United States Patent Application Publication US 2005/0244851 A1 - sequence listing, part 70

SEQ ID NO: 2722703 - DNA, 25 bp, Homo sapien
tccaaatacatagacagggagcagc

SEQ ID NO: 2722704 - DNA, 25 bp, Homo sapien
ggtttcaggccagcacagagatttg

SEQ ID NO: 2722705 - DNA, 25 bp, Homo sapien
cactatgcaaggtgctacagaccca

SEQ ID NO: 2722706 - DNA, 25 bp, Homo sapien
atgacaaggattctgcccacaaggc

SEQ ID NO: 2722707 - DNA, 25 bp, Homo sapien
taggcacagtttagcaagccatgtg

SEQ ID NO: 2722708 - DNA, 25 bp, Homo sapien
tgcagaactctctttgggagttgac

SEQ ID NO: 2722709 - DNA, 25 bp, Homo sapien
tctctttgggagttgaccttcaaaa

SEQ ID NO: 2722710 - DNA, 25 bp, Homo sapien
tcattctcggatggtaaaggcttga

SEQ ID NO: 2722711 - DNA, 25 bp, Homo sapien
tggcagcttagcttgctgtcctgga

SEQ ID NO: 2722712 - DNA, 25 bp, Homo sapien
agcttagcttgctgtcctggactgt

SEQ ID NO: 2722713 - DNA, 25 bp, Homo sapien
gcagcttagcttgctgtcctggact

SEQ ID NO: 2722714 - DNA, 25 bp, Homo sapien
cacttggcagcttagcttgctgtcc

SEQ ID NO: 2722715 - DNA, 25 bp, Homo sapien
tcaacttcttctgacagatttaact

SEQ ID NO: 2722716 - DNA, 25 bp, Homo sapien
tgctcagagctgtgggctatcacga

SEQ ID NO: 2722717 - DNA, 25 bp, Homo sapien
agctgtgggctatcacgactgtcat

SEQ ID NO: 2722718 - DNA, 25 bp, Homo sapien
tgacagatttaacttgacaccgctc

SEQ ID NO: 2722719 - DNA, 25 bp, Homo sapien
cacaggaccctcaagagaagaaatc

SEQ ID NO: 2722720 - DNA, 25 bp, Homo sapien
aaaaccaaggatgtcagcaacatag

SEQ ID NO: 2722721 - DNA, 25 bp, Homo sapien
tattgagcctctctttccggttttc

SEQ ID NO: 2722722 - DNA, 25 bp, Homo sapien
tagatcttcctttctattgagcctc

SEQ ID NO: 2722723 - DNA, 25 bp, Homo sapien
tcatagcttcctgtggtctgaggct

SEQ ID NO: 2722724 - DNA, 25 bp, Homo sapien
atctggccactactgaccgttaggg

SEQ ID NO: 2722725 - DNA, 25 bp, Homo sapien
tactgaccgttaggggctgctcagg

SEQ ID NO: 2722726 - DNA, 25 bp, Homo sapien
gctgctcaggacttacagacagatc

SEQ ID NO: 2722727 - DNA, 25 bp, Homo sapien
aggatgttagtagaattgggagata

SEQ ID NO: 2722728 - DNA, 25 bp, Homo sapien
tagaattgggagataggtttgaagt

SEQ ID NO: 2722729 - DNA, 25 bp, Homo sapien
gagaggatgttagtagaattgggag

SEQ ID NO: 2722730 - DNA, 25 bp, Homo sapien
tgttagtagaattgggagataggtt

SEQ ID NO: 2722731 - DNA, 25 bp, Homo sapien
gcaagcaatactccacagactctaa

SEQ ID NO: 2722732 - DNA, 25 bp, Homo sapien
gattctagcaagcaatactccacag

SEQ ID NO: 2722733 - DNA, 25 bp, Homo sapien
tcataagagacgtgcttctttctgg

SEQ ID NO: 2722734 - DNA, 25 bp, Homo sapien
agttgcttccaccatgagcatcatt

SEQ ID NO: 2722735 - DNA, 25 bp, Homo sapien
ctgttctccatgaaatgcttgacat

SEQ ID NO: 2722736 - DNA, 25 bp, Homo sapien
gagtctgcccctaaaccaagcatgt

SEQ ID NO: 2722737 - DNA, 25 bp, Homo sapien
ttgggcttttctcatccgatacagt

SEQ ID NO: 2722738 - DNA, 25 bp, Homo sapien
accatggctatggagtctgccccta

SEQ ID NO: 2722739 - DNA, 25 bp, Homo sapien
caaacacaagctgttagcgccctct

SEQ ID NO: 2722740 - DNA, 25 bp, Homo sapien
tccaaacacaagctgttagcgccct

SEQ ID NO: 2722741 - DNA, 25 bp, Homo sapien
caggatcccaaatgtcctgctgtca

SEQ ID NO: 2722742 - DNA, 25 bp, Homo sapien
tgctgtcaacagctaaaaatctcca

SEQ ID NO: 2722743 - DNA, 25 bp, Homo sapien
tgagcagtcacaagaaggtgatact

SEQ ID NO: 2722744 - DNA, 25 bp, Homo sapien
gagcagtcacaagaaggtgatactt

SEQ ID NO: 2722745 - DNA, 25 bp, Homo sapien
ctgagcagtcacaagaaggtgatac

SEQ ID NO: 2722746 - DNA, 25 bp, Homo sapien
ccaatgtggtctgtagccacaagca

SEQ ID NO: 2722747 - DNA, 25 bp, Homo sapien
tccatgcagatattatcaaagatac

SEQ ID NO: 2722748 - DNA, 25 bp, Homo sapien
tcatgttgaacaatatccatgcaga

SEQ ID NO: 2722749 - DNA, 25 bp, Homo sapien
atcccatgtgctcttccacagagag

SEQ ID NO: 2722750 - DNA, 25 bp, Homo sapien
gatctgtggaccacagaagtaagta

SEQ ID NO: 2722751 - DNA, 25 bp, Homo sapien
ctggggaagattgagagctgaagga

SEQ ID NO: 2722752 - DNA, 25 bp, Homo sapien
atctgtggaccacagaagtaagtaa

SEQ ID NO: 2722753 - DNA, 25 bp, Homo sapien
tggggaagattgagagctgaaggac

SEQ ID NO: 2722754 - DNA, 25 bp, Homo sapien
gatgctgctgaattgttccacgtat

SEQ ID NO: 2722755 - DNA, 25 bp, Homo sapien
tttctgctcacgtccaggaatagtc

SEQ ID NO: 2722756 - DNA, 25 bp, Homo sapien
ccaggaatagtcaatggaatgtgca

SEQ ID NO: 2722757 - DNA, 25 bp, Homo sapien
ttgttccacgtatccacaaccgtgt

SEQ ID NO: 2722758 - DNA, 25 bp, Homo sapien
gaaagctgagataaatcctcctaag

SEQ ID NO: 2722759 - DNA, 25 bp, Homo sapien
tgtattgcggaaaccctccaaaggc

SEQ ID NO: 2722760 - DNA, 25 bp, Homo sapien
taaccgctgtcagcgatggtgagga

SEQ ID NO: 2722761 - DNA, 25 bp, Homo sapien
cattgtcaaatgcaggtaaccgctg

SEQ ID NO: 2722762 - DNA, 25 bp, Homo sapien
ttcttggtgacgataaataggtcag

SEQ ID NO: 2722763 - DNA, 25 bp, Homo sapien
acgataaataggtcagctaagatgc

SEQ ID NO: 2722764 - DNA, 25 bp, Homo sapien
tcatccgatgatattcttggtgacg

SEQ ID NO: 2722765 - DNA, 25 bp, Homo sapien
catccgatgatattcttggtgacga

SEQ ID NO: 2722766 - DNA, 25 bp, Homo sapien
gaatcatgaccgttgcagtctcctt

SEQ ID NO: 2722767 - DNA, 25 bp, Homo sapien
gatacttatatccaaagttgtcccc

SEQ ID NO: 2722768 - DNA, 25 bp, Homo sapien
caaagttgtcccctgatataggaga

SEQ ID NO: 2722769 - DNA, 25 bp, Homo sapien
ccctgatataggagaatcatgaccg

SEQ ID NO: 2722770 - DNA, 25 bp, Homo sapien
caggtctttcgtgctctgtatacat

SEQ ID NO: 2722771 - DNA, 25 bp, Homo sapien
gccaatgtcatgctgatttggttac

SEQ ID NO: 2722772 - DNA, 25 bp, Homo sapien
tcaggatgtgttggctcttccaggt

SEQ ID NO: 2722773 - DNA, 25 bp, Homo sapien
ttgtagctatcataaatacgattgc

SEQ ID NO: 2722774 - DNA, 25 bp, Homo sapien
agaagttgagggctttaacctctat

SEQ ID NO: 2722775 - DNA, 25 bp, Homo sapien
gctttaacctctatccctttgctta

SEQ ID NO: 2722776 - DNA, 25 bp, Homo sapien
gaagttgagggctttaacctctatc

SEQ ID NO: 2722777 - DNA, 25 bp, Homo sapien
aatacagtttagctgatgatgtcaa

SEQ ID NO: 2722778 - DNA, 25 bp, Homo sapien
cagtttagctgatgatgtcaacatt

SEQ ID NO: 2722779 - DNA, 25 bp, Homo sapien
gtttagctgatgatgtcaacattaa

SEQ ID NO: 2722780 - DNA, 25 bp, Homo sapien
acagtttagctgatgatgtcaacat

SEQ ID NO: 2722781 - DNA, 25 bp, Homo sapien
gagctgctctaccattaatcttttg

SEQ ID NO: 2722782 - DNA, 25 bp, Homo sapien
tgaccaaatcgtggaacacagccgg

SEQ ID NO: 2722783 - DNA, 25 bp, Homo sapien
taatcttttggactaggcatgtgca

SEQ ID NO: 2722784 - DNA, 25 bp, Homo sapien
gtacccacggtcatccaagagaaag

SEQ ID NO: 2722785 - DNA, 25 bp, Homo sapien
ggatggcagccccaaaagtcccatt

SEQ ID NO: 2722786 - DNA, 25 bp, Homo sapien
aggatggcagccccaaaagtcccat

SEQ ID NO: 2722787 - DNA, 25 bp, Homo sapien
gatggcagccccaaaagtcccattc

SEQ ID NO: 2722788 - DNA, 25 bp, Homo sapien
tctgacagcataggatagggaatgg

SEQ ID NO: 2722789 - DNA, 25 bp, Homo sapien
tagggaatggcagtgcaatttgcaa

SEQ ID NO: 2722790 - DNA, 25 bp, Homo sapien
ttcaaatcttacaaggtcattgtca

SEQ ID NO: 2722791 - DNA, 25 bp, Homo sapien
ctgatggattggtgatgtttctgac

SEQ ID NO: 2722792 - DNA, 25 bp, Homo sapien
atgagaacaaatttggacaaatagg

SEQ ID NO: 2722793 - DNA, 25 bp, Homo sapien
gatttttgaggaacggtaatgcagt

SEQ ID NO: 2722794 - DNA, 25 bp, Homo sapien
gcagtggcactattgaaatctcata

SEQ ID NO: 2722795 - DNA, 25 bp, Homo sapien
tcctttagaatgcaagatttttgag

SEQ ID NO: 2722796 - DNA, 25 bp, Homo sapien
tctcatatttcagcacctgtccaga

SEQ ID NO: 2722797 - DNA, 25 bp, Homo sapien
actgattgtcctccctgatattttg

SEQ ID NO: 2722798 - DNA, 25 bp, Homo sapien
ctgccatcataataaggaatcacga

SEQ ID NO: 2722799 - DNA, 25 bp, Homo sapien
ccttattgttatcactgattgtcct

SEQ ID NO: 2722800 - DNA, 25 bp, Homo sapien
aaggaatcacgaccttattgttatc

SEQ ID NO: 2722801 - DNA, 25 bp, Homo sapien
caggtcatcgtaatacaatctgtat

SEQ ID NO: 2722802 - DNA, 25 bp, Homo sapien
ctcttgccctaaggctttcaggtca

SEQ ID NO: 2722803 - DNA, 25 bp, Homo sapien
gccctaaggctttcaggtcatcgta

SEQ ID NO: 2722804 - DNA, 25 bp, Homo sapien
gctttcaggtcatcgtaatacaatc

SEQ ID NO: 2722805 - DNA, 25 bp, Homo sapien
aatgatgaagcatcacaggaaaatg

SEQ ID NO: 2722806 - DNA, 25 bp, Homo sapien
cttgctcagattgtattctcttttc

SEQ ID NO: 2722807 - DNA, 25 bp, Homo sapien
ttcttgctcagattgtattctcttt

SEQ ID NO: 2722808 - DNA, 25 bp, Homo sapien
gaagcatcacaggaaaatggaagca

SEQ ID NO: 2722809 - DNA, 25 bp, Homo sapien
cactttagtggtaactgacagagca

SEQ ID NO: 2722810 - DNA, 25 bp, Homo sapien
ccactttagtggtaactgacagagc

SEQ ID NO: 2722811 - DNA, 25 bp, Homo sapien
taccactttagtggtaactgacaga

SEQ ID NO: 2722812 - DNA, 25 bp, Homo sapien
agtaccactttagtggtaactgaca

SEQ ID NO: 2722813 - DNA, 25 bp, Homo sapien
attcagcgttatccatatttgccaa

SEQ ID NO: 2722814 - DNA, 25 bp, Homo sapien
cattcagcgttatccatatttgcca

SEQ ID NO: 2722815 - DNA, 25 bp, Homo sapien
ggttatcatattaatgccgaactca

SEQ ID NO: 2722816 - DNA, 25 bp, Homo sapien
aactcagtgccttagtgcagccacc

SEQ ID NO: 2722817 - DNA, 25 bp, Homo sapien
gcagccaccaagcagtatagtgttc

SEQ ID NO: 2722818 - DNA, 25 bp, Homo sapien
tatcatattaatgccgaactcagtg

SEQ ID NO: 2722819 - DNA, 25 bp, Homo sapien
tgtgatcctactactaatcaacatg

SEQ ID NO: 2722820 - DNA, 25 bp, Homo sapien
caggtgtgatcctactactaatcaa

SEQ ID NO: 2722821 - DNA, 25 bp, Homo sapien
ggtgtgatcctactactaatcaaca

SEQ ID NO: 2722822 - DNA, 25 bp, Homo sapien
tgatcctactactaatcaacatggg

SEQ ID NO: 2722823 - DNA, 25 bp, Homo sapien
ggtgggctttactatagctgcagcc

SEQ ID NO: 2722824 - DNA, 25 bp, Homo sapien
gtgggctttactatagctgcagcca

SEQ ID NO: 2722825 - DNA, 25 bp, Homo sapien
gattcaggtggacccactgccacac

SEQ ID NO: 2722826 - DNA, 25 bp, Homo sapien
ggtggacccactgccacactactgt

SEQ ID NO: 2722827 - DNA, 25 bp, Homo sapien
cactactgtcataactcctaactag

SEQ ID NO: 2722828 - DNA, 25 bp, Homo sapien
gctggagtgggccagaacagattca

SEQ ID NO: 2722829 - DNA, 25 bp, Homo sapien
tagcacaagtatgtcgtaaattctg

SEQ ID NO: 2722830 - DNA, 25 bp, Homo sapien
cttcttctttagtagttgtaatgca

SEQ ID NO: 2722831 - DNA, 25 bp, Homo sapien
gttggtattggttgtttatagcaca

SEQ ID NO: 2722832 - DNA, 25 bp, Homo sapien
tcagcccttcttccgttgttgttgg

SEQ ID NO: 2722833 - DNA, 25 bp, Homo sapien
gcctccgaagattttctcatggatt

SEQ ID NO: 2722834 - DNA, 25 bp, Homo sapien
tcttgagcctccgaagattttctca

SEQ ID NO: 2722835 - DNA, 25 bp, Homo sapien
tgagcctccgaagattttctcatgg

SEQ ID NO: 2722836 - DNA, 25 bp, Homo sapien
cttctcttgagcctccgaagatttt

SEQ ID NO: 2722837 - DNA, 25 bp, Homo sapien
gcgtgctcttcccagtagctgctta

SEQ ID NO: 2722838 - DNA, 25 bp, Homo sapien
gctgcttactcagcaaaggtggaca

SEQ ID NO: 2722839 - DNA, 25 bp, Homo sapien
gagaggctaatcaagttgggattca

SEQ ID NO: 2722840 - DNA, 25 bp, Homo sapien
ttgtaacctgcctgcgtgctcttcc

SEQ ID NO: 2722841 - DNA, 25 bp, Homo sapien
tgtatgggataaatagtcgtttgaa

SEQ ID NO: 2722842 - DNA, 25 bp, Homo sapien
catttgtatgggataaatagtcgtt

SEQ ID NO: 2722843 - DNA, 25 bp, Homo sapien
ttgtatgggataaatagtcgtttga

SEQ ID NO: 2722844 - DNA, 25 bp, Homo sapien
tttgtatgggataaatagtcgtttg

SEQ ID NO: 2722845 - DNA, 25 bp, Homo sapien
ctgttaagctggcatcaaatggaac

SEQ ID NO: 2722846 - DNA, 25 bp, Homo sapien
tgttaagctggcatcaaatggaacc

SEQ ID NO: 2722847 - DNA, 25 bp, Homo sapien
tctctgttaagctggcatcaaatgg

SEQ ID NO: 2722848 - DNA, 25 bp, Homo sapien
cttctctgttaagctggcatcaaat

SEQ ID NO: 2722849 - DNA, 25 bp, Homo sapien
tggaaagcttctctgtcaagccggc

SEQ ID NO: 2722850 - DNA, 25 bp, Homo sapien
tgtcaagccggcatcaaacagaacc

SEQ ID NO: 2722851 - DNA, 25 bp, Homo sapien
tttttggaaagcttctctgtcaagc

SEQ ID NO: 2722852 - DNA, 25 bp, Homo sapien
cttctctgtcaagccggcatcaaac

SEQ ID NO: 2722853 - DNA, 25 bp, Homo sapien
gagacagcgttccagggtgaactca

SEQ ID NO: 2722854 - DNA, 25 bp, Homo sapien
taggcaaggttacagccactgaagg

SEQ ID NO: 2722855 - DNA, 25 bp, Homo sapien
ttaggcaaggttacagccactgaag

SEQ ID NO: 2722856 - DNA, 25 bp, Homo sapien
ttcagagacagcgttccagggtgaa

SEQ ID NO: 2722857 - DNA, 25 bp, Homo sapien
gcttttagtgcctcgagtgtactca

SEQ ID NO: 2722858 - DNA, 25 bp, Homo sapien
actgagctggaaggatttatcagca

SEQ ID NO: 2722859 - DNA, 25 bp, Homo sapien
ctatcatttgtccaaaaacttttag

SEQ ID NO: 2722860 - DNA, 25 bp, Homo sapien
agggttctgtcccatccatagtcaa

SEQ ID NO: 2722861 - DNA, 25 bp, Homo sapien
tgtgagtgccccaagcaatgcctac

SEQ ID NO: 2722862 - DNA, 25 bp, Homo sapien
cagaatgatgcttagcagaagagtt

SEQ ID NO: 2722863 - DNA, 25 bp, Homo sapien
agaagagttctgctccctcacgtcc

SEQ ID NO: 2722864 - DNA, 25 bp, Homo sapien
gcagccttctgtgataaggcctgag

SEQ ID NO: 2722865 - DNA, 25 bp, Homo sapien
ggcttgcatatgcctctgcagccaa

SEQ ID NO: 2722866 - DNA, 25 bp, Homo sapien
cgttcgtgcatacttgatacctgct

SEQ ID NO: 2722867 - DNA, 25 bp, Homo sapien
gcatacttgatacctgctccttttg

SEQ ID NO: 2722868 - DNA, 25 bp, Homo sapien
gctgcgttcgtgcatacttgatacc

SEQ ID NO: 2722869 - DNA, 25 bp, Homo sapien
gttttgagctgcgttcgtgcatact

SEQ ID NO: 2722870 - DNA, 25 bp, Homo sapien
tagcaggtatgtgagtacggatgaa

SEQ ID NO: 2722871 - DNA, 25 bp, Homo sapien
ctagcaggtatgtgagtacggatga

SEQ ID NO: 2722872 - DNA, 25 bp, Homo sapien
tatgtgagtacggatgaagagggtg

SEQ ID NO: 2722873 - DNA, 25 bp, Homo sapien
agtacggatgaagagggtggtcaga

SEQ ID NO: 2722874 - DNA, 25 bp, Homo sapien
gagatggtcaatcttgtctacaaca

SEQ ID NO: 2722875 - DNA, 25 bp, Homo sapien
ttccaccctgatctgtaggcaatag

SEQ ID NO: 2722876 - DNA, 25 bp, Homo sapien
gctgctccaaggtcaatagggtatt

SEQ ID NO: 2722877 - DNA, 25 bp, Homo sapien
ttgtctacaacagatctatgttggg

SEQ ID NO: 2722878 - DNA, 25 bp, Homo sapien
gagtgcctcttagcctctgaattcc

SEQ ID NO: 2722879 - DNA, 25 bp, Homo sapien
cagagctgcctgtaaatcttaacag

SEQ ID NO: 2722880 - DNA, 25 bp, Homo sapien
acatccttcttttcccgtgcacatt

SEQ ID NO: 2722881 - DNA, 25 bp, Homo sapien
tatcttgcatctggatctatgccag

SEQ ID NO: 2722882 - DNA, 25 bp, Homo sapien
agaacctaatctgtatccagaatcc

SEQ ID NO: 2722883 - DNA, 25 bp, Homo sapien
ctgggaaatccagctcttaagcttc

SEQ ID NO: 2722884 - DNA, 25 bp, Homo sapien
ccagctcttaagcttctagtctttg

SEQ ID NO: 2722885 - DNA, 25 bp, Homo sapien
gaatcctgtccataaaggagcctgg

SEQ ID NO: 2722886 - DNA, 25 bp, Homo sapien
gaagagaaatatgcttcggccacct

SEQ ID NO: 2722887 - DNA, 25 bp, Homo sapien
tcggccaccttctgtcttacaaact

SEQ ID NO: 2722888 - DNA, 25 bp, Homo sapien
aacgactgcttgtcactgccagagg

SEQ ID NO: 2722889 - DNA, 25 bp, Homo sapien
ctcaaggagagaaggtcaaacgact

SEQ ID NO: 2722890 - DNA, 25 bp, Homo sapien
tcacatctgaatccagtcctactga

SEQ ID NO: 2722891 - DNA, 25 bp, Homo sapien
aatctgaaatatgaagcacccaagg

SEQ ID NO: 2722892 - DNA, 25 bp, Homo sapien
ttccaaaatctggttgccacatatt

SEQ ID NO: 2722893 - DNA, 25 bp, Homo sapien
tatgccttgaagcagtatttccaaa

SEQ ID NO: 2722894 - DNA, 25 bp, Homo sapien
tcctgcctttttgcacttcgcatgc

SEQ ID NO: 2722895 - DNA, 25 bp, Homo sapien
ggaacacctgaactccaatgttgaa

SEQ ID NO: 2722896 - DNA, 25 bp, Homo sapien
agaacacgtcagttgctttcctgcc

SEQ ID NO: 2722897 - DNA, 25 bp, Homo sapien
gttgaattgtttgacttttccagaa

SEQ ID NO: 2722898 - DNA, 25 bp, Homo sapien
tcctcattactctgtagtccccacc

SEQ ID NO: 2722899 - DNA, 25 bp, Homo sapien
ctcctcattactctgtagtccccac

SEQ ID NO: 2722900 - DNA, 25 bp, Homo sapien
aagaggcacaccgatgcacaaagac

SEQ ID NO: 2722901 - DNA, 25 bp, Homo sapien
tgaaagaggcacaccgatgcacaaa

SEQ ID NO: 2722902 - DNA, 25 bp, Homo sapien
aggcacaccgatgcacaaagacaag

SEQ ID NO: 2722903 - DNA, 25 bp, Homo sapien
tgcacaaagacaagtagaattcatc

SEQ ID NO: 2722904 - DNA, 25 bp, Homo sapien
aaagaagctctttgagctctaatac

SEQ ID NO: 2722905 - DNA, 25 bp, Homo sapien
aaaagaagctctttgagctctaata

SEQ ID NO: 2722906 - DNA, 25 bp, Homo sapien
aagaagctctttgagctctaatacc

SEQ ID NO: 2722907 - DNA, 25 bp, Homo sapien
aatgctgactgggttgagatgccga

SEQ ID NO: 2722908 - DNA, 25 bp, Homo sapien
cgctagagcttcagtgagggagcta

SEQ ID NO: 2722909 - DNA, 25 bp, Homo sapien
cctcaggtatgcgaaatgaatgctg

SEQ ID NO: 2722910 - DNA, 25 bp, Homo sapien
tgagatgccgagtcatgttagacag

SEQ ID NO: 2722911 - DNA, 25 bp, Homo sapien
tgatttatcatgttgatccaggaat

SEQ ID NO: 2722912 - DNA, 25 bp, Homo sapien
ctgatttatcatgttgatccaggaa

SEQ ID NO: 2722913 - DNA, 25 bp, Homo sapien
gatttatcatgttgatccaggaatt

SEQ ID NO: 2722914 - DNA, 25 bp, Homo sapien
tcatcagggagtgcatagatagcac

SEQ ID NO: 2722915 - DNA, 25 bp, Homo sapien
cagggagtgcatagatagcacaatc

SEQ ID NO: 2722916 - DNA, 25 bp, Homo sapien
tgtgttcatcagggagtgcatagat

SEQ ID NO: 2722917 - DNA, 25 bp, Homo sapien
gagtgcatagatagcacaatcatgt

SEQ ID NO: 2722918 - DNA, 25 bp, Homo sapien
ggccagtggcctatctctcaaaaca

SEQ ID NO: 2722919 - DNA, 25 bp, Homo sapien
ttaaaccagactgtagggccctggc

SEQ ID NO: 2722920 - DNA, 25 bp, Homo sapien
tgaggctacctgacctgacaaaact

SEQ ID NO: 2722921 - DNA, 25 bp, Homo sapien
ggccctgttaacacaagaagcagat

SEQ ID NO: 2722922 - DNA, 25 bp, Homo sapien
tttggcatctgaggaaatttcacac

SEQ ID NO: 2722923 - DNA, 25 bp, Homo sapien
attttggcatctgaggaaatttcac

SEQ ID NO: 2722924 - DNA, 25 bp, Homo sapien
ttggcatctgaggaaatttcacacc

SEQ ID NO: 2722925 - DNA, 25 bp, Homo sapien
ttttggcatctgaggaaatttcaca

SEQ ID NO: 2722926 - DNA, 25 bp, Homo sapien
caaatcctactgctgaagtcatgct

SEQ ID NO: 2722927 - DNA, 25 bp, Homo sapien
catgcttccattattatgctccctg

SEQ ID NO: 2722928 - DNA, 25 bp, Homo sapien
gagctgtgtttaacggacagtcctc

SEQ ID NO: 2722929 - DNA, 25 bp, Homo sapien
tcagataacctaatggcgagaattc

SEQ ID NO: 2722930 - DNA, 25 bp, Homo sapien
tactactagactggttgagttacct

SEQ ID NO: 2722931 - DNA, 25 bp, Homo sapien
taccttttagcatgtccttcagaca

SEQ ID NO: 2722932 - DNA, 25 bp, Homo sapien
tccttcagacatgtgtctagcacac

SEQ ID NO: 2722933 - DNA, 25 bp, Homo sapien
gaaggtttttgatgagctaagagtt

SEQ ID NO: 2722934 - DNA, 25 bp, Homo sapien
gatggtactcaatatctgggccatt

SEQ ID NO: 2722935 - DNA, 25 bp, Homo sapien
ctcacatctgactttacctatgatg

SEQ ID NO: 2722936 - DNA, 25 bp, Homo sapien
tcctgagttcagatggtactcaata

SEQ ID NO: 2722937 - DNA, 25 bp, Homo sapien
atctgactttacctatgatgtctcc

SEQ ID NO: 2722938 - DNA, 25 bp, Homo sapien
ccaggtctccgagtctcttgtcgtt

SEQ ID NO: 2722939 - DNA, 25 bp, Homo sapien
tggcaccatgtgaactctccttttc

SEQ ID NO: 2722940 - DNA, 25 bp, Homo sapien
aggtctccgagtctcttgtcgtttg

SEQ ID NO: 2722941 - DNA, 25 bp, Homo sapien
acagaaggagtccaggtctccgagt

SEQ ID NO: 2722942 - DNA, 25 bp, Homo sapien
tatgtaacccatcgtgtttgcaaaa

SEQ ID NO: 2722943 - DNA, 25 bp, Homo sapien
gctgtgcaggagtggaaaatttatc

SEQ ID NO: 2722944 - DNA, 25 bp, Homo sapien
gcactgcagttttttaggagggaat

SEQ ID NO: 2722945 - DNA, 25 bp, Homo sapien
aataaaatctgctgtgcaggagtgg

SEQ ID NO: 2722946 - DNA, 25 bp, Homo sapien
gagccatggaattggactttcatgg

SEQ ID NO: 2722947 - DNA, 25 bp, Homo sapien
agccatggaattggactttcatggc

SEQ ID NO: 2722948 - DNA, 25 bp, Homo sapien
aggaaaatgtggcaaactagagcca

SEQ ID NO: 2722949 - DNA, 25 bp, Homo sapien
gatgaggacatttggcttgggggct

SEQ ID NO: 2722950 - DNA, 25 bp, Homo sapien
aggacatttggcttgggggctgaga

SEQ ID NO: 2722951 - DNA, 25 bp, Homo sapien
acatttggcttgggggctgagaagg

SEQ ID NO: 2722952 - DNA, 25 bp, Homo sapien
ggacatttggcttgggggctgagaa

SEQ ID NO: 2722953 - DNA, 25 bp, Homo sapien
caccccgcttggtcttggagacgga

SEQ ID NO: 2722954 - DNA, 25 bp, Homo sapien
caaatccagactggtgagttccggg

SEQ ID NO: 2722955 - DNA, 25 bp, Homo sapien
gagcgcccactgaacttgtctctga

SEQ ID NO: 2722956 - DNA, 25 bp, Homo sapien
tgtcttaggcagatcaaatgcttct

SEQ ID NO: 2722957 - DNA, 25 bp, Homo sapien
gtggagccgcccacttcaaggggcc

SEQ ID NO: 2722958 - DNA, 25 bp, Homo sapien
ggctgcggtggagccgcccacttca

SEQ ID NO: 2722959 - DNA, 25 bp, Homo sapien
ggtggagccgcccacttcaaggggc

SEQ ID NO: 2722960 - DNA, 25 bp, Homo sapien
tgcggtggagccgcccacttcaagg

SEQ ID NO: 2722961 - DNA, 25 bp, Homo sapien
gaaactgccaatggagtgctcaact

SEQ ID NO: 2722962 - DNA, 25 bp, Homo sapien
gtgctcaactccagaagcctgaaac

SEQ ID NO: 2722963 - DNA, 25 bp, Homo sapien
ggcttggcaaggtgccttgcgcccc

SEQ ID NO: 2722964 - DNA, 25 bp, Homo sapien
tgaaacctaggtcggcttggcaagg

SEQ ID NO: 2722965 - DNA, 25 bp, Homo sapien
tccttttctgggatagggcatctga

SEQ ID NO: 2722966 - DNA, 25 bp, Homo sapien
tttcagactgtaggggtagcaggca

SEQ ID NO: 2722967 - DNA, 25 bp, Homo sapien
gggcacagattgtcagacctgaaac

SEQ ID NO: 2722968 - DNA, 25 bp, Homo sapien
tacaaataagggcaaatgaccaggg

SEQ ID NO: 2722969 - DNA, 25 bp, Homo sapien
gatgaatccaaatcccatgcgcaca

SEQ ID NO: 2722970 - DNA, 25 bp, Homo sapien
gcttccctctcggtttatcatggag

SEQ ID NO: 2722971 - DNA, 25 bp, Homo sapien
cagttccgcgcaaaacctgggattc

SEQ ID NO: 2722972 - DNA, 25 bp, Homo sapien
tgcgcacattgaaccacttacagtg

SEQ ID NO: 2722973 - DNA, 25 bp, Homo sapien
tgacataggagctttcatataattt

SEQ ID NO: 2722974 - DNA, 25 bp, Homo sapien
ttttatcaaaaggatcatgccaaaa

SEQ ID NO: 2722975 - DNA, 25 bp, Homo sapien
gagggattcgaatatcaaagggtaa

SEQ ID NO: 2722976 - DNA, 25 bp, Homo sapien
caaaaggatcatgccaaaagcaaaa

SEQ ID NO: 2722977 - DNA, 25 bp, Homo sapien
ggtacttttgtgtgtagccttgtcc

SEQ ID NO: 2722978 - DNA, 25 bp, Homo sapien
tgctttctgatccttcctgtaactg

SEQ ID NO: 2722979 - DNA, 25 bp, Homo sapien
tgtccaactatgataagggccaagg

SEQ ID NO: 2722980 - DNA, 25 bp, Homo sapien
tcaggctccctaataaatgtctggt

SEQ ID NO: 2722981 - DNA, 25 bp, Homo sapien
ccaaggcaatgccacagaacaaaac

SEQ ID NO: 2722982 - DNA, 25 bp, Homo sapien
caaggcaatgccacagaacaaaact

SEQ ID NO: 2722983 - DNA, 25 bp, Homo sapien
ggccgcgcctgccctaacgaggaat

SEQ ID NO: 2722984 - DNA, 25 bp, Homo sapien
tcagggtcagctcggagccgaaggg

SEQ ID NO: 2722985 - DNA, 25 bp, Homo sapien
gccgagacaactcggccctgatcag

SEQ ID NO: 2722986 - DNA, 25 bp, Homo sapien
ggcagcgccgccgagacaactcggc

SEQ ID NO: 2722987 - DNA, 25 bp, Homo sapien
tcgtaggcaagaggagagaggcccg

SEQ ID NO: 2722988 - DNA, 25 bp, Homo sapien
gactcgtaggcaagaggagagaggc

SEQ ID NO: 2722989 - DNA, 25 bp, Homo sapien
gggactcgtaggcaagaggagagag

SEQ ID NO: 2722990 - DNA, 25 bp, Homo sapien
acgaggagaggggactcgtaggcaa

SEQ ID NO: 2722991 - DNA, 25 bp, Homo sapien
ctcaccccacgatatcagatccgag

SEQ ID NO: 2722992 - DNA, 25 bp, Homo sapien
tcaccccacgatatcagatccgaga

SEQ ID NO: 2722993 - DNA, 25 bp, Homo sapien
caccccacgatatcagatccgagag

SEQ ID NO: 2722994 - DNA, 25 bp, Homo sapien
ccccacgatatcagatccgagaggc

SEQ ID NO: 2722995 - DNA, 25 bp, Homo sapien
ttgacagagactgcagctcctcagc

SEQ ID NO: 2722996 - DNA, 25 bp, Homo sapien
cagagactgcagctcctcagcggta

SEQ ID NO: 2722997 - DNA, 25 bp, Homo sapien
agactgcagctcctcagcggtaacc

SEQ ID NO: 2722998 - DNA, 25 bp, Homo sapien
cttgacagagactgcagctcctcag

SEQ ID NO: 2722999 - DNA, 25 bp, Homo sapien
ccagcaaggagtgtaagagtagtcc

SEQ ID NO: 2723000 - DNA, 25 bp, Homo sapien
gcactgggccaagaaatgatttata

SEQ ID NO: 2723001 - DNA, 25 bp, Homo sapien
cctaaattgagttcctagagggaag

SEQ ID NO: 2723002 - DNA, 25 bp, Homo sapien
caatgcggctagtgcatctaagtca

SEQ ID NO: 2723003 - DNA, 25 bp, Homo sapien
tttctgagagtcagttgttgtcagt

SEQ ID NO: 2723004 - DNA, 25 bp, Homo sapien
ctgagagtcagttgttgtcagtacc

SEQ ID NO: 2723005 - DNA, 25 bp, Homo sapien
tagactcctgttccaacagggcatt

SEQ ID NO: 2723006 - DNA, 25 bp, Homo sapien
tttggctgacatctagactcctgtt

SEQ ID NO: 2723007 - DNA, 25 bp, Homo sapien
ggccattatcgtgtgcagactcaat

SEQ ID NO: 2723008 - DNA, 25 bp, Homo sapien
tctgaggccattatcgtgtgcagac

SEQ ID NO: 2723009 - DNA, 25 bp, Homo sapien
ttatcgtgtgcagactcaattagtc

SEQ ID NO: 2723010 - DNA, 25 bp, Homo sapien
gaggccattatcgtgtgcagactca

SEQ ID NO: 2723011 - DNA, 25 bp, Homo sapien
tcaaagtcccttagtcttgcagtca

SEQ ID NO: 2723012 - DNA, 25 bp, Homo sapien
caaagtcccttagtcttgcagtcat

SEQ ID NO: 2723013 - DNA, 25 bp, Homo sapien
aggaatctgtccagtaaattcacag

SEQ ID NO: 2723014 - DNA, 25 bp, Homo sapien
acaaaaccagtaagcccatgactct

SEQ ID NO: 2723015 - DNA, 25 bp, Homo sapien
accagtaagcccatgactctacctt

SEQ ID NO: 2723016 - DNA, 25 bp, Homo sapien
aaacaaaaccagtaagcccatgact

SEQ ID NO: 2723017 - DNA, 25 bp, Homo sapien
cagtaagcccatgactctaccttat

SEQ ID NO: 2723018 - DNA, 25 bp, Homo sapien
attgattttacagccaaataaaagc

SEQ ID NO: 2723019 - DNA, 25 bp, Homo sapien
ctgaaaccgtaaacctatattgact

SEQ ID NO: 2723020 - DNA, 25 bp, Homo sapien
gcagctcagtccaacacacccaagg

SEQ ID NO: 2723021 - DNA, 25 bp, Homo sapien
tcggatcaagtcagttgccaatggg

SEQ ID NO: 2723022 - DNA, 25 bp, Homo sapien
tgaataatacagttgcagaaattga

SEQ ID NO: 2723023 - DNA, 25 bp, Homo sapien
gtgaataatacagttgcagaaattg

SEQ ID NO: 2723024 - DNA, 25 bp, Homo sapien
tatccatacaataccattctgattt

SEQ ID NO: 2723025 - DNA, 25 bp, Homo sapien
atacaataccattctgatttccaaa

SEQ ID NO: 2723026 - DNA, 25 bp, Homo sapien
atccatacaataccattctgatttc

SEQ ID NO: 2723027 - DNA, 25 bp, Homo sapien
agtctttcaaaattaatgctatttc

SEQ ID NO: 2723028 - DNA, 25 bp, Homo sapien
ctagtctttcaaaattaatgctatt

SEQ ID NO: 2723029 - DNA, 25 bp, Homo sapien
gtctttcaaaattaatgctatttct

SEQ ID NO: 2723030 - DNA, 25 bp, Homo sapien
tctttcaaaattaatgctatttctc

SEQ ID NO: 2723031 - DNA, 25 bp, Homo sapien
tagaaaatatgatcctgcaatgaca

SEQ ID NO: 2723032 - DNA, 25 bp, Homo sapien
aaatatgatcctgcaatgacatgcc

SEQ ID NO: 2723033 - DNA, 25 bp, Homo sapien
tttagaaaatatgatcctgcaatga

SEQ ID NO: 2723034 - DNA, 25 bp, Homo sapien
tatgatcctgcaatgacatgccttc

SEQ ID NO: 2723035 - DNA, 25 bp, Homo sapien
ttctgttaactctacacacttctgt

SEQ ID NO: 2723036 - DNA, 25 bp, Homo sapien
aatgcaatgatagacaatgccaaca

SEQ ID NO: 2723037 - DNA, 25 bp, Homo sapien
tgtgcttggatctctaatgcaatga

SEQ ID NO: 2723038 - DNA, 25 bp, Homo sapien
ctacacacttctgtgcttggatctc

SEQ ID NO: 2723039 - DNA, 25 bp, Homo sapien
cagctgttaataggatttaggctat

SEQ ID NO: 2723040 - DNA, 25 bp, Homo sapien
taataggatttaggctatgtccttc

SEQ ID NO: 2723041 - DNA, 25 bp, Homo sapien
tgttaataggatttaggctatgtcc

SEQ ID NO: 2723042 - DNA, 25 bp, Homo sapien
gctgttaataggatttaggctatgt

SEQ ID NO: 2723043 - DNA, 25 bp, Homo sapien
catttgaggatagctacttaagttt

SEQ ID NO: 2723044 - DNA, 25 bp, Homo sapien
aaacatttgaggatagctacttaag

SEQ ID NO: 2723045 - DNA, 25 bp, Homo sapien
ggatagctacttaagtttcaaataa

SEQ ID NO: 2723046 - DNA, 25 bp, Homo sapien
ttaaaaacatttgaggatagctact

SEQ ID NO: 2723047 - DNA, 25 bp, Homo sapien
ggtttggaacacttatttgatgaat

SEQ ID NO: 2723048 - DNA, 25 bp, Homo sapien
tttggatacaagctcttgccagaag

SEQ ID NO: 2723049 - DNA, 25 bp, Homo sapien
catttggtttggaacacttatttga

SEQ ID NO: 2723050 - DNA, 25 bp, Homo sapien
ttaaacatttggatacaagctcttg

SEQ ID NO: 2723051 - DNA, 25 bp, Homo sapien
aattgttggaaggtgagttattctg

SEQ ID NO: 2723052 - DNA, 25 bp, Homo sapien
ggaaggtgagttattctgtagtagc

SEQ ID NO: 2723053 - DNA, 25 bp, Homo sapien
gttattctgtagtagctatgcttca

SEQ ID NO: 2723054 - DNA, 25 bp, Homo sapien
tgtagtagctatgcttcaattgccg

SEQ ID NO: 2723055 - DNA, 25 bp, Homo sapien
aaatggctaacgtatgtatcagagg

SEQ ID NO: 2723056 - DNA, 25 bp, Homo sapien
catacttggttcagacttttggtgc

SEQ ID NO: 2723057 - DNA, 25 bp, Homo sapien
ttttagtgctacaaggaggatgctg

SEQ ID NO: 2723058 - DNA, 25 bp, Homo sapien
tatctggagaataataacggaccaa

SEQ ID NO: 2723059 - DNA, 25 bp, Homo sapien
agtatagtgttgacacactctggca

SEQ ID NO: 2723060 - DNA, 25 bp, Homo sapien
tccagctgctatagcaatgataggt

SEQ ID NO: 2723061 - DNA, 25 bp, Homo sapien
catatgcagaaagcaagtttacatt

SEQ ID NO: 2723062 - DNA, 25 bp, Homo sapien
gcatataactactttgcagtagtcc

SEQ ID NO: 2723063 - DNA, 25 bp, Homo sapien
cagaagccagtctgcctaaatacta

SEQ ID NO: 2723064 - DNA, 25 bp, Homo sapien
taatattcataatcacatgtagatg

SEQ ID NO: 2723065 - DNA, 25 bp, Homo sapien
cagtctgcctaaatactactaagaa

SEQ ID NO: 2723066 - DNA, 25 bp, Homo sapien
cataatcacatgtagatgtattaaa

SEQ ID NO: 2723067 - DNA, 25 bp, Homo sapien
atggaatccatagaacaaggttgtg

SEQ ID NO: 2723068 - DNA, 25 bp, Homo sapien
aatccatagaacaaggttgtggaga

SEQ ID NO: 2723069 - DNA, 25 bp, Homo sapien
tggaatccatagaacaaggttgtgg

SEQ ID NO: 2723070 - DNA, 25 bp, Homo sapien
aaggttgtggagaaaggcttcagag

SEQ ID NO: 2723071 - DNA, 25 bp, Homo sapien
gaccatcatgcttatctcgtgatgt

SEQ ID NO: 2723072 - DNA, 25 bp, Homo sapien
tattaggcagttttcccaagtctga

SEQ ID NO: 2723073 - DNA, 25 bp, Homo sapien
cgtgatgttttgaggcttcatagct

SEQ ID NO: 2723074 - DNA, 25 bp, Homo sapien
tccactacagcataatattaggcag

SEQ ID NO: 2723075 - DNA, 25 bp, Homo sapien
gtgtgactcctccaatagcattttc

SEQ ID NO: 2723076 - DNA, 25 bp, Homo sapien
gaatatgccaaactttataggtctg

SEQ ID NO: 2723077 - DNA, 25 bp, Homo sapien
taatgacagtgattgaagctgtggg

SEQ ID NO: 2723078 - DNA, 25 bp, Homo sapien
tatactgcctagaatgttaaccctt

SEQ ID NO: 2723079 - DNA, 25 bp, Homo sapien
cttagtgtgggaaagcaagttttcg

SEQ ID NO: 2723080 - DNA, 25 bp, Homo sapien
tcgtagatacaaatgtcacctgttt

SEQ ID NO: 2723081 - DNA, 25 bp, Homo sapien
gattcagtttgaggcagtaggttct

SEQ ID NO: 2723082 - DNA, 25 bp, Homo sapien
ggaaagcaagttttcgaagtgataa

SEQ ID NO: 2723083 - DNA, 25 bp, Homo sapien
cattgtgtactgatccataacgtga

SEQ ID NO: 2723084 - DNA, 25 bp, Homo sapien
catcatggatagactcaggctatac

SEQ ID NO: 2723085 - DNA, 25 bp, Homo sapien
ggaggatcctaaacactacttcagc

SEQ ID NO: 2723086 - DNA, 25 bp, Homo sapien
tacattcactaactgccatggagga

SEQ ID NO: 2723087 - DNA, 25 bp, Homo sapien
caaaacaaagtgtcagctaatagtc

SEQ ID NO: 2723088 - DNA, 25 bp, Homo sapien
aaaacaaagtgtcagctaatagtca

SEQ ID NO: 2723089 - DNA, 25 bp, Homo sapien
aaacaaagtgtcagctaatagtcat

SEQ ID NO: 2723090 - DNA, 25 bp, Homo sapien
acaaaacaaagtgtcagctaatagt

SEQ ID NO: 2723091 - DNA, 25 bp, Homo sapien
ggctggcacaaaacttcaagtgggc

SEQ ID NO: 2723092 - DNA, 25 bp, Homo sapien
catggtggttacctggcattagcaa

SEQ ID NO: 2723093 - DNA, 25 bp, Homo sapien
tccaagtaccaggtatagaccaggg

SEQ ID NO: 2723094 - DNA, 25 bp, Homo sapien
gcaggctaacataacacatggtggt

SEQ ID NO: 2723095 - DNA, 25 bp, Homo sapien
taagacttccctgtagtatcatgag

SEQ ID NO: 2723096 - DNA, 25 bp, Homo sapien
tgcgctcggccttaaaaattggctt

SEQ ID NO: 2723097 - DNA, 25 bp, Homo sapien
catggctgcattccaagcacggtga

SEQ ID NO: 2723098 - DNA, 25 bp, Homo sapien
taaatgaagatttgtccagtcctcc

SEQ ID NO: 2723099 - DNA, 25 bp, Homo sapien
agtcttaaaactgggcagcatgatt

SEQ ID NO: 2723100 - DNA, 25 bp, Homo sapien
aaatcgtctgttgaaaaactctcca

SEQ ID NO: 2723101 - DNA, 25 bp, Homo sapien
ggactttattccatcgatctatgtg

SEQ ID NO: 2723102 - DNA, 25 bp, Homo sapien
taccagattgccttgattatcacag

SEQ ID NO: 2723103 - DNA, 25 bp, Homo sapien
ccagcagtgtatgcaggttccattt

SEQ ID NO: 2723104 - DNA, 25 bp, Homo sapien
taagaggttcatctatattcgagca

SEQ ID NO: 2723105 - DNA, 25 bp, Homo sapien
caccctttggctgtcctgactaaag

SEQ ID NO: 2723106 - DNA, 25 bp, Homo sapien
gaaccttaaccccaggtcatgagga

SEQ ID NO: 2723107 - DNA, 25 bp, Homo sapien
aagaggatccagtcagaatcatgcc

SEQ ID NO: 2723108 - DNA, 25 bp, Homo sapien
tagaagtccattctgggtggcctct

SEQ ID NO: 2723109 - DNA, 25 bp, Homo sapien
tatgggctagttttgtagaacaccc

SEQ ID NO: 2723110 - DNA, 25 bp, Homo sapien
tgattaaggtagtgtctgccagact

SEQ ID NO: 2723111 - DNA, 25 bp, Homo sapien
ggtcactaattgtatatcagtggca

SEQ ID NO: 2723112 - DNA, 25 bp, Homo sapien
ggcagaaagcaaagtaaggtcacta

SEQ ID NO: 2723113 - DNA, 25 bp, Homo sapien
tgatcatggtaattaggtgagtcct

SEQ ID NO: 2723114 - DNA, 25 bp, Homo sapien
tgagggattactttatgtcaagaag

SEQ ID NO: 2723115 - DNA, 25 bp, Homo sapien
aaatgcggatgcctacagttaacag

SEQ ID NO: 2723116 - DNA, 25 bp, Homo sapien
cagttaacagattgcaaaatgtatc

SEQ ID NO: 2723117 - DNA, 25 bp, Homo sapien
tagatcatgtgaaatgaagggtgcc

SEQ ID NO: 2723118 - DNA, 25 bp, Homo sapien
actgtgggaactattctatggatat

SEQ ID NO: 2723119 - DNA, 25 bp, Homo sapien
acaacattttgccgggtgcggtagc

SEQ ID NO: 2723120 - DNA, 25 bp, Homo sapien
tcatgcctgtaatcctggcactttg

SEQ ID NO: 2723121 - DNA, 25 bp, Homo sapien
aggcgggcggatcacaaggtcagga

SEQ ID NO: 2723122 - DNA, 25 bp, Homo sapien
cctggcactttggaaggcctaggcg

SEQ ID NO: 2723123 - DNA, 25 bp, Homo sapien
gaggttaagctcctgtacggaagcg

SEQ ID NO: 2723124 - DNA, 25 bp, Homo sapien
tgaacgactgttgggtgtcccgacg

SEQ ID NO: 2723125 - DNA, 25 bp, Homo sapien
caggtttgggtctggtcagagcccc

SEQ ID NO: 2723126 - DNA, 25 bp, Homo sapien
tcttccgtgcactgaagacaggcag

SEQ ID NO: 2723127 - DNA, 25 bp, Homo sapien
ccagtggtaccagaccttggaggag

SEQ ID NO: 2723128 - DNA, 25 bp, Homo sapien
tcattgaagttcaggtgccgccagg

SEQ ID NO: 2723129 - DNA, 25 bp, Homo sapien
tagcctaagcgtgggattccgcgcg

SEQ ID NO: 2723130 - DNA, 25 bp, Homo sapien
gactggattatgtcggccccgtttg

SEQ ID NO: 2723131 - DNA, 25 bp, Homo sapien
acggtgtagtgagttccggcttcac

SEQ ID NO: 2723132 - DNA, 25 bp, Homo sapien
gacggtgtagtgagttccggcttca

SEQ ID NO: 2723133 - DNA, 25 bp, Homo sapien
ggacggtgtagtgagttccggcttc

SEQ ID NO: 2723134 - DNA, 25 bp, Homo sapien
ctccggagacgttagaaagtgcatt

SEQ ID NO: 2723135 - DNA, 25 bp, Homo sapien
cacaggaacacgaagaaagaatgct

SEQ ID NO: 2723136 - DNA, 25 bp, Homo sapien
aatgctgggttctgattgcgtccaa

SEQ ID NO: 2723137 - DNA, 25 bp, Homo sapien
tgcgtccaattagctggcctgcgag

SEQ ID NO: 2723138 - DNA, 25 bp, Homo sapien
gctgccatccaataggagaccgtta

SEQ ID NO: 2723139 - DNA, 25 bp, Homo sapien
cgacaactgaatgcggattatcact

SEQ ID NO: 2723140 - DNA, 25 bp, Homo sapien
gaaggtgactggcactcctcgacaa

SEQ ID NO: 2723141 - DNA, 25 bp, Homo sapien
gcactcctcgacaactgaatgcgga

SEQ ID NO: 2723142 - DNA, 25 bp, Homo sapien
tgactggcactcctcgacaactgaa

SEQ ID NO: 2723143 - DNA, 25 bp, Homo sapien
cattgaatcgtttcaagggcgcctt

SEQ ID NO: 2723144 - DNA, 25 bp, Homo sapien
cagaagggtcattgaatcgtttcaa

SEQ ID NO: 2723145 - DNA, 25 bp, Homo sapien
gggtcattgaatcgtttcaagggcg

SEQ ID NO: 2723146 - DNA, 25 bp, Homo sapien
gaatcgtttcaagggcgccttagga

SEQ ID NO: 2723147 - DNA, 25 bp, Homo sapien
tcaagtagctaccaacgtctcgggt

SEQ ID NO: 2723148 - DNA, 25 bp, Homo sapien
aagatctagtagcacagtcccagca

SEQ ID NO: 2723149 - DNA, 25 bp, Homo sapien
gactgtttcactgcggtatccttag

SEQ ID NO: 2723150 - DNA, 25 bp, Homo sapien
gaggccctctcggacttgaaaatca

SEQ ID NO: 2723151 - DNA, 25 bp, Homo sapien
ggatactggtcctttcaatacttct

SEQ ID NO: 2723152 - DNA, 25 bp, Homo sapien
tctgaaaggatactggtcctttcaa

SEQ ID NO: 2723153 - DNA, 25 bp, Homo sapien
tttctgaaaggatactggtcctttc

SEQ ID NO: 2723154 - DNA, 25 bp, Homo sapien
gaaaggatactggtcctttcaatac

SEQ ID NO: 2723155 - DNA, 25 bp, Homo sapien
tgcggaaaaatgaattgtacagatc

SEQ ID NO: 2723156 - DNA, 25 bp, Homo sapien
gcggaaaaatgaattgtacagatca

SEQ ID NO: 2723157 - DNA, 25 bp, Homo sapien
cggaaaaatgaattgtacagatcat

SEQ ID NO: 2723158 - DNA, 25 bp, Homo sapien
ctgcggaaaaatgaattgtacagat

SEQ ID NO: 2723159 - DNA, 25 bp, Homo sapien
tttctagctgaagcaggcaaggtag

SEQ ID NO: 2723160 - DNA, 25 bp, Homo sapien
ctgaagcaggcaaggtagtatcttt

SEQ ID NO: 2723161 - DNA, 25 bp, Homo sapien
tccgaagacttaacttttctagctg

SEQ ID NO: 2723162 - DNA, 25 bp, Homo sapien
tgattccgaagacttaacttttcta

SEQ ID NO: 2723163 - DNA, 25 bp, Homo sapien
tagtagctcttgcacaagccacaag

SEQ ID NO: 2723164 - DNA, 25 bp, Homo sapien
tcaccactccttaacagtttctcag

SEQ ID NO: 2723165 - DNA, 25 bp, Homo sapien
ttctcagtagcaaacctctcttaga

SEQ ID NO: 2723166 - DNA, 25 bp, Homo sapien
aaaagtactatgcagcttgcctgtt

SEQ ID NO: 2723167 - DNA, 25 bp, Homo sapien
ctctttctctaatatcttcaaatct

SEQ ID NO: 2723168 - DNA, 25 bp, Homo sapien
ctttctctaatatcttcaaatcttt

SEQ ID NO: 2723169 - DNA, 25 bp, Homo sapien
tctctaatatcttcaaatctttatc

SEQ ID NO: 2723170 - DNA, 25 bp, Homo sapien
taatatcttcaaatctttatcattc

SEQ ID NO: 2723171 - DNA, 25 bp, Homo sapien
gcatttagccttgcttccatctttt

SEQ ID NO: 2723172 - DNA, 25 bp, Homo sapien
ttttcccttagtgcagcatttagcc

SEQ ID NO: 2723173 - DNA, 25 bp, Homo sapien
tagtcctggtcaattcaataagttg

SEQ ID NO: 2723174 - DNA, 25 bp, Homo sapien
cagatcctggatccgcctgtcctgg

SEQ ID NO: 2723175 - DNA, 25 bp, Homo sapien
tgtaaatattatcatgaggctcaga

SEQ ID NO: 2723176 - DNA, 25 bp, Homo sapien
taaatattatcatgaggctcagata

SEQ ID NO: 2723177 - DNA, 25 bp, Homo sapien
gtaaatattatcatgaggctcagat

SEQ ID NO: 2723178 - DNA, 25 bp, Homo sapien
aaatattatcatgaggctcagatac

SEQ ID NO: 2723179 - DNA, 25 bp, Homo sapien
aagagatcaagtctcgctccgctgt

SEQ ID NO: 2723180 - DNA, 25 bp, Homo sapien
ccactgtaccagtctactgttctta

SEQ ID NO: 2723181 - DNA, 25 bp, Homo sapien
ttttccttaatgtgacttgctggtt

SEQ ID NO: 2723182 - DNA, 25 bp, Homo sapien
atcaagtctcgctccgctgtccagg

SEQ ID NO: 2723183 - DNA, 25 bp, Homo sapien
caaattcttctggttaccattttca

SEQ ID NO: 2723184 - DNA, 25 bp, Homo sapien
aattctcaaattcttctggttacca

SEQ ID NO: 2723185 - DNA, 25 bp, Homo sapien
ctcaaattcttctggttaccatttt

SEQ ID NO: 2723186 - DNA, 25 bp, Homo sapien
ttctcaaattcttctggttaccatt

SEQ ID NO: 2723187 - DNA, 25 bp, Homo sapien
tgccttcttgcttagccatcatacc

SEQ ID NO: 2723188 - DNA, 25 bp, Homo sapien
gactcttcgagactcctttgggtga

SEQ ID NO: 2723189 - DNA, 25 bp, Homo sapien
ccttgagactcttcgagactccttt

SEQ ID NO: 2723190 - DNA, 25 bp, Homo sapien
attttcccttgagactcttcgagac

SEQ ID NO: 2723191 - DNA, 25 bp, Homo sapien
gatgtattccaagagtttttctgtt

SEQ ID NO: 2723192 - DNA, 25 bp, Homo sapien
cttcgatgtattccaagagtttttc

SEQ ID NO: 2723193 - DNA, 25 bp, Homo sapien
taatttcttcgatgtattccaagag

SEQ ID NO: 2723194 - DNA, 25 bp, Homo sapien
ctaatttcttcgatgtattccaaga

SEQ ID NO: 2723195 - DNA, 25 bp, Homo sapien
ctgggcaatatctagcttgtatttt

SEQ ID NO: 2723196 - DNA, 25 bp, Homo sapien
gcttgtatttttccacttgatctga

SEQ ID NO: 2723197 - DNA, 25 bp, Homo sapien
ctaactgggcaatatctagcttgta

SEQ ID NO: 2723198 - DNA, 25 bp, Homo sapien
tagcttgtatttttccacttgatct

SEQ ID NO: 2723199 - DNA, 25 bp, Homo sapien
ttcgttgtgttctctattcctgttg

SEQ ID NO: 2723200 - DNA, 25 bp, Homo sapien
cgttcctgttgttcaagaataaact

SEQ ID NO: 2723201 - DNA, 25 bp, Homo sapien
catttagattttcgttgtgttctct

SEQ ID NO: 2723202 - DNA, 25 bp, Homo sapien
agattttcgttgtgttctctattcc

SEQ ID NO: 2723203 - DNA, 25 bp, Homo sapien
gtaatttatcaagctcatccagtgt

SEQ ID NO: 2723204 - DNA, 25 bp, Homo sapien
tctgatgaagactcgaagataattc

SEQ ID NO: 2723205 - DNA, 25 bp, Homo sapien
tgctttaattcttcctcaaacagat

SEQ ID NO: 2723206 - DNA, 25 bp, Homo sapien
gcttgaccagcctttcagcttgttc

SEQ ID NO: 2723207 - DNA, 25 bp, Homo sapien
cttcaaggctttgcaccatactgtc

SEQ ID NO: 2723208 - DNA, 25 bp, Homo sapien
gggtatgagcagcactacttttctc

SEQ ID NO: 2723209 - DNA, 25 bp, Homo sapien
aaggctttgcaccatactgtcatac

SEQ ID NO: 2723210 - DNA, 25 bp, Homo sapien
tgggtatgagcagcactacttttct

SEQ ID NO: 2723211 - DNA, 25 bp, Homo sapien
tcttctatctcactggctgttaacg

SEQ ID NO: 2723212 - DNA, 25 bp, Homo sapien
ttcttgatttgagctctcagttgcc

SEQ ID NO: 2723213 - DNA, 25 bp, Homo sapien
aaatctgatgctgaacatcctctgc

SEQ ID NO: 2723214 - DNA, 25 bp, Homo sapien
gccttggccgctttttcctgtaatg

SEQ ID NO: 2723215 - DNA, 25 bp, Homo sapien
gcttgagttggttctgcaaatcagt

SEQ ID NO: 2723216 - DNA, 25 bp, Homo sapien
ttgagttggttctgcaaatcagtta

SEQ ID NO: 2723217 - DNA, 25 bp, Homo sapien
gagttggttctgcaaatcagttatt

SEQ ID NO: 2723218 - DNA, 25 bp, Homo sapien
ttgcttgagttggttctgcaaatca

SEQ ID NO: 2723219 - DNA, 25 bp, Homo sapien
ctgctgttgtattttctttttcagc

SEQ ID NO: 2723220 - DNA, 25 bp, Homo sapien
tgctgttgtattttctttttcagct

SEQ ID NO: 2723221 - DNA, 25 bp, Homo sapien
ctgttgtattttctttttcagcttt

SEQ ID NO: 2723222 - DNA, 25 bp, Homo sapien
gctgttgtattttctttttcagctt

SEQ ID NO: 2723223 - DNA, 25 bp, Homo sapien
tcttcatagaggagacgccacttgt

SEQ ID NO: 2723224 - DNA, 25 bp, Homo sapien
agaggagacgccacttgttaatttc

SEQ ID NO: 2723225 - DNA, 25 bp, Homo sapien
tatatagttcttcatagaggagacg

SEQ ID NO: 2723226 - DNA, 25 bp, Homo sapien
tagttcttcatagaggagacgccac

SEQ ID NO: 2723227 - DNA, 25 bp, Homo sapien
cctgagctgcaccatgttcattcaa

SEQ ID NO: 2723228 - DNA, 25 bp, Homo sapien
gacccaataatttagcatatgaatc

SEQ ID NO: 2723229 - DNA, 25 bp, Homo sapien
tctacttcaaaagcatctagttgta

SEQ ID NO: 2723230 - DNA, 25 bp, Homo sapien
attctgatgacccaataatttagca

SEQ ID NO: 2723231 - DNA, 25 bp, Homo sapien
ttttttagcaagctgacagcggagt

SEQ ID NO: 2723232 - DNA, 25 bp, Homo sapien
tgtttgatacctagaactttattca

SEQ ID NO: 2723233 - DNA, 25 bp, Homo sapien
gctgacagcggagttttgatacttc

SEQ ID NO: 2723234 - DNA, 25 bp, Homo sapien
gcctttgaaggatcaaagtgtttga

SEQ ID NO: 2723235 - DNA, 25 bp, Homo sapien
tcttgacactccataggagctcggt

SEQ ID NO: 2723236 - DNA, 25 bp, Homo sapien
cactccataggagctcggtaacagt

SEQ ID NO: 2723237 - DNA, 25 bp, Homo sapien
ggagctcggtaacagtttgtattgc

SEQ ID NO: 2723238 - DNA, 25 bp, Homo sapien
tgattcttgacactccataggagct

SEQ ID NO: 2723239 - DNA, 25 bp, Homo sapien
gctcagactagaaaagacctccagg

SEQ ID NO: 2723240 - DNA, 25 bp, Homo sapien
caagccaaggtgttttagcctagct

SEQ ID NO: 2723241 - DNA, 25 bp, Homo sapien
ggcttaaaggccaatccacagatta

SEQ ID NO: 2723242 - DNA, 25 bp, Homo sapien
caaacaggatggagcctaagaacct

SEQ ID NO: 2723243 - DNA, 25 bp, Homo sapien
tctgcctgcagagagcgcaggcacg

SEQ ID NO: 2723244 - DNA, 25 bp, Homo sapien
acgccaaaacgtgaggagcagcttc

SEQ ID NO: 2723245 - DNA, 25 bp, Homo sapien
agcattttgattccaatcccggaat

SEQ ID NO: 2723246 - DNA, 25 bp, Homo sapien
gatacgggatgggtcttagcctctg

SEQ ID NO: 2723247 - DNA, 25 bp, Homo sapien
aacccaggatcgacgcgggcctcag

SEQ ID NO: 2723248 - DNA, 25 bp, Homo sapien
ctcctccaacccaggatcgacgcgg

SEQ ID NO: 2723249 - DNA, 25 bp, Homo sapien
ccgccgtcttcacgccgcagcctca

SEQ ID NO: 2723250 - DNA, 25 bp, Homo sapien
ggatcgacgcgggcctcagctcaga

SEQ ID NO: 2723251 - DNA, 25 bp, Homo sapien
aacaaagtgtatagagagctctttc

SEQ ID NO: 2723252 - DNA, 25 bp, Homo sapien
ggaacaaagtgtatagagagctctt

SEQ ID NO: 2723253 - DNA, 25 bp, Homo sapien
gacagctcccgggaacaaagtgtat

SEQ ID NO: 2723254 - DNA, 25 bp, Homo sapien
gaacaaagtgtatagagagctcttt

SEQ ID NO: 2723255 - DNA, 25 bp, Homo sapien
tccaggctccaaccttacggaatga

SEQ ID NO: 2723256 - DNA, 25 bp, Homo sapien
tgcccgtcaagtgcataacatagtg

SEQ ID NO: 2723257 - DNA, 25 bp, Homo sapien
cacagtggaggattaaagtaatgcc

SEQ ID NO: 2723258 - DNA, 25 bp, Homo sapien
tacggaatgaacctgggccaatgtc

SEQ ID NO: 2723259 - DNA, 25 bp, Homo sapien
tcctattagggatgttaacttcctc

SEQ ID NO: 2723260 - DNA, 25 bp, Homo sapien
acagccaactgcatgccaattattc

SEQ ID NO: 2723261 - DNA, 25 bp, Homo sapien
tattctgctgaaattctttgtgtac

SEQ ID NO: 2723262 - DNA, 25 bp, Homo sapien
cagtaaccagaaccctcctattagg

SEQ ID NO: 2723263 - DNA, 25 bp, Homo sapien
cagtgggctgtgatcgatctaccgt

SEQ ID NO: 2723264 - DNA, 25 bp, Homo sapien
tagttctaactgttgtggaggccga

SEQ ID NO: 2723265 - DNA, 25 bp, Homo sapien
aatgataccgaaaacctctctgagc

SEQ ID NO: 2723266 - DNA, 25 bp, Homo sapien
gatctaccgtacttcaccctgggct

SEQ ID NO: 2723267 - DNA, 25 bp, Homo sapien
gaagcatccacattaagttgagagg

SEQ ID NO: 2723268 - DNA, 25 bp, Homo sapien
ccagaagcatccacattaagttgag

SEQ ID NO: 2723269 - DNA, 25 bp, Homo sapien
gattttctacaacatctggtcttct

SEQ ID NO: 2723270 - DNA, 25 bp, Homo sapien
tctggctgattttctacaacatctg

SEQ ID NO: 2723271 - DNA, 25 bp, Homo sapien
ctctctgtaaggtggatttgttcca

SEQ ID NO: 2723272 - DNA, 25 bp, Homo sapien
ctgagctaatgtagatgagaaatgc

SEQ ID NO: 2723273 - DNA, 25 bp, Homo sapien
aaggtggatttgttccatcaaatac

SEQ ID NO: 2723274 - DNA, 25 bp, Homo sapien
taggggagctggtatgtcttcctct

SEQ ID NO: 2723275 - DNA, 25 bp, Homo sapien
aaggaagaagcacatccctttctgc

SEQ ID NO: 2723276 - DNA, 25 bp, Homo sapien
cctttctgctcttctgccgtgagaa

SEQ ID NO: 2723277 - DNA, 25 bp, Homo sapien
taatccacgaagcaacagtgctggg

SEQ ID NO: 2723278 - DNA, 25 bp, Homo sapien
taatggtccctgctgatggtataca

SEQ ID NO: 2723279 - DNA, 25 bp, Homo sapien
tgatccatgtttgctgacttgttgc

SEQ ID NO: 2723280 - DNA, 25 bp, Homo sapien
ttctctgctagctgccggcacacag

SEQ ID NO: 2723281 - DNA, 25 bp, Homo sapien
ggaacctctgctgccagtgatccat

SEQ ID NO: 2723282 - DNA, 25 bp, Homo sapien
tccccatacagaataggaatcctca

SEQ ID NO: 2723283 - DNA, 25 bp, Homo sapien
acagtgtatatgtaaactacttttg

SEQ ID NO: 2723284 - DNA, 25 bp, Homo sapien
tggaaaagacaaagcggaccttcgc

SEQ ID NO: 2723285 - DNA, 25 bp, Homo sapien
tcactcagtaacactccaagtacag

SEQ ID NO: 2723286 - DNA, 25 bp, Homo sapien
cagctgtgaaagttcaagcatggaa

SEQ ID NO: 2723287 - DNA, 25 bp, Homo sapien
atttcatacttagtcatctgttcat

SEQ ID NO: 2723288 - DNA, 25 bp, Homo sapien
catacttagtcatctgttcattgcc

SEQ ID NO: 2723289 - DNA, 25 bp, Homo sapien
gaaaggttcccttaattgatggatc

SEQ ID NO: 2723290 - DNA, 25 bp, Homo sapien
ccagtgaaaggttcccttaattgat

SEQ ID NO: 2723291 - DNA, 25 bp, Homo sapien
caatttggagcagtcaagctgagca

SEQ ID NO: 2723292 - DNA, 25 bp, Homo sapien
gacgttgtgctcctaggacagggct

SEQ ID NO: 2723293 - DNA, 25 bp, Homo sapien
gctgagcatttctcggacgttgtgc

SEQ ID NO: 2723294 - DNA, 25 bp, Homo sapien
gaaatggtgttcgttggccaatgcc

SEQ ID NO: 2723295 - DNA, 25 bp, Homo sapien
gaggcatcaagctgtagaagttcca

SEQ ID NO: 2723296 - DNA, 25 bp, Homo sapien
ggcaacatgggatgaaaaggacagt

SEQ ID NO: 2723297 - DNA, 25 bp, Homo sapien
ctgaaaagtctacagcagatctgct

SEQ ID NO: 2723298 - DNA, 25 bp, Homo sapien
gaaatatcacttagcggcaacatgg

SEQ ID NO: 2723299 - DNA, 25 bp, Homo sapien
ttgtatgtatcacatgttacatcag

SEQ ID NO: 2723300 - DNA, 25 bp, Homo sapien
atgttacatcagaagaatgtaattt

SEQ ID NO: 2723301 - DNA, 25 bp, Homo sapien
ttttgtatgtatcacatgttacatc

SEQ ID NO: 2723302 - DNA, 25 bp, Homo sapien
acatgttacatcagaagaatgtaat

SEQ ID NO: 2723303 - DNA, 25 bp, Homo sapien
agacgaacacttctgaaggccagaa

SEQ ID NO: 2723304 - DNA, 25 bp, Homo sapien
tccagccctcctatatgccaaagtg

SEQ ID NO: 2723305 - DNA, 25 bp, Homo sapien
gggtgaattgtaactacagacgaac

SEQ ID NO: 2723306 - DNA, 25 bp, Homo sapien
ccaaggaccttatgtgttctaagca

SEQ ID NO: 2723307 - DNA, 25 bp, Homo sapien
tacatctaatttgtcctgtctgaaa

SEQ ID NO: 2723308 - DNA, 25 bp, Homo sapien
tgtacacagattcattatttcttga

SEQ ID NO: 2723309 - DNA, 25 bp, Homo sapien
tgtaacttgacataagggattttct

SEQ ID NO: 2723310 - DNA, 25 bp, Homo sapien
tcaggacattttcccatacatctaa

SEQ ID NO: 2723311 - DNA, 25 bp, Homo sapien
cagcccatgtggttcctagaaaatg

SEQ ID NO: 2723312 - DNA, 25 bp, Homo sapien
catggtgtgcagtcagaaacagctg

SEQ ID NO: 2723313 - DNA, 25 bp, Homo sapien
cttctcactacatggtgtgcagtca

SEQ ID NO: 2723314 - DNA, 25 bp, Homo sapien
tcctgcagcccaatcttgcacacag

SEQ ID NO: 2723315 - DNA, 25 bp, Homo sapien
tactaagtagaccatgtctgctgag

SEQ ID NO: 2723316 - DNA, 25 bp, Homo sapien
gcctggctgtcaagggtttactaag

SEQ ID NO: 2723317 - DNA, 25 bp, Homo sapien
ggatttgcttagaatagggacctgc

SEQ ID NO: 2723318 - DNA, 25 bp, Homo sapien
tctgctgagatgaggtacgtataaa

SEQ ID NO: 2723319 - DNA, 25 bp, Homo sapien
ccagggatcacaagccttgacaaca

SEQ ID NO: 2723320 - DNA, 25 bp, Homo sapien
tgtttctttgaatcagcctcaattg

SEQ ID NO: 2723321 - DNA, 25 bp, Homo sapien
tgagttcagtaaaagcaccattttg

SEQ ID NO: 2723322 - DNA, 25 bp, Homo sapien
gaatcagcctcaattgcaagtccag

SEQ ID NO: 2723323 - DNA, 25 bp, Homo sapien
gaaattcccctgtgcttcaataaag

SEQ ID NO: 2723324 - DNA, 25 bp, Homo sapien
tccaatgaagtctaacaaatgtgcc

SEQ ID NO: 2723325 - DNA, 25 bp, Homo sapien
gcagcaggcgagcatcttttacacg

SEQ ID NO: 2723326 - DNA, 25 bp, Homo sapien
tgtctttccccattctacctgcaaa

SEQ ID NO: 2723327 - DNA, 25 bp, Homo sapien
tctttgatagcgaaacgcccgcagg

SEQ ID NO: 2723328 - DNA, 25 bp, Homo sapien
tgtgggaagaaagcccgactgagcc

SEQ ID NO: 2723329 - DNA, 25 bp, Homo sapien
tccttagcggctagagaaccggttc

SEQ ID NO: 2723330 - DNA, 25 bp, Homo sapien
aaccggttccgcattggagccgcag

SEQ ID NO: 2723331 - DNA, 25 bp, Homo sapien
taataatgcaacattgatcttttga

SEQ ID NO: 2723332 - DNA, 25 bp, Homo sapien
gtaataatgcaacattgatcttttg

SEQ ID NO: 2723333 - DNA, 25 bp, Homo sapien
tgggataaaagccagatgcatccca

SEQ ID NO: 2723334 - DNA, 25 bp, Homo sapien
gatccggggatgatttatatggctc

SEQ ID NO: 2723335 - DNA, 25 bp, Homo sapien
agatgcatcccacacattcctgtgg

SEQ ID NO: 2723336 - DNA, 25 bp, Homo sapien
gccaagtttggtgtgatccggggat

SEQ ID NO: 2723337 - DNA, 25 bp, Homo sapien
aaatgagcaatttcctgcgaaacta

SEQ ID NO: 2723338 - DNA, 25 bp, Homo sapien
gcgaaactacatcctgaaaatgact

SEQ ID NO: 2723339 - DNA, 25 bp, Homo sapien
aatttcctgcgaaactacatcctga

SEQ ID NO: 2723340 - DNA, 25 bp, Homo sapien
cctgcgaaactacatcctgaaaatg

SEQ ID NO: 2723341 - DNA, 25 bp, Homo sapien
tgagaaaaccgttaaagtctcaata

SEQ ID NO: 2723342 - DNA, 25 bp, Homo sapien
atgcttgtttttcagtcctgtaaag

SEQ ID NO: 2723343 - DNA, 25 bp, Homo sapien
cagtcctgtaaagaaaaattcaggc

SEQ ID NO: 2723344 - DNA, 25 bp, Homo sapien
tcagtcctgtaaagaaaaattcagg

SEQ ID NO: 2723345 - DNA, 25 bp, Homo sapien
gatttgttatgtctcctgatgtctg

SEQ ID NO: 2723346 - DNA, 25 bp, Homo sapien
ttcaataggtttgcctgcttgctgt

SEQ ID NO: 2723347 - DNA, 25 bp, Homo sapien
caaaaatatatcctgttgcacatga

SEQ ID NO: 2723348 - DNA, 25 bp, Homo sapien
tgatggatgccagttggaagtctca

SEQ ID NO: 2723349 - DNA, 25 bp, Homo sapien
gggtgcaatgctctgttgaagcaag

SEQ ID NO: 2723350 - DNA, 25 bp, Homo sapien
ataaaatgtcattggattaagttca

SEQ ID NO: 2723351 - DNA, 25 bp, Homo sapien
tggattaagttcagtatggcgcctt

SEQ ID NO: 2723352 - DNA, 25 bp, Homo sapien
tggcgccttctgtcaaatccattca

SEQ ID NO: 2723353 - DNA, 25 bp, Homo sapien
ggcatgatgggctcaactgaataaa

SEQ ID NO: 2723354 - DNA, 25 bp, Homo sapien
tgctgaaatgcactgcctgaagcag

SEQ ID NO: 2723355 - DNA, 25 bp, Homo sapien
tgcactgcctgaagcaggtcttaga

SEQ ID NO: 2723356 - DNA, 25 bp, Homo sapien
tgcaaattcagatccctgtgatcct

SEQ ID NO: 2723357 - DNA, 25 bp, Homo sapien
tcttagagagatgttatggcaactc

SEQ ID NO: 2723358 - DNA, 25 bp, Homo sapien
gacttatgatccctacttcgtcggc

SEQ ID NO: 2723359 - DNA, 25 bp, Homo sapien
cacagttctgctgacttatgatccc

SEQ ID NO: 2723360 - DNA, 25 bp, Homo sapien
gaaaatgcctttgtagcacagttct

SEQ ID NO: 2723361 - DNA, 25 bp, Homo sapien
tacttcgtcggctctcatctgcttc

SEQ ID NO: 2723362 - DNA, 25 bp, Homo sapien
tgcacatataggttttatttgcatc

SEQ ID NO: 2723363 - DNA, 25 bp, Homo sapien
gatgcctcctgtcagttgaccgtaa

SEQ ID NO: 2723364 - DNA, 25 bp, Homo sapien
gaccgtaattccaatcacctccatt

SEQ ID NO: 2723365 - DNA, 25 bp, Homo sapien
tattcaagcaccgagaggttgatgc

SEQ ID NO: 2723366 - DNA, 25 bp, Homo sapien
tgtgctgtacatccagtcatgttct

SEQ ID NO: 2723367 - DNA, 25 bp, Homo sapien
ctacactaccacatgagcacgaagg

SEQ ID NO: 2723368 - DNA, 25 bp, Homo sapien
cgagggcttcgcttaaggaactgaa

SEQ ID NO: 2723369 - DNA, 25 bp, Homo sapien
gggaactatagcgagggcttcgctt

SEQ ID NO: 2723370 - DNA, 25 bp, Homo sapien
aactctgaactgactgtatttgtac

SEQ ID NO: 2723371 - DNA, 25 bp, Homo sapien
tcccaagcacctaactaacacgttg

SEQ ID NO: 2723372 - DNA, 25 bp, Homo sapien
tccaaatgcctgaattcctcccaag

SEQ ID NO: 2723373 - DNA, 25 bp, Homo sapien
aagatgattatatggttgctgcaag

SEQ ID NO: 2723374 - DNA, 25 bp, Homo sapien
taactaacacgttgcagaatgaatg

SEQ ID NO: 2723375 - DNA, 25 bp, Homo sapien
ggtggtgaatcaacagctgagagaa

SEQ ID NO: 2723376 - DNA, 25 bp, Homo sapien
cgttctgagttttatgtgagctcga

SEQ ID NO: 2723377 - DNA, 25 bp, Homo sapien
gtataactacagcttcgttctgagt

SEQ ID NO: 2723378 - DNA, 25 bp, Homo sapien
taacagttctgtcgggaccatctct

SEQ ID NO: 2723379 - DNA, 25 bp, Homo sapien
ccaaatggatgtggcgtttttgttg

SEQ ID NO: 2723380 - DNA, 25 bp, Homo sapien
tttatgcttggaaagttgtgttata

SEQ ID NO: 2723381 - DNA, 25 bp, Homo sapien
tattttagtccaaatggatgtggcg

SEQ ID NO: 2723382 - DNA, 25 bp, Homo sapien
ccttggtgagagttttcgttttatg

SEQ ID NO: 2723383 - DNA, 25 bp, Homo sapien
tagcttatggacttcggcagccatt

SEQ ID NO: 2723384 - DNA, 25 bp, Homo sapien
tttagcttatggacttcggcagcca

SEQ ID NO: 2723385 - DNA, 25 bp, Homo sapien
ggatttagcttatggacttcggcag

SEQ ID NO: 2723386 - DNA, 25 bp, Homo sapien
gccattttgtgaccaggaagtaaga

SEQ ID NO: 2723387 - DNA, 25 bp, Homo sapien
ctgtccacctgagcagaaccagctt

SEQ ID NO: 2723388 - DNA, 25 bp, Homo sapien
tgttccaacttctgtccacctgagc

SEQ ID NO: 2723389 - DNA, 25 bp, Homo sapien
ttttgttccaacttctgtccacctg

SEQ ID NO: 2723390 - DNA, 25 bp, Homo sapien
acctgagcagaaccagcttctcctt

SEQ ID NO: 2723391 - DNA, 25 bp, Homo sapien
cattactcggcattgggcaggacac

SEQ ID NO: 2723392 - DNA, 25 bp, Homo sapien
tcgagcctgctgagacctaaagatc

SEQ ID NO: 2723393 - DNA, 25 bp, Homo sapien
gaatgatctgtaccttcgagcctgc

SEQ ID NO: 2723394 - DNA, 25 bp, Homo sapien
gcagttcaacagttcatggagtcca

SEQ ID NO: 2723395 - DNA, 25 bp, Homo sapien
tgcaggtcgggaagactcatgtctg

SEQ ID NO: 2723396 - DNA, 25 bp, Homo sapien
ggtcgggaagactcatgtctgccca

SEQ ID NO: 2723397 - DNA, 25 bp, Homo sapien
aagactcatgtctgcccatcacagc

SEQ ID NO: 2723398 - DNA, 25 bp, Homo sapien
acatttgcaggtcgggaagactcat

SEQ ID NO: 2723399 - DNA, 25 bp, Homo sapien
tctgtgatgtcttcctgccttgttt

SEQ ID NO: 2723400 - DNA, 25 bp, Homo sapien
atgaactgcacggttttctgcaaat

SEQ ID NO: 2723401 - DNA, 25 bp, Homo sapien
gactttgattcgatgaactgcacgg

SEQ ID NO: 2723402 - DNA, 25 bp, Homo sapien
ctgtgttcaggactttgattcgatg

SEQ ID NO: 2723403 - DNA, 25 bp, Homo sapien
atgagatactttttctgcttcccct

SEQ ID NO: 2723404 - DNA, 25 bp, Homo sapien
ttctgcttcccctaaaacttcaatc

SEQ ID NO: 2723405 - DNA, 25 bp, Homo sapien
ctgcttcccctaaaacttcaatcat

SEQ ID NO: 2723406 - DNA, 25 bp, Homo sapien
gagatactttttctgcttcccctaa

SEQ ID NO: 2723407 - DNA, 25 bp, Homo sapien
gcatcattgtgtcaagccttctcag

SEQ ID NO: 2723408 - DNA, 25 bp, Homo sapien
gcagctggagctacaaactgtatgt

SEQ ID NO: 2723409 - DNA, 25 bp, Homo sapien
tgcccagagtatcccagctttggcc

SEQ ID NO: 2723410 - DNA, 25 bp, Homo sapien
tagatgctctgtacaaactcatgga

SEQ ID NO: 2723411 - DNA, 25 bp, Homo sapien
taataatataccagccctgttgacc

SEQ ID NO: 2723412 - DNA, 25 bp, Homo sapien
tactgctgtggggataaggctctct

SEQ ID NO: 2723413 - DNA, 25 bp, Homo sapien
tgatttactgctgtggggataaggc

SEQ ID NO: 2723414 - DNA, 25 bp, Homo sapien
taaggctctctgtaataatatacca

SEQ ID NO: 2723415 - DNA, 25 bp, Homo sapien
gtatgaactgccaatgtgttcaact

SEQ ID NO: 2723416 - DNA, 25 bp, Homo sapien
ttcatatcagtaaggttcaaggcta

SEQ ID NO: 2723417 - DNA, 25 bp, Homo sapien
cagtaaggttcaaggctatgttcat

SEQ ID NO: 2723418 - DNA, 25 bp, Homo sapien
ctgccaatgtgttcaacttcatatt

SEQ ID NO: 2723419 - DNA, 25 bp, Homo sapien
tcttgctctgattccgtagtcaaaa

SEQ ID NO: 2723420 - DNA, 25 bp, Homo sapien
aagagtgaagttgtccactcttgct

SEQ ID NO: 2723421 - DNA, 25 bp, Homo sapien
gctctgattccgtagtcaaaagcag

SEQ ID NO: 2723422 - DNA, 25 bp, Homo sapien
cactcttgctctgattccgtagtca

SEQ ID NO: 2723423 - DNA, 25 bp, Homo sapien
ttgatagagcatcttgaagcatggt

SEQ ID NO: 2723424 - DNA, 25 bp, Homo sapien
ttttgatagagcatcttgaagcatg

SEQ ID NO: 2723425 - DNA, 25 bp, Homo sapien
agttttgatagagcatcttgaagca

SEQ ID NO: 2723426 - DNA, 25 bp, Homo sapien
tagagcatcttgaagcatggtttgc

SEQ ID NO: 2723427 - DNA, 25 bp, Homo sapien
ttctagccgcttctggagttcaact

SEQ ID NO: 2723428 - DNA, 25 bp, Homo sapien
tctagccgcttctggagttcaactg

SEQ ID NO: 2723429 - DNA, 25 bp, Homo sapien
cttctagccgcttctggagttcaac

SEQ ID NO: 2723430 - DNA, 25 bp, Homo sapien
tatgagtgccacgtaattctctgtg

SEQ ID NO: 2723431 - DNA, 25 bp, Homo sapien
taaatggtcttcgaagactctgaac

SEQ ID NO: 2723432 - DNA, 25 bp, Homo sapien
caatagccctcagagctatgagtgc

SEQ ID NO: 2723433 - DNA, 25 bp, Homo sapien
gcaaaccgtgacatacaatagccct

SEQ ID NO: 2723434 - DNA, 25 bp, Homo sapien
tcccaaatcggagaccactcaagct

SEQ ID NO: 2723435 - DNA, 25 bp, Homo sapien
aaataaatctgagctttttgcactg

SEQ ID NO: 2723436 - DNA, 25 bp, Homo sapien
taatagaagaggtgagtaatagatt

SEQ ID NO: 2723437 - DNA, 25 bp, Homo sapien
tttgcactgtgaaatcgaagttcta

SEQ ID NO: 2723438 - DNA, 25 bp, Homo sapien
gatgtaccagtgacagggcctgtcc

SEQ ID NO: 2723439 - DNA, 25 bp, Homo sapien
tgtcctcatctgaacacagccatga

SEQ ID NO: 2723440 - DNA, 25 bp, Homo sapien
ccatgatgtaccagtgacagggcct

SEQ ID NO: 2723441 - DNA, 25 bp, Homo sapien
tgcagttccttgacgtatgatcaca

SEQ ID NO: 2723442 - DNA, 25 bp, Homo sapien
ttcgtgcatcactgaatccactctt

SEQ ID NO: 2723443 - DNA, 25 bp, Homo sapien
actttaaagctcgtaagtggtgcaa

SEQ ID NO: 2723444 - DNA, 25 bp, Homo sapien
ggtgcaagtcggagatgatgtaaaa

SEQ ID NO: 2723445 - DNA, 25 bp, Homo sapien
gatgtaaaaacttcgtgcatcactg

SEQ ID NO: 2723446 - DNA, 25 bp, Homo sapien
tccacttgcgtgatgaaacacgtct

SEQ ID NO: 2723447 - DNA, 25 bp, Homo sapien
cccaaggtatgccagagatttgaaa

SEQ ID NO: 2723448 - DNA, 25 bp, Homo sapien
atgcccacgtgagcccgtttcaggc

SEQ ID NO: 2723449 - DNA, 25 bp, Homo sapien
gggtgggatccacattatcatgcaa

SEQ ID NO: 2723450 - DNA, 25 bp, Homo sapien
tccctgcagaagagcatacagtggc

SEQ ID NO: 2723451 - DNA, 25 bp, Homo sapien
tcttcatataatattacattagttt

SEQ ID NO: 2723452 - DNA, 25 bp, Homo sapien
ttccctgcagaagagcatacagtgg

SEQ ID NO: 2723453 - DNA, 25 bp, Homo sapien
atttccctgcagaagagcatacagt

SEQ ID NO: 2723454 - DNA, 25 bp, Homo sapien
gtcactgtttcagttaaaggatcaa

SEQ ID NO: 2723455 - DNA, 25 bp, Homo sapien
tgactgttgtaactagcaagactac

SEQ ID NO: 2723456 - DNA, 25 bp, Homo sapien
cagaattctcaatgctcagagtgac

SEQ ID NO: 2723457 - DNA, 25 bp, Homo sapien
tcttgtccaaagtctgctgtctctc

SEQ ID NO: 2723458 - DNA, 25 bp, Homo sapien
taaagctgcaaatcattccttgggt

SEQ ID NO: 2723459 - DNA, 25 bp, Homo sapien
gggttctgttattgtcagactccaa

SEQ ID NO: 2723460 - DNA, 25 bp, Homo sapien
ggtgctctaatacagatttctcatc

SEQ ID NO: 2723461 - DNA, 25 bp, Homo sapien
aatgccttttaatgatgattcacgg

SEQ ID NO: 2723462 - DNA, 25 bp, Homo sapien
tgaagaacggatgctgcacctgagc

SEQ ID NO: 2723463 - DNA, 25 bp, Homo sapien
ttggcctgaagaacggatgctgcac

SEQ ID NO: 2723464 - DNA, 25 bp, Homo sapien
gagattggcctgaagaacggatgct

SEQ ID NO: 2723465 - DNA, 25 bp, Homo sapien
actttagtagttgagagagtaactg

SEQ ID NO: 2723466 - DNA, 25 bp, Homo sapien
ctattttgaagggtaatgcctagga

SEQ ID NO: 2723467 - DNA, 25 bp, Homo sapien
tatacataattagttcccttgcagc

SEQ ID NO: 2723468 - DNA, 25 bp, Homo sapien
gctgtttaggttactgtaaactcgc

SEQ ID NO: 2723469 - DNA, 25 bp, Homo sapien
acataaagttgttgcccgtgcctat

SEQ ID NO: 2723470 - DNA, 25 bp, Homo sapien
tcagtctcacatctatttgtgcggg

SEQ ID NO: 2723471 - DNA, 25 bp, Homo sapien
cttgtggaaaataaaacgtatcaca

SEQ ID NO: 2723472 - DNA, 25 bp, Homo sapien
cacatctatttgtgcgggggagtta

SEQ ID NO: 2723473 - DNA, 25 bp, Homo sapien
aacgtatcacagaattcagtctcac

SEQ ID NO: 2723474 - DNA, 25 bp, Homo sapien
tcacaaaagatggtgggtagacaaa

SEQ ID NO: 2723475 - DNA, 25 bp, Homo sapien
tgatgaagatttccttgtccagatc

SEQ ID NO: 2723476 - DNA, 25 bp, Homo sapien
cctgcatgatgaagatttccttgtc

SEQ ID NO: 2723477 - DNA, 25 bp, Homo sapien
gatggtgggtagacaaatgatagca

SEQ ID NO: 2723478 - DNA, 25 bp, Homo sapien
gacagacaatggggcaatgctagca

SEQ ID NO: 2723479 - DNA, 25 bp, Homo sapien
gggacagacaatggggcaatgctag

SEQ ID NO: 2723480 - DNA, 25 bp, Homo sapien
ggacagacaatggggcaatgctagc

SEQ ID NO: 2723481 - DNA, 25 bp, Homo sapien
ttacgcctgccatctggttcatttc

SEQ ID NO: 2723482 - DNA, 25 bp, Homo sapien
tctagtggttcagcatacccatgag

SEQ ID NO: 2723483 - DNA, 25 bp, Homo sapien
ctcattacgcctgccatctggttca

SEQ ID NO: 2723484 - DNA, 25 bp, Homo sapien
tgaatgaatctctagtggttcagca

SEQ ID NO: 2723485 - DNA, 25 bp, Homo sapien
gggaattttcctttctgctcttcac

SEQ ID NO: 2723486 - DNA, 25 bp, Homo sapien
ggggaattttcctttctgctcttca

SEQ ID NO: 2723487 - DNA, 25 bp, Homo sapien
ttgaatttcaaatcaatatgccaac

SEQ ID NO: 2723488 - DNA, 25 bp, Homo sapien
aatgagattttcattgaatttcaaa

SEQ ID NO: 2723489 - DNA, 25 bp, Homo sapien
ctagactaccacacaggtcattctc

SEQ ID NO: 2723490 - DNA, 25 bp, Homo sapien
tcttgctctctggattgcctccaaa

SEQ ID NO: 2723491 - DNA, 25 bp, Homo sapien
cctaaagatgattacacttactctc

SEQ ID NO: 2723492 - DNA, 25 bp, Homo sapien
caaggtacaacactggagcaaacag

SEQ ID NO: 2723493 - DNA, 25 bp, Homo sapien
gagcctccttcatcctaaagatgat

SEQ ID NO: 2723494 - DNA, 25 bp, Homo sapien
tgatcgttgtctaatggatgactct

SEQ ID NO: 2723495 - DNA, 25 bp, Homo sapien
caaatagaatctccttggtttatca

SEQ ID NO: 2723496 - DNA, 25 bp, Homo sapien
taaaccacagctagcctttcagtag

SEQ ID NO: 2723497 - DNA, 25 bp, Homo sapien
tctttctcgctggttaaaatagaca

SEQ ID NO: 2723498 - DNA, 25 bp, Homo sapien
gctactatgtcaggataagactaaa

SEQ ID NO: 2723499 - DNA, 25 bp, Homo sapien
tttcagagtcaacatggttaccatt

SEQ ID NO: 2723500 - DNA, 25 bp, Homo sapien
caggactagctggaactggaatgga

SEQ ID NO: 2723501 - DNA, 25 bp, Homo sapien
catggttaccatttctagaggtggc

SEQ ID NO: 2723502 - DNA, 25 bp, Homo sapien
caggtcaatcttagccagagggcca

SEQ ID NO: 2723503 - DNA, 25 bp, Homo sapien
gggcccattgctaacatccaatcat

SEQ ID NO: 2723504 - DNA, 25 bp, Homo sapien
cacggggcccattgctaacatccaa

SEQ ID NO: 2723505 - DNA, 25 bp, Homo sapien
aacatccaatcatagcggctgtcag

SEQ ID NO: 2723506 - DNA, 25 bp, Homo sapien
ttgctaacatccaatcatagcggct

SEQ ID NO: 2723507 - DNA, 25 bp, Homo sapien
agcagtgagcagaccttctcttcct

SEQ ID NO: 2723508 - DNA, 25 bp, Homo sapien
cttcctgtcaatcgccttttgtaac

SEQ ID NO: 2723509 - DNA, 25 bp, Homo sapien
cttctcttcctgtcaatcgcctttt

SEQ ID NO: 2723510 - DNA, 25 bp, Homo sapien
ctcttcctgtcaatcgccttttgta

SEQ ID NO: 2723511 - DNA, 25 bp, Homo sapien
tattttggagaaattgccgactccc

SEQ ID NO: 2723512 - DNA, 25 bp, Homo sapien
gactcccttcagtgggttaggtcta

SEQ ID NO: 2723513 - DNA, 25 bp, Homo sapien
gctgctattttggagaaattgccga

SEQ ID NO: 2723514 - DNA, 25 bp, Homo sapien
gagaaattgccgactcccttcagtg

SEQ ID NO: 2723515 - DNA, 25 bp, Homo sapien
acctaatgtaggagtgagccggaga

SEQ ID NO: 2723516 - DNA, 25 bp, Homo sapien
gaatcactgcccgaagtcttgcttg

SEQ ID NO: 2723517 - DNA, 25 bp, Homo sapien
ggttcattcggcagtcaaagaggac

SEQ ID NO: 2723518 - DNA, 25 bp, Homo sapien
aattgcctcgtcaaagtcgtcccag

SEQ ID NO: 2723519 - DNA, 25 bp, Homo sapien
cctggaccacaggaatctgattagg

SEQ ID NO: 2723520 - DNA, 25 bp, Homo sapien
tccctggaccacaggaatctgatta

SEQ ID NO: 2723521 - DNA, 25 bp, Homo sapien
ggaccacaggaatctgattaggcat

SEQ ID NO: 2723522 - DNA, 25 bp, Homo sapien
ctggaccacaggaatctgattaggc

SEQ ID NO: 2723523 - DNA, 25 bp, Homo sapien
tgttagccgaaagtttgaaggtgcc

SEQ ID NO: 2723524 - DNA, 25 bp, Homo sapien
ccttctctccgatataaatgatggg

SEQ ID NO: 2723525 - DNA, 25 bp, Homo sapien
tttgaagtgagggtccgatattcct

SEQ ID NO: 2723526 - DNA, 25 bp, Homo sapien
tgagggtccgatattcctccttctc

SEQ ID NO: 2723527 - DNA, 25 bp, Homo sapien
tgttgcctggttactaaaagcccac

SEQ ID NO: 2723528 - DNA, 25 bp, Homo sapien
ggagagctaagcaacactggttatt

SEQ ID NO: 2723529 - DNA, 25 bp, Homo sapien
catcagtgacccctgtcatggagga

SEQ ID NO: 2723530 - DNA, 25 bp, Homo sapien
tattaccatcagtgacccctgtcat

SEQ ID NO: 2723531 - DNA, 25 bp, Homo sapien
ctattccttgtttatgccaaggaga

SEQ ID NO: 2723532 - DNA, 25 bp, Homo sapien
gtagattgcgatttacttgttatat

SEQ ID NO: 2723533 - DNA, 25 bp, Homo sapien
ggtagattgcgatttacttgttata

SEQ ID NO: 2723534 - DNA, 25 bp, Homo sapien
gattgcgatttacttgttatatttc

SEQ ID NO: 2723535 - DNA, 25 bp, Homo sapien
caaggtagattgcgatttacttgtt

SEQ ID NO: 2723536 - DNA, 25 bp, Homo sapien
gggatctgtttgtccctaaatacat

SEQ ID NO: 2723537 - DNA, 25 bp, Homo sapien
aatacatcagcgtcattttcggtca

SEQ ID NO: 2723538 - DNA, 25 bp, Homo sapien
caataactggccataatagacactg

SEQ ID NO: 2723539 - DNA, 25 bp, Homo sapien
cactgaactttcaggtgggatctgt

SEQ ID NO: 2723540 - DNA, 25 bp, Homo sapien
tacaccagtttcctctagagaccaa

SEQ ID NO: 2723541 - DNA, 25 bp, Homo sapien
tttctattcagggaagttggctgca

SEQ ID NO: 2723542 - DNA, 25 bp, Homo sapien
tgtgcctgggaagatagaccactct

SEQ ID NO: 2723543 - DNA, 25 bp, Homo sapien
aaccgacgagtttgctatttgtgcc

SEQ ID NO: 2723544 - DNA, 25 bp, Homo sapien
tcacactgtagacactatttgcctg

SEQ ID NO: 2723545 - DNA, 25 bp, Homo sapien
gggttatcaggttatcatggcatca

SEQ ID NO: 2723546 - DNA, 25 bp, Homo sapien
caccgaatcatgtcctcaaaatgca

SEQ ID NO: 2723547 - DNA, 25 bp, Homo sapien
caagtgacttttattacaccgaatc

SEQ ID NO: 2723548 - DNA, 25 bp, Homo sapien
gacaatactatctctggaaaagcta

SEQ ID NO: 2723549 - DNA, 25 bp, Homo sapien
taaacctgtggaaaattctcccaga

SEQ ID NO: 2723550 - DNA, 25 bp, Homo sapien
gatagtgctaagaccatgtttcctg

SEQ ID NO: 2723551 - DNA, 25 bp, Homo sapien
tatactggtttagtttcacccaaga

SEQ ID NO: 2723552 - DNA, 25 bp, Homo sapien
ttctaatcagattcagtgaattaca

SEQ ID NO: 2723553 - DNA, 25 bp, Homo sapien
tagacaccgtgaaattctctaagat

SEQ ID NO: 2723554 - DNA, 25 bp, Homo sapien
aattctctaagatggcgtatatcag

SEQ ID NO: 2723555 - DNA, 25 bp, Homo sapien
agatggcgtatatcaggtattttac

SEQ ID NO: 2723556 - DNA, 25 bp, Homo sapien
tgtcataagcaactgtggagattgc

SEQ ID NO: 2723557 - DNA, 25 bp, Homo sapien
tggcagtgaaatgtcataagcaact

SEQ ID NO: 2723558 - DNA, 25 bp, Homo sapien
agcaactgtggagattgcaagagct

SEQ ID NO: 2723559 - DNA, 25 bp, Homo sapien
gtgaaatgtcataagcaactgtgga

SEQ ID NO: 2723560 - DNA, 25 bp, Homo sapien
gaacaagctcatgaatcatgttctc

SEQ ID NO: 2723561 - DNA, 25 bp, Homo sapien
ggaacaagctcatgaatcatgttct

SEQ ID NO: 2723562 - DNA, 25 bp, Homo sapien
aaatagtatttgtctcccatgcgcc

SEQ ID NO: 2723563 - DNA, 25 bp, Homo sapien
tctctcatgactgataataccaggc

SEQ ID NO: 2723564 - DNA, 25 bp, Homo sapien
cccatgcgcctagttatgctaataa

SEQ ID NO: 2723565 - DNA, 25 bp, Homo sapien
caggccagtgccattaagaaatatt

SEQ ID NO: 2723566 - DNA, 25 bp, Homo sapien
tccagttgcggaatacaaagacgtt

SEQ ID NO: 2723567 - DNA, 25 bp, Homo sapien
agaacagctaatggcccttcagtgt

SEQ ID NO: 2723568 - DNA, 25 bp, Homo sapien
gataatctgaaagctgccttaacca

SEQ ID NO: 2723569 - DNA, 25 bp, Homo sapien
tcaacaatgtccaaacctgaactct

SEQ ID NO: 2723570 - DNA, 25 bp, Homo sapien
tacaggagatatgagttgccccatg

SEQ ID NO: 2723571 - DNA, 25 bp, Homo sapien
cctgagtcctcaagacattagcatt

SEQ ID NO: 2723572 - DNA, 25 bp, Homo sapien
cagcattgatcaagctgtgtaaatc

SEQ ID NO: 2723573 - DNA, 25 bp, Homo sapien
gcataactagttcacaataaaataa

SEQ ID NO: 2723574 - DNA, 25 bp, Homo sapien
tgagatatacatctatcccctgtgg

SEQ ID NO: 2723575 - DNA, 25 bp, Homo sapien
caagtgtggcttaatccggagattc

SEQ ID NO: 2723576 - DNA, 25 bp, Homo sapien
gaaagacctggtggccaaaatactc

SEQ ID NO: 2723577 - DNA, 25 bp, Homo sapien
ggtaaggcatctccccaaattggaa

SEQ ID NO: 2723578 - DNA, 25 bp, Homo sapien
cacaatcaatgaggaacaataacgc

SEQ ID NO: 2723579 - DNA, 25 bp, Homo sapien
ccctgagcacagatgttgagtcgtc

SEQ ID NO: 2723580 - DNA, 25 bp, Homo sapien
tgttgagtcgtcatatgatgaatcc

SEQ ID NO: 2723581 - DNA, 25 bp, Homo sapien
gaaatggaatatagtagacggagcc

SEQ ID NO: 2723582 - DNA, 25 bp, Homo sapien
acatcatacctattcatattgccag

SEQ ID NO: 2723583 - DNA, 25 bp, Homo sapien
tggacatcatacctattcatattgc

SEQ ID NO: 2723584 - DNA, 25 bp, Homo sapien
tctggacatcatacctattcatatt

SEQ ID NO: 2723585 - DNA, 25 bp, Homo sapien
cttctggacatcatacctattcata

SEQ ID NO: 2723586 - DNA, 25 bp, Homo sapien
aacagccccagccatttaacttgct

SEQ ID NO: 2723587 - DNA, 25 bp, Homo sapien
gtgccatcttggagatatttgtgtt

SEQ ID NO: 2723588 - DNA, 25 bp, Homo sapien
tgctttttgtaagtgccatcttgga

SEQ ID NO: 2723589 - DNA, 25 bp, Homo sapien
cagtaggccattgttgatgcttgca

SEQ ID NO: 2723590 - DNA, 25 bp, Homo sapien
tgaggccccaggatacacttttccc

SEQ ID NO: 2723591 - DNA, 25 bp, Homo sapien
aatgtagtctaaccaggtatccagc

SEQ ID NO: 2723592 - DNA, 25 bp, Homo sapien
tgttataaagtaagagaagctgcca

SEQ ID NO: 2723593 - DNA, 25 bp, Homo sapien
gcaaaatcctattaccacagggaag

SEQ ID NO: 2723594 - DNA, 25 bp, Homo sapien
gagagggatctttccagtagcagct

SEQ ID NO: 2723595 - DNA, 25 bp, Homo sapien
gatcactttgccagggcagttttct

SEQ ID NO: 2723596 - DNA, 25 bp, Homo sapien
ttgcaaagacatagcacctgataat

SEQ ID NO: 2723597 - DNA, 25 bp, Homo sapien
acatagcacctgataattgatcttc

SEQ ID NO: 2723598 - DNA, 25 bp, Homo sapien
tttcttctttcctctccagaagatt

SEQ ID NO: 2723599 - DNA, 25 bp, Homo sapien
gtttcttctttcctctccagaagat

SEQ ID NO: 2723600 - DNA, 25 bp, Homo sapien
ggtttcttctttcctctccagaaga

SEQ ID NO: 2723601 - DNA, 25 bp, Homo sapien
gtcttccctgggtctttccagcacc

SEQ ID NO: 2723602 - DNA, 25 bp, Homo sapien
ctgtgtcttccctgggtctttccag

SEQ ID NO: 2723603 - DNA, 25 bp, Homo sapien
gtctttccagcaccttgtctagaca

SEQ ID NO: 2723604 - DNA, 25 bp, Homo sapien
tctttccagcaccttgtctagacat

SEQ ID NO: 2723605 - DNA, 25 bp, Homo sapien
cagactgcagatttggccttagaca

SEQ ID NO: 2723606 - DNA, 25 bp, Homo sapien
aaatagacaaagttcatccatacag

SEQ ID NO: 2723607 - DNA, 25 bp, Homo sapien
tatttaccaagagggaaaactagca

SEQ ID NO: 2723608 - DNA, 25 bp, Homo sapien
ataacatgcggtgggaccagactgc

SEQ ID NO: 2723609 - DNA, 25 bp, Homo sapien
tcagaagaaagtggtgaacccttag

SEQ ID NO: 2723610 - DNA, 25 bp, Homo sapien
ctaaagacctagcacaagatttgag

SEQ ID NO: 2723611 - DNA, 25 bp, Homo sapien
agaaagtggtgaacccttagggcag

SEQ ID NO: 2723612 - DNA, 25 bp, Homo sapien
cctaaagacctagcacaagatttga

SEQ ID NO: 2723613 - DNA, 25 bp, Homo sapien
cacatacaccctcccaaggccaaac

SEQ ID NO: 2723614 - DNA, 25 bp, Homo sapien
aggctccgaaattgaggcaataatt

SEQ ID NO: 2723615 - DNA, 25 bp, Homo sapien
gacacatacaccctcccaaggccaa

SEQ ID NO: 2723616 - DNA, 25 bp, Homo sapien
atacaccctcccaaggccaaaccag

SEQ ID NO: 2723617 - DNA, 25 bp, Homo sapien
tgcaaagccaaaagtcaatatgatg

SEQ ID NO: 2723618 - DNA, 25 bp, Homo sapien
aacaatgaggtagaggcgtgcccat

SEQ ID NO: 2723619 - DNA, 25 bp, Homo sapien
tcactgaactacatggaaacggaac

SEQ ID NO: 2723620 - DNA, 25 bp, Homo sapien
tagctacggtaagacactggaaaaa

SEQ ID NO: 2723621 - DNA, 25 bp, Homo sapien
tagctttaataactgcagcttgatt

SEQ ID NO: 2723622 - DNA, 25 bp, Homo sapien
ctttaataactgcagcttgattaga

SEQ ID NO: 2723623 - DNA, 25 bp, Homo sapien
tcaggtcttttattctagctttaat

SEQ ID NO: 2723624 - DNA, 25 bp, Homo sapien
caggtcttttattctagctttaata

SEQ ID NO: 2723625 - DNA, 25 bp, Homo sapien
tgcatggtaccatgccgggtcccat

SEQ ID NO: 2723626 - DNA, 25 bp, Homo sapien
agtgcatatggggtgcatggtacca

SEQ ID NO: 2723627 - DNA, 25 bp, Homo sapien
ttccaattaatactttgagtgcata

SEQ ID NO: 2723628 - DNA, 25 bp, Homo sapien
gaggttgatcattgtcattatttcc

SEQ ID NO: 2723629 - DNA, 25 bp, Homo sapien
cggatcctggaaagttttgtatgcc

SEQ ID NO: 2723630 - DNA, 25 bp, Homo sapien
tcagacggatcctggaaagttttgt

SEQ ID NO: 2723631 - DNA, 25 bp, Homo sapien
gaaagttttgtatgccacgtccaca

SEQ ID NO: 2723632 - DNA, 25 bp, Homo sapien
ctttcaccccattggcttgttcctg

SEQ ID NO: 2723633 - DNA, 25 bp, Homo sapien
caaaagatttagctgatccccactc

SEQ ID NO: 2723634 - DNA, 25 bp, Homo sapien
aacaaaagatttagctgatccccac

SEQ ID NO: 2723635 - DNA, 25 bp, Homo sapien
tcatgcgcatttaaacgctttgtca

SEQ ID NO: 2723636 - DNA, 25 bp, Homo sapien
acgctttgtcaaagactgaaagaga

SEQ ID NO: 2723637 - DNA, 25 bp, Homo sapien
gtttgattcatctctcacctgcatt

SEQ ID NO: 2723638 - DNA, 25 bp, Homo sapien
ttgtttgattcatctctcacctgca

SEQ ID NO: 2723639 - DNA, 25 bp, Homo sapien
tgtttgattcatctctcacctgcat

SEQ ID NO: 2723640 - DNA, 25 bp, Homo sapien
tgtagaaccagtgggagacctgagt

SEQ ID NO: 2723641 - DNA, 25 bp, Homo sapien
agtttgttttccagcaactggatga

SEQ ID NO: 2723642 - DNA, 25 bp, Homo sapien
gaaccagtgggagacctgagtttgt

SEQ ID NO: 2723643 - DNA, 25 bp, Homo sapien
ttttccagcaactggatgatcccat

SEQ ID NO: 2723644 - DNA, 25 bp, Homo sapien
caccaaaaggcagcacggtgagtag

SEQ ID NO: 2723645 - DNA, 25 bp, Homo sapien
ttcctggagcaccaaaaggcagcac

SEQ ID NO: 2723646 - DNA, 25 bp, Homo sapien
accaaaaggcagcacggtgagtagg

SEQ ID NO: 2723647 - DNA, 25 bp, Homo sapien
aagcagctggctaccgttcagcctg

SEQ ID NO: 2723648 - DNA, 25 bp, Homo sapien
gctggctaccgttcagcctgctgtc

SEQ ID NO: 2723649 - DNA, 25 bp, Homo sapien
tggctaccgttcagcctgctgtctg

SEQ ID NO: 2723650 - DNA, 25 bp, Homo sapien
cagctggctaccgttcagcctgctg

SEQ ID NO: 2723651 - DNA, 25 bp, Homo sapien
gacactgcttaaaaggacttgcaag

SEQ ID NO: 2723652 - DNA, 25 bp, Homo sapien
gtgcttttatttgtctctctaccca

SEQ ID NO: 2723653 - DNA, 25 bp, Homo sapien
agtggtctcctatgggtattcctgg

SEQ ID NO: 2723654 - DNA, 25 bp, Homo sapien
tggtatttagagtttagtggtctcc

SEQ ID NO: 2723655 - DNA, 25 bp, Homo sapien
gataaaccgctgtgtcatagaaggc

SEQ ID NO: 2723656 - DNA, 25 bp, Homo sapien
aaaccgctgtgtcatagaaggcccc

SEQ ID NO: 2723657 - DNA, 25 bp, Homo sapien
ccaaactgtactccttctgatctcc

SEQ ID NO: 2723658 - DNA, 25 bp, Homo sapien
ctagataaaccgctgtgtcatagaa

SEQ ID NO: 2723659 - DNA, 25 bp, Homo sapien
catttgggtggaggatatcggaatt

SEQ ID NO: 2723660 - DNA, 25 bp, Homo sapien
tatttggagcactgatgctgaatta

SEQ ID NO: 2723661 - DNA, 25 bp, Homo sapien
agtatttggagcactgatgctgaat

SEQ ID NO: 2723662 - DNA, 25 bp, Homo sapien
gaggatatcggaattcagtggtttc

SEQ ID NO: 2723663 - DNA, 25 bp, Homo sapien
gcaatccacttctccgctatgcatg

SEQ ID NO: 2723664 - DNA, 25 bp, Homo sapien
tccgctatgcatgggcgtcactttc

SEQ ID NO: 2723665 - DNA, 25 bp, Homo sapien
acttctccgctatgcatgggcgtca

SEQ ID NO: 2723666 - DNA, 25 bp, Homo sapien
gcatgggcgtcactttctccaatct

SEQ ID NO: 2723667 - DNA, 25 bp, Homo sapien
tttgagtcagcatcctcgttgttga

SEQ ID NO: 2723668 - DNA, 25 bp, Homo sapien
atcctcgttgttgaataaggtgttt

SEQ ID NO: 2723669 - DNA, 25 bp, Homo sapien
tgcttttgagtcagcatcctcgttg

SEQ ID NO: 2723670 - DNA, 25 bp, Homo sapien
gatgtagttgcactcttttatgtta

SEQ ID NO: 2723671 - DNA, 25 bp, Homo sapien
aataactgaagtgctaaagtatatt

SEQ ID NO: 2723672 - DNA, 25 bp, Homo sapien
caataactgaagtgctaaagtatat

SEQ ID NO: 2723673 - DNA, 25 bp, Homo sapien
agcctgggtgacagagtgagactcc

SEQ ID NO: 2723674 - DNA, 25 bp, Homo sapien
gtgaaggttgcagggagccgagacc

SEQ ID NO: 2723675 - DNA, 25 bp, Homo sapien
gaaggttgcagggagccgagaccgt

SEQ ID NO: 2723676 - DNA, 25 bp, Homo sapien
accgtgccattgcactccagcctgg

SEQ ID NO: 2723677 - DNA, 25 bp, Homo sapien
atcgcttgaacccggggggcagagg

SEQ ID NO: 2723678 - DNA, 25 bp, Homo sapien
ctcgggaggctgagggaagaaaatc

SEQ ID NO: 2723679 - DNA, 25 bp, Homo sapien
tgcactccagtctgggcaacaagag

SEQ ID NO: 2723680 - DNA, 25 bp, Homo sapien
ttgtagtgagccgagatcgcgccat

SEQ ID NO: 2723681 - DNA, 25 bp, Homo sapien
tctccataggatgtcaacaataaag

SEQ ID NO: 2723682 - DNA, 25 bp, Homo sapien
aatttccatagcatcagaacatttt

SEQ ID NO: 2723683 - DNA, 25 bp, Homo sapien
gaagcatccgatcatcatggaaaca

SEQ ID NO: 2723684 - DNA, 25 bp, Homo sapien
ctacatatcgagtctccataggatg

SEQ ID NO: 2723685 - DNA, 25 bp, Homo sapien
ataatgggaacctgtgatctggatc

SEQ ID NO: 2723686 - DNA, 25 bp, Homo sapien
caagttgagaacacattgcaagtag

SEQ ID NO: 2723687 - DNA, 25 bp, Homo sapien
cacattgcaagtagatggcatcatt

SEQ ID NO: 2723688 - DNA, 25 bp, Homo sapien
gatctggatctttacaatcagaaga

SEQ ID NO: 2723689 - DNA, 25 bp, Homo sapien
aaatatgtgaggtgggttaatcccg

SEQ ID NO: 2723690 - DNA, 25 bp, Homo sapien
ttttcagaggatccggcaagatggc

SEQ ID NO: 2723691 - DNA, 25 bp, Homo sapien
gacatgtcctttgagcagctgaggc

SEQ ID NO: 2723692 - DNA, 25 bp, Homo sapien
gaaggactctggcacttacggaatc

SEQ ID NO: 2723693 - DNA, 25 bp, Homo sapien
ctacttccgagatgcacagataata

SEQ ID NO: 2723694 - DNA, 25 bp, Homo sapien
tctggatcactacttccgagatgca

SEQ ID NO: 2723695 - DNA, 25 bp, Homo sapien
tcactacttccgagatgcacagata

SEQ ID NO: 2723696 - DNA, 25 bp, Homo sapien
ggatcactacttccgagatgcacag

SEQ ID NO: 2723697 - DNA, 25 bp, Homo sapien
tctcttgttgcatatttagggtctg

SEQ ID NO: 2723698 - DNA, 25 bp, Homo sapien
tgatggtcactttctcttgttgcat

SEQ ID NO: 2723699 - DNA, 25 bp, Homo sapien
ttgttgcatatttagggtctgccat

SEQ ID NO: 2723700 - DNA, 25 bp, Homo sapien
tcttgttgcatatttagggtctgcc

SEQ ID NO: 2723701 - DNA, 25 bp, Homo sapien
catctttcagtcctataaaatgaat

SEQ ID NO: 2723702 - DNA, 25 bp, Homo sapien
tgacaaagtgctgtgtggttccatt

SEQ ID NO: 2723703 - DNA, 25 bp, Homo sapien
gttccttgactttggtcctcaatca

SEQ ID NO: 2723704 - DNA, 25 bp, Homo sapien
tggtcctcaatcaaagtctttgcac

SEQ ID NO: 2723705 - DNA, 25 bp, Homo sapien
tgtttttctggctggaatacttttc

SEQ ID NO: 2723706 - DNA, 25 bp, Homo sapien
gttcattaggcctcagtgacagcag

SEQ ID NO: 2723707 - DNA, 25 bp, Homo sapien
tagaccaacatctgtctctagaatt

SEQ ID NO: 2723708 - DNA, 25 bp, Homo sapien
acacaagaatcttagaccaacatct

SEQ ID NO: 2723709 - DNA, 25 bp, Homo sapien
caagaatcttagaccaacatctgtc

SEQ ID NO: 2723710 - DNA, 25 bp, Homo sapien
gaatcttagaccaacatctgtctct

SEQ ID NO: 2723711 - DNA, 25 bp, Homo sapien
gcctgccccatgctataaaaataag

SEQ ID NO: 2723712 - DNA, 25 bp, Homo sapien
gccaacctgggtaatgatgtctctc

SEQ ID NO: 2723713 - DNA, 25 bp, Homo sapien
aatattacagccaggaaccgatgct

SEQ ID NO: 2723714 - DNA, 25 bp, Homo sapien
gtatcattaaatcgggctcccaggt

SEQ ID NO: 2723715 - DNA, 25 bp, Homo sapien
taaccaagaatgataggtgtaggag

SEQ ID NO: 2723716 - DNA, 25 bp, Homo sapien
gtaaccaagaatgataggtgtagga

SEQ ID NO: 2723717 - DNA, 25 bp, Homo sapien
ggcagtaaccaagaatgataggtgt

SEQ ID NO: 2723718 - DNA, 25 bp, Homo sapien
cagtaaccaagaatgataggtgtag

SEQ ID NO: 2723719 - DNA, 25 bp, Homo sapien
caggtcccaattttttcgaggatgg

SEQ ID NO: 2723720 - DNA, 25 bp, Homo sapien
gaagggttgaactcatcccaggtcc

SEQ ID NO: 2723721 - DNA, 25 bp, Homo sapien
gagtttctaacctatgcctgctaca

SEQ ID NO: 2723722 - DNA, 25 bp, Homo sapien
ttttcctaagagcattgagcaaccc

SEQ ID NO: 2723723 - DNA, 25 bp, Homo sapien
gcacccttggcagtgactatagctt

SEQ ID NO: 2723724 - DNA, 25 bp, Homo sapien
ccttggcagtgactatagcttctac

SEQ ID NO: 2723725 - DNA, 25 bp, Homo sapien
aacaagcacccttggcagtgactat

SEQ ID NO: 2723726 - DNA, 25 bp, Homo sapien
tggcagtgactatagcttctactgc

SEQ ID NO: 2723727 - DNA, 25 bp, Homo sapien
ttattaaagcttccctgcagagtcc

SEQ ID NO: 2723728 - DNA, 25 bp, Homo sapien
tagcagaacactaaccacaaactag

SEQ ID NO: 2723729 - DNA, 25 bp, Homo sapien
gaagtatattccactaatagcagga

SEQ ID NO: 2723730 - DNA, 25 bp, Homo sapien
gataacttctcagctatttaaatgt

SEQ ID NO: 2723731 - DNA, 25 bp, Homo sapien
tattaactctgctgcatgtgtagaa

SEQ ID NO: 2723732 - DNA, 25 bp, Homo sapien
tatctccatggattgcagcacagca

SEQ ID NO: 2723733 - DNA, 25 bp, Homo sapien
caattgaaatccattccatgagagt

SEQ ID NO: 2723734 - DNA, 25 bp, Homo sapien
tgtaaagaaagactaggatgtggtg

SEQ ID NO: 2723735 - DNA, 25 bp, Homo sapien
ccaccgtgcccgagctggactgcat

SEQ ID NO: 2723736 - DNA, 25 bp, Homo sapien
caccgtgcccgagctggactgcatt

SEQ ID NO: 2723737 - DNA, 25 bp, Homo sapien
caagaggtgccaatcacggacaacc

SEQ ID NO: 2723738 - DNA, 25 bp, Homo sapien
atcaagaggtgccaatcacggacaa

SEQ ID NO: 2723739 - DNA, 25 bp, Homo sapien
aggtgccaatcacggacaacccaag

SEQ ID NO: 2723740 - DNA, 25 bp, Homo sapien
tgccaatcacggacaacccaagggc

SEQ ID NO: 2723741 - DNA, 25 bp, Homo sapien
agccacttcacctagcctgatgctc

SEQ ID NO: 2723742 - DNA, 25 bp, Homo sapien
gccacttcacctagcctgatgctct

SEQ ID NO: 2723743 - DNA, 25 bp, Homo sapien
tggctatcgttttaattttgttgta

SEQ ID NO: 2723744 - DNA, 25 bp, Homo sapien
ctggctatcgttttaattttgttgt

SEQ ID NO: 2723745 - DNA, 25 bp, Homo sapien
ctgggaaagctgtaacaattggtcc

SEQ ID NO: 2723746 - DNA, 25 bp, Homo sapien
aaagctgtaacaattggtccacctg

SEQ ID NO: 2723747 - DNA, 25 bp, Homo sapien
aggctccaggtctatcactggaacc

SEQ ID NO: 2723748 - DNA, 25 bp, Homo sapien
ggtctatcactggaacccgaaccca

SEQ ID NO: 2723749 - DNA, 25 bp, Homo sapien
ggatgacctggcctcggtataccat

SEQ ID NO: 2723750 - DNA, 25 bp, Homo sapien
ggtataccatatacaggacctgcca

SEQ ID NO: 2723751 - DNA, 25 bp, Homo sapien
tgaggacatcaagtccaggtgttgc

SEQ ID NO: 2723752 - DNA, 25 bp, Homo sapien
acctgtagagtatattccgatacat

SEQ ID NO: 2723753 - DNA, 25 bp, Homo sapien
tatttctcagcgtgaagagtggagt

SEQ ID NO: 2723754 - DNA, 25 bp, Homo sapien
tccacgtttaagctgttgctttaaa

SEQ ID NO: 2723755 - DNA, 25 bp, Homo sapien
tgatatttctcagcgtgaagagtgg

SEQ ID NO: 2723756 - DNA, 25 bp, Homo sapien
tgttgatatttctcagcgtgaagag

SEQ ID NO: 2723757 - DNA, 25 bp, Homo sapien
cttagataaattcccgaaagatgat

SEQ ID NO: 2723758 - DNA, 25 bp, Homo sapien
gataaattcccgaaagatgatttcc

SEQ ID NO: 2723759 - DNA, 25 bp, Homo sapien
cttcttagataaattcccgaaagat

SEQ ID NO: 2723760 - DNA, 25 bp, Homo sapien
agataaattcccgaaagatgatttc

SEQ ID NO: 2723761 - DNA, 25 bp, Homo sapien
gagtaagttggaagtagagaatcaa

SEQ ID NO: 2723762 - DNA, 25 bp, Homo sapien
ttttcttcacgtcattttaacaatc

SEQ ID NO: 2723763 - DNA, 25 bp, Homo sapien
tgttagaggtatcaaatgcacatga

SEQ ID NO: 2723764 - DNA, 25 bp, Homo sapien
gaatcaattatccagcctcatatcc

SEQ ID NO: 2723765 - DNA, 25 bp, Homo sapien
tttaaccagagtcaatgttgccctg

SEQ ID NO: 2723766 - DNA, 25 bp, Homo sapien
ttcctcacagttgagtctccaagcg

SEQ ID NO: 2723767 - DNA, 25 bp, Homo sapien
gttgccctgtcttcctttacatttg

SEQ ID NO: 2723768 - DNA, 25 bp, Homo sapien
ttcaatctcccttaaagaacactgg

SEQ ID NO: 2723769 - DNA, 25 bp, Homo sapien
cactgccgtactgtctaaaactaaa

SEQ ID NO: 2723770 - DNA, 25 bp, Homo sapien
caggtagtgtagtgctctgacttcc

SEQ ID NO: 2723771 - DNA, 25 bp, Homo sapien
tgtcattgagtttgcctatctgtgg

SEQ ID NO: 2723772 - DNA, 25 bp, Homo sapien
taatcacttattacttccagaaggg

SEQ ID NO: 2723773 - DNA, 25 bp, Homo sapien
tattaaagcaatagaggcaacctcg

SEQ ID NO: 2723774 - DNA, 25 bp, Homo sapien
caagctttgtcaggaattgttgaga

SEQ ID NO: 2723775 - DNA, 25 bp, Homo sapien
ggtaggcagattcacaacaacagca

SEQ ID NO: 2723776 - DNA, 25 bp, Homo sapien
tgttgagagattgaaagcatactta

SEQ ID NO: 2723777 - DNA, 25 bp, Homo sapien
ctctttgataaattctggttatttg

SEQ ID NO: 2723778 - DNA, 25 bp, Homo sapien
ggtactcaggaagtaatgcagaata

SEQ ID NO: 2723779 - DNA, 25 bp, Homo sapien
taaatccttattgcctggtgaaaga

SEQ ID NO: 2723780 - DNA, 25 bp, Homo sapien
tatgctgattaaagacagggattgt

SEQ ID NO: 2723781 - DNA, 25 bp, Homo sapien
gaaaagccaagcctacagagacgat

SEQ ID NO: 2723782 - DNA, 25 bp, Homo sapien
tgtgcctttcatactctgactctaa

SEQ ID NO: 2723783 - DNA, 25 bp, Homo sapien
gcaaaactccataacaattttcttc

SEQ ID NO: 2723784 - DNA, 25 bp, Homo sapien
cctttcatactctgactctaaagca

SEQ ID NO: 2723785 - DNA, 25 bp, Homo sapien
tctgtgcctttcatactctgactct

SEQ ID NO: 2723786 - DNA, 25 bp, Homo sapien
caagaagtgtgtcggcatgtattgc

SEQ ID NO: 2723787 - DNA, 25 bp, Homo sapien
tcaagaagtgtgtcggcatgtattg

SEQ ID NO: 2723788 - DNA, 25 bp, Homo sapien
aagaagtgtgtcggcatgtattgcc

SEQ ID NO: 2723789 - DNA, 25 bp, Homo sapien
gtagaaaagcaatgtccgactggtt

SEQ ID NO: 2723790 - DNA, 25 bp, Homo sapien
tctcaacggagaagttaaccatatt

SEQ ID NO: 2723791 - DNA, 25 bp, Homo sapien
tacctttctctgtggtataaacaag

SEQ ID NO: 2723792 - DNA, 25 bp, Homo sapien
tatagagttcacataactatgccca

SEQ ID NO: 2723793 - DNA, 25 bp, Homo sapien
tcaaccatccactaacaagcagtga

SEQ ID NO: 2723794 - DNA, 25 bp, Homo sapien
caaaaggacaatttcatgtagagag

SEQ ID NO: 2723795 - DNA, 25 bp, Homo sapien
catcgccaccgattatgagacatac

SEQ ID NO: 2723796 - DNA, 25 bp, Homo sapien
gctctgcagagttgttccactgata

SEQ ID NO: 2723797 - DNA, 25 bp, Homo sapien
ggcaggaagattgcttaagcacagg

SEQ ID NO: 2723798 - DNA, 25 bp, Homo sapien
aggaagattgcttaagcacaggagt

SEQ ID NO: 2723799 - DNA, 25 bp, Homo sapien
ccatataatctcagaactttgggag

SEQ ID NO: 2723800 - DNA, 25 bp, Homo sapien
gccaaggcaggaagattgcttaagc

SEQ ID NO: 2723801 - DNA, 25 bp, Homo sapien
ggtaaccaattatcttcagtctgta

SEQ ID NO: 2723802 - DNA, 25 bp, Homo sapien
ttctagatgggtaaccaattatctt

SEQ ID NO: 2723803 - DNA, 25 bp, Homo sapien
tcagtctgtatttctctccaatgca

SEQ ID NO: 2723804 - DNA, 25 bp, Homo sapien
gatgggtaaccaattatcttcagtc

SEQ ID NO: 2723805 - DNA, 25 bp, Homo sapien
aatttgcatgttaagagctaataca

SEQ ID NO: 2723806 - DNA, 25 bp, Homo sapien
tattacaaagtaaagtccagttgtg

SEQ ID NO: 2723807 - DNA, 25 bp, Homo sapien
ccatcaaatgcccactgaaaaatga

SEQ ID NO: 2723808 - DNA, 25 bp, Homo sapien
tcctgattaatgtctggtgcacaat

SEQ ID NO: 2723809 - DNA, 25 bp, Homo sapien
ttactgcaggtcttacccccagact

SEQ ID NO: 2723810 - DNA, 25 bp, Homo sapien
aattactgcaggtcttacccccaga

SEQ ID NO: 2723811 - DNA, 25 bp, Homo sapien
gaaattactgcaggtcttaccccca

SEQ ID NO: 2723812 - DNA, 25 bp, Homo sapien
tactgcaggtcttacccccagactt

SEQ ID NO: 2723813 - DNA, 25 bp, Homo sapien
ctgttactgctcagatgtaccatac

SEQ ID NO: 2723814 - DNA, 25 bp, Homo sapien
tacatttcaatgagtcataaaggct

SEQ ID NO: 2723815 - DNA, 25 bp, Homo sapien
ccgtgaatctatataggaatgacct

SEQ ID NO: 2723816 - DNA, 25 bp, Homo sapien
tgggtctctagaagtgatacatttc

SEQ ID NO: 2723817 - DNA, 25 bp, Homo sapien
tgagtatcaatctcagatgggtctc

SEQ ID NO: 2723818 - DNA, 25 bp, Homo sapien
gactgccccaacttactagggtaca

SEQ ID NO: 2723819 - DNA, 25 bp, Homo sapien
gatagaagcgcagcataacgtgaaa

SEQ ID NO: 2723820 - DNA, 25 bp, Homo sapien
gaatcagaacctctcatctagtgct

SEQ ID NO: 2723821 - DNA, 25 bp, Homo sapien
cctcccagagtagctaatgatagaa

SEQ ID NO: 2723822 - DNA, 25 bp, Homo sapien
ctctgaccaggttctttacttgaaa

SEQ ID NO: 2723823 - DNA, 25 bp, Homo sapien
actctgaccaggttctttacttgaa

SEQ ID NO: 2723824 - DNA, 25 bp, Homo sapien
tctgaccaggttctttacttgaaat

SEQ ID NO: 2723825 - DNA, 25 bp, Homo sapien
tctgccttatctgcaatatggaaca

SEQ ID NO: 2723826 - DNA, 25 bp, Homo sapien
tgccttatctgcaatatggaacaaa

SEQ ID NO: 2723827 - DNA, 25 bp, Homo sapien
ttatctgcaatatggaacaaaaacc

SEQ ID NO: 2723828 - DNA, 25 bp, Homo sapien
gccttatctgcaatatggaacaaaa

SEQ ID NO: 2723829 - DNA, 25 bp, Homo sapien
gcttggtggcttgctccaattgata

SEQ ID NO: 2723830 - DNA, 25 bp, Homo sapien
gcattcttacacttcacttcaattt

SEQ ID NO: 2723831 - DNA, 25 bp, Homo sapien
tttgtgagggcacaaaagttcacaa

SEQ ID NO: 2723832 - DNA, 25 bp, Homo sapien
tatttatagccaaaagcattcttac

SEQ ID NO: 2723833 - DNA, 25 bp, Homo sapien
gatatttttatgtcacggaagagca

SEQ ID NO: 2723834 - DNA, 25 bp, Homo sapien
gctggatatttttatgtcacggaag

SEQ ID NO: 2723835 - DNA, 25 bp, Homo sapien
catacagctggatatttttatgtca

SEQ ID NO: 2723836 - DNA, 25 bp, Homo sapien
cagctggatatttttatgtcacgga

SEQ ID NO: 2723837 - DNA, 25 bp, Homo sapien
ggccaagcttgttgtaagacattca

SEQ ID NO: 2723838 - DNA, 25 bp, Homo sapien
tgtatccaacgtttgctcatctggc

SEQ ID NO: 2723839 - DNA, 25 bp, Homo sapien
tgaattggcaagatctttctagccc

SEQ ID NO: 2723840 - DNA, 25 bp, Homo sapien
taaagctaactggatctggcacggg

SEQ ID NO: 2723841 - DNA, 25 bp, Homo sapien
tcctacacaatgactgaggtggccc

SEQ ID NO: 2723842 - DNA, 25 bp, Homo sapien
gggctatctccgtctccatgtttca

SEQ ID NO: 2723843 - DNA, 25 bp, Homo sapien
caggctagaagcatactcctgtgct

SEQ ID NO: 2723844 - DNA, 25 bp, Homo sapien
tggcccggtcaaagtcacgggctat

SEQ ID NO: 2723845 - DNA, 25 bp, Homo sapien
cagtagcggcttggtatggcaacag

SEQ ID NO: 2723846 - DNA, 25 bp, Homo sapien
gacggtattaaagcatgtccagaca

SEQ ID NO: 2723847 - DNA, 25 bp, Homo sapien
tttagctaatgagaccgggaaaggc

SEQ ID NO: 2723848 - DNA, 25 bp, Homo sapien
ccagcagggtatacttgggcattca

SEQ ID NO: 2723849 - DNA, 25 bp, Homo sapien
tttctcctcgtccaagatctgcttc

SEQ ID NO: 2723850 - DNA, 25 bp, Homo sapien
tcctcgtccaagatctgcttcttgc

SEQ ID NO: 2723851 - DNA, 25 bp, Homo sapien
ctttctcctcgtccaagatctgctt

SEQ ID NO: 2723852 - DNA, 25 bp, Homo sapien
tcgtccaagatctgcttcttgcctc

SEQ ID NO: 2723853 - DNA, 25 bp, Homo sapien
gctctaaacaaagacaggcacagtt

SEQ ID NO: 2723854 - DNA, 25 bp, Homo sapien
ccgtttcggcaaaaataggcacagc

SEQ ID NO: 2723855 - DNA, 25 bp, Homo sapien
tcatgtaaaagacacccgtttcggc

SEQ ID NO: 2723856 - DNA, 25 bp, Homo sapien
caagatttctggctcatagcagtag

SEQ ID NO: 2723857 - DNA, 25 bp, Homo sapien
tgttctatggtcatgcaaagcctga

SEQ ID NO: 2723858 - DNA, 25 bp, Homo sapien
tgatgtaagcacaaaatatgatcgc

SEQ ID NO: 2723859 - DNA, 25 bp, Homo sapien
gatactgttggctatggcagctgtg

SEQ ID NO: 2723860 - DNA, 25 bp, Homo sapien
cacaaaatatgatcgcatctagttg

SEQ ID NO: 2723861 - DNA, 25 bp, Homo sapien
gaatggacagaaaagatatggtaaa

SEQ ID NO: 2723862 - DNA, 25 bp, Homo sapien
tccttctattagctcgactttgttg

SEQ ID NO: 2723863 - DNA, 25 bp, Homo sapien
gaaagactaacttctagcttgtctg

SEQ ID NO: 2723864 - DNA, 25 bp, Homo sapien
gcctgacttcctttttgttagctca

SEQ ID NO: 2723865 - DNA, 25 bp, Homo sapien
tgctcctgagccaaaacagctttgc

SEQ ID NO: 2723866 - DNA, 25 bp, Homo sapien
gaacagcagacttgtggaccttatc

SEQ ID NO: 2723867 - DNA, 25 bp, Homo sapien
ccttagtttgcgcagtggtggaaag

SEQ ID NO: 2723868 - DNA, 25 bp, Homo sapien
gagtgcaattattcctcaagtcctt

SEQ ID NO: 2723869 - DNA, 25 bp, Homo sapien
tcctgttatggagacccaaaggcag

SEQ ID NO: 2723870 - DNA, 25 bp, Homo sapien
catagaagatcagtgtaacgtccat

SEQ ID NO: 2723871 - DNA, 25 bp, Homo sapien
taaatatttaaccagtggcaggagg

SEQ ID NO: 2723872 - DNA, 25 bp, Homo sapien
ttagcaaagattaggtactgtgacc

SEQ ID NO: 2723873 - DNA, 25 bp, Homo sapien
ttttgtggcaaaatcgatcctgacc

SEQ ID NO: 2723874 - DNA, 25 bp, Homo sapien
cctgctagttatacaagaattattt

SEQ ID NO: 2723875 - DNA, 25 bp, Homo sapien
ttccaatacatacttttgtggcagt

SEQ ID NO: 2723876 - DNA, 25 bp, Homo sapien
tgacctcaacctatctcgcatatag

SEQ ID NO: 2723877 - DNA, 25 bp, Homo sapien
attccaggctcattccagacagcat

SEQ ID NO: 2723878 - DNA, 25 bp, Homo sapien
caaacgaccagtcaaagccatcctc

SEQ ID NO: 2723879 - DNA, 25 bp, Homo sapien
tcaaagccatcctcaattccaggct

SEQ ID NO: 2723880 - DNA, 25 bp, Homo sapien
tcctcaattccaggctcattccaga

SEQ ID NO: 2723881 - DNA, 25 bp, Homo sapien
taattaatatctcgtactggttcag

SEQ ID NO: 2723882 - DNA, 25 bp, Homo sapien
gaaggcatctgtccataatgaatgg

SEQ ID NO: 2723883 - DNA, 25 bp, Homo sapien
tcagtagaaaagtgaagatacggtt

SEQ ID NO: 2723884 - DNA, 25 bp, Homo sapien
cagactcattcattgctatcggagc

SEQ ID NO: 2723885 - DNA, 25 bp, Homo sapien
atccattgccgataggaaattaagc

SEQ ID NO: 2723886 - DNA, 25 bp, Homo sapien
ttaagcttggagtgacaaagtgcgc

SEQ ID NO: 2723887 - DNA, 25 bp, Homo sapien
tggagtgacaaagtgcgctctccat

SEQ ID NO: 2723888 - DNA, 25 bp, Homo sapien
gataggaaattaagcttggagtgac

SEQ ID NO: 2723889 - DNA, 25 bp, Homo sapien
aactgcgtcccaagatcaccactag

SEQ ID NO: 2723890 - DNA, 25 bp, Homo sapien
caagatcaccactagttgcaaaggc

SEQ ID NO: 2723891 - DNA, 25 bp, Homo sapien
ccactagttgcaaaggcgaatgtca

SEQ ID NO: 2723892 - DNA, 25 bp, Homo sapien
caaaggcgaatgtcaaagcaggaaa

SEQ ID NO: 2723893 - DNA, 25 bp, Homo sapien
caggcatcttgcagccttactcatg

SEQ ID NO: 2723894 - DNA, 25 bp, Homo sapien
ctgttccaaccccatggttattgac

SEQ ID NO: 2723895 - DNA, 25 bp, Homo sapien
tccagaaatgcgttcccacactgtt

SEQ ID NO: 2723896 - DNA, 25 bp, Homo sapien
ataggatctgagaatctctccagaa

SEQ ID NO: 2723897 - DNA, 25 bp, Homo sapien
aaacagacctctttgttcccataat

SEQ ID NO: 2723898 - DNA, 25 bp, Homo sapien
aacagacctctttgttcccataata

SEQ ID NO: 2723899 - DNA, 25 bp, Homo sapien
tgccccaatttgatagaatgcttga

SEQ ID NO: 2723900 - DNA, 25 bp, Homo sapien
gcagcaacatcatactaaaggagaa

SEQ ID NO: 2723901 - DNA, 25 bp, Homo sapien
cttctacatcaaccagagaggcttt

SEQ ID NO: 2723902 - DNA, 25 bp, Homo sapien
gaagctccggtgaaagcagcagcaa

SEQ ID NO: 2723903 - DNA, 25 bp, Homo sapien
attaatagactaattattgcaatca

SEQ ID NO: 2723904 - DNA, 25 bp, Homo sapien
attattgcaatcataagcctgacag

SEQ ID NO: 2723905 - DNA, 25 bp, Homo sapien
gatacaataataggatataagatac

SEQ ID NO: 2723906 - DNA, 25 bp, Homo sapien
tcataagcctgacagcagactgtca

SEQ ID NO: 2723907 - DNA, 25 bp, Homo sapien
gatgcacttagggtgactggtccag

SEQ ID NO: 2723908 - DNA, 25 bp, Homo sapien
tctgctctacgagtgcatactgatg

SEQ ID NO: 2723909 - DNA, 25 bp, Homo sapien
gaatattccagatgtccagagtgtc

SEQ ID NO: 2723910 - DNA, 25 bp, Homo sapien
ccagagtgtccgtgtataaatgttg

SEQ ID NO: 2723911 - DNA, 25 bp, Homo sapien
gaataaatagaacgtgctcttccaa

SEQ ID NO: 2723912 - DNA, 25 bp, Homo sapien
cagcagaaggtactcccataagcac

SEQ ID NO: 2723913 - DNA, 25 bp, Homo sapien
cataagcacctcctgcagtaattgt

SEQ ID NO: 2723914 - DNA, 25 bp, Homo sapien
ttttgaagtacaagtagtcatcgcg

SEQ ID NO: 2723915 - DNA, 25 bp, Homo sapien
ggtcaaattgtgtgactagttcaga

SEQ ID NO: 2723916 - DNA, 25 bp, Homo sapien
ttatattggtgttgattgcagtgtt

SEQ ID NO: 2723917 - DNA, 25 bp, Homo sapien
gtcagataagccatgttttatgact

SEQ ID NO: 2723918 - DNA, 25 bp, Homo sapien
taaacttaccgagacttgctttatg

SEQ ID NO: 2723919 - DNA, 25 bp, Homo sapien
gatggtaacatcaccttggtaactg

SEQ ID NO: 2723920 - DNA, 25 bp, Homo sapien
taacatcaccttggtaactgtgaga

SEQ ID NO: 2723921 - DNA, 25 bp, Homo sapien
ttttgatggtaacatcaccttggta

SEQ ID NO: 2723922 - DNA, 25 bp, Homo sapien
caccttggtaactgtgagactgtgg

SEQ ID NO: 2723923 - DNA, 25 bp, Homo sapien
ttttcattaagacctgaaagcacac

SEQ ID NO: 2723924 - DNA, 25 bp, Homo sapien
acctcagcttcgctagtagttgaga

SEQ ID NO: 2723925 - DNA, 25 bp, Homo sapien
tatgctcagcctttagtcactttct

SEQ ID NO: 2723926 - DNA, 25 bp, Homo sapien
tcattaagacctgaaagcacacagc

SEQ ID NO: 2723927 - DNA, 25 bp, Homo sapien
tcagaactgtagtaagctagacaaa

SEQ ID NO: 2723928 - DNA, 25 bp, Homo sapien
tgctcagtagaagcccatagtcaga

SEQ ID NO: 2723929 - DNA, 25 bp, Homo sapien
gctccaagtttatatgatgtcttcg

SEQ ID NO: 2723930 - DNA, 25 bp, Homo sapien
gaaagtatgggttttatgctcagta

SEQ ID NO: 2723931 - DNA, 25 bp, Homo sapien
ggatgtttatctaactggcttgcaa

SEQ ID NO: 2723932 - DNA, 25 bp, Homo sapien
tgtggatgtttatctaactggcttg

SEQ ID NO: 2723933 - DNA, 25 bp, Homo sapien
gtttatctaactggcttgcaatcat

SEQ ID NO: 2723934 - DNA, 25 bp, Homo sapien
acttgtggatgtttatctaactggc

SEQ ID NO: 2723935 - DNA, 25 bp, Homo sapien
tctagaaattccctgaagatgaact

SEQ ID NO: 2723936 - DNA, 25 bp, Homo sapien
tctctggtatcaagtttttaatggc

SEQ ID NO: 2723937 - DNA, 25 bp, Homo sapien
aatcctcttttttacacatcttgca

SEQ ID NO: 2723938 - DNA, 25 bp, Homo sapien
taagttattgtgacaacaatcctct

SEQ ID NO: 2723939 - DNA, 25 bp, Homo sapien
caatgcatgccgattgactcaacgg

SEQ ID NO: 2723940 - DNA, 25 bp, Homo sapien
ccccgctgcatggtttgctgtttgc

SEQ ID NO: 2723941 - DNA, 25 bp, Homo sapien
gactcaacggttagagcagactgaa

SEQ ID NO: 2723942 - DNA, 25 bp, Homo sapien
tttgtaaggctcttcaacaggcagc

SEQ ID NO: 2723943 - DNA, 25 bp, Homo sapien
tattgtggcagtgaggaatctgcaa

SEQ ID NO: 2723944 - DNA, 25 bp, Homo sapien
actccgcacagattgtcagtttgtc

SEQ ID NO: 2723945 - DNA, 25 bp, Homo sapien
tatggcatttttagaggcatgtgtt

SEQ ID NO: 2723946 - DNA, 25 bp, Homo sapien
gagcaggaagaagacccgtatggca

SEQ ID NO: 2723947 - DNA, 25 bp, Homo sapien
ttttattcttaacaggacatataca

SEQ ID NO: 2723948 - DNA, 25 bp, Homo sapien
tgcatccacatggacagctctagat

SEQ ID NO: 2723949 - DNA, 25 bp, Homo sapien
ttaacaggacatatacatttggcat

SEQ ID NO: 2723950 - DNA, 25 bp, Homo sapien
cattaggaggtagctcatccttgtc

SEQ ID NO: 2723951 - DNA, 25 bp, Homo sapien
gctcttttcatggacttttgttcct

SEQ ID NO: 2723952 - DNA, 25 bp, Homo sapien
ttcccctgctcttttcatggacttt

SEQ ID NO: 2723953 - DNA, 25 bp, Homo sapien
cccctgctcttttcatggacttttg

SEQ ID NO: 2723954 - DNA, 25 bp, Homo sapien
cctgctcttttcatggacttttgtt

SEQ ID NO: 2723955 - DNA, 25 bp, Homo sapien
ggcattggaactattgcacatttaa

SEQ ID NO: 2723956 - DNA, 25 bp, Homo sapien
cccactacatctagtttttgactgc

SEQ ID NO: 2723957 - DNA, 25 bp, Homo sapien
atttaaagtcgatgtcacccagcca

SEQ ID NO: 2723958 - DNA, 25 bp, Homo sapien
gttaaatcaacacttcccactacat

SEQ ID NO: 2723959 - DNA, 25 bp, Homo sapien
aatgtttactaaagctagcatcaga

SEQ ID NO: 2723960 - DNA, 25 bp, Homo sapien
atgtttactaaagctagcatcagac

SEQ ID NO: 2723961 - DNA, 25 bp, Homo sapien
ctgaagctggtagaagcttgtcatc

SEQ ID NO: 2723962 - DNA, 25 bp, Homo sapien
ctttcaatcacctgtaaagagttcc

SEQ ID NO: 2723963 - DNA, 25 bp, Homo sapien
tacagtttttccgtacaaagcgatc

SEQ ID NO: 2723964 - DNA, 25 bp, Homo sapien
cgtacaaagcgatctctttcaatca

SEQ ID NO: 2723965 - DNA, 25 bp, Homo sapien
gcttgtaattcacaaagcttccagc

SEQ ID NO: 2723966 - DNA, 25 bp, Homo sapien
tagttcactggcttggaccaatttg

SEQ ID NO: 2723967 - DNA, 25 bp, Homo sapien
ataagggcagattggtccggctgaa

SEQ ID NO: 2723968 - DNA, 25 bp, Homo sapien
cagcacctctgttgtgataagggca

SEQ ID NO: 2723969 - DNA, 25 bp, Homo sapien
cttgttgctttcatgaccaaggagc

SEQ ID NO: 2723970 - DNA, 25 bp, Homo sapien
ttgttgctttcatgaccaaggagca

SEQ ID NO: 2723971 - DNA, 25 bp, Homo sapien
cttgaccgagtgctcaggttctgga

SEQ ID NO: 2723972 - DNA, 25 bp, Homo sapien
gaatttctagcaggtaagtgcagct

SEQ ID NO: 2723973 - DNA, 25 bp, Homo sapien
gaggaaggaaacaccagtctaggca

SEQ ID NO: 2723974 - DNA, 25 bp, Homo sapien
tctaggcaaccagatcagcagtttc

SEQ ID NO: 2723975 - DNA, 25 bp, Homo sapien
aattggatcttgaggcccgtgcggt

SEQ ID NO: 2723976 - DNA, 25 bp, Homo sapien
tatgttctcttagaattggatcttg

SEQ ID NO: 2723977 - DNA, 25 bp, Homo sapien
atgttctcttagaattggatcttga

SEQ ID NO: 2723978 - DNA, 25 bp, Homo sapien
ctctatgttctcttagaattggatc

SEQ ID NO: 2723979 - DNA, 25 bp, Homo sapien
ctagtggacaaattcacagagaggg

SEQ ID NO: 2723980 - DNA, 25 bp, Homo sapien
aattcacagagaggggaaattgcaa

SEQ ID NO: 2723981 - DNA, 25 bp, Homo sapien
ttgcaaaggggatgctgcccgctga

SEQ ID NO: 2723982 - DNA, 25 bp, Homo sapien
ggaaattgcaaaggggatgctgccc

SEQ ID NO: 2723983 - DNA, 25 bp, Homo sapien
agcatccagcttctgggcctattac

SEQ ID NO: 2723984 - DNA, 25 bp, Homo sapien
tcaaaatgacaggtgccgaagcaca

SEQ ID NO: 2723985 - DNA, 25 bp, Homo sapien
tattctgacaacctgtcaaagttct

SEQ ID NO: 2723986 - DNA, 25 bp, Homo sapien
ggtttgtgctgcaagatattctgac

SEQ ID NO: 2723987 - DNA, 25 bp, Homo sapien
cacgtggagcttgctttctgtgtct

SEQ ID NO: 2723988 - DNA, 25 bp, Homo sapien
cactgtctcacgtggagcttgcttt

SEQ ID NO: 2723989 - DNA, 25 bp, Homo sapien
gaaagcaatgaaggcactgtctcac

SEQ ID NO: 2723990 - DNA, 25 bp, Homo sapien
tgaaggcactgtctcacgtggagct

SEQ ID NO: 2723991 - DNA, 25 bp, Homo sapien
tccctttcactggcctgatgagtac

SEQ ID NO: 2723992 - DNA, 25 bp, Homo sapien
cagtagtgttgtgggtagaaaggcc

SEQ ID NO: 2723993 - DNA, 25 bp, Homo sapien
ctttcactggcctgatgagtacttt

SEQ ID NO: 2723994 - DNA, 25 bp, Homo sapien
tttaattgcagtagtgttgtgggta

SEQ ID NO: 2723995 - DNA, 25 bp, Homo sapien
cattcatgaagttgtgacatctaaa

SEQ ID NO: 2723996 - DNA, 25 bp, Homo sapien
ctttccatagtcagtagaaggtgtc

SEQ ID NO: 2723997 - DNA, 25 bp, Homo sapien
gcatcatctcccaatgaaagaaagt

SEQ ID NO: 2723998 - DNA, 25 bp, Homo sapien
taattagaacccctatgtacacatc

SEQ ID NO: 2723999 - DNA, 25 bp, Homo sapien
ttaattcacactcagttatgatggc

SEQ ID NO: 2724000 - DNA, 25 bp, Homo sapien
tcacactcagttatgatggcagata

SEQ ID NO: 2724001 - DNA, 25 bp, Homo sapien
ctcagttatgatggcagatattcca

SEQ ID NO: 2724002 - DNA, 25 bp, Homo sapien
gttatgatggcagatattccatcag

SEQ ID NO: 2724003 - DNA, 25 bp, Homo sapien
tatcacagcacatttggctgtgctg

SEQ ID NO: 2724004 - DNA, 25 bp, Homo sapien
ggctgtgctgcttcggaaggctgat

SEQ ID NO: 2724005 - DNA, 25 bp, Homo sapien
gctgtgctgcttcggaaggctgata

SEQ ID NO: 2724006 - DNA, 25 bp, Homo sapien
gtgctgcttcggaaggctgatatta

SEQ ID NO: 2724007 - DNA, 25 bp, Homo sapien
ggccttacataaattcgactcactc

SEQ ID NO: 2724008 - DNA, 25 bp, Homo sapien
cataaattcgactcactccttttct

SEQ ID NO: 2724009 - DNA, 25 bp, Homo sapien
tacataaattcgactcactcctttt

SEQ ID NO: 2724010 - DNA, 25 bp, Homo sapien
cttacataaattcgactcactcctt

SEQ ID NO: 2724011 - DNA, 25 bp, Homo sapien
agatttgcaatgtcactttgcaagg

SEQ ID NO: 2724012 - DNA, 25 bp, Homo sapien
tcacaagatttgcaatgtcactttg

SEQ ID NO: 2724013 - DNA, 25 bp, Homo sapien
gatttgcaatgtcactttgcaaggt

SEQ ID NO: 2724014 - DNA, 25 bp, Homo sapien
gaagtttccttgattagtggctggt

SEQ ID NO: 2724015 - DNA, 25 bp, Homo sapien
tcaattgcctccagtcgacacagtt

SEQ ID NO: 2724016 - DNA, 25 bp, Homo sapien
gctggttagcgatggcctttctaaa

SEQ ID NO: 2724017 - DNA, 25 bp, Homo sapien
cgacacagttagctcagaagtttcc

SEQ ID NO: 2724018 - DNA, 25 bp, Homo sapien
taacaactttatagtctaactcttc

SEQ ID NO: 2724019 - DNA, 25 bp, Homo sapien
aaggaagtgatttaatagcctgtgc

SEQ ID NO: 2724020 - DNA, 25 bp, Homo sapien
aactaatgtattaacaactttatag

SEQ ID NO: 2724021 - DNA, 25 bp, Homo sapien
agtgatttaatagcctgtgcttcaa

SEQ ID NO: 2724022 - DNA, 25 bp, Homo sapien
agctttgatgcttatcaggctcaaa

SEQ ID NO: 2724023 - DNA, 25 bp, Homo sapien
gagctttgatgcttatcaggctcaa

SEQ ID NO: 2724024 - DNA, 25 bp, Homo sapien
tgcagacagtgatgtgccaacacga

SEQ ID NO: 2724025 - DNA, 25 bp, Homo sapien
tataactgtatcaagcacagattgc

SEQ ID NO: 2724026 - DNA, 25 bp, Homo sapien
aacacgaacccagacagctgctgta

SEQ ID NO: 2724027 - DNA, 25 bp, Homo sapien
gatccttcttgtggctttctatagc

SEQ ID NO: 2724028 - DNA, 25 bp, Homo sapien
ttatggttcctctcacgactgggcg

SEQ ID NO: 2724029 - DNA, 25 bp, Homo sapien
agtggtcacactttctacttggcaa

SEQ ID NO: 2724030 - DNA, 25 bp, Homo sapien
gactgggcgatttctcgggacacct

SEQ ID NO: 2724031 - DNA, 25 bp, Homo sapien
tatttgcacgctttagactatcctg

SEQ ID NO: 2724032 - DNA, 25 bp, Homo sapien
taatcaagtcactgtaatcatgcca

SEQ ID NO: 2724033 - DNA, 25 bp, Homo sapien
gaaattgtgttctgcatatctgagc

SEQ ID NO: 2724034 - DNA, 25 bp, Homo sapien
gacagtatcatagctgaacacacat

SEQ ID NO: 2724035 - DNA, 25 bp, Homo sapien
gcagtggcttagtctatctgccatc

SEQ ID NO: 2724036 - DNA, 25 bp, Homo sapien
tcctggacccaacaggaactttcat

SEQ ID NO: 2724037 - DNA, 25 bp, Homo sapien
catggatgggtagtatgtttttcct

SEQ ID NO: 2724038 - DNA, 25 bp, Homo sapien
gatgggtagtatgtttttcctggac

SEQ ID NO: 2724039 - DNA, 25 bp, Homo sapien
agtatgtttttcctggacccaacag

SEQ ID NO: 2724040 - DNA, 25 bp, Homo sapien
ctgcccctgggcctaaacataagct

SEQ ID NO: 2724041 - DNA, 25 bp, Homo sapien
cacattggctttctcgccagtttgg

SEQ ID NO: 2724042 - DNA, 25 bp, Homo sapien
tgggcctaaacataagctctgtcct

SEQ ID NO: 2724043 - DNA, 25 bp, Homo sapien
cattggctttctcgccagtttggag

SEQ ID NO: 2724044 - DNA, 25 bp, Homo sapien
aatcctatcaggtctcccacatcta

SEQ ID NO: 2724045 - DNA, 25 bp, Homo sapien
tccctcagagagaacccatataatt

SEQ ID NO: 2724046 - DNA, 25 bp, Homo sapien
aactgataatgcaactgtcgtgatg

SEQ ID NO: 2724047 - DNA, 25 bp, Homo sapien
gatgaaagcctgctattgttcccca

SEQ ID NO: 2724048 - DNA, 25 bp, Homo sapien
tcttgtctgcaactactgtggccat

SEQ ID NO: 2724049 - DNA, 25 bp, Homo sapien
agtaagatttctgaaggcgatcatc

SEQ ID NO: 2724050 - DNA, 25 bp, Homo sapien
tgaaggcgatcatcagtgggaagtc

SEQ ID NO: 2724051 - DNA, 25 bp, Homo sapien
gattttataatactgattcaggtca

SEQ ID NO: 2724052 - DNA, 25 bp, Homo sapien
gaaccttcactactgaccatttatg

SEQ ID NO: 2724053 - DNA, 25 bp, Homo sapien
ttcccagtttgcatatataagtctc

SEQ ID NO: 2724054 - DNA, 25 bp, Homo sapien
cacgtatttcgtgaaagaagaaaag

SEQ ID NO: 2724055 - DNA, 25 bp, Homo sapien
attctcttccgatttcacaatatgg

SEQ ID NO: 2724056 - DNA, 25 bp, Homo sapien
gcggatttaaacgtaactgtatcat

SEQ ID NO: 2724057 - DNA, 25 bp, Homo sapien
tccagcggatttaaacgtaactgta

SEQ ID NO: 2724058 - DNA, 25 bp, Homo sapien
tcatccagcggatttaaacgtaact

SEQ ID NO: 2724059 - DNA, 25 bp, Homo sapien
cttcatccagcggatttaaacgtaa

SEQ ID NO: 2724060 - DNA, 25 bp, Homo sapien
tcaaagcccgtaacctctagcagta

SEQ ID NO: 2724061 - DNA, 25 bp, Homo sapien
gcccgtaacctctagcagtacacat

SEQ ID NO: 2724062 - DNA, 25 bp, Homo sapien
gtaacctctagcagtacacattccc

SEQ ID NO: 2724063 - DNA, 25 bp, Homo sapien
tagcagtacacattcccctttctac

SEQ ID NO: 2724064 - DNA, 25 bp, Homo sapien
aagaactaacggcaaagagaatgga

SEQ ID NO: 2724065 - DNA, 25 bp, Homo sapien
gtcgtggctcaaagaactaacggca

SEQ ID NO: 2724066 - DNA, 25 bp, Homo sapien
tggctcaaagaactaacggcaaaga

SEQ ID NO: 2724067 - DNA, 25 bp, Homo sapien
ctaacggcaaagagaatggagtgtt

SEQ ID NO: 2724068 - DNA, 25 bp, Homo sapien
tgtgccagatcatatctacacgtga

SEQ ID NO: 2724069 - DNA, 25 bp, Homo sapien
ctttaatgactacaccataccactg

SEQ ID NO: 2724070 - DNA, 25 bp, Homo sapien
tatctacacgtgaggagaatgggtt

SEQ ID NO: 2724071 - DNA, 25 bp, Homo sapien
gactacaccataccactgtgccaga

SEQ ID NO: 2724072 - DNA, 25 bp, Homo sapien
cctttggtacaatgtccctccgctt

SEQ ID NO: 2724073 - DNA, 25 bp, Homo sapien
tctctaagatactctccctgtgtgg

SEQ ID NO: 2724074 - DNA, 25 bp, Homo sapien
tcatgtggggaaggtatattttctc

SEQ ID NO: 2724075 - DNA, 25 bp, Homo sapien
cgcttatgacgtttactgccagcag

SEQ ID NO: 2724076 - DNA, 25 bp, Homo sapien
cacaaaggatagaaccaactctaag

SEQ ID NO: 2724077 - DNA, 25 bp, Homo sapien
ccagtttagctgcttctatttgaca

SEQ ID NO: 2724078 - DNA, 25 bp, Homo sapien
ctatttgacataaaagaatttctgg

SEQ ID NO: 2724079 - DNA, 25 bp, Homo sapien
catagattctgtaatgggatgagcc

SEQ ID NO: 2724080 - DNA, 25 bp, Homo sapien
ttggaaaattattggatggtggtgg

SEQ ID NO: 2724081 - DNA, 25 bp, Homo sapien
tcccctgatgtctataatatcaccc

SEQ ID NO: 2724082 - DNA, 25 bp, Homo sapien
ttgtatattcgcatgtacatggcca

SEQ ID NO: 2724083 - DNA, 25 bp, Homo sapien
aatatatatacaccaggtgccactc

SEQ ID NO: 2724084 - DNA, 25 bp, Homo sapien
tggctcctagagtgcctaacatgct

SEQ ID NO: 2724085 - DNA, 25 bp, Homo sapien
gtggagcaggctggtctttccatta

SEQ ID NO: 2724086 - DNA, 25 bp, Homo sapien
tggagcaggctggtctttccattaa

SEQ ID NO: 2724087 - DNA, 25 bp, Homo sapien
cctagagtgcctaacatgctcaata

SEQ ID NO: 2724088 - DNA, 25 bp, Homo sapien
tcttacttcagattgcaaggaatat

SEQ ID NO: 2724089 - DNA, 25 bp, Homo sapien
taattagataagaggcttgagggtg

SEQ ID NO: 2724090 - DNA, 25 bp, Homo sapien
ctatcttgtaaacagctagagaaaa

SEQ ID NO: 2724091 - DNA, 25 bp, Homo sapien
taatgggaccaattctaaatcacta

SEQ ID NO: 2724092 - DNA, 25 bp, Homo sapien
ctgatatatcttcccgctcgtacaa

SEQ ID NO: 2724093 - DNA, 25 bp, Homo sapien
ttcccgctcgtacaattcatttcag

SEQ ID NO: 2724094 - DNA, 25 bp, Homo sapien
aattcatttcagaggcataacttgt

SEQ ID NO: 2724095 - DNA, 25 bp, Homo sapien
cgtacaattcatttcagaggcataa

SEQ ID NO: 2724096 - DNA, 25 bp, Homo sapien
gccactatcaaaagtacgtgcatgg

SEQ ID NO: 2724097 - DNA, 25 bp, Homo sapien
ggcttcgggatcaacaagagagccc

SEQ ID NO: 2724098 - DNA, 25 bp, Homo sapien
cccttttggcagaatatagtctctc

SEQ ID NO: 2724099 - DNA, 25 bp, Homo sapien
tagtctctccaatgtttccaccagc

SEQ ID NO: 2724100 - DNA, 25 bp, Homo sapien
gatcaagacattatcagtgattaga

SEQ ID NO: 2724101 - DNA, 25 bp, Homo sapien
caagacattatcagtgattagacta

SEQ ID NO: 2724102 - DNA, 25 bp, Homo sapien
tcaagacattatcagtgattagact

SEQ ID NO: 2724103 - DNA, 25 bp, Homo sapien
tctgatcaagacattatcagtgatt

SEQ ID NO: 2724104 - DNA, 25 bp, Homo sapien
ggaggaaactcaggtttatcacata

SEQ ID NO: 2724105 - DNA, 25 bp, Homo sapien
cgaatgagaccaaaaaagagtggcc

SEQ ID NO: 2724106 - DNA, 25 bp, Homo sapien
tagttcttatactaagccctgctgt

SEQ ID NO: 2724107 - DNA, 25 bp, Homo sapien
ccctgctgtaagatggatgttgaag

SEQ ID NO: 2724108 - DNA, 25 bp, Homo sapien
cagcacaagacagccgtcagcagtt

SEQ ID NO: 2724109 - DNA, 25 bp, Homo sapien
aagacagccgtcagcagttcatggg

SEQ ID NO: 2724110 - DNA, 25 bp, Homo sapien
ctcggaaatattacagcacaagaca

SEQ ID NO: 2724111 - DNA, 25 bp, Homo sapien
tattacagcacaagacagccgtcag

SEQ ID NO: 2724112 - DNA, 25 bp, Homo sapien
cacgctagttctggctgaattccac

SEQ ID NO: 2724113 - DNA, 25 bp, Homo sapien
ccctgggtggcagcacgctagttct

SEQ ID NO: 2724114 - DNA, 25 bp, Homo sapien
tgaattccacgagctacatggggca

SEQ ID NO: 2724115 - DNA, 25 bp, Homo sapien
cacgagctacatggggcagctgaac

SEQ ID NO: 2724116 - DNA, 25 bp, Homo sapien
tttcgtcagcactctaaatcaaggg

SEQ ID NO: 2724117 - DNA, 25 bp, Homo sapien
ccaatgctggcgattagaaagtgta

SEQ ID NO: 2724118 - DNA, 25 bp, Homo sapien
gactccctggcatagcaatttatca

SEQ ID NO: 2724119 - DNA, 25 bp, Homo sapien
catcagttactgttgagcacggcaa

SEQ ID NO: 2724120 - DNA, 25 bp, Homo sapien
gatggtgtcatccaagtctggagac

SEQ ID NO: 2724121 - DNA, 25 bp, Homo sapien
gctgaggccactcgtatataaaact

SEQ ID NO: 2724122 - DNA, 25 bp, Homo sapien
agccaaagcacggtgttctctccca

SEQ ID NO: 2724123 - DNA, 25 bp, Homo sapien
gagaagcagtccagacttctgatgg

SEQ ID NO: 2724124 - DNA, 25 bp, Homo sapien
taagtttaatgcaagtcagcccaac

SEQ ID NO: 2724125 - DNA, 25 bp, Homo sapien
gttgccctaagagataaggccctca

SEQ ID NO: 2724126 - DNA, 25 bp, Homo sapien
caaattctgcctcgtaaccatggac

SEQ ID NO: 2724127 - DNA, 25 bp, Homo sapien
gctgacgtgactaaccatatggtgt

SEQ ID NO: 2724128 - DNA, 25 bp, Homo sapien
gtgaaacccacttgcttgctgagag

SEQ ID NO: 2724129 - DNA, 25 bp, Homo sapien
gacttgtaaacatgtctgcaaccag

SEQ ID NO: 2724130 - DNA, 25 bp, Homo sapien
caggctgctacatggagccctgagg

SEQ ID NO: 2724131 - DNA, 25 bp, Homo sapien
tgtgtcttgagaccaattctggcca

SEQ ID NO: 2724132 - DNA, 25 bp, Homo sapien
taaacgagtcacattcgggtctctg

SEQ ID NO: 2724133 - DNA, 25 bp, Homo sapien
tgggttaggtggttaaccaggcaca

SEQ ID NO: 2724134 - DNA, 25 bp, Homo sapien
tcaaaagagaagtggagcatcgcta

SEQ ID NO: 2724135 - DNA, 25 bp, Homo sapien
gagcatcgctaggtaggagcacaac

SEQ ID NO: 2724136 - DNA, 25 bp, Homo sapien
caaggtgtaacctctgtcggctgac

SEQ ID NO: 2724137 - DNA, 25 bp, Homo sapien
tagggatttcatgcctctgggcgcc

SEQ ID NO: 2724138 - DNA, 25 bp, Homo sapien
tgcgagttctgctaaatatcccctt

SEQ ID NO: 2724139 - DNA, 25 bp, Homo sapien
tctgtcggctgacactccagtggca

SEQ ID NO: 2724140 - DNA, 25 bp, Homo sapien
caactgcttgcaatattaatcccga

SEQ ID NO: 2724141 - DNA, 25 bp, Homo sapien
gacattatctaagtcatgcaggttg

SEQ ID NO: 2724142 - DNA, 25 bp, Homo sapien
caggaccaaattccagaggtctgga

SEQ ID NO: 2724143 - DNA, 25 bp, Homo sapien
caaaacctcatgcactttgagttca

SEQ ID NO: 2724144 - DNA, 25 bp, Homo sapien
ctcctgcttatgtctttgtgtagca

SEQ ID NO: 2724145 - DNA, 25 bp, Homo sapien
catctttgatatggggctgtggagg

SEQ ID NO: 2724146 - DNA, 25 bp, Homo sapien
gtagcatctttgatatggggctgtg

SEQ ID NO: 2724147 - DNA, 25 bp, Homo sapien
ctttgtgtagcatctttgatatggg

SEQ ID NO: 2724148 - DNA, 25 bp, Homo sapien
aataccggcagcttcaagaacaacc

SEQ ID NO: 2724149 - DNA, 25 bp, Homo sapien
agccttcacccatgggacagtatga

SEQ ID NO: 2724150 - DNA, 25 bp, Homo sapien
taccggcagcttcaagaacaaccat

SEQ ID NO: 2724151 - DNA, 25 bp, Homo sapien
acagtatgagatatgctgtttcttc

SEQ ID NO: 2724152 - DNA, 25 bp, Homo sapien
aatccgtgtgccactggacccctgt

SEQ ID NO: 2724153 - DNA, 25 bp, Homo sapien
gaatttgcaggaccaactcatccct

SEQ ID NO: 2724154 - DNA, 25 bp, Homo sapien
ctcaggtctcagttgtgggagctga

SEQ ID NO: 2724155 - DNA, 25 bp, Homo sapien
gacttgtctccaatccgtgtgccac

SEQ ID NO: 2724156 - DNA, 25 bp, Homo sapien
cataaccacactagggtagtaaggc

SEQ ID NO: 2724157 - DNA, 25 bp, Homo sapien
ctattagggaagaggtacagcaatt

SEQ ID NO: 2724158 - DNA, 25 bp, Homo sapien
ttgagggagcaggtcttcattactt

SEQ ID NO: 2724159 - DNA, 25 bp, Homo sapien
tagtcttaccctcaaaatgagtagg

SEQ ID NO: 2724160 - DNA, 25 bp, Homo sapien
tgtgattggatgacctcctcaaatc

SEQ ID NO: 2724161 - DNA, 25 bp, Homo sapien
gactttgctaaccagtcttcagatt

SEQ ID NO: 2724162 - DNA, 25 bp, Homo sapien
tgactgttaacaaatggagttccac

SEQ ID NO: 2724163 - DNA, 25 bp, Homo sapien
catgatgatacaatctgtgcttccc

SEQ ID NO: 2724164 - DNA, 25 bp, Homo sapien
cataactgtgaagacactctgacat

SEQ ID NO: 2724165 - DNA, 25 bp, Homo sapien
tgacataactgtgaagacactctga

SEQ ID NO: 2724166 - DNA, 25 bp, Homo sapien
ttctgtgacataactgtgaagacac

SEQ ID NO: 2724167 - DNA, 25 bp, Homo sapien
tgtgacataactgtgaagacactct

SEQ ID NO: 2724168 - DNA, 25 bp, Homo sapien
tgataattaaagataacgggatatc

SEQ ID NO: 2724169 - DNA, 25 bp, Homo sapien
gattccagcaattcagtccagtgaa

SEQ ID NO: 2724170 - DNA, 25 bp, Homo sapien
cacttctgcttcactaggattccag

SEQ ID NO: 2724171 - DNA, 25 bp, Homo sapien
tcttcggactttaatcagatcaaag

SEQ ID NO: 2724172 - DNA, 25 bp, Homo sapien
tactataatcctgcacctgcggcct

SEQ ID NO: 2724173 - DNA, 25 bp, Homo sapien
gcaccaaggaagatgacggacacag

SEQ ID NO: 2724174 - DNA, 25 bp, Homo sapien
gaagctgtcctgttacgattttgca

SEQ ID NO: 2724175 - DNA, 25 bp, Homo sapien
cctgttacgattttgcaccaaggaa

SEQ ID NO: 2724176 - DNA, 25 bp, Homo sapien
tttgcaccaaggaagatgacggaca

SEQ ID NO: 2724177 - DNA, 25 bp, Homo sapien
tctatctgagtacttggcccgcaaa

SEQ ID NO: 2724178 - DNA, 25 bp, Homo sapien
ggatctatctgagtacttggcccgc

SEQ ID NO: 2724179 - DNA, 25 bp, Homo sapien
cctgggatctatctgagtacttggc

SEQ ID NO: 2724180 - DNA, 25 bp, Homo sapien
tatctgagtacttggcccgcaaaat

SEQ ID NO: 2724181 - DNA, 25 bp, Homo sapien
ggctaactgttactttagactggac

SEQ ID NO: 2724182 - DNA, 25 bp, Homo sapien
tatgtggctaactgttactttagac

SEQ ID NO: 2724183 - DNA, 25 bp, Homo sapien
cattttgtaactttatgtggctaac

SEQ ID NO: 2724184 - DNA, 25 bp, Homo sapien
actttagactggactctctcaacag

SEQ ID NO: 2724185 - DNA, 25 bp, Homo sapien
tttctccttccatagcactctgtgc

SEQ ID NO: 2724186 - DNA, 25 bp, Homo sapien
tgtaggcggaactaattgctttctt

SEQ ID NO: 2724187 - DNA, 25 bp, Homo sapien
tttctgggctactgtaggcggaact

SEQ ID NO: 2724188 - DNA, 25 bp, Homo sapien
tccttccatagcactctgtgcgtac

SEQ ID NO: 2724189 - DNA, 25 bp, Homo sapien
ttaaggagacctggctctgaacttt

SEQ ID NO: 2724190 - DNA, 25 bp, Homo sapien
tacgttaacaccaaaagctctatac

SEQ ID NO: 2724191 - DNA, 25 bp, Homo sapien
catttcattttgtgcgtccctccca

SEQ ID NO: 2724192 - DNA, 25 bp, Homo sapien
ttcctttaaggagacctggctctga

SEQ ID NO: 2724193 - DNA, 25 bp, Homo sapien
ttctgaggcaccaaacatcccctcc

SEQ ID NO: 2724194 - DNA, 25 bp, Homo sapien
cagcttctgaggcaccaaacatccc

SEQ ID NO: 2724195 - DNA, 25 bp, Homo sapien
gaacagcttctgaggcaccaaacat

SEQ ID NO: 2724196 - DNA, 25 bp, Homo sapien
cttgggaacagcttctgaggcacca

SEQ ID NO: 2724197 - DNA, 25 bp, Homo sapien
ggaggacctatgttgccaaagaaca

SEQ ID NO: 2724198 - DNA, 25 bp, Homo sapien
ttctaagaatctgcaccccatagtg

SEQ ID NO: 2724199 - DNA, 25 bp, Homo sapien
tcaagttgccgctttccttcctctg

SEQ ID NO: 2724200 - DNA, 25 bp, Homo sapien
caccccatagtgaagatggcctctt

SEQ ID NO: 2724201 - DNA, 25 bp, Homo sapien
tataacatcagtgtcactagcccca

SEQ ID NO: 2724202 - DNA, 25 bp, Homo sapien
tagccccacagctatcagccttgag

SEQ ID NO: 2724203 - DNA, 25 bp, Homo sapien
cagtagtggtggtaagcatccgtca

SEQ ID NO: 2724204 - DNA, 25 bp, Homo sapien
cttttaaaaactgcagcgggatctt

SEQ ID NO: 2724205 - DNA, 25 bp, Homo sapien
tgagcttttaactttgacaaggtca

SEQ ID NO: 2724206 - DNA, 25 bp, Homo sapien
tgtaatgccatataaagtaaatagg

SEQ ID NO: 2724207 - DNA, 25 bp, Homo sapien
tatgcagaattgtaatgccatataa

SEQ ID NO: 2724208 - DNA, 25 bp, Homo sapien
caaggtcatgctgaagcgtaccaaa

SEQ ID NO: 2724209 - DNA, 25 bp, Homo sapien
tacagcaggaagcatttcttgacct

SEQ ID NO: 2724210 - DNA, 25 bp, Homo sapien
tctgctttataacaaatccacacca

SEQ ID NO: 2724211 - DNA, 25 bp, Homo sapien
caccaaatcttactgacacctacag

SEQ ID NO: 2724212 - DNA, 25 bp, Homo sapien
tgtttctcacactgagtgatgcctc

SEQ ID NO: 2724213 - DNA, 25 bp, Homo sapien
gctggctatcgtgattgcgtgccat

SEQ ID NO: 2724214 - DNA, 25 bp, Homo sapien
ctcatctttggacaatataagagcc

SEQ ID NO: 2724215 - DNA, 25 bp, Homo sapien
tggacaatataagagccagctggct

SEQ ID NO: 2724216 - DNA, 25 bp, Homo sapien
cccttctggatgtcaaattctatct

SEQ ID NO: 2724217 - DNA, 25 bp, Homo sapien
aaaatgtgagggacgttgccaaaga

SEQ ID NO: 2724218 - DNA, 25 bp, Homo sapien
gaagaactacgacaaatgctaagaa

SEQ ID NO: 2724219 - DNA, 25 bp, Homo sapien
aggaagaactacgacaaatgctaag

SEQ ID NO: 2724220 - DNA, 25 bp, Homo sapien
ctgtgtaaaatgtgagggacgttgc

SEQ ID NO: 2724221 - DNA, 25 bp, Homo sapien
tactggtggatggttcttagtctga

SEQ ID NO: 2724222 - DNA, 25 bp, Homo sapien
ggatgtagtttctgctactggtgga

SEQ ID NO: 2724223 - DNA, 25 bp, Homo sapien
tgtgaaccgtttaggtgccgggaca

SEQ ID NO: 2724224 - DNA, 25 bp, Homo sapien
ctgcggtaatgtgaaccgtttaggt

SEQ ID NO: 2724225 - DNA, 25 bp, Homo sapien
acttagttacagctgcagaaatcac

SEQ ID NO: 2724226 - DNA, 25 bp, Homo sapien
cttgctgaggatggaacttagttac

SEQ ID NO: 2724227 - DNA, 25 bp, Homo sapien
aaagtgccatttgaactctcgcaag

SEQ ID NO: 2724228 - DNA, 25 bp, Homo sapien
tgagggcatggtgtctctctgctct

SEQ ID NO: 2724229 - DNA, 25 bp, Homo sapien
ctgagaaatcggagcccttgctgcc

SEQ ID NO: 2724230 - DNA, 25 bp, Homo sapien
cttggggatctctgccaagactgag

SEQ ID NO: 2724231 - DNA, 25 bp, Homo sapien
tccttggggatctctgccaagactg

SEQ ID NO: 2724232 - DNA, 25 bp, Homo sapien
gccaagactgagaaatcggagccct

SEQ ID NO: 2724233 - DNA, 25 bp, Homo sapien
cacaggaagccgtgctatacaaccc

SEQ ID NO: 2724234 - DNA, 25 bp, Homo sapien
cgtgctatacaacccagttctggga

SEQ ID NO: 2724235 - DNA, 25 bp, Homo sapien
tggttcttgaatcccaacatcgaac

SEQ ID NO: 2724236 - DNA, 25 bp, Homo sapien
caacatcgaacacaggaagccgtgc

SEQ ID NO: 2724237 - DNA, 25 bp, Homo sapien
ttcgtatcctctacacgctgtttgg

SEQ ID NO: 2724238 - DNA, 25 bp, Homo sapien
ttgcatccactttgtatcgttgttg

SEQ ID NO: 2724239 - DNA, 25 bp, Homo sapien
tctcatgcaatggtcgaagactttt

SEQ ID NO: 2724240 - DNA, 25 bp, Homo sapien
gagacgatggatgaattgcatccac

SEQ ID NO: 2724241 - DNA, 25 bp, Homo sapien
aactggcaagttgcataagtttccc

SEQ ID NO: 2724242 - DNA, 25 bp, Homo sapien
aagtttccctaaagtgtgctatagg

SEQ ID NO: 2724243 - DNA, 25 bp, Homo sapien
ttattagacttgctgtgtaggccat

SEQ ID NO: 2724244 - DNA, 25 bp, Homo sapien
gccatgcagcctagtggaacggccc

SEQ ID NO: 2724245 - DNA, 25 bp, Homo sapien
atgaataaaaacattgagcccaagg

SEQ ID NO: 2724246 - DNA, 25 bp, Homo sapien
catgaataaaaacattgagcccaag

SEQ ID NO: 2724247 - DNA, 25 bp, Homo sapien
tgaataaaaacattgagcccaaggt

SEQ ID NO: 2724248 - DNA, 25 bp, Homo sapien
tgggcttttactgacaacgtacaat

SEQ ID NO: 2724249 - DNA, 25 bp, Homo sapien
cccttagaatggagaaggtgcatcc

SEQ ID NO: 2724250 - DNA, 25 bp, Homo sapien
gactcaagacttgggttagttctgg

SEQ ID NO: 2724251 - DNA, 25 bp, Homo sapien
tagctccaaaacaaagtgactgtag

SEQ ID NO: 2724252 - DNA, 25 bp, Homo sapien
gagtttttcccattgaactcacagg

SEQ ID NO: 2724253 - DNA, 25 bp, Homo sapien
tgaacatccttacccctgctgcttt

SEQ ID NO: 2724254 - DNA, 25 bp, Homo sapien
ctttgaagagtctgataggcatgca

SEQ ID NO: 2724255 - DNA, 25 bp, Homo sapien
aagctaatttacagagtgattgtcc

SEQ ID NO: 2724256 - DNA, 25 bp, Homo sapien
ggcacactgaaggtaaggccagtaa

SEQ ID NO: 2724257 - DNA, 25 bp, Homo sapien
gtaaggccagtaaggttttctctgc

SEQ ID NO: 2724258 - DNA, 25 bp, Homo sapien
aggccagtaaggttttctctgccat

SEQ ID NO: 2724259 - DNA, 25 bp, Homo sapien
gggcacactgaaggtaaggccagta

SEQ ID NO: 2724260 - DNA, 25 bp, Homo sapien
ttcagcgagtgggaaggtgtaatcc

SEQ ID NO: 2724261 - DNA, 25 bp, Homo sapien
caaggccaggactcgtttgtacccg

SEQ ID NO: 2724262 - DNA, 25 bp, Homo sapien
gagtgggaaggtgtaatccgtctcc

SEQ ID NO: 2724263 - DNA, 25 bp, Homo sapien
tgtaatccgtctccacagacaaggc

SEQ ID NO: 2724264 - DNA, 25 bp, Homo sapien
ccacaaaggcagatggatcagccaa

SEQ ID NO: 2724265 - DNA, 25 bp, Homo sapien
ggcagatggatcagccaagaaggcc

SEQ ID NO: 2724266 - DNA, 25 bp, Homo sapien
ggcagcagccacaaaggcagatgga

SEQ ID NO: 2724267 - DNA, 25 bp, Homo sapien
gggcagcagccacaaaggcagatgg

SEQ ID NO: 2724268 - DNA, 25 bp, Homo sapien
cagcaggagcagctgtggtggcagc

SEQ ID NO: 2724269 - DNA, 25 bp, Homo sapien
tgcagcagcagcaggagcagctgtg

SEQ ID NO: 2724270 - DNA, 25 bp, Homo sapien
cagcagcagcaggagcagctgtggt

SEQ ID NO: 2724271 - DNA, 25 bp, Homo sapien
gctgcagcagcagcaggagcagctg

SEQ ID NO: 2724272 - DNA, 25 bp, Homo sapien
ggctaagttggttgctttttggtga

SEQ ID NO: 2724273 - DNA, 25 bp, Homo sapien
aaagagaccaaatcccatatcctcg

SEQ ID NO: 2724274 - DNA, 25 bp, Homo sapien
tgcaaataaagctggctaagttggt

SEQ ID NO: 2724275 - DNA, 25 bp, Homo sapien
tccgactcctccgactcttccttgg

SEQ ID NO: 2724276 - DNA, 25 bp, Homo sapien
tcttttttaccgtcagctattacac

SEQ ID NO: 2724277 - DNA, 25 bp, Homo sapien
ttataattaatacatcttttgtctt

SEQ ID NO: 2724278 - DNA, 25 bp, Homo sapien
tttataattaatacatcttttgtct

SEQ ID NO: 2724279 - DNA, 25 bp, Homo sapien
tataattaatacatcttttgtcttt

SEQ ID NO: 2724280 - DNA, 25 bp, Homo sapien
cgaccaggtccagtgaatgtgctga

SEQ ID NO: 2724281 - DNA, 25 bp, Homo sapien
ctgagtggttgggttgacccagcat

SEQ ID NO: 2724282 - DNA, 25 bp, Homo sapien
ttgggttgacccagcattgcttgaa

SEQ ID NO: 2724283 - DNA, 25 bp, Homo sapien
aggagcttgggcacgaccaggtcca

SEQ ID NO: 2724284 - DNA, 25 bp, Homo sapien
tttcacatcttgaatgaactgacag

SEQ ID NO: 2724285 - DNA, 25 bp, Homo sapien
cacatcttgaatgaactgacagtct

SEQ ID NO: 2724286 - DNA, 25 bp, Homo sapien
tttgagatcagagccctctagtagc

SEQ ID NO: 2724287 - DNA, 25 bp, Homo sapien
tagccaaactgaggttccactgggc

SEQ ID NO: 2724288 - DNA, 25 bp, Homo sapien
ctttgttctggctgtaaaatgtcag

SEQ ID NO: 2724289 - DNA, 25 bp, Homo sapien
ttattactgcatcaaaaccatgctg

SEQ ID NO: 2724290 - DNA, 25 bp, Homo sapien
ccatgctgtgaatttgtagctgcca

SEQ ID NO: 2724291 - DNA, 25 bp, Homo sapien
cagttggatccattttggtgctttt

SEQ ID NO: 2724292 - DNA, 25 bp, Homo sapien
cagtgatacaccactggtagctgct

SEQ ID NO: 2724293 - DNA, 25 bp, Homo sapien
ctgtcctttcctaaagatctgtaac

SEQ ID NO: 2724294 - DNA, 25 bp, Homo sapien
accactggtagctgctacaaggtaa

SEQ ID NO: 2724295 - DNA, 25 bp, Homo sapien
gtcctttcctaaagatctgtaacat

SEQ ID NO: 2724296 - DNA, 25 bp, Homo sapien
ttacagcataccaggtaggatccat

SEQ ID NO: 2724297 - DNA, 25 bp, Homo sapien
taaggtgttttacagcataccaggt

SEQ ID NO: 2724298 - DNA, 25 bp, Homo sapien
tgttttacagcataccaggtaggat

SEQ ID NO: 2724299 - DNA, 25 bp, Homo sapien
tgttaaggtgttttacagcatacca

SEQ ID NO: 2724300 - DNA, 25 bp, Homo sapien
tattgagtcacttgagttatttaca

SEQ ID NO: 2724301 - DNA, 25 bp, Homo sapien
aagatagagctttgcatagatgaag

SEQ ID NO: 2724302 - DNA, 25 bp, Homo sapien
agaaactcatattccttgcattaca

SEQ ID NO: 2724303 - DNA, 25 bp, Homo sapien
tataatgtgaataatacggttgaac

SEQ ID NO: 2724304 - DNA, 25 bp, Homo sapien
acgatggtcccatgaggcatttctt

SEQ ID NO: 2724305 - DNA, 25 bp, Homo sapien
ggctcatggaccaatactgtttgga

SEQ ID NO: 2724306 - DNA, 25 bp, Homo sapien
aaatgtatcctcatgcacgatggtc

SEQ ID NO: 2724307 - DNA, 25 bp, Homo sapien
ttggctcatggaccaatactgtttg

SEQ ID NO: 2724308 - DNA, 25 bp, Homo sapien
caaaggtcttgactgctgtggcttt

SEQ ID NO: 2724309 - DNA, 25 bp, Homo sapien
tgctgtggctttaatcagtcctttc

SEQ ID NO: 2724310 - DNA, 25 bp, Homo sapien
ctgcacaaaggtcttgactgctgtg

SEQ ID NO: 2724311 - DNA, 25 bp, Homo sapien
tcttccttttgcttagcttcgggac

SEQ ID NO: 2724312 - DNA, 25 bp, Homo sapien
tgagacatttcggacagcttctgct

SEQ ID NO: 2724313 - DNA, 25 bp, Homo sapien
tgctggcatgagacatttcggacag

SEQ ID NO: 2724314 - DNA, 25 bp, Homo sapien
tgcctttcaggagaaggcgcctgct

SEQ ID NO: 2724315 - DNA, 25 bp, Homo sapien
gcttccaaatgcagtcctgttctct

SEQ ID NO: 2724316 - DNA, 25 bp, Homo sapien
tcaaagcgtcttcagagagaaaatg

SEQ ID NO: 2724317 - DNA, 25 bp, Homo sapien
caaagcgtcttcagagagaaaatgt

SEQ ID NO: 2724318 - DNA, 25 bp, Homo sapien
tctggagggccttcaatgtaatctt

SEQ ID NO: 2724319 - DNA, 25 bp, Homo sapien
gtttattgaaggttagtacacacat

SEQ ID NO: 2724320 - DNA, 25 bp, Homo sapien
aatgtttattgaaggttagtacaca

SEQ ID NO: 2724321 - DNA, 25 bp, Homo sapien
gagggccttcaatgtaatcttctaa

SEQ ID NO: 2724322 - DNA, 25 bp, Homo sapien
ttaatgaatggattccactcagtgg

SEQ ID NO: 2724323 - DNA, 25 bp, Homo sapien
tgtcaacagccttaatgaatggatt

SEQ ID NO: 2724324 - DNA, 25 bp, Homo sapien
aatgaatggattccactcagtggtt

SEQ ID NO: 2724325 - DNA, 25 bp, Homo sapien
tctcatgtcaacagccttaatgaat

SEQ ID NO: 2724326 - DNA, 25 bp, Homo sapien
cacagctgccataatgatcctcttc

SEQ ID NO: 2724327 - DNA, 25 bp, Homo sapien
ctgtaccacagctgccataatgatc

SEQ ID NO: 2724328 - DNA, 25 bp, Homo sapien
taccacagctgccataatgatcctc

SEQ ID NO: 2724329 - DNA, 25 bp, Homo sapien
ccacagctgccataatgatcctctt

SEQ ID NO: 2724330 - DNA, 25 bp, Homo sapien
ggatcccacggagtctccccatttg

SEQ ID NO: 2724331 - DNA, 25 bp, Homo sapien
acattggtactcctgtgtggtaggc

SEQ ID NO: 2724332 - DNA, 25 bp, Homo sapien
catttgcctgatctcttgacacggg

SEQ ID NO: 2724333 - DNA, 25 bp, Homo sapien
gattctcgtaagtacgtgcatgtag

SEQ ID NO: 2724334 - DNA, 25 bp, Homo sapien
taattgagcactgtggagcgtgtgc

SEQ ID NO: 2724335 - DNA, 25 bp, Homo sapien
ccagaccctttgctcgattgtatca

SEQ ID NO: 2724336 - DNA, 25 bp, Homo sapien
gagcgtgtgccagatctaatggata

SEQ ID NO: 2724337 - DNA, 25 bp, Homo sapien
tattatgtcagtagaaccgcctcgg

SEQ ID NO: 2724338 - DNA, 25 bp, Homo sapien
taagtgagatccaaaggaactccat

SEQ ID NO: 2724339 - DNA, 25 bp, Homo sapien
cagtctcccgcagcacaaggacttt

SEQ ID NO: 2724340 - DNA, 25 bp, Homo sapien
tctgggattatcagtctcccgcagc

SEQ ID NO: 2724341 - DNA, 25 bp, Homo sapien
caaggactttactccaattaagtga

SEQ ID NO: 2724342 - DNA, 25 bp, Homo sapien
tattttccacatgcaactttgaagg

SEQ ID NO: 2724343 - DNA, 25 bp, Homo sapien
caatcacagagtgcgaaaatgaata

SEQ ID NO: 2724344 - DNA, 25 bp, Homo sapien
catctctgacttcaatcacagagtg

SEQ ID NO: 2724345 - DNA, 25 bp, Homo sapien
ggttggtgctcttttaacatagcct

SEQ ID NO: 2724346 - DNA, 25 bp, Homo sapien
aactaggatccttgagtagcttcat

SEQ ID NO: 2724347 - DNA, 25 bp, Homo sapien
gcctgaatgacaggaaaactaggat

SEQ ID NO: 2724348 - DNA, 25 bp, Homo sapien
ttccatgttccctggtactgtctag

SEQ ID NO: 2724349 - DNA, 25 bp, Homo sapien
tactgtctagacaattcttcattcc

SEQ ID NO: 2724350 - DNA, 25 bp, Homo sapien
ccatctcattgccttcctgcccaaa

SEQ ID NO: 2724351 - DNA, 25 bp, Homo sapien
aaagccagagttagatccccgtagg

SEQ ID NO: 2724352 - DNA, 25 bp, Homo sapien
gccagagttagatccccgtaggtcc

SEQ ID NO: 2724353 - DNA, 25 bp, Homo sapien
ccagagttagatccccgtaggtcca

SEQ ID NO: 2724354 - DNA, 25 bp, Homo sapien
caatagatgcaacgaagcaaaaggg

SEQ ID NO: 2724355 - DNA, 25 bp, Homo sapien
agagcctcattagaacacatcaggg

SEQ ID NO: 2724356 - DNA, 25 bp, Homo sapien
cccttcctgatccagggcaatagat

SEQ ID NO: 2724357 - DNA, 25 bp, Homo sapien
acatcagggctccttccacgatggc

SEQ ID NO: 2724358 - DNA, 25 bp, Homo sapien
tcccttgagtccaataacaccctct

SEQ ID NO: 2724359 - DNA, 25 bp, Homo sapien
caaataggagccctgttactttcat

SEQ ID NO: 2724360 - DNA, 25 bp, Homo sapien
tgaaattgtacaatctcagaggaat

SEQ ID NO: 2724361 - DNA, 25 bp, Homo sapien
aattgtacaatctcagaggaatagc

SEQ ID NO: 2724362 - DNA, 25 bp, Homo sapien
tcttgtagcccattccaggggacac

SEQ ID NO: 2724363 - DNA, 25 bp, Homo sapien
ttccaggggacaccaagtgaagcat

SEQ ID NO: 2724364 - DNA, 25 bp, Homo sapien
cctcttgtagcccattccaggggac

SEQ ID NO: 2724365 - DNA, 25 bp, Homo sapien
tagcccattccaggggacaccaagt

SEQ ID NO: 2724366 - DNA, 25 bp, Homo sapien
ctctccttggagtcgggaataatgc

SEQ ID NO: 2724367 - DNA, 25 bp, Homo sapien
tctccttggagtcgggaataatgca

SEQ ID NO: 2724368 - DNA, 25 bp, Homo sapien
ctccttggagtcgggaataatgcac

SEQ ID NO: 2724369 - DNA, 25 bp, Homo sapien
catatctgtttataacggttaaagg

SEQ ID NO: 2724370 - DNA, 25 bp, Homo sapien
tccatatctgtttataacggttaaa

SEQ ID NO: 2724371 - DNA, 25 bp, Homo sapien
tcattgcttccatatctgtttataa

SEQ ID NO: 2724372 - DNA, 25 bp, Homo sapien
tgcttccatatctgtttataacggt

SEQ ID NO: 2724373 - DNA, 25 bp, Homo sapien
ggatctccgcctcttacttggctct

SEQ ID NO: 2724374 - DNA, 25 bp, Homo sapien
tcccaggatctccgcctcttacttg

SEQ ID NO: 2724375 - DNA, 25 bp, Homo sapien
gatctccgcctcttacttggctctg

SEQ ID NO: 2724376 - DNA, 25 bp, Homo sapien
caggatctccgcctcttacttggct

SEQ ID NO: 2724377 - DNA, 25 bp, Homo sapien
gcctcagctggtatgtggtttccat

SEQ ID NO: 2724378 - DNA, 25 bp, Homo sapien
tgtagcctcagctggtatgtggttt

SEQ ID NO: 2724379 - DNA, 25 bp, Homo sapien
ctgtcatgttctggcttggtgtagt

SEQ ID NO: 2724380 - DNA, 25 bp, Homo sapien
gcttggtgtagtctgctgctgtagc

SEQ ID NO: 2724381 - DNA, 25 bp, Homo sapien
aattggaggtaggtgggatgaagaa

SEQ ID NO: 2724382 - DNA, 25 bp, Homo sapien
gaagaaggcaggttgtatctgttgt

SEQ ID NO: 2724383 - DNA, 25 bp, Homo sapien
ctaaattggaggtaggtgggatgaa

SEQ ID NO: 2724384 - DNA, 25 bp, Homo sapien
gatgaagaaggcaggttgtatctgt

SEQ ID NO: 2724385 - DNA, 25 bp, Homo sapien
tactagtaatggatatctgaaaacc

SEQ ID NO: 2724386 - DNA, 25 bp, Homo sapien
tctgaatcatttttgaggttgccaa

SEQ ID NO: 2724387 - DNA, 25 bp, Homo sapien
catttttgaggttgccaatcaccat

SEQ ID NO: 2724388 - DNA, 25 bp, Homo sapien
gaaaacctgagatatctgaatcatt

SEQ ID NO: 2724389 - DNA, 25 bp, Homo sapien
cacagccagacagataaatatagac

SEQ ID NO: 2724390 - DNA, 25 bp, Homo sapien
atactcttggaatagatttcacagc

SEQ ID NO: 2724391 - DNA, 25 bp, Homo sapien
ggctgacagcttgaaatgcacaaaa

SEQ ID NO: 2724392 - DNA, 25 bp, Homo sapien
tagactaagaagctgagtaaaggga

SEQ ID NO: 2724393 - DNA, 25 bp, Homo sapien
cttcttgagcttgattactaggctc

SEQ ID NO: 2724394 - DNA, 25 bp, Homo sapien
agcttgattactaggctcttcaaaa

SEQ ID NO: 2724395 - DNA, 25 bp, Homo sapien
cttgagcttgattactaggctcttc

SEQ ID NO: 2724396 - DNA, 25 bp, Homo sapien
tgagcttgattactaggctcttcaa

SEQ ID NO: 2724397 - DNA, 25 bp, Homo sapien
tctgctatcaaaggtgctaagcctg

SEQ ID NO: 2724398 - DNA, 25 bp, Homo sapien
tatcaggatcaacctttgaatcaga

SEQ ID NO: 2724399 - DNA, 25 bp, Homo sapien
tggacttgaactatcaggatcaacc

SEQ ID NO: 2724400 - DNA, 25 bp, Homo sapien
caaaggtgctaagcctggacttgaa

SEQ ID NO: 2724401 - DNA, 25 bp, Homo sapien
gaaagaatggtcgtccagtaattag

SEQ ID NO: 2724402 - DNA, 25 bp, Homo sapien
tctgaaagaatggtcgtccagtaat

SEQ ID NO: 2724403 - DNA, 25 bp, Homo sapien
attctgaaagaatggtcgtccagta

SEQ ID NO: 2724404 - DNA, 25 bp, Homo sapien
gaatggtcgtccagtaattagtgct

SEQ ID NO: 2724405 - DNA, 25 bp, Homo sapien
gcagctgtagaactcattttcctga

SEQ ID NO: 2724406 - DNA, 25 bp, Homo sapien
tcattgccttagcagctgtagaact

SEQ ID NO: 2724407 - DNA, 25 bp, Homo sapien
attctcattgccttagcagctgtag

SEQ ID NO: 2724408 - DNA, 25 bp, Homo sapien
tctcattgccttagcagctgtagaa

SEQ ID NO: 2724409 - DNA, 25 bp, Homo sapien
cctggagagtgaaaaccaggtattt

SEQ ID NO: 2724410 - DNA, 25 bp, Homo sapien
cagtataatctaacaactttacaca

SEQ ID NO: 2724411 - DNA, 25 bp, Homo sapien
catgctcttgcaggcaattttctta

SEQ ID NO: 2724412 - DNA, 25 bp, Homo sapien
tacacatcgccatgctcttgcaggc

SEQ ID NO: 2724413 - DNA, 25 bp, Homo sapien
aaatgttacagtataatctaacaac

SEQ ID NO: 2724414 - DNA, 25 bp, Homo sapien
tggggaaagttctaagctgattgct

SEQ ID NO: 2724415 - DNA, 25 bp, Homo sapien
ggaaagttctaagctgattgctgct

SEQ ID NO: 2724416 - DNA, 25 bp, Homo sapien
ctggggaaagttctaagctgattgc

SEQ ID NO: 2724417 - DNA, 25 bp, Homo sapien
gggaaagttctaagctgattgctgc

SEQ ID NO: 2724418 - DNA, 25 bp, Homo sapien
aagccagtaagaacagacttccctg

SEQ ID NO: 2724419 - DNA, 25 bp, Homo sapien
actggactgctttcaaggatgaata

SEQ ID NO: 2724420 - DNA, 25 bp, Homo sapien
cagtttttgtttaagtcgtgcagta

SEQ ID NO: 2724421 - DNA, 25 bp, Homo sapien
gcagtatcaatcaggtctaagccag

SEQ ID NO: 2724422 - DNA, 25 bp, Homo sapien
ggcaagggtcaatagcaatgctgaa

SEQ ID NO: 2724423 - DNA, 25 bp, Homo sapien
tcctcccaagtaggcacaatcttca

SEQ ID NO: 2724424 - DNA, 25 bp, Homo sapien
caatcttcagctcagggcaagggtc

SEQ ID NO: 2724425 - DNA, 25 bp, Homo sapien
caatgctgaatgatggaggcctaag

SEQ ID NO: 2724426 - DNA, 25 bp, Homo sapien
gccctgagtcccatgaggcaccttt

SEQ ID NO: 2724427 - DNA, 25 bp, Homo sapien
ggcaagtgtgaagtatcaaagggca

SEQ ID NO: 2724428 - DNA, 25 bp, Homo sapien
cgcaacggtcaggtcatcaaaatac

SEQ ID NO: 2724429 - DNA, 25 bp, Homo sapien
gcttttgttgtggtcttcgcaacgg

SEQ ID NO: 2724430 - DNA, 25 bp, Homo sapien
tgttctccctcagtacagacctggt

SEQ ID NO: 2724431 - DNA, 25 bp, Homo sapien
cattgagtgcaacctaagcctgtag

SEQ ID NO: 2724432 - DNA, 25 bp, Homo sapien
caagttatcctcctcgagagtggga

SEQ ID NO: 2724433 - DNA, 25 bp, Homo sapien
tagtaaattgtgcaccaagaagacc

SEQ ID NO: 2724434 - DNA, 25 bp, Homo sapien
gctgccatctcaaatggacagcatc

SEQ ID NO: 2724435 - DNA, 25 bp, Homo sapien
tgcgcttatggatgtccgggtcctg

SEQ ID NO: 2724436 - DNA, 25 bp, Homo sapien
gcttatggatgtccgggtcctggcc

SEQ ID NO: 2724437 - DNA, 25 bp, Homo sapien
ctgcgcttatggatgtccgggtcct

SEQ ID NO: 2724438 - DNA, 25 bp, Homo sapien
gaaccatatcatctcttgtctggac

SEQ ID NO: 2724439 - DNA, 25 bp, Homo sapien
tgttactaaacttttctgcatacag

SEQ ID NO: 2724440 - DNA, 25 bp, Homo sapien
ttgagaaccatatcatctcttgtct

SEQ ID NO: 2724441 - DNA, 25 bp, Homo sapien
acttttctgcatacagtcttcccac

SEQ ID NO: 2724442 - DNA, 25 bp, Homo sapien
cagaccttagactcttcgtggatcc

SEQ ID NO: 2724443 - DNA, 25 bp, Homo sapien
aaaacagaccttagactcttcgtgg

SEQ ID NO: 2724444 - DNA, 25 bp, Homo sapien
actggcaaaacagaccttagactct

SEQ ID NO: 2724445 - DNA, 25 bp, Homo sapien
tagactcttcgtggatcctctggct

SEQ ID NO: 2724446 - DNA, 25 bp, Homo sapien
gagaaaagggcagcagcaaagctaa

SEQ ID NO: 2724447 - DNA, 25 bp, Homo sapien
aaagggcagcagcaaagctaaaggg

SEQ ID NO: 2724448 - DNA, 25 bp, Homo sapien
ctgaggagaaaagggcagcagcaaa

SEQ ID NO: 2724449 - DNA, 25 bp, Homo sapien
gaaaagggcagcagcaaagctaaag

SEQ ID NO: 2724450 - DNA, 25 bp, Homo sapien
ccaaaattggaggcctagggtattg

SEQ ID NO: 2724451 - DNA, 25 bp, Homo sapien
aattggaggcctagggtattgcatc

SEQ ID NO: 2724452 - DNA, 25 bp, Homo sapien
gaggcctagggtattgcatccaatt

SEQ ID NO: 2724453 - DNA, 25 bp, Homo sapien
tggaggcctagggtattgcatccaa

SEQ ID NO: 2724454 - DNA, 25 bp, Homo sapien
ggctctcgcatagccctgatcttac

SEQ ID NO: 2724455 - DNA, 25 bp, Homo sapien
tcataccaacatggctctcgcatag

SEQ ID NO: 2724456 - DNA, 25 bp, Homo sapien
gcaggttctgtgtccactcatacca

SEQ ID NO: 2724457 - DNA, 25 bp, Homo sapien
tgtccactcataccaacatggctct

SEQ ID NO: 2724458 - DNA, 25 bp, Homo sapien
ttcacccttaaccttgtgctgcagc

SEQ ID NO: 2724459 - DNA, 25 bp, Homo sapien
tgtggttggtgtgcatccagaagaa

SEQ ID NO: 2724460 - DNA, 25 bp, Homo sapien
cctctgatcattgtttcacccttaa

SEQ ID NO: 2724461 - DNA, 25 bp, Homo sapien
ttcatttccaatcaaccaagctcct

SEQ ID NO: 2724462 - DNA, 25 bp, Homo sapien
gtcatcagtgtcccaagagctgcag

SEQ ID NO: 2724463 - DNA, 25 bp, Homo sapien
tcatcagtgtcccaagagctgcagc

SEQ ID NO: 2724464 - DNA, 25 bp, Homo sapien
tgaacccacctggatttcttaggca

SEQ ID NO: 2724465 - DNA, 25 bp, Homo sapien
tccatttggacacgggctgaaccca

SEQ ID NO: 2724466 - DNA, 25 bp, Homo sapien
taaaactcagtggtgattgggaatg

SEQ ID NO: 2724467 - DNA, 25 bp, Homo sapien
cttttcctggtaaaactcagtggtg

SEQ ID NO: 2724468 - DNA, 25 bp, Homo sapien
tctcaagtgttttactcctcggata

SEQ ID NO: 2724469 - DNA, 25 bp, Homo sapien
ggatatacccaacagctgccttgct

SEQ ID NO: 2724470 - DNA, 25 bp, Homo sapien
ttaggcaagcagttctcaagtgttt

SEQ ID NO: 2724471 - DNA, 25 bp, Homo sapien
ttgacgtgtagctcattaggcaagc

SEQ ID NO: 2724472 - DNA, 25 bp, Homo sapien
tctgaggctataaaggggtcatcat

SEQ ID NO: 2724473 - DNA, 25 bp, Homo sapien
gaggcaatggtaggcttcttgagaa

SEQ ID NO: 2724474 - DNA, 25 bp, Homo sapien
taggcttcttgagaagaacattaaa

SEQ ID NO: 2724475 - DNA, 25 bp, Homo sapien
caagggtggagatatctatagcaag

SEQ ID NO: 2724476 - DNA, 25 bp, Homo sapien
atagtaactggtaaacaagttgtct

SEQ ID NO: 2724477 - DNA, 25 bp, Homo sapien
ggacgctttcatatctaaccctgca

SEQ ID NO: 2724478 - DNA, 25 bp, Homo sapien
gcaggttataccagcaagatagcct

SEQ ID NO: 2724479 - DNA, 25 bp, Homo sapien
tggcaatacttcaaacagagtcagc

SEQ ID NO: 2724480 - DNA, 25 bp, Homo sapien
cacagtccacttcatgcaggttata

SEQ ID NO: 2724481 - DNA, 25 bp, Homo sapien
gctttacaacacctgattttgacag

SEQ ID NO: 2724482 - DNA, 25 bp, Homo sapien
tgtcagcgcttagtccacatgcatg

SEQ ID NO: 2724483 - DNA, 25 bp, Homo sapien
taatcgtaagtgcattgtcagcgct

SEQ ID NO: 2724484 - DNA, 25 bp, Homo sapien
atttggcccatggactatagcttta

SEQ ID NO: 2724485 - DNA, 25 bp, Homo sapien
tctgcaggtaccttctgttcagcat

SEQ ID NO: 2724486 - DNA, 25 bp, Homo sapien
ttgtgctgtgccagcactctgcagg

SEQ ID NO: 2724487 - DNA, 25 bp, Homo sapien
cactctgcaggtaccttctgttcag

SEQ ID NO: 2724488 - DNA, 25 bp, Homo sapien
tgcttgtgctgtgccagcactctgc

SEQ ID NO: 2724489 - DNA, 25 bp, Homo sapien
gaattctgccacagtcctactccac

SEQ ID NO: 2724490 - DNA, 25 bp, Homo sapien
aattctgccacagtcctactccacc

SEQ ID NO: 2724491 - DNA, 25 bp, Homo sapien
tactccaccccgaccaagtaggata

SEQ ID NO: 2724492 - DNA, 25 bp, Homo sapien
acagtcctactccaccccgaccaag

SEQ ID NO: 2724493 - DNA, 25 bp, Homo sapien
cccatattttccctggcacagtata

SEQ ID NO: 2724494 - DNA, 25 bp, Homo sapien
ccttttcctctaaagaagtcagaca

SEQ ID NO: 2724495 - DNA, 25 bp, Homo sapien
cagtatagccttttcctctaaagaa

SEQ ID NO: 2724496 - DNA, 25 bp, Homo sapien
cattgccactcgatattcaagatgc

SEQ ID NO: 2724497 - DNA, 25 bp, Homo sapien
tcaaagattccatgagaagagagta

SEQ ID NO: 2724498 - DNA, 25 bp, Homo sapien
caaagattccatgagaagagagtac

SEQ ID NO: 2724499 - DNA, 25 bp, Homo sapien
ttcggagacaatgataacctttgcc

SEQ ID NO: 2724500 - DNA, 25 bp, Homo sapien
gccaagatttcaatcagcaatgtgg

SEQ ID NO: 2724501 - DNA, 25 bp, Homo sapien
tgtggagacattgagtgcgttcagc

SEQ ID NO: 2724502 - DNA, 25 bp, Homo sapien
agtgcgttcagcagttttgtgttca

SEQ ID NO: 2724503 - DNA, 25 bp, Homo sapien
tctccttcttgcatgggctatggga

SEQ ID NO: 2724504 - DNA, 25 bp, Homo sapien
gaccagaaggtctagtctgcagggc

SEQ ID NO: 2724505 - DNA, 25 bp, Homo sapien
gtctcctggcagaaagtaacaatgt

SEQ ID NO: 2724506 - DNA, 25 bp, Homo sapien
cttggaagggcatatgattggaacc

SEQ ID NO: 2724507 - DNA, 25 bp, Homo sapien
tggaaagccaaaatggaccagtcac

SEQ ID NO: 2724508 - DNA, 25 bp, Homo sapien
gaagttgacgctttttcctgcctga

SEQ ID NO: 2724509 - DNA, 25 bp, Homo sapien
caaatgagctaaatgaaggcccaga

SEQ ID NO: 2724510 - DNA, 25 bp, Homo sapien
caatagctgactgtattaggtgaca

SEQ ID NO: 2724511 - DNA, 25 bp, Homo sapien
taagcagctagttgaagagctctcc

SEQ ID NO: 2724512 - DNA, 25 bp, Homo sapien
ggccagttcactaaatgccccagcg

SEQ ID NO: 2724513 - DNA, 25 bp, Homo sapien
taatgtggcatcgaggtgccccgag

SEQ ID NO: 2724514 - DNA, 25 bp, Homo sapien
gctctcagaggctacagcagaaaac

SEQ ID NO: 2724515 - DNA, 25 bp, Homo sapien
tagtttagttttccactgcagtaga

SEQ ID NO: 2724516 - DNA, 25 bp, Homo sapien
tcatgtcattcccaattaagccttc

SEQ ID NO: 2724517 - DNA, 25 bp, Homo sapien
gatctgtcctgattagcataaagtg

SEQ ID NO: 2724518 - DNA, 25 bp, Homo sapien
tataactcgtatattcgactatagc

SEQ ID NO: 2724519 - DNA, 25 bp, Homo sapien
catcagatcgaagctgtgcaggcac

SEQ ID NO: 2724520 - DNA, 25 bp, Homo sapien
tatggccgtactggttataaacaca

SEQ ID NO: 2724521 - DNA, 25 bp, Homo sapien
gtgtctcatctagccttgggatttc

SEQ ID NO: 2724522 - DNA, 25 bp, Homo sapien
taaggtgaccccaacacgatttgac

SEQ ID NO: 2724523 - DNA, 25 bp, Homo sapien
taacatagtatctggcacctgagaa

SEQ ID NO: 2724524 - DNA, 25 bp, Homo sapien
taaagcaaacgtggactctaccagt

SEQ ID NO: 2724525 - DNA, 25 bp, Homo sapien
ttacagttcagaggaaagcgagcct

SEQ ID NO: 2724526 - DNA, 25 bp, Homo sapien
cagttaaggttgacgactagttgca

SEQ ID NO: 2724527 - DNA, 25 bp, Homo sapien
gacggaaatgcgataaagaaaacag

SEQ ID NO: 2724528 - DNA, 25 bp, Homo sapien
gaatgtcagcagacggaaatgcgat

SEQ ID NO: 2724529 - DNA, 25 bp, Homo sapien
ttgtcacatgaaatggccacaagac

SEQ ID NO: 2724530 - DNA, 25 bp, Homo sapien
ccacaagacatagggcttcgggaat

SEQ ID NO: 2724531 - DNA, 25 bp, Homo sapien
gcagcaaatgtctttgtggataact

SEQ ID NO: 2724532 - DNA, 25 bp, Homo sapien
tgagcagcaaatgtctttgtggata

SEQ ID NO: 2724533 - DNA, 25 bp, Homo sapien
tgtctttgtggataacttaaagtcc

SEQ ID NO: 2724534 - DNA, 25 bp, Homo sapien
aatgtctttgtggataacttaaagt

SEQ ID NO: 2724535 - DNA, 25 bp, Homo sapien
gcaagccttgtgtaagtagacataa

SEQ ID NO: 2724536 - DNA, 25 bp, Homo sapien
gctggcgccaagttgtcaaaagaaa

SEQ ID NO: 2724537 - DNA, 25 bp, Homo sapien
tacccacagttattgattctgctca

SEQ ID NO: 2724538 - DNA, 25 bp, Homo sapien
gtagacataatgtaagctatgtacc

SEQ ID NO: 2724539 - DNA, 25 bp, Homo sapien
tacacccgaagtactgaggtagagg

SEQ ID NO: 2724540 - DNA, 25 bp, Homo sapien
cagaggccttttgttggaatccatc

SEQ ID NO: 2724541 - DNA, 25 bp, Homo sapien
ggagctgcccagaaaaatagtcaga

SEQ ID NO: 2724542 - DNA, 25 bp, Homo sapien
tcctggtggaatgaatagcctctgt

SEQ ID NO: 2724543 - DNA, 25 bp, Homo sapien
tcacattgtacaacatagcagtaag

SEQ ID NO: 2724544 - DNA, 25 bp, Homo sapien
tacaacatagcagtaagcagtcaat

SEQ ID NO: 2724545 - DNA, 25 bp, Homo sapien
tgtacaacatagcagtaagcagtca

SEQ ID NO: 2724546 - DNA, 25 bp, Homo sapien
cattgtacaacatagcagtaagcag

SEQ ID NO: 2724547 - DNA, 25 bp, Homo sapien
tgggttccaaacctttacagacagc

SEQ ID NO: 2724548 - DNA, 25 bp, Homo sapien
tacagacagctctaacagcccagag

SEQ ID NO: 2724549 - DNA, 25 bp, Homo sapien
gacagctctaacagcccagagcaca

SEQ ID NO: 2724550 - DNA, 25 bp, Homo sapien
tttacagacagctctaacagcccag

SEQ ID NO: 2724551 - DNA, 25 bp, Homo sapien
tccccaaagcctttgaacagttcac

SEQ ID NO: 2724552 - DNA, 25 bp, Homo sapien
aggagaccttgagctcgcttaaata

SEQ ID NO: 2724553 - DNA, 25 bp, Homo sapien
ccttgagctcgcttaaataggaaga

SEQ ID NO: 2724554 - DNA, 25 bp, Homo sapien
gaatgggttggaattcgacttccta

SEQ ID NO: 2724555 - DNA, 25 bp, Homo sapien
cctccagaaccttcgaggctgtgtt

SEQ ID NO: 2724556 - DNA, 25 bp, Homo sapien
aaccttcgaggctgtgttcccctca

SEQ ID NO: 2724557 - DNA, 25 bp, Homo sapien
gcggctctcatttgtatgtgttttc

SEQ ID NO: 2724558 - DNA, 25 bp, Homo sapien
gttgtgatgcggctctcatttgtat

SEQ ID NO: 2724559 - DNA, 25 bp, Homo sapien
gcagcagtatcgagaaggatctttt

SEQ ID NO: 2724560 - DNA, 25 bp, Homo sapien
aaggaagggcagcagtatcgagaag

SEQ ID NO: 2724561 - DNA, 25 bp, Homo sapien
aaggatcttttggaccgtgtacagc

SEQ ID NO: 2724562 - DNA, 25 bp, Homo sapien
agaaggatcttttggaccgtgtaca

SEQ ID NO: 2724563 - DNA, 25 bp, Homo sapien
agcctcttccgacattctgcccaca

SEQ ID NO: 2724564 - DNA, 25 bp, Homo sapien
gcaccagggggagaatgaagtccag

SEQ ID NO: 2724565 - DNA, 25 bp, Homo sapien
ccaggatcaagggtctctgatctcc

SEQ ID NO: 2724566 - DNA, 25 bp, Homo sapien
caggcccctaaaatcttcattatca

SEQ ID NO: 2724567 - DNA, 25 bp, Homo sapien
tcacacggcagggtattccaacaga

SEQ ID NO: 2724568 - DNA, 25 bp, Homo sapien
acaaccagaaaggacatctacaccg

SEQ ID NO: 2724569 - DNA, 25 bp, Homo sapien
acggcagggtattccaacagacctg

SEQ ID NO: 2724570 - DNA, 25 bp, Homo sapien
cctcacacggcagggtattccaaca

SEQ ID NO: 2724571 - DNA, 25 bp, Homo sapien
gcagcagtggctacaagccacggta

SEQ ID NO: 2724572 - DNA, 25 bp, Homo sapien
tggctacaagccacggtaaagtaaa

SEQ ID NO: 2724573 - DNA, 25 bp, Homo sapien
ctggaacccaatgcctcactgcctc

SEQ ID NO: 2724574 - DNA, 25 bp, Homo sapien
agccacggtaaagtaaaaactgcat

SEQ ID NO: 2724575 - DNA, 25 bp, Homo sapien
tgataatgccggaggatctaactgc

SEQ ID NO: 2724576 - DNA, 25 bp, Homo sapien
catgctatagtatttgataatgccg

SEQ ID NO: 2724577 - DNA, 25 bp, Homo sapien
ccggaggatctaactgccagggaga

SEQ ID NO: 2724578 - DNA, 25 bp, Homo sapien
ggtgttgcagtttagccatgctata

SEQ ID NO: 2724579 - DNA, 25 bp, Homo sapien
catgtccagtgcttggctgcaccca

SEQ ID NO: 2724580 - DNA, 25 bp, Homo sapien
ttccagggttaggaacgcagagcag

SEQ ID NO: 2724581 - DNA, 25 bp, Homo sapien
acagcaagccttcgagtcctgcgga

SEQ ID NO: 2724582 - DNA, 25 bp, Homo sapien
tggctctcgcgagcatgtccagtgc

SEQ ID NO: 2724583 - DNA, 25 bp, Homo sapien
gatgcaccacatctatgcaccacag

SEQ ID NO: 2724584 - DNA, 25 bp, Homo sapien
cggcacccgatgcaccacatctatg

SEQ ID NO: 2724585 - DNA, 25 bp, Homo sapien
tatgcaccacagctacacccaggtc

SEQ ID NO: 2724586 - DNA, 25 bp, Homo sapien
cgagggatccgctcggcacccgatg

SEQ ID NO: 2724587 - DNA, 25 bp, Homo sapien
gaggaggcttggatccctagctgca

SEQ ID NO: 2724588 - DNA, 25 bp, Homo sapien
aggcttggatccctagctgcacgca

SEQ ID NO: 2724589 - DNA, 25 bp, Homo sapien
ggaggcttggatccctagctgcacg

SEQ ID NO: 2724590 - DNA, 25 bp, Homo sapien
ggcttggatccctagctgcacgcac

SEQ ID NO: 2724591 - DNA, 25 bp, Homo sapien
tccatgccagtagtgccaaaccttg

SEQ ID NO: 2724592 - DNA, 25 bp, Homo sapien
ttctcgggcatctgttgaatccatg

SEQ ID NO: 2724593 - DNA, 25 bp, Homo sapien
gtatcatatcacaccaggctccatg

SEQ ID NO: 2724594 - DNA, 25 bp, Homo sapien
gccaaaccttgacttaggtctccaa

SEQ ID NO: 2724595 - DNA, 25 bp, Homo sapien
ttttcatgcaatggagtataatggc

SEQ ID NO: 2724596 - DNA, 25 bp, Homo sapien
aaactttctgcaaccccataagtca

SEQ ID NO: 2724597 - DNA, 25 bp, Homo sapien
taatggcagatgttcccgcatgtca

SEQ ID NO: 2724598 - DNA, 25 bp, Homo sapien
gatgttcccgcatgtcatcaaactt

SEQ ID NO: 2724599 - DNA, 25 bp, Homo sapien
caatctctcatggtcttaaacaaca

SEQ ID NO: 2724600 - DNA, 25 bp, Homo sapien
tgcctgagacatattggtgtcactc

SEQ ID NO: 2724601 - DNA, 25 bp, Homo sapien
tcttaacctggattgctaacccata

SEQ ID NO: 2724602 - DNA, 25 bp, Homo sapien
tctctatgtgatctcagatggccac

SEQ ID NO: 2724603 - DNA, 25 bp, Homo sapien
cacaataatctgtcaaatgttggca

SEQ ID NO: 2724604 - DNA, 25 bp, Homo sapien
atccagagctttccacaataatctg

SEQ ID NO: 2724605 - DNA, 25 bp, Homo sapien
cagagctttccacaataatctgtca

SEQ ID NO: 2724606 - DNA, 25 bp, Homo sapien
gagctttccacaataatctgtcaaa

SEQ ID NO: 2724607 - DNA, 25 bp, Homo sapien
tctcgcttttgcagaaaaacttcag

SEQ ID NO: 2724608 - DNA, 25 bp, Homo sapien
tcggccacctaagacatagtcttca

SEQ ID NO: 2724609 - DNA, 25 bp, Homo sapien
tcactaatgtctcgcttttgcagaa

SEQ ID NO: 2724610 - DNA, 25 bp, Homo sapien
gacatagtcttcactaatgtctcgc

SEQ ID NO: 2724611 - DNA, 25 bp, Homo sapien
ctctctctctaactctgcagttttc

SEQ ID NO: 2724612 - DNA, 25 bp, Homo sapien
ctgcagttttctggtctgttacttg

SEQ ID NO: 2724613 - DNA, 25 bp, Homo sapien
ctccattctaccaggttctccccca

SEQ ID NO: 2724614 - DNA, 25 bp, Homo sapien
tctgcagttttctggtctgttactt

SEQ ID NO: 2724615 - DNA, 25 bp, Homo sapien
gacacaagtgtaagttgagaccaca

SEQ ID NO: 2724616 - DNA, 25 bp, Homo sapien
aaaattcagtctgctgagggtggca

SEQ ID NO: 2724617 - DNA, 25 bp, Homo sapien
ttgtggccctatgaaaattagttaa

SEQ ID NO: 2724618 - DNA, 25 bp, Homo sapien
aacactctatagaggttttggaagc

SEQ ID NO: 2724619 - DNA, 25 bp, Homo sapien
ccacagaggaataaaggattaccgc

SEQ ID NO: 2724620 - DNA, 25 bp, Homo sapien
ggtttgaactgcgtaggtcccatta

SEQ ID NO: 2724621 - DNA, 25 bp, Homo sapien
taccatgactgctgtgccgaaattt

SEQ ID NO: 2724622 - DNA, 25 bp, Homo sapien
tcagggaaaatcaggccaaccaggt

SEQ ID NO: 2724623 - DNA, 25 bp, Homo sapien
tgctccactaaaataatgtccttcg

SEQ ID NO: 2724624 - DNA, 25 bp, Homo sapien
cttccctgctccactaaaataatgt

SEQ ID NO: 2724625 - DNA, 25 bp, Homo sapien
ccttcgaaatatcctcagttcccat

SEQ ID NO: 2724626 - DNA, 25 bp, Homo sapien
taaaataatgtccttcgaaatatcc

SEQ ID NO: 2724627 - DNA, 25 bp, Homo sapien
caaaatgaatgatgaggtgatgaat

SEQ ID NO: 2724628 - DNA, 25 bp, Homo sapien
ggatgatcccaacgcgatgttagta

SEQ ID NO: 2724629 - DNA, 25 bp, Homo sapien
tgaatgatgaggtgatgaatagacg

SEQ ID NO: 2724630 - DNA, 25 bp, Homo sapien
gaatagacgggtaagtggatgatcc

SEQ ID NO: 2724631 - DNA, 25 bp, Homo sapien
gatccttggaagctcggaaggccgt

SEQ ID NO: 2724632 - DNA, 25 bp, Homo sapien
cccctggttctgcacactataactg

SEQ ID NO: 2724633 - DNA, 25 bp, Homo sapien
tgcacactataactgtgatccttgg

SEQ ID NO: 2724634 - DNA, 25 bp, Homo sapien
taactgtgatccttggaagctcgga

SEQ ID NO: 2724635 - DNA, 25 bp, Homo sapien
tttaggaacaaaacacacgctgctc

SEQ ID NO: 2724636 - DNA, 25 bp, Homo sapien
tgtgacacaatctccatgggaaaac

SEQ ID NO: 2724637 - DNA, 25 bp, Homo sapien
gctaaattatttcacgtatgcccca

SEQ ID NO: 2724638 - DNA, 25 bp, Homo sapien
ccagggtgagcagtatcagttcaca

SEQ ID NO: 2724639 - DNA, 25 bp, Homo sapien
tatatttgactcacataagagctgc

SEQ ID NO: 2724640 - DNA, 25 bp, Homo sapien
tccagatgcctaggtacaatttgat

SEQ ID NO: 2724641 - DNA, 25 bp, Homo sapien
gaccctgcatgtatcttgggcatcc

SEQ ID NO: 2724642 - DNA, 25 bp, Homo sapien
gctcattttctgtctgaccctgcat

SEQ ID NO: 2724643 - DNA, 25 bp, Homo sapien
tccctgcatttcctaaggatccctt

SEQ ID NO: 2724644 - DNA, 25 bp, Homo sapien
tacggccattagcactgccattcac

SEQ ID NO: 2724645 - DNA, 25 bp, Homo sapien
tttttacggccattagcactgccat

SEQ ID NO: 2724646 - DNA, 25 bp, Homo sapien
ggatcccttaaggtataccattata

SEQ ID NO: 2724647 - DNA, 25 bp, Homo sapien
ttgaattaacacaaacaaggcattc

SEQ ID NO: 2724648 - DNA, 25 bp, Homo sapien
tgaattaacacaaacaaggcattca

SEQ ID NO: 2724649 - DNA, 25 bp, Homo sapien
gaattaacacaaacaaggcattcat

SEQ ID NO: 2724650 - DNA, 25 bp, Homo sapien
gttgaattaacacaaacaaggcatt

SEQ ID NO: 2724651 - DNA, 25 bp, Homo sapien
aatcttacagcagatgaggacttct

SEQ ID NO: 2724652 - DNA, 25 bp, Homo sapien
agaatcttacagcagatgaggactt

SEQ ID NO: 2724653 - DNA, 25 bp, Homo sapien
tcttacagcagatgaggacttcttt

SEQ ID NO: 2724654 - DNA, 25 bp, Homo sapien
caagaatcttacagcagatgaggac

SEQ ID NO: 2724655 - DNA, 25 bp, Homo sapien
tggccatcaccggatggcaatacct

SEQ ID NO: 2724656 - DNA, 25 bp, Homo sapien
gccagctcgttactgctatgctggg

SEQ ID NO: 2724657 - DNA, 25 bp, Homo sapien
atcaccggatggcaatacctctgcc

SEQ ID NO: 2724658 - DNA, 25 bp, Homo sapien
caatacctctgccagctcgttactg

SEQ ID NO: 2724659 - DNA, 25 bp, Homo sapien
tgttttcagaaaagtcaggcctgag

SEQ ID NO: 2724660 - DNA, 25 bp, Homo sapien
tcagaaaagtcaggcctgagttttg

SEQ ID NO: 2724661 - DNA, 25 bp, Homo sapien
gatgttttcagaaaagtcaggcctg

SEQ ID NO: 2724662 - DNA, 25 bp, Homo sapien
agaaaagtcaggcctgagttttggc

SEQ ID NO: 2724663 - DNA, 25 bp, Homo sapien
gactcggtttccatagtgcatcctg

SEQ ID NO: 2724664 - DNA, 25 bp, Homo sapien
gctgtcatggtcataggccttcaga

SEQ ID NO: 2724665 - DNA, 25 bp, Homo sapien
ccagagaggagcttgtgtagcgaca

SEQ ID NO: 2724666 - DNA, 25 bp, Homo sapien
tcctctggtcaaagagcggtgtcgc

SEQ ID NO: 2724667 - DNA, 25 bp, Homo sapien
gggctcaataacaacatgcggcatg

SEQ ID NO: 2724668 - DNA, 25 bp, Homo sapien
tacttttggcctgcacagtttttaa

SEQ ID NO: 2724669 - DNA, 25 bp, Homo sapien
gctatgagtttgatatggccaagca

SEQ ID NO: 2724670 - DNA, 25 bp, Homo sapien
cagactctgactacattttcatgca

SEQ ID NO: 2724671 - DNA, 25 bp, Homo sapien
catcacttttgctggctggcaattc

SEQ ID NO: 2724672 - DNA, 25 bp, Homo sapien
atcacttttgctggctggcaattct

SEQ ID NO: 2724673 - DNA, 25 bp, Homo sapien
ccatcacttttgctggctggcaatt

SEQ ID NO: 2724674 - DNA, 25 bp, Homo sapien
ggagatggcaggttcttgcatttga

SEQ ID NO: 2724675 - DNA, 25 bp, Homo sapien
gagatggcaggttcttgcatttgat

SEQ ID NO: 2724676 - DNA, 25 bp, Homo sapien
gatggcaggttcttgcatttgatac

SEQ ID NO: 2724677 - DNA, 25 bp, Homo sapien
agatggcaggttcttgcatttgata

SEQ ID NO: 2724678 - DNA, 25 bp, Homo sapien
tccaggttgagagtttgtgcaaaaa

SEQ ID NO: 2724679 - DNA, 25 bp, Homo sapien
gaccataagggagggcatagaatca

SEQ ID NO: 2724680 - DNA, 25 bp, Homo sapien
gcaatatcatttagatagtgacacc

SEQ ID NO: 2724681 - DNA, 25 bp, Homo sapien
tacacatccctacagtcgaaacgtt

SEQ ID NO: 2724682 - DNA, 25 bp, Homo sapien
ttttgtgggtctggccgaagagaaa

SEQ ID NO: 2724683 - DNA, 25 bp, Homo sapien
cacattttgtgggtctggccgaaga

SEQ ID NO: 2724684 - DNA, 25 bp, Homo sapien
cattttgtgggtctggccgaagaga

SEQ ID NO: 2724685 - DNA, 25 bp, Homo sapien
acattttgtgggtctggccgaagag

SEQ ID NO: 2724686 - DNA, 25 bp, Homo sapien
gaaaagggccacgatctgattgaaa

SEQ ID NO: 2724687 - DNA, 25 bp, Homo sapien
ggaaaagggccacgatctgattgaa

SEQ ID NO: 2724688 - DNA, 25 bp, Homo sapien
aagggccacgatctgattgaaacgt

SEQ ID NO: 2724689 - DNA, 25 bp, Homo sapien
aaagggccacgatctgattgaaacg

SEQ ID NO: 2724690 - DNA, 25 bp, Homo sapien
gatgggtgaggacgcagtaaggagc

SEQ ID NO: 2724691 - DNA, 25 bp, Homo sapien
gcaaggatgggtgaggacgcagtaa

SEQ ID NO: 2724692 - DNA, 25 bp, Homo sapien
ctaggcaaggatgggtgaggacgca

SEQ ID NO: 2724693 - DNA, 25 bp, Homo sapien
tgaggacgcagtaaggagctgaaag

SEQ ID NO: 2724694 - DNA, 25 bp, Homo sapien
caggagagagacagcggatgaagag

SEQ ID NO: 2724695 - DNA, 25 bp, Homo sapien
tctctctattcacacaggaaacagc

SEQ ID NO: 2724696 - DNA, 25 bp, Homo sapien
aggagagagacagcggatgaagagg

SEQ ID NO: 2724697 - DNA, 25 bp, Homo sapien
ctttctctctattcacacaggaaac

SEQ ID NO: 2724698 - DNA, 25 bp, Homo sapien
ttgtatgtgtgtcttcacgttagaa

SEQ ID NO: 2724699 - DNA, 25 bp, Homo sapien
taagtgtcaaggttgggcgttgatg

SEQ ID NO: 2724700 - DNA, 25 bp, Homo sapien
cctttgttcgtctccaacgtggtag

SEQ ID NO: 2724701 - DNA, 25 bp, Homo sapien
caaggttgggcgttgatgattctga

SEQ ID NO: 2724702 - DNA, 25 bp, Homo sapien
tcagtgtagggatacaaaataggag

SEQ ID NO: 2724703 - DNA, 25 bp, Homo sapien
cttcagtgtagggatacaaaatagg

SEQ ID NO: 2724704 - DNA, 25 bp, Homo sapien
tgcttcagtgtagggatacaaaata

SEQ ID NO: 2724705 - DNA, 25 bp, Homo sapien
cagtgtagggatacaaaataggaga

SEQ ID NO: 2724706 - DNA, 25 bp, Homo sapien
tgccagggtccggtctggaagggca

SEQ ID NO: 2724707 - DNA, 25 bp, Homo sapien
ctatcctgtcgcttgattctgcttt

SEQ ID NO: 2724708 - DNA, 25 bp, Homo sapien
gccagggtccggtctggaagggcat

SEQ ID NO: 2724709 - DNA, 25 bp, Homo sapien
tcctgtcgcttgattctgctttgcc

SEQ ID NO: 2724710 - DNA, 25 bp, Homo sapien
gcaggaactagcatacttccctgtt

SEQ ID NO: 2724711 - DNA, 25 bp, Homo sapien
gaagtcttgtaagtccacttgtgtg

SEQ ID NO: 2724712 - DNA, 25 bp, Homo sapien
tgatagactttaacctgagcaatga

SEQ ID NO: 2724713 - DNA, 25 bp, Homo sapien
gtgggtctgcaggaactagcatact

SEQ ID NO: 2724714 - DNA, 25 bp, Homo sapien
ccctgtcatgttgattgatccccat

SEQ ID NO: 2724715 - DNA, 25 bp, Homo sapien
ttccctgtcatgttgattgatcccc

SEQ ID NO: 2724716 - DNA, 25 bp, Homo sapien
cttccctgtcatgttgattgatccc

SEQ ID NO: 2724717 - DNA, 25 bp, Homo sapien
tccctgtcatgttgattgatcccca

SEQ ID NO: 2724718 - DNA, 25 bp, Homo sapien
ctgcaaaccaagagggacgggagga

SEQ ID NO: 2724719 - DNA, 25 bp, Homo sapien
aggagagagaaagcatgacagccga

SEQ ID NO: 2724720 - DNA, 25 bp, Homo sapien
ccattctgacttgtcgtttttagaa

SEQ ID NO: 2724721 - DNA, 25 bp, Homo sapien
atgacagccgagcaagctcccactt

SEQ ID NO: 2724722 - DNA, 25 bp, Homo sapien
tcatcgaatgcgaatctgtagggtg

SEQ ID NO: 2724723 - DNA, 25 bp, Homo sapien
tgtagggtgtcagcagaactgcctc

SEQ ID NO: 2724724 - DNA, 25 bp, Homo sapien
ggtgtcagcagaactgcctccattc

SEQ ID NO: 2724725 - DNA, 25 bp, Homo sapien
cgaatctgtagggtgtcagcagaac

SEQ ID NO: 2724726 - DNA, 25 bp, Homo sapien
aattctttcccaaactccgagcagg

SEQ ID NO: 2724727 - DNA, 25 bp, Homo sapien
gaactgcctcccgtatgatttgaac

SEQ ID NO: 2724728 - DNA, 25 bp, Homo sapien
gagatgttcccgaacaacacgccgt

SEQ ID NO: 2724729 - DNA, 25 bp, Homo sapien
tctcttctcaaagggcacggtggac

SEQ ID NO: 2724730 - DNA, 25 bp, Homo sapien
tctgaggaaactacacctagatcta

SEQ ID NO: 2724731 - DNA, 25 bp, Homo sapien
ggaaactacacctagatctattaga

SEQ ID NO: 2724732 - DNA, 25 bp, Homo sapien
tctattagatgacgtgcaccaacca

SEQ ID NO: 2724733 - DNA, 25 bp, Homo sapien
cacctagatctattagatgacgtgc

SEQ ID NO: 2724734 - DNA, 25 bp, Homo sapien
tctgctttgagacttagcctgagca

SEQ ID NO: 2724735 - DNA, 25 bp, Homo sapien
tcaaatagctccgatgtccaaggct

SEQ ID NO: 2724736 - DNA, 25 bp, Homo sapien
gagagaactaactgtccaccggaat

SEQ ID NO: 2724737 - DNA, 25 bp, Homo sapien
cagcttccggttttcatcacctcta

SEQ ID NO: 2724738 - DNA, 25 bp, Homo sapien
gagaagagacatagaacctaaaaga

SEQ ID NO: 2724739 - DNA, 25 bp, Homo sapien
catgagaagagacatagaacctaaa

SEQ ID NO: 2724740 - DNA, 25 bp, Homo sapien
tgggaatacatgagaagagacatag

SEQ ID NO: 2724741 - DNA, 25 bp, Homo sapien
gagctgggaatacatgagaagagac

SEQ ID NO: 2724742 - DNA, 25 bp, Homo sapien
aagagagaaactactcattgtgtga

SEQ ID NO: 2724743 - DNA, 25 bp, Homo sapien
tagtggaaagccgtgaacccttcat

SEQ ID NO: 2724744 - DNA, 25 bp, Homo sapien
attgtgtgattctccaagctaagat

SEQ ID NO: 2724745 - DNA, 25 bp, Homo sapien
gctaagatttctagtggaaagccgt

SEQ ID NO: 2724746 - DNA, 25 bp, Homo sapien
atcgatgggagactgattttgccct

SEQ ID NO: 2724747 - DNA, 25 bp, Homo sapien
ttcatctcgcataattatgttttca

SEQ ID NO: 2724748 - DNA, 25 bp, Homo sapien
tgccctaattcatctcgcataatta

SEQ ID NO: 2724749 - DNA, 25 bp, Homo sapien
gatgggagactgattttgccctaat

SEQ ID NO: 2724750 - DNA, 25 bp, Homo sapien
tcgttgtcagagtcagtcagggtaa

SEQ ID NO: 2724751 - DNA, 25 bp, Homo sapien
gaaggatccccatgtcggagcagta

SEQ ID NO: 2724752 - DNA, 25 bp, Homo sapien
gaccctgtgctaagggagtagccct

SEQ ID NO: 2724753 - DNA, 25 bp, Homo sapien
taagggccgagttttcacgactgga

SEQ ID NO: 2724754 - DNA, 25 bp, Homo sapien
agcacctgttccaagtttgatcttc

SEQ ID NO: 2724755 - DNA, 25 bp, Homo sapien
ccaagtttgatcttcaatacggata

SEQ ID NO: 2724756 - DNA, 25 bp, Homo sapien
tcaatacggatatgaggcattgccg

SEQ ID NO: 2724757 - DNA, 25 bp, Homo sapien
ggatatgaggcattgccgcctggaa

SEQ ID NO: 2724758 - DNA, 25 bp, Homo sapien
tgctagatttattgagaggccgctt

SEQ ID NO: 2724759 - DNA, 25 bp, Homo sapien
aatagaattccactcgcatgtttag

SEQ ID NO: 2724760 - DNA, 25 bp, Homo sapien
taagagtaatagagtgggagtagaa

SEQ ID NO: 2724761 - DNA, 25 bp, Homo sapien
taagaaacgctccaatgctagattt

SEQ ID NO: 2724762 - DNA, 25 bp, Homo sapien
tcttggcatactggaggtcttcgtg

SEQ ID NO: 2724763 - DNA, 25 bp, Homo sapien
gctatcctgcttatccactggttga

SEQ ID NO: 2724764 - DNA, 25 bp, Homo sapien
tttgtttctgactcgctggttccca

SEQ ID NO: 2724765 - DNA, 25 bp, Homo sapien
gagagtcactcctgaatgttccttg

SEQ ID NO: 2724766 - DNA, 25 bp, Homo sapien
tatttcaaggaaagcggattcccca

SEQ ID NO: 2724767 - DNA, 25 bp, Homo sapien
gaactggttcagagctccccagagg

SEQ ID NO: 2724768 - DNA, 25 bp, Homo sapien
gacttacatgggtgagacagcatca

SEQ ID NO: 2724769 - DNA, 25 bp, Homo sapien
tccaaggctttaaagggcatgctcc

SEQ ID NO: 2724770 - DNA, 25 bp, Homo sapien
tcccatggttctctcaatctcttcc

SEQ ID NO: 2724771 - DNA, 25 bp, Homo sapien
cccatggttctctcaatctcttcca

SEQ ID NO: 2724772 - DNA, 25 bp, Homo sapien
tatgatgaaaattgtcagttagcat

SEQ ID NO: 2724773 - DNA, 25 bp, Homo sapien
tgtccataagcatccttgccctgga

SEQ ID NO: 2724774 - DNA, 25 bp, Homo sapien
tcagctcctgtccataagcatcctt

SEQ ID NO: 2724775 - DNA, 25 bp, Homo sapien
gaggaattccaagcatcagctcctg

SEQ ID NO: 2724776 - DNA, 25 bp, Homo sapien
aattataatttgaggaattccaagc

SEQ ID NO: 2724777 - DNA, 25 bp, Homo sapien
ttccccaattgcacgggcctttcat

SEQ ID NO: 2724778 - DNA, 25 bp, Homo sapien
catcctcaagcttaataacactctc

SEQ ID NO: 2724779 - DNA, 25 bp, Homo sapien
tcttctacccatcctcaagcttaat

SEQ ID NO: 2724780 - DNA, 25 bp, Homo sapien
attccccaattgcacgggcctttca

SEQ ID NO: 2724781 - DNA, 25 bp, Homo sapien
ctgttaatatttttgagcacatgct

SEQ ID NO: 2724782 - DNA, 25 bp, Homo sapien
aatcctattatgtatgcatgccgct

SEQ ID NO: 2724783 - DNA, 25 bp, Homo sapien
gtgtaagccaatttttaggctgctt

SEQ ID NO: 2724784 - DNA, 25 bp, Homo sapien
taattggttctataatgtgtaagcc

SEQ ID NO: 2724785 - DNA, 25 bp, Homo sapien
gaactctcttcttttaggacccaga

SEQ ID NO: 2724786 - DNA, 25 bp, Homo sapien
gataggccatctgtctcaacaagtg

SEQ ID NO: 2724787 - DNA, 25 bp, Homo sapien
ggtttgccactaaactacatgcagg

SEQ ID NO: 2724788 - DNA, 25 bp, Homo sapien
aattgtctacatgctccatactgga

SEQ ID NO: 2724789 - DNA, 25 bp, Homo sapien
atcacagtttcctatcctctctcag

SEQ ID NO: 2724790 - DNA, 25 bp, Homo sapien
ggtggattccgatttagaatgcatc

SEQ ID NO: 2724791 - DNA, 25 bp, Homo sapien
tctaagttgaccaaatatgttcctc

SEQ ID NO: 2724792 - DNA, 25 bp, Homo sapien
ttatataatgtacccagcagttccc

SEQ ID NO: 2724793 - DNA, 25 bp, Homo sapien
ggagactgataatttagaccaactt

SEQ ID NO: 2724794 - DNA, 25 bp, Homo sapien
aacacagacacaacttgggtaacaa

SEQ ID NO: 2724795 - DNA, 25 bp, Homo sapien
tggtctctcttctaacaatgatacg

SEQ ID NO: 2724796 - DNA, 25 bp, Homo sapien
aagactcagcgtactccacaaaggt

SEQ ID NO: 2724797 - DNA, 25 bp, Homo sapien
cgcacacatgtagtttgatcagcag

SEQ ID NO: 2724798 - DNA, 25 bp, Homo sapien
tgatcagcagtcagtcaacacaaat

SEQ ID NO: 2724799 - DNA, 25 bp, Homo sapien
gcaaacttttgatagagcttccagg

SEQ ID NO: 2724800 - DNA, 25 bp, Homo sapien
ggagattctaaaagcccactggaac

SEQ ID NO: 2724801 - DNA, 25 bp, Homo sapien
tttagttcaaatgagggctgagttt

SEQ ID NO: 2724802 - DNA, 25 bp, Homo sapien
gaattgtaacttaggcctgtctgac

SEQ ID NO: 2724803 - DNA, 25 bp, Homo sapien
tatgtaactttgaaaaggccatcac

SEQ ID NO: 2724804 - DNA, 25 bp, Homo sapien
cttggtttactgaagagaagttgca

SEQ ID NO: 2724805 - DNA, 25 bp, Homo sapien
ggtgccagaaggtcaagatacttgt

SEQ ID NO: 2724806 - DNA, 25 bp, Homo sapien
cacacttacaaacgaaggtgccaga

SEQ ID NO: 2724807 - DNA, 25 bp, Homo sapien
tcagatccaagggagtccgggttct

SEQ ID NO: 2724808 - DNA, 25 bp, Homo sapien
tgcatggctcatatcagaattcaag

SEQ ID NO: 2724809 - DNA, 25 bp, Homo sapien
attcagatttaaatacgagttcacg

SEQ ID NO: 2724810 - DNA, 25 bp, Homo sapien
gtgctttcccatattgcgaatctct

SEQ ID NO: 2724811 - DNA, 25 bp, Homo sapien
cgagttcacgttgatgatgagctgt

SEQ ID NO: 2724812 - DNA, 25 bp, Homo sapien
tgttttatggaggtaaaccactcac

SEQ ID NO: 2724813 - DNA, 25 bp, Homo sapien
gagacagacagacgcttattgctta

SEQ ID NO: 2724814 - DNA, 25 bp, Homo sapien
caataattctgactgccactgggaa

SEQ ID NO: 2724815 - DNA, 25 bp, Homo sapien
catggtgtctttggtcgcactggta

SEQ ID NO: 2724816 - DNA, 25 bp, Homo sapien
aattattacaatgcagccagtaggg

SEQ ID NO: 2724817 - DNA, 25 bp, Homo sapien
gcattgccccgcttcttagaatagg

SEQ ID NO: 2724818 - DNA, 25 bp, Homo sapien
ggaaactcatacacaagtttaccag

SEQ ID NO: 2724819 - DNA, 25 bp, Homo sapien
aaccacaagaacttggcttagcaaa

SEQ ID NO: 2724820 - DNA, 25 bp, Homo sapien
ggacacatatgaaagtaaagtatct

SEQ ID NO: 2724821 - DNA, 25 bp, Homo sapien
tgctgaatccaaaattaggattcat

SEQ ID NO: 2724822 - DNA, 25 bp, Homo sapien
tttcagatcattgagtagaggagga

SEQ ID NO: 2724823 - DNA, 25 bp, Homo sapien
ttcagatcattgagtagaggaggaa

SEQ ID NO: 2724824 - DNA, 25 bp, Homo sapien
ttaaaaggtgcatgctcaaatgagg

SEQ ID NO: 2724825 - DNA, 25 bp, Homo sapien
ttaaggttctctctcacaactctca

SEQ ID NO: 2724826 - DNA, 25 bp, Homo sapien
ttttaaaaggtgcatgctcaaatga

SEQ ID NO: 2724827 - DNA, 25 bp, Homo sapien
tccaaattggatgtcttcagtggaa

SEQ ID NO: 2724828 - DNA, 25 bp, Homo sapien
aaaaatagcagaaccaattaaactg

SEQ ID NO: 2724829 - DNA, 25 bp, Homo sapien
tagcagaaccaattaaactgtctgt

SEQ ID NO: 2724830 - DNA, 25 bp, Homo sapien
aatagcagaaccaattaaactgtct

SEQ ID NO: 2724831 - DNA, 25 bp, Homo sapien
aaatagcagaaccaattaaactgtc

SEQ ID NO: 2724832 - DNA, 25 bp, Homo sapien
gttagggcagcaattatccgagata

SEQ ID NO: 2724833 - DNA, 25 bp, Homo sapien
gtgacacctagagattccaagtatt

SEQ ID NO: 2724834 - DNA, 25 bp, Homo sapien
cgcttgatgacttttgacctgttgg

SEQ ID NO: 2724835 - DNA, 25 bp, Homo sapien
tgccatggctattatgtgacaccta

SEQ ID NO: 2724836 - DNA, 25 bp, Homo sapien
taaacatcagagttgaaagaagtaa

SEQ ID NO: 2724837 - DNA, 25 bp, Homo sapien
gacagggcaatcttctaaagctacc

SEQ ID NO: 2724838 - DNA, 25 bp, Homo sapien
agtaaacatcagagttgaaagaagt

SEQ ID NO: 2724839 - DNA, 25 bp, Homo sapien
gtaaacatcagagttgaaagaagta

SEQ ID NO: 2724840 - DNA, 25 bp, Homo sapien
ctaacctggaatttggccagagcaa

SEQ ID NO: 2724841 - DNA, 25 bp, Homo sapien
cagagcaatggggtgtatgcctcct

SEQ ID NO: 2724842 - DNA, 25 bp, Homo sapien
ccagagcaatggggtgtatgcctcc

SEQ ID NO: 2724843 - DNA, 25 bp, Homo sapien
gccagagcaatggggtgtatgcctc

SEQ ID NO: 2724844 - DNA, 25 bp, Homo sapien
tttggtcctccacgttcattctcgg

SEQ ID NO: 2724845 - DNA, 25 bp, Homo sapien
tactaagtcgccttttcccaagtca

SEQ ID NO: 2724846 - DNA, 25 bp, Homo sapien
gacaaccggcattcggaaacattta

SEQ ID NO: 2724847 - DNA, 25 bp, Homo sapien
ctgtgataatgaatagactgttcaa

SEQ ID NO: 2724848 - DNA, 25 bp, Homo sapien
atatcagaagcgagcgaggaagtac

SEQ ID NO: 2724849 - DNA, 25 bp, Homo sapien
tggatagatatcagaagcgagcgag

SEQ ID NO: 2724850 - DNA, 25 bp, Homo sapien
tagatatcagaagcgagcgaggaag

SEQ ID NO: 2724851 - DNA, 25 bp, Homo sapien
cagatggatagatatcagaagcgag

SEQ ID NO: 2724852 - DNA, 25 bp, Homo sapien
tcagtaatccgctcccacacgcatc

SEQ ID NO: 2724853 - DNA, 25 bp, Homo sapien
aatccgctcccacacgcatcatcct

SEQ ID NO: 2724854 - DNA, 25 bp, Homo sapien
tccgctcccacacgcatcatcctct

SEQ ID NO: 2724855 - DNA, 25 bp, Homo sapien
gtaatccgctcccacacgcatcatc

SEQ ID NO: 2724856 - DNA, 25 bp, Homo sapien
tatcacagcagtagaaaaaggtccc

SEQ ID NO: 2724857 - DNA, 25 bp, Homo sapien
cagaagttgcattgggatgaagcta

SEQ ID NO: 2724858 - DNA, 25 bp, Homo sapien
aaggtcccacgggacacagaggaag

SEQ ID NO: 2724859 - DNA, 25 bp, Homo sapien
taagaatacaaggacatatcacagc

SEQ ID NO: 2724860 - DNA, 25 bp, Homo sapien
agtgtaatgggaacacaggccatgt

SEQ ID NO: 2724861 - DNA, 25 bp, Homo sapien
tgaccataacaccattggcaaggcc

SEQ ID NO: 2724862 - DNA, 25 bp, Homo sapien
caggccatgtgatttggattgagag

SEQ ID NO: 2724863 - DNA, 25 bp, Homo sapien
gatttggattgagaggaacaagtaa

SEQ ID NO: 2724864 - DNA, 25 bp, Homo sapien
ctgtgatgaattagtcacagttaca

SEQ ID NO: 2724865 - DNA, 25 bp, Homo sapien
tcaacattgtgaagtattatagatt

SEQ ID NO: 2724866 - DNA, 25 bp, Homo sapien
ttttgcatgtctaaacagctgtgat

SEQ ID NO: 2724867 - DNA, 25 bp, Homo sapien
gtgatgaattagtcacagttacaat

SEQ ID NO: 2724868 - DNA, 25 bp, Homo sapien
tcttagtgggagcatggcaaattgc

SEQ ID NO: 2724869 - DNA, 25 bp, Homo sapien
tgagagcctatctgtgccaagtgct

SEQ ID NO: 2724870 - DNA, 25 bp, Homo sapien
gctgtgctaggctcccgatgcaaat

SEQ ID NO: 2724871 - DNA, 25 bp, Homo sapien
taaggtgagctctacaaatgggtgc

SEQ ID NO: 2724872 - DNA, 25 bp, Homo sapien
caactctcactttcggtgtttacct

SEQ ID NO: 2724873 - DNA, 25 bp, Homo sapien
ctctcactttcggtgtttaccttca

SEQ ID NO: 2724874 - DNA, 25 bp, Homo sapien
cacaactctcactttcggtgtttac

SEQ ID NO: 2724875 - DNA, 25 bp, Homo sapien
tctcactttcggtgtttaccttcat

SEQ ID NO: 2724876 - DNA, 25 bp, Homo sapien
agtgttttgagctgcctcgtggcca

SEQ ID NO: 2724877 - DNA, 25 bp, Homo sapien
tatgatgcgaaaaccctgaaagtag

SEQ ID NO: 2724878 - DNA, 25 bp, Homo sapien
taatgaagccgcaagcacagaactc

SEQ ID NO: 2724879 - DNA, 25 bp, Homo sapien
gactggcctcttgaatatgatgcga

SEQ ID NO: 2724880 - DNA, 25 bp, Homo sapien
tctgcataaatttcacgctccaaca

SEQ ID NO: 2724881 - DNA, 25 bp, Homo sapien
tccattctgcataaatttcacgctc

SEQ ID NO: 2724882 - DNA, 25 bp, Homo sapien
tttcacgctccaacacaacagcaat

SEQ ID NO: 2724883 - DNA, 25 bp, Homo sapien
taaatttcacgctccaacacaacag

SEQ ID NO: 2724884 - DNA, 25 bp, Homo sapien
aaatattgcacatccctagcccaag

SEQ ID NO: 2724885 - DNA, 25 bp, Homo sapien
tgcacatccctagcccaagaaatct

SEQ ID NO: 2724886 - DNA, 25 bp, Homo sapien
gcagcaagaggtagaatatttagcc

SEQ ID NO: 2724887 - DNA, 25 bp, Homo sapien
caagaggtagaatatttagccaaat

SEQ ID NO: 2724888 - DNA, 25 bp, Homo sapien
gctccacctgactgggactcttgag

SEQ ID NO: 2724889 - DNA, 25 bp, Homo sapien
ccagcagggctcacatttgagggaa

SEQ ID NO: 2724890 - DNA, 25 bp, Homo sapien
catttgcgacgtgcatcaccagcag

SEQ ID NO: 2724891 - DNA, 25 bp, Homo sapien
cagctctacagcgaagcacagggct

SEQ ID NO: 2724892 - DNA, 25 bp, Homo sapien
tgaggtttatagtcagctcccaggt

SEQ ID NO: 2724893 - DNA, 25 bp, Homo sapien
cctggggactgttttccgattggct

SEQ ID NO: 2724894 - DNA, 25 bp, Homo sapien
gactgttttccgattggctttgagg

SEQ ID NO: 2724895 - DNA, 25 bp, Homo sapien
caccaatacactatctgtactgata

SEQ ID NO: 2724896 - DNA, 25 bp, Homo sapien
ctggcccttctctgaatacaacttg

SEQ ID NO: 2724897 - DNA, 25 bp, Homo sapien
actgcccaggatacttccagactga

SEQ ID NO: 2724898 - DNA, 25 bp, Homo sapien
tggcccttctctgaatacaacttgc

SEQ ID NO: 2724899 - DNA, 25 bp, Homo sapien
ggatacttccagactgagtaggcat

SEQ ID NO: 2724900 - DNA, 25 bp, Homo sapien
caattggtggcaaatccttccatct

SEQ ID NO: 2724901 - DNA, 25 bp, Homo sapien
tgtgttaaaccatccttctcttcaa

SEQ ID NO: 2724902 - DNA, 25 bp, Homo sapien
tagtgactgacttatggcatttttt

SEQ ID NO: 2724903 - DNA, 25 bp, Homo sapien
gagaagctcttgaaaggtatgtgtt

SEQ ID NO: 2724904 - DNA, 25 bp, Homo sapien
ttctcttcaatacaaagcgccttct

SEQ ID NO: 2724905 - DNA, 25 bp, Homo sapien
gagtcgctgccaaccctctctccgt

SEQ ID NO: 2724906 - DNA, 25 bp, Homo sapien
taactggagtcgctgccaaccctct

SEQ ID NO: 2724907 - DNA, 25 bp, Homo sapien
ttaactggagtcgctgccaaccctc

SEQ ID NO: 2724908 - DNA, 25 bp, Homo sapien
cgctgccaaccctctctccgtagga

SEQ ID NO: 2724909 - DNA, 25 bp, Homo sapien
gagaactgatctccactaatggttg

SEQ ID NO: 2724910 - DNA, 25 bp, Homo sapien
tggttgtggcctcttcacccagtcc

SEQ ID NO: 2724911 - DNA, 25 bp, Homo sapien
gtaataaacattcctaaagcaatgg

SEQ ID NO: 2724912 - DNA, 25 bp, Homo sapien
cagtccacagtgaccatgacagatc

SEQ ID NO: 2724913 - DNA, 25 bp, Homo sapien
ttccaagagcgaatccctccacgct

SEQ ID NO: 2724914 - DNA, 25 bp, Homo sapien
atcccttccaagagcgaatccctcc

SEQ ID NO: 2724915 - DNA, 25 bp, Homo sapien
gagcgaatccctccacgctcaccat

SEQ ID NO: 2724916 - DNA, 25 bp, Homo sapien
aagagcgaatccctccacgctcacc

SEQ ID NO: 2724917 - DNA, 25 bp, Homo sapien
tttagttgtgctgaaacacatgaag

SEQ ID NO: 2724918 - DNA, 25 bp, Homo sapien
tggcaaggactgcaccagagatcgt

SEQ ID NO: 2724919 - DNA, 25 bp, Homo sapien
catgaagggcggtgaaatgcaacac

SEQ ID NO: 2724920 - DNA, 25 bp, Homo sapien
tccccttctcaagaatgcacttgga

SEQ ID NO: 2724921 - DNA, 25 bp, Homo sapien
ctttcatggtaagcagagctaaaac

SEQ ID NO: 2724922 - DNA, 25 bp, Homo sapien
gatgcccaagcttttgactggccat

SEQ ID NO: 2724923 - DNA, 25 bp, Homo sapien
tttcatggtaagcagagctaaaaca

SEQ ID NO: 2724924 - DNA, 25 bp, Homo sapien
agatgcccaagcttttgactggcca

SEQ ID NO: 2724925 - DNA, 25 bp, Homo sapien
acaaatgcttcgtcttgataattgt

SEQ ID NO: 2724926 - DNA, 25 bp, Homo sapien
tgctgacaaactgccatgggtaaac

SEQ ID NO: 2724927 - DNA, 25 bp, Homo sapien
ataactgctgacaaactgccatggg

SEQ ID NO: 2724928 - DNA, 25 bp, Homo sapien
gacaaactgccatgggtaaacaaaa

SEQ ID NO: 2724929 - DNA, 25 bp, Homo sapien
ggagagtcaatgaattgtgacaacg

SEQ ID NO: 2724930 - DNA, 25 bp, Homo sapien
agagaacaatgagcgagggaaagac

SEQ ID NO: 2724931 - DNA, 25 bp, Homo sapien
gaagagaggagagtcaatgaattgt

SEQ ID NO: 2724932 - DNA, 25 bp, Homo sapien
gaattgtgacaacgtatgtgcatca

SEQ ID NO: 2724933 - DNA, 25 bp, Homo sapien
gaaaaggaacgctcgatcaaactga

SEQ ID NO: 2724934 - DNA, 25 bp, Homo sapien
ggagcaatgtgacgccaccttttaa

SEQ ID NO: 2724935 - DNA, 25 bp, Homo sapien
catacatgcctaaaactcgcaggag

SEQ ID NO: 2724936 - DNA, 25 bp, Homo sapien
tgttagcagcgtgcagcatctctag

SEQ ID NO: 2724937 - DNA, 25 bp, Homo sapien
ggtcaaaccctccgatcggcgctta

SEQ ID NO: 2724938 - DNA, 25 bp, Homo sapien
aaggaagccgactgaaaaatcggct

SEQ ID NO: 2724939 - DNA, 25 bp, Homo sapien
aatcggcttctgctgcggatgcctt

SEQ ID NO: 2724940 - DNA, 25 bp, Homo sapien
agatttaactaagccactcggtcaa

SEQ ID NO: 2724941 - DNA, 25 bp, Homo sapien
taagaagcgcttcacccacaagatc

SEQ ID NO: 2724942 - DNA, 25 bp, Homo sapien
gactcgagactggtaatcagcccct

SEQ ID NO: 2724943 - DNA, 25 bp, Homo sapien
taagtcccggagttcaaaagcagta

SEQ ID NO: 2724944 - DNA, 25 bp, Homo sapien
gatcctgatgcaaagttccgactcg

SEQ ID NO: 2724945 - DNA, 25 bp, Homo sapien
gcttcccagggaacttccaccagag

SEQ ID NO: 2724946 - DNA, 25 bp, Homo sapien
cagagattatctctggatgatgaag

SEQ ID NO: 2724947 - DNA, 25 bp, Homo sapien
gaagtatgatcagacccacagtcca

SEQ ID NO: 2724948 - DNA, 25 bp, Homo sapien
cccagggaacttccaccagagatta

SEQ ID NO: 2724949 - DNA, 25 bp, Homo sapien
tatgctaccaccagcacgattgcat

SEQ ID NO: 2724950 - DNA, 25 bp, Homo sapien
cgattgcatcaaacattcgacagca

SEQ ID NO: 2724951 - DNA, 25 bp, Homo sapien
taccaccagcacgattgcatcaaac

SEQ ID NO: 2724952 - DNA, 25 bp, Homo sapien
tcaaacattcgacagcagtgtcttt

SEQ ID NO: 2724953 - DNA, 25 bp, Homo sapien
ttggtgaggcaaatagccaagtcgc

SEQ ID NO: 2724954 - DNA, 25 bp, Homo sapien
caatagttaggtgtagctggagtca

SEQ ID NO: 2724955 - DNA, 25 bp, Homo sapien
ggatagctttgattaccatctgcct

SEQ ID NO: 2724956 - DNA, 25 bp, Homo sapien
ttatcattgcctcacctggaagaag

SEQ ID NO: 2724957 - DNA, 25 bp, Homo sapien
cgtgggtcccctcagtttctagtgc

SEQ ID NO: 2724958 - DNA, 25 bp, Homo sapien
tcctgtctgggtacgagattcctgg

SEQ ID NO: 2724959 - DNA, 25 bp, Homo sapien
tcgggaacatccctagcccagtgga

SEQ ID NO: 2724960 - DNA, 25 bp, Homo sapien
caccagcaaagaactaggtcggctt

SEQ ID NO: 2724961 - DNA, 25 bp, Homo sapien
cgttcaagaccctccatcatactag

SEQ ID NO: 2724962 - DNA, 25 bp, Homo sapien
gcatcggttgttcccttttggcatg

SEQ ID NO: 2724963 - DNA, 25 bp, Homo sapien
agaccctccatcatactagcatcgg

SEQ ID NO: 2724964 - DNA, 25 bp, Homo sapien
catcatactagcatcggttgttccc

SEQ ID NO: 2724965 - DNA, 25 bp, Homo sapien
actggtagcaatacctccgtaaggc

SEQ ID NO: 2724966 - DNA, 25 bp, Homo sapien
taaggctgcaatttaacggaagaat

SEQ ID NO: 2724967 - DNA, 25 bp, Homo sapien
ggaagatataggctactggtagcaa

SEQ ID NO: 2724968 - DNA, 25 bp, Homo sapien
ggaccaggagttctcaacagcattg

SEQ ID NO: 2724969 - DNA, 25 bp, Homo sapien
cagtggcaaaacagtcaaatgaggc

SEQ ID NO: 2724970 - DNA, 25 bp, Homo sapien
tcaagtgtgaatgtcatgggcagca

SEQ ID NO: 2724971 - DNA, 25 bp, Homo sapien
tgaccgtgtccacctgaataggctg

SEQ ID NO: 2724972 - DNA, 25 bp, Homo sapien
tacactagacgtcaaagagttcaag

SEQ ID NO: 2724973 - DNA, 25 bp, Homo sapien
tctcagcagggtttcgagattcagg

SEQ ID NO: 2724974 - DNA, 25 bp, Homo sapien
gcagggtttcgagattcaggtactt

SEQ ID NO: 2724975 - DNA, 25 bp, Homo sapien
tctgttctcagcagggtttcgagat

SEQ ID NO: 2724976 - DNA, 25 bp, Homo sapien
agaactctgttctcagcagggtttc

SEQ ID NO: 2724977 - DNA, 25 bp, Homo sapien
gctaacaagagccacaggacaaagt

SEQ ID NO: 2724978 - DNA, 25 bp, Homo sapien
aagtcagagtgagcaagtttaccca

SEQ ID NO: 2724979 - DNA, 25 bp, Homo sapien
taagtagtagcaagaggatcccatc

SEQ ID NO: 2724980 - DNA, 25 bp, Homo sapien
tctgacaaagactggaacctggtgc

SEQ ID NO: 2724981 - DNA, 25 bp, Homo sapien
catggattgatatgcttgtatcata

SEQ ID NO: 2724982 - DNA, 25 bp, Homo sapien
actcacagctgttggactttctaag

SEQ ID NO: 2724983 - DNA, 25 bp, Homo sapien
cacagctgttggactttctaagttt

SEQ ID NO: 2724984 - DNA, 25 bp, Homo sapien
ttactcacagctgttggactttcta

SEQ ID NO: 2724985 - DNA, 25 bp, Homo sapien
gaaatccacaccatccttggaagga

SEQ ID NO: 2724986 - DNA, 25 bp, Homo sapien
gaaagaaacatttgctacacttaga

SEQ ID NO: 2724987 - DNA, 25 bp, Homo sapien
ctctggaattgcttgagtcttgaaa

SEQ ID NO: 2724988 - DNA, 25 bp, Homo sapien
tatgtgagaataacaagggactcag

SEQ ID NO: 2724989 - DNA, 25 bp, Homo sapien
tcacccggtcatgagtcattataag

SEQ ID NO: 2724990 - DNA, 25 bp, Homo sapien
ctccttcacccggtcatgagtcatt

SEQ ID NO: 2724991 - DNA, 25 bp, Homo sapien
cccaacaagcaatttgcactgattc

SEQ ID NO: 2724992 - DNA, 25 bp, Homo sapien
caagcaatttgcactgattcctcct

SEQ ID NO: 2724993 - DNA, 25 bp, Homo sapien
ccttcctttgcgtttgaacattgct

SEQ ID NO: 2724994 - DNA, 25 bp, Homo sapien
tttcctcacttctagcacctgtttc

SEQ ID NO: 2724995 - DNA, 25 bp, Homo sapien
tttgcgtttgaacattgctttttcc

SEQ ID NO: 2724996 - DNA, 25 bp, Homo sapien
ccacccttcctttgcgtttgaacat

SEQ ID NO: 2724997 - DNA, 25 bp, Homo sapien
cgaaagaagcctccgagattgaggg

SEQ ID NO: 2724998 - DNA, 25 bp, Homo sapien
taaagaacacgaaagaagcctccga

SEQ ID NO: 2724999 - DNA, 25 bp, Homo sapien
tgtttcctgtaaagaacacgaaaga

SEQ ID NO: 2725000 - DNA, 25 bp, Homo sapien
gaacacgaaagaagcctccgagatt

SEQ ID NO: 2725001 - DNA, 25 bp, Homo sapien
tgaaagtcttacgaaaaagcatcct

SEQ ID NO: 2725002 - DNA, 25 bp, Homo sapien
gatatcaaggtttgactttttgacc

SEQ ID NO: 2725003 - DNA, 25 bp, Homo sapien
tccttttacatatagctccttcaga

SEQ ID NO: 2725004 - DNA, 25 bp, Homo sapien
cattgatagcatactgtgaaactct

SEQ ID NO: 2725005 - DNA, 25 bp, Homo sapien
tatgtccccgggttgctatcacagc

SEQ ID NO: 2725006 - DNA, 25 bp, Homo sapien
cagccagtctggttcacgcattgat

SEQ ID NO: 2725007 - DNA, 25 bp, Homo sapien
cattgatattacctgcctagctgaa

SEQ ID NO: 2725008 - DNA, 25 bp, Homo sapien
gccccgtagcgtttgtccaactgaa

SEQ ID NO: 2725009 - DNA, 25 bp, Homo sapien
tatccgggtatttaatggcttttca

SEQ ID NO: 2725010 - DNA, 25 bp, Homo sapien
cttgagttgaattatagctgcgtcc

SEQ ID NO: 2725011 - DNA, 25 bp, Homo sapien
tcaattgctgcgttctctcctttca

SEQ ID NO: 2725012 - DNA, 25 bp, Homo sapien
gcgaacaactgttatcctgctttag

SEQ ID NO: 2725013 - DNA, 25 bp, Homo sapien
taaacaaggtagaggaattgtccca

SEQ ID NO: 2725014 - DNA, 25 bp, Homo sapien
agaaataaacaaggtagaggaattg

SEQ ID NO: 2725015 - DNA, 25 bp, Homo sapien
tacttctaccgtaatgtcttaggac

SEQ ID NO: 2725016 - DNA, 25 bp, Homo sapien
gagtcatttaaagtcccatctttgg

SEQ ID NO: 2725017 - DNA, 25 bp, Homo sapien
tattatcacgcctcaactcctggaa

SEQ ID NO: 2725018 - DNA, 25 bp, Homo sapien
tcagtggagtcatcgttctcaacag

SEQ ID NO: 2725019 - DNA, 25 bp, Homo sapien
tgtaccgaaagattgaacgtaggag

SEQ ID NO: 2725020 - DNA, 25 bp, Homo sapien
ccttgagaatgtttgccccttgtga

SEQ ID NO: 2725021 - DNA, 25 bp, Homo sapien
cttacaagcacctcctacagatggg

SEQ ID NO: 2725022 - DNA, 25 bp, Homo sapien
cctccagggcagtcgtgcattatta

SEQ ID NO: 2725023 - DNA, 25 bp, Homo sapien
aacaaaacttcagggcgacttgcag

SEQ ID NO: 2725024 - DNA, 25 bp, Homo sapien
gggatacatcgtagcaagtcctgag

SEQ ID NO: 2725025 - DNA, 25 bp, Homo sapien
gcttggcttccgtgtttttcaacaa

SEQ ID NO: 2725026 - DNA, 25 bp, Homo sapien
ttttacagagcttgtgccccaggca

SEQ ID NO: 2725027 - DNA, 25 bp, Homo sapien
tgcacttgattagttcggctcacca

SEQ ID NO: 2725028 - DNA, 25 bp, Homo sapien
tttcccatgatgctcttactaaggc

SEQ ID NO: 2725029 - DNA, 25 bp, Homo sapien
cacccatgtgtatttgtcgaagcct

SEQ ID NO: 2725030 - DNA, 25 bp, Homo sapien
gaagcctttgtctaagccaggtgct

SEQ ID NO: 2725031 - DNA, 25 bp, Homo sapien
gtccccatcactggaacagatcccc

SEQ ID NO: 2725032 - DNA, 25 bp, Homo sapien
gtccagattttctaggatgatctag

SEQ ID NO: 2725033 - DNA, 25 bp, Homo sapien
atcactggaacagatccccaaacag

SEQ ID NO: 2725034 - DNA, 25 bp, Homo sapien
tctaggtttctaatattcagtcctg

SEQ ID NO: 2725035 - DNA, 25 bp, Homo sapien
ctgttaggagaaaatgaggaaggta

SEQ ID NO: 2725036 - DNA, 25 bp, Homo sapien
tgttaggagaaaatgaggaaggtac

SEQ ID NO: 2725037 - DNA, 25 bp, Homo sapien
aataacttgctggagtttccaggcc

SEQ ID NO: 2725038 - DNA, 25 bp, Homo sapien
ccaaataacttgctggagtttccag

SEQ ID NO: 2725039 - DNA, 25 bp, Homo sapien
caaataacttgctggagtttccagg

SEQ ID NO: 2725040 - DNA, 25 bp, Homo sapien
ttccaaataacttgctggagtttcc

SEQ ID NO: 2725041 - DNA, 25 bp, Homo sapien
gcaagagaacagtcgcatcgcttct

SEQ ID NO: 2725042 - DNA, 25 bp, Homo sapien
tgcagcaagagaacagtcgcatcgc

SEQ ID NO: 2725043 - DNA, 25 bp, Homo sapien
cagacagacatccatccgactgcag

SEQ ID NO: 2725044 - DNA, 25 bp, Homo sapien
catccgactgcagcaagagaacagt

SEQ ID NO: 2725045 - DNA, 25 bp, Homo sapien
gacaatatcacaaagggcaactatc

SEQ ID NO: 2725046 - DNA, 25 bp, Homo sapien
gatgatagatctttcccagttaggg

SEQ ID NO: 2725047 - DNA, 25 bp, Homo sapien
tcatcatgtcacaccaatgtccctt

SEQ ID NO: 2725048 - DNA, 25 bp, Homo sapien
tagggatgccccctttgaggacaat

SEQ ID NO: 2725049 - DNA, 25 bp, Homo sapien
ggttcttatgcctaactcgatgtca

SEQ ID NO: 2725050 - DNA, 25 bp, Homo sapien
tctaaagggattaacatgacatggt

SEQ ID NO: 2725051 - DNA, 25 bp, Homo sapien
tcagctatgcccgagaaaaatgtta

SEQ ID NO: 2725052 - DNA, 25 bp, Homo sapien
taaaaatatctaccagcttgggcct

SEQ ID NO: 2725053 - DNA, 25 bp, Homo sapien
catttaggaatccaccgcgttaaca

SEQ ID NO: 2725054 - DNA, 25 bp, Homo sapien
tcttctgagagaaataggtgcctgc

SEQ ID NO: 2725055 - DNA, 25 bp, Homo sapien
gtgcctgcgtgaacacctgaactta

SEQ ID NO: 2725056 - DNA, 25 bp, Homo sapien
ggaatgatttgtcacaccactcttg

SEQ ID NO: 2725057 - DNA, 25 bp, Homo sapien
cttggcttccaactgactcctgatt

SEQ ID NO: 2725058 - DNA, 25 bp, Homo sapien
gcttccaactgactcctgattgact

SEQ ID NO: 2725059 - DNA, 25 bp, Homo sapien
tccaactgactcctgattgactaca

SEQ ID NO: 2725060 - DNA, 25 bp, Homo sapien
aactgactcctgattgactacagtc

SEQ ID NO: 2725061 - DNA, 25 bp, Homo sapien
taaaaggaatgattgtgctgggctc

SEQ ID NO: 2725062 - DNA, 25 bp, Homo sapien
gcaccgatgtttggcattatgacag

SEQ ID NO: 2725063 - DNA, 25 bp, Homo sapien
ccttcatatacagtgatggtggcac

SEQ ID NO: 2725064 - DNA, 25 bp, Homo sapien
catgctaggcaaggcagtggactct

SEQ ID NO: 2725065 - DNA, 25 bp, Homo sapien
atatatgagaattatccttggtgcc

SEQ ID NO: 2725066 - DNA, 25 bp, Homo sapien
atatgagaattatccttggtgcctt

SEQ ID NO: 2725067 - DNA, 25 bp, Homo sapien
acccatactcgatatatgagaatta

SEQ ID NO: 2725068 - DNA, 25 bp, Homo sapien
acacccatactcgatatatgagaat

SEQ ID NO: 2725069 - DNA, 25 bp, Homo sapien
tcaggcaggttatgaaaacttccat

SEQ ID NO: 2725070 - DNA, 25 bp, Homo sapien
ctttagggttaagcttcagtgattt

SEQ ID NO: 2725071 - DNA, 25 bp, Homo sapien
gggttaagcttcagtgatttgatgt

SEQ ID NO: 2725072 - DNA, 25 bp, Homo sapien
cttctattcaggcaggttatgaaaa

SEQ ID NO: 2725073 - DNA, 25 bp, Homo sapien
ctatagaaccgtaggataatcaatg

SEQ ID NO: 2725074 - DNA, 25 bp, Homo sapien
ttaacggctaatcatgcagcgagcc

SEQ ID NO: 2725075 - DNA, 25 bp, Homo sapien
attgtctgcttgtaggagtcagtgc

SEQ ID NO: 2725076 - DNA, 25 bp, Homo sapien
ggctaatcatgcagcgagccacagg

SEQ ID NO: 2725077 - DNA, 25 bp, Homo sapien
gcttgctgacaccagtaattgtctg

SEQ ID NO: 2725078 - DNA, 25 bp, Homo sapien
cagtgccagagattgggcatgccca

SEQ ID NO: 2725079 - DNA, 25 bp, Homo sapien
ttaagggcttgaaagtaggcagtca

SEQ ID NO: 2725080 - DNA, 25 bp, Homo sapien
ggcatgcccaggaacccttgtggtt

SEQ ID NO: 2725081 - DNA, 25 bp, Homo sapien
tgccttcgtaggagcttgtgtccac

SEQ ID NO: 2725082 - DNA, 25 bp, Homo sapien
ctttgtcttcacagctccagtcaga

SEQ ID NO: 2725083 - DNA, 25 bp, Homo sapien
tagtatgctccaatgagaacaacgg

SEQ ID NO: 2725084 - DNA, 25 bp, Homo sapien
taaataggtttctgtagtatgctcc

SEQ ID NO: 2725085 - DNA, 25 bp, Homo sapien
tctgtaaattgcataagtgaccaaa

SEQ ID NO: 2725086 - DNA, 25 bp, Homo sapien
catcaaacccttgctccatctgcat

SEQ ID NO: 2725087 - DNA, 25 bp, Homo sapien
tgttcatcaaacccttgctccatct

SEQ ID NO: 2725088 - DNA, 25 bp, Homo sapien
ttcatcaaacccttgctccatctgc

SEQ ID NO: 2725089 - DNA, 25 bp, Homo sapien
ctgttcatcaaacccttgctccatc

SEQ ID NO: 2725090 - DNA, 25 bp, Homo sapien
tctgctgtgcaggatcatctctgcc

SEQ ID NO: 2725091 - DNA, 25 bp, Homo sapien
tgacaggcatgttctgatcagaaga

SEQ ID NO: 2725092 - DNA, 25 bp, Homo sapien
gcagtggctctttcgagcaggcact

SEQ ID NO: 2725093 - DNA, 25 bp, Homo sapien
agagaaacttgttgatgagcagcca

SEQ ID NO: 2725094 - DNA, 25 bp, Homo sapien
gaagaaagatgcttcccacctccca

SEQ ID NO: 2725095 - DNA, 25 bp, Homo sapien
aagacagatacaaggcagcacagac

SEQ ID NO: 2725096 - DNA, 25 bp, Homo sapien
cttgctccctgccagcaagatggga

SEQ ID NO: 2725097 - DNA, 25 bp, Homo sapien
tgaacactgtatctcctaaagtccg

SEQ ID NO: 2725098 - DNA, 25 bp, Homo sapien
gtccgtcatcaccaagacaggagaa

SEQ ID NO: 2725099 - DNA, 25 bp, Homo sapien
gcggtaagtgaaaatgggaagaaca

SEQ ID NO: 2725100 - DNA, 25 bp, Homo sapien
cggtaagtgaaaatgggaagaacat

SEQ ID NO: 2725101 - DNA, 25 bp, Homo sapien
ggaaagtcattgtcgatttggagag

SEQ ID NO: 2725102 - DNA, 25 bp, Homo sapien
ttggaaagtcattgtcgatttggag

SEQ ID NO: 2725103 - DNA, 25 bp, Homo sapien
gaaagtcattgtcgatttggagagg

SEQ ID NO: 2725104 - DNA, 25 bp, Homo sapien
aagtcattgtcgatttggagaggtg

SEQ ID NO: 2725105 - DNA, 25 bp, Homo sapien
agctgaaatgcaaacggctctgaat

SEQ ID NO: 2725106 - DNA, 25 bp, Homo sapien
cagtgatttgggcacgtttctgcat

SEQ ID NO: 2725107 - DNA, 25 bp, Homo sapien
tgtgtttccataacccgatgtgact

SEQ ID NO: 2725108 - DNA, 25 bp, Homo sapien
gaagctgctgccttaagctgaaatg

SEQ ID NO: 2725109 - DNA, 25 bp, Homo sapien
gatagtgagctccaaatatcttggc

SEQ ID NO: 2725110 - DNA, 25 bp, Homo sapien
tccacaggcttaatacagtttctag

SEQ ID NO: 2725111 - DNA, 25 bp, Homo sapien
gaaataataacaggtgccgaatgca

SEQ ID NO: 2725112 - DNA, 25 bp, Homo sapien
gataggagctgctaacatactaacc

SEQ ID NO: 2725113 - DNA, 25 bp, Homo sapien
tatccacctatgtgatggccacctg

SEQ ID NO: 2725114 - DNA, 25 bp, Homo sapien
gaatctgtctgttatgcaccatgga

SEQ ID NO: 2725115 - DNA, 25 bp, Homo sapien
cagcagaatgactgacggagcataa

SEQ ID NO: 2725116 - DNA, 25 bp, Homo sapien
gccacctgaaggcaacatgtcagca

SEQ ID NO: 2725117 - DNA, 25 bp, Homo sapien
cagtcccagtctgacacagctgagg

SEQ ID NO: 2725118 - DNA, 25 bp, Homo sapien
tgggctcaccatcggcgtaagctgg

SEQ ID NO: 2725119 - DNA, 25 bp, Homo sapien
cagcaacgctaatgatcaggagagg

SEQ ID NO: 2725120 - DNA, 25 bp, Homo sapien
ggtactgccgggtctccataagaga

SEQ ID NO: 2725121 - DNA, 25 bp, Homo sapien
tttaatctccacaatagccttattg

SEQ ID NO: 2725122 - DNA, 25 bp, Homo sapien
gaatgtgagtcctaacaaacagcca

SEQ ID NO: 2725123 - DNA, 25 bp, Homo sapien
taacaccctcatatgtgctaagttc

SEQ ID NO: 2725124 - DNA, 25 bp, Homo sapien
taagtaatctagtgtcagaactggg

SEQ ID NO: 2725125 - DNA, 25 bp, Homo sapien
caggcatgaactggattattccaac

SEQ ID NO: 2725126 - DNA, 25 bp, Homo sapien
gaatattaggatccactaagtatct

SEQ ID NO: 2725127 - DNA, 25 bp, Homo sapien
aacatcctctgctgaggtaggattc

SEQ ID NO: 2725128 - DNA, 25 bp, Homo sapien
taagtatctttctgcagcaattacc

SEQ ID NO: 2725129 - DNA, 25 bp, Homo sapien
cctggtgaaattagcgaagccatca

SEQ ID NO: 2725130 - DNA, 25 bp, Homo sapien
aaagctcagagaggattggtcatga

SEQ ID NO: 2725131 - DNA, 25 bp, Homo sapien
cccctcaaatagagatcttctaaaa

SEQ ID NO: 2725132 - DNA, 25 bp, Homo sapien
gagactgttgcctatgaattgagat

SEQ ID NO: 2725133 - DNA, 25 bp, Homo sapien
caagcgacatgaccttttgcatggt

SEQ ID NO: 2725134 - DNA, 25 bp, Homo sapien
cacaacatctgtgccacagttcttg

SEQ ID NO: 2725135 - DNA, 25 bp, Homo sapien
ttgcatggtgtaaaatatggccgcc

SEQ ID NO: 2725136 - DNA, 25 bp, Homo sapien
cagttcttgctgtttagtaatatgc

SEQ ID NO: 2725137 - DNA, 25 bp, Homo sapien
aggtgattcacccgccttatcctcc

SEQ ID NO: 2725138 - DNA, 25 bp, Homo sapien
tcaggtgattcacccgccttatcct

SEQ ID NO: 2725139 - DNA, 25 bp, Homo sapien
caggtgattcacccgccttatcctc

SEQ ID NO: 2725140 - DNA, 25 bp, Homo sapien
ggtgattcacccgccttatcctccc

SEQ ID NO: 2725141 - DNA, 25 bp, Homo sapien
tgtcttaagtgcacactgccgtggc

SEQ ID NO: 2725142 - DNA, 25 bp, Homo sapien
taactgcattaacgagtttcctggg

SEQ ID NO: 2725143 - DNA, 25 bp, Homo sapien
tctgccgccagtgccatgtgggtct

SEQ ID NO: 2725144 - DNA, 25 bp, Homo sapien
ggttcccaatggtgagctctgccgc

SEQ ID NO: 2725145 - DNA, 25 bp, Homo sapien
cttcttgtggcttctccaccttgca

SEQ ID NO: 2725146 - DNA, 25 bp, Homo sapien
tcttgtggcttctccaccttgcatt

SEQ ID NO: 2725147 - DNA, 25 bp, Homo sapien
ttgtggcttctccaccttgcattct

SEQ ID NO: 2725148 - DNA, 25 bp, Homo sapien
cttcctggtgcttcttgtggcttct

SEQ ID NO: 2725149 - DNA, 25 bp, Homo sapien
tacatagttggaggttctcgtcttc

SEQ ID NO: 2725150 - DNA, 25 bp, Homo sapien
ctctacatagttggaggttctcgtc

SEQ ID NO: 2725151 - DNA, 25 bp, Homo sapien
gttggaggttctcgtcttcttcctc

SEQ ID NO: 2725152 - DNA, 25 bp, Homo sapien
agttggaggttctcgtcttcttcct

SEQ ID NO: 2725153 - DNA, 25 bp, Homo sapien
ctgccatttaccctgctgggagata

SEQ ID NO: 2725154 - DNA, 25 bp, Homo sapien
tgccatttaccctgctgggagatac

SEQ ID NO: 2725155 - DNA, 25 bp, Homo sapien
ctctccagaatatcgggtcataagc

SEQ ID NO: 2725156 - DNA, 25 bp, Homo sapien
gtgcctctccagaatatcgggtcat

SEQ ID NO: 2725157 - DNA, 25 bp, Homo sapien
gactcaggaaagataccacggttgg

SEQ ID NO: 2725158 - DNA, 25 bp, Homo sapien
taagctttcagtgagatctgcgagc

SEQ ID NO: 2725159 - DNA, 25 bp, Homo sapien
tgagagtgatcttagggaccccaaa

SEQ ID NO: 2725160 - DNA, 25 bp, Homo sapien
gactaatggtcagccacaagggtag

SEQ ID NO: 2725161 - DNA, 25 bp, Homo sapien
agcatggcttatgtgatctgctgaa

SEQ ID NO: 2725162 - DNA, 25 bp, Homo sapien
ccagtgctggatacaaacctttgta

SEQ ID NO: 2725163 - DNA, 25 bp, Homo sapien
aaagtcgggtactttccagtgctgg

SEQ ID NO: 2725164 - DNA, 25 bp, Homo sapien
aagtcgggtactttccagtgctgga

SEQ ID NO: 2725165 - DNA, 25 bp, Homo sapien
tccagtgctggatacaaacctttgt

SEQ ID NO: 2725166 - DNA, 25 bp, Homo sapien
ggggcatagcctgttcccaagaaat

SEQ ID NO: 2725167 - DNA, 25 bp, Homo sapien
actgggggcatagcctgttcccaag

SEQ ID NO: 2725168 - DNA, 25 bp, Homo sapien
tgggggcatagcctgttcccaagaa

SEQ ID NO: 2725169 - DNA, 25 bp, Homo sapien
gggggcatagcctgttcccaagaaa

SEQ ID NO: 2725170 - DNA, 25 bp, Homo sapien
cgggagccgggagcttcagatccca

SEQ ID NO: 2725171 - DNA, 25 bp, Homo sapien
ccgggagccgggagcttcagatccc

SEQ ID NO: 2725172 - DNA, 25 bp, Homo sapien
agtaccactcaataaaaggatttca

SEQ ID NO: 2725173 - DNA, 25 bp, Homo sapien
accactcaataaaaggatttcaaag

SEQ ID NO: 2725174 - DNA, 25 bp, Homo sapien
ccttttctaaaccaccagagtatag

SEQ ID NO: 2725175 - DNA, 25 bp, Homo sapien
ttaaatggatcctgcttgaatcttc

SEQ ID NO: 2725176 - DNA, 25 bp, Homo sapien
caaatgttccctgaggtccttttct

SEQ ID NO: 2725177 - DNA, 25 bp, Homo sapien
tcttcttttctagaccccaaatgcc

SEQ ID NO: 2725178 - DNA, 25 bp, Homo sapien
aaactgcatctatgaagcttgttct

SEQ ID NO: 2725179 - DNA, 25 bp, Homo sapien
tgcacccacataatacctgtggcca

SEQ ID NO: 2725180 - DNA, 25 bp, Homo sapien
tgagctctgagggttgccagctctc

SEQ ID NO: 2725181 - DNA, 25 bp, Homo sapien
tccaggagaatctgccaggccagtt

SEQ ID NO: 2725182 - DNA, 25 bp, Homo sapien
tattcagacagataaatgagcgcac

SEQ ID NO: 2725183 - DNA, 25 bp, Homo sapien
ccagaggagctagatgacaatgcca

SEQ ID NO: 2725184 - DNA, 25 bp, Homo sapien
tcttctaagcaaacgctcagtgggt

SEQ ID NO: 2725185 - DNA, 25 bp, Homo sapien
agcccgtgggatcgcaagtctgtcc

SEQ ID NO: 2725186 - DNA, 25 bp, Homo sapien
gctgcaggtgctacaatactgtatt

SEQ ID NO: 2725187 - DNA, 25 bp, Homo sapien
tcagctgcaggtgctacaatactgt

SEQ ID NO: 2725188 - DNA, 25 bp, Homo sapien
cagctgcaggtgctacaatactgta

SEQ ID NO: 2725189 - DNA, 25 bp, Homo sapien
agctgcaggtgctacaatactgtat

SEQ ID NO: 2725190 - DNA, 25 bp, Homo sapien
ggggcagagggcaactcttgaataa

SEQ ID NO: 2725191 - DNA, 25 bp, Homo sapien
ggcagagggcaactcttgaataagt

SEQ ID NO: 2725192 - DNA, 25 bp, Homo sapien
gcagagggcaactcttgaataagta

SEQ ID NO: 2725193 - DNA, 25 bp, Homo sapien
agagggcaactcttgaataagtaaa

SEQ ID NO: 2725194 - DNA, 25 bp, Homo sapien
tcatgtgatgtaattcaaggactct

SEQ ID NO: 2725195 - DNA, 25 bp, Homo sapien
tctgtccagttggttctaagcttta

SEQ ID NO: 2725196 - DNA, 25 bp, Homo sapien
taattcaaggactctgtccagttgg

SEQ ID NO: 2725197 - DNA, 25 bp, Homo sapien
tccagttggttctaagctttatttc

SEQ ID NO: 2725198 - DNA, 25 bp, Homo sapien
tctactctcaggcaatgaagtttgc

SEQ ID NO: 2725199 - DNA, 25 bp, Homo sapien
tatagtcagcattcatgcatgtcct

SEQ ID NO: 2725200 - DNA, 25 bp, Homo sapien
ccattacccctaggaatatagtcag

SEQ ID NO: 2725201 - DNA, 25 bp, Homo sapien
tatgcagcttccattacccctagga

SEQ ID NO: 2725202 - DNA, 25 bp, Homo sapien
tttgcctcttgtaccaggcaattta

SEQ ID NO: 2725203 - DNA, 25 bp, Homo sapien
ggtgcttgtcaatcaatatgtgaaa

SEQ ID NO: 2725204 - DNA, 25 bp, Homo sapien
catttggtgctgattgccatttttc

SEQ ID NO: 2725205 - DNA, 25 bp, Homo sapien
tctagcacatctctggtgcttgtca

SEQ ID NO: 2725206 - DNA, 25 bp, Homo sapien
cagagtagtccccaggaagttattt

SEQ ID NO: 2725207 - DNA, 25 bp, Homo sapien
gagctactattaactcgttgcaagc

SEQ ID NO: 2725208 - DNA, 25 bp, Homo sapien
ggagaggagcttcccttaaaatatc

SEQ ID NO: 2725209 - DNA, 25 bp, Homo sapien
cccttggatactggttgagggtcca

SEQ ID NO: 2725210 - DNA, 25 bp, Homo sapien
tcttgaattctacgagtacacacaa

SEQ ID NO: 2725211 - DNA, 25 bp, Homo sapien
gaattctacgagtacacacaacttc

SEQ ID NO: 2725212 - DNA, 25 bp, Homo sapien
ttgaattctacgagtacacacaact

SEQ ID NO: 2725213 - DNA, 25 bp, Homo sapien
tttcttgaattctacgagtacacac

SEQ ID NO: 2725214 - DNA, 25 bp, Homo sapien
tacaacttcagtctgcacagaataa

SEQ ID NO: 2725215 - DNA, 25 bp, Homo sapien
gcaaattgcaatagtctatggaatg

SEQ ID NO: 2725216 - DNA, 25 bp, Homo sapien
tgcttaattggttccgagtgaccat

SEQ ID NO: 2725217 - DNA, 25 bp, Homo sapien
aatgtccatgaatatacaacttcag

SEQ ID NO: 2725218 - DNA, 25 bp, Homo sapien
gcttgatgggtttccagagctaaat

SEQ ID NO: 2725219 - DNA, 25 bp, Homo sapien
tcccagctgaaaatcgagatccata

SEQ ID NO: 2725220 - DNA, 25 bp, Homo sapien
tgattcaacattcctgcttgatggg

SEQ ID NO: 2725221 - DNA, 25 bp, Homo sapien
caagtgtaatatttggccaacccta

SEQ ID NO: 2725222 - DNA, 25 bp, Homo sapien
ggacattttgcattagatgagaaaa

SEQ ID NO: 2725223 - DNA, 25 bp, Homo sapien
gaggacattttgcattagatgagaa

SEQ ID NO: 2725224 - DNA, 25 bp, Homo sapien
ttgaggacattttgcattagatgag

SEQ ID NO: 2725225 - DNA, 25 bp, Homo sapien
cttcttgaggacattttgcattaga

SEQ ID NO: 2725226 - DNA, 25 bp, Homo sapien
gcttctttgtagacgtttgtcattt

SEQ ID NO: 2725227 - DNA, 25 bp, Homo sapien
tcatttccactacctgtggggctcc

SEQ ID NO: 2725228 - DNA, 25 bp, Homo sapien
tagacgtttgtcatttccactacct

SEQ ID NO: 2725229 - DNA, 25 bp, Homo sapien
ctttgtagacgtttgtcatttccac

SEQ ID NO: 2725230 - DNA, 25 bp, Homo sapien
tcaaggtcagaatgaacctccaaat

SEQ ID NO: 2725231 - DNA, 25 bp, Homo sapien
aggctcacttaggacactctccggg

SEQ ID NO: 2725232 - DNA, 25 bp, Homo sapien
cagaggcaggtgctttcaaggtact

SEQ ID NO: 2725233 - DNA, 25 bp, Homo sapien
ggcaggtgctttcaaggtactcttc

SEQ ID NO: 2725234 - DNA, 25 bp, Homo sapien
gccgtcctagaatctattttgtaag

SEQ ID NO: 2725235 - DNA, 25 bp, Homo sapien
gagctgttttcttgccgtcctagaa

SEQ ID NO: 2725236 - DNA, 25 bp, Homo sapien
tctattttgtaagagcttagttggg

SEQ ID NO: 2725237 - DNA, 25 bp, Homo sapien
tatgcagaagatacattgagctgtt

SEQ ID NO: 2725238 - DNA, 25 bp, Homo sapien
tcagcatgcttttccccagaggcga

SEQ ID NO: 2725239 - DNA, 25 bp, Homo sapien
gcttttccccagaggcgagagagat

SEQ ID NO: 2725240 - DNA, 25 bp, Homo sapien
gggaagtttcagcatgcttttcccc

SEQ ID NO: 2725241 - DNA, 25 bp, Homo sapien
ctaattgtcactgggggaagtttca

SEQ ID NO: 2725242 - DNA, 25 bp, Homo sapien
tctgtgtagttctgcatgtgcagct

SEQ ID NO: 2725243 - DNA, 25 bp, Homo sapien
tcaccacgggctttgagggagcact

SEQ ID NO: 2725244 - DNA, 25 bp, Homo sapien
tgcagcttttagagggctgtgtgac

SEQ ID NO: 2725245 - DNA, 25 bp, Homo sapien
gatattcttcatcaagccttcacca

SEQ ID NO: 2725246 - DNA, 25 bp, Homo sapien
ctaactctgatagattggtagtggc

SEQ ID NO: 2725247 - DNA, 25 bp, Homo sapien
tctgtggttgaaaccatagtgctct

SEQ ID NO: 2725248 - DNA, 25 bp, Homo sapien
tagaaatttcatggacgtggagtgg

SEQ ID NO: 2725249 - DNA, 25 bp, Homo sapien
gcttatttgacagccatgctccagg

SEQ ID NO: 2725250 - DNA, 25 bp, Homo sapien
tcatcagggttggtgtccatgattt

SEQ ID NO: 2725251 - DNA, 25 bp, Homo sapien
gaggtgttgctgtctagcaatggca

SEQ ID NO: 2725252 - DNA, 25 bp, Homo sapien
aattgggggagaattcctcatcagg

SEQ ID NO: 2725253 - DNA, 25 bp, Homo sapien
catgctctgagcaggtatgaattgg

SEQ ID NO: 2725254 - DNA, 25 bp, Homo sapien
gagaatcaagaatgtcactcacgaa

SEQ ID NO: 2725255 - DNA, 25 bp, Homo sapien
tgtcactcacgaaacaccacacatt

SEQ ID NO: 2725256 - DNA, 25 bp, Homo sapien
attcagacaccacggagtttcctta

SEQ ID NO: 2725257 - DNA, 25 bp, Homo sapien
attttggtggagaatcaagaatgtc

SEQ ID NO: 2725258 - DNA, 25 bp, Homo sapien
tgtcaacggaacacattgtaatttc

SEQ ID NO: 2725259 - DNA, 25 bp, Homo sapien
attcagtactgatgtcaacggaaca

SEQ ID NO: 2725260 - DNA, 25 bp, Homo sapien
agacttggcaagacattcagtactg

SEQ ID NO: 2725261 - DNA, 25 bp, Homo sapien
gacttggcaagacattcagtactga

SEQ ID NO: 2725262 - DNA, 25 bp, Homo sapien
cattcactccagaaagggaatctgc

SEQ ID NO: 2725263 - DNA, 25 bp, Homo sapien
tgcttcctgtgcaatagaactctgt

SEQ ID NO: 2725264 - DNA, 25 bp, Homo sapien
tcctaatgggcacttggtcatgtgc

SEQ ID NO: 2725265 - DNA, 25 bp, Homo sapien
taagagtcggatgccgttctttcgc

SEQ ID NO: 2725266 - DNA, 25 bp, Homo sapien
gtaacgtagccaattagcagagagc

SEQ ID NO: 2725267 - DNA, 25 bp, Homo sapien
ggatgtaacgtagccaattagcaga

SEQ ID NO: 2725268 - DNA, 25 bp, Homo sapien
aagggatgtaacgtagccaattagc

SEQ ID NO: 2725269 - DNA, 25 bp, Homo sapien
caaagggatgtaacgtagccaatta

SEQ ID NO: 2725270 - DNA, 25 bp, Homo sapien
tattgacaggctccatctgttccca

SEQ ID NO: 2725271 - DNA, 25 bp, Homo sapien
gattgattagtagtagctgcctgga

SEQ ID NO: 2725272 - DNA, 25 bp, Homo sapien
ctggaggaccgctgagaaatattga

SEQ ID NO: 2725273 - DNA, 25 bp, Homo sapien
gcacatgtgcctgtatctgccaaaa

SEQ ID NO: 2725274 - DNA, 25 bp, Homo sapien
ctcggaagaacattttgtccccgtg

SEQ ID NO: 2725275 - DNA, 25 bp, Homo sapien
ccaattatgaattaactcgctattg

SEQ ID NO: 2725276 - DNA, 25 bp, Homo sapien
gctcatttcaagctgctcggaagaa

SEQ ID NO: 2725277 - DNA, 25 bp, Homo sapien
tatgaattaactcgctattgcagaa

SEQ ID NO: 2725278 - DNA, 25 bp, Homo sapien
gactgctcctctgtgtcgagggaga

SEQ ID NO: 2725279 - DNA, 25 bp, Homo sapien
cggatggcggtgcaaaatgactgct

SEQ ID NO: 2725280 - DNA, 25 bp, Homo sapien
tctcgacagcacaacctctgtaggc

SEQ ID NO: 2725281 - DNA, 25 bp, Homo sapien
cacaacctctgtaggcggatggcgg

SEQ ID NO: 2725282 - DNA, 25 bp, Homo sapien
tcataggcactagcattccattact

SEQ ID NO: 2725283 - DNA, 25 bp, Homo sapien
catcaaaaccagtcaagctgcattc

SEQ ID NO: 2725284 - DNA, 25 bp, Homo sapien
tcagcggtttctgcattcttataaa

SEQ ID NO: 2725285 - DNA, 25 bp, Homo sapien
cattcagcggtttctgcattcttat

SEQ ID NO: 2725286 - DNA, 25 bp, Homo sapien
cgatattggtatgccctgagtcaga

SEQ ID NO: 2725287 - DNA, 25 bp, Homo sapien
tacccaaaggctctcgacatgtctc

SEQ ID NO: 2725288 - DNA, 25 bp, Homo sapien
gacatgtctcattgctccagccaaa

SEQ ID NO: 2725289 - DNA, 25 bp, Homo sapien
caggcgagtgctatctttgtcttcc

SEQ ID NO: 2725290 - DNA, 25 bp, Homo sapien
ctagctgcccgtgatgctgagcaca

SEQ ID NO: 2725291 - DNA, 25 bp, Homo sapien
agctgcccgtgatgctgagcacaca

SEQ ID NO: 2725292 - DNA, 25 bp, Homo sapien
gctgcccgtgatgctgagcacacac

SEQ ID NO: 2725293 - DNA, 25 bp, Homo sapien
tagctgcccgtgatgctgagcacac

SEQ ID NO: 2725294 - DNA, 25 bp, Homo sapien
cactctcgttcattactctccttat

SEQ ID NO: 2725295 - DNA, 25 bp, Homo sapien
gagctccaagtccaaggtctgttac

SEQ ID NO: 2725296 - DNA, 25 bp, Homo sapien
tccaagtccaaggtctgttacatga

SEQ ID NO: 2725297 - DNA, 25 bp, Homo sapien
tccttttgcacaagggactgagctc

SEQ ID NO: 2725298 - DNA, 25 bp, Homo sapien
cgtagttgccgatacagaaaggaac

SEQ ID NO: 2725299 - DNA, 25 bp, Homo sapien
cctgattcatctgcgtagttgccga

SEQ ID NO: 2725300 - DNA, 25 bp, Homo sapien
ctcgatgtggcacagaaagaggatg

SEQ ID NO: 2725301 - DNA, 25 bp, Homo sapien
ccaggctgggtgaatcctgattcat

SEQ ID NO: 2725302 - DNA, 25 bp, Homo sapien
tatactgcggtatcatttgagacaa

SEQ ID NO: 2725303 - DNA, 25 bp, Homo sapien
cccaagcgggaatagacacatttca

SEQ ID NO: 2725304 - DNA, 25 bp, Homo sapien
gctcttggagtacttggtagacaca

SEQ ID NO: 2725305 - DNA, 25 bp, Homo sapien
gcagaaatccccatggaactaatgg

SEQ ID NO: 2725306 - DNA, 25 bp, Homo sapien
tgaaggagtgagtcaagttgtagcc

SEQ ID NO: 2725307 - DNA, 25 bp, Homo sapien
gcttttccacatttcagagtggagg

SEQ ID NO: 2725308 - DNA, 25 bp, Homo sapien
tcttggatctggtcactgctgtcgc

SEQ ID NO: 2725309 - DNA, 25 bp, Homo sapien
tcactgctgtcgcaagctgcagctg

SEQ ID NO: 2725310 - DNA, 25 bp, Homo sapien
tttaggtactgcgtggcttttagtc

SEQ ID NO: 2725311 - DNA, 25 bp, Homo sapien
tcctgaagctgaacggactctggtg

SEQ ID NO: 2725312 - DNA, 25 bp, Homo sapien
tgactccgccgattggtcagtgagt

SEQ ID NO: 2725313 - DNA, 25 bp, Homo sapien
cgggtctccagtggcacgttgctgt

SEQ ID NO: 2725314 - DNA, 25 bp, Homo sapien
cgttgctgtttagcacccagctgtc

SEQ ID NO: 2725315 - DNA, 25 bp, Homo sapien
cctcctcacgtaagtgctgcccctt

SEQ ID NO: 2725316 - DNA, 25 bp, Homo sapien
ttatacattaccgtttgccccacag

SEQ ID NO: 2725317 - DNA, 25 bp, Homo sapien
acattaccgtttgccccacaggcat

SEQ ID NO: 2725318 - DNA, 25 bp, Homo sapien
ttccctcctcacgtaagtgctgccc

SEQ ID NO: 2725319 - DNA, 25 bp, Homo sapien
catttgaaacacacaaaccaagaat

SEQ ID NO: 2725320 - DNA, 25 bp, Homo sapien
tagcatttgaaacacacaaaccaag

SEQ ID NO: 2725321 - DNA, 25 bp, Homo sapien
aaacaatagcatttgaaacacacaa

SEQ ID NO: 2725322 - DNA, 25 bp, Homo sapien
caatagcatttgaaacacacaaacc

SEQ ID NO: 2725323 - DNA, 25 bp, Homo sapien
tctctgttccgtctccatggttctt

SEQ ID NO: 2725324 - DNA, 25 bp, Homo sapien
gggtcagtatgaattagccctcctc

SEQ ID NO: 2725325 - DNA, 25 bp, Homo sapien
tatgaattagccctcctctctgttc

SEQ ID NO: 2725326 - DNA, 25 bp, Homo sapien
ctctctgttccgtctccatggttct

SEQ ID NO: 2725327 - DNA, 25 bp, Homo sapien
aataaagcatgaacacaagatcaag

SEQ ID NO: 2725328 - DNA, 25 bp, Homo sapien
agcatgaacacaagatcaagaccat

SEQ ID NO: 2725329 - DNA, 25 bp, Homo sapien
aagaacataagtgacctgagggagc

SEQ ID NO: 2725330 - DNA, 25 bp, Homo sapien
gaaaggatttcagggattgaagatc

SEQ ID NO: 2725331 - DNA, 25 bp, Homo sapien
gaacttcttcccagcggtcggtcat

SEQ ID NO: 2725332 - DNA, 25 bp, Homo sapien
gaagtagctcagctcgggactccag

SEQ ID NO: 2725333 - DNA, 25 bp, Homo sapien
gactccaggcatcagcaaaaatgtg

SEQ ID NO: 2725334 - DNA, 25 bp, Homo sapien
cagaggcctgctcagtgtgttcaga

SEQ ID NO: 2725335 - DNA, 25 bp, Homo sapien
cgtgaaatcctgattcctgttctga

SEQ ID NO: 2725336 - DNA, 25 bp, Homo sapien
acctcccgtgaaatcctgattcctg

SEQ ID NO: 2725337 - DNA, 25 bp, Homo sapien
ttttcacctcccgtgaaatcctgat

SEQ ID NO: 2725338 - DNA, 25 bp, Homo sapien
tcccgtgaaatcctgattcctgttc

SEQ ID NO: 2725339 - DNA, 25 bp, Homo sapien
cgaacattacattcgatgatgacat

SEQ ID NO: 2725340 - DNA, 25 bp, Homo sapien
ctttcacatatgcatctagttgtta

SEQ ID NO: 2725341 - DNA, 25 bp, Homo sapien
gaaggggcgaacattacattcgatg

SEQ ID NO: 2725342 - DNA, 25 bp, Homo sapien
ggaagaaggggcgaacattacattc

SEQ ID NO: 2725343 - DNA, 25 bp, Homo sapien
tccccgaggaggtcttgaagaggaa

SEQ ID NO: 2725344 - DNA, 25 bp, Homo sapien
gcgtgtaaaccgttcctgaggtcaa

SEQ ID NO: 2725345 - DNA, 25 bp, Homo sapien
gaaatacgccagcaaaatagccaag

SEQ ID NO: 2725346 - DNA, 25 bp, Homo sapien
gagctgctgaacaagggtgtgctcc

SEQ ID NO: 2725347 - DNA, 25 bp, Homo sapien
gtcatccccagcgttgctgaataag

SEQ ID NO: 2725348 - DNA, 25 bp, Homo sapien
ccccagcgttgctgaataaggctgc

SEQ ID NO: 2725349 - DNA, 25 bp, Homo sapien
tgttgtcatccccagcgttgctgaa

SEQ ID NO: 2725350 - DNA, 25 bp, Homo sapien
catgttgtcatccccagcgttgctg

SEQ ID NO: 2725351 - DNA, 25 bp, Homo sapien
tgggaactgttttggagtcagcttc

SEQ ID NO: 2725352 - DNA, 25 bp, Homo sapien
gcttcattgagctggtgctttatgg

SEQ ID NO: 2725353 - DNA, 25 bp, Homo sapien
ggtttgctttgcaacatggcacagc

SEQ ID NO: 2725354 - DNA, 25 bp, Homo sapien
gaaaccaagccacaagcatcaagtg

SEQ ID NO: 2725355 - DNA, 25 bp, Homo sapien
ctttggcagataccatgcttgctgc

SEQ ID NO: 2725356 - DNA, 25 bp, Homo sapien
cttctttggcagataccatgcttgc

SEQ ID NO: 2725357 - DNA, 25 bp, Homo sapien
agttccttctttggcagataccatg

SEQ ID NO: 2725358 - DNA, 25 bp, Homo sapien
agcttaggagaatggtctgggaagc

SEQ ID NO: 2725359 - DNA, 25 bp, Homo sapien
tgcttccacggagccccctgaacag

SEQ ID NO: 2725360 - DNA, 25 bp, Homo sapien
aatttgcttccacggagccccctga

SEQ ID NO: 2725361 - DNA, 25 bp, Homo sapien
tcaatttgcttccacggagccccct

SEQ ID NO: 2725362 - DNA, 25 bp, Homo sapien
ttccacggagccccctgaacagcca

SEQ ID NO: 2725363 - DNA, 25 bp, Homo sapien
gcagaacattaagcctgagaagtga

SEQ ID NO: 2725364 - DNA, 25 bp, Homo sapien
tggccccgcagaacattaagcctga

SEQ ID NO: 2725365 - DNA, 25 bp, Homo sapien
atcatgaaaagaccccgaaggcaca

SEQ ID NO: 2725366 - DNA, 25 bp, Homo sapien
tgagcacaggaaccccttctgaagt

SEQ ID NO: 2725367 - DNA, 25 bp, Homo sapien
ggcagctctctttttctcagtttga

SEQ ID NO: 2725368 - DNA, 25 bp, Homo sapien
gctctctttttctcagtttgaccat

SEQ ID NO: 2725369 - DNA, 25 bp, Homo sapien
gcagctctctttttctcagtttgac

SEQ ID NO: 2725370 - DNA, 25 bp, Homo sapien
ttgtgggcagctctctttttctcag

SEQ ID NO: 2725371 - DNA, 25 bp, Homo sapien
acgtcctcctccgaagcagagggat

SEQ ID NO: 2725372 - DNA, 25 bp, Homo sapien
aggcatctcccgagagctgctgacc

SEQ ID NO: 2725373 - DNA, 25 bp, Homo sapien
gtcctcctccgaagcagagggattc

SEQ ID NO: 2725374 - DNA, 25 bp, Homo sapien
gcaaaggcatctcccgagagctgct

SEQ ID NO: 2725375 - DNA, 25 bp, Homo sapien
tcctgggctggcagacgataccatt

SEQ ID NO: 2725376 - DNA, 25 bp, Homo sapien
gcatgggccgactatcctgacttct

SEQ ID NO: 2725377 - DNA, 25 bp, Homo sapien
cagcgtctgcccacaagggtgagaa

SEQ ID NO: 2725378 - DNA, 25 bp, Homo sapien
tatactctgtggaggcacgaagtcc

SEQ ID NO: 2725379 - DNA, 25 bp, Homo sapien
ggagtactagctaaggaatgtgtca

SEQ ID NO: 2725380 - DNA, 25 bp, Homo sapien
cgtgccctgacatggattgttttac

SEQ ID NO: 2725381 - DNA, 25 bp, Homo sapien
taaccactgactatgcatgcctatg

SEQ ID NO: 2725382 - DNA, 25 bp, Homo sapien
tgatggcaatacacatagtggtgag

SEQ ID NO: 2725383 - DNA, 25 bp, Homo sapien
cattgttccattaagggtgatttca

SEQ ID NO: 2725384 - DNA, 25 bp, Homo sapien
cacagatggccctgcatttgaataa

SEQ ID NO: 2725385 - DNA, 25 bp, Homo sapien
aaatactttgcacagatggccctgc

SEQ ID NO: 2725386 - DNA, 25 bp, Homo sapien
ttaagtgaacttcaatgaatgatga

SEQ ID NO: 2725387 - DNA, 25 bp, Homo sapien
tttgcccaaggcctcgcatcagcgt

SEQ ID NO: 2725388 - DNA, 25 bp, Homo sapien
tctgcagcagggtttcgaagttcat

SEQ ID NO: 2725389 - DNA, 25 bp, Homo sapien
gtcttccaactctattaggctgcat

SEQ ID NO: 2725390 - DNA, 25 bp, Homo sapien
tccttgtcagaaccagtgcctctaa

SEQ ID NO: 2725391 - DNA, 25 bp, Homo sapien
atggcccagaacatggcaccagaaa

SEQ ID NO: 2725392 - DNA, 25 bp, Homo sapien
gatgctctgtgtttgccgagcaggc

SEQ ID NO: 2725393 - DNA, 25 bp, Homo sapien
tgctctgtgtttgccgagcaggccc

SEQ ID NO: 2725394 - DNA, 25 bp, Homo sapien
gatacataacgcgaggaggagattg

SEQ ID NO: 2725395 - DNA, 25 bp, Homo sapien
taaagatcagacttgtcgatacata

SEQ ID NO: 2725396 - DNA, 25 bp, Homo sapien
tctgcaggctggagttgccaattga

SEQ ID NO: 2725397 - DNA, 25 bp, Homo sapien
tatcccattgttaaaggtgtgccca

SEQ ID NO: 2725398 - DNA, 25 bp, Homo sapien
cacatcatcgtttcctggtaagccg

SEQ ID NO: 2725399 - DNA, 25 bp, Homo sapien
tgccaattgagtccgagcagatgca

SEQ ID NO: 2725400 - DNA, 25 bp, Homo sapien
cacaatgaaaagtgtcatgatgatc

SEQ ID NO: 2725401 - DNA, 25 bp, Homo sapien
ctttcagtctatccaagagctgcac

SEQ ID NO: 2725402 - DNA, 25 bp, Homo sapien
caatgaaaagtgtcatgatgatcat

SEQ ID NO: 2725403 - DNA, 25 bp, Homo sapien
tccaagagctgcacaatgaaaagtg

SEQ ID NO: 2725404 - DNA, 25 bp, Homo sapien
catgagatggtggaagtcctcttct

SEQ ID NO: 2725405 - DNA, 25 bp, Homo sapien
taaacaccaaagagagcgtccttcc

SEQ ID NO: 2725406 - DNA, 25 bp, Homo sapien
ctgctgtttttcaacgaccagggca

SEQ ID NO: 2725407 - DNA, 25 bp, Homo sapien
tgggacttcttgtgttacccgccga

SEQ ID NO: 2725408 - DNA, 25 bp, Homo sapien
aataatgccgatcagtggatttcac

SEQ ID NO: 2725409 - DNA, 25 bp, Homo sapien
tgccgatcagtggatttcactactg

SEQ ID NO: 2725410 - DNA, 25 bp, Homo sapien
gatcagtggatttcactactgtaaa

SEQ ID NO: 2725411 - DNA, 25 bp, Homo sapien
tcaataatgccgatcagtggatttc

SEQ ID NO: 2725412 - DNA, 25 bp, Homo sapien
ttatgttccttgataggatatacca

SEQ ID NO: 2725413 - DNA, 25 bp, Homo sapien
tccagctcaaatgagtcaccttggc

SEQ ID NO: 2725414 - DNA, 25 bp, Homo sapien
gtcaccttggctagactgccaatcc

SEQ ID NO: 2725415 - DNA, 25 bp, Homo sapien
tgttccttgataggatataccaata

SEQ ID NO: 2725416 - DNA, 25 bp, Homo sapien
cagttcagaagaaaccaaggttctc

SEQ ID NO: 2725417 - DNA, 25 bp, Homo sapien
tcagtccagttcagaagaaaccaag

SEQ ID NO: 2725418 - DNA, 25 bp, Homo sapien
tcttggtttcacacaatcgttctct

SEQ ID NO: 2725419 - DNA, 25 bp, Homo sapien
tacagctcgagctcctttggaaagg

SEQ ID NO: 2725420 - DNA, 25 bp, Homo sapien
aaactattgtgtttacgttgtactg

SEQ ID NO: 2725421 - DNA, 25 bp, Homo sapien
tcctctgacacgttcaagaagatcc

SEQ ID NO: 2725422 - DNA, 25 bp, Homo sapien
tcctgtttttggcagcaggtgtaat

SEQ ID NO: 2725423 - DNA, 25 bp, Homo sapien
ccaccattctccttgacttgataaa

SEQ ID NO: 2725424 - DNA, 25 bp, Homo sapien
actgctcgggccactataagaacca

SEQ ID NO: 2725425 - DNA, 25 bp, Homo sapien
ggctccacaggcaagaatcaagcag

SEQ ID NO: 2725426 - DNA, 25 bp, Homo sapien
tgcatttccagactgtagcagctca

SEQ ID NO: 2725427 - DNA, 25 bp, Homo sapien
gcttccggacaggaaacagcatctg

SEQ ID NO: 2725428 - DNA, 25 bp, Homo sapien
ctcctgggggcctgttcatttcttt

SEQ ID NO: 2725429 - DNA, 25 bp, Homo sapien
tctggtcacatccagagatggtggg

SEQ ID NO: 2725430 - DNA, 25 bp, Homo sapien
gaatgacttagctgcagtgggtcgc

SEQ ID NO: 2725431 - DNA, 25 bp, Homo sapien
tagctgcagtgggtcgctcactcct

SEQ ID NO: 2725432 - DNA, 25 bp, Homo sapien
ttgcagggaagtggcacatgtgagc

SEQ ID NO: 2725433 - DNA, 25 bp, Homo sapien
ggaagtggcacatgtgagctagggc

SEQ ID NO: 2725434 - DNA, 25 bp, Homo sapien
tgagctagggctgcttgaagccaca

SEQ ID NO: 2725435 - DNA, 25 bp, Homo sapien
acgctcagcagttggtgggattgca

SEQ ID NO: 2725436 - DNA, 25 bp, Homo sapien
tgaaaatgcaacttttacgagagct

SEQ ID NO: 2725437 - DNA, 25 bp, Homo sapien
tgactgatccaattataaatctccc

SEQ ID NO: 2725438 - DNA, 25 bp, Homo sapien
taaatctccccacttcttggcagag

SEQ ID NO: 2725439 - DNA, 25 bp, Homo sapien
tacgagagctcgagaggcaaagaaa

SEQ ID NO: 2725440 - DNA, 25 bp, Homo sapien
ttcatttcgggtccaagtaatcatc

SEQ ID NO: 2725441 - DNA, 25 bp, Homo sapien
gaaggtgattacttgtgtggggcca

SEQ ID NO: 2725442 - DNA, 25 bp, Homo sapien
catttcgggtccaagtaatcatccc

SEQ ID NO: 2725443 - DNA, 25 bp, Homo sapien
ttcgggtccaagtaatcatccccat

SEQ ID NO: 2725444 - DNA, 25 bp, Homo sapien
ccatttgttaatggagaaagacctt

SEQ ID NO: 2725445 - DNA, 25 bp, Homo sapien
atggagaaagaccttttttgtagca

SEQ ID NO: 2725446 - DNA, 25 bp, Homo sapien
gagaaagaccttttttgtagcacat

SEQ ID NO: 2725447 - DNA, 25 bp, Homo sapien
cgaacccatttgttaatggagaaag

SEQ ID NO: 2725448 - DNA, 25 bp, Homo sapien
ccaaggtctgtatgctccggcgttc

SEQ ID NO: 2725449 - DNA, 25 bp, Homo sapien
tgtagaaggccagatgccacaggcc

SEQ ID NO: 2725450 - DNA, 25 bp, Homo sapien
ctccttcccgtccagacgttccatg

SEQ ID NO: 2725451 - DNA, 25 bp, Homo sapien
tgcacaaacacggcttcattctgaa

SEQ ID NO: 2725452 - DNA, 25 bp, Homo sapien
atggcgtaccatctcagagacccca

SEQ ID NO: 2725453 - DNA, 25 bp, Homo sapien
catggcgtaccatctcagagacccc

SEQ ID NO: 2725454 - DNA, 25 bp, Homo sapien
tcatggcgtaccatctcagagaccc

SEQ ID NO: 2725455 - DNA, 25 bp, Homo sapien
tggcagttacgtggacagtcctgca

SEQ ID NO: 2725456 - DNA, 25 bp, Homo sapien
gaaatcctgggaaacagtgacacac

SEQ ID NO: 2725457 - DNA, 25 bp, Homo sapien
cagtctgctcctagaaatcctggga

SEQ ID NO: 2725458 - DNA, 25 bp, Homo sapien
ctttagcacagtctgctcctagaaa

SEQ ID NO: 2725459 - DNA, 25 bp, Homo sapien
ctcctagaaatcctgggaaacagtg

SEQ ID NO: 2725460 - DNA, 25 bp, Homo sapien
acaaaggtgaatgcgaatttgtgat

SEQ ID NO: 2725461 - DNA, 25 bp, Homo sapien
caaaggtgaatgcgaatttgtgatg

SEQ ID NO: 2725462 - DNA, 25 bp, Homo sapien
aacaaaggtgaatgcgaatttgtga

SEQ ID NO: 2725463 - DNA, 25 bp, Homo sapien
tgaatgcgaatttgtgatgagggag

SEQ ID NO: 2725464 - DNA, 25 bp, Homo sapien
cagagccagggaattccgggcacag

SEQ ID NO: 2725465 - DNA, 25 bp, Homo sapien
aactggcagagccagggaattccgg

SEQ ID NO: 2725466 - DNA, 25 bp, Homo sapien
ggcagagccagggaattccgggcac

SEQ ID NO: 2725467 - DNA, 25 bp, Homo sapien
ctggcagagccagggaattccgggc

SEQ ID NO: 2725468 - DNA, 25 bp, Homo sapien
cctggcaggagggcctgagtctgcc

SEQ ID NO: 2725469 - DNA, 25 bp, Homo sapien
gtggcaaattctccccctggcagga

SEQ ID NO: 2725470 - DNA, 25 bp, Homo sapien
gcaggagggcctgagtctgccggct

SEQ ID NO: 2725471 - DNA, 25 bp, Homo sapien
aggagggcctgagtctgccggctgc

SEQ ID NO: 2725472 - DNA, 25 bp, Homo sapien
gtcgcttggatgtgatgggagtctc

SEQ ID NO: 2725473 - DNA, 25 bp, Homo sapien
atgtgatgggagtctctcttgctaa

SEQ ID NO: 2725474 - DNA, 25 bp, Homo sapien
ccggtcgcttggatgtgatgggagt

SEQ ID NO: 2725475 - DNA, 25 bp, Homo sapien
tggatgtgatgggagtctctcttgc

SEQ ID NO: 2725476 - DNA, 25 bp, Homo sapien
ttgcaaacgcatgctgactgattcc

SEQ ID NO: 2725477 - DNA, 25 bp, Homo sapien
tcagggcccccgagattgtgagggc

SEQ ID NO: 2725478 - DNA, 25 bp, Homo sapien
agggctgcggaataaacgctcttgc

SEQ ID NO: 2725479 - DNA, 25 bp, Homo sapien
aaacgcatgctgactgattcctcca

SEQ ID NO: 2725480 - DNA, 25 bp, Homo sapien
gctgccaaagaatccctgtatgttt

SEQ ID NO: 2725481 - DNA, 25 bp, Homo sapien
ctgcttctgggcctttgctgccaaa

SEQ ID NO: 2725482 - DNA, 25 bp, Homo sapien
tttgctgccaaagaatccctgtatg

SEQ ID NO: 2725483 - DNA, 25 bp, Homo sapien
tgggcctttgctgccaaagaatccc

SEQ ID NO: 2725484 - DNA, 25 bp, Homo sapien
tgaagccccgcgaagtgatttctgt

SEQ ID NO: 2725485 - DNA, 25 bp, Homo sapien
ttgcacgtggccaccaaataatgtg

SEQ ID NO: 2725486 - DNA, 25 bp, Homo sapien
tgagaaacatcaggagctgccgcgt

SEQ ID NO: 2725487 - DNA, 25 bp, Homo sapien
tgtttggtaacgcaactgccatgag

SEQ ID NO: 2725488 - DNA, 25 bp, Homo sapien
gcacgtccctttagaatattgtcca

SEQ ID NO: 2725489 - DNA, 25 bp, Homo sapien
tgggcacgtcgcactctgcaccttt

SEQ ID NO: 2725490 - DNA, 25 bp, Homo sapien
cccgcaggaaggatcgatgcactga

SEQ ID NO: 2725491 - DNA, 25 bp, Homo sapien
tgtagcactggcacgtccctttaga

SEQ ID NO: 2725492 - DNA, 25 bp, Homo sapien
tatggtgacaagtaatcaaatggca

SEQ ID NO: 2725493 - DNA, 25 bp, Homo sapien
tggccaattctttatatggtgacaa

SEQ ID NO: 2725494 - DNA, 25 bp, Homo sapien
ctgtggccaattctttatatggtga

SEQ ID NO: 2725495 - DNA, 25 bp, Homo sapien
tcaaatggcaaccagagaccatatt

SEQ ID NO: 2725496 - DNA, 25 bp, Homo sapien
tcacttgagattccatgcatacagc

SEQ ID NO: 2725497 - DNA, 25 bp, Homo sapien
gattcacgtggcttgtttggttgga

SEQ ID NO: 2725498 - DNA, 25 bp, Homo sapien
catgcatacagctgtgtataatctt

SEQ ID NO: 2725499 - DNA, 25 bp, Homo sapien
cataatgattcacgtggcttgtttg

SEQ ID NO: 2725500 - DNA, 25 bp, Homo sapien
ggaccctcgccagctcacagttcag

SEQ ID NO: 2725501 - DNA, 25 bp, Homo sapien
ttcacacagactccgtggctggagc

SEQ ID NO: 2725502 - DNA, 25 bp, Homo sapien
cacagttcagaccaccccagccagg

SEQ ID NO: 2725503 - DNA, 25 bp, Homo sapien
cacacagactccgtggctggagcag

SEQ ID NO: 2725504 - DNA, 25 bp, Homo sapien
tccagttgggatcgcagctgcagag

SEQ ID NO: 2725505 - DNA, 25 bp, Homo sapien
gacccatccagttgggatcgcagct

SEQ ID NO: 2725506 - DNA, 25 bp, Homo sapien
cagagcagtcgggacccatccagtt

SEQ ID NO: 2725507 - DNA, 25 bp, Homo sapien
caacagagcagtcgggacccatcca

SEQ ID NO: 2725508 - DNA, 25 bp, Homo sapien
cgcttgcttggatagggacttgtca

SEQ ID NO: 2725509 - DNA, 25 bp, Homo sapien
aagatcacagactccacgattgagg

SEQ ID NO: 2725510 - DNA, 25 bp, Homo sapien
catgcatttgcggtgatggtaccaa

SEQ ID NO: 2725511 - DNA, 25 bp, Homo sapien
ggaaaatgaagtgtacagcgcgact

SEQ ID NO: 2725512 - DNA, 25 bp, Homo sapien
agccctcttcacagcggcaggctcc

SEQ ID NO: 2725513 - DNA, 25 bp, Homo sapien
gtggcacacgcgctggtcacacgct

SEQ ID NO: 2725514 - DNA, 25 bp, Homo sapien
acaggtcccgtgctcaatgcagcgg

SEQ ID NO: 2725515 - DNA, 25 bp, Homo sapien
cagccctctcggcattcacatttgc

SEQ ID NO: 2725516 - DNA, 25 bp, Homo sapien
ctgtttcggtgcctgccgtttgcct

SEQ ID NO: 2725517 - DNA, 25 bp, Homo sapien
tgtttcggtgcctgccgtttgccta

SEQ ID NO: 2725518 - DNA, 25 bp, Homo sapien
gtttcggtgcctgccgtttgcctac

SEQ ID NO: 2725519 - DNA, 25 bp, Homo sapien
atttatgaaaataaagcaatatgtg

SEQ ID NO: 2725520 - DNA, 25 bp, Homo sapien
tttatgaaaataaagcaatatgtgc

SEQ ID NO: 2725521 - DNA, 25 bp, Homo sapien
aatttatgaaaataaagcaatatgt

SEQ ID NO: 2725522 - DNA, 25 bp, Homo sapien
ctccttccctatcccctgggagatt

SEQ ID NO: 2725523 - DNA, 25 bp, Homo sapien
ggaacagccagttgccatgcgcgac

SEQ ID NO: 2725524 - DNA, 25 bp, Homo sapien
cttccctatcccctgggagatttgg

SEQ ID NO: 2725525 - DNA, 25 bp, Homo sapien
cctatcccctgggagatttggaggg

SEQ ID NO: 2725526 - DNA, 25 bp, Homo sapien
ttcttatctgctctggtccctttcc

SEQ ID NO: 2725527 - DNA, 25 bp, Homo sapien
gacaccgacagtttcccatgcatgt

SEQ ID NO: 2725528 - DNA, 25 bp, Homo sapien
agtgatttgaggtgcttgcaacccc

SEQ ID NO: 2725529 - DNA, 25 bp, Homo sapien
tccctccctgagattgcaagtttgg

SEQ ID NO: 2725530 - DNA, 25 bp, Homo sapien
gagttcaccttgttgccagcaagca

SEQ ID NO: 2725531 - DNA, 25 bp, Homo sapien
tgcgtctaacctgacctaaaattag

SEQ ID NO: 2725532 - DNA, 25 bp, Homo sapien
tgagagtcctgcctgcgtctaacct

SEQ ID NO: 2725533 - DNA, 25 bp, Homo sapien
agcaagcagggatccagtgatccag

SEQ ID NO: 2725534 - DNA, 25 bp, Homo sapien
ggagcaagacctggagcgtcatcga

SEQ ID NO: 2725535 - DNA, 25 bp, Homo sapien
catcgagagattgcaaaaacaattc

SEQ ID NO: 2725536 - DNA, 25 bp, Homo sapien
aaaacaattcactgccaacagactg

SEQ ID NO: 2725537 - DNA, 25 bp, Homo sapien
gtcccagtgctatggtcgtggccct

SEQ ID NO: 2725538 - DNA, 25 bp, Homo sapien
tctgcgatatctggagtagacccct

SEQ ID NO: 2725539 - DNA, 25 bp, Homo sapien
gaacaagagactatactggaccagc

SEQ ID NO: 2725540 - DNA, 25 bp, Homo sapien
tgcttggaaaggaccaaagagcccc

SEQ ID NO: 2725541 - DNA, 25 bp, Homo sapien
taaacaggtcgcagacaacccaagt

SEQ ID NO: 2725542 - DNA, 25 bp, Homo sapien
tatgctactgtgtgcaacgctgtgg

SEQ ID NO: 2725543 - DNA, 25 bp, Homo sapien
gagattcgaaatgatggttcccaca

SEQ ID NO: 2725544 - DNA, 25 bp, Homo sapien
gcaactataactcagttctctggtg

SEQ ID NO: 2725545 - DNA, 25 bp, Homo sapien
tggtgtgaagcaaattaaacgtccg

SEQ ID NO: 2725546 - DNA, 25 bp, Homo sapien
gagaggatgagaaggagggacgtga

SEQ ID NO: 2725547 - DNA, 25 bp, Homo sapien
ctggttggagaaatggagaggatga

SEQ ID NO: 2725548 - DNA, 25 bp, Homo sapien
tggagaggatgagaaggagggacgt

SEQ ID NO: 2725549 - DNA, 25 bp, Homo sapien
aggatgagaaggagggacgtgaggc

SEQ ID NO: 2725550 - DNA, 25 bp, Homo sapien
tccatggcaacgttgcatccgggcc

SEQ ID NO: 2725551 - DNA, 25 bp, Homo sapien
taccgttgcacaagtcagggcagcc

SEQ ID NO: 2725552 - DNA, 25 bp, Homo sapien
cagtgtgcatctcccgttaccgttg

SEQ ID NO: 2725553 - DNA, 25 bp, Homo sapien
gttatcagcacaggaagtttccatg

SEQ ID NO: 2725554 - DNA, 25 bp, Homo sapien
ttttgctcgttcatgaaatttataa

SEQ ID NO: 2725555 - DNA, 25 bp, Homo sapien
ttgctcgttcatgaaatttataaca

SEQ ID NO: 2725556 - DNA, 25 bp, Homo sapien
tttataacaaatgtgttcattgctg

SEQ ID NO: 2725557 - DNA, 25 bp, Homo sapien
taacaaatgtgttcattgctgctgc

SEQ ID NO: 2725558 - DNA, 25 bp, Homo sapien
ctgatgaaccgtcgctcctcaggca

SEQ ID NO: 2725559 - DNA, 25 bp, Homo sapien
gatgaaccgtcgctcctcaggcatc

SEQ ID NO: 2725560 - DNA, 25 bp, Homo sapien
ggctgcctgatgaaccgtcgctcct

SEQ ID NO: 2725561 - DNA, 25 bp, Homo sapien
gcctgatgaaccgtcgctcctcagg

SEQ ID NO: 2725562 - DNA, 25 bp, Homo sapien
aattggcactccaatctcccagtgg

SEQ ID NO: 2725563 - DNA, 25 bp, Homo sapien
gtgaactttaaattggcactccaat

SEQ ID NO: 2725564 - DNA, 25 bp, Homo sapien
tttcagacgacactgtgaactttaa

SEQ ID NO: 2725565 - DNA, 25 bp, Homo sapien
gacactgtgaactttaaattggcac

SEQ ID NO: 2725566 - DNA, 25 bp, Homo sapien
actgctgttagcactatagatttct

SEQ ID NO: 2725567 - DNA, 25 bp, Homo sapien
ctcaggtgagaagaaacccactgct

SEQ ID NO: 2725568 - DNA, 25 bp, Homo sapien
ggcctcttccaattaggggtatcat

SEQ ID NO: 2725569 - DNA, 25 bp, Homo sapien
gttagcactatagatttctttaagg

SEQ ID NO: 2725570 - DNA, 25 bp, Homo sapien
aatcaaggctctgaacatctcgggc

SEQ ID NO: 2725571 - DNA, 25 bp, Homo sapien
catctcgggctgatatgctggctga

SEQ ID NO: 2725572 - DNA, 25 bp, Homo sapien
tgctggctgaatcggatactcccca

SEQ ID NO: 2725573 - DNA, 25 bp, Homo sapien
gagcaggcatgcacactttagattg

SEQ ID NO: 2725574 - DNA, 25 bp, Homo sapien
ggcataaagctgtttggagacacta

SEQ ID NO: 2725575 - DNA, 25 bp, Homo sapien
taacacctttgttaccagcacaggc

SEQ ID NO: 2725576 - DNA, 25 bp, Homo sapien
tgtttggagacactaacacctttgt

SEQ ID NO: 2725577 - DNA, 25 bp, Homo sapien
acacctttgttaccagcacaggcat

SEQ ID NO: 2725578 - DNA, 25 bp, Homo sapien
agaggcagagccagagtcagcagat

SEQ ID NO: 2725579 - DNA, 25 bp, Homo sapien
gaggcagagccagagtcagcagatt

SEQ ID NO: 2725580 - DNA, 25 bp, Homo sapien
ggcagagccagagtcagcagatttc

SEQ ID NO: 2725581 - DNA, 25 bp, Homo sapien
cagagccagagtcagcagatttcat

SEQ ID NO: 2725582 - DNA, 25 bp, Homo sapien
ttcactgcgggccaatccgtctggc

SEQ ID NO: 2725583 - DNA, 25 bp, Homo sapien
gctgaatgatgtccagtgggtcccg

SEQ ID NO: 2725584 - DNA, 25 bp, Homo sapien
gagcttgatacggtcatagaaggac

SEQ ID NO: 2725585 - DNA, 25 bp, Homo sapien
gtcagggtccaaacaatccaccagg

SEQ ID NO: 2725586 - DNA, 25 bp, Homo sapien
ctgcctctaggggggcagattccag

SEQ ID NO: 2725587 - DNA, 25 bp, Homo sapien
gcctctaggggggcagattccaggc

SEQ ID NO: 2725588 - DNA, 25 bp, Homo sapien
agattccaggccaattgggtccccg

SEQ ID NO: 2725589 - DNA, 25 bp, Homo sapien
cctgcaaagacactagggctctgtt

SEQ ID NO: 2725590 - DNA, 25 bp, Homo sapien
gatggtgtagccgtattttgggtac

SEQ ID NO: 2725591 - DNA, 25 bp, Homo sapien
tacttggcctcggatgagagaaacc

SEQ ID NO: 2725592 - DNA, 25 bp, Homo sapien
tgacaaaagacacgttcacaccgac

SEQ ID NO: 2725593 - DNA, 25 bp, Homo sapien
catcctggcgggtgatggtgtagcc

SEQ ID NO: 2725594 - DNA, 25 bp, Homo sapien
acagtgcgctcctggctcatgaacg

SEQ ID NO: 2725595 - DNA, 25 bp, Homo sapien
ggtgtccatggcgtaaaagctgttc

SEQ ID NO: 2725596 - DNA, 25 bp, Homo sapien
ggaagcacctccatttgcgatcagg

SEQ ID NO: 2725597 - DNA, 25 bp, Homo sapien
gatgattggatcaggccggacaaag

SEQ ID NO: 2725598 - DNA, 25 bp, Homo sapien
taatatgccctctgtcgtaacaccg

SEQ ID NO: 2725599 - DNA, 25 bp, Homo sapien
gccacgagaggctgtaattatacga

SEQ ID NO: 2725600 - DNA, 25 bp, Homo sapien
ctagctgcatgcaaggaggccacga

SEQ ID NO: 2725601 - DNA, 25 bp, Homo sapien
tgacaatccgtataaagcaacaggg

SEQ ID NO: 2725602 - DNA, 25 bp, Homo sapien
tgcagttctagagctcagatagcga

SEQ ID NO: 2725603 - DNA, 25 bp, Homo sapien
gagagtccatacaccctttggccat

SEQ ID NO: 2725604 - DNA, 25 bp, Homo sapien
tttcacattggaaccagggagctcg

SEQ ID NO: 2725605 - DNA, 25 bp, Homo sapien
cagtgacttgtaccctgcagttcta

SEQ ID NO: 2725606 - DNA, 25 bp, Homo sapien
ctagggaccagccaccgaggttgga

SEQ ID NO: 2725607 - DNA, 25 bp, Homo sapien
cattgaggatgtggtgtttgtctag

SEQ ID NO: 2725608 - DNA, 25 bp, Homo sapien
cccagagaattagactgggacaggt

SEQ ID NO: 2725609 - DNA, 25 bp, Homo sapien
gtctcatattcaaacccgacagaca

SEQ ID NO: 2725610 - DNA, 25 bp, Homo sapien
agaggctcccatcgattccaacagc

SEQ ID NO: 2725611 - DNA, 25 bp, Homo sapien
acaggaaatgctccggcggcgacca

SEQ ID NO: 2725612 - DNA, 25 bp, Homo sapien
gcgtcggatgtaattgaagtcaccc

SEQ ID NO: 2725613 - DNA, 25 bp, Homo sapien
catttcgagagggaaagatgcgtcg

SEQ ID NO: 2725614 - DNA, 25 bp, Homo sapien
ggttgcatctatggccttccctcca

SEQ ID NO: 2725615 - DNA, 25 bp, Homo sapien
gacttgacgcggtagattctcctgc

SEQ ID NO: 2725616 - DNA, 25 bp, Homo sapien
tctcgggctcatcagggttgcatct

SEQ ID NO: 2725617 - DNA, 25 bp, Homo sapien
tcctgctgttggtgtcggacacgta

SEQ ID NO: 2725618 - DNA, 25 bp, Homo sapien
ttccggatcatggtggcatcgacaa

SEQ ID NO: 2725619 - DNA, 25 bp, Homo sapien
gagcccattcttgtctactgcaata

SEQ ID NO: 2725620 - DNA, 25 bp, Homo sapien
ggcatcgacaaagtacatgagccca

SEQ ID NO: 2725621 - DNA, 25 bp, Homo sapien
attccattctggtcaaccttccgga

SEQ ID NO: 2725622 - DNA, 25 bp, Homo sapien
gctaaaaggcagatctccccgttgg

SEQ ID NO: 2725623 - DNA, 25 bp, Homo sapien
caagatggcatcagtcgcgtaggca

SEQ ID NO: 2725624 - DNA, 25 bp, Homo sapien
tgtgtggacacgactttgaggcctc

SEQ ID NO: 2725625 - DNA, 25 bp, Homo sapien
tatccatgggattgacagcaaggtc

SEQ ID NO: 2725626 - DNA, 25 bp, Homo sapien
ccaattggctgatcatgtgccaaaa

SEQ ID NO: 2725627 - DNA, 25 bp, Homo sapien
ggctatgcagtgttggtcttgacca

SEQ ID NO: 2725628 - DNA, 25 bp, Homo sapien
atgaggcatcactcccgaccaggac

SEQ ID NO: 2725629 - DNA, 25 bp, Homo sapien
gacagacttttctagtagcctcaca

SEQ ID NO: 2725630 - DNA, 25 bp, Homo sapien
caaggaacgtcttcagatgtaggtc

SEQ ID NO: 2725631 - DNA, 25 bp, Homo sapien
ttcccccaaggaacgtcttcagatg

SEQ ID NO: 2725632 - DNA, 25 bp, Homo sapien
ccccaaggaacgtcttcagatgtag

SEQ ID NO: 2725633 - DNA, 25 bp, Homo sapien
aaggaacgtcttcagatgtaggtct

SEQ ID NO: 2725634 - DNA, 25 bp, Homo sapien
tttccccactttggaagatccactg

SEQ ID NO: 2725635 - DNA, 25 bp, Homo sapien
ccttgttctagttgggacagccttt

SEQ ID NO: 2725636 - DNA, 25 bp, Homo sapien
gaagatccactgtactctgagagct

SEQ ID NO: 2725637 - DNA, 25 bp, Homo sapien
aaggaaagcaggctcgtttccaggc

SEQ ID NO: 2725638 - DNA, 25 bp, Homo sapien
gggcgcgtcacgttggtcaggcggc

SEQ ID NO: 2725639 - DNA, 25 bp, Homo sapien
cgcgtcacgttggtcaggcggcctt

SEQ ID NO: 2725640 - DNA, 25 bp, Homo sapien
tggtcaggcggccttcgtggtcata

SEQ ID NO: 2725641 - DNA, 25 bp, Homo sapien
tcacgttggtcaggcggccttcgtg

SEQ ID NO: 2725642 - DNA, 25 bp, Homo sapien
tgatgacagtgacgtcatcatcacg

SEQ ID NO: 2725643 - DNA, 25 bp, Homo sapien
cactgtgtaggaggcctctactgaa

SEQ ID NO: 2725644 - DNA, 25 bp, Homo sapien
tcatcacggttggagttctcaatgt

SEQ ID NO: 2725645 - DNA, 25 bp, Homo sapien
caatgtcaatggtaatagatttctc

SEQ ID NO: 2725646 - DNA, 25 bp, Homo sapien
tggcagagcagaaatagagtcattg

SEQ ID NO: 2725647 - DNA, 25 bp, Homo sapien
tgtgactccagccgtcacacgcaga

SEQ ID NO: 2725648 - DNA, 25 bp, Homo sapien
tcattaatcatttggcagagcagaa

SEQ ID NO: 2725649 - DNA, 25 bp, Homo sapien
gccgtcacacgcagaaggacagaat

SEQ ID NO: 2725650 - DNA, 25 bp, Homo sapien
gagctggtagctgttccgaacttga

SEQ ID NO: 2725651 - DNA, 25 bp, Homo sapien
gcagggagatgttgcagcgtccaat

SEQ ID NO: 2725652 - DNA, 25 bp, Homo sapien
cattagcatacatcaccctcagggt

SEQ ID NO: 2725653 - DNA, 25 bp, Homo sapien
taagccattctccataggcagggag

SEQ ID NO: 2725654 - DNA, 25 bp, Homo sapien
taagacttgtgtgcctaacttgggc

SEQ ID NO: 2725655 - DNA, 25 bp, Homo sapien
ttacaggaactaacaccagacaatt

SEQ ID NO: 2725656 - DNA, 25 bp, Homo sapien
ttgatttgcataaacacgatgccag

SEQ ID NO: 2725657 - DNA, 25 bp, Homo sapien
acgatgccagcaaatctaaccctgg

SEQ ID NO: 2725658 - DNA, 25 bp, Homo sapien
gctggagagagctttctaatgccac

SEQ ID NO: 2725659 - DNA, 25 bp, Homo sapien
ggataaatgttagcctggcaccatg

SEQ ID NO: 2725660 - DNA, 25 bp, Homo sapien
tcttgaacccctaggcgaaaatgat

SEQ ID NO: 2725661 - DNA, 25 bp, Homo sapien
ctctgctaatgaagtccaggtaggg

SEQ ID NO: 2725662 - DNA, 25 bp, Homo sapien
caacagaagcttggtcacatcgggt

SEQ ID NO: 2725663 - DNA, 25 bp, Homo sapien
gtggtggtcagaaagataggtcttc

SEQ ID NO: 2725664 - DNA, 25 bp, Homo sapien
tacgggattggagccatcattttca

SEQ ID NO: 2725665 - DNA, 25 bp, Homo sapien
cacatcgggttggttcatctgggac

SEQ ID NO: 2725666 - DNA, 25 bp, Homo sapien
cgtcagcgaacatgcgggacacgat

SEQ ID NO: 2725667 - DNA, 25 bp, Homo sapien
tggtcataaatgatcctcagggtga

SEQ ID NO: 2725668 - DNA, 25 bp, Homo sapien
gaagtatgacacgttgacagctgcc

SEQ ID NO: 2725669 - DNA, 25 bp, Homo sapien
tcagggtgaacttccggtggtcatc

SEQ ID NO: 2725670 - DNA, 25 bp, Homo sapien
gctatgaataacatttgccttcaga

SEQ ID NO: 2725671 - DNA, 25 bp, Homo sapien
gctgagctatgaataacatttgcct

SEQ ID NO: 2725672 - DNA, 25 bp, Homo sapien
cccaatggtaatagtgctgagctat

SEQ ID NO: 2725673 - DNA, 25 bp, Homo sapien
caatggtaatagtgctgagctatga

SEQ ID NO: 2725674 - DNA, 25 bp, Homo sapien
cagaaaggaaaggggaacagaacat

SEQ ID NO: 2725675 - DNA, 25 bp, Homo sapien
gaaaggggaacagaacatatcagtt

SEQ ID NO: 2725676 - DNA, 25 bp, Homo sapien
tgcagaaaggaaaggggaacagaac

SEQ ID NO: 2725677 - DNA, 25 bp, Homo sapien
aaggaaaggggaacagaacatatca

SEQ ID NO: 2725678 - DNA, 25 bp, Homo sapien
catgaggccgttgatgctgaacaca

SEQ ID NO: 2725679 - DNA, 25 bp, Homo sapien
tacttgtagaacacctggcgtccgg

SEQ ID NO: 2725680 - DNA, 25 bp, Homo sapien
tcatcatagcggtagaggtcaacgg

SEQ ID NO: 2725681 - DNA, 25 bp, Homo sapien
tacttcgtggtattggcatagggcc

SEQ ID NO: 2725682 - DNA, 25 bp, Homo sapien
gcttggccataacttccgggtccga

SEQ ID NO: 2725683 - DNA, 25 bp, Homo sapien
tagcctaggtcgcttggccataact

SEQ ID NO: 2725684 - DNA, 25 bp, Homo sapien
tccgggtccgaaaggtcccagatgc

SEQ ID NO: 2725685 - DNA, 25 bp, Homo sapien
tggggattctgggttcgacttccaa

SEQ ID NO: 2725686 - DNA, 25 bp, Homo sapien
gaaagggtactgactgcccagagta

SEQ ID NO: 2725687 - DNA, 25 bp, Homo sapien
tctgctgaatggtctaggtccttag

SEQ ID NO: 2725688 - DNA, 25 bp, Homo sapien
agtccttgcattgggaattatgcca

SEQ ID NO: 2725689 - DNA, 25 bp, Homo sapien
ggatgtccgtgccttgaaacactca

SEQ ID NO: 2725690 - DNA, 25 bp, Homo sapien
aggaatgatgttgctaagctgaaat

SEQ ID NO: 2725691 - DNA, 25 bp, Homo sapien
gttgctaagctgaaatccaaacatc

SEQ ID NO: 2725692 - DNA, 25 bp, Homo sapien
gatgttgctaagctgaaatccaaac

SEQ ID NO: 2725693 - DNA, 25 bp, Homo sapien
gctaagctgaaatccaaacatcaca

SEQ ID NO: 2725694 - DNA, 25 bp, Homo sapien
ctctgacaattcatagggaggaggc

SEQ ID NO: 2725695 - DNA, 25 bp, Homo sapien
tcacttgcttgactctctgacaatt

SEQ ID NO: 2725696 - DNA, 25 bp, Homo sapien
caattcatagggaggaggcacgaaa

SEQ ID NO: 2725697 - DNA, 25 bp, Homo sapien
tctcacttgcttgactctctgacaa

SEQ ID NO: 2725698 - DNA, 25 bp, Homo sapien
ttttcctgcgctgacatgcccctgg

SEQ ID NO: 2725699 - DNA, 25 bp, Homo sapien
ctccaatgttttcctgcgctgacat

SEQ ID NO: 2725700 - DNA, 25 bp, Homo sapien
caatgttttcctgcgctgacatgcc

SEQ ID NO: 2725701 - DNA, 25 bp, Homo sapien
tgttttcctgcgctgacatgcccct

SEQ ID NO: 2725702 - DNA, 25 bp, Homo sapien
tatgcttggccataaagcgccgagg

SEQ ID NO: 2725703 - DNA, 25 bp, Homo sapien
gacccaagcacaaattatgttctga

SEQ ID NO: 2725704 - DNA, 25 bp, Homo sapien
aatgttctttaatgggacagaaact

SEQ ID NO: 2725705 - DNA, 25 bp, Homo sapien
tcggtcatcgcagaaagacccaagc

SEQ ID NO: 2725706 - DNA, 25 bp, Homo sapien
ctgtactctgatggttggcaactgc

SEQ ID NO: 2725707 - DNA, 25 bp, Homo sapien
tgcccgctttagacccaggaatgtc

SEQ ID NO: 2725708 - DNA, 25 bp, Homo sapien
tgatggttggcaactgccttgcccg

SEQ ID NO: 2725709 - DNA, 25 bp, Homo sapien
tggcaactgccttgcccgctttaga

SEQ ID NO: 2725710 - DNA, 25 bp, Homo sapien
caggtagtaggcgttgttcagcaca

SEQ ID NO: 2725711 - DNA, 25 bp, Homo sapien
gctttctctcggatgctggcgtgga

SEQ ID NO: 2725712 - DNA, 25 bp, Homo sapien
tctctagcaccttgcggccgatggt

SEQ ID NO: 2725713 - DNA, 25 bp, Homo sapien
tctgggtattgctccacgggaagca

SEQ ID NO: 2725714 - DNA, 25 bp, Homo sapien
gggacttctcgcttggacagtagca

SEQ ID NO: 2725715 - DNA, 25 bp, Homo sapien
gcaaaagtgtcacgatgctgcacct

SEQ ID NO: 2725716 - DNA, 25 bp, Homo sapien
tctgcgtagacccagaacaagtggg

SEQ ID NO: 2725717 - DNA, 25 bp, Homo sapien
gaaactgatacccacgaactacgga

SEQ ID NO: 2725718 - DNA, 25 bp, Homo sapien
taccatgcaccaaggtggcgcttcc

SEQ ID NO: 2725719 - DNA, 25 bp, Homo sapien
tataccatgcaccaaggtggcgctt

SEQ ID NO: 2725720 - DNA, 25 bp, Homo sapien
actcaccctataccatgcaccaagg

SEQ ID NO: 2725721 - DNA, 25 bp, Homo sapien
atggagcactcaccctataccatgc

SEQ ID NO: 2725722 - DNA, 25 bp, Homo sapien
ccatgatgtccctgcaagaactcag

SEQ ID NO: 2725723 - DNA, 25 bp, Homo sapien
atgatgtccctgcaagaactcagct

SEQ ID NO: 2725724 - DNA, 25 bp, Homo sapien
tgatgtccctgcaagaactcagctg

SEQ ID NO: 2725725 - DNA, 25 bp, Homo sapien
catgatgtccctgcaagaactcagc

SEQ ID NO: 2725726 - DNA, 25 bp, Homo sapien
ccctcggcatatggcaggaagctgg

SEQ ID NO: 2725727 - DNA, 25 bp, Homo sapien
cagcaccctgtgctgtatggaccag

SEQ ID NO: 2725728 - DNA, 25 bp, Homo sapien
gctgagccagagagggaatcatgtt

SEQ ID NO: 2725729 - DNA, 25 bp, Homo sapien
aagctggactggtcgaatgaagccc

SEQ ID NO: 2725730 - DNA, 25 bp, Homo sapien
cgggcggccgccgaggcaccatgat

SEQ ID NO: 2725731 - DNA, 25 bp, Homo sapien
ggccgccgaggcaccatgatccggg

SEQ ID NO: 2725732 - DNA, 25 bp, Homo sapien
tccagccggccgctcttagcccggg

SEQ ID NO: 2725733 - DNA, 25 bp, Homo sapien
atgatccggggggtggcgcccgcag

SEQ ID NO: 2725734 - DNA, 25 bp, Homo sapien
aagcgctgccggcgctcccccatgc

SEQ ID NO: 2725735 - DNA, 25 bp, Homo sapien
ccaagcgctgccggcgctcccccat

SEQ ID NO: 2725736 - DNA, 25 bp, Homo sapien
cttcccaagcgctgccggcgctccc

SEQ ID NO: 2725737 - DNA, 25 bp, Homo sapien
gcgctgccggcgctcccccatgcag

SEQ ID NO: 2725738 - DNA, 25 bp, Homo sapien
tctatgtagtagaccttgccgtcga

SEQ ID NO: 2725739 - DNA, 25 bp, Homo sapien
tgcggttcgtgtggtctatgtagta

SEQ ID NO: 2725740 - DNA, 25 bp, Homo sapien
gtagaccttgccgtcgaagtcgcgc

SEQ ID NO: 2725741 - DNA, 25 bp, Homo sapien
tcgatccagctggtggtgcggttcg

SEQ ID NO: 2725742 - DNA, 25 bp, Homo sapien
gctggggcctaagtcctccaactgg

SEQ ID NO: 2725743 - DNA, 25 bp, Homo sapien
caaaactccgggcaggtgccggctg

SEQ ID NO: 2725744 - DNA, 25 bp, Homo sapien
ctctcggtggcccactgaggcggga

SEQ ID NO: 2725745 - DNA, 25 bp, Homo sapien
ctagagcttaaggtcaaaactccgg

SEQ ID NO: 2725746 - DNA, 25 bp, Homo sapien
ctccatcctaacagcttccaagttg

SEQ ID NO: 2725747 - DNA, 25 bp, Homo sapien
agaaagaggcgaggggcaaggcttt

SEQ ID NO: 2725748 - DNA, 25 bp, Homo sapien
aagaggcgaggggcaaggctttccg

SEQ ID NO: 2725749 - DNA, 25 bp, Homo sapien
agaggcgaggggcaaggctttccgg

SEQ ID NO: 2725750 - DNA, 25 bp, Homo sapien
gaaagaggcgaggggcaaggctttc

SEQ ID NO: 2725751 - DNA, 25 bp, Homo sapien
ggtgcagggctgaggagcctcgccg

SEQ ID NO: 2725752 - DNA, 25 bp, Homo sapien
tgcagggctgaggagcctcgccgcc

SEQ ID NO: 2725753 - DNA, 25 bp, Homo sapien
ctggtgcagggctgaggagcctcgc

SEQ ID NO: 2725754 - DNA, 25 bp, Homo sapien
caaggtcaggtcccgctggtgcagg

SEQ ID NO: 2725755 - DNA, 25 bp, Homo sapien
taaagtccgcattccccaagacact

SEQ ID NO: 2725756 - DNA, 25 bp, Homo sapien
cgtgtcaacaacatcgtggtccggg

SEQ ID NO: 2725757 - DNA, 25 bp, Homo sapien
ccaaggtcacagacaaggtttaaag

SEQ ID NO: 2725758 - DNA, 25 bp, Homo sapien
tgcccacagaccgtgtcaacaacat

SEQ ID NO: 2725759 - DNA, 25 bp, Homo sapien
gagttactccgcaaaaggagcacgg

SEQ ID NO: 2725760 - DNA, 25 bp, Homo sapien
ttgttgggacaaccatcctcaggaa

SEQ ID NO: 2725761 - DNA, 25 bp, Homo sapien
aagtgaaatacacaggacgctggcc

SEQ ID NO: 2725762 - DNA, 25 bp, Homo sapien
cactggaccctctccggttgttggg

SEQ ID NO: 2725763 - DNA, 25 bp, Homo sapien
gcattgagcaggcaactggcaaggg

SEQ ID NO: 2725764 - DNA, 25 bp, Homo sapien
gagtgagaacttaagcctccgtccc

SEQ ID NO: 2725765 - DNA, 25 bp, Homo sapien
cagtgagatgtcatgggtagaagca

SEQ ID NO: 2725766 - DNA, 25 bp, Homo sapien
ctcatttcttcccaacagtgagatg

SEQ ID NO: 2725767 - DNA, 25 bp, Homo sapien
tcccatgtttgggtggaacaacaaa

SEQ ID NO: 2725768 - DNA, 25 bp, Homo sapien
tctttatggagagcttatctactac

SEQ ID NO: 2725769 - DNA, 25 bp, Homo sapien
cgtgaatcgtgtggtatgcaatccc

SEQ ID NO: 2725770 - DNA, 25 bp, Homo sapien
cagtgtcctctaatgatctttatgg

SEQ ID NO: 2725771 - DNA, 25 bp, Homo sapien
actccttgagctattaagacacttc

SEQ ID NO: 2725772 - DNA, 25 bp, Homo sapien
gttttgaaactccttgagctattaa

SEQ ID NO: 2725773 - DNA, 25 bp, Homo sapien
tccttgagctattaagacacttctt

SEQ ID NO: 2725774 - DNA, 25 bp, Homo sapien
gaaactccttgagctattaagacac

SEQ ID NO: 2725775 - DNA, 25 bp, Homo sapien
aacttggttctcacgaagcctttca

SEQ ID NO: 2725776 - DNA, 25 bp, Homo sapien
ccacaggccgttcaggcaccaaaca

SEQ ID NO: 2725777 - DNA, 25 bp, Homo sapien
gaaggatgttctattgggcaagcag

SEQ ID NO: 2725778 - DNA, 25 bp, Homo sapien
gcaggaatgctgcagaccaagccca

SEQ ID NO: 2725779 - DNA, 25 bp, Homo sapien
tagaagttcagatgcacgtggccaa

SEQ ID NO: 2725780 - DNA, 25 bp, Homo sapien
gggagcccctgagcatactggagaa

SEQ ID NO: 2725781 - DNA, 25 bp, Homo sapien
aataaagtgccatgaactcctgcgc

SEQ ID NO: 2725782 - DNA, 25 bp, Homo sapien
tcaaggaggataccactgtgtggcc

SEQ ID NO: 2725783 - DNA, 25 bp, Homo sapien
tgtcagagcctgcaaaagaaagggt

SEQ ID NO: 2725784 - DNA, 25 bp, Homo sapien
cagaaaaggaatgaggtgtcagagc

SEQ ID NO: 2725785 - DNA, 25 bp, Homo sapien
cactatgcaccctttggaccttaag

SEQ ID NO: 2725786 - DNA, 25 bp, Homo sapien
cagaacttggcagctagatgaagga

SEQ ID NO: 2725787 - DNA, 25 bp, Homo sapien
tcagcattccacaagatgatggaac

SEQ ID NO: 2725788 - DNA, 25 bp, Homo sapien
agggtatatggaaatttcttgtact

SEQ ID NO: 2725789 - DNA, 25 bp, Homo sapien
caacgcaaaaaaactggtaaatctg

SEQ ID NO: 2725790 - DNA, 25 bp, Homo sapien
taaatgatatacattatatgtacaa

SEQ ID NO: 2725791 - DNA, 25 bp, Homo sapien
tggagcaggaggcactaggtgctgc

SEQ ID NO: 2725792 - DNA, 25 bp, Homo sapien
ggcctctgtagccttcgaccagaaa

SEQ ID NO: 2725793 - DNA, 25 bp, Homo sapien
gggccgctattccttgcctgagatt

SEQ ID NO: 2725794 - DNA, 25 bp, Homo sapien
agccatcttgtatgggcctctgtag

SEQ ID NO: 2725795 - DNA, 25 bp, Homo sapien
gctattccttgcctgagattcctgt

SEQ ID NO: 2725796 - DNA, 25 bp, Homo sapien
actctgtagcccttccgttgccgct

SEQ ID NO: 2725797 - DNA, 25 bp, Homo sapien
gaaggtgacagcttcttaacgggaa

SEQ ID NO: 2725798 - DNA, 25 bp, Homo sapien
tcagcacccttcacttgcactgatt

SEQ ID NO: 2725799 - DNA, 25 bp, Homo sapien
gggaagcgaccattcgtcaccccta

SEQ ID NO: 2725800 - DNA, 25 bp, Homo sapien
ttgggtctgatgctcgccctctggc

SEQ ID NO: 2725801 - DNA, 25 bp, Homo sapien
tcttgggtctgatgctcgccctctg

SEQ ID NO: 2725802 - DNA, 25 bp, Homo sapien
cgcagtcccaaacaggtgggctgtg

SEQ ID NO: 2725803 - DNA, 25 bp, Homo sapien
agggacaccgcagtcccaaacaggt

SEQ ID NO: 2725804 - DNA, 25 bp, Homo sapien
ggtgctcagcttgttaagaataagg

SEQ ID NO: 2725805 - DNA, 25 bp, Homo sapien
gaggcaccctggactggtaaagcag

SEQ ID NO: 2725806 - DNA, 25 bp, Homo sapien
gcagataagcgagccagcttccagg

SEQ ID NO: 2725807 - DNA, 25 bp, Homo sapien
agagccaggtgatggacaatgtcct

SEQ ID NO: 2725808 - DNA, 25 bp, Homo sapien
ttcagaaggattcggatacagccca

SEQ ID NO: 2725809 - DNA, 25 bp, Homo sapien
ggagtctccccttggaccaattcaa

SEQ ID NO: 2725810 - DNA, 25 bp, Homo sapien
tgttgaactaaagctggagtctccc

SEQ ID NO: 2725811 - DNA, 25 bp, Homo sapien
tttgctagggcctgctgtgcactta

SEQ ID NO: 2725812 - DNA, 25 bp, Homo sapien
tgggatctggctgcgagctccagga

SEQ ID NO: 2725813 - DNA, 25 bp, Homo sapien
gtgggatctggctgcgagctccagg

SEQ ID NO: 2725814 - DNA, 25 bp, Homo sapien
tgtgggatctggctgcgagctccag

SEQ ID NO: 2725815 - DNA, 25 bp, Homo sapien
taggatcctgggaatactgaggagc

SEQ ID NO: 2725816 - DNA, 25 bp, Homo sapien
aatctctccagtaagctaggatcct

SEQ ID NO: 2725817 - DNA, 25 bp, Homo sapien
aatactgaggagcaggacttctttc

SEQ ID NO: 2725818 - DNA, 25 bp, Homo sapien
taagctaggatcctgggaatactga

SEQ ID NO: 2725819 - DNA, 25 bp, Homo sapien
tcagagatggagattactttctccc

SEQ ID NO: 2725820 - DNA, 25 bp, Homo sapien
agaacctggttcttcccagaccaag

SEQ ID NO: 2725821 - DNA, 25 bp, Homo sapien
tttctcccatggcatctcctctaga

SEQ ID NO: 2725822 - DNA, 25 bp, Homo sapien
tcccagaccaagttggaaatccgct

SEQ ID NO: 2725823 - DNA, 25 bp, Homo sapien
cctgcctcgctaaggaaattgggtt

SEQ ID NO: 2725824 - DNA, 25 bp, Homo sapien
ctgcctcgctaaggaaattgggtta

SEQ ID NO: 2725825 - DNA, 25 bp, Homo sapien
tgcctcgctaaggaaattgggttag

SEQ ID NO: 2725826 - DNA, 25 bp, Homo sapien
ctcgctaaggaaattgggttaggct

SEQ ID NO: 2725827 - DNA, 25 bp, Homo sapien
aaacctcctgagctgacattatgca

SEQ ID NO: 2725828 - DNA, 25 bp, Homo sapien
taggcttcctagaacagaagaggct

SEQ ID NO: 2725829 - DNA, 25 bp, Homo sapien
cagggatcacacttcaagaactgct

SEQ ID NO: 2725830 - DNA, 25 bp, Homo sapien
ttatgaagctttgacctcgcagatc

SEQ ID NO: 2725831 - DNA, 25 bp, Homo sapien
ctgactgcatgttcactagtcttta

SEQ ID NO: 2725832 - DNA, 25 bp, Homo sapien
cagcatctgatctactattaaactc

SEQ ID NO: 2725833 - DNA, 25 bp, Homo sapien
tttttacagcatctgatctactatt

SEQ ID NO: 2725834 - DNA, 25 bp, Homo sapien
gactatgggcacataccccacgcct

SEQ ID NO: 2725835 - DNA, 25 bp, Homo sapien
cactgagggttcgaagcttctggga

SEQ ID NO: 2725836 - DNA, 25 bp, Homo sapien
cattccatgcatacatggtgggtgc

SEQ ID NO: 2725837 - DNA, 25 bp, Homo sapien
tagtgacctcaagaacaattgacag

SEQ ID NO: 2725838 - DNA, 25 bp, Homo sapien
cttagctgtatttgccccaggatca

SEQ ID NO: 2725839 - DNA, 25 bp, Homo sapien
aaagagaattccgtgattctcttcc

SEQ ID NO: 2725840 - DNA, 25 bp, Homo sapien
cttgaaagagaattccgtgattctc

SEQ ID NO: 2725841 - DNA, 25 bp, Homo sapien
ccgtgcccagcagcatttcttgaaa

SEQ ID NO: 2725842 - DNA, 25 bp, Homo sapien
agaattccgtgattctcttccaagc

SEQ ID NO: 2725843 - DNA, 25 bp, Homo sapien
cctctccgtatccaggataccagag

SEQ ID NO: 2725844 - DNA, 25 bp, Homo sapien
taccagagggaccggtagcattcca

SEQ ID NO: 2725845 - DNA, 25 bp, Homo sapien
accagagggaccggtagcattccat

SEQ ID NO: 2725846 - DNA, 25 bp, Homo sapien
gaggcagactacctgagttctaatt

SEQ ID NO: 2725847 - DNA, 25 bp, Homo sapien
caactctgagtatactaagagccac

SEQ ID NO: 2725848 - DNA, 25 bp, Homo sapien
gcaaaagtttgtacgtgaatgttca

SEQ ID NO: 2725849 - DNA, 25 bp, Homo sapien
tagtccctaccagatatccaaaaga

SEQ ID NO: 2725850 - DNA, 25 bp, Homo sapien
tctgggtaccgaagtccactggcta

SEQ ID NO: 2725851 - DNA, 25 bp, Homo sapien
cgctctggacatggaagctgtttcc

SEQ ID NO: 2725852 - DNA, 25 bp, Homo sapien
tgaagatgcccttggaaccagcgct

SEQ ID NO: 2725853 - DNA, 25 bp, Homo sapien
tacaattagctaccaatgctctcgg

SEQ ID NO: 2725854 - DNA, 25 bp, Homo sapien
tcaactcttaatatatgtcagcccc

SEQ ID NO: 2725855 - DNA, 25 bp, Homo sapien
ttaatatatgtcagcccctcctttg

SEQ ID NO: 2725856 - DNA, 25 bp, Homo sapien
cagcatggtgtggaggcatgggatg

SEQ ID NO: 2725857 - DNA, 25 bp, Homo sapien
tgtcctagagtccagccaacctgag

SEQ ID NO: 2725858 - DNA, 25 bp, Homo sapien
gtttccctgtatggttcctggatca

SEQ ID NO: 2725859 - DNA, 25 bp, Homo sapien
tttccctgtatggttcctggatcat

SEQ ID NO: 2725860 - DNA, 25 bp, Homo sapien
tgtttccctgtatggttcctggatc

SEQ ID NO: 2725861 - DNA, 25 bp, Homo sapien
ggggaggaaatacatctgcagctgc

SEQ ID NO: 2725862 - DNA, 25 bp, Homo sapien
tctgagggtctcttgagggtcttag

SEQ ID NO: 2725863 - DNA, 25 bp, Homo sapien
ctgatgttggggcactggacagatt

SEQ ID NO: 2725864 - DNA, 25 bp, Homo sapien
tgttggggcactggacagattttct

SEQ ID NO: 2725865 - DNA, 25 bp, Homo sapien
tagcctctgaggaggacccttgtca

SEQ ID NO: 2725866 - DNA, 25 bp, Homo sapien
gagaagcagtcaggattagggcaca

SEQ ID NO: 2725867 - DNA, 25 bp, Homo sapien
tgactgacagcggttaactcgagaa

SEQ ID NO: 2725868 - DNA, 25 bp, Homo sapien
tgagctgaataagcagtatccctgg

SEQ ID NO: 2725869 - DNA, 25 bp, Homo sapien
caaacacttcttaacagggtgagca

SEQ ID NO: 2725870 - DNA, 25 bp, Homo sapien
aaagaggcctccaatttcactcggg

SEQ ID NO: 2725871 - DNA, 25 bp, Homo sapien
tacaagagggaacccaagcgctgtg

SEQ ID NO: 2725872 - DNA, 25 bp, Homo sapien
tgaggccacgagctgacagaatgac

SEQ ID NO: 2725873 - DNA, 25 bp, Homo sapien
gacctgatgatacaactggagccct

SEQ ID NO: 2725874 - DNA, 25 bp, Homo sapien
caaacggttacttaagaggccgctg

SEQ ID NO: 2725875 - DNA, 25 bp, Homo sapien
tgcaaactgagaacgaagccgatac

SEQ ID NO: 2725876 - DNA, 25 bp, Homo sapien
tgagctgtccgcatttggagggccc

SEQ ID NO: 2725877 - DNA, 25 bp, Homo sapien
ctccaacctccctggtctttctcgt

SEQ ID NO: 2725878 - DNA, 25 bp, Homo sapien
tggaagtcaaattctccgcaggcat

SEQ ID NO: 2725879 - DNA, 25 bp, Homo sapien
ctccctggtctttctcgtttcctct

SEQ ID NO: 2725880 - DNA, 25 bp, Homo sapien
tctctggaagtcaaattctccgcag

SEQ ID NO: 2725881 - DNA, 25 bp, Homo sapien
gcacagagaacgtggggcaaacaag

SEQ ID NO: 2725882 - DNA, 25 bp, Homo sapien
gagatcggaatctgctgcttctacc

SEQ ID NO: 2725883 - DNA, 25 bp, Homo sapien
ggcagctctgagatcggaatctgct

SEQ ID NO: 2725884 - DNA, 25 bp, Homo sapien
cacgggagggttactgcacagagaa

SEQ ID NO: 2725885 - DNA, 25 bp, Homo sapien
gccatggactgaaccttcacctggg

SEQ ID NO: 2725886 - DNA, 25 bp, Homo sapien
tccagaagcccctaaatcacaatag

SEQ ID NO: 2725887 - DNA, 25 bp, Homo sapien
gaaccgatccccatgctctgtgtgt

SEQ ID NO: 2725888 - DNA, 25 bp, Homo sapien
ctagatgggagaaccgatccccatg

SEQ ID NO: 2725889 - DNA, 25 bp, Homo sapien
gaagactcttgcctgacaccgatgt

SEQ ID NO: 2725890 - DNA, 25 bp, Homo sapien
ttggaagactcttgcctgacaccga

SEQ ID NO: 2725891 - DNA, 25 bp, Homo sapien
gacaccgatgtatgacacctttttt

SEQ ID NO: 2725892 - DNA, 25 bp, Homo sapien
tcttgcctgacaccgatgtatgaca

SEQ ID NO: 2725893 - DNA, 25 bp, Homo sapien
gttagagggagaggattacagaggg

SEQ ID NO: 2725894 - DNA, 25 bp, Homo sapien
acaaattaactacaggggcagaaag

SEQ ID NO: 2725895 - DNA, 25 bp, Homo sapien
gagggttagagggagaggattacag

SEQ ID NO: 2725896 - DNA, 25 bp, Homo sapien
agaggattacagaggggcacaagaa

SEQ ID NO: 2725897 - DNA, 25 bp, Homo sapien
cactcactgacatggggtgaatcca

SEQ ID NO: 2725898 - DNA, 25 bp, Homo sapien
gagtctctatgcttatctgttccca

SEQ ID NO: 2725899 - DNA, 25 bp, Homo sapien
tggggtgaatccaggctgctaatcc

SEQ ID NO: 2725900 - DNA, 25 bp, Homo sapien
taggtaaagccaacggacaacctga

SEQ ID NO: 2725901 - DNA, 25 bp, Homo sapien
ctgtgccctttgggtccatcccctt

SEQ ID NO: 2725902 - DNA, 25 bp, Homo sapien
tgtgccctttgggtccatccccttc

SEQ ID NO: 2725903 - DNA, 25 bp, Homo sapien
tgggtccatccccttccttcacctc

SEQ ID NO: 2725904 - DNA, 25 bp, Homo sapien
gtccatccccttccttcacctccat

SEQ ID NO: 2725905 - DNA, 25 bp, Homo sapien
ctgctgggttggtgagatcacacac

SEQ ID NO: 2725906 - DNA, 25 bp, Homo sapien
ctctgccctgctgggttggtgagat

SEQ ID NO: 2725907 - DNA, 25 bp, Homo sapien
tccccactgccaaatcttggattct

SEQ ID NO: 2725908 - DNA, 25 bp, Homo sapien
ccactgccaaatcttggattctgtc

SEQ ID NO: 2725909 - DNA, 25 bp, Homo sapien
tagatctccttgtttccctactctg

SEQ ID NO: 2725910 - DNA, 25 bp, Homo sapien
tctgtttgggctggcttacccagaa

SEQ ID NO: 2725911 - DNA, 25 bp, Homo sapien
agactaggcccccacaaaccagtgg

SEQ ID NO: 2725912 - DNA, 25 bp, Homo sapien
gcttttccacccttagatctccttg

SEQ ID NO: 2725913 - DNA, 25 bp, Homo sapien
gctacgtcagcagtatagacgcgaa

SEQ ID NO: 2725914 - DNA, 25 bp, Homo sapien
ttaataaggtgctacgtcagcagta

SEQ ID NO: 2725915 - DNA, 25 bp, Homo sapien
agtatagacgcgaaaggccaacggg

SEQ ID NO: 2725916 - DNA, 25 bp, Homo sapien
aggccaacgggccatgggcagggag

SEQ ID NO: 2725917 - DNA, 25 bp, Homo sapien
ctggtagttactttcctacgggctg

SEQ ID NO: 2725918 - DNA, 25 bp, Homo sapien
cattcggcattctgacaatgtgcct

SEQ ID NO: 2725919 - DNA, 25 bp, Homo sapien
acggtgggcattcggcattctgaca

SEQ ID NO: 2725920 - DNA, 25 bp, Homo sapien
gaccacggtgggcattcggcattct

SEQ ID NO: 2725921 - DNA, 25 bp, Homo sapien
ttattcagtgtgtagagatgtgtca

SEQ ID NO: 2725922 - DNA, 25 bp, Homo sapien
gattctctccggaacaaatgccaag

SEQ ID NO: 2725923 - DNA, 25 bp, Homo sapien
gacagcaagattctctccggaacaa

SEQ ID NO: 2725924 - DNA, 25 bp, Homo sapien
atctggacagcaagattctctccgg

SEQ ID NO: 2725925 - DNA, 25 bp, Homo sapien
agacactgtgcccaagagaaataaa

SEQ ID NO: 2725926 - DNA, 25 bp, Homo sapien
tgaacacagacactgtgcccaagag

SEQ ID NO: 2725927 - DNA, 25 bp, Homo sapien
acttgcagtgaacacagacactgtg

SEQ ID NO: 2725928 - DNA, 25 bp, Homo sapien
ggacacaatgctgattccacttgca

SEQ ID NO: 2725929 - DNA, 25 bp, Homo sapien
aagctccacacgcaggtatgccttc

SEQ ID NO: 2725930 - DNA, 25 bp, Homo sapien
ggaaagctccacacgcaggtatgcc

SEQ ID NO: 2725931 - DNA, 25 bp, Homo sapien
cacacgcaggtatgccttccatggg

SEQ ID NO: 2725932 - DNA, 25 bp, Homo sapien
gggagtgactccatggctgatgaca

SEQ ID NO: 2725933 - DNA, 25 bp, Homo sapien
ctgatagtaatttactgctgcactg

SEQ ID NO: 2725934 - DNA, 25 bp, Homo sapien
gcttctgatagtaatttactgctgc

SEQ ID NO: 2725935 - DNA, 25 bp, Homo sapien
ttctgatagtaatttactgctgcac

SEQ ID NO: 2725936 - DNA, 25 bp, Homo sapien
aaagcttctgatagtaatttactgc

SEQ ID NO: 2725937 - DNA, 25 bp, Homo sapien
tcactaatgcagtcagcaaaggtga

SEQ ID NO: 2725938 - DNA, 25 bp, Homo sapien
tcctagcggcaactcatcactaatg

SEQ ID NO: 2725939 - DNA, 25 bp, Homo sapien
gttgtggtctatgaagtaatctcca

SEQ ID NO: 2725940 - DNA, 25 bp, Homo sapien
atctccaacctgtgggtcatatgcc

SEQ ID NO: 2725941 - DNA, 25 bp, Homo sapien
aaggtctggccaagccaggtggctt

SEQ ID NO: 2725942 - DNA, 25 bp, Homo sapien
ggtctggccaagccaggtggcttgg

SEQ ID NO: 2725943 - DNA, 25 bp, Homo sapien
aggtctggccaagccaggtggcttg

SEQ ID NO: 2725944 - DNA, 25 bp, Homo sapien
gaaggtctggccaagccaggtggct

SEQ ID NO: 2725945 - DNA, 25 bp, Homo sapien
cgccattgtactcgaggatcctcaa

SEQ ID NO: 2725946 - DNA, 25 bp, Homo sapien
gcttatgctcccagacggcatgcag

SEQ ID NO: 2725947 - DNA, 25 bp, Homo sapien
cagttgctggtactcctgctgtgca

SEQ ID NO: 2725948 - DNA, 25 bp, Homo sapien
gatctccttttgtgcactcagagcc

SEQ ID NO: 2725949 - DNA, 25 bp, Homo sapien
aaagaagagaggagtcgtcagtgtg

SEQ ID NO: 2725950 - DNA, 25 bp, Homo sapien
gagaggagtcgtcagtgtggcaata

SEQ ID NO: 2725951 - DNA, 25 bp, Homo sapien
gaagagaggagtcgtcagtgtggca

SEQ ID NO: 2725952 - DNA, 25 bp, Homo sapien
gaggagtcgtcagtgtggcaataac

SEQ ID NO: 2725953 - DNA, 25 bp, Homo sapien
gggattttgcagtggcaatttcagc

SEQ ID NO: 2725954 - DNA, 25 bp, Homo sapien
ccgggattttgcagtggcaatttca

SEQ ID NO: 2725955 - DNA, 25 bp, Homo sapien
agggtcatacttggagctggatgat

SEQ ID NO: 2725956 - DNA, 25 bp, Homo sapien
tcagggtcatacttggagctggatg

SEQ ID NO: 2725957 - DNA, 25 bp, Homo sapien
tgacaccaaggtgcaggctgccttc

SEQ ID NO: 2725958 - DNA, 25 bp, Homo sapien
gacaccaaggtgcaggctgccttct

SEQ ID NO: 2725959 - DNA, 25 bp, Homo sapien
cagaggctgacaccaaggtgcaggc

SEQ ID NO: 2725960 - DNA, 25 bp, Homo sapien
ggtcagaggctgacaccaaggtgca

SEQ ID NO: 2725961 - DNA, 25 bp, Homo sapien
cagggtctgaaagccacgctctttg

SEQ ID NO: 2725962 - DNA, 25 bp, Homo sapien
ctgcagctcgtgctggaggtgaacc

SEQ ID NO: 2725963 - DNA, 25 bp, Homo sapien
gcagctcgtgctggaggtgaaccat

SEQ ID NO: 2725964 - DNA, 25 bp, Homo sapien
gaaagccacgctctttgaactgcag

SEQ ID NO: 2725965 - DNA, 25 bp, Homo sapien
tctccatgttctgccgcagggtagg

SEQ ID NO: 2725966 - DNA, 25 bp, Homo sapien
tctgccgcagggtaggcacagaagt

SEQ ID NO: 2725967 - DNA, 25 bp, Homo sapien
tagactctgaaaaaggggccttaca

SEQ ID NO: 2725968 - DNA, 25 bp, Homo sapien
actggatagcatccctgttagactc

SEQ ID NO: 2725969 - DNA, 25 bp, Homo sapien
cagagagcggctctgagagggaaca

SEQ ID NO: 2725970 - DNA, 25 bp, Homo sapien
gggccttagcaacccggcctctgga

SEQ ID NO: 2725971 - DNA, 25 bp, Homo sapien
gagagggaacactattgggatgaag

SEQ ID NO: 2725972 - DNA, 25 bp, Homo sapien
ctgatttcttcaagggccttagcaa

SEQ ID NO: 2725973 - DNA, 25 bp, Homo sapien
tccagtttgtagctgccctgagcat

SEQ ID NO: 2725974 - DNA, 25 bp, Homo sapien
ggaaactcgaactctccagagagct

SEQ ID NO: 2725975 - DNA, 25 bp, Homo sapien
tccaggtactgtttcggtagcggga

SEQ ID NO: 2725976 - DNA, 25 bp, Homo sapien
gaagccgtccttcaacatggcaagg

SEQ ID NO: 2725977 - DNA, 25 bp, Homo sapien
ggaccacaggtctgagtgagacccc

SEQ ID NO: 2725978 - DNA, 25 bp, Homo sapien
ttcccgagatgtctgtctgggagct

SEQ ID NO: 2725979 - DNA, 25 bp, Homo sapien
ccgagatgtctgtctgggagctcac

SEQ ID NO: 2725980 - DNA, 25 bp, Homo sapien
gcttcccgagatgtctgtctgggag

SEQ ID NO: 2725981 - DNA, 25 bp, Homo sapien
cccgagatgtctgtctgggagctca

SEQ ID NO: 2725982 - DNA, 25 bp, Homo sapien
tcgaaggcgcaatctgaccttctct

SEQ ID NO: 2725983 - DNA, 25 bp, Homo sapien
aactgattgttgctgttgatgccga

SEQ ID NO: 2725984 - DNA, 25 bp, Homo sapien
tctcttagcctcttcatatcgaagg

SEQ ID NO: 2725985 - DNA, 25 bp, Homo sapien
gccaactgattgttgctgttgatgc

SEQ ID NO: 2725986 - DNA, 25 bp, Homo sapien
cgaagtgtgtgaaaagctaagcaca

SEQ ID NO: 2725987 - DNA, 25 bp, Homo sapien
gtgtgtgaaaagctaagcacagagc

SEQ ID NO: 2725988 - DNA, 25 bp, Homo sapien
gcaggcattctacaatagtagttat

SEQ ID NO: 2725989 - DNA, 25 bp, Homo sapien
taaagaagacgaagtgtgtgaaaag

SEQ ID NO: 2725990 - DNA, 25 bp, Homo sapien
gctccgaattgctgggagttgcctg

SEQ ID NO: 2725991 - DNA, 25 bp, Homo sapien
tgggagttgcctggccacattgaca

SEQ ID NO: 2725992 - DNA, 25 bp, Homo sapien
ctggtagtgtgtaagctccgaattg

SEQ ID NO: 2725993 - DNA, 25 bp, Homo sapien
tgtgtaagctccgaattgctgggag

SEQ ID NO: 2725994 - DNA, 25 bp, Homo sapien
taagacaggcattcctgcaggatgg

SEQ ID NO: 2725995 - DNA, 25 bp, Homo sapien
caggatggaacagatccaaggttca

SEQ ID NO: 2725996 - DNA, 25 bp, Homo sapien
agagtggtcctcttcagagagaaca

SEQ ID NO: 2725997 - DNA, 25 bp, Homo sapien
caagaagtggctgtccaaatacaga

SEQ ID NO: 2725998 - DNA, 25 bp, Homo sapien
agaacgaaatggtatggtaaggccg

SEQ ID NO: 2725999 - DNA, 25 bp, Homo sapien
gaagtctaatggctcaactccagag

SEQ ID NO: 2726000 - DNA, 25 bp, Homo sapien
gggctccaccatatgcaggacattg

SEQ ID NO: 2726001 - DNA, 25 bp, Homo sapien
cctttacactaaaatgagcttcggg

SEQ ID NO: 2726002 - DNA, 25 bp, Homo sapien
tgtgccaacaatgaagtaggctctg

SEQ ID NO: 2726003 - DNA, 25 bp, Homo sapien
tgtggattcatcaccaggcactaac

SEQ ID NO: 2726004 - DNA, 25 bp, Homo sapien
gccctgttcctggtacaatagagat

SEQ ID NO: 2726005 - DNA, 25 bp, Homo sapien
taacctgcaaagcacagtacttggc

SEQ ID NO: 2726006 - DNA, 25 bp, Homo sapien
gcaagcatgactggtgtgcctaatg

SEQ ID NO: 2726007 - DNA, 25 bp, Homo sapien
actggtgtgcctaatggcactgagg

SEQ ID NO: 2726008 - DNA, 25 bp, Homo sapien
agaaagcaagcatgactggtgtgcc

SEQ ID NO: 2726009 - DNA, 25 bp, Homo sapien
gcatgactggtgtgcctaatggcac

SEQ ID NO: 2726010 - DNA, 25 bp, Homo sapien
tgataaggatcagccggtccctctc

SEQ ID NO: 2726011 - DNA, 25 bp, Homo sapien
aggatcagccggtccctctctgagt

SEQ ID NO: 2726012 - DNA, 25 bp, Homo sapien
gctgatgaagcgcatctccttcagc

SEQ ID NO: 2726013 - DNA, 25 bp, Homo sapien
tcctccttctcgttgataaggatca

SEQ ID NO: 2726014 - DNA, 25 bp, Homo sapien
ctccgtcagcgccttgctctgggtg

SEQ ID NO: 2726015 - DNA, 25 bp, Homo sapien
ttttccagccgcttccgggccatct

SEQ ID NO: 2726016 - DNA, 25 bp, Homo sapien
ccagccgcttccgggccatctccag

SEQ ID NO: 2726017 - DNA, 25 bp, Homo sapien
ttccagccgcttccgggccatctcc

SEQ ID NO: 2726018 - DNA, 25 bp, Homo sapien
tcctgatttcctatgtcggcaacct

SEQ ID NO: 2726019 - DNA, 25 bp, Homo sapien
gatttcctatgtcggcaacctgaga

SEQ ID NO: 2726020 - DNA, 25 bp, Homo sapien
ttccagggtagctggcgcactggat

SEQ ID NO: 2726021 - DNA, 25 bp, Homo sapien
ctatgtcggcaacctgagagatctc

SEQ ID NO: 2726022 - DNA, 25 bp, Homo sapien
tgtaaagcctatggtgaacgcagtg

SEQ ID NO: 2726023 - DNA, 25 bp, Homo sapien
tatatcaggcccatagatgaggctg

SEQ ID NO: 2726024 - DNA, 25 bp, Homo sapien
tgctgctgccaatgaagaacggaag

SEQ ID NO: 2726025 - DNA, 25 bp, Homo sapien
caactagtgcggagagattcctacc

SEQ ID NO: 2726026 - DNA, 25 bp, Homo sapien
ccacaggcacaagaactttccgtaa

SEQ ID NO: 2726027 - DNA, 25 bp, Homo sapien
tccgtaaagcatttgaccacggcat

SEQ ID NO: 2726028 - DNA, 25 bp, Homo sapien
gaactttccgtaaagcatttgacca

SEQ ID NO: 2726029 - DNA, 25 bp, Homo sapien
caggcacaagaactttccgtaaagc

SEQ ID NO: 2726030 - DNA, 25 bp, Homo sapien
ctgggagtgcagagttgccacctgc

SEQ ID NO: 2726031 - DNA, 25 bp, Homo sapien
gagtgcagagttgccacctgccggg

SEQ ID NO: 2726032 - DNA, 25 bp, Homo sapien
gttctctcacaagctggttcctctt

SEQ ID NO: 2726033 - DNA, 25 bp, Homo sapien
ttctctcacaagctggttcctctta

SEQ ID NO: 2726034 - DNA, 25 bp, Homo sapien
gctggacgtgagggatccggggctg

SEQ ID NO: 2726035 - DNA, 25 bp, Homo sapien
ctggatgcaaccagggagccccggc

SEQ ID NO: 2726036 - DNA, 25 bp, Homo sapien
gcctgagggccggaagccggtggcc

SEQ ID NO: 2726037 - DNA, 25 bp, Homo sapien
catagtagaggtcagtgaagctggc

SEQ ID NO: 2726038 - DNA, 25 bp, Homo sapien
gcagctctgagtccagctgctcaaa

SEQ ID NO: 2726039 - DNA, 25 bp, Homo sapien
acctcatcctcgtggatggtggtga

SEQ ID NO: 2726040 - DNA, 25 bp, Homo sapien
tggcactcagctccgggtcttcaaa

SEQ ID NO: 2726041 - DNA, 25 bp, Homo sapien
ccaaggagttgaggaaggcatcacc

SEQ ID NO: 2726042 - DNA, 25 bp, Homo sapien
tcagttcacaaagagtggcactcag

SEQ ID NO: 2726043 - DNA, 25 bp, Homo sapien
tcctgggcgctgttaccaaggctca

SEQ ID NO: 2726044 - DNA, 25 bp, Homo sapien
ccacacccctgggccgtattcacag

SEQ ID NO: 2726045 - DNA, 25 bp, Homo sapien
actcgtccgatacggcggctgagac

SEQ ID NO: 2726046 - DNA, 25 bp, Homo sapien
ggaagcctcgtacacaccactgtct

SEQ ID NO: 2726047 - DNA, 25 bp, Homo sapien
acggaagcctcgtacacaccactgt

SEQ ID NO: 2726048 - DNA, 25 bp, Homo sapien
gtctccagccactgactcgtccgat

SEQ ID NO: 2726049 - DNA, 25 bp, Homo sapien
gcttccgattcgtcactgtcaaatg

SEQ ID NO: 2726050 - DNA, 25 bp, Homo sapien
gaattcgggtcgcacccactgcttc

SEQ ID NO: 2726051 - DNA, 25 bp, Homo sapien
cactgcttccgattcgtcactgtca

SEQ ID NO: 2726052 - DNA, 25 bp, Homo sapien
ttcagggcaatctgaattcgggtcg

SEQ ID NO: 2726053 - DNA, 25 bp, Homo sapien
cagagcagaaaggttactcagctgg

SEQ ID NO: 2726054 - DNA, 25 bp, Homo sapien
gagcagaaaggttactcagctggat

SEQ ID NO: 2726055 - DNA, 25 bp, Homo sapien
agagcagaaaggttactcagctgga

SEQ ID NO: 2726056 - DNA, 25 bp, Homo sapien
aacagagcagaaaggttactcagct

SEQ ID NO: 2726057 - DNA, 25 bp, Homo sapien
cgggtccggaacaggcaggttgtgc

SEQ ID NO: 2726058 - DNA, 25 bp, Homo sapien
ggatacccagaacacctcattgaac

SEQ ID NO: 2726059 - DNA, 25 bp, Homo sapien
cctcattgaacactagagtgtctga

SEQ ID NO: 2726060 - DNA, 25 bp, Homo sapien
tagagtgtctgaggcgtccagaggc

SEQ ID NO: 2726061 - DNA, 25 bp, Homo sapien
tcttaaggtcttctggtgaagggct

SEQ ID NO: 2726062 - DNA, 25 bp, Homo sapien
tcctgtcggtggtacagacatcgac

SEQ ID NO: 2726063 - DNA, 25 bp, Homo sapien
cttccagatggctcctgtcggtggt

SEQ ID NO: 2726064 - DNA, 25 bp, Homo sapien
gacatcgactcttaaggtcttctgg

SEQ ID NO: 2726065 - DNA, 25 bp, Homo sapien
gatggccaggctatattgttaaggg

SEQ ID NO: 2726066 - DNA, 25 bp, Homo sapien
gagtgaccatgatcatatgtgcaca

SEQ ID NO: 2726067 - DNA, 25 bp, Homo sapien
gaaattaatcaaagtggtcacctat

SEQ ID NO: 2726068 - DNA, 25 bp, Homo sapien
tttttactgatgcagagagatggcc

SEQ ID NO: 2726069 - DNA, 25 bp, Homo sapien
ctcttgttgccgaggctgctggagt

SEQ ID NO: 2726070 - DNA, 25 bp, Homo sapien
aatggcatggtcttggctcaccaca

SEQ ID NO: 2726071 - DNA, 25 bp, Homo sapien
tttgctcttgttgccgaggctgctg

SEQ ID NO: 2726072 - DNA, 25 bp, Homo sapien
gcaatggcatggtcttggctcacca

SEQ ID NO: 2726073 - DNA, 25 bp, Homo sapien
tatttgtagctgagaaggttgtacc

SEQ ID NO: 2726074 - DNA, 25 bp, Homo sapien
gtttcttcaagtatttgtagctgag

SEQ ID NO: 2726075 - DNA, 25 bp, Homo sapien
accggcagacctccgccaggctgat

SEQ ID NO: 2726076 - DNA, 25 bp, Homo sapien
ggttgtaccagcgagtcgacctctc

SEQ ID NO: 2726077 - DNA, 25 bp, Homo sapien
gccatgactcccactggcttgagct

SEQ ID NO: 2726078 - DNA, 25 bp, Homo sapien
ggccatgactcccactggcttgagc

SEQ ID NO: 2726079 - DNA, 25 bp, Homo sapien
tgaggcaggggccatgactcccact

SEQ ID NO: 2726080 - DNA, 25 bp, Homo sapien
ggcaggggccatgactcccactggc

SEQ ID NO: 2726081 - DNA, 25 bp, Homo sapien
ccagtatggaccttgaacaaagtag

SEQ ID NO: 2726082 - DNA, 25 bp, Homo sapien
tgatatgactgacctagccctctga

SEQ ID NO: 2726083 - DNA, 25 bp, Homo sapien
attgttctcctctcatgacgcctga

SEQ ID NO: 2726084 - DNA, 25 bp, Homo sapien
ccaagtggtattaggtagggcaaag

SEQ ID NO: 2726085 - DNA, 25 bp, Homo sapien
gaactaaaatcaactgaaggcctgg

SEQ ID NO: 2726086 - DNA, 25 bp, Homo sapien
ctttacaaccatcctgacaggtggg

SEQ ID NO: 2726087 - DNA, 25 bp, Homo sapien
cctagctttgctgatgagatgtaca

SEQ ID NO: 2726088 - DNA, 25 bp, Homo sapien
cagtctccttttggagtgagagacc

SEQ ID NO: 2726089 - DNA, 25 bp, Homo sapien
aatgtaggtgccaccctacctgcca

SEQ ID NO: 2726090 - DNA, 25 bp, Homo sapien
taggtgccaccctacctgccaggaa

SEQ ID NO: 2726091 - DNA, 25 bp, Homo sapien
attgggtacaatgtaggtgccaccc

SEQ ID NO: 2726092 - DNA, 25 bp, Homo sapien
aaaggttgctgggtcattgggtaca

SEQ ID NO: 2726093 - DNA, 25 bp, Homo sapien
tgtctgttccaacagagcagacaca

SEQ ID NO: 2726094 - DNA, 25 bp, Homo sapien
tccactgctgtctgttccaacagag

SEQ ID NO: 2726095 - DNA, 25 bp, Homo sapien
cagctgtcttccagtgtctgtgtgc

SEQ ID NO: 2726096 - DNA, 25 bp, Homo sapien
cttccagtgtctgtgtgctgctcct

SEQ ID NO: 2726097 - DNA, 25 bp, Homo sapien
tcattgctgggcctaggtccaggca

SEQ ID NO: 2726098 - DNA, 25 bp, Homo sapien
tcatgggaaacgaaatggcaaattc

SEQ ID NO: 2726099 - DNA, 25 bp, Homo sapien
gcctttttgcctgtagagaacccat

SEQ ID NO: 2726100 - DNA, 25 bp, Homo sapien
tctgggaaccatcgtactaggttac

SEQ ID NO: 2726101 - DNA, 25 bp, Homo sapien
ccacgcctggcctctcccattattt

SEQ ID NO: 2726102 - DNA, 25 bp, Homo sapien
gaggtttcactgtgggttcaagcaa

SEQ ID NO: 2726103 - DNA, 25 bp, Homo sapien
cgcctggcctctcccattattttaa

SEQ ID NO: 2726104 - DNA, 25 bp, Homo sapien
tgaggtttcactgtgggttcaagca

SEQ ID NO: 2726105 - DNA, 25 bp, Homo sapien
caagcaaaagttgctgtgtgggaca

SEQ ID NO: 2726106 - DNA, 25 bp, Homo sapien
tcctgatggttacctgcctgatggc

SEQ ID NO: 2726107 - DNA, 25 bp, Homo sapien
gcttcttggttaacaggtacacagg

SEQ ID NO: 2726108 - DNA, 25 bp, Homo sapien
ggctaagtggctaagcttggccaat

SEQ ID NO: 2726109 - DNA, 25 bp, Homo sapien
tgcctcattctcactggtctcctca

SEQ ID NO: 2726110 - DNA, 25 bp, Homo sapien
cctcattctcactggtctcctcata

SEQ ID NO: 2726111 - DNA, 25 bp, Homo sapien
attctcactggtctcctcatacctc

SEQ ID NO: 2726112 - DNA, 25 bp, Homo sapien
tcattctcactggtctcctcatacc

SEQ ID NO: 2726113 - DNA, 25 bp, Homo sapien
ctttaatgctgggtacccatccata

SEQ ID NO: 2726114 - DNA, 25 bp, Homo sapien
caggtgaggctttctcggtgaaaac

SEQ ID NO: 2726115 - DNA, 25 bp, Homo sapien
gtgaggctttctcggtgaaaacatc

SEQ ID NO: 2726116 - DNA, 25 bp, Homo sapien
tacccatccatatcaggtgaggctt

SEQ ID NO: 2726117 - DNA, 25 bp, Homo sapien
aaacacggcaggtgctctagctcta

SEQ ID NO: 2726118 - DNA, 25 bp, Homo sapien
acctctgtgcggtactccagctgca

SEQ ID NO: 2726119 - DNA, 25 bp, Homo sapien
tgcagcctcgctcaaacacggcagg

SEQ ID NO: 2726120 - DNA, 25 bp, Homo sapien
caggcacctctgtgcggtactccag

SEQ ID NO: 2726121 - DNA, 25 bp, Homo sapien
cttagagcggatgatggtgctccct

SEQ ID NO: 2726122 - DNA, 25 bp, Homo sapien
gtgctccctcgaagaaatggcccct

SEQ ID NO: 2726123 - DNA, 25 bp, Homo sapien
cggtccttaggtcgcaccactgtgg

SEQ ID NO: 2726124 - DNA, 25 bp, Homo sapien
cggcacacgtactggctctggggtc

SEQ ID NO: 2726125 - DNA, 25 bp, Homo sapien
gacgctgcgtcgctccagggagttt

SEQ ID NO: 2726126 - DNA, 25 bp, Homo sapien
agtggagctgtcactatcactccga

SEQ ID NO: 2726127 - DNA, 25 bp, Homo sapien
gagctgtcactatcactccgattca

SEQ ID NO: 2726128 - DNA, 25 bp, Homo sapien
cgcttcatccggacgctgcgtcgct

SEQ ID NO: 2726129 - DNA, 25 bp, Homo sapien
gagacggagtttctcaatgctgagg

SEQ ID NO: 2726130 - DNA, 25 bp, Homo sapien
ttaaggtgtaggatgttaggcaaag

SEQ ID NO: 2726131 - DNA, 25 bp, Homo sapien
cttgttaaggtgtaggatgttaggc

SEQ ID NO: 2726132 - DNA, 25 bp, Homo sapien
agacttgttaaggtgtaggatgtta

SEQ ID NO: 2726133 - DNA, 25 bp, Homo sapien
tgccttccctgtgtagcctcccctg

SEQ ID NO: 2726134 - DNA, 25 bp, Homo sapien
tcctgtagggcctgccttagaaggg

SEQ ID NO: 2726135 - DNA, 25 bp, Homo sapien
ctcctgtagggcctgccttagaagg

SEQ ID NO: 2726136 - DNA, 25 bp, Homo sapien
cctgtagggcctgccttagaaggga

SEQ ID NO: 2726137 - DNA, 25 bp, Homo sapien
cagctcaggtagtgcgtggaagcaa

SEQ ID NO: 2726138 - DNA, 25 bp, Homo sapien
tctaggttgaacatggtctgctctg

SEQ ID NO: 2726139 - DNA, 25 bp, Homo sapien
tgcggtagagacaacacagctcagg

SEQ ID NO: 2726140 - DNA, 25 bp, Homo sapien
cacggctggcaagcatactattagg

SEQ ID NO: 2726141 - DNA, 25 bp, Homo sapien
tgtcgcctgcaggtctaactccagg

SEQ ID NO: 2726142 - DNA, 25 bp, Homo sapien
gtacggatcagacgctcggagcgca

SEQ ID NO: 2726143 - DNA, 25 bp, Homo sapien
tccaggtccagcgaggtacggatca

SEQ ID NO: 2726144 - DNA, 25 bp, Homo sapien
agcaggcggaaacgctcgtcctcac

SEQ ID NO: 2726145 - DNA, 25 bp, Homo sapien
agggacggcaccctcactcttgctc

SEQ ID NO: 2726146 - DNA, 25 bp, Homo sapien
ctatcacaacagagggggctactgt

SEQ ID NO: 2726147 - DNA, 25 bp, Homo sapien
tgtagggacggcaccctcactcttg

SEQ ID NO: 2726148 - DNA, 25 bp, Homo sapien
actgtagggacggcaccctcactct

SEQ ID NO: 2726149 - DNA, 25 bp, Homo sapien
gcaagcaaggccctgagtcagtgga

SEQ ID NO: 2726150 - DNA, 25 bp, Homo sapien
agcaaggccctgagtcagtggaggg

SEQ ID NO: 2726151 - DNA, 25 bp, Homo sapien
tcagtggagggggcctccagaaagg

SEQ ID NO: 2726152 - DNA, 25 bp, Homo sapien
ctgggcaaagcaagcaaggccctga

SEQ ID NO: 2726153 - DNA, 25 bp, Homo sapien
gtctgaagctcacccttgtgctccg

SEQ ID NO: 2726154 - DNA, 25 bp, Homo sapien
cttgtctgtctgaagctcacccttg

SEQ ID NO: 2726155 - DNA, 25 bp, Homo sapien
cacccttgtgctccgctcggtccat

SEQ ID NO: 2726156 - DNA, 25 bp, Homo sapien
tctgtctgaagctcacccttgtgct

SEQ ID NO: 2726157 - DNA, 25 bp, Homo sapien
tgaacttctgggggttccttacagc

SEQ ID NO: 2726158 - DNA, 25 bp, Homo sapien
tgaaagactgaacttctgggggttc

SEQ ID NO: 2726159 - DNA, 25 bp, Homo sapien
ctgaaagactgaacttctgggggtt

SEQ ID NO: 2726160 - DNA, 25 bp, Homo sapien
ttctgggggttccttacagctctgg

SEQ ID NO: 2726161 - DNA, 25 bp, Homo sapien
ctcatggatcgccagggatggcttg

SEQ ID NO: 2726162 - DNA, 25 bp, Homo sapien
ggatctaacaaattagctcgagttg

SEQ ID NO: 2726163 - DNA, 25 bp, Homo sapien
aacaaattagctcgagttgtgtggg

SEQ ID NO: 2726164 - DNA, 25 bp, Homo sapien
aagggaagagcgctgcagagctcat

SEQ ID NO: 2726165 - DNA, 25 bp, Homo sapien
tggcaagatagcacctccctgagat

SEQ ID NO: 2726166 - DNA, 25 bp, Homo sapien
gtctaaacgctagggcctctgtgga

SEQ ID NO: 2726167 - DNA, 25 bp, Homo sapien
tccgagaatacacccgggtccagca

SEQ ID NO: 2726168 - DNA, 25 bp, Homo sapien
ggacatcagaagtctaaacgctagg

SEQ ID NO: 2726169 - DNA, 25 bp, Homo sapien
gaggccgggtgaaaaatgccatctt

SEQ ID NO: 2726170 - DNA, 25 bp, Homo sapien
gatattcatccgaggccgggtgaaa

SEQ ID NO: 2726171 - DNA, 25 bp, Homo sapien
gagagctgggatattcatccgaggc

SEQ ID NO: 2726172 - DNA, 25 bp, Homo sapien
tccgaggccgggtgaaaaatgccat

SEQ ID NO: 2726173 - DNA, 25 bp, Homo sapien
caagagcactagaggacttgtgact

SEQ ID NO: 2726174 - DNA, 25 bp, Homo sapien
aagtcggttcatcttcaaaccaaca

SEQ ID NO: 2726175 - DNA, 25 bp, Homo sapien
ggacttgtgactcagtaccttcata

SEQ ID NO: 2726176 - DNA, 25 bp, Homo sapien
agcctggtcagtggaacaaaggaaa

SEQ ID NO: 2726177 - DNA, 25 bp, Homo sapien
ttgggcagccacataaaaacacgtc

SEQ ID NO: 2726178 - DNA, 25 bp, Homo sapien
tctaaaaggtggagctgtacaaacc

SEQ ID NO: 2726179 - DNA, 25 bp, Homo sapien
cagctcaagaagatccgtggatgca

SEQ ID NO: 2726180 - DNA, 25 bp, Homo sapien
tactgtgacaagtgcgggacgtcct

SEQ ID NO: 2726181 - DNA, 25 bp, Homo sapien
agggaaacagatgaagtgaggggta

SEQ ID NO: 2726182 - DNA, 25 bp, Homo sapien
gatgaagtgaggggtaggaaagaaa

SEQ ID NO: 2726183 - DNA, 25 bp, Homo sapien
ggaaacagatgaagtgaggggtagg

SEQ ID NO: 2726184 - DNA, 25 bp, Homo sapien
aaacagatgaagtgaggggtaggaa

SEQ ID NO: 2726185 - DNA, 25 bp, Homo sapien
tttttaataggctgccccaggtgat

SEQ ID NO: 2726186 - DNA, 25 bp, Homo sapien
cagtacagagagcatatccccagtc

SEQ ID NO: 2726187 - DNA, 25 bp, Homo sapien
tctgatatagctggtgcaacttgct

SEQ ID NO: 2726188 - DNA, 25 bp, Homo sapien
tgaagcacaagctgtagcacctacc

SEQ ID NO: 2726189 - DNA, 25 bp, Homo sapien
ctgcctgggtttcactcactttata

SEQ ID NO: 2726190 - DNA, 25 bp, Homo sapien
gtctctgcctgggtttcactcactt

SEQ ID NO: 2726191 - DNA, 25 bp, Homo sapien
gggtttcactcactttataccagtg

SEQ ID NO: 2726192 - DNA, 25 bp, Homo sapien
gcctgggtttcactcactttatacc

SEQ ID NO: 2726193 - DNA, 25 bp, Homo sapien
tgtgtgactcaccaataggatgcgg

SEQ ID NO: 2726194 - DNA, 25 bp, Homo sapien
tccttatacatgaggagagacagcc

SEQ ID NO: 2726195 - DNA, 25 bp, Homo sapien
aaatcgggctggatagcagctatac

SEQ ID NO: 2726196 - DNA, 25 bp, Homo sapien
gagtagattctacaccactataggt

SEQ ID NO: 2726197 - DNA, 25 bp, Homo sapien
cagcacgagaccatccttgtgctct

SEQ ID NO: 2726198 - DNA, 25 bp, Homo sapien
cacagagcagcacgagaccatcctt

SEQ ID NO: 2726199 - DNA, 25 bp, Homo sapien
gaggagtgtaggcacaggtgccaca

SEQ ID NO: 2726200 - DNA, 25 bp, Homo sapien
agagcagcacgagaccatccttgtg

SEQ ID NO: 2726201 - DNA, 25 bp, Homo sapien
ggcatttgccccgttgctgtggcca

SEQ ID NO: 2726202 - DNA, 25 bp, Homo sapien
tttgccccgttgctgtggccaatgc

SEQ ID NO: 2726203 - DNA, 25 bp, Homo sapien
agccagcttggggcatttgccccgt

SEQ ID NO: 2726204 - DNA, 25 bp, Homo sapien
catttgccccgttgctgtggccaat

SEQ ID NO: 2726205 - DNA, 25 bp, Homo sapien
gggctgacccttgctgggacaactg

SEQ ID NO: 2726206 - DNA, 25 bp, Homo sapien
tggaaccatggccagaggtagcctt

SEQ ID NO: 2726207 - DNA, 25 bp, Homo sapien
tatacacagggagggcgtttacagc

SEQ ID NO: 2726208 - DNA, 25 bp, Homo sapien
gcctctccttggtctaatcatggga

SEQ ID NO: 2726209 - DNA, 25 bp, Homo sapien
tttctctctaggcaaacaatggaat

SEQ ID NO: 2726210 - DNA, 25 bp, Homo sapien
acaaatgccccgacagctgaagtga

SEQ ID NO: 2726211 - DNA, 25 bp, Homo sapien
aggtggtctggttctccccacaaat

SEQ ID NO: 2726212 - DNA, 25 bp, Homo sapien
gtctgctgccttccgcagaggtggt

SEQ ID NO: 2726213 - DNA, 25 bp, Homo sapien
tccgctgtcccgtcggactgggtgc

SEQ ID NO: 2726214 - DNA, 25 bp, Homo sapien
acggaagcggaaacggtcagcctct

SEQ ID NO: 2726215 - DNA, 25 bp, Homo sapien
gcctcctggcgggatccagtagaca

SEQ ID NO: 2726216 - DNA, 25 bp, Homo sapien
catcagcgtctcactcgccaagtgg

SEQ ID NO: 2726217 - DNA, 25 bp, Homo sapien
agcagccgcgcggagcactcagaca

SEQ ID NO: 2726218 - DNA, 25 bp, Homo sapien
gcggagcactcagacaccagtacgt

SEQ ID NO: 2726219 - DNA, 25 bp, Homo sapien
cgcgcggagcactcagacaccagta

SEQ ID NO: 2726220 - DNA, 25 bp, Homo sapien
gagcactcagacaccagtacgtcca

SEQ ID NO: 2726221 - DNA, 25 bp, Homo sapien
ttcctgttcccacagggaccgtgcc

SEQ ID NO: 2726222 - DNA, 25 bp, Homo sapien
caggatggtcctcgcctagctgtcc

SEQ ID NO: 2726223 - DNA, 25 bp, Homo sapien
gctttgaaatgatgggtgcttcctc

SEQ ID NO: 2726224 - DNA, 25 bp, Homo sapien
ctctttcaggccttcccgccggtct

SEQ ID NO: 2726225 - DNA, 25 bp, Homo sapien
ttaatgttccctttgatgagctgtg

SEQ ID NO: 2726226 - DNA, 25 bp, Homo sapien
tctcctctgagatttttgctgacgt

SEQ ID NO: 2726227 - DNA, 25 bp, Homo sapien
atttcccctctctaccaaggcgtgg

SEQ ID NO: 2726228 - DNA, 25 bp, Homo sapien
ctaccaaggcgtggcatagaccatg

SEQ ID NO: 2726229 - DNA, 25 bp, Homo sapien
ttcaaccggtcaatttcagcagtca

SEQ ID NO: 2726230 - DNA, 25 bp, Homo sapien
ttggagaagctcctaaacagccaca

SEQ ID NO: 2726231 - DNA, 25 bp, Homo sapien
cagccacagtttttcaaccggtcaa

SEQ ID NO: 2726232 - DNA, 25 bp, Homo sapien
ctttcgaagaatattcagtcgatac

SEQ ID NO: 2726233 - DNA, 25 bp, Homo sapien
tgagaaatacccatagcactattac

SEQ ID NO: 2726234 - DNA, 25 bp, Homo sapien
acttggtgtcactagcagaggagga

SEQ ID NO: 2726235 - DNA, 25 bp, Homo sapien
caaagacctcttgtaggcggctaat

SEQ ID NO: 2726236 - DNA, 25 bp, Homo sapien
tccaaatctggatatgcagccttaa

SEQ ID NO: 2726237 - DNA, 25 bp, Homo sapien
cacacagcaatcctggacacagcag

SEQ ID NO: 2726238 - DNA, 25 bp, Homo sapien
tacctaaacaaaagagtaccaatga

SEQ ID NO: 2726239 - DNA, 25 bp, Homo sapien
ttttcaaactgtggcaaatgtcctt

SEQ ID NO: 2726240 - DNA, 25 bp, Homo sapien
aatgattgcccttaaatattgagaa

SEQ ID NO: 2726241 - DNA, 25 bp, Homo sapien
acagttatgaagtctggttccagca

SEQ ID NO: 2726242 - DNA, 25 bp, Homo sapien
aattttcaagccatgaaggtgtgca

SEQ ID NO: 2726243 - DNA, 25 bp, Homo sapien
gagtaaccccttccaattcagcaaa

SEQ ID NO: 2726244 - DNA, 25 bp, Homo sapien
taaaccacactgtaagacctggact

SEQ ID NO: 2726245 - DNA, 25 bp, Homo sapien
ttctcttggattaactttctgttcc

SEQ ID NO: 2726246 - DNA, 25 bp, Homo sapien
caatttctcttggattaactttctg

SEQ ID NO: 2726247 - DNA, 25 bp, Homo sapien
ggaggtgtttggtaatgttttcagc

SEQ ID NO: 2726248 - DNA, 25 bp, Homo sapien
atacattcattgtctgggaggtgtt

SEQ ID NO: 2726249 - DNA, 25 bp, Homo sapien
cctaaggatttgctccagacactga

SEQ ID NO: 2726250 - DNA, 25 bp, Homo sapien
aaattcttccggattccaataccag

SEQ ID NO: 2726251 - DNA, 25 bp, Homo sapien
cttgaataatcactcgctcctaagg

SEQ ID NO: 2726252 - DNA, 25 bp, Homo sapien
taatcactcgctcctaaggatttgc

SEQ ID NO: 2726253 - DNA, 25 bp, Homo sapien
tcactagaagactggtcaattgttc

SEQ ID NO: 2726254 - DNA, 25 bp, Homo sapien
caaaatcctttcttaagtggacatt

SEQ ID NO: 2726255 - DNA, 25 bp, Homo sapien
tcaattgttctgatacaaaatcctt

SEQ ID NO: 2726256 - DNA, 25 bp, Homo sapien
caggtagttgaactccattcactag

SEQ ID NO: 2726257 - DNA, 25 bp, Homo sapien
tgaagtctcatgatactgcccaggt

SEQ ID NO: 2726258 - DNA, 25 bp, Homo sapien
cagcactttccatgcagttcgtttt

SEQ ID NO: 2726259 - DNA, 25 bp, Homo sapien
ggttccacgcagttctaagatacta

SEQ ID NO: 2726260 - DNA, 25 bp, Homo sapien
gtgaaatccattcccggtttcagca

SEQ ID NO: 2726261 - DNA, 25 bp, Homo sapien
tgagcacgtcataccctgcaaattc

SEQ ID NO: 2726262 - DNA, 25 bp, Homo sapien
ctcaggtggcctacatgcatctctt

SEQ ID NO: 2726263 - DNA, 25 bp, Homo sapien
tcctatgatagttgacctcaggtgg

SEQ ID NO: 2726264 - DNA, 25 bp, Homo sapien
gaggcggcttatactctctcctatg

SEQ ID NO: 2726265 - DNA, 25 bp, Homo sapien
ctagcttcttcacagtaagtaacca

SEQ ID NO: 2726266 - DNA, 25 bp, Homo sapien
ctttgtctagcttcttcacagtaag

SEQ ID NO: 2726267 - DNA, 25 bp, Homo sapien
cctggcctaacacttactgttatag

SEQ ID NO: 2726268 - DNA, 25 bp, Homo sapien
cacttactgttatagtctcccttct

SEQ ID NO: 2726269 - DNA, 25 bp, Homo sapien
cattcagctctgcatactcaagtac

SEQ ID NO: 2726270 - DNA, 25 bp, Homo sapien
taattgagacaatgacagctgggcc

SEQ ID NO: 2726271 - DNA, 25 bp, Homo sapien
tcaagtactagaggctgcacaaggc

SEQ ID NO: 2726272 - DNA, 25 bp, Homo sapien
tacatgccagtacatcaccatttag

SEQ ID NO: 2726273 - DNA, 25 bp, Homo sapien
tgcaggtgagcgatgagcatgccaa

SEQ ID NO: 2726274 - DNA, 25 bp, Homo sapien
agacctgaagatccccaataggagg

SEQ ID NO: 2726275 - DNA, 25 bp, Homo sapien
gatgagcatgccaaactgggtcccc

SEQ ID NO: 2726276 - DNA, 25 bp, Homo sapien
tataaaagacctgaagatccccaat

SEQ ID NO: 2726277 - DNA, 25 bp, Homo sapien
cgcacctgacctagaatttgatttt

SEQ ID NO: 2726278 - DNA, 25 bp, Homo sapien
tgatttttaacatacgccaataaac

SEQ ID NO: 2726279 - DNA, 25 bp, Homo sapien
tgtgctcaagcgattatccctcctc

SEQ ID NO: 2726280 - DNA, 25 bp, Homo sapien
caccgcacctgacctagaatttgat

SEQ ID NO: 2726281 - DNA, 25 bp, Homo sapien
tgaataacaacacctctaaaataga

SEQ ID NO: 2726282 - DNA, 25 bp, Homo sapien
acaaaatgtgcagtcataaagtaac

SEQ ID NO: 2726283 - DNA, 25 bp, Homo sapien
tgtaaacattggtacactgatccaa

SEQ ID NO: 2726284 - DNA, 25 bp, Homo sapien
tacagattaagtcaaggattcaaag

SEQ ID NO: 2726285 - DNA, 25 bp, Homo sapien
tgcacccagcccataaggaaatttt

SEQ ID NO: 2726286 - DNA, 25 bp, Homo sapien
ctgcacccagcccataaggaaattt

SEQ ID NO: 2726287 - DNA, 25 bp, Homo sapien
ttattaatcaaaatatccgagagga

SEQ ID NO: 2726288 - DNA, 25 bp, Homo sapien
cattatattcgaagtacagaactcc

SEQ ID NO: 2726289 - DNA, 25 bp, Homo sapien
cactgaggttggaatacagtagtaa

SEQ ID NO: 2726290 - DNA, 25 bp, Homo sapien
tttatgatccttccaccatagggaa

SEQ ID NO: 2726291 - DNA, 25 bp, Homo sapien
tggagcagaactacacactgatatg

SEQ ID NO: 2726292 - DNA, 25 bp, Homo sapien
atatctgggtttttaccctggagca

SEQ ID NO: 2726293 - DNA, 25 bp, Homo sapien
gatatgctcgcttcttaaattcctc

SEQ ID NO: 2726294 - DNA, 25 bp, Homo sapien
tctgggtttttaccctggagcagaa

SEQ ID NO: 2726295 - DNA, 25 bp, Homo sapien
tatcattcatcctatcttgatagaa

SEQ ID NO: 2726296 - DNA, 25 bp, Homo sapien
tacaatatcattcatcctatcttga

SEQ ID NO: 2726297 - DNA, 25 bp, Homo sapien
tctctattaaagagacgtccaatgc

SEQ ID NO: 2726298 - DNA, 25 bp, Homo sapien
gacgtccaatgcatcatagatttta

SEQ ID NO: 2726299 - DNA, 25 bp, Homo sapien
catctgattttactatggttaatgg

SEQ ID NO: 2726300 - DNA, 25 bp, Homo sapien
taatggtatggaacaccctgggaca

SEQ ID NO: 2726301 - DNA, 25 bp, Homo sapien
tgggacaaatacaatctttctgcca

SEQ ID NO: 2726302 - DNA, 25 bp, Homo sapien
gccaggtcagatgtatcataggtat

SEQ ID NO: 2726303 - DNA, 25 bp, Homo sapien
tcttcccctagcaccacaccaaatc

SEQ ID NO: 2726304 - DNA, 25 bp, Homo sapien
ataccaaccaatcatttgagcagca

SEQ ID NO: 2726305 - DNA, 25 bp, Homo sapien
caccaaatccagcatggaagactcg

SEQ ID NO: 2726306 - DNA, 25 bp, Homo sapien
catggaagactcgagttactttagg

SEQ ID NO: 2726307 - DNA, 25 bp, Homo sapien
tacctaaaaggctacattccctggc

SEQ ID NO: 2726308 - DNA, 25 bp, Homo sapien
ggtctacagtctggttttcactaaa

SEQ ID NO: 2726309 - DNA, 25 bp, Homo sapien
gaaatctgagcaggtactgtaatag

SEQ ID NO: 2726310 - DNA, 25 bp, Homo sapien
tagatacaaaatcactcagctgggt

SEQ ID NO: 2726311 - DNA, 25 bp, Homo sapien
caacaaggtctttgagctccacata

SEQ ID NO: 2726312 - DNA, 25 bp, Homo sapien
catgttcaattagggcttctgcgca

SEQ ID NO: 2726313 - DNA, 25 bp, Homo sapien
tagaagcatgaccacgtttgtagga

SEQ ID NO: 2726314 - DNA, 25 bp, Homo sapien
tcaaaaaagcgcagatccacggaga

SEQ ID NO: 2726315 - DNA, 25 bp, Homo sapien
ggagctcatgttccgtgtacctgca

SEQ ID NO: 2726316 - DNA, 25 bp, Homo sapien
tgactagtggctctacaatgaggga

SEQ ID NO: 2726317 - DNA, 25 bp, Homo sapien
agttttatttccagagcttgcccaa

SEQ ID NO: 2726318 - DNA, 25 bp, Homo sapien
tatacacattgtggagcatccaacc

SEQ ID NO: 2726319 - DNA, 25 bp, Homo sapien
gatcgttttagtccttctcccagaa

SEQ ID NO: 2726320 - DNA, 25 bp, Homo sapien
tgtccatggatcgttttagtccttc

SEQ ID NO: 2726321 - DNA, 25 bp, Homo sapien
catggatcgttttagtccttctccc

SEQ ID NO: 2726322 - DNA, 25 bp, Homo sapien
tcaacttgtccatggatcgttttag

SEQ ID NO: 2726323 - DNA, 25 bp, Homo sapien
tcaaccggttatgggaaaggtcagc

SEQ ID NO: 2726324 - DNA, 25 bp, Homo sapien
tacgcaacggatgtctgagcagcat

SEQ ID NO: 2726325 - DNA, 25 bp, Homo sapien
ggcatacaacaagtaagcagctgta

SEQ ID NO: 2726326 - DNA, 25 bp, Homo sapien
caaaggagaagatgtagtcattcaa

SEQ ID NO: 2726327 - DNA, 25 bp, Homo sapien
aaatgcaccggcctagtttccattc

SEQ ID NO: 2726328 - DNA, 25 bp, Homo sapien
gtttctcgagcagctttttggagca

SEQ ID NO: 2726329 - DNA, 25 bp, Homo sapien
aatattggccagacgtgcaatagac

SEQ ID NO: 2726330 - DNA, 25 bp, Homo sapien
tctcagggaaccgtaaaatgcaccg

SEQ ID NO: 2726331 - DNA, 25 bp, Homo sapien
gttgccagctcatatatataatcac

SEQ ID NO: 2726332 - DNA, 25 bp, Homo sapien
tgtgaaagcagttgccagctcatat

SEQ ID NO: 2726333 - DNA, 25 bp, Homo sapien
gcagttgccagctcatatatataat

SEQ ID NO: 2726334 - DNA, 25 bp, Homo sapien
gaaagcagttgccagctcatatata

SEQ ID NO: 2726335 - DNA, 25 bp, Homo sapien
tagcagcatacgccacatgttcacc

SEQ ID NO: 2726336 - DNA, 25 bp, Homo sapien
caggttttattcccaggatatcaaa

SEQ ID NO: 2726337 - DNA, 25 bp, Homo sapien
catagcagcatacgccacatgttca

SEQ ID NO: 2726338 - DNA, 25 bp, Homo sapien
acaggttttattcccaggatatcaa

SEQ ID NO: 2726339 - DNA, 25 bp, Homo sapien
ctttacttatgcttgtgtccacatg

SEQ ID NO: 2726340 - DNA, 25 bp, Homo sapien
ttctttacttatgcttgtgtccaca

SEQ ID NO: 2726341 - DNA, 25 bp, Homo sapien
tctttacttatgcttgtgtccacat

SEQ ID NO: 2726342 - DNA, 25 bp, Homo sapien
gtgtgcggagctgtaccccaaaacc

SEQ ID NO: 2726343 - DNA, 25 bp, Homo sapien
tcaataatcagtgtgcggagctgta

SEQ ID NO: 2726344 - DNA, 25 bp, Homo sapien
aatcagtgtgcggagctgtacccca

SEQ ID NO: 2726345 - DNA, 25 bp, Homo sapien
aaaacctctcgctgccactgccaat

SEQ ID NO: 2726346 - DNA, 25 bp, Homo sapien
ggtatgtgcagtatgacttccgttc

SEQ ID NO: 2726347 - DNA, 25 bp, Homo sapien
tatgtgcagtatgacttccgttcca

SEQ ID NO: 2726348 - DNA, 25 bp, Homo sapien
ttactgaacacctggtatgtgcagt

SEQ ID NO: 2726349 - DNA, 25 bp, Homo sapien
actgaacacctggtatgtgcagtat

SEQ ID NO: 2726350 - DNA, 25 bp, Homo sapien
cccgttttggctactgctaggggct

SEQ ID NO: 2726351 - DNA, 25 bp, Homo sapien
ttttggctactgctaggggctttgg

SEQ ID NO: 2726352 - DNA, 25 bp, Homo sapien
agcgacagcagttggggcccccgtt

SEQ ID NO: 2726353 - DNA, 25 bp, Homo sapien
agggacagcgacagcagttggggcc

SEQ ID NO: 2726354 - DNA, 25 bp, Homo sapien
aggacgggctctaccgcagtgcccg

SEQ ID NO: 2726355 - DNA, 25 bp, Homo sapien
gagctcgcggccgacttcatggcac

SEQ ID NO: 2726356 - DNA, 25 bp, Homo sapien
agggatccctggcacttccctgggc

SEQ ID NO: 2726357 - DNA, 25 bp, Homo sapien
tgtggcgcgattgcatcacacccgt

SEQ ID NO: 2726358 - DNA, 25 bp, Homo sapien
ccgcggtagatgaagacgccctcgt

SEQ ID NO: 2726359 - DNA, 25 bp, Homo sapien
gatgttggtgcgcttcttggccacg

SEQ ID NO: 2726360 - DNA, 25 bp, Homo sapien
cagcttagagcggaacgggttccac

SEQ ID NO: 2726361 - DNA, 25 bp, Homo sapien
tggcccggcaccatgttcagcgtga

SEQ ID NO: 2726362 - DNA, 25 bp, Homo sapien
tggggagatggcaggcgagcctgag

SEQ ID NO: 2726363 - DNA, 25 bp, Homo sapien
aataatagcaaacacaacgcagcct

SEQ ID NO: 2726364 - DNA, 25 bp, Homo sapien
ctttatgcagtttaatagaaaaaca

SEQ ID NO: 2726365 - DNA, 25 bp, Homo sapien
atagcaaacacaacgcagccttggg

SEQ ID NO: 2726366 - DNA, 25 bp, Homo sapien
cttatcgtctaagagcaaacttcaa

SEQ ID NO: 2726367 - DNA, 25 bp, Homo sapien
tatctgggaccatagttacgcacca

SEQ ID NO: 2726368 - DNA, 25 bp, Homo sapien
ttcaaattagaggtgccctaggatt

SEQ ID NO: 2726369 - DNA, 25 bp, Homo sapien
gtggcacggtatcatgattcactgc

SEQ ID NO: 2726370 - DNA, 25 bp, Homo sapien
tcatcgatgttgtacctggctcagt

SEQ ID NO: 2726371 - DNA, 25 bp, Homo sapien
tggctcagtcaatagttgtcacagg

SEQ ID NO: 2726372 - DNA, 25 bp, Homo sapien
tgcttgccccgaatataactaatag

SEQ ID NO: 2726373 - DNA, 25 bp, Homo sapien
tgccatggcgcattctgtaaacatt

SEQ ID NO: 2726374 - DNA, 25 bp, Homo sapien
caatagggttatgttccagtagacc

SEQ ID NO: 2726375 - DNA, 25 bp, Homo sapien
taacgttggcctttagctgggcaaa

SEQ ID NO: 2726376 - DNA, 25 bp, Homo sapien
ggtactaggtattggattctcacca

SEQ ID NO: 2726377 - DNA, 25 bp, Homo sapien
tatgtgattgcctgtaatggccagg

SEQ ID NO: 2726378 - DNA, 25 bp, Homo sapien
gggttttaaaatggctactgactga

SEQ ID NO: 2726379 - DNA, 25 bp, Homo sapien
cctgtaatcgaatataaggacttga

SEQ ID NO: 2726380 - DNA, 25 bp, Homo sapien
aattttaaacaattgaggctgggtg

SEQ ID NO: 2726381 - DNA, 25 bp, Homo sapien
gccacaggtataaaacttgtagtta

SEQ ID NO: 2726382 - DNA, 25 bp, Homo sapien
tagaggacggtcactttttccaaca

SEQ ID NO: 2726383 - DNA, 25 bp, Homo sapien
aaaacccactccatagccatgtgga

SEQ ID NO: 2726384 - DNA, 25 bp, Homo sapien
aatactgcaaaaccaggagttgatg

SEQ ID NO: 2726385 - DNA, 25 bp, Homo sapien
ggagccagaaatagaggtgcagtta

SEQ ID NO: 2726386 - DNA, 25 bp, Homo sapien
gcagttggtgcacttcttgggctgc

SEQ ID NO: 2726387 - DNA, 25 bp, Homo sapien
tttggagcagttggtgcacttcttg

SEQ ID NO: 2726388 - DNA, 25 bp, Homo sapien
agttggtgcacttcttgggctgcca

SEQ ID NO: 2726389 - DNA, 25 bp, Homo sapien
gagcagttggtgcacttcttgggct

SEQ ID NO: 2726390 - DNA, 25 bp, Homo sapien
gaagcgagacccatataatttgagg

SEQ ID NO: 2726391 - DNA, 25 bp, Homo sapien
gaatggctctgtttaggaccactga

SEQ ID NO: 2726392 - DNA, 25 bp, Homo sapien
ggaacacagaggagtaacaacagct

SEQ ID NO: 2726393 - DNA, 25 bp, Homo sapien
caaagagtggtttgccaagcttcta

SEQ ID NO: 2726394 - DNA, 25 bp, Homo sapien
tgcgctggcggcttttagcacctgt

SEQ ID NO: 2726395 - DNA, 25 bp, Homo sapien
tacagttggagctttcaaacgtacg

SEQ ID NO: 2726396 - DNA, 25 bp, Homo sapien
tgtccttgaaatgccggtgggttcc

SEQ ID NO: 2726397 - DNA, 25 bp, Homo sapien
ttctcttcgagatctgggaggtgcc

SEQ ID NO: 2726398 - DNA, 25 bp, Homo sapien
tgggcggtcggcttccaagcccgtc

SEQ ID NO: 2726399 - DNA, 25 bp, Homo sapien
gccccgtctgaaagccccttggctg

SEQ ID NO: 2726400 - DNA, 25 bp, Homo sapien
agcccgtcgctcctcgccggcgctt

SEQ ID NO: 2726401 - DNA, 25 bp, Homo sapien
ctcgccggcgcttcgtccggtatgg

SEQ ID NO: 2726402 - DNA, 25 bp, Homo sapien
tcggaggccgtccatcgcccctcgg

SEQ ID NO: 2726403 - DNA, 25 bp, Homo sapien
tgctctcagtgccccggatcggagg

SEQ ID NO: 2726404 - DNA, 25 bp, Homo sapien
ctccggagtcgccgcctctgctctc

SEQ ID NO: 2726405 - DNA, 25 bp, Homo sapien
cgcccctcgggccgacgccatgaag

SEQ ID NO: 2726406 - DNA, 25 bp, Homo sapien
gggcctcgccgcgcggcccagccac

SEQ ID NO: 2726407 - DNA, 25 bp, Homo sapien
ccgggcctcgccgcgcggcccagcc

SEQ ID NO: 2726408 - DNA, 25 bp, Homo sapien
ggccgggcctcgccgcgcggcccag

SEQ ID NO: 2726409 - DNA, 25 bp, Homo sapien
cggccgggcctcgccgcgcggccca

SEQ ID NO: 2726410 - DNA, 25 bp, Homo sapien
agagagcggggcctcacgaaccgga

SEQ ID NO: 2726411 - DNA, 25 bp, Homo sapien
agagcggggcctcacgaaccggaga

SEQ ID NO: 2726412 - DNA, 25 bp, Homo sapien
gagcggggcctcacgaaccggagaa

SEQ ID NO: 2726413 - DNA, 25 bp, Homo sapien
cagagagcggggcctcacgaaccgg

SEQ ID NO: 2726414 - DNA, 25 bp, Homo sapien
ctctgaggcgatctgcggaagctga

SEQ ID NO: 2726415 - DNA, 25 bp, Homo sapien
gtcgcctcctcgctggcgtgactaa

SEQ ID NO: 2726416 - DNA, 25 bp, Homo sapien
tgcatctcgggctttgtagtccacc

SEQ ID NO: 2726417 - DNA, 25 bp, Homo sapien
gctggcgtgactaagacccagccct

SEQ ID NO: 2726418 - DNA, 25 bp, Homo sapien
acctgtctctgtggatacccgctca

SEQ ID NO: 2726419 - DNA, 25 bp, Homo sapien
gatacccgctcagtaaaggcaaaat

SEQ ID NO: 2726420 - DNA, 25 bp, Homo sapien
gatgtgtcaggtctcctctatcatt

SEQ ID NO: 2726421 - DNA, 25 bp, Homo sapien
aatgaagatgtgtcaggtctcctct

SEQ ID NO: 2726422 - DNA, 25 bp, Homo sapien
aagcagtctggggatcagcagccat

SEQ ID NO: 2726423 - DNA, 25 bp, Homo sapien
gctccatatcttgttggaagccaaa

SEQ ID NO: 2726424 - DNA, 25 bp, Homo sapien
tcctgctccatatcttgttggaagc

SEQ ID NO: 2726425 - DNA, 25 bp, Homo sapien
ttgttggaagccaaaagcagtctgg

SEQ ID NO: 2726426 - DNA, 25 bp, Homo sapien
gttttccagaattgtgaccaaccag

SEQ ID NO: 2726427 - DNA, 25 bp, Homo sapien
tggcacaccgaagggaaagagcgca

SEQ ID NO: 2726428 - DNA, 25 bp, Homo sapien
caccgaagggaaagagcgcatatat

SEQ ID NO: 2726429 - DNA, 25 bp, Homo sapien
tcttcagtggcacaccgaagggaaa

SEQ ID NO: 2726430 - DNA, 25 bp, Homo sapien
cacaccgaagggaaagagcgcatat

SEQ ID NO: 2726431 - DNA, 25 bp, Homo sapien
ccggatatggaagccatctttgcca

SEQ ID NO: 2726432 - DNA, 25 bp, Homo sapien
agtgtgaaccctggccaaagtgccc

SEQ ID NO: 2726433 - DNA, 25 bp, Homo sapien
ttggccagtgtgaaccctggccaaa

SEQ ID NO: 2726434 - DNA, 25 bp, Homo sapien
ccagtgtgaaccctggccaaagtgc

SEQ ID NO: 2726435 - DNA, 25 bp, Homo sapien
ggccagtgtgaaccctggccaaagt

SEQ ID NO: 2726436 - DNA, 25 bp, Homo sapien
gccacgattggggatgtacttgacc

SEQ ID NO: 2726437 - DNA, 25 bp, Homo sapien
caaattcatcagcattgaacttggt

SEQ ID NO: 2726438 - DNA, 25 bp, Homo sapien
attcatcagcattgaacttggtgaa

SEQ ID NO: 2726439 - DNA, 25 bp, Homo sapien
tgtccagagggccacgattggggat

SEQ ID NO: 2726440 - DNA, 25 bp, Homo sapien
gcagcacattggaagccctcatgag

SEQ ID NO: 2726441 - DNA, 25 bp, Homo sapien
tattggtgagtattaagaggggggc

SEQ ID NO: 2726442 - DNA, 25 bp, Homo sapien
cagcacattggaagccctcatgagt

SEQ ID NO: 2726443 - DNA, 25 bp, Homo sapien
agtattaagaggggggcagcacatt

SEQ ID NO: 2726444 - DNA, 25 bp, Homo sapien
tcaacactgccgaacacaagccatg

SEQ ID NO: 2726445 - DNA, 25 bp, Homo sapien
atgctcaacactgccgaacacaagc

SEQ ID NO: 2726446 - DNA, 25 bp, Homo sapien
gaacacaagccatggcctacccttc

SEQ ID NO: 2726447 - DNA, 25 bp, Homo sapien
actgccgaacacaagccatggccta

SEQ ID NO: 2726448 - DNA, 25 bp, Homo sapien
caatagaaggcaccaatctactgtc

SEQ ID NO: 2726449 - DNA, 25 bp, Homo sapien
tctagagttggaggcaaagacttct

SEQ ID NO: 2726450 - DNA, 25 bp, Homo sapien
tctttggatatgcagttttaggaca

SEQ ID NO: 2726451 - DNA, 25 bp, Homo sapien
cagcccttgataagtcttaactgga

SEQ ID NO: 2726452 - DNA, 25 bp, Homo sapien
tcatggccaggtgtagctgttagga

SEQ ID NO: 2726453 - DNA, 25 bp, Homo sapien
caacctggcccacactttatgatgt

SEQ ID NO: 2726454 - DNA, 25 bp, Homo sapien
caccacagtctcagtcgagctgcat

SEQ ID NO: 2726455 - DNA, 25 bp, Homo sapien
ttatgatgtgtgtctccgaaacctc

SEQ ID NO: 2726456 - DNA, 25 bp, Homo sapien
gatccgccgccagaaaggttatgca

SEQ ID NO: 2726457 - DNA, 25 bp, Homo sapien
cagcaagcggcggaaatacgtcttc

SEQ ID NO: 2726458 - DNA, 25 bp, Homo sapien
cagagaatccgtgcctgggacaagt

SEQ ID NO: 2726459 - DNA, 25 bp, Homo sapien
acaagtagtccgagaggtgatccgc

SEQ ID NO: 2726460 - DNA, 25 bp, Homo sapien
gtgccttgctgcagacattctccca

SEQ ID NO: 2726461 - DNA, 25 bp, Homo sapien
cccgtaacagcctgggagttgctgg

SEQ ID NO: 2726462 - DNA, 25 bp, Homo sapien
gtgcccgtaacagcctgggagttgc

SEQ ID NO: 2726463 - DNA, 25 bp, Homo sapien
ctcaagtgccttgctgcagacattc

SEQ ID NO: 2726464 - DNA, 25 bp, Homo sapien
gaaactacacgttgtgacgggcaag

SEQ ID NO: 2726465 - DNA, 25 bp, Homo sapien
taagcaatgcaggtcaagtccacag

SEQ ID NO: 2726466 - DNA, 25 bp, Homo sapien
tgaataagcactagccaggccatgg

SEQ ID NO: 2726467 - DNA, 25 bp, Homo sapien
cacagtgtggagctggtgacgctaa

SEQ ID NO: 2726468 - DNA, 25 bp, Homo sapien
ttctctgaactagcgggagctgcca

SEQ ID NO: 2726469 - DNA, 25 bp, Homo sapien
tttttacggatatggagactgggcc

SEQ ID NO: 2726470 - DNA, 25 bp, Homo sapien
ggtttcctggatagctgagcccttc

SEQ ID NO: 2726471 - DNA, 25 bp, Homo sapien
tctagcagatggtgtcagagtgcca

SEQ ID NO: 2726472 - DNA, 25 bp, Homo sapien
cttaccattgacacataaagatctt

SEQ ID NO: 2726473 - DNA, 25 bp, Homo sapien
agccataatactccactgccactta

SEQ ID NO: 2726474 - DNA, 25 bp, Homo sapien
gttttgaatctttcgagtatttcca

SEQ ID NO: 2726475 - DNA, 25 bp, Homo sapien
tccagaatgcgcagtctttatcacc

SEQ ID NO: 2726476 - DNA, 25 bp, Homo sapien
ccaagtggtttgaagctgctcccta

SEQ ID NO: 2726477 - DNA, 25 bp, Homo sapien
tcacaactgggatgaaagtctagcc

SEQ ID NO: 2726478 - DNA, 25 bp, Homo sapien
tcttacttgcgtaggtgagagccac

SEQ ID NO: 2726479 - DNA, 25 bp, Homo sapien
tcagatggccagtgatccaggaagc

SEQ ID NO: 2726480 - DNA, 25 bp, Homo sapien
gcttcagaaccctccatggcaatga

SEQ ID NO: 2726481 - DNA, 25 bp, Homo sapien
tgaaggctccttcaacgacctcaca

SEQ ID NO: 2726482 - DNA, 25 bp, Homo sapien
gaaggctccttcaacgacctcacat

SEQ ID NO: 2726483 - DNA, 25 bp, Homo sapien
ggcaatgacatttccagcgttcctg

SEQ ID NO: 2726484 - DNA, 25 bp, Homo sapien
tccagtaactcccttgggtctcttc

SEQ ID NO: 2726485 - DNA, 25 bp, Homo sapien
taagcacagctcttcatatgatctc

SEQ ID NO: 2726486 - DNA, 25 bp, Homo sapien
tatgatctctgaaactccagtaact

SEQ ID NO: 2726487 - DNA, 25 bp, Homo sapien
ggctccagaacttccggtcttaagc

SEQ ID NO: 2726488 - DNA, 25 bp, Homo sapien
gaccagctattagagcatcagaaaa

SEQ ID NO: 2726489 - DNA, 25 bp, Homo sapien
tcccaaccatggtccagggttggca

SEQ ID NO: 2726490 - DNA, 25 bp, Homo sapien
caggcaactctattccacttttgac

SEQ ID NO: 2726491 - DNA, 25 bp, Homo sapien
catggtccagggttggcactttgac

SEQ ID NO: 2726492 - DNA, 25 bp, Homo sapien
tgtaaacatttatacctatgaagaa

SEQ ID NO: 2726493 - DNA, 25 bp, Homo sapien
aacttgtaaacatttatacctatga

SEQ ID NO: 2726494 - DNA, 25 bp, Homo sapien
ttgtaaacatttatacctatgaaga

SEQ ID NO: 2726495 - DNA, 25 bp, Homo sapien
tataacttgtaaacatttataccta

SEQ ID NO: 2726496 - DNA, 25 bp, Homo sapien
tacgaattagtaggcttgccccagc

SEQ ID NO: 2726497 - DNA, 25 bp, Homo sapien
caaaacaccggtgtcagtgacaact

SEQ ID NO: 2726498 - DNA, 25 bp, Homo sapien
catgagttcatcagcggtacacgta

SEQ ID NO: 2726499 - DNA, 25 bp, Homo sapien
gagatgggctcgtatcactggccag

SEQ ID NO: 2726500 - DNA, 25 bp, Homo sapien
gccagcctgccacagaacttgagta

SEQ ID NO: 2726501 - DNA, 25 bp, Homo sapien
gaaataaagccagtgcgcttcctgg

SEQ ID NO: 2726502 - DNA, 25 bp, Homo sapien
ggatcctgagctacaaccggctgag

SEQ ID NO: 2726503 - DNA, 25 bp, Homo sapien
tgacgaacaagctggttagaaagcc

SEQ ID NO: 2726504 - DNA, 25 bp, Homo sapien
gatagcccgtgaatgcttttcccca

SEQ ID NO: 2726505 - DNA, 25 bp, Homo sapien
cactttgggaggagacctgattttc

SEQ ID NO: 2726506 - DNA, 25 bp, Homo sapien
cagatccagggtttccaatgcaagc

SEQ ID NO: 2726507 - DNA, 25 bp, Homo sapien
acctggagaattatggctgggagcc

SEQ ID NO: 2726508 - DNA, 25 bp, Homo sapien
ctgggtgaggaagaaaatgcctcat

SEQ ID NO: 2726509 - DNA, 25 bp, Homo sapien
gaagcactcagtcacattagctatg

SEQ ID NO: 2726510 - DNA, 25 bp, Homo sapien
gttacccacatagagtagaagcctg

SEQ ID NO: 2726511 - DNA, 25 bp, Homo sapien
tgcagctggtatgtctcaaaggccg

SEQ ID NO: 2726512 - DNA, 25 bp, Homo sapien
tagaagcctgaaagtgtgcagctgg

SEQ ID NO: 2726513 - DNA, 25 bp, Homo sapien
cttgactctgaccagtcgctgcggg

SEQ ID NO: 2726514 - DNA, 25 bp, Homo sapien
tgtgcttgatctaaccatgtggtgg

SEQ ID NO: 2726515 - DNA, 25 bp, Homo sapien
gttctgtcaagcaccgcggaaagca

SEQ ID NO: 2726516 - DNA, 25 bp, Homo sapien
tggtggaacgatggaaacggaacat

SEQ ID NO: 2726517 - DNA, 25 bp, Homo sapien
tgagtacagtagtgaaaaaggagga

SEQ ID NO: 2726518 - DNA, 25 bp, Homo sapien
tagttgagtacagtagtgaaaaagg

SEQ ID NO: 2726519 - DNA, 25 bp, Homo sapien
gttgagtacagtagtgaaaaaggag

SEQ ID NO: 2726520 - DNA, 25 bp, Homo sapien
actagttgagtacagtagtgaaaaa

SEQ ID NO: 2726521 - DNA, 25 bp, Homo sapien
aagtggaaaccaacataatgaggca

SEQ ID NO: 2726522 - DNA, 25 bp, Homo sapien
ctcagatcttgggaagccaacttcc

SEQ ID NO: 2726523 - DNA, 25 bp, Homo sapien
gaggcagctcgaagcacgtacttct

SEQ ID NO: 2726524 - DNA, 25 bp, Homo sapien
tcttgggaagccaacttcccatctc

SEQ ID NO: 2726525 - DNA, 25 bp, Homo sapien
cagggaggacagtaggattcagaaa

SEQ ID NO: 2726526 - DNA, 25 bp, Homo sapien
attgccatcagttctgcacagatac

SEQ ID NO: 2726527 - DNA, 25 bp, Homo sapien
gacgaccttgagcactgctctgtga

SEQ ID NO: 2726528 - DNA, 25 bp, Homo sapien
gacagtaggattcagaaacagccca

SEQ ID NO: 2726529 - DNA, 25 bp, Homo sapien
ggcaacctgtccaggtgacggacca

SEQ ID NO: 2726530 - DNA, 25 bp, Homo sapien
tgtttgcaatgtgtagtgggcaacc

SEQ ID NO: 2726531 - DNA, 25 bp, Homo sapien
ttcccagacgcctagaacagaactc

SEQ ID NO: 2726532 - DNA, 25 bp, Homo sapien
tcagtgaccacttgttgacaggtgg

SEQ ID NO: 2726533 - DNA, 25 bp, Homo sapien
ccatggtggtatcccgtgtctcgta

SEQ ID NO: 2726534 - DNA, 25 bp, Homo sapien
gctctggagggaccatctgtcttta

SEQ ID NO: 2726535 - DNA, 25 bp, Homo sapien
ggcttccgtgtccagtcacaagtga

SEQ ID NO: 2726536 - DNA, 25 bp, Homo sapien
catgagtcttcaaaagctctggagg

SEQ ID NO: 2726537 - DNA, 25 bp, Homo sapien
tcgtcgaaatgtaagtgcacctgtc

SEQ ID NO: 2726538 - DNA, 25 bp, Homo sapien
caataacatcgtggactgtcgagga

SEQ ID NO: 2726539 - DNA, 25 bp, Homo sapien
caactgtcgccggagaattcagctc

SEQ ID NO: 2726540 - DNA, 25 bp, Homo sapien
gagattcctgccaacttgccggagg

SEQ ID NO: 2726541 - DNA, 25 bp, Homo sapien
agaaatccaccccagcagagcagca

SEQ ID NO: 2726542 - DNA, 25 bp, Homo sapien
gaaatccaccccagcagagcagcat

SEQ ID NO: 2726543 - DNA, 25 bp, Homo sapien
agaagaaatccaccccagcagagca

SEQ ID NO: 2726544 - DNA, 25 bp, Homo sapien
ctggagaagaaatccaccccagcag

SEQ ID NO: 2726545 - DNA, 25 bp, Homo sapien
cccttgaagtcatcaggccatggtc

SEQ ID NO: 2726546 - DNA, 25 bp, Homo sapien
tgccccgtttggcacaaagacagct

SEQ ID NO: 2726547 - DNA, 25 bp, Homo sapien
gaaggttaggaattgtagtttctgc

SEQ ID NO: 2726548 - DNA, 25 bp, Homo sapien
aggcagcaccactgatgatcagtga

SEQ ID NO: 2726549 - DNA, 25 bp, Homo sapien
tttcatggcaataaatggaggaatt

SEQ ID NO: 2726550 - DNA, 25 bp, Homo sapien
tcatggcaataaatggaggaatttg

SEQ ID NO: 2726551 - DNA, 25 bp, Homo sapien
atggcaataaatggaggaatttggg

SEQ ID NO: 2726552 - DNA, 25 bp, Homo sapien
ccaaggctctgatggttttcagttt

SEQ ID NO: 2726553 - DNA, 25 bp, Homo sapien
tgagcagggccttcccctaggttcc

SEQ ID NO: 2726554 - DNA, 25 bp, Homo sapien
ctcttgagcagggccttcccctagg

SEQ ID NO: 2726555 - DNA, 25 bp, Homo sapien
cttgagcagggccttcccctaggtt

SEQ ID NO: 2726556 - DNA, 25 bp, Homo sapien
ctgtcgtctctcttgagcagggcct

SEQ ID NO: 2726557 - DNA, 25 bp, Homo sapien
agatgcctggttttgcaattatgtg

SEQ ID NO: 2726558 - DNA, 25 bp, Homo sapien
tgcctggttttgcaattatgtgata

SEQ ID NO: 2726559 - DNA, 25 bp, Homo sapien
gatgcctggttttgcaattatgtga

SEQ ID NO: 2726560 - DNA, 25 bp, Homo sapien
cctggttttgcaattatgtgataca

SEQ ID NO: 2726561 - DNA, 25 bp, Homo sapien
agacttagggagaagtctatctgcc

SEQ ID NO: 2726562 - DNA, 25 bp, Homo sapien
tctatctgccttgagacaggacatg

SEQ ID NO: 2726563 - DNA, 25 bp, Homo sapien
atctcttggacccaaggagtctgga

SEQ ID NO: 2726564 - DNA, 25 bp, Homo sapien
ccagcttgcttatgtagacttaggg

SEQ ID NO: 2726565 - DNA, 25 bp, Homo sapien
gatgcccacatttgtaagtacaact

SEQ ID NO: 2726566 - DNA, 25 bp, Homo sapien
aagtacaactcagggcatgtctcag

SEQ ID NO: 2726567 - DNA, 25 bp, Homo sapien
gtacaactcagggcatgtctcagcc

SEQ ID NO: 2726568 - DNA, 25 bp, Homo sapien
ggatgcccacatttgtaagtacaac

SEQ ID NO: 2726569 - DNA, 25 bp, Homo sapien
ctctgttaattcactgtaggcactg

SEQ ID NO: 2726570 - DNA, 25 bp, Homo sapien
gagtctggtactttggctgcatcca

SEQ ID NO: 2726571 - DNA, 25 bp, Homo sapien
actttcttctaggcttgctgtgctg

SEQ ID NO: 2726572 - DNA, 25 bp, Homo sapien
cactggcagagattgcactttcttc

SEQ ID NO: 2726573 - DNA, 25 bp, Homo sapien
gcagtaggccctgattcctggtccc

SEQ ID NO: 2726574 - DNA, 25 bp, Homo sapien
agcaagactgagaagagtggcttgc

SEQ ID NO: 2726575 - DNA, 25 bp, Homo sapien
tgattcctggtcccatgttggctgc

SEQ ID NO: 2726576 - DNA, 25 bp, Homo sapien
gtcatcagcagtaggccctgattcc

SEQ ID NO: 2726577 - DNA, 25 bp, Homo sapien
ctaatagagctgagtcagccaataa

SEQ ID NO: 2726578 - DNA, 25 bp, Homo sapien
cagccaataacgatcactcttagga

SEQ ID NO: 2726579 - DNA, 25 bp, Homo sapien
agagctgagtcagccaataacgatc

SEQ ID NO: 2726580 - DNA, 25 bp, Homo sapien
gctgagtcagccaataacgatcact

SEQ ID NO: 2726581 - DNA, 25 bp, Homo sapien
aggaagccctttcagtgtaaattcg

SEQ ID NO: 2726582 - DNA, 25 bp, Homo sapien
aggtatactagagatgcggcagccg

SEQ ID NO: 2726583 - DNA, 25 bp, Homo sapien
gtgtaaattcgttccctgatcccca

SEQ ID NO: 2726584 - DNA, 25 bp, Homo sapien
aatgacttccacaaagtcaactggg

SEQ ID NO: 2726585 - DNA, 25 bp, Homo sapien
cctggccacacgtgactcttgagca

SEQ ID NO: 2726586 - DNA, 25 bp, Homo sapien
tgtgaattgccacgtgtagctcatg

SEQ ID NO: 2726587 - DNA, 25 bp, Homo sapien
gacagggcatgttctgcaaatcacc

SEQ ID NO: 2726588 - DNA, 25 bp, Homo sapien
ccttattggacggtgcaagctggga

SEQ ID NO: 2726589 - DNA, 25 bp, Homo sapien
tagacctgagtcttgaaagtcaaga

SEQ ID NO: 2726590 - DNA, 25 bp, Homo sapien
tcctaggagctttcacaggaatttg

SEQ ID NO: 2726591 - DNA, 25 bp, Homo sapien
tctgcttttctatagacctgagtct

SEQ ID NO: 2726592 - DNA, 25 bp, Homo sapien
aaagtcaagatcctaggagctttca

SEQ ID NO: 2726593 - DNA, 25 bp, Homo sapien
tgacactcatggacctccaagccag

SEQ ID NO: 2726594 - DNA, 25 bp, Homo sapien
tgtttagtgaataacttgcctctag

SEQ ID NO: 2726595 - DNA, 25 bp, Homo sapien
gctttggtgaccagtatttgagaat

SEQ ID NO: 2726596 - DNA, 25 bp, Homo sapien
tagatcagcgctcatcccatgacac

SEQ ID NO: 2726597 - DNA, 25 bp, Homo sapien
aaaggtgcccctgcctgatggtcag

SEQ ID NO: 2726598 - DNA, 25 bp, Homo sapien
gcggtcagttcactcctaagaccgg

SEQ ID NO: 2726599 - DNA, 25 bp, Homo sapien
tcactcctaagaccgggcttctgtg

SEQ ID NO: 2726600 - DNA, 25 bp, Homo sapien
gtgctgatttgcaaaggtgcccctg

SEQ ID NO: 2726601 - DNA, 25 bp, Homo sapien
acttctcccgtgagtagcgcttagg

SEQ ID NO: 2726602 - DNA, 25 bp, Homo sapien
cttggtttgggagcagtcttttgaa

SEQ ID NO: 2726603 - DNA, 25 bp, Homo sapien
ttcagacttgacaaacttggtttgg

SEQ ID NO: 2726604 - DNA, 25 bp, Homo sapien
gggccacacattccagctgccagat

SEQ ID NO: 2726605 - DNA, 25 bp, Homo sapien
tgaattgtttttgatcagcaaagga

SEQ ID NO: 2726606 - DNA, 25 bp, Homo sapien
tgtggagaagataattgaattgttt

SEQ ID NO: 2726607 - DNA, 25 bp, Homo sapien
gtttttgatcagcaaaggatcttga

SEQ ID NO: 2726608 - DNA, 25 bp, Homo sapien
cagcaaaggatcttgaatcaacgaa

SEQ ID NO: 2726609 - DNA, 25 bp, Homo sapien
tgtgttggccacttcagctgagctt

SEQ ID NO: 2726610 - DNA, 25 bp, Homo sapien
caagcacgatgttgcccacttcaga

SEQ ID NO: 2726611 - DNA, 25 bp, Homo sapien
gaacccagagtttaatgcaagtcgc

SEQ ID NO: 2726612 - DNA, 25 bp, Homo sapien
tacagggtgttaggatattcaagca

SEQ ID NO: 2726613 - DNA, 25 bp, Homo sapien
taaacgtcagaggtcaacaattgct

SEQ ID NO: 2726614 - DNA, 25 bp, Homo sapien
taagcaggctattccgatcagagag

SEQ ID NO: 2726615 - DNA, 25 bp, Homo sapien
tctctgaggaagtgtaaccagtact

SEQ ID NO: 2726616 - DNA, 25 bp, Homo sapien
taaagtggtttgcagggatcttccc

SEQ ID NO: 2726617 - DNA, 25 bp, Homo sapien
cttttatttatctagaaatgccaga

SEQ ID NO: 2726618 - DNA, 25 bp, Homo sapien
gtgttttcgtttgatttgctttgga

SEQ ID NO: 2726619 - DNA, 25 bp, Homo sapien
ttaagtgggatctctgcttgtcccc

SEQ ID NO: 2726620 - DNA, 25 bp, Homo sapien
tctcgctgtgaatatgaggtgtttt

SEQ ID NO: 2726621 - DNA, 25 bp, Homo sapien
gaggagccttttagagccaacagaa

SEQ ID NO: 2726622 - DNA, 25 bp, Homo sapien
tgtttcccaggatcgaacacaggag

SEQ ID NO: 2726623 - DNA, 25 bp, Homo sapien
tgacatcagcaaggccggcaagtaa

SEQ ID NO: 2726624 - DNA, 25 bp, Homo sapien
tataacagggtaagcagccatcgca

SEQ ID NO: 2726625 - DNA, 25 bp, Homo sapien
cgtgaaccctggatttacatcatct

SEQ ID NO: 2726626 - DNA, 25 bp, Homo sapien
aattcccactttatcgattttgtca

SEQ ID NO: 2726627 - DNA, 25 bp, Homo sapien
tttatgacagccacgcaattcccac

SEQ ID NO: 2726628 - DNA, 25 bp, Homo sapien
tctaaatagcttcataaccatcgtg

SEQ ID NO: 2726629 - DNA, 25 bp, Homo sapien
gagcctgagatctctgccgcaatac

SEQ ID NO: 2726630 - DNA, 25 bp, Homo sapien
catgtgaagacatcgtgagccagtc

SEQ ID NO: 2726631 - DNA, 25 bp, Homo sapien
tgtagccccagataaactactttgc

SEQ ID NO: 2726632 - DNA, 25 bp, Homo sapien
taaataagttgcttgtgcagagtgc

SEQ ID NO: 2726633 - DNA, 25 bp, Homo sapien
ggactttggaagctcaactccaagg

SEQ ID NO: 2726634 - DNA, 25 bp, Homo sapien
gctcaactccaaggttgagggtctg

SEQ ID NO: 2726635 - DNA, 25 bp, Homo sapien
tcaggataatgccaggtctctggac

SEQ ID NO: 2726636 - DNA, 25 bp, Homo sapien
gagctggactttggaagctcaactc

SEQ ID NO: 2726637 - DNA, 25 bp, Homo sapien
ggactttcgccatggacacttctgt

SEQ ID NO: 2726638 - DNA, 25 bp, Homo sapien
catcttttggactttcgccatggac

SEQ ID NO: 2726639 - DNA, 25 bp, Homo sapien
ttcgccatggacacttctgtctacc

SEQ ID NO: 2726640 - DNA, 25 bp, Homo sapien
tcttttggactttcgccatggacac

SEQ ID NO: 2726641 - DNA, 25 bp, Homo sapien
agttggagagacatagccagatcca

SEQ ID NO: 2726642 - DNA, 25 bp, Homo sapien
ggaagttggagagacatagccagat

SEQ ID NO: 2726643 - DNA, 25 bp, Homo sapien
gttggagagacatagccagatccat

SEQ ID NO: 2726644 - DNA, 25 bp, Homo sapien
aagttggagagacatagccagatcc

SEQ ID NO: 2726645 - DNA, 25 bp, Homo sapien
acaggggagttgattctatttggca

SEQ ID NO: 2726646 - DNA, 25 bp, Homo sapien
gattctatttggcacgagactagtg

SEQ ID NO: 2726647 - DNA, 25 bp, Homo sapien
agtggcagcagtctcacatttgtca

SEQ ID NO: 2726648 - DNA, 25 bp, Homo sapien
tatttggcacgagactagtggcagc

SEQ ID NO: 2726649 - DNA, 25 bp, Homo sapien
cttagtgcagccgttgacaaacagg

SEQ ID NO: 2726650 - DNA, 25 bp, Homo sapien
tggggccctcagtgacaactgacat

SEQ ID NO: 2726651 - DNA, 25 bp, Homo sapien
gtgcagccgttgacaaacaggctgg

SEQ ID NO: 2726652 - DNA, 25 bp, Homo sapien
tagtgcagccgttgacaaacaggct

SEQ ID NO: 2726653 - DNA, 25 bp, Homo sapien
ctctatatcagcaaagacttggtgc

SEQ ID NO: 2726654 - DNA, 25 bp, Homo sapien
gacttggtgcaatgatgtatatcac

SEQ ID NO: 2726655 - DNA, 25 bp, Homo sapien
tctttagttgagatgtcatgctgaa

SEQ ID NO: 2726656 - DNA, 25 bp, Homo sapien
aatggatgagcctgggtatgcgcct

SEQ ID NO: 2726657 - DNA, 25 bp, Homo sapien
tgcctccaaactgaagctccttgcc

SEQ ID NO: 2726658 - DNA, 25 bp, Homo sapien
caaactgaagctccttgccctttcc

SEQ ID NO: 2726659 - DNA, 25 bp, Homo sapien
ctccaaactgaagctccttgccctt

SEQ ID NO: 2726660 - DNA, 25 bp, Homo sapien
aactgaagctccttgccctttccct

SEQ ID NO: 2726661 - DNA, 25 bp, Homo sapien
ggaaaaacttctgatggttgcccat

SEQ ID NO: 2726662 - DNA, 25 bp, Homo sapien
ctgctggaaaaacttctgatggttg

SEQ ID NO: 2726663 - DNA, 25 bp, Homo sapien
tggaaaaacttctgatggttgccca

SEQ ID NO: 2726664 - DNA, 25 bp, Homo sapien
gctggaaaaacttctgatggttgcc

SEQ ID NO: 2726665 - DNA, 25 bp, Homo sapien
tacatcactgcctgatcaagcttca

SEQ ID NO: 2726666 - DNA, 25 bp, Homo sapien
cccttatcatcagttgatacatcac

SEQ ID NO: 2726667 - DNA, 25 bp, Homo sapien
tgcctgatcaagcttcatgaagctc

SEQ ID NO: 2726668 - DNA, 25 bp, Homo sapien
gcttcatgaagctctgttcctgtgt

SEQ ID NO: 2726669 - DNA, 25 bp, Homo sapien
atccactgtggcatctttctcatct

SEQ ID NO: 2726670 - DNA, 25 bp, Homo sapien
ttactcaatatccactgtggcatct

SEQ ID NO: 2726671 - DNA, 25 bp, Homo sapien
catctttctcatctaccttctggtc

SEQ ID NO: 2726672 - DNA, 25 bp, Homo sapien
cactgtggcatctttctcatctacc

SEQ ID NO: 2726673 - DNA, 25 bp, Homo sapien
cagaggcctgatgacgctggcttcc

SEQ ID NO: 2726674 - DNA, 25 bp, Homo sapien
cagcggtgatacctgaaggcccttc

SEQ ID NO: 2726675 - DNA, 25 bp, Homo sapien
tataatgtagtgattcagaggcctg

SEQ ID NO: 2726676 - DNA, 25 bp, Homo sapien
tttggtaaaatgtgcccgagcccag

SEQ ID NO: 2726677 - DNA, 25 bp, Homo sapien
ctgtcccgaaaagcccagatttaat

SEQ ID NO: 2726678 - DNA, 25 bp, Homo sapien
ttcaatttattaggcatattagcaa

SEQ ID NO: 2726679 - DNA, 25 bp, Homo sapien
gctttcaatttattaggcatattag

SEQ ID NO: 2726680 - DNA, 25 bp, Homo sapien
ctttcaatttattaggcatattagc

SEQ ID NO: 2726681 - DNA, 25 bp, Homo sapien
cattataaaaagattagtcctagga

SEQ ID NO: 2726682 - DNA, 25 bp, Homo sapien
gccattctagggagttctaactgga

SEQ ID NO: 2726683 - DNA, 25 bp, Homo sapien
caaaccagctctgcttgaagagtaa

SEQ ID NO: 2726684 - DNA, 25 bp, Homo sapien
tatccaattactttgacatgtggcc

SEQ ID NO: 2726685 - DNA, 25 bp, Homo sapien
gctttgcaaatggagaggtgttcga

SEQ ID NO: 2726686 - DNA, 25 bp, Homo sapien
gtgtgttccagtaggtcaagttgaa

SEQ ID NO: 2726687 - DNA, 25 bp, Homo sapien
gtcaagttgaagacaccctttctaa

SEQ ID NO: 2726688 - DNA, 25 bp, Homo sapien
tttgcaaatggagaggtgttcgaag

SEQ ID NO: 2726689 - DNA, 25 bp, Homo sapien
ccattttggtcagcgtatgtgcagg

SEQ ID NO: 2726690 - DNA, 25 bp, Homo sapien
tagtatgcaacttatggaatccgac

SEQ ID NO: 2726691 - DNA, 25 bp, Homo sapien
tatcgaattgtgaaggctagtatgc

SEQ ID NO: 2726692 - DNA, 25 bp, Homo sapien
gaatccgacactgtgctgagccatg

SEQ ID NO: 2726693 - DNA, 25 bp, Homo sapien
ttaaaatattacaggcggccccatg

SEQ ID NO: 2726694 - DNA, 25 bp, Homo sapien
tattggaggcggttttccaacacca

SEQ ID NO: 2726695 - DNA, 25 bp, Homo sapien
taaacctcttacagctggagcacca

SEQ ID NO: 2726696 - DNA, 25 bp, Homo sapien
taataccagatgtgacgctggtgcc

SEQ ID NO: 2726697 - DNA, 25 bp, Homo sapien
tctcctccctgtgggtactctgtgg

SEQ ID NO: 2726698 - DNA, 25 bp, Homo sapien
attagagatctcctccctgtgggta

SEQ ID NO: 2726699 - DNA, 25 bp, Homo sapien
gagatctcctccctgtgggtactct

SEQ ID NO: 2726700 - DNA, 25 bp, Homo sapien
cctccctgtgggtactctgtggggc

SEQ ID NO: 2726701 - DNA, 25 bp, Homo sapien
gcatccctgagcctgaagtcgtagc

SEQ ID NO: 2726702 - DNA, 25 bp, Homo sapien
cctgaagtcgtagctcctaatggag

SEQ ID NO: 2726703 - DNA, 25 bp, Homo sapien
tcattttgccgctatggacacagcc

SEQ ID NO: 2726704 - DNA, 25 bp, Homo sapien
tttagcactggaagaccatattcag

SEQ ID NO: 2726705 - DNA, 25 bp, Homo sapien
ataactgtagagtttaattcttaca

SEQ ID NO: 2726706 - DNA, 25 bp, Homo sapien
agagtttaattcttacatctggcac

SEQ ID NO: 2726707 - DNA, 25 bp, Homo sapien
aactgtagagtttaattcttacatc

SEQ ID NO: 2726708 - DNA, 25 bp, Homo sapien
tgtagagtttaattcttacatctgg

SEQ ID NO: 2726709 - DNA, 25 bp, Homo sapien
cacatgctctggagagcccggtggc

SEQ ID NO: 2726710 - DNA, 25 bp, Homo sapien
caggtataggaaggcaccatgtcca

SEQ ID NO: 2726711 - DNA, 25 bp, Homo sapien
ggaagtccctttctacattcagctg

SEQ ID NO: 2726712 - DNA, 25 bp, Homo sapien
tgaggtgagtcttgcgtccacttta

SEQ ID NO: 2726713 - DNA, 25 bp, Homo sapien
gatgatgtatgcactgatggatttc

SEQ ID NO: 2726714 - DNA, 25 bp, Homo sapien
ggccctgatgatgtatgcactgatg

SEQ ID NO: 2726715 - DNA, 25 bp, Homo sapien
tgatgtatgcactgatggatttcag

SEQ ID NO: 2726716 - DNA, 25 bp, Homo sapien
cctgatgatgtatgcactgatggat

SEQ ID NO: 2726717 - DNA, 25 bp, Homo sapien
gcccacccgtagctctggatgcatg

SEQ ID NO: 2726718 - DNA, 25 bp, Homo sapien
gatgcatggcaaaagtagtaactcc

SEQ ID NO: 2726719 - DNA, 25 bp, Homo sapien
gttgtttaaaatcgacactccctgc

SEQ ID NO: 2726720 - DNA, 25 bp, Homo sapien
tcgtagaagttaatctctgtactgc

SEQ ID NO: 2726721 - DNA, 25 bp, Homo sapien
cacattgagaacgattgaatcagtg

SEQ ID NO: 2726722 - DNA, 25 bp, Homo sapien
gcagccacattgagaacgattgaat

SEQ ID NO: 2726723 - DNA, 25 bp, Homo sapien
cattgagaacgattgaatcagtgac

SEQ ID NO: 2726724 - DNA, 25 bp, Homo sapien
gccacattgagaacgattgaatcag

SEQ ID NO: 2726725 - DNA, 25 bp, Homo sapien
ttctctggaaaactcattcttggag

SEQ ID NO: 2726726 - DNA, 25 bp, Homo sapien
aaactcattcttggagagaactttc

SEQ ID NO: 2726727 - DNA, 25 bp, Homo sapien
tttgtgtaatagttcagccttttag

SEQ ID NO: 2726728 - DNA, 25 bp, Homo sapien
ttgtgtaatagttcagccttttaga

SEQ ID NO: 2726729 - DNA, 25 bp, Homo sapien
tcaaagtcccactgaggatttgtga

SEQ ID NO: 2726730 - DNA, 25 bp, Homo sapien
tagctgcggagaaaccagacatcaa

SEQ ID NO: 2726731 - DNA, 25 bp, Homo sapien
ttagctgcggagaaaccagacatca

SEQ ID NO: 2726732 - DNA, 25 bp, Homo sapien
agctgcggagaaaccagacatcaaa

SEQ ID NO: 2726733 - DNA, 25 bp, Homo sapien
catattccgtcttgtatggatttgc

SEQ ID NO: 2726734 - DNA, 25 bp, Homo sapien
ttctctgtgactctctcctttgttg

SEQ ID NO: 2726735 - DNA, 25 bp, Homo sapien
cttctctgtgactctctcctttgtt

SEQ ID NO: 2726736 - DNA, 25 bp, Homo sapien
ccttctctgtgactctctcctttgt

SEQ ID NO: 2726737 - DNA, 25 bp, Homo sapien
tctctgtgactctctcctttgttga

SEQ ID NO: 2726738 - DNA, 25 bp, Homo sapien
aagggcctttgctaacacccactgg

SEQ ID NO: 2726739 - DNA, 25 bp, Homo sapien
gctttgaagcttgcgcctcgctctg

SEQ ID NO: 2726740 - DNA, 25 bp, Homo sapien
tccagtgaagagacggctttgaagc

SEQ ID NO: 2726741 - DNA, 25 bp, Homo sapien
cattgttctgcgtgtaaagggcctt

SEQ ID NO: 2726742 - DNA, 25 bp, Homo sapien
ctgacatctcgggattcctcagtct

SEQ ID NO: 2726743 - DNA, 25 bp, Homo sapien
gagcacctggctattctgcgcttgg

SEQ ID NO: 2726744 - DNA, 25 bp, Homo sapien
tattctgcgcttggctgacatctcg

SEQ ID NO: 2726745 - DNA, 25 bp, Homo sapien
gcagcgcctcgagcacctggctatt

SEQ ID NO: 2726746 - DNA, 25 bp, Homo sapien
gcatggcctggacaagtgaagcctg

SEQ ID NO: 2726747 - DNA, 25 bp, Homo sapien
tgacatgtgggtgctctcctccgga

SEQ ID NO: 2726748 - DNA, 25 bp, Homo sapien
agtctctgaaaaagccaggcgtcag

SEQ ID NO: 2726749 - DNA, 25 bp, Homo sapien
agagatgacagagggagtctctgaa

SEQ ID NO: 2726750 - DNA, 25 bp, Homo sapien
gtggagtcttccgaggagccaccca

SEQ ID NO: 2726751 - DNA, 25 bp, Homo sapien
ccagggcctctaggacaagggtgtc

SEQ ID NO: 2726752 - DNA, 25 bp, Homo sapien
ggttgtggagtcttccgaggagcca

SEQ ID NO: 2726753 - DNA, 25 bp, Homo sapien
cagggcctctaggacaagggtgtct

SEQ ID NO: 2726754 - DNA, 25 bp, Homo sapien
tgtttttctttagggtcatgactct

SEQ ID NO: 2726755 - DNA, 25 bp, Homo sapien
ctttcatcacttaatcattgagtac

SEQ ID NO: 2726756 - DNA, 25 bp, Homo sapien
tcaggagaagaaccttcttgatact

SEQ ID NO: 2726757 - DNA, 25 bp, Homo sapien
taccaacgaacacaattaaaagcac

SEQ ID NO: 2726758 - DNA, 25 bp, Homo sapien
tctgacagtagattacccaaggttt

SEQ ID NO: 2726759 - DNA, 25 bp, Homo sapien
agccacaaggccatcgagctcaaga

SEQ ID NO: 2726760 - DNA, 25 bp, Homo sapien
tactccaagccatgagccacaaggc

SEQ ID NO: 2726761 - DNA, 25 bp, Homo sapien
ctcaagaggaatgactgagcagtcc

SEQ ID NO: 2726762 - DNA, 25 bp, Homo sapien
tccacttttgcatgggtcttcccgt

SEQ ID NO: 2726763 - DNA, 25 bp, Homo sapien
tctggagtactgctgccctgcaatt

SEQ ID NO: 2726764 - DNA, 25 bp, Homo sapien
ctccataaatccacactgtcctcat

SEQ ID NO: 2726765 - DNA, 25 bp, Homo sapien
tctccttcgaggtggcatccttcaa

SEQ ID NO: 2726766 - DNA, 25 bp, Homo sapien
aacgggcacacctgaagtggatggc

SEQ ID NO: 2726767 - DNA, 25 bp, Homo sapien
atctccttcgaggtggcatccttca

SEQ ID NO: 2726768 - DNA, 25 bp, Homo sapien
ccttcaacgggcacacctgaagtgg

SEQ ID NO: 2726769 - DNA, 25 bp, Homo sapien
gatgggctgctctaggtgcagcaca

SEQ ID NO: 2726770 - DNA, 25 bp, Homo sapien
cagcacacggagcttgagttggcca

SEQ ID NO: 2726771 - DNA, 25 bp, Homo sapien
agttggccaggcttgcgaaatggta

SEQ ID NO: 2726772 - DNA, 25 bp, Homo sapien
ccccagatgggatgtgagagcgggt

SEQ ID NO: 2726773 - DNA, 25 bp, Homo sapien
ggctgctaaaccctctttgactcag

SEQ ID NO: 2726774 - DNA, 25 bp, Homo sapien
tgatactctggcaactgagcagctc

SEQ ID NO: 2726775 - DNA, 25 bp, Homo sapien
tctttgactcagcagtctggcagtg

SEQ ID NO: 2726776 - DNA, 25 bp, Homo sapien
tcctctcacctgtctgtctatgaaa

SEQ ID NO: 2726777 - DNA, 25 bp, Homo sapien
tcacgcctgatttctcggcatggaa

SEQ ID NO: 2726778 - DNA, 25 bp, Homo sapien
gacgataggactcttgcgctcacgc

SEQ ID NO: 2726779 - DNA, 25 bp, Homo sapien
catgtttcttgagtccccatgtctc

SEQ ID NO: 2726780 - DNA, 25 bp, Homo sapien
gaaatgtgcccttagctgtgaacag

SEQ ID NO: 2726781 - DNA, 25 bp, Homo sapien
tgccttgctcctcagcggctctggg

SEQ ID NO: 2726782 - DNA, 25 bp, Homo sapien
ctcagcggctctgggagactctcga

SEQ ID NO: 2726783 - DNA, 25 bp, Homo sapien
aggctgtctttcaggcgatgccgct

SEQ ID NO: 2726784 - DNA, 25 bp, Homo sapien
gctcattgccatcatgaagccattc

SEQ ID NO: 2726785 - DNA, 25 bp, Homo sapien
caaagcctgagtgttcaggatcttc

SEQ ID NO: 2726786 - DNA, 25 bp, Homo sapien
tcagtgtgttggcattgtacctagt

SEQ ID NO: 2726787 - DNA, 25 bp, Homo sapien
cacactcatgcaattcctaaaaaag

SEQ ID NO: 2726788 - DNA, 25 bp, Homo sapien
gtacctagttatatgcatgtacaca

SEQ ID NO: 2726789 - DNA, 25 bp, Homo sapien
ggcaccagacaggtaagcccttcaa

SEQ ID NO: 2726790 - DNA, 25 bp, Homo sapien
ggcaaagaagatgggttgaagataa

SEQ ID NO: 2726791 - DNA, 25 bp, Homo sapien
agatgggttgaagataacagaagag

SEQ ID NO: 2726792 - DNA, 25 bp, Homo sapien
gagcctaggagtttagggcaaagaa

SEQ ID NO: 2726793 - DNA, 25 bp, Homo sapien
catacatgaggtccataggtcagga

SEQ ID NO: 2726794 - DNA, 25 bp, Homo sapien
tctggagtaggttcatggccgagtc

SEQ ID NO: 2726795 - DNA, 25 bp, Homo sapien
taccaccccgcttctggaggatgtg

SEQ ID NO: 2726796 - DNA, 25 bp, Homo sapien
gaaaagtttgcctcctgaagttaga

SEQ ID NO: 2726797 - DNA, 25 bp, Homo sapien
caagctgaaccaatgtctcctcttt

SEQ ID NO: 2726798 - DNA, 25 bp, Homo sapien
gagactttgggagcggcagttgttc

SEQ ID NO: 2726799 - DNA, 25 bp, Homo sapien
gggagcggcagttgttctctaatcc

SEQ ID NO: 2726800 - DNA, 25 bp, Homo sapien
tggccctgtggggatactgtgtaca

SEQ ID NO: 2726801 - DNA, 25 bp, Homo sapien
ccctgtggggatactgtgtacatca

SEQ ID NO: 2726802 - DNA, 25 bp, Homo sapien
gtttctggcacatcacatctacaga

SEQ ID NO: 2726803 - DNA, 25 bp, Homo sapien
ttctggcacatcacatctacagaat

SEQ ID NO: 2726804 - DNA, 25 bp, Homo sapien
tcttctctggacccaacagatttgg

SEQ ID NO: 2726805 - DNA, 25 bp, Homo sapien
tggcacatcacatctacagaatcac

SEQ ID NO: 2726806 - DNA, 25 bp, Homo sapien
gttcttgacccaacttcttgaaagc

SEQ ID NO: 2726807 - DNA, 25 bp, Homo sapien
atgctcctctttcagtccttgttct

SEQ ID NO: 2726808 - DNA, 25 bp, Homo sapien
gatgctcctctttcagtccttgttc

SEQ ID NO: 2726809 - DNA, 25 bp, Homo sapien
cttgttcttgacccaacttcttgaa

SEQ ID NO: 2726810 - DNA, 25 bp, Homo sapien
cttagttcacaatgaatggacttgg

SEQ ID NO: 2726811 - DNA, 25 bp, Homo sapien
ctgtatatcataatcctgcacggtg

SEQ ID NO: 2726812 - DNA, 25 bp, Homo sapien
ccattgtgtggttgtgtcatgattc

SEQ ID NO: 2726813 - DNA, 25 bp, Homo sapien
caataactctagatcttcagcagtc

SEQ ID NO: 2726814 - DNA, 25 bp, Homo sapien
tgtagattggtccagctgttatgta

SEQ ID NO: 2726815 - DNA, 25 bp, Homo sapien
catttggatggcaactatcaagtca

SEQ ID NO: 2726816 - DNA, 25 bp, Homo sapien
tatcaagtcacaagataacaaatgt

SEQ ID NO: 2726817 - DNA, 25 bp, Homo sapien
tgttgctgggaatgtagattggtcc

SEQ ID NO: 2726818 - DNA, 25 bp, Homo sapien
gaaatagattatcgtggtactcact

SEQ ID NO: 2726819 - DNA, 25 bp, Homo sapien
taacaggattcaagactctacgata

SEQ ID NO: 2726820 - DNA, 25 bp, Homo sapien
caaggagcctctcattccagattta

SEQ ID NO: 2726821 - DNA, 25 bp, Homo sapien
cactttgtagtcttgttgtgaagag

SEQ ID NO: 2726822 - DNA, 25 bp, Homo sapien
ggcctcacagattccctaggtgtat

SEQ ID NO: 2726823 - DNA, 25 bp, Homo sapien
ttcctccaaggcaagggcgatgcgg

SEQ ID NO: 2726824 - DNA, 25 bp, Homo sapien
ttccctctatttggagcttcctcca

SEQ ID NO: 2726825 - DNA, 25 bp, Homo sapien
ggtgtaactggatcccacgaaggag

SEQ ID NO: 2726826 - DNA, 25 bp, Homo sapien
ccacatcagtggctgcggtaacact

SEQ ID NO: 2726827 - DNA, 25 bp, Homo sapien
taacacttgccacagatgtccggag

SEQ ID NO: 2726828 - DNA, 25 bp, Homo sapien
cggcagtctccttaagcaggtggac

SEQ ID NO: 2726829 - DNA, 25 bp, Homo sapien
tatcatgaggcagctgtaaatggcc

SEQ ID NO: 2726830 - DNA, 25 bp, Homo sapien
ctgtgaaccatggaggagttcttct

SEQ ID NO: 2726831 - DNA, 25 bp, Homo sapien
tgtgaaccatggaggagttcttctc

SEQ ID NO: 2726832 - DNA, 25 bp, Homo sapien
gtgaaccatggaggagttcttctca

SEQ ID NO: 2726833 - DNA, 25 bp, Homo sapien
tgaaccatggaggagttcttctcat

SEQ ID NO: 2726834 - DNA, 25 bp, Homo sapien
ggcacaacaggaatgcattgtcgtc

SEQ ID NO: 2726835 - DNA, 25 bp, Homo sapien
gaaaacctttaagctgtgcaatccc

SEQ ID NO: 2726836 - DNA, 25 bp, Homo sapien
tatgaaaccttagcatgaccccgca

SEQ ID NO: 2726837 - DNA, 25 bp, Homo sapien
tgctgtcacaagtggtctgaaaacc

SEQ ID NO: 2726838 - DNA, 25 bp, Homo sapien
ctcgctgcctttaacaagctttctg

SEQ ID NO: 2726839 - DNA, 25 bp, Homo sapien
tcgctgcctttaacaagctttctgt

SEQ ID NO: 2726840 - DNA, 25 bp, Homo sapien
gcctcgctgcctttaacaagctttc

SEQ ID NO: 2726841 - DNA, 25 bp, Homo sapien
ggcctcgctgcctttaacaagcttt

SEQ ID NO: 2726842 - DNA, 25 bp, Homo sapien
ttctgatgtggttcatccggtgccg

SEQ ID NO: 2726843 - DNA, 25 bp, Homo sapien
ttctttggccctcataatccaggtc

SEQ ID NO: 2726844 - DNA, 25 bp, Homo sapien
ggtgccgatagctcaacctctttga

SEQ ID NO: 2726845 - DNA, 25 bp, Homo sapien
gatgtccagaccaaatgtggcccac

SEQ ID NO: 2726846 - DNA, 25 bp, Homo sapien
gctttggacactgcaacgtccttac

SEQ ID NO: 2726847 - DNA, 25 bp, Homo sapien
aaactctccagcatttgggtccctg

SEQ ID NO: 2726848 - DNA, 25 bp, Homo sapien
caaaggtgcccaacatggtggcttc

SEQ ID NO: 2726849 - DNA, 25 bp, Homo sapien
tatgtttggtttgtgcaaaggtgcc

SEQ ID NO: 2726850 - DNA, 25 bp, Homo sapien
cccacagtggcatgggaatagcagt

SEQ ID NO: 2726851 - DNA, 25 bp, Homo sapien
ggtgacagggccttcacattcctta

SEQ ID NO: 2726852 - DNA, 25 bp, Homo sapien
agagatcttgccctcgttgccccac

SEQ ID NO: 2726853 - DNA, 25 bp, Homo sapien
caaggatgcctttgggagggtgaca

SEQ ID NO: 2726854 - DNA, 25 bp, Homo sapien
aatgtgttcaggcaggctagatcca

SEQ ID NO: 2726855 - DNA, 25 bp, Homo sapien
aatgatgataaaatgtgttcaggca

SEQ ID NO: 2726856 - DNA, 25 bp, Homo sapien
ccatgggtggctatgtcaaaatgat

SEQ ID NO: 2726857 - DNA, 25 bp, Homo sapien
tgggtggctatgtcaaaatgatgat

SEQ ID NO: 2726858 - DNA, 25 bp, Homo sapien
ttggccagtgccagaccaaggacag

SEQ ID NO: 2726859 - DNA, 25 bp, Homo sapien
tggccagtgccagaccaaggacagg

SEQ ID NO: 2726860 - DNA, 25 bp, Homo sapien
ggccagtgccagaccaaggacagga

SEQ ID NO: 2726861 - DNA, 25 bp, Homo sapien
tttggccagtgccagaccaaggaca

SEQ ID NO: 2726862 - DNA, 25 bp, Homo sapien
ggttctgatccttgctgcttgccat

SEQ ID NO: 2726863 - DNA, 25 bp, Homo sapien
tagtggttgccagttcctgggttct

SEQ ID NO: 2726864 - DNA, 25 bp, Homo sapien
ttgccagttcctgggttctgatcct

SEQ ID NO: 2726865 - DNA, 25 bp, Homo sapien
cctgggttctgatccttgctgcttg

SEQ ID NO: 2726866 - DNA, 25 bp, Homo sapien
gaggctttgcacacgtctgcttgca

SEQ ID NO: 2726867 - DNA, 25 bp, Homo sapien
agagcactgggtgataactgattat

SEQ ID NO: 2726868 - DNA, 25 bp, Homo sapien
aactgattatcaggccggtccagct

SEQ ID NO: 2726869 - DNA, 25 bp, Homo sapien
gataactgattatcaggccggtcca

SEQ ID NO: 2726870 - DNA, 25 bp, Homo sapien
ccttgggcaatgtgatttccagaag

SEQ ID NO: 2726871 - DNA, 25 bp, Homo sapien
ttgggcaatgtgatttccagaagga

SEQ ID NO: 2726872 - DNA, 25 bp, Homo sapien
ccatctgtgagcagactaaatatgt

SEQ ID NO: 2726873 - DNA, 25 bp, Homo sapien
cccatgccatctgtgagcagactaa

SEQ ID NO: 2726874 - DNA, 25 bp, Homo sapien
ctgagacactaattcttttcttgac

SEQ ID NO: 2726875 - DNA, 25 bp, Homo sapien
tcttttcttgacatgaaaatggcgc

SEQ ID NO: 2726876 - DNA, 25 bp, Homo sapien
tgtgatcgtacttgaggcttttctg

SEQ ID NO: 2726877 - DNA, 25 bp, Homo sapien
aaatggcgcgcatgtttctttcaaa

SEQ ID NO: 2726878 - DNA, 25 bp, Homo sapien
tgaaattggatatggaagggctctg

SEQ ID NO: 2726879 - DNA, 25 bp, Homo sapien
tggaagggctctgctgctgctgctg

SEQ ID NO: 2726880 - DNA, 25 bp, Homo sapien
ctgaaattggatatggaagggctct

SEQ ID NO: 2726881 - DNA, 25 bp, Homo sapien
gaaattggatatggaagggctctgc

SEQ ID NO: 2726882 - DNA, 25 bp, Homo sapien
gatcgtgaagtcctgatgactccca

SEQ ID NO: 2726883 - DNA, 25 bp, Homo sapien
gaaagtgtactctggcaagttgcta

SEQ ID NO: 2726884 - DNA, 25 bp, Homo sapien
tacagcagttttaagggcagtgcct

SEQ ID NO: 2726885 - DNA, 25 bp, Homo sapien
tctgcattggagagtaaagcccttg

SEQ ID NO: 2726886 - DNA, 25 bp, Homo sapien
gttgcagacaatcaccaaaataaac

SEQ ID NO: 2726887 - DNA, 25 bp, Homo sapien
gcctgcaagttgcagacaatcacca

SEQ ID NO: 2726888 - DNA, 25 bp, Homo sapien
gcaagttgcagacaatcaccaaaat

SEQ ID NO: 2726889 - DNA, 25 bp, Homo sapien
ctgcaagttgcagacaatcaccaaa

SEQ ID NO: 2726890 - DNA, 25 bp, Homo sapien
gcacctacattgtctttatgccaac

SEQ ID NO: 2726891 - DNA, 25 bp, Homo sapien
ctcttttgcacctacattgtcttta

SEQ ID NO: 2726892 - DNA, 25 bp, Homo sapien
tatgccaacttgtcatctgcagtga

SEQ ID NO: 2726893 - DNA, 25 bp, Homo sapien
ctttatgccaacttgtcatctgcag

SEQ ID NO: 2726894 - DNA, 25 bp, Homo sapien
ggaaagtatgtgagggtagattttc

SEQ ID NO: 2726895 - DNA, 25 bp, Homo sapien
tatgggaaagtatgtgagggtagat

SEQ ID NO: 2726896 - DNA, 25 bp, Homo sapien
tttaattatgggaaagtatgtgagg

SEQ ID NO: 2726897 - DNA, 25 bp, Homo sapien
aattatgggaaagtatgtgagggta

SEQ ID NO: 2726898 - DNA, 25 bp, Homo sapien
tcagtctcgtagttcatgctacttt

SEQ ID NO: 2726899 - DNA, 25 bp, Homo sapien
tctcgtagttcatgctactttttct

SEQ ID NO: 2726900 - DNA, 25 bp, Homo sapien
cactgctgtttcagtctcgtagttc

SEQ ID NO: 2726901 - DNA, 25 bp, Homo sapien
tgtttcagtctcgtagttcatgcta

SEQ ID NO: 2726902 - DNA, 25 bp, Homo sapien
gcggtaacagcaaagttctggccac

SEQ ID NO: 2726903 - DNA, 25 bp, Homo sapien
aggagcggtaacagcaaagttctgg

SEQ ID NO: 2726904 - DNA, 25 bp, Homo sapien
gtaacagcaaagttctggccaccac

SEQ ID NO: 2726905 - DNA, 25 bp, Homo sapien
gagcggtaacagcaaagttctggcc

SEQ ID NO: 2726906 - DNA, 25 bp, Homo sapien
gaggtcaccaagtttaacatccatg

SEQ ID NO: 2726907 - DNA, 25 bp, Homo sapien
taatgaggcattgaggcattgggct

SEQ ID NO: 2726908 - DNA, 25 bp, Homo sapien
ttgacatgtgatccagactgaccca

SEQ ID NO: 2726909 - DNA, 25 bp, Homo sapien
gactgacccacgacgggactattgt

SEQ ID NO: 2726910 - DNA, 25 bp, Homo sapien
cctgaaggaagacgagagaagctga

SEQ ID NO: 2726911 - DNA, 25 bp, Homo sapien
gggcagtgacccaacacctgagtga

SEQ ID NO: 2726912 - DNA, 25 bp, Homo sapien
tacccttgagtgactagtgcactgc

SEQ ID NO: 2726913 - DNA, 25 bp, Homo sapien
tcactgtgtctctgggctgaatcca

SEQ ID NO: 2726914 - DNA, 25 bp, Homo sapien
acagtctccacctcatggttggagt

SEQ ID NO: 2726915 - DNA, 25 bp, Homo sapien
ttggagctattgacagtctccacct

SEQ ID NO: 2726916 - DNA, 25 bp, Homo sapien
tctccacctcatggttggagtgagg

SEQ ID NO: 2726917 - DNA, 25 bp, Homo sapien
ctgagttggagctattgacagtctc

SEQ ID NO: 2726918 - DNA, 25 bp, Homo sapien
agaataggacattctactttgatat

SEQ ID NO: 2726919 - DNA, 25 bp, Homo sapien
tggcgcaggttgcaccagacaccct

SEQ ID NO: 2726920 - DNA, 25 bp, Homo sapien
aaggcccagggatacttgacagctg

SEQ ID NO: 2726921 - DNA, 25 bp, Homo sapien
acaccctctactgaaaagcaggagg

SEQ ID NO: 2726922 - DNA, 25 bp, Homo sapien
caggaggcccctggtatctctatac

SEQ ID NO: 2726923 - DNA, 25 bp, Homo sapien
gtgatactgcctggtgcccatcagt

SEQ ID NO: 2726924 - DNA, 25 bp, Homo sapien
tatttttagtgatactgcctggtgc

SEQ ID NO: 2726925 - DNA, 25 bp, Homo sapien
gatgctctccaccaaggggaaaaaa

SEQ ID NO: 2726926 - DNA, 25 bp, Homo sapien
tcagtaatgttgtagaagatgctct

SEQ ID NO: 2726927 - DNA, 25 bp, Homo sapien
aatttttctatggtgcgtcttggca

SEQ ID NO: 2726928 - DNA, 25 bp, Homo sapien
cactcaattttacggtggaacccat

SEQ ID NO: 2726929 - DNA, 25 bp, Homo sapien
ccatctgctagtgacaaattttctt

SEQ ID NO: 2726930 - DNA, 25 bp, Homo sapien
gattatacaagtgtttgatccctgg

SEQ ID NO: 2726931 - DNA, 25 bp, Homo sapien
aggtctgagcagctcatgttcactt

SEQ ID NO: 2726932 - DNA, 25 bp, Homo sapien
tttgtgtccccatggcatctggcac

SEQ ID NO: 2726933 - DNA, 25 bp, Homo sapien
tccaaagacctgcatgactgtgtgt

SEQ ID NO: 2726934 - DNA, 25 bp, Homo sapien
ggcacagcacttttcactccaaaga

SEQ ID NO: 2726935 - DNA, 25 bp, Homo sapien
caatgactgaagtaaaccagaaact

SEQ ID NO: 2726936 - DNA, 25 bp, Homo sapien
tgactgaagtaaaccagaaactgga

SEQ ID NO: 2726937 - DNA, 25 bp, Homo sapien
tgtgctttttgggcaatgactgaag

SEQ ID NO: 2726938 - DNA, 25 bp, Homo sapien
gtgctttttgggcaatgactgaagt

SEQ ID NO: 2726939 - DNA, 25 bp, Homo sapien
agcttctttcaggtgtgcccttgtg

SEQ ID NO: 2726940 - DNA, 25 bp, Homo sapien
gcttctttcaggtgtgcccttgtga

SEQ ID NO: 2726941 - DNA, 25 bp, Homo sapien
acagacatctcagggtgaaaacaga

SEQ ID NO: 2726942 - DNA, 25 bp, Homo sapien
cacagacatctcagggtgaaaacag

SEQ ID NO: 2726943 - DNA, 25 bp, Homo sapien
aaacagagaccaaaagtacctcttg

SEQ ID NO: 2726944 - DNA, 25 bp, Homo sapien
agtacctcttgcaaaatagtcatta

SEQ ID NO: 2726945 - DNA, 25 bp, Homo sapien
ccagattctgttgccctgagcttca

SEQ ID NO: 2726946 - DNA, 25 bp, Homo sapien
gggccagattctgttgccctgagct

SEQ ID NO: 2726947 - DNA, 25 bp, Homo sapien
gtaggaaaggcctgcagatattacc

SEQ ID NO: 2726948 - DNA, 25 bp, Homo sapien
caggagcagctctctaggctttggg

SEQ ID NO: 2726949 - DNA, 25 bp, Homo sapien
caaggtccatatggcttccttatgg

SEQ ID NO: 2726950 - DNA, 25 bp, Homo sapien
ggacgtggaagtcaccagccctgct

SEQ ID NO: 2726951 - DNA, 25 bp, Homo sapien
gagagagagcaaggtccatatggct

SEQ ID NO: 2726952 - DNA, 25 bp, Homo sapien
gactttgttgcctgagcggtgctga

SEQ ID NO: 2726953 - DNA, 25 bp, Homo sapien
tgggcttggtggtggagcaggccca

SEQ ID NO: 2726954 - DNA, 25 bp, Homo sapien
tggtggagcaggcccagaagtactt

SEQ ID NO: 2726955 - DNA, 25 bp, Homo sapien
tggtggtggagcaggcccagaagta

SEQ ID NO: 2726956 - DNA, 25 bp, Homo sapien
tggagcaggcccagaagtactttag

SEQ ID NO: 2726957 - DNA, 25 bp, Homo sapien
tttttactcttccagtctgggtctg

SEQ ID NO: 2726958 - DNA, 25 bp, Homo sapien
ctttttactcttccagtctgggtct

SEQ ID NO: 2726959 - DNA, 25 bp, Homo sapien
ttttactcttccagtctgggtctgc

SEQ ID NO: 2726960 - DNA, 25 bp, Homo sapien
cttgcatgaccagtgaggactagtg

SEQ ID NO: 2726961 - DNA, 25 bp, Homo sapien
tctgaacttacttcaggtaaattcc

SEQ ID NO: 2726962 - DNA, 25 bp, Homo sapien
tccatggattgtgggtctgaactta

SEQ ID NO: 2726963 - DNA, 25 bp, Homo sapien
gtggtagtccatcgttgccttgcaa

SEQ ID NO: 2726964 - DNA, 25 bp, Homo sapien
ttaggccctgacatagagacttgga

SEQ ID NO: 2726965 - DNA, 25 bp, Homo sapien
cagactgtgagtagagttgccttgt

SEQ ID NO: 2726966 - DNA, 25 bp, Homo sapien
agcagggctttgacatgacgtctac

SEQ ID NO: 2726967 - DNA, 25 bp, Homo sapien
gttgccttgtgttctctaccttgtg

SEQ ID NO: 2726968 - DNA, 25 bp, Homo sapien
cacacagtgtgacttcccggatcag

SEQ ID NO: 2726969 - DNA, 25 bp, Homo sapien
cttgtcagtgaggttgatacctctg

SEQ ID NO: 2726970 - DNA, 25 bp, Homo sapien
tcagcagggctattgattcatcagg

SEQ ID NO: 2726971 - DNA, 25 bp, Homo sapien
tctgggagccctgtttaccctcaca

SEQ ID NO: 2726972 - DNA, 25 bp, Homo sapien
cagtagacggagaaagaattcaggc

SEQ ID NO: 2726973 - DNA, 25 bp, Homo sapien
gtcatcatccctggcgcttgctggc

SEQ ID NO: 2726974 - DNA, 25 bp, Homo sapien
gacttggagcttttgcactagataa

SEQ ID NO: 2726975 - DNA, 25 bp, Homo sapien
tggcaggaagcattgtccctctccc

SEQ ID NO: 2726976 - DNA, 25 bp, Homo sapien
gacttcagttcaaatgcaatagcca

SEQ ID NO: 2726977 - DNA, 25 bp, Homo sapien
tgcaatagccagagggttgagaaat

SEQ ID NO: 2726978 - DNA, 25 bp, Homo sapien
cagttcaaatgcaatagccagaggg

SEQ ID NO: 2726979 - DNA, 25 bp, Homo sapien
ttcaaatgcaatagccagagggttg

SEQ ID NO: 2726980 - DNA, 25 bp, Homo sapien
ctgggattcagtttgaaacgccaat

SEQ ID NO: 2726981 - DNA, 25 bp, Homo sapien
ccaataagtttggatgggatcgcaa

SEQ ID NO: 2726982 - DNA, 25 bp, Homo sapien
tgggatcgcaaagctgtggttggga

SEQ ID NO: 2726983 - DNA, 25 bp, Homo sapien
gtggttgggatgtggaactgctcgc

SEQ ID NO: 2726984 - DNA, 25 bp, Homo sapien
aagcttctgagtctgtcaaagccat

SEQ ID NO: 2726985 - DNA, 25 bp, Homo sapien
ttactttattccacacctctttctc

SEQ ID NO: 2726986 - DNA, 25 bp, Homo sapien
cttcgtttggccactcttactttat

SEQ ID NO: 2726987 - DNA, 25 bp, Homo sapien
ccttccaagcttctgagtctgtcaa

SEQ ID NO: 2726988 - DNA, 25 bp, Homo sapien
tttaactgaagtacggcacacacag

SEQ ID NO: 2726989 - DNA, 25 bp, Homo sapien
gagcaattaacatccgagccacgca

SEQ ID NO: 2726990 - DNA, 25 bp, Homo sapien
taaagacccacatccggaaaagaga

SEQ ID NO: 2726991 - DNA, 25 bp, Homo sapien
gaactctgccctgcttacaagtgga

SEQ ID NO: 2726992 - DNA, 25 bp, Homo sapien
tcatgttcctttgttgacagatgcc

SEQ ID NO: 2726993 - DNA, 25 bp, Homo sapien
gaatgtcaagtcttgcccactggag

SEQ ID NO: 2726994 - DNA, 25 bp, Homo sapien
gccactcaaggaacactcagctatg

SEQ ID NO: 2726995 - DNA, 25 bp, Homo sapien
tatacttgggtgataaactgcttct

SEQ ID NO: 2726996 - DNA, 25 bp, Homo sapien
tgagcagacgtgagctgaagacacc

SEQ ID NO: 2726997 - DNA, 25 bp, Homo sapien
tgtagcagcgaatcacggtatccat

SEQ ID NO: 2726998 - DNA, 25 bp, Homo sapien
tgaagacaccggcatgtagcagcga

SEQ ID NO: 2726999 - DNA, 25 bp, Homo sapien
cgtgagctgaagacaccggcatgta

SEQ ID NO: 2727000 - DNA, 25 bp, Homo sapien
tgggaccagtggctatacagggcac

SEQ ID NO: 2727001 - DNA, 25 bp, Homo sapien
gctgggacaggatccccatcattgg

SEQ ID NO: 2727002 - DNA, 25 bp, Homo sapien
tcaggtggcttgcaagaatgagagt

SEQ ID NO: 2727003 - DNA, 25 bp, Homo sapien
cagggcactgtggtgtccagagcaa

SEQ ID NO: 2727004 - DNA, 25 bp, Homo sapien
tgaagtgtgcacatcccactctgtg

SEQ ID NO: 2727005 - DNA, 25 bp, Homo sapien
ccactctgtgcattggcattggaag

SEQ ID NO: 2727006 - DNA, 25 bp, Homo sapien
cattggcattggaagagggatacca

SEQ ID NO: 2727007 - DNA, 25 bp, Homo sapien
taccaagacgtgatgaaaggcagac

SEQ ID NO: 2727008 - DNA, 25 bp, Homo sapien
aaagagtagaacaactacttcaatc

SEQ ID NO: 2727009 - DNA, 25 bp, Homo sapien
tatggctgttgcaaggcctttttgt

SEQ ID NO: 2727010 - DNA, 25 bp, Homo sapien
gaggggactctgtttcaaggccaga

SEQ ID NO: 2727011 - DNA, 25 bp, Homo sapien
cggttgccacattccacggtgaggg

SEQ ID NO: 2727012 - DNA, 25 bp, Homo sapien
gctgaatgcaggtagtatggctgtt

SEQ ID NO: 2727013 - DNA, 25 bp, Homo sapien
ggtcaaatttagtctctttcaccat

SEQ ID NO: 2727014 - DNA, 25 bp, Homo sapien
agaggtgtggaccaatgagctctca

SEQ ID NO: 2727015 - DNA, 25 bp, Homo sapien
gagaggtgtggaccaatgagctctc

SEQ ID NO: 2727016 - DNA, 25 bp, Homo sapien
gcagagaggtgtggaccaatgagct

SEQ ID NO: 2727017 - DNA, 25 bp, Homo sapien
cagagaggtgtggaccaatgagctc

SEQ ID NO: 2727018 - DNA, 25 bp, Homo sapien
gggagtgtcgtgctgatttatgcac

SEQ ID NO: 2727019 - DNA, 25 bp, Homo sapien
gacagaggagcctcatggagataga

SEQ ID NO: 2727020 - DNA, 25 bp, Homo sapien
agatagatgagggagtgtcgtgctg

SEQ ID NO: 2727021 - DNA, 25 bp, Homo sapien
cagaggagcctcatggagatagatg

SEQ ID NO: 2727022 - DNA, 25 bp, Homo sapien
cgcaagtgactatcagctcactcct

SEQ ID NO: 2727023 - DNA, 25 bp, Homo sapien
tattgttgtgacaaacactgtcatg

SEQ ID NO: 2727024 - DNA, 25 bp, Homo sapien
tatttttcagcttcccgcaagtgac

SEQ ID NO: 2727025 - DNA, 25 bp, Homo sapien
tgtcatggcactgtcattgactgtc

SEQ ID NO: 2727026 - DNA, 25 bp, Homo sapien
tagcatttgttcatctgaaagagac

SEQ ID NO: 2727027 - DNA, 25 bp, Homo sapien
gaagcttactttctctagatgaaaa

SEQ ID NO: 2727028 - DNA, 25 bp, Homo sapien
tcctttgcaggctacctggtacttt

SEQ ID NO: 2727029 - DNA, 25 bp, Homo sapien
aaggaggctgaatatagggtcccaa

SEQ ID NO: 2727030 - DNA, 25 bp, Homo sapien
catcatcattgatcgctgtcaccag

SEQ ID NO: 2727031 - DNA, 25 bp, Homo sapien
tcatcattgatcgctgtcaccagca

SEQ ID NO: 2727032 - DNA, 25 bp, Homo sapien
cacatcatcattgatcgctgtcacc

SEQ ID NO: 2727033 - DNA, 25 bp, Homo sapien
atcatcattgatcgctgtcaccagc

SEQ ID NO: 2727034 - DNA, 25 bp, Homo sapien
tctctgcatgaccaagagccctcat

SEQ ID NO: 2727035 - DNA, 25 bp, Homo sapien
gggaaccatggagctacagtagtga

SEQ ID NO: 2727036 - DNA, 25 bp, Homo sapien
agtagtgataattctctgcatgacc

SEQ ID NO: 2727037 - DNA, 25 bp, Homo sapien
ttgaataacttcctcgggcaagaca

SEQ ID NO: 2727038 - DNA, 25 bp, Homo sapien
tgtgtctccaggctaccagatgcaa

SEQ ID NO: 2727039 - DNA, 25 bp, Homo sapien
tttgtttcagagagtgctgaagagg

SEQ ID NO: 2727040 - DNA, 25 bp, Homo sapien
tcttcgaggttaggatgaccacatc

SEQ ID NO: 2727041 - DNA, 25 bp, Homo sapien
ccagatgcaacactggcatcgtatt

SEQ ID NO: 2727042 - DNA, 25 bp, Homo sapien
ggaagattcagaagctcctggctgc

SEQ ID NO: 2727043 - DNA, 25 bp, Homo sapien
tgtgaaccagaaggaagattcagaa

SEQ ID NO: 2727044 - DNA, 25 bp, Homo sapien
cagaaggaagattcagaagctcctg

SEQ ID NO: 2727045 - DNA, 25 bp, Homo sapien
ctgtgaaccagaaggaagattcaga

SEQ ID NO: 2727046 - DNA, 25 bp, Homo sapien
gttgggtgctttatgctggtcctga

SEQ ID NO: 2727047 - DNA, 25 bp, Homo sapien
gctttatgctggtcctgatccttcc

SEQ ID NO: 2727048 - DNA, 25 bp, Homo sapien
ggtgctttatgctggtcctgatcct

SEQ ID NO: 2727049 - DNA, 25 bp, Homo sapien
tgggtgctttatgctggtcctgatc

SEQ ID NO: 2727050 - DNA, 25 bp, Homo sapien
gagaattcaacagccagatttctgc

SEQ ID NO: 2727051 - DNA, 25 bp, Homo sapien
ctttgtcacagggaggtattgcttt

SEQ ID NO: 2727052 - DNA, 25 bp, Homo sapien
ttgtcacagggaggtattgctttgc

SEQ ID NO: 2727053 - DNA, 25 bp, Homo sapien
gtcacagggaggtattgctttgcca

SEQ ID NO: 2727054 - DNA, 25 bp, Homo sapien
tgcctttgtcacagggaggtattgc

SEQ ID NO: 2727055 - DNA, 25 bp, Homo sapien
tagcttggccaagtccaacggtgac

SEQ ID NO: 2727056 - DNA, 25 bp, Homo sapien
agcgtgttccatccagctcagactg

SEQ ID NO: 2727057 - DNA, 25 bp, Homo sapien
ggagctccagcttattgacatttac

SEQ ID NO: 2727058 - DNA, 25 bp, Homo sapien
tgcccgacatgcagaagctgaagtt

SEQ ID NO: 2727059 - DNA, 25 bp, Homo sapien
tgatgtgcttcctgctcttcgtgca

SEQ ID NO: 2727060 - DNA, 25 bp, Homo sapien
gcatttaaccgtaattgagaagagc

SEQ ID NO: 2727061 - DNA, 25 bp, Homo sapien
aaccgtaattgagaagagctcttgc

SEQ ID NO: 2727062 - DNA, 25 bp, Homo sapien
cctgctcttcgtgcatttaaccgta

SEQ ID NO: 2727063 - DNA, 25 bp, Homo sapien
gtgtttttctattgtgtctttgctc

SEQ ID NO: 2727064 - DNA, 25 bp, Homo sapien
aaaacttgagattctgttcttatgt

SEQ ID NO: 2727065 - DNA, 25 bp, Homo sapien
acttgagattctgttcttatgtgtt

SEQ ID NO: 2727066 - DNA, 25 bp, Homo sapien
ctacttaaaacttgagattctgttc

SEQ ID NO: 2727067 - DNA, 25 bp, Homo sapien
taggttggattgttctctgcctgtc

SEQ ID NO: 2727068 - DNA, 25 bp, Homo sapien
aggttggattgttctctgcctgtcc

SEQ ID NO: 2727069 - DNA, 25 bp, Homo sapien
ttaggttggattgttctctgcctgt

SEQ ID NO: 2727070 - DNA, 25 bp, Homo sapien
caagggaggtgtgagagacggccat

SEQ ID NO: 2727071 - DNA, 25 bp, Homo sapien
tgggctctccaccttttcacatatg

SEQ ID NO: 2727072 - DNA, 25 bp, Homo sapien
gtgttcaattgctttcttaacttca

SEQ ID NO: 2727073 - DNA, 25 bp, Homo sapien
cttcagtttgggtaaccctgattca

SEQ ID NO: 2727074 - DNA, 25 bp, Homo sapien
tcacgttcctagagctcttctggca

SEQ ID NO: 2727075 - DNA, 25 bp, Homo sapien
gggcagaaacacctcacagatgctc

SEQ ID NO: 2727076 - DNA, 25 bp, Homo sapien
cctctctgctggataagtcctcatg

SEQ ID NO: 2727077 - DNA, 25 bp, Homo sapien
gataagtcctcatgcttcccctggc

SEQ ID NO: 2727078 - DNA, 25 bp, Homo sapien
gacaatgtttccattaggttggcca

SEQ ID NO: 2727079 - DNA, 25 bp, Homo sapien
agacactcatgtaactgctgcgttt

SEQ ID NO: 2727080 - DNA, 25 bp, Homo sapien
gggaaaaacgtgtgtgaggactggc

SEQ ID NO: 2727081 - DNA, 25 bp, Homo sapien
aggtaaagtgagtgacaatgtttcc

SEQ ID NO: 2727082 - DNA, 25 bp, Homo sapien
agcatgggcagacgtcccctctttt

SEQ ID NO: 2727083 - DNA, 25 bp, Homo sapien
agaagagaagcatgggcagacgtcc

SEQ ID NO: 2727084 - DNA, 25 bp, Homo sapien
gagaagcatgggcagacgtcccctc

SEQ ID NO: 2727085 - DNA, 25 bp, Homo sapien
gcagcggggtagtgaccacattaga

SEQ ID NO: 2727086 - DNA, 25 bp, Homo sapien
ggtagagcatctccactcattagat

SEQ ID NO: 2727087 - DNA, 25 bp, Homo sapien
gagcatctccactcattagatccag

SEQ ID NO: 2727088 - DNA, 25 bp, Homo sapien
catctccactcattagatccaggac

SEQ ID NO: 2727089 - DNA, 25 bp, Homo sapien
tagagcatctccactcattagatcc

SEQ ID NO: 2727090 - DNA, 25 bp, Homo sapien
tcagtgtctgcacagccgatattta

SEQ ID NO: 2727091 - DNA, 25 bp, Homo sapien
gtctgcacagccgatatttagccag

SEQ ID NO: 2727092 - DNA, 25 bp, Homo sapien
tttagccagacagttatctggaagg

SEQ ID NO: 2727093 - DNA, 25 bp, Homo sapien
cagccgatatttagccagacagtta

SEQ ID NO: 2727094 - DNA, 25 bp, Homo sapien
gattccagaatgtcagtcatctcca

SEQ ID NO: 2727095 - DNA, 25 bp, Homo sapien
ggattccagaatgtcagtcatctcc

SEQ ID NO: 2727096 - DNA, 25 bp, Homo sapien
tcaggattccagaatgtcagtcatc

SEQ ID NO: 2727097 - DNA, 25 bp, Homo sapien
tccagaatgtcagtcatctccacag

SEQ ID NO: 2727098 - DNA, 25 bp, Homo sapien
tccactgctttccgatccatctcct

SEQ ID NO: 2727099 - DNA, 25 bp, Homo sapien
caagtacagatagcaaggctggcat

SEQ ID NO: 2727100 - DNA, 25 bp, Homo sapien
tctccactgctttccgatccatctc

SEQ ID NO: 2727101 - DNA, 25 bp, Homo sapien
cctcatcaagtacagatagcaaggc

SEQ ID NO: 2727102 - DNA, 25 bp, Homo sapien
ctttttcataaatcaagtcaatgca

SEQ ID NO: 2727103 - DNA, 25 bp, Homo sapien
ataacctttttcataaatcaagtca

SEQ ID NO: 2727104 - DNA, 25 bp, Homo sapien
atgctttcataacctttttcataaa

SEQ ID NO: 2727105 - DNA, 25 bp, Homo sapien
acctttttcataaatcaagtcaatg

SEQ ID NO: 2727106 - DNA, 25 bp, Homo sapien
gcctgctcagatatggaccttgaac

SEQ ID NO: 2727107 - DNA, 25 bp, Homo sapien
gtgaagttaatctccaccaaggcag

SEQ ID NO: 2727108 - DNA, 25 bp, Homo sapien
tagagtgaaccctaggcacgtgtca

SEQ ID NO: 2727109 - DNA, 25 bp, Homo sapien
caaccatggtttggaactgtgctaa

SEQ ID NO: 2727110 - DNA, 25 bp, Homo sapien
accaagttcaacagcggagaccctc

SEQ ID NO: 2727111 - DNA, 25 bp, Homo sapien
cagcccagggattgtggcgagacct

SEQ ID NO: 2727112 - DNA, 25 bp, Homo sapien
tgtaggccagggcaatgacatttgc

SEQ ID NO: 2727113 - DNA, 25 bp, Homo sapien
ttgcaatgaatagtctgtaggccag

SEQ ID NO: 2727114 - DNA, 25 bp, Homo sapien
caggtcatccacctctgaaggtggt

SEQ ID NO: 2727115 - DNA, 25 bp, Homo sapien
tcatccacctctgaaggtggtgact

SEQ ID NO: 2727116 - DNA, 25 bp, Homo sapien
ggtcatccacctctgaaggtggtga

SEQ ID NO: 2727117 - DNA, 25 bp, Homo sapien
atccacctctgaaggtggtgactca

SEQ ID NO: 2727118 - DNA, 25 bp, Homo sapien
tgtattgtttcagttttaatatatg

SEQ ID NO: 2727119 - DNA, 25 bp, Homo sapien
ctctgtattgtttcagttttaatat

SEQ ID NO: 2727120 - DNA, 25 bp, Homo sapien
tattgtttcagttttaatatatgtg

SEQ ID NO: 2727121 - DNA, 25 bp, Homo sapien
attgtttcagttttaatatatgtgc

SEQ ID NO: 2727122 - DNA, 25 bp, Homo sapien
tgagtgtaagaatgcttgcctgggt

SEQ ID NO: 2727123 - DNA, 25 bp, Homo sapien
tgcctgggtgttctggtagctgttc

SEQ ID NO: 2727124 - DNA, 25 bp, Homo sapien
cagaagatatgagtgtaagaatgct

SEQ ID NO: 2727125 - DNA, 25 bp, Homo sapien
ttcatcataagcacttaaggagtca

SEQ ID NO: 2727126 - DNA, 25 bp, Homo sapien
gcgatctcatgcaccctaccagtgg

SEQ ID NO: 2727127 - DNA, 25 bp, Homo sapien
tatttgaatgcagttcccgcgagaa

SEQ ID NO: 2727128 - DNA, 25 bp, Homo sapien
tagctctcgagtaagcgcctgggat

SEQ ID NO: 2727129 - DNA, 25 bp, Homo sapien
ctcctaatgggagctcagggcgtcc

SEQ ID NO: 2727130 - DNA, 25 bp, Homo sapien
ataagaccggctcggaacccagtgt

SEQ ID NO: 2727131 - DNA, 25 bp, Homo sapien
tcagctaaaggcctcggccgagacc

SEQ ID NO: 2727132 - DNA, 25 bp, Homo sapien
cagtgtataagaccccagggttccg

SEQ ID NO: 2727133 - DNA, 25 bp, Homo sapien
tctttagggcctgttcgactctccc

SEQ ID NO: 2727134 - DNA, 25 bp, Homo sapien
cagtggcggttataattttgaggac

SEQ ID NO: 2727135 - DNA, 25 bp, Homo sapien
gcacagcgcagatccagtggcggtt

SEQ ID NO: 2727136 - DNA, 25 bp, Homo sapien
caaccgacccaacgttccatatttg

SEQ ID NO: 2727137 - DNA, 25 bp, Homo sapien
cccaacgttccatatttgtccagaa

SEQ ID NO: 2727138 - DNA, 25 bp, Homo sapien
tctgcaccatttcttagttcgggct

SEQ ID NO: 2727139 - DNA, 25 bp, Homo sapien
catttcttagttcgggctagaggct

SEQ ID NO: 2727140 - DNA, 25 bp, Homo sapien
tgcaccatttcttagttcgggctag

SEQ ID NO: 2727141 - DNA, 25 bp, Homo sapien
caccatttcttagttcgggctagag

SEQ ID NO: 2727142 - DNA, 25 bp, Homo sapien
gaggtgggagtaatcaatcatgcca

SEQ ID NO: 2727143 - DNA, 25 bp, Homo sapien
gacagcggagaatcaggagtgacca

SEQ ID NO: 2727144 - DNA, 25 bp, Homo sapien
gaaatggaccaacgactgaaccctg

SEQ ID NO: 2727145 - DNA, 25 bp, Homo sapien
gggtgaaagcctaactagaatgcct

SEQ ID NO: 2727146 - DNA, 25 bp, Homo sapien
agtcattcactgaacgagtatttct

SEQ ID NO: 2727147 - DNA, 25 bp, Homo sapien
agtcaatgtagtcattcactgaacg

SEQ ID NO: 2727148 - DNA, 25 bp, Homo sapien
gatgttcccccatgtctcaagtcaa

SEQ ID NO: 2727149 - DNA, 25 bp, Homo sapien
aagatgttcccccatgtctcaagtc

SEQ ID NO: 2727150 - DNA, 25 bp, Homo sapien
gctaagcttccaatatgttaaggta

SEQ ID NO: 2727151 - DNA, 25 bp, Homo sapien
gcaagaactgttctgacaattctgt

SEQ ID NO: 2727152 - DNA, 25 bp, Homo sapien
ggtctcataattggaccactatcca

SEQ ID NO: 2727153 - DNA, 25 bp, Homo sapien
tgcttctaaacagttcaccatcaga

SEQ ID NO: 2727154 - DNA, 25 bp, Homo sapien
ctgcatcgaagatttgtgattatat

SEQ ID NO: 2727155 - DNA, 25 bp, Homo sapien
gatttgtgattatatctgcctccat

SEQ ID NO: 2727156 - DNA, 25 bp, Homo sapien
aagatttgtgattatatctgcctcc

SEQ ID NO: 2727157 - DNA, 25 bp, Homo sapien
catcgaagatttgtgattatatctg

SEQ ID NO: 2727158 - DNA, 25 bp, Homo sapien
ggtcatcatttcattacgacattta

SEQ ID NO: 2727159 - DNA, 25 bp, Homo sapien
cattttgactctctactagttgtaa

SEQ ID NO: 2727160 - DNA, 25 bp, Homo sapien
tagttgtaaaccatactgtgcagct

SEQ ID NO: 2727161 - DNA, 25 bp, Homo sapien
gcagcttttagtcgctcttcttcag

SEQ ID NO: 2727162 - DNA, 25 bp, Homo sapien
cactcttgcagacagaggagtccag

SEQ ID NO: 2727163 - DNA, 25 bp, Homo sapien
tcaaactctgaatacactagggtgg

SEQ ID NO: 2727164 - DNA, 25 bp, Homo sapien
gcagggcgggaactagatctaaaat

SEQ ID NO: 2727165 - DNA, 25 bp, Homo sapien
ctactattaattgctaaacaggaca

SEQ ID NO: 2727166 - DNA, 25 bp, Homo sapien
catggtatgtcaacacgtcaagtca

SEQ ID NO: 2727167 - DNA, 25 bp, Homo sapien
tgtcaacacgtcaagtcaagtaatc

SEQ ID NO: 2727168 - DNA, 25 bp, Homo sapien
tgtgctccatggtatgtcaacacgt

SEQ ID NO: 2727169 - DNA, 25 bp, Homo sapien
aacacgtcaagtcaagtaatctctg

SEQ ID NO: 2727170 - DNA, 25 bp, Homo sapien
ttgaagggtatatttttcttgttca

SEQ ID NO: 2727171 - DNA, 25 bp, Homo sapien
tgaagggtatatttttcttgttcat

SEQ ID NO: 2727172 - DNA, 25 bp, Homo sapien
gaagggtatatttttcttgttcata

SEQ ID NO: 2727173 - DNA, 25 bp, Homo sapien
taatagcttcacattcgcagctcaa

SEQ ID NO: 2727174 - DNA, 25 bp, Homo sapien
cattcgactcttgagttcaacttct

SEQ ID NO: 2727175 - DNA, 25 bp, Homo sapien
cattcgcagctcaaactttctaaca

SEQ ID NO: 2727176 - DNA, 25 bp, Homo sapien
tccatggcttctgcttagttgttct

SEQ ID NO: 2727177 - DNA, 25 bp, Homo sapien
tgatttacaagagaggagttccttc

SEQ ID NO: 2727178 - DNA, 25 bp, Homo sapien
gatgatctacttggtgcttcagctg

SEQ ID NO: 2727179 - DNA, 25 bp, Homo sapien
gcacacgttcagacattacgcgcag

SEQ ID NO: 2727180 - DNA, 25 bp, Homo sapien
tacgcgcagttcctctgatttacaa

SEQ ID NO: 2727181 - DNA, 25 bp, Homo sapien
tctttaagccggtctacctggcgca

SEQ ID NO: 2727182 - DNA, 25 bp, Homo sapien
tagtaataagaagttctagctgttc

SEQ ID NO: 2727183 - DNA, 25 bp, Homo sapien
taataagaagttctagctgttcttg

SEQ ID NO: 2727184 - DNA, 25 bp, Homo sapien
cctggcgcattaggttagtaataag

SEQ ID NO: 2727185 - DNA, 25 bp, Homo sapien
gaagatcttgatttgctacacgagc

SEQ ID NO: 2727186 - DNA, 25 bp, Homo sapien
aagatcttgatttgctacacgagct

SEQ ID NO: 2727187 - DNA, 25 bp, Homo sapien
agatcttgatttgctacacgagctt

SEQ ID NO: 2727188 - DNA, 25 bp, Homo sapien
gatcttgatttgctacacgagcttt

SEQ ID NO: 2727189 - DNA, 25 bp, Homo sapien
gttgcctttactattgggatccaag

SEQ ID NO: 2727190 - DNA, 25 bp, Homo sapien
tctgcaaacaaagagttgcctttac

SEQ ID NO: 2727191 - DNA, 25 bp, Homo sapien
tattgggatccaaggcttgctggag

SEQ ID NO: 2727192 - DNA, 25 bp, Homo sapien
gctggagtgcctggtccaactgtac

SEQ ID NO: 2727193 - DNA, 25 bp, Homo sapien
agtgactgatacttgactttcatac

SEQ ID NO: 2727194 - DNA, 25 bp, Homo sapien
tagtgactgatacttgactttcata

SEQ ID NO: 2727195 - DNA, 25 bp, Homo sapien
ttagtgactgatacttgactttcat

SEQ ID NO: 2727196 - DNA, 25 bp, Homo sapien
gctgctcaaattcagtttgagaccc

SEQ ID NO: 2727197 - DNA, 25 bp, Homo sapien
caagcaaccgttcctgctgctcaaa

SEQ ID NO: 2727198 - DNA, 25 bp, Homo sapien
ttctgctccaacatggcaagcaacc

SEQ ID NO: 2727199 - DNA, 25 bp, Homo sapien
caaattcagtttgagaccctttcat

SEQ ID NO: 2727200 - DNA, 25 bp, Homo sapien
tatcttccagagtaccagagtcgac

SEQ ID NO: 2727201 - DNA, 25 bp, Homo sapien
gaaggcttagattccatactgtcat

SEQ ID NO: 2727202 - DNA, 25 bp, Homo sapien
taataggtgttatcttccagagtac

SEQ ID NO: 2727203 - DNA, 25 bp, Homo sapien
taccagagtcgactgaaggcttaga

SEQ ID NO: 2727204 - DNA, 25 bp, Homo sapien
taatgctttcattcgctgtatggac

SEQ ID NO: 2727205 - DNA, 25 bp, Homo sapien
ctagagcccgctggctctcaaataa

SEQ ID NO: 2727206 - DNA, 25 bp, Homo sapien
ggacaattcacctttagtgctttca

SEQ ID NO: 2727207 - DNA, 25 bp, Homo sapien
tcatttgcaaaaagttttcgctcaa

SEQ ID NO: 2727208 - DNA, 25 bp, Homo sapien
agtttcaattcatctagtttagctc

SEQ ID NO: 2727209 - DNA, 25 bp, Homo sapien
gctactttccagctcagtcattaga

SEQ ID NO: 2727210 - DNA, 25 bp, Homo sapien
cagttcactgagacaatacgaagag

SEQ ID NO: 2727211 - DNA, 25 bp, Homo sapien
gggtgttgtagaaccatcacattct

SEQ ID NO: 2727212 - DNA, 25 bp, Homo sapien
tggcaacctccccactattgttgag

SEQ ID NO: 2727213 - DNA, 25 bp, Homo sapien
tttcagtacaggcacttcaactgtc

SEQ ID NO: 2727214 - DNA, 25 bp, Homo sapien
ctcacgcctctttttcagtacaggc

SEQ ID NO: 2727215 - DNA, 25 bp, Homo sapien
cctctttttcagtacaggcacttca

SEQ ID NO: 2727216 - DNA, 25 bp, Homo sapien
acgcctctttttcagtacaggcact

SEQ ID NO: 2727217 - DNA, 25 bp, Homo sapien
tctgaggcggtaatcgataaacttc

SEQ ID NO: 2727218 - DNA, 25 bp, Homo sapien
tgttgacacatgcatctttagcggt

SEQ ID NO: 2727219 - DNA, 25 bp, Homo sapien
cggtggttatatccacagggagcac

SEQ ID NO: 2727220 - DNA, 25 bp, Homo sapien
ttctttcacttaaggcctcagcgtc

SEQ ID NO: 2727221 - DNA, 25 bp, Homo sapien
gagtcctttccctttgcaatcagtt

SEQ ID NO: 2727222 - DNA, 25 bp, Homo sapien
ttccctttgcaatcagtttagtctt

SEQ ID NO: 2727223 - DNA, 25 bp, Homo sapien
gtcctttccctttgcaatcagttta

SEQ ID NO: 2727224 - DNA, 25 bp, Homo sapien
cctttccctttgcaatcagtttagt

SEQ ID NO: 2727225 - DNA, 25 bp, Homo sapien
taagactaaggtagccctagtagca

SEQ ID NO: 2727226 - DNA, 25 bp, Homo sapien
caatacagatagcaaggctggcact

SEQ ID NO: 2727227 - DNA, 25 bp, Homo sapien
ggctggcacttatcaattctggaaa

SEQ ID NO: 2727228 - DNA, 25 bp, Homo sapien
tcagaactctttgaaaccatgggta

SEQ ID NO: 2727229 - DNA, 25 bp, Homo sapien
taagttagcagatggactcacacac

SEQ ID NO: 2727230 - DNA, 25 bp, Homo sapien
taaagcatgcaatagtgaagttccc

SEQ ID NO: 2727231 - DNA, 25 bp, Homo sapien
aaataacatggaatcttgggctgca

SEQ ID NO: 2727232 - DNA, 25 bp, Homo sapien
gacagggcacctatcatgataagca

SEQ ID NO: 2727233 - DNA, 25 bp, Homo sapien
gggcctccaataaggcatggtattc

SEQ ID NO: 2727234 - DNA, 25 bp, Homo sapien
tacaggcattaaagcatccactctg

SEQ ID NO: 2727235 - DNA, 25 bp, Homo sapien
tcaaatgtggttatgaaggattgaa

SEQ ID NO: 2727236 - DNA, 25 bp, Homo sapien
gcatccactctgaattcaaatgtgg

SEQ ID NO: 2727237 - DNA, 25 bp, Homo sapien
aagacacatatagaatagggtgtaa

SEQ ID NO: 2727238 - DNA, 25 bp, Homo sapien
tctctggagtagatttagaagacac

SEQ ID NO: 2727239 - DNA, 25 bp, Homo sapien
gacacatatagaatagggtgtaatt

SEQ ID NO: 2727240 - DNA, 25 bp, Homo sapien
gggtctctggagtagatttagaaga

SEQ ID NO: 2727241 - DNA, 25 bp, Homo sapien
tcctggcacaatgagtaaataaccc

SEQ ID NO: 2727242 - DNA, 25 bp, Homo sapien
taacttttgaggcaagtggcaccgt

SEQ ID NO: 2727243 - DNA, 25 bp, Homo sapien
ggcatcacttaagaagctctccagg

SEQ ID NO: 2727244 - DNA, 25 bp, Homo sapien
gaacacttggtcaaaggcacatgaa

SEQ ID NO: 2727245 - DNA, 25 bp, Homo sapien
tacaacatagtttacaaccttccca

SEQ ID NO: 2727246 - DNA, 25 bp, Homo sapien
caacatagtttacaaccttcccatt

SEQ ID NO: 2727247 - DNA, 25 bp, Homo sapien
acattggttctttaaacactgacaa

SEQ ID NO: 2727248 - DNA, 25 bp, Homo sapien
cattggttctttaaacactgacaaa

SEQ ID NO: 2727249 - DNA, 25 bp, Homo sapien
tcaagttgacttaggatgccagaat

SEQ ID NO: 2727250 - DNA, 25 bp, Homo sapien
caggactcacgtaggagttgcagtc

SEQ ID NO: 2727251 - DNA, 25 bp, Homo sapien
ggcaccagctgagttacgctagttt

SEQ ID NO: 2727252 - DNA, 25 bp, Homo sapien
tgatagccttttgaactctacagcc

SEQ ID NO: 2727253 - DNA, 25 bp, Homo sapien
gctgggccggggcctcgcgtcctcc

SEQ ID NO: 2727254 - DNA, 25 bp, Homo sapien
gcctcgcgtcctcccgtggggaagc

SEQ ID NO: 2727255 - DNA, 25 bp, Homo sapien
ggctgggccggggcctcgcgtcctc

SEQ ID NO: 2727256 - DNA, 25 bp, Homo sapien
gccgtgccgctccttgtcagctttg

SEQ ID NO: 2727257 - DNA, 25 bp, Homo sapien
ccttgtcagctttgcgccagggggc

SEQ ID NO: 2727258 - DNA, 25 bp, Homo sapien
cttgtcagctttgcgccagggggcc

SEQ ID NO: 2727259 - DNA, 25 bp, Homo sapien
cacgccgtgccgctccttgtcagct

SEQ ID NO: 2727260 - DNA, 25 bp, Homo sapien
tagtcagcagcaaatgaggcagaag

SEQ ID NO: 2727261 - DNA, 25 bp, Homo sapien
aggcagaagaattacagccagaggg

SEQ ID NO: 2727262 - DNA, 25 bp, Homo sapien
cagaagaattacagccagagggaac

SEQ ID NO: 2727263 - DNA, 25 bp, Homo sapien
ctagtcagcagcaaatgaggcagaa

SEQ ID NO: 2727264 - DNA, 25 bp, Homo sapien
gccaccccagagctcaaacccgggc

SEQ ID NO: 2727265 - DNA, 25 bp, Homo sapien
cccagagctcaaacccgggcgggcg

SEQ ID NO: 2727266 - DNA, 25 bp, Homo sapien
cagccaccccagagctcaaacccgg

SEQ ID NO: 2727267 - DNA, 25 bp, Homo sapien
caccccagagctcaaacccgggcgg

SEQ ID NO: 2727268 - DNA, 25 bp, Homo sapien
gattcaagtgaaatgcgctcatcga

SEQ ID NO: 2727269 - DNA, 25 bp, Homo sapien
catcgaaatgcgtaagcagtgtgcc

SEQ ID NO: 2727270 - DNA, 25 bp, Homo sapien
cctgacattgcatccacgagggtga

SEQ ID NO: 2727271 - DNA, 25 bp, Homo sapien
actagcagcaggtccactttggtgg

SEQ ID NO: 2727272 - DNA, 25 bp, Homo sapien
gaaggccccggtgtgagctccagtc

SEQ ID NO: 2727273 - DNA, 25 bp, Homo sapien
caacaggcagtagctacgtctccag

SEQ ID NO: 2727274 - DNA, 25 bp, Homo sapien
gcagtagctacgtctccagactcct

SEQ ID NO: 2727275 - DNA, 25 bp, Homo sapien
agtccttcatgacgcccttggccct

SEQ ID NO: 2727276 - DNA, 25 bp, Homo sapien
tccacacgtctcctgtattcgcacc

SEQ ID NO: 2727277 - DNA, 25 bp, Homo sapien
cctgtattcgcaccacatcgccgat

SEQ ID NO: 2727278 - DNA, 25 bp, Homo sapien
cgtctcctgtattcgcaccacatcg

SEQ ID NO: 2727279 - DNA, 25 bp, Homo sapien
gtattcgcaccacatcgccgatctg

SEQ ID NO: 2727280 - DNA, 25 bp, Homo sapien
gctttatgaggtatcccctatacca

SEQ ID NO: 2727281 - DNA, 25 bp, Homo sapien
gtgctttatgaggtatcccctatac

SEQ ID NO: 2727282 - DNA, 25 bp, Homo sapien
ttgtgctttatgaggtatcccctat

SEQ ID NO: 2727283 - DNA, 25 bp, Homo sapien
tttatgaggtatcccctataccagt

SEQ ID NO: 2727284 - DNA, 25 bp, Homo sapien
ctgaagcaacaatgttcctaggtgc

SEQ ID NO: 2727285 - DNA, 25 bp, Homo sapien
gaagcaacaatgttcctaggtgcat

SEQ ID NO: 2727286 - DNA, 25 bp, Homo sapien
tgaagcaacaatgttcctaggtgca

SEQ ID NO: 2727287 - DNA, 25 bp, Homo sapien
gactttaagcgagacgaggagctct

SEQ ID NO: 2727288 - DNA, 25 bp, Homo sapien
tgcccgattccggaaagcggtcacc

SEQ ID NO: 2727289 - DNA, 25 bp, Homo sapien
tgactttaagcgagacgaggagctc

SEQ ID NO: 2727290 - DNA, 25 bp, Homo sapien
gcttctcccattgcctgcccgattc

SEQ ID NO: 2727291 - DNA, 25 bp, Homo sapien
cacttccttgatgtggataaatgac

SEQ ID NO: 2727292 - DNA, 25 bp, Homo sapien
acttccttgatgtggataaatgact

SEQ ID NO: 2727293 - DNA, 25 bp, Homo sapien
gaaaaagtggtgtgaaattgagacc

SEQ ID NO: 2727294 - DNA, 25 bp, Homo sapien
cccaaagtgtcgttgtcacttcttg

SEQ ID NO: 2727295 - DNA, 25 bp, Homo sapien
cccattcccaaagtgtcgttgtcac

SEQ ID NO: 2727296 - DNA, 25 bp, Homo sapien
ccccattcccaaagtgtcgttgtca

SEQ ID NO: 2727297 - DNA, 25 bp, Homo sapien
gtgtcgttgtcacttcttgtgccag

SEQ ID NO: 2727298 - DNA, 25 bp, Homo sapien
gccatagtcaattttggacgtgact

SEQ ID NO: 2727299 - DNA, 25 bp, Homo sapien
aattttggacgtgactttctgcttc

SEQ ID NO: 2727300 - DNA, 25 bp, Homo sapien
agctcatccttgggtaaggttcctg

SEQ ID NO: 2727301 - DNA, 25 bp, Homo sapien
tagtcaattttggacgtgactttct

SEQ ID NO: 2727302 - DNA, 25 bp, Homo sapien
gggtggtaacaacggcacgcaagca

SEQ ID NO: 2727303 - DNA, 25 bp, Homo sapien
tggtcacaaccttctcccaaacaga

SEQ ID NO: 2727304 - DNA, 25 bp, Homo sapien
acggcacgcaagcacagccattggt

SEQ ID NO: 2727305 - DNA, 25 bp, Homo sapien
caagcacagccattggtcacaacct

SEQ ID NO: 2727306 - DNA, 25 bp, Homo sapien
cctcatgtgcatggaacaagctgat

SEQ ID NO: 2727307 - DNA, 25 bp, Homo sapien
gatgacactggtattatcagggtcc

SEQ ID NO: 2727308 - DNA, 25 bp, Homo sapien
atttcttctttgatacgctctgtga

SEQ ID NO: 2727309 - DNA, 25 bp, Homo sapien
gatatttccgtcttcatctctgaca

SEQ ID NO: 2727310 - DNA, 25 bp, Homo sapien
ggatgaggagatccgggaatacatt

SEQ ID NO: 2727311 - DNA, 25 bp, Homo sapien
caattctgcacacaaagtttctcac

SEQ ID NO: 2727312 - DNA, 25 bp, Homo sapien
tctcacaaacacatagaggctatgg

SEQ ID NO: 2727313 - DNA, 25 bp, Homo sapien
gagagacatgaagagctcagcatct

SEQ ID NO: 2727314 - DNA, 25 bp, Homo sapien
aatctccttagggaagccccggctg

SEQ ID NO: 2727315 - DNA, 25 bp, Homo sapien
cgtgaagaccaccttcagattgttg

SEQ ID NO: 2727316 - DNA, 25 bp, Homo sapien
cggctgccccatcgcactaggtagt

SEQ ID NO: 2727317 - DNA, 25 bp, Homo sapien
caccttcagattgttgagcatctca

SEQ ID NO: 2727318 - DNA, 25 bp, Homo sapien
gagcacggtaacgagaagagggtgc

SEQ ID NO: 2727319 - DNA, 25 bp, Homo sapien
cggtaacgagaagagggtgcacact

SEQ ID NO: 2727320 - DNA, 25 bp, Homo sapien
cacggtaacgagaagagggtgcaca

SEQ ID NO: 2727321 - DNA, 25 bp, Homo sapien
gtaacgagaagagggtgcacactca

SEQ ID NO: 2727322 - DNA, 25 bp, Homo sapien
tttgcaccagtatccttaagatcca

SEQ ID NO: 2727323 - DNA, 25 bp, Homo sapien
tcagtccctgcgtgcacttctttgc

SEQ ID NO: 2727324 - DNA, 25 bp, Homo sapien
ttaagatccatcttgccgacccgga

SEQ ID NO: 2727325 - DNA, 25 bp, Homo sapien
cccggactatttgacaaatcaagta

SEQ ID NO: 2727326 - DNA, 25 bp, Homo sapien
ccccttgatgatgtctgttatatcc

SEQ ID NO: 2727327 - DNA, 25 bp, Homo sapien
tcactctctgctttccccttgatga

SEQ ID NO: 2727328 - DNA, 25 bp, Homo sapien
aggaatgaagtgctgcttttcttca

SEQ ID NO: 2727329 - DNA, 25 bp, Homo sapien
ctctgctttccccttgatgatgtct

SEQ ID NO: 2727330 - DNA, 25 bp, Homo sapien
taggaagtcattctcagctgtaacc

SEQ ID NO: 2727331 - DNA, 25 bp, Homo sapien
tgtgtaggaagtcattctcagctgt

SEQ ID NO: 2727332 - DNA, 25 bp, Homo sapien
gctgtgtaggaagtcattctcagct

SEQ ID NO: 2727333 - DNA, 25 bp, Homo sapien
tgtaggaagtcattctcagctgtaa

SEQ ID NO: 2727334 - DNA, 25 bp, Homo sapien
cacggtggtcctgtccaccaggtgt

SEQ ID NO: 2727335 - DNA, 25 bp, Homo sapien
agtccttgcgaatctgaatgatgtc

SEQ ID NO: 2727336 - DNA, 25 bp, Homo sapien
aggtgtggatagtccttgcgaatct

SEQ ID NO: 2727337 - DNA, 25 bp, Homo sapien
ggcatgatgatctctgggaatccca

SEQ ID NO: 2727338 - DNA, 25 bp, Homo sapien
atcagaattgcttagagaaagcatt

SEQ ID NO: 2727339 - DNA, 25 bp, Homo sapien
gaaagcatttttccctcatcaggga

SEQ ID NO: 2727340 - DNA, 25 bp, Homo sapien
ctggattggtattaattaaaatcag

SEQ ID NO: 2727341 - DNA, 25 bp, Homo sapien
agcatttttccctcatcagggaggc

SEQ ID NO: 2727342 - DNA, 25 bp, Homo sapien
gtcaccttgtaagagagtaatgtag

SEQ ID NO: 2727343 - DNA, 25 bp, Homo sapien
aatgtagatgtcgttcctgacatcc

SEQ ID NO: 2727344 - DNA, 25 bp, Homo sapien
gtacttgtcaaagtcaccttgtaag

SEQ ID NO: 2727345 - DNA, 25 bp, Homo sapien
taagagagtaatgtagatgtcgttc

SEQ ID NO: 2727346 - DNA, 25 bp, Homo sapien
gcgttttgccatcctccgcgcacac

SEQ ID NO: 2727347 - DNA, 25 bp, Homo sapien
gttttgccatcctccgcgcacacac

SEQ ID NO: 2727348 - DNA, 25 bp, Homo sapien
aggcagcgttttgccatcctccgcg

SEQ ID NO: 2727349 - DNA, 25 bp, Homo sapien
cagcgttttgccatcctccgcgcac

SEQ ID NO: 2727350 - DNA, 25 bp, Homo sapien
ccaagctcaaaaggtgttgaacaca

SEQ ID NO: 2727351 - DNA, 25 bp, Homo sapien
gtacgtctttacaagcagaggcccc

SEQ ID NO: 2727352 - DNA, 25 bp, Homo sapien
gaggaaaagtacgtctttacaagca

SEQ ID NO: 2727353 - DNA, 25 bp, Homo sapien
tcttattatggaacactgcactaac

SEQ ID NO: 2727354 - DNA, 25 bp, Homo sapien
cagcctgctcggtagtgacttgaaa

SEQ ID NO: 2727355 - DNA, 25 bp, Homo sapien
aagttctctaccagggaagttggat

SEQ ID NO: 2727356 - DNA, 25 bp, Homo sapien
caaagcaatggtctctacatttggg

SEQ ID NO: 2727357 - DNA, 25 bp, Homo sapien
taagatggctgcttgcctgttaact

SEQ ID NO: 2727358 - DNA, 25 bp, Homo sapien
acagttccctttccatgtcagcccc

SEQ ID NO: 2727359 - DNA, 25 bp, Homo sapien
cacaaatcatcaccatgccccacag

SEQ ID NO: 2727360 - DNA, 25 bp, Homo sapien
tagtcagtcaactgaactcccccag

SEQ ID NO: 2727361 - DNA, 25 bp, Homo sapien
cagtcaactgaactcccccagaatt

SEQ ID NO: 2727362 - DNA, 25 bp, Homo sapien
gtttggtccctaggccacgaccagc

SEQ ID NO: 2727363 - DNA, 25 bp, Homo sapien
gatgtggctgccttactgtaagtga

SEQ ID NO: 2727364 - DNA, 25 bp, Homo sapien
tctgtgcttgtgcaggtttggtccc

SEQ ID NO: 2727365 - DNA, 25 bp, Homo sapien
ggactgacaggcacttaactacaga

SEQ ID NO: 2727366 - DNA, 25 bp, Homo sapien
gtacacaacggagcgatactcattc

SEQ ID NO: 2727367 - DNA, 25 bp, Homo sapien
gatactcattcatgggcttgtcccc

SEQ ID NO: 2727368 - DNA, 25 bp, Homo sapien
tgacttgatagtacacaacggagcg

SEQ ID NO: 2727369 - DNA, 25 bp, Homo sapien
tttccatccagcgtggctgtttgac

SEQ ID NO: 2727370 - DNA, 25 bp, Homo sapien
tttgcggggagatgccatatgagaa

SEQ ID NO: 2727371 - DNA, 25 bp, Homo sapien
gacaccatgcacgactcatttatgt

SEQ ID NO: 2727372 - DNA, 25 bp, Homo sapien
acattttgcggggagatgccatatg

SEQ ID NO: 2727373 - DNA, 25 bp, Homo sapien
taataaaacaccacttagtattcca

SEQ ID NO: 2727374 - DNA, 25 bp, Homo sapien
ggccaatgcggagaaggttagctac

SEQ ID NO: 2727375 - DNA, 25 bp, Homo sapien
attcaggccaatgcggagaaggtta

SEQ ID NO: 2727376 - DNA, 25 bp, Homo sapien
tgagattcaggccaatgcggagaag

SEQ ID NO: 2727377 - DNA, 25 bp, Homo sapien
caggccaatgcggagaaggttagct

SEQ ID NO: 2727378 - DNA, 25 bp, Homo sapien
gatcctctgcatgtcttcaataggg

SEQ ID NO: 2727379 - DNA, 25 bp, Homo sapien
gcatgtcttcaatagggacagccac

SEQ ID NO: 2727380 - DNA, 25 bp, Homo sapien
aacatgaatcgcagatggatcctct

SEQ ID NO: 2727381 - DNA, 25 bp, Homo sapien
attccagagatgaccgatgtcgaaa

SEQ ID NO: 2727382 - DNA, 25 bp, Homo sapien
tggaaatagcattgtggggtcagga

SEQ ID NO: 2727383 - DNA, 25 bp, Homo sapien
aaaatgatacatgggccacccagct

SEQ ID NO: 2727384 - DNA, 25 bp, Homo sapien
tcacataggacatggcaaagttctt

SEQ ID NO: 2727385 - DNA, 25 bp, Homo sapien
gacaactaagtcatggaatccatcg

SEQ ID NO: 2727386 - DNA, 25 bp, Homo sapien
gaatccatcgtgtagagtagtccca

SEQ ID NO: 2727387 - DNA, 25 bp, Homo sapien
atcagcttcacataggacatggcaa

SEQ ID NO: 2727388 - DNA, 25 bp, Homo sapien
gcgtggcccccttgttttccacatg

SEQ ID NO: 2727389 - DNA, 25 bp, Homo sapien
tggagaacacatcccgggagctgac

SEQ ID NO: 2727390 - DNA, 25 bp, Homo sapien
ctttgtggagcacaccagggtggaa

SEQ ID NO: 2727391 - DNA, 25 bp, Homo sapien
ccacatggtgtcgataagaaggaag

SEQ ID NO: 2727392 - DNA, 25 bp, Homo sapien
gacacaactcttgatgacccgatta

SEQ ID NO: 2727393 - DNA, 25 bp, Homo sapien
acacaactcttgatgacccgattac

SEQ ID NO: 2727394 - DNA, 25 bp, Homo sapien
agacacaactcttgatgacccgatt

SEQ ID NO: 2727395 - DNA, 25 bp, Homo sapien
ggcttcatacgccacttcagcaaac

SEQ ID NO: 2727396 - DNA, 25 bp, Homo sapien
tgaggcttcatacgccacttcagca

SEQ ID NO: 2727397 - DNA, 25 bp, Homo sapien
gttgaggcttcatacgccacttcag

SEQ ID NO: 2727398 - DNA, 25 bp, Homo sapien
agttgaggcttcatacgccacttca

SEQ ID NO: 2727399 - DNA, 25 bp, Homo sapien
catccacaatcttcaacttttctaa

SEQ ID NO: 2727400 - DNA, 25 bp, Homo sapien
cacaatcttcaacttttctaaattc

SEQ ID NO: 2727401 - DNA, 25 bp, Homo sapien
tctccatccacaatcttcaactttt

SEQ ID NO: 2727402 - DNA, 25 bp, Homo sapien
tccacaatcttcaacttttctaaat

SEQ ID NO: 2727403 - DNA, 25 bp, Homo sapien
gggcatccagagtatcctggagaaa

SEQ ID NO: 2727404 - DNA, 25 bp, Homo sapien
gacgaggatgtcatattcatcactt

SEQ ID NO: 2727405 - DNA, 25 bp, Homo sapien
caaggcatcaaagacgaggatgtca

SEQ ID NO: 2727406 - DNA, 25 bp, Homo sapien
tgaagagggcatccagagtatcctg

SEQ ID NO: 2727407 - DNA, 25 bp, Homo sapien
gaaatttccggtctgcaatgagtcc

SEQ ID NO: 2727408 - DNA, 25 bp, Homo sapien
gaaatgctgttggatgtaagcctcc

SEQ ID NO: 2727409 - DNA, 25 bp, Homo sapien
gcctccagaacggtgttgaaatgct

SEQ ID NO: 2727410 - DNA, 25 bp, Homo sapien
tgtaagccaaggtcgcactgaaatg

SEQ ID NO: 2727411 - DNA, 25 bp, Homo sapien
gattggctcacattgctcccctctg

SEQ ID NO: 2727412 - DNA, 25 bp, Homo sapien
ttccaaagccttcagcgttcttagg

SEQ ID NO: 2727413 - DNA, 25 bp, Homo sapien
gaacttgaacacatattccaaagcc

SEQ ID NO: 2727414 - DNA, 25 bp, Homo sapien
taatgtcctcgaccgaacaatgaac

SEQ ID NO: 2727415 - DNA, 25 bp, Homo sapien
ataccagcttattggccatgtacaa

SEQ ID NO: 2727416 - DNA, 25 bp, Homo sapien
aaataccagcttattggccatgtac

SEQ ID NO: 2727417 - DNA, 25 bp, Homo sapien
taccagcttattggccatgtacaac

SEQ ID NO: 2727418 - DNA, 25 bp, Homo sapien
aataccagcttattggccatgtaca

SEQ ID NO: 2727419 - DNA, 25 bp, Homo sapien
gcctctgcgtcggaaaacttgcctt

SEQ ID NO: 2727420 - DNA, 25 bp, Homo sapien
catagggttttgctaggacaacaag

SEQ ID NO: 2727421 - DNA, 25 bp, Homo sapien
tgtaaacttgaggattctagcagcc

SEQ ID NO: 2727422 - DNA, 25 bp, Homo sapien
catagagttgcttccactggtagaa

SEQ ID NO: 2727423 - DNA, 25 bp, Homo sapien
taagctagactggaggcgtcgctga

SEQ ID NO: 2727424 - DNA, 25 bp, Homo sapien
gaaccatgctcctgagatgcccttg

SEQ ID NO: 2727425 - DNA, 25 bp, Homo sapien
ttaatgtggtggcagctccagtgca

SEQ ID NO: 2727426 - DNA, 25 bp, Homo sapien
tagagaaagggcaatcacgtctggc

SEQ ID NO: 2727427 - DNA, 25 bp, Homo sapien
cctggatacaggatgacgtcaagct

SEQ ID NO: 2727428 - DNA, 25 bp, Homo sapien
tatctgatcccaatagcttagtgtg

SEQ ID NO: 2727429 - DNA, 25 bp, Homo sapien
tccccgccgacatctagagtgtgac

SEQ ID NO: 2727430 - DNA, 25 bp, Homo sapien
tacagcacaacagcaagaacctcag

SEQ ID NO: 2727431 - DNA, 25 bp, Homo sapien
ggcacagctgcctgaaaacgctgaa

SEQ ID NO: 2727432 - DNA, 25 bp, Homo sapien
agcaatccctaatggactgtccact

SEQ ID NO: 2727433 - DNA, 25 bp, Homo sapien
tccactcatcatgccttttgccttg

SEQ ID NO: 2727434 - DNA, 25 bp, Homo sapien
gcctgaaaacgctgaatgaattcca

SEQ ID NO: 2727435 - DNA, 25 bp, Homo sapien
catctgttctttgccttcataaagc

SEQ ID NO: 2727436 - DNA, 25 bp, Homo sapien
aactccatctgttctttgccttcat

SEQ ID NO: 2727437 - DNA, 25 bp, Homo sapien
actccatctgttctttgccttcata

SEQ ID NO: 2727438 - DNA, 25 bp, Homo sapien
tccatctgttctttgccttcataaa

SEQ ID NO: 2727439 - DNA, 25 bp, Homo sapien
tcaaagagccgtctcatggattctt

SEQ ID NO: 2727440 - DNA, 25 bp, Homo sapien
tttcatcagattgttgatggattca

SEQ ID NO: 2727441 - DNA, 25 bp, Homo sapien
catcagattgttgatggattcaaag

SEQ ID NO: 2727442 - DNA, 25 bp, Homo sapien
aaagagccgtctcatggattcttca

SEQ ID NO: 2727443 - DNA, 25 bp, Homo sapien
gactttggagggacacgatggaacc

SEQ ID NO: 2727444 - DNA, 25 bp, Homo sapien
caggcggcctcacagagaagtggca

SEQ ID NO: 2727445 - DNA, 25 bp, Homo sapien
cacctggacagattataacgcgtac

SEQ ID NO: 2727446 - DNA, 25 bp, Homo sapien
gaagtttgccaagactgttgtcacg

SEQ ID NO: 2727447 - DNA, 25 bp, Homo sapien
tgagtaacttcgcatcaaagaccat

SEQ ID NO: 2727448 - DNA, 25 bp, Homo sapien
ttctacatcatgcaggacagatggg

SEQ ID NO: 2727449 - DNA, 25 bp, Homo sapien
aaagaccatttctacatcatgcagg

SEQ ID NO: 2727450 - DNA, 25 bp, Homo sapien
gagtaacttcgcatcaaagaccatt

SEQ ID NO: 2727451 - DNA, 25 bp, Homo sapien
aaagaggttgctctggactatctca

SEQ ID NO: 2727452 - DNA, 25 bp, Homo sapien
ggtgtagaactcatacaggagttgg

SEQ ID NO: 2727453 - DNA, 25 bp, Homo sapien
tgcttctggagtttcacaggaggga

SEQ ID NO: 2727454 - DNA, 25 bp, Homo sapien
ggactatctcattcatagactgtac

SEQ ID NO: 2727455 - DNA, 25 bp, Homo sapien
cctgtcctcagcaccggagattgaa

SEQ ID NO: 2727456 - DNA, 25 bp, Homo sapien
tcagtgagcgatagcacagagaacc

SEQ ID NO: 2727457 - DNA, 25 bp, Homo sapien
taggctatagcaactcagcccacag

SEQ ID NO: 2727458 - DNA, 25 bp, Homo sapien
gagaacctgcatgttgtggaccaga

SEQ ID NO: 2727459 - DNA, 25 bp, Homo sapien
ttgaagaactttgatgcctctaaat

SEQ ID NO: 2727460 - DNA, 25 bp, Homo sapien
gaagaactttgatgcctctaaatgc

SEQ ID NO: 2727461 - DNA, 25 bp, Homo sapien
acttgtcctcaaaatcgatggtact

SEQ ID NO: 2727462 - DNA, 25 bp, Homo sapien
ttgtcctcaaaatcgatggtacttt

SEQ ID NO: 2727463 - DNA, 25 bp, Homo sapien
ttgtgacactgcagttgaaacgggc

SEQ ID NO: 2727464 - DNA, 25 bp, Homo sapien
tgaagtctgcaatctgtcacatcag

SEQ ID NO: 2727465 - DNA, 25 bp, Homo sapien
gatttgagggagaaccccttctcag

SEQ ID NO: 2727466 - DNA, 25 bp, Homo sapien
tctctcttggacttgttctgcagca

SEQ ID NO: 2727467 - DNA, 25 bp, Homo sapien
tttcagctcaaacactcgatatgcc

SEQ ID NO: 2727468 - DNA, 25 bp, Homo sapien
cgatatgcccaatgtgcaaattctt

SEQ ID NO: 2727469 - DNA, 25 bp, Homo sapien
aatccttcgtgtagctcaaaatgac

SEQ ID NO: 2727470 - DNA, 25 bp, Homo sapien
cacgcatatacaatccttcgtgtag

SEQ ID NO: 2727471 - DNA, 25 bp, Homo sapien
ttttcaaacgtttgactctaactgc

SEQ ID NO: 2727472 - DNA, 25 bp, Homo sapien
cgtttgactctaactgcccataagt

SEQ ID NO: 2727473 - DNA, 25 bp, Homo sapien
ccagaagttgactccgccttctttt

SEQ ID NO: 2727474 - DNA, 25 bp, Homo sapien
tctaactgcccataagtcaccagaa

SEQ ID NO: 2727475 - DNA, 25 bp, Homo sapien
atgttacaacaatgggcgctgataa

SEQ ID NO: 2727476 - DNA, 25 bp, Homo sapien
tgatgttacaacaatgggcgctgat

SEQ ID NO: 2727477 - DNA, 25 bp, Homo sapien
gatgttacaacaatgggcgctgata

SEQ ID NO: 2727478 - DNA, 25 bp, Homo sapien
ggcgggtggactgcgctttcggtgg

SEQ ID NO: 2727479 - DNA, 25 bp, Homo sapien
ggtggactgcgctttcggtggttcc

SEQ ID NO: 2727480 - DNA, 25 bp, Homo sapien
cagacccggcgggtggactgcgctt

SEQ ID NO: 2727481 - DNA, 25 bp, Homo sapien
ctggaatgttcagacccggcgggtg

SEQ ID NO: 2727482 - DNA, 25 bp, Homo sapien
cagcacgggttaatcgactcttcaa

SEQ ID NO: 2727483 - DNA, 25 bp, Homo sapien
cgggttaatcgactcttcaatcctg

SEQ ID NO: 2727484 - DNA, 25 bp, Homo sapien
ggttaatcgactcttcaatcctgtt

SEQ ID NO: 2727485 - DNA, 25 bp, Homo sapien
gcacgggttaatcgactcttcaatc

SEQ ID NO: 2727486 - DNA, 25 bp, Homo sapien
gctccattggaagaactaaatgaaa

SEQ ID NO: 2727487 - DNA, 25 bp, Homo sapien
tccttgccagtatcagctccattgg

SEQ ID NO: 2727488 - DNA, 25 bp, Homo sapien
tgccagtatcagctccattggaaga

SEQ ID NO: 2727489 - DNA, 25 bp, Homo sapien
tatcagctccattggaagaactaaa

SEQ ID NO: 2727490 - DNA, 25 bp, Homo sapien
ctgcagaactactcaactctttggg

SEQ ID NO: 2727491 - DNA, 25 bp, Homo sapien
tctgcagaactactcaactctttgg

SEQ ID NO: 2727492 - DNA, 25 bp, Homo sapien
aagtccaaattataattcagaccag

SEQ ID NO: 2727493 - DNA, 25 bp, Homo sapien
gtccaaattataattcagaccagcc

SEQ ID NO: 2727494 - DNA, 25 bp, Homo sapien
caccgagtgacaagtccaaattata

SEQ ID NO: 2727495 - DNA, 25 bp, Homo sapien
gagtgacaagtccaaattataattc

SEQ ID NO: 2727496 - DNA, 25 bp, Homo sapien
ccaggacctggtgttgcatgtcatc

SEQ ID NO: 2727497 - DNA, 25 bp, Homo sapien
gcatcctggtagctaaggacttcca

SEQ ID NO: 2727498 - DNA, 25 bp, Homo sapien
tgttgagcaattcaacgcagtactt

SEQ ID NO: 2727499 - DNA, 25 bp, Homo sapien
acaggaagcagaatgtcccggcatt

SEQ ID NO: 2727500 - DNA, 25 bp, Homo sapien
ggatatctacatcatcaggaggact

SEQ ID NO: 2727501 - DNA, 25 bp, Homo sapien
tatctacatcatcaggaggactcac

SEQ ID NO: 2727502 - DNA, 25 bp, Homo sapien
agtccaggatatctacatcatcagg

SEQ ID NO: 2727503 - DNA, 25 bp, Homo sapien
caggatatctacatcatcaggagga

SEQ ID NO: 2727504 - DNA, 25 bp, Homo sapien
cattcagaaagctcttctctgagga

SEQ ID NO: 2727505 - DNA, 25 bp, Homo sapien
tcattcagaaagctcttctctgagg

SEQ ID NO: 2727506 - DNA, 25 bp, Homo sapien
ttcagaaagctcttctctgaggatg

SEQ ID NO: 2727507 - DNA, 25 bp, Homo sapien
cagaaagctcttctctgaggatgtt

SEQ ID NO: 2727508 - DNA, 25 bp, Homo sapien
tgtacagtggtgatcaggagccctg

SEQ ID NO: 2727509 - DNA, 25 bp, Homo sapien
aagttctggaattccccgcaggagc

SEQ ID NO: 2727510 - DNA, 25 bp, Homo sapien
gcgagggctccaaaccatctggctg

SEQ ID NO: 2727511 - DNA, 25 bp, Homo sapien
ccttctgtggagactgcgagggctc

SEQ ID NO: 2727512 - DNA, 25 bp, Homo sapien
ttgtgtctattggattcttccctcc

SEQ ID NO: 2727513 - DNA, 25 bp, Homo sapien
tgtgtctattggattcttccctcct

SEQ ID NO: 2727514 - DNA, 25 bp, Homo sapien
gggaaaaactgagcccagtcatcat

SEQ ID NO: 2727515 - DNA, 25 bp, Homo sapien
tgctaatatcctgttcaccagggaa

SEQ ID NO: 2727516 - DNA, 25 bp, Homo sapien
gatgagagccaccagagatgagagc

SEQ ID NO: 2727517 - DNA, 25 bp, Homo sapien
aaccagtcttggtcagctcgtcccc

SEQ ID NO: 2727518 - DNA, 25 bp, Homo sapien
ctttaatccatagccctgatccttc

SEQ ID NO: 2727519 - DNA, 25 bp, Homo sapien
ctgatccttccccaacaagctggtg

SEQ ID NO: 2727520 - DNA, 25 bp, Homo sapien
gatccttccccaacaagctggtgag

SEQ ID NO: 2727521 - DNA, 25 bp, Homo sapien
cttccccaacaagctggtgagcagg

SEQ ID NO: 2727522 - DNA, 25 bp, Homo sapien
tctactttccaggaagaacagggtc

SEQ ID NO: 2727523 - DNA, 25 bp, Homo sapien
tgaaggccccatttcatatcatgtg

SEQ ID NO: 2727524 - DNA, 25 bp, Homo sapien
taaccttatagatctgctacgctgg

SEQ ID NO: 2727525 - DNA, 25 bp, Homo sapien
tagcagatatgtcttgcccaaggga

SEQ ID NO: 2727526 - DNA, 25 bp, Homo sapien
cttggggctcgcaagctggatcact

SEQ ID NO: 2727527 - DNA, 25 bp, Homo sapien
gcaggtctcccgtcccatgctgggg

SEQ ID NO: 2727528 - DNA, 25 bp, Homo sapien
cactgttgccaacattactaaatgg

SEQ ID NO: 2727529 - DNA, 25 bp, Homo sapien
gggctatagatgtaaccttggggct

SEQ ID NO: 2727530 - DNA, 25 bp, Homo sapien
ctcctggatatggtggtaggtgaag

SEQ ID NO: 2727531 - DNA, 25 bp, Homo sapien
tcctggatatggtggtaggtgaagg

SEQ ID NO: 2727532 - DNA, 25 bp, Homo sapien
cctggatatggtggtaggtgaaggc

SEQ ID NO: 2727533 - DNA, 25 bp, Homo sapien
aatcagaatgtgatcccggcccatg

SEQ ID NO: 2727534 - DNA, 25 bp, Homo sapien
gcccatggtgatgactgtccggttc

SEQ ID NO: 2727535 - DNA, 25 bp, Homo sapien
cggcccatggtgatgactgtccggt

SEQ ID NO: 2727536 - DNA, 25 bp, Homo sapien
tcagaatgtgatcccggcccatggt

SEQ ID NO: 2727537 - DNA, 25 bp, Homo sapien
gagcttgcaacatttgacaagaaga

SEQ ID NO: 2727538 - DNA, 25 bp, Homo sapien
cttgcaacatttgacaagaagaaat

SEQ ID NO: 2727539 - DNA, 25 bp, Homo sapien
tgcaacatttgacaagaagaaataa

SEQ ID NO: 2727540 - DNA, 25 bp, Homo sapien
agcttgcaacatttgacaagaagaa

SEQ ID NO: 2727541 - DNA, 25 bp, Homo sapien
cttggtttaaagcacgatgggcaga

SEQ ID NO: 2727542 - DNA, 25 bp, Homo sapien
agtgacatggttgggcatactcatt

SEQ ID NO: 2727543 - DNA, 25 bp, Homo sapien
ggcccctgaaagcatttgaattttg

SEQ ID NO: 2727544 - DNA, 25 bp, Homo sapien
catttatgttggtgactggcccctg

SEQ ID NO: 2727545 - DNA, 25 bp, Homo sapien
aatggactgatgatcatctttaggt

SEQ ID NO: 2727546 - DNA, 25 bp, Homo sapien
cagaatgagccaaatggactgatga

SEQ ID NO: 2727547 - DNA, 25 bp, Homo sapien
cctgctacgtacagaatgagccaaa

SEQ ID NO: 2727548 - DNA, 25 bp, Homo sapien
gcctgctacgtacagaatgagccaa

SEQ ID NO: 2727549 - DNA, 25 bp, Homo sapien
gtaacaggatgcatcagccagggag

SEQ ID NO: 2727550 - DNA, 25 bp, Homo sapien
tctctagagcagtcagtaacaggat

SEQ ID NO: 2727551 - DNA, 25 bp, Homo sapien
ggcagtgttcaagttccctggttga

SEQ ID NO: 2727552 - DNA, 25 bp, Homo sapien
tcaatagcctcctctgtgaaaaccg

SEQ ID NO: 2727553 - DNA, 25 bp, Homo sapien
caaagagagacttaagtccctgagg

SEQ ID NO: 2727554 - DNA, 25 bp, Homo sapien
cagaacaaataaccagtcttctcaa

SEQ ID NO: 2727555 - DNA, 25 bp, Homo sapien
tcagctctttatagaaattagggtc

SEQ ID NO: 2727556 - DNA, 25 bp, Homo sapien
ggtctgccactggtaatatgcccaa

SEQ ID NO: 2727557 - DNA, 25 bp, Homo sapien
tgtagtagctaagtaagaagtagaa

SEQ ID NO: 2727558 - DNA, 25 bp, Homo sapien
tgctaagcatggtgtagtagctaag

SEQ ID NO: 2727559 - DNA, 25 bp, Homo sapien
catggtgtagtagctaagtaagaag

SEQ ID NO: 2727560 - DNA, 25 bp, Homo sapien
ttttgcaaggggttgctaagcatgg

SEQ ID NO: 2727561 - DNA, 25 bp, Homo sapien
gacttggggctcttgctgcttccaa

SEQ ID NO: 2727562 - DNA, 25 bp, Homo sapien
cttgctgcttccaattacctagaaa

SEQ ID NO: 2727563 - DNA, 25 bp, Homo sapien
caagtcatgacttggggctcttgct

SEQ ID NO: 2727564 - DNA, 25 bp, Homo sapien
cttccagccaagtcatgacttgggg

SEQ ID NO: 2727565 - DNA, 25 bp, Homo sapien
taggtccatggctaaaacatttggt

SEQ ID NO: 2727566 - DNA, 25 bp, Homo sapien
gaacttggagtcctcgtgaatggga

SEQ ID NO: 2727567 - DNA, 25 bp, Homo sapien
gattaattcctaatgccccatgtga

SEQ ID NO: 2727568 - DNA, 25 bp, Homo sapien
tcaaaggactaggtatcaggaaact

SEQ ID NO: 2727569 - DNA, 25 bp, Homo sapien
tcggccaacttgcttagagtgtagt

SEQ ID NO: 2727570 - DNA, 25 bp, Homo sapien
cttctcggccaacttgcttagagtg

SEQ ID NO: 2727571 - DNA, 25 bp, Homo sapien
caacttgcttagagtgtagttgatg

SEQ ID NO: 2727572 - DNA, 25 bp, Homo sapien
tcacttctcggccaacttgcttaga

SEQ ID NO: 2727573 - DNA, 25 bp, Homo sapien
gagtgatccgatctttatttctcca

SEQ ID NO: 2727574 - DNA, 25 bp, Homo sapien
cattaatagcaaaagaggctgacac

SEQ ID NO: 2727575 - DNA, 25 bp, Homo sapien
gaggccacaggtgatcacagagtga

SEQ ID NO: 2727576 - DNA, 25 bp, Homo sapien
gaagtaggatttacagcatcagcaa

SEQ ID NO: 2727577 - DNA, 25 bp, Homo sapien
aatcagggtcttgaaagaagatact

SEQ ID NO: 2727578 - DNA, 25 bp, Homo sapien
tcagggtcttgaaagaagatacttg

SEQ ID NO: 2727579 - DNA, 25 bp, Homo sapien
gttttgtgacaaccagcccatgaat

SEQ ID NO: 2727580 - DNA, 25 bp, Homo sapien
cagcccatgaataaaaaatacttgc

SEQ ID NO: 2727581 - DNA, 25 bp, Homo sapien
gatgggaatccgcagttgcagcaag

SEQ ID NO: 2727582 - DNA, 25 bp, Homo sapien
cccaaagccactgaatcagagagtg

SEQ ID NO: 2727583 - DNA, 25 bp, Homo sapien
ggaatccgcagttgcagcaagctcc

SEQ ID NO: 2727584 - DNA, 25 bp, Homo sapien
aaagccactgaatcagagagtgtgg

SEQ ID NO: 2727585 - DNA, 25 bp, Homo sapien
agtgctcccaaagcgtggtcgtgga

SEQ ID NO: 2727586 - DNA, 25 bp, Homo sapien
gaaatagtaattgcaacggccacag

SEQ ID NO: 2727587 - DNA, 25 bp, Homo sapien
tcgtggaccatctgcatcggaacct

SEQ ID NO: 2727588 - DNA, 25 bp, Homo sapien
cagccaagggcatcgtgagggttta

SEQ ID NO: 2727589 - DNA, 25 bp, Homo sapien
gttccaagtcaatagtcagaaagtg

SEQ ID NO: 2727590 - DNA, 25 bp, Homo sapien
tctacgtagatcttaagcaaaagcc

SEQ ID NO: 2727591 - DNA, 25 bp, Homo sapien
aaagtggaagagtctcatctacgta

SEQ ID NO: 2727592 - DNA, 25 bp, Homo sapien
aaaagcctatgcacttaacccctca

SEQ ID NO: 2727593 - DNA, 25 bp, Homo sapien
tatgaggttggcattacaaggtcct

SEQ ID NO: 2727594 - DNA, 25 bp, Homo sapien
aagaccctctctgtgtcaagcggag

SEQ ID NO: 2727595 - DNA, 25 bp, Homo sapien
taaagacacaaagtacagagacggc

SEQ ID NO: 2727596 - DNA, 25 bp, Homo sapien
cattaccacatgtctctcaaggagc

SEQ ID NO: 2727597 - DNA, 25 bp, Homo sapien
ctcctggagataacaggcttggaag

SEQ ID NO: 2727598 - DNA, 25 bp, Homo sapien
acaaataagctaataggacagggtt

SEQ ID NO: 2727599 - DNA, 25 bp, Homo sapien
gaaagctgattttactgctaaggga

SEQ ID NO: 2727600 - DNA, 25 bp, Homo sapien
taaggttgtatgattccttgaagcc

SEQ ID NO: 2727601 - DNA, 25 bp, Homo sapien
agaacaactccactttattgtgttt

SEQ ID NO: 2727602 - DNA, 25 bp, Homo sapien
tttctagaacaactccactttattg

SEQ ID NO: 2727603 - DNA, 25 bp, Homo sapien
ctttattgtgttttagatattggaa

SEQ ID NO: 2727604 - DNA, 25 bp, Homo sapien
tctagaacaactccactttattgtg

SEQ ID NO: 2727605 - DNA, 25 bp, Homo sapien
tacacaccagcaagtttgttcttct

SEQ ID NO: 2727606 - DNA, 25 bp, Homo sapien
gccttcaactcaatgtgtcacttgt

SEQ ID NO: 2727607 - DNA, 25 bp, Homo sapien
ccatgctagaagctgtgcgggtgta

SEQ ID NO: 2727608 - DNA, 25 bp, Homo sapien
tccacaaatgttcacctagctcctg

SEQ ID NO: 2727609 - DNA, 25 bp, Homo sapien
catggccctcaacctttctcactgg

SEQ ID NO: 2727610 - DNA, 25 bp, Homo sapien
gcattagtggcttgcccatccatcg

SEQ ID NO: 2727611 - DNA, 25 bp, Homo sapien
ggtgggccatggccctcaacctttc

SEQ ID NO: 2727612 - DNA, 25 bp, Homo sapien
catccatcggagaggcctctgggat

SEQ ID NO: 2727613 - DNA, 25 bp, Homo sapien
gtgttcttgcaaggcggccaccatg

SEQ ID NO: 2727614 - DNA, 25 bp, Homo sapien
tgttacctggacgactgttacagcc

SEQ ID NO: 2727615 - DNA, 25 bp, Homo sapien
ggtggtaacaccatagcacatggct

SEQ ID NO: 2727616 - DNA, 25 bp, Homo sapien
caaaccgtttgactgattgggcatc

SEQ ID NO: 2727617 - DNA, 25 bp, Homo sapien
tgctggactattcactactgtggtg

SEQ ID NO: 2727618 - DNA, 25 bp, Homo sapien
attcactactgtggtggcttggcaa

SEQ ID NO: 2727619 - DNA, 25 bp, Homo sapien
ctggactattcactactgtggtggc

SEQ ID NO: 2727620 - DNA, 25 bp, Homo sapien
ttcactactgtggtggcttggcaaa

SEQ ID NO: 2727621 - DNA, 25 bp, Homo sapien
gcaccatgaccaccttacattgaaa

SEQ ID NO: 2727622 - DNA, 25 bp, Homo sapien
gctattaataggtgcgatcatagct

SEQ ID NO: 2727623 - DNA, 25 bp, Homo sapien
ggctattaataggtgcgatcatagc

SEQ ID NO: 2727624 - DNA, 25 bp, Homo sapien
tgaccaccttacattgaaattcacc

SEQ ID NO: 2727625 - DNA, 25 bp, Homo sapien
ggtgaagctattaacatttgtcctg

SEQ ID NO: 2727626 - DNA, 25 bp, Homo sapien
tcctgcagcctgtaaggcattaatg

SEQ ID NO: 2727627 - DNA, 25 bp, Homo sapien
tgaacttgaaccttaactgaaatgg

SEQ ID NO: 2727628 - DNA, 25 bp, Homo sapien
gctgcagaatacattgggctttccc

SEQ ID NO: 2727629 - DNA, 25 bp, Homo sapien
gacctgttaaatcaactggccgact

SEQ ID NO: 2727630 - DNA, 25 bp, Homo sapien
tgttaaatcaactggccgactaggg

SEQ ID NO: 2727631 - DNA, 25 bp, Homo sapien
ctgacctgttaaatcaactggccga

SEQ ID NO: 2727632 - DNA, 25 bp, Homo sapien
cctgttaaatcaactggccgactag

SEQ ID NO: 2727633 - DNA, 25 bp, Homo sapien
tactccatgggatgcaaaagtgtct

SEQ ID NO: 2727634 - DNA, 25 bp, Homo sapien
gatgtgggcccaggttactactaag

SEQ ID NO: 2727635 - DNA, 25 bp, Homo sapien
ggttcacggatattccccaagagca

SEQ ID NO: 2727636 - DNA, 25 bp, Homo sapien
tgtgcaggccagattagatataacc

SEQ ID NO: 2727637 - DNA, 25 bp, Homo sapien
cacttcttcaaaccattaatgatca

SEQ ID NO: 2727638 - DNA, 25 bp, Homo sapien
cttcttcaaaccattaatgatcagt

SEQ ID NO: 2727639 - DNA, 25 bp, Homo sapien
acttcttcaaaccattaatgatcag

SEQ ID NO: 2727640 - DNA, 25 bp, Homo sapien
atcgatttttctggaagacccctat

SEQ ID NO: 2727641 - DNA, 25 bp, Homo sapien
tcatcgatttttctggaagacccct

SEQ ID NO: 2727642 - DNA, 25 bp, Homo sapien
tcgatttttctggaagacccctatg

SEQ ID NO: 2727643 - DNA, 25 bp, Homo sapien
catcgatttttctggaagaccccta

SEQ ID NO: 2727644 - DNA, 25 bp, Homo sapien
agaggaagtagttatcagggaagtc

SEQ ID NO: 2727645 - DNA, 25 bp, Homo sapien
atatgcctacctacccatgtgccag

SEQ ID NO: 2727646 - DNA, 25 bp, Homo sapien
gaaaaactgcagctcaatctttgac

SEQ ID NO: 2727647 - DNA, 25 bp, Homo sapien
gagaagcaattgtgcctggacacac

SEQ ID NO: 2727648 - DNA, 25 bp, Homo sapien
agcctcatgcggcacccagattcat

SEQ ID NO: 2727649 - DNA, 25 bp, Homo sapien
cagcctcatgcggcacccagattca

SEQ ID NO: 2727650 - DNA, 25 bp, Homo sapien
cttccagcctcatgcggcacccaga

SEQ ID NO: 2727651 - DNA, 25 bp, Homo sapien
tccagcctcatgcggcacccagatt

SEQ ID NO: 2727652 - DNA, 25 bp, Homo sapien
tagggttctcactgccttacagcag

SEQ ID NO: 2727653 - DNA, 25 bp, Homo sapien
taccatattggtctggcaccctggg

SEQ ID NO: 2727654 - DNA, 25 bp, Homo sapien
cctacaaggctctagaggatctggc

SEQ ID NO: 2727655 - DNA, 25 bp, Homo sapien
catgcaaacttattagaaggtcccc

SEQ ID NO: 2727656 - DNA, 25 bp, Homo sapien
tgctggtgcattgaggctgctgtca

SEQ ID NO: 2727657 - DNA, 25 bp, Homo sapien
ctggtgcattgaggctgctgtcaat

SEQ ID NO: 2727658 - DNA, 25 bp, Homo sapien
gcattgaggctgctgtcaatattgg

SEQ ID NO: 2727659 - DNA, 25 bp, Homo sapien
ggtgcattgaggctgctgtcaatat

SEQ ID NO: 2727660 - DNA, 25 bp, Homo sapien
gaacagggcaagaacagactgggca

SEQ ID NO: 2727661 - DNA, 25 bp, Homo sapien
tcagaacagggcaagaacagactgg

SEQ ID NO: 2727662 - DNA, 25 bp, Homo sapien
agactgggcaagaacaggctggccc

SEQ ID NO: 2727663 - DNA, 25 bp, Homo sapien
actgggcaagaacaggctggcccac

SEQ ID NO: 2727664 - DNA, 25 bp, Homo sapien
taatactccgtagcacccaatcggt

SEQ ID NO: 2727665 - DNA, 25 bp, Homo sapien
caataaggattgcatgataactagc

SEQ ID NO: 2727666 - DNA, 25 bp, Homo sapien
caatcggttcagtcctatcatcagc

SEQ ID NO: 2727667 - DNA, 25 bp, Homo sapien
cctgtgctaacccttggcagatact

SEQ ID NO: 2727668 - DNA, 25 bp, Homo sapien
tcagaaacggcaatggcatgctgct

SEQ ID NO: 2727669 - DNA, 25 bp, Homo sapien
agaaacggcaatggcatgctgctct

SEQ ID NO: 2727670 - DNA, 25 bp, Homo sapien
aacggcaatggcatgctgctctgca

SEQ ID NO: 2727671 - DNA, 25 bp, Homo sapien
aaacggcaatggcatgctgctctgc

SEQ ID NO: 2727672 - DNA, 25 bp, Homo sapien
gaaggatgacttcaccgcatcggca

SEQ ID NO: 2727673 - DNA, 25 bp, Homo sapien
tctgtagaaccatgcacggaagtgt

SEQ ID NO: 2727674 - DNA, 25 bp, Homo sapien
gaagtgttatcacgcttgggcctca

SEQ ID NO: 2727675 - DNA, 25 bp, Homo sapien
caaatctatataggctggagcgcgc

SEQ ID NO: 2727676 - DNA, 25 bp, Homo sapien
caactcctcaaatttttgatggtgg

SEQ ID NO: 2727677 - DNA, 25 bp, Homo sapien
aactcctcaaatttttgatggtggt

SEQ ID NO: 2727678 - DNA, 25 bp, Homo sapien
tcaactcctcaaatttttgatggtg

SEQ ID NO: 2727679 - DNA, 25 bp, Homo sapien
gtcaccactactcaactcctcaaat

SEQ ID NO: 2727680 - DNA, 25 bp, Homo sapien
tttttaaccatgtcagaggattctt

SEQ ID NO: 2727681 - DNA, 25 bp, Homo sapien
ctttttaaccatgtcagaggattct

SEQ ID NO: 2727682 - DNA, 25 bp, Homo sapien
ggtagaagccgcaaactggccttgg

SEQ ID NO: 2727683 - DNA, 25 bp, Homo sapien
tgaatatgccagctacacagtaggt

SEQ ID NO: 2727684 - DNA, 25 bp, Homo sapien
gagtgacagcacgtactgtccaggg

SEQ ID NO: 2727685 - DNA, 25 bp, Homo sapien
caggtggaaagaaccaacaaggtca

SEQ ID NO: 2727686 - DNA, 25 bp, Homo sapien
cagggaacgtatcccctgggtgaat

SEQ ID NO: 2727687 - DNA, 25 bp, Homo sapien
catgtttgcttggttccacacaggg

SEQ ID NO: 2727688 - DNA, 25 bp, Homo sapien
ccttctatgtgcatgtggacgtcat

SEQ ID NO: 2727689 - DNA, 25 bp, Homo sapien
tgagctggtaggacctctcctgacg

SEQ ID NO: 2727690 - DNA, 25 bp, Homo sapien
gatgattcacatcctaggcaaagag

SEQ ID NO: 2727691 - DNA, 25 bp, Homo sapien
tatagagacccgaatattaccacac

SEQ ID NO: 2727692 - DNA, 25 bp, Homo sapien
tacaggtgactaatgatggccaaga

SEQ ID NO: 2727693 - DNA, 25 bp, Homo sapien
tatgcatgcatacctgtacagtgtg

SEQ ID NO: 2727694 - DNA, 25 bp, Homo sapien
gtccttcttagcacttgtcacaatt

SEQ ID NO: 2727695 - DNA, 25 bp, Homo sapien
tcttagcacttgtcacaattttaat

SEQ ID NO: 2727696 - DNA, 25 bp, Homo sapien
cttcttagcacttgtcacaatttta

SEQ ID NO: 2727697 - DNA, 25 bp, Homo sapien
tccttcttagcacttgtcacaattt

SEQ ID NO: 2727698 - DNA, 25 bp, Homo sapien
tcatctgtaacatcaaaagaggcct

SEQ ID NO: 2727699 - DNA, 25 bp, Homo sapien
gatgtttaacgctccctgggtgatc

SEQ ID NO: 2727700 - DNA, 25 bp, Homo sapien
caaaaatgagccatgctgacctgac

SEQ ID NO: 2727701 - DNA, 25 bp, Homo sapien
gaaccacgtcaaaggtgagagccca

SEQ ID NO: 2727702 - DNA, 25 bp, Homo sapien
ggttatcattcaggataccccagtt

SEQ ID NO: 2727703 - DNA, 25 bp, Homo sapien
aggagaggggttatcattcaggata

SEQ ID NO: 2727704 - DNA, 25 bp, Homo sapien
gggttatcattcaggataccccagt

SEQ ID NO: 2727705 - DNA, 25 bp, Homo sapien
gaggggttatcattcaggatacccc

SEQ ID NO: 2727706 - DNA, 25 bp, Homo sapien
gtgttttacttctgactagaagcat

SEQ ID NO: 2727707 - DNA, 25 bp, Homo sapien
ctgcatttggctgttaatgaaaaat

SEQ ID NO: 2727708 - DNA, 25 bp, Homo sapien
catttggctgttaatgaaaaatgac

SEQ ID NO: 2727709 - DNA, 25 bp, Homo sapien
aatgacagtgttttacttctgacta

SEQ ID NO: 2727710 - DNA, 25 bp, Homo sapien
caatatgaaggacttattattcctt

SEQ ID NO: 2727711 - DNA, 25 bp, Homo sapien
gaaaattacaatatgaaggacttat

SEQ ID NO: 2727712 - DNA, 25 bp, Homo sapien
cttttggagtaattttgctgctggt

SEQ ID NO: 2727713 - DNA, 25 bp, Homo sapien
ttttggagtaattttgctgctggtc

SEQ ID NO: 2727714 - DNA, 25 bp, Homo sapien
tcaatgtagaaggagtagtgctggt

SEQ ID NO: 2727715 - DNA, 25 bp, Homo sapien
cacaagttcagagctggtctggaag

SEQ ID NO: 2727716 - DNA, 25 bp, Homo sapien
tggtcacccatctggtttaagatgg

SEQ ID NO: 2727717 - DNA, 25 bp, Homo sapien
gatggctgtcatacatgccacaaag

SEQ ID NO: 2727718 - DNA, 25 bp, Homo sapien
tccagggtacacgttctttccaatg

SEQ ID NO: 2727719 - DNA, 25 bp, Homo sapien
gtctccagggtacacgttctttcca

SEQ ID NO: 2727720 - DNA, 25 bp, Homo sapien
cagtctccagggtacacgttctttc

SEQ ID NO: 2727721 - DNA, 25 bp, Homo sapien
tccagtctccagggtacacgttctt

SEQ ID NO: 2727722 - DNA, 25 bp, Homo sapien
gaactcaaagttcgtgtgttctagg

SEQ ID NO: 2727723 - DNA, 25 bp, Homo sapien
aactcaaagttcgtgtgttctagga

SEQ ID NO: 2727724 - DNA, 25 bp, Homo sapien
gttctaggaacttctggttcatggt

SEQ ID NO: 2727725 - DNA, 25 bp, Homo sapien
cgtgtgttctaggaacttctggttc

SEQ ID NO: 2727726 - DNA, 25 bp, Homo sapien
gacacagggtctatgcatgtttagt

SEQ ID NO: 2727727 - DNA, 25 bp, Homo sapien
tcctagaaccggaatttctaagaca

SEQ ID NO: 2727728 - DNA, 25 bp, Homo sapien
tccagggtttcagttcaatgaccag

SEQ ID NO: 2727729 - DNA, 25 bp, Homo sapien
cattatcatggacaaggtaccctac

SEQ ID NO: 2727730 - DNA, 25 bp, Homo sapien
aacaattccttggatagcctttcag

SEQ ID NO: 2727731 - DNA, 25 bp, Homo sapien
ttttccatcctaccttggatccaag

SEQ ID NO: 2727732 - DNA, 25 bp, Homo sapien
gtctaattcctcagaagagaatgtt

SEQ ID NO: 2727733 - DNA, 25 bp, Homo sapien
ttttaaaagtctgctgcacttggct

SEQ ID NO: 2727734 - DNA, 25 bp, Homo sapien
gccagatgaaaatagttgttccaca

SEQ ID NO: 2727735 - DNA, 25 bp, Homo sapien
ctgccagatgaaaatagttgttcca

SEQ ID NO: 2727736 - DNA, 25 bp, Homo sapien
ccagatgaaaatagttgttccacag

SEQ ID NO: 2727737 - DNA, 25 bp, Homo sapien
tgccagatgaaaatagttgttccac

SEQ ID NO: 2727738 - DNA, 25 bp, Homo sapien
attttgttgtatttggcgtgtgaga

SEQ ID NO: 2727739 - DNA, 25 bp, Homo sapien
gcagagaatcctgggtgataaaagc

SEQ ID NO: 2727740 - DNA, 25 bp, Homo sapien
agagaatcctgggtgataaaagcca

SEQ ID NO: 2727741 - DNA, 25 bp, Homo sapien
tggcgtgtgagaactgctccagctg

SEQ ID NO: 2727742 - DNA, 25 bp, Homo sapien
caagcttgtaccacatatcacggat

SEQ ID NO: 2727743 - DNA, 25 bp, Homo sapien
cacatatcacggatggagaagccaa

SEQ ID NO: 2727744 - DNA, 25 bp, Homo sapien
gagaagccaattagccgtctcatgt

SEQ ID NO: 2727745 - DNA, 25 bp, Homo sapien
tcacggatggagaagccaattagcc

SEQ ID NO: 2727746 - DNA, 25 bp, Homo sapien
gcctcagggataagtgtcatctcta

SEQ ID NO: 2727747 - DNA, 25 bp, Homo sapien
gaaatccccacttctttgatattca

SEQ ID NO: 2727748 - DNA, 25 bp, Homo sapien
tattcacacagcatcatgtcgaaga

SEQ ID NO: 2727749 - DNA, 25 bp, Homo sapien
aagattggtatggtggctttccgga

SEQ ID NO: 2727750 - DNA, 25 bp, Homo sapien
ctgacattgacatgggaagagcaga

SEQ ID NO: 2727751 - DNA, 25 bp, Homo sapien
gctgacattgacatgggaagagcag

SEQ ID NO: 2727752 - DNA, 25 bp, Homo sapien
cagagatgttattagaggcctggat

SEQ ID NO: 2727753 - DNA, 25 bp, Homo sapien
gaagagcagagatgttattagaggc

SEQ ID NO: 2727754 - DNA, 25 bp, Homo sapien
ttggggagtgattgctcttcctcac

SEQ ID NO: 2727755 - DNA, 25 bp, Homo sapien
tgagatttggggagtgattgctctt

SEQ ID NO: 2727756 - DNA, 25 bp, Homo sapien
tggagtccagccctgtagaagtatg

SEQ ID NO: 2727757 - DNA, 25 bp, Homo sapien
tccagccctgtagaagtatgagatt

SEQ ID NO: 2727758 - DNA, 25 bp, Homo sapien
cacaaaggatctaagggagggacca

SEQ ID NO: 2727759 - DNA, 25 bp, Homo sapien
gttccctcacttttgtgcacaaagg

SEQ ID NO: 2727760 - DNA, 25 bp, Homo sapien
cgttccctcacttttgtgcacaaag

SEQ ID NO: 2727761 - DNA, 25 bp, Homo sapien
tgcacaaaggatctaagggagggac

SEQ ID NO: 2727762 - DNA, 25 bp, Homo sapien
ctttcctgggcataaaggatagagc

SEQ ID NO: 2727763 - DNA, 25 bp, Homo sapien
gttcacacatcatccgtgatgccat

SEQ ID NO: 2727764 - DNA, 25 bp, Homo sapien
ttggaatctttaggtgatgaaaagg

SEQ ID NO: 2727765 - DNA, 25 bp, Homo sapien
gatagagctccatggagttggaatc

SEQ ID NO: 2727766 - DNA, 25 bp, Homo sapien
ctgcatgtactgctcgtcgcctcgg

SEQ ID NO: 2727767 - DNA, 25 bp, Homo sapien
gtggtccagcttcaggatgatttcg

SEQ ID NO: 2727768 - DNA, 25 bp, Homo sapien
tccaggagctgcatgtactgctcgt

SEQ ID NO: 2727769 - DNA, 25 bp, Homo sapien
gcttcaggatgatttcgttttcaaa

SEQ ID NO: 2727770 - DNA, 25 bp, Homo sapien
tgtccaccccactagctcgtcctag

SEQ ID NO: 2727771 - DNA, 25 bp, Homo sapien
cactagctcgtcctagtttccttga

SEQ ID NO: 2727772 - DNA, 25 bp, Homo sapien
actccaagtccagtggtcttgggca

SEQ ID NO: 2727773 - DNA, 25 bp, Homo sapien
gttaaaatgatgtcctgactccaag

SEQ ID NO: 2727774 - DNA, 25 bp, Homo sapien
caatggttgggtgctctgcagcaca

SEQ ID NO: 2727775 - DNA, 25 bp, Homo sapien
atcacaccccggtaatccagcagct

SEQ ID NO: 2727776 - DNA, 25 bp, Homo sapien
ttctccaccgacttggcaatggttg

SEQ ID NO: 2727777 - DNA, 25 bp, Homo sapien
gctcatgcggttgtctttgctctca

SEQ ID NO: 2727778 - DNA, 25 bp, Homo sapien
gcctggtggagttattagcaatgaa

SEQ ID NO: 2727779 - DNA, 25 bp, Homo sapien
atgaattcctttctgctgtcatcgg

SEQ ID NO: 2727780 - DNA, 25 bp, Homo sapien
tagaaaatcaatggcaatatctagg

SEQ ID NO: 2727781 - DNA, 25 bp, Homo sapien
ttctgctgtcatcgggatttttaaa

SEQ ID NO: 2727782 - DNA, 25 bp, Homo sapien
cctccctgttgttatctttgtagaa

SEQ ID NO: 2727783 - DNA, 25 bp, Homo sapien
ctccctgttgttatctttgtagaaa

SEQ ID NO: 2727784 - DNA, 25 bp, Homo sapien
aaggagaagtgaatgttcagtgttc

SEQ ID NO: 2727785 - DNA, 25 bp, Homo sapien
aaaggagaagtgaatgttcagtgtt

SEQ ID NO: 2727786 - DNA, 25 bp, Homo sapien
caaaggagaagtgaatgttcagtgt

SEQ ID NO: 2727787 - DNA, 25 bp, Homo sapien
tcacagtccaggtgaagatcgcgga

SEQ ID NO: 2727788 - DNA, 25 bp, Homo sapien
ccaggtgaagatcgcggagtttgta

SEQ ID NO: 2727789 - DNA, 25 bp, Homo sapien
gaaggagcgtgtaggcagcctctgt

SEQ ID NO: 2727790 - DNA, 25 bp, Homo sapien
ggagaaggagcgtgtaggcagcctc

SEQ ID NO: 2727791 - DNA, 25 bp, Homo sapien
tgtgatgcacactgctcatccgacc

SEQ ID NO: 2727792 - DNA, 25 bp, Homo sapien
tcctttgtcaaagtagcctatgatg

SEQ ID NO: 2727793 - DNA, 25 bp, Homo sapien
tagcctatgatggtctcgtagagcg

SEQ ID NO: 2727794 - DNA, 25 bp, Homo sapien
tggtctcgtagagcgtctccttcag

SEQ ID NO: 2727795 - DNA, 25 bp, Homo sapien
gatctccatctcgtactgttccgcc

SEQ ID NO: 2727796 - DNA, 25 bp, Homo sapien
agctccttgcacagacttatggcct

SEQ ID NO: 2727797 - DNA, 25 bp, Homo sapien
tctcgtactgttccgccagctcctt

SEQ ID NO: 2727798 - DNA, 25 bp, Homo sapien
tgagcagctcatagtcaaagatctc

SEQ ID NO: 2727799 - DNA, 25 bp, Homo sapien
gaggggaatccctggccgtagtatc

SEQ ID NO: 2727800 - DNA, 25 bp, Homo sapien
cagcaaagtagtctggtttgggcct

SEQ ID NO: 2727801 - DNA, 25 bp, Homo sapien
ttgggcctgaggattttcatgatgc

SEQ ID NO: 2727802 - DNA, 25 bp, Homo sapien
tccctggccgtagtatccaacagca

SEQ ID NO: 2727803 - DNA, 25 bp, Homo sapien
ggaaatcttctcttcgctcatattc

SEQ ID NO: 2727804 - DNA, 25 bp, Homo sapien
ttcgctcatattccttcccgcggta

SEQ ID NO: 2727805 - DNA, 25 bp, Homo sapien
tcccgcggtagatgaacactttgtt

SEQ ID NO: 2727806 - DNA, 25 bp, Homo sapien
tcttcacatcatctcccggggcaga

SEQ ID NO: 2727807 - DNA, 25 bp, Homo sapien
aatccctgtagttaaggacttatat

SEQ ID NO: 2727808 - DNA, 25 bp, Homo sapien
ccctgtagttaaggacttatatctg

SEQ ID NO: 2727809 - DNA, 25 bp, Homo sapien
gaatccctgtagttaaggacttata

SEQ ID NO: 2727810 - DNA, 25 bp, Homo sapien
tggaatccctgtagttaaggactta

SEQ ID NO: 2727811 - DNA, 25 bp, Homo sapien
caagacaggctggacagtgaagcac

SEQ ID NO: 2727812 - DNA, 25 bp, Homo sapien
cactggcttattcttgaacctggga

SEQ ID NO: 2727813 - DNA, 25 bp, Homo sapien
gaacctgggatgttcatccaagaca

SEQ ID NO: 2727814 - DNA, 25 bp, Homo sapien
tttataatctggtcaggcactggct

SEQ ID NO: 2727815 - DNA, 25 bp, Homo sapien
cagagtcccttgtggtgcatttaaa

SEQ ID NO: 2727816 - DNA, 25 bp, Homo sapien
tgggctccgtaagagtgacttttgc

SEQ ID NO: 2727817 - DNA, 25 bp, Homo sapien
taaacttcaggcctggcagagtccc

SEQ ID NO: 2727818 - DNA, 25 bp, Homo sapien
gactggtcttgtgcccctttgagaa

SEQ ID NO: 2727819 - DNA, 25 bp, Homo sapien
gaacctttgcacgtagttggatttg

SEQ ID NO: 2727820 - DNA, 25 bp, Homo sapien
ttgcacgtagttggatttgtagaag

SEQ ID NO: 2727821 - DNA, 25 bp, Homo sapien
attctctgggtctacggtccccctg

SEQ ID NO: 2727822 - DNA, 25 bp, Homo sapien
gccgggagtagtggaacctttgcac

SEQ ID NO: 2727823 - DNA, 25 bp, Homo sapien
gagggtttctacgtgctggcaatgc

SEQ ID NO: 2727824 - DNA, 25 bp, Homo sapien
acctgggtatcggagaagcttggca

SEQ ID NO: 2727825 - DNA, 25 bp, Homo sapien
tattgcaagacccagaaacacgctc

SEQ ID NO: 2727826 - DNA, 25 bp, Homo sapien
cattctgaggctggccgatgcatgc

SEQ ID NO: 2727827 - DNA, 25 bp, Homo sapien
tgtatgcagtcacgaaggaggttct

SEQ ID NO: 2727828 - DNA, 25 bp, Homo sapien
caggatccccggcagcttgtatgca

SEQ ID NO: 2727829 - DNA, 25 bp, Homo sapien
cgaaggaggttctctcaatccacat

SEQ ID NO: 2727830 - DNA, 25 bp, Homo sapien
ctgcgacatgtgcaccacctcaaac

SEQ ID NO: 2727831 - DNA, 25 bp, Homo sapien
atcactctggtactggtttatcatc

SEQ ID NO: 2727832 - DNA, 25 bp, Homo sapien
tcttctcattggccgtggacatggt

SEQ ID NO: 2727833 - DNA, 25 bp, Homo sapien
gggagggtctcatcactctggtact

SEQ ID NO: 2727834 - DNA, 25 bp, Homo sapien
ttggcgaagcctcccatgacagcag

SEQ ID NO: 2727835 - DNA, 25 bp, Homo sapien
tccttgaggtgggtcagcttgtcct

SEQ ID NO: 2727836 - DNA, 25 bp, Homo sapien
tgaggtgggtcagcttgtcctggtc

SEQ ID NO: 2727837 - DNA, 25 bp, Homo sapien
ggtccttgaggtgggtcagcttgtc

SEQ ID NO: 2727838 - DNA, 25 bp, Homo sapien
ccttgaggtgggtcagcttgtcctg

SEQ ID NO: 2727839 - DNA, 25 bp, Homo sapien
aaagaatgagccagaggctgaccgg

SEQ ID NO: 2727840 - DNA, 25 bp, Homo sapien
tctgcctgctaagaattcatcaagg

SEQ ID NO: 2727841 - DNA, 25 bp, Homo sapien
ggcatagcctcatcttaccacatgg

SEQ ID NO: 2727842 - DNA, 25 bp, Homo sapien
tcccttgcctcataggagggctgga

SEQ ID NO: 2727843 - DNA, 25 bp, Homo sapien
catccggtcatggaagggtcgcaag

SEQ ID NO: 2727844 - DNA, 25 bp, Homo sapien
aacattcctccatccggtcatggaa

SEQ ID NO: 2727845 - DNA, 25 bp, Homo sapien
gacacccttttctcatggatcttaa

SEQ ID NO: 2727846 - DNA, 25 bp, Homo sapien
gaagggtcgcaagttatctgacacc

SEQ ID NO: 2727847 - DNA, 25 bp, Homo sapien
ccactctcctgtcgtcaaagtcagg

SEQ ID NO: 2727848 - DNA, 25 bp, Homo sapien
gcatagacctgggacggcccactct

SEQ ID NO: 2727849 - DNA, 25 bp, Homo sapien
tgcagtcagaattcatggaagccag

SEQ ID NO: 2727850 - DNA, 25 bp, Homo sapien
gatggacatctgtctgtatgagcgc

SEQ ID NO: 2727851 - DNA, 25 bp, Homo sapien
ttggacctccgcagcttgacctcag

SEQ ID NO: 2727852 - DNA, 25 bp, Homo sapien
tccactctcggcgtcttgggtgatg

SEQ ID NO: 2727853 - DNA, 25 bp, Homo sapien
tctcatccgcaaaaactacgctgct

SEQ ID NO: 2727854 - DNA, 25 bp, Homo sapien
gggtgatgctaattccaggtcaaag

SEQ ID NO: 2727855 - DNA, 25 bp, Homo sapien
tagtggaaatgtgctaacagcgctg

SEQ ID NO: 2727856 - DNA, 25 bp, Homo sapien
tatccatccacgcaagagtagcctg

SEQ ID NO: 2727857 - DNA, 25 bp, Homo sapien
tgtaaatggtgtcccctagaatcga

SEQ ID NO: 2727858 - DNA, 25 bp, Homo sapien
tgcaatacccatagcaccgcagtgg

SEQ ID NO: 2727859 - DNA, 25 bp, Homo sapien
ggttggtgtcactcatgaactcatg

SEQ ID NO: 2727860 - DNA, 25 bp, Homo sapien
ggatggccgcatgctccgagaggtt

SEQ ID NO: 2727861 - DNA, 25 bp, Homo sapien
tcatttgagagaggacagacgcctt

SEQ ID NO: 2727862 - DNA, 25 bp, Homo sapien
ctccgagaggttggtgtcactcatg

SEQ ID NO: 2727863 - DNA, 25 bp, Homo sapien
catagcagcagacgtcaaggacttc

SEQ ID NO: 2727864 - DNA, 25 bp, Homo sapien
cagaaagagtcttccaggtccacaa

SEQ ID NO: 2727865 - DNA, 25 bp, Homo sapien
gaagagagtctcaaacccacgtgtc

SEQ ID NO: 2727866 - DNA, 25 bp, Homo sapien
tgtgagttaggaccatcggctgtgc

SEQ ID NO: 2727867 - DNA, 25 bp, Homo sapien
cgtgtgagtgtcttcttgtcaccat

SEQ ID NO: 2727868 - DNA, 25 bp, Homo sapien
gtcttgaagaactgattgaccttct

SEQ ID NO: 2727869 - DNA, 25 bp, Homo sapien
ggagatgtgttggcctcatccaacc

SEQ ID NO: 2727870 - DNA, 25 bp, Homo sapien
aactgattgaccttcttccgtgtga

SEQ ID NO: 2727871 - DNA, 25 bp, Homo sapien
ccttcttcagccgatttgctggcca

SEQ ID NO: 2727872 - DNA, 25 bp, Homo sapien
tggacagcgagtctgggatctgttt

SEQ ID NO: 2727873 - DNA, 25 bp, Homo sapien
cttcttcagccgatttgctggccag

SEQ ID NO: 2727874 - DNA, 25 bp, Homo sapien
agtctgggatctgtttgccttcttc

SEQ ID NO: 2727875 - DNA, 25 bp, Homo sapien
tgtctcctctaagtaaggacaactg

SEQ ID NO: 2727876 - DNA, 25 bp, Homo sapien
tgagttcaggaatctacgttgaggc

SEQ ID NO: 2727877 - DNA, 25 bp, Homo sapien
tctctgaggcttcgatgttccacgc

SEQ ID NO: 2727878 - DNA, 25 bp, Homo sapien
cattcttgctggtaccttgagttca

SEQ ID NO: 2727879 - DNA, 25 bp, Homo sapien
acttttttaacatgctggtagccca

SEQ ID NO: 2727880 - DNA, 25 bp, Homo sapien
gaggtatgacactccactattcaga

SEQ ID NO: 2727881 - DNA, 25 bp, Homo sapien
ggcttgggtggtcttgccatctctt

SEQ ID NO: 2727882 - DNA, 25 bp, Homo sapien
actattcagattcgtgaggaagacc

SEQ ID NO: 2727883 - DNA, 25 bp, Homo sapien
tgttgtagcccaaaccccaacaatc

SEQ ID NO: 2727884 - DNA, 25 bp, Homo sapien
tcatcgcaacaggactttttagact

SEQ ID NO: 2727885 - DNA, 25 bp, Homo sapien
tagaagctgaactaggcaacacgtc

SEQ ID NO: 2727886 - DNA, 25 bp, Homo sapien
ttgcagcagggacatagaggccacc

SEQ ID NO: 2727887 - DNA, 25 bp, Homo sapien
caatcatggacggtgaaatagagtc

SEQ ID NO: 2727888 - DNA, 25 bp, Homo sapien
cggtgaaatagagtctgacattgag

SEQ ID NO: 2727889 - DNA, 25 bp, Homo sapien
gacttgcaaacaatcatggacggtg

SEQ ID NO: 2727890 - DNA, 25 bp, Homo sapien
tggcattgtaggagaagacttgcaa

SEQ ID NO: 2727891 - DNA, 25 bp, Homo sapien
ggttgcatccacatcataaggcaga

SEQ ID NO: 2727892 - DNA, 25 bp, Homo sapien
gaatgctactgggtctcctcagaag

SEQ ID NO: 2727893 - DNA, 25 bp, Homo sapien
taaggcagagcgtggcagaaatcca

SEQ ID NO: 2727894 - DNA, 25 bp, Homo sapien
gagctcctcactatgggacaccaag

SEQ ID NO: 2727895 - DNA, 25 bp, Homo sapien
cctctggtcaccacctcgctcccgc

SEQ ID NO: 2727896 - DNA, 25 bp, Homo sapien
tggtagcagctgagacttctctctg

SEQ ID NO: 2727897 - DNA, 25 bp, Homo sapien
ctctgtgatgaagcagatgggagaa

SEQ ID NO: 2727898 - DNA, 25 bp, Homo sapien
aagttggggtcagcccctctggtca

SEQ ID NO: 2727899 - DNA, 25 bp, Homo sapien
ctactcagagggtaggcgctggccc

SEQ ID NO: 2727900 - DNA, 25 bp, Homo sapien
tcagagggtaggcgctggcccctga

SEQ ID NO: 2727901 - DNA, 25 bp, Homo sapien
cagagggtaggcgctggcccctgac

SEQ ID NO: 2727902 - DNA, 25 bp, Homo sapien
actcagagggtaggcgctggcccct

SEQ ID NO: 2727903 - DNA, 25 bp, Homo sapien
ctggccggagccacctgcctggcac

SEQ ID NO: 2727904 - DNA, 25 bp, Homo sapien
tggccggagccacctgcctggcacc

SEQ ID NO: 2727905 - DNA, 25 bp, Homo sapien
ctgcctggcacctgcaccccggagc

SEQ ID NO: 2727906 - DNA, 25 bp, Homo sapien
tggcacctgcaccccggagctgccc

SEQ ID NO: 2727907 - DNA, 25 bp, Homo sapien
ggagggcgccggcaggtcgaaggag

SEQ ID NO: 2727908 - DNA, 25 bp, Homo sapien
ggcgccggcaggtcgaaggagctca

SEQ ID NO: 2727909 - DNA, 25 bp, Homo sapien
agggcgccggcaggtcgaaggagct

SEQ ID NO: 2727910 - DNA, 25 bp, Homo sapien
gcgccggcaggtcgaaggagctcat

SEQ ID NO: 2727911 - DNA, 25 bp, Homo sapien
gaagttgtcggccacgtactggtag

SEQ ID NO: 2727912 - DNA, 25 bp, Homo sapien
aagaagttctcatagtagaggttca

SEQ ID NO: 2727913 - DNA, 25 bp, Homo sapien
ggcctctgcactccataggcctggg

SEQ ID NO: 2727914 - DNA, 25 bp, Homo sapien
tagatctggctgagagtgaggcgct

SEQ ID NO: 2727915 - DNA, 25 bp, Homo sapien
ggaagtgagtcttccttggggacac

SEQ ID NO: 2727916 - DNA, 25 bp, Homo sapien
ctttctagaatggggtcttggggag

SEQ ID NO: 2727917 - DNA, 25 bp, Homo sapien
cacctccatctttaattaagcagcc

SEQ ID NO: 2727918 - DNA, 25 bp, Homo sapien
ctccatctttaattaagcagcccat

SEQ ID NO: 2727919 - DNA, 25 bp, Homo sapien
cctccatctttaattaagcagccca

SEQ ID NO: 2727920 - DNA, 25 bp, Homo sapien
acctccatctttaattaagcagccc

SEQ ID NO: 2727921 - DNA, 25 bp, Homo sapien
gaggctccatccaagatgtcctgag

SEQ ID NO: 2727922 - DNA, 25 bp, Homo sapien
ggctgtgctagaggaaacatctgat

SEQ ID NO: 2727923 - DNA, 25 bp, Homo sapien
tctctgtcttctctaaggccaagga

SEQ ID NO: 2727924 - DNA, 25 bp, Homo sapien
tgtccaccgggagactgctctctgt

SEQ ID NO: 2727925 - DNA, 25 bp, Homo sapien
cactgttgtagaagtgagggctgaa

SEQ ID NO: 2727926 - DNA, 25 bp, Homo sapien
cacagatcctccatagctgagcatg

SEQ ID NO: 2727927 - DNA, 25 bp, Homo sapien
cagggctcagtcctggtgtgaccaa

SEQ ID NO: 2727928 - DNA, 25 bp, Homo sapien
ttgaaggtcagtgagttctgccccg

SEQ ID NO: 2727929 - DNA, 25 bp, Homo sapien
tgtggccagtacagagcctagtaca

SEQ ID NO: 2727930 - DNA, 25 bp, Homo sapien
agttccgcagtcatggaccaccgtg

SEQ ID NO: 2727931 - DNA, 25 bp, Homo sapien
caggacaagttgtgcctaggctggc

SEQ ID NO: 2727932 - DNA, 25 bp, Homo sapien
tttcctgcactaaggccactggtga

SEQ ID NO: 2727933 - DNA, 25 bp, Homo sapien
tgctcagagagcactgaacaggccc

SEQ ID NO: 2727934 - DNA, 25 bp, Homo sapien
ttcctggccttctgggggaatctgg

SEQ ID NO: 2727935 - DNA, 25 bp, Homo sapien
cggttccctggtgggtaagcgctgg

SEQ ID NO: 2727936 - DNA, 25 bp, Homo sapien
gggaatctgggacagctgctcagag

SEQ ID NO: 2727937 - DNA, 25 bp, Homo sapien
gctcgttaccgcagctgaaactttg

SEQ ID NO: 2727938 - DNA, 25 bp, Homo sapien
ccgcagctgaaactttgttataggc

SEQ ID NO: 2727939 - DNA, 25 bp, Homo sapien
tgcccgatgctcgttaccgcagctg

SEQ ID NO: 2727940 - DNA, 25 bp, Homo sapien
gctgaaactttgttataggcttcca

SEQ ID NO: 2727941 - DNA, 25 bp, Homo sapien
tcaaccgtagtctccttattggtaa

SEQ ID NO: 2727942 - DNA, 25 bp, Homo sapien
tggattttcaaccgtagtctcctta

SEQ ID NO: 2727943 - DNA, 25 bp, Homo sapien
ttcaaccgtagtctccttattggta

SEQ ID NO: 2727944 - DNA, 25 bp, Homo sapien
attttcaaccgtagtctccttattg

SEQ ID NO: 2727945 - DNA, 25 bp, Homo sapien
tctgggtagtagcttgcctcctcat

SEQ ID NO: 2727946 - DNA, 25 bp, Homo sapien
cacctcacaatctgggtagtagctt

SEQ ID NO: 2727947 - DNA, 25 bp, Homo sapien
cctcctcatgcaaagacttggggct

SEQ ID NO: 2727948 - DNA, 25 bp, Homo sapien
tgttccccacctcacaatctgggta

SEQ ID NO: 2727949 - DNA, 25 bp, Homo sapien
tgctcctttcaatggtcctgacagg

SEQ ID NO: 2727950 - DNA, 25 bp, Homo sapien
atggtcctgacaggatccctttcag

SEQ ID NO: 2727951 - DNA, 25 bp, Homo sapien
tctatcctcattgctcctttcaatg

SEQ ID NO: 2727952 - DNA, 25 bp, Homo sapien
cacaggcccttagcaaatgctgctc

SEQ ID NO: 2727953 - DNA, 25 bp, Homo sapien
ttctaaagaagcaggtacttgagtt

SEQ ID NO: 2727954 - DNA, 25 bp, Homo sapien
caaggccatagtgagtggtttcccg

SEQ ID NO: 2727955 - DNA, 25 bp, Homo sapien
catagtgagtggtttcccggtggat

SEQ ID NO: 2727956 - DNA, 25 bp, Homo sapien
aggcaggtatgaggtagtagctaat

SEQ ID NO: 2727957 - DNA, 25 bp, Homo sapien
gaatgtgcaaatcactttccacggg

SEQ ID NO: 2727958 - DNA, 25 bp, Homo sapien
taatcaaagaaatccgtctggttgg

SEQ ID NO: 2727959 - DNA, 25 bp, Homo sapien
aaccaaagctggaggctctccgaag

SEQ ID NO: 2727960 - DNA, 25 bp, Homo sapien
tccgaagcccacttatgttagtcaa

SEQ ID NO: 2727961 - DNA, 25 bp, Homo sapien
cagggcacattcaccgcccccagga

SEQ ID NO: 2727962 - DNA, 25 bp, Homo sapien
agggcacattcaccgcccccaggag

SEQ ID NO: 2727963 - DNA, 25 bp, Homo sapien
gtacgctgggtcttccctcactgca

SEQ ID NO: 2727964 - DNA, 25 bp, Homo sapien
tttccaggcctttccatcggcgcca

SEQ ID NO: 2727965 - DNA, 25 bp, Homo sapien
gagagcagcaccctccatgggcctt

SEQ ID NO: 2727966 - DNA, 25 bp, Homo sapien
aaagtacgctgggtcttccctcact

SEQ ID NO: 2727967 - DNA, 25 bp, Homo sapien
gcagcaaagtcaggatcgatgccat

SEQ ID NO: 2727968 - DNA, 25 bp, Homo sapien
ggatgtctctaatgactgtctgcaa

SEQ ID NO: 2727969 - DNA, 25 bp, Homo sapien
gccatctgctcgtagcatgacaggg

SEQ ID NO: 2727970 - DNA, 25 bp, Homo sapien
gcaaactcaggacccctgatgtggg

SEQ ID NO: 2727971 - DNA, 25 bp, Homo sapien
ccaggttgtcaggaaagtgatcagc

SEQ ID NO: 2727972 - DNA, 25 bp, Homo sapien
tctttggccaatgtgatgggcagaa

SEQ ID NO: 2727973 - DNA, 25 bp, Homo sapien
aactctggctagagctctttggcca

SEQ ID NO: 2727974 - DNA, 25 bp, Homo sapien
gtgctacatacggtcccatctctgc

SEQ ID NO: 2727975 - DNA, 25 bp, Homo sapien
aacatgcgggacattccctgtccaa

SEQ ID NO: 2727976 - DNA, 25 bp, Homo sapien
gtccatcttgggtgcagaaaccctg

SEQ ID NO: 2727977 - DNA, 25 bp, Homo sapien
cttttcaaacatgcgggacattccc

SEQ ID NO: 2727978 - DNA, 25 bp, Homo sapien
ccatcttttcaaacatgcgggacat

SEQ ID NO: 2727979 - DNA, 25 bp, Homo sapien
ccccatggatgtttttaccaagtgt

SEQ ID NO: 2727980 - DNA, 25 bp, Homo sapien
catggatgtttttaccaagtgtatt

SEQ ID NO: 2727981 - DNA, 25 bp, Homo sapien
acaaacggcccttgtaggtgtggtg

SEQ ID NO: 2727982 - DNA, 25 bp, Homo sapien
caaacaaacggcccttgtaggtgtg

SEQ ID NO: 2727983 - DNA, 25 bp, Homo sapien
cctggataatttccactgcaacaat

SEQ ID NO: 2727984 - DNA, 25 bp, Homo sapien
ttaggccctggatgctatttctttt

SEQ ID NO: 2727985 - DNA, 25 bp, Homo sapien
ccttaggccctggatgctatttctt

SEQ ID NO: 2727986 - DNA, 25 bp, Homo sapien
aatttccactgcaacaatgatgatg

SEQ ID NO: 2727987 - DNA, 25 bp, Homo sapien
tgtgccagaatctggctctcctcct

SEQ ID NO: 2727988 - DNA, 25 bp, Homo sapien
cctgaaagcccacatcacaattgtt

SEQ ID NO: 2727989 - DNA, 25 bp, Homo sapien
ccttcactttaacactgcagaattt

SEQ ID NO: 2727990 - DNA, 25 bp, Homo sapien
agcccacatcacaattgttgggtat

SEQ ID NO: 2727991 - DNA, 25 bp, Homo sapien
tttccttcactttaacactgcagaa

SEQ ID NO: 2727992 - DNA, 25 bp, Homo sapien
ggagttgtagtcccaggcaaggccc

SEQ ID NO: 2727993 - DNA, 25 bp, Homo sapien
gggagttgtagtcccaggcaaggcc

SEQ ID NO: 2727994 - DNA, 25 bp, Homo sapien
ctgggagttgtagtcccaggcaagg

SEQ ID NO: 2727995 - DNA, 25 bp, Homo sapien
tgggagttgtagtcccaggcaaggc

SEQ ID NO: 2727996 - DNA, 25 bp, Homo sapien
tggccaaccgtcaccgaggttctga

SEQ ID NO: 2727997 - DNA, 25 bp, Homo sapien
agccgacggtgaaggcgaagccgcg

SEQ ID NO: 2727998 - DNA, 25 bp, Homo sapien
gagcagggagccgacggtgaaggcg

SEQ ID NO: 2727999 - DNA, 25 bp, Homo sapien
tcaccgaggttctgacaggagcagg

SEQ ID NO: 2728000 - DNA, 25 bp, Homo sapien
tcaaggcctgataccactagagcgc

SEQ ID NO: 2728001 - DNA, 25 bp, Homo sapien
tggagcctcgggcagcctggaaatt

SEQ ID NO: 2728002 - DNA, 25 bp, Homo sapien
caggttctactctgaaagcccagcc

SEQ ID NO: 2728003 - DNA, 25 bp, Homo sapien
agagccatcgttagcaccgcaggtt

SEQ ID NO: 2728004 - DNA, 25 bp, Homo sapien
cctctaccttttcctgagcagggag

SEQ ID NO: 2728005 - DNA, 25 bp, Homo sapien
tctaccttttcctgagcagggagaa

SEQ ID NO: 2728006 - DNA, 25 bp, Homo sapien
gcctctaccttttcctgagcaggga

SEQ ID NO: 2728007 - DNA, 25 bp, Homo sapien
ctctaccttttcctgagcagggaga

SEQ ID NO: 2728008 - DNA, 25 bp, Homo sapien
tactttgtccacatttagcttatga

SEQ ID NO: 2728009 - DNA, 25 bp, Homo sapien
tcttcttcaactccgaagaaattgt

SEQ ID NO: 2728010 - DNA, 25 bp, Homo sapien
tatgatcagtaacacgcttcttacc

SEQ ID NO: 2728011 - DNA, 25 bp, Homo sapien
tgtccacatttagcttatgatcagt

SEQ ID NO: 2728012 - DNA, 25 bp, Homo sapien
tttggtgcctaacgaacggccatgc

SEQ ID NO: 2728013 - DNA, 25 bp, Homo sapien
caaatctggccaatgaaagggaact

SEQ ID NO: 2728014 - DNA, 25 bp, Homo sapien
catattaggcactcattatttggtg

SEQ ID NO: 2728015 - DNA, 25 bp, Homo sapien
taagttctgagtggtccaaactggt

SEQ ID NO: 2728016 - DNA, 25 bp, Homo sapien
cattgcttgaaacagcagggttcac

SEQ ID NO: 2728017 - DNA, 25 bp, Homo sapien
ccaaacttatttggccataagaaca

SEQ ID NO: 2728018 - DNA, 25 bp, Homo sapien
gactctgttctactgtacaccatct

SEQ ID NO: 2728019 - DNA, 25 bp, Homo sapien
aatatgtagcataaagcactttcca

SEQ ID NO: 2728020 - DNA, 25 bp, Homo sapien
gatctgagcaggtcatatagtccat

SEQ ID NO: 2728021 - DNA, 25 bp, Homo sapien
aatcgaatcaatcaaggcaccgtgt

SEQ ID NO: 2728022 - DNA, 25 bp, Homo sapien
tacagctggagcatagaacatgcag

SEQ ID NO: 2728023 - DNA, 25 bp, Homo sapien
taagagaccttgactactagcagtt

SEQ ID NO: 2728024 - DNA, 25 bp, Homo sapien
gagtcctggattatggtaaattctg

SEQ ID NO: 2728025 - DNA, 25 bp, Homo sapien
tagaagagtcctggattatggtaaa

SEQ ID NO: 2728026 - DNA, 25 bp, Homo sapien
catttatgcagagctcttagaagag

SEQ ID NO: 2728027 - DNA, 25 bp, Homo sapien
ctcataggattatgatgaagagagt

SEQ ID NO: 2728028 - DNA, 25 bp, Homo sapien
gttgcccatatttaagactgtgaca

SEQ ID NO: 2728029 - DNA, 25 bp, Homo sapien
gactgtgacactaaaaagacaattg

SEQ ID NO: 2728030 - DNA, 25 bp, Homo sapien
agtatctgttgtgccttagttgccc

SEQ ID NO: 2728031 - DNA, 25 bp, Homo sapien
tctgcacctgtggtactcaataatg

SEQ ID NO: 2728032 - DNA, 25 bp, Homo sapien
gattgcttactagcactgctgtaca

SEQ ID NO: 2728033 - DNA, 25 bp, Homo sapien
catagctgagtcttgtcatatgaca

SEQ ID NO: 2728034 - DNA, 25 bp, Homo sapien
tgctcttgggttattcaacacctta

SEQ ID NO: 2728035 - DNA, 25 bp, Homo sapien
tgcacgcaacccaccagaggtaata

SEQ ID NO: 2728036 - DNA, 25 bp, Homo sapien
gatgggatgattaaaatgtaggata

SEQ ID NO: 2728037 - DNA, 25 bp, Homo sapien
ttagaaacaagggatacatctgata

SEQ ID NO: 2728038 - DNA, 25 bp, Homo sapien
catctgatattttagactcttcaaa

SEQ ID NO: 2728039 - DNA, 25 bp, Homo sapien
tctgcttctgctaagttctcagtct

SEQ ID NO: 2728040 - DNA, 25 bp, Homo sapien
caagactgtgaatcactggtccaga

SEQ ID NO: 2728041 - DNA, 25 bp, Homo sapien
tgcacatttagatcacccggagaac

SEQ ID NO: 2728042 - DNA, 25 bp, Homo sapien
aacatatttcccgtagccagtgccg

SEQ ID NO: 2728043 - DNA, 25 bp, Homo sapien
cacatggtgtcagaaggagactctc

SEQ ID NO: 2728044 - DNA, 25 bp, Homo sapien
tattacccgaccagaggcagaagct

SEQ ID NO: 2728045 - DNA, 25 bp, Homo sapien
taggctcgggaatcattaggctggc

SEQ ID NO: 2728046 - DNA, 25 bp, Homo sapien
gagacccattagtgccagcttcaca

SEQ ID NO: 2728047 - DNA, 25 bp, Homo sapien
catagcagggattcctaggctcggg

SEQ ID NO: 2728048 - DNA, 25 bp, Homo sapien
ggtcaacacattctcgtctgtaaag

SEQ ID NO: 2728049 - DNA, 25 bp, Homo sapien
gaaggtcaacacattctcgtctgta

SEQ ID NO: 2728050 - DNA, 25 bp, Homo sapien
cattctcgtctgtaaagtccctgct

SEQ ID NO: 2728051 - DNA, 25 bp, Homo sapien
ctctcctaagaaggtcaacacattc

SEQ ID NO: 2728052 - DNA, 25 bp, Homo sapien
tctatgctgttctcgtttactgcaa

SEQ ID NO: 2728053 - DNA, 25 bp, Homo sapien
tcgcaggtgcctttgctgactggag

SEQ ID NO: 2728054 - DNA, 25 bp, Homo sapien
cagctgaagttggtcgcaggtgcct

SEQ ID NO: 2728055 - DNA, 25 bp, Homo sapien
cgtttactgcaagccacttcatctt

SEQ ID NO: 2728056 - DNA, 25 bp, Homo sapien
tcatatgacaccgaaaagtctctgg

SEQ ID NO: 2728057 - DNA, 25 bp, Homo sapien
tctggatattgcagttgggccagac

SEQ ID NO: 2728058 - DNA, 25 bp, Homo sapien
cgaaaagtctctggatattgcagtt

SEQ ID NO: 2728059 - DNA, 25 bp, Homo sapien
aagtctctggatattgcagttgggc

SEQ ID NO: 2728060 - DNA, 25 bp, Homo sapien
tcaccctgatgtagaagccaggtgg

SEQ ID NO: 2728061 - DNA, 25 bp, Homo sapien
caccctgatgtagaagccaggtggg

SEQ ID NO: 2728062 - DNA, 25 bp, Homo sapien
ttcacgagccaccatacagacgtgg

SEQ ID NO: 2728063 - DNA, 25 bp, Homo sapien
gtgggaattcccctgaaggtcagaa

SEQ ID NO: 2728064 - DNA, 25 bp, Homo sapien
accatacagacgtgggaattcccct

SEQ ID NO: 2728065 - DNA, 25 bp, Homo sapien
gaaccatgctcttcacgagccacca

SEQ ID NO: 2728066 - DNA, 25 bp, Homo sapien
gctgtatctcaaaatagtcctgcaa

SEQ ID NO: 2728067 - DNA, 25 bp, Homo sapien
cggcctgcaggtggaccacaaaagt

SEQ ID NO: 2728068 - DNA, 25 bp, Homo sapien
gaatgtatctatgacttgaagcctc

SEQ ID NO: 2728069 - DNA, 25 bp, Homo sapien
ggaactcttggcagagcagacccct

SEQ ID NO: 2728070 - DNA, 25 bp, Homo sapien
ttaggattgacaaagctgattcttt

SEQ ID NO: 2728071 - DNA, 25 bp, Homo sapien
cagcctggctgtagtatagcatcac

SEQ ID NO: 2728072 - DNA, 25 bp, Homo sapien
taaagtctccgttgataaaatggcc

SEQ ID NO: 2728073 - DNA, 25 bp, Homo sapien
tcctgagataggtgctgggacccac

SEQ ID NO: 2728074 - DNA, 25 bp, Homo sapien
ggtgtctgcctaatgtccgggtcca

SEQ ID NO: 2728075 - DNA, 25 bp, Homo sapien
taaatgaacactgtccctagctggg

SEQ ID NO: 2728076 - DNA, 25 bp, Homo sapien
gcccttttagcaagtggtagataaa

SEQ ID NO: 2728077 - DNA, 25 bp, Homo sapien
cccttttagcaagtggtagataaag

SEQ ID NO: 2728078 - DNA, 25 bp, Homo sapien
gctgctggggcccttttagcaagtg

SEQ ID NO: 2728079 - DNA, 25 bp, Homo sapien
cttttagcaagtggtagataaagaa

SEQ ID NO: 2728080 - DNA, 25 bp, Homo sapien
atctggaagaactccccgcagagca

SEQ ID NO: 2728081 - DNA, 25 bp, Homo sapien
agtttgtaggcagcctcagagtggc

SEQ ID NO: 2728082 - DNA, 25 bp, Homo sapien
atctgatagatcaattctctgtgcc

SEQ ID NO: 2728083 - DNA, 25 bp, Homo sapien
ttgtaggcagcctcagagtggcctg

SEQ ID NO: 2728084 - DNA, 25 bp, Homo sapien
tgaatgaaccctgagtgacggatgc

SEQ ID NO: 2728085 - DNA, 25 bp, Homo sapien
caccccaggaacttggagcctgcct

SEQ ID NO: 2728086 - DNA, 25 bp, Homo sapien
acggatgcacccctgaagccaggct

SEQ ID NO: 2728087 - DNA, 25 bp, Homo sapien
tgtccacttaagtcctcaccacggg

SEQ ID NO: 2728088 - DNA, 25 bp, Homo sapien
tgagcttaaagatggtctgggcaaa

SEQ ID NO: 2728089 - DNA, 25 bp, Homo sapien
aaatttcacgaacccaagcttgcat

SEQ ID NO: 2728090 - DNA, 25 bp, Homo sapien
gatggtctgggcaaatttcacgaac

SEQ ID NO: 2728091 - DNA, 25 bp, Homo sapien
gagggtcccagtgatgagcttaaag

SEQ ID NO: 2728092 - DNA, 25 bp, Homo sapien
ttactcctgcaaaccacctgccacc

SEQ ID NO: 2728093 - DNA, 25 bp, Homo sapien
ctcctgcaaaccacctgccacccca

SEQ ID NO: 2728094 - DNA, 25 bp, Homo sapien
tgcaaaccacctgccaccccagttc

SEQ ID NO: 2728095 - DNA, 25 bp, Homo sapien
cctgcaaaccacctgccaccccagt

SEQ ID NO: 2728096 - DNA, 25 bp, Homo sapien
gctccttccctgaatattctgcctg

SEQ ID NO: 2728097 - DNA, 25 bp, Homo sapien
ttccctgaatattctgcctgctgct

SEQ ID NO: 2728098 - DNA, 25 bp, Homo sapien
tgggctccttccctgaatattctgc

SEQ ID NO: 2728099 - DNA, 25 bp, Homo sapien
caaagttttgtgggctccttccctg

SEQ ID NO: 2728100 - DNA, 25 bp, Homo sapien
ctggtccaacacattctttacattc

SEQ ID NO: 2728101 - DNA, 25 bp, Homo sapien
ccaacacattctttacattcctcag

SEQ ID NO: 2728102 - DNA, 25 bp, Homo sapien
aacacattctttacattcctcagtt

SEQ ID NO: 2728103 - DNA, 25 bp, Homo sapien
ggtccaacacattctttacattcct

SEQ ID NO: 2728104 - DNA, 25 bp, Homo sapien
cttggtagagggatgatgatatctc

SEQ ID NO: 2728105 - DNA, 25 bp, Homo sapien
gcctgcctagtgtccaaaactttgt

SEQ ID NO: 2728106 - DNA, 25 bp, Homo sapien
tgctttcccagacaattccagtaaa

SEQ ID NO: 2728107 - DNA, 25 bp, Homo sapien
tatctcacaggtctcaaagtcccca

SEQ ID NO: 2728108 - DNA, 25 bp, Homo sapien
ccagggcctggaggtatggatacca

SEQ ID NO: 2728109 - DNA, 25 bp, Homo sapien
gtatggataccagcggggcaggcac

SEQ ID NO: 2728110 - DNA, 25 bp, Homo sapien
ttcagtgcatttaatggcttcttcc

SEQ ID NO: 2728111 - DNA, 25 bp, Homo sapien
ggcaggcaccgcattggagcagctt

SEQ ID NO: 2728112 - DNA, 25 bp, Homo sapien
ttctcctgcttttcccctatagagt

SEQ ID NO: 2728113 - DNA, 25 bp, Homo sapien
attcaaggcttcctccttctgtcac

SEQ ID NO: 2728114 - DNA, 25 bp, Homo sapien
cttttcccctatagagtctacttgc

SEQ ID NO: 2728115 - DNA, 25 bp, Homo sapien
ttgcttctcccacagatgtgcctgc

SEQ ID NO: 2728116 - DNA, 25 bp, Homo sapien
aaaagccatgtgtaagcggacccac

SEQ ID NO: 2728117 - DNA, 25 bp, Homo sapien
ttgttttcatgtagagtgggctgag

SEQ ID NO: 2728118 - DNA, 25 bp, Homo sapien
gtggcagagactgaacaaaagccat

SEQ ID NO: 2728119 - DNA, 25 bp, Homo sapien
ttgttcaagcctcaactgtattggg

SEQ ID NO: 2728120 - DNA, 25 bp, Homo sapien
gcctgttacccatggtcacgtctga

SEQ ID NO: 2728121 - DNA, 25 bp, Homo sapien
tctgatcactgacaaagggcgacgg

SEQ ID NO: 2728122 - DNA, 25 bp, Homo sapien
gctttgagttctgatcccatccctg

SEQ ID NO: 2728123 - DNA, 25 bp, Homo sapien
tgtgcacacacggttgcatgaaagg

SEQ ID NO: 2728124 - DNA, 25 bp, Homo sapien
acctcggtagtatggcctggcttta

SEQ ID NO: 2728125 - DNA, 25 bp, Homo sapien
tttaacctcggtagtatggcctggc

SEQ ID NO: 2728126 - DNA, 25 bp, Homo sapien
gcctggctttaggccctgataattt

SEQ ID NO: 2728127 - DNA, 25 bp, Homo sapien
tctttaacctcggtagtatggcctg

SEQ ID NO: 2728128 - DNA, 25 bp, Homo sapien
taggcgcagagttttccaagtctca

SEQ ID NO: 2728129 - DNA, 25 bp, Homo sapien
tatcggccagctactgcttagagag

SEQ ID NO: 2728130 - DNA, 25 bp, Homo sapien
caatagcagcaaccttcagaaatgg

SEQ ID NO: 2728131 - DNA, 25 bp, Homo sapien
gacttcctgggcgactgtatcggcc

SEQ ID NO: 2728132 - DNA, 25 bp, Homo sapien
tcttagtctgtgtaagacagagtac

SEQ ID NO: 2728133 - DNA, 25 bp, Homo sapien
tgtttcaggtttaggtacactcctc

SEQ ID NO: 2728134 - DNA, 25 bp, Homo sapien
gacttataagtaagggtctctggca

SEQ ID NO: 2728135 - DNA, 25 bp, Homo sapien
gacagagtacaaaaaccagttctcc

SEQ ID NO: 2728136 - DNA, 25 bp, Homo sapien
gaaaaatgcactagtcccctccttg

SEQ ID NO: 2728137 - DNA, 25 bp, Homo sapien
tccggacccagataaggttcagagc

SEQ ID NO: 2728138 - DNA, 25 bp, Homo sapien
tgactgctagggttagatcttcacc

SEQ ID NO: 2728139 - DNA, 25 bp, Homo sapien
tgcaagccagatttgggagtcactc

SEQ ID NO: 2728140 - DNA, 25 bp, Homo sapien
gtactgcccaagctatccggctctg

SEQ ID NO: 2728141 - DNA, 25 bp, Homo sapien
acacgtactgcccaagctatccggc

SEQ ID NO: 2728142 - DNA, 25 bp, Homo sapien
tgcgggccccagttccacttttgac

SEQ ID NO: 2728143 - DNA, 25 bp, Homo sapien
ctctgcgggccccagttccactttt

SEQ ID NO: 2728144 - DNA, 25 bp, Homo sapien
ctatgattttcaggcctggatgaga

SEQ ID NO: 2728145 - DNA, 25 bp, Homo sapien
ggtgtggaaggagcaacttggatgt

SEQ ID NO: 2728146 - DNA, 25 bp, Homo sapien
cacagggcggaggagacgaggcctc

SEQ ID NO: 2728147 - DNA, 25 bp, Homo sapien
gctgatgcagatggccagcgggatg

SEQ ID NO: 2728148 - DNA, 25 bp, Homo sapien
gatgtgccagtcttctatcctgtgg

SEQ ID NO: 2728149 - DNA, 25 bp, Homo sapien
acgataaaatgagaaaacgcgtggg

SEQ ID NO: 2728150 - DNA, 25 bp, Homo sapien
cttctgggcttcttaggacgataaa

SEQ ID NO: 2728151 - DNA, 25 bp, Homo sapien
ggcttcttaggacgataaaatgaga

SEQ ID NO: 2728152 - DNA, 25 bp, Homo sapien
ttaggacgataaaatgagaaaacgc

SEQ ID NO: 2728153 - DNA, 25 bp, Homo sapien
gagcaacagggcctttgttactgca

SEQ ID NO: 2728154 - DNA, 25 bp, Homo sapien
tgatgtccactgagttgagcaacag

SEQ ID NO: 2728155 - DNA, 25 bp, Homo sapien
ctttgttactgcaaggacgttgtcc

SEQ ID NO: 2728156 - DNA, 25 bp, Homo sapien
tactgcaaggacgttgtccccacct

SEQ ID NO: 2728157 - DNA, 25 bp, Homo sapien
tgcaggatctcaggaaagacaatgt

SEQ ID NO: 2728158 - DNA, 25 bp, Homo sapien
tcttaaggataaatcagttgccacc

SEQ ID NO: 2728159 - DNA, 25 bp, Homo sapien
gtcacatgtgagtccacgtgcccaa

SEQ ID NO: 2728160 - DNA, 25 bp, Homo sapien
ttgcaccggagtgcaaggcagaacc

SEQ ID NO: 2728161 - DNA, 25 bp, Homo sapien
tcaacttcaagaccaagcacagttc

SEQ ID NO: 2728162 - DNA, 25 bp, Homo sapien
acttcaagaccaagcacagttctgg

SEQ ID NO: 2728163 - DNA, 25 bp, Homo sapien
ctttcaacttcaagaccaagcacag

SEQ ID NO: 2728164 - DNA, 25 bp, Homo sapien
tttcaacttcaagaccaagcacagt

SEQ ID NO: 2728165 - DNA, 25 bp, Homo sapien
tccccaggatagctcccgtcagttg

SEQ ID NO: 2728166 - DNA, 25 bp, Homo sapien
cttcattccccaggatagctcccgt

SEQ ID NO: 2728167 - DNA, 25 bp, Homo sapien
ggagaggagtatgagtgattgctac

SEQ ID NO: 2728168 - DNA, 25 bp, Homo sapien
caaattgttcatgggagaggagtat

SEQ ID NO: 2728169 - DNA, 25 bp, Homo sapien
tggagaaagcaggtccagccaccat

SEQ ID NO: 2728170 - DNA, 25 bp, Homo sapien
ttggagaaagcaggtccagccacca

SEQ ID NO: 2728171 - DNA, 25 bp, Homo sapien
cattcaggcaacactggggatgggg

SEQ ID NO: 2728172 - DNA, 25 bp, Homo sapien
tgaactgattgagggttctctgcca

SEQ ID NO: 2728173 - DNA, 25 bp, Homo sapien
aagcccaccccaaaacattcaggca

SEQ ID NO: 2728174 - DNA, 25 bp, Homo sapien
cacttcaggctccatgctccgtaag

SEQ ID NO: 2728175 - DNA, 25 bp, Homo sapien
aggtggcacggaaacaatggtcaca

SEQ ID NO: 2728176 - DNA, 25 bp, Homo sapien
caatggtcacatcttggattttgag

SEQ ID NO: 2728177 - DNA, 25 bp, Homo sapien
ccacctcaggcagagttcgagggtt

SEQ ID NO: 2728178 - DNA, 25 bp, Homo sapien
tgaaaggcctggaagaatatgtgac

SEQ ID NO: 2728179 - DNA, 25 bp, Homo sapien
gcattgctgctgctgcaattggagc

SEQ ID NO: 2728180 - DNA, 25 bp, Homo sapien
tcccaggatctccgctcccagcatt

SEQ ID NO: 2728181 - DNA, 25 bp, Homo sapien
aggatctccgctcccagcattgctg

SEQ ID NO: 2728182 - DNA, 25 bp, Homo sapien
tcagagctggctccgggctcccagg

SEQ ID NO: 2728183 - DNA, 25 bp, Homo sapien
tccccagtgaaacacagccttggac

SEQ ID NO: 2728184 - DNA, 25 bp, Homo sapien
ggacagttggtgaagaaactttgtc

SEQ ID NO: 2728185 - DNA, 25 bp, Homo sapien
ttggtgtagaatttcagactctccc

SEQ ID NO: 2728186 - DNA, 25 bp, Homo sapien
cacatgctcatgcttggtgtagaat

SEQ ID NO: 2728187 - DNA, 25 bp, Homo sapien
ctgatgtagactgcagcggaagccg

SEQ ID NO: 2728188 - DNA, 25 bp, Homo sapien
cccggttgatcatgttctggaggga

SEQ ID NO: 2728189 - DNA, 25 bp, Homo sapien
tgaggattccccctgcacgcttctg

SEQ ID NO: 2728190 - DNA, 25 bp, Homo sapien
tgtcctgatggctgcgctgcctgag

SEQ ID NO: 2728191 - DNA, 25 bp, Homo sapien
caataattcattagccatcagctcc

SEQ ID NO: 2728192 - DNA, 25 bp, Homo sapien
tgggcacgggttgttagtgcttgaa

SEQ ID NO: 2728193 - DNA, 25 bp, Homo sapien
gaaggggcaatgattagatttagga

SEQ ID NO: 2728194 - DNA, 25 bp, Homo sapien
cccacccggcctgctctctcatttt

SEQ ID NO: 2728195 - DNA, 25 bp, Homo sapien
ggcagctcgcctgcagcttggtatt

SEQ ID NO: 2728196 - DNA, 25 bp, Homo sapien
tcggagggccgagtaccaatcatga

SEQ ID NO: 2728197 - DNA, 25 bp, Homo sapien
cttggtattcagcaagcgtggaggc

SEQ ID NO: 2728198 - DNA, 25 bp, Homo sapien
tccccgtggtttgtctactctgaat

SEQ ID NO: 2728199 - DNA, 25 bp, Homo sapien
cttgagtgcgagttgggaccccggg

SEQ ID NO: 2728200 - DNA, 25 bp, Homo sapien
tgagtgcgagttgggaccccgggcc

SEQ ID NO: 2728201 - DNA, 25 bp, Homo sapien
gacttgagtgcgagttgggaccccg

SEQ ID NO: 2728202 - DNA, 25 bp, Homo sapien
agacttgagtgcgagttgggacccc

SEQ ID NO: 2728203 - DNA, 25 bp, Homo sapien
gcagagatgagaaggtgcccatgac

SEQ ID NO: 2728204 - DNA, 25 bp, Homo sapien
gtcgcctttgtttggtttgcagaga

SEQ ID NO: 2728205 - DNA, 25 bp, Homo sapien
agatgagaaggtgcccatgacggcc

SEQ ID NO: 2728206 - DNA, 25 bp, Homo sapien
gagggtcgcctttgtttggtttgca

SEQ ID NO: 2728207 - DNA, 25 bp, Homo sapien
tcggcgcctagcacccccaagccca

SEQ ID NO: 2728208 - DNA, 25 bp, Homo sapien
cacctcggcgcctagcacccccaag

SEQ ID NO: 2728209 - DNA, 25 bp, Homo sapien
cacagcccacctcggcgcctagcac

SEQ ID NO: 2728210 - DNA, 25 bp, Homo sapien
ggcacagcccacctcggcgcctagc

SEQ ID NO: 2728211 - DNA, 25 bp, Homo sapien
gggcagacgtccactccggctccct

SEQ ID NO: 2728212 - DNA, 25 bp, Homo sapien
ctcctcgtggagaggagagtccgga

SEQ ID NO: 2728213 - DNA, 25 bp, Homo sapien
atacaagcacctgtccgggctcctc

SEQ ID NO: 2728214 - DNA, 25 bp, Homo sapien
gctggggcagacgtccactccggct

SEQ ID NO: 2728215 - DNA, 25 bp, Homo sapien
atgccgcttccttcggctctcagag

SEQ ID NO: 2728216 - DNA, 25 bp, Homo sapien
ctgtgaacatgccgcttccttcggc

SEQ ID NO: 2728217 - DNA, 25 bp, Homo sapien
tgccgcttccttcggctctcagaga

SEQ ID NO: 2728218 - DNA, 25 bp, Homo sapien
tgaacatgccgcttccttcggctct

SEQ ID NO: 2728219 - DNA, 25 bp, Homo sapien
tgtggcagcaccctcactgagtgct

SEQ ID NO: 2728220 - DNA, 25 bp, Homo sapien
gtgtggcagcaccctcactgagtgc

SEQ ID NO: 2728221 - DNA, 25 bp, Homo sapien
gaagggactcgcaggtctgcacctg

SEQ ID NO: 2728222 - DNA, 25 bp, Homo sapien
ttttgggggtgcagacagagcactc

SEQ ID NO: 2728223 - DNA, 25 bp, Homo sapien
gggactcgcaggtctgcacctggca

SEQ ID NO: 2728224 - DNA, 25 bp, Homo sapien
agacagagcactcttcctgatgaag

SEQ ID NO: 2728225 - DNA, 25 bp, Homo sapien
cttgatgtaagctcagctcgcagcc

SEQ ID NO: 2728226 - DNA, 25 bp, Homo sapien
cagaagagactccacgatattatgc

SEQ ID NO: 2728227 - DNA, 25 bp, Homo sapien
gtggtgaaggaacagcgtccaggca

SEQ ID NO: 2728228 - DNA, 25 bp, Homo sapien
tatgctttttaatccttgatgtaag

SEQ ID NO: 2728229 - DNA, 25 bp, Homo sapien
ggagacctgcattgtcctccagggc

SEQ ID NO: 2728230 - DNA, 25 bp, Homo sapien
tcctccagggcccaacacactggtt

SEQ ID NO: 2728231 - DNA, 25 bp, Homo sapien
tgctggtaaggagacctgcattgtc

SEQ ID NO: 2728232 - DNA, 25 bp, Homo sapien
gactctcccacggatggtgagatca

SEQ ID NO: 2728233 - DNA, 25 bp, Homo sapien
gcttccagtctctttattccaacca

SEQ ID NO: 2728234 - DNA, 25 bp, Homo sapien
ctaactgcttccagtctctttattc

SEQ ID NO: 2728235 - DNA, 25 bp, Homo sapien
aactgcttccagtctctttattcca

SEQ ID NO: 2728236 - DNA, 25 bp, Homo sapien
cagtctctttattccaaccactaac

SEQ ID NO: 2728237 - DNA, 25 bp, Homo sapien
cttagaatccgaggagacagaagca

SEQ ID NO: 2728238 - DNA, 25 bp, Homo sapien
ctgtttcttagaatccgaggagaca

SEQ ID NO: 2728239 - DNA, 25 bp, Homo sapien
gaagcaaagacctttgtactctggg

SEQ ID NO: 2728240 - DNA, 25 bp, Homo sapien
gacagaagcaaagacctttgtactc

SEQ ID NO: 2728241 - DNA, 25 bp, Homo sapien
tgacaacctcatagtgtgttcagaa

SEQ ID NO: 2728242 - DNA, 25 bp, Homo sapien
tgtgtaaacccataatgacaacctc

SEQ ID NO: 2728243 - DNA, 25 bp, Homo sapien
gctagtcagagagataaatgtgtaa

SEQ ID NO: 2728244 - DNA, 25 bp, Homo sapien
ttcagaattgtagttaagggaagca

SEQ ID NO: 2728245 - DNA, 25 bp, Homo sapien
ctggtccctggttctgaacgtttgc

SEQ ID NO: 2728246 - DNA, 25 bp, Homo sapien
tgtgaaaactctgatcctggtccct

SEQ ID NO: 2728247 - DNA, 25 bp, Homo sapien
ggttctgaacgtttgcaattctaac

SEQ ID NO: 2728248 - DNA, 25 bp, Homo sapien
ctggaccgtgtgaaaactctgatcc

SEQ ID NO: 2728249 - DNA, 25 bp, Homo sapien
gccacacggatgcaaatgtgccagc

SEQ ID NO: 2728250 - DNA, 25 bp, Homo sapien
ctcactctgggtccagggttggcat

SEQ ID NO: 2728251 - DNA, 25 bp, Homo sapien
agccacacggatgcaaatgtgccag

SEQ ID NO: 2728252 - DNA, 25 bp, Homo sapien
gcagctgggagcttcatggtctcca

SEQ ID NO: 2728253 - DNA, 25 bp, Homo sapien
tcaagtcaccaagtaccagtctttt

SEQ ID NO: 2728254 - DNA, 25 bp, Homo sapien
tactgtcctgggatgctcgaagatg

SEQ ID NO: 2728255 - DNA, 25 bp, Homo sapien
caagtaccagtcttttgcccagtac

SEQ ID NO: 2728256 - DNA, 25 bp, Homo sapien
cccagtactgtcctgggatgctcga

SEQ ID NO: 2728257 - DNA, 25 bp, Homo sapien
cctagtcaaagaagatagtttggac

SEQ ID NO: 2728258 - DNA, 25 bp, Homo sapien
tgtgcagcctagtcaaagaagatag

SEQ ID NO: 2728259 - DNA, 25 bp, Homo sapien
cttctgtgcagcctagtcaaagaag

SEQ ID NO: 2728260 - DNA, 25 bp, Homo sapien
cacctgggggaattcaagttctggg

SEQ ID NO: 2728261 - DNA, 25 bp, Homo sapien
ttgaagacttgacgatgtaccagcc

SEQ ID NO: 2728262 - DNA, 25 bp, Homo sapien
cactgtgccacgtgctggaatgcaa

SEQ ID NO: 2728263 - DNA, 25 bp, Homo sapien
atattctgatgtgcctgataacccc

SEQ ID NO: 2728264 - DNA, 25 bp, Homo sapien
aatgattctgaaagtaccaaccagg

SEQ ID NO: 2728265 - DNA, 25 bp, Homo sapien
gacacgatcatcaaagcgccaagat

SEQ ID NO: 2728266 - DNA, 25 bp, Homo sapien
caactgctgcagacacgatcatcaa

SEQ ID NO: 2728267 - DNA, 25 bp, Homo sapien
acgatcatcaaagcgccaagattcc

SEQ ID NO: 2728268 - DNA, 25 bp, Homo sapien
tgcagacacgatcatcaaagcgcca

SEQ ID NO: 2728269 - DNA, 25 bp, Homo sapien
ctgtcagactgtctcttccggtggc

SEQ ID NO: 2728270 - DNA, 25 bp, Homo sapien
cccacaccacttggttgggcttcct

SEQ ID NO: 2728271 - DNA, 25 bp, Homo sapien
tcagactgtctcttccggtggcagg

SEQ ID NO: 2728272 - DNA, 25 bp, Homo sapien
agactgtctcttccggtggcagggt

SEQ ID NO: 2728273 - DNA, 25 bp, Homo sapien
ggcaaagatgtatgtagggttctca

SEQ ID NO: 2728274 - DNA, 25 bp, Homo sapien
aactgccaattggcaaagatgtatg

SEQ ID NO: 2728275 - DNA, 25 bp, Homo sapien
ggttgggaataacagtcgtaataga

SEQ ID NO: 2728276 - DNA, 25 bp, Homo sapien
taacagtcgtaatagaatatttacc

SEQ ID NO: 2728277 - DNA, 25 bp, Homo sapien
tgggaataacagtcgtaatagaata

SEQ ID NO: 2728278 - DNA, 25 bp, Homo sapien
tcgtaatagaatatttaccatccat

SEQ ID NO: 2728279 - DNA, 25 bp, Homo sapien
gaccctgaaggatgagtacatgtct

SEQ ID NO: 2728280 - DNA, 25 bp, Homo sapien
tggtgagggttatacagataaatgg

SEQ ID NO: 2728281 - DNA, 25 bp, Homo sapien
ggagaaagcattgcaggaacctagg

SEQ ID NO: 2728282 - DNA, 25 bp, Homo sapien
cagggtgagatcagccaaagcccca

SEQ ID NO: 2728283 - DNA, 25 bp, Homo sapien
acctaggcaaaggaacattgcagtg

SEQ ID NO: 2728284 - DNA, 25 bp, Homo sapien
ggaggaattccctgcatatcaagca

SEQ ID NO: 2728285 - DNA, 25 bp, Homo sapien
gcagttgtgaggattatccagaaaa

SEQ ID NO: 2728286 - DNA, 25 bp, Homo sapien
cctgcatatcaagcagctgggagct

SEQ ID NO: 2728287 - DNA, 25 bp, Homo sapien
aggcctctgcatagccttgggagga

SEQ ID NO: 2728288 - DNA, 25 bp, Homo sapien
tcattcttcttagtcttcaccaacc

SEQ ID NO: 2728289 - DNA, 25 bp, Homo sapien
ttcttcttagtcttcaccaacccag

SEQ ID NO: 2728290 - DNA, 25 bp, Homo sapien
gctccagggagcttctcattcttct

SEQ ID NO: 2728291 - DNA, 25 bp, Homo sapien
cttcctctcggaggctccagggagc

SEQ ID NO: 2728292 - DNA, 25 bp, Homo sapien
gggccacagtcataattaccacttc

SEQ ID NO: 2728293 - DNA, 25 bp, Homo sapien
gtctgtcgctggtgctccaatgctg

SEQ ID NO: 2728294 - DNA, 25 bp, Homo sapien
tcagtgccggccgtctgtcgctggt

SEQ ID NO: 2728295 - DNA, 25 bp, Homo sapien
tttgagcccttttgagcaggctgag

SEQ ID NO: 2728296 - DNA, 25 bp, Homo sapien
ttcccttcagaaccgagaggacaga

SEQ ID NO: 2728297 - DNA, 25 bp, Homo sapien
agattgagtcactcggcatctgctg

SEQ ID NO: 2728298 - DNA, 25 bp, Homo sapien
gagaggacagattgagtcactcggc

SEQ ID NO: 2728299 - DNA, 25 bp, Homo sapien
gaaccgagaggacagattgagtcac

SEQ ID NO: 2728300 - DNA, 25 bp, Homo sapien
taaggagcccctagattggaacgaa

SEQ ID NO: 2728301 - DNA, 25 bp, Homo sapien
ccactcaggcaagggatcagagaag

SEQ ID NO: 2728302 - DNA, 25 bp, Homo sapien
tctagcagagataggtgtggaccag

SEQ ID NO: 2728303 - DNA, 25 bp, Homo sapien
tcatcccagggcatttaagagctga

SEQ ID NO: 2728304 - DNA, 25 bp, Homo sapien
gtgtgaccctcaaccagttactttg

SEQ ID NO: 2728305 - DNA, 25 bp, Homo sapien
gataatgcctgtaaagggttaacac

SEQ ID NO: 2728306 - DNA, 25 bp, Homo sapien
tctattgccactgattggagctgaa

SEQ ID NO: 2728307 - DNA, 25 bp, Homo sapien
ggttaacacattgctggacttggag

SEQ ID NO: 2728308 - DNA, 25 bp, Homo sapien
aagtgtacaactctgctctcaaggg

SEQ ID NO: 2728309 - DNA, 25 bp, Homo sapien
aagttctagacgctgctgggtgccc

SEQ ID NO: 2728310 - DNA, 25 bp, Homo sapien
agaacaatgtggcatggacccggca

SEQ ID NO: 2728311 - DNA, 25 bp, Homo sapien
tacacaggtgacagagagcaatcga

SEQ ID NO: 2728312 - DNA, 25 bp, Homo sapien
cttaaattctcccttgaatacttct

SEQ ID NO: 2728313 - DNA, 25 bp, Homo sapien
aaattctcccttgaatacttctaat

SEQ ID NO: 2728314 - DNA, 25 bp, Homo sapien
tgaatacttctaattcagcagaatg

SEQ ID NO: 2728315 - DNA, 25 bp, Homo sapien
ttgaatacttctaattcagcagaat

SEQ ID NO: 2728316 - DNA, 25 bp, Homo sapien
gctgcggtgacaacttttccctcca

SEQ ID NO: 2728317 - DNA, 25 bp, Homo sapien
ccaaaaagggatgcacggtgtgctg

SEQ ID NO: 2728318 - DNA, 25 bp, Homo sapien
accaaaaagggatgcacggtgtgct

SEQ ID NO: 2728319 - DNA, 25 bp, Homo sapien
cggtgtgctgcggtgacaacttttc

SEQ ID NO: 2728320 - DNA, 25 bp, Homo sapien
tgtgtcccattagctccaaaccagg

SEQ ID NO: 2728321 - DNA, 25 bp, Homo sapien
catattctcctctacaccgctgtga

SEQ ID NO: 2728322 - DNA, 25 bp, Homo sapien
tagcgcgcaaactgcaacaacgctg

SEQ ID NO: 2728323 - DNA, 25 bp, Homo sapien
ggttccgatccattgctcccataat

SEQ ID NO: 2728324 - DNA, 25 bp, Homo sapien
ccctgctgcctgctccattccccat

SEQ ID NO: 2728325 - DNA, 25 bp, Homo sapien
gtttctggcagcatctgtcccctgc

SEQ ID NO: 2728326 - DNA, 25 bp, Homo sapien
tgtcccctgctgcctgctccattcc

SEQ ID NO: 2728327 - DNA, 25 bp, Homo sapien
ctcggtttctggcagcatctgtccc

SEQ ID NO: 2728328 - DNA, 25 bp, Homo sapien
gcggtgtcatttgacccagactcag

SEQ ID NO: 2728329 - DNA, 25 bp, Homo sapien
ggtgtcatttgacccagactcagcc

SEQ ID NO: 2728330 - DNA, 25 bp, Homo sapien
tgtcatttgacccagactcagccca

SEQ ID NO: 2728331 - DNA, 25 bp, Homo sapien
gggcggtgtcatttgacccagactc

SEQ ID NO: 2728332 - DNA, 25 bp, Homo sapien
gcattgaggcccagcggtgggattt

SEQ ID NO: 2728333 - DNA, 25 bp, Homo sapien
cattgaggcccagcggtgggatttg

SEQ ID NO: 2728334 - DNA, 25 bp, Homo sapien
gagcagtttcttggacaaagtagtg

SEQ ID NO: 2728335 - DNA, 25 bp, Homo sapien
gacaaagtagtgcttcggtggaggg

SEQ ID NO: 2728336 - DNA, 25 bp, Homo sapien
aggagcagtttcttggacaaagtag

SEQ ID NO: 2728337 - DNA, 25 bp, Homo sapien
gtagtgcttcggtggaggggaacca

SEQ ID NO: 2728338 - DNA, 25 bp, Homo sapien
ttagtctccgaaagggagccgccag

SEQ ID NO: 2728339 - DNA, 25 bp, Homo sapien
tgctaggcattttgcacagctggct

SEQ ID NO: 2728340 - DNA, 25 bp, Homo sapien
gatggcttagttacgctaattgcac

SEQ ID NO: 2728341 - DNA, 25 bp, Homo sapien
tgcctcttactggtgatggcttagt

SEQ ID NO: 2728342 - DNA, 25 bp, Homo sapien
cagggatccatgcaaaaccggtggg

SEQ ID NO: 2728343 - DNA, 25 bp, Homo sapien
tcaatggatggagcgatggacacac

SEQ ID NO: 2728344 - DNA, 25 bp, Homo sapien
cacacacaggtagtggcagggatcc

SEQ ID NO: 2728345 - DNA, 25 bp, Homo sapien
taggatctgtgacagtaacaacccc

SEQ ID NO: 2728346 - DNA, 25 bp, Homo sapien
ctgcatccttggggagggccctcat

SEQ ID NO: 2728347 - DNA, 25 bp, Homo sapien
tcatgaagcacttttcgcatcggtt

SEQ ID NO: 2728348 - DNA, 25 bp, Homo sapien
tgaagcacttttcgcatcggtttcg

SEQ ID NO: 2728349 - DNA, 25 bp, Homo sapien
catgaagcacttttcgcatcggttt

SEQ ID NO: 2728350 - DNA, 25 bp, Homo sapien
gaagcacttttcgcatcggtttcgt

SEQ ID NO: 2728351 - DNA, 25 bp, Homo sapien
catccatctgcaatagactggaaga

SEQ ID NO: 2728352 - DNA, 25 bp, Homo sapien
ctctgctatagtgccccagggaaga

SEQ ID NO: 2728353 - DNA, 25 bp, Homo sapien
gccctctctgctatagtgccccagg

SEQ ID NO: 2728354 - DNA, 25 bp, Homo sapien
gcatccatctgcaatagactggaag

SEQ ID NO: 2728355 - DNA, 25 bp, Homo sapien
gctgcagacgtgtagtgcagccaca

SEQ ID NO: 2728356 - DNA, 25 bp, Homo sapien
caggcccgatgcttggtgacagagc

SEQ ID NO: 2728357 - DNA, 25 bp, Homo sapien
gagctcttgtattcttggggcttgg

SEQ ID NO: 2728358 - DNA, 25 bp, Homo sapien
gtgacagagctcttgtattcttggg

SEQ ID NO: 2728359 - DNA, 25 bp, Homo sapien
ttggtgatggaggtggctgtgtgtg

SEQ ID NO: 2728360 - DNA, 25 bp, Homo sapien
ctttggtgatggaggtggctgtgtg

SEQ ID NO: 2728361 - DNA, 25 bp, Homo sapien
tggtgatggaggtggctgtgtgtgc

SEQ ID NO: 2728362 - DNA, 25 bp, Homo sapien
tttggtgatggaggtggctgtgtgt

SEQ ID NO: 2728363 - DNA, 25 bp, Homo sapien
caaatccatagatgtgcgaggtggg

SEQ ID NO: 2728364 - DNA, 25 bp, Homo sapien
catgagatcgatgcgtatgtcaggg

SEQ ID NO: 2728365 - DNA, 25 bp, Homo sapien
gcagctgggctagcatgagatcgat

SEQ ID NO: 2728366 - DNA, 25 bp, Homo sapien
gcgggaggacagaatgattttgcat

SEQ ID NO: 2728367 - DNA, 25 bp, Homo sapien
gagaggagggcgtcagggccaggcc

SEQ ID NO: 2728368 - DNA, 25 bp, Homo sapien
tagatgctgcgtgctggggatgtgg

SEQ ID NO: 2728369 - DNA, 25 bp, Homo sapien
gctggtgccggggttgtggaggtga

SEQ ID NO: 2728370 - DNA, 25 bp, Homo sapien
gccaggcctgaatgctgatgccacc

SEQ ID NO: 2728371 - DNA, 25 bp, Homo sapien
tcgatgctgttgtcataaagatgac

SEQ ID NO: 2728372 - DNA, 25 bp, Homo sapien
cacatatgcagggtacgcctggaat

SEQ ID NO: 2728373 - DNA, 25 bp, Homo sapien
atgacatttctgatggaaggctgct

SEQ ID NO: 2728374 - DNA, 25 bp, Homo sapien
tgtctattttgaatgcacgcatgct

SEQ ID NO: 2728375 - DNA, 25 bp, Homo sapien
gctgagcatggggacgggtggggat

SEQ ID NO: 2728376 - DNA, 25 bp, Homo sapien
tgagtcatgtctgtgcacatggtca

SEQ ID NO: 2728377 - DNA, 25 bp, Homo sapien
ccagagtgaagctgatgtgctgagc

SEQ ID NO: 2728378 - DNA, 25 bp, Homo sapien
tgtgcacatggtcagccagagtgaa

SEQ ID NO: 2728379 - DNA, 25 bp, Homo sapien
gagaaacatgattgaatttaggaaa

SEQ ID NO: 2728380 - DNA, 25 bp, Homo sapien
gagggcaaagacttccaatttcaaa

SEQ ID NO: 2728381 - DNA, 25 bp, Homo sapien
caatgagaaacatgattgaatttag

SEQ ID NO: 2728382 - DNA, 25 bp, Homo sapien
tttttattatatcttgagggcaaag

SEQ ID NO: 2728383 - DNA, 25 bp, Homo sapien
tctcaagaaggaccggatgaatttc

SEQ ID NO: 2728384 - DNA, 25 bp, Homo sapien
gcttgtgcaaattcatccctcccag

SEQ ID NO: 2728385 - DNA, 25 bp, Homo sapien
tatccttacattgtgcctagtgagg

SEQ ID NO: 2728386 - DNA, 25 bp, Homo sapien
ctgggcattgaacctgagcagcctg

SEQ ID NO: 2728387 - DNA, 25 bp, Homo sapien
cactcatctcattagtgttaattat

SEQ ID NO: 2728388 - DNA, 25 bp, Homo sapien
ctgtgctgagactttaattaaagcc

SEQ ID NO: 2728389 - DNA, 25 bp, Homo sapien
catctcattagtgttaattatgacc

SEQ ID NO: 2728390 - DNA, 25 bp, Homo sapien
ttaacactgtgctgagactttaatt

SEQ ID NO: 2728391 - DNA, 25 bp, Homo sapien
gggccccatggacaagtcatatatt

SEQ ID NO: 2728392 - DNA, 25 bp, Homo sapien
ttgagtacgtatagtctggagatct

SEQ ID NO: 2728393 - DNA, 25 bp, Homo sapien
catatattgagtacgtatagtctgg

SEQ ID NO: 2728394 - DNA, 25 bp, Homo sapien
ggacaagtcatatattgagtacgta

SEQ ID NO: 2728395 - DNA, 25 bp, Homo sapien
cctcacagcaccctggcgcaccggc

SEQ ID NO: 2728396 - DNA, 25 bp, Homo sapien
acagcaccctggcgcaccggcaagc

SEQ ID NO: 2728397 - DNA, 25 bp, Homo sapien
cagcaccctggcgcaccggcaagcg

SEQ ID NO: 2728398 - DNA, 25 bp, Homo sapien
tcacagcaccctggcgcaccggcaa

SEQ ID NO: 2728399 - DNA, 25 bp, Homo sapien
ccagtgtctggagcccttcggactc

SEQ ID NO: 2728400 - DNA, 25 bp, Homo sapien
cgtctgacaagtcaatcagtccgag

SEQ ID NO: 2728401 - DNA, 25 bp, Homo sapien
tagtgcaaaagtttcagggaggagc

SEQ ID NO: 2728402 - DNA, 25 bp, Homo sapien
ggaggagcacacgaccaccactatt

SEQ ID NO: 2728403 - DNA, 25 bp, Homo sapien
cacagaaaacggggaagctccaggg

SEQ ID NO: 2728404 - DNA, 25 bp, Homo sapien
tcacagaaaacggggaagctccagg

SEQ ID NO: 2728405 - DNA, 25 bp, Homo sapien
ggaggagtaccgtggatcaggagag

SEQ ID NO: 2728406 - DNA, 25 bp, Homo sapien
ccaggaggagtaccgtggatcagga

SEQ ID NO: 2728407 - DNA, 25 bp, Homo sapien
aggaggagtaccgtggatcaggaga

SEQ ID NO: 2728408 - DNA, 25 bp, Homo sapien
gaggagtaccgtggatcaggagaga

SEQ ID NO: 2728409 - DNA, 25 bp, Homo sapien
tactggtaataccaccaggcgatgt

SEQ ID NO: 2728410 - DNA, 25 bp, Homo sapien
ctgatactggtaataccaccaggcg

SEQ ID NO: 2728411 - DNA, 25 bp, Homo sapien
gatactggtaataccaccaggcgat

SEQ ID NO: 2728412 - DNA, 25 bp, Homo sapien
tgatactggtaataccaccaggcga

SEQ ID NO: 2728413 - DNA, 25 bp, Homo sapien
ttctcgccagtgaggtgacccctct

SEQ ID NO: 2728414 - DNA, 25 bp, Homo sapien
cttgggtcttctcgccagtgaggtg

SEQ ID NO: 2728415 - DNA, 25 bp, Homo sapien
accttgggtcttctcgccagtgagg

SEQ ID NO: 2728416 - DNA, 25 bp, Homo sapien
gtcttctcgccagtgaggtgacccc

SEQ ID NO: 2728417 - DNA, 25 bp, Homo sapien
gccaatggccttcctatcttgaacc

SEQ ID NO: 2728418 - DNA, 25 bp, Homo sapien
aatggttgagcttgggagtcattct

SEQ ID NO: 2728419 - DNA, 25 bp, Homo sapien
cattcttgttaggtaacaatctggg

SEQ ID NO: 2728420 - DNA, 25 bp, Homo sapien
ggctgtcaaaagagtggtgtcacga

SEQ ID NO: 2728421 - DNA, 25 bp, Homo sapien
ttttgaagcctcgataaaggacctg

SEQ ID NO: 2728422 - DNA, 25 bp, Homo sapien
ctgctccagtccctcgggccgatgg

SEQ ID NO: 2728423 - DNA, 25 bp, Homo sapien
gaagcctcgataaaggacctgcagc

SEQ ID NO: 2728424 - DNA, 25 bp, Homo sapien
ccgatggcaaaccatggtcatctcc

SEQ ID NO: 2728425 - DNA, 25 bp, Homo sapien
gccttcagagcgtgcacgggtctta

SEQ ID NO: 2728426 - DNA, 25 bp, Homo sapien
tgaggttgctccatcctcgcctgga

SEQ ID NO: 2728427 - DNA, 25 bp, Homo sapien
ggccgtttactgtctcctgaggttg

SEQ ID NO: 2728428 - DNA, 25 bp, Homo sapien
gagagtgtagcctcacgtgggaacc

SEQ ID NO: 2728429 - DNA, 25 bp, Homo sapien
ccccactccacaccactccaggatt

SEQ ID NO: 2728430 - DNA, 25 bp, Homo sapien
aggtgcatgtcgctgtagcccaccc

SEQ ID NO: 2728431 - DNA, 25 bp, Homo sapien
ataaattaatatccaggattgtatc

SEQ ID NO: 2728432 - DNA, 25 bp, Homo sapien
gcactctgagagttaaacttaaaaa

SEQ ID NO: 2728433 - DNA, 25 bp, Homo sapien
agccctaatggtaggaaactgggca

SEQ ID NO: 2728434 - DNA, 25 bp, Homo sapien
tgcccactgctaatgctgccatcga

SEQ ID NO: 2728435 - DNA, 25 bp, Homo sapien
cctaatggtaggaaactgggcactt

SEQ ID NO: 2728436 - DNA, 25 bp, Homo sapien
aatgctgccatcgaaggaaagaagc

SEQ ID NO: 2728437 - DNA, 25 bp, Homo sapien
tgagacattgtcagagaatgggcac

SEQ ID NO: 2728438 - DNA, 25 bp, Homo sapien
tgccatctcaggactggagctgctt

SEQ ID NO: 2728439 - DNA, 25 bp, Homo sapien
tggctcagccaatactaagctttgt

SEQ ID NO: 2728440 - DNA, 25 bp, Homo sapien
catttgagggccagcactaggagaa

SEQ ID NO: 2728441 - DNA, 25 bp, Homo sapien
tgtgtcttcgttgaccacaccactg

SEQ ID NO: 2728442 - DNA, 25 bp, Homo sapien
cttgaatgtgtcttcgttgaccaca

SEQ ID NO: 2728443 - DNA, 25 bp, Homo sapien
aatgtgtcttcgttgaccacaccac

SEQ ID NO: 2728444 - DNA, 25 bp, Homo sapien
tgaatgtgtcttcgttgaccacacc

SEQ ID NO: 2728445 - DNA, 25 bp, Homo sapien
gggagctgggcaagatagatttcaa

SEQ ID NO: 2728446 - DNA, 25 bp, Homo sapien
gagtacactgcttatcttccccgaa

SEQ ID NO: 2728447 - DNA, 25 bp, Homo sapien
tgagtttgtctcttcctcgagaagg

SEQ ID NO: 2728448 - DNA, 25 bp, Homo sapien
ctcacgatgagggaggtgtcctgcc

SEQ ID NO: 2728449 - DNA, 25 bp, Homo sapien
cttggtgacaggatgcaaagtggca

SEQ ID NO: 2728450 - DNA, 25 bp, Homo sapien
aggagtcaccgatgtggtcccaggc

SEQ ID NO: 2728451 - DNA, 25 bp, Homo sapien
gcaacagagcagctgttgtgggcct

SEQ ID NO: 2728452 - DNA, 25 bp, Homo sapien
ggcacacttgtaaactggcttaata

SEQ ID NO: 2728453 - DNA, 25 bp, Homo sapien
aagtgtttggaatacttggatttgc

SEQ ID NO: 2728454 - DNA, 25 bp, Homo sapien
agtgtttggaatacttggatttgca

SEQ ID NO: 2728455 - DNA, 25 bp, Homo sapien
acctgatctgggtaggggccccaca

SEQ ID NO: 2728456 - DNA, 25 bp, Homo sapien
gagaactcaataaacagtggctcag

SEQ ID NO: 2728457 - DNA, 25 bp, Homo sapien
ggctcagtggaactcagcaaactgc

SEQ ID NO: 2728458 - DNA, 25 bp, Homo sapien
cctgcatgggacaaaactgcctccc

SEQ ID NO: 2728459 - DNA, 25 bp, Homo sapien
ggcaggaattccacacagggagaac

SEQ ID NO: 2728460 - DNA, 25 bp, Homo sapien
tgagcactcactccagagtagagag

SEQ ID NO: 2728461 - DNA, 25 bp, Homo sapien
cagggagaaccttccaaacaaggca

SEQ ID NO: 2728462 - DNA, 25 bp, Homo sapien
aaaaagtgagatgagcccttgcccc

SEQ ID NO: 2728463 - DNA, 25 bp, Homo sapien
tctgagtggtgtcgaaggcattgaa

SEQ ID NO: 2728464 - DNA, 25 bp, Homo sapien
tgtcgaaggcattgaagaggtaatg

SEQ ID NO: 2728465 - DNA, 25 bp, Homo sapien
cacggagcctgtctgagtggtgtcg

SEQ ID NO: 2728466 - DNA, 25 bp, Homo sapien
aggtaatgggcatacgtgctggcat

SEQ ID NO: 2728467 - DNA, 25 bp, Homo sapien
tatgtatccgtccttgttgatgtca

SEQ ID NO: 2728468 - DNA, 25 bp, Homo sapien
gatgtcatacaaattaaatgtccac

SEQ ID NO: 2728469 - DNA, 25 bp, Homo sapien
tagtttctcgtggacagttcctctc

SEQ ID NO: 2728470 - DNA, 25 bp, Homo sapien
caataaaatcgacagagcggttaca

SEQ ID NO: 2728471 - DNA, 25 bp, Homo sapien
ctggagccctctcacacccctggcc

SEQ ID NO: 2728472 - DNA, 25 bp, Homo sapien
cactggagccctctcacacccctgg

SEQ ID NO: 2728473 - DNA, 25 bp, Homo sapien
actggagccctctcacacccctggc

SEQ ID NO: 2728474 - DNA, 25 bp, Homo sapien
catgaagctctatcttgcctcaaag

SEQ ID NO: 2728475 - DNA, 25 bp, Homo sapien
ttatctgtgctcacgagggagactg

SEQ ID NO: 2728476 - DNA, 25 bp, Homo sapien
gttccagtatgacgacacctccttg

SEQ ID NO: 2728477 - DNA, 25 bp, Homo sapien
tctctctatgctgctccagtgtggg

SEQ ID NO: 2728478 - DNA, 25 bp, Homo sapien
tcatagatggctttgacaatgtcca

SEQ ID NO: 2728479 - DNA, 25 bp, Homo sapien
ctggaagaagacgtccacatgctgc

SEQ ID NO: 2728480 - DNA, 25 bp, Homo sapien
attcatctaaagttacgatgccatc

SEQ ID NO: 2728481 - DNA, 25 bp, Homo sapien
ctaaagttacgatgccatctttatt

SEQ ID NO: 2728482 - DNA, 25 bp, Homo sapien
catctaaagttacgatgccatcttt

SEQ ID NO: 2728483 - DNA, 25 bp, Homo sapien
tcatctaaagttacgatgccatctt

SEQ ID NO: 2728484 - DNA, 25 bp, Homo sapien
tgcttaataccgaacatttgaggat

SEQ ID NO: 2728485 - DNA, 25 bp, Homo sapien
cagctctcaagggaattaacagtga

SEQ ID NO: 2728486 - DNA, 25 bp, Homo sapien
taggacatctacataacagggtggc

SEQ ID NO: 2728487 - DNA, 25 bp, Homo sapien
tggatatcaccctgcacataggaca

SEQ ID NO: 2728488 - DNA, 25 bp, Homo sapien
aacagctggagagacctcatgatgt

SEQ ID NO: 2728489 - DNA, 25 bp, Homo sapien
cagctggagagacctcatgatgttg

SEQ ID NO: 2728490 - DNA, 25 bp, Homo sapien
aaacagctggagagacctcatgatg

SEQ ID NO: 2728491 - DNA, 25 bp, Homo sapien
agctggagagacctcatgatgttgt

SEQ ID NO: 2728492 - DNA, 25 bp, Homo sapien
agagggaccttccatagggcagcag

SEQ ID NO: 2728493 - DNA, 25 bp, Homo sapien
tatcccacatatgttaggtgctggc

SEQ ID NO: 2728494 - DNA, 25 bp, Homo sapien
tcagaacaagggcagatcagggtgt

SEQ ID NO: 2728495 - DNA, 25 bp, Homo sapien
caggcattctggacttcttgggagg

SEQ ID NO: 2728496 - DNA, 25 bp, Homo sapien
gaatggactagccttcccttttcac

SEQ ID NO: 2728497 - DNA, 25 bp, Homo sapien
taataattgggtgtcaaatgaatgg

SEQ ID NO: 2728498 - DNA, 25 bp, Homo sapien
tacctaacggagtcatgaagaagtg

SEQ ID NO: 2728499 - DNA, 25 bp, Homo sapien
cagcttacctctcttacctaacgga

SEQ ID NO: 2728500 - DNA, 25 bp, Homo sapien
catttgctggttataggctgaagcc

SEQ ID NO: 2728501 - DNA, 25 bp, Homo sapien
tccaggctttccatatcagagggtc

SEQ ID NO: 2728502 - DNA, 25 bp, Homo sapien
taagacccacagtgttcaacatgag

SEQ ID NO: 2728503 - DNA, 25 bp, Homo sapien
tgaagccgcttgatggtcctctaga

SEQ ID NO: 2728504 - DNA, 25 bp, Homo sapien
aagctgttctcttgcggtctctgga

SEQ ID NO: 2728505 - DNA, 25 bp, Homo sapien
ttgaagttcccacggtccctcgcaa

SEQ ID NO: 2728506 - DNA, 25 bp, Homo sapien
ctgttttctcgggtggtccaggagg

SEQ ID NO: 2728507 - DNA, 25 bp, Homo sapien
gcggtgcggttccttgaagttccca

SEQ ID NO: 2728508 - DNA, 25 bp, Homo sapien
gcgaggggaaggctttggcaccagc

SEQ ID NO: 2728509 - DNA, 25 bp, Homo sapien
tgatttgtaaagtgcggaggtgagg

SEQ ID NO: 2728510 - DNA, 25 bp, Homo sapien
ctgatttgtaaagtgcggaggtgag

SEQ ID NO: 2728511 - DNA, 25 bp, Homo sapien
tgaggatgcagcgaggggaaggctt

SEQ ID NO: 2728512 - DNA, 25 bp, Homo sapien
caagatcatagagcgaatagagggc

SEQ ID NO: 2728513 - DNA, 25 bp, Homo sapien
cacagcatgtccatcgcagcagtgg

SEQ ID NO: 2728514 - DNA, 25 bp, Homo sapien
gaagtcagtctgaccgaccatgaaa

SEQ ID NO: 2728515 - DNA, 25 bp, Homo sapien
gccaagcgactgcactcagaggaag

SEQ ID NO: 2728516 - DNA, 25 bp, Homo sapien
tcatccccgagacatgaagagagga

SEQ ID NO: 2728517 - DNA, 25 bp, Homo sapien
ggctgacaccgcagttatcaagagc

SEQ ID NO: 2728518 - DNA, 25 bp, Homo sapien
cagttatcaagagcaagctgctcct

SEQ ID NO: 2728519 - DNA, 25 bp, Homo sapien
agagaggagttaggcggctgacacc

SEQ ID NO: 2728520 - DNA, 25 bp, Homo sapien
ggtcaggacggtgatcttacagaac

SEQ ID NO: 2728521 - DNA, 25 bp, Homo sapien
tctaatagcagcctgaccccatggg

SEQ ID NO: 2728522 - DNA, 25 bp, Homo sapien
tgagtgtgctcctgggggtcaggac

SEQ ID NO: 2728523 - DNA, 25 bp, Homo sapien
taatagcagcctgaccccatgggtg

SEQ ID NO: 2728524 - DNA, 25 bp, Homo sapien
gggtcccccaagcagacgctctggg

SEQ ID NO: 2728525 - DNA, 25 bp, Homo sapien
ttcagggaaaccagacctgtctttg

SEQ ID NO: 2728526 - DNA, 25 bp, Homo sapien
tttcttcagggaaaccagacctgtc

SEQ ID NO: 2728527 - DNA, 25 bp, Homo sapien
cccaagcagacgctctgggaaggca

SEQ ID NO: 2728528 - DNA, 25 bp, Homo sapien
agtttctgcaagattggccttcata

SEQ ID NO: 2728529 - DNA, 25 bp, Homo sapien
cagtttctgcaagattggccttcat

SEQ ID NO: 2728530 - DNA, 25 bp, Homo sapien
tcagtttctgcaagattggccttca

SEQ ID NO: 2728531 - DNA, 25 bp, Homo sapien
tttctgcaagattggccttcatatc

SEQ ID NO: 2728532 - DNA, 25 bp, Homo sapien
tttagccttgtcattcccttctgtc

SEQ ID NO: 2728533 - DNA, 25 bp, Homo sapien
agccttgtcattcccttctgtcaga

SEQ ID NO: 2728534 - DNA, 25 bp, Homo sapien
tcagtttagccttgtcattcccttc

SEQ ID NO: 2728535 - DNA, 25 bp, Homo sapien
agtttagccttgtcattcccttctg

SEQ ID NO: 2728536 - DNA, 25 bp, Homo sapien
cttggacaacactcttttatgcact

SEQ ID NO: 2728537 - DNA, 25 bp, Homo sapien
gcctcggaagctccgtagaccatca

SEQ ID NO: 2728538 - DNA, 25 bp, Homo sapien
tgactattcctggactgcagccgca

SEQ ID NO: 2728539 - DNA, 25 bp, Homo sapien
gtccccttagtcaatacggaggcta

SEQ ID NO: 2728540 - DNA, 25 bp, Homo sapien
cctgccctgtgccatggcatgttca

SEQ ID NO: 2728541 - DNA, 25 bp, Homo sapien
gcttctctacgctgctgggcctgtc

SEQ ID NO: 2728542 - DNA, 25 bp, Homo sapien
ctgccctgtgccatggcatgttcat

SEQ ID NO: 2728543 - DNA, 25 bp, Homo sapien
cgcttctctacgctgctgggcctgt

SEQ ID NO: 2728544 - DNA, 25 bp, Homo sapien
gagactttcatatcccaggacctag

SEQ ID NO: 2728545 - DNA, 25 bp, Homo sapien
acagaagtgcttcgacagtgctcac

SEQ ID NO: 2728546 - DNA, 25 bp, Homo sapien
gagtcctttcaggagcatcccagag

SEQ ID NO: 2728547 - DNA, 25 bp, Homo sapien
aagagcacagaggatagaggcccag

SEQ ID NO: 2728548 - DNA, 25 bp, Homo sapien
tagttgttgaggctctgttagggca

SEQ ID NO: 2728549 - DNA, 25 bp, Homo sapien
tgtcccctcgtatgtggacacgcag

SEQ ID NO: 2728550 - DNA, 25 bp, Homo sapien
ggcctacaggcaggacttccaggca

SEQ ID NO: 2728551 - DNA, 25 bp, Homo sapien
aaggcacggtcttctgggtccccag

SEQ ID NO: 2728552 - DNA, 25 bp, Homo sapien
ggtctaggcttgtggggtcagtcat

SEQ ID NO: 2728553 - DNA, 25 bp, Homo sapien
ttatttatccccaggtctaggcttg

SEQ ID NO: 2728554 - DNA, 25 bp, Homo sapien
cttgaccaagccagacattctttta

SEQ ID NO: 2728555 - DNA, 25 bp, Homo sapien
tttatccccaggtctaggcttgtgg

SEQ ID NO: 2728556 - DNA, 25 bp, Homo sapien
ctgctcacaccaaggggctgaagta

SEQ ID NO: 2728557 - DNA, 25 bp, Homo sapien
gaagctgctcacaccaaggggctga

SEQ ID NO: 2728558 - DNA, 25 bp, Homo sapien
gctcacaccaaggggctgaagtagg

SEQ ID NO: 2728559 - DNA, 25 bp, Homo sapien
gagaagctgctcacaccaaggggct

SEQ ID NO: 2728560 - DNA, 25 bp, Homo sapien
gaagagactcagacacacgaaggcc

SEQ ID NO: 2728561 - DNA, 25 bp, Homo sapien
cagtgaagagactcagacacacgaa

SEQ ID NO: 2728562 - DNA, 25 bp, Homo sapien
gtgaagagactcagacacacgaagg

SEQ ID NO: 2728563 - DNA, 25 bp, Homo sapien
tgaagagactcagacacacgaaggc

SEQ ID NO: 2728564 - DNA, 25 bp, Homo sapien
tgccgacctcgacgttgaactgact

SEQ ID NO: 2728565 - DNA, 25 bp, Homo sapien
ccaaaattgggcctgagaaatttgt

SEQ ID NO: 2728566 - DNA, 25 bp, Homo sapien
gaaatttgttatatcctgctgtgag

SEQ ID NO: 2728567 - DNA, 25 bp, Homo sapien
gtcacttctgccgacctcgacgttg

SEQ ID NO: 2728568 - DNA, 25 bp, Homo sapien
tgaagtcagactccttctagggctg

SEQ ID NO: 2728569 - DNA, 25 bp, Homo sapien
tgaggcacagaaggctaaaccactt

SEQ ID NO: 2728570 - DNA, 25 bp, Homo sapien
tggagccgggacagacatgaaatca

SEQ ID NO: 2728571 - DNA, 25 bp, Homo sapien
cacttgccaagcaggagagctagga

SEQ ID NO: 2728572 - DNA, 25 bp, Homo sapien
gtcagcgctatctgtacgggttctc

SEQ ID NO: 2728573 - DNA, 25 bp, Homo sapien
tgcaatgtccagagtcagcgctatc

SEQ ID NO: 2728574 - DNA, 25 bp, Homo sapien
tacttgcaatgtccagagtcagcgc

SEQ ID NO: 2728575 - DNA, 25 bp, Homo sapien
aatgctagagatacttgcaatgtcc

SEQ ID NO: 2728576 - DNA, 25 bp, Homo sapien
gagggactacttgggtagagtacaa

SEQ ID NO: 2728577 - DNA, 25 bp, Homo sapien
cacacagagagggactacttgggta

SEQ ID NO: 2728578 - DNA, 25 bp, Homo sapien
tagagtacaaaggaacagcgcttac

SEQ ID NO: 2728579 - DNA, 25 bp, Homo sapien
cttgggtagagtacaaaggaacagc

SEQ ID NO: 2728580 - DNA, 25 bp, Homo sapien
gtcggaggtatatggtggctgtgta

SEQ ID NO: 2728581 - DNA, 25 bp, Homo sapien
ccatccagcgctgtcggaggtatat

SEQ ID NO: 2728582 - DNA, 25 bp, Homo sapien
atccagcgctgtcggaggtatatgg

SEQ ID NO: 2728583 - DNA, 25 bp, Homo sapien
cagccgctggtccatccagcgctgt

SEQ ID NO: 2728584 - DNA, 25 bp, Homo sapien
atgtaagtatctggcacccagagga

SEQ ID NO: 2728585 - DNA, 25 bp, Homo sapien
tccacaatgtaagtatctggcaccc

SEQ ID NO: 2728586 - DNA, 25 bp, Homo sapien
ggactccacaatgtaagtatctggc

SEQ ID NO: 2728587 - DNA, 25 bp, Homo sapien
cacaatgtaagtatctggcacccag

SEQ ID NO: 2728588 - DNA, 25 bp, Homo sapien
aagaggcggatgagcctgtttccca

SEQ ID NO: 2728589 - DNA, 25 bp, Homo sapien
gagaagaggcggatgagcctgtttc

SEQ ID NO: 2728590 - DNA, 25 bp, Homo sapien
agaagaggcggatgagcctgtttcc

SEQ ID NO: 2728591 - DNA, 25 bp, Homo sapien
gaagaggcggatgagcctgtttccc

SEQ ID NO: 2728592 - DNA, 25 bp, Homo sapien
gttttctcccagctgccgtcctcca

SEQ ID NO: 2728593 - DNA, 25 bp, Homo sapien
ccctgaggtcacaggtgtccgcgta

SEQ ID NO: 2728594 - DNA, 25 bp, Homo sapien
ccaagacacatctgcatgttttctc

SEQ ID NO: 2728595 - DNA, 25 bp, Homo sapien
ctgcatgttttctcccagctgccgt

SEQ ID NO: 2728596 - DNA, 25 bp, Homo sapien
caggcatagggacttgcataggctc

SEQ ID NO: 2728597 - DNA, 25 bp, Homo sapien
gggcttaaccccagagatattcaat

SEQ ID NO: 2728598 - DNA, 25 bp, Homo sapien
cagtggagattgcattcaccaggcc

SEQ ID NO: 2728599 - DNA, 25 bp, Homo sapien
tatcgtcaccacttgacagcaggca

SEQ ID NO: 2728600 - DNA, 25 bp, Homo sapien
gacagatccatgttacatgcaacag

SEQ ID NO: 2728601 - DNA, 25 bp, Homo sapien
tatttagacagatccatgttacatg

SEQ ID NO: 2728602 - DNA, 25 bp, Homo sapien
gggtatttagacagatccatgttac

SEQ ID NO: 2728603 - DNA, 25 bp, Homo sapien
tagacagatccatgttacatgcaac

SEQ ID NO: 2728604 - DNA, 25 bp, Homo sapien
gattgtcccacaaaacgcttatgaa

SEQ ID NO: 2728605 - DNA, 25 bp, Homo sapien
tattagagcccgttaaaaactctgc

SEQ ID NO: 2728606 - DNA, 25 bp, Homo sapien
tcatagaactcatctggaaccacag

SEQ ID NO: 2728607 - DNA, 25 bp, Homo sapien
tcatatcttctactgggacctgtgg

SEQ ID NO: 2728608 - DNA, 25 bp, Homo sapien
gattaagaaaatgtggcacatacac

SEQ ID NO: 2728609 - DNA, 25 bp, Homo sapien
ccaaatgtccaacaatgatagactg

SEQ ID NO: 2728610 - DNA, 25 bp, Homo sapien
acaatagcaaaggcttggaaccaag

SEQ ID NO: 2728611 - DNA, 25 bp, Homo sapien
atgtatatttattgcggcattattc

SEQ ID NO: 2728612 - DNA, 25 bp, Homo sapien
gcaagggtgttccagattgaactgg

SEQ ID NO: 2728613 - DNA, 25 bp, Homo sapien
aagggtgttccagattgaactggtc

SEQ ID NO: 2728614 - DNA, 25 bp, Homo sapien
gtgttccagattgaactggtctggt

SEQ ID NO: 2728615 - DNA, 25 bp, Homo sapien
gggtgttccagattgaactggtctg

SEQ ID NO: 2728616 - DNA, 25 bp, Homo sapien
tggtgactaaggtgaaataccgctc

SEQ ID NO: 2728617 - DNA, 25 bp, Homo sapien
tatggtgtactgagcaagccgcagg

SEQ ID NO: 2728618 - DNA, 25 bp, Homo sapien
tgttccagtccacgcacagagtcgt

SEQ ID NO: 2728619 - DNA, 25 bp, Homo sapien
tctcctgctgcgatctggtgactaa

SEQ ID NO: 2728620 - DNA, 25 bp, Homo sapien
tcatacagtttgtcacatgagttac

SEQ ID NO: 2728621 - DNA, 25 bp, Homo sapien
ggtaaacaacagataggaaattgtg

SEQ ID NO: 2728622 - DNA, 25 bp, Homo sapien
ctgaaagggtaaacaacagatagga

SEQ ID NO: 2728623 - DNA, 25 bp, Homo sapien
gtgtctgttcgtgtagcaagtggtt

SEQ ID NO: 2728624 - DNA, 25 bp, Homo sapien
ggaaattgtgtctgttcgtgtagca

SEQ ID NO: 2728625 - DNA, 25 bp, Homo sapien
tgcagggactgaatcgagagagatc

SEQ ID NO: 2728626 - DNA, 25 bp, Homo sapien
aaatacagaacattcctccgaagct

SEQ ID NO: 2728627 - DNA, 25 bp, Homo sapien
caaactgtaagaccaatctagtgta

SEQ ID NO: 2728628 - DNA, 25 bp, Homo sapien
ccaggacaacaccaccaggaaagtg

SEQ ID NO: 2728629 - DNA, 25 bp, Homo sapien
gatccccaggtacacatcgatggcc

SEQ ID NO: 2728630 - DNA, 25 bp, Homo sapien
gagcaactgcatattctagcaaggc

SEQ ID NO: 2728631 - DNA, 25 bp, Homo sapien
tgcgggacccgatcatcagtgtggt

SEQ ID NO: 2728632 - DNA, 25 bp, Homo sapien
tgccatctgctgtaaggaactgtag

SEQ ID NO: 2728633 - DNA, 25 bp, Homo sapien
cactgtagtcaacgttgtcgctgga

SEQ ID NO: 2728634 - DNA, 25 bp, Homo sapien
gctgatcttccgtttaaagctggag

SEQ ID NO: 2728635 - DNA, 25 bp, Homo sapien
tgtgaaataatcaacaatcctgccc

SEQ ID NO: 2728636 - DNA, 25 bp, Homo sapien
cgctggaaatttcaatgctggcaaa

SEQ ID NO: 2728637 - DNA, 25 bp, Homo sapien
cagtaaaatacattggctagcataa

SEQ ID NO: 2728638 - DNA, 25 bp, Homo sapien
atacattggctagcataaaaatcaa

SEQ ID NO: 2728639 - DNA, 25 bp, Homo sapien
tgtagtatgcccagtaaaatacatt

SEQ ID NO: 2728640 - DNA, 25 bp, Homo sapien
atgtagtatgcccagtaaaatacat

SEQ ID NO: 2728641 - DNA, 25 bp, Homo sapien
gagccaccgaataaacagccctgag

SEQ ID NO: 2728642 - DNA, 25 bp, Homo sapien
taagccactcatagcagaccagctg

SEQ ID NO: 2728643 - DNA, 25 bp, Homo sapien
gctaagccacttgttcctgggtcaa

SEQ ID NO: 2728644 - DNA, 25 bp, Homo sapien
acttctgacacttgagggttaccca

SEQ ID NO: 2728645 - DNA, 25 bp, Homo sapien
aattaacttattctccagcatcaag

SEQ ID NO: 2728646 - DNA, 25 bp, Homo sapien
aagtgattattaaatccattagtca

SEQ ID NO: 2728647 - DNA, 25 bp, Homo sapien
taagcacagggaagtataagttaat

SEQ ID NO: 2728648 - DNA, 25 bp, Homo sapien
ccattagtcatatacaaggaatcca

SEQ ID NO: 2728649 - DNA, 25 bp, Homo sapien
cggccggtcggcacccagcgcccga

SEQ ID NO: 2728650 - DNA, 25 bp, Homo sapien
cgccggccagccggccggtcggcac

SEQ ID NO: 2728651 - DNA, 25 bp, Homo sapien
ggtcggcacccagcgcccgagggga

SEQ ID NO: 2728652 - DNA, 25 bp, Homo sapien
cagccggccggtcggcacccagcgc

SEQ ID NO: 2728653 - DNA, 25 bp, Homo sapien
tcggtctccagacgcgtcccgccgg

SEQ ID NO: 2728654 - DNA, 25 bp, Homo sapien
tctccagacgcgtcccgccgggttc

SEQ ID NO: 2728655 - DNA, 25 bp, Homo sapien
cagcgtggcggagcgcgggcccgcg

SEQ ID NO: 2728656 - DNA, 25 bp, Homo sapien
cggccctcggtctccagacgcgtcc

SEQ ID NO: 2728657 - DNA, 25 bp, Homo sapien
ggcaggggctgggactccggggaca

SEQ ID NO: 2728658 - DNA, 25 bp, Homo sapien
cagaggcaggggctgggactccggg

SEQ ID NO: 2728659 - DNA, 25 bp, Homo sapien
gaggcaggggctgggactccgggga

SEQ ID NO: 2728660 - DNA, 25 bp, Homo sapien
gggcagaggcaggggctgggactcc

SEQ ID NO: 2728661 - DNA, 25 bp, Homo sapien
taaagccgcggtcagcgagcgtgct

SEQ ID NO: 2728662 - DNA, 25 bp, Homo sapien
ggcaacactaaagccgcggtcagcg

SEQ ID NO: 2728663 - DNA, 25 bp, Homo sapien
gtgctgccggcgtccgcaccttccc

SEQ ID NO: 2728664 - DNA, 25 bp, Homo sapien
agcgagcgtgctgccggcgtccgca

SEQ ID NO: 2728665 - DNA, 25 bp, Homo sapien
gtagttttgacatcagcagctaact

SEQ ID NO: 2728666 - DNA, 25 bp, Homo sapien
agttttgacatcagcagctaacttt

SEQ ID NO: 2728667 - DNA, 25 bp, Homo sapien
ggtagttttgacatcagcagctaac

SEQ ID NO: 2728668 - DNA, 25 bp, Homo sapien
gggtagttttgacatcagcagctaa

SEQ ID NO: 2728669 - DNA, 25 bp, Homo sapien
tacttatgttggaatgtactgtgaa

SEQ ID NO: 2728670 - DNA, 25 bp, Homo sapien
ctacaggaatgtactgtgaagtact

SEQ ID NO: 2728671 - DNA, 25 bp, Homo sapien
tatttgtccaactccgcttttaagc

SEQ ID NO: 2728672 - DNA, 25 bp, Homo sapien
tccgcttttaagctgtctacaggaa

SEQ ID NO: 2728673 - DNA, 25 bp, Homo sapien
tctgttctacctaaagtgcctacct

SEQ ID NO: 2728674 - DNA, 25 bp, Homo sapien
tgactggagattaagaagcatggct

SEQ ID NO: 2728675 - DNA, 25 bp, Homo sapien
gaaagcctaatccagtgcctgccat

SEQ ID NO: 2728676 - DNA, 25 bp, Homo sapien
gatcaaatcaggtagcttgactgga

SEQ ID NO: 2728677 - DNA, 25 bp, Homo sapien
tgtgtacaaatttctttctcttgga

SEQ ID NO: 2728678 - DNA, 25 bp, Homo sapien
tacatttgtgtacaaatttctttct

SEQ ID NO: 2728679 - DNA, 25 bp, Homo sapien
catttgtgtacaaatttctttctct

SEQ ID NO: 2728680 - DNA, 25 bp, Homo sapien
tttgtgtacaaatttctttctcttg

SEQ ID NO: 2728681 - DNA, 25 bp, Homo sapien
tgggaggtcaatattactgatgaac

SEQ ID NO: 2728682 - DNA, 25 bp, Homo sapien
ttcccatattgatgggaggtcaata

SEQ ID NO: 2728683 - DNA, 25 bp, Homo sapien
tgcaatagctatgcaagggcatggt

SEQ ID NO: 2728684 - DNA, 25 bp, Homo sapien
gacacttgatcggtggagcacacta

SEQ ID NO: 2728685 - DNA, 25 bp, Homo sapien
gagtacataacacttccaattcagc

SEQ ID NO: 2728686 - DNA, 25 bp, Homo sapien
aagttccaagagtgctttctcagcc

SEQ ID NO: 2728687 - DNA, 25 bp, Homo sapien
cagtccctatgtagagatgagtaca

SEQ ID NO: 2728688 - DNA, 25 bp, Homo sapien
cattctggactgtcaataagttcca

SEQ ID NO: 2728689 - DNA, 25 bp, Homo sapien
gacaactctgctctagaccacacag

SEQ ID NO: 2728690 - DNA, 25 bp, Homo sapien
gaggcaggcaagaggtaatcagcat

SEQ ID NO: 2728691 - DNA, 25 bp, Homo sapien
cagttaccattgctaacacacgagt

SEQ ID NO: 2728692 - DNA, 25 bp, Homo sapien
tgaatatctagatgggaggcaggca

SEQ ID NO: 2728693 - DNA, 25 bp, Homo sapien
gactgactcggctgacaagttttga

SEQ ID NO: 2728694 - DNA, 25 bp, Homo sapien
aacaggtaaaggactgactcggctg

SEQ ID NO: 2728695 - DNA, 25 bp, Homo sapien
tgctgcaaggagctgagcataggat

SEQ ID NO: 2728696 - DNA, 25 bp, Homo sapien
cggctgacaagttttgaaagacatg

SEQ ID NO: 2728697 - DNA, 25 bp, Homo sapien
atgacaaagggagccagcttgggct

SEQ ID NO: 2728698 - DNA, 25 bp, Homo sapien
gggctgtgatgccacgtaattcaga

SEQ ID NO: 2728699 - DNA, 25 bp, Homo sapien
ctggagaaacttcttcacatcagca

SEQ ID NO: 2728700 - DNA, 25 bp, Homo sapien
ccaacttagtgattttagcaatgac

SEQ ID NO: 2728701 - DNA, 25 bp, Homo sapien
tactcctattatgcagtgttccaca

SEQ ID NO: 2728702 - DNA, 25 bp, Homo sapien
gattattactcctattatgcagtgt

SEQ ID NO: 2728703 - DNA, 25 bp, Homo sapien
tattactcctattatgcagtgttcc

SEQ ID NO: 2728704 - DNA, 25 bp, Homo sapien
aggattattactcctattatgcagt

SEQ ID NO: 2728705 - DNA, 25 bp, Homo sapien
gaaggctgtctattttgccacaaat

SEQ ID NO: 2728706 - DNA, 25 bp, Homo sapien
acagcattacttaagcaaactcagg

SEQ ID NO: 2728707 - DNA, 25 bp, Homo sapien
caaactcaggctcctgttagatgga

SEQ ID NO: 2728708 - DNA, 25 bp, Homo sapien
cctgttagatggaaaggctcgctta

SEQ ID NO: 2728709 - DNA, 25 bp, Homo sapien
gccaaccagtatgaccaccaactgg

SEQ ID NO: 2728710 - DNA, 25 bp, Homo sapien
caaccagtatgaccaccaactgggt

SEQ ID NO: 2728711 - DNA, 25 bp, Homo sapien
ggccaaccagtatgaccaccaactg

SEQ ID NO: 2728712 - DNA, 25 bp, Homo sapien
ctggccaaccagtatgaccaccaac

SEQ ID NO: 2728713 - DNA, 25 bp, Homo sapien
gcggcgtgctcccttagtgccaggt

SEQ ID NO: 2728714 - DNA, 25 bp, Homo sapien
ggcgtgctcccttagtgccaggtcc

SEQ ID NO: 2728715 - DNA, 25 bp, Homo sapien
agaagcagcagccaatctggttttc

SEQ ID NO: 2728716 - DNA, 25 bp, Homo sapien
agcagcagccaatctggttttcgca

SEQ ID NO: 2728717 - DNA, 25 bp, Homo sapien
cataatagattcctttctggctgac

SEQ ID NO: 2728718 - DNA, 25 bp, Homo sapien
tgcctcataatagattcctttctgg

SEQ ID NO: 2728719 - DNA, 25 bp, Homo sapien
ttgcctcataatagattcctttctg

SEQ ID NO: 2728720 - DNA, 25 bp, Homo sapien
ggagccataagtatcagtgatgagc

SEQ ID NO: 2728721 - DNA, 25 bp, Homo sapien
tatttccggagccataagtatcagt

SEQ ID NO: 2728722 - DNA, 25 bp, Homo sapien
caattatttccggagccataagtat

SEQ ID NO: 2728723 - DNA, 25 bp, Homo sapien
cacagcccaattatttccggagcca

SEQ ID NO: 2728724 - DNA, 25 bp, Homo sapien
cctggtcttgatacagactgccaaa

SEQ ID NO: 2728725 - DNA, 25 bp, Homo sapien
taaaacctggtcttgatacagactg

SEQ ID NO: 2728726 - DNA, 25 bp, Homo sapien
tctctaaaacctggtcttgatacag

SEQ ID NO: 2728727 - DNA, 25 bp, Homo sapien
gagtttctctaaaacctggtcttga

SEQ ID NO: 2728728 - DNA, 25 bp, Homo sapien
agaaatgtgccgagtggcacctgga

SEQ ID NO: 2728729 - DNA, 25 bp, Homo sapien
aagacgtaagcgttcactcccctgg

SEQ ID NO: 2728730 - DNA, 25 bp, Homo sapien
cgccagccagcaagacgtaagcgtt

SEQ ID NO: 2728731 - DNA, 25 bp, Homo sapien
taaaagaaatgtgccgagtggcacc

SEQ ID NO: 2728732 - DNA, 25 bp, Homo sapien
caccggaaggataaatggaggtcat

SEQ ID NO: 2728733 - DNA, 25 bp, Homo sapien
ggaaggataaatggaggtcataaat

SEQ ID NO: 2728734 - DNA, 25 bp, Homo sapien
aggataaatggaggtcataaatcta

SEQ ID NO: 2728735 - DNA, 25 bp, Homo sapien
ccggaaggataaatggaggtcataa

SEQ ID NO: 2728736 - DNA, 25 bp, Homo sapien
ccaagatgccattatgaggtcaagt

SEQ ID NO: 2728737 - DNA, 25 bp, Homo sapien
gccaagatgccattatgaggtcaag

SEQ ID NO: 2728738 - DNA, 25 bp, Homo sapien
tgccaagatgccattatgaggtcaa

SEQ ID NO: 2728739 - DNA, 25 bp, Homo sapien
attgccaagatgccattatgaggtc

SEQ ID NO: 2728740 - DNA, 25 bp, Homo sapien
atttgccacaatgttgttgactgca

SEQ ID NO: 2728741 - DNA, 25 bp, Homo sapien
gaagtcgtctacagttgtacccaac

SEQ ID NO: 2728742 - DNA, 25 bp, Homo sapien
gttgactgcaacaaagggcttattc

SEQ ID NO: 2728743 - DNA, 25 bp, Homo sapien
gccacagcacttgaagtcgtctaca

SEQ ID NO: 2728744 - DNA, 25 bp, Homo sapien
aggtgaggtaaagactatgtttagg

SEQ ID NO: 2728745 - DNA, 25 bp, Homo sapien
tagtaggaatgttaacatccgccag

SEQ ID NO: 2728746 - DNA, 25 bp, Homo sapien
tgatccaatcttttagtaggaatgt

SEQ ID NO: 2728747 - DNA, 25 bp, Homo sapien
ccagtgtgtatagaggtgttaggct

SEQ ID NO: 2728748 - DNA, 25 bp, Homo sapien
caggagacaaattgtagagatggtt

SEQ ID NO: 2728749 - DNA, 25 bp, Homo sapien
tttttcttgtagagcctcatgaatc

SEQ ID NO: 2728750 - DNA, 25 bp, Homo sapien
ttcttgtagagcctcatgaatctct

SEQ ID NO: 2728751 - DNA, 25 bp, Homo sapien
tttcttgtagagcctcatgaatctc

SEQ ID NO: 2728752 - DNA, 25 bp, Homo sapien
ttttcttgtagagcctcatgaatct

SEQ ID NO: 2728753 - DNA, 25 bp, Homo sapien
ttaactcctactggaagtgagaaca

SEQ ID NO: 2728754 - DNA, 25 bp, Homo sapien
gtcaatgggtaccaaggctgattcc

SEQ ID NO: 2728755 - DNA, 25 bp, Homo sapien
cattaatttgcttcagataagggcc

SEQ ID NO: 2728756 - DNA, 25 bp, Homo sapien
tctatctctcccctatctagtagtc

SEQ ID NO: 2728757 - DNA, 25 bp, Homo sapien
cactaaaacgtctttgagagaagta

SEQ ID NO: 2728758 - DNA, 25 bp, Homo sapien
gaagtatcacgaaatgaggtagcta

SEQ ID NO: 2728759 - DNA, 25 bp, Homo sapien
tgagagaagtatcacgaaatgaggt

SEQ ID NO: 2728760 - DNA, 25 bp, Homo sapien
aaaagagagcatgctagcactaaaa

SEQ ID NO: 2728761 - DNA, 25 bp, Homo sapien
gaagttgaattatcaaataacttac

SEQ ID NO: 2728762 - DNA, 25 bp, Homo sapien
caaatattctaactaggaagttgaa

SEQ ID NO: 2728763 - DNA, 25 bp, Homo sapien
aagtctgtccacaataattctttaa

SEQ ID NO: 2728764 - DNA, 25 bp, Homo sapien
ggaccagtttcaagacctgcattac

SEQ ID NO: 2728765 - DNA, 25 bp, Homo sapien
gaccagtttcaagacctgcattacc

SEQ ID NO: 2728766 - DNA, 25 bp, Homo sapien
ctgcattaccagattttgctgacat

SEQ ID NO: 2728767 - DNA, 25 bp, Homo sapien
gaatctgcaccgtgcaaagatcatc

SEQ ID NO: 2728768 - DNA, 25 bp, Homo sapien
cctttatgttgatgacccttcatac

SEQ ID NO: 2728769 - DNA, 25 bp, Homo sapien
ttaatactgtgcctttatgttgatg

SEQ ID NO: 2728770 - DNA, 25 bp, Homo sapien
tacagaaactatattgcttaatact

SEQ ID NO: 2728771 - DNA, 25 bp, Homo sapien
cagctacttcaggttacaaatccat

SEQ ID NO: 2728772 - DNA, 25 bp, Homo sapien
agattttgctaacactgatcctgaa

SEQ ID NO: 2728773 - DNA, 25 bp, Homo sapien
tgatcctgaagatttaaaggtttga

SEQ ID NO: 2728774 - DNA, 25 bp, Homo sapien
accagattttgctaacactgatcct

SEQ ID NO: 2728775 - DNA, 25 bp, Homo sapien
gaagatttaaaggtttgaccagcac

SEQ ID NO: 2728776 - DNA, 25 bp, Homo sapien
aatgaagtcaaagttaaggcagtta

SEQ ID NO: 2728777 - DNA, 25 bp, Homo sapien
ctgccaatgaagtcaaagttaaggc

SEQ ID NO: 2728778 - DNA, 25 bp, Homo sapien
ccaatgaagtcaaagttaaggcagt

SEQ ID NO: 2728779 - DNA, 25 bp, Homo sapien
tgaagtcaaagttaaggcagttaag

SEQ ID NO: 2728780 - DNA, 25 bp, Homo sapien
ttgatctccaagctgttgaaatctg

SEQ ID NO: 2728781 - DNA, 25 bp, Homo sapien
atcatttgtagaatcacctattgaa

SEQ ID NO: 2728782 - DNA, 25 bp, Homo sapien
gatcatttgtagaatcacctattga

SEQ ID NO: 2728783 - DNA, 25 bp, Homo sapien
atctccaagctgttgaaatctgcac

SEQ ID NO: 2728784 - DNA, 25 bp, Homo sapien
aagaaaagatccaatgtttctggtt

SEQ ID NO: 2728785 - DNA, 25 bp, Homo sapien
agatccaatgtttctggttccagga

SEQ ID NO: 2728786 - DNA, 25 bp, Homo sapien
tagtggtggaagtgaatgatacaaa

SEQ ID NO: 2728787 - DNA, 25 bp, Homo sapien
taactgagatagtagtggtggaagt

SEQ ID NO: 2728788 - DNA, 25 bp, Homo sapien
tcaggactgttaaataaggaccttc

SEQ ID NO: 2728789 - DNA, 25 bp, Homo sapien
attaccaaggtacttggcacgttca

SEQ ID NO: 2728790 - DNA, 25 bp, Homo sapien
ttgtcgaagcaaactgaactaaaca

SEQ ID NO: 2728791 - DNA, 25 bp, Homo sapien
taaggaccttcttgtcgaagcaaac

SEQ ID NO: 2728792 - DNA, 25 bp, Homo sapien
tgtaccctcaagcaactccgtgtct

SEQ ID NO: 2728793 - DNA, 25 bp, Homo sapien
tgcccagttgtctgtaagctccttg

SEQ ID NO: 2728794 - DNA, 25 bp, Homo sapien
tgagtatctacaggcactgtaccct

SEQ ID NO: 2728795 - DNA, 25 bp, Homo sapien
tatgcactgtagctgggatgaaaca

SEQ ID NO: 2728796 - DNA, 25 bp, Homo sapien
tctaataacttcaggatattccttc

SEQ ID NO: 2728797 - DNA, 25 bp, Homo sapien
tgtctttaaacgagccaaaaatcga

SEQ ID NO: 2728798 - DNA, 25 bp, Homo sapien
ccaaaaatcgacaaaattcatgata

SEQ ID NO: 2728799 - DNA, 25 bp, Homo sapien
cataactaattctcccagctgataa

SEQ ID NO: 2728800 - DNA, 25 bp, Homo sapien
atgaacactgttaggagcaaattcc

SEQ ID NO: 2728801 - DNA, 25 bp, Homo sapien
tgataaaggccttcgtgatttctgg

SEQ ID NO: 2728802 - DNA, 25 bp, Homo sapien
tggcaacagagtccaaccgagaagt

SEQ ID NO: 2728803 - DNA, 25 bp, Homo sapien
tgatttctggtgcataagtgtctaa

SEQ ID NO: 2728804 - DNA, 25 bp, Homo sapien
atcatccagtggatcatctaagtga

SEQ ID NO: 2728805 - DNA, 25 bp, Homo sapien
ctgaaacacagtggcagtatcatcc

SEQ ID NO: 2728806 - DNA, 25 bp, Homo sapien
aaacacagtggcagtatcatccagt

SEQ ID NO: 2728807 - DNA, 25 bp, Homo sapien
catccagtggatcatctaagtgatc

SEQ ID NO: 2728808 - DNA, 25 bp, Homo sapien
taactgcacaagaagagcacatgtc

SEQ ID NO: 2728809 - DNA, 25 bp, Homo sapien
gaatggtgatgtccacagttacacc

SEQ ID NO: 2728810 - DNA, 25 bp, Homo sapien
tgaccgtgcacaactgctccaactg

SEQ ID NO: 2728811 - DNA, 25 bp, Homo sapien
catattcacatctgctgaccgtgca

SEQ ID NO: 2728812 - DNA, 25 bp, Homo sapien
taaactatctgctcaagggccatta

SEQ ID NO: 2728813 - DNA, 25 bp, Homo sapien
tgcaatcaagtatagcaaagaagaa

SEQ ID NO: 2728814 - DNA, 25 bp, Homo sapien
ttccagagagaagtatatcctatca

SEQ ID NO: 2728815 - DNA, 25 bp, Homo sapien
gaaattgggttctgagtttgcaatc

SEQ ID NO: 2728816 - DNA, 25 bp, Homo sapien
tatatgctacgtttgccaggacaga

SEQ ID NO: 2728817 - DNA, 25 bp, Homo sapien
caagagtaaaggtcaataaggaaga

SEQ ID NO: 2728818 - DNA, 25 bp, Homo sapien
acagtggagtggttacagtaatatc

SEQ ID NO: 2728819 - DNA, 25 bp, Homo sapien
caatcataactggagatttaacacc

SEQ ID NO: 2728820 - DNA, 25 bp, Homo sapien
tcactttttgatctggatgatggga

SEQ ID NO: 2728821 - DNA, 25 bp, Homo sapien
actttttgatctggatgatgggaga

SEQ ID NO: 2728822 - DNA, 25 bp, Homo sapien
cactttttgatctggatgatgggag

SEQ ID NO: 2728823 - DNA, 25 bp, Homo sapien
tttttgatctggatgatgggagagg

SEQ ID NO: 2728824 - DNA, 25 bp, Homo sapien
ggcctaaggctttgtcacgaatttc

SEQ ID NO: 2728825 - DNA, 25 bp, Homo sapien
cacctatcttgctaccggcctaagg

SEQ ID NO: 2728826 - DNA, 25 bp, Homo sapien
caaggccctaaattatggttgatcc

SEQ ID NO: 2728827 - DNA, 25 bp, Homo sapien
tacaagagtctcaggttggtacacc

SEQ ID NO: 2728828 - DNA, 25 bp, Homo sapien
taagaaatagctgcccaacccaaag

SEQ ID NO: 2728829 - DNA, 25 bp, Homo sapien
cctgtatgctggtaccaaacagtct

SEQ ID NO: 2728830 - DNA, 25 bp, Homo sapien
ggcccacatcaacatagctacctaa

SEQ ID NO: 2728831 - DNA, 25 bp, Homo sapien
accgcacccaggtcctatatgtctg

SEQ ID NO: 2728832 - DNA, 25 bp, Homo sapien
atcctttcatatgtttagtggtcat

SEQ ID NO: 2728833 - DNA, 25 bp, Homo sapien
gagcatcctttcatatgtttagtgg

SEQ ID NO: 2728834 - DNA, 25 bp, Homo sapien
catcctttcatatgtttagtggtca

SEQ ID NO: 2728835 - DNA, 25 bp, Homo sapien
gcatcctttcatatgtttagtggtc

SEQ ID NO: 2728836 - DNA, 25 bp, Homo sapien
caaaaaccaattggctgtaaacata

SEQ ID NO: 2728837 - DNA, 25 bp, Homo sapien
tcttgacacctttgtcaaaaaccaa

SEQ ID NO: 2728838 - DNA, 25 bp, Homo sapien
gtcaaaaaccaattggctgtaaaca

SEQ ID NO: 2728839 - DNA, 25 bp, Homo sapien
acctttgtcaaaaaccaattggctg

SEQ ID NO: 2728840 - DNA, 25 bp, Homo sapien
tcctgaagtgtctccccatgttttc

SEQ ID NO: 2728841 - DNA, 25 bp, Homo sapien
atattctattcctccctggtcagtt

SEQ ID NO: 2728842 - DNA, 25 bp, Homo sapien
gctgtgaaggggctttttagcttaa

SEQ ID NO: 2728843 - DNA, 25 bp, Homo sapien
tatttgcatagattaatgtcctgaa

SEQ ID NO: 2728844 - DNA, 25 bp, Homo sapien
catagcatcatgctcatctgtactg

SEQ ID NO: 2728845 - DNA, 25 bp, Homo sapien
aagtataccagccatgcaagacgtc

SEQ ID NO: 2728846 - DNA, 25 bp, Homo sapien
ggtatatgttaatcttcctcctaca

SEQ ID NO: 2728847 - DNA, 25 bp, Homo sapien
aactgtcccaactaagtataccagc

SEQ ID NO: 2728848 - DNA, 25 bp, Homo sapien
cacaagtggtttcgtgtggcctcca

SEQ ID NO: 2728849 - DNA, 25 bp, Homo sapien
ttgtgtaagtcctagaatatgcccc

SEQ ID NO: 2728850 - DNA, 25 bp, Homo sapien
gccacttgtcttgtagccccagaaa

SEQ ID NO: 2728851 - DNA, 25 bp, Homo sapien
taccccaggagtagacattaaccag

SEQ ID NO: 2728852 - DNA, 25 bp, Homo sapien
taaggttttgctacacagaggagat

SEQ ID NO: 2728853 - DNA, 25 bp, Homo sapien
gaagaatagtttgcccttgaacaag

SEQ ID NO: 2728854 - DNA, 25 bp, Homo sapien
gagtacagacctgactgaagtgagg

SEQ ID NO: 2728855 - DNA, 25 bp, Homo sapien
ggtcctatccacagaagtgtgcaat

SEQ ID NO: 2728856 - DNA, 25 bp, Homo sapien
caagaaccacagaattgcaagctct

SEQ ID NO: 2728857 - DNA, 25 bp, Homo sapien
tatgttttacgaaactgatccaaga

SEQ ID NO: 2728858 - DNA, 25 bp, Homo sapien
ggttctttgaagttgatcaccaaca

SEQ ID NO: 2728859 - DNA, 25 bp, Homo sapien
tcattacaacatcgaggcaatccgg

SEQ ID NO: 2728860 - DNA, 25 bp, Homo sapien
gggaacaaatgggtgctacagaaca

SEQ ID NO: 2728861 - DNA, 25 bp, Homo sapien
gagatctaggccgaattcctataga

SEQ ID NO: 2728862 - DNA, 25 bp, Homo sapien
cagacaaaacgaacactctcagaat

SEQ ID NO: 2728863 - DNA, 25 bp, Homo sapien
tctctgataacaataagtagttggc

SEQ ID NO: 2728864 - DNA, 25 bp, Homo sapien
tctagtaaagcttaagatatgtaca

SEQ ID NO: 2728865 - DNA, 25 bp, Homo sapien
atgtacattttacagcccagcaatt

SEQ ID NO: 2728866 - DNA, 25 bp, Homo sapien
gtctgacaaaagcacatataatgac

SEQ ID NO: 2728867 - DNA, 25 bp, Homo sapien
tgttataacacttaggaaggcaacc

SEQ ID NO: 2728868 - DNA, 25 bp, Homo sapien
catttgactgctgacagacacttgg

SEQ ID NO: 2728869 - DNA, 25 bp, Homo sapien
tatggttgaactatgccttttgctc

SEQ ID NO: 2728870 - DNA, 25 bp, Homo sapien
aggctcccttagttcactttcccag

SEQ ID NO: 2728871 - DNA, 25 bp, Homo sapien
cttctactgataggcaagtttccac

SEQ ID NO: 2728872 - DNA, 25 bp, Homo sapien
gtagtatacagtctccagcaacttc

SEQ ID NO: 2728873 - DNA, 25 bp, Homo sapien
tttaattgagtagtatacagtctcc

SEQ ID NO: 2728874 - DNA, 25 bp, Homo sapien
ttgaactggttgctctcaaggcctg

SEQ ID NO: 2728875 - DNA, 25 bp, Homo sapien
tctgctccagtttgaactggttgct

SEQ ID NO: 2728876 - DNA, 25 bp, Homo sapien
tgtaatgctcactgggaataccaca

SEQ ID NO: 2728877 - DNA, 25 bp, Homo sapien
tgctctagacacaaggtaggctgca

SEQ ID NO: 2728878 - DNA, 25 bp, Homo sapien
gaatttgctgtaccttcttgactag

SEQ ID NO: 2728879 - DNA, 25 bp, Homo sapien
catacacccggatgacaaactggtc

SEQ ID NO: 2728880 - DNA, 25 bp, Homo sapien
ggcttcataaccttcccaatgcctt

SEQ ID NO: 2728881 - DNA, 25 bp, Homo sapien
tgttttcactccctctggcttcata

SEQ ID NO: 2728882 - DNA, 25 bp, Homo sapien
ccttcccaatgccttgaaaatcttc

SEQ ID NO: 2728883 - DNA, 25 bp, Homo sapien
ctattctgttttcactccctctggc

SEQ ID NO: 2728884 - DNA, 25 bp, Homo sapien
gctattaactaacaatctgccaaga

SEQ ID NO: 2728885 - DNA, 25 bp, Homo sapien
aaacaaggcttttactcaggtactg

SEQ ID NO: 2728886 - DNA, 25 bp, Homo sapien
tactggagcacttatcggcttaatg

SEQ ID NO: 2728887 - DNA, 25 bp, Homo sapien
tcactatagttacactactggagca

SEQ ID NO: 2728888 - DNA, 25 bp, Homo sapien
tctgatttgtggacgaagattgcct

SEQ ID NO: 2728889 - DNA, 25 bp, Homo sapien
gccttctgatttgtggacgaagatt

SEQ ID NO: 2728890 - DNA, 25 bp, Homo sapien
tgtggacgaagattgccttgttgat

SEQ ID NO: 2728891 - DNA, 25 bp, Homo sapien
gatttgtggacgaagattgccttgt

SEQ ID NO: 2728892 - DNA, 25 bp, Homo sapien
tgtcagtgtgaagcgcctttacttt

SEQ ID NO: 2728893 - DNA, 25 bp, Homo sapien
ctgtcagtgtgaagcgcctttactt

SEQ ID NO: 2728894 - DNA, 25 bp, Homo sapien
tctcctataccctccacagaaacaa

SEQ ID NO: 2728895 - DNA, 25 bp, Homo sapien
ctcctataccctccacagaaacaaa

SEQ ID NO: 2728896 - DNA, 25 bp, Homo sapien
tcctataccctccacagaaacaaac

SEQ ID NO: 2728897 - DNA, 25 bp, Homo sapien
tcccactctcctataccctccacag

SEQ ID NO: 2728898 - DNA, 25 bp, Homo sapien
cagtttggaattacacaagaatggg

SEQ ID NO: 2728899 - DNA, 25 bp, Homo sapien
caagaatgggtatgtagtatttaac

SEQ ID NO: 2728900 - DNA, 25 bp, Homo sapien
tccctaatgatagatgtgagtctgt

SEQ ID NO: 2728901 - DNA, 25 bp, Homo sapien
tcctattgtcatacagttgagatct

SEQ ID NO: 2728902 - DNA, 25 bp, Homo sapien
tggaccttagactgtgatccctggt

SEQ ID NO: 2728903 - DNA, 25 bp, Homo sapien
cacaagcccttcacaggaagatgtc

SEQ ID NO: 2728904 - DNA, 25 bp, Homo sapien
gttggataggtttgccacaagccct

SEQ ID NO: 2728905 - DNA, 25 bp, Homo sapien
gatgatgaatcagatcgttctcaag

SEQ ID NO: 2728906 - DNA, 25 bp, Homo sapien
gaactggcttaacatatagactgac

SEQ ID NO: 2728907 - DNA, 25 bp, Homo sapien
ttaacatatagactgacttgccctc

SEQ ID NO: 2728908 - DNA, 25 bp, Homo sapien
tggcttaacatatagactgacttgc

SEQ ID NO: 2728909 - DNA, 25 bp, Homo sapien
gaaaagaactggcttaacatataga

SEQ ID NO: 2728910 - DNA, 25 bp, Homo sapien
taatcatcaatagtttaggtgcatc

SEQ ID NO: 2728911 - DNA, 25 bp, Homo sapien
taataaggtgattaatcatcaatag

SEQ ID NO: 2728912 - DNA, 25 bp, Homo sapien
ggtgattaatcatcaatagtttagg

SEQ ID NO: 2728913 - DNA, 25 bp, Homo sapien
gattaatcatcaatagtttaggtgc

SEQ ID NO: 2728914 - DNA, 25 bp, Homo sapien
caatcagcttctggttccaagccat

SEQ ID NO: 2728915 - DNA, 25 bp, Homo sapien
tcaatcagcttctggttccaagcca

SEQ ID NO: 2728916 - DNA, 25 bp, Homo sapien
tgtgtgtgtcctacagaggccagaa

SEQ ID NO: 2728917 - DNA, 25 bp, Homo sapien
tacagtaaggtacaatcagctagca

SEQ ID NO: 2728918 - DNA, 25 bp, Homo sapien
tgcaatcaaatcctaactggaaagg

SEQ ID NO: 2728919 - DNA, 25 bp, Homo sapien
cacatagaatagtccgaaagtcaca

SEQ ID NO: 2728920 - DNA, 25 bp, Homo sapien
tcccattagtagtctgcaggaaggt

SEQ ID NO: 2728921 - DNA, 25 bp, Homo sapien
taatagctcactattataaaagtga

SEQ ID NO: 2728922 - DNA, 25 bp, Homo sapien
taaaagtgatatattgtgttcatcc

SEQ ID NO: 2728923 - DNA, 25 bp, Homo sapien
tgtgttcatcccattagtagtctgc

SEQ ID NO: 2728924 - DNA, 25 bp, Homo sapien
tatgagtacatttgccatgagcatt

SEQ ID NO: 2728925 - DNA, 25 bp, Homo sapien
tccattatgagtacatttgccatga

SEQ ID NO: 2728926 - DNA, 25 bp, Homo sapien
acagaatttaaactccatggattat

SEQ ID NO: 2728927 - DNA, 25 bp, Homo sapien
gccatttccattatgagtacatttg

SEQ ID NO: 2728928 - DNA, 25 bp, Homo sapien
agtccagtcctaagcattcaaagtg

SEQ ID NO: 2728929 - DNA, 25 bp, Homo sapien
tcagaaatggtaggcttagtagcag

SEQ ID NO: 2728930 - DNA, 25 bp, Homo sapien
caatcaggccctagacagttccata

SEQ ID NO: 2728931 - DNA, 25 bp, Homo sapien
actgaagagcgtgaagaccactggc

SEQ ID NO: 2728932 - DNA, 25 bp, Homo sapien
tatcaactaccaatgtgattcttca

SEQ ID NO: 2728933 - DNA, 25 bp, Homo sapien
agtaatctaaaggtagcaagaagga

SEQ ID NO: 2728934 - DNA, 25 bp, Homo sapien
gcaaaagttacaacattatctggta

SEQ ID NO: 2728935 - DNA, 25 bp, Homo sapien
gatgtgagccacataacatatgtat

SEQ ID NO: 2728936 - DNA, 25 bp, Homo sapien
gactcgaatagcatgcttttcttaa

SEQ ID NO: 2728937 - DNA, 25 bp, Homo sapien
ttgactcgaatagcatgcttttctt

SEQ ID NO: 2728938 - DNA, 25 bp, Homo sapien
gctttgactcgaatagcatgctttt

SEQ ID NO: 2728939 - DNA, 25 bp, Homo sapien
gccaaggctttgactcgaatagcat

SEQ ID NO: 2728940 - DNA, 25 bp, Homo sapien
gaaacagggaaatttactcagtctg

SEQ ID NO: 2728941 - DNA, 25 bp, Homo sapien
gaatcagtgaacttggaaacaggga

SEQ ID NO: 2728942 - DNA, 25 bp, Homo sapien
gattctcaataagactaacagcagg

SEQ ID NO: 2728943 - DNA, 25 bp, Homo sapien
ggagaaatgatcaagcataccaact

SEQ ID NO: 2728944 - DNA, 25 bp, Homo sapien
tactgagttacaagagttcccgtct

SEQ ID NO: 2728945 - DNA, 25 bp, Homo sapien
agcagatgcaggtttggcagaccgt

SEQ ID NO: 2728946 - DNA, 25 bp, Homo sapien
ggttagatttcaacagcactacagc

SEQ ID NO: 2728947 - DNA, 25 bp, Homo sapien
ggatctcaactttctcacccgtaaa

SEQ ID NO: 2728948 - DNA, 25 bp, Homo sapien
gatacctccagttaccagacttgca

SEQ ID NO: 2728949 - DNA, 25 bp, Homo sapien
tatgtttatcctttggccaggaccc

SEQ ID NO: 2728950 - DNA, 25 bp, Homo sapien
gggattttgatcatgattacactga

SEQ ID NO: 2728951 - DNA, 25 bp, Homo sapien
gcttctgccaacagtcagttgataa

SEQ ID NO: 2728952 - DNA, 25 bp, Homo sapien
cactcccttttggattaggatgtag

SEQ ID NO: 2728953 - DNA, 25 bp, Homo sapien
tgtcagacatctccctggcctaaaa

SEQ ID NO: 2728954 - DNA, 25 bp, Homo sapien
tgtcacaaatatggtgtcttaaaac

SEQ ID NO: 2728955 - DNA, 25 bp, Homo sapien
ttctagaaatcacgcctgccccttg

SEQ ID NO: 2728956 - DNA, 25 bp, Homo sapien
gactaataccacagatgtgctacca

SEQ ID NO: 2728957 - DNA, 25 bp, Homo sapien
cactaagtccagtccacaaggagag

SEQ ID NO: 2728958 - DNA, 25 bp, Homo sapien
cacttgactaaggtggagtctgact

SEQ ID NO: 2728959 - DNA, 25 bp, Homo sapien
gattgtgggttatgggactaatacc

SEQ ID NO: 2728960 - DNA, 25 bp, Homo sapien
tattgagtgcctgtcctcagagaca

SEQ ID NO: 2728961 - DNA, 25 bp, Homo sapien
acagtcaatgcccagtacaaaggag

SEQ ID NO: 2728962 - DNA, 25 bp, Homo sapien
tagtcagacgaacttagagcctctg

SEQ ID NO: 2728963 - DNA, 25 bp, Homo sapien
gctttaaactcagatggactagggt

SEQ ID NO: 2728964 - DNA, 25 bp, Homo sapien
catctgatagtaattgcattcgaca

SEQ ID NO: 2728965 - DNA, 25 bp, Homo sapien
tctaaaacagattcatgaaagagta

SEQ ID NO: 2728966 - DNA, 25 bp, Homo sapien
tgaaaaacgacaaacattaagtgac

SEQ ID NO: 2728967 - DNA, 25 bp, Homo sapien
cgacatatctaacatattacatgta

SEQ ID NO: 2728968 - DNA, 25 bp, Homo sapien
agaaacacaagaaaatggctgatta

SEQ ID NO: 2728969 - DNA, 25 bp, Homo sapien
gaaacacaagaaaatggctgattaa

SEQ ID NO: 2728970 - DNA, 25 bp, Homo sapien
acttcaggctcccagaaacacaaga

SEQ ID NO: 2728971 - DNA, 25 bp, Homo sapien
ctgaaaacttcaggctcccagaaac

SEQ ID NO: 2728972 - DNA, 25 bp, Homo sapien
cacttcacttctatcaccaataaca

SEQ ID NO: 2728973 - DNA, 25 bp, Homo sapien
tcattagtgacttttgcttcaaatc

SEQ ID NO: 2728974 - DNA, 25 bp, Homo sapien
tcaattcaatgacttcattagtgac

SEQ ID NO: 2728975 - DNA, 25 bp, Homo sapien
tcaatgacttcattagtgacttttg

SEQ ID NO: 2728976 - DNA, 25 bp, Homo sapien
tgaagcagaagtaaaaaggcaacat

SEQ ID NO: 2728977 - DNA, 25 bp, Homo sapien
ggcaacattctggatagtcttatat

SEQ ID NO: 2728978 - DNA, 25 bp, Homo sapien
tctgagtgaatgaattgcagggtgc

SEQ ID NO: 2728979 - DNA, 25 bp, Homo sapien
tactcaaccattgatgtaatgtggc

SEQ ID NO: 2728980 - DNA, 25 bp, Homo sapien
tggaggctaagaaagagttggtctc

SEQ ID NO: 2728981 - DNA, 25 bp, Homo sapien
tctgggaaaggctagggagaatagg

SEQ ID NO: 2728982 - DNA, 25 bp, Homo sapien
agaatcatggatgcaactgcaggca

SEQ ID NO: 2728983 - DNA, 25 bp, Homo sapien
tacacatacacaagggaacactatt

SEQ ID NO: 2728984 - DNA, 25 bp, Homo sapien
gtcacccacgctggagcacattggt

SEQ ID NO: 2728985 - DNA, 25 bp, Homo sapien
cacctactgggttcaagtgattctc

SEQ ID NO: 2728986 - DNA, 25 bp, Homo sapien
tgtgatctcagctcactgcaacctc

SEQ ID NO: 2728987 - DNA, 25 bp, Homo sapien
tgggttcaagtgattctcatgcctc

SEQ ID NO: 2728988 - DNA, 25 bp, Homo sapien
gagtcaaccttatgtaagcaagtgc

SEQ ID NO: 2728989 - DNA, 25 bp, Homo sapien
actgtgataaaagagcctgcaagag

SEQ ID NO: 2728990 - DNA, 25 bp, Homo sapien
tatctagcccagttattcttatggc

SEQ ID NO: 2728991 - DNA, 25 bp, Homo sapien
cctgcaagagggtataaaatctcca

SEQ ID NO: 2728992 - DNA, 25 bp, Homo sapien
gagaagataacttgccaagctcctc

SEQ ID NO: 2728993 - DNA, 25 bp, Homo sapien
gcaaacagaaaaactactagactat

SEQ ID NO: 2728994 - DNA, 25 bp, Homo sapien
agtgctctgtttcacggaaggagaa

SEQ ID NO: 2728995 - DNA, 25 bp, Homo sapien
gaaggccaatatgagaaagtaagtg

SEQ ID NO: 2728996 - DNA, 25 bp, Homo sapien
tgaacagctatcgtttactgagtgc

SEQ ID NO: 2728997 - DNA, 25 bp, Homo sapien
gcttgtacgtggtagctacagaacc

SEQ ID NO: 2728998 - DNA, 25 bp, Homo sapien
tactgagtgctcattatgggcaagc

SEQ ID NO: 2728999 - DNA, 25 bp, Homo sapien
cagggacagggatgatgacgataat

SEQ ID NO: 2729000 - DNA, 25 bp, Homo sapien
ttattctctggaggattaaatggga

SEQ ID NO: 2729001 - DNA, 25 bp, Homo sapien
gagtggtatagattcccagcttact

SEQ ID NO: 2729002 - DNA, 25 bp, Homo sapien
gtgttatcacactatggccaagtac

SEQ ID NO: 2729003 - DNA, 25 bp, Homo sapien
ccaaaatggctgacagtaggtaaac

SEQ ID NO: 2729004 - DNA, 25 bp, Homo sapien
ctgttcaagtcgaacaatgattcca

SEQ ID NO: 2729005 - DNA, 25 bp, Homo sapien
agactgttttcgataaacagaaaat

SEQ ID NO: 2729006 - DNA, 25 bp, Homo sapien
cccttgatgatcatagggaaaaatg

SEQ ID NO: 2729007 - DNA, 25 bp, Homo sapien
cttttgaaatcccttgatgatcata

SEQ ID NO: 2729008 - DNA, 25 bp, Homo sapien
tgcaggcatagcaatggagaccaga

SEQ ID NO: 2729009 - DNA, 25 bp, Homo sapien
gatacgctaggcaggcaatcatctg

SEQ ID NO: 2729010 - DNA, 25 bp, Homo sapien
tagcactaaactgcctgcaggcata

SEQ ID NO: 2729011 - DNA, 25 bp, Homo sapien
gacatcaatatacaaccatagcact

SEQ ID NO: 2729012 - DNA, 25 bp, Homo sapien
tagcaattggaacatgctctttggc

SEQ ID NO: 2729013 - DNA, 25 bp, Homo sapien
cattgctaatactagcaattggaac

SEQ ID NO: 2729014 - DNA, 25 bp, Homo sapien
gttcaacataggctggcttttcaga

SEQ ID NO: 2729015 - DNA, 25 bp, Homo sapien
taattgttcaacataggctggcttt

SEQ ID NO: 2729016 - DNA, 25 bp, Homo sapien
aaagccaacttgcttaaacacatct

SEQ ID NO: 2729017 - DNA, 25 bp, Homo sapien
tccaattttgtaatgggtgtcaacc

SEQ ID NO: 2729018 - DNA, 25 bp, Homo sapien
gcaattcacataggagaaacttgtt

SEQ ID NO: 2729019 - DNA, 25 bp, Homo sapien
agtaaagcaagggatactggcgctg

SEQ ID NO: 2729020 - DNA, 25 bp, Homo sapien
ctggcaccaacaagcatgaaaacat

SEQ ID NO: 2729021 - DNA, 25 bp, Homo sapien
actggcaccaacaagcatgaaaaca

SEQ ID NO: 2729022 - DNA, 25 bp, Homo sapien
gaactggcaccaacaagcatgaaaa

SEQ ID NO: 2729023 - DNA, 25 bp, Homo sapien
aactggcaccaacaagcatgaaaac

SEQ ID NO: 2729024 - DNA, 25 bp, Homo sapien
gctggaaagtgtggtatgacagccc

SEQ ID NO: 2729025 - DNA, 25 bp, Homo sapien
ctggaaagtgtggtatgacagccca

SEQ ID NO: 2729026 - DNA, 25 bp, Homo sapien
tacagcgaaaagcaaactgggttca

SEQ ID NO: 2729027 - DNA, 25 bp, Homo sapien
tacatagccaatgtgatacagcgaa

SEQ ID NO: 2729028 - DNA, 25 bp, Homo sapien
tggcgagccaggactagacatccaa

SEQ ID NO: 2729029 - DNA, 25 bp, Homo sapien
ggttgaaaccaagggcctgccacta

SEQ ID NO: 2729030 - DNA, 25 bp, Homo sapien
gtacatcactcctcaggcgtacaac

SEQ ID NO: 2729031 - DNA, 25 bp, Homo sapien
cttctctggaactctgggtacatca

SEQ ID NO: 2729032 - DNA, 25 bp, Homo sapien
ttgtgataatcccctctcccagtag

SEQ ID NO: 2729033 - DNA, 25 bp, Homo sapien
tcctgtggcacaaagcatgaactca

SEQ ID NO: 2729034 - DNA, 25 bp, Homo sapien
gatgcatggctaagaacatgcttcc

SEQ ID NO: 2729035 - DNA, 25 bp, Homo sapien
ctaacttgggcccaaatccagactg

SEQ ID NO: 2729036 - DNA, 25 bp, Homo sapien
tttttgtcatgaacgtctctagaac

SEQ ID NO: 2729037 - DNA, 25 bp, Homo sapien
ggttgtcatctgttattcctaagac

SEQ ID NO: 2729038 - DNA, 25 bp, Homo sapien
tctctagaacgtggttgtcatctgt

SEQ ID NO: 2729039 - DNA, 25 bp, Homo sapien
taagacttctgacatacgagcatat

SEQ ID NO: 2729040 - DNA, 25 bp, Homo sapien
aaggtcatttaggaactgaagagtc

SEQ ID NO: 2729041 - DNA, 25 bp, Homo sapien
tcatttaggaactgaagagtccttg

SEQ ID NO: 2729042 - DNA, 25 bp, Homo sapien
tcatatcttccccagtatttaaggt

SEQ ID NO: 2729043 - DNA, 25 bp, Homo sapien
catatcttccccagtatttaaggtt

SEQ ID NO: 2729044 - DNA, 25 bp, Homo sapien
gtgacagggtctatgggtaataaga

SEQ ID NO: 2729045 - DNA, 25 bp, Homo sapien
taaaattgcgaagttaaaagtgaca

SEQ ID NO: 2729046 - DNA, 25 bp, Homo sapien
atgctgccattaataggaatcttcc

SEQ ID NO: 2729047 - DNA, 25 bp, Homo sapien
ttaaaagtgacagggtctatgggta

SEQ ID NO: 2729048 - DNA, 25 bp, Homo sapien
atttcacagcatctatcttcacaag

SEQ ID NO: 2729049 - DNA, 25 bp, Homo sapien
ctgtgtagaaggttgttcgacacct

SEQ ID NO: 2729050 - DNA, 25 bp, Homo sapien
tgaagtcgctgagactatgattgtc

SEQ ID NO: 2729051 - DNA, 25 bp, Homo sapien
ccagatctaccatcagaaggcgagt

SEQ ID NO: 2729052 - DNA, 25 bp, Homo sapien
tatgattgtcactgatgccaagaaa

SEQ ID NO: 2729053 - DNA, 25 bp, Homo sapien
gcaactgtaagaggcagcatgaaat

SEQ ID NO: 2729054 - DNA, 25 bp, Homo sapien
tgtaatactgtttcaaaagcaactg

SEQ ID NO: 2729055 - DNA, 25 bp, Homo sapien
tacatcttcttgtttaaagttgttg

SEQ ID NO: 2729056 - DNA, 25 bp, Homo sapien
tgtttcaaaagcaactgtaagaggc

SEQ ID NO: 2729057 - DNA, 25 bp, Homo sapien
tagttccaacaaaagagccgtgtca

SEQ ID NO: 2729058 - DNA, 25 bp, Homo sapien
gctctatccctctccagaattaagg

SEQ ID NO: 2729059 - DNA, 25 bp, Homo sapien
ttcatctgcctttattgctctatcc

SEQ ID NO: 2729060 - DNA, 25 bp, Homo sapien
aggccccaaggtgtttcaactggag

SEQ ID NO: 2729061 - DNA, 25 bp, Homo sapien
aacagcatggtgtagctggtctttg

SEQ ID NO: 2729062 - DNA, 25 bp, Homo sapien
gatctcttgccagcccgatcaacat

SEQ ID NO: 2729063 - DNA, 25 bp, Homo sapien
tgcaaaggcaatccctcgaagatct

SEQ ID NO: 2729064 - DNA, 25 bp, Homo sapien
ggtctttgtgttcagtgcaaaggca

SEQ ID NO: 2729065 - DNA, 25 bp, Homo sapien
tggtattgtcacagtgtaataagga

SEQ ID NO: 2729066 - DNA, 25 bp, Homo sapien
ttaaacgaaagcgaggggcctggca

SEQ ID NO: 2729067 - DNA, 25 bp, Homo sapien
ctggtattgtcacagtgtaataagg

SEQ ID NO: 2729068 - DNA, 25 bp, Homo sapien
tgtctgtactaacccttggcaaagg

SEQ ID NO: 2729069 - DNA, 25 bp, Homo sapien
cgatattacagtgcccaaagtagac

SEQ ID NO: 2729070 - DNA, 25 bp, Homo sapien
ttttgggcagtatcaattacggcag

SEQ ID NO: 2729071 - DNA, 25 bp, Homo sapien
taagccgggtctgtctatcaccaaa

SEQ ID NO: 2729072 - DNA, 25 bp, Homo sapien
taaactttccccagcagtaatgtgg

SEQ ID NO: 2729073 - DNA, 25 bp, Homo sapien
aataaactttccccagcagtaatgt

SEQ ID NO: 2729074 - DNA, 25 bp, Homo sapien
atttatgtggataaaaggcaaataa

SEQ ID NO: 2729075 - DNA, 25 bp, Homo sapien
ataaactttccccagcagtaatgtg

SEQ ID NO: 2729076 - DNA, 25 bp, Homo sapien
ttggctctccataccaccgttcaac

SEQ ID NO: 2729077 - DNA, 25 bp, Homo sapien
gttggctctccataccaccgttcaa

SEQ ID NO: 2729078 - DNA, 25 bp, Homo sapien
ctccataccaccgttcaacagcatt

SEQ ID NO: 2729079 - DNA, 25 bp, Homo sapien
ggctctccataccaccgttcaacag

SEQ ID NO: 2729080 - DNA, 25 bp, Homo sapien
gttctgccataagtttcaagatggg

SEQ ID NO: 2729081 - DNA, 25 bp, Homo sapien
cataagttctgccataagtttcaag

SEQ ID NO: 2729082 - DNA, 25 bp, Homo sapien
tgttttgcataagttctgccataag

SEQ ID NO: 2729083 - DNA, 25 bp, Homo sapien
taagttctgccataagtttcaagat

SEQ ID NO: 2729084 - DNA, 25 bp, Homo sapien
cataagtgcaaaccattttactagc

SEQ ID NO: 2729085 - DNA, 25 bp, Homo sapien
ccattttactagcttctctgaagag

SEQ ID NO: 2729086 - DNA, 25 bp, Homo sapien
gaattccattaggagatgatacatc

SEQ ID NO: 2729087 - DNA, 25 bp, Homo sapien
aagagaagaattccattaggagatg

SEQ ID NO: 2729088 - DNA, 25 bp, Homo sapien
gcagaaagtgacataagtagatgtc

SEQ ID NO: 2729089 - DNA, 25 bp, Homo sapien
agcagaaagtgacataagtagatgt

SEQ ID NO: 2729090 - DNA, 25 bp, Homo sapien
aagcagaaagtgacataagtagatg

SEQ ID NO: 2729091 - DNA, 25 bp, Homo sapien
agaaagtgacataagtagatgtcat

SEQ ID NO: 2729092 - DNA, 25 bp, Homo sapien
acttgaagacgccaaagctgacata

SEQ ID NO: 2729093 - DNA, 25 bp, Homo sapien
ggagatgcccttgagtttcattgga

SEQ ID NO: 2729094 - DNA, 25 bp, Homo sapien
tacattgtcaaaatggttgtcccca

SEQ ID NO: 2729095 - DNA, 25 bp, Homo sapien
gcagacttgagagctgaatagcaga

SEQ ID NO: 2729096 - DNA, 25 bp, Homo sapien
actcccatgatgcatgattgcttac

SEQ ID NO: 2729097 - DNA, 25 bp, Homo sapien
acactcccatgatgcatgattgctt

SEQ ID NO: 2729098 - DNA, 25 bp, Homo sapien
cactcccatgatgcatgattgctta

SEQ ID NO: 2729099 - DNA, 25 bp, Homo sapien
gagaacatacatgagtacaggaggc

SEQ ID NO: 2729100 - DNA, 25 bp, Homo sapien
tatggtcctgagtgagacattccag

SEQ ID NO: 2729101 - DNA, 25 bp, Homo sapien
tagtgagtccctctgagatagatgt

SEQ ID NO: 2729102 - DNA, 25 bp, Homo sapien
tacaggaggctctaagttgatgatg

SEQ ID NO: 2729103 - DNA, 25 bp, Homo sapien
ttcagtttgggttcacaatatcttt

SEQ ID NO: 2729104 - DNA, 25 bp, Homo sapien
actgactatgtatcaaaatatgaag

SEQ ID NO: 2729105 - DNA, 25 bp, Homo sapien
gaaacaatgtcctctatgatcctta

SEQ ID NO: 2729106 - DNA, 25 bp, Homo sapien
taggatgatagtctcaataatcaca

SEQ ID NO: 2729107 - DNA, 25 bp, Homo sapien
cttgtggctgcagtctagtggtaac

SEQ ID NO: 2729108 - DNA, 25 bp, Homo sapien
tcatgatggtaaatgtcatcctttg

SEQ ID NO: 2729109 - DNA, 25 bp, Homo sapien
tgctttactagtgaattttaaactc

SEQ ID NO: 2729110 - DNA, 25 bp, Homo sapien
tgtgtgattgctttactagtgaatt

SEQ ID NO: 2729111 - DNA, 25 bp, Homo sapien
ggtttcattagttaatgttccctga

SEQ ID NO: 2729112 - DNA, 25 bp, Homo sapien
gtttcattagttaatgttccctgaa

SEQ ID NO: 2729113 - DNA, 25 bp, Homo sapien
cattagttaatgttccctgaaaaat

SEQ ID NO: 2729114 - DNA, 25 bp, Homo sapien
ttcattagttaatgttccctgaaaa

SEQ ID NO: 2729115 - DNA, 25 bp, Homo sapien
tgtaaatcgatgaagttgatcctta

SEQ ID NO: 2729116 - DNA, 25 bp, Homo sapien
tatttaaatctcttcaggtgtggag

SEQ ID NO: 2729117 - DNA, 25 bp, Homo sapien
gagagttttgtaaatcgatgaagtt

SEQ ID NO: 2729118 - DNA, 25 bp, Homo sapien
ctgaagtgttaaatagactaagttt

SEQ ID NO: 2729119 - DNA, 25 bp, Homo sapien
tattacaatacaatggcctcgactg

SEQ ID NO: 2729120 - DNA, 25 bp, Homo sapien
tacaatggcctcgactgggaccaat

SEQ ID NO: 2729121 - DNA, 25 bp, Homo sapien
cctcgactgggaccaatgctgacaa

SEQ ID NO: 2729122 - DNA, 25 bp, Homo sapien
caatgctgacaatgaggctgcacac

SEQ ID NO: 2729123 - DNA, 25 bp, Homo sapien
tcccgagactgatagaaaaggatgt

SEQ ID NO: 2729124 - DNA, 25 bp, Homo sapien
cgagactgatagaaaaggatgtaac

SEQ ID NO: 2729125 - DNA, 25 bp, Homo sapien
ccgagactgatagaaaaggatgtaa

SEQ ID NO: 2729126 - DNA, 25 bp, Homo sapien
cccgagactgatagaaaaggatgta

SEQ ID NO: 2729127 - DNA, 25 bp, Homo sapien
aacatataacctcacaacgctttct

SEQ ID NO: 2729128 - DNA, 25 bp, Homo sapien
aaccaacatataacctcacaacgct

SEQ ID NO: 2729129 - DNA, 25 bp, Homo sapien
aacctcacaacgctttcttcatagg

SEQ ID NO: 2729130 - DNA, 25 bp, Homo sapien
aacgctttcttcataggtcacttct

SEQ ID NO: 2729131 - DNA, 25 bp, Homo sapien
gaaagtatcaagagtagttatgtta

SEQ ID NO: 2729132 - DNA, 25 bp, Homo sapien
ttatctctaattaatccccacaaca

SEQ ID NO: 2729133 - DNA, 25 bp, Homo sapien
tcttcaagaaccttaaatgctttac

SEQ ID NO: 2729134 - DNA, 25 bp, Homo sapien
agagccaggacatgagcgctttagc

SEQ ID NO: 2729135 - DNA, 25 bp, Homo sapien
tcaggtaatgcaatgcctacagctg

SEQ ID NO: 2729136 - DNA, 25 bp, Homo sapien
ttctggttggtcaagattactttgg

SEQ ID NO: 2729137 - DNA, 25 bp, Homo sapien
tatacattactctgggcaatatgga

SEQ ID NO: 2729138 - DNA, 25 bp, Homo sapien
gatcggttggctgtaagtatgtgac

SEQ ID NO: 2729139 - DNA, 25 bp, Homo sapien
ggtaggtgacgatgtagtctaaact

SEQ ID NO: 2729140 - DNA, 25 bp, Homo sapien
tgggtagcctctctgcatcgaagtg

SEQ ID NO: 2729141 - DNA, 25 bp, Homo sapien
taaaatgtaatagtctctgaccagc

SEQ ID NO: 2729142 - DNA, 25 bp, Homo sapien
tctgcatcgaagtggcttcttgccc

SEQ ID NO: 2729143 - DNA, 25 bp, Homo sapien
aattcactttgggatgcatgtcatg

SEQ ID NO: 2729144 - DNA, 25 bp, Homo sapien
gcatgtcatgaagagcactatacaa

SEQ ID NO: 2729145 - DNA, 25 bp, Homo sapien
taaggttcctgtaggccaaaatctc

SEQ ID NO: 2729146 - DNA, 25 bp, Homo sapien
gactgactgactgattgaggaaaag

SEQ ID NO: 2729147 - DNA, 25 bp, Homo sapien
cacctccactccttcttcagcgttc

SEQ ID NO: 2729148 - DNA, 25 bp, Homo sapien
ccaaattgctccttgtttgtttcca

SEQ ID NO: 2729149 - DNA, 25 bp, Homo sapien
atcctagactgacacctccactcct

SEQ ID NO: 2729150 - DNA, 25 bp, Homo sapien
ttgcctaagggtaccatcctagact

SEQ ID NO: 2729151 - DNA, 25 bp, Homo sapien
cagcagctgaccctgtaggagtgat

SEQ ID NO: 2729152 - DNA, 25 bp, Homo sapien
ttgcttctgaccagcagctgaccct

SEQ ID NO: 2729153 - DNA, 25 bp, Homo sapien
tgtaggagtgattgtttctggtgcc

SEQ ID NO: 2729154 - DNA, 25 bp, Homo sapien
gattgtttctggtgccggcctaaag

SEQ ID NO: 2729155 - DNA, 25 bp, Homo sapien
gcaggtgccagctgtacagaaatta

SEQ ID NO: 2729156 - DNA, 25 bp, Homo sapien
taaagcagattaatctacaagtccc

SEQ ID NO: 2729157 - DNA, 25 bp, Homo sapien
catgctgtgcaccagtagcaggtgc

SEQ ID NO: 2729158 - DNA, 25 bp, Homo sapien
gcaatagttatctaatatacagaag

SEQ ID NO: 2729159 - DNA, 25 bp, Homo sapien
agtactctgagaaatggcactgaca

SEQ ID NO: 2729160 - DNA, 25 bp, Homo sapien
gccagtactctgagaaatggcactg

SEQ ID NO: 2729161 - DNA, 25 bp, Homo sapien
gtactctgagaaatggcactgacat

SEQ ID NO: 2729162 - DNA, 25 bp, Homo sapien
tggctctgttgccagtactctgaga

SEQ ID NO: 2729163 - DNA, 25 bp, Homo sapien
ggtgaggagactggattgcaaactc

SEQ ID NO: 2729164 - DNA, 25 bp, Homo sapien
ccaacttgaatgagtacagggtgat

SEQ ID NO: 2729165 - DNA, 25 bp, Homo sapien
cagggtgatgattgcaatggcagtg

SEQ ID NO: 2729166 - DNA, 25 bp, Homo sapien
aactcctgtggtactgtatccccag

SEQ ID NO: 2729167 - DNA, 25 bp, Homo sapien
ctcagctgcttcctcattctcctcc

SEQ ID NO: 2729168 - DNA, 25 bp, Homo sapien
cagctgcttcctcattctcctccat

SEQ ID NO: 2729169 - DNA, 25 bp, Homo sapien
gcctcagctgcttcctcattctcct

SEQ ID NO: 2729170 - DNA, 25 bp, Homo sapien
cgcctcagctgcttcctcattctcc

SEQ ID NO: 2729171 - DNA, 25 bp, Homo sapien
atatctactgcattaccctgagcag

SEQ ID NO: 2729172 - DNA, 25 bp, Homo sapien
gatatctactgcattaccctgagca

SEQ ID NO: 2729173 - DNA, 25 bp, Homo sapien
atctactgcattaccctgagcagct

SEQ ID NO: 2729174 - DNA, 25 bp, Homo sapien
tatctactgcattaccctgagcagc

SEQ ID NO: 2729175 - DNA, 25 bp, Homo sapien
cttctcattgagcaggatgagcccc

SEQ ID NO: 2729176 - DNA, 25 bp, Homo sapien
gaggcctggatactgaccactggtt

SEQ ID NO: 2729177 - DNA, 25 bp, Homo sapien
ggttccgacagtcttcaaagacaat

SEQ ID NO: 2729178 - DNA, 25 bp, Homo sapien
caaagacaatggtgttcatgaggac

SEQ ID NO: 2729179 - DNA, 25 bp, Homo sapien
ctctgttcttgacggacaggttctg

SEQ ID NO: 2729180 - DNA, 25 bp, Homo sapien
cactgggcaaggacctcctgcttgg

SEQ ID NO: 2729181 - DNA, 25 bp, Homo sapien
tatcaaacttgctctcagttcactg

SEQ ID NO: 2729182 - DNA, 25 bp, Homo sapien
tccttccattaggtttctgaagcac

SEQ ID NO: 2729183 - DNA, 25 bp, Homo sapien
tcaagggtagtaatgaggcaaagcc

SEQ ID NO: 2729184 - DNA, 25 bp, Homo sapien
gaggacggctctagatttcagctga

SEQ ID NO: 2729185 - DNA, 25 bp, Homo sapien
catgaatttctggacgataaggcca

SEQ ID NO: 2729186 - DNA, 25 bp, Homo sapien
gggttgccactaaattcactctgac

SEQ ID NO: 2729187 - DNA, 25 bp, Homo sapien
tcagctcatcatgtcgagactgcat

SEQ ID NO: 2729188 - DNA, 25 bp, Homo sapien
gtgttgccatcactgcgcaacgcct

SEQ ID NO: 2729189 - DNA, 25 bp, Homo sapien
tgaatacagacagattttgggtgaa

SEQ ID NO: 2729190 - DNA, 25 bp, Homo sapien
tgtcgagactgcatggttcagtgtt

SEQ ID NO: 2729191 - DNA, 25 bp, Homo sapien
aaatacattcccctgggctagccaa

SEQ ID NO: 2729192 - DNA, 25 bp, Homo sapien
cctttcagagcattaggagaacaaa

SEQ ID NO: 2729193 - DNA, 25 bp, Homo sapien
ccagaccttcaggagtctcttgata

SEQ ID NO: 2729194 - DNA, 25 bp, Homo sapien
ggctgctccgcacatggtcagaaaa

SEQ ID NO: 2729195 - DNA, 25 bp, Homo sapien
tgacaaccttgactgcagaaccata

SEQ ID NO: 2729196 - DNA, 25 bp, Homo sapien
gggtgagtcagaatcccaagtccca

SEQ ID NO: 2729197 - DNA, 25 bp, Homo sapien
gtagtgcttccaggctcgttctaaa

SEQ ID NO: 2729198 - DNA, 25 bp, Homo sapien
tgccagaatgggacaaacttgcctt

SEQ ID NO: 2729199 - DNA, 25 bp, Homo sapien
tgtcaaggaagcactcttatcagca

SEQ ID NO: 2729200 - DNA, 25 bp, Homo sapien
aagtggttcacatcgagctttccca

SEQ ID NO: 2729201 - DNA, 25 bp, Homo sapien
ggatgaatcggtggcaggacccaca

SEQ ID NO: 2729202 - DNA, 25 bp, Homo sapien
ccagctgtgaaggacctagttcaag

SEQ ID NO: 2729203 - DNA, 25 bp, Homo sapien
tccccgttacggcgcggccatggag

SEQ ID NO: 2729204 - DNA, 25 bp, Homo sapien
gtttccgctgctaattcctctcctg

SEQ ID NO: 2729205 - DNA, 25 bp, Homo sapien
aaactttgccaagagtgcgcgggcc

SEQ ID NO: 2729206 - DNA, 25 bp, Homo sapien
tgaaccgaacctggagtttccgctg

SEQ ID NO: 2729207 - DNA, 25 bp, Homo sapien
ggcgctaggctcaggttcacactgt

SEQ ID NO: 2729208 - DNA, 25 bp, Homo sapien
tgaagcggtctttcacgaagcggcg

SEQ ID NO: 2729209 - DNA, 25 bp, Homo sapien
taagatcccgcgtcctcgaagggcg

SEQ ID NO: 2729210 - DNA, 25 bp, Homo sapien
aattgagaccgccaaggctggagac

SEQ ID NO: 2729211 - DNA, 25 bp, Homo sapien
gcttcttacgcttgggcggcgtccg

SEQ ID NO: 2729212 - DNA, 25 bp, Homo sapien
tcattttgagggacttggcgagcgc

SEQ ID NO: 2729213 - DNA, 25 bp, Homo sapien
aggtcttgacctgcgcgtccgtcat

SEQ ID NO: 2729214 - DNA, 25 bp, Homo sapien
tctgcacccgggaaaaggacgtgcg

SEQ ID NO: 2729215 - DNA, 25 bp, Homo sapien
ggtgacagcgggaaccttggaacta

SEQ ID NO: 2729216 - DNA, 25 bp, Homo sapien
ttttggaaggcgtcgtgttgcagct

SEQ ID NO: 2729217 - DNA, 25 bp, Homo sapien
tgcagagcaaagagtgacgagttgt

SEQ ID NO: 2729218 - DNA, 25 bp, Homo sapien
caaagagtgacgagttgtgcagaca

SEQ ID NO: 2729219 - DNA, 25 bp, Homo sapien
caaagtataatacaggcgcccggcc

SEQ ID NO: 2729220 - DNA, 25 bp, Homo sapien
agtggacccagcctaaacgcagggt

SEQ ID NO: 2729221 - DNA, 25 bp, Homo sapien
cggagaaacgtaaggcgctttcttg

SEQ ID NO: 2729222 - DNA, 25 bp, Homo sapien
gaagcaggtggccggtttctaaaga

SEQ ID NO: 2729223 - DNA, 25 bp, Homo sapien
aggtggccgagagatagtcgctact

SEQ ID NO: 2729224 - DNA, 25 bp, Homo sapien
agggcaaagcgctggaagacgccaa

SEQ ID NO: 2729225 - DNA, 25 bp, Homo sapien
tacttggcaccacatgagtgggctc

SEQ ID NO: 2729226 - DNA, 25 bp, Homo sapien
gagtgggctcagctctgtaacagga

SEQ ID NO: 2729227 - DNA, 25 bp, Homo sapien
tcaccgctgcgctcgtggtggtcgc

SEQ ID NO: 2729228 - DNA, 25 bp, Homo sapien
ttcggcacggatggcaaaggcgcca

SEQ ID NO: 2729229 - DNA, 25 bp, Homo sapien
tggtggtcgcggctaggtctcccca

SEQ ID NO: 2729230 - DNA, 25 bp, Homo sapien
gcaaaggcgccagcgcgcaagcctg

SEQ ID NO: 2729231 - DNA, 25 bp, Homo sapien
gctctgcggccttggtgcacttgtt

SEQ ID NO: 2729232 - DNA, 25 bp, Homo sapien
gcgtcgctgagagtagatgctatta

SEQ ID NO: 2729233 - DNA, 25 bp, Homo sapien
gctattaacggagcaggcgcttgga

SEQ ID NO: 2729234 - DNA, 25 bp, Homo sapien
ccaaggcaatttctcgaggactttg

SEQ ID NO: 2729235 - DNA, 25 bp, Homo sapien
tagtaaagccagtacatccccggta

SEQ ID NO: 2729236 - DNA, 25 bp, Homo sapien
taaatccatcgaccaacagtgcttg

SEQ ID NO: 2729237 - DNA, 25 bp, Homo sapien
ttcttaaaatcacggagcctgggtc

SEQ ID NO: 2729238 - DNA, 25 bp, Homo sapien
tctctaatgaacctgcggccaatgg

SEQ ID NO: 2729239 - DNA, 25 bp, Homo sapien
caacaggaactgtgcaaaaggcctg

SEQ ID NO: 2729240 - DNA, 25 bp, Homo sapien
tcttagacgcaattgagagacacag

SEQ ID NO: 2729241 - DNA, 25 bp, Homo sapien
tctttaaatcttagacgcaattgag

SEQ ID NO: 2729242 - DNA, 25 bp, Homo sapien
atgcttttcaacaggaactgtgcaa

SEQ ID NO: 2729243 - DNA, 25 bp, Homo sapien
tgttgtccttgtgcactgagtggga

SEQ ID NO: 2729244 - DNA, 25 bp, Homo sapien
gacagatgtctctccgcagtgctgg

SEQ ID NO: 2729245 - DNA, 25 bp, Homo sapien
cagccgttctgccacgggtctggtg

SEQ ID NO: 2729246 - DNA, 25 bp, Homo sapien
tctgccacgggtctggtgttgtcct

SEQ ID NO: 2729247 - DNA, 25 bp, Homo sapien
cattgagggcctccaagtatcaaca

SEQ ID NO: 2729248 - DNA, 25 bp, Homo sapien
ggttccctcttatagaagtctctgg

SEQ ID NO: 2729249 - DNA, 25 bp, Homo sapien
aaagactaatgtttggacaaggcac

SEQ ID NO: 2729250 - DNA, 25 bp, Homo sapien
tcgtatccttatcagaaaaaccgtc

SEQ ID NO: 2729251 - DNA, 25 bp, Homo sapien
gtgggagggagatgtagttgtgtcc

SEQ ID NO: 2729252 - DNA, 25 bp, Homo sapien
tcctggcccttcagaatgtgggagg

SEQ ID NO: 2729253 - DNA, 25 bp, Homo sapien
cgtgctcagcggcagatccagttga

SEQ ID NO: 2729254 - DNA, 25 bp, Homo sapien
ggaagaagcaccaagcgtggcaaag

SEQ ID NO: 2729255 - DNA, 25 bp, Homo sapien
cacctggaaagcttccagatcatcc

SEQ ID NO: 2729256 - DNA, 25 bp, Homo sapien
gctgaaatgccgcttctttcctaaa

SEQ ID NO: 2729257 - DNA, 25 bp, Homo sapien
ttatgaaggccaaaaaccgtggctg

SEQ ID NO: 2729258 - DNA, 25 bp, Homo sapien
gaaagcttccagatcatccgcctta

SEQ ID NO: 2729259 - DNA, 25 bp, Homo sapien
agatgacaaaaccagcctccatcag

SEQ ID NO: 2729260 - DNA, 25 bp, Homo sapien
gatgacaaaaccagcctccatcagc

SEQ ID NO: 2729261 - DNA, 25 bp, Homo sapien
cagcctccatcagcgagtaacaaag

SEQ ID NO: 2729262 - DNA, 25 bp, Homo sapien
cagatgacaaaaccagcctccatca

SEQ ID NO: 2729263 - DNA, 25 bp, Homo sapien
tcttctgctcatttgaaggataggt

SEQ ID NO: 2729264 - DNA, 25 bp, Homo sapien
gctcatttgaaggataggtaaagga

SEQ ID NO: 2729265 - DNA, 25 bp, Homo sapien
tcagtcccccacgaagaaattattc

SEQ ID NO: 2729266 - DNA, 25 bp, Homo sapien
aggaacggtcagaccggtaagacag

SEQ ID NO: 2729267 - DNA, 25 bp, Homo sapien
ctgtcacggtgatcctctggggctc

SEQ ID NO: 2729268 - DNA, 25 bp, Homo sapien
tgtcacggtgatcctctggggctct

SEQ ID NO: 2729269 - DNA, 25 bp, Homo sapien
aataactcgaaacagcaggaaggcc

SEQ ID NO: 2729270 - DNA, 25 bp, Homo sapien
acatggctggctccctaaagaagcg

SEQ ID NO: 2729271 - DNA, 25 bp, Homo sapien
tttcccaagttacggcagagggcac

SEQ ID NO: 2729272 - DNA, 25 bp, Homo sapien
tgacttaacgggacactccaggctt

SEQ ID NO: 2729273 - DNA, 25 bp, Homo sapien
caagccttaacgagatcactgtgct

SEQ ID NO: 2729274 - DNA, 25 bp, Homo sapien
gttgttacaagccttaacgagatca

SEQ ID NO: 2729275 - DNA, 25 bp, Homo sapien
actggataaccccagatgcaagtcc

SEQ ID NO: 2729276 - DNA, 25 bp, Homo sapien
ccagatgcaagtcccttgttcactt

SEQ ID NO: 2729277 - DNA, 25 bp, Homo sapien
tcgaaggacgaagagatgaagaaac

SEQ ID NO: 2729278 - DNA, 25 bp, Homo sapien
cgtgactctaagaagatcaatcacc

SEQ ID NO: 2729279 - DNA, 25 bp, Homo sapien
aatcaccacatgtatcatagcctgt

SEQ ID NO: 2729280 - DNA, 25 bp, Homo sapien
gagaaggtcacgtggtgagcagaat

SEQ ID NO: 2729281 - DNA, 25 bp, Homo sapien
caatgaggccaatgaaatcgccagt

SEQ ID NO: 2729282 - DNA, 25 bp, Homo sapien
aatgaggccaatgaaatcgccagtg

SEQ ID NO: 2729283 - DNA, 25 bp, Homo sapien
atgaggccaatgaaatcgccagtgc

SEQ ID NO: 2729284 - DNA, 25 bp, Homo sapien
gtagagcaacccgtacaataaacag

SEQ ID NO: 2729285 - DNA, 25 bp, Homo sapien
tcccgtagagcaacccgtacaataa

SEQ ID NO: 2729286 - DNA, 25 bp, Homo sapien
cccgtacaataaacaggctgcatat

SEQ ID NO: 2729287 - DNA, 25 bp, Homo sapien
gtacaataaacaggctgcatatact

SEQ ID NO: 2729288 - DNA, 25 bp, Homo sapien
cactggggtaatgcaaagtcagaaa

SEQ ID NO: 2729289 - DNA, 25 bp, Homo sapien
ctggggtaatgcaaagtcagaaaca

SEQ ID NO: 2729290 - DNA, 25 bp, Homo sapien
ctacactggggtaatgcaaagtcag

SEQ ID NO: 2729291 - DNA, 25 bp, Homo sapien
tacactggggtaatgcaaagtcaga

SEQ ID NO: 2729292 - DNA, 25 bp, Homo sapien
aaaggcacctcgcatgcctgtccgg

SEQ ID NO: 2729293 - DNA, 25 bp, Homo sapien
ggcacctcgcatgcctgtccggagc

SEQ ID NO: 2729294 - DNA, 25 bp, Homo sapien
aaggcacctcgcatgcctgtccgga

SEQ ID NO: 2729295 - DNA, 25 bp, Homo sapien
ccaaaggcacctcgcatgcctgtcc

SEQ ID NO: 2729296 - DNA, 25 bp, Homo sapien
ccctgtgcagggcttctatcacatg

SEQ ID NO: 2729297 - DNA, 25 bp, Homo sapien
tgtgcagggcttctatcacatgctc

SEQ ID NO: 2729298 - DNA, 25 bp, Homo sapien
tgcagggcttctatcacatgctcct

SEQ ID NO: 2729299 - DNA, 25 bp, Homo sapien
cctgtgcagggcttctatcacatgc

SEQ ID NO: 2729300 - DNA, 25 bp, Homo sapien
tgtcctcaaattcattggcattgaa

SEQ ID NO: 2729301 - DNA, 25 bp, Homo sapien
gccaccatgtcctcaaattcattgg

SEQ ID NO: 2729302 - DNA, 25 bp, Homo sapien
caccatgtcctcaaattcattggca

SEQ ID NO: 2729303 - DNA, 25 bp, Homo sapien
catgtcctcaaattcattggcattg

SEQ ID NO: 2729304 - DNA, 25 bp, Homo sapien
ccacttgtccagaaggccacgactg

SEQ ID NO: 2729305 - DNA, 25 bp, Homo sapien
cagaaggccacgactggggatgtac

SEQ ID NO: 2729306 - DNA, 25 bp, Homo sapien
agaaggccacgactggggatgtact

SEQ ID NO: 2729307 - DNA, 25 bp, Homo sapien
cttgtccagaaggccacgactgggg

SEQ ID NO: 2729308 - DNA, 25 bp, Homo sapien
aatattaagagggcggcagcacagt

SEQ ID NO: 2729309 - DNA, 25 bp, Homo sapien
gaatattaagagggcggcagcacag

SEQ ID NO: 2729310 - DNA, 25 bp, Homo sapien
gccaggattccgggaggacatgaga

SEQ ID NO: 2729311 - DNA, 25 bp, Homo sapien
ggccaggattccgggaggacatgag

SEQ ID NO: 2729312 - DNA, 25 bp, Homo sapien
tggccaggattccgggaggacatga

SEQ ID NO: 2729313 - DNA, 25 bp, Homo sapien
ctggccaggattccgggaggacatg

SEQ ID NO: 2729314 - DNA, 25 bp, Homo sapien
ggcagcagcaaagctcagctcagcc

SEQ ID NO: 2729315 - DNA, 25 bp, Homo sapien
tgtggcagcagcaaagctcagctca

SEQ ID NO: 2729316 - DNA, 25 bp, Homo sapien
caacagacgcagctcccagaaggct

SEQ ID NO: 2729317 - DNA, 25 bp, Homo sapien
ctcctgtggcagcagcaaagctcag

SEQ ID NO: 2729318 - DNA, 25 bp, Homo sapien
ttccacagaggtatggtaggtaggt

SEQ ID NO: 2729319 - DNA, 25 bp, Homo sapien
ccacagaggtatggtaggtaggtta

SEQ ID NO: 2729320 - DNA, 25 bp, Homo sapien
tccacagaggtatggtaggtaggtt

SEQ ID NO: 2729321 - DNA, 25 bp, Homo sapien
tgttccacagaggtatggtaggtag

SEQ ID NO: 2729322 - DNA, 25 bp, Homo sapien
gtctgtggtcatagctttttcagca

SEQ ID NO: 2729323 - DNA, 25 bp, Homo sapien
tcacccggaaatctgaaattcctct

SEQ ID NO: 2729324 - DNA, 25 bp, Homo sapien
ggtctgtggtcatagctttttcagc

SEQ ID NO: 2729325 - DNA, 25 bp, Homo sapien
gcagtccattcacccggaaatctga

SEQ ID NO: 2729326 - DNA, 25 bp, Homo sapien
aatccactcatccttggattgctga

SEQ ID NO: 2729327 - DNA, 25 bp, Homo sapien
tccactcatccttggattgctgaat

SEQ ID NO: 2729328 - DNA, 25 bp, Homo sapien
atggtgagaacaatccactcatcct

SEQ ID NO: 2729329 - DNA, 25 bp, Homo sapien
tgagaacaatccactcatccttgga

SEQ ID NO: 2729330 - DNA, 25 bp, Homo sapien
caactccagtctgggttcgggagat

SEQ ID NO: 2729331 - DNA, 25 bp, Homo sapien
gatcatcaactccagtctgggttcg

SEQ ID NO: 2729332 - DNA, 25 bp, Homo sapien
tggatcatcaactccagtctgggtt

SEQ ID NO: 2729333 - DNA, 25 bp, Homo sapien
catcaactccagtctgggttcggga

SEQ ID NO: 2729334 - DNA, 25 bp, Homo sapien
gagccctcttcaggacccggaagca

SEQ ID NO: 2729335 - DNA, 25 bp, Homo sapien
ggctggtggtccaggagccctcttc

SEQ ID NO: 2729336 - DNA, 25 bp, Homo sapien
aggagccctcttcaggacccggaag

SEQ ID NO: 2729337 - DNA, 25 bp, Homo sapien
tggtggtccaggagccctcttcagg

SEQ ID NO: 2729338 - DNA, 25 bp, Homo sapien
ccagggcccacaaggtctggacagg

SEQ ID NO: 2729339 - DNA, 25 bp, Homo sapien
gggcccacaaggtctggacaggcgc

SEQ ID NO: 2729340 - DNA, 25 bp, Homo sapien
ccacaaggtctggacaggcgcagtg

SEQ ID NO: 2729341 - DNA, 25 bp, Homo sapien
cccacaaggtctggacaggcgcagt

SEQ ID NO: 2729342 - DNA, 25 bp, Homo sapien
aaaattatagagacgatttcagtgt

SEQ ID NO: 2729343 - DNA, 25 bp, Homo sapien
aggaaaattatagagacgatttcag

SEQ ID NO: 2729344 - DNA, 25 bp, Homo sapien
gaaaattatagagacgatttcagtg

SEQ ID NO: 2729345 - DNA, 25 bp, Homo sapien
ggaaaattatagagacgatttcagt

SEQ ID NO: 2729346 - DNA, 25 bp, Homo sapien
gactgaatcagtctccaaattagca

SEQ ID NO: 2729347 - DNA, 25 bp, Homo sapien
gggactgaatcagtctccaaattag

SEQ ID NO: 2729348 - DNA, 25 bp, Homo sapien
gggccaaaaggggactgaatcagtc

SEQ ID NO: 2729349 - DNA, 25 bp, Homo sapien
ctgaatcagtctccaaattagcaag

SEQ ID NO: 2729350 - DNA, 25 bp, Homo sapien
ttcagctctgtccttcctgagaaaa

SEQ ID NO: 2729351 - DNA, 25 bp, Homo sapien
cagctctgtccttcctgagaaaaca

SEQ ID NO: 2729352 - DNA, 25 bp, Homo sapien
gaaaacatctccaaagtccttatct

SEQ ID NO: 2729353 - DNA, 25 bp, Homo sapien
tttttcagctctgtccttcctgaga

SEQ ID NO: 2729354 - DNA, 25 bp, Homo sapien
ctcccaccgagcacgcgcactcgta

SEQ ID NO: 2729355 - DNA, 25 bp, Homo sapien
gtactccgcgggctcccaccgagca

SEQ ID NO: 2729356 - DNA, 25 bp, Homo sapien
ctccttccaggtactccgcgggctc

SEQ ID NO: 2729357 - DNA, 25 bp, Homo sapien
gagcacgcgcactcgtacactggcc

SEQ ID NO: 2729358 - DNA, 25 bp, Homo sapien
gcgagatcttcagggtctatatata

SEQ ID NO: 2729359 - DNA, 25 bp, Homo sapien
gtctatatataagcgcggggagcct

SEQ ID NO: 2729360 - DNA, 25 bp, Homo sapien
tcgcgagatcttcagggtctatata

SEQ ID NO: 2729361 - DNA, 25 bp, Homo sapien
cgcttgcgcaggacggctacggtac

SEQ ID NO: 2729362 - DNA, 25 bp, Homo sapien
gctcgcgagatcttcagggtctata

SEQ ID NO: 2729363 - DNA, 25 bp, Homo sapien
ttcggagcacgcgcgcggaggcggg

SEQ ID NO: 2729364 - DNA, 25 bp, Homo sapien
aggctccccgcgcttatatatagac

SEQ ID NO: 2729365 - DNA, 25 bp, Homo sapien
tatagaccctgaagatctcgcgagc

SEQ ID NO: 2729366 - DNA, 25 bp, Homo sapien
tatatagaccctgaagatctcgcga

SEQ ID NO: 2729367 - DNA, 25 bp, Homo sapien
ggctccccgcgcttatatatagacc

SEQ ID NO: 2729368 - DNA, 25 bp, Homo sapien
tatatatagaccctgaagatctcgc

SEQ ID NO: 2729369 - DNA, 25 bp, Homo sapien
gtaccgtagccgtcctgcgcaagcg

SEQ ID NO: 2729370 - DNA, 25 bp, Homo sapien
tcgatggacatggacatgagccccc

SEQ ID NO: 2729371 - DNA, 25 bp, Homo sapien
ttcgatggacatggacatgagcccc

SEQ ID NO: 2729372 - DNA, 25 bp, Homo sapien
aagattcgatggacatggacatgag

SEQ ID NO: 2729373 - DNA, 25 bp, Homo sapien
tggaagattcgatggacatggacat

SEQ ID NO: 2729374 - DNA, 25 bp, Homo sapien
agattcgatggacatggacatgagc

SEQ ID NO: 2729375 - DNA, 25 bp, Homo sapien
ctgaggccccagaactatcttttcg

SEQ ID NO: 2729376 - DNA, 25 bp, Homo sapien
ctcatgtccatgtccatcgaatctt

SEQ ID NO: 2729377 - DNA, 25 bp, Homo sapien
tcatgtccatgtccatcgaatcttc

SEQ ID NO: 2729378 - DNA, 25 bp, Homo sapien
gggctcatgtccatgtccatcgaat

SEQ ID NO: 2729379 - DNA, 25 bp, Homo sapien
gctcatgtccatgtccatcgaatct

SEQ ID NO: 2729380 - DNA, 25 bp, Homo sapien
gggggctcatgtccatgtccatcga

SEQ ID NO: 2729381 - DNA, 25 bp, Homo sapien
atgtccatgtccatcgaatcttcca

SEQ ID NO: 2729382 - DNA, 25 bp, Homo sapien
tggggggagctggagcgaggccgag

SEQ ID NO: 2729383 - DNA, 25 bp, Homo sapien
gggagctggagcgaggccgagcggg

SEQ ID NO: 2729384 - DNA, 25 bp, Homo sapien
gagcgaggccgagcggggcctggtg

SEQ ID NO: 2729385 - DNA, 25 bp, Homo sapien
tgctggggggagctggagcgaggcc

SEQ ID NO: 2729386 - DNA, 25 bp, Homo sapien
ctggggggagctggagcgaggccga

SEQ ID NO: 2729387 - DNA, 25 bp, Homo sapien
gagctggagcgaggccgagcggggc

SEQ ID NO: 2729388 - DNA, 25 bp, Homo sapien
caccaggccccgctcggcctcgctc

SEQ ID NO: 2729389 - DNA, 25 bp, Homo sapien
ctcgctccagctccccccagcagtt

SEQ ID NO: 2729390 - DNA, 25 bp, Homo sapien
ccaggccccgctcggcctcgctcca

SEQ ID NO: 2729391 - DNA, 25 bp, Homo sapien
cgccaccaggccccgctcggcctcg

SEQ ID NO: 2729392 - DNA, 25 bp, Homo sapien
gccccgctcggcctcgctccagctc

SEQ ID NO: 2729393 - DNA, 25 bp, Homo sapien
gcctcgctccagctccccccagcag

SEQ ID NO: 2729394 - DNA, 25 bp, Homo sapien
gtggataatgatgaaaatgagcacc

SEQ ID NO: 2729395 - DNA, 25 bp, Homo sapien
tatcactttaaggtggataatgatg

SEQ ID NO: 2729396 - DNA, 25 bp, Homo sapien
tgagcaccagttatctttaagaacg

SEQ ID NO: 2729397 - DNA, 25 bp, Homo sapien
ggataatgatgaaaatgagcaccag

SEQ ID NO: 2729398 - DNA, 25 bp, Homo sapien
ttatcactttaaggtggataatgat

SEQ ID NO: 2729399 - DNA, 25 bp, Homo sapien
attatcactttaaggtggataatga

SEQ ID NO: 2729400 - DNA, 25 bp, Homo sapien
ggtgctcattttcatcattatccac

SEQ ID NO: 2729401 - DNA, 25 bp, Homo sapien
catcattatccaccttaaagtgata

SEQ ID NO: 2729402 - DNA, 25 bp, Homo sapien
tcattatccaccttaaagtgataat

SEQ ID NO: 2729403 - DNA, 25 bp, Homo sapien
cgttcttaaagataactggtgctca

SEQ ID NO: 2729404 - DNA, 25 bp, Homo sapien
atcattatccaccttaaagtgataa

SEQ ID NO: 2729405 - DNA, 25 bp, Homo sapien
ctggtgctcattttcatcattatcc

SEQ ID NO: 2729406 - DNA, 25 bp, Homo sapien
tgcatataacatttagtgggggggt

SEQ ID NO: 2729407 - DNA, 25 bp, Homo sapien
tgtggttaagtgacgcatggctgca

SEQ ID NO: 2729408 - DNA, 25 bp, Homo sapien
taagtgacgcatggctgcatataac

SEQ ID NO: 2729409 - DNA, 25 bp, Homo sapien
tggaactcaaaagttgaagtagtat

SEQ ID NO: 2729410 - DNA, 25 bp, Homo sapien
ctagccctgtggttaagtgacgcat

SEQ ID NO: 2729411 - DNA, 25 bp, Homo sapien
agtgacgcatggctgcatataacat

SEQ ID NO: 2729412 - DNA, 25 bp, Homo sapien
atgttatatgcagccatgcgtcact

SEQ ID NO: 2729413 - DNA, 25 bp, Homo sapien
tatatgcagccatgcgtcacttaac

SEQ ID NO: 2729414 - DNA, 25 bp, Homo sapien
atactacttcaacttttgagttcca

SEQ ID NO: 2729415 - DNA, 25 bp, Homo sapien
cccccccactaaatgttatatgcag

SEQ ID NO: 2729416 - DNA, 25 bp, Homo sapien
atgcgtcacttaaccacagggctag

SEQ ID NO: 2729417 - DNA, 25 bp, Homo sapien
tgcagccatgcgtcacttaaccaca

SEQ ID NO: 2729418 - DNA, 25 bp, Homo sapien
aggatgagttgcacattgttgaagc

SEQ ID NO: 2729419 - DNA, 25 bp, Homo sapien
gtgcaaaggatgagttgcacattgt

SEQ ID NO: 2729420 - DNA, 25 bp, Homo sapien
ctggtgcaaaggatgagttgcacat

SEQ ID NO: 2729421 - DNA, 25 bp, Homo sapien
gagttgcacattgttgaagcagagg

SEQ ID NO: 2729422 - DNA, 25 bp, Homo sapien
ggtgcaaaggatgagttgcacattg

SEQ ID NO: 2729423 - DNA, 25 bp, Homo sapien
tggtgcaaaggatgagttgcacatt

SEQ ID NO: 2729424 - DNA, 25 bp, Homo sapien
acaatgtgcaactcatcctttgcac

SEQ ID NO: 2729425 - DNA, 25 bp, Homo sapien
atgtgcaactcatcctttgcaccag

SEQ ID NO: 2729426 - DNA, 25 bp, Homo sapien
aacaatgtgcaactcatcctttgca

SEQ ID NO: 2729427 - DNA, 25 bp, Homo sapien
gcttcaacaatgtgcaactcatcct

SEQ ID NO: 2729428 - DNA, 25 bp, Homo sapien
aatgtgcaactcatcctttgcacca

SEQ ID NO: 2729429 - DNA, 25 bp, Homo sapien
caatgtgcaactcatcctttgcacc

SEQ ID NO: 2729430 - DNA, 25 bp, Homo sapien
ataacaccaccagtggtcttaaggt

SEQ ID NO: 2729431 - DNA, 25 bp, Homo sapien
caccaccagtggtcttaaggttgaa

SEQ ID NO: 2729432 - DNA, 25 bp, Homo sapien
ccaccagtggtcttaaggttgaagt

SEQ ID NO: 2729433 - DNA, 25 bp, Homo sapien
aacaccaccagtggtcttaaggttg

SEQ ID NO: 2729434 - DNA, 25 bp, Homo sapien
acaccaccagtggtcttaaggttga

SEQ ID NO: 2729435 - DNA, 25 bp, Homo sapien
ccagtggtcttaaggttgaagtgtg

SEQ ID NO: 2729436 - DNA, 25 bp, Homo sapien
cacacttcaaccttaagaccactgg

SEQ ID NO: 2729437 - DNA, 25 bp, Homo sapien
tcaaccttaagaccactggtggtgt

SEQ ID NO: 2729438 - DNA, 25 bp, Homo sapien
acttcaaccttaagaccactggtgg

SEQ ID NO: 2729439 - DNA, 25 bp, Homo sapien
caaccttaagaccactggtggtgtt

SEQ ID NO: 2729440 - DNA, 25 bp, Homo sapien
ttcaaccttaagaccactggtggtg

SEQ ID NO: 2729441 - DNA, 25 bp, Homo sapien
accttaagaccactggtggtgttat

SEQ ID NO: 2729442 - DNA, 25 bp, Homo sapien
ctggaaagcggtctgcccctggagg

SEQ ID NO: 2729443 - DNA, 25 bp, Homo sapien
atatctggaaagcggtctgcccctg

SEQ ID NO: 2729444 - DNA, 25 bp, Homo sapien
atctggaaagcggtctgcccctgga

SEQ ID NO: 2729445 - DNA, 25 bp, Homo sapien
tctggaaagcggtctgcccctggag

SEQ ID NO: 2729446 - DNA, 25 bp, Homo sapien
tatatctggaaagcggtctgcccct

SEQ ID NO: 2729447 - DNA, 25 bp, Homo sapien
tggaaagcggtctgcccctggaggt

SEQ ID NO: 2729448 - DNA, 25 bp, Homo sapien
ctccaggggcagaccgctttccaga

SEQ ID NO: 2729449 - DNA, 25 bp, Homo sapien
caggggcagaccgctttccagatat

SEQ ID NO: 2729450 - DNA, 25 bp, Homo sapien
aggggcagaccgctttccagatata

SEQ ID NO: 2729451 - DNA, 25 bp, Homo sapien
cctccaggggcagaccgctttccag

SEQ ID NO: 2729452 - DNA, 25 bp, Homo sapien
acctccaggggcagaccgctttcca

SEQ ID NO: 2729453 - DNA, 25 bp, Homo sapien
tccaggggcagaccgctttccagat

SEQ ID NO: 2729454 - DNA, 25 bp, Homo sapien
aaaagtaaaacttgctgctgatgaa

SEQ ID NO: 2729455 - DNA, 25 bp, Homo sapien
gacgatgatgatgaagaggatgatg

SEQ ID NO: 2729456 - DNA, 25 bp, Homo sapien
aaacttgctgctgatgaagatgatg

SEQ ID NO: 2729457 - DNA, 25 bp, Homo sapien
aaaaagtaaaacttgctgctgatga

SEQ ID NO: 2729458 - DNA, 25 bp, Homo sapien
taaaacttgctgctgatgaagatga

SEQ ID NO: 2729459 - DNA, 25 bp, Homo sapien
atgatgaagaggatgatgatgaaga

SEQ ID NO: 2729460 - DNA, 25 bp, Homo sapien
catcatcttcatcagcagcaagttt

SEQ ID NO: 2729461 - DNA, 25 bp, Homo sapien
tcatcagcagcaagttttacttttt

SEQ ID NO: 2729462 - DNA, 25 bp, Homo sapien
tcttcatcatcatcctcttcatcat

SEQ ID NO: 2729463 - DNA, 25 bp, Homo sapien
ttcatcagcagcaagttttactttt

SEQ ID NO: 2729464 - DNA, 25 bp, Homo sapien
catcatcctcttcatcatcatcgtc

SEQ ID NO: 2729465 - DNA, 25 bp, Homo sapien
tcatcttcatcagcagcaagtttta

SEQ ID NO: 2729466 - DNA, 25 bp, Homo sapien
catacattatacagtggtatagtgt

SEQ ID NO: 2729467 - DNA, 25 bp, Homo sapien
gggagtcttctaacgattgtattta

SEQ ID NO: 2729468 - DNA, 25 bp, Homo sapien
tcttctaacgattgtatttaacctg

SEQ ID NO: 2729469 - DNA, 25 bp, Homo sapien
tgtatattcggggagtgtttccatc

SEQ ID NO: 2729470 - DNA, 25 bp, Homo sapien
aacatggaatgtttctatttaggtc

SEQ ID NO: 2729471 - DNA, 25 bp, Homo sapien
tcactctgagtgtacagtttaatag

SEQ ID NO: 2729472 - DNA, 25 bp, Homo sapien
tattaaactgtacactcagagtgaa

SEQ ID NO: 2729473 - DNA, 25 bp, Homo sapien
aatacaatcgttagaagactcccca

SEQ ID NO: 2729474 - DNA, 25 bp, Homo sapien
caagatggaaacactccccgaatat

SEQ ID NO: 2729475 - DNA, 25 bp, Homo sapien
cactataccactgtataatgtatgt

SEQ ID NO: 2729476 - DNA, 25 bp, Homo sapien
gacctaaatagaaacattccatgtt

SEQ ID NO: 2729477 - DNA, 25 bp, Homo sapien
cactccccgaatatacaggttaaat

SEQ ID NO: 2729478 - DNA, 25 bp, Homo sapien
gaagctgaagaaaaagcgccagtga

SEQ ID NO: 2729479 - DNA, 25 bp, Homo sapien
tgaagaaaaagcgccagtgaagaaa

SEQ ID NO: 2729480 - DNA, 25 bp, Homo sapien
aagctgaagaaaaagcgccagtgaa

SEQ ID NO: 2729481 - DNA, 25 bp, Homo sapien
tgattttgatgatgaggaagctgaa

SEQ ID NO: 2729482 - DNA, 25 bp, Homo sapien
agctgaagaaaaagcgccagtgaag

SEQ ID NO: 2729483 - DNA, 25 bp, Homo sapien
gctgaagaaaaagcgccagtgaaga

SEQ ID NO: 2729484 - DNA, 25 bp, Homo sapien
ttcagcttcctcatcatcaaaatca

SEQ ID NO: 2729485 - DNA, 25 bp, Homo sapien
tcttcactggcgctttttcttcagc

SEQ ID NO: 2729486 - DNA, 25 bp, Homo sapien
ttcactggcgctttttcttcagctt

SEQ ID NO: 2729487 - DNA, 25 bp, Homo sapien
cttcactggcgctttttcttcagct

SEQ ID NO: 2729488 - DNA, 25 bp, Homo sapien
tcactggcgctttttcttcagcttc

SEQ ID NO: 2729489 - DNA, 25 bp, Homo sapien
cactggcgctttttcttcagcttcc

SEQ ID NO: 2729490 - DNA, 25 bp, Homo sapien
atacgagatactccagccaaaaatg

SEQ ID NO: 2729491 - DNA, 25 bp, Homo sapien
cgagatactccagccaaaaatgcac

SEQ ID NO: 2729492 - DNA, 25 bp, Homo sapien
tatacgagatactccagccaaaaat

SEQ ID NO: 2729493 - DNA, 25 bp, Homo sapien
ctatacgagatactccagccaaaaa

SEQ ID NO: 2729494 - DNA, 25 bp, Homo sapien
tctatacgagatactccagccaaaa

SEQ ID NO: 2729495 - DNA, 25 bp, Homo sapien
aaaagactcaaaaccatcatcaaca

SEQ ID NO: 2729496 - DNA, 25 bp, Homo sapien
tttttggctggagtatctcgtatag

SEQ ID NO: 2729497 - DNA, 25 bp, Homo sapien
tgttgatgatggttttgagtctttt

SEQ ID NO: 2729498 - DNA, 25 bp, Homo sapien
catttttggctggagtatctcgtat

SEQ ID NO: 2729499 - DNA, 25 bp, Homo sapien
ttttggctggagtatctcgtataga

SEQ ID NO: 2729500 - DNA, 25 bp, Homo sapien
atttttggctggagtatctcgtata

SEQ ID NO: 2729501 - DNA, 25 bp, Homo sapien
gtgcatttttggctggagtatctcg

SEQ ID NO: 2729502 - DNA, 25 bp, Homo sapien
gcctttatagaacccctgtaattgc

SEQ ID NO: 2729503 - DNA, 25 bp, Homo sapien
tggctacatttacacgtgggtctca

SEQ ID NO: 2729504 - DNA, 25 bp, Homo sapien
ttctactgtggaagaatctagtgtg

SEQ ID NO: 2729505 - DNA, 25 bp, Homo sapien
tacatttacacgtgggtctcattga

SEQ ID NO: 2729506 - DNA, 25 bp, Homo sapien
ggtctcattgatctagttggggaaa

SEQ ID NO: 2729507 - DNA, 25 bp, Homo sapien
tttatagaacccctgtaattgctgt

SEQ ID NO: 2729508 - DNA, 25 bp, Homo sapien
tcaatgagacccacgtgtaaatgta

SEQ ID NO: 2729509 - DNA, 25 bp, Homo sapien
gagacccacgtgtaaatgtagccac

SEQ ID NO: 2729510 - DNA, 25 bp, Homo sapien
gcaattacaggggttctataaaggc

SEQ ID NO: 2729511 - DNA, 25 bp, Homo sapien
ctttttccccaactagatcaatgag

SEQ ID NO: 2729512 - DNA, 25 bp, Homo sapien
cacactagattcttccacagtagaa

SEQ ID NO: 2729513 - DNA, 25 bp, Homo sapien
tttccccaactagatcaatgagacc

SEQ ID NO: 2729514 - DNA, 25 bp, Homo sapien
cagtacttgtgctctacttatggag

SEQ ID NO: 2729515 - DNA, 25 bp, Homo sapien
ggcgccaggcatcagactacagtga

SEQ ID NO: 2729516 - DNA, 25 bp, Homo sapien
cctagacagggtgtattgatctcat

SEQ ID NO: 2729517 - DNA, 25 bp, Homo sapien
cagtctgggttagagttgcgtgatc

SEQ ID NO: 2729518 - DNA, 25 bp, Homo sapien
tgaagtagaacatttgggcctagac

SEQ ID NO: 2729519 - DNA, 25 bp, Homo sapien
cagcttgttgtgtgttgtaggtaca

SEQ ID NO: 2729520 - DNA, 25 bp, Homo sapien
gatcaatacaccctgtctaggccca

SEQ ID NO: 2729521 - DNA, 25 bp, Homo sapien
tctacttcaagctaacatgcagcca

SEQ ID NO: 2729522 - DNA, 25 bp, Homo sapien
gatcacgcaactctaacccagactg

SEQ ID NO: 2729523 - DNA, 25 bp, Homo sapien
ccataagtagagcacaagtactggg

SEQ ID NO: 2729524 - DNA, 25 bp, Homo sapien
tcactgtagtctgatgcctggcgcc

SEQ ID NO: 2729525 - DNA, 25 bp, Homo sapien
tgtacctacaacacacaacaagctg

SEQ ID NO: 2729526 - DNA, 25 bp, Homo sapien
tcaacctaatacctgatatggtctg

SEQ ID NO: 2729527 - DNA, 25 bp, Homo sapien
gaatcaacctaatacctgatatggt

SEQ ID NO: 2729528 - DNA, 25 bp, Homo sapien
aatcaacctaatacctgatatggtc

SEQ ID NO: 2729529 - DNA, 25 bp, Homo sapien
aacctaatacctgatatggtctggc

SEQ ID NO: 2729530 - DNA, 25 bp, Homo sapien
caacctaatacctgatatggtctgg

SEQ ID NO: 2729531 - DNA, 25 bp, Homo sapien
ggaatcaacctaatacctgatatgg

SEQ ID NO: 2729532 - DNA, 25 bp, Homo sapien
gccagaccatatcaggtattaggtt

SEQ ID NO: 2729533 - DNA, 25 bp, Homo sapien
accatatcaggtattaggttgattc

SEQ ID NO: 2729534 - DNA, 25 bp, Homo sapien
cagaccatatcaggtattaggttga

SEQ ID NO: 2729535 - DNA, 25 bp, Homo sapien
ccagaccatatcaggtattaggttg

SEQ ID NO: 2729536 - DNA, 25 bp, Homo sapien
ccatatcaggtattaggttgattcc

SEQ ID NO: 2729537 - DNA, 25 bp, Homo sapien
gaccatatcaggtattaggttgatt

SEQ ID NO: 2729538 - DNA, 25 bp, Homo sapien
caccaaaaggacctagttctgtaga

SEQ ID NO: 2729539 - DNA, 25 bp, Homo sapien
ccaaaaggacctagttctgtagaag

SEQ ID NO: 2729540 - DNA, 25 bp, Homo sapien
acaccaaaaggacctagttctgtag

SEQ ID NO: 2729541 - DNA, 25 bp, Homo sapien
caagaatccttcaagaaacaggaaa

SEQ ID NO: 2729542 - DNA, 25 bp, Homo sapien
caaaaggacctagttctgtagaaga

SEQ ID NO: 2729543 - DNA, 25 bp, Homo sapien
acaagaatccttcaagaaacaggaa

SEQ ID NO: 2729544 - DNA, 25 bp, Homo sapien
cctgtttcttgaaggattcttgtcc

SEQ ID NO: 2729545 - DNA, 25 bp, Homo sapien
ctacagaactaggtccttttggtgt

SEQ ID NO: 2729546 - DNA, 25 bp, Homo sapien
tcttctacagaactaggtccttttg

SEQ ID NO: 2729547 - DNA, 25 bp, Homo sapien
tctacagaactaggtccttttggtg

SEQ ID NO: 2729548 - DNA, 25 bp, Homo sapien
ttcctgtttcttgaaggattcttgt

SEQ ID NO: 2729549 - DNA, 25 bp, Homo sapien
tttcctgtttcttgaaggattcttg

SEQ ID NO: 2729550 - DNA, 25 bp, Homo sapien
cagtagattccttgtacagtgataa

SEQ ID NO: 2729551 - DNA, 25 bp, Homo sapien
tcgtggcttcagtagattccttgta

SEQ ID NO: 2729552 - DNA, 25 bp, Homo sapien
gtgataagtccactggaaaaagaat

SEQ ID NO: 2729553 - DNA, 25 bp, Homo sapien
tttttcgtggcttcagtagattcct

SEQ ID NO: 2729554 - DNA, 25 bp, Homo sapien
gcttcagtagattccttgtacagtg

SEQ ID NO: 2729555 - DNA, 25 bp, Homo sapien
gattccttgtacagtgataagtcca

SEQ ID NO: 2729556 - DNA, 25 bp, Homo sapien
tggacttatcactgtacaaggaatc

SEQ ID NO: 2729557 - DNA, 25 bp, Homo sapien
tatcactgtacaaggaatctactga

SEQ ID NO: 2729558 - DNA, 25 bp, Homo sapien
tgtacaaggaatctactgaagccac

SEQ ID NO: 2729559 - DNA, 25 bp, Homo sapien
aggaatctactgaagccacgaaaaa

SEQ ID NO: 2729560 - DNA, 25 bp, Homo sapien
tacaaggaatctactgaagccacga

SEQ ID NO: 2729561 - DNA, 25 bp, Homo sapien
attctttttccagtggacttatcac

SEQ ID NO: 2729562 - DNA, 25 bp, Homo sapien
cagtcctgggcactacatgtaaatt

SEQ ID NO: 2729563 - DNA, 25 bp, Homo sapien
cttcaggctggaaacaatctcttgg

SEQ ID NO: 2729564 - DNA, 25 bp, Homo sapien
tgtatctccttagctgctcaataaa

SEQ ID NO: 2729565 - DNA, 25 bp, Homo sapien
tcacctgacaatgttttaaatcgcc

SEQ ID NO: 2729566 - DNA, 25 bp, Homo sapien
tacttgtgcatttgcctcacctgac

SEQ ID NO: 2729567 - DNA, 25 bp, Homo sapien
tggaaacaatctcttggttccctaa

SEQ ID NO: 2729568 - DNA, 25 bp, Homo sapien
gcgatttaaaacattgtcaggtgag

SEQ ID NO: 2729569 - DNA, 25 bp, Homo sapien
ttagggaaccaagagattgtttcca

SEQ ID NO: 2729570 - DNA, 25 bp, Homo sapien
aatttacatgtagtgcccaggactg

SEQ ID NO: 2729571 - DNA, 25 bp, Homo sapien
tttattgagcagctaaggagataca

SEQ ID NO: 2729572 - DNA, 25 bp, Homo sapien
ccaagagattgtttccagcctgaag

SEQ ID NO: 2729573 - DNA, 25 bp, Homo sapien
aaggcgatttaaaacattgtcaggt

SEQ ID NO: 2729574 - DNA, 25 bp, Homo sapien
cacttgacatggttctccaaaggga

SEQ ID NO: 2729575 - DNA, 25 bp, Homo sapien
taaactgatccatgtagtagcatgc

SEQ ID NO: 2729576 - DNA, 25 bp, Homo sapien
tctgaaccagtttgtggtcagcaag

SEQ ID NO: 2729577 - DNA, 25 bp, Homo sapien
aattttctaaaggtatctctctcgg

SEQ ID NO: 2729578 - DNA, 25 bp, Homo sapien
gatactagccatgctgcccaatagg

SEQ ID NO: 2729579 - DNA, 25 bp, Homo sapien
aatttagataagcaaccgagttgcc

SEQ ID NO: 2729580 - DNA, 25 bp, Homo sapien
catccctttggagaaccatgtcaag

SEQ ID NO: 2729581 - DNA, 25 bp, Homo sapien
tattgggcagcatggctagtatctc

SEQ ID NO: 2729582 - DNA, 25 bp, Homo sapien
taagctacacttgagattcgacaaa

SEQ ID NO: 2729583 - DNA, 25 bp, Homo sapien
taacaagtcggttatcacccagaac

SEQ ID NO: 2729584 - DNA, 25 bp, Homo sapien
gatacaggcaagaaactacaatagg

SEQ ID NO: 2729585 - DNA, 25 bp, Homo sapien
gagaaatacaccgagagagatacct

SEQ ID NO: 2729586 - DNA, 25 bp, Homo sapien
tggaagccaaattcatcaattatgt

SEQ ID NO: 2729587 - DNA, 25 bp, Homo sapien
ttgcttccggatgactgaccaagag

SEQ ID NO: 2729588 - DNA, 25 bp, Homo sapien
aagtggaagccaaattcatcaatta

SEQ ID NO: 2729589 - DNA, 25 bp, Homo sapien
attgcttccggatgactgaccaaga

SEQ ID NO: 2729590 - DNA, 25 bp, Homo sapien
gtggaagccaaattcatcaattatg

SEQ ID NO: 2729591 - DNA, 25 bp, Homo sapien
caaagtggaagccaaattcatcaat

SEQ ID NO: 2729592 - DNA, 25 bp, Homo sapien
ctcttggtcagtcatccggaagcaa

SEQ ID NO: 2729593 - DNA, 25 bp, Homo sapien
taattgatgaatttggcttccactt

SEQ ID NO: 2729594 - DNA, 25 bp, Homo sapien
acataattgatgaatttggcttcca

SEQ ID NO: 2729595 - DNA, 25 bp, Homo sapien
tcttggtcagtcatccggaagcaat

SEQ ID NO: 2729596 - DNA, 25 bp, Homo sapien
attgatgaatttggcttccactttg

SEQ ID NO: 2729597 - DNA, 25 bp, Homo sapien
cataattgatgaatttggcttccac

SEQ ID NO: 2729598 - DNA, 25 bp, Homo sapien
tctggggacatgattaaatccaagt

SEQ ID NO: 2729599 - DNA, 25 bp, Homo sapien
ctggggacatgattaaatccaagtt

SEQ ID NO: 2729600 - DNA, 25 bp, Homo sapien
tggggacatgattaaatccaagttt

SEQ ID NO: 2729601 - DNA, 25 bp, Homo sapien
aaacttggatttaatcatgtcccca

SEQ ID NO: 2729602 - DNA, 25 bp, Homo sapien
aacttggatttaatcatgtccccag

SEQ ID NO: 2729603 - DNA, 25 bp, Homo sapien
acttggatttaatcatgtccccaga

SEQ ID NO: 2729604 - DNA, 25 bp, Homo sapien
tctggggacatgattaaatccaagt

SEQ ID NO: 2729605 - DNA, 25 bp, Homo sapien
ctggggacatgattaaatccaagtt

SEQ ID NO: 2729606 - DNA, 25 bp, Homo sapien
acatgattaaatccaagtttttttg

SEQ ID NO: 2729607 - DNA, 25 bp, Homo sapien
tggggacatgattaaatccaagttt

SEQ ID NO: 2729608 - DNA, 25 bp, Homo sapien
gtaactggattttctggggacatga

SEQ ID NO: 2729609 - DNA, 25 bp, Homo sapien
caagtttttttgtgatttattatga

SEQ ID NO: 2729610 - DNA, 25 bp, Homo sapien
cataataaatcacaaaaaaacttgg

SEQ ID NO: 2729611 - DNA, 25 bp, Homo sapien
taatcatgtccccagaaaatccagt

SEQ ID NO: 2729612 - DNA, 25 bp, Homo sapien
aaacttggatttaatcatgtcccca

SEQ ID NO: 2729613 - DNA, 25 bp, Homo sapien
aacttggatttaatcatgtccccag

SEQ ID NO: 2729614 - DNA, 25 bp, Homo sapien
tcatgtccccagaaaatccagttac

SEQ ID NO: 2729615 - DNA, 25 bp, Homo sapien
acttggatttaatcatgtccccaga

SEQ ID NO: 2729616 - DNA, 25 bp, Homo sapien
gaagaatacagttggcagtctgaga

SEQ ID NO: 2729617 - DNA, 25 bp, Homo sapien
accagatacataagcttgagttagc

SEQ ID NO: 2729618 - DNA, 25 bp, Homo sapien
tatcgtgtggagaacggatgctgca

SEQ ID NO: 2729619 - DNA, 25 bp, Homo sapien
gactcataagtgtaaggacaatgta

SEQ ID NO: 2729620 - DNA, 25 bp, Homo sapien
ggttttccttgctgttccatttgac

SEQ ID NO: 2729621 - DNA, 25 bp, Homo sapien
tcccagatttcctatagttggtaaa

SEQ ID NO: 2729622 - DNA, 25 bp, Homo sapien
tatgagtcaactgtaaataagagca

SEQ ID NO: 2729623 - DNA, 25 bp, Homo sapien
taatgtatttcccataagatctagg

SEQ ID NO: 2729624 - DNA, 25 bp, Homo sapien
gcagtcaaatggaacagcaaggaaa

SEQ ID NO: 2729625 - DNA, 25 bp, Homo sapien
tttaccaactataggaaatctggga

SEQ ID NO: 2729626 - DNA, 25 bp, Homo sapien
taaatgcagcatccgttctccacac

SEQ ID NO: 2729627 - DNA, 25 bp, Homo sapien
gctaactcaagcttatgtatctggt

SEQ ID NO: 2729628 - DNA, 25 bp, Homo sapien
tgcctagcctcagcatatagttttt

SEQ ID NO: 2729629 - DNA, 25 bp, Homo sapien
tatgaagtgttgtggttccttaacc

SEQ ID NO: 2729630 - DNA, 25 bp, Homo sapien
taactctctggtggtagaatgaaaa

SEQ ID NO: 2729631 - DNA, 25 bp, Homo sapien
caactctaaagctgatctcgggaga

SEQ ID NO: 2729632 - DNA, 25 bp, Homo sapien
ccaaatctggccaactctaaagctg

SEQ ID NO: 2729633 - DNA, 25 bp, Homo sapien
gatgaagttggaagtaacattggcc

SEQ ID NO: 2729634 - DNA, 25 bp, Homo sapien
tatttttcattctaccaccagagag

SEQ ID NO: 2729635 - DNA, 25 bp, Homo sapien
ccgagatcagctttagagttggcca

SEQ ID NO: 2729636 - DNA, 25 bp, Homo sapien
aaaaactatatgctgaggctaggca

SEQ ID NO: 2729637 - DNA, 25 bp, Homo sapien
ggttaaggaaccacaacacttcata

SEQ ID NO: 2729638 - DNA, 25 bp, Homo sapien
taactctagataaagatatgactcc

SEQ ID NO: 2729639 - DNA, 25 bp, Homo sapien
taaatgtctctttgcatagttcaac

SEQ ID NO: 2729640 - DNA, 25 bp, Homo sapien
ttcaagatctctggcagtggaggaa

SEQ ID NO: 2729641 - DNA, 25 bp, Homo sapien
attcaagatctctggcagtggagga

SEQ ID NO: 2729642 - DNA, 25 bp, Homo sapien
ctattcaagatctctggcagtggag

SEQ ID NO: 2729643 - DNA, 25 bp, Homo sapien
tattcaagatctctggcagtggagg

SEQ ID NO: 2729644 - DNA, 25 bp, Homo sapien
gctattcaagatctctggcagtgga

SEQ ID NO: 2729645 - DNA, 25 bp, Homo sapien
ctggcagtggaggaagtctctttaa

SEQ ID NO: 2729646 - DNA, 25 bp, Homo sapien
ttcctccactgccagagatcttgaa

SEQ ID NO: 2729647 - DNA, 25 bp, Homo sapien
tccactgccagagatcttgaatagc

SEQ ID NO: 2729648 - DNA, 25 bp, Homo sapien
ttaaagagacttcctccactgccag

SEQ ID NO: 2729649 - DNA, 25 bp, Homo sapien
ctccactgccagagatcttgaatag

SEQ ID NO: 2729650 - DNA, 25 bp, Homo sapien
cctccactgccagagatcttgaata

SEQ ID NO: 2729651 - DNA, 25 bp, Homo sapien
tcctccactgccagagatcttgaat

SEQ ID NO: 2729652 - DNA, 25 bp, Homo sapien
gtccaggttctattgccaagaatgt

SEQ ID NO: 2729653 - DNA, 25 bp, Homo sapien
ccgtcttatttcatttctgtaacag

SEQ ID NO: 2729654 - DNA, 25 bp, Homo sapien
tacatgtgaaataaaactcagtatt

SEQ ID NO: 2729655 - DNA, 25 bp, Homo sapien
tttccgtcttatttcatttctgtaa

SEQ ID NO: 2729656 - DNA, 25 bp, Homo sapien
attttccgtcttatttcatttctgt

SEQ ID NO: 2729657 - DNA, 25 bp, Homo sapien
gggagacaaaaatatacatgtgaaa

SEQ ID NO: 2729658 - DNA, 25 bp, Homo sapien
tttcacatgtatatttttgtctccc

SEQ ID NO: 2729659 - DNA, 25 bp, Homo sapien
ctgttacagaaatgaaataagacgg

SEQ ID NO: 2729660 - DNA, 25 bp, Homo sapien
aatactgagttttatttcacatgta

SEQ ID NO: 2729661 - DNA, 25 bp, Homo sapien
ttacagaaatgaaataagacggaaa

SEQ ID NO: 2729662 - DNA, 25 bp, Homo sapien
acattcttggcaatagaacctggac

SEQ ID NO: 2729663 - DNA, 25 bp, Homo sapien
acagaaatgaaataagacggaaaat

SEQ ID NO: 2729664 - DNA, 25 bp, Homo sapien
aaattctatgagaatgtccctgccc

SEQ ID NO: 2729665 - DNA, 25 bp, Homo sapien
ggagctaaccactttttcatcataa

SEQ ID NO: 2729666 - DNA, 25 bp, Homo sapien
tgtagttaggaatggcaaatagtct

SEQ ID NO: 2729667 - DNA, 25 bp, Homo sapien
taaggatttagtgctgtgttcccac

SEQ ID NO: 2729668 - DNA, 25 bp, Homo sapien
taactgctttatactttgtcaaaga

SEQ ID NO: 2729669 - DNA, 25 bp, Homo sapien
ccacctcctgatgatagttaacaat

SEQ ID NO: 2729670 - DNA, 25 bp, Homo sapien
gactatttgccattcctaactacat

SEQ ID NO: 2729671 - DNA, 25 bp, Homo sapien
cacagcactaaatccttatgatgaa

SEQ ID NO: 2729672 - DNA, 25 bp, Homo sapien
caggaggtgggaacacagcactaaa

SEQ ID NO: 2729673 - DNA, 25 bp, Homo sapien
tatgatgaaaaagtggttagctcca

SEQ ID NO: 2729674 - DNA, 25 bp, Homo sapien
attgttaactatcatcaggaggtgg

SEQ ID NO: 2729675 - DNA, 25 bp, Homo sapien
gggcagggacattctcatagaattt

SEQ ID NO: 2729676 - DNA, 25 bp, Homo sapien
tcatgtaatcagcttaaggcagaac

SEQ ID NO: 2729677 - DNA, 25 bp, Homo sapien
gcagcaagcagttggtatattaaaa

SEQ ID NO: 2729678 - DNA, 25 bp, Homo sapien
gatttcagatacacgcccaaagcag

SEQ ID NO: 2729679 - DNA, 25 bp, Homo sapien
caaggaaaacggcacagaactggag

SEQ ID NO: 2729680 - DNA, 25 bp, Homo sapien
ctagaactttcgtctgaaacagagt

SEQ ID NO: 2729681 - DNA, 25 bp, Homo sapien
gcaagtaaactgagtactgcagtct

SEQ ID NO: 2729682 - DNA, 25 bp, Homo sapien
tcagggaatctgtggaatacaaata

SEQ ID NO: 2729683 - DNA, 25 bp, Homo sapien
gagaagactcctaagattcagggaa

SEQ ID NO: 2729684 - DNA, 25 bp, Homo sapien
ccaaaggggcaggacccgcgagact

SEQ ID NO: 2729685 - DNA, 25 bp, Homo sapien
agactctcggagacgggaccggcag

SEQ ID NO: 2729686 - DNA, 25 bp, Homo sapien
acccgcgagactgaagctggtgagc

SEQ ID NO: 2729687 - DNA, 25 bp, Homo sapien
tcggagacgggaccggcagctccaa

SEQ ID NO: 2729688 - DNA, 25 bp, Homo sapien
ctgcagcgcgaaagcgtcacggccg

SEQ ID NO: 2729689 - DNA, 25 bp, Homo sapien
tggaagccgagttgcgctctccggc

SEQ ID NO: 2729690 - DNA, 25 bp, Homo sapien
gtcacggccgctccgtctgggcgcc

SEQ ID NO: 2729691 - DNA, 25 bp, Homo sapien
catgcgcggcgggtctggaagccga

SEQ ID NO: 2729692 - DNA, 25 bp, Homo sapien
agtgcaggcggagggcgctgaatac

SEQ ID NO: 2729693 - DNA, 25 bp, Homo sapien
gcaagtgcaggcggagggcgctgaa

SEQ ID NO: 2729694 - DNA, 25 bp, Homo sapien
aggcaagtgcaggcggagggcgctg

SEQ ID NO: 2729695 - DNA, 25 bp, Homo sapien
caagtgcaggcggagggcgctgaat

SEQ ID NO: 2729696 - DNA, 25 bp, Homo sapien
gcacagcagcaggaagtgtaaacac

SEQ ID NO: 2729697 - DNA, 25 bp, Homo sapien
aagcacagcagcaggaagtgtaaac

SEQ ID NO: 2729698 - DNA, 25 bp, Homo sapien
ctgtacctggaagcacagcagcagg

SEQ ID NO: 2729699 - DNA, 25 bp, Homo sapien
ggaagcacagcagcaggaagtgtaa

SEQ ID NO: 2729700 - DNA, 25 bp, Homo sapien
ttctgagcccggtagcgatggacag

SEQ ID NO: 2729701 - DNA, 25 bp, Homo sapien
attctgagcccggtagcgatggaca

SEQ ID NO: 2729702 - DNA, 25 bp, Homo sapien
cgctaagactggaccagtcctggaa

SEQ ID NO: 2729703 - DNA, 25 bp, Homo sapien
gggcccagaaactccaccgctaaga

SEQ ID NO: 2729704 - DNA, 25 bp, Homo sapien
tcaaactggagaccttcactcctct

SEQ ID NO: 2729705 - DNA, 25 bp, Homo sapien
tggcccaagggacgctctctggatt

SEQ ID NO: 2729706 - DNA, 25 bp, Homo sapien
catcgggccagccaaggctttcaga

SEQ ID NO: 2729707 - DNA, 25 bp, Homo sapien
gagtgaagctcacgttggctcccac

SEQ ID NO: 2729708 - DNA, 25 bp, Homo sapien
catgaaacccatgctcctgtctcca

SEQ ID NO: 2729709 - DNA, 25 bp, Homo sapien
atgaaacccatgctcctgtctccag

SEQ ID NO: 2729710 - DNA, 25 bp, Homo sapien
tcatgaaacccatgctcctgtctcc

SEQ ID NO: 2729711 - DNA, 25 bp, Homo sapien
caggacgacaactggttcaggccac

SEQ ID NO: 2729712 - DNA, 25 bp, Homo sapien
tattgtccacaaaaagctggggccc

SEQ ID NO: 2729713 - DNA, 25 bp, Homo sapien
gtaaggaggttggaatattgtccac

SEQ ID NO: 2729714 - DNA, 25 bp, Homo sapien
gctggggcccttgagctttctgccc

SEQ ID NO: 2729715 - DNA, 25 bp, Homo sapien
agaagaactccagtgctcctgaggc

SEQ ID NO: 2729716 - DNA, 25 bp, Homo sapien
ggtgggcatttgtccggaagactcc

SEQ ID NO: 2729717 - DNA, 25 bp, Homo sapien
ctgctcagggacagaagaactccag

SEQ ID NO: 2729718 - DNA, 25 bp, Homo sapien
ggcatttgtccggaagactccccac

SEQ ID NO: 2729719 - DNA, 25 bp, Homo sapien
tcccgagcccgcgtctggttctcca

SEQ ID NO: 2729720 - DNA, 25 bp, Homo sapien
agctgcttacggctcacatcgtccc

SEQ ID NO: 2729721 - DNA, 25 bp, Homo sapien
tgcttacggctcacatcgtcccgag

SEQ ID NO: 2729722 - DNA, 25 bp, Homo sapien
cccgcgtctggttctccacgtggat

SEQ ID NO: 2729723 - DNA, 25 bp, Homo sapien
gtttcccactggtccggctgtagag

SEQ ID NO: 2729724 - DNA, 25 bp, Homo sapien
aggacctggatgtgtttcccactgg

SEQ ID NO: 2729725 - DNA, 25 bp, Homo sapien
atcctcgccgcgggcactgatcctg

SEQ ID NO: 2729726 - DNA, 25 bp, Homo sapien
actgatcctgcggcccaggacctgg

SEQ ID NO: 2729727 - DNA, 25 bp, Homo sapien
aaattatttgtcttgttgtcacgtc

SEQ ID NO: 2729728 - DNA, 25 bp, Homo sapien
catgaggtcagtcctgccccggggc

SEQ ID NO: 2729729 - DNA, 25 bp, Homo sapien
tggacagcagatccgagggaaaacc

SEQ ID NO: 2729730 - DNA, 25 bp, Homo sapien
caccacctgggtcagcctagcacag

SEQ ID NO: 2729731 - DNA, 25 bp, Homo sapien
gggtcagcctagcacagccaggcgt

SEQ ID NO: 2729732 - DNA, 25 bp, Homo sapien
gccactggacagcagatccgaggga

SEQ ID NO: 2729733 - DNA, 25 bp, Homo sapien
gggtcggaggagtacagaaacatat

SEQ ID NO: 2729734 - DNA, 25 bp, Homo sapien
ggcctcatctgtgtttctaatgtgg

SEQ ID NO: 2729735 - DNA, 25 bp, Homo sapien
gtggcatttaaatggagcagcagca

SEQ ID NO: 2729736 - DNA, 25 bp, Homo sapien
tctaatgtggcatttaaatggagca

SEQ ID NO: 2729737 - DNA, 25 bp, Homo sapien
ggagccagtacctgatggcagttcc

SEQ ID NO: 2729738 - DNA, 25 bp, Homo sapien
acagcagacaggagtaccgcttctt

SEQ ID NO: 2729739 - DNA, 25 bp, Homo sapien
ggagtaccgcttcttccctcaggtc

SEQ ID NO: 2729740 - DNA, 25 bp, Homo sapien
tggagccagtacctgatggcagttc

SEQ ID NO: 2729741 - DNA, 25 bp, Homo sapien
aaaccaatagggttcatcgggagct

SEQ ID NO: 2729742 - DNA, 25 bp, Homo sapien
tgtttaaccctagctgtagctctag

SEQ ID NO: 2729743 - DNA, 25 bp, Homo sapien
ctagcatagccgtgtcagtcaaggg

SEQ ID NO: 2729744 - DNA, 25 bp, Homo sapien
catcgggagctctgtttaaccctag

SEQ ID NO: 2729745 - DNA, 25 bp, Homo sapien
cgcaaagatcccagtgctgacagag

SEQ ID NO: 2729746 - DNA, 25 bp, Homo sapien
aagatcccagtgctgacagagctgc

SEQ ID NO: 2729747 - DNA, 25 bp, Homo sapien
ctgcgagggctggacggtagctggc

SEQ ID NO: 2729748 - DNA, 25 bp, Homo sapien
gccagccgcaaagatcccagtgctg

SEQ ID NO: 2729749 - DNA, 25 bp, Homo sapien
aaggtttcagatctgatgaagagga

SEQ ID NO: 2729750 - DNA, 25 bp, Homo sapien
agaaggtttcagatctgatgaagag

SEQ ID NO: 2729751 - DNA, 25 bp, Homo sapien
tgataccgggagatgggaaaccctc

SEQ ID NO: 2729752 - DNA, 25 bp, Homo sapien
ggagatgggaaaccctcaggaccac

SEQ ID NO: 2729753 - DNA, 25 bp, Homo sapien
gggtatgcaggatattccactgccg

SEQ ID NO: 2729754 - DNA, 25 bp, Homo sapien
tgcagggcaaacatctggagcccct

SEQ ID NO: 2729755 - DNA, 25 bp, Homo sapien
catggaggccaccaaagctgaaggg

SEQ ID NO: 2729756 - DNA, 25 bp, Homo sapien
gcctattcatagcaggaagggcaca

SEQ ID NO: 2729757 - DNA, 25 bp, Homo sapien
tccccaaatcaggacagatgccata

SEQ ID NO: 2729758 - DNA, 25 bp, Homo sapien
cccaaatcaggacagatgccataca

SEQ ID NO: 2729759 - DNA, 25 bp, Homo sapien
ccccaaatcaggacagatgccatac

SEQ ID NO: 2729760 - DNA, 25 bp, Homo sapien
ccaaatcaggacagatgccatacaa

SEQ ID NO: 2729761 - DNA, 25 bp, Homo sapien
caaagcaggacagacggccatacaa

SEQ ID NO: 2729762 - DNA, 25 bp, Homo sapien
aaagcaggacagacggccatacaaa

SEQ ID NO: 2729763 - DNA, 25 bp, Homo sapien
ccaaagcaggacagacggccataca

SEQ ID NO: 2729764 - DNA, 25 bp, Homo sapien
tcccaaagcaggacagacggccata

SEQ ID NO: 2729765 - DNA, 25 bp, Homo sapien
cccatcgtcacccaccttccctagc

SEQ ID NO: 2729766 - DNA, 25 bp, Homo sapien
tgccccctgtggctgaacaccagtg

SEQ ID NO: 2729767 - DNA, 25 bp, Homo sapien
accagtgtgcccttctacccatcgt

SEQ ID NO: 2729768 - DNA, 25 bp, Homo sapien
gctccagccagaagggagttctgcc

SEQ ID NO: 2729769 - DNA, 25 bp, Homo sapien
ggagatggaagctgcctatcacctg

SEQ ID NO: 2729770 - DNA, 25 bp, Homo sapien
ccctgcccctcaggcagggagatgg

SEQ ID NO: 2729771 - DNA, 25 bp, Homo sapien
gaagctgcctatcacctgttccctt

SEQ ID NO: 2729772 - DNA, 25 bp, Homo sapien
gatggaagctgcctatcacctgttc

SEQ ID NO: 2729773 - DNA, 25 bp, Homo sapien
ggcaatggcttggtctaaaggctca

SEQ ID NO: 2729774 - DNA, 25 bp, Homo sapien
cattttattaccaggggcaatggct

SEQ ID NO: 2729775 - DNA, 25 bp, Homo sapien
gcaatggcttggtctaaaggctcag

SEQ ID NO: 2729776 - DNA, 25 bp, Homo sapien
acattttattaccaggggcaatggc

SEQ ID NO: 2729777 - DNA, 25 bp, Homo sapien
taccgaaggtgtctgtctccactag

SEQ ID NO: 2729778 - DNA, 25 bp, Homo sapien
tctccttgcccttgatccggacttg

SEQ ID NO: 2729779 - DNA, 25 bp, Homo sapien
acaggtagaattccgtctccttgcc

SEQ ID NO: 2729780 - DNA, 25 bp, Homo sapien
gcctttgcggttcatgcacaggtag

SEQ ID NO: 2729781 - DNA, 25 bp, Homo sapien
cacacacacggcctgttttccattt

SEQ ID NO: 2729782 - DNA, 25 bp, Homo sapien
tccatttgggactgacagtgccctg

SEQ ID NO: 2729783 - DNA, 25 bp, Homo sapien
ttttccatttgggactgacagtgcc

SEQ ID NO: 2729784 - DNA, 25 bp, Homo sapien
cagtgccctggacacattgttccag

SEQ ID NO: 2729785 - DNA, 25 bp, Homo sapien
aattgttaaaacgatcgatgcagcc

SEQ ID NO: 2729786 - DNA, 25 bp, Homo sapien
aatgctagaaccaagaggcccagcg

SEQ ID NO: 2729787 - DNA, 25 bp, Homo sapien
caaactgcatatgggagtcagtccc

SEQ ID NO: 2729788 - DNA, 25 bp, Homo sapien
ccaggttccagaggtcactgctgca

SEQ ID NO: 2729789 - DNA, 25 bp, Homo sapien
aaatcaaaaacatggcttcagcaag

SEQ ID NO: 2729790 - DNA, 25 bp, Homo sapien
caaaaacatggcttcagcaagactg

SEQ ID NO: 2729791 - DNA, 25 bp, Homo sapien
ccccaacaagatgtaatgaaccgca

SEQ ID NO: 2729792 - DNA, 25 bp, Homo sapien
gaaccgcaaataatcagccagggca

SEQ ID NO: 2729793 - DNA, 25 bp, Homo sapien
cagaaagtcagtgctcaattagcgg

SEQ ID NO: 2729794 - DNA, 25 bp, Homo sapien
ttaacaaaataatgcgacaatgccc

SEQ ID NO: 2729795 - DNA, 25 bp, Homo sapien
gcggaagctattatgacagtaatta

SEQ ID NO: 2729796 - DNA, 25 bp, Homo sapien
acaaaataatgcgacaatgccctgg

SEQ ID NO: 2729797 - DNA, 25 bp, Homo sapien
ctcctcgttacggacggatgcccag

SEQ ID NO: 2729798 - DNA, 25 bp, Homo sapien
gagggcaagcttgggccctccagac

SEQ ID NO: 2729799 - DNA, 25 bp, Homo sapien
gactgaggtgcgagttccagccttt

SEQ ID NO: 2729800 - DNA, 25 bp, Homo sapien
gagcttccaggaacgttcacctttg

SEQ ID NO: 2729801 - DNA, 25 bp, Homo sapien
ttgccaaagcacagcgaggaaggtt

SEQ ID NO: 2729802 - DNA, 25 bp, Homo sapien
ccaaggagcagagtggaaaatgact

SEQ ID NO: 2729803 - DNA, 25 bp, Homo sapien
gaccattgcgattgttgtagggaca

SEQ ID NO: 2729804 - DNA, 25 bp, Homo sapien
taactctgaatatggcacaggcagg

SEQ ID NO: 2729805 - DNA, 25 bp, Homo sapien
aagcccacgtaccagccggagtact

SEQ ID NO: 2729806 - DNA, 25 bp, Homo sapien
tagccgacatcagggccgtgtagtt

SEQ ID NO: 2729807 - DNA, 25 bp, Homo sapien
taccagccggagtacttagccgaca

SEQ ID NO: 2729808 - DNA, 25 bp, Homo sapien
gagtacttagccgacatcagggccg

SEQ ID NO: 2729809 - DNA, 25 bp, Homo sapien
ccccttggggtagcgcttcatgaaa

SEQ ID NO: 2729810 - DNA, 25 bp, Homo sapien
cggatccgacgggacctcttggtca

SEQ ID NO: 2729811 - DNA, 25 bp, Homo sapien
ttctgaagctccggctgccccttgg

SEQ ID NO: 2729812 - DNA, 25 bp, Homo sapien
caccgtcgtgtacttgaagggcttc

SEQ ID NO: 2729813 - DNA, 25 bp, Homo sapien
ggccagggcgacctgaggggccgcg

SEQ ID NO: 2729814 - DNA, 25 bp, Homo sapien
cagggcgacctgaggggccgcggcg

SEQ ID NO: 2729815 - DNA, 25 bp, Homo sapien
cctctgatgcagttttctgggagtg

SEQ ID NO: 2729816 - DNA, 25 bp, Homo sapien
gagtgtggccagggcgacctgaggg

SEQ ID NO: 2729817 - DNA, 25 bp, Homo sapien
ttgtcttcttttaaacacaatgtac

SEQ ID NO: 2729818 - DNA, 25 bp, Homo sapien
acacaatgtacaaaaatagagcttc

SEQ ID NO: 2729819 - DNA, 25 bp, Homo sapien
caatgtacaaaaatagagcttcttc

SEQ ID NO: 2729820 - DNA, 25 bp, Homo sapien
tttgtcttcttttaaacacaatgta

SEQ ID NO: 2729821 - DNA, 25 bp, Homo sapien
gacaagcacctgtgggttgactaca

SEQ ID NO: 2729822 - DNA, 25 bp, Homo sapien
tcaccatgattggacgaggcgtctg

SEQ ID NO: 2729823 - DNA, 25 bp, Homo sapien
tcacggaaggtcgatagcagcatcc

SEQ ID NO: 2729824 - DNA, 25 bp, Homo sapien
tgttggtgggcggagtactactttc

SEQ ID NO: 2729825 - DNA, 25 bp, Homo sapien
tcttggataaatccccagggtcgag

SEQ ID NO: 2729826 - DNA, 25 bp, Homo sapien
tgaagaggccactgaatcaatgacc

SEQ ID NO: 2729827 - DNA, 25 bp, Homo sapien
ggtcgagaatcgagccttggcacat

SEQ ID NO: 2729828 - DNA, 25 bp, Homo sapien
ttagaatggaatctcccggaaagca

SEQ ID NO: 2729829 - DNA, 25 bp, Homo sapien
gatggcagcccatcaaaccgtggaa

SEQ ID NO: 2729830 - DNA, 25 bp, Homo sapien
caaaccgtggaaattctgacctagg

SEQ ID NO: 2729831 - DNA, 25 bp, Homo sapien
caaggtccgcgcgttaggggacaca

SEQ ID NO: 2729832 - DNA, 25 bp, Homo sapien
acatgtgcaggcgatggcagcccat

SEQ ID NO: 2729833 - DNA, 25 bp, Homo sapien
tgaagcccactgtcagctgttccct

SEQ ID NO: 2729834 - DNA, 25 bp, Homo sapien
ctgaagcccactgtcagctgttccc

SEQ ID NO: 2729835 - DNA, 25 bp, Homo sapien
cctgaagcccactgtcagctgttcc

SEQ ID NO: 2729836 - DNA, 25 bp, Homo sapien
tttgcaagtctgcatcttctttgga

SEQ ID NO: 2729837 - DNA, 25 bp, Homo sapien
cttttgcaagtctgcatcttctttg

SEQ ID NO: 2729838 - DNA, 25 bp, Homo sapien
ctttggaatgtttacaatgtgtttg

SEQ ID NO: 2729839 - DNA, 25 bp, Homo sapien
tgcaagtctgcatcttctttggaat

SEQ ID NO: 2729840 - DNA, 25 bp, Homo sapien
tccagtgcggtggtgccgagttcca

SEQ ID NO: 2729841 - DNA, 25 bp, Homo sapien
gagttccaccttctcacggtgggca

SEQ ID NO: 2729842 - DNA, 25 bp, Homo sapien
ctgaagtggcaacgcgtgctccagt

SEQ ID NO: 2729843 - DNA, 25 bp, Homo sapien
taattgtagtatttgccccacggcg

SEQ ID NO: 2729844 - DNA, 25 bp, Homo sapien
ctgggacacgagtgggtgtggccca

SEQ ID NO: 2729845 - DNA, 25 bp, Homo sapien
tgggacacgagtgggtgtggcccat

SEQ ID NO: 2729846 - DNA, 25 bp, Homo sapien
cccagcgcccaaagttgtgtccttg

SEQ ID NO: 2729847 - DNA, 25 bp, Homo sapien
ggaaagtgccgccaacaatcatttc

SEQ ID NO: 2729848 - DNA, 25 bp, Homo sapien
taatcggtaatgcttggaaagtgcc

SEQ ID NO: 2729849 - DNA, 25 bp, Homo sapien
ccttggcagaaatcaagagcatctg

SEQ ID NO: 2729850 - DNA, 25 bp, Homo sapien
tccttccagccctgaattctctgat

SEQ ID NO: 2729851 - DNA, 25 bp, Homo sapien
gccctgaattctctgatcctcagtt

SEQ ID NO: 2729852 - DNA, 25 bp, Homo sapien
tggccccaagaccttccttccagcc

SEQ ID NO: 2729853 - DNA, 25 bp, Homo sapien
tcgaaagaccaaggctttggcccca

SEQ ID NO: 2729854 - DNA, 25 bp, Homo sapien
gcagaagagatgaccctgggccgtc

SEQ ID NO: 2729855 - DNA, 25 bp, Homo sapien
gctattcaggcagaagagatgaccc

SEQ ID NO: 2729856 - DNA, 25 bp, Homo sapien
gaagagatgaccctgggccgtctcc

SEQ ID NO: 2729857 - DNA, 25 bp, Homo sapien
ttcaggcagaagagatgaccctggg

SEQ ID NO: 2729858 - DNA, 25 bp, Homo sapien
tgagccctgcctgacccaaaactca

SEQ ID NO: 2729859 - DNA, 25 bp, Homo sapien
tggaagacgccagccgcaaccagtg

SEQ ID NO: 2729860 - DNA, 25 bp, Homo sapien
acctccactgttgctccttgctctg

SEQ ID NO: 2729861 - DNA, 25 bp, Homo sapien
cacactgcctgttctggcagccttt

SEQ ID NO: 2729862 - DNA, 25 bp, Homo sapien
cgttcagggacccaacactgagaga

SEQ ID NO: 2729863 - DNA, 25 bp, Homo sapien
gcctcgagtcagagcccttgttcca

SEQ ID NO: 2729864 - DNA, 25 bp, Homo sapien
tactttcagggcctcgcaagcccgt

SEQ ID NO: 2729865 - DNA, 25 bp, Homo sapien
tgttccaaacccaacaatgccctgg

SEQ ID NO: 2729866 - DNA, 25 bp, Homo sapien
tcggtatgatttcgctctataaaac

SEQ ID NO: 2729867 - DNA, 25 bp, Homo sapien
gggatgtgtttctattaaagctggg

SEQ ID NO: 2729868 - DNA, 25 bp, Homo sapien
acacagaggagacctcggtatgatt

SEQ ID NO: 2729869 - DNA, 25 bp, Homo sapien
ggagacctcggtatgatttcgctct

SEQ ID NO: 2729870 - DNA, 25 bp, Homo sapien
tgcccgctccgtccccagactgttc

SEQ ID NO: 2729871 - DNA, 25 bp, Homo sapien
cttcttcaccggcagccctctctct

SEQ ID NO: 2729872 - DNA, 25 bp, Homo sapien
atggctgcagcccagattccacggc

SEQ ID NO: 2729873 - DNA, 25 bp, Homo sapien
tcttcaccggcagccctctctctgt

SEQ ID NO: 2729874 - DNA, 25 bp, Homo sapien
ttggtcatcgaaggggcctcctccc

SEQ ID NO: 2729875 - DNA, 25 bp, Homo sapien
gagctggttggtcatcgaaggggcc

SEQ ID NO: 2729876 - DNA, 25 bp, Homo sapien
tcaggccagccacaaactcccatct

SEQ ID NO: 2729877 - DNA, 25 bp, Homo sapien
gctcaggccagccacaaactcccat

SEQ ID NO: 2729878 - DNA, 25 bp, Homo sapien
gtgaacatgagagaactgcaaccag

SEQ ID NO: 2729879 - DNA, 25 bp, Homo sapien
aagggaatggctccctgtttgcact

SEQ ID NO: 2729880 - DNA, 25 bp, Homo sapien
gagccaattttatgacatccagtga

SEQ ID NO: 2729881 - DNA, 25 bp, Homo sapien
tatagacttcatcttagggcctgca

SEQ ID NO: 2729882 - DNA, 25 bp, Homo sapien
cataacaattgcaaccaactggaca

SEQ ID NO: 2729883 - DNA, 25 bp, Homo sapien
cactcactgactgatggccccataa

SEQ ID NO: 2729884 - DNA, 25 bp, Homo sapien
tccgcctggttacctcggtatgaat

SEQ ID NO: 2729885 - DNA, 25 bp, Homo sapien
gaatcttccgctggccaattacaca

SEQ ID NO: 2729886 - DNA, 25 bp, Homo sapien
tcggttctgggctctagtgcaggct

SEQ ID NO: 2729887 - DNA, 25 bp, Homo sapien
ggttgaagaggagtccatcagaaag

SEQ ID NO: 2729888 - DNA, 25 bp, Homo sapien
aagaagggagtcttgactaagcatc

SEQ ID NO: 2729889 - DNA, 25 bp, Homo sapien
tgggctctagtgcaggctcatggaa

SEQ ID NO: 2729890 - DNA, 25 bp, Homo sapien
gacatttagtcgcactgttttccat

SEQ ID NO: 2729891 - DNA, 25 bp, Homo sapien
gatagagctcggtatagggcagcca

SEQ ID NO: 2729892 - DNA, 25 bp, Homo sapien
ggcccatagtggcagcttggcttca

SEQ ID NO: 2729893 - DNA, 25 bp, Homo sapien
gggcccttttcggaagctctcctga

SEQ ID NO: 2729894 - DNA, 25 bp, Homo sapien
agaaagaacagtccagagcaccgca

SEQ ID NO: 2729895 - DNA, 25 bp, Homo sapien
agcaaagcaaaaactcgcatgcaag

SEQ ID NO: 2729896 - DNA, 25 bp, Homo sapien
ccagagcaccgcaggaagccctttg

SEQ ID NO: 2729897 - DNA, 25 bp, Homo sapien
gcaaaaactcgcatgcaagcccagg

SEQ ID NO: 2729898 - DNA, 25 bp, Homo sapien
gtctgctctgcaaaactcatgtggc

SEQ ID NO: 2729899 - DNA, 25 bp, Homo sapien
tttcaatgaggaaggaaccaacagg

SEQ ID NO: 2729900 - DNA, 25 bp, Homo sapien
tcacatcgctaggaagcaacagctg

SEQ ID NO: 2729901 - DNA, 25 bp, Homo sapien
cagctgaagctaactccggtgcctt

SEQ ID NO: 2729902 - DNA, 25 bp, Homo sapien
gaaccaagtctggagtatgcaaagc

SEQ ID NO: 2729903 - DNA, 25 bp, Homo sapien
agggaagattttcatgcctgtttca

SEQ ID NO: 2729904 - DNA, 25 bp, Homo sapien
cataagcgaagaccccgaggccttg

SEQ ID NO: 2729905 - DNA, 25 bp, Homo sapien
catgcctgtttcataagcgaagacc

SEQ ID NO: 2729906 - DNA, 25 bp, Homo sapien
gattttcatgcctgtttcataagcg

SEQ ID NO: 2729907 - DNA, 25 bp, Homo sapien
ttctctgagatgtctccacaaatcc

SEQ ID NO: 2729908 - DNA, 25 bp, Homo sapien
cactgtgcacttgtgagcaatagtt

SEQ ID NO: 2729909 - DNA, 25 bp, Homo sapien
tagtttgtggtcatggacttctctg

SEQ ID NO: 2729910 - DNA, 25 bp, Homo sapien
cgccggtgctccttgtatgaagtct

SEQ ID NO: 2729911 - DNA, 25 bp, Homo sapien
gagagtgattgtcggctgtccccat

SEQ ID NO: 2729912 - DNA, 25 bp, Homo sapien
gggctcatggccatatctgtggcca

SEQ ID NO: 2729913 - DNA, 25 bp, Homo sapien
ggtaaactgagtcgcctcaggagag

SEQ ID NO: 2729914 - DNA, 25 bp, Homo sapien
caggtaagcctggatataggtaaac

SEQ ID NO: 2729915 - DNA, 25 bp, Homo sapien
tgccagtgagcagaacatcgatccc

SEQ ID NO: 2729916 - DNA, 25 bp, Homo sapien
gagcagaacatcgatcccctgggtc

SEQ ID NO: 2729917 - DNA, 25 bp, Homo sapien
cagtgagcagaacatcgatcccctg

SEQ ID NO: 2729918 - DNA, 25 bp, Homo sapien
gtgccagtgagcagaacatcgatcc

SEQ ID NO: 2729919 - DNA, 25 bp, Homo sapien
caactgtggcatgagtttgtcagcg

SEQ ID NO: 2729920 - DNA, 25 bp, Homo sapien
tggcttctaacgctccccaacaggt

SEQ ID NO: 2729921 - DNA, 25 bp, Homo sapien
gtttgtcagcgtgttttgcagaagc

SEQ ID NO: 2729922 - DNA, 25 bp, Homo sapien
tctttggtaactgggcacagagcca

SEQ ID NO: 2729923 - DNA, 25 bp, Homo sapien
cctttttctggtcctaaatgtctgc

SEQ ID NO: 2729924 - DNA, 25 bp, Homo sapien
tttttctggtcctaaatgtctgctc

SEQ ID NO: 2729925 - DNA, 25 bp, Homo sapien
ttttctggtcctaaatgtctgctca

SEQ ID NO: 2729926 - DNA, 25 bp, Homo sapien
tttctggtcctaaatgtctgctcat

SEQ ID NO: 2729927 - DNA, 25 bp, Homo sapien
ccaacagcgttccagtaaattagcc

SEQ ID NO: 2729928 - DNA, 25 bp, Homo sapien
tcaagccttgtcttcctgtggttcc

SEQ ID NO: 2729929 - DNA, 25 bp, Homo sapien
catcaaaagtttgcccatgtcttgg

SEQ ID NO: 2729930 - DNA, 25 bp, Homo sapien
tggacaaactgcaaggaagaatact

SEQ ID NO: 2729931 - DNA, 25 bp, Homo sapien
caagtccaggggagacctccctcac

SEQ ID NO: 2729932 - DNA, 25 bp, Homo sapien
tctccaagtccaggggagacctccc

SEQ ID NO: 2729933 - DNA, 25 bp, Homo sapien
tccaagtccaggggagacctccctc

SEQ ID NO: 2729934 - DNA, 25 bp, Homo sapien
ttctccaagtccaggggagacctcc

SEQ ID NO: 2729935 - DNA, 25 bp, Homo sapien
cacatcctctggttcggaagtgcag

SEQ ID NO: 2729936 - DNA, 25 bp, Homo sapien
ctgtgagcgagggtggacaggaacc

SEQ ID NO: 2729937 - DNA, 25 bp, Homo sapien
gaagtgcagaatcgatggtgtcctc

SEQ ID NO: 2729938 - DNA, 25 bp, Homo sapien
tctggttcggaagtgcagaatcgat

SEQ ID NO: 2729939 - DNA, 25 bp, Homo sapien
tctccaggttccggatagtggatgt

SEQ ID NO: 2729940 - DNA, 25 bp, Homo sapien
aggttccggatagtggatgtggtgg

SEQ ID NO: 2729941 - DNA, 25 bp, Homo sapien
ctccaggttccggatagtggatgtg

SEQ ID NO: 2729942 - DNA, 25 bp, Homo sapien
ccaggttccggatagtggatgtggt

SEQ ID NO: 2729943 - DNA, 25 bp, Homo sapien
gtccctatccagaggccaaaggtca

SEQ ID NO: 2729944 - DNA, 25 bp, Homo sapien
gagggtccctatccagaggccaaag

SEQ ID NO: 2729945 - DNA, 25 bp, Homo sapien
cggcaggagggtccctatccagagg

SEQ ID NO: 2729946 - DNA, 25 bp, Homo sapien
agaatggaaccacaaagaaggggca

SEQ ID NO: 2729947 - DNA, 25 bp, Homo sapien
tctgctgcttactgagggacagcca

SEQ ID NO: 2729948 - DNA, 25 bp, Homo sapien
tctcagagccgtctcgcgtgtaact

SEQ ID NO: 2729949 - DNA, 25 bp, Homo sapien
taagggttgccatatccagattgtg

SEQ ID NO: 2729950 - DNA, 25 bp, Homo sapien
gccaccggcttgtgtttatggaaca

SEQ ID NO: 2729951 - DNA, 25 bp, Homo sapien
ttccactcgaggacgtgttcttgaa

SEQ ID NO: 2729952 - DNA, 25 bp, Homo sapien
ggcatcttctttggcgttccactcg

SEQ ID NO: 2729953 - DNA, 25 bp, Homo sapien
tctttggcgttccactcgaggacgt

SEQ ID NO: 2729954 - DNA, 25 bp, Homo sapien
ggagcgcgctctggcccctagagca

SEQ ID NO: 2729955 - DNA, 25 bp, Homo sapien
cctcgtattgatgggcccgattggg

SEQ ID NO: 2729956 - DNA, 25 bp, Homo sapien
agccccagacaatccgcatgtcttt

SEQ ID NO: 2729957 - DNA, 25 bp, Homo sapien
aatccgcatgtcttttgtgcgggtc

SEQ ID NO: 2729958 - DNA, 25 bp, Homo sapien
gggtccagcccctcgtattgatggg

SEQ ID NO: 2729959 - DNA, 25 bp, Homo sapien
aatctgctgagccagcttttttgcc

SEQ ID NO: 2729960 - DNA, 25 bp, Homo sapien
ggtcttttaaatgatgagactctga

SEQ ID NO: 2729961 - DNA, 25 bp, Homo sapien
gagccagcttttttgcctgcacatg

SEQ ID NO: 2729962 - DNA, 25 bp, Homo sapien
tgaacttgccttccatccaaaatcc

SEQ ID NO: 2729963 - DNA, 25 bp, Homo sapien
tagctgttattacgattattgttac

SEQ ID NO: 2729964 - DNA, 25 bp, Homo sapien
gtagctgttattacgattattgtta

SEQ ID NO: 2729965 - DNA, 25 bp, Homo sapien
tgaccatgttccgagccacaacggt

SEQ ID NO: 2729966 - DNA, 25 bp, Homo sapien
tgctcttggtaactgctggtgacca

SEQ ID NO: 2729967 - DNA, 25 bp, Homo sapien
tggtgaccatgttccgagccacaac

SEQ ID NO: 2729968 - DNA, 25 bp, Homo sapien
gtgctcttggtaactgctggtgacc

SEQ ID NO: 2729969 - DNA, 25 bp, Homo sapien
gcatgttcagcttggcatgttcagg

SEQ ID NO: 2729970 - DNA, 25 bp, Homo sapien
gacattctgagcatgttcagcttgg

SEQ ID NO: 2729971 - DNA, 25 bp, Homo sapien
tctgagcatgttcagcttggcatgt

SEQ ID NO: 2729972 - DNA, 25 bp, Homo sapien
cattctgagcatgttcagcttggca

SEQ ID NO: 2729973 - DNA, 25 bp, Homo sapien
tgttcccatcgtaccaaacactggt

SEQ ID NO: 2729974 - DNA, 25 bp, Homo sapien
ttgacgtttagactcagcatggtga

SEQ ID NO: 2729975 - DNA, 25 bp, Homo sapien
taaacccacccaaacaagcgcatgt

SEQ ID NO: 2729976 - DNA, 25 bp, Homo sapien
gaatgaaattgctcgtaaacccacc

SEQ ID NO: 2729977 - DNA, 25 bp, Homo sapien
gctgtcagcagagagtaatgtgtat

SEQ ID NO: 2729978 - DNA, 25 bp, Homo sapien
tcagcagagagtaatgtgtataaag

SEQ ID NO: 2729979 - DNA, 25 bp, Homo sapien
gagagtaatgtgtataaaggccacc

SEQ ID NO: 2729980 - DNA, 25 bp, Homo sapien
gtaatgtgtataaaggccaccagcc

SEQ ID NO: 2729981 - DNA, 25 bp, Homo sapien
ctgttctcccgtcagcacgctcagt

SEQ ID NO: 2729982 - DNA, 25 bp, Homo sapien
gttctcccgtcagcacgctcagtcc

SEQ ID NO: 2729983 - DNA, 25 bp, Homo sapien
tgttctcccgtcagcacgctcagtc

SEQ ID NO: 2729984 - DNA, 25 bp, Homo sapien
ctctgttctcccgtcagcacgctca

SEQ ID NO: 2729985 - DNA, 25 bp, Homo sapien
caatttccatccatgggttgaaagc

SEQ ID NO: 2729986 - DNA, 25 bp, Homo sapien
tttccatgtgggtaattgtggtcat

SEQ ID NO: 2729987 - DNA, 25 bp, Homo sapien
caagccgttttgtacacgtcacata

SEQ ID NO: 2729988 - DNA, 25 bp, Homo sapien
tgaagctgaggccactacatgtgtg

SEQ ID NO: 2729989 - DNA, 25 bp, Homo sapien
gtgacgtccctgaccttctcttcag

SEQ ID NO: 2729990 - DNA, 25 bp, Homo sapien
aaggagggcaagtgacgtccctgac

SEQ ID NO: 2729991 - DNA, 25 bp, Homo sapien
caagtgacgtccctgaccttctctt

SEQ ID NO: 2729992 - DNA, 25 bp, Homo sapien
gagggcaagtgacgtccctgacctt

SEQ ID NO: 2729993 - DNA, 25 bp, Homo sapien
ccttgtgaggtatgcgctggtccct

SEQ ID NO: 2729994 - DNA, 25 bp, Homo sapien
agagtgatcatcgagagaacctgca

SEQ ID NO: 2729995 - DNA, 25 bp, Homo sapien
gaactggtctatcccctgaaccaag

SEQ ID NO: 2729996 - DNA, 25 bp, Homo sapien
gaatggtgtccgctgcacctggaac

SEQ ID NO: 2729997 - DNA, 25 bp, Homo sapien
gtgctgctaaggtacatataagaat

SEQ ID NO: 2729998 - DNA, 25 bp, Homo sapien
catccttggtaaatctgaggagaat

SEQ ID NO: 2729999 - DNA, 25 bp, Homo sapien
cccaggcatccttggtaaatctgag

SEQ ID NO: 2730000 - DNA, 25 bp, Homo sapien
tcctctgtatttgtgctgctaaggt

SEQ ID NO: 2730001 - DNA, 25 bp, Homo sapien
tgctaatagcttcaatatgaggctg

SEQ ID NO: 2730002 - DNA, 25 bp, Homo sapien
cagcatgcgctccttgaaagtgcta

SEQ ID NO: 2730003 - DNA, 25 bp, Homo sapien
ctccttgaaagtgctaatagcttca

SEQ ID NO: 2730004 - DNA, 25 bp, Homo sapien
agtgctaatagcttcaatatgaggc

SEQ ID NO: 2730005 - DNA, 25 bp, Homo sapien
taggcgccctcctccagtgtctgtt

SEQ ID NO: 2730006 - DNA, 25 bp, Homo sapien
aggcgccctcctccagtgtctgttt

SEQ ID NO: 2730007 - DNA, 25 bp, Homo sapien
ctaggcgccctcctccagtgtctgt

SEQ ID NO: 2730008 - DNA, 25 bp, Homo sapien
tacacaaatgccactttctaagatc

SEQ ID NO: 2730009 - DNA, 25 bp, Homo sapien
ttacacaaatgccactttctaagat

SEQ ID NO: 2730010 - DNA, 25 bp, Homo sapien
tgttacacaaatgccactttctaag

SEQ ID NO: 2730011 - DNA, 25 bp, Homo sapien
ctgttacacaaatgccactttctaa

SEQ ID NO: 2730012 - DNA, 25 bp, Homo sapien
ggctctacttggtgcttttcagcga

SEQ ID NO: 2730013 - DNA, 25 bp, Homo sapien
caaaaggaccggtgatgtgctggca

SEQ ID NO: 2730014 - DNA, 25 bp, Homo sapien
taatgactaacgtgatggccaagac

SEQ ID NO: 2730015 - DNA, 25 bp, Homo sapien
aaatggatgcgcatgactgctgctc

SEQ ID NO: 2730016 - DNA, 25 bp, Homo sapien
tcatgtcatggctgcaaaatagttg

SEQ ID NO: 2730017 - DNA, 25 bp, Homo sapien
tagacatcacgccttcactggacag

SEQ ID NO: 2730018 - DNA, 25 bp, Homo sapien
gctctgccgtccatagcctgttgct

SEQ ID NO: 2730019 - DNA, 25 bp, Homo sapien
tagttgtggtggctctagacatcac

SEQ ID NO: 2730020 - DNA, 25 bp, Homo sapien
cagcagcatttgactctttctggag

SEQ ID NO: 2730021 - DNA, 25 bp, Homo sapien
gcagcatttgactctttctggagca

SEQ ID NO: 2730022 - DNA, 25 bp, Homo sapien
ctcagcagcatttgactctttctgg

SEQ ID NO: 2730023 - DNA, 25 bp, Homo sapien
ctttttctcagcagcatttgactct

SEQ ID NO: 2730024 - DNA, 25 bp, Homo sapien
gaggagagtgatggctttacacttg

SEQ ID NO: 2730025 - DNA, 25 bp, Homo sapien
catggtggccacgagccagaacttt

SEQ ID NO: 2730026 - DNA, 25 bp, Homo sapien
tggccacgagccagaactttggctg

SEQ ID NO: 2730027 - DNA, 25 bp, Homo sapien
ggatctgcatggtggccacgagcca

SEQ ID NO: 2730028 - DNA, 25 bp, Homo sapien
ttgggaaagggtaggtttcatgagc

SEQ ID NO: 2730029 - DNA, 25 bp, Homo sapien
ggatacctctatgggacataatgca

SEQ ID NO: 2730030 - DNA, 25 bp, Homo sapien
acctctatgggacataatgcatttg

SEQ ID NO: 2730031 - DNA, 25 bp, Homo sapien
gctgaaggatacctctatgggacat

SEQ ID NO: 2730032 - DNA, 25 bp, Homo sapien
gggttgctgaaggatacctctatgg

SEQ ID NO: 2730033 - DNA, 25 bp, Homo sapien
ctgtcccagaaaggagttctggtgg

SEQ ID NO: 2730034 - DNA, 25 bp, Homo sapien
tgtcccagaaaggagttctggtggg

SEQ ID NO: 2730035 - DNA, 25 bp, Homo sapien
tcccagaaaggagttctggtgggtc

SEQ ID NO: 2730036 - DNA, 25 bp, Homo sapien
ctttatctgtttcccctgtcctatt

SEQ ID NO: 2730037 - DNA, 25 bp, Homo sapien
ctggtgtgggcgggggactggcaga

SEQ ID NO: 2730038 - DNA, 25 bp, Homo sapien
cagagggtctagtacagcactgggt

SEQ ID NO: 2730039 - DNA, 25 bp, Homo sapien
agtagctggtgtgggcgggggactg

SEQ ID NO: 2730040 - DNA, 25 bp, Homo sapien
ctggcagagggtctagtacagcact

SEQ ID NO: 2730041 - DNA, 25 bp, Homo sapien
gccccttctccgttcaagcagctgg

SEQ ID NO: 2730042 - DNA, 25 bp, Homo sapien
cttctccgttcaagcagctgggctg

SEQ ID NO: 2730043 - DNA, 25 bp, Homo sapien
cccttctccgttcaagcagctgggc

SEQ ID NO: 2730044 - DNA, 25 bp, Homo sapien
ctgccccttctccgttcaagcagct

SEQ ID NO: 2730045 - DNA, 25 bp, Homo sapien
atctctgtgctcaagtacagcacca

SEQ ID NO: 2730046 - DNA, 25 bp, Homo sapien
caagtacagcaccaagatcagcaat

SEQ ID NO: 2730047 - DNA, 25 bp, Homo sapien
caagattctggtagtagttacattc

SEQ ID NO: 2730048 - DNA, 25 bp, Homo sapien
ctgcaagattctggtagtagttaca

SEQ ID NO: 2730049 - DNA, 25 bp, Homo sapien
tgatcctttctgacacctcccaact

SEQ ID NO: 2730050 - DNA, 25 bp, Homo sapien
aactgcaagattctggtagtagtta

SEQ ID NO: 2730051 - DNA, 25 bp, Homo sapien
tgagggctcgttggtctgatattca

SEQ ID NO: 2730052 - DNA, 25 bp, Homo sapien
aggtcccacgctagctgctccagct

SEQ ID NO: 2730053 - DNA, 25 bp, Homo sapien
taacttctccgagaagacatgcaac

SEQ ID NO: 2730054 - DNA, 25 bp, Homo sapien
ctttatcggttcttctgagggctcg

SEQ ID NO: 2730055 - DNA, 25 bp, Homo sapien
ttttatatgtggagcagtgctcctc

SEQ ID NO: 2730056 - DNA, 25 bp, Homo sapien
gtgtggctctcccagaagagcatcc

SEQ ID NO: 2730057 - DNA, 25 bp, Homo sapien
tctgccccgcttagagaaatctcta

SEQ ID NO: 2730058 - DNA, 25 bp, Homo sapien
tttcttgcctgactggaacttcaag

SEQ ID NO: 2730059 - DNA, 25 bp, Homo sapien
ttcaagagtcagagctctgccccgc

SEQ ID NO: 2730060 - DNA, 25 bp, Homo sapien
tagagaaatctctagcaacccctcc

SEQ ID NO: 2730061 - DNA, 25 bp, Homo sapien
tcgctttgctgatccctctctacag

SEQ ID NO: 2730062 - DNA, 25 bp, Homo sapien
tccaagacacgacttggctggtgcg

SEQ ID NO: 2730063 - DNA, 25 bp, Homo sapien
catccaagacacgacttggctggtg

SEQ ID NO: 2730064 - DNA, 25 bp, Homo sapien
ctactgatcgctttgctgatccctc

SEQ ID NO: 2730065 - DNA, 25 bp, Homo sapien
tcccggttctctgccctcaatggtg

SEQ ID NO: 2730066 - DNA, 25 bp, Homo sapien
gattcaatgagattcaaatcccggt

SEQ ID NO: 2730067 - DNA, 25 bp, Homo sapien
tcaatggtggttcagtgcttgtacc

SEQ ID NO: 2730068 - DNA, 25 bp, Homo sapien
cctgtgccctggagattggattcaa

SEQ ID NO: 2730069 - DNA, 25 bp, Homo sapien
gagaccctgagacagatttgcaagc

SEQ ID NO: 2730070 - DNA, 25 bp, Homo sapien
tgaaccatgatgcagttgcagcagg

SEQ ID NO: 2730071 - DNA, 25 bp, Homo sapien
gagagaagcaagactgagccaatgg

SEQ ID NO: 2730072 - DNA, 25 bp, Homo sapien
gggccttggtgtcctagcactaaca

SEQ ID NO: 2730073 - DNA, 25 bp, Homo sapien
gctctcctgcagaaaatgagagtct

SEQ ID NO: 2730074 - DNA, 25 bp, Homo sapien
cctgtgaagttctgagcccaatcca

SEQ ID NO: 2730075 - DNA, 25 bp, Homo sapien
tctccctgtgaagttctgagcccaa

SEQ ID NO: 2730076 - DNA, 25 bp, Homo sapien
cctgcagaaaatgagagtctctgtg

SEQ ID NO: 2730077 - DNA, 25 bp, Homo sapien
cctttagcagggagcaatgggccac

SEQ ID NO: 2730078 - DNA, 25 bp, Homo sapien
gatgtctccatctcgactcaaagtt

SEQ ID NO: 2730079 - DNA, 25 bp, Homo sapien
tctcagacagtgtgctttctggcaa

SEQ ID NO: 2730080 - DNA, 25 bp, Homo sapien
tgattttcaactgtatcaacccaga

SEQ ID NO: 2730081 - DNA, 25 bp, Homo sapien
ggacagtgcctttctacccttagca

SEQ ID NO: 2730082 - DNA, 25 bp, Homo sapien
agcaggtgcaactcttccctgattg

SEQ ID NO: 2730083 - DNA, 25 bp, Homo sapien
tacccttagcaggtgcaactcttcc

SEQ ID NO: 2730084 - DNA, 25 bp, Homo sapien
tggttcacatggctaggtctcacag

SEQ ID NO: 2730085 - DNA, 25 bp, Homo sapien
gactgaggaaccagctctagaaggc

SEQ ID NO: 2730086 - DNA, 25 bp, Homo sapien
ctgaggaaccagctctagaaggcag

SEQ ID NO: 2730087 - DNA, 25 bp, Homo sapien
aaggcagaggctgtaaggatttgac

SEQ ID NO: 2730088 - DNA, 25 bp, Homo sapien
gaggctgtaaggatttgacatttgc

SEQ ID NO: 2730089 - DNA, 25 bp, Homo sapien
ctgcctctgaaggtaagcctcacct

SEQ ID NO: 2730090 - DNA, 25 bp, Homo sapien
tcttcttctcttttggtacttctgc

SEQ ID NO: 2730091 - DNA, 25 bp, Homo sapien
gcctctgaaggtaagcctcacctct

SEQ ID NO: 2730092 - DNA, 25 bp, Homo sapien
tcttttggtacttctgctatagcca

SEQ ID NO: 2730093 - DNA, 25 bp, Homo sapien
catacaagctcgacagagctggcat

SEQ ID NO: 2730094 - DNA, 25 bp, Homo sapien
atacaagctcgacagagctggcatt

SEQ ID NO: 2730095 - DNA, 25 bp, Homo sapien
tcatacaagctcgacagagctggca

SEQ ID NO: 2730096 - DNA, 25 bp, Homo sapien
actaagaggaagatggtttcgagga

SEQ ID NO: 2730097 - DNA, 25 bp, Homo sapien
tccatctgttgtccaagactcttcc

SEQ ID NO: 2730098 - DNA, 25 bp, Homo sapien
acaggtggaggtttgcgcagatcaa

SEQ ID NO: 2730099 - DNA, 25 bp, Homo sapien
tgggtgatttatcccatgaacgttc

SEQ ID NO: 2730100 - DNA, 25 bp, Homo sapien
tgcccgttgccgctgtttttatctt

SEQ ID NO: 2730101 - DNA, 25 bp, Homo sapien
gcccgttgccgctgtttttatcttc

SEQ ID NO: 2730102 - DNA, 25 bp, Homo sapien
ctccgtttttgcccgttgccgctgt

SEQ ID NO: 2730103 - DNA, 25 bp, Homo sapien
tttgcccgttgccgctgtttttatc

SEQ ID NO: 2730104 - DNA, 25 bp, Homo sapien
gcatggctggatctaggagctccaa

SEQ ID NO: 2730105 - DNA, 25 bp, Homo sapien
cacatggtatccaggtggctgccag

SEQ ID NO: 2730106 - DNA, 25 bp, Homo sapien
tgtcctatcctttgagcatctgtgg

SEQ ID NO: 2730107 - DNA, 25 bp, Homo sapien
tacccaaggaatgggctggtcgcag

SEQ ID NO: 2730108 - DNA, 25 bp, Homo sapien
cagaaatgtcacctgaagtaccagg

SEQ ID NO: 2730109 - DNA, 25 bp, Homo sapien
tgtcacctgaagtaccaggaccttg

SEQ ID NO: 2730110 - DNA, 25 bp, Homo sapien
cctgaagtaccaggaccttgtttgt

SEQ ID NO: 2730111 - DNA, 25 bp, Homo sapien
gaaatgtcacctgaagtaccaggac

SEQ ID NO: 2730112 - DNA, 25 bp, Homo sapien
tcagcgacgtttgggctctttagtg

SEQ ID NO: 2730113 - DNA, 25 bp, Homo sapien
ttttcaaaacacatccgaaagcatg

SEQ ID NO: 2730114 - DNA, 25 bp, Homo sapien
gaaagcatgtctcttacggaggaga

SEQ ID NO: 2730115 - DNA, 25 bp, Homo sapien
cattccattagcatatggaatattt

SEQ ID NO: 2730116 - DNA, 25 bp, Homo sapien
tccttgggaacgctccctgcagccc

SEQ ID NO: 2730117 - DNA, 25 bp, Homo sapien
taatcccgcttcacacttcttccaa

SEQ ID NO: 2730118 - DNA, 25 bp, Homo sapien
acactctcctaacggccagggctct

SEQ ID NO: 2730119 - DNA, 25 bp, Homo sapien
ggcgcccgggaatagcttctccact

SEQ ID NO: 2730120 - DNA, 25 bp, Homo sapien
gatgatggcctttgaatatgcagac

SEQ ID NO: 2730121 - DNA, 25 bp, Homo sapien
catgtttaatatagaagttcccctc

SEQ ID NO: 2730122 - DNA, 25 bp, Homo sapien
agcttcaatatcaaactggttagga

SEQ ID NO: 2730123 - DNA, 25 bp, Homo sapien
tagtaattcccagccatactctgga

SEQ ID NO: 2730124 - DNA, 25 bp, Homo sapien
tctgaagtggagtgaagcctcaagc

SEQ ID NO: 2730125 - DNA, 25 bp, Homo sapien
tactcctgagtacaagtggtcacct

SEQ ID NO: 2730126 - DNA, 25 bp, Homo sapien
tcaggctggttcagaggcccatgct

SEQ ID NO: 2730127 - DNA, 25 bp, Homo sapien
gcatggaaaggacgttggcatccaa

SEQ ID NO: 2730128 - DNA, 25 bp, Homo sapien
tatttttcccaattagtgagttgtc

SEQ ID NO: 2730129 - DNA, 25 bp, Homo sapien
tatgtagtctagatacgtcctttgc

SEQ ID NO: 2730130 - DNA, 25 bp, Homo sapien
gagttttacccttgcctgggctaga

SEQ ID NO: 2730131 - DNA, 25 bp, Homo sapien
tatgtgcttacctgccatctctata

SEQ ID NO: 2730132 - DNA, 25 bp, Homo sapien
tatccatataaagaggtgcacctgt

SEQ ID NO: 2730133 - DNA, 25 bp, Homo sapien
acctgtgtatgacctctgttcctgc

SEQ ID NO: 2730134 - DNA, 25 bp, Homo sapien
tacagtagccataccacatgatggc

SEQ ID NO: 2730135 - DNA, 25 bp, Homo sapien
tagggaaggctcaggcttattagca

SEQ ID NO: 2730136 - DNA, 25 bp, Homo sapien
gcagaaccccacgtgattatccttg

SEQ ID NO: 2730137 - DNA, 25 bp, Homo sapien
caatcctagtgatggagaggcacaa

SEQ ID NO: 2730138 - DNA, 25 bp, Homo sapien
ggaagatagataagtaccccagcgt

SEQ ID NO: 2730139 - DNA, 25 bp, Homo sapien
taagtctgttagtccacggctagag

SEQ ID NO: 2730140 - DNA, 25 bp, Homo sapien
gggccttaccgtctagagattctga

SEQ ID NO: 2730141 - DNA, 25 bp, Homo sapien
cagtaaccctgagttgagtcagata

SEQ ID NO: 2730142 - DNA, 25 bp, Homo sapien
ggcttatagaccacccagataggtt

SEQ ID NO: 2730143 - DNA, 25 bp, Homo sapien
gagtcagatacaaccacacaggctt

SEQ ID NO: 2730144 - DNA, 25 bp, Homo sapien
tcatgaagatttatggctggagcat

SEQ ID NO: 2730145 - DNA, 25 bp, Homo sapien
tgaactgcccttgatcttcatgaag

SEQ ID NO: 2730146 - DNA, 25 bp, Homo sapien
taatcaactctgaactagcaggacg

SEQ ID NO: 2730147 - DNA, 25 bp, Homo sapien
tgtcacctgtgaaccaaaacagttt

SEQ ID NO: 2730148 - DNA, 25 bp, Homo sapien
gtaaggattagctaaaagaccatgc

SEQ ID NO: 2730149 - DNA, 25 bp, Homo sapien
cctggttctccatgtaagaaggaat

SEQ ID NO: 2730150 - DNA, 25 bp, Homo sapien
gaccatgcatatgataaggctgttt

SEQ ID NO: 2730151 - DNA, 25 bp, Homo sapien
tcagggtcggtctgtctaaggtcag

SEQ ID NO: 2730152 - DNA, 25 bp, Homo sapien
actgagttgcctgcagagcatgccc

SEQ ID NO: 2730153 - DNA, 25 bp, Homo sapien
gaaggagtgatttgttgcggcctct

SEQ ID NO: 2730154 - DNA, 25 bp, Homo sapien
caaggtctttgtggctaggctgcgc

SEQ ID NO: 2730155 - DNA, 25 bp, Homo sapien
caacctggtagagagcatgtgcgca

SEQ ID NO: 2730156 - DNA, 25 bp, Homo sapien
tgtataagggaaacttataagcaat

SEQ ID NO: 2730157 - DNA, 25 bp, Homo sapien
ttatgtataagggaaacttataagc

SEQ ID NO: 2730158 - DNA, 25 bp, Homo sapien
gtttgatgtgctacctgtatatatg

SEQ ID NO: 2730159 - DNA, 25 bp, Homo sapien
atgtgtttgatgtgctacctgtata

SEQ ID NO: 2730160 - DNA, 25 bp, Homo sapien
gaggctgtcctttgccgctggtgcc

SEQ ID NO: 2730161 - DNA, 25 bp, Homo sapien
tgtatcctttcaacacagaggtgag

SEQ ID NO: 2730162 - DNA, 25 bp, Homo sapien
tgccaaatagctgactcaggggtta

SEQ ID NO: 2730163 - DNA, 25 bp, Homo sapien
gctgctgcaggcattttatgccaaa

SEQ ID NO: 2730164 - DNA, 25 bp, Homo sapien
cctgtgtagtagagacaaccctata

SEQ ID NO: 2730165 - DNA, 25 bp, Homo sapien
ctagggccatgtgcgtaagaactga

SEQ ID NO: 2730166 - DNA, 25 bp, Homo sapien
ggtataactataacatggagggctc

SEQ ID NO: 2730167 - DNA, 25 bp, Homo sapien
tgaaaagtacatcgtgcaggctccc

SEQ ID NO: 2730168 - DNA, 25 bp, Homo sapien
taatcatgcgggcatattgagtctg

SEQ ID NO: 2730169 - DNA, 25 bp, Homo sapien
gtggtagagtggttgagacttcctg

SEQ ID NO: 2730170 - DNA, 25 bp, Homo sapien
aactggtaatgatttggagtaatca

SEQ ID NO: 2730171 - DNA, 25 bp, Homo sapien
gactttttccgccttcactcctaca

SEQ ID NO: 2730172 - DNA, 25 bp, Homo sapien
tttgctctctgtgggacaaagcact

SEQ ID NO: 2730173 - DNA, 25 bp, Homo sapien
aagttcttcccctacagttctgcgg

SEQ ID NO: 2730174 - DNA, 25 bp, Homo sapien
aagcgggagcaggagatgttcttca

SEQ ID NO: 2730175 - DNA, 25 bp, Homo sapien
actgctgatgaagtccccgtgggct

SEQ ID NO: 2730176 - DNA, 25 bp, Homo sapien
cttgtgcattccctcaatactttta

SEQ ID NO: 2730177 - DNA, 25 bp, Homo sapien
ccactgtgcctgcccggtgtgtgtc

SEQ ID NO: 2730178 - DNA, 25 bp, Homo sapien
gtgcattccctcaatacttttaggt

SEQ ID NO: 2730179 - DNA, 25 bp, Homo sapien
gtgcctgcccggtgtgtgtctttct

SEQ ID NO: 2730180 - DNA, 25 bp, Homo sapien
gaagtacattcagggttagacccag

SEQ ID NO: 2730181 - DNA, 25 bp, Homo sapien
gaaaaccatccatgtagcaggagct

SEQ ID NO: 2730182 - DNA, 25 bp, Homo sapien
gaaagcctctcagtgtatgacatgt

SEQ ID NO: 2730183 - DNA, 25 bp, Homo sapien
catatagactggctgactagagatc

SEQ ID NO: 2730184 - DNA, 25 bp, Homo sapien
gaaacacggttgatttttgtgtgct

SEQ ID NO: 2730185 - DNA, 25 bp, Homo sapien
gattatgttgtataccaacagaaat

SEQ ID NO: 2730186 - DNA, 25 bp, Homo sapien
tcttatacctgcaactaaatgtgtt

SEQ ID NO: 2730187 - DNA, 25 bp, Homo sapien
cattgttagtatgtagaaacacggt

SEQ ID NO: 2730188 - DNA, 25 bp, Homo sapien
gatcccgctgttggaatagccggcc

SEQ ID NO: 2730189 - DNA, 25 bp, Homo sapien
cagcaggtggataactgagggcttt

SEQ ID NO: 2730190 - DNA, 25 bp, Homo sapien
gtggagaggctcgtcccacatgtca

SEQ ID NO: 2730191 - DNA, 25 bp, Homo sapien
ttcaaaggatgtaatctgtgacccc

SEQ ID NO: 2730192 - DNA, 25 bp, Homo sapien
cgctggccttaacggtttgttggca

SEQ ID NO: 2730193 - DNA, 25 bp, Homo sapien
ccttaacggtttgttggcagatgac

SEQ ID NO: 2730194 - DNA, 25 bp, Homo sapien
caaggctaacgctggccttaacggt

SEQ ID NO: 2730195 - DNA, 25 bp, Homo sapien
gaaaccggcaccaaggctaacgctg

SEQ ID NO: 2730196 - DNA, 25 bp, Homo sapien
ctgtgtatctgctcgcaagggtgtg

SEQ ID NO: 2730197 - DNA, 25 bp, Homo sapien
tacaagggggaggattgttcccaca

SEQ ID NO: 2730198 - DNA, 25 bp, Homo sapien
aggctgggccccttgcgggtacaag

SEQ ID NO: 2730199 - DNA, 25 bp, Homo sapien
cacagaggtgcttgggccagaaaac

SEQ ID NO: 2730200 - DNA, 25 bp, Homo sapien
gccttagtgggctctaaactcaagc

SEQ ID NO: 2730201 - DNA, 25 bp, Homo sapien
tagtgggctctaaactcaagcccat

SEQ ID NO: 2730202 - DNA, 25 bp, Homo sapien
cttagtgggctctaaactcaagccc

SEQ ID NO: 2730203 - DNA, 25 bp, Homo sapien
ggccttagtgggctctaaactcaag

SEQ ID NO: 2730204 - DNA, 25 bp, Homo sapien
gctgagcctttcagagatcacagcc

SEQ ID NO: 2730205 - DNA, 25 bp, Homo sapien
ctgtagggtagactgagaggagtca

SEQ ID NO: 2730206 - DNA, 25 bp, Homo sapien
tcaggtgggctgagcctttcagaga

SEQ ID NO: 2730207 - DNA, 25 bp, Homo sapien
gtgggctgagcctttcagagatcac

SEQ ID NO: 2730208 - DNA, 25 bp, Homo sapien
ctgcccacctatcttcccgttcact

SEQ ID NO: 2730209 - DNA, 25 bp, Homo sapien
tgcccacctatcttcccgttcactc

SEQ ID NO: 2730210 - DNA, 25 bp, Homo sapien
acttggcatggtgatgattgattgg

SEQ ID NO: 2730211 - DNA, 25 bp, Homo sapien
gattgggaagtggtttctctctgct

SEQ ID NO: 2730212 - DNA, 25 bp, Homo sapien
gaaacttggcatggtgatgattgat

SEQ ID NO: 2730213 - DNA, 25 bp, Homo sapien
tgatgattgattgggaagtggtttc

SEQ ID NO: 2730214 - DNA, 25 bp, Homo sapien
tgagtgaatgccgggcctcgcttgt

SEQ ID NO: 2730215 - DNA, 25 bp, Homo sapien
gctgagcaattgaaaggatgagtga

SEQ ID NO: 2730216 - DNA, 25 bp, Homo sapien
tgagcaattgaaaggatgagtgagt

SEQ ID NO: 2730217 - DNA, 25 bp, Homo sapien
aatgccgggcctcgcttgttgcctc

SEQ ID NO: 2730218 - DNA, 25 bp, Homo sapien
ttgctgactgctggccgttgagcct

SEQ ID NO: 2730219 - DNA, 25 bp, Homo sapien
catgagtggcccgaggttgctgact

SEQ ID NO: 2730220 - DNA, 25 bp, Homo sapien
ggatggtgataaggtggagggaagg

SEQ ID NO: 2730221 - DNA, 25 bp, Homo sapien
ctggtacggcaggcgggatggtgat

SEQ ID NO: 2730222 - DNA, 25 bp, Homo sapien
agccctgcgggtctgatttcacact

SEQ ID NO: 2730223 - DNA, 25 bp, Homo sapien
tcccgtggatgacgcccttcggctt

SEQ ID NO: 2730224 - DNA, 25 bp, Homo sapien
gggtctgaacttcccgtggatgacg

SEQ ID NO: 2730225 - DNA, 25 bp, Homo sapien
ggtctgatttcacactggccgttct

SEQ ID NO: 2730226 - DNA, 25 bp, Homo sapien
aaacgcagaactttgctttcatgct

SEQ ID NO: 2730227 - DNA, 25 bp, Homo sapien
tgtgtcctggcttcacagggttcat

SEQ ID NO: 2730228 - DNA, 25 bp, Homo sapien
ggctttcaattgcattcttgtcccc

SEQ ID NO: 2730229 - DNA, 25 bp, Homo sapien
gctggtaagatttccccttgtcatt

SEQ ID NO: 2730230 - DNA, 25 bp, Homo sapien
tgattccgtcggtctgagtcacagc

SEQ ID NO: 2730231 - DNA, 25 bp, Homo sapien
aattggtgtatacctccaggagagc

SEQ ID NO: 2730232 - DNA, 25 bp, Homo sapien
tcgaggcgatgtggaccgagaaact

SEQ ID NO: 2730233 - DNA, 25 bp, Homo sapien
tagggagccaacacctacagcttga

SEQ ID NO: 2730234 - DNA, 25 bp, Homo sapien
tggcttttgccaatttccgccgcat

SEQ ID NO: 2730235 - DNA, 25 bp, Homo sapien
accccaacgaggtgtgggagatcgt

SEQ ID NO: 2730236 - DNA, 25 bp, Homo sapien
gaaagtcccgcgaatatgagcacgt

SEQ ID NO: 2730237 - DNA, 25 bp, Homo sapien
tcctgcgcctgtctaccttcgagaa

SEQ ID NO: 2730238 - DNA, 25 bp, Homo sapien
gaaggctctggcaaccagaaataga

SEQ ID NO: 2730239 - DNA, 25 bp, Homo sapien
tctggcaaccagaaatagaatacag

SEQ ID NO: 2730240 - DNA, 25 bp, Homo sapien
tcaactgaaggctctggcaaccaga

SEQ ID NO: 2730241 - DNA, 25 bp, Homo sapien
agtactgtgtcaactgaaggctctg

SEQ ID NO: 2730242 - DNA, 25 bp, Homo sapien
tgtccagatagaggtaccacagaaa

SEQ ID NO: 2730243 - DNA, 25 bp, Homo sapien
tgccgtgcacgtccagaatatgaaa

SEQ ID NO: 2730244 - DNA, 25 bp, Homo sapien
gccaaagccttcacgtttctcacgg

SEQ ID NO: 2730245 - DNA, 25 bp, Homo sapien
cattcaaggtgttcttgccgtgcac

SEQ ID NO: 2730246 - DNA, 25 bp, Homo sapien
cgcctcttgatgttccttctccacg

SEQ ID NO: 2730247 - DNA, 25 bp, Homo sapien
tgatgttccttctccacgcctctct

SEQ ID NO: 2730248 - DNA, 25 bp, Homo sapien
cttctccacgcctctctggatatga

SEQ ID NO: 2730249 - DNA, 25 bp, Homo sapien
tctccacgcctctctggatatgagc

SEQ ID NO: 2730250 - DNA, 25 bp, Homo sapien
tgttaaggtgggcaggtgaggagat

SEQ ID NO: 2730251 - DNA, 25 bp, Homo sapien
tagaacttctcaaagtcgatctcgc

SEQ ID NO: 2730252 - DNA, 25 bp, Homo sapien
caaagtcgatctcgcccacagcgtt

SEQ ID NO: 2730253 - DNA, 25 bp, Homo sapien
cacagcgttccagtccagcatgtca

SEQ ID NO: 2730254 - DNA, 25 bp, Homo sapien
caaacacaatgttgatctgtgcctt

SEQ ID NO: 2730255 - DNA, 25 bp, Homo sapien
tttttgcaccaattctcagatcccc

SEQ ID NO: 2730256 - DNA, 25 bp, Homo sapien
taatgtcaaagtcacggaagagatc

SEQ ID NO: 2730257 - DNA, 25 bp, Homo sapien
cagatcccctttcaggtcaagcagg

SEQ ID NO: 2730258 - DNA, 25 bp, Homo sapien
aagacaggccgggaatgacgataca

SEQ ID NO: 2730259 - DNA, 25 bp, Homo sapien
ttctgtaatttgtcagtgtagatga

SEQ ID NO: 2730260 - DNA, 25 bp, Homo sapien
taatttgtcagtgtagatgattgta

SEQ ID NO: 2730261 - DNA, 25 bp, Homo sapien
gtagatgattgtatacagcttaaat

SEQ ID NO: 2730262 - DNA, 25 bp, Homo sapien
agatgattgtatacagcttaaattc

SEQ ID NO: 2730263 - DNA, 25 bp, Homo sapien
gacatgttaacagtcttcatcaatg

SEQ ID NO: 2730264 - DNA, 25 bp, Homo sapien
tagacatgttaacagtcttcatcaa

SEQ ID NO: 2730265 - DNA, 25 bp, Homo sapien
ttagacatgttaacagtcttcatca

SEQ ID NO: 2730266 - DNA, 25 bp, Homo sapien
agacatgttaacagtcttcatcaat

SEQ ID NO: 2730267 - DNA, 25 bp, Homo sapien
gttgtgttagcaattagttggatac

SEQ ID NO: 2730268 - DNA, 25 bp, Homo sapien
caattagttggatacagcggaagct

SEQ ID NO: 2730269 - DNA, 25 bp, Homo sapien
acagcggaagctattgatcagggtt

SEQ ID NO: 2730270 - DNA, 25 bp, Homo sapien
gatacagcggaagctattgatcagg

SEQ ID NO: 2730271 - DNA, 25 bp, Homo sapien
gtaaatcagtatattgctcctgtca

SEQ ID NO: 2730272 - DNA, 25 bp, Homo sapien
tgccacatcgaatagcagcacttct

SEQ ID NO: 2730273 - DNA, 25 bp, Homo sapien
tctcaaagtttgtcaactggaaaaa

SEQ ID NO: 2730274 - DNA, 25 bp, Homo sapien
taagcagatttggtgatgtcatcaa

SEQ ID NO: 2730275 - DNA, 25 bp, Homo sapien
gcctattttatctgtgcctgggaga

SEQ ID NO: 2730276 - DNA, 25 bp, Homo sapien
gatactcagttgaaaagtcgctgtc

SEQ ID NO: 2730277 - DNA, 25 bp, Homo sapien
ccagcacattagtggcaggcaccct

SEQ ID NO: 2730278 - DNA, 25 bp, Homo sapien
tgaaaggtctgtataacgaagccat

SEQ ID NO: 2730279 - DNA, 25 bp, Homo sapien
acatagacagtatgtcatctgcaaa

SEQ ID NO: 2730280 - DNA, 25 bp, Homo sapien
tcccaaattagtaggaaagctttga

SEQ ID NO: 2730281 - DNA, 25 bp, Homo sapien
tgatgtataggagagcagttgactt

SEQ ID NO: 2730282 - DNA, 25 bp, Homo sapien
acagtgtttaaaagtggtgatgaga

SEQ ID NO: 2730283 - DNA, 25 bp, Homo sapien
catgggcccaaatagaacgttgcaa

SEQ ID NO: 2730284 - DNA, 25 bp, Homo sapien
tagtgcacggtttcagccatataac

SEQ ID NO: 2730285 - DNA, 25 bp, Homo sapien
ccatgtcttgaaaaatagtgcacgg

SEQ ID NO: 2730286 - DNA, 25 bp, Homo sapien
catgctgaaacccaagatgatggtc

SEQ ID NO: 2730287 - DNA, 25 bp, Homo sapien
actgcagccggccaacttttggctg

SEQ ID NO: 2730288 - DNA, 25 bp, Homo sapien
taaccgtaggaaattcagacaggaa

SEQ ID NO: 2730289 - DNA, 25 bp, Homo sapien
gatgtgaaccttacctcttagccca

SEQ ID NO: 2730290 - DNA, 25 bp, Homo sapien
gaagctggaaatgcaacttagcact

SEQ ID NO: 2730291 - DNA, 25 bp, Homo sapien
taaagtaacctttcactgatgtata

SEQ ID NO: 2730292 - DNA, 25 bp, Homo sapien
gggcttagccaatcttcctggttca

SEQ ID NO: 2730293 - DNA, 25 bp, Homo sapien
tatacagaatagatctatagccaat

SEQ ID NO: 2730294 - DNA, 25 bp, Homo sapien
attttaatgatgtccgatttatcta

SEQ ID NO: 2730295 - DNA, 25 bp, Homo sapien
catctgtttaatagacatcgtggaa

SEQ ID NO: 2730296 - DNA, 25 bp, Homo sapien
ggtttctgcaatttctagagtgaaa

SEQ ID NO: 2730297 - DNA, 25 bp, Homo sapien
ttaatagacatcgtggaagtcttgg

SEQ ID NO: 2730298 - DNA, 25 bp, Homo sapien
catcgtggaagtcttggtttctgca

SEQ ID NO: 2730299 - DNA, 25 bp, Homo sapien
gaattgactggattgccttggctaa

SEQ ID NO: 2730300 - DNA, 25 bp, Homo sapien
atggcatcttggaactgaaactggc

SEQ ID NO: 2730301 - DNA, 25 bp, Homo sapien
ggattcgagactcctgaagccgtat

SEQ ID NO: 2730302 - DNA, 25 bp, Homo sapien
aaacagtcactggaaggcctatgcc

SEQ ID NO: 2730303 - DNA, 25 bp, Homo sapien
gatggcgcatatgcagaactcccct

SEQ ID NO: 2730304 - DNA, 25 bp, Homo sapien
caggactgtggtcgctattctgtga

SEQ ID NO: 2730305 - DNA, 25 bp, Homo sapien
tgagcgattgatggcgcatatgcag

SEQ ID NO: 2730306 - DNA, 25 bp, Homo sapien
tattctgtgagcgattgatggcgca

SEQ ID NO: 2730307 - DNA, 25 bp, Homo sapien
ggctgcttctgcgtgaggagcttcc

SEQ ID NO: 2730308 - DNA, 25 bp, Homo sapien
tcctctgatcacctgtagcatcttt

SEQ ID NO: 2730309 - DNA, 25 bp, Homo sapien
atctttagtgccttcgtccagtcgg

SEQ ID NO: 2730310 - DNA, 25 bp, Homo sapien
gccttcgtccagtcggcctgcaaat

SEQ ID NO: 2730311 - DNA, 25 bp, Homo sapien
agcatagcatgcagcggtcccatag

SEQ ID NO: 2730312 - DNA, 25 bp, Homo sapien
gatgtggtcatctgtcaaactgagg

SEQ ID NO: 2730313 - DNA, 25 bp, Homo sapien
gtcccatagggaggcaggtaaccaa

SEQ ID NO: 2730314 - DNA, 25 bp, Homo sapien
tctggagaggcatgactaaatcact

SEQ ID NO: 2730315 - DNA, 25 bp, Homo sapien
cttgtgtgacatgtatgttgttggc

SEQ ID NO: 2730316 - DNA, 25 bp, Homo sapien
acccgtgcctgttgcatgtgagaaa

SEQ ID NO: 2730317 - DNA, 25 bp, Homo sapien
tcaaggtgcctacctcggagttttc

SEQ ID NO: 2730318 - DNA, 25 bp, Homo sapien
cagtgatgtcgtctgtcttgtgtga

SEQ ID NO: 2730319 - DNA, 25 bp, Homo sapien
ggctgtgatagaccctcattgaggc

SEQ ID NO: 2730320 - DNA, 25 bp, Homo sapien
gagtctagaaaaagtcggccctgcc

SEQ ID NO: 2730321 - DNA, 25 bp, Homo sapien
gcagacaagccttgagacacccaga

SEQ ID NO: 2730322 - DNA, 25 bp, Homo sapien
agagtccagctttgtccatagccag

SEQ ID NO: 2730323 - DNA, 25 bp, Homo sapien
tcagtgcagtgtgaggacctaactc

SEQ ID NO: 2730324 - DNA, 25 bp, Homo sapien
cacttgggaggtgcactgtgttcac

SEQ ID NO: 2730325 - DNA, 25 bp, Homo sapien
taaactctgacacgggtgacgacgg

SEQ ID NO: 2730326 - DNA, 25 bp, Homo sapien
ggcaccagagcacttatcaggcaaa

SEQ ID NO: 2730327 - DNA, 25 bp, Homo sapien
tagcccctccgtgcactgcatgaga

SEQ ID NO: 2730328 - DNA, 25 bp, Homo sapien
ctgcatgagagacagcatatttgct

SEQ ID NO: 2730329 - DNA, 25 bp, Homo sapien
gctgcagaagctgtgtagcctgtga

SEQ ID NO: 2730330 - DNA, 25 bp, Homo sapien
gtgtagcctgtgagcggaagcccta

SEQ ID NO: 2730331 - DNA, 25 bp, Homo sapien
tttggcatttaagcttgctctggct

SEQ ID NO: 2730332 - DNA, 25 bp, Homo sapien
gctttggcatttaagcttgctctgg

SEQ ID NO: 2730333 - DNA, 25 bp, Homo sapien
gagcaggacggctttagcaatcaca

SEQ ID NO: 2730334 - DNA, 25 bp, Homo sapien
gctgtagagcaggacggctttagca

SEQ ID NO: 2730335 - DNA, 25 bp, Homo sapien
aggccctcacttgaaatctttcacc

SEQ ID NO: 2730336 - DNA, 25 bp, Homo sapien
gaggccctcacttgaaatctttcac

SEQ ID NO: 2730337 - DNA, 25 bp, Homo sapien
agagaggccctcacttgaaatcttt

SEQ ID NO: 2730338 - DNA, 25 bp, Homo sapien
gagaggccctcacttgaaatctttc

SEQ ID NO: 2730339 - DNA, 25 bp, Homo sapien
accgcgtgctccttgaagacagctt

SEQ ID NO: 2730340 - DNA, 25 bp, Homo sapien
ggtgctcttgttggcggctccattc

SEQ ID NO: 2730341 - DNA, 25 bp, Homo sapien
ccttgaagacagctttgatgctact

SEQ ID NO: 2730342 - DNA, 25 bp, Homo sapien
tgatgctactgccttgcgcgtagtg

SEQ ID NO: 2730343 - DNA, 25 bp, Homo sapien
tagctccagtacagcacacgaaggc

SEQ ID NO: 2730344 - DNA, 25 bp, Homo sapien
aggccatagctccagtacagcacac

SEQ ID NO: 2730345 - DNA, 25 bp, Homo sapien
caggagagaaggcatggtccccccc

SEQ ID NO: 2730346 - DNA, 25 bp, Homo sapien
catagctccagtacagcacacgaag

SEQ ID NO: 2730347 - DNA, 25 bp, Homo sapien
ggagcagtcttgctttgcatgactc

SEQ ID NO: 2730348 - DNA, 25 bp, Homo sapien
aggggagcagtcttgctttgcatga

SEQ ID NO: 2730349 - DNA, 25 bp, Homo sapien
ctgtggtagcgggaatgtcagggga

SEQ ID NO: 2730350 - DNA, 25 bp, Homo sapien
gaatgtcaggggagcagtcttgctt

SEQ ID NO: 2730351 - DNA, 25 bp, Homo sapien
aattgtgcatccttttttcctcgga

SEQ ID NO: 2730352 - DNA, 25 bp, Homo sapien
gcaagtcggcaagcagcccagttat

SEQ ID NO: 2730353 - DNA, 25 bp, Homo sapien
tagagggactgtgccgttcccgccg

SEQ ID NO: 2730354 - DNA, 25 bp, Homo sapien
gcccagttatcacactgccaaacaa

SEQ ID NO: 2730355 - DNA, 25 bp, Homo sapien
ctgccaaacaaggaaggctagaggg

SEQ ID NO: 2730356 - DNA, 25 bp, Homo sapien
agtcctcttcactacgccccctaat

SEQ ID NO: 2730357 - DNA, 25 bp, Homo sapien
tctccccatttgcagccatctcggc

SEQ ID NO: 2730358 - DNA, 25 bp, Homo sapien
cactacctgctcatcactcacttgc

SEQ ID NO: 2730359 - DNA, 25 bp, Homo sapien
tttgcagccatctcggccactacct

SEQ ID NO: 2730360 - DNA, 25 bp, Homo sapien
gctgcgggcggaggagcggccatgc

SEQ ID NO: 2730361 - DNA, 25 bp, Homo sapien
gcggaggagcggccatgccgccgcg

SEQ ID NO: 2730362 - DNA, 25 bp, Homo sapien
gcgctcggcccgctgcgggcggagg

SEQ ID NO: 2730363 - DNA, 25 bp, Homo sapien
gcgggcggaggagcggccatgccgc

SEQ ID NO: 2730364 - DNA, 25 bp, Homo sapien
attagttatgaccaccccgcaatgc

SEQ ID NO: 2730365 - DNA, 25 bp, Homo sapien
cagccaatcagacagcagtcacgga

SEQ ID NO: 2730366 - DNA, 25 bp, Homo sapien
tgtgccgggccactgagcattagaa

SEQ ID NO: 2730367 - DNA, 25 bp, Homo sapien
tgagcattagaaagcgtggccacat

SEQ ID NO: 2730368 - DNA, 25 bp, Homo sapien
tctacgagcagttgtcttgaaggcc

SEQ ID NO: 2730369 - DNA, 25 bp, Homo sapien
tcactttttgctcggacctgagctg

SEQ ID NO: 2730370 - DNA, 25 bp, Homo sapien
ccccagcagggtgttgggaatggag

SEQ ID NO: 2730371 - DNA, 25 bp, Homo sapien
cagccatgggcagctcagaaagatc

SEQ ID NO: 2730372 - DNA, 25 bp, Homo sapien
gcatgttctttggaaggcggggtcc

SEQ ID NO: 2730373 - DNA, 25 bp, Homo sapien
gaatggaggcagtggtcccagccat

SEQ ID NO: 2730374 - DNA, 25 bp, Homo sapien
gggctgaatcattccctgcatcttc

SEQ ID NO: 2730375 - DNA, 25 bp, Homo sapien
ctggggctgaatcattccctgcatc

SEQ ID NO: 2730376 - DNA, 25 bp, Homo sapien
atcttccgcatctgcgggggctccc

SEQ ID NO: 2730377 - DNA, 25 bp, Homo sapien
tcttccgcatctgcgggggctcccg

SEQ ID NO: 2730378 - DNA, 25 bp, Homo sapien
agtgtgggtggccagtaggcagccg

SEQ ID NO: 2730379 - DNA, 25 bp, Homo sapien
gcctccccttggaaccccagaagca

SEQ ID NO: 2730380 - DNA, 25 bp, Homo sapien
tgtgggtggccagtaggcagccggg

SEQ ID NO: 2730381 - DNA, 25 bp, Homo sapien
cccagcagatgacccgaggcctccc

SEQ ID NO: 2730382 - DNA, 25 bp, Homo sapien
gctcgtagttccctattacaggctg

SEQ ID NO: 2730383 - DNA, 25 bp, Homo sapien
ttccctattacaggctgatagtgct

SEQ ID NO: 2730384 - DNA, 25 bp, Homo sapien
gctaatggcttcacaggttgtccaa

SEQ ID NO: 2730385 - DNA, 25 bp, Homo sapien
tggtcagcagggctcgtagttccct

SEQ ID NO: 2730386 - DNA, 25 bp, Homo sapien
actgctgaccataactaaacgtggc

SEQ ID NO: 2730387 - DNA, 25 bp, Homo sapien
tactgctgaccataactaaacgtgg

SEQ ID NO: 2730388 - DNA, 25 bp, Homo sapien
ttactgctgaccataactaaacgtg

SEQ ID NO: 2730389 - DNA, 25 bp, Homo sapien
tgctgaccataactaaacgtggcat

SEQ ID NO: 2730390 - DNA, 25 bp, Homo sapien
catgagagcagttacacagggtgcc

SEQ ID NO: 2730391 - DNA, 25 bp, Homo sapien
gagagcagttacacagggtgccctg

SEQ ID NO: 2730392 - DNA, 25 bp, Homo sapien
tgagagcagttacacagggtgccct

SEQ ID NO: 2730393 - DNA, 25 bp, Homo sapien
agagcagttacacagggtgccctga

SEQ ID NO: 2730394 - DNA, 25 bp, Homo sapien
tgcaattgagtgctagctgccatat

SEQ ID NO: 2730395 - DNA, 25 bp, Homo sapien
tgagtgctagctgccatattgttca

SEQ ID NO: 2730396 - DNA, 25 bp, Homo sapien
gctgccatattgttcactgcgctac

SEQ ID NO: 2730397 - DNA, 25 bp, Homo sapien
tcaatgcaattgagtgctagctgcc

SEQ ID NO: 2730398 - DNA, 25 bp, Homo sapien
ttttgattttgtttgcccttgtgca

SEQ ID NO: 2730399 - DNA, 25 bp, Homo sapien
cttttgattttgtttgcccttgtgc

SEQ ID NO: 2730400 - DNA, 25 bp, Homo sapien
tttgattttgtttgcccttgtgcat

SEQ ID NO: 2730401 - DNA, 25 bp, Homo sapien
cgtctgcttctcctctgggcagccc

SEQ ID NO: 2730402 - DNA, 25 bp, Homo sapien
tgcttctcctctgggcagccccagc

SEQ ID NO: 2730403 - DNA, 25 bp, Homo sapien
cttgcgtctgcttctcctctgggca

SEQ ID NO: 2730404 - DNA, 25 bp, Homo sapien
tctgcttctcctctgggcagcccca

SEQ ID NO: 2730405 - DNA, 25 bp, Homo sapien
tttcaagtaaggtttcattagcagg

SEQ ID NO: 2730406 - DNA, 25 bp, Homo sapien
aggacatatcttctggggcggccac

SEQ ID NO: 2730407 - DNA, 25 bp, Homo sapien
gacatatcttctggggcggccacca

SEQ ID NO: 2730408 - DNA, 25 bp, Homo sapien
cattagcaggttccaaggacatatc

SEQ ID NO: 2730409 - DNA, 25 bp, Homo sapien
ggctctgaggccgtctcaacccagg

SEQ ID NO: 2730410 - DNA, 25 bp, Homo sapien
ctctgtgtatctcttttaaagacac

SEQ ID NO: 2730411 - DNA, 25 bp, Homo sapien
ttcagggttaactggacaatccagg

SEQ ID NO: 2730412 - DNA, 25 bp, Homo sapien
taaagacacttgtcactggattcag

SEQ ID NO: 2730413 - DNA, 25 bp, Homo sapien
ccctttctcacttgccagctgctgt

SEQ ID NO: 2730414 - DNA, 25 bp, Homo sapien
gacctggtgtcaagcaggtgccctg

SEQ ID NO: 2730415 - DNA, 25 bp, Homo sapien
ggatgcttggatgagagccacctct

SEQ ID NO: 2730416 - DNA, 25 bp, Homo sapien
tctgcgaagaaggtaaggtaggcca

SEQ ID NO: 2730417 - DNA, 25 bp, Homo sapien
tacttcacgtgacagtgaggcttgt

SEQ ID NO: 2730418 - DNA, 25 bp, Homo sapien
gcttgtacgggacacctgagctctt

SEQ ID NO: 2730419 - DNA, 25 bp, Homo sapien
gagattctcctgtggcgatatatac

SEQ ID NO: 2730420 - DNA, 25 bp, Homo sapien
ggctctgacccagcatgtaaacatg

SEQ ID NO: 2730421 - DNA, 25 bp, Homo sapien
ctgccggggcgccagcaggatggtg

SEQ ID NO: 2730422 - DNA, 25 bp, Homo sapien
agagaatggagttctgccccagcat

SEQ ID NO: 2730423 - DNA, 25 bp, Homo sapien
cactgcaaagcacaggtgggcagca

SEQ ID NO: 2730424 - DNA, 25 bp, Homo sapien
tgggcagcagcgggcctgccggggc

SEQ ID NO: 2730425 - DNA, 25 bp, Homo sapien
ctgctggcagctcccggccttcagc

SEQ ID NO: 2730426 - DNA, 25 bp, Homo sapien
gggacagggtctcgcaacccccaca

SEQ ID NO: 2730427 - DNA, 25 bp, Homo sapien
agggtctcgcaacccccacacggca

SEQ ID NO: 2730428 - DNA, 25 bp, Homo sapien
tcgcaacccccacacggcatgtggg

SEQ ID NO: 2730429 - DNA, 25 bp, Homo sapien
gatgagagcctctgtaaccacagag

SEQ ID NO: 2730430 - DNA, 25 bp, Homo sapien
caagatgagagcctctgtaaccaca

SEQ ID NO: 2730431 - DNA, 25 bp, Homo sapien
ctaggtcctcaagatgagagcctct

SEQ ID NO: 2730432 - DNA, 25 bp, Homo sapien
cctcaagatgagagcctctgtaacc

SEQ ID NO: 2730433 - DNA, 25 bp, Homo sapien
caggatctggatagcgaagttctca

SEQ ID NO: 2730434 - DNA, 25 bp, Homo sapien
cctgctcaggtgtgagggcatcaga

SEQ ID NO: 2730435 - DNA, 25 bp, Homo sapien
catcctcggtggatagccgtggctc

SEQ ID NO: 2730436 - DNA, 25 bp, Homo sapien
cggcagcttagctcttggaggagat

SEQ ID NO: 2730437 - DNA, 25 bp, Homo sapien
gaatactgtcatgagctccacaggg

SEQ ID NO: 2730438 - DNA, 25 bp, Homo sapien
agttcagtgcctttgttaactcccg

SEQ ID NO: 2730439 - DNA, 25 bp, Homo sapien
gagcagcgtggccaaggacattctc

SEQ ID NO: 2730440 - DNA, 25 bp, Homo sapien
agggaagactggactccttcttggg

SEQ ID NO: 2730441 - DNA, 25 bp, Homo sapien
agtccaagccgctgagcacagatct

SEQ ID NO: 2730442 - DNA, 25 bp, Homo sapien
aagccgctgagcacagatctcaggg

SEQ ID NO: 2730443 - DNA, 25 bp, Homo sapien
acgttctgggccgtgcctcctgaca

SEQ ID NO: 2730444 - DNA, 25 bp, Homo sapien
tgcacgttctgggccgtgcctcctg

SEQ ID NO: 2730445 - DNA, 25 bp, Homo sapien
ttatttggcttataaccttctggga

SEQ ID NO: 2730446 - DNA, 25 bp, Homo sapien
ttctgggctgggtatacgaagcttg

SEQ ID NO: 2730447 - DNA, 25 bp, Homo sapien
ctgggtatacgaagcttgtggtgtt

SEQ ID NO: 2730448 - DNA, 25 bp, Homo sapien
ggcttataaccttctgggatgttca

SEQ ID NO: 2730449 - DNA, 25 bp, Homo sapien
agcagcagtcccgatacaaacctca

SEQ ID NO: 2730450 - DNA, 25 bp, Homo sapien
ctggcagcagcagtcccgatacaaa

SEQ ID NO: 2730451 - DNA, 25 bp, Homo sapien
gcagtcccgatacaaacctcaaagg

SEQ ID NO: 2730452 - DNA, 25 bp, Homo sapien
ccgatacaaacctcaaaggagccct

SEQ ID NO: 2730453 - DNA, 25 bp, Homo sapien
gagatcatccagataacagcggcag

SEQ ID NO: 2730454 - DNA, 25 bp, Homo sapien
cacagggcatctttgcgagatcatc

SEQ ID NO: 2730455 - DNA, 25 bp, Homo sapien
agcggcagccagctcttcaaacgtg

SEQ ID NO: 2730456 - DNA, 25 bp, Homo sapien
ccctgtggggctagtgccatgtgct

SEQ ID NO: 2730457 - DNA, 25 bp, Homo sapien
tcagcattgcttgcacaacgctcaa

SEQ ID NO: 2730458 - DNA, 25 bp, Homo sapien
acgctcaagtgtcccaatgcgttcc

SEQ ID NO: 2730459 - DNA, 25 bp, Homo sapien
gcttgcacaacgctcaagtgtccca

SEQ ID NO: 2730460 - DNA, 25 bp, Homo sapien
cccaatgcgttcctgggtcacatgg

SEQ ID NO: 2730461 - DNA, 25 bp, Homo sapien
cactgaggatccaatcaggaaatgt

SEQ ID NO: 2730462 - DNA, 25 bp, Homo sapien
gcactgaggatccaatcaggaaatg

SEQ ID NO: 2730463 - DNA, 25 bp, Homo sapien
gcagttgaaaaggtcacagctctgc

SEQ ID NO: 2730464 - DNA, 25 bp, Homo sapien
tgtcccatgcctttgtctcttcgaa

SEQ ID NO: 2730465 - DNA, 25 bp, Homo sapien
gtctcttcgaagcttccgtttccca

SEQ ID NO: 2730466 - DNA, 25 bp, Homo sapien
gtgcagttgaaaaggtcacagctct

SEQ ID NO: 2730467 - DNA, 25 bp, Homo sapien
gagtccacgggagacacagatttga

SEQ ID NO: 2730468 - DNA, 25 bp, Homo sapien
aatcttgagtttttcggagtccacg

SEQ ID NO: 2730469 - DNA, 25 bp, Homo sapien
acacagatttgagggccacgagcac

SEQ ID NO: 2730470 - DNA, 25 bp, Homo sapien
atttgagggccacgagcacttcctg

SEQ ID NO: 2730471 - DNA, 25 bp, Homo sapien
ttaagttctgcagcgtactccttca

SEQ ID NO: 2730472 - DNA, 25 bp, Homo sapien
caggttaagttctgcagcgtactcc

SEQ ID NO: 2730473 - DNA, 25 bp, Homo sapien
gttctgcagcgtactccttcacttc

SEQ ID NO: 2730474 - DNA, 25 bp, Homo sapien
tcacaggttaagttctgcagcgtac

SEQ ID NO: 2730475 - DNA, 25 bp, Homo sapien
actgttgaatgaaggcaggccccgg

SEQ ID NO: 2730476 - DNA, 25 bp, Homo sapien
ctgttgaatgaaggcaggccccggc

SEQ ID NO: 2730477 - DNA, 25 bp, Homo sapien
aactcttgtttgcagcgtggcccag

SEQ ID NO: 2730478 - DNA, 25 bp, Homo sapien
tctgcagcaacatagatagaatcct

SEQ ID NO: 2730479 - DNA, 25 bp, Homo sapien
ttgtttgcagcgtggcccagaaagg

SEQ ID NO: 2730480 - DNA, 25 bp, Homo sapien
ggagagcaactgagtcgtctgcagc

SEQ ID NO: 2730481 - DNA, 25 bp, Homo sapien
atttttcagttgctggttacaaagt

SEQ ID NO: 2730482 - DNA, 25 bp, Homo sapien
tttttcagttgctggttacaaagtg

SEQ ID NO: 2730483 - DNA, 25 bp, Homo sapien
tgctgggccgggtagatacagacaa

SEQ ID NO: 2730484 - DNA, 25 bp, Homo sapien
ttggagacagtacacccagggttcc

SEQ ID NO: 2730485 - DNA, 25 bp, Homo sapien
aacttacacagaggcagacgggccc

SEQ ID NO: 2730486 - DNA, 25 bp, Homo sapien
cctgggaccatgtaaagggcttgga

SEQ ID NO: 2730487 - DNA, 25 bp, Homo sapien
ctgcgtcgggcgcggcgttggcggc

SEQ ID NO: 2730488 - DNA, 25 bp, Homo sapien
cgctgcgtcgggcgcggcgttggcg

SEQ ID NO: 2730489 - DNA, 25 bp, Homo sapien
cgggcgcggcgttggcggcggcgcg

SEQ ID NO: 2730490 - DNA, 25 bp, Homo sapien
ggcgcggcgttggcggcggcgcgct

SEQ ID NO: 2730491 - DNA, 25 bp, Homo sapien
gggtccggtgcaccgtgttgcccat

SEQ ID NO: 2730492 - DNA, 25 bp, Homo sapien
agggtccggtgcaccgtgttgccca

SEQ ID NO: 2730493 - DNA, 25 bp, Homo sapien
caaagccgggagaatgaggactggg

SEQ ID NO: 2730494 - DNA, 25 bp, Homo sapien
tccgggaggtaccggagactccagc

SEQ ID NO: 2730495 - DNA, 25 bp, Homo sapien
ggccaaagccgggagaatgaggact

SEQ ID NO: 2730496 - DNA, 25 bp, Homo sapien
gcgcgccgagctgaggtccgggagg

SEQ ID NO: 2730497 - DNA, 25 bp, Homo sapien
cccaggtcgccttgagtttgctcat

SEQ ID NO: 2730498 - DNA, 25 bp, Homo sapien
gtttgctcatcagcgccctcgggct

SEQ ID NO: 2730499 - DNA, 25 bp, Homo sapien
agctgcagtcttggcaccacgggtg

SEQ ID NO: 2730500 - DNA, 25 bp, Homo sapien
cacgggtggcttctgaccgtcggaa

SEQ ID NO: 2730501 - DNA, 25 bp, Homo sapien
ggctggaaactggggtgcccctgag

SEQ ID NO: 2730502 - DNA, 25 bp, Homo sapien
ctggaaactggggtgcccctgagag

SEQ ID NO: 2730503 - DNA, 25 bp, Homo sapien
tgggaggctggaaactggggtgccc

SEQ ID NO: 2730504 - DNA, 25 bp, Homo sapien
ggaaactggggtgcccctgagagca

SEQ ID NO: 2730505 - DNA, 25 bp, Homo sapien
caaagcacggcagcatgtgccgcgg

SEQ ID NO: 2730506 - DNA, 25 bp, Homo sapien
acgtggccaaagcacggcagcatgt

SEQ ID NO: 2730507 - DNA, 25 bp, Homo sapien
taactagggggcgatgcgatctgca

SEQ ID NO: 2730508 - DNA, 25 bp, Homo sapien
cagcgactccgagggggcgaaggag

SEQ ID NO: 2730509 - DNA, 25 bp, Homo sapien
tcgaggagctaaaagcgaaggccgc

SEQ ID NO: 2730510 - DNA, 25 bp, Homo sapien
gatggcaggaagcaacagctcccga

SEQ ID NO: 2730511 - DNA, 25 bp, Homo sapien
gaagcaacagctcccgatactctgg

SEQ ID NO: 2730512 - DNA, 25 bp, Homo sapien
tactctggccccgagacgccggctt

SEQ ID NO: 2730513 - DNA, 25 bp, Homo sapien
cctgctggagttccgcagatggcat

SEQ ID NO: 2730514 - DNA, 25 bp, Homo sapien
gtggcagctgggaaaatacgttctg

SEQ ID NO: 2730515 - DNA, 25 bp, Homo sapien
catttttctcccgtgtagggctcat

SEQ ID NO: 2730516 - DNA, 25 bp, Homo sapien
tggcagctgggaaaatacgttctga

SEQ ID NO: 2730517 - DNA, 25 bp, Homo sapien
acatttttctcccgtgtagggctca

SEQ ID NO: 2730518 - DNA, 25 bp, Homo sapien
gttgcccttctcgttcatagaaggg

SEQ ID NO: 2730519 - DNA, 25 bp, Homo sapien
agttgcccttctcgttcatagaagg

SEQ ID NO: 2730520 - DNA, 25 bp, Homo sapien
gcagttgcccttctcgttcatagaa

SEQ ID NO: 2730521 - DNA, 25 bp, Homo sapien
cagttgcccttctcgttcatagaag

SEQ ID NO: 2730522 - DNA, 25 bp, Homo sapien
tactagggtggccaatcagatgact

SEQ ID NO: 2730523 - DNA, 25 bp, Homo sapien
catcggcagagatagctcagggaca

SEQ ID NO: 2730524 - DNA, 25 bp, Homo sapien
tgaatgcccaacgacaacaggcgtg

SEQ ID NO: 2730525 - DNA, 25 bp, Homo sapien
cacacagctggtttagttaagggca

SEQ ID NO: 2730526 - DNA, 25 bp, Homo sapien
cagctggccttttggttctacaaca

SEQ ID NO: 2730527 - DNA, 25 bp, Homo sapien
tacagttagagcttgagcagacctc

SEQ ID NO: 2730528 - DNA, 25 bp, Homo sapien
caacagacacttgaatgggaagcag

SEQ ID NO: 2730529 - DNA, 25 bp, Homo sapien
ttcatggaagaagggtaaggcccac

SEQ ID NO: 2730530 - DNA, 25 bp, Homo sapien
ttgcctttggcctgcgcgtggaagc

SEQ ID NO: 2730531 - DNA, 25 bp, Homo sapien
ttcacgctgtagaacacgcggccgt

SEQ ID NO: 2730532 - DNA, 25 bp, Homo sapien
tgaacgtgacgccattgcagaagct

SEQ ID NO: 2730533 - DNA, 25 bp, Homo sapien
cacctcgtcggtgatgccgtagaca

SEQ ID NO: 2730534 - DNA, 25 bp, Homo sapien
tccccagggggcgccgcgcccgcga

SEQ ID NO: 2730535 - DNA, 25 bp, Homo sapien
gcaaaggcaccgctgccaggtcccc

SEQ ID NO: 2730536 - DNA, 25 bp, Homo sapien
gcgcaaaggcaccgctgccaggtcc

SEQ ID NO: 2730537 - DNA, 25 bp, Homo sapien
aaaggcaccgctgccaggtccccag

SEQ ID NO: 2730538 - DNA, 25 bp, Homo sapien
tgagcctcaatcacgtgtcagaaac

SEQ ID NO: 2730539 - DNA, 25 bp, Homo sapien
ttctgactgtaaaagcaatacaagc

SEQ ID NO: 2730540 - DNA, 25 bp, Homo sapien
gatgtatccaatgacaactcgcttt

SEQ ID NO: 2730541 - DNA, 25 bp, Homo sapien
gaaacttcccctctattatctcata

SEQ ID NO: 2730542 - DNA, 25 bp, Homo sapien
cattgcatgggatacgcttgtacta

SEQ ID NO: 2730543 - DNA, 25 bp, Homo sapien
catgggatacgcttgtactaaaatt

SEQ ID NO: 2730544 - DNA, 25 bp, Homo sapien
gtacgtcccaaacattgcatgggat

SEQ ID NO: 2730545 - DNA, 25 bp, Homo sapien
tcccaaacattgcatgggatacgct

SEQ ID NO: 2730546 - DNA, 25 bp, Homo sapien
ggtcataagcatttccgacaaggga

SEQ ID NO: 2730547 - DNA, 25 bp, Homo sapien
tgaccagcttcccacgactgggcaa

SEQ ID NO: 2730548 - DNA, 25 bp, Homo sapien
ggcctgaactcgaggacctccagaa

SEQ ID NO: 2730549 - DNA, 25 bp, Homo sapien
cataagttgagtatccctgatctga

SEQ ID NO: 2730550 - DNA, 25 bp, Homo sapien
tgttaccattctatagtgtcttgaa

SEQ ID NO: 2730551 - DNA, 25 bp, Homo sapien
taaggtctagaagagactgctatgc

SEQ ID NO: 2730552 - DNA, 25 bp, Homo sapien
tgtgtcagtctggtcaccaccatgt

SEQ ID NO: 2730553 - DNA, 25 bp, Homo sapien
ccctagctggaatatgagtctcttg

SEQ ID NO: 2730554 - DNA, 25 bp, Homo sapien
catatgacataggtaaaaaagcaaa

SEQ ID NO: 2730555 - DNA, 25 bp, Homo sapien
tcatatgacataggtaaaaaagcaa

SEQ ID NO: 2730556 - DNA, 25 bp, Homo sapien
tatgacataggtaaaaaagcaaaaa

SEQ ID NO: 2730557 - DNA, 25 bp, Homo sapien
cgtcagcgtgtcagcgaaggcgctc

SEQ ID NO: 2730558 - DNA, 25 bp, Homo sapien
gtcagcgtgtcagcgaaggcgctct

SEQ ID NO: 2730559 - DNA, 25 bp, Homo sapien
ttggccgcgtcgtggctgctgggcg

SEQ ID NO: 2730560 - DNA, 25 bp, Homo sapien
gttgttctcgagctcgttgttgtcg

SEQ ID NO: 2730561 - DNA, 25 bp, Homo sapien
ttgttgtcgaagttggccgcgtcgt

SEQ ID NO: 2730562 - DNA, 25 bp, Homo sapien
cgagctcgttgttgtcgaagttggc

SEQ ID NO: 2730563 - DNA, 25 bp, Homo sapien
ggccgcggcgtcggctggcggtggg

SEQ ID NO: 2730564 - DNA, 25 bp, Homo sapien
cccgcacggaatggcggcggccgcg

SEQ ID NO: 2730565 - DNA, 25 bp, Homo sapien
gcggcgtcggctggcggtgggcccg

SEQ ID NO: 2730566 - DNA, 25 bp, Homo sapien
tcacggggcccgcacggaatggcgg

SEQ ID NO: 2730567 - DNA, 25 bp, Homo sapien
tccagtagcgccggcgacgacgcgg

SEQ ID NO: 2730568 - DNA, 25 bp, Homo sapien
ctccagtagcgccggcgacgacgcg

SEQ ID NO: 2730569 - DNA, 25 bp, Homo sapien
gtagcgccggcgacgacgcgggccg

SEQ ID NO: 2730570 - DNA, 25 bp, Homo sapien
cagtagcgccggcgacgacgcgggc

SEQ ID NO: 2730571 - DNA, 25 bp, Homo sapien
gtactctttgcggtcgagcagcgcg

SEQ ID NO: 2730572 - DNA, 25 bp, Homo sapien
gtcgcacgacgtgatgccgaaggcc

SEQ ID NO: 2730573 - DNA, 25 bp, Homo sapien
tgcgcaggccactttgcggtcggcc

SEQ ID NO: 2730574 - DNA, 25 bp, Homo sapien
gcctgcgtggtgtcgacgcacagca

SEQ ID NO: 2730575 - DNA, 25 bp, Homo sapien
cgctgagggaccctgatggagtcgt

SEQ ID NO: 2730576 - DNA, 25 bp, Homo sapien
tggagtcgtggtcgcagggctggac

SEQ ID NO: 2730577 - DNA, 25 bp, Homo sapien
ggtcatatctgaatcactatcgtcc

SEQ ID NO: 2730578 - DNA, 25 bp, Homo sapien
tcatatctgaatcactatcgtcctg

SEQ ID NO: 2730579 - DNA, 25 bp, Homo sapien
cttttgggagatactaatttgagtt

SEQ ID NO: 2730580 - DNA, 25 bp, Homo sapien
tctgttggggcaaccccgagaatgc

SEQ ID NO: 2730581 - DNA, 25 bp, Homo sapien
caaccccgagaatgcagggcttctt

SEQ ID NO: 2730582 - DNA, 25 bp, Homo sapien
atgttaacaatgtctctctcaggtg

SEQ ID NO: 2730583 - DNA, 25 bp, Homo sapien
gcttcttgctgggaccggtgggaga

SEQ ID NO: 2730584 - DNA, 25 bp, Homo sapien
acaccgtgcactcgccattcttgat

SEQ ID NO: 2730585 - DNA, 25 bp, Homo sapien
atcttaatgacgtccttgatgggcc

SEQ ID NO: 2730586 - DNA, 25 bp, Homo sapien
ttcttgatgcctgccggctccggtg

SEQ ID NO: 2730587 - DNA, 25 bp, Homo sapien
gcttgagccgcaggccgcagctgtg

SEQ ID NO: 2730588 - DNA, 25 bp, Homo sapien
gatagggaagggcattacagagact

SEQ ID NO: 2730589 - DNA, 25 bp, Homo sapien
gaacttactgctggtcttctccttg

SEQ ID NO: 2730590 - DNA, 25 bp, Homo sapien
gaaaaacagaacttactgctggtct

SEQ ID NO: 2730591 - DNA, 25 bp, Homo sapien
ggtgggtcacctgcctctaggattc

SEQ ID NO: 2730592 - DNA, 25 bp, Homo sapien
ggagagaatcccagtgccagcattt

SEQ ID NO: 2730593 - DNA, 25 bp, Homo sapien
cagtgaacactttagtaaccagcgg

SEQ ID NO: 2730594 - DNA, 25 bp, Homo sapien
taaccagcggaggaagatacactga

SEQ ID NO: 2730595 - DNA, 25 bp, Homo sapien
aatagacaggccaagggacttccct

SEQ ID NO: 2730596 - DNA, 25 bp, Homo sapien
catctctgattggaaggaactgtac

SEQ ID NO: 2730597 - DNA, 25 bp, Homo sapien
tgcaaaataaagtacagtggctcct

SEQ ID NO: 2730598 - DNA, 25 bp, Homo sapien
caggagacggttgtctgcagcacca

SEQ ID NO: 2730599 - DNA, 25 bp, Homo sapien
ttattatggcaataagacctgccgc

SEQ ID NO: 2730600 - DNA, 25 bp, Homo sapien
cctgttgtgtgatcatgaggtcact

SEQ ID NO: 2730601 - DNA, 25 bp, Homo sapien
tctcgagcttcctgggacttggagc

SEQ ID NO: 2730602 - DNA, 25 bp, Homo sapien
ggtcacttcactcacaggacctcag

SEQ ID NO: 2730603 - DNA, 25 bp, Homo sapien
atgtggcagcagacactcccgggtt

SEQ ID NO: 2730604 - DNA, 25 bp, Homo sapien
gcccagtttttcaggagtctccgaa

SEQ ID NO: 2730605 - DNA, 25 bp, Homo sapien
gtggacacccctgaataacaagaga

SEQ ID NO: 2730606 - DNA, 25 bp, Homo sapien
ggaaccctccacataggcacaggtg

SEQ ID NO: 2730607 - DNA, 25 bp, Homo sapien
tgggcacaagaccatgaacaacggg

SEQ ID NO: 2730608 - DNA, 25 bp, Homo sapien
tgtgaagcgcacagcaggttctggt

SEQ ID NO: 2730609 - DNA, 25 bp, Homo sapien
gagtaactactacgtgctggcacag

SEQ ID NO: 2730610 - DNA, 25 bp, Homo sapien
ttctgagaacctgctaggacaagga

SEQ ID NO: 2730611 - DNA, 25 bp, Homo sapien
ggtcagagaaaagttcaccctgtgt

SEQ ID NO: 2730612 - DNA, 25 bp, Homo sapien
tctacttaacgccgttttggcagca

SEQ ID NO: 2730613 - DNA, 25 bp, Homo sapien
ttctacttaacgccgttttggcagc

SEQ ID NO: 2730614 - DNA, 25 bp, Homo sapien
caggacctgagggtgatcaccaacc

SEQ ID NO: 2730615 - DNA, 25 bp, Homo sapien
gcctcaactggacggactcaccggg

SEQ ID NO: 2730616 - DNA, 25 bp, Homo sapien
aggacctgagggtgatcaccaaccg

SEQ ID NO: 2730617 - DNA, 25 bp, Homo sapien
ctctgcctcaactggacggactcac

SEQ ID NO: 2730618 - DNA, 25 bp, Homo sapien
gacactttcgtaaggcacagacaga

SEQ ID NO: 2730619 - DNA, 25 bp, Homo sapien
caaaaaggatttcagcgatgaccac

SEQ ID NO: 2730620 - DNA, 25 bp, Homo sapien
caagtcgtttcattagggactcgga

SEQ ID NO: 2730621 - DNA, 25 bp, Homo sapien
gatccccaaggattagactgtatcg

SEQ ID NO: 2730622 - DNA, 25 bp, Homo sapien
gtaggggccacgagggggaggctca

SEQ ID NO: 2730623 - DNA, 25 bp, Homo sapien
taggggccacgagggggaggctcag

SEQ ID NO: 2730624 - DNA, 25 bp, Homo sapien
gcagggagtgctcaggaggagcttc

SEQ ID NO: 2730625 - DNA, 25 bp, Homo sapien
ggaggagcttctgcctgccaagggc

SEQ ID NO: 2730626 - DNA, 25 bp, Homo sapien
ctgcagggagtgctcaggaggagct

SEQ ID NO: 2730627 - DNA, 25 bp, Homo sapien
ctgcctgccaagggctgtccagcat

SEQ ID NO: 2730628 - DNA, 25 bp, Homo sapien
gctcctccagcacggggcccatcag

SEQ ID NO: 2730629 - DNA, 25 bp, Homo sapien
ccatcagcttctgcgtttgggcagc

SEQ ID NO: 2730630 - DNA, 25 bp, Homo sapien
gcccatcagcttctgcgtttgggca

SEQ ID NO: 2730631 - DNA, 25 bp, Homo sapien
gcttctgcgtttgggcagctccttt

SEQ ID NO: 2730632 - DNA, 25 bp, Homo sapien
gcaggagtctggcttcccggtcgtt

SEQ ID NO: 2730633 - DNA, 25 bp, Homo sapien
tcaaggttacccagatccacaaggc

SEQ ID NO: 2730634 - DNA, 25 bp, Homo sapien
tctcaccgtggccactagagagcga

SEQ ID NO: 2730635 - DNA, 25 bp, Homo sapien
gactcaatgtcaccctgacgtgcct

SEQ ID NO: 2730636 - DNA, 25 bp, Homo sapien
aacacttagaaccatgagcaatcct

SEQ ID NO: 2730637 - DNA, 25 bp, Homo sapien
tccttctgtagaggcggctcgagct

SEQ ID NO: 2730638 - DNA, 25 bp, Homo sapien
cacttagaaccatgagcaatccttc

SEQ ID NO: 2730639 - DNA, 25 bp, Homo sapien
ctggctggggcactacaaaggggca

SEQ ID NO: 2730640 - DNA, 25 bp, Homo sapien
cctcgggctgtctgttgggacttga

SEQ ID NO: 2730641 - DNA, 25 bp, Homo sapien
tccaatgttaggatgcagaggaatg

SEQ ID NO: 2730642 - DNA, 25 bp, Homo sapien
gaccggttcagatggcagctgtcca

SEQ ID NO: 2730643 - DNA, 25 bp, Homo sapien
ctgggaacctgcatggccagtgctt

SEQ ID NO: 2730644 - DNA, 25 bp, Homo sapien
ggtgtctgaactccctctgggccgg

SEQ ID NO: 2730645 - DNA, 25 bp, Homo sapien
ggctgtccagggtcactctcccaga

SEQ ID NO: 2730646 - DNA, 25 bp, Homo sapien
tgggtgtctgaactccctctgggcc

SEQ ID NO: 2730647 - DNA, 25 bp, Homo sapien
tccagggtcactctcccagatcaga

SEQ ID NO: 2730648 - DNA, 25 bp, Homo sapien
ctcttcgatgctgagaagcagatgt

SEQ ID NO: 2730649 - DNA, 25 bp, Homo sapien
aacgcctcttcgatgctgagaagca

SEQ ID NO: 2730650 - DNA, 25 bp, Homo sapien
tgcctcaacgcctcttcgatgctga

SEQ ID NO: 2730651 - DNA, 25 bp, Homo sapien
ggccatgcctcaacgcctcttcgat

SEQ ID NO: 2730652 - DNA, 25 bp, Homo sapien
catggcctatgtcaaccctctcaag

SEQ ID NO: 2730653 - DNA, 25 bp, Homo sapien
agaggagagcgtgactccaggccct

SEQ ID NO: 2730654 - DNA, 25 bp, Homo sapien
acaggtctccatggcctatgtcaac

SEQ ID NO: 2730655 - DNA, 25 bp, Homo sapien
agtagggaaggcagacattcgcaca

SEQ ID NO: 2730656 - DNA, 25 bp, Homo sapien
ctgggtcactgctgccatcttttat

SEQ ID NO: 2730657 - DNA, 25 bp, Homo sapien
ggtcactgctgccatcttttattct

SEQ ID NO: 2730658 - DNA, 25 bp, Homo sapien
tcactgctgccatcttttattctga

SEQ ID NO: 2730659 - DNA, 25 bp, Homo sapien
tgggtcactgctgccatcttttatt

SEQ ID NO: 2730660 - DNA, 25 bp, Homo sapien
tttgcggggcgatggagatgaaaaa

SEQ ID NO: 2730661 - DNA, 25 bp, Homo sapien
tgcggggcgatggagatgaaaaagt

SEQ ID NO: 2730662 - DNA, 25 bp, Homo sapien
ctttgcggggcgatggagatgaaaa

SEQ ID NO: 2730663 - DNA, 25 bp, Homo sapien
cggggcgatggagatgaaaaagtca

SEQ ID NO: 2730664 - DNA, 25 bp, Homo sapien
tgatccccagttgtaagtgacggtg

SEQ ID NO: 2730665 - DNA, 25 bp, Homo sapien
gacgctggctctattgactggtgac

SEQ ID NO: 2730666 - DNA, 25 bp, Homo sapien
gactggtgacaaggcccatctgatg

SEQ ID NO: 2730667 - DNA, 25 bp, Homo sapien
tctgatggctgattaactgatcccc

SEQ ID NO: 2730668 - DNA, 25 bp, Homo sapien
atccgtcgtggatgtctagcaggtc

SEQ ID NO: 2730669 - DNA, 25 bp, Homo sapien
ttttcctgatagtgttgcgtcccac

SEQ ID NO: 2730670 - DNA, 25 bp, Homo sapien
tgtgtgcattccaatgcctatcaca

SEQ ID NO: 2730671 - DNA, 25 bp, Homo sapien
ggtcctcagggagcagtggttttcc

SEQ ID NO: 2730672 - DNA, 25 bp, Homo sapien
accgaacgcactccccatccaaaca

SEQ ID NO: 2730673 - DNA, 25 bp, Homo sapien
agcctggtaacgctggcaccgaacg

SEQ ID NO: 2730674 - DNA, 25 bp, Homo sapien
ccttcgagcctggtaacgctggcac

SEQ ID NO: 2730675 - DNA, 25 bp, Homo sapien
tggtaacgctggcaccgaacgcact

SEQ ID NO: 2730676 - DNA, 25 bp, Homo sapien
tatgctctggcatccacaactgtga

SEQ ID NO: 2730677 - DNA, 25 bp, Homo sapien
ctgtgaggtgagcttctctgaaaac

SEQ ID NO: 2730678 - DNA, 25 bp, Homo sapien
caaaaatgcagacgggattagtcac

SEQ ID NO: 2730679 - DNA, 25 bp, Homo sapien
aaccaaaaatgcagacgggattagt

SEQ ID NO: 2730680 - DNA, 25 bp, Homo sapien
aactcccgggtgtggagagtggcat

SEQ ID NO: 2730681 - DNA, 25 bp, Homo sapien
ctgggaactcccgggtgtggagagt

SEQ ID NO: 2730682 - DNA, 25 bp, Homo sapien
ggaactcccgggtgtggagagtggc

SEQ ID NO: 2730683 - DNA, 25 bp, Homo sapien
tgggaactcccgggtgtggagagtg

SEQ ID NO: 2730684 - DNA, 25 bp, Homo sapien
gttcgggatatcaagcgggatctgc

SEQ ID NO: 2730685 - DNA, 25 bp, Homo sapien
catgaatggaatgcgtttggcccca

SEQ ID NO: 2730686 - DNA, 25 bp, Homo sapien
ctccctaagcaagtcgggcccggat

SEQ ID NO: 2730687 - DNA, 25 bp, Homo sapien
cggatcgccagtgagcctgtgcgct

SEQ ID NO: 2730688 - DNA, 25 bp, Homo sapien
cctccaataggaagattcaacatct

SEQ ID NO: 2730689 - DNA, 25 bp, Homo sapien
ttcaacatctatgctgagtctcctg

SEQ ID NO: 2730690 - DNA, 25 bp, Homo sapien
caataggaagattcaacatctatgc

SEQ ID NO: 2730691 - DNA, 25 bp, Homo sapien
gaagattcaacatctatgctgagtc

SEQ ID NO: 2730692 - DNA, 25 bp, Homo sapien
agtagaattgttctgaattccgtgc

SEQ ID NO: 2730693 - DNA, 25 bp, Homo sapien
ttgttctgaattccgtgctctgcca

SEQ ID NO: 2730694 - DNA, 25 bp, Homo sapien
aattgttctgaattccgtgctctgc

SEQ ID NO: 2730695 - DNA, 25 bp, Homo sapien
cttgtcctcaccagtagaattgttc

SEQ ID NO: 2730696 - DNA, 25 bp, Homo sapien
tctgacttgttacgtctgctgagaa

SEQ ID NO: 2730697 - DNA, 25 bp, Homo sapien
tccctctgagggtgatctgtctttt

SEQ ID NO: 2730698 - DNA, 25 bp, Homo sapien
tcatttgccttggataattctcagt

SEQ ID NO: 2730699 - DNA, 25 bp, Homo sapien
gctgagaagtcagctaactgccttg

SEQ ID NO: 2730700 - DNA, 25 bp, Homo sapien
gagaggactctgactacaatagagg

SEQ ID NO: 2730701 - DNA, 25 bp, Homo sapien
tgatccaaggcagccatatctgctt

SEQ ID NO: 2730702 - DNA, 25 bp, Homo sapien
tgcactgcgtgcagctgatccaagg

SEQ ID NO: 2730703 - DNA, 25 bp, Homo sapien
agtccctagcagtcgcggtgcaggt

SEQ ID NO: 2730704 - DNA, 25 bp, Homo sapien
tgtcttccatttacttggccggcaa

SEQ ID NO: 2730705 - DNA, 25 bp, Homo sapien
gtcttccatttacttggccggcaaa

SEQ ID NO: 2730706 - DNA, 25 bp, Homo sapien
tcttccatttacttggccggcaaag

SEQ ID NO: 2730707 - DNA, 25 bp, Homo sapien
aatacagcggctgcctaagggagcc

SEQ ID NO: 2730708 - DNA, 25 bp, Homo sapien
taccagcgacatcgagtctgtgaca

SEQ ID NO: 2730709 - DNA, 25 bp, Homo sapien
agcgaagctcttggattactggccc

SEQ ID NO: 2730710 - DNA, 25 bp, Homo sapien
tcctcagctgggtttccgattacaa

SEQ ID NO: 2730711 - DNA, 25 bp, Homo sapien
tgtggaggacattcacgctggcatt

SEQ ID NO: 2730712 - DNA, 25 bp, Homo sapien
agcactataagcaaataccatgtaa

SEQ ID NO: 2730713 - DNA, 25 bp, Homo sapien
cccaacctgaccattgctaacattg

SEQ ID NO: 2730714 - DNA, 25 bp, Homo sapien
taagcaaataccatgtaaagaaatc

SEQ ID NO: 2730715 - DNA, 25 bp, Homo sapien
gctgaactcagcacattcgggacca

SEQ ID NO: 2730716 - DNA, 25 bp, Homo sapien
taatcgagtcaagctggacgaggcc

SEQ ID NO: 2730717 - DNA, 25 bp, Homo sapien
gccacgggaggtgaggctcttcaca

SEQ ID NO: 2730718 - DNA, 25 bp, Homo sapien
tttgtgaagcagaggcgaagcatca

SEQ ID NO: 2730719 - DNA, 25 bp, Homo sapien
cgcgtgggcgctggagtacatttat

SEQ ID NO: 2730720 - DNA, 25 bp, Homo sapien
tcccaggaggatacgaagcgttttc

SEQ ID NO: 2730721 - DNA, 25 bp, Homo sapien
tatgaaggtgccgtgtcccggtgtc

SEQ ID NO: 2730722 - DNA, 25 bp, Homo sapien
tgcctgggcctttccgatgtaaact

SEQ ID NO: 2730723 - DNA, 25 bp, Homo sapien
catgggcctggagcacatcgtgccc

SEQ ID NO: 2730724 - DNA, 25 bp, Homo sapien
aaagcggcttttggttcggcgcaga

SEQ ID NO: 2730725 - DNA, 25 bp, Homo sapien
ttggccccgagaacagacaaagagc

SEQ ID NO: 2730726 - DNA, 25 bp, Homo sapien
ggctctgtcaacgtgcgcttcagca

SEQ ID NO: 2730727 - DNA, 25 bp, Homo sapien
tcaagtcggtatgcagtgaaaagtc

SEQ ID NO: 2730728 - DNA, 25 bp, Homo sapien
tctccatacagggagggcgttgccc

SEQ ID NO: 2730729 - DNA, 25 bp, Homo sapien
cacagcgcccagctcttaaaaagtt

SEQ ID NO: 2730730 - DNA, 25 bp, Homo sapien
gagttcctcagctgaataagtagta

SEQ ID NO: 2730731 - DNA, 25 bp, Homo sapien
gggcatctttcctgggctacccagt

SEQ ID NO: 2730732 - DNA, 25 bp, Homo sapien
catcagcctttacatctccaagtag

SEQ ID NO: 2730733 - DNA, 25 bp, Homo sapien
tctcaaaggcatttcctccaggtat

SEQ ID NO: 2730734 - DNA, 25 bp, Homo sapien
caggtatttctatcctacatcagcc

SEQ ID NO: 2730735 - DNA, 25 bp, Homo sapien
tgtccaacaagccttgctttgagat

SEQ ID NO: 2730736 - DNA, 25 bp, Homo sapien
cgtccttggttcagggatgaagctt

SEQ ID NO: 2730737 - DNA, 25 bp, Homo sapien
gatgaagcttgtgtgagtcacggag

SEQ ID NO: 2730738 - DNA, 25 bp, Homo sapien
ggccattgttggcaggctgcgtcct

SEQ ID NO: 2730739 - DNA, 25 bp, Homo sapien
aatgaaagtatgtctcaattcatat

SEQ ID NO: 2730740 - DNA, 25 bp, Homo sapien
aaatgaaagtatgtctcaattcata

SEQ ID NO: 2730741 - DNA, 25 bp, Homo sapien
aaaatgaaagtatgtctcaattcat

SEQ ID NO: 2730742 - DNA, 25 bp, Homo sapien
cagctacagcttgaggatatccaga

SEQ ID NO: 2730743 - DNA, 25 bp, Homo sapien
tcctagggaagaatcgagcagccca

SEQ ID NO: 2730744 - DNA, 25 bp, Homo sapien
tatttaagccgctcagtctgtggcg

SEQ ID NO: 2730745 - DNA, 25 bp, Homo sapien
cgcagtgctggaggtgtgacttcac

SEQ ID NO: 2730746 - DNA, 25 bp, Homo sapien
tggtgacgatcatgttaaacgaata

SEQ ID NO: 2730747 - DNA, 25 bp, Homo sapien
gacctgcttgtggtatcgagtcacc

SEQ ID NO: 2730748 - DNA, 25 bp, Homo sapien
aaacgaatatatttacctgggccag

SEQ ID NO: 2730749 - DNA, 25 bp, Homo sapien
tcaactccagaatcaacttgtttaa

SEQ ID NO: 2730750 - DNA, 25 bp, Homo sapien
aatactggatacaagtccgttatca

SEQ ID NO: 2730751 - DNA, 25 bp, Homo sapien
gatacaagtccgttatcagatttgg

SEQ ID NO: 2730752 - DNA, 25 bp, Homo sapien
ttttattagctattggtatatctcc

SEQ ID NO: 2730753 - DNA, 25 bp, Homo sapien
ggattttgctcctttgtcgtcgttg

SEQ ID NO: 2730754 - DNA, 25 bp, Homo sapien
tggtgccaccttctctctggcccct

SEQ ID NO: 2730755 - DNA, 25 bp, Homo sapien
ccctggtgccaccttctctctggcc

SEQ ID NO: 2730756 - DNA, 25 bp, Homo sapien
caattccctggtgccaccttctctc

SEQ ID NO: 2730757 - DNA, 25 bp, Homo sapien
gtgccaccttctctctggcccctga

SEQ ID NO: 2730758 - DNA, 25 bp, Homo sapien
cttggtagaatcttggttggatctt

SEQ ID NO: 2730759 - DNA, 25 bp, Homo sapien
ggatcccccacgatcttcttggtag

SEQ ID NO: 2730760 - DNA, 25 bp, Homo sapien
atctcgttggatcccccacgatctt

SEQ ID NO: 2730761 - DNA, 25 bp, Homo sapien
ttcttggtagaatcttggttggatc

SEQ ID NO: 2730762 - DNA, 25 bp, Homo sapien
catctgtggaggtgagtaagagggt

SEQ ID NO: 2730763 - DNA, 25 bp, Homo sapien
acgtcatctgtggaggtgagtaaga

SEQ ID NO: 2730764 - DNA, 25 bp, Homo sapien
ttacacgtcatctgtggaggtgagt

SEQ ID NO: 2730765 - DNA, 25 bp, Homo sapien
tacacgtcatctgtggaggtgagta

SEQ ID NO: 2730766 - DNA, 25 bp, Homo sapien
tgatataggacaggaccctttctgg

SEQ ID NO: 2730767 - DNA, 25 bp, Homo sapien
cttaaaacccacagtccaaaagatg

SEQ ID NO: 2730768 - DNA, 25 bp, Homo sapien
tcttccttgaagtaagtgaaacgag

SEQ ID NO: 2730769 - DNA, 25 bp, Homo sapien
ggaagcttaatgatgtcagtcagca

SEQ ID NO: 2730770 - DNA, 25 bp, Homo sapien
tctttgcctggcttagtgcagctca

SEQ ID NO: 2730771 - DNA, 25 bp, Homo sapien
tctttgcctggaagaactcaccgta

SEQ ID NO: 2730772 - DNA, 25 bp, Homo sapien
tctttgctcaaagaggacttccaga

SEQ ID NO: 2730773 - DNA, 25 bp, Homo sapien
gaggacttccagacaaaatcctctt

SEQ ID NO: 2730774 - DNA, 25 bp, Homo sapien
tcccttcgtgccatgccgtttttct

SEQ ID NO: 2730775 - DNA, 25 bp, Homo sapien
agttcccttcgtgccatgccgtttt

SEQ ID NO: 2730776 - DNA, 25 bp, Homo sapien
tcgtgccatgccgtttttctcctcc

SEQ ID NO: 2730777 - DNA, 25 bp, Homo sapien
cttcgtgccatgccgtttttctcct

SEQ ID NO: 2730778 - DNA, 25 bp, Homo sapien
tccctgttaaaatacctccatggct

SEQ ID NO: 2730779 - DNA, 25 bp, Homo sapien
gatcttctagacatggttcccgtta

SEQ ID NO: 2730780 - DNA, 25 bp, Homo sapien
tgcaaaggactcattggccacctcc

SEQ ID NO: 2730781 - DNA, 25 bp, Homo sapien
taagtccctctacctgatgagaaag

SEQ ID NO: 2730782 - DNA, 25 bp, Homo sapien
gggtctggctggatctcaagtcaca

SEQ ID NO: 2730783 - DNA, 25 bp, Homo sapien
tgagaggactggtcaggacagcaac

SEQ ID NO: 2730784 - DNA, 25 bp, Homo sapien
taagcttagcccagtcaatttccat

SEQ ID NO: 2730785 - DNA, 25 bp, Homo sapien
ggagttagtgcccactttgccaggt

SEQ ID NO: 2730786 - DNA, 25 bp, Homo sapien
tttccaaggtgcctccattggagaa

SEQ ID NO: 2730787 - DNA, 25 bp, Homo sapien
ttttccaaggtgcctccattggaga

SEQ ID NO: 2730788 - DNA, 25 bp, Homo sapien
ttccaaggtgcctccattggagaaa

SEQ ID NO: 2730789 - DNA, 25 bp, Homo sapien
tcaggcaagactcatccgtggtggt

SEQ ID NO: 2730790 - DNA, 25 bp, Homo sapien
ggaatcacagtgactcccctttgga

SEQ ID NO: 2730791 - DNA, 25 bp, Homo sapien
cctatacatatagtccacctcggag

SEQ ID NO: 2730792 - DNA, 25 bp, Homo sapien
gagagctctcccttgcagtaggatg

SEQ ID NO: 2730793 - DNA, 25 bp, Homo sapien
gccactcgccactcgcctcccgctg

SEQ ID NO: 2730794 - DNA, 25 bp, Homo sapien
gcgccgcgtgggtccgagcccgctg

SEQ ID NO: 2730795 - DNA, 25 bp, Homo sapien
ggccgcccccctgacactcgccact

SEQ ID NO: 2730796 - DNA, 25 bp, Homo sapien
ctgccaacgcctcctccggccgccc

SEQ ID NO: 2730797 - DNA, 25 bp, Homo sapien
caggcctcccgatctgcccggcctg

SEQ ID NO: 2730798 - DNA, 25 bp, Homo sapien
aggcctcccgatctgcccggcctgg

SEQ ID NO: 2730799 - DNA, 25 bp, Homo sapien
ggcctcccgatctgcccggcctggg

SEQ ID NO: 2730800 - DNA, 25 bp, Homo sapien
gcaggcctcccgatctgcccggcct

SEQ ID NO: 2730801 - DNA, 25 bp, Homo sapien
gctgagcatggactggacacttgat

SEQ ID NO: 2730802 - DNA, 25 bp, Homo sapien
cttggaatgcaaagagagccggacc

SEQ ID NO: 2730803 - DNA, 25 bp, Homo sapien
taagggtgtttcacgcactcagtcg

SEQ ID NO: 2730804 - DNA, 25 bp, Homo sapien
agcaaagggcttctactcagtggag

SEQ ID NO: 2730805 - DNA, 25 bp, Homo sapien
tccggatgctgttatcttccctcct

SEQ ID NO: 2730806 - DNA, 25 bp, Homo sapien
cagggcttccggatgctgttatctt

SEQ ID NO: 2730807 - DNA, 25 bp, Homo sapien
gcttccggatgctgttatcttccct

SEQ ID NO: 2730808 - DNA, 25 bp, Homo sapien
tgggcacagggcttccggatgctgt

SEQ ID NO: 2730809 - DNA, 25 bp, Homo sapien
ggtgaggcagcgaagtttacatccc

SEQ ID NO: 2730810 - DNA, 25 bp, Homo sapien
tggtagaggccaaaccaaggccctg

SEQ ID NO: 2730811 - DNA, 25 bp, Homo sapien
tttggaaagctcactagggagtcct

SEQ ID NO: 2730812 - DNA, 25 bp, Homo sapien
tctggtcagtgccagtgcagcggca

SEQ ID NO: 2730813 - DNA, 25 bp, Homo sapien
tcaggtatcacgctacatgaggcta

SEQ ID NO: 2730814 - DNA, 25 bp, Homo sapien
atgatgctctaagctggaaaacccc

SEQ ID NO: 2730815 - DNA, 25 bp, Homo sapien
cccctcgagggtgatgccattagct

SEQ ID NO: 2730816 - DNA, 25 bp, Homo sapien
cactggtcagcgtgggaaaactgag

SEQ ID NO: 2730817 - DNA, 25 bp, Homo sapien
gcaacaacagcacgtggtaaaccac

SEQ ID NO: 2730818 - DNA, 25 bp, Homo sapien
gcacgtggtaaaccaccttgtgggc

SEQ ID NO: 2730819 - DNA, 25 bp, Homo sapien
cataccacatggcatcctgcgcaat

SEQ ID NO: 2730820 - DNA, 25 bp, Homo sapien
tgcgcaatacctttccaggcaacaa

SEQ ID NO: 2730821 - DNA, 25 bp, Homo sapien
taggagccgctcaccagtcactggg

SEQ ID NO: 2730822 - DNA, 25 bp, Homo sapien
gtatgcagggatttccaaaagccag

SEQ ID NO: 2730823 - DNA, 25 bp, Homo sapien
gcaggagcagacctaggagccgctc

SEQ ID NO: 2730824 - DNA, 25 bp, Homo sapien
cacgggagccgttgcgggtatgcag

SEQ ID NO: 2730825 - DNA, 25 bp, Homo sapien
tagggatgcagggatcactgacaag

SEQ ID NO: 2730826 - DNA, 25 bp, Homo sapien
ctgacaaggcgcatgtcttcctctg

SEQ ID NO: 2730827 - DNA, 25 bp, Homo sapien
tctcacaggaatgacgtgctgccca

SEQ ID NO: 2730828 - DNA, 25 bp, Homo sapien
tcttgtgagtaagtttcaagtccac

SEQ ID NO: 2730829 - DNA, 25 bp, Homo sapien
aactccttacggtgttttatgcagc

SEQ ID NO: 2730830 - DNA, 25 bp, Homo sapien
tcccttcgcatcaagagttcgtgag

SEQ ID NO: 2730831 - DNA, 25 bp, Homo sapien
ggctgaagcttcttaggataaactc

SEQ ID NO: 2730832 - DNA, 25 bp, Homo sapien
cactgcccgagacccggaatgggtc

SEQ ID NO: 2730833 - DNA, 25 bp, Homo sapien
taagggcgccgatgacgacccagac

SEQ ID NO: 2730834 - DNA, 25 bp, Homo sapien
gcacaggggcatttaggggagcaga

SEQ ID NO: 2730835 - DNA, 25 bp, Homo sapien
ctccccggtaagggcgccgatgacg

SEQ ID NO: 2730836 - DNA, 25 bp, Homo sapien
cggtaagggcgccgatgacgaccca

SEQ ID NO: 2730837 - DNA, 25 bp, Homo sapien
gagcaaaacttcatctaaaaataat

SEQ ID NO: 2730838 - DNA, 25 bp, Homo sapien
ggaaggctgcggtgggcagatcatt

SEQ ID NO: 2730839 - DNA, 25 bp, Homo sapien
aaaatataaaaatgagcaggtgcag

SEQ ID NO: 2730840 - DNA, 25 bp, Homo sapien
aatataaaaatgagcaggtgcagtg

SEQ ID NO: 2730841 - DNA, 25 bp, Homo sapien
tgagtcagtagagaaccaggctccc

SEQ ID NO: 2730842 - DNA, 25 bp, Homo sapien
ccacctttgtgctcgggagtgctca

SEQ ID NO: 2730843 - DNA, 25 bp, Homo sapien
gtctcgatggtgtaaggaagtctcc

SEQ ID NO: 2730844 - DNA, 25 bp, Homo sapien
aaagggatcttacagctgaagggca

SEQ ID NO: 2730845 - DNA, 25 bp, Homo sapien
cccagattgggcagcaaataacaca

SEQ ID NO: 2730846 - DNA, 25 bp, Homo sapien
cagtggtgtacctgagacggtttta

SEQ ID NO: 2730847 - DNA, 25 bp, Homo sapien
gctgatcgcgcccaagggtcctttg

SEQ ID NO: 2730848 - DNA, 25 bp, Homo sapien
gaagtggcttcagatccggaccaac

SEQ ID NO: 2730849 - DNA, 25 bp, Homo sapien
gtagcacgataaaggtcacccaagg

SEQ ID NO: 2730850 - DNA, 25 bp, Homo sapien
tcccagcacgtagcaagcgcatggt

SEQ ID NO: 2730851 - DNA, 25 bp, Homo sapien
gagtagagacaacccagctttcggc

SEQ ID NO: 2730852 - DNA, 25 bp, Homo sapien
tctcaggctgtcaaatagtgctcac

SEQ ID NO: 2730853 - DNA, 25 bp, Homo sapien
cagcctcccctgagcacacgctgtc

SEQ ID NO: 2730854 - DNA, 25 bp, Homo sapien
gccagcctcccctgagcacacgctg

SEQ ID NO: 2730855 - DNA, 25 bp, Homo sapien
ggtgaggccagcctcccctgagcac

SEQ ID NO: 2730856 - DNA, 25 bp, Homo sapien
aggacactcattcaactgaagctga

SEQ ID NO: 2730857 - DNA, 25 bp, Homo sapien
tcagttttacttggctcctgagcaa

SEQ ID NO: 2730858 - DNA, 25 bp, Homo sapien
tttacttggctcctgagcaaaatgt

SEQ ID NO: 2730859 - DNA, 25 bp, Homo sapien
ggctagcgacttcagtgtgctggct

SEQ ID NO: 2730860 - DNA, 25 bp, Homo sapien
catcccactcggtgtgagtcatggc

SEQ ID NO: 2730861 - DNA, 25 bp, Homo sapien
agctgagggacctgagcccagccga

SEQ ID NO: 2730862 - DNA, 25 bp, Homo sapien
cacgaaatatcccagctgagggacc

SEQ ID NO: 2730863 - DNA, 25 bp, Homo sapien
cgaaatatcccagctgagggacctg

SEQ ID NO: 2730864 - DNA, 25 bp, Homo sapien
gcacacgaaatatcccagctgaggg

SEQ ID NO: 2730865 - DNA, 25 bp, Homo sapien
gacagccaggccttacatgtgggac

SEQ ID NO: 2730866 - DNA, 25 bp, Homo sapien
gattccaggaaacgtcagcatccca

SEQ ID NO: 2730867 - DNA, 25 bp, Homo sapien
ggatcaagtctagtggctgccaggc

SEQ ID NO: 2730868 - DNA, 25 bp, Homo sapien
catcccaagtgagttaacagaccgg

SEQ ID NO: 2730869 - DNA, 25 bp, Homo sapien
gatgattgatgtcactgagcatgcg

SEQ ID NO: 2730870 - DNA, 25 bp, Homo sapien
tactaccgggcacatgcgatgattg

SEQ ID NO: 2730871 - DNA, 25 bp, Homo sapien
tgcgtggactgcattcacaaacaac

SEQ ID NO: 2730872 - DNA, 25 bp, Homo sapien
ggcaggaggttgtcttacgcatctt

SEQ ID NO: 2730873 - DNA, 25 bp, Homo sapien
ggaaatagtgtaatgccagggccct

SEQ ID NO: 2730874 - DNA, 25 bp, Homo sapien
ggtctcgggcaattgaaaactcagc

SEQ ID NO: 2730875 - DNA, 25 bp, Homo sapien
tactctatctcgtggccaagctggg

SEQ ID NO: 2730876 - DNA, 25 bp, Homo sapien
gaacacaaggttactgcactgggct

SEQ ID NO: 2730877 - DNA, 25 bp, Homo sapien
gaactgaccctgagcctaatcaagg

SEQ ID NO: 2730878 - DNA, 25 bp, Homo sapien
caggaatgcttcttgcccagagaac

SEQ ID NO: 2730879 - DNA, 25 bp, Homo sapien
cctgaacgcagtgatccatctgagc

SEQ ID NO: 2730880 - DNA, 25 bp, Homo sapien
tcctaacagatagaccaggctgccc

SEQ ID NO: 2730881 - DNA, 25 bp, Homo sapien
gaaggcctggatttatgagaaatct

SEQ ID NO: 2730882 - DNA, 25 bp, Homo sapien
tagcacataatgctgatgtcaccaa

SEQ ID NO: 2730883 - DNA, 25 bp, Homo sapien
caccaacgcatataaggttttctcc

SEQ ID NO: 2730884 - DNA, 25 bp, Homo sapien
gactcctggtctacatagcacataa

SEQ ID NO: 2730885 - DNA, 25 bp, Homo sapien
taaccctgtatggtagacagtagca

SEQ ID NO: 2730886 - DNA, 25 bp, Homo sapien
tgcgagggcttactgcgcacgaagc

SEQ ID NO: 2730887 - DNA, 25 bp, Homo sapien
gaagcctcggcttacactttgcgtt

SEQ ID NO: 2730888 - DNA, 25 bp, Homo sapien
cagtctggcagtagaacaattcttc

SEQ ID NO: 2730889 - DNA, 25 bp, Homo sapien
gccccggtgtacgttggctgcgtaa

SEQ ID NO: 2730890 - DNA, 25 bp, Homo sapien
taatggccccggtgtacgttggctg

SEQ ID NO: 2730891 - DNA, 25 bp, Homo sapien
ttggctgcgtaaggtccttgggcac

SEQ ID NO: 2730892 - DNA, 25 bp, Homo sapien
tgtacgttggctgcgtaaggtcctt

SEQ ID NO: 2730893 - DNA, 25 bp, Homo sapien
tttttggtacgatcccatggaggca

SEQ ID NO: 2730894 - DNA, 25 bp, Homo sapien
aagtatcctatagaatgtcccctga

SEQ ID NO: 2730895 - DNA, 25 bp, Homo sapien
tatgcacgtggcttatcactggtca

SEQ ID NO: 2730896 - DNA, 25 bp, Homo sapien
ggagaatagctacatacacgttgag

SEQ ID NO: 2730897 - DNA, 25 bp, Homo sapien
gagaccagcctagagggaagaggaa

SEQ ID NO: 2730898 - DNA, 25 bp, Homo sapien
tctgactcgagcctcaatatgaagc

SEQ ID NO: 2730899 - DNA, 25 bp, Homo sapien
aaatgcaaactgttaagggtggtgg

SEQ ID NO: 2730900 - DNA, 25 bp, Homo sapien
actgttaagggtggtgggcactgac

SEQ ID NO: 2730901 - DNA, 25 bp, Homo sapien
aatccggtgagctccgagaggaaga

SEQ ID NO: 2730902 - DNA, 25 bp, Homo sapien
ttctgtcgttataaatccggtgagc

SEQ ID NO: 2730903 - DNA, 25 bp, Homo sapien
ctgtcgttataaatccggtgagctc

SEQ ID NO: 2730904 - DNA, 25 bp, Homo sapien
acttctgtcgttataaatccggtga

SEQ ID NO: 2730905 - DNA, 25 bp, Homo sapien
aacatcctggaatgccccatcggga

SEQ ID NO: 2730906 - DNA, 25 bp, Homo sapien
cctggaatgccccatcgggaaagta

SEQ ID NO: 2730907 - DNA, 25 bp, Homo sapien
gccccatcgggaaagtatgacttac

SEQ ID NO: 2730908 - DNA, 25 bp, Homo sapien
cagaacatcctggaatgccccatcg

SEQ ID NO: 2730909 - DNA, 25 bp, Homo sapien
tgtgtgtgtccacggctaactaatg

SEQ ID NO: 2730910 - DNA, 25 bp, Homo sapien
gtgtgtccacggctaactaatgttt

SEQ ID NO: 2730911 - DNA, 25 bp, Homo sapien
tgtgtgtccacggctaactaatgtt

SEQ ID NO: 2730912 - DNA, 25 bp, Homo sapien
gtgtgtgtgtccacggctaactaat

SEQ ID NO: 2730913 - DNA, 25 bp, Homo sapien
aaggggacattagggtcactgcatc

SEQ ID NO: 2730914 - DNA, 25 bp, Homo sapien
gggacattagggtcactgcatcttc

SEQ ID NO: 2730915 - DNA, 25 bp, Homo sapien
agggaaggggacattagggtcactg

SEQ ID NO: 2730916 - DNA, 25 bp, Homo sapien
ggaaggggacattagggtcactgca

SEQ ID NO: 2730917 - DNA, 25 bp, Homo sapien
aagaccccaaagatgtgatgctttc

SEQ ID NO: 2730918 - DNA, 25 bp, Homo sapien
tttctcctctcgattgctctgtaag

SEQ ID NO: 2730919 - DNA, 25 bp, Homo sapien
gccacccagaagacgagaactgtga

SEQ ID NO: 2730920 - DNA, 25 bp, Homo sapien
aagtcttagggctcatcctgcggag

SEQ ID NO: 2730921 - DNA, 25 bp, Homo sapien
agttacaatctcatggtggcgggag

SEQ ID NO: 2730922 - DNA, 25 bp, Homo sapien
tggagccatgttgatccaaccaacg

SEQ ID NO: 2730923 - DNA, 25 bp, Homo sapien
tatgtcactgataaccacaggctgg

SEQ ID NO: 2730924 - DNA, 25 bp, Homo sapien
taattaacggcctgtccaaagccag

SEQ ID NO: 2730925 - DNA, 25 bp, Homo sapien
agagcgtgtgctcacaaacttcagt

SEQ ID NO: 2730926 - DNA, 25 bp, Homo sapien
tgcttaggggtccagttgcgtctgt

SEQ ID NO: 2730927 - DNA, 25 bp, Homo sapien
cctcagcacagagcgtgtgctcaca

SEQ ID NO: 2730928 - DNA, 25 bp, Homo sapien
agttgcgtctgtcccacaagcctct

SEQ ID NO: 2730929 - DNA, 25 bp, Homo sapien
tgaaattgctgggtgattaacacac

SEQ ID NO: 2730930 - DNA, 25 bp, Homo sapien
tctggagagctgttgagtaatgaaa

SEQ ID NO: 2730931 - DNA, 25 bp, Homo sapien
acagtcaactaaggagagcctgggc

SEQ ID NO: 2730932 - DNA, 25 bp, Homo sapien
tctaccccagctgtaatgtgcaact

SEQ ID NO: 2730933 - DNA, 25 bp, Homo sapien
ctgcgcttgaccttgcttgtagtgt

SEQ ID NO: 2730934 - DNA, 25 bp, Homo sapien
gcttgtagtgttggccccaatcaga

SEQ ID NO: 2730935 - DNA, 25 bp, Homo sapien
cttgaccttgcttgtagtgttggcc

SEQ ID NO: 2730936 - DNA, 25 bp, Homo sapien
gaccttgcttgtagtgttggcccca

SEQ ID NO: 2730937 - DNA, 25 bp, Homo sapien
cctctggctgctgcaaggaagaccc

SEQ ID NO: 2730938 - DNA, 25 bp, Homo sapien
gctgtaggaacccacgtagagcagg

SEQ ID NO: 2730939 - DNA, 25 bp, Homo sapien
ctgctgcaaggaagacccactggag

SEQ ID NO: 2730940 - DNA, 25 bp, Homo sapien
gaggagggctgtaggaacccacgta

SEQ ID NO: 2730941 - DNA, 25 bp, Homo sapien
actcgcagtgcagattgggtaaact

SEQ ID NO: 2730942 - DNA, 25 bp, Homo sapien
taaactgatgttcagactgacgtcg

SEQ ID NO: 2730943 - DNA, 25 bp, Homo sapien
tgtctgggtcatcgacatagagctc

SEQ ID NO: 2730944 - DNA, 25 bp, Homo sapien
ttgccaccgctgtccttgtctgggt

SEQ ID NO: 2730945 - DNA, 25 bp, Homo sapien
gctgaactgcccctcgaagcggcag

SEQ ID NO: 2730946 - DNA, 25 bp, Homo sapien
ggatcttcatggagttgtcgatgtg

SEQ ID NO: 2730947 - DNA, 25 bp, Homo sapien
tcgatgtggcccacttcgtgcctgc

SEQ ID NO: 2730948 - DNA, 25 bp, Homo sapien
cagcctgccccattgttcagcggga

SEQ ID NO: 2730949 - DNA, 25 bp, Homo sapien
gaagagtagctccttcctgaaccag

SEQ ID NO: 2730950 - DNA, 25 bp, Homo sapien
cagattctcagcaggaacggccagg

SEQ ID NO: 2730951 - DNA, 25 bp, Homo sapien
tggacacgaaccctcgcttgctggg

SEQ ID NO: 2730952 - DNA, 25 bp, Homo sapien
ggtcaggtcgagtgagtgcctccac

SEQ ID NO: 2730953 - DNA, 25 bp, Homo sapien
atcacaccctcagcctaagatgggt

SEQ ID NO: 2730954 - DNA, 25 bp, Homo sapien
tgaagtgggtggtatcgtgatacta

SEQ ID NO: 2730955 - DNA, 25 bp, Homo sapien
tgatactattatcgccatcacaccc

SEQ ID NO: 2730956 - DNA, 25 bp, Homo sapien
acaccctcagcctaagatgggtcaa

SEQ ID NO: 2730957 - DNA, 25 bp, Homo sapien
gacccagtgtagtgagagcctctga

SEQ ID NO: 2730958 - DNA, 25 bp, Homo sapien
ttgtcatagcgggaacacggaccca

SEQ ID NO: 2730959 - DNA, 25 bp, Homo sapien
ccttctaagggtgtgcggtccagca

SEQ ID NO: 2730960 - DNA, 25 bp, Homo sapien
cactgtgacagtaccgagcttcgag

SEQ ID NO: 2730961 - DNA, 25 bp, Homo sapien
tgatgggcggttcctcaaagggaaa

SEQ ID NO: 2730962 - DNA, 25 bp, Homo sapien
gcacctcttgatgggcggttcctca

SEQ ID NO: 2730963 - DNA, 25 bp, Homo sapien
tggtggcttctttgagcacctcttg

SEQ ID NO: 2730964 - DNA, 25 bp, Homo sapien
tctttgagcacctcttgatgggcgg

SEQ ID NO: 2730965 - DNA, 25 bp, Homo sapien
tgacatctggctgctggtcaacttc

SEQ ID NO: 2730966 - DNA, 25 bp, Homo sapien
aacgaggtcaccgtggggtctctgg

SEQ ID NO: 2730967 - DNA, 25 bp, Homo sapien
tgccgctgctgctcaaaacacgcaa

SEQ ID NO: 2730968 - DNA, 25 bp, Homo sapien
gggctggctgatgaaacgaggtcac

SEQ ID NO: 2730969 - DNA, 25 bp, Homo sapien
gcttatcgtgcagcagcccatcaaa

SEQ ID NO: 2730970 - DNA, 25 bp, Homo sapien
gaagactgtgcgagctgtgtccgag

SEQ ID NO: 2730971 - DNA, 25 bp, Homo sapien
cgagctgtgtccgaggagggaatat

SEQ ID NO: 2730972 - DNA, 25 bp, Homo sapien
gaggagggaatatagcttatcgtgc

SEQ ID NO: 2730973 - DNA, 25 bp, Homo sapien
gaacagacaatgagactctgtggga

SEQ ID NO: 2730974 - DNA, 25 bp, Homo sapien
tcaattgagggtgcaggctgtattc

SEQ ID NO: 2730975 - DNA, 25 bp, Homo sapien
gaaggacatcctgtgttaaggctct

SEQ ID NO: 2730976 - DNA, 25 bp, Homo sapien
ctcaggaagagagcgaaaggcatct

SEQ ID NO: 2730977 - DNA, 25 bp, Homo sapien
ggtcacatgtcgagagctgcagtct

SEQ ID NO: 2730978 - DNA, 25 bp, Homo sapien
tgctacagcctctgggatcacctgc

SEQ ID NO: 2730979 - DNA, 25 bp, Homo sapien
cagactccgacacatagcaggtgct

SEQ ID NO: 2730980 - DNA, 25 bp, Homo sapien
acatggcgccagtccttcaggagat

SEQ ID NO: 2730981 - DNA, 25 bp, Homo sapien
tgtgtggacacgtggaagttgccgg

SEQ ID NO: 2730982 - DNA, 25 bp, Homo sapien
gatgacatgcgtcatgtctgggttc

SEQ ID NO: 2730983 - DNA, 25 bp, Homo sapien
atgcgtcatgtctgggttctgtggc

SEQ ID NO: 2730984 - DNA, 25 bp, Homo sapien
ttgtggatgacatgcgtcatgtctg

SEQ ID NO: 2730985 - DNA, 25 bp, Homo sapien
cttttctctgaggacaatgggaaac

SEQ ID NO: 2730986 - DNA, 25 bp, Homo sapien
acaatgggaaaccaggttggcctca

SEQ ID NO: 2730987 - DNA, 25 bp, Homo sapien
tgaggacaatgggaaaccaggttgg

SEQ ID NO: 2730988 - DNA, 25 bp, Homo sapien
ttttctctgaggacaatgggaaacc

SEQ ID NO: 2730989 - DNA, 25 bp, Homo sapien
gtctgctcccccgagagcattgaaa

SEQ ID NO: 2730990 - DNA, 25 bp, Homo sapien
ccccgagagcattgaaagctccgtg

SEQ ID NO: 2730991 - DNA, 25 bp, Homo sapien
gcattgaaagctccgtggatgttct

SEQ ID NO: 2730992 - DNA, 25 bp, Homo sapien
gagcattgaaagctccgtggatgtt

SEQ ID NO: 2730993 - DNA, 25 bp, Homo sapien
cctgacaatgggagagcaaacgcat

SEQ ID NO: 2730994 - DNA, 25 bp, Homo sapien
gtcacagagggatgttttctttgcc

SEQ ID NO: 2730995 - DNA, 25 bp, Homo sapien
cacgaaaggtatgcgtgctctcctg

SEQ ID NO: 2730996 - DNA, 25 bp, Homo sapien
agatgtgggttaaaaggtgagctca

SEQ ID NO: 2730997 - DNA, 25 bp, Homo sapien
cactcaaataaggaggtgctgccgt

SEQ ID NO: 2730998 - DNA, 25 bp, Homo sapien
tatacttatccgttgctggaggcag

SEQ ID NO: 2730999 - DNA, 25 bp, Homo sapien
aaagcaatcgggtaacagagcgcca

SEQ ID NO: 2731000 - DNA, 25 bp, Homo sapien
gaaacgacagacactttcggtgaga

SEQ ID NO: 2731001 - DNA, 25 bp, Homo sapien
gggccttcttagcttgatcctcttt

SEQ ID NO: 2731002 - DNA, 25 bp, Homo sapien
gcagacatttgtggacggccgacgt

SEQ ID NO: 2731003 - DNA, 25 bp, Homo sapien
cggccgacgtcggatgacatgttac

SEQ ID NO: 2731004 - DNA, 25 bp, Homo sapien
tgacacaaaacgacaatgaccacgg

SEQ ID NO: 2731005 - DNA, 25 bp, Homo sapien
tgtggcaggccgtgtactaaactct

SEQ ID NO: 2731006 - DNA, 25 bp, Homo sapien
tagctttcgccactagccctggaga

SEQ ID NO: 2731007 - DNA, 25 bp, Homo sapien
cagagggacctacaaaggcaacggc

SEQ ID NO: 2731008 - DNA, 25 bp, Homo sapien
ttatagctggcgcaacagccaaggg

SEQ ID NO: 2731009 - DNA, 25 bp, Homo sapien
tcgggtcacggactacagagctaaa

SEQ ID NO: 2731010 - DNA, 25 bp, Homo sapien
gaaaggtatgaactctcctgggcct

SEQ ID NO: 2731011 - DNA, 25 bp, Homo sapien
caagtggaccgtggcaaatgcttac

SEQ ID NO: 2731012 - DNA, 25 bp, Homo sapien
aatgctgggctgatagaatgctggc

SEQ ID NO: 2731013 - DNA, 25 bp, Homo sapien
ttgttggccaccgtgtactggtagg

SEQ ID NO: 2731014 - DNA, 25 bp, Homo sapien
ctcataaaccgtgggcacaatcttc

SEQ ID NO: 2731015 - DNA, 25 bp, Homo sapien
caatcttcaggatgtagtcgtggga

SEQ ID NO: 2731016 - DNA, 25 bp, Homo sapien
taggagtaccgctgcttgccactct

SEQ ID NO: 2731017 - DNA, 25 bp, Homo sapien
catctaaacacggatgggcctggga

SEQ ID NO: 2731018 - DNA, 25 bp, Homo sapien
ttgctgaacgcctccactgtggtgg

SEQ ID NO: 2731019 - DNA, 25 bp, Homo sapien
tgaggtgatcaagaagccaggctct

SEQ ID NO: 2731020 - DNA, 25 bp, Homo sapien
cagggactaaggatactacgaggct

SEQ ID NO: 2731021 - DNA, 25 bp, Homo sapien
tgatgaatctgtacagcggctgccg

SEQ ID NO: 2731022 - DNA, 25 bp, Homo sapien
cccgtgtggctgtaggcgacgtatt

SEQ ID NO: 2731023 - DNA, 25 bp, Homo sapien
gctgccgtctctctgtgtacttgac

SEQ ID NO: 2731024 - DNA, 25 bp, Homo sapien
atgcggcccgtgtggctgtaggcga

SEQ ID NO: 2731025 - DNA, 25 bp, Homo sapien
cctccaatttctagtgaacttgggc

SEQ ID NO: 2731026 - DNA, 25 bp, Homo sapien
ccaatttctagtgaacttgggcatc

SEQ ID NO: 2731027 - DNA, 25 bp, Homo sapien
atcccatccctccaatttctagtga

SEQ ID NO: 2731028 - DNA, 25 bp, Homo sapien
ccatccctccaatttctagtgaact

SEQ ID NO: 2731029 - DNA, 25 bp, Homo sapien
gattgtaatgcccagagtctcagct

SEQ ID NO: 2731030 - DNA, 25 bp, Homo sapien
ggagcaaacagaaacggggacagaa

SEQ ID NO: 2731031 - DNA, 25 bp, Homo sapien
cagaaaagagccttctgaaccctac

SEQ ID NO: 2731032 - DNA, 25 bp, Homo sapien
cgtgcccggccattgccaaatgatt

SEQ ID NO: 2731033 - DNA, 25 bp, Homo sapien
gctcccagggatctttgtgccgtgt

SEQ ID NO: 2731034 - DNA, 25 bp, Homo sapien
catctgcagcccctctaaggagcta

SEQ ID NO: 2731035 - DNA, 25 bp, Homo sapien
tgtctgagtgctggcgtcatcccca

SEQ ID NO: 2731036 - DNA, 25 bp, Homo sapien
tgacaagggcctttgaagctccaca

SEQ ID NO: 2731037 - DNA, 25 bp, Homo sapien
cacaggtaagtcagacgcggaggtc

SEQ ID NO: 2731038 - DNA, 25 bp, Homo sapien
gaatgacaggttttgagtagcacgc

SEQ ID NO: 2731039 - DNA, 25 bp, Homo sapien
tagtccccaggttagaaagcatgaa

SEQ ID NO: 2731040 - DNA, 25 bp, Homo sapien
tggtgggcaaaaaccatcccggtca

SEQ ID NO: 2731041 - DNA, 25 bp, Homo sapien
tgcacctggaaagcgatgccataga

SEQ ID NO: 2731042 - DNA, 25 bp, Homo sapien
ttccacacccaaggcagcggcaaag

SEQ ID NO: 2731043 - DNA, 25 bp, Homo sapien
aatgactactcaggaaaggcacagg

SEQ ID NO: 2731044 - DNA, 25 bp, Homo sapien
catgggaggtgcacaagacgtgttt

SEQ ID NO: 2731045 - DNA, 25 bp, Homo sapien
ggcaggagggaagacgctgattggc

SEQ ID NO: 2731046 - DNA, 25 bp, Homo sapien
gcaggagggaagacgctgattggca

SEQ ID NO: 2731047 - DNA, 25 bp, Homo sapien
tggcaggagggaagacgctgattgg

SEQ ID NO: 2731048 - DNA, 25 bp, Homo sapien
caggagggaagacgctgattggcat

SEQ ID NO: 2731049 - DNA, 25 bp, Homo sapien
ccaggtggtgtgtctgccttggaat

SEQ ID NO: 2731050 - DNA, 25 bp, Homo sapien
ttctggaacatggggagatgcagcc

SEQ ID NO: 2731051 - DNA, 25 bp, Homo sapien
cagccacaaggctgtgccaggtggt

SEQ ID NO: 2731052 - DNA, 25 bp, Homo sapien
ggagatgcagccacaaggctgtgcc

SEQ ID NO: 2731053 - DNA, 25 bp, Homo sapien
cttgagcccatcctgggcaaaacag

SEQ ID NO: 2731054 - DNA, 25 bp, Homo sapien
cagcacttcgggagatggaagggtt

SEQ ID NO: 2731055 - DNA, 25 bp, Homo sapien
ggagcttgagcccatcctgggcaaa

SEQ ID NO: 2731056 - DNA, 25 bp, Homo sapien
cacttcgggagatggaagggttgct

SEQ ID NO: 2731057 - DNA, 25 bp, Homo sapien
ggtacgtcttaactctggagcctgt

SEQ ID NO: 2731058 - DNA, 25 bp, Homo sapien
gagaggcctttggtgctaccagaaa

SEQ ID NO: 2731059 - DNA, 25 bp, Homo sapien
cctgggacttgatgggtagtaagca

SEQ ID NO: 2731060 - DNA, 25 bp, Homo sapien
gatgcaacttgaacacaggtacgtc

SEQ ID NO: 2731061 - DNA, 25 bp, Homo sapien
tgcatgagtccaggatgccggcgac

SEQ ID NO: 2731062 - DNA, 25 bp, Homo sapien
gacggtgaaggtcccgccaatgatg

SEQ ID NO: 2731063 - DNA, 25 bp, Homo sapien
cggcgacggtgaaggtcccgccaat

SEQ ID NO: 2731064 - DNA, 25 bp, Homo sapien
gaggctgtgaagatgcatgagtcca

SEQ ID NO: 2731065 - DNA, 25 bp, Homo sapien
agatttgggaccagattgagggcca

SEQ ID NO: 2731066 - DNA, 25 bp, Homo sapien
aacacggggaaaagaggtagctgca

SEQ ID NO: 2731067 - DNA, 25 bp, Homo sapien
gcaaaacatcgagccatcctctact

SEQ ID NO: 2731068 - DNA, 25 bp, Homo sapien
caggcagtgtaatttgtctaaaaag

SEQ ID NO: 2731069 - DNA, 25 bp, Homo sapien
agctctcctaggaggggtccccaag

SEQ ID NO: 2731070 - DNA, 25 bp, Homo sapien
cagctctcctaggaggggtccccaa

SEQ ID NO: 2731071 - DNA, 25 bp, Homo sapien
gctctcctaggaggggtccccaaga

SEQ ID NO: 2731072 - DNA, 25 bp, Homo sapien
ctctcctaggaggggtccccaagat

SEQ ID NO: 2731073 - DNA, 25 bp, Homo sapien
tcgatatgcattctgggatgttccc

SEQ ID NO: 2731074 - DNA, 25 bp, Homo sapien
gctgcgagattgtcgaagcctggct

SEQ ID NO: 2731075 - DNA, 25 bp, Homo sapien
atcattaatgtgtccacctagtggg

SEQ ID NO: 2731076 - DNA, 25 bp, Homo sapien
gcctggctgagagctgatcgatatg

SEQ ID NO: 2731077 - DNA, 25 bp, Homo sapien
gcttgcttgggaagtaccatctttc

SEQ ID NO: 2731078 - DNA, 25 bp, Homo sapien
ccatctttcgtggaaggtgccgggt

SEQ ID NO: 2731079 - DNA, 25 bp, Homo sapien
gaagtaccatctttcgtggaaggtg

SEQ ID NO: 2731080 - DNA, 25 bp, Homo sapien
tagtgacaaatcataggggcttgct

SEQ ID NO: 2731081 - DNA, 25 bp, Homo sapien
gaggaatctgtgacccgccttgtga

SEQ ID NO: 2731082 - DNA, 25 bp, Homo sapien
tccagaaggtagaggtccacggaca

SEQ ID NO: 2731083 - DNA, 25 bp, Homo sapien
taaggccttgggaccgatggcgtcc

SEQ ID NO: 2731084 - DNA, 25 bp, Homo sapien
gagcacagtgtcaagtgggccacga

SEQ ID NO: 2731085 - DNA, 25 bp, Homo sapien
cctgggacatgagggcatagctaaa

SEQ ID NO: 2731086 - DNA, 25 bp, Homo sapien
tcacatgcacaaggagaagcgtctc

SEQ ID NO: 2731087 - DNA, 25 bp, Homo sapien
tattcacacaccaaagggactcctt

SEQ ID NO: 2731088 - DNA, 25 bp, Homo sapien
taaatggaaaacaggcgtgtggctc

SEQ ID NO: 2731089 - DNA, 25 bp, Homo sapien
aagaatttcaactcatgtgcatgcc

SEQ ID NO: 2731090 - DNA, 25 bp, Homo sapien
tgacatcccctatgtcctcagagtt

SEQ ID NO: 2731091 - DNA, 25 bp, Homo sapien
taatctagttgaacccaacgagtgg

SEQ ID NO: 2731092 - DNA, 25 bp, Homo sapien
gaataacgggtcagaggtgtctctt

SEQ ID NO: 2731093 - DNA, 25 bp, Homo sapien
gaagcacgtctccagagacgcctct

SEQ ID NO: 2731094 - DNA, 25 bp, Homo sapien
gcctcttccgcaacttcccagggaa

SEQ ID NO: 2731095 - DNA, 25 bp, Homo sapien
gagacgcctcttccgcaacttccca

SEQ ID NO: 2731096 - DNA, 25 bp, Homo sapien
agcttctctcctcacgaagcacgtc

SEQ ID NO: 2731097 - DNA, 25 bp, Homo sapien
ggccagaatgaagtgcgtgacctca

SEQ ID NO: 2731098 - DNA, 25 bp, Homo sapien
caaatcatattaatgactggccaga

SEQ ID NO: 2731099 - DNA, 25 bp, Homo sapien
tggccatgccaagttacgaggtctc

SEQ ID NO: 2731100 - DNA, 25 bp, Homo sapien
catctcgaaggaagatctggcctga

SEQ ID NO: 2731101 - DNA, 25 bp, Homo sapien
tggcacccaaatcgcttgggtttgg

SEQ ID NO: 2731102 - DNA, 25 bp, Homo sapien
tatttctcgaggcagtggctgcatg

SEQ ID NO: 2731103 - DNA, 25 bp, Homo sapien
ctgcatggggaagtgcttgagccct

SEQ ID NO: 2731104 - DNA, 25 bp, Homo sapien
agtgtctggtgagtctttttatttc

SEQ ID NO: 2731105 - DNA, 25 bp, Homo sapien
cgccgcgccctcctacctctacttt

SEQ ID NO: 2731106 - DNA, 25 bp, Homo sapien
ccgccgcgccctcctacctctactt

SEQ ID NO: 2731107 - DNA, 25 bp, Homo sapien
ctagctgcctcagaccctgagtgcg

SEQ ID NO: 2731108 - DNA, 25 bp, Homo sapien
gctactagctgcctcagaccctgag

SEQ ID NO: 2731109 - DNA, 25 bp, Homo sapien
tagctgcctcagaccctgagtgcgc

SEQ ID NO: 2731110 - DNA, 25 bp, Homo sapien
ccggctactagctgcctcagaccct

SEQ ID NO: 2731111 - DNA, 25 bp, Homo sapien
ggcggtagagttcactgtccgagaa

SEQ ID NO: 2731112 - DNA, 25 bp, Homo sapien
tagagttcactgtccgagaaaactc

SEQ ID NO: 2731113 - DNA, 25 bp, Homo sapien
ggtagagttcactgtccgagaaaac

SEQ ID NO: 2731114 - DNA, 25 bp, Homo sapien
agttcactgtccgagaaaactccag

SEQ ID NO: 2731115 - DNA, 25 bp, Homo sapien
gtggaggtcgcatgcccgtctaaag

SEQ ID NO: 2731116 - DNA, 25 bp, Homo sapien
tgttcccgcgacacatagggcaggg

SEQ ID NO: 2731117 - DNA, 25 bp, Homo sapien
gggcctgttctcgacccaagacact

SEQ ID NO: 2731118 - DNA, 25 bp, Homo sapien
cagagagatgcgactagtctgacta

SEQ ID NO: 2731119 - DNA, 25 bp, Homo sapien
ctgcggtccgaggtaacgaagggat

SEQ ID NO: 2731120 - DNA, 25 bp, Homo sapien
tcctgcgcacgtgtgagggggcatt

SEQ ID NO: 2731121 - DNA, 25 bp, Homo sapien
atgatcttcctgcgcacgtgtgagg

SEQ ID NO: 2731122 - DNA, 25 bp, Homo sapien
tgcgcacgtgtgagggggcattgaa

SEQ ID NO: 2731123 - DNA, 25 bp, Homo sapien
gctgcacccgctcgatgtagatgac

SEQ ID NO: 2731124 - DNA, 25 bp, Homo sapien
tcacgctgcacccgctcgatgtaga

SEQ ID NO: 2731125 - DNA, 25 bp, Homo sapien
gccttctcacgctgcacccgctcga

SEQ ID NO: 2731126 - DNA, 25 bp, Homo sapien
ttctcacgctgcacccgctcgatgt

SEQ ID NO: 2731127 - DNA, 25 bp, Homo sapien
ctgcattttctcaataagttcttct

SEQ ID NO: 2731128 - DNA, 25 bp, Homo sapien
ttttccaacttgtcgagacttggct

SEQ ID NO: 2731129 - DNA, 25 bp, Homo sapien
cttgtcgagacttggctttgcgttc

SEQ ID NO: 2731130 - DNA, 25 bp, Homo sapien
tttccgatccttgtccagttttagc

SEQ ID NO: 2731131 - DNA, 25 bp, Homo sapien
accgtggttgcacaacaggttctat

SEQ ID NO: 2731132 - DNA, 25 bp, Homo sapien
tgttccagacattccgaaaagttcg

SEQ ID NO: 2731133 - DNA, 25 bp, Homo sapien
aagaaacacaccctagcctcaaaat

SEQ ID NO: 2731134 - DNA, 25 bp, Homo sapien
tctccggttaaaccgtggttgcaca

SEQ ID NO: 2731135 - DNA, 25 bp, Homo sapien
aaaacaatgcaaatactatgtggaa

SEQ ID NO: 2731136 - DNA, 25 bp, Homo sapien
tatttataaaacaatgcaaatacta

SEQ ID NO: 2731137 - DNA, 25 bp, Homo sapien
gtggaatttatttataaaacaatgc

SEQ ID NO: 2731138 - DNA, 25 bp, Homo sapien
tataaaacaatgcaaatactatgtg

SEQ ID NO: 2731139 - DNA, 25 bp, Homo sapien
atagggaaccgccaagcccttggct

SEQ ID NO: 2731140 - DNA, 25 bp, Homo sapien
gcccttggctgcacttaacactgca

SEQ ID NO: 2731141 - DNA, 25 bp, Homo sapien
ccaggagtctaatgcggaggccaat

SEQ ID NO: 2731142 - DNA, 25 bp, Homo sapien
tgcttgaaagttagaccaggagtct

SEQ ID NO: 2731143 - DNA, 25 bp, Homo sapien
ttattttttaggctagtcatggtgg

SEQ ID NO: 2731144 - DNA, 25 bp, Homo sapien
cagataaaccattactagaaagtca

SEQ ID NO: 2731145 - DNA, 25 bp, Homo sapien
cagtgtgtcagataaaccattacta

SEQ ID NO: 2731146 - DNA, 25 bp, Homo sapien
tgtcagataaaccattactagaaag

SEQ ID NO: 2731147 - DNA, 25 bp, Homo sapien
gcccacatgtggcgccgactgacag

SEQ ID NO: 2731148 - DNA, 25 bp, Homo sapien
cagcccacatgtggcgccgactgac

SEQ ID NO: 2731149 - DNA, 25 bp, Homo sapien
agcccacatgtggcgccgactgaca

SEQ ID NO: 2731150 - DNA, 25 bp, Homo sapien
ccagcccacatgtggcgccgactga

SEQ ID NO: 2731151 - DNA, 25 bp, Homo sapien
atcagtataattgcctgcatcagga

SEQ ID NO: 2731152 - DNA, 25 bp, Homo sapien
cactgatatcagtataattgcctgc

SEQ ID NO: 2731153 - DNA, 25 bp, Homo sapien
gatatcagtataattgcctgcatca

SEQ ID NO: 2731154 - DNA, 25 bp, Homo sapien
catcactgatatcagtataattgcc

SEQ ID NO: 2731155 - DNA, 25 bp, Homo sapien
taatatcaattgcaaagtccttatc

SEQ ID NO: 2731156 - DNA, 25 bp, Homo sapien
caattgcaaagtccttatcttcaaa

SEQ ID NO: 2731157 - DNA, 25 bp, Homo sapien
cttttaataatatcaattgcaaagt

SEQ ID NO: 2731158 - DNA, 25 bp, Homo sapien
tatcaattgcaaagtccttatcttc

SEQ ID NO: 2731159 - DNA, 25 bp, Homo sapien
taatgctttccaatggtcatgagtg

SEQ ID NO: 2731160 - DNA, 25 bp, Homo sapien
ctaatgctttccaatggtcatgagt

SEQ ID NO: 2731161 - DNA, 25 bp, Homo sapien
gttctgagtacatgggattggtcac

SEQ ID NO: 2731162 - DNA, 25 bp, Homo sapien
gccttgatatttaagcacgtgctga

SEQ ID NO: 2731163 - DNA, 25 bp, Homo sapien
ctattttacatctaatacatccaga

SEQ ID NO: 2731164 - DNA, 25 bp, Homo sapien
tggtgatggaaccacgtatccacgt

SEQ ID NO: 2731165 - DNA, 25 bp, Homo sapien
tcctggtgggatccgagtgaggcga

SEQ ID NO: 2731166 - DNA, 25 bp, Homo sapien
gctggtcacgcggtcagctattgac

SEQ ID NO: 2731167 - DNA, 25 bp, Homo sapien
acacgctggtcacgcggtcagctat

SEQ ID NO: 2731168 - DNA, 25 bp, Homo sapien
gcggtcagctattgacacttcctgg

SEQ ID NO: 2731169 - DNA, 25 bp, Homo sapien
tcacgcggtcagctattgacacttc

SEQ ID NO: 2731170 - DNA, 25 bp, Homo sapien
gtcagctattgacacttcctggtgg

SEQ ID NO: 2731171 - DNA, 25 bp, Homo sapien
ccaggaagtgtcaatagctgaccgc

SEQ ID NO: 2731172 - DNA, 25 bp, Homo sapien
tcgcctcactcggatcccaccagga

SEQ ID NO: 2731173 - DNA, 25 bp, Homo sapien
tagctgaccgcgtgaccagcgtgtg

SEQ ID NO: 2731174 - DNA, 25 bp, Homo sapien
tgtcaatagctgaccgcgtgaccag

SEQ ID NO: 2731175 - DNA, 25 bp, Homo sapien
gaagtgtcaatagctgaccgcgtga

SEQ ID NO: 2731176 - DNA, 25 bp, Homo sapien
ccaccaggaagtgtcaatagctgac

SEQ ID NO: 2731177 - DNA, 25 bp, Homo sapien
tgcctctcattgtgatgagcgtgtt

SEQ ID NO: 2731178 - DNA, 25 bp, Homo sapien
cgtatcacggcctcactgtgcctct

SEQ ID NO: 2731179 - DNA, 25 bp, Homo sapien
atggcgtatcacggcctcactgtgc

SEQ ID NO: 2731180 - DNA, 25 bp, Homo sapien
ctctcattgtgatgagcgtgttctg

SEQ ID NO: 2731181 - DNA, 25 bp, Homo sapien
ctcattgtgatgagcgtgttctggg

SEQ ID NO: 2731182 - DNA, 25 bp, Homo sapien
tgtgcctctcattgtgatgagcgtg

SEQ ID NO: 2731183 - DNA, 25 bp, Homo sapien
gaacacgctcatcacaatgagaggc

SEQ ID NO: 2731184 - DNA, 25 bp, Homo sapien
cacgctcatcacaatgagaggcaca

SEQ ID NO: 2731185 - DNA, 25 bp, Homo sapien
agaggcacagtgaggccgtgatacg

SEQ ID NO: 2731186 - DNA, 25 bp, Homo sapien
gcacagtgaggccgtgatacgccat

SEQ ID NO: 2731187 - DNA, 25 bp, Homo sapien
cagaacacgctcatcacaatgagag

SEQ ID NO: 2731188 - DNA, 25 bp, Homo sapien
cccagaacacgctcatcacaatgag

SEQ ID NO: 2731189 - DNA, 25 bp, Homo sapien
acaagctccttcgacaacattgagc

SEQ ID NO: 2731190 - DNA, 25 bp, Homo sapien
aagctccttcgacaacattgagccc

SEQ ID NO: 2731191 - DNA, 25 bp, Homo sapien
aacaagctccttcgacaacattgag

SEQ ID NO: 2731192 - DNA, 25 bp, Homo sapien
caagctccttcgacaacattgagcc

SEQ ID NO: 2731193 - DNA, 25 bp, Homo sapien
ctcaatgttgtcgaaggagcttgtt

SEQ ID NO: 2731194 - DNA, 25 bp, Homo sapien
gggctcaatgttgtcgaaggagctt

SEQ ID NO: 2731195 - DNA, 25 bp, Homo sapien
ggctcaatgttgtcgaaggagcttg

SEQ ID NO: 2731196 - DNA, 25 bp, Homo sapien
gctcaatgttgtcgaaggagcttgt

SEQ ID NO: 2731197 - DNA, 25 bp, Homo sapien
ggtcttaaacacctggcctcagcct

SEQ ID NO: 2731198 - DNA, 25 bp, Homo sapien
agcctggacgacagagcgatactct

SEQ ID NO: 2731199 - DNA, 25 bp, Homo sapien
aaaaaatacagatgggatctcgctc

SEQ ID NO: 2731200 - DNA, 25 bp, Homo sapien
gttggtcttaaacacctggcctcag

SEQ ID NO: 2731201 - DNA, 25 bp, Homo sapien
gatgggatctcgctctgttggccag

SEQ ID NO: 2731202 - DNA, 25 bp, Homo sapien
gatctcgctctgttggccaggttgg

SEQ ID NO: 2731203 - DNA, 25 bp, Homo sapien
agagtatcgctctgtcgtccaggct

SEQ ID NO: 2731204 - DNA, 25 bp, Homo sapien
aggctgaggccaggtgtttaagacc

SEQ ID NO: 2731205 - DNA, 25 bp, Homo sapien
ggccaacagagcgagatcccatctg

SEQ ID NO: 2731206 - DNA, 25 bp, Homo sapien
ccaacctggccaacagagcgagatc

SEQ ID NO: 2731207 - DNA, 25 bp, Homo sapien
gagcgagatcccatctgtatttttt

SEQ ID NO: 2731208 - DNA, 25 bp, Homo sapien
ctgaggccaggtgtttaagaccaac

SEQ ID NO: 2731209 - DNA, 25 bp, Homo sapien
atgttggtgacctgttcagtttgct

SEQ ID NO: 2731210 - DNA, 25 bp, Homo sapien
catgttggtgacctgttcagtttgc

SEQ ID NO: 2731211 - DNA, 25 bp, Homo sapien
agcaaactgaacaggtcaccaacat

SEQ ID NO: 2731212 - DNA, 25 bp, Homo sapien
gcaaactgaacaggtcaccaacatg

SEQ ID NO: 2731213 - DNA, 25 bp, Homo sapien
atgttggtgacctgttcagtttgct

SEQ ID NO: 2731214 - DNA, 25 bp, Homo sapien
gacctgttcagtttgctgctatctc

SEQ ID NO: 2731215 - DNA, 25 bp, Homo sapien
ggtgacctgttcagtttgctgctat

SEQ ID NO: 2731216 - DNA, 25 bp, Homo sapien
catgttggtgacctgttcagtttgc

SEQ ID NO: 2731217 - DNA, 25 bp, Homo sapien
gttggtgacctgttcagtttgctgc

SEQ ID NO: 2731218 - DNA, 25 bp, Homo sapien
agttatcattaccatgttggtgacc

SEQ ID NO: 2731219 - DNA, 25 bp, Homo sapien
gcagcaaactgaacaggtcaccaac

SEQ ID NO: 2731220 - DNA, 25 bp, Homo sapien
agcaaactgaacaggtcaccaacat

SEQ ID NO: 2731221 - DNA, 25 bp, Homo sapien
gatagcagcaaactgaacaggtcac

SEQ ID NO: 2731222 - DNA, 25 bp, Homo sapien
aagagatagcagcaaactgaacagg

SEQ ID NO: 2731223 - DNA, 25 bp, Homo sapien
ggtcaccaacatggtaatgataact

SEQ ID NO: 2731224 - DNA, 25 bp, Homo sapien
gcaaactgaacaggtcaccaacatg

SEQ ID NO: 2731225 - DNA, 25 bp, Homo sapien
cacgtagaaaacaagaaatattccg

SEQ ID NO: 2731226 - DNA, 25 bp, Homo sapien
cgtagaaaacaagaaatattccgat

SEQ ID NO: 2731227 - DNA, 25 bp, Homo sapien
tgaaacacgtagaaaacaagaaata

SEQ ID NO: 2731228 - DNA, 25 bp, Homo sapien
tagaaaacaagaaatattccgatga

SEQ ID NO: 2731229 - DNA, 25 bp, Homo sapien
gtagaaaacaagaaatattccgatg

SEQ ID NO: 2731230 - DNA, 25 bp, Homo sapien
aaacaagaaatattccgatgaatga

SEQ ID NO: 2731231 - DNA, 25 bp, Homo sapien
tcattcatcggaatatttcttgttt

SEQ ID NO: 2731232 - DNA, 25 bp, Homo sapien
tatttcttgttttctacgtgtttca

SEQ ID NO: 2731233 - DNA, 25 bp, Homo sapien
cggaatatttcttgttttctacgtg

SEQ ID NO: 2731234 - DNA, 25 bp, Homo sapien
tcatcggaatatttcttgttttcta

SEQ ID NO: 2731235 - DNA, 25 bp, Homo sapien
atcggaatatttcttgttttctacg

SEQ ID NO: 2731236 - DNA, 25 bp, Homo sapien
catcggaatatttcttgttttctac

SEQ ID NO: 2731237 - DNA, 25 bp, Homo sapien
gagctgtcattgcggcagtgcattc

SEQ ID NO: 2731238 - DNA, 25 bp, Homo sapien
gctgtcattgcggcagtgcattcca

SEQ ID NO: 2731239 - DNA, 25 bp, Homo sapien
agctgtcattgcggcagtgcattcc

SEQ ID NO: 2731240 - DNA, 25 bp, Homo sapien
tgagctgtcattgcggcagtgcatt

SEQ ID NO: 2731241 - DNA, 25 bp, Homo sapien
gaatgcactgccgcaatgacagctc

SEQ ID NO: 2731242 - DNA, 25 bp, Homo sapien
tggaatgcactgccgcaatgacagc

SEQ ID NO: 2731243 - DNA, 25 bp, Homo sapien
aatgcactgccgcaatgacagctca

SEQ ID NO: 2731244 - DNA, 25 bp, Homo sapien
ggaatgcactgccgcaatgacagct

SEQ ID NO: 2731245 - DNA, 25 bp, Homo sapien
aaaaattatccgattgtggtggcac

SEQ ID NO: 2731246 - DNA, 25 bp, Homo sapien
tgtcgtcccagctaccgggaaggtg

SEQ ID NO: 2731247 - DNA, 25 bp, Homo sapien
cattgcggcagtgcattccagcctg

SEQ ID NO: 2731248 - DNA, 25 bp, Homo sapien
attatccgattgtggtggcacatgc

SEQ ID NO: 2731249 - DNA, 25 bp, Homo sapien
gctacagtgagctgtcattgcggca

SEQ ID NO: 2731250 - DNA, 25 bp, Homo sapien
tgagctgtcattgcggcagtgcatt

SEQ ID NO: 2731251 - DNA, 25 bp, Homo sapien
tccaccttcccggtagctgggacga

SEQ ID NO: 2731252 - DNA, 25 bp, Homo sapien
caggctggaatgcactgccgcaatg

SEQ ID NO: 2731253 - DNA, 25 bp, Homo sapien
aatgcactgccgcaatgacagctca

SEQ ID NO: 2731254 - DNA, 25 bp, Homo sapien
cttcccggtagctgggacgacaggc

SEQ ID NO: 2731255 - DNA, 25 bp, Homo sapien
gcatgtgccaccacaatcggataat

SEQ ID NO: 2731256 - DNA, 25 bp, Homo sapien
actgtagccttgacttccccgggct

SEQ ID NO: 2731257 - DNA, 25 bp, Homo sapien
atattttgtgacttcctggttctcc

SEQ ID NO: 2731258 - DNA, 25 bp, Homo sapien
ggaatgacttgagatttaaacccaa

SEQ ID NO: 2731259 - DNA, 25 bp, Homo sapien
ccaaaaagcaccaaaatattttgtg

SEQ ID NO: 2731260 - DNA, 25 bp, Homo sapien
ggacaacaagtctccatctcaggag

SEQ ID NO: 2731261 - DNA, 25 bp, Homo sapien
tcctggttctccatagtctttgaaa

SEQ ID NO: 2731262 - DNA, 25 bp, Homo sapien
ggaatgagttcacagaggaatgact

SEQ ID NO: 2731263 - DNA, 25 bp, Homo sapien
tgggtttaaatctcaagtcattcct

SEQ ID NO: 2731264 - DNA, 25 bp, Homo sapien
agtcattcctctgtgaactcattcc

SEQ ID NO: 2731265 - DNA, 25 bp, Homo sapien
cacaaaatattttggtgctttttgg

SEQ ID NO: 2731266 - DNA, 25 bp, Homo sapien
tttcaaagactatggagaaccagga

SEQ ID NO: 2731267 - DNA, 25 bp, Homo sapien
ctcctgagatggagacttgttgtcc

SEQ ID NO: 2731268 - DNA, 25 bp, Homo sapien
ggagaaccaggaagtcacaaaatat

SEQ ID NO: 2731269 - DNA, 25 bp, Homo sapien
ggctttccacaatagcttggcaggg

SEQ ID NO: 2731270 - DNA, 25 bp, Homo sapien
caaatagtgagatgagtgcggagca

SEQ ID NO: 2731271 - DNA, 25 bp, Homo sapien
ggaaagatatgagacctgttgaact

SEQ ID NO: 2731272 - DNA, 25 bp, Homo sapien
gaaagggatgcaccattgttacatc

SEQ ID NO: 2731273 - DNA, 25 bp, Homo sapien
cgttattaggcgagaactgggacct

SEQ ID NO: 2731274 - DNA, 25 bp, Homo sapien
cactaaaatggtacaggtcatgcct

SEQ ID NO: 2731275 - DNA, 25 bp, Homo sapien
gatgtaacaatggtgcatccctttc

SEQ ID NO: 2731276 - DNA, 25 bp, Homo sapien
caaaagctggtgcagcaacaactgg

SEQ ID NO: 2731277 - DNA, 25 bp, Homo sapien
cctgccaagctattgtggaaagcct

SEQ ID NO: 2731278 - DNA, 25 bp, Homo sapien
gccaaagcaatttcacggagaaagg

SEQ ID NO: 2731279 - DNA, 25 bp, Homo sapien
gcatgacctgtaccattttagtgcc

SEQ ID NO: 2731280 - DNA, 25 bp, Homo sapien
aggtcccagttctcgcctaataacg

SEQ ID NO: 2731281 - DNA, 25 bp, Homo sapien
gctgtagtgatatatccacttaccc

SEQ ID NO: 2731282 - DNA, 25 bp, Homo sapien
taaagtcctgaaagcgtgaaaggag

SEQ ID NO: 2731283 - DNA, 25 bp, Homo sapien
tagaaagtgattccctgctgggcgt

SEQ ID NO: 2731284 - DNA, 25 bp, Homo sapien
gatccacccggataatggcctagtt

SEQ ID NO: 2731285 - DNA, 25 bp, Homo sapien
gcttggctagttccccgcttatagg

SEQ ID NO: 2731286 - DNA, 25 bp, Homo sapien
cgtgaaaggagactgctgtagtgat

SEQ ID NO: 2731287 - DNA, 25 bp, Homo sapien
atcactacagcagtctcctttcacg

SEQ ID NO: 2731288 - DNA, 25 bp, Homo sapien
caactaggccattatccgggtggat

SEQ ID NO: 2731289 - DNA, 25 bp, Homo sapien
gcagtctcctttcacgctttcagga

SEQ ID NO: 2731290 - DNA, 25 bp, Homo sapien
gggtaagtggatatatcactacagc

SEQ ID NO: 2731291 - DNA, 25 bp, Homo sapien
cagggaatcactttctaagggtaag

SEQ ID NO: 2731292 - DNA, 25 bp, Homo sapien
acgcccagcagggaatcactttcta

SEQ ID NO: 2731293 - DNA, 25 bp, Homo sapien
tctggtatctgaagtatcattggcc

SEQ ID NO: 2731294 - DNA, 25 bp, Homo sapien
aaaccatctggtatctgaagtatca

SEQ ID NO: 2731295 - DNA, 25 bp, Homo sapien
gtatctgaagtatcattggccttga

SEQ ID NO: 2731296 - DNA, 25 bp, Homo sapien
aatgaaaccatctggtatctgaagt

SEQ ID NO: 2731297 - DNA, 25 bp, Homo sapien
ccctctctttggaccgcaattgaaa

SEQ ID NO: 2731298 - DNA, 25 bp, Homo sapien
tctttggaccgcaattgaaaaatga

SEQ ID NO: 2731299 - DNA, 25 bp, Homo sapien
caatgatacttcagataccagatgg

SEQ ID NO: 2731300 - DNA, 25 bp, Homo sapien
gatacttcagataccagatggtttc

SEQ ID NO: 2731301 - DNA, 25 bp, Homo sapien
ggccaatgatacttcagataccaga

SEQ ID NO: 2731302 - DNA, 25 bp, Homo sapien
tcatttttcaattgcggtccaaaga

SEQ ID NO: 2731303 - DNA, 25 bp, Homo sapien
tttcaattgcggtccaaagagaggg

SEQ ID NO: 2731304 - DNA, 25 bp, Homo sapien
tcaaggccaatgatacttcagatac

SEQ ID NO: 2731305 - DNA, 25 bp, Homo sapien
aagaagacatgctctacagtgctca

SEQ ID NO: 2731306 - DNA, 25 bp, Homo sapien
tgctctacagtgctcagtctttgag

SEQ ID NO: 2731307 - DNA, 25 bp, Homo sapien
gaagacatgctctacagtgctcagt

SEQ ID NO: 2731308 - DNA, 25 bp, Homo sapien
ggaagaagacatgctctacagtgct

SEQ ID NO: 2731309 - DNA, 25 bp, Homo sapien
atgctctacagtgctcagtctttga

SEQ ID NO: 2731310 - DNA, 25 bp, Homo sapien
gacatgctctacagtgctcagtctt

SEQ ID NO: 2731311 - DNA, 25 bp, Homo sapien
ctcaaagactgagcactgtagagca

SEQ ID NO: 2731312 - DNA, 25 bp, Homo sapien
actgagcactgtagagcatgtcttc

SEQ ID NO: 2731313 - DNA, 25 bp, Homo sapien
gactgagcactgtagagcatgtctt

SEQ ID NO: 2731314 - DNA, 25 bp, Homo sapien
tcaaagactgagcactgtagagcat

SEQ ID NO: 2731315 - DNA, 25 bp, Homo sapien
tgagcactgtagagcatgtcttctt

SEQ ID NO: 2731316 - DNA, 25 bp, Homo sapien
agcactgtagagcatgtcttcttcc

SEQ ID NO: 2731317 - DNA, 25 bp, Homo sapien
tgaatgcaaacacgatctgaagagc

SEQ ID NO: 2731318 - DNA, 25 bp, Homo sapien
taagcttgcatgcactctttcagac

SEQ ID NO: 2731319 - DNA, 25 bp, Homo sapien
tcagacgcagatcaaaaaagtaact

SEQ ID NO: 2731320 - DNA, 25 bp, Homo sapien
tatggtcaggcagtcagagtttgcc

SEQ ID NO: 2731321 - DNA, 25 bp, Homo sapien
tttaacacgtggcaagggcaagctg

SEQ ID NO: 2731322 - DNA, 25 bp, Homo sapien
ttttagattctgctatcaccctgcc

SEQ ID NO: 2731323 - DNA, 25 bp, Homo sapien
gatctgcgtctgaaagagtgcatgc

SEQ ID NO: 2731324 - DNA, 25 bp, Homo sapien
cagcttgcccttgccacgtgttaaa

SEQ ID NO: 2731325 - DNA, 25 bp, Homo sapien
ggcagggtgatagcagaatctaaaa

SEQ ID NO: 2731326 - DNA, 25 bp, Homo sapien
ttcagatcgtgtttgcattcagcag

SEQ ID NO: 2731327 - DNA, 25 bp, Homo sapien
gcctgaccatactgataagaaaggt

SEQ ID NO: 2731328 - DNA, 25 bp, Homo sapien
ggcaaactctgactgcctgaccata

SEQ ID NO: 2731329 - DNA, 25 bp, Homo sapien
ggttgcctgcgccactgttctggtg

SEQ ID NO: 2731330 - DNA, 25 bp, Homo sapien
tcttgtcttcatccggttgcctgcg

SEQ ID NO: 2731331 - DNA, 25 bp, Homo sapien
cagtagtcagccatccggacagaac

SEQ ID NO: 2731332 - DNA, 25 bp, Homo sapien
gaggaatgtcttgtcttcatccggt

SEQ ID NO: 2731333 - DNA, 25 bp, Homo sapien
ggacagaaccgttcctgtgatggtg

SEQ ID NO: 2731334 - DNA, 25 bp, Homo sapien
ttccccgagagtgtgctaagcattc

SEQ ID NO: 2731335 - DNA, 25 bp, Homo sapien
tgtccggatggctgactactgctgg

SEQ ID NO: 2731336 - DNA, 25 bp, Homo sapien
gccagacgccaccagaacagtggcg

SEQ ID NO: 2731337 - DNA, 25 bp, Homo sapien
caccatcacaggaacggttctgtcc

SEQ ID NO: 2731338 - DNA, 25 bp, Homo sapien
agaacagtggcgcaggcaaccggat

SEQ ID NO: 2731339 - DNA, 25 bp, Homo sapien
gaacggttctgtccggatggctgac

SEQ ID NO: 2731340 - DNA, 25 bp, Homo sapien
caggcaaccggatgaagacaagaca

SEQ ID NO: 2731341 - DNA, 25 bp, Homo sapien
tgtccagtactcctaagagcagtgc

SEQ ID NO: 2731342 - DNA, 25 bp, Homo sapien
tgataattaggcctctgccctgtgg

SEQ ID NO: 2731343 - DNA, 25 bp, Homo sapien
ggtgtgctgctaccatggaatctcc

SEQ ID NO: 2731344 - DNA, 25 bp, Homo sapien
agattcctgagtgtgacttcctaag

SEQ ID NO: 2731345 - DNA, 25 bp, Homo sapien
ttggctgcaaataaacgtgtccagt

SEQ ID NO: 2731346 - DNA, 25 bp, Homo sapien
gatgatctgatatggttgaccacag

SEQ ID NO: 2731347 - DNA, 25 bp, Homo sapien
cactgctcttaggagtactggacac

SEQ ID NO: 2731348 - DNA, 25 bp, Homo sapien
tagagtcccacatacatcttaggaa

SEQ ID NO: 2731349 - DNA, 25 bp, Homo sapien
cttaggaagtcacactcaggaatct

SEQ ID NO: 2731350 - DNA, 25 bp, Homo sapien
caaggagattccatggtagcagcac

SEQ ID NO: 2731351 - DNA, 25 bp, Homo sapien
ccacagggcagaggcctaattatca

SEQ ID NO: 2731352 - DNA, 25 bp, Homo sapien
tactggacacgtttatttgcagcca

SEQ ID NO: 2731353 - DNA, 25 bp, Homo sapien
gaaacaagtagctctggtaattacc

SEQ ID NO: 2731354 - DNA, 25 bp, Homo sapien
gaaaattatccctagattaagtgaa

SEQ ID NO: 2731355 - DNA, 25 bp, Homo sapien
tactgatacttgtacaaagaggctg

SEQ ID NO: 2731356 - DNA, 25 bp, Homo sapien
tgtgtcatcgtgctgtagagagtct

SEQ ID NO: 2731357 - DNA, 25 bp, Homo sapien
tatgaggctttcacactactacaag

SEQ ID NO: 2731358 - DNA, 25 bp, Homo sapien
taaatttataatctgcctggtactg

SEQ ID NO: 2731359 - DNA, 25 bp, Homo sapien
taatatctttcacttaatctaggga

SEQ ID NO: 2731360 - DNA, 25 bp, Homo sapien
tcttgtagtagtgtgaaagcctcat

SEQ ID NO: 2731361 - DNA, 25 bp, Homo sapien
gagactctctacagcacgatgacac

SEQ ID NO: 2731362 - DNA, 25 bp, Homo sapien
gaacagcctctttgtacaagtatca

SEQ ID NO: 2731363 - DNA, 25 bp, Homo sapien
cagtaccaggcagattataaattta

SEQ ID NO: 2731364 - DNA, 25 bp, Homo sapien
ggtaattaccagagctacttgtttc

SEQ ID NO: 2731365 - DNA, 25 bp, Homo sapien
tggccattagctgccttaaacgtta

SEQ ID NO: 2731366 - DNA, 25 bp, Homo sapien
tattctacaatgcagcgtgttttcc

SEQ ID NO: 2731367 - DNA, 25 bp, Homo sapien
gatacgttactctctccttggaatc

SEQ ID NO: 2731368 - DNA, 25 bp, Homo sapien
gaagagccatctcaacagaatcgca

SEQ ID NO: 2731369 - DNA, 25 bp, Homo sapien
cactttggtgaattacgtgcctcca

SEQ ID NO: 2731370 - DNA, 25 bp, Homo sapien
gcctccataacctgaactgtgccga

SEQ ID NO: 2731371 - DNA, 25 bp, Homo sapien
tcggcacagttcaggttatggaggc

SEQ ID NO: 2731372 - DNA, 25 bp, Homo sapien
taacgtatctctcagaagaacagca

SEQ ID NO: 2731373 - DNA, 25 bp, Homo sapien
ggcaaaggaaaacacgctgcattgt

SEQ ID NO: 2731374 - DNA, 25 bp, Homo sapien
taacgtttaaggcagctaatggcca

SEQ ID NO: 2731375 - DNA, 25 bp, Homo sapien
gattccaaggagagagtaacgtatc

SEQ ID NO: 2731376 - DNA, 25 bp, Homo sapien
tggaggcacgtaattcaccaaagtg

SEQ ID NO: 2731377 - DNA, 25 bp, Homo sapien
ccaaatagcttgtgaacttgcaggg

SEQ ID NO: 2731378 - DNA, 25 bp, Homo sapien
caaattagtgtatcgagatgcctgc

SEQ ID NO: 2731379 - DNA, 25 bp, Homo sapien
gcatctcaagctacatggcagggtt

SEQ ID NO: 2731380 - DNA, 25 bp, Homo sapien
tgtctgaggctgtgatggttccatc

SEQ ID NO: 2731381 - DNA, 25 bp, Homo sapien
taagatggcaaacctaggacctctg

SEQ ID NO: 2731382 - DNA, 25 bp, Homo sapien
aatctagtgattgtcccaggaggcc

SEQ ID NO: 2731383 - DNA, 25 bp, Homo sapien
tctgaacgggctaaatggaggtcct

SEQ ID NO: 2731384 - DNA, 25 bp, Homo sapien
tttgccccgttacacagctagcgag

SEQ ID NO: 2731385 - DNA, 25 bp, Homo sapien
tacttcatttggatgcagcaacatg

SEQ ID NO: 2731386 - DNA, 25 bp, Homo sapien
tctagtcaactgtactgagataggt

SEQ ID NO: 2731387 - DNA, 25 bp, Homo sapien
cttacgtcggcattaggttatttct

SEQ ID NO: 2731388 - DNA, 25 bp, Homo sapien
gcaacatgatttaaacagctcctta

SEQ ID NO: 2731389 - DNA, 25 bp, Homo sapien
tcttttgctattaaattaacttcca

SEQ ID NO: 2731390 - DNA, 25 bp, Homo sapien
ttactacactattacattttcattg

SEQ ID NO: 2731391 - DNA, 25 bp, Homo sapien
tgtaacataatattctggccattat

SEQ ID NO: 2731392 - DNA, 25 bp, Homo sapien
tacactattacattttcattggaaa

SEQ ID NO: 2731393 - DNA, 25 bp, Homo sapien
tgtttatgtccttcctgacgggttc

SEQ ID NO: 2731394 - DNA, 25 bp, Homo sapien
cagggactgggtccggttccgctgc

SEQ ID NO: 2731395 - DNA, 25 bp, Homo sapien
gactgggtccggttccgctgcaggg

SEQ ID NO: 2731396 - DNA, 25 bp, Homo sapien
gctcagggactgggtccggttccgc

SEQ ID NO: 2731397 - DNA, 25 bp, Homo sapien
gatactcaggcaacacacgacactt

SEQ ID NO: 2731398 - DNA, 25 bp, Homo sapien
taaattccacattccaccaagctag

SEQ ID NO: 2731399 - DNA, 25 bp, Homo sapien
cataaagctgcaaactagtcatctc

SEQ ID NO: 2731400 - DNA, 25 bp, Homo sapien
cccaggtttatgagggtgtatgtca

SEQ ID NO: 2731401 - DNA, 25 bp, Homo sapien
tctaggtaatatagtcttggtatca

SEQ ID NO: 2731402 - DNA, 25 bp, Homo sapien
gctgtttacagattaaagtacattt

SEQ ID NO: 2731403 - DNA, 25 bp, Homo sapien
catttctaaaccctgtcatttaata

SEQ ID NO: 2731404 - DNA, 25 bp, Homo sapien
tgtccaaccctttttacatcaataa

SEQ ID NO: 2731405 - DNA, 25 bp, Homo sapien
ctgcgcccggccctaaaaagactat

SEQ ID NO: 2731406 - DNA, 25 bp, Homo sapien
caaagcagtacttataatgaccttg

SEQ ID NO: 2731407 - DNA, 25 bp, Homo sapien
cttttatcctcacattcggagagtt

SEQ ID NO: 2731408 - DNA, 25 bp, Homo sapien
tgaccttgtaagaatctgtgatcct

SEQ ID NO: 2731409 - DNA, 25 bp, Homo sapien
aagatcattttcctagccaaagcag

SEQ ID NO: 2731410 - DNA, 25 bp, Homo sapien
acctcggtgactgaaaagcttatac

SEQ ID NO: 2731411 - DNA, 25 bp, Homo sapien
tctttagcaaactaggacccatctg

SEQ ID NO: 2731412 - DNA, 25 bp, Homo sapien
tacaatgtgtataccccacgtgact

SEQ ID NO: 2731413 - DNA, 25 bp, Homo sapien
gaaagacaacttatcagatggccca

SEQ ID NO: 2731414 - DNA, 25 bp, Homo sapien
caagcccagatcctgtgaatccgat

SEQ ID NO: 2731415 - DNA, 25 bp, Homo sapien
tcaattgcttggatcactgcttttt

SEQ ID NO: 2731416 - DNA, 25 bp, Homo sapien
ggtttccccagagtgcttccaattc

SEQ ID NO: 2731417 - DNA, 25 bp, Homo sapien
ttccaagatcgaagatgatttccac

SEQ ID NO: 2731418 - DNA, 25 bp, Homo sapien
aggaaggagtatagtaaatgcctca

SEQ ID NO: 2731419 - DNA, 25 bp, Homo sapien
gaaggagtatagtaaatgcctcatt

SEQ ID NO: 2731420 - DNA, 25 bp, Homo sapien
aaggagtatagtaaatgcctcattt

SEQ ID NO: 2731421 - DNA, 25 bp, Homo sapien
ggaaggagtatagtaaatgcctcat

SEQ ID NO: 2731422 - DNA, 25 bp, Homo sapien
aaggcatccccgaaaggcggatcca

SEQ ID NO: 2731423 - DNA, 25 bp, Homo sapien
tacatgaaatctggatccgaactgt

SEQ ID NO: 2731424 - DNA, 25 bp, Homo sapien
ttgttccgaaaaggtgtggcttcga

SEQ ID NO: 2731425 - DNA, 25 bp, Homo sapien
tccgaactgtttgctaagagatctg

SEQ ID NO: 2731426 - DNA, 25 bp, Homo sapien
aaattactagatgtaggccaggtgc

SEQ ID NO: 2731427 - DNA, 25 bp, Homo sapien
gagctcaagacctgtctggctgaca

SEQ ID NO: 2731428 - DNA, 25 bp, Homo sapien
ttactagatgtaggccaggtgcgat

SEQ ID NO: 2731429 - DNA, 25 bp, Homo sapien
cgggagctcaagacctgtctggctg

SEQ ID NO: 2731430 - DNA, 25 bp, Homo sapien
gactagaaaagtcatcaagacccaa

SEQ ID NO: 2731431 - DNA, 25 bp, Homo sapien
cactgttcccagtttgaggttaaag

SEQ ID NO: 2731432 - DNA, 25 bp, Homo sapien
ggtatatttcgttaggtcttcacag

SEQ ID NO: 2731433 - DNA, 25 bp, Homo sapien
gcttgtgatctttttaccagggaat

SEQ ID NO: 2731434 - DNA, 25 bp, Homo sapien
ctcaacaagggccggctctgttgca

SEQ ID NO: 2731435 - DNA, 25 bp, Homo sapien
caacaagggccggctctgttgcact

SEQ ID NO: 2731436 - DNA, 25 bp, Homo sapien
acaagggccggctctgttgcactgg

SEQ ID NO: 2731437 - DNA, 25 bp, Homo sapien
ctggctcaacaagggccggctctgt

SEQ ID NO: 2731438 - DNA, 25 bp, Homo sapien
gtagcaggtgttctcctttgctgca

SEQ ID NO: 2731439 - DNA, 25 bp, Homo sapien
cttgaagaggctccatccctttttt

SEQ ID NO: 2731440 - DNA, 25 bp, Homo sapien
ccactgcaccacagtagcaggtgtt

SEQ ID NO: 2731441 - DNA, 25 bp, Homo sapien
cttgtctctttgccactgcaccaca

SEQ ID NO: 2731442 - DNA, 25 bp, Homo sapien
ccaagttgtcggagacaaaaagaga

SEQ ID NO: 2731443 - DNA, 25 bp, Homo sapien
caggggacttagtaatagttcctgg

SEQ ID NO: 2731444 - DNA, 25 bp, Homo sapien
ctgcaagtgacccaggaccttcctg

SEQ ID NO: 2731445 - DNA, 25 bp, Homo sapien
tttaaaaggcaaagcgggagtggca

SEQ ID NO: 2731446 - DNA, 25 bp, Homo sapien
ttcatgctcactgccgaatccttca

SEQ ID NO: 2731447 - DNA, 25 bp, Homo sapien
gttcatgctcactgccgaatccttc

SEQ ID NO: 2731448 - DNA, 25 bp, Homo sapien
agttcatgctcactgccgaatcctt

SEQ ID NO: 2731449 - DNA, 25 bp, Homo sapien
catgctcactgccgaatccttcatc

SEQ ID NO: 2731450 - DNA, 25 bp, Homo sapien
cagtctggtaagcttgcaagcatta

SEQ ID NO: 2731451 - DNA, 25 bp, Homo sapien
tcagtctggtaagcttgcaagcatt

SEQ ID NO: 2731452 - DNA, 25 bp, Homo sapien
tggtaagcttgcaagcattataata

SEQ ID NO: 2731453 - DNA, 25 bp, Homo sapien
gtctggtaagcttgcaagcattata

SEQ ID NO: 2731454 - DNA, 25 bp, Homo sapien
gccctcaaggaatcagcttatgaat

SEQ ID NO: 2731455 - DNA, 25 bp, Homo sapien
cgcctggccctaaacaggaatattt

SEQ ID NO: 2731456 - DNA, 25 bp, Homo sapien
gcataaatgctcaagagagtgacaa

SEQ ID NO: 2731457 - DNA, 25 bp, Homo sapien
tatgaatccctatgtgagcaaaagt

SEQ ID NO: 2731458 - DNA, 25 bp, Homo sapien
tgtactccagatcattaacgctagg

SEQ ID NO: 2731459 - DNA, 25 bp, Homo sapien
tacatgaacaagacggaatgggctg

SEQ ID NO: 2731460 - DNA, 25 bp, Homo sapien
aatgggctgtgcgaagaatgtacac

SEQ ID NO: 2731461 - DNA, 25 bp, Homo sapien
gcagcattggccataagtaaaaagg

SEQ ID NO: 2731462 - DNA, 25 bp, Homo sapien
ggcaaagtatctcggttccactcag

SEQ ID NO: 2731463 - DNA, 25 bp, Homo sapien
tgttcactatactcccagaagtatc

SEQ ID NO: 2731464 - DNA, 25 bp, Homo sapien
ctcttccgtgaagatattgaagtca

SEQ ID NO: 2731465 - DNA, 25 bp, Homo sapien
tgctgtgatggtgtaagttgttcac

SEQ ID NO: 2731466 - DNA, 25 bp, Homo sapien
catctccagtttgctaggaagggct

SEQ ID NO: 2731467 - DNA, 25 bp, Homo sapien
caagagacacgtttttcacggccac

SEQ ID NO: 2731468 - DNA, 25 bp, Homo sapien
gctgaatgcctaggtacacggagta

SEQ ID NO: 2731469 - DNA, 25 bp, Homo sapien
caatctatcctagaagggctggcct

SEQ ID NO: 2731470 - DNA, 25 bp, Homo sapien
gactggagtcaggtcactaatcacc

SEQ ID NO: 2731471 - DNA, 25 bp, Homo sapien
tccgtgacttctttactgcatattt

SEQ ID NO: 2731472 - DNA, 25 bp, Homo sapien
tattcagtttccgaagttcattgcc

SEQ ID NO: 2731473 - DNA, 25 bp, Homo sapien
ttctacatcagttctccgtgacttc

SEQ ID NO: 2731474 - DNA, 25 bp, Homo sapien
cttggtcgggctgttaagggaagct

SEQ ID NO: 2731475 - DNA, 25 bp, Homo sapien
ctggaagccagcttatttttttcct

SEQ ID NO: 2731476 - DNA, 25 bp, Homo sapien
ttgaggccccataatttcactttat

SEQ ID NO: 2731477 - DNA, 25 bp, Homo sapien
tgttgaggccccataatttcacttt

SEQ ID NO: 2731478 - DNA, 25 bp, Homo sapien
gttgaggccccataatttcacttta

SEQ ID NO: 2731479 - DNA, 25 bp, Homo sapien
tctcttggattctgtacccggttta

SEQ ID NO: 2731480 - DNA, 25 bp, Homo sapien
tcttggattctgtacccggtttaca

SEQ ID NO: 2731481 - DNA, 25 bp, Homo sapien
cccggtttacaatctcttgcttgat

SEQ ID NO: 2731482 - DNA, 25 bp, Homo sapien
tctgtacccggtttacaatctcttg

SEQ ID NO: 2731483 - DNA, 25 bp, Homo sapien
atgaggatttcaagcttctgcccca

SEQ ID NO: 2731484 - DNA, 25 bp, Homo sapien
tgaggatttcaagcttctgccccat

SEQ ID NO: 2731485 - DNA, 25 bp, Homo sapien
cgagagtatctttaatgaggatttc

SEQ ID NO: 2731486 - DNA, 25 bp, Homo sapien
gagtatctttaatgaggatttcaag

SEQ ID NO: 2731487 - DNA, 25 bp, Homo sapien
tgactttctcctacagcagctgagc

SEQ ID NO: 2731488 - DNA, 25 bp, Homo sapien
tataacgctggatgccttggatgct

SEQ ID NO: 2731489 - DNA, 25 bp, Homo sapien
gttggcctgacgtctagatccctgc

SEQ ID NO: 2731490 - DNA, 25 bp, Homo sapien
aaatactggcgattagggtctactc

SEQ ID NO: 2731491 - DNA, 25 bp, Homo sapien
cagtgggattcccttctgcagtctt

SEQ ID NO: 2731492 - DNA, 25 bp, Homo sapien
cttaatcctacaaggcctccagtgg

SEQ ID NO: 2731493 - DNA, 25 bp, Homo sapien
tacacctttgatgttggtatcctta

SEQ ID NO: 2731494 - DNA, 25 bp, Homo sapien
caaattctgaggtttgcccagcaac

SEQ ID NO: 2731495 - DNA, 25 bp, Homo sapien
tctgaccagtggtccaatgaggctg

SEQ ID NO: 2731496 - DNA, 25 bp, Homo sapien
gatgccagtagcagttttaatcatg

SEQ ID NO: 2731497 - DNA, 25 bp, Homo sapien
tacataatgctaactgacatgcaaa

SEQ ID NO: 2731498 - DNA, 25 bp, Homo sapien
tacaatggataacgtgacaaaacgc

SEQ ID NO: 2731499 - DNA, 25 bp, Homo sapien
taacaagagcgactggacagcatgc

SEQ ID NO: 2731500 - DNA, 25 bp, Homo sapien
tgaacatctaatatggcccacaggc

SEQ ID NO: 2731501 - DNA, 25 bp, Homo sapien
tatggaagcgaactagaggaacagc

SEQ ID NO: 2731502 - DNA, 25 bp, Homo sapien
tattgactggaaaagtgtggcaccc

SEQ ID NO: 2731503 - DNA, 25 bp, Homo sapien
tgttatgaaagaggcaaaccgaacc

SEQ ID NO: 2731504 - DNA, 25 bp, Homo sapien
gaatccacaagtattacggcactgt

SEQ ID NO: 2731505 - DNA, 25 bp, Homo sapien
aacaaagggcgaagggcaagacata

SEQ ID NO: 2731506 - DNA, 25 bp, Homo sapien
gcaatttggcctagctcagttccta

SEQ ID NO: 2731507 - DNA, 25 bp, Homo sapien
aagaggttgccacattgtatgaaca

SEQ ID NO: 2731508 - DNA, 25 bp, Homo sapien
tcttgtgacttctgtgctgtcagcc

SEQ ID NO: 2731509 - DNA, 25 bp, Homo sapien
tacgcaactatgcaaaagaggttgc

SEQ ID NO: 2731510 - DNA, 25 bp, Homo sapien
tatcgctgtcaaccacaatactaag

SEQ ID NO: 2731511 - DNA, 25 bp, Homo sapien
gatgttgcatacactgatgaatctg

SEQ ID NO: 2731512 - DNA, 25 bp, Homo sapien
tgtatctgactagaagtgctcaggg

SEQ ID NO: 2731513 - DNA, 25 bp, Homo sapien
taaacagctcatgcgtcaacaagat

SEQ ID NO: 2731514 - DNA, 25 bp, Homo sapien
tctgaaatgaaaaactgcacaacta

SEQ ID NO: 2731515 - DNA, 25 bp, Homo sapien
ttcacctccaggtcaaatttgacaa

SEQ ID NO: 2731516 - DNA, 25 bp, Homo sapien
tttgacaatctcttggttacagatc

SEQ ID NO: 2731517 - DNA, 25 bp, Homo sapien
tacagatccggacgtggacgtcttg

SEQ ID NO: 2731518 - DNA, 25 bp, Homo sapien
ctgaataagcgccttcacctccagg

SEQ ID NO: 2731519 - DNA, 25 bp, Homo sapien
tctgtgacgcaactgttgaaatttc

SEQ ID NO: 2731520 - DNA, 25 bp, Homo sapien
agggtcctgaacaatcacggatatc

SEQ ID NO: 2731521 - DNA, 25 bp, Homo sapien
gcacttaagggtcctgaacaatcac

SEQ ID NO: 2731522 - DNA, 25 bp, Homo sapien
ctgtattctgtgacgcaactgttga

SEQ ID NO: 2731523 - DNA, 25 bp, Homo sapien
tgtgtatatgatgtgactggtgact

SEQ ID NO: 2731524 - DNA, 25 bp, Homo sapien
tacagtggtgcacaactctttgccc

SEQ ID NO: 2731525 - DNA, 25 bp, Homo sapien
catataccatacttgaattcaggca

SEQ ID NO: 2731526 - DNA, 25 bp, Homo sapien
gaaagtatttgaagtggccccagga

SEQ ID NO: 2731527 - DNA, 25 bp, Homo sapien
gaagcagtccaaataaatgcccttt

SEQ ID NO: 2731528 - DNA, 25 bp, Homo sapien
taaatgccctttgatagagaactgg

SEQ ID NO: 2731529 - DNA, 25 bp, Homo sapien
ggaagcagtccaaataaatgccctt

SEQ ID NO: 2731530 - DNA, 25 bp, Homo sapien
tgtagttggagagttgaagtcatgc

SEQ ID NO: 2731531 - DNA, 25 bp, Homo sapien
aaggtaacaggtgtagttggagagt

SEQ ID NO: 2731532 - DNA, 25 bp, Homo sapien
gagttgaagaaaagtctgtcaggga

SEQ ID NO: 2731533 - DNA, 25 bp, Homo sapien
gttgaagaaaagtctgtcagggaat

SEQ ID NO: 2731534 - DNA, 25 bp, Homo sapien
ctgagcatctgctttttgtgattct

SEQ ID NO: 2731535 - DNA, 25 bp, Homo sapien
ctttttgtgattctccacttcctgg

SEQ ID NO: 2731536 - DNA, 25 bp, Homo sapien
ttcctggagtagaagttgtttctct

SEQ ID NO: 2731537 - DNA, 25 bp, Homo sapien
ttgctctttagccaactgctccagg

SEQ ID NO: 2731538 - DNA, 25 bp, Homo sapien
ctagattgtcgattgcaattttgca

SEQ ID NO: 2731539 - DNA, 25 bp, Homo sapien
ctctagattgtcgattgcaattttg

SEQ ID NO: 2731540 - DNA, 25 bp, Homo sapien
gctttctctagattgtcgattgcaa

SEQ ID NO: 2731541 - DNA, 25 bp, Homo sapien
ttctctagattgtcgattgcaattt

SEQ ID NO: 2731542 - DNA, 25 bp, Homo sapien
gggccatcatcctgctgatccccat

SEQ ID NO: 2731543 - DNA, 25 bp, Homo sapien
ctgctgggccatcatcctgctgatc

SEQ ID NO: 2731544 - DNA, 25 bp, Homo sapien
ctctcagtgatggtactggatgtct

SEQ ID NO: 2731545 - DNA, 25 bp, Homo sapien
gcctcctcgctctgctggacctgct

SEQ ID NO: 2731546 - DNA, 25 bp, Homo sapien
tagcagtcctaccagcagctgattc

SEQ ID NO: 2731547 - DNA, 25 bp, Homo sapien
agcaaccattcccaaacttgcctgg

SEQ ID NO: 2731548 - DNA, 25 bp, Homo sapien
ggagtataattgtaaactgaggtcc

SEQ ID NO: 2731549 - DNA, 25 bp, Homo sapien
cagctgattcgccaaacatctcttg

SEQ ID NO: 2731550 - DNA, 25 bp, Homo sapien
cctgtagcctctgattcacatcttt

SEQ ID NO: 2731551 - DNA, 25 bp, Homo sapien
ggaaaccagatggtctcaagcagtc

SEQ ID NO: 2731552 - DNA, 25 bp, Homo sapien
gaggaaaccagatggtctcaagcag

SEQ ID NO: 2731553 - DNA, 25 bp, Homo sapien
tgtagcctctgattcacatctttta

SEQ ID NO: 2731554 - DNA, 25 bp, Homo sapien
ctggagagggctgatactcttctcc

SEQ ID NO: 2731555 - DNA, 25 bp, Homo sapien
cttatactgaaggaccctggagagg

SEQ ID NO: 2731556 - DNA, 25 bp, Homo sapien
ttctccttttgtccacgtgtgcaat

SEQ ID NO: 2731557 - DNA, 25 bp, Homo sapien
gtccacgtgtgcaattttccaaaag

SEQ ID NO: 2731558 - DNA, 25 bp, Homo sapien
tagaactgaaacgagactggctggg

SEQ ID NO: 2731559 - DNA, 25 bp, Homo sapien
tctgcctatttggtgcactgaaaaa

SEQ ID NO: 2731560 - DNA, 25 bp, Homo sapien
tcaggtaagctgcaaactcaaggag

SEQ ID NO: 2731561 - DNA, 25 bp, Homo sapien
cacagcacacgctgagaggaagccc

SEQ ID NO: 2731562 - DNA, 25 bp, Homo sapien
actgcaactactcctgcaattgtgg

SEQ ID NO: 2731563 - DNA, 25 bp, Homo sapien
tatcgcttgtacaaaatgggcccca

SEQ ID NO: 2731564 - DNA, 25 bp, Homo sapien
caagctgaatttgtgaggcataagg

SEQ ID NO: 2731565 - DNA, 25 bp, Homo sapien
caattgtggagcaaattccagacac

SEQ ID NO: 2731566 - DNA, 25 bp, Homo sapien
tggccaaaatccacacgatgtttca

SEQ ID NO: 2731567 - DNA, 25 bp, Homo sapien
ggccaaaatccacacgatgtttcaa

SEQ ID NO: 2731568 - DNA, 25 bp, Homo sapien
ctggccaaaatccacacgatgtttc

SEQ ID NO: 2731569 - DNA, 25 bp, Homo sapien
agagactgcagctcaagatccaaag

SEQ ID NO: 2731570 - DNA, 25 bp, Homo sapien
tatagaggaccgtagcaagaaacag

SEQ ID NO: 2731571 - DNA, 25 bp, Homo sapien
gaagatgagaagcttgtccgtcagc

SEQ ID NO: 2731572 - DNA, 25 bp, Homo sapien
ggatggtgcccgacatggacttaaa

SEQ ID NO: 2731573 - DNA, 25 bp, Homo sapien
caagaaacagggctagcgcaaggaa

SEQ ID NO: 2731574 - DNA, 25 bp, Homo sapien
tcaccctttacaagccagctacttg

SEQ ID NO: 2731575 - DNA, 25 bp, Homo sapien
ggcactgtgttccatccaacctgca

SEQ ID NO: 2731576 - DNA, 25 bp, Homo sapien
gcggttcgtatgtccccagggcggc

SEQ ID NO: 2731577 - DNA, 25 bp, Homo sapien
gggcggcatcccaatgccagacctt

SEQ ID NO: 2731578 - DNA, 25 bp, Homo sapien
ggcctcccatagtgcacaatggtgg

SEQ ID NO: 2731579 - DNA, 25 bp, Homo sapien
ggactttaagtgctccacgcagcag

SEQ ID NO: 2731580 - DNA, 25 bp, Homo sapien
cctcccatagtgcacaatggtggaa

SEQ ID NO: 2731581 - DNA, 25 bp, Homo sapien
tttaagtgctccacgcagcagcggc

SEQ ID NO: 2731582 - DNA, 25 bp, Homo sapien
ggaatgaccaggagttttcatcacc

SEQ ID NO: 2731583 - DNA, 25 bp, Homo sapien
aggaatgaccaggagttttcatcac

SEQ ID NO: 2731584 - DNA, 25 bp, Homo sapien
tctggcatttaagggcacgatggga

SEQ ID NO: 2731585 - DNA, 25 bp, Homo sapien
caccagatctggcatttaagggcac

SEQ ID NO: 2731586 - DNA, 25 bp, Homo sapien
ccacacctggttgaacaggggctgt

SEQ ID NO: 2731587 - DNA, 25 bp, Homo sapien
tcctgatagtctgtgagattttatt

SEQ ID NO: 2731588 - DNA, 25 bp, Homo sapien
tgaacaggggctgttggaccctcct

SEQ ID NO: 2731589 - DNA, 25 bp, Homo sapien
tgtgagattttatttccgtgtctcc

SEQ ID NO: 2731590 - DNA, 25 bp, Homo sapien
aacagtagatccacttttaattctt

SEQ ID NO: 2731591 - DNA, 25 bp, Homo sapien
gatcaaacagtagatccacttttaa

SEQ ID NO: 2731592 - DNA, 25 bp, Homo sapien
gttttggtttgcgatgttgagcatt

SEQ ID NO: 2731593 - DNA, 25 bp, Homo sapien
gtggttttggtttgcgatgttgagc

SEQ ID NO: 2731594 - DNA, 25 bp, Homo sapien
tatgagaatcgttctgcggctgctt

SEQ ID NO: 2731595 - DNA, 25 bp, Homo sapien
gcggctgctttttttgattgacatc

SEQ ID NO: 2731596 - DNA, 25 bp, Homo sapien
tacacaaatagtagtcaactatgag

SEQ ID NO: 2731597 - DNA, 25 bp, Homo sapien
gattgacatcgtgagattgatccat

SEQ ID NO: 2731598 - DNA, 25 bp, Homo sapien
acagacagctgagcattgtctgccc

SEQ ID NO: 2731599 - DNA, 25 bp, Homo sapien
gctgagcattgtctgcccccttgaa

SEQ ID NO: 2731600 - DNA, 25 bp, Homo sapien
gaaagggccgcctttgaagccggca

SEQ ID NO: 2731601 - DNA, 25 bp, Homo sapien
cagtggggcactgaacaggcgttct

SEQ ID NO: 2731602 - DNA, 25 bp, Homo sapien
tgttgttaggcagcattactgtggc

SEQ ID NO: 2731603 - DNA, 25 bp, Homo sapien
ttagttgttgttaggcagcattact

SEQ ID NO: 2731604 - DNA, 25 bp, Homo sapien
gttgttgttaggcagcattactgtg

SEQ ID NO: 2731605 - DNA, 25 bp, Homo sapien
tagttgttgttaggcagcattactg

SEQ ID NO: 2731606 - DNA, 25 bp, Homo sapien
agagacacaactctctgctggggcc

SEQ ID NO: 2731607 - DNA, 25 bp, Homo sapien
ctcaagggattaaggctcaagagac

SEQ ID NO: 2731608 - DNA, 25 bp, Homo sapien
ttacagccagctttcccctcaaggg

SEQ ID NO: 2731609 - DNA, 25 bp, Homo sapien
atatttgtgctgttacagccagctt

SEQ ID NO: 2731610 - DNA, 25 bp, Homo sapien
ctcctcaatggctatagggtagccc

SEQ ID NO: 2731611 - DNA, 25 bp, Homo sapien
tcaatggctatagggtagccctcgg

SEQ ID NO: 2731612 - DNA, 25 bp, Homo sapien
cctcaatggctatagggtagccctc

SEQ ID NO: 2731613 - DNA, 25 bp, Homo sapien
caatggctatagggtagccctcggg

SEQ ID NO: 2731614 - DNA, 25 bp, Homo sapien
cagtgggagtggaggagaaaaaaag

SEQ ID NO: 2731615 - DNA, 25 bp, Homo sapien
aaaagaactctgtaactggtggtga

SEQ ID NO: 2731616 - DNA, 25 bp, Homo sapien
aaaaagaactctgtaactggtggtg

SEQ ID NO: 2731617 - DNA, 25 bp, Homo sapien
aagcagtgggagtggaggagaaaaa

SEQ ID NO: 2731618 - DNA, 25 bp, Homo sapien
cagtcatccttccagcgggtagaaa

SEQ ID NO: 2731619 - DNA, 25 bp, Homo sapien
gtatgaaggaccgagaacagcgcct

SEQ ID NO: 2731620 - DNA, 25 bp, Homo sapien
gatcattagcggcactgcgtccgga

SEQ ID NO: 2731621 - DNA, 25 bp, Homo sapien
tctgcccctgaagtgcaagcctgga

SEQ ID NO: 2731622 - DNA, 25 bp, Homo sapien
tctcgcaggcgcaggtctatgagct

SEQ ID NO: 2731623 - DNA, 25 bp, Homo sapien
tgctgaaactcacgtccacgcaggt

SEQ ID NO: 2731624 - DNA, 25 bp, Homo sapien
acttgaatgcggttcagagccccgg

SEQ ID NO: 2731625 - DNA, 25 bp, Homo sapien
caacttcgtgaacttcggcgtcggg

SEQ ID NO: 2731626 - DNA, 25 bp, Homo sapien
tcggatgtggctcgtttgccagacg

SEQ ID NO: 2731627 - DNA, 25 bp, Homo sapien
catttaattgaatcggatgtggctc

SEQ ID NO: 2731628 - DNA, 25 bp, Homo sapien
tccgagctcttttcagcgagacatt

SEQ ID NO: 2731629 - DNA, 25 bp, Homo sapien
agacgtcaccgcctcggcgataggc

SEQ ID NO: 2731630 - DNA, 25 bp, Homo sapien
ttcactgtatctgagtcgttgtcca

SEQ ID NO: 2731631 - DNA, 25 bp, Homo sapien
cttcactgtatctgagtcgttgtcc

SEQ ID NO: 2731632 - DNA, 25 bp, Homo sapien
tcactgtatctgagtcgttgtccat

SEQ ID NO: 2731633 - DNA, 25 bp, Homo sapien
aaaacaggcggcagttcgccagctc

SEQ ID NO: 2731634 - DNA, 25 bp, Homo sapien
agcatcaattcagcactgagccggc

SEQ ID NO: 2731635 - DNA, 25 bp, Homo sapien
cccggtggtaggtgcgactcttcac

SEQ ID NO: 2731636 - DNA, 25 bp, Homo sapien
cctgaaccgccaagccgaaggttct

SEQ ID NO: 2731637 - DNA, 25 bp, Homo sapien
ccaccttgccgggtgtcagcagaac

SEQ ID NO: 2731638 - DNA, 25 bp, Homo sapien
gagtctctcacaatgacgcagttca

SEQ ID NO: 2731639 - DNA, 25 bp, Homo sapien
aaggaagaagtttgcccacattggc

SEQ ID NO: 2731640 - DNA, 25 bp, Homo sapien
cagcaggtgggtccaaaaggaagaa

SEQ ID NO: 2731641 - DNA, 25 bp, Homo sapien
atgggtccatgaggtactgcgtgct

SEQ ID NO: 2731642 - DNA, 25 bp, Homo sapien
gcagagctccggtgagaatagcagg

SEQ ID NO: 2731643 - DNA, 25 bp, Homo sapien
tgcgtgcttgtaaagcgccctggcc

SEQ ID NO: 2731644 - DNA, 25 bp, Homo sapien
cctggcccgctgacatagagggctt

SEQ ID NO: 2731645 - DNA, 25 bp, Homo sapien
gaggccgccgggtaagcacgtggcg

SEQ ID NO: 2731646 - DNA, 25 bp, Homo sapien
gtctgcaggcatccgcgcacagccg

SEQ ID NO: 2731647 - DNA, 25 bp, Homo sapien
gcgctggcggcgggctggttcctgc

SEQ ID NO: 2731648 - DNA, 25 bp, Homo sapien
ccggtctcaccttcgcgctggcggc

SEQ ID NO: 2731649 - DNA, 25 bp, Homo sapien
tctgttggggctcgtgcccacctct

SEQ ID NO: 2731650 - DNA, 25 bp, Homo sapien
agcaaatgagttaggctgcactggg

SEQ ID NO: 2731651 - DNA, 25 bp, Homo sapien
gaaaatgcaggcgaggtctgcagca

SEQ ID NO: 2731652 - DNA, 25 bp, Homo sapien
ccaggtctctgttggggctcgtgcc

SEQ ID NO: 2731653 - DNA, 25 bp, Homo sapien
ccacgtgagcttgctaagtgataat

SEQ ID NO: 2731654 - DNA, 25 bp, Homo sapien
tactacggatttaggcaacaggacc

SEQ ID NO: 2731655 - DNA, 25 bp, Homo sapien
caacaggacctgtacattgtcacat

SEQ ID NO: 2731656 - DNA, 25 bp, Homo sapien
ggaacaaccccgtctgatctcagaa

SEQ ID NO: 2731657 - DNA, 25 bp, Homo sapien
gcgtatctgctctaaaatgacttgt

SEQ ID NO: 2731658 - DNA, 25 bp, Homo sapien
cacagctagtatttctatgccccaa

SEQ ID NO: 2731659 - DNA, 25 bp, Homo sapien
aaggcaacctgaggccagacaccaa

SEQ ID NO: 2731660 - DNA, 25 bp, Homo sapien
agtctttcatgatccatgccggcgg

SEQ ID NO: 2731661 - DNA, 25 bp, Homo sapien
tctggtgctgtctccgcggaagtca

SEQ ID NO: 2731662 - DNA, 25 bp, Homo sapien
aataaatatcgcttagaatgcagga

SEQ ID NO: 2731663 - DNA, 25 bp, Homo sapien
gggagtggcccctatgagtttatat

SEQ ID NO: 2731664 - DNA, 25 bp, Homo sapien
tgagccattgtactgtctgggctgg

SEQ ID NO: 2731665 - DNA, 25 bp, Homo sapien
tccttcttgggaatgtggccctcgg

SEQ ID NO: 2731666 - DNA, 25 bp, Homo sapien
gacttgtacttctagctgaactgcc

SEQ ID NO: 2731667 - DNA, 25 bp, Homo sapien
ggctataatgcatgcctggagcaca

SEQ ID NO: 2731668 - DNA, 25 bp, Homo sapien
tgcaggcagcccatataagaagcct

SEQ ID NO: 2731669 - DNA, 25 bp, Homo sapien
cactgtttggtcaacgctggcgatg

SEQ ID NO: 2731670 - DNA, 25 bp, Homo sapien
tgtggcgtgtttgaatgtttcgaga

SEQ ID NO: 2731671 - DNA, 25 bp, Homo sapien
tcgagaacaactcttgtgagattcg

SEQ ID NO: 2731672 - DNA, 25 bp, Homo sapien
atccagcactgtttggtcaacgctg

SEQ ID NO: 2731673 - DNA, 25 bp, Homo sapien
tgggccagttcatgaccctggcttt

SEQ ID NO: 2731674 - DNA, 25 bp, Homo sapien
aagaaccatgtgtgccgagcggctg

SEQ ID NO: 2731675 - DNA, 25 bp, Homo sapien
cagttcatgaccctggctttggtgt

SEQ ID NO: 2731676 - DNA, 25 bp, Homo sapien
cgggaggttaataccaagaaccatg

SEQ ID NO: 2731677 - DNA, 25 bp, Homo sapien
ctcaggagagctcgacacgccggat

SEQ ID NO: 2731678 - DNA, 25 bp, Homo sapien
gatagctgcggccagccgtggccat

SEQ ID NO: 2731679 - DNA, 25 bp, Homo sapien
gggaagcccactctgaagacgccct

SEQ ID NO: 2731680 - DNA, 25 bp, Homo sapien
gacaatttatggatgctccctggcg

SEQ ID NO: 2731681 - DNA, 25 bp, Homo sapien
tgtcctctgcatgcaactaactgct

SEQ ID NO: 2731682 - DNA, 25 bp, Homo sapien
cctggttttgagtgtagataggccc

SEQ ID NO: 2731683 - DNA, 25 bp, Homo sapien
cagctgtcatgcataagcctgggac

SEQ ID NO: 2731684 - DNA, 25 bp, Homo sapien
caccaattagaatgtttagtccagt

SEQ ID NO: 2731685 - DNA, 25 bp, Homo sapien
caacagggccatcaccattagcttg

SEQ ID NO: 2731686 - DNA, 25 bp, Homo sapien
ctggcctccactagtcccgctggag

SEQ ID NO: 2731687 - DNA, 25 bp, Homo sapien
agaaagggtgacactcaacagggcc

SEQ ID NO: 2731688 - DNA, 25 bp, Homo sapien
cttggcccatgttcagaagtttctc

SEQ ID NO: 2731689 - DNA, 25 bp, Homo sapien
cttggtcctttgttaattgagaaga

SEQ ID NO: 2731690 - DNA, 25 bp, Homo sapien
ggacagatgtctgccgagagcctct

SEQ ID NO: 2731691 - DNA, 25 bp, Homo sapien
agatgtctgccgagagcctctgctg

SEQ ID NO: 2731692 - DNA, 25 bp, Homo sapien
catttgatggacagatgtctgccga

SEQ ID NO: 2731693 - DNA, 25 bp, Homo sapien
ctgctgaaatcccaactggtaatta

SEQ ID NO: 2731694 - DNA, 25 bp, Homo sapien
gtgccattgacctcttagcctgctg

SEQ ID NO: 2731695 - DNA, 25 bp, Homo sapien
gacgcacggtgccattgacctctta

SEQ ID NO: 2731696 - DNA, 25 bp, Homo sapien
tggaggtttatcaatgacgcacggt

SEQ ID NO: 2731697 - DNA, 25 bp, Homo sapien
acatgtgttttctgtcccgcttgca

SEQ ID NO: 2731698 - DNA, 25 bp, Homo sapien
tctggttcggatattctcaagtaaa

SEQ ID NO: 2731699 - DNA, 25 bp, Homo sapien
tcaagtaaattattggcacggtccc

SEQ ID NO: 2731700 - DNA, 25 bp, Homo sapien
tacgggctagcaacatctggttcgg

SEQ ID NO: 2731701 - DNA, 25 bp, Homo sapien
tggatttttcccacagactcgatgt

SEQ ID NO: 2731702 - DNA, 25 bp, Homo sapien
gactcgatgtccaggattccactgg

SEQ ID NO: 2731703 - DNA, 25 bp, Homo sapien
ccactggctatgataaagcacgaac

SEQ ID NO: 2731704 - DNA, 25 bp, Homo sapien
ggattccactggctatgataaagca

SEQ ID NO: 2731705 - DNA, 25 bp, Homo sapien
tcccttgcaagttactgtttcacac

SEQ ID NO: 2731706 - DNA, 25 bp, Homo sapien
tcttcacatcgcacatattcttatc

SEQ ID NO: 2731707 - DNA, 25 bp, Homo sapien
ctcccttgcaagttactgtttcaca

SEQ ID NO: 2731708 - DNA, 25 bp, Homo sapien
tcttttcttcacatcgcacatattc

SEQ ID NO: 2731709 - DNA, 25 bp, Homo sapien
atcatcacaaaggtcttcatcacct

SEQ ID NO: 2731710 - DNA, 25 bp, Homo sapien
catcacaaaggtcttcatcaccttc

SEQ ID NO: 2731711 - DNA, 25 bp, Homo sapien
caccttcacatcaagtaggctgaag

SEQ ID NO: 2731712 - DNA, 25 bp, Homo sapien
catcaccttcacatcaagtaggctg

SEQ ID NO: 2731713 - DNA, 25 bp, Homo sapien
tcaacagcaaagctgctatggccag

SEQ ID NO: 2731714 - DNA, 25 bp, Homo sapien
aatcttctgggccttgcgaggccca

SEQ ID NO: 2731715 - DNA, 25 bp, Homo sapien
cactagggaagttaccaaagtcaag

SEQ ID NO: 2731716 - DNA, 25 bp, Homo sapien
tggatggacaaacccactgcctggg

SEQ ID NO: 2731717 - DNA, 25 bp, Homo sapien
cctgaggtctttgggtaccacaatt

SEQ ID NO: 2731718 - DNA, 25 bp, Homo sapien
aatgcttctaagtgcttcctgaggt

SEQ ID NO: 2731719 - DNA, 25 bp, Homo sapien
taccacaatttgtcccagaccagtg

SEQ ID NO: 2731720 - DNA, 25 bp, Homo sapien
tcttcttgggacgaatgggacttca

SEQ ID NO: 2731721 - DNA, 25 bp, Homo sapien
tacgttgccataacagattatctca

SEQ ID NO: 2731722 - DNA, 25 bp, Homo sapien
caatagcttttttccagacctcgct

SEQ ID NO: 2731723 - DNA, 25 bp, Homo sapien
gcttcactcctgcatcttgtattag

SEQ ID NO: 2731724 - DNA, 25 bp, Homo sapien
tattagcttcttacgttgccataac

SEQ ID NO: 2731725 - DNA, 25 bp, Homo sapien
tattgtgccttacccattgtggagc

SEQ ID NO: 2731726 - DNA, 25 bp, Homo sapien
tcaagtgaagggaagacgaccaaac

SEQ ID NO: 2731727 - DNA, 25 bp, Homo sapien
gtgatgcagaagtgagacagacctc

SEQ ID NO: 2731728 - DNA, 25 bp, Homo sapien
tagttaacagcgtgcactctggagc

SEQ ID NO: 2731729 - DNA, 25 bp, Homo sapien
cagctgtcatggccgattgagacac

SEQ ID NO: 2731730 - DNA, 25 bp, Homo sapien
gagacacagtcccaacccagggctc

SEQ ID NO: 2731731 - DNA, 25 bp, Homo sapien
atgctgctgacacgccaggggtgca

SEQ ID NO: 2731732 - DNA, 25 bp, Homo sapien
gtcaggcacgaaggcagtgctcccc

SEQ ID NO: 2731733 - DNA, 25 bp, Homo sapien
tggctgtcagctttgctctcccagc

SEQ ID NO: 2731734 - DNA, 25 bp, Homo sapien
tgcctggctgtcagctttgctctcc

SEQ ID NO: 2731735 - DNA, 25 bp, Homo sapien
cagactggctgcctggctgtcagct

SEQ ID NO: 2731736 - DNA, 25 bp, Homo sapien
gctgcctggctgtcagctttgctct

SEQ ID NO: 2731737 - DNA, 25 bp, Homo sapien
gatggctctaatggctcagcaacgt

SEQ ID NO: 2731738 - DNA, 25 bp, Homo sapien
agcaacgtccctggcaactcagtct

SEQ ID NO: 2731739 - DNA, 25 bp, Homo sapien
tttgtggtcccacaacggctgccaa

SEQ ID NO: 2731740 - DNA, 25 bp, Homo sapien
gagaggggatagattgagacaaata

SEQ ID NO: 2731741 - DNA, 25 bp, Homo sapien
gtccagaaaacacggcctgcaacat

SEQ ID NO: 2731742 - DNA, 25 bp, Homo sapien
gactcaacaaccgtccagaaaacac

SEQ ID NO: 2731743 - DNA, 25 bp, Homo sapien
aaccgtccagaaaacacggcctgca

SEQ ID NO: 2731744 - DNA, 25 bp, Homo sapien
cttcttgactcaacaaccgtccaga

SEQ ID NO: 2731745 - DNA, 25 bp, Homo sapien
tgtaaaagtcacgttcttctaagtc

SEQ ID NO: 2731746 - DNA, 25 bp, Homo sapien
tcttctaagtcacacaacaggatca

SEQ ID NO: 2731747 - DNA, 25 bp, Homo sapien
aagtcacgttcttctaagtcacaca

SEQ ID NO: 2731748 - DNA, 25 bp, Homo sapien
aagctttcaagttgtaaaagtcacg

SEQ ID NO: 2731749 - DNA, 25 bp, Homo sapien
atgtgcatgtgctctgtctttacag

SEQ ID NO: 2731750 - DNA, 25 bp, Homo sapien
gcatgtgcatgtgctctgtctttac

SEQ ID NO: 2731751 - DNA, 25 bp, Homo sapien
tgtgcatgtgctctgtctttacaga

SEQ ID NO: 2731752 - DNA, 25 bp, Homo sapien
gtctgtgatggacatgtactacttt

SEQ ID NO: 2731753 - DNA, 25 bp, Homo sapien
acttttatgacttggaaaacatggg

SEQ ID NO: 2731754 - DNA, 25 bp, Homo sapien
ttgcaccacaactcgaagcctgaac

SEQ ID NO: 2731755 - DNA, 25 bp, Homo sapien
aactcgaagcctgaaccctgctgtc

SEQ ID NO: 2731756 - DNA, 25 bp, Homo sapien
gatgtgggccaattgcaccacaact

SEQ ID NO: 2731757 - DNA, 25 bp, Homo sapien
tgggccaattgcaccacaactcgaa

SEQ ID NO: 2731758 - DNA, 25 bp, Homo sapien
gtggtggcccccgagaagggctgca

SEQ ID NO: 2731759 - DNA, 25 bp, Homo sapien
aggagcatggtggtggcccccgaga

SEQ ID NO: 2731760 - DNA, 25 bp, Homo sapien
ggccccatcagcttctttatgtccc

SEQ ID NO: 2731761 - DNA, 25 bp, Homo sapien
gccccatcagcttctttatgtccca

SEQ ID NO: 2731762 - DNA, 25 bp, Homo sapien
aagctccccctggtctcagagcggt

SEQ ID NO: 2731763 - DNA, 25 bp, Homo sapien
gtcagtagctcctcaagatcctcaa

SEQ ID NO: 2731764 - DNA, 25 bp, Homo sapien
tgcagggtcagtagctcctcaagat

SEQ ID NO: 2731765 - DNA, 25 bp, Homo sapien
cccctggtctcagagcggttctgca

SEQ ID NO: 2731766 - DNA, 25 bp, Homo sapien
tatgtattactctgatgaaaaaccc

SEQ ID NO: 2731767 - DNA, 25 bp, Homo sapien
cactgagcatgggacatatctgaat

SEQ ID NO: 2731768 - DNA, 25 bp, Homo sapien
cccatctaatcctgacattgcttga

SEQ ID NO: 2731769 - DNA, 25 bp, Homo sapien
ttagttaaatcagcctagccatgaa

SEQ ID NO: 2731770 - DNA, 25 bp, Homo sapien
ggttaaagcagaagcaatcctttca

SEQ ID NO: 2731771 - DNA, 25 bp, Homo sapien
gccttgataaagcatcagaggttaa

SEQ ID NO: 2731772 - DNA, 25 bp, Homo sapien
agctcggccttgataaagcatcaga

SEQ ID NO: 2731773 - DNA, 25 bp, Homo sapien
aagctcccgatagtgcagccctcag

SEQ ID NO: 2731774 - DNA, 25 bp, Homo sapien
tgtggttatgagagcaggccccaga

SEQ ID NO: 2731775 - DNA, 25 bp, Homo sapien
cctggttgtcccgatgttagaggca

SEQ ID NO: 2731776 - DNA, 25 bp, Homo sapien
tatagtcccgataatgcctgtgagg

SEQ ID NO: 2731777 - DNA, 25 bp, Homo sapien
tctatagagaacaccacatggacca

SEQ ID NO: 2731778 - DNA, 25 bp, Homo sapien
taaagtagcgcactcagtgagagca

SEQ ID NO: 2731779 - DNA, 25 bp, Homo sapien
atgaatgaagacctccagaagccct

SEQ ID NO: 2731780 - DNA, 25 bp, Homo sapien
gatgttccatccctctaaaagactc

SEQ ID NO: 2731781 - DNA, 25 bp, Homo sapien
gccaagaagtttcattgccactcac

SEQ ID NO: 2731782 - DNA, 25 bp, Homo sapien
acttgaagtcttgaagccatctcaa

SEQ ID NO: 2731783 - DNA, 25 bp, Homo sapien
gaagccatctcaattacaggtgttc

SEQ ID NO: 2731784 - DNA, 25 bp, Homo sapien
aagccatctcaattacaggtgttca

SEQ ID NO: 2731785 - DNA, 25 bp, Homo sapien
cagtgtcttcttgaaaccttcagca

SEQ ID NO: 2731786 - DNA, 25 bp, Homo sapien
taccattgtactgtctgctcccacg

SEQ ID NO: 2731787 - DNA, 25 bp, Homo sapien
agggccctgctaaccttgcttccat

SEQ ID NO: 2731788 - DNA, 25 bp, Homo sapien
tactgcacccggtaggcatggatgc

SEQ ID NO: 2731789 - DNA, 25 bp, Homo sapien
gggacgttccgcatgtccacgtctc

SEQ ID NO: 2731790 - DNA, 25 bp, Homo sapien
catgtccacgtctctgtggtcatcc

SEQ ID NO: 2731791 - DNA, 25 bp, Homo sapien
tttattttcacagggacgttccgca

SEQ ID NO: 2731792 - DNA, 25 bp, Homo sapien
tcacagggacgttccgcatgtccac

SEQ ID NO: 2731793 - DNA, 25 bp, Homo sapien
cctgctgagcttacacaaagccagt

SEQ ID NO: 2731794 - DNA, 25 bp, Homo sapien
catgcccacaccttacctgctgagc

SEQ ID NO: 2731795 - DNA, 25 bp, Homo sapien
ctgagaagtttgtttcccatgatag

SEQ ID NO: 2731796 - DNA, 25 bp, Homo sapien
gccagtgccccccatcttgtgtgat

SEQ ID NO: 2731797 - DNA, 25 bp, Homo sapien
agacatggatgtttggacatggagc

SEQ ID NO: 2731798 - DNA, 25 bp, Homo sapien
catggatgtttggacatggagctgc

SEQ ID NO: 2731799 - DNA, 25 bp, Homo sapien
tggagctgctgctcacgtgatgtgg

SEQ ID NO: 2731800 - DNA, 25 bp, Homo sapien
agagccaggaagacatggatgtttg

SEQ ID NO: 2731801 - DNA, 25 bp, Homo sapien
catggagacattgcagatggttgga

SEQ ID NO: 2731802 - DNA, 25 bp, Homo sapien
caagaactatctccaccctcaattt

SEQ ID NO: 2731803 - DNA, 25 bp, Homo sapien
tggcccattgccatggagacattgc

SEQ ID NO: 2731804 - DNA, 25 bp, Homo sapien
cagatcatggcgtgcctcgccaaga

SEQ ID NO: 2731805 - DNA, 25 bp, Homo sapien
atggtcacatagtgtcccctcaccg

SEQ ID NO: 2731806 - DNA, 25 bp, Homo sapien
aggcagttgaagttgtgcattctat

SEQ ID NO: 2731807 - DNA, 25 bp, Homo sapien
tgcattctatggtcacatagtgtcc

SEQ ID NO: 2731808 - DNA, 25 bp, Homo sapien
gatcccagggagacagatgtaaagg

SEQ ID NO: 2731809 - DNA, 25 bp, Homo sapien
gggtcacagtggatgctaacctgaa

SEQ ID NO: 2731810 - DNA, 25 bp, Homo sapien
tgttactgtcattgctgttaccata

SEQ ID NO: 2731811 - DNA, 25 bp, Homo sapien
ctgttaccataggccagggtcacag

SEQ ID NO: 2731812 - DNA, 25 bp, Homo sapien
ggatgctaacctgaagtccatctgc

SEQ ID NO: 2731813 - DNA, 25 bp, Homo sapien
tggtggggagaaccgccggggcaca

SEQ ID NO: 2731814 - DNA, 25 bp, Homo sapien
gggaagggccagcagagtgtcatgg

SEQ ID NO: 2731815 - DNA, 25 bp, Homo sapien
gaagggccagcagagtgtcatggct

SEQ ID NO: 2731816 - DNA, 25 bp, Homo sapien
gggccagcagagtgtcatggctgtg

SEQ ID NO: 2731817 - DNA, 25 bp, Homo sapien
taaaaagtgtcatcctcgactctgc

SEQ ID NO: 2731818 - DNA, 25 bp, Homo sapien
gactcctttgctgactttgtagacc

SEQ ID NO: 2731819 - DNA, 25 bp, Homo sapien
cctggaaatgccaaggaatggactc

SEQ ID NO: 2731820 - DNA, 25 bp, Homo sapien
tctgcagtgctagcccctggaaatg

SEQ ID NO: 2731821 - DNA, 25 bp, Homo sapien
tggaacccaactcggttctctgctc

SEQ ID NO: 2731822 - DNA, 25 bp, Homo sapien
gctgagccgcgggaaatccacagac

SEQ ID NO: 2731823 - DNA, 25 bp, Homo sapien
aggaactctcgacggtccgcagctg

SEQ ID NO: 2731824 - DNA, 25 bp, Homo sapien
gttcggcagtgaccctttttctcca

SEQ ID NO: 2731825 - DNA, 25 bp, Homo sapien
tgaaataagagctcccaaggcaaat

SEQ ID NO: 2731826 - DNA, 25 bp, Homo sapien
cacggttcaactcttagcaaggcag

SEQ ID NO: 2731827 - DNA, 25 bp, Homo sapien
gaagtctttgagcacagccatcagc

SEQ ID NO: 2731828 - DNA, 25 bp, Homo sapien
caggagccgtcctcacgctgagttt

SEQ ID NO: 2731829 - DNA, 25 bp, Homo sapien
gatcttgccaccagatcccgaggca

SEQ ID NO: 2731830 - DNA, 25 bp, Homo sapien
acctgttgatcttgccaccagatcc

SEQ ID NO: 2731831 - DNA, 25 bp, Homo sapien
tctgagtggcacctgtcaatccgta

SEQ ID NO: 2731832 - DNA, 25 bp, Homo sapien
aatccgtatcagacctgcagtttac

SEQ ID NO: 2731833 - DNA, 25 bp, Homo sapien
ctcctgttattcatgcttttgtgtc

SEQ ID NO: 2731834 - DNA, 25 bp, Homo sapien
tcctgttattcatgcttttgtgtcc

SEQ ID NO: 2731835 - DNA, 25 bp, Homo sapien
ctgttattcatgcttttgtgtcctc

SEQ ID NO: 2731836 - DNA, 25 bp, Homo sapien
gttattcatgcttttgtgtcctctt

SEQ ID NO: 2731837 - DNA, 25 bp, Homo sapien
taacgagacaacctctctgaagggc

SEQ ID NO: 2731838 - DNA, 25 bp, Homo sapien
tcaaatgcgacaagacggtttctca

SEQ ID NO: 2731839 - DNA, 25 bp, Homo sapien
cacttgctgatgctggtattctata

SEQ ID NO: 2731840 - DNA, 25 bp, Homo sapien
gaagggcagcttggtaatagatacc

SEQ ID NO: 2731841 - DNA, 25 bp, Homo sapien
tgcaaatttgatacacgataccacg

SEQ ID NO: 2731842 - DNA, 25 bp, Homo sapien
cagttgtgttagtgtgcccatcccc

SEQ ID NO: 2731843 - DNA, 25 bp, Homo sapien
gatccatatgcaggctgtgtccagg

SEQ ID NO: 2731844 - DNA, 25 bp, Homo sapien
tatctggctttggagcacgaatgct

SEQ ID NO: 2731845 - DNA, 25 bp, Homo sapien
ccagaatatttgcatcgaagtcagc

SEQ ID NO: 2731846 - DNA, 25 bp, Homo sapien
gctaaggaaactgtgacccctctga

SEQ ID NO: 2731847 - DNA, 25 bp, Homo sapien
agccagagagtccatctttagcggg

SEQ ID NO: 2731848 - DNA, 25 bp, Homo sapien
ggagcatgcatcactctcggaaata

SEQ ID NO: 2731849 - DNA, 25 bp, Homo sapien
gaatgtggtgccaacggaggtcact

SEQ ID NO: 2731850 - DNA, 25 bp, Homo sapien
ggaggtcactccatggtaatcagcc

SEQ ID NO: 2731851 - DNA, 25 bp, Homo sapien
aaaaagtgtctctgcgccgcatacc

SEQ ID NO: 2731852 - DNA, 25 bp, Homo sapien
gacttacgcagtcgacttgaaccag

SEQ ID NO: 2731853 - DNA, 25 bp, Homo sapien
tgtacaagtcattagcgtcagatag

SEQ ID NO: 2731854 - DNA, 25 bp, Homo sapien
taaggaaactcgtttgcaggctctc

SEQ ID NO: 2731855 - DNA, 25 bp, Homo sapien
tacatgaatcttctagccagtttcc

SEQ ID NO: 2731856 - DNA, 25 bp, Homo sapien
cctttgtaacgaaacatgaaatcct

SEQ ID NO: 2731857 - DNA, 25 bp, Homo sapien
tgtacattgggctcctgacaagatt

SEQ ID NO: 2731858 - DNA, 25 bp, Homo sapien
tactggagtttcgaaacgcagactt

SEQ ID NO: 2731859 - DNA, 25 bp, Homo sapien
tgccacagcctagagggtttaacag

SEQ ID NO: 2731860 - DNA, 25 bp, Homo sapien
tcagagcattggctcactggcctgg

SEQ ID NO: 2731861 - DNA, 25 bp, Homo sapien
gggctgcttggatgaggtagcccat

SEQ ID NO: 2731862 - DNA, 25 bp, Homo sapien
tgggctgcttggatgaggtagccca

SEQ ID NO: 2731863 - DNA, 25 bp, Homo sapien
catgggctgcttggatgaggtagcc

SEQ ID NO: 2731864 - DNA, 25 bp, Homo sapien
ccatgggctgcttggatgaggtagc

SEQ ID NO: 2731865 - DNA, 25 bp, Homo sapien
gtgacatcatgaggaggctctgtct

SEQ ID NO: 2731866 - DNA, 25 bp, Homo sapien
gctcaggtgacatcgtgacatcatg

SEQ ID NO: 2731867 - DNA, 25 bp, Homo sapien
agctcatgaaacaagctggacccag

SEQ ID NO: 2731868 - DNA, 25 bp, Homo sapien
tcatgaaacaagctggacccaggag

SEQ ID NO: 2731869 - DNA, 25 bp, Homo sapien
atcatgtgtttgggctgctcatttt

SEQ ID NO: 2731870 - DNA, 25 bp, Homo sapien
cggaagccgtggtggtcatggatca

SEQ ID NO: 2731871 - DNA, 25 bp, Homo sapien
gaggtcagaagtcaccaaggaggag

SEQ ID NO: 2731872 - DNA, 25 bp, Homo sapien
caaatttgcccggaagccgtggtgg

SEQ ID NO: 2731873 - DNA, 25 bp, Homo sapien
tctctgtaatagaggttggtaaaga

SEQ ID NO: 2731874 - DNA, 25 bp, Homo sapien
tgtaatagaggttggtaaagagagc

SEQ ID NO: 2731875 - DNA, 25 bp, Homo sapien
gcttgttagcaccatgggtgtccag

SEQ ID NO: 2731876 - DNA, 25 bp, Homo sapien
caaagcttgttagcaccatgggtgt

SEQ ID NO: 2731877 - DNA, 25 bp, Homo sapien
gcccgaacagttacaatcattagtc

SEQ ID NO: 2731878 - DNA, 25 bp, Homo sapien
ttgcctcaccgtgcccgaacagtta

SEQ ID NO: 2731879 - DNA, 25 bp, Homo sapien
tgtaactgtacgttcctcttgcctc

SEQ ID NO: 2731880 - DNA, 25 bp, Homo sapien
ccccgagatgctttgcccacggatt

SEQ ID NO: 2731881 - DNA, 25 bp, Homo sapien
taaactgatcaaggcctacacagtg

SEQ ID NO: 2731882 - DNA, 25 bp, Homo sapien
gaaagaggatgtcagaatcgtagaa

SEQ ID NO: 2731883 - DNA, 25 bp, Homo sapien
cagaatcgtagaaattgctaaactg

SEQ ID NO: 2731884 - DNA, 25 bp, Homo sapien
tgctaaactgatcaaggcctacaca

SEQ ID NO: 2731885 - DNA, 25 bp, Homo sapien
tcagaaagccgatcagatgttccaa

SEQ ID NO: 2731886 - DNA, 25 bp, Homo sapien
gatgttccaaatcgatggccccttt

SEQ ID NO: 2731887 - DNA, 25 bp, Homo sapien
tcttcgcacagagccataatgaggt

SEQ ID NO: 2731888 - DNA, 25 bp, Homo sapien
ctagtggatctgactcagaaagccg

SEQ ID NO: 2731889 - DNA, 25 bp, Homo sapien
taatagacctccagaggttaatggg

SEQ ID NO: 2731890 - DNA, 25 bp, Homo sapien
ccagaggttaatgggcctgacatat

SEQ ID NO: 2731891 - DNA, 25 bp, Homo sapien
gagtcttttaatagacctccagagg

SEQ ID NO: 2731892 - DNA, 25 bp, Homo sapien
cctccagaggttaatgggcctgaca

SEQ ID NO: 2731893 - DNA, 25 bp, Homo sapien
tccatattagcatccttagctgaag

SEQ ID NO: 2731894 - DNA, 25 bp, Homo sapien
atattagcatccttagctgaagctc

SEQ ID NO: 2731895 - DNA, 25 bp, Homo sapien
ttttccatattagcatccttagctg

SEQ ID NO: 2731896 - DNA, 25 bp, Homo sapien
catattagcatccttagctgaagct

SEQ ID NO: 2731897 - DNA, 25 bp, Homo sapien
taattgcctgcccacgcccgtgaat

SEQ ID NO: 2731898 - DNA, 25 bp, Homo sapien
tggcaagtgcaacggagttctcccg

SEQ ID NO: 2731899 - DNA, 25 bp, Homo sapien
ccatcctacgagagctgggccggga

SEQ ID NO: 2731900 - DNA, 25 bp, Homo sapien
tgccaggattcaaagcccacgggct

SEQ ID NO: 2731901 - DNA, 25 bp, Homo sapien
tgctctgattagacgctgtgctcaa

SEQ ID NO: 2731902 - DNA, 25 bp, Homo sapien
gggcctgctctgattagacgctgtg

SEQ ID NO: 2731903 - DNA, 25 bp, Homo sapien
ttttggtactccagtgggggcctgc

SEQ ID NO: 2731904 - DNA, 25 bp, Homo sapien
ctgattagacgctgtgctcaaggcc

SEQ ID NO: 2731905 - DNA, 25 bp, Homo sapien
gtgtgcagcgccagaggtcactgtc

SEQ ID NO: 2731906 - DNA, 25 bp, Homo sapien
tgcgaaagtgcttcgccagggtccc

SEQ ID NO: 2731907 - DNA, 25 bp, Homo sapien
aatcctgtgcggtgtgcagcgccag

SEQ ID NO: 2731908 - DNA, 25 bp, Homo sapien
gggaaataggagctcttgccgatgc

SEQ ID NO: 2731909 - DNA, 25 bp, Homo sapien
atgagctacaggaatcagaccaatt

SEQ ID NO: 2731910 - DNA, 25 bp, Homo sapien
aatgagctacaggaatcagaccaat

SEQ ID NO: 2731911 - DNA, 25 bp, Homo sapien
aaatgagctacaggaatcagaccaa

SEQ ID NO: 2731912 - DNA, 25 bp, Homo sapien
aaaatgagctacaggaatcagacca

SEQ ID NO: 2731913 - DNA, 25 bp, Homo sapien
acactaaggcactgttccggatacc

SEQ ID NO: 2731914 - DNA, 25 bp, Homo sapien
ccctttgcggaacactaaggcactg

SEQ ID NO: 2731915 - DNA, 25 bp, Homo sapien
ctgttccggatacccaccaggaggg

SEQ ID NO: 2731916 - DNA, 25 bp, Homo sapien
ctcccctttgcggaacactaaggca

SEQ ID NO: 2731917 - DNA, 25 bp, Homo sapien
tcaggctgcctgctcttggctttca

SEQ ID NO: 2731918 - DNA, 25 bp, Homo sapien
atcaggctgcctgctcttggctttc

SEQ ID NO: 2731919 - DNA, 25 bp, Homo sapien
caggctgcctgctcttggctttcat

SEQ ID NO: 2731920 - DNA, 25 bp, Homo sapien
agccaacctgtccctggtggctgca

SEQ ID NO: 2731921 - DNA, 25 bp, Homo sapien
tctgccatgccctgaaagaaatatt

SEQ ID NO: 2731922 - DNA, 25 bp, Homo sapien
atttctcggggccatcaagggtgga

SEQ ID NO: 2731923 - DNA, 25 bp, Homo sapien
agctggcataaagccggctgcagca

SEQ ID NO: 2731924 - DNA, 25 bp, Homo sapien
tgtgcttggaattcccagctgcttc

SEQ ID NO: 2731925 - DNA, 25 bp, Homo sapien
ggtgtcaccactggtgctgaaggta

SEQ ID NO: 2731926 - DNA, 25 bp, Homo sapien
tgtaggtcattcaggtattcttgga

SEQ ID NO: 2731927 - DNA, 25 bp, Homo sapien
cctgcctggacagaatgtgttgtag

SEQ ID NO: 2731928 - DNA, 25 bp, Homo sapien
tgcataggcccagagggatggcaga

SEQ ID NO: 2731929 - DNA, 25 bp, Homo sapien
taggcccagagggatggcagaggcg

SEQ ID NO: 2731930 - DNA, 25 bp, Homo sapien
ctgcataggcccagagggatggcag

SEQ ID NO: 2731931 - DNA, 25 bp, Homo sapien
cataggcccagagggatggcagagg

SEQ ID NO: 2731932 - DNA, 25 bp, Homo sapien
ctaggatgacttgactaatgggctc

SEQ ID NO: 2731933 - DNA, 25 bp, Homo sapien
tgacttgactaatgggctcccggtg

SEQ ID NO: 2731934 - DNA, 25 bp, Homo sapien
ttgactaatgggctcccggtgggca

SEQ ID NO: 2731935 - DNA, 25 bp, Homo sapien
ggatgacttgactaatgggctcccg

SEQ ID NO: 2731936 - DNA, 25 bp, Homo sapien
tcatttcggtgaaggcataattctg

SEQ ID NO: 2731937 - DNA, 25 bp, Homo sapien
catttcggtgaaggcataattctgc

SEQ ID NO: 2731938 - DNA, 25 bp, Homo sapien
atgcctcctggattggcacaaaagc

SEQ ID NO: 2731939 - DNA, 25 bp, Homo sapien
gcttgcatgcctcctggattggcac

SEQ ID NO: 2731940 - DNA, 25 bp, Homo sapien
atgggatggcccaccgtcccagagg

SEQ ID NO: 2731941 - DNA, 25 bp, Homo sapien
gatggcccaccgtcccagaggcttg

SEQ ID NO: 2731942 - DNA, 25 bp, Homo sapien
tttgtgatgtgggggtgatcttctg

SEQ ID NO: 2731943 - DNA, 25 bp, Homo sapien
catttgtgatgtgggggtgatcttc

SEQ ID NO: 2731944 - DNA, 25 bp, Homo sapien
tgtgatgtgggggtgatcttctggg

SEQ ID NO: 2731945 - DNA, 25 bp, Homo sapien
gatgtgggggtgatcttctgggggt

SEQ ID NO: 2731946 - DNA, 25 bp, Homo sapien
tcagagagcggtcgagcagcaactt

SEQ ID NO: 2731947 - DNA, 25 bp, Homo sapien
gcccgtggcaaaggcctgatgtgtc

SEQ ID NO: 2731948 - DNA, 25 bp, Homo sapien
aatccaggtcagagagcggtcgagc

SEQ ID NO: 2731949 - DNA, 25 bp, Homo sapien
cagcaacttggggagccaagtggat

SEQ ID NO: 2731950 - DNA, 25 bp, Homo sapien
tattacgagtctcagcctcatcggc

SEQ ID NO: 2731951 - DNA, 25 bp, Homo sapien
tcatcggcgttgatgcgtgtgaccg

SEQ ID NO: 2731952 - DNA, 25 bp, Homo sapien
tcccaaagcagtcggagctgaggtg

SEQ ID NO: 2731953 - DNA, 25 bp, Homo sapien
ttgattcactctcaccagtacgtgg

SEQ ID NO: 2731954 - DNA, 25 bp, Homo sapien
tagtcaaacacataggcaaatagag

SEQ ID NO: 2731955 - DNA, 25 bp, Homo sapien
gcaaatagagaacgagacaccacat

SEQ ID NO: 2731956 - DNA, 25 bp, Homo sapien
gatatgcatgcagacaaatttgcct

SEQ ID NO: 2731957 - DNA, 25 bp, Homo sapien
cgagacaccacatgaacaaaggcaa

SEQ ID NO: 2731958 - DNA, 25 bp, Homo sapien
cctgcgccagacatagcagtcagga

SEQ ID NO: 2731959 - DNA, 25 bp, Homo sapien
agtgcattgacacagagcaggacca

SEQ ID NO: 2731960 - DNA, 25 bp, Homo sapien
cagacatagcagtcaggacaaaagc

SEQ ID NO: 2731961 - DNA, 25 bp, Homo sapien
agagaattctggcagtgcattgaca

SEQ ID NO: 2731962 - DNA, 25 bp, Homo sapien
ctgaattttctatgacaacgaacat

SEQ ID NO: 2731963 - DNA, 25 bp, Homo sapien
tctgaattttctatgacaacgaaca

SEQ ID NO: 2731964 - DNA, 25 bp, Homo sapien
ctctgaattttctatgacaacgaac

SEQ ID NO: 2731965 - DNA, 25 bp, Homo sapien
ttcaggaacatggtccctgggagtc

SEQ ID NO: 2731966 - DNA, 25 bp, Homo sapien
ctgcatgcagcctggagtggcaaag

SEQ ID NO: 2731967 - DNA, 25 bp, Homo sapien
gcaaaggccctgaagacgctgaagc

SEQ ID NO: 2731968 - DNA, 25 bp, Homo sapien
gacgctgaagctgttgaccttttcc

SEQ ID NO: 2731969 - DNA, 25 bp, Homo sapien
atccaggccggcaggagggccctgg

SEQ ID NO: 2731970 - DNA, 25 bp, Homo sapien
ggggcagtcagcatccaggccggca

SEQ ID NO: 2731971 - DNA, 25 bp, Homo sapien
catccaggccggcaggagggccctg

SEQ ID NO: 2731972 - DNA, 25 bp, Homo sapien
cagtcagcatccaggccggcaggag

SEQ ID NO: 2731973 - DNA, 25 bp, Homo sapien
gtctcagctgaccccaagtgaaaga

SEQ ID NO: 2731974 - DNA, 25 bp, Homo sapien
gaggtctcgccagcaaataaagggg

SEQ ID NO: 2731975 - DNA, 25 bp, Homo sapien
cctgcaggtcttgtctcagctgacc

SEQ ID NO: 2731976 - DNA, 25 bp, Homo sapien
gtctcgccagcaaataaaggggcct

SEQ ID NO: 2731977 - DNA, 25 bp, Homo sapien
ttcgtaaaaatctcaggctcctggg

SEQ ID NO: 2731978 - DNA, 25 bp, Homo sapien
gagcttggatcctgctgggagacta

SEQ ID NO: 2731979 - DNA, 25 bp, Homo sapien
tcactgcctctgacaatttcgtaaa

SEQ ID NO: 2731980 - DNA, 25 bp, Homo sapien
gcttggatcctgctgggagactaag

SEQ ID NO: 2731981 - DNA, 25 bp, Homo sapien
gccactggttattctgctgaagttc

SEQ ID NO: 2731982 - DNA, 25 bp, Homo sapien
tacccactcggacaagttgaagaag

SEQ ID NO: 2731983 - DNA, 25 bp, Homo sapien
tcagtgcgaccatagagactgggat

SEQ ID NO: 2731984 - DNA, 25 bp, Homo sapien
ggagtctgaacacaacactgtccca

SEQ ID NO: 2731985 - DNA, 25 bp, Homo sapien
caatgcccaccacaatggttttgcg

SEQ ID NO: 2731986 - DNA, 25 bp, Homo sapien
cctctggcagaaatgcggttggagc

SEQ ID NO: 2731987 - DNA, 25 bp, Homo sapien
cccacattatgagagagctagttga

SEQ ID NO: 2731988 - DNA, 25 bp, Homo sapien
cactggcttcagtaaaggacctcca

SEQ ID NO: 2731989 - DNA, 25 bp, Homo sapien
gagtatccgaaagaattacctgttc

SEQ ID NO: 2731990 - DNA, 25 bp, Homo sapien
acaggttgcagacgggagcaaggga

SEQ ID NO: 2731991 - DNA, 25 bp, Homo sapien
gactggagacaggttgcagacggga

SEQ ID NO: 2731992 - DNA, 25 bp, Homo sapien
tggagacaggttgcagacgggagca

SEQ ID NO: 2731993 - DNA, 25 bp, Homo sapien
ctgactggagacaggttgcagacgg

SEQ ID NO: 2731994 - DNA, 25 bp, Homo sapien
tctttaatgtagctagttaaactgg

SEQ ID NO: 2731995 - DNA, 25 bp, Homo sapien
aataaacactgtagtctatttatgg

SEQ ID NO: 2731996 - DNA, 25 bp, Homo sapien
tagttaaactggtttcaactgatca

SEQ ID NO: 2731997 - DNA, 25 bp, Homo sapien
cactgtagtctatttatggtatgct

SEQ ID NO: 2731998 - DNA, 25 bp, Homo sapien
tccactgttgatttgacttcctaga

SEQ ID NO: 2731999 - DNA, 25 bp, Homo sapien
catctgcctggccactttgtccagc

SEQ ID NO: 2732000 - DNA, 25 bp, Homo sapien
ttcctagaaacgagcctgatttggg

SEQ ID NO: 2732001 - DNA, 25 bp, Homo sapien
gcaacagtccaaacctccactgttg

SEQ ID NO: 2732002 - DNA, 25 bp, Homo sapien
ctggcatagccaggccatgtggagt

SEQ ID NO: 2732003 - DNA, 25 bp, Homo sapien
gagaatcctggcatagccaggccat

SEQ ID NO: 2732004 - DNA, 25 bp, Homo sapien
caggccatgtggagtagcgggcacg

SEQ ID NO: 2732005 - DNA, 25 bp, Homo sapien
cagcttgagaatcctggcatagcca

SEQ ID NO: 2732006 - DNA, 25 bp, Homo sapien
tctcccaaatgtgcgtagcaggaag

SEQ ID NO: 2732007 - DNA, 25 bp, Homo sapien
tccttctgtgatgccgagtatttgg

SEQ ID NO: 2732008 - DNA, 25 bp, Homo sapien
ggagtcctctgtattattcctggtg

SEQ ID NO: 2732009 - DNA, 25 bp, Homo sapien
gagcttataagaccaggagtcctct

SEQ ID NO: 2732010 - DNA, 25 bp, Homo sapien
acttttggtacagtctgcagagccc

SEQ ID NO: 2732011 - DNA, 25 bp, Homo sapien
cacctgccagtggatactattatcc

SEQ ID NO: 2732012 - DNA, 25 bp, Homo sapien
tcatgggcattttcacatctactct

SEQ ID NO: 2732013 - DNA, 25 bp, Homo sapien
catctactcttttgcaatcacctgc

SEQ ID NO: 2732014 - DNA, 25 bp, Homo sapien
tggggcaggagacaagatgtacaat

SEQ ID NO: 2732015 - DNA, 25 bp, Homo sapien
ggggcaggagacaagatgtacaatg

SEQ ID NO: 2732016 - DNA, 25 bp, Homo sapien
taggccaacttgagttgctcttctt

SEQ ID NO: 2732017 - DNA, 25 bp, Homo sapien
caaagagcaagacgacactcttcat

SEQ ID NO: 2732018 - DNA, 25 bp, Homo sapien
tgcaaagagcaagacgacactcttc

SEQ ID NO: 2732019 - DNA, 25 bp, Homo sapien
gaagtaggccaacttgagttgctct

SEQ ID NO: 2732020 - DNA, 25 bp, Homo sapien
tgttgtccattcaactctcgtctag

SEQ ID NO: 2732021 - DNA, 25 bp, Homo sapien
catggtggacgtgaatggagatatc

SEQ ID NO: 2732022 - DNA, 25 bp, Homo sapien
tctcgtctagcttgaaccaacagtg

SEQ ID NO: 2732023 - DNA, 25 bp, Homo sapien
gatatcatatgtatcgagcaaaagc

SEQ ID NO: 2732024 - DNA, 25 bp, Homo sapien
caatgcatcacatatcatgatcttg

SEQ ID NO: 2732025 - DNA, 25 bp, Homo sapien
ggctcccaatgcatcacatatcatg

SEQ ID NO: 2732026 - DNA, 25 bp, Homo sapien
gactggctcccaatgcatcacatat

SEQ ID NO: 2732027 - DNA, 25 bp, Homo sapien
ccttgactggctcccaatgcatcac

SEQ ID NO: 2732028 - DNA, 25 bp, Homo sapien
ccaattggttctagcaagccttcag

SEQ ID NO: 2732029 - DNA, 25 bp, Homo sapien
gacttcacgcacagtccaattggtt

SEQ ID NO: 2732030 - DNA, 25 bp, Homo sapien
ctgaaaccgtcggtccgagccagaa

SEQ ID NO: 2732031 - DNA, 25 bp, Homo sapien
gatcggagtcctgggccgcttgtcc

SEQ ID NO: 2732032 - DNA, 25 bp, Homo sapien
cagggtaccgcggaagtggctgtat

SEQ ID NO: 2732033 - DNA, 25 bp, Homo sapien
taccgcggaagtggctgtatgccgg

SEQ ID NO: 2732034 - DNA, 25 bp, Homo sapien
gccacagggtaccgcggaagtggct

SEQ ID NO: 2732035 - DNA, 25 bp, Homo sapien
cgcggaagtggctgtatgccggtac

SEQ ID NO: 2732036 - DNA, 25 bp, Homo sapien
gaaggtttgaatagctcatctctgt

SEQ ID NO: 2732037 - DNA, 25 bp, Homo sapien
ggctggccactgaaaggtatcaaaa

SEQ ID NO: 2732038 - DNA, 25 bp, Homo sapien
tgtagctactgaagggtagctggcc

SEQ ID NO: 2732039 - DNA, 25 bp, Homo sapien
gggccacaggctataaatctgtctt

SEQ ID NO: 2732040 - DNA, 25 bp, Homo sapien
tgagtccttctcctcaggaccgagc

SEQ ID NO: 2732041 - DNA, 25 bp, Homo sapien
gccgctttaccctggtcccgcagtc

SEQ ID NO: 2732042 - DNA, 25 bp, Homo sapien
cagtccccgctgtcgttgttgagga

SEQ ID NO: 2732043 - DNA, 25 bp, Homo sapien
tctcctcacggttgctgggccgtcg

SEQ ID NO: 2732044 - DNA, 25 bp, Homo sapien
tcaggagggattagcgagactcgac

SEQ ID NO: 2732045 - DNA, 25 bp, Homo sapien
gaaggtcctgcggtttctgcctctt

SEQ ID NO: 2732046 - DNA, 25 bp, Homo sapien
tttgttcagttccctcagttcgatt

SEQ ID NO: 2732047 - DNA, 25 bp, Homo sapien
gagactcgacgagggtgagcgggcg

SEQ ID NO: 2732048 - DNA, 25 bp, Homo sapien
gaagaataagccttgcgcggagtaa

SEQ ID NO: 2732049 - DNA, 25 bp, Homo sapien
aaatgacaacctgatgtctcacgcc

SEQ ID NO: 2732050 - DNA, 25 bp, Homo sapien
tctttcgcagggtgcagttttggcc

SEQ ID NO: 2732051 - DNA, 25 bp, Homo sapien
tatagctagctcaaagatcgcagct

SEQ ID NO: 2732052 - DNA, 25 bp, Homo sapien
gatggaatctgactggaaaagcaga

SEQ ID NO: 2732053 - DNA, 25 bp, Homo sapien
agcagatttattcccagtattgctt

SEQ ID NO: 2732054 - DNA, 25 bp, Homo sapien
tcccagtattgctttgcactagcac

SEQ ID NO: 2732055 - DNA, 25 bp, Homo sapien
tttgcactagcactccaaacccgta

SEQ ID NO: 2732056 - DNA, 25 bp, Homo sapien
ctggagcaggaaaaagccaagctga

SEQ ID NO: 2732057 - DNA, 25 bp, Homo sapien
tggagcaggaaaaagccaagctgac

SEQ ID NO: 2732058 - DNA, 25 bp, Homo sapien
gtggcttcttgataatcaaaccctg

SEQ ID NO: 2732059 - DNA, 25 bp, Homo sapien
tttctgaccccaagatctcatcctg

SEQ ID NO: 2732060 - DNA, 25 bp, Homo sapien
cactggagattcgatccttattttc

SEQ ID NO: 2732061 - DNA, 25 bp, Homo sapien
taaggggtcttgctgttcctgttgc

SEQ ID NO: 2732062 - DNA, 25 bp, Homo sapien
tgaaaccagtaagagacgatgcgct

SEQ ID NO: 2732063 - DNA, 25 bp, Homo sapien
cagttactgaaaccagtaagagacg

SEQ ID NO: 2732064 - DNA, 25 bp, Homo sapien
acgatgcgctagatgtcaagggttg

SEQ ID NO: 2732065 - DNA, 25 bp, Homo sapien
ccagtaagagacgatgcgctagatg

SEQ ID NO: 2732066 - DNA, 25 bp, Homo sapien
tctgcggtgatctcggccttgggaa

SEQ ID NO: 2732067 - DNA, 25 bp, Homo sapien
gttattagccgaagcagcagggacc

SEQ ID NO: 2732068 - DNA, 25 bp, Homo sapien
ccatccaggatttaggtgcaaaggc

SEQ ID NO: 2732069 - DNA, 25 bp, Homo sapien
tcttcaaaggcgagatggagttcag

SEQ ID NO: 2732070 - DNA, 25 bp, Homo sapien
cctaatctattaatggaacataatc

SEQ ID NO: 2732071 - DNA, 25 bp, Homo sapien
atctattaatggaacataatcttac

SEQ ID NO: 2732072 - DNA, 25 bp, Homo sapien
tcatcctaatctattaatggaacat

SEQ ID NO: 2732073 - DNA, 25 bp, Homo sapien
catcctaatctattaatggaacata

SEQ ID NO: 2732074 - DNA, 25 bp, Homo sapien
cactagatagtccttactgatgaaa

SEQ ID NO: 2732075 - DNA, 25 bp, Homo sapien
cataaagagtcactctgagatgaac

SEQ ID NO: 2732076 - DNA, 25 bp, Homo sapien
aagtccatcaattcaggctgttcag

SEQ ID NO: 2732077 - DNA, 25 bp, Homo sapien
aaaggtaggccaaaatttgcagagg

SEQ ID NO: 2732078 - DNA, 25 bp, Homo sapien
tatacatttagtggagcatctgacg

SEQ ID NO: 2732079 - DNA, 25 bp, Homo sapien
gcatctgacgttcaaccacctatga

SEQ ID NO: 2732080 - DNA, 25 bp, Homo sapien
tattctggtagcaagaaagacaaat

SEQ ID NO: 2732081 - DNA, 25 bp, Homo sapien
caaaaacatcaatgactcttgccag

SEQ ID NO: 2732082 - DNA, 25 bp, Homo sapien
tgaccactaaagcacagtaattgat

SEQ ID NO: 2732083 - DNA, 25 bp, Homo sapien
taaaaatagacttcatgggattgtc

SEQ ID NO: 2732084 - DNA, 25 bp, Homo sapien
aaaggtgtatttagttctgagccaa

SEQ ID NO: 2732085 - DNA, 25 bp, Homo sapien
ggattgtcaatgtcttaaacagcct

SEQ ID NO: 2732086 - DNA, 25 bp, Homo sapien
ttaggagtttcttgtcatagagatt

SEQ ID NO: 2732087 - DNA, 25 bp, Homo sapien
attaggagtttcttgtcatagagat

SEQ ID NO: 2732088 - DNA, 25 bp, Homo sapien
gaatcacagtggtcagtttacttac

SEQ ID NO: 2732089 - DNA, 25 bp, Homo sapien
gcaaaaagaactgtatccatttaag

SEQ ID NO: 2732090 - DNA, 25 bp, Homo sapien
taaattgaagtgctaatatctataa

SEQ ID NO: 2732091 - DNA, 25 bp, Homo sapien
tacttataccaacttaaaatgatac

SEQ ID NO: 2732092 - DNA, 25 bp, Homo sapien
tagttgcaaccagcaacaaccacat

SEQ ID NO: 2732093 - DNA, 25 bp, Homo sapien
caatgtgctgatcatattccatggc

SEQ ID NO: 2732094 - DNA, 25 bp, Homo sapien
taggcttgcgataaacaggtttttc

SEQ ID NO: 2732095 - DNA, 25 bp, Homo sapien
aggtgttggaacaatgtgctgatca

SEQ ID NO: 2732096 - DNA, 25 bp, Homo sapien
tcttgcccacaagtccacagaagtg

SEQ ID NO: 2732097 - DNA, 25 bp, Homo sapien
agaggtcttgcccacaagtccacag

SEQ ID NO: 2732098 - DNA, 25 bp, Homo sapien
ttcagaggtcttgcccacaagtcca

SEQ ID NO: 2732099 - DNA, 25 bp, Homo sapien
tcctttcagaggtcttgcccacaag

SEQ ID NO: 2732100 - DNA, 25 bp, Homo sapien
ttccaccggattctttcctcattat

SEQ ID NO: 2732101 - DNA, 25 bp, Homo sapien
ccaccggattctttcctcattatcc

SEQ ID NO: 2732102 - DNA, 25 bp, Homo sapien
tccaccggattctttcctcattatc

SEQ ID NO: 2732103 - DNA, 25 bp, Homo sapien
tactgtacataaacacacaaaggcc

SEQ ID NO: 2732104 - DNA, 25 bp, Homo sapien
cttaaggatactgtacataaacaca

SEQ ID NO: 2732105 - DNA, 25 bp, Homo sapien
actgtacataaacacacaaaggcca

SEQ ID NO: 2732106 - DNA, 25 bp, Homo sapien
ggatactgtacataaacacacaaag

SEQ ID NO: 2732107 - DNA, 25 bp, Homo sapien
tatcaaagttgttcttgactgttaa

SEQ ID NO: 2732108 - DNA, 25 bp, Homo sapien
gttgttcttgactgttaatgatttg

SEQ ID NO: 2732109 - DNA, 25 bp, Homo sapien
cagatccagccaagataaattatat

SEQ ID NO: 2732110 - DNA, 25 bp, Homo sapien
accagatccagccaagataaattat

SEQ ID NO: 2732111 - DNA, 25 bp, Homo sapien
cattttcagctctcattatgtcaat

SEQ ID NO: 2732112 - DNA, 25 bp, Homo sapien
ttgacctcagtgcaaagctctatgt

SEQ ID NO: 2732113 - DNA, 25 bp, Homo sapien
taagtgggatgaccaaatataccaa

SEQ ID NO: 2732114 - DNA, 25 bp, Homo sapien
gtcataaacattgaatcactgaatg

SEQ ID NO: 2732115 - DNA, 25 bp, Homo sapien
tgtcacctttgacctcagtgcaaag

SEQ ID NO: 2732116 - DNA, 25 bp, Homo sapien
aaacaaagggtccaagaggctgaag

SEQ ID NO: 2732117 - DNA, 25 bp, Homo sapien
gaagactacccaaagtcagagtgct

SEQ ID NO: 2732118 - DNA, 25 bp, Homo sapien
tgcaaaagtagtacagagaaagcct

SEQ ID NO: 2732119 - DNA, 25 bp, Homo sapien
gacattggtacaacccacagacctt

SEQ ID NO: 2732120 - DNA, 25 bp, Homo sapien
aggtgtgggttgctatgcctggcta

SEQ ID NO: 2732121 - DNA, 25 bp, Homo sapien
acataggtgtgggttgctatgcctg

SEQ ID NO: 2732122 - DNA, 25 bp, Homo sapien
gaacataggtgtgggttgctatgcc

SEQ ID NO: 2732123 - DNA, 25 bp, Homo sapien
gggaacataggtgtgggttgctatg

SEQ ID NO: 2732124 - DNA, 25 bp, Homo sapien
tttgggtgtgctaccccagagcctg

SEQ ID NO: 2732125 - DNA, 25 bp, Homo sapien
gccggtatcatcttgtgacctaagt

SEQ ID NO: 2732126 - DNA, 25 bp, Homo sapien
taatgggtagagtcaagccggtatc

SEQ ID NO: 2732127 - DNA, 25 bp, Homo sapien
taatctcttgctgtagggcaatgag

SEQ ID NO: 2732128 - DNA, 25 bp, Homo sapien
tacatcatgccgaaggcataggcta

SEQ ID NO: 2732129 - DNA, 25 bp, Homo sapien
tgactcaacctagccaaatataggc

SEQ ID NO: 2732130 - DNA, 25 bp, Homo sapien
gccagctgcagaatttggaaccaga

SEQ ID NO: 2732131 - DNA, 25 bp, Homo sapien
aaaaatactgcctggtcagcagccc

SEQ ID NO: 2732132 - DNA, 25 bp, Homo sapien
ctgcctgctgttttgtctggttggg

SEQ ID NO: 2732133 - DNA, 25 bp, Homo sapien
gcctgctgttttgtctggttgggtt

SEQ ID NO: 2732134 - DNA, 25 bp, Homo sapien
ctgctgttttgtctggttgggtttt

SEQ ID NO: 2732135 - DNA, 25 bp, Homo sapien
tctggttgggtttttgagaactcat

SEQ ID NO: 2732136 - DNA, 25 bp, Homo sapien
catggctagctagttgataatcccc

SEQ ID NO: 2732137 - DNA, 25 bp, Homo sapien
taatgcttccctaacttgtgtgccc

SEQ ID NO: 2732138 - DNA, 25 bp, Homo sapien
tgtgtgccctactcttccgtaaatt

SEQ ID NO: 2732139 - DNA, 25 bp, Homo sapien
cattaaaagtgccatgggaatttgg

SEQ ID NO: 2732140 - DNA, 25 bp, Homo sapien
gagagctatcggatcctggatatga

SEQ ID NO: 2732141 - DNA, 25 bp, Homo sapien
cggatcctggatatgaatagtttag

SEQ ID NO: 2732142 - DNA, 25 bp, Homo sapien
taagcagagagctatcggatcctgg

SEQ ID NO: 2732143 - DNA, 25 bp, Homo sapien
gctatcggatcctggatatgaatag

SEQ ID NO: 2732144 - DNA, 25 bp, Homo sapien
tattatttctcgcactgtagcatga

SEQ ID NO: 2732145 - DNA, 25 bp, Homo sapien
gacctacatctgatgaccaagtaag

SEQ ID NO: 2732146 - DNA, 25 bp, Homo sapien
cacttcttagaggtcgtgggactta

SEQ ID NO: 2732147 - DNA, 25 bp, Homo sapien
tagaagatctgatgtacccagcaat

SEQ ID NO: 2732148 - DNA, 25 bp, Homo sapien
gaggcaactaatccaacaggaacac

SEQ ID NO: 2732149 - DNA, 25 bp, Homo sapien
aaccctcaacaagatgggccccaga

SEQ ID NO: 2732150 - DNA, 25 bp, Homo sapien
agtacttggaactgacttgaactag

SEQ ID NO: 2732151 - DNA, 25 bp, Homo sapien
gaagagttgatcactttgcctaaga

SEQ ID NO: 2732152 - DNA, 25 bp, Homo sapien
tccaatgtctatctcagagctaagc

SEQ ID NO: 2732153 - DNA, 25 bp, Homo sapien
ttttgaagtagctaatcctgagggc

SEQ ID NO: 2732154 - DNA, 25 bp, Homo sapien
gagctaagccaagatactccagagg

SEQ ID NO: 2732155 - DNA, 25 bp, Homo sapien
aacacttcttctcacttaactggga

SEQ ID NO: 2732156 - DNA, 25 bp, Homo sapien
tattgcatatgctatattgctatat

SEQ ID NO: 2732157 - DNA, 25 bp, Homo sapien
aacaaccacaagaacctttggagag

SEQ ID NO: 2732158 - DNA, 25 bp, Homo sapien
caaccacaagaacctttggagagag

SEQ ID NO: 2732159 - DNA, 25 bp, Homo sapien
attattattgcatatgctatattgc

SEQ ID NO: 2732160 - DNA, 25 bp, Homo sapien
gaaagacttgtcagggctcccctga

SEQ ID NO: 2732161 - DNA, 25 bp, Homo sapien
tgccagacttacgaagaaggtacag

SEQ ID NO: 2732162 - DNA, 25 bp, Homo sapien
taacttctggatacctgctattaga

SEQ ID NO: 2732163 - DNA, 25 bp, Homo sapien
tacaggattgcttacaaatgcttcc

SEQ ID NO: 2732164 - DNA, 25 bp, Homo sapien
tattatgtgagtatcttccaaagtg

SEQ ID NO: 2732165 - DNA, 25 bp, Homo sapien
gacttaatcagacagaggttagaaa

SEQ ID NO: 2732166 - DNA, 25 bp, Homo sapien
cagggttacagcctgggataggttt

SEQ ID NO: 2732167 - DNA, 25 bp, Homo sapien
tagatagccctggatttcaccaaag

SEQ ID NO: 2732168 - DNA, 25 bp, Homo sapien
gcagcttttaatgccagaaggccac

SEQ ID NO: 2732169 - DNA, 25 bp, Homo sapien
gggcattccaggctcaacagcgtta

SEQ ID NO: 2732170 - DNA, 25 bp, Homo sapien
tagtaaatagtgcatgtccctgacc

SEQ ID NO: 2732171 - DNA, 25 bp, Homo sapien
tgacctccaggaactagcagctttt

SEQ ID NO: 2732172 - DNA, 25 bp, Homo sapien
gaaaaactgtgactatattcttcat

SEQ ID NO: 2732173 - DNA, 25 bp, Homo sapien
ggaaaaactgtgactatattcttca

SEQ ID NO: 2732174 - DNA, 25 bp, Homo sapien
tgtcaaaagaatcaactgtgatttc

SEQ ID NO: 2732175 - DNA, 25 bp, Homo sapien
caaaagaatcaactgtgatttcatc

SEQ ID NO: 2732176 - DNA, 25 bp, Homo sapien
caaaacaacctttcaaacattgtca

SEQ ID NO: 2732177 - DNA, 25 bp, Homo sapien
caacctttcaaacattgtcaaaaga

SEQ ID NO: 2732178 - DNA, 25 bp, Homo sapien
ccagagatgccaatatgtgtaacag

SEQ ID NO: 2732179 - DNA, 25 bp, Homo sapien
tacctaaggatcaaagctatgcttc

SEQ ID NO: 2732180 - DNA, 25 bp, Homo sapien
ttgggtcgtctccaaatacaagtga

SEQ ID NO: 2732181 - DNA, 25 bp, Homo sapien
gacatctggctaacgtaacaagtag

SEQ ID NO: 2732182 - DNA, 25 bp, Homo sapien
aaatcaaacaatatagcctgcacag

SEQ ID NO: 2732183 - DNA, 25 bp, Homo sapien
agggccccatggctattggcaacct

SEQ ID NO: 2732184 - DNA, 25 bp, Homo sapien
cctagacatgtacactcaatattaa

SEQ ID NO: 2732185 - DNA, 25 bp, Homo sapien
ggctattggcaacctagacatgtac

SEQ ID NO: 2732186 - DNA, 25 bp, Homo sapien
tagctatactcttgaattcccacca

SEQ ID NO: 2732187 - DNA, 25 bp, Homo sapien
cttaaagtcccaactgagtcagaga

SEQ ID NO: 2732188 - DNA, 25 bp, Homo sapien
gaaggcgactcaagtatcccactgg

SEQ ID NO: 2732189 - DNA, 25 bp, Homo sapien
ctttaacaagcagtcggcagaagac

SEQ ID NO: 2732190 - DNA, 25 bp, Homo sapien
gaggcaatccgcctacaaacacctt

SEQ ID NO: 2732191 - DNA, 25 bp, Homo sapien
cttcatcaatgtctggaggcaatcc

SEQ ID NO: 2732192 - DNA, 25 bp, Homo sapien
ttcgagaatatcgttccactctttc

SEQ ID NO: 2732193 - DNA, 25 bp, Homo sapien
tgaacccaggccactatgaagaggc

SEQ ID NO: 2732194 - DNA, 25 bp, Homo sapien
tgggcaccgtgctataaacagttct

SEQ ID NO: 2732195 - DNA, 25 bp, Homo sapien
caagcagggctgactattggagcca

SEQ ID NO: 2732196 - DNA, 25 bp, Homo sapien
tgtaagcagggaccttccatcttgt

SEQ ID NO: 2732197 - DNA, 25 bp, Homo sapien
cagttagtacccatgtatgcccaca

SEQ ID NO: 2732198 - DNA, 25 bp, Homo sapien
ttctgccatgtgagtgtacaataag

SEQ ID NO: 2732199 - DNA, 25 bp, Homo sapien
tggagagacccttcactccttctgc

SEQ ID NO: 2732200 - DNA, 25 bp, Homo sapien
attattatctattaggaagcaggcc

SEQ ID NO: 2732201 - DNA, 25 bp, Homo sapien
tgactgctacggtccaaatgtttat

SEQ ID NO: 2732202 - DNA, 25 bp, Homo sapien
tccccttcatctagattccccaact

SEQ ID NO: 2732203 - DNA, 25 bp, Homo sapien
aagtttcaaatctactatttacaag

SEQ ID NO: 2732204 - DNA, 25 bp, Homo sapien
tctactatttacaagaacagtaaaa

SEQ ID NO: 2732205 - DNA, 25 bp, Homo sapien
gaactcctttatccccttcatctag

SEQ ID NO: 2732206 - DNA, 25 bp, Homo sapien
cgacgaaaactagctgtgatctcat

SEQ ID NO: 2732207 - DNA, 25 bp, Homo sapien
ggccaaagcgacgaaaactagctgt

SEQ ID NO: 2732208 - DNA, 25 bp, Homo sapien
caaagcgacgaaaactagctgtgat

SEQ ID NO: 2732209 - DNA, 25 bp, Homo sapien
tcagagggccaaagcgacgaaaact

SEQ ID NO: 2732210 - DNA, 25 bp, Homo sapien
aagtataatgaatcttgagaattac

SEQ ID NO: 2732211 - DNA, 25 bp, Homo sapien
taagtataatgaatcttgagaatta

SEQ ID NO: 2732212 - DNA, 25 bp, Homo sapien
ataagtataatgaatcttgagaatt

SEQ ID NO: 2732213 - DNA, 25 bp, Homo sapien
tatttataccaaaagtctgatgaca

SEQ ID NO: 2732214 - DNA, 25 bp, Homo sapien
tcattttggtagtatcttgaagcat

SEQ ID NO: 2732215 - DNA, 25 bp, Homo sapien
catttatgaaaaggctacacattaa

SEQ ID NO: 2732216 - DNA, 25 bp, Homo sapien
tacagttcattttggtagtatcttg

SEQ ID NO: 2732217 - DNA, 25 bp, Homo sapien
caatgcatgcatcaatgagagcctg

SEQ ID NO: 2732218 - DNA, 25 bp, Homo sapien
ccttgatagtgggacttgatacaca

SEQ ID NO: 2732219 - DNA, 25 bp, Homo sapien
gcctgcacagagctttcatcttgaa

SEQ ID NO: 2732220 - DNA, 25 bp, Homo sapien
tacacaaaggtagagttttccatct

SEQ ID NO: 2732221 - DNA, 25 bp, Homo sapien
tcagaggtcccaaattcaaatacgg

SEQ ID NO: 2732222 - DNA, 25 bp, Homo sapien
tggcagggaacataaacaagtcaag

SEQ ID NO: 2732223 - DNA, 25 bp, Homo sapien
caaaggctatgggttgacagcagtg

SEQ ID NO: 2732224 - DNA, 25 bp, Homo sapien
caatcagtgtatgtctaggaaatgc

SEQ ID NO: 2732225 - DNA, 25 bp, Homo sapien
cactgtcactgagattccaaggccg

SEQ ID NO: 2732226 - DNA, 25 bp, Homo sapien
gaggaacaccaccaacaaatatagt

SEQ ID NO: 2732227 - DNA, 25 bp, Homo sapien
cagctcgtaatggtcgaggaacacc

SEQ ID NO: 2732228 - DNA, 25 bp, Homo sapien
tatagtttttcgtgggtcaagtggc

SEQ ID NO: 2732229 - DNA, 25 bp, Homo sapien
gctgaaagggtgatccatctgtcca

SEQ ID NO: 2732230 - DNA, 25 bp, Homo sapien
caggtcattaagtgatagtactccc

SEQ ID NO: 2732231 - DNA, 25 bp, Homo sapien
tcctgaggaaattgaggtgctgaaa

SEQ ID NO: 2732232 - DNA, 25 bp, Homo sapien
gcaattcatctgtactctgagctca

SEQ ID NO: 2732233 - DNA, 25 bp, Homo sapien
ggtcggtatcaatcccagcgtagca

SEQ ID NO: 2732234 - DNA, 25 bp, Homo sapien
gaacaaagcgggcactgatagcagc

SEQ ID NO: 2732235 - DNA, 25 bp, Homo sapien
tgttgattagagaacgcaactctcc

SEQ ID NO: 2732236 - DNA, 25 bp, Homo sapien
gtagcacacacctccatatagccga

SEQ ID NO: 2732237 - DNA, 25 bp, Homo sapien
tctatcggccaacctgtcatgtgaa

SEQ ID NO: 2732238 - DNA, 25 bp, Homo sapien
gaagagcaggcataaggagagcact

SEQ ID NO: 2732239 - DNA, 25 bp, Homo sapien
gagaagaagagtgtcacgaagccca

SEQ ID NO: 2732240 - DNA, 25 bp, Homo sapien
tgaaactcccttacagcaggctgtc

SEQ ID NO: 2732241 - DNA, 25 bp, Homo sapien
tgtgaagatgcctgactactgcgtc

SEQ ID NO: 2732242 - DNA, 25 bp, Homo sapien
tctgagctgtcgtaaaaagcctggc

SEQ ID NO: 2732243 - DNA, 25 bp, Homo sapien
tactgcgtcacaagattctgagctg

SEQ ID NO: 2732244 - DNA, 25 bp, Homo sapien
ctgaatgaatctgttccaaggtgcc

SEQ ID NO: 2732245 - DNA, 25 bp, Homo sapien
tactgcagacaggtaacattagcac

SEQ ID NO: 2732246 - DNA, 25 bp, Homo sapien
gctgatcatccaagacatatggctt

SEQ ID NO: 2732247 - DNA, 25 bp, Homo sapien
agcacgagaatggatagcagcccag

SEQ ID NO: 2732248 - DNA, 25 bp, Homo sapien
ttgtggaattccctgccagcacgag

SEQ ID NO: 2732249 - DNA, 25 bp, Homo sapien
ttagttccagcggaatgaaatatgc

SEQ ID NO: 2732250 - DNA, 25 bp, Homo sapien
atgaaatatgccgagggcggtcacc

SEQ ID NO: 2732251 - DNA, 25 bp, Homo sapien
gaaatatgccgagggcggtcaccgc

SEQ ID NO: 2732252 - DNA, 25 bp, Homo sapien
cagcggaatgaaatatgccgagggc

SEQ ID NO: 2732253 - DNA, 25 bp, Homo sapien
cgatggcaatacgaaaaaggagttc

SEQ ID NO: 2732254 - DNA, 25 bp, Homo sapien
tacagactgctacaaaaggacatgc

SEQ ID NO: 2732255 - DNA, 25 bp, Homo sapien
gaagagtgcacttattctgaggcct

SEQ ID NO: 2732256 - DNA, 25 bp, Homo sapien
tgtttgcagtgacacaagaatctac

SEQ ID NO: 2732257 - DNA, 25 bp, Homo sapien
tattataccaaagcgcagggaccag

SEQ ID NO: 2732258 - DNA, 25 bp, Homo sapien
taaaatagcattgccagtgcacgac

SEQ ID NO: 2732259 - DNA, 25 bp, Homo sapien
tcagcaggtcatgtacaaagggaaa

SEQ ID NO: 2732260 - DNA, 25 bp, Homo sapien
cattgtaagtacatggctggcgcca

SEQ ID NO: 2732261 - DNA, 25 bp, Homo sapien
ataggaacttaacgtgaaaatgact

SEQ ID NO: 2732262 - DNA, 25 bp, Homo sapien
tacaatgctatcaatcacagtagct

SEQ ID NO: 2732263 - DNA, 25 bp, Homo sapien
gtaaaaactagacacccacttgcta

SEQ ID NO: 2732264 - DNA, 25 bp, Homo sapien
tatggaaattcagccaagtagtaca

SEQ ID NO: 2732265 - DNA, 25 bp, Homo sapien
tacataagaatgcacactggccaca

SEQ ID NO: 2732266 - DNA, 25 bp, Homo sapien
tcaagccctttggtagtgtggccac

SEQ ID NO: 2732267 - DNA, 25 bp, Homo sapien
taactgaatgcttagatcctgggct

SEQ ID NO: 2732268 - DNA, 25 bp, Homo sapien
gcaggtgaactaacagtacaggcca

SEQ ID NO: 2732269 - DNA, 25 bp, Homo sapien
ctcgttgggtaggtttaggcaatca

SEQ ID NO: 2732270 - DNA, 25 bp, Homo sapien
tactttctgatctagctgtggacac

SEQ ID NO: 2732271 - DNA, 25 bp, Homo sapien
tgaagaaatatagcccaggaagcct

SEQ ID NO: 2732272 - DNA, 25 bp, Homo sapien
cagagattactttccccatgacttt

SEQ ID NO: 2732273 - DNA, 25 bp, Homo sapien
gctacgtaagtacctagaactccag

SEQ ID NO: 2732274 - DNA, 25 bp, Homo sapien
gctttattgtgcaaagtaacttctc

SEQ ID NO: 2732275 - DNA, 25 bp, Homo sapien
tcatagaatggcagattcaaagcac

SEQ ID NO: 2732276 - DNA, 25 bp, Homo sapien
tggaactaggacagggcttagaagc

SEQ ID NO: 2732277 - DNA, 25 bp, Homo sapien
gagtttctgctcactagtccttccc

SEQ ID NO: 2732278 - DNA, 25 bp, Homo sapien
tgacaccatccagaggttcccgtgg

SEQ ID NO: 2732279 - DNA, 25 bp, Homo sapien
ccgtgggccgcagagcacctgacac

SEQ ID NO: 2732280 - DNA, 25 bp, Homo sapien
tgataaggcgaggaggagtttctgc

SEQ ID NO: 2732281 - DNA, 25 bp, Homo sapien
gttctccacgagagtcagcatgcgg

SEQ ID NO: 2732282 - DNA, 25 bp, Homo sapien
tcagcatgcggggctgctaacagga

SEQ ID NO: 2732283 - DNA, 25 bp, Homo sapien
ctccacgagagtcagcatgcggggc

SEQ ID NO: 2732284 - DNA, 25 bp, Homo sapien
cagcatgcggggctgctaacaggat

SEQ ID NO: 2732285 - DNA, 25 bp, Homo sapien
aggcgccagactgcccactgtgcag

SEQ ID NO: 2732286 - DNA, 25 bp, Homo sapien
ctcagcaaacacgacgccacaggcg

SEQ ID NO: 2732287 - DNA, 25 bp, Homo sapien
gagggatgcgggagcggttagggcc

SEQ ID NO: 2732288 - DNA, 25 bp, Homo sapien
actgcccactgtgcaggcgagggat

SEQ ID NO: 2732289 - DNA, 25 bp, Homo sapien
gccactgcactgatgcgagccgaag

SEQ ID NO: 2732290 - DNA, 25 bp, Homo sapien
tcacatagacgaagcgcgccgagtc

SEQ ID NO: 2732291 - DNA, 25 bp, Homo sapien
gcccagttgcaggacgccactgcac

SEQ ID NO: 2732292 - DNA, 25 bp, Homo sapien
gagccgaagcgcgtcacatagacga

SEQ ID NO: 2732293 - DNA, 25 bp, Homo sapien
gccgactgtctggtgccgctctgaa

SEQ ID NO: 2732294 - DNA, 25 bp, Homo sapien
tgcacgcgccgactgtctggtgccg

SEQ ID NO: 2732295 - DNA, 25 bp, Homo sapien
accgccattgcttccctcggcttct

SEQ ID NO: 2732296 - DNA, 25 bp, Homo sapien
tgaactctcgatgcccgcagctggg

SEQ ID NO: 2732297 - DNA, 25 bp, Homo sapien
aaatcataaatgtagctttcaagtt

SEQ ID NO: 2732298 - DNA, 25 bp, Homo sapien
atttgtacttccacaatagcattca

SEQ ID NO: 2732299 - DNA, 25 bp, Homo sapien
cattcatttgtacttccacaatagc

SEQ ID NO: 2732300 - DNA, 25 bp, Homo sapien
aaacattcatttgtacttccacaat

SEQ ID NO: 2732301 - DNA, 25 bp, Homo sapien
gaagcttcattcaatggtatgggaa

SEQ ID NO: 2732302 - DNA, 25 bp, Homo sapien
tggaagcttcattcaatggtatggg

SEQ ID NO: 2732303 - DNA, 25 bp, Homo sapien
ggaagcttcattcaatggtatggga

SEQ ID NO: 2732304 - DNA, 25 bp, Homo sapien
aagcttcattcaatggtatgggaaa

SEQ ID NO: 2732305 - DNA, 25 bp, Homo sapien
tacagtggtaatcaaagacttgcag

SEQ ID NO: 2732306 - DNA, 25 bp, Homo sapien
cactggtataacactggaaggacaa

SEQ ID NO: 2732307 - DNA, 25 bp, Homo sapien
gcagagcatccggtcttgaatatgt

SEQ ID NO: 2732308 - DNA, 25 bp, Homo sapien
ttggacaactagcagcgagaacagc

SEQ ID NO: 2732309 - DNA, 25 bp, Homo sapien
ggcatttcagcctgtgtctatattt

SEQ ID NO: 2732310 - DNA, 25 bp, Homo sapien
cactagataacctttggcatttcag

SEQ ID NO: 2732311 - DNA, 25 bp, Homo sapien
tgtatactctattccatactaaaac

SEQ ID NO: 2732312 - DNA, 25 bp, Homo sapien
tttggcatttcagcctgtgtctata

SEQ ID NO: 2732313 - DNA, 25 bp, Homo sapien
aagattcatcttgtgtaatttgagc

SEQ ID NO: 2732314 - DNA, 25 bp, Homo sapien
caaagcagcagttgtagactcatta

SEQ ID NO: 2732315 - DNA, 25 bp, Homo sapien
ggaaacatccaaagataggttattc

SEQ ID NO: 2732316 - DNA, 25 bp, Homo sapien
tttctgttcgactactaaagtccca

SEQ ID NO: 2732317 - DNA, 25 bp, Homo sapien
taagagttacatctaaaagaagaga

SEQ ID NO: 2732318 - DNA, 25 bp, Homo sapien
tttagaaagagagatcgtaccagca

SEQ ID NO: 2732319 - DNA, 25 bp, Homo sapien
tcacccaaggatttagcagcctgaa

SEQ ID NO: 2732320 - DNA, 25 bp, Homo sapien
aagtacctgtcactccaagggaaag

SEQ ID NO: 2732321 - DNA, 25 bp, Homo sapien
gggaaacttgagagcctacatggca

SEQ ID NO: 2732322 - DNA, 25 bp, Homo sapien
cccctactgaaattatggaacagaa

SEQ ID NO: 2732323 - DNA, 25 bp, Homo sapien
tagcaggggtgggtcattagcccct

SEQ ID NO: 2732324 - DNA, 25 bp, Homo sapien
taaagtattgcagcttatgttcagt

SEQ ID NO: 2732325 - DNA, 25 bp, Homo sapien
taagttaaagtattgcagcttatgt

SEQ ID NO: 2732326 - DNA, 25 bp, Homo sapien
cttcaggcaggagtgggtagtacat

SEQ ID NO: 2732327 - DNA, 25 bp, Homo sapien
tgatctgtcaagaaatgagagaggg

SEQ ID NO: 2732328 - DNA, 25 bp, Homo sapien
tacatcatgtctgttagttatgcca

SEQ ID NO: 2732329 - DNA, 25 bp, Homo sapien
gattgttacgaaatttctccttgca

SEQ ID NO: 2732330 - DNA, 25 bp, Homo sapien
tatgtgtagtccaaaactgtggtct

SEQ ID NO: 2732331 - DNA, 25 bp, Homo sapien
tttaatttgacattgtttccatgag

SEQ ID NO: 2732332 - DNA, 25 bp, Homo sapien
taatttgacattgtttccatgagtt

SEQ ID NO: 2732333 - DNA, 25 bp, Homo sapien
tgacattgtttccatgagtttttaa

SEQ ID NO: 2732334 - DNA, 25 bp, Homo sapien
cattgtttccatgagtttttaagca

SEQ ID NO: 2732335 - DNA, 25 bp, Homo sapien
tcccgtcctggataacttggtagca

SEQ ID NO: 2732336 - DNA, 25 bp, Homo sapien
tccggatcaccactttctgctcagt

SEQ ID NO: 2732337 - DNA, 25 bp, Homo sapien
tgttcatctcccctatcccataaaa

SEQ ID NO: 2732338 - DNA, 25 bp, Homo sapien
ggtagcactgaacctcagtgttcat

SEQ ID NO: 2732339 - DNA, 25 bp, Homo sapien
gtcttttgtcaggtttgacaaatta

SEQ ID NO: 2732340 - DNA, 25 bp, Homo sapien
tgtcaggtttgacaaattatctgtc

SEQ ID NO: 2732341 - DNA, 25 bp, Homo sapien
cttgattagggttcacagtacttct

SEQ ID NO: 2732342 - DNA, 25 bp, Homo sapien
tgaattcatcttgattagggttcac

SEQ ID NO: 2732343 - DNA, 25 bp, Homo sapien
gcaaggccttggaacaatttagcta

SEQ ID NO: 2732344 - DNA, 25 bp, Homo sapien
tactctagagattataatgcacatc

SEQ ID NO: 2732345 - DNA, 25 bp, Homo sapien
tttacttatcagacaagcaaggcct

SEQ ID NO: 2732346 - DNA, 25 bp, Homo sapien
caatttagctatattcacactcttc

SEQ ID NO: 2732347 - DNA, 25 bp, Homo sapien
caatgtggataaccacgtggagtca

SEQ ID NO: 2732348 - DNA, 25 bp, Homo sapien
ttaaaaattggcagccgggagcagt

SEQ ID NO: 2732349 - DNA, 25 bp, Homo sapien
gatacataatatgggagtgtcccag

SEQ ID NO: 2732350 - DNA, 25 bp, Homo sapien
cctagatgagttttcaggtgcaatc

SEQ ID NO: 2732351 - DNA, 25 bp, Homo sapien
gtctggatcggagcttctgagagca

SEQ ID NO: 2732352 - DNA, 25 bp, Homo sapien
gtcagagcagattcaagccaatttg

SEQ ID NO: 2732353 - DNA, 25 bp, Homo sapien
cagcccgagcttgtggtgctgaaag

SEQ ID NO: 2732354 - DNA, 25 bp, Homo sapien
acagcgcctcgcgtgtgtctggatc

SEQ ID NO: 2732355 - DNA, 25 bp, Homo sapien
ggttacagcaggaggtgaggcagaa

SEQ ID NO: 2732356 - DNA, 25 bp, Homo sapien
caggaggtgaggcagaaagagaggg

SEQ ID NO: 2732357 - DNA, 25 bp, Homo sapien
ctggttacagcaggaggtgaggcag

SEQ ID NO: 2732358 - DNA, 25 bp, Homo sapien
cagcaggaggtgaggcagaaagaga

SEQ ID NO: 2732359 - DNA, 25 bp, Homo sapien
tgagagggacggtctggaagccatc

SEQ ID NO: 2732360 - DNA, 25 bp, Homo sapien
gaagccatcctcaactgaaggcggc

SEQ ID NO: 2732361 - DNA, 25 bp, Homo sapien
gagcaggcagctgtaagtgattaac

SEQ ID NO: 2732362 - DNA, 25 bp, Homo sapien
ggcggcttggttcccttctcgctgg

SEQ ID NO: 2732363 - DNA, 25 bp, Homo sapien
aaataacacaagagatgtcttggct

SEQ ID NO: 2732364 - DNA, 25 bp, Homo sapien
tgaaataacacaagagatgtcttgg

SEQ ID NO: 2732365 - DNA, 25 bp, Homo sapien
cataaatctgaaataacacaagaga

SEQ ID NO: 2732366 - DNA, 25 bp, Homo sapien
aatctgaaataacacaagagatgtc

SEQ ID NO: 2732367 - DNA, 25 bp, Homo sapien
gatactcagtggttatcagacctgc

SEQ ID NO: 2732368 - DNA, 25 bp, Homo sapien
tggcttcacgttgcatgcatgcagg

SEQ ID NO: 2732369 - DNA, 25 bp, Homo sapien
tgcatgcaggcccactatgagagac

SEQ ID NO: 2732370 - DNA, 25 bp, Homo sapien
tctggtgcacctggactggatactc

SEQ ID NO: 2732371 - DNA, 25 bp, Homo sapien
tttatgagctggacttgcacagtcc

SEQ ID NO: 2732372 - DNA, 25 bp, Homo sapien
tacttcccaggattatcaataatga

SEQ ID NO: 2732373 - DNA, 25 bp, Homo sapien
taaatacaagtgcagaagtgctgac

SEQ ID NO: 2732374 - DNA, 25 bp, Homo sapien
taatgaagacgttcccacatggaga

SEQ ID NO: 2732375 - DNA, 25 bp, Homo sapien
tctgttccggctgatattccgttct

SEQ ID NO: 2732376 - DNA, 25 bp, Homo sapien
gctgatattccgttcttgtcttcac

SEQ ID NO: 2732377 - DNA, 25 bp, Homo sapien
ttcagcgattttcggcacccggaac

SEQ ID NO: 2732378 - DNA, 25 bp, Homo sapien
cgtaaattcagcgattttcggcacc

SEQ ID NO: 2732379 - DNA, 25 bp, Homo sapien
tacttgtacgcagctgggtcttggt

SEQ ID NO: 2732380 - DNA, 25 bp, Homo sapien
cttgtacgcagctgggtcttggtcc

SEQ ID NO: 2732381 - DNA, 25 bp, Homo sapien
tacgcagctgggtcttggtccactt

SEQ ID NO: 2732382 - DNA, 25 bp, Homo sapien
agtacttgtacgcagctgggtcttg

SEQ ID NO: 2732383 - DNA, 25 bp, Homo sapien
tagcaccaggattcccacgacacca

SEQ ID NO: 2732384 - DNA, 25 bp, Homo sapien
ttccatagcaccaggattcccacga

SEQ ID NO: 2732385 - DNA, 25 bp, Homo sapien
ccatagcaccaggattcccacgaca

SEQ ID NO: 2732386 - DNA, 25 bp, Homo sapien
atagcaccaggattcccacgacacc

SEQ ID NO: 2732387 - DNA, 25 bp, Homo sapien
ccacagcaccaggatccccatgaca

SEQ ID NO: 2732388 - DNA, 25 bp, Homo sapien
accaggatccccatgacaccagcac

SEQ ID NO: 2732389 - DNA, 25 bp, Homo sapien
cagcaccaggatccccatgacacca

SEQ ID NO: 2732390 - DNA, 25 bp, Homo sapien
caccaggatccccatgacaccagca

SEQ ID NO: 2732391 - DNA, 25 bp, Homo sapien
ctttagagcaccagcactctccttg

SEQ ID NO: 2732392 - DNA, 25 bp, Homo sapien
ccagcactctccttggcaccagctg

SEQ ID NO: 2732393 - DNA, 25 bp, Homo sapien
cagcactctccttggcaccagctgc

SEQ ID NO: 2732394 - DNA, 25 bp, Homo sapien
tagagcaccagcactctccttggca

SEQ ID NO: 2732395 - DNA, 25 bp, Homo sapien
ggcctggcagcatagctaggtgcat

SEQ ID NO: 2732396 - DNA, 25 bp, Homo sapien
gcctggcagcatagctaggtgcata

SEQ ID NO: 2732397 - DNA, 25 bp, Homo sapien
caggcctggcagcatagctaggtgc

SEQ ID NO: 2732398 - DNA, 25 bp, Homo sapien
taggtgcataagcaccttccagagc

SEQ ID NO: 2732399 - DNA, 25 bp, Homo sapien
agtgccgtactaaggacatcacact

SEQ ID NO: 2732400 - DNA, 25 bp, Homo sapien
cagtgccgtactaaggacatcacac

SEQ ID NO: 2732401 - DNA, 25 bp, Homo sapien
tgccgtactaaggacatcacactgc

SEQ ID NO: 2732402 - DNA, 25 bp, Homo sapien
gtgccgtactaaggacatcacactg

SEQ ID NO: 2732403 - DNA, 25 bp, Homo sapien
caaaaggcaaaggacgactgaggaa

SEQ ID NO: 2732404 - DNA, 25 bp, Homo sapien
gaagtagactgaaacccatatggaa

SEQ ID NO: 2732405 - DNA, 25 bp, Homo sapien
tagctttgggaggtagcaacacaaa

SEQ ID NO: 2732406 - DNA, 25 bp, Homo sapien
tgatcttagaacacctgacaaactg

SEQ ID NO: 2732407 - DNA, 25 bp, Homo sapien
ccataggagcacactgcatccccat

SEQ ID NO: 2732408 - DNA, 25 bp, Homo sapien
tccagccctgaacccctaatccatc

SEQ ID NO: 2732409 - DNA, 25 bp, Homo sapien
tcctcctccataggagcacactgca

SEQ ID NO: 2732410 - DNA, 25 bp, Homo sapien
acccctaatccatccctgctgtgta

SEQ ID NO: 2732411 - DNA, 25 bp, Homo sapien
agagcacgagcacagagcaggcctc

SEQ ID NO: 2732412 - DNA, 25 bp, Homo sapien
ggctagagagcacgagcacagagca

SEQ ID NO: 2732413 - DNA, 25 bp, Homo sapien
accaccagggctagagagcacgagc

SEQ ID NO: 2732414 - DNA, 25 bp, Homo sapien
accagggctagagagcacgagcaca

SEQ ID NO: 2732415 - DNA, 25 bp, Homo sapien
ttatagacgaatccctctgggcagc

SEQ ID NO: 2732416 - DNA, 25 bp, Homo sapien
gatgcacgcaaggaaagctagggcc

SEQ ID NO: 2732417 - DNA, 25 bp, Homo sapien
tgaaggctttgtaaaccaccaggaa

SEQ ID NO: 2732418 - DNA, 25 bp, Homo sapien
gcagctgtgatcataggtgaaggct

SEQ ID NO: 2732419 - DNA, 25 bp, Homo sapien
aagctccacttagaagaagccagac

SEQ ID NO: 2732420 - DNA, 25 bp, Homo sapien
agacgacctgaacctgatattgaca

SEQ ID NO: 2732421 - DNA, 25 bp, Homo sapien
tagaagaagccagacgacctgaacc

SEQ ID NO: 2732422 - DNA, 25 bp, Homo sapien
tattgacactgattcaaggccagcc

SEQ ID NO: 2732423 - DNA, 25 bp, Homo sapien
tagtaagcatccagggaggctggga

SEQ ID NO: 2732424 - DNA, 25 bp, Homo sapien
gctgctgacagccacggcccgatgg

SEQ ID NO: 2732425 - DNA, 25 bp, Homo sapien
cttgggctcatggatgacagcggct

SEQ ID NO: 2732426 - DNA, 25 bp, Homo sapien
tcctgggaggagtagtaagcatcca

SEQ ID NO: 2732427 - DNA, 25 bp, Homo sapien
cacaaaattataaagcgctcagcgg

SEQ ID NO: 2732428 - DNA, 25 bp, Homo sapien
tttgctgatgcagaacccaccgtcg

SEQ ID NO: 2732429 - DNA, 25 bp, Homo sapien
gaaatatcggttcagacaactccag

SEQ ID NO: 2732430 - DNA, 25 bp, Homo sapien
gctcagcggttttgctagggacaac

SEQ ID NO: 2732431 - DNA, 25 bp, Homo sapien
tcgaagtcacaaagacgtcgctcat

SEQ ID NO: 2732432 - DNA, 25 bp, Homo sapien
tttcacaacaaagtgaggtatccgc

SEQ ID NO: 2732433 - DNA, 25 bp, Homo sapien
tgaggtatccgcaggtaaatggacc

SEQ ID NO: 2732434 - DNA, 25 bp, Homo sapien
tgtgtgactcaatattacttaatgc

SEQ ID NO: 2732435 - DNA, 25 bp, Homo sapien
ccaagagcatctccctatcttaggg

SEQ ID NO: 2732436 - DNA, 25 bp, Homo sapien
tatcattacgcattgaagatggaga

SEQ ID NO: 2732437 - DNA, 25 bp, Homo sapien
tattagctaggtatcattacgcatt

SEQ ID NO: 2732438 - DNA, 25 bp, Homo sapien
ggagacacagagaaatgtactaata

SEQ ID NO: 2732439 - DNA, 25 bp, Homo sapien
acagtgtaaatattagctaggtatc

SEQ ID NO: 2732440 - DNA, 25 bp, Homo sapien
catagggtttactgggaatctgctg

SEQ ID NO: 2732441 - DNA, 25 bp, Homo sapien
atgagtggccctcatctcaagagca

SEQ ID NO: 2732442 - DNA, 25 bp, Homo sapien
ggatgagtggccctcatctcaagag

SEQ ID NO: 2732443 - DNA, 25 bp, Homo sapien
tatggctggagcatagggtttactg

SEQ ID NO: 2732444 - DNA, 25 bp, Homo sapien
aagaaggtggagctttcttgccgat

SEQ ID NO: 2732445 - DNA, 25 bp, Homo sapien
gaaggtggagctttcttgccgatgt

SEQ ID NO: 2732446 - DNA, 25 bp, Homo sapien
tggagctttcttgccgatgttgagg

SEQ ID NO: 2732447 - DNA, 25 bp, Homo sapien
ggtggagctttcttgccgatgttga

SEQ ID NO: 2732448 - DNA, 25 bp, Homo sapien
gaatgaagctccgtagcatcatctc

SEQ ID NO: 2732449 - DNA, 25 bp, Homo sapien
ctccctgaggtgtcacaaaggccca

SEQ ID NO: 2732450 - DNA, 25 bp, Homo sapien
gagagaatgaagctccgtagcatca

SEQ ID NO: 2732451 - DNA, 25 bp, Homo sapien
agctccgtagcatcatctccaggtc

SEQ ID NO: 2732452 - DNA, 25 bp, Homo sapien
aggccccatttctgtactgaggcct

SEQ ID NO: 2732453 - DNA, 25 bp, Homo sapien
tcagaagccggtggccctgttttgc

SEQ ID NO: 2732454 - DNA, 25 bp, Homo sapien
tcgagaactcccagaaaggcaagtg

SEQ ID NO: 2732455 - DNA, 25 bp, Homo sapien
gagatgccacaccttttgaacaccc

SEQ ID NO: 2732456 - DNA, 25 bp, Homo sapien
ctcataagaatgtctccaatttttc

SEQ ID NO: 2732457 - DNA, 25 bp, Homo sapien
cccgtggactctcataagaatgtct

SEQ ID NO: 2732458 - DNA, 25 bp, Homo sapien
ggactctcataagaatgtctccaat

SEQ ID NO: 2732459 - DNA, 25 bp, Homo sapien
atacccgtggactctcataagaatg

SEQ ID NO: 2732460 - DNA, 25 bp, Homo sapien
aggatgggctgtttgcacagactcc

SEQ ID NO: 2732461 - DNA, 25 bp, Homo sapien
tgtttgcacagattcctcacctgca

SEQ ID NO: 2732462 - DNA, 25 bp, Homo sapien
gtttgcacagactcctcacctgcag

SEQ ID NO: 2732463 - DNA, 25 bp, Homo sapien
ttgcacagattcctcacctgcagga

SEQ ID NO: 2732464 - DNA, 25 bp, Homo sapien
ggatgggctgtttgcacagactcct

SEQ ID NO: 2732465 - DNA, 25 bp, Homo sapien
gatgggctgtttgcacagactcctc

SEQ ID NO: 2732466 - DNA, 25 bp, Homo sapien
aggatgggctgtttgcacagactcc

SEQ ID NO: 2732467 - DNA, 25 bp, Homo sapien
tgggctgtttgcacagactcctcac

SEQ ID NO: 2732468 - DNA, 25 bp, Homo sapien
ctggcaggtgttgtctccaaactga

SEQ ID NO: 2732469 - DNA, 25 bp, Homo sapien
cattctctggcaggtgttgtctcca

SEQ ID NO: 2732470 - DNA, 25 bp, Homo sapien
tcattctctggcaggtgttgtctcc

SEQ ID NO: 2732471 - DNA, 25 bp, Homo sapien
tctctggcaggtgttgtctccaaac

SEQ ID NO: 2732472 - DNA, 25 bp, Homo sapien
ccataactcctctcccccatggttc

SEQ ID NO: 2732473 - DNA, 25 bp, Homo sapien
tcctctcccccatggttctccacac

SEQ ID NO: 2732474 - DNA, 25 bp, Homo sapien
tgcttttcccataactcctctcccc

SEQ ID NO: 2732475 - DNA, 25 bp, Homo sapien
ccccatggttctccacacacccctg

SEQ ID NO: 2732476 - DNA, 25 bp, Homo sapien
gatgtctagcgaatgtctccgttgg

SEQ ID NO: 2732477 - DNA, 25 bp, Homo sapien
aatgtctccgttggtcgtcagggtg

SEQ ID NO: 2732478 - DNA, 25 bp, Homo sapien
tagcgaatgtctccgttggtcgtca

SEQ ID NO: 2732479 - DNA, 25 bp, Homo sapien
ctatctgatgtctagcgaatgtctc

SEQ ID NO: 2732480 - DNA, 25 bp, Homo sapien
cagaaatacaacttggcgagggccc

SEQ ID NO: 2732481 - DNA, 25 bp, Homo sapien
gaaccagaagtcacattctgtcatt

SEQ ID NO: 2732482 - DNA, 25 bp, Homo sapien
agaccagaaatacaacttggcgagg

SEQ ID NO: 2732483 - DNA, 25 bp, Homo sapien
gatgcatgaaccagaagtcacattc

SEQ ID NO: 2732484 - DNA, 25 bp, Homo sapien
tcagtaggagtccagaaggactttg

SEQ ID NO: 2732485 - DNA, 25 bp, Homo sapien
aggactttgtcagaggacacagcca

SEQ ID NO: 2732486 - DNA, 25 bp, Homo sapien
gagtcaaaagctctaagcagggcag

SEQ ID NO: 2732487 - DNA, 25 bp, Homo sapien
aaagctctaagcagggcagcctgca

SEQ ID NO: 2732488 - DNA, 25 bp, Homo sapien
cagcatggcgcttacaggagacggt

SEQ ID NO: 2732489 - DNA, 25 bp, Homo sapien
gagacggtggccatgtcataagcac

SEQ ID NO: 2732490 - DNA, 25 bp, Homo sapien
gccatgtcataagcacctgattcag

SEQ ID NO: 2732491 - DNA, 25 bp, Homo sapien
cgcttacaggagacggtggccatgt

SEQ ID NO: 2732492 - DNA, 25 bp, Homo sapien
tcaggaatgtcattaggctgcgagg

SEQ ID NO: 2732493 - DNA, 25 bp, Homo sapien
tgctccctgagcaacggggaataaa

SEQ ID NO: 2732494 - DNA, 25 bp, Homo sapien
acacagccttcaagggttagaattc

SEQ ID NO: 2732495 - DNA, 25 bp, Homo sapien
cttgctggcacccagtttccatggc

SEQ ID NO: 2732496 - DNA, 25 bp, Homo sapien
cttcgcactgaaaggccatccacca

SEQ ID NO: 2732497 - DNA, 25 bp, Homo sapien
ttcgcactgaaaggccatccaccag

SEQ ID NO: 2732498 - DNA, 25 bp, Homo sapien
tcgcactgaaaggccatccaccagc

SEQ ID NO: 2732499 - DNA, 25 bp, Homo sapien
ccttcgcactgaaaggccatccacc

SEQ ID NO: 2732500 - DNA, 25 bp, Homo sapien
catttcattgactggaactggtcca

SEQ ID NO: 2732501 - DNA, 25 bp, Homo sapien
agtgttttcaatttacgatcacttc

SEQ ID NO: 2732502 - DNA, 25 bp, Homo sapien
ttcaatttacgatcacttccatcca

SEQ ID NO: 2732503 - DNA, 25 bp, Homo sapien
tccacatttcattgactggaactgg

SEQ ID NO: 2732504 - DNA, 25 bp, Homo sapien
tctgtttgaagtcatggagagtgtg

SEQ ID NO: 2732505 - DNA, 25 bp, Homo sapien
gctgtcctgagactcagcattcttc

SEQ ID NO: 2732506 - DNA, 25 bp, Homo sapien
gaattgggctgtgctgctgtcctga

SEQ ID NO: 2732507 - DNA, 25 bp, Homo sapien
tatctgtttgaagtcatggagagtg

SEQ ID NO: 2732508 - DNA, 25 bp, Homo sapien
taatatcgatgcaagacaagccacc

SEQ ID NO: 2732509 - DNA, 25 bp, Homo sapien
gataagcaatgcaggctgtcgaaag

SEQ ID NO: 2732510 - DNA, 25 bp, Homo sapien
gacgtggacgggcaaatcataagct

SEQ ID NO: 2732511 - DNA, 25 bp, Homo sapien
gccagattgtcctagaagataagca

SEQ ID NO: 2732512 - DNA, 25 bp, Homo sapien
actgcttctcacagagccatggagg

SEQ ID NO: 2732513 - DNA, 25 bp, Homo sapien
caaaagcaatcacatcgcgaatggt

SEQ ID NO: 2732514 - DNA, 25 bp, Homo sapien
ggaatgctacaggttcatagccagc

SEQ ID NO: 2732515 - DNA, 25 bp, Homo sapien
tgaagaggatcgtgcctggaatgct

SEQ ID NO: 2732516 - DNA, 25 bp, Homo sapien
ggcgtagatgctagaaccactacca

SEQ ID NO: 2732517 - DNA, 25 bp, Homo sapien
tggctaagtgcagtccctgctccag

SEQ ID NO: 2732518 - DNA, 25 bp, Homo sapien
tgatgcccttgaccccatgtagctt

SEQ ID NO: 2732519 - DNA, 25 bp, Homo sapien
ccttgcagcctccaggcaaaagtgc

SEQ ID NO: 2732520 - DNA, 25 bp, Homo sapien
atgttgcctcggccatgatgcgcac

SEQ ID NO: 2732521 - DNA, 25 bp, Homo sapien
tcatgttgcctcggccatgatgcgc

SEQ ID NO: 2732522 - DNA, 25 bp, Homo sapien
catgttgcctcggccatgatgcgca

SEQ ID NO: 2732523 - DNA, 25 bp, Homo sapien
aatacatgagttgacttcaatgttt

SEQ ID NO: 2732524 - DNA, 25 bp, Homo sapien
atacatgagttgacttcaatgtttc

SEQ ID NO: 2732525 - DNA, 25 bp, Homo sapien
aaatacatgagttgacttcaatgtt

SEQ ID NO: 2732526 - DNA, 25 bp, Homo sapien
aaaatacatgagttgacttcaatgt

SEQ ID NO: 2732527 - DNA, 25 bp, Homo sapien
cctgagagttgttgtgcttccttgg

SEQ ID NO: 2732528 - DNA, 25 bp, Homo sapien
gcttccttgggaattggtgaaatgg

SEQ ID NO: 2732529 - DNA, 25 bp, Homo sapien
gattcctgagagttgttgtgcttcc

SEQ ID NO: 2732530 - DNA, 25 bp, Homo sapien
ggtgaaatgggacagcctgtccatg

SEQ ID NO: 2732531 - DNA, 25 bp, Homo sapien
gaaaagcagggtcctcactctataa

SEQ ID NO: 2732532 - DNA, 25 bp, Homo sapien
gctttcgctgtgacatcatagccag

SEQ ID NO: 2732533 - DNA, 25 bp, Homo sapien
actctcttggcttcccatggtgggc

SEQ ID NO: 2732534 - DNA, 25 bp, Homo sapien
tggcctcaggcaaatggtacaacct

SEQ ID NO: 2732535 - DNA, 25 bp, Homo sapien
tcccccgtggattcctcattgatgg

SEQ ID NO: 2732536 - DNA, 25 bp, Homo sapien
cccgtggattcctcattgatggttc

SEQ ID NO: 2732537 - DNA, 25 bp, Homo sapien
cttcccccgtggattcctcattgat

SEQ ID NO: 2732538 - DNA, 25 bp, Homo sapien
ccccgtggattcctcattgatggtt

SEQ ID NO: 2732539 - DNA, 25 bp, Homo sapien
cactggacccagaatcagtatcctg

SEQ ID NO: 2732540 - DNA, 25 bp, Homo sapien
tattacagttgcttcctaaatctcc

SEQ ID NO: 2732541 - DNA, 25 bp, Homo sapien
ccactgtggtttgtccactggaccc

SEQ ID NO: 2732542 - DNA, 25 bp, Homo sapien
tgcccctgccaggtattacagttgc

SEQ ID NO: 2732543 - DNA, 25 bp, Homo sapien
tcaggttcaaacatgactcaggatg

SEQ ID NO: 2732544 - DNA, 25 bp, Homo sapien
ggctttacgttgctgatgaccttag

SEQ ID NO: 2732545 - DNA, 25 bp, Homo sapien
catctgtaaaaagagtccaggctgg

SEQ ID NO: 2732546 - DNA, 25 bp, Homo sapien
ggtgtaggttcattcccaggccagc

SEQ ID NO: 2732547 - DNA, 25 bp, Homo sapien
tctaccttcatcagacctaaccagg

SEQ ID NO: 2732548 - DNA, 25 bp, Homo sapien
taccttcatcagacctaaccagggc

SEQ ID NO: 2732549 - DNA, 25 bp, Homo sapien
gcctgagcaatgtcttctaccttca

SEQ ID NO: 2732550 - DNA, 25 bp, Homo sapien
atggcctgagcaatgtcttctacct

SEQ ID NO: 2732551 - DNA, 25 bp, Homo sapien
aatcatgggatggtacggtctctct

SEQ ID NO: 2732552 - DNA, 25 bp, Homo sapien
ccaggatatgctcctgagtaggtga

SEQ ID NO: 2732553 - DNA, 25 bp, Homo sapien
tggcatcctggcatatgtcatgaaa

SEQ ID NO: 2732554 - DNA, 25 bp, Homo sapien
caaaaagcgtgttcagatggccata

SEQ ID NO: 2732555 - DNA, 25 bp, Homo sapien
tagaaacacagaaatcatttgcttt

SEQ ID NO: 2732556 - DNA, 25 bp, Homo sapien
gaaacacagaaatcatttgcttttc

SEQ ID NO: 2732557 - DNA, 25 bp, Homo sapien
agaaacacagaaatcatttgctttt

SEQ ID NO: 2732558 - DNA, 25 bp, Homo sapien
ctagaaacacagaaatcatttgctt

SEQ ID NO: 2732559 - DNA, 25 bp, Homo sapien
gtgaaagccttctatcacccctgcg

SEQ ID NO: 2732560 - DNA, 25 bp, Homo sapien
catctccctgggtcacataaaggac

SEQ ID NO: 2732561 - DNA, 25 bp, Homo sapien
gacacgtccatcagaagtgaattga

SEQ ID NO: 2732562 - DNA, 25 bp, Homo sapien
ctggacacgtccatcagaagtgaat

SEQ ID NO: 2732563 - DNA, 25 bp, Homo sapien
cgaaattttcctaaggatcaggtct

SEQ ID NO: 2732564 - DNA, 25 bp, Homo sapien
ggatcaggtctaccaaatcttgcca

SEQ ID NO: 2732565 - DNA, 25 bp, Homo sapien
tcaggtctaccaaatcttgccagag

SEQ ID NO: 2732566 - DNA, 25 bp, Homo sapien
tcctaaggatcaggtctaccaaatc

SEQ ID NO: 2732567 - DNA, 25 bp, Homo sapien
tggtcatgctgatgttcttaaacac

SEQ ID NO: 2732568 - DNA, 25 bp, Homo sapien
tgatgttcttaaacaccaggaagat

SEQ ID NO: 2732569 - DNA, 25 bp, Homo sapien
tgtaaccttggtcatgctgatgttc

SEQ ID NO: 2732570 - DNA, 25 bp, Homo sapien
tcagccccgcattgtaaccttggtc

SEQ ID NO: 2732571 - DNA, 25 bp, Homo sapien
tccaagtggtgatcttgtgcccaag

SEQ ID NO: 2732572 - DNA, 25 bp, Homo sapien
gaggagatgctatccaggagtacca

SEQ ID NO: 2732573 - DNA, 25 bp, Homo sapien
tatgtgcgcacaggtgagtatgcca

SEQ ID NO: 2732574 - DNA, 25 bp, Homo sapien
cagggctctgagtactagggttcca

SEQ ID NO: 2732575 - DNA, 25 bp, Homo sapien
tatggatttcagacccaaaaggaag

SEQ ID NO: 2732576 - DNA, 25 bp, Homo sapien
cagcaggtctgtatctttgtgggag

SEQ ID NO: 2732577 - DNA, 25 bp, Homo sapien
aaggccttgaatgcccgctttcatg

SEQ ID NO: 2732578 - DNA, 25 bp, Homo sapien
gaagcaactcacgttttgagctaga

SEQ ID NO: 2732579 - DNA, 25 bp, Homo sapien
agtttctgcctgaggccccttgtta

SEQ ID NO: 2732580 - DNA, 25 bp, Homo sapien
gttcaggtaagtgcccacggagctg

SEQ ID NO: 2732581 - DNA, 25 bp, Homo sapien
gttattgttcaggtaagtgcccacg

SEQ ID NO: 2732582 - DNA, 25 bp, Homo sapien
ttcagtttctgcctgaggccccttg

SEQ ID NO: 2732583 - DNA, 25 bp, Homo sapien
gataccatatgtcatggagccagcc

SEQ ID NO: 2732584 - DNA, 25 bp, Homo sapien
aggatgataccatatgtcatggagc

SEQ ID NO: 2732585 - DNA, 25 bp, Homo sapien
ggctggtagggcctgttaccaacag

SEQ ID NO: 2732586 - DNA, 25 bp, Homo sapien
ggtagggcctgttaccaacagcagg

SEQ ID NO: 2732587 - DNA, 25 bp, Homo sapien
caggctcaggaaatcgaacggctgc

SEQ ID NO: 2732588 - DNA, 25 bp, Homo sapien
tgtgtgtgcaacgaccaaatgactc

SEQ ID NO: 2732589 - DNA, 25 bp, Homo sapien
tgtctgtagacaaactctctgcggg

SEQ ID NO: 2732590 - DNA, 25 bp, Homo sapien
gaacggctgcccacaaaggtgtctg

SEQ ID NO: 2732591 - DNA, 25 bp, Homo sapien
gacattcgaatcctgcagcaactgc

SEQ ID NO: 2732592 - DNA, 25 bp, Homo sapien
gttgtgacattcgaatcctgcagca

SEQ ID NO: 2732593 - DNA, 25 bp, Homo sapien
cagttgtgacattcgaatcctgcag

SEQ ID NO: 2732594 - DNA, 25 bp, Homo sapien
tgtgacattcgaatcctgcagcaac

SEQ ID NO: 2732595 - DNA, 25 bp, Homo sapien
gcccagcacaaatttacagatgtcc

SEQ ID NO: 2732596 - DNA, 25 bp, Homo sapien
ttttaaaggctatacccatggcagt

SEQ ID NO: 2732597 - DNA, 25 bp, Homo sapien
tcttggtaagggattgtggcccagc

SEQ ID NO: 2732598 - DNA, 25 bp, Homo sapien
ggctatacccatggcagttgttctg

SEQ ID NO: 2732599 - DNA, 25 bp, Homo sapien
cagccccgacctcatagaagtaaat

SEQ ID NO: 2732600 - DNA, 25 bp, Homo sapien
atatttggaacaacaatccaggggc

SEQ ID NO: 2732601 - DNA, 25 bp, Homo sapien
agccccgacctcatagaagtaaatg

SEQ ID NO: 2732602 - DNA, 25 bp, Homo sapien
aggcagcccgcttcggcgtgcgttc

SEQ ID NO: 2732603 - DNA, 25 bp, Homo sapien
taattggacgtgacgtggctttggc

SEQ ID NO: 2732604 - DNA, 25 bp, Homo sapien
tggctttggcctgctttataacagt

SEQ ID NO: 2732605 - DNA, 25 bp, Homo sapien
gctttataacagttgccggaacagg

SEQ ID NO: 2732606 - DNA, 25 bp, Homo sapien
gtgggtgcctaaatacagatgttcc

SEQ ID NO: 2732607 - DNA, 25 bp, Homo sapien
aggaacgtgggtgcctaaatacaga

SEQ ID NO: 2732608 - DNA, 25 bp, Homo sapien
gaacgtgggtgcctaaatacagatg

SEQ ID NO: 2732609 - DNA, 25 bp, Homo sapien
taaggaacgtgggtgcctaaataca

SEQ ID NO: 2732610 - DNA, 25 bp, Homo sapien
ctgggatgaaggctacttcacttgg

SEQ ID NO: 2732611 - DNA, 25 bp, Homo sapien
tgcgctggggtgaaaactctgtcct

SEQ ID NO: 2732612 - DNA, 25 bp, Homo sapien
ttggtcctgaaagatctgcgctggg

SEQ ID NO: 2732613 - DNA, 25 bp, Homo sapien
tgcgccggcaagttcatgcggcttc

SEQ ID NO: 2732614 - DNA, 25 bp, Homo sapien
ccagagtttcagaggttgagaaaat

SEQ ID NO: 2732615 - DNA, 25 bp, Homo sapien
gttgggcaccagagtttcagaggtt

SEQ ID NO: 2732616 - DNA, 25 bp, Homo sapien
ctgttgggcaccagagtttcagagg

SEQ ID NO: 2732617 - DNA, 25 bp, Homo sapien
caccagagtttcagaggttgagaaa

SEQ ID NO: 2732618 - DNA, 25 bp, Homo sapien
cagaatgatcattcagccattcaac

SEQ ID NO: 2732619 - DNA, 25 bp, Homo sapien
atcttcagcctgaaccccacactgg

SEQ ID NO: 2732620 - DNA, 25 bp, Homo sapien
cccacactggtactgatagccagaa

SEQ ID NO: 2732621 - DNA, 25 bp, Homo sapien
ctggtactgatagccagaatgatca

SEQ ID NO: 2732622 - DNA, 25 bp, Homo sapien
tgaaacaggagacgaagaggcagct

SEQ ID NO: 2732623 - DNA, 25 bp, Homo sapien
taacacatatcatgctagagccagg

SEQ ID NO: 2732624 - DNA, 25 bp, Homo sapien
tatatccaccagaggagtcaggagc

SEQ ID NO: 2732625 - DNA, 25 bp, Homo sapien
ccttctagatgttacgcgtgcaaga

SEQ ID NO: 2732626 - DNA, 25 bp, Homo sapien
tcggaggccgggatctagtccccag

SEQ ID NO: 2732627 - DNA, 25 bp, Homo sapien
gcgctctgctttcactcggaggccg

SEQ ID NO: 2732628 - DNA, 25 bp, Homo sapien
gctttcactcggaggccgggatcta

SEQ ID NO: 2732629 - DNA, 25 bp, Homo sapien
gatctagtccccagcactggtcgga

SEQ ID NO: 2732630 - DNA, 25 bp, Homo sapien
aggcttgttctgtgaagccggaacc

SEQ ID NO: 2732631 - DNA, 25 bp, Homo sapien
gtccacgtggcttccgccaggactt

SEQ ID NO: 2732632 - DNA, 25 bp, Homo sapien
ttgttctgtgaagccggaacccttg

SEQ ID NO: 2732633 - DNA, 25 bp, Homo sapien
gtggcttccgccaggacttgcaaga

SEQ ID NO: 2732634 - DNA, 25 bp, Homo sapien
aaagcaaagataaaaggtgatattg

SEQ ID NO: 2732635 - DNA, 25 bp, Homo sapien
tctgccttcaatgggttgccatggg

SEQ ID NO: 2732636 - DNA, 25 bp, Homo sapien
ttttgggtcgggcattttcctgaca

SEQ ID NO: 2732637 - DNA, 25 bp, Homo sapien
ctgcactgagacgagctttttgggt

SEQ ID NO: 2732638 - DNA, 25 bp, Homo sapien
ctgtcaaagctggttgtgtttatgt

SEQ ID NO: 2732639 - DNA, 25 bp, Homo sapien
gcctcagaacctcttcgaacatatg

SEQ ID NO: 2732640 - DNA, 25 bp, Homo sapien
tgtttatgtattggaggtgggccct

SEQ ID NO: 2732641 - DNA, 25 bp, Homo sapien
agggccaaccaggtatgatatcggg

SEQ ID NO: 2732642 - DNA, 25 bp, Homo sapien
cagcctccatgatcaaggtgaagtt

SEQ ID NO: 2732643 - DNA, 25 bp, Homo sapien
gcctggggaccagcctccatgatca

SEQ ID NO: 2732644 - DNA, 25 bp, Homo sapien
caaggtgaagtttgtgagcatgaca

SEQ ID NO: 2732645 - DNA, 25 bp, Homo sapien
gaagtttgtgagcatgacattcaag

SEQ ID NO: 2732646 - DNA, 25 bp, Homo sapien
cgtgtcattccaccttccaagggtg

SEQ ID NO: 2732647 - DNA, 25 bp, Homo sapien
ttagctgtgggtcgtgtcattccac

SEQ ID NO: 2732648 - DNA, 25 bp, Homo sapien
tcgtgtcattccaccttccaagggt

SEQ ID NO: 2732649 - DNA, 25 bp, Homo sapien
tctcatctcctcctcatcttcctcc

SEQ ID NO: 2732650 - DNA, 25 bp, Homo sapien
tcatctcctcctcatcttcctccat

SEQ ID NO: 2732651 - DNA, 25 bp, Homo sapien
ttctcatctcctcctcatcttcctc

SEQ ID NO: 2732652 - DNA, 25 bp, Homo sapien
ctcatctcctcctcatcttcctcca

SEQ ID NO: 2732653 - DNA, 25 bp, Homo sapien
aatcaaactctaacttcggtcctca

SEQ ID NO: 2732654 - DNA, 25 bp, Homo sapien
tataacaaaggtgaatatgtctctt

SEQ ID NO: 2732655 - DNA, 25 bp, Homo sapien
caggctaatagtattgtcaaatatg

SEQ ID NO: 2732656 - DNA, 25 bp, Homo sapien
gatattaggtaaacttgaagtccaa

SEQ ID NO: 2732657 - DNA, 25 bp, Homo sapien
ttcttgttaggaaggctcttccttg

SEQ ID NO: 2732658 - DNA, 25 bp, Homo sapien
tctgcaggtgccactatcctggtgg

SEQ ID NO: 2732659 - DNA, 25 bp, Homo sapien
cgagcagcacacatgctttttcttg

SEQ ID NO: 2732660 - DNA, 25 bp, Homo sapien
tcttccttggcaggctccctcggcc

SEQ ID NO: 2732661 - DNA, 25 bp, Homo sapien
tgttgcctggatgacttttgtgaaa

SEQ ID NO: 2732662 - DNA, 25 bp, Homo sapien
acctttccatcgtatggcttctggg

SEQ ID NO: 2732663 - DNA, 25 bp, Homo sapien
cacctttccatcgtatggcttctgg

SEQ ID NO: 2732664 - DNA, 25 bp, Homo sapien
gcctggatgacttttgtgaaaagga

SEQ ID NO: 2732665 - DNA, 25 bp, Homo sapien
gtgaacctgtctttggccaggatct

SEQ ID NO: 2732666 - DNA, 25 bp, Homo sapien
accaggtgttcaatacgaccaaatc

SEQ ID NO: 2732667 - DNA, 25 bp, Homo sapien
aaagcaggcttggttaccaggtgtt

SEQ ID NO: 2732668 - DNA, 25 bp, Homo sapien
ggttaccaggtgttcaatacgacca

SEQ ID NO: 2732669 - DNA, 25 bp, Homo sapien
aaaagcaggcttggttaccaggtgt

SEQ ID NO: 2732670 - DNA, 25 bp, Homo sapien
gttgttgaggtcaacgaaggggtca

SEQ ID NO: 2732671 - DNA, 25 bp, Homo sapien
ttgttgaggtcaacgaaggggtcat

SEQ ID NO: 2732672 - DNA, 25 bp, Homo sapien
aaggggtcattgatggtgacaatat

SEQ ID NO: 2732673 - DNA, 25 bp, Homo sapien
gggtcattgatggtgacaatatcca

SEQ ID NO: 2732674 - DNA, 25 bp, Homo sapien
gttctcagccttgacggtgccacag

SEQ ID NO: 2732675 - DNA, 25 bp, Homo sapien
cggtgccacagaatttgccatgggt

SEQ ID NO: 2732676 - DNA, 25 bp, Homo sapien
tcagccttgacggtgccacagaatt

SEQ ID NO: 2732677 - DNA, 25 bp, Homo sapien
ccttgacggtgccacagaatttgcc

SEQ ID NO: 2732678 - DNA, 25 bp, Homo sapien
agacggtgatgggatttccactggc

SEQ ID NO: 2732679 - DNA, 25 bp, Homo sapien
cggtgatgggatttccactggcgac

SEQ ID NO: 2732680 - DNA, 25 bp, Homo sapien
gaagacggtgatgggatttccactg

SEQ ID NO: 2732681 - DNA, 25 bp, Homo sapien
tggaagacggtgatgggatttccac

SEQ ID NO: 2732682 - DNA, 25 bp, Homo sapien
gtgaagatacaagtggactccgcaa

SEQ ID NO: 2732683 - DNA, 25 bp, Homo sapien
gaagatacaagtggactccgcaatg

SEQ ID NO: 2732684 - DNA, 25 bp, Homo sapien
agatacaagtggactccgcaatgta

SEQ ID NO: 2732685 - DNA, 25 bp, Homo sapien
gtggtgaagatacaagtggactccg

SEQ ID NO: 2732686 - DNA, 25 bp, Homo sapien
acttctcgtggttcacatccatcac

SEQ ID NO: 2732687 - DNA, 25 bp, Homo sapien
gtcatacttctcgtggttcacatcc

SEQ ID NO: 2732688 - DNA, 25 bp, Homo sapien
tacttctcgtggttcacatccatca

SEQ ID NO: 2732689 - DNA, 25 bp, Homo sapien
catacttctcgtggttcacatccat

SEQ ID NO: 2732690 - DNA, 25 bp, Homo sapien
caaagttgtggatgacgttggccag

SEQ ID NO: 2732691 - DNA, 25 bp, Homo sapien
ctgtggtcatgggtccttccacgat

SEQ ID NO: 2732692 - DNA, 25 bp, Homo sapien
gtggtcatgggtccttccacgatac

SEQ ID NO: 2732693 - DNA, 25 bp, Homo sapien
tgtggtcatgggtccttccacgata

SEQ ID NO: 2732694 - DNA, 25 bp, Homo sapien
aatcttctgggtggcagtgatagca

SEQ ID NO: 2732695 - DNA, 25 bp, Homo sapien
cttctgggtggcagtgatagcatgg

SEQ ID NO: 2732696 - DNA, 25 bp, Homo sapien
tcttctgggtggcagtgatagcatg

SEQ ID NO: 2732697 - DNA, 25 bp, Homo sapien
ttctgggtggcagtgatagcatgga

SEQ ID NO: 2732698 - DNA, 25 bp, Homo sapien
ctggagagctccacggccgttatgc

SEQ ID NO: 2732699 - DNA, 25 bp, Homo sapien
cggccgttatgccagtttcccggag

SEQ ID NO: 2732700 - DNA, 25 bp, Homo sapien
agctccacggccgttatgccagttt

SEQ ID NO: 2732701 - DNA, 25 bp, Homo sapien
cacggccgttatgccagtttcccgg

SEQ ID NO: 2732702 - DNA, 25 bp, Homo sapien
ctttggcagtgccagtagaggcagg

SEQ ID NO: 2732703 - DNA, 25 bp, Homo sapien
tttggcagtgccagtagaggcaggg

SEQ ID NO: 2732704 - DNA, 25 bp, Homo sapien
tgccagtagaggcagggatgatgtt

SEQ ID NO: 2732705 - DNA, 25 bp, Homo sapien
cagtgccagtagaggcagggatgat

SEQ ID NO: 2732706 - DNA, 25 bp, Homo sapien
ggcagtgaggacacagaatcccatg

SEQ ID NO: 2732707 - DNA, 25 bp, Homo sapien
catgaccaacacattggcagtgagg

SEQ ID NO: 2732708 - DNA, 25 bp, Homo sapien
acacagaatcccatgccagtaagct

SEQ ID NO: 2732709 - DNA, 25 bp, Homo sapien
gaggacacagaatcccatgccagta

SEQ ID NO: 2732710 - DNA, 25 bp, Homo sapien
gggcgttggatgcctgctttactac

SEQ ID NO: 2732711 - DNA, 25 bp, Homo sapien
ggggcgttggatgcctgctttacta

SEQ ID NO: 2732712 - DNA, 25 bp, Homo sapien
tgagggggcgttggatgcctgcttt

SEQ ID NO: 2732713 - DNA, 25 bp, Homo sapien
agggggcgttggatgcctgctttac

SEQ ID NO: 2732714 - DNA, 25 bp, Homo sapien
aggtggaagagtaggtgtgggtgtc

SEQ ID NO: 2732715 - DNA, 25 bp, Homo sapien
agtggccatcgagggcagtgccagc

SEQ ID NO: 2732716 - DNA, 25 bp, Homo sapien
acaaagtggccatcgagggcagtgc

SEQ ID NO: 2732717 - DNA, 25 bp, Homo sapien
ggtggaagagtaggtgtgggtgtcg

SEQ ID NO: 2732718 - DNA, 25 bp, Homo sapien
tactccttggcggccatgtgggccc

SEQ ID NO: 2732719 - DNA, 25 bp, Homo sapien
ctccttggcggccatgtgggccctg

SEQ ID NO: 2732720 - DNA, 25 bp, Homo sapien
ccttggcggccatgtgggccctgag

SEQ ID NO: 2732721 - DNA, 25 bp, Homo sapien
tggcggccatgtgggccctgaggtt

SEQ ID NO: 2732722 - DNA, 25 bp, Homo sapien
gaggaggggtgattcttagttagtg

SEQ ID NO: 2732723 - DNA, 25 bp, Homo sapien
ggggtgattcttagttagtgtggtg

SEQ ID NO: 2732724 - DNA, 25 bp, Homo sapien
gaggggtgattcttagttagtgtgg

SEQ ID NO: 2732725 - DNA, 25 bp, Homo sapien
tgtgaggaggggtgattcttagtta

SEQ ID NO: 2732726 - DNA, 25 bp, Homo sapien
ggcaaggccgccagcctgactgctc

SEQ ID NO: 2732727 - DNA, 25 bp, Homo sapien
ctggcaaggccgccagcctgactgc

SEQ ID NO: 2732728 - DNA, 25 bp, Homo sapien
agcctgactgctcaggcgccagggc

SEQ ID NO: 2732729 - DNA, 25 bp, Homo sapien
tggcaaggccgccagcctgactgct

SEQ ID NO: 2732730 - DNA, 25 bp, Homo sapien
ttgctcaagctccatgcgtccatca

SEQ ID NO: 2732731 - DNA, 25 bp, Homo sapien
tctcaatgccatgcttcagggctca

SEQ ID NO: 2732732 - DNA, 25 bp, Homo sapien
tctgctcagggtaatcagtcgggca

SEQ ID NO: 2732733 - DNA, 25 bp, Homo sapien
cttcttaggcagcttctcaatgcca

SEQ ID NO: 2732734 - DNA, 25 bp, Homo sapien
ccattgagtttctagtggagacttc

SEQ ID NO: 2732735 - DNA, 25 bp, Homo sapien
cactctaggagactttcagtttccg

SEQ ID NO: 2732736 - DNA, 25 bp, Homo sapien
ggaactgtaccccagatatctgagt

SEQ ID NO: 2732737 - DNA, 25 bp, Homo sapien
tgaaaccgcaactcaaagccactct

SEQ ID NO: 2732738 - DNA, 25 bp, Homo sapien
attcacactggccacgtttcaggct

SEQ ID NO: 2732739 - DNA, 25 bp, Homo sapien
caggctgggcgctaccatattgggc

SEQ ID NO: 2732740 - DNA, 25 bp, Homo sapien
caaagatactttacgtatatggttt

SEQ ID NO: 2732741 - DNA, 25 bp, Homo sapien
taaatatgatttcattgtgtcatca

SEQ ID NO: 2732742 - DNA, 25 bp, Homo sapien
taaagttgccctgaagaccttcaga

SEQ ID NO: 2732743 - DNA, 25 bp, Homo sapien
gagttttcgctgaagccattccact

SEQ ID NO: 2732744 - DNA, 25 bp, Homo sapien
gcagcagtatccaatgccaaacagc

SEQ ID NO: 2732745 - DNA, 25 bp, Homo sapien
tttgtccaagctggtgagcaactgg

SEQ ID NO: 2732746 - DNA, 25 bp, Homo sapien
catcctggataagcctcaaaggtgg

SEQ ID NO: 2732747 - DNA, 25 bp, Homo sapien
tcacaacgtggtagactgagcgcct

SEQ ID NO: 2732748 - DNA, 25 bp, Homo sapien
cagatggagctgtgtatctcacaac

SEQ ID NO: 2732749 - DNA, 25 bp, Homo sapien
tgtggctctcgcatcaacgacctga

SEQ ID NO: 2732750 - DNA, 25 bp, Homo sapien
tttggagggtcagtaagaatgaacc

SEQ ID NO: 2732751 - DNA, 25 bp, Homo sapien
ccttgactggaaagagtgtgctaca

SEQ ID NO: 2732752 - DNA, 25 bp, Homo sapien
gcccaagtaattgacggttggccac

SEQ ID NO: 2732753 - DNA, 25 bp, Homo sapien
gaaatagcagtgcaagaccccttga

SEQ ID NO: 2732754 - DNA, 25 bp, Homo sapien
atcttaaactgtgccacagaaccgt

SEQ ID NO: 2732755 - DNA, 25 bp, Homo sapien
tgtgccacagaaccgtcctgccccg

SEQ ID NO: 2732756 - DNA, 25 bp, Homo sapien
actgtgccacagaaccgtcctgccc

SEQ ID NO: 2732757 - DNA, 25 bp, Homo sapien
taaactgtgccacagaaccgtcctg

SEQ ID NO: 2732758 - DNA, 25 bp, Homo sapien
ccactggaacgtgctgtgttggctg

SEQ ID NO: 2732759 - DNA, 25 bp, Homo sapien
tgttggctggcaagtttataggctt

SEQ ID NO: 2732760 - DNA, 25 bp, Homo sapien
aacttggtgaatttctccactggaa

SEQ ID NO: 2732761 - DNA, 25 bp, Homo sapien
tttcccacagagaacttggtgaatt

SEQ ID NO: 2732762 - DNA, 25 bp, Homo sapien
gcaggaacaggagggagcacctgcg

SEQ ID NO: 2732763 - DNA, 25 bp, Homo sapien
ggaacaggagggagcacctgcgaag

SEQ ID NO: 2732764 - DNA, 25 bp, Homo sapien
aggaacaggagggagcacctgcgaa

SEQ ID NO: 2732765 - DNA, 25 bp, Homo sapien
aacaggagggagcacctgcgaaggg

SEQ ID NO: 2732766 - DNA, 25 bp, Homo sapien
tcatcgctgaactaagccttagagg

SEQ ID NO: 2732767 - DNA, 25 bp, Homo sapien
aacttccagaacctcaaactcggtg

SEQ ID NO: 2732768 - DNA, 25 bp, Homo sapien
agtcagcaacttccagaacctcaaa

SEQ ID NO: 2732769 - DNA, 25 bp, Homo sapien
tcaaactcggtgctcatcgctgaac

SEQ ID NO: 2732770 - DNA, 25 bp, Homo sapien
gtcctcagcacaggtctgataaggc

SEQ ID NO: 2732771 - DNA, 25 bp, Homo sapien
cctcagcacaggtctgataaggcat

SEQ ID NO: 2732772 - DNA, 25 bp, Homo sapien
tcctcagcacaggtctgataaggca

SEQ ID NO: 2732773 - DNA, 25 bp, Homo sapien
tccagctgcagtcgggctgtctgga

SEQ ID NO: 2732774 - DNA, 25 bp, Homo sapien
agctgcagtcgggctgtctggagaa

SEQ ID NO: 2732775 - DNA, 25 bp, Homo sapien
ggctgtctggagaacccttccagca

SEQ ID NO: 2732776 - DNA, 25 bp, Homo sapien
ggctccagctgcagtcgggctgtct

SEQ ID NO: 2732777 - DNA, 25 bp, Homo sapien
ttgtatgtgcacaaacaagctttga

SEQ ID NO: 2732778 - DNA, 25 bp, Homo sapien
cacagtctagagcatgtatagtatg

SEQ ID NO: 2732779 - DNA, 25 bp, Homo sapien
ccataggacggcatagcagtttacc

SEQ ID NO: 2732780 - DNA, 25 bp, Homo sapien
actacaataattgcgtctagggagg

SEQ ID NO: 2732781 - DNA, 25 bp, Homo sapien
ctttccaggttaaggtgtggtcctg

SEQ ID NO: 2732782 - DNA, 25 bp, Homo sapien
ccctgaggaggtccacgactttcca

SEQ ID NO: 2732783 - DNA, 25 bp, Homo sapien
agtaacacccatcggcccatctgat

SEQ ID NO: 2732784 - DNA, 25 bp, Homo sapien
tggccacagtaacacccatcggccc

SEQ ID NO: 2732785 - DNA, 25 bp, Homo sapien
ggatcggatgaagggacattttagc

SEQ ID NO: 2732786 - DNA, 25 bp, Homo sapien
ggatgaagggacattttagcatttc

SEQ ID NO: 2732787 - DNA, 25 bp, Homo sapien
ggaatagcccataacaacagtcatt

SEQ ID NO: 2732788 - DNA, 25 bp, Homo sapien
tcctgatacatggaatagcccataa

SEQ ID NO: 2732789 - DNA, 25 bp, Homo sapien
tcttctgagtgttgtctcacacaga

SEQ ID NO: 2732790 - DNA, 25 bp, Homo sapien
tctgagtgttgtctcacacagactt

SEQ ID NO: 2732791 - DNA, 25 bp, Homo sapien
tatatcttctgagtgttgtctcaca

SEQ ID NO: 2732792 - DNA, 25 bp, Homo sapien
tatcttctgagtgttgtctcacaca

SEQ ID NO: 2732793 - DNA, 25 bp, Homo sapien
cacaggctggaggagtaattgtatg

SEQ ID NO: 2732794 - DNA, 25 bp, Homo sapien
gttttatcattatcttgagagtgac

SEQ ID NO: 2732795 - DNA, 25 bp, Homo sapien
taattgtatggggtggttttatcat

SEQ ID NO: 2732796 - DNA, 25 bp, Homo sapien
tgcacaggctggaggagtaattgta

SEQ ID NO: 2732797 - DNA, 25 bp, Homo sapien
aagctctgtgggcaaggctgttggc

SEQ ID NO: 2732798 - DNA, 25 bp, Homo sapien
ttagcaagctctgtgggcaaggctg

SEQ ID NO: 2732799 - DNA, 25 bp, Homo sapien
tgggcaaggctgttggctgccagtt

SEQ ID NO: 2732800 - DNA, 25 bp, Homo sapien
aggctgttggctgccagtttctcta

SEQ ID NO: 2732801 - DNA, 25 bp, Homo sapien
aagaatgaaagtcccttgaaggcca

SEQ ID NO: 2732802 - DNA, 25 bp, Homo sapien
agaatgaaagtcccttgaaggccat

SEQ ID NO: 2732803 - DNA, 25 bp, Homo sapien
caagaatgaaagtcccttgaaggcc

SEQ ID NO: 2732804 - DNA, 25 bp, Homo sapien
tcaagaatgaaagtcccttgaaggc

SEQ ID NO: 2732805 - DNA, 25 bp, Homo sapien
tgccaggcccatcattatgtctcca

SEQ ID NO: 2732806 - DNA, 25 bp, Homo sapien
caggcccatcattatgtctccacca

SEQ ID NO: 2732807 - DNA, 25 bp, Homo sapien
aggcccatcattatgtctccaccaa

SEQ ID NO: 2732808 - DNA, 25 bp, Homo sapien
gccaggcccatcattatgtctccac

SEQ ID NO: 2732809 - DNA, 25 bp, Homo sapien
tcataaagttcttccacggtgacat

SEQ ID NO: 2732810 - DNA, 25 bp, Homo sapien
ataaagttcttccacggtgacattg

SEQ ID NO: 2732811 - DNA, 25 bp, Homo sapien
cataaagttcttccacggtgacatt

SEQ ID NO: 2732812 - DNA, 25 bp, Homo sapien
ttcataaagttcttccacggtgaca

SEQ ID NO: 2732813 - DNA, 25 bp, Homo sapien
ggcaaagaggtcaagtttctgcccc

SEQ ID NO: 2732814 - DNA, 25 bp, Homo sapien
ttgtggactaccctcaaactccagg

SEQ ID NO: 2732815 - DNA, 25 bp, Homo sapien
cagctgtctacattaatcagattca

SEQ ID NO: 2732816 - DNA, 25 bp, Homo sapien
tccagggatgaacccaaaagctgac

SEQ ID NO: 2732817 - DNA, 25 bp, Homo sapien
agcctctggagtagccaggattacg

SEQ ID NO: 2732818 - DNA, 25 bp, Homo sapien
ctggagtagccaggattacgggcat

SEQ ID NO: 2732819 - DNA, 25 bp, Homo sapien
gcctctggagtagccaggattacgg

SEQ ID NO: 2732820 - DNA, 25 bp, Homo sapien
ctctggagtagccaggattacgggc

SEQ ID NO: 2732821 - DNA, 25 bp, Homo sapien
tttcttcccattcgttcatccttga

SEQ ID NO: 2732822 - DNA, 25 bp, Homo sapien
atttcttcccattcgttcatccttg

SEQ ID NO: 2732823 - DNA, 25 bp, Homo sapien
ttgatttcttcccattcgttcatcc

SEQ ID NO: 2732824 - DNA, 25 bp, Homo sapien
tcttcccattcgttcatccttgaat

SEQ ID NO: 2732825 - DNA, 25 bp, Homo sapien
tgcgttcccatgaaaacgcgtcttg

SEQ ID NO: 2732826 - DNA, 25 bp, Homo sapien
tccctagtttgatcaaaggcctggg

SEQ ID NO: 2732827 - DNA, 25 bp, Homo sapien
caaattcttctgaggcccgtctcgc

SEQ ID NO: 2732828 - DNA, 25 bp, Homo sapien
gtttctctgcgaagccctggctctg

SEQ ID NO: 2732829 - DNA, 25 bp, Homo sapien
gagttgttattaggcgatccctgaa

SEQ ID NO: 2732830 - DNA, 25 bp, Homo sapien
taggagttaattacaggagcagtca

SEQ ID NO: 2732831 - DNA, 25 bp, Homo sapien
aatcacgccgaaactgaaaagcccg

SEQ ID NO: 2732832 - DNA, 25 bp, Homo sapien
tccctgaagggttataatcacgccg

SEQ ID NO: 2732833 - DNA, 25 bp, Homo sapien
tgagcctttcctccgaggggaagtg

SEQ ID NO: 2732834 - DNA, 25 bp, Homo sapien
tggcgctgacgccagagacgctcgc

SEQ ID NO: 2732835 - DNA, 25 bp, Homo sapien
gcccctgattggctcttcccgaagg

SEQ ID NO: 2732836 - DNA, 25 bp, Homo sapien
aacttttttgctgcggagacgggag

SEQ ID NO: 2732837 - DNA, 25 bp, Homo sapien
ttggcggcggcgaatatcggccggg

SEQ ID NO: 2732838 - DNA, 25 bp, Homo sapien
tcctcgtcgggcgaaaacaagtcat

SEQ ID NO: 2732839 - DNA, 25 bp, Homo sapien
tcattgcctttggacggagaagcca

SEQ ID NO: 2732840 - DNA, 25 bp, Homo sapien
tgaattttccgacttgaccgaggcg

SEQ ID NO: 2732841 - DNA, 25 bp, Homo sapien
ctcctactcctgccccggcgcgcac

SEQ ID NO: 2732842 - DNA, 25 bp, Homo sapien
tctcaagccctgctggaatgcggtt

SEQ ID NO: 2732843 - DNA, 25 bp, Homo sapien
caatctgtatgtcgagggagtctca

SEQ ID NO: 2732844 - DNA, 25 bp, Homo sapien
tgctttcccgggagtgtagcgcacg

SEQ ID NO: 2732845 - DNA, 25 bp, Homo sapien
gccgagggctgtagaaacggaccac

SEQ ID NO: 2732846 - DNA, 25 bp, Homo sapien
gaggtactgtttctgacggaacttg

SEQ ID NO: 2732847 - DNA, 25 bp, Homo sapien
gagagctggagaactctgcacgctc

SEQ ID NO: 2732848 - DNA, 25 bp, Homo sapien
taaagggcgtgcgcggcttccgatt

SEQ ID NO: 2732849 - DNA, 25 bp, Homo sapien
agctgggatgtggtaaagggcgtgc

SEQ ID NO: 2732850 - DNA, 25 bp, Homo sapien
ctggctggtactgccttcgtggaga

SEQ ID NO: 2732851 - DNA, 25 bp, Homo sapien
actggctggtactgccttcgtggag

SEQ ID NO: 2732852 - DNA, 25 bp, Homo sapien
tactggctggtactgccttcgtgga

SEQ ID NO: 2732853 - DNA, 25 bp, Homo sapien
catcagagccaatctttgtgaaagg

SEQ ID NO: 2732854 - DNA, 25 bp, Homo sapien
atcagagccaatctttgtgaaagga

SEQ ID NO: 2732855 - DNA, 25 bp, Homo sapien
ccatcagagccaatctttgtgaaag

SEQ ID NO: 2732856 - DNA, 25 bp, Homo sapien
tctgaaataaagttaccaacagcct

SEQ ID NO: 2732857 - DNA, 25 bp, Homo sapien
taagcagaagtcaataatcccgtaa

SEQ ID NO: 2732858 - DNA, 25 bp, Homo sapien
ggacttacacagtgtcttttgggaa

SEQ ID NO: 2732859 - DNA, 25 bp, Homo sapien
caatctgtgaggatgaatgtaccta

SEQ ID NO: 2732860 - DNA, 25 bp, Homo sapien
ttcaccaagtcaaaacatggcttta

SEQ ID NO: 2732861 - DNA, 25 bp, Homo sapien
tttcaccaagtcaaaacatggcttt

SEQ ID NO: 2732862 - DNA, 25 bp, Homo sapien
agagataactcttcaataaaatata

SEQ ID NO: 2732863 - DNA, 25 bp, Homo sapien
caaattgtacaagcaccctttcaaa

SEQ ID NO: 2732864 - DNA, 25 bp, Homo sapien
cagggaacttaatgggctgtttgac

SEQ ID NO: 2732865 - DNA, 25 bp, Homo sapien
tgggagttttcattcggtcagacaa

SEQ ID NO: 2732866 - DNA, 25 bp, Homo sapien
ggatcctcttttcagtcgggtcagg

SEQ ID NO: 2732867 - DNA, 25 bp, Homo sapien
tcgggtcaggcagacgtttcgccag

SEQ ID NO: 2732868 - DNA, 25 bp, Homo sapien
tttatagcaaagaatggccgtggga

SEQ ID NO: 2732869 - DNA, 25 bp, Homo sapien
aacttcaccaaccaggccctgtgat

SEQ ID NO: 2732870 - DNA, 25 bp, Homo sapien
tttccttgttgctgtgaccacttta

SEQ ID NO: 2732871 - DNA, 25 bp, Homo sapien
gcttatttcaaacccaacagtggag

SEQ ID NO: 2732872 - DNA, 25 bp, Homo sapien
gaggaacagacacagtcaacttcac

SEQ ID NO: 2732873 - DNA, 25 bp, Homo sapien
gcggcattctttgccctgtgtgaaa

SEQ ID NO: 2732874 - DNA, 25 bp, Homo sapien
tgcaaccacccatgaaaagttgggt

SEQ ID NO: 2732875 - DNA, 25 bp, Homo sapien
caattgttaagttggcctgttgccg

SEQ ID NO: 2732876 - DNA, 25 bp, Homo sapien
aaagttgggtttggagcggcattct

SEQ ID NO: 2732877 - DNA, 25 bp, Homo sapien
ggtgattgataacccggccgcattc

SEQ ID NO: 2732878 - DNA, 25 bp, Homo sapien
cttcgggatccagctgggtgattga

SEQ ID NO: 2732879 - DNA, 25 bp, Homo sapien
cgcgacatcaaacgggcggccggca

SEQ ID NO: 2732880 - DNA, 25 bp, Homo sapien
tgccgggcccgcgacatcaaacggg

SEQ ID NO: 2732881 - DNA, 25 bp, Homo sapien
ttccagcccgtaatccttcaggctg

SEQ ID NO: 2732882 - DNA, 25 bp, Homo sapien
gcccgtaatccttcaggctgtcatc

SEQ ID NO: 2732883 - DNA, 25 bp, Homo sapien
aatccttcaggctgtcatcagacac

SEQ ID NO: 2732884 - DNA, 25 bp, Homo sapien
cgtaatccttcaggctgtcatcaga

SEQ ID NO: 2732885 - DNA, 25 bp, Homo sapien
gattatagaagtcctctctggaacg

SEQ ID NO: 2732886 - DNA, 25 bp, Homo sapien
cgctgtatgaacaaggcttccattg

SEQ ID NO: 2732887 - DNA, 25 bp, Homo sapien
ctgaggcaggagattatagaagtcc

SEQ ID NO: 2732888 - DNA, 25 bp, Homo sapien
tcctctctggaacgctgtatgaaca

SEQ ID NO: 2732889 - DNA, 25 bp, Homo sapien
ttagcaagcctgacagcacctttca

SEQ ID NO: 2732890 - DNA, 25 bp, Homo sapien
tagcaagcctgacagcacctttcat

SEQ ID NO: 2732891 - DNA, 25 bp, Homo sapien
ggtagagtcagtgtcacagtcgctg

SEQ ID NO: 2732892 - DNA, 25 bp, Homo sapien
gacgcagcagtgagtgtgggtagag

SEQ ID NO: 2732893 - DNA, 25 bp, Homo sapien
agagtcagtgtcacagtcgctgccc

SEQ ID NO: 2732894 - DNA, 25 bp, Homo sapien
tgggtagagtcagtgtcacagtcgc

SEQ ID NO: 2732895 - DNA, 25 bp, Homo sapien
agtcagcaaaaactcccaggaccat

SEQ ID NO: 2732896 - DNA, 25 bp, Homo sapien
catgcgtctcagggtgagagagtca

SEQ ID NO: 2732897 - DNA, 25 bp, Homo sapien
gagagtcagcaaaaactcccaggac

SEQ ID NO: 2732898 - DNA, 25 bp, Homo sapien
agagagtcagcaaaaactcccagga

SEQ ID NO: 2732899 - DNA, 25 bp, Homo sapien
caaaggctctcgagaagcatccatt

SEQ ID NO: 2732900 - DNA, 25 bp, Homo sapien
gacagaataagagtgctggccttcc

SEQ ID NO: 2732901 - DNA, 25 bp, Homo sapien
tctgggactcgtcttctagggctgc

SEQ ID NO: 2732902 - DNA, 25 bp, Homo sapien
atagttccagaagccagaagtgcaa

SEQ ID NO: 2732903 - DNA, 25 bp, Homo sapien
tatcttattttgagtgtcattatcc

SEQ ID NO: 2732904 - DNA, 25 bp, Homo sapien
cgtgacacactttaatggtgaaaca

SEQ ID NO: 2732905 - DNA, 25 bp, Homo sapien
cattatccgtgacacactttaatgg

SEQ ID NO: 2732906 - DNA, 25 bp, Homo sapien
tgagtgtcattatccgtgacacact

SEQ ID NO: 2732907 - DNA, 25 bp, Homo sapien
ctgcagcacaggtgaaaggttcagg

SEQ ID NO: 2732908 - DNA, 25 bp, Homo sapien
gccctgtgggaggttgcttatggga

SEQ ID NO: 2732909 - DNA, 25 bp, Homo sapien
ccctgtgggaggttgcttatgggaa

SEQ ID NO: 2732910 - DNA, 25 bp, Homo sapien
cctgtgggaggttgcttatgggaat

SEQ ID NO: 2732911 - DNA, 25 bp, Homo sapien
tgccctgtgggaggttgcttatggg

SEQ ID NO: 2732912 - DNA, 25 bp, Homo sapien
ccagatgatggatccagccacaagt

SEQ ID NO: 2732913 - DNA, 25 bp, Homo sapien
tttgcacaggacaaccgtgggcccc

SEQ ID NO: 2732914 - DNA, 25 bp, Homo sapien
caggacaaccgtgggccccagcaga

SEQ ID NO: 2732915 - DNA, 25 bp, Homo sapien
acactttgcacaggacaaccgtggg

SEQ ID NO: 2732916 - DNA, 25 bp, Homo sapien
gccacctctttgttcctgccatggg

SEQ ID NO: 2732917 - DNA, 25 bp, Homo sapien
atgccacctctttgttcctgccatg

SEQ ID NO: 2732918 - DNA, 25 bp, Homo sapien
caaatgccacctctttgttcctgcc

SEQ ID NO: 2732919 - DNA, 25 bp, Homo sapien
cacctctttgttcctgccatgggag

SEQ ID NO: 2732920 - DNA, 25 bp, Homo sapien
ttatgctactttgcttttctgctga

SEQ ID NO: 2732921 - DNA, 25 bp, Homo sapien
tatgctactttgcttttctgctgag

SEQ ID NO: 2732922 - DNA, 25 bp, Homo sapien
atgctactttgcttttctgctgagt

SEQ ID NO: 2732923 - DNA, 25 bp, Homo sapien
tttgacaggatgagcagtaacaccc

SEQ ID NO: 2732924 - DNA, 25 bp, Homo sapien
agtgcacacctatctgatgccagaa

SEQ ID NO: 2732925 - DNA, 25 bp, Homo sapien
cccaaggagatgtaggctgttcaag

SEQ ID NO: 2732926 - DNA, 25 bp, Homo sapien
tatggaaactcagctccgtcagagg

SEQ ID NO: 2732927 - DNA, 25 bp, Homo sapien
tctgccaaggctgaaatccgacagg

SEQ ID NO: 2732928 - DNA, 25 bp, Homo sapien
gaatgactcagctgtagtttcctaa

SEQ ID NO: 2732929 - DNA, 25 bp, Homo sapien
tggtaccccatttcgagattctgtt

SEQ ID NO: 2732930 - DNA, 25 bp, Homo sapien
tgaagtctgcgtgaatctgccaagg

SEQ ID NO: 2732931 - DNA, 25 bp, Homo sapien
ggagaaggatgattttgtctgaaaa

SEQ ID NO: 2732932 - DNA, 25 bp, Homo sapien
gagaaggatgattttgtctgaaaaa

SEQ ID NO: 2732933 - DNA, 25 bp, Homo sapien
ggcttgttgatagatttaatagctg

SEQ ID NO: 2732934 - DNA, 25 bp, Homo sapien
cacactgtgtaaactggtggcttgt

SEQ ID NO: 2732935 - DNA, 25 bp, Homo sapien
actggtggcttgttgatagatttaa

SEQ ID NO: 2732936 - DNA, 25 bp, Homo sapien
ctgtgtaaactggtggcttgttgat

SEQ ID NO: 2732937 - DNA, 25 bp, Homo sapien
tggtgcctatccttgccgtagggtg

SEQ ID NO: 2732938 - DNA, 25 bp, Homo sapien
atccttgccgtagggtgtatgatgg

SEQ ID NO: 2732939 - DNA, 25 bp, Homo sapien
tgtatgatgggttgacgccgaggga

SEQ ID NO: 2732940 - DNA, 25 bp, Homo sapien
tagttttggtgcctatccttgccgt

SEQ ID NO: 2732941 - DNA, 25 bp, Homo sapien
attgtggcaaacaccgttgttgttg

SEQ ID NO: 2732942 - DNA, 25 bp, Homo sapien
gtacaagactctttccactgtctga

SEQ ID NO: 2732943 - DNA, 25 bp, Homo sapien
ggtacaagactctttccactgtctg

SEQ ID NO: 2732944 - DNA, 25 bp, Homo sapien
agccaaaagggatagatggctggaa

SEQ ID NO: 2732945 - DNA, 25 bp, Homo sapien
gccaaaagggatagatggctggaat

SEQ ID NO: 2732946 - DNA, 25 bp, Homo sapien
gagcaagggcgtgctgtgcctgctg

SEQ ID NO: 2732947 - DNA, 25 bp, Homo sapien
gaaaacacgagtgagaaaagcaagc

SEQ ID NO: 2732948 - DNA, 25 bp, Homo sapien
gtgaggcaagcgcagagcaagggcg

SEQ ID NO: 2732949 - DNA, 25 bp, Homo sapien
cagagagaaaacacgagtgagaaaa

SEQ ID NO: 2732950 - DNA, 25 bp, Homo sapien
aagttgagaggttccctggtccagc

SEQ ID NO: 2732951 - DNA, 25 bp, Homo sapien
aggatactccagaaagttgagaggt

SEQ ID NO: 2732952 - DNA, 25 bp, Homo sapien
tcaatggagacaggatactccagaa

SEQ ID NO: 2732953 - DNA, 25 bp, Homo sapien
tactccagaaagttgagaggttccc

SEQ ID NO: 2732954 - DNA, 25 bp, Homo sapien
ccacagagttgtgcgcttgcgaacc

SEQ ID NO: 2732955 - DNA, 25 bp, Homo sapien
ctgaaacccgggatcttcctgcggg

SEQ ID NO: 2732956 - DNA, 25 bp, Homo sapien
ccttctgaaacccgggatcttcctg

SEQ ID NO: 2732957 - DNA, 25 bp, Homo sapien
ttttccacagagttgtgcgcttgcg

SEQ ID NO: 2732958 - DNA, 25 bp, Homo sapien
aaaatgacactccaacaaacaggta

SEQ ID NO: 2732959 - DNA, 25 bp, Homo sapien
tcggcaacagactcagactcaaact

SEQ ID NO: 2732960 - DNA, 25 bp, Homo sapien
aatgacactccaacaaacaggtagt

SEQ ID NO: 2732961 - DNA, 25 bp, Homo sapien
caactatctcggcaacagactcaga

SEQ ID NO: 2732962 - DNA, 25 bp, Homo sapien
acagatctcatcactcatgatatgc

SEQ ID NO: 2732963 - DNA, 25 bp, Homo sapien
tgcacacagatctcatcactcatga

SEQ ID NO: 2732964 - DNA, 25 bp, Homo sapien
gatctcatcactcatgatatgctgc

SEQ ID NO: 2732965 - DNA, 25 bp, Homo sapien
tctcatcactcatgatatgctgcag

SEQ ID NO: 2732966 - DNA, 25 bp, Homo sapien
tgctcggctttctgctgacacgttg

SEQ ID NO: 2732967 - DNA, 25 bp, Homo sapien
tccaagctcttgggacacgtgagca

SEQ ID NO: 2732968 - DNA, 25 bp, Homo sapien
caagctcttgggacacgtgagcaca

SEQ ID NO: 2732969 - DNA, 25 bp, Homo sapien
ccaagctcttgggacacgtgagcac

SEQ ID NO: 2732970 - DNA, 25 bp, Homo sapien
gatctacactggtgggccaagcatc

SEQ ID NO: 2732971 - DNA, 25 bp, Homo sapien
gccgttcccggatctacactggtgg

SEQ ID NO: 2732972 - DNA, 25 bp, Homo sapien
agcagtggaaaacaatgccgttccc

SEQ ID NO: 2732973 - DNA, 25 bp, Homo sapien
gcatctgcatgcttgcacagagctg

SEQ ID NO: 2732974 - DNA, 25 bp, Homo sapien
tgaagttgattccagggcctgaggt

SEQ ID NO: 2732975 - DNA, 25 bp, Homo sapien
caaaggctgaagttgattccagggc

SEQ ID NO: 2732976 - DNA, 25 bp, Homo sapien
atccaaaggctgaagttgattccag

SEQ ID NO: 2732977 - DNA, 25 bp, Homo sapien
tgattccagggcctgaggtttttcc

SEQ ID NO: 2732978 - DNA, 25 bp, Homo sapien
ttttatgtctgtgaaatcttcctct

SEQ ID NO: 2732979 - DNA, 25 bp, Homo sapien
gcttttatgtctgtgaaatcttcct

SEQ ID NO: 2732980 - DNA, 25 bp, Homo sapien
cgaggcttttatgtctgtgaaatct

SEQ ID NO: 2732981 - DNA, 25 bp, Homo sapien
atcgaggcttttatgtctgtgaaat

SEQ ID NO: 2732982 - DNA, 25 bp, Homo sapien
tttgcttgttatgcgggcaccagtg

SEQ ID NO: 2732983 - DNA, 25 bp, Homo sapien
caccagtgatgtgtagaaaatagga

SEQ ID NO: 2732984 - DNA, 25 bp, Homo sapien
tttgttgggacagaagttcagtagg

SEQ ID NO: 2732985 - DNA, 25 bp, Homo sapien
agagaagtatttgttgggacagaag

SEQ ID NO: 2732986 - DNA, 25 bp, Homo sapien
ggacgatgctggtttgtggatttca

SEQ ID NO: 2732987 - DNA, 25 bp, Homo sapien
atcccacttcatcaatgagggatgc

SEQ ID NO: 2732988 - DNA, 25 bp, Homo sapien
cacttcatcaatgagggatgctggg

SEQ ID NO: 2732989 - DNA, 25 bp, Homo sapien
acgatgctggtttgtggatttcaga

SEQ ID NO: 2732990 - DNA, 25 bp, Homo sapien
gttttatgctctggcctcttagttt

SEQ ID NO: 2732991 - DNA, 25 bp, Homo sapien
tgttttatgctctggcctcttagtt

SEQ ID NO: 2732992 - DNA, 25 bp, Homo sapien
ctgttttatgctctggcctcttagt

SEQ ID NO: 2732993 - DNA, 25 bp, Homo sapien
atgctctggcctcttagtttctgtc

SEQ ID NO: 2732994 - DNA, 25 bp, Homo sapien
aggacacgagtcctattagattggg

SEQ ID NO: 2732995 - DNA, 25 bp, Homo sapien
gttcaagcacaaagtatcagtacat

SEQ ID NO: 2732996 - DNA, 25 bp, Homo sapien
gggccccaatctatgctaattactt

SEQ ID NO: 2732997 - DNA, 25 bp, Homo sapien
ttttctctatgcacccatggccctg

SEQ ID NO: 2732998 - DNA, 25 bp, Homo sapien
caacacctgtttcagatgtctccaa

SEQ ID NO: 2732999 - DNA, 25 bp, Homo sapien
gaggacaatgggcaaggaagaacct

SEQ ID NO: 2733000 - DNA, 25 bp, Homo sapien
aggacaatgggcaaggaagaacctc

SEQ ID NO: 2733001 - DNA, 25 bp, Homo sapien
tttcagatgtctccaaggaggacaa

SEQ ID NO: 2733002 - DNA, 25 bp, Homo sapien
ggtgggcctgtttgacgcagcaaaa

SEQ ID NO: 2733003 - DNA, 25 bp, Homo sapien
tccacgattggaaccagcgaacgag

SEQ ID NO: 2733004 - DNA, 25 bp, Homo sapien
cgcaaagcgggagagccgtttccat

SEQ ID NO: 2733005 - DNA, 25 bp, Homo sapien
ttactcctgcggctggcgcgcaaag

SEQ ID NO: 2733006 - DNA, 25 bp, Homo sapien
caggaggcctcataaacacgaggga

SEQ ID NO: 2733007 - DNA, 25 bp, Homo sapien
aggcctcataaacacgagggagaaa

SEQ ID NO: 2733008 - DNA, 25 bp, Homo sapien
gaggcctcataaacacgagggagaa

SEQ ID NO: 2733009 - DNA, 25 bp, Homo sapien
ggaggcctcataaacacgagggaga

SEQ ID NO: 2733010 - DNA, 25 bp, Homo sapien
aagtgccaaaggctaaagatgcctg

SEQ ID NO: 2733011 - DNA, 25 bp, Homo sapien
agtgggcaacgtccatccctctgct

SEQ ID NO: 2733012 - DNA, 25 bp, Homo sapien
gggatgctgctcccaatcccagttc

SEQ ID NO: 2733013 - DNA, 25 bp, Homo sapien
caaaggctaaagatgcctggtaaca

SEQ ID NO: 2733014 - DNA, 25 bp, Homo sapien
tcttagagctcctatcaggtagtgc

SEQ ID NO: 2733015 - DNA, 25 bp, Homo sapien
caagctcctaattgcaaacaagggc

SEQ ID NO: 2733016 - DNA, 25 bp, Homo sapien
aaggtatccagttaccacaaccaag

SEQ ID NO: 2733017 - DNA, 25 bp, Homo sapien
caggtagtgcttggccatatagaaa

SEQ ID NO: 2733018 - DNA, 25 bp, Homo sapien
tttggctctgaagctcctttgaagg

SEQ ID NO: 2733019 - DNA, 25 bp, Homo sapien
aaggtgagaataggtggggccacca

SEQ ID NO: 2733020 - DNA, 25 bp, Homo sapien
tctgaagctcctttgaaggtgagaa

SEQ ID NO: 2733021 - DNA, 25 bp, Homo sapien
cgagaaagctttggctctgaagctc

SEQ ID NO: 2733022 - DNA, 25 bp, Homo sapien
ctgtgctcgtaggaggaaactgcca

SEQ ID NO: 2733023 - DNA, 25 bp, Homo sapien
ttcatcactgtgctcgtaggaggaa

SEQ ID NO: 2733024 - DNA, 25 bp, Homo sapien
tcctcttaaccccttgtctgcccac

SEQ ID NO: 2733025 - DNA, 25 bp, Homo sapien
cagctgtcgcaactttcctcttaac

SEQ ID NO: 2733026 - DNA, 25 bp, Homo sapien
tatcgattcaccatgactagcttgg

SEQ ID NO: 2733027 - DNA, 25 bp, Homo sapien
gtgaccacaggtccaaatctgatgc

SEQ ID NO: 2733028 - DNA, 25 bp, Homo sapien
actagcttggctatgatcctgtcaa

SEQ ID NO: 2733029 - DNA, 25 bp, Homo sapien
gatcctgtcaatcttcatctccagc

SEQ ID NO: 2733030 - DNA, 25 bp, Homo sapien
caaattccagccccgtagctctggg

SEQ ID NO: 2733031 - DNA, 25 bp, Homo sapien
ttccagccccgtagctctggggctg

SEQ ID NO: 2733032 - DNA, 25 bp, Homo sapien
gggccaaattccagccccgtagctc

SEQ ID NO: 2733033 - DNA, 25 bp, Homo sapien
ctgggccaaattccagccccgtagc

SEQ ID NO: 2733034 - DNA, 25 bp, Homo sapien
gaaagaaactgcagggcaatgagga

SEQ ID NO: 2733035 - DNA, 25 bp, Homo sapien
aaagaaactgcagggcaatgaggaa

SEQ ID NO: 2733036 - DNA, 25 bp, Homo sapien
tagaaagaaactgcagggcaatgag

SEQ ID NO: 2733037 - DNA, 25 bp, Homo sapien
gtagaaagaaactgcagggcaatga

SEQ ID NO: 2733038 - DNA, 25 bp, Homo sapien
ctggacaagggcagtgagtggtaaa

SEQ ID NO: 2733039 - DNA, 25 bp, Homo sapien
cagtgagtggtaaagctttcaccat

SEQ ID NO: 2733040 - DNA, 25 bp, Homo sapien
ggcagtgagtggtaaagctttcacc

SEQ ID NO: 2733041 - DNA, 25 bp, Homo sapien
aagggcagtgagtggtaaagctttc

SEQ ID NO: 2733042 - DNA, 25 bp, Homo sapien
tattcactgaaagcatcactcccac

SEQ ID NO: 2733043 - DNA, 25 bp, Homo sapien
aatgctcattcttcccagcagctaa

SEQ ID NO: 2733044 - DNA, 25 bp, Homo sapien
ccagccctgcttctttattcactga

SEQ ID NO: 2733045 - DNA, 25 bp, Homo sapien
caataccaaaatgctcattcttccc

SEQ ID NO: 2733046 - DNA, 25 bp, Homo sapien
tagggatgcggaaatagacacgtga

SEQ ID NO: 2733047 - DNA, 25 bp, Homo sapien
tcatgtagtaccactcagttgaagt

SEQ ID NO: 2733048 - DNA, 25 bp, Homo sapien
cccaagggtaaacggcagatgaatc

SEQ ID NO: 2733049 - DNA, 25 bp, Homo sapien
tgcgtctccagaattcccaagggta

SEQ ID NO: 2733050 - DNA, 25 bp, Homo sapien
actaggcaggaagtcacttggttgg

SEQ ID NO: 2733051 - DNA, 25 bp, Homo sapien
agggaagggcccactaggcaggaag

SEQ ID NO: 2733052 - DNA, 25 bp, Homo sapien
gaagggcccactaggcaggaagtca

SEQ ID NO: 2733053 - DNA, 25 bp, Homo sapien
cccactaggcaggaagtcacttggt

SEQ ID NO: 2733054 - DNA, 25 bp, Homo sapien
ggaggaagcctcgagtctaatgcta

SEQ ID NO: 2733055 - DNA, 25 bp, Homo sapien
tgcaaggtattatcccagtctcagg

SEQ ID NO: 2733056 - DNA, 25 bp, Homo sapien
tgctccactcgtagaacagaatttg

SEQ ID NO: 2733057 - DNA, 25 bp, Homo sapien
gaggcttaacctctggaattccagc

SEQ ID NO: 2733058 - DNA, 25 bp, Homo sapien
cagaccctggctgcatgaatcggca

SEQ ID NO: 2733059 - DNA, 25 bp, Homo sapien
tagggcagacaggacaataactgct

SEQ ID NO: 2733060 - DNA, 25 bp, Homo sapien
aataactgctccattgcagaccctg

SEQ ID NO: 2733061 - DNA, 25 bp, Homo sapien
tcggcactgattcatgcaaacagca

SEQ ID NO: 2733062 - DNA, 25 bp, Homo sapien
tctcttgtggagaaccgatgaccac

SEQ ID NO: 2733063 - DNA, 25 bp, Homo sapien
ttgctgtctcttgtggagaaccgat

SEQ ID NO: 2733064 - DNA, 25 bp, Homo sapien
agaaccgatgaccacaagtctttca

SEQ ID NO: 2733065 - DNA, 25 bp, Homo sapien
tgtggagaaccgatgaccacaagtc

SEQ ID NO: 2733066 - DNA, 25 bp, Homo sapien
cccagtgcgtggtacagggcagtcc

SEQ ID NO: 2733067 - DNA, 25 bp, Homo sapien
tgtatactagcccagtgcaaaggaa

SEQ ID NO: 2733068 - DNA, 25 bp, Homo sapien
ccaggactgttgctaatgaaggatg

SEQ ID NO: 2733069 - DNA, 25 bp, Homo sapien
aacttagtgggaagttgcttgcagc

SEQ ID NO: 2733070 - DNA, 25 bp, Homo sapien
taacaaccggaaggcatctagggcc

SEQ ID NO: 2733071 - DNA, 25 bp, Homo sapien
gatgggcataagtctccttggtaac

SEQ ID NO: 2733072 - DNA, 25 bp, Homo sapien
gattcctgggaaatctgtaacaacc

SEQ ID NO: 2733073 - DNA, 25 bp, Homo sapien
gctgaagacttcatccttaaaggga

SEQ ID NO: 2733074 - DNA, 25 bp, Homo sapien
cctgtacttctgagtgactgactat

SEQ ID NO: 2733075 - DNA, 25 bp, Homo sapien
gactgactataatttgaggttccca

SEQ ID NO: 2733076 - DNA, 25 bp, Homo sapien
actcagggaaacacacttaatggtt

SEQ ID NO: 2733077 - DNA, 25 bp, Homo sapien
tgattataaactcaatccctagctc

SEQ ID NO: 2733078 - DNA, 25 bp, Homo sapien
catgtagggcctccacatttagatc

SEQ ID NO: 2733079 - DNA, 25 bp, Homo sapien
caaagctggagaccagtgcctcttc

SEQ ID NO: 2733080 - DNA, 25 bp, Homo sapien
tacatgtcagtagaagctctcacaa

SEQ ID NO: 2733081 - DNA, 25 bp, Homo sapien
ccagggtggcatgtagggcctccac

SEQ ID NO: 2733082 - DNA, 25 bp, Homo sapien
aagtagaatgcattagagagttgac

SEQ ID NO: 2733083 - DNA, 25 bp, Homo sapien
agttgactagggtctgggtcctgcc

SEQ ID NO: 2733084 - DNA, 25 bp, Homo sapien
ctgggtcctgcctgagtaatgtaaa

SEQ ID NO: 2733085 - DNA, 25 bp, Homo sapien
aatgtaaaggattccatggataacc

SEQ ID NO: 2733086 - DNA, 25 bp, Homo sapien
tgtgagggtagaccagatgactggc

SEQ ID NO: 2733087 - DNA, 25 bp, Homo sapien
gagcacgaggttggaagcaagtcat

SEQ ID NO: 2733088 - DNA, 25 bp, Homo sapien
gctggttctggctctacatccttgc

SEQ ID NO: 2733089 - DNA, 25 bp, Homo sapien
tagaccagatgactggcactggttt

SEQ ID NO: 2733090 - DNA, 25 bp, Homo sapien
gcacaagggctcgggctgatgctga

SEQ ID NO: 2733091 - DNA, 25 bp, Homo sapien
gggctcgggctgatgctgaaaggca

SEQ ID NO: 2733092 - DNA, 25 bp, Homo sapien
aggcacaagggctcgggctgatgct

SEQ ID NO: 2733093 - DNA, 25 bp, Homo sapien
agggctcgggctgatgctgaaaggc

SEQ ID NO: 2733094 - DNA, 25 bp, Homo sapien
gctgaatcgttgctgctcagattca

SEQ ID NO: 2733095 - DNA, 25 bp, Homo sapien
ctccagctgaatcgttgctgctcag

SEQ ID NO: 2733096 - DNA, 25 bp, Homo sapien
tgaatcgttgctgctcagattcaag

SEQ ID NO: 2733097 - DNA, 25 bp, Homo sapien
cagctgaatcgttgctgctcagatt

SEQ ID NO: 2733098 - DNA, 25 bp, Homo sapien
ggatttcgggtcagatgtccagcga

SEQ ID NO: 2733099 - DNA, 25 bp, Homo sapien
tccagcgataggcacaagggctctt

SEQ ID NO: 2733100 - DNA, 25 bp, Homo sapien
tcctagttggaagctacgaggattt

SEQ ID NO: 2733101 - DNA, 25 bp, Homo sapien
ggcagaagcagccacgtgtctcgag

SEQ ID NO: 2733102 - DNA, 25 bp, Homo sapien
gacacagattcccattaggagtagc

SEQ ID NO: 2733103 - DNA, 25 bp, Homo sapien
cagattcccattaggagtagcatgc

SEQ ID NO: 2733104 - DNA, 25 bp, Homo sapien
cacagattcccattaggagtagcat

SEQ ID NO: 2733105 - DNA, 25 bp, Homo sapien
ctttgacacagattcccattaggag

SEQ ID NO: 2733106 - DNA, 25 bp, Homo sapien
gctgtgtaattaacagcacgaggaa

SEQ ID NO: 2733107 - DNA, 25 bp, Homo sapien
cagcacgaggaagaggcttggctct

SEQ ID NO: 2733108 - DNA, 25 bp, Homo sapien
cagctgtagccaagtggctgtgtaa

SEQ ID NO: 2733109 - DNA, 25 bp, Homo sapien
taattaacagcacgaggaagaggct

SEQ ID NO: 2733110 - DNA, 25 bp, Homo sapien
ctgcagtgacagagccagcagctgg

SEQ ID NO: 2733111 - DNA, 25 bp, Homo sapien
ctggccagtgaggaaggcgctgctc

SEQ ID NO: 2733112 - DNA, 25 bp, Homo sapien
tccagagcagagggatcccagagag

SEQ ID NO: 2733113 - DNA, 25 bp, Homo sapien
tgcagtgacagagccagcagctggc

SEQ ID NO: 2733114 - DNA, 25 bp, Homo sapien
tcataaaaccttgcgctaaagagct

SEQ ID NO: 2733115 - DNA, 25 bp, Homo sapien
taaaaccttgcgctaaagagctcac

SEQ ID NO: 2733116 - DNA, 25 bp, Homo sapien
cttcataaaaccttgcgctaaagag

SEQ ID NO: 2733117 - DNA, 25 bp, Homo sapien
cataaaaccttgcgctaaagagctc

SEQ ID NO: 2733118 - DNA, 25 bp, Homo sapien
tatttaactgactataagaactgtg

SEQ ID NO: 2733119 - DNA, 25 bp, Homo sapien
tttaactgactataagaactgtgtc

SEQ ID NO: 2733120 - DNA, 25 bp, Homo sapien
atttaactgactataagaactgtgt

SEQ ID NO: 2733121 - DNA, 25 bp, Homo sapien
gcctcctcatgactttggatgctgc

SEQ ID NO: 2733122 - DNA, 25 bp, Homo sapien
ctcatgactttggatgctgctttct

SEQ ID NO: 2733123 - DNA, 25 bp, Homo sapien
gaattccttccatgatggtcctgct

SEQ ID NO: 2733124 - DNA, 25 bp, Homo sapien
acctaaaaaggctacactcgtgaat

SEQ ID NO: 2733125 - DNA, 25 bp, Homo sapien
tcagtaacagcctagatgcttggcc

SEQ ID NO: 2733126 - DNA, 25 bp, Homo sapien
tcaggatgctgcctctcagaagaag

SEQ ID NO: 2733127 - DNA, 25 bp, Homo sapien
ggttcccagctcatgtgaccaaaag

SEQ ID NO: 2733128 - DNA, 25 bp, Homo sapien
ggactcaggcatcggtacttaaact

SEQ ID NO: 2733129 - DNA, 25 bp, Homo sapien
ttgtgaaacttgaaaatattggcat

SEQ ID NO: 2733130 - DNA, 25 bp, Homo sapien
cgggattgtgaaacttgaaaatatt

SEQ ID NO: 2733131 - DNA, 25 bp, Homo sapien
gattgtgaaacttgaaaatattggc

SEQ ID NO: 2733132 - DNA, 25 bp, Homo sapien
ggattgtgaaacttgaaaatattgg

SEQ ID NO: 2733133 - DNA, 25 bp, Homo sapien
tttttagggcagtattgagggagga

SEQ ID NO: 2733134 - DNA, 25 bp, Homo sapien
cagtattgagggaggaatactcaga

SEQ ID NO: 2733135 - DNA, 25 bp, Homo sapien
gtattgagggaggaatactcagaaa

SEQ ID NO: 2733136 - DNA, 25 bp, Homo sapien
gggcagtattgagggaggaatactc

SEQ ID NO: 2733137 - DNA, 25 bp, Homo sapien
agtatcataagcctcccttgccaga

SEQ ID NO: 2733138 - DNA, 25 bp, Homo sapien
taacatttagatgcaatccgtgaaa

SEQ ID NO: 2733139 - DNA, 25 bp, Homo sapien
tcttttgacaaatgctagtcctttc

SEQ ID NO: 2733140 - DNA, 25 bp, Homo sapien
catcacccggactgtaaaaagtatc

SEQ ID NO: 2733141 - DNA, 25 bp, Homo sapien
gataaatgcaaggtgagaattgaca

SEQ ID NO: 2733142 - DNA, 25 bp, Homo sapien
aaagtatagctactactgtgttcaa

SEQ ID NO: 2733143 - DNA, 25 bp, Homo sapien
taactagcactttataagccaatga

SEQ ID NO: 2733144 - DNA, 25 bp, Homo sapien
cagaaactgatagataagggaataa

SEQ ID NO: 2733145 - DNA, 25 bp, Homo sapien
gaccacgtgcggctgtcgcccgcaa

SEQ ID NO: 2733146 - DNA, 25 bp, Homo sapien
aactctgcctgtcaagcgaggaccg

SEQ ID NO: 2733147 - DNA, 25 bp, Homo sapien
gcctgtgcgcttgctggtgccagct

SEQ ID NO: 2733148 - DNA, 25 bp, Homo sapien
ccggcctgtgcgcttgctggtgcca

SEQ ID NO: 2733149 - DNA, 25 bp, Homo sapien
tcctccgcccacctcgcccgcagaa

SEQ ID NO: 2733150 - DNA, 25 bp, Homo sapien
ccgcccacctcgcccgcagaaccat

SEQ ID NO: 2733151 - DNA, 25 bp, Homo sapien
ggcgtcctccgcccacctcgcccgc

SEQ ID NO: 2733152 - DNA, 25 bp, Homo sapien
ctccgcccacctcgcccgcagaacc

SEQ ID NO: 2733153 - DNA, 25 bp, Homo sapien
cacttggagacaacgcaggtcggac

SEQ ID NO: 2733154 - DNA, 25 bp, Homo sapien
gatccggagactggcgaggtaacca

SEQ ID NO: 2733155 - DNA, 25 bp, Homo sapien
tcgcttagggctttgggtccggcta

SEQ ID NO: 2733156 - DNA, 25 bp, Homo sapien
gacattggatttgcctcgcgggccc

SEQ ID NO: 2733157 - DNA, 25 bp, Homo sapien
cggtcgctggaacccttgtgagtga

SEQ ID NO: 2733158 - DNA, 25 bp, Homo sapien
ttctggcagtcatggaccgggaaga

SEQ ID NO: 2733159 - DNA, 25 bp, Homo sapien
tcacgaatgcaatgccagcaaagta

SEQ ID NO: 2733160 - DNA, 25 bp, Homo sapien
tgtttcaagcggaggagtcctgagt

SEQ ID NO: 2733161 - DNA, 25 bp, Homo sapien
ggctagaaaagagcgccgaaccttc

SEQ ID NO: 2733162 - DNA, 25 bp, Homo sapien
aggctagaaaagagcgccgaacctt

SEQ ID NO: 2733163 - DNA, 25 bp, Homo sapien
gagcgccgaaccttcaggtctgcca

SEQ ID NO: 2733164 - DNA, 25 bp, Homo sapien
gaaaagagcgccgaaccttcaggtc

SEQ ID NO: 2733165 - DNA, 25 bp, Homo sapien
gaggacttgatggtaaacataacgg

SEQ ID NO: 2733166 - DNA, 25 bp, Homo sapien
ccgaaagaggacttgatggtaaaca

SEQ ID NO: 2733167 - DNA, 25 bp, Homo sapien
tgacttcgtccgaaagaggacttga

SEQ ID NO: 2733168 - DNA, 25 bp, Homo sapien
cctgggtgacttcgtccgaaagagg

SEQ ID NO: 2733169 - DNA, 25 bp, Homo sapien
tgtagaccatatcagcttcctgctt

SEQ ID NO: 2733170 - DNA, 25 bp, Homo sapien
ttttgcagggctacgaggagggtcc

SEQ ID NO: 2733171 - DNA, 25 bp, Homo sapien
tcagcgtcgttttgcagggctacga

SEQ ID NO: 2733172 - DNA, 25 bp, Homo sapien
gagagcttgcacactgtcagcgtcg

SEQ ID NO: 2733173 - DNA, 25 bp, Homo sapien
tcctcgcgcgcgcctgtgagcgcgc

SEQ ID NO: 2733174 - DNA, 25 bp, Homo sapien
tcccgccacggcgtcctcgcgcgtc

SEQ ID NO: 2733175 - DNA, 25 bp, Homo sapien
caccggaaacgcttctcccgccacg

SEQ ID NO: 2733176 - DNA, 25 bp, Homo sapien
cgcgcgtccccggagcgcgtcctcg

SEQ ID NO: 2733177 - DNA, 25 bp, Homo sapien
ctggctgggcctgccgcccgcgact

SEQ ID NO: 2733178 - DNA, 25 bp, Homo sapien
gctgggcctgccgcccgcgactcac

SEQ ID NO: 2733179 - DNA, 25 bp, Homo sapien
ggctgggcctgccgcccgcgactca

SEQ ID NO: 2733180 - DNA, 25 bp, Homo sapien
tggctgggcctgccgcccgcgactc

SEQ ID NO: 2733181 - DNA, 25 bp, Homo sapien
tggtactgacgggtcaggagggccg

SEQ ID NO: 2733182 - DNA, 25 bp, Homo sapien
ctggtactgacgggtcaggagggcc

SEQ ID NO: 2733183 - DNA, 25 bp, Homo sapien
gccgggttgtggggcgggactgctg

SEQ ID NO: 2733184 - DNA, 25 bp, Homo sapien
ttgtggggcgggactgctgcgggca

SEQ ID NO: 2733185 - DNA, 25 bp, Homo sapien
acacggagcgctccttacgcacggg

SEQ ID NO: 2733186 - DNA, 25 bp, Homo sapien
aggatgcgccgagacgcgccctgtg

SEQ ID NO: 2733187 - DNA, 25 bp, Homo sapien
ctagcaagcgcgctgacacggagcg

SEQ ID NO: 2733188 - DNA, 25 bp, Homo sapien
ggctgaggaggatgcgccgagacgc

SEQ ID NO: 2733189 - DNA, 25 bp, Homo sapien
ggcaagacttctttcacgcatgaac

SEQ ID NO: 2733190 - DNA, 25 bp, Homo sapien
tgcactccaggtaaattgatccatt

SEQ ID NO: 2733191 - DNA, 25 bp, Homo sapien
tgacttccaccttcaagctcaggag

SEQ ID NO: 2733192 - DNA, 25 bp, Homo sapien
tacagactaatcaggaatgccacat

SEQ ID NO: 2733193 - DNA, 25 bp, Homo sapien
ttgagcccaagagttggagctgtag

SEQ ID NO: 2733194 - DNA, 25 bp, Homo sapien
tgtagtgagctatcatcatgccgct

SEQ ID NO: 2733195 - DNA, 25 bp, Homo sapien
gcagtggggtgtggggatcgcttga

SEQ ID NO: 2733196 - DNA, 25 bp, Homo sapien
cccaagagttggagctgtagtgagc

SEQ ID NO: 2733197 - DNA, 25 bp, Homo sapien
ccatcgaggttccttgatgttaatg

SEQ ID NO: 2733198 - DNA, 25 bp, Homo sapien
gaagaaatgattggctcgtccaatg

SEQ ID NO: 2733199 - DNA, 25 bp, Homo sapien
cactctcgagttgttcgttggttaa

SEQ ID NO: 2733200 - DNA, 25 bp, Homo sapien
gaaagtgctttgatcccatcgaggt

SEQ ID NO: 2733201 - DNA, 25 bp, Homo sapien
tataggcgtgcatcaccatactcgg

SEQ ID NO: 2733202 - DNA, 25 bp, Homo sapien
gattataggcgtgcatcaccatact

SEQ ID NO: 2733203 - DNA, 25 bp, Homo sapien
ttataggcgtgcatcaccatactcg

SEQ ID NO: 2733204 - DNA, 25 bp, Homo sapien
taggcgtgcatcaccatactcggct

SEQ ID NO: 2733205 - DNA, 25 bp, Homo sapien
ttggctggcctgcatcagttgagag

SEQ ID NO: 2733206 - DNA, 25 bp, Homo sapien
taatatgaaaatgtggaccgagcac

SEQ ID NO: 2733207 - DNA, 25 bp, Homo sapien
taatcttgggtagagcaaccgtccc

SEQ ID NO: 2733208 - DNA, 25 bp, Homo sapien
taccaatctcctagtgttgggcata

SEQ ID NO: 2733209 - DNA, 25 bp, Homo sapien
aacaacaaataatatggcaattgct

SEQ ID NO: 2733210 - DNA, 25 bp, Homo sapien
taatatggcaattgctcatttcaaa

SEQ ID NO: 2733211 - DNA, 25 bp, Homo sapien
caacaaataatatggcaattgctca

SEQ ID NO: 2733212 - DNA, 25 bp, Homo sapien
tcatttcaaatatctccccagtgtc

SEQ ID NO: 2733213 - DNA, 25 bp, Homo sapien
ctgtaagaccaggaggaacaattcc

SEQ ID NO: 2733214 - DNA, 25 bp, Homo sapien
taagaccaggaggaacaattccttg

SEQ ID NO: 2733215 - DNA, 25 bp, Homo sapien
tgtaagaccaggaggaacaattcct

SEQ ID NO: 2733216 - DNA, 25 bp, Homo sapien
aagaccaggaggaacaattccttgc

SEQ ID NO: 2733217 - DNA, 25 bp, Homo sapien
tcatagatgtactttgctctccaca

SEQ ID NO: 2733218 - DNA, 25 bp, Homo sapien
gatgtactttgctctccacaattca

SEQ ID NO: 2733219 - DNA, 25 bp, Homo sapien
ctgaatcatagatgtactttgctct

SEQ ID NO: 2733220 - DNA, 25 bp, Homo sapien
gaatcatagatgtactttgctctcc

SEQ ID NO: 2733221 - DNA, 25 bp, Homo sapien
tgggctgacattcttcctatcaaaa

SEQ ID NO: 2733222 - DNA, 25 bp, Homo sapien
catacaacctgtgatggtcatgttc

SEQ ID NO: 2733223 - DNA, 25 bp, Homo sapien
tgggaacctgggctgacattcttcc

SEQ ID NO: 2733224 - DNA, 25 bp, Homo sapien
tcatcatacaacctgtgatggtcat

SEQ ID NO: 2733225 - DNA, 25 bp, Homo sapien
gccagaacagcacagccggcgtagt

SEQ ID NO: 2733226 - DNA, 25 bp, Homo sapien
cacttctgttggtgtaattgacgac

SEQ ID NO: 2733227 - DNA, 25 bp, Homo sapien
aattgacgacggcattgaaggactg

SEQ ID NO: 2733228 - DNA, 25 bp, Homo sapien
actggttaatccactgccagaacag

SEQ ID NO: 2733229 - DNA, 25 bp, Homo sapien
tcacttatcagaggccaggccggtg

SEQ ID NO: 2733230 - DNA, 25 bp, Homo sapien
tccaaaggcacgagtaatgtctgag

SEQ ID NO: 2733231 - DNA, 25 bp, Homo sapien
ttggtgtctgtcaactcaggcaggg

SEQ ID NO: 2733232 - DNA, 25 bp, Homo sapien
gatataaagttcacaccgccatggt

SEQ ID NO: 2733233 - DNA, 25 bp, Homo sapien
tgttgctacggcaccagttgttgca

SEQ ID NO: 2733234 - DNA, 25 bp, Homo sapien
gagtcctagagctgttgctacggca

SEQ ID NO: 2733235 - DNA, 25 bp, Homo sapien
gcagaaacgtaagctgttcccaact

SEQ ID NO: 2733236 - DNA, 25 bp, Homo sapien
cttggtcaatgcattgagtcctaga

SEQ ID NO: 2733237 - DNA, 25 bp, Homo sapien
gcaattagcagcagctacggcagca

SEQ ID NO: 2733238 - DNA, 25 bp, Homo sapien
aacgtcctatcagtggtgagacatg

SEQ ID NO: 2733239 - DNA, 25 bp, Homo sapien
caaagggaacaaaacgtcctatcag

SEQ ID NO: 2733240 - DNA, 25 bp, Homo sapien
cagcagctacggcagcaaagggaac

SEQ ID NO: 2733241 - DNA, 25 bp, Homo sapien
actaacttcaatctatgctcatgtg

SEQ ID NO: 2733242 - DNA, 25 bp, Homo sapien
ttcaaagggtggacacactaacttc

SEQ ID NO: 2733243 - DNA, 25 bp, Homo sapien
tcaggaacaatatgattcaaagggt

SEQ ID NO: 2733244 - DNA, 25 bp, Homo sapien
catgtgacagtgtgccggccaattt

SEQ ID NO: 2733245 - DNA, 25 bp, Homo sapien
catccgtgacgggaatgccaacttt

SEQ ID NO: 2733246 - DNA, 25 bp, Homo sapien
gctgccatgagaatcctggacacga

SEQ ID NO: 2733247 - DNA, 25 bp, Homo sapien
gcttgtttcgcagcgttcgccgact

SEQ ID NO: 2733248 - DNA, 25 bp, Homo sapien
tggacacgacaacttgcgtgatggc

SEQ ID NO: 2733249 - DNA, 25 bp, Homo sapien
ggcaatttccactaagaggtgtgat

SEQ ID NO: 2733250 - DNA, 25 bp, Homo sapien
tgaacgctggttcaacctgtattta

SEQ ID NO: 2733251 - DNA, 25 bp, Homo sapien
gatccgtgaacgctggttcaacctg

SEQ ID NO: 2733252 - DNA, 25 bp, Homo sapien
ttctggttcacggatccgtgaacgc

SEQ ID NO: 2733253 - DNA, 25 bp, Homo sapien
gttctagactaattgggcaacatac

SEQ ID NO: 2733254 - DNA, 25 bp, Homo sapien
ctagactaattgggcaacataccaa

SEQ ID NO: 2733255 - DNA, 25 bp, Homo sapien
cagaagctggagccgcaacctcgat

SEQ ID NO: 2733256 - DNA, 25 bp, Homo sapien
gcagaagctggagccgcaacctcga

SEQ ID NO: 2733257 - DNA, 25 bp, Homo sapien
ttccaaagtgttcataatgaatgga

SEQ ID NO: 2733258 - DNA, 25 bp, Homo sapien
gcaaataatctatacggtttgaaat

SEQ ID NO: 2733259 - DNA, 25 bp, Homo sapien
ggctaacctgttactcaaaagagag

SEQ ID NO: 2733260 - DNA, 25 bp, Homo sapien
ggtgggcatgtgcaaactacgtgct

SEQ ID NO: 2733261 - DNA, 25 bp, Homo sapien
ttttgacggaaaggctctttgcaca

SEQ ID NO: 2733262 - DNA, 25 bp, Homo sapien
ctgtggctcatgcagagggttttga

SEQ ID NO: 2733263 - DNA, 25 bp, Homo sapien
cagccagcttagttaggagtcaaca

SEQ ID NO: 2733264 - DNA, 25 bp, Homo sapien
ggagcagcatcgtcaaggaaactag

SEQ ID NO: 2733265 - DNA, 25 bp, Homo sapien
caacatgcatgggaggcataccctg

SEQ ID NO: 2733266 - DNA, 25 bp, Homo sapien
gggcccctctcctcaaaagatagaa

SEQ ID NO: 2733267 - DNA, 25 bp, Homo sapien
ttgaatgggtgcactcatccatggg

SEQ ID NO: 2733268 - DNA, 25 bp, Homo sapien
caacttgaatgggtgcactcatcca

SEQ ID NO: 2733269 - DNA, 25 bp, Homo sapien
tgggtgcactcatccatgggaacct

SEQ ID NO: 2733270 - DNA, 25 bp, Homo sapien
cagaagccaactaacccaacttgaa

SEQ ID NO: 2733271 - DNA, 25 bp, Homo sapien
acagggcacaacacaggggtgtagc

SEQ ID NO: 2733272 - DNA, 25 bp, Homo sapien
cagggcacaacacaggggtgtagca

SEQ ID NO: 2733273 - DNA, 25 bp, Homo sapien
aacagggcacaacacaggggtgtag

SEQ ID NO: 2733274 - DNA, 25 bp, Homo sapien
agggcacaacacaggggtgtagcaa

SEQ ID NO: 2733275 - DNA, 25 bp, Homo sapien
tccttttaagagaccctggcttcag

SEQ ID NO: 2733276 - DNA, 25 bp, Homo sapien
aaatggaataatggcacctgcacct

SEQ ID NO: 2733277 - DNA, 25 bp, Homo sapien
gagctgggtgcatctgaaattagac

SEQ ID NO: 2733278 - DNA, 25 bp, Homo sapien
gcatttgccagtggattggaccata

SEQ ID NO: 2733279 - DNA, 25 bp, Homo sapien
cagtttgcgatgagaggcgtgcaca

SEQ ID NO: 2733280 - DNA, 25 bp, Homo sapien
aacgccagttagtcctgttctcaca

SEQ ID NO: 2733281 - DNA, 25 bp, Homo sapien
tagaaaatgccgatttaacgccagt

SEQ ID NO: 2733282 - DNA, 25 bp, Homo sapien
ggctggagacctgatgtagaaaatg

SEQ ID NO: 2733283 - DNA, 25 bp, Homo sapien
caggtagagggatctgacagcatta

SEQ ID NO: 2733284 - DNA, 25 bp, Homo sapien
gattaaagaccatatgttcgggacc

SEQ ID NO: 2733285 - DNA, 25 bp, Homo sapien
caaggtggagttctcgatcaggtag

SEQ ID NO: 2733286 - DNA, 25 bp, Homo sapien
tctagaacagaacacctcatccaaa

SEQ ID NO: 2733287 - DNA, 25 bp, Homo sapien
ggctcttcagtaggctccaaggtga

SEQ ID NO: 2733288 - DNA, 25 bp, Homo sapien
accacacgctttctgagggccttga

SEQ ID NO: 2733289 - DNA, 25 bp, Homo sapien
gaagggctcctgtccatgaggttta

SEQ ID NO: 2733290 - DNA, 25 bp, Homo sapien
caaaacagggtcatgcttggatcaa

SEQ ID NO: 2733291 - DNA, 25 bp, Homo sapien
cacttgttcacataggagacgggaa

SEQ ID NO: 2733292 - DNA, 25 bp, Homo sapien
caacaatgaatggactataggtaca

SEQ ID NO: 2733293 - DNA, 25 bp, Homo sapien
ttcagcatagtggttaaatctgcag

SEQ ID NO: 2733294 - DNA, 25 bp, Homo sapien
tgtgacacccttgtctaaaaagttc

SEQ ID NO: 2733295 - DNA, 25 bp, Homo sapien
tgataatggctatgacttacagctc

SEQ ID NO: 2733296 - DNA, 25 bp, Homo sapien
gctgggccagacgttatgcatttta

SEQ ID NO: 2733297 - DNA, 25 bp, Homo sapien
gcttccttaatgactatctggccta

SEQ ID NO: 2733298 - DNA, 25 bp, Homo sapien
tgttaaaggcccaagtctgatcttg

SEQ ID NO: 2733299 - DNA, 25 bp, Homo sapien
taatcccgctgagagataaccactg

SEQ ID NO: 2733300 - DNA, 25 bp, Homo sapien
ggtgaaatctcttattgccggcaag

SEQ ID NO: 2733301 - DNA, 25 bp, Homo sapien
tgtatggtgatgacactctcaggcc

SEQ ID NO: 2733302 - DNA, 25 bp, Homo sapien
catgcggctagaaaacgagatcacg

SEQ ID NO: 2733303 - DNA, 25 bp, Homo sapien
taagggagaaatgacagggttatta

SEQ ID NO: 2733304 - DNA, 25 bp, Homo sapien
ggataagggagaaatgacagggtta

SEQ ID NO: 2733305 - DNA, 25 bp, Homo sapien
gataagggagaaatgacagggttat

SEQ ID NO: 2733306 - DNA, 25 bp, Homo sapien
ataagggagaaatgacagggttatt

SEQ ID NO: 2733307 - DNA, 25 bp, Homo sapien
ggatcttagcttgcaactcggcctc

SEQ ID NO: 2733308 - DNA, 25 bp, Homo sapien
cacgcgtcgcaattcaggatggctc

SEQ ID NO: 2733309 - DNA, 25 bp, Homo sapien
tacaatcccttattgaagtacacgc

SEQ ID NO: 2733310 - DNA, 25 bp, Homo sapien
actcggcctccaagcttgtcacaga

SEQ ID NO: 2733311 - DNA, 25 bp, Homo sapien
tgagggctggtatatcgtctttgaa

SEQ ID NO: 2733312 - DNA, 25 bp, Homo sapien
taagggagtatcaggcacttggccc

SEQ ID NO: 2733313 - DNA, 25 bp, Homo sapien
gagcacctattctatgcctaccagt

SEQ ID NO: 2733314 - DNA, 25 bp, Homo sapien
ccaggtgctctgttaaagtagcagc

SEQ ID NO: 2733315 - DNA, 25 bp, Homo sapien
tccttgatttgcaatgggagtgaga

SEQ ID NO: 2733316 - DNA, 25 bp, Homo sapien
gcaatgggagtgagatgaaaattca

SEQ ID NO: 2733317 - DNA, 25 bp, Homo sapien
atagattagcccagagcttttgtat

SEQ ID NO: 2733318 - DNA, 25 bp, Homo sapien
tcactgctgagatctccttgatttg

SEQ ID NO: 2733319 - DNA, 25 bp, Homo sapien
gagtggcccaaagcttcagatctat

SEQ ID NO: 2733320 - DNA, 25 bp, Homo sapien
tgaaatggagctacacactacctgg

SEQ ID NO: 2733321 - DNA, 25 bp, Homo sapien
gaattcacagatatagagctcacgg

SEQ ID NO: 2733322 - DNA, 25 bp, Homo sapien
cactttataaagagacgcgtcgagg

SEQ ID NO: 2733323 - DNA, 25 bp, Homo sapien
tttctaaaagatcggcaaggattgc

SEQ ID NO: 2733324 - DNA, 25 bp, Homo sapien
taatacatggcctccaacactggca

SEQ ID NO: 2733325 - DNA, 25 bp, Homo sapien
gagtctgaagcatcaaaaaacaacg

SEQ ID NO: 2733326 - DNA, 25 bp, Homo sapien
ctggcaagacgctgtgctaatactg

SEQ ID NO: 2733327 - DNA, 25 bp, Homo sapien
ctgttaagaaagtgtcctgttacct

SEQ ID NO: 2733328 - DNA, 25 bp, Homo sapien
agtcacttagtgagggcatgcgcag

SEQ ID NO: 2733329 - DNA, 25 bp, Homo sapien
gggcatgcgcagtaggataaagctc

SEQ ID NO: 2733330 - DNA, 25 bp, Homo sapien
gtagaacagagacgaaacttcaagt

SEQ ID NO: 2733331 - DNA, 25 bp, Homo sapien
caggagactcttaccactgtcagtg

SEQ ID NO: 2733332 - DNA, 25 bp, Homo sapien
tgttctcatcagtgtcccgtccgtg

SEQ ID NO: 2733333 - DNA, 25 bp, Homo sapien
acagagctgcgctccaggagactct

SEQ ID NO: 2733334 - DNA, 25 bp, Homo sapien
tacaaatgtcctaccctgatcatct

SEQ ID NO: 2733335 - DNA, 25 bp, Homo sapien
tagggcattagcactaactctcacc

SEQ ID NO: 2733336 - DNA, 25 bp, Homo sapien
tgagagcatgaccaaaatttagggc

SEQ ID NO: 2733337 - DNA, 25 bp, Homo sapien
ccaccgcgtgctttcttacttagat

SEQ ID NO: 2733338 - DNA, 25 bp, Homo sapien
tcttacttagatgagagcatgacca

SEQ ID NO: 2733339 - DNA, 25 bp, Homo sapien
gacggaatgtgctaaatacataatg

SEQ ID NO: 2733340 - DNA, 25 bp, Homo sapien
tgaacttcctgcaaattggacggaa

SEQ ID NO: 2733341 - DNA, 25 bp, Homo sapien
gcagtccttattgatttcctcgttg

SEQ ID NO: 2733342 - DNA, 25 bp, Homo sapien
atttgctgaactgatttggctgtgt

SEQ ID NO: 2733343 - DNA, 25 bp, Homo sapien
ccctggcttcagggtgaggcccaga

SEQ ID NO: 2733344 - DNA, 25 bp, Homo sapien
gtctcccgttcaccccacacagagc

SEQ ID NO: 2733345 - DNA, 25 bp, Homo sapien
ccagctccatcaacgggacctggat

SEQ ID NO: 2733346 - DNA, 25 bp, Homo sapien
atggaactgtctcccgttcacccca

SEQ ID NO: 2733347 - DNA, 25 bp, Homo sapien
tctcagggaaggtcgccccctttga

SEQ ID NO: 2733348 - DNA, 25 bp, Homo sapien
cagatcagctgaatcggctttggca

SEQ ID NO: 2733349 - DNA, 25 bp, Homo sapien
tgaatcggctttggcaatccagtgg

SEQ ID NO: 2733350 - DNA, 25 bp, Homo sapien
ttaacagaagaatggccctcctctc

SEQ ID NO: 2733351 - DNA, 25 bp, Homo sapien
agtatgggaaaccactggacacagg

SEQ ID NO: 2733352 - DNA, 25 bp, Homo sapien
tgggagcccgagcagatccaagatt

SEQ ID NO: 2733353 - DNA, 25 bp, Homo sapien
ttgtgcgatgacagccagtatggga

SEQ ID NO: 2733354 - DNA, 25 bp, Homo sapien
cattgccagctaatggttggtgtag

SEQ ID NO: 2733355 - DNA, 25 bp, Homo sapien
tgtgagcccgcccttgaccgggcaa

SEQ ID NO: 2733356 - DNA, 25 bp, Homo sapien
gggcaaccgccacctgtgcagatat

SEQ ID NO: 2733357 - DNA, 25 bp, Homo sapien
tccctcctcatctcgccgactctga

SEQ ID NO: 2733358 - DNA, 25 bp, Homo sapien
gccacctgtgcagatattggctgag

SEQ ID NO: 2733359 - DNA, 25 bp, Homo sapien
tccgcccccaactcgctcctccttg

SEQ ID NO: 2733360 - DNA, 25 bp, Homo sapien
cgtctccgcccccaactcgctcctc

SEQ ID NO: 2733361 - DNA, 25 bp, Homo sapien
tctccgcccccaactcgctcctcct

SEQ ID NO: 2733362 - DNA, 25 bp, Homo sapien
cctcgtctccgcccccaactcgctc

SEQ ID NO: 2733363 - DNA, 25 bp, Homo sapien
gctgccgcgggtattggctccgcac

SEQ ID NO: 2733364 - DNA, 25 bp, Homo sapien
ggctgcgctccgggcagggatgcag

SEQ ID NO: 2733365 - DNA, 25 bp, Homo sapien
tgctgctgccgcgggtattggctcc

SEQ ID NO: 2733366 - DNA, 25 bp, Homo sapien
cgcgggtattggctccgcacccggt

SEQ ID NO: 2733367 - DNA, 25 bp, Homo sapien
gatataaagccgacccgcgtcccga

SEQ ID NO: 2733368 - DNA, 25 bp, Homo sapien
ctgtttcggcgcaagtgcactttcc

SEQ ID NO: 2733369 - DNA, 25 bp, Homo sapien
caaatccacccttcgcgggcaaagg

SEQ ID NO: 2733370 - DNA, 25 bp, Homo sapien
cgacagacacatcgccgcgagaaaa

SEQ ID NO: 2733371 - DNA, 25 bp, Homo sapien
gatgaaggcaggtcgttctggtttc

SEQ ID NO: 2733372 - DNA, 25 bp, Homo sapien
aggcaggtcgttctggtttcctgag

SEQ ID NO: 2733373 - DNA, 25 bp, Homo sapien
cgctgcctgttgtggctccggtcat

SEQ ID NO: 2733374 - DNA, 25 bp, Homo sapien
tccggtcatcggtcatccggcagcg

SEQ ID NO: 2733375 - DNA, 25 bp, Homo sapien
aggcaaatccacgtccagatgtccc

SEQ ID NO: 2733376 - DNA, 25 bp, Homo sapien
caggcaaatccacgtccagatgtcc

SEQ ID NO: 2733377 - DNA, 25 bp, Homo sapien
gcaaatccacgtccagatgtcccca

SEQ ID NO: 2733378 - DNA, 25 bp, Homo sapien
aaatccacgtccagatgtccccagc

SEQ ID NO: 2733379 - DNA, 25 bp, Homo sapien
agctgcagagtactggccttcatcc

SEQ ID NO: 2733380 - DNA, 25 bp, Homo sapien
agtacacacatcagctctgccgagg

SEQ ID NO: 2733381 - DNA, 25 bp, Homo sapien
tcagaaggccccttatgatcggcat

SEQ ID NO: 2733382 - DNA, 25 bp, Homo sapien
ggttgctcaggctaaacacttaggc

SEQ ID NO: 2733383 - DNA, 25 bp, Homo sapien
gaagttttgagacaggtcctgacca

SEQ ID NO: 2733384 - DNA, 25 bp, Homo sapien
gatcaaactccagtcctcagacggt

SEQ ID NO: 2733385 - DNA, 25 bp, Homo sapien
gacggtcccctgaagagctagcttc

SEQ ID NO: 2733386 - DNA, 25 bp, Homo sapien
gaaaagcaaggcctcgaagccaggt

SEQ ID NO: 2733387 - DNA, 25 bp, Homo sapien
ccaggttttgcatagaatccgaggc

SEQ ID NO: 2733388 - DNA, 25 bp, Homo sapien
cagaagagctgttggtacccggtgc

SEQ ID NO: 2733389 - DNA, 25 bp, Homo sapien
ttaagaccagagagatggcgacccg

SEQ ID NO: 2733390 - DNA, 25 bp, Homo sapien
aaacaattggtcaggttgcggagcc

SEQ ID NO: 2733391 - DNA, 25 bp, Homo sapien
tgttcagcgcagcatacaggatggg

SEQ ID NO: 2733392 - DNA, 25 bp, Homo sapien
gagttcctagaacataaaccagcac

SEQ ID NO: 2733393 - DNA, 25 bp, Homo sapien
tcctgtgcaccaatggctagggcta

SEQ ID NO: 2733394 - DNA, 25 bp, Homo sapien
ggcccttgccaagtcctctgagaat

SEQ ID NO: 2733395 - DNA, 25 bp, Homo sapien
taaacagcagctcccttaatcattc

SEQ ID NO: 2733396 - DNA, 25 bp, Homo sapien
acctttcctaaaatctacagtatca

SEQ ID NO: 2733397 - DNA, 25 bp, Homo sapien
aatctacagtatcatgcccaaactc

SEQ ID NO: 2733398 - DNA, 25 bp, Homo sapien
ctacagtatcatgcccaaactcagc

SEQ ID NO: 2733399 - DNA, 25 bp, Homo sapien
ttcacctttcctaaaatctacagta

SEQ ID NO: 2733400 - DNA, 25 bp, Homo sapien
tgggtcagttccacagaccagcatt

SEQ ID NO: 2733401 - DNA, 25 bp, Homo sapien
cataattcctggcatgtggtgggaa

SEQ ID NO: 2733402 - DNA, 25 bp, Homo sapien
gaatgaatgggtcagttccacagac

SEQ ID NO: 2733403 - DNA, 25 bp, Homo sapien
tcagttccacagaccagcattctgg

SEQ ID NO: 2733404 - DNA, 25 bp, Homo sapien
tgggtctgcaatatccacgcaagct

SEQ ID NO: 2733405 - DNA, 25 bp, Homo sapien
ttcagtgccggagcaaccaggcttg

SEQ ID NO: 2733406 - DNA, 25 bp, Homo sapien
gaccaactctctatgcgatgaggaa

SEQ ID NO: 2733407 - DNA, 25 bp, Homo sapien
gagggcccaggatccaagtctatgg

SEQ ID NO: 2733408 - DNA, 25 bp, Homo sapien
gatggagcagacagggagcggctgg

SEQ ID NO: 2733409 - DNA, 25 bp, Homo sapien
tgtgagtgatggagcagacagggag

SEQ ID NO: 2733410 - DNA, 25 bp, Homo sapien
gtgatggagcagacagggagcggct

SEQ ID NO: 2733411 - DNA, 25 bp, Homo sapien
gagtgatggagcagacagggagcgg

SEQ ID NO: 2733412 - DNA, 25 bp, Homo sapien
tcttgctgatgtgggttcgaggaac

SEQ ID NO: 2733413 - DNA, 25 bp, Homo sapien
cctggcccatccttaaatgctggtg

SEQ ID NO: 2733414 - DNA, 25 bp, Homo sapien
tctacaccctctgccttagtttgct

SEQ ID NO: 2733415 - DNA, 25 bp, Homo sapien
gaggaactaataaccttccgatgtc

SEQ ID NO: 2733416 - DNA, 25 bp, Homo sapien
ggtttaccacttcaacaaatatctg

SEQ ID NO: 2733417 - DNA, 25 bp, Homo sapien
gacagtgagggaggtttaccacttc

SEQ ID NO: 2733418 - DNA, 25 bp, Homo sapien
atctaccttctcaccgccagcctgt

SEQ ID NO: 2733419 - DNA, 25 bp, Homo sapien
tctggctttatttcaccatctacct

SEQ ID NO: 2733420 - DNA, 25 bp, Homo sapien
cctgtaagagccttgtgggcaggaa

SEQ ID NO: 2733421 - DNA, 25 bp, Homo sapien
ggctgtctccggtagccggtaccca

SEQ ID NO: 2733422 - DNA, 25 bp, Homo sapien
ggttatatggcaattcaggttttct

SEQ ID NO: 2733423 - DNA, 25 bp, Homo sapien
tccttttgagtagcgttttagtggc

SEQ ID NO: 2733424 - DNA, 25 bp, Homo sapien
tcttcccaagtcagttttggcaagt

SEQ ID NO: 2733425 - DNA, 25 bp, Homo sapien
tcctataagctttgatgtgcagtat

SEQ ID NO: 2733426 - DNA, 25 bp, Homo sapien
gctaatcttttctgtatggctccag

SEQ ID NO: 2733427 - DNA, 25 bp, Homo sapien
ggctccagttttagtgtatgagctg

SEQ ID NO: 2733428 - DNA, 25 bp, Homo sapien
taatcttttctgtatggctccagtt

SEQ ID NO: 2733429 - DNA, 25 bp, Homo sapien
agtgtatgagctgccaaagtgagcc

SEQ ID NO: 2733430 - DNA, 25 bp, Homo sapien
ctggtagaactcatttgcaaaacca

SEQ ID NO: 2733431 - DNA, 25 bp, Homo sapien
tggtagaactcatttgcaaaaccaa

SEQ ID NO: 2733432 - DNA, 25 bp, Homo sapien
tgtggctcctcagacagtggctccc

SEQ ID NO: 2733433 - DNA, 25 bp, Homo sapien
catgtgtctctgaaggaacctgagc

SEQ ID NO: 2733434 - DNA, 25 bp, Homo sapien
cgtagtgcaggacagtgctggcttc

SEQ ID NO: 2733435 - DNA, 25 bp, Homo sapien
ttgctggagcacgtagtgcaggaca

SEQ ID NO: 2733436 - DNA, 25 bp, Homo sapien
ggtcatacggccaccagagagtgct

SEQ ID NO: 2733437 - DNA, 25 bp, Homo sapien
tataagggttacgagagctcatgcc

SEQ ID NO: 2733438 - DNA, 25 bp, Homo sapien
caacgtgagctttgaacccatggga

SEQ ID NO: 2733439 - DNA, 25 bp, Homo sapien
taggtctagacagcctcagagggca

SEQ ID NO: 2733440 - DNA, 25 bp, Homo sapien
tcggatggagtgacacagagtagat

SEQ ID NO: 2733441 - DNA, 25 bp, Homo sapien
tccatgaggactgaggcaaacggag

SEQ ID NO: 2733442 - DNA, 25 bp, Homo sapien
aggcggcagtgggtctcaagctccc

SEQ ID NO: 2733443 - DNA, 25 bp, Homo sapien
gcgcctctgaaactcccaggtggag

SEQ ID NO: 2733444 - DNA, 25 bp, Homo sapien
ccatgtgacaaactctcctctaggg

SEQ ID NO: 2733445 - DNA, 25 bp, Homo sapien
ttcaaggaatcacgcaaacagccat

SEQ ID NO: 2733446 - DNA, 25 bp, Homo sapien
ggttagacagacaacggtcaccaga

SEQ ID NO: 2733447 - DNA, 25 bp, Homo sapien
ggagagacagacaacgttcaaggaa

SEQ ID NO: 2733448 - DNA, 25 bp, Homo sapien
ctccaggtccttctgatcagccagc

SEQ ID NO: 2733449 - DNA, 25 bp, Homo sapien
tcccaactacctgggtctccaggtc

SEQ ID NO: 2733450 - DNA, 25 bp, Homo sapien
aggtccttctgatcagccagccctt

SEQ ID NO: 2733451 - DNA, 25 bp, Homo sapien
aagcttctcccaactacctgggtct

SEQ ID NO: 2733452 - DNA, 25 bp, Homo sapien
tgccggcacaggattctggacgttg

SEQ ID NO: 2733453 - DNA, 25 bp, Homo sapien
ctagttaacgatcacagtttttgct

SEQ ID NO: 2733454 - DNA, 25 bp, Homo sapien
tggacgttgtagttcccaggcccca

SEQ ID NO: 2733455 - DNA, 25 bp, Homo sapien
gttaacgatcacagtttttgcttct

SEQ ID NO: 2733456 - DNA, 25 bp, Homo sapien
gttttggtgcatgcccatctttcag

SEQ ID NO: 2733457 - DNA, 25 bp, Homo sapien
cccttgtaacgttttggtgcatgcc

SEQ ID NO: 2733458 - DNA, 25 bp, Homo sapien
gattcctttgggttcccagatgtag

SEQ ID NO: 2733459 - DNA, 25 bp, Homo sapien
tcaggtgggcacgagctttgattcc

SEQ ID NO: 2733460 - DNA, 25 bp, Homo sapien
ccacactcgagcactgcgcctccct

SEQ ID NO: 2733461 - DNA, 25 bp, Homo sapien
ctcccacactcgagcactgcgcctc

SEQ ID NO: 2733462 - DNA, 25 bp, Homo sapien
acactcgagcactgcgcctccctcc

SEQ ID NO: 2733463 - DNA, 25 bp, Homo sapien
tcccacactcgagcactgcgcctcc

SEQ ID NO: 2733464 - DNA, 25 bp, Homo sapien
ccacccgaaccagggtactcaggag

SEQ ID NO: 2733465 - DNA, 25 bp, Homo sapien
acaccacccgaaccagggtactcag

SEQ ID NO: 2733466 - DNA, 25 bp, Homo sapien
cgaaccagggtactcaggagccttt

SEQ ID NO: 2733467 - DNA, 25 bp, Homo sapien
cccgaaccagggtactcaggagcct

SEQ ID NO: 2733468 - DNA, 25 bp, Homo sapien
tagggcatctctaggaggactagaa

SEQ ID NO: 2733469 - DNA, 25 bp, Homo sapien
cctgcactggaagtagggcatctct

SEQ ID NO: 2733470 - DNA, 25 bp, Homo sapien
gcactggaagtagggcatctctagg

SEQ ID NO: 2733471 - DNA, 25 bp, Homo sapien
gaagtagggcatctctaggaggact

SEQ ID NO: 2733472 - DNA, 25 bp, Homo sapien
tgacgttggtcgtaatttttggatc

SEQ ID NO: 2733473 - DNA, 25 bp, Homo sapien
tcagaggccatcggctgcttccttg

SEQ ID NO: 2733474 - DNA, 25 bp, Homo sapien
tgtcagaggccatcggctgcttcct

SEQ ID NO: 2733475 - DNA, 25 bp, Homo sapien
acgttggtcgtaatttttggatcat

SEQ ID NO: 2733476 - DNA, 25 bp, Homo sapien
cgcagtgccccttgataagtataag

SEQ ID NO: 2733477 - DNA, 25 bp, Homo sapien
taagaatgcgctaagagttggaagc

SEQ ID NO: 2733478 - DNA, 25 bp, Homo sapien
tggaagcatgaataaatcatcttgt

SEQ ID NO: 2733479 - DNA, 25 bp, Homo sapien
tatttaatatgtgcatcccattggg

SEQ ID NO: 2733480 - DNA, 25 bp, Homo sapien
taagggcagacccgctcccagggag

SEQ ID NO: 2733481 - DNA, 25 bp, Homo sapien
ggccgaggttctggcgcgtttctcc

SEQ ID NO: 2733482 - DNA, 25 bp, Homo sapien
cgtttctgtccgcctcgaatgcctg

SEQ ID NO: 2733483 - DNA, 25 bp, Homo sapien
tcctgcctgggctagcacacgtgca

SEQ ID NO: 2733484 - DNA, 25 bp, Homo sapien
ggatgcgggcaccttcagtcgctga

SEQ ID NO: 2733485 - DNA, 25 bp, Homo sapien
gatgcgggcaccttcagtcgctgag

SEQ ID NO: 2733486 - DNA, 25 bp, Homo sapien
cttcagtcgctgagcagagcagata

SEQ ID NO: 2733487 - DNA, 25 bp, Homo sapien
gatgccctgaacactatccagggct

SEQ ID NO: 2733488 - DNA, 25 bp, Homo sapien
aggggatgccctgaacactatccag

SEQ ID NO: 2733489 - DNA, 25 bp, Homo sapien
gggatgccctgaacactatccaggg

SEQ ID NO: 2733490 - DNA, 25 bp, Homo sapien
cactatccagggctttagtgctgag

SEQ ID NO: 2733491 - DNA, 25 bp, Homo sapien
tgtctttaggcaagtcctttcactc

SEQ ID NO: 2733492 - DNA, 25 bp, Homo sapien
tgtgtgtctttaggcaagtcctttc

SEQ ID NO: 2733493 - DNA, 25 bp, Homo sapien
ttaggcaagtcctttcactctctga

SEQ ID NO: 2733494 - DNA, 25 bp, Homo sapien
tctttaggcaagtcctttcactctc

SEQ ID NO: 2733495 - DNA, 25 bp, Homo sapien
cccataagatggttgggatcctggg

SEQ ID NO: 2733496 - DNA, 25 bp, Homo sapien
tggccggccacctggaagaggagct

SEQ ID NO: 2733497 - DNA, 25 bp, Homo sapien
ggttgactcctccacccataagatg

SEQ ID NO: 2733498 - DNA, 25 bp, Homo sapien
cacactggattactggtcgtgggtg

SEQ ID NO: 2733499 - DNA, 25 bp, Homo sapien
ctgaagctcactggtgttctcattc

SEQ ID NO: 2733500 - DNA, 25 bp, Homo sapien
tgccacagtataaccttgagacctg

SEQ ID NO: 2733501 - DNA, 25 bp, Homo sapien
gagacagtgggtctcctcaaggagc

SEQ ID NO: 2733502 - DNA, 25 bp, Homo sapien
tccaagtaacacagagggtcaatgc

SEQ ID NO: 2733503 - DNA, 25 bp, Homo sapien
tgagacctgcagtccctataggccc

SEQ ID NO: 2733504 - DNA, 25 bp, Homo sapien
agtgaattctttcccgcccctgatg

SEQ ID NO: 2733505 - DNA, 25 bp, Homo sapien
tagttttggccaacggcctgtgaga

SEQ ID NO: 2733506 - DNA, 25 bp, Homo sapien
gcccctgatggtgagataggtcatg

SEQ ID NO: 2733507 - DNA, 25 bp, Homo sapien
cttgtgctgcaagaacgtgaactca

SEQ ID NO: 2733508 - DNA, 25 bp, Homo sapien
ggcaagtttctgtgtctcgagcacc

SEQ ID NO: 2733509 - DNA, 25 bp, Homo sapien
gtttctgtgtctcgagcacctctgg

SEQ ID NO: 2733510 - DNA, 25 bp, Homo sapien
tgatgctggcaagtttctgtgtctc

SEQ ID NO: 2733511 - DNA, 25 bp, Homo sapien
tgtctcgagcacctctggttcctgg

SEQ ID NO: 2733512 - DNA, 25 bp, Homo sapien
agcagaaggttcagcggctctgatg

SEQ ID NO: 2733513 - DNA, 25 bp, Homo sapien
cagaaggttcagcggctctgatggt

SEQ ID NO: 2733514 - DNA, 25 bp, Homo sapien
tgactggcttccaccaacagcagaa

SEQ ID NO: 2733515 - DNA, 25 bp, Homo sapien
cagcagaaggttcagcggctctgat

SEQ ID NO: 2733516 - DNA, 25 bp, Homo sapien
ccagagagcacggagggccgcagcc

SEQ ID NO: 2733517 - DNA, 25 bp, Homo sapien
atgagagagaccgctaggcagtgac

SEQ ID NO: 2733518 - DNA, 25 bp, Homo sapien
cacgctggtggatgagagagaccgc

SEQ ID NO: 2733519 - DNA, 25 bp, Homo sapien
acggagggccgcagccacgctggtg

SEQ ID NO: 2733520 - DNA, 25 bp, Homo sapien
gcctgcctgcagagctatgtatgag

SEQ ID NO: 2733521 - DNA, 25 bp, Homo sapien
gtatgagggtccctcgaagagacca

SEQ ID NO: 2733522 - DNA, 25 bp, Homo sapien
ctatgtatgagggtccctcgaagag

SEQ ID NO: 2733523 - DNA, 25 bp, Homo sapien
tgagggtccctcgaagagaccacca

SEQ ID NO: 2733524 - DNA, 25 bp, Homo sapien
tagctcacattaaagaggcaagcag

SEQ ID NO: 2733525 - DNA, 25 bp, Homo sapien
tcttagctcacattaaagaggcaag

SEQ ID NO: 2733526 - DNA, 25 bp, Homo sapien
cattaaagaggcaagcagagtgcta

SEQ ID NO: 2733527 - DNA, 25 bp, Homo sapien
tcacattaaagaggcaagcagagtg

SEQ ID NO: 2733528 - DNA, 25 bp, Homo sapien
aaaggtcttgcacagtacgccccga

SEQ ID NO: 2733529 - DNA, 25 bp, Homo sapien
ctggcaaaggtcttgcacagtacgc

SEQ ID NO: 2733530 - DNA, 25 bp, Homo sapien
gcaaaggtcttgcacagtacgcccc

SEQ ID NO: 2733531 - DNA, 25 bp, Homo sapien
aggtcttgcacagtacgccccgaat

SEQ ID NO: 2733532 - DNA, 25 bp, Homo sapien
agtgtgtcctccttcatggccctcc

SEQ ID NO: 2733533 - DNA, 25 bp, Homo sapien
tgtgtcctccttcatggccctccat

SEQ ID NO: 2733534 - DNA, 25 bp, Homo sapien
gcagtgtgtcctccttcatggccct

SEQ ID NO: 2733535 - DNA, 25 bp, Homo sapien
cagcagtgtgtcctccttcatggcc

SEQ ID NO: 2733536 - DNA, 25 bp, Homo sapien
ccaaacaagcaaactgactgttttg

SEQ ID NO: 2733537 - DNA, 25 bp, Homo sapien
ggtcagtgccacccaaacaagcaaa

SEQ ID NO: 2733538 - DNA, 25 bp, Homo sapien
cccaaacaagcaaactgactgtttt

SEQ ID NO: 2733539 - DNA, 25 bp, Homo sapien
aaacaagcaaactgactgttttgtg

SEQ ID NO: 2733540 - DNA, 25 bp, Homo sapien
cataaggcctagtagggcctggagt

SEQ ID NO: 2733541 - DNA, 25 bp, Homo sapien
ggcataaggcctagtagggcctgga

SEQ ID NO: 2733542 - DNA, 25 bp, Homo sapien
ctggcataaggcctagtagggcctg

SEQ ID NO: 2733543 - DNA, 25 bp, Homo sapien
gctggcataaggcctagtagggcct

SEQ ID NO: 2733544 - DNA, 25 bp, Homo sapien
tggtcttgagactcattcatcttgg

SEQ ID NO: 2733545 - DNA, 25 bp, Homo sapien
gtcttgagactcattcatcttggtg

SEQ ID NO: 2733546 - DNA, 25 bp, Homo sapien
cttggtcttgagactcattcatctt

SEQ ID NO: 2733547 - DNA, 25 bp, Homo sapien
gagactcattcatcttggtggcccc

SEQ ID NO: 2733548 - DNA, 25 bp, Homo sapien
gattgatccagcaaacgaaggcctg

SEQ ID NO: 2733549 - DNA, 25 bp, Homo sapien
gatccagcaaacgaaggcctggctg

SEQ ID NO: 2733550 - DNA, 25 bp, Homo sapien
agctttaagattgatccagcaaacg

SEQ ID NO: 2733551 - DNA, 25 bp, Homo sapien
taagattgatccagcaaacgaaggc

SEQ ID NO: 2733552 - DNA, 25 bp, Homo sapien
tcctcagatcttctcgatatctctt

SEQ ID NO: 2733553 - DNA, 25 bp, Homo sapien
caatttcacctttgagtggcgtcgg

SEQ ID NO: 2733554 - DNA, 25 bp, Homo sapien
agtttgtcaactggagttggaacat

SEQ ID NO: 2733555 - DNA, 25 bp, Homo sapien
tgcaagagcagtgcctttggtgccc

SEQ ID NO: 2733556 - DNA, 25 bp, Homo sapien
atatccacagttcatatctccacac

SEQ ID NO: 2733557 - DNA, 25 bp, Homo sapien
ccacaccccctcaaagatgcacata

SEQ ID NO: 2733558 - DNA, 25 bp, Homo sapien
tctccacaccccctcaaagatgcac

SEQ ID NO: 2733559 - DNA, 25 bp, Homo sapien
tcatatccacagttcatatctccac

SEQ ID NO: 2733560 - DNA, 25 bp, Homo sapien
ctacaagctggtccccatggtcacg

SEQ ID NO: 2733561 - DNA, 25 bp, Homo sapien
tacaagctggtccccatggtcacgt

SEQ ID NO: 2733562 - DNA, 25 bp, Homo sapien
acaagctggtccccatggtcacgtt

SEQ ID NO: 2733563 - DNA, 25 bp, Homo sapien
tttgtattcagagagggatattcag

SEQ ID NO: 2733564 - DNA, 25 bp, Homo sapien
gaggttaagcccttgttcaggataa

SEQ ID NO: 2733565 - DNA, 25 bp, Homo sapien
agaggttaagcccttgttcaggata

SEQ ID NO: 2733566 - DNA, 25 bp, Homo sapien
cagagagggatattcagactcagag

SEQ ID NO: 2733567 - DNA, 25 bp, Homo sapien
tctgggccactcaacctccagttgt

SEQ ID NO: 2733568 - DNA, 25 bp, Homo sapien
tcaggcccaagaacaggaggaattt

SEQ ID NO: 2733569 - DNA, 25 bp, Homo sapien
tctcctgcacatgaaggcctaggat

SEQ ID NO: 2733570 - DNA, 25 bp, Homo sapien
ggcctaggatatttgtgtcctccaa

SEQ ID NO: 2733571 - DNA, 25 bp, Homo sapien
ctccggcccgactccacgaggtggt

SEQ ID NO: 2733572 - DNA, 25 bp, Homo sapien
tgcaattccgccaggcgagctggag

SEQ ID NO: 2733573 - DNA, 25 bp, Homo sapien
tggcggtccctgcaaccgtctgagc

SEQ ID NO: 2733574 - DNA, 25 bp, Homo sapien
ggtggttccttctgctattccagct

SEQ ID NO: 2733575 - DNA, 25 bp, Homo sapien
tgactcgggtaacctgcagtggttg

SEQ ID NO: 2733576 - DNA, 25 bp, Homo sapien
gcagtggttgtccttatggccgttt

SEQ ID NO: 2733577 - DNA, 25 bp, Homo sapien
catctgagcccctagaggttttcgg

SEQ ID NO: 2733578 - DNA, 25 bp, Homo sapien
accgactcaggctcgaccatctgag

SEQ ID NO: 2733579 - DNA, 25 bp, Homo sapien
gccgccggctctggttagcgtgcct

SEQ ID NO: 2733580 - DNA, 25 bp, Homo sapien
ttagcccacggcagaatttgcatgc

SEQ ID NO: 2733581 - DNA, 25 bp, Homo sapien
gaatttgcatgcagcgctcctggct

SEQ ID NO: 2733582 - DNA, 25 bp, Homo sapien
ggcctggcttgggaagatgtgacaa

SEQ ID NO: 2733583 - DNA, 25 bp, Homo sapien
gggcctgcttcatgacgaagtccat

SEQ ID NO: 2733584 - DNA, 25 bp, Homo sapien
aagggcctgcttcatgacgaagtcc

SEQ ID NO: 2733585 - DNA, 25 bp, Homo sapien
tccaagggcctgcttcatgacgaag

SEQ ID NO: 2733586 - DNA, 25 bp, Homo sapien
caagggcctgcttcatgacgaagtc

SEQ ID NO: 2733587 - DNA, 25 bp, Homo sapien
ctccatgcgcgcgtgcttggcctta

SEQ ID NO: 2733588 - DNA, 25 bp, Homo sapien
cttatctcggatctgctgccggacc

SEQ ID NO: 2733589 - DNA, 25 bp, Homo sapien
tgcgcgcgtgcttggccttacgctc

SEQ ID NO: 2733590 - DNA, 25 bp, Homo sapien
tatctcggatctgctgccggacctt

SEQ ID NO: 2733591 - DNA, 25 bp, Homo sapien
catgcactggactgtctggagtagg

SEQ ID NO: 2733592 - DNA, 25 bp, Homo sapien
gcacgcactaacagacatgcactgg

SEQ ID NO: 2733593 - DNA, 25 bp, Homo sapien
ttggagtacctactacgcgcattct

SEQ ID NO: 2733594 - DNA, 25 bp, Homo sapien
gatctgcagtacgaaatggtggacc

SEQ ID NO: 2733595 - DNA, 25 bp, Homo sapien
ggcaggtatttgagcaccgtgtcca

SEQ ID NO: 2733596 - DNA, 25 bp, Homo sapien
cgggcaggtatttgagcaccgtgtc

SEQ ID NO: 2733597 - DNA, 25 bp, Homo sapien
cggcccgggcaggtatttgagcacc

SEQ ID NO: 2733598 - DNA, 25 bp, Homo sapien
ttgggccgggtcaggctcccctcgc

SEQ ID NO: 2733599 - DNA, 25 bp, Homo sapien
gggtcaccacactagcacgacctta

SEQ ID NO: 2733600 - DNA, 25 bp, Homo sapien
tgcaggtggataccctgggatgaag

SEQ ID NO: 2733601 - DNA, 25 bp, Homo sapien
cactgagggttagaggccaaaggtc

SEQ ID NO: 2733602 - DNA, 25 bp, Homo sapien
caaaaagaagtagtaacaggtggag

SEQ ID NO: 2733603 - DNA, 25 bp, Homo sapien
gtctctccaggtgggggctggggaa

SEQ ID NO: 2733604 - DNA, 25 bp, Homo sapien
ctctccaggtgggggctggggaagg

SEQ ID NO: 2733605 - DNA, 25 bp, Homo sapien
tctctccaggtgggggctggggaag

SEQ ID NO: 2733606 - DNA, 25 bp, Homo sapien
ggatccatttgaagggaccagcttg

SEQ ID NO: 2733607 - DNA, 25 bp, Homo sapien
catttgaagggaccagcttggcagg

SEQ ID NO: 2733608 - DNA, 25 bp, Homo sapien
acaaatgagctaaagtccacaaagg

SEQ ID NO: 2733609 - DNA, 25 bp, Homo sapien
cacaaatgagctaaagtccacaaag

SEQ ID NO: 2733610 - DNA, 25 bp, Homo sapien
aatggaggtgttccccatggcatag

SEQ ID NO: 2733611 - DNA, 25 bp, Homo sapien
atcgctacccgatggctccaagtgt

SEQ ID NO: 2733612 - DNA, 25 bp, Homo sapien
cctggcagccccttgactgagcaag

SEQ ID NO: 2733613 - DNA, 25 bp, Homo sapien
cccttgactgagcaagctgggccca

SEQ ID NO: 2733614 - DNA, 25 bp, Homo sapien
tggaagcgcatggacaggacggggt

SEQ ID NO: 2733615 - DNA, 25 bp, Homo sapien
ctggaagcgcatggacaggacgggg

SEQ ID NO: 2733616 - DNA, 25 bp, Homo sapien
tttggccaggaagcgtcctcctggg

SEQ ID NO: 2733617 - DNA, 25 bp, Homo sapien
gctttggccaggaagcgtcctcctg

SEQ ID NO: 2733618 - DNA, 25 bp, Homo sapien
caggaagcgtcctcctggggaccgt

SEQ ID NO: 2733619 - DNA, 25 bp, Homo sapien
gccaggaagcgtcctcctggggacc

SEQ ID NO: 2733620 - DNA, 25 bp, Homo sapien
caaggtctcccgttggaggtggcca

SEQ ID NO: 2733621 - DNA, 25 bp, Homo sapien
tgggaggactctaggccaaggacaa

SEQ ID NO: 2733622 - DNA, 25 bp, Homo sapien
tggacgccttctgtcaagtgggaat

SEQ ID NO: 2733623 - DNA, 25 bp, Homo sapien
taaacacgagatggatagcacacac

SEQ ID NO: 2733624 - DNA, 25 bp, Homo sapien
gcagtctaactgatatggctttacc

SEQ ID NO: 2733625 - DNA, 25 bp, Homo sapien
catatggattgttttgtctcgtgtt

SEQ ID NO: 2733626 - DNA, 25 bp, Homo sapien
tattggaaacggacagagaagacac

SEQ ID NO: 2733627 - DNA, 25 bp, Homo sapien
tggaaaacctgcagaatgcaaactg

SEQ ID NO: 2733628 - DNA, 25 bp, Homo sapien
ttgagaatgaccatcctgcccagga

SEQ ID NO: 2733629 - DNA, 25 bp, Homo sapien
agctggagctgtcgaggccctgctc

SEQ ID NO: 2733630 - DNA, 25 bp, Homo sapien
tctctgaacacttgtgtccaagtgg

SEQ ID NO: 2733631 - DNA, 25 bp, Homo sapien
tgcccaggataacagacacaaagag

SEQ ID NO: 2733632 - DNA, 25 bp, Homo sapien
tgtgtgccaggcagaaattttctcc

SEQ ID NO: 2733633 - DNA, 25 bp, Homo sapien
ggactgcactgtggagaacaccagg

SEQ ID NO: 2733634 - DNA, 25 bp, Homo sapien
tatctggttcgactgggttctcttg

SEQ ID NO: 2733635 - DNA, 25 bp, Homo sapien
tctgtgtccttgcatcactgtcgag

SEQ ID NO: 2733636 - DNA, 25 bp, Homo sapien
gccaggtctgcatcagtaatgatag

SEQ ID NO: 2733637 - DNA, 25 bp, Homo sapien
ggtgcacgctcccttgaacctcatt

SEQ ID NO: 2733638 - DNA, 25 bp, Homo sapien
gagcaactctcacgtattctgtgca

SEQ ID NO: 2733639 - DNA, 25 bp, Homo sapien
taagtgtgttgcatgcacactgccc

SEQ ID NO: 2733640 - DNA, 25 bp, Homo sapien
cacagccgcctttttgcttctctct

SEQ ID NO: 2733641 - DNA, 25 bp, Homo sapien
gatccacagccgcctttttgcttct

SEQ ID NO: 2733642 - DNA, 25 bp, Homo sapien
tccacagccgcctttttgcttctct

SEQ ID NO: 2733643 - DNA, 25 bp, Homo sapien
gcgatccacagccgcctttttgctt

SEQ ID NO: 2733644 - DNA, 25 bp, Homo sapien
ctgggatggtgtctcgacttcctga

SEQ ID NO: 2733645 - DNA, 25 bp, Homo sapien
gatggtgtctcgacttcctgattcc

SEQ ID NO: 2733646 - DNA, 25 bp, Homo sapien
gcacagctttgcagttaaggacacc

SEQ ID NO: 2733647 - DNA, 25 bp, Homo sapien
gttaaggacaccttctgggagcttc

SEQ ID NO: 2733648 - DNA, 25 bp, Homo sapien
cctgccagctgggtactagggctat

SEQ ID NO: 2733649 - DNA, 25 bp, Homo sapien
cctgtggaaccctagaggatggagc

SEQ ID NO: 2733650 - DNA, 25 bp, Homo sapien
caatgacacagcacggatgtgggaa

SEQ ID NO: 2733651 - DNA, 25 bp, Homo sapien
caggcactgacacattgaaaggaag

SEQ ID NO: 2733652 - DNA, 25 bp, Homo sapien
tcaggaagcggcacccagaggggct

SEQ ID NO: 2733653 - DNA, 25 bp, Homo sapien
cgtgcgacttgacagcattctcagg

SEQ ID NO: 2733654 - DNA, 25 bp, Homo sapien
cattctcaggaagcggcacccagag

SEQ ID NO: 2733655 - DNA, 25 bp, Homo sapien
tgcgacttgacagcattctcaggaa

SEQ ID NO: 2733656 - DNA, 25 bp, Homo sapien
gaatgctgagtggtgtcctttcttt

SEQ ID NO: 2733657 - DNA, 25 bp, Homo sapien
ccaggcttctgcacgtggcccgtgg

SEQ ID NO: 2733658 - DNA, 25 bp, Homo sapien
gctgagtggtgtcctttctttggga

SEQ ID NO: 2733659 - DNA, 25 bp, Homo sapien
tgagtggtgtcctttctttgggacc

SEQ ID NO: 2733660 - DNA, 25 bp, Homo sapien
gtaatttattatggagtaacaggta

SEQ ID NO: 2733661 - DNA, 25 bp, Homo sapien
gctaaaattcaagagcgcttcctga

SEQ ID NO: 2733662 - DNA, 25 bp, Homo sapien
agctaaaattcaagagcgcttcctg

SEQ ID NO: 2733663 - DNA, 25 bp, Homo sapien
tggagtaacaggtaactactgcaaa

SEQ ID NO: 2733664 - DNA, 25 bp, Homo sapien
cgtgtttctggggtatatcagagtg

SEQ ID NO: 2733665 - DNA, 25 bp, Homo sapien
tctggggtatatcagagtgggtcca

SEQ ID NO: 2733666 - DNA, 25 bp, Homo sapien
ggtccagcatcaaaggggccccagc

SEQ ID NO: 2733667 - DNA, 25 bp, Homo sapien
gggtccagcatcaaaggggccccag

SEQ ID NO: 2733668 - DNA, 25 bp, Homo sapien
gcatgtgacacgtgtctgtgtggct

SEQ ID NO: 2733669 - DNA, 25 bp, Homo sapien
gagacacactgcatggcccactgac

SEQ ID NO: 2733670 - DNA, 25 bp, Homo sapien
tggagacacactgcatggcccactg

SEQ ID NO: 2733671 - DNA, 25 bp, Homo sapien
gtgatcgcatgtgacacgtgtctgt

SEQ ID NO: 2733672 - DNA, 25 bp, Homo sapien
tttggagaccactgacggtgggacc

SEQ ID NO: 2733673 - DNA, 25 bp, Homo sapien
ttatcacctggctcccttaggaggg

SEQ ID NO: 2733674 - DNA, 25 bp, Homo sapien
gaggaatcctcgctgtgtgcagtca

SEQ ID NO: 2733675 - DNA, 25 bp, Homo sapien
caagaacttgctcagggatggacat

SEQ ID NO: 2733676 - DNA, 25 bp, Homo sapien
tgtcctcaaggcgtgctcatgtttg

SEQ ID NO: 2733677 - DNA, 25 bp, Homo sapien
caaggcgtgctcatgtttgacccgg

SEQ ID NO: 2733678 - DNA, 25 bp, Homo sapien
cttgctggtgtcctcaaggcgtgct

SEQ ID NO: 2733679 - DNA, 25 bp, Homo sapien
gctcatgtttgacccgggatgtccc

SEQ ID NO: 2733680 - DNA, 25 bp, Homo sapien
gatagaaaggtggatgggacaccat

SEQ ID NO: 2733681 - DNA, 25 bp, Homo sapien
tcacattggcatcgatgtggcactg

SEQ ID NO: 2733682 - DNA, 25 bp, Homo sapien
tctcacattggcatcgatgtggcac

SEQ ID NO: 2733683 - DNA, 25 bp, Homo sapien
acattggcatcgatgtggcactggg

SEQ ID NO: 2733684 - DNA, 25 bp, Homo sapien
gacagtatccatgggtctcactttt

SEQ ID NO: 2733685 - DNA, 25 bp, Homo sapien
ctgggacagtatccatgggtctcac

SEQ ID NO: 2733686 - DNA, 25 bp, Homo sapien
gggacagtatccatgggtctcactt

SEQ ID NO: 2733687 - DNA, 25 bp, Homo sapien
tgggacagtatccatgggtctcact

SEQ ID NO: 2733688 - DNA, 25 bp, Homo sapien
tacaggcagtgaggcgctggaatcc

SEQ ID NO: 2733689 - DNA, 25 bp, Homo sapien
tggcggatgcccaaacactcatcag

SEQ ID NO: 2733690 - DNA, 25 bp, Homo sapien
cactcatcaggcaagacaggtctgt

SEQ ID NO: 2733691 - DNA, 25 bp, Homo sapien
gtagtgaaggactttggtgatgccc

SEQ ID NO: 2733692 - DNA, 25 bp, Homo sapien
tacaggtagggaactcaaagactgg

SEQ ID NO: 2733693 - DNA, 25 bp, Homo sapien
gaatctatatcgtctatcacccaag

SEQ ID NO: 2733694 - DNA, 25 bp, Homo sapien
cagggctaaaatctcgcagagggac

SEQ ID NO: 2733695 - DNA, 25 bp, Homo sapien
cagtgattagcttgaggatggatgc

SEQ ID NO: 2733696 - DNA, 25 bp, Homo sapien
catggtgataagtggtacggaggga

SEQ ID NO: 2733697 - DNA, 25 bp, Homo sapien
tattatattctgtgggaggataaag

SEQ ID NO: 2733698 - DNA, 25 bp, Homo sapien
gacatggtgataagtggtacggagg

SEQ ID NO: 2733699 - DNA, 25 bp, Homo sapien
tattctgtgggaggataaagacaac

SEQ ID NO: 2733700 - DNA, 25 bp, Homo sapien
gagaagttgacaggataactgcaac

SEQ ID NO: 2733701 - DNA, 25 bp, Homo sapien
gttgacaggataactgcaaccctag

SEQ ID NO: 2733702 - DNA, 25 bp, Homo sapien
accctaggggcatctctgtgttgaa

SEQ ID NO: 2733703 - DNA, 25 bp, Homo sapien
tgacaggataactgcaaccctaggg

SEQ ID NO: 2733704 - DNA, 25 bp, Homo sapien
tggtaggtcttcccagatcatctgg

SEQ ID NO: 2733705 - DNA, 25 bp, Homo sapien
aatggtaggtcttcccagatcatct

SEQ ID NO: 2733706 - DNA, 25 bp, Homo sapien
ggtaggtcttcccagatcatctggc

SEQ ID NO: 2733707 - DNA, 25 bp, Homo sapien
atggtaggtcttcccagatcatctg

SEQ ID NO: 2733708 - DNA, 25 bp, Homo sapien
agaaatcatccagtagtttttattg

SEQ ID NO: 2733709 - DNA, 25 bp, Homo sapien
aaatcatccagtagtttttattgtt

SEQ ID NO: 2733710 - DNA, 25 bp, Homo sapien
gttcaagcccccgctgcattttatt

SEQ ID NO: 2733711 - DNA, 25 bp, Homo sapien
gagtcagagcctgcttcaatagaaa

SEQ ID NO: 2733712 - DNA, 25 bp, Homo sapien
ctttgtcggttgttttctgtgcaga

SEQ ID NO: 2733713 - DNA, 25 bp, Homo sapien
actttgtcggttgttttctgtgcag

SEQ ID NO: 2733714 - DNA, 25 bp, Homo sapien
tttgtcggttgttttctgtgcagaa

SEQ ID NO: 2733715 - DNA, 25 bp, Homo sapien
tcactttgtcggttgttttctgtgc

SEQ ID NO: 2733716 - DNA, 25 bp, Homo sapien
gtgcctgtttggatgtcagagccca

SEQ ID NO: 2733717 - DNA, 25 bp, Homo sapien
agcctgtgcctgtttggatgtcaga

SEQ ID NO: 2733718 - DNA, 25 bp, Homo sapien
gggtgggaagcctgtgcctgtttgg

SEQ ID NO: 2733719 - DNA, 25 bp, Homo sapien
ggtgggaagcctgtgcctgtttgga

SEQ ID NO: 2733720 - DNA, 25 bp, Homo sapien
ctttaattttattcagcgtgcttat

SEQ ID NO: 2733721 - DNA, 25 bp, Homo sapien
tggatctcttcccaccgactttaat

SEQ ID NO: 2733722 - DNA, 25 bp, Homo sapien
taattttattcagcgtgcttatcat

SEQ ID NO: 2733723 - DNA, 25 bp, Homo sapien
tgttaatgtagcctccctttgcccc

SEQ ID NO: 2733724 - DNA, 25 bp, Homo sapien
gacagagaagctttagcttggagac

SEQ ID NO: 2733725 - DNA, 25 bp, Homo sapien
ctggttctttgtgggaaagatgtca

SEQ ID NO: 2733726 - DNA, 25 bp, Homo sapien
gatgtcacactgctgatgggcagaa

SEQ ID NO: 2733727 - DNA, 25 bp, Homo sapien
ttctttgtgggaaagatgtcacact

SEQ ID NO: 2733728 - DNA, 25 bp, Homo sapien
gaggtgagtgcaggacaggggacag

SEQ ID NO: 2733729 - DNA, 25 bp, Homo sapien
cgtcagtgtcctggacgtgaagatg

SEQ ID NO: 2733730 - DNA, 25 bp, Homo sapien
agtgtcctggacgtgaagatggtca

SEQ ID NO: 2733731 - DNA, 25 bp, Homo sapien
tgggggggcgttgctgcagcttgga

SEQ ID NO: 2733732 - DNA, 25 bp, Homo sapien
ttctctcggagttggtgggcaccct

SEQ ID NO: 2733733 - DNA, 25 bp, Homo sapien
gagttaactcgcgtggactctgcag

SEQ ID NO: 2733734 - DNA, 25 bp, Homo sapien
ctctgcagtgcgagtagtgacccca

SEQ ID NO: 2733735 - DNA, 25 bp, Homo sapien
aaattgtaaacgtctctggtcaggc

SEQ ID NO: 2733736 - DNA, 25 bp, Homo sapien
ttactaagtaagcagacgcgggcac

SEQ ID NO: 2733737 - DNA, 25 bp, Homo sapien
aactcggaatcgttaagtgtgaagc

SEQ ID NO: 2733738 - DNA, 25 bp, Homo sapien
cacgcgctgcataccgggatttgta

SEQ ID NO: 2733739 - DNA, 25 bp, Homo sapien
cgtcgcgctacgtgcttgggatgca

SEQ ID NO: 2733740 - DNA, 25 bp, Homo sapien
ttcttagtttgattttgatcagctc

SEQ ID NO: 2733741 - DNA, 25 bp, Homo sapien
aatttcttagtttgattttgatcag

SEQ ID NO: 2733742 - DNA, 25 bp, Homo sapien
aaatttcttagtttgattttgatca

SEQ ID NO: 2733743 - DNA, 25 bp, Homo sapien
atttcttagtttgattttgatcagc

SEQ ID NO: 2733744 - DNA, 25 bp, Homo sapien
tatggcctgattctgccttgaatga

SEQ ID NO: 2733745 - DNA, 25 bp, Homo sapien
tacccatatgttgaggctttgccag

SEQ ID NO: 2733746 - DNA, 25 bp, Homo sapien
caaaggacttatacttcaagactcc

SEQ ID NO: 2733747 - DNA, 25 bp, Homo sapien
tgaatgaccctgaagtccccaagac

SEQ ID NO: 2733748 - DNA, 25 bp, Homo sapien
attctaattatcttccagttgttct

SEQ ID NO: 2733749 - DNA, 25 bp, Homo sapien
taattatcttccagttgttctgctt

SEQ ID NO: 2733750 - DNA, 25 bp, Homo sapien
tctaattatcttccagttgttctgc

SEQ ID NO: 2733751 - DNA, 25 bp, Homo sapien
gataattctaattatcttccagttg

SEQ ID NO: 2733752 - DNA, 25 bp, Homo sapien
agggccgctcgttgtcttcccctga

SEQ ID NO: 2733753 - DNA, 25 bp, Homo sapien
caggaggtctttgtcccgaagtcag

SEQ ID NO: 2733754 - DNA, 25 bp, Homo sapien
tgggaagggccgctcgttgtcttcc

SEQ ID NO: 2733755 - DNA, 25 bp, Homo sapien
gtctttagagacacatgatgggggt

SEQ ID NO: 2733756 - DNA, 25 bp, Homo sapien
tcaggcacctgggcactgagaatgt

SEQ ID NO: 2733757 - DNA, 25 bp, Homo sapien
ctgcctcaggcacctgggcactgag

SEQ ID NO: 2733758 - DNA, 25 bp, Homo sapien
gcacctgggcactgagaatgttcat

SEQ ID NO: 2733759 - DNA, 25 bp, Homo sapien
ggcacctgggcactgagaatgttca

SEQ ID NO: 2733760 - DNA, 25 bp, Homo sapien
tgctgtagttcccagcagggaaaac

SEQ ID NO: 2733761 - DNA, 25 bp, Homo sapien
ctgctgtagttcccagcagggaaaa

SEQ ID NO: 2733762 - DNA, 25 bp, Homo sapien
tagttcccagcagggaaaacagagc

SEQ ID NO: 2733763 - DNA, 25 bp, Homo sapien
ttcccagcagggaaaacagagccat

SEQ ID NO: 2733764 - DNA, 25 bp, Homo sapien
tggtgatgaagcagatgttgacaaa

SEQ ID NO: 2733765 - DNA, 25 bp, Homo sapien
actaagtgcatacacaggaagagcc

SEQ ID NO: 2733766 - DNA, 25 bp, Homo sapien
gactaagtgcatacacaggaagagc

SEQ ID NO: 2733767 - DNA, 25 bp, Homo sapien
ggatcaggttggtgatgaagcagat

SEQ ID NO: 2733768 - DNA, 25 bp, Homo sapien
aaaggtgtccacgttggcaaaggag

SEQ ID NO: 2733769 - DNA, 25 bp, Homo sapien
tggccagcagaaaggtgtccacgtt

SEQ ID NO: 2733770 - DNA, 25 bp, Homo sapien
cacatagtggtccagtgccatgatg

SEQ ID NO: 2733771 - DNA, 25 bp, Homo sapien
tgccatgatggccagcagaaaggtg

SEQ ID NO: 2733772 - DNA, 25 bp, Homo sapien
gccgggggtgatgatggagcagtac

SEQ ID NO: 2733773 - DNA, 25 bp, Homo sapien
agccgggggtgatgatggagcagta

SEQ ID NO: 2733774 - DNA, 25 bp, Homo sapien
agagccgggggtgatgatggagcag

SEQ ID NO: 2733775 - DNA, 25 bp, Homo sapien
gagccgggggtgatgatggagcagt

SEQ ID NO: 2733776 - DNA, 25 bp, Homo sapien
gggcggaggagcagaaggccagtct

SEQ ID NO: 2733777 - DNA, 25 bp, Homo sapien
aggccagtctgctcatgatgaccgt

SEQ ID NO: 2733778 - DNA, 25 bp, Homo sapien
tctgctcatgatgaccgtgtggacc

SEQ ID NO: 2733779 - DNA, 25 bp, Homo sapien
tcatgatgaccgtgtggaccaggga

SEQ ID NO: 2733780 - DNA, 25 bp, Homo sapien
acatgtatgtgagcaggcaatcttc

SEQ ID NO: 2733781 - DNA, 25 bp, Homo sapien
caggtaggcgtcacagtagaagtgt

SEQ ID NO: 2733782 - DNA, 25 bp, Homo sapien
caatcttcatgagcaggtaggcgtc

SEQ ID NO: 2733783 - DNA, 25 bp, Homo sapien
catgagcaggtaggcgtcacagtag

SEQ ID NO: 2733784 - DNA, 25 bp, Homo sapien
gtgggagctacatatggaacatgcc

SEQ ID NO: 2733785 - DNA, 25 bp, Homo sapien
gaatccggaggatggctgcagcaat

SEQ ID NO: 2733786 - DNA, 25 bp, Homo sapien
catgccttgcgccttcttgtaggag

SEQ ID NO: 2733787 - DNA, 25 bp, Homo sapien
aatccggaggatggctgcagcaatg

SEQ ID NO: 2733788 - DNA, 25 bp, Homo sapien
aggacagttccatagaacagggtga

SEQ ID NO: 2733789 - DNA, 25 bp, Homo sapien
caggacagttccatagaacagggtg

SEQ ID NO: 2733790 - DNA, 25 bp, Homo sapien
ggacagttccatagaacagggtgac

SEQ ID NO: 2733791 - DNA, 25 bp, Homo sapien
ccaggacagttccatagaacagggt

SEQ ID NO: 2733792 - DNA, 25 bp, Homo sapien
gaaggggtttagcatagaggtcacc

SEQ ID NO: 2733793 - DNA, 25 bp, Homo sapien
cagtgtacatgatggttgctatggt

SEQ ID NO: 2733794 - DNA, 25 bp, Homo sapien
aggggtttagcatagaggtcaccac

SEQ ID NO: 2733795 - DNA, 25 bp, Homo sapien
atgaaggggtttagcatagaggtca

SEQ ID NO: 2733796 - DNA, 25 bp, Homo sapien
ttccgtcccaaacccacagccaggc

SEQ ID NO: 2733797 - DNA, 25 bp, Homo sapien
tccgtcccaaacccacagccaggcc

SEQ ID NO: 2733798 - DNA, 25 bp, Homo sapien
ccgtcccaaacccacagccaggcca

SEQ ID NO: 2733799 - DNA, 25 bp, Homo sapien
cgtcccaaacccacagccaggccat

SEQ ID NO: 2733800 - DNA, 25 bp, Homo sapien
gaagctgaagccgatggcctcagtg

SEQ ID NO: 2733801 - DNA, 25 bp, Homo sapien
tgtgaagctgaagccgatggcctca

SEQ ID NO: 2733802 - DNA, 25 bp, Homo sapien
ggtgtgaagctgaagccgatggcct

SEQ ID NO: 2733803 - DNA, 25 bp, Homo sapien
tgaagctgaagccgatggcctcagt

SEQ ID NO: 2733804 - DNA, 25 bp, Homo sapien
taatagtctaaaacttataaaatgc

SEQ ID NO: 2733805 - DNA, 25 bp, Homo sapien
ttgtgcattaatattggtaacattt

SEQ ID NO: 2733806 - DNA, 25 bp, Homo sapien
tagtatcttttattaatagtctaaa

SEQ ID NO: 2733807 - DNA, 25 bp, Homo sapien
tgttaagaacatagcttttccatct

SEQ ID NO: 2733808 - DNA, 25 bp, Homo sapien
caaagaggcatcctggctgggcctc

SEQ ID NO: 2733809 - DNA, 25 bp, Homo sapien
tgtatcatcaaagaggcatcctggc

SEQ ID NO: 2733810 - DNA, 25 bp, Homo sapien
catcaaagaggcatcctggctgggc

SEQ ID NO: 2733811 - DNA, 25 bp, Homo sapien
ctgtatcatcaaagaggcatcctgg

SEQ ID NO: 2733812 - DNA, 25 bp, Homo sapien
ctgtatcatcaaagaggcatcctgg

SEQ ID NO: 2733813 - DNA, 25 bp, Homo sapien
catcaaagaggcatcctggctgggc

SEQ ID NO: 2733814 - DNA, 25 bp, Homo sapien
tgtatcatcaaagaggcatcctggc

SEQ ID NO: 2733815 - DNA, 25 bp, Homo sapien
caaagaggcatcctggctgggcctc

SEQ ID NO: 2733816 - DNA, 25 bp, Homo sapien
tgtatcatcaaagaggcatcctggc

SEQ ID NO: 2733817 - DNA, 25 bp, Homo sapien
catcaaagaggcatcctggctgggc

SEQ ID NO: 2733818 - DNA, 25 bp, Homo sapien
ctgtatcatcaaagaggcatcctgg

SEQ ID NO: 2733819 - DNA, 25 bp, Homo sapien
caaagaggcatcctggctgggcctc

SEQ ID NO: 2733820 - DNA, 25 bp, Homo sapien
tgtatcatcaaagaggcatcctggc

SEQ ID NO: 2733821 - DNA, 25 bp, Homo sapien
catcaaagaggcatcctggctgggc

SEQ ID NO: 2733822 - DNA, 25 bp, Homo sapien
caaagaggcatcctggctgggcctc

SEQ ID NO: 2733823 - DNA, 25 bp, Homo sapien
ctgtatcatcaaagaggcatcctgg

SEQ ID NO: 2733824 - DNA, 25 bp, Homo sapien
ctgtatcatcaaagaggcatcctgg

SEQ ID NO: 2733825 - DNA, 25 bp, Homo sapien
caaagaggcatcctggctgggcctc

SEQ ID NO: 2733826 - DNA, 25 bp, Homo sapien
tgtatcatcaaagaggcatcctggc

SEQ ID NO: 2733827 - DNA, 25 bp, Homo sapien
catcaaagaggcatcctggctgggc

SEQ ID NO: 2733828 - DNA, 25 bp, Homo sapien
atcacccaggagcaagaagagagac

SEQ ID NO: 2733829 - DNA, 25 bp, Homo sapien
ctatcacccaggagcaagaagagag

SEQ ID NO: 2733830 - DNA, 25 bp, Homo sapien
cccaggagcaagaagagagacaggg

SEQ ID NO: 2733831 - DNA, 25 bp, Homo sapien
caggagcaagaagagagacaggggc

SEQ ID NO: 2733832 - DNA, 25 bp, Homo sapien
catatgcagaacgtacttgacttta

SEQ ID NO: 2733833 - DNA, 25 bp, Homo sapien
cacatatgcagaacgtacttgactt

SEQ ID NO: 2733834 - DNA, 25 bp, Homo sapien
acacatatgcagaacgtacttgact

SEQ ID NO: 2733835 - DNA, 25 bp, Homo sapien
atgcagaacgtacttgactttactc

SEQ ID NO: 2733836 - DNA, 25 bp, Homo sapien
tagccagacaccaaatgccagggtg

SEQ ID NO: 2733837 - DNA, 25 bp, Homo sapien
agccagacaccaaatgccagggtgt

SEQ ID NO: 2733838 - DNA, 25 bp, Homo sapien
ttagccagacaccaaatgccagggt

SEQ ID NO: 2733839 - DNA, 25 bp, Homo sapien
tgtttctacacatgcatgccctatg

SEQ ID NO: 2733840 - DNA, 25 bp, Homo sapien
gctaagtgactaacaagtgggaagg

SEQ ID NO: 2733841 - DNA, 25 bp, Homo sapien
aggatttgacgactcagagagctgc

SEQ ID NO: 2733842 - DNA, 25 bp, Homo sapien
cacactacttggaacagcacagcaa

SEQ ID NO: 2733843 - DNA, 25 bp, Homo sapien
tccgctggacatcaggtcgcagttt

SEQ ID NO: 2733844 - DNA, 25 bp, Homo sapien
gacatcaggcctccgctggacatca

SEQ ID NO: 2733845 - DNA, 25 bp, Homo sapien
tgcatggacatcaggcctccgctgg

SEQ ID NO: 2733846 - DNA, 25 bp, Homo sapien
tggacatcaggtcgcagtttggcat

SEQ ID NO: 2733847 - DNA, 25 bp, Homo sapien
aacgtcgggccccaagtgcacactg

SEQ ID NO: 2733848 - DNA, 25 bp, Homo sapien
tggactcaaggtggacgttggacac

SEQ ID NO: 2733849 - DNA, 25 bp, Homo sapien
cataaggccccagcggacacaaagg

SEQ ID NO: 2733850 - DNA, 25 bp, Homo sapien
tggacaacaggtcccagagggactc

SEQ ID NO: 2733851 - DNA, 25 bp, Homo sapien
ttcacttttcttatactgaatacgt

SEQ ID NO: 2733852 - DNA, 25 bp, Homo sapien
ccttctcgtactttctttgtgttct

SEQ ID NO: 2733853 - DNA, 25 bp, Homo sapien
tgaatacgtaggtcccacgtttcca

SEQ ID NO: 2733854 - DNA, 25 bp, Homo sapien
tgtcccagttggacaccaagtcaca

SEQ ID NO: 2733855 - DNA, 25 bp, Homo sapien
ccagttggacaccaagtcacatggg

SEQ ID NO: 2733856 - DNA, 25 bp, Homo sapien
cggtgtccaatgtcccagttggaca

SEQ ID NO: 2733857 - DNA, 25 bp, Homo sapien
tccaatgtcccagttggacaccaag

SEQ ID NO: 2733858 - DNA, 25 bp, Homo sapien
tcacttggtaccaatgccgtcagcc

SEQ ID NO: 2733859 - DNA, 25 bp, Homo sapien
tgccgtcagcccgtgggtatctgag

SEQ ID NO: 2733860 - DNA, 25 bp, Homo sapien
agttggactggagccacaagctgca

SEQ ID NO: 2733861 - DNA, 25 bp, Homo sapien
gcactgtgaacctggtcacttggta

SEQ ID NO: 2733862 - DNA, 25 bp, Homo sapien
tagcaacatgacttataatcctctg

SEQ ID NO: 2733863 - DNA, 25 bp, Homo sapien
ttttgtccttccgagagtttgttga

SEQ ID NO: 2733864 - DNA, 25 bp, Homo sapien
ggtctgcgatgctccccttcctgtg

SEQ ID NO: 2733865 - DNA, 25 bp, Homo sapien
tccttccgagagtttgttgagaatg

SEQ ID NO: 2733866 - DNA, 25 bp, Homo sapien
gaagccgaccgcctgactttgctgc

SEQ ID NO: 2733867 - DNA, 25 bp, Homo sapien
tgatccctggcgctgggcaatccac

SEQ ID NO: 2733868 - DNA, 25 bp, Homo sapien
ggtctgagggtctgctcctcctgga

SEQ ID NO: 2733869 - DNA, 25 bp, Homo sapien
aggatgagactcatcggctgctggc

SEQ ID NO: 2733870 - DNA, 25 bp, Homo sapien
ccacttccgcggcttcgcccttgac

SEQ ID NO: 2733871 - DNA, 25 bp, Homo sapien
tccttctaagaaccttcagtaaaga

SEQ ID NO: 2733872 - DNA, 25 bp, Homo sapien
tggattgtaagttttaagaatcttc

SEQ ID NO: 2733873 - DNA, 25 bp, Homo sapien
ctggattgtaagttttaagaatctt

SEQ ID NO: 2733874 - DNA, 25 bp, Homo sapien
caaacagagtatacagtagtacccc

SEQ ID NO: 2733875 - DNA, 25 bp, Homo sapien
gagcataaccgggaccttattagaa

SEQ ID NO: 2733876 - DNA, 25 bp, Homo sapien
tgatatctacaagtgaaccgcagta

SEQ ID NO: 2733877 - DNA, 25 bp, Homo sapien
tttcaggaccaaaacatgacgggca

SEQ ID NO: 2733878 - DNA, 25 bp, Homo sapien
gggctggctatcgtgtggatggtaa

SEQ ID NO: 2733879 - DNA, 25 bp, Homo sapien
cccaataagcacgagtgtgaacaaa

SEQ ID NO: 2733880 - DNA, 25 bp, Homo sapien
ggatggtaagagaacaccttggctg

SEQ ID NO: 2733881 - DNA, 25 bp, Homo sapien
gaacaaactggctggcctcgatgag

SEQ ID NO: 2733882 - DNA, 25 bp, Homo sapien
aaacagcttggaataacggattggc

SEQ ID NO: 2733883 - DNA, 25 bp, Homo sapien
gattggcccagaatgcatggctacc

SEQ ID NO: 2733884 - DNA, 25 bp, Homo sapien
aacggattggcccagaatgcatggc

SEQ ID NO: 2733885 - DNA, 25 bp, Homo sapien
ggcccagaatgcatggctaccaaca

SEQ ID NO: 2733886 - DNA, 25 bp, Homo sapien
atcgagtgtcaacatctggcctggg

SEQ ID NO: 2733887 - DNA, 25 bp, Homo sapien
ccagtcagatcgagtgtcaacatct

SEQ ID NO: 2733888 - DNA, 25 bp, Homo sapien
tcagatcgagtgtcaacatctggcc

SEQ ID NO: 2733889 - DNA, 25 bp, Homo sapien
tgggcccagtcagatcgagtgtcaa

SEQ ID NO: 2733890 - DNA, 25 bp, Homo sapien
tccatggggatggcaatgtacacca

SEQ ID NO: 2733891 - DNA, 25 bp, Homo sapien
ccatggggatggcaatgtacaccaa

SEQ ID NO: 2733892 - DNA, 25 bp, Homo sapien
gagaaacctggctgacaccagtgaa

SEQ ID NO: 2733893 - DNA, 25 bp, Homo sapien
ctccatggggatggcaatgtacacc

SEQ ID NO: 2733894 - DNA, 25 bp, Homo sapien
tcacgtggatgacagagatcttctt

SEQ ID NO: 2733895 - DNA, 25 bp, Homo sapien
cacgtggatgacagagatcttcttg

SEQ ID NO: 2733896 - DNA, 25 bp, Homo sapien
cgtggatgacagagatcttcttggc

SEQ ID NO: 2733897 - DNA, 25 bp, Homo sapien
ctgtcacgtggatgacagagatctt

SEQ ID NO: 2733898 - DNA, 25 bp, Homo sapien
gatatgccgtcatgcacaggtctgc

SEQ ID NO: 2733899 - DNA, 25 bp, Homo sapien
tggctggagaacttacacgactacc

SEQ ID NO: 2733900 - DNA, 25 bp, Homo sapien
gcttggccaagataatgggcgctcc

SEQ ID NO: 2733901 - DNA, 25 bp, Homo sapien
tttgcggagttcatcaccagcctcg

SEQ ID NO: 2733902 - DNA, 25 bp, Homo sapien
gaacacatattacctgtgtaaatgg

SEQ ID NO: 2733903 - DNA, 25 bp, Homo sapien
gaaggaacacatattacctgtgtaa

SEQ ID NO: 2733904 - DNA, 25 bp, Homo sapien
tgggaaggaacacatattacctgtg

SEQ ID NO: 2733905 - DNA, 25 bp, Homo sapien
aaaaaatactagaccacagatttat

SEQ ID NO: 2733906 - DNA, 25 bp, Homo sapien
gtcctctgagacaactaagctgcgt

SEQ ID NO: 2733907 - DNA, 25 bp, Homo sapien
caacgttcagttgccagaatggcag

SEQ ID NO: 2733908 - DNA, 25 bp, Homo sapien
gacaactaagctgcgtttactgcca

SEQ ID NO: 2733909 - DNA, 25 bp, Homo sapien
gaaaggcaagacctatatcatcaga

SEQ ID NO: 2733910 - DNA, 25 bp, Homo sapien
cttcgaggcaacaactataagcaca

SEQ ID NO: 2733911 - DNA, 25 bp, Homo sapien
gaggcaacaactataagcacatccc

SEQ ID NO: 2733912 - DNA, 25 bp, Homo sapien
tcgaggcaacaactataagcacatc

SEQ ID NO: 2733913 - DNA, 25 bp, Homo sapien
ggcaacaactataagcacatcccat

SEQ ID NO: 2733914 - DNA, 25 bp, Homo sapien
ccgggatgccagtgataccagtgat

SEQ ID NO: 2733915 - DNA, 25 bp, Homo sapien
tgattggcttctcacgctcgcggtg

SEQ ID NO: 2733916 - DNA, 25 bp, Homo sapien
tggcagacggtggattcccctggca

SEQ ID NO: 2733917 - DNA, 25 bp, Homo sapien
ctagggtatatatggccgggatgcc

SEQ ID NO: 2733918 - DNA, 25 bp, Homo sapien
ccttaggcaaccttggatgctaagg

SEQ ID NO: 2733919 - DNA, 25 bp, Homo sapien
cttggatgctaaggacagggggctg

SEQ ID NO: 2733920 - DNA, 25 bp, Homo sapien
tcccttaggcaaccttggatgctaa

SEQ ID NO: 2733921 - DNA, 25 bp, Homo sapien
cccttaggcaaccttggatgctaag

SEQ ID NO: 2733922 - DNA, 25 bp, Homo sapien
ctaggaaacacagagtaactgtcat

SEQ ID NO: 2733923 - DNA, 25 bp, Homo sapien
atgaacgcccaggacatcttcagat

SEQ ID NO: 2733924 - DNA, 25 bp, Homo sapien
tcagatgaagcttcctgcaccaggt

SEQ ID NO: 2733925 - DNA, 25 bp, Homo sapien
catatgaacgcccaggacatcttca

SEQ ID NO: 2733926 - DNA, 25 bp, Homo sapien
aacgcccaggacatcttcagatgaa

SEQ ID NO: 2733927 - DNA, 25 bp, Homo sapien
tgaggcaatggtcctaaagcctcga

SEQ ID NO: 2733928 - DNA, 25 bp, Homo sapien
gagattacagtagccggtcagcatg

SEQ ID NO: 2733929 - DNA, 25 bp, Homo sapien
agtagccggtcagcatgcccagcta

SEQ ID NO: 2733930 - DNA, 25 bp, Homo sapien
gaagacacttctggaaaggcacaag

SEQ ID NO: 2733931 - DNA, 25 bp, Homo sapien
tgtctctctctgtgtctttgtccac

SEQ ID NO: 2733932 - DNA, 25 bp, Homo sapien
ctttgtcaacactagaatttttcct

SEQ ID NO: 2733933 - DNA, 25 bp, Homo sapien
cactagaatttttcctcagcatagg

SEQ ID NO: 2733934 - DNA, 25 bp, Homo sapien
gaatttttcctcagcataggggtga

SEQ ID NO: 2733935 - DNA, 25 bp, Homo sapien
tagaatttttcctcagcataggggt

SEQ ID NO: 2733936 - DNA, 25 bp, Homo sapien
tataggtggagctcccgtagtcgcc

SEQ ID NO: 2733937 - DNA, 25 bp, Homo sapien
tagtcgccgtagttgccgtttcatc

SEQ ID NO: 2733938 - DNA, 25 bp, Homo sapien
catcgcctcttggtacttcttccat

SEQ ID NO: 2733939 - DNA, 25 bp, Homo sapien
ggtacttcttccatgtgctgtatag

SEQ ID NO: 2733940 - DNA, 25 bp, Homo sapien
cacattgtggaactcccaaggatgt

SEQ ID NO: 2733941 - DNA, 25 bp, Homo sapien
tgtacctttaatcgctcacagcaga

SEQ ID NO: 2733942 - DNA, 25 bp, Homo sapien
gcccaacgggcagctgtctatgaat

SEQ ID NO: 2733943 - DNA, 25 bp, Homo sapien
caaatcatgttcctctgcaggccca

SEQ ID NO: 2733944 - DNA, 25 bp, Homo sapien
tgtctctcgcatagagcccaacggg

SEQ ID NO: 2733945 - DNA, 25 bp, Homo sapien
aaaacggacctcctgccagaacatc

SEQ ID NO: 2733946 - DNA, 25 bp, Homo sapien
taactgcaaaaacggacctcctgcc

SEQ ID NO: 2733947 - DNA, 25 bp, Homo sapien
tgcaaaaacggacctcctgccagaa

SEQ ID NO: 2733948 - DNA, 25 bp, Homo sapien
aaaaacggacctcctgccagaacat

SEQ ID NO: 2733949 - DNA, 25 bp, Homo sapien
ttgggtgcactgaaggaatccgtca

SEQ ID NO: 2733950 - DNA, 25 bp, Homo sapien
cagcacgttgggtgcactgaaggaa

SEQ ID NO: 2733951 - DNA, 25 bp, Homo sapien
tgcactgaaggaatccgtcaggcag

SEQ ID NO: 2733952 - DNA, 25 bp, Homo sapien
aaggaatccgtcaggcagacttgtg

SEQ ID NO: 2733953 - DNA, 25 bp, Homo sapien
tctcgggtggacacaatggcttgcc

SEQ ID NO: 2733954 - DNA, 25 bp, Homo sapien
gagcctggcaacgtctccgagagta

SEQ ID NO: 2733955 - DNA, 25 bp, Homo sapien
tggcttgcccaaggagccttcgtca

SEQ ID NO: 2733956 - DNA, 25 bp, Homo sapien
tccgagagtatctcgggtggacaca

SEQ ID NO: 2733957 - DNA, 25 bp, Homo sapien
cttctgatggaaagcataccctttt

SEQ ID NO: 2733958 - DNA, 25 bp, Homo sapien
gagactctgattggatgcttcaggg

SEQ ID NO: 2733959 - DNA, 25 bp, Homo sapien
ttctgctataaactcctctagatga

SEQ ID NO: 2733960 - DNA, 25 bp, Homo sapien
agactctgattggatgcttcaggga

SEQ ID NO: 2733961 - DNA, 25 bp, Homo sapien
tctgctataaactcctctagatgat

SEQ ID NO: 2733962 - DNA, 25 bp, Homo sapien
cgttggtttggatgcctgtgtctgc

SEQ ID NO: 2733963 - DNA, 25 bp, Homo sapien
cagagactgtctgccctggcccatg

SEQ ID NO: 2733964 - DNA, 25 bp, Homo sapien
cttcctcagagactgtctgccctgg

SEQ ID NO: 2733965 - DNA, 25 bp, Homo sapien
gtggcttcctcagagactgtctgcc

SEQ ID NO: 2733966 - DNA, 25 bp, Homo sapien
cctcagagactgtctgccctggccc

SEQ ID NO: 2733967 - DNA, 25 bp, Homo sapien
ccagtgtgtctgggtccccctccat

SEQ ID NO: 2733968 - DNA, 25 bp, Homo sapien
tcggccagtgtgtctgggtccccct

SEQ ID NO: 2733969 - DNA, 25 bp, Homo sapien
ggccagtgtgtctgggtccccctcc

SEQ ID NO: 2733970 - DNA, 25 bp, Homo sapien
gttcggccagtgtgtctgggtcccc

SEQ ID NO: 2733971 - DNA, 25 bp, Homo sapien
ggacagctcctgaagtacatccctg

SEQ ID NO: 2733972 - DNA, 25 bp, Homo sapien
gctcctgaagtacatccctgatcag

SEQ ID NO: 2733973 - DNA, 25 bp, Homo sapien
tcctcctcgccgttgtaactggaca

SEQ ID NO: 2733974 - DNA, 25 bp, Homo sapien
tcctgaagtacatccctgatcagaa

SEQ ID NO: 2733975 - DNA, 25 bp, Homo sapien
cacgttgtggaactcccaaggatgt

SEQ ID NO: 2733976 - DNA, 25 bp, Homo sapien
catgagcaggccccttgcacgggat

SEQ ID NO: 2733977 - DNA, 25 bp, Homo sapien
aagacatgagcaggccccttgcacg

SEQ ID NO: 2733978 - DNA, 25 bp, Homo sapien
aaaagacatgagcaggccccttgca

SEQ ID NO: 2733979 - DNA, 25 bp, Homo sapien
tgagcaggccccttgcacgggatcc

SEQ ID NO: 2733980 - DNA, 25 bp, Homo sapien
cagtcaccatgtcacaacttttgta

SEQ ID NO: 2733981 - DNA, 25 bp, Homo sapien
tgtactagataaaaagcaacccttc

SEQ ID NO: 2733982 - DNA, 25 bp, Homo sapien
tataatggtgccatctcgacccacc

SEQ ID NO: 2733983 - DNA, 25 bp, Homo sapien
aaatatcctacgtattcactaacct

SEQ ID NO: 2733984 - DNA, 25 bp, Homo sapien
gagccttggtcctctagctacgcca

SEQ ID NO: 2733985 - DNA, 25 bp, Homo sapien
tacgccaacctcttcgacatgaaag

SEQ ID NO: 2733986 - DNA, 25 bp, Homo sapien
tgtggaaaggtgtgttcacagcaca

SEQ ID NO: 2733987 - DNA, 25 bp, Homo sapien
gaaggtctcagaagacagagccttg

SEQ ID NO: 2733988 - DNA, 25 bp, Homo sapien
cttcctcagagactgtctgccctgg

SEQ ID NO: 2733989 - DNA, 25 bp, Homo sapien
cagagactgtctgccctggcacatg

SEQ ID NO: 2733990 - DNA, 25 bp, Homo sapien
gtctgccctggcacatgctcctcca

SEQ ID NO: 2733991 - DNA, 25 bp, Homo sapien
catgtgaacccctgtggcttcctca

SEQ ID NO: 2733992 - DNA, 25 bp, Homo sapien
catttctcttaaggaaaatgcctct

SEQ ID NO: 2733993 - DNA, 25 bp, Homo sapien
gcatttctcttaaggaaaatgcctc

SEQ ID NO: 2733994 - DNA, 25 bp, Homo sapien
caggtcttcacttgttgacattaaa

SEQ ID NO: 2733995 - DNA, 25 bp, Homo sapien
tctttgccggcgtggctgggtccac

SEQ ID NO: 2733996 - DNA, 25 bp, Homo sapien
gccggcgtggctgggtccacctgca

SEQ ID NO: 2733997 - DNA, 25 bp, Homo sapien
ttgccggcgtggctgggtccacctg

SEQ ID NO: 2733998 - DNA, 25 bp, Homo sapien
ctttgccggcgtggctgggtccacc

SEQ ID NO: 2733999 - DNA, 25 bp, Homo sapien
aggaaacagagtcgctataagcaca

SEQ ID NO: 2734000 - DNA, 25 bp, Homo sapien
aacagagtcgctataagcacatgag

SEQ ID NO: 2734001 - DNA, 25 bp, Homo sapien
gaaacagagtcgctataagcacatg

SEQ ID NO: 2734002 - DNA, 25 bp, Homo sapien
cagagtcgctataagcacatgagct

SEQ ID NO: 2734003 - DNA, 25 bp, Homo sapien
catgtgaacccctgtggcttcctca

SEQ ID NO: 2734004 - DNA, 25 bp, Homo sapien
cttcctcagagactgtctgccctgg

SEQ ID NO: 2734005 - DNA, 25 bp, Homo sapien
cagagactgtctgccctggcacatg

SEQ ID NO: 2734006 - DNA, 25 bp, Homo sapien
gtctgccctggcacatgctcctcca

SEQ ID NO: 2734007 - DNA, 25 bp, Homo sapien
gtcacctatagtgtatatggtgagg

SEQ ID NO: 2734008 - DNA, 25 bp, Homo sapien
caggtcttcacttgttgacgttaaa

SEQ ID NO: 2734009 - DNA, 25 bp, Homo sapien
catttctcttaaggaaaatgcctgt

SEQ ID NO: 2734010 - DNA, 25 bp, Homo sapien
cctgttgacacacagtttgtaagtg

SEQ ID NO: 2734011 - DNA, 25 bp, Homo sapien
ccagtgtggctgggtccacctgcat

SEQ ID NO: 2734012 - DNA, 25 bp, Homo sapien
taaacaaagagatgatcccagaata

SEQ ID NO: 2734013 - DNA, 25 bp, Homo sapien
ctaaacaaagagatgatcccagaat

SEQ ID NO: 2734014 - DNA, 25 bp, Homo sapien
caaagagatgatcccagaatacgta

SEQ ID NO: 2734015 - DNA, 25 bp, Homo sapien
aacaaagagatgatcccagaatacg

SEQ ID NO: 2734016 - DNA, 25 bp, Homo sapien
ctgtgcccggtgtgactcttagtag

SEQ ID NO: 2734017 - DNA, 25 bp, Homo sapien
tggcagaaagctcaaaccagagtgg

SEQ ID NO: 2734018 - DNA, 25 bp, Homo sapien
ctcaacctctaccacctcggttcaa

SEQ ID NO: 2734019 - DNA, 25 bp, Homo sapien
accagagtggcccttgagcaaaagc

SEQ ID NO: 2734020 - DNA, 25 bp, Homo sapien
gctctcttaagagtagacttttggc

SEQ ID NO: 2734021 - DNA, 25 bp, Homo sapien
gggaacttctagcatggctcttgtg

SEQ ID NO: 2734022 - DNA, 25 bp, Homo sapien
ggctcttgtgaggaggttatgaatt

SEQ ID NO: 2734023 - DNA, 25 bp, Homo sapien
gatgcaaatgcactgagttaggtgg

SEQ ID NO: 2734024 - DNA, 25 bp, Homo sapien
ctccctgggctctgtgaactcaggg

SEQ ID NO: 2734025 - DNA, 25 bp, Homo sapien
attagtactactgctctgtccactg

SEQ ID NO: 2734026 - DNA, 25 bp, Homo sapien
ggcctttatgaaggcactgctcaca

SEQ ID NO: 2734027 - DNA, 25 bp, Homo sapien
catgagcccatgtacagagacacaa

SEQ ID NO: 2734028 - DNA, 25 bp, Homo sapien
gagagaaccactcagaccccgctgt

SEQ ID NO: 2734029 - DNA, 25 bp, Homo sapien
tagagtcgagagaaccactcagacc

SEQ ID NO: 2734030 - DNA, 25 bp, Homo sapien
ggagagttagagtcgagagaaccac

SEQ ID NO: 2734031 - DNA, 25 bp, Homo sapien
aagcatcagagtgtccggaggagca

SEQ ID NO: 2734032 - DNA, 25 bp, Homo sapien
gcctgtaatggtggagtcttccaat

SEQ ID NO: 2734033 - DNA, 25 bp, Homo sapien
tgcctgtaatggtggagtcttccaa

SEQ ID NO: 2734034 - DNA, 25 bp, Homo sapien
gtggctgcctgtaatggtggagtct

SEQ ID NO: 2734035 - DNA, 25 bp, Homo sapien
gctgcctgtaatggtggagtcttcc

SEQ ID NO: 2734036 - DNA, 25 bp, Homo sapien
ttccactttggtcttttctgttgct

SEQ ID NO: 2734037 - DNA, 25 bp, Homo sapien
gtgcagaggaaggacttgctgacat

SEQ ID NO: 2734038 - DNA, 25 bp, Homo sapien
cttctgcaggtgcagaggaaggact

SEQ ID NO: 2734039 - DNA, 25 bp, Homo sapien
tgcaggtgcagaggaaggacttgct

SEQ ID NO: 2734040 - DNA, 25 bp, Homo sapien
tttcaggacattccaccggcttttc

SEQ ID NO: 2734041 - DNA, 25 bp, Homo sapien
acattccaccggcttttcttgctgg

SEQ ID NO: 2734042 - DNA, 25 bp, Homo sapien
atttcaggacattccaccggctttt

SEQ ID NO: 2734043 - DNA, 25 bp, Homo sapien
caggacattccaccggcttttcttg

SEQ ID NO: 2734044 - DNA, 25 bp, Homo sapien
aagagctgcacgttgaacatgcata

SEQ ID NO: 2734045 - DNA, 25 bp, Homo sapien
gcacgttgaacatgcatagcttcct

SEQ ID NO: 2734046 - DNA, 25 bp, Homo sapien
cacgttgaatatgcatagcttcctg

SEQ ID NO: 2734047 - DNA, 25 bp, Homo sapien
gagctgcacgttgaatatgcatagc

SEQ ID NO: 2734048 - DNA, 25 bp, Homo sapien
aggaggtctcatgacacagggtggg

SEQ ID NO: 2734049 - DNA, 25 bp, Homo sapien
tgcccctgggccctaagaggagcag

SEQ ID NO: 2734050 - DNA, 25 bp, Homo sapien
tcaagtctgagccatgttgacatcc

SEQ ID NO: 2734051 - DNA, 25 bp, Homo sapien
ctgagccatgttgacatccccacgt

SEQ ID NO: 2734052 - DNA, 25 bp, Homo sapien
gccatgttgacatccccacgtcggg

SEQ ID NO: 2734053 - DNA, 25 bp, Homo sapien
caagtctgagccatgttgacatccc

SEQ ID NO: 2734054 - DNA, 25 bp, Homo sapien
acagaatgtaaatcaccacaaaaca

SEQ ID NO: 2734055 - DNA, 25 bp, Homo sapien
cctgcaccaggccattaacatttat

SEQ ID NO: 2734056 - DNA, 25 bp, Homo sapien
caatttgtgccctctgaaaaacaga

SEQ ID NO: 2734057 - DNA, 25 bp, Homo sapien
catttcccgaaatgatcacgatcca

SEQ ID NO: 2734058 - DNA, 25 bp, Homo sapien
gcttgtcagtaatgtaagtttctca

SEQ ID NO: 2734059 - DNA, 25 bp, Homo sapien
cattttccaataaactagtgtggca

SEQ ID NO: 2734060 - DNA, 25 bp, Homo sapien
cttccaagcttgtcagtaatgtaag

SEQ ID NO: 2734061 - DNA, 25 bp, Homo sapien
aaactagtgtggcataggtcactgt

SEQ ID NO: 2734062 - DNA, 25 bp, Homo sapien
tctgggcttatttaccaacgcagcc

SEQ ID NO: 2734063 - DNA, 25 bp, Homo sapien
gtaaacctgacacagaaagcccctg

SEQ ID NO: 2734064 - DNA, 25 bp, Homo sapien
ggcacgggccccatctcttttcgta

SEQ ID NO: 2734065 - DNA, 25 bp, Homo sapien
cttctcgcacgtctaaggcctggca

SEQ ID NO: 2734066 - DNA, 25 bp, Homo sapien
tcaaaaaagtacagacgagcctatc

SEQ ID NO: 2734067 - DNA, 25 bp, Homo sapien
catggtctaagttggcactggcttt

SEQ ID NO: 2734068 - DNA, 25 bp, Homo sapien
caatgttgtaacacccagctcggca

SEQ ID NO: 2734069 - DNA, 25 bp, Homo sapien
caagagctctcagtcatggtctaag

SEQ ID NO: 2734070 - DNA, 25 bp, Homo sapien
tgactaggatcacctgtaggtaact

SEQ ID NO: 2734071 - DNA, 25 bp, Homo sapien
ctaggatcacctgtaggtaacttaa

SEQ ID NO: 2734072 - DNA, 25 bp, Homo sapien
ctgactaggatcacctgtaggtaac

SEQ ID NO: 2734073 - DNA, 25 bp, Homo sapien
gactaggatcacctgtaggtaactt

SEQ ID NO: 2734074 - DNA, 25 bp, Homo sapien
gggaaggtgcaggcatttcttatca

SEQ ID NO: 2734075 - DNA, 25 bp, Homo sapien
aggtggcaaatgctagccactggtt

SEQ ID NO: 2734076 - DNA, 25 bp, Homo sapien
gcaaatgctagccactggttgatct

SEQ ID NO: 2734077 - DNA, 25 bp, Homo sapien
cactggttgatctgaatgaagaata

SEQ ID NO: 2734078 - DNA, 25 bp, Homo sapien
ctacctgagtcgtttcagacgagta

SEQ ID NO: 2734079 - DNA, 25 bp, Homo sapien
cctgagtcgtttcagacgagtatga

SEQ ID NO: 2734080 - DNA, 25 bp, Homo sapien
tacctgagtcgtttcagacgagtat

SEQ ID NO: 2734081 - DNA, 25 bp, Homo sapien
tgagtcgtttcagacgagtatgagc

SEQ ID NO: 2734082 - DNA, 25 bp, Homo sapien
tataggcatgagctaaatcgtacca

SEQ ID NO: 2734083 - DNA, 25 bp, Homo sapien
tgtgtgtgtagagtctggtctcaaa

SEQ ID NO: 2734084 - DNA, 25 bp, Homo sapien
agctggggtctcagtcgcatgccac

SEQ ID NO: 2734085 - DNA, 25 bp, Homo sapien
ccattcccgcttcgtgtgtgcgtgt

SEQ ID NO: 2734086 - DNA, 25 bp, Homo sapien
atcagaacttgagaacttctttcag

SEQ ID NO: 2734087 - DNA, 25 bp, Homo sapien
aaattttagaactcaatcagaactt

SEQ ID NO: 2734088 - DNA, 25 bp, Homo sapien
acttgagaacttctttcagtaggtg

SEQ ID NO: 2734089 - DNA, 25 bp, Homo sapien
tatgaagaattccaatcttcaaaaa

SEQ ID NO: 2734090 - DNA, 25 bp, Homo sapien
gatagagacgaccttcaaagtccac

SEQ ID NO: 2734091 - DNA, 25 bp, Homo sapien
tctttccaacctcaaattgatagag

SEQ ID NO: 2734092 - DNA, 25 bp, Homo sapien
tgatctgaggttggtagaaagcaag

SEQ ID NO: 2734093 - DNA, 25 bp, Homo sapien
cttgtaacacagctaaaggatgtca

SEQ ID NO: 2734094 - DNA, 25 bp, Homo sapien
taagttgctgctaattggaaaagac

SEQ ID NO: 2734095 - DNA, 25 bp, Homo sapien
tgttcatatcattgccacttctagc

SEQ ID NO: 2734096 - DNA, 25 bp, Homo sapien
gatcttaagctgaactgacaatttt

SEQ ID NO: 2734097 - DNA, 25 bp, Homo sapien
cacttctagccacaaattaggagtc

SEQ ID NO: 2734098 - DNA, 25 bp, Homo sapien
cagcatctacaactctagtcaccaa

SEQ ID NO: 2734099 - DNA, 25 bp, Homo sapien
cgtgatgggctggtgacatgcatct

SEQ ID NO: 2734100 - DNA, 25 bp, Homo sapien
caagactcagatttagtaaagccag

SEQ ID NO: 2734101 - DNA, 25 bp, Homo sapien
caacagtcttttactgtatgttcat

SEQ ID NO: 2734102 - DNA, 25 bp, Homo sapien
tccttaaccaacacatttcatttca

SEQ ID NO: 2734103 - DNA, 25 bp, Homo sapien
taagaccgatgtattctatcaacag

SEQ ID NO: 2734104 - DNA, 25 bp, Homo sapien
tccttggaaaacgtggcagtgccgg

SEQ ID NO: 2734105 - DNA, 25 bp, Homo sapien
tattcaaagcccgtcctctccttct

SEQ ID NO: 2734106 - DNA, 25 bp, Homo sapien
gcaggcatcctgtggtgactgaaga

SEQ ID NO: 2734107 - DNA, 25 bp, Homo sapien
tcttgttcatgaatggcaggcatcc

SEQ ID NO: 2734108 - DNA, 25 bp, Homo sapien
tctccttcttgttcatgaatggcag

SEQ ID NO: 2734109 - DNA, 25 bp, Homo sapien
tcacactgaagtccaaatggcctca

SEQ ID NO: 2734110 - DNA, 25 bp, Homo sapien
cacactgaagtccaaatggcctcac

SEQ ID NO: 2734111 - DNA, 25 bp, Homo sapien
aaaagattctcagccagttgcggtg

SEQ ID NO: 2734112 - DNA, 25 bp, Homo sapien
caagaataatggaaagctgaccatt

SEQ ID NO: 2734113 - DNA, 25 bp, Homo sapien
agtgtagcattagcagacttggttc

SEQ ID NO: 2734114 - DNA, 25 bp, Homo sapien
gggcttatatctaaactagacagaa

SEQ ID NO: 2734115 - DNA, 25 bp, Homo sapien
tagtaagcaaccaatccattataaa

SEQ ID NO: 2734116 - DNA, 25 bp, Homo sapien
tataactaaagacatataaaatggt

SEQ ID NO: 2734117 - DNA, 25 bp, Homo sapien
ataactaaagacatataaaatggtc

SEQ ID NO: 2734118 - DNA, 25 bp, Homo sapien
aatggaataatatgacacatatgtg

SEQ ID NO: 2734119 - DNA, 25 bp, Homo sapien
actggaattgaaaagaagacattgg

SEQ ID NO: 2734120 - DNA, 25 bp, Homo sapien
tcagggtttgggaacaggtacagaa

SEQ ID NO: 2734121 - DNA, 25 bp, Homo sapien
gccattgacatcactggtttcaggg

SEQ ID NO: 2734122 - DNA, 25 bp, Homo sapien
aaagcattgatgaacatggtccagg

SEQ ID NO: 2734123 - DNA, 25 bp, Homo sapien
ggtacagaatatgaccaggcagcag

SEQ ID NO: 2734124 - DNA, 25 bp, Homo sapien
cacaggagccccagttattaaagta

SEQ ID NO: 2734125 - DNA, 25 bp, Homo sapien
agcaatgtctgtaaccggtggccaa

SEQ ID NO: 2734126 - DNA, 25 bp, Homo sapien
actggagttgacaagatcccctggg

SEQ ID NO: 2734127 - DNA, 25 bp, Homo sapien
cacaagtggcaatggctgtgcacca

SEQ ID NO: 2734128 - DNA, 25 bp, Homo sapien
tctttgaggttaagcggtggcttat

SEQ ID NO: 2734129 - DNA, 25 bp, Homo sapien
aaagtcagagcctttatggttttct

SEQ ID NO: 2734130 - DNA, 25 bp, Homo sapien
gaaagtcagagcctttatggttttc

SEQ ID NO: 2734131 - DNA, 25 bp, Homo sapien
ttgaggttaagcggtggcttatgat

SEQ ID NO: 2734132 - DNA, 25 bp, Homo sapien
tttgggaccaaataccggctctgga

SEQ ID NO: 2734133 - DNA, 25 bp, Homo sapien
tatccagctgtcacgggagagcatg

SEQ ID NO: 2734134 - DNA, 25 bp, Homo sapien
tcttccatctgcgacccatattctg

SEQ ID NO: 2734135 - DNA, 25 bp, Homo sapien
gatgcctcacatcggaacctgctaa

SEQ ID NO: 2734136 - DNA, 25 bp, Homo sapien
tggacgtcagacctcaagaaagtgg

SEQ ID NO: 2734137 - DNA, 25 bp, Homo sapien
tcaagaaagtggaccggatcgggct

SEQ ID NO: 2734138 - DNA, 25 bp, Homo sapien
caaaagtggagatctgttggaaccc

SEQ ID NO: 2734139 - DNA, 25 bp, Homo sapien
tgaggtggattggacgtcagacctc

SEQ ID NO: 2734140 - DNA, 25 bp, Homo sapien
cacactcagagtgataccaccaatg

SEQ ID NO: 2734141 - DNA, 25 bp, Homo sapien
tgagcaccacagttattcaagccag

SEQ ID NO: 2734142 - DNA, 25 bp, Homo sapien
tacattacccgagtttatatcagca

SEQ ID NO: 2734143 - DNA, 25 bp, Homo sapien
cccgtgtagattcctttattacatt

SEQ ID NO: 2734144 - DNA, 25 bp, Homo sapien
tagattgttgtgtttgatgctggaa

SEQ ID NO: 2734145 - DNA, 25 bp, Homo sapien
ccacactagctgattagaaaatgag

SEQ ID NO: 2734146 - DNA, 25 bp, Homo sapien
aagactccaaacagcgacgtatgcc

SEQ ID NO: 2734147 - DNA, 25 bp, Homo sapien
gaaacttatgttatcaacaggcttg

SEQ ID NO: 2734148 - DNA, 25 bp, Homo sapien
tgccacggctgacagtgactctatg

SEQ ID NO: 2734149 - DNA, 25 bp, Homo sapien
ttcttctaccgccagaattggcggt

SEQ ID NO: 2734150 - DNA, 25 bp, Homo sapien
cagaattggcggtttctctcgctgg

SEQ ID NO: 2734151 - DNA, 25 bp, Homo sapien
tgacagtgactctatgtttcctagg

SEQ ID NO: 2734152 - DNA, 25 bp, Homo sapien
agctagactgctcaccaaaatggga

SEQ ID NO: 2734153 - DNA, 25 bp, Homo sapien
tgaaagtgcactggtctagagagcg

SEQ ID NO: 2734154 - DNA, 25 bp, Homo sapien
taccgatgacagtgtgagacgttcc

SEQ ID NO: 2734155 - DNA, 25 bp, Homo sapien
gaacaatcatatagcgctgacaccg

SEQ ID NO: 2734156 - DNA, 25 bp, Homo sapien
cctgcacacgctcctgcacacggct

SEQ ID NO: 2734157 - DNA, 25 bp, Homo sapien
acgctcctgcacacggctcttctgc

SEQ ID NO: 2734158 - DNA, 25 bp, Homo sapien
acacgctcctgcacacggctcttct

SEQ ID NO: 2734159 - DNA, 25 bp, Homo sapien
tgcacacgctcctgcacacggctct

SEQ ID NO: 2734160 - DNA, 25 bp, Homo sapien
ttggtgacgtgggcacgttgctctt

SEQ ID NO: 2734161 - DNA, 25 bp, Homo sapien
gctcttccgtggcaagaggccagcc

SEQ ID NO: 2734162 - DNA, 25 bp, Homo sapien
cgttgctcttccgtggcaagaggcc

SEQ ID NO: 2734163 - DNA, 25 bp, Homo sapien
tgtgggacccagcaccggtgggcag

SEQ ID NO: 2734164 - DNA, 25 bp, Homo sapien
gtgcgggttttgggactgggtgtca

SEQ ID NO: 2734165 - DNA, 25 bp, Homo sapien
tgctgtgctgaggacgggtggggca

SEQ ID NO: 2734166 - DNA, 25 bp, Homo sapien
ttgggactgggtgtcagaggacagg

SEQ ID NO: 2734167 - DNA, 25 bp, Homo sapien
ggcagggcgggtggcccgggcgtca

SEQ ID NO: 2734168 - DNA, 25 bp, Homo sapien
ctgataagcgcttttcttcttgtga

SEQ ID NO: 2734169 - DNA, 25 bp, Homo sapien
cctgataagcgcttttcttcttgtg

SEQ ID NO: 2734170 - DNA, 25 bp, Homo sapien
ccctgataagcgcttttcttcttgt

SEQ ID NO: 2734171 - DNA, 25 bp, Homo sapien
gagtcctcgggtcacaaccctagca

SEQ ID NO: 2734172 - DNA, 25 bp, Homo sapien
agagtcctcgggtcacaaccctagc

SEQ ID NO: 2734173 - DNA, 25 bp, Homo sapien
tcagagtcctcgggtcacaacccta

SEQ ID NO: 2734174 - DNA, 25 bp, Homo sapien
agtcctcgggtcacaaccctagcag

SEQ ID NO: 2734175 - DNA, 25 bp, Homo sapien
cttccccttgttagaggtgaatgtg

SEQ ID NO: 2734176 - DNA, 25 bp, Homo sapien
cttcgggggaaaactggattctctg

SEQ ID NO: 2734177 - DNA, 25 bp, Homo sapien
gaatgtgatgctgggcatcatttct

SEQ ID NO: 2734178 - DNA, 25 bp, Homo sapien
ccctgacaggtccatggcttcccct

SEQ ID NO: 2734179 - DNA, 25 bp, Homo sapien
gagctgagccaggcatccagtctgt

SEQ ID NO: 2734180 - DNA, 25 bp, Homo sapien
gcagcagccaagatgtggccagaga

SEQ ID NO: 2734181 - DNA, 25 bp, Homo sapien
tcagatgggccctgaggtggtcaca

SEQ ID NO: 2734182 - DNA, 25 bp, Homo sapien
cctgaggtggtcacagagctgagcc

SEQ ID NO: 2734183 - DNA, 25 bp, Homo sapien
ggtgttgagtgtcaggggcagagtt

SEQ ID NO: 2734184 - DNA, 25 bp, Homo sapien
gtgttgagtgtcaggggcagagttg

SEQ ID NO: 2734185 - DNA, 25 bp, Homo sapien
gcctcggctgggagcgcactggtgg

SEQ ID NO: 2734186 - DNA, 25 bp, Homo sapien
gcagcgggctgcgtgtgactggcca

SEQ ID NO: 2734187 - DNA, 25 bp, Homo sapien
tttctgcttgcgctgggcagcgggc

SEQ ID NO: 2734188 - DNA, 25 bp, Homo sapien
tgggagcgcactggtggcgggcggc

SEQ ID NO: 2734189 - DNA, 25 bp, Homo sapien
taggctcagtgtataagacccgggt

SEQ ID NO: 2734190 - DNA, 25 bp, Homo sapien
tataagccccaggtcgtaggctcac

SEQ ID NO: 2734191 - DNA, 25 bp, Homo sapien
tgagtacaagcccagtgtcctaggc

SEQ ID NO: 2734192 - DNA, 25 bp, Homo sapien
tgtcctcggctctgggtataagcct

SEQ ID NO: 2734193 - DNA, 25 bp, Homo sapien
gcattcttgttctgcataatggcag

SEQ ID NO: 2734194 - DNA, 25 bp, Homo sapien
ttggacacggtcacttctccagatt

SEQ ID NO: 2734195 - DNA, 25 bp, Homo sapien
tgggtggcttcactgacaaacttgg

SEQ ID NO: 2734196 - DNA, 25 bp, Homo sapien
tgttctgcataatggcagacaatgc

SEQ ID NO: 2734197 - DNA, 25 bp, Homo sapien
gcatccctaggtcatggaaaactct

SEQ ID NO: 2734198 - DNA, 25 bp, Homo sapien
tgaaattcagccatagtgacccttc

SEQ ID NO: 2734199 - DNA, 25 bp, Homo sapien
caaatccttaagatgacctgccagt

SEQ ID NO: 2734200 - DNA, 25 bp, Homo sapien
tatgaaatgcttagtccctggcaga

SEQ ID NO: 2734201 - DNA, 25 bp, Homo sapien
gttttagattatgattttctccttc

SEQ ID NO: 2734202 - DNA, 25 bp, Homo sapien
cttttgttgcgattttctcctctgg

SEQ ID NO: 2734203 - DNA, 25 bp, Homo sapien
attttctcctctggatgttttagat

SEQ ID NO: 2734204 - DNA, 25 bp, Homo sapien
caatctgacaccatttgctctccat

SEQ ID NO: 2734205 - DNA, 25 bp, Homo sapien
ttaggacaccaattcaagccaaatt

SEQ ID NO: 2734206 - DNA, 25 bp, Homo sapien
caagccaaattgcattaatgaccac

SEQ ID NO: 2734207 - DNA, 25 bp, Homo sapien
ggtaactgcataaaaccaggcattc

SEQ ID NO: 2734208 - DNA, 25 bp, Homo sapien
ggttttgaccaagtatgaggtctac

SEQ ID NO: 2734209 - DNA, 25 bp, Homo sapien
cgacgacttcggttcctgcttctga

SEQ ID NO: 2734210 - DNA, 25 bp, Homo sapien
ctgcgggccccgaccgaagacccag

SEQ ID NO: 2734211 - DNA, 25 bp, Homo sapien
cggcggcgacgacttcggttcctgc

SEQ ID NO: 2734212 - DNA, 25 bp, Homo sapien
cccgaccgaagacccaggcagtggc

SEQ ID NO: 2734213 - DNA, 25 bp, Homo sapien
gccgctgtcgtccgagatcacgatg

SEQ ID NO: 2734214 - DNA, 25 bp, Homo sapien
agcgcgccggaggttcgcgacaggg

SEQ ID NO: 2734215 - DNA, 25 bp, Homo sapien
ccggagctctcagagccgctgtcgt

SEQ ID NO: 2734216 - DNA, 25 bp, Homo sapien
ggcagcgcgccggaggttcgcgaca

SEQ ID NO: 2734217 - DNA, 25 bp, Homo sapien
gctttccagccgcagtcctctcggg

SEQ ID NO: 2734218 - DNA, 25 bp, Homo sapien
tttccagccgcagtcctctcgggct

SEQ ID NO: 2734219 - DNA, 25 bp, Homo sapien
ctttccagccgcagtcctctcgggc

SEQ ID NO: 2734220 - DNA, 25 bp, Homo sapien
tgcagcaggcgcgccaggagctcgt

SEQ ID NO: 2734221 - DNA, 25 bp, Homo sapien
cagcaggcgcgccaggagctcgtcc

SEQ ID NO: 2734222 - DNA, 25 bp, Homo sapien
ctgcagcaggcgcgccaggagctcg

SEQ ID NO: 2734223 - DNA, 25 bp, Homo sapien
gcaggcgcgccaggagctcgtccat

SEQ ID NO: 2734224 - DNA, 25 bp, Homo sapien
ccgaggctccgaggacgcccgcggc

SEQ ID NO: 2734225 - DNA, 25 bp, Homo sapien
cgcggccccggcctgagaccccagc

SEQ ID NO: 2734226 - DNA, 25 bp, Homo sapien
tcccgccgaggctccgaggacgccc

SEQ ID NO: 2734227 - DNA, 25 bp, Homo sapien
ccgcggccccggcctgagaccccag

SEQ ID NO: 2734228 - DNA, 25 bp, Homo sapien
gtgtccaccacaggccgaagaatta

SEQ ID NO: 2734229 - DNA, 25 bp, Homo sapien
gctttcctgcatcggcccggccagt

SEQ ID NO: 2734230 - DNA, 25 bp, Homo sapien
accacaggccgaagaattacgcgct

SEQ ID NO: 2734231 - DNA, 25 bp, Homo sapien
agaattacgcgctcccgctttcctg

SEQ ID NO: 2734232 - DNA, 25 bp, Homo sapien
taccatagactacactgtactaccg

SEQ ID NO: 2734233 - DNA, 25 bp, Homo sapien
tgtactaccgtgataataatgtcct

SEQ ID NO: 2734234 - DNA, 25 bp, Homo sapien
cccagtaaactgtgtatcacggtaa

SEQ ID NO: 2734235 - DNA, 25 bp, Homo sapien
taaaacgccacgtgacactaatcaa

SEQ ID NO: 2734236 - DNA, 25 bp, Homo sapien
gctttaacggcctgacactgaaatg

SEQ ID NO: 2734237 - DNA, 25 bp, Homo sapien
tccagctctaactctgctttaacgg

SEQ ID NO: 2734238 - DNA, 25 bp, Homo sapien
tccagtatatcctgattctgtgctc

SEQ ID NO: 2734239 - DNA, 25 bp, Homo sapien
ggtgaggtgataattctcttttaac

SEQ ID NO: 2734240 - DNA, 25 bp, Homo sapien
cctgagtgacacagcaagacaccgt

SEQ ID NO: 2734241 - DNA, 25 bp, Homo sapien
tgtagaattgaccttgcatacctgg

SEQ ID NO: 2734242 - DNA, 25 bp, Homo sapien
catagagctagttagcaagtagtcc

SEQ ID NO: 2734243 - DNA, 25 bp, Homo sapien
catacctgggagaaatcctacttgg

SEQ ID NO: 2734244 - DNA, 25 bp, Homo sapien
tagcctactgatgtggtgaattgca

SEQ ID NO: 2734245 - DNA, 25 bp, Homo sapien
ttcacctctgccatggttggaagct

SEQ ID NO: 2734246 - DNA, 25 bp, Homo sapien
cacctctgccatggttggaagcttc

SEQ ID NO: 2734247 - DNA, 25 bp, Homo sapien
cattcacctctgccatggttggaag

SEQ ID NO: 2734248 - DNA, 25 bp, Homo sapien
cccattcacctctgccatggttgga

SEQ ID NO: 2734249 - DNA, 25 bp, Homo sapien
cactgtaatgactactttggcttca

SEQ ID NO: 2734250 - DNA, 25 bp, Homo sapien
tgactgttttcccttagttcagttg

SEQ ID NO: 2734251 - DNA, 25 bp, Homo sapien
tttctggtaagaatagagttactac

SEQ ID NO: 2734252 - DNA, 25 bp, Homo sapien
cagaaatcttccttgtattgatgtc

SEQ ID NO: 2734253 - DNA, 25 bp, Homo sapien
gggaagagctattacattttgtcaa

SEQ ID NO: 2734254 - DNA, 25 bp, Homo sapien
aattgggaagagctattacattttg

SEQ ID NO: 2734255 - DNA, 25 bp, Homo sapien
cagatgcctttaaggaagttctctt

SEQ ID NO: 2734256 - DNA, 25 bp, Homo sapien
tcattaagtataattctagctgtgg

SEQ ID NO: 2734257 - DNA, 25 bp, Homo sapien
cggtggatcacctagggcctaggaa

SEQ ID NO: 2734258 - DNA, 25 bp, Homo sapien
tgtctccactgaacctatgcaaacc

SEQ ID NO: 2734259 - DNA, 25 bp, Homo sapien
cctggaatgactatcatccctttga

SEQ ID NO: 2734260 - DNA, 25 bp, Homo sapien
ttaaaacccatcaccggctaggcgc

SEQ ID NO: 2734261 - DNA, 25 bp, Homo sapien
aaaccaatagtgtaagtctgagccc

SEQ ID NO: 2734262 - DNA, 25 bp, Homo sapien
cacatacgcatgactaggatcacag

SEQ ID NO: 2734263 - DNA, 25 bp, Homo sapien
tgagggcctaggaatgtacaacttg

SEQ ID NO: 2734264 - DNA, 25 bp, Homo sapien
caacctctgtaccatgagcctggaa

SEQ ID NO: 2734265 - DNA, 25 bp, Homo sapien
ctgggaaggagtgacaggttctaaa

SEQ ID NO: 2734266 - DNA, 25 bp, Homo sapien
caagagtggcaataggtctattttc

SEQ ID NO: 2734267 - DNA, 25 bp, Homo sapien
actgcgatcttttgtccttggtctg

SEQ ID NO: 2734268 - DNA, 25 bp, Homo sapien
tctaaagttaagtcaagagtggcaa

SEQ ID NO: 2734269 - DNA, 25 bp, Homo sapien
atgtctgaagactggttggctcctt

SEQ ID NO: 2734270 - DNA, 25 bp, Homo sapien
caccgctttgccagagaggctggca

SEQ ID NO: 2734271 - DNA, 25 bp, Homo sapien
ggcacatgtctgaagactggttggc

SEQ ID NO: 2734272 - DNA, 25 bp, Homo sapien
aggctggcacatgtctgaagactgg

SEQ ID NO: 2734273 - DNA, 25 bp, Homo sapien
tctccgtgctgtaggctgagagctt

SEQ ID NO: 2734274 - DNA, 25 bp, Homo sapien
tctgttggataaacagagcctccac

SEQ ID NO: 2734275 - DNA, 25 bp, Homo sapien
gtggctgagctacaattaggctctg

SEQ ID NO: 2734276 - DNA, 25 bp, Homo sapien
actaggtccaaatctacaggatcac

SEQ ID NO: 2734277 - DNA, 25 bp, Homo sapien
ctgaagacagctgtagacttgccaa

SEQ ID NO: 2734278 - DNA, 25 bp, Homo sapien
gaagacagctgtagacttgccaaga

SEQ ID NO: 2734279 - DNA, 25 bp, Homo sapien
gacagctgtagacttgccaagaagc

SEQ ID NO: 2734280 - DNA, 25 bp, Homo sapien
atctgaagacagctgtagacttgcc

SEQ ID NO: 2734281 - DNA, 25 bp, Homo sapien
gctctcggtgggcatggcaaaggtc

SEQ ID NO: 2734282 - DNA, 25 bp, Homo sapien
tcgcagggggcacggcaaggcctgt

SEQ ID NO: 2734283 - DNA, 25 bp, Homo sapien
ggtgggcatggcaaaggtcgcaggg

SEQ ID NO: 2734284 - DNA, 25 bp, Homo sapien
caaggctcgtggtgggcatgaggag

SEQ ID NO: 2734285 - DNA, 25 bp, Homo sapien
ccgagggcatggcacttcttgaggt

SEQ ID NO: 2734286 - DNA, 25 bp, Homo sapien
ttctgccgagggcatggcacttctt

SEQ ID NO: 2734287 - DNA, 25 bp, Homo sapien
ggatattctgccgagggcatggcac

SEQ ID NO: 2734288 - DNA, 25 bp, Homo sapien
gatattctgccgagggcatggcact

SEQ ID NO: 2734289 - DNA, 25 bp, Homo sapien
tgactgtggcacatctcctggtgac

SEQ ID NO: 2734290 - DNA, 25 bp, Homo sapien
tggtgactgtggcacatctcctggt

SEQ ID NO: 2734291 - DNA, 25 bp, Homo sapien
tgtcttgcaggtatgccacatcttg

SEQ ID NO: 2734292 - DNA, 25 bp, Homo sapien
cttgtggatgtaatatgctttgagg

SEQ ID NO: 2734293 - DNA, 25 bp, Homo sapien
catctcccggtaagtgtggcatgcc

SEQ ID NO: 2734294 - DNA, 25 bp, Homo sapien
tgagtgtggcatgtctccaggtgaa

SEQ ID NO: 2734295 - DNA, 25 bp, Homo sapien
tgtcacgtcccctgatgagtgtggc

SEQ ID NO: 2734296 - DNA, 25 bp, Homo sapien
tctgggtaaagtcaggcctgtctcc

SEQ ID NO: 2734297 - DNA, 25 bp, Homo sapien
tgttgtacaacccaccttgtggtgt

SEQ ID NO: 2734298 - DNA, 25 bp, Homo sapien
caccttgtggtgttcgtgattgtac

SEQ ID NO: 2734299 - DNA, 25 bp, Homo sapien
gcaggctctgacagtgatatttctt

SEQ ID NO: 2734300 - DNA, 25 bp, Homo sapien
cgtgattgtacgtgggcagacccag

SEQ ID NO: 2734301 - DNA, 25 bp, Homo sapien
gtacttcagtctatgcaggcatggt

SEQ ID NO: 2734302 - DNA, 25 bp, Homo sapien
tatccggtattagcgtctgaaagaa

SEQ ID NO: 2734303 - DNA, 25 bp, Homo sapien
tctttatccggtattagcgtctgaa

SEQ ID NO: 2734304 - DNA, 25 bp, Homo sapien
agaagtacttcagtctatgcaggca

SEQ ID NO: 2734305 - DNA, 25 bp, Homo sapien
tgctctgttccccaggctggagtgc

SEQ ID NO: 2734306 - DNA, 25 bp, Homo sapien
ctgtagagattaaaaagaaggaaat

SEQ ID NO: 2734307 - DNA, 25 bp, Homo sapien
ttgctctgttccccaggctggagtg

SEQ ID NO: 2734308 - DNA, 25 bp, Homo sapien
gagccactgagcaagattttctgga

SEQ ID NO: 2734309 - DNA, 25 bp, Homo sapien
cacgatttctcttggtgggtaatgc

SEQ ID NO: 2734310 - DNA, 25 bp, Homo sapien
tatttgttaccattcttagtcttcg

SEQ ID NO: 2734311 - DNA, 25 bp, Homo sapien
tttcatgagaagcatgtaggcctcc

SEQ ID NO: 2734312 - DNA, 25 bp, Homo sapien
gatccctagaagattcgccaacagc

SEQ ID NO: 2734313 - DNA, 25 bp, Homo sapien
caagagaaagctatgccctgagtcc

SEQ ID NO: 2734314 - DNA, 25 bp, Homo sapien
cagttcacggtgattggctcaaaga

SEQ ID NO: 2734315 - DNA, 25 bp, Homo sapien
tgactataaaggaagcagacactct

SEQ ID NO: 2734316 - DNA, 25 bp, Homo sapien
ttcctccatgacataggtgagcagt

SEQ ID NO: 2734317 - DNA, 25 bp, Homo sapien
cctccatgacataggtgagcagttt

SEQ ID NO: 2734318 - DNA, 25 bp, Homo sapien
ctcttcctccatgacataggtgagc

SEQ ID NO: 2734319 - DNA, 25 bp, Homo sapien
ccatgacataggtgagcagtttcca

SEQ ID NO: 2734320 - DNA, 25 bp, Homo sapien
ctacagaagatataatcttataatt

SEQ ID NO: 2734321 - DNA, 25 bp, Homo sapien
gatataatcttataattgttgttac

SEQ ID NO: 2734322 - DNA, 25 bp, Homo sapien
tacagaagatataatcttataattg

SEQ ID NO: 2734323 - DNA, 25 bp, Homo sapien
gaagatataatcttataattgttgt

SEQ ID NO: 2734324 - DNA, 25 bp, Homo sapien
gccatggcacctgatatcacttttc

SEQ ID NO: 2734325 - DNA, 25 bp, Homo sapien
gagccatggcacctgatatcacttt

SEQ ID NO: 2734326 - DNA, 25 bp, Homo sapien
tgagccatggcacctgatatcactt

SEQ ID NO: 2734327 - DNA, 25 bp, Homo sapien
tgtgagccatggcacctgatatcac

SEQ ID NO: 2734328 - DNA, 25 bp, Homo sapien
tcagttgcatacaaaaacctctact

SEQ ID NO: 2734329 - DNA, 25 bp, Homo sapien
ttacttgaagttaccaatgagatca

SEQ ID NO: 2734330 - DNA, 25 bp, Homo sapien
ttatatactgtatacccataacttg

SEQ ID NO: 2734331 - DNA, 25 bp, Homo sapien
tctacttctttactactccactgca

SEQ ID NO: 2734332 - DNA, 25 bp, Homo sapien
cacctggccacaagagtttggtatt

SEQ ID NO: 2734333 - DNA, 25 bp, Homo sapien
gcatatagttggatcctggttttta

SEQ ID NO: 2734334 - DNA, 25 bp, Homo sapien
tagtccattcagctaatctctgtct

SEQ ID NO: 2734335 - DNA, 25 bp, Homo sapien
ggtgtgtgttactatgcctactaag

SEQ ID NO: 2734336 - DNA, 25 bp, Homo sapien
agtcaaccaagggatgactgcatat

SEQ ID NO: 2734337 - DNA, 25 bp, Homo sapien
tttattaggtatattggttggcagt

SEQ ID NO: 2734338 - DNA, 25 bp, Homo sapien
ggattcaaccaactgagatttgaaa

SEQ ID NO: 2734339 - DNA, 25 bp, Homo sapien
agtccccccatgtagtcaaccaagg

SEQ ID NO: 2734340 - DNA, 25 bp, Homo sapien
taggaagccttaccatttattggtg

SEQ ID NO: 2734341 - DNA, 25 bp, Homo sapien
tcatgcccggctaaagacatcaact

SEQ ID NO: 2734342 - DNA, 25 bp, Homo sapien
taaaagttggtgtctcttgggattc

SEQ ID NO: 2734343 - DNA, 25 bp, Homo sapien
taaagacatcaacttctgaaagact

SEQ ID NO: 2734344 - DNA, 25 bp, Homo sapien
caaggaaagtgtcagactctagatg

SEQ ID NO: 2734345 - DNA, 25 bp, Homo sapien
acaaacaaggaaagtgtcagactct

SEQ ID NO: 2734346 - DNA, 25 bp, Homo sapien
tgtcagactctagatgaactgcctg

SEQ ID NO: 2734347 - DNA, 25 bp, Homo sapien
tgttcaactcccctatccacagccc

SEQ ID NO: 2734348 - DNA, 25 bp, Homo sapien
tcagaacgtcgttaagatgatgaca

SEQ ID NO: 2734349 - DNA, 25 bp, Homo sapien
cgtcgttaagatgatgacagaacga

SEQ ID NO: 2734350 - DNA, 25 bp, Homo sapien
atgacagaacgaatgtgaacaattc

SEQ ID NO: 2734351 - DNA, 25 bp, Homo sapien
tgtgaacaattctgatggcatcaac

SEQ ID NO: 2734352 - DNA, 25 bp, Homo sapien
tacaaagccttgatccatcatctgg

SEQ ID NO: 2734353 - DNA, 25 bp, Homo sapien
caaacagttatatgaggatgggaat

SEQ ID NO: 2734354 - DNA, 25 bp, Homo sapien
gataccagcccacaactctcatggg

SEQ ID NO: 2734355 - DNA, 25 bp, Homo sapien
catgtgaaggccaaacagttatatg

SEQ ID NO: 2734356 - DNA, 25 bp, Homo sapien
gcctgtatggattggaagcaagtgt

SEQ ID NO: 2734357 - DNA, 25 bp, Homo sapien
ctcttttgggcctgtatggattgga

SEQ ID NO: 2734358 - DNA, 25 bp, Homo sapien
tgtatggattggaagcaagtgtaga

SEQ ID NO: 2734359 - DNA, 25 bp, Homo sapien
actcttttgggcctgtatggattgg

SEQ ID NO: 2734360 - DNA, 25 bp, Homo sapien
ttctggccctcaatggagatgtgct

SEQ ID NO: 2734361 - DNA, 25 bp, Homo sapien
tctggccctcaatggagatgtgctg

SEQ ID NO: 2734362 - DNA, 25 bp, Homo sapien
cttctggccctcaatggagatgtgc

SEQ ID NO: 2734363 - DNA, 25 bp, Homo sapien
tatggattgggatttcgattctctc

SEQ ID NO: 2734364 - DNA, 25 bp, Homo sapien
tgacatgaggtacaatatggattgg

SEQ ID NO: 2734365 - DNA, 25 bp, Homo sapien
ctttcccgatagtgacatgaggtac

SEQ ID NO: 2734366 - DNA, 25 bp, Homo sapien
cttgggcagctctactgctgattca

SEQ ID NO: 2734367 - DNA, 25 bp, Homo sapien
gaggcccgctgactgctgacatctg

SEQ ID NO: 2734368 - DNA, 25 bp, Homo sapien
aaccactgtagaagaggcccgctga

SEQ ID NO: 2734369 - DNA, 25 bp, Homo sapien
tgcaattcctgcaaatgctattggt

SEQ ID NO: 2734370 - DNA, 25 bp, Homo sapien
ttgtctcctgctttattccagagaa

SEQ ID NO: 2734371 - DNA, 25 bp, Homo sapien
tcttcaaaattgatttagcttaagt

SEQ ID NO: 2734372 - DNA, 25 bp, Homo sapien
atgtgagtcctccaagtttttcttc

SEQ ID NO: 2734373 - DNA, 25 bp, Homo sapien
tcaaaattgatttagcttaagtaac

SEQ ID NO: 2734374 - DNA, 25 bp, Homo sapien
ttcttcttcaaaattgatttagctt

SEQ ID NO: 2734375 - DNA, 25 bp, Homo sapien
taggtccatacaacttcagcacagg

SEQ ID NO: 2734376 - DNA, 25 bp, Homo sapien
cattccagagcagtattccaagtta

SEQ ID NO: 2734377 - DNA, 25 bp, Homo sapien
gaactccttgcgtcatccctttata

SEQ ID NO: 2734378 - DNA, 25 bp, Homo sapien
tttgttcaccataatacccctgagg

SEQ ID NO: 2734379 - DNA, 25 bp, Homo sapien
gctattttcagaggtcctgtccctt

SEQ ID NO: 2734380 - DNA, 25 bp, Homo sapien
tcaactcaagaatagtgctgaatct

SEQ ID NO: 2734381 - DNA, 25 bp, Homo sapien
gatgttacaccagccctgctatttt

SEQ ID NO: 2734382 - DNA, 25 bp, Homo sapien
tccgttttacatcgtcaaggctaat

SEQ ID NO: 2734383 - DNA, 25 bp, Homo sapien
tttctggactatgtggaaacctccg

SEQ ID NO: 2734384 - DNA, 25 bp, Homo sapien
gaaacctccgaactccagagaatag

SEQ ID NO: 2734385 - DNA, 25 bp, Homo sapien
caagtgctgggagcttaggcttcaa

SEQ ID NO: 2734386 - DNA, 25 bp, Homo sapien
tgtcacatagtaggcaagcatgcac

SEQ ID NO: 2734387 - DNA, 25 bp, Homo sapien
catgatgtccactctactgatgaac

SEQ ID NO: 2734388 - DNA, 25 bp, Homo sapien
gaaactggttctttaatgactcctg

SEQ ID NO: 2734389 - DNA, 25 bp, Homo sapien
gatcatttgatttaagaggcagcca

SEQ ID NO: 2734390 - DNA, 25 bp, Homo sapien
tgtgctgctagatcaaaccgccatg

SEQ ID NO: 2734391 - DNA, 25 bp, Homo sapien
tattacttgttcaaaggatctaggc

SEQ ID NO: 2734392 - DNA, 25 bp, Homo sapien
attattacttgttcaaaggatctag

SEQ ID NO: 2734393 - DNA, 25 bp, Homo sapien
attacttgttcaaaggatctaggca

SEQ ID NO: 2734394 - DNA, 25 bp, Homo sapien
ttacttgttcaaaggatctaggcat

SEQ ID NO: 2734395 - DNA, 25 bp, Homo sapien
tgtgcttaaaagagaggctcctagg

SEQ ID NO: 2734396 - DNA, 25 bp, Homo sapien
caagagaaggccatgcatcaacaag

SEQ ID NO: 2734397 - DNA, 25 bp, Homo sapien
cataaatactaagcccaagagaagg

SEQ ID NO: 2734398 - DNA, 25 bp, Homo sapien
gacagtcaacattgggctctcataa

SEQ ID NO: 2734399 - DNA, 25 bp, Homo sapien
gcaccatgtttgcaatggattgctg

SEQ ID NO: 2734400 - DNA, 25 bp, Homo sapien
aggactcgcccaggcagagtttgtc

SEQ ID NO: 2734401 - DNA, 25 bp, Homo sapien
tcttctagggtctgaacgacataac

SEQ ID NO: 2734402 - DNA, 25 bp, Homo sapien
ataacgcaggaaaaggactcgccca

SEQ ID NO: 2734403 - DNA, 25 bp, Homo sapien
tgaagacgtttgatttccatttggg

SEQ ID NO: 2734404 - DNA, 25 bp, Homo sapien
ctgttcctgaagacgtttgatttcc

SEQ ID NO: 2734405 - DNA, 25 bp, Homo sapien
attggtgttctttgtcaggttgggc

SEQ ID NO: 2734406 - DNA, 25 bp, Homo sapien
ttccatttgggggctgagtcaatcc

SEQ ID NO: 2734407 - DNA, 25 bp, Homo sapien
gaagctgctcttagggattggtgtt

SEQ ID NO: 2734408 - DNA, 25 bp, Homo sapien
gaagtgaagggcagtgtcctctagc

SEQ ID NO: 2734409 - DNA, 25 bp, Homo sapien
catctgcgttgtgacttcgtattca

SEQ ID NO: 2734410 - DNA, 25 bp, Homo sapien
cagatatctgaagtgatgaggagct

SEQ ID NO: 2734411 - DNA, 25 bp, Homo sapien
cacacaaggtcagggagaactactc

SEQ ID NO: 2734412 - DNA, 25 bp, Homo sapien
ctatttgaacctctcagaacctggg

SEQ ID NO: 2734413 - DNA, 25 bp, Homo sapien
ggatcttataaagcacacacaaggt

SEQ ID NO: 2734414 - DNA, 25 bp, Homo sapien
ggtccccaccagtgtacatcgagag

SEQ ID NO: 2734415 - DNA, 25 bp, Homo sapien
ctgagtccagaacataggacacaga

SEQ ID NO: 2734416 - DNA, 25 bp, Homo sapien
agaacataggacacagatgagtgtg

SEQ ID NO: 2734417 - DNA, 25 bp, Homo sapien
aacataggacacagatgagtgtgag

SEQ ID NO: 2734418 - DNA, 25 bp, Homo sapien
gtccagaacataggacacagatgag

SEQ ID NO: 2734419 - DNA, 25 bp, Homo sapien
aacccaaacatcatctcggcaattt

SEQ ID NO: 2734420 - DNA, 25 bp, Homo sapien
catcatctcggcaattttattggag

SEQ ID NO: 2734421 - DNA, 25 bp, Homo sapien
gggtcctgtccacctctacggctat

SEQ ID NO: 2734422 - DNA, 25 bp, Homo sapien
acggctatggagagcatcctctgaa

SEQ ID NO: 2734423 - DNA, 25 bp, Homo sapien
gcctttagtgaacacttatgccagg

SEQ ID NO: 2734424 - DNA, 25 bp, Homo sapien
tcattcacccaccaagcctttagtg

SEQ ID NO: 2734425 - DNA, 25 bp, Homo sapien
tatctatttcattcacccaccaagc

SEQ ID NO: 2734426 - DNA, 25 bp, Homo sapien
cttatgccaggcctatggataaaga

SEQ ID NO: 2734427 - DNA, 25 bp, Homo sapien
tttccatggtagtaaagaacatttc

SEQ ID NO: 2734428 - DNA, 25 bp, Homo sapien
ctttccatggtagtaaagaacattt

SEQ ID NO: 2734429 - DNA, 25 bp, Homo sapien
ttccatggtagtaaagaacatttct

SEQ ID NO: 2734430 - DNA, 25 bp, Homo sapien
cgtagaattattcagaaagtagagg

SEQ ID NO: 2734431 - DNA, 25 bp, Homo sapien
tcacagctgtggaggaatatgattt

SEQ ID NO: 2734432 - DNA, 25 bp, Homo sapien
tttctaacactttgcagcgcagaag

SEQ ID NO: 2734433 - DNA, 25 bp, Homo sapien
ctgacacttgagcagtgacgtagaa

SEQ ID NO: 2734434 - DNA, 25 bp, Homo sapien
agatgctcaaccaattcgtcccaag

SEQ ID NO: 2734435 - DNA, 25 bp, Homo sapien
gatgctcaaccaattcgtcccaagt

SEQ ID NO: 2734436 - DNA, 25 bp, Homo sapien
gctcaaccaattcgtcccaagtctg

SEQ ID NO: 2734437 - DNA, 25 bp, Homo sapien
tgcagatgctcaaccaattcgtccc

SEQ ID NO: 2734438 - DNA, 25 bp, Homo sapien
aatgtttacaatgtccacagtcagt

SEQ ID NO: 2734439 - DNA, 25 bp, Homo sapien
attgtattgacggatgtttacaatg

SEQ ID NO: 2734440 - DNA, 25 bp, Homo sapien
caatgtttacaatgtccacagtcag

SEQ ID NO: 2734441 - DNA, 25 bp, Homo sapien
gtattgacggatgtttacaatgttt

SEQ ID NO: 2734442 - DNA, 25 bp, Homo sapien
tgctcctgatttgctctgtacttac

SEQ ID NO: 2734443 - DNA, 25 bp, Homo sapien
ttgctcctgatttgctctgtactta

SEQ ID NO: 2734444 - DNA, 25 bp, Homo sapien
tggtctaactctcctacatcgtcat

SEQ ID NO: 2734445 - DNA, 25 bp, Homo sapien
tcctacatcgtcattggtcactggc

SEQ ID NO: 2734446 - DNA, 25 bp, Homo sapien
taactctcctacatcgtcattggtc

SEQ ID NO: 2734447 - DNA, 25 bp, Homo sapien
catcgtcattggtcactggcttcac

SEQ ID NO: 2734448 - DNA, 25 bp, Homo sapien
gactggcctcagaatgactgtgact

SEQ ID NO: 2734449 - DNA, 25 bp, Homo sapien
ctggcctcagaatgactgtgactga

SEQ ID NO: 2734450 - DNA, 25 bp, Homo sapien
gtgactggcctcagaatgactgtga

SEQ ID NO: 2734451 - DNA, 25 bp, Homo sapien
cctcagaatgactgtgactgacttc

SEQ ID NO: 2734452 - DNA, 25 bp, Homo sapien
ctgcttttccccgtccgtggacagg

SEQ ID NO: 2734453 - DNA, 25 bp, Homo sapien
ctgcttctgcttttccccgtccgtg

SEQ ID NO: 2734454 - DNA, 25 bp, Homo sapien
gcttctgcttttccccgtccgtgga

SEQ ID NO: 2734455 - DNA, 25 bp, Homo sapien
ttctgcttttccccgtccgtggaca

SEQ ID NO: 2734456 - DNA, 25 bp, Homo sapien
atctctcaaaactaaagtctgtaat

SEQ ID NO: 2734457 - DNA, 25 bp, Homo sapien
gctgcggaaggcctcaatctgcttc

SEQ ID NO: 2734458 - DNA, 25 bp, Homo sapien
tcagggttcaagtccgcagcataga

SEQ ID NO: 2734459 - DNA, 25 bp, Homo sapien
gagcaggagcttcaacaagtgcact

SEQ ID NO: 2734460 - DNA, 25 bp, Homo sapien
taagtcctttcggtcgatcacggaa

SEQ ID NO: 2734461 - DNA, 25 bp, Homo sapien
aggaggtattcttggcattcagtgc

SEQ ID NO: 2734462 - DNA, 25 bp, Homo sapien
gttcaggaggtattcttggcattca

SEQ ID NO: 2734463 - DNA, 25 bp, Homo sapien
taaccacttttcatgcttttagagc

SEQ ID NO: 2734464 - DNA, 25 bp, Homo sapien
agagagttcaggaggtattcttggc

SEQ ID NO: 2734465 - DNA, 25 bp, Homo sapien
caggctaggataggattatttaaaa

SEQ ID NO: 2734466 - DNA, 25 bp, Homo sapien
agaacaggctaggataggattattt

SEQ ID NO: 2734467 - DNA, 25 bp, Homo sapien
gatatttactagagttagaaattac

SEQ ID NO: 2734468 - DNA, 25 bp, Homo sapien
tataccttgtatatttaagccatat

SEQ ID NO: 2734469 - DNA, 25 bp, Homo sapien
cattagggaaaaatgaacgtctctc

SEQ ID NO: 2734470 - DNA, 25 bp, Homo sapien
tgtatagactaggttcagcagaggg

SEQ ID NO: 2734471 - DNA, 25 bp, Homo sapien
caggttgtcggtaccttgaatgaca

SEQ ID NO: 2734472 - DNA, 25 bp, Homo sapien
taataggtctaacagaatgcttgca

SEQ ID NO: 2734473 - DNA, 25 bp, Homo sapien
cacccagagtcacactgaacttggt

SEQ ID NO: 2734474 - DNA, 25 bp, Homo sapien
aacaatagttattccactctaccca

SEQ ID NO: 2734475 - DNA, 25 bp, Homo sapien
tatgatctcgttttgacaataaaaa

SEQ ID NO: 2734476 - DNA, 25 bp, Homo sapien
atttgtgtcttctattatgatctcg

SEQ ID NO: 2734477 - DNA, 25 bp, Homo sapien
cagggacccctctttctaggctgaa

SEQ ID NO: 2734478 - DNA, 25 bp, Homo sapien
gctaagacgactttggccctgttga

SEQ ID NO: 2734479 - DNA, 25 bp, Homo sapien
caaatcatggcttagaggtgctcac

SEQ ID NO: 2734480 - DNA, 25 bp, Homo sapien
gatttccttgttcaggtcagggcct

SEQ ID NO: 2734481 - DNA, 25 bp, Homo sapien
ctggcccaaatcctagcaccatgga

SEQ ID NO: 2734482 - DNA, 25 bp, Homo sapien
gcttgggttaagcagtggcgtggca

SEQ ID NO: 2734483 - DNA, 25 bp, Homo sapien
gaatggatctgttgagcgtttgaga

SEQ ID NO: 2734484 - DNA, 25 bp, Homo sapien
cattgtttggtgtgcagcttgggtt

SEQ ID NO: 2734485 - DNA, 25 bp, Homo sapien
tgagaaaattcaaacgtgatcattg

SEQ ID NO: 2734486 - DNA, 25 bp, Homo sapien
gaggaccaggtccaagtgtctttag

SEQ ID NO: 2734487 - DNA, 25 bp, Homo sapien
gattggtcatcctaatgaaacctga

SEQ ID NO: 2734488 - DNA, 25 bp, Homo sapien
tgaaacctgatatgagaacttggat

SEQ ID NO: 2734489 - DNA, 25 bp, Homo sapien
tagtcttaagaatgtatgattggtc

SEQ ID NO: 2734490 - DNA, 25 bp, Homo sapien
ttgggaccggcagcatcagtaacac

SEQ ID NO: 2734491 - DNA, 25 bp, Homo sapien
tcctcaaggtgtggtcttgggaccg

SEQ ID NO: 2734492 - DNA, 25 bp, Homo sapien
aagaccattacttgaaccttgggag

SEQ ID NO: 2734493 - DNA, 25 bp, Homo sapien
tatcaggtgtttcgattgcagaagg

SEQ ID NO: 2734494 - DNA, 25 bp, Homo sapien
tcaggtaggttctggacattagttc

SEQ ID NO: 2734495 - DNA, 25 bp, Homo sapien
tatgcaaggattagcaaacgaaaca

SEQ ID NO: 2734496 - DNA, 25 bp, Homo sapien
acttggctccctggtctggcacagc

SEQ ID NO: 2734497 - DNA, 25 bp, Homo sapien
gggtggctgcatcacaacccgacat

SEQ ID NO: 2734498 - DNA, 25 bp, Homo sapien
taggattgtgcccattcagtgaatg

SEQ ID NO: 2734499 - DNA, 25 bp, Homo sapien
tgtagccgtcgcgagccataggatt

SEQ ID NO: 2734500 - DNA, 25 bp, Homo sapien
cagtgaatgctttgtagtgtgttgc

SEQ ID NO: 2734501 - DNA, 25 bp, Homo sapien
acaaactccgtgtagccgtcgcgag

SEQ ID NO: 2734502 - DNA, 25 bp, Homo sapien
cacgcccagccagttttattttatt

SEQ ID NO: 2734503 - DNA, 25 bp, Homo sapien
caccgtgcccggcggaactcctgac

SEQ ID NO: 2734504 - DNA, 25 bp, Homo sapien
cgtgcccggcggaactcctgacctt

SEQ ID NO: 2734505 - DNA, 25 bp, Homo sapien
gccaccgtgcccggcggaactcctg

SEQ ID NO: 2734506 - DNA, 25 bp, Homo sapien
caccccgccttcggctagggtcctg

SEQ ID NO: 2734507 - DNA, 25 bp, Homo sapien
agcccgagcccccgcggcttgtcct

SEQ ID NO: 2734508 - DNA, 25 bp, Homo sapien
ctccccacaccccgccttcggctag

SEQ ID NO: 2734509 - DNA, 25 bp, Homo sapien
agcccccgcggcttgtcctcaacct

SEQ ID NO: 2734510 - DNA, 25 bp, Homo sapien
tcacaggtgaacagatggcgggcct

SEQ ID NO: 2734511 - DNA, 25 bp, Homo sapien
tctccggaggctttatctgcagtgc

SEQ ID NO: 2734512 - DNA, 25 bp, Homo sapien
tgcccgctgggtggtactgctacct

SEQ ID NO: 2734513 - DNA, 25 bp, Homo sapien
ggtctcgcgatcgtggacaacaact

SEQ ID NO: 2734514 - DNA, 25 bp, Homo sapien
gcaaggcctctcagttctgccagta

SEQ ID NO: 2734515 - DNA, 25 bp, Homo sapien
cctgagatgagttttgatggcgagc

SEQ ID NO: 2734516 - DNA, 25 bp, Homo sapien
tttcaagtcgcatgagcaaggcctc

SEQ ID NO: 2734517 - DNA, 25 bp, Homo sapien
tgccagtacggctggaagcctcaaa

SEQ ID NO: 2734518 - DNA, 25 bp, Homo sapien
cgagggacgcaggtgcgggttgcac

SEQ ID NO: 2734519 - DNA, 25 bp, Homo sapien
agatggccccgctgcgactgctgcg

SEQ ID NO: 2734520 - DNA, 25 bp, Homo sapien
gcgggttgcacaggccgagcccact

SEQ ID NO: 2734521 - DNA, 25 bp, Homo sapien
tcgcccgccgaagatggccccgctg

SEQ ID NO: 2734522 - DNA, 25 bp, Homo sapien
ggccgcggccgaagtaggtcttcca

SEQ ID NO: 2734523 - DNA, 25 bp, Homo sapien
tctcggccgcggccgaagtaggtct

SEQ ID NO: 2734524 - DNA, 25 bp, Homo sapien
ccgcggccgaagtaggtcttccaga

SEQ ID NO: 2734525 - DNA, 25 bp, Homo sapien
cggccgaagtaggtcttccagagga

SEQ ID NO: 2734526 - DNA, 25 bp, Homo sapien
cgagggaagaccgaaggcaccagag

SEQ ID NO: 2734527 - DNA, 25 bp, Homo sapien
aagcggaggtaaggttgcggctggc

SEQ ID NO: 2734528 - DNA, 25 bp, Homo sapien
gcggaggtaaggttgcggctggcgg

SEQ ID NO: 2734529 - DNA, 25 bp, Homo sapien
ggaggtaaggttgcggctggcggcc

SEQ ID NO: 2734530 - DNA, 25 bp, Homo sapien
ggaagcggaggtaaggttgcggctg

SEQ ID NO: 2734531 - DNA, 25 bp, Homo sapien
agcaccagcacctcgcgctgttcca

SEQ ID NO: 2734532 - DNA, 25 bp, Homo sapien
tccttggtgggcagacgcacggagt

SEQ ID NO: 2734533 - DNA, 25 bp, Homo sapien
gcagacgcacggagttgaagcccca

SEQ ID NO: 2734534 - DNA, 25 bp, Homo sapien
ccgacaacacgcgcaggaacgtgct

SEQ ID NO: 2734535 - DNA, 25 bp, Homo sapien
agatgacactagtttgggccagaca

SEQ ID NO: 2734536 - DNA, 25 bp, Homo sapien
aactagaatggtggggtgcgatggc

SEQ ID NO: 2734537 - DNA, 25 bp, Homo sapien
aaagatgacactagtttgggccaga

SEQ ID NO: 2734538 - DNA, 25 bp, Homo sapien
gggccagacaggcaatagtggagga

SEQ ID NO: 2734539 - DNA, 25 bp, Homo sapien
cagcttgtgcagctcctgtcgggcc

SEQ ID NO: 2734540 - DNA, 25 bp, Homo sapien
ccagtagaagcgcaggttctggctg

SEQ ID NO: 2734541 - DNA, 25 bp, Homo sapien
cgctcacaaactccttccagtagaa

SEQ ID NO: 2734542 - DNA, 25 bp, Homo sapien
gcttgttggccaccacgacgacagg

SEQ ID NO: 2734543 - DNA, 25 bp, Homo sapien
tctccagagtacgagatgataggga

SEQ ID NO: 2734544 - DNA, 25 bp, Homo sapien
tataggaggcacttaataattattt

SEQ ID NO: 2734545 - DNA, 25 bp, Homo sapien
tctgagtggatgtcacctggaccga

SEQ ID NO: 2734546 - DNA, 25 bp, Homo sapien
gcagggatcaggacagggcataggt

SEQ ID NO: 2734547 - DNA, 25 bp, Homo sapien
ctcaaagtgttggaggtagaggttt

SEQ ID NO: 2734548 - DNA, 25 bp, Homo sapien
tactttatagggtcaacagaagcat

SEQ ID NO: 2734549 - DNA, 25 bp, Homo sapien
gattataagactagcctgtcccatc

SEQ ID NO: 2734550 - DNA, 25 bp, Homo sapien
tactctcaagatgtacaaccttgga

SEQ ID NO: 2734551 - DNA, 25 bp, Homo sapien
cacctgatattgagaatgggaccca

SEQ ID NO: 2734552 - DNA, 25 bp, Homo sapien
tctgaggtcgaagacatacagtctc

SEQ ID NO: 2734553 - DNA, 25 bp, Homo sapien
cagaggcacctgagtttaggccaca

SEQ ID NO: 2734554 - DNA, 25 bp, Homo sapien
gatcagactctgtactctggcagtt

SEQ ID NO: 2734555 - DNA, 25 bp, Homo sapien
aagggaccactacacagcatgactg

SEQ ID NO: 2734556 - DNA, 25 bp, Homo sapien
tagtgccagaacaagagtcgtaaat

SEQ ID NO: 2734557 - DNA, 25 bp, Homo sapien
gatcacttccagacaagacctctag

SEQ ID NO: 2734558 - DNA, 25 bp, Homo sapien
gctcagagcgggcactattaatagt

SEQ ID NO: 2734559 - DNA, 25 bp, Homo sapien
gatgtgcacggtgccaggctcttca

SEQ ID NO: 2734560 - DNA, 25 bp, Homo sapien
gtttccagatgtgcacggtgccagg

SEQ ID NO: 2734561 - DNA, 25 bp, Homo sapien
gaaaacctcccgctggttatcgata

SEQ ID NO: 2734562 - DNA, 25 bp, Homo sapien
ccccatactcatggcctcgctcagg

SEQ ID NO: 2734563 - DNA, 25 bp, Homo sapien
ccagaaaggctgagtgatgtaccca

SEQ ID NO: 2734564 - DNA, 25 bp, Homo sapien
gacctgtagtggaggattgagccca

SEQ ID NO: 2734565 - DNA, 25 bp, Homo sapien
taagtgtcagtacagagccagtcct

SEQ ID NO: 2734566 - DNA, 25 bp, Homo sapien
cacagttagtacgagagcagcagct

SEQ ID NO: 2734567 - DNA, 25 bp, Homo sapien
tatggtgctgaacaaaactgaacgc

SEQ ID NO: 2734568 - DNA, 25 bp, Homo sapien
caatcgtcggctgaaggctgctaaa

SEQ ID NO: 2734569 - DNA, 25 bp, Homo sapien
tgaattaagtctggcctaaagctgc

SEQ ID NO: 2734570 - DNA, 25 bp, Homo sapien
tactatggagagcttcaaaaggcgg

SEQ ID NO: 2734571 - DNA, 25 bp, Homo sapien
cagcatgctataaagggaccacata

SEQ ID NO: 2734572 - DNA, 25 bp, Homo sapien
tcatgctcaccttgcaaacagcttt

SEQ ID NO: 2734573 - DNA, 25 bp, Homo sapien
aagtccccataatcagaggtcaaag

SEQ ID NO: 2734574 - DNA, 25 bp, Homo sapien
gttgcccactggaccttgtttagga

SEQ ID NO: 2734575 - DNA, 25 bp, Homo sapien
acctgaatatcaagggactgccctg

SEQ ID NO: 2734576 - DNA, 25 bp, Homo sapien
gaaaatccgtgggaccataatctgg

SEQ ID NO: 2734577 - DNA, 25 bp, Homo sapien
gacagacacagattgacccctatga

SEQ ID NO: 2734578 - DNA, 25 bp, Homo sapien
gatggaccatttgaacgcttacaga

SEQ ID NO: 2734579 - DNA, 25 bp, Homo sapien
tgccaccacgcccggcgtgagccac

SEQ ID NO: 2734580 - DNA, 25 bp, Homo sapien
ccaccacgcccggcgtgagccacag

SEQ ID NO: 2734581 - DNA, 25 bp, Homo sapien
caccacgcccggcgtgagccacagc

SEQ ID NO: 2734582 - DNA, 25 bp, Homo sapien
gccaccacgcccggcgtgagccaca

SEQ ID NO: 2734583 - DNA, 25 bp, Homo sapien
tttttgcaagttccacgtgctgtgg

SEQ ID NO: 2734584 - DNA, 25 bp, Homo sapien
ttggtaaagggttcatctgatctgg

SEQ ID NO: 2734585 - DNA, 25 bp, Homo sapien
tctgatctggttttagggagtgaac

SEQ ID NO: 2734586 - DNA, 25 bp, Homo sapien
gtctattaaattccagtcaaaccca

SEQ ID NO: 2734587 - DNA, 25 bp, Homo sapien
tactcaagaacatagttgacccagc

SEQ ID NO: 2734588 - DNA, 25 bp, Homo sapien
ttttaaatcggtatgcagaggcatc

SEQ ID NO: 2734589 - DNA, 25 bp, Homo sapien
tcgatgctttgagtacagtaaccct

SEQ ID NO: 2734590 - DNA, 25 bp, Homo sapien
aacagcctgaggatactaaagacca

SEQ ID NO: 2734591 - DNA, 25 bp, Homo sapien
cagtcaggctatctctgtatgccaa

SEQ ID NO: 2734592 - DNA, 25 bp, Homo sapien
tgtgtaaacaccctgcaacctgatg

SEQ ID NO: 2734593 - DNA, 25 bp, Homo sapien
gcttttggtcctgagcactacctgg

SEQ ID NO: 2734594 - DNA, 25 bp, Homo sapien
tgaaggctgccaaaacatgtccaaa

SEQ ID NO: 2734595 - DNA, 25 bp, Homo sapien
taggtgtcagaacgtggtactgccc

SEQ ID NO: 2734596 - DNA, 25 bp, Homo sapien
tattcaatcatccttggtctgaggc

SEQ ID NO: 2734597 - DNA, 25 bp, Homo sapien
tcaactgacgttgagcaagggtctc

SEQ ID NO: 2734598 - DNA, 25 bp, Homo sapien
agttttcgacctccccacagtcaga

SEQ ID NO: 2734599 - DNA, 25 bp, Homo sapien
tgtcaaccgaaagcgtctgaaccgg

SEQ ID NO: 2734600 - DNA, 25 bp, Homo sapien
caaatgctcgttgcatcctgggagt

SEQ ID NO: 2734601 - DNA, 25 bp, Homo sapien
taaattgagccttgtacgcaggcgc

SEQ ID NO: 2734602 - DNA, 25 bp, Homo sapien
tgaaccggaatgctcgacggaaggc

SEQ ID NO: 2734603 - DNA, 25 bp, Homo sapien
ggttctcgcgggtcttgcgaacgaa

SEQ ID NO: 2734604 - DNA, 25 bp, Homo sapien
cctccggaatcacagggccgggagt

SEQ ID NO: 2734605 - DNA, 25 bp, Homo sapien
gcccctcaatgactggaggcttcga

SEQ ID NO: 2734606 - DNA, 25 bp, Homo sapien
gactggaggcttcgatggttcaaag

SEQ ID NO: 2734607 - DNA, 25 bp, Homo sapien
cgaggtcttcctagttacagagtcc

SEQ ID NO: 2734608 - DNA, 25 bp, Homo sapien
gctagcgctctggtccttctctact

SEQ ID NO: 2734609 - DNA, 25 bp, Homo sapien
ggtctcgcttccccaaagccaagat

SEQ ID NO: 2734610 - DNA, 25 bp, Homo sapien
ggggacaaagcaactgggaaacagc

SEQ ID NO: 2734611 - DNA, 25 bp, Homo sapien
agctgagagcgctggctgttgcccc

SEQ ID NO: 2734612 - DNA, 25 bp, Homo sapien
tcggttacagttacacaaagggtca

SEQ ID NO: 2734613 - DNA, 25 bp, Homo sapien
ttacagttacacaaagggtcacttc

SEQ ID NO: 2734614 - DNA, 25 bp, Homo sapien
ggaatcatttctgcggagctttcaa

SEQ ID NO: 2734615 - DNA, 25 bp, Homo sapien
cagttacacaaagggtcacttcctc

SEQ ID NO: 2734616 - DNA, 25 bp, Homo sapien
tggtgaaaccatgttgttttagtat

SEQ ID NO: 2734617 - DNA, 25 bp, Homo sapien
gaaccagatggtctaggctgggcgt

SEQ ID NO: 2734618 - DNA, 25 bp, Homo sapien
ttcctcttctatactgtgtcaagaa

SEQ ID NO: 2734619 - DNA, 25 bp, Homo sapien
agaaccagatggtctaggctgggcg

SEQ ID NO: 2734620 - DNA, 25 bp, Homo sapien
tttgtggccaaatcttcgttttctg

SEQ ID NO: 2734621 - DNA, 25 bp, Homo sapien
ttagctggcagacgcatcaccccaa

SEQ ID NO: 2734622 - DNA, 25 bp, Homo sapien
gcatcccttagctggcagacgcatc

SEQ ID NO: 2734623 - DNA, 25 bp, Homo sapien
tctttgtggccaaatcttcgttttc

SEQ ID NO: 2734624 - DNA, 25 bp, Homo sapien
tgaagcagacgccactgtcccgcta

SEQ ID NO: 2734625 - DNA, 25 bp, Homo sapien
tgcctgctaggtgcatggccacaga

SEQ ID NO: 2734626 - DNA, 25 bp, Homo sapien
gtctactcaattgtgactgtccctc

SEQ ID NO: 2734627 - DNA, 25 bp, Homo sapien
gcctcctctcagtctactcaattgt

SEQ ID NO: 2734628 - DNA, 25 bp, Homo sapien
tggcccagctatgtgacttcaaccc

SEQ ID NO: 2734629 - DNA, 25 bp, Homo sapien
ggcccagctatgtgacttcaacccc

SEQ ID NO: 2734630 - DNA, 25 bp, Homo sapien
aaattgttcagtgtcgctgttttca

SEQ ID NO: 2734631 - DNA, 25 bp, Homo sapien
ggcctcagcaccctcgggaaattgt

SEQ ID NO: 2734632 - DNA, 25 bp, Homo sapien
aaatcaaggacgaacaggaggctgg

SEQ ID NO: 2734633 - DNA, 25 bp, Homo sapien
aggagaaatcaaggacgaacaggag

SEQ ID NO: 2734634 - DNA, 25 bp, Homo sapien
gcacaaaccacgacgtcctggaaaa

SEQ ID NO: 2734635 - DNA, 25 bp, Homo sapien
tgcacaaaccacgacgtcctggaaa

SEQ ID NO: 2734636 - DNA, 25 bp, Homo sapien
cacgacgtcctggaaaaacagcaca

SEQ ID NO: 2734637 - DNA, 25 bp, Homo sapien
accacgacgtcctggaaaaacagca

SEQ ID NO: 2734638 - DNA, 25 bp, Homo sapien
gttgatccggtgagacagaaaaggc

SEQ ID NO: 2734639 - DNA, 25 bp, Homo sapien
tggtacacgcttttccactgaccac

SEQ ID NO: 2734640 - DNA, 25 bp, Homo sapien
ccttgcagggttgatccggtgagac

SEQ ID NO: 2734641 - DNA, 25 bp, Homo sapien
agaggcctgggtctggtacacgctt

SEQ ID NO: 2734642 - DNA, 25 bp, Homo sapien
tccgaagggctctggatactggcgc

SEQ ID NO: 2734643 - DNA, 25 bp, Homo sapien
catctctcgggaggttccgaagggc

SEQ ID NO: 2734644 - DNA, 25 bp, Homo sapien
tctgcttttccgtgcctggagcctt

SEQ ID NO: 2734645 - DNA, 25 bp, Homo sapien
gaagctgtgggcagacttcggccac

SEQ ID NO: 2734646 - DNA, 25 bp, Homo sapien
tcgggagacgcagccgttccgaaat

SEQ ID NO: 2734647 - DNA, 25 bp, Homo sapien
agacgcagccgttccgaaataccag

SEQ ID NO: 2734648 - DNA, 25 bp, Homo sapien
cagccttttggtcgctggcccctga

SEQ ID NO: 2734649 - DNA, 25 bp, Homo sapien
taccagccttttggtcgctggcccc

SEQ ID NO: 2734650 - DNA, 25 bp, Homo sapien
taagattaggcgacgaaaggagacc

SEQ ID NO: 2734651 - DNA, 25 bp, Homo sapien
aatggcattcggctgatttcggctg

SEQ ID NO: 2734652 - DNA, 25 bp, Homo sapien
catttaggcgacgaaaggatctgct

SEQ ID NO: 2734653 - DNA, 25 bp, Homo sapien
aatgtgcctcgagaagctccggagc

SEQ ID NO: 2734654 - DNA, 25 bp, Homo sapien
cgcaccgtcacccgccggaactgac

SEQ ID NO: 2734655 - DNA, 25 bp, Homo sapien
tgccgccgcctctacgctcctgacc

SEQ ID NO: 2734656 - DNA, 25 bp, Homo sapien
tttgccgccgcctctacgctcctga

SEQ ID NO: 2734657 - DNA, 25 bp, Homo sapien
gccgcctctacgctcctgacccgtc

SEQ ID NO: 2734658 - DNA, 25 bp, Homo sapien
ccgccgcctctacgctcctgacccg

SEQ ID NO: 2734659 - DNA, 25 bp, Homo sapien
cctgggttagatcccgctcctcagg

SEQ ID NO: 2734660 - DNA, 25 bp, Homo sapien
tcctgggttagatcccgctcctcag

SEQ ID NO: 2734661 - DNA, 25 bp, Homo sapien
gctcctgggttagatcccgctcctc

SEQ ID NO: 2734662 - DNA, 25 bp, Homo sapien
ctgctcctgggttagatcccgctcc

SEQ ID NO: 2734663 - DNA, 25 bp, Homo sapien
ctagggtccaacagaggcttggggg

SEQ ID NO: 2734664 - DNA, 25 bp, Homo sapien
ggccgggggaatcagggcagttgga

SEQ ID NO: 2734665 - DNA, 25 bp, Homo sapien
gccgggggaatcagggcagttggag

SEQ ID NO: 2734666 - DNA, 25 bp, Homo sapien
ccgggggaatcagggcagttggagt

SEQ ID NO: 2734667 - DNA, 25 bp, Homo sapien
acgaggcgggtctgcccgcagcgat

SEQ ID NO: 2734668 - DNA, 25 bp, Homo sapien
tctgcccgcagcgatggctggaagg

SEQ ID NO: 2734669 - DNA, 25 bp, Homo sapien
acagaggcacagacgaggcgggtct

SEQ ID NO: 2734670 - DNA, 25 bp, Homo sapien
cagggaagctgacacgctgagggca

SEQ ID NO: 2734671 - DNA, 25 bp, Homo sapien
gaaatgacgccaactccgcggtggg

SEQ ID NO: 2734672 - DNA, 25 bp, Homo sapien
gggactaagcttctccggcagatat

SEQ ID NO: 2734673 - DNA, 25 bp, Homo sapien
tcagagacccgaaatgacgccaact

SEQ ID NO: 2734674 - DNA, 25 bp, Homo sapien
cagatatagactcgttgggcggaga

SEQ ID NO: 2734675 - DNA, 25 bp, Homo sapien
ttacttcattgcacttaaaccacat

SEQ ID NO: 2734676 - DNA, 25 bp, Homo sapien
ctgcattagctctccttaaaaccta

SEQ ID NO: 2734677 - DNA, 25 bp, Homo sapien
gctctccttaaaacctatgtcctta

SEQ ID NO: 2734678 - DNA, 25 bp, Homo sapien
ttagctctccttaaaacctatgtcc

SEQ ID NO: 2734679 - DNA, 25 bp, Homo sapien
gcattagctctccttaaaacctatg

SEQ ID NO: 2734680 - DNA, 25 bp, Homo sapien
tctgctggcctgcataactccttta

SEQ ID NO: 2734681 - DNA, 25 bp, Homo sapien
ggcctgcataactcctttaattccc

SEQ ID NO: 2734682 - DNA, 25 bp, Homo sapien
tgtgcaagcagaaaagggatcattt

SEQ ID NO: 2734683 - DNA, 25 bp, Homo sapien
taaaaggatgagggtcataaatttc

SEQ ID NO: 2734684 - DNA, 25 bp, Homo sapien
taaatttgattctacagcccagcgt

SEQ ID NO: 2734685 - DNA, 25 bp, Homo sapien
gattctacagcccagcgttcaggct

SEQ ID NO: 2734686 - DNA, 25 bp, Homo sapien
gacttataaatttgattctacagcc

SEQ ID NO: 2734687 - DNA, 25 bp, Homo sapien
tttgattctacagcccagcgttcag

SEQ ID NO: 2734688 - DNA, 25 bp, Homo sapien
tgcagagttaagtataatataatca

SEQ ID NO: 2734689 - DNA, 25 bp, Homo sapien
gtcagtcttcatgactacttaccta

SEQ ID NO: 2734690 - DNA, 25 bp, Homo sapien
tacctatgctatgcagagttaagta

SEQ ID NO: 2734691 - DNA, 25 bp, Homo sapien
catgactacttacctatgctatgca

SEQ ID NO: 2734692 - DNA, 25 bp, Homo sapien
ggcgacactgatccatagattcgat

SEQ ID NO: 2734693 - DNA, 25 bp, Homo sapien
cactgatccatagattcgatgccag

SEQ ID NO: 2734694 - DNA, 25 bp, Homo sapien
gttccaaggtatggcgacactgatc

SEQ ID NO: 2734695 - DNA, 25 bp, Homo sapien
atgctgttccaaggtatggcgacac

SEQ ID NO: 2734696 - DNA, 25 bp, Homo sapien
tgctcattcaatctgtcctgtacag

SEQ ID NO: 2734697 - DNA, 25 bp, Homo sapien
gaaaacactaggtacgccctcttgc

SEQ ID NO: 2734698 - DNA, 25 bp, Homo sapien
tcgtgatggaggtgggttgaaaaca

SEQ ID NO: 2734699 - DNA, 25 bp, Homo sapien
cttgctcattcaatctgtcctgtac

SEQ ID NO: 2734700 - DNA, 25 bp, Homo sapien
catagctgtagatcctgtggtcagc

SEQ ID NO: 2734701 - DNA, 25 bp, Homo sapien
aacatagctgtagatcctgtggtca

SEQ ID NO: 2734702 - DNA, 25 bp, Homo sapien
agatcctgtggtcagctgtattaac

SEQ ID NO: 2734703 - DNA, 25 bp, Homo sapien
gctgtagatcctgtggtcagctgta

SEQ ID NO: 2734704 - DNA, 25 bp, Homo sapien
tgtcaaattcaattgcaaattaatg

SEQ ID NO: 2734705 - DNA, 25 bp, Homo sapien
tatagacttgtcaaattcaattgca

SEQ ID NO: 2734706 - DNA, 25 bp, Homo sapien
atgttccccaaatgatacacactca

SEQ ID NO: 2734707 - DNA, 25 bp, Homo sapien
tggcagctacttatagacttgtcaa

SEQ ID NO: 2734708 - DNA, 25 bp, Homo sapien
atcgtgtaataggtaaaccggaatg

SEQ ID NO: 2734709 - DNA, 25 bp, Homo sapien
caagtatcgtgtaataggtaaaccg

SEQ ID NO: 2734710 - DNA, 25 bp, Homo sapien
caactaggaagtgtagaggtgacaa

SEQ ID NO: 2734711 - DNA, 25 bp, Homo sapien
gtcaacattgatagagcataaagct

SEQ ID NO: 2734712 - DNA, 25 bp, Homo sapien
tttcacaatgcctgccaatgcttca

SEQ ID NO: 2734713 - DNA, 25 bp, Homo sapien
gacagttcgggaagtgtattccatc

SEQ ID NO: 2734714 - DNA, 25 bp, Homo sapien
gacatgctaagaagttgtgccccac

SEQ ID NO: 2734715 - DNA, 25 bp, Homo sapien
gaaagccattaagtagacagcctca

SEQ ID NO: 2734716 - DNA, 25 bp, Homo sapien
gacccttgtacttatgcagctgctg

SEQ ID NO: 2734717 - DNA, 25 bp, Homo sapien
tacagggaacctgtacttccaggga

SEQ ID NO: 2734718 - DNA, 25 bp, Homo sapien
agtaatacatgccgtgcatattttc

SEQ ID NO: 2734719 - DNA, 25 bp, Homo sapien
gtaatacatgccgtgcatattttcc

SEQ ID NO: 2734720 - DNA, 25 bp, Homo sapien
ttagtaatacatgccgtgcatattt

SEQ ID NO: 2734721 - DNA, 25 bp, Homo sapien
tagtaatacatgccgtgcatatttt

SEQ ID NO: 2734722 - DNA, 25 bp, Homo sapien
tgatgatttatggttgatggcaacc

SEQ ID NO: 2734723 - DNA, 25 bp, Homo sapien
cagggtgtgccctcccatatttctc

SEQ ID NO: 2734724 - DNA, 25 bp, Homo sapien
gctgcgagggtcaggccgtataaaa

SEQ ID NO: 2734725 - DNA, 25 bp, Homo sapien
tctcttcaaaagagtgcataaatga

SEQ ID NO: 2734726 - DNA, 25 bp, Homo sapien
ataaatgaaacaatgtccccaacgg

SEQ ID NO: 2734727 - DNA, 25 bp, Homo sapien
tcatttcggtaagttggcatctata

SEQ ID NO: 2734728 - DNA, 25 bp, Homo sapien
catctatatggtttatggcactgac

SEQ ID NO: 2734729 - DNA, 25 bp, Homo sapien
ggtaagttggcatctatatggttta

SEQ ID NO: 2734730 - DNA, 25 bp, Homo sapien
agttggcatctatatggtttatggc

SEQ ID NO: 2734731 - DNA, 25 bp, Homo sapien
tgaatgagatgtgctaccctgagtc

SEQ ID NO: 2734732 - DNA, 25 bp, Homo sapien
tcttgagtcaaaggtctacatggct

SEQ ID NO: 2734733 - DNA, 25 bp, Homo sapien
tctggaggctgcataatagaacccc

SEQ ID NO: 2734734 - DNA, 25 bp, Homo sapien
tagagatataccaaacacccacaga

SEQ ID NO: 2734735 - DNA, 25 bp, Homo sapien
aagaaagcgaagctcccttttggca

SEQ ID NO: 2734736 - DNA, 25 bp, Homo sapien
gcgaagctcccttttggcatcgtta

SEQ ID NO: 2734737 - DNA, 25 bp, Homo sapien
gagtcctggtgatcatctccatgaa

SEQ ID NO: 2734738 - DNA, 25 bp, Homo sapien
gctcccttttggcatcgttaagtgc

SEQ ID NO: 2734739 - DNA, 25 bp, Homo sapien
cccagaagagcatcctagtgtttat

SEQ ID NO: 2734740 - DNA, 25 bp, Homo sapien
gaagagcatcctagtgtttattagt

SEQ ID NO: 2734741 - DNA, 25 bp, Homo sapien
gagcatcctagtgtttattagtgaa

SEQ ID NO: 2734742 - DNA, 25 bp, Homo sapien
cagaagagcatcctagtgtttatta

SEQ ID NO: 2734743 - DNA, 25 bp, Homo sapien
cataaagcaaaggtaatatgacccc

SEQ ID NO: 2734744 - DNA, 25 bp, Homo sapien
tgtaataaatggcatggcatgtctt

SEQ ID NO: 2734745 - DNA, 25 bp, Homo sapien
atctaccacagaacaaacacacttg

SEQ ID NO: 2734746 - DNA, 25 bp, Homo sapien
caatataaaatagcaactagcgtcg

SEQ ID NO: 2734747 - DNA, 25 bp, Homo sapien
gcatgcctatccctaggtgcttgac

SEQ ID NO: 2734748 - DNA, 25 bp, Homo sapien
ggataatgtctacttgatggtacaa

SEQ ID NO: 2734749 - DNA, 25 bp, Homo sapien
cagtttttccctgtacaagggctca

SEQ ID NO: 2734750 - DNA, 25 bp, Homo sapien
gcaagtctcagcctgatgatactga

SEQ ID NO: 2734751 - DNA, 25 bp, Homo sapien
taagtctggttagcatccatgataa

SEQ ID NO: 2734752 - DNA, 25 bp, Homo sapien
atggataggtgttctctcgtaaagc

SEQ ID NO: 2734753 - DNA, 25 bp, Homo sapien
aagtctggttagcatccatgataaa

SEQ ID NO: 2734754 - DNA, 25 bp, Homo sapien
gaatggataggtgttctctcgtaaa

SEQ ID NO: 2734755 - DNA, 25 bp, Homo sapien
agaggtcagccctccaaatttacaa

SEQ ID NO: 2734756 - DNA, 25 bp, Homo sapien
tctgttccagaagggaactcccttg

SEQ ID NO: 2734757 - DNA, 25 bp, Homo sapien
gaagtcaggattggtagagccccag

SEQ ID NO: 2734758 - DNA, 25 bp, Homo sapien
taatagcggcctgatgcacagaaga

SEQ ID NO: 2734759 - DNA, 25 bp, Homo sapien
ccgaaatgctcggattacaggtatg

SEQ ID NO: 2734760 - DNA, 25 bp, Homo sapien
gagttcaagcaatcttcttacctca

SEQ ID NO: 2734761 - DNA, 25 bp, Homo sapien
ctgagttcaagcaatcttcttacct

SEQ ID NO: 2734762 - DNA, 25 bp, Homo sapien
tcccgaaatgctcggattacaggta

SEQ ID NO: 2734763 - DNA, 25 bp, Homo sapien
atttagccaatcaaaatagttgaac

SEQ ID NO: 2734764 - DNA, 25 bp, Homo sapien
tctcttagccaaaatatttagccaa

SEQ ID NO: 2734765 - DNA, 25 bp, Homo sapien
tgtaaccatgtaatcaccactccaa

SEQ ID NO: 2734766 - DNA, 25 bp, Homo sapien
tcagagaatcactaatcaaagataa

SEQ ID NO: 2734767 - DNA, 25 bp, Homo sapien
tgttgtctcagcacttgggtctggt

SEQ ID NO: 2734768 - DNA, 25 bp, Homo sapien
gctgttgtctcagcacttgggtctg

SEQ ID NO: 2734769 - DNA, 25 bp, Homo sapien
gttgtctcagcacttgggtctggtt

SEQ ID NO: 2734770 - DNA, 25 bp, Homo sapien
ctgctgttgtctcagcacttgggtc

SEQ ID NO: 2734771 - DNA, 25 bp, Homo sapien
actgtgaaaagtggaatcgtctctc

SEQ ID NO: 2734772 - DNA, 25 bp, Homo sapien
ggtaatttgaagatgatcttgacac

SEQ ID NO: 2734773 - DNA, 25 bp, Homo sapien
tcttgacactttcagggtcatcagg

SEQ ID NO: 2734774 - DNA, 25 bp, Homo sapien
tactcgagaatcattaggtaatttg

SEQ ID NO: 2734775 - DNA, 25 bp, Homo sapien
ccaagtattcttggtatgaaaccaa

SEQ ID NO: 2734776 - DNA, 25 bp, Homo sapien
gtctatcaacctaactcgttttcag

SEQ ID NO: 2734777 - DNA, 25 bp, Homo sapien
caagtaagtgggataacacatgtcc

SEQ ID NO: 2734778 - DNA, 25 bp, Homo sapien
tgcatcaattagacttacaccaagt

SEQ ID NO: 2734779 - DNA, 25 bp, Homo sapien
gctctgacaaggcacagttaaaatc

SEQ ID NO: 2734780 - DNA, 25 bp, Homo sapien
ctggctctgacaaggcacagttaaa

SEQ ID NO: 2734781 - DNA, 25 bp, Homo sapien
ggctctgacaaggcacagttaaaat

SEQ ID NO: 2734782 - DNA, 25 bp, Homo sapien
tggctctgacaaggcacagttaaaa

SEQ ID NO: 2734783 - DNA, 25 bp, Homo sapien
gggagtgcaagcgcccgccaccacg

SEQ ID NO: 2734784 - DNA, 25 bp, Homo sapien
agtagctgggagtgcaagcgcccgc

SEQ ID NO: 2734785 - DNA, 25 bp, Homo sapien
atcttctgaccttgtgatcctcccg

SEQ ID NO: 2734786 - DNA, 25 bp, Homo sapien
tcttctgaccttgtgatcctcccgt

SEQ ID NO: 2734787 - DNA, 25 bp, Homo sapien
cactcctctgaagggatgcagggca

SEQ ID NO: 2734788 - DNA, 25 bp, Homo sapien
atgcagggcagcactcgcctgggaa

SEQ ID NO: 2734789 - DNA, 25 bp, Homo sapien
cgtagggggattgggccactcctct

SEQ ID NO: 2734790 - DNA, 25 bp, Homo sapien
tcattcgtcagttaggtcctgaaca

SEQ ID NO: 2734791 - DNA, 25 bp, Homo sapien
ttacactattgtgggctaaggagcc

SEQ ID NO: 2734792 - DNA, 25 bp, Homo sapien
tacgtttgttgctaaccttgcgcgc

SEQ ID NO: 2734793 - DNA, 25 bp, Homo sapien
tgttcactggaaggtgcgtgcacag

SEQ ID NO: 2734794 - DNA, 25 bp, Homo sapien
cacaggttgtgactcttacgggcag

SEQ ID NO: 2734795 - DNA, 25 bp, Homo sapien
gaaggccgccctaacagttgtactg

SEQ ID NO: 2734796 - DNA, 25 bp, Homo sapien
gaatacttgtcagagcgcactggca

SEQ ID NO: 2734797 - DNA, 25 bp, Homo sapien
gatttaccccaacaactgaggactg

SEQ ID NO: 2734798 - DNA, 25 bp, Homo sapien
ttgtactgacataaagggagaccct

SEQ ID NO: 2734799 - DNA, 25 bp, Homo sapien
ttcaagcaccggataatgatgcccc

SEQ ID NO: 2734800 - DNA, 25 bp, Homo sapien
ctattcaggcgcagtacaagttggg

SEQ ID NO: 2734801 - DNA, 25 bp, Homo sapien
aaaaccagttgtagagcggagctcc

SEQ ID NO: 2734802 - DNA, 25 bp, Homo sapien
cagtcgtgggagtgcagaacaaaac

SEQ ID NO: 2734803 - DNA, 25 bp, Homo sapien
tgcccgaggttgcaaacctgacaaa

SEQ ID NO: 2734804 - DNA, 25 bp, Homo sapien
ggaagctagagaatttgcccgaggt

SEQ ID NO: 2734805 - DNA, 25 bp, Homo sapien
actagagagcccaaatttgaaccca

SEQ ID NO: 2734806 - DNA, 25 bp, Homo sapien
gaaattcaagttcagggaagctaga

SEQ ID NO: 2734807 - DNA, 25 bp, Homo sapien
cacagattgtgtgtcggctgcagca

SEQ ID NO: 2734808 - DNA, 25 bp, Homo sapien
tctggcctaggcatgacagtgggca

SEQ ID NO: 2734809 - DNA, 25 bp, Homo sapien
tatagcagtgttgaaaacccacgtg

SEQ ID NO: 2734810 - DNA, 25 bp, Homo sapien
gttgctgccctgaacgaactgcgtg

SEQ ID NO: 2734811 - DNA, 25 bp, Homo sapien
tgtgagggctgagtctggttcccta

SEQ ID NO: 2734812 - DNA, 25 bp, Homo sapien
tctggttccctaggggaccctcatc

SEQ ID NO: 2734813 - DNA, 25 bp, Homo sapien
gaccccgaacagtgaactcaggcag

SEQ ID NO: 2734814 - DNA, 25 bp, Homo sapien
tccttgaccccgaacagtgaactca

SEQ ID NO: 2734815 - DNA, 25 bp, Homo sapien
gtgtccctccgagagcggcgcaaaa

SEQ ID NO: 2734816 - DNA, 25 bp, Homo sapien
catggtccgggatcctcggctctta

SEQ ID NO: 2734817 - DNA, 25 bp, Homo sapien
caaaagagtaggaagcggacgaggg

SEQ ID NO: 2734818 - DNA, 25 bp, Homo sapien
aagtcgcagcgttctggcccctgcg

SEQ ID NO: 2734819 - DNA, 25 bp, Homo sapien
cttgcccggcagacgttagctcgtt

SEQ ID NO: 2734820 - DNA, 25 bp, Homo sapien
gcgtggcggttaaatgtctctgtga

SEQ ID NO: 2734821 - DNA, 25 bp, Homo sapien
tagctcgtttgcatgggtggtccgc

SEQ ID NO: 2734822 - DNA, 25 bp, Homo sapien
gccatgatgtcagcgcggtgctgca

SEQ ID NO: 2734823 - DNA, 25 bp, Homo sapien
cgttccagggagcatcgatagcact

SEQ ID NO: 2734824 - DNA, 25 bp, Homo sapien
tgatacgatcattgctggtctaaac

SEQ ID NO: 2734825 - DNA, 25 bp, Homo sapien
gatagcactgcatcatgaccttgct

SEQ ID NO: 2734826 - DNA, 25 bp, Homo sapien
tgcttagagatctgccgacagccgg

SEQ ID NO: 2734827 - DNA, 25 bp, Homo sapien
ccggagacgcgctgcagttctttgg

SEQ ID NO: 2734828 - DNA, 25 bp, Homo sapien
agcgggagctgcgccgctcttctcc

SEQ ID NO: 2734829 - DNA, 25 bp, Homo sapien
cccaggcgtccggcaccgcgagccg

SEQ ID NO: 2734830 - DNA, 25 bp, Homo sapien
ggcaccgcgagccggagacgcgctg

SEQ ID NO: 2734831 - DNA, 25 bp, Homo sapien
gcggggtcttcccgccaggcctctg

SEQ ID NO: 2734832 - DNA, 25 bp, Homo sapien
ttcccgccaggcctctgccggcgcc

SEQ ID NO: 2734833 - DNA, 25 bp, Homo sapien
gggtcttcccgccaggcctctgccg

SEQ ID NO: 2734834 - DNA, 25 bp, Homo sapien
tcttcccgccaggcctctgccggcg

SEQ ID NO: 2734835 - DNA, 25 bp, Homo sapien
cgcggccgaaagaggctccgccccg

SEQ ID NO: 2734836 - DNA, 25 bp, Homo sapien
cgcacgcgtggtgcggtccaggcag

SEQ ID NO: 2734837 - DNA, 25 bp, Homo sapien
ccctggccgactgacgctgggcggg

SEQ ID NO: 2734838 - DNA, 25 bp, Homo sapien
cgccccgcacgcgtggtgcggtcca

SEQ ID NO: 2734839 - DNA, 25 bp, Homo sapien
cattccgcagacttgaaaagtgagg

SEQ ID NO: 2734840 - DNA, 25 bp, Homo sapien
cactctccgggaagcgaagattctc

SEQ ID NO: 2734841 - DNA, 25 bp, Homo sapien
ggccggccgcctcgttttgttgtca

SEQ ID NO: 2734842 - DNA, 25 bp, Homo sapien
gaacgtaatccctcccgatgtctcg

SEQ ID NO: 2734843 - DNA, 25 bp, Homo sapien
agacgacctggttgtgcagcttgtg

SEQ ID NO: 2734844 - DNA, 25 bp, Homo sapien
aggcgcggtctgcagggactaccac

SEQ ID NO: 2734845 - DNA, 25 bp, Homo sapien
ggtctgcagggactaccaccacctg

SEQ ID NO: 2734846 - DNA, 25 bp, Homo sapien
ctaaacctgggctaagcagacgacc

SEQ ID NO: 2734847 - DNA, 25 bp, Homo sapien
tccaaaatgggcctaatgcagactc

SEQ ID NO: 2734848 - DNA, 25 bp, Homo sapien
gaagtcacccatttgaagtcctgag

SEQ ID NO: 2734849 - DNA, 25 bp, Homo sapien
gacctttggacccatcacgatgagg

SEQ ID NO: 2734850 - DNA, 25 bp, Homo sapien
tgcacgaggcgacagtttagataca

SEQ ID NO: 2734851 - DNA, 25 bp, Homo sapien
ctacgagtcttcagtgacaggggat

SEQ ID NO: 2734852 - DNA, 25 bp, Homo sapien
cagaggacctgggaacaaggcccaa

SEQ ID NO: 2734853 - DNA, 25 bp, Homo sapien
gcagagtacagctgggggcgccgga

SEQ ID NO: 2734854 - DNA, 25 bp, Homo sapien
aggggcctggccgaccctgagccca

SEQ ID NO: 2734855 - DNA, 25 bp, Homo sapien
gaccaaggcgccagagctcctggcg

SEQ ID NO: 2734856 - DNA, 25 bp, Homo sapien
gtccccttcgccacggaggcggcag

SEQ ID NO: 2734857 - DNA, 25 bp, Homo sapien
tgtccccttcgccacggaggcggca

SEQ ID NO: 2734858 - DNA, 25 bp, Homo sapien
tgtgtccccttcgccacggaggcgg

SEQ ID NO: 2734859 - DNA, 25 bp, Homo sapien
ctgtgtccccttcgccacggaggcg

SEQ ID NO: 2734860 - DNA, 25 bp, Homo sapien
gccgcatctcagagcagtccacggt

SEQ ID NO: 2734861 - DNA, 25 bp, Homo sapien
gagcagtccacggtgccaagatttt

SEQ ID NO: 2734862 - DNA, 25 bp, Homo sapien
ggcttcagccgcatctcagagcagt

SEQ ID NO: 2734863 - DNA, 25 bp, Homo sapien
gaggaggcttcagccgcatctcaga

SEQ ID NO: 2734864 - DNA, 25 bp, Homo sapien
aaggaagaaagcaatctgtaacctg

SEQ ID NO: 2734865 - DNA, 25 bp, Homo sapien
agaaagcaatctgtaacctgttgtg

SEQ ID NO: 2734866 - DNA, 25 bp, Homo sapien
gaagaaagcaatctgtaacctgttg

SEQ ID NO: 2734867 - DNA, 25 bp, Homo sapien
gaaagcaatctgtaacctgttgtga

SEQ ID NO: 2734868 - DNA, 25 bp, Homo sapien
tgaacgcccacgtccaatccgtgca

SEQ ID NO: 2734869 - DNA, 25 bp, Homo sapien
tccttctcctgaacgcccacgtcca

SEQ ID NO: 2734870 - DNA, 25 bp, Homo sapien
ttctctctaatcagcctgcatctct

SEQ ID NO: 2734871 - DNA, 25 bp, Homo sapien
gtccaatccgtgcagcctcctctgt

SEQ ID NO: 2734872 - DNA, 25 bp, Homo sapien
cagacaccacgagggcaggaaggag

SEQ ID NO: 2734873 - DNA, 25 bp, Homo sapien
gaaggaggaagcaggacagccatag

SEQ ID NO: 2734874 - DNA, 25 bp, Homo sapien
ggaagcaggacagccatagctgggc

SEQ ID NO: 2734875 - DNA, 25 bp, Homo sapien
gaggaagcaggacagccatagctgg

SEQ ID NO: 2734876 - DNA, 25 bp, Homo sapien
gaacttcggggccacgttggctgcc

SEQ ID NO: 2734877 - DNA, 25 bp, Homo sapien
ggaacttcggggccacgttggctgc

SEQ ID NO: 2734878 - DNA, 25 bp, Homo sapien
aacttcggggccacgttggctgcca

SEQ ID NO: 2734879 - DNA, 25 bp, Homo sapien
aggaacttcggggccacgttggctg

SEQ ID NO: 2734880 - DNA, 25 bp, Homo sapien
caggtcctcaggcaggatcactgac

SEQ ID NO: 2734881 - DNA, 25 bp, Homo sapien
cctcaggcaggatcactgacgtcat

SEQ ID NO: 2734882 - DNA, 25 bp, Homo sapien
tcctcaggcaggatcactgacgtca

SEQ ID NO: 2734883 - DNA, 25 bp, Homo sapien
ggtcctcaggcaggatcactgacgt

SEQ ID NO: 2734884 - DNA, 25 bp, Homo sapien
tcatcccataggtcagagggtcatt

SEQ ID NO: 2734885 - DNA, 25 bp, Homo sapien
cacttccccagttttcggagtgaca

SEQ ID NO: 2734886 - DNA, 25 bp, Homo sapien
gtccagagcgctggccagcttcact

SEQ ID NO: 2734887 - DNA, 25 bp, Homo sapien
tggtcttccgctaccaaccagaagg

SEQ ID NO: 2734888 - DNA, 25 bp, Homo sapien
ggtcgctcacggagatggtgacttt

SEQ ID NO: 2734889 - DNA, 25 bp, Homo sapien
ctggatgtaggggtcgctcacggag

SEQ ID NO: 2734890 - DNA, 25 bp, Homo sapien
taggggtcgctcacggagatggtga

SEQ ID NO: 2734891 - DNA, 25 bp, Homo sapien
tgtaggggtcgctcacggagatggt

SEQ ID NO: 2734892 - DNA, 25 bp, Homo sapien
tgttctggaaaacgggtgcgttgtc

SEQ ID NO: 2734893 - DNA, 25 bp, Homo sapien
agcggtgttctggaaaacgggtgcg

SEQ ID NO: 2734894 - DNA, 25 bp, Homo sapien
tggagaaagcggtgttctggaaaac

SEQ ID NO: 2734895 - DNA, 25 bp, Homo sapien
gtgcgttgtcgtttctatcttccac

SEQ ID NO: 2734896 - DNA, 25 bp, Homo sapien
gctttggttcttgaagctgcccctg

SEQ ID NO: 2734897 - DNA, 25 bp, Homo sapien
tcctaacctgactgattgcaaaata

SEQ ID NO: 2734898 - DNA, 25 bp, Homo sapien
aatattgctgtaaccagtttgtggg

SEQ ID NO: 2734899 - DNA, 25 bp, Homo sapien
tgcccctgctaggagaggtttttcc

SEQ ID NO: 2734900 - DNA, 25 bp, Homo sapien
tggagtacacgaccatgcctgcaga

SEQ ID NO: 2734901 - DNA, 25 bp, Homo sapien
gcagaccccatgtctttatccacgg

SEQ ID NO: 2734902 - DNA, 25 bp, Homo sapien
catgtctttatccacggccagcacg

SEQ ID NO: 2734903 - DNA, 25 bp, Homo sapien
ggccagcacggagaacaccacactg

SEQ ID NO: 2734904 - DNA, 25 bp, Homo sapien
cattgaggactatggagccattggc

SEQ ID NO: 2734905 - DNA, 25 bp, Homo sapien
agccattggccaggatccggaagag

SEQ ID NO: 2734906 - DNA, 25 bp, Homo sapien
cagctggtagaaagcgctcttgttg

SEQ ID NO: 2734907 - DNA, 25 bp, Homo sapien
aagagatgctcgctgtccccagtgc

SEQ ID NO: 2734908 - DNA, 25 bp, Homo sapien
tgaaggtgttgtggtacatgccgcc

SEQ ID NO: 2734909 - DNA, 25 bp, Homo sapien
ggtccaccacggagatggacaggaa

SEQ ID NO: 2734910 - DNA, 25 bp, Homo sapien
ggtcaggctggtccaccacggagat

SEQ ID NO: 2734911 - DNA, 25 bp, Homo sapien
cacagaggccgagtaaaactccctg

SEQ ID NO: 2734912 - DNA, 25 bp, Homo sapien
tcattgatgcctttgtcgccatcca

SEQ ID NO: 2734913 - DNA, 25 bp, Homo sapien
tgatgcctttgtcgccatccacagc

SEQ ID NO: 2734914 - DNA, 25 bp, Homo sapien
ttgatgcctttgtcgccatccacag

SEQ ID NO: 2734915 - DNA, 25 bp, Homo sapien
agggtcattgatgcctttgtcgcca

SEQ ID NO: 2734916 - DNA, 25 bp, Homo sapien
gctgcacctcctcatccgcctccag

SEQ ID NO: 2734917 - DNA, 25 bp, Homo sapien
cccatctgccccgatgtcaaaccag

SEQ ID NO: 2734918 - DNA, 25 bp, Homo sapien
cgatgtcaaaccagccgggccgcgt

SEQ ID NO: 2734919 - DNA, 25 bp, Homo sapien
ccgttgaccctgatcaccccatctg

SEQ ID NO: 2734920 - DNA, 25 bp, Homo sapien
cgtccacgtagccagtgaagttcac

SEQ ID NO: 2734921 - DNA, 25 bp, Homo sapien
ggtcattgacgtccatcactctcac

SEQ ID NO: 2734922 - DNA, 25 bp, Homo sapien
ctcctgcccgtagatgttgaggtgt

SEQ ID NO: 2734923 - DNA, 25 bp, Homo sapien
tgaagttcacttgggcctcttcggg

SEQ ID NO: 2734924 - DNA, 25 bp, Homo sapien
cacatgacaccgtcactcgatccag

SEQ ID NO: 2734925 - DNA, 25 bp, Homo sapien
ccagcaccacatgacaccgtcactc

SEQ ID NO: 2734926 - DNA, 25 bp, Homo sapien
atgacaccgtcactcgatccaggct

SEQ ID NO: 2734927 - DNA, 25 bp, Homo sapien
gcaccacatgacaccgtcactcgat

SEQ ID NO: 2734928 - DNA, 25 bp, Homo sapien
gcacccccattctccgccatcacac

SEQ ID NO: 2734929 - DNA, 25 bp, Homo sapien
cccccagcgacaacaggaaggtgcc

SEQ ID NO: 2734930 - DNA, 25 bp, Homo sapien
ccccagcgacaacaggaaggtgcca

SEQ ID NO: 2734931 - DNA, 25 bp, Homo sapien
cccagcgacaacaggaaggtgccat

SEQ ID NO: 2734932 - DNA, 25 bp, Homo sapien
gccccccagcgacaacaggaaggtg

SEQ ID NO: 2734933 - DNA, 25 bp, Homo sapien
accagcacctgaacggaggctgagc

SEQ ID NO: 2734934 - DNA, 25 bp, Homo sapien
cgtagtccaccagcgcggatactct

SEQ ID NO: 2734935 - DNA, 25 bp, Homo sapien
cgctccggggagacgctgaaggctt

SEQ ID NO: 2734936 - DNA, 25 bp, Homo sapien
atcgccgtctgcctctcgtagtcca

SEQ ID NO: 2734937 - DNA, 25 bp, Homo sapien
tctggctgacggagtctgtggccac

SEQ ID NO: 2734938 - DNA, 25 bp, Homo sapien
tctaaggtggatggtcaccatggcg

SEQ ID NO: 2734939 - DNA, 25 bp, Homo sapien
accatggcgacggagaagttctggc

SEQ ID NO: 2734940 - DNA, 25 bp, Homo sapien
caccgtgaggacgtacaagctctgg

SEQ ID NO: 2734941 - DNA, 25 bp, Homo sapien
acgcgcccgtgtctgggtccgtggc

SEQ ID NO: 2734942 - DNA, 25 bp, Homo sapien
tggccccacgcgcccgtgtctgggt

SEQ ID NO: 2734943 - DNA, 25 bp, Homo sapien
tcctgggagcaggctgtaggtaatt

SEQ ID NO: 2734944 - DNA, 25 bp, Homo sapien
cctgggagcaggctgtaggtaattt

SEQ ID NO: 2734945 - DNA, 25 bp, Homo sapien
gatgttgtaggagccgctaaccacg

SEQ ID NO: 2734946 - DNA, 25 bp, Homo sapien
ggatggtcacggagacattgccctc

SEQ ID NO: 2734947 - DNA, 25 bp, Homo sapien
cctcctcctggacgaagatgttgta

SEQ ID NO: 2734948 - DNA, 25 bp, Homo sapien
gctaaccacgggtgcattgtcgttg

SEQ ID NO: 2734949 - DNA, 25 bp, Homo sapien
ggtcatcggccatcggcattcccag

SEQ ID NO: 2734950 - DNA, 25 bp, Homo sapien
tgcacgtaagcaggggttggtcatc

SEQ ID NO: 2734951 - DNA, 25 bp, Homo sapien
agcccctccgatgcagccggaccct

SEQ ID NO: 2734952 - DNA, 25 bp, Homo sapien
taagcaggggttggtcatcggccat

SEQ ID NO: 2734953 - DNA, 25 bp, Homo sapien
cgaggacaggctcgccgcagtcaga

SEQ ID NO: 2734954 - DNA, 25 bp, Homo sapien
cgcagtcagacacaagcactgtcag

SEQ ID NO: 2734955 - DNA, 25 bp, Homo sapien
tgatggtgacattgactttggtgcc

SEQ ID NO: 2734956 - DNA, 25 bp, Homo sapien
aagcactgtcagcacaatgcggccc

SEQ ID NO: 2734957 - DNA, 25 bp, Homo sapien
gactgattgaagatgggcaggttat

SEQ ID NO: 2734958 - DNA, 25 bp, Homo sapien
tcctccttcaccgtaaagttgtagc

SEQ ID NO: 2734959 - DNA, 25 bp, Homo sapien
ttgtagctggactgattgaagatgg

SEQ ID NO: 2734960 - DNA, 25 bp, Homo sapien
ccgtaaagttgtagctggactgatt

SEQ ID NO: 2734961 - DNA, 25 bp, Homo sapien
gctgatgcggttgttggcttccgtc

SEQ ID NO: 2734962 - DNA, 25 bp, Homo sapien
tgttggcttccgtctggtccgcgtc

SEQ ID NO: 2734963 - DNA, 25 bp, Homo sapien
cctcggatcatgaagtagttggcac

SEQ ID NO: 2734964 - DNA, 25 bp, Homo sapien
gtagttggcaccactccccgacagg

SEQ ID NO: 2734965 - DNA, 25 bp, Homo sapien
tcactgtcaagttgaagacgggctg

SEQ ID NO: 2734966 - DNA, 25 bp, Homo sapien
gacgggctgtgtctcgtaatccagg

SEQ ID NO: 2734967 - DNA, 25 bp, Homo sapien
gttgatgtacacagagccgttggcc

SEQ ID NO: 2734968 - DNA, 25 bp, Homo sapien
cggatgccccggagtgaggctacat

SEQ ID NO: 2734969 - DNA, 25 bp, Homo sapien
aaaatagggtgcattgtcattcacg

SEQ ID NO: 2734970 - DNA, 25 bp, Homo sapien
tcctcaatggtaatgaggaggcttc

SEQ ID NO: 2734971 - DNA, 25 bp, Homo sapien
gaaaatagggtgcattgtcattcac

SEQ ID NO: 2734972 - DNA, 25 bp, Homo sapien
tgcaggtgtgaacgggaacggggtc

SEQ ID NO: 2734973 - DNA, 25 bp, Homo sapien
agcggggtcgggacactgcccacct

SEQ ID NO: 2734974 - DNA, 25 bp, Homo sapien
ctggaccaaggctggtcacgagccc

SEQ ID NO: 2734975 - DNA, 25 bp, Homo sapien
aaggctggtcacgagcccagctcag

SEQ ID NO: 2734976 - DNA, 25 bp, Homo sapien
ggcagcacgagttcagggatgatca

SEQ ID NO: 2734977 - DNA, 25 bp, Homo sapien
acagaagccacctcccggttgggca

SEQ ID NO: 2734978 - DNA, 25 bp, Homo sapien
cggacagaagccacctcccggttgg

SEQ ID NO: 2734979 - DNA, 25 bp, Homo sapien
gttgggcagcacgagttcagggatg

SEQ ID NO: 2734980 - DNA, 25 bp, Homo sapien
gatgacgccattgttccctgaatca

SEQ ID NO: 2734981 - DNA, 25 bp, Homo sapien
tggtggccccgtccttagagatgaa

SEQ ID NO: 2734982 - DNA, 25 bp, Homo sapien
gaagatcgagaagacaccctggaaa

SEQ ID NO: 2734983 - DNA, 25 bp, Homo sapien
tagagatgaagtctactcggaggat

SEQ ID NO: 2734984 - DNA, 25 bp, Homo sapien
agtggagtcgaggctggtcaccggc

SEQ ID NO: 2734985 - DNA, 25 bp, Homo sapien
cacttggtaggtgccttggagagtg

SEQ ID NO: 2734986 - DNA, 25 bp, Homo sapien
ggagagtggagtcgaggctggtcac

SEQ ID NO: 2734987 - DNA, 25 bp, Homo sapien
gagagtggagtcgaggctggtcacc

SEQ ID NO: 2734988 - DNA, 25 bp, Homo sapien
aagggggtgtgcaggagatgaggca

SEQ ID NO: 2734989 - DNA, 25 bp, Homo sapien
gatgaggcaccagggaccctggggg

SEQ ID NO: 2734990 - DNA, 25 bp, Homo sapien
ctgggggctggcagagggcgttggg

SEQ ID NO: 2734991 - DNA, 25 bp, Homo sapien
caggagatgaggcaccagggaccct

SEQ ID NO: 2734992 - DNA, 25 bp, Homo sapien
aactgcagccgcgagcggtaactct

SEQ ID NO: 2734993 - DNA, 25 bp, Homo sapien
cctccttcggtgtggagaactgcag

SEQ ID NO: 2734994 - DNA, 25 bp, Homo sapien
ctcctccttcggtgtggagaactgc

SEQ ID NO: 2734995 - DNA, 25 bp, Homo sapien
ggtaactctggtccacggtgaagag

SEQ ID NO: 2734996 - DNA, 25 bp, Homo sapien
ttaatcgcctgtctgttggcgccca

SEQ ID NO: 2734997 - DNA, 25 bp, Homo sapien
cattaatcgcctgtctgttggcgcc

SEQ ID NO: 2734998 - DNA, 25 bp, Homo sapien
taatcgcctgtctgttggcgcccac

SEQ ID NO: 2734999 - DNA, 25 bp, Homo sapien
gcattaatcgcctgtctgttggcgc

SEQ ID NO: 2735000 - DNA, 25 bp, Homo sapien
tcctgaatgtccacaatgtatactg

SEQ ID NO: 2735001 - DNA, 25 bp, Homo sapien
cgagctgcagaatctatgtcctgaa

SEQ ID NO: 2735002 - DNA, 25 bp, Homo sapien
agtcctggttgcctgggtaagagcc

SEQ ID NO: 2735003 - DNA, 25 bp, Homo sapien
ccacaatgtatactgtagtcctggt

SEQ ID NO: 2735004 - DNA, 25 bp, Homo sapien
agacaaagtaggcatcgaggtagga

SEQ ID NO: 2735005 - DNA, 25 bp, Homo sapien
gggaagacaaagtaggcatcgaggt

SEQ ID NO: 2735006 - DNA, 25 bp, Homo sapien
gaagacaaagtaggcatcgaggtag

SEQ ID NO: 2735007 - DNA, 25 bp, Homo sapien
agggctgacccattggggaagacaa

SEQ ID NO: 2735008 - DNA, 25 bp, Homo sapien
cacttaggcccgagggaccttggca

SEQ ID NO: 2735009 - DNA, 25 bp, Homo sapien
acagaactccacttaggcccgaggg

SEQ ID NO: 2735010 - DNA, 25 bp, Homo sapien
ggccacagaactccacttaggcccg

SEQ ID NO: 2735011 - DNA, 25 bp, Homo sapien
agggaccttggcacaccccaggctt

SEQ ID NO: 2735012 - DNA, 25 bp, Homo sapien
gtcagcgagtcctgatcattccgga

SEQ ID NO: 2735013 - DNA, 25 bp, Homo sapien
gcgagtcctgatcattccggatcat

SEQ ID NO: 2735014 - DNA, 25 bp, Homo sapien
tgcgtcagcgagtcctgatcattcc

SEQ ID NO: 2735015 - DNA, 25 bp, Homo sapien
gctgcgtcagcgagtcctgatcatt

SEQ ID NO: 2735016 - DNA, 25 bp, Homo sapien
agcaaagccactcccaatcctatga

SEQ ID NO: 2735017 - DNA, 25 bp, Homo sapien
cacacacacgaaggccatggtcatg

SEQ ID NO: 2735018 - DNA, 25 bp, Homo sapien
caatcctatgatgacactgatgagc

SEQ ID NO: 2735019 - DNA, 25 bp, Homo sapien
gatgagctgtttcgacaggtctgac

SEQ ID NO: 2735020 - DNA, 25 bp, Homo sapien
ggctgagggcatcacccctgctgct

SEQ ID NO: 2735021 - DNA, 25 bp, Homo sapien
ttggcagccttcatagcttgaagct

SEQ ID NO: 2735022 - DNA, 25 bp, Homo sapien
gggctgagggcatcacccctgctgc

SEQ ID NO: 2735023 - DNA, 25 bp, Homo sapien
catagcttgaagcttccggttgtag

SEQ ID NO: 2735024 - DNA, 25 bp, Homo sapien
ctgacagagtccaggtcattggagg

SEQ ID NO: 2735025 - DNA, 25 bp, Homo sapien
gtactccaagcccaggtctttgttg

SEQ ID NO: 2735026 - DNA, 25 bp, Homo sapien
actccaagcccaggtctttgttggg

SEQ ID NO: 2735027 - DNA, 25 bp, Homo sapien
gagaggtactccaagcccaggtctt

SEQ ID NO: 2735028 - DNA, 25 bp, Homo sapien
ccaccaccaccgtcactacctgtac

SEQ ID NO: 2735029 - DNA, 25 bp, Homo sapien
accaccaccgtcactacctgtacca

SEQ ID NO: 2735030 - DNA, 25 bp, Homo sapien
ccaccacctagcctggctgtgaggg

SEQ ID NO: 2735031 - DNA, 25 bp, Homo sapien
accaccgtcactacctgtaccacca

SEQ ID NO: 2735032 - DNA, 25 bp, Homo sapien
ccacatccacagagttgtcgtccag

SEQ ID NO: 2735033 - DNA, 25 bp, Homo sapien
cacagagttgtcgtccagggagttg

SEQ ID NO: 2735034 - DNA, 25 bp, Homo sapien
catccacagagttgtcgtccaggga

SEQ ID NO: 2735035 - DNA, 25 bp, Homo sapien
cagagttgtcgtccagggagttgac

SEQ ID NO: 2735036 - DNA, 25 bp, Homo sapien
ttgcgcctgcctgccgtcctaacag

SEQ ID NO: 2735037 - DNA, 25 bp, Homo sapien
tcctaacaggaccacgctcaggggc

SEQ ID NO: 2735038 - DNA, 25 bp, Homo sapien
tcacaggtccgtggtgtccaggcca

SEQ ID NO: 2735039 - DNA, 25 bp, Homo sapien
cagcgttggtgtaggatggcccctc

SEQ ID NO: 2735040 - DNA, 25 bp, Homo sapien
tccagggagacaggtgcagttaggg

SEQ ID NO: 2735041 - DNA, 25 bp, Homo sapien
gtcacagtatacattggtaataaaa

SEQ ID NO: 2735042 - DNA, 25 bp, Homo sapien
ttttggctacaaactgtcacagtat

SEQ ID NO: 2735043 - DNA, 25 bp, Homo sapien
tgtctgccgtgattggccaaaagca

SEQ ID NO: 2735044 - DNA, 25 bp, Homo sapien
tctggagcgacagatcgaggagcac

SEQ ID NO: 2735045 - DNA, 25 bp, Homo sapien
ttcttgatcacaggcccctagaagg

SEQ ID NO: 2735046 - DNA, 25 bp, Homo sapien
tctgagtggcagaagcttcaagtgg

SEQ ID NO: 2735047 - DNA, 25 bp, Homo sapien
tcctgagatgtctagactggtgcgt

SEQ ID NO: 2735048 - DNA, 25 bp, Homo sapien
cggctgagcccgtgcgagacgtgag

SEQ ID NO: 2735049 - DNA, 25 bp, Homo sapien
tcagcgctggcggccgctgtagcgc

SEQ ID NO: 2735050 - DNA, 25 bp, Homo sapien
ggagccggctgagcccgtgcgagac

SEQ ID NO: 2735051 - DNA, 25 bp, Homo sapien
ccggagccggctgagcccgtgcgag

SEQ ID NO: 2735052 - DNA, 25 bp, Homo sapien
ttttccttggctacacgcgtgggat

SEQ ID NO: 2735053 - DNA, 25 bp, Homo sapien
gaccccaggtctatctttaggacca

SEQ ID NO: 2735054 - DNA, 25 bp, Homo sapien
ccttctagtagctgcccggtgctct

SEQ ID NO: 2735055 - DNA, 25 bp, Homo sapien
cgcgtgggatcccagtagcgatgct

SEQ ID NO: 2735056 - DNA, 25 bp, Homo sapien
gatgcgcgtcagtgtgcaccccgga

SEQ ID NO: 2735057 - DNA, 25 bp, Homo sapien
caccccggagtatgtgagtatgctc

SEQ ID NO: 2735058 - DNA, 25 bp, Homo sapien
cgtcagtgtgcaccccggagtatgt

SEQ ID NO: 2735059 - DNA, 25 bp, Homo sapien
gtatgtgagtatgctccggtgtttg

SEQ ID NO: 2735060 - DNA, 25 bp, Homo sapien
ccttgttgctttggatgttgatccg

SEQ ID NO: 2735061 - DNA, 25 bp, Homo sapien
ttccaccactgagcgcacgaacaca

SEQ ID NO: 2735062 - DNA, 25 bp, Homo sapien
gagcgcacgaacacacacgcgtaca

SEQ ID NO: 2735063 - DNA, 25 bp, Homo sapien
gctgtaatgaccttgttgctttgga

SEQ ID NO: 2735064 - DNA, 25 bp, Homo sapien
cagagtcatcgtccttagtacattc

SEQ ID NO: 2735065 - DNA, 25 bp, Homo sapien
ccagagtcatcgtccttagtacatt

SEQ ID NO: 2735066 - DNA, 25 bp, Homo sapien
agtcatctgctcactcacacgtggg

SEQ ID NO: 2735067 - DNA, 25 bp, Homo sapien
tattctactagagtcacaggcccag

SEQ ID NO: 2735068 - DNA, 25 bp, Homo sapien
caatgtgggtagtgctcagtaggac

SEQ ID NO: 2735069 - DNA, 25 bp, Homo sapien
catttattatgctcacaagcgtgca

SEQ ID NO: 2735070 - DNA, 25 bp, Homo sapien
gccaggcctgagcttcatcgagtca

SEQ ID NO: 2735071 - DNA, 25 bp, Homo sapien
tgattctaccctgaccgcggccagg

SEQ ID NO: 2735072 - DNA, 25 bp, Homo sapien
gggttctagtcctgattctaccctg

SEQ ID NO: 2735073 - DNA, 25 bp, Homo sapien
tgttctctgcctgacctggatggtg

SEQ ID NO: 2735074 - DNA, 25 bp, Homo sapien
caacctcacatcagagcaggtattc

SEQ ID NO: 2735075 - DNA, 25 bp, Homo sapien
ccaacctcacatcagagcaggtatt

SEQ ID NO: 2735076 - DNA, 25 bp, Homo sapien
acctcacatcagagcaggtattcat

SEQ ID NO: 2735077 - DNA, 25 bp, Homo sapien
ccccaacctcacatcagagcaggta

SEQ ID NO: 2735078 - DNA, 25 bp, Homo sapien
tggccgtggggccttctggcaccat

SEQ ID NO: 2735079 - DNA, 25 bp, Homo sapien
atggccgtggggccttctggcacca

SEQ ID NO: 2735080 - DNA, 25 bp, Homo sapien
tagtgagtgccttcttcgtgcaggc

SEQ ID NO: 2735081 - DNA, 25 bp, Homo sapien
agtgccttcttcgtgcaggcctggg

SEQ ID NO: 2735082 - DNA, 25 bp, Homo sapien
agtgagtgccttcttcgtgcaggcc

SEQ ID NO: 2735083 - DNA, 25 bp, Homo sapien
tgagtgccttcttcgtgcaggcctg

SEQ ID NO: 2735084 - DNA, 25 bp, Homo sapien
tttctcctgtgggcgtcctctctgc

SEQ ID NO: 2735085 - DNA, 25 bp, Homo sapien
gagacagcaaagtcctgggagagtt

SEQ ID NO: 2735086 - DNA, 25 bp, Homo sapien
tcctcctcccactctcggattccac

SEQ ID NO: 2735087 - DNA, 25 bp, Homo sapien
agcttgacttccatggggccccccg

SEQ ID NO: 2735088 - DNA, 25 bp, Homo sapien
gggggaggcagccaggaggaagcag

SEQ ID NO: 2735089 - DNA, 25 bp, Homo sapien
gggaggcagccaggaggaagcagag

SEQ ID NO: 2735090 - DNA, 25 bp, Homo sapien
gaggcagccaggaggaagcagagag

SEQ ID NO: 2735091 - DNA, 25 bp, Homo sapien
tggtaggggaagggggaggcagcca

SEQ ID NO: 2735092 - DNA, 25 bp, Homo sapien
tcattcttgaagaaccacagagccc

SEQ ID NO: 2735093 - DNA, 25 bp, Homo sapien
gcggtcattcttgaagaaccacaga

SEQ ID NO: 2735094 - DNA, 25 bp, Homo sapien
ggtcattcttgaagaaccacagagc

SEQ ID NO: 2735095 - DNA, 25 bp, Homo sapien
cggtcattcttgaagaaccacagag

SEQ ID NO: 2735096 - DNA, 25 bp, Homo sapien
tgaggcagccgagtcctccctttgc

SEQ ID NO: 2735097 - DNA, 25 bp, Homo sapien
tcaccctccctagggcttgtgtagc

SEQ ID NO: 2735098 - DNA, 25 bp, Homo sapien
agtggccgagtcaaggtcagcttcc

SEQ ID NO: 2735099 - DNA, 25 bp, Homo sapien
cgaccccatgccaaaagtcaaggct

SEQ ID NO: 2735100 - DNA, 25 bp, Homo sapien
cttgaagagggcgtagtcacagcca

SEQ ID NO: 2735101 - DNA, 25 bp, Homo sapien
tgaagagggcgtagtcacagccaga

SEQ ID NO: 2735102 - DNA, 25 bp, Homo sapien
ggccagctggatgtgactgtatagc

SEQ ID NO: 2735103 - DNA, 25 bp, Homo sapien
tggccagctggatgtgactgtatag

SEQ ID NO: 2735104 - DNA, 25 bp, Homo sapien
ggcagatggcaagtcaactgcctcc

SEQ ID NO: 2735105 - DNA, 25 bp, Homo sapien
ctgcaaggcagatggcaagtcaact

SEQ ID NO: 2735106 - DNA, 25 bp, Homo sapien
tgcaaggcagatggcaagtcaactg

SEQ ID NO: 2735107 - DNA, 25 bp, Homo sapien
caaggcagatggcaagtcaactgcc

SEQ ID NO: 2735108 - DNA, 25 bp, Homo sapien
gcggccaccccgtttattcctgctg

SEQ ID NO: 2735109 - DNA, 25 bp, Homo sapien
tcaatgtggcgctgctgcttggcca

SEQ ID NO: 2735110 - DNA, 25 bp, Homo sapien
agccacagccggtccagctcaatgt

SEQ ID NO: 2735111 - DNA, 25 bp, Homo sapien
gtcctcccacatgggctggatgcca

SEQ ID NO: 2735112 - DNA, 25 bp, Homo sapien
gctgggacatagggactggcctgcc

SEQ ID NO: 2735113 - DNA, 25 bp, Homo sapien
tgagacccacacagcccgtctcttc

SEQ ID NO: 2735114 - DNA, 25 bp, Homo sapien
atccttgagaccactgccaccatga

SEQ ID NO: 2735115 - DNA, 25 bp, Homo sapien
ccgaagtagggggttgtgagatcac

SEQ ID NO: 2735116 - DNA, 25 bp, Homo sapien
aagctctccccgatcagacacagca

SEQ ID NO: 2735117 - DNA, 25 bp, Homo sapien
tccctcgtccacacagcgatcttgt

SEQ ID NO: 2735118 - DNA, 25 bp, Homo sapien
acgtgcagcacgcccgcctggtttt

SEQ ID NO: 2735119 - DNA, 25 bp, Homo sapien
ccccttggtgcggatgttgacgacg

SEQ ID NO: 2735120 - DNA, 25 bp, Homo sapien
gactttcagaggtctcccatgcagg

SEQ ID NO: 2735121 - DNA, 25 bp, Homo sapien
caaaaggagagctgcactgccgtaa

SEQ ID NO: 2735122 - DNA, 25 bp, Homo sapien
cacaggtagtcatcagagggtccta

SEQ ID NO: 2735123 - DNA, 25 bp, Homo sapien
tagagataacttaggccaccagact

SEQ ID NO: 2735124 - DNA, 25 bp, Homo sapien
gcccaggcgctctttgtatacacgc

SEQ ID NO: 2735125 - DNA, 25 bp, Homo sapien
gaggcccaggcgctctttgtataca

SEQ ID NO: 2735126 - DNA, 25 bp, Homo sapien
gagaggcccaggcgctctttgtata

SEQ ID NO: 2735127 - DNA, 25 bp, Homo sapien
ggcccaggcgctctttgtatacacg

SEQ ID NO: 2735128 - DNA, 25 bp, Homo sapien
aacgctggactatgggtttctccgc

SEQ ID NO: 2735129 - DNA, 25 bp, Homo sapien
tgtacaaatgatggcgttcaccctc

SEQ ID NO: 2735130 - DNA, 25 bp, Homo sapien
ggctcaggccccaactcatgttaaa

SEQ ID NO: 2735131 - DNA, 25 bp, Homo sapien
tcctgggtggaaacagtaaacgctg

SEQ ID NO: 2735132 - DNA, 25 bp, Homo sapien
gcttcatggcctcggccacacagag

SEQ ID NO: 2735133 - DNA, 25 bp, Homo sapien
ctcggccacacagagcgccggtcgg

SEQ ID NO: 2735134 - DNA, 25 bp, Homo sapien
gcccggggcctagccgggcggctgc

SEQ ID NO: 2735135 - DNA, 25 bp, Homo sapien
cggcttcatggcctcggccacacag

SEQ ID NO: 2735136 - DNA, 25 bp, Homo sapien
aaccggagccgggagccaggcccag

SEQ ID NO: 2735137 - DNA, 25 bp, Homo sapien
agccaggcccagcgccccgcgggcc

SEQ ID NO: 2735138 - DNA, 25 bp, Homo sapien
tgagcggccacccgccggcccggaa

SEQ ID NO: 2735139 - DNA, 25 bp, Homo sapien
gtgagcggccacccgccggcccgga

SEQ ID NO: 2735140 - DNA, 25 bp, Homo sapien
tggaaatgctggtgcttgccgggca

SEQ ID NO: 2735141 - DNA, 25 bp, Homo sapien
gcagcagccgacctcaggttcctgg

SEQ ID NO: 2735142 - DNA, 25 bp, Homo sapien
aagtatttcccgcagcagccgacct

SEQ ID NO: 2735143 - DNA, 25 bp, Homo sapien
aatgttgaagccaaacaggaagtat

SEQ ID NO: 2735144 - DNA, 25 bp, Homo sapien
ccagaggccgatagccaggaacagg

SEQ ID NO: 2735145 - DNA, 25 bp, Homo sapien
aggcccagaggccgatagccaggaa

SEQ ID NO: 2735146 - DNA, 25 bp, Homo sapien
gcccagaggccgatagccaggaaca

SEQ ID NO: 2735147 - DNA, 25 bp, Homo sapien
cagaggccgatagccaggaacaggg

SEQ ID NO: 2735148 - DNA, 25 bp, Homo sapien
atgacgcctccaactaccacaaaca

SEQ ID NO: 2735149 - DNA, 25 bp, Homo sapien
ctgtcagcgctgagatgttcgagag

SEQ ID NO: 2735150 - DNA, 25 bp, Homo sapien
cacaaacagccacacggggtcaagg

SEQ ID NO: 2735151 - DNA, 25 bp, Homo sapien
gggtcaaggcctcccagatctgtca

SEQ ID NO: 2735152 - DNA, 25 bp, Homo sapien
agggccccaatgcagccagcaaagc

SEQ ID NO: 2735153 - DNA, 25 bp, Homo sapien
agcaggaaggtgttctcccggaggg

SEQ ID NO: 2735154 - DNA, 25 bp, Homo sapien
cggagggccccaatgcagccagcaa

SEQ ID NO: 2735155 - DNA, 25 bp, Homo sapien
cccggagggccccaatgcagccagc

SEQ ID NO: 2735156 - DNA, 25 bp, Homo sapien
cagggcttgggtgtgccacagggaa

SEQ ID NO: 2735157 - DNA, 25 bp, Homo sapien
gttatatgatggtaataggcatctg

SEQ ID NO: 2735158 - DNA, 25 bp, Homo sapien
tagtattgttatatgatggtaatag

SEQ ID NO: 2735159 - DNA, 25 bp, Homo sapien
ggaagggctccatccctacctccac

SEQ ID NO: 2735160 - DNA, 25 bp, Homo sapien
ggaagaagatgagaccgaggaacac

SEQ ID NO: 2735161 - DNA, 25 bp, Homo sapien
aggaagaagatgagaccgaggaaca

SEQ ID NO: 2735162 - DNA, 25 bp, Homo sapien
gaagaagatgagaccgaggaacacg

SEQ ID NO: 2735163 - DNA, 25 bp, Homo sapien
agaagatgagaccgaggaacacgga

SEQ ID NO: 2735164 - DNA, 25 bp, Homo sapien
tctggaggtcaatgtcgtcccggta

SEQ ID NO: 2735165 - DNA, 25 bp, Homo sapien
aggttctggaggtcaatgtcgtccc

SEQ ID NO: 2735166 - DNA, 25 bp, Homo sapien
aatgtcgtcccggtaggccttgacg

SEQ ID NO: 2735167 - DNA, 25 bp, Homo sapien
aggtcaatgtcgtcccggtaggcct

SEQ ID NO: 2735168 - DNA, 25 bp, Homo sapien
gaggcttcaagctctccacgcagag

SEQ ID NO: 2735169 - DNA, 25 bp, Homo sapien
tcattcgtctgccaggaaggcgcct

SEQ ID NO: 2735170 - DNA, 25 bp, Homo sapien
cagagagcctctgtaccagtgaagg

SEQ ID NO: 2735171 - DNA, 25 bp, Homo sapien
catagctgcagccaataccgtgggc

SEQ ID NO: 2735172 - DNA, 25 bp, Homo sapien
gaagtagatattgaggttccagtca

SEQ ID NO: 2735173 - DNA, 25 bp, Homo sapien
aggagaagggcaccccgcagcgctc

SEQ ID NO: 2735174 - DNA, 25 bp, Homo sapien
cagggtccctgacgcagcaggagaa

SEQ ID NO: 2735175 - DNA, 25 bp, Homo sapien
caagtcagtgcagttgaagtagata

SEQ ID NO: 2735176 - DNA, 25 bp, Homo sapien
gacctgcctccgttcaggaatcctg

SEQ ID NO: 2735177 - DNA, 25 bp, Homo sapien
catcccagatggactatgactgaag

SEQ ID NO: 2735178 - DNA, 25 bp, Homo sapien
gaatgcgtggctgcaatcgccaacc

SEQ ID NO: 2735179 - DNA, 25 bp, Homo sapien
tctgccctgaagaaagtcgtaaagg

SEQ ID NO: 2735180 - DNA, 25 bp, Homo sapien
ttgagccggacgtcgtagccacact

SEQ ID NO: 2735181 - DNA, 25 bp, Homo sapien
cagtttgagccggacgtcgtagcca

SEQ ID NO: 2735182 - DNA, 25 bp, Homo sapien
gtttgagccggacgtcgtagccaca

SEQ ID NO: 2735183 - DNA, 25 bp, Homo sapien
gagccggacgtcgtagccacactgg

SEQ ID NO: 2735184 - DNA, 25 bp, Homo sapien
ccgccaccacaatcaggttgtcctg

SEQ ID NO: 2735185 - DNA, 25 bp, Homo sapien
agggcgatgcccatgaagactcccg

SEQ ID NO: 2735186 - DNA, 25 bp, Homo sapien
actcccgccaccacaatcaggttgt

SEQ ID NO: 2735187 - DNA, 25 bp, Homo sapien
ccaccacaatcaggttgtcctgcag

SEQ ID NO: 2735188 - DNA, 25 bp, Homo sapien
agagtgagggcggccccggcaaggg

SEQ ID NO: 2735189 - DNA, 25 bp, Homo sapien
gagagtgagggcggccccggcaagg

SEQ ID NO: 2735190 - DNA, 25 bp, Homo sapien
ggttctgggccaggcagatgccaaa

SEQ ID NO: 2735191 - DNA, 25 bp, Homo sapien
ttctgggccaggcagatgccaaaga

SEQ ID NO: 2735192 - DNA, 25 bp, Homo sapien
gaggttctgggccaggcagatgcca

SEQ ID NO: 2735193 - DNA, 25 bp, Homo sapien
tctgggccaggcagatgccaaagat

SEQ ID NO: 2735194 - DNA, 25 bp, Homo sapien
cagttggctttcactgccttgatgt

SEQ ID NO: 2735195 - DNA, 25 bp, Homo sapien
ctttcactgccttgatgtcactcac

SEQ ID NO: 2735196 - DNA, 25 bp, Homo sapien
gctttcactgccttgatgtcactca

SEQ ID NO: 2735197 - DNA, 25 bp, Homo sapien
ttggctttcactgccttgatgtcac

SEQ ID NO: 2735198 - DNA, 25 bp, Homo sapien
tcctggcaggctcaaagttacagct

SEQ ID NO: 2735199 - DNA, 25 bp, Homo sapien
caaatgtagccgagacggtggctcc

SEQ ID NO: 2735200 - DNA, 25 bp, Homo sapien
tacacacgcatatgggacaagaggc

SEQ ID NO: 2735201 - DNA, 25 bp, Homo sapien
cagcaacttcctccgtgggtggaca

SEQ ID NO: 2735202 - DNA, 25 bp, Homo sapien
cctcggaaatggtgggcgtaagcca

SEQ ID NO: 2735203 - DNA, 25 bp, Homo sapien
gtcagagagttctgctgaggccccg

SEQ ID NO: 2735204 - DNA, 25 bp, Homo sapien
tgaggccccgccgtggacaggacct

SEQ ID NO: 2735205 - DNA, 25 bp, Homo sapien
tggctcagggtataaaccacccagg

SEQ ID NO: 2735206 - DNA, 25 bp, Homo sapien
cacttaggtgagtagaacgggccag

SEQ ID NO: 2735207 - DNA, 25 bp, Homo sapien
tttatacaacatacgtggccccagg

SEQ ID NO: 2735208 - DNA, 25 bp, Homo sapien
tgtttcactccagattggcccgcag

SEQ ID NO: 2735209 - DNA, 25 bp, Homo sapien
gtagtgttgccaccgaagagccggc

SEQ ID NO: 2735210 - DNA, 25 bp, Homo sapien
gccagccactgagccgtgttaatga

SEQ ID NO: 2735211 - DNA, 25 bp, Homo sapien
attcatccccattagccgctgtcca

SEQ ID NO: 2735212 - DNA, 25 bp, Homo sapien
agggagatcaattcccagcgccagc

SEQ ID NO: 2735213 - DNA, 25 bp, Homo sapien
taatgaggatgtaagcgcccctgca

SEQ ID NO: 2735214 - DNA, 25 bp, Homo sapien
caccggacgaccgtccctcggcagc

SEQ ID NO: 2735215 - DNA, 25 bp, Homo sapien
accggacgaccgtccctcggcagca

SEQ ID NO: 2735216 - DNA, 25 bp, Homo sapien
tccgccctgtgtgggccaccggacg

SEQ ID NO: 2735217 - DNA, 25 bp, Homo sapien
ctgtgtgggccaccggacgaccgtc

SEQ ID NO: 2735218 - DNA, 25 bp, Homo sapien
gaataggtttcttatttgctgggag

SEQ ID NO: 2735219 - DNA, 25 bp, Homo sapien
ttaacactcatgaataggtttctta

SEQ ID NO: 2735220 - DNA, 25 bp, Homo sapien
ttgctgggagctgggttctcaagtc

SEQ ID NO: 2735221 - DNA, 25 bp, Homo sapien
actcatgaataggtttcttatttgc

SEQ ID NO: 2735222 - DNA, 25 bp, Homo sapien
gtttgccagcgcctgtcccgtgaga

SEQ ID NO: 2735223 - DNA, 25 bp, Homo sapien
tttcctctgacaaagggacgagtct

SEQ ID NO: 2735224 - DNA, 25 bp, Homo sapien
gtatttgatagcgaggtcagcacct

SEQ ID NO: 2735225 - DNA, 25 bp, Homo sapien
ggcagcaacatccaacttgggtatt

SEQ ID NO: 2735226 - DNA, 25 bp, Homo sapien
ctatgacggtgctgaattgtagcac

SEQ ID NO: 2735227 - DNA, 25 bp, Homo sapien
ccatatgtctgatatgtgcccttta

SEQ ID NO: 2735228 - DNA, 25 bp, Homo sapien
gctgctgatgtttcaacatgaagta

SEQ ID NO: 2735229 - DNA, 25 bp, Homo sapien
ttgtagcactgagtcagcatccttg

SEQ ID NO: 2735230 - DNA, 25 bp, Homo sapien
tcgcggatcccaaaggcggagctca

SEQ ID NO: 2735231 - DNA, 25 bp, Homo sapien
gtgggtgcctttctccgacagcggc

SEQ ID NO: 2735232 - DNA, 25 bp, Homo sapien
taataaattgcagcggaggcgagag

SEQ ID NO: 2735233 - DNA, 25 bp, Homo sapien
gccgctggttctgcggcctccagta

SEQ ID NO: 2735234 - DNA, 25 bp, Homo sapien
gagcagttgctagccagaggttaga

SEQ ID NO: 2735235 - DNA, 25 bp, Homo sapien
tgagactacagcaagacggaatcgg

SEQ ID NO: 2735236 - DNA, 25 bp, Homo sapien
aatggtttctgtgcacgttccaaga

SEQ ID NO: 2735237 - DNA, 25 bp, Homo sapien
gcagattggctttcgcaaatgagac

SEQ ID NO: 2735238 - DNA, 25 bp, Homo sapien
gccaggctgtgtctatatgagtacg

SEQ ID NO: 2735239 - DNA, 25 bp, Homo sapien
tctgctggtctctcgtgtgtgggtc

SEQ ID NO: 2735240 - DNA, 25 bp, Homo sapien
tatgagtacgggaagggagccaaat

SEQ ID NO: 2735241 - DNA, 25 bp, Homo sapien
tgggcagtttctcaacccgggcagg

SEQ ID NO: 2735242 - DNA, 25 bp, Homo sapien
cagactttttgtacatccagagcag

SEQ ID NO: 2735243 - DNA, 25 bp, Homo sapien
gaaaaagcaaattcacggagtcctc

SEQ ID NO: 2735244 - DNA, 25 bp, Homo sapien
tggtgcctccgacaaggcagatgga

SEQ ID NO: 2735245 - DNA, 25 bp, Homo sapien
tgtacgatttctctcgccggcagaa

SEQ ID NO: 2735246 - DNA, 25 bp, Homo sapien
tgccgccaacacgcttttctgagct

SEQ ID NO: 2735247 - DNA, 25 bp, Homo sapien
gccgccaacacgcttttctgagctc

SEQ ID NO: 2735248 - DNA, 25 bp, Homo sapien
caatccgtgcatattccacttcagg

SEQ ID NO: 2735249 - DNA, 25 bp, Homo sapien
tcttctcagaggctgtacctcgaag

SEQ ID NO: 2735250 - DNA, 25 bp, Homo sapien
gctgtacctcgaagtccaatccgtg

SEQ ID NO: 2735251 - DNA, 25 bp, Homo sapien
actgaccacaaacactaagtccttt

SEQ ID NO: 2735252 - DNA, 25 bp, Homo sapien
tggacggctccatgagctaacatat

SEQ ID NO: 2735253 - DNA, 25 bp, Homo sapien
catatttcttgtttgccgaagccat

SEQ ID NO: 2735254 - DNA, 25 bp, Homo sapien
ggacggctccatgagctaacatatt

SEQ ID NO: 2735255 - DNA, 25 bp, Homo sapien
gctggacggctccatgagctaacat

SEQ ID NO: 2735256 - DNA, 25 bp, Homo sapien
gggcagggacgacggccagtccttc

SEQ ID NO: 2735257 - DNA, 25 bp, Homo sapien
ggcagggacgacggccagtccttcc

SEQ ID NO: 2735258 - DNA, 25 bp, Homo sapien
ccggaggaggggcaagcaggcgctc

SEQ ID NO: 2735259 - DNA, 25 bp, Homo sapien
gctcccaacgcgtacgccagccaca

SEQ ID NO: 2735260 - DNA, 25 bp, Homo sapien
catggcaacggccgcctccctcccg

SEQ ID NO: 2735261 - DNA, 25 bp, Homo sapien
gcctccctcccgcaccgcttcgcct

SEQ ID NO: 2735262 - DNA, 25 bp, Homo sapien
cctccctcccgcaccgcttcgcctc

SEQ ID NO: 2735263 - DNA, 25 bp, Homo sapien
ctctgcagagagaattctggtccca

SEQ ID NO: 2735264 - DNA, 25 bp, Homo sapien
ccgaccctctgcagagagaattctg

SEQ ID NO: 2735265 - DNA, 25 bp, Homo sapien
gcagagagaattctggtcccagagt

SEQ ID NO: 2735266 - DNA, 25 bp, Homo sapien
agagagaattctggtcccagagtac

SEQ ID NO: 2735267 - DNA, 25 bp, Homo sapien
gaagcgccaaggacaaaggaatggc

SEQ ID NO: 2735268 - DNA, 25 bp, Homo sapien
agaagcgccaaggacaaaggaatgg

SEQ ID NO: 2735269 - DNA, 25 bp, Homo sapien
gagaagcgccaaggacaaaggaatg

SEQ ID NO: 2735270 - DNA, 25 bp, Homo sapien
caaggcggacagcggagcagggagg

SEQ ID NO: 2735271 - DNA, 25 bp, Homo sapien
aaggcggacagcggagcagggaggg

SEQ ID NO: 2735272 - DNA, 25 bp, Homo sapien
gggctccgctcgcggtctgcaggga

SEQ ID NO: 2735273 - DNA, 25 bp, Homo sapien
taagcgcactaatttgccgttgtcg

SEQ ID NO: 2735274 - DNA, 25 bp, Homo sapien
tggaagtaagtcgattaagatgcac

SEQ ID NO: 2735275 - DNA, 25 bp, Homo sapien
catgtttgccgggataaacgccgaa

SEQ ID NO: 2735276 - DNA, 25 bp, Homo sapien
agatgcacagcagaccccatttcag

SEQ ID NO: 2735277 - DNA, 25 bp, Homo sapien
aaaattagccatttgcaagagtaga

SEQ ID NO: 2735278 - DNA, 25 bp, Homo sapien
ccagtaaatgtgagcttcccaaggc

SEQ ID NO: 2735279 - DNA, 25 bp, Homo sapien
ggatattgagggtccaatgtgccca

SEQ ID NO: 2735280 - DNA, 25 bp, Homo sapien
ttcccaaggctcgaaacagatcgga

SEQ ID NO: 2735281 - DNA, 25 bp, Homo sapien
tagatcttcggagccctatgggtag

SEQ ID NO: 2735282 - DNA, 25 bp, Homo sapien
gggtggtggccccatgggtgcctgg

SEQ ID NO: 2735283 - DNA, 25 bp, Homo sapien
cccatgggtgcctggcgtcctgagc

SEQ ID NO: 2735284 - DNA, 25 bp, Homo sapien
gcctggcgtcctgagcgtgtcctcc

SEQ ID NO: 2735285 - DNA, 25 bp, Homo sapien
ctggcgtcctgagcgtgtcctccat

SEQ ID NO: 2735286 - DNA, 25 bp, Homo sapien
ccgcagcaagtgagtcatgcatggt

SEQ ID NO: 2735287 - DNA, 25 bp, Homo sapien
ttggagccttgacgctgagcctctg

SEQ ID NO: 2735288 - DNA, 25 bp, Homo sapien
aggctttggagccttgacgctgagc

SEQ ID NO: 2735289 - DNA, 25 bp, Homo sapien
agcctctgcagcctgaatgcccgac

SEQ ID NO: 2735290 - DNA, 25 bp, Homo sapien
tccagatgaccacctggtggtgctc

SEQ ID NO: 2735291 - DNA, 25 bp, Homo sapien
gactcagcttccagatgaccacctg

SEQ ID NO: 2735292 - DNA, 25 bp, Homo sapien
gcttccagatgaccacctggtggtg

SEQ ID NO: 2735293 - DNA, 25 bp, Homo sapien
gagagactcagcttccagatgacca

SEQ ID NO: 2735294 - DNA, 25 bp, Homo sapien
ttttaatatgaaggctatgctggct

SEQ ID NO: 2735295 - DNA, 25 bp, Homo sapien
tgtaaggttggtgatatttcttcct

SEQ ID NO: 2735296 - DNA, 25 bp, Homo sapien
ctctggtgaactatatgtaaggttg

SEQ ID NO: 2735297 - DNA, 25 bp, Homo sapien
tggaagaattattcaatgaagacat

SEQ ID NO: 2735298 - DNA, 25 bp, Homo sapien
tagaaatagcttccaatgtagaaac

SEQ ID NO: 2735299 - DNA, 25 bp, Homo sapien
cttttctagtgttgtccatgcaata

SEQ ID NO: 2735300 - DNA, 25 bp, Homo sapien
ctagtgttgtccatgcaatagaaat

SEQ ID NO: 2735301 - DNA, 25 bp, Homo sapien
acaacaacccacagtcagaggccaa

SEQ ID NO: 2735302 - DNA, 25 bp, Homo sapien
tgaagttcaggatctaggcatcagg

SEQ ID NO: 2735303 - DNA, 25 bp, Homo sapien
ccagggctgcctagtaacaacgtac

SEQ ID NO: 2735304 - DNA, 25 bp, Homo sapien
tggagccggcttccactgggctatg

SEQ ID NO: 2735305 - DNA, 25 bp, Homo sapien
ttccctggctgtgctaatgttccgc

SEQ ID NO: 2735306 - DNA, 25 bp, Homo sapien
acagcgcgaacaggtggcagcaaga

SEQ ID NO: 2735307 - DNA, 25 bp, Homo sapien
agcgcgaacaggtggcagcaagatt

SEQ ID NO: 2735308 - DNA, 25 bp, Homo sapien
gcgaacaggtggcagcaagattggc

SEQ ID NO: 2735309 - DNA, 25 bp, Homo sapien
gcacagcgcgaacaggtggcagcaa

SEQ ID NO: 2735310 - DNA, 25 bp, Homo sapien
tgttctgatcgctcagacacccagc

SEQ ID NO: 2735311 - DNA, 25 bp, Homo sapien
ctagtaggcaggacagagataagct

SEQ ID NO: 2735312 - DNA, 25 bp, Homo sapien
caatcccagggtgggtctagtaggc

SEQ ID NO: 2735313 - DNA, 25 bp, Homo sapien
gattgattttgctaccaggtctctg

SEQ ID NO: 2735314 - DNA, 25 bp, Homo sapien
caattgatcaggaaattagttcagc

SEQ ID NO: 2735315 - DNA, 25 bp, Homo sapien
gctccaatctaccagacaaataacc

SEQ ID NO: 2735316 - DNA, 25 bp, Homo sapien
ggaaagacttagcagagccctagaa

SEQ ID NO: 2735317 - DNA, 25 bp, Homo sapien
gccctagaatcatgagcttccaggt

SEQ ID NO: 2735318 - DNA, 25 bp, Homo sapien
cagtctgcgcacaggtggcccggga

SEQ ID NO: 2735319 - DNA, 25 bp, Homo sapien
tcggtgctccggatccgggctctcg

SEQ ID NO: 2735320 - DNA, 25 bp, Homo sapien
caggagtctgaaacccggagtggat

SEQ ID NO: 2735321 - DNA, 25 bp, Homo sapien
ggcgcggcgccagcctgcggagagc

SEQ ID NO: 2735322 - DNA, 25 bp, Homo sapien
agggcggctttagcgcctcagcccg

SEQ ID NO: 2735323 - DNA, 25 bp, Homo sapien
gcgcgtggctcccttgggcacggga

SEQ ID NO: 2735324 - DNA, 25 bp, Homo sapien
atgccagcggactgcgctgcctccg

SEQ ID NO: 2735325 - DNA, 25 bp, Homo sapien
ggcacgggagcgcagcaatgcagcc

SEQ ID NO: 2735326 - DNA, 25 bp, Homo sapien
caagcggcgaggactatgcccagga

SEQ ID NO: 2735327 - DNA, 25 bp, Homo sapien
gccaagcggcgaggactatgcccag

SEQ ID NO: 2735328 - DNA, 25 bp, Homo sapien
gagccaagcggcgaggactatgccc

SEQ ID NO: 2735329 - DNA, 25 bp, Homo sapien
ccgagccgcggagccaagcggcgag

SEQ ID NO: 2735330 - DNA, 25 bp, Homo sapien
aggagcccgggtcacggcagggcca

SEQ ID NO: 2735331 - DNA, 25 bp, Homo sapien
gcaaaaggcagcgcgggaggagccc

SEQ ID NO: 2735332 - DNA, 25 bp, Homo sapien
gctgttgcaacggaggcaaaaggca

SEQ ID NO: 2735333 - DNA, 25 bp, Homo sapien
tcaccggaggctgttgcaacggagg

SEQ ID NO: 2735334 - DNA, 25 bp, Homo sapien
tgttctccctggatacaaccatgcc

SEQ ID NO: 2735335 - DNA, 25 bp, Homo sapien
tgtggcacagtgtggtgagctccca

SEQ ID NO: 2735336 - DNA, 25 bp, Homo sapien
tgagggaaggatcttggccatactg

SEQ ID NO: 2735337 - DNA, 25 bp, Homo sapien
gaggctgtgacaattgggccaccac

SEQ ID NO: 2735338 - DNA, 25 bp, Homo sapien
tgttgccaatcttgaaccacgagac

SEQ ID NO: 2735339 - DNA, 25 bp, Homo sapien
cactcctaggtgtatgcccaacaga

SEQ ID NO: 2735340 - DNA, 25 bp, Homo sapien
caaagcaggagcaccaagacatgag

SEQ ID NO: 2735341 - DNA, 25 bp, Homo sapien
tggtggccacgcacagattcaggca

SEQ ID NO: 2735342 - DNA, 25 bp, Homo sapien
ctggatgcgtgctggccttgagcat

SEQ ID NO: 2735343 - DNA, 25 bp, Homo sapien
tggatgcgtgctggccttgagcatt

SEQ ID NO: 2735344 - DNA, 25 bp, Homo sapien
ggatgcgtgctggccttgagcattc

SEQ ID NO: 2735345 - DNA, 25 bp, Homo sapien
ggtacacagtactttagagtccctc

SEQ ID NO: 2735346 - DNA, 25 bp, Homo sapien
agaatggagtccttcgtgtctggct

SEQ ID NO: 2735347 - DNA, 25 bp, Homo sapien
tctagaatgtcaccgcaatgggatc

SEQ ID NO: 2735348 - DNA, 25 bp, Homo sapien
tctggcttctttagcggtacacagt

SEQ ID NO: 2735349 - DNA, 25 bp, Homo sapien
gtcacttggcagccaccggccagcc

SEQ ID NO: 2735350 - DNA, 25 bp, Homo sapien
cctgacccagacgtgggacccaggg

SEQ ID NO: 2735351 - DNA, 25 bp, Homo sapien
acttggcagccaccggccagccctg

SEQ ID NO: 2735352 - DNA, 25 bp, Homo sapien
gccctgacccagacgtgggacccag

SEQ ID NO: 2735353 - DNA, 25 bp, Homo sapien
gagacactgggctcatcaagtgtac

SEQ ID NO: 2735354 - DNA, 25 bp, Homo sapien
tgggaccaagacaccttattgacgg

SEQ ID NO: 2735355 - DNA, 25 bp, Homo sapien
ggaagtggcggaatgcaggcgacgc

SEQ ID NO: 2735356 - DNA, 25 bp, Homo sapien
tctgctggggtctgtcgtaggctca

SEQ ID NO: 2735357 - DNA, 25 bp, Homo sapien
tctgtcgtaggctcaggaagtggcg

SEQ ID NO: 2735358 - DNA, 25 bp, Homo sapien
tcatagggggtgagagccaacaagg

SEQ ID NO: 2735359 - DNA, 25 bp, Homo sapien
catagggggtgagagccaacaagga

SEQ ID NO: 2735360 - DNA, 25 bp, Homo sapien
atagggggtgagagccaacaaggaa

SEQ ID NO: 2735361 - DNA, 25 bp, Homo sapien
ccccacggttctgcgtgttccacag

SEQ ID NO: 2735362 - DNA, 25 bp, Homo sapien
cccacggttctgcgtgttccacagc

SEQ ID NO: 2735363 - DNA, 25 bp, Homo sapien
ccacggttctgcgtgttccacagca

SEQ ID NO: 2735364 - DNA, 25 bp, Homo sapien
cacggttctgcgtgttccacagcaa

SEQ ID NO: 2735365 - DNA, 25 bp, Homo sapien
ccgaggtggcctggcgactgccttc

SEQ ID NO: 2735366 - DNA, 25 bp, Homo sapien
ccagcaccgaggtggcctggcgact

SEQ ID NO: 2735367 - DNA, 25 bp, Homo sapien
cggagtcccagcaccgaggtggcct

SEQ ID NO: 2735368 - DNA, 25 bp, Homo sapien
tgggcggagtcccagcaccgaggtg

SEQ ID NO: 2735369 - DNA, 25 bp, Homo sapien
cggccttgcacacaagcagcactgg

SEQ ID NO: 2735370 - DNA, 25 bp, Homo sapien
tctgtgctgcgctcgatcacgtggt

SEQ ID NO: 2735371 - DNA, 25 bp, Homo sapien
actggcttgttcttgacgatgtaca

SEQ ID NO: 2735372 - DNA, 25 bp, Homo sapien
acgatgtacacatcctcgggctcca

SEQ ID NO: 2735373 - DNA, 25 bp, Homo sapien
tctgttgggctacattggccgccaa

SEQ ID NO: 2735374 - DNA, 25 bp, Homo sapien
tggccgccaaccctctctatctccc

SEQ ID NO: 2735375 - DNA, 25 bp, Homo sapien
cagaccctcccagcaagacaaggtg

SEQ ID NO: 2735376 - DNA, 25 bp, Homo sapien
cagggttctgttgggctacattggc

SEQ ID NO: 2735377 - DNA, 25 bp, Homo sapien
tttgggttgagaaatcgatgagatc

SEQ ID NO: 2735378 - DNA, 25 bp, Homo sapien
tcaatgaacgttcagatgttccggc

SEQ ID NO: 2735379 - DNA, 25 bp, Homo sapien
gatgagatcaatgaacgttcagatg

SEQ ID NO: 2735380 - DNA, 25 bp, Homo sapien
cgttcagatgttccggccatgggag

SEQ ID NO: 2735381 - DNA, 25 bp, Homo sapien
tctttggtctttggcggcgtggcgc

SEQ ID NO: 2735382 - DNA, 25 bp, Homo sapien
ctgccgtggtatctgccgtgggtaa

SEQ ID NO: 2735383 - DNA, 25 bp, Homo sapien
gcgtggcgccactgccgtggtatct

SEQ ID NO: 2735384 - DNA, 25 bp, Homo sapien
tgaccacagaacgtttctggtttgg

SEQ ID NO: 2735385 - DNA, 25 bp, Homo sapien
tgccttgagacattaatgcggacct

SEQ ID NO: 2735386 - DNA, 25 bp, Homo sapien
accttctcgacctgctgccttgaga

SEQ ID NO: 2735387 - DNA, 25 bp, Homo sapien
ggctatgcggatgtaggccttctga

SEQ ID NO: 2735388 - DNA, 25 bp, Homo sapien
taatgcggacctccatggtgggcag

SEQ ID NO: 2735389 - DNA, 25 bp, Homo sapien
agaggaatgagagtgtcctcctgtc

SEQ ID NO: 2735390 - DNA, 25 bp, Homo sapien
gaggaatgagagtgtcctcctgtct

SEQ ID NO: 2735391 - DNA, 25 bp, Homo sapien
gggatgccctccggtggacggcagg

SEQ ID NO: 2735392 - DNA, 25 bp, Homo sapien
ggtggacggcagggcagcacgatgc

SEQ ID NO: 2735393 - DNA, 25 bp, Homo sapien
ggatgccctccggtggacggcaggg

SEQ ID NO: 2735394 - DNA, 25 bp, Homo sapien
gccagcggctcctgctcgaagttct

SEQ ID NO: 2735395 - DNA, 25 bp, Homo sapien
cagggacgggtccaccaggtcctcg

SEQ ID NO: 2735396 - DNA, 25 bp, Homo sapien
tgctcccgcgtgatgtatacattgg

SEQ ID NO: 2735397 - DNA, 25 bp, Homo sapien
tagttggccgtgtcagcaaggcggg

SEQ ID NO: 2735398 - DNA, 25 bp, Homo sapien
gctgcggcgacgtgccacgatgttc

SEQ ID NO: 2735399 - DNA, 25 bp, Homo sapien
gtgcctctccctgtgaccagggagt

SEQ ID NO: 2735400 - DNA, 25 bp, Homo sapien
ctccctgtgaccagggagtcccggg

SEQ ID NO: 2735401 - DNA, 25 bp, Homo sapien
tgcccaggggcaccgcagtgcctct

SEQ ID NO: 2735402 - DNA, 25 bp, Homo sapien
agccacatgtcactgcccaggggca

SEQ ID NO: 2735403 - DNA, 25 bp, Homo sapien
cggaccactcggtccacgtcgacca

SEQ ID NO: 2735404 - DNA, 25 bp, Homo sapien
gagaggcgccgggttggtgcagctc

SEQ ID NO: 2735405 - DNA, 25 bp, Homo sapien
gccagccgcgcccacagctggcgct

SEQ ID NO: 2735406 - DNA, 25 bp, Homo sapien
gaaagcgcccccgttgagaggcgcc

SEQ ID NO: 2735407 - DNA, 25 bp, Homo sapien
caccccggcagtctgccagtgtggc

SEQ ID NO: 2735408 - DNA, 25 bp, Homo sapien
ggtgcggtcagcctgggagcccacc

SEQ ID NO: 2735409 - DNA, 25 bp, Homo sapien
gagaggagacggtgcggtcagcctg

SEQ ID NO: 2735410 - DNA, 25 bp, Homo sapien
ccggcagtctgccagtgtggcccct

SEQ ID NO: 2735411 - DNA, 25 bp, Homo sapien
tcactggtacagttgcgggtgtcca

SEQ ID NO: 2735412 - DNA, 25 bp, Homo sapien
gctgggtcagagcactcacggctcc

SEQ ID NO: 2735413 - DNA, 25 bp, Homo sapien
tgtgtacacagaggtcactggtaca

SEQ ID NO: 2735414 - DNA, 25 bp, Homo sapien
tcacggctccgccagtgggtgcagt

SEQ ID NO: 2735415 - DNA, 25 bp, Homo sapien
gcaggagaatagctccctcagcccc

SEQ ID NO: 2735416 - DNA, 25 bp, Homo sapien
aaatctgtgcccgtctcaggaggca

SEQ ID NO: 2735417 - DNA, 25 bp, Homo sapien
cctgggcccatgtgcaggtatgcta

SEQ ID NO: 2735418 - DNA, 25 bp, Homo sapien
ggtgtgcatgaatcaaggttcaaat

SEQ ID NO: 2735419 - DNA, 25 bp, Homo sapien
tggttccaggtcagtgcctagacca

SEQ ID NO: 2735420 - DNA, 25 bp, Homo sapien
ttgtaattaacagccctcacaagcc

SEQ ID NO: 2735421 - DNA, 25 bp, Homo sapien
gattgactgcttggaggaagctata

SEQ ID NO: 2735422 - DNA, 25 bp, Homo sapien
ccacaggacctgtatgtgcacttgg

SEQ ID NO: 2735423 - DNA, 25 bp, Homo sapien
ccagagcggataacctggtgcctgg

SEQ ID NO: 2735424 - DNA, 25 bp, Homo sapien
tacttccccagagcggataacctgg

SEQ ID NO: 2735425 - DNA, 25 bp, Homo sapien
ttccccagagcggataacctggtgc

SEQ ID NO: 2735426 - DNA, 25 bp, Homo sapien
gagctacttccccagagcggataac

SEQ ID NO: 2735427 - DNA, 25 bp, Homo sapien
gcatggagtccgtgcgtgtgcatcc

SEQ ID NO: 2735428 - DNA, 25 bp, Homo sapien
gggcatctgcactagctagggagca

SEQ ID NO: 2735429 - DNA, 25 bp, Homo sapien
aaggagaggtcagtggtctgcaccc

SEQ ID NO: 2735430 - DNA, 25 bp, Homo sapien
tgagcaaatcacattcctcgtgggc

SEQ ID NO: 2735431 - DNA, 25 bp, Homo sapien
cgggagacagcatggccttggtggg

SEQ ID NO: 2735432 - DNA, 25 bp, Homo sapien
gagacagcatggccttggtgggggc

SEQ ID NO: 2735433 - DNA, 25 bp, Homo sapien
ctgcgggagacagcatggccttggt

SEQ ID NO: 2735434 - DNA, 25 bp, Homo sapien
agacagcatggccttggtgggggca

SEQ ID NO: 2735435 - DNA, 25 bp, Homo sapien
ccggcaataaacgaggatgaggaca

SEQ ID NO: 2735436 - DNA, 25 bp, Homo sapien
tgaggcccacatagagggccacgtc

SEQ ID NO: 2735437 - DNA, 25 bp, Homo sapien
ggccacggcgatgaggcccacatag

SEQ ID NO: 2735438 - DNA, 25 bp, Homo sapien
ggtgagaatggacgagtcagccaca

SEQ ID NO: 2735439 - DNA, 25 bp, Homo sapien
acagagactgccctggtaggtggtg

SEQ ID NO: 2735440 - DNA, 25 bp, Homo sapien
ggacagagactgccctggtaggtgg

SEQ ID NO: 2735441 - DNA, 25 bp, Homo sapien
ctgaggtccggctggatggtgagca

SEQ ID NO: 2735442 - DNA, 25 bp, Homo sapien
tccggctggatggtgagcagatggg

SEQ ID NO: 2735443 - DNA, 25 bp, Homo sapien
gctgagcaggtgcccattggtgagc

SEQ ID NO: 2735444 - DNA, 25 bp, Homo sapien
tgcagtgtgtggcggccgccaccca

SEQ ID NO: 2735445 - DNA, 25 bp, Homo sapien
gagcaggtgcccattggtgagctgg

SEQ ID NO: 2735446 - DNA, 25 bp, Homo sapien
gtgcagtgtgtggcggccgccaccc

SEQ ID NO: 2735447 - DNA, 25 bp, Homo sapien
cccgaggaagttgaaggtcccatag

SEQ ID NO: 2735448 - DNA, 25 bp, Homo sapien
cataggtcatgttgctggtgcctcg

SEQ ID NO: 2735449 - DNA, 25 bp, Homo sapien
aggcgggagacgaactcctcggcct

SEQ ID NO: 2735450 - DNA, 25 bp, Homo sapien
gtattagggatcatcagccggcccc

SEQ ID NO: 2735451 - DNA, 25 bp, Homo sapien
ctacatttatggaacaggcagctgg

SEQ ID NO: 2735452 - DNA, 25 bp, Homo sapien
tgtacagttctgtcgcccgggagaa

SEQ ID NO: 2735453 - DNA, 25 bp, Homo sapien
gcttgagcaactagacgatccgtga

SEQ ID NO: 2735454 - DNA, 25 bp, Homo sapien
tctgcacagacacggcgattaaagc

SEQ ID NO: 2735455 - DNA, 25 bp, Homo sapien
tagatctcatagatcttccctcggg

SEQ ID NO: 2735456 - DNA, 25 bp, Homo sapien
gtgcagcgtgaggtagatctcatag

SEQ ID NO: 2735457 - DNA, 25 bp, Homo sapien
tcttccggcttgtgcagcgtgaggt

SEQ ID NO: 2735458 - DNA, 25 bp, Homo sapien
cttccctcggggtatggcatctggg

SEQ ID NO: 2735459 - DNA, 25 bp, Homo sapien
cccggcaacagggcccgcggccaca

SEQ ID NO: 2735460 - DNA, 25 bp, Homo sapien
ccggcaacagggcccgcggccacac

SEQ ID NO: 2735461 - DNA, 25 bp, Homo sapien
tcaagtggggaaatatgggtgggga

SEQ ID NO: 2735462 - DNA, 25 bp, Homo sapien
ctcaagtggggaaatatgggtgggg

SEQ ID NO: 2735463 - DNA, 25 bp, Homo sapien
gccaggatgactggccgggtgagca

SEQ ID NO: 2735464 - DNA, 25 bp, Homo sapien
gctgccctcgcacgactgctttttg

SEQ ID NO: 2735465 - DNA, 25 bp, Homo sapien
actgctttttgaggcgcaggctcca

SEQ ID NO: 2735466 - DNA, 25 bp, Homo sapien
tccccacagtggtccatagccagga

SEQ ID NO: 2735467 - DNA, 25 bp, Homo sapien
tagacccggatgttgtactcgaggg

SEQ ID NO: 2735468 - DNA, 25 bp, Homo sapien
aacagaagcagcttgaggcgcttgg

SEQ ID NO: 2735469 - DNA, 25 bp, Homo sapien
ccagctgctcggtgaagacgtagca

SEQ ID NO: 2735470 - DNA, 25 bp, Homo sapien
cttgagtgcatcgtgggtgtcatgc

SEQ ID NO: 2735471 - DNA, 25 bp, Homo sapien
catcgtggatggataggcgcaggtt

SEQ ID NO: 2735472 - DNA, 25 bp, Homo sapien
tgacaaggagcttactcttccacag

SEQ ID NO: 2735473 - DNA, 25 bp, Homo sapien
tgtccttgaagtgcaggacccgtgg

SEQ ID NO: 2735474 - DNA, 25 bp, Homo sapien
aggacccgtggctcctggatcagct

SEQ ID NO: 2735475 - DNA, 25 bp, Homo sapien
aggcctcttgtgcgctggccacggc

SEQ ID NO: 2735476 - DNA, 25 bp, Homo sapien
ggcctcttgtgcgctggccacggcc

SEQ ID NO: 2735477 - DNA, 25 bp, Homo sapien
caggcctcttgtgcgctggccacgg

SEQ ID NO: 2735478 - DNA, 25 bp, Homo sapien
tccaggcctcttgtgcgctggccac

SEQ ID NO: 2735479 - DNA, 25 bp, Homo sapien
aaggtgcagtgcaagtaccgctgcg

SEQ ID NO: 2735480 - DNA, 25 bp, Homo sapien
gcgtgccattccagatgtgataaaa

SEQ ID NO: 2735481 - DNA, 25 bp, Homo sapien
tgacacgctccagggtgaaggtgca

SEQ ID NO: 2735482 - DNA, 25 bp, Homo sapien
ttgcaggccaggtcactagtgctgg

SEQ ID NO: 2735483 - DNA, 25 bp, Homo sapien
tggaaattatcttctgccgaatgag

SEQ ID NO: 2735484 - DNA, 25 bp, Homo sapien
gaggaaggggatcttgaaggcactg

SEQ ID NO: 2735485 - DNA, 25 bp, Homo sapien
cagtcggcaccccgcctacagggtg

SEQ ID NO: 2735486 - DNA, 25 bp, Homo sapien
tttctgggccagagtccgccagtcg

SEQ ID NO: 2735487 - DNA, 25 bp, Homo sapien
aagtgccgcgcctcccacaggttga

SEQ ID NO: 2735488 - DNA, 25 bp, Homo sapien
acactgtgaagaggccagcgtctgg

SEQ ID NO: 2735489 - DNA, 25 bp, Homo sapien
agcactcagcctccgacactgtgaa

SEQ ID NO: 2735490 - DNA, 25 bp, Homo sapien
cgttggggaagtgccgcgcctccca

SEQ ID NO: 2735491 - DNA, 25 bp, Homo sapien
caggacacgagcttcacatgacagg

SEQ ID NO: 2735492 - DNA, 25 bp, Homo sapien
gaggcaaatgtgcaccaacactggg

SEQ ID NO: 2735493 - DNA, 25 bp, Homo sapien
caacactgggcgtgagacgtgagca

SEQ ID NO: 2735494 - DNA, 25 bp, Homo sapien
cataaggccaagagtaagtgcgtga

SEQ ID NO: 2735495 - DNA, 25 bp, Homo sapien
gacttgattctacacgtgggcagca

SEQ ID NO: 2735496 - DNA, 25 bp, Homo sapien
ttaagcccagaacaacacgtagcgg

SEQ ID NO: 2735497 - DNA, 25 bp, Homo sapien
caggatgagtggaacttgaaagccc

SEQ ID NO: 2735498 - DNA, 25 bp, Homo sapien
tggtctctcaacacgaggcatgtgg

SEQ ID NO: 2735499 - DNA, 25 bp, Homo sapien
gaccaagggtttcaaggcatcagac

SEQ ID NO: 2735500 - DNA, 25 bp, Homo sapien
tcgtgagtctgttgcgggaagccat

SEQ ID NO: 2735501 - DNA, 25 bp, Homo sapien
gcatcctcctgaactggaccaaggg

SEQ ID NO: 2735502 - DNA, 25 bp, Homo sapien
ggaagccatcactcgcagacaggta

SEQ ID NO: 2735503 - DNA, 25 bp, Homo sapien
acaaaataggtcctcataaaacaag

SEQ ID NO: 2735504 - DNA, 25 bp, Homo sapien
gtttataaagtctctggcacaaaat

SEQ ID NO: 2735505 - DNA, 25 bp, Homo sapien
attagcatttaatctgtcctagact

SEQ ID NO: 2735506 - DNA, 25 bp, Homo sapien
tggaatctattgatacagtttaatt

SEQ ID NO: 2735507 - DNA, 25 bp, Homo sapien
taaagtcaggtagcaggtagcataa

SEQ ID NO: 2735508 - DNA, 25 bp, Homo sapien
tctttatgccagtacaagtgtcttg

SEQ ID NO: 2735509 - DNA, 25 bp, Homo sapien
taagtgagagtttatgtctggcttc

SEQ ID NO: 2735510 - DNA, 25 bp, Homo sapien
cttcatagcgagtcttaaagtcagg

SEQ ID NO: 2735511 - DNA, 25 bp, Homo sapien
catatgtattctatccataactccc

SEQ ID NO: 2735512 - DNA, 25 bp, Homo sapien
agaggatagtagtactctgaacccc

SEQ ID NO: 2735513 - DNA, 25 bp, Homo sapien
aactcgtggccactgttgtttcata

SEQ ID NO: 2735514 - DNA, 25 bp, Homo sapien
catattctacctagtcattcatcaa

SEQ ID NO: 2735515 - DNA, 25 bp, Homo sapien
tcagatgttagtattagggttatga

SEQ ID NO: 2735516 - DNA, 25 bp, Homo sapien
cataaaaccgggctaccaaatgatt

SEQ ID NO: 2735517 - DNA, 25 bp, Homo sapien
tatgtcctaccacaatttaaatagt

SEQ ID NO: 2735518 - DNA, 25 bp, Homo sapien
gtattagggttatgatataaaagag

SEQ ID NO: 2735519 - DNA, 25 bp, Homo sapien
tttggattgacaggttaagaactct

SEQ ID NO: 2735520 - DNA, 25 bp, Homo sapien
actattcctggccaaatcttgatag

SEQ ID NO: 2735521 - DNA, 25 bp, Homo sapien
tggctggcagttctctaagtattaa

SEQ ID NO: 2735522 - DNA, 25 bp, Homo sapien
taatcccctgaagccaatctataga

SEQ ID NO: 2735523 - DNA, 25 bp, Homo sapien
ccggtagagagcctctcaggcgcct

SEQ ID NO: 2735524 - DNA, 25 bp, Homo sapien
cccgcaaaccctcaccggtagagag

SEQ ID NO: 2735525 - DNA, 25 bp, Homo sapien
aaaccctcaccggtagagagcctct

SEQ ID NO: 2735526 - DNA, 25 bp, Homo sapien
tcaccggtagagagcctctcaggcg

SEQ ID NO: 2735527 - DNA, 25 bp, Homo sapien
aaagcgcaccccgtccggctcctgg

SEQ ID NO: 2735528 - DNA, 25 bp, Homo sapien
ggcgcgccctctcgcggtcaaagcg

SEQ ID NO: 2735529 - DNA, 25 bp, Homo sapien
aactccgagctgctgtaaggcccgg

SEQ ID NO: 2735530 - DNA, 25 bp, Homo sapien
ccgtggccggcgcgggatactccat

SEQ ID NO: 2735531 - DNA, 25 bp, Homo sapien
gatggcaaagactgtaggtctccga

SEQ ID NO: 2735532 - DNA, 25 bp, Homo sapien
gacagtcctcgaatgtgggaaaaac

SEQ ID NO: 2735533 - DNA, 25 bp, Homo sapien
gatgacagtcctcgaatgtgggaaa

SEQ ID NO: 2735534 - DNA, 25 bp, Homo sapien
cgacaggacgagtatagggatgaca

SEQ ID NO: 2735535 - DNA, 25 bp, Homo sapien
gaataagggacccagcaagtagagg

SEQ ID NO: 2735536 - DNA, 25 bp, Homo sapien
aagggagtcacacaagcaggtcagg

SEQ ID NO: 2735537 - DNA, 25 bp, Homo sapien
gagtgacccctaacgtggctttgca

SEQ ID NO: 2735538 - DNA, 25 bp, Homo sapien
caactttgggtcaagtgtaggacac

SEQ ID NO: 2735539 - DNA, 25 bp, Homo sapien
gacaagtctgctcagcaagcaaaca

SEQ ID NO: 2735540 - DNA, 25 bp, Homo sapien
gaagcccagatagagttcttgtaca

SEQ ID NO: 2735541 - DNA, 25 bp, Homo sapien
tccagatacctgacaaggttagcag

SEQ ID NO: 2735542 - DNA, 25 bp, Homo sapien
ctgggttagcatcaagcagctggct

SEQ ID NO: 2735543 - DNA, 25 bp, Homo sapien
cacagggtcgatgaagtaggaacac

SEQ ID NO: 2735544 - DNA, 25 bp, Homo sapien
tatgagatgttacgtattcacagga

SEQ ID NO: 2735545 - DNA, 25 bp, Homo sapien
ctagagtatgaagcacagggctgct

SEQ ID NO: 2735546 - DNA, 25 bp, Homo sapien
tatccacatgatagccaagtaaaag

SEQ ID NO: 2735547 - DNA, 25 bp, Homo sapien
gaagagaagaggaggtaaaatctct

SEQ ID NO: 2735548 - DNA, 25 bp, Homo sapien
gaagaggaggtaaaatctctcccaa

SEQ ID NO: 2735549 - DNA, 25 bp, Homo sapien
aagaggaggtaaaatctctcccaag

SEQ ID NO: 2735550 - DNA, 25 bp, Homo sapien
gagaagaggaggtaaaatctctccc

SEQ ID NO: 2735551 - DNA, 25 bp, Homo sapien
ctgggactcagaaataagcaaggcg

SEQ ID NO: 2735552 - DNA, 25 bp, Homo sapien
taagcaaggcgcagcaaaccttaca

SEQ ID NO: 2735553 - DNA, 25 bp, Homo sapien
tacactgggtgttggtgaagagaca

SEQ ID NO: 2735554 - DNA, 25 bp, Homo sapien
ggtaatgtgccagcttctgggactc

SEQ ID NO: 2735555 - DNA, 25 bp, Homo sapien
tttaatgtctccattccatggattg

SEQ ID NO: 2735556 - DNA, 25 bp, Homo sapien
cttcactttgttggcatgttttttg

SEQ ID NO: 2735557 - DNA, 25 bp, Homo sapien
tctgagtctagcttcttcgtttccc

SEQ ID NO: 2735558 - DNA, 25 bp, Homo sapien
gattgctaggtatctcttcactttg

SEQ ID NO: 2735559 - DNA, 25 bp, Homo sapien
gaacaggcatttatggcccccctca

SEQ ID NO: 2735560 - DNA, 25 bp, Homo sapien
ataacagaacaggcatttatggccc

SEQ ID NO: 2735561 - DNA, 25 bp, Homo sapien
ctgcccataacagaacaggcattta

SEQ ID NO: 2735562 - DNA, 25 bp, Homo sapien
cctcacacattaaccccaacctact

SEQ ID NO: 2735563 - DNA, 25 bp, Homo sapien
ccagaaaatcttcaatggttcccca

SEQ ID NO: 2735564 - DNA, 25 bp, Homo sapien
tgatcataccactgccccaccagaa

SEQ ID NO: 2735565 - DNA, 25 bp, Homo sapien
taccactgccccaccagaaaatctt

SEQ ID NO: 2735566 - DNA, 25 bp, Homo sapien
caccagaaaatcttcaatggttccc

SEQ ID NO: 2735567 - DNA, 25 bp, Homo sapien
caggtagtgcgactgggccacgaca

SEQ ID NO: 2735568 - DNA, 25 bp, Homo sapien
cttccaccttagtggactgctgctt

SEQ ID NO: 2735569 - DNA, 25 bp, Homo sapien
cagctttaagttctttgcgtgggtc

SEQ ID NO: 2735570 - DNA, 25 bp, Homo sapien
tccccaggtagtgcgactgggccac

SEQ ID NO: 2735571 - DNA, 25 bp, Homo sapien
aggacggcaggggtcccactatagc

SEQ ID NO: 2735572 - DNA, 25 bp, Homo sapien
ctgaggacggcaggggtcccactat

SEQ ID NO: 2735573 - DNA, 25 bp, Homo sapien
ggtcccactatagcactactcagga

SEQ ID NO: 2735574 - DNA, 25 bp, Homo sapien
ccactatagcactactcaggaaaac

SEQ ID NO: 2735575 - DNA, 25 bp, Homo sapien
tctgtgagcccctggcagtagtgcc

SEQ ID NO: 2735576 - DNA, 25 bp, Homo sapien
tgaggatctctgtgagcccctggca

SEQ ID NO: 2735577 - DNA, 25 bp, Homo sapien
cctcagtgaggatctctgtgagccc

SEQ ID NO: 2735578 - DNA, 25 bp, Homo sapien
acttcttcaagtctgtggcctcagt

SEQ ID NO: 2735579 - DNA, 25 bp, Homo sapien
gagtaggccataacctgagcatgtg

SEQ ID NO: 2735580 - DNA, 25 bp, Homo sapien
gaacaggcagcttttgaggattaaa

SEQ ID NO: 2735581 - DNA, 25 bp, Homo sapien
gaatgctctcatggtatgcgtggcc

SEQ ID NO: 2735582 - DNA, 25 bp, Homo sapien
gctcagcctatagagaaaaacctat

SEQ ID NO: 2735583 - DNA, 25 bp, Homo sapien
aggataatagtattactaatagtgt

SEQ ID NO: 2735584 - DNA, 25 bp, Homo sapien
taatagtattactaatagtgtagtc

SEQ ID NO: 2735585 - DNA, 25 bp, Homo sapien
atagtattactaatagtgtagtcta

SEQ ID NO: 2735586 - DNA, 25 bp, Homo sapien
gataatagtattactaatagtgtag

SEQ ID NO: 2735587 - DNA, 25 bp, Homo sapien
tggaggccacaaggaaaggatttgt

SEQ ID NO: 2735588 - DNA, 25 bp, Homo sapien
gaggccacaaggaaaggatttgtaa

SEQ ID NO: 2735589 - DNA, 25 bp, Homo sapien
cacaaggaaaggatttgtaaggcgt

SEQ ID NO: 2735590 - DNA, 25 bp, Homo sapien
aaggatttgtaaggcgttttgacag

SEQ ID NO: 2735591 - DNA, 25 bp, Homo sapien
catgacagggtcgttgaaagttgca

SEQ ID NO: 2735592 - DNA, 25 bp, Homo sapien
gtcagtgacagcagggtccgccagc

SEQ ID NO: 2735593 - DNA, 25 bp, Homo sapien
cagccgcccatagcgtgccattagt

SEQ ID NO: 2735594 - DNA, 25 bp, Homo sapien
cataatgttgttgagccatgacagg

SEQ ID NO: 2735595 - DNA, 25 bp, Homo sapien
tttgatacatgttctcgctctcact

SEQ ID NO: 2735596 - DNA, 25 bp, Homo sapien
gccatgtggggtggcacataactgt

SEQ ID NO: 2735597 - DNA, 25 bp, Homo sapien
attagccggaaattagccatgtggg

SEQ ID NO: 2735598 - DNA, 25 bp, Homo sapien
tgtggggtggcacataactgtaatc

SEQ ID NO: 2735599 - DNA, 25 bp, Homo sapien
tagttaagttcacttgaggtccttc

SEQ ID NO: 2735600 - DNA, 25 bp, Homo sapien
taatagattatactatgcaatcatt

SEQ ID NO: 2735601 - DNA, 25 bp, Homo sapien
atcattacagtagtcccgccaccac

SEQ ID NO: 2735602 - DNA, 25 bp, Homo sapien
tgaattagttaagttcacttgaggt

SEQ ID NO: 2735603 - DNA, 25 bp, Homo sapien
agaattgcttgaacccaggaggcag

SEQ ID NO: 2735604 - DNA, 25 bp, Homo sapien
aggtcgcggtgagccgagattgcac

SEQ ID NO: 2735605 - DNA, 25 bp, Homo sapien
cagctactcaggaggctgaggcagg

SEQ ID NO: 2735606 - DNA, 25 bp, Homo sapien
gtttggtggtgggtgtctataatcc

SEQ ID NO: 2735607 - DNA, 25 bp, Homo sapien
cagaaacagatcctttggaaaagcc

SEQ ID NO: 2735608 - DNA, 25 bp, Homo sapien
ctaggtctttctagactggacacca

SEQ ID NO: 2735609 - DNA, 25 bp, Homo sapien
aggactcaacaaggccaaatttatg

SEQ ID NO: 2735610 - DNA, 25 bp, Homo sapien
tgcctggccctagttttcgatttta

SEQ ID NO: 2735611 - DNA, 25 bp, Homo sapien
agctcactgcaaccaggttcaagag

SEQ ID NO: 2735612 - DNA, 25 bp, Homo sapien
ctcactgcaaccaggttcaagagat

SEQ ID NO: 2735613 - DNA, 25 bp, Homo sapien
gctcactgcaaccaggttcaagaga

SEQ ID NO: 2735614 - DNA, 25 bp, Homo sapien
caaccccatgacaggcctgggtgtg

SEQ ID NO: 2735615 - DNA, 25 bp, Homo sapien
cgtatacatataccaagttggtgtg

SEQ ID NO: 2735616 - DNA, 25 bp, Homo sapien
gttacacacgtatacatataccaag

SEQ ID NO: 2735617 - DNA, 25 bp, Homo sapien
catataccaagttggtgtgctgcat

SEQ ID NO: 2735618 - DNA, 25 bp, Homo sapien
tgcatattctaggtcaacagcccac

SEQ ID NO: 2735619 - DNA, 25 bp, Homo sapien
gcatattctaggtcaacagcccacc

SEQ ID NO: 2735620 - DNA, 25 bp, Homo sapien
catattctaggtcaacagcccacct

SEQ ID NO: 2735621 - DNA, 25 bp, Homo sapien
ctgcatattctaggtcaacagccca

SEQ ID NO: 2735622 - DNA, 25 bp, Homo sapien
gcaagaaggatttgcctgaatgcta

SEQ ID NO: 2735623 - DNA, 25 bp, Homo sapien
taagctccataagaacacagacaat

SEQ ID NO: 2735624 - DNA, 25 bp, Homo sapien
actgagtgggagataagaccctaat

SEQ ID NO: 2735625 - DNA, 25 bp, Homo sapien
gaagcagaggatttcagtaacctgg

SEQ ID NO: 2735626 - DNA, 25 bp, Homo sapien
gctccaatgacaaagtggcttttcc

SEQ ID NO: 2735627 - DNA, 25 bp, Homo sapien
gcacccggcctgatccttagctttt

SEQ ID NO: 2735628 - DNA, 25 bp, Homo sapien
gccaggatagggaactgaactgctg

SEQ ID NO: 2735629 - DNA, 25 bp, Homo sapien
acagtgttttatcatgtcggccatg

SEQ ID NO: 2735630 - DNA, 25 bp, Homo sapien
gcactatcttacatgttttgcaggg

SEQ ID NO: 2735631 - DNA, 25 bp, Homo sapien
gaagccgctgacatgagcttggtac

SEQ ID NO: 2735632 - DNA, 25 bp, Homo sapien
ggtactgttctatggagttcagcac

SEQ ID NO: 2735633 - DNA, 25 bp, Homo sapien
cttgtgtttgaagccgctgacatga

SEQ ID NO: 2735634 - DNA, 25 bp, Homo sapien
gaatgggttgcctttgcattggaat

SEQ ID NO: 2735635 - DNA, 25 bp, Homo sapien
tttctgaatgggttgcctttgcatt

SEQ ID NO: 2735636 - DNA, 25 bp, Homo sapien
caaggtggttgagtctttctgaatg

SEQ ID NO: 2735637 - DNA, 25 bp, Homo sapien
ggaatctggcccagggatgatgcca

SEQ ID NO: 2735638 - DNA, 25 bp, Homo sapien
gcaatgaacctcacagctagcgggc

SEQ ID NO: 2735639 - DNA, 25 bp, Homo sapien
tacttcacagttggcagaaacctgc

SEQ ID NO: 2735640 - DNA, 25 bp, Homo sapien
tactttcctggtgagaacaacgagc

SEQ ID NO: 2735641 - DNA, 25 bp, Homo sapien
caggagtgaattagcccggaccaat

SEQ ID NO: 2735642 - DNA, 25 bp, Homo sapien
tgggacccagaaatcacccggtgga

SEQ ID NO: 2735643 - DNA, 25 bp, Homo sapien
ggaaggctagcaccacagcaaactg

SEQ ID NO: 2735644 - DNA, 25 bp, Homo sapien
gatggggaaggctagcaccacagca

SEQ ID NO: 2735645 - DNA, 25 bp, Homo sapien
gacccagaaatcacccggtggatga

SEQ ID NO: 2735646 - DNA, 25 bp, Homo sapien
gaattctcgtctcaaggttacaagg

SEQ ID NO: 2735647 - DNA, 25 bp, Homo sapien
gggcctgggaaacgcctgttcctca

SEQ ID NO: 2735648 - DNA, 25 bp, Homo sapien
ggaaaaatctatccgtgtggactca

SEQ ID NO: 2735649 - DNA, 25 bp, Homo sapien
ttgacacaatgaagagaagcctctg

SEQ ID NO: 2735650 - DNA, 25 bp, Homo sapien
cctaagtgattagcctggaaagcca

SEQ ID NO: 2735651 - DNA, 25 bp, Homo sapien
tataggtgcatgacgccgcacctgg

SEQ ID NO: 2735652 - DNA, 25 bp, Homo sapien
tggcaatatggctcaaaaccctagg

SEQ ID NO: 2735653 - DNA, 25 bp, Homo sapien
tcaagggagactttcacagggtgct

SEQ ID NO: 2735654 - DNA, 25 bp, Homo sapien
tcatttcttagaggcaagaccttgg

SEQ ID NO: 2735655 - DNA, 25 bp, Homo sapien
tactctggtcctcactcataaaggg

SEQ ID NO: 2735656 - DNA, 25 bp, Homo sapien
tcatctgttttgtgggtgctgcccc

SEQ ID NO: 2735657 - DNA, 25 bp, Homo sapien
gactgtgtgtgaacccctaagggca

SEQ ID NO: 2735658 - DNA, 25 bp, Homo sapien
ggtactaatgttccaccccgaggca

SEQ ID NO: 2735659 - DNA, 25 bp, Homo sapien
gagggtgacttttcgctgggcccca

SEQ ID NO: 2735660 - DNA, 25 bp, Homo sapien
tgctaaaagtaagaagggccctgat

SEQ ID NO: 2735661 - DNA, 25 bp, Homo sapien
tattgatttctgaggccattcgagg

SEQ ID NO: 2735662 - DNA, 25 bp, Homo sapien
tgattactcagtcgggtcacaggct

SEQ ID NO: 2735663 - DNA, 25 bp, Homo sapien
gaagcaggctgtccttacatgctgg

SEQ ID NO: 2735664 - DNA, 25 bp, Homo sapien
taagctctgcaagactttgtccctg

SEQ ID NO: 2735665 - DNA, 25 bp, Homo sapien
gagcaggtttgtcacccaaaggaga

SEQ ID NO: 2735666 - DNA, 25 bp, Homo sapien
gaattagatcatcgtaacacagcat

SEQ ID NO: 2735667 - DNA, 25 bp, Homo sapien
gcatattaagggctatgctagaggg

SEQ ID NO: 2735668 - DNA, 25 bp, Homo sapien
catctgggaacacaaagggcagcca

SEQ ID NO: 2735669 - DNA, 25 bp, Homo sapien
cacagtcctatgctagggaccaggg

SEQ ID NO: 2735670 - DNA, 25 bp, Homo sapien
ggcaacggagtgagaccctaataaa

SEQ ID NO: 2735671 - DNA, 25 bp, Homo sapien
ggcaggtcaatcgcctgaggttggg

SEQ ID NO: 2735672 - DNA, 25 bp, Homo sapien
caggtcaatcgcctgaggttgggag

SEQ ID NO: 2735673 - DNA, 25 bp, Homo sapien
aaatattagccagacgggcgtggtg

SEQ ID NO: 2735674 - DNA, 25 bp, Homo sapien
tgtccaaactgacccaacaggattc

SEQ ID NO: 2735675 - DNA, 25 bp, Homo sapien
tgatcagatatcgaagatgggcggc

SEQ ID NO: 2735676 - DNA, 25 bp, Homo sapien
tgttcccacaacacgttagctggtt

SEQ ID NO: 2735677 - DNA, 25 bp, Homo sapien
gatgggcggcagttcttgctaaact

SEQ ID NO: 2735678 - DNA, 25 bp, Homo sapien
tacggatctaaccaagtcactcctc

SEQ ID NO: 2735679 - DNA, 25 bp, Homo sapien
gggctatcaaaaagaagcggtgact

SEQ ID NO: 2735680 - DNA, 25 bp, Homo sapien
tttgctgaaccccttgcttccccta

SEQ ID NO: 2735681 - DNA, 25 bp, Homo sapien
tgacttctttaaactacggatctaa

SEQ ID NO: 2735682 - DNA, 25 bp, Homo sapien
cagaaacctaagtgagcagggccta

SEQ ID NO: 2735683 - DNA, 25 bp, Homo sapien
cagagagttgagtttccacacagca

SEQ ID NO: 2735684 - DNA, 25 bp, Homo sapien
cacgtctgtttggaggaggaccgac

SEQ ID NO: 2735685 - DNA, 25 bp, Homo sapien
tcatggtcgcaagatgttggcttca

SEQ ID NO: 2735686 - DNA, 25 bp, Homo sapien
gtttatactctgaagacagcagggc

SEQ ID NO: 2735687 - DNA, 25 bp, Homo sapien
gactgtgagaatgacccctcctcag

SEQ ID NO: 2735688 - DNA, 25 bp, Homo sapien
tctagcttggctggtcaaaacggag

SEQ ID NO: 2735689 - DNA, 25 bp, Homo sapien
ggtcataccatacccagctgctcag

SEQ ID NO: 2735690 - DNA, 25 bp, Homo sapien
cgcaacccccctatacacaccccat

SEQ ID NO: 2735691 - DNA, 25 bp, Homo sapien
tacacgcaacccccctatacacacc

SEQ ID NO: 2735692 - DNA, 25 bp, Homo sapien
ctacacgcaacccccctatacacac

SEQ ID NO: 2735693 - DNA, 25 bp, Homo sapien
cctacacgcaacccccctatacaca

SEQ ID NO: 2735694 - DNA, 25 bp, Homo sapien
ccaagatccccgcccacctggagag

SEQ ID NO: 2735695 - DNA, 25 bp, Homo sapien
ctagaccagctcgagccggagagag

SEQ ID NO: 2735696 - DNA, 25 bp, Homo sapien
cgcctagaccagctcgagccggaga

SEQ ID NO: 2735697 - DNA, 25 bp, Homo sapien
agctcgagccggagagaggtgtggc

SEQ ID NO: 2735698 - DNA, 25 bp, Homo sapien
gggagcgaggaatgtacccgcgacg

SEQ ID NO: 2735699 - DNA, 25 bp, Homo sapien
ccgcgacccctgcacgcggcagggt

SEQ ID NO: 2735700 - DNA, 25 bp, Homo sapien
gcgacccctgcacgcggcagggtcc

SEQ ID NO: 2735701 - DNA, 25 bp, Homo sapien
gcgaggaatgtacccgcgacggcgg

SEQ ID NO: 2735702 - DNA, 25 bp, Homo sapien
tcgagcctgcgtgactccgcgccca

SEQ ID NO: 2735703 - DNA, 25 bp, Homo sapien
ctcgagcctgcgtgactccgcgccc

SEQ ID NO: 2735704 - DNA, 25 bp, Homo sapien
agcctgcgtgactccgcgcccagca

SEQ ID NO: 2735705 - DNA, 25 bp, Homo sapien
gtgactccgcgcccagcacagggtc

SEQ ID NO: 2735706 - DNA, 25 bp, Homo sapien
ccaagctggacttcccaccaactgc

SEQ ID NO: 2735707 - DNA, 25 bp, Homo sapien
agctctcagggacccaagctggact

SEQ ID NO: 2735708 - DNA, 25 bp, Homo sapien
tcagggacccaagctggacttccca

SEQ ID NO: 2735709 - DNA, 25 bp, Homo sapien
caagctggacttcccaccaactgcc

SEQ ID NO: 2735710 - DNA, 25 bp, Homo sapien
tccacttcctcagaggcctccaggg

SEQ ID NO: 2735711 - DNA, 25 bp, Homo sapien
gcctccagggacaagactggaggcc

SEQ ID NO: 2735712 - DNA, 25 bp, Homo sapien
acactcagcaggacccccaacaggg

SEQ ID NO: 2735713 - DNA, 25 bp, Homo sapien
actggaggcccaggcacactcagca

SEQ ID NO: 2735714 - DNA, 25 bp, Homo sapien
tctctcgcagacacagtgatagatg

SEQ ID NO: 2735715 - DNA, 25 bp, Homo sapien
gggcctgggcaaggatcctttccag

SEQ ID NO: 2735716 - DNA, 25 bp, Homo sapien
gagtctcagtggttgagccctgccc

SEQ ID NO: 2735717 - DNA, 25 bp, Homo sapien
tagatgaatgcttgctggaagccag

SEQ ID NO: 2735718 - DNA, 25 bp, Homo sapien
gctggcaatctctaggcggcccctc

SEQ ID NO: 2735719 - DNA, 25 bp, Homo sapien
tctgcaggacgatcatggagcctcg

SEQ ID NO: 2735720 - DNA, 25 bp, Homo sapien
gtgccaggcgactgccctccttgta

SEQ ID NO: 2735721 - DNA, 25 bp, Homo sapien
tcctcaggtaggaagctggcaatct

SEQ ID NO: 2735722 - DNA, 25 bp, Homo sapien
aagcatctaaggtccaagaggggca

SEQ ID NO: 2735723 - DNA, 25 bp, Homo sapien
agcatctaaggtccaagaggggcag

SEQ ID NO: 2735724 - DNA, 25 bp, Homo sapien
ttcactccctgctagagtctcttac

SEQ ID NO: 2735725 - DNA, 25 bp, Homo sapien
tctccccaggcatcccttcactccc

SEQ ID NO: 2735726 - DNA, 25 bp, Homo sapien
ctattcgaggggtccctatgggact

SEQ ID NO: 2735727 - DNA, 25 bp, Homo sapien
taactgtgcctattcgaggggtccc

SEQ ID NO: 2735728 - DNA, 25 bp, Homo sapien
ttgctgggggtaactgtgcctattc

SEQ ID NO: 2735729 - DNA, 25 bp, Homo sapien
cctcatcatcgttgctggaggtcaa

SEQ ID NO: 2735730 - DNA, 25 bp, Homo sapien
ggaaggcccctagaatgaccgtgtg

SEQ ID NO: 2735731 - DNA, 25 bp, Homo sapien
tcctcttctcagtgatcagatgagc

SEQ ID NO: 2735732 - DNA, 25 bp, Homo sapien
tcttctcagtgatcagatgagcagc

SEQ ID NO: 2735733 - DNA, 25 bp, Homo sapien
tgaccgtgtgttcccacacaggcct

SEQ ID NO: 2735734 - DNA, 25 bp, Homo sapien
ggttctccccatgaaaggcctgtcc

SEQ ID NO: 2735735 - DNA, 25 bp, Homo sapien
tgcagctggacagcggaacttgacg

SEQ ID NO: 2735736 - DNA, 25 bp, Homo sapien
ggcctgtccatccttaagccagcgg

SEQ ID NO: 2735737 - DNA, 25 bp, Homo sapien
tgttccccgcaggtactgcatgcag

SEQ ID NO: 2735738 - DNA, 25 bp, Homo sapien
cacgagactccagtgctgatggcgc

SEQ ID NO: 2735739 - DNA, 25 bp, Homo sapien
cgagactccagtgctgatggcgcag

SEQ ID NO: 2735740 - DNA, 25 bp, Homo sapien
acgagactccagtgctgatggcgca

SEQ ID NO: 2735741 - DNA, 25 bp, Homo sapien
caggtagttatagcggatgctgccc

SEQ ID NO: 2735742 - DNA, 25 bp, Homo sapien
cagcgttctctaccaggcaggtgta

SEQ ID NO: 2735743 - DNA, 25 bp, Homo sapien
cgttctctaccaggcaggtgtatgt

SEQ ID NO: 2735744 - DNA, 25 bp, Homo sapien
atctagcaggtagttatagcggatg

SEQ ID NO: 2735745 - DNA, 25 bp, Homo sapien
tggggaccgggcgagacagtcaacc

SEQ ID NO: 2735746 - DNA, 25 bp, Homo sapien
ctggggaccgggcgagacagtcaac

SEQ ID NO: 2735747 - DNA, 25 bp, Homo sapien
cccaccacggctgtggtgttggccg

SEQ ID NO: 2735748 - DNA, 25 bp, Homo sapien
ctgggcatcgctgtacaccttgcac

SEQ ID NO: 2735749 - DNA, 25 bp, Homo sapien
ggaaaccgtcggctccgaagctgct

SEQ ID NO: 2735750 - DNA, 25 bp, Homo sapien
ttgatgacgatgtgcttcagccact

SEQ ID NO: 2735751 - DNA, 25 bp, Homo sapien
ggggacatgctctggggtcacagca

SEQ ID NO: 2735752 - DNA, 25 bp, Homo sapien
gggacatgctctggggtcacagcag

SEQ ID NO: 2735753 - DNA, 25 bp, Homo sapien
ggggtgggggacatgctctggggtc

SEQ ID NO: 2735754 - DNA, 25 bp, Homo sapien
gtgggggacatgctctggggtcaca

SEQ ID NO: 2735755 - DNA, 25 bp, Homo sapien
cgatggaattgcctgcgaggcaggt

SEQ ID NO: 2735756 - DNA, 25 bp, Homo sapien
gacacgttccgcaggtacaggacct

SEQ ID NO: 2735757 - DNA, 25 bp, Homo sapien
cagactggtaggagaggccgatgga

SEQ ID NO: 2735758 - DNA, 25 bp, Homo sapien
tcggctgacacgttccgcaggtaca

SEQ ID NO: 2735759 - DNA, 25 bp, Homo sapien
cccagaggggcatctcgcagcatct

SEQ ID NO: 2735760 - DNA, 25 bp, Homo sapien
ggcccagaggggcatctcgcagcat

SEQ ID NO: 2735761 - DNA, 25 bp, Homo sapien
cagaggggcatctcgcagcatctcc

SEQ ID NO: 2735762 - DNA, 25 bp, Homo sapien
agaggggcatctcgcagcatctcct

SEQ ID NO: 2735763 - DNA, 25 bp, Homo sapien
cgtggagcgcctgccctcgatacag

SEQ ID NO: 2735764 - DNA, 25 bp, Homo sapien
ccgacgcgtacaggatgatgtccgt

SEQ ID NO: 2735765 - DNA, 25 bp, Homo sapien
ccagggagcccgacgcgtacaggat

SEQ ID NO: 2735766 - DNA, 25 bp, Homo sapien
gatgtccgtatacctggcctcgggc

SEQ ID NO: 2735767 - DNA, 25 bp, Homo sapien
tcacatgtgaggtgggggatgcgcc

SEQ ID NO: 2735768 - DNA, 25 bp, Homo sapien
gacttggttctgcctgctggagtca

SEQ ID NO: 2735769 - DNA, 25 bp, Homo sapien
gtcacatgtgaggtgggggatgcgc

SEQ ID NO: 2735770 - DNA, 25 bp, Homo sapien
agacttggttctgcctgctggagtc

SEQ ID NO: 2735771 - DNA, 25 bp, Homo sapien
ctggaggagagacgcacgcctcgta

SEQ ID NO: 2735772 - DNA, 25 bp, Homo sapien
gaactcccatagtgggtcgagaggt

SEQ ID NO: 2735773 - DNA, 25 bp, Homo sapien
ctagactcacgaggccggcgagcaa

SEQ ID NO: 2735774 - DNA, 25 bp, Homo sapien
cagggatgagcttgacttgccggaa

SEQ ID NO: 2735775 - DNA, 25 bp, Homo sapien
caaaggcctctgcacgtactacctg

SEQ ID NO: 2735776 - DNA, 25 bp, Homo sapien
tggccaaagcagccctcgcctaggg

SEQ ID NO: 2735777 - DNA, 25 bp, Homo sapien
tgcacgtactacctggccaaagcag

SEQ ID NO: 2735778 - DNA, 25 bp, Homo sapien
aaggcctctgcacgtactacctggc

SEQ ID NO: 2735779 - DNA, 25 bp, Homo sapien
tgtcggccgatcagcttcatcacct

SEQ ID NO: 2735780 - DNA, 25 bp, Homo sapien
cttgtgtcggccgatcagcttcatc

SEQ ID NO: 2735781 - DNA, 25 bp, Homo sapien
gatgttcttgtgtcggccgatcagc

SEQ ID NO: 2735782 - DNA, 25 bp, Homo sapien
tgatgatgttcttgtgtcggccgat

SEQ ID NO: 2735783 - DNA, 25 bp, Homo sapien
gcccctcactgctccgaggaccgtc

SEQ ID NO: 2735784 - DNA, 25 bp, Homo sapien
gcgcactccacgatcacgtacaggg

SEQ ID NO: 2735785 - DNA, 25 bp, Homo sapien
aggtttcccttggcggcgcactcca

SEQ ID NO: 2735786 - DNA, 25 bp, Homo sapien
tcactgctccgaggaccgtcggggc

SEQ ID NO: 2735787 - DNA, 25 bp, Homo sapien
tcttatagtagtcaatgtggtggac

SEQ ID NO: 2735788 - DNA, 25 bp, Homo sapien
atagtagtcaatgtggtggacgccg

SEQ ID NO: 2735789 - DNA, 25 bp, Homo sapien
ttatagtagtcaatgtggtggacgc

SEQ ID NO: 2735790 - DNA, 25 bp, Homo sapien
ttttcttatagtagtcaatgtggtg

SEQ ID NO: 2735791 - DNA, 25 bp, Homo sapien
ccatccagttctgccccatctccct

SEQ ID NO: 2735792 - DNA, 25 bp, Homo sapien
tccagttctgccccatctccctcac

SEQ ID NO: 2735793 - DNA, 25 bp, Homo sapien
atccagttctgccccatctccctca

SEQ ID NO: 2735794 - DNA, 25 bp, Homo sapien
ccccatccagttctgccccatctcc

SEQ ID NO: 2735795 - DNA, 25 bp, Homo sapien
ctggtgtgtgtacacccggtcaaac

SEQ ID NO: 2735796 - DNA, 25 bp, Homo sapien
tgtgtacacccggtcaaacaaggcc

SEQ ID NO: 2735797 - DNA, 25 bp, Homo sapien
tgtgtgtacacccggtcaaacaagg

SEQ ID NO: 2735798 - DNA, 25 bp, Homo sapien
ggtgtgtgtacacccggtcaaacaa

SEQ ID NO: 2735799 - DNA, 25 bp, Homo sapien
atgccaggatacggggagcccccga

SEQ ID NO: 2735800 - DNA, 25 bp, Homo sapien
gcagtgtgggggtcggtccatccga

SEQ ID NO: 2735801 - DNA, 25 bp, Homo sapien
tgggggtcggtccatccgatgtccc

SEQ ID NO: 2735802 - DNA, 25 bp, Homo sapien
ggtccatccgatgtccctcccgcag

SEQ ID NO: 2735803 - DNA, 25 bp, Homo sapien
ggcggagggtcacagggagcctcag

SEQ ID NO: 2735804 - DNA, 25 bp, Homo sapien
gggcggagggtcacagggagcctca

SEQ ID NO: 2735805 - DNA, 25 bp, Homo sapien
tgccagcactcacgcatcagcccgt

SEQ ID NO: 2735806 - DNA, 25 bp, Homo sapien
tgcgtgccagcactcacgcatcagc

SEQ ID NO: 2735807 - DNA, 25 bp, Homo sapien
ggagggcgctgcgtgccagcactca

SEQ ID NO: 2735808 - DNA, 25 bp, Homo sapien
agggcgctgcgtgccagcactcacg

SEQ ID NO: 2735809 - DNA, 25 bp, Homo sapien
tgtccacgcggtcaggccagatgag

SEQ ID NO: 2735810 - DNA, 25 bp, Homo sapien
ggaacggagctggtcagcctctgca

SEQ ID NO: 2735811 - DNA, 25 bp, Homo sapien
ggcgcatgtccacgcggtcaggcca

SEQ ID NO: 2735812 - DNA, 25 bp, Homo sapien
tgggacggggcgcatgtccacgcgg

SEQ ID NO: 2735813 - DNA, 25 bp, Homo sapien
gatcccaatggcagggggtcgtggc

SEQ ID NO: 2735814 - DNA, 25 bp, Homo sapien
gaatagggtccgaaggtcaggcgga

SEQ ID NO: 2735815 - DNA, 25 bp, Homo sapien
gtccgaaggtcaggcggaggtcgag

SEQ ID NO: 2735816 - DNA, 25 bp, Homo sapien
tgaagacagaatcgctggaggagca

SEQ ID NO: 2735817 - DNA, 25 bp, Homo sapien
actaagcgccaaggtccaagaagcc

SEQ ID NO: 2735818 - DNA, 25 bp, Homo sapien
tatcaaggtcgagcactgtgtcagg

SEQ ID NO: 2735819 - DNA, 25 bp, Homo sapien
gaagccgagcagaaccctgacattt

SEQ ID NO: 2735820 - DNA, 25 bp, Homo sapien
ggcaggaggtttagcatagcagctc

SEQ ID NO: 2735821 - DNA, 25 bp, Homo sapien
gataaacaatcatgagctgacgctc

SEQ ID NO: 2735822 - DNA, 25 bp, Homo sapien
gatgagttctgtgtgggataccgtc

SEQ ID NO: 2735823 - DNA, 25 bp, Homo sapien
taccgtcagctggagaggctatgct

SEQ ID NO: 2735824 - DNA, 25 bp, Homo sapien
ccatgaaggctgtcctggttgggca

SEQ ID NO: 2735825 - DNA, 25 bp, Homo sapien
tcagctgttggcgatttcacgcccc

SEQ ID NO: 2735826 - DNA, 25 bp, Homo sapien
gcccaggtgccgacgaaggtcaaat

SEQ ID NO: 2735827 - DNA, 25 bp, Homo sapien
cgaaggtcaaatttcgatagcaaga

SEQ ID NO: 2735828 - DNA, 25 bp, Homo sapien
tttcgatagcaagagagtaaaaagg

SEQ ID NO: 2735829 - DNA, 25 bp, Homo sapien
cagtagtgccgctgtagccaaatcc

SEQ ID NO: 2735830 - DNA, 25 bp, Homo sapien
tagtgccgctgtagccaaatccggt

SEQ ID NO: 2735831 - DNA, 25 bp, Homo sapien
cgctgtagccaaatccggtgacgtt

SEQ ID NO: 2735832 - DNA, 25 bp, Homo sapien
tagccaaatccggtgacgtttcacc

SEQ ID NO: 2735833 - DNA, 25 bp, Homo sapien
tctttgtacgttgggttgcgccggc

SEQ ID NO: 2735834 - DNA, 25 bp, Homo sapien
tattggtccgttcggtcaggtggct

SEQ ID NO: 2735835 - DNA, 25 bp, Homo sapien
cctattaactttcagcgtgtcccag

SEQ ID NO: 2735836 - DNA, 25 bp, Homo sapien
caaagggcagccaattcctattaac

SEQ ID NO: 2735837 - DNA, 25 bp, Homo sapien
ttattgctggtgtctttcctgatgt

SEQ ID NO: 2735838 - DNA, 25 bp, Homo sapien
ctggtgtctttcctgatgtaaatcc

SEQ ID NO: 2735839 - DNA, 25 bp, Homo sapien
cttattgctggtgtctttcctgatg

SEQ ID NO: 2735840 - DNA, 25 bp, Homo sapien
gtgtctttcctgatgtaaatcccat

SEQ ID NO: 2735841 - DNA, 25 bp, Homo sapien
ctggggatgaactgcttgctgacag

SEQ ID NO: 2735842 - DNA, 25 bp, Homo sapien
gctggggatgaactgcttgctgaca

SEQ ID NO: 2735843 - DNA, 25 bp, Homo sapien
cagctggggatgaactgcttgctga

SEQ ID NO: 2735844 - DNA, 25 bp, Homo sapien
ggggatgaactgcttgctgacaggt

SEQ ID NO: 2735845 - DNA, 25 bp, Homo sapien
ggctcccaagtcaacaggcccttag

SEQ ID NO: 2735846 - DNA, 25 bp, Homo sapien
tcccaagtcaacaggcccttagcac

SEQ ID NO: 2735847 - DNA, 25 bp, Homo sapien
ggaggctcccaagtcaacaggccct

SEQ ID NO: 2735848 - DNA, 25 bp, Homo sapien
tgtctgcaagtgccggatgcagacc

SEQ ID NO: 2735849 - DNA, 25 bp, Homo sapien
ctgcaccgggcccgcagcaccgaat

SEQ ID NO: 2735850 - DNA, 25 bp, Homo sapien
tgcagttctcggcacccaggcagat

SEQ ID NO: 2735851 - DNA, 25 bp, Homo sapien
ggagtgcgcgcctcgcccctgaggg

SEQ ID NO: 2735852 - DNA, 25 bp, Homo sapien
gagctgcgccgggacacgggaccgc

SEQ ID NO: 2735853 - DNA, 25 bp, Homo sapien
ggcagatggccctctcgtgccaccg

SEQ ID NO: 2735854 - DNA, 25 bp, Homo sapien
aggctggatcgtcccgggtgccgcg

SEQ ID NO: 2735855 - DNA, 25 bp, Homo sapien
tgtctcaggctcgacgcccgcgagg

SEQ ID NO: 2735856 - DNA, 25 bp, Homo sapien
ggactcggccctgcggtgcccacag

SEQ ID NO: 2735857 - DNA, 25 bp, Homo sapien
gggaacgaagccaggcgaccccagc

SEQ ID NO: 2735858 - DNA, 25 bp, Homo sapien
ctgtccgatcgtcccgccagccctg

SEQ ID NO: 2735859 - DNA, 25 bp, Homo sapien
cgcggctgaggcctgtccgatcgtc

SEQ ID NO: 2735860 - DNA, 25 bp, Homo sapien
gaggcctgtccgatcgtcccgccag

SEQ ID NO: 2735861 - DNA, 25 bp, Homo sapien
ggctgaggcctgtccgatcgtcccg

SEQ ID NO: 2735862 - DNA, 25 bp, Homo sapien
tacactggggtgcgagcggagcggt

SEQ ID NO: 2735863 - DNA, 25 bp, Homo sapien
actggggtgcgagcggagcggtggg

SEQ ID NO: 2735864 - DNA, 25 bp, Homo sapien
tccccccgcgtctctcttcagggga

SEQ ID NO: 2735865 - DNA, 25 bp, Homo sapien
ggagcggtggggagagagcggggcc

SEQ ID NO: 2735866 - DNA, 25 bp, Homo sapien
cccgcgccccctcccgggccagctg

SEQ ID NO: 2735867 - DNA, 25 bp, Homo sapien
ccgcgccccctcccgggccagctgg

SEQ ID NO: 2735868 - DNA, 25 bp, Homo sapien
cgcgccccctcccgggccagctggg

SEQ ID NO: 2735869 - DNA, 25 bp, Homo sapien
ggccgaggtgttcgcaggcggccgg

SEQ ID NO: 2735870 - DNA, 25 bp, Homo sapien
ccgaggtgttcgcaggcggccggcg

SEQ ID NO: 2735871 - DNA, 25 bp, Homo sapien
aggccgaggtgttcgcaggcggccg

SEQ ID NO: 2735872 - DNA, 25 bp, Homo sapien
gaggccgaggtgttcgcaggcggcc

SEQ ID NO: 2735873 - DNA, 25 bp, Homo sapien
ctcatcaatattcagcagcaagcaa

SEQ ID NO: 2735874 - DNA, 25 bp, Homo sapien
agccgagccgatcgctctcatcaat

SEQ ID NO: 2735875 - DNA, 25 bp, Homo sapien
gagccgatcgctctcatcaatattc

SEQ ID NO: 2735876 - DNA, 25 bp, Homo sapien
cagcaagcaaagtttgctgcgggag

SEQ ID NO: 2735877 - DNA, 25 bp, Homo sapien
tacagctcgaaaaacatggctgctg

SEQ ID NO: 2735878 - DNA, 25 bp, Homo sapien
ctacagctcgaaaaacatggctgct

SEQ ID NO: 2735879 - DNA, 25 bp, Homo sapien
acagctcgaaaaacatggctgctgc

SEQ ID NO: 2735880 - DNA, 25 bp, Homo sapien
accgaggcggccagcgaagcccagt

SEQ ID NO: 2735881 - DNA, 25 bp, Homo sapien
agggagaaaccgaggcggccagcga

SEQ ID NO: 2735882 - DNA, 25 bp, Homo sapien
gcgaagcccagtcagggtagcagca

SEQ ID NO: 2735883 - DNA, 25 bp, Homo sapien
ctggacccggcagagggagaaaccg

SEQ ID NO: 2735884 - DNA, 25 bp, Homo sapien
tgcaccccagagctcgccttcctga

SEQ ID NO: 2735885 - DNA, 25 bp, Homo sapien
aggccgcaggcgagccggccgaggc

SEQ ID NO: 2735886 - DNA, 25 bp, Homo sapien
gctcgccttcctgaatgcaggcctg

SEQ ID NO: 2735887 - DNA, 25 bp, Homo sapien
cagcgccggagcctttgcagcggcg

SEQ ID NO: 2735888 - DNA, 25 bp, Homo sapien
agggcgcagcggtcacaatagcgct

SEQ ID NO: 2735889 - DNA, 25 bp, Homo sapien
ggcgcagcggtcacaatagcgctgc

SEQ ID NO: 2735890 - DNA, 25 bp, Homo sapien
ctagggcgcagcggtcacaatagcg

SEQ ID NO: 2735891 - DNA, 25 bp, Homo sapien
cgcagcggtcacaatagcgctgcac

SEQ ID NO: 2735892 - DNA, 25 bp, Homo sapien
ttcttctgggtagttcacaggtctg

SEQ ID NO: 2735893 - DNA, 25 bp, Homo sapien
tctgggtagttcacaggtctgatcc

SEQ ID NO: 2735894 - DNA, 25 bp, Homo sapien
tcttctgggtagttcacaggtctga

SEQ ID NO: 2735895 - DNA, 25 bp, Homo sapien
tgggtagttcacaggtctgatccat

SEQ ID NO: 2735896 - DNA, 25 bp, Homo sapien
agggctgtccttgtcttcaggggca

SEQ ID NO: 2735897 - DNA, 25 bp, Homo sapien
aaagggctgtccttgtcttcagggg

SEQ ID NO: 2735898 - DNA, 25 bp, Homo sapien
cgaaagggctgtccttgtcttcagg

SEQ ID NO: 2735899 - DNA, 25 bp, Homo sapien
gggctgtccttgtcttcaggggcat

SEQ ID NO: 2735900 - DNA, 25 bp, Homo sapien
caagaatggcgatttgactgcaccg

SEQ ID NO: 2735901 - DNA, 25 bp, Homo sapien
gaggccaaatcctgtagtctccgca

SEQ ID NO: 2735902 - DNA, 25 bp, Homo sapien
caaggaagtgcaaacaattggcgtc

SEQ ID NO: 2735903 - DNA, 25 bp, Homo sapien
cagtctgaggagctaatggcaagaa

SEQ ID NO: 2735904 - DNA, 25 bp, Homo sapien
aatggcaattcctgtgaagtagatg

SEQ ID NO: 2735905 - DNA, 25 bp, Homo sapien
aaatggcaattcctgtgaagtagat

SEQ ID NO: 2735906 - DNA, 25 bp, Homo sapien
gtttcctaatgtactggtactggaa

SEQ ID NO: 2735907 - DNA, 25 bp, Homo sapien
tatatgtatatatttaagttgtacc

SEQ ID NO: 2735908 - DNA, 25 bp, Homo sapien
tatgtatatatttaagttgtaccaa

SEQ ID NO: 2735909 - DNA, 25 bp, Homo sapien
ttaagtggcctgtatatatacatat

SEQ ID NO: 2735910 - DNA, 25 bp, Homo sapien
tgtatatatttaagttgtaccaaaa

SEQ ID NO: 2735911 - DNA, 25 bp, Homo sapien
ttttgcccaaagcttatgattagca

SEQ ID NO: 2735912 - DNA, 25 bp, Homo sapien
gctgtgaactgataagcaaccaaaa

SEQ ID NO: 2735913 - DNA, 25 bp, Homo sapien
catatatgtatacctccaacttgag

SEQ ID NO: 2735914 - DNA, 25 bp, Homo sapien
taaacctgaactcaatcaaatgcct

SEQ ID NO: 2735915 - DNA, 25 bp, Homo sapien
ctgtagttctagctgatgcaggagg

SEQ ID NO: 2735916 - DNA, 25 bp, Homo sapien
caagaacttctggaatttagacgca

SEQ ID NO: 2735917 - DNA, 25 bp, Homo sapien
tctttgctaacattaccggcggtga

SEQ ID NO: 2735918 - DNA, 25 bp, Homo sapien
gaagtgaactgatcatttagctaga

SEQ ID NO: 2735919 - DNA, 25 bp, Homo sapien
tgtaggacaattcagactcaagata

SEQ ID NO: 2735920 - DNA, 25 bp, Homo sapien
gaaaccaaggagtaccaaggcataa

SEQ ID NO: 2735921 - DNA, 25 bp, Homo sapien
agaaaaaggatttgtctgagctgcc

SEQ ID NO: 2735922 - DNA, 25 bp, Homo sapien
ctctttgacgagaaacaggtttaca

SEQ ID NO: 2735923 - DNA, 25 bp, Homo sapien
cttcaaggtgataaagtctttgagc

SEQ ID NO: 2735924 - DNA, 25 bp, Homo sapien
tcaaggtgataaagtctttgagcaa

SEQ ID NO: 2735925 - DNA, 25 bp, Homo sapien
caaggtgataaagtctttgagcaat

SEQ ID NO: 2735926 - DNA, 25 bp, Homo sapien
ttcaaggtgataaagtctttgagca

SEQ ID NO: 2735927 - DNA, 25 bp, Homo sapien
aaagcacctagcctgtctcaacaac

SEQ ID NO: 2735928 - DNA, 25 bp, Homo sapien
agtctgaatttctaggccccattac

SEQ ID NO: 2735929 - DNA, 25 bp, Homo sapien
gcaatctccaacaagtatcctctga

SEQ ID NO: 2735930 - DNA, 25 bp, Homo sapien
cactgggccgattcttaagtcttaa

SEQ ID NO: 2735931 - DNA, 25 bp, Homo sapien
catagagtggagtagcagcagaatc

SEQ ID NO: 2735932 - DNA, 25 bp, Homo sapien
gtagcagcagaatcaatgaaagtga

SEQ ID NO: 2735933 - DNA, 25 bp, Homo sapien
gagtggagtagcagcagaatcaatg

SEQ ID NO: 2735934 - DNA, 25 bp, Homo sapien
agagtttcatagagtggagtagcag

SEQ ID NO: 2735935 - DNA, 25 bp, Homo sapien
ttgacaagtagaatttgttggtttg

SEQ ID NO: 2735936 - DNA, 25 bp, Homo sapien
ttagttgacaagtagaatttgttgg

SEQ ID NO: 2735937 - DNA, 25 bp, Homo sapien
acaagtagaatttgttggtttgaag

SEQ ID NO: 2735938 - DNA, 25 bp, Homo sapien
agttgacaagtagaatttgttggtt

SEQ ID NO: 2735939 - DNA, 25 bp, Homo sapien
tctatctagaacaaaggacaacctg

SEQ ID NO: 2735940 - DNA, 25 bp, Homo sapien
taaattatcttgtatcatggccagg

SEQ ID NO: 2735941 - DNA, 25 bp, Homo sapien
cagaaagctattgatcctattgcac

SEQ ID NO: 2735942 - DNA, 25 bp, Homo sapien
tacatttgactcttggcatgcagca

SEQ ID NO: 2735943 - DNA, 25 bp, Homo sapien
ctaaatttcagagactggatctcct

SEQ ID NO: 2735944 - DNA, 25 bp, Homo sapien
taaatttcagagactggatctcctt

SEQ ID NO: 2735945 - DNA, 25 bp, Homo sapien
aaatttcagagactggatctccttt

SEQ ID NO: 2735946 - DNA, 25 bp, Homo sapien
aattagattcaaaagtaactgttca

SEQ ID NO: 2735947 - DNA, 25 bp, Homo sapien
attagattcaaaagtaactgttcaa

SEQ ID NO: 2735948 - DNA, 25 bp, Homo sapien
aaaaaacgattggtgaagtacatca

SEQ ID NO: 2735949 - DNA, 25 bp, Homo sapien
aatattctggttgtgtggtattaga

SEQ ID NO: 2735950 - DNA, 25 bp, Homo sapien
gcatcagatggagactccgactcaa

SEQ ID NO: 2735951 - DNA, 25 bp, Homo sapien
aaaatattaccattgcaaaaccagg

SEQ ID NO: 2735952 - DNA, 25 bp, Homo sapien
gacgggagtcatggatatactaacc

SEQ ID NO: 2735953 - DNA, 25 bp, Homo sapien
caaagaacttaatatacacacaatg

SEQ ID NO: 2735954 - DNA, 25 bp, Homo sapien
ctaacctatacaggtgataaaaaca

SEQ ID NO: 2735955 - DNA, 25 bp, Homo sapien
acatttagaaagttgacgggagtca

SEQ ID NO: 2735956 - DNA, 25 bp, Homo sapien
tgcgcgcttcttatgagattctaac

SEQ ID NO: 2735957 - DNA, 25 bp, Homo sapien
gaatggtactggtcctctcagcctg

SEQ ID NO: 2735958 - DNA, 25 bp, Homo sapien
aagtatggtttgtatataggcattt

SEQ ID NO: 2735959 - DNA, 25 bp, Homo sapien
gcagacaagggagcattatcgcctg

SEQ ID NO: 2735960 - DNA, 25 bp, Homo sapien
cagtgctatctaagtgtgggacaaa

SEQ ID NO: 2735961 - DNA, 25 bp, Homo sapien
cactcgaaaacacagatctagctat

SEQ ID NO: 2735962 - DNA, 25 bp, Homo sapien
tccagaaataagtacatcaagagcc

SEQ ID NO: 2735963 - DNA, 25 bp, Homo sapien
taatgacctgccctaacacttctgc

SEQ ID NO: 2735964 - DNA, 25 bp, Homo sapien
taaaatgcaattagtatacatttat

SEQ ID NO: 2735965 - DNA, 25 bp, Homo sapien
tgcctcagcctaagacggggttcca

SEQ ID NO: 2735966 - DNA, 25 bp, Homo sapien
gcctcagcctaagacggggttccac

SEQ ID NO: 2735967 - DNA, 25 bp, Homo sapien
gacggagtcttgctaatgcagttag

SEQ ID NO: 2735968 - DNA, 25 bp, Homo sapien
gactgtatttgtatgaaacgcctag

SEQ ID NO: 2735969 - DNA, 25 bp, Homo sapien
gactgagtgcagactcagcgtcctg

SEQ ID NO: 2735970 - DNA, 25 bp, Homo sapien
ttcacagtagcactgcctgtaacag

SEQ ID NO: 2735971 - DNA, 25 bp, Homo sapien
gaaacaaaatgtccgtcaagtgatg

SEQ ID NO: 2735972 - DNA, 25 bp, Homo sapien
agaacccacgcccggatgcagtggc

SEQ ID NO: 2735973 - DNA, 25 bp, Homo sapien
gaacccacgcccggatgcagtggct

SEQ ID NO: 2735974 - DNA, 25 bp, Homo sapien
atttagaacccacgcccggatgcag

SEQ ID NO: 2735975 - DNA, 25 bp, Homo sapien
agaatttagaacccacgcccggatg

SEQ ID NO: 2735976 - DNA, 25 bp, Homo sapien
cttttggcattatttgtcaactgag

SEQ ID NO: 2735977 - DNA, 25 bp, Homo sapien
tatggctgaacatagtggctcatgt

SEQ ID NO: 2735978 - DNA, 25 bp, Homo sapien
gccaggtatggctgaacatagtggc

SEQ ID NO: 2735979 - DNA, 25 bp, Homo sapien
tttgtcaactgagggagaaattaac

SEQ ID NO: 2735980 - DNA, 25 bp, Homo sapien
tacaatcagccttaagttatttaaa

SEQ ID NO: 2735981 - DNA, 25 bp, Homo sapien
agccaatacaatcagccttaagtta

SEQ ID NO: 2735982 - DNA, 25 bp, Homo sapien
acaagtgtaagccaatacaatcagc

SEQ ID NO: 2735983 - DNA, 25 bp, Homo sapien
caagtgtaagccaatacaatcagcc

SEQ ID NO: 2735984 - DNA, 25 bp, Homo sapien
taggaagtcacgtacactttccaaa

SEQ ID NO: 2735985 - DNA, 25 bp, Homo sapien
acactgtgaatacatgtaatgcact

SEQ ID NO: 2735986 - DNA, 25 bp, Homo sapien
ccaaatggatgaataggaagtcacg

SEQ ID NO: 2735987 - DNA, 25 bp, Homo sapien
ggctccactttatgttaataagcca

SEQ ID NO: 2735988 - DNA, 25 bp, Homo sapien
actattgttggctcactggttgtac

SEQ ID NO: 2735989 - DNA, 25 bp, Homo sapien
ttgcctcagcgattcacaaatgtaa

SEQ ID NO: 2735990 - DNA, 25 bp, Homo sapien
ctattgttggctcactggttgtaca

SEQ ID NO: 2735991 - DNA, 25 bp, Homo sapien
tttggattttgcctcagcgattcac

SEQ ID NO: 2735992 - DNA, 25 bp, Homo sapien
gctttgttgtaaaatcgaaacagga

SEQ ID NO: 2735993 - DNA, 25 bp, Homo sapien
tgtaaaatcgaaacaggatgtatct

SEQ ID NO: 2735994 - DNA, 25 bp, Homo sapien
cgaaacaggatgtatctatcacttg

SEQ ID NO: 2735995 - DNA, 25 bp, Homo sapien
aatcgaaacaggatgtatctatcac

SEQ ID NO: 2735996 - DNA, 25 bp, Homo sapien
tctggatccccttgtgcatacctct

SEQ ID NO: 2735997 - DNA, 25 bp, Homo sapien
ctttacaatctaaggcacgcttcat

SEQ ID NO: 2735998 - DNA, 25 bp, Homo sapien
tatgaccaagttccatcacacgatt

SEQ ID NO: 2735999 - DNA, 25 bp, Homo sapien
gaaacatctcttgggtctactttac

SEQ ID NO: 2736000 - DNA, 25 bp, Homo sapien
tactaaaaatgcaaaaattagccag

SEQ ID NO: 2736001 - DNA, 25 bp, Homo sapien
ggataacaaggcaaaaccctgtctg

SEQ ID NO: 2736002 - DNA, 25 bp, Homo sapien
agcctggataacaaggcaaaaccct

SEQ ID NO: 2736003 - DNA, 25 bp, Homo sapien
gcatggtggcatgcgcctgtaatcc

SEQ ID NO: 2736004 - DNA, 25 bp, Homo sapien
catggggcatcaataagaatcaaaa

SEQ ID NO: 2736005 - DNA, 25 bp, Homo sapien
tggggcatcaataagaatcaaaata

SEQ ID NO: 2736006 - DNA, 25 bp, Homo sapien
aacatggggcatcaataagaatcaa

SEQ ID NO: 2736007 - DNA, 25 bp, Homo sapien
gggcatcaataagaatcaaaatatt

SEQ ID NO: 2736008 - DNA, 25 bp, Homo sapien
tgtgtgttaatcaacggatcagaac

SEQ ID NO: 2736009 - DNA, 25 bp, Homo sapien
tcagtggcgtagactttttcttagg

SEQ ID NO: 2736010 - DNA, 25 bp, Homo sapien
accatgggcgtctcttgaattttgc

SEQ ID NO: 2736011 - DNA, 25 bp, Homo sapien
gatgagatctccaacttcatacttc

SEQ ID NO: 2736012 - DNA, 25 bp, Homo sapien
catagtatcttttgtcccaaaaaat

SEQ ID NO: 2736013 - DNA, 25 bp, Homo sapien
gttcccttgtaacaaccatgtctta

SEQ ID NO: 2736014 - DNA, 25 bp, Homo sapien
aaagaaagtcaggacaacacatgtt

SEQ ID NO: 2736015 - DNA, 25 bp, Homo sapien
tcaggacaacacatgtttaacaatt

SEQ ID NO: 2736016 - DNA, 25 bp, Homo sapien
tacactaaaaagtgtcacaaaagaa

SEQ ID NO: 2736017 - DNA, 25 bp, Homo sapien
tccacgtagtactgccgatagggcc

SEQ ID NO: 2736018 - DNA, 25 bp, Homo sapien
tctcctaaggacaggtagctcttcg

SEQ ID NO: 2736019 - DNA, 25 bp, Homo sapien
gaaggatctccaaaagcctccacgt

SEQ ID NO: 2736020 - DNA, 25 bp, Homo sapien
aaacatgacgattgcttttccagcc

SEQ ID NO: 2736021 - DNA, 25 bp, Homo sapien
gatcgtccacagttgcgcctagtaa

SEQ ID NO: 2736022 - DNA, 25 bp, Homo sapien
taatagagcttgatttgctgcccca

SEQ ID NO: 2736023 - DNA, 25 bp, Homo sapien
tttaccagaagcagggaggtctctc

SEQ ID NO: 2736024 - DNA, 25 bp, Homo sapien
cctggaaagttcattagaggcctgc

SEQ ID NO: 2736025 - DNA, 25 bp, Homo sapien
cctgcagtacagcatcaagagtcac

SEQ ID NO: 2736026 - DNA, 25 bp, Homo sapien
tctgaaggggatcctctttactagg

SEQ ID NO: 2736027 - DNA, 25 bp, Homo sapien
cacttgttaagtggcccattatctg

SEQ ID NO: 2736028 - DNA, 25 bp, Homo sapien
tctgccccacctctcaatgaacctc

SEQ ID NO: 2736029 - DNA, 25 bp, Homo sapien
aaacatttaaccgtggcccagctga

SEQ ID NO: 2736030 - DNA, 25 bp, Homo sapien
gctgaaggagttctatgctctggaa

SEQ ID NO: 2736031 - DNA, 25 bp, Homo sapien
ctttggtttaaacgctgccaccgct

SEQ ID NO: 2736032 - DNA, 25 bp, Homo sapien
taaatctgttcatgcgcttacgagg

SEQ ID NO: 2736033 - DNA, 25 bp, Homo sapien
ccgaaatggatttacagagatggtt

SEQ ID NO: 2736034 - DNA, 25 bp, Homo sapien
gacagtcaactattggttctctagg

SEQ ID NO: 2736035 - DNA, 25 bp, Homo sapien
ttctctaggactagtggtaggaaga

SEQ ID NO: 2736036 - DNA, 25 bp, Homo sapien
tttactgggatggtagaaatgctcc

SEQ ID NO: 2736037 - DNA, 25 bp, Homo sapien
cacttgcttggcttcctaaggcgtt

SEQ ID NO: 2736038 - DNA, 25 bp, Homo sapien
tcctaaggcgtttcttctctgaccg

SEQ ID NO: 2736039 - DNA, 25 bp, Homo sapien
gtgcacctgctcctgtaccttcttt

SEQ ID NO: 2736040 - DNA, 25 bp, Homo sapien
aatatctgatcatattcttctgtat

SEQ ID NO: 2736041 - DNA, 25 bp, Homo sapien
ttctgagcactagatcgacctcggg

SEQ ID NO: 2736042 - DNA, 25 bp, Homo sapien
aacggagcctccctttcaagaactg

SEQ ID NO: 2736043 - DNA, 25 bp, Homo sapien
acagacaaggtcagctgcggcaact

SEQ ID NO: 2736044 - DNA, 25 bp, Homo sapien
gcaattcctcagactcaagggcagg

SEQ ID NO: 2736045 - DNA, 25 bp, Homo sapien
gtctaaatcattggattcaagaagt

SEQ ID NO: 2736046 - DNA, 25 bp, Homo sapien
gggtctaaatcattggattcaagaa

SEQ ID NO: 2736047 - DNA, 25 bp, Homo sapien
ggtctaaatcattggattcaagaag

SEQ ID NO: 2736048 - DNA, 25 bp, Homo sapien
ggcataaatccagggtctaaatcat

SEQ ID NO: 2736049 - DNA, 25 bp, Homo sapien
acagggagaacatctttgtgtccat

SEQ ID NO: 2736050 - DNA, 25 bp, Homo sapien
tcaatatgggggagaacaaaactcc

SEQ ID NO: 2736051 - DNA, 25 bp, Homo sapien
ggaacaaagatctatatgtgaaacc

SEQ ID NO: 2736052 - DNA, 25 bp, Homo sapien
caagatggaacaaagatctatatgt

SEQ ID NO: 2736053 - DNA, 25 bp, Homo sapien
agattcagttatgccattctccagg

SEQ ID NO: 2736054 - DNA, 25 bp, Homo sapien
aataagatgtggcacaagattcagt

SEQ ID NO: 2736055 - DNA, 25 bp, Homo sapien
caccaaaatcttttgaataagatgt

SEQ ID NO: 2736056 - DNA, 25 bp, Homo sapien
caagattcagttatgccattctcca

SEQ ID NO: 2736057 - DNA, 25 bp, Homo sapien
tccttggcttgtcaaatatcttggt

SEQ ID NO: 2736058 - DNA, 25 bp, Homo sapien
agcatgcctctgtcgttttcgcttc

SEQ ID NO: 2736059 - DNA, 25 bp, Homo sapien
ggaatctcttttgacgagtcatcat

SEQ ID NO: 2736060 - DNA, 25 bp, Homo sapien
ctctgtcgttttcgcttccttggct

SEQ ID NO: 2736061 - DNA, 25 bp, Homo sapien
acaacgcccagccagcagtctcaat

SEQ ID NO: 2736062 - DNA, 25 bp, Homo sapien
cagccagcagtctcaatttttttct

SEQ ID NO: 2736063 - DNA, 25 bp, Homo sapien
caacgcccagccagcagtctcaatt

SEQ ID NO: 2736064 - DNA, 25 bp, Homo sapien
agccagcagtctcaatttttttctt

SEQ ID NO: 2736065 - DNA, 25 bp, Homo sapien
ttttttagaggcaggcatcccggga

SEQ ID NO: 2736066 - DNA, 25 bp, Homo sapien
caccttcctcaacagtctccttggg

SEQ ID NO: 2736067 - DNA, 25 bp, Homo sapien
gcatcccgggatcgtgttctacacc

SEQ ID NO: 2736068 - DNA, 25 bp, Homo sapien
aacagtctccttggggcttgtggcc

SEQ ID NO: 2736069 - DNA, 25 bp, Homo sapien
ctgtgcgacattcattgcagataaa

SEQ ID NO: 2736070 - DNA, 25 bp, Homo sapien
cagcagctcacccaatttttcacaa

SEQ ID NO: 2736071 - DNA, 25 bp, Homo sapien
cactccaggtggaaagccccacagc

SEQ ID NO: 2736072 - DNA, 25 bp, Homo sapien
tgagcctcacataacagcagctcac

SEQ ID NO: 2736073 - DNA, 25 bp, Homo sapien
gaagaccgttcgatatctactttac

SEQ ID NO: 2736074 - DNA, 25 bp, Homo sapien
ggaggaagaccgttcgatatctact

SEQ ID NO: 2736075 - DNA, 25 bp, Homo sapien
ggaagaccgttcgatatctacttta

SEQ ID NO: 2736076 - DNA, 25 bp, Homo sapien
gaggaagaccgttcgatatctactt

SEQ ID NO: 2736077 - DNA, 25 bp, Homo sapien
catggtaaaactttccacacaaggg

SEQ ID NO: 2736078 - DNA, 25 bp, Homo sapien
ttgttctgcataacagtgggtgggt

SEQ ID NO: 2736079 - DNA, 25 bp, Homo sapien
caggttatacagatgtggagggagc

SEQ ID NO: 2736080 - DNA, 25 bp, Homo sapien
gagggagcaccggaagcccttgttc

SEQ ID NO: 2736081 - DNA, 25 bp, Homo sapien
acagcggacacagcgcatcaaccga

SEQ ID NO: 2736082 - DNA, 25 bp, Homo sapien
cagcagccaggcaaaagtcattggc

SEQ ID NO: 2736083 - DNA, 25 bp, Homo sapien
ttagatgcaaggatctttgacccag

SEQ ID NO: 2736084 - DNA, 25 bp, Homo sapien
gtggtatgccacaggacagcggaca

SEQ ID NO: 2736085 - DNA, 25 bp, Homo sapien
caaatagaggaagaaatgatttctt

SEQ ID NO: 2736086 - DNA, 25 bp, Homo sapien
tacaaatagaggaagaaatgatttc

SEQ ID NO: 2736087 - DNA, 25 bp, Homo sapien
aatagaggaagaaatgatttcttac

SEQ ID NO: 2736088 - DNA, 25 bp, Homo sapien
ctacaaatagaggaagaaatgattt

SEQ ID NO: 2736089 - DNA, 25 bp, Homo sapien
gtacaaaggcaaatgatgcctcaaa

SEQ ID NO: 2736090 - DNA, 25 bp, Homo sapien
ttatgaggtcagtctcgctatattg

SEQ ID NO: 2736091 - DNA, 25 bp, Homo sapien
aatgaggtacgcatttgtctcagat

SEQ ID NO: 2736092 - DNA, 25 bp, Homo sapien
gtcattggttctgatagggggttgg

SEQ ID NO: 2736093 - DNA, 25 bp, Homo sapien
ttgtcattggttctgatagggggtt

SEQ ID NO: 2736094 - DNA, 25 bp, Homo sapien
gcaatgaggtacgcatttgtctcag

SEQ ID NO: 2736095 - DNA, 25 bp, Homo sapien
aaggcctacagaacatgtactgggt

SEQ ID NO: 2736096 - DNA, 25 bp, Homo sapien
taaaaggcctacagaacatgtactg

SEQ ID NO: 2736097 - DNA, 25 bp, Homo sapien
aaaggcctacagaacatgtactggg

SEQ ID NO: 2736098 - DNA, 25 bp, Homo sapien
ggcctacagaacatgtactgggtgc

SEQ ID NO: 2736099 - DNA, 25 bp, Homo sapien
tgagtggagcaagctagtgcttcag

SEQ ID NO: 2736100 - DNA, 25 bp, Homo sapien
gagtggagcaagctagtgcttcagt

SEQ ID NO: 2736101 - DNA, 25 bp, Homo sapien
ggtagacatctacaccgtcaaggtg

SEQ ID NO: 2736102 - DNA, 25 bp, Homo sapien
aaagactacaagatccactggtggg

SEQ ID NO: 2736103 - DNA, 25 bp, Homo sapien
tctatgcccggacaagtggctggcg

SEQ ID NO: 2736104 - DNA, 25 bp, Homo sapien
tcagcaagtggatgggctaactgcc

SEQ ID NO: 2736105 - DNA, 25 bp, Homo sapien
ctgtgggaataaaaaaatgtggcat

SEQ ID NO: 2736106 - DNA, 25 bp, Homo sapien
tacagtcattgcaataccagtttcc

SEQ ID NO: 2736107 - DNA, 25 bp, Homo sapien
gacaatctccctgtagtgtggcttt

SEQ ID NO: 2736108 - DNA, 25 bp, Homo sapien
cttcagggatatcaatgttcaggca

SEQ ID NO: 2736109 - DNA, 25 bp, Homo sapien
ttcaggcattcacgatgaaaagcag

SEQ ID NO: 2736110 - DNA, 25 bp, Homo sapien
aacagctcgaggatggcagatctca

SEQ ID NO: 2736111 - DNA, 25 bp, Homo sapien
ttatcaatgttggaaggaacagctc

SEQ ID NO: 2736112 - DNA, 25 bp, Homo sapien
aaagaggactgggaactctcccaca

SEQ ID NO: 2736113 - DNA, 25 bp, Homo sapien
tccatgtaagggaagactcgggcct

SEQ ID NO: 2736114 - DNA, 25 bp, Homo sapien
ggtatttcgactgctggtatctatt

SEQ ID NO: 2736115 - DNA, 25 bp, Homo sapien
gactgctggtatctatttcagattc

SEQ ID NO: 2736116 - DNA, 25 bp, Homo sapien
ttcgactgctggtatctatttcaga

SEQ ID NO: 2736117 - DNA, 25 bp, Homo sapien
gcaggtatttcgactgctggtatct

SEQ ID NO: 2736118 - DNA, 25 bp, Homo sapien
acacacttctgccacaatattaata

SEQ ID NO: 2736119 - DNA, 25 bp, Homo sapien
tacaatacacacttctgccacaata

SEQ ID NO: 2736120 - DNA, 25 bp, Homo sapien
cacttctgccacaatattaataata

SEQ ID NO: 2736121 - DNA, 25 bp, Homo sapien
atatacaatacacacttctgccaca

SEQ ID NO: 2736122 - DNA, 25 bp, Homo sapien
caactgtgcgttagatgagaaaaca

SEQ ID NO: 2736123 - DNA, 25 bp, Homo sapien
tgctacatcttaggtgccccagata

SEQ ID NO: 2736124 - DNA, 25 bp, Homo sapien
ccactttcggaaacatgctacatct

SEQ ID NO: 2736125 - DNA, 25 bp, Homo sapien
gatgccatctcctaacaactacgct

SEQ ID NO: 2736126 - DNA, 25 bp, Homo sapien
acaggtaatgtagtccaaagggtat

SEQ ID NO: 2736127 - DNA, 25 bp, Homo sapien
ttaagacaaaacataatccagaact

SEQ ID NO: 2736128 - DNA, 25 bp, Homo sapien
tccagaactaaatggcacaatacag

SEQ ID NO: 2736129 - DNA, 25 bp, Homo sapien
cacaaaaatcgaccaatgctatatg

SEQ ID NO: 2736130 - DNA, 25 bp, Homo sapien
gctgtcttagctctttttgggcctt

SEQ ID NO: 2736131 - DNA, 25 bp, Homo sapien
cttcctgcagctgtcttagctcttt

SEQ ID NO: 2736132 - DNA, 25 bp, Homo sapien
ctttatatgtttataaggtggtggc

SEQ ID NO: 2736133 - DNA, 25 bp, Homo sapien
tgtttataaggtggtggcttcttgt

SEQ ID NO: 2736134 - DNA, 25 bp, Homo sapien
caacctctggatattggcgcttgga

SEQ ID NO: 2736135 - DNA, 25 bp, Homo sapien
tggcactcatagagcagcatgcggt

SEQ ID NO: 2736136 - DNA, 25 bp, Homo sapien
tgaagatctgtaccctgccaatagg

SEQ ID NO: 2736137 - DNA, 25 bp, Homo sapien
tgcattcagagtctatcccacaggg

SEQ ID NO: 2736138 - DNA, 25 bp, Homo sapien
cactgggagatgatttgttcaatat

SEQ ID NO: 2736139 - DNA, 25 bp, Homo sapien
tcaatatttctctccctccgaaatg

SEQ ID NO: 2736140 - DNA, 25 bp, Homo sapien
catggttagacctcacctccacaaa

SEQ ID NO: 2736141 - DNA, 25 bp, Homo sapien
tgtcacacatctctagagcccttta

SEQ ID NO: 2736142 - DNA, 25 bp, Homo sapien
tgtctagggtgagcatatagaaatt

SEQ ID NO: 2736143 - DNA, 25 bp, Homo sapien
tataagctcacccacatactcattc

SEQ ID NO: 2736144 - DNA, 25 bp, Homo sapien
catagcgaattcgagctctgcattc

SEQ ID NO: 2736145 - DNA, 25 bp, Homo sapien
aattagtgatatcatgttcttgagc

SEQ ID NO: 2736146 - DNA, 25 bp, Homo sapien
ttgggaccagcatcaatgattcggt

SEQ ID NO: 2736147 - DNA, 25 bp, Homo sapien
gaaccgagcatagtttcctttggga

SEQ ID NO: 2736148 - DNA, 25 bp, Homo sapien
taatgtcacttagtgcaaaaaggcc

SEQ ID NO: 2736149 - DNA, 25 bp, Homo sapien
ggcctacacgggtatctccattcac

SEQ ID NO: 2736150 - DNA, 25 bp, Homo sapien
tcgcgcccagccacaaattttaata

SEQ ID NO: 2736151 - DNA, 25 bp, Homo sapien
aaccatcgcgcccagccacaaattt

SEQ ID NO: 2736152 - DNA, 25 bp, Homo sapien
catcgcgcccagccacaaattttaa

SEQ ID NO: 2736153 - DNA, 25 bp, Homo sapien
tgaaccatcgcgcccagccacaaat

SEQ ID NO: 2736154 - DNA, 25 bp, Homo sapien
gaatgggactatcagcactcagcag

SEQ ID NO: 2736155 - DNA, 25 bp, Homo sapien
gaatttcaacaccaagctacctgag

SEQ ID NO: 2736156 - DNA, 25 bp, Homo sapien
taagttgcaggtatgtgaagggccc

SEQ ID NO: 2736157 - DNA, 25 bp, Homo sapien
tcttcagttactgggcatggcaaag

SEQ ID NO: 2736158 - DNA, 25 bp, Homo sapien
ctttccattcccaagacattctagg

SEQ ID NO: 2736159 - DNA, 25 bp, Homo sapien
ttgtagttgaaggtaagttcagtgc

SEQ ID NO: 2736160 - DNA, 25 bp, Homo sapien
aagccactgcagttcggggctccac

SEQ ID NO: 2736161 - DNA, 25 bp, Homo sapien
ttgcaaacagtctttccattcccaa

SEQ ID NO: 2736162 - DNA, 25 bp, Homo sapien
gggacagacacagatataccaagaa

SEQ ID NO: 2736163 - DNA, 25 bp, Homo sapien
tgagatcaagacgagggaggtaact

SEQ ID NO: 2736164 - DNA, 25 bp, Homo sapien
cattattagttagaaaagtagcacc

SEQ ID NO: 2736165 - DNA, 25 bp, Homo sapien
tagcaccaattaaagtcagatggcc

SEQ ID NO: 2736166 - DNA, 25 bp, Homo sapien
tgctggtcgcttggtcagattgaga

SEQ ID NO: 2736167 - DNA, 25 bp, Homo sapien
cagattgagacagtctgcgtggtaa

SEQ ID NO: 2736168 - DNA, 25 bp, Homo sapien
acttttcttccgtggcaatgggttg

SEQ ID NO: 2736169 - DNA, 25 bp, Homo sapien
acagtctgcgtggtaaacttttggg

SEQ ID NO: 2736170 - DNA, 25 bp, Homo sapien
tgaaaagcatcccttctcgatgctg

SEQ ID NO: 2736171 - DNA, 25 bp, Homo sapien
gggtcatgctcagtacaagacagac

SEQ ID NO: 2736172 - DNA, 25 bp, Homo sapien
gtacaagacagacgcccatccagtt

SEQ ID NO: 2736173 - DNA, 25 bp, Homo sapien
caggttccagaggattgggcccaca

SEQ ID NO: 2736174 - DNA, 25 bp, Homo sapien
cggtactgggggaggcacatactca

SEQ ID NO: 2736175 - DNA, 25 bp, Homo sapien
ctggaggcagcggtactgggggagg

SEQ ID NO: 2736176 - DNA, 25 bp, Homo sapien
ggtactgggggaggcacatactcac

SEQ ID NO: 2736177 - DNA, 25 bp, Homo sapien
ggcagcggtactgggggaggcacat

SEQ ID NO: 2736178 - DNA, 25 bp, Homo sapien
gggcctggagtcagttctctcaaga

SEQ ID NO: 2736179 - DNA, 25 bp, Homo sapien
gacattttgggtgcctgagcagcca

SEQ ID NO: 2736180 - DNA, 25 bp, Homo sapien
cttttttggagagcgacagcatctg

SEQ ID NO: 2736181 - DNA, 25 bp, Homo sapien
ggtagcagtggcctctgacaagtcc

SEQ ID NO: 2736182 - DNA, 25 bp, Homo sapien
gattgggatttggtccctgacccag

SEQ ID NO: 2736183 - DNA, 25 bp, Homo sapien
ggattgggatttggtccctgaccca

SEQ ID NO: 2736184 - DNA, 25 bp, Homo sapien
tttgtcgcttagctggggtcttggt

SEQ ID NO: 2736185 - DNA, 25 bp, Homo sapien
tcactggagagggtttgtcgcttag

SEQ ID NO: 2736186 - DNA, 25 bp, Homo sapien
actggagagggtttgtcgcttagct

SEQ ID NO: 2736187 - DNA, 25 bp, Homo sapien
ggtttgtcgcttagctggggtcttg

SEQ ID NO: 2736188 - DNA, 25 bp, Homo sapien
ttgtcagtaggcctgtctgaagtct

SEQ ID NO: 2736189 - DNA, 25 bp, Homo sapien
tgggctggcagcacctatggattta

SEQ ID NO: 2736190 - DNA, 25 bp, Homo sapien
agtaatgagcagtctgtctggcggc

SEQ ID NO: 2736191 - DNA, 25 bp, Homo sapien
cagtgggaactgaggttttctccag

SEQ ID NO: 2736192 - DNA, 25 bp, Homo sapien
ctgatgaggtgaagctgcccgctcc

SEQ ID NO: 2736193 - DNA, 25 bp, Homo sapien
tctttagctacaagggtctggacca

SEQ ID NO: 2736194 - DNA, 25 bp, Homo sapien
tccttctggcgaggagttaggtcta

SEQ ID NO: 2736195 - DNA, 25 bp, Homo sapien
tttgactgagtattctggtccacag

SEQ ID NO: 2736196 - DNA, 25 bp, Homo sapien
gccatgaacttgactccaacactgg

SEQ ID NO: 2736197 - DNA, 25 bp, Homo sapien
ggccatgaacttgactccaacactg

SEQ ID NO: 2736198 - DNA, 25 bp, Homo sapien
ccatgaacttgactccaacactggc

SEQ ID NO: 2736199 - DNA, 25 bp, Homo sapien
ttctcaacagctctcggcatatgcc

SEQ ID NO: 2736200 - DNA, 25 bp, Homo sapien
tcaacagctctcggcatatgcccca

SEQ ID NO: 2736201 - DNA, 25 bp, Homo sapien
tctcaacagctctcggcatatgccc

SEQ ID NO: 2736202 - DNA, 25 bp, Homo sapien
aacagctctcggcatatgccccaga

SEQ ID NO: 2736203 - DNA, 25 bp, Homo sapien
gttggctcatataaaaaggccttgg

SEQ ID NO: 2736204 - DNA, 25 bp, Homo sapien
tctggcctgggtgagtgatttaaca

SEQ ID NO: 2736205 - DNA, 25 bp, Homo sapien
tgccaatgtctgtgtgctcccagca

SEQ ID NO: 2736206 - DNA, 25 bp, Homo sapien
gcaagtgcaggtagttgctggcctc

SEQ ID NO: 2736207 - DNA, 25 bp, Homo sapien
acatggttcacacaaccataagccc

SEQ ID NO: 2736208 - DNA, 25 bp, Homo sapien
ggcagcttgtttgttcatgtgacat

SEQ ID NO: 2736209 - DNA, 25 bp, Homo sapien
agtgttgggatatgaggaaagaata

SEQ ID NO: 2736210 - DNA, 25 bp, Homo sapien
taacagtgggaaagtgttcggggca

SEQ ID NO: 2736211 - DNA, 25 bp, Homo sapien
ggaaatcgctttgagagcccctata

SEQ ID NO: 2736212 - DNA, 25 bp, Homo sapien
cacgtgaatgctcaggaaatcgcca

SEQ ID NO: 2736213 - DNA, 25 bp, Homo sapien
tcgccactgatttgaaagaacacca

SEQ ID NO: 2736214 - DNA, 25 bp, Homo sapien
tataccttccaacctgaccagcgga

SEQ ID NO: 2736215 - DNA, 25 bp, Homo sapien
gttcctgaaagccttggaatccagg

SEQ ID NO: 2736216 - DNA, 25 bp, Homo sapien
tacttcctggtcaaaggttcctgaa

SEQ ID NO: 2736217 - DNA, 25 bp, Homo sapien
tctctcatcagtgactagcacccgg

SEQ ID NO: 2736218 - DNA, 25 bp, Homo sapien
agggatgaggcctgtatctctcatc

SEQ ID NO: 2736219 - DNA, 25 bp, Homo sapien
taggagtcatctcttagcctggacg

SEQ ID NO: 2736220 - DNA, 25 bp, Homo sapien
tagctcagagcttgccagagattcc

SEQ ID NO: 2736221 - DNA, 25 bp, Homo sapien
gaaatctacattcgcacagagcccg

SEQ ID NO: 2736222 - DNA, 25 bp, Homo sapien
gagacctctgtgagtgtgcgcgcat

SEQ ID NO: 2736223 - DNA, 25 bp, Homo sapien
tcagtgaaatgcagggataggcccc

SEQ ID NO: 2736224 - DNA, 25 bp, Homo sapien
gagttcaagtgtctcaacctcagag

SEQ ID NO: 2736225 - DNA, 25 bp, Homo sapien
aattcacagaggagattccgaggtc

SEQ ID NO: 2736226 - DNA, 25 bp, Homo sapien
gaatcctattgagagcgtgaaagcc

SEQ ID NO: 2736227 - DNA, 25 bp, Homo sapien
tggtgggcccaatagctcaaatttc

SEQ ID NO: 2736228 - DNA, 25 bp, Homo sapien
tagaattacaacctgggagtccggc

SEQ ID NO: 2736229 - DNA, 25 bp, Homo sapien
tatcacatgctgctactggtgggcc

SEQ ID NO: 2736230 - DNA, 25 bp, Homo sapien
gaacgaagcctccaatgaatggcgg

SEQ ID NO: 2736231 - DNA, 25 bp, Homo sapien
caggtagcacccacctcgatgagac

SEQ ID NO: 2736232 - DNA, 25 bp, Homo sapien
gaaacacttcttccgaggttgtgga

SEQ ID NO: 2736233 - DNA, 25 bp, Homo sapien
gcagctctagagaaggaaccacata

SEQ ID NO: 2736234 - DNA, 25 bp, Homo sapien
tgtcttgtccacgaaactttgctga

SEQ ID NO: 2736235 - DNA, 25 bp, Homo sapien
tcacttacagctgacaatctatggg

SEQ ID NO: 2736236 - DNA, 25 bp, Homo sapien
caatgatggaccttggctgatcccc

SEQ ID NO: 2736237 - DNA, 25 bp, Homo sapien
gatgtctatcgtcagcttgcctctt

SEQ ID NO: 2736238 - DNA, 25 bp, Homo sapien
cctctttgccaagacctaggaggcg

SEQ ID NO: 2736239 - DNA, 25 bp, Homo sapien
tcctcatgtcagcagagtggcgcct

SEQ ID NO: 2736240 - DNA, 25 bp, Homo sapien
catggaacggagacagcattgggct

SEQ ID NO: 2736241 - DNA, 25 bp, Homo sapien
gataaggctgatttggaccccaggc

SEQ ID NO: 2736242 - DNA, 25 bp, Homo sapien
tcctttctgggcttgggtagtcaaa

SEQ ID NO: 2736243 - DNA, 25 bp, Homo sapien
ggtccaggagactccctgaactgct

SEQ ID NO: 2736244 - DNA, 25 bp, Homo sapien
ggtatgaggctttagtcacttctct

SEQ ID NO: 2736245 - DNA, 25 bp, Homo sapien
ccaggagactccctgaactgctagc

SEQ ID NO: 2736246 - DNA, 25 bp, Homo sapien
tttatctaattctcaggtatgaggc

SEQ ID NO: 2736247 - DNA, 25 bp, Homo sapien
ggtaatctgcacctatggccccgat

SEQ ID NO: 2736248 - DNA, 25 bp, Homo sapien
tatgtggcaccaagagtgacctgct

SEQ ID NO: 2736249 - DNA, 25 bp, Homo sapien
tatcagaacgtgagtgcatccggag

SEQ ID NO: 2736250 - DNA, 25 bp, Homo sapien
agagaacagcccttgaccacttggt

SEQ ID NO: 2736251 - DNA, 25 bp, Homo sapien
tcttcgaaggataatcggcgcccgg

SEQ ID NO: 2736252 - DNA, 25 bp, Homo sapien
tgctgcgctgttgaggacgctgtcc

SEQ ID NO: 2736253 - DNA, 25 bp, Homo sapien
gttgggattcccagccagaacggag

SEQ ID NO: 2736254 - DNA, 25 bp, Homo sapien
caaggagtacgtgggcaagactagc

SEQ ID NO: 2736255 - DNA, 25 bp, Homo sapien
atgagttgtccggccgcgcgccact

SEQ ID NO: 2736256 - DNA, 25 bp, Homo sapien
cgccgccgccatgagttgtccggcc

SEQ ID NO: 2736257 - DNA, 25 bp, Homo sapien
ttccggcgcagccacacagaagcca

SEQ ID NO: 2736258 - DNA, 25 bp, Homo sapien
cgcgcgccacttccggcgcagccac

SEQ ID NO: 2736259 - DNA, 25 bp, Homo sapien
gcgaacacttggtcccaggaactcc

SEQ ID NO: 2736260 - DNA, 25 bp, Homo sapien
aggaactccggagcacgctctggcc

SEQ ID NO: 2736261 - DNA, 25 bp, Homo sapien
atagggattcgggtaccgctgccag

SEQ ID NO: 2736262 - DNA, 25 bp, Homo sapien
attcgggtaccgctgccagaaggcg

SEQ ID NO: 2736263 - DNA, 25 bp, Homo sapien
gaatggacctcatgatttattgcac

SEQ ID NO: 2736264 - DNA, 25 bp, Homo sapien
cttctagcaggaatggacctcatga

SEQ ID NO: 2736265 - DNA, 25 bp, Homo sapien
ttgcaccccaggaaagcgccacggg

SEQ ID NO: 2736266 - DNA, 25 bp, Homo sapien
aactcccatactgccgcctcttctt

SEQ ID NO: 2736267 - DNA, 25 bp, Homo sapien
ccctcagaagcttgcccctaagaga

SEQ ID NO: 2736268 - DNA, 25 bp, Homo sapien
tgaaggtgaccctcagaagcttgcc

SEQ ID NO: 2736269 - DNA, 25 bp, Homo sapien
agggtgaaggtgaccctcagaagct

SEQ ID NO: 2736270 - DNA, 25 bp, Homo sapien
aggtgaccctcagaagcttgcccct

SEQ ID NO: 2736271 - DNA, 25 bp, Homo sapien
gacgtacaccgagtgagcaacattg

SEQ ID NO: 2736272 - DNA, 25 bp, Homo sapien
agagtcctccaggacgtacaccgag

SEQ ID NO: 2736273 - DNA, 25 bp, Homo sapien
ggcaggaaatagtcgctcggcccag

SEQ ID NO: 2736274 - DNA, 25 bp, Homo sapien
tcggcccagcgtggcatcctgttgg

SEQ ID NO: 2736275 - DNA, 25 bp, Homo sapien
tagacgcatgcagtgttttagccgc

SEQ ID NO: 2736276 - DNA, 25 bp, Homo sapien
ataaaaacatttgcccggcgcggtg

SEQ ID NO: 2736277 - DNA, 25 bp, Homo sapien
gcatttagaacttaggacaactccg

SEQ ID NO: 2736278 - DNA, 25 bp, Homo sapien
gaggtcatactctacagctgtcaac

SEQ ID NO: 2736279 - DNA, 25 bp, Homo sapien
ggatttcagtccagccactgttgtc

SEQ ID NO: 2736280 - DNA, 25 bp, Homo sapien
acccaggcttcccggcggatttcag

SEQ ID NO: 2736281 - DNA, 25 bp, Homo sapien
ggacagctctggagacaccaaataa

SEQ ID NO: 2736282 - DNA, 25 bp, Homo sapien
ttcccggcggatttcagtccagcca

SEQ ID NO: 2736283 - DNA, 25 bp, Homo sapien
atgagaatgggaaggatactgagtt

SEQ ID NO: 2736284 - DNA, 25 bp, Homo sapien
gccccaacaccgaaagcactgggtc

SEQ ID NO: 2736285 - DNA, 25 bp, Homo sapien
cagcagccccaacaacactgctcac

SEQ ID NO: 2736286 - DNA, 25 bp, Homo sapien
aggatactgagttgcccactgaccc

SEQ ID NO: 2736287 - DNA, 25 bp, Homo sapien
cacgttgcttttgaaccgggcaaga

SEQ ID NO: 2736288 - DNA, 25 bp, Homo sapien
cttgcagcttagccaagatatattc

SEQ ID NO: 2736289 - DNA, 25 bp, Homo sapien
tgcttttgaaccgggcaagaccaaa

SEQ ID NO: 2736290 - DNA, 25 bp, Homo sapien
gtcttggtcacgttgcttttgaacc

SEQ ID NO: 2736291 - DNA, 25 bp, Homo sapien
caggtggctgcctttagaagatgcc

SEQ ID NO: 2736292 - DNA, 25 bp, Homo sapien
tttagaagatgcctgaaagaccaac

SEQ ID NO: 2736293 - DNA, 25 bp, Homo sapien
gatgcctgaaagaccaacctaattt

SEQ ID NO: 2736294 - DNA, 25 bp, Homo sapien
tgtcgcgaacggcaggtggctgcct

SEQ ID NO: 2736295 - DNA, 25 bp, Homo sapien
tctcaacaagtgttttggaaggggc

SEQ ID NO: 2736296 - DNA, 25 bp, Homo sapien
ctgtctcaacaagtgttttggaagg

SEQ ID NO: 2736297 - DNA, 25 bp, Homo sapien
tgtctcaacaagtgttttggaaggg

SEQ ID NO: 2736298 - DNA, 25 bp, Homo sapien
gtagctgccagtgccgtctcctttg

SEQ ID NO: 2736299 - DNA, 25 bp, Homo sapien
tctgtagctgccagtgccgtctcct

SEQ ID NO: 2736300 - DNA, 25 bp, Homo sapien
cttctctgtagctgccagtgccgtc

SEQ ID NO: 2736301 - DNA, 25 bp, Homo sapien
tctctgtagctgccagtgccgtctc

SEQ ID NO: 2736302 - DNA, 25 bp, Homo sapien
tggtggccgccttgctggcgaggtc

SEQ ID NO: 2736303 - DNA, 25 bp, Homo sapien
gcttcttggtggccgccttgctggc

SEQ ID NO: 2736304 - DNA, 25 bp, Homo sapien
ctgcttcttggtggccgccttgctg

SEQ ID NO: 2736305 - DNA, 25 bp, Homo sapien
ccgccttgctggcgaggtccttggc

SEQ ID NO: 2736306 - DNA, 25 bp, Homo sapien
gaggggctaagcctagctgtctggg

SEQ ID NO: 2736307 - DNA, 25 bp, Homo sapien
gacatgaatcatgtgcttggtgtac

SEQ ID NO: 2736308 - DNA, 25 bp, Homo sapien
ccgggcaagtcaccgcacctctgtg

SEQ ID NO: 2736309 - DNA, 25 bp, Homo sapien
acctctgtgcctcggtcctcagctg

SEQ ID NO: 2736310 - DNA, 25 bp, Homo sapien
ggtgtactgcagatgccaaactgca

SEQ ID NO: 2736311 - DNA, 25 bp, Homo sapien
agtggtgcaattaccagcgtgagca

SEQ ID NO: 2736312 - DNA, 25 bp, Homo sapien
aaagtggtgcaattaccagcgtgag

SEQ ID NO: 2736313 - DNA, 25 bp, Homo sapien
aagtggtgcaattaccagcgtgagc

SEQ ID NO: 2736314 - DNA, 25 bp, Homo sapien
cggcaggagcggaacaagcgcttct

SEQ ID NO: 2736315 - DNA, 25 bp, Homo sapien
gggccgagtgtgaccgtttgctaaa

SEQ ID NO: 2736316 - DNA, 25 bp, Homo sapien
agccgaggcttagggtctggcaccc

SEQ ID NO: 2736317 - DNA, 25 bp, Homo sapien
tgtgcgctctcctgggcatcgttgt

SEQ ID NO: 2736318 - DNA, 25 bp, Homo sapien
tgttgtgggaatgtgtgcctagatc

SEQ ID NO: 2736319 - DNA, 25 bp, Homo sapien
caagtgctgtaaacgagtgaccagg

SEQ ID NO: 2736320 - DNA, 25 bp, Homo sapien
ttgattcaaatgtctggaggagcca

SEQ ID NO: 2736321 - DNA, 25 bp, Homo sapien
caagagggcagtttctaaaaggagc

SEQ ID NO: 2736322 - DNA, 25 bp, Homo sapien
ccccgatcatgatgaatccagtctc

SEQ ID NO: 2736323 - DNA, 25 bp, Homo sapien
tattatccccgctccaatctcttct

SEQ ID NO: 2736324 - DNA, 25 bp, Homo sapien
tctcccccgatcatgatgaatccag

SEQ ID NO: 2736325 - DNA, 25 bp, Homo sapien
tcatgatgaatccagtctccctatt

SEQ ID NO: 2736326 - DNA, 25 bp, Homo sapien
tggccaaagacttgagcgcattcat

SEQ ID NO: 2736327 - DNA, 25 bp, Homo sapien
ctaggtaggggactggatcacctat

SEQ ID NO: 2736328 - DNA, 25 bp, Homo sapien
tgtggccaaagacttgagcgcattc

SEQ ID NO: 2736329 - DNA, 25 bp, Homo sapien
taggtaggggactggatcacctata

SEQ ID NO: 2736330 - DNA, 25 bp, Homo sapien
gaggcttccgtgtgcccagcaagga

SEQ ID NO: 2736331 - DNA, 25 bp, Homo sapien
gagctctaagttcatgcctgggctc

SEQ ID NO: 2736332 - DNA, 25 bp, Homo sapien
agaggcttccgtgtgcccagcaagg

SEQ ID NO: 2736333 - DNA, 25 bp, Homo sapien
tgaaacaccgctcactacctctttt

SEQ ID NO: 2736334 - DNA, 25 bp, Homo sapien
agtggagagagcctgactcggctcc

SEQ ID NO: 2736335 - DNA, 25 bp, Homo sapien
ggcagtggagagagcctgactcggc

SEQ ID NO: 2736336 - DNA, 25 bp, Homo sapien
ctgcgggccctcacatcctgaaaca

SEQ ID NO: 2736337 - DNA, 25 bp, Homo sapien
tgccgatcaggggtccccgccgcgg

SEQ ID NO: 2736338 - DNA, 25 bp, Homo sapien
ctgccgatcaggggtccccgccgcg

SEQ ID NO: 2736339 - DNA, 25 bp, Homo sapien
tgcgcccgttggggacgcccaggtg

SEQ ID NO: 2736340 - DNA, 25 bp, Homo sapien
atgcgcccgttggggacgcccaggt

SEQ ID NO: 2736341 - DNA, 25 bp, Homo sapien
catgcgcccgttggggacgcccagg

SEQ ID NO: 2736342 - DNA, 25 bp, Homo sapien
ctcaggctgagcgggatgtaggggc

SEQ ID NO: 2736343 - DNA, 25 bp, Homo sapien
gcaagagctgccactaacatgacct

SEQ ID NO: 2736344 - DNA, 25 bp, Homo sapien
ctggaggacaccgacccagcaagag

SEQ ID NO: 2736345 - DNA, 25 bp, Homo sapien
aatgctagttctggcaggaagcctc

SEQ ID NO: 2736346 - DNA, 25 bp, Homo sapien
ccgggctgcccaaacaatgctagtt

SEQ ID NO: 2736347 - DNA, 25 bp, Homo sapien
aaccccgagtcaggggtgataggcg

SEQ ID NO: 2736348 - DNA, 25 bp, Homo sapien
taaccccgagtcaggggtgataggc

SEQ ID NO: 2736349 - DNA, 25 bp, Homo sapien
ctaaccccgagtcaggggtgatagg

SEQ ID NO: 2736350 - DNA, 25 bp, Homo sapien
ggactcgcccccctccgctgggctg

SEQ ID NO: 2736351 - DNA, 25 bp, Homo sapien
gcctcggagacgcagtcatcgccct

SEQ ID NO: 2736352 - DNA, 25 bp, Homo sapien
gatccccgagaatcacccggactcg

SEQ ID NO: 2736353 - DNA, 25 bp, Homo sapien
tcccagcctcggagacgcagtcatc

SEQ ID NO: 2736354 - DNA, 25 bp, Homo sapien
atgctgagagagctgccgcggccct

SEQ ID NO: 2736355 - DNA, 25 bp, Homo sapien
tggatgctgagagagctgccgcggc

SEQ ID NO: 2736356 - DNA, 25 bp, Homo sapien
tgctgagagagctgccgcggccctc

SEQ ID NO: 2736357 - DNA, 25 bp, Homo sapien
gctgtggatgctgagagagctgccg

SEQ ID NO: 2736358 - DNA, 25 bp, Homo sapien
gcaacagccgctcgaaggacagggc

SEQ ID NO: 2736359 - DNA, 25 bp, Homo sapien
ggtcctgcaacagccgctcgaagga

SEQ ID NO: 2736360 - DNA, 25 bp, Homo sapien
ctgcaacagccgctcgaaggacagg

SEQ ID NO: 2736361 - DNA, 25 bp, Homo sapien
acagccgctcgaaggacagggccca

SEQ ID NO: 2736362 - DNA, 25 bp, Homo sapien
gttttccgcgctgaactccttcttc

SEQ ID NO: 2736363 - DNA, 25 bp, Homo sapien
atcgctggccgggatctgctggaag

SEQ ID NO: 2736364 - DNA, 25 bp, Homo sapien
tgctgggtatcgctggccgggatct

SEQ ID NO: 2736365 - DNA, 25 bp, Homo sapien
gaagcgctcgcaggccttccagaaa

SEQ ID NO: 2736366 - DNA, 25 bp, Homo sapien
gccaagccaggcctgacggtcgatg

SEQ ID NO: 2736367 - DNA, 25 bp, Homo sapien
ctcctggtagatgttgcgggcctcc

SEQ ID NO: 2736368 - DNA, 25 bp, Homo sapien
tcctggtagatgttgcgggcctcct

SEQ ID NO: 2736369 - DNA, 25 bp, Homo sapien
cctgacggtcgatgttcactgggct

SEQ ID NO: 2736370 - DNA, 25 bp, Homo sapien
tgcctgcacccaggccgggtccttg

SEQ ID NO: 2736371 - DNA, 25 bp, Homo sapien
caaacctagggctggatttcccaag

SEQ ID NO: 2736372 - DNA, 25 bp, Homo sapien
tgcggggcgaccccggaacaggtga

SEQ ID NO: 2736373 - DNA, 25 bp, Homo sapien
tagggctggatttcccaagccccgc

SEQ ID NO: 2736374 - DNA, 25 bp, Homo sapien
gggacttgacgaagcgcgcatagct

SEQ ID NO: 2736375 - DNA, 25 bp, Homo sapien
ttcctcgtggcgtcagggctgccga

SEQ ID NO: 2736376 - DNA, 25 bp, Homo sapien
ctagcaggcactcgcggtacagcgg

SEQ ID NO: 2736377 - DNA, 25 bp, Homo sapien
agagggcgtccctcggcttcggcta

SEQ ID NO: 2736378 - DNA, 25 bp, Homo sapien
atctgcacccggaggcgtcccctct

SEQ ID NO: 2736379 - DNA, 25 bp, Homo sapien
ggaggcgtcccctcttgcacgcggt

SEQ ID NO: 2736380 - DNA, 25 bp, Homo sapien
ccagcccgcatgcagaccgtgggca

SEQ ID NO: 2736381 - DNA, 25 bp, Homo sapien
gtgggtacaggggaggcgctggcac

SEQ ID NO: 2736382 - DNA, 25 bp, Homo sapien
ccaggaccctcaacgggtggcagct

SEQ ID NO: 2736383 - DNA, 25 bp, Homo sapien
ggaccctcaacgggtggcagctgcc

SEQ ID NO: 2736384 - DNA, 25 bp, Homo sapien
ggacttgcggagagggcggccccca

SEQ ID NO: 2736385 - DNA, 25 bp, Homo sapien
gacttgcggagagggcggcccccag

SEQ ID NO: 2736386 - DNA, 25 bp, Homo sapien
ccacatctctgttgctcgctcctgc

SEQ ID NO: 2736387 - DNA, 25 bp, Homo sapien
agactgtgggccacgtaggaggaag

SEQ ID NO: 2736388 - DNA, 25 bp, Homo sapien
actgtgggccacgtaggaggaaggg

SEQ ID NO: 2736389 - DNA, 25 bp, Homo sapien
atctctgttgctcgctcctgccctc

SEQ ID NO: 2736390 - DNA, 25 bp, Homo sapien
gatttccaaacgtctgaggtctagc

SEQ ID NO: 2736391 - DNA, 25 bp, Homo sapien
cggaagcctgttccccactggtggg

SEQ ID NO: 2736392 - DNA, 25 bp, Homo sapien
tgggagcgacaccaccgttggagat

SEQ ID NO: 2736393 - DNA, 25 bp, Homo sapien
cactggtgggccttgtttggagcca

SEQ ID NO: 2736394 - DNA, 25 bp, Homo sapien
ctctcggcgcaaggcggcgtttgca

SEQ ID NO: 2736395 - DNA, 25 bp, Homo sapien
aggcggcgtttgcagtcccgcccag

SEQ ID NO: 2736396 - DNA, 25 bp, Homo sapien
tgagggagccctgagactctcggcg

SEQ ID NO: 2736397 - DNA, 25 bp, Homo sapien
agactctcggcgcaaggcggcgttt

SEQ ID NO: 2736398 - DNA, 25 bp, Homo sapien
gatttgctgctgacgaaggctagga

SEQ ID NO: 2736399 - DNA, 25 bp, Homo sapien
agatttgctgctgacgaaggctagg

SEQ ID NO: 2736400 - DNA, 25 bp, Homo sapien
atttgctgctgacgaaggctaggaa

SEQ ID NO: 2736401 - DNA, 25 bp, Homo sapien
cagatttgctgctgacgaaggctag

SEQ ID NO: 2736402 - DNA, 25 bp, Homo sapien
gagagaggcctcgtttctcacagat

SEQ ID NO: 2736403 - DNA, 25 bp, Homo sapien
cagcatgtctcggatggtgaggcca

SEQ ID NO: 2736404 - DNA, 25 bp, Homo sapien
acacagcagtacttccctggccggc

SEQ ID NO: 2736405 - DNA, 25 bp, Homo sapien
tgtgccatcgggcaggtacacacag

SEQ ID NO: 2736406 - DNA, 25 bp, Homo sapien
ttagaacttgaattggggttggagc

SEQ ID NO: 2736407 - DNA, 25 bp, Homo sapien
tcaggatcaggaaggaggttagagt

SEQ ID NO: 2736408 - DNA, 25 bp, Homo sapien
attggggttggagccatgactgagc

SEQ ID NO: 2736409 - DNA, 25 bp, Homo sapien
gagtgaaagttggtgctgagggtgc

SEQ ID NO: 2736410 - DNA, 25 bp, Homo sapien
caccacaataggatgatggatgaag

SEQ ID NO: 2736411 - DNA, 25 bp, Homo sapien
taaggtcaccacaataggatgatgg

SEQ ID NO: 2736412 - DNA, 25 bp, Homo sapien
ggtcaccacaataggatgatggatg

SEQ ID NO: 2736413 - DNA, 25 bp, Homo sapien
ctccctaaggtcaccacaataggat

SEQ ID NO: 2736414 - DNA, 25 bp, Homo sapien
cgcacttcctgatccgccagcacgg

SEQ ID NO: 2736415 - DNA, 25 bp, Homo sapien
cttcctgatccgccagcacggtgca

SEQ ID NO: 2736416 - DNA, 25 bp, Homo sapien
tcctgatccgccagcacggtgcagt

SEQ ID NO: 2736417 - DNA, 25 bp, Homo sapien
cagcacggtgcagtcctgatccagg

SEQ ID NO: 2736418 - DNA, 25 bp, Homo sapien
ctgcgaggaaccctcgggcagcaga

SEQ ID NO: 2736419 - DNA, 25 bp, Homo sapien
tgcgaggaaccctcgggcagcagag

SEQ ID NO: 2736420 - DNA, 25 bp, Homo sapien
gcagcaccacctctagcgggctcaa

SEQ ID NO: 2736421 - DNA, 25 bp, Homo sapien
gggcttggctgagattcgtaccacg

SEQ ID NO: 2736422 - DNA, 25 bp, Homo sapien
ttggctgagattcgtaccacgcgct

SEQ ID NO: 2736423 - DNA, 25 bp, Homo sapien
ggctcaagccgtgcttctccagaat

SEQ ID NO: 2736424 - DNA, 25 bp, Homo sapien
ctgtggggagaggtcagcagcccgc

SEQ ID NO: 2736425 - DNA, 25 bp, Homo sapien
tggggagaggtcagcagcccgcggt

SEQ ID NO: 2736426 - DNA, 25 bp, Homo sapien
ggggagaggtcagcagcccgcggta

SEQ ID NO: 2736427 - DNA, 25 bp, Homo sapien
tgtggggagaggtcagcagcccgcg

SEQ ID NO: 2736428 - DNA, 25 bp, Homo sapien
gggccgccaccgagctcactagctt

SEQ ID NO: 2736429 - DNA, 25 bp, Homo sapien
gagctcactagcttccccagatcca

SEQ ID NO: 2736430 - DNA, 25 bp, Homo sapien
tctctgggccgccaccgagctcact

SEQ ID NO: 2736431 - DNA, 25 bp, Homo sapien
aaaccagtctctgggccgccaccga

SEQ ID NO: 2736432 - DNA, 25 bp, Homo sapien
tcacgggctttggagatcttcacac

SEQ ID NO: 2736433 - DNA, 25 bp, Homo sapien
agggagatttgtcacgggctttgga

SEQ ID NO: 2736434 - DNA, 25 bp, Homo sapien
tgtcacgggctttggagatcttcac

SEQ ID NO: 2736435 - DNA, 25 bp, Homo sapien
atttgtcacgggctttggagatctt

SEQ ID NO: 2736436 - DNA, 25 bp, Homo sapien
gaagaggccactcgcctttcgctca

SEQ ID NO: 2736437 - DNA, 25 bp, Homo sapien
gaatttggggtcagagccaaaatcg

SEQ ID NO: 2736438 - DNA, 25 bp, Homo sapien
tttggggtcagagccaaaatcggga

SEQ ID NO: 2736439 - DNA, 25 bp, Homo sapien
gtggaagaggccactcgcctttcgc

SEQ ID NO: 2736440 - DNA, 25 bp, Homo sapien
cagtggcactactgggcaccttcac

SEQ ID NO: 2736441 - DNA, 25 bp, Homo sapien
ttccagtggcactactgggcacctt

SEQ ID NO: 2736442 - DNA, 25 bp, Homo sapien
ccttcaccagagaactgggggacgc

SEQ ID NO: 2736443 - DNA, 25 bp, Homo sapien
tttccagtggcactactgggcacct

SEQ ID NO: 2736444 - DNA, 25 bp, Homo sapien
actgccctagtctttctgatcccca

SEQ ID NO: 2736445 - DNA, 25 bp, Homo sapien
agccccctgccttagctcaaggctc

SEQ ID NO: 2736446 - DNA, 25 bp, Homo sapien
tgatgccaccctgaatggtccccaa

SEQ ID NO: 2736447 - DNA, 25 bp, Homo sapien
tccttcctgttccacgcccagtggc

SEQ ID NO: 2736448 - DNA, 25 bp, Homo sapien
tatatgccagcccacgatagtccca

SEQ ID NO: 2736449 - DNA, 25 bp, Homo sapien
ccacgatagtcccactgccttactg

SEQ ID NO: 2736450 - DNA, 25 bp, Homo sapien
cgatagtcccactgccttactgtgg

SEQ ID NO: 2736451 - DNA, 25 bp, Homo sapien
ccagcagacctgcctatatgccagc

SEQ ID NO: 2736452 - DNA, 25 bp, Homo sapien
ccctctggtcgtgggccccgctgct

SEQ ID NO: 2736453 - DNA, 25 bp, Homo sapien
cgctgctctgcacccggttcagcag

SEQ ID NO: 2736454 - DNA, 25 bp, Homo sapien
tcagaaggcccctctggtcgtgggc

SEQ ID NO: 2736455 - DNA, 25 bp, Homo sapien
gcccctctggtcgtgggccccgctg

SEQ ID NO: 2736456 - DNA, 25 bp, Homo sapien
gggctgagtcggtggtggagttcaa

SEQ ID NO: 2736457 - DNA, 25 bp, Homo sapien
tcggtggtggagttcaaggatcccc

SEQ ID NO: 2736458 - DNA, 25 bp, Homo sapien
ggctgggctgctgatttggtctgtg

SEQ ID NO: 2736459 - DNA, 25 bp, Homo sapien
gagttcaaggatcccccgatgggct

SEQ ID NO: 2736460 - DNA, 25 bp, Homo sapien
gacagggcatgcagagcggacccat

SEQ ID NO: 2736461 - DNA, 25 bp, Homo sapien
gcttgttgagggacaaggcggtggc

SEQ ID NO: 2736462 - DNA, 25 bp, Homo sapien
gacactcatggcacagacagggcat

SEQ ID NO: 2736463 - DNA, 25 bp, Homo sapien
tcctgcgggcctgcccatggcagga

SEQ ID NO: 2736464 - DNA, 25 bp, Homo sapien
cccctgttgaagcttggcacaggct

SEQ ID NO: 2736465 - DNA, 25 bp, Homo sapien
tcaaggccttactcataccagcttc

SEQ ID NO: 2736466 - DNA, 25 bp, Homo sapien
tgtacagtatagtctatgtgggtgg

SEQ ID NO: 2736467 - DNA, 25 bp, Homo sapien
cacaaggaagacaactcatggcaga

SEQ ID NO: 2736468 - DNA, 25 bp, Homo sapien
agaatgatgtactcagatccacaga

SEQ ID NO: 2736469 - DNA, 25 bp, Homo sapien
cagaatgatgtactcagatccacag

SEQ ID NO: 2736470 - DNA, 25 bp, Homo sapien
gaatgatgtactcagatccacagag

SEQ ID NO: 2736471 - DNA, 25 bp, Homo sapien
aacaggaccagaatgatgtactcag

SEQ ID NO: 2736472 - DNA, 25 bp, Homo sapien
ccttcttagctagctgggacttcat

SEQ ID NO: 2736473 - DNA, 25 bp, Homo sapien
tctgctcagcagctcaatgaagcct

SEQ ID NO: 2736474 - DNA, 25 bp, Homo sapien
agcttctgctcagcagctcaatgaa

SEQ ID NO: 2736475 - DNA, 25 bp, Homo sapien
ttctgctcagcagctcaatgaagcc

SEQ ID NO: 2736476 - DNA, 25 bp, Homo sapien
cttagaattctgtgtttcagcttct

SEQ ID NO: 2736477 - DNA, 25 bp, Homo sapien
tgcaggtcagtgggtctcagcaacg

SEQ ID NO: 2736478 - DNA, 25 bp, Homo sapien
ctgggcacccactatgaggtctgca

SEQ ID NO: 2736479 - DNA, 25 bp, Homo sapien
cctgggcacccactatgaggtctgc

SEQ ID NO: 2736480 - DNA, 25 bp, Homo sapien
cccagcctctctccgtaggacaaca

SEQ ID NO: 2736481 - DNA, 25 bp, Homo sapien
gggaccccagcctctctccgtagga

SEQ ID NO: 2736482 - DNA, 25 bp, Homo sapien
accccagcctctctccgtaggacaa

SEQ ID NO: 2736483 - DNA, 25 bp, Homo sapien
gaccccagcctctctccgtaggaca

SEQ ID NO: 2736484 - DNA, 25 bp, Homo sapien
ctgggcacgtaggcaaaggccgtcc

SEQ ID NO: 2736485 - DNA, 25 bp, Homo sapien
cctcgcatcacatgccccccacgga

SEQ ID NO: 2736486 - DNA, 25 bp, Homo sapien
taggcaaaggccgtccctcgcatca

SEQ ID NO: 2736487 - DNA, 25 bp, Homo sapien
gcacgtaggcaaaggccgtccctcg

SEQ ID NO: 2736488 - DNA, 25 bp, Homo sapien
ggcagtggttcatggcgctccagga

SEQ ID NO: 2736489 - DNA, 25 bp, Homo sapien
gggcaggtgtgctcagcaagggcca

SEQ ID NO: 2736490 - DNA, 25 bp, Homo sapien
agtggttcatggcgctccaggacct

SEQ ID NO: 2736491 - DNA, 25 bp, Homo sapien
gcaggcagtggttcatggcgctcca

SEQ ID NO: 2736492 - DNA, 25 bp, Homo sapien
tggatgggggaagccatgagcatag

SEQ ID NO: 2736493 - DNA, 25 bp, Homo sapien
ggatgggggaagccatgagcatagt

SEQ ID NO: 2736494 - DNA, 25 bp, Homo sapien
cagggagcagacgaagaggtagagg

SEQ ID NO: 2736495 - DNA, 25 bp, Homo sapien
catcagtggcaccttgagcagcatg

SEQ ID NO: 2736496 - DNA, 25 bp, Homo sapien
gtccagggagcagacgaagaggtag

SEQ ID NO: 2736497 - DNA, 25 bp, Homo sapien
aggaaggtgagcatcagtggcacct

SEQ ID NO: 2736498 - DNA, 25 bp, Homo sapien
ccagcccggccaccgggttggacag

SEQ ID NO: 2736499 - DNA, 25 bp, Homo sapien
gacaggatggcgttatccttgaaga

SEQ ID NO: 2736500 - DNA, 25 bp, Homo sapien
aggagaccatgctgacgatgatgga

SEQ ID NO: 2736501 - DNA, 25 bp, Homo sapien
ccatgctgacgatgatggatgtgga

SEQ ID NO: 2736502 - DNA, 25 bp, Homo sapien
gggtgcccctccaagctcttcccca

SEQ ID NO: 2736503 - DNA, 25 bp, Homo sapien
ttcccagctcctggggtgcccctcc

SEQ ID NO: 2736504 - DNA, 25 bp, Homo sapien
tggggtcacgctccccatttgccac

SEQ ID NO: 2736505 - DNA, 25 bp, Homo sapien
gtcacgctccccatttgccaccctt

SEQ ID NO: 2736506 - DNA, 25 bp, Homo sapien
cggaagtcagtcctgtcccccgcct

SEQ ID NO: 2736507 - DNA, 25 bp, Homo sapien
ccacgatggtgttggtgacagaggt

SEQ ID NO: 2736508 - DNA, 25 bp, Homo sapien
ctgcatcagggccacgatggtgttg

SEQ ID NO: 2736509 - DNA, 25 bp, Homo sapien
tgttggtgacagaggtgccgatgtt

SEQ ID NO: 2736510 - DNA, 25 bp, Homo sapien
ggcagggaggccacattgcaaggca

SEQ ID NO: 2736511 - DNA, 25 bp, Homo sapien
gagccagtgcacagtcacgcctggg

SEQ ID NO: 2736512 - DNA, 25 bp, Homo sapien
gccacattgcaaggcaggctcgagc

SEQ ID NO: 2736513 - DNA, 25 bp, Homo sapien
aggcaggctcgagccagtgcacagt

SEQ ID NO: 2736514 - DNA, 25 bp, Homo sapien
ggaggccaccacaagtcgagtgatg

SEQ ID NO: 2736515 - DNA, 25 bp, Homo sapien
tggatgatgagcttcgtgaagggct

SEQ ID NO: 2736516 - DNA, 25 bp, Homo sapien
gatgatgagcttcgtgaagggctct

SEQ ID NO: 2736517 - DNA, 25 bp, Homo sapien
ccacaagtcgagtgatgtggtgcag

SEQ ID NO: 2736518 - DNA, 25 bp, Homo sapien
tgggcaagatgtgggcagggggagt

SEQ ID NO: 2736519 - DNA, 25 bp, Homo sapien
gagtgaaggaggctgggtcccttgt

SEQ ID NO: 2736520 - DNA, 25 bp, Homo sapien
caagatgtgggcagggggagtgaag

SEQ ID NO: 2736521 - DNA, 25 bp, Homo sapien
tgaaggaggctgggtcccttgttac

SEQ ID NO: 2736522 - DNA, 25 bp, Homo sapien
catcaccagtggcaatgctggttat

SEQ ID NO: 2736523 - DNA, 25 bp, Homo sapien
atctggatgagactgtggttcctca

SEQ ID NO: 2736524 - DNA, 25 bp, Homo sapien
tgctggttatcacagactcgtccag

SEQ ID NO: 2736525 - DNA, 25 bp, Homo sapien
agatctggatgagactgtggttcct

SEQ ID NO: 2736526 - DNA, 25 bp, Homo sapien
cacacctagaggaactgctgaagca

SEQ ID NO: 2736527 - DNA, 25 bp, Homo sapien
ccaagagtctgaagagggagtcctc

SEQ ID NO: 2736528 - DNA, 25 bp, Homo sapien
catggtaggataagctctggcacgt

SEQ ID NO: 2736529 - DNA, 25 bp, Homo sapien
aacccaagggttgcgctggatcagc

SEQ ID NO: 2736530 - DNA, 25 bp, Homo sapien
cataatgggtggtccatgagcatcc

SEQ ID NO: 2736531 - DNA, 25 bp, Homo sapien
tgaagtcagcgtaaaagctgcccgc

SEQ ID NO: 2736532 - DNA, 25 bp, Homo sapien
gtaaaggtccagtcacaagaagcag

SEQ ID NO: 2736533 - DNA, 25 bp, Homo sapien
tctgttcgcaccagggtaaaggtcc

SEQ ID NO: 2736534 - DNA, 25 bp, Homo sapien
ttttgcgaagatcaaagtgtgtgat

SEQ ID NO: 2736535 - DNA, 25 bp, Homo sapien
tccatggcttgctttttgcgaagat

SEQ ID NO: 2736536 - DNA, 25 bp, Homo sapien
ggcttgctttttgcgaagatcaaag

SEQ ID NO: 2736537 - DNA, 25 bp, Homo sapien
tgctttttgcgaagatcaaagtgtg

SEQ ID NO: 2736538 - DNA, 25 bp, Homo sapien
gaaggtgattcccaggacggtgtca

SEQ ID NO: 2736539 - DNA, 25 bp, Homo sapien
tcaattacatggacttgggcaagcc

SEQ ID NO: 2736540 - DNA, 25 bp, Homo sapien
gacaagtgtcagctgcagccgtaga

SEQ ID NO: 2736541 - DNA, 25 bp, Homo sapien
tccaagccgaggaaatgagaccctg

SEQ ID NO: 2736542 - DNA, 25 bp, Homo sapien
caattcaatgaaggtcagcagaagc

SEQ ID NO: 2736543 - DNA, 25 bp, Homo sapien
tgtggacaactcatttgtagccttg

SEQ ID NO: 2736544 - DNA, 25 bp, Homo sapien
tattggcgaccactttgagttatct

SEQ ID NO: 2736545 - DNA, 25 bp, Homo sapien
gaaagcaacaaactcccaatctgta

SEQ ID NO: 2736546 - DNA, 25 bp, Homo sapien
tggcatttccaagggtctggctgga

SEQ ID NO: 2736547 - DNA, 25 bp, Homo sapien
catttccaagggtctggctggagtt

SEQ ID NO: 2736548 - DNA, 25 bp, Homo sapien
ggtggcatttccaagggtctggctg

SEQ ID NO: 2736549 - DNA, 25 bp, Homo sapien
gtctggctggagttggcctctgctc

SEQ ID NO: 2736550 - DNA, 25 bp, Homo sapien
gagcagggagttgagcatcttgact

SEQ ID NO: 2736551 - DNA, 25 bp, Homo sapien
gtccggtaggccagtgtccacaaag

SEQ ID NO: 2736552 - DNA, 25 bp, Homo sapien
gcatcttgactaggaggatgaggca

SEQ ID NO: 2736553 - DNA, 25 bp, Homo sapien
cagccaggtccggtaggccagtgtc

SEQ ID NO: 2736554 - DNA, 25 bp, Homo sapien
tgatggccgaggtgaacacagaact

SEQ ID NO: 2736555 - DNA, 25 bp, Homo sapien
acgaaggtcatgctggcgcccacca

SEQ ID NO: 2736556 - DNA, 25 bp, Homo sapien
agaactgctctggaccacgaaggtc

SEQ ID NO: 2736557 - DNA, 25 bp, Homo sapien
caccatggcaaagtagcctgtgacc

SEQ ID NO: 2736558 - DNA, 25 bp, Homo sapien
gccgatgttggaacccagtgtgagc

SEQ ID NO: 2736559 - DNA, 25 bp, Homo sapien
tgtgagcgggtaggccctctcaatg

SEQ ID NO: 2736560 - DNA, 25 bp, Homo sapien
gaacccagtgtgagcgggtaggccc

SEQ ID NO: 2736561 - DNA, 25 bp, Homo sapien
agcgggtaggccctctcaatgctga

SEQ ID NO: 2736562 - DNA, 25 bp, Homo sapien
tgagcagtgtctccctattagatgc

SEQ ID NO: 2736563 - DNA, 25 bp, Homo sapien
tcattgagcatattaggtggccctt

SEQ ID NO: 2736564 - DNA, 25 bp, Homo sapien
ggtggcccttagtaggcagtcaaaa

SEQ ID NO: 2736565 - DNA, 25 bp, Homo sapien
tgttgtcacacctttgtcaggcccc

SEQ ID NO: 2736566 - DNA, 25 bp, Homo sapien
tcaccccgaggtggctatgctggct

SEQ ID NO: 2736567 - DNA, 25 bp, Homo sapien
ccagcagctaaaggattgatgtcag

SEQ ID NO: 2736568 - DNA, 25 bp, Homo sapien
taaataactactgccctgagctccc

SEQ ID NO: 2736569 - DNA, 25 bp, Homo sapien
gataggaaccccgatctggtctggg

SEQ ID NO: 2736570 - DNA, 25 bp, Homo sapien
caaggagatagaggacggcaaacca

SEQ ID NO: 2736571 - DNA, 25 bp, Homo sapien
ttcagggagtgcatccagcgaggca

SEQ ID NO: 2736572 - DNA, 25 bp, Homo sapien
catgtctgtaaccacttgggcaggt

SEQ ID NO: 2736573 - DNA, 25 bp, Homo sapien
gacattgatgagcaccacgaaggcc

SEQ ID NO: 2736574 - DNA, 25 bp, Homo sapien
ttgcggagctacagaaggagagact

SEQ ID NO: 2736575 - DNA, 25 bp, Homo sapien
gcaaattcagtaacgcaggcaccaa

SEQ ID NO: 2736576 - DNA, 25 bp, Homo sapien
tgtgtacacgtgcagaggacctgaa

SEQ ID NO: 2736577 - DNA, 25 bp, Homo sapien
tacaagcttctacacaggacaggtg

SEQ ID NO: 2736578 - DNA, 25 bp, Homo sapien
tgcaaaatctagatgccagcccagc

SEQ ID NO: 2736579 - DNA, 25 bp, Homo sapien
caaggtctatgagatcttaacgtgc

SEQ ID NO: 2736580 - DNA, 25 bp, Homo sapien
ccaagacagaaaagcgattcacagc

SEQ ID NO: 2736581 - DNA, 25 bp, Homo sapien
caagccctgtgcaaggagaagctgc

SEQ ID NO: 2736582 - DNA, 25 bp, Homo sapien
ttccctccttggtgattccgcagtg

SEQ ID NO: 2736583 - DNA, 25 bp, Homo sapien
catggaaggcaagattgtgtcccat

SEQ ID NO: 2736584 - DNA, 25 bp, Homo sapien
tccttggtgattccgcagtgagaga

SEQ ID NO: 2736585 - DNA, 25 bp, Homo sapien
ggcatggaaggcaagattgtgtccc

SEQ ID NO: 2736586 - DNA, 25 bp, Homo sapien
tctgttgcgccttcaggaggatgcg

SEQ ID NO: 2736587 - DNA, 25 bp, Homo sapien
ccaccagttcgagggtaggcacaac

SEQ ID NO: 2736588 - DNA, 25 bp, Homo sapien
cctacagaatgggtggcgctgacct

SEQ ID NO: 2736589 - DNA, 25 bp, Homo sapien
tgtcgccttacgttcagccggtgtg

SEQ ID NO: 2736590 - DNA, 25 bp, Homo sapien
gcagcgtgacgccttgttgaacctt

SEQ ID NO: 2736591 - DNA, 25 bp, Homo sapien
aacacacgctttctccctaaggtag

SEQ ID NO: 2736592 - DNA, 25 bp, Homo sapien
tgaaaaacgttgcactaagtagact

SEQ ID NO: 2736593 - DNA, 25 bp, Homo sapien
gctgatggcactatagcacacacct

SEQ ID NO: 2736594 - DNA, 25 bp, Homo sapien
tgtgggaagacaccatacaagggca

SEQ ID NO: 2736595 - DNA, 25 bp, Homo sapien
cacacccagccacttctgtcatatt

SEQ ID NO: 2736596 - DNA, 25 bp, Homo sapien
gaacagccctaactcaatgtgggaa

SEQ ID NO: 2736597 - DNA, 25 bp, Homo sapien
cacagaacagccctaactcaatgtg

SEQ ID NO: 2736598 - DNA, 25 bp, Homo sapien
gattgcaagccaaatgtcagcgagg

SEQ ID NO: 2736599 - DNA, 25 bp, Homo sapien
ttctccctacatgggcttctctgca

SEQ ID NO: 2736600 - DNA, 25 bp, Homo sapien
tgcatgtgtgtcctcacaacacagt

SEQ ID NO: 2736601 - DNA, 25 bp, Homo sapien
tccaattggcactggctgtcagcag

SEQ ID NO: 2736602 - DNA, 25 bp, Homo sapien
ttgaaccaatcgctgaagacagagg

SEQ ID NO: 2736603 - DNA, 25 bp, Homo sapien
aatgagggccatttctagaagcagg

SEQ ID NO: 2736604 - DNA, 25 bp, Homo sapien
gaaatgatagacatccatcacaggc

SEQ ID NO: 2736605 - DNA, 25 bp, Homo sapien
gccaggtctagatcaaatgcccact

SEQ ID NO: 2736606 - DNA, 25 bp, Homo sapien
cttcttcctggtccgtggatctctg

SEQ ID NO: 2736607 - DNA, 25 bp, Homo sapien
tcttcctggtccgtggatctctgct

SEQ ID NO: 2736608 - DNA, 25 bp, Homo sapien
cttcctggtccgtggatctctgctt

SEQ ID NO: 2736609 - DNA, 25 bp, Homo sapien
gcttcttcctggtccgtggatctct

SEQ ID NO: 2736610 - DNA, 25 bp, Homo sapien
tcatttgaccaatcaccgggcagaa

SEQ ID NO: 2736611 - DNA, 25 bp, Homo sapien
tttctaggctttcgtaggataccaa

SEQ ID NO: 2736612 - DNA, 25 bp, Homo sapien
tcagcccctaggttcgaatttctag

SEQ ID NO: 2736613 - DNA, 25 bp, Homo sapien
gtcttcccattagtcttcctcttca

SEQ ID NO: 2736614 - DNA, 25 bp, Homo sapien
ctcggctcggctcgcagtgaccgcg

SEQ ID NO: 2736615 - DNA, 25 bp, Homo sapien
ctcggctcgcagtgaccgcgccgcg

SEQ ID NO: 2736616 - DNA, 25 bp, Homo sapien
ccggatggcgatcggcgcggctcgg

SEQ ID NO: 2736617 - DNA, 25 bp, Homo sapien
gggatcgcgcgcgagtgccgaggcc

SEQ ID NO: 2736618 - DNA, 25 bp, Homo sapien
cgtgttcgctacgatgttctcgagc

SEQ ID NO: 2736619 - DNA, 25 bp, Homo sapien
ttcccgggccttgagtagcaccgtg

SEQ ID NO: 2736620 - DNA, 25 bp, Homo sapien
gggccttgagtagcaccgtgttcgc

SEQ ID NO: 2736621 - DNA, 25 bp, Homo sapien
tagcaccgtgttcgctacgatgttc

SEQ ID NO: 2736622 - DNA, 25 bp, Homo sapien
gggatccgacggctgggtagccctg

SEQ ID NO: 2736623 - DNA, 25 bp, Homo sapien
gatccgacggctgggtagccctgcg

SEQ ID NO: 2736624 - DNA, 25 bp, Homo sapien
ctgggtagccctgcggagctcagac

SEQ ID NO: 2736625 - DNA, 25 bp, Homo sapien
agccctgcggagctcagacgcagcg

SEQ ID NO: 2736626 - DNA, 25 bp, Homo sapien
ccggaaaggctcgtgtctgggcggg

SEQ ID NO: 2736627 - DNA, 25 bp, Homo sapien
tgggcggggtgtaaggcgcagggcc

SEQ ID NO: 2736628 - DNA, 25 bp, Homo sapien
agacgacgggccggaaaggctcgtg

SEQ ID NO: 2736629 - DNA, 25 bp, Homo sapien
gacgggccggaaaggctcgtgtctg

SEQ ID NO: 2736630 - DNA, 25 bp, Homo sapien
gctacgcagagggtccgtttattca

SEQ ID NO: 2736631 - DNA, 25 bp, Homo sapien
caagtggcagtcctataagtagcat

SEQ ID NO: 2736632 - DNA, 25 bp, Homo sapien
tacctatcgccaactttgcgcggga

SEQ ID NO: 2736633 - DNA, 25 bp, Homo sapien
tggccaggagtttccccaagtcagg

SEQ ID NO: 2736634 - DNA, 25 bp, Homo sapien
tcagtgcggtccacggcctctaggg

SEQ ID NO: 2736635 - DNA, 25 bp, Homo sapien
ttccaggacacacgtgcttctcctg

SEQ ID NO: 2736636 - DNA, 25 bp, Homo sapien
tgggagcaataggacactgggtctc

SEQ ID NO: 2736637 - DNA, 25 bp, Homo sapien
gacactgggtctcgagtcccactgc

SEQ ID NO: 2736638 - DNA, 25 bp, Homo sapien
tgagccgcagctcttcgcactggct

SEQ ID NO: 2736639 - DNA, 25 bp, Homo sapien
agcatctgccgccatttcttgcttt

SEQ ID NO: 2736640 - DNA, 25 bp, Homo sapien
ggaactggagcatctgccgccattt

SEQ ID NO: 2736641 - DNA, 25 bp, Homo sapien
gcttttgcctttgcgatttccaccg

SEQ ID NO: 2736642 - DNA, 25 bp, Homo sapien
cagtgtggtagccacaatcttcttc

SEQ ID NO: 2736643 - DNA, 25 bp, Homo sapien
gacttgcgtatgtcacggtactggg

SEQ ID NO: 2736644 - DNA, 25 bp, Homo sapien
gtgcggtccgtgaggttccggccca

SEQ ID NO: 2736645 - DNA, 25 bp, Homo sapien
acacagccgggagtctggctccaga

SEQ ID NO: 2736646 - DNA, 25 bp, Homo sapien
cccatccaggaaggcgacgcagcgg

SEQ ID NO: 2736647 - DNA, 25 bp, Homo sapien
tcatccggggtcacttcatactcgg

SEQ ID NO: 2736648 - DNA, 25 bp, Homo sapien
acatgccttccgcttgtcatccggg

SEQ ID NO: 2736649 - DNA, 25 bp, Homo sapien
ttctgcgttagctgccgcccacatg

SEQ ID NO: 2736650 - DNA, 25 bp, Homo sapien
tggctcagaaaattctgcgttagct

SEQ ID NO: 2736651 - DNA, 25 bp, Homo sapien
tccagccgctgggtgcagttcgtca

SEQ ID NO: 2736652 - DNA, 25 bp, Homo sapien
cagccgctgggtgcagttcgtcacc

SEQ ID NO: 2736653 - DNA, 25 bp, Homo sapien
cgctgggtgcagttcgtcaccagct

SEQ ID NO: 2736654 - DNA, 25 bp, Homo sapien
gggtgcagttcgtcaccagctgccg

SEQ ID NO: 2736655 - DNA, 25 bp, Homo sapien
caggaaacggttgaagtagatgctg

SEQ ID NO: 2736656 - DNA, 25 bp, Homo sapien
tgcaggaaacggttgaagtagatgc

SEQ ID NO: 2736657 - DNA, 25 bp, Homo sapien
aggaaacggttgaagtagatgctgt

SEQ ID NO: 2736658 - DNA, 25 bp, Homo sapien
gcaggaaacggttgaagtagatgct

SEQ ID NO: 2736659 - DNA, 25 bp, Homo sapien
ccaggactcggtattgcctgaaggt

SEQ ID NO: 2736660 - DNA, 25 bp, Homo sapien
ttgcccaggactcggtattgcctga

SEQ ID NO: 2736661 - DNA, 25 bp, Homo sapien
ggactcggtattgcctgaaggtgtt

SEQ ID NO: 2736662 - DNA, 25 bp, Homo sapien
cctttgcccaggactcggtattgcc

SEQ ID NO: 2736663 - DNA, 25 bp, Homo sapien
tgtggcccgcacctggcaggcgcac

SEQ ID NO: 2736664 - DNA, 25 bp, Homo sapien
cctgtggcccgcacctggcaggcgc

SEQ ID NO: 2736665 - DNA, 25 bp, Homo sapien
tggcccgcacctggcaggcgcacac

SEQ ID NO: 2736666 - DNA, 25 bp, Homo sapien
tgcttctcgttcagcgccatggcct

SEQ ID NO: 2736667 - DNA, 25 bp, Homo sapien
ccacagcagatctcggcggcgtaga

SEQ ID NO: 2736668 - DNA, 25 bp, Homo sapien
cggcgtagaagacggcccgcgcttc

SEQ ID NO: 2736669 - DNA, 25 bp, Homo sapien
atctcggcggcgtagaagacggccc

SEQ ID NO: 2736670 - DNA, 25 bp, Homo sapien
tccaggccacagcagatctcggcgg

SEQ ID NO: 2736671 - DNA, 25 bp, Homo sapien
ccagcaagatgttctcgggcttcag

SEQ ID NO: 2736672 - DNA, 25 bp, Homo sapien
gcaagatgttctcgggcttcaggtc

SEQ ID NO: 2736673 - DNA, 25 bp, Homo sapien
cgtggtcatccagcaagatgttctc

SEQ ID NO: 2736674 - DNA, 25 bp, Homo sapien
caagatgttctcgggcttcaggtcc

SEQ ID NO: 2736675 - DNA, 25 bp, Homo sapien
gtcccaggtcagagatgcggatgtg

SEQ ID NO: 2736676 - DNA, 25 bp, Homo sapien
cccaggtcagagatgcggatgtggc

SEQ ID NO: 2736677 - DNA, 25 bp, Homo sapien
tcccaggtcagagatgcggatgtgg

SEQ ID NO: 2736678 - DNA, 25 bp, Homo sapien
cgatcatctcgtacaggaggcagcc

SEQ ID NO: 2736679 - DNA, 25 bp, Homo sapien
gctgaacgtgtaccgttcatttttc

SEQ ID NO: 2736680 - DNA, 25 bp, Homo sapien
ctgtgagcaaagtgagcgggcctgc

SEQ ID NO: 2736681 - DNA, 25 bp, Homo sapien
gcctgcgatcatctcgtacaggagg

SEQ ID NO: 2736682 - DNA, 25 bp, Homo sapien
gggagggaaaggtgcatccacccca

SEQ ID NO: 2736683 - DNA, 25 bp, Homo sapien
gcaggggtgagtcggccaggcaggc

SEQ ID NO: 2736684 - DNA, 25 bp, Homo sapien
gccaggcttctgtgagctgccgtac

SEQ ID NO: 2736685 - DNA, 25 bp, Homo sapien
aaaggtgcatccaccccagccctgg

SEQ ID NO: 2736686 - DNA, 25 bp, Homo sapien
tcagcttcttaaagagggggtgctc

SEQ ID NO: 2736687 - DNA, 25 bp, Homo sapien
ccaggcgttcggcagggtccttgca

SEQ ID NO: 2736688 - DNA, 25 bp, Homo sapien
ttgaagggcggctccagcatgccag

SEQ ID NO: 2736689 - DNA, 25 bp, Homo sapien
gctcccagccgcttgaagttcagct

SEQ ID NO: 2736690 - DNA, 25 bp, Homo sapien
tgtggctaagccactagattgtttt

SEQ ID NO: 2736691 - DNA, 25 bp, Homo sapien
aagccactagattgttttttctgcc

SEQ ID NO: 2736692 - DNA, 25 bp, Homo sapien
agcatcctggctgatactacaagag

SEQ ID NO: 2736693 - DNA, 25 bp, Homo sapien
ctgatactacaagagcccctgagcc

SEQ ID NO: 2736694 - DNA, 25 bp, Homo sapien
ggaccagtcctcatagacatgggaa

SEQ ID NO: 2736695 - DNA, 25 bp, Homo sapien
cattgacagctatcaacctggcctg

SEQ ID NO: 2736696 - DNA, 25 bp, Homo sapien
taaatgggcactcagctatttgctg

SEQ ID NO: 2736697 - DNA, 25 bp, Homo sapien
ccagtgggcctcattatctccaggg

SEQ ID NO: 2736698 - DNA, 25 bp, Homo sapien
cccaagtaggtgagattaccggcat

SEQ ID NO: 2736699 - DNA, 25 bp, Homo sapien
caagtaggtgagattaccggcatgc

SEQ ID NO: 2736700 - DNA, 25 bp, Homo sapien
ccaagtaggtgagattaccggcatg

SEQ ID NO: 2736701 - DNA, 25 bp, Homo sapien
aagtaggtgagattaccggcatgcg

SEQ ID NO: 2736702 - DNA, 25 bp, Homo sapien
gcccttgaccgtagagaactgttca

SEQ ID NO: 2736703 - DNA, 25 bp, Homo sapien
aagtcctggtcggtaggctccagct

SEQ ID NO: 2736704 - DNA, 25 bp, Homo sapien
caatgtccagaacatccttgcagta

SEQ ID NO: 2736705 - DNA, 25 bp, Homo sapien
gaactgttcaatgtccagaacatcc

SEQ ID NO: 2736706 - DNA, 25 bp, Homo sapien
tctgccaggggatgggcacactgcc

SEQ ID NO: 2736707 - DNA, 25 bp, Homo sapien
actgcctgtggcaaacttctggtag

SEQ ID NO: 2736708 - DNA, 25 bp, Homo sapien
ggcacactgcctgtggcaaacttct

SEQ ID NO: 2736709 - DNA, 25 bp, Homo sapien
cacactgcctgtggcaaacttctgg

SEQ ID NO: 2736710 - DNA, 25 bp, Homo sapien
ctgaggagcaggcggctgtgacagc

SEQ ID NO: 2736711 - DNA, 25 bp, Homo sapien
agcaggcggctgtgacagctgtccc

SEQ ID NO: 2736712 - DNA, 25 bp, Homo sapien
caggcggctgtgacagctgtcccca

SEQ ID NO: 2736713 - DNA, 25 bp, Homo sapien
ggagcaggcggctgtgacagctgtc

SEQ ID NO: 2736714 - DNA, 25 bp, Homo sapien
gctcttggaagcactcggtctccac

SEQ ID NO: 2736715 - DNA, 25 bp, Homo sapien
tctgggggaactgagccatccagcc

SEQ ID NO: 2736716 - DNA, 25 bp, Homo sapien
ctgcagcagtccctttttaggaggt

SEQ ID NO: 2736717 - DNA, 25 bp, Homo sapien
cagcccaaagacattcagctcttgg

SEQ ID NO: 2736718 - DNA, 25 bp, Homo sapien
agacaagcgaagcaaagctggcagc

SEQ ID NO: 2736719 - DNA, 25 bp, Homo sapien
aggcagcaaggccaacccacgggga

SEQ ID NO: 2736720 - DNA, 25 bp, Homo sapien
gggcgggcaccagacttctttctcc

SEQ ID NO: 2736721 - DNA, 25 bp, Homo sapien
ccatggaagggctgcccgtggctcc

SEQ ID NO: 2736722 - DNA, 25 bp, Homo sapien
gcagaggctgccggcaacagactga

SEQ ID NO: 2736723 - DNA, 25 bp, Homo sapien
ggctgggtagatcccacggtctgcc

SEQ ID NO: 2736724 - DNA, 25 bp, Homo sapien
caacagactgaagtaagggggctgg

SEQ ID NO: 2736725 - DNA, 25 bp, Homo sapien
tgggtgggcgtcattgcagaggctg

SEQ ID NO: 2736726 - DNA, 25 bp, Homo sapien
ctagaggcgggtggggagctcttcc

SEQ ID NO: 2736727 - DNA, 25 bp, Homo sapien
cctcgctgtcgctgcagtttccaca

SEQ ID NO: 2736728 - DNA, 25 bp, Homo sapien
tgtcgctgcagtttccacagcaatc

SEQ ID NO: 2736729 - DNA, 25 bp, Homo sapien
ctcttcctcgctgtcgctgcagttt

SEQ ID NO: 2736730 - DNA, 25 bp, Homo sapien
aactgctggtgggggcctcgggctg

SEQ ID NO: 2736731 - DNA, 25 bp, Homo sapien
ctgctggtgggggcctcgggctggg

SEQ ID NO: 2736732 - DNA, 25 bp, Homo sapien
ctaccgccaactgctggtgggggcc

SEQ ID NO: 2736733 - DNA, 25 bp, Homo sapien
actgctggtgggggcctcgggctgg

SEQ ID NO: 2736734 - DNA, 25 bp, Homo sapien
ctgtaaacggcgctcggagtagctg

SEQ ID NO: 2736735 - DNA, 25 bp, Homo sapien
ggaggcacgagtcttactcagaggc

SEQ ID NO: 2736736 - DNA, 25 bp, Homo sapien
ccagaggagccttgagtttggcagt

SEQ ID NO: 2736737 - DNA, 25 bp, Homo sapien
cgggaattaagaatgctctggtcgc

SEQ ID NO: 2736738 - DNA, 25 bp, Homo sapien
taaatacagaaagccccgagctcca

SEQ ID NO: 2736739 - DNA, 25 bp, Homo sapien
agaggcagacctatctgggccggcc

SEQ ID NO: 2736740 - DNA, 25 bp, Homo sapien
ctgggcttgggcgtttctgaaagag

SEQ ID NO: 2736741 - DNA, 25 bp, Homo sapien
ctattgttatgaggggagtccggaa

SEQ ID NO: 2736742 - DNA, 25 bp, Homo sapien
ggcagaggcagacctatctgggccg

SEQ ID NO: 2736743 - DNA, 25 bp, Homo sapien
acagcctcgccctatccccttcacc

SEQ ID NO: 2736744 - DNA, 25 bp, Homo sapien
tgtaatcccatgctaccctaacact

SEQ ID NO: 2736745 - DNA, 25 bp, Homo sapien
catgctaccctaacactgggaccag

SEQ ID NO: 2736746 - DNA, 25 bp, Homo sapien
caggatggccatcacagtctgggaa

SEQ ID NO: 2736747 - DNA, 25 bp, Homo sapien
gtcgtgcacgctggatgcacagcca

SEQ ID NO: 2736748 - DNA, 25 bp, Homo sapien
agctcagctcggagagcacacacat

SEQ ID NO: 2736749 - DNA, 25 bp, Homo sapien
cagctgaggtcgagaacccggacgc

SEQ ID NO: 2736750 - DNA, 25 bp, Homo sapien
caggtccccgtcacatcctgacagg

SEQ ID NO: 2736751 - DNA, 25 bp, Homo sapien
gaggcacacgccggccgacccggtc

SEQ ID NO: 2736752 - DNA, 25 bp, Homo sapien
cacgccggccgacccggtccacact

SEQ ID NO: 2736753 - DNA, 25 bp, Homo sapien
cggccgacccggtccacactccagg

SEQ ID NO: 2736754 - DNA, 25 bp, Homo sapien
ccgacccggtccacactccaggctg

SEQ ID NO: 2736755 - DNA, 25 bp, Homo sapien
ggggagcagacagtggcagcgaaag

SEQ ID NO: 2736756 - DNA, 25 bp, Homo sapien
tcgttctcctggctcggggcgagca

SEQ ID NO: 2736757 - DNA, 25 bp, Homo sapien
aagcggctccgagcgctgggctgga

SEQ ID NO: 2736758 - DNA, 25 bp, Homo sapien
gcagcgcgggcccagcggacagagc

SEQ ID NO: 2736759 - DNA, 25 bp, Homo sapien
ccggtttggcacgtgcctcggccgt

SEQ ID NO: 2736760 - DNA, 25 bp, Homo sapien
gccatgtccagggccggcgcgatta

SEQ ID NO: 2736761 - DNA, 25 bp, Homo sapien
gggatgcaagcttcgctcctctacc

SEQ ID NO: 2736762 - DNA, 25 bp, Homo sapien
cagggccggcgcgattaggtggtgg

SEQ ID NO: 2736763 - DNA, 25 bp, Homo sapien
aacccaaggacggttgtggtcgctg

SEQ ID NO: 2736764 - DNA, 25 bp, Homo sapien
gacggttgtggtcgctgggatcctg

SEQ ID NO: 2736765 - DNA, 25 bp, Homo sapien
tgggatcctggatctgaagcccgcg

SEQ ID NO: 2736766 - DNA, 25 bp, Homo sapien
tcctggatctgaagcccgcggtcgg

SEQ ID NO: 2736767 - DNA, 25 bp, Homo sapien
aaggcctccaatgccccagatgcca

SEQ ID NO: 2736768 - DNA, 25 bp, Homo sapien
atcttatgccaaggcctccaatgcc

SEQ ID NO: 2736769 - DNA, 25 bp, Homo sapien
ggcatcttatgccaaggcctccaat

SEQ ID NO: 2736770 - DNA, 25 bp, Homo sapien
ctaagggcatcttatgccaaggcct

SEQ ID NO: 2736771 - DNA, 25 bp, Homo sapien
gataatggatgcagagcactcaaca

SEQ ID NO: 2736772 - DNA, 25 bp, Homo sapien
aattaggagataatggatgcagagc

SEQ ID NO: 2736773 - DNA, 25 bp, Homo sapien
aagggaatgaaaggcacccgtgagt

SEQ ID NO: 2736774 - DNA, 25 bp, Homo sapien
gcacccgtgagtaattccccaggcg

SEQ ID NO: 2736775 - DNA, 25 bp, Homo sapien
caatgcctggagctagactgagcac

SEQ ID NO: 2736776 - DNA, 25 bp, Homo sapien
tgaagcccgggtgatgacaaagtcc

SEQ ID NO: 2736777 - DNA, 25 bp, Homo sapien
tcttcagcagtaggaccagggtgcc

SEQ ID NO: 2736778 - DNA, 25 bp, Homo sapien
cagttcataagcaagtggagacccc

SEQ ID NO: 2736779 - DNA, 25 bp, Homo sapien
gtgcttttgaaccatatcgctctgc

SEQ ID NO: 2736780 - DNA, 25 bp, Homo sapien
gatgaagctaatccatgcaaagggt

SEQ ID NO: 2736781 - DNA, 25 bp, Homo sapien
tctgcatgttttctcgggccacaca

SEQ ID NO: 2736782 - DNA, 25 bp, Homo sapien
tgcaaagggtgtggaggtaccaaca

SEQ ID NO: 2736783 - DNA, 25 bp, Homo sapien
cactcactccagatgggcatctcta

SEQ ID NO: 2736784 - DNA, 25 bp, Homo sapien
tgcactcactccagatgggcatctc

SEQ ID NO: 2736785 - DNA, 25 bp, Homo sapien
gcactcactccagatgggcatctct

SEQ ID NO: 2736786 - DNA, 25 bp, Homo sapien
ctcactccagatgggcatctctagt

SEQ ID NO: 2736787 - DNA, 25 bp, Homo sapien
tcctcagacgcttcactggacactg

SEQ ID NO: 2736788 - DNA, 25 bp, Homo sapien
gcaggtctcaagtcgtgcgcgcgcc

SEQ ID NO: 2736789 - DNA, 25 bp, Homo sapien
gctgcccgtggcaggtctcaagtcg

SEQ ID NO: 2736790 - DNA, 25 bp, Homo sapien
ggcggcgggtcctcagacgcttcac

SEQ ID NO: 2736791 - DNA, 25 bp, Homo sapien
agagcaggacgatgagaccccagat

SEQ ID NO: 2736792 - DNA, 25 bp, Homo sapien
gcagagcaggacgatgagaccccag

SEQ ID NO: 2736793 - DNA, 25 bp, Homo sapien
gagcaggacgatgagaccccagatg

SEQ ID NO: 2736794 - DNA, 25 bp, Homo sapien
cagcagagcaggacgatgagacccc

SEQ ID NO: 2736795 - DNA, 25 bp, Homo sapien
ctctagggcgcgcaggttctgctcg

SEQ ID NO: 2736796 - DNA, 25 bp, Homo sapien
ggccagactgccctcgagttcgagg

SEQ ID NO: 2736797 - DNA, 25 bp, Homo sapien
ggcgccgtttgaggcggcggcgcag

SEQ ID NO: 2736798 - DNA, 25 bp, Homo sapien
gcaggttctgctcgcgcagtcgctc

SEQ ID NO: 2736799 - DNA, 25 bp, Homo sapien
gtgagccggcgcctccaggcggcta

SEQ ID NO: 2736800 - DNA, 25 bp, Homo sapien
tgagccggcgcctccaggcggctac

SEQ ID NO: 2736801 - DNA, 25 bp, Homo sapien
tgcacgtgcacgtgcggatgcgagt

SEQ ID NO: 2736802 - DNA, 25 bp, Homo sapien
cgtgcacgtgcggatgcgagtgcgc

SEQ ID NO: 2736803 - DNA, 25 bp, Homo sapien
gggcccgtggtgcagcagcgggtgc

SEQ ID NO: 2736804 - DNA, 25 bp, Homo sapien
ggcaccgacaggtgcgtaggcggcg

SEQ ID NO: 2736805 - DNA, 25 bp, Homo sapien
cttggcgcgggtagctccagggccg

SEQ ID NO: 2736806 - DNA, 25 bp, Homo sapien
tccagggccgtggcggcaccgacag

SEQ ID NO: 2736807 - DNA, 25 bp, Homo sapien
tgcgggagcgcgtggtggtgcgggt

SEQ ID NO: 2736808 - DNA, 25 bp, Homo sapien
ccagcctctcgcagaggccccggcc

SEQ ID NO: 2736809 - DNA, 25 bp, Homo sapien
cagccctagcccgaacccgagcccg

SEQ ID NO: 2736810 - DNA, 25 bp, Homo sapien
gtgaggccgccggttcccagcctct

SEQ ID NO: 2736811 - DNA, 25 bp, Homo sapien
tccgtgagcacctcgctatagggcg

SEQ ID NO: 2736812 - DNA, 25 bp, Homo sapien
gcaccgcctcttcgtaacacggtgg

SEQ ID NO: 2736813 - DNA, 25 bp, Homo sapien
aacacggtggtttggacatgtccga

SEQ ID NO: 2736814 - DNA, 25 bp, Homo sapien
ctcaggaagggcgtgacgatcttgc

SEQ ID NO: 2736815 - DNA, 25 bp, Homo sapien
ctatacggctgtagtcctcccgaac

SEQ ID NO: 2736816 - DNA, 25 bp, Homo sapien
ttaaaaagccccgcagtcaggccag

SEQ ID NO: 2736817 - DNA, 25 bp, Homo sapien
cctttattatcctcaaaatgtaaca

SEQ ID NO: 2736818 - DNA, 25 bp, Homo sapien
aaagccccgcagtcaggccaggagt

SEQ ID NO: 2736819 - DNA, 25 bp, Homo sapien
aaaaagccccgcagtcaggccagga

SEQ ID NO: 2736820 - DNA, 25 bp, Homo sapien
tcttagacttagtgctgtaccctta

SEQ ID NO: 2736821 - DNA, 25 bp, Homo sapien
taaagaaatccagatcccttcgggc

SEQ ID NO: 2736822 - DNA, 25 bp, Homo sapien
gcttggcacctacaaccaccggaga

SEQ ID NO: 2736823 - DNA, 25 bp, Homo sapien
tctgtaacgggtcgtgctcatgtct

SEQ ID NO: 2736824 - DNA, 25 bp, Homo sapien
taggagacttgtacagttgactggc

SEQ ID NO: 2736825 - DNA, 25 bp, Homo sapien
tgagacgctgttgcaaattccaccc

SEQ ID NO: 2736826 - DNA, 25 bp, Homo sapien
tgactggctttcctctcgttggtag

SEQ ID NO: 2736827 - DNA, 25 bp, Homo sapien
gattgtagctcttagtcctccctgc

SEQ ID NO: 2736828 - DNA, 25 bp, Homo sapien
aatggttgccttaaccctggctcct

SEQ ID NO: 2736829 - DNA, 25 bp, Homo sapien
tcagatcaacctggaaggaaagacc

SEQ ID NO: 2736830 - DNA, 25 bp, Homo sapien
gcctggagtcgtggccctgcatttc

SEQ ID NO: 2736831 - DNA, 25 bp, Homo sapien
agagccatgccttctctcatgtgtg

SEQ ID NO: 2736832 - DNA, 25 bp, Homo sapien
atggctgtgacttcaagatcgacgc

SEQ ID NO: 2736833 - DNA, 25 bp, Homo sapien
tcgacgctggggaccgcttcctgga

SEQ ID NO: 2736834 - DNA, 25 bp, Homo sapien
gaagatgtttggcacgaaatgccat

SEQ ID NO: 2736835 - DNA, 25 bp, Homo sapien
gtttggcacgaaatgccatggctgt

SEQ ID NO: 2736836 - DNA, 25 bp, Homo sapien
gagggcgtgccctattgcgagcgag

SEQ ID NO: 2736837 - DNA, 25 bp, Homo sapien
ctgcaagacgcccatccggaacagg

SEQ ID NO: 2736838 - DNA, 25 bp, Homo sapien
gcaagacgcccatccggaacagggc

SEQ ID NO: 2736839 - DNA, 25 bp, Homo sapien
ccttctacatggaggagggcgtgcc

SEQ ID NO: 2736840 - DNA, 25 bp, Homo sapien
tgggccacgcgtaccacccggagga

SEQ ID NO: 2736841 - DNA, 25 bp, Homo sapien
atcttctgcccaccatgctatgacg

SEQ ID NO: 2736842 - DNA, 25 bp, Homo sapien
tctttgaggagaagggcgccatctt

SEQ ID NO: 2736843 - DNA, 25 bp, Homo sapien
acccggaggagtttgtgtgtagcca

SEQ ID NO: 2736844 - DNA, 25 bp, Homo sapien
tgttgggggcactccgggctccagc

SEQ ID NO: 2736845 - DNA, 25 bp, Homo sapien
ttcttccctgatggagatgactttc

SEQ ID NO: 2736846 - DNA, 25 bp, Homo sapien
tccctgatggagatgactttcagat

SEQ ID NO: 2736847 - DNA, 25 bp, Homo sapien
tcagatatggcctgttgggggcact

SEQ ID NO: 2736848 - DNA, 25 bp, Homo sapien
aacatgagggcccaactggagaccc

SEQ ID NO: 2736849 - DNA, 25 bp, Homo sapien
gggatttcagagacaccctcgtcca

SEQ ID NO: 2736850 - DNA, 25 bp, Homo sapien
gctgtgaggcttacttgtcagactc

SEQ ID NO: 2736851 - DNA, 25 bp, Homo sapien
atgttgctctgcacggccgagtgac

SEQ ID NO: 2736852 - DNA, 25 bp, Homo sapien
gaccaagcaggtcagcaacatcggt

SEQ ID NO: 2736853 - DNA, 25 bp, Homo sapien
acatcggtcgcaaggactacctggc

SEQ ID NO: 2736854 - DNA, 25 bp, Homo sapien
ttctgagccgacagtcttcccttct

SEQ ID NO: 2736855 - DNA, 25 bp, Homo sapien
cacagctccatggacttctgagccg

SEQ ID NO: 2736856 - DNA, 25 bp, Homo sapien
tcggtcctggcaactgtcgcgtaac

SEQ ID NO: 2736857 - DNA, 25 bp, Homo sapien
caagacgccatgctctgggagaggt

SEQ ID NO: 2736858 - DNA, 25 bp, Homo sapien
cagtgaacgtatgtgtcacacaggc

SEQ ID NO: 2736859 - DNA, 25 bp, Homo sapien
tgtacttgcacatcgccagacctgt

SEQ ID NO: 2736860 - DNA, 25 bp, Homo sapien
ggagctaacagggtcactaagagcc

SEQ ID NO: 2736861 - DNA, 25 bp, Homo sapien
cctaaaaccaactcgaggttatgtg

SEQ ID NO: 2736862 - DNA, 25 bp, Homo sapien
ttgtgtccaaactccatgccccaaa

SEQ ID NO: 2736863 - DNA, 25 bp, Homo sapien
agagccatgtatttgggtgttgtga

SEQ ID NO: 2736864 - DNA, 25 bp, Homo sapien
tgattagcattgagcgcagactggt

SEQ ID NO: 2736865 - DNA, 25 bp, Homo sapien
gatactgtgaagatctttcgtgccg

SEQ ID NO: 2736866 - DNA, 25 bp, Homo sapien
tttcgtgccgaaagataaagcaaca

SEQ ID NO: 2736867 - DNA, 25 bp, Homo sapien
gaagcatgggctctcccttagtcac

SEQ ID NO: 2736868 - DNA, 25 bp, Homo sapien
catggaaaggttaggcagagtgcct

SEQ ID NO: 2736869 - DNA, 25 bp, Homo sapien
catgccacatcgctgatagctcaga

SEQ ID NO: 2736870 - DNA, 25 bp, Homo sapien
gagaataacagaacctaagtcgtag

SEQ ID NO: 2736871 - DNA, 25 bp, Homo sapien
agtggctggacattgccctcgggca

SEQ ID NO: 2736872 - DNA, 25 bp, Homo sapien
aaagcatgcacttggtcacacctgc

SEQ ID NO: 2736873 - DNA, 25 bp, Homo sapien
cagcttgacagccaaaactgagcag

SEQ ID NO: 2736874 - DNA, 25 bp, Homo sapien
gacacagttaagttctcacccagaa

SEQ ID NO: 2736875 - DNA, 25 bp, Homo sapien
tcctaccggtgagagaagtcactga

SEQ ID NO: 2736876 - DNA, 25 bp, Homo sapien
ttcaaaggctggagaacatcgaccg

SEQ ID NO: 2736877 - DNA, 25 bp, Homo sapien
aactgatgtaaccaccaatgagtgc

SEQ ID NO: 2736878 - DNA, 25 bp, Homo sapien
cattgaaaaactgctatccaaaggg

SEQ ID NO: 2736879 - DNA, 25 bp, Homo sapien
aaatcaattttgtggcctggtgccc

SEQ ID NO: 2736880 - DNA, 25 bp, Homo sapien
tcggcacataagctctcgggcctct

SEQ ID NO: 2736881 - DNA, 25 bp, Homo sapien
tcctgccctgggaactcgggagact

SEQ ID NO: 2736882 - DNA, 25 bp, Homo sapien
gaactcgggagactgggatcctagc

SEQ ID NO: 2736883 - DNA, 25 bp, Homo sapien
tagctcgttcctgtcggcacataag

SEQ ID NO: 2736884 - DNA, 25 bp, Homo sapien
aaattagaagaatggccaggtgtgg

SEQ ID NO: 2736885 - DNA, 25 bp, Homo sapien
gctatcttgttaacataacaatttt

SEQ ID NO: 2736886 - DNA, 25 bp, Homo sapien
ttagtcaggcgtattggcaggcgcc

SEQ ID NO: 2736887 - DNA, 25 bp, Homo sapien
aacaaaattagaagaatggccaggt

SEQ ID NO: 2736888 - DNA, 25 bp, Homo sapien
agacttcggcggctcgggcgctttc

SEQ ID NO: 2736889 - DNA, 25 bp, Homo sapien
gggatgggccatcctgccgcggctg

SEQ ID NO: 2736890 - DNA, 25 bp, Homo sapien
tcggtccgcgctcctgcgactaggc

SEQ ID NO: 2736891 - DNA, 25 bp, Homo sapien
gaggatgacgaacccaacctggtgc

SEQ ID NO: 2736892 - DNA, 25 bp, Homo sapien
caaggagtcgggtttgagtcccact

SEQ ID NO: 2736893 - DNA, 25 bp, Homo sapien
gactcccagtagaccatatgttgca

SEQ ID NO: 2736894 - DNA, 25 bp, Homo sapien
aaaatgggaatgatccgtacctgcc

SEQ ID NO: 2736895 - DNA, 25 bp, Homo sapien
tatgttgcaaataaagaccttcgtc

SEQ ID NO: 2736896 - DNA, 25 bp, Homo sapien
tctcagcaccaaccagtggggacca

SEQ ID NO: 2736897 - DNA, 25 bp, Homo sapien
agattcccacaggcaagaatggctg

SEQ ID NO: 2736898 - DNA, 25 bp, Homo sapien
gcaccaaccagtggggaccaatgac

SEQ ID NO: 2736899 - DNA, 25 bp, Homo sapien
gggaagaacgagccaggtctcagca

SEQ ID NO: 2736900 - DNA, 25 bp, Homo sapien
cggccgcgccacgtcgccctgccgc

SEQ ID NO: 2736901 - DNA, 25 bp, Homo sapien
gccgcgccacgtcgccctgccgccg

SEQ ID NO: 2736902 - DNA, 25 bp, Homo sapien
ccggccgcgccacgtcgccctgccg

SEQ ID NO: 2736903 - DNA, 25 bp, Homo sapien
agccggccgcgccacgtcgccctgc

SEQ ID NO: 2736904 - DNA, 25 bp, Homo sapien
cggggccggacgagcagcacgccca

SEQ ID NO: 2736905 - DNA, 25 bp, Homo sapien
ggtctcgtccgggatctcctcaata

SEQ ID NO: 2736906 - DNA, 25 bp, Homo sapien
acttcttctccgtctctccgatgtg

SEQ ID NO: 2736907 - DNA, 25 bp, Homo sapien
aagtagagcgcgcttccgcgcgtcg

SEQ ID NO: 2736908 - DNA, 25 bp, Homo sapien
gggatctcctcaataaagcacttct

SEQ ID NO: 2736909 - DNA, 25 bp, Homo sapien
gtggcatgggttccgcgaccgcctg

SEQ ID NO: 2736910 - DNA, 25 bp, Homo sapien
caggtcagaggagcgcgaggtggca

SEQ ID NO: 2736911 - DNA, 25 bp, Homo sapien
agcccaggtcagaggagcgcgaggt

SEQ ID NO: 2736912 - DNA, 25 bp, Homo sapien
gaggagcgcgaggtggcatgggttc

SEQ ID NO: 2736913 - DNA, 25 bp, Homo sapien
acaaacatgccaagccccggggtgg

SEQ ID NO: 2736914 - DNA, 25 bp, Homo sapien
cggctggtactcctcccgctgcttg

SEQ ID NO: 2736915 - DNA, 25 bp, Homo sapien
ctgcttgtcatacagctgcgtccgg

SEQ ID NO: 2736916 - DNA, 25 bp, Homo sapien
tcatacagctgcgtccggtagtttc

SEQ ID NO: 2736917 - DNA, 25 bp, Homo sapien
cagcatgcctccagcaaagagggag

SEQ ID NO: 2736918 - DNA, 25 bp, Homo sapien
tgggaagtgaaagtgaacctgccct

SEQ ID NO: 2736919 - DNA, 25 bp, Homo sapien
cggagccatactgccgggccaggat

SEQ ID NO: 2736920 - DNA, 25 bp, Homo sapien
attggagtgaagacagatctggtgc

SEQ ID NO: 2736921 - DNA, 25 bp, Homo sapien
ggaaacccagtgttcttaggagaca

SEQ ID NO: 2736922 - DNA, 25 bp, Homo sapien
gctgaaacctgcaagtctcacatgg

SEQ ID NO: 2736923 - DNA, 25 bp, Homo sapien
tcttcagtgtcttagccccatgagg

SEQ ID NO: 2736924 - DNA, 25 bp, Homo sapien
cacaagcaagtattaagcctgggct

SEQ ID NO: 2736925 - DNA, 25 bp, Homo sapien
gtagctgcaactcactcaacttgtc

SEQ ID NO: 2736926 - DNA, 25 bp, Homo sapien
accagctgtcgcactcgtagctgca

SEQ ID NO: 2736927 - DNA, 25 bp, Homo sapien
cactcaacttgtctttagcagcaat

SEQ ID NO: 2736928 - DNA, 25 bp, Homo sapien
tccacttgttccaccagctgtcgca

SEQ ID NO: 2736929 - DNA, 25 bp, Homo sapien
aatgcagtgcaggtaagtcccttgg

SEQ ID NO: 2736930 - DNA, 25 bp, Homo sapien
tgagaccctggtcctgggagcatgt

SEQ ID NO: 2736931 - DNA, 25 bp, Homo sapien
ccactgaaacagcacccaaggtgtt

SEQ ID NO: 2736932 - DNA, 25 bp, Homo sapien
ggcaatgacagcctcttacgagtct

SEQ ID NO: 2736933 - DNA, 25 bp, Homo sapien
cacaggctgtaaactggcaggctgg

SEQ ID NO: 2736934 - DNA, 25 bp, Homo sapien
gagtggacttgctctaagccctctg

SEQ ID NO: 2736935 - DNA, 25 bp, Homo sapien
cacaggtaatttgtgcagcagcaat

SEQ ID NO: 2736936 - DNA, 25 bp, Homo sapien
taaggtagttgtggtatcaccccac

SEQ ID NO: 2736937 - DNA, 25 bp, Homo sapien
cgcatctgccagacaccgatggcca

SEQ ID NO: 2736938 - DNA, 25 bp, Homo sapien
tgccgcatctgccagacaccgatgg

SEQ ID NO: 2736939 - DNA, 25 bp, Homo sapien
atctgccagacaccgatggccacga

SEQ ID NO: 2736940 - DNA, 25 bp, Homo sapien
gtgccgcatctgccagacaccgatg

SEQ ID NO: 2736941 - DNA, 25 bp, Homo sapien
ctgtgattctgaggtgccaagagga

SEQ ID NO: 2736942 - DNA, 25 bp, Homo sapien
tgaagcagctcaggtcaactgcagg

SEQ ID NO: 2736943 - DNA, 25 bp, Homo sapien
gaagacagaagactggcttgcctgc

SEQ ID NO: 2736944 - DNA, 25 bp, Homo sapien
tgattactaccaaacggcccagagg

SEQ ID NO: 2736945 - DNA, 25 bp, Homo sapien
aatgaaatcagtaactaagactctg

SEQ ID NO: 2736946 - DNA, 25 bp, Homo sapien
atgaaatcagtaactaagactctgc

SEQ ID NO: 2736947 - DNA, 25 bp, Homo sapien
ttattgggaaactcatgtaacaaac

SEQ ID NO: 2736948 - DNA, 25 bp, Homo sapien
aaaatgaaatcagtaactaagactc

SEQ ID NO: 2736949 - DNA, 25 bp, Homo sapien
caaatcgcttacctggagctcgagg

SEQ ID NO: 2736950 - DNA, 25 bp, Homo sapien
cagaccctgggtgattactgcaaag

SEQ ID NO: 2736951 - DNA, 25 bp, Homo sapien
tagggctctcagtggctttaccaga

SEQ ID NO: 2736952 - DNA, 25 bp, Homo sapien
tgaaaggtgggcatgtccaaatcgc

SEQ ID NO: 2736953 - DNA, 25 bp, Homo sapien
ggcctcaggccatccacctacctca

SEQ ID NO: 2736954 - DNA, 25 bp, Homo sapien
cctggcctcaggccatccacctacc

SEQ ID NO: 2736955 - DNA, 25 bp, Homo sapien
gtgtgaaccaccgtgcccgccaaaa

SEQ ID NO: 2736956 - DNA, 25 bp, Homo sapien
tgtgaaccaccgtgcccgccaaaaa

SEQ ID NO: 2736957 - DNA, 25 bp, Homo sapien
cgtgcggagaggcggcggcgcatgg

SEQ ID NO: 2736958 - DNA, 25 bp, Homo sapien
ggcgcatggggcaggcgctcgcagc

SEQ ID NO: 2736959 - DNA, 25 bp, Homo sapien
ggagaggcggcggcgcatggggcag

SEQ ID NO: 2736960 - DNA, 25 bp, Homo sapien
aggcggcggcgcatggggcaggcgc

SEQ ID NO: 2736961 - DNA, 25 bp, Homo sapien
agctgcgccgctttcctccgcgagg

SEQ ID NO: 2736962 - DNA, 25 bp, Homo sapien
agggcagctgcgccgctttcctccg

SEQ ID NO: 2736963 - DNA, 25 bp, Homo sapien
gcgccgctttcctccgcgaggggaa

SEQ ID NO: 2736964 - DNA, 25 bp, Homo sapien
gggcagctgcgccgctttcctccgc

SEQ ID NO: 2736965 - DNA, 25 bp, Homo sapien
caatggagaaatacggacccacggg

SEQ ID NO: 2736966 - DNA, 25 bp, Homo sapien
gaagtcaatggagaaatacggaccc

SEQ ID NO: 2736967 - DNA, 25 bp, Homo sapien
gtcaatggagaaatacggacccacg

SEQ ID NO: 2736968 - DNA, 25 bp, Homo sapien
aagtcaatggagaaatacggaccca

SEQ ID NO: 2736969 - DNA, 25 bp, Homo sapien
ggaagttcctgagtatgctgagaca

SEQ ID NO: 2736970 - DNA, 25 bp, Homo sapien
caggagacagccttttggttagcaa

SEQ ID NO: 2736971 - DNA, 25 bp, Homo sapien
tgaggaatccatgaagggagaagct

SEQ ID NO: 2736972 - DNA, 25 bp, Homo sapien
tcttaagagtcagcgattagctatc

SEQ ID NO: 2736973 - DNA, 25 bp, Homo sapien
gaggaggctgcacataactcgtcta

SEQ ID NO: 2736974 - DNA, 25 bp, Homo sapien
tgctctcttactttctgtgactgag

SEQ ID NO: 2736975 - DNA, 25 bp, Homo sapien
taccatgcatccgaatcctgcttgc

SEQ ID NO: 2736976 - DNA, 25 bp, Homo sapien
gagcaagcgcgggacagggtcagga

SEQ ID NO: 2736977 - DNA, 25 bp, Homo sapien
ccagcgagaggcaggccacgaacag

SEQ ID NO: 2736978 - DNA, 25 bp, Homo sapien
cacgtagatgtggtgccggatcttc

SEQ ID NO: 2736979 - DNA, 25 bp, Homo sapien
tggaagacggaacacttccgaggga

SEQ ID NO: 2736980 - DNA, 25 bp, Homo sapien
tcctcgaagcgttcgcggaagggca

SEQ ID NO: 2736981 - DNA, 25 bp, Homo sapien
gtatgccagggagggttttaatgat

SEQ ID NO: 2736982 - DNA, 25 bp, Homo sapien
gccagggagggttttaatgatggac

SEQ ID NO: 2736983 - DNA, 25 bp, Homo sapien
atgccagggagggttttaatgatgg

SEQ ID NO: 2736984 - DNA, 25 bp, Homo sapien
gagtatgccagggagggttttaatg

SEQ ID NO: 2736985 - DNA, 25 bp, Homo sapien
tgttgggggcactccgggctccagc

SEQ ID NO: 2736986 - DNA, 25 bp, Homo sapien
ttcttccctgatggagatgactttc

SEQ ID NO: 2736987 - DNA, 25 bp, Homo sapien
tcagatatggcctgttgggggcact

SEQ ID NO: 2736988 - DNA, 25 bp, Homo sapien
tccctgatggagatgactttcagat

SEQ ID NO: 2736989 - DNA, 25 bp, Homo sapien
atgttgctctgcacggccgagtgac

SEQ ID NO: 2736990 - DNA, 25 bp, Homo sapien
gctgtgaggcttacttgtcagactc

SEQ ID NO: 2736991 - DNA, 25 bp, Homo sapien
aacatgagggcccaactggagaccc

SEQ ID NO: 2736992 - DNA, 25 bp, Homo sapien
gggatttcagagacaccctcgtcca

SEQ ID NO: 2736993 - DNA, 25 bp, Homo sapien
gaccaagcaggtcagcaacatcggt

SEQ ID NO: 2736994 - DNA, 25 bp, Homo sapien
acatcggtcgcaaggactacctggc

SEQ ID NO: 2736995 - DNA, 25 bp, Homo sapien
ttctgagccgacagtcttcccttct

SEQ ID NO: 2736996 - DNA, 25 bp, Homo sapien
cacagctccatggacttctgagccg

SEQ ID NO: 2736997 - DNA, 25 bp, Homo sapien
tatctggccgtgacatgataggcat

SEQ ID NO: 2736998 - DNA, 25 bp, Homo sapien
tgaaattggccctcgggtcatcctc

SEQ ID NO: 2736999 - DNA, 25 bp, Homo sapien
cctgtgagtcatgaagacgatgtcg

SEQ ID NO: 2737000 - DNA, 25 bp, Homo sapien
ggttttcatagccatcctgagaggc

SEQ ID NO: 2737001 - DNA, 25 bp, Homo sapien
tcggtcctggcaactgtcgcgtaac

SEQ ID NO: 2737002 - DNA, 25 bp, Homo sapien
caagacgccatgctctgggagaggt

SEQ ID NO: 2737003 - DNA, 25 bp, Homo sapien
cagtgaacgtatgtgtcacacaggc

SEQ ID NO: 2737004 - DNA, 25 bp, Homo sapien
tgtacttgcacatcgccagacctgt

SEQ ID NO: 2737005 - DNA, 25 bp, Homo sapien
aggccattgtactgtgaaaactatg

SEQ ID NO: 2737006 - DNA, 25 bp, Homo sapien
tatccttcacatcccagctaagagg

SEQ ID NO: 2737007 - DNA, 25 bp, Homo sapien
ggttgagacccaccatgggactggc

SEQ ID NO: 2737008 - DNA, 25 bp, Homo sapien
tgtgagcaggaccagaaaccatgtc

SEQ ID NO: 2737009 - DNA, 25 bp, Homo sapien
tgattagcattgagcgcagactggt

SEQ ID NO: 2737010 - DNA, 25 bp, Homo sapien
gaagcatgggctctcccttagtcac

SEQ ID NO: 2737011 - DNA, 25 bp, Homo sapien
tttcgtgccgaaagataaagcaaca

SEQ ID NO: 2737012 - DNA, 25 bp, Homo sapien
gatactgtgaagatctttcgtgccg

SEQ ID NO: 2737013 - DNA, 25 bp, Homo sapien
agtggctggacattgccctcgggca

SEQ ID NO: 2737014 - DNA, 25 bp, Homo sapien
catggaaaggttaggcagagtgcct

SEQ ID NO: 2737015 - DNA, 25 bp, Homo sapien
gagaataacagaacctaagtcgtag

SEQ ID NO: 2737016 - DNA, 25 bp, Homo sapien
catgccacatcgctgatagctcaga

SEQ ID NO: 2737017 - DNA, 25 bp, Homo sapien
cagcttgacagccaaaactgagcag

SEQ ID NO: 2737018 - DNA, 25 bp, Homo sapien
gacacagttaagttctcacccagaa

SEQ ID NO: 2737019 - DNA, 25 bp, Homo sapien
aaagcatgcacttggtcacacctgc

SEQ ID NO: 2737020 - DNA, 25 bp, Homo sapien
tcctaccggtgagagaagtcactga

SEQ ID NO: 2737021 - DNA, 25 bp, Homo sapien
tccgctcgaggctgaccaggcggaa

SEQ ID NO: 2737022 - DNA, 25 bp, Homo sapien
gctgcccatgaaggggggcaccctg

SEQ ID NO: 2737023 - DNA, 25 bp, Homo sapien
ggagaagctccgctcgaggctgacc

SEQ ID NO: 2737024 - DNA, 25 bp, Homo sapien
ctgaccaggcggaaagaggagctgc

SEQ ID NO: 2737025 - DNA, 25 bp, Homo sapien
aactgatgtaaccaccaatgagtgc

SEQ ID NO: 2737026 - DNA, 25 bp, Homo sapien
cattgaaaaactgctatccaaaggg

SEQ ID NO: 2737027 - DNA, 25 bp, Homo sapien
aaatcaattttgtggcctggtgccc

SEQ ID NO: 2737028 - DNA, 25 bp, Homo sapien
ttcaaaggctggagaacatcgaccg

SEQ ID NO: 2737029 - DNA, 25 bp, Homo sapien
tcctgccctgggaactcgggagact

SEQ ID NO: 2737030 - DNA, 25 bp, Homo sapien
tcggcacataagctctcgggcctct

SEQ ID NO: 2737031 - DNA, 25 bp, Homo sapien
tagctcgttcctgtcggcacataag

SEQ ID NO: 2737032 - DNA, 25 bp, Homo sapien
gaactcgggagactgggatcctagc

SEQ ID NO: 2737033 - DNA, 25 bp, Homo sapien
aaattagaagaatggccaggtgtgg

SEQ ID NO: 2737034 - DNA, 25 bp, Homo sapien
gctatcttgttaacataacaatttt

SEQ ID NO: 2737035 - DNA, 25 bp, Homo sapien
ttagtcaggcgtattggcaggcgcc

SEQ ID NO: 2737036 - DNA, 25 bp, Homo sapien
aacaaaattagaagaatggccaggt

SEQ ID NO: 2737037 - DNA, 25 bp, Homo sapien
tcggtccgcgctcctgcgactaggc

SEQ ID NO: 2737038 - DNA, 25 bp, Homo sapien
gggatgggccatcctgccgcggctg

SEQ ID NO: 2737039 - DNA, 25 bp, Homo sapien
gaggatgacgaacccaacctggtgc

SEQ ID NO: 2737040 - DNA, 25 bp, Homo sapien
agacttcggcggctcgggcgctttc

SEQ ID NO: 2737041 - DNA, 25 bp, Homo sapien
gactcccagtagaccatatgttgca

SEQ ID NO: 2737042 - DNA, 25 bp, Homo sapien
caaggagtcgggtttgagtcccact

SEQ ID NO: 2737043 - DNA, 25 bp, Homo sapien
tatgttgcaaataaagaccttcgtc

SEQ ID NO: 2737044 - DNA, 25 bp, Homo sapien
aaaatgggaatgatccgtacctgcc

SEQ ID NO: 2737045 - DNA, 25 bp, Homo sapien
tctcagcaccaaccagtggggacca

SEQ ID NO: 2737046 - DNA, 25 bp, Homo sapien
gcaccaaccagtggggaccaatgac

SEQ ID NO: 2737047 - DNA, 25 bp, Homo sapien
gggaagaacgagccaggtctcagca

SEQ ID NO: 2737048 - DNA, 25 bp, Homo sapien
agattcccacaggcaagaatggctg

SEQ ID NO: 2737049 - DNA, 25 bp, Homo sapien
gccgcgccacgtcgccctgccgccg

SEQ ID NO: 2737050 - DNA, 25 bp, Homo sapien
agccggccgcgccacgtcgccctgc

SEQ ID NO: 2737051 - DNA, 25 bp, Homo sapien
cggccgcgccacgtcgccctgccgc

SEQ ID NO: 2737052 - DNA, 25 bp, Homo sapien
ccggccgcgccacgtcgccctgccg

SEQ ID NO: 2737053 - DNA, 25 bp, Homo sapien
ggtctcgtccgggatctcctcaata

SEQ ID NO: 2737054 - DNA, 25 bp, Homo sapien
gggatctcctcaataaagcacttct

SEQ ID NO: 2737055 - DNA, 25 bp, Homo sapien
acttcttctccgtctctccgatgtg

SEQ ID NO: 2737056 - DNA, 25 bp, Homo sapien
aagtagagcgcgcttccgcgcgtcg

SEQ ID NO: 2737057 - DNA, 25 bp, Homo sapien
gaggagcgcgaggtggcatgggttc

SEQ ID NO: 2737058 - DNA, 25 bp, Homo sapien
gtggcatgggttccgcgaccgcctg

SEQ ID NO: 2737059 - DNA, 25 bp, Homo sapien
caggtcagaggagcgcgaggtggca

SEQ ID NO: 2737060 - DNA, 25 bp, Homo sapien
agcccaggtcagaggagcgcgaggt

SEQ ID NO: 2737061 - DNA, 25 bp, Homo sapien
acaaacatgccaagccccggggtgg

SEQ ID NO: 2737062 - DNA, 25 bp, Homo sapien
cggctggtactcctcccgctgcttg

SEQ ID NO: 2737063 - DNA, 25 bp, Homo sapien
tcatacagctgcgtccggtagtttc

SEQ ID NO: 2737064 - DNA, 25 bp, Homo sapien
ctgcttgtcatacagctgcgtccgg

SEQ ID NO: 2737065 - DNA, 25 bp, Homo sapien
tgggaagtgaaagtgaacctgccct

SEQ ID NO: 2737066 - DNA, 25 bp, Homo sapien
attggagtgaagacagatctggtgc

SEQ ID NO: 2737067 - DNA, 25 bp, Homo sapien
cagcatgcctccagcaaagagggag

SEQ ID NO: 2737068 - DNA, 25 bp, Homo sapien
cggagccatactgccgggccaggat

SEQ ID NO: 2737069 - DNA, 25 bp, Homo sapien
cacaagcaagtattaagcctgggct

SEQ ID NO: 2737070 - DNA, 25 bp, Homo sapien
ggaaacccagtgttcttaggagaca

SEQ ID NO: 2737071 - DNA, 25 bp, Homo sapien
gctgaaacctgcaagtctcacatgg

SEQ ID NO: 2737072 - DNA, 25 bp, Homo sapien
tcttcagtgtcttagccccatgagg

SEQ ID NO: 2737073 - DNA, 25 bp, Homo sapien
accagctgtcgcactcgtagctgca

SEQ ID NO: 2737074 - DNA, 25 bp, Homo sapien
cactcaacttgtctttagcagcaat

SEQ ID NO: 2737075 - DNA, 25 bp, Homo sapien
tccacttgttccaccagctgtcgca

SEQ ID NO: 2737076 - DNA, 25 bp, Homo sapien
gtagctgcaactcactcaacttgtc

SEQ ID NO: 2737077 - DNA, 25 bp, Homo sapien
ggcaatgacagcctcttacgagtct

SEQ ID NO: 2737078 - DNA, 25 bp, Homo sapien
tgagaccctggtcctgggagcatgt

SEQ ID NO: 2737079 - DNA, 25 bp, Homo sapien
aatgcagtgcaggtaagtcccttgg

SEQ ID NO: 2737080 - DNA, 25 bp, Homo sapien
ccactgaaacagcacccaaggtgtt

SEQ ID NO: 2737081 - DNA, 25 bp, Homo sapien
taaggtagttgtggtatcaccccac

SEQ ID NO: 2737082 - DNA, 25 bp, Homo sapien
cacaggctgtaaactggcaggctgg

SEQ ID NO: 2737083 - DNA, 25 bp, Homo sapien
cacaggtaatttgtgcagcagcaat

SEQ ID NO: 2737084 - DNA, 25 bp, Homo sapien
gagtggacttgctctaagccctctg

SEQ ID NO: 2737085 - DNA, 25 bp, Homo sapien
atctgccagacaccgatggccacga

SEQ ID NO: 2737086 - DNA, 25 bp, Homo sapien
cgcatctgccagacaccgatggcca

SEQ ID NO: 2737087 - DNA, 25 bp, Homo sapien
tgccgcatctgccagacaccgatgg

SEQ ID NO: 2737088 - DNA, 25 bp, Homo sapien
gtgccgcatctgccagacaccgatg

SEQ ID NO: 2737089 - DNA, 25 bp, Homo sapien
ctgtgattctgaggtgccaagagga

SEQ ID NO: 2737090 - DNA, 25 bp, Homo sapien
tgaagcagctcaggtcaactgcagg

SEQ ID NO: 2737091 - DNA, 25 bp, Homo sapien
gaagacagaagactggcttgcctgc

SEQ ID NO: 2737092 - DNA, 25 bp, Homo sapien
tgattactaccaaacggcccagagg

SEQ ID NO: 2737093 - DNA, 25 bp, Homo sapien
aaaatgaaatcagtaactaagactc

SEQ ID NO: 2737094 - DNA, 25 bp, Homo sapien
aatgaaatcagtaactaagactctg

SEQ ID NO: 2737095 - DNA, 25 bp, Homo sapien
ttattgggaaactcatgtaacaaac

SEQ ID NO: 2737096 - DNA, 25 bp, Homo sapien
atgaaatcagtaactaagactctgc

SEQ ID NO: 2737097 - DNA, 25 bp, Homo sapien
tgaaaggtgggcatgtccaaatcgc

SEQ ID NO: 2737098 - DNA, 25 bp, Homo sapien
caaatcgcttacctggagctcgagg

SEQ ID NO: 2737099 - DNA, 25 bp, Homo sapien
cagaccctgggtgattactgcaaag

SEQ ID NO: 2737100 - DNA, 25 bp, Homo sapien
tagggctctcagtggctttaccaga

SEQ ID NO: 2737101 - DNA, 25 bp, Homo sapien
tagtggtgtgatcttggctcactgc

SEQ ID NO: 2737102 - DNA, 25 bp, Homo sapien
tctcctgggttcaagcaattctgcc

SEQ ID NO: 2737103 - DNA, 25 bp, Homo sapien
aacctctgtctcctgggttcaagca

SEQ ID NO: 2737104 - DNA, 25 bp, Homo sapien
cactgtagcccaggttggagtgtag

SEQ ID NO: 2737105 - DNA, 25 bp, Homo sapien
tcccgggcctacgcggcgcctccgc

SEQ ID NO: 2737106 - DNA, 25 bp, Homo sapien
ctcccgggcctacgcggcgcctccg

SEQ ID NO: 2737107 - DNA, 25 bp, Homo sapien
ccgggcctacgcggcgcctccgcct

SEQ ID NO: 2737108 - DNA, 25 bp, Homo sapien
gcctcccgggcctacgcggcgcctc

SEQ ID NO: 2737109 - DNA, 25 bp, Homo sapien
agggcagctgcgccgctttcctccg

SEQ ID NO: 2737110 - DNA, 25 bp, Homo sapien
agctgcgccgctttcctccgcgagg

SEQ ID NO: 2737111 - DNA, 25 bp, Homo sapien
gcgccgctttcctccgcgaggggaa

SEQ ID NO: 2737112 - DNA, 25 bp, Homo sapien
gggcagctgcgccgctttcctccgc

SEQ ID NO: 2737113 - DNA, 25 bp, Homo sapien
gtcaatggagaaatacggacccacg

SEQ ID NO: 2737114 - DNA, 25 bp, Homo sapien
aagtcaatggagaaatacggaccca

SEQ ID NO: 2737115 - DNA, 25 bp, Homo sapien
gaagtcaatggagaaatacggaccc

SEQ ID NO: 2737116 - DNA, 25 bp, Homo sapien
caatggagaaatacggacccacggg

SEQ ID NO: 2737117 - DNA, 25 bp, Homo sapien
cgaagcaatgcaaggcccaaactgt

SEQ ID NO: 2737118 - DNA, 25 bp, Homo sapien
cccaaactgtcagtggcggttcact

SEQ ID NO: 2737119 - DNA, 25 bp, Homo sapien
caccttagagatgcaacccactgct

SEQ ID NO: 2737120 - DNA, 25 bp, Homo sapien
tcaaacctttagtccaagaggcagc

SEQ ID NO: 2737121 - DNA, 25 bp, Homo sapien
aggtggaagacggaacacttccgag

SEQ ID NO: 2737122 - DNA, 25 bp, Homo sapien
tggaagacggaacacttccgaggga

SEQ ID NO: 2737123 - DNA, 25 bp, Homo sapien
acacttccgagggaggccgccggag

SEQ ID NO: 2737124 - DNA, 25 bp, Homo sapien
gaggccgccggagagcaacccggac

SEQ ID NO: 2737125 - DNA, 25 bp, Homo sapien
tggggcacgaagaccaggagctcct

SEQ ID NO: 2737126 - DNA, 25 bp, Homo sapien
cacgtagatgtggtgccggatcttc

SEQ ID NO: 2737127 - DNA, 25 bp, Homo sapien
tcctcgaagcgttcgcggaagggca

SEQ ID NO: 2737128 - DNA, 25 bp, Homo sapien
agctgcagccagagtagggagaaga

SEQ ID NO: 2737129 - DNA, 25 bp, Homo sapien
gggacttgaaaaggtgggaagatca

SEQ ID NO: 2737130 - DNA, 25 bp, Homo sapien
cagagaagccccgatggtgagagct

SEQ ID NO: 2737131 - DNA, 25 bp, Homo sapien
tctgcataggagagatggcactgcc

SEQ ID NO: 2737132 - DNA, 25 bp, Homo sapien
gaccgccctagctgttgtgctggaa

SEQ ID NO: 2737133 - DNA, 25 bp, Homo sapien
ttcaaagcacgggaggtacagcagt

SEQ ID NO: 2737134 - DNA, 25 bp, Homo sapien
gatgccgccgacataggtcttgtag

SEQ ID NO: 2737135 - DNA, 25 bp, Homo sapien
tcctcgttgagagggagcaggtcaa

SEQ ID NO: 2737136 - DNA, 25 bp, Homo sapien
caggtcaacgtcgtgcatggcaatg

SEQ ID NO: 2737137 - DNA, 25 bp, Homo sapien
ggaagcccacgttgatgagcgctgc

SEQ ID NO: 2737138 - DNA, 25 bp, Homo sapien
tgacacagagacaagcagcgtcact

SEQ ID NO: 2737139 - DNA, 25 bp, Homo sapien
gacagacacccattcttgcacctgg

SEQ ID NO: 2737140 - DNA, 25 bp, Homo sapien
tcccaagttctcctgctaggccagg

SEQ ID NO: 2737141 - DNA, 25 bp, Homo sapien
tttggtctcctaccgctcgggagtg

SEQ ID NO: 2737142 - DNA, 25 bp, Homo sapien
gccggtagaactcgtcgtcctcgcg

SEQ ID NO: 2737143 - DNA, 25 bp, Homo sapien
ccccagaagcggttggacatcccat

SEQ ID NO: 2737144 - DNA, 25 bp, Homo sapien
agaagcggttggacatcccattgca

SEQ ID NO: 2737145 - DNA, 25 bp, Homo sapien
cagctcccttaatgcgccggtagaa

SEQ ID NO: 2737146 - DNA, 25 bp, Homo sapien
gtccaaggaagtcggggtcaggctg

SEQ ID NO: 2737147 - DNA, 25 bp, Homo sapien
caccaccagctcccgaggtcccaca

SEQ ID NO: 2737148 - DNA, 25 bp, Homo sapien
aaggaactggctagatgaccatgca

SEQ ID NO: 2737149 - DNA, 25 bp, Homo sapien
gcagggttagggcagggatcagaat

SEQ ID NO: 2737150 - DNA, 25 bp, Homo sapien
tttttgagctgcgatgcgcttctgg

SEQ ID NO: 2737151 - DNA, 25 bp, Homo sapien
ttgtacccagttgtgattcccgagg

SEQ ID NO: 2737152 - DNA, 25 bp, Homo sapien
caggtggcgaaatgtcttgtaccca

SEQ ID NO: 2737153 - DNA, 25 bp, Homo sapien
tccctcttccgccaggctgggtcat

SEQ ID NO: 2737154 - DNA, 25 bp, Homo sapien
tgaatgtgcaccagggtgtggcggt

SEQ ID NO: 2737155 - DNA, 25 bp, Homo sapien
caacatgatgttgaggacagtgcag

SEQ ID NO: 2737156 - DNA, 25 bp, Homo sapien
ggtgtggcggtcttgtcacagtcca

SEQ ID NO: 2737157 - DNA, 25 bp, Homo sapien
gaagccacatggtacttcacagtgt

SEQ ID NO: 2737158 - DNA, 25 bp, Homo sapien
cctgagcaatatggcctgtaggtac

SEQ ID NO: 2737159 - DNA, 25 bp, Homo sapien
tggccactccacatcctgtcagagc

SEQ ID NO: 2737160 - DNA, 25 bp, Homo sapien
gcccacgacctgaggccttgtcctg

SEQ ID NO: 2737161 - DNA, 25 bp, Homo sapien
tatggcctgtaggtacaggcttcct

SEQ ID NO: 2737162 - DNA, 25 bp, Homo sapien
cttggcggccgggtggctgcaattg

SEQ ID NO: 2737163 - DNA, 25 bp, Homo sapien
ttggcggccgggtggctgcaattgc

SEQ ID NO: 2737164 - DNA, 25 bp, Homo sapien
gtgatgagaggttgtcctgttcagc

SEQ ID NO: 2737165 - DNA, 25 bp, Homo sapien
caggcctgggcacgtgaaggaggtc

SEQ ID NO: 2737166 - DNA, 25 bp, Homo sapien
ctctgatcactgtgcatggcaagca

SEQ ID NO: 2737167 - DNA, 25 bp, Homo sapien
cactgtgtctctgcacgaggcagcc

SEQ ID NO: 2737168 - DNA, 25 bp, Homo sapien
cagctagagcggtgctggctgttcc

SEQ ID NO: 2737169 - DNA, 25 bp, Homo sapien
cacattccggcatggcaacaaccag

SEQ ID NO: 2737170 - DNA, 25 bp, Homo sapien
agcattctagtttctttcgaaaaat

SEQ ID NO: 2737171 - DNA, 25 bp, Homo sapien
gaagatatcacttaagaatccagca

SEQ ID NO: 2737172 - DNA, 25 bp, Homo sapien
ggatgtcaagtccattccacgaagg

SEQ ID NO: 2737173 - DNA, 25 bp, Homo sapien
catgtcagtccaagatgaagcagct

SEQ ID NO: 2737174 - DNA, 25 bp, Homo sapien
tacatcctgggtaggtttcggccac

SEQ ID NO: 2737175 - DNA, 25 bp, Homo sapien
gaaccagtgaattaggacccagctc

SEQ ID NO: 2737176 - DNA, 25 bp, Homo sapien
atcgtgggtgccaggaacactccag

SEQ ID NO: 2737177 - DNA, 25 bp, Homo sapien
ggcattcacagatcctcatgactca

SEQ ID NO: 2737178 - DNA, 25 bp, Homo sapien
tttgcacatgatgatcccttccctt

SEQ ID NO: 2737179 - DNA, 25 bp, Homo sapien
caagttgcttagtgtggcattcaca

SEQ ID NO: 2737180 - DNA, 25 bp, Homo sapien
gcctgatggcgtctgattgatcctg

SEQ ID NO: 2737181 - DNA, 25 bp, Homo sapien
gaaacagtctgcagtggagtcgacc

SEQ ID NO: 2737182 - DNA, 25 bp, Homo sapien
tcccccaaaggatctgtgtcataga

SEQ ID NO: 2737183 - DNA, 25 bp, Homo sapien
caaaaaggccatgtgtccgtccatt

SEQ ID NO: 2737184 - DNA, 25 bp, Homo sapien
gccccgttgatgtggtggtatgatt

SEQ ID NO: 2737185 - DNA, 25 bp, Homo sapien
tcgtagggcctcagtaagacaggct

SEQ ID NO: 2737186 - DNA, 25 bp, Homo sapien
tgctgttacactggagccccgttga

SEQ ID NO: 2737187 - DNA, 25 bp, Homo sapien
ttagtgcatccgtatccctggtgtc

SEQ ID NO: 2737188 - DNA, 25 bp, Homo sapien
taagcttagagaacaccaaatagga

SEQ ID NO: 2737189 - DNA, 25 bp, Homo sapien
tatgcacaattgaaacaccacaagg

SEQ ID NO: 2737190 - DNA, 25 bp, Homo sapien
tcgtgaaagttataatggctcccaa

SEQ ID NO: 2737191 - DNA, 25 bp, Homo sapien
caagccacggatccagtaagcttag

SEQ ID NO: 2737192 - DNA, 25 bp, Homo sapien
ctccagagaagcaacgcgctccaga

SEQ ID NO: 2737193 - DNA, 25 bp, Homo sapien
ggtgctgttttatctccccaggtag

SEQ ID NO: 2737194 - DNA, 25 bp, Homo sapien
tgctgttttatctccccaggtagcc

SEQ ID NO: 2737195 - DNA, 25 bp, Homo sapien
aagcaacgcgctccagactctgatg

SEQ ID NO: 2737196 - DNA, 25 bp, Homo sapien
gggtatgactttggcagagcagctc

SEQ ID NO: 2737197 - DNA, 25 bp, Homo sapien
tccagataagacgagccctgaagca

SEQ ID NO: 2737198 - DNA, 25 bp, Homo sapien
catgggttagacctggaaggcaaac

SEQ ID NO: 2737199 - DNA, 25 bp, Homo sapien
cctgtgtctccaagaagggtatgac

SEQ ID NO: 2737200 - DNA, 25 bp, Homo sapien
cagctagtgcagagttggtgctaca

SEQ ID NO: 2737201 - DNA, 25 bp, Homo sapien
tgtctgctcacctaaagcaattggc

SEQ ID NO: 2737202 - DNA, 25 bp, Homo sapien
gaagaaggtcttccacattctgacc

SEQ ID NO: 2737203 - DNA, 25 bp, Homo sapien
taaggatccccaagtttaattgcca

SEQ ID NO: 2737204 - DNA, 25 bp, Homo sapien
attcacctggagacatgccacactc

SEQ ID NO: 2737205 - DNA, 25 bp, Homo sapien
cactcatcaggggacgtgacacact

SEQ ID NO: 2737206 - DNA, 25 bp, Homo sapien
tcatcaggggacgtgacacactcac

SEQ ID NO: 2737207 - DNA, 25 bp, Homo sapien
acctggagacatgccacactcatca

SEQ ID NO: 2737208 - DNA, 25 bp, Homo sapien
cacttgacccactcagaattctgta

SEQ ID NO: 2737209 - DNA, 25 bp, Homo sapien
aggatgagggaatccctattccagg

SEQ ID NO: 2737210 - DNA, 25 bp, Homo sapien
gaatccctattccaggatgccagct

SEQ ID NO: 2737211 - DNA, 25 bp, Homo sapien
aattctgtattctgctttggtgctg

SEQ ID NO: 2737212 - DNA, 25 bp, Homo sapien
aacctaagcttccatttaagaagct

SEQ ID NO: 2737213 - DNA, 25 bp, Homo sapien
tatagaattataaagttgacaggaa

SEQ ID NO: 2737214 - DNA, 25 bp, Homo sapien
tgataaatagctagatcagggattt

SEQ ID NO: 2737215 - DNA, 25 bp, Homo sapien
taggaaacagatcaaaaagatcaat

SEQ ID NO: 2737216 - DNA, 25 bp, Homo sapien
aacaagatacagcaaaagtttaact

SEQ ID NO: 2737217 - DNA, 25 bp, Homo sapien
aaaagatatactgtctcaaggagag

SEQ ID NO: 2737218 - DNA, 25 bp, Homo sapien
agtttaactactgagatgtgaatct

SEQ ID NO: 2737219 - DNA, 25 bp, Homo sapien
gagaaagtggaagaccaaaaggcag

SEQ ID NO: 2737220 - DNA, 25 bp, Homo sapien
aatagggaaggaaacctcgcgcgct

SEQ ID NO: 2737221 - DNA, 25 bp, Homo sapien
ctcagaaccccttcgtctttgtcgt

SEQ ID NO: 2737222 - DNA, 25 bp, Homo sapien
aacctcgcgcgctatttctgtttcc

SEQ ID NO: 2737223 - DNA, 25 bp, Homo sapien
ggaaggaaacctcgcgcgctatttc

SEQ ID NO: 2737224 - DNA, 25 bp, Homo sapien
tactggccgggccgatgcaggaaag

SEQ ID NO: 2737225 - DNA, 25 bp, Homo sapien
aagcgggagcgcgtaattcttcggc

SEQ ID NO: 2737226 - DNA, 25 bp, Homo sapien
gacgtgggggctcgggtgtactggc

SEQ ID NO: 2737227 - DNA, 25 bp, Homo sapien
gcaggaaagcgggagcgcgtaattc

SEQ ID NO: 2737228 - DNA, 25 bp, Homo sapien
gaactgtagaggtctcaacaaggaa

SEQ ID NO: 2737229 - DNA, 25 bp, Homo sapien
aagcactccaaaggaactgtagagg

SEQ ID NO: 2737230 - DNA, 25 bp, Homo sapien
ggaaagcactccaaaggaactgtag

SEQ ID NO: 2737231 - DNA, 25 bp, Homo sapien
tccaaaggaactgtagaggtctcaa

SEQ ID NO: 2737232 - DNA, 25 bp, Homo sapien
tttgagctgtggcacctctttgaat

SEQ ID NO: 2737233 - DNA, 25 bp, Homo sapien
gctgtggcacctctttgaatcttca

SEQ ID NO: 2737234 - DNA, 25 bp, Homo sapien
gagctgtggcacctctttgaatctt

SEQ ID NO: 2737235 - DNA, 25 bp, Homo sapien
tacttttgagctgtggcacctcttt

SEQ ID NO: 2737236 - DNA, 25 bp, Homo sapien
aacgtgtacatgattcctgcagctt

SEQ ID NO: 2737237 - DNA, 25 bp, Homo sapien
cagctttcctgttgagccagaccat

SEQ ID NO: 2737238 - DNA, 25 bp, Homo sapien
caaaccctgaaaccagtgatgtcaa

SEQ ID NO: 2737239 - DNA, 25 bp, Homo sapien
accagtgatgtcaatggctgcgtgg

SEQ ID NO: 2737240 - DNA, 25 bp, Homo sapien
atccggattctatcttcactggcta

SEQ ID NO: 2737241 - DNA, 25 bp, Homo sapien
attccaatccggattctatcttcac

SEQ ID NO: 2737242 - DNA, 25 bp, Homo sapien
tccaatccggattctatcttcactg

SEQ ID NO: 2737243 - DNA, 25 bp, Homo sapien
caatccggattctatcttcactggc

SEQ ID NO: 2737244 - DNA, 25 bp, Homo sapien
gctcagttgtacagaactggaaaag

SEQ ID NO: 2737245 - DNA, 25 bp, Homo sapien
tgttgaggctcagttgtacagaact

SEQ ID NO: 2737246 - DNA, 25 bp, Homo sapien
ttgaggctcagttgtacagaactgg

SEQ ID NO: 2737247 - DNA, 25 bp, Homo sapien
gaggctcagttgtacagaactggaa

SEQ ID NO: 2737248 - DNA, 25 bp, Homo sapien
tcatgaacaggaaggagaggacggg

SEQ ID NO: 2737249 - DNA, 25 bp, Homo sapien
ctgccattcatgaacaggaaggaga

SEQ ID NO: 2737250 - DNA, 25 bp, Homo sapien
ccattcatgaacaggaaggagagga

SEQ ID NO: 2737251 - DNA, 25 bp, Homo sapien
attcatgaacaggaaggagaggacg

SEQ ID NO: 2737252 - DNA, 25 bp, Homo sapien
gtatttctgaacagggcaccatggg

SEQ ID NO: 2737253 - DNA, 25 bp, Homo sapien
gccggcactgccacgttttccaagg

SEQ ID NO: 2737254 - DNA, 25 bp, Homo sapien
ctggctttactaaatctgagtcttg

SEQ ID NO: 2737255 - DNA, 25 bp, Homo sapien
gatggagtccctttgctgctaggcc

SEQ ID NO: 2737256 - DNA, 25 bp, Homo sapien
caggcaccttctcgctgataggcat

SEQ ID NO: 2737257 - DNA, 25 bp, Homo sapien
ttcaactgagaattgtcaggcacct

SEQ ID NO: 2737258 - DNA, 25 bp, Homo sapien
ggggaacttggtcaggacatttcaa

SEQ ID NO: 2737259 - DNA, 25 bp, Homo sapien
attgtcaggcaccttctcgctgata

SEQ ID NO: 2737260 - DNA, 25 bp, Homo sapien
taagctttgtgtcgctcaagttcag

SEQ ID NO: 2737261 - DNA, 25 bp, Homo sapien
catgtgcaagcaatttgagaggagc

SEQ ID NO: 2737262 - DNA, 25 bp, Homo sapien
tatgagtgtactaaccactgtgagc

SEQ ID NO: 2737263 - DNA, 25 bp, Homo sapien
actgtgagcttctccaagcatgtgc

SEQ ID NO: 2737264 - DNA, 25 bp, Homo sapien
tctggacatgcacaattgttctctt

SEQ ID NO: 2737265 - DNA, 25 bp, Homo sapien
tgcactggcgtctctggacatgcac

SEQ ID NO: 2737266 - DNA, 25 bp, Homo sapien
gcgtctctggacatgcacaattgtt

SEQ ID NO: 2737267 - DNA, 25 bp, Homo sapien
cactggcgtctctggacatgcacaa

SEQ ID NO: 2737268 - DNA, 25 bp, Homo sapien
ggaggtgagaacagaccctgcttca

SEQ ID NO: 2737269 - DNA, 25 bp, Homo sapien
gccccacactagttgcagaggaggt

SEQ ID NO: 2737270 - DNA, 25 bp, Homo sapien
tgagtaggtacattgcacagtgggc

SEQ ID NO: 2737271 - DNA, 25 bp, Homo sapien
tctcaatggtcagctaacccagggt

SEQ ID NO: 2737272 - DNA, 25 bp, Homo sapien
caaagcgtacgtattctgggatcat

SEQ ID NO: 2737273 - DNA, 25 bp, Homo sapien
taacgtcaacaagtgaagacctgtg

SEQ ID NO: 2737274 - DNA, 25 bp, Homo sapien
ccaggaatgtcttctagataccggg

SEQ ID NO: 2737275 - DNA, 25 bp, Homo sapien
cacaggagacagcatggtctgaccc

SEQ ID NO: 2737276 - DNA, 25 bp, Homo sapien
tttaggaccattgcctcaaccactg

SEQ ID NO: 2737277 - DNA, 25 bp, Homo sapien
ttaccaggtaagaaatgatctcaga

SEQ ID NO: 2737278 - DNA, 25 bp, Homo sapien
gaagtgtcttcgaggctttaggacc

SEQ ID NO: 2737279 - DNA, 25 bp, Homo sapien
tcagatggcattcttagatgacacc

SEQ ID NO: 2737280 - DNA, 25 bp, Homo sapien
tggccccaggccagatgttgacact

SEQ ID NO: 2737281 - DNA, 25 bp, Homo sapien
tgttgacactcgatctgactgggcc

SEQ ID NO: 2737282 - DNA, 25 bp, Homo sapien
gcccagaccgggtatgcaaagctgt

SEQ ID NO: 2737283 - DNA, 25 bp, Homo sapien
agaactgtcacttggccgaaccttg

SEQ ID NO: 2737284 - DNA, 25 bp, Homo sapien
ccaggtaagacttctgatagtgaat

SEQ ID NO: 2737285 - DNA, 25 bp, Homo sapien
taagacttctgatagtgaatttctc

SEQ ID NO: 2737286 - DNA, 25 bp, Homo sapien
atccaggtaagacttctgatagtga

SEQ ID NO: 2737287 - DNA, 25 bp, Homo sapien
tctgatagtgaatttctcatttctc

SEQ ID NO: 2737288 - DNA, 25 bp, Homo sapien
gaagaagttcttcggctttgggagc

SEQ ID NO: 2737289 - DNA, 25 bp, Homo sapien
ggctccctaggccacgtctacaggg

SEQ ID NO: 2737290 - DNA, 25 bp, Homo sapien
tccacagggcgctgtcaagggcgaa

SEQ ID NO: 2737291 - DNA, 25 bp, Homo sapien
ggtaccgaatcggaagatccacagg

SEQ ID NO: 2737292 - DNA, 25 bp, Homo sapien
ccgggcggctttgcgaggctcacta

SEQ ID NO: 2737293 - DNA, 25 bp, Homo sapien
gagccgggcggctttgcgaggctca

SEQ ID NO: 2737294 - DNA, 25 bp, Homo sapien
gcggctttgcgaggctcactaggtc

SEQ ID NO: 2737295 - DNA, 25 bp, Homo sapien
ttgcgaggctcactaggtctgagag

SEQ ID NO: 2737296 - DNA, 25 bp, Homo sapien
gggccgcgcgcctgcgattttccgt

SEQ ID NO: 2737297 - DNA, 25 bp, Homo sapien
aacccgcgagcccagcggcgcctgc

SEQ ID NO: 2737298 - DNA, 25 bp, Homo sapien
gcgcgcctgcgattttccgtccgtg

SEQ ID NO: 2737299 - DNA, 25 bp, Homo sapien
tgcgattttccgtccgtggtcctgg

SEQ ID NO: 2737300 - DNA, 25 bp, Homo sapien
ggtgcccatgccagcaccagatctc

SEQ ID NO: 2737301 - DNA, 25 bp, Homo sapien
atccgggaagccactccggtggccg

SEQ ID NO: 2737302 - DNA, 25 bp, Homo sapien
ccggtggccgcggggtgcccatgcc

SEQ ID NO: 2737303 - DNA, 25 bp, Homo sapien
gtgcccatgccagcaccagatctct

SEQ ID NO: 2737304 - DNA, 25 bp, Homo sapien
tcagtagaggaactggctgtggacc

SEQ ID NO: 2737305 - DNA, 25 bp, Homo sapien
aactggctgtggaccttcacctctg

SEQ ID NO: 2737306 - DNA, 25 bp, Homo sapien
ctgtggaccttcacctctgcatccc

SEQ ID NO: 2737307 - DNA, 25 bp, Homo sapien
cagtagaggaactggctgtggacct

SEQ ID NO: 2737308 - DNA, 25 bp, Homo sapien
tcctcagagagtggatccagggtca

SEQ ID NO: 2737309 - DNA, 25 bp, Homo sapien
tccagggtcagaacgaagaactttg

SEQ ID NO: 2737310 - DNA, 25 bp, Homo sapien
gactgggagggttccaacatagcca

SEQ ID NO: 2737311 - DNA, 25 bp, Homo sapien
gacctacagaattccactattgcaa

SEQ ID NO: 2737312 - DNA, 25 bp, Homo sapien
tatcactcccaagtaagggattggt

SEQ ID NO: 2737313 - DNA, 25 bp, Homo sapien
cgaagcagtactctacagagaccca

SEQ ID NO: 2737314 - DNA, 25 bp, Homo sapien
ccccagtatcactcccaagtaaggg

SEQ ID NO: 2737315 - DNA, 25 bp, Homo sapien
gaagtaccctgagctccattcgaag

SEQ ID NO: 2737316 - DNA, 25 bp, Homo sapien
gctccagtccaactggcaggtggct

SEQ ID NO: 2737317 - DNA, 25 bp, Homo sapien
cattttcataaaacaatccgtggtg

SEQ ID NO: 2737318 - DNA, 25 bp, Homo sapien
gtggctccagtccaactggcaggtg

SEQ ID NO: 2737319 - DNA, 25 bp, Homo sapien
aatccgtggtgtcccgctcggagac

SEQ ID NO: 2737320 - DNA, 25 bp, Homo sapien
gataattctttacgacagccttggg

SEQ ID NO: 2737321 - DNA, 25 bp, Homo sapien
gaaaatagccattttgtggagacct

SEQ ID NO: 2737322 - DNA, 25 bp, Homo sapien
tggagaccttagcagaaatttggcc

SEQ ID NO: 2737323 - DNA, 25 bp, Homo sapien
tagttacagaaccatgaatgacctc

SEQ ID NO: 2737324 - DNA, 25 bp, Homo sapien
aggcgagcctgagcgactgcagctg

SEQ ID NO: 2737325 - DNA, 25 bp, Homo sapien
gcacgacggcggtggaggcgagcct

SEQ ID NO: 2737326 - DNA, 25 bp, Homo sapien
atccagcggcctgtggcacgacggc

SEQ ID NO: 2737327 - DNA, 25 bp, Homo sapien
gcatccagcggcctgtggcacgacg

SEQ ID NO: 2737328 - DNA, 25 bp, Homo sapien
tggagaaagttctcgcagccctggg

SEQ ID NO: 2737329 - DNA, 25 bp, Homo sapien
agaaagttctcgcagccctgggcgc

SEQ ID NO: 2737330 - DNA, 25 bp, Homo sapien
tggcggcggctgatggcccgtgtgg

SEQ ID NO: 2737331 - DNA, 25 bp, Homo sapien
cttggagaaagttctcgcagccctg

SEQ ID NO: 2737332 - DNA, 25 bp, Homo sapien
cattcctgtcgagctgcagtctcca

SEQ ID NO: 2737333 - DNA, 25 bp, Homo sapien
atcgctgtcgctgccacaaccacag

SEQ ID NO: 2737334 - DNA, 25 bp, Homo sapien
gctgccacaaccacaggaagtgagc

SEQ ID NO: 2737335 - DNA, 25 bp, Homo sapien
gagccacgccatctacaggctccaa

SEQ ID NO: 2737336 - DNA, 25 bp, Homo sapien
cacgttggtggtaggcttgaggaag

SEQ ID NO: 2737337 - DNA, 25 bp, Homo sapien
cagcggtgatagacaatggagcagc

SEQ ID NO: 2737338 - DNA, 25 bp, Homo sapien
gcagcacgttggtggtaggcttgag

SEQ ID NO: 2737339 - DNA, 25 bp, Homo sapien
aggaggaaggcccagcggtgataga

SEQ ID NO: 2737340 - DNA, 25 bp, Homo sapien
tcatcttggtctcctacatccgcat

SEQ ID NO: 2737341 - DNA, 25 bp, Homo sapien
gattgcctgctcacatacatgacaa

SEQ ID NO: 2737342 - DNA, 25 bp, Homo sapien
ggtctcctacatccgcattgctgca

SEQ ID NO: 2737343 - DNA, 25 bp, Homo sapien
tcttggtctcctacatccgcattgc

SEQ ID NO: 2737344 - DNA, 25 bp, Homo sapien
tcttcttaacaatgtgtcttggaca

SEQ ID NO: 2737345 - DNA, 25 bp, Homo sapien
gttcccaccctatgaatcctgagag

SEQ ID NO: 2737346 - DNA, 25 bp, Homo sapien
ttggacatgtttcctattgatgggt

SEQ ID NO: 2737347 - DNA, 25 bp, Homo sapien
tgactacagtggcagtgatcggaaa

SEQ ID NO: 2737348 - DNA, 25 bp, Homo sapien
taagttccagggttctataccactg

SEQ ID NO: 2737349 - DNA, 25 bp, Homo sapien
caaattgagctacttcacctgcaga

SEQ ID NO: 2737350 - DNA, 25 bp, Homo sapien
gatatgtatcgaagcatcactgtgt

SEQ ID NO: 2737351 - DNA, 25 bp, Homo sapien
tagccctttcctagacatgtttagg

SEQ ID NO: 2737352 - DNA, 25 bp, Homo sapien
ctcctccaccaggtttttgagcaag

SEQ ID NO: 2737353 - DNA, 25 bp, Homo sapien
cttctttcacttcaaccccctctgg

SEQ ID NO: 2737354 - DNA, 25 bp, Homo sapien
gggagactctgtaagcaggcctatg

SEQ ID NO: 2737355 - DNA, 25 bp, Homo sapien
aggcctatgggaacaaacagcatct

SEQ ID NO: 2737356 - DNA, 25 bp, Homo sapien
ctccacggcgcagtcagtcctggcg

SEQ ID NO: 2737357 - DNA, 25 bp, Homo sapien
ggcgcagtcagtcctggcgccgctg

SEQ ID NO: 2737358 - DNA, 25 bp, Homo sapien
cacggcgcagtcagtcctggcgccg

SEQ ID NO: 2737359 - DNA, 25 bp, Homo sapien
gcctccacggcgcagtcagtcctgg

SEQ ID NO: 2737360 - DNA, 25 bp, Homo sapien
ccgagctccccagcttccaactcac

SEQ ID NO: 2737361 - DNA, 25 bp, Homo sapien
gccgagctccccagcttccaactca

SEQ ID NO: 2737362 - DNA, 25 bp, Homo sapien
tggcccaacgccgagggccccatgg

SEQ ID NO: 2737363 - DNA, 25 bp, Homo sapien
ctggcccaacgccgagggccccatg

SEQ ID NO: 2737364 - DNA, 25 bp, Homo sapien
cacggggccatcgagccgggaccgc

SEQ ID NO: 2737365 - DNA, 25 bp, Homo sapien
acggggccatcgagccgggaccgct

SEQ ID NO: 2737366 - DNA, 25 bp, Homo sapien
ggccccggaacagctcctgcatccc

SEQ ID NO: 2737367 - DNA, 25 bp, Homo sapien
ggaacagctcctgcatcccaagcac

SEQ ID NO: 2737368 - DNA, 25 bp, Homo sapien
ctgtggccccggaacagctcctgca

SEQ ID NO: 2737369 - DNA, 25 bp, Homo sapien
cccggaacagctcctgcatcccaag

SEQ ID NO: 2737370 - DNA, 25 bp, Homo sapien
tgtgcgccagaactcgcgcgtcttg

SEQ ID NO: 2737371 - DNA, 25 bp, Homo sapien
ctgtgcgccagaactcgcgcgtctt

SEQ ID NO: 2737372 - DNA, 25 bp, Homo sapien
cttgtcgaaggaccccgaggctagg

SEQ ID NO: 2737373 - DNA, 25 bp, Homo sapien
gaggctaggcgacgcccgtcgcaac

SEQ ID NO: 2737374 - DNA, 25 bp, Homo sapien
tccaggccaccgagtgcaccttggc

SEQ ID NO: 2737375 - DNA, 25 bp, Homo sapien
tctccagcaagaagacgctggccgt

SEQ ID NO: 2737376 - DNA, 25 bp, Homo sapien
acagtggcaatgcattttgtagtcc

SEQ ID NO: 2737377 - DNA, 25 bp, Homo sapien
gattacttggatgccaacaaagctg

SEQ ID NO: 2737378 - DNA, 25 bp, Homo sapien
taacaaataggtcaggattacttgg

SEQ ID NO: 2737379 - DNA, 25 bp, Homo sapien
cgaatggttttatctccggacgccg

SEQ ID NO: 2737380 - DNA, 25 bp, Homo sapien
tgttgcctacagcaatggtctgccc

SEQ ID NO: 2737381 - DNA, 25 bp, Homo sapien
tcttggcatcaataaaggtcaccac

SEQ ID NO: 2737382 - DNA, 25 bp, Homo sapien
ccaggagatttcgttgacctcgaac

SEQ ID NO: 2737383 - DNA, 25 bp, Homo sapien
ccatcaggactccagcagatattaa

SEQ ID NO: 2737384 - DNA, 25 bp, Homo sapien
aagtcaggatagtgtttgcttttgt

SEQ ID NO: 2737385 - DNA, 25 bp, Homo sapien
cacctggatggacttctgggatggc

SEQ ID NO: 2737386 - DNA, 25 bp, Homo sapien
gcacatgtggtagataaactatgaa

SEQ ID NO: 2737387 - DNA, 25 bp, Homo sapien
tggaaggaagttgtaattaggacaa

SEQ ID NO: 2737388 - DNA, 25 bp, Homo sapien
aaggatgggcgttgatggactgcac

SEQ ID NO: 2737389 - DNA, 25 bp, Homo sapien
gggtcaaacttgatacagatgcagt

SEQ ID NO: 2737390 - DNA, 25 bp, Homo sapien
gaaaagcaccgaacacacactaact

SEQ ID NO: 2737391 - DNA, 25 bp, Homo sapien
aagcatctgcacttcctgtggcaaa

SEQ ID NO: 2737392 - DNA, 25 bp, Homo sapien
tgagggttcttacaggccaatccag

SEQ ID NO: 2737393 - DNA, 25 bp, Homo sapien
gacgccagcattttcccatcatggc

SEQ ID NO: 2737394 - DNA, 25 bp, Homo sapien
catggctgaaactgagggttcttac

SEQ ID NO: 2737395 - DNA, 25 bp, Homo sapien
aatgatcttccgatgctgacgccag

SEQ ID NO: 2737396 - DNA, 25 bp, Homo sapien
gcagagatgagatcacaagagaagt

SEQ ID NO: 2737397 - DNA, 25 bp, Homo sapien
tcatgctggtgaagtagtcacatgc

SEQ ID NO: 2737398 - DNA, 25 bp, Homo sapien
ccaaaggtgaaagacggtagattct

SEQ ID NO: 2737399 - DNA, 25 bp, Homo sapien
agacggtagattctcatgaagttac

SEQ ID NO: 2737400 - DNA, 25 bp, Homo sapien
tttcctcttcgaagttttctataca

SEQ ID NO: 2737401 - DNA, 25 bp, Homo sapien
catatacaggcaaaagataaagaga

SEQ ID NO: 2737402 - DNA, 25 bp, Homo sapien
tcatatacaggcaaaagataaagag

SEQ ID NO: 2737403 - DNA, 25 bp, Homo sapien
ttcctcttcgaagttttctatacag

SEQ ID NO: 2737404 - DNA, 25 bp, Homo sapien
accaatcaatacgttcaaaacgaag

SEQ ID NO: 2737405 - DNA, 25 bp, Homo sapien
caatacgttcaaaacgaaggacaca

SEQ ID NO: 2737406 - DNA, 25 bp, Homo sapien
caatcaatacgttcaaaacgaagga

SEQ ID NO: 2737407 - DNA, 25 bp, Homo sapien
cgttcaaaacgaaggacacattcat

SEQ ID NO: 2737408 - DNA, 25 bp, Homo sapien
agcttcacagttccggcttcccggc

SEQ ID NO: 2737409 - DNA, 25 bp, Homo sapien
gaaggtcggagactcacactgtacc

SEQ ID NO: 2737410 - DNA, 25 bp, Homo sapien
tttgtcatcacaggcaaatgccagc

SEQ ID NO: 2737411 - DNA, 25 bp, Homo sapien
gcttcccggctgctgtcatatttgc

SEQ ID NO: 2737412 - DNA, 25 bp, Homo sapien
cagagacgtttacaatttataccaa

SEQ ID NO: 2737413 - DNA, 25 bp, Homo sapien
atttagggtgcccaccaactccgag

SEQ ID NO: 2737414 - DNA, 25 bp, Homo sapien
gagaacagaccaaactaaccacatg

SEQ ID NO: 2737415 - DNA, 25 bp, Homo sapien
tgaaggaagacctctgccggggcct

SEQ ID NO: 2737416 - DNA, 25 bp, Homo sapien
ccctccaaactaggtattgtccaag

SEQ ID NO: 2737417 - DNA, 25 bp, Homo sapien
ggtcactactcgcactgcagagtcc

SEQ ID NO: 2737418 - DNA, 25 bp, Homo sapien
ttgtccaagttgtatcaaatgccac

SEQ ID NO: 2737419 - DNA, 25 bp, Homo sapien
aagtctaccatgcacccagaagcag

SEQ ID NO: 2737420 - DNA, 25 bp, Homo sapien
gtttattaaatgctcaattctcaaa

SEQ ID NO: 2737421 - DNA, 25 bp, Homo sapien
agtttattaaatgctcaattctcaa

SEQ ID NO: 2737422 - DNA, 25 bp, Homo sapien
gggcaaagggaggctacattaacat

SEQ ID NO: 2737423 - DNA, 25 bp, Homo sapien
ccaatggagtgttctaggcaaggga

SEQ ID NO: 2737424 - DNA, 25 bp, Homo sapien
ggactgcttctaaattaagacctaa

SEQ ID NO: 2737425 - DNA, 25 bp, Homo sapien
taatgaaaccactcacatgaattgt

SEQ ID NO: 2737426 - DNA, 25 bp, Homo sapien
ggctctgacatccaaacaggcacag

SEQ ID NO: 2737427 - DNA, 25 bp, Homo sapien
caagtgcttccaaggcaaatagggc

SEQ ID NO: 2737428 - DNA, 25 bp, Homo sapien
cagtgcaagactgttcaaggagtcc

SEQ ID NO: 2737429 - DNA, 25 bp, Homo sapien
caaagagccttcatgggtaaatccc

SEQ ID NO: 2737430 - DNA, 25 bp, Homo sapien
cacaattgggtttcagaacagggaa

SEQ ID NO: 2737431 - DNA, 25 bp, Homo sapien
tgttttccaaaaagcgtcagcaagt

SEQ ID NO: 2737432 - DNA, 25 bp, Homo sapien
gggacagtccaatgcaaatacacaa

SEQ ID NO: 2737433 - DNA, 25 bp, Homo sapien
taatcccaggctacaagacaagcag

SEQ ID NO: 2737434 - DNA, 25 bp, Homo sapien
gcctgattccaaccatcctcgatga

SEQ ID NO: 2737435 - DNA, 25 bp, Homo sapien
gccatcacgatgtctcagtgcctga

SEQ ID NO: 2737436 - DNA, 25 bp, Homo sapien
tggctgttgtcccattagacccagg

SEQ ID NO: 2737437 - DNA, 25 bp, Homo sapien
cagggcctagttcaaagccatcacg

SEQ ID NO: 2737438 - DNA, 25 bp, Homo sapien
ttccagcgctccgaatttgccaagt

SEQ ID NO: 2737439 - DNA, 25 bp, Homo sapien
cagcgctccgaatttgccaagtgga

SEQ ID NO: 2737440 - DNA, 25 bp, Homo sapien
ccgaatttgccaagtggaagagcag

SEQ ID NO: 2737441 - DNA, 25 bp, Homo sapien
cgctccgaatttgccaagtggaaga

SEQ ID NO: 2737442 - DNA, 25 bp, Homo sapien
aacacaaactataatgaggacaata

SEQ ID NO: 2737443 - DNA, 25 bp, Homo sapien
catattaaacacctgacaaagtaaa

SEQ ID NO: 2737444 - DNA, 25 bp, Homo sapien
catgcatagaggtggcaaaaacaca

SEQ ID NO: 2737445 - DNA, 25 bp, Homo sapien
tcaaactgaccaagaactgacacag

SEQ ID NO: 2737446 - DNA, 25 bp, Homo sapien
atggcttgaaccactgcacaccagg

SEQ ID NO: 2737447 - DNA, 25 bp, Homo sapien
agaatggcttgaaccactgcacacc

SEQ ID NO: 2737448 - DNA, 25 bp, Homo sapien
ggctgggtgacagaacgagactctg

SEQ ID NO: 2737449 - DNA, 25 bp, Homo sapien
gctgggtgacagaacgagactctgt

SEQ ID NO: 2737450 - DNA, 25 bp, Homo sapien
actagaagccatctaccttagtgct

SEQ ID NO: 2737451 - DNA, 25 bp, Homo sapien
aaaactagaagccatctaccttagt

SEQ ID NO: 2737452 - DNA, 25 bp, Homo sapien
gaagccatctaccttagtgctgctg

SEQ ID NO: 2737453 - DNA, 25 bp, Homo sapien
tagaagccatctaccttagtgctgc

SEQ ID NO: 2737454 - DNA, 25 bp, Homo sapien
tctaataacgggaagccactggacc

SEQ ID NO: 2737455 - DNA, 25 bp, Homo sapien
gcttatatccagagtttaggacccg

SEQ ID NO: 2737456 - DNA, 25 bp, Homo sapien
tatacacggagcctaggacattggg

SEQ ID NO: 2737457 - DNA, 25 bp, Homo sapien
cctaggatatggagcttatacccaa

SEQ ID NO: 2737458 - DNA, 25 bp, Homo sapien
caggcgagcgccgtgcgcgagagga

SEQ ID NO: 2737459 - DNA, 25 bp, Homo sapien
cctgggcaatctgagctgctgtacg

SEQ ID NO: 2737460 - DNA, 25 bp, Homo sapien
cgccgtgcgcgagaggagcaggcag

SEQ ID NO: 2737461 - DNA, 25 bp, Homo sapien
gctgtacgccctgctctggtctctg

SEQ ID NO: 2737462 - DNA, 25 bp, Homo sapien
tcacttttgccgagcagcggcagca

SEQ ID NO: 2737463 - DNA, 25 bp, Homo sapien
tcagccggcgggactttcacttttg

SEQ ID NO: 2737464 - DNA, 25 bp, Homo sapien
gcagcagcaccggatgtctccttcg

SEQ ID NO: 2737465 - DNA, 25 bp, Homo sapien
accttcgcgctggcccgtgagggca

SEQ ID NO: 2737466 - DNA, 25 bp, Homo sapien
ttcctcgggttatggacaccagggc

SEQ ID NO: 2737467 - DNA, 25 bp, Homo sapien
ggcagcgccttgtcccagtgagttt

SEQ ID NO: 2737468 - DNA, 25 bp, Homo sapien
cagacaccaggcttgaatcaggagg

SEQ ID NO: 2737469 - DNA, 25 bp, Homo sapien
gtcattaggtggctgtcagatccct

SEQ ID NO: 2737470 - DNA, 25 bp, Homo sapien
tctccgcggctgtctggctcctgat

SEQ ID NO: 2737471 - DNA, 25 bp, Homo sapien
cgccctctccgcggctgtctggctc

SEQ ID NO: 2737472 - DNA, 25 bp, Homo sapien
cgccgccctctccgcggctgtctgg

SEQ ID NO: 2737473 - DNA, 25 bp, Homo sapien
ccgcggctgtctggctcctgatttg

SEQ ID NO: 2737474 - DNA, 25 bp, Homo sapien
cacctcccaccctcaaaagcaccca

SEQ ID NO: 2737475 - DNA, 25 bp, Homo sapien
gagaaagaatgggtgatgctgatcc

SEQ ID NO: 2737476 - DNA, 25 bp, Homo sapien
atgctgatcccccaagcaaaatgga

SEQ ID NO: 2737477 - DNA, 25 bp, Homo sapien
caaaagcacccaacaacgggccctg

SEQ ID NO: 2737478 - DNA, 25 bp, Homo sapien
tgtccacaggcggacggactctcca

SEQ ID NO: 2737479 - DNA, 25 bp, Homo sapien
ctgctgtccacaggcggacggactc

SEQ ID NO: 2737480 - DNA, 25 bp, Homo sapien
cctcggctcctccacgtcagctcct

SEQ ID NO: 2737481 - DNA, 25 bp, Homo sapien
aggcggacggactctccaggagccc

SEQ ID NO: 2737482 - DNA, 25 bp, Homo sapien
taaattaatagaccacacctgaggg

SEQ ID NO: 2737483 - DNA, 25 bp, Homo sapien
aacactaagcggatggatgaaccac

SEQ ID NO: 2737484 - DNA, 25 bp, Homo sapien
ggacggatagaccacacctgagagt

SEQ ID NO: 2737485 - DNA, 25 bp, Homo sapien
tctcaacctgtgtgggaagactgga

SEQ ID NO: 2737486 - DNA, 25 bp, Homo sapien
cccaggagtctggtgataccctgtc

SEQ ID NO: 2737487 - DNA, 25 bp, Homo sapien
ggtcccaggagtctggtgataccct

SEQ ID NO: 2737488 - DNA, 25 bp, Homo sapien
ggcggaggtcccaggagtctggtga

SEQ ID NO: 2737489 - DNA, 25 bp, Homo sapien
gaggtcccaggagtctggtgatacc

SEQ ID NO: 2737490 - DNA, 25 bp, Homo sapien
aatagaataataccagagccaccct

SEQ ID NO: 2737491 - DNA, 25 bp, Homo sapien
gagggcagcttggtaaattatcata

SEQ ID NO: 2737492 - DNA, 25 bp, Homo sapien
gaagtgtaatattcatacagagaag

SEQ ID NO: 2737493 - DNA, 25 bp, Homo sapien
gagtgaatacgtctgggacaccagc

SEQ ID NO: 2737494 - DNA, 25 bp, Homo sapien
agtcaggcaagctgtccttgagccc

SEQ ID NO: 2737495 - DNA, 25 bp, Homo sapien
ctgaagaggcttcatccttatggct

SEQ ID NO: 2737496 - DNA, 25 bp, Homo sapien
gaagaggcttcatccttatggctgc

SEQ ID NO: 2737497 - DNA, 25 bp, Homo sapien
tccttatggctgcagtcaggcaagc

SEQ ID NO: 2737498 - DNA, 25 bp, Homo sapien
gtaagaaccctctgcacaggcccca

SEQ ID NO: 2737499 - DNA, 25 bp, Homo sapien
taagaaccctctgcacaggccccac

SEQ ID NO: 2737500 - DNA, 25 bp, Homo sapien
gagacggaggttgagccacagtggc

SEQ ID NO: 2737501 - DNA, 25 bp, Homo sapien
ggagacggaggttgagccacagtgg

SEQ ID NO: 2737502 - DNA, 25 bp, Homo sapien
aggagacggaggttgagccacagtg

SEQ ID NO: 2737503 - DNA, 25 bp, Homo sapien
gtatctgctaaaatcctggggtgtc

SEQ ID NO: 2737504 - DNA, 25 bp, Homo sapien
attcccaagtacgtacagattttat

SEQ ID NO: 2737505 - DNA, 25 bp, Homo sapien
acatagacacgctaaacctcgtctc

SEQ ID NO: 2737506 - DNA, 25 bp, Homo sapien
gctgtacatttatgacaggaatgac

SEQ ID NO: 2737507 - DNA, 25 bp, Homo sapien
tggcttccagtcatgggttttgttg

SEQ ID NO: 2737508 - DNA, 25 bp, Homo sapien
gggatggcttccagtcatgggtttt

SEQ ID NO: 2737509 - DNA, 25 bp, Homo sapien
cgcagaagacttatcggggatggct

SEQ ID NO: 2737510 - DNA, 25 bp, Homo sapien
cagaagacttatcggggatggcttc

SEQ ID NO: 2737511 - DNA, 25 bp, Homo sapien
gagaaaacctactcctgtcataggg

SEQ ID NO: 2737512 - DNA, 25 bp, Homo sapien
gtcatagggcagacttttgctggag

SEQ ID NO: 2737513 - DNA, 25 bp, Homo sapien
gaaaacctactcctgtcatagggca

SEQ ID NO: 2737514 - DNA, 25 bp, Homo sapien
catagggcagacttttgctggagaa

SEQ ID NO: 2737515 - DNA, 25 bp, Homo sapien
ggtcgggcacgcctcagtattccct

SEQ ID NO: 2737516 - DNA, 25 bp, Homo sapien
gaagtctgagtattttaccccgaga

SEQ ID NO: 2737517 - DNA, 25 bp, Homo sapien
ggttcagacccaactgagcagcagt

SEQ ID NO: 2737518 - DNA, 25 bp, Homo sapien
gatacccaacttccaatgcgctctg

SEQ ID NO: 2737519 - DNA, 25 bp, Homo sapien
gcagctgagcgtggcccacggacac

SEQ ID NO: 2737520 - DNA, 25 bp, Homo sapien
gcgtggcccacggacaccgcggcca

SEQ ID NO: 2737521 - DNA, 25 bp, Homo sapien
ctgagcgtggcccacggacaccgcg

SEQ ID NO: 2737522 - DNA, 25 bp, Homo sapien
gtggcccacggacaccgcggccacc

SEQ ID NO: 2737523 - DNA, 25 bp, Homo sapien
cggcagctgcgctcgtcgtccttgg

SEQ ID NO: 2737524 - DNA, 25 bp, Homo sapien
cgctcgtcgtccttggcgctctcca

SEQ ID NO: 2737525 - DNA, 25 bp, Homo sapien
tcgtccttggcgctctccagctctt

SEQ ID NO: 2737526 - DNA, 25 bp, Homo sapien
ctcgcggcccggcagctgcgctcgt

SEQ ID NO: 2737527 - DNA, 25 bp, Homo sapien
tgtaccttcttgtagttgttgcaac

SEQ ID NO: 2737528 - DNA, 25 bp, Homo sapien
taccttcttgtagttgttgcaactg

SEQ ID NO: 2737529 - DNA, 25 bp, Homo sapien
atgtaccttcttgtagttgttgcaa

SEQ ID NO: 2737530 - DNA, 25 bp, Homo sapien
accttcttgtagttgttgcaactgc

SEQ ID NO: 2737531 - DNA, 25 bp, Homo sapien
tctttcatgtaatttcgtcccactt

SEQ ID NO: 2737532 - DNA, 25 bp, Homo sapien
aggaagagttcagcattccgtatcc

SEQ ID NO: 2737533 - DNA, 25 bp, Homo sapien
gaagagttcagcattccgtatcctc

SEQ ID NO: 2737534 - DNA, 25 bp, Homo sapien
tttcgtcccacttgttcagtttcca

SEQ ID NO: 2737535 - DNA, 25 bp, Homo sapien
agctcaaccttcttgtcttcaaatt

SEQ ID NO: 2737536 - DNA, 25 bp, Homo sapien
cagctcaaccttcttgtcttcaaat

SEQ ID NO: 2737537 - DNA, 25 bp, Homo sapien
gctcaaccttcttgtcttcaaattc

SEQ ID NO: 2737538 - DNA, 25 bp, Homo sapien
ctttgactccagatagatggcctgg

SEQ ID NO: 2737539 - DNA, 25 bp, Homo sapien
ggatcatttggtcgcctccgcaact

SEQ ID NO: 2737540 - DNA, 25 bp, Homo sapien
tccgcaactttctggtcatgatagg

SEQ ID NO: 2737541 - DNA, 25 bp, Homo sapien
cattggctcctacagaactgatcac

SEQ ID NO: 2737542 - DNA, 25 bp, Homo sapien
tcagtaagttctggtctctgtagag

SEQ ID NO: 2737543 - DNA, 25 bp, Homo sapien
aaagtgccttaaagaatccactaca

SEQ ID NO: 2737544 - DNA, 25 bp, Homo sapien
taagttctggtctctgtagagccag

SEQ ID NO: 2737545 - DNA, 25 bp, Homo sapien
taaagaatccactacaatgctctcc

SEQ ID NO: 2737546 - DNA, 25 bp, Homo sapien
acttgtgcttgccacggcagctgcc

SEQ ID NO: 2737547 - DNA, 25 bp, Homo sapien
aagcccactaacatccatccgcttc

SEQ ID NO: 2737548 - DNA, 25 bp, Homo sapien
tccatccgcttcaacttgtgcttgc

SEQ ID NO: 2737549 - DNA, 25 bp, Homo sapien
ttgtgcttgccacggcagctgccca

SEQ ID NO: 2737550 - DNA, 25 bp, Homo sapien
ctccactctgcggagttcctcttct

SEQ ID NO: 2737551 - DNA, 25 bp, Homo sapien
cacctgcaggcgctgcgttttgtac

SEQ ID NO: 2737552 - DNA, 25 bp, Homo sapien
cactctgcggagttcctcttctgag

SEQ ID NO: 2737553 - DNA, 25 bp, Homo sapien
acctgcaggcgctgcgttttgtaca

SEQ ID NO: 2737554 - DNA, 25 bp, Homo sapien
cccagggagcgccttactgccgtaa

SEQ ID NO: 2737555 - DNA, 25 bp, Homo sapien
cagggagcgccttactgccgtaatg

SEQ ID NO: 2737556 - DNA, 25 bp, Homo sapien
ggagcgccttactgccgtaatggca

SEQ ID NO: 2737557 - DNA, 25 bp, Homo sapien
tggatgcccagggagcgccttactg

SEQ ID NO: 2737558 - DNA, 25 bp, Homo sapien
acttctggatggccggactctggcc

SEQ ID NO: 2737559 - DNA, 25 bp, Homo sapien
ctgtgcgctccaggcacttctggat

SEQ ID NO: 2737560 - DNA, 25 bp, Homo sapien
tgctgtgcgctccaggcacttctgg

SEQ ID NO: 2737561 - DNA, 25 bp, Homo sapien
cttgctgtgcgctccaggcacttct

SEQ ID NO: 2737562 - DNA, 25 bp, Homo sapien
gaagtcaagttctctgcgcccttcc

SEQ ID NO: 2737563 - DNA, 25 bp, Homo sapien
gcccttcccttctacattcgctagt

SEQ ID NO: 2737564 - DNA, 25 bp, Homo sapien
gctggcctggaaagcgcaaaaggtg

SEQ ID NO: 2737565 - DNA, 25 bp, Homo sapien
gaaagcgcaaaaggtgggaagtcaa

SEQ ID NO: 2737566 - DNA, 25 bp, Homo sapien
tctcttccgggcactctgtttcgga

SEQ ID NO: 2737567 - DNA, 25 bp, Homo sapien
gaatcgaatcgatccctttatcaat

SEQ ID NO: 2737568 - DNA, 25 bp, Homo sapien
agcttttcaggctcacgccggcggt

SEQ ID NO: 2737569 - DNA, 25 bp, Homo sapien
attcattaaatttccataggtgtca

SEQ ID NO: 2737570 - DNA, 25 bp, Homo sapien
gagcgtagtcaaccgaatctccacg

SEQ ID NO: 2737571 - DNA, 25 bp, Homo sapien
tggtaagagatactgcctgagtagc

SEQ ID NO: 2737572 - DNA, 25 bp, Homo sapien
ggaaggcctcagagacccgatagaa

SEQ ID NO: 2737573 - DNA, 25 bp, Homo sapien
aggagggccctcatgccggtttcca

SEQ ID NO: 2737574 - DNA, 25 bp, Homo sapien
tcacaagtggctccttgatgtccag

SEQ ID NO: 2737575 - DNA, 25 bp, Homo sapien
tgatgtccagtgacctatgaaaagt

SEQ ID NO: 2737576 - DNA, 25 bp, Homo sapien
gctccttgatgtccagtgacctatg

SEQ ID NO: 2737577 - DNA, 25 bp, Homo sapien
cctggttcacaagtggctccttgat

SEQ ID NO: 2737578 - DNA, 25 bp, Homo sapien
aaagaccaaagtcccttgccaggcg

SEQ ID NO: 2737579 - DNA, 25 bp, Homo sapien
aggacacactcatcccagccccaag

SEQ ID NO: 2737580 - DNA, 25 bp, Homo sapien
gtgcctccttcttctcacacaggac

SEQ ID NO: 2737581 - DNA, 25 bp, Homo sapien
gctgtggccacccaatctgccttgt

SEQ ID NO: 2737582 - DNA, 25 bp, Homo sapien
gtgttcacatttatcaaggccaatg

SEQ ID NO: 2737583 - DNA, 25 bp, Homo sapien
gccaagaaagccacatgaccattat

SEQ ID NO: 2737584 - DNA, 25 bp, Homo sapien
cacaggttaagccagatctaacatg

SEQ ID NO: 2737585 - DNA, 25 bp, Homo sapien
gattgcttcaataagaaattaggtg

SEQ ID NO: 2737586 - DNA, 25 bp, Homo sapien
gactgaacatataacgctggtcagc

SEQ ID NO: 2737587 - DNA, 25 bp, Homo sapien
atctaggactgaacatataacgctg

SEQ ID NO: 2737588 - DNA, 25 bp, Homo sapien
gaacatataacgctggtcagctttt

SEQ ID NO: 2737589 - DNA, 25 bp, Homo sapien
taggactgaacatataacgctggtc

SEQ ID NO: 2737590 - DNA, 25 bp, Homo sapien
tgatccctggcgctgggcaatccac

SEQ ID NO: 2737591 - DNA, 25 bp, Homo sapien
ggtctgagggtctgctcctcctgga

SEQ ID NO: 2737592 - DNA, 25 bp, Homo sapien
gaagccgaccgcctgactttgctgc

SEQ ID NO: 2737593 - DNA, 25 bp, Homo sapien
aggatgagactcatcggctgctggc

SEQ ID NO: 2737594 - DNA, 25 bp, Homo sapien
gcgatcccgcctggtccgcccttca

SEQ ID NO: 2737595 - DNA, 25 bp, Homo sapien
caagtctgcgatctagcccagaatc

SEQ ID NO: 2737596 - DNA, 25 bp, Homo sapien
ccagaatccgcgatcccgcctggtc

SEQ ID NO: 2737597 - DNA, 25 bp, Homo sapien
agtctgcgatctagcccagaatccg

SEQ ID NO: 2737598 - DNA, 25 bp, Homo sapien
gcctgtgctgcctgtccccggcttc

SEQ ID NO: 2737599 - DNA, 25 bp, Homo sapien
gccctgtggttcttccgattcggta

SEQ ID NO: 2737600 - DNA, 25 bp, Homo sapien
ggcttcgcccttgacagcgccctgt

SEQ ID NO: 2737601 - DNA, 25 bp, Homo sapien
ccacttccgcggcttcgcccttgac

SEQ ID NO: 2737602 - DNA, 25 bp, Homo sapien
tgagttctctcattaggcacctcct

SEQ ID NO: 2737603 - DNA, 25 bp, Homo sapien
ataacactgtgtatgcttagcttgg

SEQ ID NO: 2737604 - DNA, 25 bp, Homo sapien
gccgactcacggtattttttgatag

SEQ ID NO: 2737605 - DNA, 25 bp, Homo sapien
agcagctgaggctccgtttggcacc

SEQ ID NO: 2737606 - DNA, 25 bp, Homo sapien
gtggatacggatgtaaaacggacag

SEQ ID NO: 2737607 - DNA, 25 bp, Homo sapien
gtaaagaaccgatctacacaggtgg

SEQ ID NO: 2737608 - DNA, 25 bp, Homo sapien
gatctacacaggtggatacggatgt

SEQ ID NO: 2737609 - DNA, 25 bp, Homo sapien
cacaggtggatacggatgtaaaacg

SEQ ID NO: 2737610 - DNA, 25 bp, Homo sapien
tggattgtaagttttaagaatcttc

SEQ ID NO: 2737611 - DNA, 25 bp, Homo sapien
ctggattgtaagttttaagaatctt

SEQ ID NO: 2737612 - DNA, 25 bp, Homo sapien
gctgcaggagttcatttatatgcag

SEQ ID NO: 2737613 - DNA, 25 bp, Homo sapien
taacaggtaatacagttcacccttg

SEQ ID NO: 2737614 - DNA, 25 bp, Homo sapien
tacgagaaagggattgttgagttcc

SEQ ID NO: 2737615 - DNA, 25 bp, Homo sapien
taaagatacttccttagtgacacaa

SEQ ID NO: 2737616 - DNA, 25 bp, Homo sapien
caaacagagtatacagtagtacccc

SEQ ID NO: 2737617 - DNA, 25 bp, Homo sapien
gagcataaccgggaccttattagaa

SEQ ID NO: 2737618 - DNA, 25 bp, Homo sapien
tgatatctacaagtgaaccgcagta

SEQ ID NO: 2737619 - DNA, 25 bp, Homo sapien
tttcaggaccaaaacatgacgggca

SEQ ID NO: 2737620 - DNA, 25 bp, Homo sapien
gaacaaactggctggcctcgatgag

SEQ ID NO: 2737621 - DNA, 25 bp, Homo sapien
cccaataagcacgagtgtgaacaaa

SEQ ID NO: 2737622 - DNA, 25 bp, Homo sapien
ggatggtaagagaacaccttggctg

SEQ ID NO: 2737623 - DNA, 25 bp, Homo sapien
gggctggctatcgtgtggatggtaa

SEQ ID NO: 2737624 - DNA, 25 bp, Homo sapien
aacggattggcccagaatgcatggc

SEQ ID NO: 2737625 - DNA, 25 bp, Homo sapien
ggcccagaatgcatggctaccaaca

SEQ ID NO: 2737626 - DNA, 25 bp, Homo sapien
gattggcccagaatgcatggctacc

SEQ ID NO: 2737627 - DNA, 25 bp, Homo sapien
aaacagcttggaataacggattggc

SEQ ID NO: 2737628 - DNA, 25 bp, Homo sapien
tgggcccagtcagatcgagtgtcaa

SEQ ID NO: 2737629 - DNA, 25 bp, Homo sapien
tcagatcgagtgtcaacatctggcc

SEQ ID NO: 2737630 - DNA, 25 bp, Homo sapien
ccagtcagatcgagtgtcaacatct

SEQ ID NO: 2737631 - DNA, 25 bp, Homo sapien
atcgagtgtcaacatctggcctggg

SEQ ID NO: 2737632 - DNA, 25 bp, Homo sapien
tccatggggatggcaatgtacacca

SEQ ID NO: 2737633 - DNA, 25 bp, Homo sapien
ccatggggatggcaatgtacaccaa

SEQ ID NO: 2737634 - DNA, 25 bp, Homo sapien
ctccatggggatggcaatgtacacc

SEQ ID NO: 2737635 - DNA, 25 bp, Homo sapien
gagaaacctggctgacaccagtgaa

SEQ ID NO: 2737636 - DNA, 25 bp, Homo sapien
ggatgaagacagctgggaagccctg

SEQ ID NO: 2737637 - DNA, 25 bp, Homo sapien
tggatgaagacagctgggaagccct

SEQ ID NO: 2737638 - DNA, 25 bp, Homo sapien
ctggatgaagacagctgggaagccc

SEQ ID NO: 2737639 - DNA, 25 bp, Homo sapien
atgaagacagctgggaagccctggg

SEQ ID NO: 2737640 - DNA, 25 bp, Homo sapien
cacgtggatgacagagatcttcttg

SEQ ID NO: 2737641 - DNA, 25 bp, Homo sapien
tcacgtggatgacagagatcttctt

SEQ ID NO: 2737642 - DNA, 25 bp, Homo sapien
ctgtcacgtggatgacagagatctt

SEQ ID NO: 2737643 - DNA, 25 bp, Homo sapien
cgtggatgacagagatcttcttggc

SEQ ID NO: 2737644 - DNA, 25 bp, Homo sapien
ttgtcacggtgtcagtgctatatga

SEQ ID NO: 2737645 - DNA, 25 bp, Homo sapien
cggtgtcagtgctatatgattgttc

SEQ ID NO: 2737646 - DNA, 25 bp, Homo sapien
aagtcctttgacaaagctttgtcac

SEQ ID NO: 2737647 - DNA, 25 bp, Homo sapien
gtcctttgacaaagctttgtcacgg

SEQ ID NO: 2737648 - DNA, 25 bp, Homo sapien
cttggatgctaaggacagggggctg

SEQ ID NO: 2737649 - DNA, 25 bp, Homo sapien
ccttaggcaaccttggatgctaagg

SEQ ID NO: 2737650 - DNA, 25 bp, Homo sapien
cccttaggcaaccttggatgctaag

SEQ ID NO: 2737651 - DNA, 25 bp, Homo sapien
tcccttaggcaaccttggatgctaa

SEQ ID NO: 2737652 - DNA, 25 bp, Homo sapien
caccaggtcctcatcgtaatctagg

SEQ ID NO: 2737653 - DNA, 25 bp, Homo sapien
gaacgcccaggacatcttcagatga

SEQ ID NO: 2737654 - DNA, 25 bp, Homo sapien
tcagatgaagcttcctgcaccaggt

SEQ ID NO: 2737655 - DNA, 25 bp, Homo sapien
catatgaacgcccaggacatcttca

SEQ ID NO: 2737656 - DNA, 25 bp, Homo sapien
ttccagaatacgtactgtctctctc

SEQ ID NO: 2737657 - DNA, 25 bp, Homo sapien
tccagaatacgtactgtctctctct

SEQ ID NO: 2737658 - DNA, 25 bp, Homo sapien
tagtcgccgtagttgccgtttcatc

SEQ ID NO: 2737659 - DNA, 25 bp, Homo sapien
catcgcctcttggtacttcttccat

SEQ ID NO: 2737660 - DNA, 25 bp, Homo sapien
ggtacttcttccatgtgctgtatag

SEQ ID NO: 2737661 - DNA, 25 bp, Homo sapien
tataggtggagctcccgtagtcgcc

SEQ ID NO: 2737662 - DNA, 25 bp, Homo sapien
tgagctgagcacacagaaaccatga

SEQ ID NO: 2737663 - DNA, 25 bp, Homo sapien
catgactaggctgagggatacaagg

SEQ ID NO: 2737664 - DNA, 25 bp, Homo sapien
tgagcacacagaaaccatgactagg

SEQ ID NO: 2737665 - DNA, 25 bp, Homo sapien
cacagaaaccatgactaggctgagg

SEQ ID NO: 2737666 - DNA, 25 bp, Homo sapien
gagaagatgaggaccagggtaacat

SEQ ID NO: 2737667 - DNA, 25 bp, Homo sapien
ttccttcggttcttatttggtgctg

SEQ ID NO: 2737668 - DNA, 25 bp, Homo sapien
tgaggaccagggtaacatccaagtt

SEQ ID NO: 2737669 - DNA, 25 bp, Homo sapien
ttcttatttggtgctgtgtcttggg

SEQ ID NO: 2737670 - DNA, 25 bp, Homo sapien
acactggctccagcactaggacagc

SEQ ID NO: 2737671 - DNA, 25 bp, Homo sapien
tcacactggctccagcactaggaca

SEQ ID NO: 2737672 - DNA, 25 bp, Homo sapien
cacactggctccagcactaggacag

SEQ ID NO: 2737673 - DNA, 25 bp, Homo sapien
tttgccggtgtggctgggtccacct

SEQ ID NO: 2737674 - DNA, 25 bp, Homo sapien
gccggtgtggctgggtccacctgca

SEQ ID NO: 2737675 - DNA, 25 bp, Homo sapien
tctttgccggtgtggctgggtccac

SEQ ID NO: 2737676 - DNA, 25 bp, Homo sapien
tgccggtgtggctgggtccacctgc

SEQ ID NO: 2737677 - DNA, 25 bp, Homo sapien
gtggctgcctgtaatggtggagtct

SEQ ID NO: 2737678 - DNA, 25 bp, Homo sapien
gcctgtaatggtggagtcttccaat

SEQ ID NO: 2737679 - DNA, 25 bp, Homo sapien
gctgcctgtaatggtggagtcttcc

SEQ ID NO: 2737680 - DNA, 25 bp, Homo sapien
tgcctgtaatggtggagtcttccaa

SEQ ID NO: 2737681 - DNA, 25 bp, Homo sapien
ttccactttggtcttttctgttgct

SEQ ID NO: 2737682 - DNA, 25 bp, Homo sapien
gtgcagaggaaggacttgctgacat

SEQ ID NO: 2737683 - DNA, 25 bp, Homo sapien
tgcaggtgcagaggaaggacttgct

SEQ ID NO: 2737684 - DNA, 25 bp, Homo sapien
cttctgcaggtgcagaggaaggact

SEQ ID NO: 2737685 - DNA, 25 bp, Homo sapien
tttcaggacattccaccggcttttc

SEQ ID NO: 2737686 - DNA, 25 bp, Homo sapien
atttcaggacattccaccggctttt

SEQ ID NO: 2737687 - DNA, 25 bp, Homo sapien
caggacattccaccggcttttcttg

SEQ ID NO: 2737688 - DNA, 25 bp, Homo sapien
acattccaccggcttttcttgctgg

SEQ ID NO: 2737689 - DNA, 25 bp, Homo sapien
aagagctgcacgttgaacatgcata

SEQ ID NO: 2737690 - DNA, 25 bp, Homo sapien
gcacgttgaacatgcatagcttcct

SEQ ID NO: 2737691 - DNA, 25 bp, Homo sapien
tgcacgttgaacatgcatagcttcc

SEQ ID NO: 2737692 - DNA, 25 bp, Homo sapien
agagctgcacgttgaacatgcatag

SEQ ID NO: 2737693 - DNA, 25 bp, Homo sapien
tgcccctgggccctaagaggagcag

SEQ ID NO: 2737694 - DNA, 25 bp, Homo sapien
aggaggtctcatgacacagggtggg

SEQ ID NO: 2737695 - DNA, 25 bp, Homo sapien
ctgagccatgttgacatccccacgt

SEQ ID NO: 2737696 - DNA, 25 bp, Homo sapien
caagtctgagccatgttgacatccc

SEQ ID NO: 2737697 - DNA, 25 bp, Homo sapien
tcaagtctgagccatgttgacatcc

SEQ ID NO: 2737698 - DNA, 25 bp, Homo sapien
gccatgttgacatccccacgtcggg

SEQ ID NO: 2737699 - DNA, 25 bp, Homo sapien
acatttcccgaaatgatcacgatcc

SEQ ID NO: 2737700 - DNA, 25 bp, Homo sapien
tttcccgaaatgatcacgatccaca

SEQ ID NO: 2737701 - DNA, 25 bp, Homo sapien
ggagtaacacatttcccgaaatgat

SEQ ID NO: 2737702 - DNA, 25 bp, Homo sapien
aacacatttcccgaaatgatcacga

SEQ ID NO: 2737703 - DNA, 25 bp, Homo sapien
agtaaacaaaacttcagaaagaatg

SEQ ID NO: 2737704 - DNA, 25 bp, Homo sapien
aaaatggaaacaatacaagaacaat

SEQ ID NO: 2737705 - DNA, 25 bp, Homo sapien
aaacaatacaagaacaatttgtgcc

SEQ ID NO: 2737706 - DNA, 25 bp, Homo sapien
gcacaaaagtctatcaaaattacaa

SEQ ID NO: 2737707 - DNA, 25 bp, Homo sapien
aaactagtgtggcataggtcactgt

SEQ ID NO: 2737708 - DNA, 25 bp, Homo sapien
gcttgtcagtaatgtaagtttctca

SEQ ID NO: 2737709 - DNA, 25 bp, Homo sapien
cttccaagcttgtcagtaatgtaag

SEQ ID NO: 2737710 - DNA, 25 bp, Homo sapien
cattttccaataaactagtgtggca

SEQ ID NO: 2737711 - DNA, 25 bp, Homo sapien
taaaacactctaagatcagatacat

SEQ ID NO: 2737712 - DNA, 25 bp, Homo sapien
tgcaattaacattaagagtctcaaa

SEQ ID NO: 2737713 - DNA, 25 bp, Homo sapien
tcagatacatttaggtcaataattc

SEQ ID NO: 2737714 - DNA, 25 bp, Homo sapien
gacttagccatttcacctccaataa

SEQ ID NO: 2737715 - DNA, 25 bp, Homo sapien
taaaacaggctctaaggtagtgact

SEQ ID NO: 2737716 - DNA, 25 bp, Homo sapien
ctaggatcacctgtaggtaacttaa

SEQ ID NO: 2737717 - DNA, 25 bp, Homo sapien
ctgactaggatcacctgtaggtaac

SEQ ID NO: 2737718 - DNA, 25 bp, Homo sapien
gactaggatcacctgtaggtaactt

SEQ ID NO: 2737719 - DNA, 25 bp, Homo sapien
tgactaggatcacctgtaggtaact

SEQ ID NO: 2737720 - DNA, 25 bp, Homo sapien
gggaaggtgcaggcatttcttatca

SEQ ID NO: 2737721 - DNA, 25 bp, Homo sapien
aggtggcaaatgctagccactggtt

SEQ ID NO: 2737722 - DNA, 25 bp, Homo sapien
cactggttgatctgaatgaagaata

SEQ ID NO: 2737723 - DNA, 25 bp, Homo sapien
gcaaatgctagccactggttgatct

SEQ ID NO: 2737724 - DNA, 25 bp, Homo sapien
gaaactgacactttaggctactgtt

SEQ ID NO: 2737725 - DNA, 25 bp, Homo sapien
ggttgaaactgacactttaggctac

SEQ ID NO: 2737726 - DNA, 25 bp, Homo sapien
ttgaaactgacactttaggctactg

SEQ ID NO: 2737727 - DNA, 25 bp, Homo sapien
actgacactttaggctactgttttc

SEQ ID NO: 2737728 - DNA, 25 bp, Homo sapien
ttgaaatgtcctgacgaagttcccc

SEQ ID NO: 2737729 - DNA, 25 bp, Homo sapien
gcatgcctatcagtgagaaggtgcc

SEQ ID NO: 2737730 - DNA, 25 bp, Homo sapien
ggtgcctgacaattctcagttgaaa

SEQ ID NO: 2737731 - DNA, 25 bp, Homo sapien
tgtctgcttatgagctgcaccaccg

SEQ ID NO: 2737732 - DNA, 25 bp, Homo sapien
tgaagaattctaatcttcaaaaaat

SEQ ID NO: 2737733 - DNA, 25 bp, Homo sapien
tagaactcagtcagaacttgagaac

SEQ ID NO: 2737734 - DNA, 25 bp, Homo sapien
acttgagaacttctttcagtaggtg

SEQ ID NO: 2737735 - DNA, 25 bp, Homo sapien
caaaaaattttagaactcagtcaga

SEQ ID NO: 2737736 - DNA, 25 bp, Homo sapien
ctacaggagcccacaaccatgcctg

SEQ ID NO: 2737737 - DNA, 25 bp, Homo sapien
tgtgagccaccacgctcggcctttt

SEQ ID NO: 2737738 - DNA, 25 bp, Homo sapien
gagccaccacgctcggccttttttg

SEQ ID NO: 2737739 - DNA, 25 bp, Homo sapien
actacaggagcccacaaccatgcct

SEQ ID NO: 2737740 - DNA, 25 bp, Homo sapien
tccgtatgctgagtgccggtctcct

SEQ ID NO: 2737741 - DNA, 25 bp, Homo sapien
gcagcgaaaggaaaggctcacaggt

SEQ ID NO: 2737742 - DNA, 25 bp, Homo sapien
tcttgctgagacactgaaaatggta

SEQ ID NO: 2737743 - DNA, 25 bp, Homo sapien
tcacaggttttcttgctgacaccct

SEQ ID NO: 2737744 - DNA, 25 bp, Homo sapien
tcttctgaggcccgagcatgctcat

SEQ ID NO: 2737745 - DNA, 25 bp, Homo sapien
gcctcttctgaggcccgagcatgct

SEQ ID NO: 2737746 - DNA, 25 bp, Homo sapien
gagcctcttctgaggcccgagcatg

SEQ ID NO: 2737747 - DNA, 25 bp, Homo sapien
ccacagcggaggacactagaggcga

SEQ ID NO: 2737748 - DNA, 25 bp, Homo sapien
aggcttgcggatgatcagcccgtct

SEQ ID NO: 2737749 - DNA, 25 bp, Homo sapien
tctcactggggtctaaccagacctt

SEQ ID NO: 2737750 - DNA, 25 bp, Homo sapien
cccgtctttgatgagcttccggatc

SEQ ID NO: 2737751 - DNA, 25 bp, Homo sapien
ggtctcactggggtctaaccagacc

SEQ ID NO: 2737752 - DNA, 25 bp, Homo sapien
caaggtgtttttccggcatcgagcc

SEQ ID NO: 2737753 - DNA, 25 bp, Homo sapien
atcgagcccgggaatggaccgtcac

SEQ ID NO: 2737754 - DNA, 25 bp, Homo sapien
ggccaaggtgtttttccggcatcga

SEQ ID NO: 2737755 - DNA, 25 bp, Homo sapien
tgtttttccggcatcgagcccggga

SEQ ID NO: 2737756 - DNA, 25 bp, Homo sapien
ctgctcacctatggccacgtgcctg

SEQ ID NO: 2737757 - DNA, 25 bp, Homo sapien
ttctgctcacctatggccacgtgcc

SEQ ID NO: 2737758 - DNA, 25 bp, Homo sapien
gtacccttctgctcacctatggcca

SEQ ID NO: 2737759 - DNA, 25 bp, Homo sapien
ccttctgctcacctatggccacgtg

SEQ ID NO: 2737760 - DNA, 25 bp, Homo sapien
tggataaagtcttgatgaactcctc

SEQ ID NO: 2737761 - DNA, 25 bp, Homo sapien
ccttggataaagtcttgatgaactc

SEQ ID NO: 2737762 - DNA, 25 bp, Homo sapien
ctccttggataaagtcttgatgaac

SEQ ID NO: 2737763 - DNA, 25 bp, Homo sapien
cttggataaagtcttgatgaactcc

SEQ ID NO: 2737764 - DNA, 25 bp, Homo sapien
tcatggctgatctatgtaatcacag

SEQ ID NO: 2737765 - DNA, 25 bp, Homo sapien
attttcatggctgatctatgtaatc

SEQ ID NO: 2737766 - DNA, 25 bp, Homo sapien
agaggccagtatgtacagacaaagg

SEQ ID NO: 2737767 - DNA, 25 bp, Homo sapien
tcacagaggccagtatgtacagaca

SEQ ID NO: 2737768 - DNA, 25 bp, Homo sapien
tatatcgttaagagtgaaactgctg

SEQ ID NO: 2737769 - DNA, 25 bp, Homo sapien
tgtatgtcttcaccaacacaggata

SEQ ID NO: 2737770 - DNA, 25 bp, Homo sapien
catggctaacatgcacaggagactt

SEQ ID NO: 2737771 - DNA, 25 bp, Homo sapien
tcctacctgtctgtggagcacatga

SEQ ID NO: 2737772 - DNA, 25 bp, Homo sapien
gtgaatgtggtctatctccctaaga

SEQ ID NO: 2737773 - DNA, 25 bp, Homo sapien
tggaaccacggatcaagcgggattg

SEQ ID NO: 2737774 - DNA, 25 bp, Homo sapien
aagaggagttccatgctttgcaccc

SEQ ID NO: 2737775 - DNA, 25 bp, Homo sapien
tttgcaccctgagcatagattggct

SEQ ID NO: 2737776 - DNA, 25 bp, Homo sapien
tgtctccccaaggcgccagtgtttc

SEQ ID NO: 2737777 - DNA, 25 bp, Homo sapien
tctcacatagatggctgtggccgag

SEQ ID NO: 2737778 - DNA, 25 bp, Homo sapien
gtctcacatagatggctgtggccga

SEQ ID NO: 2737779 - DNA, 25 bp, Homo sapien
aggaatgcatttctagacaaaaggg

SEQ ID NO: 2737780 - DNA, 25 bp, Homo sapien
cacacataagccacagccttctttg

SEQ ID NO: 2737781 - DNA, 25 bp, Homo sapien
ttgcccagattggtgcttaaactcc

SEQ ID NO: 2737782 - DNA, 25 bp, Homo sapien
gctttgctcctaggggattccctca

SEQ ID NO: 2737783 - DNA, 25 bp, Homo sapien
tgtcctggtgttgctcacagacgtc

SEQ ID NO: 2737784 - DNA, 25 bp, Homo sapien
gattagatacatgaagaggctgtcc

SEQ ID NO: 2737785 - DNA, 25 bp, Homo sapien
tccacagttggacagaacgaggttt

SEQ ID NO: 2737786 - DNA, 25 bp, Homo sapien
tccaccacgtggcaataacgagaag

SEQ ID NO: 2737787 - DNA, 25 bp, Homo sapien
gcttctgtcccaaacccgcagccag

SEQ ID NO: 2737788 - DNA, 25 bp, Homo sapien
ggcttctgtcccaaacccgcagcca

SEQ ID NO: 2737789 - DNA, 25 bp, Homo sapien
cttctgtcccaaacccgcagccagg

SEQ ID NO: 2737790 - DNA, 25 bp, Homo sapien
gaagctgaagccgatggcctcagtg

SEQ ID NO: 2737791 - DNA, 25 bp, Homo sapien
tgtgaagctgaagccgatggcctca

SEQ ID NO: 2737792 - DNA, 25 bp, Homo sapien
ggtgtgaagctgaagccgatggcct

SEQ ID NO: 2737793 - DNA, 25 bp, Homo sapien
tgaagctgaagccgatggcctcagt

SEQ ID NO: 2737794 - DNA, 25 bp, Homo sapien
ctgcccacaagcaccgctctctcct

SEQ ID NO: 2737795 - DNA, 25 bp, Homo sapien
gcccacaagcaccgctctctccttt

SEQ ID NO: 2737796 - DNA, 25 bp, Homo sapien
ccacaagcaccgctctctcctttcc

SEQ ID NO: 2737797 - DNA, 25 bp, Homo sapien
cacaagcaccgctctctcctttccc

SEQ ID NO: 2737798 - DNA, 25 bp, Homo sapien
gtctgtcttcctgcatccatgctgt

SEQ ID NO: 2737799 - DNA, 25 bp, Homo sapien
cttcgttgttgtgggtctgtggtct

SEQ ID NO: 2737800 - DNA, 25 bp, Homo sapien
tggtctgtcttcctgcatccatgct

SEQ ID NO: 2737801 - DNA, 25 bp, Homo sapien
tgtgggtctgtggtctgtcttcctg

SEQ ID NO: 2737802 - DNA, 25 bp, Homo sapien
gccgggactgcgtgccgggtcggag

SEQ ID NO: 2737803 - DNA, 25 bp, Homo sapien
tcgcctgccccaaaggcggagggaa

SEQ ID NO: 2737804 - DNA, 25 bp, Homo sapien
cgcggatttgaaccctcctgcaagg

SEQ ID NO: 2737805 - DNA, 25 bp, Homo sapien
ccggagccggattggcgagggaggg

SEQ ID NO: 2737806 - DNA, 25 bp, Homo sapien
gaccctgcacgggtcgtggagagaa

SEQ ID NO: 2737807 - DNA, 25 bp, Homo sapien
caagccacattctccacaggtcctg

SEQ ID NO: 2737808 - DNA, 25 bp, Homo sapien
gaacatcagagcaaaaagccgggga

SEQ ID NO: 2737809 - DNA, 25 bp, Homo sapien
tccctgagctgggagcggcaaaccc

SEQ ID NO: 2737810 - DNA, 25 bp, Homo sapien
ttgtcaaagcgaccccgttctggca

SEQ ID NO: 2737811 - DNA, 25 bp, Homo sapien
cgaggtcttgctgaagtcacccgcg

SEQ ID NO: 2737812 - DNA, 25 bp, Homo sapien
tgcaggtagctgaggaactcacgct

SEQ ID NO: 2737813 - DNA, 25 bp, Homo sapien
tcacccgcgcgagaatgttcccggt

SEQ ID NO: 2737814 - DNA, 25 bp, Homo sapien
cacaccttgtaaggggcatgggcaa

SEQ ID NO: 2737815 - DNA, 25 bp, Homo sapien
cccacaccttgtaaggggcatgggc

SEQ ID NO: 2737816 - DNA, 25 bp, Homo sapien
cttgtaaggggcatgggcaaaggtg

SEQ ID NO: 2737817 - DNA, 25 bp, Homo sapien
tccccacaccttgtaaggggcatgg

SEQ ID NO: 2737818 - DNA, 25 bp, Homo sapien
gacgccagactttgcatggatagga

SEQ ID NO: 2737819 - DNA, 25 bp, Homo sapien
cccgccgtaggcttgaacactgagg

SEQ ID NO: 2737820 - DNA, 25 bp, Homo sapien
ttgggtccttgagaggcccggtcca

SEQ ID NO: 2737821 - DNA, 25 bp, Homo sapien
acggctcccatttcctcggcagagg

SEQ ID NO: 2737822 - DNA, 25 bp, Homo sapien
cttcctcctctggtcgtgcactggg

SEQ ID NO: 2737823 - DNA, 25 bp, Homo sapien
tggtcgtgcactggggtcagcctct

SEQ ID NO: 2737824 - DNA, 25 bp, Homo sapien
tcgctgcgctcagccttctgggtca

SEQ ID NO: 2737825 - DNA, 25 bp, Homo sapien
acatacaggcgcttcagctcagcca

SEQ ID NO: 2737826 - DNA, 25 bp, Homo sapien
gggaggacgcaagcaaagtagggtg

SEQ ID NO: 2737827 - DNA, 25 bp, Homo sapien
gcagaagaagggaccggcaatggag

SEQ ID NO: 2737828 - DNA, 25 bp, Homo sapien
tctcggagccctgtgtcatctctca

SEQ ID NO: 2737829 - DNA, 25 bp, Homo sapien
gagtctcggagccctgtgtcatctc

SEQ ID NO: 2737830 - DNA, 25 bp, Homo sapien
tccagtgcctggttgcggcggtaca

SEQ ID NO: 2737831 - DNA, 25 bp, Homo sapien
tcagatcttggaggactcgagccgg

SEQ ID NO: 2737832 - DNA, 25 bp, Homo sapien
cggctgccccgaagttgtgtcttca

SEQ ID NO: 2737833 - DNA, 25 bp, Homo sapien
gctgctgcttcaagaggctaatctc

SEQ ID NO: 2737834 - DNA, 25 bp, Homo sapien
tgagccggccgtctcagggcacctt

SEQ ID NO: 2737835 - DNA, 25 bp, Homo sapien
tctgacctgcccttcgggaccttgg

SEQ ID NO: 2737836 - DNA, 25 bp, Homo sapien
caggagggccttgtcctggctcctg

SEQ ID NO: 2737837 - DNA, 25 bp, Homo sapien
ccaccccaaccagtgcaagggaagg

SEQ ID NO: 2737838 - DNA, 25 bp, Homo sapien
gagccattgtcccagagatttccgt

SEQ ID NO: 2737839 - DNA, 25 bp, Homo sapien
cagtcactatttggagcggccttca

SEQ ID NO: 2737840 - DNA, 25 bp, Homo sapien
aatatctgaaccgtcactgcagggc

SEQ ID NO: 2737841 - DNA, 25 bp, Homo sapien
ttaataatgccctagagccccgttg

SEQ ID NO: 2737842 - DNA, 25 bp, Homo sapien
ttatgagatgctagggaaagggctc

SEQ ID NO: 2737843 - DNA, 25 bp, Homo sapien
tcctcagaagagatggtatcacctt

SEQ ID NO: 2737844 - DNA, 25 bp, Homo sapien
aacaaaggctgtcttgtcatgcaga

SEQ ID NO: 2737845 - DNA, 25 bp, Homo sapien
gttcaaagcattcagcctcccacag

SEQ ID NO: 2737846 - DNA, 25 bp, Homo sapien
ggcttccggcgccactgtcatcgga

SEQ ID NO: 2737847 - DNA, 25 bp, Homo sapien
ggcgccactgtcatcggaaccggaa

SEQ ID NO: 2737848 - DNA, 25 bp, Homo sapien
cgcccattggcggttttgcggaggg

SEQ ID NO: 2737849 - DNA, 25 bp, Homo sapien
ccactgtcatcggaaccggaagccg

SEQ ID NO: 2737850 - DNA, 25 bp, Homo sapien
caagcccaagggcagattgttcggg

SEQ ID NO: 2737851 - DNA, 25 bp, Homo sapien
ctgcgaagagaacaagcccaagggc

SEQ ID NO: 2737852 - DNA, 25 bp, Homo sapien
cttagtcgtgggtagcaggggttct

SEQ ID NO: 2737853 - DNA, 25 bp, Homo sapien
gagaacaagcccaagggcagattgt

SEQ ID NO: 2737854 - DNA, 25 bp, Homo sapien
cacgaggactggacgtttgagtccg

SEQ ID NO: 2737855 - DNA, 25 bp, Homo sapien
gcggtcgcacgaggactggacgttt

SEQ ID NO: 2737856 - DNA, 25 bp, Homo sapien
tcacttccgacccagcgcggtcgca

SEQ ID NO: 2737857 - DNA, 25 bp, Homo sapien
ggacgtttgagtccgagcaactccc

SEQ ID NO: 2737858 - DNA, 25 bp, Homo sapien
aaggctgcagtcagccatgattatg

SEQ ID NO: 2737859 - DNA, 25 bp, Homo sapien
ctgcattccagcctgagcaagagtg

SEQ ID NO: 2737860 - DNA, 25 bp, Homo sapien
gtcagccatgattatgccactgcat

SEQ ID NO: 2737861 - DNA, 25 bp, Homo sapien
ccactgcattccagcctgagcaaga

SEQ ID NO: 2737862 - DNA, 25 bp, Homo sapien
atagtaacataaaccataaaggccg

SEQ ID NO: 2737863 - DNA, 25 bp, Homo sapien
tgctgtctcatagctgcgtgccctg

SEQ ID NO: 2737864 - DNA, 25 bp, Homo sapien
atgctggcctgacggacttgcccag

SEQ ID NO: 2737865 - DNA, 25 bp, Homo sapien
taaaggccgtccttgagtggctgat

SEQ ID NO: 2737866 - DNA, 25 bp, Homo sapien
tggggagggtcagctgggtcaggcc

SEQ ID NO: 2737867 - DNA, 25 bp, Homo sapien
ctggggagggtcagctgggtcaggc

SEQ ID NO: 2737868 - DNA, 25 bp, Homo sapien
gagggtcagctgggtcaggccccat

SEQ ID NO: 2737869 - DNA, 25 bp, Homo sapien
gggagggtcagctgggtcaggcccc

SEQ ID NO: 2737870 - DNA, 25 bp, Homo sapien
gcccgtaggtcaggaacttctgcag

SEQ ID NO: 2737871 - DNA, 25 bp, Homo sapien
gcagctggcccacgtagtgcagcag

SEQ ID NO: 2737872 - DNA, 25 bp, Homo sapien
tggcccacgtagtgcagcagctcct

SEQ ID NO: 2737873 - DNA, 25 bp, Homo sapien
tccgctcacagtgctgcccgtaggt

SEQ ID NO: 2737874 - DNA, 25 bp, Homo sapien
gcaggtaccaacatcctcatcatcg

SEQ ID NO: 2737875 - DNA, 25 bp, Homo sapien
agtagcttcgggtctcccatgtcct

SEQ ID NO: 2737876 - DNA, 25 bp, Homo sapien
ttccggaaccctgtcactcagtagc

SEQ ID NO: 2737877 - DNA, 25 bp, Homo sapien
caaggaggcctacagatgcaggtac

SEQ ID NO: 2737878 - DNA, 25 bp, Homo sapien
catcagctagtggaaaaacatggca

SEQ ID NO: 2737879 - DNA, 25 bp, Homo sapien
gatgatctggcacttactatgggtc

SEQ ID NO: 2737880 - DNA, 25 bp, Homo sapien
tgtaaatatgctgaaaaccgctgag

SEQ ID NO: 2737881 - DNA, 25 bp, Homo sapien
tagagttaccacctgatccagcagt

SEQ ID NO: 2737882 - DNA, 25 bp, Homo sapien
gagagagggtggctgagagaggggt

SEQ ID NO: 2737883 - DNA, 25 bp, Homo sapien
cagagagagggtggctgagagaggg

SEQ ID NO: 2737884 - DNA, 25 bp, Homo sapien
gagagggtggctgagagaggggtcc

SEQ ID NO: 2737885 - DNA, 25 bp, Homo sapien
caccagagagagggtggctgagaga

SEQ ID NO: 2737886 - DNA, 25 bp, Homo sapien
tgatcttccggcagcactgtgacat

SEQ ID NO: 2737887 - DNA, 25 bp, Homo sapien
gcaccgtatctttgatcttccggca

SEQ ID NO: 2737888 - DNA, 25 bp, Homo sapien
cccactcgggatacactgctgtgaa

SEQ ID NO: 2737889 - DNA, 25 bp, Homo sapien
gtccgaagccagtttctgcaccgta

SEQ ID NO: 2737890 - DNA, 25 bp, Homo sapien
ttgctggctctccttcgagtccttg

SEQ ID NO: 2737891 - DNA, 25 bp, Homo sapien
agggcctggtgatgcgggcactctt

SEQ ID NO: 2737892 - DNA, 25 bp, Homo sapien
cctggtgatgcgggcactcttgctg

SEQ ID NO: 2737893 - DNA, 25 bp, Homo sapien
tccttcgagtccttgtacatcccag

SEQ ID NO: 2737894 - DNA, 25 bp, Homo sapien
aacaccacagatctcagagtcgaag

SEQ ID NO: 2737895 - DNA, 25 bp, Homo sapien
gagcatgccctgctgatacaggtgt

SEQ ID NO: 2737896 - DNA, 25 bp, Homo sapien
caggtgttccacgatggccatctgc

SEQ ID NO: 2737897 - DNA, 25 bp, Homo sapien
accgcatctgacacaacaccacaga

SEQ ID NO: 2737898 - DNA, 25 bp, Homo sapien
tccaagtccacattcagcgttgatt

SEQ ID NO: 2737899 - DNA, 25 bp, Homo sapien
cagggcttccaggattcgattcaac

SEQ ID NO: 2737900 - DNA, 25 bp, Homo sapien
tcgattcaactctaggaaaggctgc

SEQ ID NO: 2737901 - DNA, 25 bp, Homo sapien
caggtcttgttcgtgcagggcttcc

SEQ ID NO: 2737902 - DNA, 25 bp, Homo sapien
cgaagcagaatgctgctggcccacc

SEQ ID NO: 2737903 - DNA, 25 bp, Homo sapien
tgtgaggctcttgagacagggctgc

SEQ ID NO: 2737904 - DNA, 25 bp, Homo sapien
tgaagaccacagtcaagccctgtgc

SEQ ID NO: 2737905 - DNA, 25 bp, Homo sapien
tgcaggcaagtcaagtacatctggg

SEQ ID NO: 2737906 - DNA, 25 bp, Homo sapien
agtcggtgcagcttgaactccaggg

SEQ ID NO: 2737907 - DNA, 25 bp, Homo sapien
cctcctgccaagaggcggatgaagt

SEQ ID NO: 2737908 - DNA, 25 bp, Homo sapien
gctggtgcagccgagcaaagggctg

SEQ ID NO: 2737909 - DNA, 25 bp, Homo sapien
caaagggctggaagtgccgagcata

SEQ ID NO: 2737910 - DNA, 25 bp, Homo sapien
tcagggaggcatacgaggcagaaca

SEQ ID NO: 2737911 - DNA, 25 bp, Homo sapien
gtgtaacagacagccccacatgggt

SEQ ID NO: 2737912 - DNA, 25 bp, Homo sapien
catggcatgctctaaatgagtgtgg

SEQ ID NO: 2737913 - DNA, 25 bp, Homo sapien
cctgggtggtctgcgctgaagctat

SEQ ID NO: 2737914 - DNA, 25 bp, Homo sapien
agcacaatatgctgagcccggtggc

SEQ ID NO: 2737915 - DNA, 25 bp, Homo sapien
acagcacaatatgctgagcccggtg

SEQ ID NO: 2737916 - DNA, 25 bp, Homo sapien
cagcacaatatgctgagcccggtgg

SEQ ID NO: 2737917 - DNA, 25 bp, Homo sapien
cacagcacaatatgctgagcccggt

SEQ ID NO: 2737918 - DNA, 25 bp, Homo sapien
ctgacgctaaggggggactccacag

SEQ ID NO: 2737919 - DNA, 25 bp, Homo sapien
caggtacaccaggctgcccatcatc

SEQ ID NO: 2737920 - DNA, 25 bp, Homo sapien
gacgctaaggggggactccacagaa

SEQ ID NO: 2737921 - DNA, 25 bp, Homo sapien
gcgtcccgggtaaaggtctcacaga

SEQ ID NO: 2737922 - DNA, 25 bp, Homo sapien
tgaaagcaccgagcactgttcctgg

SEQ ID NO: 2737923 - DNA, 25 bp, Homo sapien
aaatggtgcacggtcaaatcggtcc

SEQ ID NO: 2737924 - DNA, 25 bp, Homo sapien
caagtgcccattattccctgcgagg

SEQ ID NO: 2737925 - DNA, 25 bp, Homo sapien
tagagtggctcagatcacagcagac

SEQ ID NO: 2737926 - DNA, 25 bp, Homo sapien
tgttcatcaacacaggcagcgccac

SEQ ID NO: 2737927 - DNA, 25 bp, Homo sapien
tgatgttcatcaacacaggcagcgc

SEQ ID NO: 2737928 - DNA, 25 bp, Homo sapien
atgttcatcaacacaggcagcgcca

SEQ ID NO: 2737929 - DNA, 25 bp, Homo sapien
gatgttcatcaacacaggcagcgcc

SEQ ID NO: 2737930 - DNA, 25 bp, Homo sapien
gtacctcttgcccacgattccccag

SEQ ID NO: 2737931 - DNA, 25 bp, Homo sapien
gcgaagcgggtgagttccacttcct

SEQ ID NO: 2737932 - DNA, 25 bp, Homo sapien
ggctgtcctccccagtacctcttgc

SEQ ID NO: 2737933 - DNA, 25 bp, Homo sapien
gcagcgaagcgggtgagttccactt

SEQ ID NO: 2737934 - DNA, 25 bp, Homo sapien
caagcgaacacggagtggtaccagc

SEQ ID NO: 2737935 - DNA, 25 bp, Homo sapien
tccattaatgagcttattgagtgca

SEQ ID NO: 2737936 - DNA, 25 bp, Homo sapien
ggaatctgacgtctgctggcggagg

SEQ ID NO: 2737937 - DNA, 25 bp, Homo sapien
agtgcatctcgggagataacatggc

SEQ ID NO: 2737938 - DNA, 25 bp, Homo sapien
tgctccatgggacagtagggacact

SEQ ID NO: 2737939 - DNA, 25 bp, Homo sapien
cgtttcccatctgccgggttctgct

SEQ ID NO: 2737940 - DNA, 25 bp, Homo sapien
tgatgcgtttcccatctgccgggtt

SEQ ID NO: 2737941 - DNA, 25 bp, Homo sapien
gctccatgggacagtagggacactt

SEQ ID NO: 2737942 - DNA, 25 bp, Homo sapien
gagacagaccaaggctcacaggtga

SEQ ID NO: 2737943 - DNA, 25 bp, Homo sapien
tcttcctcagcagagagcccaaagg

SEQ ID NO: 2737944 - DNA, 25 bp, Homo sapien
ttcttgggataaagcaggaggccct

SEQ ID NO: 2737945 - DNA, 25 bp, Homo sapien
gatgcttcacccatgttagtccggt

SEQ ID NO: 2737946 - DNA, 25 bp, Homo sapien
cactcacagtgaaaggcgcttaaca

SEQ ID NO: 2737947 - DNA, 25 bp, Homo sapien
tgtcaaacaggcagatggctatagg

SEQ ID NO: 2737948 - DNA, 25 bp, Homo sapien
ggagttttcagcacatagatggcac

SEQ ID NO: 2737949 - DNA, 25 bp, Homo sapien
gacagagggcccaatcttgagatgt

SEQ ID NO: 2737950 - DNA, 25 bp, Homo sapien
gctcaacggcatctaacctagctgg

SEQ ID NO: 2737951 - DNA, 25 bp, Homo sapien
tcaagagatcaataatgttgggcag

SEQ ID NO: 2737952 - DNA, 25 bp, Homo sapien
tacacgttgtgatagatagccatga

SEQ ID NO: 2737953 - DNA, 25 bp, Homo sapien
caagaagtgaaactgtaggtgctca

SEQ ID NO: 2737954 - DNA, 25 bp, Homo sapien
tttgattcgcgcaggcgcgagccgc

SEQ ID NO: 2737955 - DNA, 25 bp, Homo sapien
gcccgcaggccggacatcccgctcg

SEQ ID NO: 2737956 - DNA, 25 bp, Homo sapien
cggacatcccgctcgcacggcgcgc

SEQ ID NO: 2737957 - DNA, 25 bp, Homo sapien
agcccgacgcgaccccggcgcatca

SEQ ID NO: 2737958 - DNA, 25 bp, Homo sapien
cgctatgctcgccatgaccgctgag

SEQ ID NO: 2737959 - DNA, 25 bp, Homo sapien
ctatgctcgccatgaccgctgagtc

SEQ ID NO: 2737960 - DNA, 25 bp, Homo sapien
gctatgctcgccatgaccgctgagt

SEQ ID NO: 2737961 - DNA, 25 bp, Homo sapien
cttcctcctggctcaggtgcttcac

SEQ ID NO: 2737962 - DNA, 25 bp, Homo sapien
ctgggcttcctcctggctcaggtgc

SEQ ID NO: 2737963 - DNA, 25 bp, Homo sapien
gcttcctcctggctcaggtgcttca

SEQ ID NO: 2737964 - DNA, 25 bp, Homo sapien
gggcttcctcctggctcaggtgctt

SEQ ID NO: 2737965 - DNA, 25 bp, Homo sapien
tcgttgaatagctcctggtccacga

SEQ ID NO: 2737966 - DNA, 25 bp, Homo sapien
cgttgaatagctcctggtccacgac

SEQ ID NO: 2737967 - DNA, 25 bp, Homo sapien
ggacagtaggggagctcctggacat

SEQ ID NO: 2737968 - DNA, 25 bp, Homo sapien
gccacagatgaccaggacagtaggg

SEQ ID NO: 2737969 - DNA, 25 bp, Homo sapien
gggccacagatgaccaggacagtag

SEQ ID NO: 2737970 - DNA, 25 bp, Homo sapien
tattccccgggccacagatgaccag

SEQ ID NO: 2737971 - DNA, 25 bp, Homo sapien
aaagagtttgaggtgcgcagcacag

SEQ ID NO: 2737972 - DNA, 25 bp, Homo sapien
atggttggccggttagccaaagagt

SEQ ID NO: 2737973 - DNA, 25 bp, Homo sapien
tagatggttggccggttagccaaag

SEQ ID NO: 2737974 - DNA, 25 bp, Homo sapien
taatagatggttggccggttagcca

SEQ ID NO: 2737975 - DNA, 25 bp, Homo sapien
cacggggtcaccaacgcaatgaaga

SEQ ID NO: 2737976 - DNA, 25 bp, Homo sapien
ctgacacggggtcaccaacgcaatg

SEQ ID NO: 2737977 - DNA, 25 bp, Homo sapien
cggggtcaccaacgcaatgaagagg

SEQ ID NO: 2737978 - DNA, 25 bp, Homo sapien
tcaccaacgcaatgaagaggggctg

SEQ ID NO: 2737979 - DNA, 25 bp, Homo sapien
cagctcaatcatcacgggctctgag

SEQ ID NO: 2737980 - DNA, 25 bp, Homo sapien
gctcatacagctcaatcatcacggg

SEQ ID NO: 2737981 - DNA, 25 bp, Homo sapien
catcacgggctctgagcgcatttcc

SEQ ID NO: 2737982 - DNA, 25 bp, Homo sapien
cagctcatacagctcaatcatcacg

SEQ ID NO: 2737983 - DNA, 25 bp, Homo sapien
tcaggatgctgtggaacgttcccga

SEQ ID NO: 2737984 - DNA, 25 bp, Homo sapien
aggatgctgtggaacgttcccgaac

SEQ ID NO: 2737985 - DNA, 25 bp, Homo sapien
caggatgctgtggaacgttcccgaa

SEQ ID NO: 2737986 - DNA, 25 bp, Homo sapien
tgctgaggcctcgccccagtcagcc

SEQ ID NO: 2737987 - DNA, 25 bp, Homo sapien
gccgcactcaagctcgcgctgctga

SEQ ID NO: 2737988 - DNA, 25 bp, Homo sapien
agccaagctccgtcccgcgcggtgc

SEQ ID NO: 2737989 - DNA, 25 bp, Homo sapien
cggtgccgccgcctgacaatgccga

SEQ ID NO: 2737990 - DNA, 25 bp, Homo sapien
ggcgacagcgcgtcaggccggcgcg

SEQ ID NO: 2737991 - DNA, 25 bp, Homo sapien
gacagcgcgtcaggccggcgcggct

SEQ ID NO: 2737992 - DNA, 25 bp, Homo sapien
ggcgcggctcccgccagagctcccg

SEQ ID NO: 2737993 - DNA, 25 bp, Homo sapien
agcggcgacagcgcgtcaggccggc

SEQ ID NO: 2737994 - DNA, 25 bp, Homo sapien
gcctcatgtccgttctcggtggcgc

SEQ ID NO: 2737995 - DNA, 25 bp, Homo sapien
gacggcctcatgtccgttctcggtg

SEQ ID NO: 2737996 - DNA, 25 bp, Homo sapien
tcgccttcggggacggcctcatgtc

SEQ ID NO: 2737997 - DNA, 25 bp, Homo sapien
gggacggcctcatgtccgttctcgg

SEQ ID NO: 2737998 - DNA, 25 bp, Homo sapien
cgccgcggcgcccgtgccagccccg

SEQ ID NO: 2737999 - DNA, 25 bp, Homo sapien
ccgcggcgcccgtgccagccccggc

SEQ ID NO: 2738000 - DNA, 25 bp, Homo sapien
gccgcggcgcccgtgccagccccgg

SEQ ID NO: 2738001 - DNA, 25 bp, Homo sapien
gccctcggcgccgttctgattcccg

SEQ ID NO: 2738002 - DNA, 25 bp, Homo sapien
gcgtcctcctcgttcttgctggcgt

SEQ ID NO: 2738003 - DNA, 25 bp, Homo sapien
gcgttgatctggtcgccctcggcgc

SEQ ID NO: 2738004 - DNA, 25 bp, Homo sapien
ctcgttcttgctggcgttgatctgg

SEQ ID NO: 2738005 - DNA, 25 bp, Homo sapien
tccgagcgctttccctcttccgggc

SEQ ID NO: 2738006 - DNA, 25 bp, Homo sapien
gggtgagacacacggcaacaagtct

SEQ ID NO: 2738007 - DNA, 25 bp, Homo sapien
cttgtaagcaagctgtgattttgga

SEQ ID NO: 2738008 - DNA, 25 bp, Homo sapien
cagctacccttagagtctgcaagga

SEQ ID NO: 2738009 - DNA, 25 bp, Homo sapien
ctggcaaagttctcacgaagtctac

SEQ ID NO: 2738010 - DNA, 25 bp, Homo sapien
gaccgtccagtgttgggatccattt

SEQ ID NO: 2738011 - DNA, 25 bp, Homo sapien
ttttgctagtatcccagctcaggcc

SEQ ID NO: 2738012 - DNA, 25 bp, Homo sapien
tttattgtacagtcaacgacctctc

SEQ ID NO: 2738013 - DNA, 25 bp, Homo sapien
tccacactggctgcatctttgaaca

SEQ ID NO: 2738014 - DNA, 25 bp, Homo sapien
tgtttagcgccgtacccagaatagg

SEQ ID NO: 2738015 - DNA, 25 bp, Homo sapien
ttcatcaaacctcaagtacagctgg

SEQ ID NO: 2738016 - DNA, 25 bp, Homo sapien
gctggtttacctcgacacctagaaa

SEQ ID NO: 2738017 - DNA, 25 bp, Homo sapien
taagccataaagacaccagtacaga

SEQ ID NO: 2738018 - DNA, 25 bp, Homo sapien
ctttttagggtcaatgacacggcca

SEQ ID NO: 2738019 - DNA, 25 bp, Homo sapien
caaactcgccaaagtactccctgat

SEQ ID NO: 2738020 - DNA, 25 bp, Homo sapien
tcaggattcagacccccaacgaaga

SEQ ID NO: 2738021 - DNA, 25 bp, Homo sapien
tcttcaccgggtccttcttcatagc

SEQ ID NO: 2738022 - DNA, 25 bp, Homo sapien
aaagaaggcagccttaggggcagct

SEQ ID NO: 2738023 - DNA, 25 bp, Homo sapien
ctgcctgggagggtctagccagcca

SEQ ID NO: 2738024 - DNA, 25 bp, Homo sapien
caaggataccaaggaccagaaagaa

SEQ ID NO: 2738025 - DNA, 25 bp, Homo sapien
gggcagctgatgggctattcccaga

SEQ ID NO: 2738026 - DNA, 25 bp, Homo sapien
tccattggcaattcaatggcctcaa

SEQ ID NO: 2738027 - DNA, 25 bp, Homo sapien
ccattggcaattcaatggcctcaat

SEQ ID NO: 2738028 - DNA, 25 bp, Homo sapien
cctgtcccaccttatctggctgcca

SEQ ID NO: 2738029 - DNA, 25 bp, Homo sapien
gagttccacctgtcccaccttatct

SEQ ID NO: 2738030 - DNA, 25 bp, Homo sapien
tccacctgtcccaccttatctggct

SEQ ID NO: 2738031 - DNA, 25 bp, Homo sapien
cacctgtcccaccttatctggctgc

SEQ ID NO: 2738032 - DNA, 25 bp, Homo sapien
aaatatgctagtatgggaggccacc

SEQ ID NO: 2738033 - DNA, 25 bp, Homo sapien
cagagaacccttccgacagaatgca

SEQ ID NO: 2738034 - DNA, 25 bp, Homo sapien
tacacgctattgagaaggcgagcct

SEQ ID NO: 2738035 - DNA, 25 bp, Homo sapien
tctaatggaggcaggcaactgggcc

SEQ ID NO: 2738036 - DNA, 25 bp, Homo sapien
gctgctgctgatagacttctttggg

SEQ ID NO: 2738037 - DNA, 25 bp, Homo sapien
tgctgctgctgatagacttctttgg

SEQ ID NO: 2738038 - DNA, 25 bp, Homo sapien
aacaggacctatcttcatccacgtt

SEQ ID NO: 2738039 - DNA, 25 bp, Homo sapien
gaaacaggacctatcttcatccacg

SEQ ID NO: 2738040 - DNA, 25 bp, Homo sapien
gggaaacaggacctatcttcatcca

SEQ ID NO: 2738041 - DNA, 25 bp, Homo sapien
ggaaacaggacctatcttcatccac

SEQ ID NO: 2738042 - DNA, 25 bp, Homo sapien
cctggttccagtagttgccgtagcc

SEQ ID NO: 2738043 - DNA, 25 bp, Homo sapien
tgctggtagccgtagccctggttcc

SEQ ID NO: 2738044 - DNA, 25 bp, Homo sapien
ccatagggcgagtagtcgtagccgc

SEQ ID NO: 2738045 - DNA, 25 bp, Homo sapien
gggccgtagccgtaatagccatagg

SEQ ID NO: 2738046 - DNA, 25 bp, Homo sapien
cccgaagtctaaggctcaaaatcaa

SEQ ID NO: 2738047 - DNA, 25 bp, Homo sapien
cacgcgcttgatatgcatcttccca

SEQ ID NO: 2738048 - DNA, 25 bp, Homo sapien
tagggacgagaacaaccatagcagc

SEQ ID NO: 2738049 - DNA, 25 bp, Homo sapien
tcctcatgttattaagaccccgaag

SEQ ID NO: 2738050 - DNA, 25 bp, Homo sapien
cacgtcgctggctcttgccgtagtt

SEQ ID NO: 2738051 - DNA, 25 bp, Homo sapien
cgtcgctggctcttgccgtagtttg

SEQ ID NO: 2738052 - DNA, 25 bp, Homo sapien
gtagttattctgatggccaccacgt

SEQ ID NO: 2738053 - DNA, 25 bp, Homo sapien
gtcgctggctcttgccgtagtttgt

SEQ ID NO: 2738054 - DNA, 25 bp, Homo sapien
catatccaaacaaagcatgtgtgcg

SEQ ID NO: 2738055 - DNA, 25 bp, Homo sapien
gcctaaacacctagagctctggaaa

SEQ ID NO: 2738056 - DNA, 25 bp, Homo sapien
tcagcccatgatggcgctatggcct

SEQ ID NO: 2738057 - DNA, 25 bp, Homo sapien
ggtgacactggtttcctaagataca

SEQ ID NO: 2738058 - DNA, 25 bp, Homo sapien
tagcttgcacttgatggcaggaaca

SEQ ID NO: 2738059 - DNA, 25 bp, Homo sapien
tggagttgggctccaatccagccaa

SEQ ID NO: 2738060 - DNA, 25 bp, Homo sapien
ttatgccctaaataccagacctgga

SEQ ID NO: 2738061 - DNA, 25 bp, Homo sapien
caggaggagcactattgtgccccaa

SEQ ID NO: 2738062 - DNA, 25 bp, Homo sapien
gaaacagatcccaagttcagcccgt

SEQ ID NO: 2738063 - DNA, 25 bp, Homo sapien
cagttaccctgctaggtggcaagag

SEQ ID NO: 2738064 - DNA, 25 bp, Homo sapien
tggcaagagctagatctggccccag

SEQ ID NO: 2738065 - DNA, 25 bp, Homo sapien
tattcaaattgtgagacacgcgtgg

SEQ ID NO: 2738066 - DNA, 25 bp, Homo sapien
gaacattccaacaaatcgtaggtgg

SEQ ID NO: 2738067 - DNA, 25 bp, Homo sapien
gcaggcgattacagtgtatctggga

SEQ ID NO: 2738068 - DNA, 25 bp, Homo sapien
ggccactcacacagtacagacatct

SEQ ID NO: 2738069 - DNA, 25 bp, Homo sapien
tgccccccagataatttctaggaag

SEQ ID NO: 2738070 - DNA, 25 bp, Homo sapien
gactctagtcttagactgcttgggc

SEQ ID NO: 2738071 - DNA, 25 bp, Homo sapien
gacataatgatactaggtacccact

SEQ ID NO: 2738072 - DNA, 25 bp, Homo sapien
gaagtgaaaccagttgacagtcacc

SEQ ID NO: 2738073 - DNA, 25 bp, Homo sapien
tggaaagaaagggagtctgagactc

SEQ ID NO: 2738074 - DNA, 25 bp, Homo sapien
gtcacatactcgcacttaggcctca

SEQ ID NO: 2738075 - DNA, 25 bp, Homo sapien
cccagtgggcaagcgaagaaatgaa

SEQ ID NO: 2738076 - DNA, 25 bp, Homo sapien
gcccgggtaaggtaccagtcacata

SEQ ID NO: 2738077 - DNA, 25 bp, Homo sapien
tatgcacaaggcgactcaaagactg

SEQ ID NO: 2738078 - DNA, 25 bp, Homo sapien
gtctccaggaagctggtatcacagc

SEQ ID NO: 2738079 - DNA, 25 bp, Homo sapien
ccaggaagctggtatcacagcccat

SEQ ID NO: 2738080 - DNA, 25 bp, Homo sapien
tctccaggaagctggtatcacagcc

SEQ ID NO: 2738081 - DNA, 25 bp, Homo sapien
cctgtcaacgtctccaggaagctgg

SEQ ID NO: 2738082 - DNA, 25 bp, Homo sapien
cactgggaggcctgagcaggctggg

SEQ ID NO: 2738083 - DNA, 25 bp, Homo sapien
ctgggcctggtgagggatgagggca

SEQ ID NO: 2738084 - DNA, 25 bp, Homo sapien
cagcagctccccagtcactgggagg

SEQ ID NO: 2738085 - DNA, 25 bp, Homo sapien
tgggcctggtgagggatgagggcac

SEQ ID NO: 2738086 - DNA, 25 bp, Homo sapien
tcctctgtgtaggcagctctggcag

SEQ ID NO: 2738087 - DNA, 25 bp, Homo sapien
gcgtccctcaggcttgacactggga

SEQ ID NO: 2738088 - DNA, 25 bp, Homo sapien
gtccctcaggcttgacactgggagc

SEQ ID NO: 2738089 - DNA, 25 bp, Homo sapien
gcgggcgtccctcaggcttgacact

SEQ ID NO: 2738090 - DNA, 25 bp, Homo sapien
agccccgcgggcgtccctcaggctt

SEQ ID NO: 2738091 - DNA, 25 bp, Homo sapien
gcctggagaaggggcgctgtgactg

SEQ ID NO: 2738092 - DNA, 25 bp, Homo sapien
gagaaggggcgctgtgactgtcggg

SEQ ID NO: 2738093 - DNA, 25 bp, Homo sapien
ctggagaaggggcgctgtgactgtc

SEQ ID NO: 2738094 - DNA, 25 bp, Homo sapien
ctggcctggagaaggggcgctgtga

SEQ ID NO: 2738095 - DNA, 25 bp, Homo sapien
ctgtcgggaattaaagacgaagctg

SEQ ID NO: 2738096 - DNA, 25 bp, Homo sapien
ggccatgacaggactgtcgggaatt

SEQ ID NO: 2738097 - DNA, 25 bp, Homo sapien
caggactgtcgggaattaaagacga

SEQ ID NO: 2738098 - DNA, 25 bp, Homo sapien
tgacaggactgtcgggaattaaaga

SEQ ID NO: 2738099 - DNA, 25 bp, Homo sapien
cctcgagcatcggagaggatgctgc

SEQ ID NO: 2738100 - DNA, 25 bp, Homo sapien
tcgagcatcggagaggatgctgcct

SEQ ID NO: 2738101 - DNA, 25 bp, Homo sapien
cagcctcgagcatcggagaggatgc

SEQ ID NO: 2738102 - DNA, 25 bp, Homo sapien
cccaggacccagttgggtgccggca

SEQ ID NO: 2738103 - DNA, 25 bp, Homo sapien
ctgtgccgctgtcaggtcctgtgcg

SEQ ID NO: 2738104 - DNA, 25 bp, Homo sapien
ggctgtgccgctgtcaggtcctgtg

SEQ ID NO: 2738105 - DNA, 25 bp, Homo sapien
gcagcaagacgcagcgtggctgtgc

SEQ ID NO: 2738106 - DNA, 25 bp, Homo sapien
caagacgcagcgtggctgtgccgct

SEQ ID NO: 2738107 - DNA, 25 bp, Homo sapien
caaaagctagcgcattcctgggata

SEQ ID NO: 2738108 - DNA, 25 bp, Homo sapien
taacccaaaagctagcgcattcctg

SEQ ID NO: 2738109 - DNA, 25 bp, Homo sapien
aaaattaacccaaaagctagcgcat

SEQ ID NO: 2738110 - DNA, 25 bp, Homo sapien
tagcgcattcctgggatagatgtcc

SEQ ID NO: 2738111 - DNA, 25 bp, Homo sapien
gagagccagcgcacaagcctggttg

SEQ ID NO: 2738112 - DNA, 25 bp, Homo sapien
tgtgaccattttcctagcaagagag

SEQ ID NO: 2738113 - DNA, 25 bp, Homo sapien
tgttcgccggaacgttctgtgacca

SEQ ID NO: 2738114 - DNA, 25 bp, Homo sapien
aatgcaggcacagaattccacaggc

SEQ ID NO: 2738115 - DNA, 25 bp, Homo sapien
agcatgtttcagagctgttgggcag

SEQ ID NO: 2738116 - DNA, 25 bp, Homo sapien
cagccgaggaattagagcatgtttc

SEQ ID NO: 2738117 - DNA, 25 bp, Homo sapien
tgtgactaagatccagagggaccgt

SEQ ID NO: 2738118 - DNA, 25 bp, Homo sapien
cagtggcctaattgaaggtgggtca

SEQ ID NO: 2738119 - DNA, 25 bp, Homo sapien
acctgaggtgttggcctggtctgca

SEQ ID NO: 2738120 - DNA, 25 bp, Homo sapien
ggcttcttagctggagaatcccaga

SEQ ID NO: 2738121 - DNA, 25 bp, Homo sapien
tgcaggcctgcagatagggtgatcc

SEQ ID NO: 2738122 - DNA, 25 bp, Homo sapien
cccactcaggagatggtccataaat

SEQ ID NO: 2738123 - DNA, 25 bp, Homo sapien
caccctctgggtgggacattccatg

SEQ ID NO: 2738124 - DNA, 25 bp, Homo sapien
ttgactggaggcactgacaagagct

SEQ ID NO: 2738125 - DNA, 25 bp, Homo sapien
aacttaggagggcatcactggtgca

SEQ ID NO: 2738126 - DNA, 25 bp, Homo sapien
cagtctgatccggagaccgtgacca

SEQ ID NO: 2738127 - DNA, 25 bp, Homo sapien
ccagcagtcctgctgccagcgttgg

SEQ ID NO: 2738128 - DNA, 25 bp, Homo sapien
ctgccgcctgtgagggtaccagcag

SEQ ID NO: 2738129 - DNA, 25 bp, Homo sapien
ctgtgagggtaccagcagtcctgct

SEQ ID NO: 2738130 - DNA, 25 bp, Homo sapien
gtcctgctgccagcgttggcaacat

SEQ ID NO: 2738131 - DNA, 25 bp, Homo sapien
ggccacccagcaccgacacagcctg

SEQ ID NO: 2738132 - DNA, 25 bp, Homo sapien
ttgatgaacccagaatgggtctccc

SEQ ID NO: 2738133 - DNA, 25 bp, Homo sapien
ggtctccctggtttttgcaaactca

SEQ ID NO: 2738134 - DNA, 25 bp, Homo sapien
tagtagaaatcctcgccggcggttg

SEQ ID NO: 2738135 - DNA, 25 bp, Homo sapien
cagcggtcgtggtcattgtagtaga

SEQ ID NO: 2738136 - DNA, 25 bp, Homo sapien
ccccttggctacctcacgggccctg

SEQ ID NO: 2738137 - DNA, 25 bp, Homo sapien
ccagctgccccttggctacctcacg

SEQ ID NO: 2738138 - DNA, 25 bp, Homo sapien
ttggctacctcacgggccctgtcca

SEQ ID NO: 2738139 - DNA, 25 bp, Homo sapien
ccttggctacctcacgggccctgtc

SEQ ID NO: 2738140 - DNA, 25 bp, Homo sapien
tgcgaagcgtgactttcctgcctga

SEQ ID NO: 2738141 - DNA, 25 bp, Homo sapien
ggattccggcctgggacatgactgt

SEQ ID NO: 2738142 - DNA, 25 bp, Homo sapien
tcattcatcgtgagcgtcctgacac

SEQ ID NO: 2738143 - DNA, 25 bp, Homo sapien
ttgatgtcaggtaggaagtggtccc

SEQ ID NO: 2738144 - DNA, 25 bp, Homo sapien
cagcttcttgaagtcttgcaccttc

SEQ ID NO: 2738145 - DNA, 25 bp, Homo sapien
gaaagtatctagcttagggcctgtg

SEQ ID NO: 2738146 - DNA, 25 bp, Homo sapien
ttagagttgatttccggcgaggcct

SEQ ID NO: 2738147 - DNA, 25 bp, Homo sapien
cttcttggtgagaccaggacagcga

SEQ ID NO: 2738148 - DNA, 25 bp, Homo sapien
tgcttagtttctgggagccatccca

SEQ ID NO: 2738149 - DNA, 25 bp, Homo sapien
gaagatgcttagtttctgggagcca

SEQ ID NO: 2738150 - DNA, 25 bp, Homo sapien
ttctgggagccatcccagtcctgct

SEQ ID NO: 2738151 - DNA, 25 bp, Homo sapien
tagtttctgggagccatcccagtcc

SEQ ID NO: 2738152 - DNA, 25 bp, Homo sapien
taagccccaggtgcgtagcatttct

SEQ ID NO: 2738153 - DNA, 25 bp, Homo sapien
tagctagagacccagcaaagaccct

SEQ ID NO: 2738154 - DNA, 25 bp, Homo sapien
acagctgctcgaggttaagccccag

SEQ ID NO: 2738155 - DNA, 25 bp, Homo sapien
tgtttgccaagtccaaagccgaatg

SEQ ID NO: 2738156 - DNA, 25 bp, Homo sapien
tagctcatctgcagcaggagacagt

SEQ ID NO: 2738157 - DNA, 25 bp, Homo sapien
ttagctcatctgcagcaggagacag

SEQ ID NO: 2738158 - DNA, 25 bp, Homo sapien
gcaggagacagtgagagccggtgca

SEQ ID NO: 2738159 - DNA, 25 bp, Homo sapien
gcagcaggagacagtgagagccggt

SEQ ID NO: 2738160 - DNA, 25 bp, Homo sapien
gccggtggggaggtgaagcagccat

SEQ ID NO: 2738161 - DNA, 25 bp, Homo sapien
agccgacacccacagccggtgggga

SEQ ID NO: 2738162 - DNA, 25 bp, Homo sapien
ctgcagccgacacccacagccggtg

SEQ ID NO: 2738163 - DNA, 25 bp, Homo sapien
gcagccgacacccacagccggtggg

SEQ ID NO: 2738164 - DNA, 25 bp, Homo sapien
tggagctgccaatcccaaaccaaga

SEQ ID NO: 2738165 - DNA, 25 bp, Homo sapien
gggcctggagctgccaatcccaaac

SEQ ID NO: 2738166 - DNA, 25 bp, Homo sapien
gccaatcccaaaccaagagattcaa

SEQ ID NO: 2738167 - DNA, 25 bp, Homo sapien
gggggcctggagctgccaatcccaa

SEQ ID NO: 2738168 - DNA, 25 bp, Homo sapien
tgcaccagaggatggaggacgcagc

SEQ ID NO: 2738169 - DNA, 25 bp, Homo sapien
accagaggatggaggacgcagcgcc

SEQ ID NO: 2738170 - DNA, 25 bp, Homo sapien
agaggatggaggacgcagcgcccat

SEQ ID NO: 2738171 - DNA, 25 bp, Homo sapien
ctggtgcaccagaggatggaggacg

SEQ ID NO: 2738172 - DNA, 25 bp, Homo sapien
gaaaatgcactaagcgcagcagctc

SEQ ID NO: 2738173 - DNA, 25 bp, Homo sapien
taaaggaaatgtctgacgtgaccgc

SEQ ID NO: 2738174 - DNA, 25 bp, Homo sapien
tggacatcatcggaagactcggagc

SEQ ID NO: 2738175 - DNA, 25 bp, Homo sapien
caagctagtgctgatgtgtattcca

SEQ ID NO: 2738176 - DNA, 25 bp, Homo sapien
cacattgtacgatggcagcctgcat

SEQ ID NO: 2738177 - DNA, 25 bp, Homo sapien
aaaagagagccacattgtacgatgg

SEQ ID NO: 2738178 - DNA, 25 bp, Homo sapien
gagagccacattgtacgatggcagc

SEQ ID NO: 2738179 - DNA, 25 bp, Homo sapien
gagccacattgtacgatggcagcct

SEQ ID NO: 2738180 - DNA, 25 bp, Homo sapien
tgggaagtaggcgtttggatgatat

SEQ ID NO: 2738181 - DNA, 25 bp, Homo sapien
gtgggaagtaggcgtttggatgata

SEQ ID NO: 2738182 - DNA, 25 bp, Homo sapien
gggaagtaggcgtttggatgatatg

SEQ ID NO: 2738183 - DNA, 25 bp, Homo sapien
agtgggaagtaggcgtttggatgat

SEQ ID NO: 2738184 - DNA, 25 bp, Homo sapien
ctgctggtgccccaggacagtttct

SEQ ID NO: 2738185 - DNA, 25 bp, Homo sapien
gctggtgccccaggacagtttctga

SEQ ID NO: 2738186 - DNA, 25 bp, Homo sapien
tgctggtgccccaggacagtttctg

SEQ ID NO: 2738187 - DNA, 25 bp, Homo sapien
caggccacggcctgaagggtggcag

SEQ ID NO: 2738188 - DNA, 25 bp, Homo sapien
aggccacggcctgaagggtggcagc

SEQ ID NO: 2738189 - DNA, 25 bp, Homo sapien
tcctctcgaggtgtgaagtttcctg

SEQ ID NO: 2738190 - DNA, 25 bp, Homo sapien
ccaggtcacatcctctcgaggtgtg

SEQ ID NO: 2738191 - DNA, 25 bp, Homo sapien
cagaaggccatcaccttaacccagg

SEQ ID NO: 2738192 - DNA, 25 bp, Homo sapien
agaaggccatcaccttaacccaggt

SEQ ID NO: 2738193 - DNA, 25 bp, Homo sapien
ggaagagggaccgcggacagggctg

SEQ ID NO: 2738194 - DNA, 25 bp, Homo sapien
gccccctgggacgaggatgggagga

SEQ ID NO: 2738195 - DNA, 25 bp, Homo sapien
gcagccccctgggacgaggatggga

SEQ ID NO: 2738196 - DNA, 25 bp, Homo sapien
tctcctgagggaggcagccccctgg

SEQ ID NO: 2738197 - DNA, 25 bp, Homo sapien
cctgggacgaggatgggaggaaaca

SEQ ID NO: 2738198 - DNA, 25 bp, Homo sapien
aattggactcaaaggtgcatatgac

SEQ ID NO: 2738199 - DNA, 25 bp, Homo sapien
ccttgtgagtaaaattggactcaaa

SEQ ID NO: 2738200 - DNA, 25 bp, Homo sapien
ccttgcgcatccttgtgagtaaaat

SEQ ID NO: 2738201 - DNA, 25 bp, Homo sapien
taaaattggactcaaaggtgcatat

SEQ ID NO: 2738202 - DNA, 25 bp, Homo sapien
tgaccattatgaggcgtcaaggaag

SEQ ID NO: 2738203 - DNA, 25 bp, Homo sapien
caggcagtggtgaccattatgaggc

SEQ ID NO: 2738204 - DNA, 25 bp, Homo sapien
cagcagcagagataggcaggcagtg

SEQ ID NO: 2738205 - DNA, 25 bp, Homo sapien
tatgaggcgtcaaggaagtgactgt

SEQ ID NO: 2738206 - DNA, 25 bp, Homo sapien
aggggaggatggcaccgccttggag

SEQ ID NO: 2738207 - DNA, 25 bp, Homo sapien
gggaggatggcaccgccttggagat

SEQ ID NO: 2738208 - DNA, 25 bp, Homo sapien
ccacacccctgaagatcgaaggtcc

SEQ ID NO: 2738209 - DNA, 25 bp, Homo sapien
cacccctgaagatcgaaggtccagg

SEQ ID NO: 2738210 - DNA, 25 bp, Homo sapien
agcattgtgcacttcagcccggagc

SEQ ID NO: 2738211 - DNA, 25 bp, Homo sapien
ctgagtggctaggaacacagacacg

SEQ ID NO: 2738212 - DNA, 25 bp, Homo sapien
catgggatttcaacctgctctgctt

SEQ ID NO: 2738213 - DNA, 25 bp, Homo sapien
gcccggagctcgtgggctcaccgat

SEQ ID NO: 2738214 - DNA, 25 bp, Homo sapien
tgctctgagtggcacttctcagcct

SEQ ID NO: 2738215 - DNA, 25 bp, Homo sapien
ccatggccatcgtacttgctggcct

SEQ ID NO: 2738216 - DNA, 25 bp, Homo sapien
catggccatcgtacttgctggcctt

SEQ ID NO: 2738217 - DNA, 25 bp, Homo sapien
tccccatggccatcgtacttgctgg

SEQ ID NO: 2738218 - DNA, 25 bp, Homo sapien
ctgacactccctccaggcaatgtgg

SEQ ID NO: 2738219 - DNA, 25 bp, Homo sapien
gcaatgtgggtgatgatcagccgca

SEQ ID NO: 2738220 - DNA, 25 bp, Homo sapien
tccctccaggcaatgtgggtgatga

SEQ ID NO: 2738221 - DNA, 25 bp, Homo sapien
tccaggcaatgtgggtgatgatcag

SEQ ID NO: 2738222 - DNA, 25 bp, Homo sapien
ggctcccggctaacactgaaggact

SEQ ID NO: 2738223 - DNA, 25 bp, Homo sapien
cagacttggagaacgatgctccagc

SEQ ID NO: 2738224 - DNA, 25 bp, Homo sapien
ctaacactgaaggactgtgattgtg

SEQ ID NO: 2738225 - DNA, 25 bp, Homo sapien
gacttggagaacgatgctccagctc

SEQ ID NO: 2738226 - DNA, 25 bp, Homo sapien
agcagaaaggactgagccccagttc

SEQ ID NO: 2738227 - DNA, 25 bp, Homo sapien
ggagcagaaaggactgagccccagt

SEQ ID NO: 2738228 - DNA, 25 bp, Homo sapien
cggaaggcccagtaaggagaagagt

SEQ ID NO: 2738229 - DNA, 25 bp, Homo sapien
gagcggaaggcccagtaaggagaag

SEQ ID NO: 2738230 - DNA, 25 bp, Homo sapien
cctctgtgaattccccgcgtccaca

SEQ ID NO: 2738231 - DNA, 25 bp, Homo sapien
ttccctctgtgaattccccgcgtcc

SEQ ID NO: 2738232 - DNA, 25 bp, Homo sapien
tgtttgatagagcaggggtgtttcc

SEQ ID NO: 2738233 - DNA, 25 bp, Homo sapien
tagagcaggggtgtttccctctgtg

SEQ ID NO: 2738234 - DNA, 25 bp, Homo sapien
ttttggccatttgcttccagcctac

SEQ ID NO: 2738235 - DNA, 25 bp, Homo sapien
tgtgggaagcttcgggggaagggca

SEQ ID NO: 2738236 - DNA, 25 bp, Homo sapien
gcttcgggggaagggcatgagagta

SEQ ID NO: 2738237 - DNA, 25 bp, Homo sapien
gggggaagggcatgagagtaacttc

SEQ ID NO: 2738238 - DNA, 25 bp, Homo sapien
tcgggggaagggcatgagagtaact

SEQ ID NO: 2738239 - DNA, 25 bp, Homo sapien
tcaagccacgacgtgtggcagatga

SEQ ID NO: 2738240 - DNA, 25 bp, Homo sapien
tgtggcagatgatgcgcttaacgtc

SEQ ID NO: 2738241 - DNA, 25 bp, Homo sapien
ggtgtgagtcaacatcaagccacga

SEQ ID NO: 2738242 - DNA, 25 bp, Homo sapien
ttaacgtcctcagacagccagtcac

SEQ ID NO: 2738243 - DNA, 25 bp, Homo sapien
agcagtgtcggtgggcggtggccat

SEQ ID NO: 2738244 - DNA, 25 bp, Homo sapien
acatgccctgaggagcagtgtcggt

SEQ ID NO: 2738245 - DNA, 25 bp, Homo sapien
agcgtgcgctgggtggacatgccct

SEQ ID NO: 2738246 - DNA, 25 bp, Homo sapien
tggacatgccctgaggagcagtgtc

SEQ ID NO: 2738247 - DNA, 25 bp, Homo sapien
gatccgtcctgagcacattgttggc

SEQ ID NO: 2738248 - DNA, 25 bp, Homo sapien
ggatcccacagatccgtcctgagca

SEQ ID NO: 2738249 - DNA, 25 bp, Homo sapien
agatgtggcttggatcccacagatc

SEQ ID NO: 2738250 - DNA, 25 bp, Homo sapien
gctgctagctcctgccgccgagcgt

SEQ ID NO: 2738251 - DNA, 25 bp, Homo sapien
ttttcttgcttggccacgttgggtc

SEQ ID NO: 2738252 - DNA, 25 bp, Homo sapien
cttgcttggccacgttgggtcttgt

SEQ ID NO: 2738253 - DNA, 25 bp, Homo sapien
gcttggccacgttgggtcttgttct

SEQ ID NO: 2738254 - DNA, 25 bp, Homo sapien
taatgtggcattttctgttgaactg

SEQ ID NO: 2738255 - DNA, 25 bp, Homo sapien
ctgagagccgaatgctgcttagcat

SEQ ID NO: 2738256 - DNA, 25 bp, Homo sapien
ttggagctgagagccgaatgctgct

SEQ ID NO: 2738257 - DNA, 25 bp, Homo sapien
gagctgagagccgaatgctgcttag

SEQ ID NO: 2738258 - DNA, 25 bp, Homo sapien
cgtttggagctgagagccgaatgct

SEQ ID NO: 2738259 - DNA, 25 bp, Homo sapien
tggtactgagtaggtcctgccagcc

SEQ ID NO: 2738260 - DNA, 25 bp, Homo sapien
gaaagcctctgcgagtccttcctga

SEQ ID NO: 2738261 - DNA, 25 bp, Homo sapien
agtccacgccaaacagtcctgggca

SEQ ID NO: 2738262 - DNA, 25 bp, Homo sapien
gacgtttgttcactggacaccaggg

SEQ ID NO: 2738263 - DNA, 25 bp, Homo sapien
cagcaaggcgggctcgtccccactg

SEQ ID NO: 2738264 - DNA, 25 bp, Homo sapien
aaggcgggctcgtccccactgagca

SEQ ID NO: 2738265 - DNA, 25 bp, Homo sapien
cactgagcactgtaactggcaccat

SEQ ID NO: 2738266 - DNA, 25 bp, Homo sapien
ccactgagcactgtaactggcacca

SEQ ID NO: 2738267 - DNA, 25 bp, Homo sapien
gtagaagtgttcgtggaggccggct

SEQ ID NO: 2738268 - DNA, 25 bp, Homo sapien
tctgcaaggggcgtccctcgtgtcc

SEQ ID NO: 2738269 - DNA, 25 bp, Homo sapien
attggaagtatctgcaaggggcgtc

SEQ ID NO: 2738270 - DNA, 25 bp, Homo sapien
ccctcatggagccagggcgggatgg

SEQ ID NO: 2738271 - DNA, 25 bp, Homo sapien
gaggtacacgtagcgaggaaggcag

SEQ ID NO: 2738272 - DNA, 25 bp, Homo sapien
aggaaggcaggacttcttggcgtca

SEQ ID NO: 2738273 - DNA, 25 bp, Homo sapien
gaaggcaggacttcttggcgtcagt

SEQ ID NO: 2738274 - DNA, 25 bp, Homo sapien
tgtaaaaatactggcgaggtacacg

SEQ ID NO: 2738275 - DNA, 25 bp, Homo sapien
ttttctgctgtataatgatatctcg

SEQ ID NO: 2738276 - DNA, 25 bp, Homo sapien
tatcgttgagggttggatttccgtc

SEQ ID NO: 2738277 - DNA, 25 bp, Homo sapien
cagacggggctgttcttgagcattc

SEQ ID NO: 2738278 - DNA, 25 bp, Homo sapien
cattctttcaaatgtcgctttatcg

SEQ ID NO: 2738279 - DNA, 25 bp, Homo sapien
ccaggagggacagacgctggatggc

SEQ ID NO: 2738280 - DNA, 25 bp, Homo sapien
gacagacgctggatggccagctcaa

SEQ ID NO: 2738281 - DNA, 25 bp, Homo sapien
agcaagcttcgtccctgagaagtgc

SEQ ID NO: 2738282 - DNA, 25 bp, Homo sapien
cagctcaaagcaagcttcgtccctg

SEQ ID NO: 2738283 - DNA, 25 bp, Homo sapien
tgggtggggagctgggagtcctcac

SEQ ID NO: 2738284 - DNA, 25 bp, Homo sapien
gtggggagctgggagtcctcacgtc

SEQ ID NO: 2738285 - DNA, 25 bp, Homo sapien
gggtggggagctgggagtcctcacg

SEQ ID NO: 2738286 - DNA, 25 bp, Homo sapien
ctgggtggggagctgggagtcctca

SEQ ID NO: 2738287 - DNA, 25 bp, Homo sapien
tgacggcttgccgtggcttctggct

SEQ ID NO: 2738288 - DNA, 25 bp, Homo sapien
cctgtcttgcacctctgtgttctct

SEQ ID NO: 2738289 - DNA, 25 bp, Homo sapien
aggggccctctgctcgacactgacg

SEQ ID NO: 2738290 - DNA, 25 bp, Homo sapien
tctctcaccctctggcctgttaatg

SEQ ID NO: 2738291 - DNA, 25 bp, Homo sapien
tctttgacccacgtgctggcttcca

SEQ ID NO: 2738292 - DNA, 25 bp, Homo sapien
ctttgacccacgtgctggcttccat

SEQ ID NO: 2738293 - DNA, 25 bp, Homo sapien
ctcgtctttgacccacgtgctggct

SEQ ID NO: 2738294 - DNA, 25 bp, Homo sapien
cgtctttgacccacgtgctggcttc

SEQ ID NO: 2738295 - DNA, 25 bp, Homo sapien
tgccactgtattctgtgggagcctt

SEQ ID NO: 2738296 - DNA, 25 bp, Homo sapien
tgtgtcgtatgagcgggtgtttccc

SEQ ID NO: 2738297 - DNA, 25 bp, Homo sapien
gaggcggtgggctccttgagacagg

SEQ ID NO: 2738298 - DNA, 25 bp, Homo sapien
tccagtgtcttatgggaagtgccac

SEQ ID NO: 2738299 - DNA, 25 bp, Homo sapien
cagctgcctgaatcttgtcgaacac

SEQ ID NO: 2738300 - DNA, 25 bp, Homo sapien
atcttcaggacattcaaggttgttc

SEQ ID NO: 2738301 - DNA, 25 bp, Homo sapien
gcctgaatcttgtcgaacactccca

SEQ ID NO: 2738302 - DNA, 25 bp, Homo sapien
caaggttgttcacttctagggtgtt

SEQ ID NO: 2738303 - DNA, 25 bp, Homo sapien
ctgcagaaggaaactgcctgggcat

SEQ ID NO: 2738304 - DNA, 25 bp, Homo sapien
cgcttcctggggaaggcagactgca

SEQ ID NO: 2738305 - DNA, 25 bp, Homo sapien
actgcagaaggaaactgcctgggca

SEQ ID NO: 2738306 - DNA, 25 bp, Homo sapien
tggggaaggcagactgcagaaggaa

SEQ ID NO: 2738307 - DNA, 25 bp, Homo sapien
aacacttggtgcgttactgggggag

SEQ ID NO: 2738308 - DNA, 25 bp, Homo sapien
gtgaccccgagcactggaccgggtc

SEQ ID NO: 2738309 - DNA, 25 bp, Homo sapien
caagggaagggcgtgcagaggcgtc

SEQ ID NO: 2738310 - DNA, 25 bp, Homo sapien
gcagggtggcgaaggcccgggtgac

SEQ ID NO: 2738311 - DNA, 25 bp, Homo sapien
ctgcagatatgaagcggagccgctg

SEQ ID NO: 2738312 - DNA, 25 bp, Homo sapien
cgcccgaccgccgggaggatggagt

SEQ ID NO: 2738313 - DNA, 25 bp, Homo sapien
cgggcagcggagctgtctcagtctt

SEQ ID NO: 2738314 - DNA, 25 bp, Homo sapien
agccgctgccgcgaccgaccgcagc

SEQ ID NO: 2738315 - DNA, 25 bp, Homo sapien
caagatgctgttcagcagaaagaac

SEQ ID NO: 2738316 - DNA, 25 bp, Homo sapien
ctgttgagaaggctcgaaggcgccg

SEQ ID NO: 2738317 - DNA, 25 bp, Homo sapien
agaactgctgttgagaaggctcgaa

SEQ ID NO: 2738318 - DNA, 25 bp, Homo sapien
cagaaagaactgctgttgagaaggc

SEQ ID NO: 2738319 - DNA, 25 bp, Homo sapien
gagccttggacacattatctttttc

SEQ ID NO: 2738320 - DNA, 25 bp, Homo sapien
tttcctatgagccttggacacatta

SEQ ID NO: 2738321 - DNA, 25 bp, Homo sapien
cctatgagccttggacacattatct

SEQ ID NO: 2738322 - DNA, 25 bp, Homo sapien
tatgagccttggacacattatcttt

SEQ ID NO: 2738323 - DNA, 25 bp, Homo sapien
ttgtggttcggtgactccaggactg

SEQ ID NO: 2738324 - DNA, 25 bp, Homo sapien
cagcccaccttgagtttggtgttgt

SEQ ID NO: 2738325 - DNA, 25 bp, Homo sapien
agaaccaggctcctctcatgctgca

SEQ ID NO: 2738326 - DNA, 25 bp, Homo sapien
ggagaaccaggctcctctcatgctg

SEQ ID NO: 2738327 - DNA, 25 bp, Homo sapien
ctgatgggtcatgaccctctcgggt

SEQ ID NO: 2738328 - DNA, 25 bp, Homo sapien
tgatgggtcatgaccctctcgggtc

SEQ ID NO: 2738329 - DNA, 25 bp, Homo sapien
tggtctggatgatgcatccggtgat

SEQ ID NO: 2738330 - DNA, 25 bp, Homo sapien
tgatgcatccggtgattggtcctta

SEQ ID NO: 2738331 - DNA, 25 bp, Homo sapien
catccggtgattggtccttattgta

SEQ ID NO: 2738332 - DNA, 25 bp, Homo sapien
cggtgattggtccttattgtacaac

SEQ ID NO: 2738333 - DNA, 25 bp, Homo sapien
ccgagccgcatagggatgccctcat

SEQ ID NO: 2738334 - DNA, 25 bp, Homo sapien
cctctgtagggtcatcatcgctttc

SEQ ID NO: 2738335 - DNA, 25 bp, Homo sapien
atagggatgccctcatcgcaccctg

SEQ ID NO: 2738336 - DNA, 25 bp, Homo sapien
tttcaagaatgggaccgagccgcat

SEQ ID NO: 2738337 - DNA, 25 bp, Homo sapien
ttttcaccctttccgatgtaagagc

SEQ ID NO: 2738338 - DNA, 25 bp, Homo sapien
tccgatgtaagagccttctggtttg

SEQ ID NO: 2738339 - DNA, 25 bp, Homo sapien
tctttcccccggtcagccagaggga

SEQ ID NO: 2738340 - DNA, 25 bp, Homo sapien
ccggtcagccagagggatggctgca

SEQ ID NO: 2738341 - DNA, 25 bp, Homo sapien
ctctggtattttttcttccctgcct

SEQ ID NO: 2738342 - DNA, 25 bp, Homo sapien
gagctctggtattttttcttccctg

SEQ ID NO: 2738343 - DNA, 25 bp, Homo sapien
agctctggtattttttcttccctgc

SEQ ID NO: 2738344 - DNA, 25 bp, Homo sapien
ctggggggcagacggccagctttgc

SEQ ID NO: 2738345 - DNA, 25 bp, Homo sapien
cagctttgcagggtctgcaccctca

SEQ ID NO: 2738346 - DNA, 25 bp, Homo sapien
gctttgcagggtctgcaccctcatc

SEQ ID NO: 2738347 - DNA, 25 bp, Homo sapien
ctctggggggcagacggccagcttt

SEQ ID NO: 2738348 - DNA, 25 bp, Homo sapien
ccacatgctgtagcggcctttcctg

SEQ ID NO: 2738349 - DNA, 25 bp, Homo sapien
gcagtaatactatctggcttcttac

SEQ ID NO: 2738350 - DNA, 25 bp, Homo sapien
tcttatgccggggtatattccacat

SEQ ID NO: 2738351 - DNA, 25 bp, Homo sapien
gggacaggttcagtgcagtaatact

SEQ ID NO: 2738352 - DNA, 25 bp, Homo sapien
gtcgccatcagtcgggagctgccag

SEQ ID NO: 2738353 - DNA, 25 bp, Homo sapien
cacagagtaggaggccactgggaat

SEQ ID NO: 2738354 - DNA, 25 bp, Homo sapien
gactttactggcacgttcttctagg

SEQ ID NO: 2738355 - DNA, 25 bp, Homo sapien
cttgtctgttgttaggtccgtcgcc

SEQ ID NO: 2738356 - DNA, 25 bp, Homo sapien
agaggaaggcttggtagactccccg

SEQ ID NO: 2738357 - DNA, 25 bp, Homo sapien
gggagccctgatcatcagcaccgtg

SEQ ID NO: 2738358 - DNA, 25 bp, Homo sapien
cagcaccgtgctgatgctgtcccag

SEQ ID NO: 2738359 - DNA, 25 bp, Homo sapien
tggaggccatcctggtaggtgtggt

SEQ ID NO: 2738360 - DNA, 25 bp, Homo sapien
cattgtcggagatgacttagctgcc

SEQ ID NO: 2738361 - DNA, 25 bp, Homo sapien
caaagtaaacggactcggtttgctg

SEQ ID NO: 2738362 - DNA, 25 bp, Homo sapien
gaggagctaagacattgtcggagat

SEQ ID NO: 2738363 - DNA, 25 bp, Homo sapien
cggtttgctgggtggtattggtgga

SEQ ID NO: 2738364 - DNA, 25 bp, Homo sapien
gactagcgaagatccggactgctcg

SEQ ID NO: 2738365 - DNA, 25 bp, Homo sapien
ctgagaacagcatggtccggaaggt

SEQ ID NO: 2738366 - DNA, 25 bp, Homo sapien
tcggccgccgtttgcttgggattgc

SEQ ID NO: 2738367 - DNA, 25 bp, Homo sapien
tcaggctgtcgtcttcgtgcactgg

SEQ ID NO: 2738368 - DNA, 25 bp, Homo sapien
tgcctcagcctctggggtaagctgg

SEQ ID NO: 2738369 - DNA, 25 bp, Homo sapien
tcagcctctggggtaagctgggact

SEQ ID NO: 2738370 - DNA, 25 bp, Homo sapien
gccggcctcggcgtcccaaagtatg

SEQ ID NO: 2738371 - DNA, 25 bp, Homo sapien
cctctggggtaagctgggactacag

SEQ ID NO: 2738372 - DNA, 25 bp, Homo sapien
tgctgcgcaaggagaaacacagtct

SEQ ID NO: 2738373 - DNA, 25 bp, Homo sapien
gagctcccagcatcgacttgctgcg

SEQ ID NO: 2738374 - DNA, 25 bp, Homo sapien
caacggctgtaagttggagctccca

SEQ ID NO: 2738375 - DNA, 25 bp, Homo sapien
gtattgagggactgccaaaagcact

SEQ ID NO: 2738376 - DNA, 25 bp, Homo sapien
gaggggcggcgctgcccgagaggcc

SEQ ID NO: 2738377 - DNA, 25 bp, Homo sapien
gcgcctcggaggacaggaccgagag

SEQ ID NO: 2738378 - DNA, 25 bp, Homo sapien
tggtccaaagccgaacccaggcggc

SEQ ID NO: 2738379 - DNA, 25 bp, Homo sapien
ccagcgccgcgctgctcgcctggtc

SEQ ID NO: 2738380 - DNA, 25 bp, Homo sapien
ggaatgttctcacggggagtgttct

SEQ ID NO: 2738381 - DNA, 25 bp, Homo sapien
ttctcacggggagtgttctcagagg

SEQ ID NO: 2738382 - DNA, 25 bp, Homo sapien
ctcacggggagtgttctcagaggat

SEQ ID NO: 2738383 - DNA, 25 bp, Homo sapien
tgttctcacggggagtgttctcaga

SEQ ID NO: 2738384 - DNA, 25 bp, Homo sapien
tgtgcggcatgtgcggcagttcccc

SEQ ID NO: 2738385 - DNA, 25 bp, Homo sapien
ttggtcaaagcctccgccttttgtg

SEQ ID NO: 2738386 - DNA, 25 bp, Homo sapien
caaagcctccgccttttgtgtgcgg

SEQ ID NO: 2738387 - DNA, 25 bp, Homo sapien
tccgccttttgtgtgcggcatgtgc

SEQ ID NO: 2738388 - DNA, 25 bp, Homo sapien
tgactgtgaccagtagcacctactg

SEQ ID NO: 2738389 - DNA, 25 bp, Homo sapien
tactgttcctaaccaacgctggtac

SEQ ID NO: 2738390 - DNA, 25 bp, Homo sapien
taaagatgaggctcgtgggaagtat

SEQ ID NO: 2738391 - DNA, 25 bp, Homo sapien
ggtgtgcgctcggacacgccgcttc

SEQ ID NO: 2738392 - DNA, 25 bp, Homo sapien
tggagcgcctgctgcgggaggtgag

SEQ ID NO: 2738393 - DNA, 25 bp, Homo sapien
cggacttgggtgtgtcgggttgagg

SEQ ID NO: 2738394 - DNA, 25 bp, Homo sapien
gaggtgagcgtcttggcgcgtggct

SEQ ID NO: 2738395 - DNA, 25 bp, Homo sapien
ggcagcgtgcaggtctctgggagga

SEQ ID NO: 2738396 - DNA, 25 bp, Homo sapien
tgaaatatcctttgtgtccagtgat

SEQ ID NO: 2738397 - DNA, 25 bp, Homo sapien
tgtgattgatcttgccttttgtaca

SEQ ID NO: 2738398 - DNA, 25 bp, Homo sapien
caagtatggtcttgataatgcatta

SEQ ID NO: 2738399 - DNA, 25 bp, Homo sapien
ggaggtcacctctgaagtgattttt

SEQ ID NO: 2738400 - DNA, 25 bp, Homo sapien
tcgcagaagccaccgagggagttct

SEQ ID NO: 2738401 - DNA, 25 bp, Homo sapien
gacaaggtggtatttccaaacacag

SEQ ID NO: 2738402 - DNA, 25 bp, Homo sapien
tgttttggaatcatatcactctaag

SEQ ID NO: 2738403 - DNA, 25 bp, Homo sapien
ttaaccagctgtatattcttagaca

SEQ ID NO: 2738404 - DNA, 25 bp, Homo sapien
tgatagtcatagttgttggtagttt

SEQ ID NO: 2738405 - DNA, 25 bp, Homo sapien
ttttccactctgtccttaagttgta

SEQ ID NO: 2738406 - DNA, 25 bp, Homo sapien
tttccactctgtccttaagttgtac

SEQ ID NO: 2738407 - DNA, 25 bp, Homo sapien
tccactctgtccttaagttgtactt

SEQ ID NO: 2738408 - DNA, 25 bp, Homo sapien
agtccagttaaccaccaggccagtg

SEQ ID NO: 2738409 - DNA, 25 bp, Homo sapien
cgtaaacatgatactgagtccagtt

SEQ ID NO: 2738410 - DNA, 25 bp, Homo sapien
catagtactggttattcataggata

SEQ ID NO: 2738411 - DNA, 25 bp, Homo sapien
tgaacagttcatttgtgctcatagt

SEQ ID NO: 2738412 - DNA, 25 bp, Homo sapien
ggcgtccgtgcaaatccaggtggtt

SEQ ID NO: 2738413 - DNA, 25 bp, Homo sapien
ctttaggtctccgagccaggtgtcg

SEQ ID NO: 2738414 - DNA, 25 bp, Homo sapien
tgtcgggagacccttcgagagccgt

SEQ ID NO: 2738415 - DNA, 25 bp, Homo sapien
ccctgtcttgagtgcgccaaaggca

SEQ ID NO: 2738416 - DNA, 25 bp, Homo sapien
gagggaagacggcagtttggcgaca

SEQ ID NO: 2738417 - DNA, 25 bp, Homo sapien
cagcggccgaggagggaagacggca

SEQ ID NO: 2738418 - DNA, 25 bp, Homo sapien
ctgccgccattttgtggggtgtttg

SEQ ID NO: 2738419 - DNA, 25 bp, Homo sapien
ggtgtttgtcgcagcggccgaggag

SEQ ID NO: 2738420 - DNA, 25 bp, Homo sapien
caggcgcgttcgcgcggcgtaggtg

SEQ ID NO: 2738421 - DNA, 25 bp, Homo sapien
gcaggcgcgttcgcgcggcgtaggt

SEQ ID NO: 2738422 - DNA, 25 bp, Homo sapien
ggcgggagcgcgcaaggttctgtca

SEQ ID NO: 2738423 - DNA, 25 bp, Homo sapien
tcacgtggagccccgcccttaggtg

SEQ ID NO: 2738424 - DNA, 25 bp, Homo sapien
gagccccgcccttaggtggagcggc

SEQ ID NO: 2738425 - DNA, 25 bp, Homo sapien
gcgggagcgcgcaaggttctgtcac

SEQ ID NO: 2738426 - DNA, 25 bp, Homo sapien
aaaccaaaagtgatctccctgttgc

SEQ ID NO: 2738427 - DNA, 25 bp, Homo sapien
caaaccaaaagtgatctccctgttg

SEQ ID NO: 2738428 - DNA, 25 bp, Homo sapien
tccgaaagcctttgtgggcgctggc

SEQ ID NO: 2738429 - DNA, 25 bp, Homo sapien
gttgctggtgcacccgcgtccggct

SEQ ID NO: 2738430 - DNA, 25 bp, Homo sapien
ccgggacgctcgagcttagggaggt

SEQ ID NO: 2738431 - DNA, 25 bp, Homo sapien
ggcggttccggagcctcgcggctgg

SEQ ID NO: 2738432 - DNA, 25 bp, Homo sapien
cgtatgtctcaatgtatgtctcact

SEQ ID NO: 2738433 - DNA, 25 bp, Homo sapien
gaaagaagccaacgtagacataaaa

SEQ ID NO: 2738434 - DNA, 25 bp, Homo sapien
aaaactgctgtactcattgggaaag

SEQ ID NO: 2738435 - DNA, 25 bp, Homo sapien
gatattcttgataggagaaagaagc

SEQ ID NO: 2738436 - DNA, 25 bp, Homo sapien
aaggctacgatattcttgataggag

SEQ ID NO: 2738437 - DNA, 25 bp, Homo sapien
tatcctctctaaacttggaatctga

SEQ ID NO: 2738438 - DNA, 25 bp, Homo sapien
tttatcctctctaaacttggaatct

SEQ ID NO: 2738439 - DNA, 25 bp, Homo sapien
ttatcctctctaaacttggaatctg

SEQ ID NO: 2738440 - DNA, 25 bp, Homo sapien
atttatcctctctaaacttggaatc

SEQ ID NO: 2738441 - DNA, 25 bp, Homo sapien
aagttgccgtcaaacagatcatcgc

SEQ ID NO: 2738442 - DNA, 25 bp, Homo sapien
gaaaccttgaatggcctggcgcagg

SEQ ID NO: 2738443 - DNA, 25 bp, Homo sapien
gatcatcgctcgaaaagccatggag

SEQ ID NO: 2738444 - DNA, 25 bp, Homo sapien
caagctgtgcttaagggctgccggt

SEQ ID NO: 2738445 - DNA, 25 bp, Homo sapien
tctcttattaagtgagtaaggccca

SEQ ID NO: 2738446 - DNA, 25 bp, Homo sapien
catcacctgtcctgccaaagctgaa

SEQ ID NO: 2738447 - DNA, 25 bp, Homo sapien
tccacttgtgaaacagctccctcgg

SEQ ID NO: 2738448 - DNA, 25 bp, Homo sapien
tgtcaggcccgatcctgcactgagg

SEQ ID NO: 2738449 - DNA, 25 bp, Homo sapien
tctgttattgatacttgcaaaggga

SEQ ID NO: 2738450 - DNA, 25 bp, Homo sapien
tagctggaggtggtcactgttgtcc

SEQ ID NO: 2738451 - DNA, 25 bp, Homo sapien
gccgggtgatcaccatcagagtcat

SEQ ID NO: 2738452 - DNA, 25 bp, Homo sapien
gatacttgcaaagggagtgacacct

SEQ ID NO: 2738453 - DNA, 25 bp, Homo sapien
gtggctgccttctaccgagctcggg

SEQ ID NO: 2738454 - DNA, 25 bp, Homo sapien
gggcgtctccggaattctctgcttt

SEQ ID NO: 2738455 - DNA, 25 bp, Homo sapien
agggtaggtaccaagatgctgtgcc

SEQ ID NO: 2738456 - DNA, 25 bp, Homo sapien
aaggctccttgggatcggatgcaga

SEQ ID NO: 2738457 - DNA, 25 bp, Homo sapien
ttttctttgcagaagtggctatcgc

SEQ ID NO: 2738458 - DNA, 25 bp, Homo sapien
aagtggctatcgcacgtcctttgca

SEQ ID NO: 2738459 - DNA, 25 bp, Homo sapien
tagctgtgagtcaatttcatgtttt

SEQ ID NO: 2738460 - DNA, 25 bp, Homo sapien
cgtcctttgcacgtttgtcgcttgt

SEQ ID NO: 2738461 - DNA, 25 bp, Homo sapien
agtaacattcatttcagtaagagtg

SEQ ID NO: 2738462 - DNA, 25 bp, Homo sapien
catccagttgtcactcataatgcac

SEQ ID NO: 2738463 - DNA, 25 bp, Homo sapien
gatgaatagcgatgctgaggacctt

SEQ ID NO: 2738464 - DNA, 25 bp, Homo sapien
tcaaggcttcaagtgagcggagatc

SEQ ID NO: 2738465 - DNA, 25 bp, Homo sapien
gttccacactggctttacaatcagt

SEQ ID NO: 2738466 - DNA, 25 bp, Homo sapien
gagttccacactggctttacaatca

SEQ ID NO: 2738467 - DNA, 25 bp, Homo sapien
agagttccacactggctttacaatc

SEQ ID NO: 2738468 - DNA, 25 bp, Homo sapien
tccacactggctttacaatcagtaa

SEQ ID NO: 2738469 - DNA, 25 bp, Homo sapien
ctcctccttcgacttcttggatact

SEQ ID NO: 2738470 - DNA, 25 bp, Homo sapien
ttgggtgtcagctcccgtactggcc

SEQ ID NO: 2738471 - DNA, 25 bp, Homo sapien
tggagcctggactgaagaacctttt

SEQ ID NO: 2738472 - DNA, 25 bp, Homo sapien
tactggccgtgacggctctgaactc

SEQ ID NO: 2738473 - DNA, 25 bp, Homo sapien
ttttcttgcagtagtccttccacat

SEQ ID NO: 2738474 - DNA, 25 bp, Homo sapien
ccatctgggataactttttcttgca

SEQ ID NO: 2738475 - DNA, 25 bp, Homo sapien
cagaatccttggcaagcttcctttc

SEQ ID NO: 2738476 - DNA, 25 bp, Homo sapien
gggcttgtcctgaaccatctgggat

SEQ ID NO: 2738477 - DNA, 25 bp, Homo sapien
tcttgggcccagcgctgtttcttct

SEQ ID NO: 2738478 - DNA, 25 bp, Homo sapien
tcgttctataggtgatgtttcaggt

SEQ ID NO: 2738479 - DNA, 25 bp, Homo sapien
atgtttcaggttcttgggcccagcg

SEQ ID NO: 2738480 - DNA, 25 bp, Homo sapien
cagcttgagcttggtggggctttgg

SEQ ID NO: 2738481 - DNA, 25 bp, Homo sapien
cttgagcttggtggggctttggatc

SEQ ID NO: 2738482 - DNA, 25 bp, Homo sapien
gcttgagcttggtggggctttggat

SEQ ID NO: 2738483 - DNA, 25 bp, Homo sapien
tgagcttggtggggctttggatcac

SEQ ID NO: 2738484 - DNA, 25 bp, Homo sapien
tgctgggatggctgcttctgcagca

SEQ ID NO: 2738485 - DNA, 25 bp, Homo sapien
gcagcaggggcagggtgtcccgctt

SEQ ID NO: 2738486 - DNA, 25 bp, Homo sapien
ggctgctgggatggctgcttctgca

SEQ ID NO: 2738487 - DNA, 25 bp, Homo sapien
tcagaccttgcctgctggctgctgg

SEQ ID NO: 2738488 - DNA, 25 bp, Homo sapien
ccatgaactgcaggtgtccttccat

SEQ ID NO: 2738489 - DNA, 25 bp, Homo sapien
tgccatgaactgcaggtgtccttcc

SEQ ID NO: 2738490 - DNA, 25 bp, Homo sapien
gccacgcccaccctgttgccatgaa

SEQ ID NO: 2738491 - DNA, 25 bp, Homo sapien
cacgcccaccctgttgccatgaact

SEQ ID NO: 2738492 - DNA, 25 bp, Homo sapien
tccacgcgtttgaggcgaggtcgca

SEQ ID NO: 2738493 - DNA, 25 bp, Homo sapien
ggaagtgtagttccacgcgtttgag

SEQ ID NO: 2738494 - DNA, 25 bp, Homo sapien
aaggcctctaggaaatggagtccac

SEQ ID NO: 2738495 - DNA, 25 bp, Homo sapien
ggccgctaaggcctctaggaaatgg

SEQ ID NO: 2738496 - DNA, 25 bp, Homo sapien
cgggcagcgaaagctccgcagagcg

SEQ ID NO: 2738497 - DNA, 25 bp, Homo sapien
ggcagcgaaagctccgcagagcgcc

SEQ ID NO: 2738498 - DNA, 25 bp, Homo sapien
agcgaaagctccgcagagcgcctgg

SEQ ID NO: 2738499 - DNA, 25 bp, Homo sapien
gcagcgaaagctccgcagagcgcct

SEQ ID NO: 2738500 - DNA, 25 bp, Homo sapien
caggatcccgcgttcccgggccgcg

SEQ ID NO: 2738501 - DNA, 25 bp, Homo sapien
ggctcctccgacgtctgggcgacct

SEQ ID NO: 2738502 - DNA, 25 bp, Homo sapien
gaagctccagcctcgtgacccggct

SEQ ID NO: 2738503 - DNA, 25 bp, Homo sapien
tccccgccgcactctgcaagcagga

SEQ ID NO: 2738504 - DNA, 25 bp, Homo sapien
cagggccagggctcgccccacgccg

SEQ ID NO: 2738505 - DNA, 25 bp, Homo sapien
gccccacgccgctgagttcctcggc

SEQ ID NO: 2738506 - DNA, 25 bp, Homo sapien
ctgagttcctcggcgccagctggca

SEQ ID NO: 2738507 - DNA, 25 bp, Homo sapien
agtggcagcagcgacccgctgagcc

SEQ ID NO: 2738508 - DNA, 25 bp, Homo sapien
cctcacagggattcgggaggagcca

SEQ ID NO: 2738509 - DNA, 25 bp, Homo sapien
gccctggaatccgcagctctaaaac

SEQ ID NO: 2738510 - DNA, 25 bp, Homo sapien
tctaaaaccccgactcccgctgaga

SEQ ID NO: 2738511 - DNA, 25 bp, Homo sapien
ggagccaggaagaaccccttctgct

SEQ ID NO: 2738512 - DNA, 25 bp, Homo sapien
ctctcccgggaggacggcgcagtct

SEQ ID NO: 2738513 - DNA, 25 bp, Homo sapien
tctcccgggaggacggcgcagtctc

SEQ ID NO: 2738514 - DNA, 25 bp, Homo sapien
gggaggacggcgcagtctccagaag

SEQ ID NO: 2738515 - DNA, 25 bp, Homo sapien
aggacggcgcagtctccagaaggca

SEQ ID NO: 2738516 - DNA, 25 bp, Homo sapien
ctggggcctcgcttcccgctgccca

SEQ ID NO: 2738517 - DNA, 25 bp, Homo sapien
cctcgcttcccgctgcccagcagcc

SEQ ID NO: 2738518 - DNA, 25 bp, Homo sapien
ggcctcgcttcccgctgcccagcag

SEQ ID NO: 2738519 - DNA, 25 bp, Homo sapien
tcgcttcccgctgcccagcagccat

SEQ ID NO: 2738520 - DNA, 25 bp, Homo sapien
taaggacaagtcgttccagctcacc

SEQ ID NO: 2738521 - DNA, 25 bp, Homo sapien
aggacaagtcgttccagctcaccca

SEQ ID NO: 2738522 - DNA, 25 bp, Homo sapien
gacaagtcgttccagctcacccagg

SEQ ID NO: 2738523 - DNA, 25 bp, Homo sapien
ctgtaaggacaagtcgttccagctc

SEQ ID NO: 2738524 - DNA, 25 bp, Homo sapien
cccaggtaaagagcacagccacgtc

SEQ ID NO: 2738525 - DNA, 25 bp, Homo sapien
ccaggtaaagagcacagccacgtcc

SEQ ID NO: 2738526 - DNA, 25 bp, Homo sapien
caggtaaagagcacagccacgtcct

SEQ ID NO: 2738527 - DNA, 25 bp, Homo sapien
aggtaaagagcacagccacgtcctc

SEQ ID NO: 2738528 - DNA, 25 bp, Homo sapien
gctgagatatcccaatttttgaatt

SEQ ID NO: 2738529 - DNA, 25 bp, Homo sapien
gagatatcccaatttttgaattctg

SEQ ID NO: 2738530 - DNA, 25 bp, Homo sapien
ctgagatatcccaatttttgaattc

SEQ ID NO: 2738531 - DNA, 25 bp, Homo sapien
gtgctgagatatcccaatttttgaa

SEQ ID NO: 2738532 - DNA, 25 bp, Homo sapien
cttgctgcaacagggagatgacttt

SEQ ID NO: 2738533 - DNA, 25 bp, Homo sapien
gagaggagacaccagaactgtcttt

SEQ ID NO: 2738534 - DNA, 25 bp, Homo sapien
ctagagaggagacaccagaactgtc

SEQ ID NO: 2738535 - DNA, 25 bp, Homo sapien
tgcaacagggagatgacttttggtt

SEQ ID NO: 2738536 - DNA, 25 bp, Homo sapien
gcccgcggctctcttcggtgcctgg

SEQ ID NO: 2738537 - DNA, 25 bp, Homo sapien
tctcaagcaccaaccaaactctatg

SEQ ID NO: 2738538 - DNA, 25 bp, Homo sapien
ctcagagcctatgcttagctctcaa

SEQ ID NO: 2738539 - DNA, 25 bp, Homo sapien
aaactctatgacaaggcccgcggct

SEQ ID NO: 2738540 - DNA, 25 bp, Homo sapien
gtaaggatttttgtatgggcaactg

SEQ ID NO: 2738541 - DNA, 25 bp, Homo sapien
caggatctttctgatatgaagttcc

SEQ ID NO: 2738542 - DNA, 25 bp, Homo sapien
tttttctttagcaaatctctgttgc

SEQ ID NO: 2738543 - DNA, 25 bp, Homo sapien
gatttcaggtagaagttttggccaa

SEQ ID NO: 2738544 - DNA, 25 bp, Homo sapien
gggatgcactatggctgaaggcttt

SEQ ID NO: 2738545 - DNA, 25 bp, Homo sapien
acagtatgggtccttaaatgcttac

SEQ ID NO: 2738546 - DNA, 25 bp, Homo sapien
cacagtatgggtccttaaatgctta

SEQ ID NO: 2738547 - DNA, 25 bp, Homo sapien
gcccagaccttcgactgaaggattt

SEQ ID NO: 2738548 - DNA, 25 bp, Homo sapien
aagggaagtgctgtaactggatgcc

SEQ ID NO: 2738549 - DNA, 25 bp, Homo sapien
tataaaaagcccagaccttcgactg

SEQ ID NO: 2738550 - DNA, 25 bp, Homo sapien
aaagggaagtgctgtaactggatgc

SEQ ID NO: 2738551 - DNA, 25 bp, Homo sapien
catcccacattctaaacatcgatat

SEQ ID NO: 2738552 - DNA, 25 bp, Homo sapien
atgcaaatcggcttttaaggagtcc

SEQ ID NO: 2738553 - DNA, 25 bp, Homo sapien
cacattctaaacatcgatatggttt

SEQ ID NO: 2738554 - DNA, 25 bp, Homo sapien
caaatcggcttttaaggagtcctct

SEQ ID NO: 2738555 - DNA, 25 bp, Homo sapien
ctctgatgagttttggtttaaggct

SEQ ID NO: 2738556 - DNA, 25 bp, Homo sapien
caaatggccaatttcaatgtctgca

SEQ ID NO: 2738557 - DNA, 25 bp, Homo sapien
taaaacttagtatctgatgagaact

SEQ ID NO: 2738558 - DNA, 25 bp, Homo sapien
tttcccataagttattacatagcta

SEQ ID NO: 2738559 - DNA, 25 bp, Homo sapien
tcttttttgcatgtcatagatagca

SEQ ID NO: 2738560 - DNA, 25 bp, Homo sapien
ttttttgcatgtcatagatagcata

SEQ ID NO: 2738561 - DNA, 25 bp, Homo sapien
ttttgcatgtcatagatagcatata

SEQ ID NO: 2738562 - DNA, 25 bp, Homo sapien
tttgcatgtcatagatagcatatat

SEQ ID NO: 2738563 - DNA, 25 bp, Homo sapien
agaaagtgcgaatgtagtcccccac

SEQ ID NO: 2738564 - DNA, 25 bp, Homo sapien
gagaaagtgcgaatgtagtccccca

SEQ ID NO: 2738565 - DNA, 25 bp, Homo sapien
caggagaaagtgcgaatgtagtccc

SEQ ID NO: 2738566 - DNA, 25 bp, Homo sapien
aggagaaagtgcgaatgtagtcccc

SEQ ID NO: 2738567 - DNA, 25 bp, Homo sapien
ttctagcgctcaggataatatctgg

SEQ ID NO: 2738568 - DNA, 25 bp, Homo sapien
tggacatgactacaacaaagaagag

SEQ ID NO: 2738569 - DNA, 25 bp, Homo sapien
tccaggcactaagaggtagttcagt

SEQ ID NO: 2738570 - DNA, 25 bp, Homo sapien
taaaagccatgcacgaagtttgaca

SEQ ID NO: 2738571 - DNA, 25 bp, Homo sapien
tcagacatcatggtctctgggacac

SEQ ID NO: 2738572 - DNA, 25 bp, Homo sapien
tcctggtctgcttggttagtcttcc

SEQ ID NO: 2738573 - DNA, 25 bp, Homo sapien
gggacactattgctggtctctcctg

SEQ ID NO: 2738574 - DNA, 25 bp, Homo sapien
tgcatcccatgcaaatctctccatt

SEQ ID NO: 2738575 - DNA, 25 bp, Homo sapien
tacacattcgtgcaatacagtttcc

SEQ ID NO: 2738576 - DNA, 25 bp, Homo sapien
cactgactatccttgcttgagctta

SEQ ID NO: 2738577 - DNA, 25 bp, Homo sapien
tgtttacccctatattgcctacaag

SEQ ID NO: 2738578 - DNA, 25 bp, Homo sapien
gaccttttgttacctagccactgcc

SEQ ID NO: 2738579 - DNA, 25 bp, Homo sapien
acctgacactactgcccatctgaga

SEQ ID NO: 2738580 - DNA, 25 bp, Homo sapien
gaaatagtcttcaacagcctacttg

SEQ ID NO: 2738581 - DNA, 25 bp, Homo sapien
ggttaattcctccacctatgctatg

SEQ ID NO: 2738582 - DNA, 25 bp, Homo sapien
tgagtcagcaggcagaaaattcctt

SEQ ID NO: 2738583 - DNA, 25 bp, Homo sapien
tgtccttattctgataacagggatc

SEQ ID NO: 2738584 - DNA, 25 bp, Homo sapien
gataacagggatccacaaacaattt

SEQ ID NO: 2738585 - DNA, 25 bp, Homo sapien
atgaaacattggttaacaccaaaat

SEQ ID NO: 2738586 - DNA, 25 bp, Homo sapien
atgtccttattctgataacagggat

SEQ ID NO: 2738587 - DNA, 25 bp, Homo sapien
gctgaaaaggctagacaccatgtaa

SEQ ID NO: 2738588 - DNA, 25 bp, Homo sapien
tggcaaaataccagagcagtttggg

SEQ ID NO: 2738589 - DNA, 25 bp, Homo sapien
gactttacagcttggaacagactga

SEQ ID NO: 2738590 - DNA, 25 bp, Homo sapien
ttgggacaccaagaacagaaataac

SEQ ID NO: 2738591 - DNA, 25 bp, Homo sapien
cgtaatacataattattttattgaa

SEQ ID NO: 2738592 - DNA, 25 bp, Homo sapien
aatatacaaggtttcagatgtatgg

SEQ ID NO: 2738593 - DNA, 25 bp, Homo sapien
taaggaaaggtacatctgtctattc

SEQ ID NO: 2738594 - DNA, 25 bp, Homo sapien
caaggtttcagatgtatgggataaa

SEQ ID NO: 2738595 - DNA, 25 bp, Homo sapien
gatgtatgggataaataaggaaagg

SEQ ID NO: 2738596 - DNA, 25 bp, Homo sapien
gaatttcctaacgtcccctgaagca

SEQ ID NO: 2738597 - DNA, 25 bp, Homo sapien
gagatttgcactccctatacctgga

SEQ ID NO: 2738598 - DNA, 25 bp, Homo sapien
cacatctcccacgaagcaggttgta

SEQ ID NO: 2738599 - DNA, 25 bp, Homo sapien
gggtctcagccaccaacataggacg

SEQ ID NO: 2738600 - DNA, 25 bp, Homo sapien
gagcagcggcgaccgacacagccgc

SEQ ID NO: 2738601 - DNA, 25 bp, Homo sapien
gcagcggcgaccgacacagccgcga

SEQ ID NO: 2738602 - DNA, 25 bp, Homo sapien
cagcggcgaccgacacagccgcgac

SEQ ID NO: 2738603 - DNA, 25 bp, Homo sapien
agcagcggcgaccgacacagccgcg

SEQ ID NO: 2738604 - DNA, 25 bp, Homo sapien
tgtcgaccccacagaattccgagtg

SEQ ID NO: 2738605 - DNA, 25 bp, Homo sapien
tgtgaggagcaagtaccaccctgtg

SEQ ID NO: 2738606 - DNA, 25 bp, Homo sapien
gagatagccttgtcaatgggaccaa

SEQ ID NO: 2738607 - DNA, 25 bp, Homo sapien
gaactgttcaggtgctacaaggatg

SEQ ID NO: 2738608 - DNA, 25 bp, Homo sapien
cttcccaagagaaatctatggacac

SEQ ID NO: 2738609 - DNA, 25 bp, Homo sapien
tctgcttgaatccactcttcccaag

SEQ ID NO: 2738610 - DNA, 25 bp, Homo sapien
cctctgagcagaatctgcttgaatc

SEQ ID NO: 2738611 - DNA, 25 bp, Homo sapien
aatctatggacacatccttgaaggt

SEQ ID NO: 2738612 - DNA, 25 bp, Homo sapien
cagtgagaccgggttcctgtagttc

SEQ ID NO: 2738613 - DNA, 25 bp, Homo sapien
gcatcacctccccatacacggtcat

SEQ ID NO: 2738614 - DNA, 25 bp, Homo sapien
agtgagaccgggttcctgtagttct

SEQ ID NO: 2738615 - DNA, 25 bp, Homo sapien
ccagcatcacctccccatacacggt

SEQ ID NO: 2738616 - DNA, 25 bp, Homo sapien
aaaaccaatcctagcagagttctga

SEQ ID NO: 2738617 - DNA, 25 bp, Homo sapien
gatcaggccttatgattgtcaagag

SEQ ID NO: 2738618 - DNA, 25 bp, Homo sapien
tctgaactgagcctaaaaaccaatc

SEQ ID NO: 2738619 - DNA, 25 bp, Homo sapien
ggtgtggcttatgaagttccccatt

SEQ ID NO: 2738620 - DNA, 25 bp, Homo sapien
atcagactcagttctcgttccagct

SEQ ID NO: 2738621 - DNA, 25 bp, Homo sapien
ggcggttctttttgcatcagactca

SEQ ID NO: 2738622 - DNA, 25 bp, Homo sapien
gttctcgttccagctgggaagtccc

SEQ ID NO: 2738623 - DNA, 25 bp, Homo sapien
caccctcaggcggttctttttgcat

SEQ ID NO: 2738624 - DNA, 25 bp, Homo sapien
gaagactgtctaaaactctctcaca

SEQ ID NO: 2738625 - DNA, 25 bp, Homo sapien
gtaaggctgctagaaatgaaaacaa

SEQ ID NO: 2738626 - DNA, 25 bp, Homo sapien
taacaaagataaaggagcattcaac

SEQ ID NO: 2738627 - DNA, 25 bp, Homo sapien
tgataaggattagaaaccagataac

SEQ ID NO: 2738628 - DNA, 25 bp, Homo sapien
cccttgactgggacaggataatgag

SEQ ID NO: 2738629 - DNA, 25 bp, Homo sapien
tcaatactttctccccttgactggg

SEQ ID NO: 2738630 - DNA, 25 bp, Homo sapien
tagatgttttgtgtcaagtaagtga

SEQ ID NO: 2738631 - DNA, 25 bp, Homo sapien
tcaagtaagtgagatgctggctgtg

SEQ ID NO: 2738632 - DNA, 25 bp, Homo sapien
caccatacctggctaatttttgtat

SEQ ID NO: 2738633 - DNA, 25 bp, Homo sapien
gaattataggtacgtgccaccatac

SEQ ID NO: 2738634 - DNA, 25 bp, Homo sapien
ggaattataggtacgtgccaccata

SEQ ID NO: 2738635 - DNA, 25 bp, Homo sapien
actctattagtggtgctccatatag

SEQ ID NO: 2738636 - DNA, 25 bp, Homo sapien
catgatgttttcttgggtggctagc

SEQ ID NO: 2738637 - DNA, 25 bp, Homo sapien
gccaactctattagtggtgctccat

SEQ ID NO: 2738638 - DNA, 25 bp, Homo sapien
tgatgttttcttgggtggctagctg

SEQ ID NO: 2738639 - DNA, 25 bp, Homo sapien
tgccctgtcaaggaataggacgtgc

SEQ ID NO: 2738640 - DNA, 25 bp, Homo sapien
tcaaggaataggacgtgctccaagc

SEQ ID NO: 2738641 - DNA, 25 bp, Homo sapien
tgctcttgccctgtcaaggaatagg

SEQ ID NO: 2738642 - DNA, 25 bp, Homo sapien
tgccatgctcttgccctgtcaagga

SEQ ID NO: 2738643 - DNA, 25 bp, Homo sapien
atgcacattggtttctgtgctagga

SEQ ID NO: 2738644 - DNA, 25 bp, Homo sapien
ttcaaatgcacattggtttctgtgc

SEQ ID NO: 2738645 - DNA, 25 bp, Homo sapien
caaatgcacattggtttctgtgcta

SEQ ID NO: 2738646 - DNA, 25 bp, Homo sapien
aatgcacattggtttctgtgctagg

SEQ ID NO: 2738647 - DNA, 25 bp, Homo sapien
tcttcagtaatacccggcttcggag

SEQ ID NO: 2738648 - DNA, 25 bp, Homo sapien
cggcttcggagttggctctttggtt

SEQ ID NO: 2738649 - DNA, 25 bp, Homo sapien
aaatcttcagtaatacccggcttcg

SEQ ID NO: 2738650 - DNA, 25 bp, Homo sapien
taatacccggcttcggagttggctc

SEQ ID NO: 2738651 - DNA, 25 bp, Homo sapien
gagtagaatgccagataccttccct

SEQ ID NO: 2738652 - DNA, 25 bp, Homo sapien
ctgttgtccctctaaccaattatta

SEQ ID NO: 2738653 - DNA, 25 bp, Homo sapien
tgttgtccctctaaccaattattag

SEQ ID NO: 2738654 - DNA, 25 bp, Homo sapien
cccaggtttcccctagagtagaatg

SEQ ID NO: 2738655 - DNA, 25 bp, Homo sapien
taactcccacttggctcagatgact

SEQ ID NO: 2738656 - DNA, 25 bp, Homo sapien
actcccacttggctcagatgactat

SEQ ID NO: 2738657 - DNA, 25 bp, Homo sapien
atgggtaactcccacttggctcaga

SEQ ID NO: 2738658 - DNA, 25 bp, Homo sapien
gggtaactcccacttggctcagatg

SEQ ID NO: 2738659 - DNA, 25 bp, Homo sapien
tcctgactggaacatctttcaaatt

SEQ ID NO: 2738660 - DNA, 25 bp, Homo sapien
aggaatgctttgctgtgtatcaagg

SEQ ID NO: 2738661 - DNA, 25 bp, Homo sapien
ttcaaattcattacctccacatact

SEQ ID NO: 2738662 - DNA, 25 bp, Homo sapien
tatcaaggattgaatcctgactgga

SEQ ID NO: 2738663 - DNA, 25 bp, Homo sapien
cttctccatgtgaattacagttatg

SEQ ID NO: 2738664 - DNA, 25 bp, Homo sapien
ctccatgtgaattacagttatgggg

SEQ ID NO: 2738665 - DNA, 25 bp, Homo sapien
atgtgaattacagttatggggcctt

SEQ ID NO: 2738666 - DNA, 25 bp, Homo sapien
tgtgaattacagttatggggccttt

SEQ ID NO: 2738667 - DNA, 25 bp, Homo sapien
catagatcttctttcctacaaacat

SEQ ID NO: 2738668 - DNA, 25 bp, Homo sapien
ctgaaggttttgctgcactgattac

SEQ ID NO: 2738669 - DNA, 25 bp, Homo sapien
tgattacattcatagatcttctttc

SEQ ID NO: 2738670 - DNA, 25 bp, Homo sapien
aaggttttgctgcactgattacatt

SEQ ID NO: 2738671 - DNA, 25 bp, Homo sapien
gaatgacctgatgcacggtaaggga

SEQ ID NO: 2738672 - DNA, 25 bp, Homo sapien
taagatgcatgctttgactgaaggc

SEQ ID NO: 2738673 - DNA, 25 bp, Homo sapien
taagggatgatcgtccagtgaaatg

SEQ ID NO: 2738674 - DNA, 25 bp, Homo sapien
tacagtaagggaggatcgttcaatg

SEQ ID NO: 2738675 - DNA, 25 bp, Homo sapien
tgtaagggatgaattcttaatgaag

SEQ ID NO: 2738676 - DNA, 25 bp, Homo sapien
ctgatgcactgtaagggatgaattc

SEQ ID NO: 2738677 - DNA, 25 bp, Homo sapien
cgtgtaaggtttgtactccggctga

SEQ ID NO: 2738678 - DNA, 25 bp, Homo sapien
ttgatgtcgtgtaaggtttgtactc

SEQ ID NO: 2738679 - DNA, 25 bp, Homo sapien
tgggctgtccagttaaacactctca

SEQ ID NO: 2738680 - DNA, 25 bp, Homo sapien
gttaatcatgaggtaagggccagtg

SEQ ID NO: 2738681 - DNA, 25 bp, Homo sapien
tgtaaagtctctgatagccaaagga

SEQ ID NO: 2738682 - DNA, 25 bp, Homo sapien
taggactacataccaggtctctggg

SEQ ID NO: 2738683 - DNA, 25 bp, Homo sapien
ttacctttgtggcaccaacttttga

SEQ ID NO: 2738684 - DNA, 25 bp, Homo sapien
tatctttgccctccatagcatttca

SEQ ID NO: 2738685 - DNA, 25 bp, Homo sapien
agtattaactattcctatcgctgtg

SEQ ID NO: 2738686 - DNA, 25 bp, Homo sapien
tgcgactggccgacatagttctgtt

SEQ ID NO: 2738687 - DNA, 25 bp, Homo sapien
ggttttgaagcctaggatggatgca

SEQ ID NO: 2738688 - DNA, 25 bp, Homo sapien
ttttcttgttccccacatgatctca

SEQ ID NO: 2738689 - DNA, 25 bp, Homo sapien
taatgacagcagcaaaataaacgct

SEQ ID NO: 2738690 - DNA, 25 bp, Homo sapien
gcagcaaaataaacgctcagaaggc

SEQ ID NO: 2738691 - DNA, 25 bp, Homo sapien
ttgctgagccctgttgggacccttg

SEQ ID NO: 2738692 - DNA, 25 bp, Homo sapien
ggacagtggctacgtgccagtaatt

SEQ ID NO: 2738693 - DNA, 25 bp, Homo sapien
agtctgcttacgcttccccaggaca

SEQ ID NO: 2738694 - DNA, 25 bp, Homo sapien
ccttgaagcgtgatataataaggtc

SEQ ID NO: 2738695 - DNA, 25 bp, Homo sapien
gccttgcactaaggcgcaggaagat

SEQ ID NO: 2738696 - DNA, 25 bp, Homo sapien
caggtctctgccttgcactaaggcg

SEQ ID NO: 2738697 - DNA, 25 bp, Homo sapien
caggaagatgcagatcagcgaaaag

SEQ ID NO: 2738698 - DNA, 25 bp, Homo sapien
tccgttcgctttagaaccaggtctc

SEQ ID NO: 2738699 - DNA, 25 bp, Homo sapien
ggcgagagatcgcaagcgccacatc

SEQ ID NO: 2738700 - DNA, 25 bp, Homo sapien
tccctctgcggctttgaccaccgtg

SEQ ID NO: 2738701 - DNA, 25 bp, Homo sapien
cgccacatcgcagtcagaacacaat

SEQ ID NO: 2738702 - DNA, 25 bp, Homo sapien
tcgctcttcgaggagcctctgccgg

SEQ ID NO: 2738703 - DNA, 25 bp, Homo sapien
ggggcattcgatcagcgtcctccag

SEQ ID NO: 2738704 - DNA, 25 bp, Homo sapien
tccgggaagtttggggcattcgatc

SEQ ID NO: 2738705 - DNA, 25 bp, Homo sapien
tcagcgtcctccagaatggaccaca

SEQ ID NO: 2738706 - DNA, 25 bp, Homo sapien
cagcgtcctccagaatggaccacaa

SEQ ID NO: 2738707 - DNA, 25 bp, Homo sapien
ggagtcacgggtgggcagaagcggc

SEQ ID NO: 2738708 - DNA, 25 bp, Homo sapien
cgggtgggcagaagcggcgtttgtg

SEQ ID NO: 2738709 - DNA, 25 bp, Homo sapien
ctggagtcacgggtgggcagaagcg

SEQ ID NO: 2738710 - DNA, 25 bp, Homo sapien
gtcacgggtgggcagaagcggcgtt

SEQ ID NO: 2738711 - DNA, 25 bp, Homo sapien
tctgggttcgactggattggaagac

SEQ ID NO: 2738712 - DNA, 25 bp, Homo sapien
ggagaggcaacggagggcagtgtct

SEQ ID NO: 2738713 - DNA, 25 bp, Homo sapien
ctccctctgcggctttggaacagct

SEQ ID NO: 2738714 - DNA, 25 bp, Homo sapien
ctggattggaagaccgctccgctct

SEQ ID NO: 2738715 - DNA, 25 bp, Homo sapien
ggcaggtgtggagcttcacacctgc

SEQ ID NO: 2738716 - DNA, 25 bp, Homo sapien
tcctcaggctagaagggtccacaca

SEQ ID NO: 2738717 - DNA, 25 bp, Homo sapien
cctgcaggactcctcaggctagaag

SEQ ID NO: 2738718 - DNA, 25 bp, Homo sapien
cttagggacaggcaaagtgctatgg

SEQ ID NO: 2738719 - DNA, 25 bp, Homo sapien
ccatggttggcaggtggctgacagc

SEQ ID NO: 2738720 - DNA, 25 bp, Homo sapien
ctggaccatggttggcaggtggctg

SEQ ID NO: 2738721 - DNA, 25 bp, Homo sapien
catggttggcaggtggctgacagcc

SEQ ID NO: 2738722 - DNA, 25 bp, Homo sapien
gaccatggttggcaggtggctgaca

SEQ ID NO: 2738723 - DNA, 25 bp, Homo sapien
tgggtgaacagtatagccacatcct

SEQ ID NO: 2738724 - DNA, 25 bp, Homo sapien
tcctgggtgaacagtatagccacat

SEQ ID NO: 2738725 - DNA, 25 bp, Homo sapien
gtgaacagtatagccacatccttga

SEQ ID NO: 2738726 - DNA, 25 bp, Homo sapien
ggtgaacagtatagccacatccttg

SEQ ID NO: 2738727 - DNA, 25 bp, Homo sapien
taaggggagacaaaaatgaaccaca

SEQ ID NO: 2738728 - DNA, 25 bp, Homo sapien
aaggggagacaaaaatgaaccacat

SEQ ID NO: 2738729 - DNA, 25 bp, Homo sapien
agctgggaaaacgtatctggtttgg

SEQ ID NO: 2738730 - DNA, 25 bp, Homo sapien
acgtatctggtttgggtcctaagag

SEQ ID NO: 2738731 - DNA, 25 bp, Homo sapien
ttctagctgggaaaacgtatctggt

SEQ ID NO: 2738732 - DNA, 25 bp, Homo sapien
cgtatctggtttgggtcctaagagt

SEQ ID NO: 2738733 - DNA, 25 bp, Homo sapien
ccaaaccagcctcagtgcggcatct

SEQ ID NO: 2738734 - DNA, 25 bp, Homo sapien
tgcggcatctccacgaaactcagaa

SEQ ID NO: 2738735 - DNA, 25 bp, Homo sapien
gcatctccacgaaactcagaaatca

SEQ ID NO: 2738736 - DNA, 25 bp, Homo sapien
gcctcagtgcggcatctccacgaaa

SEQ ID NO: 2738737 - DNA, 25 bp, Homo sapien
cctggataggcaatgagggattact

SEQ ID NO: 2738738 - DNA, 25 bp, Homo sapien
tagagaaaacggacccaatgatggg

SEQ ID NO: 2738739 - DNA, 25 bp, Homo sapien
ctgaggaaagcttctcacaagaaag

SEQ ID NO: 2738740 - DNA, 25 bp, Homo sapien
gaactgtgttgaagactgaagcccc

SEQ ID NO: 2738741 - DNA, 25 bp, Homo sapien
ttacatgataacactcatcttcaaa

SEQ ID NO: 2738742 - DNA, 25 bp, Homo sapien
catgataacactcatcttcaaatag

SEQ ID NO: 2738743 - DNA, 25 bp, Homo sapien
tcaaatagagtttaccaagagggga

SEQ ID NO: 2738744 - DNA, 25 bp, Homo sapien
agtcaaatgcatcccggtttgacca

SEQ ID NO: 2738745 - DNA, 25 bp, Homo sapien
ttcttgatgtgagtgctgactacac

SEQ ID NO: 2738746 - DNA, 25 bp, Homo sapien
cctttacgacaaaagaaactgcgag

SEQ ID NO: 2738747 - DNA, 25 bp, Homo sapien
gatgaatctcagacatactgttgaa

SEQ ID NO: 2738748 - DNA, 25 bp, Homo sapien
tgttccaagtgacaacaaggatgaa

SEQ ID NO: 2738749 - DNA, 25 bp, Homo sapien
tacgtcagcaagtgtaaggcttatt

SEQ ID NO: 2738750 - DNA, 25 bp, Homo sapien
ggcttattataatgctcgagtaatc

SEQ ID NO: 2738751 - DNA, 25 bp, Homo sapien
ctaaagcaatgttgtgttggcacaa

SEQ ID NO: 2738752 - DNA, 25 bp, Homo sapien
aaactggagaatttacgtcagcaag

SEQ ID NO: 2738753 - DNA, 25 bp, Homo sapien
aaaatgtaagaaggcatgaaaagca

SEQ ID NO: 2738754 - DNA, 25 bp, Homo sapien
tacaattgattatatgagacaataa

SEQ ID NO: 2738755 - DNA, 25 bp, Homo sapien
ccagcagatctacattaaaagaaac

SEQ ID NO: 2738756 - DNA, 25 bp, Homo sapien
aaaacagagatggtgtcaccagcag

SEQ ID NO: 2738757 - DNA, 25 bp, Homo sapien
tagtacgggcaaatgagcagttgac

SEQ ID NO: 2738758 - DNA, 25 bp, Homo sapien
tcctgcagggctacaaaactagtag

SEQ ID NO: 2738759 - DNA, 25 bp, Homo sapien
aaggccagctgtgctaagaaattca

SEQ ID NO: 2738760 - DNA, 25 bp, Homo sapien
tgcactctagctgctaccagggaag

SEQ ID NO: 2738761 - DNA, 25 bp, Homo sapien
agatgagctcatagtgctcccggat

SEQ ID NO: 2738762 - DNA, 25 bp, Homo sapien
tcgctgcaaactgatctcctggcct

SEQ ID NO: 2738763 - DNA, 25 bp, Homo sapien
ggtgagtgagtaccactcgctgcaa

SEQ ID NO: 2738764 - DNA, 25 bp, Homo sapien
aggaatctctgccttgacagtagat

SEQ ID NO: 2738765 - DNA, 25 bp, Homo sapien
tcaggtgagtgcttcggataaaggc

SEQ ID NO: 2738766 - DNA, 25 bp, Homo sapien
taaggtgcgtactctggtgaaaggc

SEQ ID NO: 2738767 - DNA, 25 bp, Homo sapien
ctagtgctgattggtcccgaaaggc

SEQ ID NO: 2738768 - DNA, 25 bp, Homo sapien
tgttcagtaagggaagagttcaccc

SEQ ID NO: 2738769 - DNA, 25 bp, Homo sapien
taaagtgactatcttgatgcaagct

SEQ ID NO: 2738770 - DNA, 25 bp, Homo sapien
gcaagctttcatagttattctctag

SEQ ID NO: 2738771 - DNA, 25 bp, Homo sapien
tgtgaaacctgaccctcagtaaata

SEQ ID NO: 2738772 - DNA, 25 bp, Homo sapien
caaaccccatgacactgtgaaacct

SEQ ID NO: 2738773 - DNA, 25 bp, Homo sapien
ggtgacgtactttctctacactggg

SEQ ID NO: 2738774 - DNA, 25 bp, Homo sapien
ggcaccatgcagacagttaggcgtt

SEQ ID NO: 2738775 - DNA, 25 bp, Homo sapien
gggcaaatgaatcgtctcacaggga

SEQ ID NO: 2738776 - DNA, 25 bp, Homo sapien
ctcacagggattctacagggatgaa

SEQ ID NO: 2738777 - DNA, 25 bp, Homo sapien
tcacagctgggtatgtcgacatggc

SEQ ID NO: 2738778 - DNA, 25 bp, Homo sapien
gaaaaagtcttactgcagggtcctc

SEQ ID NO: 2738779 - DNA, 25 bp, Homo sapien
tccctgaagagtcccaaatcgtggt

SEQ ID NO: 2738780 - DNA, 25 bp, Homo sapien
tagagagcagtatcatccacgtgag

SEQ ID NO: 2738781 - DNA, 25 bp, Homo sapien
gaagaacctatcagtctagatgcca

SEQ ID NO: 2738782 - DNA, 25 bp, Homo sapien
cagatgacaaatcagtcagctggag

SEQ ID NO: 2738783 - DNA, 25 bp, Homo sapien
aggctcggccacagtaacctggaag

SEQ ID NO: 2738784 - DNA, 25 bp, Homo sapien
taacgtcttagagagggcgctgtca

SEQ ID NO: 2738785 - DNA, 25 bp, Homo sapien
gaccacgtggggcttcgatggtcat

SEQ ID NO: 2738786 - DNA, 25 bp, Homo sapien
cacgctgctttccaggaccacgtgg

SEQ ID NO: 2738787 - DNA, 25 bp, Homo sapien
cacagcatgaacacgctgctttcca

SEQ ID NO: 2738788 - DNA, 25 bp, Homo sapien
tgctggccccggtgatgggaaacag

SEQ ID NO: 2738789 - DNA, 25 bp, Homo sapien
tacaagagtctatggcaggaaaacg

SEQ ID NO: 2738790 - DNA, 25 bp, Homo sapien
gaaaacgtggatgcctgaagttaga

SEQ ID NO: 2738791 - DNA, 25 bp, Homo sapien
cagctggtacaagaattcatccgag

SEQ ID NO: 2738792 - DNA, 25 bp, Homo sapien
gacttgtccattaggtgcagtaggg

SEQ ID NO: 2738793 - DNA, 25 bp, Homo sapien
gaattcttgtaccagctgcataact

SEQ ID NO: 2738794 - DNA, 25 bp, Homo sapien
gctgcataactatactcccaagatc

SEQ ID NO: 2738795 - DNA, 25 bp, Homo sapien
ctatactcccaagatccagtttctc

SEQ ID NO: 2738796 - DNA, 25 bp, Homo sapien
ctatcttatcgccaactcggatgaa

SEQ ID NO: 2738797 - DNA, 25 bp, Homo sapien
caccctagtggtggagacacacaat

SEQ ID NO: 2738798 - DNA, 25 bp, Homo sapien
ggaactgcttccctcataggacttg

SEQ ID NO: 2738799 - DNA, 25 bp, Homo sapien
taagcacctgggatacatcagcaga

SEQ ID NO: 2738800 - DNA, 25 bp, Homo sapien
tgcttattcattttggtcccacagg

SEQ ID NO: 2738801 - DNA, 25 bp, Homo sapien
agtatcaacatctgagttatttttc

SEQ ID NO: 2738802 - DNA, 25 bp, Homo sapien
tcaacatctgagttatttttcccat

SEQ ID NO: 2738803 - DNA, 25 bp, Homo sapien
ctgtagtatcaacatctgagttatt

SEQ ID NO: 2738804 - DNA, 25 bp, Homo sapien
tatcaacatctgagttatttttccc

SEQ ID NO: 2738805 - DNA, 25 bp, Homo sapien
gaaaaactgctgtagtatggacagc

SEQ ID NO: 2738806 - DNA, 25 bp, Homo sapien
tctcttgggctttgacaggggaaaa

SEQ ID NO: 2738807 - DNA, 25 bp, Homo sapien
gtggaatactgatgcttattacaag

SEQ ID NO: 2738808 - DNA, 25 bp, Homo sapien
cagccagagtggaatactgatgctt

SEQ ID NO: 2738809 - DNA, 25 bp, Homo sapien
cattttactgtggaagagcatcgaa

SEQ ID NO: 2738810 - DNA, 25 bp, Homo sapien
aagagctatctgaccggttttcctg

SEQ ID NO: 2738811 - DNA, 25 bp, Homo sapien
ttggctcacatatggaaacaggtca

SEQ ID NO: 2738812 - DNA, 25 bp, Homo sapien
gcatcgaattccatccagtggccag

SEQ ID NO: 2738813 - DNA, 25 bp, Homo sapien
taaaggcatctcatcacaagacagg

SEQ ID NO: 2738814 - DNA, 25 bp, Homo sapien
cctggactgagagtagttttagcga

SEQ ID NO: 2738815 - DNA, 25 bp, Homo sapien
gagtgaatgcgctctcaaagccctg

SEQ ID NO: 2738816 - DNA, 25 bp, Homo sapien
gggtcttcctgcttatggtctcata

SEQ ID NO: 2738817 - DNA, 25 bp, Homo sapien
agctccacaccgcacaagaggcgag

SEQ ID NO: 2738818 - DNA, 25 bp, Homo sapien
gaggcgagcggaacacctaattcag

SEQ ID NO: 2738819 - DNA, 25 bp, Homo sapien
cacctaattcagagacgtttcccgt

SEQ ID NO: 2738820 - DNA, 25 bp, Homo sapien
tcagagacgtttcccgtcgctgccg

SEQ ID NO: 2738821 - DNA, 25 bp, Homo sapien
tctgccgtgccttaacagggtcaag

SEQ ID NO: 2738822 - DNA, 25 bp, Homo sapien
tgtaggaaaacactgccaaacgtgc

SEQ ID NO: 2738823 - DNA, 25 bp, Homo sapien
gaccctgaaccgaggcggcattttg

SEQ ID NO: 2738824 - DNA, 25 bp, Homo sapien
tcaggcaaggctcattcagataaag

SEQ ID NO: 2738825 - DNA, 25 bp, Homo sapien
cctgctgcctctcttggagaaggca

SEQ ID NO: 2738826 - DNA, 25 bp, Homo sapien
ggctggcagcaacctccttgccatt

SEQ ID NO: 2738827 - DNA, 25 bp, Homo sapien
catgggctggcagcaacctccttgc

SEQ ID NO: 2738828 - DNA, 25 bp, Homo sapien
ctgtacatgggctggcagcaacctc

SEQ ID NO: 2738829 - DNA, 25 bp, Homo sapien
tggcattggagccccattaaattct

SEQ ID NO: 2738830 - DNA, 25 bp, Homo sapien
ggcattggagccccattaaattctt

SEQ ID NO: 2738831 - DNA, 25 bp, Homo sapien
ctggcattggagccccattaaattc

SEQ ID NO: 2738832 - DNA, 25 bp, Homo sapien
cctggcattggagccccattaaatt

SEQ ID NO: 2738833 - DNA, 25 bp, Homo sapien
catgatctccgctcgcttcaacccc

SEQ ID NO: 2738834 - DNA, 25 bp, Homo sapien
atgatctccgctcgcttcaacccct

SEQ ID NO: 2738835 - DNA, 25 bp, Homo sapien
tgatctccgctcgcttcaacccctg

SEQ ID NO: 2738836 - DNA, 25 bp, Homo sapien
ccagcacattcactgagggagatat

SEQ ID NO: 2738837 - DNA, 25 bp, Homo sapien
ctagttctgcctcaactcgggccat

SEQ ID NO: 2738838 - DNA, 25 bp, Homo sapien
gagatataggtggaacaccaccagg

SEQ ID NO: 2738839 - DNA, 25 bp, Homo sapien
ctgggaaaggcggtcactgagtcct

SEQ ID NO: 2738840 - DNA, 25 bp, Homo sapien
caggtgcaaccactcgtcctggctg

SEQ ID NO: 2738841 - DNA, 25 bp, Homo sapien
gtccaggtgcaaccactcgtcctgg

SEQ ID NO: 2738842 - DNA, 25 bp, Homo sapien
tgacctttggcttggaaaagagaat

SEQ ID NO: 2738843 - DNA, 25 bp, Homo sapien
tgggagatgacctttggcttggaaa

SEQ ID NO: 2738844 - DNA, 25 bp, Homo sapien
atgacctttggcttggaaaagagaa

SEQ ID NO: 2738845 - DNA, 25 bp, Homo sapien
gagatgacctttggcttggaaaaga

SEQ ID NO: 2738846 - DNA, 25 bp, Homo sapien
ccttcctctggaaactattctcggt

SEQ ID NO: 2738847 - DNA, 25 bp, Homo sapien
taataagcgatgattttagaccaag

SEQ ID NO: 2738848 - DNA, 25 bp, Homo sapien
taacatttacgcactgtgttgaccc

SEQ ID NO: 2738849 - DNA, 25 bp, Homo sapien
caacttgaagtcaaatgtgccatca

SEQ ID NO: 2738850 - DNA, 25 bp, Homo sapien
aagtgctgagttagggatgagcttt

SEQ ID NO: 2738851 - DNA, 25 bp, Homo sapien
tgctgagttagggatgagctttggc

SEQ ID NO: 2738852 - DNA, 25 bp, Homo sapien
tgtatgaaccctcaagtgctgagtt

SEQ ID NO: 2738853 - DNA, 25 bp, Homo sapien
ctgagttagggatgagctttggctg

SEQ ID NO: 2738854 - DNA, 25 bp, Homo sapien
gaattcgatggtgcctacttagccg

SEQ ID NO: 2738855 - DNA, 25 bp, Homo sapien
tattaacgcctgagtgggaactgaa

SEQ ID NO: 2738856 - DNA, 25 bp, Homo sapien
tatattaagccgtgaaatccaagag

SEQ ID NO: 2738857 - DNA, 25 bp, Homo sapien
gaatttttcgatgagtattaacgcc

SEQ ID NO: 2738858 - DNA, 25 bp, Homo sapien
tccttggcagaaaaacttagcactt

SEQ ID NO: 2738859 - DNA, 25 bp, Homo sapien
tatttgcccagtgacctttagagtg

SEQ ID NO: 2738860 - DNA, 25 bp, Homo sapien
gatgttagcctctgtaaagcccaac

SEQ ID NO: 2738861 - DNA, 25 bp, Homo sapien
ggctggtaaccagaaagctcacaga

SEQ ID NO: 2738862 - DNA, 25 bp, Homo sapien
gcagatgtccacaacacgcacaagt

SEQ ID NO: 2738863 - DNA, 25 bp, Homo sapien
tgtaaaatcatacattaccgtggcc

SEQ ID NO: 2738864 - DNA, 25 bp, Homo sapien
tatacatcccttgatgcccacatgc

SEQ ID NO: 2738865 - DNA, 25 bp, Homo sapien
tgaagctcagtattgtcacacatcc

SEQ ID NO: 2738866 - DNA, 25 bp, Homo sapien
agggatgagttggactagttacctg

SEQ ID NO: 2738867 - DNA, 25 bp, Homo sapien
gatgagttggactagttacctgcag

SEQ ID NO: 2738868 - DNA, 25 bp, Homo sapien
tgagttggactagttacctgcagca

SEQ ID NO: 2738869 - DNA, 25 bp, Homo sapien
agttggactagttacctgcagcagg

SEQ ID NO: 2738870 - DNA, 25 bp, Homo sapien
gagtctgactcgttttaagttccaa

SEQ ID NO: 2738871 - DNA, 25 bp, Homo sapien
ggcacaactggccagcaatattaaa

SEQ ID NO: 2738872 - DNA, 25 bp, Homo sapien
tacagaggctctattccacaggccc

SEQ ID NO: 2738873 - DNA, 25 bp, Homo sapien
tgtttgggagataactgtgcaaagg

SEQ ID NO: 2738874 - DNA, 25 bp, Homo sapien
gaagagaccactgcgagcgcctcaa

SEQ ID NO: 2738875 - DNA, 25 bp, Homo sapien
actcgctggagaggcccggatccac

SEQ ID NO: 2738876 - DNA, 25 bp, Homo sapien
ccgagccgcgtagggctggtcccag

SEQ ID NO: 2738877 - DNA, 25 bp, Homo sapien
ccggcaatcctagccaagcctggat

SEQ ID NO: 2738878 - DNA, 25 bp, Homo sapien
tctccggcagtccaggccgctcgcg

SEQ ID NO: 2738879 - DNA, 25 bp, Homo sapien
agtccaggccgctcgcggacggcgc

SEQ ID NO: 2738880 - DNA, 25 bp, Homo sapien
tccggcagtccaggccgctcgcgga

SEQ ID NO: 2738881 - DNA, 25 bp, Homo sapien
aggccgctcgcggacggcgccccgg

SEQ ID NO: 2738882 - DNA, 25 bp, Homo sapien
cctcagtcttcctgcccagggagag

SEQ ID NO: 2738883 - DNA, 25 bp, Homo sapien
agagcagagtgtggacacggtgggt

SEQ ID NO: 2738884 - DNA, 25 bp, Homo sapien
cctcctcagtcttcctgcccaggga

SEQ ID NO: 2738885 - DNA, 25 bp, Homo sapien
ggagagcagagtgtggacacggtgg

SEQ ID NO: 2738886 - DNA, 25 bp, Homo sapien
gagcagacagcagatccacagccat

SEQ ID NO: 2738887 - DNA, 25 bp, Homo sapien
ctgagcagacagcagatccacagcc

SEQ ID NO: 2738888 - DNA, 25 bp, Homo sapien
tgagcagacagcagatccacagcca

SEQ ID NO: 2738889 - DNA, 25 bp, Homo sapien
tcctgctgtggatgtaggcgagctc

SEQ ID NO: 2738890 - DNA, 25 bp, Homo sapien
taatagctggatattcctgtgcact

SEQ ID NO: 2738891 - DNA, 25 bp, Homo sapien
gctaaaatgaagtaagtctctcctg

SEQ ID NO: 2738892 - DNA, 25 bp, Homo sapien
gaacaaccctacctttgggcagcag

SEQ ID NO: 2738893 - DNA, 25 bp, Homo sapien
gtccaggtgcaaccactcgtcctgg

SEQ ID NO: 2738894 - DNA, 25 bp, Homo sapien
caggtgcaaccactcgtcctggctg

SEQ ID NO: 2738895 - DNA, 25 bp, Homo sapien
agtgagaccaggctgctgtagttct

SEQ ID NO: 2738896 - DNA, 25 bp, Homo sapien
ggctgctgtagttctccagcatcac

SEQ ID NO: 2738897 - DNA, 25 bp, Homo sapien
ccagtgagaccaggctgctgtagtt

SEQ ID NO: 2738898 - DNA, 25 bp, Homo sapien
caggctgctgtagttctccagcatc

SEQ ID NO: 2738899 - DNA, 25 bp, Homo sapien
aaggcagcacaagcacttcgcaggg

SEQ ID NO: 2738900 - DNA, 25 bp, Homo sapien
ctcagttcagaaccattatagggcc

SEQ ID NO: 2738901 - DNA, 25 bp, Homo sapien
ggcagacaaggcagcacaagcactt

SEQ ID NO: 2738902 - DNA, 25 bp, Homo sapien
cactggagctgtcaatggccgggga

SEQ ID NO: 2738903 - DNA, 25 bp, Homo sapien
gaaccaacacagcaaagaaggcaag

SEQ ID NO: 2738904 - DNA, 25 bp, Homo sapien
tctgaaccaacacagcaaagaaggc

SEQ ID NO: 2738905 - DNA, 25 bp, Homo sapien
accaacacagcaaagaaggcaagcc

SEQ ID NO: 2738906 - DNA, 25 bp, Homo sapien
tgaaccaacacagcaaagaaggcaa

SEQ ID NO: 2738907 - DNA, 25 bp, Homo sapien
gaccaatcctagaactgacctacta

SEQ ID NO: 2738908 - DNA, 25 bp, Homo sapien
caaatagcatgaagaccaatcctag

SEQ ID NO: 2738909 - DNA, 25 bp, Homo sapien
aatcctagaactgacctactactca

SEQ ID NO: 2738910 - DNA, 25 bp, Homo sapien
gaagtttgaacaaatagcatgaaga

SEQ ID NO: 2738911 - DNA, 25 bp, Homo sapien
tcaactttggcattgaaaatggaat

SEQ ID NO: 2738912 - DNA, 25 bp, Homo sapien
ctgatgaatcaactttggcattgaa

SEQ ID NO: 2738913 - DNA, 25 bp, Homo sapien
gatgaatcaactttggcattgaaaa

SEQ ID NO: 2738914 - DNA, 25 bp, Homo sapien
aactttggcattgaaaatggaatcc

SEQ ID NO: 2738915 - DNA, 25 bp, Homo sapien
tagacgggtatctgaagggacttct

SEQ ID NO: 2738916 - DNA, 25 bp, Homo sapien
tctttccaccatgcagggatcttct

SEQ ID NO: 2738917 - DNA, 25 bp, Homo sapien
ctagacgggtatctgaagggacttc

SEQ ID NO: 2738918 - DNA, 25 bp, Homo sapien
ggcctgagcatctcaagaggactca

SEQ ID NO: 2738919 - DNA, 25 bp, Homo sapien
gaactgcctctttgtgacctacttg

SEQ ID NO: 2738920 - DNA, 25 bp, Homo sapien
tgtctataaagaaccccttgtgccc

SEQ ID NO: 2738921 - DNA, 25 bp, Homo sapien
gaaaagatttagttcgaggtgactc

SEQ ID NO: 2738922 - DNA, 25 bp, Homo sapien
aaatgtcctgtctatgaggcaatgc

SEQ ID NO: 2738923 - DNA, 25 bp, Homo sapien
gaacactctgttgtgtgacaagagc

SEQ ID NO: 2738924 - DNA, 25 bp, Homo sapien
cttcaaagttaatgtcccagtgacc

SEQ ID NO: 2738925 - DNA, 25 bp, Homo sapien
gatggttttctcatgcgaatctatc

SEQ ID NO: 2738926 - DNA, 25 bp, Homo sapien
cgctgatgttcgataagggttacaa

SEQ ID NO: 2738927 - DNA, 25 bp, Homo sapien
ggatcctctcatgttcggttaaaaa

SEQ ID NO: 2738928 - DNA, 25 bp, Homo sapien
tgctctacagttgaaggccttctca

SEQ ID NO: 2738929 - DNA, 25 bp, Homo sapien
tacaatacgtgtgaaggttctccca

SEQ ID NO: 2738930 - DNA, 25 bp, Homo sapien
taaaaaatctctgatactgggtaag

SEQ ID NO: 2738931 - DNA, 25 bp, Homo sapien
aaatctctgatactgggtaagtgag

SEQ ID NO: 2738932 - DNA, 25 bp, Homo sapien
aaaaatctctgatactgggtaagtg

SEQ ID NO: 2738933 - DNA, 25 bp, Homo sapien
aaaatctctgatactgggtaagtga

SEQ ID NO: 2738934 - DNA, 25 bp, Homo sapien
gagaataccttcaacttggcgcctg

SEQ ID NO: 2738935 - DNA, 25 bp, Homo sapien
agtcgcttgaagaacatcaccctgg

SEQ ID NO: 2738936 - DNA, 25 bp, Homo sapien
gaaagatccgtcaagctggtgtcat

SEQ ID NO: 2738937 - DNA, 25 bp, Homo sapien
aaagaagtgcctcctatgttagcca

SEQ ID NO: 2738938 - DNA, 25 bp, Homo sapien
gcccaggagcgccacaatgatcttg

SEQ ID NO: 2738939 - DNA, 25 bp, Homo sapien
tcattacttttgagggtccccagac

SEQ ID NO: 2738940 - DNA, 25 bp, Homo sapien
gccaatgattacatccctggaggat

SEQ ID NO: 2738941 - DNA, 25 bp, Homo sapien
tccaggtccaagtagcaggaagata

SEQ ID NO: 2738942 - DNA, 25 bp, Homo sapien
ggccatgggcttcagttacttacta

SEQ ID NO: 2738943 - DNA, 25 bp, Homo sapien
tgtcctcacgataaggcaactggtt

SEQ ID NO: 2738944 - DNA, 25 bp, Homo sapien
gctcaggcaagagaggatccacttc

SEQ ID NO: 2738945 - DNA, 25 bp, Homo sapien
gagagcacatgcctatgcagaagcc

SEQ ID NO: 2738946 - DNA, 25 bp, Homo sapien
tcagagttgcgcgataattagcatg

SEQ ID NO: 2738947 - DNA, 25 bp, Homo sapien
tacagattggcattaacagataagc

SEQ ID NO: 2738948 - DNA, 25 bp, Homo sapien
gatagaactcacacaccatgcaatt

SEQ ID NO: 2738949 - DNA, 25 bp, Homo sapien
agtgtacagtccaaaagccttgtag

SEQ ID NO: 2738950 - DNA, 25 bp, Homo sapien
acagtacaactgaggagcatccacc

SEQ ID NO: 2738951 - DNA, 25 bp, Homo sapien
caaacccttcttaatctgcaacgta

SEQ ID NO: 2738952 - DNA, 25 bp, Homo sapien
tccaacaatgctatcggtgtgaaag

SEQ ID NO: 2738953 - DNA, 25 bp, Homo sapien
aatgacttccaagcaatggatatgc

SEQ ID NO: 2738954 - DNA, 25 bp, Homo sapien
gccagggtgggtgtaagggcgaagc

SEQ ID NO: 2738955 - DNA, 25 bp, Homo sapien
gagccagggtgggtgtaagggcgaa

SEQ ID NO: 2738956 - DNA, 25 bp, Homo sapien
agccagggtgggtgtaagggcgaag

SEQ ID NO: 2738957 - DNA, 25 bp, Homo sapien
gagagccagggtgggtgtaagggcg

SEQ ID NO: 2738958 - DNA, 25 bp, Homo sapien
ttgtcagaatgggagttagagtccc

SEQ ID NO: 2738959 - DNA, 25 bp, Homo sapien
tccacacacccggatgacagcttga

SEQ ID NO: 2738960 - DNA, 25 bp, Homo sapien
gatgacagcttgaggcagcctcgga

SEQ ID NO: 2738961 - DNA, 25 bp, Homo sapien
tcctgatagctgatgtggaagcctc

SEQ ID NO: 2738962 - DNA, 25 bp, Homo sapien
tcctccctcctccctcctccgcaga

SEQ ID NO: 2738963 - DNA, 25 bp, Homo sapien
ctcctccctcctccctcctccgcag

SEQ ID NO: 2738964 - DNA, 25 bp, Homo sapien
cctccctcctccctcctccgcagac

SEQ ID NO: 2738965 - DNA, 25 bp, Homo sapien
atgtcgtggtgagcacgggatccag

SEQ ID NO: 2738966 - DNA, 25 bp, Homo sapien
ggatgtcgtggtgagcacgggatcc

SEQ ID NO: 2738967 - DNA, 25 bp, Homo sapien
gcacgggatccagaccgcagggagc

SEQ ID NO: 2738968 - DNA, 25 bp, Homo sapien
cacgggatccagaccgcagggagca

SEQ ID NO: 2738969 - DNA, 25 bp, Homo sapien
cttagtgcacccggatagagcagcc

SEQ ID NO: 2738970 - DNA, 25 bp, Homo sapien
cccttagtgcacccggatagagcag

SEQ ID NO: 2738971 - DNA, 25 bp, Homo sapien
ccttagtgcacccggatagagcagc

SEQ ID NO: 2738972 - DNA, 25 bp, Homo sapien
tcccttagtgcacccggatagagca

SEQ ID NO: 2738973 - DNA, 25 bp, Homo sapien
caccgcagttgcctctaatgaggac

SEQ ID NO: 2738974 - DNA, 25 bp, Homo sapien
gcctggccgcatcgtgaatcgcagt

SEQ ID NO: 2738975 - DNA, 25 bp, Homo sapien
taatgaggactcctggtggtggcac

SEQ ID NO: 2738976 - DNA, 25 bp, Homo sapien
aatcgcagtgcgcagattgggccct

SEQ ID NO: 2738977 - DNA, 25 bp, Homo sapien
aactttcacgagtgctgagaccgca

SEQ ID NO: 2738978 - DNA, 25 bp, Homo sapien
cagtggtcggacaggagtgttttca

SEQ ID NO: 2738979 - DNA, 25 bp, Homo sapien
caaacaatccgaaggcatatgggct

SEQ ID NO: 2738980 - DNA, 25 bp, Homo sapien
tcagctggtcgtggtggaaatctcg

SEQ ID NO: 2738981 - DNA, 25 bp, Homo sapien
gggatgaggggcgtccagtcttcaa

SEQ ID NO: 2738982 - DNA, 25 bp, Homo sapien
gatgaggggcgtccagtcttcaaaa

SEQ ID NO: 2738983 - DNA, 25 bp, Homo sapien
gtcttcaaaatgcaggctcccaggg

SEQ ID NO: 2738984 - DNA, 25 bp, Homo sapien
tccagtcttcaaaatgcaggctccc

SEQ ID NO: 2738985 - DNA, 25 bp, Homo sapien
ggagatacagacaatccgcccgcat

SEQ ID NO: 2738986 - DNA, 25 bp, Homo sapien
aaggagatacagacaatccgcccgc

SEQ ID NO: 2738987 - DNA, 25 bp, Homo sapien
caaggagatacagacaatccgcccg

SEQ ID NO: 2738988 - DNA, 25 bp, Homo sapien
aggagatacagacaatccgcccgca

SEQ ID NO: 2738989 - DNA, 25 bp, Homo sapien
ggcagtggccggcataagagctggg

SEQ ID NO: 2738990 - DNA, 25 bp, Homo sapien
ccggcataagagctgggccttgctg

SEQ ID NO: 2738991 - DNA, 25 bp, Homo sapien
cttccgcttcacacccacactggtt

SEQ ID NO: 2738992 - DNA, 25 bp, Homo sapien
tggccggcataagagctgggccttg

SEQ ID NO: 2738993 - DNA, 25 bp, Homo sapien
ctgcagagtccacggggagtcgggc

SEQ ID NO: 2738994 - DNA, 25 bp, Homo sapien
agagtccacggggagtcgggctgtg

SEQ ID NO: 2738995 - DNA, 25 bp, Homo sapien
gtccacggggagtcgggctgtggaa

SEQ ID NO: 2738996 - DNA, 25 bp, Homo sapien
tccacggggagtcgggctgtggaag

SEQ ID NO: 2738997 - DNA, 25 bp, Homo sapien
cagcgtccagggcacggtggactgg

SEQ ID NO: 2738998 - DNA, 25 bp, Homo sapien
gtccagggcacggtggactgggccc

SEQ ID NO: 2738999 - DNA, 25 bp, Homo sapien
agcagcgtccagggcacggtggact

SEQ ID NO: 2739000 - DNA, 25 bp, Homo sapien
gcgtccagggcacggtggactgggc

SEQ ID NO: 2739001 - DNA, 25 bp, Homo sapien
cgagggtgaagccctgcacacggaa

SEQ ID NO: 2739002 - DNA, 25 bp, Homo sapien
tccatggtcatggaggtcaaagcag

SEQ ID NO: 2739003 - DNA, 25 bp, Homo sapien
aggtccatggtcatggaggtcaaag

SEQ ID NO: 2739004 - DNA, 25 bp, Homo sapien
gagggtgaagccctgcacacggaag

SEQ ID NO: 2739005 - DNA, 25 bp, Homo sapien
gcaccgcttaactgacgcgactgga

SEQ ID NO: 2739006 - DNA, 25 bp, Homo sapien
ccgcttaactgacgcgactggatcc

SEQ ID NO: 2739007 - DNA, 25 bp, Homo sapien
tgggcagcaccgcttaactgacgcg

SEQ ID NO: 2739008 - DNA, 25 bp, Homo sapien
ttaactgacgcgactggatccaggt

SEQ ID NO: 2739009 - DNA, 25 bp, Homo sapien
gctaacgttcccgaggagcttccag

SEQ ID NO: 2739010 - DNA, 25 bp, Homo sapien
ctgcgatgagggacacagctaacgt

SEQ ID NO: 2739011 - DNA, 25 bp, Homo sapien
gcttccaggcaccttgcactctgtc

SEQ ID NO: 2739012 - DNA, 25 bp, Homo sapien
gagggacacagctaacgttcccgag

SEQ ID NO: 2739013 - DNA, 25 bp, Homo sapien
tcgttttccaccagcgtgaggtcat

SEQ ID NO: 2739014 - DNA, 25 bp, Homo sapien
tacagaatggcctttgacatggcaa

SEQ ID NO: 2739015 - DNA, 25 bp, Homo sapien
tcgcctcgttttgctggacgtggaa

SEQ ID NO: 2739016 - DNA, 25 bp, Homo sapien
gcccggctgggttgatctgctgtct

SEQ ID NO: 2739017 - DNA, 25 bp, Homo sapien
agcagccagttcctaggcccagcag

SEQ ID NO: 2739018 - DNA, 25 bp, Homo sapien
agccagttcctaggcccagcagcat

SEQ ID NO: 2739019 - DNA, 25 bp, Homo sapien
gggagcagccagttcctaggcccag

SEQ ID NO: 2739020 - DNA, 25 bp, Homo sapien
gagcagccagttcctaggcccagca

SEQ ID NO: 2739021 - DNA, 25 bp, Homo sapien
ccatgctcatgtgttgggggtgtag

SEQ ID NO: 2739022 - DNA, 25 bp, Homo sapien
atgctcatgtgttgggggtgtaggc

SEQ ID NO: 2739023 - DNA, 25 bp, Homo sapien
catgctcatgtgttgggggtgtagg

SEQ ID NO: 2739024 - DNA, 25 bp, Homo sapien
gcaatatcccgggagctcccagcat

SEQ ID NO: 2739025 - DNA, 25 bp, Homo sapien
gctcctttgttctgggcaatatccc

SEQ ID NO: 2739026 - DNA, 25 bp, Homo sapien
gatggtctcaagagggttctgccct

SEQ ID NO: 2739027 - DNA, 25 bp, Homo sapien
tgtccagaacgtcaggtgcctgtgc

SEQ ID NO: 2739028 - DNA, 25 bp, Homo sapien
tatacccgtgcctggatgtcctcca

SEQ ID NO: 2739029 - DNA, 25 bp, Homo sapien
cagagctgttggatgcggcactgag

SEQ ID NO: 2739030 - DNA, 25 bp, Homo sapien
catctgtagcgcatcagcgggagcc

SEQ ID NO: 2739031 - DNA, 25 bp, Homo sapien
tgcggtcgtcctgttgttcttggag

SEQ ID NO: 2739032 - DNA, 25 bp, Homo sapien
agcggttccgtttctgtgaggcgaa

SEQ ID NO: 2739033 - DNA, 25 bp, Homo sapien
tccagcggttccgtttctgtgaggc

SEQ ID NO: 2739034 - DNA, 25 bp, Homo sapien
cctttccagcggttccgtttctgtg

SEQ ID NO: 2739035 - DNA, 25 bp, Homo sapien
tttccagcggttccgtttctgtgag

SEQ ID NO: 2739036 - DNA, 25 bp, Homo sapien
tgtcctctcaaccttgcctggagcc

SEQ ID NO: 2739037 - DNA, 25 bp, Homo sapien
tggcaggtgacgccagcagagatca

SEQ ID NO: 2739038 - DNA, 25 bp, Homo sapien
aggacagtggtctcgtatgggcaca

SEQ ID NO: 2739039 - DNA, 25 bp, Homo sapien
gggcagagctggataacactggccc

SEQ ID NO: 2739040 - DNA, 25 bp, Homo sapien
ctgctcctggtgcaaactctcttga

SEQ ID NO: 2739041 - DNA, 25 bp, Homo sapien
ctgagccagcccagacgcgctcgag

SEQ ID NO: 2739042 - DNA, 25 bp, Homo sapien
acccggcagatggcggcctgagcca

SEQ ID NO: 2739043 - DNA, 25 bp, Homo sapien
tcaggttctgttcctgcaaataggt

SEQ ID NO: 2739044 - DNA, 25 bp, Homo sapien
tccacccgacatgctgttgttctgg

SEQ ID NO: 2739045 - DNA, 25 bp, Homo sapien
cccgacatgctgttgttctggctca

SEQ ID NO: 2739046 - DNA, 25 bp, Homo sapien
agctccacccgacatgctgttgttc

SEQ ID NO: 2739047 - DNA, 25 bp, Homo sapien
agcgcgctcagctccgcccagcatg

SEQ ID NO: 2739048 - DNA, 25 bp, Homo sapien
ggacagttctggaagaccggccagt

SEQ ID NO: 2739049 - DNA, 25 bp, Homo sapien
ttctgaggagctgcattagggctgc

SEQ ID NO: 2739050 - DNA, 25 bp, Homo sapien
ctttggtggagcaccgtgggcaggt

SEQ ID NO: 2739051 - DNA, 25 bp, Homo sapien
gatgcttccagcactaggtgggtga

SEQ ID NO: 2739052 - DNA, 25 bp, Homo sapien
gttggagatgccagcgcggtgatgt

SEQ ID NO: 2739053 - DNA, 25 bp, Homo sapien
gcggcgctcctgtcctcgtgcagac

SEQ ID NO: 2739054 - DNA, 25 bp, Homo sapien
gcgcggtgatgtggcccacgcggaa

SEQ ID NO: 2739055 - DNA, 25 bp, Homo sapien
agaccgggcccttgggatggctgtt

SEQ ID NO: 2739056 - DNA, 25 bp, Homo sapien
cctcggcgctggatccctggagtcc

SEQ ID NO: 2739057 - DNA, 25 bp, Homo sapien
cagcaagctcgtactggttgcagtg

SEQ ID NO: 2739058 - DNA, 25 bp, Homo sapien
ttcagcaagctcgtactggttgcag

SEQ ID NO: 2739059 - DNA, 25 bp, Homo sapien
gcaagctcgtactggttgcagtgtg

SEQ ID NO: 2739060 - DNA, 25 bp, Homo sapien
aagctcgtactggttgcagtgtgag

SEQ ID NO: 2739061 - DNA, 25 bp, Homo sapien
ggcaggatatccctgcagcgtcagg

SEQ ID NO: 2739062 - DNA, 25 bp, Homo sapien
ggtggcaggatatccctgcagcgtc

SEQ ID NO: 2739063 - DNA, 25 bp, Homo sapien
gcaggatatccctgcagcgtcaggg

SEQ ID NO: 2739064 - DNA, 25 bp, Homo sapien
ccacgggctgctcagggtgatctcg

SEQ ID NO: 2739065 - DNA, 25 bp, Homo sapien
ccagagtggcaactgggagatacat

SEQ ID NO: 2739066 - DNA, 25 bp, Homo sapien
cagggcccagagtggcaactgggag

SEQ ID NO: 2739067 - DNA, 25 bp, Homo sapien
ctgggagatacataaaagctgtgtc

SEQ ID NO: 2739068 - DNA, 25 bp, Homo sapien
tgcctgggccttttcagggcccaga

SEQ ID NO: 2739069 - DNA, 25 bp, Homo sapien
tctctggcatcacccaaagcgtctg

SEQ ID NO: 2739070 - DNA, 25 bp, Homo sapien
aaagcgtctgctgaggtcccacgga

SEQ ID NO: 2739071 - DNA, 25 bp, Homo sapien
accttggcacgtgctgtgtggctga

SEQ ID NO: 2739072 - DNA, 25 bp, Homo sapien
tcccgggtcccatcattgtcagcat

SEQ ID NO: 2739073 - DNA, 25 bp, Homo sapien
tgccgagaagcagcaatctcaggtt

SEQ ID NO: 2739074 - DNA, 25 bp, Homo sapien
tctgcattgccaggcaggtggggtg

SEQ ID NO: 2739075 - DNA, 25 bp, Homo sapien
tggggtgggaggctacggctgacag

SEQ ID NO: 2739076 - DNA, 25 bp, Homo sapien
ctcttggttcttggtgccgagaagc

SEQ ID NO: 2739077 - DNA, 25 bp, Homo sapien
ggacagaggccatgggcattggtgc

SEQ ID NO: 2739078 - DNA, 25 bp, Homo sapien
aggagggacagaggccatgggcatt

SEQ ID NO: 2739079 - DNA, 25 bp, Homo sapien
aggccatgggcattggtgcgtggga

SEQ ID NO: 2739080 - DNA, 25 bp, Homo sapien
gcattggtgcgtgggagggagcagc

SEQ ID NO: 2739081 - DNA, 25 bp, Homo sapien
gaggctgagcaggagggtgtggagg

SEQ ID NO: 2739082 - DNA, 25 bp, Homo sapien
ctgagcaggagggtgtggaggtccc

SEQ ID NO: 2739083 - DNA, 25 bp, Homo sapien
ctgggggcggccagagagaggctga

SEQ ID NO: 2739084 - DNA, 25 bp, Homo sapien
gagcaggagggtgtggaggtccccg

SEQ ID NO: 2739085 - DNA, 25 bp, Homo sapien
tggcctctggtgctgtggaaaccgg

SEQ ID NO: 2739086 - DNA, 25 bp, Homo sapien
ctctggtgctgtggaaaccggagca

SEQ ID NO: 2739087 - DNA, 25 bp, Homo sapien
tcactgtggcacgaggggaccctgg

SEQ ID NO: 2739088 - DNA, 25 bp, Homo sapien
tggcacgaggggaccctggcctctg

SEQ ID NO: 2739089 - DNA, 25 bp, Homo sapien
ggagcacggaatctgcgttgcaggg

SEQ ID NO: 2739090 - DNA, 25 bp, Homo sapien
agggagcacggaatctgcgttgcag

SEQ ID NO: 2739091 - DNA, 25 bp, Homo sapien
gggagcacggaatctgcgttgcagg

SEQ ID NO: 2739092 - DNA, 25 bp, Homo sapien
tgctcttgagcctatccagtgagtt

SEQ ID NO: 2739093 - DNA, 25 bp, Homo sapien
tagatctttcggtattttcccacag

SEQ ID NO: 2739094 - DNA, 25 bp, Homo sapien
ctctcatttgaggtttgccgatctg

SEQ ID NO: 2739095 - DNA, 25 bp, Homo sapien
actcgctgcagtttgaattgggtaa

SEQ ID NO: 2739096 - DNA, 25 bp, Homo sapien
gagagtccctgtcagtgtccactgt

SEQ ID NO: 2739097 - DNA, 25 bp, Homo sapien
ggacgagcctgaccagatatcaagg

SEQ ID NO: 2739098 - DNA, 25 bp, Homo sapien
gattcttggcatgctgctcaccact

SEQ ID NO: 2739099 - DNA, 25 bp, Homo sapien
tagacacaggaaccgctagagtggg

SEQ ID NO: 2739100 - DNA, 25 bp, Homo sapien
gctgttccatgtcgtgaaccctcct

SEQ ID NO: 2739101 - DNA, 25 bp, Homo sapien
gcttttgcctgaatgctgggaaccc

SEQ ID NO: 2739102 - DNA, 25 bp, Homo sapien
tgtcctggtagttagcacagctgtt

SEQ ID NO: 2739103 - DNA, 25 bp, Homo sapien
tccttgggcctcatgggctttgcat

SEQ ID NO: 2739104 - DNA, 25 bp, Homo sapien
ctgaccatcatcatttcctgcttgc

SEQ ID NO: 2739105 - DNA, 25 bp, Homo sapien
caggagctccgaaagatcacacaca

SEQ ID NO: 2739106 - DNA, 25 bp, Homo sapien
cagctgcccatgataagcacgcggt

SEQ ID NO: 2739107 - DNA, 25 bp, Homo sapien
ctcctccactttgagggtaaagcac

SEQ ID NO: 2739108 - DNA, 25 bp, Homo sapien
tccctgtgttgctgccggcacagca

SEQ ID NO: 2739109 - DNA, 25 bp, Homo sapien
gggggtccctgtgttgctgccggca

SEQ ID NO: 2739110 - DNA, 25 bp, Homo sapien
gccggcacagcaggctggtggctgc

SEQ ID NO: 2739111 - DNA, 25 bp, Homo sapien
gggtccctgtgttgctgccggcaca

SEQ ID NO: 2739112 - DNA, 25 bp, Homo sapien
cattgcatggactaaactgtgcttc

SEQ ID NO: 2739113 - DNA, 25 bp, Homo sapien
ccaagcatggcggtgtgcaactata

SEQ ID NO: 2739114 - DNA, 25 bp, Homo sapien
gcttcatccacccagatgatgaaac

SEQ ID NO: 2739115 - DNA, 25 bp, Homo sapien
ccttgttagtttgaccattgcatgg

SEQ ID NO: 2739116 - DNA, 25 bp, Homo sapien
gctgttgagttggtgtttcttggga

SEQ ID NO: 2739117 - DNA, 25 bp, Homo sapien
gctgctggaaggaggtcaccacccc

SEQ ID NO: 2739118 - DNA, 25 bp, Homo sapien
ggaaggaggtcaccacccctgcaca

SEQ ID NO: 2739119 - DNA, 25 bp, Homo sapien
ccgtgccttggacctgctgctggaa

SEQ ID NO: 2739120 - DNA, 25 bp, Homo sapien
tgatctcccaggcaggacgcagccg

SEQ ID NO: 2739121 - DNA, 25 bp, Homo sapien
ctgccgtggagaggcggtctgcagc

SEQ ID NO: 2739122 - DNA, 25 bp, Homo sapien
gggagtcttcaggcggctggctgct

SEQ ID NO: 2739123 - DNA, 25 bp, Homo sapien
gtctgcagcccacgggttcctggag

SEQ ID NO: 2739124 - DNA, 25 bp, Homo sapien
tctgcactccttgctgtgcggggag

SEQ ID NO: 2739125 - DNA, 25 bp, Homo sapien
ctgtctagtctgctgacctcatcca

SEQ ID NO: 2739126 - DNA, 25 bp, Homo sapien
tgtctagtctgctgacctcatccat

SEQ ID NO: 2739127 - DNA, 25 bp, Homo sapien
tcctctcccaagtctgtgctctgct

SEQ ID NO: 2739128 - DNA, 25 bp, Homo sapien
ccggggccgcctcatcctctttctc

SEQ ID NO: 2739129 - DNA, 25 bp, Homo sapien
tgctctgctgggtgcggggaccctg

SEQ ID NO: 2739130 - DNA, 25 bp, Homo sapien
tctttctctgctgcgggctgcagcc

SEQ ID NO: 2739131 - DNA, 25 bp, Homo sapien
ggcagccccacactggcaaggggct

SEQ ID NO: 2739132 - DNA, 25 bp, Homo sapien
aagggctggagctgtgcggtctccg

SEQ ID NO: 2739133 - DNA, 25 bp, Homo sapien
gggctggagctgtgcggtctccggg

SEQ ID NO: 2739134 - DNA, 25 bp, Homo sapien
gctgtgcggtctccgggagtctgga

SEQ ID NO: 2739135 - DNA, 25 bp, Homo sapien
agtcggggccgcctgactggaccat

SEQ ID NO: 2739136 - DNA, 25 bp, Homo sapien
ggccgcctgactggaccatgactct

SEQ ID NO: 2739137 - DNA, 25 bp, Homo sapien
tggctgccgaacagcgtgagggcac

SEQ ID NO: 2739138 - DNA, 25 bp, Homo sapien
acctatgcctggctgccgaacagcg

SEQ ID NO: 2739139 - DNA, 25 bp, Homo sapien
tgctctctgccctgacgtactctgt

SEQ ID NO: 2739140 - DNA, 25 bp, Homo sapien
tctctgccccgatgtcctctgagct

SEQ ID NO: 2739141 - DNA, 25 bp, Homo sapien
tctctgccctgacgtactctgtgct

SEQ ID NO: 2739142 - DNA, 25 bp, Homo sapien
gctctctgccctgacgtactctgtg

SEQ ID NO: 2739143 - DNA, 25 bp, Homo sapien
cctctgccccaacgtcctccgtgcc

SEQ ID NO: 2739144 - DNA, 25 bp, Homo sapien
tccgtgccctctgccccgacgtcct

SEQ ID NO: 2739145 - DNA, 25 bp, Homo sapien
ctccgtgccctctgccccgacgtcc

SEQ ID NO: 2739146 - DNA, 25 bp, Homo sapien
gtgccctctgccccgacgtcctctg

SEQ ID NO: 2739147 - DNA, 25 bp, Homo sapien
ggagagggccctgacatcctctgtg

SEQ ID NO: 2739148 - DNA, 25 bp, Homo sapien
agagggccctgacatcctctgtgcc

SEQ ID NO: 2739149 - DNA, 25 bp, Homo sapien
gagagggccctgacatcctctgtgc

SEQ ID NO: 2739150 - DNA, 25 bp, Homo sapien
gaagacatctgccttatgaccgcaa

SEQ ID NO: 2739151 - DNA, 25 bp, Homo sapien
gccttatgaccgcaaggcgagcttc

SEQ ID NO: 2739152 - DNA, 25 bp, Homo sapien
acatctgccttatgaccgcaaggcg

SEQ ID NO: 2739153 - DNA, 25 bp, Homo sapien
aaagaagacatctgccttatgaccg

SEQ ID NO: 2739154 - DNA, 25 bp, Homo sapien
caccaaggttctgagtatgcaaggg

SEQ ID NO: 2739155 - DNA, 25 bp, Homo sapien
gcaagggtgcctgaaaatagtctct

SEQ ID NO: 2739156 - DNA, 25 bp, Homo sapien
ggagtgaccattcactcagcttatg

SEQ ID NO: 2739157 - DNA, 25 bp, Homo sapien
cattgcttgcatcctggagtgacca

SEQ ID NO: 2739158 - DNA, 25 bp, Homo sapien
gttcctcgaaggtttcctgctggag

SEQ ID NO: 2739159 - DNA, 25 bp, Homo sapien
ttcctcgaaggtttcctgctggagt

SEQ ID NO: 2739160 - DNA, 25 bp, Homo sapien
tcctgtcggcctggcgggtatggga

SEQ ID NO: 2739161 - DNA, 25 bp, Homo sapien
gccggcttcctgtcggcctggcggg

SEQ ID NO: 2739162 - DNA, 25 bp, Homo sapien
tggcgggtatgggaagctgcctctc

SEQ ID NO: 2739163 - DNA, 25 bp, Homo sapien
tgcctctctcaaggggccgctccat

SEQ ID NO: 2739164 - DNA, 25 bp, Homo sapien
caactaaaactaagtcatggtgttt

SEQ ID NO: 2739165 - DNA, 25 bp, Homo sapien
cagccaactaaaactaagtcatggt

SEQ ID NO: 2739166 - DNA, 25 bp, Homo sapien
gccaactaaaactaagtcatggtgt

SEQ ID NO: 2739167 - DNA, 25 bp, Homo sapien
agccaactaaaactaagtcatggtg

SEQ ID NO: 2739168 - DNA, 25 bp, Homo sapien
gtgtatgtcatacccctggatggtg

SEQ ID NO: 2739169 - DNA, 25 bp, Homo sapien
tcagggtgtatgtcatacccctgga

SEQ ID NO: 2739170 - DNA, 25 bp, Homo sapien
gggtgtatgtcatacccctggatgg

SEQ ID NO: 2739171 - DNA, 25 bp, Homo sapien
gcttctcagggtgtatgtcataccc

SEQ ID NO: 2739172 - DNA, 25 bp, Homo sapien
tgggagaggccggatgtacctcctc

SEQ ID NO: 2739173 - DNA, 25 bp, Homo sapien
tgtcctgagccacgcaaatcatgcc

SEQ ID NO: 2739174 - DNA, 25 bp, Homo sapien
cctcatggtcatgtcactgtcctga

SEQ ID NO: 2739175 - DNA, 25 bp, Homo sapien
actgtcctgagccacgcaaatcatg

SEQ ID NO: 2739176 - DNA, 25 bp, Homo sapien
caagcctggtgtgttgttctaaaag

SEQ ID NO: 2739177 - DNA, 25 bp, Homo sapien
gttccccaggactgtcactgccccg

SEQ ID NO: 2739178 - DNA, 25 bp, Homo sapien
ataccctcggacctcgtagcctttg

SEQ ID NO: 2739179 - DNA, 25 bp, Homo sapien
tcctggaatcgccatcctgcctgct

SEQ ID NO: 2739180 - DNA, 25 bp, Homo sapien
cagcagcaggtccacatcctgtggt

SEQ ID NO: 2739181 - DNA, 25 bp, Homo sapien
tctggcttttggaaggttttgacac

SEQ ID NO: 2739182 - DNA, 25 bp, Homo sapien
atcctgtggtctggcttttggaagg

SEQ ID NO: 2739183 - DNA, 25 bp, Homo sapien
tgctgagggacctgtccagcttccc

SEQ ID NO: 2739184 - DNA, 25 bp, Homo sapien
ctgctctgaggagagtgcataagaa

SEQ ID NO: 2739185 - DNA, 25 bp, Homo sapien
ctgggagtgcggctgtgacagactc

SEQ ID NO: 2739186 - DNA, 25 bp, Homo sapien
gagtgcataagaagcgtggacagcc

SEQ ID NO: 2739187 - DNA, 25 bp, Homo sapien
gctgtgacagactctcggatgggca

SEQ ID NO: 2739188 - DNA, 25 bp, Homo sapien
tggacaggggcatgggtcccgagta

SEQ ID NO: 2739189 - DNA, 25 bp, Homo sapien
tcccgagtagagcagggccctccga

SEQ ID NO: 2739190 - DNA, 25 bp, Homo sapien
ggcatgggtcccgagtagagcaggg

SEQ ID NO: 2739191 - DNA, 25 bp, Homo sapien
ggtcccgagtagagcagggccctcc

SEQ ID NO: 2739192 - DNA, 25 bp, Homo sapien
tggacagcctgtatagatgaggcag

SEQ ID NO: 2739193 - DNA, 25 bp, Homo sapien
tgttggatgacgctcccatggtgga

SEQ ID NO: 2739194 - DNA, 25 bp, Homo sapien
caaaacctttcagaacggctgtgtc

SEQ ID NO: 2739195 - DNA, 25 bp, Homo sapien
tatgaagtgttggatggcgctccca

SEQ ID NO: 2739196 - DNA, 25 bp, Homo sapien
gccttgtgcccacctatctgcccca

SEQ ID NO: 2739197 - DNA, 25 bp, Homo sapien
ctccacggggcagccttgtgcccac

SEQ ID NO: 2739198 - DNA, 25 bp, Homo sapien
agccttgtgcccacctatctgcccc

SEQ ID NO: 2739199 - DNA, 25 bp, Homo sapien
tgcggtcacctctgcagagagctgt

SEQ ID NO: 2739200 - DNA, 25 bp, Homo sapien
caggttccatgctggcaatgcggtc

SEQ ID NO: 2739201 - DNA, 25 bp, Homo sapien
ctgtaggaacaggttccatgctggc

SEQ ID NO: 2739202 - DNA, 25 bp, Homo sapien
catgctggcaatgcggtcacctctg

SEQ ID NO: 2739203 - DNA, 25 bp, Homo sapien
tttcccgtggacacgtgtatgaggc

SEQ ID NO: 2739204 - DNA, 25 bp, Homo sapien
gcagacagttgtcctttcccgtgga

SEQ ID NO: 2739205 - DNA, 25 bp, Homo sapien
ctccgtgcgtgtaaactcgtggaca

SEQ ID NO: 2739206 - DNA, 25 bp, Homo sapien
tatgaggcttcttgcagcagtggtc

SEQ ID NO: 2739207 - DNA, 25 bp, Homo sapien
cgttatgtggggagtagcagccaac

SEQ ID NO: 2739208 - DNA, 25 bp, Homo sapien
ctcaccgttatgtggggagtagcag

SEQ ID NO: 2739209 - DNA, 25 bp, Homo sapien
accgttatgtggggagtagcagcca

SEQ ID NO: 2739210 - DNA, 25 bp, Homo sapien
gcagccaacgggcactaccaggtgc

SEQ ID NO: 2739211 - DNA, 25 bp, Homo sapien
aggagggcgcctgggtgagtggtgt

SEQ ID NO: 2739212 - DNA, 25 bp, Homo sapien
gtgagtggtgtctgcgacgtgctgg

SEQ ID NO: 2739213 - DNA, 25 bp, Homo sapien
cagcaggagggcgcctgggtgagtg

SEQ ID NO: 2739214 - DNA, 25 bp, Homo sapien
tgagtggtgtctgcgacgtgctggc

SEQ ID NO: 2739215 - DNA, 25 bp, Homo sapien
ctcctggccccgagctgcagagaaa

SEQ ID NO: 2739216 - DNA, 25 bp, Homo sapien
tgccttgaggagtcacagtgctcct

SEQ ID NO: 2739217 - DNA, 25 bp, Homo sapien
tgggtggtcgctgtcctgttagcca

SEQ ID NO: 2739218 - DNA, 25 bp, Homo sapien
ggccacagagagtggatgtctgtct

SEQ ID NO: 2739219 - DNA, 25 bp, Homo sapien
gctgctgccctacgggcccccttgg

SEQ ID NO: 2739220 - DNA, 25 bp, Homo sapien
cagagcggtgggacatgagagctca

SEQ ID NO: 2739221 - DNA, 25 bp, Homo sapien
gagaccatggctcgggcagagcggt

SEQ ID NO: 2739222 - DNA, 25 bp, Homo sapien
cctgagaccatggctcgggcagagc

SEQ ID NO: 2739223 - DNA, 25 bp, Homo sapien
ctgcaagaccgcctcatgcagctgg

SEQ ID NO: 2739224 - DNA, 25 bp, Homo sapien
gcgcagtcgtgtcggaggaaaagct

SEQ ID NO: 2739225 - DNA, 25 bp, Homo sapien
caagaccgcctcatgcagctggaga

SEQ ID NO: 2739226 - DNA, 25 bp, Homo sapien
tcctgtccctgcgggcgcagtcgtg

SEQ ID NO: 2739227 - DNA, 25 bp, Homo sapien
ggcaataaccctgtcagtgttgtct

SEQ ID NO: 2739228 - DNA, 25 bp, Homo sapien
tgtaggagcaggggcttgcaggacc

SEQ ID NO: 2739229 - DNA, 25 bp, Homo sapien
tggatgtgtaggagcaggggcttgc

SEQ ID NO: 2739230 - DNA, 25 bp, Homo sapien
tgtgtaggagcaggggcttgcagga

SEQ ID NO: 2739231 - DNA, 25 bp, Homo sapien
tgtggatgtgtaggagcaggggctt

SEQ ID NO: 2739232 - DNA, 25 bp, Homo sapien
gcagggtgagcaggccgcgagtgca

SEQ ID NO: 2739233 - DNA, 25 bp, Homo sapien
ggtgggcagggtgagcaggccgcga

SEQ ID NO: 2739234 - DNA, 25 bp, Homo sapien
ggcagggtgagcaggccgcgagtgc

SEQ ID NO: 2739235 - DNA, 25 bp, Homo sapien
tgggcagggtgagcaggccgcgagt

SEQ ID NO: 2739236 - DNA, 25 bp, Homo sapien
gagatcagcgatgacagtgctgaga

SEQ ID NO: 2739237 - DNA, 25 bp, Homo sapien
aacttgaggattggacagggttggg

SEQ ID NO: 2739238 - DNA, 25 bp, Homo sapien
ctgcagagatcagcgatgacagtgc

SEQ ID NO: 2739239 - DNA, 25 bp, Homo sapien
gctggaacttgaggattggacaggg

SEQ ID NO: 2739240 - DNA, 25 bp, Homo sapien
tctgggttatgatggtgcaacctgg

SEQ ID NO: 2739241 - DNA, 25 bp, Homo sapien
cacagtagtggaattcagcagggac

SEQ ID NO: 2739242 - DNA, 25 bp, Homo sapien
aaagcgtgtcgagaggcacagtagt

SEQ ID NO: 2739243 - DNA, 25 bp, Homo sapien
ggcatgatggtggactgcaagtcct

SEQ ID NO: 2739244 - DNA, 25 bp, Homo sapien
tgttaaataaagtgagcagtcccga

SEQ ID NO: 2739245 - DNA, 25 bp, Homo sapien
gtcccgatcatgtgcactagtgcct

SEQ ID NO: 2739246 - DNA, 25 bp, Homo sapien
gatgagcccctcattcagaaatggt

SEQ ID NO: 2739247 - DNA, 25 bp, Homo sapien
aaagttctaggcgatgatgagcccc

SEQ ID NO: 2739248 - DNA, 25 bp, Homo sapien
gtaccctcattctgtttgcagaacc

SEQ ID NO: 2739249 - DNA, 25 bp, Homo sapien
ctgtaccctcattctgtttgcagaa

SEQ ID NO: 2739250 - DNA, 25 bp, Homo sapien
tgtaccctcattctgtttgcagaac

SEQ ID NO: 2739251 - DNA, 25 bp, Homo sapien
taccctcattctgtttgcagaacca

SEQ ID NO: 2739252 - DNA, 25 bp, Homo sapien
ccagggagaatgctctgctcttctt

SEQ ID NO: 2739253 - DNA, 25 bp, Homo sapien
ccctttccagggagaatgctctgct

SEQ ID NO: 2739254 - DNA, 25 bp, Homo sapien
taaatgaaaggtgcgtcctttctcc

SEQ ID NO: 2739255 - DNA, 25 bp, Homo sapien
aatgaaaggtgcgtcctttctccct

SEQ ID NO: 2739256 - DNA, 25 bp, Homo sapien
gattgtgggggcgagatagattcag

SEQ ID NO: 2739257 - DNA, 25 bp, Homo sapien
ctctgagtgtcgatccagctgcctt

SEQ ID NO: 2739258 - DNA, 25 bp, Homo sapien
tgtgtgtaaagattgtgggggcgag

SEQ ID NO: 2739259 - DNA, 25 bp, Homo sapien
ctatatctctgagtgtcgatccagc

SEQ ID NO: 2739260 - DNA, 25 bp, Homo sapien
gggggctcctggagagtccgtccgc

SEQ ID NO: 2739261 - DNA, 25 bp, Homo sapien
ctgggggctcctggagagtccgtcc

SEQ ID NO: 2739262 - DNA, 25 bp, Homo sapien
ctgacgtggaggagccgaggcccac

SEQ ID NO: 2739263 - DNA, 25 bp, Homo sapien
cgtggaggagccgaggcccactggg

SEQ ID NO: 2739264 - DNA, 25 bp, Homo sapien
gcagcggcccccgtggaccagcaga

SEQ ID NO: 2739265 - DNA, 25 bp, Homo sapien
gggtggaacccatggccccctctga

SEQ ID NO: 2739266 - DNA, 25 bp, Homo sapien
ccccgtggaccagcagagggacaag

SEQ ID NO: 2739267 - DNA, 25 bp, Homo sapien
atggccccctctgactcccaggaga

SEQ ID NO: 2739268 - DNA, 25 bp, Homo sapien
tgatgcaaacagctgcccgtgaggc

SEQ ID NO: 2739269 - DNA, 25 bp, Homo sapien
ttcactgtgatgcaaacagctgccc

SEQ ID NO: 2739270 - DNA, 25 bp, Homo sapien
gtgccatgggaactttgtagatttc

SEQ ID NO: 2739271 - DNA, 25 bp, Homo sapien
gccatgggaactttgtagatttcac

SEQ ID NO: 2739272 - DNA, 25 bp, Homo sapien
ccggacattcccgtgtggaggaagc

SEQ ID NO: 2739273 - DNA, 25 bp, Homo sapien
acattcccgtgtggaggaagcgtcc

SEQ ID NO: 2739274 - DNA, 25 bp, Homo sapien
gggcagccggacattcccgtgtgga

SEQ ID NO: 2739275 - DNA, 25 bp, Homo sapien
ttccttggggcagccggacattccc

SEQ ID NO: 2739276 - DNA, 25 bp, Homo sapien
tgtctgaatttgtacacgaacacct

SEQ ID NO: 2739277 - DNA, 25 bp, Homo sapien
gagtcggtgaggcttccactgttgc

SEQ ID NO: 2739278 - DNA, 25 bp, Homo sapien
ggtattctgccaacagttgtctgaa

SEQ ID NO: 2739279 - DNA, 25 bp, Homo sapien
cgctcctttatctgcgtgcttggta

SEQ ID NO: 2739280 - DNA, 25 bp, Homo sapien
ggcaactgagccctgggcatcccct

SEQ ID NO: 2739281 - DNA, 25 bp, Homo sapien
ctcaggcaactgagccctgggcatc

SEQ ID NO: 2739282 - DNA, 25 bp, Homo sapien
gtcaactgcactgctgtcctcaggc

SEQ ID NO: 2739283 - DNA, 25 bp, Homo sapien
gtcctcaggcaactgagccctgggc

SEQ ID NO: 2739284 - DNA, 25 bp, Homo sapien
accaggctgaacacaacaaagagga

SEQ ID NO: 2739285 - DNA, 25 bp, Homo sapien
ctgaacacaacaaagaggacgaaat

SEQ ID NO: 2739286 - DNA, 25 bp, Homo sapien
cacaacaaagaggacgaaatggatg

SEQ ID NO: 2739287 - DNA, 25 bp, Homo sapien
caacaaagaggacgaaatggatgat

SEQ ID NO: 2739288 - DNA, 25 bp, Homo sapien
tttatttccgatcctgagccattcc

SEQ ID NO: 2739289 - DNA, 25 bp, Homo sapien
tatttatttccgatcctgagccatt

SEQ ID NO: 2739290 - DNA, 25 bp, Homo sapien
atttatttccgatcctgagccattc

SEQ ID NO: 2739291 - DNA, 25 bp, Homo sapien
cggtgggcagcgttttctcatttat

SEQ ID NO: 2739292 - DNA, 25 bp, Homo sapien
ggtgggcagcgttttctcatttata

SEQ ID NO: 2739293 - DNA, 25 bp, Homo sapien
cagcaggaaagtgtagacctcaagg

SEQ ID NO: 2739294 - DNA, 25 bp, Homo sapien
aaagtgtagacctcaaggttctcca

SEQ ID NO: 2739295 - DNA, 25 bp, Homo sapien
tttccagcaggaaagtgtagacctc

SEQ ID NO: 2739296 - DNA, 25 bp, Homo sapien
gtgtagacctcaaggttctccaatt

SEQ ID NO: 2739297 - DNA, 25 bp, Homo sapien
cagacctcacaaacctgagccaagt

SEQ ID NO: 2739298 - DNA, 25 bp, Homo sapien
aaataatatgccagttgcacagccc

SEQ ID NO: 2739299 - DNA, 25 bp, Homo sapien
aataatatgccagttgcacagccct

SEQ ID NO: 2739300 - DNA, 25 bp, Homo sapien
cctgagccaagttatgtgcaaaata

SEQ ID NO: 2739301 - DNA, 25 bp, Homo sapien
ctgtggtagctcatgttaatagatt

SEQ ID NO: 2739302 - DNA, 25 bp, Homo sapien
tccagtcttaattagttaagaggga

SEQ ID NO: 2739303 - DNA, 25 bp, Homo sapien
tggtagctcatgttaatagattttt

SEQ ID NO: 2739304 - DNA, 25 bp, Homo sapien
ccaggactccgggagtctgaagcag

SEQ ID NO: 2739305 - DNA, 25 bp, Homo sapien
gttggctgataatttaaaatgcgag

SEQ ID NO: 2739306 - DNA, 25 bp, Homo sapien
agcagcacatcattgcttcttattc

SEQ ID NO: 2739307 - DNA, 25 bp, Homo sapien
gctgataatttaaaatgcgagaaaa

SEQ ID NO: 2739308 - DNA, 25 bp, Homo sapien
gcacatcattgcttcttattctagg

SEQ ID NO: 2739309 - DNA, 25 bp, Homo sapien
gtctatgaagtcatggtgatatcac

SEQ ID NO: 2739310 - DNA, 25 bp, Homo sapien
aggtacagattctagagcatgtcta

SEQ ID NO: 2739311 - DNA, 25 bp, Homo sapien
ttgggtaaaggtacagattctagag

SEQ ID NO: 2739312 - DNA, 25 bp, Homo sapien
tgatatcaccgtgctaaagatgatg

SEQ ID NO: 2739313 - DNA, 25 bp, Homo sapien
tatcttcagataaagaggaccctgt

SEQ ID NO: 2739314 - DNA, 25 bp, Homo sapien
caaatggtcttgtagctgcagggac

SEQ ID NO: 2739315 - DNA, 25 bp, Homo sapien
gaatctcaagtgcagctgaactcct

SEQ ID NO: 2739316 - DNA, 25 bp, Homo sapien
cctgctttcagaggaaataccggga

SEQ ID NO: 2739317 - DNA, 25 bp, Homo sapien
aggttcccggtggccctgcgtgcca

SEQ ID NO: 2739318 - DNA, 25 bp, Homo sapien
gtcaggatgggcgccgaccagccct

SEQ ID NO: 2739319 - DNA, 25 bp, Homo sapien
agctggcttcggtccacgatctcaa

SEQ ID NO: 2739320 - DNA, 25 bp, Homo sapien
tcgttgcgctccgcaggtcgcctgg

SEQ ID NO: 2739321 - DNA, 25 bp, Homo sapien
ctgcgcgcgccgtgccgtccccgct

SEQ ID NO: 2739322 - DNA, 25 bp, Homo sapien
cagcgcgctcccgcagctcgccgac

SEQ ID NO: 2739323 - DNA, 25 bp, Homo sapien
cgcgccgtgccgtccccgctgtccc

SEQ ID NO: 2739324 - DNA, 25 bp, Homo sapien
gcagcgcgctcccgcagctcgccga

SEQ ID NO: 2739325 - DNA, 25 bp, Homo sapien
agcctgggtgatgagcaaaacgccg

SEQ ID NO: 2739326 - DNA, 25 bp, Homo sapien
gcctgggtgatgagcaaaacgccgg

SEQ ID NO: 2739327 - DNA, 25 bp, Homo sapien
cagccgggtgcctgcagggaagcat

SEQ ID NO: 2739328 - DNA, 25 bp, Homo sapien
ccttctctcttgccggatagtgcca

SEQ ID NO: 2739329 - DNA, 25 bp, Homo sapien
tcttgccggatagtgccagccgggt

SEQ ID NO: 2739330 - DNA, 25 bp, Homo sapien
tctctcttgccggatagtgccagcc

SEQ ID NO: 2739331 - DNA, 25 bp, Homo sapien
gacggcggggccttgggtcagaaga

SEQ ID NO: 2739332 - DNA, 25 bp, Homo sapien
gcggggccttgggtcagaagagcca

SEQ ID NO: 2739333 - DNA, 25 bp, Homo sapien
ccttgggtcagaagagccactgggc

SEQ ID NO: 2739334 - DNA, 25 bp, Homo sapien
gggccttgggtcagaagagccactg

SEQ ID NO: 2739335 - DNA, 25 bp, Homo sapien
ggcaaccgggattcgcaggtaagta

SEQ ID NO: 2739336 - DNA, 25 bp, Homo sapien
tcagactccgggcaacggtgagaag

SEQ ID NO: 2739337 - DNA, 25 bp, Homo sapien
gatagcttcgttagtggactgagcg

SEQ ID NO: 2739338 - DNA, 25 bp, Homo sapien
agtccctgatccctagaggccacag

SEQ ID NO: 2739339 - DNA, 25 bp, Homo sapien
gcatcaggttggcacgctcctccat

SEQ ID NO: 2739340 - DNA, 25 bp, Homo sapien
gactggagcaacaccttgatgctga

SEQ ID NO: 2739341 - DNA, 25 bp, Homo sapien
tgcaagggggcatggtccgcatcca

SEQ ID NO: 2739342 - DNA, 25 bp, Homo sapien
cccaggctcagagccgactggagca

SEQ ID NO: 2739343 - DNA, 25 bp, Homo sapien
agcccatgtttgaggcagtgctcca

SEQ ID NO: 2739344 - DNA, 25 bp, Homo sapien
gctatatctgatgcttctggacaaa

SEQ ID NO: 2739345 - DNA, 25 bp, Homo sapien
ttctggacaaagtttctccaccagc

SEQ ID NO: 2739346 - DNA, 25 bp, Homo sapien
ttctggaagatttctgacactagtc

SEQ ID NO: 2739347 - DNA, 25 bp, Homo sapien
gacactagtcgctatatctgatgct

SEQ ID NO: 2739348 - DNA, 25 bp, Homo sapien
ttaaaaggcatatacttgtctcctt

SEQ ID NO: 2739349 - DNA, 25 bp, Homo sapien
taaaaggcatatacttgtctccttg

SEQ ID NO: 2739350 - DNA, 25 bp, Homo sapien
gaaagtattaaaaggcatatacttg

SEQ ID NO: 2739351 - DNA, 25 bp, Homo sapien
aaggcatatacttgtctccttgtcc

SEQ ID NO: 2739352 - DNA, 25 bp, Homo sapien
gatgacaacaggttaccaaaattct

SEQ ID NO: 2739353 - DNA, 25 bp, Homo sapien
ttctagtggcaatttgatgacaaca

SEQ ID NO: 2739354 - DNA, 25 bp, Homo sapien
catttagtaatatatcctagggaaa

SEQ ID NO: 2739355 - DNA, 25 bp, Homo sapien
gcctggccaactgtgcaactttcta

SEQ ID NO: 2739356 - DNA, 25 bp, Homo sapien
agtgcaagataaagccacgctcggc

SEQ ID NO: 2739357 - DNA, 25 bp, Homo sapien
tcttttgcatgagtgcaagataaag

SEQ ID NO: 2739358 - DNA, 25 bp, Homo sapien
aagcactttcagataatctgccagt

SEQ ID NO: 2739359 - DNA, 25 bp, Homo sapien
agagatgtttattgtctataagcac

SEQ ID NO: 2739360 - DNA, 25 bp, Homo sapien
tttcaagcagagattggcatcgaga

SEQ ID NO: 2739361 - DNA, 25 bp, Homo sapien
taaagcctcaggctcatagaactcg

SEQ ID NO: 2739362 - DNA, 25 bp, Homo sapien
ttcctccatcattaaagcctcaggc

SEQ ID NO: 2739363 - DNA, 25 bp, Homo sapien
ggcatcgagaacattgagtcccacc

SEQ ID NO: 2739364 - DNA, 25 bp, Homo sapien
acagagcactctacaccttactggt

SEQ ID NO: 2739365 - DNA, 25 bp, Homo sapien
tgcacatggagggatcagggaatct

SEQ ID NO: 2739366 - DNA, 25 bp, Homo sapien
tggtcaccagctcctatgcaggaag

SEQ ID NO: 2739367 - DNA, 25 bp, Homo sapien
accaggagtttaggccttggctctg

SEQ ID NO: 2739368 - DNA, 25 bp, Homo sapien
gaaggcgccatccaccagggcaatg

SEQ ID NO: 2739369 - DNA, 25 bp, Homo sapien
gctggctttccgagctgcgactgac

SEQ ID NO: 2739370 - DNA, 25 bp, Homo sapien
ctggaaggcgccatccaccagggca

SEQ ID NO: 2739371 - DNA, 25 bp, Homo sapien
aggggctggctttccgagctgcgac

SEQ ID NO: 2739372 - DNA, 25 bp, Homo sapien
ttccctttgtagcccacagcttcac

SEQ ID NO: 2739373 - DNA, 25 bp, Homo sapien
gtgggtgaactaagtccacccagac

SEQ ID NO: 2739374 - DNA, 25 bp, Homo sapien
gtcgctgaatgcgacgttctccatg

SEQ ID NO: 2739375 - DNA, 25 bp, Homo sapien
ggtgaactaagtccacccagacacc

SEQ ID NO: 2739376 - DNA, 25 bp, Homo sapien
ctgaatgcgacgttctccatgggcc

SEQ ID NO: 2739377 - DNA, 25 bp, Homo sapien
catccatggagcaccccagaggcaa

SEQ ID NO: 2739378 - DNA, 25 bp, Homo sapien
ccgtgctcatctgcgtactggaatg

SEQ ID NO: 2739379 - DNA, 25 bp, Homo sapien
ttcccgtgctcatctgcgtactgga

SEQ ID NO: 2739380 - DNA, 25 bp, Homo sapien
atccatggagcaccccagaggcaaa

SEQ ID NO: 2739381 - DNA, 25 bp, Homo sapien
tcattgtcgctaccaggcttccagc

SEQ ID NO: 2739382 - DNA, 25 bp, Homo sapien
tccacattgggcttcattgtcgcta

SEQ ID NO: 2739383 - DNA, 25 bp, Homo sapien
gcttcattgtcgctaccaggcttcc

SEQ ID NO: 2739384 - DNA, 25 bp, Homo sapien
ttgggcttcattgtcgctaccaggc

SEQ ID NO: 2739385 - DNA, 25 bp, Homo sapien
ctgcacatccttaaggtagagggaa

SEQ ID NO: 2739386 - DNA, 25 bp, Homo sapien
tccttgccaccatcaagatcctgca

SEQ ID NO: 2739387 - DNA, 25 bp, Homo sapien
gtagagggaaaaatctattactcca

SEQ ID NO: 2739388 - DNA, 25 bp, Homo sapien
agatcctgcacatccttaaggtaga

SEQ ID NO: 2739389 - DNA, 25 bp, Homo sapien
cattctttggtaaggtgcactgcca

SEQ ID NO: 2739390 - DNA, 25 bp, Homo sapien
taaatttcaagtgggtgagcccttg

SEQ ID NO: 2739391 - DNA, 25 bp, Homo sapien
gatacgccactctagaaatgttcca

SEQ ID NO: 2739392 - DNA, 25 bp, Homo sapien
aacgcgatcccaaggtttacagtga

SEQ ID NO: 2739393 - DNA, 25 bp, Homo sapien
ttgatcaaggacatcagtaattctt

SEQ ID NO: 2739394 - DNA, 25 bp, Homo sapien
ctcaagtgccggttaagttcttcca

SEQ ID NO: 2739395 - DNA, 25 bp, Homo sapien
gatcaaggacatcagtaattctttc

SEQ ID NO: 2739396 - DNA, 25 bp, Homo sapien
caaggacatcagtaattctttcatg

SEQ ID NO: 2739397 - DNA, 25 bp, Homo sapien
ttatacaagctgactgttttctcaa

SEQ ID NO: 2739398 - DNA, 25 bp, Homo sapien
acataaacttatacaagctgactgt

SEQ ID NO: 2739399 - DNA, 25 bp, Homo sapien
aacttatacaagctgactgttttct

SEQ ID NO: 2739400 - DNA, 25 bp, Homo sapien
cataaacttatacaagctgactgtt

SEQ ID NO: 2739401 - DNA, 25 bp, Homo sapien
tcttcttgaagctttgagttagtct

SEQ ID NO: 2739402 - DNA, 25 bp, Homo sapien
tggtttgaagatccccaactgtgca

SEQ ID NO: 2739403 - DNA, 25 bp, Homo sapien
ccaagccatctatcttggtttgaag

SEQ ID NO: 2739404 - DNA, 25 bp, Homo sapien
tagtcttttccaagccatctatctt

SEQ ID NO: 2739405 - DNA, 25 bp, Homo sapien
tttacagttcttaacatcaaaatta

SEQ ID NO: 2739406 - DNA, 25 bp, Homo sapien
tacagttcttaacatcaaaattaat

SEQ ID NO: 2739407 - DNA, 25 bp, Homo sapien
ttacagttcttaacatcaaaattaa

SEQ ID NO: 2739408 - DNA, 25 bp, Homo sapien
ttcacttctttctcgaattaattca

SEQ ID NO: 2739409 - DNA, 25 bp, Homo sapien
tgaagtgagcaaattcggtctgttg

SEQ ID NO: 2739410 - DNA, 25 bp, Homo sapien
agtgagcaaattcggtctgttgcag

SEQ ID NO: 2739411 - DNA, 25 bp, Homo sapien
tcttgaagtgagcaaattcggtctg

SEQ ID NO: 2739412 - DNA, 25 bp, Homo sapien
gctgaagaacgagtaggaactttgg

SEQ ID NO: 2739413 - DNA, 25 bp, Homo sapien
ccgtccaagggatccaggtggtctg

SEQ ID NO: 2739414 - DNA, 25 bp, Homo sapien
gggaccgcagtgagaggccctttct

SEQ ID NO: 2739415 - DNA, 25 bp, Homo sapien
gaactttggcatgcaaaggcccaca

SEQ ID NO: 2739416 - DNA, 25 bp, Homo sapien
ttgaaaagttaagttcataggctgg

SEQ ID NO: 2739417 - DNA, 25 bp, Homo sapien
acaccaagaggaattgtttgcttat

SEQ ID NO: 2739418 - DNA, 25 bp, Homo sapien
gaatgagaataagtcaatagatatt

SEQ ID NO: 2739419 - DNA, 25 bp, Homo sapien
aagcaagctaattatgaagtatttc

SEQ ID NO: 2739420 - DNA, 25 bp, Homo sapien
ttgccgagtttgcttgtaagtctcc

SEQ ID NO: 2739421 - DNA, 25 bp, Homo sapien
agctcaactttggtatcctgttttg

SEQ ID NO: 2739422 - DNA, 25 bp, Homo sapien
agtctccagctcaactttggtatcc

SEQ ID NO: 2739423 - DNA, 25 bp, Homo sapien
catcactgtacatttcatccagacc

SEQ ID NO: 2739424 - DNA, 25 bp, Homo sapien
tttggctttttgagaatgtaatctc

SEQ ID NO: 2739425 - DNA, 25 bp, Homo sapien
tggagatcaatccaagtttccatgt

SEQ ID NO: 2739426 - DNA, 25 bp, Homo sapien
tctgtcctgcaacaatatggctttg

SEQ ID NO: 2739427 - DNA, 25 bp, Homo sapien
tataaccttgagactgactttttct

SEQ ID NO: 2739428 - DNA, 25 bp, Homo sapien
ctttgtaaggaaaggatgacttttg

SEQ ID NO: 2739429 - DNA, 25 bp, Homo sapien
ctggatgcgacaccagcaagagtgc

SEQ ID NO: 2739430 - DNA, 25 bp, Homo sapien
tggatgcgacaccagcaagagtgca

SEQ ID NO: 2739431 - DNA, 25 bp, Homo sapien
tgcagggcgccgatcctcccgccca

SEQ ID NO: 2739432 - DNA, 25 bp, Homo sapien
gcagggcgccgatcctcccgcccag

SEQ ID NO: 2739433 - DNA, 25 bp, Homo sapien
gcagcttgtggctccgctcctcagc

SEQ ID NO: 2739434 - DNA, 25 bp, Homo sapien
agggcgccgatcctcccgcccagct

SEQ ID NO: 2739435 - DNA, 25 bp, Homo sapien
gaagagcctgtctttgctctttttc

SEQ ID NO: 2739436 - DNA, 25 bp, Homo sapien
tctttctcgtgctgtaattcgcgct

SEQ ID NO: 2739437 - DNA, 25 bp, Homo sapien
tgtaattcgcgctgaagagcctgtc

SEQ ID NO: 2739438 - DNA, 25 bp, Homo sapien
ctgagtagagaggaagtgtctttct

SEQ ID NO: 2739439 - DNA, 25 bp, Homo sapien
agtccttccacttgttgcagctcca

SEQ ID NO: 2739440 - DNA, 25 bp, Homo sapien
tgccttctcgtcctgaagctcccgc

SEQ ID NO: 2739441 - DNA, 25 bp, Homo sapien
ccttctcgtcctgaagctcccgcaa

SEQ ID NO: 2739442 - DNA, 25 bp, Homo sapien
ctgccttctcgtcctgaagctcccg

SEQ ID NO: 2739443 - DNA, 25 bp, Homo sapien
ttctcgtcctgaagctcccgcaact

SEQ ID NO: 2739444 - DNA, 25 bp, Homo sapien
aactcctcaggtagtcctgtctggg

SEQ ID NO: 2739445 - DNA, 25 bp, Homo sapien
gagagagcacaaaagcaactcctca

SEQ ID NO: 2739446 - DNA, 25 bp, Homo sapien
gatttggaagctaggttagccggta

SEQ ID NO: 2739447 - DNA, 25 bp, Homo sapien
ttagccggtagtgccaggcggccac

SEQ ID NO: 2739448 - DNA, 25 bp, Homo sapien
gccaatgaaactggaaactgttcct

SEQ ID NO: 2739449 - DNA, 25 bp, Homo sapien
cctgcgaagaggctttgccatctct

SEQ ID NO: 2739450 - DNA, 25 bp, Homo sapien
gaactctgggaaacacaatttagga

SEQ ID NO: 2739451 - DNA, 25 bp, Homo sapien
ctgtagctaatgtagggcctgcgaa

SEQ ID NO: 2739452 - DNA, 25 bp, Homo sapien
ttatatcttccatcttcagcttgga

SEQ ID NO: 2739453 - DNA, 25 bp, Homo sapien
tatatcttccatcttcagcttggac

SEQ ID NO: 2739454 - DNA, 25 bp, Homo sapien
ttcagtgcctggttcacttctttta

SEQ ID NO: 2739455 - DNA, 25 bp, Homo sapien
tgcctggttcacttcttttatatct

SEQ ID NO: 2739456 - DNA, 25 bp, Homo sapien
ttaaacgtacgagcacacgggcagt

SEQ ID NO: 2739457 - DNA, 25 bp, Homo sapien
tgactgttgggatacttaaacgtac

SEQ ID NO: 2739458 - DNA, 25 bp, Homo sapien
gggcagtcagcacaagctgacagca

SEQ ID NO: 2739459 - DNA, 25 bp, Homo sapien
agcacacgggcagtcagcacaagct

SEQ ID NO: 2739460 - DNA, 25 bp, Homo sapien
tattacctagaagtcccggctgctg

SEQ ID NO: 2739461 - DNA, 25 bp, Homo sapien
cactgtttaaagatatccgcgggtc

SEQ ID NO: 2739462 - DNA, 25 bp, Homo sapien
tgagctagagccatatacccttggg

SEQ ID NO: 2739463 - DNA, 25 bp, Homo sapien
tggagtcggaagacctaggctcagc

SEQ ID NO: 2739464 - DNA, 25 bp, Homo sapien
agagcgagcttctggtgcctgcaac

SEQ ID NO: 2739465 - DNA, 25 bp, Homo sapien
aagtgctagctgaactggcaggcgc

SEQ ID NO: 2739466 - DNA, 25 bp, Homo sapien
tttctcagggcgaagcagcacctgt

SEQ ID NO: 2739467 - DNA, 25 bp, Homo sapien
caggcgcggaagaagggccaaatct

SEQ ID NO: 2739468 - DNA, 25 bp, Homo sapien
tggccacatccattgtccctcatag

SEQ ID NO: 2739469 - DNA, 25 bp, Homo sapien
tgtctaagcccctgatgagtgggta

SEQ ID NO: 2739470 - DNA, 25 bp, Homo sapien
gtagctgcgttctggccacatccat

SEQ ID NO: 2739471 - DNA, 25 bp, Homo sapien
cctgatgagtgggtagctgcgttct

SEQ ID NO: 2739472 - DNA, 25 bp, Homo sapien
cactgcctacagtgtgtcgcttcgt

SEQ ID NO: 2739473 - DNA, 25 bp, Homo sapien
tccttctcacactgcctacagtgtg

SEQ ID NO: 2739474 - DNA, 25 bp, Homo sapien
ctccgggaaatggagaactccttct

SEQ ID NO: 2739475 - DNA, 25 bp, Homo sapien
agtgtgtcgcttcgtcatctttcag

SEQ ID NO: 2739476 - DNA, 25 bp, Homo sapien
cagaacatggctgtggcagaaaggt

SEQ ID NO: 2739477 - DNA, 25 bp, Homo sapien
cagaaaggtgggtggcgctggcagt

SEQ ID NO: 2739478 - DNA, 25 bp, Homo sapien
gaaaggtgggtggcgctggcagtgt

SEQ ID NO: 2739479 - DNA, 25 bp, Homo sapien
gacagaacatggctgtggcagaaag

SEQ ID NO: 2739480 - DNA, 25 bp, Homo sapien
tagctctgagcttactgcaaggcac

SEQ ID NO: 2739481 - DNA, 25 bp, Homo sapien
caggccttgtagacacatgtgatct

SEQ ID NO: 2739482 - DNA, 25 bp, Homo sapien
ggcactgcctgaaactcgggttggg

SEQ ID NO: 2739483 - DNA, 25 bp, Homo sapien
gcagcctcaggacgtggtttctagc

SEQ ID NO: 2739484 - DNA, 25 bp, Homo sapien
catgttacaggaagagtctggttcg

SEQ ID NO: 2739485 - DNA, 25 bp, Homo sapien
tacaggaagagtctggttcgttctc

SEQ ID NO: 2739486 - DNA, 25 bp, Homo sapien
gctgctagtccatgttacaggaaga

SEQ ID NO: 2739487 - DNA, 25 bp, Homo sapien
agtctggttcgttctctttgctgca

SEQ ID NO: 2739488 - DNA, 25 bp, Homo sapien
cagggtgtggcagctgtcgcacact

SEQ ID NO: 2739489 - DNA, 25 bp, Homo sapien
tgtggccacagttccggcagtggtg

SEQ ID NO: 2739490 - DNA, 25 bp, Homo sapien
cgtggaggagcagcgctgcaggagc

SEQ ID NO: 2739491 - DNA, 25 bp, Homo sapien
cgcacactcgcaccggcttggggta

SEQ ID NO: 2739492 - DNA, 25 bp, Homo sapien
cacaagggcatgaaatggcagatct

SEQ ID NO: 2739493 - DNA, 25 bp, Homo sapien
ccaatgataggtagtcacaagggca

SEQ ID NO: 2739494 - DNA, 25 bp, Homo sapien
tgtcaaacgctgtgcatgaatcagg

SEQ ID NO: 2739495 - DNA, 25 bp, Homo sapien
gaaccagagccgtgatgtaaccaag

SEQ ID NO: 2739496 - DNA, 25 bp, Homo sapien
cgagagacggctaccgcatgaaagt

SEQ ID NO: 2739497 - DNA, 25 bp, Homo sapien
gcatgaaagtatctcggcctcgaag

SEQ ID NO: 2739498 - DNA, 25 bp, Homo sapien
tagaaacgccacacttggagacgag

SEQ ID NO: 2739499 - DNA, 25 bp, Homo sapien
tccaagtggtgtacctgagcgagtt

SEQ ID NO: 2739500 - DNA, 25 bp, Homo sapien
tgccctttgccacgttaaattgaac

SEQ ID NO: 2739501 - DNA, 25 bp, Homo sapien
gatcctgatcactgactcttggtca

SEQ ID NO: 2739502 - DNA, 25 bp, Homo sapien
taacagtttctgcaatacaagcttg

SEQ ID NO: 2739503 - DNA, 25 bp, Homo sapien
gcttactctaagtggaaatcaggat

SEQ ID NO: 2739504 - DNA, 25 bp, Homo sapien
ggaggctatgatgattacaatggct

SEQ ID NO: 2739505 - DNA, 25 bp, Homo sapien
tatggaggctatgatgattacaatg

SEQ ID NO: 2739506 - DNA, 25 bp, Homo sapien
tggaggctatgatgattacaatggc

SEQ ID NO: 2739507 - DNA, 25 bp, Homo sapien
gctatggaggctatgatgattacaa

SEQ ID NO: 2739508 - DNA, 25 bp, Homo sapien
cacttgctatacatgctgccaatgg

SEQ ID NO: 2739509 - DNA, 25 bp, Homo sapien
cacgaaagcttatggccatgcagcg

SEQ ID NO: 2739510 - DNA, 25 bp, Homo sapien
tctctacccctaaggttgggctctg

SEQ ID NO: 2739511 - DNA, 25 bp, Homo sapien
gattcttactaaaagcataggctgg

SEQ ID NO: 2739512 - DNA, 25 bp, Homo sapien
gaaaatggccgagtgattagacaaa

SEQ ID NO: 2739513 - DNA, 25 bp, Homo sapien
gcattcttcggaaagttaaaatgtc

SEQ ID NO: 2739514 - DNA, 25 bp, Homo sapien
aaattggcataggtgggatttcctc

SEQ ID NO: 2739515 - DNA, 25 bp, Homo sapien
tatcttgaagtgtaacctcttgttt

SEQ ID NO: 2739516 - DNA, 25 bp, Homo sapien
ggcggcccgctgttacgcaatggaa

SEQ ID NO: 2739517 - DNA, 25 bp, Homo sapien
gggagtgcggcaggtttggcagact

SEQ ID NO: 2739518 - DNA, 25 bp, Homo sapien
gggcgactacactcaccgctgtgct

SEQ ID NO: 2739519 - DNA, 25 bp, Homo sapien
gcaatggaaatttcgaaagccccgc

SEQ ID NO: 2739520 - DNA, 25 bp, Homo sapien
taattggcgctctcagttctggtcc

SEQ ID NO: 2739521 - DNA, 25 bp, Homo sapien
ttgcagtttgtttcgacgccggacc

SEQ ID NO: 2739522 - DNA, 25 bp, Homo sapien
gccggaccgcgtaagagacgatgat

SEQ ID NO: 2739523 - DNA, 25 bp, Homo sapien
cttgctcggccgatgaagtgcagag

SEQ ID NO: 2739524 - DNA, 25 bp, Homo sapien
aggccgcgccgactctattgtgtga

SEQ ID NO: 2739525 - DNA, 25 bp, Homo sapien
ccggtcgccggacgaggaggtgttg

SEQ ID NO: 2739526 - DNA, 25 bp, Homo sapien
agagccgcgagtggttcgctgaatc

SEQ ID NO: 2739527 - DNA, 25 bp, Homo sapien
tgaatctcggcaccgccgctgaggc

SEQ ID NO: 2739528 - DNA, 25 bp, Homo sapien
tccccatatctctgggagggccacg

SEQ ID NO: 2739529 - DNA, 25 bp, Homo sapien
tgcgaggattgtttgtccccatatc

SEQ ID NO: 2739530 - DNA, 25 bp, Homo sapien
attgtttgtccccatatctctggga

SEQ ID NO: 2739531 - DNA, 25 bp, Homo sapien
tttttgcgaggattgtttgtcccca

SEQ ID NO: 2739532 - DNA, 25 bp, Homo sapien
cttatttaggttgcgcaggcgcccg

SEQ ID NO: 2739533 - DNA, 25 bp, Homo sapien
ggtttcaaggaagacgcatgcgcat

SEQ ID NO: 2739534 - DNA, 25 bp, Homo sapien
ttgcagttcagcgaccacggtgggt

SEQ ID NO: 2739535 - DNA, 25 bp, Homo sapien
tgctgagcccaaaacccaagcgtgt

SEQ ID NO: 2739536 - DNA, 25 bp, Homo sapien
tcgcgatccctcctcgtgccagggc

SEQ ID NO: 2739537 - DNA, 25 bp, Homo sapien
ggagatgcagcggtaacctaccgag

SEQ ID NO: 2739538 - DNA, 25 bp, Homo sapien
gtggagcccgcgctcgcgatccctc

SEQ ID NO: 2739539 - DNA, 25 bp, Homo sapien
agcggtaacctaccgagcgcagagg

SEQ ID NO: 2739540 - DNA, 25 bp, Homo sapien
atttgtgtattgtctgtgtccacta

SEQ ID NO: 2739541 - DNA, 25 bp, Homo sapien
cttattgttaatttgtgtattgtct

SEQ ID NO: 2739542 - DNA, 25 bp, Homo sapien
taatttgtgtattgtctgtgtccac

SEQ ID NO: 2739543 - DNA, 25 bp, Homo sapien
tgtgtattgtctgtgtccactaaag

SEQ ID NO: 2739544 - DNA, 25 bp, Homo sapien
taaggtagctctgcggcagggtcca

SEQ ID NO: 2739545 - DNA, 25 bp, Homo sapien
gctctgcggcagggtccagcactac

SEQ ID NO: 2739546 - DNA, 25 bp, Homo sapien
gtagctctgcggcagggtccagcac

SEQ ID NO: 2739547 - DNA, 25 bp, Homo sapien
ctaaggtagctctgcggcagggtcc

SEQ ID NO: 2739548 - DNA, 25 bp, Homo sapien
ttgcacctggcatatcccagcaatt

SEQ ID NO: 2739549 - DNA, 25 bp, Homo sapien
aaaggcaatcataaatcagggccga

SEQ ID NO: 2739550 - DNA, 25 bp, Homo sapien
tcacatgtagaataatcccagggct

SEQ ID NO: 2739551 - DNA, 25 bp, Homo sapien
gccgagcatcatggctcacatgtag

SEQ ID NO: 2739552 - DNA, 25 bp, Homo sapien
tgtgcagtggcacctgcgcgaagct

SEQ ID NO: 2739553 - DNA, 25 bp, Homo sapien
tgaggaaagcaccatagtgactacc

SEQ ID NO: 2739554 - DNA, 25 bp, Homo sapien
gataaaatgacctcagtagccgcct

SEQ ID NO: 2739555 - DNA, 25 bp, Homo sapien
ccaaggacaggagggatttgtgcac

SEQ ID NO: 2739556 - DNA, 25 bp, Homo sapien
tgcgcgtgccgtatgtgacttggct

SEQ ID NO: 2739557 - DNA, 25 bp, Homo sapien
cgaggcgtgtattattttgatccag

SEQ ID NO: 2739558 - DNA, 25 bp, Homo sapien
agtgcgcgtgccgtatgtgacttgg

SEQ ID NO: 2739559 - DNA, 25 bp, Homo sapien
gtcgaggcgtgtattattttgatcc

SEQ ID NO: 2739560 - DNA, 25 bp, Homo sapien
aggccacgtacaacggcagtcccgg

SEQ ID NO: 2739561 - DNA, 25 bp, Homo sapien
gagagcggaagtgagctccaggcca

SEQ ID NO: 2739562 - DNA, 25 bp, Homo sapien
cagtcccggttccccgccatcagca

SEQ ID NO: 2739563 - DNA, 25 bp, Homo sapien
gagctccaggccacgtacaacggca

SEQ ID NO: 2739564 - DNA, 25 bp, Homo sapien
ggaggccaagattatctgtcccgaa

SEQ ID NO: 2739565 - DNA, 25 bp, Homo sapien
ttctgtttcagccatagcgtgtaca

SEQ ID NO: 2739566 - DNA, 25 bp, Homo sapien
aaatcaaatcttgggctgggaggcc

SEQ ID NO: 2739567 - DNA, 25 bp, Homo sapien
cttgaacgcgtgaggtggagtttac

SEQ ID NO: 2739568 - DNA, 25 bp, Homo sapien
tatccgacatccacgaacaattggg

SEQ ID NO: 2739569 - DNA, 25 bp, Homo sapien
cagacactcccatggacaccgaata

SEQ ID NO: 2739570 - DNA, 25 bp, Homo sapien
tgaggacaacttggaggcgcgtccc

SEQ ID NO: 2739571 - DNA, 25 bp, Homo sapien
caattgggaatctcctgaggacaac

SEQ ID NO: 2739572 - DNA, 25 bp, Homo sapien
agcacgtgctgggagatggccgtgg

SEQ ID NO: 2739573 - DNA, 25 bp, Homo sapien
cacgtgctgggagatggccgtggta

SEQ ID NO: 2739574 - DNA, 25 bp, Homo sapien
tgagcacgtgctgggagatggccgt

SEQ ID NO: 2739575 - DNA, 25 bp, Homo sapien
cgtgctgggagatggccgtggtaca

SEQ ID NO: 2739576 - DNA, 25 bp, Homo sapien
cagtttttgaggatctggatttgcc

SEQ ID NO: 2739577 - DNA, 25 bp, Homo sapien
acagatggtacctggttcattggag

SEQ ID NO: 2739578 - DNA, 25 bp, Homo sapien
gcccctgaaattcctgttatttcca

SEQ ID NO: 2739579 - DNA, 25 bp, Homo sapien
ccagggattattgctccagggtctc

SEQ ID NO: 2739580 - DNA, 25 bp, Homo sapien
ctgtcctcaggcaactgagccctgg

SEQ ID NO: 2739581 - DNA, 25 bp, Homo sapien
tgtcctcaggcaactgagccctggg

SEQ ID NO: 2739582 - DNA, 25 bp, Homo sapien
cctcaggcaactgagccctgggcat

SEQ ID NO: 2739583 - DNA, 25 bp, Homo sapien
gtcaactgcactgctgtcctcaggc

SEQ ID NO: 2739584 - DNA, 25 bp, Homo sapien
ctgtccagaggaaagagaatatcca

SEQ ID NO: 2739585 - DNA, 25 bp, Homo sapien
tgtccagaggaaagagaatatccat

SEQ ID NO: 2739586 - DNA, 25 bp, Homo sapien
tggggcacagctctgtaccaataac

SEQ ID NO: 2739587 - DNA, 25 bp, Homo sapien
ggggcacagctctgtaccaataaca

SEQ ID NO: 2739588 - DNA, 25 bp, Homo sapien
gctggggcacagctctgtaccaata

SEQ ID NO: 2739589 - DNA, 25 bp, Homo sapien
gggctggggcacagctctgtaccaa

SEQ ID NO: 2739590 - DNA, 25 bp, Homo sapien
accaggctgaacacaacaaagagga

SEQ ID NO: 2739591 - DNA, 25 bp, Homo sapien
ctgaacacaacaaagaggacgaaat

SEQ ID NO: 2739592 - DNA, 25 bp, Homo sapien
caacaaagaggacgaaatggatgat

SEQ ID NO: 2739593 - DNA, 25 bp, Homo sapien
cacaacaaagaggacgaaatggatg

SEQ ID NO: 2739594 - DNA, 25 bp, Homo sapien
ttgggaaacgcacactcttgggtct

SEQ ID NO: 2739595 - DNA, 25 bp, Homo sapien
ggtttggttttgctctgacgcctcc

SEQ ID NO: 2739596 - DNA, 25 bp, Homo sapien
gattctgcttccgaggaggccaggg

SEQ ID NO: 2739597 - DNA, 25 bp, Homo sapien
cgactccagtctcaggtgggaggct

SEQ ID NO: 2739598 - DNA, 25 bp, Homo sapien
ggtgcaggccgggtctcagtctcct

SEQ ID NO: 2739599 - DNA, 25 bp, Homo sapien
gcagacccagtgctcgtgaatgaca

SEQ ID NO: 2739600 - DNA, 25 bp, Homo sapien
cagtgctcgtgaatgacacactttc

SEQ ID NO: 2739601 - DNA, 25 bp, Homo sapien
aaagagggtgcaggccgggtctcag

SEQ ID NO: 2739602 - DNA, 25 bp, Homo sapien
tatttatttccgatcctgagccatt

SEQ ID NO: 2739603 - DNA, 25 bp, Homo sapien
tttatttccgatcctgagccattcc

SEQ ID NO: 2739604 - DNA, 25 bp, Homo sapien
atttatttccgatcctgagccattc

SEQ ID NO: 2739605 - DNA, 25 bp, Homo sapien
cagaggcagtctcaaagaggactca

SEQ ID NO: 2739606 - DNA, 25 bp, Homo sapien
ggcctctgcagatgacttcctagga

SEQ ID NO: 2739607 - DNA, 25 bp, Homo sapien
gacttggtgcttgttcctagggaca

SEQ ID NO: 2739608 - DNA, 25 bp, Homo sapien
agaggactcagccatgttaaacagc

SEQ ID NO: 2739609 - DNA, 25 bp, Homo sapien
ggcagcactttgtcgtctccaaagt

SEQ ID NO: 2739610 - DNA, 25 bp, Homo sapien
cactttgtcgtctccaaagtgcttc

SEQ ID NO: 2739611 - DNA, 25 bp, Homo sapien
tcccgacacgctccatcatgggggt

SEQ ID NO: 2739612 - DNA, 25 bp, Homo sapien
aagtgcttcccgacacgctccatca

SEQ ID NO: 2739613 - DNA, 25 bp, Homo sapien
ggagatgggttatggtggcgaggga

SEQ ID NO: 2739614 - DNA, 25 bp, Homo sapien
cgacaggaaagtgtagatctcaagg

SEQ ID NO: 2739615 - DNA, 25 bp, Homo sapien
tttttcgacaggaaagtgtagatct

SEQ ID NO: 2739616 - DNA, 25 bp, Homo sapien
gtagatctcaaggttctccagttct

SEQ ID NO: 2739617 - DNA, 25 bp, Homo sapien
aagtgtagatctcaaggttctccag

SEQ ID NO: 2739618 - DNA, 25 bp, Homo sapien
cccacgtggccggtggttcctagca

SEQ ID NO: 2739619 - DNA, 25 bp, Homo sapien
ttcctagcaggtgctggtttgtaca

SEQ ID NO: 2739620 - DNA, 25 bp, Homo sapien
ctagcaggtgctggtttgtacactg

SEQ ID NO: 2739621 - DNA, 25 bp, Homo sapien
ccacgtggccggtggttcctagcag

SEQ ID NO: 2739622 - DNA, 25 bp, Homo sapien
tcttcgggactgatgacggcatgga

SEQ ID NO: 2739623 - DNA, 25 bp, Homo sapien
ggaggtcttcgggactgatgacggc

SEQ ID NO: 2739624 - DNA, 25 bp, Homo sapien
tgtgaagggtgcttcaggggacaca

SEQ ID NO: 2739625 - DNA, 25 bp, Homo sapien
gactgatgacggcatggaggccaga

SEQ ID NO: 2739626 - DNA, 25 bp, Homo sapien
agcctgcatggagtcggaccaggac

SEQ ID NO: 2739627 - DNA, 25 bp, Homo sapien
gcatggagtcggaccaggacaccca

SEQ ID NO: 2739628 - DNA, 25 bp, Homo sapien
caggggacgcaaaggctctggtggc

SEQ ID NO: 2739629 - DNA, 25 bp, Homo sapien
ccagccaggattccgtcgtcgggga

SEQ ID NO: 2739630 - DNA, 25 bp, Homo sapien
cccaggttgggatcactgcagcgac

SEQ ID NO: 2739631 - DNA, 25 bp, Homo sapien
accaacgcctcggatcactcgaggg

SEQ ID NO: 2739632 - DNA, 25 bp, Homo sapien
ccaggtgtgtggacaggagcgctca

SEQ ID NO: 2739633 - DNA, 25 bp, Homo sapien
tcgagggctagaaggcacccaccag

SEQ ID NO: 2739634 - DNA, 25 bp, Homo sapien
tattcggtgtccatgggagtgtctg

SEQ ID NO: 2739635 - DNA, 25 bp, Homo sapien
cccaattgttcgtggatgtcggata

SEQ ID NO: 2739636 - DNA, 25 bp, Homo sapien
gtcctcaggagattcccaattgttc

SEQ ID NO: 2739637 - DNA, 25 bp, Homo sapien
gcgtccagcagcgttggcacatcca

SEQ ID NO: 2739638 - DNA, 25 bp, Homo sapien
aagaggtctctgtgggcgccaagcc

SEQ ID NO: 2739639 - DNA, 25 bp, Homo sapien
gactggaggtttggaccccatctcc

SEQ ID NO: 2739640 - DNA, 25 bp, Homo sapien
caaggagatttacgggctccaggga

SEQ ID NO: 2739641 - DNA, 25 bp, Homo sapien
gaagtttgcaggtctacacgtggaa

SEQ ID NO: 2739642 - DNA, 25 bp, Homo sapien
cattggaggttgcagcattttattc

SEQ ID NO: 2739643 - DNA, 25 bp, Homo sapien
tgaggtgggcagatatctcaaggtc

SEQ ID NO: 2739644 - DNA, 25 bp, Homo sapien
ggtgacaccttctctcgactaaaat

SEQ ID NO: 2739645 - DNA, 25 bp, Homo sapien
tcaggtttacaatttatgattcatc

SEQ ID NO: 2739646 - DNA, 25 bp, Homo sapien
ccccatgagagcgagacggtgaagc

SEQ ID NO: 2739647 - DNA, 25 bp, Homo sapien
gagcgagacggtgaagctaccagca

SEQ ID NO: 2739648 - DNA, 25 bp, Homo sapien
attgaccccagcttgcacagctgag

SEQ ID NO: 2739649 - DNA, 25 bp, Homo sapien
ctggttctgatgtagccattgaccc

SEQ ID NO: 2739650 - DNA, 25 bp, Homo sapien
atcccgcacaggtgagccgtctggg

SEQ ID NO: 2739651 - DNA, 25 bp, Homo sapien
tttggccagcttcgcgcaggtgcca

SEQ ID NO: 2739652 - DNA, 25 bp, Homo sapien
cttttgttccatcccgcacaggtga

SEQ ID NO: 2739653 - DNA, 25 bp, Homo sapien
ggtcaggagtcagtgcacaaatccc

SEQ ID NO: 2739654 - DNA, 25 bp, Homo sapien
gggagctgggactcgcaaacctcaa

SEQ ID NO: 2739655 - DNA, 25 bp, Homo sapien
agaaggtgtttcatggagctgccca

SEQ ID NO: 2739656 - DNA, 25 bp, Homo sapien
gaggcgctcttcactaaggcaatgc

SEQ ID NO: 2739657 - DNA, 25 bp, Homo sapien
caagagggctcttatactgtgtagc

SEQ ID NO: 2739658 - DNA, 25 bp, Homo sapien
cattctggatggcaacatttaaccc

SEQ ID NO: 2739659 - DNA, 25 bp, Homo sapien
tgaaaacaaatacagtcctagggtg

SEQ ID NO: 2739660 - DNA, 25 bp, Homo sapien
tcctagggtggagaaaggtatctgc

SEQ ID NO: 2739661 - DNA, 25 bp, Homo sapien
gctttggccagactacttgaaaaca

SEQ ID NO: 2739662 - DNA, 25 bp, Homo sapien
ctcataaagggatccaagaatgcct

SEQ ID NO: 2739663 - DNA, 25 bp, Homo sapien
tgctgactgagaccatggcgcgcat

SEQ ID NO: 2739664 - DNA, 25 bp, Homo sapien
ggagaacaactacctgaagctgcag

SEQ ID NO: 2739665 - DNA, 25 bp, Homo sapien
gaactgctcatagacatgctgactg

SEQ ID NO: 2739666 - DNA, 25 bp, Homo sapien
caaaagccaagtgttgctggaggag

SEQ ID NO: 2739667 - DNA, 25 bp, Homo sapien
gagtgctcggctacgagccatgcca

SEQ ID NO: 2739668 - DNA, 25 bp, Homo sapien
gttttgggccgatcacatctcgcgg

SEQ ID NO: 2739669 - DNA, 25 bp, Homo sapien
gagcacctgcgtgccctacaaggtc

SEQ ID NO: 2739670 - DNA, 25 bp, Homo sapien
gccctggcaaccttcgagtgctcgg

SEQ ID NO: 2739671 - DNA, 25 bp, Homo sapien
gatacaatctcaagggtgggcctgg

SEQ ID NO: 2739672 - DNA, 25 bp, Homo sapien
tagggaacctgacccatgacacgct

SEQ ID NO: 2739673 - DNA, 25 bp, Homo sapien
tcagagttccccatgagagcaagcg

SEQ ID NO: 2739674 - DNA, 25 bp, Homo sapien
cagagatgggactagccctgggaca

SEQ ID NO: 2739675 - DNA, 25 bp, Homo sapien
catgtctgcacaaagaagacataag

SEQ ID NO: 2739676 - DNA, 25 bp, Homo sapien
ctctgcatgtctgcacaaagaagac

SEQ ID NO: 2739677 - DNA, 25 bp, Homo sapien
tctttttacattcttctctgcatgt

SEQ ID NO: 2739678 - DNA, 25 bp, Homo sapien
ttctttttacattcttctctgcatg

SEQ ID NO: 2739679 - DNA, 25 bp, Homo sapien
cgatcacagtgcactttatccgtct

SEQ ID NO: 2739680 - DNA, 25 bp, Homo sapien
ttagctggtcccttcatttcccgat

SEQ ID NO: 2739681 - DNA, 25 bp, Homo sapien
tcttggggcggatttccgaagagaa

SEQ ID NO: 2739682 - DNA, 25 bp, Homo sapien
gcggatttccgaagagaacaggaag

SEQ ID NO: 2739683 - DNA, 25 bp, Homo sapien
agaatcagcaacatccttctcgtac

SEQ ID NO: 2739684 - DNA, 25 bp, Homo sapien
aacttccctttcgacttagaatcag

SEQ ID NO: 2739685 - DNA, 25 bp, Homo sapien
gctttgagccatcaaacttcccttt

SEQ ID NO: 2739686 - DNA, 25 bp, Homo sapien
ttccctttcgacttagaatcagcaa

SEQ ID NO: 2739687 - DNA, 25 bp, Homo sapien
ctttttccaggcaactttagcagga

SEQ ID NO: 2739688 - DNA, 25 bp, Homo sapien
tttttccaggcaactttagcaggac

SEQ ID NO: 2739689 - DNA, 25 bp, Homo sapien
tgacagataaacactttgtttattc

SEQ ID NO: 2739690 - DNA, 25 bp, Homo sapien
ctcatctcctcctcgtcttcatctt

SEQ ID NO: 2739691 - DNA, 25 bp, Homo sapien
ttttgacagataaacactttgttta

SEQ ID NO: 2739692 - DNA, 25 bp, Homo sapien
cctcatctcctcctcgtcttcatct

SEQ ID NO: 2739693 - DNA, 25 bp, Homo sapien
aggaagggcccgttgcagcgaacgc

SEQ ID NO: 2739694 - DNA, 25 bp, Homo sapien
ggtaggagtccgacgatcggccatc

SEQ ID NO: 2739695 - DNA, 25 bp, Homo sapien
ccgagacttgggacgcatcgcgcgc

SEQ ID NO: 2739696 - DNA, 25 bp, Homo sapien
ccgacgatcggccatcaggaagggc

SEQ ID NO: 2739697 - DNA, 25 bp, Homo sapien
cgaggcctcttggttctgcggcacg

SEQ ID NO: 2739698 - DNA, 25 bp, Homo sapien
cctcttggttctgcggcacgtgacg

SEQ ID NO: 2739699 - DNA, 25 bp, Homo sapien
gcctctctctttactgcggcgcggg

SEQ ID NO: 2739700 - DNA, 25 bp, Homo sapien
acagggccgggcttcgtgcggtggg

SEQ ID NO: 2739701 - DNA, 25 bp, Homo sapien
gcagcggtggccgaggcctcttggt

SEQ ID NO: 2739702 - DNA, 25 bp, Homo sapien
ttctgcggcacgtgacggtcgggcc

SEQ ID NO: 2739703 - DNA, 25 bp, Homo sapien
cgtcacgtgccgcagaaccaagagg

SEQ ID NO: 2739704 - DNA, 25 bp, Homo sapien
tgccccgcgccgcagtaaagagaga

SEQ ID NO: 2739705 - DNA, 25 bp, Homo sapien
cccgcgccgcagtaaagagagaggc

SEQ ID NO: 2739706 - DNA, 25 bp, Homo sapien
tgccgcagaaccaagaggcctcggc

SEQ ID NO: 2739707 - DNA, 25 bp, Homo sapien
ggcggcccgaccgtcacgtgccgca

SEQ ID NO: 2739708 - DNA, 25 bp, Homo sapien
acgtgccgcagaaccaagaggcctc

SEQ ID NO: 2739709 - DNA, 25 bp, Homo sapien
gtgcgggcgggaaggggcacgggca

SEQ ID NO: 2739710 - DNA, 25 bp, Homo sapien
tgcgggcgggaaggggcacgggcac

SEQ ID NO: 2739711 - DNA, 25 bp, Homo sapien
tgcccgtgccccttcccgcccgcac

SEQ ID NO: 2739712 - DNA, 25 bp, Homo sapien
gtgcccgtgccccttcccgcccgca

SEQ ID NO: 2739713 - DNA, 25 bp, Homo sapien
tttcttaggcctctttgccggctgc

SEQ ID NO: 2739714 - DNA, 25 bp, Homo sapien
ctttcttaggcctctttgccggctg

SEQ ID NO: 2739715 - DNA, 25 bp, Homo sapien
ttcttaggcctctttgccggctgcc

SEQ ID NO: 2739716 - DNA, 25 bp, Homo sapien
gctttcttaggcctctttgccggct

SEQ ID NO: 2739717 - DNA, 25 bp, Homo sapien
ttaggcctctttgccggctgcctgg

SEQ ID NO: 2739718 - DNA, 25 bp, Homo sapien
tctttgccggctgcctgggcagccg

SEQ ID NO: 2739719 - DNA, 25 bp, Homo sapien
gcagccggcaaagaggcctaagaaa

SEQ ID NO: 2739720 - DNA, 25 bp, Homo sapien
cagccggcaaagaggcctaagaaag

SEQ ID NO: 2739721 - DNA, 25 bp, Homo sapien
agccggcaaagaggcctaagaaagc

SEQ ID NO: 2739722 - DNA, 25 bp, Homo sapien
ggcagccggcaaagaggcctaagaa

SEQ ID NO: 2739723 - DNA, 25 bp, Homo sapien
cggctgcccaggcagccggcaaaga

SEQ ID NO: 2739724 - DNA, 25 bp, Homo sapien
ccaggcagccggcaaagaggcctaa

SEQ ID NO: 2739725 - DNA, 25 bp, Homo sapien
gaggaaactagaggccctggtaata

SEQ ID NO: 2739726 - DNA, 25 bp, Homo sapien
gaggccctggtaatataaggtaaca

SEQ ID NO: 2739727 - DNA, 25 bp, Homo sapien
gagggtgctgattactagctaaaag

SEQ ID NO: 2739728 - DNA, 25 bp, Homo sapien
cctgatgtcagtaatggagaagagt

SEQ ID NO: 2739729 - DNA, 25 bp, Homo sapien
catgtagagcagctatagagggaga

SEQ ID NO: 2739730 - DNA, 25 bp, Homo sapien
ttttgcaaacatggactcatgatag

SEQ ID NO: 2739731 - DNA, 25 bp, Homo sapien
tatcatgagtccatgtttgcaaaaa

SEQ ID NO: 2739732 - DNA, 25 bp, Homo sapien
taccttatattaccagggcctctag

SEQ ID NO: 2739733 - DNA, 25 bp, Homo sapien
actcttctccattactgacatcagg

SEQ ID NO: 2739734 - DNA, 25 bp, Homo sapien
gactcatcacccaaaaactatcatg

SEQ ID NO: 2739735 - DNA, 25 bp, Homo sapien
catttttgggcttgagaaagtacag

SEQ ID NO: 2739736 - DNA, 25 bp, Homo sapien
tcttttagctagtaatcagcaccct

SEQ ID NO: 2739737 - DNA, 25 bp, Homo sapien
ttacgtggttagaaaagaagagata

SEQ ID NO: 2739738 - DNA, 25 bp, Homo sapien
cagggcgcttacgtggttagaaaag

SEQ ID NO: 2739739 - DNA, 25 bp, Homo sapien
taatataatacacagggcgcttacg

SEQ ID NO: 2739740 - DNA, 25 bp, Homo sapien
atataatacacagggcgcttacgtg

SEQ ID NO: 2739741 - DNA, 25 bp, Homo sapien
gcgcttacgtggttagaaaagaaga

SEQ ID NO: 2739742 - DNA, 25 bp, Homo sapien
tacacagggcgcttacgtggttaga

SEQ ID NO: 2739743 - DNA, 25 bp, Homo sapien
tatctcttcttttctaaccacgtaa

SEQ ID NO: 2739744 - DNA, 25 bp, Homo sapien
tctaaccacgtaagcgccctgtgta

SEQ ID NO: 2739745 - DNA, 25 bp, Homo sapien
tcttcttttctaaccacgtaagcgc

SEQ ID NO: 2739746 - DNA, 25 bp, Homo sapien
gtaagcgccctgtgtattatattag

SEQ ID NO: 2739747 - DNA, 25 bp, Homo sapien
cttttctaaccacgtaagcgccctg

SEQ ID NO: 2739748 - DNA, 25 bp, Homo sapien
cacgtaagcgccctgtgtattatat

SEQ ID NO: 2739749 - DNA, 25 bp, Homo sapien
gtgccaatgcatcccagcctggcga

SEQ ID NO: 2739750 - DNA, 25 bp, Homo sapien
taggagaatcacttgaacccaggag

SEQ ID NO: 2739751 - DNA, 25 bp, Homo sapien
agtgccaatgcatcccagcctggcg

SEQ ID NO: 2739752 - DNA, 25 bp, Homo sapien
gtgagccaagatagtgccaatgcat

SEQ ID NO: 2739753 - DNA, 25 bp, Homo sapien
tagtgccaatgcatcccagcctggc

SEQ ID NO: 2739754 - DNA, 25 bp, Homo sapien
gtaggagaatcacttgaacccagga

SEQ ID NO: 2739755 - DNA, 25 bp, Homo sapien
tcgccaggctgggatgcattggcac

SEQ ID NO: 2739756 - DNA, 25 bp, Homo sapien
gccaggctgggatgcattggcacta

SEQ ID NO: 2739757 - DNA, 25 bp, Homo sapien
ctcctgggttcaagtgattctccta

SEQ ID NO: 2739758 - DNA, 25 bp, Homo sapien
cgccaggctgggatgcattggcact

SEQ ID NO: 2739759 - DNA, 25 bp, Homo sapien
tcctgggttcaagtgattctcctac

SEQ ID NO: 2739760 - DNA, 25 bp, Homo sapien
atgcattggcactatcttggctcac

SEQ ID NO: 2739761 - DNA, 25 bp, Homo sapien
ttgaatgccccacatctgtgtaacc

SEQ ID NO: 2739762 - DNA, 25 bp, Homo sapien
tgtgtaaccaatcctctctatatga

SEQ ID NO: 2739763 - DNA, 25 bp, Homo sapien
aaattagtgtatgaaagggcttttg

SEQ ID NO: 2739764 - DNA, 25 bp, Homo sapien
ttgtatttgaatgccccacatctgt

SEQ ID NO: 2739765 - DNA, 25 bp, Homo sapien
ggcttttgtctgttgtaaagcactt

SEQ ID NO: 2739766 - DNA, 25 bp, Homo sapien
ctttaatctctctaggctgcctttc

SEQ ID NO: 2739767 - DNA, 25 bp, Homo sapien
tagagaggattggttacacagatgt

SEQ ID NO: 2739768 - DNA, 25 bp, Homo sapien
taaagtgctttacaacagacaaaag

SEQ ID NO: 2739769 - DNA, 25 bp, Homo sapien
caacatcctcatatagagaggattg

SEQ ID NO: 2739770 - DNA, 25 bp, Homo sapien
tcatatagagaggattggttacaca

SEQ ID NO: 2739771 - DNA, 25 bp, Homo sapien
gaaaggcagcctagagagattaaag

SEQ ID NO: 2739772 - DNA, 25 bp, Homo sapien
caaaagccctttcatacactaattt

SEQ ID NO: 2739773 - DNA, 25 bp, Homo sapien
actgctattgttgaggctcatgatg

SEQ ID NO: 2739774 - DNA, 25 bp, Homo sapien
tgtgtatgttactggtgcttggaac

SEQ ID NO: 2739775 - DNA, 25 bp, Homo sapien
ttgaggatgaccttgacgatgtcat

SEQ ID NO: 2739776 - DNA, 25 bp, Homo sapien
gaactgctattgttgaggctcatga

SEQ ID NO: 2739777 - DNA, 25 bp, Homo sapien
tgcttggaactgctattgttgaggc

SEQ ID NO: 2739778 - DNA, 25 bp, Homo sapien
tgaccttgacgatgtcattgaagag

SEQ ID NO: 2739779 - DNA, 25 bp, Homo sapien
ctcttcaatgacatcgtcaaggtca

SEQ ID NO: 2739780 - DNA, 25 bp, Homo sapien
gagcctcaacaatagcagttccaag

SEQ ID NO: 2739781 - DNA, 25 bp, Homo sapien
tcatgagcctcaacaatagcagttc

SEQ ID NO: 2739782 - DNA, 25 bp, Homo sapien
atgacatcgtcaaggtcatcctcaa

SEQ ID NO: 2739783 - DNA, 25 bp, Homo sapien
ttccaagcaccagtaacatacacag

SEQ ID NO: 2739784 - DNA, 25 bp, Homo sapien
catcatgagcctcaacaatagcagt

SEQ ID NO: 2739785 - DNA, 25 bp, Homo sapien
cagataccactgctcctccttcatc

SEQ ID NO: 2739786 - DNA, 25 bp, Homo sapien
tagaagactcaaaaccagataccac

SEQ ID NO: 2739787 - DNA, 25 bp, Homo sapien
gtagaagactcaaaaccagatacca

SEQ ID NO: 2739788 - DNA, 25 bp, Homo sapien
gaagactcaaaaccagataccactg

SEQ ID NO: 2739789 - DNA, 25 bp, Homo sapien
cactgctcctccttcatctcccaag

SEQ ID NO: 2739790 - DNA, 25 bp, Homo sapien
gactcaaaaccagataccactgctc

SEQ ID NO: 2739791 - DNA, 25 bp, Homo sapien
gaaggaggagcagtggtatctggtt

SEQ ID NO: 2739792 - DNA, 25 bp, Homo sapien
tggtatctggttttgagtcttctac

SEQ ID NO: 2739793 - DNA, 25 bp, Homo sapien
gagcagtggtatctggttttgagtc

SEQ ID NO: 2739794 - DNA, 25 bp, Homo sapien
cttgggagatgaaggaggagcagtg

SEQ ID NO: 2739795 - DNA, 25 bp, Homo sapien
cagtggtatctggttttgagtcttc

SEQ ID NO: 2739796 - DNA, 25 bp, Homo sapien
gatgaaggaggagcagtggtatctg

SEQ ID NO: 2739797 - DNA, 25 bp, Homo sapien
ccagttccaacaggggaagtatatt

SEQ ID NO: 2739798 - DNA, 25 bp, Homo sapien
tccagttccaacaggggaagtatat

SEQ ID NO: 2739799 - DNA, 25 bp, Homo sapien
cagttccaacaggggaagtatattt

SEQ ID NO: 2739800 - DNA, 25 bp, Homo sapien
aaatatacttcccctgttggaactg

SEQ ID NO: 2739801 - DNA, 25 bp, Homo sapien
atatacttcccctgttggaactgga

SEQ ID NO: 2739802 - DNA, 25 bp, Homo sapien
aatatacttcccctgttggaactgg

SEQ ID NO: 2739803 - DNA, 25 bp, Homo sapien
attttgctgattcttttgacagagg

SEQ ID NO: 2739804 - DNA, 25 bp, Homo sapien
cttttgacagaggaactctgtcagg

SEQ ID NO: 2739805 - DNA, 25 bp, Homo sapien
tatattttgctgattcttttgacag

SEQ ID NO: 2739806 - DNA, 25 bp, Homo sapien
gttacttacaaagctccagttccaa

SEQ ID NO: 2739807 - DNA, 25 bp, Homo sapien
tattttgctgattcttttgacagag

SEQ ID NO: 2739808 - DNA, 25 bp, Homo sapien
tcttttgacagaggaactctgtcag

SEQ ID NO: 2739809 - DNA, 25 bp, Homo sapien
tctgtcaaaagaatcagcaaaatat

SEQ ID NO: 2739810 - DNA, 25 bp, Homo sapien
cctgacagagttcctctgtcaaaag

SEQ ID NO: 2739811 - DNA, 25 bp, Homo sapien
ttggaactggagctttgtaagtaac

SEQ ID NO: 2739812 - DNA, 25 bp, Homo sapien
cctctgtcaaaagaatcagcaaaat

SEQ ID NO: 2739813 - DNA, 25 bp, Homo sapien
tgtcaaaagaatcagcaaaatatac

SEQ ID NO: 2739814 - DNA, 25 bp, Homo sapien
aatatacttcccctgttggaactgg

SEQ ID NO: 2739815 - DNA, 25 bp, Homo sapien
caagaaagacgataccgatgatgaa

SEQ ID NO: 2739816 - DNA, 25 bp, Homo sapien
aagacgataccgatgatgaaattgc

SEQ ID NO: 2739817 - DNA, 25 bp, Homo sapien
gccaagaaagacgataccgatgatg

SEQ ID NO: 2739818 - DNA, 25 bp, Homo sapien
aagccaagaaagacgataccgatga

SEQ ID NO: 2739819 - DNA, 25 bp, Homo sapien
gacgataccgatgatgaaattgcca

SEQ ID NO: 2739820 - DNA, 25 bp, Homo sapien
caaagccaagaaagacgataccgat

SEQ ID NO: 2739821 - DNA, 25 bp, Homo sapien
tcatcatcggtatcgtctttcttgg

SEQ ID NO: 2739822 - DNA, 25 bp, Homo sapien
catcatcggtatcgtctttcttggc

SEQ ID NO: 2739823 - DNA, 25 bp, Homo sapien
tggcaatttcatcatcggtatcgtc

SEQ ID NO: 2739824 - DNA, 25 bp, Homo sapien
atcggtatcgtctttcttggctttg

SEQ ID NO: 2739825 - DNA, 25 bp, Homo sapien
ggcaatttcatcatcggtatcgtct

SEQ ID NO: 2739826 - DNA, 25 bp, Homo sapien
tcatcggtatcgtctttcttggctt

SEQ ID NO: 2739827 - DNA, 25 bp, Homo sapien
ggacttgtgttgatgtctcgggcca

SEQ ID NO: 2739828 - DNA, 25 bp, Homo sapien
ttcctgtttgacaccaagcctctca

SEQ ID NO: 2739829 - DNA, 25 bp, Homo sapien
catctctgctaaactgaacaagccc

SEQ ID NO: 2739830 - DNA, 25 bp, Homo sapien
gaaatgaaggagtcaaagcttccag

SEQ ID NO: 2739831 - DNA, 25 bp, Homo sapien
ttgacaccaagcctctcattgttca

SEQ ID NO: 2739832 - DNA, 25 bp, Homo sapien
tgtgttgatgtctcgggccaagcat

SEQ ID NO: 2739833 - DNA, 25 bp, Homo sapien
tggaagctttgactccttcatttcc

SEQ ID NO: 2739834 - DNA, 25 bp, Homo sapien
tgaacaatgagaggcttggtgtcaa

SEQ ID NO: 2739835 - DNA, 25 bp, Homo sapien
gggcttgttcagtttagcagagatg

SEQ ID NO: 2739836 - DNA, 25 bp, Homo sapien
gatgcttggcccgagacatcaacac

SEQ ID NO: 2739837 - DNA, 25 bp, Homo sapien
tggcccgagacatcaacacaagtcc

SEQ ID NO: 2739838 - DNA, 25 bp, Homo sapien
tgagaggcttggtgtcaaacaggaa

SEQ ID NO: 2739839 - DNA, 25 bp, Homo sapien
tgacctatgataaaacgtgactaag

SEQ ID NO: 2739840 - DNA, 25 bp, Homo sapien
aaacgtgactaagatgagggagaga

SEQ ID NO: 2739841 - DNA, 25 bp, Homo sapien
gagagtttcgatctttcaaaatgcc

SEQ ID NO: 2739842 - DNA, 25 bp, Homo sapien
gaagatggaatcctttgtaagggta

SEQ ID NO: 2739843 - DNA, 25 bp, Homo sapien
tgtaagggtaaacatttgacctatg

SEQ ID NO: 2739844 - DNA, 25 bp, Homo sapien
taccggaaatctgcattaatagttt

SEQ ID NO: 2739845 - DNA, 25 bp, Homo sapien
ctgactctaaataacttgtagattt

SEQ ID NO: 2739846 - DNA, 25 bp, Homo sapien
actctaaataacttgtagattttgc

SEQ ID NO: 2739847 - DNA, 25 bp, Homo sapien
tcctgactctaaataacttgtagat

SEQ ID NO: 2739848 - DNA, 25 bp, Homo sapien
ttcctgactctaaataacttgtaga

SEQ ID NO: 2739849 - DNA, 25 bp, Homo sapien
gactctaaataacttgtagattttg

SEQ ID NO: 2739850 - DNA, 25 bp, Homo sapien
cctgactctaaataacttgtagatt

SEQ ID NO: 2739851 - DNA, 25 bp, Homo sapien
caaaatctacaagttatttagagtc

SEQ ID NO: 2739852 - DNA, 25 bp, Homo sapien
aatctacaagttatttagagtcagg

SEQ ID NO: 2739853 - DNA, 25 bp, Homo sapien
gcaaaatctacaagttatttagagt

SEQ ID NO: 2739854 - DNA, 25 bp, Homo sapien
aaatctacaagttatttagagtcag

SEQ ID NO: 2739855 - DNA, 25 bp, Homo sapien
atctacaagttatttagagtcagga

SEQ ID NO: 2739856 - DNA, 25 bp, Homo sapien
tctacaagttatttagagtcaggaa

SEQ ID NO: 2739857 - DNA, 25 bp, Homo sapien
tacccttacaaaggattccatcttc

SEQ ID NO: 2739858 - DNA, 25 bp, Homo sapien
cataggtcaaatgtttacccttaca

SEQ ID NO: 2739859 - DNA, 25 bp, Homo sapien
aaactattaatgcagatttccggta

SEQ ID NO: 2739860 - DNA, 25 bp, Homo sapien
tagtcacgttttatcataggtcaaa

SEQ ID NO: 2739861 - DNA, 25 bp, Homo sapien
ggcattttgaaagatcgaaactctc

SEQ ID NO: 2739862 - DNA, 25 bp, Homo sapien
tctctccctcatcttagtcacgttt

SEQ ID NO: 2739863 - DNA, 25 bp, Homo sapien
gctttctaaaacaccagaactcaac

SEQ ID NO: 2739864 - DNA, 25 bp, Homo sapien
tgctttctaaaacaccagaactcaa

SEQ ID NO: 2739865 - DNA, 25 bp, Homo sapien
gttgagttctggtgttttagaaagc

SEQ ID NO: 2739866 - DNA, 25 bp, Homo sapien
ttgagttctggtgttttagaaagca

SEQ ID NO: 2739867 - DNA, 25 bp, Homo sapien
ggtgcctatgtgaaactgctttcta

SEQ ID NO: 2739868 - DNA, 25 bp, Homo sapien
tatgaggttaatttccaaaatggaa

SEQ ID NO: 2739869 - DNA, 25 bp, Homo sapien
ttctaaaacaccagaactcaacctg

SEQ ID NO: 2739870 - DNA, 25 bp, Homo sapien
tgctttctaaaacaccagaactcaa

SEQ ID NO: 2739871 - DNA, 25 bp, Homo sapien
aaatggaatagaatgtggtggtgcc

SEQ ID NO: 2739872 - DNA, 25 bp, Homo sapien
tggtggtgcctatgtgaaactgctt

SEQ ID NO: 2739873 - DNA, 25 bp, Homo sapien
tccattttggaaattaacctcatac

SEQ ID NO: 2739874 - DNA, 25 bp, Homo sapien
caggttgagttctggtgttttagaa

SEQ ID NO: 2739875 - DNA, 25 bp, Homo sapien
tagaaagcagtttcacataggcacc

SEQ ID NO: 2739876 - DNA, 25 bp, Homo sapien
aagcagtttcacataggcaccacca

SEQ ID NO: 2739877 - DNA, 25 bp, Homo sapien
ttgagttctggtgttttagaaagca

SEQ ID NO: 2739878 - DNA, 25 bp, Homo sapien
taggcaccaccacattctattccat

SEQ ID NO: 2739879 - DNA, 25 bp, Homo sapien
gacacccactattaccttgtaagaa

SEQ ID NO: 2739880 - DNA, 25 bp, Homo sapien
ccactattaccttgtaagaattttg

SEQ ID NO: 2739881 - DNA, 25 bp, Homo sapien
ggctggacacccactattaccttgt

SEQ ID NO: 2739882 - DNA, 25 bp, Homo sapien
ggacacccactattaccttgtaaga

SEQ ID NO: 2739883 - DNA, 25 bp, Homo sapien
tggacacccactattaccttgtaag

SEQ ID NO: 2739884 - DNA, 25 bp, Homo sapien
gctggacacccactattaccttgta

SEQ ID NO: 2739885 - DNA, 25 bp, Homo sapien
tacaaggtaatagtgggtgtccagc

SEQ ID NO: 2739886 - DNA, 25 bp, Homo sapien
aattcttacaaggtaatagtgggtg

SEQ ID NO: 2739887 - DNA, 25 bp, Homo sapien
caaaattcttacaaggtaatagtgg

SEQ ID NO: 2739888 - DNA, 25 bp, Homo sapien
cttacaaggtaatagtgggtgtcca

SEQ ID NO: 2739889 - DNA, 25 bp, Homo sapien
acaaggtaatagtgggtgtccagcc

SEQ ID NO: 2739890 - DNA, 25 bp, Homo sapien
tcttacaaggtaatagtgggtgtcc

SEQ ID NO: 2739891 - DNA, 25 bp, Homo sapien
cgattatgtttggtccagataaatg

SEQ ID NO: 2739892 - DNA, 25 bp, Homo sapien
ccttatacgattatgtttggtccag

SEQ ID NO: 2739893 - DNA, 25 bp, Homo sapien
gcagatctgaagacctattttactg

SEQ ID NO: 2739894 - DNA, 25 bp, Homo sapien
tgcacttcatcttccgacacaaaaa

SEQ ID NO: 2739895 - DNA, 25 bp, Homo sapien
tgacaagaccccttatacgattatg

SEQ ID NO: 2739896 - DNA, 25 bp, Homo sapien
tctgaagacctattttactgataag

SEQ ID NO: 2739897 - DNA, 25 bp, Homo sapien
cagtaaaataggtcttcagatctgc

SEQ ID NO: 2739898 - DNA, 25 bp, Homo sapien
catttatctggaccaaacataatcg

SEQ ID NO: 2739899 - DNA, 25 bp, Homo sapien
gtttttgtgtcggaagatgaagtgc

SEQ ID NO: 2739900 - DNA, 25 bp, Homo sapien
tttgtgtcggaagatgaagtgcagt

SEQ ID NO: 2739901 - DNA, 25 bp, Homo sapien
cttatcagtaaaataggtcttcaga

SEQ ID NO: 2739902 - DNA, 25 bp, Homo sapien
tggaccaaacataatcgtataaggg

SEQ ID NO: 2739903 - DNA, 25 bp, Homo sapien
acgcctgtaaccgaagctagttggg

SEQ ID NO: 2739904 - DNA, 25 bp, Homo sapien
tttgggggcttatggtattacatat

SEQ ID NO: 2739905 - DNA, 25 bp, Homo sapien
gggcttatggtattacatatatatc

SEQ ID NO: 2739906 - DNA, 25 bp, Homo sapien
ttgggggcttatggtattacatata

SEQ ID NO: 2739907 - DNA, 25 bp, Homo sapien
agtttgggggcttatggtattacat

SEQ ID NO: 2739908 - DNA, 25 bp, Homo sapien
gtttgggggcttatggtattacata

SEQ ID NO: 2739909 - DNA, 25 bp, Homo sapien
atatatatgtaataccataagcccc

SEQ ID NO: 2739910 - DNA, 25 bp, Homo sapien
atgtaataccataagcccccaaact

SEQ ID NO: 2739911 - DNA, 25 bp, Homo sapien
gatatatatgtaataccataagccc

SEQ ID NO: 2739912 - DNA, 25 bp, Homo sapien
cccaactagcttcggttacaggcgt

SEQ ID NO: 2739913 - DNA, 25 bp, Homo sapien
tatgtaataccataagcccccaaac

SEQ ID NO: 2739914 - DNA, 25 bp, Homo sapien
tatatgtaataccataagcccccaa

SEQ ID NO: 2739915 - DNA, 25 bp, Homo sapien
acgcctgtaaccgaagctagttggg

SEQ ID NO: 2739916 - DNA, 25 bp, Homo sapien
gagccaagatcattgtgccacagca

SEQ ID NO: 2739917 - DNA, 25 bp, Homo sapien
cctgggcgaaagtgagactcaatct

SEQ ID NO: 2739918 - DNA, 25 bp, Homo sapien
ttgaacctgggagggagccaagatc

SEQ ID NO: 2739919 - DNA, 25 bp, Homo sapien
ggaattcgagaacagtctggccaaa

SEQ ID NO: 2739920 - DNA, 25 bp, Homo sapien
aaagattgtatatctggccgggcac

SEQ ID NO: 2739921 - DNA, 25 bp, Homo sapien
aacttcttttccacaggaactgagg

SEQ ID NO: 2739922 - DNA, 25 bp, Homo sapien
tagaataggtgtttttggccaggca

SEQ ID NO: 2739923 - DNA, 25 bp, Homo sapien
aataggtgtttttggccaggcatgg

SEQ ID NO: 2739924 - DNA, 25 bp, Homo sapien
gaactgaggttcgagataattttaa

SEQ ID NO: 2739925 - DNA, 25 bp, Homo sapien
ggtgacaaagtgagatgctgtctca

SEQ ID NO: 2739926 - DNA, 25 bp, Homo sapien
ttttccacaggaactgaggttcgag

SEQ ID NO: 2739927 - DNA, 25 bp, Homo sapien
accatgcctggccaaaaacacctat

SEQ ID NO: 2739928 - DNA, 25 bp, Homo sapien
tatctcgaacctcagttcctgtgga

SEQ ID NO: 2739929 - DNA, 25 bp, Homo sapien
gcctggccaaaaacacctattctat

SEQ ID NO: 2739930 - DNA, 25 bp, Homo sapien
gagacagcatctcactttgtcaccc

SEQ ID NO: 2739931 - DNA, 25 bp, Homo sapien
tcttaaaattatctcgaacctcagt

SEQ ID NO: 2739932 - DNA, 25 bp, Homo sapien
cctcagttcctgtggaaaagaagtt

SEQ ID NO: 2739933 - DNA, 25 bp, Homo sapien
aactcttggccatctgttgatccgc

SEQ ID NO: 2739934 - DNA, 25 bp, Homo sapien
tatagttagaacaatttatggtgta

SEQ ID NO: 2739935 - DNA, 25 bp, Homo sapien
ttggccatctgttgatccgcccacc

SEQ ID NO: 2739936 - DNA, 25 bp, Homo sapien
caaactcttggccatctgttgatcc

SEQ ID NO: 2739937 - DNA, 25 bp, Homo sapien
aaactcttggccatctgttgatccg

SEQ ID NO: 2739938 - DNA, 25 bp, Homo sapien
tcttggccatctgttgatccgccca

SEQ ID NO: 2739939 - DNA, 25 bp, Homo sapien
ggtgggcggatcaacagatggccaa

SEQ ID NO: 2739940 - DNA, 25 bp, Homo sapien
tgggcggatcaacagatggccaaga

SEQ ID NO: 2739941 - DNA, 25 bp, Homo sapien
tacaccataaattgttctaactata

SEQ ID NO: 2739942 - DNA, 25 bp, Homo sapien
ggatcaacagatggccaagagtttg

SEQ ID NO: 2739943 - DNA, 25 bp, Homo sapien
gcggatcaacagatggccaagagtt

SEQ ID NO: 2739944 - DNA, 25 bp, Homo sapien
ggcggatcaacagatggccaagagt

SEQ ID NO: 2739945 - DNA, 25 bp, Homo sapien
tcttgaatccagataatagttttga

SEQ ID NO: 2739946 - DNA, 25 bp, Homo sapien
cttgaatccagataatagttttgaa

SEQ ID NO: 2739947 - DNA, 25 bp, Homo sapien
ttttgaaatactggttgaccaatct

SEQ ID NO: 2739948 - DNA, 25 bp, Homo sapien
agttttgaaatactggttgaccaat

SEQ ID NO: 2739949 - DNA, 25 bp, Homo sapien
tagttttgaaatactggttgaccaa

SEQ ID NO: 2739950 - DNA, 25 bp, Homo sapien
gttttgaaatactggttgaccaatc

SEQ ID NO: 2739951 - DNA, 25 bp, Homo sapien
ttcaaaactattatctggattcaag

SEQ ID NO: 2739952 - DNA, 25 bp, Homo sapien
tcaaaactattatctggattcaaga

SEQ ID NO: 2739953 - DNA, 25 bp, Homo sapien
tggtcaaccagtatttcaaaactat

SEQ ID NO: 2739954 - DNA, 25 bp, Homo sapien
ttggtcaaccagtatttcaaaacta

SEQ ID NO: 2739955 - DNA, 25 bp, Homo sapien
gattggtcaaccagtatttcaaaac

SEQ ID NO: 2739956 - DNA, 25 bp, Homo sapien
agattggtcaaccagtatttcaaaa

SEQ ID NO: 2739957 - DNA, 25 bp, Homo sapien
atagtggaaatctgctcaatgacat

SEQ ID NO: 2739958 - DNA, 25 bp, Homo sapien
gaatagtggaaatctgctcaatgac

SEQ ID NO: 2739959 - DNA, 25 bp, Homo sapien
tagtggaaatctgctcaatgacatg

SEQ ID NO: 2739960 - DNA, 25 bp, Homo sapien
tgaatagtggaaatctgctcaatga

SEQ ID NO: 2739961 - DNA, 25 bp, Homo sapien
aatagtggaaatctgctcaatgaca

SEQ ID NO: 2739962 - DNA, 25 bp, Homo sapien
tgtcattgagcagatttccactatt

SEQ ID NO: 2739963 - DNA, 25 bp, Homo sapien
tcattgagcagatttccactattca

SEQ ID NO: 2739964 - DNA, 25 bp, Homo sapien
catgtcattgagcagatttccacta

SEQ ID NO: 2739965 - DNA, 25 bp, Homo sapien
gtcattgagcagatttccactattc

SEQ ID NO: 2739966 - DNA, 25 bp, Homo sapien
atgtcattgagcagatttccactat

SEQ ID NO: 2739967 - DNA, 25 bp, Homo sapien
agcccgaggattgggatgaaagacc

SEQ ID NO: 2739968 - DNA, 25 bp, Homo sapien
gaccggaagcccgaggattgggatg

SEQ ID NO: 2739969 - DNA, 25 bp, Homo sapien
agaccggaagcccgaggattgggat

SEQ ID NO: 2739970 - DNA, 25 bp, Homo sapien
agaagaccggaagcccgaggattgg

SEQ ID NO: 2739971 - DNA, 25 bp, Homo sapien
cagaagaccggaagcccgaggattg

SEQ ID NO: 2739972 - DNA, 25 bp, Homo sapien
aagcccgaggattgggatgaaagac

SEQ ID NO: 2739973 - DNA, 25 bp, Homo sapien
ccttcacgtgaaattgaggacccag

SEQ ID NO: 2739974 - DNA, 25 bp, Homo sapien
tccttcacgtgaaattgaggaccca

SEQ ID NO: 2739975 - DNA, 25 bp, Homo sapien
actcctcctgtaaatccttcacgtg

SEQ ID NO: 2739976 - DNA, 25 bp, Homo sapien
tgtaaatccttcacgtgaaattgag

SEQ ID NO: 2739977 - DNA, 25 bp, Homo sapien
aatccttcacgtgaaattgaggacc

SEQ ID NO: 2739978 - DNA, 25 bp, Homo sapien
cctcctgtaaatccttcacgtgaaa

SEQ ID NO: 2739979 - DNA, 25 bp, Homo sapien
gggtcctcaatttcacgtgaaggat

SEQ ID NO: 2739980 - DNA, 25 bp, Homo sapien
ctgggtcctcaatttcacgtgaagg

SEQ ID NO: 2739981 - DNA, 25 bp, Homo sapien
caatttcacgtgaaggatttacagg

SEQ ID NO: 2739982 - DNA, 25 bp, Homo sapien
cctcaatttcacgtgaaggatttac

SEQ ID NO: 2739983 - DNA, 25 bp, Homo sapien
cacgtgaaggatttacaggaggagt

SEQ ID NO: 2739984 - DNA, 25 bp, Homo sapien
tttcacgtgaaggatttacaggagg

SEQ ID NO: 2739985 - DNA, 25 bp, Homo sapien
atcccaatcctcgggcttccggtct

SEQ ID NO: 2739986 - DNA, 25 bp, Homo sapien
caatcctcgggcttccggtcttctg

SEQ ID NO: 2739987 - DNA, 25 bp, Homo sapien
ccaatcctcgggcttccggtcttct

SEQ ID NO: 2739988 - DNA, 25 bp, Homo sapien
catcccaatcctcgggcttccggtc

SEQ ID NO: 2739989 - DNA, 25 bp, Homo sapien
ggtctttcatcccaatcctcgggct

SEQ ID NO: 2739990 - DNA, 25 bp, Homo sapien
gtctttcatcccaatcctcgggctt

SEQ ID NO: 2739991 - DNA, 25 bp, Homo sapien
cacaaaacccgaaggctggttagat

SEQ ID NO: 2739992 - DNA, 25 bp, Homo sapien
gagcctgagtacgtacctgatccag

SEQ ID NO: 2739993 - DNA, 25 bp, Homo sapien
gagtacgtacctgatccagacgcag

SEQ ID NO: 2739994 - DNA, 25 bp, Homo sapien
cccgaaggctggttagatgatgagc

SEQ ID NO: 2739995 - DNA, 25 bp, Homo sapien
tacgtacctgatccagacgcagaga

SEQ ID NO: 2739996 - DNA, 25 bp, Homo sapien
gatgatgagcctgagtacgtacctg

SEQ ID NO: 2739997 - DNA, 25 bp, Homo sapien
tctctgcgtctggatcaggtacgta

SEQ ID NO: 2739998 - DNA, 25 bp, Homo sapien
gctcatcatctaaccagccttcggg

SEQ ID NO: 2739999 - DNA, 25 bp, Homo sapien
tggatcaggtacgtactcaggctca

SEQ ID NO: 2740000 - DNA, 25 bp, Homo sapien
catctaaccagccttcgggttttgt

SEQ ID NO: 2740001 - DNA, 25 bp, Homo sapien
gcgtctggatcaggtacgtactcag

SEQ ID NO: 2740002 - DNA, 25 bp, Homo sapien
caggtacgtactcaggctcatcatc

SEQ ID NO: 2740003 - DNA, 25 bp, Homo sapien
tcctcagattgccaaccctagatgt

SEQ ID NO: 2740004 - DNA, 25 bp, Homo sapien
agattgccaaccctagatgtgagtc

SEQ ID NO: 2740005 - DNA, 25 bp, Homo sapien
gctcctcagattgccaaccctagat

SEQ ID NO: 2740006 - DNA, 25 bp, Homo sapien
cctcagattgccaaccctagatgtg

SEQ ID NO: 2740007 - DNA, 25 bp, Homo sapien
tcagattgccaaccctagatgtgag

SEQ ID NO: 2740008 - DNA, 25 bp, Homo sapien
aggctcctcagattgccaaccctag

SEQ ID NO: 2740009 - DNA, 25 bp, Homo sapien
acatctagggttggcaatctgagga

SEQ ID NO: 2740010 - DNA, 25 bp, Homo sapien
gactcacatctagggttggcaatct

SEQ ID NO: 2740011 - DNA, 25 bp, Homo sapien
cacatctagggttggcaatctgagg

SEQ ID NO: 2740012 - DNA, 25 bp, Homo sapien
ctcacatctagggttggcaatctga

SEQ ID NO: 2740013 - DNA, 25 bp, Homo sapien
ctagggttggcaatctgaggagcct

SEQ ID NO: 2740014 - DNA, 25 bp, Homo sapien
tctagggttggcaatctgaggagcc

SEQ ID NO: 2740015 - DNA, 25 bp, Homo sapien
tgacaaccccaattataaaggcaaa

SEQ ID NO: 2740016 - DNA, 25 bp, Homo sapien
aatggaagcctcctatgattgacaa

SEQ ID NO: 2740017 - DNA, 25 bp, Homo sapien
atggaagcctcctatgattgacaat

SEQ ID NO: 2740018 - DNA, 25 bp, Homo sapien
tatgattgacaatcccagttaccag

SEQ ID NO: 2740019 - DNA, 25 bp, Homo sapien
ttgacaaccccaattataaaggcaa

SEQ ID NO: 2740020 - DNA, 25 bp, Homo sapien
tttgcctttataattggggttgtca

SEQ ID NO: 2740021 - DNA, 25 bp, Homo sapien
attgtcaatcataggaggcttccat

SEQ ID NO: 2740022 - DNA, 25 bp, Homo sapien
ctggtaactgggattgtcaatcata

SEQ ID NO: 2740023 - DNA, 25 bp, Homo sapien
ttgtcaatcataggaggcttccatt

SEQ ID NO: 2740024 - DNA, 25 bp, Homo sapien
ttgcctttataattggggttgtcaa

SEQ ID NO: 2740025 - DNA, 25 bp, Homo sapien
catgtctgggtgtatgttgtgagta

SEQ ID NO: 2740026 - DNA, 25 bp, Homo sapien
aagttgccctttagttgttctcctg

SEQ ID NO: 2740027 - DNA, 25 bp, Homo sapien
tcccagctgcttaggcacgaggctg

SEQ ID NO: 2740028 - DNA, 25 bp, Homo sapien
agtcactgctgctgtaataatcctt

SEQ ID NO: 2740029 - DNA, 25 bp, Homo sapien
gaagtacgtactgacttatgctccc

SEQ ID NO: 2740030 - DNA, 25 bp, Homo sapien
ggtggccatttaggtggattgtcac

SEQ ID NO: 2740031 - DNA, 25 bp, Homo sapien
taaatggccaccaacaggagaacaa

SEQ ID NO: 2740032 - DNA, 25 bp, Homo sapien
aaggattattacagcagcagtgact

SEQ ID NO: 2740033 - DNA, 25 bp, Homo sapien
cagcctcgtgcctaagcagctggga

SEQ ID NO: 2740034 - DNA, 25 bp, Homo sapien
agtgggagcataagtcagtacgtac

SEQ ID NO: 2740035 - DNA, 25 bp, Homo sapien
caggagaacaactaaagggcaactt

SEQ ID NO: 2740036 - DNA, 25 bp, Homo sapien
aagtgacaatccacctaaatggcca

SEQ ID NO: 2740037 - DNA, 25 bp, Homo sapien
tcgaagaatagttgatgattgggcc

SEQ ID NO: 2740038 - DNA, 25 bp, Homo sapien
tcatttgtgctgatcgaagaatagt

SEQ ID NO: 2740039 - DNA, 25 bp, Homo sapien
gaatagttgatgattgggccaatga

SEQ ID NO: 2740040 - DNA, 25 bp, Homo sapien
aatgactccttttagtgctattggt

SEQ ID NO: 2740041 - DNA, 25 bp, Homo sapien
gaagatctggaacctttcagaatga

SEQ ID NO: 2740042 - DNA, 25 bp, Homo sapien
gctattggtttggagctgtggtcca

SEQ ID NO: 2740043 - DNA, 25 bp, Homo sapien
tcattctgaaaggttccagatcttc

SEQ ID NO: 2740044 - DNA, 25 bp, Homo sapien
caaaccaatagcactaaaaggagtc

SEQ ID NO: 2740045 - DNA, 25 bp, Homo sapien
actattcttcgatcagcacaaatga

SEQ ID NO: 2740046 - DNA, 25 bp, Homo sapien
tcattggcccaatcatcaactattc

SEQ ID NO: 2740047 - DNA, 25 bp, Homo sapien
ggcccaatcatcaactattcttcga

SEQ ID NO: 2740048 - DNA, 25 bp, Homo sapien
tggaccacagctccaaaccaatagc

SEQ ID NO: 2740049 - DNA, 25 bp, Homo sapien
tctgaaaaagaaggtcctgcgtagt

SEQ ID NO: 2740050 - DNA, 25 bp, Homo sapien
aaacagcacggcctatgtttggtgt

SEQ ID NO: 2740051 - DNA, 25 bp, Homo sapien
tgcagaaaaacagcacggcctatgt

SEQ ID NO: 2740052 - DNA, 25 bp, Homo sapien
tgccatgccataactgaactgcaga

SEQ ID NO: 2740053 - DNA, 25 bp, Homo sapien
ggtcctgcgtagtgccatgccataa

SEQ ID NO: 2740054 - DNA, 25 bp, Homo sapien
ggaactttcaatcagccctgtcttg

SEQ ID NO: 2740055 - DNA, 25 bp, Homo sapien
tctgcagttcagttatggcatggca

SEQ ID NO: 2740056 - DNA, 25 bp, Homo sapien
caagacagggctgattgaaagttcc

SEQ ID NO: 2740057 - DNA, 25 bp, Homo sapien
actacgcaggaccttctttttcaga

SEQ ID NO: 2740058 - DNA, 25 bp, Homo sapien
ttatggcatggcactacgcaggacc

SEQ ID NO: 2740059 - DNA, 25 bp, Homo sapien
cataggccgtgctgtttttctgcag

SEQ ID NO: 2740060 - DNA, 25 bp, Homo sapien
acaccaaacataggccgtgctgttt

SEQ ID NO: 2740061 - DNA, 25 bp, Homo sapien
tctatattctaactgtagcccttcc

SEQ ID NO: 2740062 - DNA, 25 bp, Homo sapien
ccgtggctgtgggtagtctatattc

SEQ ID NO: 2740063 - DNA, 25 bp, Homo sapien
tgtgttcctggttatcctcttctgc

SEQ ID NO: 2740064 - DNA, 25 bp, Homo sapien
ggctgtgggtagtctatattctaac

SEQ ID NO: 2740065 - DNA, 25 bp, Homo sapien
ggcagatgatcgaggcagctgaaga

SEQ ID NO: 2740066 - DNA, 25 bp, Homo sapien
ggtagtctatattctaactgtagcc

SEQ ID NO: 2740067 - DNA, 25 bp, Homo sapien
agcagaagaggataaccaggaacac

SEQ ID NO: 2740068 - DNA, 25 bp, Homo sapien
agaagaggataaccaggaacacagg

SEQ ID NO: 2740069 - DNA, 25 bp, Homo sapien
agaatatagactacccacagccacg

SEQ ID NO: 2740070 - DNA, 25 bp, Homo sapien
cagttagaatatagactacccacag

SEQ ID NO: 2740071 - DNA, 25 bp, Homo sapien
tcttcagctgcctcgatcatctgcc

SEQ ID NO: 2740072 - DNA, 25 bp, Homo sapien
gaagggctacagttagaatatagac

SEQ ID NO: 2740073 - DNA, 25 bp, Homo sapien
aataactaagatatgttgcctgagg

SEQ ID NO: 2740074 - DNA, 25 bp, Homo sapien
tgaccaagccatgtttggtgttgac

SEQ ID NO: 2740075 - DNA, 25 bp, Homo sapien
tggtgttgacttcagaaaccttact

SEQ ID NO: 2740076 - DNA, 25 bp, Homo sapien
gccgtttattgtgcccagatgggag

SEQ ID NO: 2740077 - DNA, 25 bp, Homo sapien
tgtagtggctcagtaatgaccaagc

SEQ ID NO: 2740078 - DNA, 25 bp, Homo sapien
gcaggatttatagccccttggttgc

SEQ ID NO: 2740079 - DNA, 25 bp, Homo sapien
gaaaacctcaggcaacatatcttag

SEQ ID NO: 2740080 - DNA, 25 bp, Homo sapien
caaacatggcttggtcattactgag

SEQ ID NO: 2740081 - DNA, 25 bp, Homo sapien
tactgagccactacaaagaaaacct

SEQ ID NO: 2740082 - DNA, 25 bp, Homo sapien
ctcccatctgggcacaataaacggc

SEQ ID NO: 2740083 - DNA, 25 bp, Homo sapien
tgggcacaataaacggccactgagg

SEQ ID NO: 2740084 - DNA, 25 bp, Homo sapien
taagtaaggtttctgaagtcaacac

SEQ ID NO: 2740085 - DNA, 25 bp, Homo sapien
tatctatccctgtatacagcctgga

SEQ ID NO: 2740086 - DNA, 25 bp, Homo sapien
cactattctgtgtatcggtgcctca

SEQ ID NO: 2740087 - DNA, 25 bp, Homo sapien
tacatacacgctcttcagggtagga

SEQ ID NO: 2740088 - DNA, 25 bp, Homo sapien
catagcactttgtaactggatccca

SEQ ID NO: 2740089 - DNA, 25 bp, Homo sapien
ggaacagaactttgcctgtaggcat

SEQ ID NO: 2740090 - DNA, 25 bp, Homo sapien
tacttctgctaaatgaggattatgc

SEQ ID NO: 2740091 - DNA, 25 bp, Homo sapien
taattcctaccctgaagagcgtgta

SEQ ID NO: 2740092 - DNA, 25 bp, Homo sapien
tgggatccagttacaaagtgctatg

SEQ ID NO: 2740093 - DNA, 25 bp, Homo sapien
tcaaggtgactgaggcaccgataca

SEQ ID NO: 2740094 - DNA, 25 bp, Homo sapien
gaagcataatcctcatttagcagaa

SEQ ID NO: 2740095 - DNA, 25 bp, Homo sapien
taacaataaggctgtggtaccccaa

SEQ ID NO: 2740096 - DNA, 25 bp, Homo sapien
caccgatacacagaatagtggcaga

SEQ ID NO: 2740097 - DNA, 25 bp, Homo sapien
tggagtataagaaaactgatgcacc

SEQ ID NO: 2740098 - DNA, 25 bp, Homo sapien
ctcaaccggatgtgaaggaagagga

SEQ ID NO: 2740099 - DNA, 25 bp, Homo sapien
tgatgcacctcaaccggatgtgaag

SEQ ID NO: 2740100 - DNA, 25 bp, Homo sapien
gcacctcaaccggatgtgaaggaag

SEQ ID NO: 2740101 - DNA, 25 bp, Homo sapien
aagaaaactgatgcacctcaaccgg

SEQ ID NO: 2740102 - DNA, 25 bp, Homo sapien
aaaactgatgcacctcaaccggatg

SEQ ID NO: 2740103 - DNA, 25 bp, Homo sapien
tcttccttcacatccggttgaggtg

SEQ ID NO: 2740104 - DNA, 25 bp, Homo sapien
cacatccggttgaggtgcatcagtt

SEQ ID NO: 2740105 - DNA, 25 bp, Homo sapien
tcctcttccttcacatccggttgag

SEQ ID NO: 2740106 - DNA, 25 bp, Homo sapien
cttcacatccggttgaggtgcatca

SEQ ID NO: 2740107 - DNA, 25 bp, Homo sapien
tccggttgaggtgcatcagttttct

SEQ ID NO: 2740108 - DNA, 25 bp, Homo sapien
ggtgcatcagttttcttatactcca

SEQ ID NO: 2740109 - DNA, 25 bp, Homo sapien
atttgatatggtctggccctgttgc

SEQ ID NO: 2740110 - DNA, 25 bp, Homo sapien
gaaaatctgctttaagccaagaccc

SEQ ID NO: 2740111 - DNA, 25 bp, Homo sapien
cctttacagtcaagttaaggattgt

SEQ ID NO: 2740112 - DNA, 25 bp, Homo sapien
atgcgctaccatgctcagctgtttg

SEQ ID NO: 2740113 - DNA, 25 bp, Homo sapien
gctaccatgctcagctgtttgtttg

SEQ ID NO: 2740114 - DNA, 25 bp, Homo sapien
tatttatttgatatggtctggccct

SEQ ID NO: 2740115 - DNA, 25 bp, Homo sapien
gcaacagggccagaccatatcaaat

SEQ ID NO: 2740116 - DNA, 25 bp, Homo sapien
caatccttaacttgactgtaaaggt

SEQ ID NO: 2740117 - DNA, 25 bp, Homo sapien
caaacagctgagcatggtagcgcat

SEQ ID NO: 2740118 - DNA, 25 bp, Homo sapien
gggtcttggcttaaagcagattttc

SEQ ID NO: 2740119 - DNA, 25 bp, Homo sapien
caaacaaacagctgagcatggtagc

SEQ ID NO: 2740120 - DNA, 25 bp, Homo sapien
agggccagaccatatcaaataaata

SEQ ID NO: 2740121 - DNA, 25 bp, Homo sapien
ttttgctcagttgtttaacttctgt

SEQ ID NO: 2740122 - DNA, 25 bp, Homo sapien
tttgctcagttgtttaacttctgtc

SEQ ID NO: 2740123 - DNA, 25 bp, Homo sapien
gttttgctcagttgtttaacttctg

SEQ ID NO: 2740124 - DNA, 25 bp, Homo sapien
ttgctcagttgtttaacttctgtct

SEQ ID NO: 2740125 - DNA, 25 bp, Homo sapien
cagaagttaaacaactgagcaaaac

SEQ ID NO: 2740126 - DNA, 25 bp, Homo sapien
gacagaagttaaacaactgagcaaa

SEQ ID NO: 2740127 - DNA, 25 bp, Homo sapien
acagaagttaaacaactgagcaaaa

SEQ ID NO: 2740128 - DNA, 25 bp, Homo sapien
agacagaagttaaacaactgagcaa

SEQ ID NO: 2740129 - DNA, 25 bp, Homo sapien
ttttgctcagttgtttaacttctgt

SEQ ID NO: 2740130 - DNA, 25 bp, Homo sapien
tttgctcagttgtttaacttctgtc

SEQ ID NO: 2740131 - DNA, 25 bp, Homo sapien
gctcagttgtttaacttctgtctta

SEQ ID NO: 2740132 - DNA, 25 bp, Homo sapien
gttttgctcagttgtttaacttctg

SEQ ID NO: 2740133 - DNA, 25 bp, Homo sapien
ttgctcagttgtttaacttctgtct

SEQ ID NO: 2740134 - DNA, 25 bp, Homo sapien
ctcagttgtttaacttctgtcttag

SEQ ID NO: 2740135 - DNA, 25 bp, Homo sapien
cagaagttaaacaactgagcaaaac

SEQ ID NO: 2740136 - DNA, 25 bp, Homo sapien
gacagaagttaaacaactgagcaaa

SEQ ID NO: 2740137 - DNA, 25 bp, Homo sapien
acagaagttaaacaactgagcaaaa

SEQ ID NO: 2740138 - DNA, 25 bp, Homo sapien
ctaagacagaagttaaacaactgag

SEQ ID NO: 2740139 - DNA, 25 bp, Homo sapien
agacagaagttaaacaactgagcaa

SEQ ID NO: 2740140 - DNA, 25 bp, Homo sapien
taagacagaagttaaacaactgagc

SEQ ID NO: 2740141 - DNA, 25 bp, Homo sapien
agaagatggtggcactgtcagtcaa

SEQ ID NO: 2740142 - DNA, 25 bp, Homo sapien
gaagatggtggcactgtcagtcaag

SEQ ID NO: 2740143 - DNA, 25 bp, Homo sapien
agatggtggcactgtcagtcaagag

SEQ ID NO: 2740144 - DNA, 25 bp, Homo sapien
atggtggcactgtcagtcaagagga

SEQ ID NO: 2740145 - DNA, 25 bp, Homo sapien
aagatggtggcactgtcagtcaaga

SEQ ID NO: 2740146 - DNA, 25 bp, Homo sapien
tggtggcactgtcagtcaagaggag

SEQ ID NO: 2740147 - DNA, 25 bp, Homo sapien
tcttgactgacagtgccaccatctt

SEQ ID NO: 2740148 - DNA, 25 bp, Homo sapien
cttgactgacagtgccaccatcttc

SEQ ID NO: 2740149 - DNA, 25 bp, Homo sapien
tcctcttgactgacagtgccaccat

SEQ ID NO: 2740150 - DNA, 25 bp, Homo sapien
ttgactgacagtgccaccatcttct

SEQ ID NO: 2740151 - DNA, 25 bp, Homo sapien
ctcctcttgactgacagtgccacca

SEQ ID NO: 2740152 - DNA, 25 bp, Homo sapien
ctcttgactgacagtgccaccatct

SEQ ID NO: 2740153 - DNA, 25 bp, Homo sapien
gaaattttgaacagatcaccaagaa

SEQ ID NO: 2740154 - DNA, 25 bp, Homo sapien
aattttgaacagatcaccaagaaac

SEQ ID NO: 2740155 - DNA, 25 bp, Homo sapien
atgaaattttgaacagatcaccaag

SEQ ID NO: 2740156 - DNA, 25 bp, Homo sapien
ttttgaacagatcaccaagaaacag

SEQ ID NO: 2740157 - DNA, 25 bp, Homo sapien
tgaaattttgaacagatcaccaaga

SEQ ID NO: 2740158 - DNA, 25 bp, Homo sapien
tttgaacagatcaccaagaaacaga

SEQ ID NO: 2740159 - DNA, 25 bp, Homo sapien
tgtttcttggtgatctgttcaaaat

SEQ ID NO: 2740160 - DNA, 25 bp, Homo sapien
tcttggtgatctgttcaaaatttca

SEQ ID NO: 2740161 - DNA, 25 bp, Homo sapien
ttcttggtgatctgttcaaaatttc

SEQ ID NO: 2740162 - DNA, 25 bp, Homo sapien
ctgtttcttggtgatctgttcaaaa

SEQ ID NO: 2740163 - DNA, 25 bp, Homo sapien
tctgtttcttggtgatctgttcaaa

SEQ ID NO: 2740164 - DNA, 25 bp, Homo sapien
cttggtgatctgttcaaaatttcat

SEQ ID NO: 2740165 - DNA, 25 bp, Homo sapien
tcttggtgatctgttcaaaatttca

SEQ ID NO: 2740166 - DNA, 25 bp, Homo sapien
ctgtttcttggtgatctgttcaaaa

SEQ ID NO: 2740167 - DNA, 25 bp, Homo sapien
cactctcttcgtggctttctgtttc

SEQ ID NO: 2740168 - DNA, 25 bp, Homo sapien
tttctgtttcttggtgatctgttca

SEQ ID NO: 2740169 - DNA, 25 bp, Homo sapien
tctgtttcttggtgatctgttcaaa

SEQ ID NO: 2740170 - DNA, 25 bp, Homo sapien
gtgatctgttcaaaatttcatcctc

SEQ ID NO: 2740171 - DNA, 25 bp, Homo sapien
ccctgcaagagtggtcctaggagag

SEQ ID NO: 2740172 - DNA, 25 bp, Homo sapien
caatcttaagagcttgatctgtgat

SEQ ID NO: 2740173 - DNA, 25 bp, Homo sapien
cccctgcaagagtggtcctaggaga

SEQ ID NO: 2740174 - DNA, 25 bp, Homo sapien
cttaagagcttgatctgtgatttct

SEQ ID NO: 2740175 - DNA, 25 bp, Homo sapien
aacaatcttaagagcttgatctgtg

SEQ ID NO: 2740176 - DNA, 25 bp, Homo sapien
caagagtggtcctaggagaggacct

SEQ ID NO: 2740177 - DNA, 25 bp, Homo sapien
cacagatcaagctcttaagattgtt

SEQ ID NO: 2740178 - DNA, 25 bp, Homo sapien
ctctcctaggaccactcttgcaggg

SEQ ID NO: 2740179 - DNA, 25 bp, Homo sapien
agaaatcacagatcaagctcttaag

SEQ ID NO: 2740180 - DNA, 25 bp, Homo sapien
atcacagatcaagctcttaagattg

SEQ ID NO: 2740181 - DNA, 25 bp, Homo sapien
gaaatcacagatcaagctcttaaga

SEQ ID NO: 2740182 - DNA, 25 bp, Homo sapien
aggtcctctcctaggaccactcttg

SEQ ID NO: 2740183 - DNA, 25 bp, Homo sapien
tagaatgatagaactttgccagtct

SEQ ID NO: 2740184 - DNA, 25 bp, Homo sapien
tcagcaggctccagttgaacactag

SEQ ID NO: 2740185 - DNA, 25 bp, Homo sapien
agagggactgaatagaagcccaaat

SEQ ID NO: 2740186 - DNA, 25 bp, Homo sapien
taaacatctagcagtaaatacttgc

SEQ ID NO: 2740187 - DNA, 25 bp, Homo sapien
cttgcagttgtgatataaaggaccc

SEQ ID NO: 2740188 - DNA, 25 bp, Homo sapien
gataattacgtttaaagtgcagtca

SEQ ID NO: 2740189 - DNA, 25 bp, Homo sapien
tcaatttccttaggaggaactcaat

SEQ ID NO: 2740190 - DNA, 25 bp, Homo sapien
gggtcctttatatcacaactgcaag

SEQ ID NO: 2740191 - DNA, 25 bp, Homo sapien
caaatgactgcactttaaacgtaat

SEQ ID NO: 2740192 - DNA, 25 bp, Homo sapien
tatcaattttgagggacagaggtgt

SEQ ID NO: 2740193 - DNA, 25 bp, Homo sapien
gatcttaaagactggcaaagttcta

SEQ ID NO: 2740194 - DNA, 25 bp, Homo sapien
cacagactagtgttcaactggagcc

SEQ ID NO: 2740195 - DNA, 25 bp, Homo sapien
taagcagacccatacctttccaggg

SEQ ID NO: 2740196 - DNA, 25 bp, Homo sapien
gcttgcagtccgttgctgaaaatga

SEQ ID NO: 2740197 - DNA, 25 bp, Homo sapien
tctgtagctcagttcccagacagct

SEQ ID NO: 2740198 - DNA, 25 bp, Homo sapien
taaggaatgctagcagggcatggca

SEQ ID NO: 2740199 - DNA, 25 bp, Homo sapien
cacttgatgtttgttagaccagaaa

SEQ ID NO: 2740200 - DNA, 25 bp, Homo sapien
catggcacgtgagctccggaataga

SEQ ID NO: 2740201 - DNA, 25 bp, Homo sapien
cattttcagcaacggactgcaagct

SEQ ID NO: 2740202 - DNA, 25 bp, Homo sapien
tttctggtctaacaaacatcaagtg

SEQ ID NO: 2740203 - DNA, 25 bp, Homo sapien
gaagacatctattccggagctcacg

SEQ ID NO: 2740204 - DNA, 25 bp, Homo sapien
tctattctgtactttgaccctggaa

SEQ ID NO: 2740205 - DNA, 25 bp, Homo sapien
cctggaaaggtatgggtctgcttaa

SEQ ID NO: 2740206 - DNA, 25 bp, Homo sapien
aaagctgtctgggaactgagctaca

SEQ ID NO: 2740207 - DNA, 25 bp, Homo sapien
catagcagactttcccaaatgtatt

SEQ ID NO: 2740208 - DNA, 25 bp, Homo sapien
tgcactgaatatataaacactccac

SEQ ID NO: 2740209 - DNA, 25 bp, Homo sapien
cactccacagtgtttatattgggaa

SEQ ID NO: 2740210 - DNA, 25 bp, Homo sapien
gctttcaaatgtaccgatgatactg

SEQ ID NO: 2740211 - DNA, 25 bp, Homo sapien
ttcatctgttgttctgtggtcacag

SEQ ID NO: 2740212 - DNA, 25 bp, Homo sapien
tgcagatgggtgctatcagagcctc

SEQ ID NO: 2740213 - DNA, 25 bp, Homo sapien
caatacatttgggaaagtctgctat

SEQ ID NO: 2740214 - DNA, 25 bp, Homo sapien
ctgtgaccacagaacaacagatgaa

SEQ ID NO: 2740215 - DNA, 25 bp, Homo sapien
cattattacactatagtggtgtggg

SEQ ID NO: 2740216 - DNA, 25 bp, Homo sapien
tatcttcccaatataaacactgtgg

SEQ ID NO: 2740217 - DNA, 25 bp, Homo sapien
gaggctctgatagcacccatctgca

SEQ ID NO: 2740218 - DNA, 25 bp, Homo sapien
cagtatcatcggtacatttgaaagc

SEQ ID NO: 2740219 - DNA, 25 bp, Homo sapien
gacagtatatgtcatgcctcacttt

SEQ ID NO: 2740220 - DNA, 25 bp, Homo sapien
tgaagcaaatgtgtgggatcattgc

SEQ ID NO: 2740221 - DNA, 25 bp, Homo sapien
tctgcaggtttctccttgaagcaaa

SEQ ID NO: 2740222 - DNA, 25 bp, Homo sapien
tccttgaagcaaatgtgtgggatca

SEQ ID NO: 2740223 - DNA, 25 bp, Homo sapien
tatgtctgcaggtttctccttgaag

SEQ ID NO: 2740224 - DNA, 25 bp, Homo sapien
tcaccctccgttgacagtatatgtc

SEQ ID NO: 2740225 - DNA, 25 bp, Homo sapien
gaaagtgaggcatgacatatactgt

SEQ ID NO: 2740226 - DNA, 25 bp, Homo sapien
gcttcaaggagaaacctgcagacat

SEQ ID NO: 2740227 - DNA, 25 bp, Homo sapien
tgatcccacacatttgcttcaagga

SEQ ID NO: 2740228 - DNA, 25 bp, Homo sapien
catgacatatactgtcaacggaggg

SEQ ID NO: 2740229 - DNA, 25 bp, Homo sapien
gcaatgatcccacacatttgcttca

SEQ ID NO: 2740230 - DNA, 25 bp, Homo sapien
catatactgtcaacggagggtgaag

SEQ ID NO: 2740231 - DNA, 25 bp, Homo sapien
ttgtcagatcgttcattgcctttcc

SEQ ID NO: 2740232 - DNA, 25 bp, Homo sapien
gagctttaaatcattagagcttaaa

SEQ ID NO: 2740233 - DNA, 25 bp, Homo sapien
taaattgtcagatcgttcattgcct

SEQ ID NO: 2740234 - DNA, 25 bp, Homo sapien
ttaaattgtcagatcgttcattgcc

SEQ ID NO: 2740235 - DNA, 25 bp, Homo sapien
ttaaatcattagagcttaaattgtc

SEQ ID NO: 2740236 - DNA, 25 bp, Homo sapien
aaattgtcagatcgttcattgcctt

SEQ ID NO: 2740237 - DNA, 25 bp, Homo sapien
ttaagctctaatgatttaaagctca

SEQ ID NO: 2740238 - DNA, 25 bp, Homo sapien
gaaaggcaatgaacgatctgacaat

SEQ ID NO: 2740239 - DNA, 25 bp, Homo sapien
aaggcaatgaacgatctgacaattt

SEQ ID NO: 2740240 - DNA, 25 bp, Homo sapien
ggaaaggcaatgaacgatctgacaa

SEQ ID NO: 2740241 - DNA, 25 bp, Homo sapien
gacaatttaagctctaatgatttaa

SEQ ID NO: 2740242 - DNA, 25 bp, Homo sapien
ggcaatgaacgatctgacaatttaa

SEQ ID NO: 2740243 - DNA, 25 bp, Homo sapien
attgttgtcaaatgcccactctcca

SEQ ID NO: 2740244 - DNA, 25 bp, Homo sapien
ccagcatcctgattaaatgtctgac

SEQ ID NO: 2740245 - DNA, 25 bp, Homo sapien
tacatgctggttacctgttccattg

SEQ ID NO: 2740246 - DNA, 25 bp, Homo sapien
gaaggtccagcatcctgattaaatg

SEQ ID NO: 2740247 - DNA, 25 bp, Homo sapien
ttgattttacatgctggttacctgt

SEQ ID NO: 2740248 - DNA, 25 bp, Homo sapien
tgttccattgttgtcaaatgcccac

SEQ ID NO: 2740249 - DNA, 25 bp, Homo sapien
catttaatcaggatgctggaccttc

SEQ ID NO: 2740250 - DNA, 25 bp, Homo sapien
caatggaacaggtaaccagcatgta

SEQ ID NO: 2740251 - DNA, 25 bp, Homo sapien
gtcagacatttaatcaggatgctgg

SEQ ID NO: 2740252 - DNA, 25 bp, Homo sapien
gtgggcatttgacaacaatggaaca

SEQ ID NO: 2740253 - DNA, 25 bp, Homo sapien
tggagagtgggcatttgacaacaat

SEQ ID NO: 2740254 - DNA, 25 bp, Homo sapien
acaggtaaccagcatgtaaaatcaa

SEQ ID NO: 2740255 - DNA, 25 bp, Homo sapien
cctcacttttcaatttgtcatgtta

SEQ ID NO: 2740256 - DNA, 25 bp, Homo sapien
cttttcaatttgtcatgttactaaa

SEQ ID NO: 2740257 - DNA, 25 bp, Homo sapien
cacttttcaatttgtcatgttacta

SEQ ID NO: 2740258 - DNA, 25 bp, Homo sapien
ctcacttttcaatttgtcatgttac

SEQ ID NO: 2740259 - DNA, 25 bp, Homo sapien
acttttcaatttgtcatgttactaa

SEQ ID NO: 2740260 - DNA, 25 bp, Homo sapien
tcctcacttttcaatttgtcatgtt

SEQ ID NO: 2740261 - DNA, 25 bp, Homo sapien
tttagtaacatgacaaattgaaaag

SEQ ID NO: 2740262 - DNA, 25 bp, Homo sapien
gtaacatgacaaattgaaaagtgag

SEQ ID NO: 2740263 - DNA, 25 bp, Homo sapien
taacatgacaaattgaaaagtgagg

SEQ ID NO: 2740264 - DNA, 25 bp, Homo sapien
aacatgacaaattgaaaagtgagga

SEQ ID NO: 2740265 - DNA, 25 bp, Homo sapien
tagtaacatgacaaattgaaaagtg

SEQ ID NO: 2740266 - DNA, 25 bp, Homo sapien
ttagtaacatgacaaattgaaaagt

SEQ ID NO: 2740267 - DNA, 25 bp, Homo sapien
gcccatgtgattgcggtgcagtagt

SEQ ID NO: 2740268 - DNA, 25 bp, Homo sapien
tatggcacttttgccttggtggccc

SEQ ID NO: 2740269 - DNA, 25 bp, Homo sapien
tgagagttcactactaggcagaaac

SEQ ID NO: 2740270 - DNA, 25 bp, Homo sapien
ggttgatcttcgtataattggccac

SEQ ID NO: 2740271 - DNA, 25 bp, Homo sapien
tcaccacgtgagtttgatgcagtct

SEQ ID NO: 2740272 - DNA, 25 bp, Homo sapien
cacagaatgtagtgctcctagttac

SEQ ID NO: 2740273 - DNA, 25 bp, Homo sapien
aagtgggccaccaaggcaaaagtgc

SEQ ID NO: 2740274 - DNA, 25 bp, Homo sapien
catagtggccaattatacgaagatc

SEQ ID NO: 2740275 - DNA, 25 bp, Homo sapien
tatgtcttcatacaaacgcagcaga

SEQ ID NO: 2740276 - DNA, 25 bp, Homo sapien
gaaaagactgcatcaaactcacgtg

SEQ ID NO: 2740277 - DNA, 25 bp, Homo sapien
caaaagtgccataatgcagtcctgc

SEQ ID NO: 2740278 - DNA, 25 bp, Homo sapien
tactgcaccgcaatcacatgggcag

SEQ ID NO: 2740279 - DNA, 25 bp, Homo sapien
gcttgctgcctacctcaagcctcgg

SEQ ID NO: 2740280 - DNA, 25 bp, Homo sapien
tgttttccgcgctaccgccgcggcc

SEQ ID NO: 2740281 - DNA, 25 bp, Homo sapien
cgcttgctgcctacctcaagcctcg

SEQ ID NO: 2740282 - DNA, 25 bp, Homo sapien
gccccattgttttccgcgctaccgc

SEQ ID NO: 2740283 - DNA, 25 bp, Homo sapien
tgcgggcttcgctccccgcggctac

SEQ ID NO: 2740284 - DNA, 25 bp, Homo sapien
tcgcgcgcggcggcgggttttcctc

SEQ ID NO: 2740285 - DNA, 25 bp, Homo sapien
ggccgcgccatgcccccgagggcag

SEQ ID NO: 2740286 - DNA, 25 bp, Homo sapien
ctctccgcctcacggccgcgccatg

SEQ ID NO: 2740287 - DNA, 25 bp, Homo sapien
gggccgcgggctgcacgggccgggc

SEQ ID NO: 2740288 - DNA, 25 bp, Homo sapien
ccgcgggctgcacgggccgggcccg

SEQ ID NO: 2740289 - DNA, 25 bp, Homo sapien
cgcgggctgcacgggccgggcccgg

SEQ ID NO: 2740290 - DNA, 25 bp, Homo sapien
ggccgcgggctgcacgggccgggcc

SEQ ID NO: 2740291 - DNA, 25 bp, Homo sapien
tcgtagcgggcctcgcaggtgctgt

SEQ ID NO: 2740292 - DNA, 25 bp, Homo sapien
cggcacagctcgatgcgccggcgaa

SEQ ID NO: 2740293 - DNA, 25 bp, Homo sapien
gtggcgccggcacagctcgatgcgc

SEQ ID NO: 2740294 - DNA, 25 bp, Homo sapien
aaggcgctccatgaccgcgctgtgc

SEQ ID NO: 2740295 - DNA, 25 bp, Homo sapien
tgcttcccggcgcgcttggccttgg

SEQ ID NO: 2740296 - DNA, 25 bp, Homo sapien
cgaaggtgtgttggcgctccagctc

SEQ ID NO: 2740297 - DNA, 25 bp, Homo sapien
ggtgcagggcgaaggtgtgttggcg

SEQ ID NO: 2740298 - DNA, 25 bp, Homo sapien
tgcctgtgcttcccggcgcgcttgg

SEQ ID NO: 2740299 - DNA, 25 bp, Homo sapien
cgggcggccgtgctcggggccgtca

SEQ ID NO: 2740300 - DNA, 25 bp, Homo sapien
tggccgggcggccgtgctcggggcc

SEQ ID NO: 2740301 - DNA, 25 bp, Homo sapien
gggcggccgtgctcggggccgtcag

SEQ ID NO: 2740302 - DNA, 25 bp, Homo sapien
gtggccgggcggccgtgctcggggc

SEQ ID NO: 2740303 - DNA, 25 bp, Homo sapien
cccgatccgcgtcagaggaagcgtt

SEQ ID NO: 2740304 - DNA, 25 bp, Homo sapien
gaataaagatctcaacatcccggaa

SEQ ID NO: 2740305 - DNA, 25 bp, Homo sapien
catcacaggcgactcgaatgctagt

SEQ ID NO: 2740306 - DNA, 25 bp, Homo sapien
tcagttggtcaaccaaaggccgact

SEQ ID NO: 2740307 - DNA, 25 bp, Homo sapien
tcctgggggcggcacggtgcggtgg

SEQ ID NO: 2740308 - DNA, 25 bp, Homo sapien
actttcagagatcaagttggaagaa

SEQ ID NO: 2740309 - DNA, 25 bp, Homo sapien
ttcagagatcaagttggaagaaagg

SEQ ID NO: 2740310 - DNA, 25 bp, Homo sapien
gggggcggcacggtgcggtggctca

SEQ ID NO: 2740311 - DNA, 25 bp, Homo sapien
ccaaggccaaagagctcagctagac

SEQ ID NO: 2740312 - DNA, 25 bp, Homo sapien
tcagctagactaacttggagtccaa

SEQ ID NO: 2740313 - DNA, 25 bp, Homo sapien
cccctgaattgaaggagccactgtt

SEQ ID NO: 2740314 - DNA, 25 bp, Homo sapien
aatcgtacatactcaaggactctct

SEQ ID NO: 2740315 - DNA, 25 bp, Homo sapien
cttaactcttaaaaggtacacatgg

SEQ ID NO: 2740316 - DNA, 25 bp, Homo sapien
tgcagcatactctcaggtggttcag

SEQ ID NO: 2740317 - DNA, 25 bp, Homo sapien
gagtttggtctacaaaattaacagc

SEQ ID NO: 2740318 - DNA, 25 bp, Homo sapien
gagagctatgaggtgtgcagcatac

SEQ ID NO: 2740319 - DNA, 25 bp, Homo sapien
tgactaagatgccaatgaggctggg

SEQ ID NO: 2740320 - DNA, 25 bp, Homo sapien
tacggaggcaacttcagagtaatag

SEQ ID NO: 2740321 - DNA, 25 bp, Homo sapien
catccttggtgtcctttacggaggc

SEQ ID NO: 2740322 - DNA, 25 bp, Homo sapien
gaatccgcagatgcagaatgcgcag

SEQ ID NO: 2740323 - DNA, 25 bp, Homo sapien
agaactactagtgcttttgcttagt

SEQ ID NO: 2740324 - DNA, 25 bp, Homo sapien
gaactactagtgcttttgcttagtg

SEQ ID NO: 2740325 - DNA, 25 bp, Homo sapien
aagaactactagtgcttttgcttag

SEQ ID NO: 2740326 - DNA, 25 bp, Homo sapien
caaagaactactagtgcttttgctt

SEQ ID NO: 2740327 - DNA, 25 bp, Homo sapien
cttcagaattttgaagacattgttc

SEQ ID NO: 2740328 - DNA, 25 bp, Homo sapien
tccttcagaattttgaagacattgt

SEQ ID NO: 2740329 - DNA, 25 bp, Homo sapien
ccttcagaattttgaagacattgtt

SEQ ID NO: 2740330 - DNA, 25 bp, Homo sapien
ttcagaattttgaagacattgttcc

SEQ ID NO: 2740331 - DNA, 25 bp, Homo sapien
tccaggaggtgagcgcatcaatctc

SEQ ID NO: 2740332 - DNA, 25 bp, Homo sapien
acctctcggtgggttgcactgctgc

SEQ ID NO: 2740333 - DNA, 25 bp, Homo sapien
ggagttttgggaaacacagggctca

SEQ ID NO: 2740334 - DNA, 25 bp, Homo sapien
aaagcccctcctgaggaagtcgtga

SEQ ID NO: 2740335 - DNA, 25 bp, Homo sapien
acaaagggctccatacagcaggcac

SEQ ID NO: 2740336 - DNA, 25 bp, Homo sapien
gctccatacagcaggcactgtggct

SEQ ID NO: 2740337 - DNA, 25 bp, Homo sapien
ctgcctccttgctgggaatcgtcat

SEQ ID NO: 2740338 - DNA, 25 bp, Homo sapien
tgcacaaagggctccatacagcagg

SEQ ID NO: 2740339 - DNA, 25 bp, Homo sapien
gatctgcccagttcagcctccccaa

SEQ ID NO: 2740340 - DNA, 25 bp, Homo sapien
atctgcccagttcagcctccccaag

SEQ ID NO: 2740341 - DNA, 25 bp, Homo sapien
ttatctttttaacatgtaatcagta

SEQ ID NO: 2740342 - DNA, 25 bp, Homo sapien
gcctatattatctttttaacatgta

SEQ ID NO: 2740343 - DNA, 25 bp, Homo sapien
gtctttcctgttccaatgattgtga

SEQ ID NO: 2740344 - DNA, 25 bp, Homo sapien
tatcaaacgtagcacggagggtaat

SEQ ID NO: 2740345 - DNA, 25 bp, Homo sapien
gcagattgccagaggccaaagacag

SEQ ID NO: 2740346 - DNA, 25 bp, Homo sapien
catctaggatttaggtgagcaaact

SEQ ID NO: 2740347 - DNA, 25 bp, Homo sapien
gccagtatcgcacaccattgcactg

SEQ ID NO: 2740348 - DNA, 25 bp, Homo sapien
cagtgagccagtatcgcacaccatt

SEQ ID NO: 2740349 - DNA, 25 bp, Homo sapien
ctcccccccgattcatctcatccac

SEQ ID NO: 2740350 - DNA, 25 bp, Homo sapien
gagccagtatcgcacaccattgcac

SEQ ID NO: 2740351 - DNA, 25 bp, Homo sapien
gaggtccccgtagccattctgttga

SEQ ID NO: 2740352 - DNA, 25 bp, Homo sapien
cagtcccagtgatcatgcaaggcag

SEQ ID NO: 2740353 - DNA, 25 bp, Homo sapien
tttgcgatatggagccgacagtccc

SEQ ID NO: 2740354 - DNA, 25 bp, Homo sapien
tccagaaggcttgtcagactgaccg

SEQ ID NO: 2740355 - DNA, 25 bp, Homo sapien
ctgggattgtccgcccggggctgac

SEQ ID NO: 2740356 - DNA, 25 bp, Homo sapien
gggattgtccgcccggggctgacca

SEQ ID NO: 2740357 - DNA, 25 bp, Homo sapien
attgtccgcccggggctgaccagag

SEQ ID NO: 2740358 - DNA, 25 bp, Homo sapien
gattgtccgcccggggctgaccaga

SEQ ID NO: 2740359 - DNA, 25 bp, Homo sapien
cacagacccctggttattcgcggag

SEQ ID NO: 2740360 - DNA, 25 bp, Homo sapien
tgacttatatgggacagctgctggg

SEQ ID NO: 2740361 - DNA, 25 bp, Homo sapien
gaaacagggagttctgctcgtgact

SEQ ID NO: 2740362 - DNA, 25 bp, Homo sapien
tctttgtgcgttctgggcctgggct

SEQ ID NO: 2740363 - DNA, 25 bp, Homo sapien
cattttccatttgatgctaccgggc

SEQ ID NO: 2740364 - DNA, 25 bp, Homo sapien
tacaaattcacgttcactgcaggct

SEQ ID NO: 2740365 - DNA, 25 bp, Homo sapien
ccatgatgaagtaagcacagagctg

SEQ ID NO: 2740366 - DNA, 25 bp, Homo sapien
ctcatgatattaccggcactgggct

SEQ ID NO: 2740367 - DNA, 25 bp, Homo sapien
ctgttccgcgagaaggtgctgttgc

SEQ ID NO: 2740368 - DNA, 25 bp, Homo sapien
ggctgggtcccaacactggtagcct

SEQ ID NO: 2740369 - DNA, 25 bp, Homo sapien
aactgatgctgcttcattacagcgg

SEQ ID NO: 2740370 - DNA, 25 bp, Homo sapien
ctgggcttgcacagggacactggaa

SEQ ID NO: 2740371 - DNA, 25 bp, Homo sapien
tggcttataacaggctctgtagtgg

SEQ ID NO: 2740372 - DNA, 25 bp, Homo sapien
ttataacaggctctgtagtggcagc

SEQ ID NO: 2740373 - DNA, 25 bp, Homo sapien
tgactccatagtggaatgacagaca

SEQ ID NO: 2740374 - DNA, 25 bp, Homo sapien
cagcaaagctgactccatagtggaa

SEQ ID NO: 2740375 - DNA, 25 bp, Homo sapien
ttaaatagtatgaaacagatctagg

SEQ ID NO: 2740376 - DNA, 25 bp, Homo sapien
acttatccaagtttgttactcacaa

SEQ ID NO: 2740377 - DNA, 25 bp, Homo sapien
tagtatgaaacagatctagggagca

SEQ ID NO: 2740378 - DNA, 25 bp, Homo sapien
gatctagggagcaatgactttttta

SEQ ID NO: 2740379 - DNA, 25 bp, Homo sapien
gggcgggtcagatggcgctgaaact

SEQ ID NO: 2740380 - DNA, 25 bp, Homo sapien
gatggcgctgaaactgttgcttctc

SEQ ID NO: 2740381 - DNA, 25 bp, Homo sapien
gtgggaagctgccttgtgtcgggtc

SEQ ID NO: 2740382 - DNA, 25 bp, Homo sapien
gctgccttgtgtcgggtcttggtac

SEQ ID NO: 2740383 - DNA, 25 bp, Homo sapien
cctgtccctgctcgtcacacagaca

SEQ ID NO: 2740384 - DNA, 25 bp, Homo sapien
ccctgtccctgctcgtcacacagac

SEQ ID NO: 2740385 - DNA, 25 bp, Homo sapien
tcccctgtccctgctcgtcacacag

SEQ ID NO: 2740386 - DNA, 25 bp, Homo sapien
tgtccctgctcgtcacacagacacc

SEQ ID NO: 2740387 - DNA, 25 bp, Homo sapien
tgtgtgacaacatctcaccagacaa

SEQ ID NO: 2740388 - DNA, 25 bp, Homo sapien
cagggttgtaaagcccaagagtggc

SEQ ID NO: 2740389 - DNA, 25 bp, Homo sapien
gaggagtcgcaggaaattaccagat

SEQ ID NO: 2740390 - DNA, 25 bp, Homo sapien
agaggctgttcagtcacggagatga

SEQ ID NO: 2740391 - DNA, 25 bp, Homo sapien
tgaggtggacccaacgcaagatccg

SEQ ID NO: 2740392 - DNA, 25 bp, Homo sapien
gcaagatccgcctctgggaggcaaa

SEQ ID NO: 2740393 - DNA, 25 bp, Homo sapien
ggagagaaaaccagtgacctacttc

SEQ ID NO: 2740394 - DNA, 25 bp, Homo sapien
gacctacttcatctaactttcaagc

SEQ ID NO: 2740395 - DNA, 25 bp, Homo sapien
ttcacggcacactgggaagagggcc

SEQ ID NO: 2740396 - DNA, 25 bp, Homo sapien
ccttccacaggtggaatggaggcct

SEQ ID NO: 2740397 - DNA, 25 bp, Homo sapien
gaaagccttccacaggtggaatgga

SEQ ID NO: 2740398 - DNA, 25 bp, Homo sapien
ggccatggggcagaaagccttccac

SEQ ID NO: 2740399 - DNA, 25 bp, Homo sapien
tctgagactcgagccgcagcaccag

SEQ ID NO: 2740400 - DNA, 25 bp, Homo sapien
agtctggcagtcaggagtcgaccac

SEQ ID NO: 2740401 - DNA, 25 bp, Homo sapien
aggagtcgaccaccactgggtccct

SEQ ID NO: 2740402 - DNA, 25 bp, Homo sapien
ggtccctctgagactcgagccgcag

SEQ ID NO: 2740403 - DNA, 25 bp, Homo sapien
gctataggcaaaaggcagctcctgg

SEQ ID NO: 2740404 - DNA, 25 bp, Homo sapien
cctgagggaacactcgaggacagct

SEQ ID NO: 2740405 - DNA, 25 bp, Homo sapien
cctgggagaattgcgggctagacat

SEQ ID NO: 2740406 - DNA, 25 bp, Homo sapien
tcttcagcagggagtcgatcagatc

SEQ ID NO: 2740407 - DNA, 25 bp, Homo sapien
cagccttcagccgatttttgggaga

SEQ ID NO: 2740408 - DNA, 25 bp, Homo sapien
gaatgatccattgggagactccagg

SEQ ID NO: 2740409 - DNA, 25 bp, Homo sapien
aagtggaattgcttcctccgggccg

SEQ ID NO: 2740410 - DNA, 25 bp, Homo sapien
ttttggcatacgcagtcaacagcct

SEQ ID NO: 2740411 - DNA, 25 bp, Homo sapien
tgccataaaacttatcatagctccc

SEQ ID NO: 2740412 - DNA, 25 bp, Homo sapien
tgtataccagagttaagggcagtag

SEQ ID NO: 2740413 - DNA, 25 bp, Homo sapien
taacaataccaaccgtttgccataa

SEQ ID NO: 2740414 - DNA, 25 bp, Homo sapien
aatatacagttggaagctctagcgc

SEQ ID NO: 2740415 - DNA, 25 bp, Homo sapien
cctaagggttctacatgaagcacga

SEQ ID NO: 2740416 - DNA, 25 bp, Homo sapien
tgaagcacgagaagcacagtcgtcc

SEQ ID NO: 2740417 - DNA, 25 bp, Homo sapien
ctttctcagggtgatgctagagcta

SEQ ID NO: 2740418 - DNA, 25 bp, Homo sapien
tgagtcccggagacaggctgctttc

SEQ ID NO: 2740419 - DNA, 25 bp, Homo sapien
tagggccactcacttctgttctcgt

SEQ ID NO: 2740420 - DNA, 25 bp, Homo sapien
cagataacgtgcattcttagccaag

SEQ ID NO: 2740421 - DNA, 25 bp, Homo sapien
caagaattcacagggagtctccgga

SEQ ID NO: 2740422 - DNA, 25 bp, Homo sapien
tgtgcatctcacaggtagggccact

SEQ ID NO: 2740423 - DNA, 25 bp, Homo sapien
cattttctgcgactgtaaacagcca

SEQ ID NO: 2740424 - DNA, 25 bp, Homo sapien
aatggctgcatcctatctcatggag

SEQ ID NO: 2740425 - DNA, 25 bp, Homo sapien
tctcatggagtggaagcaccagttt

SEQ ID NO: 2740426 - DNA, 25 bp, Homo sapien
tattggcttgcaagttaagagcccc

SEQ ID NO: 2740427 - DNA, 25 bp, Homo sapien
gagctctgcggtacagggaccttac

SEQ ID NO: 2740428 - DNA, 25 bp, Homo sapien
tcttaagagacctacgttgctaccg

SEQ ID NO: 2740429 - DNA, 25 bp, Homo sapien
gattaggcctacgttgtgtgtcact

SEQ ID NO: 2740430 - DNA, 25 bp, Homo sapien
tgtgtaagaactccttcccatgaga

SEQ ID NO: 2740431 - DNA, 25 bp, Homo sapien
catctttcaacagctttagagccac

SEQ ID NO: 2740432 - DNA, 25 bp, Homo sapien
tttagagccacattgccagctccag

SEQ ID NO: 2740433 - DNA, 25 bp, Homo sapien
ctttagagccacattgccagctcca

SEQ ID NO: 2740434 - DNA, 25 bp, Homo sapien
gaagagggcataaccttgggcagct

SEQ ID NO: 2740435 - DNA, 25 bp, Homo sapien
tatctggagtgtatcacagcctctg

SEQ ID NO: 2740436 - DNA, 25 bp, Homo sapien
ccaaggaggcctctaacggatctca

SEQ ID NO: 2740437 - DNA, 25 bp, Homo sapien
cactcataagggagcaagggctact

SEQ ID NO: 2740438 - DNA, 25 bp, Homo sapien
gaagtttcagagagccgaccgagct

SEQ ID NO: 2740439 - DNA, 25 bp, Homo sapien
ggcctgggcatgaccttcaaacaag

SEQ ID NO: 2740440 - DNA, 25 bp, Homo sapien
tagagtatcgatccagatgtcccca

SEQ ID NO: 2740441 - DNA, 25 bp, Homo sapien
taggtcatagcagagccccatatgg

SEQ ID NO: 2740442 - DNA, 25 bp, Homo sapien
tcccttggagctgatgagacgcatg

SEQ ID NO: 2740443 - DNA, 25 bp, Homo sapien
tggtttgtccaaagaatctgcgagc

SEQ ID NO: 2740444 - DNA, 25 bp, Homo sapien
gggtgccactcacgcttaacttatg

SEQ ID NO: 2740445 - DNA, 25 bp, Homo sapien
gtgcaatgccatgaaaagccctgta

SEQ ID NO: 2740446 - DNA, 25 bp, Homo sapien
tgcaccgggtggtgactggtctcct

SEQ ID NO: 2740447 - DNA, 25 bp, Homo sapien
cctttcccgcgtggaagggactcag

SEQ ID NO: 2740448 - DNA, 25 bp, Homo sapien
gtcccttgaggagaccaacgctggt

SEQ ID NO: 2740449 - DNA, 25 bp, Homo sapien
catgaattgctcgtggccctttccc

SEQ ID NO: 2740450 - DNA, 25 bp, Homo sapien
ccggcagaaccattgcacagagaag

SEQ ID NO: 2740451 - DNA, 25 bp, Homo sapien
tggagtggatcataggcagtgcaca

SEQ ID NO: 2740452 - DNA, 25 bp, Homo sapien
taggcagtgcacaactcagaccctg

SEQ ID NO: 2740453 - DNA, 25 bp, Homo sapien
cagaaaggccggcagaaccattgca

SEQ ID NO: 2740454 - DNA, 25 bp, Homo sapien
agccaaagcctaacatcagcagctt

SEQ ID NO: 2740455 - DNA, 25 bp, Homo sapien
aagccaaagcctaacatcagcagct

SEQ ID NO: 2740456 - DNA, 25 bp, Homo sapien
tccttgcctagtcccgcgtggcaga

SEQ ID NO: 2740457 - DNA, 25 bp, Homo sapien
ttagccccgtctgctgctcagagga

SEQ ID NO: 2740458 - DNA, 25 bp, Homo sapien
gtggcagagcccaagctgtccatct

SEQ ID NO: 2740459 - DNA, 25 bp, Homo sapien
ggaagagcagcctcggtgctctccc

SEQ ID NO: 2740460 - DNA, 25 bp, Homo sapien
ccagtagagctacctcgtccttcat

SEQ ID NO: 2740461 - DNA, 25 bp, Homo sapien
tctgagaaaggcattaagcaggctc

SEQ ID NO: 2740462 - DNA, 25 bp, Homo sapien
cagagggcaagctgtagggatctaa

SEQ ID NO: 2740463 - DNA, 25 bp, Homo sapien
ggctatcctaccatttgtcctggca

SEQ ID NO: 2740464 - DNA, 25 bp, Homo sapien
cacgtggtcccagtatggaggtgcc

SEQ ID NO: 2740465 - DNA, 25 bp, Homo sapien
tcggtagacgcgctcgaactcgggt

SEQ ID NO: 2740466 - DNA, 25 bp, Homo sapien
tcgaactcgggtgggccggtggtga

SEQ ID NO: 2740467 - DNA, 25 bp, Homo sapien
tgggctcggtagacgcgctcgaact

SEQ ID NO: 2740468 - DNA, 25 bp, Homo sapien
cgcgctcgaactcgggtgggccggt

SEQ ID NO: 2740469 - DNA, 25 bp, Homo sapien
tgcgacccggacccgcctggggctc

SEQ ID NO: 2740470 - DNA, 25 bp, Homo sapien
ctgcgacccggacccgcctggggct

SEQ ID NO: 2740471 - DNA, 25 bp, Homo sapien
gtgggcgggtgggatgagcgcgccg

SEQ ID NO: 2740472 - DNA, 25 bp, Homo sapien
ctgcggtgggcgggtgggatgagcg

SEQ ID NO: 2740473 - DNA, 25 bp, Homo sapien
cggtgggcgggtgggatgagcgcgc

SEQ ID NO: 2740474 - DNA, 25 bp, Homo sapien
gggcgggtgggatgagcgcgccggc

SEQ ID NO: 2740475 - DNA, 25 bp, Homo sapien
gccggcgacccagagcgtggcgagg

SEQ ID NO: 2740476 - DNA, 25 bp, Homo sapien
cgtggcgaggaacagcgggaagtac

SEQ ID NO: 2740477 - DNA, 25 bp, Homo sapien
ggaacagcgggaagtactcgctgca

SEQ ID NO: 2740478 - DNA, 25 bp, Homo sapien
ttcatgaaagaagatgccggcgacc

SEQ ID NO: 2740479 - DNA, 25 bp, Homo sapien
gagaggtacgcacgggcctggtgag

SEQ ID NO: 2740480 - DNA, 25 bp, Homo sapien
tacgcacgggcctggtgagcgccct

SEQ ID NO: 2740481 - DNA, 25 bp, Homo sapien
tggtgagcgccctgcgcgggtcccg

SEQ ID NO: 2740482 - DNA, 25 bp, Homo sapien
ctgcgagaggtacgcacgggcctgg

SEQ ID NO: 2740483 - DNA, 25 bp, Homo sapien
gcgaacaggtagaccaggccgcaca

SEQ ID NO: 2740484 - DNA, 25 bp, Homo sapien
cgcgcgaacaggtagaccaggccgc

SEQ ID NO: 2740485 - DNA, 25 bp, Homo sapien
gaacaggtagaccaggccgcacagg

SEQ ID NO: 2740486 - DNA, 25 bp, Homo sapien
acaggtagaccaggccgcacagggc

SEQ ID NO: 2740487 - DNA, 25 bp, Homo sapien
gcgcgtagccctggaagtagcggag

SEQ ID NO: 2740488 - DNA, 25 bp, Homo sapien
tgagctgcgcggagcgcgcgtagcc

SEQ ID NO: 2740489 - DNA, 25 bp, Homo sapien
gcggagcgcgcgtagccctggaagt

SEQ ID NO: 2740490 - DNA, 25 bp, Homo sapien
ctgagctgcgcggagcgcgcgtagc

SEQ ID NO: 2740491 - DNA, 25 bp, Homo sapien
cagggctcgcccaccgaatccccaa

SEQ ID NO: 2740492 - DNA, 25 bp, Homo sapien
gcgcgaggaggcccgcttcttcccc

SEQ ID NO: 2740493 - DNA, 25 bp, Homo sapien
ctcgcccaccgaatccccaaaggcg

SEQ ID NO: 2740494 - DNA, 25 bp, Homo sapien
accgaatccccaaaggcgctgggct

SEQ ID NO: 2740495 - DNA, 25 bp, Homo sapien
cgcgcgctcgcgtacagcggtgcca

SEQ ID NO: 2740496 - DNA, 25 bp, Homo sapien
cgcgctcgcgtacagcggtgccagc

SEQ ID NO: 2740497 - DNA, 25 bp, Homo sapien
gcgcgctcgcgtacagcggtgccag

SEQ ID NO: 2740498 - DNA, 25 bp, Homo sapien
cgcgcgcgctcgcgtacagcggtgc

SEQ ID NO: 2740499 - DNA, 25 bp, Homo sapien
gcccacggcagcagcgtccggagcc

SEQ ID NO: 2740500 - DNA, 25 bp, Homo sapien
cagcagcgtccggagccgtccgagg

SEQ ID NO: 2740501 - DNA, 25 bp, Homo sapien
gcggccgggaggaagtgggcgagca

SEQ ID NO: 2740502 - DNA, 25 bp, Homo sapien
acggcagcagcgtccggagccgtcc

SEQ ID NO: 2740503 - DNA, 25 bp, Homo sapien
tggaggctccggctcttctttcccg

SEQ ID NO: 2740504 - DNA, 25 bp, Homo sapien
ctttaatgatagagactaggatgcg

SEQ ID NO: 2740505 - DNA, 25 bp, Homo sapien
ctaggatgcggaagcgagcgcccct

SEQ ID NO: 2740506 - DNA, 25 bp, Homo sapien
ggtcactagaactttaatgatagag

SEQ ID NO: 2740507 - DNA, 25 bp, Homo sapien
tccaggctccgtagcccgcggtgcg

SEQ ID NO: 2740508 - DNA, 25 bp, Homo sapien
tgcccggactcgggctgggcccctc

SEQ ID NO: 2740509 - DNA, 25 bp, Homo sapien
gcggacccagagaacgcagcccggg

SEQ ID NO: 2740510 - DNA, 25 bp, Homo sapien
ccccgcggacccagagaacgcagcc

SEQ ID NO: 2740511 - DNA, 25 bp, Homo sapien
tgtgtgcctcaaatgtgagcgccct

SEQ ID NO: 2740512 - DNA, 25 bp, Homo sapien
cctgctaagtcaaggagccagcctg

SEQ ID NO: 2740513 - DNA, 25 bp, Homo sapien
tatacttctataagagcgtgacttg

SEQ ID NO: 2740514 - DNA, 25 bp, Homo sapien
cctgcggttggcttcatttggtctg

SEQ ID NO: 2740515 - DNA, 25 bp, Homo sapien
caatggcaccttcctgacgctgctg

SEQ ID NO: 2740516 - DNA, 25 bp, Homo sapien
gcaatggcaccttcctgacgctgct

SEQ ID NO: 2740517 - DNA, 25 bp, Homo sapien
cggccagaaaggtgagcgcgacccc

SEQ ID NO: 2740518 - DNA, 25 bp, Homo sapien
tcgctgtcctggtacgcggcactca

SEQ ID NO: 2740519 - DNA, 25 bp, Homo sapien
gcgggagccgatcgggatcccggcc

SEQ ID NO: 2740520 - DNA, 25 bp, Homo sapien
gctgcgggagccgatcgggatcccg

SEQ ID NO: 2740521 - DNA, 25 bp, Homo sapien
gccgactcgcacgagcccacgcggg

SEQ ID NO: 2740522 - DNA, 25 bp, Homo sapien
ctgaggccgactcgcacgagcccac

SEQ ID NO: 2740523 - DNA, 25 bp, Homo sapien
gaaattagaacgcaaatgggccgtg

SEQ ID NO: 2740524 - DNA, 25 bp, Homo sapien
gctgaactaggaagacaaagccgca

SEQ ID NO: 2740525 - DNA, 25 bp, Homo sapien
tccacagaggattgaggaacgcctg

SEQ ID NO: 2740526 - DNA, 25 bp, Homo sapien
tagaaggctcctataagtcccagtc

SEQ ID NO: 2740527 - DNA, 25 bp, Homo sapien
tggctgtctcacttggattacaggc

SEQ ID NO: 2740528 - DNA, 25 bp, Homo sapien
agtgcccaactgagtcacttttttt

SEQ ID NO: 2740529 - DNA, 25 bp, Homo sapien
cagtgcccaactgagtcactttttt

SEQ ID NO: 2740530 - DNA, 25 bp, Homo sapien
agatagaatcccaagttccaccccg

SEQ ID NO: 2740531 - DNA, 25 bp, Homo sapien
gttccaccccgaacatgagaccaag

SEQ ID NO: 2740532 - DNA, 25 bp, Homo sapien
gctagctggtttctcgcctcccaga

SEQ ID NO: 2740533 - DNA, 25 bp, Homo sapien
cagcaaagcgagagagagtcccgct

SEQ ID NO: 2740534 - DNA, 25 bp, Homo sapien
tgcacgccaaactgttgtaggactt

SEQ ID NO: 2740535 - DNA, 25 bp, Homo sapien
aagccccatgttgcacgccaaactg

SEQ ID NO: 2740536 - DNA, 25 bp, Homo sapien
tgtgcagcggccatgagagattaat

SEQ ID NO: 2740537 - DNA, 25 bp, Homo sapien
ccatgagagattaatctcgcagaca

SEQ ID NO: 2740538 - DNA, 25 bp, Homo sapien
catcaggaaggaacccgaaaaggag

SEQ ID NO: 2740539 - DNA, 25 bp, Homo sapien
aggcctgcagtacgacccgcttcaa

SEQ ID NO: 2740540 - DNA, 25 bp, Homo sapien
tctgcaggcctgcagtacgacccgc

SEQ ID NO: 2740541 - DNA, 25 bp, Homo sapien
acgacccgcttcaactgctgccctg

SEQ ID NO: 2740542 - DNA, 25 bp, Homo sapien
cgcctgcggaggtggaagtacacac

SEQ ID NO: 2740543 - DNA, 25 bp, Homo sapien
ggcggcctccggaagctgctgaaaa

SEQ ID NO: 2740544 - DNA, 25 bp, Homo sapien
aaagcggcctgaagcagcctggaga

SEQ ID NO: 2740545 - DNA, 25 bp, Homo sapien
taccgatggtgaggtccaaagcggc

SEQ ID NO: 2740546 - DNA, 25 bp, Homo sapien
caatggctgaaaccatagacgggct

SEQ ID NO: 2740547 - DNA, 25 bp, Homo sapien
taaccacgctggtctgaagctcctg

SEQ ID NO: 2740548 - DNA, 25 bp, Homo sapien
gaaggacccctggttagaaacatgc

SEQ ID NO: 2740549 - DNA, 25 bp, Homo sapien
agggacacccttggcatctgcagaa

SEQ ID NO: 2740550 - DNA, 25 bp, Homo sapien
tgtgaacccagaagggccattccct

SEQ ID NO: 2740551 - DNA, 25 bp, Homo sapien
gattatccccacaggcatagaaggg

SEQ ID NO: 2740552 - DNA, 25 bp, Homo sapien
gactaagttgctgttaaccgacgga

SEQ ID NO: 2740553 - DNA, 25 bp, Homo sapien
aaccgacggaagcagaattgtgaac

SEQ ID NO: 2740554 - DNA, 25 bp, Homo sapien
cacggcaaccatgatcttcttgggc

SEQ ID NO: 2740555 - DNA, 25 bp, Homo sapien
tccacatggttatgcctgtagccag

SEQ ID NO: 2740556 - DNA, 25 bp, Homo sapien
ccttgaggtgagaccatgtgattaa

SEQ ID NO: 2740557 - DNA, 25 bp, Homo sapien
gacctgagccagaagagccatatat

SEQ ID NO: 2740558 - DNA, 25 bp, Homo sapien
tgtggataaaggctggtattgaagc

SEQ ID NO: 2740559 - DNA, 25 bp, Homo sapien
cctgtgttaggccaccacatactct

SEQ ID NO: 2740560 - DNA, 25 bp, Homo sapien
gccaccacatactcttgcgtaaaag

SEQ ID NO: 2740561 - DNA, 25 bp, Homo sapien
tgccccgtgtgtcccatgtgttata

SEQ ID NO: 2740562 - DNA, 25 bp, Homo sapien
gagtccctgtgcacccactttgttc

SEQ ID NO: 2740563 - DNA, 25 bp, Homo sapien
gacgagactcagctcttcgacctcc

SEQ ID NO: 2740564 - DNA, 25 bp, Homo sapien
gcctcccgacgagactcagctcttc

SEQ ID NO: 2740565 - DNA, 25 bp, Homo sapien
ttcgacctccctgcgagtccctgtg

SEQ ID NO: 2740566 - DNA, 25 bp, Homo sapien
gaggatctaacccttcttgctccca

SEQ ID NO: 2740567 - DNA, 25 bp, Homo sapien
cagcagggcccgcaccccaggacgg

SEQ ID NO: 2740568 - DNA, 25 bp, Homo sapien
gatctaacccttcttgctcccaatg

SEQ ID NO: 2740569 - DNA, 25 bp, Homo sapien
tgaggatctaacccttcttgctccc

SEQ ID NO: 2740570 - DNA, 25 bp, Homo sapien
ccaaagcatagggccagcctgagtg

SEQ ID NO: 2740571 - DNA, 25 bp, Homo sapien
gtcgcgctgggacctaaggcgccgc

SEQ ID NO: 2740572 - DNA, 25 bp, Homo sapien
gctgagaggcgggtcgcgctgggac

SEQ ID NO: 2740573 - DNA, 25 bp, Homo sapien
tccccggtgttctcgaggtccctgc

SEQ ID NO: 2740574 - DNA, 25 bp, Homo sapien
gaacctgccgaagttccagctcggg

SEQ ID NO: 2740575 - DNA, 25 bp, Homo sapien
gtgtctaaaggcacgacgcggagca

SEQ ID NO: 2740576 - DNA, 25 bp, Homo sapien
cctgggctgggcgaatttctccaaa

SEQ ID NO: 2740577 - DNA, 25 bp, Homo sapien
ttcaaacatggcctgcctcgggacg

SEQ ID NO: 2740578 - DNA, 25 bp, Homo sapien
acagacatggttagagaattcagtg

SEQ ID NO: 2740579 - DNA, 25 bp, Homo sapien
caagtcatggacagacatggttaga

SEQ ID NO: 2740580 - DNA, 25 bp, Homo sapien
ggcacgcccacaaggggtttgcaaa

SEQ ID NO: 2740581 - DNA, 25 bp, Homo sapien
gaaaaggagttcaagtcatggacag

SEQ ID NO: 2740582 - DNA, 25 bp, Homo sapien
ccatttggcccgtttgggatcgcgg

SEQ ID NO: 2740583 - DNA, 25 bp, Homo sapien
tcctttgctttctcgccatttggcc

SEQ ID NO: 2740584 - DNA, 25 bp, Homo sapien
ttctcgccatttggcccgtttggga

SEQ ID NO: 2740585 - DNA, 25 bp, Homo sapien
ttgctttctcgccatttggcccgtt

SEQ ID NO: 2740586 - DNA, 25 bp, Homo sapien
tcgagaggggcggagtctctcgcgc

SEQ ID NO: 2740587 - DNA, 25 bp, Homo sapien
gggcggagtctctcgcgccctcccc

SEQ ID NO: 2740588 - DNA, 25 bp, Homo sapien
tttgtagcgaacgcggaggccccgc

SEQ ID NO: 2740589 - DNA, 25 bp, Homo sapien
ccgccaccgtcgtcgcggcgcgaga

SEQ ID NO: 2740590 - DNA, 25 bp, Homo sapien
cgggccgtcccggtcgcagccgccg

SEQ ID NO: 2740591 - DNA, 25 bp, Homo sapien
gcagccgctcgcagggtcccggacc

SEQ ID NO: 2740592 - DNA, 25 bp, Homo sapien
gcagaagctgaagcggcgaatctcg

SEQ ID NO: 2740593 - DNA, 25 bp, Homo sapien
cgcgccgcgtcctccttgcccagaa

SEQ ID NO: 2740594 - DNA, 25 bp, Homo sapien
ctgcagcagaagctgaagcggcgaa

SEQ ID NO: 2740595 - DNA, 25 bp, Homo sapien
cccgccaggcgtcgccgagaaggga

SEQ ID NO: 2740596 - DNA, 25 bp, Homo sapien
aggaggccgtgtccggcctgcgtca

SEQ ID NO: 2740597 - DNA, 25 bp, Homo sapien
ccttggtcaccactccagtcaccag

SEQ ID NO: 2740598 - DNA, 25 bp, Homo sapien
tcccatggccgaactggggacccat

SEQ ID NO: 2740599 - DNA, 25 bp, Homo sapien
gcaaggtgtcagtgtaacccgagtg

SEQ ID NO: 2740600 - DNA, 25 bp, Homo sapien
aaggtgtcagtgtaacccgagtgcc

SEQ ID NO: 2740601 - DNA, 25 bp, Homo sapien
ggtgtcagtgtaacccgagtgcccg

SEQ ID NO: 2740602 - DNA, 25 bp, Homo sapien
gtgtcagtgtaacccgagtgcccgc

SEQ ID NO: 2740603 - DNA, 25 bp, Homo sapien
tggctcggagcgttccgccggcgat

SEQ ID NO: 2740604 - DNA, 25 bp, Homo sapien
cccgcgcttgtttacccgcgtcact

SEQ ID NO: 2740605 - DNA, 25 bp, Homo sapien
tcctccagggcattatctgaaccca

SEQ ID NO: 2740606 - DNA, 25 bp, Homo sapien
gctgtcgcggcgctcgcgagtcccc

SEQ ID NO: 2740607 - DNA, 25 bp, Homo sapien
tctgaagaacgttctcgtccacttg

SEQ ID NO: 2740608 - DNA, 25 bp, Homo sapien
accaacacttctgaagaacgttctc

SEQ ID NO: 2740609 - DNA, 25 bp, Homo sapien
gaagaacgttctcgtccacttgcca

SEQ ID NO: 2740610 - DNA, 25 bp, Homo sapien
cacttctgaagaacgttctcgtcca

SEQ ID NO: 2740611 - DNA, 25 bp, Homo sapien
tgtgggagatccctgcctgtgacct

SEQ ID NO: 2740612 - DNA, 25 bp, Homo sapien
catgtccgtcttcaactgtgggaga

SEQ ID NO: 2740613 - DNA, 25 bp, Homo sapien
ggtaaacaaaacatggcctgtccac

SEQ ID NO: 2740614 - DNA, 25 bp, Homo sapien
gcaggagtgagaggcaagactaccc

SEQ ID NO: 2740615 - DNA, 25 bp, Homo sapien
ctcacagggctataaacaaacacac

SEQ ID NO: 2740616 - DNA, 25 bp, Homo sapien
ctgaggcaagtatgaaagggacact

SEQ ID NO: 2740617 - DNA, 25 bp, Homo sapien
ggcaagtatgaaagggacactcaca

SEQ ID NO: 2740618 - DNA, 25 bp, Homo sapien
gggacactcacagggctataaacaa

SEQ ID NO: 2740619 - DNA, 25 bp, Homo sapien
aaagacagcacgtgagcacccaggg

SEQ ID NO: 2740620 - DNA, 25 bp, Homo sapien
ggggttctcagctggacataagctg

SEQ ID NO: 2740621 - DNA, 25 bp, Homo sapien
gggttctcagctggacataagctgc

SEQ ID NO: 2740622 - DNA, 25 bp, Homo sapien
aaaagacagcacgtgagcacccagg

SEQ ID NO: 2740623 - DNA, 25 bp, Homo sapien
gtcaattcctcgtcactggaaaagg

SEQ ID NO: 2740624 - DNA, 25 bp, Homo sapien
tgtcaattcctcgtcactggaaaag

SEQ ID NO: 2740625 - DNA, 25 bp, Homo sapien
tgtagattcggaagatgtcatcctt

SEQ ID NO: 2740626 - DNA, 25 bp, Homo sapien
tttaatgtagattcggaagatgtca

SEQ ID NO: 2740627 - DNA, 25 bp, Homo sapien
gattcggaagatgtcatccttcacg

SEQ ID NO: 2740628 - DNA, 25 bp, Homo sapien
ggaagatgtcatccttcacgtagga

SEQ ID NO: 2740629 - DNA, 25 bp, Homo sapien
tcattggtggaacatcgagccctgt

SEQ ID NO: 2740630 - DNA, 25 bp, Homo sapien
tgttttttactcagcagggaactga

SEQ ID NO: 2740631 - DNA, 25 bp, Homo sapien
gtcatgtgatttcggctcatggcaa

SEQ ID NO: 2740632 - DNA, 25 bp, Homo sapien
ggaactgagtacaagctgagctggc

SEQ ID NO: 2740633 - DNA, 25 bp, Homo sapien
ggactcctctttctcaggtcaggca

SEQ ID NO: 2740634 - DNA, 25 bp, Homo sapien
tcaggtcaggcacagcacttaaaat

SEQ ID NO: 2740635 - DNA, 25 bp, Homo sapien
cctagagtgaacatggactcctctt

SEQ ID NO: 2740636 - DNA, 25 bp, Homo sapien
cagaccccatccctagagtgaacat

SEQ ID NO: 2740637 - DNA, 25 bp, Homo sapien
cacattggggtgcaccatgttgcgg

SEQ ID NO: 2740638 - DNA, 25 bp, Homo sapien
gcgcctcctgagcacacggtgggcg

SEQ ID NO: 2740639 - DNA, 25 bp, Homo sapien
ctgagcacacggtgggcggtggtcc

SEQ ID NO: 2740640 - DNA, 25 bp, Homo sapien
tgggcggtggtcccgccggcactct

SEQ ID NO: 2740641 - DNA, 25 bp, Homo sapien
aatgcgagcttggtgtgcccccggt

SEQ ID NO: 2740642 - DNA, 25 bp, Homo sapien
tttccctcgcagacgctacacaagt

SEQ ID NO: 2740643 - DNA, 25 bp, Homo sapien
cagacgctgcacttgtagcgggttc

SEQ ID NO: 2740644 - DNA, 25 bp, Homo sapien
tacacaagtcgtagtctgggcagac

SEQ ID NO: 2740645 - DNA, 25 bp, Homo sapien
gccacccgaagtgtccgtgtttcac

SEQ ID NO: 2740646 - DNA, 25 bp, Homo sapien
ggccacccgaagtgtccgtgtttca

SEQ ID NO: 2740647 - DNA, 25 bp, Homo sapien
tccagtttcctggtggacccatttc

SEQ ID NO: 2740648 - DNA, 25 bp, Homo sapien
gaggacgtgggctccagtttcctgg

SEQ ID NO: 2740649 - DNA, 25 bp, Homo sapien
ctgcacgaggaggacgtgggctcca

SEQ ID NO: 2740650 - DNA, 25 bp, Homo sapien
ggctccagtttcctggtggacccat

SEQ ID NO: 2740651 - DNA, 25 bp, Homo sapien
ctgattctgccgtggggccagggcg

SEQ ID NO: 2740652 - DNA, 25 bp, Homo sapien
aagggtgaggtgattcacaggacac

SEQ ID NO: 2740653 - DNA, 25 bp, Homo sapien
taacccggacatcttgtccagtgac

SEQ ID NO: 2740654 - DNA, 25 bp, Homo sapien
tctagactacaaagctaacggtaag

SEQ ID NO: 2740655 - DNA, 25 bp, Homo sapien
tactcaaagtcaagcaaacatcccc

SEQ ID NO: 2740656 - DNA, 25 bp, Homo sapien
ttcaggaaattcacactcggatcct

SEQ ID NO: 2740657 - DNA, 25 bp, Homo sapien
aattcacactcggatcctccgatgg

SEQ ID NO: 2740658 - DNA, 25 bp, Homo sapien
ggaaattcacactcggatcctccga

SEQ ID NO: 2740659 - DNA, 25 bp, Homo sapien
acactcggatcctccgatggaccag

SEQ ID NO: 2740660 - DNA, 25 bp, Homo sapien
tcaccagtgtcaagggcatgtcaat

SEQ ID NO: 2740661 - DNA, 25 bp, Homo sapien
cgtggtccagcactactaaaggttg

SEQ ID NO: 2740662 - DNA, 25 bp, Homo sapien
tgttcatccaaaggagggcagtcag

SEQ ID NO: 2740663 - DNA, 25 bp, Homo sapien
caaccttgagttgcccgtggtccag

SEQ ID NO: 2740664 - DNA, 25 bp, Homo sapien
cagacactgaacacaacctttggac

SEQ ID NO: 2740665 - DNA, 25 bp, Homo sapien
gccactgcagtcacaaaaacaagct

SEQ ID NO: 2740666 - DNA, 25 bp, Homo sapien
aaaacaagctcactcgtctagcgag

SEQ ID NO: 2740667 - DNA, 25 bp, Homo sapien
agatgcaggtgtcccagcgatccat

SEQ ID NO: 2740668 - DNA, 25 bp, Homo sapien
gcctgtctctagtatcccatgctga

SEQ ID NO: 2740669 - DNA, 25 bp, Homo sapien
ccattgctcattcgggatgcccagt

SEQ ID NO: 2740670 - DNA, 25 bp, Homo sapien
gaggtctccttcaattgttggcaag

SEQ ID NO: 2740671 - DNA, 25 bp, Homo sapien
catcatctggccaagtgggccctga

SEQ ID NO: 2740672 - DNA, 25 bp, Homo sapien
gtacaatccaggctcgttgcaccct

SEQ ID NO: 2740673 - DNA, 25 bp, Homo sapien
tcatagtgtttgtagacacgggaag

SEQ ID NO: 2740674 - DNA, 25 bp, Homo sapien
gctggggccataagtacacaactcc

SEQ ID NO: 2740675 - DNA, 25 bp, Homo sapien
gggccataagtacacaactccatgc

SEQ ID NO: 2740676 - DNA, 25 bp, Homo sapien
gagagacgggggtcaggcggcttct

SEQ ID NO: 2740677 - DNA, 25 bp, Homo sapien
tctctggagagacgggggtcaggcg

SEQ ID NO: 2740678 - DNA, 25 bp, Homo sapien
gaactctctggagagacgggggtca

SEQ ID NO: 2740679 - DNA, 25 bp, Homo sapien
ggagagacgggggtcaggcggcttc

SEQ ID NO: 2740680 - DNA, 25 bp, Homo sapien
cagagactgcgtggcgccctcaaca

SEQ ID NO: 2740681 - DNA, 25 bp, Homo sapien
tccaaggcgatcttcctcatctgct

SEQ ID NO: 2740682 - DNA, 25 bp, Homo sapien
aaggcgatcttcctcatctgctccg

SEQ ID NO: 2740683 - DNA, 25 bp, Homo sapien
catctgctccgccagagactgcgtg

SEQ ID NO: 2740684 - DNA, 25 bp, Homo sapien
tgcaggccacagatcactaggctgg

SEQ ID NO: 2740685 - DNA, 25 bp, Homo sapien
aggatgaggcggaggtgcaggccac

SEQ ID NO: 2740686 - DNA, 25 bp, Homo sapien
tagcaggttcccagcgtgactttaa

SEQ ID NO: 2740687 - DNA, 25 bp, Homo sapien
cagctccctcgggtttgtaagtggg

SEQ ID NO: 2740688 - DNA, 25 bp, Homo sapien
ctggcagacagtcggggagcacgca

SEQ ID NO: 2740689 - DNA, 25 bp, Homo sapien
catgcacacgtgcagttaaggctgc

SEQ ID NO: 2740690 - DNA, 25 bp, Homo sapien
tcggggagcacgcatgcacacgtgc

SEQ ID NO: 2740691 - DNA, 25 bp, Homo sapien
cagacagtcggggagcacgcatgca

SEQ ID NO: 2740692 - DNA, 25 bp, Homo sapien
gacacgcgcaacaggccaagcctga

SEQ ID NO: 2740693 - DNA, 25 bp, Homo sapien
aggagacacgcgcaacaggccaagc

SEQ ID NO: 2740694 - DNA, 25 bp, Homo sapien
agcacacaggagacacgcgcaacag

SEQ ID NO: 2740695 - DNA, 25 bp, Homo sapien
acacaggagacacgcgcaacaggcc

SEQ ID NO: 2740696 - DNA, 25 bp, Homo sapien
cctcctgaacagttatccgactcca

SEQ ID NO: 2740697 - DNA, 25 bp, Homo sapien
ctcctgaacagttatccgactccat

SEQ ID NO: 2740698 - DNA, 25 bp, Homo sapien
ctgtagacgggtccacttcttttga

SEQ ID NO: 2740699 - DNA, 25 bp, Homo sapien
tcctcctgaacagttatccgactcc

SEQ ID NO: 2740700 - DNA, 25 bp, Homo sapien
gagagcttggcccttcggattctgg

SEQ ID NO: 2740701 - DNA, 25 bp, Homo sapien
agagcttggcccttcggattctggc

SEQ ID NO: 2740702 - DNA, 25 bp, Homo sapien
agagagcttggcccttcggattctg

SEQ ID NO: 2740703 - DNA, 25 bp, Homo sapien
gaaaaattcttatcctgttgatctg

SEQ ID NO: 2740704 - DNA, 25 bp, Homo sapien
agaaaaattcttatcctgttgatct

SEQ ID NO: 2740705 - DNA, 25 bp, Homo sapien
aaaaattcttatcctgttgatctgt

SEQ ID NO: 2740706 - DNA, 25 bp, Homo sapien
ttttggaggtagaatgaacaggact

SEQ ID NO: 2740707 - DNA, 25 bp, Homo sapien
ggaacgaaataataccttttgcagc

SEQ ID NO: 2740708 - DNA, 25 bp, Homo sapien
tggagcagcacaactcacaattgca

SEQ ID NO: 2740709 - DNA, 25 bp, Homo sapien
caggtggtgtgtaagcagaaccatc

SEQ ID NO: 2740710 - DNA, 25 bp, Homo sapien
gtctttttcacactgctcaactctg

SEQ ID NO: 2740711 - DNA, 25 bp, Homo sapien
tttttcacactgctcaactctgcca

SEQ ID NO: 2740712 - DNA, 25 bp, Homo sapien
ctgtaaagggccaagcagtcttttt

SEQ ID NO: 2740713 - DNA, 25 bp, Homo sapien
gtaaagggccaagcagtctttttca

SEQ ID NO: 2740714 - DNA, 25 bp, Homo sapien
accagggtctgccagtgtccgagcc

SEQ ID NO: 2740715 - DNA, 25 bp, Homo sapien
tgccagtgtccgagcctgcccagag

SEQ ID NO: 2740716 - DNA, 25 bp, Homo sapien
agagctctcgtcctcacaggccaca

SEQ ID NO: 2740717 - DNA, 25 bp, Homo sapien
gcccagagctctcgtcctcacaggc

SEQ ID NO: 2740718 - DNA, 25 bp, Homo sapien
ccgaaacagtaaggaagccatgagg

SEQ ID NO: 2740719 - DNA, 25 bp, Homo sapien
tgccgaaacagtaaggaagccatga

SEQ ID NO: 2740720 - DNA, 25 bp, Homo sapien
gaaacagtaaggaagccatgaggag

SEQ ID NO: 2740721 - DNA, 25 bp, Homo sapien
ctgccgaaacagtaaggaagccatg

SEQ ID NO: 2740722 - DNA, 25 bp, Homo sapien
ctgggagagggactcaatcagccgc

SEQ ID NO: 2740723 - DNA, 25 bp, Homo sapien
agagggactcaatcagccgcgggtc

SEQ ID NO: 2740724 - DNA, 25 bp, Homo sapien
gagagggactcaatcagccgcgggt

SEQ ID NO: 2740725 - DNA, 25 bp, Homo sapien
gggactcaatcagccgcgggtcagc

SEQ ID NO: 2740726 - DNA, 25 bp, Homo sapien
ccgatgtcatagttcttggtctgca

SEQ ID NO: 2740727 - DNA, 25 bp, Homo sapien
ggtgtccagagccgctccgatgtca

SEQ ID NO: 2740728 - DNA, 25 bp, Homo sapien
gccagccgccttcatcagagaagcc

SEQ ID NO: 2740729 - DNA, 25 bp, Homo sapien
cagagccgctccgatgtcatagttc

SEQ ID NO: 2740730 - DNA, 25 bp, Homo sapien
caacggcgggggatgctttgaatac

SEQ ID NO: 2740731 - DNA, 25 bp, Homo sapien
cacaacggcgggggatgctttgaat

SEQ ID NO: 2740732 - DNA, 25 bp, Homo sapien
acaacggcgggggatgctttgaata

SEQ ID NO: 2740733 - DNA, 25 bp, Homo sapien
tcacaacggcgggggatgctttgaa

SEQ ID NO: 2740734 - DNA, 25 bp, Homo sapien
caagcttaacacaactatgagacag

SEQ ID NO: 2740735 - DNA, 25 bp, Homo sapien
aacacaactatgagacagaagaggg

SEQ ID NO: 2740736 - DNA, 25 bp, Homo sapien
tgcaattctacgcaagcttaacaca

SEQ ID NO: 2740737 - DNA, 25 bp, Homo sapien
gcaattctacgcaagcttaacacaa

SEQ ID NO: 2740738 - DNA, 25 bp, Homo sapien
aacattgcggatgcccttcgtgagc

SEQ ID NO: 2740739 - DNA, 25 bp, Homo sapien
tctaaaatcagagtgtaccaggtct

SEQ ID NO: 2740740 - DNA, 25 bp, Homo sapien
gctctcagtgaaaccaacattgcgg

SEQ ID NO: 2740741 - DNA, 25 bp, Homo sapien
ccattaggcaagctatgtgctgggc

SEQ ID NO: 2740742 - DNA, 25 bp, Homo sapien
ggaagacctcatgggacgcaaggac

SEQ ID NO: 2740743 - DNA, 25 bp, Homo sapien
ccaaggtctcttcagagggacccca

SEQ ID NO: 2740744 - DNA, 25 bp, Homo sapien
tctgagaggccttgcgggaagacct

SEQ ID NO: 2740745 - DNA, 25 bp, Homo sapien
gaatcctcgacccacacgactatgt

SEQ ID NO: 2740746 - DNA, 25 bp, Homo sapien
taaatgggcgcaatttgtcctgcca

SEQ ID NO: 2740747 - DNA, 25 bp, Homo sapien
gcagaaagtgtcagaaccagaggcc

SEQ ID NO: 2740748 - DNA, 25 bp, Homo sapien
gagctatggagtcccatccagcagg

SEQ ID NO: 2740749 - DNA, 25 bp, Homo sapien
tgctttgtcttgctaaccctcaaaa

SEQ ID NO: 2740750 - DNA, 25 bp, Homo sapien
cagaatggagccagcgcaccccttt

SEQ ID NO: 2740751 - DNA, 25 bp, Homo sapien
agcaccagtcctatcccacagggag

SEQ ID NO: 2740752 - DNA, 25 bp, Homo sapien
ggccgacacccaactttcagagcat

SEQ ID NO: 2740753 - DNA, 25 bp, Homo sapien
cctttcccgatgtctcgaggccctt

SEQ ID NO: 2740754 - DNA, 25 bp, Homo sapien
aatgtgtgttgatgccacccaatga

SEQ ID NO: 2740755 - DNA, 25 bp, Homo sapien
gaatgtgaagcagcaggtaagcctc

SEQ ID NO: 2740756 - DNA, 25 bp, Homo sapien
cagttggcttaaagctgcagggaac

SEQ ID NO: 2740757 - DNA, 25 bp, Homo sapien
cagcactctgggcatacctctgaga

SEQ ID NO: 2740758 - DNA, 25 bp, Homo sapien
ttctatatatatgcagtggacaatt

SEQ ID NO: 2740759 - DNA, 25 bp, Homo sapien
tatatatatgcagtggacaattgga

SEQ ID NO: 2740760 - DNA, 25 bp, Homo sapien
tatatgcagtggacaattggaaaaa

SEQ ID NO: 2740761 - DNA, 25 bp, Homo sapien
tatatatgcagtggacaattggaaa

SEQ ID NO: 2740762 - DNA, 25 bp, Homo sapien
gctaaccaaccctggtgattgatgg

SEQ ID NO: 2740763 - DNA, 25 bp, Homo sapien
taaccaaccctggtgattgatggag

SEQ ID NO: 2740764 - DNA, 25 bp, Homo sapien
aaccaaccctggtgattgatggagt

SEQ ID NO: 2740765 - DNA, 25 bp, Homo sapien
cagctaaccaaccctggtgattgat

SEQ ID NO: 2740766 - DNA, 25 bp, Homo sapien
gcgggacccgtactctcaaattcca

SEQ ID NO: 2740767 - DNA, 25 bp, Homo sapien
gtgccatagcgggacccgtactctc

SEQ ID NO: 2740768 - DNA, 25 bp, Homo sapien
atagcgggacccgtactctcaaatt

SEQ ID NO: 2740769 - DNA, 25 bp, Homo sapien
ctcaaattccatcccgtaccatctg

SEQ ID NO: 2740770 - DNA, 25 bp, Homo sapien
cccgcataacgttctgagctttttg

SEQ ID NO: 2740771 - DNA, 25 bp, Homo sapien
ggagaatccggttgagtatagcatc

SEQ ID NO: 2740772 - DNA, 25 bp, Homo sapien
gttctcgggtgctacgctgctgcag

SEQ ID NO: 2740773 - DNA, 25 bp, Homo sapien
tgttgtctcgaatggctccgggatg

SEQ ID NO: 2740774 - DNA, 25 bp, Homo sapien
cagggccggaaccagtgccttagga

SEQ ID NO: 2740775 - DNA, 25 bp, Homo sapien
tcagacgacgagtcggctaccagga

SEQ ID NO: 2740776 - DNA, 25 bp, Homo sapien
ccgctccgcgttgtgtccaaggact

SEQ ID NO: 2740777 - DNA, 25 bp, Homo sapien
ggaggccctgtcgtctcaattccag

SEQ ID NO: 2740778 - DNA, 25 bp, Homo sapien
cgggctccggttcaaaggctaactg

SEQ ID NO: 2740779 - DNA, 25 bp, Homo sapien
cctctccgggaagcgtgggtgtggt

SEQ ID NO: 2740780 - DNA, 25 bp, Homo sapien
tgggtgtggtgagcccctccgtctc

SEQ ID NO: 2740781 - DNA, 25 bp, Homo sapien
tcaaaggctaactgttcgctgctac

SEQ ID NO: 2740782 - DNA, 25 bp, Homo sapien
aacatccccggtgtgggtaggcgca

SEQ ID NO: 2740783 - DNA, 25 bp, Homo sapien
gccggtgtcacagaagtcaaacgat

SEQ ID NO: 2740784 - DNA, 25 bp, Homo sapien
gattaccggttcattgccaaaagga

SEQ ID NO: 2740785 - DNA, 25 bp, Homo sapien
gctgatggaactgcctaagagtccg

SEQ ID NO: 2740786 - DNA, 25 bp, Homo sapien
gagcctgaacctcctgactgaggaa

SEQ ID NO: 2740787 - DNA, 25 bp, Homo sapien
cacaggcgtggctgtacacgtgctc

SEQ ID NO: 2740788 - DNA, 25 bp, Homo sapien
gggcatgtgcttgttgggcaccaaa

SEQ ID NO: 2740789 - DNA, 25 bp, Homo sapien
accaaagtgatggaaccctcaggtg

SEQ ID NO: 2740790 - DNA, 25 bp, Homo sapien
gagtccctccatccgtggatgcttt

SEQ ID NO: 2740791 - DNA, 25 bp, Homo sapien
tccatccgtggatgctttcctgcag

SEQ ID NO: 2740792 - DNA, 25 bp, Homo sapien
ctttcctgcagctatgtggtatggg

SEQ ID NO: 2740793 - DNA, 25 bp, Homo sapien
gccaggccagctgagtccctccatc

SEQ ID NO: 2740794 - DNA, 25 bp, Homo sapien
tagacagattccctgggcctgcatc

SEQ ID NO: 2740795 - DNA, 25 bp, Homo sapien
agctgcacctgcctagcattacagg

SEQ ID NO: 2740796 - DNA, 25 bp, Homo sapien
gagcagtgagttgtgagtggaaaga

SEQ ID NO: 2740797 - DNA, 25 bp, Homo sapien
ttccttacacctggtgggagcccgc

SEQ ID NO: 2740798 - DNA, 25 bp, Homo sapien
tatgccaacagtgtacacccgtatg

SEQ ID NO: 2740799 - DNA, 25 bp, Homo sapien
gattagctcagtttcgggcctccct

SEQ ID NO: 2740800 - DNA, 25 bp, Homo sapien
taattcattggatagcttgtgccag

SEQ ID NO: 2740801 - DNA, 25 bp, Homo sapien
aaatgttctgggcagcacagctcct

SEQ ID NO: 2740802 - DNA, 25 bp, Homo sapien
tatagccaccgacatctgcggagcg

SEQ ID NO: 2740803 - DNA, 25 bp, Homo sapien
cagaaggattcggtgctgctggcct

SEQ ID NO: 2740804 - DNA, 25 bp, Homo sapien
tcctgtcagttgaggtggaggctcc

SEQ ID NO: 2740805 - DNA, 25 bp, Homo sapien
tgtaccacaaaagctctaggcggcc

SEQ ID NO: 2740806 - DNA, 25 bp, Homo sapien
gatgccgcttaggatggtcagttga

SEQ ID NO: 2740807 - DNA, 25 bp, Homo sapien
tcctacccacatagggcgcaagagc

SEQ ID NO: 2740808 - DNA, 25 bp, Homo sapien
ctggtgatgccgcttaggatggtca

SEQ ID NO: 2740809 - DNA, 25 bp, Homo sapien
gcaagagcggggacatcctgctggt

SEQ ID NO: 2740810 - DNA, 25 bp, Homo sapien
atttaaacaacacgccatgggcctg

SEQ ID NO: 2740811 - DNA, 25 bp, Homo sapien
tattaaagcacctctaagatggatg

SEQ ID NO: 2740812 - DNA, 25 bp, Homo sapien
ccttttattccatagggtagaatgg

SEQ ID NO: 2740813 - DNA, 25 bp, Homo sapien
gatgagtcagtcaactgcagatctg

SEQ ID NO: 2740814 - DNA, 25 bp, Homo sapien
ggcctttcagcagagagatattcct

SEQ ID NO: 2740815 - DNA, 25 bp, Homo sapien
tgacggtaggcaggagacagatttt

SEQ ID NO: 2740816 - DNA, 25 bp, Homo sapien
cagcctgggcataattagggcacac

SEQ ID NO: 2740817 - DNA, 25 bp, Homo sapien
cacagagcaggatcagcgagttgtg

SEQ ID NO: 2740818 - DNA, 25 bp, Homo sapien
tctgggtcatgcctgcggagctgcc

SEQ ID NO: 2740819 - DNA, 25 bp, Homo sapien
tgagggagtacgcaaaggcccttct

SEQ ID NO: 2740820 - DNA, 25 bp, Homo sapien
tgaaaaggctgcatggaagagtgac

SEQ ID NO: 2740821 - DNA, 25 bp, Homo sapien
ggctatgccctcatgtgcgtactga

SEQ ID NO: 2740822 - DNA, 25 bp, Homo sapien
tcagggtcgggtggcattccccagc

SEQ ID NO: 2740823 - DNA, 25 bp, Homo sapien
aggtgaaccactagctgctgctgtt

SEQ ID NO: 2740824 - DNA, 25 bp, Homo sapien
gcaggtgaaccactagctgctgctg

SEQ ID NO: 2740825 - DNA, 25 bp, Homo sapien
ctgttggccacccaggcagttttcc

SEQ ID NO: 2740826 - DNA, 25 bp, Homo sapien
caaacaaccaaatcctacttagcag

SEQ ID NO: 2740827 - DNA, 25 bp, Homo sapien
caatcagggtgccaaaaaactaatc

SEQ ID NO: 2740828 - DNA, 25 bp, Homo sapien
cagagaactcttcacttagccatga

SEQ ID NO: 2740829 - DNA, 25 bp, Homo sapien
tagctattgtagaaagcataactgg

SEQ ID NO: 2740830 - DNA, 25 bp, Homo sapien
ctcagcgtgctgacccgggtgcgca

SEQ ID NO: 2740831 - DNA, 25 bp, Homo sapien
agaggccgtctgctgcggtccatgc

SEQ ID NO: 2740832 - DNA, 25 bp, Homo sapien
agaggaccgcttcaccattgactgc

SEQ ID NO: 2740833 - DNA, 25 bp, Homo sapien
gaagcaatgggtttaattccctcag

SEQ ID NO: 2740834 - DNA, 25 bp, Homo sapien
tggcgctccgcattcggcacagcag

SEQ ID NO: 2740835 - DNA, 25 bp, Homo sapien
tgttgctaagcggttctgttccctc

SEQ ID NO: 2740836 - DNA, 25 bp, Homo sapien
ggactctgaacagacttggcaagac

SEQ ID NO: 2740837 - DNA, 25 bp, Homo sapien
taagcggttctgttccctcaccgtc

SEQ ID NO: 2740838 - DNA, 25 bp, Homo sapien
tctccgctagaaggacacagttgca

SEQ ID NO: 2740839 - DNA, 25 bp, Homo sapien
tagtgctgcccctacattcagagta

SEQ ID NO: 2740840 - DNA, 25 bp, Homo sapien
tcaaaacggcttgcatttcaatggc

SEQ ID NO: 2740841 - DNA, 25 bp, Homo sapien
tttcaatggcagaggagtggtgacc

SEQ ID NO: 2740842 - DNA, 25 bp, Homo sapien
gatacatggagagttgaagacctgc

SEQ ID NO: 2740843 - DNA, 25 bp, Homo sapien
tgcaattttcatagcgtcgtctcgg

SEQ ID NO: 2740844 - DNA, 25 bp, Homo sapien
gtcgtctcggagatgcagccaagaa

SEQ ID NO: 2740845 - DNA, 25 bp, Homo sapien
ttcagcaccgtaaaagtaatccagc

SEQ ID NO: 2740846 - DNA, 25 bp, Homo sapien
tctcagggagtcaaggacacttcac

SEQ ID NO: 2740847 - DNA, 25 bp, Homo sapien
tcacagagaaggtaggttgtgacct

SEQ ID NO: 2740848 - DNA, 25 bp, Homo sapien
gctcttaagatcatagtgtttgcaa

SEQ ID NO: 2740849 - DNA, 25 bp, Homo sapien
gagcttaccttctgttgcaatgaca

SEQ ID NO: 2740850 - DNA, 25 bp, Homo sapien
gaagtattgtatatactgccaagat

SEQ ID NO: 2740851 - DNA, 25 bp, Homo sapien
cattttagatggcagagtgaatttt

SEQ ID NO: 2740852 - DNA, 25 bp, Homo sapien
ttgtcattttagatggcagagtgaa

SEQ ID NO: 2740853 - DNA, 25 bp, Homo sapien
tactgccaagatttgtcctacagaa

SEQ ID NO: 2740854 - DNA, 25 bp, Homo sapien
gggactcctatataactttcgccag

SEQ ID NO: 2740855 - DNA, 25 bp, Homo sapien
taaaagtcaagtgtctgaggcagct

SEQ ID NO: 2740856 - DNA, 25 bp, Homo sapien
tccagtcctttgcaagttggtggcg

SEQ ID NO: 2740857 - DNA, 25 bp, Homo sapien
tcagggtctttgagccctatcaggc

SEQ ID NO: 2740858 - DNA, 25 bp, Homo sapien
acgtctgttccagtgccctgtccat

SEQ ID NO: 2740859 - DNA, 25 bp, Homo sapien
ggacgtctgttccagtgccctgtcc

SEQ ID NO: 2740860 - DNA, 25 bp, Homo sapien
aggacgtctgttccagtgccctgtc

SEQ ID NO: 2740861 - DNA, 25 bp, Homo sapien
gacgtctgttccagtgccctgtcca

SEQ ID NO: 2740862 - DNA, 25 bp, Homo sapien
agttgaggagttgagaagagtattc

SEQ ID NO: 2740863 - DNA, 25 bp, Homo sapien
gaaacagcatccgagtcggagttga

SEQ ID NO: 2740864 - DNA, 25 bp, Homo sapien
agtattctaggccaaaggccccttg

SEQ ID NO: 2740865 - DNA, 25 bp, Homo sapien
tccaaggggtcagagaggaatgcct

SEQ ID NO: 2740866 - DNA, 25 bp, Homo sapien
ctgaatatgaacagggagctgtgtg

SEQ ID NO: 2740867 - DNA, 25 bp, Homo sapien
actgaatatgaacagggagctgtgt

SEQ ID NO: 2740868 - DNA, 25 bp, Homo sapien
ctggagggttggctttttctgtctc

SEQ ID NO: 2740869 - DNA, 25 bp, Homo sapien
cttaaagtcctttggttgctggaca

SEQ ID NO: 2740870 - DNA, 25 bp, Homo sapien
tagcttaaagtcctttggttgctgg

SEQ ID NO: 2740871 - DNA, 25 bp, Homo sapien
gcttaaagtcctttggttgctggac

SEQ ID NO: 2740872 - DNA, 25 bp, Homo sapien
ttagcttaaagtcctttggttgctg

SEQ ID NO: 2740873 - DNA, 25 bp, Homo sapien
tctgttcggggcctgcattgggttc

SEQ ID NO: 2740874 - DNA, 25 bp, Homo sapien
ctgttcaccgggatatgcctggcca

SEQ ID NO: 2740875 - DNA, 25 bp, Homo sapien
gctgttcaccgggatatgcctggcc

SEQ ID NO: 2740876 - DNA, 25 bp, Homo sapien
ctgcattgggttcgggcagctgttc

SEQ ID NO: 2740877 - DNA, 25 bp, Homo sapien
tgatacgttgctttcttccatgtga

SEQ ID NO: 2740878 - DNA, 25 bp, Homo sapien
aggattttgtaaactctgaaatgat

SEQ ID NO: 2740879 - DNA, 25 bp, Homo sapien
aatgatacgttgctttcttccatgt

SEQ ID NO: 2740880 - DNA, 25 bp, Homo sapien
tgtaaactctgaaatgatacgttgc

SEQ ID NO: 2740881 - DNA, 25 bp, Homo sapien
taatcaatggtaacagaaagcagga

SEQ ID NO: 2740882 - DNA, 25 bp, Homo sapien
actaatcaatggtaacagaaagcag

SEQ ID NO: 2740883 - DNA, 25 bp, Homo sapien
ggcaaactaatcaatggtaacagaa

SEQ ID NO: 2740884 - DNA, 25 bp, Homo sapien
tatattatataaagttcaacaacag

SEQ ID NO: 2740885 - DNA, 25 bp, Homo sapien
ttttctgtgttatgaccgtgtgttc

SEQ ID NO: 2740886 - DNA, 25 bp, Homo sapien
gatttaatgctgaagcaagggcctt

SEQ ID NO: 2740887 - DNA, 25 bp, Homo sapien
tgtgctgctcgagagtgttcgctgc

SEQ ID NO: 2740888 - DNA, 25 bp, Homo sapien
cagtcttcatccacgtgaatgtcat

SEQ ID NO: 2740889 - DNA, 25 bp, Homo sapien
acagcagcgactcatttctcagggc

SEQ ID NO: 2740890 - DNA, 25 bp, Homo sapien
aggagggcacagcagcgactcattt

SEQ ID NO: 2740891 - DNA, 25 bp, Homo sapien
ctaaaacgatggggtgcgaggaggg

SEQ ID NO: 2740892 - DNA, 25 bp, Homo sapien
gcagcgactcatttctcagggcctc

SEQ ID NO: 2740893 - DNA, 25 bp, Homo sapien
ggtacttcgtgcaccagtctccata

SEQ ID NO: 2740894 - DNA, 25 bp, Homo sapien
ggcactgtgcgaggtacttcgtgca

SEQ ID NO: 2740895 - DNA, 25 bp, Homo sapien
ctccccgtggcgagtgctggccttg

SEQ ID NO: 2740896 - DNA, 25 bp, Homo sapien
cctgtgttgtggtctggccctagca

SEQ ID NO: 2740897 - DNA, 25 bp, Homo sapien
gaaaacagagcttacgtggaaccac

SEQ ID NO: 2740898 - DNA, 25 bp, Homo sapien
gccgctaggtagcacacgaatttaa

SEQ ID NO: 2740899 - DNA, 25 bp, Homo sapien
ggcttatccttaagctgcaggagca

SEQ ID NO: 2740900 - DNA, 25 bp, Homo sapien
gagcatggcattaacccatcatagg

SEQ ID NO: 2740901 - DNA, 25 bp, Homo sapien
taagatattgttggatttaaattaa

SEQ ID NO: 2740902 - DNA, 25 bp, Homo sapien
tgtgattaagatattgttggattta

SEQ ID NO: 2740903 - DNA, 25 bp, Homo sapien
gatattgttggatttaaattaacca

SEQ ID NO: 2740904 - DNA, 25 bp, Homo sapien
gattaagatattgttggatttaaat

SEQ ID NO: 2740905 - DNA, 25 bp, Homo sapien
gctttcatccggcatgattagttta

SEQ ID NO: 2740906 - DNA, 25 bp, Homo sapien
gattagtttagaacgtatccgtgct

SEQ ID NO: 2740907 - DNA, 25 bp, Homo sapien
aacgtatccgtgctgtgggtgtcag

SEQ ID NO: 2740908 - DNA, 25 bp, Homo sapien
tgagctcatccgtccctccgctttc

SEQ ID NO: 2740909 - DNA, 25 bp, Homo sapien
tgacgtactcccgtaaaatgcccta

SEQ ID NO: 2740910 - DNA, 25 bp, Homo sapien
ctgtagggagatggatctcctgtga

SEQ ID NO: 2740911 - DNA, 25 bp, Homo sapien
gtggctgacggtagcgcccatcagt

SEQ ID NO: 2740912 - DNA, 25 bp, Homo sapien
ccaggactggagtggctgacggtag

SEQ ID NO: 2740913 - DNA, 25 bp, Homo sapien
tcctcggagaaggtcggtcaggctc

SEQ ID NO: 2740914 - DNA, 25 bp, Homo sapien
gccatttcccgattttcctgtcaac

SEQ ID NO: 2740915 - DNA, 25 bp, Homo sapien
gagagagggctggttcggaatcctc

SEQ ID NO: 2740916 - DNA, 25 bp, Homo sapien
gctgcagcaggtcactcagcacgct

SEQ ID NO: 2740917 - DNA, 25 bp, Homo sapien
ggctctttggatattgttaccctgg

SEQ ID NO: 2740918 - DNA, 25 bp, Homo sapien
gggctctttggatattgttaccctg

SEQ ID NO: 2740919 - DNA, 25 bp, Homo sapien
cgggctctttggatattgttaccct

SEQ ID NO: 2740920 - DNA, 25 bp, Homo sapien
tcgggctctttggatattgttaccc

SEQ ID NO: 2740921 - DNA, 25 bp, Homo sapien
ggtcctgccaccaatggtgccccaa

SEQ ID NO: 2740922 - DNA, 25 bp, Homo sapien
gcctgcagaagggtgcgcttttgtc

SEQ ID NO: 2740923 - DNA, 25 bp, Homo sapien
ggtgcgcttttgtcctgcctgtttc

SEQ ID NO: 2740924 - DNA, 25 bp, Homo sapien
tccagtttccttagggccttactgc

SEQ ID NO: 2740925 - DNA, 25 bp, Homo sapien
gcggtttgcaggttgggcgtcgaaa

SEQ ID NO: 2740926 - DNA, 25 bp, Homo sapien
caggttgggcgtcgaaaggctgccc

SEQ ID NO: 2740927 - DNA, 25 bp, Homo sapien
ccccaggcggtttgcaggttgggcg

SEQ ID NO: 2740928 - DNA, 25 bp, Homo sapien
gcagcccccaggcggtttgcaggtt

SEQ ID NO: 2740929 - DNA, 25 bp, Homo sapien
ttagattgggaaagcgatgcttggg

SEQ ID NO: 2740930 - DNA, 25 bp, Homo sapien
ggacggcatcaagggaccacctggt

SEQ ID NO: 2740931 - DNA, 25 bp, Homo sapien
gcagtgacagcggacggcatcaagg

SEQ ID NO: 2740932 - DNA, 25 bp, Homo sapien
gacagcggacggcatcaagggacca

SEQ ID NO: 2740933 - DNA, 25 bp, Homo sapien
ttcagccgctagagtggcaggaaga

SEQ ID NO: 2740934 - DNA, 25 bp, Homo sapien
aagcttctttcagccgctagagtgg

SEQ ID NO: 2740935 - DNA, 25 bp, Homo sapien
gggcgcgaggagcaagcttctttca

SEQ ID NO: 2740936 - DNA, 25 bp, Homo sapien
gcaggaagagccagcctagaccaaa

SEQ ID NO: 2740937 - DNA, 25 bp, Homo sapien
cctcaggggacacggtcttctcctt

SEQ ID NO: 2740938 - DNA, 25 bp, Homo sapien
gagacctcaggggacacggtcttct

SEQ ID NO: 2740939 - DNA, 25 bp, Homo sapien
caggggacacggtcttctcctttgt

SEQ ID NO: 2740940 - DNA, 25 bp, Homo sapien
gacctcaggggacacggtcttctcc

SEQ ID NO: 2740941 - DNA, 25 bp, Homo sapien
cttcctggtgttgcatgagccgcga

SEQ ID NO: 2740942 - DNA, 25 bp, Homo sapien
agctcatgcgtcttcctcagcacag

SEQ ID NO: 2740943 - DNA, 25 bp, Homo sapien
tgagccgcgactgcagctcatgcgt

SEQ ID NO: 2740944 - DNA, 25 bp, Homo sapien
aggcccaactctcggcagcgatggg

SEQ ID NO: 2740945 - DNA, 25 bp, Homo sapien
tcacaagaatgttctgggaaactct

SEQ ID NO: 2740946 - DNA, 25 bp, Homo sapien
tcagaggacgtgaaggaaataccct

SEQ ID NO: 2740947 - DNA, 25 bp, Homo sapien
cagaggccaggctgattcagatgcc

SEQ ID NO: 2740948 - DNA, 25 bp, Homo sapien
cctcggccaataccacgttcttgat

SEQ ID NO: 2740949 - DNA, 25 bp, Homo sapien
tgtgaccacaaatgcttgcttggac

SEQ ID NO: 2740950 - DNA, 25 bp, Homo sapien
tggtgtctgtccagaaaaagtcgat

SEQ ID NO: 2740951 - DNA, 25 bp, Homo sapien
aaattgcaagccacacttctagaga

SEQ ID NO: 2740952 - DNA, 25 bp, Homo sapien
ttggacttgcccatctagcactttg

SEQ ID NO: 2740953 - DNA, 25 bp, Homo sapien
taatgcctcaggcagcatgaccacc

SEQ ID NO: 2740954 - DNA, 25 bp, Homo sapien
gacaaagtcgtaaaatccactccag

SEQ ID NO: 2740955 - DNA, 25 bp, Homo sapien
ttagtgtcacaagccaagtggttca

SEQ ID NO: 2740956 - DNA, 25 bp, Homo sapien
ttacacgagcgctcacgaggacaaa

SEQ ID NO: 2740957 - DNA, 25 bp, Homo sapien
ccacagggtagcgttgggttccagg

SEQ ID NO: 2740958 - DNA, 25 bp, Homo sapien
gcccacagggtagcgttgggttcca

SEQ ID NO: 2740959 - DNA, 25 bp, Homo sapien
ctgcccacagggtagcgttgggttc

SEQ ID NO: 2740960 - DNA, 25 bp, Homo sapien
acagggtagcgttgggttccaggca

SEQ ID NO: 2740961 - DNA, 25 bp, Homo sapien
tttcgtgggcggcttccgcatgcca

SEQ ID NO: 2740962 - DNA, 25 bp, Homo sapien
tcagctagggcatttgggcggccct

SEQ ID NO: 2740963 - DNA, 25 bp, Homo sapien
ccgcatgccacggtgggttagacag

SEQ ID NO: 2740964 - DNA, 25 bp, Homo sapien
tgtccctgtagcgtggggcttttcg

SEQ ID NO: 2740965 - DNA, 25 bp, Homo sapien
cacaggactgtgcatgcggcgcctg

SEQ ID NO: 2740966 - DNA, 25 bp, Homo sapien
acccacaggactgtgcatgcggcgc

SEQ ID NO: 2740967 - DNA, 25 bp, Homo sapien
gtgccttccctgttggtacccacag

SEQ ID NO: 2740968 - DNA, 25 bp, Homo sapien
cctgttgcaggcaggcctcaccgtg

SEQ ID NO: 2740969 - DNA, 25 bp, Homo sapien
ctctcctccctgtcaccttgttccc

SEQ ID NO: 2740970 - DNA, 25 bp, Homo sapien
ccctgtcaccttgttccctgctgct

SEQ ID NO: 2740971 - DNA, 25 bp, Homo sapien
ctcctccctgtcaccttgttccctg

SEQ ID NO: 2740972 - DNA, 25 bp, Homo sapien
tctcctccctgtcaccttgttccct

SEQ ID NO: 2740973 - DNA, 25 bp, Homo sapien
cctgcttagggatctccaaggtcac

SEQ ID NO: 2740974 - DNA, 25 bp, Homo sapien
ccagaattattgaaatgactttcac

SEQ ID NO: 2740975 - DNA, 25 bp, Homo sapien
tctgtggcagagccacctagggcct

SEQ ID NO: 2740976 - DNA, 25 bp, Homo sapien
tgactttcactgttctggtcttccc

SEQ ID NO: 2740977 - DNA, 25 bp, Homo sapien
gaatctggccgaatatttctccaca

SEQ ID NO: 2740978 - DNA, 25 bp, Homo sapien
catttatgaggcctgttaccagtgt

SEQ ID NO: 2740979 - DNA, 25 bp, Homo sapien
tcccatgcatgtagtttgtgtccag

SEQ ID NO: 2740980 - DNA, 25 bp, Homo sapien
tgtatggcttcaccccacgtttctc

SEQ ID NO: 2740981 - DNA, 25 bp, Homo sapien
ggaaagagtgagtcttttaccatat

SEQ ID NO: 2740982 - DNA, 25 bp, Homo sapien
tacaaaaactgaatcgtttcccaca

SEQ ID NO: 2740983 - DNA, 25 bp, Homo sapien
acattgtgagctctttatgtctttg

SEQ ID NO: 2740984 - DNA, 25 bp, Homo sapien
aggtaaccagaatgtccaaaggctt

SEQ ID NO: 2740985 - DNA, 25 bp, Homo sapien
cattttttacagttataggatttct

SEQ ID NO: 2740986 - DNA, 25 bp, Homo sapien
gactgaagcctttatcccatttttg

SEQ ID NO: 2740987 - DNA, 25 bp, Homo sapien
ggaactgtgttgactgaaggctttg

SEQ ID NO: 2740988 - DNA, 25 bp, Homo sapien
ccatttttgacattcattgggtttc

SEQ ID NO: 2740989 - DNA, 25 bp, Homo sapien
atgagttctctcatgtgtttggagg

SEQ ID NO: 2740990 - DNA, 25 bp, Homo sapien
gtatgagttctctcatgtgtttgga

SEQ ID NO: 2740991 - DNA, 25 bp, Homo sapien
gagttctctcatgtgtttggaggta

SEQ ID NO: 2740992 - DNA, 25 bp, Homo sapien
agttctctcatgtgtttggaggtaa

SEQ ID NO: 2740993 - DNA, 25 bp, Homo sapien
aaatgtctaaagacttgaccacatt

SEQ ID NO: 2740994 - DNA, 25 bp, Homo sapien
ctttcatgtttacttagagaactga

SEQ ID NO: 2740995 - DNA, 25 bp, Homo sapien
cattccttacagtcaaagggtgcct

SEQ ID NO: 2740996 - DNA, 25 bp, Homo sapien
cagtcaaagggtgcctctccagtgt

SEQ ID NO: 2740997 - DNA, 25 bp, Homo sapien
gacttgaccacatcccttacagtca

SEQ ID NO: 2740998 - DNA, 25 bp, Homo sapien
catgtttacgtagagaactggaatg

SEQ ID NO: 2740999 - DNA, 25 bp, Homo sapien
tgaccacatcccttacggtcaaagg

SEQ ID NO: 2741000 - DNA, 25 bp, Homo sapien
tgagttcttccgtgtttacatagag

SEQ ID NO: 2741001 - DNA, 25 bp, Homo sapien
gaagacttgaccacattccttatag

SEQ ID NO: 2741002 - DNA, 25 bp, Homo sapien
tgtctggagacttgaccacattcct

SEQ ID NO: 2741003 - DNA, 25 bp, Homo sapien
ttttcatgtttacctagagaactgg

SEQ ID NO: 2741004 - DNA, 25 bp, Homo sapien
tgaccacattccttatagtcaaagg

SEQ ID NO: 2741005 - DNA, 25 bp, Homo sapien
ttttcatgtttacatacaggactgg

SEQ ID NO: 2741006 - DNA, 25 bp, Homo sapien
ttacattctcaggatttctacagag

SEQ ID NO: 2741007 - DNA, 25 bp, Homo sapien
tctgaagacttcaccacattgcaag

SEQ ID NO: 2741008 - DNA, 25 bp, Homo sapien
gataactgaattaactgaatgtttt

SEQ ID NO: 2741009 - DNA, 25 bp, Homo sapien
tctagtccccaaaggccggctctcc

SEQ ID NO: 2741010 - DNA, 25 bp, Homo sapien
aaccattgttcccactcttctagtc

SEQ ID NO: 2741011 - DNA, 25 bp, Homo sapien
gcttcacttttcaacgtagatctgg

SEQ ID NO: 2741012 - DNA, 25 bp, Homo sapien
gtagatctggcaacatcccaagccc

SEQ ID NO: 2741013 - DNA, 25 bp, Homo sapien
taagaccaggtgacttgtggctccc

SEQ ID NO: 2741014 - DNA, 25 bp, Homo sapien
tggcagtgccaatctacctcaaggt

SEQ ID NO: 2741015 - DNA, 25 bp, Homo sapien
ctctctgggctgaacaaggcgtatc

SEQ ID NO: 2741016 - DNA, 25 bp, Homo sapien
ccataggccggatcaggtgagacgt

SEQ ID NO: 2741017 - DNA, 25 bp, Homo sapien
gggcggagcatattcacaggccagc

SEQ ID NO: 2741018 - DNA, 25 bp, Homo sapien
ggcggagcatattcacaggccagct

SEQ ID NO: 2741019 - DNA, 25 bp, Homo sapien
cggagcatattcacaggccagctca

SEQ ID NO: 2741020 - DNA, 25 bp, Homo sapien
agcatattcacaggccagctcaggt

SEQ ID NO: 2741021 - DNA, 25 bp, Homo sapien
gccattgtataacggcaactgggct

SEQ ID NO: 2741022 - DNA, 25 bp, Homo sapien
ttcctccatttgctaggcactctgg

SEQ ID NO: 2741023 - DNA, 25 bp, Homo sapien
taagacacggatgaagaggctggac

SEQ ID NO: 2741024 - DNA, 25 bp, Homo sapien
gaatgcctgtctaaacactgccggt

SEQ ID NO: 2741025 - DNA, 25 bp, Homo sapien
tttgctttccctcgtgatgtcaccc

SEQ ID NO: 2741026 - DNA, 25 bp, Homo sapien
gtggtacttcccgtggcaccgtctg

SEQ ID NO: 2741027 - DNA, 25 bp, Homo sapien
ggaacgcgttgaccctcactgtttg

SEQ ID NO: 2741028 - DNA, 25 bp, Homo sapien
atgtcaccccggatgcgctgttctg

SEQ ID NO: 2741029 - DNA, 25 bp, Homo sapien
gctctcctgctggtaggaaggatgc

SEQ ID NO: 2741030 - DNA, 25 bp, Homo sapien
tggtaggaaggatgcttggcccagg

SEQ ID NO: 2741031 - DNA, 25 bp, Homo sapien
tcctgctggtaggaaggatgcttgg

SEQ ID NO: 2741032 - DNA, 25 bp, Homo sapien
tgctggtaggaaggatgcttggccc

SEQ ID NO: 2741033 - DNA, 25 bp, Homo sapien
gctcgggaatttcacgagccctcat

SEQ ID NO: 2741034 - DNA, 25 bp, Homo sapien
gcacacgctcgggaatttcacgagc

SEQ ID NO: 2741035 - DNA, 25 bp, Homo sapien
cacgctcgggaatttcacgagccct

SEQ ID NO: 2741036 - DNA, 25 bp, Homo sapien
cacgtgcacacgctcgggaatttca

SEQ ID NO: 2741037 - DNA, 25 bp, Homo sapien
ctgagccaggtgccgcgtctgctca

SEQ ID NO: 2741038 - DNA, 25 bp, Homo sapien
tggcgtgggatcacatgcatccgcg

SEQ ID NO: 2741039 - DNA, 25 bp, Homo sapien
gccaggtgccgcgtctgctcagggc

SEQ ID NO: 2741040 - DNA, 25 bp, Homo sapien
tgggatcacatgcatccgcggcacc

SEQ ID NO: 2741041 - DNA, 25 bp, Homo sapien
gatttggcaggaaggatttgcgctt

SEQ ID NO: 2741042 - DNA, 25 bp, Homo sapien
tcccatccacgaatttgtaaactgt

SEQ ID NO: 2741043 - DNA, 25 bp, Homo sapien
tgcgtcccatactgcacttagtaat

SEQ ID NO: 2741044 - DNA, 25 bp, Homo sapien
gtaaactgtccctgtgcgtcccata

SEQ ID NO: 2741045 - DNA, 25 bp, Homo sapien
agtgccacaaggacccagacacgag

SEQ ID NO: 2741046 - DNA, 25 bp, Homo sapien
tgccacaaggacccagacacgagca

SEQ ID NO: 2741047 - DNA, 25 bp, Homo sapien
gtgccacaaggacccagacacgagc

SEQ ID NO: 2741048 - DNA, 25 bp, Homo sapien
gaatcaaagagtgcgtgctggctta

SEQ ID NO: 2741049 - DNA, 25 bp, Homo sapien
ggtgcccactcggagccagaatcaa

SEQ ID NO: 2741050 - DNA, 25 bp, Homo sapien
cagattttctggtactgacttgtgg

SEQ ID NO: 2741051 - DNA, 25 bp, Homo sapien
gtgcgtgctggcttaggtgccttct

SEQ ID NO: 2741052 - DNA, 25 bp, Homo sapien
aggctgaacaggcatccgtggaaat

SEQ ID NO: 2741053 - DNA, 25 bp, Homo sapien
cagacgccattctccatgtgtagag

SEQ ID NO: 2741054 - DNA, 25 bp, Homo sapien
tccgtggaaattcctgaaccctcag

SEQ ID NO: 2741055 - DNA, 25 bp, Homo sapien
gctaaaatctcgtgctcccagacgc

SEQ ID NO: 2741056 - DNA, 25 bp, Homo sapien
aaagcagctgaacagggcctgtggc

SEQ ID NO: 2741057 - DNA, 25 bp, Homo sapien
ccagaccgtagtggaaatgtcacag

SEQ ID NO: 2741058 - DNA, 25 bp, Homo sapien
gaaaagcagctgaacagggcctgtg

SEQ ID NO: 2741059 - DNA, 25 bp, Homo sapien
cataaccctccccagaccgtagtgg

SEQ ID NO: 2741060 - DNA, 25 bp, Homo sapien
tcaagcggcccagtgcagacaccct

SEQ ID NO: 2741061 - DNA, 25 bp, Homo sapien
ctgccaacagcagccgtatacaggt

SEQ ID NO: 2741062 - DNA, 25 bp, Homo sapien
gcagccgtatacaggtccatcacat

SEQ ID NO: 2741063 - DNA, 25 bp, Homo sapien
gtatacaggtccatcacatacagcc

SEQ ID NO: 2741064 - DNA, 25 bp, Homo sapien
tgggcaccggcatttctacacatcc

SEQ ID NO: 2741065 - DNA, 25 bp, Homo sapien
cctcttgtgggcaccggcatttcta

SEQ ID NO: 2741066 - DNA, 25 bp, Homo sapien
ttgtcttcacatctccggccactct

SEQ ID NO: 2741067 - DNA, 25 bp, Homo sapien
tgcagccgcctcttgtgggcaccgg

SEQ ID NO: 2741068 - DNA, 25 bp, Homo sapien
caccactgtctgactcactcgcgat

SEQ ID NO: 2741069 - DNA, 25 bp, Homo sapien
ctgccggatgatccacacaaggcgc

SEQ ID NO: 2741070 - DNA, 25 bp, Homo sapien
tctgtccagtgggtggattggtcca

SEQ ID NO: 2741071 - DNA, 25 bp, Homo sapien
ggatgatccacacaaggcgcccagc

SEQ ID NO: 2741072 - DNA, 25 bp, Homo sapien
aagcccggagtgcagctccacctga

SEQ ID NO: 2741073 - DNA, 25 bp, Homo sapien
tggtggccacctcgagggcccttga

SEQ ID NO: 2741074 - DNA, 25 bp, Homo sapien
ggagctcatgccaaagcccggagtg

SEQ ID NO: 2741075 - DNA, 25 bp, Homo sapien
tgccaaagcccggagtgcagctcca

SEQ ID NO: 2741076 - DNA, 25 bp, Homo sapien
atggtcccgctggatgtgatgtgcc

SEQ ID NO: 2741077 - DNA, 25 bp, Homo sapien
cctatggtcccgctggatgtgatgt

SEQ ID NO: 2741078 - DNA, 25 bp, Homo sapien
tatggtcccgctggatgtgatgtgc

SEQ ID NO: 2741079 - DNA, 25 bp, Homo sapien
ggtcccgctggatgtgatgtgccgg

SEQ ID NO: 2741080 - DNA, 25 bp, Homo sapien
taggagacccaaattccaagccagg

SEQ ID NO: 2741081 - DNA, 25 bp, Homo sapien
agcctgacactaggggggaccaaca

SEQ ID NO: 2741082 - DNA, 25 bp, Homo sapien
tcaaaacagcgtgaaattgtaggag

SEQ ID NO: 2741083 - DNA, 25 bp, Homo sapien
ttgctttgccttgcggatgccgttc

SEQ ID NO: 2741084 - DNA, 25 bp, Homo sapien
gggtgggaagcttcccgcatgtcac

SEQ ID NO: 2741085 - DNA, 25 bp, Homo sapien
ccaagtttgaactggtctctgtgtt

SEQ ID NO: 2741086 - DNA, 25 bp, Homo sapien
atgtcaccaagacggctccaaggct

SEQ ID NO: 2741087 - DNA, 25 bp, Homo sapien
caagaactggcttccggttttcagg

SEQ ID NO: 2741088 - DNA, 25 bp, Homo sapien
actcccttattacccaagaaatctg

SEQ ID NO: 2741089 - DNA, 25 bp, Homo sapien
gaaatctgacggttctggttgtcag

SEQ ID NO: 2741090 - DNA, 25 bp, Homo sapien
tacccaagaaatctgacggttctgg

SEQ ID NO: 2741091 - DNA, 25 bp, Homo sapien
ccttattacccaagaaatctgacgg

SEQ ID NO: 2741092 - DNA, 25 bp, Homo sapien
gctgcggaagcagcgccccgttgaa

SEQ ID NO: 2741093 - DNA, 25 bp, Homo sapien
cggctgcggaagcagcgccccgttg

SEQ ID NO: 2741094 - DNA, 25 bp, Homo sapien
agcagcgccccgttgaagacgagga

SEQ ID NO: 2741095 - DNA, 25 bp, Homo sapien
ggaagcagcgccccgttgaagacga

SEQ ID NO: 2741096 - DNA, 25 bp, Homo sapien
tctgtggagtctggcgtactacacg

SEQ ID NO: 2741097 - DNA, 25 bp, Homo sapien
gcatgtaccgcctgctgtgggccaa

SEQ ID NO: 2741098 - DNA, 25 bp, Homo sapien
tactacacgccacttgcccagcatg

SEQ ID NO: 2741099 - DNA, 25 bp, Homo sapien
cccaccacacgggataggatggttc

SEQ ID NO: 2741100 - DNA, 25 bp, Homo sapien
ttggcctgaggctgagagaccctcc

SEQ ID NO: 2741101 - DNA, 25 bp, Homo sapien
tttgtaatttgcaatcaggaacgtc

SEQ ID NO: 2741102 - DNA, 25 bp, Homo sapien
gacgcccatttcaactgcgacaagg

SEQ ID NO: 2741103 - DNA, 25 bp, Homo sapien
ggaacgtcagggaagcactttggcc

SEQ ID NO: 2741104 - DNA, 25 bp, Homo sapien
ggatgtggagtgctcagctgcactg

SEQ ID NO: 2741105 - DNA, 25 bp, Homo sapien
ttggggataatggaggccccaaggc

SEQ ID NO: 2741106 - DNA, 25 bp, Homo sapien
ccaaggcaacctgagcgaggttggc

SEQ ID NO: 2741107 - DNA, 25 bp, Homo sapien
cttcatgcccaggttggggataatg

SEQ ID NO: 2741108 - DNA, 25 bp, Homo sapien
caaggcaacctgagcgaggttggca

SEQ ID NO: 2741109 - DNA, 25 bp, Homo sapien
cagccctgatcagggatgttctggt

SEQ ID NO: 2741110 - DNA, 25 bp, Homo sapien
ctgtgtccccggtgagggacagggc

SEQ ID NO: 2741111 - DNA, 25 bp, Homo sapien
gggcccagccctgatcagggatgtt

SEQ ID NO: 2741112 - DNA, 25 bp, Homo sapien
ttactctgtgtccccggtgagggac

SEQ ID NO: 2741113 - DNA, 25 bp, Homo sapien
ggacagacagacggctcagtgccct

SEQ ID NO: 2741114 - DNA, 25 bp, Homo sapien
acagacagacggctcagtgccctgg

SEQ ID NO: 2741115 - DNA, 25 bp, Homo sapien
agacagacggctcagtgccctggcg

SEQ ID NO: 2741116 - DNA, 25 bp, Homo sapien
cagacagacggctcagtgccctggc

SEQ ID NO: 2741117 - DNA, 25 bp, Homo sapien
ttggcatgtagggtgggcattctgt

SEQ ID NO: 2741118 - DNA, 25 bp, Homo sapien
gctgtttggcatgtagggtgggcat

SEQ ID NO: 2741119 - DNA, 25 bp, Homo sapien
gcatgtagggtgggcattctgttcc

SEQ ID NO: 2741120 - DNA, 25 bp, Homo sapien
gctgctgtttggcatgtagggtggg

SEQ ID NO: 2741121 - DNA, 25 bp, Homo sapien
agaaagacagcaccagccgtctcca

SEQ ID NO: 2741122 - DNA, 25 bp, Homo sapien
atgtttcttcgccacggtcccagct

SEQ ID NO: 2741123 - DNA, 25 bp, Homo sapien
agtccccgtgcaacaccgaagcagt

SEQ ID NO: 2741124 - DNA, 25 bp, Homo sapien
caacaccgaagcagtccgggagcct

SEQ ID NO: 2741125 - DNA, 25 bp, Homo sapien
agcagatgtttcttcgccacggtcc

SEQ ID NO: 2741126 - DNA, 25 bp, Homo sapien
gctgctgtaacacaactccatggac

SEQ ID NO: 2741127 - DNA, 25 bp, Homo sapien
caagtgttgacagcgtcttagtcca

SEQ ID NO: 2741128 - DNA, 25 bp, Homo sapien
tatcagtttacaaccactacgatgg

SEQ ID NO: 2741129 - DNA, 25 bp, Homo sapien
ggtagaaagatgaggctcctagcag

SEQ ID NO: 2741130 - DNA, 25 bp, Homo sapien
ctgtgtcattccagtttctagtata

SEQ ID NO: 2741131 - DNA, 25 bp, Homo sapien
ctctgtgtcattccagtttctagta

SEQ ID NO: 2741132 - DNA, 25 bp, Homo sapien
gtttctagtatatatgctactgaag

SEQ ID NO: 2741133 - DNA, 25 bp, Homo sapien
ccagtttctagtatatatgctactg

SEQ ID NO: 2741134 - DNA, 25 bp, Homo sapien
gcaatgcatctgctcatcgccctgg

SEQ ID NO: 2741135 - DNA, 25 bp, Homo sapien
ttgcgcgtcattcccgttctcagca

SEQ ID NO: 2741136 - DNA, 25 bp, Homo sapien
ctcagggaggccttgcgcgtcattc

SEQ ID NO: 2741137 - DNA, 25 bp, Homo sapien
accagggacccacgctgcagcaatg

SEQ ID NO: 2741138 - DNA, 25 bp, Homo sapien
ttgtgggaatggtttgggtctcttc

SEQ ID NO: 2741139 - DNA, 25 bp, Homo sapien
cagaatttcccttgcgtttgtggga

SEQ ID NO: 2741140 - DNA, 25 bp, Homo sapien
tcaagtgtcgagtggctctcgtgct

SEQ ID NO: 2741141 - DNA, 25 bp, Homo sapien
tcaggaagctgcgtttcctcaagtg

SEQ ID NO: 2741142 - DNA, 25 bp, Homo sapien
gtaactgggacgataggtgtgcgcc

SEQ ID NO: 2741143 - DNA, 25 bp, Homo sapien
gagtaactgggacgataggtgtgcg

SEQ ID NO: 2741144 - DNA, 25 bp, Homo sapien
caccacacccagctaagttttaagt

SEQ ID NO: 2741145 - DNA, 25 bp, Homo sapien
aatgcagtagcacaatctcagctcg

SEQ ID NO: 2741146 - DNA, 25 bp, Homo sapien
tacttagtacactcacaatggcgtg

SEQ ID NO: 2741147 - DNA, 25 bp, Homo sapien
gtagaagccccagccggatactgtt

SEQ ID NO: 2741148 - DNA, 25 bp, Homo sapien
ggcagagattcttactccagggtct

SEQ ID NO: 2741149 - DNA, 25 bp, Homo sapien
ttttgagcgtaggtaacagatccca

SEQ ID NO: 2741150 - DNA, 25 bp, Homo sapien
ggcagaggcccgaggtccacgttcc

SEQ ID NO: 2741151 - DNA, 25 bp, Homo sapien
agggataccgttgctggaagaaaga

SEQ ID NO: 2741152 - DNA, 25 bp, Homo sapien
tcagggataccgttgctggaagaaa

SEQ ID NO: 2741153 - DNA, 25 bp, Homo sapien
cagaggcccgaggtccacgttccat

SEQ ID NO: 2741154 - DNA, 25 bp, Homo sapien
tgaaagcaaacaagcatcatggcgg

SEQ ID NO: 2741155 - DNA, 25 bp, Homo sapien
agcaaacaagcatcatggcggcggc

SEQ ID NO: 2741156 - DNA, 25 bp, Homo sapien
gaaagcaaacaagcatcatggcggc

SEQ ID NO: 2741157 - DNA, 25 bp, Homo sapien
gcccccctcgttttcattgaaagca

SEQ ID NO: 2741158 - DNA, 25 bp, Homo sapien
ccggcctcgccctcctcgctgcgcc

SEQ ID NO: 2741159 - DNA, 25 bp, Homo sapien
gcccccggcctcgccctcctcgctg

SEQ ID NO: 2741160 - DNA, 25 bp, Homo sapien
ggcctcgccctcctcgctgcgcccg

SEQ ID NO: 2741161 - DNA, 25 bp, Homo sapien
ccccggcctcgccctcctcgctgcg

SEQ ID NO: 2741162 - DNA, 25 bp, Homo sapien
cctccgagagccactgcttcggctg

SEQ ID NO: 2741163 - DNA, 25 bp, Homo sapien
tctgccgccttagtcgctgctcttt

SEQ ID NO: 2741164 - DNA, 25 bp, Homo sapien
ctgtggaaccaccataccagtcccg

SEQ ID NO: 2741165 - DNA, 25 bp, Homo sapien
gcagcggggtctgccctgtggaacc

SEQ ID NO: 2741166 - DNA, 25 bp, Homo sapien
cacaacgctgtcaatggcaacaaca

SEQ ID NO: 2741167 - DNA, 25 bp, Homo sapien
tgaaggaggtaaagaatcaaaggaa

SEQ ID NO: 2741168 - DNA, 25 bp, Homo sapien
acaggtgttggttagcaggctcttc

SEQ ID NO: 2741169 - DNA, 25 bp, Homo sapien
gagctcgagcgagatgaccattcac

SEQ ID NO: 2741170 - DNA, 25 bp, Homo sapien
caaagttaaattcccagatacaagt

SEQ ID NO: 2741171 - DNA, 25 bp, Homo sapien
gttattcatattcactctcttcctc

SEQ ID NO: 2741172 - DNA, 25 bp, Homo sapien
aattcccagatacaagtaggcaaga

SEQ ID NO: 2741173 - DNA, 25 bp, Homo sapien
gcaagaagattcagcactaacaatg

SEQ ID NO: 2741174 - DNA, 25 bp, Homo sapien
cattctaaacactgtgatggccagg

SEQ ID NO: 2741175 - DNA, 25 bp, Homo sapien
gcaaaacacctggagtagatcacag

SEQ ID NO: 2741176 - DNA, 25 bp, Homo sapien
cgttcatcgactgagaagtgacctg

SEQ ID NO: 2741177 - DNA, 25 bp, Homo sapien
ggcaagtcacctccacctagaaagg

SEQ ID NO: 2741178 - DNA, 25 bp, Homo sapien
tccttctatatcttttgatgcaact

SEQ ID NO: 2741179 - DNA, 25 bp, Homo sapien
ttctatatcttttgatgcaactggc

SEQ ID NO: 2741180 - DNA, 25 bp, Homo sapien
tcttttgatgcaactggcagacaaa

SEQ ID NO: 2741181 - DNA, 25 bp, Homo sapien
tatatcttttgatgcaactggcaga

SEQ ID NO: 2741182 - DNA, 25 bp, Homo sapien
cccaatgtcttgtgtaatgcctagc

SEQ ID NO: 2741183 - DNA, 25 bp, Homo sapien
tcttcacaggaactcagacgacatg

SEQ ID NO: 2741184 - DNA, 25 bp, Homo sapien
tgtaagccctcctcaacacggaaac

SEQ ID NO: 2741185 - DNA, 25 bp, Homo sapien
catgcacaccatacgtttaccacag

SEQ ID NO: 2741186 - DNA, 25 bp, Homo sapien
tctgagcctaggacatggagtttgc

SEQ ID NO: 2741187 - DNA, 25 bp, Homo sapien
tagctgccatcaacagtaggctgga

SEQ ID NO: 2741188 - DNA, 25 bp, Homo sapien
agaactacccgtttggcccagcaat

SEQ ID NO: 2741189 - DNA, 25 bp, Homo sapien
taaaaatagaactaagccaggccca

SEQ ID NO: 2741190 - DNA, 25 bp, Homo sapien
gacataattgtatacatcctccgag

SEQ ID NO: 2741191 - DNA, 25 bp, Homo sapien
tcagaagacataattgtatacatcc

SEQ ID NO: 2741192 - DNA, 25 bp, Homo sapien
gcttcctcagaagacataattgtat

SEQ ID NO: 2741193 - DNA, 25 bp, Homo sapien
taattgtatacatcctccgagggtc

SEQ ID NO: 2741194 - DNA, 25 bp, Homo sapien
gcacttacaggaggcagcccaagga

SEQ ID NO: 2741195 - DNA, 25 bp, Homo sapien
tattggctgaagaaaacgcgacctt

SEQ ID NO: 2741196 - DNA, 25 bp, Homo sapien
taagatgagacaccaaccaatgcag

SEQ ID NO: 2741197 - DNA, 25 bp, Homo sapien
cagggtagaccctataactgtctca

SEQ ID NO: 2741198 - DNA, 25 bp, Homo sapien
cctagtgataactgcatgaagaacc

SEQ ID NO: 2741199 - DNA, 25 bp, Homo sapien
ctagtgataactgcatgaagaacca

SEQ ID NO: 2741200 - DNA, 25 bp, Homo sapien
tagtgataactgcatgaagaaccac

SEQ ID NO: 2741201 - DNA, 25 bp, Homo sapien
cacaaagatgcgcttaagcttctta

SEQ ID NO: 2741202 - DNA, 25 bp, Homo sapien
aagctgtcaggtgagttagtgacca

SEQ ID NO: 2741203 - DNA, 25 bp, Homo sapien
gatgcgcttaagcttcttacttttc

SEQ ID NO: 2741204 - DNA, 25 bp, Homo sapien
agctgtcaggtgagttagtgaccac

SEQ ID NO: 2741205 - DNA, 25 bp, Homo sapien
gtttccgagttctgcgggtaagcta

SEQ ID NO: 2741206 - DNA, 25 bp, Homo sapien
tctgcgggtaagctacgaattttat

SEQ ID NO: 2741207 - DNA, 25 bp, Homo sapien
cgaattttattagatgacaggtcca

SEQ ID NO: 2741208 - DNA, 25 bp, Homo sapien
caatgtctgaaggaattcgggacag

SEQ ID NO: 2741209 - DNA, 25 bp, Homo sapien
tgaacagttttgtttcctaacacaa

SEQ ID NO: 2741210 - DNA, 25 bp, Homo sapien
ttgttttaggggtcatatagctagt

SEQ ID NO: 2741211 - DNA, 25 bp, Homo sapien
tagtatgtattaagttgaatctgca

SEQ ID NO: 2741212 - DNA, 25 bp, Homo sapien
tagctagtatgtattaagttgaatc

SEQ ID NO: 2741213 - DNA, 25 bp, Homo sapien
taaagcagcctaccatgtgaattct

SEQ ID NO: 2741214 - DNA, 25 bp, Homo sapien
caatgtctagtactgcgtttcttaa

SEQ ID NO: 2741215 - DNA, 25 bp, Homo sapien
gtatcactggtctagtacacatggg

SEQ ID NO: 2741216 - DNA, 25 bp, Homo sapien
gactggcaagacagtttgcaaactg

SEQ ID NO: 2741217 - DNA, 25 bp, Homo sapien
gcctaaagtctgcaactgaaacagt

SEQ ID NO: 2741218 - DNA, 25 bp, Homo sapien
cctaaagtctgcaactgaaacagtt

SEQ ID NO: 2741219 - DNA, 25 bp, Homo sapien
ctaaagtctgcaactgaaacagttt

SEQ ID NO: 2741220 - DNA, 25 bp, Homo sapien
ttagattcaaagacatatacacaaa

SEQ ID NO: 2741221 - DNA, 25 bp, Homo sapien
tacacaaaccataagaagtacaaat

SEQ ID NO: 2741222 - DNA, 25 bp, Homo sapien
ctagcagaaagcttcttggcttctt

SEQ ID NO: 2741223 - DNA, 25 bp, Homo sapien
gcttcttggcttctttagattcaaa

SEQ ID NO: 2741224 - DNA, 25 bp, Homo sapien
caggccgcggctttaggtcacactg

SEQ ID NO: 2741225 - DNA, 25 bp, Homo sapien
tggaaagcactagataccaggccgc

SEQ ID NO: 2741226 - DNA, 25 bp, Homo sapien
tcactagaccccagtagcctggagt

SEQ ID NO: 2741227 - DNA, 25 bp, Homo sapien
cagctgtacccttctgaggctcaaa

SEQ ID NO: 2741228 - DNA, 25 bp, Homo sapien
cactagcagtgctctatatctgacc

SEQ ID NO: 2741229 - DNA, 25 bp, Homo sapien
caagagtgagcaaaacacgaacggg

SEQ ID NO: 2741230 - DNA, 25 bp, Homo sapien
gatgtcagactatagaaaatattgt

SEQ ID NO: 2741231 - DNA, 25 bp, Homo sapien
gttatagttactagtaagatgtcag

SEQ ID NO: 2741232 - DNA, 25 bp, Homo sapien
tcagcagccgtcttgttccatctgg

SEQ ID NO: 2741233 - DNA, 25 bp, Homo sapien
caagcaaatagttcagcagccgtct

SEQ ID NO: 2741234 - DNA, 25 bp, Homo sapien
aggttcaatatatcctgggtaaggg

SEQ ID NO: 2741235 - DNA, 25 bp, Homo sapien
ctggttcctgataaaggttcaatat

SEQ ID NO: 2741236 - DNA, 25 bp, Homo sapien
agcaatattcttacacgtcttccta

SEQ ID NO: 2741237 - DNA, 25 bp, Homo sapien
gcaatattcttacacgtcttcctaa

SEQ ID NO: 2741238 - DNA, 25 bp, Homo sapien
tattcttacacgtcttcctaataaa

SEQ ID NO: 2741239 - DNA, 25 bp, Homo sapien
aatattcttacacgtcttcctaata

SEQ ID NO: 2741240 - DNA, 25 bp, Homo sapien
cttggaggtggttgttctgttgtaa

SEQ ID NO: 2741241 - DNA, 25 bp, Homo sapien
tatctggttcttgtaacataatcca

SEQ ID NO: 2741242 - DNA, 25 bp, Homo sapien
cataatccaagaccttggaggtggt

SEQ ID NO: 2741243 - DNA, 25 bp, Homo sapien
gttggccttgtcctatctggttctt

SEQ ID NO: 2741244 - DNA, 25 bp, Homo sapien
tatcagcattgcagctcaagatttc

SEQ ID NO: 2741245 - DNA, 25 bp, Homo sapien
gccgggtcgcatatttatcacaaag

SEQ ID NO: 2741246 - DNA, 25 bp, Homo sapien
gcgcccatgatggacagtagccgta

SEQ ID NO: 2741247 - DNA, 25 bp, Homo sapien
tgtagtcccagtttagcgcccatga

SEQ ID NO: 2741248 - DNA, 25 bp, Homo sapien
gccacgttctttcagctctaccaga

SEQ ID NO: 2741249 - DNA, 25 bp, Homo sapien
gaatattgcacagccatcaacatgt

SEQ ID NO: 2741250 - DNA, 25 bp, Homo sapien
ctctagacttaggactgaagaatcc

SEQ ID NO: 2741251 - DNA, 25 bp, Homo sapien
tgaagaatccattatagccacgttc

SEQ ID NO: 2741252 - DNA, 25 bp, Homo sapien
tcaacagtgtgtttctgaaccaaag

SEQ ID NO: 2741253 - DNA, 25 bp, Homo sapien
gcagtactgcaaccccaatgttatc

SEQ ID NO: 2741254 - DNA, 25 bp, Homo sapien
gttcagcatagcttcagacccctca

SEQ ID NO: 2741255 - DNA, 25 bp, Homo sapien
ggcatttcaatcgattccttccgaa

SEQ ID NO: 2741256 - DNA, 25 bp, Homo sapien
cacatcagagtattcagggtcccaa

SEQ ID NO: 2741257 - DNA, 25 bp, Homo sapien
caaaacactggatttgaggttgcga

SEQ ID NO: 2741258 - DNA, 25 bp, Homo sapien
gaggaacatcatagtttgtaccaac

SEQ ID NO: 2741259 - DNA, 25 bp, Homo sapien
gggcgttagccacaagaataagttg

SEQ ID NO: 2741260 - DNA, 25 bp, Homo sapien
tatgtgtgcaaataaaggagctcat

SEQ ID NO: 2741261 - DNA, 25 bp, Homo sapien
taccacacgctggaatcccaaagag

SEQ ID NO: 2741262 - DNA, 25 bp, Homo sapien
gagcgctccagatcaggctttctgt

SEQ ID NO: 2741263 - DNA, 25 bp, Homo sapien
tactatccacggaaagagcgctcca

SEQ ID NO: 2741264 - DNA, 25 bp, Homo sapien
tcataggcactctgtaacttgaaac

SEQ ID NO: 2741265 - DNA, 25 bp, Homo sapien
tgtaattcgtgtaaggcatcaggcc

SEQ ID NO: 2741266 - DNA, 25 bp, Homo sapien
gaaaccatgagtgatccttccattg

SEQ ID NO: 2741267 - DNA, 25 bp, Homo sapien
acctcaactccttaaagtctttgtg

SEQ ID NO: 2741268 - DNA, 25 bp, Homo sapien
ttggcatgcaagagtttactttcag

SEQ ID NO: 2741269 - DNA, 25 bp, Homo sapien
caaactagataattatggtgctgca

SEQ ID NO: 2741270 - DNA, 25 bp, Homo sapien
ggtgctgcatatctagctattagta

SEQ ID NO: 2741271 - DNA, 25 bp, Homo sapien
tctacaaagtaaggatgtgacactg

SEQ ID NO: 2741272 - DNA, 25 bp, Homo sapien
tggccaaatgtactgaagcacattc

SEQ ID NO: 2741273 - DNA, 25 bp, Homo sapien
caaaggctcctgagatactatctaa

SEQ ID NO: 2741274 - DNA, 25 bp, Homo sapien
aacgctaagcattcccactctgtgg

SEQ ID NO: 2741275 - DNA, 25 bp, Homo sapien
ggtttactttctatgctctaaggtg

SEQ ID NO: 2741276 - DNA, 25 bp, Homo sapien
taaaaggcctttcaggatgcagcct

SEQ ID NO: 2741277 - DNA, 25 bp, Homo sapien
aatttgtgccactttccctgcttcc

SEQ ID NO: 2741278 - DNA, 25 bp, Homo sapien
tatctggatctttaacaagacctaa

SEQ ID NO: 2741279 - DNA, 25 bp, Homo sapien
tctttcctagcctaatttgtgccac

SEQ ID NO: 2741280 - DNA, 25 bp, Homo sapien
gatgttattctcaaccagccagtgg

SEQ ID NO: 2741281 - DNA, 25 bp, Homo sapien
taagagctccagttgtgcaaaaagt

SEQ ID NO: 2741282 - DNA, 25 bp, Homo sapien
cctaaggtgttcagctgaggtttag

SEQ ID NO: 2741283 - DNA, 25 bp, Homo sapien
gggcccaggatgcctaaggtgttca

SEQ ID NO: 2741284 - DNA, 25 bp, Homo sapien
taatgctcacatggcgtccttttgc

SEQ ID NO: 2741285 - DNA, 25 bp, Homo sapien
tgatctctggatgttgctactggcc

SEQ ID NO: 2741286 - DNA, 25 bp, Homo sapien
tgcaatgacaccgagaagcagtgct

SEQ ID NO: 2741287 - DNA, 25 bp, Homo sapien
tctctaaatggcactatgggcaaaa

SEQ ID NO: 2741288 - DNA, 25 bp, Homo sapien
aacaggtccaagaccaagattcaac

SEQ ID NO: 2741289 - DNA, 25 bp, Homo sapien
caagattcaacatcaaaaccttttg

SEQ ID NO: 2741290 - DNA, 25 bp, Homo sapien
caacatcaaaaccttttggagaatt

SEQ ID NO: 2741291 - DNA, 25 bp, Homo sapien
aaaacaggtccaagaccaagattca

SEQ ID NO: 2741292 - DNA, 25 bp, Homo sapien
tgtcagcacaacttaaacaaaaagc

SEQ ID NO: 2741293 - DNA, 25 bp, Homo sapien
taaaaagttatgcactggttctaca

SEQ ID NO: 2741294 - DNA, 25 bp, Homo sapien
ccagctttccaatgtactgattata

SEQ ID NO: 2741295 - DNA, 25 bp, Homo sapien
atgtgtttggtgtcagcacaactta

SEQ ID NO: 2741296 - DNA, 25 bp, Homo sapien
gtctcattagtccaaccagctccag

SEQ ID NO: 2741297 - DNA, 25 bp, Homo sapien
cataatgcagatcgtaggaaaagct

SEQ ID NO: 2741298 - DNA, 25 bp, Homo sapien
tcactggaaattgtcatgatgcaca

SEQ ID NO: 2741299 - DNA, 25 bp, Homo sapien
taacaagtgcactctagttccagca

SEQ ID NO: 2741300 - DNA, 25 bp, Homo sapien
ggtgtgactgttcattacctacaga

SEQ ID NO: 2741301 - DNA, 25 bp, Homo sapien
tcaagacataacaggccattacatc

SEQ ID NO: 2741302 - DNA, 25 bp, Homo sapien
cactgtccaaataaggtggagaagc

SEQ ID NO: 2741303 - DNA, 25 bp, Homo sapien
tacacttgtaaatctacactcttgg

SEQ ID NO: 2741304 - DNA, 25 bp, Homo sapien
tcatcaaagagctgtctgggcggat

SEQ ID NO: 2741305 - DNA, 25 bp, Homo sapien
tacgaatggtgaagaacacctgctg

SEQ ID NO: 2741306 - DNA, 25 bp, Homo sapien
gctgtacttcaggagattggcgaca

SEQ ID NO: 2741307 - DNA, 25 bp, Homo sapien
caagagttagtccagtgcatcacac

SEQ ID NO: 2741308 - DNA, 25 bp, Homo sapien
tgagttacaaccctgtcccagaaga

SEQ ID NO: 2741309 - DNA, 25 bp, Homo sapien
catgaggtataaggtaacaacaacg

SEQ ID NO: 2741310 - DNA, 25 bp, Homo sapien
ggaccatcagttgcctaaatataaa

SEQ ID NO: 2741311 - DNA, 25 bp, Homo sapien
taaatacgtggtctgctgatcaaca

SEQ ID NO: 2741312 - DNA, 25 bp, Homo sapien
tatttaaaatatgtcaacctccttc

SEQ ID NO: 2741313 - DNA, 25 bp, Homo sapien
aaatatgtcaacctccttccaaaag

SEQ ID NO: 2741314 - DNA, 25 bp, Homo sapien
tgtcaacctccttccaaaagacgga

SEQ ID NO: 2741315 - DNA, 25 bp, Homo sapien
tatgtcaacctccttccaaaagacg

SEQ ID NO: 2741316 - DNA, 25 bp, Homo sapien
aatgaattattataaccccaacaca

SEQ ID NO: 2741317 - DNA, 25 bp, Homo sapien
tgaattattataaccccaacacaat

SEQ ID NO: 2741318 - DNA, 25 bp, Homo sapien
gaattattataaccccaacacaatg

SEQ ID NO: 2741319 - DNA, 25 bp, Homo sapien
atgaattattataaccccaacacaa

SEQ ID NO: 2741320 - DNA, 25 bp, Homo sapien
tcagacataccactttttatactgt

SEQ ID NO: 2741321 - DNA, 25 bp, Homo sapien
ctcagacataccactttttatactg

SEQ ID NO: 2741322 - DNA, 25 bp, Homo sapien
cagcctcagacataccactttttat

SEQ ID NO: 2741323 - DNA, 25 bp, Homo sapien
gcctcagacataccactttttatac

SEQ ID NO: 2741324 - DNA, 25 bp, Homo sapien
cacacagcgcgagtcctttgcatga

SEQ ID NO: 2741325 - DNA, 25 bp, Homo sapien
gaaaccagctgactagtctgacacc

SEQ ID NO: 2741326 - DNA, 25 bp, Homo sapien
cagcttagctgtcaactggaccaca

SEQ ID NO: 2741327 - DNA, 25 bp, Homo sapien
cacacgaggcaggaattgagattat

SEQ ID NO: 2741328 - DNA, 25 bp, Homo sapien
aaggcccaggctgacgagagggcgc

SEQ ID NO: 2741329 - DNA, 25 bp, Homo sapien
tgcagacagcgccaagcactttctc

SEQ ID NO: 2741330 - DNA, 25 bp, Homo sapien
agacctgagccagcaagggccgcaa

SEQ ID NO: 2741331 - DNA, 25 bp, Homo sapien
cactttctcagtgtctcggcagacc

SEQ ID NO: 2741332 - DNA, 25 bp, Homo sapien
ggcccaaaagatgccctgcaaacac

SEQ ID NO: 2741333 - DNA, 25 bp, Homo sapien
caaacactgcccagaacaagctgac

SEQ ID NO: 2741334 - DNA, 25 bp, Homo sapien
tattttggcccaaaagatgccctgc

SEQ ID NO: 2741335 - DNA, 25 bp, Homo sapien
tcttcctgcattccgtgggagtggg

SEQ ID NO: 2741336 - DNA, 25 bp, Homo sapien
catcgggaaactcagggtgccggct

SEQ ID NO: 2741337 - DNA, 25 bp, Homo sapien
ggtgccggctgacaccaccagggct

SEQ ID NO: 2741338 - DNA, 25 bp, Homo sapien
ggtcccaggaccatcgggaaactca

SEQ ID NO: 2741339 - DNA, 25 bp, Homo sapien
tcagggcggtgtggagggtcgctgc

SEQ ID NO: 2741340 - DNA, 25 bp, Homo sapien
gtgcccgagggcccacggggctgag

SEQ ID NO: 2741341 - DNA, 25 bp, Homo sapien
agtgcccgagggcccacggggctga

SEQ ID NO: 2741342 - DNA, 25 bp, Homo sapien
acacaggactgcccggccctggaag

SEQ ID NO: 2741343 - DNA, 25 bp, Homo sapien
gccacacaggactgcccggccctgg

SEQ ID NO: 2741344 - DNA, 25 bp, Homo sapien
tggaaggaggcagctcccctgagaa

SEQ ID NO: 2741345 - DNA, 25 bp, Homo sapien
gctcccctgagaaggacatggcctc

SEQ ID NO: 2741346 - DNA, 25 bp, Homo sapien
tttaaggctagacgggcattctgag

SEQ ID NO: 2741347 - DNA, 25 bp, Homo sapien
tcaccgagaaggagggatcttgaag

SEQ ID NO: 2741348 - DNA, 25 bp, Homo sapien
ttctgagaagggctgacgtctttca

SEQ ID NO: 2741349 - DNA, 25 bp, Homo sapien
ttattttaaggctagacgggcattc

SEQ ID NO: 2741350 - DNA, 25 bp, Homo sapien
gagttggaactcacaaaccgcagcc

SEQ ID NO: 2741351 - DNA, 25 bp, Homo sapien
tgattctatgctgacgtccccagtg

SEQ ID NO: 2741352 - DNA, 25 bp, Homo sapien
aagagcccttcgtcacctgcttggg

SEQ ID NO: 2741353 - DNA, 25 bp, Homo sapien
caggccctggcgtttgcatccagca

SEQ ID NO: 2741354 - DNA, 25 bp, Homo sapien
ggctgagacccgtggttcctccagg

SEQ ID NO: 2741355 - DNA, 25 bp, Homo sapien
ctgggtgtcctttcccgggtgcctg

SEQ ID NO: 2741356 - DNA, 25 bp, Homo sapien
ctgagacccgtggttcctccaggat

SEQ ID NO: 2741357 - DNA, 25 bp, Homo sapien
agacccgtggttcctccaggatgaa

SEQ ID NO: 2741358 - DNA, 25 bp, Homo sapien
cacagagcctctggacgtggcaggc

SEQ ID NO: 2741359 - DNA, 25 bp, Homo sapien
cagttcccgggccaggaacaggaag

SEQ ID NO: 2741360 - DNA, 25 bp, Homo sapien
aggcctgaatctgcccagggagccc

SEQ ID NO: 2741361 - DNA, 25 bp, Homo sapien
agacaacagccaggcaggaaggatg

SEQ ID NO: 2741362 - DNA, 25 bp, Homo sapien
tgtcccaccagggtatggcacagcc

SEQ ID NO: 2741363 - DNA, 25 bp, Homo sapien
agaaaccagctaaggccagcgctca

SEQ ID NO: 2741364 - DNA, 25 bp, Homo sapien
cacactgccccgtagagagggccgg

SEQ ID NO: 2741365 - DNA, 25 bp, Homo sapien
gactcagccatcattcggagagcag

SEQ ID NO: 2741366 - DNA, 25 bp, Homo sapien
ccacaagataagcaccagcttcttg

SEQ ID NO: 2741367 - DNA, 25 bp, Homo sapien
caggccatccctagccccgcgtcca

SEQ ID NO: 2741368 - DNA, 25 bp, Homo sapien
gctcgtggtaccggcccttcctgct

SEQ ID NO: 2741369 - DNA, 25 bp, Homo sapien
cagcttcttgggctcgtggtaccgg

SEQ ID NO: 2741370 - DNA, 25 bp, Homo sapien
gctggtggccccgatttagcagcac

SEQ ID NO: 2741371 - DNA, 25 bp, Homo sapien
gtggccccgatttagcagcactggg

SEQ ID NO: 2741372 - DNA, 25 bp, Homo sapien
gggttgtctgataacgccgctcgtc

SEQ ID NO: 2741373 - DNA, 25 bp, Homo sapien
ggacatcctgcctgcatttccctct

SEQ ID NO: 2741374 - DNA, 25 bp, Homo sapien
tcagcaggggttcatgggaaaggac

SEQ ID NO: 2741375 - DNA, 25 bp, Homo sapien
gaatctgggttttccggtcacactg

SEQ ID NO: 2741376 - DNA, 25 bp, Homo sapien
agatgcgggcattcattcccggagg

SEQ ID NO: 2741377 - DNA, 25 bp, Homo sapien
agcaggaagatgcgggcattcattc

SEQ ID NO: 2741378 - DNA, 25 bp, Homo sapien
actgaggagacaggtctgggagcag

SEQ ID NO: 2741379 - DNA, 25 bp, Homo sapien
tcagcaggtgccgagttcagagccg

SEQ ID NO: 2741380 - DNA, 25 bp, Homo sapien
cagtacgggagctgacacccaaggc

SEQ ID NO: 2741381 - DNA, 25 bp, Homo sapien
agccaagcaagctgcctctccgctg

SEQ ID NO: 2741382 - DNA, 25 bp, Homo sapien
ttcagagccgccacggccagtacgg

SEQ ID NO: 2741383 - DNA, 25 bp, Homo sapien
ccgggcccaggatcaccagagcctt

SEQ ID NO: 2741384 - DNA, 25 bp, Homo sapien
cgggcccaggatcaccagagcctta

SEQ ID NO: 2741385 - DNA, 25 bp, Homo sapien
gggcccaggatcaccagagccttac

SEQ ID NO: 2741386 - DNA, 25 bp, Homo sapien
gccctggcatatcttcctccaggtc

SEQ ID NO: 2741387 - DNA, 25 bp, Homo sapien
cttcctcagaggacgtctgccctgg

SEQ ID NO: 2741388 - DNA, 25 bp, Homo sapien
tgccctggcatatcttcctccaggt

SEQ ID NO: 2741389 - DNA, 25 bp, Homo sapien
tcagaggacgtctgccctggcatat

SEQ ID NO: 2741390 - DNA, 25 bp, Homo sapien
tttgccagtgtgtctgggtccccct

SEQ ID NO: 2741391 - DNA, 25 bp, Homo sapien
gccagtgtgtctgggtccccctgca

SEQ ID NO: 2741392 - DNA, 25 bp, Homo sapien
ttgccagtgtgtctgggtccccctg

SEQ ID NO: 2741393 - DNA, 25 bp, Homo sapien
tgtttgccagtgtgtctgggtcccc

SEQ ID NO: 2741394 - DNA, 25 bp, Homo sapien
ccgaggtcacatgtgcctcttccat

SEQ ID NO: 2741395 - DNA, 25 bp, Homo sapien
cagggctttgtgacaaattcagtgc

SEQ ID NO: 2741396 - DNA, 25 bp, Homo sapien
cattaaccttccactcattgccgag

SEQ ID NO: 2741397 - DNA, 25 bp, Homo sapien
caaattcagtgcagtagcccatggc

SEQ ID NO: 2741398 - DNA, 25 bp, Homo sapien
caggtcggccgtcagcaagatggat

SEQ ID NO: 2741399 - DNA, 25 bp, Homo sapien
tcattcggcggccttcatcgagcga

SEQ ID NO: 2741400 - DNA, 25 bp, Homo sapien
gtcgtggatagaattcatcaaacca

SEQ ID NO: 2741401 - DNA, 25 bp, Homo sapien
ctctcaggtagctgctcaggtcggc

SEQ ID NO: 2741402 - DNA, 25 bp, Homo sapien
cctggtttgagcctcctgctggaaa

SEQ ID NO: 2741403 - DNA, 25 bp, Homo sapien
tctaacgtgcgtactctgggatctc

SEQ ID NO: 2741404 - DNA, 25 bp, Homo sapien
gaagaaaagacccatgaacacagga

SEQ ID NO: 2741405 - DNA, 25 bp, Homo sapien
gacacagcatggtctgaggctcacg

SEQ ID NO: 2741406 - DNA, 25 bp, Homo sapien
ctggtttacattacactatagtttt

SEQ ID NO: 2741407 - DNA, 25 bp, Homo sapien
ggaggtttatcaattctatttatct

SEQ ID NO: 2741408 - DNA, 25 bp, Homo sapien
ttcttgatggttagcctggctggag

SEQ ID NO: 2741409 - DNA, 25 bp, Homo sapien
tagcttcctaaggtggaaggtaaga

SEQ ID NO: 2741410 - DNA, 25 bp, Homo sapien
gtgattgtgaatacagctgccctca

SEQ ID NO: 2741411 - DNA, 25 bp, Homo sapien
gtgaatcatgttccactgggttcct

SEQ ID NO: 2741412 - DNA, 25 bp, Homo sapien
tctcagctgcttcccgttcaggtga

SEQ ID NO: 2741413 - DNA, 25 bp, Homo sapien
cataaagtatgcagtcacttaggac

SEQ ID NO: 2741414 - DNA, 25 bp, Homo sapien
tgatcatggtaactcctgccgggta

SEQ ID NO: 2741415 - DNA, 25 bp, Homo sapien
gcagtccttcaaaaattatgcagtt

SEQ ID NO: 2741416 - DNA, 25 bp, Homo sapien
gaaatcatgcgggtcagcatatccg

SEQ ID NO: 2741417 - DNA, 25 bp, Homo sapien
gaagagagtgcaatgcagtccttca

SEQ ID NO: 2741418 - DNA, 25 bp, Homo sapien
ttcagctttacagagcagtgacatc

SEQ ID NO: 2741419 - DNA, 25 bp, Homo sapien
tcttcagctttacagagcagtgaca

SEQ ID NO: 2741420 - DNA, 25 bp, Homo sapien
cagctttacagagcagtgacatcat

SEQ ID NO: 2741421 - DNA, 25 bp, Homo sapien
tcttcttcagctttacagagcagtg

SEQ ID NO: 2741422 - DNA, 25 bp, Homo sapien
tggtcaagataaaattaggctcttc

SEQ ID NO: 2741423 - DNA, 25 bp, Homo sapien
gataaaattaggctcttctgcaggc

SEQ ID NO: 2741424 - DNA, 25 bp, Homo sapien
tcaagataaaattaggctcttctgc

SEQ ID NO: 2741425 - DNA, 25 bp, Homo sapien
ggtggtcaagataaaattaggctct

SEQ ID NO: 2741426 - DNA, 25 bp, Homo sapien
tccccaccttggtcaagaagcagat

SEQ ID NO: 2741427 - DNA, 25 bp, Homo sapien
cagatggcctttggatggttggatt

SEQ ID NO: 2741428 - DNA, 25 bp, Homo sapien
cccaccttggtcaagaagcagatgg

SEQ ID NO: 2741429 - DNA, 25 bp, Homo sapien
caccttggtcaagaagcagatggcc

SEQ ID NO: 2741430 - DNA, 25 bp, Homo sapien
gaatgccattgatgctgggcctcac

SEQ ID NO: 2741431 - DNA, 25 bp, Homo sapien
catgacgtgaccatcccattgacat

SEQ ID NO: 2741432 - DNA, 25 bp, Homo sapien
cccattgacattagtgataggatca

SEQ ID NO: 2741433 - DNA, 25 bp, Homo sapien
gctcttctcctttgacacgttcaga

SEQ ID NO: 2741434 - DNA, 25 bp, Homo sapien
ttgacacgttcagataaccatgacg

SEQ ID NO: 2741435 - DNA, 25 bp, Homo sapien
cctggtggccgatgtcatagagtgc

SEQ ID NO: 2741436 - DNA, 25 bp, Homo sapien
gggcccgtgacctgcgtgtctgact

SEQ ID NO: 2741437 - DNA, 25 bp, Homo sapien
cctggcaattcacagggagtttagg

SEQ ID NO: 2741438 - DNA, 25 bp, Homo sapien
gaagtagacaccagggccctatttc

SEQ ID NO: 2741439 - DNA, 25 bp, Homo sapien
gggtctcctggtattcacccatcaa

SEQ ID NO: 2741440 - DNA, 25 bp, Homo sapien
tggtattcacccatcaaggcttgct

SEQ ID NO: 2741441 - DNA, 25 bp, Homo sapien
tattcacccatcaaggcttgctcag

SEQ ID NO: 2741442 - DNA, 25 bp, Homo sapien
ccatcaaggcttgctcaggtggcat

SEQ ID NO: 2741443 - DNA, 25 bp, Homo sapien
ttctcaggctcctgaagcaaggagc

SEQ ID NO: 2741444 - DNA, 25 bp, Homo sapien
ttacaagacgaaagactgggttctc

SEQ ID NO: 2741445 - DNA, 25 bp, Homo sapien
tctcaggctcctgaagcaaggagca

SEQ ID NO: 2741446 - DNA, 25 bp, Homo sapien
tttcatgaaagaaagtggaagctac

SEQ ID NO: 2741447 - DNA, 25 bp, Homo sapien
agagagggactatgccctgacccct

SEQ ID NO: 2741448 - DNA, 25 bp, Homo sapien
tagaagacagaattcgatctgcctg

SEQ ID NO: 2741449 - DNA, 25 bp, Homo sapien
tccctgttgctctaggaggctcctg

SEQ ID NO: 2741450 - DNA, 25 bp, Homo sapien
agcagtttatagttctgagatggaa

SEQ ID NO: 2741451 - DNA, 25 bp, Homo sapien
ccttgcagcctagcagtttatagtt

SEQ ID NO: 2741452 - DNA, 25 bp, Homo sapien
tggccaaaatgatactaaccaaagg

SEQ ID NO: 2741453 - DNA, 25 bp, Homo sapien
agttgaagggggcaagcaagacctc

SEQ ID NO: 2741454 - DNA, 25 bp, Homo sapien
tcctggagcatgtgcagagagtttg

SEQ ID NO: 2741455 - DNA, 25 bp, Homo sapien
cgttctcaagggagtcagatcaggg

SEQ ID NO: 2741456 - DNA, 25 bp, Homo sapien
gggtattaagcaggaaaccactgtg

SEQ ID NO: 2741457 - DNA, 25 bp, Homo sapien
tatgatcctagctggaattagcacc

SEQ ID NO: 2741458 - DNA, 25 bp, Homo sapien
caagaacgatgacctttggccgcaa

SEQ ID NO: 2741459 - DNA, 25 bp, Homo sapien
tggagcccaagtggccaaaggcctt

SEQ ID NO: 2741460 - DNA, 25 bp, Homo sapien
caagtttatcaagctgaaccagcag

SEQ ID NO: 2741461 - DNA, 25 bp, Homo sapien
gagccacgggcagttctttgaccag

SEQ ID NO: 2741462 - DNA, 25 bp, Homo sapien
agggcagccttgaaccgtcccctgg

SEQ ID NO: 2741463 - DNA, 25 bp, Homo sapien
tgtggggcgctatcctctttgtggc

SEQ ID NO: 2741464 - DNA, 25 bp, Homo sapien
gaggaggcatccctaggactgcggg

SEQ ID NO: 2741465 - DNA, 25 bp, Homo sapien
cagggcttgtgctgtggggcgctat

SEQ ID NO: 2741466 - DNA, 25 bp, Homo sapien
ccatcagcaatcactgcgtcctggt

SEQ ID NO: 2741467 - DNA, 25 bp, Homo sapien
aggatctgccttccatcagcaatca

SEQ ID NO: 2741468 - DNA, 25 bp, Homo sapien
atcatccaggatctgccttccatca

SEQ ID NO: 2741469 - DNA, 25 bp, Homo sapien
agcaatcactgcgtcctggtccttc

SEQ ID NO: 2741470 - DNA, 25 bp, Homo sapien
cggagcaggccaagttcggggccag

SEQ ID NO: 2741471 - DNA, 25 bp, Homo sapien
ggagcaggccaagttcggggccagg

SEQ ID NO: 2741472 - DNA, 25 bp, Homo sapien
caggccaagttcggggccaggacgt

SEQ ID NO: 2741473 - DNA, 25 bp, Homo sapien
ccggagcaggccaagttcggggcca

SEQ ID NO: 2741474 - DNA, 25 bp, Homo sapien
gcgcgcggccctttgtttctctaga

SEQ ID NO: 2741475 - DNA, 25 bp, Homo sapien
tctagaaccctgcacgattcgtggt

SEQ ID NO: 2741476 - DNA, 25 bp, Homo sapien
caagttagtgagcagtcagtcagta

SEQ ID NO: 2741477 - DNA, 25 bp, Homo sapien
gtcagtaaccacaggccgcagagtt

SEQ ID NO: 2741478 - DNA, 25 bp, Homo sapien
tcttggatctacaaaccagtgtttc

SEQ ID NO: 2741479 - DNA, 25 bp, Homo sapien
tttggctcctcatgtcttggatcta

SEQ ID NO: 2741480 - DNA, 25 bp, Homo sapien
tcatgtcttggatctacaaaccagt

SEQ ID NO: 2741481 - DNA, 25 bp, Homo sapien
ggctcctcatgtcttggatctacaa

SEQ ID NO: 2741482 - DNA, 25 bp, Homo sapien
tgacgggctggggacgttgggtaga

SEQ ID NO: 2741483 - DNA, 25 bp, Homo sapien
aaaaatgggcgggatgtggaacgct

SEQ ID NO: 2741484 - DNA, 25 bp, Homo sapien
ggatgtggaacgctgcgttgccggg

SEQ ID NO: 2741485 - DNA, 25 bp, Homo sapien
tgggcgggatgtggaacgctgcgtt

SEQ ID NO: 2741486 - DNA, 25 bp, Homo sapien
agggctgcaccgcacaggttccgcc

SEQ ID NO: 2741487 - DNA, 25 bp, Homo sapien
gttccgcccctacttcagcgtcctc

SEQ ID NO: 2741488 - DNA, 25 bp, Homo sapien
atgcgtgcttcttcccgcgcggctc

SEQ ID NO: 2741489 - DNA, 25 bp, Homo sapien
ctcctgtacggccgctactctgcgc

SEQ ID NO: 2741490 - DNA, 25 bp, Homo sapien
tgagaaaccaggtcaagcaggccgt

SEQ ID NO: 2741491 - DNA, 25 bp, Homo sapien
accaggtcaagcaggccgtcgctgg

SEQ ID NO: 2741492 - DNA, 25 bp, Homo sapien
aaccaggtcaagcaggccgtcgctg

SEQ ID NO: 2741493 - DNA, 25 bp, Homo sapien
ctttttgagaaaccaggtcaagcag

SEQ ID NO: 2741494 - DNA, 25 bp, Homo sapien
cgaggaagcgggaacacacaggccc

SEQ ID NO: 2741495 - DNA, 25 bp, Homo sapien
aaggcttctcgccaggacccgcgac

SEQ ID NO: 2741496 - DNA, 25 bp, Homo sapien
ctacacagagctcgcgtccgaggaa

SEQ ID NO: 2741497 - DNA, 25 bp, Homo sapien
ccggtgctttccgaaaggcttctcg

SEQ ID NO: 2741498 - DNA, 25 bp, Homo sapien
gaaacagcagcgatgaacgaaacaa

SEQ ID NO: 2741499 - DNA, 25 bp, Homo sapien
gcgagaaacagcagcgatgaacgaa

SEQ ID NO: 2741500 - DNA, 25 bp, Homo sapien
acagcagcgatgaacgaaacaaaac

SEQ ID NO: 2741501 - DNA, 25 bp, Homo sapien
aggcagcgagaaacagcagcgatga

SEQ ID NO: 2741502 - DNA, 25 bp, Homo sapien
gaacttcaaaaacgagtagcggctc

SEQ ID NO: 2741503 - DNA, 25 bp, Homo sapien
ggcaggttcgaaactcaggagtccg

SEQ ID NO: 2741504 - DNA, 25 bp, Homo sapien
cagtccgtgctctggagaaatccca

SEQ ID NO: 2741505 - DNA, 25 bp, Homo sapien
gcaagattctcgaacatgtcgggag

SEQ ID NO: 2741506 - DNA, 25 bp, Homo sapien
tgctggctgggtataaattggatcc

SEQ ID NO: 2741507 - DNA, 25 bp, Homo sapien
ctaggatcagggtagtgggtcccca

SEQ ID NO: 2741508 - DNA, 25 bp, Homo sapien
gatgtgctggctgggtataaattgg

SEQ ID NO: 2741509 - DNA, 25 bp, Homo sapien
caggcagggtcaaatggatgtgctg

SEQ ID NO: 2741510 - DNA, 25 bp, Homo sapien
cttgccaaagacagcggtgcctgtc

SEQ ID NO: 2741511 - DNA, 25 bp, Homo sapien
ggatatttctccacataatcggccc

SEQ ID NO: 2741512 - DNA, 25 bp, Homo sapien
cataatcggccctcggttttgtgct

SEQ ID NO: 2741513 - DNA, 25 bp, Homo sapien
tacttgctgattatcctgccaacag

SEQ ID NO: 2741514 - DNA, 25 bp, Homo sapien
caacaggaatttgggtgtgcggaaa

SEQ ID NO: 2741515 - DNA, 25 bp, Homo sapien
taagtgaggtacatgtggcggtcta

SEQ ID NO: 2741516 - DNA, 25 bp, Homo sapien
tgtatggttgagctggactgctgcc

SEQ ID NO: 2741517 - DNA, 25 bp, Homo sapien
caaaacccaagcagtgtaagtgagg

SEQ ID NO: 2741518 - DNA, 25 bp, Homo sapien
ttcaaagtccaaggtgagcatgcct

SEQ ID NO: 2741519 - DNA, 25 bp, Homo sapien
gaggctgactaccaggaccactggc

SEQ ID NO: 2741520 - DNA, 25 bp, Homo sapien
tggtgccacagagagtaaaggtcta

SEQ ID NO: 2741521 - DNA, 25 bp, Homo sapien
cacgataattcttgtgtcagaaggg

SEQ ID NO: 2741522 - DNA, 25 bp, Homo sapien
tccattctgagtacacttcagaggg

SEQ ID NO: 2741523 - DNA, 25 bp, Homo sapien
caggtggaagttgagttcggttcac

SEQ ID NO: 2741524 - DNA, 25 bp, Homo sapien
ggtagctacctctgcgcaggtggaa

SEQ ID NO: 2741525 - DNA, 25 bp, Homo sapien
tgtgaatctccactttgttcaaccc

SEQ ID NO: 2741526 - DNA, 25 bp, Homo sapien
ttaaagacccagctacctctacgca

SEQ ID NO: 2741527 - DNA, 25 bp, Homo sapien
cggcggcgggctgtgagaaccgcag

SEQ ID NO: 2741528 - DNA, 25 bp, Homo sapien
tgtgagaaccgcagaagaacgctgg

SEQ ID NO: 2741529 - DNA, 25 bp, Homo sapien
caaagccacgtttctagggtgatgc

SEQ ID NO: 2741530 - DNA, 25 bp, Homo sapien
tgcagccccagtaagttcctggcgg

SEQ ID NO: 2741531 - DNA, 25 bp, Homo sapien
atttacaagaacaccgcggcctgag

SEQ ID NO: 2741532 - DNA, 25 bp, Homo sapien
tgaggccggagagtcccttcaaccc

SEQ ID NO: 2741533 - DNA, 25 bp, Homo sapien
aacatggccgaaaccaggaagctgc

SEQ ID NO: 2741534 - DNA, 25 bp, Homo sapien
ctaatttacaagaacaccgcggcct

SEQ ID NO: 2741535 - DNA, 25 bp, Homo sapien
tggagaacggtcgttgggcaggtcc

SEQ ID NO: 2741536 - DNA, 25 bp, Homo sapien
tgcggaggtcgggaatggagaacgg

SEQ ID NO: 2741537 - DNA, 25 bp, Homo sapien
agaaccacccgggtgtgcgcagctc

SEQ ID NO: 2741538 - DNA, 25 bp, Homo sapien
gcaggtccgggtacccgtagccaga

SEQ ID NO: 2741539 - DNA, 25 bp, Homo sapien
caactgaggtcgaggacgtgcctga

SEQ ID NO: 2741540 - DNA, 25 bp, Homo sapien
atgtgcacgtggcaactgaggtcga

SEQ ID NO: 2741541 - DNA, 25 bp, Homo sapien
ggtcgaggacgtgcctgagagagag

SEQ ID NO: 2741542 - DNA, 25 bp, Homo sapien
cgtggcaactgaggtcgaggacgtg

SEQ ID NO: 2741543 - DNA, 25 bp, Homo sapien
gggttaggccagcacaggacgaaaa

SEQ ID NO: 2741544 - DNA, 25 bp, Homo sapien
aggctttgttagagccggcagctga

SEQ ID NO: 2741545 - DNA, 25 bp, Homo sapien
tggagtctggtggagaaagaccgac

SEQ ID NO: 2741546 - DNA, 25 bp, Homo sapien
gaaagacagaggctttgttagagcc

SEQ ID NO: 2741547 - DNA, 25 bp, Homo sapien
gttctccacattaaagtctaccagt

SEQ ID NO: 2741548 - DNA, 25 bp, Homo sapien
gctgagaatttgcatggttacaagt

SEQ ID NO: 2741549 - DNA, 25 bp, Homo sapien
taaagtctaccagtcctgactggta

SEQ ID NO: 2741550 - DNA, 25 bp, Homo sapien
agtttctgatgcaggaagtctgggt

SEQ ID NO: 2741551 - DNA, 25 bp, Homo sapien
ggcaacagaacaaggccccatcaat

SEQ ID NO: 2741552 - DNA, 25 bp, Homo sapien
aggcaacagaacaaggccccatcaa

SEQ ID NO: 2741553 - DNA, 25 bp, Homo sapien
gcaacagaacaaggccccatcaatc

SEQ ID NO: 2741554 - DNA, 25 bp, Homo sapien
tggtccccaccagctatatggaggc

SEQ ID NO: 2741555 - DNA, 25 bp, Homo sapien
cagggacactctacaagtaactggt

SEQ ID NO: 2741556 - DNA, 25 bp, Homo sapien
tataaggccactgcgatggtctgaa

SEQ ID NO: 2741557 - DNA, 25 bp, Homo sapien
agggtccacccgctttctgatttgc

SEQ ID NO: 2741558 - DNA, 25 bp, Homo sapien
tgaactcagttccaccatgtgcttg

SEQ ID NO: 2741559 - DNA, 25 bp, Homo sapien
caaaggacctagagttgtgtggtac

SEQ ID NO: 2741560 - DNA, 25 bp, Homo sapien
tcaggccttccaacttagaccaagc

SEQ ID NO: 2741561 - DNA, 25 bp, Homo sapien
gatagtgcctgcctacattgagggt

SEQ ID NO: 2741562 - DNA, 25 bp, Homo sapien
aagccggtggcatggcctgatccaa

SEQ ID NO: 2741563 - DNA, 25 bp, Homo sapien
tgccagggtcacaatataccatctg

SEQ ID NO: 2741564 - DNA, 25 bp, Homo sapien
gtaaatatcaatccacagaggaaga

SEQ ID NO: 2741565 - DNA, 25 bp, Homo sapien
cctcacaacagttaccgtggtaaga

SEQ ID NO: 2741566 - DNA, 25 bp, Homo sapien
aattaattcttcatccagctgatgg

SEQ ID NO: 2741567 - DNA, 25 bp, Homo sapien
attaattcttcatccagctgatggc

SEQ ID NO: 2741568 - DNA, 25 bp, Homo sapien
aaattaattcttcatccagctgatg

SEQ ID NO: 2741569 - DNA, 25 bp, Homo sapien
ctaaattaattcttcatccagctga

SEQ ID NO: 2741570 - DNA, 25 bp, Homo sapien
ggcggctgtcccttctcgtgaacat

SEQ ID NO: 2741571 - DNA, 25 bp, Homo sapien
ggagagtcaacatcctcaacaactt

SEQ ID NO: 2741572 - DNA, 25 bp, Homo sapien
tcgtgaacatcccttcaagagaagc

SEQ ID NO: 2741573 - DNA, 25 bp, Homo sapien
ccttgtacttgaaggtgcatcagct

SEQ ID NO: 2741574 - DNA, 25 bp, Homo sapien
gttctggaccagcataaaaggatcc

SEQ ID NO: 2741575 - DNA, 25 bp, Homo sapien
cagtaacagctctggccttagggtc

SEQ ID NO: 2741576 - DNA, 25 bp, Homo sapien
gaaagcctacatgtcctactccagc

SEQ ID NO: 2741577 - DNA, 25 bp, Homo sapien
tgaatgcgacatctgtgggaaaacc

SEQ ID NO: 2741578 - DNA, 25 bp, Homo sapien
cacatgtctcagtgggtgcgtttct

SEQ ID NO: 2741579 - DNA, 25 bp, Homo sapien
ccagcgtcatgttaggtctgctcaa

SEQ ID NO: 2741580 - DNA, 25 bp, Homo sapien
gtgggccacaactgcgacgtttgaa

SEQ ID NO: 2741581 - DNA, 25 bp, Homo sapien
tctgctcaacgttccgagaagggcc

SEQ ID NO: 2741582 - DNA, 25 bp, Homo sapien
gaagaggagaactggcctaatgctc

SEQ ID NO: 2741583 - DNA, 25 bp, Homo sapien
tctgtgaatggacctcacggcatgg

SEQ ID NO: 2741584 - DNA, 25 bp, Homo sapien
cacggcatggaaacggatgacagga

SEQ ID NO: 2741585 - DNA, 25 bp, Homo sapien
cctaatgctcaaggtgcggaagcca

SEQ ID NO: 2741586 - DNA, 25 bp, Homo sapien
gagactcagaaccaaactgagcatg

SEQ ID NO: 2741587 - DNA, 25 bp, Homo sapien
tcccagcttgaggagactcagaacc

SEQ ID NO: 2741588 - DNA, 25 bp, Homo sapien
ctgatcccagcttgaggagactcag

SEQ ID NO: 2741589 - DNA, 25 bp, Homo sapien
gaaccaaactgagcatgagagccat

SEQ ID NO: 2741590 - DNA, 25 bp, Homo sapien
gaatcgaccaataacaggagctgaa

SEQ ID NO: 2741591 - DNA, 25 bp, Homo sapien
tctgaatcgaccaataacaggagct

SEQ ID NO: 2741592 - DNA, 25 bp, Homo sapien
atcgaccaataacaggagctgaaat

SEQ ID NO: 2741593 - DNA, 25 bp, Homo sapien
tgaatcgaccaataacaggagctga

SEQ ID NO: 2741594 - DNA, 25 bp, Homo sapien
tgtggcatctgcataaatggctggt

SEQ ID NO: 2741595 - DNA, 25 bp, Homo sapien
ggtggaccacgctagagaactggcc

SEQ ID NO: 2741596 - DNA, 25 bp, Homo sapien
gaaacaggagaatgctgcgtcctcc

SEQ ID NO: 2741597 - DNA, 25 bp, Homo sapien
ggaactaatcctgcacccatagagg

SEQ ID NO: 2741598 - DNA, 25 bp, Homo sapien
ctgtctcagcctctcaaggtgttgg

SEQ ID NO: 2741599 - DNA, 25 bp, Homo sapien
tcctgtctcagcctctcaaggtgtt

SEQ ID NO: 2741600 - DNA, 25 bp, Homo sapien
tcctcctgtctcagcctctcaaggt

SEQ ID NO: 2741601 - DNA, 25 bp, Homo sapien
cctcctgtctcagcctctcaaggtg

SEQ ID NO: 2741602 - DNA, 25 bp, Homo sapien
ggagtcgtatgccaattgtagtgac

SEQ ID NO: 2741603 - DNA, 25 bp, Homo sapien
gataatccactaccgtcagagcagc

SEQ ID NO: 2741604 - DNA, 25 bp, Homo sapien
ttgtagtgacactactaagttcgga

SEQ ID NO: 2741605 - DNA, 25 bp, Homo sapien
gacactactaagttcggataatcca

SEQ ID NO: 2741606 - DNA, 25 bp, Homo sapien
tctatcaacatatcccgtgatggaa

SEQ ID NO: 2741607 - DNA, 25 bp, Homo sapien
agcccgaggactgacagagtagctg

SEQ ID NO: 2741608 - DNA, 25 bp, Homo sapien
atgtctctatcaacatatcccgtga

SEQ ID NO: 2741609 - DNA, 25 bp, Homo sapien
cagagtagctggatgtctctatcaa

SEQ ID NO: 2741610 - DNA, 25 bp, Homo sapien
tcttggacggtcagagagatctcca

SEQ ID NO: 2741611 - DNA, 25 bp, Homo sapien
tggattccacctctcggctcagatg

SEQ ID NO: 2741612 - DNA, 25 bp, Homo sapien
gctcagatgagcatgccgcatggaa

SEQ ID NO: 2741613 - DNA, 25 bp, Homo sapien
tggaacaggatatgctcccggcgtt

SEQ ID NO: 2741614 - DNA, 25 bp, Homo sapien
ctttactagtaatgtgagtcactta

SEQ ID NO: 2741615 - DNA, 25 bp, Homo sapien
atttataggtacagacttccatttt

SEQ ID NO: 2741616 - DNA, 25 bp, Homo sapien
ctttgtgtgtctttactagtaatgt

SEQ ID NO: 2741617 - DNA, 25 bp, Homo sapien
gtcacttatagacagtagtatatgg

SEQ ID NO: 2741618 - DNA, 25 bp, Homo sapien
actctctaccaagtccacggggcag

SEQ ID NO: 2741619 - DNA, 25 bp, Homo sapien
ttgtattgtccctgatctagcagga

SEQ ID NO: 2741620 - DNA, 25 bp, Homo sapien
cagtggcagcctgtctggagcagtt

SEQ ID NO: 2741621 - DNA, 25 bp, Homo sapien
aaaaagttataagaatgggcattct

SEQ ID NO: 2741622 - DNA, 25 bp, Homo sapien
ctcttgtgtctcactaagtgttctt

SEQ ID NO: 2741623 - DNA, 25 bp, Homo sapien
aattttatcactatagtaatccatc

SEQ ID NO: 2741624 - DNA, 25 bp, Homo sapien
gtaatccatcaaatggcaatgtttt

SEQ ID NO: 2741625 - DNA, 25 bp, Homo sapien
ctccatttctagtctcttgtgtctc

SEQ ID NO: 2741626 - DNA, 25 bp, Homo sapien
tgtacgtagcatgacacttttatct

SEQ ID NO: 2741627 - DNA, 25 bp, Homo sapien
attctcttgtacgtagcatgacact

SEQ ID NO: 2741628 - DNA, 25 bp, Homo sapien
taggttatttacaccatctctcatc

SEQ ID NO: 2741629 - DNA, 25 bp, Homo sapien
aaatgtgccatgtagaggacctttt

SEQ ID NO: 2741630 - DNA, 25 bp, Homo sapien
caagaaccctgaccgaattttcatg

SEQ ID NO: 2741631 - DNA, 25 bp, Homo sapien
gaaccctgaccgaattttcatgagt

SEQ ID NO: 2741632 - DNA, 25 bp, Homo sapien
accgaattttcatgagtggctccag

SEQ ID NO: 2741633 - DNA, 25 bp, Homo sapien
ccctgaccgaattttcatgagtggc

SEQ ID NO: 2741634 - DNA, 25 bp, Homo sapien
caggtgccacgatataggctcgaaa

SEQ ID NO: 2741635 - DNA, 25 bp, Homo sapien
cacgatataggctcgaaaaaggtat

SEQ ID NO: 2741636 - DNA, 25 bp, Homo sapien
tagccaggtgccacgatataggctc

SEQ ID NO: 2741637 - DNA, 25 bp, Homo sapien
tgccacgatataggctcgaaaaagg

SEQ ID NO: 2741638 - DNA, 25 bp, Homo sapien
tgctggaaccatgaataaggcaccg

SEQ ID NO: 2741639 - DNA, 25 bp, Homo sapien
ctggaggctaggactagaagaagag

SEQ ID NO: 2741640 - DNA, 25 bp, Homo sapien
catgaataaggcaccggcccatgct

SEQ ID NO: 2741641 - DNA, 25 bp, Homo sapien
ccggcccatgcttctctctctcgct

SEQ ID NO: 2741642 - DNA, 25 bp, Homo sapien
gcctgtccgtgctttcttctccagt

SEQ ID NO: 2741643 - DNA, 25 bp, Homo sapien
tgcctgtccgtgctttcttctccag

SEQ ID NO: 2741644 - DNA, 25 bp, Homo sapien
ctgcctgtccgtgctttcttctcca

SEQ ID NO: 2741645 - DNA, 25 bp, Homo sapien
gcgtgtttccgggcgtctctcaatt

SEQ ID NO: 2741646 - DNA, 25 bp, Homo sapien
tgcgtgtttccgggcgtctctcaat

SEQ ID NO: 2741647 - DNA, 25 bp, Homo sapien
ctgcgtgtttccgggcgtctctcaa

SEQ ID NO: 2741648 - DNA, 25 bp, Homo sapien
tttctgcctgactttacttccttcc

SEQ ID NO: 2741649 - DNA, 25 bp, Homo sapien
caggatgggtctcagcatcactctg

SEQ ID NO: 2741650 - DNA, 25 bp, Homo sapien
tgtgttcccgtatctgtccctgttc

SEQ ID NO: 2741651 - DNA, 25 bp, Homo sapien
cactagtgccctcaattccctgaaa

SEQ ID NO: 2741652 - DNA, 25 bp, Homo sapien
tcagaaacgcagagcttcgggtgag

SEQ ID NO: 2741653 - DNA, 25 bp, Homo sapien
aaacgcagagcttcgggtgagccgt

SEQ ID NO: 2741654 - DNA, 25 bp, Homo sapien
ggtgagccgtctctggatccagagt

SEQ ID NO: 2741655 - DNA, 25 bp, Homo sapien
agcttcgggtgagccgtctctggat

SEQ ID NO: 2741656 - DNA, 25 bp, Homo sapien
tgaggacccagtacccatgatcggg

SEQ ID NO: 2741657 - DNA, 25 bp, Homo sapien
taagccttcaaaccgacatgtcagg

SEQ ID NO: 2741658 - DNA, 25 bp, Homo sapien
tgctcattataggacggatactcaa

SEQ ID NO: 2741659 - DNA, 25 bp, Homo sapien
tgggattgcagaggccctttgccaa

SEQ ID NO: 2741660 - DNA, 25 bp, Homo sapien
ctggggaggaagggcgtggttgcct

SEQ ID NO: 2741661 - DNA, 25 bp, Homo sapien
aggaagggcgtggttgcctgtgagg

SEQ ID NO: 2741662 - DNA, 25 bp, Homo sapien
cgtggttgcctgtgaggaggactca

SEQ ID NO: 2741663 - DNA, 25 bp, Homo sapien
ctacatttcacccctggggaggaag

SEQ ID NO: 2741664 - DNA, 25 bp, Homo sapien
gaattcctgacggttcttcacctga

SEQ ID NO: 2741665 - DNA, 25 bp, Homo sapien
tacttaatctacaccacagcctgtg

SEQ ID NO: 2741666 - DNA, 25 bp, Homo sapien
ttcaagatcacttagccagatggag

SEQ ID NO: 2741667 - DNA, 25 bp, Homo sapien
ctttggatctgggagagagacctta

SEQ ID NO: 2741668 - DNA, 25 bp, Homo sapien
tcctcttgacactgtccgtactcag

SEQ ID NO: 2741669 - DNA, 25 bp, Homo sapien
tcttgacactgtccgtactcaggta

SEQ ID NO: 2741670 - DNA, 25 bp, Homo sapien
cactgtccgtactcaggtacctgag

SEQ ID NO: 2741671 - DNA, 25 bp, Homo sapien
gacactgtccgtactcaggtacctg

SEQ ID NO: 2741672 - DNA, 25 bp, Homo sapien
atcctcatatctctaatgcctggct

SEQ ID NO: 2741673 - DNA, 25 bp, Homo sapien
agacagttcacagcagtccatcctc

SEQ ID NO: 2741674 - DNA, 25 bp, Homo sapien
ttcctagacagttcacagcagtcca

SEQ ID NO: 2741675 - DNA, 25 bp, Homo sapien
ctggtagtttctgggcttgtattta

SEQ ID NO: 2741676 - DNA, 25 bp, Homo sapien
ctgcctccaggacttccgcagccat

SEQ ID NO: 2741677 - DNA, 25 bp, Homo sapien
ttgttagcaacaagggatggtttcc

SEQ ID NO: 2741678 - DNA, 25 bp, Homo sapien
tgttagcaacaagggatggtttccg

SEQ ID NO: 2741679 - DNA, 25 bp, Homo sapien
agctgtcggtctcaaatgacttagt

SEQ ID NO: 2741680 - DNA, 25 bp, Homo sapien
taatgggaattagcagcttcatgca

SEQ ID NO: 2741681 - DNA, 25 bp, Homo sapien
tgtcggtctcaaatgacttagtgaa

SEQ ID NO: 2741682 - DNA, 25 bp, Homo sapien
gctgtcggtctcaaatgacttagtg

SEQ ID NO: 2741683 - DNA, 25 bp, Homo sapien
gcgcaggagccgtggagaggctctt

SEQ ID NO: 2741684 - DNA, 25 bp, Homo sapien
ggttgatctcacactatgaaaacag

SEQ ID NO: 2741685 - DNA, 25 bp, Homo sapien
gaacgatgtcaaactgtgcatttct

SEQ ID NO: 2741686 - DNA, 25 bp, Homo sapien
gatggatgatttggaggtcaggcca

SEQ ID NO: 2741687 - DNA, 25 bp, Homo sapien
caccagctcgtagaaactgagaacc

SEQ ID NO: 2741688 - DNA, 25 bp, Homo sapien
ctgacaccagctcgtagaaactgag

SEQ ID NO: 2741689 - DNA, 25 bp, Homo sapien
accagctcgtagaaactgagaacca

SEQ ID NO: 2741690 - DNA, 25 bp, Homo sapien
gacaccagctcgtagaaactgagaa

SEQ ID NO: 2741691 - DNA, 25 bp, Homo sapien
ctatacaccaggctttgtcttgatg

SEQ ID NO: 2741692 - DNA, 25 bp, Homo sapien
acaccaggctttgtcttgatggtta

SEQ ID NO: 2741693 - DNA, 25 bp, Homo sapien
tacaccaggctttgtcttgatggtt

SEQ ID NO: 2741694 - DNA, 25 bp, Homo sapien
tatacaccaggctttgtcttgatgg

SEQ ID NO: 2741695 - DNA, 25 bp, Homo sapien
gtatatgtctgtttctccggccagc

SEQ ID NO: 2741696 - DNA, 25 bp, Homo sapien
tgctgtcatttgtcttgccgacagc

SEQ ID NO: 2741697 - DNA, 25 bp, Homo sapien
caagccaggcaaacagtttttagta

SEQ ID NO: 2741698 - DNA, 25 bp, Homo sapien
ttgtcttgccgacagcgtctccctt

SEQ ID NO: 2741699 - DNA, 25 bp, Homo sapien
gtattttcttggtacagctttgtct

SEQ ID NO: 2741700 - DNA, 25 bp, Homo sapien
ttttagccttagagagacacgcccc

SEQ ID NO: 2741701 - DNA, 25 bp, Homo sapien
catacaggccgatgtccgagggagt

SEQ ID NO: 2741702 - DNA, 25 bp, Homo sapien
ggtggaccacagcatggaactgatt

SEQ ID NO: 2741703 - DNA, 25 bp, Homo sapien
ggtggcctcctcatcgtaaatctgg

SEQ ID NO: 2741704 - DNA, 25 bp, Homo sapien
ggcagagtaactggatacctccgtc

SEQ ID NO: 2741705 - DNA, 25 bp, Homo sapien
taactggatacctccgtcaacatat

SEQ ID NO: 2741706 - DNA, 25 bp, Homo sapien
ctccgtcaacatatcccacgatgga

SEQ ID NO: 2741707 - DNA, 25 bp, Homo sapien
tccgtcaacatatcccacgatggaa

SEQ ID NO: 2741708 - DNA, 25 bp, Homo sapien
ttggctgtgggctgggggaaccagc

SEQ ID NO: 2741709 - DNA, 25 bp, Homo sapien
acttggctgtgggctgggggaacca

SEQ ID NO: 2741710 - DNA, 25 bp, Homo sapien
ttccacttggctgtgggctggggga

SEQ ID NO: 2741711 - DNA, 25 bp, Homo sapien
ctttccacttggctgtgggctgggg

SEQ ID NO: 2741712 - DNA, 25 bp, Homo sapien
tggaacacaatatgctcccagcatt

SEQ ID NO: 2741713 - DNA, 25 bp, Homo sapien
tcaataccttggattccacctcatg

SEQ ID NO: 2741714 - DNA, 25 bp, Homo sapien
atcatacaggctgtacccatctgca

SEQ ID NO: 2741715 - DNA, 25 bp, Homo sapien
ttcctggactataatggagatctcc

SEQ ID NO: 2741716 - DNA, 25 bp, Homo sapien
aacaattatcatccccatgacaaca

SEQ ID NO: 2741717 - DNA, 25 bp, Homo sapien
gcaccacagagtaacccgagtaaaa

SEQ ID NO: 2741718 - DNA, 25 bp, Homo sapien
aaatagaagccaggcgccaaggtga

SEQ ID NO: 2741719 - DNA, 25 bp, Homo sapien
acccgagtaaaatagaagccaggcg

SEQ ID NO: 2741720 - DNA, 25 bp, Homo sapien
gggtcgtccagaggctcaaactgtg

SEQ ID NO: 2741721 - DNA, 25 bp, Homo sapien
cagggtcgtccagaggctcaaactg

SEQ ID NO: 2741722 - DNA, 25 bp, Homo sapien
agccagggtcgtccagaggctcaaa

SEQ ID NO: 2741723 - DNA, 25 bp, Homo sapien
gagggacccgggagaaccatgtgtg

SEQ ID NO: 2741724 - DNA, 25 bp, Homo sapien
gcctgtccgtgctttcttctccagt

SEQ ID NO: 2741725 - DNA, 25 bp, Homo sapien
tgcctgtccgtgctttcttctccag

SEQ ID NO: 2741726 - DNA, 25 bp, Homo sapien
ctgcctgtccgtgctttcttctcca

SEQ ID NO: 2741727 - DNA, 25 bp, Homo sapien
gcgtgtttccgggcgtctctcaatt

SEQ ID NO: 2741728 - DNA, 25 bp, Homo sapien
tgcgtgtttccgggcgtctctcaat

SEQ ID NO: 2741729 - DNA, 25 bp, Homo sapien
ctgcgtgtttccgggcgtctctcaa

SEQ ID NO: 2741730 - DNA, 25 bp, Homo sapien
tcagaaacgcagagcttcgggtgag

SEQ ID NO: 2741731 - DNA, 25 bp, Homo sapien
agcttcgggtgagccgtctctggat

SEQ ID NO: 2741732 - DNA, 25 bp, Homo sapien
ggtgagccgtctctggatccagagt

SEQ ID NO: 2741733 - DNA, 25 bp, Homo sapien
aaacgcagagcttcgggtgagccgt

SEQ ID NO: 2741734 - DNA, 25 bp, Homo sapien
acccattgttgggagacaaagtcac

SEQ ID NO: 2741735 - DNA, 25 bp, Homo sapien
gtcacattgttcttccccctgtcta

SEQ ID NO: 2741736 - DNA, 25 bp, Homo sapien
tgaggacccaatacccattgttggg

SEQ ID NO: 2741737 - DNA, 25 bp, Homo sapien
tgtctacgtcatcccgacacactcc

SEQ ID NO: 2741738 - DNA, 25 bp, Homo sapien
catacatcgcatgctggatataggg

SEQ ID NO: 2741739 - DNA, 25 bp, Homo sapien
gacatatgaatatgggagtcccctt

SEQ ID NO: 2741740 - DNA, 25 bp, Homo sapien
ccttttcctcgtcatacatcgcatg

SEQ ID NO: 2741741 - DNA, 25 bp, Homo sapien
tatagggtctcaacaagccttcaaa

SEQ ID NO: 2741742 - DNA, 25 bp, Homo sapien
tttgagcctcacaaagcaggtgttc

SEQ ID NO: 2741743 - DNA, 25 bp, Homo sapien
gacttgttcaagatcgcttagctgg

SEQ ID NO: 2741744 - DNA, 25 bp, Homo sapien
tgactagcaaatgaggagcctggga

SEQ ID NO: 2741745 - DNA, 25 bp, Homo sapien
taatgtgagtctattccgtccccac

SEQ ID NO: 2741746 - DNA, 25 bp, Homo sapien
caattttactaaacgtgctgccaaa

SEQ ID NO: 2741747 - DNA, 25 bp, Homo sapien
tcattccaattttactaaacgtgct

SEQ ID NO: 2741748 - DNA, 25 bp, Homo sapien
tttactaaacgtgctgccaaagcaa

SEQ ID NO: 2741749 - DNA, 25 bp, Homo sapien
atcattccaattttactaaacgtgc

SEQ ID NO: 2741750 - DNA, 25 bp, Homo sapien
attttctcctgttccgttctccagg

SEQ ID NO: 2741751 - DNA, 25 bp, Homo sapien
ggcagcccacaacatggcccttgag

SEQ ID NO: 2741752 - DNA, 25 bp, Homo sapien
ctgacattcttgtgcctgtcagctg

SEQ ID NO: 2741753 - DNA, 25 bp, Homo sapien
tccagggagctcacactgacattct

SEQ ID NO: 2741754 - DNA, 25 bp, Homo sapien
cgtgtgacagaattatttatccatc

SEQ ID NO: 2741755 - DNA, 25 bp, Homo sapien
gaggccagggcacgtgtgacagaat

SEQ ID NO: 2741756 - DNA, 25 bp, Homo sapien
acgtgtgacagaattatttatccat

SEQ ID NO: 2741757 - DNA, 25 bp, Homo sapien
tgtgacagaattatttatccatctt

SEQ ID NO: 2741758 - DNA, 25 bp, Homo sapien
caaagggtgatgattgctgtaaagt

SEQ ID NO: 2741759 - DNA, 25 bp, Homo sapien
tggtcccagatgctaagattcccta

SEQ ID NO: 2741760 - DNA, 25 bp, Homo sapien
gatgagtcctggtgagctcacctcc

SEQ ID NO: 2741761 - DNA, 25 bp, Homo sapien
tccctagacgtggactggcagctga

SEQ ID NO: 2741762 - DNA, 25 bp, Homo sapien
agaaggaaaacccagtgtgcgcaag

SEQ ID NO: 2741763 - DNA, 25 bp, Homo sapien
cagtgtgcgcaaggaccacaaaggg

SEQ ID NO: 2741764 - DNA, 25 bp, Homo sapien
ggcacgtgctgcttgtcctcccagg

SEQ ID NO: 2741765 - DNA, 25 bp, Homo sapien
taagggactggacgcgtcggatatt

SEQ ID NO: 2741766 - DNA, 25 bp, Homo sapien
ctctgctattttgattacagtgtaa

SEQ ID NO: 2741767 - DNA, 25 bp, Homo sapien
ttgaagcgtaagtcccctcctcgaa

SEQ ID NO: 2741768 - DNA, 25 bp, Homo sapien
gctattttgattacagtgtaaattg

SEQ ID NO: 2741769 - DNA, 25 bp, Homo sapien
tgaagcgtaagtcccctcctcgaag

SEQ ID NO: 2741770 - DNA, 25 bp, Homo sapien
tcttccgagaccttggcatggcagg

SEQ ID NO: 2741771 - DNA, 25 bp, Homo sapien
gcatggcaggtgtttccggtgtcct

SEQ ID NO: 2741772 - DNA, 25 bp, Homo sapien
cagtgcccttgttggaaggccacgg

SEQ ID NO: 2741773 - DNA, 25 bp, Homo sapien
tgtcagcaacaccatcagcaggtgt

SEQ ID NO: 2741774 - DNA, 25 bp, Homo sapien
tgtgctgctgccaatgagtctctgg

SEQ ID NO: 2741775 - DNA, 25 bp, Homo sapien
gtgctgctgccaatgagtctctgga

SEQ ID NO: 2741776 - DNA, 25 bp, Homo sapien
gaagacaagactgctggtcagcgat

SEQ ID NO: 2741777 - DNA, 25 bp, Homo sapien
cagcgatactggcttcaaggagtct

SEQ ID NO: 2741778 - DNA, 25 bp, Homo sapien
tggtcagcgatactggcttcaagga

SEQ ID NO: 2741779 - DNA, 25 bp, Homo sapien
gactgctggtcagcgatactggctt

SEQ ID NO: 2741780 - DNA, 25 bp, Homo sapien
tacgaaaaaacgttgagtgcacgat

SEQ ID NO: 2741781 - DNA, 25 bp, Homo sapien
tatcacacccctttatagctgagga

SEQ ID NO: 2741782 - DNA, 25 bp, Homo sapien
ggtgagatactctacaggacaactg

SEQ ID NO: 2741783 - DNA, 25 bp, Homo sapien
tcagaacaggcaaaagcaaccctca

SEQ ID NO: 2741784 - DNA, 25 bp, Homo sapien
cattgaaggtctgactccggaacca

SEQ ID NO: 2741785 - DNA, 25 bp, Homo sapien
cataggcgatgtcgtccttgaccaa

SEQ ID NO: 2741786 - DNA, 25 bp, Homo sapien
gatactcagggcctagcaccttgac

SEQ ID NO: 2741787 - DNA, 25 bp, Homo sapien
gagcttcgccagagaagttgtcgga

SEQ ID NO: 2741788 - DNA, 25 bp, Homo sapien
tgcagggccttaggtcagtccacgc

SEQ ID NO: 2741789 - DNA, 25 bp, Homo sapien
tctgcagggccttaggtcagtccac

SEQ ID NO: 2741790 - DNA, 25 bp, Homo sapien
cagggccttaggtcagtccacgcac

SEQ ID NO: 2741791 - DNA, 25 bp, Homo sapien
tcctctgcagggccttaggtcagtc

SEQ ID NO: 2741792 - DNA, 25 bp, Homo sapien
tgtgtatcaggaaaaaagcgccatc

SEQ ID NO: 2741793 - DNA, 25 bp, Homo sapien
ccattgggtggatagagcatactca

SEQ ID NO: 2741794 - DNA, 25 bp, Homo sapien
caaagcaagtgtatgttatcgaacc

SEQ ID NO: 2741795 - DNA, 25 bp, Homo sapien
gattgctgtgtcagagggtagccac

SEQ ID NO: 2741796 - DNA, 25 bp, Homo sapien
aggcactgtccctggtggtctctcc

SEQ ID NO: 2741797 - DNA, 25 bp, Homo sapien
ctggatctgagcctcagctgaatgc

SEQ ID NO: 2741798 - DNA, 25 bp, Homo sapien
cccgctcggacaaccacagatgttt

SEQ ID NO: 2741799 - DNA, 25 bp, Homo sapien
atcccagacgatggcttcaaactct

SEQ ID NO: 2741800 - DNA, 25 bp, Homo sapien
gaagatgggtgtgagctaacagcca

SEQ ID NO: 2741801 - DNA, 25 bp, Homo sapien
tgcagacaggcgcagtaccattgtg

SEQ ID NO: 2741802 - DNA, 25 bp, Homo sapien
cctttgggccaatgtgtatgtacac

SEQ ID NO: 2741803 - DNA, 25 bp, Homo sapien
taccattgtgtctttatagactgcc

SEQ ID NO: 2741804 - DNA, 25 bp, Homo sapien
caatacatactgtttgagagacagc

SEQ ID NO: 2741805 - DNA, 25 bp, Homo sapien
tctaacgtgatgtgacaggatgcac

SEQ ID NO: 2741806 - DNA, 25 bp, Homo sapien
gagacagcattacgaatctattggc

SEQ ID NO: 2741807 - DNA, 25 bp, Homo sapien
ggtcacgttgtggaaactcaataca

SEQ ID NO: 2741808 - DNA, 25 bp, Homo sapien
tcctggtgcaaaaagagagactctt

SEQ ID NO: 2741809 - DNA, 25 bp, Homo sapien
tggtaagcggtgttgccaggtcctc

SEQ ID NO: 2741810 - DNA, 25 bp, Homo sapien
taatctgtggacatgcctcactgct

SEQ ID NO: 2741811 - DNA, 25 bp, Homo sapien
tctcatgggagtttagcttagctgc

SEQ ID NO: 2741812 - DNA, 25 bp, Homo sapien
catccgtggaatcagacggcatttg

SEQ ID NO: 2741813 - DNA, 25 bp, Homo sapien
gcttataagtgacatcagtggactg

SEQ ID NO: 2741814 - DNA, 25 bp, Homo sapien
cctctaggtaatcccacatccgtgg

SEQ ID NO: 2741815 - DNA, 25 bp, Homo sapien
acggcatttgttctgtgtgtctggc

SEQ ID NO: 2741816 - DNA, 25 bp, Homo sapien
ctgtggcggttgaatagagtaactt

SEQ ID NO: 2741817 - DNA, 25 bp, Homo sapien
gtggcggttgaatagagtaactttc

SEQ ID NO: 2741818 - DNA, 25 bp, Homo sapien
cggttgaatagagtaactttctgtc

SEQ ID NO: 2741819 - DNA, 25 bp, Homo sapien
gaatagagtaactttctgtctgtgt

SEQ ID NO: 2741820 - DNA, 25 bp, Homo sapien
gcgcagaacccaccggcccttcgca

SEQ ID NO: 2741821 - DNA, 25 bp, Homo sapien
gcaggcaggacgtggccgggggcag

SEQ ID NO: 2741822 - DNA, 25 bp, Homo sapien
cggcgcagggacgcgcagaacccac

SEQ ID NO: 2741823 - DNA, 25 bp, Homo sapien
gcccgcaggcaggacgtggccgggg

SEQ ID NO: 2741824 - DNA, 25 bp, Homo sapien
gcgggggccgtgtcggtccaggcgc

SEQ ID NO: 2741825 - DNA, 25 bp, Homo sapien
cgcgggggccgtgtcggtccaggcg

SEQ ID NO: 2741826 - DNA, 25 bp, Homo sapien
aacagcagcggcagggtcgcgacga

SEQ ID NO: 2741827 - DNA, 25 bp, Homo sapien
ccagcgccgcgaggaccaacagcag

SEQ ID NO: 2741828 - DNA, 25 bp, Homo sapien
gggtcgcgacgaacgcgctcttcca

SEQ ID NO: 2741829 - DNA, 25 bp, Homo sapien
ctcttccacgcagaggctccgggta

SEQ ID NO: 2741830 - DNA, 25 bp, Homo sapien
tcttctccgcctgcttcctcagctt

SEQ ID NO: 2741831 - DNA, 25 bp, Homo sapien
ttctccgcctgcttcctcagctttt

SEQ ID NO: 2741832 - DNA, 25 bp, Homo sapien
cttgtctcttctccgcctgcttcct

SEQ ID NO: 2741833 - DNA, 25 bp, Homo sapien
tctcttctccgcctgcttcctcagc

SEQ ID NO: 2741834 - DNA, 25 bp, Homo sapien
gggcaggtgcgtgcagaacgccctg

SEQ ID NO: 2741835 - DNA, 25 bp, Homo sapien
gatgacggcgggttttggcacttgg

SEQ ID NO: 2741836 - DNA, 25 bp, Homo sapien
ttagatgacggcgggttttggcact

SEQ ID NO: 2741837 - DNA, 25 bp, Homo sapien
ttggcacttgggcaggtgcgtgcag

SEQ ID NO: 2741838 - DNA, 25 bp, Homo sapien
gacatctgtgcactagcctccgtgg

SEQ ID NO: 2741839 - DNA, 25 bp, Homo sapien
ccttctgcataggagggtgacccag

SEQ ID NO: 2741840 - DNA, 25 bp, Homo sapien
caaatctattagctcggcggaaacg

SEQ ID NO: 2741841 - DNA, 25 bp, Homo sapien
cctgtgcgctatgaaaacctggacg

SEQ ID NO: 2741842 - DNA, 25 bp, Homo sapien
gagacacatcccatggtttcacgtc

SEQ ID NO: 2741843 - DNA, 25 bp, Homo sapien
cccttgaagggcgaggtagactgcc

SEQ ID NO: 2741844 - DNA, 25 bp, Homo sapien
tttcacgtctctgagtccctctggg

SEQ ID NO: 2741845 - DNA, 25 bp, Homo sapien
gatctgtccacccaatgtcaagctc

SEQ ID NO: 2741846 - DNA, 25 bp, Homo sapien
ctgagggccgcctacgtgagcctca

SEQ ID NO: 2741847 - DNA, 25 bp, Homo sapien
cagatcttagtactgacaggcctct

SEQ ID NO: 2741848 - DNA, 25 bp, Homo sapien
gctcccgcctaagtgcaggcactga

SEQ ID NO: 2741849 - DNA, 25 bp, Homo sapien
tagaagggataccagatcttagtac

SEQ ID NO: 2741850 - DNA, 25 bp, Homo sapien
tcttaagccactgctaatcacagct

SEQ ID NO: 2741851 - DNA, 25 bp, Homo sapien
agaaaacttcagcctgcaggtgggt

SEQ ID NO: 2741852 - DNA, 25 bp, Homo sapien
cttcattgccctcaaaaagaggccc

SEQ ID NO: 2741853 - DNA, 25 bp, Homo sapien
ggtgggtggaaccatcttcccaaga

SEQ ID NO: 2741854 - DNA, 25 bp, Homo sapien
tatatggggaatcagatgcaaaatg

SEQ ID NO: 2741855 - DNA, 25 bp, Homo sapien
acaggaaattagcacatcaggaccc

SEQ ID NO: 2741856 - DNA, 25 bp, Homo sapien
gagaaatagttctaagaggggtcac

SEQ ID NO: 2741857 - DNA, 25 bp, Homo sapien
gcctgggcatcatacctggttggga

SEQ ID NO: 2741858 - DNA, 25 bp, Homo sapien
cagcctggccttcagcccgtctcca

SEQ ID NO: 2741859 - DNA, 25 bp, Homo sapien
agcctggccttcagcccgtctccag

SEQ ID NO: 2741860 - DNA, 25 bp, Homo sapien
gcctggccttcagcccgtctccagt

SEQ ID NO: 2741861 - DNA, 25 bp, Homo sapien
tgtgtgaggccacggaatgcaacca

SEQ ID NO: 2741862 - DNA, 25 bp, Homo sapien
ggtttgcagtacacttagtcctcag

SEQ ID NO: 2741863 - DNA, 25 bp, Homo sapien
tagtcctcaggacagagtatgacct

SEQ ID NO: 2741864 - DNA, 25 bp, Homo sapien
gcatacgggaaaagcaaggaacatc

SEQ ID NO: 2741865 - DNA, 25 bp, Homo sapien
ggaaaaacagactgaatgcacacga

SEQ ID NO: 2741866 - DNA, 25 bp, Homo sapien
acgagtggcagcgatggatattaaa

SEQ ID NO: 2741867 - DNA, 25 bp, Homo sapien
tgaatgcacacgagtggcagcgatg

SEQ ID NO: 2741868 - DNA, 25 bp, Homo sapien
aacagactgaatgcacacgagtggc

SEQ ID NO: 2741869 - DNA, 25 bp, Homo sapien
ttgttgtggagttagaggcagcctg

SEQ ID NO: 2741870 - DNA, 25 bp, Homo sapien
tgttgttgtggagttagaggcagcc

SEQ ID NO: 2741871 - DNA, 25 bp, Homo sapien
gggtggctggctaaaacgaagcact

SEQ ID NO: 2741872 - DNA, 25 bp, Homo sapien
cagtgttgttgtggagttagaggca

SEQ ID NO: 2741873 - DNA, 25 bp, Homo sapien
agcgccgtaaggcaacacgtttgag

SEQ ID NO: 2741874 - DNA, 25 bp, Homo sapien
cacacagcgccgtaaggcaacacgt

SEQ ID NO: 2741875 - DNA, 25 bp, Homo sapien
cacagcgccgtaaggcaacacgttt

SEQ ID NO: 2741876 - DNA, 25 bp, Homo sapien
gcgccgtaaggcaacacgtttgaga

SEQ ID NO: 2741877 - DNA, 25 bp, Homo sapien
aacttggaatgctggttcacatgag

SEQ ID NO: 2741878 - DNA, 25 bp, Homo sapien
gattggcaaacttggaatgctggtt

SEQ ID NO: 2741879 - DNA, 25 bp, Homo sapien
ttatccccactgattggcaaacttg

SEQ ID NO: 2741880 - DNA, 25 bp, Homo sapien
aatgagccatcacttatccccactg

SEQ ID NO: 2741881 - DNA, 25 bp, Homo sapien
tcacgatgtttacccatgagggatt

SEQ ID NO: 2741882 - DNA, 25 bp, Homo sapien
cacaacagaagaaggaattcacgat

SEQ ID NO: 2741883 - DNA, 25 bp, Homo sapien
ttttcagtagaggaagtccccagag

SEQ ID NO: 2741884 - DNA, 25 bp, Homo sapien
cccagagccaactagcatatacaga

SEQ ID NO: 2741885 - DNA, 25 bp, Homo sapien
tgccccggttttgcgtcaggataac

SEQ ID NO: 2741886 - DNA, 25 bp, Homo sapien
caggataactggtgaagctttaaac

SEQ ID NO: 2741887 - DNA, 25 bp, Homo sapien
taaacaccctagctcttgtgtggaa

SEQ ID NO: 2741888 - DNA, 25 bp, Homo sapien
caagacgttctcagagctccagata

SEQ ID NO: 2741889 - DNA, 25 bp, Homo sapien
agggatgcatgcagatcgaatgacc

SEQ ID NO: 2741890 - DNA, 25 bp, Homo sapien
cagtcagtaactctggaaccttaac

SEQ ID NO: 2741891 - DNA, 25 bp, Homo sapien
tgcatgcagatcgaatgaccccatt

SEQ ID NO: 2741892 - DNA, 25 bp, Homo sapien
cgaagtctccagatgtatgagggat

SEQ ID NO: 2741893 - DNA, 25 bp, Homo sapien
gcatatttttgggctgctctccact

SEQ ID NO: 2741894 - DNA, 25 bp, Homo sapien
ctgcatatttttgggctgctctcca

SEQ ID NO: 2741895 - DNA, 25 bp, Homo sapien
tgcatatttttgggctgctctccac

SEQ ID NO: 2741896 - DNA, 25 bp, Homo sapien
gggaccccttcgtcagagaatctgg

SEQ ID NO: 2741897 - DNA, 25 bp, Homo sapien
tcccttctgtttaagatccggccaa

SEQ ID NO: 2741898 - DNA, 25 bp, Homo sapien
tatgtgtcgtgtggcgtgtttgcaa

SEQ ID NO: 2741899 - DNA, 25 bp, Homo sapien
ggaggttcattacagactctgcact

SEQ ID NO: 2741900 - DNA, 25 bp, Homo sapien
ggctggggtgcgccgaggccgggtc

SEQ ID NO: 2741901 - DNA, 25 bp, Homo sapien
ggggtgcgccgaggccgggtccagc

SEQ ID NO: 2741902 - DNA, 25 bp, Homo sapien
tggggtgcgccgaggccgggtccag

SEQ ID NO: 2741903 - DNA, 25 bp, Homo sapien
ctggggtgcgccgaggccgggtcca

SEQ ID NO: 2741904 - DNA, 25 bp, Homo sapien
tgcgggtggccaggcgccgggcctg

SEQ ID NO: 2741905 - DNA, 25 bp, Homo sapien
ctgcgggtggccaggcgccgggcct

SEQ ID NO: 2741906 - DNA, 25 bp, Homo sapien
gcacccagtagccggccgcagggct

SEQ ID NO: 2741907 - DNA, 25 bp, Homo sapien
tcagcgcgcacgtctgctccgagaa

SEQ ID NO: 2741908 - DNA, 25 bp, Homo sapien
ggccgcagggctcaggcgcgcaggc

SEQ ID NO: 2741909 - DNA, 25 bp, Homo sapien
cggctgcggcggcccacgtgcacct

SEQ ID NO: 2741910 - DNA, 25 bp, Homo sapien
ggggcacgcgcagggtgagcgcgac

SEQ ID NO: 2741911 - DNA, 25 bp, Homo sapien
gttgaagaaggacagctctccggcc

SEQ ID NO: 2741912 - DNA, 25 bp, Homo sapien
gagcgcgacgcggtgcggggccagg

SEQ ID NO: 2741913 - DNA, 25 bp, Homo sapien
ttgaagaaggacagctctccggcct

SEQ ID NO: 2741914 - DNA, 25 bp, Homo sapien
tccgcgggctcatagggctgtagcc

SEQ ID NO: 2741915 - DNA, 25 bp, Homo sapien
gatccggatgttcgccgccgtcgtg

SEQ ID NO: 2741916 - DNA, 25 bp, Homo sapien
ctgggcctgaagtacgcacagagcg

SEQ ID NO: 2741917 - DNA, 25 bp, Homo sapien
caggtgtcactgtcgttctcttcgg

SEQ ID NO: 2741918 - DNA, 25 bp, Homo sapien
tgctttgagactggaaacagcctgt

SEQ ID NO: 2741919 - DNA, 25 bp, Homo sapien
gaacatctgtcgaccagtcacctag

SEQ ID NO: 2741920 - DNA, 25 bp, Homo sapien
aaattaactgatccctctaaggcag

SEQ ID NO: 2741921 - DNA, 25 bp, Homo sapien
cacatctacgtaggcaaaggtccct

SEQ ID NO: 2741922 - DNA, 25 bp, Homo sapien
gtcggggtgacgggatctttggctg

SEQ ID NO: 2741923 - DNA, 25 bp, Homo sapien
ggtcaatctggtggccaatttcagt

SEQ ID NO: 2741924 - DNA, 25 bp, Homo sapien
cgggtctggtcaatctggtggccaa

SEQ ID NO: 2741925 - DNA, 25 bp, Homo sapien
tgggcataacgggtctggtcaatct

SEQ ID NO: 2741926 - DNA, 25 bp, Homo sapien
ctgatgggcataacgggtctggtca

SEQ ID NO: 2741927 - DNA, 25 bp, Homo sapien
ttgcatcagctctccatatgccgaa

SEQ ID NO: 2741928 - DNA, 25 bp, Homo sapien
agcttgcatcagctctccatatgcc

SEQ ID NO: 2741929 - DNA, 25 bp, Homo sapien
ctagcaaaggctttggggcaaaggc

SEQ ID NO: 2741930 - DNA, 25 bp, Homo sapien
tctcctcctcggtgatgatttaggc

SEQ ID NO: 2741931 - DNA, 25 bp, Homo sapien
ctgcgtggggccccagcaatgacat

SEQ ID NO: 2741932 - DNA, 25 bp, Homo sapien
ccaaggctacactccacgggaggac

SEQ ID NO: 2741933 - DNA, 25 bp, Homo sapien
tccaaggctacactccacgggagga

SEQ ID NO: 2741934 - DNA, 25 bp, Homo sapien
ttccaaggctacactccacgggagg

SEQ ID NO: 2741935 - DNA, 25 bp, Homo sapien
caaggctacactccacgggaggact

SEQ ID NO: 2741936 - DNA, 25 bp, Homo sapien
acctgtcctggagccttgcctactg

SEQ ID NO: 2741937 - DNA, 25 bp, Homo sapien
gccacctgtcctggagccttgccta

SEQ ID NO: 2741938 - DNA, 25 bp, Homo sapien
ccgccacctgtcctggagccttgcc

SEQ ID NO: 2741939 - DNA, 25 bp, Homo sapien
tcagtgggccctgagttaatgtttg

SEQ ID NO: 2741940 - DNA, 25 bp, Homo sapien
ccgttttggagtggaagactggatt

SEQ ID NO: 2741941 - DNA, 25 bp, Homo sapien
gggcgctgagtaaggccgttttgga

SEQ ID NO: 2741942 - DNA, 25 bp, Homo sapien
cagggagcctcgtgttgcattgcag

SEQ ID NO: 2741943 - DNA, 25 bp, Homo sapien
ggcaggagtccttgtagctcaaaga

SEQ ID NO: 2741944 - DNA, 25 bp, Homo sapien
ttcagttgataggtgaagatcattc

SEQ ID NO: 2741945 - DNA, 25 bp, Homo sapien
cttcagttgataggtgaagatcatt

SEQ ID NO: 2741946 - DNA, 25 bp, Homo sapien
cattatataatactgagtgacgccg

SEQ ID NO: 2741947 - DNA, 25 bp, Homo sapien
taatactgagtgacgccgttatcat

SEQ ID NO: 2741948 - DNA, 25 bp, Homo sapien
ttatataatactgagtgacgccgtt

SEQ ID NO: 2741949 - DNA, 25 bp, Homo sapien
tataatactgagtgacgccgttatc

SEQ ID NO: 2741950 - DNA, 25 bp, Homo sapien
agtgacgccgttatcattatataat

SEQ ID NO: 2741951 - DNA, 25 bp, Homo sapien
tgagtgacgccgttatcattatata

SEQ ID NO: 2741952 - DNA, 25 bp, Homo sapien
gagtgacgccgttatcattatataa

SEQ ID NO: 2741953 - DNA, 25 bp, Homo sapien
ctgagtgacgccgttatcattatat

SEQ ID NO: 2741954 - DNA, 25 bp, Homo sapien
cattatataatactgagtgacgccg

SEQ ID NO: 2741955 - DNA, 25 bp, Homo sapien
tatataatactgagtgacgccgtta

SEQ ID NO: 2741956 - DNA, 25 bp, Homo sapien
tataatactgagtgacgccgttatc

SEQ ID NO: 2741957 - DNA, 25 bp, Homo sapien
ttatataatactgagtgacgccgtt

SEQ ID NO: 2741958 - DNA, 25 bp, Homo sapien
tatcattcattatataatactgagt

SEQ ID NO: 2741959 - DNA, 25 bp, Homo sapien
tcattcattatataatactgagtga

SEQ ID NO: 2741960 - DNA, 25 bp, Homo sapien
cattcattatataatactgagtgac

SEQ ID NO: 2741961 - DNA, 25 bp, Homo sapien
atcattcattatataatactgagtg

SEQ ID NO: 2741962 - DNA, 25 bp, Homo sapien
tgagtgatgccgttatcattcatta

SEQ ID NO: 2741963 - DNA, 25 bp, Homo sapien
cattatataatactgagtgatgccg

SEQ ID NO: 2741964 - DNA, 25 bp, Homo sapien
gatgccgttatcattcattatataa

SEQ ID NO: 2741965 - DNA, 25 bp, Homo sapien
tataatactgagtgatgccgttatc

SEQ ID NO: 2741966 - DNA, 25 bp, Homo sapien
tataatactgagtgacgccgttatc

SEQ ID NO: 2741967 - DNA, 25 bp, Homo sapien
tatataatactgagtgacgccgtta

SEQ ID NO: 2741968 - DNA, 25 bp, Homo sapien
ttatataatactgagtgacgccgtt

SEQ ID NO: 2741969 - DNA, 25 bp, Homo sapien
cattatataatactgagtgacgccg

SEQ ID NO: 2741970 - DNA, 25 bp, Homo sapien
tatcattcattatataatactgagt

SEQ ID NO: 2741971 - DNA, 25 bp, Homo sapien
cattcattatataatactgagtgac

SEQ ID NO: 2741972 - DNA, 25 bp, Homo sapien
atcattcattatataatactgagtg

SEQ ID NO: 2741973 - DNA, 25 bp, Homo sapien
tcattcattatataatactgagtga

SEQ ID NO: 2741974 - DNA, 25 bp, Homo sapien
ctgagtgacgccgttatcattcatt

SEQ ID NO: 2741975 - DNA, 25 bp, Homo sapien
gacgccgttatcattcattatataa

SEQ ID NO: 2741976 - DNA, 25 bp, Homo sapien
gagtgacgccgttatcattcattat

SEQ ID NO: 2741977 - DNA, 25 bp, Homo sapien
gtgacgccgttatcattcattatat

SEQ ID NO: 2741978 - DNA, 25 bp, Homo sapien
ctgaacgataccattatcattcatt

SEQ ID NO: 2741979 - DNA, 25 bp, Homo sapien
aatactgaacgataccattatcatt

SEQ ID NO: 2741980 - DNA, 25 bp, Homo sapien
tactgaacgataccattatcattca

SEQ ID NO: 2741981 - DNA, 25 bp, Homo sapien
ctaatactgaacgataccattatca

SEQ ID NO: 2741982 - DNA, 25 bp, Homo sapien
ctttcgcgtgtgaggcgaacgtgat

SEQ ID NO: 2741983 - DNA, 25 bp, Homo sapien
tgataaccactacactacggaaacc

SEQ ID NO: 2741984 - DNA, 25 bp, Homo sapien
gggacctttcgcgtgtgaggcgaac

SEQ ID NO: 2741985 - DNA, 25 bp, Homo sapien
ccggggacctttcgcgtgtgaggcg

SEQ ID NO: 2741986 - DNA, 25 bp, Homo sapien
cacgcctccgaagagactggagcct

SEQ ID NO: 2741987 - DNA, 25 bp, Homo sapien
cgcctccgaagagactggagcctta

SEQ ID NO: 2741988 - DNA, 25 bp, Homo sapien
tccgaagagactggagccttaatcc

SEQ ID NO: 2741989 - DNA, 25 bp, Homo sapien
gaacccacgcctccgaagagactgg

SEQ ID NO: 2741990 - DNA, 25 bp, Homo sapien
cagaaggtggaagaacgtgctgcct

SEQ ID NO: 2741991 - DNA, 25 bp, Homo sapien
agaaggtggaagaacgtgctgcctc

SEQ ID NO: 2741992 - DNA, 25 bp, Homo sapien
aacccagcacggtgatccctttctc

SEQ ID NO: 2741993 - DNA, 25 bp, Homo sapien
acccagcacggtgatccctttctct

SEQ ID NO: 2741994 - DNA, 25 bp, Homo sapien
caacccagcacggtgatccctttct

SEQ ID NO: 2741995 - DNA, 25 bp, Homo sapien
ccagcacggtgatccctttctcttt

SEQ ID NO: 2741996 - DNA, 25 bp, Homo sapien
gacaatttccagaacattgaatttg

SEQ ID NO: 2741997 - DNA, 25 bp, Homo sapien
ggacaatttccagaacattgaattt

SEQ ID NO: 2741998 - DNA, 25 bp, Homo sapien
aatttccagaacattgaatttgcct

SEQ ID NO: 2741999 - DNA, 25 bp, Homo sapien
tggacaatttccagaacattgaatt

SEQ ID NO: 2742000 - DNA, 25 bp, Homo sapien
tcattctgaagaggagtcccggttc

SEQ ID NO: 2742001 - DNA, 25 bp, Homo sapien
ccctccggaggcgagcagggtcatt

SEQ ID NO: 2742002 - DNA, 25 bp, Homo sapien
gaggcgagcagggtcattctgaaga

SEQ ID NO: 2742003 - DNA, 25 bp, Homo sapien
gtcattctgaagaggagtcccggtt

SEQ ID NO: 2742004 - DNA, 25 bp, Homo sapien
cgccagcacgcggtcagcaaaggag

SEQ ID NO: 2742005 - DNA, 25 bp, Homo sapien
gtttatggccctcgccagcacgcgg

SEQ ID NO: 2742006 - DNA, 25 bp, Homo sapien
taattgtcgtttatggccctcgcca

SEQ ID NO: 2742007 - DNA, 25 bp, Homo sapien
aataggagtaattgtcgtttatggc

SEQ ID NO: 2742008 - DNA, 25 bp, Homo sapien
cgggataacgagcaatcccaggcgc

SEQ ID NO: 2742009 - DNA, 25 bp, Homo sapien
tatgaggccaactgggcggaaccag

SEQ ID NO: 2742010 - DNA, 25 bp, Homo sapien
tcgggaccacgaagcccgctcggaa

SEQ ID NO: 2742011 - DNA, 25 bp, Homo sapien
ggaaccagagcgctgcaaatgcagt

SEQ ID NO: 2742012 - DNA, 25 bp, Homo sapien
acacagacacagcgcctctgaaaac

SEQ ID NO: 2742013 - DNA, 25 bp, Homo sapien
gcgcctctgaaaaccgcccctcgct

SEQ ID NO: 2742014 - DNA, 25 bp, Homo sapien
gcgcaccgcgcatctcagcctctca

SEQ ID NO: 2742015 - DNA, 25 bp, Homo sapien
gctgagtaggattcccagcaccacg

SEQ ID NO: 2742016 - DNA, 25 bp, Homo sapien
tggcggtttcaaagcgtttcaggct

SEQ ID NO: 2742017 - DNA, 25 bp, Homo sapien
tccacctggcgattgagatcagcag

SEQ ID NO: 2742018 - DNA, 25 bp, Homo sapien
actcgccgtcgggtaactttgcttg

SEQ ID NO: 2742019 - DNA, 25 bp, Homo sapien
cagccaggtttctgccgatgttgca

SEQ ID NO: 2742020 - DNA, 25 bp, Homo sapien
cgtttcttggccgagtctaggtgtc

SEQ ID NO: 2742021 - DNA, 25 bp, Homo sapien
acttcatagcgtttcttggccgagt

SEQ ID NO: 2742022 - DNA, 25 bp, Homo sapien
cagccaaattaccacggtaacttga

SEQ ID NO: 2742023 - DNA, 25 bp, Homo sapien
cttggccgagtctaggtgtccccag

SEQ ID NO: 2742024 - DNA, 25 bp, Homo sapien
aaacagccgcccatgtgtggagcag

SEQ ID NO: 2742025 - DNA, 25 bp, Homo sapien
gcaggtcctcgtctttgtaagcatc

SEQ ID NO: 2742026 - DNA, 25 bp, Homo sapien
agataaacagccgcccatgtgtgga

SEQ ID NO: 2742027 - DNA, 25 bp, Homo sapien
catgtgtggagcaggtcctcgtctt

SEQ ID NO: 2742028 - DNA, 25 bp, Homo sapien
gctgccagagtgtagacaggaagcc

SEQ ID NO: 2742029 - DNA, 25 bp, Homo sapien
tgccagagtgtagacaggaagccat

SEQ ID NO: 2742030 - DNA, 25 bp, Homo sapien
ctgccagagtgtagacaggaagcca

SEQ ID NO: 2742031 - DNA, 25 bp, Homo sapien
taaaagcagtggctgtacaaaaata

SEQ ID NO: 2742032 - DNA, 25 bp, Homo sapien
gtttgcacatgatcaaaagttcccc

SEQ ID NO: 2742033 - DNA, 25 bp, Homo sapien
caagagctgtcagcaggccatggac

SEQ ID NO: 2742034 - DNA, 25 bp, Homo sapien
cagaaaactcttgatctgcatgaga

SEQ ID NO: 2742035 - DNA, 25 bp, Homo sapien
tgctacttcaggatttgctacctca

SEQ ID NO: 2742036 - DNA, 25 bp, Homo sapien
tacttcaggatttgctacctcaggg

SEQ ID NO: 2742037 - DNA, 25 bp, Homo sapien
agctgctacttcaggatttgctacc

SEQ ID NO: 2742038 - DNA, 25 bp, Homo sapien
gctggttcccagctgctacttcagg

SEQ ID NO: 2742039 - DNA, 25 bp, Homo sapien
cagggcacagtttgattttatgcat

SEQ ID NO: 2742040 - DNA, 25 bp, Homo sapien
gaagacatgagacgtcaatcagcat

SEQ ID NO: 2742041 - DNA, 25 bp, Homo sapien
aagacatgagacgtcaatcagcata

SEQ ID NO: 2742042 - DNA, 25 bp, Homo sapien
tcagggcacagtttgattttatgca

SEQ ID NO: 2742043 - DNA, 25 bp, Homo sapien
aggtgcgcatcaccacgcctggcca

SEQ ID NO: 2742044 - DNA, 25 bp, Homo sapien
cgtagtttcatcatgttggtcaagc

SEQ ID NO: 2742045 - DNA, 25 bp, Homo sapien
gagacgtagtttcatcatgttggtc

SEQ ID NO: 2742046 - DNA, 25 bp, Homo sapien
caggtgcgcatcaccacgcctggcc

SEQ ID NO: 2742047 - DNA, 25 bp, Homo sapien
caacaaggatagcatctcacagaag

SEQ ID NO: 2742048 - DNA, 25 bp, Homo sapien
gatcaagccatcgattatcccaaag

SEQ ID NO: 2742049 - DNA, 25 bp, Homo sapien
tgtgaagaccgccataaccacggag

SEQ ID NO: 2742050 - DNA, 25 bp, Homo sapien
tagaatgtgagcataggaggccacg

SEQ ID NO: 2742051 - DNA, 25 bp, Homo sapien
gtgctggctgccgatcctgcagcgg

SEQ ID NO: 2742052 - DNA, 25 bp, Homo sapien
tcagtgctggctgccgatcctgcag

SEQ ID NO: 2742053 - DNA, 25 bp, Homo sapien
gctggctgccgatcctgcagcggtc

SEQ ID NO: 2742054 - DNA, 25 bp, Homo sapien
ggctgccgatcctgcagcggtccag

SEQ ID NO: 2742055 - DNA, 25 bp, Homo sapien
aatagaaatgtgtacaaggcaaaaa

SEQ ID NO: 2742056 - DNA, 25 bp, Homo sapien
gttgaagggtgcaaaatcccagaga

SEQ ID NO: 2742057 - DNA, 25 bp, Homo sapien
ggttgaagggtgcaaaatcccagag

SEQ ID NO: 2742058 - DNA, 25 bp, Homo sapien
gggttgaagggtgcaaaatcccaga

SEQ ID NO: 2742059 - DNA, 25 bp, Homo sapien
ccctggtccttgtgcgggaaatgaa

SEQ ID NO: 2742060 - DNA, 25 bp, Homo sapien
tccaaaattctgcatcacggaaggg

SEQ ID NO: 2742061 - DNA, 25 bp, Homo sapien
gaccctgtggaacctttttgtgaca

SEQ ID NO: 2742062 - DNA, 25 bp, Homo sapien
tgtgcctggacataagaggaccctg

SEQ ID NO: 2742063 - DNA, 25 bp, Homo sapien
ttgaccccctagagccttgggcctg

SEQ ID NO: 2742064 - DNA, 25 bp, Homo sapien
tctttgaccccctagagccttgggc

SEQ ID NO: 2742065 - DNA, 25 bp, Homo sapien
ctctttgaccccctagagccttggg

SEQ ID NO: 2742066 - DNA, 25 bp, Homo sapien
ctttcgcgtgttaggcgaacgtgat

SEQ ID NO: 2742067 - DNA, 25 bp, Homo sapien
cgcgtgttaggcgaacgtgataacc

SEQ ID NO: 2742068 - DNA, 25 bp, Homo sapien
acctttcgcgtgttaggcgaacgtg

SEQ ID NO: 2742069 - DNA, 25 bp, Homo sapien
cgtgttaggcgaacgtgataaccac

SEQ ID NO: 2742070 - DNA, 25 bp, Homo sapien
ccagggcaagtgaggtgggttcagt

SEQ ID NO: 2742071 - DNA, 25 bp, Homo sapien
tccagggcaagtgaggtgggttcag

SEQ ID NO: 2742072 - DNA, 25 bp, Homo sapien
tgtccagggcaagtgaggtgggttc

SEQ ID NO: 2742073 - DNA, 25 bp, Homo sapien
atggccttttctccgtaaccaggtg

SEQ ID NO: 2742074 - DNA, 25 bp, Homo sapien
ccatgggttgcaaaaggaggattca

SEQ ID NO: 2742075 - DNA, 25 bp, Homo sapien
ggaactcgccttgggccccacgcat

SEQ ID NO: 2742076 - DNA, 25 bp, Homo sapien
ctcgggatctggattccacttggca

SEQ ID NO: 2742077 - DNA, 25 bp, Homo sapien
cgcatgctcgggatctggattccac

SEQ ID NO: 2742078 - DNA, 25 bp, Homo sapien
tgcaaggcggtggttctgcaatgcc

SEQ ID NO: 2742079 - DNA, 25 bp, Homo sapien
ctgcaaggcggtggttctgcaatgc

SEQ ID NO: 2742080 - DNA, 25 bp, Homo sapien
aaagcagatcccgaggcctgcgctt

SEQ ID NO: 2742081 - DNA, 25 bp, Homo sapien
agagggccgatgtgggtgactttga

SEQ ID NO: 2742082 - DNA, 25 bp, Homo sapien
gatcccgaggcctgcgcttctcgaa

SEQ ID NO: 2742083 - DNA, 25 bp, Homo sapien
ccgatgtgggtgactttgagtgacc

SEQ ID NO: 2742084 - DNA, 25 bp, Homo sapien
ctttcgcgtgttaggcgaacgtgat

SEQ ID NO: 2742085 - DNA, 25 bp, Homo sapien
acctttcgcgtgttaggcgaacgtg

SEQ ID NO: 2742086 - DNA, 25 bp, Homo sapien
cgtgttaggcgaacgtgataaccac

SEQ ID NO: 2742087 - DNA, 25 bp, Homo sapien
cgcgtgttaggcgaacgtgataacc

SEQ ID NO: 2742088 - DNA, 25 bp, Homo sapien
ccagggcaagtgaggtgggttcagt

SEQ ID NO: 2742089 - DNA, 25 bp, Homo sapien
tgcgaagttcgtcggcgccgctgtc

SEQ ID NO: 2742090 - DNA, 25 bp, Homo sapien
atggccttttctccgtaaccaggtg

SEQ ID NO: 2742091 - DNA, 25 bp, Homo sapien
tgtccagggcaagtgaggtgggttc

SEQ ID NO: 2742092 - DNA, 25 bp, Homo sapien
ttcattggaactcgccttgggcccc

SEQ ID NO: 2742093 - DNA, 25 bp, Homo sapien
attcattggaactcgccttgggccc

SEQ ID NO: 2742094 - DNA, 25 bp, Homo sapien
gattcattggaactcgccttgggcc

SEQ ID NO: 2742095 - DNA, 25 bp, Homo sapien
gccacacaggcggacaacggtggac

SEQ ID NO: 2742096 - DNA, 25 bp, Homo sapien
acaacggtggacggcactgcgcgat

SEQ ID NO: 2742097 - DNA, 25 bp, Homo sapien
gtggacggcactgcgcgatggagcg

SEQ ID NO: 2742098 - DNA, 25 bp, Homo sapien
cctccgcccagggagatgtggaaga

SEQ ID NO: 2742099 - DNA, 25 bp, Homo sapien
caggggacacagcacgaaggaaaca

SEQ ID NO: 2742100 - DNA, 25 bp, Homo sapien
gggacacagcacgaaggaaacaaaa

SEQ ID NO: 2742101 - DNA, 25 bp, Homo sapien
agggtcagagcaattaacacccgca

SEQ ID NO: 2742102 - DNA, 25 bp, Homo sapien
cgcactagcactgggtacgactgaa

SEQ ID NO: 2742103 - DNA, 25 bp, Homo sapien
tgggtacgactgaagaaacactcac

SEQ ID NO: 2742104 - DNA, 25 bp, Homo sapien
aattaacacccgcactagcactggg

SEQ ID NO: 2742105 - DNA, 25 bp, Homo sapien
ctttcgcgtgtgaggcgaacgtgat

SEQ ID NO: 2742106 - DNA, 25 bp, Homo sapien
gggacctttcgcgtgtgaggcgaac

SEQ ID NO: 2742107 - DNA, 25 bp, Homo sapien
ccggggacctttcgcgtgtgaggcg

SEQ ID NO: 2742108 - DNA, 25 bp, Homo sapien
tgataaccactacactacggaaacc

SEQ ID NO: 2742109 - DNA, 25 bp, Homo sapien
cccaggttccaatggttgaggcgga

SEQ ID NO: 2742110 - DNA, 25 bp, Homo sapien
gagtgttgtaggcaagtcctcagtg

SEQ ID NO: 2742111 - DNA, 25 bp, Homo sapien
tcgggatctggattccatttggcag

SEQ ID NO: 2742112 - DNA, 25 bp, Homo sapien
tgtccacagcaagtgaagtgggttc

SEQ ID NO: 2742113 - DNA, 25 bp, Homo sapien
ttctgactttctgagtggcccccaa

SEQ ID NO: 2742114 - DNA, 25 bp, Homo sapien
tgcgcgtcgcgaatcttctctgctg

SEQ ID NO: 2742115 - DNA, 25 bp, Homo sapien
aaagcaaattccgaggcctgcgcgt

SEQ ID NO: 2742116 - DNA, 25 bp, Homo sapien
ccaatgtgggtgactttctgacttt

SEQ ID NO: 2742117 - DNA, 25 bp, Homo sapien
gagactggagccttaatccagcgcc

SEQ ID NO: 2742118 - DNA, 25 bp, Homo sapien
cccgaagagactggagccttaatcc

SEQ ID NO: 2742119 - DNA, 25 bp, Homo sapien
agagactggagccttaatccagcgc

SEQ ID NO: 2742120 - DNA, 25 bp, Homo sapien
acgcccccgaagagactggagcctt

SEQ ID NO: 2742121 - DNA, 25 bp, Homo sapien
gacggcactgtcttcgcggagccct

SEQ ID NO: 2742122 - DNA, 25 bp, Homo sapien
gcggagccctctgccgggactaacg

SEQ ID NO: 2742123 - DNA, 25 bp, Homo sapien
ttcgcggagccctctgccgggacta

SEQ ID NO: 2742124 - DNA, 25 bp, Homo sapien
gcgcgcccaacgacggcactgtctt

SEQ ID NO: 2742125 - DNA, 25 bp, Homo sapien
tccacaaggaaaaccgatctctaac

SEQ ID NO: 2742126 - DNA, 25 bp, Homo sapien
taaaaccgggtagccaattcaggca

SEQ ID NO: 2742127 - DNA, 25 bp, Homo sapien
gaagcattccagagagtgaatccta

SEQ ID NO: 2742128 - DNA, 25 bp, Homo sapien
attcaggcatttgaataccactgat

SEQ ID NO: 2742129 - DNA, 25 bp, Homo sapien
gccacaacactatcccagaggcagg

SEQ ID NO: 2742130 - DNA, 25 bp, Homo sapien
aggcaggcccagttgacacagcacc

SEQ ID NO: 2742131 - DNA, 25 bp, Homo sapien
tgaggacagggtcatttcaaagtcc

SEQ ID NO: 2742132 - DNA, 25 bp, Homo sapien
gacaatcagaataccgcatcctcca

SEQ ID NO: 2742133 - DNA, 25 bp, Homo sapien
caggggcaatgatagctgaatagcc

SEQ ID NO: 2742134 - DNA, 25 bp, Homo sapien
aacaggggcaatgatagctgaatag

SEQ ID NO: 2742135 - DNA, 25 bp, Homo sapien
ggggcaatgatagctgaatagccct

SEQ ID NO: 2742136 - DNA, 25 bp, Homo sapien
gcaaacaggggcaatgatagctgaa

SEQ ID NO: 2742137 - DNA, 25 bp, Homo sapien
aagatgcagccagctctaaacaaca

SEQ ID NO: 2742138 - DNA, 25 bp, Homo sapien
gagcaccctggtgccaaggccttct

SEQ ID NO: 2742139 - DNA, 25 bp, Homo sapien
agccccttgtctacttgttctccag

SEQ ID NO: 2742140 - DNA, 25 bp, Homo sapien
gcacaaatatgctcctgacggactc

SEQ ID NO: 2742141 - DNA, 25 bp, Homo sapien
gatcctccagtttccatctccctaa

SEQ ID NO: 2742142 - DNA, 25 bp, Homo sapien
tgtgagccgctgtacccgaactttt

SEQ ID NO: 2742143 - DNA, 25 bp, Homo sapien
agtgatcctccagtttccatctccc

SEQ ID NO: 2742144 - DNA, 25 bp, Homo sapien
cagtttccatctccctaagagctgg

SEQ ID NO: 2742145 - DNA, 25 bp, Homo sapien
accgtccgcagtgatcaattagtgg

SEQ ID NO: 2742146 - DNA, 25 bp, Homo sapien
ctcctgggcgtcctcgagtagctgg

SEQ ID NO: 2742147 - DNA, 25 bp, Homo sapien
caattagtggccacagttttcatag

SEQ ID NO: 2742148 - DNA, 25 bp, Homo sapien
cttactctggagtgagatcatggag

SEQ ID NO: 2742149 - DNA, 25 bp, Homo sapien
cgtgtcgctcatgcacgccttgctt

SEQ ID NO: 2742150 - DNA, 25 bp, Homo sapien
gctcatgcacgccttgctttgtttc

SEQ ID NO: 2742151 - DNA, 25 bp, Homo sapien
atataatctcccgtgtcgctcatgc

SEQ ID NO: 2742152 - DNA, 25 bp, Homo sapien
taatctcccgtgtcgctcatgcacg

SEQ ID NO: 2742153 - DNA, 25 bp, Homo sapien
cagtaggtgcataagggctgtgacc

SEQ ID NO: 2742154 - DNA, 25 bp, Homo sapien
tataaacaactagataaacttcaca

SEQ ID NO: 2742155 - DNA, 25 bp, Homo sapien
gctacacgtatgcactttgatgttt

SEQ ID NO: 2742156 - DNA, 25 bp, Homo sapien
tccatagatgggttaagaacagtca

SEQ ID NO: 2742157 - DNA, 25 bp, Homo sapien
ctgtaagacttgaagggaagtgcac

SEQ ID NO: 2742158 - DNA, 25 bp, Homo sapien
gggagttaatatccataaggcgctc

SEQ ID NO: 2742159 - DNA, 25 bp, Homo sapien
ccccactgggctgccgtcagggttg

SEQ ID NO: 2742160 - DNA, 25 bp, Homo sapien
ttaatatccataaggcgctccaggc

SEQ ID NO: 2742161 - DNA, 25 bp, Homo sapien
tagaggttgcggtcagccaagatca

SEQ ID NO: 2742162 - DNA, 25 bp, Homo sapien
agcctgggcaacgagagtgaaactc

SEQ ID NO: 2742163 - DNA, 25 bp, Homo sapien
ggaggtagaggttgcggtcagccaa

SEQ ID NO: 2742164 - DNA, 25 bp, Homo sapien
ctgggcaacgagagtgaaactccat

SEQ ID NO: 2742165 - DNA, 25 bp, Homo sapien
taagataagcaaacatgaggcctgg

SEQ ID NO: 2742166 - DNA, 25 bp, Homo sapien
gcctctaccccaagttggaatgata

SEQ ID NO: 2742167 - DNA, 25 bp, Homo sapien
tagagggcgtcagagctgctccctg

SEQ ID NO: 2742168 - DNA, 25 bp, Homo sapien
tatttgaaatcgaggctaacggaga

SEQ ID NO: 2742169 - DNA, 25 bp, Homo sapien
gcctcatacatgcaaagcatgcgct

SEQ ID NO: 2742170 - DNA, 25 bp, Homo sapien
ccggggcctcatacatgcaaagcat

SEQ ID NO: 2742171 - DNA, 25 bp, Homo sapien
cgaacccggggcctcatacatgcaa

SEQ ID NO: 2742172 - DNA, 25 bp, Homo sapien
gggcctcatacatgcaaagcatgcg

SEQ ID NO: 2742173 - DNA, 25 bp, Homo sapien
cgtggggctcgaacccacgaccctg

SEQ ID NO: 2742174 - DNA, 25 bp, Homo sapien
ctctaccgactgagctagccgggcg

SEQ ID NO: 2742175 - DNA, 25 bp, Homo sapien
tcgaacccacgaccctgagattaag

SEQ ID NO: 2742176 - DNA, 25 bp, Homo sapien
tcatgctctaccgactgagctagcc

SEQ ID NO: 2742177 - DNA, 25 bp, Homo sapien
tggctagtagtcgtagatttaggac

SEQ ID NO: 2742178 - DNA, 25 bp, Homo sapien
tggagcgcccgcaagagtattacac

SEQ ID NO: 2742179 - DNA, 25 bp, Homo sapien
aagacttcagagcagattattttcc

SEQ ID NO: 2742180 - DNA, 25 bp, Homo sapien
gggcatattttaccacagctttaaa

SEQ ID NO: 2742181 - DNA, 25 bp, Homo sapien
tgagggactcgcacctttaatccaa

SEQ ID NO: 2742182 - DNA, 25 bp, Homo sapien
acagcaacgaaacagtgaagtgagc

SEQ ID NO: 2742183 - DNA, 25 bp, Homo sapien
tgtgatatgatataaacagcaacga

SEQ ID NO: 2742184 - DNA, 25 bp, Homo sapien
gactcgcacctttaatccaatgtga

SEQ ID NO: 2742185 - DNA, 25 bp, Homo sapien
gaaatccttggtggaagttcacgcc

SEQ ID NO: 2742186 - DNA, 25 bp, Homo sapien
aatgccacggaatgacagatgaacg

SEQ ID NO: 2742187 - DNA, 25 bp, Homo sapien
ttcacgccgtggaaggtgtgcaccg

SEQ ID NO: 2742188 - DNA, 25 bp, Homo sapien
gtcccggcggatcaaatacagtcag

SEQ ID NO: 2742189 - DNA, 25 bp, Homo sapien
gcctggtccatacaggaggcggccg

SEQ ID NO: 2742190 - DNA, 25 bp, Homo sapien
tgcaaggcttgcagcggcgatagat

SEQ ID NO: 2742191 - DNA, 25 bp, Homo sapien
acgcaggtgaaggagcgggatgcaa

SEQ ID NO: 2742192 - DNA, 25 bp, Homo sapien
gtgatgcaaacagggagtatgaggg

SEQ ID NO: 2742193 - DNA, 25 bp, Homo sapien
attacaggacctgcggactcggctg

SEQ ID NO: 2742194 - DNA, 25 bp, Homo sapien
gagtatgtcagatcaaacgcgccaa

SEQ ID NO: 2742195 - DNA, 25 bp, Homo sapien
tgaactatgctaggccattacagga

SEQ ID NO: 2742196 - DNA, 25 bp, Homo sapien
tacaagggcgcttgcctagagctat

SEQ ID NO: 2742197 - DNA, 25 bp, Homo sapien
tagtccgcactagagaacagggcgg

SEQ ID NO: 2742198 - DNA, 25 bp, Homo sapien
agagagatgtcctgccgacaaccca

SEQ ID NO: 2742199 - DNA, 25 bp, Homo sapien
caggaaatggcgaggagacgctcta

SEQ ID NO: 2742200 - DNA, 25 bp, Homo sapien
aacgacaaccgtgtctctacgaggg

SEQ ID NO: 2742201 - DNA, 25 bp, Homo sapien
ctgaagggtctgcacagggttgggt

SEQ ID NO: 2742202 - DNA, 25 bp, Homo sapien
acacggggtccgtgaagtaatcgag

SEQ ID NO: 2742203 - DNA, 25 bp, Homo sapien
acaactgggttacacaaactcggca

SEQ ID NO: 2742204 - DNA, 25 bp, Homo sapien
ggttacacaaactcggcagaagttg

SEQ ID NO: 2742205 - DNA, 25 bp, Homo sapien
ctcctcctcccgatctaactcatct

SEQ ID NO: 2742206 - DNA, 25 bp, Homo sapien
cctcccgatctaactcatctctgtc

SEQ ID NO: 2742207 - DNA, 25 bp, Homo sapien
ctcctcccgatctaactcatctctg

SEQ ID NO: 2742208 - DNA, 25 bp, Homo sapien
tcccgatctaactcatctctgtcct

SEQ ID NO: 2742209 - DNA, 25 bp, Homo sapien
caccctcgtagtcttcatcccgcat

SEQ ID NO: 2742210 - DNA, 25 bp, Homo sapien
ctccatgtcaccctcgtagtcttca

SEQ ID NO: 2742211 - DNA, 25 bp, Homo sapien
tgtcaccctcgtagtcttcatcccg

SEQ ID NO: 2742212 - DNA, 25 bp, Homo sapien
tccatgtcaccctcgtagtcttcat

SEQ ID NO: 2742213 - DNA, 25 bp, Homo sapien
ccatgtcccccaagtagtagtccag

SEQ ID NO: 2742214 - DNA, 25 bp, Homo sapien
catgtcccccaagtagtagtccagg

SEQ ID NO: 2742215 - DNA, 25 bp, Homo sapien
ctccatgtcccccaagtagtagtcc

SEQ ID NO: 2742216 - DNA, 25 bp, Homo sapien
tgtcccccaagtagtagtccaggtc

SEQ ID NO: 2742217 - DNA, 25 bp, Homo sapien
cgaatcacctggaccatattggcca

SEQ ID NO: 2742218 - DNA, 25 bp, Homo sapien
gttgggtgcatctgccgaatcacct

SEQ ID NO: 2742219 - DNA, 25 bp, Homo sapien
agatgccctgatcggtcacgcggct

SEQ ID NO: 2742220 - DNA, 25 bp, Homo sapien
cttggtgtttgggacagatgccctg

SEQ ID NO: 2742221 - DNA, 25 bp, Homo sapien
tgttccctataccttaagctgccag

SEQ ID NO: 2742222 - DNA, 25 bp, Homo sapien
gacctcatggatagcacacttactg

SEQ ID NO: 2742223 - DNA, 25 bp, Homo sapien
taaagagtttaccaagccagagtgc

SEQ ID NO: 2742224 - DNA, 25 bp, Homo sapien
cctggcatgtagcagaagatcagta

SEQ ID NO: 2742225 - DNA, 25 bp, Homo sapien
gagcctcaagactagagagctccca

SEQ ID NO: 2742226 - DNA, 25 bp, Homo sapien
tatgctaaaacctttccatgggtca

SEQ ID NO: 2742227 - DNA, 25 bp, Homo sapien
ttcacaggcgatcttccccagaact

SEQ ID NO: 2742228 - DNA, 25 bp, Homo sapien
cagactcttaacacgtttgaccaca

SEQ ID NO: 2742229 - DNA, 25 bp, Homo sapien
agttctgtcactcgcctctcctcct

SEQ ID NO: 2742230 - DNA, 25 bp, Homo sapien
ttctcaatgcaaggcaaaggagccc

SEQ ID NO: 2742231 - DNA, 25 bp, Homo sapien
aaagtatcaacttgggcagctggcc

SEQ ID NO: 2742232 - DNA, 25 bp, Homo sapien
cagagtccctaacgttcaggtggca

SEQ ID NO: 2742233 - DNA, 25 bp, Homo sapien
gacagtgtccgcctcatgcttaggg

SEQ ID NO: 2742234 - DNA, 25 bp, Homo sapien
gcatctctctgagacgccgttccag

SEQ ID NO: 2742235 - DNA, 25 bp, Homo sapien
gtgtcagtcgcccaaactccgaggc

SEQ ID NO: 2742236 - DNA, 25 bp, Homo sapien
tcttcagccagaaaccgtgtcagtc

SEQ ID NO: 2742237 - DNA, 25 bp, Homo sapien
ggcggcctgttctgcaaggcgacta

SEQ ID NO: 2742238 - DNA, 25 bp, Homo sapien
gaatcttcatgcttttcactgggta

SEQ ID NO: 2742239 - DNA, 25 bp, Homo sapien
cgtttggtaagcactgcctgacagc

SEQ ID NO: 2742240 - DNA, 25 bp, Homo sapien
gatctccagtcagagactgaacctg

SEQ ID NO: 2742241 - DNA, 25 bp, Homo sapien
tcactgggtataatcgccacacata

SEQ ID NO: 2742242 - DNA, 25 bp, Homo sapien
gggataccgaagagaagcagggaca

SEQ ID NO: 2742243 - DNA, 25 bp, Homo sapien
ggaccacgatattcccagagggaaa

SEQ ID NO: 2742244 - DNA, 25 bp, Homo sapien
tgggaccacgatattcccagaggga

SEQ ID NO: 2742245 - DNA, 25 bp, Homo sapien
gggtgggaccacgatattcccagag

SEQ ID NO: 2742246 - DNA, 25 bp, Homo sapien
catctgtcaggaagtcatggctatg

SEQ ID NO: 2742247 - DNA, 25 bp, Homo sapien
atggctatggggttggcacgggtca

SEQ ID NO: 2742248 - DNA, 25 bp, Homo sapien
atctgtcaggaagtcatggctatgg

SEQ ID NO: 2742249 - DNA, 25 bp, Homo sapien
ttggcacgggtcaggggaccagacc

SEQ ID NO: 2742250 - DNA, 25 bp, Homo sapien
cagcctgacagaacatccggctcat

SEQ ID NO: 2742251 - DNA, 25 bp, Homo sapien
gcagcctgacagaacatccggctca

SEQ ID NO: 2742252 - DNA, 25 bp, Homo sapien
ctctcgcagcctgacagaacatccg

SEQ ID NO: 2742253 - DNA, 25 bp, Homo sapien
tcgcagcctgacagaacatccggct

SEQ ID NO: 2742254 - DNA, 25 bp, Homo sapien
ggaacggctgttcccctgtcagcag

SEQ ID NO: 2742255 - DNA, 25 bp, Homo sapien
gcttgaaacctcaacctcagagtgg

SEQ ID NO: 2742256 - DNA, 25 bp, Homo sapien
taggtctacctgctcatggcttgaa

SEQ ID NO: 2742257 - DNA, 25 bp, Homo sapien
tgttcctaggatacctgacaggtct

SEQ ID NO: 2742258 - DNA, 25 bp, Homo sapien
agaagcgcttgggatggtcagcaac

SEQ ID NO: 2742259 - DNA, 25 bp, Homo sapien
agtacgcagcagtcggccgagaagc

SEQ ID NO: 2742260 - DNA, 25 bp, Homo sapien
atcagggccgggtgagccgtgtcag

SEQ ID NO: 2742261 - DNA, 25 bp, Homo sapien
ttgggatggtcagcaacctcctgcc

SEQ ID NO: 2742262 - DNA, 25 bp, Homo sapien
tctctgcgttgtagaagcccaggcg

SEQ ID NO: 2742263 - DNA, 25 bp, Homo sapien
tctgtggagctctgggcctgatagc

SEQ ID NO: 2742264 - DNA, 25 bp, Homo sapien
tatgatgggttgattcacgggcagc

SEQ ID NO: 2742265 - DNA, 25 bp, Homo sapien
ctgatagcgtttgccgttggtgccc

SEQ ID NO: 2742266 - DNA, 25 bp, Homo sapien
ttgagccctcaaacttacgggccac

SEQ ID NO: 2742267 - DNA, 25 bp, Homo sapien
gggaagagcctttgagccctcaaac

SEQ ID NO: 2742268 - DNA, 25 bp, Homo sapien
agtgggaagagcctttgagccctca

SEQ ID NO: 2742269 - DNA, 25 bp, Homo sapien
agcaacacagtaacaagcagtggga

SEQ ID NO: 2742270 - DNA, 25 bp, Homo sapien
acagacatagtaggtgagagaaggc

SEQ ID NO: 2742271 - DNA, 25 bp, Homo sapien
ctgttggacagacatagtaggtgag

SEQ ID NO: 2742272 - DNA, 25 bp, Homo sapien
tggacagacatagtaggtgagagaa

SEQ ID NO: 2742273 - DNA, 25 bp, Homo sapien
cagacatagtaggtgagagaaggct

SEQ ID NO: 2742274 - DNA, 25 bp, Homo sapien
agcctgcctccccaaatggcttcca

SEQ ID NO: 2742275 - DNA, 25 bp, Homo sapien
gggatgttgccttgcccaaaccctc

SEQ ID NO: 2742276 - DNA, 25 bp, Homo sapien
ctatggaggtagaaattgaggacgg

SEQ ID NO: 2742277 - DNA, 25 bp, Homo sapien
gttctcattatcagggacccatgca

SEQ ID NO: 2742278 - DNA, 25 bp, Homo sapien
tcaagtgaagctaaattctggccgg

SEQ ID NO: 2742279 - DNA, 25 bp, Homo sapien
caagtgaagctaaattctggccggt

SEQ ID NO: 2742280 - DNA, 25 bp, Homo sapien
gaaagctgcaagtgacaaggcaaga

SEQ ID NO: 2742281 - DNA, 25 bp, Homo sapien
aatggtgcgtggtttcaatcatggc

SEQ ID NO: 2742282 - DNA, 25 bp, Homo sapien
caaatggagtgaaaggcatggaaag

SEQ ID NO: 2742283 - DNA, 25 bp, Homo sapien
catcaaagcagagggcgaaagctgc

SEQ ID NO: 2742284 - DNA, 25 bp, Homo sapien
gaaataggagcctgcctggtaacag

SEQ ID NO: 2742285 - DNA, 25 bp, Homo sapien
tagaaacctcagtacagggatggaa

SEQ ID NO: 2742286 - DNA, 25 bp, Homo sapien
gaatggttcaacatgcggctgagac

SEQ ID NO: 2742287 - DNA, 25 bp, Homo sapien
aactacagcatattgaaggcccaca

SEQ ID NO: 2742288 - DNA, 25 bp, Homo sapien
tcttacagtctacccggcgttgtgg

SEQ ID NO: 2742289 - DNA, 25 bp, Homo sapien
gaatttatgccagcctgacctgtca

SEQ ID NO: 2742290 - DNA, 25 bp, Homo sapien
ggctgaatctagtgagactgcagaa

SEQ ID NO: 2742291 - DNA, 25 bp, Homo sapien
cctagacaatggagcaaggtggacg

SEQ ID NO: 2742292 - DNA, 25 bp, Homo sapien
gggcaccaccacgaggcgatttgtg

SEQ ID NO: 2742293 - DNA, 25 bp, Homo sapien
tctgacaaccggcagattgtctctg

SEQ ID NO: 2742294 - DNA, 25 bp, Homo sapien
caaccggcagattgtctctggatct

SEQ ID NO: 2742295 - DNA, 25 bp, Homo sapien
gggccataccaaggatgtgctgagt

SEQ ID NO: 2742296 - DNA, 25 bp, Homo sapien
tgatgtggttatctcctcagatggc

SEQ ID NO: 2742297 - DNA, 25 bp, Homo sapien
ggatggaaccctgcgcctctgggat

SEQ ID NO: 2742298 - DNA, 25 bp, Homo sapien
ctatggaattccacagcgtgctctg

SEQ ID NO: 2742299 - DNA, 25 bp, Homo sapien
gtcactcccactttgttagtgatgt

SEQ ID NO: 2742300 - DNA, 25 bp, Homo sapien
tcaagggccacaacggctgggtaac

SEQ ID NO: 2742301 - DNA, 25 bp, Homo sapien
cgcagttcccggacatgatcctctc

SEQ ID NO: 2742302 - DNA, 25 bp, Homo sapien
actgagcagatgacccttcgtggca

SEQ ID NO: 2742303 - DNA, 25 bp, Homo sapien
gctgggtaacccagatcgctactac

SEQ ID NO: 2742304 - DNA, 25 bp, Homo sapien
gattgagtcccgtattggaaaagcg

SEQ ID NO: 2742305 - DNA, 25 bp, Homo sapien
gatgtatacaaacctggagccttag

SEQ ID NO: 2742306 - DNA, 25 bp, Homo sapien
cttaggatggtccacaggctgcgga

SEQ ID NO: 2742307 - DNA, 25 bp, Homo sapien
cgttcacctatttgtgcccgagggc

SEQ ID NO: 2742308 - DNA, 25 bp, Homo sapien
gctcagggttgaccttcagtgacca

SEQ ID NO: 2742309 - DNA, 25 bp, Homo sapien
gaaaggccgaatcctgcagggtctg

SEQ ID NO: 2742310 - DNA, 25 bp, Homo sapien
tccacacgggctctaagacaaaacc

SEQ ID NO: 2742311 - DNA, 25 bp, Homo sapien
tcggaaagccaaccatacagtcagc

SEQ ID NO: 2742312 - DNA, 25 bp, Homo sapien
tgggaaaagcgtgactcagcctcct

SEQ ID NO: 2742313 - DNA, 25 bp, Homo sapien
ttgctgacccagagtcaacccagcg

SEQ ID NO: 2742314 - DNA, 25 bp, Homo sapien
ctggtgggaaaagcgtgactcagcc

SEQ ID NO: 2742315 - DNA, 25 bp, Homo sapien
agctgggtgcccaacgggaaaggcg

SEQ ID NO: 2742316 - DNA, 25 bp, Homo sapien
agaggccggcaggtccggcgggcgc

SEQ ID NO: 2742317 - DNA, 25 bp, Homo sapien
caggtaggggcctccagcaagcttc

SEQ ID NO: 2742318 - DNA, 25 bp, Homo sapien
ttgtatggaatggaagtggtgcctc

SEQ ID NO: 2742319 - DNA, 25 bp, Homo sapien
gacccagtcaggaagggtcctgcca

SEQ ID NO: 2742320 - DNA, 25 bp, Homo sapien
gcctgaggggctggttccaactgta

SEQ ID NO: 2742321 - DNA, 25 bp, Homo sapien
gatggattttcataggagagcctct

SEQ ID NO: 2742322 - DNA, 25 bp, Homo sapien
tccaactgtacaggtcctgtggact

SEQ ID NO: 2742323 - DNA, 25 bp, Homo sapien
tggtgagatggattttcataggaga

SEQ ID NO: 2742324 - DNA, 25 bp, Homo sapien
tacaccaccgctgtgaaagcatgaa

SEQ ID NO: 2742325 - DNA, 25 bp, Homo sapien
ggctggccaccaaaattagaatctt

SEQ ID NO: 2742326 - DNA, 25 bp, Homo sapien
gccacttcgtaggaatcttgcacca

SEQ ID NO: 2742327 - DNA, 25 bp, Homo sapien
tacttttcaacccatgaggctggcc

SEQ ID NO: 2742328 - DNA, 25 bp, Homo sapien
ggccaattctagacactggagtgaa

SEQ ID NO: 2742329 - DNA, 25 bp, Homo sapien
tcaaccaaagagctcctatatacag

SEQ ID NO: 2742330 - DNA, 25 bp, Homo sapien
tcctatatacagaggccaattctag

SEQ ID NO: 2742331 - DNA, 25 bp, Homo sapien
aggtgtgaaccatgctcaaccaaag

SEQ ID NO: 2742332 - DNA, 25 bp, Homo sapien
gactgctagacgtcagacttctgcc

SEQ ID NO: 2742333 - DNA, 25 bp, Homo sapien
tgctttctgggggactgctagacgt

SEQ ID NO: 2742334 - DNA, 25 bp, Homo sapien
aggaagccccaacagacaacagaat

SEQ ID NO: 2742335 - DNA, 25 bp, Homo sapien
ccaacagacaacagaatgctttctg

SEQ ID NO: 2742336 - DNA, 25 bp, Homo sapien
ggatgtgatttctccgcaggccctg

SEQ ID NO: 2742337 - DNA, 25 bp, Homo sapien
gagatcccaacttagagccctttgg

SEQ ID NO: 2742338 - DNA, 25 bp, Homo sapien
catacaaatttgagctagccagccc

SEQ ID NO: 2742339 - DNA, 25 bp, Homo sapien
tagccttagtgtgagcagagaggac

SEQ ID NO: 2742340 - DNA, 25 bp, Homo sapien
catgttgtcatctaaaccggattga

SEQ ID NO: 2742341 - DNA, 25 bp, Homo sapien
tcatgttgtcatctaaaccggattg

SEQ ID NO: 2742342 - DNA, 25 bp, Homo sapien
atgttgtcatctaaaccggattgat

SEQ ID NO: 2742343 - DNA, 25 bp, Homo sapien
gaaatcaactcccattgcactatga

SEQ ID NO: 2742344 - DNA, 25 bp, Homo sapien
tctgtggctgtaccctggatctcat

SEQ ID NO: 2742345 - DNA, 25 bp, Homo sapien
tccctattaggttcagctgttcact

SEQ ID NO: 2742346 - DNA, 25 bp, Homo sapien
ttaacagccttactatcctactgag

SEQ ID NO: 2742347 - DNA, 25 bp, Homo sapien
aatgtcaatgggcaaacaccaattt

SEQ ID NO: 2742348 - DNA, 25 bp, Homo sapien
gcaaacaccaatttcgccgttcatt

SEQ ID NO: 2742349 - DNA, 25 bp, Homo sapien
aaacaccaatttcgccgttcattat

SEQ ID NO: 2742350 - DNA, 25 bp, Homo sapien
accaatttcgccgttcattatgaaa

SEQ ID NO: 2742351 - DNA, 25 bp, Homo sapien
tcaagatgtactgcagctgtcacca

SEQ ID NO: 2742352 - DNA, 25 bp, Homo sapien
tcttaatggcactacagcaaactgt

SEQ ID NO: 2742353 - DNA, 25 bp, Homo sapien
tgctgtcagcatagaccactgtgag

SEQ ID NO: 2742354 - DNA, 25 bp, Homo sapien
aacggattctgctgaacttgtggac

SEQ ID NO: 2742355 - DNA, 25 bp, Homo sapien
caggaatcttccaagccgtgaaagc

SEQ ID NO: 2742356 - DNA, 25 bp, Homo sapien
tcatcactctgcaagagggaccaga

SEQ ID NO: 2742357 - DNA, 25 bp, Homo sapien
ggagtgttctgcaaagcccgattct

SEQ ID NO: 2742358 - DNA, 25 bp, Homo sapien
taaaaaacatcagctcgcaagaggc

SEQ ID NO: 2742359 - DNA, 25 bp, Homo sapien
tatttctattgcataaccaggacag

SEQ ID NO: 2742360 - DNA, 25 bp, Homo sapien
cagcaaggcctataatcagtaagat

SEQ ID NO: 2742361 - DNA, 25 bp, Homo sapien
gttggaaacaactctggtgggaata

SEQ ID NO: 2742362 - DNA, 25 bp, Homo sapien
ccatcccatgagttagagttcgtct

SEQ ID NO: 2742363 - DNA, 25 bp, Homo sapien
catagagacgtggtcctccgccggc

SEQ ID NO: 2742364 - DNA, 25 bp, Homo sapien
ccatagagacgtggtcctccgccgg

SEQ ID NO: 2742365 - DNA, 25 bp, Homo sapien
ctggccggaatgtgcagcactagcc

SEQ ID NO: 2742366 - DNA, 25 bp, Homo sapien
ggccggaatgtgcagcactagccca

SEQ ID NO: 2742367 - DNA, 25 bp, Homo sapien
tgatcagagccgctctgccggcccg

SEQ ID NO: 2742368 - DNA, 25 bp, Homo sapien
ctgccggcccgagggagctgagaag

SEQ ID NO: 2742369 - DNA, 25 bp, Homo sapien
attagtgaggggtgcagtcatgccc

SEQ ID NO: 2742370 - DNA, 25 bp, Homo sapien
tgcccgtgggccttcaacagcattt

SEQ ID NO: 2742371 - DNA, 25 bp, Homo sapien
ggctccaaggtgtgctcaaggttcc

SEQ ID NO: 2742372 - DNA, 25 bp, Homo sapien
ttccactgggacagtggtgtcctcc

SEQ ID NO: 2742373 - DNA, 25 bp, Homo sapien
actgtggtcaaggaactgagtatgc

SEQ ID NO: 2742374 - DNA, 25 bp, Homo sapien
tgtggtcaaggaactgagtatgcaa

SEQ ID NO: 2742375 - DNA, 25 bp, Homo sapien
actgagtatgcaacaaagaagagaa

SEQ ID NO: 2742376 - DNA, 25 bp, Homo sapien
ggcactgtggtcaaggaactgagta

SEQ ID NO: 2742377 - DNA, 25 bp, Homo sapien
tgatcctttagagaaatggtttcct

SEQ ID NO: 2742378 - DNA, 25 bp, Homo sapien
tggaaaggaggagctagatcggagg

SEQ ID NO: 2742379 - DNA, 25 bp, Homo sapien
ggagaaacatcagcaggacttggct

SEQ ID NO: 2742380 - DNA, 25 bp, Homo sapien
gtgaaatctggagtggcagaagtaa

SEQ ID NO: 2742381 - DNA, 25 bp, Homo sapien
taaagcctatgaagtggtgagcctt

SEQ ID NO: 2742382 - DNA, 25 bp, Homo sapien
cacctggccaagaatttccttaaag

SEQ ID NO: 2742383 - DNA, 25 bp, Homo sapien
tttccttaaagcctatgaagtggtg

SEQ ID NO: 2742384 - DNA, 25 bp, Homo sapien
gaagtggtgagcctttcatttcatg

SEQ ID NO: 2742385 - DNA, 25 bp, Homo sapien
tgcactacagcctggcgactgagca

SEQ ID NO: 2742386 - DNA, 25 bp, Homo sapien
gcactacagcctggcgactgagcaa

SEQ ID NO: 2742387 - DNA, 25 bp, Homo sapien
ccactgcactacagcctggcgactg

SEQ ID NO: 2742388 - DNA, 25 bp, Homo sapien
actgcactacagcctggcgactgag

SEQ ID NO: 2742389 - DNA, 25 bp, Homo sapien
acgtcggaccttgccaggccatggt

SEQ ID NO: 2742390 - DNA, 25 bp, Homo sapien
aaacgtcggaccttgccaggccatg

SEQ ID NO: 2742391 - DNA, 25 bp, Homo sapien
gtcggaccttgccaggccatggtgc

SEQ ID NO: 2742392 - DNA, 25 bp, Homo sapien
tggaaaacgtcggaccttgccaggc

SEQ ID NO: 2742393 - DNA, 25 bp, Homo sapien
ggtgtcacctggttggccgcagaag

SEQ ID NO: 2742394 - DNA, 25 bp, Homo sapien
tgtccctcataactggcaggtgtca

SEQ ID NO: 2742395 - DNA, 25 bp, Homo sapien
tggttggccgcagaagggcctgcca

SEQ ID NO: 2742396 - DNA, 25 bp, Homo sapien
gggaccacatcagtgtaagaagcag

SEQ ID NO: 2742397 - DNA, 25 bp, Homo sapien
taatgtaggttagtcttaagattaa

SEQ ID NO: 2742398 - DNA, 25 bp, Homo sapien
gcttctttgcactctggaaaagaac

SEQ ID NO: 2742399 - DNA, 25 bp, Homo sapien
cataatacctgaagagccaatgctt

SEQ ID NO: 2742400 - DNA, 25 bp, Homo sapien
tatttgtctatagagtaaagcaatt

SEQ ID NO: 2742401 - DNA, 25 bp, Homo sapien
cattaatttgccgattggtgctgca

SEQ ID NO: 2742402 - DNA, 25 bp, Homo sapien
gagagtaggcctgtaaatcatggaa

SEQ ID NO: 2742403 - DNA, 25 bp, Homo sapien
ttaaaggaactaagcacccaccaga

SEQ ID NO: 2742404 - DNA, 25 bp, Homo sapien
caacattttgcagggacgttagtca

SEQ ID NO: 2742405 - DNA, 25 bp, Homo sapien
gatttttacatacccaatgccagca

SEQ ID NO: 2742406 - DNA, 25 bp, Homo sapien
ctgaaatggtaggagaaacccttgg

SEQ ID NO: 2742407 - DNA, 25 bp, Homo sapien
tatttaaccatcagcacagacaatg

SEQ ID NO: 2742408 - DNA, 25 bp, Homo sapien
tggtcagaataacatacagcctagg

SEQ ID NO: 2742409 - DNA, 25 bp, Homo sapien
acatagatcagcgatacgatgattc

SEQ ID NO: 2742410 - DNA, 25 bp, Homo sapien
atagatcagcgatacgatgattcca

SEQ ID NO: 2742411 - DNA, 25 bp, Homo sapien
tttacatagatcagcgatacgatga

SEQ ID NO: 2742412 - DNA, 25 bp, Homo sapien
cagtttgtttacatagatcagcgat

SEQ ID NO: 2742413 - DNA, 25 bp, Homo sapien
aacagtaactccattgtgtaaacgc

SEQ ID NO: 2742414 - DNA, 25 bp, Homo sapien
gatgaacagtaactccattgtgtaa

SEQ ID NO: 2742415 - DNA, 25 bp, Homo sapien
gtaactccattgtgtaaacgcccat

SEQ ID NO: 2742416 - DNA, 25 bp, Homo sapien
cagtaactccattgtgtaaacgccc

SEQ ID NO: 2742417 - DNA, 25 bp, Homo sapien
gtaaggatggcatgactcgccggca

SEQ ID NO: 2742418 - DNA, 25 bp, Homo sapien
aaggagaaacgtgtaaggatggcat

SEQ ID NO: 2742419 - DNA, 25 bp, Homo sapien
gatggcatgactcgccggcagccct

SEQ ID NO: 2742420 - DNA, 25 bp, Homo sapien
cgtgtaaggatggcatgactcgccg

SEQ ID NO: 2742421 - DNA, 25 bp, Homo sapien
gactgaagacgtacctgacagttga

SEQ ID NO: 2742422 - DNA, 25 bp, Homo sapien
gacgtacctgacagttgatttatca

SEQ ID NO: 2742423 - DNA, 25 bp, Homo sapien
acttgactgaagacgtacctgacag

SEQ ID NO: 2742424 - DNA, 25 bp, Homo sapien
ctaatctgacttgactgaagacgta

SEQ ID NO: 2742425 - DNA, 25 bp, Homo sapien
aaaagggtatgggatcatcaccgga

SEQ ID NO: 2742426 - DNA, 25 bp, Homo sapien
gactggaaaaaagggtatgggatca

SEQ ID NO: 2742427 - DNA, 25 bp, Homo sapien
aagggtatgggatcatcaccggacc

SEQ ID NO: 2742428 - DNA, 25 bp, Homo sapien
aaaaaagggtatgggatcatcaccg

SEQ ID NO: 2742429 - DNA, 25 bp, Homo sapien
tccttctaaagtaacatcctctcaa

SEQ ID NO: 2742430 - DNA, 25 bp, Homo sapien
tctaaagtaacatcctctcaaggcc

SEQ ID NO: 2742431 - DNA, 25 bp, Homo sapien
tgatatcaggagtcgaggcgggaag

SEQ ID NO: 2742432 - DNA, 25 bp, Homo sapien
tcacttgatatcaggagtcgaggcg

SEQ ID NO: 2742433 - DNA, 25 bp, Homo sapien
ggacagtacttgttctcaagggaat

SEQ ID NO: 2742434 - DNA, 25 bp, Homo sapien
tcatggaacataatgtctcctactg

SEQ ID NO: 2742435 - DNA, 25 bp, Homo sapien
taagatagagtggttaagtgaaata

SEQ ID NO: 2742436 - DNA, 25 bp, Homo sapien
ctgtcgttaaaaattaccattgtca

SEQ ID NO: 2742437 - DNA, 25 bp, Homo sapien
tcactcaattaaaaactgtcgttaa

SEQ ID NO: 2742438 - DNA, 25 bp, Homo sapien
ttccacagaggccgtgccaatctct

SEQ ID NO: 2742439 - DNA, 25 bp, Homo sapien
tcattcttccacagaggccgtgcca

SEQ ID NO: 2742440 - DNA, 25 bp, Homo sapien
atgtcattcttccacagaggccgtg

SEQ ID NO: 2742441 - DNA, 25 bp, Homo sapien
ccacagaggccgtgccaatctctct

SEQ ID NO: 2742442 - DNA, 25 bp, Homo sapien
gagccattacattgagccagtaata

SEQ ID NO: 2742443 - DNA, 25 bp, Homo sapien
tagaaaataaggtggccagatgcgc

SEQ ID NO: 2742444 - DNA, 25 bp, Homo sapien
ctttcattggctgttcctgagatgg

SEQ ID NO: 2742445 - DNA, 25 bp, Homo sapien
tcctgtgcatctctttcattggctg

SEQ ID NO: 2742446 - DNA, 25 bp, Homo sapien
gctacaacaaagtaccctacattta

SEQ ID NO: 2742447 - DNA, 25 bp, Homo sapien
aagtaccctacatttagtggcatca

SEQ ID NO: 2742448 - DNA, 25 bp, Homo sapien
gcaaccgtaacatgaggtcccagct

SEQ ID NO: 2742449 - DNA, 25 bp, Homo sapien
gggccagaagcccaactaggtctat

SEQ ID NO: 2742450 - DNA, 25 bp, Homo sapien
atggccttaaaacatactcccatct

SEQ ID NO: 2742451 - DNA, 25 bp, Homo sapien
gatttcttttatctagcatccttta

SEQ ID NO: 2742452 - DNA, 25 bp, Homo sapien
ctcatggccttaaaacatactccca

SEQ ID NO: 2742453 - DNA, 25 bp, Homo sapien
ctctcaaactgttggaactataggt

SEQ ID NO: 2742454 - DNA, 25 bp, Homo sapien
taatgagccatgataggaccactga

SEQ ID NO: 2742455 - DNA, 25 bp, Homo sapien
tgaggctataatgagccatgatagg

SEQ ID NO: 2742456 - DNA, 25 bp, Homo sapien
tataatgagccatgataggaccact

SEQ ID NO: 2742457 - DNA, 25 bp, Homo sapien
gctataatgagccatgataggacca

SEQ ID NO: 2742458 - DNA, 25 bp, Homo sapien
taattttggccaggcaaaatggctc

SEQ ID NO: 2742459 - DNA, 25 bp, Homo sapien
tacagaggatcagcacaatgaggga

SEQ ID NO: 2742460 - DNA, 25 bp, Homo sapien
tgagggacacactagcacaaagtaa

SEQ ID NO: 2742461 - DNA, 25 bp, Homo sapien
tcagcacaatgagggacacactagc

SEQ ID NO: 2742462 - DNA, 25 bp, Homo sapien
tgtgagacccggtatcaaaaagaaa

SEQ ID NO: 2742463 - DNA, 25 bp, Homo sapien
gacagtgtgagacccggtatcaaaa

SEQ ID NO: 2742464 - DNA, 25 bp, Homo sapien
cagtgtgagacccggtatcaaaaag

SEQ ID NO: 2742465 - DNA, 25 bp, Homo sapien
gtgtgagacccggtatcaaaaagaa

SEQ ID NO: 2742466 - DNA, 25 bp, Homo sapien
gagagaggtatattacttgaggcca

SEQ ID NO: 2742467 - DNA, 25 bp, Homo sapien
cacagactgggaatgagggaataat

SEQ ID NO: 2742468 - DNA, 25 bp, Homo sapien
aaacagagtgaatgtgtggaagaca

SEQ ID NO: 2742469 - DNA, 25 bp, Homo sapien
tataacgtagactcagtgggatctc

SEQ ID NO: 2742470 - DNA, 25 bp, Homo sapien
agtttgcgctatcccatcccggccc

SEQ ID NO: 2742471 - DNA, 25 bp, Homo sapien
gggcagtttgcgctatcccatcccg

SEQ ID NO: 2742472 - DNA, 25 bp, Homo sapien
ttgcgctatcccatcccggcccatt

SEQ ID NO: 2742473 - DNA, 25 bp, Homo sapien
ggcagtttgcgctatcccatcccgg

SEQ ID NO: 2742474 - DNA, 25 bp, Homo sapien
ggtgagcctgcgcaaatcattcatt

SEQ ID NO: 2742475 - DNA, 25 bp, Homo sapien
tacccagttaatatccagagcactg

SEQ ID NO: 2742476 - DNA, 25 bp, Homo sapien
catacattcagtcggaagtgtgtga

SEQ ID NO: 2742477 - DNA, 25 bp, Homo sapien
tgtgagtagagacaaacatgggctt

SEQ ID NO: 2742478 - DNA, 25 bp, Homo sapien
gaaccactggaacccagacaatcaa

SEQ ID NO: 2742479 - DNA, 25 bp, Homo sapien
accactggaacccagacaatcaagg

SEQ ID NO: 2742480 - DNA, 25 bp, Homo sapien
ggtgggagaaccactggaacccaga

SEQ ID NO: 2742481 - DNA, 25 bp, Homo sapien
gccaacacaacaagaccccatctat

SEQ ID NO: 2742482 - DNA, 25 bp, Homo sapien
cgaagcttccctcactccctcactc

SEQ ID NO: 2742483 - DNA, 25 bp, Homo sapien
ctcactccctcactcgacaccgctc

SEQ ID NO: 2742484 - DNA, 25 bp, Homo sapien
tcactccctcactcgacaccgctca

SEQ ID NO: 2742485 - DNA, 25 bp, Homo sapien
ctccctcactcgacaccgctcacct

SEQ ID NO: 2742486 - DNA, 25 bp, Homo sapien
ggccaaaagatgtaagcacatttgc

SEQ ID NO: 2742487 - DNA, 25 bp, Homo sapien
gccaaaagatgtaagcacatttgca

SEQ ID NO: 2742488 - DNA, 25 bp, Homo sapien
ctgggccaaaagatgtaagcacatt

SEQ ID NO: 2742489 - DNA, 25 bp, Homo sapien
tgggccaaaagatgtaagcacattt

SEQ ID NO: 2742490 - DNA, 25 bp, Homo sapien
gtagggtatgggcctaaataggcca

SEQ ID NO: 2742491 - DNA, 25 bp, Homo sapien
agggtatgggcctaaataggccatt

SEQ ID NO: 2742492 - DNA, 25 bp, Homo sapien
tagggtatgggcctaaataggccat

SEQ ID NO: 2742493 - DNA, 25 bp, Homo sapien
gggtatgggcctaaataggccattg

SEQ ID NO: 2742494 - DNA, 25 bp, Homo sapien
tggcacatgcctcgaggatgggagg

SEQ ID NO: 2742495 - DNA, 25 bp, Homo sapien
ggcacatgcctcgaggatgggaggc

SEQ ID NO: 2742496 - DNA, 25 bp, Homo sapien
gcacatgcctcgaggatgggaggca

SEQ ID NO: 2742497 - DNA, 25 bp, Homo sapien
gcagtcagctgcgatagcactacta

SEQ ID NO: 2742498 - DNA, 25 bp, Homo sapien
cctctggaatccacgtatacgaaaa

SEQ ID NO: 2742499 - DNA, 25 bp, Homo sapien
acccctctggaatccacgtatacga

SEQ ID NO: 2742500 - DNA, 25 bp, Homo sapien
ccacgtatacgaaaattccaaatgt

SEQ ID NO: 2742501 - DNA, 25 bp, Homo sapien
ctcctgctgtgtggctccttgcggc

SEQ ID NO: 2742502 - DNA, 25 bp, Homo sapien
attagtgggcgtgttaagcttgttt

SEQ ID NO: 2742503 - DNA, 25 bp, Homo sapien
agaattagtgggcgtgttaagcttg

SEQ ID NO: 2742504 - DNA, 25 bp, Homo sapien
taatgtagaattagtgggcgtgtta

SEQ ID NO: 2742505 - DNA, 25 bp, Homo sapien
tgtagaattagtgggcgtgttaagc

SEQ ID NO: 2742506 - DNA, 25 bp, Homo sapien
gtagggtatgggcctaaataggcca

SEQ ID NO: 2742507 - DNA, 25 bp, Homo sapien
tagggtatgggcctaaataggccat

SEQ ID NO: 2742508 - DNA, 25 bp, Homo sapien
agggtatgggcctaaataggccatt

SEQ ID NO: 2742509 - DNA, 25 bp, Homo sapien
gggtatgggcctaaataggccattg

SEQ ID NO: 2742510 - DNA, 25 bp, Homo sapien
agctgggcctggagaggctgcaaag

SEQ ID NO: 2742511 - DNA, 25 bp, Homo sapien
gctgggcctggagaggctgcaaaga

SEQ ID NO: 2742512 - DNA, 25 bp, Homo sapien
ctgggcctggagaggctgcaaagaa

SEQ ID NO: 2742513 - DNA, 25 bp, Homo sapien
tgggcctggagaggctgcaaagaag

SEQ ID NO: 2742514 - DNA, 25 bp, Homo sapien
tagatgctgggcgtgaagaatctgc

SEQ ID NO: 2742515 - DNA, 25 bp, Homo sapien
atgctgggcgtgaagaatctgctgt

SEQ ID NO: 2742516 - DNA, 25 bp, Homo sapien
cacagtgaggtagatgctgggcgtg

SEQ ID NO: 2742517 - DNA, 25 bp, Homo sapien
cgttgggactgtagaggctgacggg

SEQ ID NO: 2742518 - DNA, 25 bp, Homo sapien
actgggccaaaaaaggctgttgtga

SEQ ID NO: 2742519 - DNA, 25 bp, Homo sapien
aactgggccaaaaaaggctgttgtg

SEQ ID NO: 2742520 - DNA, 25 bp, Homo sapien
ggaaatggcctcacagtcatgagtt

SEQ ID NO: 2742521 - DNA, 25 bp, Homo sapien
tggcctcacagtcatgagttgggcc

SEQ ID NO: 2742522 - DNA, 25 bp, Homo sapien
gcctcacagtcatgagttgggccta

SEQ ID NO: 2742523 - DNA, 25 bp, Homo sapien
aatggcctcacagtcatgagttggg

SEQ ID NO: 2742524 - DNA, 25 bp, Homo sapien
cctggagacccaaccaggaagaaga

SEQ ID NO: 2742525 - DNA, 25 bp, Homo sapien
acaacttgggcctgcggcggtcgcc

SEQ ID NO: 2742526 - DNA, 25 bp, Homo sapien
aatcgggcctggagacccaaccagg

SEQ ID NO: 2742527 - DNA, 25 bp, Homo sapien
ggagacccaaccaggaagaagagct

SEQ ID NO: 2742528 - DNA, 25 bp, Homo sapien
agcagcccgagtgcgatcctgttcc

SEQ ID NO: 2742529 - DNA, 25 bp, Homo sapien
ccagcagcccgagtgcgatcctgtt

SEQ ID NO: 2742530 - DNA, 25 bp, Homo sapien
cccagcagcccgagtgcgatcctgt

SEQ ID NO: 2742531 - DNA, 25 bp, Homo sapien
cagcagcccgagtgcgatcctgttc

SEQ ID NO: 2742532 - DNA, 25 bp, Homo sapien
cctgcagatgtcatcggagggccag

SEQ ID NO: 2742533 - DNA, 25 bp, Homo sapien
gcctgcagatgtcatcggagggcca

SEQ ID NO: 2742534 - DNA, 25 bp, Homo sapien
gggactgatgactgcatgatcttct

SEQ ID NO: 2742535 - DNA, 25 bp, Homo sapien
tgggactgatgactgcatgatcttc

SEQ ID NO: 2742536 - DNA, 25 bp, Homo sapien
caaagcccaacacccccaagtgtgc

SEQ ID NO: 2742537 - DNA, 25 bp, Homo sapien
ccaaagcccaacacccccaagtgtg

SEQ ID NO: 2742538 - DNA, 25 bp, Homo sapien
tctgcggccgtgttctcctggtact

SEQ ID NO: 2742539 - DNA, 25 bp, Homo sapien
cggccgtgttctcctggtactccat

SEQ ID NO: 2742540 - DNA, 25 bp, Homo sapien
ctgcggccgtgttctcctggtactc

SEQ ID NO: 2742541 - DNA, 25 bp, Homo sapien
tgcggccgtgttctcctggtactcc

SEQ ID NO: 2742542 - DNA, 25 bp, Homo sapien
tcatcacagtagagcacgatcttaa

SEQ ID NO: 2742543 - DNA, 25 bp, Homo sapien
agcagtgtggctgaacacctaaaag

SEQ ID NO: 2742544 - DNA, 25 bp, Homo sapien
tcaaacaaacccaaatcatcacagt

SEQ ID NO: 2742545 - DNA, 25 bp, Homo sapien
actcaggagtaaacactcagatatg

SEQ ID NO: 2742546 - DNA, 25 bp, Homo sapien
tctttgtatcggtgctcagctgagt

SEQ ID NO: 2742547 - DNA, 25 bp, Homo sapien
ttgaatcattttaagatgctcgaac

SEQ ID NO: 2742548 - DNA, 25 bp, Homo sapien
tgtctttctttgtatcggtgctcag

SEQ ID NO: 2742549 - DNA, 25 bp, Homo sapien
tctttctttgtatcggtgctcagct

SEQ ID NO: 2742550 - DNA, 25 bp, Homo sapien
gatgggatgtagaatgataaggctc

SEQ ID NO: 2742551 - DNA, 25 bp, Homo sapien
gccctgctaggagttcacgctttag

SEQ ID NO: 2742552 - DNA, 25 bp, Homo sapien
aaagacaaactcacaggaagatggg

SEQ ID NO: 2742553 - DNA, 25 bp, Homo sapien
tgagaactgcaattagagttaaatg

SEQ ID NO: 2742554 - DNA, 25 bp, Homo sapien
cccaacgtttagactacacaatgag

SEQ ID NO: 2742555 - DNA, 25 bp, Homo sapien
ataagctcaccaatatactatgtac

SEQ ID NO: 2742556 - DNA, 25 bp, Homo sapien
acagctgataatttattagttaggc

SEQ ID NO: 2742557 - DNA, 25 bp, Homo sapien
tagactacacaatgagttaagaatg

SEQ ID NO: 2742558 - DNA, 25 bp, Homo sapien
tgttaatgtataagagatgtagatt

SEQ ID NO: 2742559 - DNA, 25 bp, Homo sapien
tcaggtacttaaagttagctccaaa

SEQ ID NO: 2742560 - DNA, 25 bp, Homo sapien
ttgttaatgtataagagatgtagat

SEQ ID NO: 2742561 - DNA, 25 bp, Homo sapien
attgttaatgtataagagatgtaga

SEQ ID NO: 2742562 - DNA, 25 bp, Homo sapien
ttttcttaataagaggaattcatat

SEQ ID NO: 2742563 - DNA, 25 bp, Homo sapien
cttaataagaggaattcatatggat

SEQ ID NO: 2742564 - DNA, 25 bp, Homo sapien
aataagaggaattcatatggatcag

SEQ ID NO: 2742565 - DNA, 25 bp, Homo sapien
ttcttaataagaggaattcatatgg

SEQ ID NO: 2742566 - DNA, 25 bp, Homo sapien
aattaacttctaacatacaaagcct

SEQ ID NO: 2742567 - DNA, 25 bp, Homo sapien
tggccttgtaagaaagcaaattaac

SEQ ID NO: 2742568 - DNA, 25 bp, Homo sapien
accatctacgctaagacataaaatt

SEQ ID NO: 2742569 - DNA, 25 bp, Homo sapien
tcagttgtttagttacaagatagaa

SEQ ID NO: 2742570 - DNA, 25 bp, Homo sapien
agtatgtatatgcagtgactcagca

SEQ ID NO: 2742571 - DNA, 25 bp, Homo sapien
ttacatccatgagcctgataaaagt

SEQ ID NO: 2742572 - DNA, 25 bp, Homo sapien
gaaaatcttgtccattactggttaa

SEQ ID NO: 2742573 - DNA, 25 bp, Homo sapien
tcaagagaaacttacaggagtggac

SEQ ID NO: 2742574 - DNA, 25 bp, Homo sapien
tcacctgtaaaattgtctgagcaac

SEQ ID NO: 2742575 - DNA, 25 bp, Homo sapien
gattcaaggtgtgaaggtaacatca

SEQ ID NO: 2742576 - DNA, 25 bp, Homo sapien
gcatgtttgctagaactcacctgta

SEQ ID NO: 2742577 - DNA, 25 bp, Homo sapien
ctgtaacagtgcaattaaacgttct

SEQ ID NO: 2742578 - DNA, 25 bp, Homo sapien
gcacataactaaactataaatcttc

SEQ ID NO: 2742579 - DNA, 25 bp, Homo sapien
tatacagcacataactaaactataa

SEQ ID NO: 2742580 - DNA, 25 bp, Homo sapien
gaaaataggtacatacaaaatatca

SEQ ID NO: 2742581 - DNA, 25 bp, Homo sapien
catacaaaatatcacatagagagaa

SEQ ID NO: 2742582 - DNA, 25 bp, Homo sapien
caagataaagtgcatgcctctgaag

SEQ ID NO: 2742583 - DNA, 25 bp, Homo sapien
gagcttgagctagtcaagaagccca

SEQ ID NO: 2742584 - DNA, 25 bp, Homo sapien
tgcagcatgtgaaccctccacagag

SEQ ID NO: 2742585 - DNA, 25 bp, Homo sapien
cccagaaatccctaaaagaggtgtg

SEQ ID NO: 2742586 - DNA, 25 bp, Homo sapien
gcaaagaggtttaaagtaacatcaa

SEQ ID NO: 2742587 - DNA, 25 bp, Homo sapien
ggtgaattccagagcaacattaaat

SEQ ID NO: 2742588 - DNA, 25 bp, Homo sapien
gaagcaggtgttgttagagccacat

SEQ ID NO: 2742589 - DNA, 25 bp, Homo sapien
tattttatgactaaaggtgaattcc

SEQ ID NO: 2742590 - DNA, 25 bp, Homo sapien
gaaaatggggaggaaattgtgatta

SEQ ID NO: 2742591 - DNA, 25 bp, Homo sapien
tgggctgtggctaaaattatgagaa

SEQ ID NO: 2742592 - DNA, 25 bp, Homo sapien
ctgggctgtggctaaaattatgaga

SEQ ID NO: 2742593 - DNA, 25 bp, Homo sapien
gaactgcaatctgtaggtgtcggta

SEQ ID NO: 2742594 - DNA, 25 bp, Homo sapien
gtaatgcttgccacatagagcacag

SEQ ID NO: 2742595 - DNA, 25 bp, Homo sapien
aagctgtccaacacattagggccac

SEQ ID NO: 2742596 - DNA, 25 bp, Homo sapien
tccatctgtgaattagggtgtggcc

SEQ ID NO: 2742597 - DNA, 25 bp, Homo sapien
agatcctcttgtaaatcactagctg

SEQ ID NO: 2742598 - DNA, 25 bp, Homo sapien
tgagatcctcttgtaaatcactagc

SEQ ID NO: 2742599 - DNA, 25 bp, Homo sapien
atgagatcctcttgtaaatcactag

SEQ ID NO: 2742600 - DNA, 25 bp, Homo sapien
ttatgagatcctcttgtaaatcact

SEQ ID NO: 2742601 - DNA, 25 bp, Homo sapien
gtgttgtcagcatccacatacttct

SEQ ID NO: 2742602 - DNA, 25 bp, Homo sapien
tacagtgttgtcagcatccacatac

SEQ ID NO: 2742603 - DNA, 25 bp, Homo sapien
tcttttgctccttgtaacttcctac

SEQ ID NO: 2742604 - DNA, 25 bp, Homo sapien
ttcctacagtgttgtcagcatccac

SEQ ID NO: 2742605 - DNA, 25 bp, Homo sapien
gcagacctagtgcatggctccacac

SEQ ID NO: 2742606 - DNA, 25 bp, Homo sapien
cagacctagtgcatggctccacact

SEQ ID NO: 2742607 - DNA, 25 bp, Homo sapien
atgcccccgattttgcatgtcccag

SEQ ID NO: 2742608 - DNA, 25 bp, Homo sapien
agagtcaagatccacgctcagctcc

SEQ ID NO: 2742609 - DNA, 25 bp, Homo sapien
catgtcccagccaattcagagtcaa

SEQ ID NO: 2742610 - DNA, 25 bp, Homo sapien
aacaccaagcatgcccccgattttg

SEQ ID NO: 2742611 - DNA, 25 bp, Homo sapien
ggtcatccatcctttggccccaata

SEQ ID NO: 2742612 - DNA, 25 bp, Homo sapien
gcctggatcgtttgaaatggtcatc

SEQ ID NO: 2742613 - DNA, 25 bp, Homo sapien
gaaatggtcatccatcctttggccc

SEQ ID NO: 2742614 - DNA, 25 bp, Homo sapien
cctggcttagcctggatcgtttgaa

SEQ ID NO: 2742615 - DNA, 25 bp, Homo sapien
tctgtccctcgatccttgcaacgta

SEQ ID NO: 2742616 - DNA, 25 bp, Homo sapien
ggcacagcagcttctaccttatgga

SEQ ID NO: 2742617 - DNA, 25 bp, Homo sapien
tattcattggccacttgctgcacgc

SEQ ID NO: 2742618 - DNA, 25 bp, Homo sapien
gctgcaaggatgctcagaaaaccag

SEQ ID NO: 2742619 - DNA, 25 bp, Homo sapien
catgtgtccctaagaatctgagagc

SEQ ID NO: 2742620 - DNA, 25 bp, Homo sapien
gacggtgtcttactcatctgctctc

SEQ ID NO: 2742621 - DNA, 25 bp, Homo sapien
cgcttactacctggcacttattggg

SEQ ID NO: 2742622 - DNA, 25 bp, Homo sapien
gaggtcatgaccagtagaaatctca

SEQ ID NO: 2742623 - DNA, 25 bp, Homo sapien
tggccagcctttcatgcctgcttca

SEQ ID NO: 2742624 - DNA, 25 bp, Homo sapien
aggtcagccgcagagcccggggcac

SEQ ID NO: 2742625 - DNA, 25 bp, Homo sapien
ggccagcctttcatgcctgcttcat

SEQ ID NO: 2742626 - DNA, 25 bp, Homo sapien
caggtcagccgcagagcccggggca

SEQ ID NO: 2742627 - DNA, 25 bp, Homo sapien
ccggcgcacgcgggttctctgtggc

SEQ ID NO: 2742628 - DNA, 25 bp, Homo sapien
ggccggcgcacgcgggttctctgtg

SEQ ID NO: 2742629 - DNA, 25 bp, Homo sapien
gccggcgcacgcgggttctctgtgg

SEQ ID NO: 2742630 - DNA, 25 bp, Homo sapien
cggccggcgcacgcgggttctctgt

SEQ ID NO: 2742631 - DNA, 25 bp, Homo sapien
ccggcgcacgcgggttctctgtggc

SEQ ID NO: 2742632 - DNA, 25 bp, Homo sapien
cggccggcgcacgcgggttctctgt

SEQ ID NO: 2742633 - DNA, 25 bp, Homo sapien
gccggcgcacgcgggttctctgtgg

SEQ ID NO: 2742634 - DNA, 25 bp, Homo sapien
ggccggcgcacgcgggttctctgtg

SEQ ID NO: 2742635 - DNA, 25 bp, Homo sapien
tctgctccatcacgtgtatggggca

SEQ ID NO: 2742636 - DNA, 25 bp, Homo sapien
cagagagtatgcaagcacgaccacg

SEQ ID NO: 2742637 - DNA, 25 bp, Homo sapien
ggttcacacagcacgttttctgctc

SEQ ID NO: 2742638 - DNA, 25 bp, Homo sapien
atgcaagcacgaccacgtcaacagg

SEQ ID NO: 2742639 - DNA, 25 bp, Homo sapien
ctggggcccttgcaccaggcaggag

SEQ ID NO: 2742640 - DNA, 25 bp, Homo sapien
tctggggcagcccggaaccaccaga

SEQ ID NO: 2742641 - DNA, 25 bp, Homo sapien
gcagcccggaaccaccagaggtcag

SEQ ID NO: 2742642 - DNA, 25 bp, Homo sapien
gggcagcccggaaccaccagaggtc

SEQ ID NO: 2742643 - DNA, 25 bp, Homo sapien
cagtgttgttgacagggtagggtgc

SEQ ID NO: 2742644 - DNA, 25 bp, Homo sapien
acgactacccagagtcagagctgcc

SEQ ID NO: 2742645 - DNA, 25 bp, Homo sapien
taaacaggagcatgcaacccccgtg

SEQ ID NO: 2742646 - DNA, 25 bp, Homo sapien
ctgagagttccccagggtcacgact

SEQ ID NO: 2742647 - DNA, 25 bp, Homo sapien
gcactccaacatgggatagtgagcc

SEQ ID NO: 2742648 - DNA, 25 bp, Homo sapien
tcagcacggacgaggagggagccgc

SEQ ID NO: 2742649 - DNA, 25 bp, Homo sapien
gtcggctcggcgaggagccggtctc

SEQ ID NO: 2742650 - DNA, 25 bp, Homo sapien
cgctcagcacggacgaggagggagc

SEQ ID NO: 2742651 - DNA, 25 bp, Homo sapien
gcgcacgcgcggtcggctcggcgag

SEQ ID NO: 2742652 - DNA, 25 bp, Homo sapien
gtctagatttgtcttcgtctctgag

SEQ ID NO: 2742653 - DNA, 25 bp, Homo sapien
ggtctgtctagatttgtcttcgtct

SEQ ID NO: 2742654 - DNA, 25 bp, Homo sapien
aatgtgaatagactgagtgggaacc

SEQ ID NO: 2742655 - DNA, 25 bp, Homo sapien
cttgatctaatgtgaatagactgag

SEQ ID NO: 2742656 - DNA, 25 bp, Homo sapien
tgttataagtagcttgattgtcata

SEQ ID NO: 2742657 - DNA, 25 bp, Homo sapien
agcatccaacgacgcatatttcctt

SEQ ID NO: 2742658 - DNA, 25 bp, Homo sapien
gcttgattgtcatacagcatccaac

SEQ ID NO: 2742659 - DNA, 25 bp, Homo sapien
tcatacagcatccaacgacgcatat

SEQ ID NO: 2742660 - DNA, 25 bp, Homo sapien
agtcccggagatggcacacagcctt

SEQ ID NO: 2742661 - DNA, 25 bp, Homo sapien
atcaccgctaggagcactctgagaa

SEQ ID NO: 2742662 - DNA, 25 bp, Homo sapien
gcacgaaccgcaatgagctgggctc

SEQ ID NO: 2742663 - DNA, 25 bp, Homo sapien
gcctctccgtgcagtcccggagatg

SEQ ID NO: 2742664 - DNA, 25 bp, Homo sapien
tcaggatgaggtattcggagctgtg

SEQ ID NO: 2742665 - DNA, 25 bp, Homo sapien
aggatgaggtattcggagctgtgtc

SEQ ID NO: 2742666 - DNA, 25 bp, Homo sapien
atttcaggatgaggtattcggagct

SEQ ID NO: 2742667 - DNA, 25 bp, Homo sapien
tttcaggatgaggtattcggagctg

SEQ ID NO: 2742668 - DNA, 25 bp, Homo sapien
gatgaccacagctacagggctaggt

SEQ ID NO: 2742669 - DNA, 25 bp, Homo sapien
gtgcacacaattagtaaccgtagcg

SEQ ID NO: 2742670 - DNA, 25 bp, Homo sapien
aaccgtagcgatatacgtgtacacg

SEQ ID NO: 2742671 - DNA, 25 bp, Homo sapien
caatcccaagcaccataatgtggaa

SEQ ID NO: 2742672 - DNA, 25 bp, Homo sapien
gaatatccttaagataaggccccag

SEQ ID NO: 2742673 - DNA, 25 bp, Homo sapien
gagcatttccggttcccctgctgtg

SEQ ID NO: 2742674 - DNA, 25 bp, Homo sapien
gaggcccagctgagtttggatcata

SEQ ID NO: 2742675 - DNA, 25 bp, Homo sapien
taggctcaggtggaacagcctcaac

SEQ ID NO: 2742676 - DNA, 25 bp, Homo sapien
cacaggtgggcagcaggtctaacac

SEQ ID NO: 2742677 - DNA, 25 bp, Homo sapien
tcacaggtgggcagcaggtctaaca

SEQ ID NO: 2742678 - DNA, 25 bp, Homo sapien
aggtctatccctggcagtaaacagg

SEQ ID NO: 2742679 - DNA, 25 bp, Homo sapien
acaggtctatccctggcagtaaaca

SEQ ID NO: 2742680 - DNA, 25 bp, Homo sapien
ccacaggtctatccctggcagtaaa

SEQ ID NO: 2742681 - DNA, 25 bp, Homo sapien
tggccacaggtctatccctggcagt

SEQ ID NO: 2742682 - DNA, 25 bp, Homo sapien
gaatggtgtagaaaggctgacccca

SEQ ID NO: 2742683 - DNA, 25 bp, Homo sapien
tctggtcctcgaacctcttgtctgc

SEQ ID NO: 2742684 - DNA, 25 bp, Homo sapien
ggacaccagcatcccggaatggtgt

SEQ ID NO: 2742685 - DNA, 25 bp, Homo sapien
agattctctgttccccgtgcccagg

SEQ ID NO: 2742686 - DNA, 25 bp, Homo sapien
tgccaacccagttgaccgcagacat

SEQ ID NO: 2742687 - DNA, 25 bp, Homo sapien
cagccacagaatcgtgagcaaataa

SEQ ID NO: 2742688 - DNA, 25 bp, Homo sapien
cgtgagcaaataagtgatgcttaag

SEQ ID NO: 2742689 - DNA, 25 bp, Homo sapien
ccgcagacatgcaggtctgctcagg

SEQ ID NO: 2742690 - DNA, 25 bp, Homo sapien
ggtcttcactgtggacatgccacac

SEQ ID NO: 2742691 - DNA, 25 bp, Homo sapien
tcttcactgtggacatgccacacta

SEQ ID NO: 2742692 - DNA, 25 bp, Homo sapien
cacgtctccccaggtcagtcttaag

SEQ ID NO: 2742693 - DNA, 25 bp, Homo sapien
cttaaggacaatgaaactctggtct

SEQ ID NO: 2742694 - DNA, 25 bp, Homo sapien
cttttttgcgtgtggctgcggacac

SEQ ID NO: 2742695 - DNA, 25 bp, Homo sapien
ggaggagcaggagcttccttcgctt

SEQ ID NO: 2742696 - DNA, 25 bp, Homo sapien
taggaggagcaggagcttccttcgc

SEQ ID NO: 2742697 - DNA, 25 bp, Homo sapien
cactttggcttcggctttaggagga

SEQ ID NO: 2742698 - DNA, 25 bp, Homo sapien
ggccgcctgaaggtgggtgacatgc

SEQ ID NO: 2742699 - DNA, 25 bp, Homo sapien
ttgggccgcctgaaggtgggtgaca

SEQ ID NO: 2742700 - DNA, 25 bp, Homo sapien
tgggccgcctgaaggtgggtgacat

SEQ ID NO: 2742701 - DNA, 25 bp, Homo sapien
ccgcctgaaggtgggtgacatgcgg

SEQ ID NO: 2742702 - DNA, 25 bp, Homo sapien
cttgttctctttatcaggacaaatc

SEQ ID NO: 2742703 - DNA, 25 bp, Homo sapien
gccttgttctctttatcaggacaaa

SEQ ID NO: 2742704 - DNA, 25 bp, Homo sapien
atgccttgttctctttatcaggaca

SEQ ID NO: 2742705 - DNA, 25 bp, Homo sapien
gttctctttatcaggacaaatcagg

SEQ ID NO: 2742706 - DNA, 25 bp, Homo sapien
ccagctggactcagtttagatgatc

SEQ ID NO: 2742707 - DNA, 25 bp, Homo sapien
tagccagctggactcagtttagatg

SEQ ID NO: 2742708 - DNA, 25 bp, Homo sapien
ttagccagctggactcagtttagat

SEQ ID NO: 2742709 - DNA, 25 bp, Homo sapien
tagatgatcccaattttgttacaac

SEQ ID NO: 2742710 - DNA, 25 bp, Homo sapien
gtgctctattctaacttggcttgga

SEQ ID NO: 2742711 - DNA, 25 bp, Homo sapien
aagtgctctattctaacttggcttg

SEQ ID NO: 2742712 - DNA, 25 bp, Homo sapien
agtgctctattctaacttggcttgg

SEQ ID NO: 2742713 - DNA, 25 bp, Homo sapien
aaaagtgctctattctaacttggct

SEQ ID NO: 2742714 - DNA, 25 bp, Homo sapien
ttgaccagctgtgtgtgtcccttaa

SEQ ID NO: 2742715 - DNA, 25 bp, Homo sapien
taatccagtcaagtagatgtctaaa

SEQ ID NO: 2742716 - DNA, 25 bp, Homo sapien
agctgtgtgtgtcccttaatccagt

SEQ ID NO: 2742717 - DNA, 25 bp, Homo sapien
ttaatccagtcaagtagatgtctaa

SEQ ID NO: 2742718 - DNA, 25 bp, Homo sapien
accctcatagatatgcccagaaatc

SEQ ID NO: 2742719 - DNA, 25 bp, Homo sapien
ccagaaatcgtgtttgaccagctat

SEQ ID NO: 2742720 - DNA, 25 bp, Homo sapien
cacattgggtcatggttatctcagt

SEQ ID NO: 2742721 - DNA, 25 bp, Homo sapien
aagcaaagctatccctcttcacatg

SEQ ID NO: 2742722 - DNA, 25 bp, Homo sapien
tctatctgggctctcaaccaattgg

SEQ ID NO: 2742723 - DNA, 25 bp, Homo sapien
cttccttgttattctatctgggctc

SEQ ID NO: 2742724 - DNA, 25 bp, Homo sapien
gttattctatctgggctctcaacca

SEQ ID NO: 2742725 - DNA, 25 bp, Homo sapien
gctctcaaccaattggatggtgcct

SEQ ID NO: 2742726 - DNA, 25 bp, Homo sapien
tatcaatggagaatgcatggactta

SEQ ID NO: 2742727 - DNA, 25 bp, Homo sapien
atcaatggagaatgcatggacttaa

SEQ ID NO: 2742728 - DNA, 25 bp, Homo sapien
gggtgttcgtatgccatatgccatg

SEQ ID NO: 2742729 - DNA, 25 bp, Homo sapien
gtgttcgtatgccatatgccatgtt

SEQ ID NO: 2742730 - DNA, 25 bp, Homo sapien
tcagggtgttcgtatgccatatgcc

SEQ ID NO: 2742731 - DNA, 25 bp, Homo sapien
gttcgtatgccatatgccatgttca

SEQ ID NO: 2742732 - DNA, 25 bp, Homo sapien
caggatgtttgtgatagtatctgtt

SEQ ID NO: 2742733 - DNA, 25 bp, Homo sapien
gttctcggtggcaggaaaatctgta

SEQ ID NO: 2742734 - DNA, 25 bp, Homo sapien
tcttgcagttctcggtggcaggaaa

SEQ ID NO: 2742735 - DNA, 25 bp, Homo sapien
tatctgttacgctgatgctgccatc

SEQ ID NO: 2742736 - DNA, 25 bp, Homo sapien
tacccaatatcacgcattgcccgag

SEQ ID NO: 2742737 - DNA, 25 bp, Homo sapien
atacccaatatcacgcattgcccga

SEQ ID NO: 2742738 - DNA, 25 bp, Homo sapien
gaccacatacccaatatcacgcatt

SEQ ID NO: 2742739 - DNA, 25 bp, Homo sapien
ggagtgaccacatacccaatatcac

SEQ ID NO: 2742740 - DNA, 25 bp, Homo sapien
ccgttcaagttgtccctgggtggat

SEQ ID NO: 2742741 - DNA, 25 bp, Homo sapien
tgtgagcgcttatcgcacccatggc

SEQ ID NO: 2742742 - DNA, 25 bp, Homo sapien
tttctaggtatgagtgaacggttcc

SEQ ID NO: 2742743 - DNA, 25 bp, Homo sapien
gagtctccgctattaccgttcaagt

SEQ ID NO: 2742744 - DNA, 25 bp, Homo sapien
tgaaggggacctcggtgcccggagc

SEQ ID NO: 2742745 - DNA, 25 bp, Homo sapien
gcgcggttcccgagcagctccagga

SEQ ID NO: 2742746 - DNA, 25 bp, Homo sapien
ggctttcgttcccggctgtgtggcc

SEQ ID NO: 2742747 - DNA, 25 bp, Homo sapien
ctccaggaactgaaacgtgaagggg

SEQ ID NO: 2742748 - DNA, 25 bp, Homo sapien
ttctgcatgctttttgcacactggt

SEQ ID NO: 2742749 - DNA, 25 bp, Homo sapien
catgctttttgcacactggtgcttt

SEQ ID NO: 2742750 - DNA, 25 bp, Homo sapien
tgcatgctttttgcacactggtgct

SEQ ID NO: 2742751 - DNA, 25 bp, Homo sapien
tctgttctttctaattctgcatgct

SEQ ID NO: 2742752 - DNA, 25 bp, Homo sapien
tgttgccctctccatatctcttctt

SEQ ID NO: 2742753 - DNA, 25 bp, Homo sapien
tgccctctccatatctcttcttgtt

SEQ ID NO: 2742754 - DNA, 25 bp, Homo sapien
cctctccatatctcttcttgttcag

SEQ ID NO: 2742755 - DNA, 25 bp, Homo sapien
gttgccctctccatatctcttcttg

SEQ ID NO: 2742756 - DNA, 25 bp, Homo sapien
tatttctcttaataccatccttccc

SEQ ID NO: 2742757 - DNA, 25 bp, Homo sapien
gtatttctcttaataccatccttcc

SEQ ID NO: 2742758 - DNA, 25 bp, Homo sapien
ggtatttctcttaataccatccttc

SEQ ID NO: 2742759 - DNA, 25 bp, Homo sapien
actggtagacagtggtggtcacacc

SEQ ID NO: 2742760 - DNA, 25 bp, Homo sapien
ctcatcctcaggtgcactggagtct

SEQ ID NO: 2742761 - DNA, 25 bp, Homo sapien
tcatggcaacactagcaccaccata

SEQ ID NO: 2742762 - DNA, 25 bp, Homo sapien
caccaccatattggtagtaaaaact

SEQ ID NO: 2742763 - DNA, 25 bp, Homo sapien
ctcccacaggagagacctgcgtccc

SEQ ID NO: 2742764 - DNA, 25 bp, Homo sapien
agctgccttgccgtgaagttcccaa

SEQ ID NO: 2742765 - DNA, 25 bp, Homo sapien
ctgcgtcccacagccgcatgacagc

SEQ ID NO: 2742766 - DNA, 25 bp, Homo sapien
cctggctggacaactcgccgttgct

SEQ ID NO: 2742767 - DNA, 25 bp, Homo sapien
cctctgcatctagggctgcctcgag

SEQ ID NO: 2742768 - DNA, 25 bp, Homo sapien
ctgtgccgggaattggcatcctgtc

SEQ ID NO: 2742769 - DNA, 25 bp, Homo sapien
ggctgcctcgaggtggctctgttca

SEQ ID NO: 2742770 - DNA, 25 bp, Homo sapien
ctgcctcgaggtggctctgttcacc

SEQ ID NO: 2742771 - DNA, 25 bp, Homo sapien
tgccaggtcaatgtgcaagtcaatt

SEQ ID NO: 2742772 - DNA, 25 bp, Homo sapien
tgagcttctttctgtggtgacagct

SEQ ID NO: 2742773 - DNA, 25 bp, Homo sapien
atctcctcatgctccattgagcttc

SEQ ID NO: 2742774 - DNA, 25 bp, Homo sapien
gtcaattccaatatgtctgcctttc

SEQ ID NO: 2742775 - DNA, 25 bp, Homo sapien
aagcttcgatgaaaggctgggtggt

SEQ ID NO: 2742776 - DNA, 25 bp, Homo sapien
ttactgggaagcctcgttgagaggc

SEQ ID NO: 2742777 - DNA, 25 bp, Homo sapien
tactgggaagcctcgttgagaggcc

SEQ ID NO: 2742778 - DNA, 25 bp, Homo sapien
tcggggaagcttcgatgaaaggctg

SEQ ID NO: 2742779 - DNA, 25 bp, Homo sapien
gtcagggaaggctcgatgagaggcc

SEQ ID NO: 2742780 - DNA, 25 bp, Homo sapien
gtcagggaaggctcgatgagaggca

SEQ ID NO: 2742781 - DNA, 25 bp, Homo sapien
gccttgatgagaggccgggtggtca

SEQ ID NO: 2742782 - DNA, 25 bp, Homo sapien
tcagggaaggctcgatgagaggccg

SEQ ID NO: 2742783 - DNA, 25 bp, Homo sapien
gaacgggagggagcttcttcaggca

SEQ ID NO: 2742784 - DNA, 25 bp, Homo sapien
gaagaaataacgctttctggacaga

SEQ ID NO: 2742785 - DNA, 25 bp, Homo sapien
taacctcgtgaatactcgggagaag

SEQ ID NO: 2742786 - DNA, 25 bp, Homo sapien
ttccttgtaacctcgtgaatactcg

SEQ ID NO: 2742787 - DNA, 25 bp, Homo sapien
tacgatggtcagagccaacttcgcc

SEQ ID NO: 2742788 - DNA, 25 bp, Homo sapien
agggtctgcatacgatggtcagagc

SEQ ID NO: 2742789 - DNA, 25 bp, Homo sapien
cagcccaaagcctctccggccctgg

SEQ ID NO: 2742790 - DNA, 25 bp, Homo sapien
ctgcatacgatggtcagagccaact

SEQ ID NO: 2742791 - DNA, 25 bp, Homo sapien
ccattcaggctccagatcgttttcc

SEQ ID NO: 2742792 - DNA, 25 bp, Homo sapien
cctgaaggtggagaaacactccgca

SEQ ID NO: 2742793 - DNA, 25 bp, Homo sapien
tccatggtggagaaacactgcacag

SEQ ID NO: 2742794 - DNA, 25 bp, Homo sapien
catggtggagaaacactgcacaggg

SEQ ID NO: 2742795 - DNA, 25 bp, Homo sapien
aaggtggagaaacactccgcagtgg

SEQ ID NO: 2742796 - DNA, 25 bp, Homo sapien
ctgtaatgtgtgtgaacaatcaaat

SEQ ID NO: 2742797 - DNA, 25 bp, Homo sapien
tgtcccgcagatctctaagaatctg

SEQ ID NO: 2742798 - DNA, 25 bp, Homo sapien
ccattgatcctgtccttagggtcac

SEQ ID NO: 2742799 - DNA, 25 bp, Homo sapien
tagtacttcaattgcgtataccagt

SEQ ID NO: 2742800 - DNA, 25 bp, Homo sapien
tagtcttcatatcaggttgttccca

SEQ ID NO: 2742801 - DNA, 25 bp, Homo sapien
ctggagcaggcggaggtgacgcgcg

SEQ ID NO: 2742802 - DNA, 25 bp, Homo sapien
gacctgcgcgacagaacctgcaggg

SEQ ID NO: 2742803 - DNA, 25 bp, Homo sapien
ccctggaggagttccggctgggagc

SEQ ID NO: 2742804 - DNA, 25 bp, Homo sapien
ggcctcgcggaccacgtgctgcagg

SEQ ID NO: 2742805 - DNA, 25 bp, Homo sapien
actgcccctcgttccgggcggacag

SEQ ID NO: 2742806 - DNA, 25 bp, Homo sapien
tgccctgcgcaagctggaggtggtg

SEQ ID NO: 2742807 - DNA, 25 bp, Homo sapien
acaacgtgcggctgcatgcgggcca

SEQ ID NO: 2742808 - DNA, 25 bp, Homo sapien
gcccggcccctctgcgggtgcactg

SEQ ID NO: 2742809 - DNA, 25 bp, Homo sapien
actgctggtcacaacccgctgtctg

SEQ ID NO: 2742810 - DNA, 25 bp, Homo sapien
gcagcccatgaaaaacaaccgagaa

SEQ ID NO: 2742811 - DNA, 25 bp, Homo sapien
tagactgacgggagctattccgggt

SEQ ID NO: 2742812 - DNA, 25 bp, Homo sapien
ttgaaggtctagcacttgaccagcc

SEQ ID NO: 2742813 - DNA, 25 bp, Homo sapien
ggcggcatgatgaccaaccttaagg

SEQ ID NO: 2742814 - DNA, 25 bp, Homo sapien
tattgtaagactcagccgctgggcg

SEQ ID NO: 2742815 - DNA, 25 bp, Homo sapien
agcatgagtgccgtacaggagcctg

SEQ ID NO: 2742816 - DNA, 25 bp, Homo sapien
gatattgcggccagcttttggaaac

SEQ ID NO: 2742817 - DNA, 25 bp, Homo sapien
tatggagagcacttctctaccgcag

SEQ ID NO: 2742818 - DNA, 25 bp, Homo sapien
caagacaagctagtgggaatcaggc

SEQ ID NO: 2742819 - DNA, 25 bp, Homo sapien
cacgcctgctgggtttttatggaga

SEQ ID NO: 2742820 - DNA, 25 bp, Homo sapien
caggtgagagtgctgatccaaccca

SEQ ID NO: 2742821 - DNA, 25 bp, Homo sapien
aggagatatacgcaggcccagtggc

SEQ ID NO: 2742822 - DNA, 25 bp, Homo sapien
gaacatcagggttgctctcatccac

SEQ ID NO: 2742823 - DNA, 25 bp, Homo sapien
atgatgataccctcgcaggccaagg

SEQ ID NO: 2742824 - DNA, 25 bp, Homo sapien
taatgacttgttccacaggtcagga

SEQ ID NO: 2742825 - DNA, 25 bp, Homo sapien
atgctggcacaaagggctcccgtga

SEQ ID NO: 2742826 - DNA, 25 bp, Homo sapien
cacctcggagctatggcacagtgct

SEQ ID NO: 2742827 - DNA, 25 bp, Homo sapien
taaacagagccacttgagtgcccca

SEQ ID NO: 2742828 - DNA, 25 bp, Homo sapien
tgaggtctctgccagattcccaggt

SEQ ID NO: 2742829 - DNA, 25 bp, Homo sapien
agcaaacatccaggcggcggcagca

SEQ ID NO: 2742830 - DNA, 25 bp, Homo sapien
ccagcaaacatccaggcggcggcag

SEQ ID NO: 2742831 - DNA, 25 bp, Homo sapien
tcaaggtacacttgtcctgtgagcc

SEQ ID NO: 2742832 - DNA, 25 bp, Homo sapien
tacacttgtcctgtgagccgcagag

SEQ ID NO: 2742833 - DNA, 25 bp, Homo sapien
gagacctgcgaagctgccacagaag

SEQ ID NO: 2742834 - DNA, 25 bp, Homo sapien
tgagagacctgcgaagctgccacag

SEQ ID NO: 2742835 - DNA, 25 bp, Homo sapien
gatgagagacctgcgaagctgccac

SEQ ID NO: 2742836 - DNA, 25 bp, Homo sapien
gaagccctccgccttccaccgcatg

SEQ ID NO: 2742837 - DNA, 25 bp, Homo sapien
gaacaccgcggtatggtggagccca

SEQ ID NO: 2742838 - DNA, 25 bp, Homo sapien
tcccatgaagctagcaaaggccaca

SEQ ID NO: 2742839 - DNA, 25 bp, Homo sapien
cacgggctgtcctcatgctggaaca

SEQ ID NO: 2742840 - DNA, 25 bp, Homo sapien
tgctggaacaagacacctcgaggag

SEQ ID NO: 2742841 - DNA, 25 bp, Homo sapien
actggactacggaagagaaatgctg

SEQ ID NO: 2742842 - DNA, 25 bp, Homo sapien
tccttatgaaatcaacacctgccag

SEQ ID NO: 2742843 - DNA, 25 bp, Homo sapien
gaaacaccccataattggtgcaagg

SEQ ID NO: 2742844 - DNA, 25 bp, Homo sapien
aaagcgcatctaccaaatgagctga

SEQ ID NO: 2742845 - DNA, 25 bp, Homo sapien
gacaaggattacagtggctgcccct

SEQ ID NO: 2742846 - DNA, 25 bp, Homo sapien
ttccgaaacctaggatctcccagag

SEQ ID NO: 2742847 - DNA, 25 bp, Homo sapien
gccttgctggctcacggttttatag

SEQ ID NO: 2742848 - DNA, 25 bp, Homo sapien
tacaatgttcactccagacaaggat

SEQ ID NO: 2742849 - DNA, 25 bp, Homo sapien
gccgaggtgggggcggtggatcacc

SEQ ID NO: 2742850 - DNA, 25 bp, Homo sapien
tagcgcacgcctgtaatcccagcta

SEQ ID NO: 2742851 - DNA, 25 bp, Homo sapien
tgaggtcagcagttcgagaccagcc

SEQ ID NO: 2742852 - DNA, 25 bp, Homo sapien
caaaacaaaaattagctgggtgtgg

SEQ ID NO: 2742853 - DNA, 25 bp, Homo sapien
agacacaagccaaattccaaacaca

SEQ ID NO: 2742854 - DNA, 25 bp, Homo sapien
tgaatacagacacaagccaaattcc

SEQ ID NO: 2742855 - DNA, 25 bp, Homo sapien
tgctaataagtatctgcttgctgaa

SEQ ID NO: 2742856 - DNA, 25 bp, Homo sapien
tatcattgctaataagtatctgctt

SEQ ID NO: 2742857 - DNA, 25 bp, Homo sapien
tggcctcgagtcactaaaagcagtt

SEQ ID NO: 2742858 - DNA, 25 bp, Homo sapien
cagaaggcgcatgactgcctggcct

SEQ ID NO: 2742859 - DNA, 25 bp, Homo sapien
cccctttatggagtgagagagatct

SEQ ID NO: 2742860 - DNA, 25 bp, Homo sapien
gcttcggtgcacttctgctcagacg

SEQ ID NO: 2742861 - DNA, 25 bp, Homo sapien
actctcttaaacttcttcagttcga

SEQ ID NO: 2742862 - DNA, 25 bp, Homo sapien
tctcttaaacttcttcagttcgaca

SEQ ID NO: 2742863 - DNA, 25 bp, Homo sapien
tcttaaacttcttcagttcgacaac

SEQ ID NO: 2742864 - DNA, 25 bp, Homo sapien
cttaaacttcttcagttcgacaacg

SEQ ID NO: 2742865 - DNA, 25 bp, Homo sapien
gatcatggcgtggtacttggcttcc

SEQ ID NO: 2742866 - DNA, 25 bp, Homo sapien
tgccatctctaggtcagcggcgacg

SEQ ID NO: 2742867 - DNA, 25 bp, Homo sapien
aaatatgtcggtgagaccggctgcc

SEQ ID NO: 2742868 - DNA, 25 bp, Homo sapien
ttccaaggacaactgagcgacagca

SEQ ID NO: 2742869 - DNA, 25 bp, Homo sapien
tgatgctcgacatcgcacactgcag

SEQ ID NO: 2742870 - DNA, 25 bp, Homo sapien
tgtgagcacgctgatgctcgacatc

SEQ ID NO: 2742871 - DNA, 25 bp, Homo sapien
gcacactgatgctcgacatcgcaca

SEQ ID NO: 2742872 - DNA, 25 bp, Homo sapien
acactgcagccacgatgagacagca

SEQ ID NO: 2742873 - DNA, 25 bp, Homo sapien
tgatgctcgacatcgcacactgcag

SEQ ID NO: 2742874 - DNA, 25 bp, Homo sapien
actgcagccacgatgagacagcacc

SEQ ID NO: 2742875 - DNA, 25 bp, Homo sapien
tgtgagcacgctgatgctcgacatc

SEQ ID NO: 2742876 - DNA, 25 bp, Homo sapien
gacgggacagcagtgtgagcacgct

SEQ ID NO: 2742877 - DNA, 25 bp, Homo sapien
gagcacactgatgctcgacatcgca

SEQ ID NO: 2742878 - DNA, 25 bp, Homo sapien
acactgcagccacgacgagacagca

SEQ ID NO: 2742879 - DNA, 25 bp, Homo sapien
cagacgggacagcagtgtgagcacg

SEQ ID NO: 2742880 - DNA, 25 bp, Homo sapien
agtgtgagcacgctgatgctcgaca

SEQ ID NO: 2742881 - DNA, 25 bp, Homo sapien
aatactgaatattctcccctgggag

SEQ ID NO: 2742882 - DNA, 25 bp, Homo sapien
taagtctgcatatgaccggcaggtc

SEQ ID NO: 2742883 - DNA, 25 bp, Homo sapien
aaaatctagtaaatgggctgggcac

SEQ ID NO: 2742884 - DNA, 25 bp, Homo sapien
cagggactgctctttcgggcaagca

SEQ ID NO: 2742885 - DNA, 25 bp, Homo sapien
cagccaatcccagcattggaaccaa

SEQ ID NO: 2742886 - DNA, 25 bp, Homo sapien
accatccgccctggaattaggccgg

SEQ ID NO: 2742887 - DNA, 25 bp, Homo sapien
gaaccaacagggcataattccacct

SEQ ID NO: 2742888 - DNA, 25 bp, Homo sapien
attaggccggatattccaatttggg

SEQ ID NO: 2742889 - DNA, 25 bp, Homo sapien
taagcatctgaagtgcaggtagaat

SEQ ID NO: 2742890 - DNA, 25 bp, Homo sapien
aacagacatgtcttaagcatctgaa

SEQ ID NO: 2742891 - DNA, 25 bp, Homo sapien
tgcaggtagaatcaggtaagttctc

SEQ ID NO: 2742892 - DNA, 25 bp, Homo sapien
aaaacagacatgtcttaagcatctg

SEQ ID NO: 2742893 - DNA, 25 bp, Homo sapien
accgtccgcgggtccgctttgcgca

SEQ ID NO: 2742894 - DNA, 25 bp, Homo sapien
ccccactcagtacccgctccgggcg

SEQ ID NO: 2742895 - DNA, 25 bp, Homo sapien
tccgctttgcgcaggcgcggcgccc

SEQ ID NO: 2742896 - DNA, 25 bp, Homo sapien
ggagcgcgggacctcagcgttccct

SEQ ID NO: 2742897 - DNA, 25 bp, Homo sapien
acgtcacgaaggagccgatccctgt

SEQ ID NO: 2742898 - DNA, 25 bp, Homo sapien
ccatgatcttcgctggcgtggacgt

SEQ ID NO: 2742899 - DNA, 25 bp, Homo sapien
tccccaccgtgcattataacatggg

SEQ ID NO: 2742900 - DNA, 25 bp, Homo sapien
tgcattataacatgggcggcattcc

SEQ ID NO: 2742901 - DNA, 25 bp, Homo sapien
tcctgaggcacgtgaatggccagga

SEQ ID NO: 2742902 - DNA, 25 bp, Homo sapien
ttgtgcccggcctgtacgcctgtgg

SEQ ID NO: 2742903 - DNA, 25 bp, Homo sapien
ccaggatcagattgtgcccggcctg

SEQ ID NO: 2742904 - DNA, 25 bp, Homo sapien
cctgtgcctcggtacatggtgccaa

SEQ ID NO: 2742905 - DNA, 25 bp, Homo sapien
tggccagggagcgtggcacttacct

SEQ ID NO: 2742906 - DNA, 25 bp, Homo sapien
gcacttacctttgtcccttgcttca

SEQ ID NO: 2742907 - DNA, 25 bp, Homo sapien
taactgtcttcatacgcttctgcac

SEQ ID NO: 2742908 - DNA, 25 bp, Homo sapien
ccagccattcgctcctactgatgag

SEQ ID NO: 2742909 - DNA, 25 bp, Homo sapien
tgaagagaccattagaaaccacttg

SEQ ID NO: 2742910 - DNA, 25 bp, Homo sapien
ggagggcatagtcagccatgtccca

SEQ ID NO: 2742911 - DNA, 25 bp, Homo sapien
catgtcgtggcctgaacggttttca

SEQ ID NO: 2742912 - DNA, 25 bp, Homo sapien
aaatagagtggccacgcccatgaca

SEQ ID NO: 2742913 - DNA, 25 bp, Homo sapien
tctcaggtatatgccttgtggacaa

SEQ ID NO: 2742914 - DNA, 25 bp, Homo sapien
gaataatggatttgcgtccacaggg

SEQ ID NO: 2742915 - DNA, 25 bp, Homo sapien
cacattaggtgaatgccaaagccac

SEQ ID NO: 2742916 - DNA, 25 bp, Homo sapien
tgccactgataaaagaccacgtcct

SEQ ID NO: 2742917 - DNA, 25 bp, Homo sapien
gtcgcggggccggacattttctcca

SEQ ID NO: 2742918 - DNA, 25 bp, Homo sapien
aagcgctttcctggcacagcgcgca

SEQ ID NO: 2742919 - DNA, 25 bp, Homo sapien
ccggacattttctccaagcgctttc

SEQ ID NO: 2742920 - DNA, 25 bp, Homo sapien
ggcggcctgcgccaaagctctggct

SEQ ID NO: 2742921 - DNA, 25 bp, Homo sapien
actgcctgggcgctgttaaaatgtc

SEQ ID NO: 2742922 - DNA, 25 bp, Homo sapien
tacctgtggtagctctcaagttgca

SEQ ID NO: 2742923 - DNA, 25 bp, Homo sapien
ttgaagcctgatttagtacaccgtg

SEQ ID NO: 2742924 - DNA, 25 bp, Homo sapien
taagcacaggtttctggtccatctc

SEQ ID NO: 2742925 - DNA, 25 bp, Homo sapien
tcctactggatgtctcagccgagcc

SEQ ID NO: 2742926 - DNA, 25 bp, Homo sapien
cttctgtttcacggcagtcagaaga

SEQ ID NO: 2742927 - DNA, 25 bp, Homo sapien
ttctgtttcacggcagtcagaagaa

SEQ ID NO: 2742928 - DNA, 25 bp, Homo sapien
tctgtttcacggcagtcagaagaac

SEQ ID NO: 2742929 - DNA, 25 bp, Homo sapien
gttcctgtatagtttctccttggat

SEQ ID NO: 2742930 - DNA, 25 bp, Homo sapien
ctgaagaaggataaacacagctaac

SEQ ID NO: 2742931 - DNA, 25 bp, Homo sapien
tctccttggatctgttaacaattca

SEQ ID NO: 2742932 - DNA, 25 bp, Homo sapien
gataaacacagctaacaaccatcac

SEQ ID NO: 2742933 - DNA, 25 bp, Homo sapien
caaagaaactgatccaggacaggac

SEQ ID NO: 2742934 - DNA, 25 bp, Homo sapien
aagaaactgatccaggacaggacaa

SEQ ID NO: 2742935 - DNA, 25 bp, Homo sapien
ctatatgacaaagaaactgatccag

SEQ ID NO: 2742936 - DNA, 25 bp, Homo sapien
gaaactgatccaggacaggacaaac

SEQ ID NO: 2742937 - DNA, 25 bp, Homo sapien
gactctcaacgtccatggcttcctg

SEQ ID NO: 2742938 - DNA, 25 bp, Homo sapien
ccttggacacctagaggcccttggt

SEQ ID NO: 2742939 - DNA, 25 bp, Homo sapien
ggctcagctgaacgcacctcttgaa

SEQ ID NO: 2742940 - DNA, 25 bp, Homo sapien
caaagatgggtttgaatccaccagg

SEQ ID NO: 2742941 - DNA, 25 bp, Homo sapien
tccggtgactatctgtatggcaaag

SEQ ID NO: 2742942 - DNA, 25 bp, Homo sapien
agtgcgtccatagggcctgtccacg

SEQ ID NO: 2742943 - DNA, 25 bp, Homo sapien
tgtccagagtgcgtccatagggcct

SEQ ID NO: 2742944 - DNA, 25 bp, Homo sapien
tgttcacagtgcctgtccagagtgc

SEQ ID NO: 2742945 - DNA, 25 bp, Homo sapien
gtgcctgtccagagtgcgtccatag

SEQ ID NO: 2742946 - DNA, 25 bp, Homo sapien
ctgggtctcctcaagaagcagttct

SEQ ID NO: 2742947 - DNA, 25 bp, Homo sapien
tgaccagctgcgagccaggatttgg

SEQ ID NO: 2742948 - DNA, 25 bp, Homo sapien
tggacactgggtctcctcaagaagc

SEQ ID NO: 2742949 - DNA, 25 bp, Homo sapien
ccagctgcgagccaggatttgggct

SEQ ID NO: 2742950 - DNA, 25 bp, Homo sapien
ttcgtcctggtctggccaaggactt

SEQ ID NO: 2742951 - DNA, 25 bp, Homo sapien
gaccatcggtcctcagaatgtgcag

SEQ ID NO: 2742952 - DNA, 25 bp, Homo sapien
tctgaggccctcttcgtcctggtct

SEQ ID NO: 2742953 - DNA, 25 bp, Homo sapien
tccctttgtccatgccagtgaccat

SEQ ID NO: 2742954 - DNA, 25 bp, Homo sapien
cagctgactcagcacgtgccgttta

SEQ ID NO: 2742955 - DNA, 25 bp, Homo sapien
gcacgtgccgtttaggttgctgtaa

SEQ ID NO: 2742956 - DNA, 25 bp, Homo sapien
cagtcgggcggagaacagttcctcc

SEQ ID NO: 2742957 - DNA, 25 bp, Homo sapien
tgtaaacagccggtgagattctccc

SEQ ID NO: 2742958 - DNA, 25 bp, Homo sapien
gtgcaccccagtgatggccgccgtc

SEQ ID NO: 2742959 - DNA, 25 bp, Homo sapien
cgtgcaccccagtgatggccgccgt

SEQ ID NO: 2742960 - DNA, 25 bp, Homo sapien
tgcaccccagtgatggccgccgtcc

SEQ ID NO: 2742961 - DNA, 25 bp, Homo sapien
cgccgtccccgtgcacaccagtgat

SEQ ID NO: 2742962 - DNA, 25 bp, Homo sapien
gttccacgacatcctcattcgaaag

SEQ ID NO: 2742963 - DNA, 25 bp, Homo sapien
gggcagattgccttcgacgacttca

SEQ ID NO: 2742964 - DNA, 25 bp, Homo sapien
tcttgaaggctaccggctctctgac

SEQ ID NO: 2742965 - DNA, 25 bp, Homo sapien
ttcgaaagtttgacaggcagggacg

SEQ ID NO: 2742966 - DNA, 25 bp, Homo sapien
caaggcaagctccttggtggtgtct

SEQ ID NO: 2742967 - DNA, 25 bp, Homo sapien
aaggcaagctccttggtggtgtctc

SEQ ID NO: 2742968 - DNA, 25 bp, Homo sapien
ggcaagctccttggtggtgtctctc

SEQ ID NO: 2742969 - DNA, 25 bp, Homo sapien
caagctccttggtggtgtctctcct

SEQ ID NO: 2742970 - DNA, 25 bp, Homo sapien
tagcctctgccaagtcaaggagccc

SEQ ID NO: 2742971 - DNA, 25 bp, Homo sapien
taacaaataacatgaacacttctag

SEQ ID NO: 2742972 - DNA, 25 bp, Homo sapien
cccattactctttaagccagcatta

SEQ ID NO: 2742973 - DNA, 25 bp, Homo sapien
ccagcattatccattgcggtgcttt

SEQ ID NO: 2742974 - DNA, 25 bp, Homo sapien
tgcgaggacgctgtgtcttccctgc

SEQ ID NO: 2742975 - DNA, 25 bp, Homo sapien
caggcgagagtcaccatgctggcct

SEQ ID NO: 2742976 - DNA, 25 bp, Homo sapien
cgatcctcacgcctcggacccccaa

SEQ ID NO: 2742977 - DNA, 25 bp, Homo sapien
gctggcctgaatcttcagggtattt

SEQ ID NO: 2742978 - DNA, 25 bp, Homo sapien
ttaaccatccctgtttcaggagtgt

SEQ ID NO: 2742979 - DNA, 25 bp, Homo sapien
aaccatccctgtttcaggagtgtag

SEQ ID NO: 2742980 - DNA, 25 bp, Homo sapien
accatccctgtttcaggagtgtagg

SEQ ID NO: 2742981 - DNA, 25 bp, Homo sapien
catccctgtttcaggagtgtaggtg

SEQ ID NO: 2742982 - DNA, 25 bp, Homo sapien
tcgtacgaacagtacctgtccatgg

SEQ ID NO: 2742983 - DNA, 25 bp, Homo sapien
tggaaagagccaaaatgtcacagtt

SEQ ID NO: 2742984 - DNA, 25 bp, Homo sapien
tatgaccctggcctctcgtgaagag

SEQ ID NO: 2742985 - DNA, 25 bp, Homo sapien
gatgtctctggttctatagtgcaaa

SEQ ID NO: 2742986 - DNA, 25 bp, Homo sapien
aaggccgatgtgctcatcctgtgga

SEQ ID NO: 2742987 - DNA, 25 bp, Homo sapien
tgtctccatggatgatacgggccaa

SEQ ID NO: 2742988 - DNA, 25 bp, Homo sapien
tacgggccaacagttgataccaagg

SEQ ID NO: 2742989 - DNA, 25 bp, Homo sapien
gctgtcagccctggtgagacacctg

SEQ ID NO: 2742990 - DNA, 25 bp, Homo sapien
tcagagtcccgagaggaccagtggc

SEQ ID NO: 2742991 - DNA, 25 bp, Homo sapien
gggagccagagggttcaatgacact

SEQ ID NO: 2742992 - DNA, 25 bp, Homo sapien
ctctggttcagagtcccgagaggac

SEQ ID NO: 2742993 - DNA, 25 bp, Homo sapien
atccctgccaggtgttagcgcctct

SEQ ID NO: 2742994 - DNA, 25 bp, Homo sapien
atgaggaccgcggatgctgaggagc

SEQ ID NO: 2742995 - DNA, 25 bp, Homo sapien
acgtcagggtgcgaggccaggctga

SEQ ID NO: 2742996 - DNA, 25 bp, Homo sapien
tgcgggatgaagagggcgcggttcc

SEQ ID NO: 2742997 - DNA, 25 bp, Homo sapien
ccagggtctgtggagacgtcagggt

SEQ ID NO: 2742998 - DNA, 25 bp, Homo sapien
tacaccgcccggctctagggccggc

SEQ ID NO: 2742999 - DNA, 25 bp, Homo sapien
ttcgggtctacaccgcccggctcta

SEQ ID NO: 2743000 - DNA, 25 bp, Homo sapien
cgcccggctctagggccggcagctc

SEQ ID NO: 2743001 - DNA, 25 bp, Homo sapien
ctgttcgggtctacaccgcccggct

SEQ ID NO: 2743002 - DNA, 25 bp, Homo sapien
cccgcgtgacgagtgtttggaggct

SEQ ID NO: 2743003 - DNA, 25 bp, Homo sapien
cgggaacacgggatcccgcgtgacg

SEQ ID NO: 2743004 - DNA, 25 bp, Homo sapien
aggacgccggtctcccgccacggcg

SEQ ID NO: 2743005 - DNA, 25 bp, Homo sapien
tggcttcctcctcaggacgccggtc

SEQ ID NO: 2743006 - DNA, 25 bp, Homo sapien
ggcgccaggaccgcgctgaggggcc

SEQ ID NO: 2743007 - DNA, 25 bp, Homo sapien
gggcgccaggaccgcgctgaggggc

SEQ ID NO: 2743008 - DNA, 25 bp, Homo sapien
ggagttctgtcccttccaacgagga

SEQ ID NO: 2743009 - DNA, 25 bp, Homo sapien
ccaacgaggatgcttagggtcgatg

SEQ ID NO: 2743010 - DNA, 25 bp, Homo sapien
tagggaccttcatgaagcacccaca

SEQ ID NO: 2743011 - DNA, 25 bp, Homo sapien
atctggctgcttgcaccactcaggc

SEQ ID NO: 2743012 - DNA, 25 bp, Homo sapien
gctgcggtttgggtgaaggacaaag

SEQ ID NO: 2743013 - DNA, 25 bp, Homo sapien
caaagggacgtcctcttctgctcgc

SEQ ID NO: 2743014 - DNA, 25 bp, Homo sapien
tgggatgggtcacaggaggcctgag

SEQ ID NO: 2743015 - DNA, 25 bp, Homo sapien
ttctgctcgctttgcctgttctgct

SEQ ID NO: 2743016 - DNA, 25 bp, Homo sapien
tcacagtctgggcacgattctctct

SEQ ID NO: 2743017 - DNA, 25 bp, Homo sapien
agcatccacagtgcgtgagtccacg

SEQ ID NO: 2743018 - DNA, 25 bp, Homo sapien
ctttaagggaagaggctgtgaacca

SEQ ID NO: 2743019 - DNA, 25 bp, Homo sapien
cgaggctccagcagatgcggctgaa

SEQ ID NO: 2743020 - DNA, 25 bp, Homo sapien
cgtagctcctgaccgtccatgttag

SEQ ID NO: 2743021 - DNA, 25 bp, Homo sapien
tagctcctgaccgtccatgttagcc

SEQ ID NO: 2743022 - DNA, 25 bp, Homo sapien
acgtagctcctgaccgtccatgtta

SEQ ID NO: 2743023 - DNA, 25 bp, Homo sapien
gctcctgaccgtccatgttagcccc

SEQ ID NO: 2743024 - DNA, 25 bp, Homo sapien
agtatgtggcaaccgctgaattggg

SEQ ID NO: 2743025 - DNA, 25 bp, Homo sapien
gcagttggatggcaactctgttccc

SEQ ID NO: 2743026 - DNA, 25 bp, Homo sapien
tagtaggacatcatcagtatgtggc

SEQ ID NO: 2743027 - DNA, 25 bp, Homo sapien
cacagtggtagtttgggtcccctag

SEQ ID NO: 2743028 - DNA, 25 bp, Homo sapien
cagttccgttgtcagggttggtcca

SEQ ID NO: 2743029 - DNA, 25 bp, Homo sapien
ttgtccagcgtttgaagaaaaagtc

SEQ ID NO: 2743030 - DNA, 25 bp, Homo sapien
tgctcaaaggacaaagaacccacat

SEQ ID NO: 2743031 - DNA, 25 bp, Homo sapien
cagcctcagccgttcctggtgggtc

SEQ ID NO: 2743032 - DNA, 25 bp, Homo sapien
gggcgtcccagtcttgtcacatgag

SEQ ID NO: 2743033 - DNA, 25 bp, Homo sapien
caggcgattggtactaaaatggtaa

SEQ ID NO: 2743034 - DNA, 25 bp, Homo sapien
gcacggtgtgttcaccaaaacatct

SEQ ID NO: 2743035 - DNA, 25 bp, Homo sapien
tcagtaatacgagggacatggaagt

SEQ ID NO: 2743036 - DNA, 25 bp, Homo sapien
taagcacggtctctattctcccaga

SEQ ID NO: 2743037 - DNA, 25 bp, Homo sapien
tctgtgcttcacatgggagtcgccg

SEQ ID NO: 2743038 - DNA, 25 bp, Homo sapien
tgacccacgtgtgaaaagcctccag

SEQ ID NO: 2743039 - DNA, 25 bp, Homo sapien
catttaacaaggtctaagcaggagc

SEQ ID NO: 2743040 - DNA, 25 bp, Homo sapien
gaagttactagacagtcctccatcc

SEQ ID NO: 2743041 - DNA, 25 bp, Homo sapien
cagacactgatataatagtatgagt

SEQ ID NO: 2743042 - DNA, 25 bp, Homo sapien
gcgccccgccaagaaagacttctaa

SEQ ID NO: 2743043 - DNA, 25 bp, Homo sapien
catccaaattcactaccagacactg

SEQ ID NO: 2743044 - DNA, 25 bp, Homo sapien
agacccttcctttcgtgtggctaat

SEQ ID NO: 2743045 - DNA, 25 bp, Homo sapien
cagacaaaccctgaacgctcgtggt

SEQ ID NO: 2743046 - DNA, 25 bp, Homo sapien
tagcagctccaacctatgaaagact

SEQ ID NO: 2743047 - DNA, 25 bp, Homo sapien
ggtcagtgtcaacatcagcagggca

SEQ ID NO: 2743048 - DNA, 25 bp, Homo sapien
tcttcgtttactgaatgcccggcgc

SEQ ID NO: 2743049 - DNA, 25 bp, Homo sapien
caggtatgacagacgtttgattccc

SEQ ID NO: 2743050 - DNA, 25 bp, Homo sapien
ttcccacgagggtgccaatgactgc

SEQ ID NO: 2743051 - DNA, 25 bp, Homo sapien
gacgacgaggccaacataaagacag

SEQ ID NO: 2743052 - DNA, 25 bp, Homo sapien
gcaggtccccgagctgaagtcgctc

SEQ ID NO: 2743053 - DNA, 25 bp, Homo sapien
agaaaatgcacgcagtcacgctcgg

SEQ ID NO: 2743054 - DNA, 25 bp, Homo sapien
acgctcggcggaggcgtccaggact

SEQ ID NO: 2743055 - DNA, 25 bp, Homo sapien
tcgctcggccgggagacgagtaccc

SEQ ID NO: 2743056 - DNA, 25 bp, Homo sapien
ctggcagacgtcagcaaggactgga

SEQ ID NO: 2743057 - DNA, 25 bp, Homo sapien
tttaggccgccatccagtcacagtt

SEQ ID NO: 2743058 - DNA, 25 bp, Homo sapien
gaggcagcgcatggctatcattggc

SEQ ID NO: 2743059 - DNA, 25 bp, Homo sapien
cacaacgccctgaatgacgtcaaag

SEQ ID NO: 2743060 - DNA, 25 bp, Homo sapien
tggtggctctctgtgcaaccgtggc

SEQ ID NO: 2743061 - DNA, 25 bp, Homo sapien
tgcagagaatggtcaccgtgacgct

SEQ ID NO: 2743062 - DNA, 25 bp, Homo sapien
aaccgtggcgctctgtgcaactgtg

SEQ ID NO: 2743063 - DNA, 25 bp, Homo sapien
ggccgcccattctgtagccttgaca

SEQ ID NO: 2743064 - DNA, 25 bp, Homo sapien
gggtcttgagctctccacggtctcc

SEQ ID NO: 2743065 - DNA, 25 bp, Homo sapien
caagtgcagcttggaccagacacct

SEQ ID NO: 2743066 - DNA, 25 bp, Homo sapien
cagacaccttccgaggacgtgatta

SEQ ID NO: 2743067 - DNA, 25 bp, Homo sapien
gacgtgattacagggagtccccagt

SEQ ID NO: 2743068 - DNA, 25 bp, Homo sapien
tgttcacagtcattagagtgtccct

SEQ ID NO: 2743069 - DNA, 25 bp, Homo sapien
gaagcagctcttaacaagcatcagg

SEQ ID NO: 2743070 - DNA, 25 bp, Homo sapien
tctggaatgagtgcccagggcgaat

SEQ ID NO: 2743071 - DNA, 25 bp, Homo sapien
tgattctgtgtgagggtcaccgctg

SEQ ID NO: 2743072 - DNA, 25 bp, Homo sapien
aattctcataggtggatatttctct

SEQ ID NO: 2743073 - DNA, 25 bp, Homo sapien
tcagtgctaatttttgggcagagcg

SEQ ID NO: 2743074 - DNA, 25 bp, Homo sapien
ggagacgtctccttaaattctcata

SEQ ID NO: 2743075 - DNA, 25 bp, Homo sapien
cagagcgatgtctgcctacaggaga

SEQ ID NO: 2743076 - DNA, 25 bp, Homo sapien
tcaggatttcggtgatgggccctcc

SEQ ID NO: 2743077 - DNA, 25 bp, Homo sapien
gaatcgccatgcattgcgcggtgga

SEQ ID NO: 2743078 - DNA, 25 bp, Homo sapien
cagaacagccacttgtgccgggaag

SEQ ID NO: 2743079 - DNA, 25 bp, Homo sapien
tgcagttagggtcgagagcttctcc

SEQ ID NO: 2743080 - DNA, 25 bp, Homo sapien
gctatcaatgggaaattgtggactt

SEQ ID NO: 2743081 - DNA, 25 bp, Homo sapien
tttcacaacagtaaaaagctatcaa

SEQ ID NO: 2743082 - DNA, 25 bp, Homo sapien
cttttcccaccagggactcaatggg

SEQ ID NO: 2743083 - DNA, 25 bp, Homo sapien
tcaatggggactcaatgtgcaatat

SEQ ID NO: 2743084 - DNA, 25 bp, Homo sapien
tcctcctgactggtgactgtcaaca

SEQ ID NO: 2743085 - DNA, 25 bp, Homo sapien
tgactggtgactgtcaacacttgat

SEQ ID NO: 2743086 - DNA, 25 bp, Homo sapien
tcctgactggtgactgtcaacactt

SEQ ID NO: 2743087 - DNA, 25 bp, Homo sapien
tctttaagaactcctcctgactggt

SEQ ID NO: 2743088 - DNA, 25 bp, Homo sapien
taaggactggccgtgattcttggca

SEQ ID NO: 2743089 - DNA, 25 bp, Homo sapien
ttccaccgtgcaggcaggtttcagg

SEQ ID NO: 2743090 - DNA, 25 bp, Homo sapien
gaccctgtgggacttgccgtctgag

SEQ ID NO: 2743091 - DNA, 25 bp, Homo sapien
caaacgctgagcagacggaagacgt

SEQ ID NO: 2743092 - DNA, 25 bp, Homo sapien
tgcagttcaaagacctggcgagggc

SEQ ID NO: 2743093 - DNA, 25 bp, Homo sapien
ccttgggctggtttcacgcaaatcc

SEQ ID NO: 2743094 - DNA, 25 bp, Homo sapien
tggcgctcgggaggtccctgagtcg

SEQ ID NO: 2743095 - DNA, 25 bp, Homo sapien
tccctgagtcggtccccgagtcagt

SEQ ID NO: 2743096 - DNA, 25 bp, Homo sapien
gtgcggcggtgcgtggcacgagggc

SEQ ID NO: 2743097 - DNA, 25 bp, Homo sapien
caggcgcggcactctcggagttctg

SEQ ID NO: 2743098 - DNA, 25 bp, Homo sapien
gccgctggaacgagcgccggctgtg

SEQ ID NO: 2743099 - DNA, 25 bp, Homo sapien
agcggccggttagcggcgtgtcgga

SEQ ID NO: 2743100 - DNA, 25 bp, Homo sapien
aaggtgccgggagagtagggaatct

SEQ ID NO: 2743101 - DNA, 25 bp, Homo sapien
tgcaggaaggagtccacggacttgc

SEQ ID NO: 2743102 - DNA, 25 bp, Homo sapien
tagggaatctgcgtgcgggccctct

SEQ ID NO: 2743103 - DNA, 25 bp, Homo sapien
tccagggcctcgtccggagaaaaca

SEQ ID NO: 2743104 - DNA, 25 bp, Homo sapien
gctgtgtccttggtgacactagcca

SEQ ID NO: 2743105 - DNA, 25 bp, Homo sapien
tgacactagccaggaactcgatccc

SEQ ID NO: 2743106 - DNA, 25 bp, Homo sapien
gggagtcggacgctgtgtccttggt

SEQ ID NO: 2743107 - DNA, 25 bp, Homo sapien
tcatctcctcatcatagttgggggg

SEQ ID NO: 2743108 - DNA, 25 bp, Homo sapien
ttgatggtgaaattctgcgcagggc

SEQ ID NO: 2743109 - DNA, 25 bp, Homo sapien
tggtgaaattctgcgcagggctctc

SEQ ID NO: 2743110 - DNA, 25 bp, Homo sapien
aaattctgcgcagggctctccatgg

SEQ ID NO: 2743111 - DNA, 25 bp, Homo sapien
tgaaattctgcgcagggctctccat

SEQ ID NO: 2743112 - DNA, 25 bp, Homo sapien
ccagcttggtcgacttgaaggactc

SEQ ID NO: 2743113 - DNA, 25 bp, Homo sapien
gcacgctcccgcttgtacagcttgg

SEQ ID NO: 2743114 - DNA, 25 bp, Homo sapien
cgtgagctcgtgtcggctgtacaga

SEQ ID NO: 2743115 - DNA, 25 bp, Homo sapien
tgtttctcgtcctccgtgggcgtga

SEQ ID NO: 2743116 - DNA, 25 bp, Homo sapien
aggcagacagcgctgacattttctc

SEQ ID NO: 2743117 - DNA, 25 bp, Homo sapien
tacaggtactgctgtagcgtgtggt

SEQ ID NO: 2743118 - DNA, 25 bp, Homo sapien
ctcctgccgcggcttgtacaggtac

SEQ ID NO: 2743119 - DNA, 25 bp, Homo sapien
tgtggtgcgtgaccatgtcctccgc

SEQ ID NO: 2743120 - DNA, 25 bp, Homo sapien
aagtccacgttgaccacgttgtcgg

SEQ ID NO: 2743121 - DNA, 25 bp, Homo sapien
acgttgaccacgttgtcggtgctgg

SEQ ID NO: 2743122 - DNA, 25 bp, Homo sapien
cctccacggtggacgatcgtggcgt

SEQ ID NO: 2743123 - DNA, 25 bp, Homo sapien
gaaggccagggacccgcggcgctct

SEQ ID NO: 2743124 - DNA, 25 bp, Homo sapien
tccttagggaggagctgcggaatcc

SEQ ID NO: 2743125 - DNA, 25 bp, Homo sapien
cttagggaggagctgcggaatccct

SEQ ID NO: 2743126 - DNA, 25 bp, Homo sapien
tgtccttagggaggagctgcggaat

SEQ ID NO: 2743127 - DNA, 25 bp, Homo sapien
tgagggcaccaaagctcgctaggga

SEQ ID NO: 2743128 - DNA, 25 bp, Homo sapien
catcagcctcccgtgaactgctggg

SEQ ID NO: 2743129 - DNA, 25 bp, Homo sapien
gccccgacccggcagagcaagcggc

SEQ ID NO: 2743130 - DNA, 25 bp, Homo sapien
tcagtttaccccacgagagcccctg

SEQ ID NO: 2743131 - DNA, 25 bp, Homo sapien
cctggccttgggacgcgggtgcagg

SEQ ID NO: 2743132 - DNA, 25 bp, Homo sapien
agacattcaggatccggtctcgaga

SEQ ID NO: 2743133 - DNA, 25 bp, Homo sapien
tgggccgaccgtctcatgaggaccc

SEQ ID NO: 2743134 - DNA, 25 bp, Homo sapien
ggtctcgagacttctgggccgaccg

SEQ ID NO: 2743135 - DNA, 25 bp, Homo sapien
gacattcaggatccggtctcgagac

SEQ ID NO: 2743136 - DNA, 25 bp, Homo sapien
ccaagaagtcaaagctaaccgaggc

SEQ ID NO: 2743137 - DNA, 25 bp, Homo sapien
tcctgttggatggaggccgttagac

SEQ ID NO: 2743138 - DNA, 25 bp, Homo sapien
tggcctggccggacttagaggaaac

SEQ ID NO: 2743139 - DNA, 25 bp, Homo sapien
tagacgcatatgaaactgcatgccg

SEQ ID NO: 2743140 - DNA, 25 bp, Homo sapien
acctcaagtgagctgaccacctcag

SEQ ID NO: 2743141 - DNA, 25 bp, Homo sapien
cctcaagtgagctgaccacctcagt

SEQ ID NO: 2743142 - DNA, 25 bp, Homo sapien
ctcaagtgagctgaccacctcagtc

SEQ ID NO: 2743143 - DNA, 25 bp, Homo sapien
taattgtgcccgatctgtccggata

SEQ ID NO: 2743144 - DNA, 25 bp, Homo sapien
ttgtctctgagataattgtgcccga

SEQ ID NO: 2743145 - DNA, 25 bp, Homo sapien
cggatatgtcctcgatggccgagag

SEQ ID NO: 2743146 - DNA, 25 bp, Homo sapien
cgatctgtccggatatgtcctcgat

SEQ ID NO: 2743147 - DNA, 25 bp, Homo sapien
tgagccgaggttcccggtgctcgct

SEQ ID NO: 2743148 - DNA, 25 bp, Homo sapien
gaggttcccggtgctcgctcctctt

SEQ ID NO: 2743149 - DNA, 25 bp, Homo sapien
tcgttgagccgaggttcccggtgct

SEQ ID NO: 2743150 - DNA, 25 bp, Homo sapien
tctcgttgagccgaggttcccggtg

SEQ ID NO: 2743151 - DNA, 25 bp, Homo sapien
acaggaccacctggtcaatgggctc

SEQ ID NO: 2743152 - DNA, 25 bp, Homo sapien
cggtagcggttcagaagccaggtct

SEQ ID NO: 2743153 - DNA, 25 bp, Homo sapien
cggtgaagaacactacgatgatggt

SEQ ID NO: 2743154 - DNA, 25 bp, Homo sapien
ctgcaccatgcggtagcggttcaga

SEQ ID NO: 2743155 - DNA, 25 bp, Homo sapien
tccaggtccagatgaacgggttcac

SEQ ID NO: 2743156 - DNA, 25 bp, Homo sapien
cgatggcccggtacacggagatgaa

SEQ ID NO: 2743157 - DNA, 25 bp, Homo sapien
gagatgaagaccagcgtcaggagca

SEQ ID NO: 2743158 - DNA, 25 bp, Homo sapien
gcacgaaggccgtgttccaggtcca

SEQ ID NO: 2743159 - DNA, 25 bp, Homo sapien
aggatggccgacagcgacagcatct

SEQ ID NO: 2743160 - DNA, 25 bp, Homo sapien
cagcatctcggacgtcaggtaggac

SEQ ID NO: 2743161 - DNA, 25 bp, Homo sapien
gatacgcacatgcttggtgaagcgc

SEQ ID NO: 2743162 - DNA, 25 bp, Homo sapien
atgatgaacacgaagccgggctcga

SEQ ID NO: 2743163 - DNA, 25 bp, Homo sapien
ccccaggctcaccacgaagaaggac

SEQ ID NO: 2743164 - DNA, 25 bp, Homo sapien
cccaggctcaccacgaagaaggaca

SEQ ID NO: 2743165 - DNA, 25 bp, Homo sapien
agaggacgccctttgtggccgtgcc

SEQ ID NO: 2743166 - DNA, 25 bp, Homo sapien
ctgggtagaggacgccctttgtggc

SEQ ID NO: 2743167 - DNA, 25 bp, Homo sapien
cctttgtggccgtgccggccttccg

SEQ ID NO: 2743168 - DNA, 25 bp, Homo sapien
ctttgtggccgtgccggccttccgg

SEQ ID NO: 2743169 - DNA, 25 bp, Homo sapien
gcagtccacgccagtcacgttgtca

SEQ ID NO: 2743170 - DNA, 25 bp, Homo sapien
ttcacgcagtccacgccagtcacgt

SEQ ID NO: 2743171 - DNA, 25 bp, Homo sapien
gtcacgttgtcacctcccagcgcca

SEQ ID NO: 2743172 - DNA, 25 bp, Homo sapien
ccagcgccacgaaagattcaaacac

SEQ ID NO: 2743173 - DNA, 25 bp, Homo sapien
cagcgactccccgaagacgatgatg

SEQ ID NO: 2743174 - DNA, 25 bp, Homo sapien
tgacatggacctcctcaaacacggc

SEQ ID NO: 2743175 - DNA, 25 bp, Homo sapien
gactgcgtcgttcagcagcgactcc

SEQ ID NO: 2743176 - DNA, 25 bp, Homo sapien
gccaggacggccaccgggtccacag

SEQ ID NO: 2743177 - DNA, 25 bp, Homo sapien
ggcctgccacccgaggaggagggcc

SEQ ID NO: 2743178 - DNA, 25 bp, Homo sapien
tggaagacaagccgggccgcggggc

SEQ ID NO: 2743179 - DNA, 25 bp, Homo sapien
ctggaagacaagccgggccgcgggg

SEQ ID NO: 2743180 - DNA, 25 bp, Homo sapien
tgcagggcctgccacccgaggagga

SEQ ID NO: 2743181 - DNA, 25 bp, Homo sapien
gctggcgccggtggcgtggggagct

SEQ ID NO: 2743182 - DNA, 25 bp, Homo sapien
tggggaggcgctcgcctacgggtcg

SEQ ID NO: 2743183 - DNA, 25 bp, Homo sapien
gggtcagcttcctgcgtccctccca

SEQ ID NO: 2743184 - DNA, 25 bp, Homo sapien
ttcggagcccgtctggctggcgccg

SEQ ID NO: 2743185 - DNA, 25 bp, Homo sapien
gggaaatccggcagtgtctctggcc

SEQ ID NO: 2743186 - DNA, 25 bp, Homo sapien
caggctcggccagttgcaccgagga

SEQ ID NO: 2743187 - DNA, 25 bp, Homo sapien
agggcttcatggtgcaggtgcagca

SEQ ID NO: 2743188 - DNA, 25 bp, Homo sapien
tctgcttcgtgcaagggaaatccgg

SEQ ID NO: 2743189 - DNA, 25 bp, Homo sapien
aaagctgtagcatccccggcagcag

SEQ ID NO: 2743190 - DNA, 25 bp, Homo sapien
cagccacgcgtggtctgggtccggg

SEQ ID NO: 2743191 - DNA, 25 bp, Homo sapien
ccaaaaccgcgcagcagttctggct

SEQ ID NO: 2743192 - DNA, 25 bp, Homo sapien
tggcatgttgagaggcgccagccac

SEQ ID NO: 2743193 - DNA, 25 bp, Homo sapien
gacggcgtacaacaggatggtcccc

SEQ ID NO: 2743194 - DNA, 25 bp, Homo sapien
cggtacccacgacggcgtacaacag

SEQ ID NO: 2743195 - DNA, 25 bp, Homo sapien
aggaagacgccgtagagggacagcc

SEQ ID NO: 2743196 - DNA, 25 bp, Homo sapien
gtggtggccgcgttccacacggtac

SEQ ID NO: 2743197 - DNA, 25 bp, Homo sapien
cgctctcgggaaccacgctggtgac

SEQ ID NO: 2743198 - DNA, 25 bp, Homo sapien
acgcgatgtggtcggccgcccagac

SEQ ID NO: 2743199 - DNA, 25 bp, Homo sapien
tgagcagggcgctctcgggaaccac

SEQ ID NO: 2743200 - DNA, 25 bp, Homo sapien
tgggcgtcagtgtgaaggacgcgat

SEQ ID NO: 2743201 - DNA, 25 bp, Homo sapien
acagagaccgcgtgtccccaggtgg

SEQ ID NO: 2743202 - DNA, 25 bp, Homo sapien
ctgggagatggtatttgtccaatag

SEQ ID NO: 2743203 - DNA, 25 bp, Homo sapien
tatttgtccaatagcgcttgtggag

SEQ ID NO: 2743204 - DNA, 25 bp, Homo sapien
tccaatagcgcttgtggagcagcca

SEQ ID NO: 2743205 - DNA, 25 bp, Homo sapien
ttggtggctgccgacacttggcccg

SEQ ID NO: 2743206 - DNA, 25 bp, Homo sapien
gggaagcagcgggagtctcggagct

SEQ ID NO: 2743207 - DNA, 25 bp, Homo sapien
ctgggaagcagcgggagtctcggag

SEQ ID NO: 2743208 - DNA, 25 bp, Homo sapien
agctcctggacgccctcacccttgg

SEQ ID NO: 2743209 - DNA, 25 bp, Homo sapien
tcctgcatgggacatgccgtcccac

SEQ ID NO: 2743210 - DNA, 25 bp, Homo sapien
cacgggggaggagccgcacccatcc

SEQ ID NO: 2743211 - DNA, 25 bp, Homo sapien
acccatccccaccggccaggcaggc

SEQ ID NO: 2743212 - DNA, 25 bp, Homo sapien
ccccaccggccaggcaggcgtgagc

SEQ ID NO: 2743213 - DNA, 25 bp, Homo sapien
catccccaccggccaggcaggcgtg

SEQ ID NO: 2743214 - DNA, 25 bp, Homo sapien
tacgggcgggactccttctgcttct

SEQ ID NO: 2743215 - DNA, 25 bp, Homo sapien
tgtgaacgtcctcacgatgaacgcc

SEQ ID NO: 2743216 - DNA, 25 bp, Homo sapien
gagctgctgcttccgtgactcacat

SEQ ID NO: 2743217 - DNA, 25 bp, Homo sapien
cggccatttccgtggtgtgaggtac

SEQ ID NO: 2743218 - DNA, 25 bp, Homo sapien
tggaaaggccagaacccgtgggaca

SEQ ID NO: 2743219 - DNA, 25 bp, Homo sapien
gaaaggaaacgtggccgtacgctgc

SEQ ID NO: 2743220 - DNA, 25 bp, Homo sapien
caagagcagcgacagagaccatcgt

SEQ ID NO: 2743221 - DNA, 25 bp, Homo sapien
tacgctgccacggagctctaaggtg

SEQ ID NO: 2743222 - DNA, 25 bp, Homo sapien
aggctggaacagactcagcccggaa

SEQ ID NO: 2743223 - DNA, 25 bp, Homo sapien
ggaacagactcagcccggaaaggcc

SEQ ID NO: 2743224 - DNA, 25 bp, Homo sapien
catctcctgtgagtcgatggggtca

SEQ ID NO: 2743225 - DNA, 25 bp, Homo sapien
agactcagcccggaaaggcccaggc

SEQ ID NO: 2743226 - DNA, 25 bp, Homo sapien
aagacagccgctgagtgctatcagg

SEQ ID NO: 2743227 - DNA, 25 bp, Homo sapien
gtaaggctcgccttcccaggtggag

SEQ ID NO: 2743228 - DNA, 25 bp, Homo sapien
caggtggagccaacaatccgagaca

SEQ ID NO: 2743229 - DNA, 25 bp, Homo sapien
gtctgcgcctgtgggataccgcgat

SEQ ID NO: 2743230 - DNA, 25 bp, Homo sapien
gggagaccctggcataaatagggca

SEQ ID NO: 2743231 - DNA, 25 bp, Homo sapien
ggcggcaggcgtcactgaaggaaaa

SEQ ID NO: 2743232 - DNA, 25 bp, Homo sapien
tccaatcaagcctgctgggcgtacc

SEQ ID NO: 2743233 - DNA, 25 bp, Homo sapien
ggaaaaggcgccttctccaatcaag

SEQ ID NO: 2743234 - DNA, 25 bp, Homo sapien
tggccacgaggatccagagcgcgat

SEQ ID NO: 2743235 - DNA, 25 bp, Homo sapien
cgcgatgacgtagggatcctgcacg

SEQ ID NO: 2743236 - DNA, 25 bp, Homo sapien
acgtagggatcctgcacgtgggccc

SEQ ID NO: 2743237 - DNA, 25 bp, Homo sapien
cgaggatccagagcgcgatgacgta

SEQ ID NO: 2743238 - DNA, 25 bp, Homo sapien
cggcccgcgccagcccgcccagcgc

SEQ ID NO: 2743239 - DNA, 25 bp, Homo sapien
cagcagcagcccccggtcggggccc

SEQ ID NO: 2743240 - DNA, 25 bp, Homo sapien
gccagcagcagcccccggtcggggc

SEQ ID NO: 2743241 - DNA, 25 bp, Homo sapien
ccccggcccgcgccagcccgcccag

SEQ ID NO: 2743242 - DNA, 25 bp, Homo sapien
ggacgcgcatgtcgcggggggtccc

SEQ ID NO: 2743243 - DNA, 25 bp, Homo sapien
cgcgcatgtcgcggggggtcccggc

SEQ ID NO: 2743244 - DNA, 25 bp, Homo sapien
ctgggacgcgcatgtcgcggggggt

SEQ ID NO: 2743245 - DNA, 25 bp, Homo sapien
cagggctgggacgcgcatgtcgcgg

SEQ ID NO: 2743246 - DNA, 25 bp, Homo sapien
gcaagagcgagcccgggactgcgcg

SEQ ID NO: 2743247 - DNA, 25 bp, Homo sapien
gggcagcgggacaggcggttccgcg

SEQ ID NO: 2743248 - DNA, 25 bp, Homo sapien
tggaggtccgggaggtcgcggcaag

SEQ ID NO: 2743249 - DNA, 25 bp, Homo sapien
gcgggacaggcggttccgcgcagct

SEQ ID NO: 2743250 - DNA, 25 bp, Homo sapien
cgtggtgcgctggtaagtctctctg

SEQ ID NO: 2743251 - DNA, 25 bp, Homo sapien
caggccttgcgtggtgcgctggtaa

SEQ ID NO: 2743252 - DNA, 25 bp, Homo sapien
gggcgcccaggccttgcgtggtgcg

SEQ ID NO: 2743253 - DNA, 25 bp, Homo sapien
ttgcgtggtgcgctggtaagtctct

SEQ ID NO: 2743254 - DNA, 25 bp, Homo sapien
gcttccgtcccgctgagcgcacgaa

SEQ ID NO: 2743255 - DNA, 25 bp, Homo sapien
gtcgcgcgtcctcccttccgccctc

SEQ ID NO: 2743256 - DNA, 25 bp, Homo sapien
atgtgcatccgcaaccgcttccgtc

SEQ ID NO: 2743257 - DNA, 25 bp, Homo sapien
ggcctctctccgcatccgcatgtgc

SEQ ID NO: 2743258 - DNA, 25 bp, Homo sapien
ctcgccactagctggaggctggtgc

SEQ ID NO: 2743259 - DNA, 25 bp, Homo sapien
tcacttggcatggaccagtcttact

SEQ ID NO: 2743260 - DNA, 25 bp, Homo sapien
tagaaacaccgggaagtcaggtgga

SEQ ID NO: 2743261 - DNA, 25 bp, Homo sapien
gaggctcgttcactgcctggagaca

SEQ ID NO: 2743262 - DNA, 25 bp, Homo sapien
tgcacgctgtgaaaggctctgagct

SEQ ID NO: 2743263 - DNA, 25 bp, Homo sapien
cactttccccattcggctgtggtga

SEQ ID NO: 2743264 - DNA, 25 bp, Homo sapien
cctggacatcgacgggcctcacttt

SEQ ID NO: 2743265 - DNA, 25 bp, Homo sapien
aggcttgggcaaggtctcctggaca

SEQ ID NO: 2743266 - DNA, 25 bp, Homo sapien
gccacacgtggacggccgcatctgg

SEQ ID NO: 2743267 - DNA, 25 bp, Homo sapien
tggccacacgtggacggccgcatct

SEQ ID NO: 2743268 - DNA, 25 bp, Homo sapien
ctgctggccacacgtggacggccgc

SEQ ID NO: 2743269 - DNA, 25 bp, Homo sapien
gctggccacacgtggacggccgcat

SEQ ID NO: 2743270 - DNA, 25 bp, Homo sapien
cctcaaccaccctgagctcaagcca

SEQ ID NO: 2743271 - DNA, 25 bp, Homo sapien
tagctgggaccacaggcacatgcca

SEQ ID NO: 2743272 - DNA, 25 bp, Homo sapien
cctggctaattcttcttattattta

SEQ ID NO: 2743273 - DNA, 25 bp, Homo sapien
cattgtcccacctcagcctccccag

SEQ ID NO: 2743274 - DNA, 25 bp, Homo sapien
ggtagccaccgcaggctgaccactg

SEQ ID NO: 2743275 - DNA, 25 bp, Homo sapien
ccccggccaacgagtgtgcagggat

SEQ ID NO: 2743276 - DNA, 25 bp, Homo sapien
agcaaggccagcaacgtgaaggcac

SEQ ID NO: 2743277 - DNA, 25 bp, Homo sapien
tgtgcacgggtagccaccgcaggct

SEQ ID NO: 2743278 - DNA, 25 bp, Homo sapien
gccaccagtcaagccgatgtcctga

SEQ ID NO: 2743279 - DNA, 25 bp, Homo sapien
gcaggtggccaccagtcaagccgat

SEQ ID NO: 2743280 - DNA, 25 bp, Homo sapien
agctggattcgctccgagggctctg

SEQ ID NO: 2743281 - DNA, 25 bp, Homo sapien
tcaattggacagctggattcgctcc

SEQ ID NO: 2743282 - DNA, 25 bp, Homo sapien
tttcagcacgtttacatccaaagtc

SEQ ID NO: 2743283 - DNA, 25 bp, Homo sapien
ttggacctggcgttttgttgttgaa

SEQ ID NO: 2743284 - DNA, 25 bp, Homo sapien
ttagtagttgtaagttttcagcacg

SEQ ID NO: 2743285 - DNA, 25 bp, Homo sapien
ggacctggcgttttgttgttgaagc

SEQ ID NO: 2743286 - DNA, 25 bp, Homo sapien
tccatcctgatgtccagctgtagca

SEQ ID NO: 2743287 - DNA, 25 bp, Homo sapien
cttctgcgtccatcctgatgtccag

SEQ ID NO: 2743288 - DNA, 25 bp, Homo sapien
tgcgtccatcctgatgtccagctgt

SEQ ID NO: 2743289 - DNA, 25 bp, Homo sapien
ctccgtgggcgcctgtcccttctct

SEQ ID NO: 2743290 - DNA, 25 bp, Homo sapien
tcctggaagagtgccttgaacatgg

SEQ ID NO: 2743291 - DNA, 25 bp, Homo sapien
tcacccgatcaggatgccaggtgcc

SEQ ID NO: 2743292 - DNA, 25 bp, Homo sapien
ttgagcagactcacccgatcaggat

SEQ ID NO: 2743293 - DNA, 25 bp, Homo sapien
gacaggagcattgagcagactcacc

SEQ ID NO: 2743294 - DNA, 25 bp, Homo sapien
gttctgttgacgtttcccgtgacat

SEQ ID NO: 2743295 - DNA, 25 bp, Homo sapien
tgtgctgtgtttctgcaacacgtca

SEQ ID NO: 2743296 - DNA, 25 bp, Homo sapien
tctgcaacacgtcaaaatgctgtgt

SEQ ID NO: 2743297 - DNA, 25 bp, Homo sapien
acaaggatgttctgttgacgtttcc

SEQ ID NO: 2743298 - DNA, 25 bp, Homo sapien
cccaaatccacagaatgccccaggc

SEQ ID NO: 2743299 - DNA, 25 bp, Homo sapien
ccaaatccacagaatgccccaggct

SEQ ID NO: 2743300 - DNA, 25 bp, Homo sapien
ccagcaccatctatcggacagggag

SEQ ID NO: 2743301 - DNA, 25 bp, Homo sapien
aattcaggtgcctatcggccgggct

SEQ ID NO: 2743302 - DNA, 25 bp, Homo sapien
tgtgtctgaaaaatcaatcgggtcc

SEQ ID NO: 2743303 - DNA, 25 bp, Homo sapien
tcccttacagaagtgaacggcgcgg

SEQ ID NO: 2743304 - DNA, 25 bp, Homo sapien
ctgcagctgcggtctctggagagca

SEQ ID NO: 2743305 - DNA, 25 bp, Homo sapien
gacactgggcactgcgtgaagtctc

SEQ ID NO: 2743306 - DNA, 25 bp, Homo sapien
gaatgagtccctccgtggacgtgga

SEQ ID NO: 2743307 - DNA, 25 bp, Homo sapien
ctgggtctcccaaacgaacgtctgg

SEQ ID NO: 2743308 - DNA, 25 bp, Homo sapien
tcagagctccggctgagatgtgcag

SEQ ID NO: 2743309 - DNA, 25 bp, Homo sapien
caggccagcgctcagctaaatgcct

SEQ ID NO: 2743310 - DNA, 25 bp, Homo sapien
ctcagggctccggtagcgaaggcca

SEQ ID NO: 2743311 - DNA, 25 bp, Homo sapien
tcctgcgtcttggtccctgaggacc

SEQ ID NO: 2743312 - DNA, 25 bp, Homo sapien
ccagcttctgctgtatcgctccatg

SEQ ID NO: 2743313 - DNA, 25 bp, Homo sapien
ctctgggccaggatcctcccgtcgc

SEQ ID NO: 2743314 - DNA, 25 bp, Homo sapien
cttaggggctcagaacaacacgcag

SEQ ID NO: 2743315 - DNA, 25 bp, Homo sapien
tctgctgtatcgctccatggccggc

SEQ ID NO: 2743316 - DNA, 25 bp, Homo sapien
tgcactgcattctcccggtgctgcc

SEQ ID NO: 2743317 - DNA, 25 bp, Homo sapien
caaggctggctccagcgggctcagt

SEQ ID NO: 2743318 - DNA, 25 bp, Homo sapien
tccagcgggctcagtgctgactacc

SEQ ID NO: 2743319 - DNA, 25 bp, Homo sapien
cagtgctgactaccaggatgcagga

SEQ ID NO: 2743320 - DNA, 25 bp, Homo sapien
aaagctctgtagaaggacctcacaa

SEQ ID NO: 2743321 - DNA, 25 bp, Homo sapien
tctggattcactccaccaggcgctg

SEQ ID NO: 2743322 - DNA, 25 bp, Homo sapien
tgggccacagtggtacggtgacaca

SEQ ID NO: 2743323 - DNA, 25 bp, Homo sapien
tgccaacgagctggtctaatctggg

SEQ ID NO: 2743324 - DNA, 25 bp, Homo sapien
tgggagaaccgccattcaggagaac

SEQ ID NO: 2743325 - DNA, 25 bp, Homo sapien
ctgggagaaccgccattcaggagaa

SEQ ID NO: 2743326 - DNA, 25 bp, Homo sapien
tgtaaaatcaactcagcaaagggct

SEQ ID NO: 2743327 - DNA, 25 bp, Homo sapien
tatgaacggaagtgctacggacacc

SEQ ID NO: 2743328 - DNA, 25 bp, Homo sapien
tgctgtcaggaggattaaccgaacg

SEQ ID NO: 2743329 - DNA, 25 bp, Homo sapien
gaggactcactcgactccaaagaga

SEQ ID NO: 2743330 - DNA, 25 bp, Homo sapien
aagtgtaatcacatagcagaacaga

SEQ ID NO: 2743331 - DNA, 25 bp, Homo sapien
atcacatagcagaacagaatcttcc

SEQ ID NO: 2743332 - DNA, 25 bp, Homo sapien
cacgtgtatctccttgtggatgtgc

SEQ ID NO: 2743333 - DNA, 25 bp, Homo sapien
gatgtgctaggaaaagtgtaatcac

SEQ ID NO: 2743334 - DNA, 25 bp, Homo sapien
agtgccgggatttgacccaagtcct

SEQ ID NO: 2743335 - DNA, 25 bp, Homo sapien
gtgccgggatttgacccaagtcctg

SEQ ID NO: 2743336 - DNA, 25 bp, Homo sapien
cagtgccgggatttgacccaagtcc

SEQ ID NO: 2743337 - DNA, 25 bp, Homo sapien
tccagtgccgggatttagaccagtc

SEQ ID NO: 2743338 - DNA, 25 bp, Homo sapien
cagtgccgggatttagaccagtcct

SEQ ID NO: 2743339 - DNA, 25 bp, Homo sapien
gccgggatttagaccagtcctggtg

SEQ ID NO: 2743340 - DNA, 25 bp, Homo sapien
ctgtccagtgccgggatttagacca

SEQ ID NO: 2743341 - DNA, 25 bp, Homo sapien
ggttctgtccagtgccgggatttga

SEQ ID NO: 2743342 - DNA, 25 bp, Homo sapien
tcctggtggggttctgtccagtgcc

SEQ ID NO: 2743343 - DNA, 25 bp, Homo sapien
agtgccgggatttggcccagtcctg

SEQ ID NO: 2743344 - DNA, 25 bp, Homo sapien
gttctatccagtgccgggatttggc

SEQ ID NO: 2743345 - DNA, 25 bp, Homo sapien
gtccagtgccgggatttagaccagt

SEQ ID NO: 2743346 - DNA, 25 bp, Homo sapien
ccagtgccgggatttagaccagtcc

SEQ ID NO: 2743347 - DNA, 25 bp, Homo sapien
gtccagcgccgggatttggcccagt

SEQ ID NO: 2743348 - DNA, 25 bp, Homo sapien
tccagcgccgggatttggcccagtc

SEQ ID NO: 2743349 - DNA, 25 bp, Homo sapien
tccagcgccgggatttggaccagtc

SEQ ID NO: 2743350 - DNA, 25 bp, Homo sapien
tccagtgccgggatttagaccagtc

SEQ ID NO: 2743351 - DNA, 25 bp, Homo sapien
gtccagcgccgggatttggcccagt

SEQ ID NO: 2743352 - DNA, 25 bp, Homo sapien
cagtgccgggatttggaccagttct

SEQ ID NO: 2743353 - DNA, 25 bp, Homo sapien
tccagtgccgggatttagaccagtc

SEQ ID NO: 2743354 - DNA, 25 bp, Homo sapien
gtccagcgccgggatttggcccagt

SEQ ID NO: 2743355 - DNA, 25 bp, Homo sapien
gtgccgggatttagaccagtcctgg

SEQ ID NO: 2743356 - DNA, 25 bp, Homo sapien
gttctgtccagcgccgggatttggc

SEQ ID NO: 2743357 - DNA, 25 bp, Homo sapien
tccagcgccgggatttggaccagtc

SEQ ID NO: 2743358 - DNA, 25 bp, Homo sapien
tccagtgccgggatttagaccagtc

SEQ ID NO: 2743359 - DNA, 25 bp, Homo sapien
cagtgccgggatttagaccagtcct

SEQ ID NO: 2743360 - DNA, 25 bp, Homo sapien
cagtgccgggatttggaccagttct

SEQ ID NO: 2743361 - DNA, 25 bp, Homo sapien
tcatgatgtgtctttgtgtgctttc

SEQ ID NO: 2743362 - DNA, 25 bp, Homo sapien
gtgctttcgaatgccagccatttgg

SEQ ID NO: 2743363 - DNA, 25 bp, Homo sapien
tgaaggataggatcttcatgatgtg

SEQ ID NO: 2743364 - DNA, 25 bp, Homo sapien
cttgaaggataggatcttcatgatg

SEQ ID NO: 2743365 - DNA, 25 bp, Homo sapien
gccacgtgcagacctgtagatccca

SEQ ID NO: 2743366 - DNA, 25 bp, Homo sapien
gctgttgagatactggccgtgcctg

SEQ ID NO: 2743367 - DNA, 25 bp, Homo sapien
tagtcaccgaacttgcaggaaaccc

SEQ ID NO: 2743368 - DNA, 25 bp, Homo sapien
tagatcccagcaagggtgtctcgga

SEQ ID NO: 2743369 - DNA, 25 bp, Homo sapien
gccttgcagtgttatagcccctcag

SEQ ID NO: 2743370 - DNA, 25 bp, Homo sapien
tcctagaatgaggacgccctgcagt

SEQ ID NO: 2743371 - DNA, 25 bp, Homo sapien
ttctaccaggcaacccgtacatgag

SEQ ID NO: 2743372 - DNA, 25 bp, Homo sapien
tgtgtgtgtccctcaggagcctagc

SEQ ID NO: 2743373 - DNA, 25 bp, Homo sapien
catactgtccgtttcatgggaacca

SEQ ID NO: 2743374 - DNA, 25 bp, Homo sapien
gatgacggccagtgtcccatggtga

SEQ ID NO: 2743375 - DNA, 25 bp, Homo sapien
tggcatccttagcacagggagctgg

SEQ ID NO: 2743376 - DNA, 25 bp, Homo sapien
tgtatttaaacacatgtgggcctcc

SEQ ID NO: 2743377 - DNA, 25 bp, Homo sapien
tctgcatttaagcacacgtggtccc

SEQ ID NO: 2743378 - DNA, 25 bp, Homo sapien
gtgcatttaagcacacgtggtcccc

SEQ ID NO: 2743379 - DNA, 25 bp, Homo sapien
tgtgcatttaaacacacgtggtccc

SEQ ID NO: 2743380 - DNA, 25 bp, Homo sapien
gtgcatttaaacacacgtggtcccc

SEQ ID NO: 2743381 - DNA, 25 bp, Homo sapien
ccctgtcagggtgagtgatccagaa

SEQ ID NO: 2743382 - DNA, 25 bp, Homo sapien
tatactgaaacacacgtgaccggct

SEQ ID NO: 2743383 - DNA, 25 bp, Homo sapien
tctgagcctgggacgagacagagct

SEQ ID NO: 2743384 - DNA, 25 bp, Homo sapien
tggatttaagcacacatggcccctt

SEQ ID NO: 2743385 - DNA, 25 bp, Homo sapien
caaagaaacaccctttgcctccatt

SEQ ID NO: 2743386 - DNA, 25 bp, Homo sapien
gggcattcctcaccagtgagcctct

SEQ ID NO: 2743387 - DNA, 25 bp, Homo sapien
ctcttgtgatacaaaggccacctca

SEQ ID NO: 2743388 - DNA, 25 bp, Homo sapien
tgatctgatctatcattagccatgc

SEQ ID NO: 2743389 - DNA, 25 bp, Homo sapien
ggaaaactgtttcgctgggctagta

SEQ ID NO: 2743390 - DNA, 25 bp, Homo sapien
gagagactccctcgggaaaaggcga

SEQ ID NO: 2743391 - DNA, 25 bp, Homo sapien
caccagtgctagagcaggactcaca

SEQ ID NO: 2743392 - DNA, 25 bp, Homo sapien
acacctgacagatggctggtccgcc

SEQ ID NO: 2743393 - DNA, 25 bp, Homo sapien
tatttgtcactttaccaacttgaca

SEQ ID NO: 2743394 - DNA, 25 bp, Homo sapien
tttaccaacttgacacacaatgtta

SEQ ID NO: 2743395 - DNA, 25 bp, Homo sapien
gacacacaatgttaacgacagcaga

SEQ ID NO: 2743396 - DNA, 25 bp, Homo sapien
acaatgttaacgacagcagacacag

SEQ ID NO: 2743397 - DNA, 25 bp, Homo sapien
cggaggcggcacacagatgcaatta

SEQ ID NO: 2743398 - DNA, 25 bp, Homo sapien
tctgagaaaagcctgagggccgctg

SEQ ID NO: 2743399 - DNA, 25 bp, Homo sapien
taaataagcactctggcgtgaacag

SEQ ID NO: 2743400 - DNA, 25 bp, Homo sapien
tcactacaggtttgcaagccaggct

SEQ ID NO: 2743401 - DNA, 25 bp, Homo sapien
cgcagcaggtgcactcttgggagtc

SEQ ID NO: 2743402 - DNA, 25 bp, Homo sapien
gtccttccacggagctgtggccgca

SEQ ID NO: 2743403 - DNA, 25 bp, Homo sapien
aggctcatccgcaggtagactccag

SEQ ID NO: 2743404 - DNA, 25 bp, Homo sapien
tagccacgggctaacaggctctgga

SEQ ID NO: 2743405 - DNA, 25 bp, Homo sapien
ggtgcagacaggcaagggcgggccg

SEQ ID NO: 2743406 - DNA, 25 bp, Homo sapien
gagggagcaggagcgccggcttctc

SEQ ID NO: 2743407 - DNA, 25 bp, Homo sapien
tggccacacccgtcagcctccccag

SEQ ID NO: 2743408 - DNA, 25 bp, Homo sapien
aggagcgccggcttctccccaggtg

SEQ ID NO: 2743409 - DNA, 25 bp, Homo sapien
cacagggaccggacattctgaatct

SEQ ID NO: 2743410 - DNA, 25 bp, Homo sapien
gcaatgggaggtctgcgagcaaaca

SEQ ID NO: 2743411 - DNA, 25 bp, Homo sapien
gcacttcgtgtctcttgcctggcaa

SEQ ID NO: 2743412 - DNA, 25 bp, Homo sapien
cagccaccgcatcttctcaggaaag

SEQ ID NO: 2743413 - DNA, 25 bp, Homo sapien
caattccgtgttagttgcctgctgg

SEQ ID NO: 2743414 - DNA, 25 bp, Homo sapien
cccagtgtggtgtgatccgcgagac

SEQ ID NO: 2743415 - DNA, 25 bp, Homo sapien
ttgacctgcaaaccacgtgcccagt

SEQ ID NO: 2743416 - DNA, 25 bp, Homo sapien
aaggccccgtggtgtccgctgcaca

SEQ ID NO: 2743417 - DNA, 25 bp, Homo sapien
tgaagtgcgaggtgacagagtccct

SEQ ID NO: 2743418 - DNA, 25 bp, Homo sapien
gagttctgccccagttagtacagga

SEQ ID NO: 2743419 - DNA, 25 bp, Homo sapien
tgtattaggagggtcagcgaactgg

SEQ ID NO: 2743420 - DNA, 25 bp, Homo sapien
tctggggcacccgtctgagttctgc

SEQ ID NO: 2743421 - DNA, 25 bp, Homo sapien
acatagcctgactcgtccaccagat

SEQ ID NO: 2743422 - DNA, 25 bp, Homo sapien
cctgcgtgcttgtagccggacacat

SEQ ID NO: 2743423 - DNA, 25 bp, Homo sapien
cctcgacactgtgggcgacgagatg

SEQ ID NO: 2743424 - DNA, 25 bp, Homo sapien
aacttggtggtgtccgtgagcctcg

SEQ ID NO: 2743425 - DNA, 25 bp, Homo sapien
aaaggtgatggtccggcaagacttc

SEQ ID NO: 2743426 - DNA, 25 bp, Homo sapien
cccctgagatgatgggcgccttgcc

SEQ ID NO: 2743427 - DNA, 25 bp, Homo sapien
gtctttgaatcgcttcttggcgagc

SEQ ID NO: 2743428 - DNA, 25 bp, Homo sapien
gcgccttgccctcgatgagcctgtg

SEQ ID NO: 2743429 - DNA, 25 bp, Homo sapien
gaagtaccgacaagcacacggagag

SEQ ID NO: 2743430 - DNA, 25 bp, Homo sapien
cgtcagggaagtaccgacaagcaca

SEQ ID NO: 2743431 - DNA, 25 bp, Homo sapien
ccgtcagggaagtaccgacaagcac

SEQ ID NO: 2743432 - DNA, 25 bp, Homo sapien
ggaagtaccgacaagcacacggaga

SEQ ID NO: 2743433 - DNA, 25 bp, Homo sapien
ggttcccatacactttacacgcgtg

SEQ ID NO: 2743434 - DNA, 25 bp, Homo sapien
cgctgggtgattcccagaccccaag

SEQ ID NO: 2743435 - DNA, 25 bp, Homo sapien
tgctgtgtttaaacagcacctgagg

SEQ ID NO: 2743436 - DNA, 25 bp, Homo sapien
cctgagggttcccatacactttaca

SEQ ID NO: 2743437 - DNA, 25 bp, Homo sapien
ggacacccgcacgttccctgtggtg

SEQ ID NO: 2743438 - DNA, 25 bp, Homo sapien
gggcgctggtgagcccggtgagccg

SEQ ID NO: 2743439 - DNA, 25 bp, Homo sapien
ccatagggcgctgttgtccagcagc

SEQ ID NO: 2743440 - DNA, 25 bp, Homo sapien
tggatttagccccttgacgcgctcg

SEQ ID NO: 2743441 - DNA, 25 bp, Homo sapien
taattttgcgttgctgccggccttt

SEQ ID NO: 2743442 - DNA, 25 bp, Homo sapien
gctgctaattaattttgcgttgctg

SEQ ID NO: 2743443 - DNA, 25 bp, Homo sapien
ttttgcgttgctgccggccttttcg

SEQ ID NO: 2743444 - DNA, 25 bp, Homo sapien
ctaattaattttgcgttgctgccgg

SEQ ID NO: 2743445 - DNA, 25 bp, Homo sapien
tgtatcctggaacacacattgggcg

SEQ ID NO: 2743446 - DNA, 25 bp, Homo sapien
gactcgtcccagatgtgtccacacg

SEQ ID NO: 2743447 - DNA, 25 bp, Homo sapien
tttgccccgggtctgctcctgtgta

SEQ ID NO: 2743448 - DNA, 25 bp, Homo sapien
acacgcccgagcctgctgaggagca

SEQ ID NO: 2743449 - DNA, 25 bp, Homo sapien
ctgtcctccaggcagcggctgacat

SEQ ID NO: 2743450 - DNA, 25 bp, Homo sapien
agagcggccctggtcaccaggacct

SEQ ID NO: 2743451 - DNA, 25 bp, Homo sapien
caggggatggcaggctggtctgtcc

SEQ ID NO: 2743452 - DNA, 25 bp, Homo sapien
gggccatctacacaggcccacaccg

SEQ ID NO: 2743453 - DNA, 25 bp, Homo sapien
acacaggggcatctgacccacggcc

SEQ ID NO: 2743454 - DNA, 25 bp, Homo sapien
ccagagctggtagatggggcgctgg

SEQ ID NO: 2743455 - DNA, 25 bp, Homo sapien
cggccccttgcaaagccaaggccgc

SEQ ID NO: 2743456 - DNA, 25 bp, Homo sapien
gtagatggggcgctggcgccgcaga

SEQ ID NO: 2743457 - DNA, 25 bp, Homo sapien
tgtccacgtcagtgacggtcacgtt

SEQ ID NO: 2743458 - DNA, 25 bp, Homo sapien
acagcttcgaccagttcttgccgtg

SEQ ID NO: 2743459 - DNA, 25 bp, Homo sapien
tgcacggcaaagcgccggaaggcct

SEQ ID NO: 2743460 - DNA, 25 bp, Homo sapien
gttcctgccgtcgatcacctggcag

SEQ ID NO: 2743461 - DNA, 25 bp, Homo sapien
cagcatcagagcctattccgggtcc

SEQ ID NO: 2743462 - DNA, 25 bp, Homo sapien
cagggtctgtgacgtgctgccttcc

SEQ ID NO: 2743463 - DNA, 25 bp, Homo sapien
gagaaaggtgtcacccgggccatgt

SEQ ID NO: 2743464 - DNA, 25 bp, Homo sapien
gctcagtgtgtgactggcagcatca

SEQ ID NO: 2743465 - DNA, 25 bp, Homo sapien
gctgggccgcgtgggggcaggatcc

SEQ ID NO: 2743466 - DNA, 25 bp, Homo sapien
tggaaggcaccaaaaatgcagatgc

SEQ ID NO: 2743467 - DNA, 25 bp, Homo sapien
atcctgggggtggaagggccgcctg

SEQ ID NO: 2743468 - DNA, 25 bp, Homo sapien
agatgccaacccagcggaggatgca

SEQ ID NO: 2743469 - DNA, 25 bp, Homo sapien
ggacaagctcccaggcgtgtaccca

SEQ ID NO: 2743470 - DNA, 25 bp, Homo sapien
ccatctccacgcgtgtgccctgagc

SEQ ID NO: 2743471 - DNA, 25 bp, Homo sapien
aaaggacaagctcccaggcgtgtac

SEQ ID NO: 2743472 - DNA, 25 bp, Homo sapien
cgtgtacccaccatctccacgcgtg

SEQ ID NO: 2743473 - DNA, 25 bp, Homo sapien
acagtttccaccttgacgccgaagc

SEQ ID NO: 2743474 - DNA, 25 bp, Homo sapien
tgatggaccctccaatgtcccacgg

SEQ ID NO: 2743475 - DNA, 25 bp, Homo sapien
actgccggaacaggaccctctcgtg

SEQ ID NO: 2743476 - DNA, 25 bp, Homo sapien
acaggaccctctcgtgcctgcagat

SEQ ID NO: 2743477 - DNA, 25 bp, Homo sapien
acaggcccgcggacagtagccaaga

SEQ ID NO: 2743478 - DNA, 25 bp, Homo sapien
ggcccgcggacagtagccaagaccc

SEQ ID NO: 2743479 - DNA, 25 bp, Homo sapien
cgcggacagtagccaagacccgggg

SEQ ID NO: 2743480 - DNA, 25 bp, Homo sapien
ccgcggacagtagccaagacccggg

SEQ ID NO: 2743481 - DNA, 25 bp, Homo sapien
cgcgcgacccggtgctcagcggagc

SEQ ID NO: 2743482 - DNA, 25 bp, Homo sapien
gcgcgacccggtgctcagcggagct

SEQ ID NO: 2743483 - DNA, 25 bp, Homo sapien
aggcgcctccgcgactcggccgcgc

SEQ ID NO: 2743484 - DNA, 25 bp, Homo sapien
agacgcagcgactgcagcggaggcg

SEQ ID NO: 2743485 - DNA, 25 bp, Homo sapien
ttccctcctgctcgggtgcgggctc

SEQ ID NO: 2743486 - DNA, 25 bp, Homo sapien
gtgcgggctcggctgccttctcgtc

SEQ ID NO: 2743487 - DNA, 25 bp, Homo sapien
ccccgaagctgtgcggcggccacgc

SEQ ID NO: 2743488 - DNA, 25 bp, Homo sapien
cacactcgcagctgggaagtcgggg

SEQ ID NO: 2743489 - DNA, 25 bp, Homo sapien
gcagacatggtcctggagcctttgg

SEQ ID NO: 2743490 - DNA, 25 bp, Homo sapien
gaggtggatcctgattcgggactcc

SEQ ID NO: 2743491 - DNA, 25 bp, Homo sapien
tctaccgtcgggagtcggcgtgttc

SEQ ID NO: 2743492 - DNA, 25 bp, Homo sapien
cagcgacagtcggttcagtcagcac

SEQ ID NO: 2743493 - DNA, 25 bp, Homo sapien
ctgcccgtccggtggcccttcctgg

SEQ ID NO: 2743494 - DNA, 25 bp, Homo sapien
gctgcccgtccggtggcccttcctg

SEQ ID NO: 2743495 - DNA, 25 bp, Homo sapien
gcttcctgcacaggttctgcgtccg

SEQ ID NO: 2743496 - DNA, 25 bp, Homo sapien
tgtgttaccgtgtcagtgaccagga

SEQ ID NO: 2743497 - DNA, 25 bp, Homo sapien
tgtcagtgaccaggagcgttccccg

SEQ ID NO: 2743498 - DNA, 25 bp, Homo sapien
gtagctgtttccacggcttcctgca

SEQ ID NO: 2743499 - DNA, 25 bp, Homo sapien
gtcttgctgccagggagcgactctg

SEQ ID NO: 2743500 - DNA, 25 bp, Homo sapien
ttggagcacattcttaatacgccag

SEQ ID NO: 2743501 - DNA, 25 bp, Homo sapien
tgtgtgtttgggctgtgattgcatc

SEQ ID NO: 2743502 - DNA, 25 bp, Homo sapien
taaagtgcaggttccgggtcttgct

SEQ ID NO: 2743503 - DNA, 25 bp, Homo sapien
atggcgttgcagagcggagggccgc

SEQ ID NO: 2743504 - DNA, 25 bp, Homo sapien
caacaggacagcgtgctgggaagaa

SEQ ID NO: 2743505 - DNA, 25 bp, Homo sapien
ctcagttccacagccgatgttaggg

SEQ ID NO: 2743506 - DNA, 25 bp, Homo sapien
atgcctggcagagacacggaggacc

SEQ ID NO: 2743507 - DNA, 25 bp, Homo sapien
aattatctgtgatctgtgggacaac

SEQ ID NO: 2743508 - DNA, 25 bp, Homo sapien
aactgcactgcatgggattaatggc

SEQ ID NO: 2743509 - DNA, 25 bp, Homo sapien
ttaaaactgatgcagaacgggcaca

SEQ ID NO: 2743510 - DNA, 25 bp, Homo sapien
taaaagctaatttgaggcacggaag

SEQ ID NO: 2743511 - DNA, 25 bp, Homo sapien
tatgactactaaacagactaaaacg

SEQ ID NO: 2743512 - DNA, 25 bp, Homo sapien
atatgactactaaacagactaaaac

SEQ ID NO: 2743513 - DNA, 25 bp, Homo sapien
atttcccaatgctatgctccatttc

SEQ ID NO: 2743514 - DNA, 25 bp, Homo sapien
tcccatttcccaatgctatgctcca

SEQ ID NO: 2743515 - DNA, 25 bp, Homo sapien
tgtgctcccatttccgaatactgtg

SEQ ID NO: 2743516 - DNA, 25 bp, Homo sapien
ctgtgctcccaattcccagtactgt

SEQ ID NO: 2743517 - DNA, 25 bp, Homo sapien
tttcccagtactgtgagctcccatt

SEQ ID NO: 2743518 - DNA, 25 bp, Homo sapien
atttcccagtactgtgagctcccat

SEQ ID NO: 2743519 - DNA, 25 bp, Homo sapien
tgtatactcctatttcccagtgcca

SEQ ID NO: 2743520 - DNA, 25 bp, Homo sapien
tttcccagtgctgtatactcctatt

SEQ ID NO: 2743521 - DNA, 25 bp, Homo sapien
tgagctcccatttctcagcgctgtg

SEQ ID NO: 2743522 - DNA, 25 bp, Homo sapien
aaactgtgctctcatttcctagcac

SEQ ID NO: 2743523 - DNA, 25 bp, Homo sapien
tcccagtgctgtatactcctatctc

SEQ ID NO: 2743524 - DNA, 25 bp, Homo sapien
tttcccagtgctgtatactcctatc

SEQ ID NO: 2743525 - DNA, 25 bp, Homo sapien
gtgctgtatactcctatctcccagt

SEQ ID NO: 2743526 - DNA, 25 bp, Homo sapien
cagtgctgtatactcctatctccca

SEQ ID NO: 2743527 - DNA, 25 bp, Homo sapien
tcccatttcccagtactttgtgctc

SEQ ID NO: 2743528 - DNA, 25 bp, Homo sapien
tgtgatcccatttcctagtactgtg

SEQ ID NO: 2743529 - DNA, 25 bp, Homo sapien
agtactttgtgctcccatttcccag

SEQ ID NO: 2743530 - DNA, 25 bp, Homo sapien
catttcccattactgtgctcccatt

SEQ ID NO: 2743531 - DNA, 25 bp, Homo sapien
tgtgctcccatttctcagtactgtg

SEQ ID NO: 2743532 - DNA, 25 bp, Homo sapien
tgtgctcccatttcccagtactatg

SEQ ID NO: 2743533 - DNA, 25 bp, Homo sapien
atttcccagtactgtgctcccattt

SEQ ID NO: 2743534 - DNA, 25 bp, Homo sapien
gtactatgctcccatttcccagtac

SEQ ID NO: 2743535 - DNA, 25 bp, Homo sapien
tggacagcacagttaagcaggtggc

SEQ ID NO: 2743536 - DNA, 25 bp, Homo sapien
tcctggagatgtaaaccctcctgca

SEQ ID NO: 2743537 - DNA, 25 bp, Homo sapien
caggaggctttgcaaggtagactct

SEQ ID NO: 2743538 - DNA, 25 bp, Homo sapien
tggttccttcgaaggacatccaggg

SEQ ID NO: 2743539 - DNA, 25 bp, Homo sapien
gataacccatcttttatcactagat

SEQ ID NO: 2743540 - DNA, 25 bp, Homo sapien
tgttattcttcggaaatacatcctt

SEQ ID NO: 2743541 - DNA, 25 bp, Homo sapien
tcccagctgggtctagtgagagtcc

SEQ ID NO: 2743542 - DNA, 25 bp, Homo sapien
gtgcatcaccgacagaggccatttt

SEQ ID NO: 2743543 - DNA, 25 bp, Homo sapien
tcactctctagagaaccaaacttgg

SEQ ID NO: 2743544 - DNA, 25 bp, Homo sapien
aagaagatatttcactctctagaga

SEQ ID NO: 2743545 - DNA, 25 bp, Homo sapien
caacatgacctgcactgccacgtat

SEQ ID NO: 2743546 - DNA, 25 bp, Homo sapien
tcaacatgacctgcactgccacgta

SEQ ID NO: 2743547 - DNA, 25 bp, Homo sapien
agtcttcactttcagcactgtcagt

SEQ ID NO: 2743548 - DNA, 25 bp, Homo sapien
tcactttcagcactgtcagttttca

SEQ ID NO: 2743549 - DNA, 25 bp, Homo sapien
actgtcagttttcatgggctctgtt

SEQ ID NO: 2743550 - DNA, 25 bp, Homo sapien
cgaatctcagtcttcactttcagca

SEQ ID NO: 2743551 - DNA, 25 bp, Homo sapien
gatgtactcggggcatcatctgctt

SEQ ID NO: 2743552 - DNA, 25 bp, Homo sapien
atgtactcggggcatcatctgcttc

SEQ ID NO: 2743553 - DNA, 25 bp, Homo sapien
gtagatgtactcggggcatcatctg

SEQ ID NO: 2743554 - DNA, 25 bp, Homo sapien
tagatgtactcggggcatcatctgc

SEQ ID NO: 2743555 - DNA, 25 bp, Homo sapien
cattcatcgagtcagggtgtcttct

SEQ ID NO: 2743556 - DNA, 25 bp, Homo sapien
cagtttgttccattcatcgagtcag

SEQ ID NO: 2743557 - DNA, 25 bp, Homo sapien
aaatgtaaagaagggcttgtttctg

SEQ ID NO: 2743558 - DNA, 25 bp, Homo sapien
tgttccattcatcgagtcagggtgt

SEQ ID NO: 2743559 - DNA, 25 bp, Homo sapien
cttgggtgtcagtgaagtcacgctc

SEQ ID NO: 2743560 - DNA, 25 bp, Homo sapien
tattcatccacacatagatgctgca

SEQ ID NO: 2743561 - DNA, 25 bp, Homo sapien
cgggcttgggattcaacgtgatgct

SEQ ID NO: 2743562 - DNA, 25 bp, Homo sapien
gctcattttcagacggaattctcct

SEQ ID NO: 2743563 - DNA, 25 bp, Homo sapien
ccaggttgggtgatccattttcatt

SEQ ID NO: 2743564 - DNA, 25 bp, Homo sapien
cctccaggttgggtgatccattttc

SEQ ID NO: 2743565 - DNA, 25 bp, Homo sapien
tccaggttgggtgatccattttcat

SEQ ID NO: 2743566 - DNA, 25 bp, Homo sapien
ctccaggttgggtgatccattttca

SEQ ID NO: 2743567 - DNA, 25 bp, Homo sapien
tgtgccttcgaatccccgtcctggt

SEQ ID NO: 2743568 - DNA, 25 bp, Homo sapien
ctgtgccttcgaatccccgtcctgg

SEQ ID NO: 2743569 - DNA, 25 bp, Homo sapien
ggcatttgtaaatcagcagggagct

SEQ ID NO: 2743570 - DNA, 25 bp, Homo sapien
atgggcatttgtaaatcagcaggga

SEQ ID NO: 2743571 - DNA, 25 bp, Homo sapien
cattaaatggccacatcaaaaagac

SEQ ID NO: 2743572 - DNA, 25 bp, Homo sapien
tctttgggtcgacaatgaaatccag

SEQ ID NO: 2743573 - DNA, 25 bp, Homo sapien
gatctttgggtcgacaatgaaatcc

SEQ ID NO: 2743574 - DNA, 25 bp, Homo sapien
gacacagcaaaagtgatgtttaaag

SEQ ID NO: 2743575 - DNA, 25 bp, Homo sapien
gcagatgagcccagggcgccagctc

SEQ ID NO: 2743576 - DNA, 25 bp, Homo sapien
ccctgtgcagatgagcccagggcgc

SEQ ID NO: 2743577 - DNA, 25 bp, Homo sapien
ctgtgcagatgagcccagggcgcca

SEQ ID NO: 2743578 - DNA, 25 bp, Homo sapien
gtgcagatgagcccagggcgccagc

SEQ ID NO: 2743579 - DNA, 25 bp, Homo sapien
ttttgaactctcttctttgcgggta

SEQ ID NO: 2743580 - DNA, 25 bp, Homo sapien
gatgatcacgactatcagagtctgc

SEQ ID NO: 2743581 - DNA, 25 bp, Homo sapien
atgatcacgactatcagagtctgca

SEQ ID NO: 2743582 - DNA, 25 bp, Homo sapien
aggaacagcagccacgtgttcatat

SEQ ID NO: 2743583 - DNA, 25 bp, Homo sapien
tgcaccgggaacagggggaggaaca

SEQ ID NO: 2743584 - DNA, 25 bp, Homo sapien
cagcagccacgtgttcatattcttg

SEQ ID NO: 2743585 - DNA, 25 bp, Homo sapien
gggaggaacagcagccacgtgttca

SEQ ID NO: 2743586 - DNA, 25 bp, Homo sapien
gggagaagaacgcaacaggcatcgt

SEQ ID NO: 2743587 - DNA, 25 bp, Homo sapien
gcatcagtcacgcttcgaagtggaa

SEQ ID NO: 2743588 - DNA, 25 bp, Homo sapien
tgtgaggccctggaggcatcagtca

SEQ ID NO: 2743589 - DNA, 25 bp, Homo sapien
tttagggacttccacgtggagctgg

SEQ ID NO: 2743590 - DNA, 25 bp, Homo sapien
atggcgatcaggcagagcatgccag

SEQ ID NO: 2743591 - DNA, 25 bp, Homo sapien
tcatacctggggtccgtgcggagca

SEQ ID NO: 2743592 - DNA, 25 bp, Homo sapien
gacatacagcaggatggcgatcagg

SEQ ID NO: 2743593 - DNA, 25 bp, Homo sapien
gttcacgaggtactggacgaggaca

SEQ ID NO: 2743594 - DNA, 25 bp, Homo sapien
aataattccggcttcccacgcagtt

SEQ ID NO: 2743595 - DNA, 25 bp, Homo sapien
cagtggtggtcgaagccggacacac

SEQ ID NO: 2743596 - DNA, 25 bp, Homo sapien
tcccacgcagttgttgatccatttg

SEQ ID NO: 2743597 - DNA, 25 bp, Homo sapien
cttattgcaggaaatgcagtgtttg

SEQ ID NO: 2743598 - DNA, 25 bp, Homo sapien
aagccaggtgcctcggaggaaccag

SEQ ID NO: 2743599 - DNA, 25 bp, Homo sapien
agggccagaggtccatcactggaag

SEQ ID NO: 2743600 - DNA, 25 bp, Homo sapien
tgaatcggggaacgcctgtcaggcc

SEQ ID NO: 2743601 - DNA, 25 bp, Homo sapien
tgtcaggccccaagtgcgcaggttg

SEQ ID NO: 2743602 - DNA, 25 bp, Homo sapien
catgagtctgacattggagtcggcc

SEQ ID NO: 2743603 - DNA, 25 bp, Homo sapien
gacgaggtggaacgagaagatcccc

SEQ ID NO: 2743604 - DNA, 25 bp, Homo sapien
gaactgattctggatcacgtgtgca

SEQ ID NO: 2743605 - DNA, 25 bp, Homo sapien
cacgtgtgcatgttttgatctgtcg

SEQ ID NO: 2743606 - DNA, 25 bp, Homo sapien
tgatgagggtcccgtaagaagcgtg

SEQ ID NO: 2743607 - DNA, 25 bp, Homo sapien
cctgatgagggtcccgtaagaagcg

SEQ ID NO: 2743608 - DNA, 25 bp, Homo sapien
cctcgtcctggcaccaccttggggc

SEQ ID NO: 2743609 - DNA, 25 bp, Homo sapien
ccctgatgagggtcccgtaagaagc

SEQ ID NO: 2743610 - DNA, 25 bp, Homo sapien
gttccggacacagtgtcaccacttc

SEQ ID NO: 2743611 - DNA, 25 bp, Homo sapien
ggacacagtgtcaccacttccccac

SEQ ID NO: 2743612 - DNA, 25 bp, Homo sapien
tccggacacagtgtcaccacttccc

SEQ ID NO: 2743613 - DNA, 25 bp, Homo sapien
agttccggacacagtgtcaccactt

SEQ ID NO: 2743614 - DNA, 25 bp, Homo sapien
gcggtctgacatagggtcagtggct

SEQ ID NO: 2743615 - DNA, 25 bp, Homo sapien
gacgatgggccacgcaggaatggcc

SEQ ID NO: 2743616 - DNA, 25 bp, Homo sapien
accctgagccatgtgggagcggtct

SEQ ID NO: 2743617 - DNA, 25 bp, Homo sapien
gctgctctgtccacccgacgatggg

SEQ ID NO: 2743618 - DNA, 25 bp, Homo sapien
tccatcgcagggtcctccaggaacc

SEQ ID NO: 2743619 - DNA, 25 bp, Homo sapien
ggctcgggggacatagtctggccca

SEQ ID NO: 2743620 - DNA, 25 bp, Homo sapien
ccaggacaggtgactggtgccaccg

SEQ ID NO: 2743621 - DNA, 25 bp, Homo sapien
cgcttagaccatgccacgatgaaaa

SEQ ID NO: 2743622 - DNA, 25 bp, Homo sapien
cataggcgatgtatttccacgagtg

SEQ ID NO: 2743623 - DNA, 25 bp, Homo sapien
acataggcgatgtatttccacgagt

SEQ ID NO: 2743624 - DNA, 25 bp, Homo sapien
ataggcgatgtatttccacgagtga

SEQ ID NO: 2743625 - DNA, 25 bp, Homo sapien
cacataggcgatgtatttccacgag

SEQ ID NO: 2743626 - DNA, 25 bp, Homo sapien
aaaggccaacgaagacagcccaagt

SEQ ID NO: 2743627 - DNA, 25 bp, Homo sapien
caaggaaaggccaacgaagacagcc

SEQ ID NO: 2743628 - DNA, 25 bp, Homo sapien
aggaaaggccaacgaagacagccca

SEQ ID NO: 2743629 - DNA, 25 bp, Homo sapien
ggccaacgaagacagcccaagtcac

SEQ ID NO: 2743630 - DNA, 25 bp, Homo sapien
ctcttcattgttgcgtatggcttct

SEQ ID NO: 2743631 - DNA, 25 bp, Homo sapien
ggggcggcaagaccagctcttcatt

SEQ ID NO: 2743632 - DNA, 25 bp, Homo sapien
ccagctcttcattgttgcgtatggc

SEQ ID NO: 2743633 - DNA, 25 bp, Homo sapien
atgcggggcggcaagaccagctctt

SEQ ID NO: 2743634 - DNA, 25 bp, Homo sapien
cagaaggggaggacctgcgccatca

SEQ ID NO: 2743635 - DNA, 25 bp, Homo sapien
gggaggacctgcgccatcagctccg

SEQ ID NO: 2743636 - DNA, 25 bp, Homo sapien
acacagaaggggaggacctgcgcca

SEQ ID NO: 2743637 - DNA, 25 bp, Homo sapien
gaggacctgcgccatcagctccggg

SEQ ID NO: 2743638 - DNA, 25 bp, Homo sapien
ggccagagccgagtggcaacagaaa

SEQ ID NO: 2743639 - DNA, 25 bp, Homo sapien
gggtggatgactgaaagcaacggga

SEQ ID NO: 2743640 - DNA, 25 bp, Homo sapien
tgagctgccatctggacggctgcgg

SEQ ID NO: 2743641 - DNA, 25 bp, Homo sapien
gaacagacatgctgcagaatctgac

SEQ ID NO: 2743642 - DNA, 25 bp, Homo sapien
gggccaacacctgcctcggcgcaca

SEQ ID NO: 2743643 - DNA, 25 bp, Homo sapien
ggccaacacctgcctcggcgcacac

SEQ ID NO: 2743644 - DNA, 25 bp, Homo sapien
cgtccgacttcaagtcgccaaatgc

SEQ ID NO: 2743645 - DNA, 25 bp, Homo sapien
tcgtccgacttcaagtcgccaaatg

SEQ ID NO: 2743646 - DNA, 25 bp, Homo sapien
ctctcgtctttgaagcccagcgtgg

SEQ ID NO: 2743647 - DNA, 25 bp, Homo sapien
tctctcgtctttgaagcccagcgtg

SEQ ID NO: 2743648 - DNA, 25 bp, Homo sapien
cttctctcgtctttgaagcccagcg

SEQ ID NO: 2743649 - DNA, 25 bp, Homo sapien
tctcgtctttgaagcccagcgtggt

SEQ ID NO: 2743650 - DNA, 25 bp, Homo sapien
ctggagagcgagctcaagtccaccg

SEQ ID NO: 2743651 - DNA, 25 bp, Homo sapien
agagcgagctcaagtccaccgggtg

SEQ ID NO: 2743652 - DNA, 25 bp, Homo sapien
agctcaagtccaccgggtgggtctc

SEQ ID NO: 2743653 - DNA, 25 bp, Homo sapien
cgagctcaagtccaccgggtgggtc

SEQ ID NO: 2743654 - DNA, 25 bp, Homo sapien
ctgcaacacggacatggcgggccgt

SEQ ID NO: 2743655 - DNA, 25 bp, Homo sapien
aacgcggtgccccagtgcagtgcca

SEQ ID NO: 2743656 - DNA, 25 bp, Homo sapien
gcaggtgtgaccccaacgcggtgcc

SEQ ID NO: 2743657 - DNA, 25 bp, Homo sapien
catggcgggccgtgagtggcaggtg

SEQ ID NO: 2743658 - DNA, 25 bp, Homo sapien
gccatccttcaacactgtcctggac

SEQ ID NO: 2743659 - DNA, 25 bp, Homo sapien
acactgtcctggacataatcatcta

SEQ ID NO: 2743660 - DNA, 25 bp, Homo sapien
cgccatccttcaacactgtcctgga

SEQ ID NO: 2743661 - DNA, 25 bp, Homo sapien
ctgtcctggacataatcatctaaca

SEQ ID NO: 2743662 - DNA, 25 bp, Homo sapien
tgaccgaggtctgaccagcaccaca

SEQ ID NO: 2743663 - DNA, 25 bp, Homo sapien
ctctcggcagcttttcaggaacgtg

SEQ ID NO: 2743664 - DNA, 25 bp, Homo sapien
ggaacgtggctcgagtcccgctgct

SEQ ID NO: 2743665 - DNA, 25 bp, Homo sapien
tcccaaggagccctgaccgaggtct

SEQ ID NO: 2743666 - DNA, 25 bp, Homo sapien
tcggtgcacatgtcctccaactcca

SEQ ID NO: 2743667 - DNA, 25 bp, Homo sapien
ctcggtgcacatgtcctccaactcc

SEQ ID NO: 2743668 - DNA, 25 bp, Homo sapien
cactcggtgcacatgtcctccaact

SEQ ID NO: 2743669 - DNA, 25 bp, Homo sapien
actcggtgcacatgtcctccaactc

SEQ ID NO: 2743670 - DNA, 25 bp, Homo sapien
tggggggcgtcctgttggcagcttt

SEQ ID NO: 2743671 - DNA, 25 bp, Homo sapien
ttggggggcgtcctgttggcagctt

SEQ ID NO: 2743672 - DNA, 25 bp, Homo sapien
catgggggcaggaccgcgtgggggc

SEQ ID NO: 2743673 - DNA, 25 bp, Homo sapien
ccctggaagacaccaaaaatgcaga

SEQ ID NO: 2743674 - DNA, 25 bp, Homo sapien
atcctgggggtggaagggccgtctg

SEQ ID NO: 2743675 - DNA, 25 bp, Homo sapien
agatgccaacccagcggaggatgca

SEQ ID NO: 2743676 - DNA, 25 bp, Homo sapien
gaagacgagggtgacagccgtcaac

SEQ ID NO: 2743677 - DNA, 25 bp, Homo sapien
gtagtagatgcaggaacccatggcc

SEQ ID NO: 2743678 - DNA, 25 bp, Homo sapien
cccatggccgtcacacgggagtgag

SEQ ID NO: 2743679 - DNA, 25 bp, Homo sapien
cgtcaacagccgagaagaagtagta

SEQ ID NO: 2743680 - DNA, 25 bp, Homo sapien
ggcttgcatccaggtgtgcacctgc

SEQ ID NO: 2743681 - DNA, 25 bp, Homo sapien
tccagggggtcgctcttcactccca

SEQ ID NO: 2743682 - DNA, 25 bp, Homo sapien
agggggtcgctcttcactcccagac

SEQ ID NO: 2743683 - DNA, 25 bp, Homo sapien
ggtcgctcttcactcccagacctgt

SEQ ID NO: 2743684 - DNA, 25 bp, Homo sapien
cttggcaccgaagccctgggatggc

SEQ ID NO: 2743685 - DNA, 25 bp, Homo sapien
gcccagtgctccatcatgacctgga

SEQ ID NO: 2743686 - DNA, 25 bp, Homo sapien
tgcaacgcccagtgctccatcatga

SEQ ID NO: 2743687 - DNA, 25 bp, Homo sapien
tgctccatcatgacctggacccagg

SEQ ID NO: 2743688 - DNA, 25 bp, Homo sapien
ggcagagctcccaatcagaacaaag

SEQ ID NO: 2743689 - DNA, 25 bp, Homo sapien
gtttttcactatcatcgcacggccc

SEQ ID NO: 2743690 - DNA, 25 bp, Homo sapien
aagctggcagttttgagtccgtgcc

SEQ ID NO: 2743691 - DNA, 25 bp, Homo sapien
cagagcccatttgggtgcagcacag

SEQ ID NO: 2743692 - DNA, 25 bp, Homo sapien
acaggcccgcggacagtagccaagg

SEQ ID NO: 2743693 - DNA, 25 bp, Homo sapien
ggcccgcggacagtagccaaggccc

SEQ ID NO: 2743694 - DNA, 25 bp, Homo sapien
aggcccgcggacagtagccaaggcc

SEQ ID NO: 2743695 - DNA, 25 bp, Homo sapien
caggcccgcggacagtagccaaggc

SEQ ID NO: 2743696 - DNA, 25 bp, Homo sapien
cgaactccgggcatcccaatccggg

SEQ ID NO: 2743697 - DNA, 25 bp, Homo sapien
tccccgtcgcgtcctcgcaccgagc

SEQ ID NO: 2743698 - DNA, 25 bp, Homo sapien
ggcctttgcaaagcctccccgtcgc

SEQ ID NO: 2743699 - DNA, 25 bp, Homo sapien
cgcagggcggcccgggaatgtggct

SEQ ID NO: 2743700 - DNA, 25 bp, Homo sapien
tgtgagggtgctcggaccccaaggc

SEQ ID NO: 2743701 - DNA, 25 bp, Homo sapien
ccaggtatccgctcagcgcagggcg

SEQ ID NO: 2743702 - DNA, 25 bp, Homo sapien
cgaccgcgcccagttctttaaggag

SEQ ID NO: 2743703 - DNA, 25 bp, Homo sapien
cgcaggacgcgcgttgacggtgcgg

SEQ ID NO: 2743704 - DNA, 25 bp, Homo sapien
gcagacatggtcctggagcctttgg

SEQ ID NO: 2743705 - DNA, 25 bp, Homo sapien
cagcgacagtcggttcagtcagcac

SEQ ID NO: 2743706 - DNA, 25 bp, Homo sapien
tctaccgtcgggagtcggcgtgttc

SEQ ID NO: 2743707 - DNA, 25 bp, Homo sapien
gaggtggatcctgattcgggactcc

SEQ ID NO: 2743708 - DNA, 25 bp, Homo sapien
ctgcccgtccggtggcccttcctgg

SEQ ID NO: 2743709 - DNA, 25 bp, Homo sapien
gctgcccgtccggtggcccttcctg

SEQ ID NO: 2743710 - DNA, 25 bp, Homo sapien
tgtctactaagataagaagtctggg

SEQ ID NO: 2743711 - DNA, 25 bp, Homo sapien
gcctctggttctctggtattgactc

SEQ ID NO: 2743712 - DNA, 25 bp, Homo sapien
actctttttgtctactaagataaga

SEQ ID NO: 2743713 - DNA, 25 bp, Homo sapien
ggttctctggtattgactctttttg

SEQ ID NO: 2743714 - DNA, 25 bp, Homo sapien
ctaggctgaaaaactcagaatccag

SEQ ID NO: 2743715 - DNA, 25 bp, Homo sapien
ggctgaaaaactcagaatccaggtc

SEQ ID NO: 2743716 - DNA, 25 bp, Homo sapien
ctgaaaaactcagaatccaggtctg

SEQ ID NO: 2743717 - DNA, 25 bp, Homo sapien
taggctgaaaaactcagaatccagg

SEQ ID NO: 2743718 - DNA, 25 bp, Homo sapien
ccagtactatgctcccatttcccag

SEQ ID NO: 2743719 - DNA, 25 bp, Homo sapien
ttcccagtactatgctcccatttcc

SEQ ID NO: 2743720 - DNA, 25 bp, Homo sapien
gtactatgctcccatttcccagtac

SEQ ID NO: 2743721 - DNA, 25 bp, Homo sapien
actatgctcccatttcccagtactg

SEQ ID NO: 2743722 - DNA, 25 bp, Homo sapien
ccagtactatgctcccatttccgag

SEQ ID NO: 2743723 - DNA, 25 bp, Homo sapien
tactatgctcccatttccgagtact

SEQ ID NO: 2743724 - DNA, 25 bp, Homo sapien
cagtactatgctcccatttccgagt

SEQ ID NO: 2743725 - DNA, 25 bp, Homo sapien
tatgctcccatttccgagtactgtg

SEQ ID NO: 2743726 - DNA, 25 bp, Homo sapien
tcccctttcccagtactgtgggctc

SEQ ID NO: 2743727 - DNA, 25 bp, Homo sapien
ctcccctttcccagtactgtgggct

SEQ ID NO: 2743728 - DNA, 25 bp, Homo sapien
ctcagtactgtatgcccatttccca

SEQ ID NO: 2743729 - DNA, 25 bp, Homo sapien
catttctcagtactgtgctcccact

SEQ ID NO: 2743730 - DNA, 25 bp, Homo sapien
tgtgctcccatttcccagtactgtg

SEQ ID NO: 2743731 - DNA, 25 bp, Homo sapien
ccattttgcagtgctgtgagccccc

SEQ ID NO: 2743732 - DNA, 25 bp, Homo sapien
tcccaatactgtgctcccattttgc

SEQ ID NO: 2743733 - DNA, 25 bp, Homo sapien
caggaggctttgcaaggtagactct

SEQ ID NO: 2743734 - DNA, 25 bp, Homo sapien
tggacagcacagttaagcaggtggc

SEQ ID NO: 2743735 - DNA, 25 bp, Homo sapien
tcctggagatgtaaaccctcctgca

SEQ ID NO: 2743736 - DNA, 25 bp, Homo sapien
tggttccttcgaaggacatccaggg

SEQ ID NO: 2743737 - DNA, 25 bp, Homo sapien
tcagcactgtcagttttcatgggct

SEQ ID NO: 2743738 - DNA, 25 bp, Homo sapien
tcactttcagcactgtcagttttca

SEQ ID NO: 2743739 - DNA, 25 bp, Homo sapien
agtcttcactttcagcactgtcagt

SEQ ID NO: 2743740 - DNA, 25 bp, Homo sapien
actgtcagttttcatgggctctgtt

SEQ ID NO: 2743741 - DNA, 25 bp, Homo sapien
gcagcatgacctactggaatggtgg

SEQ ID NO: 2743742 - DNA, 25 bp, Homo sapien
tgagcagcatgacctactggaatgg

SEQ ID NO: 2743743 - DNA, 25 bp, Homo sapien
gcatgacctactggaatggtggcag

SEQ ID NO: 2743744 - DNA, 25 bp, Homo sapien
cctgagcagcatgacctactggaat

SEQ ID NO: 2743745 - DNA, 25 bp, Homo sapien
tgtagagacagacaaaacgttcccg

SEQ ID NO: 2743746 - DNA, 25 bp, Homo sapien
tttgagttcaggcaagtgtagagac

SEQ ID NO: 2743747 - DNA, 25 bp, Homo sapien
tcctatgtaatttgagttcaggcaa

SEQ ID NO: 2743748 - DNA, 25 bp, Homo sapien
catgaatggctataaatgttcagag

SEQ ID NO: 2743749 - DNA, 25 bp, Homo sapien
ccaagtgtagatatactcggggcat

SEQ ID NO: 2743750 - DNA, 25 bp, Homo sapien
tgtagatatactcggggcatcatct

SEQ ID NO: 2743751 - DNA, 25 bp, Homo sapien
aagtgtagatatactcggggcatca

SEQ ID NO: 2743752 - DNA, 25 bp, Homo sapien
gtgtagatatactcggggcatcatc

SEQ ID NO: 2743753 - DNA, 25 bp, Homo sapien
aataggatctcagtggtgacacagc

SEQ ID NO: 2743754 - DNA, 25 bp, Homo sapien
caatccttgtattatgggctgaact

SEQ ID NO: 2743755 - DNA, 25 bp, Homo sapien
gggctgaactatatcctcctccaaa

SEQ ID NO: 2743756 - DNA, 25 bp, Homo sapien
gagtaatggtacttcaagaatgcct

SEQ ID NO: 2743757 - DNA, 25 bp, Homo sapien
cagccctgggccctctcgaagggga

SEQ ID NO: 2743758 - DNA, 25 bp, Homo sapien
atcgagtcagggtgtcttctatgga

SEQ ID NO: 2743759 - DNA, 25 bp, Homo sapien
ctgggccctctcgaaggggaggcga

SEQ ID NO: 2743760 - DNA, 25 bp, Homo sapien
attcatcgagtcagggtgtcttcta

SEQ ID NO: 2743761 - DNA, 25 bp, Homo sapien
ccccgtctgggtgtacacgagtgga

SEQ ID NO: 2743762 - DNA, 25 bp, Homo sapien
gagtggagaactgacacaggcgcct

SEQ ID NO: 2743763 - DNA, 25 bp, Homo sapien
gcctgcaaatcagccgggagttcct

SEQ ID NO: 2743764 - DNA, 25 bp, Homo sapien
tgacacaggcgcctgcaaatcagcc

SEQ ID NO: 2743765 - DNA, 25 bp, Homo sapien
ggagcgacctcacggcgacctcaat

SEQ ID NO: 2743766 - DNA, 25 bp, Homo sapien
gacctcaatttccactgcgcctcct

SEQ ID NO: 2743767 - DNA, 25 bp, Homo sapien
tcctcccagagcctaagaagctgca

SEQ ID NO: 2743768 - DNA, 25 bp, Homo sapien
ggcagcaacagtgtacggcgacatt

SEQ ID NO: 2743769 - DNA, 25 bp, Homo sapien
gatggacacgggtcttcatcccctt

SEQ ID NO: 2743770 - DNA, 25 bp, Homo sapien
ccaagtgcagatggacacgggtctt

SEQ ID NO: 2743771 - DNA, 25 bp, Homo sapien
aagtgcagatggacacgggtcttca

SEQ ID NO: 2743772 - DNA, 25 bp, Homo sapien
tgcagatggacacgggtcttcatcc

SEQ ID NO: 2743773 - DNA, 25 bp, Homo sapien
catcttctttggacaacactgtctg

SEQ ID NO: 2743774 - DNA, 25 bp, Homo sapien
tcctccccgatgtgaacaatgaacg

SEQ ID NO: 2743775 - DNA, 25 bp, Homo sapien
agtttgttccattcatctactcaga

SEQ ID NO: 2743776 - DNA, 25 bp, Homo sapien
tccccgatgtgaacaatgaacgacg

SEQ ID NO: 2743777 - DNA, 25 bp, Homo sapien
tctgcttcagaccaggcctcatgtg

SEQ ID NO: 2743778 - DNA, 25 bp, Homo sapien
ggcctcatgtggcttcactattcat

SEQ ID NO: 2743779 - DNA, 25 bp, Homo sapien
ttctctgcttcagaccaggcctcat

SEQ ID NO: 2743780 - DNA, 25 bp, Homo sapien
ggcttcactattcatccacacatag

SEQ ID NO: 2743781 - DNA, 25 bp, Homo sapien
aaggcttggacaccagcgtcgctgt

SEQ ID NO: 2743782 - DNA, 25 bp, Homo sapien
ggtgtcaacgtggacaaacacaggc

SEQ ID NO: 2743783 - DNA, 25 bp, Homo sapien
ccaaatctttgctggaagtgcaggc

SEQ ID NO: 2743784 - DNA, 25 bp, Homo sapien
gggctcaatcgatttccaccgagtg

SEQ ID NO: 2743785 - DNA, 25 bp, Homo sapien
gaagtgacataagtgcttgtgaatc

SEQ ID NO: 2743786 - DNA, 25 bp, Homo sapien
agtgcagaagtgacataagtgcttg

SEQ ID NO: 2743787 - DNA, 25 bp, Homo sapien
tgacataagtgcttgtgaatcagca

SEQ ID NO: 2743788 - DNA, 25 bp, Homo sapien
tgcagaagtgacataagtgcttgtg

SEQ ID NO: 2743789 - DNA, 25 bp, Homo sapien
gatctttgggtcgacaatgaaatcc

SEQ ID NO: 2743790 - DNA, 25 bp, Homo sapien
cattaaatggccacatcaaaaagac

SEQ ID NO: 2743791 - DNA, 25 bp, Homo sapien
tctttgggtcgacaatgaaatccag

SEQ ID NO: 2743792 - DNA, 25 bp, Homo sapien
gacacagcaaaagtgatgtttaaag

SEQ ID NO: 2743793 - DNA, 25 bp, Homo sapien
ctgtgcagatgagcccagggcgcca

SEQ ID NO: 2743794 - DNA, 25 bp, Homo sapien
gcagatgagcccagggcgccagctc

SEQ ID NO: 2743795 - DNA, 25 bp, Homo sapien
gtgcagatgagcccagggcgccagc

SEQ ID NO: 2743796 - DNA, 25 bp, Homo sapien
ccctgtgcagatgagcccagggcgc

SEQ ID NO: 2743797 - DNA, 25 bp, Homo sapien
ttttgaactctcttctttgcggtta

SEQ ID NO: 2743798 - DNA, 25 bp, Homo sapien
tttgaactctcttctttgcggttat

SEQ ID NO: 2743799 - DNA, 25 bp, Homo sapien
tgaactctcttctttgcggttatta

SEQ ID NO: 2743800 - DNA, 25 bp, Homo sapien
aactctcttctttgcggttattaat

SEQ ID NO: 2743801 - DNA, 25 bp, Homo sapien
ccacgagcttccatggaggggccaa

SEQ ID NO: 2743802 - DNA, 25 bp, Homo sapien
gccacgagcttccatggaggggcca

SEQ ID NO: 2743803 - DNA, 25 bp, Homo sapien
agccacgagcttccatggaggggcc

SEQ ID NO: 2743804 - DNA, 25 bp, Homo sapien
tgccgcctgaggcaagggccagctt

SEQ ID NO: 2743805 - DNA, 25 bp, Homo sapien
agccttcacaggatgcgtctcacca

SEQ ID NO: 2743806 - DNA, 25 bp, Homo sapien
cacacttggtctgggctttgcgttc

SEQ ID NO: 2743807 - DNA, 25 bp, Homo sapien
tagagaagaagctcctggacatcct

SEQ ID NO: 2743808 - DNA, 25 bp, Homo sapien
cctgtggttatgaacaaggaggctc

SEQ ID NO: 2743809 - DNA, 25 bp, Homo sapien
tggaagacgctttgcagctggccca

SEQ ID NO: 2743810 - DNA, 25 bp, Homo sapien
ccactgcccagagaatggaagacgc

SEQ ID NO: 2743811 - DNA, 25 bp, Homo sapien
caagctgtcaggagcagggcattct

SEQ ID NO: 2743812 - DNA, 25 bp, Homo sapien
acttgtgtttttggaagtccacctg

SEQ ID NO: 2743813 - DNA, 25 bp, Homo sapien
cttgtgtttttggaagtccacctgt

SEQ ID NO: 2743814 - DNA, 25 bp, Homo sapien
tctacttgtgtttttggaagtccac

SEQ ID NO: 2743815 - DNA, 25 bp, Homo sapien
caggtctcggcgtgagttcagcttc

SEQ ID NO: 2743816 - DNA, 25 bp, Homo sapien
tgatctcacttctgggagaggctga

SEQ ID NO: 2743817 - DNA, 25 bp, Homo sapien
cagggttagggacatactcaagtag

SEQ ID NO: 2743818 - DNA, 25 bp, Homo sapien
gaccctgaacacatgcgcacacggg

SEQ ID NO: 2743819 - DNA, 25 bp, Homo sapien
gatgatcacgactatcagggtctgc

SEQ ID NO: 2743820 - DNA, 25 bp, Homo sapien
atgatcacgactatcagggtctgca

SEQ ID NO: 2743821 - DNA, 25 bp, Homo sapien
cagccagtgcgagggatgtctccct

SEQ ID NO: 2743822 - DNA, 25 bp, Homo sapien
tgccacatcaggtggacgtcacaga

SEQ ID NO: 2743823 - DNA, 25 bp, Homo sapien
gtccagcacctgctgacgggtgcca

SEQ ID NO: 2743824 - DNA, 25 bp, Homo sapien
tggacgtcacagaccagagcgtgct

SEQ ID NO: 2743825 - DNA, 25 bp, Homo sapien
aaatcaggcgtaatgcagaatggca

SEQ ID NO: 2743826 - DNA, 25 bp, Homo sapien
tgaagccctgcagaatcatctggaa

SEQ ID NO: 2743827 - DNA, 25 bp, Homo sapien
aatgtcacaccgtgttggctccgga

SEQ ID NO: 2743828 - DNA, 25 bp, Homo sapien
gacatcacgatgagttcagcccatg

SEQ ID NO: 2743829 - DNA, 25 bp, Homo sapien
gttcacgaggtactggacgaggaca

SEQ ID NO: 2743830 - DNA, 25 bp, Homo sapien
tactggacgaggacatacagcagga

SEQ ID NO: 2743831 - DNA, 25 bp, Homo sapien
gacatacagcaggatggcgatcagg

SEQ ID NO: 2743832 - DNA, 25 bp, Homo sapien
atggcgatcaggcagagcatgccag

SEQ ID NO: 2743833 - DNA, 25 bp, Homo sapien
gctcggtccactcggggggccctga

SEQ ID NO: 2743834 - DNA, 25 bp, Homo sapien
cacgcgggctcggtccactcggggg

SEQ ID NO: 2743835 - DNA, 25 bp, Homo sapien
aataattccggcttcccacgcagtt

SEQ ID NO: 2743836 - DNA, 25 bp, Homo sapien
cagtggtggtcgaagccggacacac

SEQ ID NO: 2743837 - DNA, 25 bp, Homo sapien
tcccacgcagttgttgatccatttg

SEQ ID NO: 2743838 - DNA, 25 bp, Homo sapien
cttattgcaggaaatgcagtgtttg

SEQ ID NO: 2743839 - DNA, 25 bp, Homo sapien
agggccagaggtccatcactggaag

SEQ ID NO: 2743840 - DNA, 25 bp, Homo sapien
aagccaggtgcctcggaggaaccag

SEQ ID NO: 2743841 - DNA, 25 bp, Homo sapien
tgaatcggggaacgcctgtcaggcc

SEQ ID NO: 2743842 - DNA, 25 bp, Homo sapien
tgtcaggccccaagtgcgcaggttg

SEQ ID NO: 2743843 - DNA, 25 bp, Homo sapien
catgagtctgacattggagtcggcc

SEQ ID NO: 2743844 - DNA, 25 bp, Homo sapien
cacgtgtgcatgttttgatctgtcg

SEQ ID NO: 2743845 - DNA, 25 bp, Homo sapien
gacgaggtggaacgagaagatcccc

SEQ ID NO: 2743846 - DNA, 25 bp, Homo sapien
gaactgattctggatcacgtgtgca

SEQ ID NO: 2743847 - DNA, 25 bp, Homo sapien
aggaagggaatgaagatcccgaagg

SEQ ID NO: 2743848 - DNA, 25 bp, Homo sapien
ccacgcgtgaggcaggaagggaatg

SEQ ID NO: 2743849 - DNA, 25 bp, Homo sapien
cacgcgtgaggcaggaagggaatga

SEQ ID NO: 2743850 - DNA, 25 bp, Homo sapien
agggaatgaagatcccgaaggtggc

SEQ ID NO: 2743851 - DNA, 25 bp, Homo sapien
cgaggaaaggcccacgaagacagcc

SEQ ID NO: 2743852 - DNA, 25 bp, Homo sapien
aggaaaggcccacgaagacagccca

SEQ ID NO: 2743853 - DNA, 25 bp, Homo sapien
aaaggcccacgaagacagcccaggt

SEQ ID NO: 2743854 - DNA, 25 bp, Homo sapien
ggaaaggcccacgaagacagcccag

SEQ ID NO: 2743855 - DNA, 25 bp, Homo sapien
agtagtgcaggggtaacgaccagcc

SEQ ID NO: 2743856 - DNA, 25 bp, Homo sapien
tgcaggggtaacgaccagccgttca

SEQ ID NO: 2743857 - DNA, 25 bp, Homo sapien
caggggtaacgaccagccgttcact

SEQ ID NO: 2743858 - DNA, 25 bp, Homo sapien
tagtgcaggggtaacgaccagccgt

SEQ ID NO: 2743859 - DNA, 25 bp, Homo sapien
atgcggggcggcaagaccagctttt

SEQ ID NO: 2743860 - DNA, 25 bp, Homo sapien
agcttttcattattgagtatggctt

SEQ ID NO: 2743861 - DNA, 25 bp, Homo sapien
ggggcggcaagaccagcttttcatt

SEQ ID NO: 2743862 - DNA, 25 bp, Homo sapien
gcttttcattattgagtatggcttc

SEQ ID NO: 2743863 - DNA, 25 bp, Homo sapien
aggacctgcgccgtcagatcctggg

SEQ ID NO: 2743864 - DNA, 25 bp, Homo sapien
gacctgcgccgtcagatcctgggag

SEQ ID NO: 2743865 - DNA, 25 bp, Homo sapien
gggaggacctgcgccgtcagatcct

SEQ ID NO: 2743866 - DNA, 25 bp, Homo sapien
acacagaaggggaggacctgcgccg

SEQ ID NO: 2743867 - DNA, 25 bp, Homo sapien
gactgggaatgcagccgccaggacc

SEQ ID NO: 2743868 - DNA, 25 bp, Homo sapien
gtcacagagaccaaggggactggga

SEQ ID NO: 2743869 - DNA, 25 bp, Homo sapien
ggaatgcagccgccaggaccagcac

SEQ ID NO: 2743870 - DNA, 25 bp, Homo sapien
tgtcacagagaccaaggggactggg

SEQ ID NO: 2743871 - DNA, 25 bp, Homo sapien
ggggaatgaacagacatgctgcaga

SEQ ID NO: 2743872 - DNA, 25 bp, Homo sapien
ccaggggaatgaacagacatgctgc

SEQ ID NO: 2743873 - DNA, 25 bp, Homo sapien
gccacgttccccgcagagggagcag

SEQ ID NO: 2743874 - DNA, 25 bp, Homo sapien
ccacgttccccgcagagggagcagg

SEQ ID NO: 2743875 - DNA, 25 bp, Homo sapien
cgttctggggagtgctcgacagccc

SEQ ID NO: 2743876 - DNA, 25 bp, Homo sapien
ttacgttctggggagtgctcgacag

SEQ ID NO: 2743877 - DNA, 25 bp, Homo sapien
ccccacacagcgacaggtcccacaa

SEQ ID NO: 2743878 - DNA, 25 bp, Homo sapien
agcgacaggtcccacaacccgttca

SEQ ID NO: 2743879 - DNA, 25 bp, Homo sapien
aggagtgcagggattgcatctgcct

SEQ ID NO: 2743880 - DNA, 25 bp, Homo sapien
gagtgcagggattgcatctgccttt

SEQ ID NO: 2743881 - DNA, 25 bp, Homo sapien
tccttaccgccagaacccacagttc

SEQ ID NO: 2743882 - DNA, 25 bp, Homo sapien
ggagtgcagggattgcatctgcctt

SEQ ID NO: 2743883 - DNA, 25 bp, Homo sapien
gctaactccagaccaaagtgagaag

SEQ ID NO: 2743884 - DNA, 25 bp, Homo sapien
gaaaagcagcgtcgctctcgctaac

SEQ ID NO: 2743885 - DNA, 25 bp, Homo sapien
ggctgccctggtcgacacggtagcc

SEQ ID NO: 2743886 - DNA, 25 bp, Homo sapien
gtcgacacggtagccatggaaccca

SEQ ID NO: 2743887 - DNA, 25 bp, Homo sapien
gattgcaacgcgttgtggtccgcaa

SEQ ID NO: 2743888 - DNA, 25 bp, Homo sapien
tggatgggccccaatgcctgcttgt

SEQ ID NO: 2743889 - DNA, 25 bp, Homo sapien
aacaggcgacgtccaggaagactgc

SEQ ID NO: 2743890 - DNA, 25 bp, Homo sapien
agtactcagcctaggaggaaccggg

SEQ ID NO: 2743891 - DNA, 25 bp, Homo sapien
gccggctgaagcctgctgggtctca

SEQ ID NO: 2743892 - DNA, 25 bp, Homo sapien
cagggatgcaccctttctgttagca

SEQ ID NO: 2743893 - DNA, 25 bp, Homo sapien
tccaagaccaccaccgtgagggagt

SEQ ID NO: 2743894 - DNA, 25 bp, Homo sapien
agtggccagaggtctgctgcccatg

SEQ ID NO: 2743895 - DNA, 25 bp, Homo sapien
aacgccccgtcttgtagcctggagt

SEQ ID NO: 2743896 - DNA, 25 bp, Homo sapien
tgctggaccactaagggtgacggca

SEQ ID NO: 2743897 - DNA, 25 bp, Homo sapien
tattgtggccctgatgctgtctaaa

SEQ ID NO: 2743898 - DNA, 25 bp, Homo sapien
cagttaacgtcctgacacctgcagg

SEQ ID NO: 2743899 - DNA, 25 bp, Homo sapien
tctgtcctgttaagggaatcctggc

SEQ ID NO: 2743900 - DNA, 25 bp, Homo sapien
gcagccactggaacggtgcacttgg

SEQ ID NO: 2743901 - DNA, 25 bp, Homo sapien
ggagccacgttgttcctgagcccaa

SEQ ID NO: 2743902 - DNA, 25 bp, Homo sapien
gaaggacctgagaatgctcacccat

SEQ ID NO: 2743903 - DNA, 25 bp, Homo sapien
cgttttatggacacggaacgctcca

SEQ ID NO: 2743904 - DNA, 25 bp, Homo sapien
aacgctccactgtaacgggcaggca

SEQ ID NO: 2743905 - DNA, 25 bp, Homo sapien
gcagttgggtgcactttggcgctct

SEQ ID NO: 2743906 - DNA, 25 bp, Homo sapien
gcacctgatgtcactgtgggcacga

SEQ ID NO: 2743907 - DNA, 25 bp, Homo sapien
tgggagacacaaactatgacaggaa

SEQ ID NO: 2743908 - DNA, 25 bp, Homo sapien
gtatgactccactcctcagggttcg

SEQ ID NO: 2743909 - DNA, 25 bp, Homo sapien
gtgatgctcggacacaaacggcacg

SEQ ID NO: 2743910 - DNA, 25 bp, Homo sapien
tctgctgacacgatggccatatggc

SEQ ID NO: 2743911 - DNA, 25 bp, Homo sapien
gggtcgtgggtgacgtctggctgct

SEQ ID NO: 2743912 - DNA, 25 bp, Homo sapien
ccccgacactcaggcgagaagggct

SEQ ID NO: 2743913 - DNA, 25 bp, Homo sapien
tgctccccgacactcaggcgagaag

SEQ ID NO: 2743914 - DNA, 25 bp, Homo sapien
tgggtgacgtctggctgctccccga

SEQ ID NO: 2743915 - DNA, 25 bp, Homo sapien
gggcagttcccaaagtcatactggg

SEQ ID NO: 2743916 - DNA, 25 bp, Homo sapien
gtcaatggaatcgaaaataccggcc

SEQ ID NO: 2743917 - DNA, 25 bp, Homo sapien
cacagcacggatgctgcttctgaag

SEQ ID NO: 2743918 - DNA, 25 bp, Homo sapien
tctgaaggagagaacgctccttggc

SEQ ID NO: 2743919 - DNA, 25 bp, Homo sapien
tggtccctctcggaggcgttggaca

SEQ ID NO: 2743920 - DNA, 25 bp, Homo sapien
ttcaaatggctgtcgtcagggtcca

SEQ ID NO: 2743921 - DNA, 25 bp, Homo sapien
ggtcctgcaggagcttcgtcgtctc

SEQ ID NO: 2743922 - DNA, 25 bp, Homo sapien
gtcgtctcatccaagttcaaatggc

SEQ ID NO: 2743923 - DNA, 25 bp, Homo sapien
cagacatgccctgtagaactgggta

SEQ ID NO: 2743924 - DNA, 25 bp, Homo sapien
gattccaacacacacgaaggagcag

SEQ ID NO: 2743925 - DNA, 25 bp, Homo sapien
gacattacccttagcagtgagtgaa

SEQ ID NO: 2743926 - DNA, 25 bp, Homo sapien
tctggaaactgagtggacgagctca

SEQ ID NO: 2743927 - DNA, 25 bp, Homo sapien
gccaaatgttaatacctcagggaca

SEQ ID NO: 2743928 - DNA, 25 bp, Homo sapien
catttgcgtaagtaaagaggagcca

SEQ ID NO: 2743929 - DNA, 25 bp, Homo sapien
gaaaagggccccactactctgtgaa

SEQ ID NO: 2743930 - DNA, 25 bp, Homo sapien
taaaagggtcgatgcttcagagggt

SEQ ID NO: 2743931 - DNA, 25 bp, Homo sapien
tctttccttcaccaatgaccagtct

SEQ ID NO: 2743932 - DNA, 25 bp, Homo sapien
tcaccaatgaccagtctcaggtggt

SEQ ID NO: 2743933 - DNA, 25 bp, Homo sapien
aacctctttccttcaccaatgacca

SEQ ID NO: 2743934 - DNA, 25 bp, Homo sapien
ccttcaccaatgaccagtctcaggt

SEQ ID NO: 2743935 - DNA, 25 bp, Homo sapien
caaatgctgctggaggtcagaacag

SEQ ID NO: 2743936 - DNA, 25 bp, Homo sapien
tcactcctgggaattaagcgtgtcc

SEQ ID NO: 2743937 - DNA, 25 bp, Homo sapien
tggaacgtcaccacgcaaagcagtg

SEQ ID NO: 2743938 - DNA, 25 bp, Homo sapien
cataagtgcctgaacagagccagca

SEQ ID NO: 2743939 - DNA, 25 bp, Homo sapien
tctaagccccatggactgaacggat

SEQ ID NO: 2743940 - DNA, 25 bp, Homo sapien
gggcactccaaagtcaacctggaaa

SEQ ID NO: 2743941 - DNA, 25 bp, Homo sapien
ccatgatgtgaagcgggactggact

SEQ ID NO: 2743942 - DNA, 25 bp, Homo sapien
tggactgaacggattcccactcttg

SEQ ID NO: 2743943 - DNA, 25 bp, Homo sapien
gactccgtggtaataagacaccaaa

SEQ ID NO: 2743944 - DNA, 25 bp, Homo sapien
agcatcacgtgatagatggcaggcc

SEQ ID NO: 2743945 - DNA, 25 bp, Homo sapien
aattccgatccgactttagtacagc

SEQ ID NO: 2743946 - DNA, 25 bp, Homo sapien
gaaggttgacaaagcagactccgtg

SEQ ID NO: 2743947 - DNA, 25 bp, Homo sapien
gcatccctgtctagtcaggaaggga

SEQ ID NO: 2743948 - DNA, 25 bp, Homo sapien
ctggcatccctgtctagtcaggaag

SEQ ID NO: 2743949 - DNA, 25 bp, Homo sapien
gctatggtccaaaaacctgggacaa

SEQ ID NO: 2743950 - DNA, 25 bp, Homo sapien
tggcatccctgtctagtcaggaagg

SEQ ID NO: 2743951 - DNA, 25 bp, Homo sapien
tggagatatccacagaaacgtcggg

SEQ ID NO: 2743952 - DNA, 25 bp, Homo sapien
cgggataggacttcatcgacatgaa

SEQ ID NO: 2743953 - DNA, 25 bp, Homo sapien
gagagctgagcatggagatatccac

SEQ ID NO: 2743954 - DNA, 25 bp, Homo sapien
gacatgaactccagaacagagctgc

SEQ ID NO: 2743955 - DNA, 25 bp, Homo sapien
ggcttcatctggaggcttcatggga

SEQ ID NO: 2743956 - DNA, 25 bp, Homo sapien
atctggaggcttcatgggaacattt

SEQ ID NO: 2743957 - DNA, 25 bp, Homo sapien
gaggcttcatgggaacatttcttct

SEQ ID NO: 2743958 - DNA, 25 bp, Homo sapien
cttggcttcatctggaggcttcatg

SEQ ID NO: 2743959 - DNA, 25 bp, Homo sapien
gggtcactcaactccatatccaagt

SEQ ID NO: 2743960 - DNA, 25 bp, Homo sapien
ttcagtcactttagtcctgagcatc

SEQ ID NO: 2743961 - DNA, 25 bp, Homo sapien
tttagtcctgagcatcatttactgc

SEQ ID NO: 2743962 - DNA, 25 bp, Homo sapien
cactttcccgaaaggaatctaactg

SEQ ID NO: 2743963 - DNA, 25 bp, Homo sapien
gctccaagtgcagcaaagtgtcaaa

SEQ ID NO: 2743964 - DNA, 25 bp, Homo sapien
tcaaatttcccagcggccatgtggc

SEQ ID NO: 2743965 - DNA, 25 bp, Homo sapien
catgtgggccataagaaatcgttac

SEQ ID NO: 2743966 - DNA, 25 bp, Homo sapien
tatcagacagcgagggtcaggactg

SEQ ID NO: 2743967 - DNA, 25 bp, Homo sapien
gccgaggctctgtgagccacacgct

SEQ ID NO: 2743968 - DNA, 25 bp, Homo sapien
gttcaaaagctcctagagcaccggc

SEQ ID NO: 2743969 - DNA, 25 bp, Homo sapien
acaacaaatgctaagtagaacacaa

SEQ ID NO: 2743970 - DNA, 25 bp, Homo sapien
tttgagtaatggctaaaaatcttcc

SEQ ID NO: 2743971 - DNA, 25 bp, Homo sapien
gtggtgagcacacagtcacggtctc

SEQ ID NO: 2743972 - DNA, 25 bp, Homo sapien
tgggagtggtgagcacacagtcacg

SEQ ID NO: 2743973 - DNA, 25 bp, Homo sapien
gagtggtgagcacacagtcacggtc

SEQ ID NO: 2743974 - DNA, 25 bp, Homo sapien
tgagcacacagtcacggtctccggg

SEQ ID NO: 2743975 - DNA, 25 bp, Homo sapien
tggtccaggaggtcgtccaccactt

SEQ ID NO: 2743976 - DNA, 25 bp, Homo sapien
aggaggtcgtccaccactttcttgc

SEQ ID NO: 2743977 - DNA, 25 bp, Homo sapien
ctagagtggtctccgcctgtgatct

SEQ ID NO: 2743978 - DNA, 25 bp, Homo sapien
cttcagctggaagagcgtcctagag

SEQ ID NO: 2743979 - DNA, 25 bp, Homo sapien
gtgggactccacgtcccacaccagg

SEQ ID NO: 2743980 - DNA, 25 bp, Homo sapien
gggactccacgtcccacaccagggc

SEQ ID NO: 2743981 - DNA, 25 bp, Homo sapien
atgtgggactccacgtcccacacca

SEQ ID NO: 2743982 - DNA, 25 bp, Homo sapien
tgggactccacgtcccacaccaggg

SEQ ID NO: 2743983 - DNA, 25 bp, Homo sapien
tcgtccgacttcaagtcgccaaata

SEQ ID NO: 2743984 - DNA, 25 bp, Homo sapien
ccgacttcaagtcgccaaatactga

SEQ ID NO: 2743985 - DNA, 25 bp, Homo sapien
gtccgacttcaagtcgccaaatact

SEQ ID NO: 2743986 - DNA, 25 bp, Homo sapien
acttcaagtcgccaaatactgaatt

SEQ ID NO: 2743987 - DNA, 25 bp, Homo sapien
gcgcagtagtggcactggagagaaa

SEQ ID NO: 2743988 - DNA, 25 bp, Homo sapien
cgcagtagtggcactggagagaaag

SEQ ID NO: 2743989 - DNA, 25 bp, Homo sapien
caagaggatccttcccagtggaggg

SEQ ID NO: 2743990 - DNA, 25 bp, Homo sapien
gcagaatttcaacacctggagctgg

SEQ ID NO: 2743991 - DNA, 25 bp, Homo sapien
gagcgcaccgtctgtcactgtggag

SEQ ID NO: 2743992 - DNA, 25 bp, Homo sapien
ccaaagaccgcagggaaatgagctc

SEQ ID NO: 2743993 - DNA, 25 bp, Homo sapien
tctcgtctttgaagcccagcgtggt

SEQ ID NO: 2743994 - DNA, 25 bp, Homo sapien
cgagctcaagtccaccgggtgggtc

SEQ ID NO: 2743995 - DNA, 25 bp, Homo sapien
cttctctcgtctttgaagcccagcg

SEQ ID NO: 2743996 - DNA, 25 bp, Homo sapien
gagtagcttactggagagcgagctc

SEQ ID NO: 2743997 - DNA, 25 bp, Homo sapien
ctgcaacacggacatggcgggccgt

SEQ ID NO: 2743998 - DNA, 25 bp, Homo sapien
gcaggtgtgaccccaacgcggtgcc

SEQ ID NO: 2743999 - DNA, 25 bp, Homo sapien
aacgcggtgccccagtgcagtgcca

SEQ ID NO: 2744000 - DNA, 25 bp, Homo sapien
catggcgggccgtgagtggcaggtg

SEQ ID NO: 2744001 - DNA, 25 bp, Homo sapien
tgttctaacagcgaaacggtggcgt

SEQ ID NO: 2744002 - DNA, 25 bp, Homo sapien
gactgagctcgggatgtgaaccctt

SEQ ID NO: 2744003 - DNA, 25 bp, Homo sapien
gaatctagaggcaacccgtgccagg

SEQ ID NO: 2744004 - DNA, 25 bp, Homo sapien
tggagcgcgtgcatctgacagcatg

SEQ ID NO: 2744005 - DNA, 25 bp, Homo sapien
tgtagagcaggctcccgtccccgtt

SEQ ID NO: 2744006 - DNA, 25 bp, Homo sapien
tcagcgtccggctcggccgtgttga

SEQ ID NO: 2744007 - DNA, 25 bp, Homo sapien
ggctcggccgtgttgaccacgctgt

SEQ ID NO: 2744008 - DNA, 25 bp, Homo sapien
gtgttgaccacgctgtagagcaggc

SEQ ID NO: 2744009 - DNA, 25 bp, Homo sapien
gctccagtgcaagggtgacgtccat

SEQ ID NO: 2744010 - DNA, 25 bp, Homo sapien
gattaggagacaagtcctcacggcg

SEQ ID NO: 2744011 - DNA, 25 bp, Homo sapien
tctctagtcaagaaaccagggcttc

SEQ ID NO: 2744012 - DNA, 25 bp, Homo sapien
ggaatttcagactcaccggcaacag

SEQ ID NO: 2744013 - DNA, 25 bp, Homo sapien
acacagaccacagcaactttccaac

SEQ ID NO: 2744014 - DNA, 25 bp, Homo sapien
cccaacaggcgagccaagcaaccgc

SEQ ID NO: 2744015 - DNA, 25 bp, Homo sapien
agcaactttccaacacacaagccat

SEQ ID NO: 2744016 - DNA, 25 bp, Homo sapien
cacaagccatgcaaaccacaaactc

SEQ ID NO: 2744017 - DNA, 25 bp, Homo sapien
gagataaaatgttggatatagaggt

SEQ ID NO: 2744018 - DNA, 25 bp, Homo sapien
acgttttctacagactacatgttga

SEQ ID NO: 2744019 - DNA, 25 bp, Homo sapien
tcccatcccatgtgcattttgaaga

SEQ ID NO: 2744020 - DNA, 25 bp, Homo sapien
gaaatgcccccacttcagcgttctt

SEQ ID NO: 2744021 - DNA, 25 bp, Homo sapien
aagcctgagactgcagacagcctgt

SEQ ID NO: 2744022 - DNA, 25 bp, Homo sapien
tatcagggctgctaggaagcctgag

SEQ ID NO: 2744023 - DNA, 25 bp, Homo sapien
tgctctacttctcttatcagggctg

SEQ ID NO: 2744024 - DNA, 25 bp, Homo sapien
gaagcctgagactgcagacagcctg

SEQ ID NO: 2744025 - DNA, 25 bp, Homo sapien
acgatgcatgaaacaccagcggcag

SEQ ID NO: 2744026 - DNA, 25 bp, Homo sapien
tatgtgtgtctgatccggacctccc

SEQ ID NO: 2744027 - DNA, 25 bp, Homo sapien
cactggaataacaagggcggtgcct

SEQ ID NO: 2744028 - DNA, 25 bp, Homo sapien
cacgtgaacacagtcggtggcctat

SEQ ID NO: 2744029 - DNA, 25 bp, Homo sapien
acgtggcaccctctctcggtggcca

SEQ ID NO: 2744030 - DNA, 25 bp, Homo sapien
ggccacgtggcaccctctctcggtg

SEQ ID NO: 2744031 - DNA, 25 bp, Homo sapien
ccacgtggcaccctctctcggtggc

SEQ ID NO: 2744032 - DNA, 25 bp, Homo sapien
ggggccacgtggcaccctctctcgg

SEQ ID NO: 2744033 - DNA, 25 bp, Homo sapien
tgtcccgagcttcgtcagctgcgtg

SEQ ID NO: 2744034 - DNA, 25 bp, Homo sapien
tctgcggtactgtccgtcaagctgc

SEQ ID NO: 2744035 - DNA, 25 bp, Homo sapien
gtcaagctgcaggcattcccttcag

SEQ ID NO: 2744036 - DNA, 25 bp, Homo sapien
cgcctgggaggaaccggttgatcct

SEQ ID NO: 2744037 - DNA, 25 bp, Homo sapien
gcaaagggcggccatgaaaccccga

SEQ ID NO: 2744038 - DNA, 25 bp, Homo sapien
ctcgatgctcagtcaccatgaggcg

SEQ ID NO: 2744039 - DNA, 25 bp, Homo sapien
gagcatgctgaccagcaccaacttc

SEQ ID NO: 2744040 - DNA, 25 bp, Homo sapien
ttcaattccccctcgatgctcagtc

SEQ ID NO: 2744041 - DNA, 25 bp, Homo sapien
cttgtactggtacaacttcagggac

SEQ ID NO: 2744042 - DNA, 25 bp, Homo sapien
cttcattgcccaaaagagctgcctg

SEQ ID NO: 2744043 - DNA, 25 bp, Homo sapien
taacttctctactcggctttttgga

SEQ ID NO: 2744044 - DNA, 25 bp, Homo sapien
ggcagtttctacttgtactggtaca

SEQ ID NO: 2744045 - DNA, 25 bp, Homo sapien
catgctgcgcttcaaagctaacagc

SEQ ID NO: 2744046 - DNA, 25 bp, Homo sapien
gaaaaatccatgtcctgcataaacg

SEQ ID NO: 2744047 - DNA, 25 bp, Homo sapien
tgcgcttcaaagctaacagccgctc

SEQ ID NO: 2744048 - DNA, 25 bp, Homo sapien
tgcataaacgacatgctgcgcttca

SEQ ID NO: 2744049 - DNA, 25 bp, Homo sapien
taccttctcctacgtgggatgcatg

SEQ ID NO: 2744050 - DNA, 25 bp, Homo sapien
caaggatgtcccgtctggattcagt

SEQ ID NO: 2744051 - DNA, 25 bp, Homo sapien
taagagctaactttccacggcggag

SEQ ID NO: 2744052 - DNA, 25 bp, Homo sapien
gacacccaggcttaagatcaagaga

SEQ ID NO: 2744053 - DNA, 25 bp, Homo sapien
gaaggatcttcttcgccaacttgta

SEQ ID NO: 2744054 - DNA, 25 bp, Homo sapien
tctggcctattgtatgtcattgcat

SEQ ID NO: 2744055 - DNA, 25 bp, Homo sapien
cattatcacacatcagcttgaaatc

SEQ ID NO: 2744056 - DNA, 25 bp, Homo sapien
tagtacacggtatctggcctattgt

SEQ ID NO: 2744057 - DNA, 25 bp, Homo sapien
tctcccactctcctttaagtctgtt

SEQ ID NO: 2744058 - DNA, 25 bp, Homo sapien
gggcatggagtgctcttaacatcta

SEQ ID NO: 2744059 - DNA, 25 bp, Homo sapien
aatacagagggctttcgggcatgga

SEQ ID NO: 2744060 - DNA, 25 bp, Homo sapien
aggcgctgcctgatcctctcatcga

SEQ ID NO: 2744061 - DNA, 25 bp, Homo sapien
taaattccgtaactgacttgtattc

SEQ ID NO: 2744062 - DNA, 25 bp, Homo sapien
aaatccatgggatgttttattatca

SEQ ID NO: 2744063 - DNA, 25 bp, Homo sapien
ggagcaattgcatccgtgacaggaa

SEQ ID NO: 2744064 - DNA, 25 bp, Homo sapien
ttattatcattgaatatccaggagc

SEQ ID NO: 2744065 - DNA, 25 bp, Homo sapien
ctacgcaccccgaagtggactggga

SEQ ID NO: 2744066 - DNA, 25 bp, Homo sapien
gacttcagagtgagccactaatgag

SEQ ID NO: 2744067 - DNA, 25 bp, Homo sapien
tgtttcacagctgacgaggctggcg

SEQ ID NO: 2744068 - DNA, 25 bp, Homo sapien
gaataaggcctcagaaaagatgaca

SEQ ID NO: 2744069 - DNA, 25 bp, Homo sapien
tgaataggtgtgctctcattttcgg

SEQ ID NO: 2744070 - DNA, 25 bp, Homo sapien
gctgaataggtgtgctctcattttc

SEQ ID NO: 2744071 - DNA, 25 bp, Homo sapien
ggagttgctgaataggtgtgctctc

SEQ ID NO: 2744072 - DNA, 25 bp, Homo sapien
gttgctgaataggtgtgctctcatt

SEQ ID NO: 2744073 - DNA, 25 bp, Homo sapien
aaaattgaatacaagactttggtat

SEQ ID NO: 2744074 - DNA, 25 bp, Homo sapien
ttgaatacaagactttggtatccct

SEQ ID NO: 2744075 - DNA, 25 bp, Homo sapien
aattgaatacaagactttggtatcc

SEQ ID NO: 2744076 - DNA, 25 bp, Homo sapien
gaatacaagactttggtatcccttc

SEQ ID NO: 2744077 - DNA, 25 bp, Homo sapien
agctccaagttcacagtatctgtct

SEQ ID NO: 2744078 - DNA, 25 bp, Homo sapien
gagctccaagttcacagtatctgtc

SEQ ID NO: 2744079 - DNA, 25 bp, Homo sapien
tagagagctccaagttcacagtatc

SEQ ID NO: 2744080 - DNA, 25 bp, Homo sapien
taaaggttgatcctgaattcaccga

SEQ ID NO: 2744081 - DNA, 25 bp, Homo sapien
ggaacaaacgctctggacataaagg

SEQ ID NO: 2744082 - DNA, 25 bp, Homo sapien
aagatacatccgactcagccttggc

SEQ ID NO: 2744083 - DNA, 25 bp, Homo sapien
taataaccggtagcccttacatcaa

SEQ ID NO: 2744084 - DNA, 25 bp, Homo sapien
ctggctgtgtccggcacgctcggac

SEQ ID NO: 2744085 - DNA, 25 bp, Homo sapien
cttcccaggatcaaagtcgtcagcc

SEQ ID NO: 2744086 - DNA, 25 bp, Homo sapien
ggatcaaagtcgtcagcctctccct

SEQ ID NO: 2744087 - DNA, 25 bp, Homo sapien
ctctccctccgtgtcacagtgctcc

SEQ ID NO: 2744088 - DNA, 25 bp, Homo sapien
cccaggatcaaagtcgtcagcctct

SEQ ID NO: 2744089 - DNA, 25 bp, Homo sapien
ggatccggacaggtctgcccaatcc

SEQ ID NO: 2744090 - DNA, 25 bp, Homo sapien
cctcgcagttctcaggggagggaca

SEQ ID NO: 2744091 - DNA, 25 bp, Homo sapien
ggagtaggcgggatccggacaggtc

SEQ ID NO: 2744092 - DNA, 25 bp, Homo sapien
ctgggcggcagagtcaagggagtga

SEQ ID NO: 2744093 - DNA, 25 bp, Homo sapien
tttctttgtgcctctctcgctcatg

SEQ ID NO: 2744094 - DNA, 25 bp, Homo sapien
tctttcctcatcgtccagatgcttc

SEQ ID NO: 2744095 - DNA, 25 bp, Homo sapien
gtgcctctctcgctcatggtctgac

SEQ ID NO: 2744096 - DNA, 25 bp, Homo sapien
gatgcttctccttctcggacttctt

SEQ ID NO: 2744097 - DNA, 25 bp, Homo sapien
agagttcagtcacttcacttcctcc

SEQ ID NO: 2744098 - DNA, 25 bp, Homo sapien
tgtcatcatagtaactggagtcgtg

SEQ ID NO: 2744099 - DNA, 25 bp, Homo sapien
ccttcaggactagctttagaggctt

SEQ ID NO: 2744100 - DNA, 25 bp, Homo sapien
tcgtggccggatcctgagagttcag

SEQ ID NO: 2744101 - DNA, 25 bp, Homo sapien
agcacttcggttcaccctcgcctga

SEQ ID NO: 2744102 - DNA, 25 bp, Homo sapien
gggatgttgttcacattactcgttc

SEQ ID NO: 2744103 - DNA, 25 bp, Homo sapien
cattactcgttcaagaagatggatt

SEQ ID NO: 2744104 - DNA, 25 bp, Homo sapien
ggagcccgatctccctcctagaaac

SEQ ID NO: 2744105 - DNA, 25 bp, Homo sapien
aggcgcccgtgctgcccgctgacac

SEQ ID NO: 2744106 - DNA, 25 bp, Homo sapien
ctgcaggcgcccgtgctgcccgctg

SEQ ID NO: 2744107 - DNA, 25 bp, Homo sapien
tgcaggcgcccgtgctgcccgctga

SEQ ID NO: 2744108 - DNA, 25 bp, Homo sapien
ttcctgcaggcgcccgtgctgcccg

SEQ ID NO: 2744109 - DNA, 25 bp, Homo sapien
tctaccaggaacgtaagcgcctacc

SEQ ID NO: 2744110 - DNA, 25 bp, Homo sapien
cagaaccctctaccaggaacgtaag

SEQ ID NO: 2744111 - DNA, 25 bp, Homo sapien
gcacagatgcttccctagtctccag

SEQ ID NO: 2744112 - DNA, 25 bp, Homo sapien
caggacccctcacgtgtgcccggtt

SEQ ID NO: 2744113 - DNA, 25 bp, Homo sapien
cctcgtaggacgagcgccactcggc

SEQ ID NO: 2744114 - DNA, 25 bp, Homo sapien
taggacgagcgccactcggccttgt

SEQ ID NO: 2744115 - DNA, 25 bp, Homo sapien
aggacgagcgccactcggccttgtg

SEQ ID NO: 2744116 - DNA, 25 bp, Homo sapien
acgagcgccactcggccttgtgctt

SEQ ID NO: 2744117 - DNA, 25 bp, Homo sapien
ctgggaacagctggcacccggtcgg

SEQ ID NO: 2744118 - DNA, 25 bp, Homo sapien
cgcccgcgctcgctgcgccgaggtt

SEQ ID NO: 2744119 - DNA, 25 bp, Homo sapien
agctggcacccggtcggaccttggc

SEQ ID NO: 2744120 - DNA, 25 bp, Homo sapien
ctgcgccgaggttgccgagctcgct

SEQ ID NO: 2744121 - DNA, 25 bp, Homo sapien
gtttcctcttccaacgccacctctg

SEQ ID NO: 2744122 - DNA, 25 bp, Homo sapien
tgcccaactcgcctgctcttggtgg

SEQ ID NO: 2744123 - DNA, 25 bp, Homo sapien
tccttggttgatgtcccaaacctca

SEQ ID NO: 2744124 - DNA, 25 bp, Homo sapien
gcatttcaccatggggtcaggggtc

SEQ ID NO: 2744125 - DNA, 25 bp, Homo sapien
gcaggtggccctcatagttggtaaa

SEQ ID NO: 2744126 - DNA, 25 bp, Homo sapien
tagggatttggcaggcggtgcagag

SEQ ID NO: 2744127 - DNA, 25 bp, Homo sapien
acttttgccacggagagaagtgtgc

SEQ ID NO: 2744128 - DNA, 25 bp, Homo sapien
ggtggccctcatagttggtaaatac

SEQ ID NO: 2744129 - DNA, 25 bp, Homo sapien
gagaagcgctctccgaatatttccc

SEQ ID NO: 2744130 - DNA, 25 bp, Homo sapien
gctggagaagcgctctccgaatatt

SEQ ID NO: 2744131 - DNA, 25 bp, Homo sapien
ccatcagctggagaagcgctctccg

SEQ ID NO: 2744132 - DNA, 25 bp, Homo sapien
gcgctctccgaatatttccccggga

SEQ ID NO: 2744133 - DNA, 25 bp, Homo sapien
gcttccagacctgtcccgaagccct

SEQ ID NO: 2744134 - DNA, 25 bp, Homo sapien
tgtcccgaagccctgttctccgcgg

SEQ ID NO: 2744135 - DNA, 25 bp, Homo sapien
cagcctcaccggcttccagacctgt

SEQ ID NO: 2744136 - DNA, 25 bp, Homo sapien
aagccctgttctccgcggctctggg

SEQ ID NO: 2744137 - DNA, 25 bp, Homo sapien
atccacgccgccggagctggtgtct

SEQ ID NO: 2744138 - DNA, 25 bp, Homo sapien
cagcagcatccacgccgccggagct

SEQ ID NO: 2744139 - DNA, 25 bp, Homo sapien
agcatccacgccgccggagctggtg

SEQ ID NO: 2744140 - DNA, 25 bp, Homo sapien
ccacgccgccggagctggtgtctga

SEQ ID NO: 2744141 - DNA, 25 bp, Homo sapien
actcaagctggtgccgtcacaggga

SEQ ID NO: 2744142 - DNA, 25 bp, Homo sapien
ctgggttgggaatcatgacgtcttt

SEQ ID NO: 2744143 - DNA, 25 bp, Homo sapien
agcacggagagagccagtcggcatc

SEQ ID NO: 2744144 - DNA, 25 bp, Homo sapien
gaagaagtcttacctagaagcccac

SEQ ID NO: 2744145 - DNA, 25 bp, Homo sapien
tgctcctcatgctgtctatgctgcc

SEQ ID NO: 2744146 - DNA, 25 bp, Homo sapien
ccatgctcctcatgctgtctatgct

SEQ ID NO: 2744147 - DNA, 25 bp, Homo sapien
atactcgtcatgtgccctgtgcttc

SEQ ID NO: 2744148 - DNA, 25 bp, Homo sapien
atgctccccatactcgtcatgtgcc

SEQ ID NO: 2744149 - DNA, 25 bp, Homo sapien
tgtcccaatggcatcgattcaaccc

SEQ ID NO: 2744150 - DNA, 25 bp, Homo sapien
ctgtgtgttgctgttagtgatgtcc

SEQ ID NO: 2744151 - DNA, 25 bp, Homo sapien
tgttagtgatgtcccaatggcatcg

SEQ ID NO: 2744152 - DNA, 25 bp, Homo sapien
atcgattcaacccaccacgaaggcg

SEQ ID NO: 2744153 - DNA, 25 bp, Homo sapien
caggcagaagccgtctgctgggccc

SEQ ID NO: 2744154 - DNA, 25 bp, Homo sapien
ctgtgggctccggtgcctcgtgtga

SEQ ID NO: 2744155 - DNA, 25 bp, Homo sapien
catggaactcacaggcagaagccgt

SEQ ID NO: 2744156 - DNA, 25 bp, Homo sapien
ctcttgtaaaatccagcatggaact

SEQ ID NO: 2744157 - DNA, 25 bp, Homo sapien
cccagaacaggcaccacgcccacgg

SEQ ID NO: 2744158 - DNA, 25 bp, Homo sapien
cagtgcctctgccgccacctgcacc

SEQ ID NO: 2744159 - DNA, 25 bp, Homo sapien
cacctgcacccccagaacaggcacc

SEQ ID NO: 2744160 - DNA, 25 bp, Homo sapien
gccagtgcctctgccgccacctgca

SEQ ID NO: 2744161 - DNA, 25 bp, Homo sapien
cttgcagtcccacagcagctgaagc

SEQ ID NO: 2744162 - DNA, 25 bp, Homo sapien
agggctgggggctgaagaccctcca

SEQ ID NO: 2744163 - DNA, 25 bp, Homo sapien
gctgggggctgaagaccctccagca

SEQ ID NO: 2744164 - DNA, 25 bp, Homo sapien
ctgggggctgaagaccctccagcat

SEQ ID NO: 2744165 - DNA, 25 bp, Homo sapien
gctggtttcctgttacaaacacagg

SEQ ID NO: 2744166 - DNA, 25 bp, Homo sapien
tttgggttgtggtctgacctcgcag

SEQ ID NO: 2744167 - DNA, 25 bp, Homo sapien
caaacacaggcttagttttaagatc

SEQ ID NO: 2744168 - DNA, 25 bp, Homo sapien
taagatcaaacaactgtttgggttg

SEQ ID NO: 2744169 - DNA, 25 bp, Homo sapien
gaagaaggcagctggaacagacgcc

SEQ ID NO: 2744170 - DNA, 25 bp, Homo sapien
ctggtggcttgacatggtattaatc

SEQ ID NO: 2744171 - DNA, 25 bp, Homo sapien
tcattatcggagctccttctcccag

SEQ ID NO: 2744172 - DNA, 25 bp, Homo sapien
ggatcttttatgaggtccaacatta

SEQ ID NO: 2744173 - DNA, 25 bp, Homo sapien
gctcgagttgaatgggcagcagggc

SEQ ID NO: 2744174 - DNA, 25 bp, Homo sapien
tgctgttttggcccatgctttccct

SEQ ID NO: 2744175 - DNA, 25 bp, Homo sapien
gcagggccacaaagacgccaaggcc

SEQ ID NO: 2744176 - DNA, 25 bp, Homo sapien
caaagacgccaaggccggggcactg

SEQ ID NO: 2744177 - DNA, 25 bp, Homo sapien
ctgtgagctcgaggggacgtactca

SEQ ID NO: 2744178 - DNA, 25 bp, Homo sapien
tggccgcgggtttggaggacagagc

SEQ ID NO: 2744179 - DNA, 25 bp, Homo sapien
gacgtgaggcattggctgtgagctc

SEQ ID NO: 2744180 - DNA, 25 bp, Homo sapien
cagaggaggctcagaattggagtct

SEQ ID NO: 2744181 - DNA, 25 bp, Homo sapien
gtgagagcttccaaaaatgcccgcc

SEQ ID NO: 2744182 - DNA, 25 bp, Homo sapien
taacttcccttcaaagctgagcgag

SEQ ID NO: 2744183 - DNA, 25 bp, Homo sapien
aaagccccgtgttagagatcagccg

SEQ ID NO: 2744184 - DNA, 25 bp, Homo sapien
tcaacttcaacgattgcgggagcaa

SEQ ID NO: 2744185 - DNA, 25 bp, Homo sapien
caactctgagttaccagggagcggg

SEQ ID NO: 2744186 - DNA, 25 bp, Homo sapien
cctgctctcgggaacggtgtgacat

SEQ ID NO: 2744187 - DNA, 25 bp, Homo sapien
tcccgggacaccatgaaggagaatc

SEQ ID NO: 2744188 - DNA, 25 bp, Homo sapien
gtgtgacatgctcggcaactctgag

SEQ ID NO: 2744189 - DNA, 25 bp, Homo sapien
gtgcctcctgtagcctctcagccac

SEQ ID NO: 2744190 - DNA, 25 bp, Homo sapien
agtgcctcctgtagcctctcagcca

SEQ ID NO: 2744191 - DNA, 25 bp, Homo sapien
tgcctcctgtagcctctcagccacc

SEQ ID NO: 2744192 - DNA, 25 bp, Homo sapien
gcctcctgtagcctctcagccacca

SEQ ID NO: 2744193 - DNA, 25 bp, Homo sapien
taacagtccatgtaccagaggtgat

SEQ ID NO: 2744194 - DNA, 25 bp, Homo sapien
aacaggtaggcgtgcttcagatcca

SEQ ID NO: 2744195 - DNA, 25 bp, Homo sapien
cagtggtctggcaacgttccaagta

SEQ ID NO: 2744196 - DNA, 25 bp, Homo sapien
taattcagaataagcctcgtgtggc

SEQ ID NO: 2744197 - DNA, 25 bp, Homo sapien
ccccgcccgcggctgaggagataag

SEQ ID NO: 2744198 - DNA, 25 bp, Homo sapien
gatttgaaaagctgcgaggacgcgc

SEQ ID NO: 2744199 - DNA, 25 bp, Homo sapien
tgctgggaacggattttatcagcag

SEQ ID NO: 2744200 - DNA, 25 bp, Homo sapien
gacgcgcattttaacctccagggac

SEQ ID NO: 2744201 - DNA, 25 bp, Homo sapien
aagtgtccccgcgtacactggccgt

SEQ ID NO: 2744202 - DNA, 25 bp, Homo sapien
cagacgcagagcgaaaggcgaggca

SEQ ID NO: 2744203 - DNA, 25 bp, Homo sapien
cgctgtgagcccgagctgcgctgca

SEQ ID NO: 2744204 - DNA, 25 bp, Homo sapien
gggacaaggacagttgccctgaaaa

SEQ ID NO: 2744205 - DNA, 25 bp, Homo sapien
aaagtagatgggcatctcgcggcag

SEQ ID NO: 2744206 - DNA, 25 bp, Homo sapien
gaccaggccgctctgtgatgcagac

SEQ ID NO: 2744207 - DNA, 25 bp, Homo sapien
tggcatcacgtgaggagagcgtcca

SEQ ID NO: 2744208 - DNA, 25 bp, Homo sapien
gcatgcacacgccagaagggaacgt

SEQ ID NO: 2744209 - DNA, 25 bp, Homo sapien
agctcatgtatctgcggacagccag

SEQ ID NO: 2744210 - DNA, 25 bp, Homo sapien
ttaactttccgttttgccactgagc

SEQ ID NO: 2744211 - DNA, 25 bp, Homo sapien
ctgagcagcctaggcctctgtaaaa

SEQ ID NO: 2744212 - DNA, 25 bp, Homo sapien
taaaatcgtgtgatggcggcatctg

SEQ ID NO: 2744213 - DNA, 25 bp, Homo sapien
ctccatgtttcgggctggaggagct

SEQ ID NO: 2744214 - DNA, 25 bp, Homo sapien
ggaattccttgtcctaggctgggag

SEQ ID NO: 2744215 - DNA, 25 bp, Homo sapien
ctggacctagacgtcccgggctggg

SEQ ID NO: 2744216 - DNA, 25 bp, Homo sapien
tgctagtgtcccatgctgagtggcg

SEQ ID NO: 2744217 - DNA, 25 bp, Homo sapien
tgcgacagatcctactgacgtccag

SEQ ID NO: 2744218 - DNA, 25 bp, Homo sapien
ccaccacagcgaagtgtccctctgg

SEQ ID NO: 2744219 - DNA, 25 bp, Homo sapien
gtcctcccaggtggtatccactgag

SEQ ID NO: 2744220 - DNA, 25 bp, Homo sapien
tcctactgacgtccaggagagtcgc

SEQ ID NO: 2744221 - DNA, 25 bp, Homo sapien
gcagcactttcccagacaggtgtgt

SEQ ID NO: 2744222 - DNA, 25 bp, Homo sapien
acggcttcatcaccgagtgtccctg

SEQ ID NO: 2744223 - DNA, 25 bp, Homo sapien
ggcgactctgcggagcgccacactt

SEQ ID NO: 2744224 - DNA, 25 bp, Homo sapien
cactttgcttttggcgggacccgca

SEQ ID NO: 2744225 - DNA, 25 bp, Homo sapien
tgggagcagtttcttgtagaagatc

SEQ ID NO: 2744226 - DNA, 25 bp, Homo sapien
gatgcccagttcttggtcagtggga

SEQ ID NO: 2744227 - DNA, 25 bp, Homo sapien
cagtgggatgcccagttcttggtca

SEQ ID NO: 2744228 - DNA, 25 bp, Homo sapien
cagttcttggtcagtgggagcagtt

SEQ ID NO: 2744229 - DNA, 25 bp, Homo sapien
tggtcctgcccgctcgggtcactgt

SEQ ID NO: 2744230 - DNA, 25 bp, Homo sapien
tgcagatgtgcattctcagtgtcgg

SEQ ID NO: 2744231 - DNA, 25 bp, Homo sapien
ggtcactgtacctggacagtgcaga

SEQ ID NO: 2744232 - DNA, 25 bp, Homo sapien
gcacctgagagccataggacgggtt

SEQ ID NO: 2744233 - DNA, 25 bp, Homo sapien
gcccctctcctgttggacttgcctt

SEQ ID NO: 2744234 - DNA, 25 bp, Homo sapien
gacttgccttcctgaacatggggag

SEQ ID NO: 2744235 - DNA, 25 bp, Homo sapien
accttctgagccgtcgtctgtcaca

SEQ ID NO: 2744236 - DNA, 25 bp, Homo sapien
ccgagcccaggacccctaatcagtt

SEQ ID NO: 2744237 - DNA, 25 bp, Homo sapien
tgtttttggataacagagcctaccc

SEQ ID NO: 2744238 - DNA, 25 bp, Homo sapien
cggatttagactgagagccttgcca

SEQ ID NO: 2744239 - DNA, 25 bp, Homo sapien
tccagtgaggttctccgtgaggcac

SEQ ID NO: 2744240 - DNA, 25 bp, Homo sapien
ccttaaggccgtggtcctgcgtgga

SEQ ID NO: 2744241 - DNA, 25 bp, Homo sapien
gccaatagcaaagccgcaggtggcc

SEQ ID NO: 2744242 - DNA, 25 bp, Homo sapien
tggcttgtgtggacggcagccgcca

SEQ ID NO: 2744243 - DNA, 25 bp, Homo sapien
cacagcagggccctcgtggaggttc

SEQ ID NO: 2744244 - DNA, 25 bp, Homo sapien
tttcatctcgtggagcctctcgcca

SEQ ID NO: 2744245 - DNA, 25 bp, Homo sapien
tgggaagaggacatcgcccgctcca

SEQ ID NO: 2744246 - DNA, 25 bp, Homo sapien
gggaagaggacatcgcccgctccag

SEQ ID NO: 2744247 - DNA, 25 bp, Homo sapien
tgcaccggcacttccaggttgaagg

SEQ ID NO: 2744248 - DNA, 25 bp, Homo sapien
tgcctgcaccggcacttccaggttg

SEQ ID NO: 2744249 - DNA, 25 bp, Homo sapien
ctgtggcggggatcagatgtcctca

SEQ ID NO: 2744250 - DNA, 25 bp, Homo sapien
cccggtgcctgtggcggggatcaga

SEQ ID NO: 2744251 - DNA, 25 bp, Homo sapien
gctgggaggacgaagcgctcagccc

SEQ ID NO: 2744252 - DNA, 25 bp, Homo sapien
gaggacgaagcgctcagcccggtgc

SEQ ID NO: 2744253 - DNA, 25 bp, Homo sapien
gcaaaggctacctgttgttgacgcc

SEQ ID NO: 2744254 - DNA, 25 bp, Homo sapien
agctgcgaggctatgggttctggtc

SEQ ID NO: 2744255 - DNA, 25 bp, Homo sapien
gacagacgcctgctgctcatgcagc

SEQ ID NO: 2744256 - DNA, 25 bp, Homo sapien
cttcctgagcatcccgtagggccgt

SEQ ID NO: 2744257 - DNA, 25 bp, Homo sapien
gcccccggcatcacaggaggatgcc

SEQ ID NO: 2744258 - DNA, 25 bp, Homo sapien
cccccggcatcacaggaggatgcca

SEQ ID NO: 2744259 - DNA, 25 bp, Homo sapien
gcaggcccacggtcgggttcctgtc

SEQ ID NO: 2744260 - DNA, 25 bp, Homo sapien
agcccccggcatcacaggaggatgc

SEQ ID NO: 2744261 - DNA, 25 bp, Homo sapien
atctgggcagcgatgtggcctccat

SEQ ID NO: 2744262 - DNA, 25 bp, Homo sapien
ttaaggctctttagcaaggagtgct

SEQ ID NO: 2744263 - DNA, 25 bp, Homo sapien
gacatgttcagcaaatcgtgggaaa

SEQ ID NO: 2744264 - DNA, 25 bp, Homo sapien
cagggcacctcactgctatctgtaa

SEQ ID NO: 2744265 - DNA, 25 bp, Homo sapien
tttaccctgaacaggaacatgcggg

SEQ ID NO: 2744266 - DNA, 25 bp, Homo sapien
tgttttccggaatctggcgaggccg

SEQ ID NO: 2744267 - DNA, 25 bp, Homo sapien
catgctgagacgtgatccgtggtgc

SEQ ID NO: 2744268 - DNA, 25 bp, Homo sapien
gggcccgtgccaatgtttctgagtc

SEQ ID NO: 2744269 - DNA, 25 bp, Homo sapien
cgagttagtgtgtgaagcagtgggc

SEQ ID NO: 2744270 - DNA, 25 bp, Homo sapien
tttgtgaacgagtgggcaagttagt

SEQ ID NO: 2744271 - DNA, 25 bp, Homo sapien
tgaagcagtgggcaagtttgtgaat

SEQ ID NO: 2744272 - DNA, 25 bp, Homo sapien
ggcatgtgaatgagtcgatgagtta

SEQ ID NO: 2744273 - DNA, 25 bp, Homo sapien
gagttggtgtgtgaaagagtgggtt

SEQ ID NO: 2744274 - DNA, 25 bp, Homo sapien
ggttagtgcatgaatgggtgggtta

SEQ ID NO: 2744275 - DNA, 25 bp, Homo sapien
tttgtgaatgggtgtgtgaacgagt

SEQ ID NO: 2744276 - DNA, 25 bp, Homo sapien
tagtgtgtgaatgggttgtgaacga

SEQ ID NO: 2744277 - DNA, 25 bp, Homo sapien
tcatgaaatgtggacctgccgagcc

SEQ ID NO: 2744278 - DNA, 25 bp, Homo sapien
taactcatgcttagccaaggcaggc

SEQ ID NO: 2744279 - DNA, 25 bp, Homo sapien
tgacacgggcatggacagagtcctc

SEQ ID NO: 2744280 - DNA, 25 bp, Homo sapien
gtagaaatgcaacctaaccactggg

SEQ ID NO: 2744281 - DNA, 25 bp, Homo sapien
gctgaacaggagagccctaggtgac

SEQ ID NO: 2744282 - DNA, 25 bp, Homo sapien
ttaaggctgaacaggagagccctag

SEQ ID NO: 2744283 - DNA, 25 bp, Homo sapien
tgttaaggctgaacaggagagccct

SEQ ID NO: 2744284 - DNA, 25 bp, Homo sapien
aacaggagagccctaggtgacgggc

SEQ ID NO: 2744285 - DNA, 25 bp, Homo sapien
gggggacaggtgtgtctgccgtctg

SEQ ID NO: 2744286 - DNA, 25 bp, Homo sapien
agaaacttccgtaggaagccccatg

SEQ ID NO: 2744287 - DNA, 25 bp, Homo sapien
atgggcagcttgggcggcatcactg

SEQ ID NO: 2744288 - DNA, 25 bp, Homo sapien
gacaggtgtgtctgccgtctgtttc

SEQ ID NO: 2744289 - DNA, 25 bp, Homo sapien
ccagagtgccgtgatgctgttgggc

SEQ ID NO: 2744290 - DNA, 25 bp, Homo sapien
cagagtgccgtgatgctgttgggca

SEQ ID NO: 2744291 - DNA, 25 bp, Homo sapien
cccagagtgccgtgatgctgttggg

SEQ ID NO: 2744292 - DNA, 25 bp, Homo sapien
cacccctgaccaggaggactctgtt

SEQ ID NO: 2744293 - DNA, 25 bp, Homo sapien
tcttacctgagcgtgtgtagctgaa

SEQ ID NO: 2744294 - DNA, 25 bp, Homo sapien
tgtagctgaaatcgtgataggagtg

SEQ ID NO: 2744295 - DNA, 25 bp, Homo sapien
tggtcaacagagttaaggccacagc

SEQ ID NO: 2744296 - DNA, 25 bp, Homo sapien
gataggagtgaggtttatcctctcc

SEQ ID NO: 2744297 - DNA, 25 bp, Homo sapien
actgcatcccggtcgtagctcccag

SEQ ID NO: 2744298 - DNA, 25 bp, Homo sapien
tgcatcccggtcgtagctcccagag

SEQ ID NO: 2744299 - DNA, 25 bp, Homo sapien
ccactgcatcccggtcgtagctccc

SEQ ID NO: 2744300 - DNA, 25 bp, Homo sapien
gccccactgcatcccggtcgtagct

SEQ ID NO: 2744301 - DNA, 25 bp, Homo sapien
caggtcttagcgagaagccaccagg

SEQ ID NO: 2744302 - DNA, 25 bp, Homo sapien
ccaggtcttagcgagaagccaccag

SEQ ID NO: 2744303 - DNA, 25 bp, Homo sapien
cagcaggcacactgcaagaaaggat

SEQ ID NO: 2744304 - DNA, 25 bp, Homo sapien
gctcagcaggcacactgcaagaaag

SEQ ID NO: 2744305 - DNA, 25 bp, Homo sapien
gcaggcacactgcaagaaaggatac

SEQ ID NO: 2744306 - DNA, 25 bp, Homo sapien
tcagcaggcacactgcaagaaagga

SEQ ID NO: 2744307 - DNA, 25 bp, Homo sapien
gaggacgacgccattgagcttcaca

SEQ ID NO: 2744308 - DNA, 25 bp, Homo sapien
ttcacagccgtgtgcatccgcctga

SEQ ID NO: 2744309 - DNA, 25 bp, Homo sapien
tgtgcatccgcctgacgttggactg

SEQ ID NO: 2744310 - DNA, 25 bp, Homo sapien
catcctgggacttgttgaggacgac

SEQ ID NO: 2744311 - DNA, 25 bp, Homo sapien
tgtgagtcaggatcaggcggattct

SEQ ID NO: 2744312 - DNA, 25 bp, Homo sapien
gattctctgaccctgaaggatgcag

SEQ ID NO: 2744313 - DNA, 25 bp, Homo sapien
tgagctgagccctgatgagctgcat

SEQ ID NO: 2744314 - DNA, 25 bp, Homo sapien
cattcacacgtgttggaaagggctg

SEQ ID NO: 2744315 - DNA, 25 bp, Homo sapien
tgtgcagccgttgctgctgaagctc

SEQ ID NO: 2744316 - DNA, 25 bp, Homo sapien
tgttcctgtcgtggatcagctgggc

SEQ ID NO: 2744317 - DNA, 25 bp, Homo sapien
ccagataggctggtgtctctgctcc

SEQ ID NO: 2744318 - DNA, 25 bp, Homo sapien
tcatctgcaccttgtctggcgtagg

SEQ ID NO: 2744319 - DNA, 25 bp, Homo sapien
cctgtacttctcagcgatcagcttc

SEQ ID NO: 2744320 - DNA, 25 bp, Homo sapien
ggcccttcgagctcgagcttgctgt

SEQ ID NO: 2744321 - DNA, 25 bp, Homo sapien
ttcttgttcctagctggacccgggc

SEQ ID NO: 2744322 - DNA, 25 bp, Homo sapien
cactgaacttcccatgaagccatgg

SEQ ID NO: 2744323 - DNA, 25 bp, Homo sapien
gaagccatgggtggattcttgttcc

SEQ ID NO: 2744324 - DNA, 25 bp, Homo sapien
cacgcagacccgtgtactgcaggtt

SEQ ID NO: 2744325 - DNA, 25 bp, Homo sapien
tgcttagtgattccggctgtcagca

SEQ ID NO: 2744326 - DNA, 25 bp, Homo sapien
gcagcagtcgctgcttagtgattcc

SEQ ID NO: 2744327 - DNA, 25 bp, Homo sapien
ggctgtcagcacatatggccccaca

SEQ ID NO: 2744328 - DNA, 25 bp, Homo sapien
gcagacacacgtgtgtgataccagc

SEQ ID NO: 2744329 - DNA, 25 bp, Homo sapien
ggtctgcagacacacgtgtgtgata

SEQ ID NO: 2744330 - DNA, 25 bp, Homo sapien
tctgcagacacacgtgtgtgatacc

SEQ ID NO: 2744331 - DNA, 25 bp, Homo sapien
ctggtctgcagacacacgtgtgtga

SEQ ID NO: 2744332 - DNA, 25 bp, Homo sapien
tgaaagcagatatgtcgttttcaac

SEQ ID NO: 2744333 - DNA, 25 bp, Homo sapien
tgcttcagcatctgcgacctctgct

SEQ ID NO: 2744334 - DNA, 25 bp, Homo sapien
tcctctcgtaggtgaaagcagatat

SEQ ID NO: 2744335 - DNA, 25 bp, Homo sapien
ctctgctccatcattagtgtcctct

SEQ ID NO: 2744336 - DNA, 25 bp, Homo sapien
gcgctgatgcgcaagtggtacaaga

SEQ ID NO: 2744337 - DNA, 25 bp, Homo sapien
atgcgcaagtggtacaagaacatct

SEQ ID NO: 2744338 - DNA, 25 bp, Homo sapien
aagaacatctgcaggtccttcttca

SEQ ID NO: 2744339 - DNA, 25 bp, Homo sapien
tccacctcggcgctgatgcgcaagt

SEQ ID NO: 2744340 - DNA, 25 bp, Homo sapien
ccgccgaagcgctcctggttttgcg

SEQ ID NO: 2744341 - DNA, 25 bp, Homo sapien
gcggcggtggtgtcgcggacggtgt

SEQ ID NO: 2744342 - DNA, 25 bp, Homo sapien
aacgagtcgacgttcttggccacca

SEQ ID NO: 2744343 - DNA, 25 bp, Homo sapien
gcagagcctggtgcgcggcggtggt

SEQ ID NO: 2744344 - DNA, 25 bp, Homo sapien
ccgactggatcaggtgggacatgcc

SEQ ID NO: 2744345 - DNA, 25 bp, Homo sapien
cgcaggctggacgagaccaccagct

SEQ ID NO: 2744346 - DNA, 25 bp, Homo sapien
gtgttgtgcttcaggccgcccaggc

SEQ ID NO: 2744347 - DNA, 25 bp, Homo sapien
ttctctgtgctcattagggaccgta

SEQ ID NO: 2744348 - DNA, 25 bp, Homo sapien
ctgcgggagacaggacaggttggtg

SEQ ID NO: 2744349 - DNA, 25 bp, Homo sapien
tgctcccggccgctgtgtgtgtatg

SEQ ID NO: 2744350 - DNA, 25 bp, Homo sapien
gtgtgctgcggtgctcccggccgct

SEQ ID NO: 2744351 - DNA, 25 bp, Homo sapien
aaggcccgaaggctcaacggtgtgc

SEQ ID NO: 2744352 - DNA, 25 bp, Homo sapien
cccgaaggctcaacggtgtgctgcg

SEQ ID NO: 2744353 - DNA, 25 bp, Homo sapien
tatcacaagtcagcaccgtgtcggg

SEQ ID NO: 2744354 - DNA, 25 bp, Homo sapien
gttatcacaagtcagcaccgtgtcg

SEQ ID NO: 2744355 - DNA, 25 bp, Homo sapien
gggaccctgttatcacaagtcagca

SEQ ID NO: 2744356 - DNA, 25 bp, Homo sapien
ctgttatcacaagtcagcaccgtgt

SEQ ID NO: 2744357 - DNA, 25 bp, Homo sapien
cctgtgagctccgttaacgtgagag

SEQ ID NO: 2744358 - DNA, 25 bp, Homo sapien
acagccaaaggctcgctgagagcag

SEQ ID NO: 2744359 - DNA, 25 bp, Homo sapien
agccctcgcaaccaatgcagctaag

SEQ ID NO: 2744360 - DNA, 25 bp, Homo sapien
tataagtgagcgcagctcttcccat

SEQ ID NO: 2744361 - DNA, 25 bp, Homo sapien
cactgcaacaggcacgtggtatagg

SEQ ID NO: 2744362 - DNA, 25 bp, Homo sapien
tccatgggatcctggccctaggcca

SEQ ID NO: 2744363 - DNA, 25 bp, Homo sapien
acagccctcttgagcagggttccca

SEQ ID NO: 2744364 - DNA, 25 bp, Homo sapien
ggcccagacctggacgggcctcagt

SEQ ID NO: 2744365 - DNA, 25 bp, Homo sapien
gcacacgggcatcacacttatgcag

SEQ ID NO: 2744366 - DNA, 25 bp, Homo sapien
tcacacttatgcagcccccagtgag

SEQ ID NO: 2744367 - DNA, 25 bp, Homo sapien
atcacacttatgcagcccccagtga

SEQ ID NO: 2744368 - DNA, 25 bp, Homo sapien
ccagcacacgggcatcacacttatg

SEQ ID NO: 2744369 - DNA, 25 bp, Homo sapien
tcacacttatgcagcccccagtgag

SEQ ID NO: 2744370 - DNA, 25 bp, Homo sapien
gcacacgggcatcacacttatgcag

SEQ ID NO: 2744371 - DNA, 25 bp, Homo sapien
atcacacttatgcagcccccagtga

SEQ ID NO: 2744372 - DNA, 25 bp, Homo sapien
ccagcacacgggcatcacacttatg

SEQ ID NO: 2744373 - DNA, 25 bp, Homo sapien
tcacacttatgcagccccagtgagc

SEQ ID NO: 2744374 - DNA, 25 bp, Homo sapien
cggcatcacacttatgcagccccag

SEQ ID NO: 2744375 - DNA, 25 bp, Homo sapien
atcacacttatgcagccccagtgag

SEQ ID NO: 2744376 - DNA, 25 bp, Homo sapien
ggcatcacacttatgcagccccagt

SEQ ID NO: 2744377 - DNA, 25 bp, Homo sapien
tcacacttatgcagccccagtgagc

SEQ ID NO: 2744378 - DNA, 25 bp, Homo sapien
cagcacacgggcatcacacttatgc

SEQ ID NO: 2744379 - DNA, 25 bp, Homo sapien
ccagcacacgggcatcacacttatg

SEQ ID NO: 2744380 - DNA, 25 bp, Homo sapien
tcacacttatgcagcccccagtgag

SEQ ID NO: 2744381 - DNA, 25 bp, Homo sapien
gagcccccagtgagcccccagcaca

SEQ ID NO: 2744382 - DNA, 25 bp, Homo sapien
ccccagtgagcccccagtgagcccc

SEQ ID NO: 2744383 - DNA, 25 bp, Homo sapien
ccagtgagcccccagtgagccccca

SEQ ID NO: 2744384 - DNA, 25 bp, Homo sapien
gcccccagtgagcccccagcacacg

SEQ ID NO: 2744385 - DNA, 25 bp, Homo sapien
tcacacttatgcagccccagtgagc

SEQ ID NO: 2744386 - DNA, 25 bp, Homo sapien
ccagcacacgggcatcacacttatg

SEQ ID NO: 2744387 - DNA, 25 bp, Homo sapien
ggcatcacacttatgcagccccagt

SEQ ID NO: 2744388 - DNA, 25 bp, Homo sapien
gcacacgggcatcacacttatgcag

SEQ ID NO: 2744389 - DNA, 25 bp, Homo sapien
ccagcacacgggcatcacacttatg

SEQ ID NO: 2744390 - DNA, 25 bp, Homo sapien
acgggcatcacacttatgcagcccc

SEQ ID NO: 2744391 - DNA, 25 bp, Homo sapien
atcacacttatgcagcccccagtga

SEQ ID NO: 2744392 - DNA, 25 bp, Homo sapien
gcacacgggcatcacacttatgcag

SEQ ID NO: 2744393 - DNA, 25 bp, Homo sapien
aggccttagcgcgctgctctgagct

SEQ ID NO: 2744394 - DNA, 25 bp, Homo sapien
acggctaaaacacagcagcgccacg

SEQ ID NO: 2744395 - DNA, 25 bp, Homo sapien
accgtgttgacacgctgcgatgagg

SEQ ID NO: 2744396 - DNA, 25 bp, Homo sapien
agcgccacgcacagcaccgtgttga

SEQ ID NO: 2744397 - DNA, 25 bp, Homo sapien
tgctccgcgtccaggttcagcatca

SEQ ID NO: 2744398 - DNA, 25 bp, Homo sapien
gtgcttgtccaggtacgtcccctcc

SEQ ID NO: 2744399 - DNA, 25 bp, Homo sapien
tcagctgcgacgtgaaggacagcag

SEQ ID NO: 2744400 - DNA, 25 bp, Homo sapien
gggtgcttcacggcctgctccgcgt

SEQ ID NO: 2744401 - DNA, 25 bp, Homo sapien
cgggcggcgttcagggataggccac

SEQ ID NO: 2744402 - DNA, 25 bp, Homo sapien
gggaccgtgctccacgcgcagcagg

SEQ ID NO: 2744403 - DNA, 25 bp, Homo sapien
cgttcagggataggccacggatgcc

SEQ ID NO: 2744404 - DNA, 25 bp, Homo sapien
ggataggccacggatgccatcgccc

SEQ ID NO: 2744405 - DNA, 25 bp, Homo sapien
gatgcagccagcgatgagcatggcg

SEQ ID NO: 2744406 - DNA, 25 bp, Homo sapien
cggacagcgcgtagtaccaggagca

SEQ ID NO: 2744407 - DNA, 25 bp, Homo sapien
cagccagcgatgagcatggcggaca

SEQ ID NO: 2744408 - DNA, 25 bp, Homo sapien
tgagcatggcggacagcgcgtagta

SEQ ID NO: 2744409 - DNA, 25 bp, Homo sapien
acggcgcaggccaggttcacgaaca

SEQ ID NO: 2744410 - DNA, 25 bp, Homo sapien
cagttgggggtacgtagcagggtct

SEQ ID NO: 2744411 - DNA, 25 bp, Homo sapien
aacttgaagcgtggacgccagttgg

SEQ ID NO: 2744412 - DNA, 25 bp, Homo sapien
tggtagaacttgaagcgtggacgcc

SEQ ID NO: 2744413 - DNA, 25 bp, Homo sapien
tgaggatgccagtctcgcagatgag

SEQ ID NO: 2744414 - DNA, 25 bp, Homo sapien
tctcgcagatgaggactgtcagcag

SEQ ID NO: 2744415 - DNA, 25 bp, Homo sapien
tgccagtctcgcagatgaggactgt

SEQ ID NO: 2744416 - DNA, 25 bp, Homo sapien
ctgtcagcagcagcgcccacgtggg

SEQ ID NO: 2744417 - DNA, 25 bp, Homo sapien
ccacccttttaggagagaagctgca

SEQ ID NO: 2744418 - DNA, 25 bp, Homo sapien
tgacaccacccttttaggagagaag

SEQ ID NO: 2744419 - DNA, 25 bp, Homo sapien
cagatgacaccacccttttaggaga

SEQ ID NO: 2744420 - DNA, 25 bp, Homo sapien
caccacccttttaggagagaagctg

SEQ ID NO: 2744421 - DNA, 25 bp, Homo sapien
gggccaggccagcatgccgatgacc

SEQ ID NO: 2744422 - DNA, 25 bp, Homo sapien
gacgatgccgtcacgggcaatggcc

SEQ ID NO: 2744423 - DNA, 25 bp, Homo sapien
gccagcatgccgatgaccaggttcc

SEQ ID NO: 2744424 - DNA, 25 bp, Homo sapien
acgatgccgtcacgggcaatggcct

SEQ ID NO: 2744425 - DNA, 25 bp, Homo sapien
caggctttgcacgaaaactgcaggt

SEQ ID NO: 2744426 - DNA, 25 bp, Homo sapien
tctgcacgcggacatgaagtcctag

SEQ ID NO: 2744427 - DNA, 25 bp, Homo sapien
ttcaaagccgaattcatcctcagga

SEQ ID NO: 2744428 - DNA, 25 bp, Homo sapien
tcctagggcgatgtaatttcaaagc

SEQ ID NO: 2744429 - DNA, 25 bp, Homo sapien
caggccccaaacagcacaatgcagg

SEQ ID NO: 2744430 - DNA, 25 bp, Homo sapien
ccaaacagcacaatgcaggagagat

SEQ ID NO: 2744431 - DNA, 25 bp, Homo sapien
ctcgtaagaccacgccttcaatgca

SEQ ID NO: 2744432 - DNA, 25 bp, Homo sapien
ttatctcgtaagaccacgccttcaa

SEQ ID NO: 2744433 - DNA, 25 bp, Homo sapien
gcctggtgcttgaccgccagggatt

SEQ ID NO: 2744434 - DNA, 25 bp, Homo sapien
accatgctgaggggacaatgctcgg

SEQ ID NO: 2744435 - DNA, 25 bp, Homo sapien
gcttgaccgccagggattggcaggg

SEQ ID NO: 2744436 - DNA, 25 bp, Homo sapien
ctggcctggtgcttgaccgccaggg

SEQ ID NO: 2744437 - DNA, 25 bp, Homo sapien
agaagccagaggccccgcgggccca

SEQ ID NO: 2744438 - DNA, 25 bp, Homo sapien
cagccttgggattgagaagccagag

SEQ ID NO: 2744439 - DNA, 25 bp, Homo sapien
aaagaggcagccttgggattgagaa

SEQ ID NO: 2744440 - DNA, 25 bp, Homo sapien
aggcagccttgggattgagaagcca

SEQ ID NO: 2744441 - DNA, 25 bp, Homo sapien
tgtgcatccttgaggtccccggacc

SEQ ID NO: 2744442 - DNA, 25 bp, Homo sapien
tgcatccttgaggtccccggaccgg

SEQ ID NO: 2744443 - DNA, 25 bp, Homo sapien
gatggtccccgtggggatggacttc

SEQ ID NO: 2744444 - DNA, 25 bp, Homo sapien
ttctgtgcatccttgaggtccccgg

SEQ ID NO: 2744445 - DNA, 25 bp, Homo sapien
ccagaaagctggaaaggcggtctct

SEQ ID NO: 2744446 - DNA, 25 bp, Homo sapien
caaagacccatctgaggagtcagtg

SEQ ID NO: 2744447 - DNA, 25 bp, Homo sapien
tgcaaagacccatctgaggagtcag

SEQ ID NO: 2744448 - DNA, 25 bp, Homo sapien
ctgcaaagacccatctgaggagtca

SEQ ID NO: 2744449 - DNA, 25 bp, Homo sapien
gctccagggctttcggatgtgctga

SEQ ID NO: 2744450 - DNA, 25 bp, Homo sapien
agtccgggagcagacgtgggaggga

SEQ ID NO: 2744451 - DNA, 25 bp, Homo sapien
ggaaacacgagaagccagcgctgtg

SEQ ID NO: 2744452 - DNA, 25 bp, Homo sapien
tgggagggaccagaagggaccagaa

SEQ ID NO: 2744453 - DNA, 25 bp, Homo sapien
gtagatgccaaccagcagggtgaag

SEQ ID NO: 2744454 - DNA, 25 bp, Homo sapien
ggaagtagatgccaaccagcagggt

SEQ ID NO: 2744455 - DNA, 25 bp, Homo sapien
gggaagtagatgccaaccagcaggg

SEQ ID NO: 2744456 - DNA, 25 bp, Homo sapien
gaagtagatgccaaccagcagggtg

SEQ ID NO: 2744457 - DNA, 25 bp, Homo sapien
tgacgcaggcatcgaagctgcgccg

SEQ ID NO: 2744458 - DNA, 25 bp, Homo sapien
tgtggatgccgtaggccttgacgca

SEQ ID NO: 2744459 - DNA, 25 bp, Homo sapien
tgccctggatttcggtgacgttgtt

SEQ ID NO: 2744460 - DNA, 25 bp, Homo sapien
atgaagtactcgtcacaggcggcgc

SEQ ID NO: 2744461 - DNA, 25 bp, Homo sapien
ccaggaagaccagcgccagcttgtt

SEQ ID NO: 2744462 - DNA, 25 bp, Homo sapien
cagggccatgagcacgagcgtgcac

SEQ ID NO: 2744463 - DNA, 25 bp, Homo sapien
tgcacgtgccgtacacacgcatgtt

SEQ ID NO: 2744464 - DNA, 25 bp, Homo sapien
gttgacatacttgacgcccacgaag

SEQ ID NO: 2744465 - DNA, 25 bp, Homo sapien
gatatcatgtagtaggacccgccag

SEQ ID NO: 2744466 - DNA, 25 bp, Homo sapien
cagaaaaatctcgatggtccccaaa

SEQ ID NO: 2744467 - DNA, 25 bp, Homo sapien
gggtcccagcgagcgcgatatcatg

SEQ ID NO: 2744468 - DNA, 25 bp, Homo sapien
ccaaaatatacatggcccctgcaaa

SEQ ID NO: 2744469 - DNA, 25 bp, Homo sapien
gttggtagcgatcgcactcatggaa

SEQ ID NO: 2744470 - DNA, 25 bp, Homo sapien
cactcatggaaatggcggtcagcat

SEQ ID NO: 2744471 - DNA, 25 bp, Homo sapien
tagcgatcgcactcatggaaatggc

SEQ ID NO: 2744472 - DNA, 25 bp, Homo sapien
gatcgcactcatggaaatggcggtc

SEQ ID NO: 2744473 - DNA, 25 bp, Homo sapien
gggctctccatctcaatggagtggc

SEQ ID NO: 2744474 - DNA, 25 bp, Homo sapien
gcagccatctgaggagagttttcca

SEQ ID NO: 2744475 - DNA, 25 bp, Homo sapien
tgccggcatcgcaacactcccaagt

SEQ ID NO: 2744476 - DNA, 25 bp, Homo sapien
gtcagggtctatgacccggctcccg

SEQ ID NO: 2744477 - DNA, 25 bp, Homo sapien
gccacacctggccgggggagactca

SEQ ID NO: 2744478 - DNA, 25 bp, Homo sapien
accgcccgaaggcacagccacacct

SEQ ID NO: 2744479 - DNA, 25 bp, Homo sapien
agctgccaccgcccgaaggcacagc

SEQ ID NO: 2744480 - DNA, 25 bp, Homo sapien
gccaccgcccgaaggcacagccaca

SEQ ID NO: 2744481 - DNA, 25 bp, Homo sapien
cgatccacgtcaggcgcaggaagag

SEQ ID NO: 2744482 - DNA, 25 bp, Homo sapien
acgatccacgtcaggcgcaggaaga

SEQ ID NO: 2744483 - DNA, 25 bp, Homo sapien
ccacgatccacgtcaggcgcaggaa

SEQ ID NO: 2744484 - DNA, 25 bp, Homo sapien
ccccacgatccacgtcaggcgcagg

SEQ ID NO: 2744485 - DNA, 25 bp, Homo sapien
tccacgtgcagcagtgatggtccca

SEQ ID NO: 2744486 - DNA, 25 bp, Homo sapien
ggcctcaaggtagtgcccagcatgc

SEQ ID NO: 2744487 - DNA, 25 bp, Homo sapien
ccagcatgcgtgaaaccccagaaag

SEQ ID NO: 2744488 - DNA, 25 bp, Homo sapien
cacagcgtccacgtgcggaaaggta

SEQ ID NO: 2744489 - DNA, 25 bp, Homo sapien
accacgccctggctcaggttggtgt

SEQ ID NO: 2744490 - DNA, 25 bp, Homo sapien
gcttgttgagcagcgaggacaccat

SEQ ID NO: 2744491 - DNA, 25 bp, Homo sapien
caccatggggttactgtccatctcc

SEQ ID NO: 2744492 - DNA, 25 bp, Homo sapien
ctcaggttggtgtagttggccagct

SEQ ID NO: 2744493 - DNA, 25 bp, Homo sapien
tcaaagaagctctcttgttccacct

SEQ ID NO: 2744494 - DNA, 25 bp, Homo sapien
aaagaagctctcttgttccacctcg

SEQ ID NO: 2744495 - DNA, 25 bp, Homo sapien
caaagaagctctcttgttccacctc

SEQ ID NO: 2744496 - DNA, 25 bp, Homo sapien
agcacgtgctcccagtagggtgcct

SEQ ID NO: 2744497 - DNA, 25 bp, Homo sapien
tgggttccagccgtgccagcaaaga

SEQ ID NO: 2744498 - DNA, 25 bp, Homo sapien
cagcaaagagggcatcgccgtctgg

SEQ ID NO: 2744499 - DNA, 25 bp, Homo sapien
cttggtgcgaccatgagtgactgca

SEQ ID NO: 2744500 - DNA, 25 bp, Homo sapien
gcacctcctcccttgtcattctgca

SEQ ID NO: 2744501 - DNA, 25 bp, Homo sapien
tgttttggggatagagccactcgcc

SEQ ID NO: 2744502 - DNA, 25 bp, Homo sapien
ctgcacattcatgatgaccggaagg

SEQ ID NO: 2744503 - DNA, 25 bp, Homo sapien
ttggacatcggcagtcctggctgct

SEQ ID NO: 2744504 - DNA, 25 bp, Homo sapien
gccgcctgtcatctatctttccaca

SEQ ID NO: 2744505 - DNA, 25 bp, Homo sapien
cctgatgaggcttgtacggtgctcc

SEQ ID NO: 2744506 - DNA, 25 bp, Homo sapien
cctttcaaaggctcgatggtctcgc

SEQ ID NO: 2744507 - DNA, 25 bp, Homo sapien
cattctgcagacacgccgtcggaat

SEQ ID NO: 2744508 - DNA, 25 bp, Homo sapien
aacagcctgtttcagcgccctctcc

SEQ ID NO: 2744509 - DNA, 25 bp, Homo sapien
ctcacctgccccgagcggccctaag

SEQ ID NO: 2744510 - DNA, 25 bp, Homo sapien
cgagcggccctaagcagctggcact

SEQ ID NO: 2744511 - DNA, 25 bp, Homo sapien
ccccgagcggccctaagcagctggc

SEQ ID NO: 2744512 - DNA, 25 bp, Homo sapien
ttcccgaaccctctgtcacgtggct

SEQ ID NO: 2744513 - DNA, 25 bp, Homo sapien
gttccagagactcggggcccaggca

SEQ ID NO: 2744514 - DNA, 25 bp, Homo sapien
gaaccctctgtcacgtggctgtttg

SEQ ID NO: 2744515 - DNA, 25 bp, Homo sapien
tagttccagagactcggggcccagg

SEQ ID NO: 2744516 - DNA, 25 bp, Homo sapien
acagcctgggagtatgtcaggcgca

SEQ ID NO: 2744517 - DNA, 25 bp, Homo sapien
ataggtgcccgcacacatggacccg

SEQ ID NO: 2744518 - DNA, 25 bp, Homo sapien
aagcacatggctcacacgtggatac

SEQ ID NO: 2744519 - DNA, 25 bp, Homo sapien
tttaccgcatgcctgctaaggagag

SEQ ID NO: 2744520 - DNA, 25 bp, Homo sapien
cacaaaagcgccaggtgcaagttct

SEQ ID NO: 2744521 - DNA, 25 bp, Homo sapien
tgcaagttctctgccagttcggaga

SEQ ID NO: 2744522 - DNA, 25 bp, Homo sapien
gggccaccctcaaaagtgtccagaa

SEQ ID NO: 2744523 - DNA, 25 bp, Homo sapien
gatcaagtggattccgaagggcagc

SEQ ID NO: 2744524 - DNA, 25 bp, Homo sapien
gctcggcagtctcgtccccgccgcc

SEQ ID NO: 2744525 - DNA, 25 bp, Homo sapien
gcctccgtccgctcggcagtctcgt

SEQ ID NO: 2744526 - DNA, 25 bp, Homo sapien
cgctcggcagtctcgtccccgccgc

SEQ ID NO: 2744527 - DNA, 25 bp, Homo sapien
cggagcctccgtccgctcggcagtc

SEQ ID NO: 2744528 - DNA, 25 bp, Homo sapien
tgcagccgacagtccccgtcccggc

SEQ ID NO: 2744529 - DNA, 25 bp, Homo sapien
ctgcagccgacagtccccgtcccgg

SEQ ID NO: 2744530 - DNA, 25 bp, Homo sapien
gcagccgacagtccccgtcccggcc

SEQ ID NO: 2744531 - DNA, 25 bp, Homo sapien
ggatcaccgggctctgtgggttcaa

SEQ ID NO: 2744532 - DNA, 25 bp, Homo sapien
ccacaactgctgtacgacaacaaag

SEQ ID NO: 2744533 - DNA, 25 bp, Homo sapien
tggtgtgggcaaacacggccacagc

SEQ ID NO: 2744534 - DNA, 25 bp, Homo sapien
tgtctaatcctaaaaggcagctgga

SEQ ID NO: 2744535 - DNA, 25 bp, Homo sapien
ttcacacttagggtgctgggtaaac

SEQ ID NO: 2744536 - DNA, 25 bp, Homo sapien
agtttagggtcctgtggcagctccg

SEQ ID NO: 2744537 - DNA, 25 bp, Homo sapien
gcagctccgagggtggtcttctctg

SEQ ID NO: 2744538 - DNA, 25 bp, Homo sapien
agctcccggactcaggactcatcag

SEQ ID NO: 2744539 - DNA, 25 bp, Homo sapien
tgttgtaggaagtggccctcggaca

SEQ ID NO: 2744540 - DNA, 25 bp, Homo sapien
ctgtacccggcacctgttgtaggaa

SEQ ID NO: 2744541 - DNA, 25 bp, Homo sapien
cctcggacacgtggaggtacccgag

SEQ ID NO: 2744542 - DNA, 25 bp, Homo sapien
tggccctcggacacgtggaggtacc

SEQ ID NO: 2744543 - DNA, 25 bp, Homo sapien
gagccaggggactgctgggatccgg

SEQ ID NO: 2744544 - DNA, 25 bp, Homo sapien
ccaggggactgctgggatccgggtc

SEQ ID NO: 2744545 - DNA, 25 bp, Homo sapien
ggcacctggagccaggggactgctg

SEQ ID NO: 2744546 - DNA, 25 bp, Homo sapien
gactgctgggatccgggtccagtcc

SEQ ID NO: 2744547 - DNA, 25 bp, Homo sapien
gcctccaggtatctgtgtgcctctg

SEQ ID NO: 2744548 - DNA, 25 bp, Homo sapien
ggtgcgccatctgcatccttctggg

SEQ ID NO: 2744549 - DNA, 25 bp, Homo sapien
ctgggaacctgctgtcgggtatcag

SEQ ID NO: 2744550 - DNA, 25 bp, Homo sapien
ggctcatctcctggtgcgccatctg

SEQ ID NO: 2744551 - DNA, 25 bp, Homo sapien
acttctttcccgtgaagcttgggca

SEQ ID NO: 2744552 - DNA, 25 bp, Homo sapien
caaatgtttgctgtcggctcagggg

SEQ ID NO: 2744553 - DNA, 25 bp, Homo sapien
cccgtgaagcttgggcaaatgtttg

SEQ ID NO: 2744554 - DNA, 25 bp, Homo sapien
tgctccacaggtgacttctttcccg

SEQ ID NO: 2744555 - DNA, 25 bp, Homo sapien
accatctttaagtgtccgacggacg

SEQ ID NO: 2744556 - DNA, 25 bp, Homo sapien
tgtaaaatgtgtgaagcgccccacg

SEQ ID NO: 2744557 - DNA, 25 bp, Homo sapien
ctcccaggagaggatcagacagggc

SEQ ID NO: 2744558 - DNA, 25 bp, Homo sapien
atggacacgagggttgctattcccc

SEQ ID NO: 2744559 - DNA, 25 bp, Homo sapien
cagtgcttgcactaaccggagcgag

SEQ ID NO: 2744560 - DNA, 25 bp, Homo sapien
tatgtggaaatgcacccagccactg

SEQ ID NO: 2744561 - DNA, 25 bp, Homo sapien
caccacagggttgagagaggagctc

SEQ ID NO: 2744562 - DNA, 25 bp, Homo sapien
gagaaacccacgtgctgaagagtga

SEQ ID NO: 2744563 - DNA, 25 bp, Homo sapien
gatctcatccttaaggcaggctggg

SEQ ID NO: 2744564 - DNA, 25 bp, Homo sapien
ccaggaaagtgtcccaagagtggct

SEQ ID NO: 2744565 - DNA, 25 bp, Homo sapien
gataaagcacgaggagatgcccaca

SEQ ID NO: 2744566 - DNA, 25 bp, Homo sapien
cagggttgctggatccaagttgcca

SEQ ID NO: 2744567 - DNA, 25 bp, Homo sapien
ttgggagcactcctgggatcccctg

SEQ ID NO: 2744568 - DNA, 25 bp, Homo sapien
catgtgcgtccaacacacctgccag

SEQ ID NO: 2744569 - DNA, 25 bp, Homo sapien
tctcctcaaacctcggtcacagctg

SEQ ID NO: 2744570 - DNA, 25 bp, Homo sapien
ttccctgatggccaagcataccccg

SEQ ID NO: 2744571 - DNA, 25 bp, Homo sapien
gacccaaatattgcttctactaaga

SEQ ID NO: 2744572 - DNA, 25 bp, Homo sapien
tccggcccctcctaagaggcgtgtg

SEQ ID NO: 2744573 - DNA, 25 bp, Homo sapien
tccatggccaaaggacctggtaggg

SEQ ID NO: 2744574 - DNA, 25 bp, Homo sapien
ggctgccggataagacacgggcact

SEQ ID NO: 2744575 - DNA, 25 bp, Homo sapien
tccagcccaggtgcagtcaactgtg

SEQ ID NO: 2744576 - DNA, 25 bp, Homo sapien
gagattttgactaaacaggcagagg

SEQ ID NO: 2744577 - DNA, 25 bp, Homo sapien
tggtcccagggttgaagtcgccaca

SEQ ID NO: 2744578 - DNA, 25 bp, Homo sapien
tgcatttgcagctgagcctgtgaga

SEQ ID NO: 2744579 - DNA, 25 bp, Homo sapien
gtgaacatgtgcaaagtgatgccac

SEQ ID NO: 2744580 - DNA, 25 bp, Homo sapien
acacgcagcttcaggtgcgtgcatg

SEQ ID NO: 2744581 - DNA, 25 bp, Homo sapien
cgcagcttcaggtgcgtgcatgagt

SEQ ID NO: 2744582 - DNA, 25 bp, Homo sapien
gtgcaaagtgatgccacacgcagct

SEQ ID NO: 2744583 - DNA, 25 bp, Homo sapien
tcagctgatggttggctggagccat

SEQ ID NO: 2744584 - DNA, 25 bp, Homo sapien
aggcagccgcatggccgtgggcaca

SEQ ID NO: 2744585 - DNA, 25 bp, Homo sapien
ggagcccagctgtccacggcagcca

SEQ ID NO: 2744586 - DNA, 25 bp, Homo sapien
cagccgcatggccgtgggcacaggg

SEQ ID NO: 2744587 - DNA, 25 bp, Homo sapien
agcagaatgggaagcgggtcctcgt

SEQ ID NO: 2744588 - DNA, 25 bp, Homo sapien
ccgggctcgcggcagtagagcagaa

SEQ ID NO: 2744589 - DNA, 25 bp, Homo sapien
gcgggtcctcgtcaggcggctcggg

SEQ ID NO: 2744590 - DNA, 25 bp, Homo sapien
aatgggaagcgggtcctcgtcaggc

SEQ ID NO: 2744591 - DNA, 25 bp, Homo sapien
ctcggggtggggcgctggctgtcgc

SEQ ID NO: 2744592 - DNA, 25 bp, Homo sapien
ggctcggggtggggcgctggctgtc

SEQ ID NO: 2744593 - DNA, 25 bp, Homo sapien
cggggtggggcgctggctgtcgcct

SEQ ID NO: 2744594 - DNA, 25 bp, Homo sapien
gggtggggcgctggctgtcgccttc

SEQ ID NO: 2744595 - DNA, 25 bp, Homo sapien
gccgcgggggtcaccacgaagcgct

SEQ ID NO: 2744596 - DNA, 25 bp, Homo sapien
gggtcaccacgaagcgctgggacat

SEQ ID NO: 2744597 - DNA, 25 bp, Homo sapien
caccacgaagcgctgggacatggtg

SEQ ID NO: 2744598 - DNA, 25 bp, Homo sapien
ccacgaagcgctgggacatggtgtc

SEQ ID NO: 2744599 - DNA, 25 bp, Homo sapien
gaccaaccctggcagcaacgctgca

SEQ ID NO: 2744600 - DNA, 25 bp, Homo sapien
tggccaagcagggttcagccgtgcc

SEQ ID NO: 2744601 - DNA, 25 bp, Homo sapien
tctcgctggcctttgggtccgtggg

SEQ ID NO: 2744602 - DNA, 25 bp, Homo sapien
tgcctgcgtgcgaggcagaggcctc

SEQ ID NO: 2744603 - DNA, 25 bp, Homo sapien
cacgttcaggctaagctgggcagcc

SEQ ID NO: 2744604 - DNA, 25 bp, Homo sapien
agccgttgcccgtccacggaggtca

SEQ ID NO: 2744605 - DNA, 25 bp, Homo sapien
ggacctgcggcagacctataggagt

SEQ ID NO: 2744606 - DNA, 25 bp, Homo sapien
cctgcggcagacctataggagtagg

SEQ ID NO: 2744607 - DNA, 25 bp, Homo sapien
agctttctgtgcacgcaaggccaca

SEQ ID NO: 2744608 - DNA, 25 bp, Homo sapien
gctttctgtgcacgcaaggccacag

SEQ ID NO: 2744609 - DNA, 25 bp, Homo sapien
tgcccgtggcccgaggatgtgtcct

SEQ ID NO: 2744610 - DNA, 25 bp, Homo sapien
ccaccccacgtcagcaaagccagct

SEQ ID NO: 2744611 - DNA, 25 bp, Homo sapien
tgttcctacggccagtcctcctgag

SEQ ID NO: 2744612 - DNA, 25 bp, Homo sapien
cctgaggccaccgtgaccccgaggg

SEQ ID NO: 2744613 - DNA, 25 bp, Homo sapien
tacagagaacgtctggattatagat

SEQ ID NO: 2744614 - DNA, 25 bp, Homo sapien
gagaacgtctggattatagatgcag

SEQ ID NO: 2744615 - DNA, 25 bp, Homo sapien
aacgtctggattatagatgcagaag

SEQ ID NO: 2744616 - DNA, 25 bp, Homo sapien
cagagaacgtctggattatagatgc

SEQ ID NO: 2744617 - DNA, 25 bp, Homo sapien
gaggtgagtgggttgcccaagctca

SEQ ID NO: 2744618 - DNA, 25 bp, Homo sapien
caggtggcgcgtttggagttgttgg

SEQ ID NO: 2744619 - DNA, 25 bp, Homo sapien
tgaactcggcacgtccggaactggt

SEQ ID NO: 2744620 - DNA, 25 bp, Homo sapien
cccaaagagcaagcggcaacaagat

SEQ ID NO: 2744621 - DNA, 25 bp, Homo sapien
tcctttatttgaccccgcccacatc

SEQ ID NO: 2744622 - DNA, 25 bp, Homo sapien
tggcttcacctctcaccgggaggca

SEQ ID NO: 2744623 - DNA, 25 bp, Homo sapien
cttcacctctcaccgggaggcagag

SEQ ID NO: 2744624 - DNA, 25 bp, Homo sapien
gaggcagagattgcagtgagccgag

SEQ ID NO: 2744625 - DNA, 25 bp, Homo sapien
gaaatcgctgggtctgagtacttga

SEQ ID NO: 2744626 - DNA, 25 bp, Homo sapien
agtgtcttgtataaaacccagcgcg

SEQ ID NO: 2744627 - DNA, 25 bp, Homo sapien
ggcacctctgggaaagcatatccac

SEQ ID NO: 2744628 - DNA, 25 bp, Homo sapien
catcatcttccaccgtgaggcgggt

SEQ ID NO: 2744629 - DNA, 25 bp, Homo sapien
tgtgtagcggcgtcttctggcggtg

SEQ ID NO: 2744630 - DNA, 25 bp, Homo sapien
gtgtagcggcgtcttctggcggtgg

SEQ ID NO: 2744631 - DNA, 25 bp, Homo sapien
cgcacgattttccccgtgggtgaga

SEQ ID NO: 2744632 - DNA, 25 bp, Homo sapien
gacgaggccgggcgcacgattttcc

SEQ ID NO: 2744633 - DNA, 25 bp, Homo sapien
ggatagtctgttagcctcgccaggc

SEQ ID NO: 2744634 - DNA, 25 bp, Homo sapien
gctgcaggatgcttggaaagaacat

SEQ ID NO: 2744635 - DNA, 25 bp, Homo sapien
ttctctcagtgctggcggctccaga

SEQ ID NO: 2744636 - DNA, 25 bp, Homo sapien
tagactcaaggaaagtggcgcctgg

SEQ ID NO: 2744637 - DNA, 25 bp, Homo sapien
ctgtggctgtggaaacatccggcac

SEQ ID NO: 2744638 - DNA, 25 bp, Homo sapien
tgtggctgtggaaacatccggcaca

SEQ ID NO: 2744639 - DNA, 25 bp, Homo sapien
aaacatccggcacaatgagcacggg

SEQ ID NO: 2744640 - DNA, 25 bp, Homo sapien
atccggcacaatgagcacggggcga

SEQ ID NO: 2744641 - DNA, 25 bp, Homo sapien
tctctggacttggagtgaatgtctg

SEQ ID NO: 2744642 - DNA, 25 bp, Homo sapien
cggtctctggacttggagtgaatgt

SEQ ID NO: 2744643 - DNA, 25 bp, Homo sapien
tggacttggagtgaatgtctgcacc

SEQ ID NO: 2744644 - DNA, 25 bp, Homo sapien
ccttagaaagggcgcggtctctgga

SEQ ID NO: 2744645 - DNA, 25 bp, Homo sapien
tagtgtcagggacctcgatctcggg

SEQ ID NO: 2744646 - DNA, 25 bp, Homo sapien
cagtggctctcagtatcgactggag

SEQ ID NO: 2744647 - DNA, 25 bp, Homo sapien
ttactgagctgtgaccatcgacacc

SEQ ID NO: 2744648 - DNA, 25 bp, Homo sapien
tcctgcgaaggtgcttatggccacg

SEQ ID NO: 2744649 - DNA, 25 bp, Homo sapien
cacgggcggtcactggaaggcagag

SEQ ID NO: 2744650 - DNA, 25 bp, Homo sapien
tgctgagcgggtcaggatgtgacac

SEQ ID NO: 2744651 - DNA, 25 bp, Homo sapien
cctccttcgcggtaagtggtgcagg

SEQ ID NO: 2744652 - DNA, 25 bp, Homo sapien
agccttgagcctccttcgcggtaag

SEQ ID NO: 2744653 - DNA, 25 bp, Homo sapien
cccgctggggtgacgtgggccttgg

SEQ ID NO: 2744654 - DNA, 25 bp, Homo sapien
tgataattctcaggcagggatgggt

SEQ ID NO: 2744655 - DNA, 25 bp, Homo sapien
ctgtggccccgctggggtgacgtgg

SEQ ID NO: 2744656 - DNA, 25 bp, Homo sapien
ctcaggtttgaccgccatgctccag

SEQ ID NO: 2744657 - DNA, 25 bp, Homo sapien
gtttgttcctgcagcgtagcctctc

SEQ ID NO: 2744658 - DNA, 25 bp, Homo sapien
tcttgtgccggctaaaatgtcgtct

SEQ ID NO: 2744659 - DNA, 25 bp, Homo sapien
ctcaagccttgagggtgctgtgcct

SEQ ID NO: 2744660 - DNA, 25 bp, Homo sapien
ccctggcccatagaacattgtcatg

SEQ ID NO: 2744661 - DNA, 25 bp, Homo sapien
taccgtcagcaatggagccgtgaag

SEQ ID NO: 2744662 - DNA, 25 bp, Homo sapien
gagaactccgggcatgaatgtgcga

SEQ ID NO: 2744663 - DNA, 25 bp, Homo sapien
tttcatcctcatggcgcaaacggga

SEQ ID NO: 2744664 - DNA, 25 bp, Homo sapien
aacagacgtccacggcggctttcat

SEQ ID NO: 2744665 - DNA, 25 bp, Homo sapien
ggttctggaacattgcgtttcctgc

SEQ ID NO: 2744666 - DNA, 25 bp, Homo sapien
gtttgttccgcggatgtgccgcttc

SEQ ID NO: 2744667 - DNA, 25 bp, Homo sapien
ctgcagcgtccagctcgagacagtg

SEQ ID NO: 2744668 - DNA, 25 bp, Homo sapien
tgtgccgcttcctgaaagttcatcc

SEQ ID NO: 2744669 - DNA, 25 bp, Homo sapien
tcagcatttaactcctgtttataag

SEQ ID NO: 2744670 - DNA, 25 bp, Homo sapien
gacaggcccagtgtcttatattccc

SEQ ID NO: 2744671 - DNA, 25 bp, Homo sapien
ccagtctaccgacgatgggcatgta

SEQ ID NO: 2744672 - DNA, 25 bp, Homo sapien
tatattcccttctatctgcccaggt

SEQ ID NO: 2744673 - DNA, 25 bp, Homo sapien
agtcgacggccatcgccgacggtca

SEQ ID NO: 2744674 - DNA, 25 bp, Homo sapien
gcacgcagtcgacggccatcgccga

SEQ ID NO: 2744675 - DNA, 25 bp, Homo sapien
cccgggcacgcagtcgacggccatc

SEQ ID NO: 2744676 - DNA, 25 bp, Homo sapien
atcgccgacggtcacctcccacctc

SEQ ID NO: 2744677 - DNA, 25 bp, Homo sapien
gaacaagcatggagtacttacctag

SEQ ID NO: 2744678 - DNA, 25 bp, Homo sapien
gaaagctccagtgcaggatcagaac

SEQ ID NO: 2744679 - DNA, 25 bp, Homo sapien
cttacctaggtacgaggcagttgag

SEQ ID NO: 2744680 - DNA, 25 bp, Homo sapien
caggcgtcaggcactggtcttccat

SEQ ID NO: 2744681 - DNA, 25 bp, Homo sapien
tactgtgagagttgggtactacgct

SEQ ID NO: 2744682 - DNA, 25 bp, Homo sapien
tggttgctaccccgcaacctggttg

SEQ ID NO: 2744683 - DNA, 25 bp, Homo sapien
catatacgaatgctgggcctgaggg

SEQ ID NO: 2744684 - DNA, 25 bp, Homo sapien
ggcctgagggcactaagaactatgg

SEQ ID NO: 2744685 - DNA, 25 bp, Homo sapien
gctgcaggttccatgacacaggacc

SEQ ID NO: 2744686 - DNA, 25 bp, Homo sapien
gcaggttccatgacacaggaccctc

SEQ ID NO: 2744687 - DNA, 25 bp, Homo sapien
gggtggctgcaggttccatgacaca

SEQ ID NO: 2744688 - DNA, 25 bp, Homo sapien
tggctgcaggttccatgacacagga

SEQ ID NO: 2744689 - DNA, 25 bp, Homo sapien
gataaggcattaacagtccctccgc

SEQ ID NO: 2744690 - DNA, 25 bp, Homo sapien
gcagatctgctgacgactggctccg

SEQ ID NO: 2744691 - DNA, 25 bp, Homo sapien
caaaggttctctataaagtgcccgg

SEQ ID NO: 2744692 - DNA, 25 bp, Homo sapien
gccgggcgtctctgcagataaggca

SEQ ID NO: 2744693 - DNA, 25 bp, Homo sapien
gcttctgcgtgggcctcggcaacgt

SEQ ID NO: 2744694 - DNA, 25 bp, Homo sapien
tcggcaacgtgtggcgcttccccta

SEQ ID NO: 2744695 - DNA, 25 bp, Homo sapien
tgggcctcggcaacgtgtggcgctt

SEQ ID NO: 2744696 - DNA, 25 bp, Homo sapien
ctgcctgggcttctgcgtgggcctc

SEQ ID NO: 2744697 - DNA, 25 bp, Homo sapien
gggggctgaccaggaccccacatac

SEQ ID NO: 2744698 - DNA, 25 bp, Homo sapien
ggttctggcagtcgccccggcctgg

SEQ ID NO: 2744699 - DNA, 25 bp, Homo sapien
cagctgcggcatcgcagatggctcc

SEQ ID NO: 2744700 - DNA, 25 bp, Homo sapien
gccccggcctggaggaaccctgtgc

SEQ ID NO: 2744701 - DNA, 25 bp, Homo sapien
ccgtctcaagggcgtgctgcacctg

SEQ ID NO: 2744702 - DNA, 25 bp, Homo sapien
gagccgtctcaagggcgtgctgcac

SEQ ID NO: 2744703 - DNA, 25 bp, Homo sapien
ctgagccgtctcaagggcgtgctgc

SEQ ID NO: 2744704 - DNA, 25 bp, Homo sapien
tctcaagggcgtgctgcacctgggc

SEQ ID NO: 2744705 - DNA, 25 bp, Homo sapien
ttccacctgagtgagccaacatctg

SEQ ID NO: 2744706 - DNA, 25 bp, Homo sapien
ctgcttccacctgagtgagccaaca

SEQ ID NO: 2744707 - DNA, 25 bp, Homo sapien
ggacctttgcaaccacgtccaggcg

SEQ ID NO: 2744708 - DNA, 25 bp, Homo sapien
cagggacctttgcaaccacgtccag

SEQ ID NO: 2744709 - DNA, 25 bp, Homo sapien
ggcgcgacgggagctgcttccgcgt

SEQ ID NO: 2744710 - DNA, 25 bp, Homo sapien
aggctgtcggcttcgctgtgctcac

SEQ ID NO: 2744711 - DNA, 25 bp, Homo sapien
ttgcagctgctgacctcggtcccaa

SEQ ID NO: 2744712 - DNA, 25 bp, Homo sapien
cagctgtgtttggaattcttgcgcc

SEQ ID NO: 2744713 - DNA, 25 bp, Homo sapien
gaaggttccaatcagcaaaagctcc

SEQ ID NO: 2744714 - DNA, 25 bp, Homo sapien
gcactgtccagttctagaaggttcc

SEQ ID NO: 2744715 - DNA, 25 bp, Homo sapien
ccccgggtgagcactgatgcgctct

SEQ ID NO: 2744716 - DNA, 25 bp, Homo sapien
gtgcctagtccggacatttcctgcg

SEQ ID NO: 2744717 - DNA, 25 bp, Homo sapien
taaacatgcagttaacgccagtgca

SEQ ID NO: 2744718 - DNA, 25 bp, Homo sapien
tacccacctgcagataagctgagtg

SEQ ID NO: 2744719 - DNA, 25 bp, Homo sapien
gaagctgcccacctaagagtgtccc

SEQ ID NO: 2744720 - DNA, 25 bp, Homo sapien
tacacgcattcttgttgggaacccg

SEQ ID NO: 2744721 - DNA, 25 bp, Homo sapien
ctggccaagttcagggtgggcttca

SEQ ID NO: 2744722 - DNA, 25 bp, Homo sapien
gttcacaggatccatgggactctct

SEQ ID NO: 2744723 - DNA, 25 bp, Homo sapien
agaactggccaagttcagggtgggc

SEQ ID NO: 2744724 - DNA, 25 bp, Homo sapien
cttttttaagtagggcgtctctgtg

SEQ ID NO: 2744725 - DNA, 25 bp, Homo sapien
agccactcagacttatccgaggtta

SEQ ID NO: 2744726 - DNA, 25 bp, Homo sapien
gcctgcaagtcctgtcgttgacccg

SEQ ID NO: 2744727 - DNA, 25 bp, Homo sapien
gaggttacattttgcgtcaatacca

SEQ ID NO: 2744728 - DNA, 25 bp, Homo sapien
cccggacgagaaaaacaggcagctg

SEQ ID NO: 2744729 - DNA, 25 bp, Homo sapien
agtgtgaggactccgccagcggcct

SEQ ID NO: 2744730 - DNA, 25 bp, Homo sapien
atcccttgcccgtcagtgtgaggac

SEQ ID NO: 2744731 - DNA, 25 bp, Homo sapien
ggatccagggtgaagaggctccatc

SEQ ID NO: 2744732 - DNA, 25 bp, Homo sapien
cactcgccgggggccctggtcaaag

SEQ ID NO: 2744733 - DNA, 25 bp, Homo sapien
ctccctgggacgtagagcccggcgt

SEQ ID NO: 2744734 - DNA, 25 bp, Homo sapien
gaagccgggctcctggtgaggaaaa

SEQ ID NO: 2744735 - DNA, 25 bp, Homo sapien
actcagccttcagccggacatgcag

SEQ ID NO: 2744736 - DNA, 25 bp, Homo sapien
cagggcacacctttggtcactccaa

SEQ ID NO: 2744737 - DNA, 25 bp, Homo sapien
agggcagtgccgggttggctgcggc

SEQ ID NO: 2744738 - DNA, 25 bp, Homo sapien
cagtgccgggttggctgcggcctcc

SEQ ID NO: 2744739 - DNA, 25 bp, Homo sapien
ggcagtgccgggttggctgcggcct

SEQ ID NO: 2744740 - DNA, 25 bp, Homo sapien
gtgccgggttggctgcggcctccag

SEQ ID NO: 2744741 - DNA, 25 bp, Homo sapien
tgcggggccaaaatcagactccgtt

SEQ ID NO: 2744742 - DNA, 25 bp, Homo sapien
caaaatcagactccgttccagaaga

SEQ ID NO: 2744743 - DNA, 25 bp, Homo sapien
cagactccgttccagaagaggccag

SEQ ID NO: 2744744 - DNA, 25 bp, Homo sapien
gggccaaaatcagactccgttccag

SEQ ID NO: 2744745 - DNA, 25 bp, Homo sapien
ctccaccggggcgagcagacaggca

SEQ ID NO: 2744746 - DNA, 25 bp, Homo sapien
agacaggcagcccagtgacgctgga

SEQ ID NO: 2744747 - DNA, 25 bp, Homo sapien
gggaacctcagtgaagggacagaca

SEQ ID NO: 2744748 - DNA, 25 bp, Homo sapien
agcccagtgacgctggagcggcggg

SEQ ID NO: 2744749 - DNA, 25 bp, Homo sapien
cacgtaggtgacacggtgtcgagtc

SEQ ID NO: 2744750 - DNA, 25 bp, Homo sapien
tcgagtcagcttgagcaggaatgct

SEQ ID NO: 2744751 - DNA, 25 bp, Homo sapien
agcaggaatgcttggtggcacagcc

SEQ ID NO: 2744752 - DNA, 25 bp, Homo sapien
ccccaggagtggcacgtaggtgaca

SEQ ID NO: 2744753 - DNA, 25 bp, Homo sapien
ggagtcacgacagaaatgttttctt

SEQ ID NO: 2744754 - DNA, 25 bp, Homo sapien
gtcacgacagaaatgttttcttcgg

SEQ ID NO: 2744755 - DNA, 25 bp, Homo sapien
gagtcacgacagaaatgttttcttc

SEQ ID NO: 2744756 - DNA, 25 bp, Homo sapien
agtcacgacagaaatgttttcttcg

SEQ ID NO: 2744757 - DNA, 25 bp, Homo sapien
gcctgacagtggttgggttaaacca

SEQ ID NO: 2744758 - DNA, 25 bp, Homo sapien
tctgctcaccccacgagagggcggg

SEQ ID NO: 2744759 - DNA, 25 bp, Homo sapien
atggcagctcccagacagctcctgt

SEQ ID NO: 2744760 - DNA, 25 bp, Homo sapien
taaaccacttcctgatgcgaaaagg

SEQ ID NO: 2744761 - DNA, 25 bp, Homo sapien
agtagcagagggaggccgtgtcaga

SEQ ID NO: 2744762 - DNA, 25 bp, Homo sapien
tcttggctttcaggatggagtagca

SEQ ID NO: 2744763 - DNA, 25 bp, Homo sapien
tgtcagagatgacgcgcaggaaaaa

SEQ ID NO: 2744764 - DNA, 25 bp, Homo sapien
acttgctgatgaaatgggagctgca

SEQ ID NO: 2744765 - DNA, 25 bp, Homo sapien
cgccagccctgtcagcctccatctt

SEQ ID NO: 2744766 - DNA, 25 bp, Homo sapien
cgcgccagccctgtcagcctccatc

SEQ ID NO: 2744767 - DNA, 25 bp, Homo sapien
gccagccctgtcagcctccatcttt

SEQ ID NO: 2744768 - DNA, 25 bp, Homo sapien
gcgccagccctgtcagcctccatct

SEQ ID NO: 2744769 - DNA, 25 bp, Homo sapien
tcttgtagatgttggtgcacaccgt

SEQ ID NO: 2744770 - DNA, 25 bp, Homo sapien
tgttggtgcacaccgtctggaggct

SEQ ID NO: 2744771 - DNA, 25 bp, Homo sapien
tgtagatgttggtgcacaccgtctg

SEQ ID NO: 2744772 - DNA, 25 bp, Homo sapien
tagatgttggtgcacaccgtctgga

SEQ ID NO: 2744773 - DNA, 25 bp, Homo sapien
tcagccgcaagaccccaaagagttt

SEQ ID NO: 2744774 - DNA, 25 bp, Homo sapien
agtttgcgacgcatgttcctcccag

SEQ ID NO: 2744775 - DNA, 25 bp, Homo sapien
actggctctgatggaggtccgggca

SEQ ID NO: 2744776 - DNA, 25 bp, Homo sapien
cccagccttgaagccgcggttgaag

SEQ ID NO: 2744777 - DNA, 25 bp, Homo sapien
tgcatctgtgtccatcttcaattca

SEQ ID NO: 2744778 - DNA, 25 bp, Homo sapien
aaacagcacagatttctgcatctgt

SEQ ID NO: 2744779 - DNA, 25 bp, Homo sapien
tctgagcctgagacggggccttgag

SEQ ID NO: 2744780 - DNA, 25 bp, Homo sapien
aacaagaccccagaattttgtagag

SEQ ID NO: 2744781 - DNA, 25 bp, Homo sapien
cccacacggaagcagaggtggacgc

SEQ ID NO: 2744782 - DNA, 25 bp, Homo sapien
ggcctctgaccctttgggattggca

SEQ ID NO: 2744783 - DNA, 25 bp, Homo sapien
gggattggcagtcgcctgccccaca

SEQ ID NO: 2744784 - DNA, 25 bp, Homo sapien
aggtggacgcaacggccctgcagca

SEQ ID NO: 2744785 - DNA, 25 bp, Homo sapien
gcctcgtcttctacagggaagttca

SEQ ID NO: 2744786 - DNA, 25 bp, Homo sapien
gaagttcaccactgtcttccgcaag

SEQ ID NO: 2744787 - DNA, 25 bp, Homo sapien
gccgtgggccggcatctgaacaaaa

SEQ ID NO: 2744788 - DNA, 25 bp, Homo sapien
ggagtagtcgctctgcacctccagg

SEQ ID NO: 2744789 - DNA, 25 bp, Homo sapien
ctgaggaaggttttcgcgtgggtga

SEQ ID NO: 2744790 - DNA, 25 bp, Homo sapien
aaggttttcgcgtgggtgaggtgag

SEQ ID NO: 2744791 - DNA, 25 bp, Homo sapien
gaaggttttcgcgtgggtgaggtga

SEQ ID NO: 2744792 - DNA, 25 bp, Homo sapien
tttcgcgtgggtgaggtgaggtgtc

SEQ ID NO: 2744793 - DNA, 25 bp, Homo sapien
agagcagcgtggagaggatggagcc

SEQ ID NO: 2744794 - DNA, 25 bp, Homo sapien
gccgaatccccgcaaacagcttgtt

SEQ ID NO: 2744795 - DNA, 25 bp, Homo sapien
caaacagcttgttctccatgtcgcc

SEQ ID NO: 2744796 - DNA, 25 bp, Homo sapien
atgtcgccgtagcacaggctgcaga

SEQ ID NO: 2744797 - DNA, 25 bp, Homo sapien
tagccccgtggaacctaaaggtgca

SEQ ID NO: 2744798 - DNA, 25 bp, Homo sapien
caagacctgttattttcgggaagcg

SEQ ID NO: 2744799 - DNA, 25 bp, Homo sapien
tctccaaacaaggatgccaagggtg

SEQ ID NO: 2744800 - DNA, 25 bp, Homo sapien
ggacgccactcctgttgctaagaga

SEQ ID NO: 2744801 - DNA, 25 bp, Homo sapien
cacatgggatgggaaactctctctg

SEQ ID NO: 2744802 - DNA, 25 bp, Homo sapien
caggcagacaacagtgacgttccgt

SEQ ID NO: 2744803 - DNA, 25 bp, Homo sapien
cacagtgatgggcaagaggactgca

SEQ ID NO: 2744804 - DNA, 25 bp, Homo sapien
aagcacacgcaccaactctaggagt

SEQ ID NO: 2744805 - DNA, 25 bp, Homo sapien
cacatgaagcgtaggaagacgtcga

SEQ ID NO: 2744806 - DNA, 25 bp, Homo sapien
gaagacgtcgaagaggccactgctg

SEQ ID NO: 2744807 - DNA, 25 bp, Homo sapien
cgtggtggcacatgaagcgtaggaa

SEQ ID NO: 2744808 - DNA, 25 bp, Homo sapien
ttgcccctgatgcgcacggcgtggt

SEQ ID NO: 2744809 - DNA, 25 bp, Homo sapien
cgtggcccggatggcatatgtgatc

SEQ ID NO: 2744810 - DNA, 25 bp, Homo sapien
tatgtgatccaggagttgctgccca

SEQ ID NO: 2744811 - DNA, 25 bp, Homo sapien
tggcatatgtgatccaggagttgct

SEQ ID NO: 2744812 - DNA, 25 bp, Homo sapien
cccggatggcatatgtgatccagga

SEQ ID NO: 2744813 - DNA, 25 bp, Homo sapien
acggcatccctcagcgggctggtct

SEQ ID NO: 2744814 - DNA, 25 bp, Homo sapien
tgctcgatgacgacggcatccctca

SEQ ID NO: 2744815 - DNA, 25 bp, Homo sapien
caggtgagccacgaactgtcgcatg

SEQ ID NO: 2744816 - DNA, 25 bp, Homo sapien
catgtacggctggaggtctgtcaag

SEQ ID NO: 2744817 - DNA, 25 bp, Homo sapien
aggcaggcgccccatacagagcggg

SEQ ID NO: 2744818 - DNA, 25 bp, Homo sapien
gagctcctgcaagccgatgatggca

SEQ ID NO: 2744819 - DNA, 25 bp, Homo sapien
tacagagcggggcaggacggacagc

SEQ ID NO: 2744820 - DNA, 25 bp, Homo sapien
gacggacagccacctcccgcaagag

SEQ ID NO: 2744821 - DNA, 25 bp, Homo sapien
caacatccctaaagcacgtctgtga

SEQ ID NO: 2744822 - DNA, 25 bp, Homo sapien
gcgagttccacaacggatgccattc

SEQ ID NO: 2744823 - DNA, 25 bp, Homo sapien
acagcagcgggaaggatacatccac

SEQ ID NO: 2744824 - DNA, 25 bp, Homo sapien
ggaattcacccagaggcgagggcct

SEQ ID NO: 2744825 - DNA, 25 bp, Homo sapien
ggagcgaggcctgaatcagccttcc

SEQ ID NO: 2744826 - DNA, 25 bp, Homo sapien
tatatctcatggagccggcataggc

SEQ ID NO: 2744827 - DNA, 25 bp, Homo sapien
ctcatgaccactgggtgggaaccca

SEQ ID NO: 2744828 - DNA, 25 bp, Homo sapien
ccgctctgggaggagtgtgtcccgg

SEQ ID NO: 2744829 - DNA, 25 bp, Homo sapien
gcataccgacgcacgcagtacgtgt

SEQ ID NO: 2744830 - DNA, 25 bp, Homo sapien
tcttgaaggccttgcggacgtgccc

SEQ ID NO: 2744831 - DNA, 25 bp, Homo sapien
tgatgctggcgatgacctccgtgag

SEQ ID NO: 2744832 - DNA, 25 bp, Homo sapien
ggccttctggaccacggcataccga

SEQ ID NO: 2744833 - DNA, 25 bp, Homo sapien
ggatggtgtcgtacgcgcccgtcac

SEQ ID NO: 2744834 - DNA, 25 bp, Homo sapien
ctgggggatggtgtcgtacgcgccc

SEQ ID NO: 2744835 - DNA, 25 bp, Homo sapien
ggggatggtgtcgtacgcgcccgtc

SEQ ID NO: 2744836 - DNA, 25 bp, Homo sapien
gatggtgtcgtacgcgcccgtcaca

SEQ ID NO: 2744837 - DNA, 25 bp, Homo sapien
gtgcgccaggccctgtggatatcgt

SEQ ID NO: 2744838 - DNA, 25 bp, Homo sapien
gtggatatcgtccaggcccagcaca

SEQ ID NO: 2744839 - DNA, 25 bp, Homo sapien
acacgcagcacgaaggtgcgccagg

SEQ ID NO: 2744840 - DNA, 25 bp, Homo sapien
gcccgctcgtagttgagcacgctga

SEQ ID NO: 2744841 - DNA, 25 bp, Homo sapien
cttcaccctcgaggtgagacgctcg

SEQ ID NO: 2744842 - DNA, 25 bp, Homo sapien
tcaccctcgaggtgagacgctcggc

SEQ ID NO: 2744843 - DNA, 25 bp, Homo sapien
ttcaccctcgaggtgagacgctcgg

SEQ ID NO: 2744844 - DNA, 25 bp, Homo sapien
ggcagtcgtggcctggtccccgggc

SEQ ID NO: 2744845 - DNA, 25 bp, Homo sapien
tctcctcagatgacggggtcaccgc

SEQ ID NO: 2744846 - DNA, 25 bp, Homo sapien
tccaggatcctcagagcccggtggg

SEQ ID NO: 2744847 - DNA, 25 bp, Homo sapien
taagcggaagcgcacggaggctgcg

SEQ ID NO: 2744848 - DNA, 25 bp, Homo sapien
tcgggccgtgctgcatccaggccct

SEQ ID NO: 2744849 - DNA, 25 bp, Homo sapien
tcactgtgcgcacaaatgggttggc

SEQ ID NO: 2744850 - DNA, 25 bp, Homo sapien
acgctgcttttctggaggcaccggc

SEQ ID NO: 2744851 - DNA, 25 bp, Homo sapien
aggacacggatccaggacctcgggc

SEQ ID NO: 2744852 - DNA, 25 bp, Homo sapien
cctcttttctctgcggaacgttctg

SEQ ID NO: 2744853 - DNA, 25 bp, Homo sapien
gctcccacgacgtagtccatgttca

SEQ ID NO: 2744854 - DNA, 25 bp, Homo sapien
gaacgttctggctcccacgacgtag

SEQ ID NO: 2744855 - DNA, 25 bp, Homo sapien
tctctgcggaacgttctggctccca

SEQ ID NO: 2744856 - DNA, 25 bp, Homo sapien
gcctggcttcccgatgctgcctgac

SEQ ID NO: 2744857 - DNA, 25 bp, Homo sapien
tgcctgacctctgcttccgacagct

SEQ ID NO: 2744858 - DNA, 25 bp, Homo sapien
atcggccgcagcccgtcaggcttgg

SEQ ID NO: 2744859 - DNA, 25 bp, Homo sapien
ggatgaagcggagtctggacgtcag

SEQ ID NO: 2744860 - DNA, 25 bp, Homo sapien
tcttttgaaacgtggtctccgtgac

SEQ ID NO: 2744861 - DNA, 25 bp, Homo sapien
ctcttccggtagaaaaagagcctgt

SEQ ID NO: 2744862 - DNA, 25 bp, Homo sapien
ggtctccgtgacataaaagaaagac

SEQ ID NO: 2744863 - DNA, 25 bp, Homo sapien
tgctttgcaacttgctccagacact

SEQ ID NO: 2744864 - DNA, 25 bp, Homo sapien
caggatctcctcacgcagacggtgc

SEQ ID NO: 2744865 - DNA, 25 bp, Homo sapien
aggatctcctcacgcagacggtgct

SEQ ID NO: 2744866 - DNA, 25 bp, Homo sapien
gctcgacgacgtacacactcatcag

SEQ ID NO: 2744867 - DNA, 25 bp, Homo sapien
ctgagcagctcgacgacgtacacac

SEQ ID NO: 2744868 - DNA, 25 bp, Homo sapien
acatccagatcaccgagggcctggt

SEQ ID NO: 2744869 - DNA, 25 bp, Homo sapien
cttaaacgagaaggacatgccacat

SEQ ID NO: 2744870 - DNA, 25 bp, Homo sapien
ttcggacacggggacaccgcatatc

SEQ ID NO: 2744871 - DNA, 25 bp, Homo sapien
ctgcaccatccagacaacacacata

SEQ ID NO: 2744872 - DNA, 25 bp, Homo sapien
gtgtccactcgacgtcctgagcgaa

SEQ ID NO: 2744873 - DNA, 25 bp, Homo sapien
agcgaaaagccacgtgtgcccacgt

SEQ ID NO: 2744874 - DNA, 25 bp, Homo sapien
gtcctgagcgaaaagccacgtgtgc

SEQ ID NO: 2744875 - DNA, 25 bp, Homo sapien
tgcccacgtgacgatggagacagga

SEQ ID NO: 2744876 - DNA, 25 bp, Homo sapien
ctcatcttccacgtcagctcctgca

SEQ ID NO: 2744877 - DNA, 25 bp, Homo sapien
gccaagcgcagtcccgcacgctcat

SEQ ID NO: 2744878 - DNA, 25 bp, Homo sapien
agcgcagtcccgcacgctcatcttc

SEQ ID NO: 2744879 - DNA, 25 bp, Homo sapien
agtcccgcacgctcatcttccacgt

SEQ ID NO: 2744880 - DNA, 25 bp, Homo sapien
tgttcctgaggaagcggcgttcgtt

SEQ ID NO: 2744881 - DNA, 25 bp, Homo sapien
aggcaggcccgcacgaagccgtaca

SEQ ID NO: 2744882 - DNA, 25 bp, Homo sapien
ttccccagggagatgaacttcttgg

SEQ ID NO: 2744883 - DNA, 25 bp, Homo sapien
agcttggcatgcttccccagggaga

SEQ ID NO: 2744884 - DNA, 25 bp, Homo sapien
gcagcgggcagtgcgtcttgaggag

SEQ ID NO: 2744885 - DNA, 25 bp, Homo sapien
tggggtgaccgcagctcgcagcggg

SEQ ID NO: 2744886 - DNA, 25 bp, Homo sapien
gggcagtgcgtcttgaggagcaccc

SEQ ID NO: 2744887 - DNA, 25 bp, Homo sapien
gctcgcagcgggcagtgcgtcttga

SEQ ID NO: 2744888 - DNA, 25 bp, Homo sapien
gcgcgtggttcccaagcagctccag

SEQ ID NO: 2744889 - DNA, 25 bp, Homo sapien
cgcatttgccagtagcgctggggca

SEQ ID NO: 2744890 - DNA, 25 bp, Homo sapien
gcgtggttcccaagcagctccagaa

SEQ ID NO: 2744891 - DNA, 25 bp, Homo sapien
aaacaggggccgcatttgccagtag

SEQ ID NO: 2744892 - DNA, 25 bp, Homo sapien
agcctccgagcgccagtcaggctgg

SEQ ID NO: 2744893 - DNA, 25 bp, Homo sapien
ccagaaagatggtctccacgagcct

SEQ ID NO: 2744894 - DNA, 25 bp, Homo sapien
gaacccagaaagatggtctccacga

SEQ ID NO: 2744895 - DNA, 25 bp, Homo sapien
ccttgtcgcctgaggagtagaggaa

SEQ ID NO: 2744896 - DNA, 25 bp, Homo sapien
caccgggggacaaggcgtgtcccag

SEQ ID NO: 2744897 - DNA, 25 bp, Homo sapien
ggacaaggcgtgtcccagggacgtg

SEQ ID NO: 2744898 - DNA, 25 bp, Homo sapien
gtcccagggacgtggtggccgcgat

SEQ ID NO: 2744899 - DNA, 25 bp, Homo sapien
cgatgtggatggggggcccgcgtgg

SEQ ID NO: 2744900 - DNA, 25 bp, Homo sapien
cttgggcaacggcagacttcggctg

SEQ ID NO: 2744901 - DNA, 25 bp, Homo sapien
acagaaaccacggtcactcggtcca

SEQ ID NO: 2744902 - DNA, 25 bp, Homo sapien
agagagcgcaccctccaaagaggtg

SEQ ID NO: 2744903 - DNA, 25 bp, Homo sapien
tgacgctatggttccaggcccgttc

SEQ ID NO: 2744904 - DNA, 25 bp, Homo sapien
cccgcagtgcgtcggtcaccgtgtt

SEQ ID NO: 2744905 - DNA, 25 bp, Homo sapien
acaaagagcgcgcagcgtgccagca

SEQ ID NO: 2744906 - DNA, 25 bp, Homo sapien
tgttgggcaggtagctgcgcacgct

SEQ ID NO: 2744907 - DNA, 25 bp, Homo sapien
gccagcaggtgaaccagcacgtcgt

SEQ ID NO: 2744908 - DNA, 25 bp, Homo sapien
cagcagcgcgaagccgaaggccagc

SEQ ID NO: 2744909 - DNA, 25 bp, Homo sapien
cgcgggccccgtccagcagcgcgaa

SEQ ID NO: 2744910 - DNA, 25 bp, Homo sapien
ccgtccagcagcgcgaagccgaagg

SEQ ID NO: 2744911 - DNA, 25 bp, Homo sapien
gtccagcagcgcgaagccgaaggcc

SEQ ID NO: 2744912 - DNA, 25 bp, Homo sapien
acagcctctgcagcactcgggccac

SEQ ID NO: 2744913 - DNA, 25 bp, Homo sapien
gttcttcgcgccgcgctcgcacagc

SEQ ID NO: 2744914 - DNA, 25 bp, Homo sapien
tcgcgccgcgctcgcacagcctctg

SEQ ID NO: 2744915 - DNA, 25 bp, Homo sapien
gcctctgcagcactcgggccaccag

SEQ ID NO: 2744916 - DNA, 25 bp, Homo sapien
gccgtgcgtcccagggcacgcacac

SEQ ID NO: 2744917 - DNA, 25 bp, Homo sapien
gggggcggccgtgcgtcccagggca

SEQ ID NO: 2744918 - DNA, 25 bp, Homo sapien
gcggccgtgcgtcccagggcacgca

SEQ ID NO: 2744919 - DNA, 25 bp, Homo sapien
gggcggccgtgcgtcccagggcacg

SEQ ID NO: 2744920 - DNA, 25 bp, Homo sapien
accagcgcgcggaaagccgccgggt

SEQ ID NO: 2744921 - DNA, 25 bp, Homo sapien
cccaggcgccgcacgaacgtggcca

SEQ ID NO: 2744922 - DNA, 25 bp, Homo sapien
cctcgcggtagtggctgcgcagcag

SEQ ID NO: 2744923 - DNA, 25 bp, Homo sapien
gccagcggcagcacctcgcggtagt

SEQ ID NO: 2744924 - DNA, 25 bp, Homo sapien
agggcttcccacgtgcgcagcagga

SEQ ID NO: 2744925 - DNA, 25 bp, Homo sapien
gccagggcttcccacgtgcgcagca

SEQ ID NO: 2744926 - DNA, 25 bp, Homo sapien
ggcttcccacgtgcgcagcaggacg

SEQ ID NO: 2744927 - DNA, 25 bp, Homo sapien
cagggcttcccacgtgcgcagcagg

SEQ ID NO: 2744928 - DNA, 25 bp, Homo sapien
aatatccgaaatactttcattatac

SEQ ID NO: 2744929 - DNA, 25 bp, Homo sapien
aaataaatccatatcatgtattact

SEQ ID NO: 2744930 - DNA, 25 bp, Homo sapien
gaaagagcctttgatcccagagtcc

SEQ ID NO: 2744931 - DNA, 25 bp, Homo sapien
caaatctgacgtgatgggaacttgg

SEQ ID NO: 2744932 - DNA, 25 bp, Homo sapien
gtaagcgctaccagctccaaatctg

SEQ ID NO: 2744933 - DNA, 25 bp, Homo sapien
tccgaagggattttggcaacacaga

SEQ ID NO: 2744934 - DNA, 25 bp, Homo sapien
tctgcgtttatccacaggataaagc

SEQ ID NO: 2744935 - DNA, 25 bp, Homo sapien
tcgtaggactccccaaactcgttca

SEQ ID NO: 2744936 - DNA, 25 bp, Homo sapien
cgttcactctgcgtttatccacagg

SEQ ID NO: 2744937 - DNA, 25 bp, Homo sapien
actcgttcactctgcgtttatccac

SEQ ID NO: 2744938 - DNA, 25 bp, Homo sapien
gaaccaagccccgtgtgagtgtgag

SEQ ID NO: 2744939 - DNA, 25 bp, Homo sapien
aaatggataaacaggcgcagggtgc

SEQ ID NO: 2744940 - DNA, 25 bp, Homo sapien
cagaagttttactgccgagggctga

SEQ ID NO: 2744941 - DNA, 25 bp, Homo sapien
gaaagccgtcattccgttcagcagc

SEQ ID NO: 2744942 - DNA, 25 bp, Homo sapien
gaaggcaaagacgtcatcaatgaag

SEQ ID NO: 2744943 - DNA, 25 bp, Homo sapien
ggtagaccagaaacaccacgtcgtc

SEQ ID NO: 2744944 - DNA, 25 bp, Homo sapien
aagcaggccagccggtgagacgtgg

SEQ ID NO: 2744945 - DNA, 25 bp, Homo sapien
aacaccacgtcgtcccggaagcagg

SEQ ID NO: 2744946 - DNA, 25 bp, Homo sapien
tctgctcagtgagaagggattcctc

SEQ ID NO: 2744947 - DNA, 25 bp, Homo sapien
taatgctgttggctggaagacgccc

SEQ ID NO: 2744948 - DNA, 25 bp, Homo sapien
gaggcacttctaatcccacacggag

SEQ ID NO: 2744949 - DNA, 25 bp, Homo sapien
gatgcttggaactaactggaactcc

SEQ ID NO: 2744950 - DNA, 25 bp, Homo sapien
tccagggcagatgtgccactgactt

SEQ ID NO: 2744951 - DNA, 25 bp, Homo sapien
agggcagatgtgccactgacttcaa

SEQ ID NO: 2744952 - DNA, 25 bp, Homo sapien
agacaggcccaggtcagctgtgggc

SEQ ID NO: 2744953 - DNA, 25 bp, Homo sapien
gacaggcccaggtcagctgtgggca

SEQ ID NO: 2744954 - DNA, 25 bp, Homo sapien
agagacaggcccaggtcagctgtgg

SEQ ID NO: 2744955 - DNA, 25 bp, Homo sapien
gagacaggcccaggtcagctgtggg

SEQ ID NO: 2744956 - DNA, 25 bp, Homo sapien
agttcacaaagagctggggcagcat

SEQ ID NO: 2744957 - DNA, 25 bp, Homo sapien
gcatgaagaggaaaccaaaggcata

SEQ ID NO: 2744958 - DNA, 25 bp, Homo sapien
tgaagaggaaaccaaaggcatagac

SEQ ID NO: 2744959 - DNA, 25 bp, Homo sapien
gaagaggaaaccaaaggcatagacc

SEQ ID NO: 2744960 - DNA, 25 bp, Homo sapien
gttgacgaagctgttgattaaccag

SEQ ID NO: 2744961 - DNA, 25 bp, Homo sapien
cgttgacgaagctgttgattaacca

SEQ ID NO: 2744962 - DNA, 25 bp, Homo sapien
cagagagggtacagcaggtatgaca

SEQ ID NO: 2744963 - DNA, 25 bp, Homo sapien
cttatatttgatattcaggagtgaa

SEQ ID NO: 2744964 - DNA, 25 bp, Homo sapien
agtgaatagacagcacccccgacac

SEQ ID NO: 2744965 - DNA, 25 bp, Homo sapien
gcaggtatgacaagtacttcatggc

SEQ ID NO: 2744966 - DNA, 25 bp, Homo sapien
ggctgacccgtactccaaggagact

SEQ ID NO: 2744967 - DNA, 25 bp, Homo sapien
tatccctactatacggtgacacagg

SEQ ID NO: 2744968 - DNA, 25 bp, Homo sapien
ggagacttccgcactgagcaatgac

SEQ ID NO: 2744969 - DNA, 25 bp, Homo sapien
tgggaaatgagtctctgcgagcccc

SEQ ID NO: 2744970 - DNA, 25 bp, Homo sapien
tgagtatcgtactcctcggttttcc

SEQ ID NO: 2744971 - DNA, 25 bp, Homo sapien
ctcggttttcctctcagattcgctg

SEQ ID NO: 2744972 - DNA, 25 bp, Homo sapien
ctgagtatcgtactcctcggttttc

SEQ ID NO: 2744973 - DNA, 25 bp, Homo sapien
tctcagattcgctgtaagtgccaaa

SEQ ID NO: 2744974 - DNA, 25 bp, Homo sapien
ttttcagtgccaccgcttcagtgag

SEQ ID NO: 2744975 - DNA, 25 bp, Homo sapien
tcaatcaaggtccatccgtgggcac

SEQ ID NO: 2744976 - DNA, 25 bp, Homo sapien
ggcgtcacatatggctgcagagctg

SEQ ID NO: 2744977 - DNA, 25 bp, Homo sapien
tattaatagactcagggaggatctg

SEQ ID NO: 2744978 - DNA, 25 bp, Homo sapien
gcgcctctggacaaggtgccaaaac

SEQ ID NO: 2744979 - DNA, 25 bp, Homo sapien
aggtgccaaaacgaagcacacgtgc

SEQ ID NO: 2744980 - DNA, 25 bp, Homo sapien
gaagtgctgccgtctgcactgaaga

SEQ ID NO: 2744981 - DNA, 25 bp, Homo sapien
tgccaggactgtacggaccccagtc

SEQ ID NO: 2744982 - DNA, 25 bp, Homo sapien
gtggctgcgatcagaaaccagtgct

SEQ ID NO: 2744983 - DNA, 25 bp, Homo sapien
tggccatcttactctttgcacaggg

SEQ ID NO: 2744984 - DNA, 25 bp, Homo sapien
gaatcctcaggcgaagagagtggct

SEQ ID NO: 2744985 - DNA, 25 bp, Homo sapien
accacggaggctcccctgacagagg

SEQ ID NO: 2744986 - DNA, 25 bp, Homo sapien
ggcctctccaaaaaatagtcatctt

SEQ ID NO: 2744987 - DNA, 25 bp, Homo sapien
ctgaaattcgggcatcaggcctctc

SEQ ID NO: 2744988 - DNA, 25 bp, Homo sapien
aaaatagtcatcttcaatgccttct

SEQ ID NO: 2744989 - DNA, 25 bp, Homo sapien
gcatcaggcctctccaaaaaatagt

SEQ ID NO: 2744990 - DNA, 25 bp, Homo sapien
tttgggaccgctctgagagccgcca

SEQ ID NO: 2744991 - DNA, 25 bp, Homo sapien
ccctggagccagttttgggaccgct

SEQ ID NO: 2744992 - DNA, 25 bp, Homo sapien
atcacccacggagctcaggacgggt

SEQ ID NO: 2744993 - DNA, 25 bp, Homo sapien
cacctcatggctaaatgcttggaag

SEQ ID NO: 2744994 - DNA, 25 bp, Homo sapien
tctacaggatacattccatccagct

SEQ ID NO: 2744995 - DNA, 25 bp, Homo sapien
ctcctctacaggatacattccatcc

SEQ ID NO: 2744996 - DNA, 25 bp, Homo sapien
agcaccagcaggctcgtctgctcgt

SEQ ID NO: 2744997 - DNA, 25 bp, Homo sapien
tgaccacggtgctgaagcagcgcca

SEQ ID NO: 2744998 - DNA, 25 bp, Homo sapien
accacggtgctgaagcagcgccaga

SEQ ID NO: 2744999 - DNA, 25 bp, Homo sapien
acggtgctgaagcagcgccagagca

SEQ ID NO: 2745000 - DNA, 25 bp, Homo sapien
tggggacaggatggtcgggctggga

SEQ ID NO: 2745001 - DNA, 25 bp, Homo sapien
taggagacaacaacgcagaacacgg

SEQ ID NO: 2745002 - DNA, 25 bp, Homo sapien
caaatgagcatggaacgtgggcaga

SEQ ID NO: 2745003 - DNA, 25 bp, Homo sapien
caacttgttcgggtctgatactgga

SEQ ID NO: 2745004 - DNA, 25 bp, Homo sapien
gcttgggcgtcttttccatgcgaga

SEQ ID NO: 2745005 - DNA, 25 bp, Homo sapien
ggtggacatgccgatcatgctcttc

SEQ ID NO: 2745006 - DNA, 25 bp, Homo sapien
tggacatgccgatcatgctcttctt

SEQ ID NO: 2745007 - DNA, 25 bp, Homo sapien
ttggtggacatgccgatcatgctct

SEQ ID NO: 2745008 - DNA, 25 bp, Homo sapien
cttggtggacatgccgatcatgctc

SEQ ID NO: 2745009 - DNA, 25 bp, Homo sapien
gaaaggcccccaggcaattggaggc

SEQ ID NO: 2745010 - DNA, 25 bp, Homo sapien
tcaactgtgctaaaaacgcaagggc

SEQ ID NO: 2745011 - DNA, 25 bp, Homo sapien
tctcgggttgtgcccactcagggca

SEQ ID NO: 2745012 - DNA, 25 bp, Homo sapien
tctggattcccctggatcatgggcc

SEQ ID NO: 2745013 - DNA, 25 bp, Homo sapien
tactgtatacacaccggatgaggat

SEQ ID NO: 2745014 - DNA, 25 bp, Homo sapien
tatacacaccggatgaggataaggg

SEQ ID NO: 2745015 - DNA, 25 bp, Homo sapien
actactgtatacacaccggatgagg

SEQ ID NO: 2745016 - DNA, 25 bp, Homo sapien
gggactactgtatacacaccggatg

SEQ ID NO: 2745017 - DNA, 25 bp, Homo sapien
ctactgtatacacaccggatgagga

SEQ ID NO: 2745018 - DNA, 25 bp, Homo sapien
tatacacaccggatgaggataaggg

SEQ ID NO: 2745019 - DNA, 25 bp, Homo sapien
gtatacacaccggatgaggataagg

SEQ ID NO: 2745020 - DNA, 25 bp, Homo sapien
gggactactgtatacacaccggatg

SEQ ID NO: 2745021 - DNA, 25 bp, Homo sapien
tataagttggtatctacaaaaattc

SEQ ID NO: 2745022 - DNA, 25 bp, Homo sapien
cgacaaagaaggtcagcgccaggaa

SEQ ID NO: 2745023 - DNA, 25 bp, Homo sapien
tcagcgccaggaagtataagttggt

SEQ ID NO: 2745024 - DNA, 25 bp, Homo sapien
atggaacgctgcgacaaagaaggtc

SEQ ID NO: 2745025 - DNA, 25 bp, Homo sapien
cgaactgctgcagggagtacacggc

SEQ ID NO: 2745026 - DNA, 25 bp, Homo sapien
tgcatgtggatccagaagcgcagcc

SEQ ID NO: 2745027 - DNA, 25 bp, Homo sapien
gagaccttgtcgtaggacacggtga

SEQ ID NO: 2745028 - DNA, 25 bp, Homo sapien
gagtacacggcgtcctgcatgtgga

SEQ ID NO: 2745029 - DNA, 25 bp, Homo sapien
ggtaatgcacggttttccccagctg

SEQ ID NO: 2745030 - DNA, 25 bp, Homo sapien
gatgggcaggtaatgcacggttttc

SEQ ID NO: 2745031 - DNA, 25 bp, Homo sapien
atcaggtccttcacgcggttgctga

SEQ ID NO: 2745032 - DNA, 25 bp, Homo sapien
tgctgagctggtcgatgaacaggat

SEQ ID NO: 2745033 - DNA, 25 bp, Homo sapien
aaagttgtccgccatcacgttcagc

SEQ ID NO: 2745034 - DNA, 25 bp, Homo sapien
ccagtgggacactggctcatccagg

SEQ ID NO: 2745035 - DNA, 25 bp, Homo sapien
cagggaggacccgtcaaagacaaag

SEQ ID NO: 2745036 - DNA, 25 bp, Homo sapien
atccagggcactcgtcggcttcttc

SEQ ID NO: 2745037 - DNA, 25 bp, Homo sapien
gcacatggaaaaaccgcacccggac

SEQ ID NO: 2745038 - DNA, 25 bp, Homo sapien
cacatggaaaaaccgcgcccggaca

SEQ ID NO: 2745039 - DNA, 25 bp, Homo sapien
cagatggccacgcacatggaaaaac

SEQ ID NO: 2745040 - DNA, 25 bp, Homo sapien
gcacatggaaaaaccgcgcccggac

SEQ ID NO: 2745041 - DNA, 25 bp, Homo sapien
gaacagatggccacgcacatggaaa

SEQ ID NO: 2745042 - DNA, 25 bp, Homo sapien
cagatggccacgcacatggaaaaac

SEQ ID NO: 2745043 - DNA, 25 bp, Homo sapien
cacatggaaaaaccgcgcccggaca

SEQ ID NO: 2745044 - DNA, 25 bp, Homo sapien
gaacagatggccacgcacatggaaa

SEQ ID NO: 2745045 - DNA, 25 bp, Homo sapien
gcacatggaaaaaccgcgcccggac

SEQ ID NO: 2745046 - DNA, 25 bp, Homo sapien
acagctgccaattccgccagactct

SEQ ID NO: 2745047 - DNA, 25 bp, Homo sapien
atccttatctccacggaagccaggg

SEQ ID NO: 2745048 - DNA, 25 bp, Homo sapien
tgtggtcacggacttcaccaattcc

SEQ ID NO: 2745049 - DNA, 25 bp, Homo sapien
gggtgctgctttgcaacatgtggtc

SEQ ID NO: 2745050 - DNA, 25 bp, Homo sapien
attccccgagggactctgcatcgag

SEQ ID NO: 2745051 - DNA, 25 bp, Homo sapien
gcgatcacttcaactgtccctaatt

SEQ ID NO: 2745052 - DNA, 25 bp, Homo sapien
tcgagaatgccagcgatcacttcaa

SEQ ID NO: 2745053 - DNA, 25 bp, Homo sapien
cttgtctgcaaactcatggatatga

SEQ ID NO: 2745054 - DNA, 25 bp, Homo sapien
caggaccccagcgtgatggaggaag

SEQ ID NO: 2745055 - DNA, 25 bp, Homo sapien
tgcttcccgtcgtgccacggcagga

SEQ ID NO: 2745056 - DNA, 25 bp, Homo sapien
aagatgtaggcatacagcgtcccat

SEQ ID NO: 2745057 - DNA, 25 bp, Homo sapien
tcagactccccggtgagcaggttga

SEQ ID NO: 2745058 - DNA, 25 bp, Homo sapien
tctcagcacccaggtgggacctcgt

SEQ ID NO: 2745059 - DNA, 25 bp, Homo sapien
gacctcgtcgtggtgtacacgctca

SEQ ID NO: 2745060 - DNA, 25 bp, Homo sapien
gaccaggtcgatgttgttctcagca

SEQ ID NO: 2745061 - DNA, 25 bp, Homo sapien
ttccacattcaagaccaggtcgatg

SEQ ID NO: 2745062 - DNA, 25 bp, Homo sapien
ttggcgtcgccggagcacgggcggg

SEQ ID NO: 2745063 - DNA, 25 bp, Homo sapien
agcacgggcgggtgtagacgatgcc

SEQ ID NO: 2745064 - DNA, 25 bp, Homo sapien
ggcgggtgtagacgatgccgtacat

SEQ ID NO: 2745065 - DNA, 25 bp, Homo sapien
ctggatgcagttggcgtcgccggag

SEQ ID NO: 2745066 - DNA, 25 bp, Homo sapien
gtgcaccacgtagaccacgaacacg

SEQ ID NO: 2745067 - DNA, 25 bp, Homo sapien
caggtgtgcaccacgtagaccacga

SEQ ID NO: 2745068 - DNA, 25 bp, Homo sapien
cccaccaccaagctggtgaaggagc

SEQ ID NO: 2745069 - DNA, 25 bp, Homo sapien
cgcccaccaccaagctggtgaagga

SEQ ID NO: 2745070 - DNA, 25 bp, Homo sapien
tggcgccgcgggattcgccggcccc

SEQ ID NO: 2745071 - DNA, 25 bp, Homo sapien
gaacgaatgcgccgcgcgccgcaga

SEQ ID NO: 2745072 - DNA, 25 bp, Homo sapien
gcccgcctctcagccgcgagccccg

SEQ ID NO: 2745073 - DNA, 25 bp, Homo sapien
cgggctccgccgctcactggagagc

SEQ ID NO: 2745074 - DNA, 25 bp, Homo sapien
actggagcagctcccgtcctttggc

SEQ ID NO: 2745075 - DNA, 25 bp, Homo sapien
cgtgcagcacaatcgaaaaaccttg

SEQ ID NO: 2745076 - DNA, 25 bp, Homo sapien
ccgtcctttggccagttctctggaa

SEQ ID NO: 2745077 - DNA, 25 bp, Homo sapien
ctggaaggtcgtttccgtttctgtg

SEQ ID NO: 2745078 - DNA, 25 bp, Homo sapien
tcttgtccttactgggggccagtgt

SEQ ID NO: 2745079 - DNA, 25 bp, Homo sapien
tagggaggggcatcgtgctgctctt

SEQ ID NO: 2745080 - DNA, 25 bp, Homo sapien
tggctgtagggaggggcatcgtgct

SEQ ID NO: 2745081 - DNA, 25 bp, Homo sapien
gaggggcatcgtgctgctcttgtcc

SEQ ID NO: 2745082 - DNA, 25 bp, Homo sapien
tggtgccgacgaggagggccatggg

SEQ ID NO: 2745083 - DNA, 25 bp, Homo sapien
tgttgttgtcctgagactcccagcc

SEQ ID NO: 2745084 - DNA, 25 bp, Homo sapien
gagatgttgttgtcctgagactccc

SEQ ID NO: 2745085 - DNA, 25 bp, Homo sapien
tgcaagggcccggtggtgccgacga

SEQ ID NO: 2745086 - DNA, 25 bp, Homo sapien
tgcagcagcgcactcacatggcggt

SEQ ID NO: 2745087 - DNA, 25 bp, Homo sapien
tttccggagatctaacaatagcgca

SEQ ID NO: 2745088 - DNA, 25 bp, Homo sapien
ggtggcactgggctctgttcagaac

SEQ ID NO: 2745089 - DNA, 25 bp, Homo sapien
caatagcgcacatcaaagtgggtgg

SEQ ID NO: 2745090 - DNA, 25 bp, Homo sapien
gagtccatgtcacgtgctggcacgg

SEQ ID NO: 2745091 - DNA, 25 bp, Homo sapien
tgctggcacggcaatcgccatcctt

SEQ ID NO: 2745092 - DNA, 25 bp, Homo sapien
ctttcacaacaggtcacgaagccga

SEQ ID NO: 2745093 - DNA, 25 bp, Homo sapien
tgtgtgcgcaggcatccgagtccat

SEQ ID NO: 2745094 - DNA, 25 bp, Homo sapien
cctgggaggaagacacatttgctag

SEQ ID NO: 2745095 - DNA, 25 bp, Homo sapien
tcatcggtttggagagacgagctct

SEQ ID NO: 2745096 - DNA, 25 bp, Homo sapien
gcttgacacggttgagaatccctga

SEQ ID NO: 2745097 - DNA, 25 bp, Homo sapien
gaaggacacttagtccccaactgga

SEQ ID NO: 2745098 - DNA, 25 bp, Homo sapien
ctgagatggccagacacgcagcaag

SEQ ID NO: 2745099 - DNA, 25 bp, Homo sapien
ttccacgtctgcagaatgccgtcct

SEQ ID NO: 2745100 - DNA, 25 bp, Homo sapien
tcctcgccatcgaaaggaagaaggt

SEQ ID NO: 2745101 - DNA, 25 bp, Homo sapien
ccgtcctcgccatcgaaaggaagaa

SEQ ID NO: 2745102 - DNA, 25 bp, Homo sapien
ggcttccgagggtgtaagtcttcca

SEQ ID NO: 2745103 - DNA, 25 bp, Homo sapien
aggagttgaagtgcaggccccctgt

SEQ ID NO: 2745104 - DNA, 25 bp, Homo sapien
caggagttgaagtgcaggccccctg

SEQ ID NO: 2745105 - DNA, 25 bp, Homo sapien
tcaggagttgaagtgcaggccccct

SEQ ID NO: 2745106 - DNA, 25 bp, Homo sapien
tgggcaacactttcgtggtctttat

SEQ ID NO: 2745107 - DNA, 25 bp, Homo sapien
ggacgtctggagctatcaccatggg

SEQ ID NO: 2745108 - DNA, 25 bp, Homo sapien
tgaacaccgtctccggacgtctgga

SEQ ID NO: 2745109 - DNA, 25 bp, Homo sapien
agcagcgctgaacaccgtctccgga

SEQ ID NO: 2745110 - DNA, 25 bp, Homo sapien
cagaccctcgcggtacatgttacgg

SEQ ID NO: 2745111 - DNA, 25 bp, Homo sapien
agtgtcacagctcctaaaaatgcag

SEQ ID NO: 2745112 - DNA, 25 bp, Homo sapien
gacctttaccgtgagcgttgcagct

SEQ ID NO: 2745113 - DNA, 25 bp, Homo sapien
aaaaatgcagcacgtccagagttct

SEQ ID NO: 2745114 - DNA, 25 bp, Homo sapien
gggaagagggcttgcttccgcagag

SEQ ID NO: 2745115 - DNA, 25 bp, Homo sapien
gtactgcagccaccgtggtcccggg

SEQ ID NO: 2745116 - DNA, 25 bp, Homo sapien
ccgggaagagggcttgcttccgcag

SEQ ID NO: 2745117 - DNA, 25 bp, Homo sapien
cagccaccgtggtcccgggaagagg

SEQ ID NO: 2745118 - DNA, 25 bp, Homo sapien
gtggttctcggaggttcccatcctc

SEQ ID NO: 2745119 - DNA, 25 bp, Homo sapien
gtcatggctggtgccgcggttctca

SEQ ID NO: 2745120 - DNA, 25 bp, Homo sapien
aggtctcacagaaccgcccttggcc

SEQ ID NO: 2745121 - DNA, 25 bp, Homo sapien
catggccctggttcacttaagtgac

SEQ ID NO: 2745122 - DNA, 25 bp, Homo sapien
ttagggcggcacctgtagcaggcgg

SEQ ID NO: 2745123 - DNA, 25 bp, Homo sapien
tgtgagctgttagggcggcacctgt

SEQ ID NO: 2745124 - DNA, 25 bp, Homo sapien
agctgttagggcggcacctgtagca

SEQ ID NO: 2745125 - DNA, 25 bp, Homo sapien
ggtgtgagctgttagggcggcacct

SEQ ID NO: 2745126 - DNA, 25 bp, Homo sapien
ccagctgaaaggtgcgagcgtcctt

SEQ ID NO: 2745127 - DNA, 25 bp, Homo sapien
cagtagcagtgtccccatgtgctgc

SEQ ID NO: 2745128 - DNA, 25 bp, Homo sapien
cacacgcagccacgtgctacgatgc

SEQ ID NO: 2745129 - DNA, 25 bp, Homo sapien
gccacgtgctacgatgcagcagtag

SEQ ID NO: 2745130 - DNA, 25 bp, Homo sapien
tgcaatatcagcaagcaggctcgcg

SEQ ID NO: 2745131 - DNA, 25 bp, Homo sapien
aacacctgggttgctacacggagcc

SEQ ID NO: 2745132 - DNA, 25 bp, Homo sapien
ggctcgcggatactgcattcttgaa

SEQ ID NO: 2745133 - DNA, 25 bp, Homo sapien
tagggacccacacgatgctgaatag

SEQ ID NO: 2745134 - DNA, 25 bp, Homo sapien
ctggggtagtacacgctccagtggg

SEQ ID NO: 2745135 - DNA, 25 bp, Homo sapien
gggccctgcatgcgtccggtccggg

SEQ ID NO: 2745136 - DNA, 25 bp, Homo sapien
ataggacacgctcctctcaggccgt

SEQ ID NO: 2745137 - DNA, 25 bp, Homo sapien
aggtcacggctcaaggccaggcaga

SEQ ID NO: 2745138 - DNA, 25 bp, Homo sapien
ggagccacgcatcgggaaaggactt

SEQ ID NO: 2745139 - DNA, 25 bp, Homo sapien
tcagcaggtgcgtctacaaggatcg

SEQ ID NO: 2745140 - DNA, 25 bp, Homo sapien
gcaatgtgtcaactgaacgctcaat

SEQ ID NO: 2745141 - DNA, 25 bp, Homo sapien
aaggatcgtgatccccgcctgagaa

SEQ ID NO: 2745142 - DNA, 25 bp, Homo sapien
ttacagcaacacaagacacggcgag

SEQ ID NO: 2745143 - DNA, 25 bp, Homo sapien
ctcgctgcacagatctacgtcgtta

SEQ ID NO: 2745144 - DNA, 25 bp, Homo sapien
gccctcctttctctcgaaacttaga

SEQ ID NO: 2745145 - DNA, 25 bp, Homo sapien
gcgctcccggcacggaaaggtgtaa

SEQ ID NO: 2745146 - DNA, 25 bp, Homo sapien
aatgcggagcgtccatagctgagct

SEQ ID NO: 2745147 - DNA, 25 bp, Homo sapien
cacgcagcttccagagatgaagtag

SEQ ID NO: 2745148 - DNA, 25 bp, Homo sapien
agctgtggtttgttcacgtgacgga

SEQ ID NO: 2745149 - DNA, 25 bp, Homo sapien
tgacggacggtcagggaccagtcac

SEQ ID NO: 2745150 - DNA, 25 bp, Homo sapien
tgaactggcgcacctcccctctgtc

SEQ ID NO: 2745151 - DNA, 25 bp, Homo sapien
accagctcacggtccttctcgggtg

SEQ ID NO: 2745152 - DNA, 25 bp, Homo sapien
ttctcgggtgcaatggcgtaggcca

SEQ ID NO: 2745153 - DNA, 25 bp, Homo sapien
cgtgaactggcgcacctcccctctg

SEQ ID NO: 2745154 - DNA, 25 bp, Homo sapien
tgaggttttacttggcttacgttca

SEQ ID NO: 2745155 - DNA, 25 bp, Homo sapien
aggtccgccgggctgtaggcatcct

SEQ ID NO: 2745156 - DNA, 25 bp, Homo sapien
ttggcttacgttcagagtttggcca

SEQ ID NO: 2745157 - DNA, 25 bp, Homo sapien
tttggccatgcgaggggtaagggcg

SEQ ID NO: 2745158 - DNA, 25 bp, Homo sapien
gaaggtcacaatgctgaccacgacc

SEQ ID NO: 2745159 - DNA, 25 bp, Homo sapien
ggctgcagaacttgtaggccgcata

SEQ ID NO: 2745160 - DNA, 25 bp, Homo sapien
tgtaggccgcatagatgggcaccat

SEQ ID NO: 2745161 - DNA, 25 bp, Homo sapien
ccatggaggatgtggcgatgaccca

SEQ ID NO: 2745162 - DNA, 25 bp, Homo sapien
tctgctggatgtcgtcgctgaactg

SEQ ID NO: 2745163 - DNA, 25 bp, Homo sapien
gccgctgcccggtcatctgctggat

SEQ ID NO: 2745164 - DNA, 25 bp, Homo sapien
gctggatgtcgtcgctgaactgccc

SEQ ID NO: 2745165 - DNA, 25 bp, Homo sapien
cagcacagccgccagtacaggctgg

SEQ ID NO: 2745166 - DNA, 25 bp, Homo sapien
tccaaagaggatggacgtgccggct

SEQ ID NO: 2745167 - DNA, 25 bp, Homo sapien
gacgtgccggctgcaaaatggtcca

SEQ ID NO: 2745168 - DNA, 25 bp, Homo sapien
gaaccaggccactccgatggcttcg

SEQ ID NO: 2745169 - DNA, 25 bp, Homo sapien
caggagcgtgaagacgtagatgcca

SEQ ID NO: 2745170 - DNA, 25 bp, Homo sapien
tcactcactgcaaaactctggtttg

SEQ ID NO: 2745171 - DNA, 25 bp, Homo sapien
gggattcactgtgcacacaaattgt

SEQ ID NO: 2745172 - DNA, 25 bp, Homo sapien
gagcctgtggacctacagaagggct

SEQ ID NO: 2745173 - DNA, 25 bp, Homo sapien
tgcacacaaattgtttcactcactg

SEQ ID NO: 2745174 - DNA, 25 bp, Homo sapien
gagcccggtgatcactgactccata

SEQ ID NO: 2745175 - DNA, 25 bp, Homo sapien
tggaactcatcgatgagcccggtga

SEQ ID NO: 2745176 - DNA, 25 bp, Homo sapien
tcgccaggacgatgaagagcgtgaa

SEQ ID NO: 2745177 - DNA, 25 bp, Homo sapien
agcgtgaagagctcacggtgtctgt

SEQ ID NO: 2745178 - DNA, 25 bp, Homo sapien
gagggaccactgtatccacggtagg

SEQ ID NO: 2745179 - DNA, 25 bp, Homo sapien
cacatggccgtccagggtgcaggat

SEQ ID NO: 2745180 - DNA, 25 bp, Homo sapien
acagctgttggcgagggcttctatg

SEQ ID NO: 2745181 - DNA, 25 bp, Homo sapien
cttctatggcggcacgaccgcagga

SEQ ID NO: 2745182 - DNA, 25 bp, Homo sapien
tcccaaataatcacggggctcgccc

SEQ ID NO: 2745183 - DNA, 25 bp, Homo sapien
ggtctgggggccgtacgtgagccca

SEQ ID NO: 2745184 - DNA, 25 bp, Homo sapien
cagccccgagaaaggtctcccaaat

SEQ ID NO: 2745185 - DNA, 25 bp, Homo sapien
acggggctcgcccaagtcaaggaca

SEQ ID NO: 2745186 - DNA, 25 bp, Homo sapien
cgctgtcgatacccagggtgagcag

SEQ ID NO: 2745187 - DNA, 25 bp, Homo sapien
ggcgctgtcgatacccagggtgagc

SEQ ID NO: 2745188 - DNA, 25 bp, Homo sapien
gcgctgtcgatacccagggtgagca

SEQ ID NO: 2745189 - DNA, 25 bp, Homo sapien
gctgtcgatacccagggtgagcagc

SEQ ID NO: 2745190 - DNA, 25 bp, Homo sapien
atggcttccgggtagatgatgaaga

SEQ ID NO: 2745191 - DNA, 25 bp, Homo sapien
ggagcgtggcgatggcttccgggta

SEQ ID NO: 2745192 - DNA, 25 bp, Homo sapien
tggcgatggcttccgggtagatgat

SEQ ID NO: 2745193 - DNA, 25 bp, Homo sapien
cagagggagcgtggcgatggcttcc

SEQ ID NO: 2745194 - DNA, 25 bp, Homo sapien
tgaagtcgctcagggcccatgcgtc

SEQ ID NO: 2745195 - DNA, 25 bp, Homo sapien
tcacaaggaaaaaggctttgctgag

SEQ ID NO: 2745196 - DNA, 25 bp, Homo sapien
ctcggcgctggtgctacacggagca

SEQ ID NO: 2745197 - DNA, 25 bp, Homo sapien
ctttgctgagagctcggcgctggtg

SEQ ID NO: 2745198 - DNA, 25 bp, Homo sapien
gtccccgatgggcacactgtgcttc

SEQ ID NO: 2745199 - DNA, 25 bp, Homo sapien
tctgtgccatgtaccccaggaagga

SEQ ID NO: 2745200 - DNA, 25 bp, Homo sapien
gtgcttctgtgccatgtaccccagg

SEQ ID NO: 2745201 - DNA, 25 bp, Homo sapien
cggaggagaagctcgtcagggagtt

SEQ ID NO: 2745202 - DNA, 25 bp, Homo sapien
gctggagaaggcgatcagcaccccg

SEQ ID NO: 2745203 - DNA, 25 bp, Homo sapien
cctgggtggccgcgtcaatccaaac

SEQ ID NO: 2745204 - DNA, 25 bp, Homo sapien
gagaaggcgatcagcaccccgaacc

SEQ ID NO: 2745205 - DNA, 25 bp, Homo sapien
tagctggagaaggcgatcagcaccc

SEQ ID NO: 2745206 - DNA, 25 bp, Homo sapien
gcatggtggctgtgatccataccac

SEQ ID NO: 2745207 - DNA, 25 bp, Homo sapien
aacgctcaggtatgctctgatgccg

SEQ ID NO: 2745208 - DNA, 25 bp, Homo sapien
cagtgaggaccacgtatggcatggt

SEQ ID NO: 2745209 - DNA, 25 bp, Homo sapien
ctcgcagagccggtagaagtcaacg

SEQ ID NO: 2745210 - DNA, 25 bp, Homo sapien
ctgaggtcttcacgcccttccagag

SEQ ID NO: 2745211 - DNA, 25 bp, Homo sapien
agaggctgaagtagagcagcacgat

SEQ ID NO: 2745212 - DNA, 25 bp, Homo sapien
aggccccaggtcgtcgatgccatgg

SEQ ID NO: 2745213 - DNA, 25 bp, Homo sapien
aagtagagcagcacgatgaccagca

SEQ ID NO: 2745214 - DNA, 25 bp, Homo sapien
ctctggtggaggtgcagcacgccac

SEQ ID NO: 2745215 - DNA, 25 bp, Homo sapien
tctggtggaggtgcagcacgccacg

SEQ ID NO: 2745216 - DNA, 25 bp, Homo sapien
ctggtggaggtgcagcacgccacgt

SEQ ID NO: 2745217 - DNA, 25 bp, Homo sapien
aaatgacggctgagtcgaagagtcc

SEQ ID NO: 2745218 - DNA, 25 bp, Homo sapien
taagatgcgtctaaccaggcaagcg

SEQ ID NO: 2745219 - DNA, 25 bp, Homo sapien
gggagaatcgcgcaaacgtcctctc

SEQ ID NO: 2745220 - DNA, 25 bp, Homo sapien
ctggctgacgggaaacactggatct

SEQ ID NO: 2745221 - DNA, 25 bp, Homo sapien
cagtgacacccagaaagttatcttt

SEQ ID NO: 2745222 - DNA, 25 bp, Homo sapien
tcttgcgcagtgacacccagaaagt

SEQ ID NO: 2745223 - DNA, 25 bp, Homo sapien
agccagagacttcttgcgcagtgac

SEQ ID NO: 2745224 - DNA, 25 bp, Homo sapien
agacttcttgcgcagtgacacccag

SEQ ID NO: 2745225 - DNA, 25 bp, Homo sapien
aagtactcggcagcaggtgtggtcc

SEQ ID NO: 2745226 - DNA, 25 bp, Homo sapien
caaaagtgtcgttgaggcccgagct

SEQ ID NO: 2745227 - DNA, 25 bp, Homo sapien
tgagatgaggatgaccgtgaagccc

SEQ ID NO: 2745228 - DNA, 25 bp, Homo sapien
tagaagaagccgacatacagtgaga

SEQ ID NO: 2745229 - DNA, 25 bp, Homo sapien
caccatcagcaacgtgtcccttcca

SEQ ID NO: 2745230 - DNA, 25 bp, Homo sapien
tcagcaacgtgtcccttccacctcc

SEQ ID NO: 2745231 - DNA, 25 bp, Homo sapien
catcagcaacgtgtcccttccacct

SEQ ID NO: 2745232 - DNA, 25 bp, Homo sapien
gccaccatcagcaacgtgtcccttc

SEQ ID NO: 2745233 - DNA, 25 bp, Homo sapien
ttaggagcagggagcagctcgcagg

SEQ ID NO: 2745234 - DNA, 25 bp, Homo sapien
taggagcagggagcagctcgcaggt

SEQ ID NO: 2745235 - DNA, 25 bp, Homo sapien
taaactggcatcctgcgcttgacag

SEQ ID NO: 2745236 - DNA, 25 bp, Homo sapien
taggcagaacaaacgggacgctggc

SEQ ID NO: 2745237 - DNA, 25 bp, Homo sapien
gaaatgagctcttatctgcggacct

SEQ ID NO: 2745238 - DNA, 25 bp, Homo sapien
ccccggctgcgcattgtggagaaca

SEQ ID NO: 2745239 - DNA, 25 bp, Homo sapien
ttctatgagtatccagaggctgacc

SEQ ID NO: 2745240 - DNA, 25 bp, Homo sapien
gctgggctcggctgtcttctaaaca

SEQ ID NO: 2745241 - DNA, 25 bp, Homo sapien
catttccacggctgcgagactgact

SEQ ID NO: 2745242 - DNA, 25 bp, Homo sapien
aatgagtctcgtgcctgggaagaac

SEQ ID NO: 2745243 - DNA, 25 bp, Homo sapien
catgatgcggctggcttgctttgaa

SEQ ID NO: 2745244 - DNA, 25 bp, Homo sapien
acccaagttcaagtggcgtgtgcca

SEQ ID NO: 2745245 - DNA, 25 bp, Homo sapien
gcagatctttaaggtgggacccaag

SEQ ID NO: 2745246 - DNA, 25 bp, Homo sapien
gcctgtgtcttagcaaagcagggct

SEQ ID NO: 2745247 - DNA, 25 bp, Homo sapien
tgaactggccgagggccagctccat

SEQ ID NO: 2745248 - DNA, 25 bp, Homo sapien
atcttccagacaccagcggcccctt

SEQ ID NO: 2745249 - DNA, 25 bp, Homo sapien
cccttccctgttgaactggccgagg

SEQ ID NO: 2745250 - DNA, 25 bp, Homo sapien
aaagtggcatcccagcaatgaccat

SEQ ID NO: 2745251 - DNA, 25 bp, Homo sapien
cacggcattgggctccttagccggg

SEQ ID NO: 2745252 - DNA, 25 bp, Homo sapien
cagcaaagccaatgacggacaggag

SEQ ID NO: 2745253 - DNA, 25 bp, Homo sapien
tccttgacaaggatgagctccacct

SEQ ID NO: 2745254 - DNA, 25 bp, Homo sapien
ggaagacatgagtcccacggagcat

SEQ ID NO: 2745255 - DNA, 25 bp, Homo sapien
ggcacactgggagttgaggaattct

SEQ ID NO: 2745256 - DNA, 25 bp, Homo sapien
gggcacactgggagttgaggaattc

SEQ ID NO: 2745257 - DNA, 25 bp, Homo sapien
gaggaattctgtgcttcttccctct

SEQ ID NO: 2745258 - DNA, 25 bp, Homo sapien
gaattctgtgcttcttccctcttgg

SEQ ID NO: 2745259 - DNA, 25 bp, Homo sapien
cgagtcctggcgccgagagcgttcc

SEQ ID NO: 2745260 - DNA, 25 bp, Homo sapien
cctgggctttgcacgcgagtcctgg

SEQ ID NO: 2745261 - DNA, 25 bp, Homo sapien
ggcctgggctttgcacgcgagtcct

SEQ ID NO: 2745262 - DNA, 25 bp, Homo sapien
gcgccgagagcgttccgcgaagcct

SEQ ID NO: 2745263 - DNA, 25 bp, Homo sapien
tggaagacagcgtggatgctccccc

SEQ ID NO: 2745264 - DNA, 25 bp, Homo sapien
tcagtgctggatgttgcgccgtgtc

SEQ ID NO: 2745265 - DNA, 25 bp, Homo sapien
tctcgcctgatttggaagacagcgt

SEQ ID NO: 2745266 - DNA, 25 bp, Homo sapien
ggatgctccccccatgagtgctgta

SEQ ID NO: 2745267 - DNA, 25 bp, Homo sapien
gaagctttaggtgtgctgcccatgg

SEQ ID NO: 2745268 - DNA, 25 bp, Homo sapien
gcttactgtggccaatgaaccagga

SEQ ID NO: 2745269 - DNA, 25 bp, Homo sapien
gacatagtgcctcgaactgtggacc

SEQ ID NO: 2745270 - DNA, 25 bp, Homo sapien
caacatgtcggaagcagggtcccat

SEQ ID NO: 2745271 - DNA, 25 bp, Homo sapien
gttaggatcagcatacggcagcagc

SEQ ID NO: 2745272 - DNA, 25 bp, Homo sapien
cagccagcttctggttaggatcagc

SEQ ID NO: 2745273 - DNA, 25 bp, Homo sapien
tgctggtccttcactaccccgtttg

SEQ ID NO: 2745274 - DNA, 25 bp, Homo sapien
acttctcacattcccgagctctgct

SEQ ID NO: 2745275 - DNA, 25 bp, Homo sapien
tctcctggctccaatgctgagtgga

SEQ ID NO: 2745276 - DNA, 25 bp, Homo sapien
ttcctgagggtcccaccttcatttc

SEQ ID NO: 2745277 - DNA, 25 bp, Homo sapien
cctgagggtcccaccttcatttctc

SEQ ID NO: 2745278 - DNA, 25 bp, Homo sapien
tcctgagggtcccaccttcatttct

SEQ ID NO: 2745279 - DNA, 25 bp, Homo sapien
aaataccagaacactccggagcgtc

SEQ ID NO: 2745280 - DNA, 25 bp, Homo sapien
caaacatgctagaaccacaccaaga

SEQ ID NO: 2745281 - DNA, 25 bp, Homo sapien
gccaccaagacagctttttctacag

SEQ ID NO: 2745282 - DNA, 25 bp, Homo sapien
tgtaagatgtctgctactgtccgca

SEQ ID NO: 2745283 - DNA, 25 bp, Homo sapien
tattccattgaaaatcccaagttcc

SEQ ID NO: 2745284 - DNA, 25 bp, Homo sapien
tccattgaaaatcccaagttccttc

SEQ ID NO: 2745285 - DNA, 25 bp, Homo sapien
tgaaaatcccaagttccttcatggc

SEQ ID NO: 2745286 - DNA, 25 bp, Homo sapien
cattgaaaatcccaagttccttcat

SEQ ID NO: 2745287 - DNA, 25 bp, Homo sapien
gggcccatgccccacctgcccacgg

SEQ ID NO: 2745288 - DNA, 25 bp, Homo sapien
catgccccacctgcccacgggtctg

SEQ ID NO: 2745289 - DNA, 25 bp, Homo sapien
gccagggcccatgccccacctgccc

SEQ ID NO: 2745290 - DNA, 25 bp, Homo sapien
acctgcccacgggtctggcccccag

SEQ ID NO: 2745291 - DNA, 25 bp, Homo sapien
gaatatccgccaactctaagtcgcc

SEQ ID NO: 2745292 - DNA, 25 bp, Homo sapien
cgctatgtacattcacagttccgaa

SEQ ID NO: 2745293 - DNA, 25 bp, Homo sapien
taagtcgccacgaagagaaaagaga

SEQ ID NO: 2745294 - DNA, 25 bp, Homo sapien
aaacccttcatctgcagacctgcgg

SEQ ID NO: 2745295 - DNA, 25 bp, Homo sapien
tgtgacagagactcgaaaccagggc

SEQ ID NO: 2745296 - DNA, 25 bp, Homo sapien
tctgtcagtggagaaacgcgtatca

SEQ ID NO: 2745297 - DNA, 25 bp, Homo sapien
tcagtgactgttagctaccaaaggc

SEQ ID NO: 2745298 - DNA, 25 bp, Homo sapien
tgaaaaatcaggtgacggctcggct

SEQ ID NO: 2745299 - DNA, 25 bp, Homo sapien
taatccagcttcttgcgaacaggct

SEQ ID NO: 2745300 - DNA, 25 bp, Homo sapien
caggtattcctctgcgaaggcaggg

SEQ ID NO: 2745301 - DNA, 25 bp, Homo sapien
tgaggtctctgcacagctttcgaaa

SEQ ID NO: 2745302 - DNA, 25 bp, Homo sapien
ttcgaaatgtgtctgatccgggtac

SEQ ID NO: 2745303 - DNA, 25 bp, Homo sapien
tctggacagtgatctggcgctctga

SEQ ID NO: 2745304 - DNA, 25 bp, Homo sapien
gggacttagcacttctgaggcactg

SEQ ID NO: 2745305 - DNA, 25 bp, Homo sapien
aaattgcagctggtcggtgcccact

SEQ ID NO: 2745306 - DNA, 25 bp, Homo sapien
aaaatggaaacaagcgcacgcatgc

SEQ ID NO: 2745307 - DNA, 25 bp, Homo sapien
ggtcggtcacggtgagctctgccac

SEQ ID NO: 2745308 - DNA, 25 bp, Homo sapien
ggacaggtcaccttcgccgacgctg

SEQ ID NO: 2745309 - DNA, 25 bp, Homo sapien
ttctcctcttggtcaatggctcgga

SEQ ID NO: 2745310 - DNA, 25 bp, Homo sapien
ccccagggccgtcttgaggatgcag

SEQ ID NO: 2745311 - DNA, 25 bp, Homo sapien
ggctacagcagacgtgttcacaagc

SEQ ID NO: 2745312 - DNA, 25 bp, Homo sapien
tgggaggccgcggaagggtcctgcc

SEQ ID NO: 2745313 - DNA, 25 bp, Homo sapien
tccgtgagtgcaggctacagcagac

SEQ ID NO: 2745314 - DNA, 25 bp, Homo sapien
gcgcggcgcaagcttgggctgcaga

SEQ ID NO: 2745315 - DNA, 25 bp, Homo sapien
cgggccggccggcagacgacagaca

SEQ ID NO: 2745316 - DNA, 25 bp, Homo sapien
tcgcaggtccacctcgccgctgccg

SEQ ID NO: 2745317 - DNA, 25 bp, Homo sapien
cagacagggcaaccacacactctcg

SEQ ID NO: 2745318 - DNA, 25 bp, Homo sapien
ccggccggcagacgacagacagggc

SEQ ID NO: 2745319 - DNA, 25 bp, Homo sapien
gccacctggtgtgaccgtggatgcc

SEQ ID NO: 2745320 - DNA, 25 bp, Homo sapien
ggtgtgaccgtggatgcctcatcaa

SEQ ID NO: 2745321 - DNA, 25 bp, Homo sapien
atgcctcatcaattacgacgaggac

SEQ ID NO: 2745322 - DNA, 25 bp, Homo sapien
cctggtgtgaccgtggatgcctcat

SEQ ID NO: 2745323 - DNA, 25 bp, Homo sapien
tccagcaagtcagaaacggggactt

SEQ ID NO: 2745324 - DNA, 25 bp, Homo sapien
ggacttccagggaggcggcaaactc

SEQ ID NO: 2745325 - DNA, 25 bp, Homo sapien
gcaaactccgcaatacctatcttct

SEQ ID NO: 2745326 - DNA, 25 bp, Homo sapien
cagtgaaaacatgtcttccagcaag

SEQ ID NO: 2745327 - DNA, 25 bp, Homo sapien
cagctggcagtcctcgaacgtgtag

SEQ ID NO: 2745328 - DNA, 25 bp, Homo sapien
ccgcacgagcctggcaaattctaaa

SEQ ID NO: 2745329 - DNA, 25 bp, Homo sapien
tgtagtcagtcacggagacacccaa

SEQ ID NO: 2745330 - DNA, 25 bp, Homo sapien
aggccccgcacgagcctggcaaatt

SEQ ID NO: 2745331 - DNA, 25 bp, Homo sapien
gggcagtcacacattcatcgatcag

SEQ ID NO: 2745332 - DNA, 25 bp, Homo sapien
atgtgacccagagacgccaaagtga

SEQ ID NO: 2745333 - DNA, 25 bp, Homo sapien
taccaacatgtgacgtggagacacg

SEQ ID NO: 2745334 - DNA, 25 bp, Homo sapien
tgctctgaaacgatgacggcagcca

SEQ ID NO: 2745335 - DNA, 25 bp, Homo sapien
catgactcgccgcacgttgctggca

SEQ ID NO: 2745336 - DNA, 25 bp, Homo sapien
atacagcgcggggttcctcttctcc

SEQ ID NO: 2745337 - DNA, 25 bp, Homo sapien
tcggccatgactcgccgcacgttgc

SEQ ID NO: 2745338 - DNA, 25 bp, Homo sapien
ccgcacgttgctggcatacagcgcg

SEQ ID NO: 2745339 - DNA, 25 bp, Homo sapien
tgaaactgacacagcgtgagccaca

SEQ ID NO: 2745340 - DNA, 25 bp, Homo sapien
tcacctgaaagcaccagcggaccca

SEQ ID NO: 2745341 - DNA, 25 bp, Homo sapien
gacgtcagctcagacgtcagcaccc

SEQ ID NO: 2745342 - DNA, 25 bp, Homo sapien
acatcctcccaaacgcctggaatgg

SEQ ID NO: 2745343 - DNA, 25 bp, Homo sapien
gggttgttcattgttgcataactga

SEQ ID NO: 2745344 - DNA, 25 bp, Homo sapien
aggacaaagaggacgacacggcgtt

SEQ ID NO: 2745345 - DNA, 25 bp, Homo sapien
aacaggacaaagaggacgacacggc

SEQ ID NO: 2745346 - DNA, 25 bp, Homo sapien
acaaagaggacgacacggcgttcaa

SEQ ID NO: 2745347 - DNA, 25 bp, Homo sapien
aagaggacgacacggcgttcaactt

SEQ ID NO: 2745348 - DNA, 25 bp, Homo sapien
ggtccttgccacgtccatgtgatgg

SEQ ID NO: 2745349 - DNA, 25 bp, Homo sapien
aggtccttgccacgtccatgtgatg

SEQ ID NO: 2745350 - DNA, 25 bp, Homo sapien
cttgccacgtccatgtgatggtgtc

SEQ ID NO: 2745351 - DNA, 25 bp, Homo sapien
tccttgccacgtccatgtgatggtg

SEQ ID NO: 2745352 - DNA, 25 bp, Homo sapien
ttatttggatatcgtaaaaccacag

SEQ ID NO: 2745353 - DNA, 25 bp, Homo sapien
tttatttggatatcgtaaaaccaca

SEQ ID NO: 2745354 - DNA, 25 bp, Homo sapien
acgggcgctccagggatgaatgcac

SEQ ID NO: 2745355 - DNA, 25 bp, Homo sapien
aaccacaggctggacgggcgctcca

SEQ ID NO: 2745356 - DNA, 25 bp, Homo sapien
aacagcggtgttgcccatggcagcc

SEQ ID NO: 2745357 - DNA, 25 bp, Homo sapien
catggcagcccacgcaggacagcgt

SEQ ID NO: 2745358 - DNA, 25 bp, Homo sapien
agcccacgcaggacagcgtctgctg

SEQ ID NO: 2745359 - DNA, 25 bp, Homo sapien
ctgccgagaaaggaacagcggtgtt

SEQ ID NO: 2745360 - DNA, 25 bp, Homo sapien
ctcgggctgtcagtgccatcgctgg

SEQ ID NO: 2745361 - DNA, 25 bp, Homo sapien
gctgggcccacgcagcatcctaggg

SEQ ID NO: 2745362 - DNA, 25 bp, Homo sapien
agccacatttggtaggcccgcctct

SEQ ID NO: 2745363 - DNA, 25 bp, Homo sapien
gtaggcccgcctctgcatcctcggg

SEQ ID NO: 2745364 - DNA, 25 bp, Homo sapien
aggtacccagtcagccgatcctgct

SEQ ID NO: 2745365 - DNA, 25 bp, Homo sapien
ttccgaacacgtgactcgaggcagc

SEQ ID NO: 2745366 - DNA, 25 bp, Homo sapien
cagctaagacgcatgagggcctgag

SEQ ID NO: 2745367 - DNA, 25 bp, Homo sapien
ccaaacctcactaagaagtacccag

SEQ ID NO: 2745368 - DNA, 25 bp, Homo sapien
caggtgacacgcagaactcatggct

SEQ ID NO: 2745369 - DNA, 25 bp, Homo sapien
agtcccctcagtttcgtgatatgcg

SEQ ID NO: 2745370 - DNA, 25 bp, Homo sapien
gcacacagtgagctcctactgggca

SEQ ID NO: 2745371 - DNA, 25 bp, Homo sapien
ctcctcacgtctacacaagggccgc

SEQ ID NO: 2745372 - DNA, 25 bp, Homo sapien
tgatatgcgttgagaggtgctcaca

SEQ ID NO: 2745373 - DNA, 25 bp, Homo sapien
tctctaggagaaaaataaacattta

SEQ ID NO: 2745374 - DNA, 25 bp, Homo sapien
catctctttaatattttccttttct

SEQ ID NO: 2745375 - DNA, 25 bp, Homo sapien
taatattttccttttctctaggaga

SEQ ID NO: 2745376 - DNA, 25 bp, Homo sapien
tttgaaggtaattaggcaggtcctg

SEQ ID NO: 2745377 - DNA, 25 bp, Homo sapien
tgaaggtaattaggcaggtcctgtt

SEQ ID NO: 2745378 - DNA, 25 bp, Homo sapien
caggtttgaaggtaattaggcaggt

SEQ ID NO: 2745379 - DNA, 25 bp, Homo sapien
ttgaaggtaattaggcaggtcctgt

SEQ ID NO: 2745380 - DNA, 25 bp, Homo sapien
tggtctgaccgggacacgaacacag

SEQ ID NO: 2745381 - DNA, 25 bp, Homo sapien
ggactgcgcccgtctcttgatttct

SEQ ID NO: 2745382 - DNA, 25 bp, Homo sapien
tgttttcctgcgagaatcctggtct

SEQ ID NO: 2745383 - DNA, 25 bp, Homo sapien
tgtggccactttccgttggactgcg

SEQ ID NO: 2745384 - DNA, 25 bp, Homo sapien
agcctcagtgccacaagtaacaaac

SEQ ID NO: 2745385 - DNA, 25 bp, Homo sapien
tcagtgccacaagtaacaaacagca

SEQ ID NO: 2745386 - DNA, 25 bp, Homo sapien
gtagcctcagtgccacaagtaacaa

SEQ ID NO: 2745387 - DNA, 25 bp, Homo sapien
cctcagtgccacaagtaacaaacag

SEQ ID NO: 2745388 - DNA, 25 bp, Homo sapien
gaaccagaagtcaccacaagctggg

SEQ ID NO: 2745389 - DNA, 25 bp, Homo sapien
gagatggttctgagctcccgaatca

SEQ ID NO: 2745390 - DNA, 25 bp, Homo sapien
tgggaccaggggagattatctctga

SEQ ID NO: 2745391 - DNA, 25 bp, Homo sapien
agctcccgaatcagagggtgctcca

SEQ ID NO: 2745392 - DNA, 25 bp, Homo sapien
catcactcggatggtgcctgcagtc

SEQ ID NO: 2745393 - DNA, 25 bp, Homo sapien
aaacctgcgtgtgagagccaaggcc

SEQ ID NO: 2745394 - DNA, 25 bp, Homo sapien
gatgacgaacgaccatgggcctttg

SEQ ID NO: 2745395 - DNA, 25 bp, Homo sapien
gggtatgccagaaccacaggatgca

SEQ ID NO: 2745396 - DNA, 25 bp, Homo sapien
tgccttcatcacgatggaggacatc

SEQ ID NO: 2745397 - DNA, 25 bp, Homo sapien
ccttcatcacgatggaggacatcgt

SEQ ID NO: 2745398 - DNA, 25 bp, Homo sapien
tctgccttcatcacgatggaggaca

SEQ ID NO: 2745399 - DNA, 25 bp, Homo sapien
tcatcacgatggaggacatcgtcat

SEQ ID NO: 2745400 - DNA, 25 bp, Homo sapien
cacagggatggcgtcgaagtaggac

SEQ ID NO: 2745401 - DNA, 25 bp, Homo sapien
tggtgcgcatgatggccttcagcag

SEQ ID NO: 2745402 - DNA, 25 bp, Homo sapien
gaagccgccggcgaaccacatggtg

SEQ ID NO: 2745403 - DNA, 25 bp, Homo sapien
agtaggacgagtgaggcgcgagcgt

SEQ ID NO: 2745404 - DNA, 25 bp, Homo sapien
tcatggcagcggcaaccaggagccg

SEQ ID NO: 2745405 - DNA, 25 bp, Homo sapien
gcccagggatgcgacaagtgcgagg

SEQ ID NO: 2745406 - DNA, 25 bp, Homo sapien
ccaggagccggaccgggaagagcgt

SEQ ID NO: 2745407 - DNA, 25 bp, Homo sapien
accgggaagagcgtcagtgtcatga

SEQ ID NO: 2745408 - DNA, 25 bp, Homo sapien
ttttgagttctcaacggagaccagc

SEQ ID NO: 2745409 - DNA, 25 bp, Homo sapien
caggagacacagatcgcagttggct

SEQ ID NO: 2745410 - DNA, 25 bp, Homo sapien
gaaacaccagtcctgaggtgcaggt

SEQ ID NO: 2745411 - DNA, 25 bp, Homo sapien
tacagctcatttcgcccggtatatc

SEQ ID NO: 2745412 - DNA, 25 bp, Homo sapien
ggcagcatgcggaaccaagacatca

SEQ ID NO: 2745413 - DNA, 25 bp, Homo sapien
gataagcgggctgttgcgtggacaa

SEQ ID NO: 2745414 - DNA, 25 bp, Homo sapien
aagacatcactgcaagtcgtggaca

SEQ ID NO: 2745415 - DNA, 25 bp, Homo sapien
ctgcaagtcgtggacagggataagc

SEQ ID NO: 2745416 - DNA, 25 bp, Homo sapien
tctctgggtctagatgcaaccacca

SEQ ID NO: 2745417 - DNA, 25 bp, Homo sapien
ggcccaaatcaaggaagctggcaga

SEQ ID NO: 2745418 - DNA, 25 bp, Homo sapien
tcacactcacgtgacagggatccag

SEQ ID NO: 2745419 - DNA, 25 bp, Homo sapien
gaccagtgggaactgaccctctctg

SEQ ID NO: 2745420 - DNA, 25 bp, Homo sapien
aacatgtggtccctctcgtgtgcac

SEQ ID NO: 2745421 - DNA, 25 bp, Homo sapien
ccggcgtttcacaatcagtgctgaa

SEQ ID NO: 2745422 - DNA, 25 bp, Homo sapien
tcaaagacacgaggttgccagagaa

SEQ ID NO: 2745423 - DNA, 25 bp, Homo sapien
tcgtgtgcactcacgccatcgcggt

SEQ ID NO: 2745424 - DNA, 25 bp, Homo sapien
actgcagtgccccagccagtgaagg

SEQ ID NO: 2745425 - DNA, 25 bp, Homo sapien
tgttggagatgtcacactgcagtgc

SEQ ID NO: 2745426 - DNA, 25 bp, Homo sapien
gcggcccctccgagcccacttgttg

SEQ ID NO: 2745427 - DNA, 25 bp, Homo sapien
ccagccagtgaaggggctccaatgc

SEQ ID NO: 2745428 - DNA, 25 bp, Homo sapien
accccaggcgctacagatcccaggt

SEQ ID NO: 2745429 - DNA, 25 bp, Homo sapien
aggcacggcccgcaccccaggcgct

SEQ ID NO: 2745430 - DNA, 25 bp, Homo sapien
caggcgctacagatcccaggtgagg

SEQ ID NO: 2745431 - DNA, 25 bp, Homo sapien
ggcccgcaccccaggcgctacagat

SEQ ID NO: 2745432 - DNA, 25 bp, Homo sapien
gctgcacggtgttgaatgggatcaa

SEQ ID NO: 2745433 - DNA, 25 bp, Homo sapien
cagtccacgggcgtcttacgaggat

SEQ ID NO: 2745434 - DNA, 25 bp, Homo sapien
gaatgggatcaaagccagtctggtc

SEQ ID NO: 2745435 - DNA, 25 bp, Homo sapien
cgggcgtcttacgaggatgctgcac

SEQ ID NO: 2745436 - DNA, 25 bp, Homo sapien
tcacacccgtgatgccagcacaggg

SEQ ID NO: 2745437 - DNA, 25 bp, Homo sapien
ggactaagcgttccctgacaccctg

SEQ ID NO: 2745438 - DNA, 25 bp, Homo sapien
gctgtctggactaagcgttccctga

SEQ ID NO: 2745439 - DNA, 25 bp, Homo sapien
tctggactaagcgttccctgacacc

SEQ ID NO: 2745440 - DNA, 25 bp, Homo sapien
tgcagcccgtgtaaagatggcacgc

SEQ ID NO: 2745441 - DNA, 25 bp, Homo sapien
gtgtaaagatggcacgcgccggcat

SEQ ID NO: 2745442 - DNA, 25 bp, Homo sapien
tggtgtgggcctgcgggaaaagggc

SEQ ID NO: 2745443 - DNA, 25 bp, Homo sapien
caggtgcagcccgtgtaaagatggc

SEQ ID NO: 2745444 - DNA, 25 bp, Homo sapien
taaccgggaatggtaagcatgcccc

SEQ ID NO: 2745445 - DNA, 25 bp, Homo sapien
gaaatgctggaaacagtaaccggga

SEQ ID NO: 2745446 - DNA, 25 bp, Homo sapien
gcaaaatgacgtgggtttcacaggg

SEQ ID NO: 2745447 - DNA, 25 bp, Homo sapien
taacacacctaagctcatgctgctg

SEQ ID NO: 2745448 - DNA, 25 bp, Homo sapien
tcatgggccgcgtggggatgagggc

SEQ ID NO: 2745449 - DNA, 25 bp, Homo sapien
ggacggtcgcggctcctggccatcc

SEQ ID NO: 2745450 - DNA, 25 bp, Homo sapien
acggtcgcggctcctggccatcctg

SEQ ID NO: 2745451 - DNA, 25 bp, Homo sapien
catcctgagaaccatagcacttttg

SEQ ID NO: 2745452 - DNA, 25 bp, Homo sapien
aagtgtggtagtcgagtcccgtgcc

SEQ ID NO: 2745453 - DNA, 25 bp, Homo sapien
catgtccaagcagtacagcacaggg

SEQ ID NO: 2745454 - DNA, 25 bp, Homo sapien
ggtgacctcgtggaagcctagcttg

SEQ ID NO: 2745455 - DNA, 25 bp, Homo sapien
tggcttagcaagacaggtgacctcg

SEQ ID NO: 2745456 - DNA, 25 bp, Homo sapien
gcattctgaacgcagctgtgggccg

SEQ ID NO: 2745457 - DNA, 25 bp, Homo sapien
gcatttgcaaagtctgatgacggct

SEQ ID NO: 2745458 - DNA, 25 bp, Homo sapien
taatgcagaagtgaacccgcagggc

SEQ ID NO: 2745459 - DNA, 25 bp, Homo sapien
caggagagccgcatccggaatgcat

SEQ ID NO: 2745460 - DNA, 25 bp, Homo sapien
gctggacgccttccagagaaaaggc

SEQ ID NO: 2745461 - DNA, 25 bp, Homo sapien
ccgggtgactggctggacgccttcc

SEQ ID NO: 2745462 - DNA, 25 bp, Homo sapien
gcaatgcgtggtttaaagcggaaaa

SEQ ID NO: 2745463 - DNA, 25 bp, Homo sapien
cagagaaaaggcaatgcgtggttta

SEQ ID NO: 2745464 - DNA, 25 bp, Homo sapien
aagacaggctatttcactctgtgga

SEQ ID NO: 2745465 - DNA, 25 bp, Homo sapien
tttctgcgggttcttgagtgtgtca

SEQ ID NO: 2745466 - DNA, 25 bp, Homo sapien
tttatctcaactgggaacttagctg

SEQ ID NO: 2745467 - DNA, 25 bp, Homo sapien
gtgtgtcagccactactggacccat

SEQ ID NO: 2745468 - DNA, 25 bp, Homo sapien
gggaccggcgatgcgggtccagcct

SEQ ID NO: 2745469 - DNA, 25 bp, Homo sapien
gggccgcgtccaggcaaagccgctc

SEQ ID NO: 2745470 - DNA, 25 bp, Homo sapien
gcgcgcagggcctgccaaggcgggc

SEQ ID NO: 2745471 - DNA, 25 bp, Homo sapien
gacgagcgcggggaccggcgatgcg

SEQ ID NO: 2745472 - DNA, 25 bp, Homo sapien
agggaccaggatgcgcgtgcgggcg

SEQ ID NO: 2745473 - DNA, 25 bp, Homo sapien
gttgtgggcccggttcagggtgcag

SEQ ID NO: 2745474 - DNA, 25 bp, Homo sapien
ttgtgggcccggttcagggtgcagg

SEQ ID NO: 2745475 - DNA, 25 bp, Homo sapien
gaggaaggcgctgagggaccaggat

SEQ ID NO: 2745476 - DNA, 25 bp, Homo sapien
gcgctgaggcgcagctcgtgcacga

SEQ ID NO: 2745477 - DNA, 25 bp, Homo sapien
agcagccgagcgtcgctggcccctg

SEQ ID NO: 2745478 - DNA, 25 bp, Homo sapien
ggggcgccagcagccgagcgtcgct

SEQ ID NO: 2745479 - DNA, 25 bp, Homo sapien
agctcgtgcacgaaggggttccgcc

SEQ ID NO: 2745480 - DNA, 25 bp, Homo sapien
ggcccggggtccgcatccccgcagc

SEQ ID NO: 2745481 - DNA, 25 bp, Homo sapien
cggcccggggtccgcatccccgcag

SEQ ID NO: 2745482 - DNA, 25 bp, Homo sapien
gcggcccggggtccgcatccccgca

SEQ ID NO: 2745483 - DNA, 25 bp, Homo sapien
ccgtcccgcggcgagcgcagccgag

SEQ ID NO: 2745484 - DNA, 25 bp, Homo sapien
cgcgccgtcccgcggcgagcgcagc

SEQ ID NO: 2745485 - DNA, 25 bp, Homo sapien
gccgtcccgcggcgagcgcagccga

SEQ ID NO: 2745486 - DNA, 25 bp, Homo sapien
ggccgcgccgtcccgcggcgagcgc

SEQ ID NO: 2745487 - DNA, 25 bp, Homo sapien
ggcgcgggccgaggatgcgcggcgg

SEQ ID NO: 2745488 - DNA, 25 bp, Homo sapien
gcgggccgaggatgcgcggcggctg

SEQ ID NO: 2745489 - DNA, 25 bp, Homo sapien
tcctgcagccactggagcacaggga

SEQ ID NO: 2745490 - DNA, 25 bp, Homo sapien
tggggaccgggggcgcctcctgcag

SEQ ID NO: 2745491 - DNA, 25 bp, Homo sapien
cgctggggaccgggggcgcctcctg

SEQ ID NO: 2745492 - DNA, 25 bp, Homo sapien
tggtggtttctctggggtctgtggg

SEQ ID NO: 2745493 - DNA, 25 bp, Homo sapien
gctgttccggcgaaggccccacgcc

SEQ ID NO: 2745494 - DNA, 25 bp, Homo sapien
ccaggccctgggtgccgagccccgg

SEQ ID NO: 2745495 - DNA, 25 bp, Homo sapien
ggctgttccggcgaaggccccacgc

SEQ ID NO: 2745496 - DNA, 25 bp, Homo sapien
tgggtgccgagccccgggctgttcc

SEQ ID NO: 2745497 - DNA, 25 bp, Homo sapien
acctgatattctcaacaccacgtat

SEQ ID NO: 2745498 - DNA, 25 bp, Homo sapien
ttttagagttatctataggatagaa

SEQ ID NO: 2745499 - DNA, 25 bp, Homo sapien
caatcacagactcccacttgtgggt

SEQ ID NO: 2745500 - DNA, 25 bp, Homo sapien
ttctgcctttcatggttgcatttta

SEQ ID NO: 2745501 - DNA, 25 bp, Homo sapien
gactggctacctctggccttatgaa

SEQ ID NO: 2745502 - DNA, 25 bp, Homo sapien
gatacaacctgcatgttttagctgg

SEQ ID NO: 2745503 - DNA, 25 bp, Homo sapien
tattcccagcctaggtgtggtcgtg

SEQ ID NO: 2745504 - DNA, 25 bp, Homo sapien
gtcgtgtgactaattcctggcagca

SEQ ID NO: 2745505 - DNA, 25 bp, Homo sapien
gaggcatttcctaagaatgctgcct

SEQ ID NO: 2745506 - DNA, 25 bp, Homo sapien
tgggaggcatttcctaagaatgctg

SEQ ID NO: 2745507 - DNA, 25 bp, Homo sapien
gagagtgggaggcatttcctaagaa

SEQ ID NO: 2745508 - DNA, 25 bp, Homo sapien
gagtgggaggcatttcctaagaatg

SEQ ID NO: 2745509 - DNA, 25 bp, Homo sapien
ggacatttgagccaggattttgcaa

SEQ ID NO: 2745510 - DNA, 25 bp, Homo sapien
tagacagacgtttatatgggcgatg

SEQ ID NO: 2745511 - DNA, 25 bp, Homo sapien
tagaaaacgcattgataacccagaa

SEQ ID NO: 2745512 - DNA, 25 bp, Homo sapien
gccagtcgcctttgatttagcagac

SEQ ID NO: 2745513 - DNA, 25 bp, Homo sapien
caatgctgatgtctcggcacgtgcg

SEQ ID NO: 2745514 - DNA, 25 bp, Homo sapien
tagtcgtctttcatgaacacgcggg

SEQ ID NO: 2745515 - DNA, 25 bp, Homo sapien
gcccacagcgggtgcttactcaatg

SEQ ID NO: 2745516 - DNA, 25 bp, Homo sapien
cacgtgcgtcatgttccgttctgga

SEQ ID NO: 2745517 - DNA, 25 bp, Homo sapien
ttttattagaacacgttagctggca

SEQ ID NO: 2745518 - DNA, 25 bp, Homo sapien
gtgcttgagtcacagctcagctctg

SEQ ID NO: 2745519 - DNA, 25 bp, Homo sapien
agccagcccggtgcttgagtcacag

SEQ ID NO: 2745520 - DNA, 25 bp, Homo sapien
gctggcatctgagtgtcacagggat

SEQ ID NO: 2745521 - DNA, 25 bp, Homo sapien
gggctgcctgcacgggtgggccagt

SEQ ID NO: 2745522 - DNA, 25 bp, Homo sapien
ctgtctgcacaggtgggccggtgca

SEQ ID NO: 2745523 - DNA, 25 bp, Homo sapien
ccagtgacggttgggctgtctgcac

SEQ ID NO: 2745524 - DNA, 25 bp, Homo sapien
tgctgtccgaggggtcctttttcag

SEQ ID NO: 2745525 - DNA, 25 bp, Homo sapien
tctcccctcgactgaggaagggagc

SEQ ID NO: 2745526 - DNA, 25 bp, Homo sapien
cgctggggatggatgcacctctctc

SEQ ID NO: 2745527 - DNA, 25 bp, Homo sapien
ctggctggggtaccgaagctgcaat

SEQ ID NO: 2745528 - DNA, 25 bp, Homo sapien
ggaagggagcaggtctgaccaggcc

SEQ ID NO: 2745529 - DNA, 25 bp, Homo sapien
gccctggtgaattcacaccctccag

SEQ ID NO: 2745530 - DNA, 25 bp, Homo sapien
ggccctggtgaattcacaccctcca

SEQ ID NO: 2745531 - DNA, 25 bp, Homo sapien
ttagggccctggtgaattcacaccc

SEQ ID NO: 2745532 - DNA, 25 bp, Homo sapien
agggccctggtgaattcacaccctc

SEQ ID NO: 2745533 - DNA, 25 bp, Homo sapien
tccagttttgtagggttagcacgca

SEQ ID NO: 2745534 - DNA, 25 bp, Homo sapien
tagacacgaacacgcaggaaagtcc

SEQ ID NO: 2745535 - DNA, 25 bp, Homo sapien
ccacttacagttggcaaacggcaga

SEQ ID NO: 2745536 - DNA, 25 bp, Homo sapien
gatgcagaactgtgcgacgtcagcc

SEQ ID NO: 2745537 - DNA, 25 bp, Homo sapien
gtcatgtctgagtgtaagggcacag

SEQ ID NO: 2745538 - DNA, 25 bp, Homo sapien
tgtctgagtgtaagggcacagaagc

SEQ ID NO: 2745539 - DNA, 25 bp, Homo sapien
gtctgagtgtaagggcacagaagcc

SEQ ID NO: 2745540 - DNA, 25 bp, Homo sapien
catgtctgagtgtaagggcacagaa

SEQ ID NO: 2745541 - DNA, 25 bp, Homo sapien
tgaaaatctgttgttaagcgcaacc

SEQ ID NO: 2745542 - DNA, 25 bp, Homo sapien
ccagatcttctggacgcggaaggta

SEQ ID NO: 2745543 - DNA, 25 bp, Homo sapien
gcacctgccgcgtcaccttgcgttt

SEQ ID NO: 2745544 - DNA, 25 bp, Homo sapien
tctgcaggttcctcgcctgtctcag

SEQ ID NO: 2745545 - DNA, 25 bp, Homo sapien
tctcagggcaaaacaatcgctcggg

SEQ ID NO: 2745546 - DNA, 25 bp, Homo sapien
gatggtacccggctttcctgggcag

SEQ ID NO: 2745547 - DNA, 25 bp, Homo sapien
ggcacatctgcacgtttaccaatca

SEQ ID NO: 2745548 - DNA, 25 bp, Homo sapien
taaacaaagcatgacggcacatctg

SEQ ID NO: 2745549 - DNA, 25 bp, Homo sapien
ctgccaaaaaagacatcattaaaaa

SEQ ID NO: 2745550 - DNA, 25 bp, Homo sapien
agacatcattaaaaaaaatctaaat

SEQ ID NO: 2745551 - DNA, 25 bp, Homo sapien
tgccaaaaaagacatcattaaaaaa

SEQ ID NO: 2745552 - DNA, 25 bp, Homo sapien
gacatcattaaaaaaaatctaaata

SEQ ID NO: 2745553 - DNA, 25 bp, Homo sapien
cccaggagtttgagaccagcctggg

SEQ ID NO: 2745554 - DNA, 25 bp, Homo sapien
ggctgaggcaggaggactgcttgag

SEQ ID NO: 2745555 - DNA, 25 bp, Homo sapien
cacctataatcccaatactctggga

SEQ ID NO: 2745556 - DNA, 25 bp, Homo sapien
caagatggtgaaaccctgtctctgt

SEQ ID NO: 2745557 - DNA, 25 bp, Homo sapien
ggagttcacacagtagctcaccggc

SEQ ID NO: 2745558 - DNA, 25 bp, Homo sapien
cacagtagctcaccggcccactgct

SEQ ID NO: 2745559 - DNA, 25 bp, Homo sapien
ggttggagctcacaaggtaatgctc

SEQ ID NO: 2745560 - DNA, 25 bp, Homo sapien
ttggagctcacaaggtaatgctctg

SEQ ID NO: 2745561 - DNA, 25 bp, Homo sapien
ttttctccatttgctctcaggcacc

SEQ ID NO: 2745562 - DNA, 25 bp, Homo sapien
gacacatgcatgagctattatacat

SEQ ID NO: 2745563 - DNA, 25 bp, Homo sapien
cacatgcatgagctattatacataa

SEQ ID NO: 2745564 - DNA, 25 bp, Homo sapien
catgcatgagctattatacataatt

SEQ ID NO: 2745565 - DNA, 25 bp, Homo sapien
tgcatgagctattatacataattac

SEQ ID NO: 2745566 - DNA, 25 bp, Homo sapien
ctcgttcaaagttttgtcgattacg

SEQ ID NO: 2745567 - DNA, 25 bp, Homo sapien
ggacggtggcacagtcagcctcgtt

SEQ ID NO: 2745568 - DNA, 25 bp, Homo sapien
tcagtaggagcgaatggctgggggg

SEQ ID NO: 2745569 - DNA, 25 bp, Homo sapien
cacagtcagcctcgttcaaagtttt

SEQ ID NO: 2745570 - DNA, 25 bp, Homo sapien
gtgctttacaataatgctcccgtca

SEQ ID NO: 2745571 - DNA, 25 bp, Homo sapien
actgtaaatgatggcagattcgtag

SEQ ID NO: 2745572 - DNA, 25 bp, Homo sapien
tggcagattcgtagagtggaacaga

SEQ ID NO: 2745573 - DNA, 25 bp, Homo sapien
aaatgatggcagattcgtagagtgg

SEQ ID NO: 2745574 - DNA, 25 bp, Homo sapien
gctgtggtgagaacgagctccacac

SEQ ID NO: 2745575 - DNA, 25 bp, Homo sapien
tgttgcccctggatgggcttggagt

SEQ ID NO: 2745576 - DNA, 25 bp, Homo sapien
ctgttgcccctggatgggcttggag

SEQ ID NO: 2745577 - DNA, 25 bp, Homo sapien
tcagttcatctgaagaacaagtgac

SEQ ID NO: 2745578 - DNA, 25 bp, Homo sapien
atcagttcatctgaagaacaagtga

SEQ ID NO: 2745579 - DNA, 25 bp, Homo sapien
cagttcatctgaagaacaagtgacc

SEQ ID NO: 2745580 - DNA, 25 bp, Homo sapien
tccgtagatggtctgcagcgcacac

SEQ ID NO: 2745581 - DNA, 25 bp, Homo sapien
agatggtctgcagcgcacacagcat

SEQ ID NO: 2745582 - DNA, 25 bp, Homo sapien
gcctctgctccgtagatggtctgca

SEQ ID NO: 2745583 - DNA, 25 bp, Homo sapien
tctgctccgtagatggtctgcagcg

SEQ ID NO: 2745584 - DNA, 25 bp, Homo sapien
actggttgtggctttatagctgtgg

SEQ ID NO: 2745585 - DNA, 25 bp, Homo sapien
cactggttgtggctttatagctgtg

SEQ ID NO: 2745586 - DNA, 25 bp, Homo sapien
gttgtggctttatagctgtgggcca

SEQ ID NO: 2745587 - DNA, 25 bp, Homo sapien
tggttgtggctttatagctgtgggc

SEQ ID NO: 2745588 - DNA, 25 bp, Homo sapien
ctgcagaaggcagggcccaacagtg

SEQ ID NO: 2745589 - DNA, 25 bp, Homo sapien
ccaacagtgtgcacagagcccactg

SEQ ID NO: 2745590 - DNA, 25 bp, Homo sapien
aacagtgtgcacagagcccactgtc

SEQ ID NO: 2745591 - DNA, 25 bp, Homo sapien
aaggcagggcccaacagtgtgcaca

SEQ ID NO: 2745592 - DNA, 25 bp, Homo sapien
ggtcgaacgtcttcaggtgctttag

SEQ ID NO: 2745593 - DNA, 25 bp, Homo sapien
ccggtcgaacgtcttcaggtgcttt

SEQ ID NO: 2745594 - DNA, 25 bp, Homo sapien
gtcgaacgtcttcaggtgctttagg

SEQ ID NO: 2745595 - DNA, 25 bp, Homo sapien
cggtcgaacgtcttcaggtgcttta

SEQ ID NO: 2745596 - DNA, 25 bp, Homo sapien
ggaacacggcagcatgattttgcat

SEQ ID NO: 2745597 - DNA, 25 bp, Homo sapien
cacggaacacggcagcatgattttg

SEQ ID NO: 2745598 - DNA, 25 bp, Homo sapien
ttcccacacggaacacggcagcatg

SEQ ID NO: 2745599 - DNA, 25 bp, Homo sapien
ccacacggaacacggcagcatgatt

SEQ ID NO: 2745600 - DNA, 25 bp, Homo sapien
aatgaagttttgactaaagcttctg

SEQ ID NO: 2745601 - DNA, 25 bp, Homo sapien
cagactatgagtttattactctgaa

SEQ ID NO: 2745602 - DNA, 25 bp, Homo sapien
aacttttaatccatagaagcagcca

SEQ ID NO: 2745603 - DNA, 25 bp, Homo sapien
cagccatatcaagaactgcttaatt

SEQ ID NO: 2745604 - DNA, 25 bp, Homo sapien
acccctggcgggactcctgacgcgg

SEQ ID NO: 2745605 - DNA, 25 bp, Homo sapien
ctttccagcgggatacagccagggt

SEQ ID NO: 2745606 - DNA, 25 bp, Homo sapien
tctggtggtgaacgtgacacaagcc

SEQ ID NO: 2745607 - DNA, 25 bp, Homo sapien
cctgtgaggcaccatgttccataca

SEQ ID NO: 2745608 - DNA, 25 bp, Homo sapien
tatgctgggaagtaggcgtcagctt

SEQ ID NO: 2745609 - DNA, 25 bp, Homo sapien
gaagctccttgtacactgagttcct

SEQ ID NO: 2745610 - DNA, 25 bp, Homo sapien
gcttcctgtgggacagacaggcacc

SEQ ID NO: 2745611 - DNA, 25 bp, Homo sapien
taactgtgctttgctccactgaccc

SEQ ID NO: 2745612 - DNA, 25 bp, Homo sapien
gcagattactgcttgcacattgcaa

SEQ ID NO: 2745613 - DNA, 25 bp, Homo sapien
gaggtatttactgatgtctaagcag

SEQ ID NO: 2745614 - DNA, 25 bp, Homo sapien
ggagccagtttatggccacattggg

SEQ ID NO: 2745615 - DNA, 25 bp, Homo sapien
tttcatgtccattagcagccacgtt

SEQ ID NO: 2745616 - DNA, 25 bp, Homo sapien
cataggaatcgttgccagcacccct

SEQ ID NO: 2745617 - DNA, 25 bp, Homo sapien
ttcttgccgtatttcttatcatttc

SEQ ID NO: 2745618 - DNA, 25 bp, Homo sapien
ccataggaatcgttgccagcacccc

SEQ ID NO: 2745619 - DNA, 25 bp, Homo sapien
taggaattcttgccgtatttcttat

SEQ ID NO: 2745620 - DNA, 25 bp, Homo sapien
cggaatctcttcctcagcattcgct

SEQ ID NO: 2745621 - DNA, 25 bp, Homo sapien
tgacctcaggtggatggctgtgttt

SEQ ID NO: 2745622 - DNA, 25 bp, Homo sapien
atctcttcctcagcattcgctcatg

SEQ ID NO: 2745623 - DNA, 25 bp, Homo sapien
cctcaggtggatggctgtgtttgac

SEQ ID NO: 2745624 - DNA, 25 bp, Homo sapien
gttaataatgcgattcaattgctta

SEQ ID NO: 2745625 - DNA, 25 bp, Homo sapien
ataatgcgattcaattgcttatggg

SEQ ID NO: 2745626 - DNA, 25 bp, Homo sapien
atttagctagagcttgagaattagg

SEQ ID NO: 2745627 - DNA, 25 bp, Homo sapien
aatttagctagagcttgagaattag

SEQ ID NO: 2745628 - DNA, 25 bp, Homo sapien
taacaccagtagctgaatgtggagt

SEQ ID NO: 2745629 - DNA, 25 bp, Homo sapien
tagatcagctgcatctcgagtcttc

SEQ ID NO: 2745630 - DNA, 25 bp, Homo sapien
aaagccattctacaagatcttgctc

SEQ ID NO: 2745631 - DNA, 25 bp, Homo sapien
ttttcaatcagctgcagctcgagtc

SEQ ID NO: 2745632 - DNA, 25 bp, Homo sapien
gaataatatcctaaaccttggcagg

SEQ ID NO: 2745633 - DNA, 25 bp, Homo sapien
gtgtcccttttctaattgttcatta

SEQ ID NO: 2745634 - DNA, 25 bp, Homo sapien
gttcattaactaagtcctctaaagc

SEQ ID NO: 2745635 - DNA, 25 bp, Homo sapien
tggcaggaactgtctttccacttga

SEQ ID NO: 2745636 - DNA, 25 bp, Homo sapien
aggagctgtgctatatgctctcttg

SEQ ID NO: 2745637 - DNA, 25 bp, Homo sapien
gctgtgctatatgctctcttggctc

SEQ ID NO: 2745638 - DNA, 25 bp, Homo sapien
gagctgtgctatatgctctcttggc

SEQ ID NO: 2745639 - DNA, 25 bp, Homo sapien
ctgtgctatatgctctcttggctct

SEQ ID NO: 2745640 - DNA, 25 bp, Homo sapien
tatgcatattacctctgataccgtc

SEQ ID NO: 2745641 - DNA, 25 bp, Homo sapien
gcatattacctctgataccgtcaca

SEQ ID NO: 2745642 - DNA, 25 bp, Homo sapien
atattacctctgataccgtcacagg

SEQ ID NO: 2745643 - DNA, 25 bp, Homo sapien
ttatgcatattacctctgataccgt

SEQ ID NO: 2745644 - DNA, 25 bp, Homo sapien
cccatgtgtgggcgccacttgctga

SEQ ID NO: 2745645 - DNA, 25 bp, Homo sapien
agttttctgtcgctccggtgaccct

SEQ ID NO: 2745646 - DNA, 25 bp, Homo sapien
tccaagttttctgtcgctccggtga

SEQ ID NO: 2745647 - DNA, 25 bp, Homo sapien
tgtgtgggcgccacttgctgagacc

SEQ ID NO: 2745648 - DNA, 25 bp, Homo sapien
gttctcatgttcttatgcttccatc

SEQ ID NO: 2745649 - DNA, 25 bp, Homo sapien
caagattcatgacagattcttcccc

SEQ ID NO: 2745650 - DNA, 25 bp, Homo sapien
gagtcgcagttctcatgttcttatg

SEQ ID NO: 2745651 - DNA, 25 bp, Homo sapien
gcagttctcatgttcttatgcttcc

SEQ ID NO: 2745652 - DNA, 25 bp, Homo sapien
cggcgtcaggaacgatggacctgaa

SEQ ID NO: 2745653 - DNA, 25 bp, Homo sapien
gtcaggaacgatggacctgaactcc

SEQ ID NO: 2745654 - DNA, 25 bp, Homo sapien
ctgcggcgtcaggaacgatggacct

SEQ ID NO: 2745655 - DNA, 25 bp, Homo sapien
ggaacgatggacctgaactccgcct

SEQ ID NO: 2745656 - DNA, 25 bp, Homo sapien
tacccttttaatactatctgcacct

SEQ ID NO: 2745657 - DNA, 25 bp, Homo sapien
tggcctcccgagcagtggtcagatc

SEQ ID NO: 2745658 - DNA, 25 bp, Homo sapien
ctggcctcccgagcagtggtcagat

SEQ ID NO: 2745659 - DNA, 25 bp, Homo sapien
gctggcctcccgagcagtggtcaga

SEQ ID NO: 2745660 - DNA, 25 bp, Homo sapien
tgcctgaccaaagacaaccaagtcc

SEQ ID NO: 2745661 - DNA, 25 bp, Homo sapien
cgagtttgccccgagccgattggca

SEQ ID NO: 2745662 - DNA, 25 bp, Homo sapien
cgattggcaccatgtaccgaggcac

SEQ ID NO: 2745663 - DNA, 25 bp, Homo sapien
caaagacaaccaagtccaagagcga

SEQ ID NO: 2745664 - DNA, 25 bp, Homo sapien
agcaggcgcgacaggacccagaccg

SEQ ID NO: 2745665 - DNA, 25 bp, Homo sapien
tcagcaggcgcgacaggacccagac

SEQ ID NO: 2745666 - DNA, 25 bp, Homo sapien
cgctcagcaggcgcgacaggaccca

SEQ ID NO: 2745667 - DNA, 25 bp, Homo sapien
ctcagcaggcgcgacaggacccaga

SEQ ID NO: 2745668 - DNA, 25 bp, Homo sapien
gcctgcgcaccacaccggggtcgag

SEQ ID NO: 2745669 - DNA, 25 bp, Homo sapien
cgcctgcgcaccacaccggggtcga

SEQ ID NO: 2745670 - DNA, 25 bp, Homo sapien
tcgtgggtgtttctccgagagcggg

SEQ ID NO: 2745671 - DNA, 25 bp, Homo sapien
tttctccgagagcgggatgtgtcag

SEQ ID NO: 2745672 - DNA, 25 bp, Homo sapien
cgtgggtgtttctccgagagcggga

SEQ ID NO: 2745673 - DNA, 25 bp, Homo sapien
ctccgagagcgggatgtgtcagggt

SEQ ID NO: 2745674 - DNA, 25 bp, Homo sapien
aggtgcctgtggccttccgcagttt

SEQ ID NO: 2745675 - DNA, 25 bp, Homo sapien
ggtgcctgtggccttccgcagtttt

SEQ ID NO: 2745676 - DNA, 25 bp, Homo sapien
gaggtgcctgtggccttccgcagtt

SEQ ID NO: 2745677 - DNA, 25 bp, Homo sapien
aacaaaattaaccatcgcagcagcc

SEQ ID NO: 2745678 - DNA, 25 bp, Homo sapien
gatgccgtcaagttgacaaacaaaa

SEQ ID NO: 2745679 - DNA, 25 bp, Homo sapien
atctgagcacctcatgatgccgtca

SEQ ID NO: 2745680 - DNA, 25 bp, Homo sapien
aaaattaaccatcgcagcagccata

SEQ ID NO: 2745681 - DNA, 25 bp, Homo sapien
tgagtcgctttcacctaaggtcttg

SEQ ID NO: 2745682 - DNA, 25 bp, Homo sapien
cacttcagatgcttaagacatgtct

SEQ ID NO: 2745683 - DNA, 25 bp, Homo sapien
ttccccaaccagattgtgagtcgct

SEQ ID NO: 2745684 - DNA, 25 bp, Homo sapien
tacctgcacttcagatgcttaagac

SEQ ID NO: 2745685 - DNA, 25 bp, Homo sapien
tctttgaatcccgtagggcctcagt

SEQ ID NO: 2745686 - DNA, 25 bp, Homo sapien
ctttgaatcccgtagggcctcagtg

SEQ ID NO: 2745687 - DNA, 25 bp, Homo sapien
tcttctttgaatcccgtagggcctc

SEQ ID NO: 2745688 - DNA, 25 bp, Homo sapien
ttctttgaatcccgtagggcctcag

SEQ ID NO: 2745689 - DNA, 25 bp, Homo sapien
tgtgcagcaagcacatagttaaaac

SEQ ID NO: 2745690 - DNA, 25 bp, Homo sapien
ctgtgcagcaagcacatagttaaaa

SEQ ID NO: 2745691 - DNA, 25 bp, Homo sapien
tgggcagatcgagtgaccagcctga

SEQ ID NO: 2745692 - DNA, 25 bp, Homo sapien
caggtgggcagatcgagtgaccagc

SEQ ID NO: 2745693 - DNA, 25 bp, Homo sapien
gtgggcagatcgagtgaccagcctg

SEQ ID NO: 2745694 - DNA, 25 bp, Homo sapien
ggtgggcagatcgagtgaccagcct

SEQ ID NO: 2745695 - DNA, 25 bp, Homo sapien
gagtggagatggcaccacttgccct

SEQ ID NO: 2745696 - DNA, 25 bp, Homo sapien
tgggaagatcagtggagcctgggag

SEQ ID NO: 2745697 - DNA, 25 bp, Homo sapien
gtggagatggcaccacttgccctcc

SEQ ID NO: 2745698 - DNA, 25 bp, Homo sapien
gtgagtggagatggcaccacttgcc

SEQ ID NO: 2745699 - DNA, 25 bp, Homo sapien
tctgcttcgatgtctcaggtcagaa

SEQ ID NO: 2745700 - DNA, 25 bp, Homo sapien
caagactgccctctagttgtagcga

SEQ ID NO: 2745701 - DNA, 25 bp, Homo sapien
tctagtttagattgacttggcacca

SEQ ID NO: 2745702 - DNA, 25 bp, Homo sapien
tctgggctggcacttaggaacatga

SEQ ID NO: 2745703 - DNA, 25 bp, Homo sapien
tatgattcagtgatctgcgcagtgc

SEQ ID NO: 2745704 - DNA, 25 bp, Homo sapien
tcagactcatctcaagcttttatag

SEQ ID NO: 2745705 - DNA, 25 bp, Homo sapien
taacacttggagaggctactgttgc

SEQ ID NO: 2745706 - DNA, 25 bp, Homo sapien
gaggccctgaagtgactcattttcc

SEQ ID NO: 2745707 - DNA, 25 bp, Homo sapien
acataagagcgtaaccagccttcag

SEQ ID NO: 2745708 - DNA, 25 bp, Homo sapien
tctattgcacataagagcgtaacca

SEQ ID NO: 2745709 - DNA, 25 bp, Homo sapien
aggttctattgcacataagagcgta

SEQ ID NO: 2745710 - DNA, 25 bp, Homo sapien
ttgcacataagagcgtaaccagcct

SEQ ID NO: 2745711 - DNA, 25 bp, Homo sapien
gaaatgtgtgtaattgtgcttgcct

SEQ ID NO: 2745712 - DNA, 25 bp, Homo sapien
gaaattcttaccctgagtagctccc

SEQ ID NO: 2745713 - DNA, 25 bp, Homo sapien
tagcgttcctgtacctcctgtttcc

SEQ ID NO: 2745714 - DNA, 25 bp, Homo sapien
gcttgcctgaaagagcagtccctgg

SEQ ID NO: 2745715 - DNA, 25 bp, Homo sapien
tgatgcagaccctcacattaaggct

SEQ ID NO: 2745716 - DNA, 25 bp, Homo sapien
ctctgtgtgggcttgagcaggaaaa

SEQ ID NO: 2745717 - DNA, 25 bp, Homo sapien
gggatggagacacagcacgactctc

SEQ ID NO: 2745718 - DNA, 25 bp, Homo sapien
caaggacttcaaacacagtcaagga

SEQ ID NO: 2745719 - DNA, 25 bp, Homo sapien
cagtcactggattaaagggagtcca

SEQ ID NO: 2745720 - DNA, 25 bp, Homo sapien
tgacagtcactggattaaagggagt

SEQ ID NO: 2745721 - DNA, 25 bp, Homo sapien
cactggattaaagggagtccacgtg

SEQ ID NO: 2745722 - DNA, 25 bp, Homo sapien
cctgacagtcactggattaaaggga

SEQ ID NO: 2745723 - DNA, 25 bp, Homo sapien
cgagcatctgttaagctgaatagag

SEQ ID NO: 2745724 - DNA, 25 bp, Homo sapien
atagagtgataatctgcaggattac

SEQ ID NO: 2745725 - DNA, 25 bp, Homo sapien
acagcagcactcgacgagcatctgt

SEQ ID NO: 2745726 - DNA, 25 bp, Homo sapien
taagctgaatagagtgataatctgc

SEQ ID NO: 2745727 - DNA, 25 bp, Homo sapien
catagaggtattcggaaaggtcgga

SEQ ID NO: 2745728 - DNA, 25 bp, Homo sapien
tgtgtgcagcaacctagtgtctgca

SEQ ID NO: 2745729 - DNA, 25 bp, Homo sapien
aaaagcaaagatgggctacagagaa

SEQ ID NO: 2745730 - DNA, 25 bp, Homo sapien
ggaaaactctaaacaccaaggagca

SEQ ID NO: 2745731 - DNA, 25 bp, Homo sapien
gtttgagcaatccacacccgctgag

SEQ ID NO: 2745732 - DNA, 25 bp, Homo sapien
gttggtcaactacccaggcaaagta

SEQ ID NO: 2745733 - DNA, 25 bp, Homo sapien
ggcaaagtagtgcaacatggctcca

SEQ ID NO: 2745734 - DNA, 25 bp, Homo sapien
gagtcacacagggtgcaccggattc

SEQ ID NO: 2745735 - DNA, 25 bp, Homo sapien
aaccaccatggtagatccgcagtga

SEQ ID NO: 2745736 - DNA, 25 bp, Homo sapien
accaccatggtagatccgcagtgat

SEQ ID NO: 2745737 - DNA, 25 bp, Homo sapien
taaccaccatggtagatccgcagtg

SEQ ID NO: 2745738 - DNA, 25 bp, Homo sapien
tccactgacatccactgggatgtcc

SEQ ID NO: 2745739 - DNA, 25 bp, Homo sapien
ctgactccactgacatccactggga

SEQ ID NO: 2745740 - DNA, 25 bp, Homo sapien
tgactccactgacatccactgggat

SEQ ID NO: 2745741 - DNA, 25 bp, Homo sapien
actccactgacatccactgggatgt

SEQ ID NO: 2745742 - DNA, 25 bp, Homo sapien
tgcagtgaacaagcatttggatctc

SEQ ID NO: 2745743 - DNA, 25 bp, Homo sapien
aggtctgtgcaaacagtgacaccag

SEQ ID NO: 2745744 - DNA, 25 bp, Homo sapien
agtgaacaagcatttggatctcttc

SEQ ID NO: 2745745 - DNA, 25 bp, Homo sapien
cttcccacttaggtctgtgcaaaca

SEQ ID NO: 2745746 - DNA, 25 bp, Homo sapien
gagactcaccagatcacgccatctg

SEQ ID NO: 2745747 - DNA, 25 bp, Homo sapien
ttcttaggaaactgaccatcaggcc

SEQ ID NO: 2745748 - DNA, 25 bp, Homo sapien
ggctttatctgagggccgagcagca

SEQ ID NO: 2745749 - DNA, 25 bp, Homo sapien
agatcagatctggtgttgaactggc

SEQ ID NO: 2745750 - DNA, 25 bp, Homo sapien
cagggaccacccaccgaaggtgaat

SEQ ID NO: 2745751 - DNA, 25 bp, Homo sapien
ggaccacccaccgaaggtgaatgtg

SEQ ID NO: 2745752 - DNA, 25 bp, Homo sapien
ccgaaggtgaatgtggacaagaaaa

SEQ ID NO: 2745753 - DNA, 25 bp, Homo sapien
cacccaccgaaggtgaatgtggaca

SEQ ID NO: 2745754 - DNA, 25 bp, Homo sapien
tctccaagatgtcatgcggcggcat

SEQ ID NO: 2745755 - DNA, 25 bp, Homo sapien
tgtgcgcaccgaaactagcttcctt

SEQ ID NO: 2745756 - DNA, 25 bp, Homo sapien
tagcttccttcaccgggcatatggc

SEQ ID NO: 2745757 - DNA, 25 bp, Homo sapien
tttgggtgcatccttccactgctgg

SEQ ID NO: 2745758 - DNA, 25 bp, Homo sapien
tatctaagggttttatagcgtcatg

SEQ ID NO: 2745759 - DNA, 25 bp, Homo sapien
accccaggccatacaaattttcctg

SEQ ID NO: 2745760 - DNA, 25 bp, Homo sapien
atctaagggttttatagcgtcatgt

SEQ ID NO: 2745761 - DNA, 25 bp, Homo sapien
caaacgtggatgtgtcagtggccat

SEQ ID NO: 2745762 - DNA, 25 bp, Homo sapien
gggagccaaacgtggatgtgtcagt

SEQ ID NO: 2745763 - DNA, 25 bp, Homo sapien
gaggggacaaacttgagaaatgcca

SEQ ID NO: 2745764 - DNA, 25 bp, Homo sapien
gacttgagaggggacaaacttgaga

SEQ ID NO: 2745765 - DNA, 25 bp, Homo sapien
cagatgttattgttcagctacatac

SEQ ID NO: 2745766 - DNA, 25 bp, Homo sapien
agatgttattgttcagctacataca

SEQ ID NO: 2745767 - DNA, 25 bp, Homo sapien
ccagatgttattgttcagctacata

SEQ ID NO: 2745768 - DNA, 25 bp, Homo sapien
gatgttattgttcagctacatacaa

SEQ ID NO: 2745769 - DNA, 25 bp, Homo sapien
cggccctcaaattgcaacatcagtt

SEQ ID NO: 2745770 - DNA, 25 bp, Homo sapien
tggaacatcagctcctaggccctca

SEQ ID NO: 2745771 - DNA, 25 bp, Homo sapien
gcacggacctcaacctggaacatta

SEQ ID NO: 2745772 - DNA, 25 bp, Homo sapien
ctgcaacattagctccccactgggt

SEQ ID NO: 2745773 - DNA, 25 bp, Homo sapien
tgcagctgcacgtccctcaaactag

SEQ ID NO: 2745774 - DNA, 25 bp, Homo sapien
aggtctccagctgcacgaccctcaa

SEQ ID NO: 2745775 - DNA, 25 bp, Homo sapien
gctgcacgaccctcaaactagaaca

SEQ ID NO: 2745776 - DNA, 25 bp, Homo sapien
ccaggtctgcagctgcacgtccctc

SEQ ID NO: 2745777 - DNA, 25 bp, Homo sapien
cagctgcatggccctcaatctagaa

SEQ ID NO: 2745778 - DNA, 25 bp, Homo sapien
atggccctcaatctagaacctcagc

SEQ ID NO: 2745779 - DNA, 25 bp, Homo sapien
tgcatggccctcaatctagaacctc

SEQ ID NO: 2745780 - DNA, 25 bp, Homo sapien
gctgcatggccctcaatctagaacc

SEQ ID NO: 2745781 - DNA, 25 bp, Homo sapien
cagctggaagatccactaactagaa

SEQ ID NO: 2745782 - DNA, 25 bp, Homo sapien
gtctgcagctggaagatccactaac

SEQ ID NO: 2745783 - DNA, 25 bp, Homo sapien
tgggtctgcagctggaagatccact

SEQ ID NO: 2745784 - DNA, 25 bp, Homo sapien
ggaagatccactaactagaacatca

SEQ ID NO: 2745785 - DNA, 25 bp, Homo sapien
tccagctccatgaccctcaatcaag

SEQ ID NO: 2745786 - DNA, 25 bp, Homo sapien
ctccatgaccctcaatcaagattat

SEQ ID NO: 2745787 - DNA, 25 bp, Homo sapien
gaccctcaatcaagattatcagctc

SEQ ID NO: 2745788 - DNA, 25 bp, Homo sapien
catgaccctcaatcaagattatcag

SEQ ID NO: 2745789 - DNA, 25 bp, Homo sapien
ttaggccaatgctgttccccgtgga

SEQ ID NO: 2745790 - DNA, 25 bp, Homo sapien
gaatcattcttcaccagccggtttg

SEQ ID NO: 2745791 - DNA, 25 bp, Homo sapien
tgttccccgtggaggacagagaagc

SEQ ID NO: 2745792 - DNA, 25 bp, Homo sapien
gcaagaaatgtcagcctctgtcccc

SEQ ID NO: 2745793 - DNA, 25 bp, Homo sapien
gcacatgaatggtgtgttctaaata

SEQ ID NO: 2745794 - DNA, 25 bp, Homo sapien
caggagcttaatgtgggcaggtatt

SEQ ID NO: 2745795 - DNA, 25 bp, Homo sapien
tggcacatgaatggtgtgttctaaa

SEQ ID NO: 2745796 - DNA, 25 bp, Homo sapien
gaacaggagcttaatgtgggcaggt

SEQ ID NO: 2745797 - DNA, 25 bp, Homo sapien
cacccgaaaagggatcaaactcaag

SEQ ID NO: 2745798 - DNA, 25 bp, Homo sapien
tacatcagtgttatattaaggcaaa

SEQ ID NO: 2745799 - DNA, 25 bp, Homo sapien
aacccacttcagaagcacaaagtta

SEQ ID NO: 2745800 - DNA, 25 bp, Homo sapien
cttataattccaagaaatatgtgaa

SEQ ID NO: 2745801 - DNA, 25 bp, Homo sapien
cagagaacagtctttttcttcgtac

SEQ ID NO: 2745802 - DNA, 25 bp, Homo sapien
acattttattgcaaaaagaagggca

SEQ ID NO: 2745803 - DNA, 25 bp, Homo sapien
tttgtaacattttattgcaaaaaga

SEQ ID NO: 2745804 - DNA, 25 bp, Homo sapien
aagaagggcagagaacagtcttttt

SEQ ID NO: 2745805 - DNA, 25 bp, Homo sapien
tctagtagcgagagggaattacgaa

SEQ ID NO: 2745806 - DNA, 25 bp, Homo sapien
tgaatcagcgtataggccacaaata

SEQ ID NO: 2745807 - DNA, 25 bp, Homo sapien
gagagggaattacgaaaacatgagc

SEQ ID NO: 2745808 - DNA, 25 bp, Homo sapien
caccactacacttgtttagtttttg

SEQ ID NO: 2745809 - DNA, 25 bp, Homo sapien
catccagtaggatgccaccaggcag

SEQ ID NO: 2745810 - DNA, 25 bp, Homo sapien
gaaacacggtgtactaaatcaggct

SEQ ID NO: 2745811 - DNA, 25 bp, Homo sapien
ggccacggtgaatgctcacatgtga

SEQ ID NO: 2745812 - DNA, 25 bp, Homo sapien
gaacagagtggctcggctgagacat

SEQ ID NO: 2745813 - DNA, 25 bp, Homo sapien
tttgcatcctgaagggcgggtggag

SEQ ID NO: 2745814 - DNA, 25 bp, Homo sapien
ctttatagaggagggctttgcatcc

SEQ ID NO: 2745815 - DNA, 25 bp, Homo sapien
catctggccccgcatgcactttata

SEQ ID NO: 2745816 - DNA, 25 bp, Homo sapien
gccccgcatgcactttatagaggag

SEQ ID NO: 2745817 - DNA, 25 bp, Homo sapien
gaagcagtattaacaatttgtccta

SEQ ID NO: 2745818 - DNA, 25 bp, Homo sapien
atctccaccatgaagcagtattaac

SEQ ID NO: 2745819 - DNA, 25 bp, Homo sapien
gctcggtgaggcactccaagcagta

SEQ ID NO: 2745820 - DNA, 25 bp, Homo sapien
tccaagcagtaacagcggtagccac

SEQ ID NO: 2745821 - DNA, 25 bp, Homo sapien
ctcacggcttcttggtccggagacc

SEQ ID NO: 2745822 - DNA, 25 bp, Homo sapien
gcaggctcacggcttcttggtccgg

SEQ ID NO: 2745823 - DNA, 25 bp, Homo sapien
cggcttcttggtccggagacccagt

SEQ ID NO: 2745824 - DNA, 25 bp, Homo sapien
agttatccactgtgaacagggcagg

SEQ ID NO: 2745825 - DNA, 25 bp, Homo sapien
tgctgaagctcggtgtctgatatca

SEQ ID NO: 2745826 - DNA, 25 bp, Homo sapien
agcttgctgaagctcggtgtctgat

SEQ ID NO: 2745827 - DNA, 25 bp, Homo sapien
tatcactccactcctgtctttatcg

SEQ ID NO: 2745828 - DNA, 25 bp, Homo sapien
tgaagctcggtgtctgatatcactc

SEQ ID NO: 2745829 - DNA, 25 bp, Homo sapien
agacgttccacaggaagctctggtc

SEQ ID NO: 2745830 - DNA, 25 bp, Homo sapien
gaagacgttccacaggaagctctgg

SEQ ID NO: 2745831 - DNA, 25 bp, Homo sapien
tccacaggaagctctggtcgggcag

SEQ ID NO: 2745832 - DNA, 25 bp, Homo sapien
ctctggaagacgttccacaggaagc

SEQ ID NO: 2745833 - DNA, 25 bp, Homo sapien
caaggcccgccgctgggctgaagcg

SEQ ID NO: 2745834 - DNA, 25 bp, Homo sapien
ggcgactggcgacccctcagagcga

SEQ ID NO: 2745835 - DNA, 25 bp, Homo sapien
ctcagagcgacaccgcttccgcctc

SEQ ID NO: 2745836 - DNA, 25 bp, Homo sapien
gctgaagcgcctgcggcgactggcg

SEQ ID NO: 2745837 - DNA, 25 bp, Homo sapien
ggatggagggtctggagcaatggcc

SEQ ID NO: 2745838 - DNA, 25 bp, Homo sapien
atctcctgccccgaaggttgatgag

SEQ ID NO: 2745839 - DNA, 25 bp, Homo sapien
atggcccagacagggtggaagttcc

SEQ ID NO: 2745840 - DNA, 25 bp, Homo sapien
tctcctgccccgaaggttgatgagg

SEQ ID NO: 2745841 - DNA, 25 bp, Homo sapien
tctgcatctgagctgcgtcctctgg

SEQ ID NO: 2745842 - DNA, 25 bp, Homo sapien
atctgagctgcgtcctctgggtggg

SEQ ID NO: 2745843 - DNA, 25 bp, Homo sapien
catctgagctgcgtcctctgggtgg

SEQ ID NO: 2745844 - DNA, 25 bp, Homo sapien
tgcatctgagctgcgtcctctgggt

SEQ ID NO: 2745845 - DNA, 25 bp, Homo sapien
agctctgggtactagggcgccgggc

SEQ ID NO: 2745846 - DNA, 25 bp, Homo sapien
ggatgactgaaaacaggccctgtct

SEQ ID NO: 2745847 - DNA, 25 bp, Homo sapien
gcgcgggaactaacgggctgagtct

SEQ ID NO: 2745848 - DNA, 25 bp, Homo sapien
tgtcttcggtttaggctcaggcgga

SEQ ID NO: 2745849 - DNA, 25 bp, Homo sapien
tctacaggtcagtgggcgatcaaca

SEQ ID NO: 2745850 - DNA, 25 bp, Homo sapien
gatcaacagctggacgcgtagcagg

SEQ ID NO: 2745851 - DNA, 25 bp, Homo sapien
tcagtgggcgatcaacagctggacg

SEQ ID NO: 2745852 - DNA, 25 bp, Homo sapien
aggtcttctacaggtcagtgggcga

SEQ ID NO: 2745853 - DNA, 25 bp, Homo sapien
gatgcggtcgtctacttgctgggca

SEQ ID NO: 2745854 - DNA, 25 bp, Homo sapien
tagtttccacccgtggctgtgagga

SEQ ID NO: 2745855 - DNA, 25 bp, Homo sapien
attgagtagtttccacccgtggctg

SEQ ID NO: 2745856 - DNA, 25 bp, Homo sapien
agggtgtcagctctgcaatgcattg

SEQ ID NO: 2745857 - DNA, 25 bp, Homo sapien
agaaactggaagacgctgtgcggct

SEQ ID NO: 2745858 - DNA, 25 bp, Homo sapien
aaagacaatgtccttgcaaggagga

SEQ ID NO: 2745859 - DNA, 25 bp, Homo sapien
tgtggaaactccttcgaagaaggct

SEQ ID NO: 2745860 - DNA, 25 bp, Homo sapien
gactctgcgagtggaaccagctgct

SEQ ID NO: 2745861 - DNA, 25 bp, Homo sapien
cctgggtcgtgtcaacgaagttcat

SEQ ID NO: 2745862 - DNA, 25 bp, Homo sapien
caaaggcgtccctcctcggcagggt

SEQ ID NO: 2745863 - DNA, 25 bp, Homo sapien
tgctcctgggtcgtgtcaacgaagt

SEQ ID NO: 2745864 - DNA, 25 bp, Homo sapien
ggtcgtgctcctgggtcgtgtcaac

SEQ ID NO: 2745865 - DNA, 25 bp, Homo sapien
aagtccaggtgataatgtagaggtc

SEQ ID NO: 2745866 - DNA, 25 bp, Homo sapien
cagtccaggcgagaatgtgaaggtt

SEQ ID NO: 2745867 - DNA, 25 bp, Homo sapien
cagggaggtccaagtgagaacgtgg

SEQ ID NO: 2745868 - DNA, 25 bp, Homo sapien
caagtgaggatgcaaaaggacgggt

SEQ ID NO: 2745869 - DNA, 25 bp, Homo sapien
aaatccattgtcatcaggtacataa

SEQ ID NO: 2745870 - DNA, 25 bp, Homo sapien
catcaggtacataattaattgtaac

SEQ ID NO: 2745871 - DNA, 25 bp, Homo sapien
tgagacattcatgacacgtttccat

SEQ ID NO: 2745872 - DNA, 25 bp, Homo sapien
tcacacattgagacattcatgacac

SEQ ID NO: 2745873 - DNA, 25 bp, Homo sapien
cgtggcttgaggcgagcagcaggcg

SEQ ID NO: 2745874 - DNA, 25 bp, Homo sapien
aggccggggagggacacacaaggct

SEQ ID NO: 2745875 - DNA, 25 bp, Homo sapien
tacttcagtgccgtgaaccacccgt

SEQ ID NO: 2745876 - DNA, 25 bp, Homo sapien
ggtgtatcagttgatcttatgaatc

SEQ ID NO: 2745877 - DNA, 25 bp, Homo sapien
gaaccacccgttctgtgctaatatt

SEQ ID NO: 2745878 - DNA, 25 bp, Homo sapien
tgggcacaaaggtgtatcagttgat

SEQ ID NO: 2745879 - DNA, 25 bp, Homo sapien
actctccgggaaccagcaagtgaca

SEQ ID NO: 2745880 - DNA, 25 bp, Homo sapien
ctgctggctccctactctccgggaa

SEQ ID NO: 2745881 - DNA, 25 bp, Homo sapien
tccgggaaccagcaagtgacagcag

SEQ ID NO: 2745882 - DNA, 25 bp, Homo sapien
cctactctccgggaaccagcaagtg

SEQ ID NO: 2745883 - DNA, 25 bp, Homo sapien
atggcccaggaagcttccagtggct

SEQ ID NO: 2745884 - DNA, 25 bp, Homo sapien
ccagtggctctggttcctgggccat

SEQ ID NO: 2745885 - DNA, 25 bp, Homo sapien
tccagtggctctggttcctgggcca

SEQ ID NO: 2745886 - DNA, 25 bp, Homo sapien
agcagtccaacaggcatggcccagg

SEQ ID NO: 2745887 - DNA, 25 bp, Homo sapien
gaaatgcagccggttccatttagaa

SEQ ID NO: 2745888 - DNA, 25 bp, Homo sapien
gggcggccggctccggatctcagac

SEQ ID NO: 2745889 - DNA, 25 bp, Homo sapien
gcggaccgcgcgctgaaatgcagcc

SEQ ID NO: 2745890 - DNA, 25 bp, Homo sapien
agcagagcgaggaggacgccgcgga

SEQ ID NO: 2745891 - DNA, 25 bp, Homo sapien
aaggaagagagtggacaaatttatt

SEQ ID NO: 2745892 - DNA, 25 bp, Homo sapien
gagagtggacaaatttatttgatgg

SEQ ID NO: 2745893 - DNA, 25 bp, Homo sapien
atggtttgataaccagggacactgg

SEQ ID NO: 2745894 - DNA, 25 bp, Homo sapien
tggtttgataaccagggacactggt

SEQ ID NO: 2745895 - DNA, 25 bp, Homo sapien
cagggtcctgatagacaactctgga

SEQ ID NO: 2745896 - DNA, 25 bp, Homo sapien
gctgcggtcaatgcacagttggtcc

SEQ ID NO: 2745897 - DNA, 25 bp, Homo sapien
gtctccttgtcatgagctgcggtca

SEQ ID NO: 2745898 - DNA, 25 bp, Homo sapien
cttccttgggaacatatagctgaca

SEQ ID NO: 2745899 - DNA, 25 bp, Homo sapien
tgtaagcactgttaactgaacgcat

SEQ ID NO: 2745900 - DNA, 25 bp, Homo sapien
gatagtgcaagtatcctatatgaca

SEQ ID NO: 2745901 - DNA, 25 bp, Homo sapien
gtaataacactatagcactttgcag

SEQ ID NO: 2745902 - DNA, 25 bp, Homo sapien
tggcatcactgcgttcttcctgctt

SEQ ID NO: 2745903 - DNA, 25 bp, Homo sapien
attatcctggctagatcttatcaat

SEQ ID NO: 2745904 - DNA, 25 bp, Homo sapien
tctttcaatgaattggtctatttcc

SEQ ID NO: 2745905 - DNA, 25 bp, Homo sapien
catcttctggcagatattgtagaga

SEQ ID NO: 2745906 - DNA, 25 bp, Homo sapien
tactatagacctgatagtctatttc

SEQ ID NO: 2745907 - DNA, 25 bp, Homo sapien
agtatgatatgaataggtgtctctt

SEQ ID NO: 2745908 - DNA, 25 bp, Homo sapien
catatcctcatgctgaaagattctt

SEQ ID NO: 2745909 - DNA, 25 bp, Homo sapien
tctttcctccgttgtgtccagtcta

SEQ ID NO: 2745910 - DNA, 25 bp, Homo sapien
atgtttttgccagaatttctacctc

SEQ ID NO: 2745911 - DNA, 25 bp, Homo sapien
cacgttgattctggaagccgctgac

SEQ ID NO: 2745912 - DNA, 25 bp, Homo sapien
ccgctgacagtggaggcagtattct

SEQ ID NO: 2745913 - DNA, 25 bp, Homo sapien
aagtcccaggaatggttcgtcagca

SEQ ID NO: 2745914 - DNA, 25 bp, Homo sapien
tagtaaacaagctgactccacgttg

SEQ ID NO: 2745915 - DNA, 25 bp, Homo sapien
gaagctcagctcaggacgatggcca

SEQ ID NO: 2745916 - DNA, 25 bp, Homo sapien
ggacgatggccacgagagccacttt

SEQ ID NO: 2745917 - DNA, 25 bp, Homo sapien
tcgcagctgacccattgtccttggc

SEQ ID NO: 2745918 - DNA, 25 bp, Homo sapien
tggcaccggttcaggaagaagctca

SEQ ID NO: 2745919 - DNA, 25 bp, Homo sapien
tgacatgaggaaccccccaagcagg

SEQ ID NO: 2745920 - DNA, 25 bp, Homo sapien
tggggggcactgacatgaggaaccc

SEQ ID NO: 2745921 - DNA, 25 bp, Homo sapien
gggcactgacatgaggaacccccca

SEQ ID NO: 2745922 - DNA, 25 bp, Homo sapien
gcactgacatgaggaaccccccaag

SEQ ID NO: 2745923 - DNA, 25 bp, Homo sapien
tcatggtgcgcgtctcctcgttctt

SEQ ID NO: 2745924 - DNA, 25 bp, Homo sapien
ctggagctggcatatcgtgcggata

SEQ ID NO: 2745925 - DNA, 25 bp, Homo sapien
cccacgctcactaatgcctagatag

SEQ ID NO: 2745926 - DNA, 25 bp, Homo sapien
ccgcatttccgtgtcgcatgatcca

SEQ ID NO: 2745927 - DNA, 25 bp, Homo sapien
catggctgtgaaggaccctcgtcac

SEQ ID NO: 2745928 - DNA, 25 bp, Homo sapien
cccacacggctgcttttaggccagg

SEQ ID NO: 2745929 - DNA, 25 bp, Homo sapien
tggtgctcctttaactcgcccggtg

SEQ ID NO: 2745930 - DNA, 25 bp, Homo sapien
atctgagatcctacactcagccggg

SEQ ID NO: 2745931 - DNA, 25 bp, Homo sapien
cacagcggaagtcggtctctctcat

SEQ ID NO: 2745932 - DNA, 25 bp, Homo sapien
caaaacgtaattcatattgcataag

SEQ ID NO: 2745933 - DNA, 25 bp, Homo sapien
tcagcacgaataacaaatggagggt

SEQ ID NO: 2745934 - DNA, 25 bp, Homo sapien
gggttagtgaagtatttatgctctg

SEQ ID NO: 2745935 - DNA, 25 bp, Homo sapien
tcatattgcataagttccgaagcgt

SEQ ID NO: 2745936 - DNA, 25 bp, Homo sapien
gggagtgcggtactttgggcacaga

SEQ ID NO: 2745937 - DNA, 25 bp, Homo sapien
cccacggctgcagccgaaaagagcc

SEQ ID NO: 2745938 - DNA, 25 bp, Homo sapien
ggcacagacgcagccagacttggct

SEQ ID NO: 2745939 - DNA, 25 bp, Homo sapien
gagccctgcttcttctatgtggggg

SEQ ID NO: 2745940 - DNA, 25 bp, Homo sapien
ctagcaggaggatgtgtctgagata

SEQ ID NO: 2745941 - DNA, 25 bp, Homo sapien
gagatataaacagcggatgaagggc

SEQ ID NO: 2745942 - DNA, 25 bp, Homo sapien
caggaggatgtgtctgagatataaa

SEQ ID NO: 2745943 - DNA, 25 bp, Homo sapien
tctgagatataaacagcggatgaag

SEQ ID NO: 2745944 - DNA, 25 bp, Homo sapien
tggatttctcgggctcaggatggca

SEQ ID NO: 2745945 - DNA, 25 bp, Homo sapien
ttccccgagcattcggcagcagctg

SEQ ID NO: 2745946 - DNA, 25 bp, Homo sapien
gatggcaagtgtggctactaaagtg

SEQ ID NO: 2745947 - DNA, 25 bp, Homo sapien
gccagtggggtgttccccgagcatt

SEQ ID NO: 2745948 - DNA, 25 bp, Homo sapien
tcgacgcgtcatagcacctagaact

SEQ ID NO: 2745949 - DNA, 25 bp, Homo sapien
gcacctagaactggccctggcgagg

SEQ ID NO: 2745950 - DNA, 25 bp, Homo sapien
tgctgctggatgtgcagtcctgtga

SEQ ID NO: 2745951 - DNA, 25 bp, Homo sapien
gctttgtttggctctcgacgcgtca

SEQ ID NO: 2745952 - DNA, 25 bp, Homo sapien
gcaacattggtggagctttctctat

SEQ ID NO: 2745953 - DNA, 25 bp, Homo sapien
acggccagggttcggcacagcagtc

SEQ ID NO: 2745954 - DNA, 25 bp, Homo sapien
ggagctttctctattcacggccagg

SEQ ID NO: 2745955 - DNA, 25 bp, Homo sapien
ccgccatcgtatggactcagcaaca

SEQ ID NO: 2745956 - DNA, 25 bp, Homo sapien
ttgttctggactcccagatcgaccc

SEQ ID NO: 2745957 - DNA, 25 bp, Homo sapien
ctgcgtatcttgttctggactccca

SEQ ID NO: 2745958 - DNA, 25 bp, Homo sapien
aaagctgcctgtcctcctcccgttt

SEQ ID NO: 2745959 - DNA, 25 bp, Homo sapien
agatcgacccctcagaaaagctgcc

SEQ ID NO: 2745960 - DNA, 25 bp, Homo sapien
gaatccgggcggaaagcctccatgt

SEQ ID NO: 2745961 - DNA, 25 bp, Homo sapien
tagagtgagcgaagctgctgtccgt

SEQ ID NO: 2745962 - DNA, 25 bp, Homo sapien
ggacaaagctcgtcccttggcaccg

SEQ ID NO: 2745963 - DNA, 25 bp, Homo sapien
gggaggcagccgctcgtcgcctctt

SEQ ID NO: 2745964 - DNA, 25 bp, Homo sapien
ccagacaggatcaggaacgagggaa

SEQ ID NO: 2745965 - DNA, 25 bp, Homo sapien
ttcagggtcaactcagatgtgtgga

SEQ ID NO: 2745966 - DNA, 25 bp, Homo sapien
ctttgggcatcaaggctgaatccga

SEQ ID NO: 2745967 - DNA, 25 bp, Homo sapien
tgcactggcattgttgctttgggca

SEQ ID NO: 2745968 - DNA, 25 bp, Homo sapien
cagcgtggcgtccaggcggagtgga

SEQ ID NO: 2745969 - DNA, 25 bp, Homo sapien
tgagctcacagacaccctcgttgtc

SEQ ID NO: 2745970 - DNA, 25 bp, Homo sapien
tgctggcggggggatgagctcacag

SEQ ID NO: 2745971 - DNA, 25 bp, Homo sapien
acagacaccctcgttgtcatggagg

SEQ ID NO: 2745972 - DNA, 25 bp, Homo sapien
gcaagcactggtggcagaaaacctg

SEQ ID NO: 2745973 - DNA, 25 bp, Homo sapien
gtgacagcaagcactggtggcagaa

SEQ ID NO: 2745974 - DNA, 25 bp, Homo sapien
ctcgccgggtggtgcctgtgtggca

SEQ ID NO: 2745975 - DNA, 25 bp, Homo sapien
cagcagcagccgctgtgacagcaag

SEQ ID NO: 2745976 - DNA, 25 bp, Homo sapien
tgtccatacctgctgccctggtgcg

SEQ ID NO: 2745977 - DNA, 25 bp, Homo sapien
gtccatacctgctgccctggtgcga

SEQ ID NO: 2745978 - DNA, 25 bp, Homo sapien
ctgtccatacctgctgccctggtgc

SEQ ID NO: 2745979 - DNA, 25 bp, Homo sapien
gccccggtggcaaacgcttgtggat

SEQ ID NO: 2745980 - DNA, 25 bp, Homo sapien
aatgcttacgtgcagaaggaagctc

SEQ ID NO: 2745981 - DNA, 25 bp, Homo sapien
gtctcccaacaatgcttacgtgcag

SEQ ID NO: 2745982 - DNA, 25 bp, Homo sapien
ctccatcaggaagccgcccttcaca

SEQ ID NO: 2745983 - DNA, 25 bp, Homo sapien
cagacacagccggattgttacaggt

SEQ ID NO: 2745984 - DNA, 25 bp, Homo sapien
gaaactcacattggcaggaatctct

SEQ ID NO: 2745985 - DNA, 25 bp, Homo sapien
gatcggccaaatctcagtgataggc

SEQ ID NO: 2745986 - DNA, 25 bp, Homo sapien
ttgggtcttccgacagtgcctcgct

SEQ ID NO: 2745987 - DNA, 25 bp, Homo sapien
cttgttcagcagtggtcagatggtg

SEQ ID NO: 2745988 - DNA, 25 bp, Homo sapien
gtcaagccaccctaaggcaggactt

SEQ ID NO: 2745989 - DNA, 25 bp, Homo sapien
tccgggtctggccactgaatggtcc

SEQ ID NO: 2745990 - DNA, 25 bp, Homo sapien
aatgaccttgcatgttgttcccagg

SEQ ID NO: 2745991 - DNA, 25 bp, Homo sapien
ggttcctgccgtctgttccacacat

SEQ ID NO: 2745992 - DNA, 25 bp, Homo sapien
ttccacacatggggccggatgaccc

SEQ ID NO: 2745993 - DNA, 25 bp, Homo sapien
gttttactgcaagtcctatgagaag

SEQ ID NO: 2745994 - DNA, 25 bp, Homo sapien
agagcaccagaaccgacggatccag

SEQ ID NO: 2745995 - DNA, 25 bp, Homo sapien
aaggttcaaaggttctggccacaga

SEQ ID NO: 2745996 - DNA, 25 bp, Homo sapien
gttcttcgtaagcaagttttactgc

SEQ ID NO: 2745997 - DNA, 25 bp, Homo sapien
ttcagaaaatgaaggatgcagccac

SEQ ID NO: 2745998 - DNA, 25 bp, Homo sapien
ctaaaccatcttcagaaaatgaagg

SEQ ID NO: 2745999 - DNA, 25 bp, Homo sapien
accatcttcagaaaatgaaggatgc

SEQ ID NO: 2746000 - DNA, 25 bp, Homo sapien
catatcctaaaccatcttcagaaaa

SEQ ID NO: 2746001 - DNA, 25 bp, Homo sapien
gaaaaagagaatgaacgcagcagcc

SEQ ID NO: 2746002 - DNA, 25 bp, Homo sapien
caaagtttcagcttggccgtcatcc

SEQ ID NO: 2746003 - DNA, 25 bp, Homo sapien
tgcgtactgcagaaacacacccagt

SEQ ID NO: 2746004 - DNA, 25 bp, Homo sapien
gactgtgtgcccacgtttgcatggc

SEQ ID NO: 2746005 - DNA, 25 bp, Homo sapien
tattctggactgaagcctggatagg

SEQ ID NO: 2746006 - DNA, 25 bp, Homo sapien
cttggcttgtacagcgacgggtgac

SEQ ID NO: 2746007 - DNA, 25 bp, Homo sapien
tacgtacagcctgaggagcactgag

SEQ ID NO: 2746008 - DNA, 25 bp, Homo sapien
taagcagcctcacggagacatagag

SEQ ID NO: 2746009 - DNA, 25 bp, Homo sapien
gacactctcgggaagctcactgtgg

SEQ ID NO: 2746010 - DNA, 25 bp, Homo sapien
tccataagatacaaccattctccca

SEQ ID NO: 2746011 - DNA, 25 bp, Homo sapien
tacactgaaacgtgatgggtaactt

SEQ ID NO: 2746012 - DNA, 25 bp, Homo sapien
tgacgagtatgtgcgtgactctgga

SEQ ID NO: 2746013 - DNA, 25 bp, Homo sapien
ttcccctgactccttgatgtgataa

SEQ ID NO: 2746014 - DNA, 25 bp, Homo sapien
ccaggtaacagtccttgcagcgctt

SEQ ID NO: 2746015 - DNA, 25 bp, Homo sapien
tcttaaggacagtcttgtttttgaa

SEQ ID NO: 2746016 - DNA, 25 bp, Homo sapien
gatgggttttacagtagacgtacca

SEQ ID NO: 2746017 - DNA, 25 bp, Homo sapien
ctctgcttgtgcctcggatgggttt

SEQ ID NO: 2746018 - DNA, 25 bp, Homo sapien
cacttggctgggagggagcttaaac

SEQ ID NO: 2746019 - DNA, 25 bp, Homo sapien
caaacagacaccaggtcaaggacgg

SEQ ID NO: 2746020 - DNA, 25 bp, Homo sapien
tgtgcaaagccctgcgatgttgagg

SEQ ID NO: 2746021 - DNA, 25 bp, Homo sapien
caaggacggttcaactgatgagctc

SEQ ID NO: 2746022 - DNA, 25 bp, Homo sapien
gcgccgacccctgcgtctgcgcact

SEQ ID NO: 2746023 - DNA, 25 bp, Homo sapien
actggcacgcggacgctgctgccag

SEQ ID NO: 2746024 - DNA, 25 bp, Homo sapien
gccgcacgctctcacccggcgccga

SEQ ID NO: 2746025 - DNA, 25 bp, Homo sapien
tgcgtctgcgcactggcacgcggac

SEQ ID NO: 2746026 - DNA, 25 bp, Homo sapien
tgtttggagcgctctcgggaaaaaa

SEQ ID NO: 2746027 - DNA, 25 bp, Homo sapien
gaacgaaaatggatatccgcaacga

SEQ ID NO: 2746028 - DNA, 25 bp, Homo sapien
caccgggatcgtcgtgctgtttgga

SEQ ID NO: 2746029 - DNA, 25 bp, Homo sapien
caggcgctggagtgcgacgtatcac

SEQ ID NO: 2746030 - DNA, 25 bp, Homo sapien
gaaggtttcgcacaccattgcctgc

SEQ ID NO: 2746031 - DNA, 25 bp, Homo sapien
caatatacgtttcctctgcggctcc

SEQ ID NO: 2746032 - DNA, 25 bp, Homo sapien
cactgggtactcctaatcgctgaag

SEQ ID NO: 2746033 - DNA, 25 bp, Homo sapien
gaacgcttgccttgaacgaggagaa

SEQ ID NO: 2746034 - DNA, 25 bp, Homo sapien
ttgatagcagagcagcccgtgagcg

SEQ ID NO: 2746035 - DNA, 25 bp, Homo sapien
cgggtgatagcgtgcgatggcggcg

SEQ ID NO: 2746036 - DNA, 25 bp, Homo sapien
ggcgggggagctcttggccacccaa

SEQ ID NO: 2746037 - DNA, 25 bp, Homo sapien
gagcgaggtggagactcgggtgata

SEQ ID NO: 2746038 - DNA, 25 bp, Homo sapien
ccggcacatgcggttactgtgggct

SEQ ID NO: 2746039 - DNA, 25 bp, Homo sapien
ggcacatgcggttactgtgggctcc

SEQ ID NO: 2746040 - DNA, 25 bp, Homo sapien
cggcacatgcggttactgtgggctc

SEQ ID NO: 2746041 - DNA, 25 bp, Homo sapien
tgagtctagagatgccaccatgggc

SEQ ID NO: 2746042 - DNA, 25 bp, Homo sapien
cacagggtcccaatgctgaggctca

SEQ ID NO: 2746043 - DNA, 25 bp, Homo sapien
ggatttgctcacaaacgctctggag

SEQ ID NO: 2746044 - DNA, 25 bp, Homo sapien
tgctttattcacacccggatgggag

SEQ ID NO: 2746045 - DNA, 25 bp, Homo sapien
caagttgtcttcttcaatccgtggg

SEQ ID NO: 2746046 - DNA, 25 bp, Homo sapien
aatgctctacttaagtttcctcctg

SEQ ID NO: 2746047 - DNA, 25 bp, Homo sapien
tcctcctgttatttacaagttgtct

SEQ ID NO: 2746048 - DNA, 25 bp, Homo sapien
tcttgcatatttctcgtcatcattt

SEQ ID NO: 2746049 - DNA, 25 bp, Homo sapien
cactttcaaggactgcgtgccggcc

SEQ ID NO: 2746050 - DNA, 25 bp, Homo sapien
aggcagcaggtgacgatgacagcct

SEQ ID NO: 2746051 - DNA, 25 bp, Homo sapien
ggcctgatgactctccccgttctta

SEQ ID NO: 2746052 - DNA, 25 bp, Homo sapien
ttaccctaagaagaggcggcgggca

SEQ ID NO: 2746053 - DNA, 25 bp, Homo sapien
caccggctgctcgtgtgagaatcat

SEQ ID NO: 2746054 - DNA, 25 bp, Homo sapien
gcaaactatgagctctgctaatcca

SEQ ID NO: 2746055 - DNA, 25 bp, Homo sapien
tgctaatccagtcactcgagtctgt

SEQ ID NO: 2746056 - DNA, 25 bp, Homo sapien
gttcacaaaggcgccgcaaactatg

SEQ ID NO: 2746057 - DNA, 25 bp, Homo sapien
attctgtggcttataaagtcgtttg

SEQ ID NO: 2746058 - DNA, 25 bp, Homo sapien
tatacacaatggaagggtgaggaaa

SEQ ID NO: 2746059 - DNA, 25 bp, Homo sapien
gggtttggatcagaaaaattctgtg

SEQ ID NO: 2746060 - DNA, 25 bp, Homo sapien
aaaaggtcagcaataactctgcgac

SEQ ID NO: 2746061 - DNA, 25 bp, Homo sapien
tcggtgccacgtgaattagtgatgt

SEQ ID NO: 2746062 - DNA, 25 bp, Homo sapien
gccacgtgaattagtgatgtgactt

SEQ ID NO: 2746063 - DNA, 25 bp, Homo sapien
tcctcattcggtgccacgtgaatta

SEQ ID NO: 2746064 - DNA, 25 bp, Homo sapien
ctgcttcctcattcggtgccacgtg

SEQ ID NO: 2746065 - DNA, 25 bp, Homo sapien
cggtctccacgtatgcagaggcaca

SEQ ID NO: 2746066 - DNA, 25 bp, Homo sapien
agaggcacagccgagccacacaccc

SEQ ID NO: 2746067 - DNA, 25 bp, Homo sapien
cctggacggtctccacgtatgcaga

SEQ ID NO: 2746068 - DNA, 25 bp, Homo sapien
gggcctggacggtctccacgtatgc

SEQ ID NO: 2746069 - DNA, 25 bp, Homo sapien
ccagtgaatcaagaaacgtgtttgc

SEQ ID NO: 2746070 - DNA, 25 bp, Homo sapien
ggcaattccagtgaatcaagaaacg

SEQ ID NO: 2746071 - DNA, 25 bp, Homo sapien
acgtgtttgctatttgcacgtcaaa

SEQ ID NO: 2746072 - DNA, 25 bp, Homo sapien
aggaaaaggcggcaattccagtgaa

SEQ ID NO: 2746073 - DNA, 25 bp, Homo sapien
tgggtggtgacaggttcccctcgcc

SEQ ID NO: 2746074 - DNA, 25 bp, Homo sapien
cagcgtgcagtggccatctggcatg

SEQ ID NO: 2746075 - DNA, 25 bp, Homo sapien
cctcatggcccacgctcaggatggg

SEQ ID NO: 2746076 - DNA, 25 bp, Homo sapien
tctggcatgtcccagaggctcccgg

SEQ ID NO: 2746077 - DNA, 25 bp, Homo sapien
gaaagatcagaaagcaacgtcgtct

SEQ ID NO: 2746078 - DNA, 25 bp, Homo sapien
gaattaggaatatcacttggcccac

SEQ ID NO: 2746079 - DNA, 25 bp, Homo sapien
tcctggattctcaggaggagcaggt

SEQ ID NO: 2746080 - DNA, 25 bp, Homo sapien
caagcgcgttggtggtaaacggagc

SEQ ID NO: 2746081 - DNA, 25 bp, Homo sapien
tgccactgcgcctgggagtccattc

SEQ ID NO: 2746082 - DNA, 25 bp, Homo sapien
aagctgaaatgttagacgcggaggg

SEQ ID NO: 2746083 - DNA, 25 bp, Homo sapien
tgcgcctgggagtccattcccaggt

SEQ ID NO: 2746084 - DNA, 25 bp, Homo sapien
atgttagacgcggagggctggcttc

SEQ ID NO: 2746085 - DNA, 25 bp, Homo sapien
ggacgatttctctccgaccgaagga

SEQ ID NO: 2746086 - DNA, 25 bp, Homo sapien
gcagggtttggggacgatttctctc

SEQ ID NO: 2746087 - DNA, 25 bp, Homo sapien
taatggggccatcacgtaggcaagg

SEQ ID NO: 2746088 - DNA, 25 bp, Homo sapien
tctctccgaccgaaggagtaatggg

SEQ ID NO: 2746089 - DNA, 25 bp, Homo sapien
tggaatgggactcgctgacgaaagc

SEQ ID NO: 2746090 - DNA, 25 bp, Homo sapien
gaatgggactcgctgacgaaagccc

SEQ ID NO: 2746091 - DNA, 25 bp, Homo sapien
tgggactcgctgacgaaagcccact

SEQ ID NO: 2746092 - DNA, 25 bp, Homo sapien
tgtggaatgggactcgctgacgaaa

SEQ ID NO: 2746093 - DNA, 25 bp, Homo sapien
ggcggatgcgtctgcctgctctgtc

SEQ ID NO: 2746094 - DNA, 25 bp, Homo sapien
tctgagagcagctgccgggatggga

SEQ ID NO: 2746095 - DNA, 25 bp, Homo sapien
tgttcccaccaggacgtgccggaaa

SEQ ID NO: 2746096 - DNA, 25 bp, Homo sapien
aggctcttgctctgtgggaaaatca

SEQ ID NO: 2746097 - DNA, 25 bp, Homo sapien
tggcgccgtgactgcattcctgtct

SEQ ID NO: 2746098 - DNA, 25 bp, Homo sapien
cattgctggtcactcacacgaagcc

SEQ ID NO: 2746099 - DNA, 25 bp, Homo sapien
tcaagagaccaacacaagggtcttc

SEQ ID NO: 2746100 - DNA, 25 bp, Homo sapien
tttgaggccggcgtttcccaccatg

SEQ ID NO: 2746101 - DNA, 25 bp, Homo sapien
aaagtccactcggaagaaggtcaag

SEQ ID NO: 2746102 - DNA, 25 bp, Homo sapien
tcagggttatgcatcggcatgcttc

SEQ ID NO: 2746103 - DNA, 25 bp, Homo sapien
tcaagtgggtgacctgagagaccaa

SEQ ID NO: 2746104 - DNA, 25 bp, Homo sapien
caagtgtgcggcttggcctctcaac

SEQ ID NO: 2746105 - DNA, 25 bp, Homo sapien
tgaccacacaccaatctggtgctca

SEQ ID NO: 2746106 - DNA, 25 bp, Homo sapien
gaccacacaccaatctggtgctcag

SEQ ID NO: 2746107 - DNA, 25 bp, Homo sapien
tctgaccacacaccaatctggtgct

SEQ ID NO: 2746108 - DNA, 25 bp, Homo sapien
accacacaccaatctggtgctcagg

SEQ ID NO: 2746109 - DNA, 25 bp, Homo sapien
atctgcagtgccaccccgctcacca

SEQ ID NO: 2746110 - DNA, 25 bp, Homo sapien
aagactcaagcctggggccatctgc

SEQ ID NO: 2746111 - DNA, 25 bp, Homo sapien
ggccatctgcagtgccaccccgctc

SEQ ID NO: 2746112 - DNA, 25 bp, Homo sapien
ctgacccccaagactcaagcctggg

SEQ ID NO: 2746113 - DNA, 25 bp, Homo sapien
ctcagtgaaaagagtcggcgccgtc

SEQ ID NO: 2746114 - DNA, 25 bp, Homo sapien
gagtcaagagtgtgcaagagtcaac

SEQ ID NO: 2746115 - DNA, 25 bp, Homo sapien
ggccgcgctagtcttcctctggaaa

SEQ ID NO: 2746116 - DNA, 25 bp, Homo sapien
caaatttgggaatggcccggtcagg

SEQ ID NO: 2746117 - DNA, 25 bp, Homo sapien
gggtgcagtcagcacgttcgcgccc

SEQ ID NO: 2746118 - DNA, 25 bp, Homo sapien
ccagtttctgagactggttaccggg

SEQ ID NO: 2746119 - DNA, 25 bp, Homo sapien
tggttcaaagtgctgtgcctgagga

SEQ ID NO: 2746120 - DNA, 25 bp, Homo sapien
gcgcagaagggtttgccgccggcct

SEQ ID NO: 2746121 - DNA, 25 bp, Homo sapien
cgcttgagcatgcacgacggaaact

SEQ ID NO: 2746122 - DNA, 25 bp, Homo sapien
catgcacgacggaaactcagtctgg

SEQ ID NO: 2746123 - DNA, 25 bp, Homo sapien
gaccttggcgcttgagcatgcacga

SEQ ID NO: 2746124 - DNA, 25 bp, Homo sapien
ccgcgggaccttggcgcttgagcat

SEQ ID NO: 2746125 - DNA, 25 bp, Homo sapien
agatgcgcggcttagcctccaggcc

SEQ ID NO: 2746126 - DNA, 25 bp, Homo sapien
tgcgcggcttagcctccaggcctgc

SEQ ID NO: 2746127 - DNA, 25 bp, Homo sapien
atgcgcggcttagcctccaggcctg

SEQ ID NO: 2746128 - DNA, 25 bp, Homo sapien
cagatgcgcggcttagcctccaggc

SEQ ID NO: 2746129 - DNA, 25 bp, Homo sapien
gaagtcgtccaagtcactaagctcc

SEQ ID NO: 2746130 - DNA, 25 bp, Homo sapien
ccagaccgccgtccagggagtggaa

SEQ ID NO: 2746131 - DNA, 25 bp, Homo sapien
tgaggcctccttgaccgggccgtcg

SEQ ID NO: 2746132 - DNA, 25 bp, Homo sapien
tgcttccagcgggtcgaagtcgtcc

SEQ ID NO: 2746133 - DNA, 25 bp, Homo sapien
gtagcctgaggcagaaccggtttgc

SEQ ID NO: 2746134 - DNA, 25 bp, Homo sapien
tttgcacggtgaccgcctaggcatg

SEQ ID NO: 2746135 - DNA, 25 bp, Homo sapien
cggtttgcacggtgaccgcctaggc

SEQ ID NO: 2746136 - DNA, 25 bp, Homo sapien
ggcagaaccggtttgcacggtgacc

SEQ ID NO: 2746137 - DNA, 25 bp, Homo sapien
tcgccctccgcgtagggccgcttct

SEQ ID NO: 2746138 - DNA, 25 bp, Homo sapien
ctcgccctccgcgtagggccgcttc

SEQ ID NO: 2746139 - DNA, 25 bp, Homo sapien
gccctccgcgtagggccgcttctcg

SEQ ID NO: 2746140 - DNA, 25 bp, Homo sapien
ctcctcgccctccgcgtagggccgc

SEQ ID NO: 2746141 - DNA, 25 bp, Homo sapien
gcgtgccgctgtccatggttccata

SEQ ID NO: 2746142 - DNA, 25 bp, Homo sapien
cgtggcgttcttgcgccgcgtgccg

SEQ ID NO: 2746143 - DNA, 25 bp, Homo sapien
gttcttgcggtgctcctgcagccag

SEQ ID NO: 2746144 - DNA, 25 bp, Homo sapien
gcggcggccacgtcatcttgttctc

SEQ ID NO: 2746145 - DNA, 25 bp, Homo sapien
tcgtaagggtagtaggcggcagcgg

SEQ ID NO: 2746146 - DNA, 25 bp, Homo sapien
gtaagggtagtaggcggcagcggct

SEQ ID NO: 2746147 - DNA, 25 bp, Homo sapien
agatcccgaaccatccttggaatca

SEQ ID NO: 2746148 - DNA, 25 bp, Homo sapien
tgcgcagatcccgaaccatccttgg

SEQ ID NO: 2746149 - DNA, 25 bp, Homo sapien
cggactcgcagcacgtgctcaggga

SEQ ID NO: 2746150 - DNA, 25 bp, Homo sapien
taggtcacgtagttgccatagccct

SEQ ID NO: 2746151 - DNA, 25 bp, Homo sapien
gccggctctcgtagaccgggcagta

SEQ ID NO: 2746152 - DNA, 25 bp, Homo sapien
atagccctgcgatccgccataggga

SEQ ID NO: 2746153 - DNA, 25 bp, Homo sapien
ctggggagccgaggagtaggggtat

SEQ ID NO: 2746154 - DNA, 25 bp, Homo sapien
gagccgaggagtaggggtatccaaa

SEQ ID NO: 2746155 - DNA, 25 bp, Homo sapien
gggagccgaggagtaggggtatcca

SEQ ID NO: 2746156 - DNA, 25 bp, Homo sapien
tggggagccgaggagtaggggtatc

SEQ ID NO: 2746157 - DNA, 25 bp, Homo sapien
agctgcaggcttctaggcgctggga

SEQ ID NO: 2746158 - DNA, 25 bp, Homo sapien
gcgtggcgcggccactgctccggag

SEQ ID NO: 2746159 - DNA, 25 bp, Homo sapien
tccggagctgcaggcttctaggcgc

SEQ ID NO: 2746160 - DNA, 25 bp, Homo sapien
actgctccggagctgcaggcttcta

SEQ ID NO: 2746161 - DNA, 25 bp, Homo sapien
ccgcggggagcagctcgcagcccgg

SEQ ID NO: 2746162 - DNA, 25 bp, Homo sapien
tcccgcccgcgccgtgtggctgccg

SEQ ID NO: 2746163 - DNA, 25 bp, Homo sapien
ctgagctggggaagctcccgcccgc

SEQ ID NO: 2746164 - DNA, 25 bp, Homo sapien
cgcgccgtgtggctgccggggccgc

SEQ ID NO: 2746165 - DNA, 25 bp, Homo sapien
ggagccggcgacaactaatggagac

SEQ ID NO: 2746166 - DNA, 25 bp, Homo sapien
cgtgacgtgggcgagcgagcgcgct

SEQ ID NO: 2746167 - DNA, 25 bp, Homo sapien
tttccaggcggagcacctggcgagc

SEQ ID NO: 2746168 - DNA, 25 bp, Homo sapien
gacaactaatggagacatttccagg

SEQ ID NO: 2746169 - DNA, 25 bp, Homo sapien
tgctgctgtagcatgcacaggcatc

SEQ ID NO: 2746170 - DNA, 25 bp, Homo sapien
atgctgctgtagcatgcacaggcat

SEQ ID NO: 2746171 - DNA, 25 bp, Homo sapien
gatgctgctgtagcatgcacaggca

SEQ ID NO: 2746172 - DNA, 25 bp, Homo sapien
tcagatagtggagcgagatctcttt

SEQ ID NO: 2746173 - DNA, 25 bp, Homo sapien
gatagtggagcgagatctctttatt

SEQ ID NO: 2746174 - DNA, 25 bp, Homo sapien
tagtggagcgagatctctttattgg

SEQ ID NO: 2746175 - DNA, 25 bp, Homo sapien
gtggagcgagatctctttattggct

SEQ ID NO: 2746176 - DNA, 25 bp, Homo sapien
tgctggcagttctccgtggttttat

SEQ ID NO: 2746177 - DNA, 25 bp, Homo sapien
atctgctgatgggtgctcccatgca

SEQ ID NO: 2746178 - DNA, 25 bp, Homo sapien
cccatgcagtgaacatctggaaaat

SEQ ID NO: 2746179 - DNA, 25 bp, Homo sapien
cattgtctggggtcattgtgtggct

SEQ ID NO: 2746180 - DNA, 25 bp, Homo sapien
catcgctgagagttggacttctgac

SEQ ID NO: 2746181 - DNA, 25 bp, Homo sapien
actcattagagggacagccacgtgg

SEQ ID NO: 2746182 - DNA, 25 bp, Homo sapien
gggaatgtagatgtagcagcactca

SEQ ID NO: 2746183 - DNA, 25 bp, Homo sapien
ccagaggaaccaacatttaacttgt

SEQ ID NO: 2746184 - DNA, 25 bp, Homo sapien
gctttgtgcttgtcgcctgttgcct

SEQ ID NO: 2746185 - DNA, 25 bp, Homo sapien
tggagcatggagacacgcgctgggc

SEQ ID NO: 2746186 - DNA, 25 bp, Homo sapien
ggaagtcttcctgcactcggacacc

SEQ ID NO: 2746187 - DNA, 25 bp, Homo sapien
caccttgttctataaggagctctct

SEQ ID NO: 2746188 - DNA, 25 bp, Homo sapien
cacagcggatttgcctgaagcctca

SEQ ID NO: 2746189 - DNA, 25 bp, Homo sapien
cagctgtgcataccggtgggtctca

SEQ ID NO: 2746190 - DNA, 25 bp, Homo sapien
gaccctatgggcttgagtattcaga

SEQ ID NO: 2746191 - DNA, 25 bp, Homo sapien
cagtgtagaccgaccctgatgagac

SEQ ID NO: 2746192 - DNA, 25 bp, Homo sapien
tctagagactggaagcacgtccttc

SEQ ID NO: 2746193 - DNA, 25 bp, Homo sapien
gggccttttcgtgttggagatcttg

SEQ ID NO: 2746194 - DNA, 25 bp, Homo sapien
gagttcttccttatgggcttagaag

SEQ ID NO: 2746195 - DNA, 25 bp, Homo sapien
gctatcactcagtaccttctagaga

SEQ ID NO: 2746196 - DNA, 25 bp, Homo sapien
tcacgtggcttcctgtctaaaggga

SEQ ID NO: 2746197 - DNA, 25 bp, Homo sapien
tttatgtggcctaccatgcaccgca

SEQ ID NO: 2746198 - DNA, 25 bp, Homo sapien
gaagcttgtaccatctggcgtccct

SEQ ID NO: 2746199 - DNA, 25 bp, Homo sapien
tctcatgctggaacacgtatttgcg

SEQ ID NO: 2746200 - DNA, 25 bp, Homo sapien
ggtcaatgatttctctgtcccacat

SEQ ID NO: 2746201 - DNA, 25 bp, Homo sapien
gccagagagatgctttggttttgct

SEQ ID NO: 2746202 - DNA, 25 bp, Homo sapien
gttttgctgatattttgactaaggg

SEQ ID NO: 2746203 - DNA, 25 bp, Homo sapien
cccacatttccttggtgatggccat

SEQ ID NO: 2746204 - DNA, 25 bp, Homo sapien
tatcctccgccgctgtaacaggctt

SEQ ID NO: 2746205 - DNA, 25 bp, Homo sapien
gagaaccgtgagtctggtctgagcc

SEQ ID NO: 2746206 - DNA, 25 bp, Homo sapien
gaagaacccctataaacagaagctg

SEQ ID NO: 2746207 - DNA, 25 bp, Homo sapien
catccacagtgtgtctcgttggcga

SEQ ID NO: 2746208 - DNA, 25 bp, Homo sapien
ccacttccagtggaattatgaaatc

SEQ ID NO: 2746209 - DNA, 25 bp, Homo sapien
tgaccgtgcgcttgtccacttccag

SEQ ID NO: 2746210 - DNA, 25 bp, Homo sapien
gtcctaatgaccgtgcgcttgtcca

SEQ ID NO: 2746211 - DNA, 25 bp, Homo sapien
ttgtccacttccagtggaattatga

SEQ ID NO: 2746212 - DNA, 25 bp, Homo sapien
cggtgctgatgctagcggaggaaga

SEQ ID NO: 2746213 - DNA, 25 bp, Homo sapien
gcttgggggagctggaacttgcagg

SEQ ID NO: 2746214 - DNA, 25 bp, Homo sapien
ggcctggaagcggtgctgatgctag

SEQ ID NO: 2746215 - DNA, 25 bp, Homo sapien
gaagaagagggtgtgcgatggagct

SEQ ID NO: 2746216 - DNA, 25 bp, Homo sapien
tgtttattggtccatgcaccccact

SEQ ID NO: 2746217 - DNA, 25 bp, Homo sapien
gagctttattatactgaccgtagca

SEQ ID NO: 2746218 - DNA, 25 bp, Homo sapien
gaccgtagcagtacttgctgagtga

SEQ ID NO: 2746219 - DNA, 25 bp, Homo sapien
tgagtgagtgaatggctggctaccc

SEQ ID NO: 2746220 - DNA, 25 bp, Homo sapien
acagctgggttgaagtcctcgaaga

SEQ ID NO: 2746221 - DNA, 25 bp, Homo sapien
aacagcctgctggttcggtaatggg

SEQ ID NO: 2746222 - DNA, 25 bp, Homo sapien
ctaactagggtcttgctgaaaacag

SEQ ID NO: 2746223 - DNA, 25 bp, Homo sapien
agcagcctcacacctaactagggtc

SEQ ID NO: 2746224 - DNA, 25 bp, Homo sapien
cagagcatcaaaacggtactgacgg

SEQ ID NO: 2746225 - DNA, 25 bp, Homo sapien
gttgaggtccccaaagcggagagaa

SEQ ID NO: 2746226 - DNA, 25 bp, Homo sapien
tcccaggttgacttgagcagagcat

SEQ ID NO: 2746227 - DNA, 25 bp, Homo sapien
catgccaaggtccacattccaaagc

SEQ ID NO: 2746228 - DNA, 25 bp, Homo sapien
tccttctctgccttcccgctgacac

SEQ ID NO: 2746229 - DNA, 25 bp, Homo sapien
tgtgcctttcttctggatccttctc

SEQ ID NO: 2746230 - DNA, 25 bp, Homo sapien
gcctttcttctggatccttctctgc

SEQ ID NO: 2746231 - DNA, 25 bp, Homo sapien
tctgtgcctttcttctggatccttc

SEQ ID NO: 2746232 - DNA, 25 bp, Homo sapien
agccacagtggatttccccagctgg

SEQ ID NO: 2746233 - DNA, 25 bp, Homo sapien
tccccagctggtcattgtttaaacg

SEQ ID NO: 2746234 - DNA, 25 bp, Homo sapien
tttaaacgactaagaccaggctgac

SEQ ID NO: 2746235 - DNA, 25 bp, Homo sapien
cagcctcgggaggacttccaagcct

SEQ ID NO: 2746236 - DNA, 25 bp, Homo sapien
tgtgacacggaccaaagggaacacg

SEQ ID NO: 2746237 - DNA, 25 bp, Homo sapien
tgcgtaacgacatctccacatttgg

SEQ ID NO: 2746238 - DNA, 25 bp, Homo sapien
gctattgccgaaacgtggagtcttc

SEQ ID NO: 2746239 - DNA, 25 bp, Homo sapien
cagccacgtgagtttctcgcagtaa

SEQ ID NO: 2746240 - DNA, 25 bp, Homo sapien
ccgtctttagaagcaacaagattca

SEQ ID NO: 2746241 - DNA, 25 bp, Homo sapien
catactcgctccagccgtctttaga

SEQ ID NO: 2746242 - DNA, 25 bp, Homo sapien
tccagccgtctttagaagcaacaag

SEQ ID NO: 2746243 - DNA, 25 bp, Homo sapien
gctggtggtgcacatactcgctcca

SEQ ID NO: 2746244 - DNA, 25 bp, Homo sapien
gatgagaggagcctgctagtacgcc

SEQ ID NO: 2746245 - DNA, 25 bp, Homo sapien
tgaaacgctacagatgagaggagcc

SEQ ID NO: 2746246 - DNA, 25 bp, Homo sapien
ctgcctgaaacgctacagatgagag

SEQ ID NO: 2746247 - DNA, 25 bp, Homo sapien
ggagcctgctagtacgcctctgcat

SEQ ID NO: 2746248 - DNA, 25 bp, Homo sapien
actccacagggacgggagacggcaa

SEQ ID NO: 2746249 - DNA, 25 bp, Homo sapien
gacggcaaacattcgatcaatccca

SEQ ID NO: 2746250 - DNA, 25 bp, Homo sapien
gatcaatcccacttccgacagtgaa

SEQ ID NO: 2746251 - DNA, 25 bp, Homo sapien
gacgggagacggcaaacattcgatc

SEQ ID NO: 2746252 - DNA, 25 bp, Homo sapien
gggtcatggaaacgtacagatgatc

SEQ ID NO: 2746253 - DNA, 25 bp, Homo sapien
gcagtctcttggtctatcatggccg

SEQ ID NO: 2746254 - DNA, 25 bp, Homo sapien
gccggggcagcctcggtgcatgtgt

SEQ ID NO: 2746255 - DNA, 25 bp, Homo sapien
atgcagtctcttggtctatcatggc

SEQ ID NO: 2746256 - DNA, 25 bp, Homo sapien
agtctcttggtctatcatggccggg

SEQ ID NO: 2746257 - DNA, 25 bp, Homo sapien
tttgagttgtccaacgttgctgctg

SEQ ID NO: 2746258 - DNA, 25 bp, Homo sapien
agttgtccaacgttgctgctgcttc

SEQ ID NO: 2746259 - DNA, 25 bp, Homo sapien
gagttgtccaacgttgctgctgctt

SEQ ID NO: 2746260 - DNA, 25 bp, Homo sapien
tgagttgtccaacgttgctgctgct

SEQ ID NO: 2746261 - DNA, 25 bp, Homo sapien
ctgctcaaatctgtgaagatggtga

SEQ ID NO: 2746262 - DNA, 25 bp, Homo sapien
caaatctgtgaagatggtgagggcc

SEQ ID NO: 2746263 - DNA, 25 bp, Homo sapien
gctcaaatctgtgaagatggtgagg

SEQ ID NO: 2746264 - DNA, 25 bp, Homo sapien
tcaaatctgtgaagatggtgagggc

SEQ ID NO: 2746265 - DNA, 25 bp, Homo sapien
tctggatgcggagcgtcttcctcag

SEQ ID NO: 2746266 - DNA, 25 bp, Homo sapien
gatgcggagcgtcttcctcagtcct

SEQ ID NO: 2746267 - DNA, 25 bp, Homo sapien
tgcggagcgtcttcctcagtcctct

SEQ ID NO: 2746268 - DNA, 25 bp, Homo sapien
tgtctggatgcggagcgtcttcctc

SEQ ID NO: 2746269 - DNA, 25 bp, Homo sapien
ggtggcagagattcacctcctctga

SEQ ID NO: 2746270 - DNA, 25 bp, Homo sapien
ctctgatgcaaaccaaactctgaat

SEQ ID NO: 2746271 - DNA, 25 bp, Homo sapien
ctttccttaaatgccgctctggacg

SEQ ID NO: 2746272 - DNA, 25 bp, Homo sapien
ccaaactctgaatttgtttagagac

SEQ ID NO: 2746273 - DNA, 25 bp, Homo sapien
caagaagagatcagcgagtgcacgg

SEQ ID NO: 2746274 - DNA, 25 bp, Homo sapien
acagttggtgcggttggcctgatga

SEQ ID NO: 2746275 - DNA, 25 bp, Homo sapien
gatgattcatgactggattcactgg

SEQ ID NO: 2746276 - DNA, 25 bp, Homo sapien
gatcagcgagtgcacggagacagtt

SEQ ID NO: 2746277 - DNA, 25 bp, Homo sapien
acagctgcgttacaggatgctgacc

SEQ ID NO: 2746278 - DNA, 25 bp, Homo sapien
gcgttacaggatgctgaccactctg

SEQ ID NO: 2746279 - DNA, 25 bp, Homo sapien
caggatgctgaccactctgtctgcc

SEQ ID NO: 2746280 - DNA, 25 bp, Homo sapien
gctgcgttacaggatgctgaccact

SEQ ID NO: 2746281 - DNA, 25 bp, Homo sapien
gacacatgcgtctccagtctgcatg

SEQ ID NO: 2746282 - DNA, 25 bp, Homo sapien
cagagacctggagacttagggagag

SEQ ID NO: 2746283 - DNA, 25 bp, Homo sapien
actgtttggaagatgcaggcagaga

SEQ ID NO: 2746284 - DNA, 25 bp, Homo sapien
gtgcccggcatgacacatgcgtctc

SEQ ID NO: 2746285 - DNA, 25 bp, Homo sapien
tttcttgggtcaccaggggcctctg

SEQ ID NO: 2746286 - DNA, 25 bp, Homo sapien
ctgggtgctttcttgggtcaccagg

SEQ ID NO: 2746287 - DNA, 25 bp, Homo sapien
tgctttcttgggtcaccaggggcct

SEQ ID NO: 2746288 - DNA, 25 bp, Homo sapien
gtgctttcttgggtcaccaggggcc

SEQ ID NO: 2746289 - DNA, 25 bp, Homo sapien
tccggttgttcaaagctacctccat

SEQ ID NO: 2746290 - DNA, 25 bp, Homo sapien
ttccggttgttcaaagctacctcca

SEQ ID NO: 2746291 - DNA, 25 bp, Homo sapien
cacttccttccggttgttcaaagct

SEQ ID NO: 2746292 - DNA, 25 bp, Homo sapien
gccaccaggaagttgccccgttgct

SEQ ID NO: 2746293 - DNA, 25 bp, Homo sapien
cagatgtagctgagatgaaaggaca

SEQ ID NO: 2746294 - DNA, 25 bp, Homo sapien
tagcctgttggcccatgcagctggt

SEQ ID NO: 2746295 - DNA, 25 bp, Homo sapien
gacatgagcatagctgtctttggca

SEQ ID NO: 2746296 - DNA, 25 bp, Homo sapien
tttaggtgacgcaggtcagttttag

SEQ ID NO: 2746297 - DNA, 25 bp, Homo sapien
gctggtttaggtgacgcaggtcagt

SEQ ID NO: 2746298 - DNA, 25 bp, Homo sapien
gtttaggtgacgcaggtcagtttta

SEQ ID NO: 2746299 - DNA, 25 bp, Homo sapien
tggtttaggtgacgcaggtcagttt

SEQ ID NO: 2746300 - DNA, 25 bp, Homo sapien
tctctgcttttgaccaggatctttt

SEQ ID NO: 2746301 - DNA, 25 bp, Homo sapien
catccctctgtctatttctggagga

SEQ ID NO: 2746302 - DNA, 25 bp, Homo sapien
agcatccctctgtctatttctggag

SEQ ID NO: 2746303 - DNA, 25 bp, Homo sapien
gtctctgcttttgaccaggatcttt

SEQ ID NO: 2746304 - DNA, 25 bp, Homo sapien
aggagaacaagctggaagcagggga

SEQ ID NO: 2746305 - DNA, 25 bp, Homo sapien
agcaggggactggtttaagaacgag

SEQ ID NO: 2746306 - DNA, 25 bp, Homo sapien
agaggagaacaagctggaagcaggg

SEQ ID NO: 2746307 - DNA, 25 bp, Homo sapien
gaggagaacaagctggaagcagggg

SEQ ID NO: 2746308 - DNA, 25 bp, Homo sapien
ctgagtggagcggtcactctggcct

SEQ ID NO: 2746309 - DNA, 25 bp, Homo sapien
atgctgagtggagcggtcactctgg

SEQ ID NO: 2746310 - DNA, 25 bp, Homo sapien
caatgctgagtggagcggtcactct

SEQ ID NO: 2746311 - DNA, 25 bp, Homo sapien
gctgagtggagcggtcactctggcc

SEQ ID NO: 2746312 - DNA, 25 bp, Homo sapien
actgaggggcctggttgttttgcca

SEQ ID NO: 2746313 - DNA, 25 bp, Homo sapien
ttcctgaacaccagacagcggcgtg

SEQ ID NO: 2746314 - DNA, 25 bp, Homo sapien
gagctgatgttcctgaacaccagac

SEQ ID NO: 2746315 - DNA, 25 bp, Homo sapien
gatgttcctgaacaccagacagcgg

SEQ ID NO: 2746316 - DNA, 25 bp, Homo sapien
tctaagtctggaaccgctgccttca

SEQ ID NO: 2746317 - DNA, 25 bp, Homo sapien
tgtcaatgacccttgttaacgcctc

SEQ ID NO: 2746318 - DNA, 25 bp, Homo sapien
cacacattgtctgctgccgatcttg

SEQ ID NO: 2746319 - DNA, 25 bp, Homo sapien
tctcccgacaggtggacggcatcca

SEQ ID NO: 2746320 - DNA, 25 bp, Homo sapien
ccagatcctttgatcgaaagccgtc

SEQ ID NO: 2746321 - DNA, 25 bp, Homo sapien
gatcctttgatcgaaagccgtctgc

SEQ ID NO: 2746322 - DNA, 25 bp, Homo sapien
ggccagatcctttgatcgaaagccg

SEQ ID NO: 2746323 - DNA, 25 bp, Homo sapien
agatcctttgatcgaaagccgtctg

SEQ ID NO: 2746324 - DNA, 25 bp, Homo sapien
gaacccaagtttgaatgaatttcat

SEQ ID NO: 2746325 - DNA, 25 bp, Homo sapien
tcagcaaagaaatgcacgttgagtc

SEQ ID NO: 2746326 - DNA, 25 bp, Homo sapien
aatgcatgctgttcctaagcatctg

SEQ ID NO: 2746327 - DNA, 25 bp, Homo sapien
tcattttggtcatgctcttcagcaa

SEQ ID NO: 2746328 - DNA, 25 bp, Homo sapien
ctgctgccaccaagcaggaagccat

SEQ ID NO: 2746329 - DNA, 25 bp, Homo sapien
agggtgcgttagtggacgaattcct

SEQ ID NO: 2746330 - DNA, 25 bp, Homo sapien
tagtggacgaattcctccacctgtg

SEQ ID NO: 2746331 - DNA, 25 bp, Homo sapien
tccagatacaccgagttttcctgtg

SEQ ID NO: 2746332 - DNA, 25 bp, Homo sapien
ttccgagggtgcgttagtggacgaa

SEQ ID NO: 2746333 - DNA, 25 bp, Homo sapien
ggagacgtcgtccttcccaacactg

SEQ ID NO: 2746334 - DNA, 25 bp, Homo sapien
tcccaacactgacacgggacgctag

SEQ ID NO: 2746335 - DNA, 25 bp, Homo sapien
acgggacgctagtgcgctcttccaa

SEQ ID NO: 2746336 - DNA, 25 bp, Homo sapien
tccacaggaggagctacacgggaga

SEQ ID NO: 2746337 - DNA, 25 bp, Homo sapien
cagtcaagctggtaatgaggtctaa

SEQ ID NO: 2746338 - DNA, 25 bp, Homo sapien
ttttgcagtcaagctggtaatgagg

SEQ ID NO: 2746339 - DNA, 25 bp, Homo sapien
taattttgcagtcaagctggtaatg

SEQ ID NO: 2746340 - DNA, 25 bp, Homo sapien
aagctggtaatgaggtctaatactc

SEQ ID NO: 2746341 - DNA, 25 bp, Homo sapien
taatctcacgtttctctccaggcat

SEQ ID NO: 2746342 - DNA, 25 bp, Homo sapien
ccgatggaggagtgatgagacctca

SEQ ID NO: 2746343 - DNA, 25 bp, Homo sapien
caatctttaatctcacgtttctctc

SEQ ID NO: 2746344 - DNA, 25 bp, Homo sapien
tggtgtgtgcaggacccgatggagg

SEQ ID NO: 2746345 - DNA, 25 bp, Homo sapien
gggcatggcagaccccgcagttccg

SEQ ID NO: 2746346 - DNA, 25 bp, Homo sapien
agaccccgcagttccgtttcatcat

SEQ ID NO: 2746347 - DNA, 25 bp, Homo sapien
tggcagaccccgcagttccgtttca

SEQ ID NO: 2746348 - DNA, 25 bp, Homo sapien
gcagggcatggcagaccccgcagtt

SEQ ID NO: 2746349 - DNA, 25 bp, Homo sapien
tgtagagacaattttccaacatcgg

SEQ ID NO: 2746350 - DNA, 25 bp, Homo sapien
caattttccaacatcggtctcgttc

SEQ ID NO: 2746351 - DNA, 25 bp, Homo sapien
ggattctacttcgtctgtgctgtag

SEQ ID NO: 2746352 - DNA, 25 bp, Homo sapien
caactcccacgggtgtagacttggg

SEQ ID NO: 2746353 - DNA, 25 bp, Homo sapien
agaggtgagagtgacgataagcaca

SEQ ID NO: 2746354 - DNA, 25 bp, Homo sapien
gcacaataaatccagtgccgtccac

SEQ ID NO: 2746355 - DNA, 25 bp, Homo sapien
ataagcacaataaatccagtgccgt

SEQ ID NO: 2746356 - DNA, 25 bp, Homo sapien
tgagagtgacgataagcacaataaa

SEQ ID NO: 2746357 - DNA, 25 bp, Homo sapien
gcccagcctggggcgactggatctg

SEQ ID NO: 2746358 - DNA, 25 bp, Homo sapien
agcccagcctggggcgactggatct

SEQ ID NO: 2746359 - DNA, 25 bp, Homo sapien
cagcccagcctggggcgactggatc

SEQ ID NO: 2746360 - DNA, 25 bp, Homo sapien
cccagcctggggcgactggatctgg

SEQ ID NO: 2746361 - DNA, 25 bp, Homo sapien
caggagctggagagataactctgtg

SEQ ID NO: 2746362 - DNA, 25 bp, Homo sapien
tcaggagctggagagataactctgt

SEQ ID NO: 2746363 - DNA, 25 bp, Homo sapien
aggagctggagagataactctgtga

SEQ ID NO: 2746364 - DNA, 25 bp, Homo sapien
ggagctggagagataactctgtgac

SEQ ID NO: 2746365 - DNA, 25 bp, Homo sapien
tgtgggagtacacggcttctcccca

SEQ ID NO: 2746366 - DNA, 25 bp, Homo sapien
gtcccttggtgcaggtcctgtctct

SEQ ID NO: 2746367 - DNA, 25 bp, Homo sapien
caatctacgtgaatccaccagagaa

SEQ ID NO: 2746368 - DNA, 25 bp, Homo sapien
ctgtttctcaaaccgcacatggcca

SEQ ID NO: 2746369 - DNA, 25 bp, Homo sapien
cagtcctcatgctcgatggcgtcag

SEQ ID NO: 2746370 - DNA, 25 bp, Homo sapien
ttcctgacctgaagatgcacccaca

SEQ ID NO: 2746371 - DNA, 25 bp, Homo sapien
tccattgccttggaggctccagtcc

SEQ ID NO: 2746372 - DNA, 25 bp, Homo sapien
ggaggccgcggtcctcagtcctcat

SEQ ID NO: 2746373 - DNA, 25 bp, Homo sapien
tctctccacgagctctgttaagact

SEQ ID NO: 2746374 - DNA, 25 bp, Homo sapien
ccagagtgcaatctgtacaaaagct

SEQ ID NO: 2746375 - DNA, 25 bp, Homo sapien
caagtccccttcaggcgtggccaga

SEQ ID NO: 2746376 - DNA, 25 bp, Homo sapien
tccaggctccgagcatccaggcacc

SEQ ID NO: 2746377 - DNA, 25 bp, Homo sapien
atgtctgtgtccgtgggaatgttcc

SEQ ID NO: 2746378 - DNA, 25 bp, Homo sapien
ctgtgtccgtgggaatgttccaaat

SEQ ID NO: 2746379 - DNA, 25 bp, Homo sapien
gtctgtgtccgtgggaatgttccaa

SEQ ID NO: 2746380 - DNA, 25 bp, Homo sapien
ggcatgtctgtgtccgtgggaatgt

SEQ ID NO: 2746381 - DNA, 25 bp, Homo sapien
gaagagggtgacatccagatactga

SEQ ID NO: 2746382 - DNA, 25 bp, Homo sapien
gagggtgacatccagatactgattc

SEQ ID NO: 2746383 - DNA, 25 bp, Homo sapien
gggtgacatccagatactgattcct

SEQ ID NO: 2746384 - DNA, 25 bp, Homo sapien
ctgaagagggtgacatccagatact

SEQ ID NO: 2746385 - DNA, 25 bp, Homo sapien
gtttctgggaacaaagtctcggatg

SEQ ID NO: 2746386 - DNA, 25 bp, Homo sapien
gggatgctggtccttctactctcag

SEQ ID NO: 2746387 - DNA, 25 bp, Homo sapien
tggtccttctactctcagctgtttc

SEQ ID NO: 2746388 - DNA, 25 bp, Homo sapien
aagtctcggatgtactgatgtttcc

SEQ ID NO: 2746389 - DNA, 25 bp, Homo sapien
ctgttggtgactgtggtattgatga

SEQ ID NO: 2746390 - DNA, 25 bp, Homo sapien
tatctgtcaatgtcctgctgccaaa

SEQ ID NO: 2746391 - DNA, 25 bp, Homo sapien
tggtgactgtggtattgatgacttt

SEQ ID NO: 2746392 - DNA, 25 bp, Homo sapien
atataatgagtatctgtcaatgtcc

SEQ ID NO: 2746393 - DNA, 25 bp, Homo sapien
agccgcgttactacgccattcccgg

SEQ ID NO: 2746394 - DNA, 25 bp, Homo sapien
tgcgatgctgacaaccagccgcgtt

SEQ ID NO: 2746395 - DNA, 25 bp, Homo sapien
gaagatgcccgtcttttcctgcgca

SEQ ID NO: 2746396 - DNA, 25 bp, Homo sapien
gggaagatgcccgtcttttcctgcg

SEQ ID NO: 2746397 - DNA, 25 bp, Homo sapien
tctgcttcccgaagcggacggacac

SEQ ID NO: 2746398 - DNA, 25 bp, Homo sapien
ctgggctggcggttccctgccttgg

SEQ ID NO: 2746399 - DNA, 25 bp, Homo sapien
gaagcggacggacacggacttccga

SEQ ID NO: 2746400 - DNA, 25 bp, Homo sapien
ctgccttgggacaaacgggctctgg

SEQ ID NO: 2746401 - DNA, 25 bp, Homo sapien
tgagtttcctgtgcccggtgctgaa

SEQ ID NO: 2746402 - DNA, 25 bp, Homo sapien
tatatgctaatggtatgccgaggct

SEQ ID NO: 2746403 - DNA, 25 bp, Homo sapien
tggcagagacaagtcgcagcactcg

SEQ ID NO: 2746404 - DNA, 25 bp, Homo sapien
taatccatcacctgtctgacagatg

SEQ ID NO: 2746405 - DNA, 25 bp, Homo sapien
gcagtccagggcgcccgtatctgaa

SEQ ID NO: 2746406 - DNA, 25 bp, Homo sapien
ttggggctgacgcttttctcttgct

SEQ ID NO: 2746407 - DNA, 25 bp, Homo sapien
gtgtattaaggtcccgcagtccagg

SEQ ID NO: 2746408 - DNA, 25 bp, Homo sapien
tccactgtgttattcggtacatcct

SEQ ID NO: 2746409 - DNA, 25 bp, Homo sapien
tcctcttcatgtccgggctccttgt

SEQ ID NO: 2746410 - DNA, 25 bp, Homo sapien
ggcattctgggcgttaggtcccaca

SEQ ID NO: 2746411 - DNA, 25 bp, Homo sapien
ggcgtgggccgtttgcacatcctct

SEQ ID NO: 2746412 - DNA, 25 bp, Homo sapien
ctccttgtgcggatgagcagatgga

SEQ ID NO: 2746413 - DNA, 25 bp, Homo sapien
ttccgaccatcaggtgacccacagg

SEQ ID NO: 2746414 - DNA, 25 bp, Homo sapien
gagagacaatggctgtccttgaagc

SEQ ID NO: 2746415 - DNA, 25 bp, Homo sapien
accatcaggtgacccacaggagggc

SEQ ID NO: 2746416 - DNA, 25 bp, Homo sapien
gctgcctgagagacaatggctgtcc

SEQ ID NO: 2746417 - DNA, 25 bp, Homo sapien
ggagcaggttatggagtcctagcat

SEQ ID NO: 2746418 - DNA, 25 bp, Homo sapien
gttatggagtcctagcatgcatgtg

SEQ ID NO: 2746419 - DNA, 25 bp, Homo sapien
tggagtcctagcatgcatgtgcaca

SEQ ID NO: 2746420 - DNA, 25 bp, Homo sapien
tcctttttgagtggagcaggttatg

SEQ ID NO: 2746421 - DNA, 25 bp, Homo sapien
cctcatcattgcctttgtcattgaa

SEQ ID NO: 2746422 - DNA, 25 bp, Homo sapien
attgcctttgtcattgaagccctca

SEQ ID NO: 2746423 - DNA, 25 bp, Homo sapien
catcattgcctttgtcattgaagcc

SEQ ID NO: 2746424 - DNA, 25 bp, Homo sapien
tgtgtgggtcctcatcattgccttt

SEQ ID NO: 2746425 - DNA, 25 bp, Homo sapien
ttttgatttccttgtctgttgcctc

SEQ ID NO: 2746426 - DNA, 25 bp, Homo sapien
ttgatttccttgtctgttgcctcac

SEQ ID NO: 2746427 - DNA, 25 bp, Homo sapien
cttctgcgttttgatttccttgtct

SEQ ID NO: 2746428 - DNA, 25 bp, Homo sapien
cgttttgatttccttgtctgttgcc

SEQ ID NO: 2746429 - DNA, 25 bp, Homo sapien
ccctaccaggtaccggaagagcaga

SEQ ID NO: 2746430 - DNA, 25 bp, Homo sapien
cccctaccaggtaccggaagagcag

SEQ ID NO: 2746431 - DNA, 25 bp, Homo sapien
cctaccaggtaccggaagagcagaa

SEQ ID NO: 2746432 - DNA, 25 bp, Homo sapien
acagacactgcatagagtgaatgtg

SEQ ID NO: 2746433 - DNA, 25 bp, Homo sapien
cactgcatagagtgaatgtgaacca

SEQ ID NO: 2746434 - DNA, 25 bp, Homo sapien
catagagtgaatgtgaaccatcgca

SEQ ID NO: 2746435 - DNA, 25 bp, Homo sapien
ttttacgaacccctacagacactgc

SEQ ID NO: 2746436 - DNA, 25 bp, Homo sapien
tgtggcaggccttcaagatgcatcc

SEQ ID NO: 2746437 - DNA, 25 bp, Homo sapien
cagatcccggggaaatcagtagggc

SEQ ID NO: 2746438 - DNA, 25 bp, Homo sapien
gcgggccttctaggtccacctggaa

SEQ ID NO: 2746439 - DNA, 25 bp, Homo sapien
cacctggaacctcgactgtggcagg

SEQ ID NO: 2746440 - DNA, 25 bp, Homo sapien
gtcagggcagctaccaggaacacaa

SEQ ID NO: 2746441 - DNA, 25 bp, Homo sapien
caaaatgctcttcgacagagcatgg

SEQ ID NO: 2746442 - DNA, 25 bp, Homo sapien
ccaggttctctagctcatgtggaag

SEQ ID NO: 2746443 - DNA, 25 bp, Homo sapien
gctggaacgggatgtgtaaagccat

SEQ ID NO: 2746444 - DNA, 25 bp, Homo sapien
tgttttcctccattttacttccagc

SEQ ID NO: 2746445 - DNA, 25 bp, Homo sapien
tgtgttttcctccattttacttcca

SEQ ID NO: 2746446 - DNA, 25 bp, Homo sapien
ttttcctccattttacttccagcat

SEQ ID NO: 2746447 - DNA, 25 bp, Homo sapien
gttttcctccattttacttccagca

SEQ ID NO: 2746448 - DNA, 25 bp, Homo sapien
ccacaaaggttctgacattaacaaa

SEQ ID NO: 2746449 - DNA, 25 bp, Homo sapien
aatgcttgcaaatatcctgcctttc

SEQ ID NO: 2746450 - DNA, 25 bp, Homo sapien
tgacattaacaaaatgcttgcaaat

SEQ ID NO: 2746451 - DNA, 25 bp, Homo sapien
catggcaactcagccccacaaaggt

SEQ ID NO: 2746452 - DNA, 25 bp, Homo sapien
tgattactctccacccggttctgtg

SEQ ID NO: 2746453 - DNA, 25 bp, Homo sapien
taacgtgaagggtactttccagata

SEQ ID NO: 2746454 - DNA, 25 bp, Homo sapien
caccgagggagtctatctgattact

SEQ ID NO: 2746455 - DNA, 25 bp, Homo sapien
gaacttttctagtacacagcccttg

SEQ ID NO: 2746456 - DNA, 25 bp, Homo sapien
tggctggaccactgcatcttctcca

SEQ ID NO: 2746457 - DNA, 25 bp, Homo sapien
ggaccactgcatcttctccatctag

SEQ ID NO: 2746458 - DNA, 25 bp, Homo sapien
gcatcttctccatctagtgtttgct

SEQ ID NO: 2746459 - DNA, 25 bp, Homo sapien
actgcatcttctccatctagtgttt

SEQ ID NO: 2746460 - DNA, 25 bp, Homo sapien
tgttggatccaggaacactgtgagc

SEQ ID NO: 2746461 - DNA, 25 bp, Homo sapien
ctgttcttgttggatccaggaacac

SEQ ID NO: 2746462 - DNA, 25 bp, Homo sapien
tcttgttggatccaggaacactgtg

SEQ ID NO: 2746463 - DNA, 25 bp, Homo sapien
tgttcttgttggatccaggaacact

SEQ ID NO: 2746464 - DNA, 25 bp, Homo sapien
tctgctcatcgtcatgtgaacggga

SEQ ID NO: 2746465 - DNA, 25 bp, Homo sapien
ctgtttctcccgaagagactgagga

SEQ ID NO: 2746466 - DNA, 25 bp, Homo sapien
gaggagaaaggtcccactggctgtt

SEQ ID NO: 2746467 - DNA, 25 bp, Homo sapien
catcgtcatgtgaacgggaggtcat

SEQ ID NO: 2746468 - DNA, 25 bp, Homo sapien
gaaatgacgaccacttgtagccggg

SEQ ID NO: 2746469 - DNA, 25 bp, Homo sapien
ttgcagggaggtatccaggccgcct

SEQ ID NO: 2746470 - DNA, 25 bp, Homo sapien
gtagccggggaataacagccttgca

SEQ ID NO: 2746471 - DNA, 25 bp, Homo sapien
tcttttaggtggacaaggcgggcca

SEQ ID NO: 2746472 - DNA, 25 bp, Homo sapien
ggacatctgcatggccatagagcag

SEQ ID NO: 2746473 - DNA, 25 bp, Homo sapien
ccagggcggcttggggaatgcggtt

SEQ ID NO: 2746474 - DNA, 25 bp, Homo sapien
cattttccacgagggtcccacaaag

SEQ ID NO: 2746475 - DNA, 25 bp, Homo sapien
ccttcccaagccagggcggcttggg

SEQ ID NO: 2746476 - DNA, 25 bp, Homo sapien
aggacagggcggagggcatcgcccg

SEQ ID NO: 2746477 - DNA, 25 bp, Homo sapien
cctcctgcctccctgcaggctctcc

SEQ ID NO: 2746478 - DNA, 25 bp, Homo sapien
ctaaggacagggcggagggcatcgc

SEQ ID NO: 2746479 - DNA, 25 bp, Homo sapien
ggcatcgcccgctcctcctcagggc

SEQ ID NO: 2746480 - DNA, 25 bp, Homo sapien
tcagaggcagttccaggcttccctg

SEQ ID NO: 2746481 - DNA, 25 bp, Homo sapien
tccctgagatggacggaaggagaaa

SEQ ID NO: 2746482 - DNA, 25 bp, Homo sapien
ttgtgaagtcttggcagcctgtgga

SEQ ID NO: 2746483 - DNA, 25 bp, Homo sapien
tcatttcagtgaagcctgttggcaa

SEQ ID NO: 2746484 - DNA, 25 bp, Homo sapien
gcttttgagcttgttcttggcggac

SEQ ID NO: 2746485 - DNA, 25 bp, Homo sapien
gcagagtgccccaaacggtgtggtt

SEQ ID NO: 2746486 - DNA, 25 bp, Homo sapien
ttttcttggatggtgtacttagtgc

SEQ ID NO: 2746487 - DNA, 25 bp, Homo sapien
tatttctggagttgcgcttttgagc

SEQ ID NO: 2746488 - DNA, 25 bp, Homo sapien
ctttggagacggcaacacagagccc

SEQ ID NO: 2746489 - DNA, 25 bp, Homo sapien
tggctttggagacggcaacacagag

SEQ ID NO: 2746490 - DNA, 25 bp, Homo sapien
gctttggagacggcaacacagagcc

SEQ ID NO: 2746491 - DNA, 25 bp, Homo sapien
tctggctttggagacggcaacacag

SEQ ID NO: 2746492 - DNA, 25 bp, Homo sapien
ttgccagtccccggaggaacggtga

SEQ ID NO: 2746493 - DNA, 25 bp, Homo sapien
cgaccacgccgatggtgggaccggg

SEQ ID NO: 2746494 - DNA, 25 bp, Homo sapien
ggaacggtgaggacggcgctggcct

SEQ ID NO: 2746495 - DNA, 25 bp, Homo sapien
ctcccgcctggctcgcagctccttg

SEQ ID NO: 2746496 - DNA, 25 bp, Homo sapien
ccggccggcagcgagtgggaggtgg

SEQ ID NO: 2746497 - DNA, 25 bp, Homo sapien
cacactgccctgagccggccggcag

SEQ ID NO: 2746498 - DNA, 25 bp, Homo sapien
ccacactgccctgagccggccggca

SEQ ID NO: 2746499 - DNA, 25 bp, Homo sapien
ctgagccggccggcagcgagtggga

SEQ ID NO: 2746500 - DNA, 25 bp, Homo sapien
cttctcgcctgtttttcttgtaagg

SEQ ID NO: 2746501 - DNA, 25 bp, Homo sapien
tgtaaggtaaagcaataccgaagta

SEQ ID NO: 2746502 - DNA, 25 bp, Homo sapien
caataccgaagtaacttgtgatttg

SEQ ID NO: 2746503 - DNA, 25 bp, Homo sapien
ttcttgtaaggtaaagcaataccga

SEQ ID NO: 2746504 - DNA, 25 bp, Homo sapien
ctggggcttcaggctgaagggctgg

SEQ ID NO: 2746505 - DNA, 25 bp, Homo sapien
ggcttcaggctgaagggctggcctt

SEQ ID NO: 2746506 - DNA, 25 bp, Homo sapien
gctgaagggctggccttggtgcacc

SEQ ID NO: 2746507 - DNA, 25 bp, Homo sapien
ggctgaagggctggccttggtgcac

SEQ ID NO: 2746508 - DNA, 25 bp, Homo sapien
ttcctggtcccaagcactctcagag

SEQ ID NO: 2746509 - DNA, 25 bp, Homo sapien
ggattcctggtcccaagcactctca

SEQ ID NO: 2746510 - DNA, 25 bp, Homo sapien
ctggtcccaagcactctcagagctg

SEQ ID NO: 2746511 - DNA, 25 bp, Homo sapien
tggtcccaagcactctcagagctgt

SEQ ID NO: 2746512 - DNA, 25 bp, Homo sapien
atctggggtagcacagccggaccga

SEQ ID NO: 2746513 - DNA, 25 bp, Homo sapien
cagccggaccgaggtatgtgccaac

SEQ ID NO: 2746514 - DNA, 25 bp, Homo sapien
acagccggaccgaggtatgtgccaa

SEQ ID NO: 2746515 - DNA, 25 bp, Homo sapien
acttgatctggggtagcacagccgg

SEQ ID NO: 2746516 - DNA, 25 bp, Homo sapien
ttggacaccgtatcagcagctccct

SEQ ID NO: 2746517 - DNA, 25 bp, Homo sapien
tccaggatgacttttggcactgcca

SEQ ID NO: 2746518 - DNA, 25 bp, Homo sapien
tcaatgatgacctgaaactgcagct

SEQ ID NO: 2746519 - DNA, 25 bp, Homo sapien
tcttaggtccttggacaccgtatca

SEQ ID NO: 2746520 - DNA, 25 bp, Homo sapien
ggtatgagatttcagggtctacaga

SEQ ID NO: 2746521 - DNA, 25 bp, Homo sapien
agcacaaccctttgataggaaaacg

SEQ ID NO: 2746522 - DNA, 25 bp, Homo sapien
aattaagtggtatgagatttcaggg

SEQ ID NO: 2746523 - DNA, 25 bp, Homo sapien
gagacaaatgtgtcgctaatttaat

SEQ ID NO: 2746524 - DNA, 25 bp, Homo sapien
tatgatgatgccggctttgcttttg

SEQ ID NO: 2746525 - DNA, 25 bp, Homo sapien
tgatgatgccggctttgcttttgag

SEQ ID NO: 2746526 - DNA, 25 bp, Homo sapien
ttatgatgatgccggctttgctttt

SEQ ID NO: 2746527 - DNA, 25 bp, Homo sapien
atgatgatgccggctttgcttttga

SEQ ID NO: 2746528 - DNA, 25 bp, Homo sapien
tttgggcgtttgaatgagacagtcg

SEQ ID NO: 2746529 - DNA, 25 bp, Homo sapien
accccagctgccgtcaacaggagtg

SEQ ID NO: 2746530 - DNA, 25 bp, Homo sapien
cttgatgccgatttgggcgtttgaa

SEQ ID NO: 2746531 - DNA, 25 bp, Homo sapien
agtgcagtagagctggtaaaacgca

SEQ ID NO: 2746532 - DNA, 25 bp, Homo sapien
cagtcttacctggaccgtagggtct

SEQ ID NO: 2746533 - DNA, 25 bp, Homo sapien
gcagtcttacctggaccgtagggtc

SEQ ID NO: 2746534 - DNA, 25 bp, Homo sapien
agtcttacctggaccgtagggtctg

SEQ ID NO: 2746535 - DNA, 25 bp, Homo sapien
tctcccgtgcatgtcaagagtgcca

SEQ ID NO: 2746536 - DNA, 25 bp, Homo sapien
gaccaggaggtgacatggccagtct

SEQ ID NO: 2746537 - DNA, 25 bp, Homo sapien
catggccagtctcccgtgcatgtca

SEQ ID NO: 2746538 - DNA, 25 bp, Homo sapien
tgtcaagagtgccagcaaacagccc

SEQ ID NO: 2746539 - DNA, 25 bp, Homo sapien
cctgggctgccaccgagagccagga

SEQ ID NO: 2746540 - DNA, 25 bp, Homo sapien
ctgggctgccaccgagagccaggag

SEQ ID NO: 2746541 - DNA, 25 bp, Homo sapien
ttcctttgacgttttgagtagaaga

SEQ ID NO: 2746542 - DNA, 25 bp, Homo sapien
gcttaaatcatgaaccctggagcac

SEQ ID NO: 2746543 - DNA, 25 bp, Homo sapien
ctgagcttaaatcatgaaccctgga

SEQ ID NO: 2746544 - DNA, 25 bp, Homo sapien
tcctttgacgttttgagtagaagat

SEQ ID NO: 2746545 - DNA, 25 bp, Homo sapien
agaccccagcggcatgtgttataat

SEQ ID NO: 2746546 - DNA, 25 bp, Homo sapien
gtaaagaccccagcggcatgtgtta

SEQ ID NO: 2746547 - DNA, 25 bp, Homo sapien
gtgtaaagaccccagcggcatgtgt

SEQ ID NO: 2746548 - DNA, 25 bp, Homo sapien
caacggtgtaaagaccccagcggca

SEQ ID NO: 2746549 - DNA, 25 bp, Homo sapien
ccgtgcatggtagatggcctttaaa

SEQ ID NO: 2746550 - DNA, 25 bp, Homo sapien
tccgcgcgcatagtgtccaaacttg

SEQ ID NO: 2746551 - DNA, 25 bp, Homo sapien
gtgttttcatgaactccggccccag

SEQ ID NO: 2746552 - DNA, 25 bp, Homo sapien
gattgacaggattagaaaagcctcc

SEQ ID NO: 2746553 - DNA, 25 bp, Homo sapien
tttgcttctgcagctgccattgtgg

SEQ ID NO: 2746554 - DNA, 25 bp, Homo sapien
ctttgcttctgcagctgccattgtg

SEQ ID NO: 2746555 - DNA, 25 bp, Homo sapien
tgcttctgcagctgccattgtggct

SEQ ID NO: 2746556 - DNA, 25 bp, Homo sapien
ttctgcagctgccattgtggctcac

SEQ ID NO: 2746557 - DNA, 25 bp, Homo sapien
aactatgtctgagagcagccatgcc

SEQ ID NO: 2746558 - DNA, 25 bp, Homo sapien
ccatgccagttgagaaggccacgct

SEQ ID NO: 2746559 - DNA, 25 bp, Homo sapien
aaactagggcggatctcagctgtgc

SEQ ID NO: 2746560 - DNA, 25 bp, Homo sapien
gagagcggcatctgcaaaactaggg

SEQ ID NO: 2746561 - DNA, 25 bp, Homo sapien
caaccgcccttctggtcctctggtt

SEQ ID NO: 2746562 - DNA, 25 bp, Homo sapien
ccttgtccaccaggtacctaaagag

SEQ ID NO: 2746563 - DNA, 25 bp, Homo sapien
ccaccaggtacctaaagaggctgct

SEQ ID NO: 2746564 - DNA, 25 bp, Homo sapien
ggtacctaaagaggctgctccaacc

SEQ ID NO: 2746565 - DNA, 25 bp, Homo sapien
tgtgcagagagggcccaggtgccca

SEQ ID NO: 2746566 - DNA, 25 bp, Homo sapien
ggtgcccagccccccagagaggagg

SEQ ID NO: 2746567 - DNA, 25 bp, Homo sapien
ctggagggtgtgcagagagggccca

SEQ ID NO: 2746568 - DNA, 25 bp, Homo sapien
agggtgtgcagagagggcccaggtg

SEQ ID NO: 2746569 - DNA, 25 bp, Homo sapien
ctccaggatggtgacgtcccgtctc

SEQ ID NO: 2746570 - DNA, 25 bp, Homo sapien
gcactgtggtatggtccagtagtgc

SEQ ID NO: 2746571 - DNA, 25 bp, Homo sapien
gggtaggctgctccgacacagtttc

SEQ ID NO: 2746572 - DNA, 25 bp, Homo sapien
tctcagcaggtgtatgttctcacct

SEQ ID NO: 2746573 - DNA, 25 bp, Homo sapien
cctcctcgctgggggcattccatag

SEQ ID NO: 2746574 - DNA, 25 bp, Homo sapien
gctgggggcattccatagctcttgt

SEQ ID NO: 2746575 - DNA, 25 bp, Homo sapien
agcctcctcgctgggggcattccat

SEQ ID NO: 2746576 - DNA, 25 bp, Homo sapien
cctcgctgggggcattccatagctc

SEQ ID NO: 2746577 - DNA, 25 bp, Homo sapien
tgtgccacaatcggctgtcagtcct

SEQ ID NO: 2746578 - DNA, 25 bp, Homo sapien
ctgtgccacaatcggctgtcagtcc

SEQ ID NO: 2746579 - DNA, 25 bp, Homo sapien
gcagaaagtcgctcatgcgctggct

SEQ ID NO: 2746580 - DNA, 25 bp, Homo sapien
cctggcgatcaggagcctggaagat

SEQ ID NO: 2746581 - DNA, 25 bp, Homo sapien
gaaagtcgctcatgcgctggctctg

SEQ ID NO: 2746582 - DNA, 25 bp, Homo sapien
ggatgtggagacctggcgatcagga

SEQ ID NO: 2746583 - DNA, 25 bp, Homo sapien
ccacaacacatgcacctttctgggt

SEQ ID NO: 2746584 - DNA, 25 bp, Homo sapien
tgtcccatgacaacccatctactgc

SEQ ID NO: 2746585 - DNA, 25 bp, Homo sapien
tgacaacccatctactgccaagact

SEQ ID NO: 2746586 - DNA, 25 bp, Homo sapien
acctttctgggtgctccctgttctg

SEQ ID NO: 2746587 - DNA, 25 bp, Homo sapien
ggcccactggacgtgtaatttgtga

SEQ ID NO: 2746588 - DNA, 25 bp, Homo sapien
cttcccaaggcccactggacgtgta

SEQ ID NO: 2746589 - DNA, 25 bp, Homo sapien
ccaaggcccactggacgtgtaattt

SEQ ID NO: 2746590 - DNA, 25 bp, Homo sapien
ccactggacgtgtaatttgtgagta

SEQ ID NO: 2746591 - DNA, 25 bp, Homo sapien
gggctctctaaggtgctggcagccc

SEQ ID NO: 2746592 - DNA, 25 bp, Homo sapien
ttggccccacgtgacccgctctgct

SEQ ID NO: 2746593 - DNA, 25 bp, Homo sapien
gggaagatgccgtccttggctctgc

SEQ ID NO: 2746594 - DNA, 25 bp, Homo sapien
tcttccccgcatgggctctctaagg

SEQ ID NO: 2746595 - DNA, 25 bp, Homo sapien
gaatcagcgccagtgttggacattc

SEQ ID NO: 2746596 - DNA, 25 bp, Homo sapien
gctcagagcccgcaggaatcagcgc

SEQ ID NO: 2746597 - DNA, 25 bp, Homo sapien
caaggaattaactgtctctgtctca

SEQ ID NO: 2746598 - DNA, 25 bp, Homo sapien
gagccatcccggaaggtgagctgct

SEQ ID NO: 2746599 - DNA, 25 bp, Homo sapien
tagggtagcaagagccctactgctg

SEQ ID NO: 2746600 - DNA, 25 bp, Homo sapien
ctagggtagcaagagccctactgct

SEQ ID NO: 2746601 - DNA, 25 bp, Homo sapien
aagacttccacatgcaggtatatta

SEQ ID NO: 2746602 - DNA, 25 bp, Homo sapien
gtggcagcaccacccggatagccag

SEQ ID NO: 2746603 - DNA, 25 bp, Homo sapien
gtcagctggtcgacccagtgtggca

SEQ ID NO: 2746604 - DNA, 25 bp, Homo sapien
cctggagtcagctggtcgacccagt

SEQ ID NO: 2746605 - DNA, 25 bp, Homo sapien
agcaccacccggatagccagggagg

SEQ ID NO: 2746606 - DNA, 25 bp, Homo sapien
gtggaggagtgcgagagccgcgtcc

SEQ ID NO: 2746607 - DNA, 25 bp, Homo sapien
ccctgacgctgagcagccggagaga

SEQ ID NO: 2746608 - DNA, 25 bp, Homo sapien
agtgcgagagccgcgtccacagcag

SEQ ID NO: 2746609 - DNA, 25 bp, Homo sapien
gagagagtggaggagtgcgagagcc

SEQ ID NO: 2746610 - DNA, 25 bp, Homo sapien
catccaactaaccacttcagattct

SEQ ID NO: 2746611 - DNA, 25 bp, Homo sapien
aagttttgattaatgctgtccagtg

SEQ ID NO: 2746612 - DNA, 25 bp, Homo sapien
ccagaggcttctgtcacggggatca

SEQ ID NO: 2746613 - DNA, 25 bp, Homo sapien
tcttgcgtgtttgatatgtgtcaga

SEQ ID NO: 2746614 - DNA, 25 bp, Homo sapien
tgcttaattcttcgggaaatgagaa

SEQ ID NO: 2746615 - DNA, 25 bp, Homo sapien
tgcctcgtcccatccaagccgatca

SEQ ID NO: 2746616 - DNA, 25 bp, Homo sapien
acagcccctcgtggtgggacagcgc

SEQ ID NO: 2746617 - DNA, 25 bp, Homo sapien
ccctcgtggtgggacagcgcctgca

SEQ ID NO: 2746618 - DNA, 25 bp, Homo sapien
gccgatcaccttctgagaggacctg

SEQ ID NO: 2746619 - DNA, 25 bp, Homo sapien
tgcaagacgcgaggaagagaataat

SEQ ID NO: 2746620 - DNA, 25 bp, Homo sapien
cgtggtgtgtgaccgagagaggtat

SEQ ID NO: 2746621 - DNA, 25 bp, Homo sapien
agagaggtatagagatgtctgcaag

SEQ ID NO: 2746622 - DNA, 25 bp, Homo sapien
gacagcgccggctgacattttactt

SEQ ID NO: 2746623 - DNA, 25 bp, Homo sapien
ggctgcctggtacccgggatcctgt

SEQ ID NO: 2746624 - DNA, 25 bp, Homo sapien
cctggtacccgggatcctgtttctg

SEQ ID NO: 2746625 - DNA, 25 bp, Homo sapien
tgggcagccgtcacgtcacccttcc

SEQ ID NO: 2746626 - DNA, 25 bp, Homo sapien
ctgggcagccgtcacgtcacccttc

SEQ ID NO: 2746627 - DNA, 25 bp, Homo sapien
tgggtcatcgtgtccagtgatggcc

SEQ ID NO: 2746628 - DNA, 25 bp, Homo sapien
gtcatcgtgtccagtgatggccaag

SEQ ID NO: 2746629 - DNA, 25 bp, Homo sapien
ggtcatcgtgtccagtgatggccaa

SEQ ID NO: 2746630 - DNA, 25 bp, Homo sapien
tcatcgtgtccagtgatggccaagg

SEQ ID NO: 2746631 - DNA, 25 bp, Homo sapien
tgaggaataggtagcactgcaggca

SEQ ID NO: 2746632 - DNA, 25 bp, Homo sapien
caggtgaggaataggtagcactgca

SEQ ID NO: 2746633 - DNA, 25 bp, Homo sapien
aggccctccttgggcaacgtggagg

SEQ ID NO: 2746634 - DNA, 25 bp, Homo sapien
cctccttgggcaacgtggaggagca

SEQ ID NO: 2746635 - DNA, 25 bp, Homo sapien
gagagaaggtagaagcaggtcccgg

SEQ ID NO: 2746636 - DNA, 25 bp, Homo sapien
gatatactgcgtgtttcagagagaa

SEQ ID NO: 2746637 - DNA, 25 bp, Homo sapien
tggagggtcctaatccactggccac

SEQ ID NO: 2746638 - DNA, 25 bp, Homo sapien
ggaagagactgcgtggatatactgc

SEQ ID NO: 2746639 - DNA, 25 bp, Homo sapien
cagaggaaggctcagaatttcagaa

SEQ ID NO: 2746640 - DNA, 25 bp, Homo sapien
tcaccccttcatagacaatccaggg

SEQ ID NO: 2746641 - DNA, 25 bp, Homo sapien
aatttcagaagttggcttcacccct

SEQ ID NO: 2746642 - DNA, 25 bp, Homo sapien
tcagtggcttttctcagaggaaggc

SEQ ID NO: 2746643 - DNA, 25 bp, Homo sapien
gggatacagttggatggatctgcaa

SEQ ID NO: 2746644 - DNA, 25 bp, Homo sapien
aaatgggcctgcagacgtgggtctg

SEQ ID NO: 2746645 - DNA, 25 bp, Homo sapien
cagacgtgggtctgatgctggatcc

SEQ ID NO: 2746646 - DNA, 25 bp, Homo sapien
gattctccagttacagctgcaggga

SEQ ID NO: 2746647 - DNA, 25 bp, Homo sapien
aatcagggatgaaataggccgaggt

SEQ ID NO: 2746648 - DNA, 25 bp, Homo sapien
cagaatcagggatgaaataggccga

SEQ ID NO: 2746649 - DNA, 25 bp, Homo sapien
gctgccagaatcagggatgaaatag

SEQ ID NO: 2746650 - DNA, 25 bp, Homo sapien
acagctgccagaatcagggatgaaa

SEQ ID NO: 2746651 - DNA, 25 bp, Homo sapien
gcccctggtcgcttagcaggatgga

SEQ ID NO: 2746652 - DNA, 25 bp, Homo sapien
cactggcccctggtcgcttagcagg

SEQ ID NO: 2746653 - DNA, 25 bp, Homo sapien
cctggtcgcttagcaggatggacat

SEQ ID NO: 2746654 - DNA, 25 bp, Homo sapien
ctggcccctggtcgcttagcaggat

SEQ ID NO: 2746655 - DNA, 25 bp, Homo sapien
gtgtatctgcctccagaacccttaa

SEQ ID NO: 2746656 - DNA, 25 bp, Homo sapien
cctgtgtaggtgcaggtgtatctgc

SEQ ID NO: 2746657 - DNA, 25 bp, Homo sapien
tctatcctgatcaagtttgcatttg

SEQ ID NO: 2746658 - DNA, 25 bp, Homo sapien
cccctgtgtaggtgcaggtgtatct

SEQ ID NO: 2746659 - DNA, 25 bp, Homo sapien
acctttagaggccacagctgcggaa

SEQ ID NO: 2746660 - DNA, 25 bp, Homo sapien
cagacgggaacctttagaggccaca

SEQ ID NO: 2746661 - DNA, 25 bp, Homo sapien
ctcttagtctccagacgggaacctt

SEQ ID NO: 2746662 - DNA, 25 bp, Homo sapien
tctccagacgggaacctttagaggc

SEQ ID NO: 2746663 - DNA, 25 bp, Homo sapien
taggagctgtgactcaaggttgccc

SEQ ID NO: 2746664 - DNA, 25 bp, Homo sapien
tattctacagtccacaacatgcatg

SEQ ID NO: 2746665 - DNA, 25 bp, Homo sapien
gcactccagggatattattctacag

SEQ ID NO: 2746666 - DNA, 25 bp, Homo sapien
atccccggccagctggcactccagg

SEQ ID NO: 2746667 - DNA, 25 bp, Homo sapien
acctggctgcgtctggcaaactgca

SEQ ID NO: 2746668 - DNA, 25 bp, Homo sapien
ggcaaactgcactgcctgcacccgc

SEQ ID NO: 2746669 - DNA, 25 bp, Homo sapien
cttcctcacaagtgtggcacacggg

SEQ ID NO: 2746670 - DNA, 25 bp, Homo sapien
cctcacaagtgtggcacacgggtgg

SEQ ID NO: 2746671 - DNA, 25 bp, Homo sapien
gcaacgcagagcactagaggctgat

SEQ ID NO: 2746672 - DNA, 25 bp, Homo sapien
aggcagcaacgcagagcactagagg

SEQ ID NO: 2746673 - DNA, 25 bp, Homo sapien
ggcaaagccaaccagggtctgtttc

SEQ ID NO: 2746674 - DNA, 25 bp, Homo sapien
agggcatccaggcagcaacgcagag

SEQ ID NO: 2746675 - DNA, 25 bp, Homo sapien
ctggcttcagggactgcagatttgg

SEQ ID NO: 2746676 - DNA, 25 bp, Homo sapien
gactgcagatttggaggcagatgcc

SEQ ID NO: 2746677 - DNA, 25 bp, Homo sapien
tgaggcttgaggctgccacaatgct

SEQ ID NO: 2746678 - DNA, 25 bp, Homo sapien
tcttccactccagcagtgcggggag

SEQ ID NO: 2746679 - DNA, 25 bp, Homo sapien
gtatctctgtgctctggtttcatcc

SEQ ID NO: 2746680 - DNA, 25 bp, Homo sapien
ggtatctctgtgctctggtttcatc

SEQ ID NO: 2746681 - DNA, 25 bp, Homo sapien
ctggtatctctgtgctctggtttca

SEQ ID NO: 2746682 - DNA, 25 bp, Homo sapien
tatctctgtgctctggtttcatccc

SEQ ID NO: 2746683 - DNA, 25 bp, Homo sapien
gaggggggtgacttcctgatacagc

SEQ ID NO: 2746684 - DNA, 25 bp, Homo sapien
ggaggggggtgacttcctgatacag

SEQ ID NO: 2746685 - DNA, 25 bp, Homo sapien
gacacagcactgatgtaggaacttg

SEQ ID NO: 2746686 - DNA, 25 bp, Homo sapien
gatgttgggcctggtgcatggtctg

SEQ ID NO: 2746687 - DNA, 25 bp, Homo sapien
ggatgttgggcctggtgcatggtct

SEQ ID NO: 2746688 - DNA, 25 bp, Homo sapien
ggacacagcactgatgtaggaactt

SEQ ID NO: 2746689 - DNA, 25 bp, Homo sapien
ccaggcaggccgtgggggcatggtg

SEQ ID NO: 2746690 - DNA, 25 bp, Homo sapien
tggtgtgtctgcaggtttctccctg

SEQ ID NO: 2746691 - DNA, 25 bp, Homo sapien
aggtttctccctgaatctctgggac

SEQ ID NO: 2746692 - DNA, 25 bp, Homo sapien
gccgtgggggcatggtgtgtctgca

SEQ ID NO: 2746693 - DNA, 25 bp, Homo sapien
caaacaggagagtcgggacctgccc

SEQ ID NO: 2746694 - DNA, 25 bp, Homo sapien
gggacctgcccactgcttcgttcgg

SEQ ID NO: 2746695 - DNA, 25 bp, Homo sapien
ggcacctttacagagagcgcctggt

SEQ ID NO: 2746696 - DNA, 25 bp, Homo sapien
cactgcttcgttcggccttgaagcc

SEQ ID NO: 2746697 - DNA, 25 bp, Homo sapien
tggaccgccgtaattatatgttaaa

SEQ ID NO: 2746698 - DNA, 25 bp, Homo sapien
aaatggaccgccgtaattatatgtt

SEQ ID NO: 2746699 - DNA, 25 bp, Homo sapien
aatggaccgccgtaattatatgtta

SEQ ID NO: 2746700 - DNA, 25 bp, Homo sapien
aaaaatggaccgccgtaattatatg

SEQ ID NO: 2746701 - DNA, 25 bp, Homo sapien
gccagcatggagaacgctgtcctga

SEQ ID NO: 2746702 - DNA, 25 bp, Homo sapien
tcattaacatgcacatttaggataa

SEQ ID NO: 2746703 - DNA, 25 bp, Homo sapien
ggataatctggagggcatttcagac

SEQ ID NO: 2746704 - DNA, 25 bp, Homo sapien
ctctcagatctgatggtcattaaca

SEQ ID NO: 2746705 - DNA, 25 bp, Homo sapien
tcttggtgaacaggtgaaatttggg

SEQ ID NO: 2746706 - DNA, 25 bp, Homo sapien
ggcccagtggattggtccattgata

SEQ ID NO: 2746707 - DNA, 25 bp, Homo sapien
gatggaaacccatcgtcagtgatgc

SEQ ID NO: 2746708 - DNA, 25 bp, Homo sapien
gtgatgccaacactacctgcgttag

SEQ ID NO: 2746709 - DNA, 25 bp, Homo sapien
tgtgagagtcaggcggggtttcagt

SEQ ID NO: 2746710 - DNA, 25 bp, Homo sapien
ttgtgagagtcaggcggggtttcag

SEQ ID NO: 2746711 - DNA, 25 bp, Homo sapien
gttgtgagagtcaggcggggtttca

SEQ ID NO: 2746712 - DNA, 25 bp, Homo sapien
gaaacacgtcacagtgggattctat

SEQ ID NO: 2746713 - DNA, 25 bp, Homo sapien
tggattcccttaaagacacggacac

SEQ ID NO: 2746714 - DNA, 25 bp, Homo sapien
cccttaaagacacggacacatactc

SEQ ID NO: 2746715 - DNA, 25 bp, Homo sapien
tgtaaccatgatgaatttcgagtca

SEQ ID NO: 2746716 - DNA, 25 bp, Homo sapien
tccacgcctcattctgtcacgggag

SEQ ID NO: 2746717 - DNA, 25 bp, Homo sapien
gagagagtctctgcacttctatttt

SEQ ID NO: 2746718 - DNA, 25 bp, Homo sapien
gaataaaagacggtatcactatggg

SEQ ID NO: 2746719 - DNA, 25 bp, Homo sapien
aaacagttctgcgaatcctccacgc

SEQ ID NO: 2746720 - DNA, 25 bp, Homo sapien
caagcatagctcaggaacctcagtt

SEQ ID NO: 2746721 - DNA, 25 bp, Homo sapien
ttgaaaacaccgtgctgccaggtac

SEQ ID NO: 2746722 - DNA, 25 bp, Homo sapien
gacctttacgctcaagcatcttgta

SEQ ID NO: 2746723 - DNA, 25 bp, Homo sapien
acaaatgtgactttaaacgtgacct

SEQ ID NO: 2746724 - DNA, 25 bp, Homo sapien
gaagccacaggcagtgtggctggaa

SEQ ID NO: 2746725 - DNA, 25 bp, Homo sapien
gaatgtggaagccacaggcagtgtg

SEQ ID NO: 2746726 - DNA, 25 bp, Homo sapien
aggcagtgtggctggaagttcccat

SEQ ID NO: 2746727 - DNA, 25 bp, Homo sapien
tgctgaagaatgtggaagccacagg

SEQ ID NO: 2746728 - DNA, 25 bp, Homo sapien
ccagcggggctgtggtccctaagac

SEQ ID NO: 2746729 - DNA, 25 bp, Homo sapien
ggctgtggtccctaagacgcctgca

SEQ ID NO: 2746730 - DNA, 25 bp, Homo sapien
agcggggctgtggtccctaagacgc

SEQ ID NO: 2746731 - DNA, 25 bp, Homo sapien
cggggctgtggtccctaagacgcct

SEQ ID NO: 2746732 - DNA, 25 bp, Homo sapien
gagtcctctggaaacaactacacat

SEQ ID NO: 2746733 - DNA, 25 bp, Homo sapien
tctctctagacaggcagaatataca

SEQ ID NO: 2746734 - DNA, 25 bp, Homo sapien
gagctctctgctatgtttgttgtgg

SEQ ID NO: 2746735 - DNA, 25 bp, Homo sapien
tataaccctgtttggctgctcatag

SEQ ID NO: 2746736 - DNA, 25 bp, Homo sapien
cctctgcctggggatgtcttccatc

SEQ ID NO: 2746737 - DNA, 25 bp, Homo sapien
tctgcctggggatgtcttccatcag

SEQ ID NO: 2746738 - DNA, 25 bp, Homo sapien
ctctgcctggggatgtcttccatca

SEQ ID NO: 2746739 - DNA, 25 bp, Homo sapien
aacacaggagcacattttagaagca

SEQ ID NO: 2746740 - DNA, 25 bp, Homo sapien
gagctcccgacagtcactgtgggca

SEQ ID NO: 2746741 - DNA, 25 bp, Homo sapien
tttagaagcattcatcaacagcaag

SEQ ID NO: 2746742 - DNA, 25 bp, Homo sapien
gaagatgagcagagctcccgacagt

SEQ ID NO: 2746743 - DNA, 25 bp, Homo sapien
tatatgaagcaccaaaaaatgattt

SEQ ID NO: 2746744 - DNA, 25 bp, Homo sapien
aatgatttcctgctgtttcatataa

SEQ ID NO: 2746745 - DNA, 25 bp, Homo sapien
ttatatgaagcaccaaaaaatgatt

SEQ ID NO: 2746746 - DNA, 25 bp, Homo sapien
aaaaatgatttcctgctgtttcata

SEQ ID NO: 2746747 - DNA, 25 bp, Homo sapien
tcaaatgtcttcacgactcgggaga

SEQ ID NO: 2746748 - DNA, 25 bp, Homo sapien
tgcctggtaggaggggacggccgct

SEQ ID NO: 2746749 - DNA, 25 bp, Homo sapien
gccacggctccctcgtagggcagct

SEQ ID NO: 2746750 - DNA, 25 bp, Homo sapien
gtcttcacgactcgggagaatgcct

SEQ ID NO: 2746751 - DNA, 25 bp, Homo sapien
tgtagtcactttccttagaactgtg

SEQ ID NO: 2746752 - DNA, 25 bp, Homo sapien
cacacctgtagtcactttccttaga

SEQ ID NO: 2746753 - DNA, 25 bp, Homo sapien
tcaaagtaaccttcacacctgtagt

SEQ ID NO: 2746754 - DNA, 25 bp, Homo sapien
atcaaagtaaccttcacacctgtag

SEQ ID NO: 2746755 - DNA, 25 bp, Homo sapien
tcctgtttccgcaatccctgtgtga

SEQ ID NO: 2746756 - DNA, 25 bp, Homo sapien
gtcaatcactccctgccagacagag

SEQ ID NO: 2746757 - DNA, 25 bp, Homo sapien
gccagtagcagggacgcctgtgtca

SEQ ID NO: 2746758 - DNA, 25 bp, Homo sapien
tgcagtgcggctgtgcctccttcat

SEQ ID NO: 2746759 - DNA, 25 bp, Homo sapien
cagccttgaccaacgtgaaccaaaa

SEQ ID NO: 2746760 - DNA, 25 bp, Homo sapien
ccagggccgttcagcaagttcacaa

SEQ ID NO: 2746761 - DNA, 25 bp, Homo sapien
gacagacagccgctctgtgtaggag

SEQ ID NO: 2746762 - DNA, 25 bp, Homo sapien
gcagcaagcctcatccgccttgagg

SEQ ID NO: 2746763 - DNA, 25 bp, Homo sapien
ggtgtaaaccaagccagcagggctg

SEQ ID NO: 2746764 - DNA, 25 bp, Homo sapien
tctccatcccgagaataagggctcg

SEQ ID NO: 2746765 - DNA, 25 bp, Homo sapien
taagggctcggctccgttttcaggc

SEQ ID NO: 2746766 - DNA, 25 bp, Homo sapien
actttgaagtgagtcagccgcgcag

SEQ ID NO: 2746767 - DNA, 25 bp, Homo sapien
gagttcagggtctgtggtttgccca

SEQ ID NO: 2746768 - DNA, 25 bp, Homo sapien
gatgcaccacctgtctatcaaggct

SEQ ID NO: 2746769 - DNA, 25 bp, Homo sapien
tatcaaggctgagctcggtagccac

SEQ ID NO: 2746770 - DNA, 25 bp, Homo sapien
gggacgggatcctccaagtgcttca

SEQ ID NO: 2746771 - DNA, 25 bp, Homo sapien
ctgtactgcaggcactgggacttca

SEQ ID NO: 2746772 - DNA, 25 bp, Homo sapien
gggacttcatccgagcccttcacag

SEQ ID NO: 2746773 - DNA, 25 bp, Homo sapien
gaccatgcatcagctggtggcttga

SEQ ID NO: 2746774 - DNA, 25 bp, Homo sapien
tgattgccacccagactgtactgca

SEQ ID NO: 2746775 - DNA, 25 bp, Homo sapien
gttcttctagttgagatttaatgct

SEQ ID NO: 2746776 - DNA, 25 bp, Homo sapien
ctagttgagatttaatgctaagcct

SEQ ID NO: 2746777 - DNA, 25 bp, Homo sapien
ttgagatttaatgctaagccttgtg

SEQ ID NO: 2746778 - DNA, 25 bp, Homo sapien
gatttaatgctaagccttgtgcaaa

SEQ ID NO: 2746779 - DNA, 25 bp, Homo sapien
ctgtgctgcactgcggcctccgagt

SEQ ID NO: 2746780 - DNA, 25 bp, Homo sapien
tctccttcgtaggtctgaggcccct

SEQ ID NO: 2746781 - DNA, 25 bp, Homo sapien
gtggctcgcacaactgcgcctggca

SEQ ID NO: 2746782 - DNA, 25 bp, Homo sapien
cagttgtctccttcgtaggtctgag

SEQ ID NO: 2746783 - DNA, 25 bp, Homo sapien
aagcagcacttggatgtcctctgac

SEQ ID NO: 2746784 - DNA, 25 bp, Homo sapien
tctgacacggctgccaggaggcact

SEQ ID NO: 2746785 - DNA, 25 bp, Homo sapien
tgttaaaacaagcagcacttggatg

SEQ ID NO: 2746786 - DNA, 25 bp, Homo sapien
gtcctctgacacggctgccaggagg

SEQ ID NO: 2746787 - DNA, 25 bp, Homo sapien
tcctggtcatccattgttctgtagg

SEQ ID NO: 2746788 - DNA, 25 bp, Homo sapien
ctggccaggaaacacacgtggatcc

SEQ ID NO: 2746789 - DNA, 25 bp, Homo sapien
caggggctgtaacatctggccagga

SEQ ID NO: 2746790 - DNA, 25 bp, Homo sapien
gaaacacacgtggatcctggtcatc

SEQ ID NO: 2746791 - DNA, 25 bp, Homo sapien
tgacggcccccatgttgacagcatg

SEQ ID NO: 2746792 - DNA, 25 bp, Homo sapien
ccaccagctgaggttgcaggctctg

SEQ ID NO: 2746793 - DNA, 25 bp, Homo sapien
gggcccatttgatgcacaccaagca

SEQ ID NO: 2746794 - DNA, 25 bp, Homo sapien
gcaggcctgagcaattgctgacggc

SEQ ID NO: 2746795 - DNA, 25 bp, Homo sapien
ctgcacccattctacactttctgtg

SEQ ID NO: 2746796 - DNA, 25 bp, Homo sapien
gagctgagacaggaccatttttctg

SEQ ID NO: 2746797 - DNA, 25 bp, Homo sapien
ctgagacaggaccatttttctgtgt

SEQ ID NO: 2746798 - DNA, 25 bp, Homo sapien
tggagctgagacaggaccatttttc

SEQ ID NO: 2746799 - DNA, 25 bp, Homo sapien
atggagctgagacaggaccattttt

SEQ ID NO: 2746800 - DNA, 25 bp, Homo sapien
attccctccagaggcgaatccttca

SEQ ID NO: 2746801 - DNA, 25 bp, Homo sapien
tgtgggggatacacgtcttccctgt

SEQ ID NO: 2746802 - DNA, 25 bp, Homo sapien
ccagaggcgaatccttcagcattct

SEQ ID NO: 2746803 - DNA, 25 bp, Homo sapien
agcattctgttgtgggggatacacg

SEQ ID NO: 2746804 - DNA, 25 bp, Homo sapien
ctgcagaagggggtgggagtctgac

SEQ ID NO: 2746805 - DNA, 25 bp, Homo sapien
tgcagaagggggtgggagtctgacc

SEQ ID NO: 2746806 - DNA, 25 bp, Homo sapien
tcctggagaccagtgctgtccccat

SEQ ID NO: 2746807 - DNA, 25 bp, Homo sapien
tccccacagtgggtctccctcctgg

SEQ ID NO: 2746808 - DNA, 25 bp, Homo sapien
gtggtctcggctcggtggggatctg

SEQ ID NO: 2746809 - DNA, 25 bp, Homo sapien
ctcggtggggatctgtccccacagt

SEQ ID NO: 2746810 - DNA, 25 bp, Homo sapien
agaggccttgtctgagctgttctgt

SEQ ID NO: 2746811 - DNA, 25 bp, Homo sapien
ctggtgcttggtggcggttggttca

SEQ ID NO: 2746812 - DNA, 25 bp, Homo sapien
gacggtgttcagcatcctgtccaca

SEQ ID NO: 2746813 - DNA, 25 bp, Homo sapien
tgatgtcgttactccagggctgcag

SEQ ID NO: 2746814 - DNA, 25 bp, Homo sapien
gcaaagctatgctgagctccctcag

SEQ ID NO: 2746815 - DNA, 25 bp, Homo sapien
cactctcttttgaccagggttctga

SEQ ID NO: 2746816 - DNA, 25 bp, Homo sapien
gctgttcagcgcctgcaaagctatg

SEQ ID NO: 2746817 - DNA, 25 bp, Homo sapien
tgatgctcacagaagagtcctggca

SEQ ID NO: 2746818 - DNA, 25 bp, Homo sapien
tctgaacgcctgcttggagggacag

SEQ ID NO: 2746819 - DNA, 25 bp, Homo sapien
tggtttgcccttgacagcatctcca

SEQ ID NO: 2746820 - DNA, 25 bp, Homo sapien
acgtccatggtttgcccttgacagc

SEQ ID NO: 2746821 - DNA, 25 bp, Homo sapien
tgaacgcctgcttggagggacagcc

SEQ ID NO: 2746822 - DNA, 25 bp, Homo sapien
agaggcccagctttgggatagagca

SEQ ID NO: 2746823 - DNA, 25 bp, Homo sapien
ggcagaggcccagctttgggataga

SEQ ID NO: 2746824 - DNA, 25 bp, Homo sapien
cagaatggccagcggcagaggccca

SEQ ID NO: 2746825 - DNA, 25 bp, Homo sapien
caggaggcagaatggccagcggcag

SEQ ID NO: 2746826 - DNA, 25 bp, Homo sapien
actgaaaaacctgtcctaagcatac

SEQ ID NO: 2746827 - DNA, 25 bp, Homo sapien
aggaaatgctattaggcgcccatca

SEQ ID NO: 2746828 - DNA, 25 bp, Homo sapien
tcaagaactcaaagcaagcttccga

SEQ ID NO: 2746829 - DNA, 25 bp, Homo sapien
catcttcatattgtctgcacgggac

SEQ ID NO: 2746830 - DNA, 25 bp, Homo sapien
agcaagcttccgaaagctgcttggg

SEQ ID NO: 2746831 - DNA, 25 bp, Homo sapien
tcaactgcacccacgcagtgtccag

SEQ ID NO: 2746832 - DNA, 25 bp, Homo sapien
tcctcaactgcacccacgcagtgtc

SEQ ID NO: 2746833 - DNA, 25 bp, Homo sapien
tgcctcctcaactgcacccacgcag

SEQ ID NO: 2746834 - DNA, 25 bp, Homo sapien
actgcacccacgcagtgtccaggct

SEQ ID NO: 2746835 - DNA, 25 bp, Homo sapien
cttgtaggggagaggaggagaatgg

SEQ ID NO: 2746836 - DNA, 25 bp, Homo sapien
gtaggggagaggaggagaatggatg

SEQ ID NO: 2746837 - DNA, 25 bp, Homo sapien
ttgtaggggagaggaggagaatgga

SEQ ID NO: 2746838 - DNA, 25 bp, Homo sapien
tgtaggggagaggaggagaatggat

SEQ ID NO: 2746839 - DNA, 25 bp, Homo sapien
gcgactgtagtctgcaactggttct

SEQ ID NO: 2746840 - DNA, 25 bp, Homo sapien
agaatccttaccacacaaagaggtg

SEQ ID NO: 2746841 - DNA, 25 bp, Homo sapien
gatttctgcttactccccgttggtg

SEQ ID NO: 2746842 - DNA, 25 bp, Homo sapien
gaggtggccacaataacaaagccat

SEQ ID NO: 2746843 - DNA, 25 bp, Homo sapien
cacaggcaaagtttgccccagtagc

SEQ ID NO: 2746844 - DNA, 25 bp, Homo sapien
tcacaggcaaagtttgccccagtag

SEQ ID NO: 2746845 - DNA, 25 bp, Homo sapien
ggcaaagtttgccccagtagctagc

SEQ ID NO: 2746846 - DNA, 25 bp, Homo sapien
caggcaaagtttgccccagtagcta

SEQ ID NO: 2746847 - DNA, 25 bp, Homo sapien
tcagatcattaaactgcggccgttc

SEQ ID NO: 2746848 - DNA, 25 bp, Homo sapien
gtttatcagatcattaaactgcggc

SEQ ID NO: 2746849 - DNA, 25 bp, Homo sapien
ttatcagatcattaaactgcggccg

SEQ ID NO: 2746850 - DNA, 25 bp, Homo sapien
agatcattaaactgcggccgttcgt

SEQ ID NO: 2746851 - DNA, 25 bp, Homo sapien
tgatgtgggatccaccacccggctg

SEQ ID NO: 2746852 - DNA, 25 bp, Homo sapien
gaggctctactgttctgctccggca

SEQ ID NO: 2746853 - DNA, 25 bp, Homo sapien
ccggctggaggctctactgttctgc

SEQ ID NO: 2746854 - DNA, 25 bp, Homo sapien
cacattgccaggaatctcgccaggt

SEQ ID NO: 2746855 - DNA, 25 bp, Homo sapien
ctactttgacacacatccactaaac

SEQ ID NO: 2746856 - DNA, 25 bp, Homo sapien
tcttgctactactttgacacacatc

SEQ ID NO: 2746857 - DNA, 25 bp, Homo sapien
gctactactttgacacacatccact

SEQ ID NO: 2746858 - DNA, 25 bp, Homo sapien
ttgctactactttgacacacatcca

SEQ ID NO: 2746859 - DNA, 25 bp, Homo sapien
gatggcaaatctttgaatgagtatc

SEQ ID NO: 2746860 - DNA, 25 bp, Homo sapien
tgacatggtcggcacaggccttcgg

SEQ ID NO: 2746861 - DNA, 25 bp, Homo sapien
gctgtgatggcaaatctttgaatga

SEQ ID NO: 2746862 - DNA, 25 bp, Homo sapien
atcttctgacatggtcggcacaggc

SEQ ID NO: 2746863 - DNA, 25 bp, Homo sapien
gaccacaccgcgtttttctcagact

SEQ ID NO: 2746864 - DNA, 25 bp, Homo sapien
gcaggttgcctttcccgttcacgtg

SEQ ID NO: 2746865 - DNA, 25 bp, Homo sapien
gtgtcttccgtacacggcgcctgca

SEQ ID NO: 2746866 - DNA, 25 bp, Homo sapien
cgcctgcagaccacaccgcgttttt

SEQ ID NO: 2746867 - DNA, 25 bp, Homo sapien
ctgttgtgccatcaatagcagccat

SEQ ID NO: 2746868 - DNA, 25 bp, Homo sapien
ccatcaatagcagccatgagggtca

SEQ ID NO: 2746869 - DNA, 25 bp, Homo sapien
gtgccatcaatagcagccatgaggg

SEQ ID NO: 2746870 - DNA, 25 bp, Homo sapien
gtctgttgtgccatcaatagcagcc

SEQ ID NO: 2746871 - DNA, 25 bp, Homo sapien
gttcccaggagtggttccgttgtca

SEQ ID NO: 2746872 - DNA, 25 bp, Homo sapien
gagtggttccgttgtcacagagaag

SEQ ID NO: 2746873 - DNA, 25 bp, Homo sapien
tgtgagaacttcaagcgcagtccca

SEQ ID NO: 2746874 - DNA, 25 bp, Homo sapien
tgagaacttcaagcgcagtcccagg

SEQ ID NO: 2746875 - DNA, 25 bp, Homo sapien
aggcacagctgcatcagatgtgttc

SEQ ID NO: 2746876 - DNA, 25 bp, Homo sapien
cacagctgcatcagatgtgttccca

SEQ ID NO: 2746877 - DNA, 25 bp, Homo sapien
atcactcctgaagcctctagcttct

SEQ ID NO: 2746878 - DNA, 25 bp, Homo sapien
cctctagcttctgatgtagaaatca

SEQ ID NO: 2746879 - DNA, 25 bp, Homo sapien
gtctttgagttgatgtggttgttgg

SEQ ID NO: 2746880 - DNA, 25 bp, Homo sapien
agtctttgagttgatgtggttgttg

SEQ ID NO: 2746881 - DNA, 25 bp, Homo sapien
ttcagtctttgagttgatgtggttg

SEQ ID NO: 2746882 - DNA, 25 bp, Homo sapien
cagtctttgagttgatgtggttgtt

SEQ ID NO: 2746883 - DNA, 25 bp, Homo sapien
ttactcagagtttcaaaacaaccag

SEQ ID NO: 2746884 - DNA, 25 bp, Homo sapien
tacttcaatcttgacctcgttcagg

SEQ ID NO: 2746885 - DNA, 25 bp, Homo sapien
tcagatacttcaatcttgacctcgt

SEQ ID NO: 2746886 - DNA, 25 bp, Homo sapien
cctcgttcaggtatttactcagagt

SEQ ID NO: 2746887 - DNA, 25 bp, Homo sapien
gcagggccgggttgttgagaatatg

SEQ ID NO: 2746888 - DNA, 25 bp, Homo sapien
tatactcccgtacctcacaaagagc

SEQ ID NO: 2746889 - DNA, 25 bp, Homo sapien
tgcagcaagctatactcccgtacct

SEQ ID NO: 2746890 - DNA, 25 bp, Homo sapien
ctgggtttgcagcaagctatactcc

SEQ ID NO: 2746891 - DNA, 25 bp, Homo sapien
cagcccacatcggagtgaccagggc

SEQ ID NO: 2746892 - DNA, 25 bp, Homo sapien
agcccacatcggagtgaccagggct

SEQ ID NO: 2746893 - DNA, 25 bp, Homo sapien
tagctgacaacaaaatgcttcttag

SEQ ID NO: 2746894 - DNA, 25 bp, Homo sapien
cttcttagggccattagatcctgtc

SEQ ID NO: 2746895 - DNA, 25 bp, Homo sapien
tttctactctgctacagtcctcttt

SEQ ID NO: 2746896 - DNA, 25 bp, Homo sapien
gaggcggtaaactgacaccatagct

SEQ ID NO: 2746897 - DNA, 25 bp, Homo sapien
ttccatttatcagcaaatgcttgag

SEQ ID NO: 2746898 - DNA, 25 bp, Homo sapien
tgcacctggtgagcagtacctgcgg

SEQ ID NO: 2746899 - DNA, 25 bp, Homo sapien
tgagcagtacctgcggagctgctgt

SEQ ID NO: 2746900 - DNA, 25 bp, Homo sapien
cagcaaatgcttgagagcacactct

SEQ ID NO: 2746901 - DNA, 25 bp, Homo sapien
ttccaggcggtgtgagtccaggtct

SEQ ID NO: 2746902 - DNA, 25 bp, Homo sapien
tccattcaggattcgtgcttgccca

SEQ ID NO: 2746903 - DNA, 25 bp, Homo sapien
tgcctgtgccaagtagggcttgtcc

SEQ ID NO: 2746904 - DNA, 25 bp, Homo sapien
tctttaaaaggaagcagcgctttgc

SEQ ID NO: 2746905 - DNA, 25 bp, Homo sapien
gctggccaaacctctcattcttcaa

SEQ ID NO: 2746906 - DNA, 25 bp, Homo sapien
cttcaatgtccagctccggtttgcc

SEQ ID NO: 2746907 - DNA, 25 bp, Homo sapien
gaaatccacagcatcagaattaatt

SEQ ID NO: 2746908 - DNA, 25 bp, Homo sapien
ctcctgattcgatggcaggtggtac

SEQ ID NO: 2746909 - DNA, 25 bp, Homo sapien
gtgctttctgatccaatgttcagcg

SEQ ID NO: 2746910 - DNA, 25 bp, Homo sapien
cttcttgtgctttctgatccaatgt

SEQ ID NO: 2746911 - DNA, 25 bp, Homo sapien
atccaatgttcagcgggcaggagct

SEQ ID NO: 2746912 - DNA, 25 bp, Homo sapien
ctcggccctggtgcccgccgcattt

SEQ ID NO: 2746913 - DNA, 25 bp, Homo sapien
tgggcacacaacagggagtccgtaa

SEQ ID NO: 2746914 - DNA, 25 bp, Homo sapien
ctgggcacacaacagggagtccgta

SEQ ID NO: 2746915 - DNA, 25 bp, Homo sapien
tgacggctttatgcggctctcagtg

SEQ ID NO: 2746916 - DNA, 25 bp, Homo sapien
tgacactgtagcctgacggctttat

SEQ ID NO: 2746917 - DNA, 25 bp, Homo sapien
tagcctgacggctttatgcggctct

SEQ ID NO: 2746918 - DNA, 25 bp, Homo sapien
gggcagcagaaagccgggcttgtga

SEQ ID NO: 2746919 - DNA, 25 bp, Homo sapien
gttatgtttatggacaacaggcaga

SEQ ID NO: 2746920 - DNA, 25 bp, Homo sapien
tctgctgtgggctgtttaaatttag

SEQ ID NO: 2746921 - DNA, 25 bp, Homo sapien
cagtcagcgtctcgttggctttccc

SEQ ID NO: 2746922 - DNA, 25 bp, Homo sapien
aatacgcgtgccttctctgctgtgg

SEQ ID NO: 2746923 - DNA, 25 bp, Homo sapien
cagtttacaaatcttcctgtgagtg

SEQ ID NO: 2746924 - DNA, 25 bp, Homo sapien
gtttacaaatcttcctgtgagtgtg

SEQ ID NO: 2746925 - DNA, 25 bp, Homo sapien
ttacaaatcttcctgtgagtgtgtg

SEQ ID NO: 2746926 - DNA, 25 bp, Homo sapien
acaaatcttcctgtgagtgtgtgtt

SEQ ID NO: 2746927 - DNA, 25 bp, Homo sapien
aatgctctcccattgccaagcatgg

SEQ ID NO: 2746928 - DNA, 25 bp, Homo sapien
caatgctctcccattgccaagcatg

SEQ ID NO: 2746929 - DNA, 25 bp, Homo sapien
cccaatgctctcccattgccaagca

SEQ ID NO: 2746930 - DNA, 25 bp, Homo sapien
atgctctcccattgccaagcatggt

SEQ ID NO: 2746931 - DNA, 25 bp, Homo sapien
ctggaatgaacacccgacagcatgg

SEQ ID NO: 2746932 - DNA, 25 bp, Homo sapien
atgaacacccgacagcatggaaggg

SEQ ID NO: 2746933 - DNA, 25 bp, Homo sapien
cagcatggaagggagattcctgtcc

SEQ ID NO: 2746934 - DNA, 25 bp, Homo sapien
cgcctctggaatgaacacccgacag

SEQ ID NO: 2746935 - DNA, 25 bp, Homo sapien
cacagccctgtttgttcggtttgca

SEQ ID NO: 2746936 - DNA, 25 bp, Homo sapien
tagacagggcgctttgcaaaacggt

SEQ ID NO: 2746937 - DNA, 25 bp, Homo sapien
tgactttgtacttctgttcggcgcc

SEQ ID NO: 2746938 - DNA, 25 bp, Homo sapien
ctaatgacggccgtgtggctgccgc

SEQ ID NO: 2746939 - DNA, 25 bp, Homo sapien
tgtcaattagatgcgtaggcctcgg

SEQ ID NO: 2746940 - DNA, 25 bp, Homo sapien
taggcctcggagtctgaaacggaat

SEQ ID NO: 2746941 - DNA, 25 bp, Homo sapien
taaataatttccaacagcgactcgc

SEQ ID NO: 2746942 - DNA, 25 bp, Homo sapien
gaaacggaatgacctgctcgggtga

SEQ ID NO: 2746943 - DNA, 25 bp, Homo sapien
cattgtgctcttgcacgtgcccctg

SEQ ID NO: 2746944 - DNA, 25 bp, Homo sapien
caggtctccatgagtccgtgacagc

SEQ ID NO: 2746945 - DNA, 25 bp, Homo sapien
gggtatgcttgtctctaggactgaa

SEQ ID NO: 2746946 - DNA, 25 bp, Homo sapien
cagctgctgaactgggttctgccca

SEQ ID NO: 2746947 - DNA, 25 bp, Homo sapien
tttcctcaggggctcccatggctgc

SEQ ID NO: 2746948 - DNA, 25 bp, Homo sapien
aactcttcacagttgggttcctctg

SEQ ID NO: 2746949 - DNA, 25 bp, Homo sapien
tgtggagactgcaccctcccgtttc

SEQ ID NO: 2746950 - DNA, 25 bp, Homo sapien
tgtctgtctttctattctgcggctc

SEQ ID NO: 2746951 - DNA, 25 bp, Homo sapien
ctgcacagccccgcagtgtcactgc

SEQ ID NO: 2746952 - DNA, 25 bp, Homo sapien
cagccccgcagtgtcactgcccagc

SEQ ID NO: 2746953 - DNA, 25 bp, Homo sapien
cacagccccgcagtgtcactgccca

SEQ ID NO: 2746954 - DNA, 25 bp, Homo sapien
tgcacagccccgcagtgtcactgcc

SEQ ID NO: 2746955 - DNA, 25 bp, Homo sapien
ctctgggtgagtttccttatgcagg

SEQ ID NO: 2746956 - DNA, 25 bp, Homo sapien
ctgggtgagtttccttatgcaggtc

SEQ ID NO: 2746957 - DNA, 25 bp, Homo sapien
ggtgagtttccttatgcaggtctct

SEQ ID NO: 2746958 - DNA, 25 bp, Homo sapien
gggtgagtttccttatgcaggtctc

SEQ ID NO: 2746959 - DNA, 25 bp, Homo sapien
ctccagaggatggtagcgagtcgct

SEQ ID NO: 2746960 - DNA, 25 bp, Homo sapien
tgccccaggtaggagatggcagctt

SEQ ID NO: 2746961 - DNA, 25 bp, Homo sapien
aggtccctccagaggatggtagcga

SEQ ID NO: 2746962 - DNA, 25 bp, Homo sapien
tcaaaggtccctccagaggatggta

SEQ ID NO: 2746963 - DNA, 25 bp, Homo sapien
atgaggtgtggccaagtttgggctt

SEQ ID NO: 2746964 - DNA, 25 bp, Homo sapien
ccaagtttgggctttggagcaggaa

SEQ ID NO: 2746965 - DNA, 25 bp, Homo sapien
ctgtaaatgaggtgtggccaagttt

SEQ ID NO: 2746966 - DNA, 25 bp, Homo sapien
ggctttggagcaggaagcaagctca

SEQ ID NO: 2746967 - DNA, 25 bp, Homo sapien
tggacatctgggcttacatagccat

SEQ ID NO: 2746968 - DNA, 25 bp, Homo sapien
tggcactctgacgaggccctttcct

SEQ ID NO: 2746969 - DNA, 25 bp, Homo sapien
ggtggttcggcttcttagagactta

SEQ ID NO: 2746970 - DNA, 25 bp, Homo sapien
tttgaggagaggcatattggacatc

SEQ ID NO: 2746971 - DNA, 25 bp, Homo sapien
catgctcatagtcatcgctgatgta

SEQ ID NO: 2746972 - DNA, 25 bp, Homo sapien
tgtatgaatattaccaaacagagct

SEQ ID NO: 2746973 - DNA, 25 bp, Homo sapien
tccttttcatgctcatagtcatcgc

SEQ ID NO: 2746974 - DNA, 25 bp, Homo sapien
gtcatcgctgatgtataaataattc

SEQ ID NO: 2746975 - DNA, 25 bp, Homo sapien
tttctggcaactctgacgtggagag

SEQ ID NO: 2746976 - DNA, 25 bp, Homo sapien
gcagctgagctcccggcatcaggga

SEQ ID NO: 2746977 - DNA, 25 bp, Homo sapien
ctctttctggcaactctgacgtgga

SEQ ID NO: 2746978 - DNA, 25 bp, Homo sapien
ctctgagtgagctccaaagcttgca

SEQ ID NO: 2746979 - DNA, 25 bp, Homo sapien
cttgtggatcttgtaggattcctga

SEQ ID NO: 2746980 - DNA, 25 bp, Homo sapien
ttgtggatcttgtaggattcctgag

SEQ ID NO: 2746981 - DNA, 25 bp, Homo sapien
tcgtggaccccgaggttgaggtaga

SEQ ID NO: 2746982 - DNA, 25 bp, Homo sapien
ggttgaggtagaatggtaccacttg

SEQ ID NO: 2746983 - DNA, 25 bp, Homo sapien
caggtggagatttcggtggggtgtc

SEQ ID NO: 2746984 - DNA, 25 bp, Homo sapien
tcagggtcgtggaccccgaggttga

SEQ ID NO: 2746985 - DNA, 25 bp, Homo sapien
ctgcctctgtgcccactgttgcttc

SEQ ID NO: 2746986 - DNA, 25 bp, Homo sapien
gcctctgtgcccactgttgcttctt

SEQ ID NO: 2746987 - DNA, 25 bp, Homo sapien
gttgcttcttcctttctgttgatga

SEQ ID NO: 2746988 - DNA, 25 bp, Homo sapien
gcttcttcctttctgttgatgaggc

SEQ ID NO: 2746989 - DNA, 25 bp, Homo sapien
tggtctccaagtcacagcttttcat

SEQ ID NO: 2746990 - DNA, 25 bp, Homo sapien
ttttctgtggtctccaagtcacagc

SEQ ID NO: 2746991 - DNA, 25 bp, Homo sapien
tctgtggtctccaagtcacagcttt

SEQ ID NO: 2746992 - DNA, 25 bp, Homo sapien
tggctgaatgctgcttcctgaaact

SEQ ID NO: 2746993 - DNA, 25 bp, Homo sapien
ctagccctcaatctgcattggcaat

SEQ ID NO: 2746994 - DNA, 25 bp, Homo sapien
gatgtctggtcttaggtctctaggt

SEQ ID NO: 2746995 - DNA, 25 bp, Homo sapien
tctctaggttcacaccagatgtctc

SEQ ID NO: 2746996 - DNA, 25 bp, Homo sapien
tccaggatgaccgagatgtctggtc

SEQ ID NO: 2746997 - DNA, 25 bp, Homo sapien
cagggccatccaggatgaccgagat

SEQ ID NO: 2746998 - DNA, 25 bp, Homo sapien
ttgtttttcttcgaggccgcacctg

SEQ ID NO: 2746999 - DNA, 25 bp, Homo sapien
caggtctctcagaaagccttgtgga

SEQ ID NO: 2747000 - DNA, 25 bp, Homo sapien
tattccgtgccatcaggctggtgct

SEQ ID NO: 2747001 - DNA, 25 bp, Homo sapien
cacgcctctacttgtggagctgcag

SEQ ID NO: 2747002 - DNA, 25 bp, Homo sapien
tctgcgtgtataaaatgagtctcct

SEQ ID NO: 2747003 - DNA, 25 bp, Homo sapien
actcaggagttagcaagaccgggag

SEQ ID NO: 2747004 - DNA, 25 bp, Homo sapien
cattcctaacactacctgggtccag

SEQ ID NO: 2747005 - DNA, 25 bp, Homo sapien
tcaatggcccgacataaggaaacgg

SEQ ID NO: 2747006 - DNA, 25 bp, Homo sapien
aacaagccgacgcttgcttctcgcc

SEQ ID NO: 2747007 - DNA, 25 bp, Homo sapien
ctccactggactcgcgggttgacct

SEQ ID NO: 2747008 - DNA, 25 bp, Homo sapien
ctgcttgcaatgtcagcacccaggg

SEQ ID NO: 2747009 - DNA, 25 bp, Homo sapien
gacgcttgcttctcgcctctgccac

SEQ ID NO: 2747010 - DNA, 25 bp, Homo sapien
gataaaaacgttcttcattgaggaa

SEQ ID NO: 2747011 - DNA, 25 bp, Homo sapien
gagagccccgcgtggtcccacaggc

SEQ ID NO: 2747012 - DNA, 25 bp, Homo sapien
cagtgggaagccgtctgagagcccc

SEQ ID NO: 2747013 - DNA, 25 bp, Homo sapien
acagccagtgggaagccgtctgaga

SEQ ID NO: 2747014 - DNA, 25 bp, Homo sapien
agccccgcgtggtcccacaggccca

SEQ ID NO: 2747015 - DNA, 25 bp, Homo sapien
gaacaggcatgtttctatagttcat

SEQ ID NO: 2747016 - DNA, 25 bp, Homo sapien
tcttcacataaggctgcttggacat

SEQ ID NO: 2747017 - DNA, 25 bp, Homo sapien
gcatgtttctatagttcatcttcac

SEQ ID NO: 2747018 - DNA, 25 bp, Homo sapien
caggcatgtttctatagttcatctt

SEQ ID NO: 2747019 - DNA, 25 bp, Homo sapien
cacgccttaacaggcctgctgttag

SEQ ID NO: 2747020 - DNA, 25 bp, Homo sapien
gagcacctggcagtaaaccacacct

SEQ ID NO: 2747021 - DNA, 25 bp, Homo sapien
gggactcagctctgaagagcacctg

SEQ ID NO: 2747022 - DNA, 25 bp, Homo sapien
agccacacatggatgattccattgc

SEQ ID NO: 2747023 - DNA, 25 bp, Homo sapien
tttggacatgaccttgtccatcaga

SEQ ID NO: 2747024 - DNA, 25 bp, Homo sapien
agggcaagacccagcctgaaagtct

SEQ ID NO: 2747025 - DNA, 25 bp, Homo sapien
tgtgcgtcgtccgagcaccgctgac

SEQ ID NO: 2747026 - DNA, 25 bp, Homo sapien
gaaagtctgcccgaacctggagagc

SEQ ID NO: 2747027 - DNA, 25 bp, Homo sapien
tgatatgcgagtaagatgccactta

SEQ ID NO: 2747028 - DNA, 25 bp, Homo sapien
atctgactgctgtcactaccgcaga

SEQ ID NO: 2747029 - DNA, 25 bp, Homo sapien
tctgccttcagcctcgcactcctct

SEQ ID NO: 2747030 - DNA, 25 bp, Homo sapien
ttcagcctcgcactcctctgcagaa

SEQ ID NO: 2747031 - DNA, 25 bp, Homo sapien
gactgctgtcactaccgcagacttc

SEQ ID NO: 2747032 - DNA, 25 bp, Homo sapien
gaagagttgccaaagcgtgtcttca

SEQ ID NO: 2747033 - DNA, 25 bp, Homo sapien
tggattcagccaagcaggcgaatgt

SEQ ID NO: 2747034 - DNA, 25 bp, Homo sapien
tgttccggaaggagcgtgaaggctc

SEQ ID NO: 2747035 - DNA, 25 bp, Homo sapien
gctccaggtgccgatgtggatcatg

SEQ ID NO: 2747036 - DNA, 25 bp, Homo sapien
agccccagaggcacgtgcatgcact

SEQ ID NO: 2747037 - DNA, 25 bp, Homo sapien
tgcactcacacgtgcacggcgaggg

SEQ ID NO: 2747038 - DNA, 25 bp, Homo sapien
ccagaggcacgtgcatgcactcaca

SEQ ID NO: 2747039 - DNA, 25 bp, Homo sapien
cgtgcatgcactcacacgtgcacgg

SEQ ID NO: 2747040 - DNA, 25 bp, Homo sapien
actcgggtgtacaagtgcacaggtt

SEQ ID NO: 2747041 - DNA, 25 bp, Homo sapien
caggaactcgggtgtacaagtgcac

SEQ ID NO: 2747042 - DNA, 25 bp, Homo sapien
ggaactcgggtgtacaagtgcacag

SEQ ID NO: 2747043 - DNA, 25 bp, Homo sapien
tcgggtgtacaagtgcacaggtttg

SEQ ID NO: 2747044 - DNA, 25 bp, Homo sapien
tgtctcagcaggatcactgccatcc

SEQ ID NO: 2747045 - DNA, 25 bp, Homo sapien
tggtccatcgggtctccactccttg

SEQ ID NO: 2747046 - DNA, 25 bp, Homo sapien
acacccttggagacagcgagtgtct

SEQ ID NO: 2747047 - DNA, 25 bp, Homo sapien
tccagggcacggctctggtccatcg

SEQ ID NO: 2747048 - DNA, 25 bp, Homo sapien
gcagcagaggtggtctccggtcctg

SEQ ID NO: 2747049 - DNA, 25 bp, Homo sapien
cagcagaggtggtctccggtcctgc

SEQ ID NO: 2747050 - DNA, 25 bp, Homo sapien
gtctccggtcctgcgtccctccaac

SEQ ID NO: 2747051 - DNA, 25 bp, Homo sapien
cagaggtggtctccggtcctgcgtc

SEQ ID NO: 2747052 - DNA, 25 bp, Homo sapien
cagtgattctcctcaatgcagcagg

SEQ ID NO: 2747053 - DNA, 25 bp, Homo sapien
ggcagtgattctcctcaatgcagca

SEQ ID NO: 2747054 - DNA, 25 bp, Homo sapien
tctcctcaatgcagcaggtgcttgt

SEQ ID NO: 2747055 - DNA, 25 bp, Homo sapien
gattctcctcaatgcagcaggtgct

SEQ ID NO: 2747056 - DNA, 25 bp, Homo sapien
cttcctctcaatactcagaccctcc

SEQ ID NO: 2747057 - DNA, 25 bp, Homo sapien
ccagcctcttttgggattccgtcca

SEQ ID NO: 2747058 - DNA, 25 bp, Homo sapien
cagcctcttttgggattccgtccat

SEQ ID NO: 2747059 - DNA, 25 bp, Homo sapien
cctctcaatactcagaccctccatc

SEQ ID NO: 2747060 - DNA, 25 bp, Homo sapien
tggcatgttgagtatctccatgaaa

SEQ ID NO: 2747061 - DNA, 25 bp, Homo sapien
ctggcatgttgagtatctccatgaa

SEQ ID NO: 2747062 - DNA, 25 bp, Homo sapien
ggcatgttgagtatctccatgaaat

SEQ ID NO: 2747063 - DNA, 25 bp, Homo sapien
gcaggaactgactgtgccgggaccc

SEQ ID NO: 2747064 - DNA, 25 bp, Homo sapien
tgactgtgccgggaccccagcacaa

SEQ ID NO: 2747065 - DNA, 25 bp, Homo sapien
ggaactgactgtgccgggaccccag

SEQ ID NO: 2747066 - DNA, 25 bp, Homo sapien
cagtagccatgggatgagctgccag

SEQ ID NO: 2747067 - DNA, 25 bp, Homo sapien
tgagttaggggtgggatgggagcag

SEQ ID NO: 2747068 - DNA, 25 bp, Homo sapien
gggtgggatgggagcaggggaagac

SEQ ID NO: 2747069 - DNA, 25 bp, Homo sapien
gtgggatgggagcaggggaagacat

SEQ ID NO: 2747070 - DNA, 25 bp, Homo sapien
agttaggggtgggatgggagcaggg

SEQ ID NO: 2747071 - DNA, 25 bp, Homo sapien
ccctcagaatagaatgccagacgta

SEQ ID NO: 2747072 - DNA, 25 bp, Homo sapien
catccacgtgggtagcaagtgacaa

SEQ ID NO: 2747073 - DNA, 25 bp, Homo sapien
cgttcattcacgagaggcctcaggt

SEQ ID NO: 2747074 - DNA, 25 bp, Homo sapien
tctagcagctgatttacaagtggtc

SEQ ID NO: 2747075 - DNA, 25 bp, Homo sapien
aggcagccctccagcgggttctggt

SEQ ID NO: 2747076 - DNA, 25 bp, Homo sapien
gactcaacgcgctttgtagggcctg

SEQ ID NO: 2747077 - DNA, 25 bp, Homo sapien
aggcgaccagacgtgctctccgtcg

SEQ ID NO: 2747078 - DNA, 25 bp, Homo sapien
aaatccggcttgtcgcataagctcc

SEQ ID NO: 2747079 - DNA, 25 bp, Homo sapien
gttccctgacctgcgactgttcggt

SEQ ID NO: 2747080 - DNA, 25 bp, Homo sapien
ggtctcggtgtgaccaactaagcag

SEQ ID NO: 2747081 - DNA, 25 bp, Homo sapien
tcggttctcccgactggccttggtc

SEQ ID NO: 2747082 - DNA, 25 bp, Homo sapien
aactaagcagacactcagcggcagc

SEQ ID NO: 2747083 - DNA, 25 bp, Homo sapien
catccatctgtttctagggatgcag

SEQ ID NO: 2747084 - DNA, 25 bp, Homo sapien
tctgccttcacggtaggaaacacaa

SEQ ID NO: 2747085 - DNA, 25 bp, Homo sapien
tctttccttttatctgggattgcgc

SEQ ID NO: 2747086 - DNA, 25 bp, Homo sapien
gggattgcgcaaatacggacaacag

SEQ ID NO: 2747087 - DNA, 25 bp, Homo sapien
aaaaggtgaggtcagatcacctgga

SEQ ID NO: 2747088 - DNA, 25 bp, Homo sapien
gaggttattcactagcgctctaccc

SEQ ID NO: 2747089 - DNA, 25 bp, Homo sapien
cagcacatgtttctcccgattatat

SEQ ID NO: 2747090 - DNA, 25 bp, Homo sapien
tatagaaatcatctacagcacatgt

SEQ ID NO: 2747091 - DNA, 25 bp, Homo sapien
cgtgttaaacaaccaacaaagattg

SEQ ID NO: 2747092 - DNA, 25 bp, Homo sapien
caaccaacaaagattgtataaccag

SEQ ID NO: 2747093 - DNA, 25 bp, Homo sapien
aacaaagattgtataaccagcaatg

SEQ ID NO: 2747094 - DNA, 25 bp, Homo sapien
tattgtagactagtctgtttttatt

SEQ ID NO: 2747095 - DNA, 25 bp, Homo sapien
caatagtctgttccaattgttagag

SEQ ID NO: 2747096 - DNA, 25 bp, Homo sapien
gctgtgtggatccttctcttttaca

SEQ ID NO: 2747097 - DNA, 25 bp, Homo sapien
tatataccgtggcaatgaagtgatc

SEQ ID NO: 2747098 - DNA, 25 bp, Homo sapien
cttttacagtggcacaagatgtggt

SEQ ID NO: 2747099 - DNA, 25 bp, Homo sapien
ggaagagagaatggcctgctgactt

SEQ ID NO: 2747100 - DNA, 25 bp, Homo sapien
ctgtaaatttatgagcttgggaaga

SEQ ID NO: 2747101 - DNA, 25 bp, Homo sapien
gtaaatttatgagcttgggaagaga

SEQ ID NO: 2747102 - DNA, 25 bp, Homo sapien
agagagaatggcctgctgacttttt

SEQ ID NO: 2747103 - DNA, 25 bp, Homo sapien
tgagccccgggagaatgtcagagtc

SEQ ID NO: 2747104 - DNA, 25 bp, Homo sapien
tgataaaagactagtacgcctcgtg

SEQ ID NO: 2747105 - DNA, 25 bp, Homo sapien
gtaattctgactcgttgcaaagcaa

SEQ ID NO: 2747106 - DNA, 25 bp, Homo sapien
tttgagatactgttgtgagccccgg

SEQ ID NO: 2747107 - DNA, 25 bp, Homo sapien
ggacgcccccgccaaccacggtgca

SEQ ID NO: 2747108 - DNA, 25 bp, Homo sapien
ctggacgcccccgccaaccacggtg

SEQ ID NO: 2747109 - DNA, 25 bp, Homo sapien
gacgcccccgccaaccacggtgcag

SEQ ID NO: 2747110 - DNA, 25 bp, Homo sapien
tggacgcccccgccaaccacggtgc

SEQ ID NO: 2747111 - DNA, 25 bp, Homo sapien
ccgcagagttgtaccgcaggagacc

SEQ ID NO: 2747112 - DNA, 25 bp, Homo sapien
tagtgggactcgagcgggtgcgcgc

SEQ ID NO: 2747113 - DNA, 25 bp, Homo sapien
gcgcggtgtgcagggcctcgccggg

SEQ ID NO: 2747114 - DNA, 25 bp, Homo sapien
accggtagtgggactcgagcgggtg

SEQ ID NO: 2747115 - DNA, 25 bp, Homo sapien
tgcagcgccgcgttcaagttcccgt

SEQ ID NO: 2747116 - DNA, 25 bp, Homo sapien
caagttcccgtagtttgtgtagttg

SEQ ID NO: 2747117 - DNA, 25 bp, Homo sapien
tgtgtagttgccgtagaagggcgac

SEQ ID NO: 2747118 - DNA, 25 bp, Homo sapien
cccagcagcggcgaggcagggtagg

SEQ ID NO: 2747119 - DNA, 25 bp, Homo sapien
acgtggcgatctcggccagcgacca

SEQ ID NO: 2747120 - DNA, 25 bp, Homo sapien
agcggcgcctccaagccggtaagcg

SEQ ID NO: 2747121 - DNA, 25 bp, Homo sapien
cccaggctcggctgcttgaggtccg

SEQ ID NO: 2747122 - DNA, 25 bp, Homo sapien
gcgcccggagacgtccggctgccct

SEQ ID NO: 2747123 - DNA, 25 bp, Homo sapien
tccgactcggccgagcacgagtgat

SEQ ID NO: 2747124 - DNA, 25 bp, Homo sapien
ttgtccttgcactccgagcccgatt

SEQ ID NO: 2747125 - DNA, 25 bp, Homo sapien
tcatacttgtccttgcactccgagc

SEQ ID NO: 2747126 - DNA, 25 bp, Homo sapien
gatccgtgagcgagtccacgtgcag

SEQ ID NO: 2747127 - DNA, 25 bp, Homo sapien
tgtgggggcgcgggcacggtgggtg

SEQ ID NO: 2747128 - DNA, 25 bp, Homo sapien
ggggcgcgggcacggtgggtggcac

SEQ ID NO: 2747129 - DNA, 25 bp, Homo sapien
tgggggcgcgggcacggtgggtggc

SEQ ID NO: 2747130 - DNA, 25 bp, Homo sapien
ggcgcgggcacggtgggtggcacga

SEQ ID NO: 2747131 - DNA, 25 bp, Homo sapien
ctcatcttcgcttttgtttctcggg

SEQ ID NO: 2747132 - DNA, 25 bp, Homo sapien
ttgcttctggtagcgtcgccctcgt

SEQ ID NO: 2747133 - DNA, 25 bp, Homo sapien
tcctgcgccttgtcgggactctcgt

SEQ ID NO: 2747134 - DNA, 25 bp, Homo sapien
cgtacgggtggtagctgatggcgcc

SEQ ID NO: 2747135 - DNA, 25 bp, Homo sapien
ccgcgagtgaatgcgaaccgcccgg

SEQ ID NO: 2747136 - DNA, 25 bp, Homo sapien
gagtgaatgcgaaccgcccggccgt

SEQ ID NO: 2747137 - DNA, 25 bp, Homo sapien
cccggccgtcggctcagaggccgca

SEQ ID NO: 2747138 - DNA, 25 bp, Homo sapien
ctgagccccgcgagtgaatgcgaac

SEQ ID NO: 2747139 - DNA, 25 bp, Homo sapien
gccccacgccaatgcaggcgagcac

SEQ ID NO: 2747140 - DNA, 25 bp, Homo sapien
cacgccaatgcaggcgagcacacag

SEQ ID NO: 2747141 - DNA, 25 bp, Homo sapien
cctcgcgccccacgccaatgcaggc

SEQ ID NO: 2747142 - DNA, 25 bp, Homo sapien
aggcgagcacacagcccgctccgaa

SEQ ID NO: 2747143 - DNA, 25 bp, Homo sapien
ggcggcggcggcgtcggccgagtac

SEQ ID NO: 2747144 - DNA, 25 bp, Homo sapien
gcggcggcggcggcgtcggccgagt

SEQ ID NO: 2747145 - DNA, 25 bp, Homo sapien
tgtaggacgggaagccggcggcggc

SEQ ID NO: 2747146 - DNA, 25 bp, Homo sapien
catgtaggacgggaagccggcggcg

SEQ ID NO: 2747147 - DNA, 25 bp, Homo sapien
gtggccgcctgcgccgtgaaggccg

SEQ ID NO: 2747148 - DNA, 25 bp, Homo sapien
cagcgggctcccgaagccggtggcc

SEQ ID NO: 2747149 - DNA, 25 bp, Homo sapien
gcagcgggctcccgaagccggtggc

SEQ ID NO: 2747150 - DNA, 25 bp, Homo sapien
ctgcgccgtgaaggccgccgagccc

SEQ ID NO: 2747151 - DNA, 25 bp, Homo sapien
tagagcgccagcgagccgggcgcct

SEQ ID NO: 2747152 - DNA, 25 bp, Homo sapien
gccgccaaagccgacgcgccgtagg

SEQ ID NO: 2747153 - DNA, 25 bp, Homo sapien
cgacgcgccgtaggccgggcacgag

SEQ ID NO: 2747154 - DNA, 25 bp, Homo sapien
ccgggcgcctggtacaggtagccct

SEQ ID NO: 2747155 - DNA, 25 bp, Homo sapien
gcgcgcggcgccctccatccacgcc

SEQ ID NO: 2747156 - DNA, 25 bp, Homo sapien
tccatccacgcccggccggggcgcg

SEQ ID NO: 2747157 - DNA, 25 bp, Homo sapien
cctccatccacgcccggccggggcg

SEQ ID NO: 2747158 - DNA, 25 bp, Homo sapien
cagggcgcgcggcgccctccatcca

SEQ ID NO: 2747159 - DNA, 25 bp, Homo sapien
ccggtgggcgcagccgcgcgccagg

SEQ ID NO: 2747160 - DNA, 25 bp, Homo sapien
gtgggcgcagccgcgcgccaggccg

SEQ ID NO: 2747161 - DNA, 25 bp, Homo sapien
gagccggtgggcgcagccgcgcgcc

SEQ ID NO: 2747162 - DNA, 25 bp, Homo sapien
agccggtgggcgcagccgcgcgcca

SEQ ID NO: 2747163 - DNA, 25 bp, Homo sapien
gtccagtacaagctcatggtcatag

SEQ ID NO: 2747164 - DNA, 25 bp, Homo sapien
cttgtttcgaagtgaaagaagcagg

SEQ ID NO: 2747165 - DNA, 25 bp, Homo sapien
gcagctccctgtggtcaatgagttc

SEQ ID NO: 2747166 - DNA, 25 bp, Homo sapien
caatgagttccaagcttgtttcgaa

SEQ ID NO: 2747167 - DNA, 25 bp, Homo sapien
gcttctctcggtagcacatccgtca

SEQ ID NO: 2747168 - DNA, 25 bp, Homo sapien
ggaaaggcacgctttctgctgcttc

SEQ ID NO: 2747169 - DNA, 25 bp, Homo sapien
gcagcacggaaaggcacgctttctg

SEQ ID NO: 2747170 - DNA, 25 bp, Homo sapien
ctgctgcttctctcggtagcacatc

SEQ ID NO: 2747171 - DNA, 25 bp, Homo sapien
agggaccatggaagccgcccctctc

SEQ ID NO: 2747172 - DNA, 25 bp, Homo sapien
tccctgccagccacgcttctcccat

SEQ ID NO: 2747173 - DNA, 25 bp, Homo sapien
ctctccctgccagccacgcttctcc

SEQ ID NO: 2747174 - DNA, 25 bp, Homo sapien
ccctctccctgccagccacgcttct

SEQ ID NO: 2747175 - DNA, 25 bp, Homo sapien
aagtcatgaccctccatacaagctt

SEQ ID NO: 2747176 - DNA, 25 bp, Homo sapien
gctctgacaccttcataaaagtcat

SEQ ID NO: 2747177 - DNA, 25 bp, Homo sapien
tcttagcttgtagtgcatataaaag

SEQ ID NO: 2747178 - DNA, 25 bp, Homo sapien
ctgcgtgctgcagattgccaaccca

SEQ ID NO: 2747179 - DNA, 25 bp, Homo sapien
taccttagtgtgatctttagagatg

SEQ ID NO: 2747180 - DNA, 25 bp, Homo sapien
ccaggagttaccttagtgtgatctt

SEQ ID NO: 2747181 - DNA, 25 bp, Homo sapien
gagatgttggagacatgttattaat

SEQ ID NO: 2747182 - DNA, 25 bp, Homo sapien
cccctccaggagttaccttagtgtg

SEQ ID NO: 2747183 - DNA, 25 bp, Homo sapien
cttgtcttcatcaatcttagactcc

SEQ ID NO: 2747184 - DNA, 25 bp, Homo sapien
gtcttcatcaatcttagactccata

SEQ ID NO: 2747185 - DNA, 25 bp, Homo sapien
tcttcatcaatcttagactccatat

SEQ ID NO: 2747186 - DNA, 25 bp, Homo sapien
tgtcttcatcaatcttagactccat

SEQ ID NO: 2747187 - DNA, 25 bp, Homo sapien
ctacaaagtgtgtagcaattcctgc

SEQ ID NO: 2747188 - DNA, 25 bp, Homo sapien
tacaaagtgtgtagcaattcctgct

SEQ ID NO: 2747189 - DNA, 25 bp, Homo sapien
acatcagggaacagccctactgcgg

SEQ ID NO: 2747190 - DNA, 25 bp, Homo sapien
aacagccctactgcggtttctggca

SEQ ID NO: 2747191 - DNA, 25 bp, Homo sapien
tatcatttcattttagtctgaatcc

SEQ ID NO: 2747192 - DNA, 25 bp, Homo sapien
tactgcggtttctggcatggcaaaa

SEQ ID NO: 2747193 - DNA, 25 bp, Homo sapien
tgacgaccaactctcccacccattg

SEQ ID NO: 2747194 - DNA, 25 bp, Homo sapien
ttttcagcctccgagatgactctaa

SEQ ID NO: 2747195 - DNA, 25 bp, Homo sapien
gagatgactctaatatcactcccat

SEQ ID NO: 2747196 - DNA, 25 bp, Homo sapien
aagctgcccatggactgacgaccaa

SEQ ID NO: 2747197 - DNA, 25 bp, Homo sapien
ctagccatggatacatctgcacacg

SEQ ID NO: 2747198 - DNA, 25 bp, Homo sapien
caatagcacgtcttctgctgcatct

SEQ ID NO: 2747199 - DNA, 25 bp, Homo sapien
tgtgtgcttggacattctcaaatgg

SEQ ID NO: 2747200 - DNA, 25 bp, Homo sapien
aatgcattaaacctcgacatgagcc

SEQ ID NO: 2747201 - DNA, 25 bp, Homo sapien
ggtgagcagcagacggtcctcctca

SEQ ID NO: 2747202 - DNA, 25 bp, Homo sapien
gagagtgacacaggggttggctgct

SEQ ID NO: 2747203 - DNA, 25 bp, Homo sapien
accatgggtgagcagcagacggtcc

SEQ ID NO: 2747204 - DNA, 25 bp, Homo sapien
agtacgttggtgatgaggtgtggag

SEQ ID NO: 2747205 - DNA, 25 bp, Homo sapien
tcaatctgtgaactcttcccggaga

SEQ ID NO: 2747206 - DNA, 25 bp, Homo sapien
ccggagatcccgcattgtcttggaa

SEQ ID NO: 2747207 - DNA, 25 bp, Homo sapien
tgtcttggaaggaagcgggatccat

SEQ ID NO: 2747208 - DNA, 25 bp, Homo sapien
ggaagcgggatccatctacattcct

SEQ ID NO: 2747209 - DNA, 25 bp, Homo sapien
aattctattagcgtgtgctccttgg

SEQ ID NO: 2747210 - DNA, 25 bp, Homo sapien
tgttaccagaatgccgcctttgcgg

SEQ ID NO: 2747211 - DNA, 25 bp, Homo sapien
aagccattttggttggcggcagaca

SEQ ID NO: 2747212 - DNA, 25 bp, Homo sapien
gtgacggtgctagctgccaccacgt

SEQ ID NO: 2747213 - DNA, 25 bp, Homo sapien
ccctgatgcgggagaaacacaggca

SEQ ID NO: 2747214 - DNA, 25 bp, Homo sapien
aggagtccatctgcgtgcagaagtt

SEQ ID NO: 2747215 - DNA, 25 bp, Homo sapien
aggcaggttttgagcccctccagga

SEQ ID NO: 2747216 - DNA, 25 bp, Homo sapien
atggagcaccctgatgcgggagaaa

SEQ ID NO: 2747217 - DNA, 25 bp, Homo sapien
tggaccacggtcctgagcagaagac

SEQ ID NO: 2747218 - DNA, 25 bp, Homo sapien
gggcctggttcaggtgggtgcatgc

SEQ ID NO: 2747219 - DNA, 25 bp, Homo sapien
tgagcagaagacctctgctgggcac

SEQ ID NO: 2747220 - DNA, 25 bp, Homo sapien
cacttcccaagctctggcagtgggc

SEQ ID NO: 2747221 - DNA, 25 bp, Homo sapien
gaacaccaaggaacgtggatgcttc

SEQ ID NO: 2747222 - DNA, 25 bp, Homo sapien
aggaaggtgaatccgacgaggacca

SEQ ID NO: 2747223 - DNA, 25 bp, Homo sapien
tgaatccgacgaggaccaggctgga

SEQ ID NO: 2747224 - DNA, 25 bp, Homo sapien
caaggacggtgttgcagtttaataa

SEQ ID NO: 2747225 - DNA, 25 bp, Homo sapien
cacagatcgtgtattagcacagtcc

SEQ ID NO: 2747226 - DNA, 25 bp, Homo sapien
tcattgtgccattctgttgctgcag

SEQ ID NO: 2747227 - DNA, 25 bp, Homo sapien
agatcgtgtattagcacagtcctcc

SEQ ID NO: 2747228 - DNA, 25 bp, Homo sapien
gatgcactggtaacggggcccaaaa

SEQ ID NO: 2747229 - DNA, 25 bp, Homo sapien
atgccgcccagtccataaggtagga

SEQ ID NO: 2747230 - DNA, 25 bp, Homo sapien
tgccgcccagtccataaggtaggat

SEQ ID NO: 2747231 - DNA, 25 bp, Homo sapien
cgcccagtccataaggtaggatgcc

SEQ ID NO: 2747232 - DNA, 25 bp, Homo sapien
gccgcccagtccataaggtaggatg

SEQ ID NO: 2747233 - DNA, 25 bp, Homo sapien
tccaaagacgcatgaagagctaggt

SEQ ID NO: 2747234 - DNA, 25 bp, Homo sapien
ggctgaatcttgcaagcaggtggat

SEQ ID NO: 2747235 - DNA, 25 bp, Homo sapien
cctgttgtgagccacctgatggaga

SEQ ID NO: 2747236 - DNA, 25 bp, Homo sapien
ggtggattaccattccctcaactag

SEQ ID NO: 2747237 - DNA, 25 bp, Homo sapien
cccaggtctgagtgtaactgcgctg

SEQ ID NO: 2747238 - DNA, 25 bp, Homo sapien
caaggacctttgagtaaatgtgtgt

SEQ ID NO: 2747239 - DNA, 25 bp, Homo sapien
ccctggctggcgtggaaaatccata

SEQ ID NO: 2747240 - DNA, 25 bp, Homo sapien
gggcgcgctctgactgtaactgctg

SEQ ID NO: 2747241 - DNA, 25 bp, Homo sapien
tccaggtttctcaggggatgcgtgt

SEQ ID NO: 2747242 - DNA, 25 bp, Homo sapien
ctccaatccacgatggaacctccag

SEQ ID NO: 2747243 - DNA, 25 bp, Homo sapien
caatccacgatggaacctccaggtt

SEQ ID NO: 2747244 - DNA, 25 bp, Homo sapien
ccaggtttctcaggggatgcgtgtc

SEQ ID NO: 2747245 - DNA, 25 bp, Homo sapien
gttggaatacataccccgcattggg

SEQ ID NO: 2747246 - DNA, 25 bp, Homo sapien
tggtactatgatcacggccagccaa

SEQ ID NO: 2747247 - DNA, 25 bp, Homo sapien
ttcctctgatggtaccggcattgca

SEQ ID NO: 2747248 - DNA, 25 bp, Homo sapien
tgatttaagacaaaccctgtgaggg

SEQ ID NO: 2747249 - DNA, 25 bp, Homo sapien
actgtactggtatgatgggtgctca

SEQ ID NO: 2747250 - DNA, 25 bp, Homo sapien
aagtccactgttggcggcttgtcac

SEQ ID NO: 2747251 - DNA, 25 bp, Homo sapien
gactgtttcgttgtctttcctcaag

SEQ ID NO: 2747252 - DNA, 25 bp, Homo sapien
cttgtcaccgcagtgcagggaggca

SEQ ID NO: 2747253 - DNA, 25 bp, Homo sapien
gtttattgaagatgatataagcaaa

SEQ ID NO: 2747254 - DNA, 25 bp, Homo sapien
aagtttattgaagatgatataagca

SEQ ID NO: 2747255 - DNA, 25 bp, Homo sapien
agctttggggcaatacttctcccct

SEQ ID NO: 2747256 - DNA, 25 bp, Homo sapien
tgagctttggggcaatacttctccc

SEQ ID NO: 2747257 - DNA, 25 bp, Homo sapien
gctcctggatgtggccttgccacca

SEQ ID NO: 2747258 - DNA, 25 bp, Homo sapien
tcttatgtaaatggccagtgggctc

SEQ ID NO: 2747259 - DNA, 25 bp, Homo sapien
catggatggtggatgctccctcttc

SEQ ID NO: 2747260 - DNA, 25 bp, Homo sapien
tgccctgtccaggtgcccatggatg

SEQ ID NO: 2747261 - DNA, 25 bp, Homo sapien
tgaattccccggaaatccatgccga

SEQ ID NO: 2747262 - DNA, 25 bp, Homo sapien
gtcctgccagggtgaattccccgga

SEQ ID NO: 2747263 - DNA, 25 bp, Homo sapien
cagatgatgggagacgagaagagac

SEQ ID NO: 2747264 - DNA, 25 bp, Homo sapien
aatccatgccgacaagacaagcaga

SEQ ID NO: 2747265 - DNA, 25 bp, Homo sapien
tcaaccatgaggacacgctaggcct

SEQ ID NO: 2747266 - DNA, 25 bp, Homo sapien
gcccacaggtgtacgaggaattccc

SEQ ID NO: 2747267 - DNA, 25 bp, Homo sapien
gctaggcctcctttcaagttcttta

SEQ ID NO: 2747268 - DNA, 25 bp, Homo sapien
cagggtcagtgtcaaacatggtgaa

SEQ ID NO: 2747269 - DNA, 25 bp, Homo sapien
tgttgtgctcaatcttcaactgagc

SEQ ID NO: 2747270 - DNA, 25 bp, Homo sapien
taagcagagacttttgaatcctcat

SEQ ID NO: 2747271 - DNA, 25 bp, Homo sapien
tagaccacggccatcgtgcacactg

SEQ ID NO: 2747272 - DNA, 25 bp, Homo sapien
tcttgttgggaagcgtgtagaccac

SEQ ID NO: 2747273 - DNA, 25 bp, Homo sapien
gtgctatccggtgggtccagtcctc

SEQ ID NO: 2747274 - DNA, 25 bp, Homo sapien
actgtttctctggacactgtgccga

SEQ ID NO: 2747275 - DNA, 25 bp, Homo sapien
ccgaggctctgtgatgcacgtgcta

SEQ ID NO: 2747276 - DNA, 25 bp, Homo sapien
tctggacactgtgccgaggctctgt

SEQ ID NO: 2747277 - DNA, 25 bp, Homo sapien
ttgatggtcaaagttgctgaataat

SEQ ID NO: 2747278 - DNA, 25 bp, Homo sapien
tttgatggtcaaagttgctgaataa

SEQ ID NO: 2747279 - DNA, 25 bp, Homo sapien
tgatggtcaaagttgctgaataatt

SEQ ID NO: 2747280 - DNA, 25 bp, Homo sapien
tccgtagacatttctgggagtcagc

SEQ ID NO: 2747281 - DNA, 25 bp, Homo sapien
cttcaatccgtagacatttctggga

SEQ ID NO: 2747282 - DNA, 25 bp, Homo sapien
catttctgggagtcagctgcgtgca

SEQ ID NO: 2747283 - DNA, 25 bp, Homo sapien
acatttctgggagtcagctgcgtgc

SEQ ID NO: 2747284 - DNA, 25 bp, Homo sapien
gagagagtgaccagcacccaccctt

SEQ ID NO: 2747285 - DNA, 25 bp, Homo sapien
acaggaaccacctcagaggtgctct

SEQ ID NO: 2747286 - DNA, 25 bp, Homo sapien
acagcagcacaggaaccacctcaga

SEQ ID NO: 2747287 - DNA, 25 bp, Homo sapien
tcagaggtgctctggagagagtgac

SEQ ID NO: 2747288 - DNA, 25 bp, Homo sapien
cggcgtcatcatgcaagtgtctgtc

SEQ ID NO: 2747289 - DNA, 25 bp, Homo sapien
ctgtctgagcatggccagtaagaga

SEQ ID NO: 2747290 - DNA, 25 bp, Homo sapien
taagagaactggtggtttcggtcca

SEQ ID NO: 2747291 - DNA, 25 bp, Homo sapien
tcatgtagagtaccacggcgtcatc

SEQ ID NO: 2747292 - DNA, 25 bp, Homo sapien
ttggagtctgactgggccccatgca

SEQ ID NO: 2747293 - DNA, 25 bp, Homo sapien
ctggccacgacattggttggagtct

SEQ ID NO: 2747294 - DNA, 25 bp, Homo sapien
cattggttggagtctgactgggccc

SEQ ID NO: 2747295 - DNA, 25 bp, Homo sapien
cacgacattggttggagtctgactg

SEQ ID NO: 2747296 - DNA, 25 bp, Homo sapien
tgtgacttctgacatataatgaaca

SEQ ID NO: 2747297 - DNA, 25 bp, Homo sapien
cgttcgaagcagaactgctgtgcat

SEQ ID NO: 2747298 - DNA, 25 bp, Homo sapien
ctagcctgtgggcagttgctcctga

SEQ ID NO: 2747299 - DNA, 25 bp, Homo sapien
tcctgatcctgaacgtcagcgttcg

SEQ ID NO: 2747300 - DNA, 25 bp, Homo sapien
aggaagcaccgtcagcggcactttg

SEQ ID NO: 2747301 - DNA, 25 bp, Homo sapien
tccaagtgcttttcctgaggctcca

SEQ ID NO: 2747302 - DNA, 25 bp, Homo sapien
gtaagatgcgttcatcccagcagga

SEQ ID NO: 2747303 - DNA, 25 bp, Homo sapien
tgagtgagagatgctgtcctgacac

SEQ ID NO: 2747304 - DNA, 25 bp, Homo sapien
gatctttaacctagtttgatctaaa

SEQ ID NO: 2747305 - DNA, 25 bp, Homo sapien
cagactccttgggaatgatatcatt

SEQ ID NO: 2747306 - DNA, 25 bp, Homo sapien
aaccagactccttgggaatgatatc

SEQ ID NO: 2747307 - DNA, 25 bp, Homo sapien
attcatgatctttaacctagtttga

SEQ ID NO: 2747308 - DNA, 25 bp, Homo sapien
gtgtcgtgaccttccctcccatggg

SEQ ID NO: 2747309 - DNA, 25 bp, Homo sapien
tcccatgggcggcactggccttggg

SEQ ID NO: 2747310 - DNA, 25 bp, Homo sapien
gagacctccacacttgctacgttct

SEQ ID NO: 2747311 - DNA, 25 bp, Homo sapien
ccctcagagacctccacacttgcta

SEQ ID NO: 2747312 - DNA, 25 bp, Homo sapien
cagtgagtgcctggcatcagacaca

SEQ ID NO: 2747313 - DNA, 25 bp, Homo sapien
cctggaagacaggaccggaaaacag

SEQ ID NO: 2747314 - DNA, 25 bp, Homo sapien
actgggcaccccgagtggtggcctt

SEQ ID NO: 2747315 - DNA, 25 bp, Homo sapien
gatacaaggacttatccctcagggc

SEQ ID NO: 2747316 - DNA, 25 bp, Homo sapien
gctcgtggccgtggctcttctctcc

SEQ ID NO: 2747317 - DNA, 25 bp, Homo sapien
ttctctccatatggagtcgcctcac

SEQ ID NO: 2747318 - DNA, 25 bp, Homo sapien
cttctctccatatggagtcgcctca

SEQ ID NO: 2747319 - DNA, 25 bp, Homo sapien
tgtgctcgtggcctcctgtgactta

SEQ ID NO: 2747320 - DNA, 25 bp, Homo sapien
ctgcgcactcgtggccgtggctctc

SEQ ID NO: 2747321 - DNA, 25 bp, Homo sapien
agttgcttcaccttgctgtgtgctc

SEQ ID NO: 2747322 - DNA, 25 bp, Homo sapien
ctcctgtgacttatcagaagctcca

SEQ ID NO: 2747323 - DNA, 25 bp, Homo sapien
gctattgtaggcagctcagtctcat

SEQ ID NO: 2747324 - DNA, 25 bp, Homo sapien
gaaatagaccaggatggaaacctca

SEQ ID NO: 2747325 - DNA, 25 bp, Homo sapien
ccaatacagtatctgtggcggtaca

SEQ ID NO: 2747326 - DNA, 25 bp, Homo sapien
cagtctcatggatatatgagaggcc

SEQ ID NO: 2747327 - DNA, 25 bp, Homo sapien
acacagatttgagggaccgtcacac

SEQ ID NO: 2747328 - DNA, 25 bp, Homo sapien
agttccttccgttgaacatctgcaa

SEQ ID NO: 2747329 - DNA, 25 bp, Homo sapien
gagcccacttgggtgctcctggaac

SEQ ID NO: 2747330 - DNA, 25 bp, Homo sapien
cacacttgattagagcccacttggg

SEQ ID NO: 2747331 - DNA, 25 bp, Homo sapien
ctcatggaagaacagtctgaagtga

SEQ ID NO: 2747332 - DNA, 25 bp, Homo sapien
tccgtaaaaagcctgagtgatagac

SEQ ID NO: 2747333 - DNA, 25 bp, Homo sapien
tcatcaattccacacctgtccgtaa

SEQ ID NO: 2747334 - DNA, 25 bp, Homo sapien
cacacctgtccgtaaaaagcctgag

SEQ ID NO: 2747335 - DNA, 25 bp, Homo sapien
tgaactgttgtgctacatgagcgcc

SEQ ID NO: 2747336 - DNA, 25 bp, Homo sapien
tgagcgcctgaagcgcgactttctg

SEQ ID NO: 2747337 - DNA, 25 bp, Homo sapien
gcctgaagcgcgactttctgtgttt

SEQ ID NO: 2747338 - DNA, 25 bp, Homo sapien
gttgtgctacatgagcgcctgaagc

SEQ ID NO: 2747339 - DNA, 25 bp, Homo sapien
gggaaacatgctctgacagagagaa

SEQ ID NO: 2747340 - DNA, 25 bp, Homo sapien
ggaagatgcacaggtatttgccaga

SEQ ID NO: 2747341 - DNA, 25 bp, Homo sapien
caggtatttgccagacaagaccaag

SEQ ID NO: 2747342 - DNA, 25 bp, Homo sapien
gaccaagtgggggaaacatgctctg

SEQ ID NO: 2747343 - DNA, 25 bp, Homo sapien
tcctgagaaaacagctagtcgtgag

SEQ ID NO: 2747344 - DNA, 25 bp, Homo sapien
agatgtcttctgtagtagggtggct

SEQ ID NO: 2747345 - DNA, 25 bp, Homo sapien
gaacttcttggtgagaagtaagttg

SEQ ID NO: 2747346 - DNA, 25 bp, Homo sapien
cacagctggcaccattatcagacct

SEQ ID NO: 2747347 - DNA, 25 bp, Homo sapien
cacttggagcaagccactcactgaa

SEQ ID NO: 2747348 - DNA, 25 bp, Homo sapien
gcttgagtagggttaatctctttag

SEQ ID NO: 2747349 - DNA, 25 bp, Homo sapien
tatgggacacttcaggcttgagtag

SEQ ID NO: 2747350 - DNA, 25 bp, Homo sapien
gacttttgatgaatacttatgggac

SEQ ID NO: 2747351 - DNA, 25 bp, Homo sapien
catctggcaacaatctttcatgacg

SEQ ID NO: 2747352 - DNA, 25 bp, Homo sapien
tcatgacgatcaaaaggctttccag

SEQ ID NO: 2747353 - DNA, 25 bp, Homo sapien
gattatcttgagtgcagcttcgtta

SEQ ID NO: 2747354 - DNA, 25 bp, Homo sapien
cctctaatatggagttgcagggaaa

SEQ ID NO: 2747355 - DNA, 25 bp, Homo sapien
tgcagccagtcaatgataggattat

SEQ ID NO: 2747356 - DNA, 25 bp, Homo sapien
tcttgccaggaaactaggttgtcat

SEQ ID NO: 2747357 - DNA, 25 bp, Homo sapien
cctggaacacatagccatgatgaca

SEQ ID NO: 2747358 - DNA, 25 bp, Homo sapien
tgccccttgcccttggtttctagtg

SEQ ID NO: 2747359 - DNA, 25 bp, Homo sapien
tgtcctggagaacaagctgggcctg

SEQ ID NO: 2747360 - DNA, 25 bp, Homo sapien
tggacagtggcttggttgacctttg

SEQ ID NO: 2747361 - DNA, 25 bp, Homo sapien
agacgcaggtgtcgggcctctccgt

SEQ ID NO: 2747362 - DNA, 25 bp, Homo sapien
tctccgtggatacagaagggctgtg

SEQ ID NO: 2747363 - DNA, 25 bp, Homo sapien
cttccagcactaaggaagatgccaa

SEQ ID NO: 2747364 - DNA, 25 bp, Homo sapien
ttactccatgtctgcactctgcatc

SEQ ID NO: 2747365 - DNA, 25 bp, Homo sapien
ttccagcactaaggaagatgccaaa

SEQ ID NO: 2747366 - DNA, 25 bp, Homo sapien
gcactctgcatccaggatcttccag

SEQ ID NO: 2747367 - DNA, 25 bp, Homo sapien
tgagagagaaggcaagttgtcagac

SEQ ID NO: 2747368 - DNA, 25 bp, Homo sapien
gatgtaggtaatgttggttctggaa

SEQ ID NO: 2747369 - DNA, 25 bp, Homo sapien
tagatatcaggataaggtccattca

SEQ ID NO: 2747370 - DNA, 25 bp, Homo sapien
agtttgtggctaaagattccagatt

SEQ ID NO: 2747371 - DNA, 25 bp, Homo sapien
taaaccctgtgaagcacgaggtcgt

SEQ ID NO: 2747372 - DNA, 25 bp, Homo sapien
gatttaaaccctgtgaagcacgagg

SEQ ID NO: 2747373 - DNA, 25 bp, Homo sapien
ggatttaaaccctgtgaagcacgag

SEQ ID NO: 2747374 - DNA, 25 bp, Homo sapien
tttaaaccctgtgaagcacgaggtc

SEQ ID NO: 2747375 - DNA, 25 bp, Homo sapien
acaggtgactccaccgcgtgccagg

SEQ ID NO: 2747376 - DNA, 25 bp, Homo sapien
actccaccgcgtgccaggagggatc

SEQ ID NO: 2747377 - DNA, 25 bp, Homo sapien
tccacaggggactccgccgcatgtc

SEQ ID NO: 2747378 - DNA, 25 bp, Homo sapien
gtgactccaccgcgtgccaggaggg

SEQ ID NO: 2747379 - DNA, 25 bp, Homo sapien
cccaggtccgtggagccctggagag

SEQ ID NO: 2747380 - DNA, 25 bp, Homo sapien
ccaggtccgtggagccctggagagg

SEQ ID NO: 2747381 - DNA, 25 bp, Homo sapien
tcagggctggtggcttgagtccatg

SEQ ID NO: 2747382 - DNA, 25 bp, Homo sapien
gagcccggccgtcagatccccagag

SEQ ID NO: 2747383 - DNA, 25 bp, Homo sapien
agcccggccgtcagatccccagaga

SEQ ID NO: 2747384 - DNA, 25 bp, Homo sapien
tgagcccggccgtcagatccccaga

SEQ ID NO: 2747385 - DNA, 25 bp, Homo sapien
gggaggaactggaggctgccagaaa

SEQ ID NO: 2747386 - DNA, 25 bp, Homo sapien
tgggaggaactggaggctgccagaa

SEQ ID NO: 2747387 - DNA, 25 bp, Homo sapien
ctgggaggaactggaggctgccaga

SEQ ID NO: 2747388 - DNA, 25 bp, Homo sapien
ccgtggcatggctgagaccagtgct

SEQ ID NO: 2747389 - DNA, 25 bp, Homo sapien
ggccaagactccgtggcatggctga

SEQ ID NO: 2747390 - DNA, 25 bp, Homo sapien
ctgcaacacatgcttgggggccaag

SEQ ID NO: 2747391 - DNA, 25 bp, Homo sapien
gcaacacatgcttgggggccaagac

SEQ ID NO: 2747392 - DNA, 25 bp, Homo sapien
gggctcaatgtaggcaggtctattt

SEQ ID NO: 2747393 - DNA, 25 bp, Homo sapien
ctgggctcaatgtaggcaggtctat

SEQ ID NO: 2747394 - DNA, 25 bp, Homo sapien
gctcaatgtaggcaggtctatttcc

SEQ ID NO: 2747395 - DNA, 25 bp, Homo sapien
tgggctcaatgtaggcaggtctatt

SEQ ID NO: 2747396 - DNA, 25 bp, Homo sapien
cagagacgaggagactcaatggctc

SEQ ID NO: 2747397 - DNA, 25 bp, Homo sapien
aggaagaggtaattacgatggccca

SEQ ID NO: 2747398 - DNA, 25 bp, Homo sapien
aagaggtaattacgatggcccagag

SEQ ID NO: 2747399 - DNA, 25 bp, Homo sapien
gaggtaattacgatggcccagagtg

SEQ ID NO: 2747400 - DNA, 25 bp, Homo sapien
gaagaggtaattacgatggcccaga

SEQ ID NO: 2747401 - DNA, 25 bp, Homo sapien
ggcagcaaatgccagcgttctcagg

SEQ ID NO: 2747402 - DNA, 25 bp, Homo sapien
gcaaatgccagcgttctcaggaggt

SEQ ID NO: 2747403 - DNA, 25 bp, Homo sapien
tgccagcgttctcaggaggtccttc

SEQ ID NO: 2747404 - DNA, 25 bp, Homo sapien
aaatgccagcgttctcaggaggtcc

SEQ ID NO: 2747405 - DNA, 25 bp, Homo sapien
aggccctgctctttaagtctgaaga

SEQ ID NO: 2747406 - DNA, 25 bp, Homo sapien
aaggccctgctctttaagtctgaag

SEQ ID NO: 2747407 - DNA, 25 bp, Homo sapien
agttcgggcattgggaatcacaggc

SEQ ID NO: 2747408 - DNA, 25 bp, Homo sapien
tataagtgaatacgctgtcctcctg

SEQ ID NO: 2747409 - DNA, 25 bp, Homo sapien
gaggctcatcagacagggagtataa

SEQ ID NO: 2747410 - DNA, 25 bp, Homo sapien
gcgatggctccgtcttcacagaaaa

SEQ ID NO: 2747411 - DNA, 25 bp, Homo sapien
aggaagctgcgggtcgtccccaagt

SEQ ID NO: 2747412 - DNA, 25 bp, Homo sapien
atgaaggaagctgcgggtcgtcccc

SEQ ID NO: 2747413 - DNA, 25 bp, Homo sapien
ggatgaaggaagctgcgggtcgtcc

SEQ ID NO: 2747414 - DNA, 25 bp, Homo sapien
agctgcgggtcgtccccaagtgtga

SEQ ID NO: 2747415 - DNA, 25 bp, Homo sapien
cgaacattctcagtggcgtgtcacc

SEQ ID NO: 2747416 - DNA, 25 bp, Homo sapien
gcgtgtcaccagatttgatgttgct

SEQ ID NO: 2747417 - DNA, 25 bp, Homo sapien
tcagtgtttagagccgaacattctc

SEQ ID NO: 2747418 - DNA, 25 bp, Homo sapien
gccaccttcttgctgcatatgcagt

SEQ ID NO: 2747419 - DNA, 25 bp, Homo sapien
cgtagccatcctcgatgtgtgcatt

SEQ ID NO: 2747420 - DNA, 25 bp, Homo sapien
ccaggggccagcacgtagccatcct

SEQ ID NO: 2747421 - DNA, 25 bp, Homo sapien
cacgtagccatcctcgatgtgtgca

SEQ ID NO: 2747422 - DNA, 25 bp, Homo sapien
gccatcctcgatgtgtgcattctga

SEQ ID NO: 2747423 - DNA, 25 bp, Homo sapien
tcattccaagtgattagtggatttt

SEQ ID NO: 2747424 - DNA, 25 bp, Homo sapien
cattccaagtgattagtggattttc

SEQ ID NO: 2747425 - DNA, 25 bp, Homo sapien
ttcattccaagtgattagtggattt

SEQ ID NO: 2747426 - DNA, 25 bp, Homo sapien
tggtggtaatgtcaaccctaggtaa

SEQ ID NO: 2747427 - DNA, 25 bp, Homo sapien
aatgtcaaccctaggtaatgatggc

SEQ ID NO: 2747428 - DNA, 25 bp, Homo sapien
ccctaggtaatgatggctctgcatt

SEQ ID NO: 2747429 - DNA, 25 bp, Homo sapien
ggaactgcttggtggtaatgtcaac

SEQ ID NO: 2747430 - DNA, 25 bp, Homo sapien
gactagaccacttgggagctttggc

SEQ ID NO: 2747431 - DNA, 25 bp, Homo sapien
cacaaactggtgcttcacggaagca

SEQ ID NO: 2747432 - DNA, 25 bp, Homo sapien
gacttgcaagatccccacttgtgga

SEQ ID NO: 2747433 - DNA, 25 bp, Homo sapien
cacggttcgcccacatgtaggttgg

SEQ ID NO: 2747434 - DNA, 25 bp, Homo sapien
tcttcctgcatgtccttgagtccag

SEQ ID NO: 2747435 - DNA, 25 bp, Homo sapien
aatcgtcagagggaatgcagcacct

SEQ ID NO: 2747436 - DNA, 25 bp, Homo sapien
gtccttgagtccagtctgccttgtg

SEQ ID NO: 2747437 - DNA, 25 bp, Homo sapien
tcacttgctgcattttgtggatgaa

SEQ ID NO: 2747438 - DNA, 25 bp, Homo sapien
gggtagatgcacaacacgctttaaa

SEQ ID NO: 2747439 - DNA, 25 bp, Homo sapien
taggtcgtagagaggcaagtcattt

SEQ ID NO: 2747440 - DNA, 25 bp, Homo sapien
taaatccggatctttccttgcctga

SEQ ID NO: 2747441 - DNA, 25 bp, Homo sapien
caatgagtgttcccggtggaaccca

SEQ ID NO: 2747442 - DNA, 25 bp, Homo sapien
gctgcactgtgttgagtaagttatt

SEQ ID NO: 2747443 - DNA, 25 bp, Homo sapien
atgagcagctgcactgtgttgagta

SEQ ID NO: 2747444 - DNA, 25 bp, Homo sapien
agctgcactgtgttgagtaagttat

SEQ ID NO: 2747445 - DNA, 25 bp, Homo sapien
agcagctgcactgtgttgagtaagt

SEQ ID NO: 2747446 - DNA, 25 bp, Homo sapien
gcctgtggcttttaccaggtgggac

SEQ ID NO: 2747447 - DNA, 25 bp, Homo sapien
gtggtgtgcacgctccagagtgcct

SEQ ID NO: 2747448 - DNA, 25 bp, Homo sapien
tgcctgtggcttttaccaggtggga

SEQ ID NO: 2747449 - DNA, 25 bp, Homo sapien
tgtgcacgctccagagtgcctgtgg

SEQ ID NO: 2747450 - DNA, 25 bp, Homo sapien
tcatcctgatggcaccgttgctggt

SEQ ID NO: 2747451 - DNA, 25 bp, Homo sapien
gctgactgtagagtgacctgagagt

SEQ ID NO: 2747452 - DNA, 25 bp, Homo sapien
agagtcccaagtgcacctgtgcctc

SEQ ID NO: 2747453 - DNA, 25 bp, Homo sapien
caggtaaacagtttgcatctgggct

SEQ ID NO: 2747454 - DNA, 25 bp, Homo sapien
tgctctcctttgctaagagacgtga

SEQ ID NO: 2747455 - DNA, 25 bp, Homo sapien
agagacgtgaggagcaggccattca

SEQ ID NO: 2747456 - DNA, 25 bp, Homo sapien
cctttgctaagagacgtgaggagca

SEQ ID NO: 2747457 - DNA, 25 bp, Homo sapien
gcagggagacgaaggtgctctcttc

SEQ ID NO: 2747458 - DNA, 25 bp, Homo sapien
ccattcccagtggaacagaggtggt

SEQ ID NO: 2747459 - DNA, 25 bp, Homo sapien
cattcccagtggaacagaggtggtg

SEQ ID NO: 2747460 - DNA, 25 bp, Homo sapien
attcccagtggaacagaggtggtgt

SEQ ID NO: 2747461 - DNA, 25 bp, Homo sapien
ttcccaatgccggtatccattcagg

SEQ ID NO: 2747462 - DNA, 25 bp, Homo sapien
atggtattcccaatgccggtatcca

SEQ ID NO: 2747463 - DNA, 25 bp, Homo sapien
ccaatgccggtatccattcaggaat

SEQ ID NO: 2747464 - DNA, 25 bp, Homo sapien
ggtattcccaatgccggtatccatt

SEQ ID NO: 2747465 - DNA, 25 bp, Homo sapien
ctaagaggtacaacatcttttggtt

SEQ ID NO: 2747466 - DNA, 25 bp, Homo sapien
aacatcttttggttcccaagatggc

SEQ ID NO: 2747467 - DNA, 25 bp, Homo sapien
tctgggatcgctgaaatatggaaca

SEQ ID NO: 2747468 - DNA, 25 bp, Homo sapien
atgaagatttctgggatcgctgaaa

SEQ ID NO: 2747469 - DNA, 25 bp, Homo sapien
catgacacaggctttctcggtagca

SEQ ID NO: 2747470 - DNA, 25 bp, Homo sapien
gctgcccttgttcttatggtacaat

SEQ ID NO: 2747471 - DNA, 25 bp, Homo sapien
tattgcagttgcttgttcggtggct

SEQ ID NO: 2747472 - DNA, 25 bp, Homo sapien
ggtagcagtgataagcccgctgccc

SEQ ID NO: 2747473 - DNA, 25 bp, Homo sapien
ggtgctctgtgttatcactggggca

SEQ ID NO: 2747474 - DNA, 25 bp, Homo sapien
cactggggcaccaggttctaagcag

SEQ ID NO: 2747475 - DNA, 25 bp, Homo sapien
tatcactggggcaccaggttctaag

SEQ ID NO: 2747476 - DNA, 25 bp, Homo sapien
tctgtgttatcactggggcaccagg

SEQ ID NO: 2747477 - DNA, 25 bp, Homo sapien
gatgggaaatctttaggcatcctcc

SEQ ID NO: 2747478 - DNA, 25 bp, Homo sapien
gaaagccaagctttaccagagccct

SEQ ID NO: 2747479 - DNA, 25 bp, Homo sapien
gataagaggtgcttcttaggagact

SEQ ID NO: 2747480 - DNA, 25 bp, Homo sapien
tatgcttctgaattggctccttcca

SEQ ID NO: 2747481 - DNA, 25 bp, Homo sapien
gatcgatattcaatccaaacaaggg

SEQ ID NO: 2747482 - DNA, 25 bp, Homo sapien
gcttacaggttcaggaaactgcggg

SEQ ID NO: 2747483 - DNA, 25 bp, Homo sapien
gaaaagcgagaactagaaccaggag

SEQ ID NO: 2747484 - DNA, 25 bp, Homo sapien
catgtgaactacactggaactgcag

SEQ ID NO: 2747485 - DNA, 25 bp, Homo sapien
catctgccggaatgtgacaggcggc

SEQ ID NO: 2747486 - DNA, 25 bp, Homo sapien
tgtgcctctgagacgatgccggtga

SEQ ID NO: 2747487 - DNA, 25 bp, Homo sapien
gacaggcggccaagccacgtgctgt

SEQ ID NO: 2747488 - DNA, 25 bp, Homo sapien
gctgtgcctctgagacgatgccggt

SEQ ID NO: 2747489 - DNA, 25 bp, Homo sapien
aatcttcgggatggactctgcttct

SEQ ID NO: 2747490 - DNA, 25 bp, Homo sapien
tcacctgctcgaggatcacctgtgg

SEQ ID NO: 2747491 - DNA, 25 bp, Homo sapien
tgtttctctgataggaccccgccaa

SEQ ID NO: 2747492 - DNA, 25 bp, Homo sapien
catattgacccaaggaatcttcggg

SEQ ID NO: 2747493 - DNA, 25 bp, Homo sapien
cctcttgcagggctgaacgggaaag

SEQ ID NO: 2747494 - DNA, 25 bp, Homo sapien
acagtctggcagtgcgtgggagcaa

SEQ ID NO: 2747495 - DNA, 25 bp, Homo sapien
ctgaacgggaaagggacgcggcaca

SEQ ID NO: 2747496 - DNA, 25 bp, Homo sapien
ggcagtgcgtgggagcaaacgaaac

SEQ ID NO: 2747497 - DNA, 25 bp, Homo sapien
tgtgacaggcttgttcaggacacca

SEQ ID NO: 2747498 - DNA, 25 bp, Homo sapien
tgacaggcttgttcaggacaccaga

SEQ ID NO: 2747499 - DNA, 25 bp, Homo sapien
ctgtgtgacaggcttgttcaggaca

SEQ ID NO: 2747500 - DNA, 25 bp, Homo sapien
ggacaccagaaacagctgtcccagc

SEQ ID NO: 2747501 - DNA, 25 bp, Homo sapien
cggttgcattttgtgaacgatgctc

SEQ ID NO: 2747502 - DNA, 25 bp, Homo sapien
tatccaagtggcgtgtgcacggttg

SEQ ID NO: 2747503 - DNA, 25 bp, Homo sapien
gccaccagtgctccgatatccaagt

SEQ ID NO: 2747504 - DNA, 25 bp, Homo sapien
gtttttaattgttgtgccaccagtg

SEQ ID NO: 2747505 - DNA, 25 bp, Homo sapien
ccaagcctgtcgatgctggggtgca

SEQ ID NO: 2747506 - DNA, 25 bp, Homo sapien
gcttgggggtaagtacacacagttc

SEQ ID NO: 2747507 - DNA, 25 bp, Homo sapien
agtgaaggaatgcggctgtcttctg

SEQ ID NO: 2747508 - DNA, 25 bp, Homo sapien
agagagtgaaggaatgcggctgtct

SEQ ID NO: 2747509 - DNA, 25 bp, Homo sapien
gatatgaacagccatcaccatttga

SEQ ID NO: 2747510 - DNA, 25 bp, Homo sapien
taaatctcttgcatgaagtacacct

SEQ ID NO: 2747511 - DNA, 25 bp, Homo sapien
ggctggcgaccgactgatatgaaca

SEQ ID NO: 2747512 - DNA, 25 bp, Homo sapien
catgaatatgaacaaatggcaaaca

SEQ ID NO: 2747513 - DNA, 25 bp, Homo sapien
aagccgcgtctgtctgggcgtcgca

SEQ ID NO: 2747514 - DNA, 25 bp, Homo sapien
ttagcactgaaagccgcgtctgtct

SEQ ID NO: 2747515 - DNA, 25 bp, Homo sapien
aatggctttgatagcgccaataacc

SEQ ID NO: 2747516 - DNA, 25 bp, Homo sapien
cgcaggagcggtctaaagtgtttac

SEQ ID NO: 2747517 - DNA, 25 bp, Homo sapien
atgaagttgatctcacaatgttttt

SEQ ID NO: 2747518 - DNA, 25 bp, Homo sapien
ctgaaattcagtcatgatgttagca

SEQ ID NO: 2747519 - DNA, 25 bp, Homo sapien
agttgatctcacaatgtttttatga

SEQ ID NO: 2747520 - DNA, 25 bp, Homo sapien
gttccctggatgcagtgcagccctg

SEQ ID NO: 2747521 - DNA, 25 bp, Homo sapien
tctgtggatgcgacggcaaggtacc

SEQ ID NO: 2747522 - DNA, 25 bp, Homo sapien
ttttttccccgtgcactgtgacttc

SEQ ID NO: 2747523 - DNA, 25 bp, Homo sapien
tgcgtccgcctccactgggtgggct

SEQ ID NO: 2747524 - DNA, 25 bp, Homo sapien
cttgctgccgggctgaccttgcaca

SEQ ID NO: 2747525 - DNA, 25 bp, Homo sapien
cagcacaaaagattgctttgctcaa

SEQ ID NO: 2747526 - DNA, 25 bp, Homo sapien
tcgtccccagtaattagcctgtcac

SEQ ID NO: 2747527 - DNA, 25 bp, Homo sapien
aatcttgagcttgggtgcgcccggc

SEQ ID NO: 2747528 - DNA, 25 bp, Homo sapien
cgagctccgtgacgaccattctcag

SEQ ID NO: 2747529 - DNA, 25 bp, Homo sapien
caggaccgccgtaactagctgcagt

SEQ ID NO: 2747530 - DNA, 25 bp, Homo sapien
ttccgcgaggtcagctgcaggaccg

SEQ ID NO: 2747531 - DNA, 25 bp, Homo sapien
tatgtttgtagttgcacacaggcac

SEQ ID NO: 2747532 - DNA, 25 bp, Homo sapien
cagagatggctcctcttccgcgagg

SEQ ID NO: 2747533 - DNA, 25 bp, Homo sapien
ctgatgtatggagctggaattgtaa

SEQ ID NO: 2747534 - DNA, 25 bp, Homo sapien
agagctctgatgtatggagctggaa

SEQ ID NO: 2747535 - DNA, 25 bp, Homo sapien
gtgtaggatcgaaataataagccat

SEQ ID NO: 2747536 - DNA, 25 bp, Homo sapien
ggaattgtaattgtgtaggatcgaa

SEQ ID NO: 2747537 - DNA, 25 bp, Homo sapien
agaacccgacatggcagcgcccatg

SEQ ID NO: 2747538 - DNA, 25 bp, Homo sapien
gaatgggaagctgtctgccagaacc

SEQ ID NO: 2747539 - DNA, 25 bp, Homo sapien
catgtttaggatgcttcctcccttt

SEQ ID NO: 2747540 - DNA, 25 bp, Homo sapien
agtgaccaggaggactcatgatctc

SEQ ID NO: 2747541 - DNA, 25 bp, Homo sapien
cagtgtgtgtaggaaacccccggag

SEQ ID NO: 2747542 - DNA, 25 bp, Homo sapien
tggcacgtggttttcccaactcctc

SEQ ID NO: 2747543 - DNA, 25 bp, Homo sapien
ctcctccgtcaagcaaaactgcagt

SEQ ID NO: 2747544 - DNA, 25 bp, Homo sapien
ggaaacccccggaggcagctgcata

SEQ ID NO: 2747545 - DNA, 25 bp, Homo sapien
tgctgctgccccgtgtcccggtcac

SEQ ID NO: 2747546 - DNA, 25 bp, Homo sapien
ctttctgcagcccagatttactgct

SEQ ID NO: 2747547 - DNA, 25 bp, Homo sapien
cccgtgtcccggtcacaccctcctg

SEQ ID NO: 2747548 - DNA, 25 bp, Homo sapien
ttctcaatggattccgcctccttct

SEQ ID NO: 2747549 - DNA, 25 bp, Homo sapien
ctgggcacctgtaaggcaagatgaa

SEQ ID NO: 2747550 - DNA, 25 bp, Homo sapien
gaagaaaaggactgcggcaggagag

SEQ ID NO: 2747551 - DNA, 25 bp, Homo sapien
acagcgcagggcgaagctggttccc

SEQ ID NO: 2747552 - DNA, 25 bp, Homo sapien
tgcggcaggagagtgcgcagtgcca

SEQ ID NO: 2747553 - DNA, 25 bp, Homo sapien
tgtacatgttgctcgacacctgtgg

SEQ ID NO: 2747554 - DNA, 25 bp, Homo sapien
cttcagtcctggtagccaacttggg

SEQ ID NO: 2747555 - DNA, 25 bp, Homo sapien
cggcaggaggaccatccagcattaa

SEQ ID NO: 2747556 - DNA, 25 bp, Homo sapien
aaggtttaagggctgccctgtgcac

SEQ ID NO: 2747557 - DNA, 25 bp, Homo sapien
ggtggagctttaatttggcacaaag

SEQ ID NO: 2747558 - DNA, 25 bp, Homo sapien
tgtgttccggaagttgccagcctgc

SEQ ID NO: 2747559 - DNA, 25 bp, Homo sapien
cacaaagttgctggttgtctcctga

SEQ ID NO: 2747560 - DNA, 25 bp, Homo sapien
tgatttgaccacctcgattctggcc

SEQ ID NO: 2747561 - DNA, 25 bp, Homo sapien
tgtagattgcaactgggctgctctc

SEQ ID NO: 2747562 - DNA, 25 bp, Homo sapien
aggaatcctggaactcactgctagc

SEQ ID NO: 2747563 - DNA, 25 bp, Homo sapien
cactgctagcttccagggaaaggac

SEQ ID NO: 2747564 - DNA, 25 bp, Homo sapien
tgctctcaggaatcctggaactcac

SEQ ID NO: 2747565 - DNA, 25 bp, Homo sapien
gcgaggccaactgccgcgtactctg

SEQ ID NO: 2747566 - DNA, 25 bp, Homo sapien
tccgcattttggtaacccgcgaggc

SEQ ID NO: 2747567 - DNA, 25 bp, Homo sapien
gcattttggtaacccgcgaggccaa

SEQ ID NO: 2747568 - DNA, 25 bp, Homo sapien
aagatccgcattttggtaacccgcg

SEQ ID NO: 2747569 - DNA, 25 bp, Homo sapien
ctgccgttctgcaggtgttccttcc

SEQ ID NO: 2747570 - DNA, 25 bp, Homo sapien
caggtgttccttccaagaaacaaca

SEQ ID NO: 2747571 - DNA, 25 bp, Homo sapien
gagcaagaggccgagttgtgcacct

SEQ ID NO: 2747572 - DNA, 25 bp, Homo sapien
tagaagaagacattgaccactgtgg

SEQ ID NO: 2747573 - DNA, 25 bp, Homo sapien
ggttgcactttcagcacacatgggt

SEQ ID NO: 2747574 - DNA, 25 bp, Homo sapien
tgtgcaccttctccgccattgcgat

SEQ ID NO: 2747575 - DNA, 25 bp, Homo sapien
tccacatcgtataaactgtagcaca

SEQ ID NO: 2747576 - DNA, 25 bp, Homo sapien
caggggagaacattacttgcttctt

SEQ ID NO: 2747577 - DNA, 25 bp, Homo sapien
ctccacatcgtataaactgtagcac

SEQ ID NO: 2747578 - DNA, 25 bp, Homo sapien
tgtagcacaagtcaggggagaacat

SEQ ID NO: 2747579 - DNA, 25 bp, Homo sapien
tgggtgcggtcagcgacggccacca

SEQ ID NO: 2747580 - DNA, 25 bp, Homo sapien
gtccacactgggtgcggtcagcgac

SEQ ID NO: 2747581 - DNA, 25 bp, Homo sapien
tccacactgggtgcggtcagcgacg

SEQ ID NO: 2747582 - DNA, 25 bp, Homo sapien
cactgggtgcggtcagcgacggcca

SEQ ID NO: 2747583 - DNA, 25 bp, Homo sapien
gatcgtgttccaatcagtcacaggt

SEQ ID NO: 2747584 - DNA, 25 bp, Homo sapien
ggtaccatccacagattcaaggtgg

SEQ ID NO: 2747585 - DNA, 25 bp, Homo sapien
accgctccagcgagaggcattctca

SEQ ID NO: 2747586 - DNA, 25 bp, Homo sapien
ttcaaggtggctgaagaaccgctcc

SEQ ID NO: 2747587 - DNA, 25 bp, Homo sapien
tgacaccaagtcctgccggttcgcc

SEQ ID NO: 2747588 - DNA, 25 bp, Homo sapien
cttcaagaagtctgggtctgacacc

SEQ ID NO: 2747589 - DNA, 25 bp, Homo sapien
tctgacaccaagtcctgccggttcg

SEQ ID NO: 2747590 - DNA, 25 bp, Homo sapien
ggtctgacaccaagtcctgccggtt

SEQ ID NO: 2747591 - DNA, 25 bp, Homo sapien
aggtgggtacctgctggttcgccat

SEQ ID NO: 2747592 - DNA, 25 bp, Homo sapien
ggaggtgggtacctgctggttcgcc

SEQ ID NO: 2747593 - DNA, 25 bp, Homo sapien
gaggtgggtacctgctggttcgcca

SEQ ID NO: 2747594 - DNA, 25 bp, Homo sapien
aatcttagcatttcacgcagcagcc

SEQ ID NO: 2747595 - DNA, 25 bp, Homo sapien
taacccagctcggtaatgctcatga

SEQ ID NO: 2747596 - DNA, 25 bp, Homo sapien
ttgtctctgtggtagcagcgcccgg

SEQ ID NO: 2747597 - DNA, 25 bp, Homo sapien
cacgtgactggtaatgctgttctaa

SEQ ID NO: 2747598 - DNA, 25 bp, Homo sapien
tctccttgtttgacacgaggctggc

SEQ ID NO: 2747599 - DNA, 25 bp, Homo sapien
ccgaatacggaactcaggctttggg

SEQ ID NO: 2747600 - DNA, 25 bp, Homo sapien
tttcccattaaaactgatgagggct

SEQ ID NO: 2747601 - DNA, 25 bp, Homo sapien
ggctgcagtcctatgttggcgtcca

SEQ ID NO: 2747602 - DNA, 25 bp, Homo sapien
tatcaatgaagccactgttgccact

SEQ ID NO: 2747603 - DNA, 25 bp, Homo sapien
gacctgggccagaattagagtgcag

SEQ ID NO: 2747604 - DNA, 25 bp, Homo sapien
tccggaggtaattacattcatgtgt

SEQ ID NO: 2747605 - DNA, 25 bp, Homo sapien
tgagatcccaagtcttgacctgggc

SEQ ID NO: 2747606 - DNA, 25 bp, Homo sapien
tgaaaaacaggattggctaagaagg

SEQ ID NO: 2747607 - DNA, 25 bp, Homo sapien
tccatcgcccttcttcgagacaaag

SEQ ID NO: 2747608 - DNA, 25 bp, Homo sapien
acaaagcggcctcagtggtgacgtt

SEQ ID NO: 2747609 - DNA, 25 bp, Homo sapien
tgagtcgctgcacactttcgggcat

SEQ ID NO: 2747610 - DNA, 25 bp, Homo sapien
tgtgaggacaggcacggagcggccc

SEQ ID NO: 2747611 - DNA, 25 bp, Homo sapien
gtgatttcactagcgttggggcagc

SEQ ID NO: 2747612 - DNA, 25 bp, Homo sapien
gggcgagcaggagtaaccgcacggg

SEQ ID NO: 2747613 - DNA, 25 bp, Homo sapien
ttcactagcgttggggcagcggtcc

SEQ ID NO: 2747614 - DNA, 25 bp, Homo sapien
gcacgctgcgccagaatcccaggtt

SEQ ID NO: 2747615 - DNA, 25 bp, Homo sapien
agggaacccgtgcacgctgcgccag

SEQ ID NO: 2747616 - DNA, 25 bp, Homo sapien
tccttggaaaatcgccgtccccaga

SEQ ID NO: 2747617 - DNA, 25 bp, Homo sapien
caagtggaaggtcatcttgactctc

SEQ ID NO: 2747618 - DNA, 25 bp, Homo sapien
cctgcttcagtagcatggagctggg

SEQ ID NO: 2747619 - DNA, 25 bp, Homo sapien
gttctggcagagaacgagcccggcc

SEQ ID NO: 2747620 - DNA, 25 bp, Homo sapien
agaacgctgcccactcgcaggtccc

SEQ ID NO: 2747621 - DNA, 25 bp, Homo sapien
agctgggggtccagaacgctgccca

SEQ ID NO: 2747622 - DNA, 25 bp, Homo sapien
ctggcacctgcaacgccatgcagct

SEQ ID NO: 2747623 - DNA, 25 bp, Homo sapien
accacaccccgcagttcctgggcat

SEQ ID NO: 2747624 - DNA, 25 bp, Homo sapien
acctgcaacgccatgcagctcacca

SEQ ID NO: 2747625 - DNA, 25 bp, Homo sapien
atgcagctcaccacaccccgcagtt

SEQ ID NO: 2747626 - DNA, 25 bp, Homo sapien
aagtgtgtctggtacactcgtagtt

SEQ ID NO: 2747627 - DNA, 25 bp, Homo sapien
ggtacactcgtagttctctggactg

SEQ ID NO: 2747628 - DNA, 25 bp, Homo sapien
cactcgtagttctctggactgctgg

SEQ ID NO: 2747629 - DNA, 25 bp, Homo sapien
tctggtacactcgtagttctctgga

SEQ ID NO: 2747630 - DNA, 25 bp, Homo sapien
gccaccaggaagaggatcagggctc

SEQ ID NO: 2747631 - DNA, 25 bp, Homo sapien
ggaagaggatcagggctctttgagg

SEQ ID NO: 2747632 - DNA, 25 bp, Homo sapien
gagaaggcgggccacacagggtggc

SEQ ID NO: 2747633 - DNA, 25 bp, Homo sapien
agagaaggcgggccacacagggtgg

SEQ ID NO: 2747634 - DNA, 25 bp, Homo sapien
tgttctgtggaattgcatggatcac

SEQ ID NO: 2747635 - DNA, 25 bp, Homo sapien
cgggcactgtgcccactctgatgaa

SEQ ID NO: 2747636 - DNA, 25 bp, Homo sapien
cagcgtcttccattgtcctgtggcc

SEQ ID NO: 2747637 - DNA, 25 bp, Homo sapien
aggcagcgtcttccattgtcctgtg

SEQ ID NO: 2747638 - DNA, 25 bp, Homo sapien
caggaaagctgaactcagacccctg

SEQ ID NO: 2747639 - DNA, 25 bp, Homo sapien
gaactcagacccctgtgagttgtgt

SEQ ID NO: 2747640 - DNA, 25 bp, Homo sapien
cctgtgagttgtgttcatagcgctt

SEQ ID NO: 2747641 - DNA, 25 bp, Homo sapien
gttgtgttcatagcgctttacgtcc

SEQ ID NO: 2747642 - DNA, 25 bp, Homo sapien
gtcttcaaacagttggagacatgac

SEQ ID NO: 2747643 - DNA, 25 bp, Homo sapien
tcacgtcttcaaacagttggagaca

SEQ ID NO: 2747644 - DNA, 25 bp, Homo sapien
cacgtcttcaaacagttggagacat

SEQ ID NO: 2747645 - DNA, 25 bp, Homo sapien
cgtcttcaaacagttggagacatga

SEQ ID NO: 2747646 - DNA, 25 bp, Homo sapien
gcgttgctttcatggtgctgtcctg

SEQ ID NO: 2747647 - DNA, 25 bp, Homo sapien
ctgggatgccagtgtcagttccggg

SEQ ID NO: 2747648 - DNA, 25 bp, Homo sapien
ggccggtctgcgttgctttcatggt

SEQ ID NO: 2747649 - DNA, 25 bp, Homo sapien
cgagaggccggtctgcgttgctttc

SEQ ID NO: 2747650 - DNA, 25 bp, Homo sapien
tggctgcgggtgcacgctggttagg

SEQ ID NO: 2747651 - DNA, 25 bp, Homo sapien
tagggagggtagctgggatggcctg

SEQ ID NO: 2747652 - DNA, 25 bp, Homo sapien
gttagggagggtagctgggatggcc

SEQ ID NO: 2747653 - DNA, 25 bp, Homo sapien
gggtgcacgctggttagggagggta

SEQ ID NO: 2747654 - DNA, 25 bp, Homo sapien
catgacaacagtgcaatcgttggcc

SEQ ID NO: 2747655 - DNA, 25 bp, Homo sapien
tggcaaaacccaacaatggcaccat

SEQ ID NO: 2747656 - DNA, 25 bp, Homo sapien
tgtacaccttgacctcctgttctgt

SEQ ID NO: 2747657 - DNA, 25 bp, Homo sapien
acagtgcaatcgttggccacttggg

SEQ ID NO: 2747658 - DNA, 25 bp, Homo sapien
gaggaggaatgattatcctcattac

SEQ ID NO: 2747659 - DNA, 25 bp, Homo sapien
ggaggaggaatgattatcctcatta

SEQ ID NO: 2747660 - DNA, 25 bp, Homo sapien
tggaggaggaatgattatcctcatt

SEQ ID NO: 2747661 - DNA, 25 bp, Homo sapien
tgccctgtgggtttgcggtcaccag

SEQ ID NO: 2747662 - DNA, 25 bp, Homo sapien
tggtcttctcgggatggcagccctg

SEQ ID NO: 2747663 - DNA, 25 bp, Homo sapien
agatgcattcagcagcgcagggctc

SEQ ID NO: 2747664 - DNA, 25 bp, Homo sapien
agggctcctatctcctgaccggatg

SEQ ID NO: 2747665 - DNA, 25 bp, Homo sapien
tcactgacggtagcagaagccatca

SEQ ID NO: 2747666 - DNA, 25 bp, Homo sapien
gaagttaaggcactagcaaagccct

SEQ ID NO: 2747667 - DNA, 25 bp, Homo sapien
ttggagcactccagatacgaggatc

SEQ ID NO: 2747668 - DNA, 25 bp, Homo sapien
cttcagaaaggtcacgaggaggact

SEQ ID NO: 2747669 - DNA, 25 bp, Homo sapien
ttcctggatgacaatgagggtgcaa

SEQ ID NO: 2747670 - DNA, 25 bp, Homo sapien
atgagggtgcaaagtccaactgtgc

SEQ ID NO: 2747671 - DNA, 25 bp, Homo sapien
tggatgacaatgagggtgcaaagtc

SEQ ID NO: 2747672 - DNA, 25 bp, Homo sapien
aatgagggtgcaaagtccaactgtg

SEQ ID NO: 2747673 - DNA, 25 bp, Homo sapien
tggaaaacctggctccacgaaccag

SEQ ID NO: 2747674 - DNA, 25 bp, Homo sapien
gccaggtgcattctctaagcaattg

SEQ ID NO: 2747675 - DNA, 25 bp, Homo sapien
ggctccacgaaccagggctgcatct

SEQ ID NO: 2747676 - DNA, 25 bp, Homo sapien
aggtgcattctctaagcaattgagg

SEQ ID NO: 2747677 - DNA, 25 bp, Homo sapien
caaagtgggttacagcgaggcaatc

SEQ ID NO: 2747678 - DNA, 25 bp, Homo sapien
gaagtaatctgtcatctcccacgaa

SEQ ID NO: 2747679 - DNA, 25 bp, Homo sapien
taagtagctcaagtgtggaccaaca

SEQ ID NO: 2747680 - DNA, 25 bp, Homo sapien
gaaaggacacgttggacatctcagg

SEQ ID NO: 2747681 - DNA, 25 bp, Homo sapien
caaatgtggaactagcaaaaacgac

SEQ ID NO: 2747682 - DNA, 25 bp, Homo sapien
tctgtggcggaatactcaaatgtgg

SEQ ID NO: 2747683 - DNA, 25 bp, Homo sapien
agactgcggtaaacgagagagagat

SEQ ID NO: 2747684 - DNA, 25 bp, Homo sapien
tacgcagccactcctactaggagat

SEQ ID NO: 2747685 - DNA, 25 bp, Homo sapien
tcataggtgtgcaattgggtctccc

SEQ ID NO: 2747686 - DNA, 25 bp, Homo sapien
gctgaggtccttctctggtctggga

SEQ ID NO: 2747687 - DNA, 25 bp, Homo sapien
tctgagggacctacattggaatggc

SEQ ID NO: 2747688 - DNA, 25 bp, Homo sapien
gaattaatttccctaggagcagccc

SEQ ID NO: 2747689 - DNA, 25 bp, Homo sapien
gagaagagctctggctctgcatgct

SEQ ID NO: 2747690 - DNA, 25 bp, Homo sapien
agaagctgaagagagtcaaccgagg

SEQ ID NO: 2747691 - DNA, 25 bp, Homo sapien
gctccttgaatttgaaccaccccaa

SEQ ID NO: 2747692 - DNA, 25 bp, Homo sapien
gatgcagggaagtcgtcttctcagg

SEQ ID NO: 2747693 - DNA, 25 bp, Homo sapien
cagctgtattggaaggagtctcctc

SEQ ID NO: 2747694 - DNA, 25 bp, Homo sapien
aaggagcggcgttcatgatgctgca

SEQ ID NO: 2747695 - DNA, 25 bp, Homo sapien
cagagtctccagacgcgttggaagc

SEQ ID NO: 2747696 - DNA, 25 bp, Homo sapien
ttggaagcccgctgcacaggaagga

SEQ ID NO: 2747697 - DNA, 25 bp, Homo sapien
gcagtcaacacagacggcccatggc

SEQ ID NO: 2747698 - DNA, 25 bp, Homo sapien
cagtcaacacagacggcccatggca

SEQ ID NO: 2747699 - DNA, 25 bp, Homo sapien
tgcagtcaacacagacggcccatgg

SEQ ID NO: 2747700 - DNA, 25 bp, Homo sapien
aggaaaggcagtagacacggagcgg

SEQ ID NO: 2747701 - DNA, 25 bp, Homo sapien
ggaaaggcagtagacacggagcggg

SEQ ID NO: 2747702 - DNA, 25 bp, Homo sapien
aaggcagtagacacggagcggggag

SEQ ID NO: 2747703 - DNA, 25 bp, Homo sapien
gaaaggcagtagacacggagcgggg

SEQ ID NO: 2747704 - DNA, 25 bp, Homo sapien
tccttgccagaaggggtaagaatgg

SEQ ID NO: 2747705 - DNA, 25 bp, Homo sapien
caggcttcaagggtggaaagtgctc

SEQ ID NO: 2747706 - DNA, 25 bp, Homo sapien
ccttcaggcttcaagggtggaaagt

SEQ ID NO: 2747707 - DNA, 25 bp, Homo sapien
aatggtaactggtcacccaccaggc

SEQ ID NO: 2747708 - DNA, 25 bp, Homo sapien
taaataagcacgtctgccagagtca

SEQ ID NO: 2747709 - DNA, 25 bp, Homo sapien
gagtcaccttttgttgcattgcaga

SEQ ID NO: 2747710 - DNA, 25 bp, Homo sapien
tgagcacagtgcctcgattgagcaa

SEQ ID NO: 2747711 - DNA, 25 bp, Homo sapien
tttatgtctcatggagcgcttctgc

SEQ ID NO: 2747712 - DNA, 25 bp, Homo sapien
ttcctctgatgatgtcatggttttc

SEQ ID NO: 2747713 - DNA, 25 bp, Homo sapien
cctctgatgatgtcatggttttcct

SEQ ID NO: 2747714 - DNA, 25 bp, Homo sapien
tttcctctgatgatgtcatggtttt

SEQ ID NO: 2747715 - DNA, 25 bp, Homo sapien
gcatttgagtcgtactgttccacaa

SEQ ID NO: 2747716 - DNA, 25 bp, Homo sapien
cagcatttgagtcgtactgttccac

SEQ ID NO: 2747717 - DNA, 25 bp, Homo sapien
ctcagcatttgagtcgtactgttcc

SEQ ID NO: 2747718 - DNA, 25 bp, Homo sapien
tttgagtcgtactgttccacaaaag

SEQ ID NO: 2747719 - DNA, 25 bp, Homo sapien
ttagagcaatccacttgagagggcg

SEQ ID NO: 2747720 - DNA, 25 bp, Homo sapien
cagtgaatgccgacctttgaaagag

SEQ ID NO: 2747721 - DNA, 25 bp, Homo sapien
gagagtgccacgtgaaggtacaagc

SEQ ID NO: 2747722 - DNA, 25 bp, Homo sapien
taggtgagcctctaagccactacgg

SEQ ID NO: 2747723 - DNA, 25 bp, Homo sapien
agagaaccagtactttccgaagccg

SEQ ID NO: 2747724 - DNA, 25 bp, Homo sapien
tttctgtccataagagcgaggaccc

SEQ ID NO: 2747725 - DNA, 25 bp, Homo sapien
ggcctgccttcttagcgcgtggatg

SEQ ID NO: 2747726 - DNA, 25 bp, Homo sapien
tgcaccttccagatgcaactgagcg

SEQ ID NO: 2747727 - DNA, 25 bp, Homo sapien
gtggatgggaaacggcctctgtctt

SEQ ID NO: 2747728 - DNA, 25 bp, Homo sapien
gagaataccgtcatgaacttcaact

SEQ ID NO: 2747729 - DNA, 25 bp, Homo sapien
caggaaagtggagaactaaaaatag

SEQ ID NO: 2747730 - DNA, 25 bp, Homo sapien
tctttgagtcacacgttgagagaat

SEQ ID NO: 2747731 - DNA, 25 bp, Homo sapien
attcctggtgggcaatgggatgcct

SEQ ID NO: 2747732 - DNA, 25 bp, Homo sapien
gacagactttcgctcctgggtcaga

SEQ ID NO: 2747733 - DNA, 25 bp, Homo sapien
gaggcccagaaagtcgtgcaaatac

SEQ ID NO: 2747734 - DNA, 25 bp, Homo sapien
caggcaccatgtccctgaagcatct

SEQ ID NO: 2747735 - DNA, 25 bp, Homo sapien
gaagccattgtccactgtactcagt

SEQ ID NO: 2747736 - DNA, 25 bp, Homo sapien
tgctcggtgccaagctgtaatctgt

SEQ ID NO: 2747737 - DNA, 25 bp, Homo sapien
gaatgagatatgactccgcagcagc

SEQ ID NO: 2747738 - DNA, 25 bp, Homo sapien
ccgcagcagcaagtcggtgcttaaa

SEQ ID NO: 2747739 - DNA, 25 bp, Homo sapien
gaaaaggcggttccaagctacacag

SEQ ID NO: 2747740 - DNA, 25 bp, Homo sapien
tatagacggagaaacattttggacc

SEQ ID NO: 2747741 - DNA, 25 bp, Homo sapien
gggatactcttgagcactgccgaat

SEQ ID NO: 2747742 - DNA, 25 bp, Homo sapien
ggacagtcctcgctgatatatcagg

SEQ ID NO: 2747743 - DNA, 25 bp, Homo sapien
ggttgcagttgccccattgcactct

SEQ ID NO: 2747744 - DNA, 25 bp, Homo sapien
gaggttgcagttgccccattgcact

SEQ ID NO: 2747745 - DNA, 25 bp, Homo sapien
gtggaggttgcagttgccccattgc

SEQ ID NO: 2747746 - DNA, 25 bp, Homo sapien
tgcagttgccccattgcactctagc

SEQ ID NO: 2747747 - DNA, 25 bp, Homo sapien
ttttatgggtatctcctctcttgaa

SEQ ID NO: 2747748 - DNA, 25 bp, Homo sapien
tttttatgggtatctcctctcttga

SEQ ID NO: 2747749 - DNA, 25 bp, Homo sapien
agctcagggggaagagcacgagctc

SEQ ID NO: 2747750 - DNA, 25 bp, Homo sapien
gctcagggggaagagcacgagctca

SEQ ID NO: 2747751 - DNA, 25 bp, Homo sapien
cagctcagggggaagagcacgagct

SEQ ID NO: 2747752 - DNA, 25 bp, Homo sapien
tcagctcagggggaagagcacgagc

SEQ ID NO: 2747753 - DNA, 25 bp, Homo sapien
tgaaacgtcttgctctccccgctac

SEQ ID NO: 2747754 - DNA, 25 bp, Homo sapien
ttgatgctgcctgaaacgtcttgct

SEQ ID NO: 2747755 - DNA, 25 bp, Homo sapien
tgcctgaaacgtcttgctctccccg

SEQ ID NO: 2747756 - DNA, 25 bp, Homo sapien
cttgatgctgcctgaaacgtcttgc

SEQ ID NO: 2747757 - DNA, 25 bp, Homo sapien
gagacacaagtgtcacatgtccctt

SEQ ID NO: 2747758 - DNA, 25 bp, Homo sapien
gacccctcctgtgcataagaataga

SEQ ID NO: 2747759 - DNA, 25 bp, Homo sapien
tctcctcgtgcttgcgggaatgggc

SEQ ID NO: 2747760 - DNA, 25 bp, Homo sapien
gcttcgtgagttaccaaattggata

SEQ ID NO: 2747761 - DNA, 25 bp, Homo sapien
tttcataaatgatgcatagtgcttc

SEQ ID NO: 2747762 - DNA, 25 bp, Homo sapien
ccaacgcagcaataactcttgtaac

SEQ ID NO: 2747763 - DNA, 25 bp, Homo sapien
gggctccaacgcagcaataactctt

SEQ ID NO: 2747764 - DNA, 25 bp, Homo sapien
catagtgcttccatgaactgggctc

SEQ ID NO: 2747765 - DNA, 25 bp, Homo sapien
tgttccctgctcagatacaacggcg

SEQ ID NO: 2747766 - DNA, 25 bp, Homo sapien
tcaatgttaacaaaatctctggcct

SEQ ID NO: 2747767 - DNA, 25 bp, Homo sapien
gctggagattggatgcccacataaa

SEQ ID NO: 2747768 - DNA, 25 bp, Homo sapien
taaataacctcctcacacagtgaca

SEQ ID NO: 2747769 - DNA, 25 bp, Homo sapien
tggtcgatgtctggcaggtccagct

SEQ ID NO: 2747770 - DNA, 25 bp, Homo sapien
tttctttaacaagagatttcatggt

SEQ ID NO: 2747771 - DNA, 25 bp, Homo sapien
gcaggtccagctgagtgccactaat

SEQ ID NO: 2747772 - DNA, 25 bp, Homo sapien
gtgccactaatgtcagcattaccct

SEQ ID NO: 2747773 - DNA, 25 bp, Homo sapien
gggagcaacttctgctctggggtgc

SEQ ID NO: 2747774 - DNA, 25 bp, Homo sapien
cgggagcaacttctgctctggggtg

SEQ ID NO: 2747775 - DNA, 25 bp, Homo sapien
ccgggagcaacttctgctctggggt

SEQ ID NO: 2747776 - DNA, 25 bp, Homo sapien
ggagcaacttctgctctggggtgca

SEQ ID NO: 2747777 - DNA, 25 bp, Homo sapien
ctaaaggtagcaatttctgtgtgag

SEQ ID NO: 2747778 - DNA, 25 bp, Homo sapien
ctgtgtgagttagattcagtggact

SEQ ID NO: 2747779 - DNA, 25 bp, Homo sapien
tgcagacgcttagcattccccacgt

SEQ ID NO: 2747780 - DNA, 25 bp, Homo sapien
cagtggactgtaattatgcagacgc

SEQ ID NO: 2747781 - DNA, 25 bp, Homo sapien
ctgatcatagcacagttgtacgtga

SEQ ID NO: 2747782 - DNA, 25 bp, Homo sapien
tgatcatagcacagttgtacgtgat

SEQ ID NO: 2747783 - DNA, 25 bp, Homo sapien
atcatagcacagttgtacgtgattt

SEQ ID NO: 2747784 - DNA, 25 bp, Homo sapien
ctctctgctgatcatagcacagttg

SEQ ID NO: 2747785 - DNA, 25 bp, Homo sapien
tgtgccaggcatgattctgcaatat

SEQ ID NO: 2747786 - DNA, 25 bp, Homo sapien
tgcgtctctgccagtgccgtgtgcc

SEQ ID NO: 2747787 - DNA, 25 bp, Homo sapien
gacactttcccttctgcgtctctgc

SEQ ID NO: 2747788 - DNA, 25 bp, Homo sapien
tccaggttattcaagaaggtcaggg

SEQ ID NO: 2747789 - DNA, 25 bp, Homo sapien
tcatccgacgttgcggagagcagcg

SEQ ID NO: 2747790 - DNA, 25 bp, Homo sapien
cagtcatccgacgttgcggagagca

SEQ ID NO: 2747791 - DNA, 25 bp, Homo sapien
cggagagcagcgtgggtccgaggga

SEQ ID NO: 2747792 - DNA, 25 bp, Homo sapien
agagcagcgtgggtccgagggaagg

SEQ ID NO: 2747793 - DNA, 25 bp, Homo sapien
caggcccctcgaggtctgggtttcg

SEQ ID NO: 2747794 - DNA, 25 bp, Homo sapien
ctgggcttgtcgagctctgcccgca

SEQ ID NO: 2747795 - DNA, 25 bp, Homo sapien
tgggcttgtcgagctctgcccgcag

SEQ ID NO: 2747796 - DNA, 25 bp, Homo sapien
ggcgagtgaggcagagtgaagcaca

SEQ ID NO: 2747797 - DNA, 25 bp, Homo sapien
tgactgaggtcagggcttgcctttg

SEQ ID NO: 2747798 - DNA, 25 bp, Homo sapien
cagcaggcggaaggcgagtgaggca

SEQ ID NO: 2747799 - DNA, 25 bp, Homo sapien
atatcaccgccaccccgtgtgactg

SEQ ID NO: 2747800 - DNA, 25 bp, Homo sapien
gacccggctacgctggacccaggtg

SEQ ID NO: 2747801 - DNA, 25 bp, Homo sapien
cagcagtggcatccgggctgtccca

SEQ ID NO: 2747802 - DNA, 25 bp, Homo sapien
tcctgcgcctacaccccgagagcgg

SEQ ID NO: 2747803 - DNA, 25 bp, Homo sapien
acccaggtgcgctggacccaggcgt

SEQ ID NO: 2747804 - DNA, 25 bp, Homo sapien
tggggatgtgatgtccccagacagc

SEQ ID NO: 2747805 - DNA, 25 bp, Homo sapien
gacagcagcaccctggcagtggctg

SEQ ID NO: 2747806 - DNA, 25 bp, Homo sapien
cccagacagcagcaccctggcagtg

SEQ ID NO: 2747807 - DNA, 25 bp, Homo sapien
catggggatgtgatgtccccagaca

SEQ ID NO: 2747808 - DNA, 25 bp, Homo sapien
catgcatggctccttcaggaaccat

SEQ ID NO: 2747809 - DNA, 25 bp, Homo sapien
aggcaggtgttgttctaagccgcat

SEQ ID NO: 2747810 - DNA, 25 bp, Homo sapien
caggcaggtgttgttctaagccgca

SEQ ID NO: 2747811 - DNA, 25 bp, Homo sapien
gcaggcaggtgttgttctaagccgc

SEQ ID NO: 2747812 - DNA, 25 bp, Homo sapien
gaaggagaattgagccaccaaggat

SEQ ID NO: 2747813 - DNA, 25 bp, Homo sapien
tgcagacgctatcgaggtgtcacct

SEQ ID NO: 2747814 - DNA, 25 bp, Homo sapien
gatttgacaagaggacagtgcgctg

SEQ ID NO: 2747815 - DNA, 25 bp, Homo sapien
cggaatgctcccctggtgaactaaa

SEQ ID NO: 2747816 - DNA, 25 bp, Homo sapien
aggctcctcgtctttgtctctggca

SEQ ID NO: 2747817 - DNA, 25 bp, Homo sapien
ggcccaagggcttccggactggatc

SEQ ID NO: 2747818 - DNA, 25 bp, Homo sapien
taagcaggaggagctccgattccgc

SEQ ID NO: 2747819 - DNA, 25 bp, Homo sapien
gcagcgacccctagacctggttttg

SEQ ID NO: 2747820 - DNA, 25 bp, Homo sapien
tataggcgatgtctcagtgtctgtc

SEQ ID NO: 2747821 - DNA, 25 bp, Homo sapien
ctaaagccgagaagacgccagagtg

SEQ ID NO: 2747822 - DNA, 25 bp, Homo sapien
gtgtccaggatacgggtggctcaaa

SEQ ID NO: 2747823 - DNA, 25 bp, Homo sapien
agagtgcgctgctgaaattcccgcg

SEQ ID NO: 2747824 - DNA, 25 bp, Homo sapien
ccgagctggcgacttctccgcggga

SEQ ID NO: 2747825 - DNA, 25 bp, Homo sapien
gatttgccctcgctcaaagtttgca

SEQ ID NO: 2747826 - DNA, 25 bp, Homo sapien
gctggcgacttctccgcgggatttg

SEQ ID NO: 2747827 - DNA, 25 bp, Homo sapien
tccgcgggatttgccctcgctcaaa

SEQ ID NO: 2747828 - DNA, 25 bp, Homo sapien
cgcggagctgggcggcggggcaggc

SEQ ID NO: 2747829 - DNA, 25 bp, Homo sapien
cggagctgggcggcggggcaggcgc

SEQ ID NO: 2747830 - DNA, 25 bp, Homo sapien
gagctgggcggcggggcaggcgcgg

SEQ ID NO: 2747831 - DNA, 25 bp, Homo sapien
ccgggggccgcggagctgggcggcg

SEQ ID NO: 2747832 - DNA, 25 bp, Homo sapien
gactgtacacctgccacatcggcaa

SEQ ID NO: 2747833 - DNA, 25 bp, Homo sapien
ttcctgcctagccacggactgtaca

SEQ ID NO: 2747834 - DNA, 25 bp, Homo sapien
tctccaactggaccaacagcgcatt

SEQ ID NO: 2747835 - DNA, 25 bp, Homo sapien
caagcccaagatctggtcgctggcg

SEQ ID NO: 2747836 - DNA, 25 bp, Homo sapien
gaaatacatagatgtggtcaggacc

SEQ ID NO: 2747837 - DNA, 25 bp, Homo sapien
ccatgttgtaacttatgcctatatt

SEQ ID NO: 2747838 - DNA, 25 bp, Homo sapien
atcccctgacctcaaaacatctaaa

SEQ ID NO: 2747839 - DNA, 25 bp, Homo sapien
gccatgtttatatggaggttgcaga

SEQ ID NO: 2747840 - DNA, 25 bp, Homo sapien
tgaaacgtatgattggggaaagccc

SEQ ID NO: 2747841 - DNA, 25 bp, Homo sapien
gtttcccatagacacgcccagggct

SEQ ID NO: 2747842 - DNA, 25 bp, Homo sapien
catggtgagttatgttatctggatg

SEQ ID NO: 2747843 - DNA, 25 bp, Homo sapien
tctgcagaggagatgcatgtgagtt

SEQ ID NO: 2747844 - DNA, 25 bp, Homo sapien
gaaaatcggagctcacatttccctg

SEQ ID NO: 2747845 - DNA, 25 bp, Homo sapien
tggtcagtctcggattgagctggtg

SEQ ID NO: 2747846 - DNA, 25 bp, Homo sapien
gcaccttggtcctcagaggggcgat

SEQ ID NO: 2747847 - DNA, 25 bp, Homo sapien
gaagtacgcagcagatgaatcagtg

SEQ ID NO: 2747848 - DNA, 25 bp, Homo sapien
aatgtgtctggaagctgtgtctcca

SEQ ID NO: 2747849 - DNA, 25 bp, Homo sapien
gaatgtgtctggaagctgtgtctcc

SEQ ID NO: 2747850 - DNA, 25 bp, Homo sapien
tgtgtctggaagctgtgtctccaac

SEQ ID NO: 2747851 - DNA, 25 bp, Homo sapien
atgtgtctggaagctgtgtctccaa

SEQ ID NO: 2747852 - DNA, 25 bp, Homo sapien
acttgattttcatccagggcgagaa

SEQ ID NO: 2747853 - DNA, 25 bp, Homo sapien
gaacttgattttcatccagggcgag

SEQ ID NO: 2747854 - DNA, 25 bp, Homo sapien
aacttgattttcatccagggcgaga

SEQ ID NO: 2747855 - DNA, 25 bp, Homo sapien
tggtcctgtttgttcggcacactga

SEQ ID NO: 2747856 - DNA, 25 bp, Homo sapien
cagtcagggtggctcgaaggcaaat

SEQ ID NO: 2747857 - DNA, 25 bp, Homo sapien
ggtggaagcttttccgtagccttca

SEQ ID NO: 2747858 - DNA, 25 bp, Homo sapien
gtttgttcggcacactgaccaagga

SEQ ID NO: 2747859 - DNA, 25 bp, Homo sapien
caagccagtctgcacctcagctctt

SEQ ID NO: 2747860 - DNA, 25 bp, Homo sapien
cactgatcgtgagctatgggtctgg

SEQ ID NO: 2747861 - DNA, 25 bp, Homo sapien
tatttgtgagctgccactgatcgtg

SEQ ID NO: 2747862 - DNA, 25 bp, Homo sapien
caatgagtgcaaaccaggtgccggg

SEQ ID NO: 2747863 - DNA, 25 bp, Homo sapien
actccttgttgatcctaaaaattct

SEQ ID NO: 2747864 - DNA, 25 bp, Homo sapien
tactccttgttgatcctaaaaattc

SEQ ID NO: 2747865 - DNA, 25 bp, Homo sapien
ccttgttgatcctaaaaattctcac

SEQ ID NO: 2747866 - DNA, 25 bp, Homo sapien
ttcctgatgccacgctgccatcata

SEQ ID NO: 2747867 - DNA, 25 bp, Homo sapien
acgctgccatcatagggtatgtggg

SEQ ID NO: 2747868 - DNA, 25 bp, Homo sapien
cgctgccatcatagggtatgtggga

SEQ ID NO: 2747869 - DNA, 25 bp, Homo sapien
gctgccatcatagggtatgtgggac

SEQ ID NO: 2747870 - DNA, 25 bp, Homo sapien
attctatatgatgacctgcccgtta

SEQ ID NO: 2747871 - DNA, 25 bp, Homo sapien
tgttatgaccacacataaccttccc

SEQ ID NO: 2747872 - DNA, 25 bp, Homo sapien
tatatgatgacctgcccgttatgac

SEQ ID NO: 2747873 - DNA, 25 bp, Homo sapien
gacctgcccgttatgacctcacaga

SEQ ID NO: 2747874 - DNA, 25 bp, Homo sapien
gactgttctagctcccaggctttcg

SEQ ID NO: 2747875 - DNA, 25 bp, Homo sapien
tgtgtgactctctacgtgggctgga

SEQ ID NO: 2747876 - DNA, 25 bp, Homo sapien
gatgacctgccctgttatgatctca

SEQ ID NO: 2747877 - DNA, 25 bp, Homo sapien
aggctttcgggcacctgggcttata

SEQ ID NO: 2747878 - DNA, 25 bp, Homo sapien
tggtgctgaccttgtactccagagg

SEQ ID NO: 2747879 - DNA, 25 bp, Homo sapien
cagaggctcagcgaggctttgtctg

SEQ ID NO: 2747880 - DNA, 25 bp, Homo sapien
tgtgccgctcctggaccttaactgt

SEQ ID NO: 2747881 - DNA, 25 bp, Homo sapien
cgctcctggaccttaactgtgttgg

SEQ ID NO: 2747882 - DNA, 25 bp, Homo sapien
tccaggggctattcttcgcaggcat

SEQ ID NO: 2747883 - DNA, 25 bp, Homo sapien
tgccattgcccagagagcaagccgg

SEQ ID NO: 2747884 - DNA, 25 bp, Homo sapien
cactcagcgcaaagctcagcctctt

SEQ ID NO: 2747885 - DNA, 25 bp, Homo sapien
tgagcttgcaatggcccctcccaaa

SEQ ID NO: 2747886 - DNA, 25 bp, Homo sapien
ctttttctgctgaatcgactcaatt

SEQ ID NO: 2747887 - DNA, 25 bp, Homo sapien
gctgaatcgactcaattgtaaacat

SEQ ID NO: 2747888 - DNA, 25 bp, Homo sapien
gctggactactactgaaaaactcat

SEQ ID NO: 2747889 - DNA, 25 bp, Homo sapien
ctggctggactactactgaaaaact

SEQ ID NO: 2747890 - DNA, 25 bp, Homo sapien
cttctgggctgatgtaacctgagag

SEQ ID NO: 2747891 - DNA, 25 bp, Homo sapien
gagagccttaggacatagacctgaa

SEQ ID NO: 2747892 - DNA, 25 bp, Homo sapien
taacctgagagccttaggacataga

SEQ ID NO: 2747893 - DNA, 25 bp, Homo sapien
tctgggctgatgtaacctgagagcc

SEQ ID NO: 2747894 - DNA, 25 bp, Homo sapien
tgggagggttatcagctcccgaccc

SEQ ID NO: 2747895 - DNA, 25 bp, Homo sapien
ggagggttatcagctcccgacccca

SEQ ID NO: 2747896 - DNA, 25 bp, Homo sapien
tattgtactggacttgcccactggg

SEQ ID NO: 2747897 - DNA, 25 bp, Homo sapien
catgctgggagggttatcagctccc

SEQ ID NO: 2747898 - DNA, 25 bp, Homo sapien
tgtgaagcctgatctgcacaccacg

SEQ ID NO: 2747899 - DNA, 25 bp, Homo sapien
ctcagactttccgtgtgaagcctga

SEQ ID NO: 2747900 - DNA, 25 bp, Homo sapien
cgtggaagcactctgcaacgcaggt

SEQ ID NO: 2747901 - DNA, 25 bp, Homo sapien
tctgcacaccacgtggaagcactct

SEQ ID NO: 2747902 - DNA, 25 bp, Homo sapien
ccccgaatgagccatgttccagaga

SEQ ID NO: 2747903 - DNA, 25 bp, Homo sapien
tcagctccagaactgccacataaat

SEQ ID NO: 2747904 - DNA, 25 bp, Homo sapien
agaagctacagggtgcaagtttgca

SEQ ID NO: 2747905 - DNA, 25 bp, Homo sapien
taaatggtagcgatttgtgctggac

SEQ ID NO: 2747906 - DNA, 25 bp, Homo sapien
gagatttcaggcttgggttagcctc

SEQ ID NO: 2747907 - DNA, 25 bp, Homo sapien
gggtggattgtctgcaagagcctct

SEQ ID NO: 2747908 - DNA, 25 bp, Homo sapien
cctcggacgcatgcaaatagcttaa

SEQ ID NO: 2747909 - DNA, 25 bp, Homo sapien
ggattgtctgcaagagcctcttcac

SEQ ID NO: 2747910 - DNA, 25 bp, Homo sapien
tctggtattgcataagaagttgtgc

SEQ ID NO: 2747911 - DNA, 25 bp, Homo sapien
catagcatcattgtgagacctgggc

SEQ ID NO: 2747912 - DNA, 25 bp, Homo sapien
cagagactgcacgtggttgtagcca

SEQ ID NO: 2747913 - DNA, 25 bp, Homo sapien
tccacccaaggagtttcttcaagaa

SEQ ID NO: 2747914 - DNA, 25 bp, Homo sapien
gtgtccctgggcgtttcttcattcg

SEQ ID NO: 2747915 - DNA, 25 bp, Homo sapien
gatagctgctgagcagtccaggatg

SEQ ID NO: 2747916 - DNA, 25 bp, Homo sapien
gagttttcaggtgggccgcattgac

SEQ ID NO: 2747917 - DNA, 25 bp, Homo sapien
tgcttttgcctatacgtgtccctgg

SEQ ID NO: 2747918 - DNA, 25 bp, Homo sapien
agcgccgcgtccctgcaggtccaca

SEQ ID NO: 2747919 - DNA, 25 bp, Homo sapien
tcctcactgggaggacgcggcttgt

SEQ ID NO: 2747920 - DNA, 25 bp, Homo sapien
tgtatgggcccctccacaatcttca

SEQ ID NO: 2747921 - DNA, 25 bp, Homo sapien
gaggacgcggcttgttcccatttct

SEQ ID NO: 2747922 - DNA, 25 bp, Homo sapien
tgaatgccccgagctggttctccat

SEQ ID NO: 2747923 - DNA, 25 bp, Homo sapien
ccatcatctgacagttcaaccgcta

SEQ ID NO: 2747924 - DNA, 25 bp, Homo sapien
ctgacagttcaaccgctaacatctg

SEQ ID NO: 2747925 - DNA, 25 bp, Homo sapien
agccccacttgaatgccccgagctg

SEQ ID NO: 2747926 - DNA, 25 bp, Homo sapien
gaaaacatcattgccaatttctttc

SEQ ID NO: 2747927 - DNA, 25 bp, Homo sapien
tctcaggcaccaagtgaaaacatca

SEQ ID NO: 2747928 - DNA, 25 bp, Homo sapien
caaaagaagttgttccattgccaca

SEQ ID NO: 2747929 - DNA, 25 bp, Homo sapien
tggtctctcaggcaccaagtgaaaa

SEQ ID NO: 2747930 - DNA, 25 bp, Homo sapien
ttttgcaatacaggtggagagcatc

SEQ ID NO: 2747931 - DNA, 25 bp, Homo sapien
ctcatccttcagattatacaggaac

SEQ ID NO: 2747932 - DNA, 25 bp, Homo sapien
tatacaggaactcccgaaggaagca

SEQ ID NO: 2747933 - DNA, 25 bp, Homo sapien
tctgtggatgtgtaatttgtttcta

SEQ ID NO: 2747934 - DNA, 25 bp, Homo sapien
agtccccagaaagagccgtccctgg

SEQ ID NO: 2747935 - DNA, 25 bp, Homo sapien
cggagggagcagagtttctaccggg

SEQ ID NO: 2747936 - DNA, 25 bp, Homo sapien
gcagagtttctaccggggcatcctg

SEQ ID NO: 2747937 - DNA, 25 bp, Homo sapien
gggccggagggagcagagtttctac

SEQ ID NO: 2747938 - DNA, 25 bp, Homo sapien
gcatgcatcaagatgcccacctagt

SEQ ID NO: 2747939 - DNA, 25 bp, Homo sapien
taattgagataagggtgtcactttg

SEQ ID NO: 2747940 - DNA, 25 bp, Homo sapien
cagtgataattttcaatcatgtcat

SEQ ID NO: 2747941 - DNA, 25 bp, Homo sapien
aatctcagctatttcacctcactgc

SEQ ID NO: 2747942 - DNA, 25 bp, Homo sapien
aaagcgggtgacagctatgtccact

SEQ ID NO: 2747943 - DNA, 25 bp, Homo sapien
ccactttgcaggaacgatgcaacga

SEQ ID NO: 2747944 - DNA, 25 bp, Homo sapien
ttcgtaacggcccatcctgcacagg

SEQ ID NO: 2747945 - DNA, 25 bp, Homo sapien
gatgcaacgatgcagggtttctcct

SEQ ID NO: 2747946 - DNA, 25 bp, Homo sapien
gtgatgcttacggatgggatcttca

SEQ ID NO: 2747947 - DNA, 25 bp, Homo sapien
aaggaggccagagtgatgcttacgg

SEQ ID NO: 2747948 - DNA, 25 bp, Homo sapien
ccagagtgatgcttacggatgggat

SEQ ID NO: 2747949 - DNA, 25 bp, Homo sapien
tacggatgggatcttcatgttctct

SEQ ID NO: 2747950 - DNA, 25 bp, Homo sapien
gaaaactcatctctagtaaggcgac

SEQ ID NO: 2747951 - DNA, 25 bp, Homo sapien
ggaatgatgttcgtgtaacacccac

SEQ ID NO: 2747952 - DNA, 25 bp, Homo sapien
cagaatacgggtggtgcaagtccag

SEQ ID NO: 2747953 - DNA, 25 bp, Homo sapien
taaggcgacgatggcagatgcgatc

SEQ ID NO: 2747954 - DNA, 25 bp, Homo sapien
tggagaatcatacgttcctgggtgt

SEQ ID NO: 2747955 - DNA, 25 bp, Homo sapien
cagtgcctggcgctgaaccatgatc

SEQ ID NO: 2747956 - DNA, 25 bp, Homo sapien
tttcttgtctcatggtggccccacg

SEQ ID NO: 2747957 - DNA, 25 bp, Homo sapien
gacgggactcaccactgtgtttaag

SEQ ID NO: 2747958 - DNA, 25 bp, Homo sapien
ccccatagaggccagtatcagggcc

SEQ ID NO: 2747959 - DNA, 25 bp, Homo sapien
tcctcccttctttatgacaaccgtc

SEQ ID NO: 2747960 - DNA, 25 bp, Homo sapien
gaggccagtatcagggcctcctccc

SEQ ID NO: 2747961 - DNA, 25 bp, Homo sapien
ctcctcccttctttatgacaaccgt

SEQ ID NO: 2747962 - DNA, 25 bp, Homo sapien
aaatagatgcttcttgtagtccaag

SEQ ID NO: 2747963 - DNA, 25 bp, Homo sapien
tttcttgcccatgcacacagacctt

SEQ ID NO: 2747964 - DNA, 25 bp, Homo sapien
gcatttggaatatctagtgcccatg

SEQ ID NO: 2747965 - DNA, 25 bp, Homo sapien
gctgcgtggctctccggagaaactt

SEQ ID NO: 2747966 - DNA, 25 bp, Homo sapien
cactgggagccgttgatgggaagcg

SEQ ID NO: 2747967 - DNA, 25 bp, Homo sapien
ggtaaattcagggtgatgtagaaaa

SEQ ID NO: 2747968 - DNA, 25 bp, Homo sapien
cagggtgatgtagaaaatgactctt

SEQ ID NO: 2747969 - DNA, 25 bp, Homo sapien
cttgatgaaactgtgggtagagtac

SEQ ID NO: 2747970 - DNA, 25 bp, Homo sapien
catcctctagtggttgctcctggca

SEQ ID NO: 2747971 - DNA, 25 bp, Homo sapien
cataccctacagctctaaattgagg

SEQ ID NO: 2747972 - DNA, 25 bp, Homo sapien
agaattttccaaatgcagtccctga

SEQ ID NO: 2747973 - DNA, 25 bp, Homo sapien
ggagaagtcaaggagaccactggca

SEQ ID NO: 2747974 - DNA, 25 bp, Homo sapien
gaatgacagtgttaaatacttaatc

SEQ ID NO: 2747975 - DNA, 25 bp, Homo sapien
tctgtggcttggtactcactggaaa

SEQ ID NO: 2747976 - DNA, 25 bp, Homo sapien
gagagtggcccttccatcccgtttc

SEQ ID NO: 2747977 - DNA, 25 bp, Homo sapien
ggattgtcttggagagtggcccttc

SEQ ID NO: 2747978 - DNA, 25 bp, Homo sapien
ccagaaacttccaagacgtcaccat

SEQ ID NO: 2747979 - DNA, 25 bp, Homo sapien
ttctcggatgaactgtgcagctgca

SEQ ID NO: 2747980 - DNA, 25 bp, Homo sapien
aggtgacacttcaggaaccatgccc

SEQ ID NO: 2747981 - DNA, 25 bp, Homo sapien
ttgctttctcggatgaactgtgcag

SEQ ID NO: 2747982 - DNA, 25 bp, Homo sapien
caaggccttccctcacaggctgaaa

SEQ ID NO: 2747983 - DNA, 25 bp, Homo sapien
agcaaggccttccctcacaggctga

SEQ ID NO: 2747984 - DNA, 25 bp, Homo sapien
ctggaacagcagcaaggccttccct

SEQ ID NO: 2747985 - DNA, 25 bp, Homo sapien
gactggaacagcagcaaggccttcc

SEQ ID NO: 2747986 - DNA, 25 bp, Homo sapien
cgccgttttctagagtatgtgcaca

SEQ ID NO: 2747987 - DNA, 25 bp, Homo sapien
taaagcagtgggtaggaccccgatc

SEQ ID NO: 2747988 - DNA, 25 bp, Homo sapien
catgctgggaataactggcttgttt

SEQ ID NO: 2747989 - DNA, 25 bp, Homo sapien
cattctgtgtgtagttacacttggg

SEQ ID NO: 2747990 - DNA, 25 bp, Homo sapien
tgggcatgggtatcccgacagcaag

SEQ ID NO: 2747991 - DNA, 25 bp, Homo sapien
tgtgcccaggcatgattaagccaag

SEQ ID NO: 2747992 - DNA, 25 bp, Homo sapien
cattagccagtgttctgtgcccagg

SEQ ID NO: 2747993 - DNA, 25 bp, Homo sapien
gaagcttctgctcgttaccatttgg

SEQ ID NO: 2747994 - DNA, 25 bp, Homo sapien
gaatgagtttttcccgcctctgtgt

SEQ ID NO: 2747995 - DNA, 25 bp, Homo sapien
ggttggttgacatcctgcagtcagg

SEQ ID NO: 2747996 - DNA, 25 bp, Homo sapien
catcctgcagtcaggaatgagtttt

SEQ ID NO: 2747997 - DNA, 25 bp, Homo sapien
ggagatgcagacttcgcattactgg

SEQ ID NO: 2747998 - DNA, 25 bp, Homo sapien
gtgacagaaataggcctggcgcgct

SEQ ID NO: 2747999 - DNA, 25 bp, Homo sapien
cgctcgggaggaatgctaatcgccc

SEQ ID NO: 2748000 - DNA, 25 bp, Homo sapien
ggcttgtcggcctatttcactagga

SEQ ID NO: 2748001 - DNA, 25 bp, Homo sapien
caccgtggctaggatgctcgtggcc

SEQ ID NO: 2748002 - DNA, 25 bp, Homo sapien
aatggtgcccggagagagctgcttc

SEQ ID NO: 2748003 - DNA, 25 bp, Homo sapien
aggtctccctaatggtgcccggaga

SEQ ID NO: 2748004 - DNA, 25 bp, Homo sapien
cctctctactgttaaggagggacag

SEQ ID NO: 2748005 - DNA, 25 bp, Homo sapien
ctctactgttaaggagggacagtcc

SEQ ID NO: 2748006 - DNA, 25 bp, Homo sapien
tactgggttgccatcagggtggcaa

SEQ ID NO: 2748007 - DNA, 25 bp, Homo sapien
catgccctctgtttgcgtgtctgtg

SEQ ID NO: 2748008 - DNA, 25 bp, Homo sapien
aaggtgacttgggaatgatgctccg

SEQ ID NO: 2748009 - DNA, 25 bp, Homo sapien
gctctgttcccagtaaaggtgactt

SEQ ID NO: 2748010 - DNA, 25 bp, Homo sapien
gacggcttggtaagaatcaccgcaa

SEQ ID NO: 2748011 - DNA, 25 bp, Homo sapien
agtttccttgtggtgacacaggaat

SEQ ID NO: 2748012 - DNA, 25 bp, Homo sapien
agaatcaccgcaactctagccaagg

SEQ ID NO: 2748013 - DNA, 25 bp, Homo sapien
tccacaggtatatttcccaacgacg

SEQ ID NO: 2748014 - DNA, 25 bp, Homo sapien
ggaagagcctcgctgttcttcttct

SEQ ID NO: 2748015 - DNA, 25 bp, Homo sapien
cttctacctgtggtccaacttggac

SEQ ID NO: 2748016 - DNA, 25 bp, Homo sapien
ctgtggcaccggtaccctgttggaa

SEQ ID NO: 2748017 - DNA, 25 bp, Homo sapien
tcttcttctacctgtggtccaactt

SEQ ID NO: 2748018 - DNA, 25 bp, Homo sapien
tggccataagcatcagcagcatctt

SEQ ID NO: 2748019 - DNA, 25 bp, Homo sapien
aaacaccggagaacagggctccctg

SEQ ID NO: 2748020 - DNA, 25 bp, Homo sapien
gtgctggccataagcatcagcagca

SEQ ID NO: 2748021 - DNA, 25 bp, Homo sapien
tccagtgctggccataagcatcagc

SEQ ID NO: 2748022 - DNA, 25 bp, Homo sapien
gagtgtgccacgctagttggctccg

SEQ ID NO: 2748023 - DNA, 25 bp, Homo sapien
ggtggagtgagtgtgccacgctagt

SEQ ID NO: 2748024 - DNA, 25 bp, Homo sapien
cgctagttggctccgggacacaatg

SEQ ID NO: 2748025 - DNA, 25 bp, Homo sapien
tgccacgctagttggctccgggaca

SEQ ID NO: 2748026 - DNA, 25 bp, Homo sapien
cacggcattggtagctttgatatac

SEQ ID NO: 2748027 - DNA, 25 bp, Homo sapien
cggcattggtagctttgatatacat

SEQ ID NO: 2748028 - DNA, 25 bp, Homo sapien
gacacggcattggtagctttgatat

SEQ ID NO: 2748029 - DNA, 25 bp, Homo sapien
agacacggcattggtagctttgata

SEQ ID NO: 2748030 - DNA, 25 bp, Homo sapien
gatgacatccactgagaatttggcc

SEQ ID NO: 2748031 - DNA, 25 bp, Homo sapien
cagctgactcttcgttccctgatat

SEQ ID NO: 2748032 - DNA, 25 bp, Homo sapien
tgcagaggaaacaacccttgctggc

SEQ ID NO: 2748033 - DNA, 25 bp, Homo sapien
tcagttgagctgaacaatattcaga

SEQ ID NO: 2748034 - DNA, 25 bp, Homo sapien
gcgcaggcaccagagccccgggaga

SEQ ID NO: 2748035 - DNA, 25 bp, Homo sapien
agcccagggcgcaggcaccagagcc

SEQ ID NO: 2748036 - DNA, 25 bp, Homo sapien
aggcaccagagccccgggagaggcc

SEQ ID NO: 2748037 - DNA, 25 bp, Homo sapien
gatgctctcagggctgctgcagagc

SEQ ID NO: 2748038 - DNA, 25 bp, Homo sapien
ctcccaagtggtagggcagcctcct

SEQ ID NO: 2748039 - DNA, 25 bp, Homo sapien
caagtgcatagtcgtggagccccag

SEQ ID NO: 2748040 - DNA, 25 bp, Homo sapien
gtgcctcccaagtggtagggcagcc

SEQ ID NO: 2748041 - DNA, 25 bp, Homo sapien
ctgcaagtgcatagtcgtggagccc

SEQ ID NO: 2748042 - DNA, 25 bp, Homo sapien
aacaaccccatgctgtgtaaacaaa

SEQ ID NO: 2748043 - DNA, 25 bp, Homo sapien
aaacaaccccatgctgtgtaaacaa

SEQ ID NO: 2748044 - DNA, 25 bp, Homo sapien
acaaccccatgctgtgtaaacaaag

SEQ ID NO: 2748045 - DNA, 25 bp, Homo sapien
ctgattcatccaggacggcttcttt

SEQ ID NO: 2748046 - DNA, 25 bp, Homo sapien
taagcctttgcctttatgcaggaac

SEQ ID NO: 2748047 - DNA, 25 bp, Homo sapien
cttttcagacgcagctaagcctttg

SEQ ID NO: 2748048 - DNA, 25 bp, Homo sapien
tgcccacatcctcgaaattcctgaa

SEQ ID NO: 2748049 - DNA, 25 bp, Homo sapien
cctgcgataaaagtggaagctctat

SEQ ID NO: 2748050 - DNA, 25 bp, Homo sapien
aaatgtgggcaggagatatcaggaa

SEQ ID NO: 2748051 - DNA, 25 bp, Homo sapien
tgcgataaaagtggaagctctattt

SEQ ID NO: 2748052 - DNA, 25 bp, Homo sapien
tgggcaggagatatcaggaagcaaa

SEQ ID NO: 2748053 - DNA, 25 bp, Homo sapien
ttgaataataacatctggagcttga

SEQ ID NO: 2748054 - DNA, 25 bp, Homo sapien
tttgtagcaagatttgaataataac

SEQ ID NO: 2748055 - DNA, 25 bp, Homo sapien
ataacatctggagcttgaagatcaa

SEQ ID NO: 2748056 - DNA, 25 bp, Homo sapien
tgtccttgacgatgctgatccctgg

SEQ ID NO: 2748057 - DNA, 25 bp, Homo sapien
tagatatgttagagcttttgtcaaa

SEQ ID NO: 2748058 - DNA, 25 bp, Homo sapien
gataaatttagccatttgctgggtt

SEQ ID NO: 2748059 - DNA, 25 bp, Homo sapien
tacttcacataaactcagagaacat

SEQ ID NO: 2748060 - DNA, 25 bp, Homo sapien
caaccgcgtagaactttggagatac

SEQ ID NO: 2748061 - DNA, 25 bp, Homo sapien
tcctggggaccaaagacaggcgtca

SEQ ID NO: 2748062 - DNA, 25 bp, Homo sapien
aagacaggcgtcacaagtctcctct

SEQ ID NO: 2748063 - DNA, 25 bp, Homo sapien
ccaaagacaggcgtcacaagtctcc

SEQ ID NO: 2748064 - DNA, 25 bp, Homo sapien
gggaccaaagacaggcgtcacaagt

SEQ ID NO: 2748065 - DNA, 25 bp, Homo sapien
tacttcctccgggagctgtgtttct

SEQ ID NO: 2748066 - DNA, 25 bp, Homo sapien
gatctagtggtgacggttcccaaag

SEQ ID NO: 2748067 - DNA, 25 bp, Homo sapien
aggctctgtggatctagtggtgacg

SEQ ID NO: 2748068 - DNA, 25 bp, Homo sapien
tctgtggatctagtggtgacggttc

SEQ ID NO: 2748069 - DNA, 25 bp, Homo sapien
agtcctggctgtcttttccgtcact

SEQ ID NO: 2748070 - DNA, 25 bp, Homo sapien
ccttgcacggatggacaacagggaa

SEQ ID NO: 2748071 - DNA, 25 bp, Homo sapien
tttccgtcacttcagattccttgca

SEQ ID NO: 2748072 - DNA, 25 bp, Homo sapien
aagctgctaagttggaagtcctggc

SEQ ID NO: 2748073 - DNA, 25 bp, Homo sapien
caggacccacgtttggcttcatgga

SEQ ID NO: 2748074 - DNA, 25 bp, Homo sapien
aggacccacgtttggcttcatggag

SEQ ID NO: 2748075 - DNA, 25 bp, Homo sapien
ggacccacgtttggcttcatggaga

SEQ ID NO: 2748076 - DNA, 25 bp, Homo sapien
ccaggacccacgtttggcttcatgg

SEQ ID NO: 2748077 - DNA, 25 bp, Homo sapien
aggtagaagctaatgaaatactctg

SEQ ID NO: 2748078 - DNA, 25 bp, Homo sapien
gtagaagctaatgaaatactctgac

SEQ ID NO: 2748079 - DNA, 25 bp, Homo sapien
ggtagaagctaatgaaatactctga

SEQ ID NO: 2748080 - DNA, 25 bp, Homo sapien
ggtgcacctgagcagttgcttctgt

SEQ ID NO: 2748081 - DNA, 25 bp, Homo sapien
gtttcttccttactagcactggagc

SEQ ID NO: 2748082 - DNA, 25 bp, Homo sapien
actggtgccgagtgcaggtgcacct

SEQ ID NO: 2748083 - DNA, 25 bp, Homo sapien
ggacattctcaggacggactggtgc

SEQ ID NO: 2748084 - DNA, 25 bp, Homo sapien
tgtcagcatttctgagggaccagag

SEQ ID NO: 2748085 - DNA, 25 bp, Homo sapien
tgtattgacaggatgacttcacccg

SEQ ID NO: 2748086 - DNA, 25 bp, Homo sapien
gaaacagagcaagcccactattggg

SEQ ID NO: 2748087 - DNA, 25 bp, Homo sapien
gctttcagaggtaggccatggtgca

SEQ ID NO: 2748088 - DNA, 25 bp, Homo sapien
tggctgccagcccaacgtcctcctt

SEQ ID NO: 2748089 - DNA, 25 bp, Homo sapien
acccagctctgtgccgaaggtgtgg

SEQ ID NO: 2748090 - DNA, 25 bp, Homo sapien
tctgtgccgaaggtgtggtcacacg

SEQ ID NO: 2748091 - DNA, 25 bp, Homo sapien
cgtcctccttcgacccagctctgtg

SEQ ID NO: 2748092 - DNA, 25 bp, Homo sapien
agcagagccaggaaaccgcggtgct

SEQ ID NO: 2748093 - DNA, 25 bp, Homo sapien
tactatgggcttctctgtcagggtg

SEQ ID NO: 2748094 - DNA, 25 bp, Homo sapien
ccaggaggagaatcttctactccga

SEQ ID NO: 2748095 - DNA, 25 bp, Homo sapien
tgacccctggtacatctttgccaga

SEQ ID NO: 2748096 - DNA, 25 bp, Homo sapien
tcttggatagcttcctgcgataaaa

SEQ ID NO: 2748097 - DNA, 25 bp, Homo sapien
aaagctgccacgctgtcatgggcct

SEQ ID NO: 2748098 - DNA, 25 bp, Homo sapien
cagcacctgatgctctcttggatag

SEQ ID NO: 2748099 - DNA, 25 bp, Homo sapien
tgcgataaaacgatctgacatccct

SEQ ID NO: 2748100 - DNA, 25 bp, Homo sapien
tgatctatccacatttagggcctga

SEQ ID NO: 2748101 - DNA, 25 bp, Homo sapien
gaagtatgtcctattcccgtagaat

SEQ ID NO: 2748102 - DNA, 25 bp, Homo sapien
tagagcttccatgacaaagagttca

SEQ ID NO: 2748103 - DNA, 25 bp, Homo sapien
tagggcctgacagattgaatgactg

SEQ ID NO: 2748104 - DNA, 25 bp, Homo sapien
gcacagaagcagttgccgaggctct

SEQ ID NO: 2748105 - DNA, 25 bp, Homo sapien
tctgtgttaagatgggagctacttg

SEQ ID NO: 2748106 - DNA, 25 bp, Homo sapien
gagctacttgagcaccttggattgc

SEQ ID NO: 2748107 - DNA, 25 bp, Homo sapien
gaaatgatctagcaactgtggccag

SEQ ID NO: 2748108 - DNA, 25 bp, Homo sapien
ctgaagaactcttgcccggagcagc

SEQ ID NO: 2748109 - DNA, 25 bp, Homo sapien
agttggtgaaacaaggccatttgcc

SEQ ID NO: 2748110 - DNA, 25 bp, Homo sapien
tgattctggaatagggccgtgcctg

SEQ ID NO: 2748111 - DNA, 25 bp, Homo sapien
tagggtctgatgcaacgtaatgtgc

SEQ ID NO: 2748112 - DNA, 25 bp, Homo sapien
cagaattgagaagcacagtgcttct

SEQ ID NO: 2748113 - DNA, 25 bp, Homo sapien
acagaattgagaagcacagtgcttc

SEQ ID NO: 2748114 - DNA, 25 bp, Homo sapien
ggaatctccaacactaacgtgcatg

SEQ ID NO: 2748115 - DNA, 25 bp, Homo sapien
aaggaatctccaacactaacgtgca

SEQ ID NO: 2748116 - DNA, 25 bp, Homo sapien
aacactaacgtgcatgtgttggtcc

SEQ ID NO: 2748117 - DNA, 25 bp, Homo sapien
tctccaacactaacgtgcatgtgtt

SEQ ID NO: 2748118 - DNA, 25 bp, Homo sapien
ggctgtggctgcttcggggtctgca

SEQ ID NO: 2748119 - DNA, 25 bp, Homo sapien
gctgtggctgcttcggggtctgcag

SEQ ID NO: 2748120 - DNA, 25 bp, Homo sapien
cgtcaaccctgtggcaagctgtggc

SEQ ID NO: 2748121 - DNA, 25 bp, Homo sapien
tagctgatcgcagtccgtgttggtc

SEQ ID NO: 2748122 - DNA, 25 bp, Homo sapien
caccctagtgtctcccagatttgga

SEQ ID NO: 2748123 - DNA, 25 bp, Homo sapien
tctgcacagaggtatacggcaccct

SEQ ID NO: 2748124 - DNA, 25 bp, Homo sapien
cttcctaggtggagtgaaatgaaga

SEQ ID NO: 2748125 - DNA, 25 bp, Homo sapien
gaaatgaagatttgctgtggagaag

SEQ ID NO: 2748126 - DNA, 25 bp, Homo sapien
cctcggtactttctacggagactga

SEQ ID NO: 2748127 - DNA, 25 bp, Homo sapien
tcaccatggatacctgggtcaatca

SEQ ID NO: 2748128 - DNA, 25 bp, Homo sapien
tggcgtttccaacgtggacagatca

SEQ ID NO: 2748129 - DNA, 25 bp, Homo sapien
gcgtttccaacgtggacagatcaaa

SEQ ID NO: 2748130 - DNA, 25 bp, Homo sapien
cccttggcgtttccaacgtggacag

SEQ ID NO: 2748131 - DNA, 25 bp, Homo sapien
cttggcgtttccaacgtggacagat

SEQ ID NO: 2748132 - DNA, 25 bp, Homo sapien
gggcaaccaacacccttctgagctt

SEQ ID NO: 2748133 - DNA, 25 bp, Homo sapien
agggcaaccaacacccttctgagct

SEQ ID NO: 2748134 - DNA, 25 bp, Homo sapien
ggcaaccaacacccttctgagcttc

SEQ ID NO: 2748135 - DNA, 25 bp, Homo sapien
cagggcaaccaacacccttctgagc

SEQ ID NO: 2748136 - DNA, 25 bp, Homo sapien
agtgggaacggccatagttggccac

SEQ ID NO: 2748137 - DNA, 25 bp, Homo sapien
acaggcagtgggaacggccatagtt

SEQ ID NO: 2748138 - DNA, 25 bp, Homo sapien
gaacggccatagttggccacaaggg

SEQ ID NO: 2748139 - DNA, 25 bp, Homo sapien
cacaggcagtgggaacggccatagt

SEQ ID NO: 2748140 - DNA, 25 bp, Homo sapien
ctgctcctcgcattgtgttattgaa

SEQ ID NO: 2748141 - DNA, 25 bp, Homo sapien
ttgtgttattgaaatatgagggctc

SEQ ID NO: 2748142 - DNA, 25 bp, Homo sapien
ggctgctcctcgcattgtgttattg

SEQ ID NO: 2748143 - DNA, 25 bp, Homo sapien
atatgagggctccatttttatcctg

SEQ ID NO: 2748144 - DNA, 25 bp, Homo sapien
ttttccttcatatgtttggtggttg

SEQ ID NO: 2748145 - DNA, 25 bp, Homo sapien
cacttatacctagaactgactgaaa

SEQ ID NO: 2748146 - DNA, 25 bp, Homo sapien
gaaggatgcttctgcattgccaagg

SEQ ID NO: 2748147 - DNA, 25 bp, Homo sapien
gcattgccaaggtaatgtcttcact

SEQ ID NO: 2748148 - DNA, 25 bp, Homo sapien
gactgaaaatgcacagaacgggtga

SEQ ID NO: 2748149 - DNA, 25 bp, Homo sapien
tcgtcttggttctgatgaggccact

SEQ ID NO: 2748150 - DNA, 25 bp, Homo sapien
ttggctctcggtgatcctactgaag

SEQ ID NO: 2748151 - DNA, 25 bp, Homo sapien
cagagtctgtatcacattatggaga

SEQ ID NO: 2748152 - DNA, 25 bp, Homo sapien
gagagtctcccaacagaagtccatt

SEQ ID NO: 2748153 - DNA, 25 bp, Homo sapien
tgcatgtcagcactctctggagtct

SEQ ID NO: 2748154 - DNA, 25 bp, Homo sapien
ggtccctggtagtgatgcatgtcag

SEQ ID NO: 2748155 - DNA, 25 bp, Homo sapien
tgcacaactcaaaagtcactaaata

SEQ ID NO: 2748156 - DNA, 25 bp, Homo sapien
gacttgtccttttcgtgtgtctgtg

SEQ ID NO: 2748157 - DNA, 25 bp, Homo sapien
tactcatgacttgttgccagtggcc

SEQ ID NO: 2748158 - DNA, 25 bp, Homo sapien
tgttcagcgtgtccattgcagagag

SEQ ID NO: 2748159 - DNA, 25 bp, Homo sapien
gacggcagcctgtctggtcaaagac

SEQ ID NO: 2748160 - DNA, 25 bp, Homo sapien
tagaagcctggcgttcacacaatga

SEQ ID NO: 2748161 - DNA, 25 bp, Homo sapien
tgaaagaggacaacaccgtatttca

SEQ ID NO: 2748162 - DNA, 25 bp, Homo sapien
gaggacaacaccgtatttcaggcca

SEQ ID NO: 2748163 - DNA, 25 bp, Homo sapien
agaggacaacaccgtatttcaggcc

SEQ ID NO: 2748164 - DNA, 25 bp, Homo sapien
gggagttggaacacagcttcaccct

SEQ ID NO: 2748165 - DNA, 25 bp, Homo sapien
agtgtcatccacaaatgggagttgg

SEQ ID NO: 2748166 - DNA, 25 bp, Homo sapien
gcatccgtcttacagtgtcatccac

SEQ ID NO: 2748167 - DNA, 25 bp, Homo sapien
actgtccctggttccaagcatccgt

SEQ ID NO: 2748168 - DNA, 25 bp, Homo sapien
gatctgcttcatgctgagagagcgg

SEQ ID NO: 2748169 - DNA, 25 bp, Homo sapien
aaaatgtgttgcagactcggtcagt

SEQ ID NO: 2748170 - DNA, 25 bp, Homo sapien
gatggaccgttctccaccatgtgat

SEQ ID NO: 2748171 - DNA, 25 bp, Homo sapien
gaaagtgcacaacctccttgaaaag

SEQ ID NO: 2748172 - DNA, 25 bp, Homo sapien
tatgtttgccacactctcgcgtgca

SEQ ID NO: 2748173 - DNA, 25 bp, Homo sapien
tactaagggcgtcctacgtgcggtg

SEQ ID NO: 2748174 - DNA, 25 bp, Homo sapien
tactatacgtgttctgtgtgcccca

SEQ ID NO: 2748175 - DNA, 25 bp, Homo sapien
catgcatgcggaattctgacggcac

SEQ ID NO: 2748176 - DNA, 25 bp, Homo sapien
caacttgctgtctccaacaggtaca

SEQ ID NO: 2748177 - DNA, 25 bp, Homo sapien
caggctcctgcgtagataggttgtc

SEQ ID NO: 2748178 - DNA, 25 bp, Homo sapien
cagtaggaacttgaaaacgtgcatc

SEQ ID NO: 2748179 - DNA, 25 bp, Homo sapien
tagaaacagtactagcagatgtagc

SEQ ID NO: 2748180 - DNA, 25 bp, Homo sapien
aaacaacggactccctgatctgcag

SEQ ID NO: 2748181 - DNA, 25 bp, Homo sapien
tcgtgtagaaaatgagaggctgctc

SEQ ID NO: 2748182 - DNA, 25 bp, Homo sapien
gacctcactgatgccgtccgtgaaa

SEQ ID NO: 2748183 - DNA, 25 bp, Homo sapien
tgtgggctccctttcttcgtgtaga

SEQ ID NO: 2748184 - DNA, 25 bp, Homo sapien
tccgcgtcagaggagctcctcttgg

SEQ ID NO: 2748185 - DNA, 25 bp, Homo sapien
ggacggtgggatgcgcttccgcgtc

SEQ ID NO: 2748186 - DNA, 25 bp, Homo sapien
cacatccctggactggacggtggga

SEQ ID NO: 2748187 - DNA, 25 bp, Homo sapien
tgaagggcgggacacatccctggac

SEQ ID NO: 2748188 - DNA, 25 bp, Homo sapien
cccaacaagggatagtgagtttcac

SEQ ID NO: 2748189 - DNA, 25 bp, Homo sapien
taaaacacaatgctctccctagaag

SEQ ID NO: 2748190 - DNA, 25 bp, Homo sapien
gcagcgtgcacttggtatagaaaga

SEQ ID NO: 2748191 - DNA, 25 bp, Homo sapien
tctcccctaccagatgcaagaggca

SEQ ID NO: 2748192 - DNA, 25 bp, Homo sapien
tcattggaacaggaccctgcgacat

SEQ ID NO: 2748193 - DNA, 25 bp, Homo sapien
caaagacgtgttgctgatatgcaaa

SEQ ID NO: 2748194 - DNA, 25 bp, Homo sapien
tctccaaagacgtgttgctgatatg

SEQ ID NO: 2748195 - DNA, 25 bp, Homo sapien
tacaacagatgaatcattggaacag

SEQ ID NO: 2748196 - DNA, 25 bp, Homo sapien
tttgtgtaaattcccctcagtgcag

SEQ ID NO: 2748197 - DNA, 25 bp, Homo sapien
ggagctgcgctttcttcctgcacaa

SEQ ID NO: 2748198 - DNA, 25 bp, Homo sapien
tcaattaaggatggacggaaagacc

SEQ ID NO: 2748199 - DNA, 25 bp, Homo sapien
tctgcaggaaagacgcatacattag

SEQ ID NO: 2748200 - DNA, 25 bp, Homo sapien
cactgagttgtccagagatttccaa

SEQ ID NO: 2748201 - DNA, 25 bp, Homo sapien
tcatgagttgaacaagtggtcaggg

SEQ ID NO: 2748202 - DNA, 25 bp, Homo sapien
cctaaagtataggaggctgccatgc

SEQ ID NO: 2748203 - DNA, 25 bp, Homo sapien
tatgttctctcttctaggctggcag

SEQ ID NO: 2748204 - DNA, 25 bp, Homo sapien
ccagcaagcttgtgaatgaattccc

SEQ ID NO: 2748205 - DNA, 25 bp, Homo sapien
tattatctattccacaccatacaat

SEQ ID NO: 2748206 - DNA, 25 bp, Homo sapien
tatatagtttaagtcctgaaagtaa

SEQ ID NO: 2748207 - DNA, 25 bp, Homo sapien
tattccacaccatacaattgttttc

SEQ ID NO: 2748208 - DNA, 25 bp, Homo sapien
tccactttaacattggccaatcatt

SEQ ID NO: 2748209 - DNA, 25 bp, Homo sapien
ccactttaacattggccaatcattt

SEQ ID NO: 2748210 - DNA, 25 bp, Homo sapien
attccactttaacattggccaatca

SEQ ID NO: 2748211 - DNA, 25 bp, Homo sapien
ttccactttaacattggccaatcat

SEQ ID NO: 2748212 - DNA, 25 bp, Homo sapien
taatgggtgttgtccttgagagagc

SEQ ID NO: 2748213 - DNA, 25 bp, Homo sapien
gagagctttgcccagctccctgaag

SEQ ID NO: 2748214 - DNA, 25 bp, Homo sapien
cagctctgagccacaatgcaagcag

SEQ ID NO: 2748215 - DNA, 25 bp, Homo sapien
ggtccgtgagacatggtgcagccat

SEQ ID NO: 2748216 - DNA, 25 bp, Homo sapien
tgcctgaagctggtcattaagtgtt

SEQ ID NO: 2748217 - DNA, 25 bp, Homo sapien
tcattaagtgttgctaatgatagct

SEQ ID NO: 2748218 - DNA, 25 bp, Homo sapien
gaggtgagagaaccttaggttttgc

SEQ ID NO: 2748219 - DNA, 25 bp, Homo sapien
ttcccaaccagtcactactacaggt

SEQ ID NO: 2748220 - DNA, 25 bp, Homo sapien
aagattttcaggcacgcattcagca

SEQ ID NO: 2748221 - DNA, 25 bp, Homo sapien
gcgttcctggagctcatctataaaa

SEQ ID NO: 2748222 - DNA, 25 bp, Homo sapien
tatacatcaatagttctggaagaca

SEQ ID NO: 2748223 - DNA, 25 bp, Homo sapien
gacatataagtgaatagggttttca

SEQ ID NO: 2748224 - DNA, 25 bp, Homo sapien
gggaaaggtagtgactaacctgctg

SEQ ID NO: 2748225 - DNA, 25 bp, Homo sapien
ttctttgacaagattcagcgtaggg

SEQ ID NO: 2748226 - DNA, 25 bp, Homo sapien
tgactaacctgctgctcccaaaaaa

SEQ ID NO: 2748227 - DNA, 25 bp, Homo sapien
ttttctttgacaagattcagcgtag

SEQ ID NO: 2748228 - DNA, 25 bp, Homo sapien
tttgtcccgacactctgctgtaagc

SEQ ID NO: 2748229 - DNA, 25 bp, Homo sapien
tctgtgtcctcgtgaatccaggaga

SEQ ID NO: 2748230 - DNA, 25 bp, Homo sapien
taagcatctccctaattcctcacag

SEQ ID NO: 2748231 - DNA, 25 bp, Homo sapien
gaagacatttgtcccgacactctgc

SEQ ID NO: 2748232 - DNA, 25 bp, Homo sapien
gagttactcaggactaataaaacag

SEQ ID NO: 2748233 - DNA, 25 bp, Homo sapien
gaacctgtaatagtgagctgtaccc

SEQ ID NO: 2748234 - DNA, 25 bp, Homo sapien
tgctgccttaagacagatgaccttt

SEQ ID NO: 2748235 - DNA, 25 bp, Homo sapien
tctaaggtcaagagtaagaacctgt

SEQ ID NO: 2748236 - DNA, 25 bp, Homo sapien
ctatcgagattatgattgattggcg

SEQ ID NO: 2748237 - DNA, 25 bp, Homo sapien
tgtgactctgggtccaataactgca

SEQ ID NO: 2748238 - DNA, 25 bp, Homo sapien
tgttgctcgtgtgtggacttcatga

SEQ ID NO: 2748239 - DNA, 25 bp, Homo sapien
gattggcgtaagatgagacagctga

SEQ ID NO: 2748240 - DNA, 25 bp, Homo sapien
tatgttgaatctcacccaaagccag

SEQ ID NO: 2748241 - DNA, 25 bp, Homo sapien
gacccacggtaagtactgcttcgct

SEQ ID NO: 2748242 - DNA, 25 bp, Homo sapien
aatgagggcctcatgactctgcctg

SEQ ID NO: 2748243 - DNA, 25 bp, Homo sapien
gagtttctcgcagagcttcaagctg

SEQ ID NO: 2748244 - DNA, 25 bp, Homo sapien
tgaaatggcttccagtcaccagagc

SEQ ID NO: 2748245 - DNA, 25 bp, Homo sapien
caataaatggtagagggtaagcgcc

SEQ ID NO: 2748246 - DNA, 25 bp, Homo sapien
tggagtctctcacactaaaggcaac

SEQ ID NO: 2748247 - DNA, 25 bp, Homo sapien
ccagcaagtaggtgcagatcccaga

SEQ ID NO: 2748248 - DNA, 25 bp, Homo sapien
tattttcccaatacagcttgccaca

SEQ ID NO: 2748249 - DNA, 25 bp, Homo sapien
tgctataacgatgaacctatcaggt

SEQ ID NO: 2748250 - DNA, 25 bp, Homo sapien
agaatgctagccctgaagactgttc

SEQ ID NO: 2748251 - DNA, 25 bp, Homo sapien
taccccaggtaagaatgtgtgcttt

SEQ ID NO: 2748252 - DNA, 25 bp, Homo sapien
gaaagcctgtcctgcaccagcatta

SEQ ID NO: 2748253 - DNA, 25 bp, Homo sapien
tggcagtagttttgatggtcatgaa

SEQ ID NO: 2748254 - DNA, 25 bp, Homo sapien
gtggtggcagtagttttgatggtca

SEQ ID NO: 2748255 - DNA, 25 bp, Homo sapien
tgtcctgcaccagcattaaccacaa

SEQ ID NO: 2748256 - DNA, 25 bp, Homo sapien
cactgtccggtggtgaggtgcattc

SEQ ID NO: 2748257 - DNA, 25 bp, Homo sapien
tggttagacgcagtcctgtgaatat

SEQ ID NO: 2748258 - DNA, 25 bp, Homo sapien
gagttttcattgtctccactaacag

SEQ ID NO: 2748259 - DNA, 25 bp, Homo sapien
gggacagatgcatactggttagacg

SEQ ID NO: 2748260 - DNA, 25 bp, Homo sapien
ggcataactatcttgcatctttgca

SEQ ID NO: 2748261 - DNA, 25 bp, Homo sapien
ggcagagtactctggcgctatctgt

SEQ ID NO: 2748262 - DNA, 25 bp, Homo sapien
ccagaaggttctgaattacatattt

SEQ ID NO: 2748263 - DNA, 25 bp, Homo sapien
tattttctttacatacctcaaggca

SEQ ID NO: 2748264 - DNA, 25 bp, Homo sapien
ctccagctgaggctgagcgagcacg

SEQ ID NO: 2748265 - DNA, 25 bp, Homo sapien
tagggccccttgtctcggcctgtgt

SEQ ID NO: 2748266 - DNA, 25 bp, Homo sapien
aggctggcctcaggtctgtgacaat

SEQ ID NO: 2748267 - DNA, 25 bp, Homo sapien
gcgagcacgcctttgtttagggccc

SEQ ID NO: 2748268 - DNA, 25 bp, Homo sapien
tatcaacgaaccgagaatctcctga

SEQ ID NO: 2748269 - DNA, 25 bp, Homo sapien
taactattcctctgtttggtacaga

SEQ ID NO: 2748270 - DNA, 25 bp, Homo sapien
aaaataaagttgatatcccttgtag

SEQ ID NO: 2748271 - DNA, 25 bp, Homo sapien
taccactgtattcagggtcataact

SEQ ID NO: 2748272 - DNA, 25 bp, Homo sapien
tctttggcaatacccctaggtggca

SEQ ID NO: 2748273 - DNA, 25 bp, Homo sapien
gatgtgtcagtttcctaggtcaggc

SEQ ID NO: 2748274 - DNA, 25 bp, Homo sapien
caatcacggcgtagaggcagctaaa

SEQ ID NO: 2748275 - DNA, 25 bp, Homo sapien
gaatgcctggagagctgaatgacct

SEQ ID NO: 2748276 - DNA, 25 bp, Homo sapien
tgctagcaatggagttgactggacc

SEQ ID NO: 2748277 - DNA, 25 bp, Homo sapien
cactgctagcaatggagttgactgg

SEQ ID NO: 2748278 - DNA, 25 bp, Homo sapien
tcctctcactgctagcaatggagtt

SEQ ID NO: 2748279 - DNA, 25 bp, Homo sapien
tctcactgctagcaatggagttgac

SEQ ID NO: 2748280 - DNA, 25 bp, Homo sapien
caggttcttccccaggcagttgtgc

SEQ ID NO: 2748281 - DNA, 25 bp, Homo sapien
gccttgctccccagtcatgctgtgg

SEQ ID NO: 2748282 - DNA, 25 bp, Homo sapien
cagttgtgcccaagcagtgcagggt

SEQ ID NO: 2748283 - DNA, 25 bp, Homo sapien
gctgattccccagacgtccttgcag

SEQ ID NO: 2748284 - DNA, 25 bp, Homo sapien
gctatgtaataataagtagtttttg

SEQ ID NO: 2748285 - DNA, 25 bp, Homo sapien
acaaattgcctttgtccatacaaga

SEQ ID NO: 2748286 - DNA, 25 bp, Homo sapien
gcctttgtccatacaagaaatgaat

SEQ ID NO: 2748287 - DNA, 25 bp, Homo sapien
gaaatgaattctcaagatatatctt

SEQ ID NO: 2748288 - DNA, 25 bp, Homo sapien
tgaagcacaagtaggcaagggcagc

SEQ ID NO: 2748289 - DNA, 25 bp, Homo sapien
caagggcagcgtgtgaatatttact

SEQ ID NO: 2748290 - DNA, 25 bp, Homo sapien
ggagtgacgcatacaaagaaaacca

SEQ ID NO: 2748291 - DNA, 25 bp, Homo sapien
gcaattggacaggagtgacgcatac

SEQ ID NO: 2748292 - DNA, 25 bp, Homo sapien
caagacttggccagtctgctgctcc

SEQ ID NO: 2748293 - DNA, 25 bp, Homo sapien
ttctccaaaactctcaagacttggc

SEQ ID NO: 2748294 - DNA, 25 bp, Homo sapien
ctccatgagggcgtttgctatcaca

SEQ ID NO: 2748295 - DNA, 25 bp, Homo sapien
tgctatcacaacacgagaatcctct

SEQ ID NO: 2748296 - DNA, 25 bp, Homo sapien
cgttcagccacgttgccgtgcagct

SEQ ID NO: 2748297 - DNA, 25 bp, Homo sapien
catatagtgggcgttcagccacgtt

SEQ ID NO: 2748298 - DNA, 25 bp, Homo sapien
tgatgacagcaggtgagtcatatag

SEQ ID NO: 2748299 - DNA, 25 bp, Homo sapien
cacgttgccgtgcagctcagaagga

SEQ ID NO: 2748300 - DNA, 25 bp, Homo sapien
ccagaattaacatcttcagctgtgt

SEQ ID NO: 2748301 - DNA, 25 bp, Homo sapien
agatttcatacttgcagttaataac

SEQ ID NO: 2748302 - DNA, 25 bp, Homo sapien
gtgttctgaatctcacgtcctttca

SEQ ID NO: 2748303 - DNA, 25 bp, Homo sapien
tttcatcacctccaagatttcatac

SEQ ID NO: 2748304 - DNA, 25 bp, Homo sapien
tgttaggtccaaaaccaagacctgc

SEQ ID NO: 2748305 - DNA, 25 bp, Homo sapien
gttttcatggcaacaaagtctacag

SEQ ID NO: 2748306 - DNA, 25 bp, Homo sapien
tgtcaacactgaaggacgactttct

SEQ ID NO: 2748307 - DNA, 25 bp, Homo sapien
actttctgagaaggtcacagcctca

SEQ ID NO: 2748308 - DNA, 25 bp, Homo sapien
cctgtgttttcttgccgtactatct

SEQ ID NO: 2748309 - DNA, 25 bp, Homo sapien
ccgtactatctttggcagtggttgc

SEQ ID NO: 2748310 - DNA, 25 bp, Homo sapien
gccctgtgttttcttgccgtactat

SEQ ID NO: 2748311 - DNA, 25 bp, Homo sapien
tttcttgccgtactatctttggcag

SEQ ID NO: 2748312 - DNA, 25 bp, Homo sapien
acatgttctctggaggtggtgccat

SEQ ID NO: 2748313 - DNA, 25 bp, Homo sapien
taccagatgatacagcagggagccg

SEQ ID NO: 2748314 - DNA, 25 bp, Homo sapien
ttctaaactgcaggcaaatgtggcc

SEQ ID NO: 2748315 - DNA, 25 bp, Homo sapien
tgtgtcctgtcttccagcgtggagg

SEQ ID NO: 2748316 - DNA, 25 bp, Homo sapien
taatggaacaagaaggtacctcgct

SEQ ID NO: 2748317 - DNA, 25 bp, Homo sapien
gagatgacgtactcagtcacttcat

SEQ ID NO: 2748318 - DNA, 25 bp, Homo sapien
gctgcctcccaataaccatgcttga

SEQ ID NO: 2748319 - DNA, 25 bp, Homo sapien
tactgtgtaggtgccgatgcctgct

SEQ ID NO: 2748320 - DNA, 25 bp, Homo sapien
ttgaatgtcctctgctaagaaaccc

SEQ ID NO: 2748321 - DNA, 25 bp, Homo sapien
aggtatcgaatatgtggctgccaca

SEQ ID NO: 2748322 - DNA, 25 bp, Homo sapien
cagactttgctatggttctgtagcc

SEQ ID NO: 2748323 - DNA, 25 bp, Homo sapien
tatggttctgtagccagagtctgaa

SEQ ID NO: 2748324 - DNA, 25 bp, Homo sapien
aattataaccttccaggtatcgaat

SEQ ID NO: 2748325 - DNA, 25 bp, Homo sapien
aggaacatccctgcattcgcatgtg

SEQ ID NO: 2748326 - DNA, 25 bp, Homo sapien
cagaagaatgatcactgtagggaca

SEQ ID NO: 2748327 - DNA, 25 bp, Homo sapien
ggcgccacgggcatgttcataactg

SEQ ID NO: 2748328 - DNA, 25 bp, Homo sapien
gcatgtgccttatgccgaattcgta

SEQ ID NO: 2748329 - DNA, 25 bp, Homo sapien
tgctccaggctcaacttgcgagttt

SEQ ID NO: 2748330 - DNA, 25 bp, Homo sapien
gaatttctggcaaatggtgctccag

SEQ ID NO: 2748331 - DNA, 25 bp, Homo sapien
tggaaccagtcatttctccaggagc

SEQ ID NO: 2748332 - DNA, 25 bp, Homo sapien
tcttgctagtgggttgggtttgctt

SEQ ID NO: 2748333 - DNA, 25 bp, Homo sapien
gtggccgcctttgagggctcttttg

SEQ ID NO: 2748334 - DNA, 25 bp, Homo sapien
agcaggggtggccgcctttgagggc

SEQ ID NO: 2748335 - DNA, 25 bp, Homo sapien
tggccgcctttgagggctcttttgg

SEQ ID NO: 2748336 - DNA, 25 bp, Homo sapien
aggggtggccgcctttgagggctct

SEQ ID NO: 2748337 - DNA, 25 bp, Homo sapien
tctccagtgtgtgtatggtcccaag

SEQ ID NO: 2748338 - DNA, 25 bp, Homo sapien
gtttccaagagaccaaatctgcatg

SEQ ID NO: 2748339 - DNA, 25 bp, Homo sapien
tttcatggtgactgtagacagaccc

SEQ ID NO: 2748340 - DNA, 25 bp, Homo sapien
agacccttggtctgtgatcttggga

SEQ ID NO: 2748341 - DNA, 25 bp, Homo sapien
gctcggtgcaccttgtctgcttgca

SEQ ID NO: 2748342 - DNA, 25 bp, Homo sapien
ctgcttgcaggtgctgatgttcttc

SEQ ID NO: 2748343 - DNA, 25 bp, Homo sapien
ttcatgacctgcagattccccatgc

SEQ ID NO: 2748344 - DNA, 25 bp, Homo sapien
ctggattttcattccccaggtgtct

SEQ ID NO: 2748345 - DNA, 25 bp, Homo sapien
taattggagtgtccttctagcctgg

SEQ ID NO: 2748346 - DNA, 25 bp, Homo sapien
tgtccttgaactcttacggaagatg

SEQ ID NO: 2748347 - DNA, 25 bp, Homo sapien
caatacattgtaaggtgaagaggtc

SEQ ID NO: 2748348 - DNA, 25 bp, Homo sapien
acactccatcacaggtcagctgaga

SEQ ID NO: 2748349 - DNA, 25 bp, Homo sapien
ttggtccaagacttgtcaacttcag

SEQ ID NO: 2748350 - DNA, 25 bp, Homo sapien
tcagcatgcgtcagggtaatggcaa

SEQ ID NO: 2748351 - DNA, 25 bp, Homo sapien
ggtaatggcaatcactcgctgaatg

SEQ ID NO: 2748352 - DNA, 25 bp, Homo sapien
cttgtcaacttcagcatgcgtcagg

SEQ ID NO: 2748353 - DNA, 25 bp, Homo sapien
cttttcagtctcaattttcctattt

SEQ ID NO: 2748354 - DNA, 25 bp, Homo sapien
tgtttttaattcactttcacttcca

SEQ ID NO: 2748355 - DNA, 25 bp, Homo sapien
ttcagtctcaattttcctatttgtt

SEQ ID NO: 2748356 - DNA, 25 bp, Homo sapien
tcacttccataatgttttttcttcc

SEQ ID NO: 2748357 - DNA, 25 bp, Homo sapien
aattcttccattttagagatttctg

SEQ ID NO: 2748358 - DNA, 25 bp, Homo sapien
tcctatattgtctctggctccagac

SEQ ID NO: 2748359 - DNA, 25 bp, Homo sapien
aatcaaacttcatcctatattgtct

SEQ ID NO: 2748360 - DNA, 25 bp, Homo sapien
tcatcctatattgtctctggctcca

SEQ ID NO: 2748361 - DNA, 25 bp, Homo sapien
catgaggatctatgaaacgagaatc

SEQ ID NO: 2748362 - DNA, 25 bp, Homo sapien
cacatggtctttgctccgacatctc

SEQ ID NO: 2748363 - DNA, 25 bp, Homo sapien
gggctaccttgatctagagccctgg

SEQ ID NO: 2748364 - DNA, 25 bp, Homo sapien
gaatgcatttcaccacatgaggatc

SEQ ID NO: 2748365 - DNA, 25 bp, Homo sapien
agcggtgttcagcacgcaattaagg

SEQ ID NO: 2748366 - DNA, 25 bp, Homo sapien
cagccagtgctgagcggtgttcagc

SEQ ID NO: 2748367 - DNA, 25 bp, Homo sapien
tcagcacgcaattaaggcagcccat

SEQ ID NO: 2748368 - DNA, 25 bp, Homo sapien
aataagtttgatcagccagtgctga

SEQ ID NO: 2748369 - DNA, 25 bp, Homo sapien
ttccttatcaccctcattgaagtgt

SEQ ID NO: 2748370 - DNA, 25 bp, Homo sapien
caggcaccatccttggatcaagctt

SEQ ID NO: 2748371 - DNA, 25 bp, Homo sapien
ggtcaggcaccatccttggatcaag

SEQ ID NO: 2748372 - DNA, 25 bp, Homo sapien
attgaagtgttcctttcctgagagt

SEQ ID NO: 2748373 - DNA, 25 bp, Homo sapien
tccatagggaaggtccagctttttc

SEQ ID NO: 2748374 - DNA, 25 bp, Homo sapien
cacttttccccatgtccatagggaa

SEQ ID NO: 2748375 - DNA, 25 bp, Homo sapien
tgacttccagatagccacttttccc

SEQ ID NO: 2748376 - DNA, 25 bp, Homo sapien
tttcccttgacttccagatagccac

SEQ ID NO: 2748377 - DNA, 25 bp, Homo sapien
tatcttagagtctttgatccttact

SEQ ID NO: 2748378 - DNA, 25 bp, Homo sapien
aattaatttagtgctttcagttatc

SEQ ID NO: 2748379 - DNA, 25 bp, Homo sapien
ttcagttatcttagagtctttgatc

SEQ ID NO: 2748380 - DNA, 25 bp, Homo sapien
tttgatccttacttaaatactgtga

SEQ ID NO: 2748381 - DNA, 25 bp, Homo sapien
aagacagtgagatcgagcagacagg

SEQ ID NO: 2748382 - DNA, 25 bp, Homo sapien
cttcagcactaagacacagagttac

SEQ ID NO: 2748383 - DNA, 25 bp, Homo sapien
gacaaggtcaggcagaacatttgct

SEQ ID NO: 2748384 - DNA, 25 bp, Homo sapien
cacattttgccacccatgggctgga

SEQ ID NO: 2748385 - DNA, 25 bp, Homo sapien
tgttgagaaccaatggagatgttga

SEQ ID NO: 2748386 - DNA, 25 bp, Homo sapien
ccaatggagatgttgaagtaggttt

SEQ ID NO: 2748387 - DNA, 25 bp, Homo sapien
gagaaccaatggagatgttgaagta

SEQ ID NO: 2748388 - DNA, 25 bp, Homo sapien
ctctatgttgagaaccaatggagat

SEQ ID NO: 2748389 - DNA, 25 bp, Homo sapien
ttcaccagcagtgggtattttcacc

SEQ ID NO: 2748390 - DNA, 25 bp, Homo sapien
cacaccctctgtagcgaaatggttg

SEQ ID NO: 2748391 - DNA, 25 bp, Homo sapien
gcagatgtgtcctagtatttcagag

SEQ ID NO: 2748392 - DNA, 25 bp, Homo sapien
catttccaaaagcagtgtaggagtg

SEQ ID NO: 2748393 - DNA, 25 bp, Homo sapien
ttgactttacactcagctttactcc

SEQ ID NO: 2748394 - DNA, 25 bp, Homo sapien
tctgcgccatcacgtggtggaaaaa

SEQ ID NO: 2748395 - DNA, 25 bp, Homo sapien
ttctgtctgcgccatcacgtggtgg

SEQ ID NO: 2748396 - DNA, 25 bp, Homo sapien
caagtctaagatccacgcaggggca

SEQ ID NO: 2748397 - DNA, 25 bp, Homo sapien
ctcttaaataagagaacgaatttca

SEQ ID NO: 2748398 - DNA, 25 bp, Homo sapien
gggataagggaaacagcgcttctgc

SEQ ID NO: 2748399 - DNA, 25 bp, Homo sapien
tccccatcgccctgttcttgcgaca

SEQ ID NO: 2748400 - DNA, 25 bp, Homo sapien
gcgcttctgcagacaaacatccaac

SEQ ID NO: 2748401 - DNA, 25 bp, Homo sapien
ttgcaggtccccatcgccctgttct

SEQ ID NO: 2748402 - DNA, 25 bp, Homo sapien
caagtgaagtgtccacgtgaggtgt

SEQ ID NO: 2748403 - DNA, 25 bp, Homo sapien
gggtccatccccaagtgaagtgtcc

SEQ ID NO: 2748404 - DNA, 25 bp, Homo sapien
catggctggtcctgccatcggcgtg

SEQ ID NO: 2748405 - DNA, 25 bp, Homo sapien
gaggtatgaagccagtcgttcccac

SEQ ID NO: 2748406 - DNA, 25 bp, Homo sapien
cacacaggccactggcatgatgaca

SEQ ID NO: 2748407 - DNA, 25 bp, Homo sapien
acaggccactggcatgatgacaact

SEQ ID NO: 2748408 - DNA, 25 bp, Homo sapien
ggccactggcatgatgacaactgca

SEQ ID NO: 2748409 - DNA, 25 bp, Homo sapien
caccacacaggccactggcatgatg

SEQ ID NO: 2748410 - DNA, 25 bp, Homo sapien
gcagtctccatgaacctggtccaca

SEQ ID NO: 2748411 - DNA, 25 bp, Homo sapien
accctgggttgccacaggctgcaac

SEQ ID NO: 2748412 - DNA, 25 bp, Homo sapien
cagccggagttggttcacggcagct

SEQ ID NO: 2748413 - DNA, 25 bp, Homo sapien
ctccatgcctacgagccagcagttg

SEQ ID NO: 2748414 - DNA, 25 bp, Homo sapien
gtaggaacgtattatgtaacatgca

SEQ ID NO: 2748415 - DNA, 25 bp, Homo sapien
tgctggtgctgatttagtaggaacg

SEQ ID NO: 2748416 - DNA, 25 bp, Homo sapien
ttgtttatcggctcttggcaaagca

SEQ ID NO: 2748417 - DNA, 25 bp, Homo sapien
agcaggaaccgtcccacatcaacag

SEQ ID NO: 2748418 - DNA, 25 bp, Homo sapien
gaagccctgccagtgcagagcacgt

SEQ ID NO: 2748419 - DNA, 25 bp, Homo sapien
cttagaatcagtaagaagccctgcc

SEQ ID NO: 2748420 - DNA, 25 bp, Homo sapien
ttccttagaatcagtaagaagccct

SEQ ID NO: 2748421 - DNA, 25 bp, Homo sapien
agccctgccagtgcagagcacgtgc

SEQ ID NO: 2748422 - DNA, 25 bp, Homo sapien
catcaaggtctcccacagctctgag

SEQ ID NO: 2748423 - DNA, 25 bp, Homo sapien
tctgtcaacctcatcgctttgtcca

SEQ ID NO: 2748424 - DNA, 25 bp, Homo sapien
tgtcaacctcatcgctttgtccaaa

SEQ ID NO: 2748425 - DNA, 25 bp, Homo sapien
caacctcatcgctttgtccaaatac

SEQ ID NO: 2748426 - DNA, 25 bp, Homo sapien
tcccgtttaattccatagcatcagg

SEQ ID NO: 2748427 - DNA, 25 bp, Homo sapien
actccagctcccgtttaattccata

SEQ ID NO: 2748428 - DNA, 25 bp, Homo sapien
aattcttgtccttcccgaactcact

SEQ ID NO: 2748429 - DNA, 25 bp, Homo sapien
cctaccgggtaacgatcatgctggc

SEQ ID NO: 2748430 - DNA, 25 bp, Homo sapien
tggactcttcggagggctctttgaa

SEQ ID NO: 2748431 - DNA, 25 bp, Homo sapien
cccatgggaatgctctgacctccgg

SEQ ID NO: 2748432 - DNA, 25 bp, Homo sapien
taagttctatgagcagtggcggcag

SEQ ID NO: 2748433 - DNA, 25 bp, Homo sapien
ggcaggtgcgtctccggagattccc

SEQ ID NO: 2748434 - DNA, 25 bp, Homo sapien
tccaaggtccaagattcctgcattt

SEQ ID NO: 2748435 - DNA, 25 bp, Homo sapien
gtcagaattcccagccgttgtccaa

SEQ ID NO: 2748436 - DNA, 25 bp, Homo sapien
caaggtccaagattcctgcattttc

SEQ ID NO: 2748437 - DNA, 25 bp, Homo sapien
tctggaaacagttttataaggagtc

SEQ ID NO: 2748438 - DNA, 25 bp, Homo sapien
agcagttattctgaatgcttcttcc

SEQ ID NO: 2748439 - DNA, 25 bp, Homo sapien
ctccagcagcagttattctgaatgc

SEQ ID NO: 2748440 - DNA, 25 bp, Homo sapien
tgcttcttccttgcagagtcctctc

SEQ ID NO: 2748441 - DNA, 25 bp, Homo sapien
gaaatgaaattgttctctccagcag

SEQ ID NO: 2748442 - DNA, 25 bp, Homo sapien
agtcctccccagcagtagatactca

SEQ ID NO: 2748443 - DNA, 25 bp, Homo sapien
ccagcgctgagtactcatgagtcca

SEQ ID NO: 2748444 - DNA, 25 bp, Homo sapien
cccagcagtagatactcatgagtct

SEQ ID NO: 2748445 - DNA, 25 bp, Homo sapien
tccagcactgggtactcacaagtcc

SEQ ID NO: 2748446 - DNA, 25 bp, Homo sapien
ggatttccataaccagccctcaggc

SEQ ID NO: 2748447 - DNA, 25 bp, Homo sapien
gccgggcagcccaagcatagcctct

SEQ ID NO: 2748448 - DNA, 25 bp, Homo sapien
tccttctgtacctttaccaggagca

SEQ ID NO: 2748449 - DNA, 25 bp, Homo sapien
gacatggagtctggtgtttctccag

SEQ ID NO: 2748450 - DNA, 25 bp, Homo sapien
ctgagagtacgggtgcaggtctcct

SEQ ID NO: 2748451 - DNA, 25 bp, Homo sapien
gcaaggaccacagagactgcgaatg

SEQ ID NO: 2748452 - DNA, 25 bp, Homo sapien
ccagtgcatgtccaacgctggaagg

SEQ ID NO: 2748453 - DNA, 25 bp, Homo sapien
cctatcatgccagaactgcagcaag

SEQ ID NO: 2748454 - DNA, 25 bp, Homo sapien
gatcaaactctcattggcaccttcc

SEQ ID NO: 2748455 - DNA, 25 bp, Homo sapien
gcaagtgattccaggatcaaactct

SEQ ID NO: 2748456 - DNA, 25 bp, Homo sapien
atctgactggtgacgagcaagtgat

SEQ ID NO: 2748457 - DNA, 25 bp, Homo sapien
gactggtgacgagcaagtgattcca

SEQ ID NO: 2748458 - DNA, 25 bp, Homo sapien
tgcaccgtatctccacaataatgag

SEQ ID NO: 2748459 - DNA, 25 bp, Homo sapien
tattctaagtagatgcacaactccc

SEQ ID NO: 2748460 - DNA, 25 bp, Homo sapien
aagacttgttgccatgtgacggaga

SEQ ID NO: 2748461 - DNA, 25 bp, Homo sapien
gtagtccttagaaccagcatttgag

SEQ ID NO: 2748462 - DNA, 25 bp, Homo sapien
agaaatttattccaggagccatcca

SEQ ID NO: 2748463 - DNA, 25 bp, Homo sapien
ctcagtggtagaaatttattccagg

SEQ ID NO: 2748464 - DNA, 25 bp, Homo sapien
tgcctcaccagcaaggttcctcagt

SEQ ID NO: 2748465 - DNA, 25 bp, Homo sapien
caccagcaaggttcctcagtggtag

SEQ ID NO: 2748466 - DNA, 25 bp, Homo sapien
cagggataaactccagctcaaagtc

SEQ ID NO: 2748467 - DNA, 25 bp, Homo sapien
caatcttcagatcagggataaactc

SEQ ID NO: 2748468 - DNA, 25 bp, Homo sapien
tcactcctcttgatgaacaactctt

SEQ ID NO: 2748469 - DNA, 25 bp, Homo sapien
cctcttgatgaacaactcttgaagc

SEQ ID NO: 2748470 - DNA, 25 bp, Homo sapien
ttgaggaaaagctattggctgatca

SEQ ID NO: 2748471 - DNA, 25 bp, Homo sapien
tggctgatcaagaagctgcaattca

SEQ ID NO: 2748472 - DNA, 25 bp, Homo sapien
aaaagctattggctgatcaagaagc

SEQ ID NO: 2748473 - DNA, 25 bp, Homo sapien
gatcaagaagctgcaattcacaaag

SEQ ID NO: 2748474 - DNA, 25 bp, Homo sapien
atcagctttgatttacttaagtgaa

SEQ ID NO: 2748475 - DNA, 25 bp, Homo sapien
aatcagctttgatttacttaagtga

SEQ ID NO: 2748476 - DNA, 25 bp, Homo sapien
cagctttgatttacttaagtgaata

SEQ ID NO: 2748477 - DNA, 25 bp, Homo sapien
tcagctttgatttacttaagtgaat

SEQ ID NO: 2748478 - DNA, 25 bp, Homo sapien
ggagcttgcatatccacagagactt

SEQ ID NO: 2748479 - DNA, 25 bp, Homo sapien
cccttgggtggacagtgaatatgct

SEQ ID NO: 2748480 - DNA, 25 bp, Homo sapien
tcacagtcactgagagcaggcccat

SEQ ID NO: 2748481 - DNA, 25 bp, Homo sapien
taagtagaaaatcgtccagcctctg

SEQ ID NO: 2748482 - DNA, 25 bp, Homo sapien
tcacgcagaagtttcctacggtcat

SEQ ID NO: 2748483 - DNA, 25 bp, Homo sapien
ctgtattcagactcacgcagaagtt

SEQ ID NO: 2748484 - DNA, 25 bp, Homo sapien
cagactcacgcagaagtttcctacg

SEQ ID NO: 2748485 - DNA, 25 bp, Homo sapien
ctctcccatgcctgtattcagactc

SEQ ID NO: 2748486 - DNA, 25 bp, Homo sapien
tgtcagtgccatagtcaaattttca

SEQ ID NO: 2748487 - DNA, 25 bp, Homo sapien
gggcttgtcagtgccatagtcaaat

SEQ ID NO: 2748488 - DNA, 25 bp, Homo sapien
ttgtcagtgccatagtcaaattttc

SEQ ID NO: 2748489 - DNA, 25 bp, Homo sapien
gcttgtcagtgccatagtcaaattt

SEQ ID NO: 2748490 - DNA, 25 bp, Homo sapien
taggctgtcccattattctggactg

SEQ ID NO: 2748491 - DNA, 25 bp, Homo sapien
agatgtatcttcgtaggctgtccca

SEQ ID NO: 2748492 - DNA, 25 bp, Homo sapien
ctggactggacgcttctgatggtgt

SEQ ID NO: 2748493 - DNA, 25 bp, Homo sapien
tgagctggcccagcagatgtatctt

SEQ ID NO: 2748494 - DNA, 25 bp, Homo sapien
cagctattaggtgagtttgggatca

SEQ ID NO: 2748495 - DNA, 25 bp, Homo sapien
tgttgagtccaacaccagctacttc

SEQ ID NO: 2748496 - DNA, 25 bp, Homo sapien
taggacgaaagttccgcttcatagg

SEQ ID NO: 2748497 - DNA, 25 bp, Homo sapien
gaattcggtccatgggacttcccac

SEQ ID NO: 2748498 - DNA, 25 bp, Homo sapien
atgcctttgaaatcccctctttagt

SEQ ID NO: 2748499 - DNA, 25 bp, Homo sapien
cctaagtagcggctctgtagactca

SEQ ID NO: 2748500 - DNA, 25 bp, Homo sapien
tccttggagacagcgacatctgcga

SEQ ID NO: 2748501 - DNA, 25 bp, Homo sapien
taactggagtcacgagaaggaattt

SEQ ID NO: 2748502 - DNA, 25 bp, Homo sapien
tctgcgaagcttccaagccacggtg

SEQ ID NO: 2748503 - DNA, 25 bp, Homo sapien
gaacttgtttgatcacagatatctt

SEQ ID NO: 2748504 - DNA, 25 bp, Homo sapien
caagaaacaactgttagcatgccgt

SEQ ID NO: 2748505 - DNA, 25 bp, Homo sapien
gatatcttcgatcaagaaacaactg

SEQ ID NO: 2748506 - DNA, 25 bp, Homo sapien
aacaactgttagcatgccgtttggg

SEQ ID NO: 2748507 - DNA, 25 bp, Homo sapien
ctagctgtcaatagccagcgtgtcc

SEQ ID NO: 2748508 - DNA, 25 bp, Homo sapien
tcttagtgaggcagcgggaacctcc

SEQ ID NO: 2748509 - DNA, 25 bp, Homo sapien
tgtctcaatatgaggcccacggtcc

SEQ ID NO: 2748510 - DNA, 25 bp, Homo sapien
tctgcaatggtggaattgccccggg

SEQ ID NO: 2748511 - DNA, 25 bp, Homo sapien
ccaggtttaccaggcaggactaagc

SEQ ID NO: 2748512 - DNA, 25 bp, Homo sapien
atggagttgtagagtgtcctccatt

SEQ ID NO: 2748513 - DNA, 25 bp, Homo sapien
aggatggagttgtagagtgtcctcc

SEQ ID NO: 2748514 - DNA, 25 bp, Homo sapien
gaccctcgtggaggcgcccccaagc

SEQ ID NO: 2748515 - DNA, 25 bp, Homo sapien
ggatggagttgtagagtgtcctcca

SEQ ID NO: 2748516 - DNA, 25 bp, Homo sapien
tggaaggcatcacacaggaaacacc

SEQ ID NO: 2748517 - DNA, 25 bp, Homo sapien
tgcccgtggtgcagatactcctgga

SEQ ID NO: 2748518 - DNA, 25 bp, Homo sapien
cactgacgaaggtaacatgggagca

SEQ ID NO: 2748519 - DNA, 25 bp, Homo sapien
cattccctagatccagtctgcatct

SEQ ID NO: 2748520 - DNA, 25 bp, Homo sapien
ccagtagaacgtggcagaagcagtc

SEQ ID NO: 2748521 - DNA, 25 bp, Homo sapien
tatgccgcctttgtacccattggaa

SEQ ID NO: 2748522 - DNA, 25 bp, Homo sapien
cgcaagagatgctatggaataccaa

SEQ ID NO: 2748523 - DNA, 25 bp, Homo sapien
cagtcatgtgggtacagcaggccca

SEQ ID NO: 2748524 - DNA, 25 bp, Homo sapien
tttccacatgagaaagggccctggc

SEQ ID NO: 2748525 - DNA, 25 bp, Homo sapien
aatgctaccttctttgaaacctgac

SEQ ID NO: 2748526 - DNA, 25 bp, Homo sapien
tgttgatgcacaatacaatgctacc

SEQ ID NO: 2748527 - DNA, 25 bp, Homo sapien
tttacatacaaggtaatgtgcccac

SEQ ID NO: 2748528 - DNA, 25 bp, Homo sapien
ctctgaacacctggcaccacagttg

SEQ ID NO: 2748529 - DNA, 25 bp, Homo sapien
agccagggcttcgtgcctaagtgtg

SEQ ID NO: 2748530 - DNA, 25 bp, Homo sapien
cctggcaccacagttgttgtcacaa

SEQ ID NO: 2748531 - DNA, 25 bp, Homo sapien
gttgtcacaacgtatcgtctccatg

SEQ ID NO: 2748532 - DNA, 25 bp, Homo sapien
tcttgtgctgttcctcactcacagc

SEQ ID NO: 2748533 - DNA, 25 bp, Homo sapien
ggaggtttggtagaagcttctgtct

SEQ ID NO: 2748534 - DNA, 25 bp, Homo sapien
ttggtagaagcttctgtctggccat

SEQ ID NO: 2748535 - DNA, 25 bp, Homo sapien
ttgtgtggatggttgtccaatctgg

SEQ ID NO: 2748536 - DNA, 25 bp, Homo sapien
ggtttgccccattgtagcgaattca

SEQ ID NO: 2748537 - DNA, 25 bp, Homo sapien
cggatgtctaacaagatcagggccc

SEQ ID NO: 2748538 - DNA, 25 bp, Homo sapien
gcgaattcacactgtcttggcaaca

SEQ ID NO: 2748539 - DNA, 25 bp, Homo sapien
aagagcttgtgtcttttcgcgtgaa

SEQ ID NO: 2748540 - DNA, 25 bp, Homo sapien
aattgtgccccagtttgcccttaag

SEQ ID NO: 2748541 - DNA, 25 bp, Homo sapien
taaggaagtccgtaagattttctgc

SEQ ID NO: 2748542 - DNA, 25 bp, Homo sapien
taacagaattatccagtggctcaaa

SEQ ID NO: 2748543 - DNA, 25 bp, Homo sapien
gaagtgacaaactaatccatgcatg

SEQ ID NO: 2748544 - DNA, 25 bp, Homo sapien
catccgccgttagtgattagccaag

SEQ ID NO: 2748545 - DNA, 25 bp, Homo sapien
cacaggagcgtttgaccccttggag

SEQ ID NO: 2748546 - DNA, 25 bp, Homo sapien
gacgatcatgggtttactacaaagg

SEQ ID NO: 2748547 - DNA, 25 bp, Homo sapien
gtccttggtccagcatcagcagtag

SEQ ID NO: 2748548 - DNA, 25 bp, Homo sapien
tgggttatgtccatgggccagagtc

SEQ ID NO: 2748549 - DNA, 25 bp, Homo sapien
catgctgtcaagagcactgtgtgct

SEQ ID NO: 2748550 - DNA, 25 bp, Homo sapien
gcctgatcgcacatggagcttagta

SEQ ID NO: 2748551 - DNA, 25 bp, Homo sapien
gatggcaccctttgacatgtggacc

SEQ ID NO: 2748552 - DNA, 25 bp, Homo sapien
tgccttgccacctcccaaattattt

SEQ ID NO: 2748553 - DNA, 25 bp, Homo sapien
gccttgccacctcccaaattatttc

SEQ ID NO: 2748554 - DNA, 25 bp, Homo sapien
agcctccgaccctcatgagtggctg

SEQ ID NO: 2748555 - DNA, 25 bp, Homo sapien
gcctttgttggctagcagcctccga

SEQ ID NO: 2748556 - DNA, 25 bp, Homo sapien
gctggtttgggagataaactgtttg

SEQ ID NO: 2748557 - DNA, 25 bp, Homo sapien
tggtccttgatgcataactgtcacg

SEQ ID NO: 2748558 - DNA, 25 bp, Homo sapien
accctcacagcccacgcactggtgg

SEQ ID NO: 2748559 - DNA, 25 bp, Homo sapien
gagccttaggaactgtgcggctgca

SEQ ID NO: 2748560 - DNA, 25 bp, Homo sapien
agccttaggaactgtgcggctgcag

SEQ ID NO: 2748561 - DNA, 25 bp, Homo sapien
cacgcactggtggagctcaggagcc

SEQ ID NO: 2748562 - DNA, 25 bp, Homo sapien
caagccagccttgtagaaattgtat

SEQ ID NO: 2748563 - DNA, 25 bp, Homo sapien
gtatttatctgggagcaatgcagca

SEQ ID NO: 2748564 - DNA, 25 bp, Homo sapien
cataaattgccgttgtccagttaaa

SEQ ID NO: 2748565 - DNA, 25 bp, Homo sapien
tgcagcatggtggataagaacccag

SEQ ID NO: 2748566 - DNA, 25 bp, Homo sapien
atatttgaagccgtctgcataagct

SEQ ID NO: 2748567 - DNA, 25 bp, Homo sapien
tatttgaagccgtctgcataagctt

SEQ ID NO: 2748568 - DNA, 25 bp, Homo sapien
aatatttgaagccgtctgcataagc

SEQ ID NO: 2748569 - DNA, 25 bp, Homo sapien
tttgaagccgtctgcataagcttca

SEQ ID NO: 2748570 - DNA, 25 bp, Homo sapien
cctgacctcaggttcgagaagtgga

SEQ ID NO: 2748571 - DNA, 25 bp, Homo sapien
taggcagctgagtcgaggcatttct

SEQ ID NO: 2748572 - DNA, 25 bp, Homo sapien
gtcttttgagtcaggtaaagcagca

SEQ ID NO: 2748573 - DNA, 25 bp, Homo sapien
caggttcgagaagtggattcgccca

SEQ ID NO: 2748574 - DNA, 25 bp, Homo sapien
agttatttgcaagtgagtgtccttt

SEQ ID NO: 2748575 - DNA, 25 bp, Homo sapien
tgagtctggccatttctataatgcc

SEQ ID NO: 2748576 - DNA, 25 bp, Homo sapien
gtgacaataaccttagagtcctgtg

SEQ ID NO: 2748577 - DNA, 25 bp, Homo sapien
aatgacagatcgaagtataggttac

SEQ ID NO: 2748578 - DNA, 25 bp, Homo sapien
acatgtgcgggaagtataggttaca

SEQ ID NO: 2748579 - DNA, 25 bp, Homo sapien
gagggtacatgtgcgggaagtatag

SEQ ID NO: 2748580 - DNA, 25 bp, Homo sapien
tgagggtacatgtgcgggaagtata

SEQ ID NO: 2748581 - DNA, 25 bp, Homo sapien
ggtacatgtgcgggaagtataggtt

SEQ ID NO: 2748582 - DNA, 25 bp, Homo sapien
atgtataggtggacgcccagctgca

SEQ ID NO: 2748583 - DNA, 25 bp, Homo sapien
cattgccttccagtgccaggacaga

SEQ ID NO: 2748584 - DNA, 25 bp, Homo sapien
tggcacagttgcacagccgtcttag

SEQ ID NO: 2748585 - DNA, 25 bp, Homo sapien
gtcttagcatctggacagcaccctg

SEQ ID NO: 2748586 - DNA, 25 bp, Homo sapien
ccattagctcctggtgagtttaaat

SEQ ID NO: 2748587 - DNA, 25 bp, Homo sapien
caaaatgagccctgtatcttcaccg

SEQ ID NO: 2748588 - DNA, 25 bp, Homo sapien
aatgagccctgtatcttcaccggca

SEQ ID NO: 2748589 - DNA, 25 bp, Homo sapien
tccattagctcctggtgagtttaaa

SEQ ID NO: 2748590 - DNA, 25 bp, Homo sapien
tctgaatatccttagacctggctga

SEQ ID NO: 2748591 - DNA, 25 bp, Homo sapien
aggagccccttttctcaatagagta

SEQ ID NO: 2748592 - DNA, 25 bp, Homo sapien
tcagaaacgcactcatttaaccgag

SEQ ID NO: 2748593 - DNA, 25 bp, Homo sapien
cttagacctggctgaatttactttt

SEQ ID NO: 2748594 - DNA, 25 bp, Homo sapien
tgtccctggttgtcgaattgtctag

SEQ ID NO: 2748595 - DNA, 25 bp, Homo sapien
tcacaggccgttgcacctgcagact

SEQ ID NO: 2748596 - DNA, 25 bp, Homo sapien
tagtctggtcatatgggctccctgg

SEQ ID NO: 2748597 - DNA, 25 bp, Homo sapien
gatggttcccgcaatagacagtctc

SEQ ID NO: 2748598 - DNA, 25 bp, Homo sapien
ctgttggacgccagcacatccacga

SEQ ID NO: 2748599 - DNA, 25 bp, Homo sapien
gggtccaaggcacgttgagctgggt

SEQ ID NO: 2748600 - DNA, 25 bp, Homo sapien
acatccacgagggagaggtcctctg

SEQ ID NO: 2748601 - DNA, 25 bp, Homo sapien
tggagtgggctagtacagggagctc

SEQ ID NO: 2748602 - DNA, 25 bp, Homo sapien
gcacagaaggtgcaatcccataaat

SEQ ID NO: 2748603 - DNA, 25 bp, Homo sapien
aagcgtctatatgagggacattcac

SEQ ID NO: 2748604 - DNA, 25 bp, Homo sapien
tcatttttcctcgtctgtccagagt

SEQ ID NO: 2748605 - DNA, 25 bp, Homo sapien
accagggacaccagacgagtttgtt

SEQ ID NO: 2748606 - DNA, 25 bp, Homo sapien
gtccttccctacaagtgcaaataag

SEQ ID NO: 2748607 - DNA, 25 bp, Homo sapien
aggaggactggcctgagaacacagg

SEQ ID NO: 2748608 - DNA, 25 bp, Homo sapien
agctgcctccaatgtccttccctac

SEQ ID NO: 2748609 - DNA, 25 bp, Homo sapien
cctacaagtgcaaataagtgtttcc

SEQ ID NO: 2748610 - DNA, 25 bp, Homo sapien
caccgcactcggcccccttttcact

SEQ ID NO: 2748611 - DNA, 25 bp, Homo sapien
tgagccaccgcactcggcccccttt

SEQ ID NO: 2748612 - DNA, 25 bp, Homo sapien
catgagccaccgcactcggccccct

SEQ ID NO: 2748613 - DNA, 25 bp, Homo sapien
tttttgtatgtgtagtagtagagac

SEQ ID NO: 2748614 - DNA, 25 bp, Homo sapien
gtcggcaggtcatccgttccaagca

SEQ ID NO: 2748615 - DNA, 25 bp, Homo sapien
ttggtcggcaggtcatccgttccaa

SEQ ID NO: 2748616 - DNA, 25 bp, Homo sapien
gttccaagcatcacaggcaatatgc

SEQ ID NO: 2748617 - DNA, 25 bp, Homo sapien
atccgttccaagcatcacaggcaat

SEQ ID NO: 2748618 - DNA, 25 bp, Homo sapien
tcctgagagtgcactggagggaaag

SEQ ID NO: 2748619 - DNA, 25 bp, Homo sapien
aggtcctgagagtgcactggaggga

SEQ ID NO: 2748620 - DNA, 25 bp, Homo sapien
ggtcctgagagtgcactggagggaa

SEQ ID NO: 2748621 - DNA, 25 bp, Homo sapien
gtcctgagagtgcactggagggaaa

SEQ ID NO: 2748622 - DNA, 25 bp, Homo sapien
tcagggaactttcttgctgtgttgg

SEQ ID NO: 2748623 - DNA, 25 bp, Homo sapien
tggatgctcttggggaatggctgca

SEQ ID NO: 2748624 - DNA, 25 bp, Homo sapien
ggatgctcttggggaatggctgcag

SEQ ID NO: 2748625 - DNA, 25 bp, Homo sapien
tcttgctgtgttggatgctcttggg

SEQ ID NO: 2748626 - DNA, 25 bp, Homo sapien
gcaagaggacagcatggcacacatg

SEQ ID NO: 2748627 - DNA, 25 bp, Homo sapien
tgcagcaagaggacagcatggcaca

SEQ ID NO: 2748628 - DNA, 25 bp, Homo sapien
cagcaagaggacagcatggcacaca

SEQ ID NO: 2748629 - DNA, 25 bp, Homo sapien
ctgcagcaagaggacagcatggcac

SEQ ID NO: 2748630 - DNA, 25 bp, Homo sapien
tccaggagagctccatgagccccac

SEQ ID NO: 2748631 - DNA, 25 bp, Homo sapien
ggatgtggaggggtatgtgttccag

SEQ ID NO: 2748632 - DNA, 25 bp, Homo sapien
ggcagcagagcagtaggatgtggag

SEQ ID NO: 2748633 - DNA, 25 bp, Homo sapien
tgggcagcagagcagtaggatgtgg

SEQ ID NO: 2748634 - DNA, 25 bp, Homo sapien
gaggtagggcagtgtgtggaaatac

SEQ ID NO: 2748635 - DNA, 25 bp, Homo sapien
aggaggtagggcagtgtgtggaaat

SEQ ID NO: 2748636 - DNA, 25 bp, Homo sapien
ggaggtagggcagtgtgtggaaata

SEQ ID NO: 2748637 - DNA, 25 bp, Homo sapien
caggaggtagggcagtgtgtggaaa

SEQ ID NO: 2748638 - DNA, 25 bp, Homo sapien
aaacgatctggttggctatgaaggg

SEQ ID NO: 2748639 - DNA, 25 bp, Homo sapien
ctatgaagggcttgggtggaacctt

SEQ ID NO: 2748640 - DNA, 25 bp, Homo sapien
gagggatccttcatcagtgacaaga

SEQ ID NO: 2748641 - DNA, 25 bp, Homo sapien
gacaagatacattcccccatcctgg

SEQ ID NO: 2748642 - DNA, 25 bp, Homo sapien
tcaaaggagcgagacaggtagccag

SEQ ID NO: 2748643 - DNA, 25 bp, Homo sapien
ttgtccagcagaacagaaactggcg

SEQ ID NO: 2748644 - DNA, 25 bp, Homo sapien
aggtgggtggccatcagggccaggt

SEQ ID NO: 2748645 - DNA, 25 bp, Homo sapien
aggaagcaccagttcattgtccagc

SEQ ID NO: 2748646 - DNA, 25 bp, Homo sapien
gccaggctggaacaccagcagcccc

SEQ ID NO: 2748647 - DNA, 25 bp, Homo sapien
gaggctgccaggctggaacaccagc

SEQ ID NO: 2748648 - DNA, 25 bp, Homo sapien
ctgccaggctggaacaccagcagcc

SEQ ID NO: 2748649 - DNA, 25 bp, Homo sapien
ggctgccaggctggaacaccagcag

SEQ ID NO: 2748650 - DNA, 25 bp, Homo sapien
ggtgctttgagccatggcagagctc

SEQ ID NO: 2748651 - DNA, 25 bp, Homo sapien
ccaccaggtgctttgagccatggca

SEQ ID NO: 2748652 - DNA, 25 bp, Homo sapien
ggccaccaggtgctttgagccatgg

SEQ ID NO: 2748653 - DNA, 25 bp, Homo sapien
ccaggtgctttgagccatggcagag

SEQ ID NO: 2748654 - DNA, 25 bp, Homo sapien
caagcattcattgagatgttggtgg

SEQ ID NO: 2748655 - DNA, 25 bp, Homo sapien
taatcatcacattctcggacagggt

SEQ ID NO: 2748656 - DNA, 25 bp, Homo sapien
cagcagaggaacttgctcagtatta

SEQ ID NO: 2748657 - DNA, 25 bp, Homo sapien
gcagtgctcagaaggcaagcattca

SEQ ID NO: 2748658 - DNA, 25 bp, Homo sapien
tgagctctggtaacaatatttaagg

SEQ ID NO: 2748659 - DNA, 25 bp, Homo sapien
tgtgagagtgcctgtaccccatcta

SEQ ID NO: 2748660 - DNA, 25 bp, Homo sapien
caaatgaagatctgctgactctctg

SEQ ID NO: 2748661 - DNA, 25 bp, Homo sapien
tgtagcaggtgatctgttccttcca

SEQ ID NO: 2748662 - DNA, 25 bp, Homo sapien
tcacacacagggactaacacatgag

SEQ ID NO: 2748663 - DNA, 25 bp, Homo sapien
ccttgggccaagacaataggcagat

SEQ ID NO: 2748664 - DNA, 25 bp, Homo sapien
gtagacagtccagaaacggcctctc

SEQ ID NO: 2748665 - DNA, 25 bp, Homo sapien
gatcaagggaacagagtagacagtc

SEQ ID NO: 2748666 - DNA, 25 bp, Homo sapien
atggccaattggactggctggtgtg

SEQ ID NO: 2748667 - DNA, 25 bp, Homo sapien
ggccaattggactggctggtgtgcc

SEQ ID NO: 2748668 - DNA, 25 bp, Homo sapien
caattggactggctggtgtgcctgt

SEQ ID NO: 2748669 - DNA, 25 bp, Homo sapien
gccaattggactggctggtgtgcct

SEQ ID NO: 2748670 - DNA, 25 bp, Homo sapien
tgtggagatggatgcctcctcttgg

SEQ ID NO: 2748671 - DNA, 25 bp, Homo sapien
caagaatgtggttgatcccagacca

SEQ ID NO: 2748672 - DNA, 25 bp, Homo sapien
gtggcctgcaagaatgtggttgatc

SEQ ID NO: 2748673 - DNA, 25 bp, Homo sapien
gcccagagctcgtctctcttctgtg

SEQ ID NO: 2748674 - DNA, 25 bp, Homo sapien
ctgagtcccaaacttcaaaggtagg

SEQ ID NO: 2748675 - DNA, 25 bp, Homo sapien
cttcagtctgcggctagaggcctgg

SEQ ID NO: 2748676 - DNA, 25 bp, Homo sapien
ttcagtctgcggctagaggcctggg

SEQ ID NO: 2748677 - DNA, 25 bp, Homo sapien
ccttcagtctgcggctagaggcctg

SEQ ID NO: 2748678 - DNA, 25 bp, Homo sapien
ctgctcggtatgtgctgttgtcatt

SEQ ID NO: 2748679 - DNA, 25 bp, Homo sapien
tggaatgaagtaatgaattagaaag

SEQ ID NO: 2748680 - DNA, 25 bp, Homo sapien
ctggaatgaagtaatgaattagaaa

SEQ ID NO: 2748681 - DNA, 25 bp, Homo sapien
ggaatgaagtaatgaattagaaagt

SEQ ID NO: 2748682 - DNA, 25 bp, Homo sapien
ttaagatatatagggcttaacctat

SEQ ID NO: 2748683 - DNA, 25 bp, Homo sapien
aagatatatagggcttaacctataa

SEQ ID NO: 2748684 - DNA, 25 bp, Homo sapien
gatatatagggcttaacctataact

SEQ ID NO: 2748685 - DNA, 25 bp, Homo sapien
tatatagggcttaacctataactta

SEQ ID NO: 2748686 - DNA, 25 bp, Homo sapien
aggcatgtcagataggccgaggaaa

SEQ ID NO: 2748687 - DNA, 25 bp, Homo sapien
gcaaaatgagctttagcataggctt

SEQ ID NO: 2748688 - DNA, 25 bp, Homo sapien
aattgacgcctataaatataatagc

SEQ ID NO: 2748689 - DNA, 25 bp, Homo sapien
tatgtgtcgggataaccggagtagc

SEQ ID NO: 2748690 - DNA, 25 bp, Homo sapien
caccctccagggttgattgcgtgag

SEQ ID NO: 2748691 - DNA, 25 bp, Homo sapien
tcatgaggaaagttacactggtctc

SEQ ID NO: 2748692 - DNA, 25 bp, Homo sapien
caaacaatgctgcacttcacaggac

SEQ ID NO: 2748693 - DNA, 25 bp, Homo sapien
gaagacacgcataactgagctgata

SEQ ID NO: 2748694 - DNA, 25 bp, Homo sapien
taaatatgcagatgtaaaactatat

SEQ ID NO: 2748695 - DNA, 25 bp, Homo sapien
aaatatgcagatgtaaaactatata

SEQ ID NO: 2748696 - DNA, 25 bp, Homo sapien
ggtaggcattgaccacccaaaaggc

SEQ ID NO: 2748697 - DNA, 25 bp, Homo sapien
gagtcttctgtagcggccacttgca

SEQ ID NO: 2748698 - DNA, 25 bp, Homo sapien
tgtgctgccgctaatcaggcatggg

SEQ ID NO: 2748699 - DNA, 25 bp, Homo sapien
tgctacatctctaccagtaggcaag

SEQ ID NO: 2748700 - DNA, 25 bp, Homo sapien
gacggcgaccagctgtgatgactaa

SEQ ID NO: 2748701 - DNA, 25 bp, Homo sapien
tctgaacaaggtactgacggcgacc

SEQ ID NO: 2748702 - DNA, 25 bp, Homo sapien
ggcgaacgattcaaccaggctctgg

SEQ ID NO: 2748703 - DNA, 25 bp, Homo sapien
caaaatgggtagacaaggtggcgaa

SEQ ID NO: 2748704 - DNA, 25 bp, Homo sapien
aatgattacgctctaacagatattc

SEQ ID NO: 2748705 - DNA, 25 bp, Homo sapien
caaagtcccatagatgttttctatg

SEQ ID NO: 2748706 - DNA, 25 bp, Homo sapien
acagaaatattcaaagtcccataga

SEQ ID NO: 2748707 - DNA, 25 bp, Homo sapien
gcagatggtttatagggaaaagtgt

SEQ ID NO: 2748708 - DNA, 25 bp, Homo sapien
ttctgaatcctcatgggaacccatg

SEQ ID NO: 2748709 - DNA, 25 bp, Homo sapien
gatccctgcactcgtgatgaagaca

SEQ ID NO: 2748710 - DNA, 25 bp, Homo sapien
gggctggtgcccgtcaaagatgctt

SEQ ID NO: 2748711 - DNA, 25 bp, Homo sapien
tatgcatgaagagaccagggctggt

SEQ ID NO: 2748712 - DNA, 25 bp, Homo sapien
tgcctgtccttttcgtgccgtggca

SEQ ID NO: 2748713 - DNA, 25 bp, Homo sapien
gaataagcccttctcaggtctgctg

SEQ ID NO: 2748714 - DNA, 25 bp, Homo sapien
ctagtgggctgccacgtgtgcacag

SEQ ID NO: 2748715 - DNA, 25 bp, Homo sapien
gatgaagtcgtgtgcatgagcaaga

SEQ ID NO: 2748716 - DNA, 25 bp, Homo sapien
gctgggtgacaaggacagtagtgtg

SEQ ID NO: 2748717 - DNA, 25 bp, Homo sapien
gactcagagcgaggcagttgctggg

SEQ ID NO: 2748718 - DNA, 25 bp, Homo sapien
gcgaggcagttgctgggtgacaagg

SEQ ID NO: 2748719 - DNA, 25 bp, Homo sapien
ggagatgggactcagagcgaggcag

SEQ ID NO: 2748720 - DNA, 25 bp, Homo sapien
cttctgtggggagctcttcctccat

SEQ ID NO: 2748721 - DNA, 25 bp, Homo sapien
gccactgaggcttgagaagtgcctt

SEQ ID NO: 2748722 - DNA, 25 bp, Homo sapien
aaaagcgttccgtctgcgattgtca

SEQ ID NO: 2748723 - DNA, 25 bp, Homo sapien
tgtgacttgagtcccagcaatccag

SEQ ID NO: 2748724 - DNA, 25 bp, Homo sapien
gagcttggctgacctgggatgccac

SEQ ID NO: 2748725 - DNA, 25 bp, Homo sapien
cagagctctgtgtgccgtgtacata

SEQ ID NO: 2748726 - DNA, 25 bp, Homo sapien
ggaccgtgctatgatgtgtctcaca

SEQ ID NO: 2748727 - DNA, 25 bp, Homo sapien
tatgtgacaatgcatcaggaagagg

SEQ ID NO: 2748728 - DNA, 25 bp, Homo sapien
gagcaattcacagatgagcgcaggc

SEQ ID NO: 2748729 - DNA, 25 bp, Homo sapien
tattccgttgtccaggagagccatc

SEQ ID NO: 2748730 - DNA, 25 bp, Homo sapien
ttccgttgtccaggagagccatctg

SEQ ID NO: 2748731 - DNA, 25 bp, Homo sapien
cagtcgaagccgagggttccaacaa

SEQ ID NO: 2748732 - DNA, 25 bp, Homo sapien
gagggaaattgtgacttgcagtcga

SEQ ID NO: 2748733 - DNA, 25 bp, Homo sapien
aacggagggccatcctttatttgca

SEQ ID NO: 2748734 - DNA, 25 bp, Homo sapien
cggagggccatcctttatttgcatg

SEQ ID NO: 2748735 - DNA, 25 bp, Homo sapien
ctgtaacggagggccatcctttatt

SEQ ID NO: 2748736 - DNA, 25 bp, Homo sapien
taacggagggccatcctttatttgc

SEQ ID NO: 2748737 - DNA, 25 bp, Homo sapien
ctatcacattggcaatcatccggaa

SEQ ID NO: 2748738 - DNA, 25 bp, Homo sapien
gattttgacgcagttttgaagtgca

SEQ ID NO: 2748739 - DNA, 25 bp, Homo sapien
gagacagaaatttaacccctatcac

SEQ ID NO: 2748740 - DNA, 25 bp, Homo sapien
ttgtaaaacttgcttcgagatgaga

SEQ ID NO: 2748741 - DNA, 25 bp, Homo sapien
aagcagtgtgttttcggctgcctgg

SEQ ID NO: 2748742 - DNA, 25 bp, Homo sapien
ctgtagagcaggtcccgggaattga

SEQ ID NO: 2748743 - DNA, 25 bp, Homo sapien
ccgggaattgaccacatgaggcaca

SEQ ID NO: 2748744 - DNA, 25 bp, Homo sapien
cacatgaggcacatttgtgcgtgga

SEQ ID NO: 2748745 - DNA, 25 bp, Homo sapien
gatagttacaaggaagcgatggccc

SEQ ID NO: 2748746 - DNA, 25 bp, Homo sapien
gagttagatttactacgagaactga

SEQ ID NO: 2748747 - DNA, 25 bp, Homo sapien
atggccccgggtcgcaggcccatag

SEQ ID NO: 2748748 - DNA, 25 bp, Homo sapien
cgagaactgaaggtggaagaattca

SEQ ID NO: 2748749 - DNA, 25 bp, Homo sapien
tcaaggtcccacagttaaacatggt

SEQ ID NO: 2748750 - DNA, 25 bp, Homo sapien
tctagaaagcaggtgcatgcagtgt

SEQ ID NO: 2748751 - DNA, 25 bp, Homo sapien
gacaatgtgcccagtgcgaagagga

SEQ ID NO: 2748752 - DNA, 25 bp, Homo sapien
gcgaagaggacccatagagcttggc

SEQ ID NO: 2748753 - DNA, 25 bp, Homo sapien
ggagtgccaagatgcggcagaagct

SEQ ID NO: 2748754 - DNA, 25 bp, Homo sapien
taggagtgccaagatgcggcagaag

SEQ ID NO: 2748755 - DNA, 25 bp, Homo sapien
gcagctaggagtgccaagatgcggc

SEQ ID NO: 2748756 - DNA, 25 bp, Homo sapien
tagcagctaggagtgccaagatgcg

SEQ ID NO: 2748757 - DNA, 25 bp, Homo sapien
ccacatgtccaggatcattagtgtg

SEQ ID NO: 2748758 - DNA, 25 bp, Homo sapien
tgaggcgagaggtggtaggcagggc

SEQ ID NO: 2748759 - DNA, 25 bp, Homo sapien
tttggatgttccagatgaggcgaga

SEQ ID NO: 2748760 - DNA, 25 bp, Homo sapien
ccaggatcattagtgtgattttgga

SEQ ID NO: 2748761 - DNA, 25 bp, Homo sapien
gtttcttctgtactatccagttcca

SEQ ID NO: 2748762 - DNA, 25 bp, Homo sapien
ttctgtactatccagttccatgtcc

SEQ ID NO: 2748763 - DNA, 25 bp, Homo sapien
gtctgctctagcagaggccttgtaa

SEQ ID NO: 2748764 - DNA, 25 bp, Homo sapien
tctgctctagcagaggccttgtaaa

SEQ ID NO: 2748765 - DNA, 25 bp, Homo sapien
ggctagaacgtcttctctgacagaa

SEQ ID NO: 2748766 - DNA, 25 bp, Homo sapien
tcacttccgcagatgatgggttttg

SEQ ID NO: 2748767 - DNA, 25 bp, Homo sapien
taggcgccggccacttaagccttta

SEQ ID NO: 2748768 - DNA, 25 bp, Homo sapien
tgttgtgttggatctactaggcgcc

SEQ ID NO: 2748769 - DNA, 25 bp, Homo sapien
tattagtatgatttgaagacctggg

SEQ ID NO: 2748770 - DNA, 25 bp, Homo sapien
aagccatcatatggcctcttggaag

SEQ ID NO: 2748771 - DNA, 25 bp, Homo sapien
gaactctccttggtggagtctcgct

SEQ ID NO: 2748772 - DNA, 25 bp, Homo sapien
tgggacagttcttttcgtaaagcca

SEQ ID NO: 2748773 - DNA, 25 bp, Homo sapien
cgctcccaaagtagtctgtgggcct

SEQ ID NO: 2748774 - DNA, 25 bp, Homo sapien
ccttctgtgtgatggaagctgccca

SEQ ID NO: 2748775 - DNA, 25 bp, Homo sapien
agtatggaggaccagcccacagatg

SEQ ID NO: 2748776 - DNA, 25 bp, Homo sapien
gacttcatttctgacgctcccaaag

SEQ ID NO: 2748777 - DNA, 25 bp, Homo sapien
gactgacaaccattgcagccgtcat

SEQ ID NO: 2748778 - DNA, 25 bp, Homo sapien
aatgttggacaaggatcgggagtaa

SEQ ID NO: 2748779 - DNA, 25 bp, Homo sapien
gatcgggagtaagtgcttttctgac

SEQ ID NO: 2748780 - DNA, 25 bp, Homo sapien
cttttctgactgacaaccattgcag

SEQ ID NO: 2748781 - DNA, 25 bp, Homo sapien
gacagcctcattggcttttgctcag

SEQ ID NO: 2748782 - DNA, 25 bp, Homo sapien
tccatcagtcgagggaggatgccca

SEQ ID NO: 2748783 - DNA, 25 bp, Homo sapien
gcttccagggagaaatcgtcaacca

SEQ ID NO: 2748784 - DNA, 25 bp, Homo sapien
gcacatcaggaaataggacagcctc

SEQ ID NO: 2748785 - DNA, 25 bp, Homo sapien
tgtgaagggcactgccgactctaaa

SEQ ID NO: 2748786 - DNA, 25 bp, Homo sapien
gactctaaaaagagaggcagcccca

SEQ ID NO: 2748787 - DNA, 25 bp, Homo sapien
tattaattgcggaataacataggaa

SEQ ID NO: 2748788 - DNA, 25 bp, Homo sapien
ggacaagcgtcatgggcttcagcag

SEQ ID NO: 2748789 - DNA, 25 bp, Homo sapien
ctcccgtctttgcagatgcggcgtc

SEQ ID NO: 2748790 - DNA, 25 bp, Homo sapien
tcccgtctttgcagatgcggcgtcc

SEQ ID NO: 2748791 - DNA, 25 bp, Homo sapien
atttcccaaagcgggtgggagctgc

SEQ ID NO: 2748792 - DNA, 25 bp, Homo sapien
ttctgctctcgcaggtgtttgaatt

SEQ ID NO: 2748793 - DNA, 25 bp, Homo sapien
cagaactcctaagcgagatgaggca

SEQ ID NO: 2748794 - DNA, 25 bp, Homo sapien
tcttgacggcaggtatgctgggatc

SEQ ID NO: 2748795 - DNA, 25 bp, Homo sapien
tggagagatgggaggtgccagaact

SEQ ID NO: 2748796 - DNA, 25 bp, Homo sapien
aggtgccagaactttgtgcagctgc

SEQ ID NO: 2748797 - DNA, 25 bp, Homo sapien
ttgtgcagctgcctttatcctgcac

SEQ ID NO: 2748798 - DNA, 25 bp, Homo sapien
tgtgcagctgcctttatcctgcact

SEQ ID NO: 2748799 - DNA, 25 bp, Homo sapien
tgagtagaatgaggcgcaggaaata

SEQ ID NO: 2748800 - DNA, 25 bp, Homo sapien
catgaataagatacgaagtgctggc

SEQ ID NO: 2748801 - DNA, 25 bp, Homo sapien
gaaataggagcgcaaaagacatttt

SEQ ID NO: 2748802 - DNA, 25 bp, Homo sapien
tgatctaacccgtgtgtgggcagag

SEQ ID NO: 2748803 - DNA, 25 bp, Homo sapien
ctcgtgtgatgtaggtgggttggac

SEQ ID NO: 2748804 - DNA, 25 bp, Homo sapien
gggtatgccctcgtgtgatgtaggt

SEQ ID NO: 2748805 - DNA, 25 bp, Homo sapien
aaggattttacgaggagcaccagga

SEQ ID NO: 2748806 - DNA, 25 bp, Homo sapien
tcaatagttgaaggattttacgagg

SEQ ID NO: 2748807 - DNA, 25 bp, Homo sapien
gggtctgggtgactttgcagagatt

SEQ ID NO: 2748808 - DNA, 25 bp, Homo sapien
ttgcagagattggtgcagctgtggg

SEQ ID NO: 2748809 - DNA, 25 bp, Homo sapien
acccggcaaattgcacaggtctggg

SEQ ID NO: 2748810 - DNA, 25 bp, Homo sapien
tacccggcaaattgcacaggtctgg

SEQ ID NO: 2748811 - DNA, 25 bp, Homo sapien
ctccaaacctaataggtcagtaagg

SEQ ID NO: 2748812 - DNA, 25 bp, Homo sapien
tcctccaaacctaataggtcagtaa

SEQ ID NO: 2748813 - DNA, 25 bp, Homo sapien
tatcctccaaacctaataggtcagt

SEQ ID NO: 2748814 - DNA, 25 bp, Homo sapien
gttatcctccaaacctaataggtca

SEQ ID NO: 2748815 - DNA, 25 bp, Homo sapien
ccgtgaacctgacattggtggccca

SEQ ID NO: 2748816 - DNA, 25 bp, Homo sapien
gggttccgtgaacctgacattggtg

SEQ ID NO: 2748817 - DNA, 25 bp, Homo sapien
ttccgtgaacctgacattggtggcc

SEQ ID NO: 2748818 - DNA, 25 bp, Homo sapien
gtgaacctgacattggtggcccagg

SEQ ID NO: 2748819 - DNA, 25 bp, Homo sapien
cttttcagggagttgctgccatagc

SEQ ID NO: 2748820 - DNA, 25 bp, Homo sapien
tgctggcaggtggagacccgggctg

SEQ ID NO: 2748821 - DNA, 25 bp, Homo sapien
cagggagttgctgccatagcagaag

SEQ ID NO: 2748822 - DNA, 25 bp, Homo sapien
tgggtgagtcttcccaacacgcatt

SEQ ID NO: 2748823 - DNA, 25 bp, Homo sapien
agcacacatcctacaggaggcagga

SEQ ID NO: 2748824 - DNA, 25 bp, Homo sapien
cacacatcctacaggaggcaggagg

SEQ ID NO: 2748825 - DNA, 25 bp, Homo sapien
tgctggtgagccttcccagcacaca

SEQ ID NO: 2748826 - DNA, 25 bp, Homo sapien
tgggctgctggtgagccttcccagc

SEQ ID NO: 2748827 - DNA, 25 bp, Homo sapien
tacttgccaaatgctagttcgatca

SEQ ID NO: 2748828 - DNA, 25 bp, Homo sapien
gcttgagtgatacttgccaaatgct

SEQ ID NO: 2748829 - DNA, 25 bp, Homo sapien
gtgatacttgccaaatgctagttcg

SEQ ID NO: 2748830 - DNA, 25 bp, Homo sapien
tgtagcttgagtgatacttgccaaa

SEQ ID NO: 2748831 - DNA, 25 bp, Homo sapien
ggagctcatgccactgggtgttcca

SEQ ID NO: 2748832 - DNA, 25 bp, Homo sapien
acctttttactggagagcgaggtgg

SEQ ID NO: 2748833 - DNA, 25 bp, Homo sapien
gggagctcatgccactgggtgttcc

SEQ ID NO: 2748834 - DNA, 25 bp, Homo sapien
gtggggagctcatgccactgggtgt

SEQ ID NO: 2748835 - DNA, 25 bp, Homo sapien
tctgatcccagacacgcaagcgtga

SEQ ID NO: 2748836 - DNA, 25 bp, Homo sapien
gcctgattttgcctggatgtgagaa

SEQ ID NO: 2748837 - DNA, 25 bp, Homo sapien
cgtgcttggaaacagttctgatccc

SEQ ID NO: 2748838 - DNA, 25 bp, Homo sapien
taaaacgtgcaagccatacaccgca

SEQ ID NO: 2748839 - DNA, 25 bp, Homo sapien
aacttggccatcctcatggactgtg

SEQ ID NO: 2748840 - DNA, 25 bp, Homo sapien
tcaggttttcaacttctgccggtaa

SEQ ID NO: 2748841 - DNA, 25 bp, Homo sapien
taatgtggaccatcccgacattggt

SEQ ID NO: 2748842 - DNA, 25 bp, Homo sapien
cgacattggtaagctaacttggcca

SEQ ID NO: 2748843 - DNA, 25 bp, Homo sapien
gcttctcaggattgatgatgacgga

SEQ ID NO: 2748844 - DNA, 25 bp, Homo sapien
atccagtatggcttgatctccagag

SEQ ID NO: 2748845 - DNA, 25 bp, Homo sapien
tggctgaacgtgaatgaaggcgcat

SEQ ID NO: 2748846 - DNA, 25 bp, Homo sapien
ttgatctccagagggacattaagtg

SEQ ID NO: 2748847 - DNA, 25 bp, Homo sapien
tgggtagcttatatctgtgcaggcc

SEQ ID NO: 2748848 - DNA, 25 bp, Homo sapien
aatgctcaaggaacacaagtctcca

SEQ ID NO: 2748849 - DNA, 25 bp, Homo sapien
gatgtgatgggtagcttatatctgt

SEQ ID NO: 2748850 - DNA, 25 bp, Homo sapien
tcaaggaacacaagtctccaccatc

SEQ ID NO: 2748851 - DNA, 25 bp, Homo sapien
ttagcacttcatccgtcctcatccg

SEQ ID NO: 2748852 - DNA, 25 bp, Homo sapien
tttgaacactcctggggctttagca

SEQ ID NO: 2748853 - DNA, 25 bp, Homo sapien
ggctttagcacttcatccgtcctca

SEQ ID NO: 2748854 - DNA, 25 bp, Homo sapien
tcttctccagccaaatcctgttctt

SEQ ID NO: 2748855 - DNA, 25 bp, Homo sapien
ctccaaggatcttctccaaccaaat

SEQ ID NO: 2748856 - DNA, 25 bp, Homo sapien
aggatcttctccaaccaaatcctgt

SEQ ID NO: 2748857 - DNA, 25 bp, Homo sapien
tttagcacttcatccgtcctcatct

SEQ ID NO: 2748858 - DNA, 25 bp, Homo sapien
tcctctctgaacactcctggggctt

SEQ ID NO: 2748859 - DNA, 25 bp, Homo sapien
caggcacttgccgatttgtaagcag

SEQ ID NO: 2748860 - DNA, 25 bp, Homo sapien
aggcacttgccgatttgtaagcagc

SEQ ID NO: 2748861 - DNA, 25 bp, Homo sapien
ggcacttgccgatttgtaagcagct

SEQ ID NO: 2748862 - DNA, 25 bp, Homo sapien
tcaggcacttgccgatttgtaagca

SEQ ID NO: 2748863 - DNA, 25 bp, Homo sapien
acaaatcctccggatttccaggaag

SEQ ID NO: 2748864 - DNA, 25 bp, Homo sapien
caaatcctccggatttccaggaaga

SEQ ID NO: 2748865 - DNA, 25 bp, Homo sapien
ccctcacacagtgaagggagaacca

SEQ ID NO: 2748866 - DNA, 25 bp, Homo sapien
tctgattgccctcacacagtgaagg

SEQ ID NO: 2748867 - DNA, 25 bp, Homo sapien
gataatgctccgatctgattgccct

SEQ ID NO: 2748868 - DNA, 25 bp, Homo sapien
tccaggacccagaattgctgataat

SEQ ID NO: 2748869 - DNA, 25 bp, Homo sapien
tggccatgggaataaacaggcattc

SEQ ID NO: 2748870 - DNA, 25 bp, Homo sapien
tcagccagttttcagcaaagtcagt

SEQ ID NO: 2748871 - DNA, 25 bp, Homo sapien
cagaaccaaggttttgcctggcttc

SEQ ID NO: 2748872 - DNA, 25 bp, Homo sapien
cactgattgatgtgatggccatggg

SEQ ID NO: 2748873 - DNA, 25 bp, Homo sapien
gaatttgtgaattattgctcagtgc

SEQ ID NO: 2748874 - DNA, 25 bp, Homo sapien
agttgcacacactgagactgagcat

SEQ ID NO: 2748875 - DNA, 25 bp, Homo sapien
gagactcgatggactctgaaccaga

SEQ ID NO: 2748876 - DNA, 25 bp, Homo sapien
gtgcagtatcagatgtgttgtgtcc

SEQ ID NO: 2748877 - DNA, 25 bp, Homo sapien
aggcacaacgccattgtgccacctg

SEQ ID NO: 2748878 - DNA, 25 bp, Homo sapien
cttggatggcggtaaggaacccaag

SEQ ID NO: 2748879 - DNA, 25 bp, Homo sapien
taaagccacatcagggctggtcttc

SEQ ID NO: 2748880 - DNA, 25 bp, Homo sapien
gtgattggcaggcacaacgccattg

SEQ ID NO: 2748881 - DNA, 25 bp, Homo sapien
tttcattaaattgtgcccaagaagc

SEQ ID NO: 2748882 - DNA, 25 bp, Homo sapien
taaagctccggggttcttgacatgg

SEQ ID NO: 2748883 - DNA, 25 bp, Homo sapien
cctctgcggaggtggtcgtggaaca

SEQ ID NO: 2748884 - DNA, 25 bp, Homo sapien
tggtcgtggaacaaagtcctgaagg

SEQ ID NO: 2748885 - DNA, 25 bp, Homo sapien
aaaagaatagggctgtttccatgaa

SEQ ID NO: 2748886 - DNA, 25 bp, Homo sapien
ccgctggctgccagcctgctgcagc

SEQ ID NO: 2748887 - DNA, 25 bp, Homo sapien
agcctctggggccgctggctgccag

SEQ ID NO: 2748888 - DNA, 25 bp, Homo sapien
gctggctgccagcctgctgcagcat

SEQ ID NO: 2748889 - DNA, 25 bp, Homo sapien
ggccgctggctgccagcctgctgca

SEQ ID NO: 2748890 - DNA, 25 bp, Homo sapien
caagctgactctcctcttacttgtc

SEQ ID NO: 2748891 - DNA, 25 bp, Homo sapien
aagctgactctcctcttacttgtct

SEQ ID NO: 2748892 - DNA, 25 bp, Homo sapien
gctgactctcctcttacttgtcttt

SEQ ID NO: 2748893 - DNA, 25 bp, Homo sapien
cccaagctgactctcctcttacttg

SEQ ID NO: 2748894 - DNA, 25 bp, Homo sapien
ttccaggtcatattgagtgtctgcc

SEQ ID NO: 2748895 - DNA, 25 bp, Homo sapien
tttcagacccagtaagacttccagg

SEQ ID NO: 2748896 - DNA, 25 bp, Homo sapien
gaactcctgatttcctgcgtattct

SEQ ID NO: 2748897 - DNA, 25 bp, Homo sapien
tctctcttttcagtggcagtgttct

SEQ ID NO: 2748898 - DNA, 25 bp, Homo sapien
gcgcctggcccaggtttgttatata

SEQ ID NO: 2748899 - DNA, 25 bp, Homo sapien
tgctcactacgacttctgtctcctg

SEQ ID NO: 2748900 - DNA, 25 bp, Homo sapien
tatataggtacattgtatgtcatgg

SEQ ID NO: 2748901 - DNA, 25 bp, Homo sapien
gataattttgttacctgggtaatca

SEQ ID NO: 2748902 - DNA, 25 bp, Homo sapien
caaatgctctggcatttcggtggcc

SEQ ID NO: 2748903 - DNA, 25 bp, Homo sapien
ggcctcatcctttgtactggattgc

SEQ ID NO: 2748904 - DNA, 25 bp, Homo sapien
ttgtactggattgcctttctctctt

SEQ ID NO: 2748905 - DNA, 25 bp, Homo sapien
aaatgctctggcatttcggtggcct

SEQ ID NO: 2748906 - DNA, 25 bp, Homo sapien
taggaaagtctgtgacgttcatagc

SEQ ID NO: 2748907 - DNA, 25 bp, Homo sapien
tatctcttaaccttaggaaagtctg

SEQ ID NO: 2748908 - DNA, 25 bp, Homo sapien
aagtctgtgacgttcatagcattca

SEQ ID NO: 2748909 - DNA, 25 bp, Homo sapien
ataggatttgaagtatctcttaacc

SEQ ID NO: 2748910 - DNA, 25 bp, Homo sapien
cttctaaatgactcaacacaggaca

SEQ ID NO: 2748911 - DNA, 25 bp, Homo sapien
ttctaaatgactcaacacaggacat

SEQ ID NO: 2748912 - DNA, 25 bp, Homo sapien
gtgccttgtttgctggatcttccag

SEQ ID NO: 2748913 - DNA, 25 bp, Homo sapien
tctggggcccctgaactctcatcct

SEQ ID NO: 2748914 - DNA, 25 bp, Homo sapien
tgtttgctggatcttccagccccag

SEQ ID NO: 2748915 - DNA, 25 bp, Homo sapien
tgcagctgtgccttgtttgctggat

SEQ ID NO: 2748916 - DNA, 25 bp, Homo sapien
tgagtgagccttgctttgaaacctg

SEQ ID NO: 2748917 - DNA, 25 bp, Homo sapien
acagcagtgcccatcagtgagtgag

SEQ ID NO: 2748918 - DNA, 25 bp, Homo sapien
acctgtgtctaatgcatgtctgttc

SEQ ID NO: 2748919 - DNA, 25 bp, Homo sapien
gctttgaaacctgtgtctaatgcat

SEQ ID NO: 2748920 - DNA, 25 bp, Homo sapien
ttgagcagtcggcaccattgctggc

SEQ ID NO: 2748921 - DNA, 25 bp, Homo sapien
agcagtcggcaccattgctggcgtc

SEQ ID NO: 2748922 - DNA, 25 bp, Homo sapien
cacccttgagcagtcggcaccattg

SEQ ID NO: 2748923 - DNA, 25 bp, Homo sapien
agtcggcaccattgctggcgtcctc

SEQ ID NO: 2748924 - DNA, 25 bp, Homo sapien
cacaggagctttgctatagactgaa

SEQ ID NO: 2748925 - DNA, 25 bp, Homo sapien
ttttactgagaaatagcgtggcccc

SEQ ID NO: 2748926 - DNA, 25 bp, Homo sapien
tggaaacctaatgcccactgtgatg

SEQ ID NO: 2748927 - DNA, 25 bp, Homo sapien
ggaaccaggatacattcagcaaaca

SEQ ID NO: 2748928 - DNA, 25 bp, Homo sapien
agcctcgctttgctggcgcacagac

SEQ ID NO: 2748929 - DNA, 25 bp, Homo sapien
caacacgaacgtggaggagcacgca

SEQ ID NO: 2748930 - DNA, 25 bp, Homo sapien
tgtctctgaagcatcacgagccggt

SEQ ID NO: 2748931 - DNA, 25 bp, Homo sapien
tcaatgcgtcaacatccacagggct

SEQ ID NO: 2748932 - DNA, 25 bp, Homo sapien
aagcggcgcgcttcttaaagagtga

SEQ ID NO: 2748933 - DNA, 25 bp, Homo sapien
gatttcaccggaatgctcgagtggg

SEQ ID NO: 2748934 - DNA, 25 bp, Homo sapien
acctgccctcgaggacgggtcctgt

SEQ ID NO: 2748935 - DNA, 25 bp, Homo sapien
cgtttgagaaccaatcactgagctg

SEQ ID NO: 2748936 - DNA, 25 bp, Homo sapien
caggcatcagcaggtcctcagctaa

SEQ ID NO: 2748937 - DNA, 25 bp, Homo sapien
gcaggtcctcagctaacactaaggc

SEQ ID NO: 2748938 - DNA, 25 bp, Homo sapien
atctcagataatcgatgggggttgg

SEQ ID NO: 2748939 - DNA, 25 bp, Homo sapien
tcacaggtgggctgaaaatctcaga

SEQ ID NO: 2748940 - DNA, 25 bp, Homo sapien
aaaggaaggcacttttccagagtgc

SEQ ID NO: 2748941 - DNA, 25 bp, Homo sapien
ccacaaaaggaaggcacttttccag

SEQ ID NO: 2748942 - DNA, 25 bp, Homo sapien
cagtcctctcctcgtccattggctc

SEQ ID NO: 2748943 - DNA, 25 bp, Homo sapien
tctcctcgtccattggctccattgt

SEQ ID NO: 2748944 - DNA, 25 bp, Homo sapien
tgggcagagccttcttacttggaga

SEQ ID NO: 2748945 - DNA, 25 bp, Homo sapien
gccttcttacttggagagcttcggc

SEQ ID NO: 2748946 - DNA, 25 bp, Homo sapien
ggcctaatggcgtcatttgcctcat

SEQ ID NO: 2748947 - DNA, 25 bp, Homo sapien
agagcttcggcctaatggcgtcatt

SEQ ID NO: 2748948 - DNA, 25 bp, Homo sapien
ccttgctggtatccttgactgctat

SEQ ID NO: 2748949 - DNA, 25 bp, Homo sapien
attcttcctggactgccactacact

SEQ ID NO: 2748950 - DNA, 25 bp, Homo sapien
ccctattcttcctggactgccacta

SEQ ID NO: 2748951 - DNA, 25 bp, Homo sapien
tgactgctatcttgaccttcaacat

SEQ ID NO: 2748952 - DNA, 25 bp, Homo sapien
cataggtggatgtaggcaaaacaga

SEQ ID NO: 2748953 - DNA, 25 bp, Homo sapien
ctcccggatgccttctacctgctct

SEQ ID NO: 2748954 - DNA, 25 bp, Homo sapien
cccggatgccttctacctgctctgg

SEQ ID NO: 2748955 - DNA, 25 bp, Homo sapien
ccggatgccttctacctgctctggg

SEQ ID NO: 2748956 - DNA, 25 bp, Homo sapien
tcccggatgccttctacctgctctg

SEQ ID NO: 2748957 - DNA, 25 bp, Homo sapien
gccactggcagatggacacgaatgt

SEQ ID NO: 2748958 - DNA, 25 bp, Homo sapien
agattccaccggctccagtcacatg

SEQ ID NO: 2748959 - DNA, 25 bp, Homo sapien
gtcacatggccttagattgtgctgc

SEQ ID NO: 2748960 - DNA, 25 bp, Homo sapien
tgaacttttaagaggctttgacatt

SEQ ID NO: 2748961 - DNA, 25 bp, Homo sapien
tcaggattgcctgtggatctggccc

SEQ ID NO: 2748962 - DNA, 25 bp, Homo sapien
caggattgcctgtggatctggccca

SEQ ID NO: 2748963 - DNA, 25 bp, Homo sapien
cacgcagacatggagttcatccttc

SEQ ID NO: 2748964 - DNA, 25 bp, Homo sapien
ctgtggtgccagacacgcagacatg

SEQ ID NO: 2748965 - DNA, 25 bp, Homo sapien
gcccatgtacgataggacactgttc

SEQ ID NO: 2748966 - DNA, 25 bp, Homo sapien
ctacagcattaagccacagaatggg

SEQ ID NO: 2748967 - DNA, 25 bp, Homo sapien
tatgtgtcatcacctgtaacccggc

SEQ ID NO: 2748968 - DNA, 25 bp, Homo sapien
cggctgtgtgttccatgacacgaga

SEQ ID NO: 2748969 - DNA, 25 bp, Homo sapien
tgacattgaaggagcacaaagccaa

SEQ ID NO: 2748970 - DNA, 25 bp, Homo sapien
ctgacattgaaggagcacaaagcca

SEQ ID NO: 2748971 - DNA, 25 bp, Homo sapien
cattgaaggagcacaaagccaaagc

SEQ ID NO: 2748972 - DNA, 25 bp, Homo sapien
gacattgaaggagcacaaagccaaa

SEQ ID NO: 2748973 - DNA, 25 bp, Homo sapien
tgcctggacattcacggcactccat

SEQ ID NO: 2748974 - DNA, 25 bp, Homo sapien
tagcacatgcgagcagctggaaatg

SEQ ID NO: 2748975 - DNA, 25 bp, Homo sapien
ctgaggatgtatttagcacatgcga

SEQ ID NO: 2748976 - DNA, 25 bp, Homo sapien
gctggaaatgcctggacattcacgg

SEQ ID NO: 2748977 - DNA, 25 bp, Homo sapien
ttcactgcaagtgtccgggatgaga

SEQ ID NO: 2748978 - DNA, 25 bp, Homo sapien
gcaagctttgcaatagcagagaggt

SEQ ID NO: 2748979 - DNA, 25 bp, Homo sapien
ttccgtaatgtcagggcaagctttg

SEQ ID NO: 2748980 - DNA, 25 bp, Homo sapien
catattttctggtatccggtattcc

SEQ ID NO: 2748981 - DNA, 25 bp, Homo sapien
tgcaactccctccagcaaaaaagct

SEQ ID NO: 2748982 - DNA, 25 bp, Homo sapien
tggatttccagagttatctgcacct

SEQ ID NO: 2748983 - DNA, 25 bp, Homo sapien
actctttgcggccttttccacatgg

SEQ ID NO: 2748984 - DNA, 25 bp, Homo sapien
ttccagagttatctgcacctgcagt

SEQ ID NO: 2748985 - DNA, 25 bp, Homo sapien
gagcaggaagagatgacaatctggt

SEQ ID NO: 2748986 - DNA, 25 bp, Homo sapien
tgacaatctggttaggcactgctcc

SEQ ID NO: 2748987 - DNA, 25 bp, Homo sapien
tgagcaggaagagatgacaatctgg

SEQ ID NO: 2748988 - DNA, 25 bp, Homo sapien
caatctggttaggcactgctcccag

SEQ ID NO: 2748989 - DNA, 25 bp, Homo sapien
ctgcccgagggcccttagagatatt

SEQ ID NO: 2748990 - DNA, 25 bp, Homo sapien
tgcccgagggcccttagagatattg

SEQ ID NO: 2748991 - DNA, 25 bp, Homo sapien
cccgagggcccttagagatattgcc

SEQ ID NO: 2748992 - DNA, 25 bp, Homo sapien
ccgagggcccttagagatattgcca

SEQ ID NO: 2748993 - DNA, 25 bp, Homo sapien
gtccactcaaaatgcaagaatattc

SEQ ID NO: 2748994 - DNA, 25 bp, Homo sapien
gtctgtccactcaaaatgcaagaat

SEQ ID NO: 2748995 - DNA, 25 bp, Homo sapien
ccactcaaaatgcaagaatattccc

SEQ ID NO: 2748996 - DNA, 25 bp, Homo sapien
ctgtccactcaaaatgcaagaatat

SEQ ID NO: 2748997 - DNA, 25 bp, Homo sapien
gggtgctgctaacaaaggaggttcc

SEQ ID NO: 2748998 - DNA, 25 bp, Homo sapien
tcctcggtagttggggtgctgctaa

SEQ ID NO: 2748999 - DNA, 25 bp, Homo sapien
tagttggggtgctgctaacaaagga

SEQ ID NO: 2749000 - DNA, 25 bp, Homo sapien
agtcctcctcggtagttggggtgct

SEQ ID NO: 2749001 - DNA, 25 bp, Homo sapien
gtgttatcccacagaactcacgtga

SEQ ID NO: 2749002 - DNA, 25 bp, Homo sapien
tttggacgtgtctcatcatagctgc

SEQ ID NO: 2749003 - DNA, 25 bp, Homo sapien
gaaactgggcagtacacaagagcag

SEQ ID NO: 2749004 - DNA, 25 bp, Homo sapien
taataaatgcgtgtattccctgccc

SEQ ID NO: 2749005 - DNA, 25 bp, Homo sapien
tcatccaaccctttaagccagcagg

SEQ ID NO: 2749006 - DNA, 25 bp, Homo sapien
tttagagagctcaactagctgagtg

SEQ ID NO: 2749007 - DNA, 25 bp, Homo sapien
gatggaatctggtccacctctagaa

SEQ ID NO: 2749008 - DNA, 25 bp, Homo sapien
tctatccagtggctacggctgaagt

SEQ ID NO: 2749009 - DNA, 25 bp, Homo sapien
ttggttacacatccacaactatggg

SEQ ID NO: 2749010 - DNA, 25 bp, Homo sapien
tcccaagccgcatgaaataggtaat

SEQ ID NO: 2749011 - DNA, 25 bp, Homo sapien
tgccacaatatgagaactaagccct

SEQ ID NO: 2749012 - DNA, 25 bp, Homo sapien
tatgggtatacagctagcaagttag

SEQ ID NO: 2749013 - DNA, 25 bp, Homo sapien
gaagaactcgccttacatgatggca

SEQ ID NO: 2749014 - DNA, 25 bp, Homo sapien
gaagttgtttccaatgtcacgtgcc

SEQ ID NO: 2749015 - DNA, 25 bp, Homo sapien
tagggtccctctggcataataaaga

SEQ ID NO: 2749016 - DNA, 25 bp, Homo sapien
gctggagatgtcaatgcctcactaa

SEQ ID NO: 2749017 - DNA, 25 bp, Homo sapien
cttgccacatttgtgtttcacacca

SEQ ID NO: 2749018 - DNA, 25 bp, Homo sapien
gccttgccacatttgtgtttcacac

SEQ ID NO: 2749019 - DNA, 25 bp, Homo sapien
catttgtgtttcacaccatgagcca

SEQ ID NO: 2749020 - DNA, 25 bp, Homo sapien
tcagccttgccacatttgtgtttca

SEQ ID NO: 2749021 - DNA, 25 bp, Homo sapien
caccatcctgtggtcggtgaatgtt

SEQ ID NO: 2749022 - DNA, 25 bp, Homo sapien
tcctgtggtcggtgaatgttcccac

SEQ ID NO: 2749023 - DNA, 25 bp, Homo sapien
gtttcaccatcctgtggtcggtgaa

SEQ ID NO: 2749024 - DNA, 25 bp, Homo sapien
gaatgttcccacttcaatgtcctcc

SEQ ID NO: 2749025 - DNA, 25 bp, Homo sapien
tcagtaggtgatgtccagaaagaag

SEQ ID NO: 2749026 - DNA, 25 bp, Homo sapien
gaagagattttctgcatgttcttgg

SEQ ID NO: 2749027 - DNA, 25 bp, Homo sapien
gtaggtgatgtccagaaagaagaga

SEQ ID NO: 2749028 - DNA, 25 bp, Homo sapien
aagagattttctgcatgttcttggc

SEQ ID NO: 2749029 - DNA, 25 bp, Homo sapien
ggtgggaatgtgctgttaatgctta

SEQ ID NO: 2749030 - DNA, 25 bp, Homo sapien
tgctgaagcagtaatcagaagaggt

SEQ ID NO: 2749031 - DNA, 25 bp, Homo sapien
gtgggaatgtgctgttaatgcttat

SEQ ID NO: 2749032 - DNA, 25 bp, Homo sapien
tgttgctgaagcagtaatcagaaga

SEQ ID NO: 2749033 - DNA, 25 bp, Homo sapien
atgacgtcttggcacgaccccgctg

SEQ ID NO: 2749034 - DNA, 25 bp, Homo sapien
caggtgatgacgtcttggcacgacc

SEQ ID NO: 2749035 - DNA, 25 bp, Homo sapien
tgacgtcttggcacgaccccgctgg

SEQ ID NO: 2749036 - DNA, 25 bp, Homo sapien
gtgatgacgtcttggcacgaccccg

SEQ ID NO: 2749037 - DNA, 25 bp, Homo sapien
taaaactttcgtgctccaaaagcca

SEQ ID NO: 2749038 - DNA, 25 bp, Homo sapien
ggcataggaagcacaaactacatta

SEQ ID NO: 2749039 - DNA, 25 bp, Homo sapien
caacaaatggtgagagaacacttgg

SEQ ID NO: 2749040 - DNA, 25 bp, Homo sapien
gatgccaaggtaattccatatggga

SEQ ID NO: 2749041 - DNA, 25 bp, Homo sapien
cactaatgagttggattcttgcggt

SEQ ID NO: 2749042 - DNA, 25 bp, Homo sapien
gccacgattatcttgagagctgatg

SEQ ID NO: 2749043 - DNA, 25 bp, Homo sapien
attcttgcggtagggttaacatctc

SEQ ID NO: 2749044 - DNA, 25 bp, Homo sapien
agtggaattggtggcctcactaatg

SEQ ID NO: 2749045 - DNA, 25 bp, Homo sapien
ttctctttgatgactgtagtgcttc

SEQ ID NO: 2749046 - DNA, 25 bp, Homo sapien
gaaacctgggaataacagactccgc

SEQ ID NO: 2749047 - DNA, 25 bp, Homo sapien
tgggaataacagactccgcaggcat

SEQ ID NO: 2749048 - DNA, 25 bp, Homo sapien
actccgcaggcatcatactcattca

SEQ ID NO: 2749049 - DNA, 25 bp, Homo sapien
gactgcaccttccacgcaatgtggg

SEQ ID NO: 2749050 - DNA, 25 bp, Homo sapien
aattaaaggtactgagaactacagc

SEQ ID NO: 2749051 - DNA, 25 bp, Homo sapien
tggaggtagaagtcctagcagtgaa

SEQ ID NO: 2749052 - DNA, 25 bp, Homo sapien
caatgtggggcattattgtacttgg

SEQ ID NO: 2749053 - DNA, 25 bp, Homo sapien
ctctgctcagttatgtggcgaggca

SEQ ID NO: 2749054 - DNA, 25 bp, Homo sapien
gaggcagctgcactatcagcatggg

SEQ ID NO: 2749055 - DNA, 25 bp, Homo sapien
ggctggactctcttccggctttgat

SEQ ID NO: 2749056 - DNA, 25 bp, Homo sapien
acagagggtctgtacgtgtccttca

SEQ ID NO: 2749057 - DNA, 25 bp, Homo sapien
tctagaattctggatctcttcatcc

SEQ ID NO: 2749058 - DNA, 25 bp, Homo sapien
tagaattctggatctcttcatccat

SEQ ID NO: 2749059 - DNA, 25 bp, Homo sapien
ctctagaattctggatctcttcatc

SEQ ID NO: 2749060 - DNA, 25 bp, Homo sapien
ctagaattctggatctcttcatcca

SEQ ID NO: 2749061 - DNA, 25 bp, Homo sapien
gatgtaaacacaaccagtcatagct

SEQ ID NO: 2749062 - DNA, 25 bp, Homo sapien
gaggctgatgagaccgatgtaaaca

SEQ ID NO: 2749063 - DNA, 25 bp, Homo sapien
tgagaccgatgtaaacacaaccagt

SEQ ID NO: 2749064 - DNA, 25 bp, Homo sapien
cacaaccagtcatagcttcacttgc

SEQ ID NO: 2749065 - DNA, 25 bp, Homo sapien
acagtcagaagctgcgcccatggga

SEQ ID NO: 2749066 - DNA, 25 bp, Homo sapien
tcagtgtggtcgatcaaaagcagtt

SEQ ID NO: 2749067 - DNA, 25 bp, Homo sapien
gggcatgcttctatggaccaacctc

SEQ ID NO: 2749068 - DNA, 25 bp, Homo sapien
catgctcgtcctcttcagtgtggtc

SEQ ID NO: 2749069 - DNA, 25 bp, Homo sapien
tgaaggatccaacacaggaggcggt

SEQ ID NO: 2749070 - DNA, 25 bp, Homo sapien
ccaaatccggtgcatgagagagcca

SEQ ID NO: 2749071 - DNA, 25 bp, Homo sapien
tcatagatagagcaggtcattccca

SEQ ID NO: 2749072 - DNA, 25 bp, Homo sapien
gggtaaaccgccaactgcaatgctg

SEQ ID NO: 2749073 - DNA, 25 bp, Homo sapien
tgactgacatgtcctgggagcacat

SEQ ID NO: 2749074 - DNA, 25 bp, Homo sapien
gacaccatgctcctctacacagcag

SEQ ID NO: 2749075 - DNA, 25 bp, Homo sapien
taagatgttcgtgcagaggatgtgc

SEQ ID NO: 2749076 - DNA, 25 bp, Homo sapien
tacagagaccagtaagatgttcgtg

SEQ ID NO: 2749077 - DNA, 25 bp, Homo sapien
ccacccaggactgatgtcctttaaa

SEQ ID NO: 2749078 - DNA, 25 bp, Homo sapien
gcccacccaggactgatgtccttta

SEQ ID NO: 2749079 - DNA, 25 bp, Homo sapien
gactgatgtcctttaaaaaggacaa

SEQ ID NO: 2749080 - DNA, 25 bp, Homo sapien
caggactgatgtcctttaaaaagga

SEQ ID NO: 2749081 - DNA, 25 bp, Homo sapien
tgctgctcgcatgattctggccaag

SEQ ID NO: 2749082 - DNA, 25 bp, Homo sapien
ggatagctggtaggttatatgtgca

SEQ ID NO: 2749083 - DNA, 25 bp, Homo sapien
aaatgaaaacattgtgtctgctgct

SEQ ID NO: 2749084 - DNA, 25 bp, Homo sapien
caatgaggattacagcttcaacatg

SEQ ID NO: 2749085 - DNA, 25 bp, Homo sapien
aatttctactctatgcctggagcca

SEQ ID NO: 2749086 - DNA, 25 bp, Homo sapien
atttctactctatgcctggagccaa

SEQ ID NO: 2749087 - DNA, 25 bp, Homo sapien
aaatttctactctatgcctggagcc

SEQ ID NO: 2749088 - DNA, 25 bp, Homo sapien
gggccataatcagttcttcaggaga

SEQ ID NO: 2749089 - DNA, 25 bp, Homo sapien
gccactgggacttctctcgggaggt

SEQ ID NO: 2749090 - DNA, 25 bp, Homo sapien
cactgcagagagtatcctgggcttt

SEQ ID NO: 2749091 - DNA, 25 bp, Homo sapien
tctcgtctgggctgaatcacattgt

SEQ ID NO: 2749092 - DNA, 25 bp, Homo sapien
cattcatcggctcactcatttatta

SEQ ID NO: 2749093 - DNA, 25 bp, Homo sapien
tgttgggaagttggccctctcctca

SEQ ID NO: 2749094 - DNA, 25 bp, Homo sapien
atcccttatcaaaccaatggctgtt

SEQ ID NO: 2749095 - DNA, 25 bp, Homo sapien
tctcctcacctaccgttaggttcca

SEQ ID NO: 2749096 - DNA, 25 bp, Homo sapien
ggagccagaccctatgaggctaaga

SEQ ID NO: 2749097 - DNA, 25 bp, Homo sapien
ttgtgtaactcttggacagtcatgc

SEQ ID NO: 2749098 - DNA, 25 bp, Homo sapien
tgctgccagttttcaattattaagt

SEQ ID NO: 2749099 - DNA, 25 bp, Homo sapien
ctcctgttaagagtacaggctctgg

SEQ ID NO: 2749100 - DNA, 25 bp, Homo sapien
tctttcttaaaatagctgcccaagc

SEQ ID NO: 2749101 - DNA, 25 bp, Homo sapien
taagacaaagcatatacaagcacct

SEQ ID NO: 2749102 - DNA, 25 bp, Homo sapien
ttcactatgttgagcgcatgcctct

SEQ ID NO: 2749103 - DNA, 25 bp, Homo sapien
aagctcaagaaaggctgagcatggc

SEQ ID NO: 2749104 - DNA, 25 bp, Homo sapien
caatatagttctttcccttgttcat

SEQ ID NO: 2749105 - DNA, 25 bp, Homo sapien
tcaatatagttctttcccttgttca

SEQ ID NO: 2749106 - DNA, 25 bp, Homo sapien
tccagaattatttccaaaaccatcc

SEQ ID NO: 2749107 - DNA, 25 bp, Homo sapien
tccaaaaccatccatgcaatgtttt

SEQ ID NO: 2749108 - DNA, 25 bp, Homo sapien
tcagtaaccaacactggtagtatac

SEQ ID NO: 2749109 - DNA, 25 bp, Homo sapien
acgaaaagcctgtttctgtgactga

SEQ ID NO: 2749110 - DNA, 25 bp, Homo sapien
aagcccatgggataactcagtaacc

SEQ ID NO: 2749111 - DNA, 25 bp, Homo sapien
gaattctaagcccatgggataactc

SEQ ID NO: 2749112 - DNA, 25 bp, Homo sapien
tgtccaaagctgaaaccatttgagc

SEQ ID NO: 2749113 - DNA, 25 bp, Homo sapien
cagtaaaaatcgctggcctggtgca

SEQ ID NO: 2749114 - DNA, 25 bp, Homo sapien
tattggattatcacccaaaggctca

SEQ ID NO: 2749115 - DNA, 25 bp, Homo sapien
taaatatccacgagtgaacactgat

SEQ ID NO: 2749116 - DNA, 25 bp, Homo sapien
cagttcagaattgcccttaggtcct

SEQ ID NO: 2749117 - DNA, 25 bp, Homo sapien
tacagttcagaattgcccttaggtc

SEQ ID NO: 2749118 - DNA, 25 bp, Homo sapien
agttcagaattgcccttaggtcctt

SEQ ID NO: 2749119 - DNA, 25 bp, Homo sapien
ctacagttcagaattgcccttaggt

SEQ ID NO: 2749120 - DNA, 25 bp, Homo sapien
aggttttgcatttaagtctctagtc

SEQ ID NO: 2749121 - DNA, 25 bp, Homo sapien
gcattcacttttgaggacttagaca

SEQ ID NO: 2749122 - DNA, 25 bp, Homo sapien
tgtttaattaggtaccaattgtcaa

SEQ ID NO: 2749123 - DNA, 25 bp, Homo sapien
aagatttagacacttcaccaatgaa

SEQ ID NO: 2749124 - DNA, 25 bp, Homo sapien
tacacaggctggtatacacacgtat

SEQ ID NO: 2749125 - DNA, 25 bp, Homo sapien
agtacatctaggctccagaccatgg

SEQ ID NO: 2749126 - DNA, 25 bp, Homo sapien
actaggactaacaacacctcagtgg

SEQ ID NO: 2749127 - DNA, 25 bp, Homo sapien
gctgtcagatgatagcaactaggac

SEQ ID NO: 2749128 - DNA, 25 bp, Homo sapien
gggcattggcgtgctcatcactggt

SEQ ID NO: 2749129 - DNA, 25 bp, Homo sapien
ccccagggcattggcgtgctcatca

SEQ ID NO: 2749130 - DNA, 25 bp, Homo sapien
ggcattggcgtgctcatcactggtg

SEQ ID NO: 2749131 - DNA, 25 bp, Homo sapien
cagggcattggcgtgctcatcactg

SEQ ID NO: 2749132 - DNA, 25 bp, Homo sapien
gcttatgccagactcagttttagaa

SEQ ID NO: 2749133 - DNA, 25 bp, Homo sapien
aaagagatttggtgccacacattga

SEQ ID NO: 2749134 - DNA, 25 bp, Homo sapien
caaaccaattgtagttcagtagaac

SEQ ID NO: 2749135 - DNA, 25 bp, Homo sapien
taagtgtgaccaaaaccgtatgacg

SEQ ID NO: 2749136 - DNA, 25 bp, Homo sapien
tgcaatgtccctagaagacgggtcc

SEQ ID NO: 2749137 - DNA, 25 bp, Homo sapien
tactgcaaggtaggtctgagtccct

SEQ ID NO: 2749138 - DNA, 25 bp, Homo sapien
gaagaataacgacggctgggcacta

SEQ ID NO: 2749139 - DNA, 25 bp, Homo sapien
cataatgctgtaattgcggaggcct

SEQ ID NO: 2749140 - DNA, 25 bp, Homo sapien
tcccaaatctaattgcaggactaga

SEQ ID NO: 2749141 - DNA, 25 bp, Homo sapien
tttcacagcttcatcacagaccttg

SEQ ID NO: 2749142 - DNA, 25 bp, Homo sapien
aatctgtgagcctgtatgtctaaag

SEQ ID NO: 2749143 - DNA, 25 bp, Homo sapien
cagtgtaatcagatggatagagcca

SEQ ID NO: 2749144 - DNA, 25 bp, Homo sapien
aggaatcaataggattgcagcaggc

SEQ ID NO: 2749145 - DNA, 25 bp, Homo sapien
gaatcaataggattgcagcaggcag

SEQ ID NO: 2749146 - DNA, 25 bp, Homo sapien
atcaataggattgcagcaggcagga

SEQ ID NO: 2749147 - DNA, 25 bp, Homo sapien
tcaggaatcaataggattgcagcag

SEQ ID NO: 2749148 - DNA, 25 bp, Homo sapien
gccacatactcgttgtccacatctg

SEQ ID NO: 2749149 - DNA, 25 bp, Homo sapien
caggccacatactcgttgtccacat

SEQ ID NO: 2749150 - DNA, 25 bp, Homo sapien
cacatactcgttgtccacatctgca

SEQ ID NO: 2749151 - DNA, 25 bp, Homo sapien
tcaggccacatactcgttgtccaca

SEQ ID NO: 2749152 - DNA, 25 bp, Homo sapien
aatagtgcacacgtttgtacatacc

SEQ ID NO: 2749153 - DNA, 25 bp, Homo sapien
tgtacataccatagagcagcagttc

SEQ ID NO: 2749154 - DNA, 25 bp, Homo sapien
caagcatcgttgtgtccagtgccac

SEQ ID NO: 2749155 - DNA, 25 bp, Homo sapien
gccacccaggaaaggtactcatctg

SEQ ID NO: 2749156 - DNA, 25 bp, Homo sapien
actgtcccagaaccactatagatca

SEQ ID NO: 2749157 - DNA, 25 bp, Homo sapien
cactgtcccagaaccactatagatc

SEQ ID NO: 2749158 - DNA, 25 bp, Homo sapien
ctgattctgccataatacactgtcc

SEQ ID NO: 2749159 - DNA, 25 bp, Homo sapien
tgtcccagaaccactatagatcacc

SEQ ID NO: 2749160 - DNA, 25 bp, Homo sapien
ccagcttgcttaagacacatgctcc

SEQ ID NO: 2749161 - DNA, 25 bp, Homo sapien
gcttgcttaagacacatgctccaac

SEQ ID NO: 2749162 - DNA, 25 bp, Homo sapien
agcttgcttaagacacatgctccaa

SEQ ID NO: 2749163 - DNA, 25 bp, Homo sapien
cagcttgcttaagacacatgctcca

SEQ ID NO: 2749164 - DNA, 25 bp, Homo sapien
caggtgctccaagaacgatgttgcc

SEQ ID NO: 2749165 - DNA, 25 bp, Homo sapien
tttttcgatgctcacttacggcccc

SEQ ID NO: 2749166 - DNA, 25 bp, Homo sapien
tgccgtcttctctcaatgcaggtgc

SEQ ID NO: 2749167 - DNA, 25 bp, Homo sapien
gtgccgtccatgctgtgagtccctg

SEQ ID NO: 2749168 - DNA, 25 bp, Homo sapien
agacactcagaaggccacggaagct

SEQ ID NO: 2749169 - DNA, 25 bp, Homo sapien
tggccagacactcagaaggccacgg

SEQ ID NO: 2749170 - DNA, 25 bp, Homo sapien
agaaggccacggaagcttcgctcag

SEQ ID NO: 2749171 - DNA, 25 bp, Homo sapien
aaggccacggaagcttcgctcaggc

SEQ ID NO: 2749172 - DNA, 25 bp, Homo sapien
catcatacccggatcatcaggagaa

SEQ ID NO: 2749173 - DNA, 25 bp, Homo sapien
tacccaagagggtctaaagagctta

SEQ ID NO: 2749174 - DNA, 25 bp, Homo sapien
taactagaattttaatggctgccca

SEQ ID NO: 2749175 - DNA, 25 bp, Homo sapien
catggatggcacactctaaagacag

SEQ ID NO: 2749176 - DNA, 25 bp, Homo sapien
ttggaggatgcattgacttgggccc

SEQ ID NO: 2749177 - DNA, 25 bp, Homo sapien
cattagggacagaggtgcactttga

SEQ ID NO: 2749178 - DNA, 25 bp, Homo sapien
tagtcctgtggtggatgaactcatc

SEQ ID NO: 2749179 - DNA, 25 bp, Homo sapien
tgaactcatctcagaacgccagctg

SEQ ID NO: 2749180 - DNA, 25 bp, Homo sapien
gaggcttcgatgcttgatgcttcca

SEQ ID NO: 2749181 - DNA, 25 bp, Homo sapien
caaatgctgattcacgaggcttcga

SEQ ID NO: 2749182 - DNA, 25 bp, Homo sapien
gaacacagtctgaaaccttgcaagc

SEQ ID NO: 2749183 - DNA, 25 bp, Homo sapien
gatgcttccaacacggctggctagc

SEQ ID NO: 2749184 - DNA, 25 bp, Homo sapien
aaatggagtgctcagactggcatgg

SEQ ID NO: 2749185 - DNA, 25 bp, Homo sapien
taaatggagtgctcagactggcatg

SEQ ID NO: 2749186 - DNA, 25 bp, Homo sapien
taattaaatggagtgctcagactgg

SEQ ID NO: 2749187 - DNA, 25 bp, Homo sapien
attaaatggagtgctcagactggca

SEQ ID NO: 2749188 - DNA, 25 bp, Homo sapien
catggtcagcatgaagcaagttgat

SEQ ID NO: 2749189 - DNA, 25 bp, Homo sapien
tatgtatgaggcagcatgattggtg

SEQ ID NO: 2749190 - DNA, 25 bp, Homo sapien
cattccacacatattgagctactat

SEQ ID NO: 2749191 - DNA, 25 bp, Homo sapien
cagcatgattggtgtgatgaggaat

SEQ ID NO: 2749192 - DNA, 25 bp, Homo sapien
ggaaaagaggttctgtcaagctgca

SEQ ID NO: 2749193 - DNA, 25 bp, Homo sapien
catgctccaaaagtggcgcaagaca

SEQ ID NO: 2749194 - DNA, 25 bp, Homo sapien
gcaagacacaggtcatgacggtgaa

SEQ ID NO: 2749195 - DNA, 25 bp, Homo sapien
acgacagaactccagatgacggcct

SEQ ID NO: 2749196 - DNA, 25 bp, Homo sapien
tggaccccattgctggccttcccat

SEQ ID NO: 2749197 - DNA, 25 bp, Homo sapien
ggaccccattgctggccttcccatg

SEQ ID NO: 2749198 - DNA, 25 bp, Homo sapien
gtcaccccacagcaacagagccggc

SEQ ID NO: 2749199 - DNA, 25 bp, Homo sapien
ctgaatggtcaccccacagcaacag

SEQ ID NO: 2749200 - DNA, 25 bp, Homo sapien
ccccacagcaacagagccggcacac

SEQ ID NO: 2749201 - DNA, 25 bp, Homo sapien
tcaccccacagcaacagagccggca

SEQ ID NO: 2749202 - DNA, 25 bp, Homo sapien
ttctatggcgagcaggatggcatca

SEQ ID NO: 2749203 - DNA, 25 bp, Homo sapien
ctcagcacggctgcagcatagctct

SEQ ID NO: 2749204 - DNA, 25 bp, Homo sapien
cttgtccactccttctatggcgagc

SEQ ID NO: 2749205 - DNA, 25 bp, Homo sapien
cactccttctatggcgagcaggatg

SEQ ID NO: 2749206 - DNA, 25 bp, Homo sapien
ctttctctcaacactggactcaggc

SEQ ID NO: 2749207 - DNA, 25 bp, Homo sapien
ctctcaacactggactcaggcaatg

SEQ ID NO: 2749208 - DNA, 25 bp, Homo sapien
tctctcaacactggactcaggcaat

SEQ ID NO: 2749209 - DNA, 25 bp, Homo sapien
tttctctcaacactggactcaggca

SEQ ID NO: 2749210 - DNA, 25 bp, Homo sapien
gctgtgtccccataggaaagcaggg

SEQ ID NO: 2749211 - DNA, 25 bp, Homo sapien
ctctgctaatggctgcacaaaggaa

SEQ ID NO: 2749212 - DNA, 25 bp, Homo sapien
gttttcctctgctaatggctgcaca

SEQ ID NO: 2749213 - DNA, 25 bp, Homo sapien
tcagtttgctcactgatgctgctgc

SEQ ID NO: 2749214 - DNA, 25 bp, Homo sapien
cgggcgggtcagaggggaccagtct

SEQ ID NO: 2749215 - DNA, 25 bp, Homo sapien
tccgcaccgcacaggtgatcccacc

SEQ ID NO: 2749216 - DNA, 25 bp, Homo sapien
gcgggtcagaggggaccagtctctg

SEQ ID NO: 2749217 - DNA, 25 bp, Homo sapien
ccgcaccgcacaggtgatcccaccc

SEQ ID NO: 2749218 - DNA, 25 bp, Homo sapien
ggaaaaccaagggacatgtgaccgc

SEQ ID NO: 2749219 - DNA, 25 bp, Homo sapien
tatcctgtataagatggctcactcc

SEQ ID NO: 2749220 - DNA, 25 bp, Homo sapien
tacatgactgccttaattgttgggc

SEQ ID NO: 2749221 - DNA, 25 bp, Homo sapien
aaaatcctagcacaagcccaagtgg

SEQ ID NO: 2749222 - DNA, 25 bp, Homo sapien
gctttccttctatcaacactgggag

SEQ ID NO: 2749223 - DNA, 25 bp, Homo sapien
tactctagaagtgccccagctgaga

SEQ ID NO: 2749224 - DNA, 25 bp, Homo sapien
aaattgggccctaaactgacgcctg

SEQ ID NO: 2749225 - DNA, 25 bp, Homo sapien
ccagagagagtaaacgtgtaagcac

SEQ ID NO: 2749226 - DNA, 25 bp, Homo sapien
ttggagaaactcattcagatggagc

SEQ ID NO: 2749227 - DNA, 25 bp, Homo sapien
aaggccgaccctcagctaatgttga

SEQ ID NO: 2749228 - DNA, 25 bp, Homo sapien
tcattcatgttagtcatagcacagt

SEQ ID NO: 2749229 - DNA, 25 bp, Homo sapien
taataagctccttggtggttctgcc

SEQ ID NO: 2749230 - DNA, 25 bp, Homo sapien
gtccttgggcataacaaaaatcagt

SEQ ID NO: 2749231 - DNA, 25 bp, Homo sapien
caaaaatcagtaggccctggggctg

SEQ ID NO: 2749232 - DNA, 25 bp, Homo sapien
ggtgtccttgggcataacaaaaatc

SEQ ID NO: 2749233 - DNA, 25 bp, Homo sapien
tcagcggtgtccttgggcataacaa

SEQ ID NO: 2749234 - DNA, 25 bp, Homo sapien
atattacaaaaataattacatggaa

SEQ ID NO: 2749235 - DNA, 25 bp, Homo sapien
ggacaccataatacaatagaacaga

SEQ ID NO: 2749236 - DNA, 25 bp, Homo sapien
gccacatacttagtttattataggc

SEQ ID NO: 2749237 - DNA, 25 bp, Homo sapien
cgttatttagctttcggacaccata

SEQ ID NO: 2749238 - DNA, 25 bp, Homo sapien
aataccacttaagtacttcccacat

SEQ ID NO: 2749239 - DNA, 25 bp, Homo sapien
ccctcagagagaatgatccccacag

SEQ ID NO: 2749240 - DNA, 25 bp, Homo sapien
tcggtcccatgaggccaaacaatga

SEQ ID NO: 2749241 - DNA, 25 bp, Homo sapien
agttgacgccagacaagctgctgga

SEQ ID NO: 2749242 - DNA, 25 bp, Homo sapien
gaaggtggcgtcagcactcgcagtc

SEQ ID NO: 2749243 - DNA, 25 bp, Homo sapien
catgtcttccggaaatactttagaa

SEQ ID NO: 2749244 - DNA, 25 bp, Homo sapien
ttagccatgtcttccggaaatactt

SEQ ID NO: 2749245 - DNA, 25 bp, Homo sapien
cggatgcttcgatacttagccatgt

SEQ ID NO: 2749246 - DNA, 25 bp, Homo sapien
aggcgggtgatcctccccccggatg

SEQ ID NO: 2749247 - DNA, 25 bp, Homo sapien
cggaacaatcaaaacgagcggccct

SEQ ID NO: 2749248 - DNA, 25 bp, Homo sapien
tgaaggtgacgctggactcaacaac

SEQ ID NO: 2749249 - DNA, 25 bp, Homo sapien
gaactgtaagccacgtccctggtga

SEQ ID NO: 2749250 - DNA, 25 bp, Homo sapien
actaagcaatacagggccacgggac

SEQ ID NO: 2749251 - DNA, 25 bp, Homo sapien
cacctgaatgggattctggaagccc

SEQ ID NO: 2749252 - DNA, 25 bp, Homo sapien
gactaggcaggtctccttctgacag

SEQ ID NO: 2749253 - DNA, 25 bp, Homo sapien
tctggcaccaggcatcagtgggaac

SEQ ID NO: 2749254 - DNA, 25 bp, Homo sapien
tgtattccagaaccgaaaaccaggc

SEQ ID NO: 2749255 - DNA, 25 bp, Homo sapien
atgagtggccgttaagtccaaataa

SEQ ID NO: 2749256 - DNA, 25 bp, Homo sapien
aaatgagtggccgttaagtccaaat

SEQ ID NO: 2749257 - DNA, 25 bp, Homo sapien
aatgagtggccgttaagtccaaata

SEQ ID NO: 2749258 - DNA, 25 bp, Homo sapien
ccctctccaggcactctttggtgta

SEQ ID NO: 2749259 - DNA, 25 bp, Homo sapien
gggatttcgaccttgatctatatat

SEQ ID NO: 2749260 - DNA, 25 bp, Homo sapien
agagctggggatttcgaccttgatc

SEQ ID NO: 2749261 - DNA, 25 bp, Homo sapien
taacttgctcatttttagctagagc

SEQ ID NO: 2749262 - DNA, 25 bp, Homo sapien
tgatcactgataaacccaagcacgc

SEQ ID NO: 2749263 - DNA, 25 bp, Homo sapien
tagacaaaactcagtgtaggaacca

SEQ ID NO: 2749264 - DNA, 25 bp, Homo sapien
catttacacaagtacagatcatctg

SEQ ID NO: 2749265 - DNA, 25 bp, Homo sapien
gtatatataactgcacacggccttg

SEQ ID NO: 2749266 - DNA, 25 bp, Homo sapien
ctgaaaactaactctactttcgaat

SEQ ID NO: 2749267 - DNA, 25 bp, Homo sapien
tcacttcagaacaagatatcattag

SEQ ID NO: 2749268 - DNA, 25 bp, Homo sapien
tctgtaccctaaagaaatccttatc

SEQ ID NO: 2749269 - DNA, 25 bp, Homo sapien
aaaaagtagccttgatagatagcaa

SEQ ID NO: 2749270 - DNA, 25 bp, Homo sapien
tgaagaagtcacgataccacaccat

SEQ ID NO: 2749271 - DNA, 25 bp, Homo sapien
tgaagtcagagacctcagtggtgcc

SEQ ID NO: 2749272 - DNA, 25 bp, Homo sapien
tccacgggcagtttgggaacatcag

SEQ ID NO: 2749273 - DNA, 25 bp, Homo sapien
gaccttttgggatggaaaacagcca

SEQ ID NO: 2749274 - DNA, 25 bp, Homo sapien
gtcaatatcctgtaagccagtaaca

SEQ ID NO: 2749275 - DNA, 25 bp, Homo sapien
tacagtaatatcatgaagctgctgt

SEQ ID NO: 2749276 - DNA, 25 bp, Homo sapien
cctgtaagccagtaacaataaaatt

SEQ ID NO: 2749277 - DNA, 25 bp, Homo sapien
aacttctaacggtacagtaatatca

SEQ ID NO: 2749278 - DNA, 25 bp, Homo sapien
tagggcgtgcactcactgtggagcc

SEQ ID NO: 2749279 - DNA, 25 bp, Homo sapien
tggcttcggagcctcaccttctgag

SEQ ID NO: 2749280 - DNA, 25 bp, Homo sapien
acgtaaagtatatcatctggccatg

SEQ ID NO: 2749281 - DNA, 25 bp, Homo sapien
cgctagaagagaaagcatgattccc

SEQ ID NO: 2749282 - DNA, 25 bp, Homo sapien
cacgagtagcggtcaggctcggctc

SEQ ID NO: 2749283 - DNA, 25 bp, Homo sapien
tcggctcgggctccctagatccccg

SEQ ID NO: 2749284 - DNA, 25 bp, Homo sapien
tagatccccgctcccctagcacacg

SEQ ID NO: 2749285 - DNA, 25 bp, Homo sapien
ctagcacacgcttcccggccaggcc

SEQ ID NO: 2749286 - DNA, 25 bp, Homo sapien
tgctcctctaggtggtcaaacttct

SEQ ID NO: 2749287 - DNA, 25 bp, Homo sapien
agcttttggttgagcccggcctggc

SEQ ID NO: 2749288 - DNA, 25 bp, Homo sapien
gccgaatgttctccacgaacttctc

SEQ ID NO: 2749289 - DNA, 25 bp, Homo sapien
tggaagtcactgacgatgatgccga

SEQ ID NO: 2749290 - DNA, 25 bp, Homo sapien
tcaaccagcagcgccgcaggcgtgg

SEQ ID NO: 2749291 - DNA, 25 bp, Homo sapien
ccgacccacacagcctcaaccagca

SEQ ID NO: 2749292 - DNA, 25 bp, Homo sapien
tggccctacgctcccgcttcctgct

SEQ ID NO: 2749293 - DNA, 25 bp, Homo sapien
gcaggcgtggccctacgctcccgct

SEQ ID NO: 2749294 - DNA, 25 bp, Homo sapien
gataaccaggagactgtacagcaga

SEQ ID NO: 2749295 - DNA, 25 bp, Homo sapien
cagataaccaggagactgtacagca

SEQ ID NO: 2749296 - DNA, 25 bp, Homo sapien
tgcagaaaatcgtggtgcacgcagg

SEQ ID NO: 2749297 - DNA, 25 bp, Homo sapien
aaaatcgtggtgcacgcaggcctgg

SEQ ID NO: 2749298 - DNA, 25 bp, Homo sapien
gggtgcctcgttcggtgccggcagg

SEQ ID NO: 2749299 - DNA, 25 bp, Homo sapien
tgggtgcctcgttcggtgccggcag

SEQ ID NO: 2749300 - DNA, 25 bp, Homo sapien
ggtgcctcgttcggtgccggcagga

SEQ ID NO: 2749301 - DNA, 25 bp, Homo sapien
ctgggtgcctcgttcggtgccggca

SEQ ID NO: 2749302 - DNA, 25 bp, Homo sapien
ctgggggactccaggtgtcgtggcc

SEQ ID NO: 2749303 - DNA, 25 bp, Homo sapien
agtcctggagagctgggggactcca

SEQ ID NO: 2749304 - DNA, 25 bp, Homo sapien
tgctccttgctgagtcctggagagc

SEQ ID NO: 2749305 - DNA, 25 bp, Homo sapien
gggggactccaggtgtcgtggccat

SEQ ID NO: 2749306 - DNA, 25 bp, Homo sapien
cacagagagagatgcattgaagtat

SEQ ID NO: 2749307 - DNA, 25 bp, Homo sapien
cccaggtgggtggacacagagagag

SEQ ID NO: 2749308 - DNA, 25 bp, Homo sapien
ggacacagagagagatgcattgaag

SEQ ID NO: 2749309 - DNA, 25 bp, Homo sapien
cgtaccttgcccaggtgggtggaca

SEQ ID NO: 2749310 - DNA, 25 bp, Homo sapien
caacgtgggactttgccagagccag

SEQ ID NO: 2749311 - DNA, 25 bp, Homo sapien
tggatccgcacgagaaaagctgcac

SEQ ID NO: 2749312 - DNA, 25 bp, Homo sapien
gctcagggcagatgcgtcgtcgtca

SEQ ID NO: 2749313 - DNA, 25 bp, Homo sapien
tgagccccgcatcagggattctgag

SEQ ID NO: 2749314 - DNA, 25 bp, Homo sapien
tataataataattcctttggtgccc

SEQ ID NO: 2749315 - DNA, 25 bp, Homo sapien
taacatacagtttgcaagtgagaga

SEQ ID NO: 2749316 - DNA, 25 bp, Homo sapien
caagcggcaatatagcaatgggcaa

SEQ ID NO: 2749317 - DNA, 25 bp, Homo sapien
gccctccacctagcatgtcatgtta

SEQ ID NO: 2749318 - DNA, 25 bp, Homo sapien
gtgaaatgatatgcagtgatgtcac

SEQ ID NO: 2749319 - DNA, 25 bp, Homo sapien
tgatgtcactaaaatccaccttagg

SEQ ID NO: 2749320 - DNA, 25 bp, Homo sapien
cttaggtctgagagggggccacacc

SEQ ID NO: 2749321 - DNA, 25 bp, Homo sapien
tatgcagtgatgtcactaaaatcca

SEQ ID NO: 2749322 - DNA, 25 bp, Homo sapien
tggccatccttaaaaaccctgccca

SEQ ID NO: 2749323 - DNA, 25 bp, Homo sapien
taaaagcgatgacttcctcctctga

SEQ ID NO: 2749324 - DNA, 25 bp, Homo sapien
tcctcaaccactccttcaataaaag

SEQ ID NO: 2749325 - DNA, 25 bp, Homo sapien
tccttcaataaaagcgatgacttcc

SEQ ID NO: 2749326 - DNA, 25 bp, Homo sapien
ggataagccgcaggctctcagccct

SEQ ID NO: 2749327 - DNA, 25 bp, Homo sapien
tccaccgaatgtcccatttggataa

SEQ ID NO: 2749328 - DNA, 25 bp, Homo sapien
gctccaccgaatgtcccatttggat

SEQ ID NO: 2749329 - DNA, 25 bp, Homo sapien
cccatttggataagccgcaggctct

SEQ ID NO: 2749330 - DNA, 25 bp, Homo sapien
agccagtaacatgctggcagccagc

SEQ ID NO: 2749331 - DNA, 25 bp, Homo sapien
gcgctcagagccagtaacatgctgg

SEQ ID NO: 2749332 - DNA, 25 bp, Homo sapien
ggcgctcagagccagtaacatgctg

SEQ ID NO: 2749333 - DNA, 25 bp, Homo sapien
tcagagccagtaacatgctggcagc

SEQ ID NO: 2749334 - DNA, 25 bp, Homo sapien
gggctgtgtcctgtctcccaatctg

SEQ ID NO: 2749335 - DNA, 25 bp, Homo sapien
tgtgtcctgtctcccaatctggggc

SEQ ID NO: 2749336 - DNA, 25 bp, Homo sapien
tgtcctgtctcccaatctggggctg

SEQ ID NO: 2749337 - DNA, 25 bp, Homo sapien
aatctggggctggacgctcccccag

SEQ ID NO: 2749338 - DNA, 25 bp, Homo sapien
ccagatcaattgttatcttcatgtg

SEQ ID NO: 2749339 - DNA, 25 bp, Homo sapien
aagagcagggccgacttggtttcct

SEQ ID NO: 2749340 - DNA, 25 bp, Homo sapien
cttctccagatcaattgttatcttc

SEQ ID NO: 2749341 - DNA, 25 bp, Homo sapien
gccgacttggtttcctccaccagca

SEQ ID NO: 2749342 - DNA, 25 bp, Homo sapien
gtctcgaggtattgccagaaacttc

SEQ ID NO: 2749343 - DNA, 25 bp, Homo sapien
tgtgagctcacaagagcacgagcct

SEQ ID NO: 2749344 - DNA, 25 bp, Homo sapien
aagtggatcttctgggcttgatacc

SEQ ID NO: 2749345 - DNA, 25 bp, Homo sapien
cacgagcctcggtatgtggattgtc

SEQ ID NO: 2749346 - DNA, 25 bp, Homo sapien
atggcccacatggaagcccacagac

SEQ ID NO: 2749347 - DNA, 25 bp, Homo sapien
cacaccagtgctggaggtccacagt

SEQ ID NO: 2749348 - DNA, 25 bp, Homo sapien
ccaggatggcccacatggaagccca

SEQ ID NO: 2749349 - DNA, 25 bp, Homo sapien
gcccacaccagtgctggaggtccac

SEQ ID NO: 2749350 - DNA, 25 bp, Homo sapien
ctcatccgactagatccagctgaag

SEQ ID NO: 2749351 - DNA, 25 bp, Homo sapien
gtctcatccgactagatccagctga

SEQ ID NO: 2749352 - DNA, 25 bp, Homo sapien
tctcatccgactagatccagctgaa

SEQ ID NO: 2749353 - DNA, 25 bp, Homo sapien
tcatccgactagatccagctgaagt

SEQ ID NO: 2749354 - DNA, 25 bp, Homo sapien
ggtggccacacagacccatatggct

SEQ ID NO: 2749355 - DNA, 25 bp, Homo sapien
agagaaattctgttcgcgaaggttc

SEQ ID NO: 2749356 - DNA, 25 bp, Homo sapien
ccattcacatcccagtacgtgccca

SEQ ID NO: 2749357 - DNA, 25 bp, Homo sapien
tgtagcaccagtgccccgaattgga

SEQ ID NO: 2749358 - DNA, 25 bp, Homo sapien
gaagtgcagagggtctgttcagaga

SEQ ID NO: 2749359 - DNA, 25 bp, Homo sapien
ggttggtaattatgcgcctgccagt

SEQ ID NO: 2749360 - DNA, 25 bp, Homo sapien
gccagtacataaagctcagccagtt

SEQ ID NO: 2749361 - DNA, 25 bp, Homo sapien
tgcgcctgccagtacataaagctca

SEQ ID NO: 2749362 - DNA, 25 bp, Homo sapien
tgaacagcaggcgatggttggtaat

SEQ ID NO: 2749363 - DNA, 25 bp, Homo sapien
aaaacatgtacatgggatgcccaag

SEQ ID NO: 2749364 - DNA, 25 bp, Homo sapien
gcaaaacatgtacatgggatgccca

SEQ ID NO: 2749365 - DNA, 25 bp, Homo sapien
aaacatgtacatgggatgcccaagg

SEQ ID NO: 2749366 - DNA, 25 bp, Homo sapien
caaaacatgtacatgggatgcccaa

SEQ ID NO: 2749367 - DNA, 25 bp, Homo sapien
aatgctgtgcatcctccacccgttt

SEQ ID NO: 2749368 - DNA, 25 bp, Homo sapien
tgcagtagacgctcgagcgcctgtc

SEQ ID NO: 2749369 - DNA, 25 bp, Homo sapien
tgtccgacggctgatgtctgccacg

SEQ ID NO: 2749370 - DNA, 25 bp, Homo sapien
atatggttgggtcaccccgcccgtg

SEQ ID NO: 2749371 - DNA, 25 bp, Homo sapien
tttccatgtaaatggcgccgttcat

SEQ ID NO: 2749372 - DNA, 25 bp, Homo sapien
gtgcgtccccggcacgtgtttgctg

SEQ ID NO: 2749373 - DNA, 25 bp, Homo sapien
caggaaactcaatgcccctgctggc

SEQ ID NO: 2749374 - DNA, 25 bp, Homo sapien
tatttcacagggacgccgtgcatct

SEQ ID NO: 2749375 - DNA, 25 bp, Homo sapien
ttaggaaatggtcctacggccgcgc

SEQ ID NO: 2749376 - DNA, 25 bp, Homo sapien
gaaggcagaggatactgcgaccacc

SEQ ID NO: 2749377 - DNA, 25 bp, Homo sapien
gaacagtctcgtccgatgttaggaa

SEQ ID NO: 2749378 - DNA, 25 bp, Homo sapien
caacggatggtcagctgcgaacagt

SEQ ID NO: 2749379 - DNA, 25 bp, Homo sapien
ccccgaaattgggatgggtgagcac

SEQ ID NO: 2749380 - DNA, 25 bp, Homo sapien
actgccaaaggataccaagtgatca

SEQ ID NO: 2749381 - DNA, 25 bp, Homo sapien
tgagcacccttgctgtggtgtaaac

SEQ ID NO: 2749382 - DNA, 25 bp, Homo sapien
gcatgatcgggtctatttcacccaa

SEQ ID NO: 2749383 - DNA, 25 bp, Homo sapien
tcattcatccaaccctctatggtgg

SEQ ID NO: 2749384 - DNA, 25 bp, Homo sapien
tcatccaaccctctatggtggcatt

SEQ ID NO: 2749385 - DNA, 25 bp, Homo sapien
gatgttcattcatccaaccctctat

SEQ ID NO: 2749386 - DNA, 25 bp, Homo sapien
tccaaccctctatggtggcattctc

SEQ ID NO: 2749387 - DNA, 25 bp, Homo sapien
gacatttggctgacggtctttggac

SEQ ID NO: 2749388 - DNA, 25 bp, Homo sapien
tgacatttggctgacggtctttgga

SEQ ID NO: 2749389 - DNA, 25 bp, Homo sapien
atttggctgacggtctttggaccct

SEQ ID NO: 2749390 - DNA, 25 bp, Homo sapien
acatttggctgacggtctttggacc

SEQ ID NO: 2749391 - DNA, 25 bp, Homo sapien
tggaattacactgtggagatgaaag

SEQ ID NO: 2749392 - DNA, 25 bp, Homo sapien
catggaattacactgtggagatgaa

SEQ ID NO: 2749393 - DNA, 25 bp, Homo sapien
gaattacactgtggagatgaaagac

SEQ ID NO: 2749394 - DNA, 25 bp, Homo sapien
ggaattacactgtggagatgaaaga

SEQ ID NO: 2749395 - DNA, 25 bp, Homo sapien
gctccacgatcatggcactgccaca

SEQ ID NO: 2749396 - DNA, 25 bp, Homo sapien
tccacgatcatggcactgccacacc

SEQ ID NO: 2749397 - DNA, 25 bp, Homo sapien
actgctccacgatcatggcactgcc

SEQ ID NO: 2749398 - DNA, 25 bp, Homo sapien
ctgctccacgatcatggcactgcca

SEQ ID NO: 2749399 - DNA, 25 bp, Homo sapien
gacagcccttcgcaggaatccaggg

SEQ ID NO: 2749400 - DNA, 25 bp, Homo sapien
tcatgcccaggcagacctgctggca

SEQ ID NO: 2749401 - DNA, 25 bp, Homo sapien
tcagattgtctctccgggatagccg

SEQ ID NO: 2749402 - DNA, 25 bp, Homo sapien
gaatggatggtcctagagacagccc

SEQ ID NO: 2749403 - DNA, 25 bp, Homo sapien
tgcaagttaacccagttaggtctcc

SEQ ID NO: 2749404 - DNA, 25 bp, Homo sapien
cgaaggacgtgcaagttaacccagt

SEQ ID NO: 2749405 - DNA, 25 bp, Homo sapien
ctcatcagccgcctctgcggcggcc

SEQ ID NO: 2749406 - DNA, 25 bp, Homo sapien
cacgtgggcctcgaaggacgtgcaa

SEQ ID NO: 2749407 - DNA, 25 bp, Homo sapien
ctgttgtaaagtccagtttcctggt

SEQ ID NO: 2749408 - DNA, 25 bp, Homo sapien
tcctggcaccccgactgggtcatag

SEQ ID NO: 2749409 - DNA, 25 bp, Homo sapien
tcaccaccctgttgtaaagtccagt

SEQ ID NO: 2749410 - DNA, 25 bp, Homo sapien
atagccctcaccaccctgttgtaaa

SEQ ID NO: 2749411 - DNA, 25 bp, Homo sapien
cctggcgttgtccatctgtagggat

SEQ ID NO: 2749412 - DNA, 25 bp, Homo sapien
tgagggaaacggttcagatggatgt

SEQ ID NO: 2749413 - DNA, 25 bp, Homo sapien
ggtgtgagacatgctgggaacagca

SEQ ID NO: 2749414 - DNA, 25 bp, Homo sapien
aaacggttcagatggatgtaggtgt

SEQ ID NO: 2749415 - DNA, 25 bp, Homo sapien
tcagatggatgtaggtgtgagacat

SEQ ID NO: 2749416 - DNA, 25 bp, Homo sapien
tctctgaatacgcagaacctccggg

SEQ ID NO: 2749417 - DNA, 25 bp, Homo sapien
ttgcgttcagcaccttccaagttgg

SEQ ID NO: 2749418 - DNA, 25 bp, Homo sapien
tttgagtgggaaccatgtcgcacct

SEQ ID NO: 2749419 - DNA, 25 bp, Homo sapien
ccttcatggaaattgtctgggtgct

SEQ ID NO: 2749420 - DNA, 25 bp, Homo sapien
tcagcttcccgggccagggacctgc

SEQ ID NO: 2749421 - DNA, 25 bp, Homo sapien
cctcagcttcccgggccagggacct

SEQ ID NO: 2749422 - DNA, 25 bp, Homo sapien
gggccagggacctgctgcaggccat

SEQ ID NO: 2749423 - DNA, 25 bp, Homo sapien
ccgggccagggacctgctgcaggcc

SEQ ID NO: 2749424 - DNA, 25 bp, Homo sapien
tcagctcctgggttcaccaccttct

SEQ ID NO: 2749425 - DNA, 25 bp, Homo sapien
agctcctgggttcaccaccttctgc

SEQ ID NO: 2749426 - DNA, 25 bp, Homo sapien
tcctgggttcaccaccttctgcatc

SEQ ID NO: 2749427 - DNA, 25 bp, Homo sapien
gctcctgggttcaccaccttctgca

SEQ ID NO: 2749428 - DNA, 25 bp, Homo sapien
aaagagcaaacggtccaccaggatg

SEQ ID NO: 2749429 - DNA, 25 bp, Homo sapien
cagaatgtaaaacggtcatgggctc

SEQ ID NO: 2749430 - DNA, 25 bp, Homo sapien
tccctgggggtcttgcatcccagaa

SEQ ID NO: 2749431 - DNA, 25 bp, Homo sapien
gccatgaaacttccctctggtctgg

SEQ ID NO: 2749432 - DNA, 25 bp, Homo sapien
gcacagtgagtgtttgcactcccac

SEQ ID NO: 2749433 - DNA, 25 bp, Homo sapien
gttagcacagtgagtgtttgcactc

SEQ ID NO: 2749434 - DNA, 25 bp, Homo sapien
cagttagcacagtgagtgtttgcac

SEQ ID NO: 2749435 - DNA, 25 bp, Homo sapien
tagcacagtgagtgtttgcactccc

SEQ ID NO: 2749436 - DNA, 25 bp, Homo sapien
gtggtctccctggagtcctcgttgt

SEQ ID NO: 2749437 - DNA, 25 bp, Homo sapien
gggcttcaggtcatttacaagcaac

SEQ ID NO: 2749438 - DNA, 25 bp, Homo sapien
tgttggggggcttcaggtcatttac

SEQ ID NO: 2749439 - DNA, 25 bp, Homo sapien
ctcacagattgtggtctccctggag

SEQ ID NO: 2749440 - DNA, 25 bp, Homo sapien
caccacgatttactttggaacccat

SEQ ID NO: 2749441 - DNA, 25 bp, Homo sapien
tgtgtgtcctggctaggcttggtct

SEQ ID NO: 2749442 - DNA, 25 bp, Homo sapien
tcctggctaggcttggtctctctcc

SEQ ID NO: 2749443 - DNA, 25 bp, Homo sapien
tcctctcgctctgtacaccacgatt

SEQ ID NO: 2749444 - DNA, 25 bp, Homo sapien
tgcacatgagactccagacctgtgt

SEQ ID NO: 2749445 - DNA, 25 bp, Homo sapien
gggagagtagtgcacatgagactcc

SEQ ID NO: 2749446 - DNA, 25 bp, Homo sapien
ggctgcacagggcagagttgaccct

SEQ ID NO: 2749447 - DNA, 25 bp, Homo sapien
cacatgagactccagacctgtgtcc

SEQ ID NO: 2749448 - DNA, 25 bp, Homo sapien
tcctccatgactggtgctgcacaaa

SEQ ID NO: 2749449 - DNA, 25 bp, Homo sapien
caaatagacagggatgttctcaggg

SEQ ID NO: 2749450 - DNA, 25 bp, Homo sapien
caaacttcctccatgactggtgctg

SEQ ID NO: 2749451 - DNA, 25 bp, Homo sapien
ggtgctgcacaaatagacagggatg

SEQ ID NO: 2749452 - DNA, 25 bp, Homo sapien
cgcaccatgggccgccaaaggaggg

SEQ ID NO: 2749453 - DNA, 25 bp, Homo sapien
cagggccactatccccaagatgtca

SEQ ID NO: 2749454 - DNA, 25 bp, Homo sapien
ggcagcagggccactatccccaaga

SEQ ID NO: 2749455 - DNA, 25 bp, Homo sapien
agcagggccactatccccaagatgt

SEQ ID NO: 2749456 - DNA, 25 bp, Homo sapien
gcaggttctaatgtctctccagtgg

SEQ ID NO: 2749457 - DNA, 25 bp, Homo sapien
gtctcctgaaagtaccggcacatgg

SEQ ID NO: 2749458 - DNA, 25 bp, Homo sapien
gagggaatcacctaagtgggctgaa

SEQ ID NO: 2749459 - DNA, 25 bp, Homo sapien
caagcagagatcttgtgcaagggca

SEQ ID NO: 2749460 - DNA, 25 bp, Homo sapien
cctgcaggaaaacccagtgaacggt

SEQ ID NO: 2749461 - DNA, 25 bp, Homo sapien
gacactggggattaactactgctcg

SEQ ID NO: 2749462 - DNA, 25 bp, Homo sapien
cagtggccatcaggctctttgtgga

SEQ ID NO: 2749463 - DNA, 25 bp, Homo sapien
ccagtgaacggtgcccaggtgcctg

SEQ ID NO: 2749464 - DNA, 25 bp, Homo sapien
ggctttgaagggcgccagttcccag

SEQ ID NO: 2749465 - DNA, 25 bp, Homo sapien
cctttgcggcgtgggcccctttctg

SEQ ID NO: 2749466 - DNA, 25 bp, Homo sapien
cgacaacagcgcctttgcggcgtgg

SEQ ID NO: 2749467 - DNA, 25 bp, Homo sapien
cacccgcgcgctgtcggctccggga

SEQ ID NO: 2749468 - DNA, 25 bp, Homo sapien
tcttttcccctcactgccgtcaccc

SEQ ID NO: 2749469 - DNA, 25 bp, Homo sapien
ttttcccctcactgccgtcacccag

SEQ ID NO: 2749470 - DNA, 25 bp, Homo sapien
tgtcttttcccctcactgccgtcac

SEQ ID NO: 2749471 - DNA, 25 bp, Homo sapien
cttgtcttttcccctcactgccgtc

SEQ ID NO: 2749472 - DNA, 25 bp, Homo sapien
tggcagggaccagtaattcagtgct

SEQ ID NO: 2749473 - DNA, 25 bp, Homo sapien
ttccaaactgcaaccccgatcagca

SEQ ID NO: 2749474 - DNA, 25 bp, Homo sapien
tgtggcagggaccagtaattcagtg

SEQ ID NO: 2749475 - DNA, 25 bp, Homo sapien
ctcctgcatggatggccagagcgct

SEQ ID NO: 2749476 - DNA, 25 bp, Homo sapien
cagcagcttcgtcaaacacaaacac

SEQ ID NO: 2749477 - DNA, 25 bp, Homo sapien
tcgccagatgtcagcacagcagtgt

SEQ ID NO: 2749478 - DNA, 25 bp, Homo sapien
tcagaccttcacttcgccagatgtc

SEQ ID NO: 2749479 - DNA, 25 bp, Homo sapien
gcagcttcgtcaaacacaaacacca

SEQ ID NO: 2749480 - DNA, 25 bp, Homo sapien
ttgatactggaaaatgtcatttgtt

SEQ ID NO: 2749481 - DNA, 25 bp, Homo sapien
gaaaatgtcatttgttgtaaccaaa

SEQ ID NO: 2749482 - DNA, 25 bp, Homo sapien
gtcatttgttgtaaccaaaatccac

SEQ ID NO: 2749483 - DNA, 25 bp, Homo sapien
aatgtcatttgttgtaaccaaaatc

SEQ ID NO: 2749484 - DNA, 25 bp, Homo sapien
aagcactccattcaataaaagcaca

SEQ ID NO: 2749485 - DNA, 25 bp, Homo sapien
ttagtatgacaattcacgatacagc

SEQ ID NO: 2749486 - DNA, 25 bp, Homo sapien
cccctcaataattagtatgacaatt

SEQ ID NO: 2749487 - DNA, 25 bp, Homo sapien
tgtaaagcactccattcaataaaag

SEQ ID NO: 2749488 - DNA, 25 bp, Homo sapien
aagaaacactagacccagcttggcc

SEQ ID NO: 2749489 - DNA, 25 bp, Homo sapien
tatatgctttacaggccacaggctg

SEQ ID NO: 2749490 - DNA, 25 bp, Homo sapien
gcatgttaatgacacaccactgagg

SEQ ID NO: 2749491 - DNA, 25 bp, Homo sapien
gaggcctcagatattaaccccactg

SEQ ID NO: 2749492 - DNA, 25 bp, Homo sapien
ggtcacagcctgctgtcacgtctgg

SEQ ID NO: 2749493 - DNA, 25 bp, Homo sapien
tgtccctcagtcacgtcattgtctg

SEQ ID NO: 2749494 - DNA, 25 bp, Homo sapien
tcacgtctggactgttggcctcttc

SEQ ID NO: 2749495 - DNA, 25 bp, Homo sapien
catctgggctgttgggctctcctgc

SEQ ID NO: 2749496 - DNA, 25 bp, Homo sapien
atcctgagataatgaagccgttcat

SEQ ID NO: 2749497 - DNA, 25 bp, Homo sapien
tccgcataagacgatgggacactgc

SEQ ID NO: 2749498 - DNA, 25 bp, Homo sapien
tcttgggcacaaaagttcgaatgga

SEQ ID NO: 2749499 - DNA, 25 bp, Homo sapien
gggacactgcagagcgtctggattc

SEQ ID NO: 2749500 - DNA, 25 bp, Homo sapien
ccataactaaatcgaatgagatgta

SEQ ID NO: 2749501 - DNA, 25 bp, Homo sapien
atcgaatgagatgtaatatgcaact

SEQ ID NO: 2749502 - DNA, 25 bp, Homo sapien
ctaaatcgaatgagatgtaatatgc

SEQ ID NO: 2749503 - DNA, 25 bp, Homo sapien
cattcccataactaaatcgaatgag

SEQ ID NO: 2749504 - DNA, 25 bp, Homo sapien
tgcagctcacctcaagtttcctaag

SEQ ID NO: 2749505 - DNA, 25 bp, Homo sapien
aactactgggaggacatttcatctg

SEQ ID NO: 2749506 - DNA, 25 bp, Homo sapien
taagttcacaatggagtagaggccc

SEQ ID NO: 2749507 - DNA, 25 bp, Homo sapien
tttcctaagtggactgaagctcctg

SEQ ID NO: 2749508 - DNA, 25 bp, Homo sapien
aagggcagggcgtgtactgacttac

SEQ ID NO: 2749509 - DNA, 25 bp, Homo sapien
aaaaattcacttagcctgagctgag

SEQ ID NO: 2749510 - DNA, 25 bp, Homo sapien
tcacaaggctacttctgaggaacaa

SEQ ID NO: 2749511 - DNA, 25 bp, Homo sapien
aacactgtagctaatgacaaggcgt

SEQ ID NO: 2749512 - DNA, 25 bp, Homo sapien
gttcatacttcagcacgatgcttcc

SEQ ID NO: 2749513 - DNA, 25 bp, Homo sapien
aatctggttcatacttcagcacgat

SEQ ID NO: 2749514 - DNA, 25 bp, Homo sapien
agaatctggttcatacttcagcacg

SEQ ID NO: 2749515 - DNA, 25 bp, Homo sapien
gcagaatctggttcatacttcagca

SEQ ID NO: 2749516 - DNA, 25 bp, Homo sapien
ggatgcatgcgctgagcacatttct

SEQ ID NO: 2749517 - DNA, 25 bp, Homo sapien
aggttttccaggtagtggatgcatg

SEQ ID NO: 2749518 - DNA, 25 bp, Homo sapien
cagacacacatttgccaggttttcc

SEQ ID NO: 2749519 - DNA, 25 bp, Homo sapien
tccaggtagtggatgcatgcgctga

SEQ ID NO: 2749520 - DNA, 25 bp, Homo sapien
tgcctttgacccttagcattctgaa

SEQ ID NO: 2749521 - DNA, 25 bp, Homo sapien
gggaagtacaccaaccccaagatgc

SEQ ID NO: 2749522 - DNA, 25 bp, Homo sapien
tgtcaatcagggatctacagaaccc

SEQ ID NO: 2749523 - DNA, 25 bp, Homo sapien
gaaccctctggaaattgatgtagcc

SEQ ID NO: 2749524 - DNA, 25 bp, Homo sapien
ctttgcttgactgtaggtctcactg

SEQ ID NO: 2749525 - DNA, 25 bp, Homo sapien
agggattttcctgggtcaacagtat

SEQ ID NO: 2749526 - DNA, 25 bp, Homo sapien
ccaggtcctttgcttgactgtaggt

SEQ ID NO: 2749527 - DNA, 25 bp, Homo sapien
tgggtcaacagtatcttaacatctt

SEQ ID NO: 2749528 - DNA, 25 bp, Homo sapien
gaaagcacagtcaaactcttcaccg

SEQ ID NO: 2749529 - DNA, 25 bp, Homo sapien
cggaaagcacagtcaaactcttcac

SEQ ID NO: 2749530 - DNA, 25 bp, Homo sapien
ccagactttgatccccgtgttaata

SEQ ID NO: 2749531 - DNA, 25 bp, Homo sapien
tacaccagactttgatccccgtgtt

SEQ ID NO: 2749532 - DNA, 25 bp, Homo sapien
ccaaatgaaatctaagccgctgtga

SEQ ID NO: 2749533 - DNA, 25 bp, Homo sapien
gatgtcacggtctgctccaaatgaa

SEQ ID NO: 2749534 - DNA, 25 bp, Homo sapien
catctcctgtaaggatgccgggcca

SEQ ID NO: 2749535 - DNA, 25 bp, Homo sapien
ctcaaaggacaaatcccaagggtcg

SEQ ID NO: 2749536 - DNA, 25 bp, Homo sapien
cactcagcgtctgtgcggctggcac

SEQ ID NO: 2749537 - DNA, 25 bp, Homo sapien
tattcagcagcacattccgcaactc

SEQ ID NO: 2749538 - DNA, 25 bp, Homo sapien
agcacattccgcaactccttagaaa

SEQ ID NO: 2749539 - DNA, 25 bp, Homo sapien
tgttattcagcagcacattccgcaa

SEQ ID NO: 2749540 - DNA, 25 bp, Homo sapien
aaccatgtagagctgccttttcttc

SEQ ID NO: 2749541 - DNA, 25 bp, Homo sapien
tgaaggatccaaagcataaaatttc

SEQ ID NO: 2749542 - DNA, 25 bp, Homo sapien
tgggaatgaaggatccaaagcataa

SEQ ID NO: 2749543 - DNA, 25 bp, Homo sapien
ggaatgaaggatccaaagcataaaa

SEQ ID NO: 2749544 - DNA, 25 bp, Homo sapien
cttgggaatgaaggatccaaagcat

SEQ ID NO: 2749545 - DNA, 25 bp, Homo sapien
aaaaagacagtaagtgaccgccctg

SEQ ID NO: 2749546 - DNA, 25 bp, Homo sapien
gaatgtcagacttgtcctaaaccct

SEQ ID NO: 2749547 - DNA, 25 bp, Homo sapien
gagtaatttaggttcaggatcacaa

SEQ ID NO: 2749548 - DNA, 25 bp, Homo sapien
gaccgccctggtaaatagattctaa

SEQ ID NO: 2749549 - DNA, 25 bp, Homo sapien
aaaaaagctagacagaactacatac

SEQ ID NO: 2749550 - DNA, 25 bp, Homo sapien
aagctagacagaactacatacaaaa

SEQ ID NO: 2749551 - DNA, 25 bp, Homo sapien
aaaagctagacagaactacatacaa

SEQ ID NO: 2749552 - DNA, 25 bp, Homo sapien
aaaaagctagacagaactacataca

SEQ ID NO: 2749553 - DNA, 25 bp, Homo sapien
ataaatacaaatggatcttctttaa

SEQ ID NO: 2749554 - DNA, 25 bp, Homo sapien
aatacaaatggatcttctttaaatc

SEQ ID NO: 2749555 - DNA, 25 bp, Homo sapien
caaatggatcttctttaaatccaaa

SEQ ID NO: 2749556 - DNA, 25 bp, Homo sapien
tcaataggtggaaataatgggtcat

SEQ ID NO: 2749557 - DNA, 25 bp, Homo sapien
aagggaatcaggatgagacaaatca

SEQ ID NO: 2749558 - DNA, 25 bp, Homo sapien
taaaaagggaatcaggatgagacaa

SEQ ID NO: 2749559 - DNA, 25 bp, Homo sapien
aaaagggaatcaggatgagacaaat

SEQ ID NO: 2749560 - DNA, 25 bp, Homo sapien
gggaatcaggatgagacaaatcaat

SEQ ID NO: 2749561 - DNA, 25 bp, Homo sapien
ctgtaatgtgtggtaaccttcaata

SEQ ID NO: 2749562 - DNA, 25 bp, Homo sapien
tgtaatgtgtggtaaccttcaatac

SEQ ID NO: 2749563 - DNA, 25 bp, Homo sapien
atgtgtggtaaccttcaataccaaa

SEQ ID NO: 2749564 - DNA, 25 bp, Homo sapien
taatgtgtggtaaccttcaatacca

SEQ ID NO: 2749565 - DNA, 25 bp, Homo sapien
aatgacggactttccagcttagagg

SEQ ID NO: 2749566 - DNA, 25 bp, Homo sapien
gggtttcccttctgtgagatctgca

SEQ ID NO: 2749567 - DNA, 25 bp, Homo sapien
tgtgtcaccagttcctgtgaatgac

SEQ ID NO: 2749568 - DNA, 25 bp, Homo sapien
cacacacgccatctttcttactgcc

SEQ ID NO: 2749569 - DNA, 25 bp, Homo sapien
ccatgctagcactagatctgttgaa

SEQ ID NO: 2749570 - DNA, 25 bp, Homo sapien
agcacaggccatgctagcactagat

SEQ ID NO: 2749571 - DNA, 25 bp, Homo sapien
ctgcgttcccagtaggaccaacagc

SEQ ID NO: 2749572 - DNA, 25 bp, Homo sapien
gcgttcccagtaggaccaacagcag

SEQ ID NO: 2749573 - DNA, 25 bp, Homo sapien
ctttggctgacgtttattccacggc

SEQ ID NO: 2749574 - DNA, 25 bp, Homo sapien
ttcaccaatactgccacaaaaaacc

SEQ ID NO: 2749575 - DNA, 25 bp, Homo sapien
tttttcaccaatactgccacaaaaa

SEQ ID NO: 2749576 - DNA, 25 bp, Homo sapien
attccacggcattgaagattttttc

SEQ ID NO: 2749577 - DNA, 25 bp, Homo sapien
aatctttaaaaagttcatgacggct

SEQ ID NO: 2749578 - DNA, 25 bp, Homo sapien
cacctggcccactttgtaatcttta

SEQ ID NO: 2749579 - DNA, 25 bp, Homo sapien
tgcacctggcccactttgtaatctt

SEQ ID NO: 2749580 - DNA, 25 bp, Homo sapien
aaagttcatgacggctgggcacagt

SEQ ID NO: 2749581 - DNA, 25 bp, Homo sapien
tgctgtgaggaacagcgtcccagtc

SEQ ID NO: 2749582 - DNA, 25 bp, Homo sapien
tccttcggagggaacatggtaggtc

SEQ ID NO: 2749583 - DNA, 25 bp, Homo sapien
cagtctgtaaaccactgcccatctt

SEQ ID NO: 2749584 - DNA, 25 bp, Homo sapien
taggtcggatctgggtgtgtctgct

SEQ ID NO: 2749585 - DNA, 25 bp, Homo sapien
cagccctggcagttcattagacaca

SEQ ID NO: 2749586 - DNA, 25 bp, Homo sapien
tgaacacgtggaatacaccatcctt

SEQ ID NO: 2749587 - DNA, 25 bp, Homo sapien
cagtaaagatgctatgactgcttca

SEQ ID NO: 2749588 - DNA, 25 bp, Homo sapien
actgcttcatcctcaatagggttta

SEQ ID NO: 2749589 - DNA, 25 bp, Homo sapien
ttcagccagctgttcagccccgcgt

SEQ ID NO: 2749590 - DNA, 25 bp, Homo sapien
gttttttctcatagtgccgtctcca

SEQ ID NO: 2749591 - DNA, 25 bp, Homo sapien
tgtagctgcaagctatttaaggtgg

SEQ ID NO: 2749592 - DNA, 25 bp, Homo sapien
tgttttttctcatagtgccgtctcc

SEQ ID NO: 2749593 - DNA, 25 bp, Homo sapien
ccatgtagctgcaagctatttaagg

SEQ ID NO: 2749594 - DNA, 25 bp, Homo sapien
ctggaggcatcatggttgaccacca

SEQ ID NO: 2749595 - DNA, 25 bp, Homo sapien
cagcctcttggcttgatggacgagc

SEQ ID NO: 2749596 - DNA, 25 bp, Homo sapien
tccacatctatctggagcctgggta

SEQ ID NO: 2749597 - DNA, 25 bp, Homo sapien
gagcaggtagcagcgcttgttgtcc

SEQ ID NO: 2749598 - DNA, 25 bp, Homo sapien
tgagcacctcgcaagctacatactg

SEQ ID NO: 2749599 - DNA, 25 bp, Homo sapien
gctgactctaaaacatcacgatggg

SEQ ID NO: 2749600 - DNA, 25 bp, Homo sapien
gctgggaagtctactgggtgtacct

SEQ ID NO: 2749601 - DNA, 25 bp, Homo sapien
gcgtggtgtcactataacagctaac

SEQ ID NO: 2749602 - DNA, 25 bp, Homo sapien
gtcggcatgtagcatttcaattaac

SEQ ID NO: 2749603 - DNA, 25 bp, Homo sapien
taactgtgtggtctttgagccaggt

SEQ ID NO: 2749604 - DNA, 25 bp, Homo sapien
ggcatgtagcatttcaattaactgt

SEQ ID NO: 2749605 - DNA, 25 bp, Homo sapien
ccaggtgctgcacacatatctaaga

SEQ ID NO: 2749606 - DNA, 25 bp, Homo sapien
ctaacagcttcttgacgactaatat

SEQ ID NO: 2749607 - DNA, 25 bp, Homo sapien
cagcttcttgacgactaatatttcc

SEQ ID NO: 2749608 - DNA, 25 bp, Homo sapien
tgaggccgcacgttgaggagcagtg

SEQ ID NO: 2749609 - DNA, 25 bp, Homo sapien
cttatgatgaggccgcacgttgagg

SEQ ID NO: 2749610 - DNA, 25 bp, Homo sapien
gaaactgatgaaacttttccaagtg

SEQ ID NO: 2749611 - DNA, 25 bp, Homo sapien
caagatttttcgacttaaatttgtg

SEQ ID NO: 2749612 - DNA, 25 bp, Homo sapien
ttttcgacttaaatttgtgtgccag

SEQ ID NO: 2749613 - DNA, 25 bp, Homo sapien
ccaagtgtggcgattttctcaagat

SEQ ID NO: 2749614 - DNA, 25 bp, Homo sapien
tcaggacttaaaagcccgacactgc

SEQ ID NO: 2749615 - DNA, 25 bp, Homo sapien
tcaatttaacaatgcaggctcacaa

SEQ ID NO: 2749616 - DNA, 25 bp, Homo sapien
gaaactggctgaatctgtccacggc

SEQ ID NO: 2749617 - DNA, 25 bp, Homo sapien
cattagaggcgaaatagtaggttac

SEQ ID NO: 2749618 - DNA, 25 bp, Homo sapien
taaaaagcacgtaacaggcgaggtg

SEQ ID NO: 2749619 - DNA, 25 bp, Homo sapien
ctatgacaaaccatcctcaatctag

SEQ ID NO: 2749620 - DNA, 25 bp, Homo sapien
tcctatttgggctttttagaggata

SEQ ID NO: 2749621 - DNA, 25 bp, Homo sapien
aaattctcaagtggtaaggactctg

SEQ ID NO: 2749622 - DNA, 25 bp, Homo sapien
ttcaactttctgaccgtccacctcc

SEQ ID NO: 2749623 - DNA, 25 bp, Homo sapien
caactttctgaccgtccacctccag

SEQ ID NO: 2749624 - DNA, 25 bp, Homo sapien
acttcaactttctgaccgtccacct

SEQ ID NO: 2749625 - DNA, 25 bp, Homo sapien
tcaactttctgaccgtccacctcca

SEQ ID NO: 2749626 - DNA, 25 bp, Homo sapien
tacttgcgactcatttagaaagatg

SEQ ID NO: 2749627 - DNA, 25 bp, Homo sapien
cttgcgactcatttagaaagatgta

SEQ ID NO: 2749628 - DNA, 25 bp, Homo sapien
ttaagttttacttgcgactcattta

SEQ ID NO: 2749629 - DNA, 25 bp, Homo sapien
cgttaagttttacttgcgactcatt

SEQ ID NO: 2749630 - DNA, 25 bp, Homo sapien
tctggcactgtaacacttgtcgaag

SEQ ID NO: 2749631 - DNA, 25 bp, Homo sapien
cttgtcgaagaaaacaccgtcgcct

SEQ ID NO: 2749632 - DNA, 25 bp, Homo sapien
tcctgaatccaaaccgctgaaacgc

SEQ ID NO: 2749633 - DNA, 25 bp, Homo sapien
gctgaaacgccacggttctctggca

SEQ ID NO: 2749634 - DNA, 25 bp, Homo sapien
cctgagagcgtccatgaactggccc

SEQ ID NO: 2749635 - DNA, 25 bp, Homo sapien
gagctcctggtagtagtgctcgaac

SEQ ID NO: 2749636 - DNA, 25 bp, Homo sapien
tcgccctcgggcacgatcttgagct

SEQ ID NO: 2749637 - DNA, 25 bp, Homo sapien
attcttaaagtggccgggagcggct

SEQ ID NO: 2749638 - DNA, 25 bp, Homo sapien
gttgctggagccgccgaccccgcga

SEQ ID NO: 2749639 - DNA, 25 bp, Homo sapien
gctggagccgccgaccccgcgaccg

SEQ ID NO: 2749640 - DNA, 25 bp, Homo sapien
gctgttgctggagccgccgaccccg

SEQ ID NO: 2749641 - DNA, 25 bp, Homo sapien
tggagccgccgaccccgcgaccgcc

SEQ ID NO: 2749642 - DNA, 25 bp, Homo sapien
tctttcagaaaagcggcgtgacagg

SEQ ID NO: 2749643 - DNA, 25 bp, Homo sapien
gaccgtccaggaataagcccaaagc

SEQ ID NO: 2749644 - DNA, 25 bp, Homo sapien
tgacagggaaaacagcgaacagctc

SEQ ID NO: 2749645 - DNA, 25 bp, Homo sapien
caaagcgcacaacccgtctttcaga

SEQ ID NO: 2749646 - DNA, 25 bp, Homo sapien
cgtcctggagccctttatttgcaca

SEQ ID NO: 2749647 - DNA, 25 bp, Homo sapien
agcgtcctggagccctttatttgca

SEQ ID NO: 2749648 - DNA, 25 bp, Homo sapien
tggagccctttatttgcacagggcc

SEQ ID NO: 2749649 - DNA, 25 bp, Homo sapien
accagagtggaaacagcatttagca

SEQ ID NO: 2749650 - DNA, 25 bp, Homo sapien
tggagtgaggttgggccctgccttg

SEQ ID NO: 2749651 - DNA, 25 bp, Homo sapien
tcttttgggagtggcaaggaccaga

SEQ ID NO: 2749652 - DNA, 25 bp, Homo sapien
tgtgaggtttcgctggagtgaggtt

SEQ ID NO: 2749653 - DNA, 25 bp, Homo sapien
gcagagctacagctcttcccagagc

SEQ ID NO: 2749654 - DNA, 25 bp, Homo sapien
ttccttgctatctgaaattggcccc

SEQ ID NO: 2749655 - DNA, 25 bp, Homo sapien
ccttgctatctgaaattggccccat

SEQ ID NO: 2749656 - DNA, 25 bp, Homo sapien
cttccttgctatctgaaattggccc

SEQ ID NO: 2749657 - DNA, 25 bp, Homo sapien
tccttgctatctgaaattggcccca

SEQ ID NO: 2749658 - DNA, 25 bp, Homo sapien
gtattctctggacacgcctctttgg

SEQ ID NO: 2749659 - DNA, 25 bp, Homo sapien
gaacgtccaccacatacgcagaatg

SEQ ID NO: 2749660 - DNA, 25 bp, Homo sapien
ctgatatgccagagggaacgtccac

SEQ ID NO: 2749661 - DNA, 25 bp, Homo sapien
gaggcccgacctcttatgaactgag

SEQ ID NO: 2749662 - DNA, 25 bp, Homo sapien
cacaggaaatgttggtatgcaagca

SEQ ID NO: 2749663 - DNA, 25 bp, Homo sapien
agcacttgcagtgtgcctacatccc

SEQ ID NO: 2749664 - DNA, 25 bp, Homo sapien
aaatgttggtatgcaagcacttgca

SEQ ID NO: 2749665 - DNA, 25 bp, Homo sapien
cagtgtgcctacatcccaaatgcca

SEQ ID NO: 2749666 - DNA, 25 bp, Homo sapien
atgactttaccctggcgcacatggt

SEQ ID NO: 2749667 - DNA, 25 bp, Homo sapien
gactcatgtgaatgtcttccccagg

SEQ ID NO: 2749668 - DNA, 25 bp, Homo sapien
gaatgagatgagaaccttggaggct

SEQ ID NO: 2749669 - DNA, 25 bp, Homo sapien
tccaagacgcagagagaaattgctg

SEQ ID NO: 2749670 - DNA, 25 bp, Homo sapien
gaatatcctactgtgtaacaggtca

SEQ ID NO: 2749671 - DNA, 25 bp, Homo sapien
taagtacctaaatacgctgaaatgg

SEQ ID NO: 2749672 - DNA, 25 bp, Homo sapien
tagccattgtgcagtcatggcccgg

SEQ ID NO: 2749673 - DNA, 25 bp, Homo sapien
gaaacttgccaaccttcgtgtcagg

SEQ ID NO: 2749674 - DNA, 25 bp, Homo sapien
ggctttccggtaggatcaccatgga

SEQ ID NO: 2749675 - DNA, 25 bp, Homo sapien
caaatgtctagcttgtgagggctgc

SEQ ID NO: 2749676 - DNA, 25 bp, Homo sapien
acaggtctgctgaacaagtgcactc

SEQ ID NO: 2749677 - DNA, 25 bp, Homo sapien
caaccaacatttatgccggcagatg

SEQ ID NO: 2749678 - DNA, 25 bp, Homo sapien
ccttcgggtagatacacaatagagg

SEQ ID NO: 2749679 - DNA, 25 bp, Homo sapien
catacatgtccagttgtctttttga

SEQ ID NO: 2749680 - DNA, 25 bp, Homo sapien
acatacatgtccagttgtctttttg

SEQ ID NO: 2749681 - DNA, 25 bp, Homo sapien
ttgagacttttgtggagcatttctg

SEQ ID NO: 2749682 - DNA, 25 bp, Homo sapien
gggatgcctgttgcaatgcctgttg

SEQ ID NO: 2749683 - DNA, 25 bp, Homo sapien
tgcaatgcctgttgcattgcccctc

SEQ ID NO: 2749684 - DNA, 25 bp, Homo sapien
ttagtttgagacttttgtggagcat

SEQ ID NO: 2749685 - DNA, 25 bp, Homo sapien
tgccatgtcgttcctatgaaacgct

SEQ ID NO: 2749686 - DNA, 25 bp, Homo sapien
cctgggtgcccaaacacggaagaca

SEQ ID NO: 2749687 - DNA, 25 bp, Homo sapien
ctgagatgggttgctactccagcct

SEQ ID NO: 2749688 - DNA, 25 bp, Homo sapien
gccaccaccaatgtgtgccatgtcg

SEQ ID NO: 2749689 - DNA, 25 bp, Homo sapien
tgcccagtactgttccacacggcat

SEQ ID NO: 2749690 - DNA, 25 bp, Homo sapien
tttgaccttgattgcctgactcacc

SEQ ID NO: 2749691 - DNA, 25 bp, Homo sapien
tcctgcgggactgccatagcctcct

SEQ ID NO: 2749692 - DNA, 25 bp, Homo sapien
cacacggcatgtaatcttctagagt

SEQ ID NO: 2749693 - DNA, 25 bp, Homo sapien
ggcaaattcgttccacagtccctgt

SEQ ID NO: 2749694 - DNA, 25 bp, Homo sapien
cagaataggtacacggcgctggtcc

SEQ ID NO: 2749695 - DNA, 25 bp, Homo sapien
gctgtatgccctgttgaaagactct

SEQ ID NO: 2749696 - DNA, 25 bp, Homo sapien
tcaagaaacacggagaaggaacagt

SEQ ID NO: 2749697 - DNA, 25 bp, Homo sapien
gaactagctgaaaactccagggccc

SEQ ID NO: 2749698 - DNA, 25 bp, Homo sapien
cctagaactgcttacccgtgtggag

SEQ ID NO: 2749699 - DNA, 25 bp, Homo sapien
aaacttggtgactttagctgcaggc

SEQ ID NO: 2749700 - DNA, 25 bp, Homo sapien
caggacacatgttaatacgggcagt

SEQ ID NO: 2749701 - DNA, 25 bp, Homo sapien
cacgtgggccgacgcgcggacccca

SEQ ID NO: 2749702 - DNA, 25 bp, Homo sapien
acggaccctcggatgagagacctgg

SEQ ID NO: 2749703 - DNA, 25 bp, Homo sapien
gtgacctgctgcacggaccctcgga

SEQ ID NO: 2749704 - DNA, 25 bp, Homo sapien
cccgcgaggtgcagggagcacgtgg

SEQ ID NO: 2749705 - DNA, 25 bp, Homo sapien
tgctcggaaacttccaccggcggcg

SEQ ID NO: 2749706 - DNA, 25 bp, Homo sapien
ggaagcgcctgcggtggcgtccgct

SEQ ID NO: 2749707 - DNA, 25 bp, Homo sapien
ccgcccggctgctcggaaacttcca

SEQ ID NO: 2749708 - DNA, 25 bp, Homo sapien
ggccacgctgccctgcgcacgcgca

SEQ ID NO: 2749709 - DNA, 25 bp, Homo sapien
cttcttcaacttcgccgacggcgcg

SEQ ID NO: 2749710 - DNA, 25 bp, Homo sapien
ggcggcgccttcttcaacttcgccg

SEQ ID NO: 2749711 - DNA, 25 bp, Homo sapien
tcgtccaacgcggagtcgggcaccg

SEQ ID NO: 2749712 - DNA, 25 bp, Homo sapien
cgcttgcacaagtcgccgtcgctgt

SEQ ID NO: 2749713 - DNA, 25 bp, Homo sapien
tcttgcacatagtagaaggagtgga

SEQ ID NO: 2749714 - DNA, 25 bp, Homo sapien
ccagggaacattaagtaggcaacta

SEQ ID NO: 2749715 - DNA, 25 bp, Homo sapien
ggctgtatgtgctgctccgtgtaac

SEQ ID NO: 2749716 - DNA, 25 bp, Homo sapien
aaatggccatgtatttagacagctc

SEQ ID NO: 2749717 - DNA, 25 bp, Homo sapien
tgacctgcagtctcgcaatcctgga

SEQ ID NO: 2749718 - DNA, 25 bp, Homo sapien
gaggatttcatagggaagccagtcc

SEQ ID NO: 2749719 - DNA, 25 bp, Homo sapien
ggaagcgggatttctgtcacctgga

SEQ ID NO: 2749720 - DNA, 25 bp, Homo sapien
tcaaatatgttggtgcagggccttt

SEQ ID NO: 2749721 - DNA, 25 bp, Homo sapien
gttttcttggtagcacggtatggca

SEQ ID NO: 2749722 - DNA, 25 bp, Homo sapien
catttttgtccgttggatgagtcac

SEQ ID NO: 2749723 - DNA, 25 bp, Homo sapien
cactgtgaggcctcctgattgtcag

SEQ ID NO: 2749724 - DNA, 25 bp, Homo sapien
agattcctttgatttgctgtcccag

SEQ ID NO: 2749725 - DNA, 25 bp, Homo sapien
tctgacgagcatcgttacaaacacc

SEQ ID NO: 2749726 - DNA, 25 bp, Homo sapien
ctaagttgggtcatcgtgtcggctg

SEQ ID NO: 2749727 - DNA, 25 bp, Homo sapien
catcgttacaaacaccatgatgagg

SEQ ID NO: 2749728 - DNA, 25 bp, Homo sapien
tgtcggctggttgtctgacgagcat

SEQ ID NO: 2749729 - DNA, 25 bp, Homo sapien
gagccacctggcagactgcccgtgg

SEQ ID NO: 2749730 - DNA, 25 bp, Homo sapien
ttcttttggtcggaagtgagtgaag

SEQ ID NO: 2749731 - DNA, 25 bp, Homo sapien
gagccaggtcgccctgaaggttttc

SEQ ID NO: 2749732 - DNA, 25 bp, Homo sapien
tgtcgggccccaggccgttgtcctg

SEQ ID NO: 2749733 - DNA, 25 bp, Homo sapien
tgaccacagagttttaatgttttgg

SEQ ID NO: 2749734 - DNA, 25 bp, Homo sapien
ctgaccacagagttttaatgttttg

SEQ ID NO: 2749735 - DNA, 25 bp, Homo sapien
tctacgcattagcaatattgactgt

SEQ ID NO: 2749736 - DNA, 25 bp, Homo sapien
taatctctacgcattagcaatattg

SEQ ID NO: 2749737 - DNA, 25 bp, Homo sapien
ttagcaatattgactgtaaacccac

SEQ ID NO: 2749738 - DNA, 25 bp, Homo sapien
cctgtactaatctctacgcattagc

SEQ ID NO: 2749739 - DNA, 25 bp, Homo sapien
ctacgggtctggcagtgcgtgtccc

SEQ ID NO: 2749740 - DNA, 25 bp, Homo sapien
gggtgtgcattttaaaactcgattc

SEQ ID NO: 2749741 - DNA, 25 bp, Homo sapien
taaggaaaccactacgggtctggca

SEQ ID NO: 2749742 - DNA, 25 bp, Homo sapien
caggtaccatgttccatttccgtca

SEQ ID NO: 2749743 - DNA, 25 bp, Homo sapien
taccactgtggtcgcgtgctacagg

SEQ ID NO: 2749744 - DNA, 25 bp, Homo sapien
tgtgtgtggacaacaatatggaagc

SEQ ID NO: 2749745 - DNA, 25 bp, Homo sapien
cgcgtgctacaggtttgacaaaaag

SEQ ID NO: 2749746 - DNA, 25 bp, Homo sapien
ggtgaagcaaatgaattggcctggc

SEQ ID NO: 2749747 - DNA, 25 bp, Homo sapien
ggagaacagagcagccctatcctca

SEQ ID NO: 2749748 - DNA, 25 bp, Homo sapien
gaacagagcagccctatcctcatgg

SEQ ID NO: 2749749 - DNA, 25 bp, Homo sapien
ctggagaacagagcagccctatcct

SEQ ID NO: 2749750 - DNA, 25 bp, Homo sapien
acagagcagccctatcctcatggca

SEQ ID NO: 2749751 - DNA, 25 bp, Homo sapien
tgacagcaccatatggtggtgctgg

SEQ ID NO: 2749752 - DNA, 25 bp, Homo sapien
gaagccgctgacagcaccatatggt

SEQ ID NO: 2749753 - DNA, 25 bp, Homo sapien
ctggggggaagacgacaggcagctg

SEQ ID NO: 2749754 - DNA, 25 bp, Homo sapien
gccgctgacagcaccatatggtggt

SEQ ID NO: 2749755 - DNA, 25 bp, Homo sapien
cctgaggtgtcaaatgggtcccgct

SEQ ID NO: 2749756 - DNA, 25 bp, Homo sapien
gagcagctgtgttaccagggagcct

SEQ ID NO: 2749757 - DNA, 25 bp, Homo sapien
cacagaggcacctgaggtgtcaaat

SEQ ID NO: 2749758 - DNA, 25 bp, Homo sapien
cagctgtgttaccagggagcctgag

SEQ ID NO: 2749759 - DNA, 25 bp, Homo sapien
ggaaggtaagggctttctgagggca

SEQ ID NO: 2749760 - DNA, 25 bp, Homo sapien
agggctttctgagggcacagtgaac

SEQ ID NO: 2749761 - DNA, 25 bp, Homo sapien
ctggaaggtaagggctttctgaggg

SEQ ID NO: 2749762 - DNA, 25 bp, Homo sapien
aaggtaagggctttctgagggcaca

SEQ ID NO: 2749763 - DNA, 25 bp, Homo sapien
ggtgactttgactacctttggtcaa

SEQ ID NO: 2749764 - DNA, 25 bp, Homo sapien
gtcattatcctcctgctgttgataa

SEQ ID NO: 2749765 - DNA, 25 bp, Homo sapien
ctgtgatgccctaagccctgagaac

SEQ ID NO: 2749766 - DNA, 25 bp, Homo sapien
tgaggttcttgccaatccttaggtg

SEQ ID NO: 2749767 - DNA, 25 bp, Homo sapien
tgagtttaggtggaacactggtgct

SEQ ID NO: 2749768 - DNA, 25 bp, Homo sapien
ctctttgtaaagtcctgtggcccct

SEQ ID NO: 2749769 - DNA, 25 bp, Homo sapien
cactgctctttgtaaagtcctgtgg

SEQ ID NO: 2749770 - DNA, 25 bp, Homo sapien
aacactggtgcttacattatgattg

SEQ ID NO: 2749771 - DNA, 25 bp, Homo sapien
atgtgaaactccatatgggttgaag

SEQ ID NO: 2749772 - DNA, 25 bp, Homo sapien
aaactccatatgggttgaagttctg

SEQ ID NO: 2749773 - DNA, 25 bp, Homo sapien
ccactttgttaccaaagtctgtcac

SEQ ID NO: 2749774 - DNA, 25 bp, Homo sapien
ttgttaccaaagtctgtcacagaca

SEQ ID NO: 2749775 - DNA, 25 bp, Homo sapien
tgggtgctggtttcaccactttgtt

SEQ ID NO: 2749776 - DNA, 25 bp, Homo sapien
acagacaggcattgggtgaacttac

SEQ ID NO: 2749777 - DNA, 25 bp, Homo sapien
gctcagcctgcagacgtagccccag

SEQ ID NO: 2749778 - DNA, 25 bp, Homo sapien
gagctgtgcacagacgcctgctgcg

SEQ ID NO: 2749779 - DNA, 25 bp, Homo sapien
gctgtgcacagacgcctgctgcgtg

SEQ ID NO: 2749780 - DNA, 25 bp, Homo sapien
ctgtgcacagacgcctgctgcgtgc

SEQ ID NO: 2749781 - DNA, 25 bp, Homo sapien
ttggcccctggacccggcattcgag

SEQ ID NO: 2749782 - DNA, 25 bp, Homo sapien
tcgaggccttccgagacattctgcc

SEQ ID NO: 2749783 - DNA, 25 bp, Homo sapien
ctgcgggtggaagtcttggcccctg

SEQ ID NO: 2749784 - DNA, 25 bp, Homo sapien
acccggcattcgaggccttccgaga

SEQ ID NO: 2749785 - DNA, 25 bp, Homo sapien
cggaacgggtcttcagaactgggca

SEQ ID NO: 2749786 - DNA, 25 bp, Homo sapien
catgcaccaaagcacggagagggac

SEQ ID NO: 2749787 - DNA, 25 bp, Homo sapien
gcaatggcaggacgggatccacagt

SEQ ID NO: 2749788 - DNA, 25 bp, Homo sapien
cagagcatggctccttttgatgggg

SEQ ID NO: 2749789 - DNA, 25 bp, Homo sapien
agagcctcgatgactcctctcctct

SEQ ID NO: 2749790 - DNA, 25 bp, Homo sapien
ggggaccagctgtctttcaggtaac

SEQ ID NO: 2749791 - DNA, 25 bp, Homo sapien
cttccacgtgcagtacggctctgca

SEQ ID NO: 2749792 - DNA, 25 bp, Homo sapien
ttctgtctccccttgtatgtcccca

SEQ ID NO: 2749793 - DNA, 25 bp, Homo sapien
caggggattggtggccgctttgtcg

SEQ ID NO: 2749794 - DNA, 25 bp, Homo sapien
tagggtccccgatgtcggacatgag

SEQ ID NO: 2749795 - DNA, 25 bp, Homo sapien
tgtcgttagggtccccgatgtcgga

SEQ ID NO: 2749796 - DNA, 25 bp, Homo sapien
cgctttgtcgttagggtccccgatg

SEQ ID NO: 2749797 - DNA, 25 bp, Homo sapien
tcctgggtccagtttccatctcact

SEQ ID NO: 2749798 - DNA, 25 bp, Homo sapien
gaactgaggcggtggcattctctgc

SEQ ID NO: 2749799 - DNA, 25 bp, Homo sapien
ccccgatgggcttgtgaactgaggc

SEQ ID NO: 2749800 - DNA, 25 bp, Homo sapien
ggctcagcctcagaacctcaggaat

SEQ ID NO: 2749801 - DNA, 25 bp, Homo sapien
agacatttccctgtcaccgccaagg

SEQ ID NO: 2749802 - DNA, 25 bp, Homo sapien
gacatttccctgtcaccgccaaggg

SEQ ID NO: 2749803 - DNA, 25 bp, Homo sapien
gcagacatttccctgtcaccgccaa

SEQ ID NO: 2749804 - DNA, 25 bp, Homo sapien
ccagcagacatttccctgtcaccgc

SEQ ID NO: 2749805 - DNA, 25 bp, Homo sapien
agcaggtctggacaggcgggacttg

SEQ ID NO: 2749806 - DNA, 25 bp, Homo sapien
ctggactggctccatggctaccctt

SEQ ID NO: 2749807 - DNA, 25 bp, Homo sapien
tccatggctacccttcccacaaggc

SEQ ID NO: 2749808 - DNA, 25 bp, Homo sapien
gacttgccttgtgtcttccagtctg

SEQ ID NO: 2749809 - DNA, 25 bp, Homo sapien
ggaacgaggcagcaacttgatcctc

SEQ ID NO: 2749810 - DNA, 25 bp, Homo sapien
caagttgctctgatttgtccttaca

SEQ ID NO: 2749811 - DNA, 25 bp, Homo sapien
gggaacgaggcagcaacttgatcct

SEQ ID NO: 2749812 - DNA, 25 bp, Homo sapien
tgatttgtccttacacagtagccct

SEQ ID NO: 2749813 - DNA, 25 bp, Homo sapien
ctgcctcgtagccggagggaatctc

SEQ ID NO: 2749814 - DNA, 25 bp, Homo sapien
agctgcctcgtagccggagggaatc

SEQ ID NO: 2749815 - DNA, 25 bp, Homo sapien
gcctcgtagccggagggaatctctt

SEQ ID NO: 2749816 - DNA, 25 bp, Homo sapien
caagctgcctcgtagccggagggaa

SEQ ID NO: 2749817 - DNA, 25 bp, Homo sapien
ctgaggtgtgctccttttaagactt

SEQ ID NO: 2749818 - DNA, 25 bp, Homo sapien
gaggtgtgctccttttaagacttcc

SEQ ID NO: 2749819 - DNA, 25 bp, Homo sapien
cctgaggtgtgctccttttaagact

SEQ ID NO: 2749820 - DNA, 25 bp, Homo sapien
tgaggtgtgctccttttaagacttc

SEQ ID NO: 2749821 - DNA, 25 bp, Homo sapien
agggcctccgagcatttggtgttca

SEQ ID NO: 2749822 - DNA, 25 bp, Homo sapien
cctgaatggaccaggttgctggtgg

SEQ ID NO: 2749823 - DNA, 25 bp, Homo sapien
ggttgctggtggacactgatccctg

SEQ ID NO: 2749824 - DNA, 25 bp, Homo sapien
ttggtcaaagcgtccaccctgaatg

SEQ ID NO: 2749825 - DNA, 25 bp, Homo sapien
gctgatttccgccttgtgtttttgc

SEQ ID NO: 2749826 - DNA, 25 bp, Homo sapien
ggggctggctgatttccgccttgtg

SEQ ID NO: 2749827 - DNA, 25 bp, Homo sapien
gctggctgatttccgccttgtgttt

SEQ ID NO: 2749828 - DNA, 25 bp, Homo sapien
gatttccgccttgtgtttttgcctc

SEQ ID NO: 2749829 - DNA, 25 bp, Homo sapien
ggagggatgcctgaaacccagcctt

SEQ ID NO: 2749830 - DNA, 25 bp, Homo sapien
aaggctgtgacatcagtcagcctca

SEQ ID NO: 2749831 - DNA, 25 bp, Homo sapien
tcatggagaactggaacaacgggct

SEQ ID NO: 2749832 - DNA, 25 bp, Homo sapien
tgtctgtgatgcgaaggctgtgaca

SEQ ID NO: 2749833 - DNA, 25 bp, Homo sapien
ttggagaacgcgtcaagaccagggc

SEQ ID NO: 2749834 - DNA, 25 bp, Homo sapien
ggctccgttcagaaggatctggatg

SEQ ID NO: 2749835 - DNA, 25 bp, Homo sapien
agagtggcagcaccaacaaccagtg

SEQ ID NO: 2749836 - DNA, 25 bp, Homo sapien
tcgcctggacgtgctgccgtgtcat

SEQ ID NO: 2749837 - DNA, 25 bp, Homo sapien
aacaaccagtgcgagggctccgttc

SEQ ID NO: 2749838 - DNA, 25 bp, Homo sapien
tcgtcagtccactcactcttattct

SEQ ID NO: 2749839 - DNA, 25 bp, Homo sapien
tctcagcaatggctatttccagcct

SEQ ID NO: 2749840 - DNA, 25 bp, Homo sapien
tcttcacccgtgaggaccatcttca

SEQ ID NO: 2749841 - DNA, 25 bp, Homo sapien
ttgctggcccctcgtcagtccactc

SEQ ID NO: 2749842 - DNA, 25 bp, Homo sapien
cagccctggccacgctttcccatca

SEQ ID NO: 2749843 - DNA, 25 bp, Homo sapien
tgcagccctggccacgctttcccat

SEQ ID NO: 2749844 - DNA, 25 bp, Homo sapien
ctctgcagccctggccacgctttcc

SEQ ID NO: 2749845 - DNA, 25 bp, Homo sapien
tctgcagccctggccacgctttccc

SEQ ID NO: 2749846 - DNA, 25 bp, Homo sapien
ctggcgttgagacctagtaactgtt

SEQ ID NO: 2749847 - DNA, 25 bp, Homo sapien
cgttgagacctagtaactgttttca

SEQ ID NO: 2749848 - DNA, 25 bp, Homo sapien
aggaatgaatttctggcgttgagac

SEQ ID NO: 2749849 - DNA, 25 bp, Homo sapien
gaatttctggcgttgagacctagta

SEQ ID NO: 2749850 - DNA, 25 bp, Homo sapien
gcttccctggctctatttgtgagag

SEQ ID NO: 2749851 - DNA, 25 bp, Homo sapien
tcacaaaccccaacaatttagtgct

SEQ ID NO: 2749852 - DNA, 25 bp, Homo sapien
cagtaccgtggctgggatcttccat

SEQ ID NO: 2749853 - DNA, 25 bp, Homo sapien
gacagatgctttcccagtggatggg

SEQ ID NO: 2749854 - DNA, 25 bp, Homo sapien
ctggcgggtcctcactgaaagatgg

SEQ ID NO: 2749855 - DNA, 25 bp, Homo sapien
tggtctctggaatccgaaacacctg

SEQ ID NO: 2749856 - DNA, 25 bp, Homo sapien
tgagtgttctgtaactggtaggcac

SEQ ID NO: 2749857 - DNA, 25 bp, Homo sapien
cacgtgtgatgtgcaaggactaaac

SEQ ID NO: 2749858 - DNA, 25 bp, Homo sapien
taaacaaggcgtgcctgtaaagtgc

SEQ ID NO: 2749859 - DNA, 25 bp, Homo sapien
ctaacttgacagctgcctcccggat

SEQ ID NO: 2749860 - DNA, 25 bp, Homo sapien
gatcccactagggaggtccacacct

SEQ ID NO: 2749861 - DNA, 25 bp, Homo sapien
cctcccggatcctgcttggacagat

SEQ ID NO: 2749862 - DNA, 25 bp, Homo sapien
cacacctgtgagagcggcaaatgca

SEQ ID NO: 2749863 - DNA, 25 bp, Homo sapien
tccagcctgtgcatcgggactcatg

SEQ ID NO: 2749864 - DNA, 25 bp, Homo sapien
gagatcttgactaaatttatcctga

SEQ ID NO: 2749865 - DNA, 25 bp, Homo sapien
tctgctgccagaacggagatcttga

SEQ ID NO: 2749866 - DNA, 25 bp, Homo sapien
tgagtcaaagccgtgcctctgctgc

SEQ ID NO: 2749867 - DNA, 25 bp, Homo sapien
ttatgcaactggcaccactgaatgt

SEQ ID NO: 2749868 - DNA, 25 bp, Homo sapien
gggttatgcaactggcaccactgaa

SEQ ID NO: 2749869 - DNA, 25 bp, Homo sapien
tccttgggttatgcaactggcacca

SEQ ID NO: 2749870 - DNA, 25 bp, Homo sapien
acagctccttgggttatgcaactgg

SEQ ID NO: 2749871 - DNA, 25 bp, Homo sapien
gcttcaggctttgcaaggggtctgg

SEQ ID NO: 2749872 - DNA, 25 bp, Homo sapien
acattgttagaagcaagagcagagc

SEQ ID NO: 2749873 - DNA, 25 bp, Homo sapien
ttctagatttctccgggcttgtggc

SEQ ID NO: 2749874 - DNA, 25 bp, Homo sapien
ccttgactccataagctaagctgag

SEQ ID NO: 2749875 - DNA, 25 bp, Homo sapien
ggaaaagtggatgggccttgactcc

SEQ ID NO: 2749876 - DNA, 25 bp, Homo sapien
gagattgcctgtatcttgatctgag

SEQ ID NO: 2749877 - DNA, 25 bp, Homo sapien
cattgggaaccatccaaggagcagc

SEQ ID NO: 2749878 - DNA, 25 bp, Homo sapien
gatgatctcgatctacgacccttcc

SEQ ID NO: 2749879 - DNA, 25 bp, Homo sapien
gatctgagtaatagctctccagttc

SEQ ID NO: 2749880 - DNA, 25 bp, Homo sapien
cacggttttgggtgcagacatgatc

SEQ ID NO: 2749881 - DNA, 25 bp, Homo sapien
ggacctctctgatgtgccttctgtg

SEQ ID NO: 2749882 - DNA, 25 bp, Homo sapien
ttagattggaattcaccagccccgg

SEQ ID NO: 2749883 - DNA, 25 bp, Homo sapien
gaaaattgcaagttgagctccggct

SEQ ID NO: 2749884 - DNA, 25 bp, Homo sapien
tgcttcacagcgtggaggtgcacag

SEQ ID NO: 2749885 - DNA, 25 bp, Homo sapien
cctgtctgttgcacgcgaggatgcg

SEQ ID NO: 2749886 - DNA, 25 bp, Homo sapien
gctctggagggaaatcgtgcatcct

SEQ ID NO: 2749887 - DNA, 25 bp, Homo sapien
caggcaagcagactgacacaggctc

SEQ ID NO: 2749888 - DNA, 25 bp, Homo sapien
cctgggtggtatcactctgtgctgc

SEQ ID NO: 2749889 - DNA, 25 bp, Homo sapien
atggagctcacctgaacgtctccag

SEQ ID NO: 2749890 - DNA, 25 bp, Homo sapien
gcgacttctcggcataaacagagct

SEQ ID NO: 2749891 - DNA, 25 bp, Homo sapien
cctgagctcctatacaattccgggt

SEQ ID NO: 2749892 - DNA, 25 bp, Homo sapien
tttggagcctgcggatcctgcctga

SEQ ID NO: 2749893 - DNA, 25 bp, Homo sapien
gagcctgcggatcctgcctgagctg

SEQ ID NO: 2749894 - DNA, 25 bp, Homo sapien
gctttggagcctgcggatcctgcct

SEQ ID NO: 2749895 - DNA, 25 bp, Homo sapien
tggagcctgcggatcctgcctgagc

SEQ ID NO: 2749896 - DNA, 25 bp, Homo sapien
ccctgagtgtatttctggttatgac

SEQ ID NO: 2749897 - DNA, 25 bp, Homo sapien
catctctctgcaggtattgggtttt

SEQ ID NO: 2749898 - DNA, 25 bp, Homo sapien
caaggattgagcattgttccctgag

SEQ ID NO: 2749899 - DNA, 25 bp, Homo sapien
gcaggtattgggttttctctgagct

SEQ ID NO: 2749900 - DNA, 25 bp, Homo sapien
cagtgtggagatatgtcgcctctgt

SEQ ID NO: 2749901 - DNA, 25 bp, Homo sapien
tgtggagatatgtcgcctctgtttt

SEQ ID NO: 2749902 - DNA, 25 bp, Homo sapien
gagatatgtcgcctctgttttgtct

SEQ ID NO: 2749903 - DNA, 25 bp, Homo sapien
ctgcagtgtggagatatgtcgcctc

SEQ ID NO: 2749904 - DNA, 25 bp, Homo sapien
aatcccagttgctcttgggtttcac

SEQ ID NO: 2749905 - DNA, 25 bp, Homo sapien
ggcaaaacgatgatgacaaattgct

SEQ ID NO: 2749906 - DNA, 25 bp, Homo sapien
caaaacgatgatgacaaattgcttt

SEQ ID NO: 2749907 - DNA, 25 bp, Homo sapien
ggaatcccagttgctcttgggtttc

SEQ ID NO: 2749908 - DNA, 25 bp, Homo sapien
ctttcagccagagacttgtccataa

SEQ ID NO: 2749909 - DNA, 25 bp, Homo sapien
gactttcagccagagacttgtccat

SEQ ID NO: 2749910 - DNA, 25 bp, Homo sapien
tttcagccagagacttgtccataat

SEQ ID NO: 2749911 - DNA, 25 bp, Homo sapien
actttcagccagagacttgtccata

SEQ ID NO: 2749912 - DNA, 25 bp, Homo sapien
ctcagacgatgaaacaccctttgcc

SEQ ID NO: 2749913 - DNA, 25 bp, Homo sapien
agacgatgaaacaccctttgccatc

SEQ ID NO: 2749914 - DNA, 25 bp, Homo sapien
tcagacgatgaaacaccctttgcca

SEQ ID NO: 2749915 - DNA, 25 bp, Homo sapien
cggagctacagcctgactggccagg

SEQ ID NO: 2749916 - DNA, 25 bp, Homo sapien
ggccaggcagatattagagttcctt

SEQ ID NO: 2749917 - DNA, 25 bp, Homo sapien
ccttgtctcagatttcctgtctggg

SEQ ID NO: 2749918 - DNA, 25 bp, Homo sapien
tgcaaaagtgtgccccggagctaca

SEQ ID NO: 2749919 - DNA, 25 bp, Homo sapien
ggtgctgcaaacacagctggaccca

SEQ ID NO: 2749920 - DNA, 25 bp, Homo sapien
tgagtgtaaaagacaacagtgcact

SEQ ID NO: 2749921 - DNA, 25 bp, Homo sapien
ctgtggccagacagagcaactgctc

SEQ ID NO: 2749922 - DNA, 25 bp, Homo sapien
gctggacccaaagtctgagtgtaaa

SEQ ID NO: 2749923 - DNA, 25 bp, Homo sapien
gcggtctctgtgtataggaaggtct

SEQ ID NO: 2749924 - DNA, 25 bp, Homo sapien
tctgtgtataggaaggtctagagct

SEQ ID NO: 2749925 - DNA, 25 bp, Homo sapien
ggtctagagctattgtgaacctgga

SEQ ID NO: 2749926 - DNA, 25 bp, Homo sapien
tgtgaacctggaccagggctagcag

SEQ ID NO: 2749927 - DNA, 25 bp, Homo sapien
cctgtccatgctgctagcggacgga

SEQ ID NO: 2749928 - DNA, 25 bp, Homo sapien
tccatgctgctagcggacggatgga

SEQ ID NO: 2749929 - DNA, 25 bp, Homo sapien
catcctgtccatgctgctagcggac

SEQ ID NO: 2749930 - DNA, 25 bp, Homo sapien
gccatcctgtccatgctgctagcgg

SEQ ID NO: 2749931 - DNA, 25 bp, Homo sapien
cgtcctcttcgaccgagcacacagc

SEQ ID NO: 2749932 - DNA, 25 bp, Homo sapien
ctcttcgaccgagcacacagcttca

SEQ ID NO: 2749933 - DNA, 25 bp, Homo sapien
ttcgaccgagcacacagcttcagga

SEQ ID NO: 2749934 - DNA, 25 bp, Homo sapien
tcgtcctcttcgaccgagcacacag

SEQ ID NO: 2749935 - DNA, 25 bp, Homo sapien
gggtgcacagatctccagggtttgc

SEQ ID NO: 2749936 - DNA, 25 bp, Homo sapien
caatgcacagagcacaaagcaccaa

SEQ ID NO: 2749937 - DNA, 25 bp, Homo sapien
tggtgtgtttcgtggtgcatggtga

SEQ ID NO: 2749938 - DNA, 25 bp, Homo sapien
catgtatttggctctccttggtgtg

SEQ ID NO: 2749939 - DNA, 25 bp, Homo sapien
gcactgcagagtttcagtgtgagtt

SEQ ID NO: 2749940 - DNA, 25 bp, Homo sapien
ggagcactgcagagtttcagtgtga

SEQ ID NO: 2749941 - DNA, 25 bp, Homo sapien
agcactgcagagtttcagtgtgagt

SEQ ID NO: 2749942 - DNA, 25 bp, Homo sapien
gagcactgcagagtttcagtgtgag

SEQ ID NO: 2749943 - DNA, 25 bp, Homo sapien
agagctatggaaggcctcgtgtcca

SEQ ID NO: 2749944 - DNA, 25 bp, Homo sapien
gagctatggaaggcctcgtgtccat

SEQ ID NO: 2749945 - DNA, 25 bp, Homo sapien
gcagagctatggaaggcctcgtgtc

SEQ ID NO: 2749946 - DNA, 25 bp, Homo sapien
cagagctatggaaggcctcgtgtcc

SEQ ID NO: 2749947 - DNA, 25 bp, Homo sapien
caatatgccagctggtggaattgct

SEQ ID NO: 2749948 - DNA, 25 bp, Homo sapien
agctcttcccactgatatgatctgc

SEQ ID NO: 2749949 - DNA, 25 bp, Homo sapien
atggcagcataaaacatctcgaggc

SEQ ID NO: 2749950 - DNA, 25 bp, Homo sapien
tcagtttgtcaatatgccagctggt

SEQ ID NO: 2749951 - DNA, 25 bp, Homo sapien
cctgggccagcagctaatcccgcct

SEQ ID NO: 2749952 - DNA, 25 bp, Homo sapien
ccagcagctaatcccgcctggccag

SEQ ID NO: 2749953 - DNA, 25 bp, Homo sapien
tgcctgggccagcagctaatcccgc

SEQ ID NO: 2749954 - DNA, 25 bp, Homo sapien
tgggccagcagctaatcccgcctgg

SEQ ID NO: 2749955 - DNA, 25 bp, Homo sapien
tttgtctggcagtgcaagagaggct

SEQ ID NO: 2749956 - DNA, 25 bp, Homo sapien
gcagcccgctgtcctcttatttttg

SEQ ID NO: 2749957 - DNA, 25 bp, Homo sapien
gctgacccagttctgctgacggatc

SEQ ID NO: 2749958 - DNA, 25 bp, Homo sapien
cgttttcgcatgagctgagctgacc

SEQ ID NO: 2749959 - DNA, 25 bp, Homo sapien
aattagacacaaggtatgtgtgccc

SEQ ID NO: 2749960 - DNA, 25 bp, Homo sapien
gtgcccacacactttgttgctattg

SEQ ID NO: 2749961 - DNA, 25 bp, Homo sapien
tgtcgattacgagcctgccagttgc

SEQ ID NO: 2749962 - DNA, 25 bp, Homo sapien
gctgtatttatgttgtcgattacga

SEQ ID NO: 2749963 - DNA, 25 bp, Homo sapien
tagggcatggggtcttttcaataaa

SEQ ID NO: 2749964 - DNA, 25 bp, Homo sapien
actcttttgctggatacctattatc

SEQ ID NO: 2749965 - DNA, 25 bp, Homo sapien
catagggcacgacccctcgtgaaga

SEQ ID NO: 2749966 - DNA, 25 bp, Homo sapien
tccaacttaaactggtcactgtggg

SEQ ID NO: 2749967 - DNA, 25 bp, Homo sapien
gacaggtctcccgtgccagggatct

SEQ ID NO: 2749968 - DNA, 25 bp, Homo sapien
cctgtaatgtcataacatgtagact

SEQ ID NO: 2749969 - DNA, 25 bp, Homo sapien
gctaagctctcaaaacctgtaatgt

SEQ ID NO: 2749970 - DNA, 25 bp, Homo sapien
taacatgtagactgtgcagggaagg

SEQ ID NO: 2749971 - DNA, 25 bp, Homo sapien
gcagcaccaggaacaattgtgtgca

SEQ ID NO: 2749972 - DNA, 25 bp, Homo sapien
agatgcaacagcaccagcagcacca

SEQ ID NO: 2749973 - DNA, 25 bp, Homo sapien
cagcagcaccaggaacaattgtgtg

SEQ ID NO: 2749974 - DNA, 25 bp, Homo sapien
accagcagcaccaggaacaattgtg

SEQ ID NO: 2749975 - DNA, 25 bp, Homo sapien
taagattggctatcaccccaaggtg

SEQ ID NO: 2749976 - DNA, 25 bp, Homo sapien
caattttgtatcagtcccagagcac

SEQ ID NO: 2749977 - DNA, 25 bp, Homo sapien
caggccgacctgcacaaagatggtt

SEQ ID NO: 2749978 - DNA, 25 bp, Homo sapien
gctccagcggatctgtgaccaattt

SEQ ID NO: 2749979 - DNA, 25 bp, Homo sapien
gattcagattggattctagagtcag

SEQ ID NO: 2749980 - DNA, 25 bp, Homo sapien
ggtgcattgtggtccttgcctgatg

SEQ ID NO: 2749981 - DNA, 25 bp, Homo sapien
tgcctgatgcaggaggtttggactc

SEQ ID NO: 2749982 - DNA, 25 bp, Homo sapien
ttggattctagagtcaggtgcattg

SEQ ID NO: 2749983 - DNA, 25 bp, Homo sapien
tcatagggttgtgcataggcaaaag

SEQ ID NO: 2749984 - DNA, 25 bp, Homo sapien
aggttcatagggttgtgcataggca

SEQ ID NO: 2749985 - DNA, 25 bp, Homo sapien
aaaggaggttcatagggttgtgcat

SEQ ID NO: 2749986 - DNA, 25 bp, Homo sapien
tagggttgtgcataggcaaaaggca

SEQ ID NO: 2749987 - DNA, 25 bp, Homo sapien
tgtttctggtggaggcgacccctga

SEQ ID NO: 2749988 - DNA, 25 bp, Homo sapien
tattaggaagacttgagcatgattc

SEQ ID NO: 2749989 - DNA, 25 bp, Homo sapien
tgcccttgtccctgcgatggctgca

SEQ ID NO: 2749990 - DNA, 25 bp, Homo sapien
gcagatgtccttggatttgagctcc

SEQ ID NO: 2749991 - DNA, 25 bp, Homo sapien
gcccttcttgtggccgatccttcat

SEQ ID NO: 2749992 - DNA, 25 bp, Homo sapien
tgggcccttcttgtggccgatcctt

SEQ ID NO: 2749993 - DNA, 25 bp, Homo sapien
cttcttgtggccgatccttcatcct

SEQ ID NO: 2749994 - DNA, 25 bp, Homo sapien
ggcccttcttgtggccgatccttca

SEQ ID NO: 2749995 - DNA, 25 bp, Homo sapien
gaattgcagcatcatgtcatcagaa

SEQ ID NO: 2749996 - DNA, 25 bp, Homo sapien
tcatgatacgcaagagacacaaccc

SEQ ID NO: 2749997 - DNA, 25 bp, Homo sapien
tctctgggaaggacaaccttctcct

SEQ ID NO: 2749998 - DNA, 25 bp, Homo sapien
ggatgcttcctgttgcagcatttca

SEQ ID NO: 2749999 - DNA, 25 bp, Homo sapien
ggccagtctcttcttgaaccctacg

SEQ ID NO: 2750000 - DNA, 25 bp, Homo sapien
catgtgggagttgagtagtcattac

SEQ ID NO: 2750001 - DNA, 25 bp, Homo sapien
ggagagaatcccgtcattaaaggga

SEQ ID NO: 2750002 - DNA, 25 bp, Homo sapien
tcacgtcggaacatgctcctgttat

SEQ ID NO: 2750003 - DNA, 25 bp, Homo sapien
tccccagttcagttaggagccttgt

SEQ ID NO: 2750004 - DNA, 25 bp, Homo sapien
ctccccagttcagttaggagccttg

SEQ ID NO: 2750005 - DNA, 25 bp, Homo sapien
tctccccagttcagttaggagcctt

SEQ ID NO: 2750006 - DNA, 25 bp, Homo sapien
ccagaccatttccatattgtccata

SEQ ID NO: 2750007 - DNA, 25 bp, Homo sapien
atgcaatcgtctggttttctccaag

SEQ ID NO: 2750008 - DNA, 25 bp, Homo sapien
catctgatacaacgctgggcactgc

SEQ ID NO: 2750009 - DNA, 25 bp, Homo sapien
gagcaaagtaatggcccatctgata

SEQ ID NO: 2750010 - DNA, 25 bp, Homo sapien
ggctcatatgcaatcgtctggtttt

SEQ ID NO: 2750011 - DNA, 25 bp, Homo sapien
tctgagacagtacagtaatgtgaag

SEQ ID NO: 2750012 - DNA, 25 bp, Homo sapien
accccttctctgcttcggtgtcgtt

SEQ ID NO: 2750013 - DNA, 25 bp, Homo sapien
tctgcttcggtgtcgtttctgagac

SEQ ID NO: 2750014 - DNA, 25 bp, Homo sapien
cgctgattgagatgaggaccccttc

SEQ ID NO: 2750015 - DNA, 25 bp, Homo sapien
caaagcaatctctgtgtagtatgat

SEQ ID NO: 2750016 - DNA, 25 bp, Homo sapien
tctgtctgtattgcattcacattct

SEQ ID NO: 2750017 - DNA, 25 bp, Homo sapien
gctgtggcgtgtagtattccgttca

SEQ ID NO: 2750018 - DNA, 25 bp, Homo sapien
cactgctgcacctctgtctgtattg

SEQ ID NO: 2750019 - DNA, 25 bp, Homo sapien
tgagagatgacccccggctcctggg

SEQ ID NO: 2750020 - DNA, 25 bp, Homo sapien
atgagagatgacccccggctcctgg

SEQ ID NO: 2750021 - DNA, 25 bp, Homo sapien
tcttgcattcctaacgttttgggga

SEQ ID NO: 2750022 - DNA, 25 bp, Homo sapien
tgcattcctaacgttttggggataa

SEQ ID NO: 2750023 - DNA, 25 bp, Homo sapien
gataagttgagttttagagacattc

SEQ ID NO: 2750024 - DNA, 25 bp, Homo sapien
tggggataagttgagttttagagac

SEQ ID NO: 2750025 - DNA, 25 bp, Homo sapien
gtggttctctgccttgagagctgct

SEQ ID NO: 2750026 - DNA, 25 bp, Homo sapien
tcagaagtatgagtggttctctgcc

SEQ ID NO: 2750027 - DNA, 25 bp, Homo sapien
tgctaccctcaaggtcttggtcctt

SEQ ID NO: 2750028 - DNA, 25 bp, Homo sapien
tctcccggtcagtagctctagctga

SEQ ID NO: 2750029 - DNA, 25 bp, Homo sapien
cgtatagatcctatctgtaaaactt

SEQ ID NO: 2750030 - DNA, 25 bp, Homo sapien
aagatctattctagcagaaggataa

SEQ ID NO: 2750031 - DNA, 25 bp, Homo sapien
ttattccgtatagatcctatctgta

SEQ ID NO: 2750032 - DNA, 25 bp, Homo sapien
gatctattctagcagaaggataaat

SEQ ID NO: 2750033 - DNA, 25 bp, Homo sapien
gtggaaatgatagtaaggctctttg

SEQ ID NO: 2750034 - DNA, 25 bp, Homo sapien
cctgctgttatcctcggggagctgg

SEQ ID NO: 2750035 - DNA, 25 bp, Homo sapien
cagcaaaattcatggctggccatct

SEQ ID NO: 2750036 - DNA, 25 bp, Homo sapien
atctggcttggttttattaacctat

SEQ ID NO: 2750037 - DNA, 25 bp, Homo sapien
aatctgtaacggctgcagagaagca

SEQ ID NO: 2750038 - DNA, 25 bp, Homo sapien
agataaatctgtaacggctgcagag

SEQ ID NO: 2750039 - DNA, 25 bp, Homo sapien
accagtttcacaagggatgtgagga

SEQ ID NO: 2750040 - DNA, 25 bp, Homo sapien
ccagtttcacaagggatgtgaggac

SEQ ID NO: 2750041 - DNA, 25 bp, Homo sapien
cacgcaattttactgtggtctgtcc

SEQ ID NO: 2750042 - DNA, 25 bp, Homo sapien
ctgcagtttaacacgcaattttact

SEQ ID NO: 2750043 - DNA, 25 bp, Homo sapien
cgtctgtgtccattgcagctggcaa

SEQ ID NO: 2750044 - DNA, 25 bp, Homo sapien
gggtggctgtcatcctcatgatgcg

SEQ ID NO: 2750045 - DNA, 25 bp, Homo sapien
ggtcagtgattaccaatggcagtct

SEQ ID NO: 2750046 - DNA, 25 bp, Homo sapien
gtgattaccaatggcagtctacaaa

SEQ ID NO: 2750047 - DNA, 25 bp, Homo sapien
tcagtgattaccaatggcagtctac

SEQ ID NO: 2750048 - DNA, 25 bp, Homo sapien
cagtgattaccaatggcagtctaca

SEQ ID NO: 2750049 - DNA, 25 bp, Homo sapien
tctctgaatgtcaataactcgttgt

SEQ ID NO: 2750050 - DNA, 25 bp, Homo sapien
gattgaaatttctgctacactgata

SEQ ID NO: 2750051 - DNA, 25 bp, Homo sapien
tatgtcagctgatcttgttcccagg

SEQ ID NO: 2750052 - DNA, 25 bp, Homo sapien
ggcatttcctggacagtcaagcatg

SEQ ID NO: 2750053 - DNA, 25 bp, Homo sapien
gtaattgacaaagacatctgcttct

SEQ ID NO: 2750054 - DNA, 25 bp, Homo sapien
tgtgaccctcgctctctctatctgt

SEQ ID NO: 2750055 - DNA, 25 bp, Homo sapien
taccatcaagatagggcttagacat

SEQ ID NO: 2750056 - DNA, 25 bp, Homo sapien
tattctctcgctgtctttccgtgaa

SEQ ID NO: 2750057 - DNA, 25 bp, Homo sapien
tcattgtctagccttctgttcttcc

SEQ ID NO: 2750058 - DNA, 25 bp, Homo sapien
ctaagattcagatttatccctgttt

SEQ ID NO: 2750059 - DNA, 25 bp, Homo sapien
tctataattctagcttctttcctta

SEQ ID NO: 2750060 - DNA, 25 bp, Homo sapien
actgcctctgtctaagattcagatt

SEQ ID NO: 2750061 - DNA, 25 bp, Homo sapien
ttctttggtgctcacgtccccttta

SEQ ID NO: 2750062 - DNA, 25 bp, Homo sapien
tcatctttgcaagtggaagctcgat

SEQ ID NO: 2750063 - DNA, 25 bp, Homo sapien
ttagctcgcagatgccttccaagag

SEQ ID NO: 2750064 - DNA, 25 bp, Homo sapien
tctggaatgctggtctcccataagc

SEQ ID NO: 2750065 - DNA, 25 bp, Homo sapien
cattccgggaaaagcgtggtctgaa

SEQ ID NO: 2750066 - DNA, 25 bp, Homo sapien
ttccataagggatgcgcgcacatcc

SEQ ID NO: 2750067 - DNA, 25 bp, Homo sapien
tctcaacatccattaccagtgcagg

SEQ ID NO: 2750068 - DNA, 25 bp, Homo sapien
tgctacagctgggatatctaattca

SEQ ID NO: 2750069 - DNA, 25 bp, Homo sapien
aactgctcagggaggcaagaagcca

SEQ ID NO: 2750070 - DNA, 25 bp, Homo sapien
tgagaactgatcacctgtagagctg

SEQ ID NO: 2750071 - DNA, 25 bp, Homo sapien
gggatgcacacacgaacccctggtt

SEQ ID NO: 2750072 - DNA, 25 bp, Homo sapien
gttgtctgtagcatccaccatggtg

SEQ ID NO: 2750073 - DNA, 25 bp, Homo sapien
ttacagcatcacgaaggcagtcccg

SEQ ID NO: 2750074 - DNA, 25 bp, Homo sapien
tatgaattaagtaagccacgaccca

SEQ ID NO: 2750075 - DNA, 25 bp, Homo sapien
tgattcagacgccagtgtgtcacat

SEQ ID NO: 2750076 - DNA, 25 bp, Homo sapien
tcttagtacccacagcgtaggaatc

SEQ ID NO: 2750077 - DNA, 25 bp, Homo sapien
agggccaggctttcttatgattcag

SEQ ID NO: 2750078 - DNA, 25 bp, Homo sapien
tctttagctttcttgtaaggaaata

SEQ ID NO: 2750079 - DNA, 25 bp, Homo sapien
taccttagggtaattgcagtaagag

SEQ ID NO: 2750080 - DNA, 25 bp, Homo sapien
gcagtaagagaaaatgctagtcaaa

SEQ ID NO: 2750081 - DNA, 25 bp, Homo sapien
tatatccatttaataccttagggta

SEQ ID NO: 2750082 - DNA, 25 bp, Homo sapien
tgagctccatgcaggctagagggta

SEQ ID NO: 2750083 - DNA, 25 bp, Homo sapien
agaggggagctatggctccttgcca

SEQ ID NO: 2750084 - DNA, 25 bp, Homo sapien
ccactgggaccccaccctgattcag

SEQ ID NO: 2750085 - DNA, 25 bp, Homo sapien
cccaccctgattcaggtagagaggg

SEQ ID NO: 2750086 - DNA, 25 bp, Homo sapien
gagtaattcaaatccatggcggcat

SEQ ID NO: 2750087 - DNA, 25 bp, Homo sapien
tgtggaagacaaccaagattaactg

SEQ ID NO: 2750088 - DNA, 25 bp, Homo sapien
caagattaactgatggtgtggagag

SEQ ID NO: 2750089 - DNA, 25 bp, Homo sapien
cccatgttcgtgataatttaatgag

SEQ ID NO: 2750090 - DNA, 25 bp, Homo sapien
tagattagaaattgtatttggaggg

SEQ ID NO: 2750091 - DNA, 25 bp, Homo sapien
tttagattagaaattgtatttggag

SEQ ID NO: 2750092 - DNA, 25 bp, Homo sapien
agattagaaattgtatttggagggc

SEQ ID NO: 2750093 - DNA, 25 bp, Homo sapien
agtttagattagaaattgtatttgg

SEQ ID NO: 2750094 - DNA, 25 bp, Homo sapien
accctactggtgctctgatcttgaa

SEQ ID NO: 2750095 - DNA, 25 bp, Homo sapien
tctgctctggcagaattagcgggcc

SEQ ID NO: 2750096 - DNA, 25 bp, Homo sapien
tgatcttgaaagtccggcttccaga

SEQ ID NO: 2750097 - DNA, 25 bp, Homo sapien
gaataagctaccgaagatcatgagg

SEQ ID NO: 2750098 - DNA, 25 bp, Homo sapien
taattagcaaggatccagggcacca

SEQ ID NO: 2750099 - DNA, 25 bp, Homo sapien
gagttcccaagtgttgcagtgcagc

SEQ ID NO: 2750100 - DNA, 25 bp, Homo sapien
gccccagagtgcaggatatgagctt

SEQ ID NO: 2750101 - DNA, 25 bp, Homo sapien
gacttggaagaataggcagcttgca

SEQ ID NO: 2750102 - DNA, 25 bp, Homo sapien
cagcacatagtttctctgcgtaaat

SEQ ID NO: 2750103 - DNA, 25 bp, Homo sapien
catagtttctctgcgtaaatgtttg

SEQ ID NO: 2750104 - DNA, 25 bp, Homo sapien
cacatagtttctctgcgtaaatgtt

SEQ ID NO: 2750105 - DNA, 25 bp, Homo sapien
agcacatagtttctctgcgtaaatg

SEQ ID NO: 2750106 - DNA, 25 bp, Homo sapien
aaatatgcactttggctagtgtctg

SEQ ID NO: 2750107 - DNA, 25 bp, Homo sapien
taaacttcgaagatccattagcacc

SEQ ID NO: 2750108 - DNA, 25 bp, Homo sapien
gccagtccattatgtaattaattaa

SEQ ID NO: 2750109 - DNA, 25 bp, Homo sapien
ccatgaataaacttcgaagatccat

SEQ ID NO: 2750110 - DNA, 25 bp, Homo sapien
cttacactggttccttcttatctgc

SEQ ID NO: 2750111 - DNA, 25 bp, Homo sapien
tgaaagaattgtcatcaagttctga

SEQ ID NO: 2750112 - DNA, 25 bp, Homo sapien
cattgttgaagaactagtgtgatct

SEQ ID NO: 2750113 - DNA, 25 bp, Homo sapien
catattcatggtgttcttacactgg

SEQ ID NO: 2750114 - DNA, 25 bp, Homo sapien
taataacgcatcctgcacaacgagc

SEQ ID NO: 2750115 - DNA, 25 bp, Homo sapien
gctgttcctatagacgctccatggg

SEQ ID NO: 2750116 - DNA, 25 bp, Homo sapien
ttaataacaggaagctcattggtcc

SEQ ID NO: 2750117 - DNA, 25 bp, Homo sapien
tcaagttgtgctctagggccaaacc

SEQ ID NO: 2750118 - DNA, 25 bp, Homo sapien
tgcaggatgtcccagggcccgactt

SEQ ID NO: 2750119 - DNA, 25 bp, Homo sapien
catctcaccatcactctcagatgat

SEQ ID NO: 2750120 - DNA, 25 bp, Homo sapien
tctcagatgattgcctggcagctgc

SEQ ID NO: 2750121 - DNA, 25 bp, Homo sapien
gggcttggagagtccatctcaccat

SEQ ID NO: 2750122 - DNA, 25 bp, Homo sapien
tccctgaggtatgtctttcctgagg

SEQ ID NO: 2750123 - DNA, 25 bp, Homo sapien
ccctgaggtatgtctttcctgaggt

SEQ ID NO: 2750124 - DNA, 25 bp, Homo sapien
cctgaggtatgtctttcctgaggtt

SEQ ID NO: 2750125 - DNA, 25 bp, Homo sapien
ctccctgaggtatgtctttcctgag

SEQ ID NO: 2750126 - DNA, 25 bp, Homo sapien
aaatcatataggcctgtctgggacc

SEQ ID NO: 2750127 - DNA, 25 bp, Homo sapien
ttagtaaatcatataggcctgtctg

SEQ ID NO: 2750128 - DNA, 25 bp, Homo sapien
caagaatgtttagtaaatcatatag

SEQ ID NO: 2750129 - DNA, 25 bp, Homo sapien
tgtttagtaaatcatataggcctgt

SEQ ID NO: 2750130 - DNA, 25 bp, Homo sapien
tcttaactcccaaactgagcgattc

SEQ ID NO: 2750131 - DNA, 25 bp, Homo sapien
tgagcgattctgaactgaagccctg

SEQ ID NO: 2750132 - DNA, 25 bp, Homo sapien
gccagccatccctttacattctgta

SEQ ID NO: 2750133 - DNA, 25 bp, Homo sapien
ctgtctacactggaatcgtgggcat

SEQ ID NO: 2750134 - DNA, 25 bp, Homo sapien
caaatctccagggatgaatgttggt

SEQ ID NO: 2750135 - DNA, 25 bp, Homo sapien
tcccacgttcagtggcccctggttg

SEQ ID NO: 2750136 - DNA, 25 bp, Homo sapien
gctcttcataacttttaggcactga

SEQ ID NO: 2750137 - DNA, 25 bp, Homo sapien
ctaagtgaaagacctagtcccacgt

SEQ ID NO: 2750138 - DNA, 25 bp, Homo sapien
gttggtattcttcaacctgctctgc

SEQ ID NO: 2750139 - DNA, 25 bp, Homo sapien
gtgttggtattcttcaacctgctct

SEQ ID NO: 2750140 - DNA, 25 bp, Homo sapien
tgttggtattcttcaacctgctctg

SEQ ID NO: 2750141 - DNA, 25 bp, Homo sapien
gggatgatgtgtggaatgtgttcat

SEQ ID NO: 2750142 - DNA, 25 bp, Homo sapien
atagatgtgggatgatgtgtggaat

SEQ ID NO: 2750143 - DNA, 25 bp, Homo sapien
tgtgggatgatgtgtggaatgtgtt

SEQ ID NO: 2750144 - DNA, 25 bp, Homo sapien
tatagatgtgggatgatgtgtggaa

SEQ ID NO: 2750145 - DNA, 25 bp, Homo sapien
gatgtagcaccaagctcaagttttg

SEQ ID NO: 2750146 - DNA, 25 bp, Homo sapien
tccactgagtcccttgcacagagat

SEQ ID NO: 2750147 - DNA, 25 bp, Homo sapien
caagatatctgtaaccctcggcgag

SEQ ID NO: 2750148 - DNA, 25 bp, Homo sapien
cctcggcgagtggtgtgctatatgt

SEQ ID NO: 2750149 - DNA, 25 bp, Homo sapien
gggttaattaatactgctcagtgct

SEQ ID NO: 2750150 - DNA, 25 bp, Homo sapien
ggcctgccagatcttgtaggagtct

SEQ ID NO: 2750151 - DNA, 25 bp, Homo sapien
tttgatcaccaggtatatgctcatc

SEQ ID NO: 2750152 - DNA, 25 bp, Homo sapien
gattcagagacctgatccatggtgt

SEQ ID NO: 2750153 - DNA, 25 bp, Homo sapien
aagtgagccatgcattaaaaagggc

SEQ ID NO: 2750154 - DNA, 25 bp, Homo sapien
tgatttttgacacagggacatagat

SEQ ID NO: 2750155 - DNA, 25 bp, Homo sapien
tcctcttcaagaatagatccaaggt

SEQ ID NO: 2750156 - DNA, 25 bp, Homo sapien
catagataatacacttccctggcag

SEQ ID NO: 2750157 - DNA, 25 bp, Homo sapien
catcattctgcacggcggtgagggt

SEQ ID NO: 2750158 - DNA, 25 bp, Homo sapien
tattcataccaggagggtgcatcga

SEQ ID NO: 2750159 - DNA, 25 bp, Homo sapien
ggtgcatcgacacgcacaccatcat

SEQ ID NO: 2750160 - DNA, 25 bp, Homo sapien
agagctgggccttgaatattcatac

SEQ ID NO: 2750161 - DNA, 25 bp, Homo sapien
tagaaggacaccattcatgggattt

SEQ ID NO: 2750162 - DNA, 25 bp, Homo sapien
ttagaaggacaccattcatgggatt

SEQ ID NO: 2750163 - DNA, 25 bp, Homo sapien
cttagaaggacaccattcatgggat

SEQ ID NO: 2750164 - DNA, 25 bp, Homo sapien
ccataagccggctgtgagacttgaa

SEQ ID NO: 2750165 - DNA, 25 bp, Homo sapien
acttgaagttcccatgctcataggg

SEQ ID NO: 2750166 - DNA, 25 bp, Homo sapien
tttctgatgaaacatagacattggc

SEQ ID NO: 2750167 - DNA, 25 bp, Homo sapien
gttttttaggcatctcagccacttc

SEQ ID NO: 2750168 - DNA, 25 bp, Homo sapien
ctgatgcttatttgctgccctggga

SEQ ID NO: 2750169 - DNA, 25 bp, Homo sapien
gaaagtggcctcagacaatacataa

SEQ ID NO: 2750170 - DNA, 25 bp, Homo sapien
caaactctcctagcaataccttggg

SEQ ID NO: 2750171 - DNA, 25 bp, Homo sapien
tgatccttgatccagtcagcagttg

SEQ ID NO: 2750172 - DNA, 25 bp, Homo sapien
tgctgcctctcaggacggtgcctct

SEQ ID NO: 2750173 - DNA, 25 bp, Homo sapien
gctgcctctcaggacggtgcctctg

SEQ ID NO: 2750174 - DNA, 25 bp, Homo sapien
catgtgccacagcttcagaaactcc

SEQ ID NO: 2750175 - DNA, 25 bp, Homo sapien
cctagaactagtcgcatcatgctgt

SEQ ID NO: 2750176 - DNA, 25 bp, Homo sapien
tgctggacctgtgcaccatgtgcca

SEQ ID NO: 2750177 - DNA, 25 bp, Homo sapien
ttccatcagatggtcaaagcccagc

SEQ ID NO: 2750178 - DNA, 25 bp, Homo sapien
aggttgtgatgttgtagcctgcagc

SEQ ID NO: 2750179 - DNA, 25 bp, Homo sapien
gaggttgtgatgttgtagcctgcag

SEQ ID NO: 2750180 - DNA, 25 bp, Homo sapien
ggttgtgatgttgtagcctgcagct

SEQ ID NO: 2750181 - DNA, 25 bp, Homo sapien
gttgtgatgttgtagcctgcagctt

SEQ ID NO: 2750182 - DNA, 25 bp, Homo sapien
aagttcctgacgtggtggcatagag

SEQ ID NO: 2750183 - DNA, 25 bp, Homo sapien
cattttatacttgtccaggcagcag

SEQ ID NO: 2750184 - DNA, 25 bp, Homo sapien
gattacagagcaggacttgcgtgga

SEQ ID NO: 2750185 - DNA, 25 bp, Homo sapien
tatagggtcgggtgtagctaagcca

SEQ ID NO: 2750186 - DNA, 25 bp, Homo sapien
gaagatgcaagggtatcatcgagct

SEQ ID NO: 2750187 - DNA, 25 bp, Homo sapien
gatgcaagggtatcatcgagctgga

SEQ ID NO: 2750188 - DNA, 25 bp, Homo sapien
agggtatcatcgagctggagcctga

SEQ ID NO: 2750189 - DNA, 25 bp, Homo sapien
agtggaagatgcaagggtatcatcg

SEQ ID NO: 2750190 - DNA, 25 bp, Homo sapien
tatcacttgcctgctacagcatggt

SEQ ID NO: 2750191 - DNA, 25 bp, Homo sapien
cagacaagccttacaagttaagttc

SEQ ID NO: 2750192 - DNA, 25 bp, Homo sapien
ttacaagttaagttcaggatctgcg

SEQ ID NO: 2750193 - DNA, 25 bp, Homo sapien
tgagcccgtcccctcttaatcaata

SEQ ID NO: 2750194 - DNA, 25 bp, Homo sapien
cggctcagcttccttatggtgctct

SEQ ID NO: 2750195 - DNA, 25 bp, Homo sapien
tgccccacagataaaatgtcaatct

SEQ ID NO: 2750196 - DNA, 25 bp, Homo sapien
ttctggttgcggctcagcttcctta

SEQ ID NO: 2750197 - DNA, 25 bp, Homo sapien
gctctcacacccataaaacaccaag

SEQ ID NO: 2750198 - DNA, 25 bp, Homo sapien
ttaattagaggcggtggcaggaggg

SEQ ID NO: 2750199 - DNA, 25 bp, Homo sapien
agaggcggtggcaggaggggccctg

SEQ ID NO: 2750200 - DNA, 25 bp, Homo sapien
gcggtggcaggaggggccctgaaaa

SEQ ID NO: 2750201 - DNA, 25 bp, Homo sapien
aggcggtggcaggaggggccctgaa

SEQ ID NO: 2750202 - DNA, 25 bp, Homo sapien
gggacaccagaaggggcttccagct

SEQ ID NO: 2750203 - DNA, 25 bp, Homo sapien
gcataccttgttgggccaggttgtt

SEQ ID NO: 2750204 - DNA, 25 bp, Homo sapien
gccagctgcataccttgttgggcca

SEQ ID NO: 2750205 - DNA, 25 bp, Homo sapien
ccttgttgggccaggttgttgtaag

SEQ ID NO: 2750206 - DNA, 25 bp, Homo sapien
ggaagtttgctaaacaagcctagta

SEQ ID NO: 2750207 - DNA, 25 bp, Homo sapien
gaagtttgctaaacaagcctagtaa

SEQ ID NO: 2750208 - DNA, 25 bp, Homo sapien
agttaatcacgatgttgcattcttg

SEQ ID NO: 2750209 - DNA, 25 bp, Homo sapien
agattggccataagcgccggtggcg

SEQ ID NO: 2750210 - DNA, 25 bp, Homo sapien
ggagccgccttgagattggccataa

SEQ ID NO: 2750211 - DNA, 25 bp, Homo sapien
tcagccggtgggctccaagtaggaa

SEQ ID NO: 2750212 - DNA, 25 bp, Homo sapien
ggtcgcgagaggcgtcaggatccct

SEQ ID NO: 2750213 - DNA, 25 bp, Homo sapien
gatagtttttgagctgttgagttaa

SEQ ID NO: 2750214 - DNA, 25 bp, Homo sapien
ctgatagtttttgagctgttgagtt

SEQ ID NO: 2750215 - DNA, 25 bp, Homo sapien
ttactgatagtttttgagctgttga

SEQ ID NO: 2750216 - DNA, 25 bp, Homo sapien
tactgatagtttttgagctgttgag

SEQ ID NO: 2750217 - DNA, 25 bp, Homo sapien
ggcccactgtaaagtaacacaatgt

SEQ ID NO: 2750218 - DNA, 25 bp, Homo sapien
gccatggcccactgtaaagtaacac

SEQ ID NO: 2750219 - DNA, 25 bp, Homo sapien
gagggagccatggcccactgtaaag

SEQ ID NO: 2750220 - DNA, 25 bp, Homo sapien
cacagggttagaacccctcttctgg

SEQ ID NO: 2750221 - DNA, 25 bp, Homo sapien
tgtcaaacctacagccctcgggaag

SEQ ID NO: 2750222 - DNA, 25 bp, Homo sapien
tcgggaaggctttggccaaatccat

SEQ ID NO: 2750223 - DNA, 25 bp, Homo sapien
agcctgtcaaacctacagccctcgg

SEQ ID NO: 2750224 - DNA, 25 bp, Homo sapien
ccagcctgtcaaacctacagccctc

SEQ ID NO: 2750225 - DNA, 25 bp, Homo sapien
agactgtattcacaaggtcacgtgg

SEQ ID NO: 2750226 - DNA, 25 bp, Homo sapien
tcacgtggcggcttacacttctgta

SEQ ID NO: 2750227 - DNA, 25 bp, Homo sapien
gccataagacaagacaagacgaaag

SEQ ID NO: 2750228 - DNA, 25 bp, Homo sapien
cacgtacctaggattggtgatccac

SEQ ID NO: 2750229 - DNA, 25 bp, Homo sapien
tagaagaataggatgcaggaggtgc

SEQ ID NO: 2750230 - DNA, 25 bp, Homo sapien
gaggtgctgcctaagcctgggtgct

SEQ ID NO: 2750231 - DNA, 25 bp, Homo sapien
ggtgctcctgggtgttcttcattcc

SEQ ID NO: 2750232 - DNA, 25 bp, Homo sapien
ctttttcttgtctcctcggtagaag

SEQ ID NO: 2750233 - DNA, 25 bp, Homo sapien
tgcttccgcatgtgctcctcctgct

SEQ ID NO: 2750234 - DNA, 25 bp, Homo sapien
gctcctcctgctttcgcacctgctc

SEQ ID NO: 2750235 - DNA, 25 bp, Homo sapien
tgcttccgcatctgctcttcctgct

SEQ ID NO: 2750236 - DNA, 25 bp, Homo sapien
tgttcctcctgctccgccatttgct

SEQ ID NO: 2750237 - DNA, 25 bp, Homo sapien
gcttcagcatctgcttctcctgctt

SEQ ID NO: 2750238 - DNA, 25 bp, Homo sapien
cttctgcttcagcatctgcttctcc

SEQ ID NO: 2750239 - DNA, 25 bp, Homo sapien
tgcttcagcatctgcttctcctgct

SEQ ID NO: 2750240 - DNA, 25 bp, Homo sapien
tctgcttcagcatctgcttctcctg

SEQ ID NO: 2750241 - DNA, 25 bp, Homo sapien
cacatcttctcctgcaaagtgttgg

SEQ ID NO: 2750242 - DNA, 25 bp, Homo sapien
ctcgtgcttccgtagcttctcctga

SEQ ID NO: 2750243 - DNA, 25 bp, Homo sapien
tcttctcctgcaaagtgttggtttg

SEQ ID NO: 2750244 - DNA, 25 bp, Homo sapien
gtagcttctcctgatcccgtagctc

SEQ ID NO: 2750245 - DNA, 25 bp, Homo sapien
ctttttagctccttgatgtggagct

SEQ ID NO: 2750246 - DNA, 25 bp, Homo sapien
ctgtggcagcgggattttgtccgtc

SEQ ID NO: 2750247 - DNA, 25 bp, Homo sapien
cagcgggattttgtccgtctccagt

SEQ ID NO: 2750248 - DNA, 25 bp, Homo sapien
tggcagcgggattttgtccgtctcc

SEQ ID NO: 2750249 - DNA, 25 bp, Homo sapien
tggagcttccctgcgcacacatgta

SEQ ID NO: 2750250 - DNA, 25 bp, Homo sapien
taaacctgtatgaccccctagcatg

SEQ ID NO: 2750251 - DNA, 25 bp, Homo sapien
cagtggcacagccatcactggagct

SEQ ID NO: 2750252 - DNA, 25 bp, Homo sapien
tggcacagccatcactggagcttcc

SEQ ID NO: 2750253 - DNA, 25 bp, Homo sapien
atgttcctgtgcagctccagactca

SEQ ID NO: 2750254 - DNA, 25 bp, Homo sapien
tctcctttgttaactcctcgatgta

SEQ ID NO: 2750255 - DNA, 25 bp, Homo sapien
tccctctcctttgttaactcctcga

SEQ ID NO: 2750256 - DNA, 25 bp, Homo sapien
cctgtgcagctccagactcagggct

SEQ ID NO: 2750257 - DNA, 25 bp, Homo sapien
tctgggcaggacactgcatcctgca

SEQ ID NO: 2750258 - DNA, 25 bp, Homo sapien
agaaatggcccatgctgtcttctgg

SEQ ID NO: 2750259 - DNA, 25 bp, Homo sapien
aaatggcccatgctgtcttctgggc

SEQ ID NO: 2750260 - DNA, 25 bp, Homo sapien
aaaagcagcaagaaatggcccatgc

SEQ ID NO: 2750261 - DNA, 25 bp, Homo sapien
ttaggctcattcctccatctgcgaa

SEQ ID NO: 2750262 - DNA, 25 bp, Homo sapien
catctgcgaagctgggctcccaggg

SEQ ID NO: 2750263 - DNA, 25 bp, Homo sapien
cgaagctgggctcccaggggaccgg

SEQ ID NO: 2750264 - DNA, 25 bp, Homo sapien
ctttaggctcattcctccatctgcg

SEQ ID NO: 2750265 - DNA, 25 bp, Homo sapien
gtgctctgcggacatagcagagaga

SEQ ID NO: 2750266 - DNA, 25 bp, Homo sapien
catggagcactgtttccagttcagt

SEQ ID NO: 2750267 - DNA, 25 bp, Homo sapien
cagttcagttttctgacacttaagg

SEQ ID NO: 2750268 - DNA, 25 bp, Homo sapien
ctgtcatggagcactgtttccagtt

SEQ ID NO: 2750269 - DNA, 25 bp, Homo sapien
tcctggctgtcatggagcactgttt

SEQ ID NO: 2750270 - DNA, 25 bp, Homo sapien
gcctccttagggcttgctgatgttg

SEQ ID NO: 2750271 - DNA, 25 bp, Homo sapien
ctctagctgcctccttagggcttgc

SEQ ID NO: 2750272 - DNA, 25 bp, Homo sapien
tagctgcctccttagggcttgctga

SEQ ID NO: 2750273 - DNA, 25 bp, Homo sapien
gctgcctccttagggcttgctgatg

SEQ ID NO: 2750274 - DNA, 25 bp, Homo sapien
ctctttcagctgagctcggttctgt

SEQ ID NO: 2750275 - DNA, 25 bp, Homo sapien
tttcagctgagctcggttctgttgt

SEQ ID NO: 2750276 - DNA, 25 bp, Homo sapien
tctttcagctgagctcggttctgtt

SEQ ID NO: 2750277 - DNA, 25 bp, Homo sapien
tcagctgagctcggttctgttgttt

SEQ ID NO: 2750278 - DNA, 25 bp, Homo sapien
ttctttttggtgtcggttgctccag

SEQ ID NO: 2750279 - DNA, 25 bp, Homo sapien
ggtgaatggcaaccccccagaagtg

SEQ ID NO: 2750280 - DNA, 25 bp, Homo sapien
actgttccactgatgatagtctgtg

SEQ ID NO: 2750281 - DNA, 25 bp, Homo sapien
ggttgctccagtaccaacaccagca

SEQ ID NO: 2750282 - DNA, 25 bp, Homo sapien
tggtcccagccaattttctttgttg

SEQ ID NO: 2750283 - DNA, 25 bp, Homo sapien
ctttctcttggtcccagccaatttt

SEQ ID NO: 2750284 - DNA, 25 bp, Homo sapien
ttctcttggtcccagccaattttct

SEQ ID NO: 2750285 - DNA, 25 bp, Homo sapien
cttggtcccagccaattttctttgt

SEQ ID NO: 2750286 - DNA, 25 bp, Homo sapien
cgtgatccaggcgaggacagtgata

SEQ ID NO: 2750287 - DNA, 25 bp, Homo sapien
ggacagtgatatgcctccagtcatg

SEQ ID NO: 2750288 - DNA, 25 bp, Homo sapien
ggtcacattggcgtgatccaggcga

SEQ ID NO: 2750289 - DNA, 25 bp, Homo sapien
ctgcactagaatgcggaaaaggggc

SEQ ID NO: 2750290 - DNA, 25 bp, Homo sapien
caattagatggagcgtgttaaatgc

SEQ ID NO: 2750291 - DNA, 25 bp, Homo sapien
ccatttccttactgatgtttgtctg

SEQ ID NO: 2750292 - DNA, 25 bp, Homo sapien
tagtgtatcacgtatctcaattaga

SEQ ID NO: 2750293 - DNA, 25 bp, Homo sapien
tcacgtatctcaattagatggagcg

SEQ ID NO: 2750294 - DNA, 25 bp, Homo sapien
tatctgtggatcactgatggtgacc

SEQ ID NO: 2750295 - DNA, 25 bp, Homo sapien
gtcagggtcgtcagccaaacaaagt

SEQ ID NO: 2750296 - DNA, 25 bp, Homo sapien
ggaactctatgctgacaacttggga

SEQ ID NO: 2750297 - DNA, 25 bp, Homo sapien
gggtcactcatagtccaaggtctgg

SEQ ID NO: 2750298 - DNA, 25 bp, Homo sapien
gtgggccctgcttcctttgacatct

SEQ ID NO: 2750299 - DNA, 25 bp, Homo sapien
ctttgacatcttcctaaagcagcat

SEQ ID NO: 2750300 - DNA, 25 bp, Homo sapien
tcttcctaaagcagcattcactctt

SEQ ID NO: 2750301 - DNA, 25 bp, Homo sapien
ttccaggcatcggtgggccctgctt

SEQ ID NO: 2750302 - DNA, 25 bp, Homo sapien
ctttattaccacaacatctgttgcc

SEQ ID NO: 2750303 - DNA, 25 bp, Homo sapien
ttattaccacaacatctgttgccat

SEQ ID NO: 2750304 - DNA, 25 bp, Homo sapien
tttattaccacaacatctgttgcca

SEQ ID NO: 2750305 - DNA, 25 bp, Homo sapien
gctgtgcatggactgacatcaactg

SEQ ID NO: 2750306 - DNA, 25 bp, Homo sapien
ctgcagttggtgggtcctcggttcc

SEQ ID NO: 2750307 - DNA, 25 bp, Homo sapien
tttggcccactcatggaaggtcact

SEQ ID NO: 2750308 - DNA, 25 bp, Homo sapien
caggctttggcccactcatggaagg

SEQ ID NO: 2750309 - DNA, 25 bp, Homo sapien
ttccaaggtcgcatcattgacagga

SEQ ID NO: 2750310 - DNA, 25 bp, Homo sapien
gaagaaaggttggagtgctcttccc

SEQ ID NO: 2750311 - DNA, 25 bp, Homo sapien
acggtgtgcttcctgtgcacatgga

SEQ ID NO: 2750312 - DNA, 25 bp, Homo sapien
tcacctccagcaagtgttttcccca

SEQ ID NO: 2750313 - DNA, 25 bp, Homo sapien
ccaagaaatcaagccattcacagag

SEQ ID NO: 2750314 - DNA, 25 bp, Homo sapien
tccaagaaatcaagccattcacaga

SEQ ID NO: 2750315 - DNA, 25 bp, Homo sapien
gagttcctgtcccggcaacactgga

SEQ ID NO: 2750316 - DNA, 25 bp, Homo sapien
tgagttcctgtcccggcaacactgg

SEQ ID NO: 2750317 - DNA, 25 bp, Homo sapien
ctgagttcctgtcccggcaacactg

SEQ ID NO: 2750318 - DNA, 25 bp, Homo sapien
agttcctgtcccggcaacactggaa

SEQ ID NO: 2750319 - DNA, 25 bp, Homo sapien
gggtgacaccccagtatacaaataa

SEQ ID NO: 2750320 - DNA, 25 bp, Homo sapien
aatgatggaagctatcgaatgacct

SEQ ID NO: 2750321 - DNA, 25 bp, Homo sapien
caaataacacctgggatccaaggcc

SEQ ID NO: 2750322 - DNA, 25 bp, Homo sapien
gacaacttgcttcatcacagtggaa

SEQ ID NO: 2750323 - DNA, 25 bp, Homo sapien
caatctggactgtattggacggcgg

SEQ ID NO: 2750324 - DNA, 25 bp, Homo sapien
gcttttcacatgattgccccgcata

SEQ ID NO: 2750325 - DNA, 25 bp, Homo sapien
tggagtccatcctgtaaggcagcag

SEQ ID NO: 2750326 - DNA, 25 bp, Homo sapien
gatttagacaatgtggcatgtgccc

SEQ ID NO: 2750327 - DNA, 25 bp, Homo sapien
tacacaataagcagctaatcccact

SEQ ID NO: 2750328 - DNA, 25 bp, Homo sapien
aataagcagctaatcccacttgctc

SEQ ID NO: 2750329 - DNA, 25 bp, Homo sapien
gtttacacaataagcagctaatccc

SEQ ID NO: 2750330 - DNA, 25 bp, Homo sapien
aagtttacacaataagcagctaatc

SEQ ID NO: 2750331 - DNA, 25 bp, Homo sapien
cagagtaagagcagtacagtccaag

SEQ ID NO: 2750332 - DNA, 25 bp, Homo sapien
aatactgggtaacattggcagcaac

SEQ ID NO: 2750333 - DNA, 25 bp, Homo sapien
caagaggtataatggcattagacgg

SEQ ID NO: 2750334 - DNA, 25 bp, Homo sapien
cattagacggttaagcagggcagct

SEQ ID NO: 2750335 - DNA, 25 bp, Homo sapien
cgctcccgcgcccagccgctctccc

SEQ ID NO: 2750336 - DNA, 25 bp, Homo sapien
ataaagttcccgaggtgttcaccag

SEQ ID NO: 2750337 - DNA, 25 bp, Homo sapien
ttttgcatctttgcgcacccgctgg

SEQ ID NO: 2750338 - DNA, 25 bp, Homo sapien
tacgagtcctactactgcatgagcc

SEQ ID NO: 2750339 - DNA, 25 bp, Homo sapien
tgcccgcagcgctggaataggtctt

SEQ ID NO: 2750340 - DNA, 25 bp, Homo sapien
catcctctagtgaatactcttctgt

SEQ ID NO: 2750341 - DNA, 25 bp, Homo sapien
aatgcatgatgcaggcagcgaggcc

SEQ ID NO: 2750342 - DNA, 25 bp, Homo sapien
tccattgacttagccttaagaaaaa

SEQ ID NO: 2750343 - DNA, 25 bp, Homo sapien
actgtggcctgtaagctcgtacatc

SEQ ID NO: 2750344 - DNA, 25 bp, Homo sapien
ggaagttgaagaccatgtggcgttt

SEQ ID NO: 2750345 - DNA, 25 bp, Homo sapien
tatcctggtctgcatcgagtctgtg

SEQ ID NO: 2750346 - DNA, 25 bp, Homo sapien
tgttgccatgggatacctgttcatg

SEQ ID NO: 2750347 - DNA, 25 bp, Homo sapien
tctcgttggtgatatggatatgcct

SEQ ID NO: 2750348 - DNA, 25 bp, Homo sapien
gtgtttaagaagctgctgcgcctct

SEQ ID NO: 2750349 - DNA, 25 bp, Homo sapien
taatcaccatacaacgcacagggca

SEQ ID NO: 2750350 - DNA, 25 bp, Homo sapien
ctttccaagtgcagagacgaaggca

SEQ ID NO: 2750351 - DNA, 25 bp, Homo sapien
ttctcaaacgggagcgattgcaccc

SEQ ID NO: 2750352 - DNA, 25 bp, Homo sapien
aattatgcagcccagttccgagcct

SEQ ID NO: 2750353 - DNA, 25 bp, Homo sapien
atcctgagttggtagagatccttca

SEQ ID NO: 2750354 - DNA, 25 bp, Homo sapien
aatcctgagttggtagagatccttc

SEQ ID NO: 2750355 - DNA, 25 bp, Homo sapien
gtagagatccttcatggcccagcag

SEQ ID NO: 2750356 - DNA, 25 bp, Homo sapien
tgggagcaactctgagattcctaag

SEQ ID NO: 2750357 - DNA, 25 bp, Homo sapien
caactctgagattcctaagttaaac

SEQ ID NO: 2750358 - DNA, 25 bp, Homo sapien
gatgtgggagcaactctgagattcc

SEQ ID NO: 2750359 - DNA, 25 bp, Homo sapien
gagcaactctgagattcctaagtta

SEQ ID NO: 2750360 - DNA, 25 bp, Homo sapien
gcagccagccctataacgctctctc

SEQ ID NO: 2750361 - DNA, 25 bp, Homo sapien
ggctcaggtccataaacccagcagc

SEQ ID NO: 2750362 - DNA, 25 bp, Homo sapien
tggctcaggtccataaacccagcag

SEQ ID NO: 2750363 - DNA, 25 bp, Homo sapien
agccctataacgctctctccccggt

SEQ ID NO: 2750364 - DNA, 25 bp, Homo sapien
ccccagtgatgagaggcacaagctg

SEQ ID NO: 2750365 - DNA, 25 bp, Homo sapien
caggtgcttttttccattcggtcca

SEQ ID NO: 2750366 - DNA, 25 bp, Homo sapien
tgctgacatgcaccctgctttgctg

SEQ ID NO: 2750367 - DNA, 25 bp, Homo sapien
cacaagctggtgctgagctctggtg

SEQ ID NO: 2750368 - DNA, 25 bp, Homo sapien
ctgatggccgatgataccaagagaa

SEQ ID NO: 2750369 - DNA, 25 bp, Homo sapien
gcttccgggctgatctcttggccct

SEQ ID NO: 2750370 - DNA, 25 bp, Homo sapien
gccctgatggccgatgataccaaga

SEQ ID NO: 2750371 - DNA, 25 bp, Homo sapien
ctcttctgtgcttccgggctgatct

SEQ ID NO: 2750372 - DNA, 25 bp, Homo sapien
ggaagtactgaggatgctggtacct

SEQ ID NO: 2750373 - DNA, 25 bp, Homo sapien
gatgctggtacctcccactctgtca

SEQ ID NO: 2750374 - DNA, 25 bp, Homo sapien
tactgaggatgctggtacctcccac

SEQ ID NO: 2750375 - DNA, 25 bp, Homo sapien
tgaggatgctggtacctcccactct

SEQ ID NO: 2750376 - DNA, 25 bp, Homo sapien
gataaaatgactgccatcgaggtgc

SEQ ID NO: 2750377 - DNA, 25 bp, Homo sapien
gatatgaagagttgtgatactctgc

SEQ ID NO: 2750378 - DNA, 25 bp, Homo sapien
cttttagtgaagaacacgatatgaa

SEQ ID NO: 2750379 - DNA, 25 bp, Homo sapien
caaagaggttaagatgagcagggat

SEQ ID NO: 2750380 - DNA, 25 bp, Homo sapien
gccagagtcattgaaaagagaatgg

SEQ ID NO: 2750381 - DNA, 25 bp, Homo sapien
catgtgaagttctgtgaagcctggg

SEQ ID NO: 2750382 - DNA, 25 bp, Homo sapien
gccccatgtgaagttctgtgaagcc

SEQ ID NO: 2750383 - DNA, 25 bp, Homo sapien
gctgagccagtggagctcagcctgc

SEQ ID NO: 2750384 - DNA, 25 bp, Homo sapien
cattgagacctgaactgctgctgaa

SEQ ID NO: 2750385 - DNA, 25 bp, Homo sapien
ttgagacctgaactgctgctgaaac

SEQ ID NO: 2750386 - DNA, 25 bp, Homo sapien
tgctgctgaaacctggtccagagat

SEQ ID NO: 2750387 - DNA, 25 bp, Homo sapien
gctgctgaaacctggtccagagatc

SEQ ID NO: 2750388 - DNA, 25 bp, Homo sapien
tccagctgtgcagcgcttgagcgtc

SEQ ID NO: 2750389 - DNA, 25 bp, Homo sapien
tccatacttggtaccagaagcgctg

SEQ ID NO: 2750390 - DNA, 25 bp, Homo sapien
agaagcgctggcgtgattgcaccac

SEQ ID NO: 2750391 - DNA, 25 bp, Homo sapien
attgcaccacgtccttccagctgtg

SEQ ID NO: 2750392 - DNA, 25 bp, Homo sapien
cgtgctctcggcatctgctttcact

SEQ ID NO: 2750393 - DNA, 25 bp, Homo sapien
ctccctttgcagtttggtagatcac

SEQ ID NO: 2750394 - DNA, 25 bp, Homo sapien
actaactccccttgatgacacctgc

SEQ ID NO: 2750395 - DNA, 25 bp, Homo sapien
cccgtccccgatgatgcctgtccct

SEQ ID NO: 2750396 - DNA, 25 bp, Homo sapien
tgcagcctttagtggcatggaaaca

SEQ ID NO: 2750397 - DNA, 25 bp, Homo sapien
ctaaaatgagcatgtctcatgctgt

SEQ ID NO: 2750398 - DNA, 25 bp, Homo sapien
tgtctcatgctgttctatgcagcct

SEQ ID NO: 2750399 - DNA, 25 bp, Homo sapien
caggaggctcttagaaaccagaata

SEQ ID NO: 2750400 - DNA, 25 bp, Homo sapien
tgcgagacgccatcattgccagcgt

SEQ ID NO: 2750401 - DNA, 25 bp, Homo sapien
gcctgtctgcaacaccgggaggcaa

SEQ ID NO: 2750402 - DNA, 25 bp, Homo sapien
tgctgcccttcaacatgcgagacgc

SEQ ID NO: 2750403 - DNA, 25 bp, Homo sapien
tgtagtgtggtacctgcagctgttc

SEQ ID NO: 2750404 - DNA, 25 bp, Homo sapien
gatgtaaggcttattaacaggttga

SEQ ID NO: 2750405 - DNA, 25 bp, Homo sapien
tgaagattatccagacctttatggg

SEQ ID NO: 2750406 - DNA, 25 bp, Homo sapien
tacaaaggagtttctctgaggcaaa

SEQ ID NO: 2750407 - DNA, 25 bp, Homo sapien
tcaagaagttttgtcagtgcagtat

SEQ ID NO: 2750408 - DNA, 25 bp, Homo sapien
catctcttggtgcggcatgcaaggc

SEQ ID NO: 2750409 - DNA, 25 bp, Homo sapien
cacatctcttggtgcggcatgcaag

SEQ ID NO: 2750410 - DNA, 25 bp, Homo sapien
ccacatctcttggtgcggcatgcaa

SEQ ID NO: 2750411 - DNA, 25 bp, Homo sapien
gtccacatctcttggtgcggcatgc

SEQ ID NO: 2750412 - DNA, 25 bp, Homo sapien
gttctttctgaaggtcattctgaca

SEQ ID NO: 2750413 - DNA, 25 bp, Homo sapien
ttcccacaattgcacttcccaggta

SEQ ID NO: 2750414 - DNA, 25 bp, Homo sapien
gttacacgccaaccgataaacagcc

SEQ ID NO: 2750415 - DNA, 25 bp, Homo sapien
cagtccttcagcatgcggtcggtgg

SEQ ID NO: 2750416 - DNA, 25 bp, Homo sapien
tgaggacacacgctggcagatgggc

SEQ ID NO: 2750417 - DNA, 25 bp, Homo sapien
ctgaggacacacgctggcagatggg

SEQ ID NO: 2750418 - DNA, 25 bp, Homo sapien
agatgctccagtaggtgaacgggca

SEQ ID NO: 2750419 - DNA, 25 bp, Homo sapien
cagcctcggtttatgactccttggg

SEQ ID NO: 2750420 - DNA, 25 bp, Homo sapien
cagaggcccgttaattacagatgga

SEQ ID NO: 2750421 - DNA, 25 bp, Homo sapien
tccggttggcatttggaatggacag

SEQ ID NO: 2750422 - DNA, 25 bp, Homo sapien
taggctccgtctgctaaaaccaaaa

SEQ ID NO: 2750423 - DNA, 25 bp, Homo sapien
ccaagcaaggatttaggctccgtct

SEQ ID NO: 2750424 - DNA, 25 bp, Homo sapien
tcacaaccgtgtggccaacactggt

SEQ ID NO: 2750425 - DNA, 25 bp, Homo sapien
aacactggtacgtctggctgctgga

SEQ ID NO: 2750426 - DNA, 25 bp, Homo sapien
tcagcataggttctatcagaaagtt

SEQ ID NO: 2750427 - DNA, 25 bp, Homo sapien
ttaagttggcacctcccatccatgg

SEQ ID NO: 2750428 - DNA, 25 bp, Homo sapien
tgattctgcacatgaacaggacagg

SEQ ID NO: 2750429 - DNA, 25 bp, Homo sapien
catgggctacttaccatgaatgagt

SEQ ID NO: 2750430 - DNA, 25 bp, Homo sapien
cgccctctgggggatgagcgcaaat

SEQ ID NO: 2750431 - DNA, 25 bp, Homo sapien
gggatgagcgcaaatcgaggaaaac

SEQ ID NO: 2750432 - DNA, 25 bp, Homo sapien
taaaatgcacataggtttggggacc

SEQ ID NO: 2750433 - DNA, 25 bp, Homo sapien
taggtagatatttttggcaccaaac

SEQ ID NO: 2750434 - DNA, 25 bp, Homo sapien
tctttgctctgccagctgctatttc

SEQ ID NO: 2750435 - DNA, 25 bp, Homo sapien
tctgccagctgctatttctggctta

SEQ ID NO: 2750436 - DNA, 25 bp, Homo sapien
ttgctccttctttgctctgccagct

SEQ ID NO: 2750437 - DNA, 25 bp, Homo sapien
tttgctctgccagctgctatttctg

SEQ ID NO: 2750438 - DNA, 25 bp, Homo sapien
actgagagcttactgactgttgatg

SEQ ID NO: 2750439 - DNA, 25 bp, Homo sapien
tattctagaatgtgcgtgaggccac

SEQ ID NO: 2750440 - DNA, 25 bp, Homo sapien
ggaggagacaccaaatgcatagaga

SEQ ID NO: 2750441 - DNA, 25 bp, Homo sapien
ccaccaggtagatagcaggcagctg

SEQ ID NO: 2750442 - DNA, 25 bp, Homo sapien
ggccgttccttcctgaggctgactt

SEQ ID NO: 2750443 - DNA, 25 bp, Homo sapien
agaggccgttccttcctgaggctga

SEQ ID NO: 2750444 - DNA, 25 bp, Homo sapien
ccgttccttcctgaggctgacttca

SEQ ID NO: 2750445 - DNA, 25 bp, Homo sapien
gaggccgttccttcctgaggctgac

SEQ ID NO: 2750446 - DNA, 25 bp, Homo sapien
ggtcatcagggctttccacatgctc

SEQ ID NO: 2750447 - DNA, 25 bp, Homo sapien
tgaagactgccacattgctctgaag

SEQ ID NO: 2750448 - DNA, 25 bp, Homo sapien
cctctaatcggaagccaggaaggtc

SEQ ID NO: 2750449 - DNA, 25 bp, Homo sapien
aaaaggtgatgcatcaaagtatggc

SEQ ID NO: 2750450 - DNA, 25 bp, Homo sapien
catggaactcgctcttcagcaaaca

SEQ ID NO: 2750451 - DNA, 25 bp, Homo sapien
tgtctctttagatcctggccaatgt

SEQ ID NO: 2750452 - DNA, 25 bp, Homo sapien
tggccaatgtgatcattttcatctg

SEQ ID NO: 2750453 - DNA, 25 bp, Homo sapien
ggaacctggcgggagcctaccataa

SEQ ID NO: 2750454 - DNA, 25 bp, Homo sapien
gcatcctaggttgattgttgtgggt

SEQ ID NO: 2750455 - DNA, 25 bp, Homo sapien
tacagcgcctgttgtccacatagga

SEQ ID NO: 2750456 - DNA, 25 bp, Homo sapien
tgggtgacacaaatgcacatcaggg

SEQ ID NO: 2750457 - DNA, 25 bp, Homo sapien
gaggagccaggtgtcgttgtcaggg

SEQ ID NO: 2750458 - DNA, 25 bp, Homo sapien
agcacatggcatcccttgccacagt

SEQ ID NO: 2750459 - DNA, 25 bp, Homo sapien
gctgaaagcacatggcatcccttgc

SEQ ID NO: 2750460 - DNA, 25 bp, Homo sapien
ctgaaagcacatggcatcccttgcc

SEQ ID NO: 2750461 - DNA, 25 bp, Homo sapien
gcacatggcatcccttgccacagtg

SEQ ID NO: 2750462 - DNA, 25 bp, Homo sapien
ctgtctcgagttttgacttttgtct

SEQ ID NO: 2750463 - DNA, 25 bp, Homo sapien
ttgtcttaagtttcatatcccacag

SEQ ID NO: 2750464 - DNA, 25 bp, Homo sapien
agtaaaatccgcagctgtttcctga

SEQ ID NO: 2750465 - DNA, 25 bp, Homo sapien
cctgagcaccgtgtagtgtggcaga

SEQ ID NO: 2750466 - DNA, 25 bp, Homo sapien
cctctctgcagaatttagtggaaca

SEQ ID NO: 2750467 - DNA, 25 bp, Homo sapien
caagaaagtgatccttgggtggtca

SEQ ID NO: 2750468 - DNA, 25 bp, Homo sapien
tctggctgtccttggatgcaaaatt

SEQ ID NO: 2750469 - DNA, 25 bp, Homo sapien
tctggctgtagtctttctggctgtc

SEQ ID NO: 2750470 - DNA, 25 bp, Homo sapien
tgaagcacatcgtacagctcagcat

SEQ ID NO: 2750471 - DNA, 25 bp, Homo sapien
ccctgaagcacatcgtacagctcag

SEQ ID NO: 2750472 - DNA, 25 bp, Homo sapien
ttaagctgtgaaagccagaattccc

SEQ ID NO: 2750473 - DNA, 25 bp, Homo sapien
gctgtgaaagccagaattccctgaa

SEQ ID NO: 2750474 - DNA, 25 bp, Homo sapien
agcccactgcgtgggagcctctgtg

SEQ ID NO: 2750475 - DNA, 25 bp, Homo sapien
agtggcttgcgatttctgtatgttc

SEQ ID NO: 2750476 - DNA, 25 bp, Homo sapien
ccccccggacagtggcttgcgattt

SEQ ID NO: 2750477 - DNA, 25 bp, Homo sapien
cactgcgtgggagcctctgtgactt

SEQ ID NO: 2750478 - DNA, 25 bp, Homo sapien
aaagtgcaatttgtttgatggccaa

SEQ ID NO: 2750479 - DNA, 25 bp, Homo sapien
tatccgaggcaccaaagatagagga

SEQ ID NO: 2750480 - DNA, 25 bp, Homo sapien
caggaagcacgagaaaaagatgagg

SEQ ID NO: 2750481 - DNA, 25 bp, Homo sapien
tttgtccagcaagcgtatccgaggc

SEQ ID NO: 2750482 - DNA, 25 bp, Homo sapien
gagcagttaataaacattgctgcca

SEQ ID NO: 2750483 - DNA, 25 bp, Homo sapien
cctccacccatgcaaacacagaggg

SEQ ID NO: 2750484 - DNA, 25 bp, Homo sapien
aaacgggagcagttaataaacattg

SEQ ID NO: 2750485 - DNA, 25 bp, Homo sapien
cacagaggggtggaaaacgggagca

SEQ ID NO: 2750486 - DNA, 25 bp, Homo sapien
caggcgtttcccatgactgagggct

SEQ ID NO: 2750487 - DNA, 25 bp, Homo sapien
tcctgagcaggcgtttcccatgact

SEQ ID NO: 2750488 - DNA, 25 bp, Homo sapien
ttaggttttagacactgagagatct

SEQ ID NO: 2750489 - DNA, 25 bp, Homo sapien
gcttttgtcgtggaagtcgtcctga

SEQ ID NO: 2750490 - DNA, 25 bp, Homo sapien
aaacaccagagtctccacagtctgg

SEQ ID NO: 2750491 - DNA, 25 bp, Homo sapien
tgaaacaccagagtctccacagtct

SEQ ID NO: 2750492 - DNA, 25 bp, Homo sapien
gaaacaccagagtctccacagtctg

SEQ ID NO: 2750493 - DNA, 25 bp, Homo sapien
tccatatagttgctgtcctctccag

SEQ ID NO: 2750494 - DNA, 25 bp, Homo sapien
tatagttgctgtcctctccagtttt

SEQ ID NO: 2750495 - DNA, 25 bp, Homo sapien
ctcaactgaagtttctgtttccata

SEQ ID NO: 2750496 - DNA, 25 bp, Homo sapien
gtttccatatagttgctgtcctctc

SEQ ID NO: 2750497 - DNA, 25 bp, Homo sapien
gatcttgatcattgaaccttgtttc

SEQ ID NO: 2750498 - DNA, 25 bp, Homo sapien
ccagccagagccctccatagatgga

SEQ ID NO: 2750499 - DNA, 25 bp, Homo sapien
tagatggaccgctgcatgaggctgt

SEQ ID NO: 2750500 - DNA, 25 bp, Homo sapien
catatttggtcaggccgataggctt

SEQ ID NO: 2750501 - DNA, 25 bp, Homo sapien
cgaaacctgatgtgatagcctgtgt

SEQ ID NO: 2750502 - DNA, 25 bp, Homo sapien
aacctacaatgtgcacgaaacctga

SEQ ID NO: 2750503 - DNA, 25 bp, Homo sapien
tacttcatcgaggtagggtccaccc

SEQ ID NO: 2750504 - DNA, 25 bp, Homo sapien
tgccctgcaggatgcatagcagcat

SEQ ID NO: 2750505 - DNA, 25 bp, Homo sapien
tagagaagcacgagagcaagcactg

SEQ ID NO: 2750506 - DNA, 25 bp, Homo sapien
tattatacagattagcatacttcct

SEQ ID NO: 2750507 - DNA, 25 bp, Homo sapien
tagaactgttgacctctaaaaccat

SEQ ID NO: 2750508 - DNA, 25 bp, Homo sapien
aaacagtccagatatggcatctgtc

SEQ ID NO: 2750509 - DNA, 25 bp, Homo sapien
tgatgcaggttgctagttcaggctg

SEQ ID NO: 2750510 - DNA, 25 bp, Homo sapien
caaccccaaggtcagtatcattgta

SEQ ID NO: 2750511 - DNA, 25 bp, Homo sapien
tcatgtgtgttagtcggtgtattcc

SEQ ID NO: 2750512 - DNA, 25 bp, Homo sapien
gatgctgcatctgaaagcctcccag

SEQ ID NO: 2750513 - DNA, 25 bp, Homo sapien
gataaccagtgtaagatgtagttcc

SEQ ID NO: 2750514 - DNA, 25 bp, Homo sapien
caatattaggacattcagataacca

SEQ ID NO: 2750515 - DNA, 25 bp, Homo sapien
gttcctctatctttcgggcacagag

SEQ ID NO: 2750516 - DNA, 25 bp, Homo sapien
gtcgcagccaccgtaaaatcccagg

SEQ ID NO: 2750517 - DNA, 25 bp, Homo sapien
gcaaaaccttctcacccaaatctta

SEQ ID NO: 2750518 - DNA, 25 bp, Homo sapien
aaaagcactctgatggtttggatgc

SEQ ID NO: 2750519 - DNA, 25 bp, Homo sapien
tgaaagtattttcactaagtctgaa

SEQ ID NO: 2750520 - DNA, 25 bp, Homo sapien
tgacttttaccttctagaaatgaaa

SEQ ID NO: 2750521 - DNA, 25 bp, Homo sapien
cataagatccgtgaatgaggctccc

SEQ ID NO: 2750522 - DNA, 25 bp, Homo sapien
tggtcctcctaaacttgattccata

SEQ ID NO: 2750523 - DNA, 25 bp, Homo sapien
tagacgtggcgacacttggtcctcc

SEQ ID NO: 2750524 - DNA, 25 bp, Homo sapien
tgcccaggaagcctagacgtggcga

SEQ ID NO: 2750525 - DNA, 25 bp, Homo sapien
caactctgaagagcccgcctttgca

SEQ ID NO: 2750526 - DNA, 25 bp, Homo sapien
caccaactcctctcatgctggctgg

SEQ ID NO: 2750527 - DNA, 25 bp, Homo sapien
gctggccgggattcccattttgcgt

SEQ ID NO: 2750528 - DNA, 25 bp, Homo sapien
tgcaccaccaactcctctcatgctg

SEQ ID NO: 2750529 - DNA, 25 bp, Homo sapien
tcattgtactacttcaggcacttga

SEQ ID NO: 2750530 - DNA, 25 bp, Homo sapien
ttgcacccaagtgcggtttcctggt

SEQ ID NO: 2750531 - DNA, 25 bp, Homo sapien
aatgttgggttgcacccaagtgcgg

SEQ ID NO: 2750532 - DNA, 25 bp, Homo sapien
tgcttgaaggaatgttgggttgcac

SEQ ID NO: 2750533 - DNA, 25 bp, Homo sapien
cttgaaggaatgttgggttgcaccc

SEQ ID NO: 2750534 - DNA, 25 bp, Homo sapien
caactggactccttccgaacttgaa

SEQ ID NO: 2750535 - DNA, 25 bp, Homo sapien
ttccgaacttgaagctctgaatcca

SEQ ID NO: 2750536 - DNA, 25 bp, Homo sapien
cattctggcgggttcccagcctctg

SEQ ID NO: 2750537 - DNA, 25 bp, Homo sapien
cagtcatggcatcctgctccgcatt

SEQ ID NO: 2750538 - DNA, 25 bp, Homo sapien
gatggtaagtcggtggccttcgtca

SEQ ID NO: 2750539 - DNA, 25 bp, Homo sapien
tgttggatctccttagacacctctg

SEQ ID NO: 2750540 - DNA, 25 bp, Homo sapien
ggtgccttcctaggcccatatagca

SEQ ID NO: 2750541 - DNA, 25 bp, Homo sapien
tcaccattgccagctattctcaggc

SEQ ID NO: 2750542 - DNA, 25 bp, Homo sapien
tctgtcagtgagagggacctaagct

SEQ ID NO: 2750543 - DNA, 25 bp, Homo sapien
ttctcagagagaaatggtgacctcc

SEQ ID NO: 2750544 - DNA, 25 bp, Homo sapien
gacaccgcagtcataggctcagaga

SEQ ID NO: 2750545 - DNA, 25 bp, Homo sapien
gaagctcctataaatcctggcctga

SEQ ID NO: 2750546 - DNA, 25 bp, Homo sapien
ggcgaggtcccacattaggccgtct

SEQ ID NO: 2750547 - DNA, 25 bp, Homo sapien
ttagggttatctggagggacagaaa

SEQ ID NO: 2750548 - DNA, 25 bp, Homo sapien
acctaggaacagtaccttgcatctg

SEQ ID NO: 2750549 - DNA, 25 bp, Homo sapien
aatcacaaggcgaggtcccacatta

SEQ ID NO: 2750550 - DNA, 25 bp, Homo sapien
tgctccgtgtgtctcatgccagcag

SEQ ID NO: 2750551 - DNA, 25 bp, Homo sapien
gtcgccatccgtcaccagaattagt

SEQ ID NO: 2750552 - DNA, 25 bp, Homo sapien
cattgtctcattgccagtggtgtcc

SEQ ID NO: 2750553 - DNA, 25 bp, Homo sapien
cagaattagtcctcacagcctagga

SEQ ID NO: 2750554 - DNA, 25 bp, Homo sapien
taatgcacccaaaggcattcgaaat

SEQ ID NO: 2750555 - DNA, 25 bp, Homo sapien
atatggtataatgcacccaaaggca

SEQ ID NO: 2750556 - DNA, 25 bp, Homo sapien
aaaagacacctacactgaaaaactg

SEQ ID NO: 2750557 - DNA, 25 bp, Homo sapien
aaaggcattcgaaataaactactgc

SEQ ID NO: 2750558 - DNA, 25 bp, Homo sapien
gatgatatgacttgccctagaacac

SEQ ID NO: 2750559 - DNA, 25 bp, Homo sapien
ccaacttaggttacaagcgactgct

SEQ ID NO: 2750560 - DNA, 25 bp, Homo sapien
cagggttgtttgtgttcaggcagca

SEQ ID NO: 2750561 - DNA, 25 bp, Homo sapien
tgttgaacaccgaaatctagcctct

SEQ ID NO: 2750562 - DNA, 25 bp, Homo sapien
tgctcacaatgaatcggtctccaga

SEQ ID NO: 2750563 - DNA, 25 bp, Homo sapien
gttggtcaggctcctaacccagcaa

SEQ ID NO: 2750564 - DNA, 25 bp, Homo sapien
tagccaagctcctaggcgtcatgag

SEQ ID NO: 2750565 - DNA, 25 bp, Homo sapien
caggccacagggtatcggacatgcc

SEQ ID NO: 2750566 - DNA, 25 bp, Homo sapien
gattgatgcgcttcccatagacaga

SEQ ID NO: 2750567 - DNA, 25 bp, Homo sapien
ttcctgtagaagtcagcctgcacat

SEQ ID NO: 2750568 - DNA, 25 bp, Homo sapien
tagacagaagacgtcagcactccaa

SEQ ID NO: 2750569 - DNA, 25 bp, Homo sapien
gagcaatgtgcccaaagccgggttc

SEQ ID NO: 2750570 - DNA, 25 bp, Homo sapien
tctcggtgcaacttctgatcataat

SEQ ID NO: 2750571 - DNA, 25 bp, Homo sapien
taatctaggcgcctcttaaaaatac

SEQ ID NO: 2750572 - DNA, 25 bp, Homo sapien
aaaaatacaatcatagagggaaata

SEQ ID NO: 2750573 - DNA, 25 bp, Homo sapien
gaagtcccaggctttttgcatgttc

SEQ ID NO: 2750574 - DNA, 25 bp, Homo sapien
tgagaggcccagtatgaagcaggga

SEQ ID NO: 2750575 - DNA, 25 bp, Homo sapien
gagaagtttgctgagaggcccagta

SEQ ID NO: 2750576 - DNA, 25 bp, Homo sapien
tgctgagaggcccagtatgaagcag

SEQ ID NO: 2750577 - DNA, 25 bp, Homo sapien
gaggcccagtatgaagcagggacat

SEQ ID NO: 2750578 - DNA, 25 bp, Homo sapien
tgaagggagctgcttcagaggatta

SEQ ID NO: 2750579 - DNA, 25 bp, Homo sapien
gagctgcttcagaggattagaagcc

SEQ ID NO: 2750580 - DNA, 25 bp, Homo sapien
gaagccacagattgacactcacatt

SEQ ID NO: 2750581 - DNA, 25 bp, Homo sapien
tgacactcacattttgccttcacct

SEQ ID NO: 2750582 - DNA, 25 bp, Homo sapien
gcgccgcggcgggatgtagctgaag

SEQ ID NO: 2750583 - DNA, 25 bp, Homo sapien
agcgtggacgcggtggtctcctcct

SEQ ID NO: 2750584 - DNA, 25 bp, Homo sapien
tagctgaaggcggactgcgccgaga

SEQ ID NO: 2750585 - DNA, 25 bp, Homo sapien
cggtagtagtagctgtgctctttgg

SEQ ID NO: 2750586 - DNA, 25 bp, Homo sapien
gattgagccttgaacggagcaggcc

SEQ ID NO: 2750587 - DNA, 25 bp, Homo sapien
tagtgactgagcacctagcgcatgg

SEQ ID NO: 2750588 - DNA, 25 bp, Homo sapien
ccttcgcgagaccattagtgactga

SEQ ID NO: 2750589 - DNA, 25 bp, Homo sapien
tctgcaggcctcaggttgctcagcg

SEQ ID NO: 2750590 - DNA, 25 bp, Homo sapien
gactcctgaacttgtacgaccactg

SEQ ID NO: 2750591 - DNA, 25 bp, Homo sapien
tcacagtctcccctggagtgtcttg

SEQ ID NO: 2750592 - DNA, 25 bp, Homo sapien
gaggtgagtcatagccccacggaat

SEQ ID NO: 2750593 - DNA, 25 bp, Homo sapien
catgtactggaggtgagatgcttct

SEQ ID NO: 2750594 - DNA, 25 bp, Homo sapien
cctatttggccctagagctggagca

SEQ ID NO: 2750595 - DNA, 25 bp, Homo sapien
tgtgcccagcgtgatcagaactgtc

SEQ ID NO: 2750596 - DNA, 25 bp, Homo sapien
ctggagcattgagtgtgcccagcgt

SEQ ID NO: 2750597 - DNA, 25 bp, Homo sapien
cagaactgtctgctgaatgcgtacg

SEQ ID NO: 2750598 - DNA, 25 bp, Homo sapien
catttagcagataactatgacaaaa

SEQ ID NO: 2750599 - DNA, 25 bp, Homo sapien
ttttcatttagcagataactatgac

SEQ ID NO: 2750600 - DNA, 25 bp, Homo sapien
tcatttagcagataactatgacaaa

SEQ ID NO: 2750601 - DNA, 25 bp, Homo sapien
ttcatttagcagataactatgacaa

SEQ ID NO: 2750602 - DNA, 25 bp, Homo sapien
cagcacatgatcaattgtttgatgt

SEQ ID NO: 2750603 - DNA, 25 bp, Homo sapien
gatgctttcagatcaccagtctaga

SEQ ID NO: 2750604 - DNA, 25 bp, Homo sapien
gtttgatgtacaaaaagtatctatg

SEQ ID NO: 2750605 - DNA, 25 bp, Homo sapien
gtatacatagtataaggaaaactac

SEQ ID NO: 2750606 - DNA, 25 bp, Homo sapien
ttgattttagcatcccaatctcatg

SEQ ID NO: 2750607 - DNA, 25 bp, Homo sapien
tgcaaccaatgaacagtgttttgag

SEQ ID NO: 2750608 - DNA, 25 bp, Homo sapien
aatattccaccaattcacgtcttga

SEQ ID NO: 2750609 - DNA, 25 bp, Homo sapien
tcattcttgcaaccaatgaacagtg

SEQ ID NO: 2750610 - DNA, 25 bp, Homo sapien
taactaggaactttccacagaatag

SEQ ID NO: 2750611 - DNA, 25 bp, Homo sapien
tgtccagttcaataattgctgcctg

SEQ ID NO: 2750612 - DNA, 25 bp, Homo sapien
gccatttcgagttttgtgctgtcca

SEQ ID NO: 2750613 - DNA, 25 bp, Homo sapien
aactgtaaccagtcaagtagattct

SEQ ID NO: 2750614 - DNA, 25 bp, Homo sapien
ggagcaaaacctttttggaccatca

SEQ ID NO: 2750615 - DNA, 25 bp, Homo sapien
aacttgataaccgagtaactgtagg

SEQ ID NO: 2750616 - DNA, 25 bp, Homo sapien
tggaccatcaatacacagtgctatc

SEQ ID NO: 2750617 - DNA, 25 bp, Homo sapien
taactgtaggtgtctttgtttaata

SEQ ID NO: 2750618 - DNA, 25 bp, Homo sapien
tggctattactatgtgccaatatta

SEQ ID NO: 2750619 - DNA, 25 bp, Homo sapien
ttgggatttggctattactatgtgc

SEQ ID NO: 2750620 - DNA, 25 bp, Homo sapien
ggctattactatgtgccaatattat

SEQ ID NO: 2750621 - DNA, 25 bp, Homo sapien
ggatttggctattactatgtgccaa

SEQ ID NO: 2750622 - DNA, 25 bp, Homo sapien
ggatatcttcattagctgtggatgg

SEQ ID NO: 2750623 - DNA, 25 bp, Homo sapien
gatatcttcattagctgtggatggc

SEQ ID NO: 2750624 - DNA, 25 bp, Homo sapien
tggatatcttcattagctgtggatg

SEQ ID NO: 2750625 - DNA, 25 bp, Homo sapien
atatcttcattagctgtggatggca

SEQ ID NO: 2750626 - DNA, 25 bp, Homo sapien
tcacaaacactatcttcctgtattc

SEQ ID NO: 2750627 - DNA, 25 bp, Homo sapien
aaaaattcctcgtgtgataccctca

SEQ ID NO: 2750628 - DNA, 25 bp, Homo sapien
ccaccttgcattgatcaattggact

SEQ ID NO: 2750629 - DNA, 25 bp, Homo sapien
tcctcgtgtgataccctcacaaaca

SEQ ID NO: 2750630 - DNA, 25 bp, Homo sapien
cacggaaggcttccgaactgtcctt

SEQ ID NO: 2750631 - DNA, 25 bp, Homo sapien
tctgcgagcacggaaggcttccgaa

SEQ ID NO: 2750632 - DNA, 25 bp, Homo sapien
gagcacggaaggcttccgaactgtc

SEQ ID NO: 2750633 - DNA, 25 bp, Homo sapien
ctggtctgcgagcacggaaggcttc

SEQ ID NO: 2750634 - DNA, 25 bp, Homo sapien
aaaggttagtcagcccaatcttcac

SEQ ID NO: 2750635 - DNA, 25 bp, Homo sapien
catatctataaagctgagaatccac

SEQ ID NO: 2750636 - DNA, 25 bp, Homo sapien
gaaatgacttcacttgatatttagg

SEQ ID NO: 2750637 - DNA, 25 bp, Homo sapien
tgtataacaatagggtgtcaacact

SEQ ID NO: 2750638 - DNA, 25 bp, Homo sapien
acttttccaggaattgggacaggca

SEQ ID NO: 2750639 - DNA, 25 bp, Homo sapien
tcttacagtgcaagtctaatagttc

SEQ ID NO: 2750640 - DNA, 25 bp, Homo sapien
ttagaactgagaattgtcccaaggg

SEQ ID NO: 2750641 - DNA, 25 bp, Homo sapien
tccgaaaccttttaagcacagacag

SEQ ID NO: 2750642 - DNA, 25 bp, Homo sapien
taaattccaggtgtacaacatgctg

SEQ ID NO: 2750643 - DNA, 25 bp, Homo sapien
caatataataaacgatgctggagaa

SEQ ID NO: 2750644 - DNA, 25 bp, Homo sapien
cactgcgcacggcaagagtacattt

SEQ ID NO: 2750645 - DNA, 25 bp, Homo sapien
gattgcgtgcttgaaaatggctgag

SEQ ID NO: 2750646 - DNA, 25 bp, Homo sapien
gttgtgcccgactcaatgtgtccaa

SEQ ID NO: 2750647 - DNA, 25 bp, Homo sapien
tgtgcccgactcaatgtgtccaaat

SEQ ID NO: 2750648 - DNA, 25 bp, Homo sapien
tgggtcagttgtgcccgactcaatg

SEQ ID NO: 2750649 - DNA, 25 bp, Homo sapien
tcagttgtgcccgactcaatgtgtc

SEQ ID NO: 2750650 - DNA, 25 bp, Homo sapien
gcagctacacgatgctctagggctt

SEQ ID NO: 2750651 - DNA, 25 bp, Homo sapien
tgactttgatcaagaaccaccaggg

SEQ ID NO: 2750652 - DNA, 25 bp, Homo sapien
ttcaggatccaacgtgaggcacacc

SEQ ID NO: 2750653 - DNA, 25 bp, Homo sapien
tgggacatgcctcacgacatatttg

SEQ ID NO: 2750654 - DNA, 25 bp, Homo sapien
gcttgcaaagcagtcactaaactag

SEQ ID NO: 2750655 - DNA, 25 bp, Homo sapien
caaattcgttgtaaagctcctgctg

SEQ ID NO: 2750656 - DNA, 25 bp, Homo sapien
taaactagtgtttgacagctgtgag

SEQ ID NO: 2750657 - DNA, 25 bp, Homo sapien
ttttggcagcccttgatcaccatcc

SEQ ID NO: 2750658 - DNA, 25 bp, Homo sapien
gaaaggctcaggttgtcgtgaacac

SEQ ID NO: 2750659 - DNA, 25 bp, Homo sapien
cttgagagaacactggtccaccgag

SEQ ID NO: 2750660 - DNA, 25 bp, Homo sapien
tgatggaatttgaccccgaaaggct

SEQ ID NO: 2750661 - DNA, 25 bp, Homo sapien
gaagtcaagttgctcagtctcctgt

SEQ ID NO: 2750662 - DNA, 25 bp, Homo sapien
tgtgaacatgatttagaggtttatt

SEQ ID NO: 2750663 - DNA, 25 bp, Homo sapien
ttaaagcagccagagctctatgcat

SEQ ID NO: 2750664 - DNA, 25 bp, Homo sapien
attttttaaagcagccagagctcta

SEQ ID NO: 2750665 - DNA, 25 bp, Homo sapien
cttgtgaacatgatttagaggttta

SEQ ID NO: 2750666 - DNA, 25 bp, Homo sapien
cagataaacgataaaggttcttcct

SEQ ID NO: 2750667 - DNA, 25 bp, Homo sapien
gataaacgataaaggttcttcctca

SEQ ID NO: 2750668 - DNA, 25 bp, Homo sapien
atcagataaacgataaaggttcttc

SEQ ID NO: 2750669 - DNA, 25 bp, Homo sapien
aaatcagataaacgataaaggttct

SEQ ID NO: 2750670 - DNA, 25 bp, Homo sapien
gattgacccaacatcaatgtttatg

SEQ ID NO: 2750671 - DNA, 25 bp, Homo sapien
gagaacatgattgacccaacatcaa

SEQ ID NO: 2750672 - DNA, 25 bp, Homo sapien
taaatacattgagaacatgattgac

SEQ ID NO: 2750673 - DNA, 25 bp, Homo sapien
accatcagattctcaatttgataac

SEQ ID NO: 2750674 - DNA, 25 bp, Homo sapien
tctgccgggcaatcactccgggtgg

SEQ ID NO: 2750675 - DNA, 25 bp, Homo sapien
tattggtcctgggtaccgagcatgg

SEQ ID NO: 2750676 - DNA, 25 bp, Homo sapien
tgcctgtcggctacggttcccggat

SEQ ID NO: 2750677 - DNA, 25 bp, Homo sapien
aagtcgcgttgtgcaggttcgtgcc

SEQ ID NO: 2750678 - DNA, 25 bp, Homo sapien
catgccaatcagacgtttacagacg

SEQ ID NO: 2750679 - DNA, 25 bp, Homo sapien
gcttggcgtgctcttaccgtctgaa

SEQ ID NO: 2750680 - DNA, 25 bp, Homo sapien
ggtgagccacacttcgctgttagag

SEQ ID NO: 2750681 - DNA, 25 bp, Homo sapien
ggttttttccatatcgccagcacac

SEQ ID NO: 2750682 - DNA, 25 bp, Homo sapien
tatatagtacggtctttgcttgtcc

SEQ ID NO: 2750683 - DNA, 25 bp, Homo sapien
cccatgaagacagcgggaaagccct

SEQ ID NO: 2750684 - DNA, 25 bp, Homo sapien
aaaacagtgttgtctcacccacatc

SEQ ID NO: 2750685 - DNA, 25 bp, Homo sapien
agccctggctcctaaggtaagaaat

SEQ ID NO: 2750686 - DNA, 25 bp, Homo sapien
tgtcatcggtggtcaaatacaggct

SEQ ID NO: 2750687 - DNA, 25 bp, Homo sapien
tgaacattgatcgtccgtcagggaa

SEQ ID NO: 2750688 - DNA, 25 bp, Homo sapien
aatgagaagacagcggagcaggatc

SEQ ID NO: 2750689 - DNA, 25 bp, Homo sapien
ggcatcgtgacccagaacatatgga

SEQ ID NO: 2750690 - DNA, 25 bp, Homo sapien
agggagacaaagaagcgctgatgac

SEQ ID NO: 2750691 - DNA, 25 bp, Homo sapien
gagggccaagccattttactaagga

SEQ ID NO: 2750692 - DNA, 25 bp, Homo sapien
agtgagatctgacatccttggctgg

SEQ ID NO: 2750693 - DNA, 25 bp, Homo sapien
catatgtgacgtctctcagggtgac

SEQ ID NO: 2750694 - DNA, 25 bp, Homo sapien
ccaagcatctggaggaatctgcaca

SEQ ID NO: 2750695 - DNA, 25 bp, Homo sapien
caaagttgggtggaggcaccctcac

SEQ ID NO: 2750696 - DNA, 25 bp, Homo sapien
tctgagatggacagggacccttcgc

SEQ ID NO: 2750697 - DNA, 25 bp, Homo sapien
tgaatccagtgaagccactcatggg

SEQ ID NO: 2750698 - DNA, 25 bp, Homo sapien
gcacagaagatcaatgtcagcaggg

SEQ ID NO: 2750699 - DNA, 25 bp, Homo sapien
tgtatatggctgtcttttccttgta

SEQ ID NO: 2750700 - DNA, 25 bp, Homo sapien
tgaggactgtcataacaaactacca

SEQ ID NO: 2750701 - DNA, 25 bp, Homo sapien
cgattcctcactttcccttaacaga

SEQ ID NO: 2750702 - DNA, 25 bp, Homo sapien
caacagcaatcccacaatgcgactg

SEQ ID NO: 2750703 - DNA, 25 bp, Homo sapien
aacaccagcataaccaaccacacca

SEQ ID NO: 2750704 - DNA, 25 bp, Homo sapien
aatgcgactgtcgtccactccgtct

SEQ ID NO: 2750705 - DNA, 25 bp, Homo sapien
aaactggacaagtacgactcggtgg

SEQ ID NO: 2750706 - DNA, 25 bp, Homo sapien
cagggagctacctgccatgctgttg

SEQ ID NO: 2750707 - DNA, 25 bp, Homo sapien
tttcatgacattccagggagctacc

SEQ ID NO: 2750708 - DNA, 25 bp, Homo sapien
caacttgtttagcttttggatagac

SEQ ID NO: 2750709 - DNA, 25 bp, Homo sapien
cagattgctgctaaactcgccttat

SEQ ID NO: 2750710 - DNA, 25 bp, Homo sapien
tcacctctgaatgatgtggactcag

SEQ ID NO: 2750711 - DNA, 25 bp, Homo sapien
gaaggatggaattcctgcacactgg

SEQ ID NO: 2750712 - DNA, 25 bp, Homo sapien
tccccatagctccagtggcatgtgg

SEQ ID NO: 2750713 - DNA, 25 bp, Homo sapien
ctaaggaactcagggacactggttc

SEQ ID NO: 2750714 - DNA, 25 bp, Homo sapien
aacttcctcgtggaaacatgaagct

SEQ ID NO: 2750715 - DNA, 25 bp, Homo sapien
gcataaacttcctcgtggaaacatg

SEQ ID NO: 2750716 - DNA, 25 bp, Homo sapien
gttttgcataaacttcctcgtggaa

SEQ ID NO: 2750717 - DNA, 25 bp, Homo sapien
taattggttttgcataaacttcctc

SEQ ID NO: 2750718 - DNA, 25 bp, Homo sapien
tccgggcattgcagagctcttaagg

SEQ ID NO: 2750719 - DNA, 25 bp, Homo sapien
gaaatgataacataattccgggcat

SEQ ID NO: 2750720 - DNA, 25 bp, Homo sapien
catagttagaaccaggaaatgataa

SEQ ID NO: 2750721 - DNA, 25 bp, Homo sapien
gagctcttaaggtttctgtaaagga

SEQ ID NO: 2750722 - DNA, 25 bp, Homo sapien
ccagtattgaagtgaatgaatggct

SEQ ID NO: 2750723 - DNA, 25 bp, Homo sapien
gaatggctttgtagtaggtcactgc

SEQ ID NO: 2750724 - DNA, 25 bp, Homo sapien
taagctgtctatggtcatcggattg

SEQ ID NO: 2750725 - DNA, 25 bp, Homo sapien
catcggattgggaatgaaaactgag

SEQ ID NO: 2750726 - DNA, 25 bp, Homo sapien
tcaagtcaggacatgtggacagccg

SEQ ID NO: 2750727 - DNA, 25 bp, Homo sapien
catcaagtcaggacatgtggacagc

SEQ ID NO: 2750728 - DNA, 25 bp, Homo sapien
gtcaggacatgtggacagccgtggg

SEQ ID NO: 2750729 - DNA, 25 bp, Homo sapien
aagtcaggacatgtggacagccgtg

SEQ ID NO: 2750730 - DNA, 25 bp, Homo sapien
cccgcagcctcacactgtgctctct

SEQ ID NO: 2750731 - DNA, 25 bp, Homo sapien
ctgctgaagctctgctcatcactct

SEQ ID NO: 2750732 - DNA, 25 bp, Homo sapien
ccagccacacgcatgtctgctgaag

SEQ ID NO: 2750733 - DNA, 25 bp, Homo sapien
ggatcaagggtttctgccccagcca

SEQ ID NO: 2750734 - DNA, 25 bp, Homo sapien
tgtccaaagcaaccgctagcaacat

SEQ ID NO: 2750735 - DNA, 25 bp, Homo sapien
gtcccttaaaggagcatgtccaaag

SEQ ID NO: 2750736 - DNA, 25 bp, Homo sapien
taaaggagcatgtccaaagcaaccg

SEQ ID NO: 2750737 - DNA, 25 bp, Homo sapien
ggagcatgtccaaagcaaccgctag

SEQ ID NO: 2750738 - DNA, 25 bp, Homo sapien
ccagtagtcgaataaagtagtagac

SEQ ID NO: 2750739 - DNA, 25 bp, Homo sapien
ctgccaatatcacagcatcgttctt

SEQ ID NO: 2750740 - DNA, 25 bp, Homo sapien
ggcctgagaccagtagtcgaataaa

SEQ ID NO: 2750741 - DNA, 25 bp, Homo sapien
catcgttcttcatggcctgagacca

SEQ ID NO: 2750742 - DNA, 25 bp, Homo sapien
aactcctggccggtctcagagctgc

SEQ ID NO: 2750743 - DNA, 25 bp, Homo sapien
cagagcgtgcaaattcccggagaac

SEQ ID NO: 2750744 - DNA, 25 bp, Homo sapien
cactgagaactcctggccggtctca

SEQ ID NO: 2750745 - DNA, 25 bp, Homo sapien
ggagaacgctcctgctttcagactc

SEQ ID NO: 2750746 - DNA, 25 bp, Homo sapien
gaggtacagccaaatgctacttttg

SEQ ID NO: 2750747 - DNA, 25 bp, Homo sapien
caacttctgaggtacagccaaatgc

SEQ ID NO: 2750748 - DNA, 25 bp, Homo sapien
gcagcgctggccctgcaacttctga

SEQ ID NO: 2750749 - DNA, 25 bp, Homo sapien
gctacttttgcctcctgtgcagagt

SEQ ID NO: 2750750 - DNA, 25 bp, Homo sapien
catattgctgacacagaggatcaaa

SEQ ID NO: 2750751 - DNA, 25 bp, Homo sapien
actgtaactcagcatattgctgaca

SEQ ID NO: 2750752 - DNA, 25 bp, Homo sapien
gaggatcaaattcagccagtgatgg

SEQ ID NO: 2750753 - DNA, 25 bp, Homo sapien
tgtgcattggcgttttgtgacaact

SEQ ID NO: 2750754 - DNA, 25 bp, Homo sapien
gcccttggtcagttggagacctgct

SEQ ID NO: 2750755 - DNA, 25 bp, Homo sapien
tgcaaccaagtggcccttggtcagt

SEQ ID NO: 2750756 - DNA, 25 bp, Homo sapien
caagtggcccttggtcagttggaga

SEQ ID NO: 2750757 - DNA, 25 bp, Homo sapien
tggcccttggtcagttggagacctg

SEQ ID NO: 2750758 - DNA, 25 bp, Homo sapien
tcatggaagtagaacacaccgtatc

SEQ ID NO: 2750759 - DNA, 25 bp, Homo sapien
cacaccgtatctcagtgaggaattt

SEQ ID NO: 2750760 - DNA, 25 bp, Homo sapien
tagaacacaccgtatctcagtgagg

SEQ ID NO: 2750761 - DNA, 25 bp, Homo sapien
ggaagtcatggaagtagaacacacc

SEQ ID NO: 2750762 - DNA, 25 bp, Homo sapien
ggaatttctacgtcccgtgcctctg

SEQ ID NO: 2750763 - DNA, 25 bp, Homo sapien
tggagtctctggaatttctacgtcc

SEQ ID NO: 2750764 - DNA, 25 bp, Homo sapien
ggacggtggagcctcgcggaccctg

SEQ ID NO: 2750765 - DNA, 25 bp, Homo sapien
cctgagatgaggtcggccttggctc

SEQ ID NO: 2750766 - DNA, 25 bp, Homo sapien
ctggggacggggcaaatccaggcat

SEQ ID NO: 2750767 - DNA, 25 bp, Homo sapien
caggtgagacgaggagtcctcaccc

SEQ ID NO: 2750768 - DNA, 25 bp, Homo sapien
gggcgctccaggtgagacgaggagt

SEQ ID NO: 2750769 - DNA, 25 bp, Homo sapien
tgagacgaggagtcctcaccccagt

SEQ ID NO: 2750770 - DNA, 25 bp, Homo sapien
tccaggtgagacgaggagtcctcac

SEQ ID NO: 2750771 - DNA, 25 bp, Homo sapien
agaattccataaggactgggtggtg

SEQ ID NO: 2750772 - DNA, 25 bp, Homo sapien
tttacgtttaggcagctgacaaact

SEQ ID NO: 2750773 - DNA, 25 bp, Homo sapien
tggtgaacccccactctctacggag

SEQ ID NO: 2750774 - DNA, 25 bp, Homo sapien
tgtcgcccatgtaaacacagcagaa

SEQ ID NO: 2750775 - DNA, 25 bp, Homo sapien
tactagagaggtgaacatcactcat

SEQ ID NO: 2750776 - DNA, 25 bp, Homo sapien
aagttggaagcatctgtctcaacct

SEQ ID NO: 2750777 - DNA, 25 bp, Homo sapien
tcaaccttaggaagattcactcgag

SEQ ID NO: 2750778 - DNA, 25 bp, Homo sapien
gccagagatttttggaagttggaag

SEQ ID NO: 2750779 - DNA, 25 bp, Homo sapien
ccagaggcctgtcccagttggtcat

SEQ ID NO: 2750780 - DNA, 25 bp, Homo sapien
tccagaggcctgtcccagttggtca

SEQ ID NO: 2750781 - DNA, 25 bp, Homo sapien
gtccagaggcctgtcccagttggtc

SEQ ID NO: 2750782 - DNA, 25 bp, Homo sapien
aggatggggtagtagctttttgcaa

SEQ ID NO: 2750783 - DNA, 25 bp, Homo sapien
gattagtgatttgagctgcggcagc

SEQ ID NO: 2750784 - DNA, 25 bp, Homo sapien
tggactttcttaacgatgaggatgg

SEQ ID NO: 2750785 - DNA, 25 bp, Homo sapien
tccattgaggatgatgattctttat

SEQ ID NO: 2750786 - DNA, 25 bp, Homo sapien
attgctttaaactttacatcctcag

SEQ ID NO: 2750787 - DNA, 25 bp, Homo sapien
atcttgttcactattgctttaaact

SEQ ID NO: 2750788 - DNA, 25 bp, Homo sapien
catcctcagtgactattacttttgc

SEQ ID NO: 2750789 - DNA, 25 bp, Homo sapien
cctaattgtgttcatgtttcctatc

SEQ ID NO: 2750790 - DNA, 25 bp, Homo sapien
gggatcctcggccattcatagtttt

SEQ ID NO: 2750791 - DNA, 25 bp, Homo sapien
gcatgttttcacagttcccacagtg

SEQ ID NO: 2750792 - DNA, 25 bp, Homo sapien
tgtgagtgattagatgcttggacca

SEQ ID NO: 2750793 - DNA, 25 bp, Homo sapien
cacagcaagttacgtgccacatcca

SEQ ID NO: 2750794 - DNA, 25 bp, Homo sapien
gtgacccagagagggcggggccaga

SEQ ID NO: 2750795 - DNA, 25 bp, Homo sapien
tttatctatgctgaggagcagcttc

SEQ ID NO: 2750796 - DNA, 25 bp, Homo sapien
gggaggagggcagtgacccagagag

SEQ ID NO: 2750797 - DNA, 25 bp, Homo sapien
agagagggcgggaggggctgtagac

SEQ ID NO: 2750798 - DNA, 25 bp, Homo sapien
ttaacacctcgttaatctgccccat

SEQ ID NO: 2750799 - DNA, 25 bp, Homo sapien
tctgtttaacacctcgttaatctgc

SEQ ID NO: 2750800 - DNA, 25 bp, Homo sapien
tgtttaacacctcgttaatctgccc

SEQ ID NO: 2750801 - DNA, 25 bp, Homo sapien
tctctgtttaacacctcgttaatct

SEQ ID NO: 2750802 - DNA, 25 bp, Homo sapien
tcaccgggagcgctgtgtttacagg

SEQ ID NO: 2750803 - DNA, 25 bp, Homo sapien
ccctgcagggcaccgatgagcagga

SEQ ID NO: 2750804 - DNA, 25 bp, Homo sapien
ggactgggcgaaattccagtgtcca

SEQ ID NO: 2750805 - DNA, 25 bp, Homo sapien
acatgcatccatggactgggcgaaa

SEQ ID NO: 2750806 - DNA, 25 bp, Homo sapien
ggctctctctatcgctcttcttact

SEQ ID NO: 2750807 - DNA, 25 bp, Homo sapien
aagcgtgtaagaggctctctctatc

SEQ ID NO: 2750808 - DNA, 25 bp, Homo sapien
gaaagcgtgtaagaggctctctcta

SEQ ID NO: 2750809 - DNA, 25 bp, Homo sapien
tgtaagaggctctctctatcgctct

SEQ ID NO: 2750810 - DNA, 25 bp, Homo sapien
tggtgcctcctacagcagaacaagc

SEQ ID NO: 2750811 - DNA, 25 bp, Homo sapien
tctgcggagagctggtgcctcctac

SEQ ID NO: 2750812 - DNA, 25 bp, Homo sapien
caagcaggaaatagcgcagcagaga

SEQ ID NO: 2750813 - DNA, 25 bp, Homo sapien
gcagaacaagcaggaaatagcgcag

SEQ ID NO: 2750814 - DNA, 25 bp, Homo sapien
gcagagctgggcggtgaggaaactg

SEQ ID NO: 2750815 - DNA, 25 bp, Homo sapien
ctggctgggtttatctcaagaggct

SEQ ID NO: 2750816 - DNA, 25 bp, Homo sapien
ctgggtttatctcaagaggctgtgc

SEQ ID NO: 2750817 - DNA, 25 bp, Homo sapien
cagagctgggcggtgaggaaactga

SEQ ID NO: 2750818 - DNA, 25 bp, Homo sapien
ccgaccattggtgggaggtcccatg

SEQ ID NO: 2750819 - DNA, 25 bp, Homo sapien
cattggtgggaggtcccatgctcac

SEQ ID NO: 2750820 - DNA, 25 bp, Homo sapien
gccgaccattggtgggaggtcccat

SEQ ID NO: 2750821 - DNA, 25 bp, Homo sapien
gaccattggtgggaggtcccatgct

SEQ ID NO: 2750822 - DNA, 25 bp, Homo sapien
aaccgtgtggcagctggcgtccttt

SEQ ID NO: 2750823 - DNA, 25 bp, Homo sapien
cagctggcgtcctttgtttcaacaa

SEQ ID NO: 2750824 - DNA, 25 bp, Homo sapien
cgcctgtgcacgaaccgtgtggcag

SEQ ID NO: 2750825 - DNA, 25 bp, Homo sapien
gggacataaggccgcctgtgcacga

SEQ ID NO: 2750826 - DNA, 25 bp, Homo sapien
tcctgtgattccactcggagggggc

SEQ ID NO: 2750827 - DNA, 25 bp, Homo sapien
tttccaaataagtaagctgaccgct

SEQ ID NO: 2750828 - DNA, 25 bp, Homo sapien
tctgagcataagcttggcccctctt

SEQ ID NO: 2750829 - DNA, 25 bp, Homo sapien
attgctgggaatcttcaaggctctc

SEQ ID NO: 2750830 - DNA, 25 bp, Homo sapien
caaggctctcattgactctgagcat

SEQ ID NO: 2750831 - DNA, 25 bp, Homo sapien
tgaagcttgaggtgtaaggtctacc

SEQ ID NO: 2750832 - DNA, 25 bp, Homo sapien
cttgtgaagcttgaggtgtaaggtc

SEQ ID NO: 2750833 - DNA, 25 bp, Homo sapien
acaaggttccttgtgaagcttgagg

SEQ ID NO: 2750834 - DNA, 25 bp, Homo sapien
ttccttgtgaagcttgaggtgtaag

SEQ ID NO: 2750835 - DNA, 25 bp, Homo sapien
gttggaccgggctgacaccagcctt

SEQ ID NO: 2750836 - DNA, 25 bp, Homo sapien
tcccacagtgggatccagtgatgaa

SEQ ID NO: 2750837 - DNA, 25 bp, Homo sapien
gccttcggcttcaagcccacctctg

SEQ ID NO: 2750838 - DNA, 25 bp, Homo sapien
tgggatccagtgatgaatacccgcc

SEQ ID NO: 2750839 - DNA, 25 bp, Homo sapien
ccttattgctttggtatctgacctc

SEQ ID NO: 2750840 - DNA, 25 bp, Homo sapien
tctctcacagcgtactctttggttt

SEQ ID NO: 2750841 - DNA, 25 bp, Homo sapien
tcagaggtattagggtagaatttca

SEQ ID NO: 2750842 - DNA, 25 bp, Homo sapien
tctcacttaaagaaggagggtcaga

SEQ ID NO: 2750843 - DNA, 25 bp, Homo sapien
ttagcacatacagcagcccttccac

SEQ ID NO: 2750844 - DNA, 25 bp, Homo sapien
cccttccacaagtgactcgccctgg

SEQ ID NO: 2750845 - DNA, 25 bp, Homo sapien
cttagcacatacagcagcccttcca

SEQ ID NO: 2750846 - DNA, 25 bp, Homo sapien
aagtgactcgccctggggcacattc

SEQ ID NO: 2750847 - DNA, 25 bp, Homo sapien
ggtgaactgatctctaatttgctct

SEQ ID NO: 2750848 - DNA, 25 bp, Homo sapien
ctatgatacaatcagggattgggct

SEQ ID NO: 2750849 - DNA, 25 bp, Homo sapien
cagggattgggctgacttaaagaaa

SEQ ID NO: 2750850 - DNA, 25 bp, Homo sapien
tggtatttctgagggtgaactgatc

SEQ ID NO: 2750851 - DNA, 25 bp, Homo sapien
tccactttggcagatcttgattgtt

SEQ ID NO: 2750852 - DNA, 25 bp, Homo sapien
tatgaaacccaggtaaaagcttgga

SEQ ID NO: 2750853 - DNA, 25 bp, Homo sapien
tattgacgaggacccctccactttg

SEQ ID NO: 2750854 - DNA, 25 bp, Homo sapien
tgagaccctgaaagatcttaccagc

SEQ ID NO: 2750855 - DNA, 25 bp, Homo sapien
tccacctggttaccaatgctctata

SEQ ID NO: 2750856 - DNA, 25 bp, Homo sapien
cacctggttaccaatgctctatatt

SEQ ID NO: 2750857 - DNA, 25 bp, Homo sapien
tgctccacctggttaccaatgctct

SEQ ID NO: 2750858 - DNA, 25 bp, Homo sapien
caatgctctatatttgagaggattc

SEQ ID NO: 2750859 - DNA, 25 bp, Homo sapien
ttttgcaaccttaaaagctgtgaag

SEQ ID NO: 2750860 - DNA, 25 bp, Homo sapien
tggtatgatcatgggctcctttttc

SEQ ID NO: 2750861 - DNA, 25 bp, Homo sapien
agctgtgaagggtattggtatgatc

SEQ ID NO: 2750862 - DNA, 25 bp, Homo sapien
tatcgtctggcctcatcgagttgat

SEQ ID NO: 2750863 - DNA, 25 bp, Homo sapien
ggtcctgttcgatgctgactctcca

SEQ ID NO: 2750864 - DNA, 25 bp, Homo sapien
ctgactctccaaagctgagatctta

SEQ ID NO: 2750865 - DNA, 25 bp, Homo sapien
atttgtggtcctgttcgatgctgac

SEQ ID NO: 2750866 - DNA, 25 bp, Homo sapien
gctgagatcttaacacacacattct

SEQ ID NO: 2750867 - DNA, 25 bp, Homo sapien
cttgggctagaagtgaccgtatcac

SEQ ID NO: 2750868 - DNA, 25 bp, Homo sapien
agctgccttgggctagaagtgaccg

SEQ ID NO: 2750869 - DNA, 25 bp, Homo sapien
gccttgggctagaagtgaccgtatc

SEQ ID NO: 2750870 - DNA, 25 bp, Homo sapien
ctagaagtgaccgtatcacttccac

SEQ ID NO: 2750871 - DNA, 25 bp, Homo sapien
ttaagacacattaaatatgagtaaa

SEQ ID NO: 2750872 - DNA, 25 bp, Homo sapien
gacacattaaatatgagtaaaagct

SEQ ID NO: 2750873 - DNA, 25 bp, Homo sapien
cacattaaatatgagtaaaagcttc

SEQ ID NO: 2750874 - DNA, 25 bp, Homo sapien
aagacacattaaatatgagtaaaag

SEQ ID NO: 2750875 - DNA, 25 bp, Homo sapien
cagaaaggagatgtgctcacttgag

SEQ ID NO: 2750876 - DNA, 25 bp, Homo sapien
gatcctcgcagcaggttagtgtcag

SEQ ID NO: 2750877 - DNA, 25 bp, Homo sapien
aacagtaaaattgccccgatcctcg

SEQ ID NO: 2750878 - DNA, 25 bp, Homo sapien
tcgccaacttctcgctgtgttgtaa

SEQ ID NO: 2750879 - DNA, 25 bp, Homo sapien
tctgtagaccttgttcaaagctgcc

SEQ ID NO: 2750880 - DNA, 25 bp, Homo sapien
gagctatgttctcaggtctgtagac

SEQ ID NO: 2750881 - DNA, 25 bp, Homo sapien
aacagatgccgctccagagagagtg

SEQ ID NO: 2750882 - DNA, 25 bp, Homo sapien
gaaagcctgtgccagcggttctgtg

SEQ ID NO: 2750883 - DNA, 25 bp, Homo sapien
ggaaccgtgcatgtgtgaccatctg

SEQ ID NO: 2750884 - DNA, 25 bp, Homo sapien
gaatggctccgttggctttcactgt

SEQ ID NO: 2750885 - DNA, 25 bp, Homo sapien
caccacgaggcttctcaataatagg

SEQ ID NO: 2750886 - DNA, 25 bp, Homo sapien
aatcagcttcaaccagacaccatca

SEQ ID NO: 2750887 - DNA, 25 bp, Homo sapien
tggtaaaatctggaggtgctgtctt

SEQ ID NO: 2750888 - DNA, 25 bp, Homo sapien
tctgccctttgtgcccagcagtcat

SEQ ID NO: 2750889 - DNA, 25 bp, Homo sapien
ggtgctgtcttctgccctttgtgcc

SEQ ID NO: 2750890 - DNA, 25 bp, Homo sapien
ctcatatttccatacttggtaaaat

SEQ ID NO: 2750891 - DNA, 25 bp, Homo sapien
tacactttagatcatgtacagacaa

SEQ ID NO: 2750892 - DNA, 25 bp, Homo sapien
ttcaaagtagatgttagtggtccag

SEQ ID NO: 2750893 - DNA, 25 bp, Homo sapien
tagatgttagtggtccagtttacac

SEQ ID NO: 2750894 - DNA, 25 bp, Homo sapien
taagaatgaacgttgaacacaggat

SEQ ID NO: 2750895 - DNA, 25 bp, Homo sapien
ccagcagctagggttgactgagaca

SEQ ID NO: 2750896 - DNA, 25 bp, Homo sapien
taccagtcggtgataattttcccag

SEQ ID NO: 2750897 - DNA, 25 bp, Homo sapien
tgcccttacgaaaagaggacctgga

SEQ ID NO: 2750898 - DNA, 25 bp, Homo sapien
ctgatcacatacagacgggccagct

SEQ ID NO: 2750899 - DNA, 25 bp, Homo sapien
tctatggcaatacttctactacatt

SEQ ID NO: 2750900 - DNA, 25 bp, Homo sapien
tatggcaatacttctactacattga

SEQ ID NO: 2750901 - DNA, 25 bp, Homo sapien
gcaatacttctactacattgaatcc

SEQ ID NO: 2750902 - DNA, 25 bp, Homo sapien
tggcaatacttctactacattgaat

SEQ ID NO: 2750903 - DNA, 25 bp, Homo sapien
gatgttccatgttaagggcaatttc

SEQ ID NO: 2750904 - DNA, 25 bp, Homo sapien
catgttaagggcaatttcatctcca

SEQ ID NO: 2750905 - DNA, 25 bp, Homo sapien
ccaggaagtgatgttccatgttaag

SEQ ID NO: 2750906 - DNA, 25 bp, Homo sapien
gaagtgatgttccatgttaagggca

SEQ ID NO: 2750907 - DNA, 25 bp, Homo sapien
ggtcctctgccccaagcataaaaat

SEQ ID NO: 2750908 - DNA, 25 bp, Homo sapien
agaagcttgatggtgctggcccagg

SEQ ID NO: 2750909 - DNA, 25 bp, Homo sapien
agtggttggaaggaagcgatgatgc

SEQ ID NO: 2750910 - DNA, 25 bp, Homo sapien
tggggacacatgcttgcagaagagg

SEQ ID NO: 2750911 - DNA, 25 bp, Homo sapien
tgtaagtgaggtgtttgctgtgttt

SEQ ID NO: 2750912 - DNA, 25 bp, Homo sapien
agtgtaagtgaggtgtttgctgtgt

SEQ ID NO: 2750913 - DNA, 25 bp, Homo sapien
tcaaggaaggcaggtaactttccag

SEQ ID NO: 2750914 - DNA, 25 bp, Homo sapien
cagtgtaagtgaggtgtttgctgtg

SEQ ID NO: 2750915 - DNA, 25 bp, Homo sapien
acttcttttgaaaacgatgaactgg

SEQ ID NO: 2750916 - DNA, 25 bp, Homo sapien
cttttgaaaacgatgaactggtgaa

SEQ ID NO: 2750917 - DNA, 25 bp, Homo sapien
cttcttttgaaaacgatgaactggt

SEQ ID NO: 2750918 - DNA, 25 bp, Homo sapien
cttctgcactgggagactgtttctg

SEQ ID NO: 2750919 - DNA, 25 bp, Homo sapien
actgggagactgtttctgaaagtga

SEQ ID NO: 2750920 - DNA, 25 bp, Homo sapien
tctgaaagtgaatttggttccatac

SEQ ID NO: 2750921 - DNA, 25 bp, Homo sapien
tgtaagacagtgaacactggcaggg

SEQ ID NO: 2750922 - DNA, 25 bp, Homo sapien
actgcacagccagtccatgaggcag

SEQ ID NO: 2750923 - DNA, 25 bp, Homo sapien
tatttttaccgagtcttcattatca

SEQ ID NO: 2750924 - DNA, 25 bp, Homo sapien
aattgactgtcctatttttaccgag

SEQ ID NO: 2750925 - DNA, 25 bp, Homo sapien
tgtcctatttttaccgagtcttcat

SEQ ID NO: 2750926 - DNA, 25 bp, Homo sapien
tgtggtctatctttccccaactttc

SEQ ID NO: 2750927 - DNA, 25 bp, Homo sapien
tggaccagcccatgacttagtgcta

SEQ ID NO: 2750928 - DNA, 25 bp, Homo sapien
ctttgaacattagggacattctccc

SEQ ID NO: 2750929 - DNA, 25 bp, Homo sapien
gggctactgtctgaaaactttgaac

SEQ ID NO: 2750930 - DNA, 25 bp, Homo sapien
actaagaccaatgggcagctctgtg

SEQ ID NO: 2750931 - DNA, 25 bp, Homo sapien
gacaaacatctacaacttcaacctg

SEQ ID NO: 2750932 - DNA, 25 bp, Homo sapien
gaccccactggagtgacaaacatct

SEQ ID NO: 2750933 - DNA, 25 bp, Homo sapien
caacttcaacctgaataaacttgac

SEQ ID NO: 2750934 - DNA, 25 bp, Homo sapien
ggatctgggcacatatgtaaggctt

SEQ ID NO: 2750935 - DNA, 25 bp, Homo sapien
tttttctaagaggcagggtatccca

SEQ ID NO: 2750936 - DNA, 25 bp, Homo sapien
agagatcaagttcatactcaactga

SEQ ID NO: 2750937 - DNA, 25 bp, Homo sapien
actgaactttgtggatctgggcaca

SEQ ID NO: 2750938 - DNA, 25 bp, Homo sapien
tcatggtctcttagctacatctctc

SEQ ID NO: 2750939 - DNA, 25 bp, Homo sapien
atggtctcttagctacatctctctt

SEQ ID NO: 2750940 - DNA, 25 bp, Homo sapien
gcatctgcaactgcacacaaggccc

SEQ ID NO: 2750941 - DNA, 25 bp, Homo sapien
gcacacaaggcccgtgatggctgct

SEQ ID NO: 2750942 - DNA, 25 bp, Homo sapien
ctgaggaggagaccgggaaaggctt

SEQ ID NO: 2750943 - DNA, 25 bp, Homo sapien
tgaggaggagaccgggaaaggcttc

SEQ ID NO: 2750944 - DNA, 25 bp, Homo sapien
taggagggcaactttggatcacaga

SEQ ID NO: 2750945 - DNA, 25 bp, Homo sapien
agaggctcggatgcacttttgcccc

SEQ ID NO: 2750946 - DNA, 25 bp, Homo sapien
cacagaaaagatgtcgtctttggca

SEQ ID NO: 2750947 - DNA, 25 bp, Homo sapien
ggaaaggtcatgcaaccaagaggct

SEQ ID NO: 2750948 - DNA, 25 bp, Homo sapien
tgtaatggcttgtagaagagagtag

SEQ ID NO: 2750949 - DNA, 25 bp, Homo sapien
cctctgttgagcacgccaactgtgc

SEQ ID NO: 2750950 - DNA, 25 bp, Homo sapien
taggttaattgtacttcgtgttgtg

SEQ ID NO: 2750951 - DNA, 25 bp, Homo sapien
gggcctctgttgagcacgccaactg

SEQ ID NO: 2750952 - DNA, 25 bp, Homo sapien
gtaaaagcttgtggtgacctgggat

SEQ ID NO: 2750953 - DNA, 25 bp, Homo sapien
aagtaaaagcttgtggtgacctggg

SEQ ID NO: 2750954 - DNA, 25 bp, Homo sapien
taaagtaaaagcttgtggtgacctg

SEQ ID NO: 2750955 - DNA, 25 bp, Homo sapien
gacctgggatgtgggcctctacctg

SEQ ID NO: 2750956 - DNA, 25 bp, Homo sapien
gtatacggatgaatgatattgccct

SEQ ID NO: 2750957 - DNA, 25 bp, Homo sapien
gagtatacggatgaatgatattgcc

SEQ ID NO: 2750958 - DNA, 25 bp, Homo sapien
cctgtgtgcaagagtatacggatga

SEQ ID NO: 2750959 - DNA, 25 bp, Homo sapien
tgcaagagtatacggatgaatgata

SEQ ID NO: 2750960 - DNA, 25 bp, Homo sapien
tttgttgtggttgactgaaatgcat

SEQ ID NO: 2750961 - DNA, 25 bp, Homo sapien
gttttgttgtggttgactgaaatgc

SEQ ID NO: 2750962 - DNA, 25 bp, Homo sapien
attattgttttgttgtggttgactg

SEQ ID NO: 2750963 - DNA, 25 bp, Homo sapien
ttattattgttttgttgtggttgac

SEQ ID NO: 2750964 - DNA, 25 bp, Homo sapien
cattcgtgtactgataattgttgca

SEQ ID NO: 2750965 - DNA, 25 bp, Homo sapien
agctggtgaaatgagtaaagctact

SEQ ID NO: 2750966 - DNA, 25 bp, Homo sapien
ctggagctggtgaaatgagtaaagc

SEQ ID NO: 2750967 - DNA, 25 bp, Homo sapien
tgtaaccatgtaggaacagcaggtg

SEQ ID NO: 2750968 - DNA, 25 bp, Homo sapien
gcacagccaacaagccttgagagaa

SEQ ID NO: 2750969 - DNA, 25 bp, Homo sapien
caacaagccttgagagaaaaactgg

SEQ ID NO: 2750970 - DNA, 25 bp, Homo sapien
ccaaagctgctatgtcaggtggctc

SEQ ID NO: 2750971 - DNA, 25 bp, Homo sapien
tcaccaaagctgctatgtcaggtgg

SEQ ID NO: 2750972 - DNA, 25 bp, Homo sapien
caatgatggactgcctagacaaggg

SEQ ID NO: 2750973 - DNA, 25 bp, Homo sapien
gaaatgattaccaaagagccagaga

SEQ ID NO: 2750974 - DNA, 25 bp, Homo sapien
catagtgctgcaaatacccaagaag

SEQ ID NO: 2750975 - DNA, 25 bp, Homo sapien
caaagggttactccaaaatgagcca

SEQ ID NO: 2750976 - DNA, 25 bp, Homo sapien
caggtaaggaaggtgctaagacagc

SEQ ID NO: 2750977 - DNA, 25 bp, Homo sapien
tctccacttgaccaggtaaggaagg

SEQ ID NO: 2750978 - DNA, 25 bp, Homo sapien
catgtccatcacttagaagccatac

SEQ ID NO: 2750979 - DNA, 25 bp, Homo sapien
ggtgctaagacagcatgtccatcac

SEQ ID NO: 2750980 - DNA, 25 bp, Homo sapien
ctccagaggtcctgactgttgagat

SEQ ID NO: 2750981 - DNA, 25 bp, Homo sapien
cctgactgttgagatgcctggtctt

SEQ ID NO: 2750982 - DNA, 25 bp, Homo sapien
gaggtcctgactgttgagatgcctg

SEQ ID NO: 2750983 - DNA, 25 bp, Homo sapien
cagaggtcctgactgttgagatgcc

SEQ ID NO: 2750984 - DNA, 25 bp, Homo sapien
gatgatggatcttgagccacagaca

SEQ ID NO: 2750985 - DNA, 25 bp, Homo sapien
gacggatagttagaagcagagcagc

SEQ ID NO: 2750986 - DNA, 25 bp, Homo sapien
catggaaatgaatggctcccctgaa

SEQ ID NO: 2750987 - DNA, 25 bp, Homo sapien
tgtatcacgatagaaatggctaccc

SEQ ID NO: 2750988 - DNA, 25 bp, Homo sapien
tctgatgataaaatgtactcaagca

SEQ ID NO: 2750989 - DNA, 25 bp, Homo sapien
tatgattggccatctgatgataaaa

SEQ ID NO: 2750990 - DNA, 25 bp, Homo sapien
tatatgattggccatctgatgataa

SEQ ID NO: 2750991 - DNA, 25 bp, Homo sapien
gatgataaaatgtactcaagcagta

SEQ ID NO: 2750992 - DNA, 25 bp, Homo sapien
gcgttagtcagccaggagatgtaga

SEQ ID NO: 2750993 - DNA, 25 bp, Homo sapien
tttcaatttacctaagcctgctttg

SEQ ID NO: 2750994 - DNA, 25 bp, Homo sapien
gactcaggagagcttctctctttca

SEQ ID NO: 2750995 - DNA, 25 bp, Homo sapien
aaacataagttggactcaggagagc

SEQ ID NO: 2750996 - DNA, 25 bp, Homo sapien
tatttccaaggtcctgtgtgcctca

SEQ ID NO: 2750997 - DNA, 25 bp, Homo sapien
gtgcctcaatactgtactgtagaca

SEQ ID NO: 2750998 - DNA, 25 bp, Homo sapien
actgtactgtagacaggtgctgtca

SEQ ID NO: 2750999 - DNA, 25 bp, Homo sapien
aaacaactaatccttgtgtctctgc

SEQ ID NO: 2751000 - DNA, 25 bp, Homo sapien
ctgccacagccacagttaggatgtg

SEQ ID NO: 2751001 - DNA, 25 bp, Homo sapien
tgcagacttggcctggtaataacct

SEQ ID NO: 2751002 - DNA, 25 bp, Homo sapien
cagttaggatgtggtctttctgcat

SEQ ID NO: 2751003 - DNA, 25 bp, Homo sapien
cagacttggcctggtaataaccttt

SEQ ID NO: 2751004 - DNA, 25 bp, Homo sapien
ttctttctcaagactctcagggttc

SEQ ID NO: 2751005 - DNA, 25 bp, Homo sapien
tctcaagactctcagggttcttttt

SEQ ID NO: 2751006 - DNA, 25 bp, Homo sapien
tttctcaagactctcagggttcttt

SEQ ID NO: 2751007 - DNA, 25 bp, Homo sapien
tcaagactctcagggttctttttac

SEQ ID NO: 2751008 - DNA, 25 bp, Homo sapien
tgatctagcatatcagccagtccta

SEQ ID NO: 2751009 - DNA, 25 bp, Homo sapien
caactaggatgattttggctcaaag

SEQ ID NO: 2751010 - DNA, 25 bp, Homo sapien
tggcagtaagtaggcagcagctcca

SEQ ID NO: 2751011 - DNA, 25 bp, Homo sapien
tcctggcagaaggacccagctttgc

SEQ ID NO: 2751012 - DNA, 25 bp, Homo sapien
ctaataacagacatatccttgggcc

SEQ ID NO: 2751013 - DNA, 25 bp, Homo sapien
ttgggcctggggtagtgtcggacaa

SEQ ID NO: 2751014 - DNA, 25 bp, Homo sapien
taataacagacatatccttgggcct

SEQ ID NO: 2751015 - DNA, 25 bp, Homo sapien
cctggggtagtgtcggacaaagcac

SEQ ID NO: 2751016 - DNA, 25 bp, Homo sapien
ctggggtatgtggttcttggatctc

SEQ ID NO: 2751017 - DNA, 25 bp, Homo sapien
ttagcctcgcaaaccaaaggatgga

SEQ ID NO: 2751018 - DNA, 25 bp, Homo sapien
tctgcagcagcacaaaaccattgct

SEQ ID NO: 2751019 - DNA, 25 bp, Homo sapien
ttcccaaggctatctggggtatgtg

SEQ ID NO: 2751020 - DNA, 25 bp, Homo sapien
ctggtccacacagcgtgtcaggatc

SEQ ID NO: 2751021 - DNA, 25 bp, Homo sapien
gatcactctatgttccgtacctttg

SEQ ID NO: 2751022 - DNA, 25 bp, Homo sapien
tacctttgtgtggactcagtgtgga

SEQ ID NO: 2751023 - DNA, 25 bp, Homo sapien
gcgtgtcaggatcactctatgttcc

SEQ ID NO: 2751024 - DNA, 25 bp, Homo sapien
cctgcactgggtgttaaacacgtgg

SEQ ID NO: 2751025 - DNA, 25 bp, Homo sapien
cactgggtgttaaacacgtgggcat

SEQ ID NO: 2751026 - DNA, 25 bp, Homo sapien
tgcactgggtgttaaacacgtgggc

SEQ ID NO: 2751027 - DNA, 25 bp, Homo sapien
ccctgcactgggtgttaaacacgtg

SEQ ID NO: 2751028 - DNA, 25 bp, Homo sapien
ttgtttttggagtgatcacaccata

SEQ ID NO: 2751029 - DNA, 25 bp, Homo sapien
gctctgcgtggaagggctttttgtt

SEQ ID NO: 2751030 - DNA, 25 bp, Homo sapien
ctctgcgtggaagggctttttgttt

SEQ ID NO: 2751031 - DNA, 25 bp, Homo sapien
ttggagtgatcacaccatacaggag

SEQ ID NO: 2751032 - DNA, 25 bp, Homo sapien
tacaagtccagaattacaaaggttc

SEQ ID NO: 2751033 - DNA, 25 bp, Homo sapien
tctgggatgtggttcacagtaagtg

SEQ ID NO: 2751034 - DNA, 25 bp, Homo sapien
cattctgaggggttctaagtacttc

SEQ ID NO: 2751035 - DNA, 25 bp, Homo sapien
cttctagcccaagcatgagcaggat

SEQ ID NO: 2751036 - DNA, 25 bp, Homo sapien
gactgttgtggaagtgagtctggct

SEQ ID NO: 2751037 - DNA, 25 bp, Homo sapien
ggagaacagcgtgattggacccttc

SEQ ID NO: 2751038 - DNA, 25 bp, Homo sapien
ttgtggaagtgagtctggctgtagt

SEQ ID NO: 2751039 - DNA, 25 bp, Homo sapien
tagttggagaacagcgtgattggac

SEQ ID NO: 2751040 - DNA, 25 bp, Homo sapien
gcagctttccacgtgacctccactg

SEQ ID NO: 2751041 - DNA, 25 bp, Homo sapien
gctttccacgtgacctccactggaa

SEQ ID NO: 2751042 - DNA, 25 bp, Homo sapien
aatgacagcgatgaggtgggccaat

SEQ ID NO: 2751043 - DNA, 25 bp, Homo sapien
gaaccagaatgacagcgatgaggtg

SEQ ID NO: 2751044 - DNA, 25 bp, Homo sapien
cttttgaagacatatccagcatttt

SEQ ID NO: 2751045 - DNA, 25 bp, Homo sapien
ctcttttgaagacatatccagcatt

SEQ ID NO: 2751046 - DNA, 25 bp, Homo sapien
tcttttgaagacatatccagcattt

SEQ ID NO: 2751047 - DNA, 25 bp, Homo sapien
actcttttgaagacatatccagcat

SEQ ID NO: 2751048 - DNA, 25 bp, Homo sapien
tttctcctgattgcagatacgcagc

SEQ ID NO: 2751049 - DNA, 25 bp, Homo sapien
acaggcattgataatgcaagcttgt

SEQ ID NO: 2751050 - DNA, 25 bp, Homo sapien
gatacgcagcataaacactcaagat

SEQ ID NO: 2751051 - DNA, 25 bp, Homo sapien
agccctcggccactgagcagtggga

SEQ ID NO: 2751052 - DNA, 25 bp, Homo sapien
cagagcaattgtcacaggatgagca

SEQ ID NO: 2751053 - DNA, 25 bp, Homo sapien
aggagctgtgccgtccactggccat

SEQ ID NO: 2751054 - DNA, 25 bp, Homo sapien
cacaggatgagcataagaggagctg

SEQ ID NO: 2751055 - DNA, 25 bp, Homo sapien
tggctcccattgcagagcaattgtc

SEQ ID NO: 2751056 - DNA, 25 bp, Homo sapien
ttcttcatgaatagaatgagtcgac

SEQ ID NO: 2751057 - DNA, 25 bp, Homo sapien
ccaatttcgtaagaaattatcagaa

SEQ ID NO: 2751058 - DNA, 25 bp, Homo sapien
gagtcgactcttctaaaattaatga

SEQ ID NO: 2751059 - DNA, 25 bp, Homo sapien
tataaacataatggacacgcacttc

SEQ ID NO: 2751060 - DNA, 25 bp, Homo sapien
tagcagctgtgtccgcctgactttg

SEQ ID NO: 2751061 - DNA, 25 bp, Homo sapien
gtgtccgcctgactttggcccatgc

SEQ ID NO: 2751062 - DNA, 25 bp, Homo sapien
tcctagcagctgtgtccgcctgact

SEQ ID NO: 2751063 - DNA, 25 bp, Homo sapien
ctgtgtccgcctgactttggcccat

SEQ ID NO: 2751064 - DNA, 25 bp, Homo sapien
agccccaaatcaaaagatggtagaa

SEQ ID NO: 2751065 - DNA, 25 bp, Homo sapien
actcctcggatgagggcagaactcc

SEQ ID NO: 2751066 - DNA, 25 bp, Homo sapien
gccccaaatcaaaagatggtagaag

SEQ ID NO: 2751067 - DNA, 25 bp, Homo sapien
cctcggatgagggcagaactcccac

SEQ ID NO: 2751068 - DNA, 25 bp, Homo sapien
ccaaacggacggtgtggacaagcat

SEQ ID NO: 2751069 - DNA, 25 bp, Homo sapien
tatcaatggccagatgggaaatgtg

SEQ ID NO: 2751070 - DNA, 25 bp, Homo sapien
tctctgctctgcacaatatcaatgg

SEQ ID NO: 2751071 - DNA, 25 bp, Homo sapien
catcagattaatgtccaggctctgg

SEQ ID NO: 2751072 - DNA, 25 bp, Homo sapien
taactagagacacagttgtgcatgc

SEQ ID NO: 2751073 - DNA, 25 bp, Homo sapien
gcatgcgtggtgcaatatctggcct

SEQ ID NO: 2751074 - DNA, 25 bp, Homo sapien
aaacactttcttgaacagcaggcta

SEQ ID NO: 2751075 - DNA, 25 bp, Homo sapien
tacaccttccgagtctgtcagtagg

SEQ ID NO: 2751076 - DNA, 25 bp, Homo sapien
tgtcatctctagagttcccacttcc

SEQ ID NO: 2751077 - DNA, 25 bp, Homo sapien
ccaaggagtcacgtgagttcataaa

SEQ ID NO: 2751078 - DNA, 25 bp, Homo sapien
taaaaaccacccagcagaatgtctg

SEQ ID NO: 2751079 - DNA, 25 bp, Homo sapien
tgcattcgtaacagaccaaggagtc

SEQ ID NO: 2751080 - DNA, 25 bp, Homo sapien
ttagaatctatccagtctctttccc

SEQ ID NO: 2751081 - DNA, 25 bp, Homo sapien
tattagaatctatccagtctctttc

SEQ ID NO: 2751082 - DNA, 25 bp, Homo sapien
attagaatctatccagtctctttcc

SEQ ID NO: 2751083 - DNA, 25 bp, Homo sapien
catattagaatctatccagtctctt

SEQ ID NO: 2751084 - DNA, 25 bp, Homo sapien
tcttccacttcagaaacctgcaaaa

SEQ ID NO: 2751085 - DNA, 25 bp, Homo sapien
gcagcattccatcactatctgcttc

SEQ ID NO: 2751086 - DNA, 25 bp, Homo sapien
gcattccatcactatctgcttcttc

SEQ ID NO: 2751087 - DNA, 25 bp, Homo sapien
tagcagcattccatcactatctgct

SEQ ID NO: 2751088 - DNA, 25 bp, Homo sapien
taagggactggcgttccaggaacag

SEQ ID NO: 2751089 - DNA, 25 bp, Homo sapien
gccggctcagtgaggcggagcggcc

SEQ ID NO: 2751090 - DNA, 25 bp, Homo sapien
ctcccatcctaagggactggcgttc

SEQ ID NO: 2751091 - DNA, 25 bp, Homo sapien
cagtgaggcggagcggccaagcctt

SEQ ID NO: 2751092 - DNA, 25 bp, Homo sapien
ttaacgtccatttttctccacaata

SEQ ID NO: 2751093 - DNA, 25 bp, Homo sapien
ccatttttctccacaatatccttaa

SEQ ID NO: 2751094 - DNA, 25 bp, Homo sapien
acgtccatttttctccacaatatcc

SEQ ID NO: 2751095 - DNA, 25 bp, Homo sapien
gtccatttttctccacaatatcctt

SEQ ID NO: 2751096 - DNA, 25 bp, Homo sapien
tatcttggctccatctattataaga

SEQ ID NO: 2751097 - DNA, 25 bp, Homo sapien
ggagacatcatgagctagcagacac

SEQ ID NO: 2751098 - DNA, 25 bp, Homo sapien
ataagagtcaatcgaagattcattc

SEQ ID NO: 2751099 - DNA, 25 bp, Homo sapien
cccacaacaaattatcttggctcca

SEQ ID NO: 2751100 - DNA, 25 bp, Homo sapien
cgttacaacaggaagcattaagagc

SEQ ID NO: 2751101 - DNA, 25 bp, Homo sapien
tcattcagatttgcgagttgcacct

SEQ ID NO: 2751102 - DNA, 25 bp, Homo sapien
gagttgcacctggtgctgtcagcac

SEQ ID NO: 2751103 - DNA, 25 bp, Homo sapien
ggtgcttcttgcctgtgttactgac

SEQ ID NO: 2751104 - DNA, 25 bp, Homo sapien
caaggatgtagcaggcatgccccat

SEQ ID NO: 2751105 - DNA, 25 bp, Homo sapien
ccaaggatgtagcaggcatgcccca

SEQ ID NO: 2751106 - DNA, 25 bp, Homo sapien
tttctatgtctggttcggcttccct

SEQ ID NO: 2751107 - DNA, 25 bp, Homo sapien
catgagggtcatggcagtcttgaat

SEQ ID NO: 2751108 - DNA, 25 bp, Homo sapien
actctagagaaaccaccatgagggt

SEQ ID NO: 2751109 - DNA, 25 bp, Homo sapien
cgagctatggagatgtagtgactct

SEQ ID NO: 2751110 - DNA, 25 bp, Homo sapien
aatagctctgggacataatttcatc

SEQ ID NO: 2751111 - DNA, 25 bp, Homo sapien
cataatttcatccacaggaaactgt

SEQ ID NO: 2751112 - DNA, 25 bp, Homo sapien
taatagctctgggacataatttcat

SEQ ID NO: 2751113 - DNA, 25 bp, Homo sapien
gggacataatttcatccacaggaaa

SEQ ID NO: 2751114 - DNA, 25 bp, Homo sapien
ctgcattctctacgctgaagggaga

SEQ ID NO: 2751115 - DNA, 25 bp, Homo sapien
attctctacgctgaagggagagcag

SEQ ID NO: 2751116 - DNA, 25 bp, Homo sapien
gtctgcattctctacgctgaaggga

SEQ ID NO: 2751117 - DNA, 25 bp, Homo sapien
gcattctctacgctgaagggagagc

SEQ ID NO: 2751118 - DNA, 25 bp, Homo sapien
tcttcacaggtaacttgctgggtcc

SEQ ID NO: 2751119 - DNA, 25 bp, Homo sapien
tcccagtgacaggtgatgctgctcc

SEQ ID NO: 2751120 - DNA, 25 bp, Homo sapien
gagtccttgggatagagcagctccc

SEQ ID NO: 2751121 - DNA, 25 bp, Homo sapien
cccattgtgatcgtggagctgttcg

SEQ ID NO: 2751122 - DNA, 25 bp, Homo sapien
caccctcaattaggtctggtatcca

SEQ ID NO: 2751123 - DNA, 25 bp, Homo sapien
tgttttatggctatgcagtgttcct

SEQ ID NO: 2751124 - DNA, 25 bp, Homo sapien
ccaccctcaattaggtctggtatcc

SEQ ID NO: 2751125 - DNA, 25 bp, Homo sapien
gctatgcagtgttccttggtgtata

SEQ ID NO: 2751126 - DNA, 25 bp, Homo sapien
taatgacatgaaaagtcatttctgt

SEQ ID NO: 2751127 - DNA, 25 bp, Homo sapien
tgaaaagtcatttctgtatttcaac

SEQ ID NO: 2751128 - DNA, 25 bp, Homo sapien
aagtcatttctgtatttcaactata

SEQ ID NO: 2751129 - DNA, 25 bp, Homo sapien
ctaatgacatgaaaagtcatttctg

SEQ ID NO: 2751130 - DNA, 25 bp, Homo sapien
aatgcgtcccgcttcactgtcaaca

SEQ ID NO: 2751131 - DNA, 25 bp, Homo sapien
ctcagggaaaatgcgtcccgcttca

SEQ ID NO: 2751132 - DNA, 25 bp, Homo sapien
aaatgcgtcccgcttcactgtcaac

SEQ ID NO: 2751133 - DNA, 25 bp, Homo sapien
gggaaaatgcgtcccgcttcactgt

SEQ ID NO: 2751134 - DNA, 25 bp, Homo sapien
ggattttcccatccgtagactgatg

SEQ ID NO: 2751135 - DNA, 25 bp, Homo sapien
gaccattgtgatctcattccttcgg

SEQ ID NO: 2751136 - DNA, 25 bp, Homo sapien
atcagggttgagtcttgaacttttc

SEQ ID NO: 2751137 - DNA, 25 bp, Homo sapien
gatgctgcttatccacataggcaag

SEQ ID NO: 2751138 - DNA, 25 bp, Homo sapien
tctaaggcctacaccctctgagact

SEQ ID NO: 2751139 - DNA, 25 bp, Homo sapien
attctggagtcaccgttcctccaca

SEQ ID NO: 2751140 - DNA, 25 bp, Homo sapien
gcctctctcttctaaggcctacacc

SEQ ID NO: 2751141 - DNA, 25 bp, Homo sapien
ggagtcaccgttcctccacatgcag

SEQ ID NO: 2751142 - DNA, 25 bp, Homo sapien
gataaactgatcctctgcagcggcc

SEQ ID NO: 2751143 - DNA, 25 bp, Homo sapien
ataacattcagcatagaatctgact

SEQ ID NO: 2751144 - DNA, 25 bp, Homo sapien
gccccaggcaatgtccttgaggaca

SEQ ID NO: 2751145 - DNA, 25 bp, Homo sapien
gaaccacaagtagaactggataaac

SEQ ID NO: 2751146 - DNA, 25 bp, Homo sapien
tgaccttccagtctaccacctggcc

SEQ ID NO: 2751147 - DNA, 25 bp, Homo sapien
ccccagtgtgctttgtaagtctttc

SEQ ID NO: 2751148 - DNA, 25 bp, Homo sapien
tgtaaatctactttgtgcagtacag

SEQ ID NO: 2751149 - DNA, 25 bp, Homo sapien
cagtttaaaggcctggacaagcttc

SEQ ID NO: 2751150 - DNA, 25 bp, Homo sapien
ataccaatagaaggatccacgaata

SEQ ID NO: 2751151 - DNA, 25 bp, Homo sapien
tccacgaatataaacctgtatcttg

SEQ ID NO: 2751152 - DNA, 25 bp, Homo sapien
cgaatataaacctgtatcttgtagt

SEQ ID NO: 2751153 - DNA, 25 bp, Homo sapien
tagaaggatccacgaatataaacct

SEQ ID NO: 2751154 - DNA, 25 bp, Homo sapien
tgactgattggccagcacgtgccca

SEQ ID NO: 2751155 - DNA, 25 bp, Homo sapien
ttatttctccatcccattggctaac

SEQ ID NO: 2751156 - DNA, 25 bp, Homo sapien
cattggctaacaatgactgattggc

SEQ ID NO: 2751157 - DNA, 25 bp, Homo sapien
catcccattggctaacaatgactga

SEQ ID NO: 2751158 - DNA, 25 bp, Homo sapien
tgcttcatcccagtcagacccacag

SEQ ID NO: 2751159 - DNA, 25 bp, Homo sapien
acagtcttctgccaataccagaagg

SEQ ID NO: 2751160 - DNA, 25 bp, Homo sapien
ttctgccaataccagaagggctgct

SEQ ID NO: 2751161 - DNA, 25 bp, Homo sapien
atcactaataacacagtcttctgcc

SEQ ID NO: 2751162 - DNA, 25 bp, Homo sapien
tgtggatcttgtggatcaacgtggc

SEQ ID NO: 2751163 - DNA, 25 bp, Homo sapien
ttgtggatcaacgtggcagaaggaa

SEQ ID NO: 2751164 - DNA, 25 bp, Homo sapien
tcaacgtggcagaaggaagtcacct

SEQ ID NO: 2751165 - DNA, 25 bp, Homo sapien
cttagttgctgatgttcttgtggat

SEQ ID NO: 2751166 - DNA, 25 bp, Homo sapien
tcttgctggccacgctgacgatgat

SEQ ID NO: 2751167 - DNA, 25 bp, Homo sapien
tcactccttttgtagactgggcact

SEQ ID NO: 2751168 - DNA, 25 bp, Homo sapien
actgggcactgagctagggatcttg

SEQ ID NO: 2751169 - DNA, 25 bp, Homo sapien
gagctagggatcttgctggccacgc

SEQ ID NO: 2751170 - DNA, 25 bp, Homo sapien
tttcctggacatagtcaacttcctc

SEQ ID NO: 2751171 - DNA, 25 bp, Homo sapien
ctttcctggacatagtcaacttcct

SEQ ID NO: 2751172 - DNA, 25 bp, Homo sapien
ggacatcgcaaagctgacaccagaa

SEQ ID NO: 2751173 - DNA, 25 bp, Homo sapien
tgtatccggacatcgcaaagctgac

SEQ ID NO: 2751174 - DNA, 25 bp, Homo sapien
cgtcctgttgtatccggacatcgca

SEQ ID NO: 2751175 - DNA, 25 bp, Homo sapien
tcacgtttgtcgtcctgttgtatcc

SEQ ID NO: 2751176 - DNA, 25 bp, Homo sapien
agacttcgcgaatagtcacgtcaag

SEQ ID NO: 2751177 - DNA, 25 bp, Homo sapien
ttcgcgaatagtcacgtcaaggccc

SEQ ID NO: 2751178 - DNA, 25 bp, Homo sapien
cgcgaatagtcacgtcaaggcccat

SEQ ID NO: 2751179 - DNA, 25 bp, Homo sapien
acttcgcgaatagtcacgtcaaggc

SEQ ID NO: 2751180 - DNA, 25 bp, Homo sapien
gaaagttggctgtccaggttccgat

SEQ ID NO: 2751181 - DNA, 25 bp, Homo sapien
gccctgctgatagtgcatgccttca

SEQ ID NO: 2751182 - DNA, 25 bp, Homo sapien
catgccttcatgtggatgccaaagt

SEQ ID NO: 2751183 - DNA, 25 bp, Homo sapien
tagggaaactaactgccaaatgcac

SEQ ID NO: 2751184 - DNA, 25 bp, Homo sapien
tgttttacgacacaatggtcagtgt

SEQ ID NO: 2751185 - DNA, 25 bp, Homo sapien
tgtgtactacacttagatctctgca

SEQ ID NO: 2751186 - DNA, 25 bp, Homo sapien
gatctctgcatgctttgggctctcc

SEQ ID NO: 2751187 - DNA, 25 bp, Homo sapien
gcctgcatctgttttacgacacaat

SEQ ID NO: 2751188 - DNA, 25 bp, Homo sapien
aagaaagaaactgggtcattgtgct

SEQ ID NO: 2751189 - DNA, 25 bp, Homo sapien
aaagaaactgggtcattgtgctgac

SEQ ID NO: 2751190 - DNA, 25 bp, Homo sapien
aaaagaaagaaactgggtcattgtg

SEQ ID NO: 2751191 - DNA, 25 bp, Homo sapien
gaaagaaactgggtcattgtgctga

SEQ ID NO: 2751192 - DNA, 25 bp, Homo sapien
ctggctccggcttcaccaacacctt

SEQ ID NO: 2751193 - DNA, 25 bp, Homo sapien
gggtcgcacgctggctccggcttca

SEQ ID NO: 2751194 - DNA, 25 bp, Homo sapien
gctccggcttcaccaacaccttgca

SEQ ID NO: 2751195 - DNA, 25 bp, Homo sapien
cgggtcgcacgctggctccggcttc

SEQ ID NO: 2751196 - DNA, 25 bp, Homo sapien
agtgacggaccccagagtctctcct

SEQ ID NO: 2751197 - DNA, 25 bp, Homo sapien
tgtgcagtgacggaccccagagtct

SEQ ID NO: 2751198 - DNA, 25 bp, Homo sapien
ttctgtgcagtgacggaccccagag

SEQ ID NO: 2751199 - DNA, 25 bp, Homo sapien
gttgtttctgtgcagtgacggaccc

SEQ ID NO: 2751200 - DNA, 25 bp, Homo sapien
agagatcactctgggctgtaatgtg

SEQ ID NO: 2751201 - DNA, 25 bp, Homo sapien
tgaggccagcaacgcttgtagagat

SEQ ID NO: 2751202 - DNA, 25 bp, Homo sapien
cagcaacgcttgtagagatcactct

SEQ ID NO: 2751203 - DNA, 25 bp, Homo sapien
ccatgaggccagcaacgcttgtaga

SEQ ID NO: 2751204 - DNA, 25 bp, Homo sapien
aattgtaaagaacattgaggctagg

SEQ ID NO: 2751205 - DNA, 25 bp, Homo sapien
ttgtaaagaacattgaggctaggaa

SEQ ID NO: 2751206 - DNA, 25 bp, Homo sapien
caaattgtaaagaacattgaggcta

SEQ ID NO: 2751207 - DNA, 25 bp, Homo sapien
gccaaattgtaaagaacattgaggc

SEQ ID NO: 2751208 - DNA, 25 bp, Homo sapien
agaataaggtttggatgattggagg

SEQ ID NO: 2751209 - DNA, 25 bp, Homo sapien
ctgagaataaggtttggatgattgg

SEQ ID NO: 2751210 - DNA, 25 bp, Homo sapien
tgagaataaggtttggatgattgga

SEQ ID NO: 2751211 - DNA, 25 bp, Homo sapien
gctgagaataaggtttggatgattg

SEQ ID NO: 2751212 - DNA, 25 bp, Homo sapien
ctttaacacagagcccttagacatt

SEQ ID NO: 2751213 - DNA, 25 bp, Homo sapien
cattaaacattcctgggataaggct

SEQ ID NO: 2751214 - DNA, 25 bp, Homo sapien
taaggctaaggaaatggatcttccc

SEQ ID NO: 2751215 - DNA, 25 bp, Homo sapien
gacaggagctgtaaaagaaaggcgt

SEQ ID NO: 2751216 - DNA, 25 bp, Homo sapien
tcttcgacaacgaagaggaacacac

SEQ ID NO: 2751217 - DNA, 25 bp, Homo sapien
agaattaggaggcattcttcgacaa

SEQ ID NO: 2751218 - DNA, 25 bp, Homo sapien
taggaggcattcttcgacaacgaag

SEQ ID NO: 2751219 - DNA, 25 bp, Homo sapien
ggcattcttcgacaacgaagaggaa

SEQ ID NO: 2751220 - DNA, 25 bp, Homo sapien
gcaggctgcataaacagcctcacag

SEQ ID NO: 2751221 - DNA, 25 bp, Homo sapien
tgtttcatcgaggagcatcatgtgt

SEQ ID NO: 2751222 - DNA, 25 bp, Homo sapien
tacagacggtgagagggaaattagt

SEQ ID NO: 2751223 - DNA, 25 bp, Homo sapien
gataaaggtcttcactacagacggt

SEQ ID NO: 2751224 - DNA, 25 bp, Homo sapien
tctcttcttcttcctgttctgtaat

SEQ ID NO: 2751225 - DNA, 25 bp, Homo sapien
tcttcttcttcctgttctgtaattc

SEQ ID NO: 2751226 - DNA, 25 bp, Homo sapien
ctcctttcttgcctttcttttctct

SEQ ID NO: 2751227 - DNA, 25 bp, Homo sapien
ttcttcttcctgttctgtaattcat

SEQ ID NO: 2751228 - DNA, 25 bp, Homo sapien
tgtggagtaattggcagaatctgcg

SEQ ID NO: 2751229 - DNA, 25 bp, Homo sapien
gctaggagattccataacactccaa

SEQ ID NO: 2751230 - DNA, 25 bp, Homo sapien
tgaactggaaatcagattccacggg

SEQ ID NO: 2751231 - DNA, 25 bp, Homo sapien
agaatctgcggactgagacatgaac

SEQ ID NO: 2751232 - DNA, 25 bp, Homo sapien
tactttctatcactcaaatcaaatt

SEQ ID NO: 2751233 - DNA, 25 bp, Homo sapien
agaaagcaaagcactactatagact

SEQ ID NO: 2751234 - DNA, 25 bp, Homo sapien
caaattttacatccaccattgtgct

SEQ ID NO: 2751235 - DNA, 25 bp, Homo sapien
agcactactatagactgtgaacatc

SEQ ID NO: 2751236 - DNA, 25 bp, Homo sapien
ttgtgctgcagttatgatagctgta

SEQ ID NO: 2751237 - DNA, 25 bp, Homo sapien
ttttgtgctgcagttatgatagctg

SEQ ID NO: 2751238 - DNA, 25 bp, Homo sapien
agagaggaacgctggaattttgtgc

SEQ ID NO: 2751239 - DNA, 25 bp, Homo sapien
gaggaacgctggaattttgtgctgc

SEQ ID NO: 2751240 - DNA, 25 bp, Homo sapien
tgccccttttctactggctgtaaga

SEQ ID NO: 2751241 - DNA, 25 bp, Homo sapien
cttagactgccccttttctactggc

SEQ ID NO: 2751242 - DNA, 25 bp, Homo sapien
gactgccccttttctactggctgta

SEQ ID NO: 2751243 - DNA, 25 bp, Homo sapien
aagcttagactgccccttttctact

SEQ ID NO: 2751244 - DNA, 25 bp, Homo sapien
gtgaataacacaatcagacatgtct

SEQ ID NO: 2751245 - DNA, 25 bp, Homo sapien
gaataacacaatcagacatgtctac

SEQ ID NO: 2751246 - DNA, 25 bp, Homo sapien
tcttgacagtgaataacacaatcag

SEQ ID NO: 2751247 - DNA, 25 bp, Homo sapien
gacagtgaataacacaatcagacat

SEQ ID NO: 2751248 - DNA, 25 bp, Homo sapien
caccttcattgactggtgcctcaat

SEQ ID NO: 2751249 - DNA, 25 bp, Homo sapien
tgaattcgttggtaggagcaagcat

SEQ ID NO: 2751250 - DNA, 25 bp, Homo sapien
cacattctacaacgattatttcaac

SEQ ID NO: 2751251 - DNA, 25 bp, Homo sapien
tcacatagattggagtgaccacaaa

SEQ ID NO: 2751252 - DNA, 25 bp, Homo sapien
cctgaacactgaagtggtgtaccac

SEQ ID NO: 2751253 - DNA, 25 bp, Homo sapien
tctagtgtttgtttgtgccacctga

SEQ ID NO: 2751254 - DNA, 25 bp, Homo sapien
tctctctctctaagtcccactctgt

SEQ ID NO: 2751255 - DNA, 25 bp, Homo sapien
gccacctgaacactgaagtggtgta

SEQ ID NO: 2751256 - DNA, 25 bp, Homo sapien
tcttctttccctcaacatgagtgct

SEQ ID NO: 2751257 - DNA, 25 bp, Homo sapien
acctccactctaggaaacttcttct

SEQ ID NO: 2751258 - DNA, 25 bp, Homo sapien
tcctcctggtggtgaacaacacttt

SEQ ID NO: 2751259 - DNA, 25 bp, Homo sapien
agcatccctttcctacacctttgat

SEQ ID NO: 2751260 - DNA, 25 bp, Homo sapien
ggcattaaatgccatcattctaaga

SEQ ID NO: 2751261 - DNA, 25 bp, Homo sapien
ccatggagtgcggaaaacagattac

SEQ ID NO: 2751262 - DNA, 25 bp, Homo sapien
tgtgttgttaggctggactatctcc

SEQ ID NO: 2751263 - DNA, 25 bp, Homo sapien
gatgagagtctcaaaaactggcttt

SEQ ID NO: 2751264 - DNA, 25 bp, Homo sapien
gctgccggcgaacacaaagcagctc

SEQ ID NO: 2751265 - DNA, 25 bp, Homo sapien
cagaagccgccttttcagggaagcg

SEQ ID NO: 2751266 - DNA, 25 bp, Homo sapien
cagcaggagcaagtgcaatccctgg

SEQ ID NO: 2751267 - DNA, 25 bp, Homo sapien
gcaatccctggagacgagtcgaagg

SEQ ID NO: 2751268 - DNA, 25 bp, Homo sapien
ttaaaacaaaggacatcagctccag

SEQ ID NO: 2751269 - DNA, 25 bp, Homo sapien
ctggctgaaatattggtcttttgtt

SEQ ID NO: 2751270 - DNA, 25 bp, Homo sapien
tgctgattggtgtctttgaatgtca

SEQ ID NO: 2751271 - DNA, 25 bp, Homo sapien
ccagtgcggctcgtgcacaggacat

SEQ ID NO: 2751272 - DNA, 25 bp, Homo sapien
cataactgggcaccgagaggttgtt

SEQ ID NO: 2751273 - DNA, 25 bp, Homo sapien
tcccccataactgggcaccgagagg

SEQ ID NO: 2751274 - DNA, 25 bp, Homo sapien
tttgccctgaagaaatcccccataa

SEQ ID NO: 2751275 - DNA, 25 bp, Homo sapien
gaagaaatcccccataactgggcac

SEQ ID NO: 2751276 - DNA, 25 bp, Homo sapien
taaccagggagcttggctgccatat

SEQ ID NO: 2751277 - DNA, 25 bp, Homo sapien
gggagcttggctgccatatgttgcc

SEQ ID NO: 2751278 - DNA, 25 bp, Homo sapien
ttggctgccatatgttgcccttgca

SEQ ID NO: 2751279 - DNA, 25 bp, Homo sapien
ctaaccagggagcttggctgccata

SEQ ID NO: 2751280 - DNA, 25 bp, Homo sapien
ggcagaggacaacgggtggcacagc

SEQ ID NO: 2751281 - DNA, 25 bp, Homo sapien
acaacgggtggcacagccgcctctt

SEQ ID NO: 2751282 - DNA, 25 bp, Homo sapien
acgggtggcacagccgcctcttctg

SEQ ID NO: 2751283 - DNA, 25 bp, Homo sapien
aggacaacgggtggcacagccgcct

SEQ ID NO: 2751284 - DNA, 25 bp, Homo sapien
tctgctgctctatgcagtggccact

SEQ ID NO: 2751285 - DNA, 25 bp, Homo sapien
tgctgctctatgcagtggccactac

SEQ ID NO: 2751286 - DNA, 25 bp, Homo sapien
gtctattctgctgctctatgcagtg

SEQ ID NO: 2751287 - DNA, 25 bp, Homo sapien
tattctgctgctctatgcagtggcc

SEQ ID NO: 2751288 - DNA, 25 bp, Homo sapien
gagccaaagagaacataccctgtaa

SEQ ID NO: 2751289 - DNA, 25 bp, Homo sapien
gagattttcttagtgactcagggca

SEQ ID NO: 2751290 - DNA, 25 bp, Homo sapien
aaaacagcaattgcagcaggtactc

SEQ ID NO: 2751291 - DNA, 25 bp, Homo sapien
gggcaagagtaccttcttatagtaa

SEQ ID NO: 2751292 - DNA, 25 bp, Homo sapien
tgtagatggcctatcttaatcttcc

SEQ ID NO: 2751293 - DNA, 25 bp, Homo sapien
atcttcctacaccaatacccatggg

SEQ ID NO: 2751294 - DNA, 25 bp, Homo sapien
gatggcctatcttaatcttcctaca

SEQ ID NO: 2751295 - DNA, 25 bp, Homo sapien
accaatacccatgggcatgtactag

SEQ ID NO: 2751296 - DNA, 25 bp, Homo sapien
ggaaagaacaaactcaagattctac

SEQ ID NO: 2751297 - DNA, 25 bp, Homo sapien
gagaaggaaagaacaaactcaagat

SEQ ID NO: 2751298 - DNA, 25 bp, Homo sapien
caaagaattgagaaggaaagaacaa

SEQ ID NO: 2751299 - DNA, 25 bp, Homo sapien
gaacaaactcaagattctacaatca

SEQ ID NO: 2751300 - DNA, 25 bp, Homo sapien
aggaggaacttgcaggagtggagaa

SEQ ID NO: 2751301 - DNA, 25 bp, Homo sapien
acttgcaggagtggagaagaagctt

SEQ ID NO: 2751302 - DNA, 25 bp, Homo sapien
aggaacttgcaggagtggagaagaa

SEQ ID NO: 2751303 - DNA, 25 bp, Homo sapien
gaacttgcaggagtggagaagaagc

SEQ ID NO: 2751304 - DNA, 25 bp, Homo sapien
taacaacacagactttccaaggtgc

SEQ ID NO: 2751305 - DNA, 25 bp, Homo sapien
tatcacccataaagctacctccaga

SEQ ID NO: 2751306 - DNA, 25 bp, Homo sapien
ccatcttggacaaagagaccattga

SEQ ID NO: 2751307 - DNA, 25 bp, Homo sapien
taaaacatagcgctctgcggagcag

SEQ ID NO: 2751308 - DNA, 25 bp, Homo sapien
acacatcagcatgggcttgctctat

SEQ ID NO: 2751309 - DNA, 25 bp, Homo sapien
catcagcatgggcttgctctataac

SEQ ID NO: 2751310 - DNA, 25 bp, Homo sapien
aacacatcagcatgggcttgctcta

SEQ ID NO: 2751311 - DNA, 25 bp, Homo sapien
tcagcatgggcttgctctataaccc

SEQ ID NO: 2751312 - DNA, 25 bp, Homo sapien
gttgcaggtgctagaatgttccata

SEQ ID NO: 2751313 - DNA, 25 bp, Homo sapien
cagatgtactctggcgttgcaggtg

SEQ ID NO: 2751314 - DNA, 25 bp, Homo sapien
cagaccccagatgtactctggcgtt

SEQ ID NO: 2751315 - DNA, 25 bp, Homo sapien
tggcgttgcaggtgctagaatgttc

SEQ ID NO: 2751316 - DNA, 25 bp, Homo sapien
cactgtcaaatgcagacacccactc

SEQ ID NO: 2751317 - DNA, 25 bp, Homo sapien
actgtcaaatgcagacacccactca

SEQ ID NO: 2751318 - DNA, 25 bp, Homo sapien
ccagctcactgtcaaatgcagacac

SEQ ID NO: 2751319 - DNA, 25 bp, Homo sapien
gctcactgtcaaatgcagacaccca

SEQ ID NO: 2751320 - DNA, 25 bp, Homo sapien
gctgtagctgccacaggttccccat

SEQ ID NO: 2751321 - DNA, 25 bp, Homo sapien
gagggccactggcatagtcaaggca

SEQ ID NO: 2751322 - DNA, 25 bp, Homo sapien
tggaggtttgtcctgcacagacact

SEQ ID NO: 2751323 - DNA, 25 bp, Homo sapien
gcacagacactgctgttgacccagc

SEQ ID NO: 2751324 - DNA, 25 bp, Homo sapien
agtggcagttggtttccaggtgctc

SEQ ID NO: 2751325 - DNA, 25 bp, Homo sapien
gtggcagttggtttccaggtgctca

SEQ ID NO: 2751326 - DNA, 25 bp, Homo sapien
tggcagttggtttccaggtgctcat

SEQ ID NO: 2751327 - DNA, 25 bp, Homo sapien
aaacagccctgctcggaactggact

SEQ ID NO: 2751328 - DNA, 25 bp, Homo sapien
ccccaggtgtgagaatgcttcgagt

SEQ ID NO: 2751329 - DNA, 25 bp, Homo sapien
taactccatactcagggaaacagcc

SEQ ID NO: 2751330 - DNA, 25 bp, Homo sapien
gatctggatgggagacctagcagca

SEQ ID NO: 2751331 - DNA, 25 bp, Homo sapien
gaagcccagtttgcagcctgcatct

SEQ ID NO: 2751332 - DNA, 25 bp, Homo sapien
gcagcctgcatcttcacgaaggcct

SEQ ID NO: 2751333 - DNA, 25 bp, Homo sapien
gcatcttcacgaaggcctctgcctg

SEQ ID NO: 2751334 - DNA, 25 bp, Homo sapien
cttggaagcccagtttgcagcctgc

SEQ ID NO: 2751335 - DNA, 25 bp, Homo sapien
tgagaagttttccaatccttgactt

SEQ ID NO: 2751336 - DNA, 25 bp, Homo sapien
tctgagaagttttccaatccttgac

SEQ ID NO: 2751337 - DNA, 25 bp, Homo sapien
agtttacacaaagacatctgagaag

SEQ ID NO: 2751338 - DNA, 25 bp, Homo sapien
cccagtttacacaaagacatctgag

SEQ ID NO: 2751339 - DNA, 25 bp, Homo sapien
acacttccctgttagagcatactca

SEQ ID NO: 2751340 - DNA, 25 bp, Homo sapien
caacacttccctgttagagcatact

SEQ ID NO: 2751341 - DNA, 25 bp, Homo sapien
cccccaacacttccctgttagagca

SEQ ID NO: 2751342 - DNA, 25 bp, Homo sapien
cacttccctgttagagcatactcat

SEQ ID NO: 2751343 - DNA, 25 bp, Homo sapien
ttactctataatcccctaagtttga

SEQ ID NO: 2751344 - DNA, 25 bp, Homo sapien
gaaggcacaggctgatgtatcactc

SEQ ID NO: 2751345 - DNA, 25 bp, Homo sapien
caggctgatgtatcactcctattta

SEQ ID NO: 2751346 - DNA, 25 bp, Homo sapien
taatcccctaagtttgacatgaaca

SEQ ID NO: 2751347 - DNA, 25 bp, Homo sapien
ggtcagctgcttcagaacctgaagt

SEQ ID NO: 2751348 - DNA, 25 bp, Homo sapien
cagcatgtggcttccgactcagggt

SEQ ID NO: 2751349 - DNA, 25 bp, Homo sapien
actgtaagtccgagagtgcaggtca

SEQ ID NO: 2751350 - DNA, 25 bp, Homo sapien
ttccgactcagggtcacaggaaggc

SEQ ID NO: 2751351 - DNA, 25 bp, Homo sapien
gctgtcatgttggtccttggctcta

SEQ ID NO: 2751352 - DNA, 25 bp, Homo sapien
ttttctatatttggctgtcatgttg

SEQ ID NO: 2751353 - DNA, 25 bp, Homo sapien
tttggctgtcatgttggtccttggc

SEQ ID NO: 2751354 - DNA, 25 bp, Homo sapien
atgttggtccttggctctaacatga

SEQ ID NO: 2751355 - DNA, 25 bp, Homo sapien
gggtgaccacatgtaagcgaagcca

SEQ ID NO: 2751356 - DNA, 25 bp, Homo sapien
taagtcactgacaccactttgctga

SEQ ID NO: 2751357 - DNA, 25 bp, Homo sapien
tccccttcgtgagctgcaggaggca

SEQ ID NO: 2751358 - DNA, 25 bp, Homo sapien
catgatgtggcattagcctcttcta

SEQ ID NO: 2751359 - DNA, 25 bp, Homo sapien
tacacaaacacattataaatgatga

SEQ ID NO: 2751360 - DNA, 25 bp, Homo sapien
ttacacaaacacattataaatgatg

SEQ ID NO: 2751361 - DNA, 25 bp, Homo sapien
acacaaacacattataaatgatgac

SEQ ID NO: 2751362 - DNA, 25 bp, Homo sapien
taatctgggagtgcggttgaatgct

SEQ ID NO: 2751363 - DNA, 25 bp, Homo sapien
ttctgagtatgaaaggatcacgtcc

SEQ ID NO: 2751364 - DNA, 25 bp, Homo sapien
catcttcagcaggacaatggtagcc

SEQ ID NO: 2751365 - DNA, 25 bp, Homo sapien
aatggtagcccatcaatgtttccct

SEQ ID NO: 2751366 - DNA, 25 bp, Homo sapien
gaggagggggcatcgaaagacaggc

SEQ ID NO: 2751367 - DNA, 25 bp, Homo sapien
agggggcatcgaaagacaggcagca

SEQ ID NO: 2751368 - DNA, 25 bp, Homo sapien
gagggggcatcgaaagacaggcagc

SEQ ID NO: 2751369 - DNA, 25 bp, Homo sapien
ggcatgtctgctggatatgacatgt

SEQ ID NO: 2751370 - DNA, 25 bp, Homo sapien
ctgccactccctcagggtgaactgg

SEQ ID NO: 2751371 - DNA, 25 bp, Homo sapien
gatatgacatgtgaatgtgcatgag

SEQ ID NO: 2751372 - DNA, 25 bp, Homo sapien
tgaactgggtcggagaatgttggca

SEQ ID NO: 2751373 - DNA, 25 bp, Homo sapien
atctcatggcttttggtcatctgac

SEQ ID NO: 2751374 - DNA, 25 bp, Homo sapien
ctggaaactggtgccacccctggtc

SEQ ID NO: 2751375 - DNA, 25 bp, Homo sapien
tggattggcaatcagctctgctgcc

SEQ ID NO: 2751376 - DNA, 25 bp, Homo sapien
gtcatctgactaaggccccaccact

SEQ ID NO: 2751377 - DNA, 25 bp, Homo sapien
actggcatccaattatccagcctga

SEQ ID NO: 2751378 - DNA, 25 bp, Homo sapien
gccttagtcaacactggcatccaat

SEQ ID NO: 2751379 - DNA, 25 bp, Homo sapien
gaaagggaatcatccacagctgcct

SEQ ID NO: 2751380 - DNA, 25 bp, Homo sapien
tccacagctgccttagtcaacactg

SEQ ID NO: 2751381 - DNA, 25 bp, Homo sapien
ttgtgagtgtgtattccccgggccc

SEQ ID NO: 2751382 - DNA, 25 bp, Homo sapien
tactgatagcctcaaggattgctgg

SEQ ID NO: 2751383 - DNA, 25 bp, Homo sapien
gagcatcttctataagggctgcacc

SEQ ID NO: 2751384 - DNA, 25 bp, Homo sapien
ccttctaggtatagggctctcagca

SEQ ID NO: 2751385 - DNA, 25 bp, Homo sapien
tatactctaggagctggttgttgac

SEQ ID NO: 2751386 - DNA, 25 bp, Homo sapien
gcttccctctcgtagacctttgtaa

SEQ ID NO: 2751387 - DNA, 25 bp, Homo sapien
ggttgttgactagaacaatgcttcc

SEQ ID NO: 2751388 - DNA, 25 bp, Homo sapien
aataaatagctgttcttgcctacca

SEQ ID NO: 2751389 - DNA, 25 bp, Homo sapien
tctttctatatgttactgcttgatg

SEQ ID NO: 2751390 - DNA, 25 bp, Homo sapien
tgttactgcttgatgtaatgatgag

SEQ ID NO: 2751391 - DNA, 25 bp, Homo sapien
gtatatgaagcattgatggtgtatc

SEQ ID NO: 2751392 - DNA, 25 bp, Homo sapien
tctatatgttactgcttgatgtaat

SEQ ID NO: 2751393 - DNA, 25 bp, Homo sapien
gagcagtggccattgcttagcacct

SEQ ID NO: 2751394 - DNA, 25 bp, Homo sapien
ggagaccgcacactcagaggcaata

SEQ ID NO: 2751395 - DNA, 25 bp, Homo sapien
ttgtaaacagaaagcctaattggcc

SEQ ID NO: 2751396 - DNA, 25 bp, Homo sapien
ggtggtcttcctgggtcaagcttct

SEQ ID NO: 2751397 - DNA, 25 bp, Homo sapien
ccaagagcagtaagagagcacaaca

SEQ ID NO: 2751398 - DNA, 25 bp, Homo sapien
caatgcagcaggtaatgagtttcca

SEQ ID NO: 2751399 - DNA, 25 bp, Homo sapien
taaaagttacatcaagcggcatagc

SEQ ID NO: 2751400 - DNA, 25 bp, Homo sapien
tgattggttaggtgacctccgccca

SEQ ID NO: 2751401 - DNA, 25 bp, Homo sapien
tccagatctgaaagtgcccttgact

SEQ ID NO: 2751402 - DNA, 25 bp, Homo sapien
tgactagttcctgccattgcgccaa

SEQ ID NO: 2751403 - DNA, 25 bp, Homo sapien
tagttccgatttttcagagtccaga

SEQ ID NO: 2751404 - DNA, 25 bp, Homo sapien
taaactaccgcacttacagagaggg

SEQ ID NO: 2751405 - DNA, 25 bp, Homo sapien
ggctaaaactctggcactctgggca

SEQ ID NO: 2751406 - DNA, 25 bp, Homo sapien
ggatccccttagagagccacttggg

SEQ ID NO: 2751407 - DNA, 25 bp, Homo sapien
taattctaccagagactccagtggg

SEQ ID NO: 2751408 - DNA, 25 bp, Homo sapien
cattgaagtgtaaaggatacccgga

SEQ ID NO: 2751409 - DNA, 25 bp, Homo sapien
gcttcttttctatttgccatcacct

SEQ ID NO: 2751410 - DNA, 25 bp, Homo sapien
tacttatccgactatttcctccatt

SEQ ID NO: 2751411 - DNA, 25 bp, Homo sapien
accacatgacatgaacggactcttc

SEQ ID NO: 2751412 - DNA, 25 bp, Homo sapien
ctggttcatcccaaaccacatgaca

SEQ ID NO: 2751413 - DNA, 25 bp, Homo sapien
gtttcaccaaagctacatgtccctg

SEQ ID NO: 2751414 - DNA, 25 bp, Homo sapien
tacttgaacaggcttagggaaccat

SEQ ID NO: 2751415 - DNA, 25 bp, Homo sapien
tgagatgcctcatgtaagtcacaag

SEQ ID NO: 2751416 - DNA, 25 bp, Homo sapien
aatgtaagactaaagccaagccagc

SEQ ID NO: 2751417 - DNA, 25 bp, Homo sapien
ggaacaattggagaaccatccggct

SEQ ID NO: 2751418 - DNA, 25 bp, Homo sapien
tagcacttcgtgtggacctggcaga

SEQ ID NO: 2751419 - DNA, 25 bp, Homo sapien
gagtgagaggcaacatgaagtcccc

SEQ ID NO: 2751420 - DNA, 25 bp, Homo sapien
taacttctgccggtgtggaccaggt

SEQ ID NO: 2751421 - DNA, 25 bp, Homo sapien
aattattgagatctgtaaagtaggc

SEQ ID NO: 2751422 - DNA, 25 bp, Homo sapien
ttcctctaggatcaagttgtttttg

SEQ ID NO: 2751423 - DNA, 25 bp, Homo sapien
agtaggcattagaataggtcttccc

SEQ ID NO: 2751424 - DNA, 25 bp, Homo sapien
tctttcctctaggatcaagttgttt

SEQ ID NO: 2751425 - DNA, 25 bp, Homo sapien
tagaaggattcgttaaagactggac

SEQ ID NO: 2751426 - DNA, 25 bp, Homo sapien
gtaccttcaacgtcctttatcttca

SEQ ID NO: 2751427 - DNA, 25 bp, Homo sapien
tcctttatcttcatgagagaaacat

SEQ ID NO: 2751428 - DNA, 25 bp, Homo sapien
aagactggacagctgtccgtacctt

SEQ ID NO: 2751429 - DNA, 25 bp, Homo sapien
tgggattgctgctggtaccgctggc

SEQ ID NO: 2751430 - DNA, 25 bp, Homo sapien
ggtggatgacagtcgcatcgtggga

SEQ ID NO: 2751431 - DNA, 25 bp, Homo sapien
cccacggcgatcatgtggaacatgt

SEQ ID NO: 2751432 - DNA, 25 bp, Homo sapien
cagtaagtatagacgagcagggtga

SEQ ID NO: 2751433 - DNA, 25 bp, Homo sapien
gcagtgtcactaatacctttccctg

SEQ ID NO: 2751434 - DNA, 25 bp, Homo sapien
acatcctgaggacaccagctttccc

SEQ ID NO: 2751435 - DNA, 25 bp, Homo sapien
ccaccagggtgaggggcagtgtcac

SEQ ID NO: 2751436 - DNA, 25 bp, Homo sapien
ggtgaggggcagtgtcactaatacc

SEQ ID NO: 2751437 - DNA, 25 bp, Homo sapien
aatggtagttaggaatgataagtac

SEQ ID NO: 2751438 - DNA, 25 bp, Homo sapien
gataagtacattcctgaaacatgcc

SEQ ID NO: 2751439 - DNA, 25 bp, Homo sapien
tgaagcttcaggttccatgtgaaca

SEQ ID NO: 2751440 - DNA, 25 bp, Homo sapien
catgtgaacatgtcagaggcaatgc

SEQ ID NO: 2751441 - DNA, 25 bp, Homo sapien
aggtctcaatgtagacattggctcg

SEQ ID NO: 2751442 - DNA, 25 bp, Homo sapien
tgtggaagttaaggtctcaatgtag

SEQ ID NO: 2751443 - DNA, 25 bp, Homo sapien
tcagtcacacatgtggaagttaagg

SEQ ID NO: 2751444 - DNA, 25 bp, Homo sapien
tctcaatgtagacattggctcggat

SEQ ID NO: 2751445 - DNA, 25 bp, Homo sapien
cttttctcttctacgctactggatc

SEQ ID NO: 2751446 - DNA, 25 bp, Homo sapien
tcttctacgctactggatcttgcca

SEQ ID NO: 2751447 - DNA, 25 bp, Homo sapien
ttctcttctacgctactggatcttg

SEQ ID NO: 2751448 - DNA, 25 bp, Homo sapien
tacgctactggatcttgccacagat

SEQ ID NO: 2751449 - DNA, 25 bp, Homo sapien
tggtgttcccggagcactggctgcc

SEQ ID NO: 2751450 - DNA, 25 bp, Homo sapien
ctgggatgaaattagagtcaaacac

SEQ ID NO: 2751451 - DNA, 25 bp, Homo sapien
ggacttggacgccagaggcttcaca

SEQ ID NO: 2751452 - DNA, 25 bp, Homo sapien
ggaacaggaggatgcactggcgggc

SEQ ID NO: 2751453 - DNA, 25 bp, Homo sapien
gttgcagagtgcctcttctgtgtgc

SEQ ID NO: 2751454 - DNA, 25 bp, Homo sapien
gtgttgcagagtgcctcttctgtgt

SEQ ID NO: 2751455 - DNA, 25 bp, Homo sapien
ggctgcgtgttgcagagtgcctctt

SEQ ID NO: 2751456 - DNA, 25 bp, Homo sapien
tgcgtgttgcagagtgcctcttctg

SEQ ID NO: 2751457 - DNA, 25 bp, Homo sapien
ctggattggagcaagagcgggtcct

SEQ ID NO: 2751458 - DNA, 25 bp, Homo sapien
ggattggagcaagagcgggtcctca

SEQ ID NO: 2751459 - DNA, 25 bp, Homo sapien
tggattggagcaagagcgggtcctc

SEQ ID NO: 2751460 - DNA, 25 bp, Homo sapien
ggggaccagcaagaccacacgccat

SEQ ID NO: 2751461 - DNA, 25 bp, Homo sapien
tttgtccagggggaccagcaagacc

SEQ ID NO: 2751462 - DNA, 25 bp, Homo sapien
atagtgtccaccgccgcatgttgct

SEQ ID NO: 2751463 - DNA, 25 bp, Homo sapien
gtccaccgccgcatgttgctgaaca

SEQ ID NO: 2751464 - DNA, 25 bp, Homo sapien
cagcatactgaggtctggactacat

SEQ ID NO: 2751465 - DNA, 25 bp, Homo sapien
tctctcgggacatgggcaaatgtgg

SEQ ID NO: 2751466 - DNA, 25 bp, Homo sapien
tatctataggacacacaactgccag

SEQ ID NO: 2751467 - DNA, 25 bp, Homo sapien
gactacataggtttgcactgcagga

SEQ ID NO: 2751468 - DNA, 25 bp, Homo sapien
tacctttgtaggtcaaagtctggag

SEQ ID NO: 2751469 - DNA, 25 bp, Homo sapien
taattagctatttctcaatgctggc

SEQ ID NO: 2751470 - DNA, 25 bp, Homo sapien
tctttaaggctaaatcaaatatgca

SEQ ID NO: 2751471 - DNA, 25 bp, Homo sapien
tcctcttagctgaacattacttagc

SEQ ID NO: 2751472 - DNA, 25 bp, Homo sapien
ggatggccatgacgtgtgggctgaa

SEQ ID NO: 2751473 - DNA, 25 bp, Homo sapien
acagatcagccctcaggatggccat

SEQ ID NO: 2751474 - DNA, 25 bp, Homo sapien
gactttccgtgggttctggacagga

SEQ ID NO: 2751475 - DNA, 25 bp, Homo sapien
gaagtgggaagttctggtggaagtg

SEQ ID NO: 2751476 - DNA, 25 bp, Homo sapien
ggtccaggggttgcatgtttgatac

SEQ ID NO: 2751477 - DNA, 25 bp, Homo sapien
ttttgtgacagaagacatgaggacc

SEQ ID NO: 2751478 - DNA, 25 bp, Homo sapien
gttgcatgtttgatacccgtgaccc

SEQ ID NO: 2751479 - DNA, 25 bp, Homo sapien
tttgtgacagaagacatgaggacca

SEQ ID NO: 2751480 - DNA, 25 bp, Homo sapien
tgaccaagccccgttgaccgtgtgg

SEQ ID NO: 2751481 - DNA, 25 bp, Homo sapien
gttgcaaacacgcttccggttccga

SEQ ID NO: 2751482 - DNA, 25 bp, Homo sapien
cctggtattccagagatgggccaag

SEQ ID NO: 2751483 - DNA, 25 bp, Homo sapien
gaccgtgtgggcagagtatctccca

SEQ ID NO: 2751484 - DNA, 25 bp, Homo sapien
ggaatcgttgctcatagtggccgcc

SEQ ID NO: 2751485 - DNA, 25 bp, Homo sapien
ccaggcgggctttgcatgtgtatcg

SEQ ID NO: 2751486 - DNA, 25 bp, Homo sapien
agcaaattcggatcagccaggcggg

SEQ ID NO: 2751487 - DNA, 25 bp, Homo sapien
tggtgccgtcgctagaacagtaccg

SEQ ID NO: 2751488 - DNA, 25 bp, Homo sapien
cgatcccataaaaatcgtcttcctt

SEQ ID NO: 2751489 - DNA, 25 bp, Homo sapien
ccataaaaatcgtcttcctttcact

SEQ ID NO: 2751490 - DNA, 25 bp, Homo sapien
tcccataaaaatcgtcttcctttca

SEQ ID NO: 2751491 - DNA, 25 bp, Homo sapien
cataaaaatcgtcttcctttcactt

SEQ ID NO: 2751492 - DNA, 25 bp, Homo sapien
tacaggagttgaccttggatacagt

SEQ ID NO: 2751493 - DNA, 25 bp, Homo sapien
ccaacaggagggatacaggagttga

SEQ ID NO: 2751494 - DNA, 25 bp, Homo sapien
caggagggatacaggagttgacctt

SEQ ID NO: 2751495 - DNA, 25 bp, Homo sapien
agttgaccttggatacagtgtgaca

SEQ ID NO: 2751496 - DNA, 25 bp, Homo sapien
tacagtcatggcttcctgtgttcct

SEQ ID NO: 2751497 - DNA, 25 bp, Homo sapien
tatgccaagtactacagtcatggct

SEQ ID NO: 2751498 - DNA, 25 bp, Homo sapien
ttctatgccaagtactacagtcatg

SEQ ID NO: 2751499 - DNA, 25 bp, Homo sapien
gcttcctgtgttccttctgtcctct

SEQ ID NO: 2751500 - DNA, 25 bp, Homo sapien
aatggccgcattcactttcaacctg

SEQ ID NO: 2751501 - DNA, 25 bp, Homo sapien
cgaagtggggagtaactgagccaaa

SEQ ID NO: 2751502 - DNA, 25 bp, Homo sapien
tgggtaactgacaccctcactggct

SEQ ID NO: 2751503 - DNA, 25 bp, Homo sapien
caacctgtagccaacctgggttctt

SEQ ID NO: 2751504 - DNA, 25 bp, Homo sapien
aggcatgtggtgttgtgtgtcctca

SEQ ID NO: 2751505 - DNA, 25 bp, Homo sapien
tcagggtccacaggtgaacagtcct

SEQ ID NO: 2751506 - DNA, 25 bp, Homo sapien
ttgtaacgcagctctgatctgaggg

SEQ ID NO: 2751507 - DNA, 25 bp, Homo sapien
cttagagccttcagagcagctggtc

SEQ ID NO: 2751508 - DNA, 25 bp, Homo sapien
tgtgtgacaatctgaaagatagacg

SEQ ID NO: 2751509 - DNA, 25 bp, Homo sapien
gttttagactgtcaggcagcaactc

SEQ ID NO: 2751510 - DNA, 25 bp, Homo sapien
acaatctgaaagatagacgactaag

SEQ ID NO: 2751511 - DNA, 25 bp, Homo sapien
tgtgacaatctgaaagatagacgac

SEQ ID NO: 2751512 - DNA, 25 bp, Homo sapien
ctgctccctaaatcggaccccaatc

SEQ ID NO: 2751513 - DNA, 25 bp, Homo sapien
ctccctaaatcggaccccaatcctg

SEQ ID NO: 2751514 - DNA, 25 bp, Homo sapien
cctaaatcggaccccaatcctggct

SEQ ID NO: 2751515 - DNA, 25 bp, Homo sapien
taaatcggaccccaatcctggctgc

SEQ ID NO: 2751516 - DNA, 25 bp, Homo sapien
gtcccttgccgcatccctgtacaca

SEQ ID NO: 2751517 - DNA, 25 bp, Homo sapien
cctgtacacatcctgtagcccacaa

SEQ ID NO: 2751518 - DNA, 25 bp, Homo sapien
ttgccgcatccctgtacacatcctg

SEQ ID NO: 2751519 - DNA, 25 bp, Homo sapien
agatctgtcccttgccgcatccctg

SEQ ID NO: 2751520 - DNA, 25 bp, Homo sapien
ggaagttctcaccagtccatgggac

SEQ ID NO: 2751521 - DNA, 25 bp, Homo sapien
ctatgcgatgactgggaagttctca

SEQ ID NO: 2751522 - DNA, 25 bp, Homo sapien
tatgcgatgactgggaagttctcac

SEQ ID NO: 2751523 - DNA, 25 bp, Homo sapien
ctgggaagttctcaccagtccatgg

SEQ ID NO: 2751524 - DNA, 25 bp, Homo sapien
tgggtctacgtccaatgtaaaataa

SEQ ID NO: 2751525 - DNA, 25 bp, Homo sapien
caagggtattattaagggcagcaaa

SEQ ID NO: 2751526 - DNA, 25 bp, Homo sapien
acttggaaatgggtctacgtccaat

SEQ ID NO: 2751527 - DNA, 25 bp, Homo sapien
ttcatatagggtctgcatctgtgag

SEQ ID NO: 2751528 - DNA, 25 bp, Homo sapien
aatggtctactttcatgggtatgag

SEQ ID NO: 2751529 - DNA, 25 bp, Homo sapien
gatctttcccattaatctcactgtt

SEQ ID NO: 2751530 - DNA, 25 bp, Homo sapien
ctcactgttcttgttcgtatacttg

SEQ ID NO: 2751531 - DNA, 25 bp, Homo sapien
ggtatgagatattagatctttccca

SEQ ID NO: 2751532 - DNA, 25 bp, Homo sapien
gaatttcccaaggatatctcggctg

SEQ ID NO: 2751533 - DNA, 25 bp, Homo sapien
tatctcggctgtgtggtttttgcat

SEQ ID NO: 2751534 - DNA, 25 bp, Homo sapien
tttagccagaccttctcgtgctgag

SEQ ID NO: 2751535 - DNA, 25 bp, Homo sapien
gagcttctccatcaaacctttgcca

SEQ ID NO: 2751536 - DNA, 25 bp, Homo sapien
tggcaccagcttactctaacaatgg

SEQ ID NO: 2751537 - DNA, 25 bp, Homo sapien
tgcattggcaccagcttactctaac

SEQ ID NO: 2751538 - DNA, 25 bp, Homo sapien
ctaacaatggctccatatagtttct

SEQ ID NO: 2751539 - DNA, 25 bp, Homo sapien
ctccatatagtttctcagtccccag

SEQ ID NO: 2751540 - DNA, 25 bp, Homo sapien
gcacagtcaggcccattctcacaga

SEQ ID NO: 2751541 - DNA, 25 bp, Homo sapien
agatcctgcggcgagcttgaatgcc

SEQ ID NO: 2751542 - DNA, 25 bp, Homo sapien
agcttgaatgccacccccgcattgg

SEQ ID NO: 2751543 - DNA, 25 bp, Homo sapien
cgcattgggctgtgcaccgttccca

SEQ ID NO: 2751544 - DNA, 25 bp, Homo sapien
gtccagaacatgtgtgggggacata

SEQ ID NO: 2751545 - DNA, 25 bp, Homo sapien
tccagaacatgtgtgggggacatag

SEQ ID NO: 2751546 - DNA, 25 bp, Homo sapien
aggagcctccggagagtcaagaacc

SEQ ID NO: 2751547 - DNA, 25 bp, Homo sapien
ccagggagagatagttgatgtgtag

SEQ ID NO: 2751548 - DNA, 25 bp, Homo sapien
gagcctccggagagtcaagaaccaa

SEQ ID NO: 2751549 - DNA, 25 bp, Homo sapien
gttgatgtgtagggggtgaaggagc

SEQ ID NO: 2751550 - DNA, 25 bp, Homo sapien
ggcaagcagtttagtttgtctaaac

SEQ ID NO: 2751551 - DNA, 25 bp, Homo sapien
tgggcaagcagtttagtttgtctaa

SEQ ID NO: 2751552 - DNA, 25 bp, Homo sapien
caagcagtttagtttgtctaaactt

SEQ ID NO: 2751553 - DNA, 25 bp, Homo sapien
ctgggcaagcagtttagtttgtcta

SEQ ID NO: 2751554 - DNA, 25 bp, Homo sapien
taactatagtctcccagggtcctat

SEQ ID NO: 2751555 - DNA, 25 bp, Homo sapien
tttaggtggtaactatagtctccca

SEQ ID NO: 2751556 - DNA, 25 bp, Homo sapien
catttgagcgtagccaatggaactg

SEQ ID NO: 2751557 - DNA, 25 bp, Homo sapien
tgagcgtagccaatggaactgaaca

SEQ ID NO: 2751558 - DNA, 25 bp, Homo sapien
tacttgaattctttcccaatagtga

SEQ ID NO: 2751559 - DNA, 25 bp, Homo sapien
caataagtttatattagtatagctg

SEQ ID NO: 2751560 - DNA, 25 bp, Homo sapien
ccaatagtgacaaattagaataaac

SEQ ID NO: 2751561 - DNA, 25 bp, Homo sapien
tagctgaataagaatcctgaaagca

SEQ ID NO: 2751562 - DNA, 25 bp, Homo sapien
tgagttctgaggaaaaccctaccgc

SEQ ID NO: 2751563 - DNA, 25 bp, Homo sapien
ccaatttgggttgtgctgcagcttc

SEQ ID NO: 2751564 - DNA, 25 bp, Homo sapien
gctgaaagctcaaaatacacgtgga

SEQ ID NO: 2751565 - DNA, 25 bp, Homo sapien
tgattacgattgcagaggttgagcc

SEQ ID NO: 2751566 - DNA, 25 bp, Homo sapien
caagagtaagtctcctgcagacgta

SEQ ID NO: 2751567 - DNA, 25 bp, Homo sapien
tctgcatccgggaccttcttaggtc

SEQ ID NO: 2751568 - DNA, 25 bp, Homo sapien
ctgcccagtagtgtctgcatccggg

SEQ ID NO: 2751569 - DNA, 25 bp, Homo sapien
gcagacgtacttccagagtctccag

SEQ ID NO: 2751570 - DNA, 25 bp, Homo sapien
tcagcggaaagggatgccacacata

SEQ ID NO: 2751571 - DNA, 25 bp, Homo sapien
tggcaattgctcagcggagccagcc

SEQ ID NO: 2751572 - DNA, 25 bp, Homo sapien
ccagtgatgctgtcgacgaggcttt

SEQ ID NO: 2751573 - DNA, 25 bp, Homo sapien
aaagaagaggacgactggctcagcg

SEQ ID NO: 2751574 - DNA, 25 bp, Homo sapien
gaatgagagtaagcgtgaggctggc

SEQ ID NO: 2751575 - DNA, 25 bp, Homo sapien
ggccggaatgagagtaagcgtgagg

SEQ ID NO: 2751576 - DNA, 25 bp, Homo sapien
ctggccggaatgagagtaagcgtga

SEQ ID NO: 2751577 - DNA, 25 bp, Homo sapien
ccggaatgagagtaagcgtgaggct

SEQ ID NO: 2751578 - DNA, 25 bp, Homo sapien
agcgctgccgcacctggaagccgat

SEQ ID NO: 2751579 - DNA, 25 bp, Homo sapien
ctttcctcgcggttctgtcccacgc

SEQ ID NO: 2751580 - DNA, 25 bp, Homo sapien
gcggttctgtcccacgcacacccgg

SEQ ID NO: 2751581 - DNA, 25 bp, Homo sapien
caggagcgctgccgcacctggaagc

SEQ ID NO: 2751582 - DNA, 25 bp, Homo sapien
cgaggtccagggagtccagcctccg

SEQ ID NO: 2751583 - DNA, 25 bp, Homo sapien
ggtccagggagtccagcctccgttc

SEQ ID NO: 2751584 - DNA, 25 bp, Homo sapien
ctgcagggagaccacgaggtccagg

SEQ ID NO: 2751585 - DNA, 25 bp, Homo sapien
gagaccacgaggtccagggagtcca

SEQ ID NO: 2751586 - DNA, 25 bp, Homo sapien
gggaagggaagcaatgcaatcatta

SEQ ID NO: 2751587 - DNA, 25 bp, Homo sapien
aggtcccgcaggctcagagtccaag

SEQ ID NO: 2751588 - DNA, 25 bp, Homo sapien
tgtctgcacccacggccaaatgcct

SEQ ID NO: 2751589 - DNA, 25 bp, Homo sapien
tgttcctcaggaggatcacgcttgg

SEQ ID NO: 2751590 - DNA, 25 bp, Homo sapien
gaacagttggcgatctccatgccag

SEQ ID NO: 2751591 - DNA, 25 bp, Homo sapien
gggttcgacagaggcaggatcccac

SEQ ID NO: 2751592 - DNA, 25 bp, Homo sapien
accaaagtgcccatccacggtgaga

SEQ ID NO: 2751593 - DNA, 25 bp, Homo sapien
catctgtgtgcgtgcaaggcgtcca

SEQ ID NO: 2751594 - DNA, 25 bp, Homo sapien
aaggtctgggaagagcaacgaggag

SEQ ID NO: 2751595 - DNA, 25 bp, Homo sapien
caacgaggagcctgtgttgagtctt

SEQ ID NO: 2751596 - DNA, 25 bp, Homo sapien
gtctgggaagagcaacgaggagcct

SEQ ID NO: 2751597 - DNA, 25 bp, Homo sapien
aagagcaacgaggagcctgtgttga

SEQ ID NO: 2751598 - DNA, 25 bp, Homo sapien
gactgtcaaaagcatgtctcttgtt

SEQ ID NO: 2751599 - DNA, 25 bp, Homo sapien
gctgtgcaaaccttgctagtattgt

SEQ ID NO: 2751600 - DNA, 25 bp, Homo sapien
ccagactcctgcttgctgtgcaaac

SEQ ID NO: 2751601 - DNA, 25 bp, Homo sapien
tgctagtattgttttgactgtcaaa

SEQ ID NO: 2751602 - DNA, 25 bp, Homo sapien
ttctcttttattagcgctgtaaggg

SEQ ID NO: 2751603 - DNA, 25 bp, Homo sapien
tataacagcattccacgtggccctg

SEQ ID NO: 2751604 - DNA, 25 bp, Homo sapien
ctccattatcaaatcaacacagttt

SEQ ID NO: 2751605 - DNA, 25 bp, Homo sapien
aatagtccacaccaaactctggagg

SEQ ID NO: 2751606 - DNA, 25 bp, Homo sapien
catggctcccatgggcagcattttc

SEQ ID NO: 2751607 - DNA, 25 bp, Homo sapien
cagcattttcagaggatggagaagg

SEQ ID NO: 2751608 - DNA, 25 bp, Homo sapien
tcgccaggggagcatggctcccatg

SEQ ID NO: 2751609 - DNA, 25 bp, Homo sapien
ggatcgccaggggagcatggctccc

SEQ ID NO: 2751610 - DNA, 25 bp, Homo sapien
ttcccactgcgtcatgctcaggctc

SEQ ID NO: 2751611 - DNA, 25 bp, Homo sapien
cactgcgtcatgctcaggctctcct

SEQ ID NO: 2751612 - DNA, 25 bp, Homo sapien
ccactgcgtcatgctcaggctctcc

SEQ ID NO: 2751613 - DNA, 25 bp, Homo sapien
tgttcccactgcgtcatgctcaggc

SEQ ID NO: 2751614 - DNA, 25 bp, Homo sapien
cactgaaccaacagcaactggagga

SEQ ID NO: 2751615 - DNA, 25 bp, Homo sapien
tccagctatgacatcctgttggcca

SEQ ID NO: 2751616 - DNA, 25 bp, Homo sapien
tccaaaaaggtcatccttcactgag

SEQ ID NO: 2751617 - DNA, 25 bp, Homo sapien
ccttctagatatattccagctatga

SEQ ID NO: 2751618 - DNA, 25 bp, Homo sapien
gggatcttgaccacgtgctcccgca

SEQ ID NO: 2751619 - DNA, 25 bp, Homo sapien
cggtagaactggcacctcttcaggg

SEQ ID NO: 2751620 - DNA, 25 bp, Homo sapien
ccacgaacaggacactctggctgtg

SEQ ID NO: 2751621 - DNA, 25 bp, Homo sapien
cagctgcttgaggtctgattcaggg

SEQ ID NO: 2751622 - DNA, 25 bp, Homo sapien
gctcacagctacacggccagtaaat

SEQ ID NO: 2751623 - DNA, 25 bp, Homo sapien
tcaagtaagatgatggaggttcacc

SEQ ID NO: 2751624 - DNA, 25 bp, Homo sapien
tggccatgagaatggaacctggtct

SEQ ID NO: 2751625 - DNA, 25 bp, Homo sapien
ggaggttcaccaaggtgaagtgaca

SEQ ID NO: 2751626 - DNA, 25 bp, Homo sapien
gccctgtacagagtttgacatgaag

SEQ ID NO: 2751627 - DNA, 25 bp, Homo sapien
ccccagacctacatattggttgggt

SEQ ID NO: 2751628 - DNA, 25 bp, Homo sapien
catcctttgggtggtgccctgtaca

SEQ ID NO: 2751629 - DNA, 25 bp, Homo sapien
caacagtcctactggggagtttcca

SEQ ID NO: 2751630 - DNA, 25 bp, Homo sapien
gggcacagaaacggctctaattctg

SEQ ID NO: 2751631 - DNA, 25 bp, Homo sapien
gcacagaaacggctctaattctgag

SEQ ID NO: 2751632 - DNA, 25 bp, Homo sapien
ggcacagaaacggctctaattctga

SEQ ID NO: 2751633 - DNA, 25 bp, Homo sapien
agggcacagaaacggctctaattct

SEQ ID NO: 2751634 - DNA, 25 bp, Homo sapien
ctcctggaggaaagttcgtctgtaa

SEQ ID NO: 2751635 - DNA, 25 bp, Homo sapien
tggaggaaagttcgtctgtaacacc

SEQ ID NO: 2751636 - DNA, 25 bp, Homo sapien
gaggaaagttcgtctgtaacaccat

SEQ ID NO: 2751637 - DNA, 25 bp, Homo sapien
agtcactctgctttgtaacaactcc

SEQ ID NO: 2751638 - DNA, 25 bp, Homo sapien
ttccacgcaggtcctgagaagccac

SEQ ID NO: 2751639 - DNA, 25 bp, Homo sapien
ccttcgttgaagattgacttgttca

SEQ ID NO: 2751640 - DNA, 25 bp, Homo sapien
gttcatctttgttcacaaccatggg

SEQ ID NO: 2751641 - DNA, 25 bp, Homo sapien
gacttggccttcgttgaagattgac

SEQ ID NO: 2751642 - DNA, 25 bp, Homo sapien
gcaggcctgggctgctgccaggtga

SEQ ID NO: 2751643 - DNA, 25 bp, Homo sapien
atgcaggcctgggctgctgccaggt

SEQ ID NO: 2751644 - DNA, 25 bp, Homo sapien
aggcctgggctgctgccaggtgacc

SEQ ID NO: 2751645 - DNA, 25 bp, Homo sapien
ctaggagatgcaggcctgggctgct

SEQ ID NO: 2751646 - DNA, 25 bp, Homo sapien
taactttgtggcacatgtcctgctc

SEQ ID NO: 2751647 - DNA, 25 bp, Homo sapien
ctcttgtagtagaatagcacgtcat

SEQ ID NO: 2751648 - DNA, 25 bp, Homo sapien
ggttcaaagacaccaatcactctgt

SEQ ID NO: 2751649 - DNA, 25 bp, Homo sapien
tccaatagtgtctttgggcacaagt

SEQ ID NO: 2751650 - DNA, 25 bp, Homo sapien
tgaatttccctggtttgccttgatg

SEQ ID NO: 2751651 - DNA, 25 bp, Homo sapien
cagttaaaattgtcaagccagtcta

SEQ ID NO: 2751652 - DNA, 25 bp, Homo sapien
taagagaccggaaaaacatcagctt

SEQ ID NO: 2751653 - DNA, 25 bp, Homo sapien
gccagtctaaacaagctgaaatgct

SEQ ID NO: 2751654 - DNA, 25 bp, Homo sapien
tcatcccacaaacctattccgtgcc

SEQ ID NO: 2751655 - DNA, 25 bp, Homo sapien
catcccacaaacctattccgtgccg

SEQ ID NO: 2751656 - DNA, 25 bp, Homo sapien
atcccacaaacctattccgtgccgg

SEQ ID NO: 2751657 - DNA, 25 bp, Homo sapien
gaaaagcggctattgtcctccatga

SEQ ID NO: 2751658 - DNA, 25 bp, Homo sapien
tgcaccacgtcgactgccacgtggg

SEQ ID NO: 2751659 - DNA, 25 bp, Homo sapien
gcagatttctctcggtcaggttcac

SEQ ID NO: 2751660 - DNA, 25 bp, Homo sapien
tagatgatgtggacgagcgcttctc

SEQ ID NO: 2751661 - DNA, 25 bp, Homo sapien
taagccacaatccatcattgaagta

SEQ ID NO: 2751662 - DNA, 25 bp, Homo sapien
catcattgaagtatgcaaacatgtc

SEQ ID NO: 2751663 - DNA, 25 bp, Homo sapien
taacttggaaatcaagtaagccaca

SEQ ID NO: 2751664 - DNA, 25 bp, Homo sapien
gaagacgggccaggttaccagagcc

SEQ ID NO: 2751665 - DNA, 25 bp, Homo sapien
tgggttgggatacggtagccaggcc

SEQ ID NO: 2751666 - DNA, 25 bp, Homo sapien
tgcgcgatggcgctcaggttgaaga

SEQ ID NO: 2751667 - DNA, 25 bp, Homo sapien
cgcgagttttcttggtacttgaagg

SEQ ID NO: 2751668 - DNA, 25 bp, Homo sapien
cacagctgaggccgcaatgctgttc

SEQ ID NO: 2751669 - DNA, 25 bp, Homo sapien
acgggagcagttcaggcgagccttc

SEQ ID NO: 2751670 - DNA, 25 bp, Homo sapien
gaagcgcccaccaatatcgttcttg

SEQ ID NO: 2751671 - DNA, 25 bp, Homo sapien
gctctactgcattttctcggaaaaa

SEQ ID NO: 2751672 - DNA, 25 bp, Homo sapien
ccaggtgtcttccagcaggaagcgc

SEQ ID NO: 2751673 - DNA, 25 bp, Homo sapien
ctattctggctttacagagcttctt

SEQ ID NO: 2751674 - DNA, 25 bp, Homo sapien
gagcacctcttgcagaccagtcaca

SEQ ID NO: 2751675 - DNA, 25 bp, Homo sapien
ttgtcagtcgagagagcacctcttg

SEQ ID NO: 2751676 - DNA, 25 bp, Homo sapien
gaatttccagctgtagcgaatcttg

SEQ ID NO: 2751677 - DNA, 25 bp, Homo sapien
agaccagtcacacctccaggtactg

SEQ ID NO: 2751678 - DNA, 25 bp, Homo sapien
aaggcttgaacaagcacagaagtgg

SEQ ID NO: 2751679 - DNA, 25 bp, Homo sapien
aagaaagactcaggtctgggagcca

SEQ ID NO: 2751680 - DNA, 25 bp, Homo sapien
gaaggcttgaacaagcacagaagtg

SEQ ID NO: 2751681 - DNA, 25 bp, Homo sapien
aggtctgggagccactctaaaagtg

SEQ ID NO: 2751682 - DNA, 25 bp, Homo sapien
gcaacaagtccaactctcaaatttt

SEQ ID NO: 2751683 - DNA, 25 bp, Homo sapien
caaagcaggaagacctacgccttca

SEQ ID NO: 2751684 - DNA, 25 bp, Homo sapien
cattgtagcctccttccgcaacaag

SEQ ID NO: 2751685 - DNA, 25 bp, Homo sapien
tacgccttcaccaccccattgtagc

SEQ ID NO: 2751686 - DNA, 25 bp, Homo sapien
agagccaccgtattgacctctgaat

SEQ ID NO: 2751687 - DNA, 25 bp, Homo sapien
tagagccaccgtattgacctctgaa

SEQ ID NO: 2751688 - DNA, 25 bp, Homo sapien
ggtagagccaccgtattgacctctg

SEQ ID NO: 2751689 - DNA, 25 bp, Homo sapien
agtggtagagccaccgtattgacct

SEQ ID NO: 2751690 - DNA, 25 bp, Homo sapien
gcgggccatgccactgatctgatca

SEQ ID NO: 2751691 - DNA, 25 bp, Homo sapien
ggctgtagcagcatagagctcccca

SEQ ID NO: 2751692 - DNA, 25 bp, Homo sapien
taggcttcggtaaatggcaggatca

SEQ ID NO: 2751693 - DNA, 25 bp, Homo sapien
catttggagttgtactgcgccgtgc

SEQ ID NO: 2751694 - DNA, 25 bp, Homo sapien
tgcagacaggcgtgaatgcattggt

SEQ ID NO: 2751695 - DNA, 25 bp, Homo sapien
gtcccacaggtgaataaccggtcgc

SEQ ID NO: 2751696 - DNA, 25 bp, Homo sapien
cacaggtgaataaccggtcgccacc

SEQ ID NO: 2751697 - DNA, 25 bp, Homo sapien
acaggcgtgaatgcattggtcccac

SEQ ID NO: 2751698 - DNA, 25 bp, Homo sapien
ctttgatttgcctttgctgtaacag

SEQ ID NO: 2751699 - DNA, 25 bp, Homo sapien
cctttgctgtaacaggcctttttgg

SEQ ID NO: 2751700 - DNA, 25 bp, Homo sapien
aggcctttttggtagcttcatcaca

SEQ ID NO: 2751701 - DNA, 25 bp, Homo sapien
gtaacaggcctttttggtagcttca

SEQ ID NO: 2751702 - DNA, 25 bp, Homo sapien
tgagttggtgactatagcactgatg

SEQ ID NO: 2751703 - DNA, 25 bp, Homo sapien
ggatttttccccagtagcagtcatt

SEQ ID NO: 2751704 - DNA, 25 bp, Homo sapien
gaatagacccagacgaggcttaagg

SEQ ID NO: 2751705 - DNA, 25 bp, Homo sapien
gatgggatgcttagatctagtcact

SEQ ID NO: 2751706 - DNA, 25 bp, Homo sapien
acaggtaccaggatgtgcaaagtct

SEQ ID NO: 2751707 - DNA, 25 bp, Homo sapien
gagagacgtatgcttgctgaaaaca

SEQ ID NO: 2751708 - DNA, 25 bp, Homo sapien
cacaaggaatgttgaggaataagca

SEQ ID NO: 2751709 - DNA, 25 bp, Homo sapien
tgtatggctgaatgccacaaggaat

SEQ ID NO: 2751710 - DNA, 25 bp, Homo sapien
gtccacttagcgtctgtttaggcca

SEQ ID NO: 2751711 - DNA, 25 bp, Homo sapien
ttccagacacaggattcagcaagcc

SEQ ID NO: 2751712 - DNA, 25 bp, Homo sapien
ccagacacaggattcagcaagccct

SEQ ID NO: 2751713 - DNA, 25 bp, Homo sapien
gagctgtccacttagcgtctgttta

SEQ ID NO: 2751714 - DNA, 25 bp, Homo sapien
caatctgtttgtgaacaaaaggcat

SEQ ID NO: 2751715 - DNA, 25 bp, Homo sapien
ccaatctgtttgtgaacaaaaggca

SEQ ID NO: 2751716 - DNA, 25 bp, Homo sapien
ttcccaatctgtttgtgaacaaaag

SEQ ID NO: 2751717 - DNA, 25 bp, Homo sapien
tccatttatctcacatttcccaatc

SEQ ID NO: 2751718 - DNA, 25 bp, Homo sapien
ccaggtaacccagtggcagccagtg

SEQ ID NO: 2751719 - DNA, 25 bp, Homo sapien
ggaccttttccatggccctatccag

SEQ ID NO: 2751720 - DNA, 25 bp, Homo sapien
atagaagcttcccagtacagaggca

SEQ ID NO: 2751721 - DNA, 25 bp, Homo sapien
tggtgggaatcgcagctcggacttc

SEQ ID NO: 2751722 - DNA, 25 bp, Homo sapien
tattttgctacaagtaaggatgtct

SEQ ID NO: 2751723 - DNA, 25 bp, Homo sapien
atgtctagtcaagattctctccctg

SEQ ID NO: 2751724 - DNA, 25 bp, Homo sapien
tcccctacctgggatttgcggtgag

SEQ ID NO: 2751725 - DNA, 25 bp, Homo sapien
ggaattcctgatcaacaaaattgtg

SEQ ID NO: 2751726 - DNA, 25 bp, Homo sapien
tttacagcactcaggacccagagga

SEQ ID NO: 2751727 - DNA, 25 bp, Homo sapien
gtgcaatgtcattaaaggccactga

SEQ ID NO: 2751728 - DNA, 25 bp, Homo sapien
tcaggacccagaggatattattctc

SEQ ID NO: 2751729 - DNA, 25 bp, Homo sapien
aagggcacttgggtcatttacagca

SEQ ID NO: 2751730 - DNA, 25 bp, Homo sapien
caagcacatagtacattgttagtag

SEQ ID NO: 2751731 - DNA, 25 bp, Homo sapien
gtagttatagtcaccatgtcataca

SEQ ID NO: 2751732 - DNA, 25 bp, Homo sapien
cacataagtgagatcttgcagtttt

SEQ ID NO: 2751733 - DNA, 25 bp, Homo sapien
cctttgtctaactggaatttcttgt

SEQ ID NO: 2751734 - DNA, 25 bp, Homo sapien
ttacaagaaattgatgcccggatgc

SEQ ID NO: 2751735 - DNA, 25 bp, Homo sapien
tttaacccaagtattcatatttatg

SEQ ID NO: 2751736 - DNA, 25 bp, Homo sapien
tacaagaaattgatgcccggatgca

SEQ ID NO: 2751737 - DNA, 25 bp, Homo sapien
taaataatcgatgattgctgtaact

SEQ ID NO: 2751738 - DNA, 25 bp, Homo sapien
tcaaactaaataatcgatgattgct

SEQ ID NO: 2751739 - DNA, 25 bp, Homo sapien
ttgaagcaatgttccttgaatggtc

SEQ ID NO: 2751740 - DNA, 25 bp, Homo sapien
caatgttccttgaatggtctgtcat

SEQ ID NO: 2751741 - DNA, 25 bp, Homo sapien
ggatcacatccacggaacaaacagg

SEQ ID NO: 2751742 - DNA, 25 bp, Homo sapien
acatccacggaacaaacagggccac

SEQ ID NO: 2751743 - DNA, 25 bp, Homo sapien
aaatcaggatcacatccacggaaca

SEQ ID NO: 2751744 - DNA, 25 bp, Homo sapien
tcaggatcacatccacggaacaaac

SEQ ID NO: 2751745 - DNA, 25 bp, Homo sapien
acagatcctcaagctgtaacctgaa

SEQ ID NO: 2751746 - DNA, 25 bp, Homo sapien
caagctgtaacctgaagaggtagtt

SEQ ID NO: 2751747 - DNA, 25 bp, Homo sapien
gatcctcaagctgtaacctgaagag

SEQ ID NO: 2751748 - DNA, 25 bp, Homo sapien
ctcaagctgtaacctgaagaggtag

SEQ ID NO: 2751749 - DNA, 25 bp, Homo sapien
tgttggccatcaattgctgtcaaaa

SEQ ID NO: 2751750 - DNA, 25 bp, Homo sapien
gaactgaaacgtgtctcaaatctgg

SEQ ID NO: 2751751 - DNA, 25 bp, Homo sapien
gccatcatcactgcctaagtctaag

SEQ ID NO: 2751752 - DNA, 25 bp, Homo sapien
tgaatggtttgatgcttcccaccag

SEQ ID NO: 2751753 - DNA, 25 bp, Homo sapien
cttcccagcagaccatgttgatatg

SEQ ID NO: 2751754 - DNA, 25 bp, Homo sapien
tatgcaatggatggagacctccagg

SEQ ID NO: 2751755 - DNA, 25 bp, Homo sapien
ggactccagggatattgaattgcag

SEQ ID NO: 2751756 - DNA, 25 bp, Homo sapien
cctccaggaatgaggtctgggatga

SEQ ID NO: 2751757 - DNA, 25 bp, Homo sapien
tgttaactgcgagaaatccacagca

SEQ ID NO: 2751758 - DNA, 25 bp, Homo sapien
tctgtcctgggtcaaatgttaactg

SEQ ID NO: 2751759 - DNA, 25 bp, Homo sapien
gaaatccacagcattcttcgctctg

SEQ ID NO: 2751760 - DNA, 25 bp, Homo sapien
tcgctctgaactcccgtaaccaggg

SEQ ID NO: 2751761 - DNA, 25 bp, Homo sapien
aggaaaaaatgcgtgcactgtttca

SEQ ID NO: 2751762 - DNA, 25 bp, Homo sapien
gaaaaaatgcgtgcactgtttcagt

SEQ ID NO: 2751763 - DNA, 25 bp, Homo sapien
aaaaaatgcgtgcactgtttcagtg

SEQ ID NO: 2751764 - DNA, 25 bp, Homo sapien
aaatgcgtgcactgtttcagtgagg

SEQ ID NO: 2751765 - DNA, 25 bp, Homo sapien
aggacttcccaattggattctgttt

SEQ ID NO: 2751766 - DNA, 25 bp, Homo sapien
agcccccactgaagacgcatttctt

SEQ ID NO: 2751767 - DNA, 25 bp, Homo sapien
gaagtgagagctgatagccccaggt

SEQ ID NO: 2751768 - DNA, 25 bp, Homo sapien
actgaagacgcatttcttctctgag

SEQ ID NO: 2751769 - DNA, 25 bp, Homo sapien
ccatataaattggaacctgctcctt

SEQ ID NO: 2751770 - DNA, 25 bp, Homo sapien
ttagctccacgtcatgtcgtacagt

SEQ ID NO: 2751771 - DNA, 25 bp, Homo sapien
catgtcgtacagtatggatgaataa

SEQ ID NO: 2751772 - DNA, 25 bp, Homo sapien
gctccacgtcatgtcgtacagtatg

SEQ ID NO: 2751773 - DNA, 25 bp, Homo sapien
cacgtcatgtcgtacagtatggatg

SEQ ID NO: 2751774 - DNA, 25 bp, Homo sapien
catccagttttgaagattaagaacc

SEQ ID NO: 2751775 - DNA, 25 bp, Homo sapien
ttaaaggcaaaatgtccatccagtt

SEQ ID NO: 2751776 - DNA, 25 bp, Homo sapien
ccatccagttttgaagattaagaac

SEQ ID NO: 2751777 - DNA, 25 bp, Homo sapien
cctttaaaggcaaaatgtccatcca

SEQ ID NO: 2751778 - DNA, 25 bp, Homo sapien
gaggccccagtttcgtcttcatgag

SEQ ID NO: 2751779 - DNA, 25 bp, Homo sapien
ccttttgcaggtagaacagctcact

SEQ ID NO: 2751780 - DNA, 25 bp, Homo sapien
tgagcatgtttataagccccagccc

SEQ ID NO: 2751781 - DNA, 25 bp, Homo sapien
tcgtgggaacctagaaagcaggctt

SEQ ID NO: 2751782 - DNA, 25 bp, Homo sapien
caaacacttaggaggcccacagtac

SEQ ID NO: 2751783 - DNA, 25 bp, Homo sapien
tcaaacacttaggaggcccacagta

SEQ ID NO: 2751784 - DNA, 25 bp, Homo sapien
gcattcgtgatgctctattatcttc

SEQ ID NO: 2751785 - DNA, 25 bp, Homo sapien
ctggattatacagcattcgtgatgc

SEQ ID NO: 2751786 - DNA, 25 bp, Homo sapien
aacaagagccactggattatacagc

SEQ ID NO: 2751787 - DNA, 25 bp, Homo sapien
gccactggattatacagcattcgtg

SEQ ID NO: 2751788 - DNA, 25 bp, Homo sapien
tttgcaatcagtgcgtgctggttcc

SEQ ID NO: 2751789 - DNA, 25 bp, Homo sapien
caatcagtgcgtgctggttccttac

SEQ ID NO: 2751790 - DNA, 25 bp, Homo sapien
ttagatgacggctttgcaatcagtg

SEQ ID NO: 2751791 - DNA, 25 bp, Homo sapien
gacggctttgcaatcagtgcgtgct

SEQ ID NO: 2751792 - DNA, 25 bp, Homo sapien
ctctgggtgggcgagtctccacagc

SEQ ID NO: 2751793 - DNA, 25 bp, Homo sapien
gatgactggatgctcggttctctgg

SEQ ID NO: 2751794 - DNA, 25 bp, Homo sapien
tctctggcactgagtcgtaccctgg

SEQ ID NO: 2751795 - DNA, 25 bp, Homo sapien
agaacagccatgctataacacaggt

SEQ ID NO: 2751796 - DNA, 25 bp, Homo sapien
gcctctgactctgggcacgtgtctt

SEQ ID NO: 2751797 - DNA, 25 bp, Homo sapien
aaggggcctctgactctgggcacgt

SEQ ID NO: 2751798 - DNA, 25 bp, Homo sapien
tgggcaaggggcctctgactctggg

SEQ ID NO: 2751799 - DNA, 25 bp, Homo sapien
gggcctctgactctgggcacgtgtc

SEQ ID NO: 2751800 - DNA, 25 bp, Homo sapien
aaacagaagctcttcttctcctcat

SEQ ID NO: 2751801 - DNA, 25 bp, Homo sapien
ctaaacagaagctcttcttctcctc

SEQ ID NO: 2751802 - DNA, 25 bp, Homo sapien
ctcttcttctcctcatgtgtggaaa

SEQ ID NO: 2751803 - DNA, 25 bp, Homo sapien
tcttctcctcatgtgtggaaagtgc

SEQ ID NO: 2751804 - DNA, 25 bp, Homo sapien
taccatggcaaagcattcctgtacc

SEQ ID NO: 2751805 - DNA, 25 bp, Homo sapien
cgcatagcctgaaggtgatttatac

SEQ ID NO: 2751806 - DNA, 25 bp, Homo sapien
tggtatcatcttggcactcgaaaat

SEQ ID NO: 2751807 - DNA, 25 bp, Homo sapien
caaaatccttactcctagctatggg

SEQ ID NO: 2751808 - DNA, 25 bp, Homo sapien
caataggagtgttcttcaccctcta

SEQ ID NO: 2751809 - DNA, 25 bp, Homo sapien
aagttatttgcctcagtagcatcag

SEQ ID NO: 2751810 - DNA, 25 bp, Homo sapien
cacttcctatatgcaaagcagagca

SEQ ID NO: 2751811 - DNA, 25 bp, Homo sapien
gaaattcctgccctgcaataggagt

SEQ ID NO: 2751812 - DNA, 25 bp, Homo sapien
gaattaatcagtgtccactagctgg

SEQ ID NO: 2751813 - DNA, 25 bp, Homo sapien
tgagctgtgataagggtaccccaat

SEQ ID NO: 2751814 - DNA, 25 bp, Homo sapien
tgattggcccacttgggtaggtacc

SEQ ID NO: 2751815 - DNA, 25 bp, Homo sapien
tcactgtagtaaggaggtggcctgc

SEQ ID NO: 2751816 - DNA, 25 bp, Homo sapien
actccagcccaagtctcacacacca

SEQ ID NO: 2751817 - DNA, 25 bp, Homo sapien
tggaggacgcgtttcctcaatcatg

SEQ ID NO: 2751818 - DNA, 25 bp, Homo sapien
tccagcccaagtctcacacaccaac

SEQ ID NO: 2751819 - DNA, 25 bp, Homo sapien
gaggatggaggacgcgtttcctcaa

SEQ ID NO: 2751820 - DNA, 25 bp, Homo sapien
tgtccagcacgatggtctgcaagcg

SEQ ID NO: 2751821 - DNA, 25 bp, Homo sapien
tcacctggaacgagctgtaaaactg

SEQ ID NO: 2751822 - DNA, 25 bp, Homo sapien
caaaggattgctcgctgtgtggtca

SEQ ID NO: 2751823 - DNA, 25 bp, Homo sapien
gatgccagtggcaagtctcacagcg

SEQ ID NO: 2751824 - DNA, 25 bp, Homo sapien
gcctctaagccaggatcaagctgag

SEQ ID NO: 2751825 - DNA, 25 bp, Homo sapien
ggactgtaagcatgggtggctttcc

SEQ ID NO: 2751826 - DNA, 25 bp, Homo sapien
ggacagaatctggtaaacaagcacc

SEQ ID NO: 2751827 - DNA, 25 bp, Homo sapien
tgtttcctggcacagactagaggac

SEQ ID NO: 2751828 - DNA, 25 bp, Homo sapien
taccaggagggttatggcaagagca

SEQ ID NO: 2751829 - DNA, 25 bp, Homo sapien
gaatctccagcccaattgcctaacg

SEQ ID NO: 2751830 - DNA, 25 bp, Homo sapien
ggagtcatgattcccatccacacag

SEQ ID NO: 2751831 - DNA, 25 bp, Homo sapien
aaggagactgatgcctccatgccag

SEQ ID NO: 2751832 - DNA, 25 bp, Homo sapien
tttcaggtgacatacttttccatca

SEQ ID NO: 2751833 - DNA, 25 bp, Homo sapien
caggtgacatacttttccatcatct

SEQ ID NO: 2751834 - DNA, 25 bp, Homo sapien
tcaggtgacatacttttccatcatc

SEQ ID NO: 2751835 - DNA, 25 bp, Homo sapien
tcatttcaggtgacatacttttcca

SEQ ID NO: 2751836 - DNA, 25 bp, Homo sapien
agaacaagggaaatctttgctattt

SEQ ID NO: 2751837 - DNA, 25 bp, Homo sapien
cagaacaagggaaatctttgctatt

SEQ ID NO: 2751838 - DNA, 25 bp, Homo sapien
agggaaatctttgctatttccccat

SEQ ID NO: 2751839 - DNA, 25 bp, Homo sapien
gaacaagggaaatctttgctatttc

SEQ ID NO: 2751840 - DNA, 25 bp, Homo sapien
tcaccagagggtgatgataagagaa

SEQ ID NO: 2751841 - DNA, 25 bp, Homo sapien
tccctcactagcatcaccagagggt

SEQ ID NO: 2751842 - DNA, 25 bp, Homo sapien
ttgggctggcaggtactccggagat

SEQ ID NO: 2751843 - DNA, 25 bp, Homo sapien
caggtactccggagatggccactcc

SEQ ID NO: 2751844 - DNA, 25 bp, Homo sapien
taggcaaatcgctggctggctgtca

SEQ ID NO: 2751845 - DNA, 25 bp, Homo sapien
aggctgtaggcaaatcgctggctgg

SEQ ID NO: 2751846 - DNA, 25 bp, Homo sapien
ggaggctgtaggcaaatcgctggct

SEQ ID NO: 2751847 - DNA, 25 bp, Homo sapien
gctgtaggcaaatcgctggctggct

SEQ ID NO: 2751848 - DNA, 25 bp, Homo sapien
gactactgtatggatgctacgtgga

SEQ ID NO: 2751849 - DNA, 25 bp, Homo sapien
gagtcgtttgtttcccatgagcacg

SEQ ID NO: 2751850 - DNA, 25 bp, Homo sapien
tttcccagccgagatatagcagcag

SEQ ID NO: 2751851 - DNA, 25 bp, Homo sapien
tcatattgcaaatcggcggcacaca

SEQ ID NO: 2751852 - DNA, 25 bp, Homo sapien
caatgccgcaactatgtgtgtaaac

SEQ ID NO: 2751853 - DNA, 25 bp, Homo sapien
gaatgctgcaattatgacaatgccg

SEQ ID NO: 2751854 - DNA, 25 bp, Homo sapien
taaacataggcagcgaaaggtcctc

SEQ ID NO: 2751855 - DNA, 25 bp, Homo sapien
tatggcaagctataaggaacgtaat

SEQ ID NO: 2751856 - DNA, 25 bp, Homo sapien
gaggcttgtgcttttgtggtgccac

SEQ ID NO: 2751857 - DNA, 25 bp, Homo sapien
atgagaaggaggcttgtgcttttgt

SEQ ID NO: 2751858 - DNA, 25 bp, Homo sapien
aaggaggcttgtgcttttgtggtgc

SEQ ID NO: 2751859 - DNA, 25 bp, Homo sapien
ttccatgagaaggaggcttgtgctt

SEQ ID NO: 2751860 - DNA, 25 bp, Homo sapien
cacaaacctttatggagcacttgaa

SEQ ID NO: 2751861 - DNA, 25 bp, Homo sapien
caaagaatttagtgtcgtgtcctta

SEQ ID NO: 2751862 - DNA, 25 bp, Homo sapien
caaagcagcctagcttccaatggaa

SEQ ID NO: 2751863 - DNA, 25 bp, Homo sapien
gaaatggttaactggcccctagaga

SEQ ID NO: 2751864 - DNA, 25 bp, Homo sapien
gaagaagccagagctcagtgcatag

SEQ ID NO: 2751865 - DNA, 25 bp, Homo sapien
cagtgcatagcagggacttgtctaa

SEQ ID NO: 2751866 - DNA, 25 bp, Homo sapien
tggtcttctaactcataatccggtg

SEQ ID NO: 2751867 - DNA, 25 bp, Homo sapien
taatgttcaattctgctgcacggtg

SEQ ID NO: 2751868 - DNA, 25 bp, Homo sapien
catgtcagatccagctccttaagag

SEQ ID NO: 2751869 - DNA, 25 bp, Homo sapien
gatagtccccgggaatagcagctgt

SEQ ID NO: 2751870 - DNA, 25 bp, Homo sapien
tgtcaggaaggtgctgctacatgtc

SEQ ID NO: 2751871 - DNA, 25 bp, Homo sapien
tagtccccgggaatagcagctgtca

SEQ ID NO: 2751872 - DNA, 25 bp, Homo sapien
tgggttccaaaacagggtctcagac

SEQ ID NO: 2751873 - DNA, 25 bp, Homo sapien
ttctgaggtccaagaccgtcctggg

SEQ ID NO: 2751874 - DNA, 25 bp, Homo sapien
catggattgaacttagcagcccttt

SEQ ID NO: 2751875 - DNA, 25 bp, Homo sapien
cgtcgcatagccttcgcctgcatgg

SEQ ID NO: 2751876 - DNA, 25 bp, Homo sapien
tcacagccctgttagagatgtaagc

SEQ ID NO: 2751877 - DNA, 25 bp, Homo sapien
cagcacccgggcaatggcggaatgt

SEQ ID NO: 2751878 - DNA, 25 bp, Homo sapien
gaacaatgggattccagcagaacac

SEQ ID NO: 2751879 - DNA, 25 bp, Homo sapien
gcggaatgtgtgcatcgttgcctcc

SEQ ID NO: 2751880 - DNA, 25 bp, Homo sapien
tcttgctttaagccaccgagtgtgt

SEQ ID NO: 2751881 - DNA, 25 bp, Homo sapien
ttctcttgctttaagccaccgagtg

SEQ ID NO: 2751882 - DNA, 25 bp, Homo sapien
ccgagtgtgtgctgatttgttatag

SEQ ID NO: 2751883 - DNA, 25 bp, Homo sapien
cgagtgtgtgctgatttgttatagt

SEQ ID NO: 2751884 - DNA, 25 bp, Homo sapien
aagccaaccagaagcagagggctag

SEQ ID NO: 2751885 - DNA, 25 bp, Homo sapien
gagggctagcaagacttcaatgcag

SEQ ID NO: 2751886 - DNA, 25 bp, Homo sapien
caaccagaagcagagggctagcaag

SEQ ID NO: 2751887 - DNA, 25 bp, Homo sapien
gctagcaagacttcaatgcagtcca

SEQ ID NO: 2751888 - DNA, 25 bp, Homo sapien
ctgtcagctccatcaaggtctgagg

SEQ ID NO: 2751889 - DNA, 25 bp, Homo sapien
tgctctagggatggtggccaagcct

SEQ ID NO: 2751890 - DNA, 25 bp, Homo sapien
tgaggaactgccacccaactgtggc

SEQ ID NO: 2751891 - DNA, 25 bp, Homo sapien
ctggtgaaagggctacccacctgca

SEQ ID NO: 2751892 - DNA, 25 bp, Homo sapien
tggtgttcgacaaggctcagcagcc

SEQ ID NO: 2751893 - DNA, 25 bp, Homo sapien
ggtgttcgacaaggctcagcagcca

SEQ ID NO: 2751894 - DNA, 25 bp, Homo sapien
ctggtgttcgacaaggctcagcagc

SEQ ID NO: 2751895 - DNA, 25 bp, Homo sapien
gtgttcgacaaggctcagcagccag

SEQ ID NO: 2751896 - DNA, 25 bp, Homo sapien
ccagctccaaaaacctcaaggcagg

SEQ ID NO: 2751897 - DNA, 25 bp, Homo sapien
cagtcaagatgcttattctccccac

SEQ ID NO: 2751898 - DNA, 25 bp, Homo sapien
tcttaatgatgacgctgccacaccc

SEQ ID NO: 2751899 - DNA, 25 bp, Homo sapien
gccccactatgagcaattcactaat

SEQ ID NO: 2751900 - DNA, 25 bp, Homo sapien
caaagttaagtaacattcgcaggcg

SEQ ID NO: 2751901 - DNA, 25 bp, Homo sapien
tcagggagctggaaactccgcaggt

SEQ ID NO: 2751902 - DNA, 25 bp, Homo sapien
ttcgcaggcgtaagctttcaagtga

SEQ ID NO: 2751903 - DNA, 25 bp, Homo sapien
ttcgcaagctggtgatagaacctag

SEQ ID NO: 2751904 - DNA, 25 bp, Homo sapien
gctccaggcctgactttcggagtca

SEQ ID NO: 2751905 - DNA, 25 bp, Homo sapien
cagacggaaagtaaatttggctcca

SEQ ID NO: 2751906 - DNA, 25 bp, Homo sapien
tgactttcggagtcagcgtggaaag

SEQ ID NO: 2751907 - DNA, 25 bp, Homo sapien
cactgctggcagacggaaagtaaat

SEQ ID NO: 2751908 - DNA, 25 bp, Homo sapien
tcaaaactaaatacctgccctggta

SEQ ID NO: 2751909 - DNA, 25 bp, Homo sapien
tagttttagagtccatggttagccc

SEQ ID NO: 2751910 - DNA, 25 bp, Homo sapien
cagagttgtatgacaatctccacaa

SEQ ID NO: 2751911 - DNA, 25 bp, Homo sapien
taggaaatatgcagtccctctccca

SEQ ID NO: 2751912 - DNA, 25 bp, Homo sapien
ggcacaaggttttgaggttcataca

SEQ ID NO: 2751913 - DNA, 25 bp, Homo sapien
cctactcgctgagttccagaatggg

SEQ ID NO: 2751914 - DNA, 25 bp, Homo sapien
caaagttgggtgtccaagccagctc

SEQ ID NO: 2751915 - DNA, 25 bp, Homo sapien
gaggagcgctggtgccagtcatcca

SEQ ID NO: 2751916 - DNA, 25 bp, Homo sapien
gagcggctccgaggatcctcttcag

SEQ ID NO: 2751917 - DNA, 25 bp, Homo sapien
tctggcttcttactgctcagccggg

SEQ ID NO: 2751918 - DNA, 25 bp, Homo sapien
ggcttcttactgctcagccgggaag

SEQ ID NO: 2751919 - DNA, 25 bp, Homo sapien
atgctctggcttcttactgctcagc

SEQ ID NO: 2751920 - DNA, 25 bp, Homo sapien
tcttactgctcagccgggaagccat

SEQ ID NO: 2751921 - DNA, 25 bp, Homo sapien
atccttagcagaccagtgacctcgg

SEQ ID NO: 2751922 - DNA, 25 bp, Homo sapien
gatgcaatccttagcagaccagtga

SEQ ID NO: 2751923 - DNA, 25 bp, Homo sapien
tcttcagatgcaatccttagcagac

SEQ ID NO: 2751924 - DNA, 25 bp, Homo sapien
tcggggaaccctaaagccagacaga

SEQ ID NO: 2751925 - DNA, 25 bp, Homo sapien
cagcctgctgttctagccactggag

SEQ ID NO: 2751926 - DNA, 25 bp, Homo sapien
caggtgcaccatgggacgtagggta

SEQ ID NO: 2751927 - DNA, 25 bp, Homo sapien
agcctgctgttctagccactggagc

SEQ ID NO: 2751928 - DNA, 25 bp, Homo sapien
caccatgggacgtagggtagcagca

SEQ ID NO: 2751929 - DNA, 25 bp, Homo sapien
gatacgacaaaagctttagacttcc

SEQ ID NO: 2751930 - DNA, 25 bp, Homo sapien
ccttctgtgaggaattccgtatctc

SEQ ID NO: 2751931 - DNA, 25 bp, Homo sapien
cctgatgtgcaactggatacgacaa

SEQ ID NO: 2751932 - DNA, 25 bp, Homo sapien
ctacccttctgtgaggaattccgta

SEQ ID NO: 2751933 - DNA, 25 bp, Homo sapien
agccacagccagtgcacgacacaag

SEQ ID NO: 2751934 - DNA, 25 bp, Homo sapien
ccagtgcacgacacaagtgagaatg

SEQ ID NO: 2751935 - DNA, 25 bp, Homo sapien
ggtgccattttgtcccgcagcaaaa

SEQ ID NO: 2751936 - DNA, 25 bp, Homo sapien
tgcagtcctggtgccattttgtccc

SEQ ID NO: 2751937 - DNA, 25 bp, Homo sapien
tgtgcttatcttgtagtactcacac

SEQ ID NO: 2751938 - DNA, 25 bp, Homo sapien
aatgtgtgtgcttatcttgtagtac

SEQ ID NO: 2751939 - DNA, 25 bp, Homo sapien
ctggcacacttaatgtgtgtgctta

SEQ ID NO: 2751940 - DNA, 25 bp, Homo sapien
tcttgtagtactcacaccgatccat

SEQ ID NO: 2751941 - DNA, 25 bp, Homo sapien
tctttgaactgatccaacttctctc

SEQ ID NO: 2751942 - DNA, 25 bp, Homo sapien
catgggttctttgaactgatccaac

SEQ ID NO: 2751943 - DNA, 25 bp, Homo sapien
tcattgaatcatgggttctttgaac

SEQ ID NO: 2751944 - DNA, 25 bp, Homo sapien
gcaggcatgggtaaatcattgaatc

SEQ ID NO: 2751945 - DNA, 25 bp, Homo sapien
tagatacatatagcagagaccccag

SEQ ID NO: 2751946 - DNA, 25 bp, Homo sapien
taagcaatggcactgagaactcagc

SEQ ID NO: 2751947 - DNA, 25 bp, Homo sapien
tagaaaacgccgagccatgtggcaa

SEQ ID NO: 2751948 - DNA, 25 bp, Homo sapien
gagatccagcggagccatttttctg

SEQ ID NO: 2751949 - DNA, 25 bp, Homo sapien
agaaaatagataatgaggtgagact

SEQ ID NO: 2751950 - DNA, 25 bp, Homo sapien
tcataaggcttgtgctacatttttt

SEQ ID NO: 2751951 - DNA, 25 bp, Homo sapien
tattttgtgtagaataggtcttttg

SEQ ID NO: 2751952 - DNA, 25 bp, Homo sapien
tcattacataatttctgtcactgtc

SEQ ID NO: 2751953 - DNA, 25 bp, Homo sapien
ttgatatgggaatcccatggagtga

SEQ ID NO: 2751954 - DNA, 25 bp, Homo sapien
gtcagtggcttggaacgttgacagt

SEQ ID NO: 2751955 - DNA, 25 bp, Homo sapien
ggcttggaacgttgacagttttaca

SEQ ID NO: 2751956 - DNA, 25 bp, Homo sapien
tgacagttttacatggacaaatagc

SEQ ID NO: 2751957 - DNA, 25 bp, Homo sapien
gaacgttgacagttttacatggaca

SEQ ID NO: 2751958 - DNA, 25 bp, Homo sapien
tttcccaagtgggccctcacacttc

SEQ ID NO: 2751959 - DNA, 25 bp, Homo sapien
ttcccaagtgggccctcacacttca

SEQ ID NO: 2751960 - DNA, 25 bp, Homo sapien
ctttcccaagtgggccctcacactt

SEQ ID NO: 2751961 - DNA, 25 bp, Homo sapien
tctatcggtttgagagcccctggag

SEQ ID NO: 2751962 - DNA, 25 bp, Homo sapien
tgttttcccacaccgcaaggtcttc

SEQ ID NO: 2751963 - DNA, 25 bp, Homo sapien
gcaacgaggcatagagagtcacacg

SEQ ID NO: 2751964 - DNA, 25 bp, Homo sapien
gagatcacttagctccccagtcagg

SEQ ID NO: 2751965 - DNA, 25 bp, Homo sapien
gggtaatgaataacaccaagcattc

SEQ ID NO: 2751966 - DNA, 25 bp, Homo sapien
caagcattcatctatgaaggagttc

SEQ ID NO: 2751967 - DNA, 25 bp, Homo sapien
tcaccagtgagtccctcaagactgg

SEQ ID NO: 2751968 - DNA, 25 bp, Homo sapien
cagtgagtccctcaagactgggtaa

SEQ ID NO: 2751969 - DNA, 25 bp, Homo sapien
tctcccttggttcgtgtgaaaggac

SEQ ID NO: 2751970 - DNA, 25 bp, Homo sapien
cagggtttggagtccatggagttcc

SEQ ID NO: 2751971 - DNA, 25 bp, Homo sapien
tcatccccatgaagaggagccatgg

SEQ ID NO: 2751972 - DNA, 25 bp, Homo sapien
ttgtgtcctcatcgggctccgcagt

SEQ ID NO: 2751973 - DNA, 25 bp, Homo sapien
tgaagctcatctgacaggtccagca

SEQ ID NO: 2751974 - DNA, 25 bp, Homo sapien
taatactgatgggtgctttaggcaa

SEQ ID NO: 2751975 - DNA, 25 bp, Homo sapien
tctgtagagcgtcatgagggcaccc

SEQ ID NO: 2751976 - DNA, 25 bp, Homo sapien
gttgttccagggagcctgtactctg

SEQ ID NO: 2751977 - DNA, 25 bp, Homo sapien
tctccaattcattgagtgccctcca

SEQ ID NO: 2751978 - DNA, 25 bp, Homo sapien
tatgctctccaacttatcgagtgcc

SEQ ID NO: 2751979 - DNA, 25 bp, Homo sapien
ccccaatagtagtgaggacatgtca

SEQ ID NO: 2751980 - DNA, 25 bp, Homo sapien
gaggacatgtcatagttgccacttt

SEQ ID NO: 2751981 - DNA, 25 bp, Homo sapien
gcctggtccctttaggcatcagtgt

SEQ ID NO: 2751982 - DNA, 25 bp, Homo sapien
tcttaccactttgtgacatgtctcc

SEQ ID NO: 2751983 - DNA, 25 bp, Homo sapien
tcacattatatgctgacttggctgg

SEQ ID NO: 2751984 - DNA, 25 bp, Homo sapien
tgtttattatcccaggtctacaggg

SEQ ID NO: 2751985 - DNA, 25 bp, Homo sapien
ccaccaggacatcttgccctcccat

SEQ ID NO: 2751986 - DNA, 25 bp, Homo sapien
tcctcacaccaccaccttctatcct

SEQ ID NO: 2751987 - DNA, 25 bp, Homo sapien
ttggccctggtcatgccaccccctt

SEQ ID NO: 2751988 - DNA, 25 bp, Homo sapien
tccttggtcatgcacttggccctgg

SEQ ID NO: 2751989 - DNA, 25 bp, Homo sapien
gctcgtttgtgcagatccctctcaa

SEQ ID NO: 2751990 - DNA, 25 bp, Homo sapien
ttatgtggcccaccagaagaggaac

SEQ ID NO: 2751991 - DNA, 25 bp, Homo sapien
ccgtgaccacgcagactgggatata

SEQ ID NO: 2751992 - DNA, 25 bp, Homo sapien
ccacacattaagttggaacatgaca

SEQ ID NO: 2751993 - DNA, 25 bp, Homo sapien
ctggttggtggtttatggctaaatg

SEQ ID NO: 2751994 - DNA, 25 bp, Homo sapien
agctaaagaccaaacactggctcac

SEQ ID NO: 2751995 - DNA, 25 bp, Homo sapien
tctggttggtggtttatggctaaat

SEQ ID NO: 2751996 - DNA, 25 bp, Homo sapien
ttctggttggtggtttatggctaaa

SEQ ID NO: 2751997 - DNA, 25 bp, Homo sapien
tgtcagaaatcaacatccactgaga

SEQ ID NO: 2751998 - DNA, 25 bp, Homo sapien
cactgagacaccagaaatttgaaca

SEQ ID NO: 2751999 - DNA, 25 bp, Homo sapien
aatttgaacaggtccctaaagacag

SEQ ID NO: 2752000 - DNA, 25 bp, Homo sapien
cctgtggcacagtcatttgcagtct

SEQ ID NO: 2752001 - DNA, 25 bp, Homo sapien
gcatgatgaccagttgtgctgccgg

SEQ ID NO: 2752002 - DNA, 25 bp, Homo sapien
caatgtcaccgaaataaggcagagg

SEQ ID NO: 2752003 - DNA, 25 bp, Homo sapien
tgggaggagctttgcactggatcca

SEQ ID NO: 2752004 - DNA, 25 bp, Homo sapien
gagtagcgcttggacattggtccca

SEQ ID NO: 2752005 - DNA, 25 bp, Homo sapien
catttgacaggatctaacacccagt

SEQ ID NO: 2752006 - DNA, 25 bp, Homo sapien
cataccaagatgtcagtagctaaca

SEQ ID NO: 2752007 - DNA, 25 bp, Homo sapien
tacttacttgtgagaaacggaatgc

SEQ ID NO: 2752008 - DNA, 25 bp, Homo sapien
tgaaaatcctcagtacacaaaaagg

SEQ ID NO: 2752009 - DNA, 25 bp, Homo sapien
tcttggagctaataagagaataaca

SEQ ID NO: 2752010 - DNA, 25 bp, Homo sapien
tctgagaaggttgtgacccaactga

SEQ ID NO: 2752011 - DNA, 25 bp, Homo sapien
taaatgggccttgccactctgagaa

SEQ ID NO: 2752012 - DNA, 25 bp, Homo sapien
aaatggttgctctttcattgtggaa

SEQ ID NO: 2752013 - DNA, 25 bp, Homo sapien
tcagagccctcaacaagacaaaagg

SEQ ID NO: 2752014 - DNA, 25 bp, Homo sapien
caaatagcctaactagaggaaggtc

SEQ ID NO: 2752015 - DNA, 25 bp, Homo sapien
gaatgcctttgctcagttatccagc

SEQ ID NO: 2752016 - DNA, 25 bp, Homo sapien
ggctttctgtgtagctccactgaca

SEQ ID NO: 2752017 - DNA, 25 bp, Homo sapien
tcaagtattgcgtgtcacaatatag

SEQ ID NO: 2752018 - DNA, 25 bp, Homo sapien
atatagacccggtaaattgtcttcg

SEQ ID NO: 2752019 - DNA, 25 bp, Homo sapien
tttccaaaatgggtttctgtgtgaa

SEQ ID NO: 2752020 - DNA, 25 bp, Homo sapien
tgtcttcggaactttcacttttcca

SEQ ID NO: 2752021 - DNA, 25 bp, Homo sapien
cagaaagtcctaaagacatgcttca

SEQ ID NO: 2752022 - DNA, 25 bp, Homo sapien
tccagatgagcaattcaattgctgc

SEQ ID NO: 2752023 - DNA, 25 bp, Homo sapien
tctccccttgatggataccagatgg

SEQ ID NO: 2752024 - DNA, 25 bp, Homo sapien
gatgccttccagtgcagtttgggac

SEQ ID NO: 2752025 - DNA, 25 bp, Homo sapien
tgctcatgtgtgctatccccagcag

SEQ ID NO: 2752026 - DNA, 25 bp, Homo sapien
cctgaggtccatatgccagaaaata

SEQ ID NO: 2752027 - DNA, 25 bp, Homo sapien
tacttctcaagtacctgctcatgtg

SEQ ID NO: 2752028 - DNA, 25 bp, Homo sapien
tgaggtccatatgccagaaaatact

SEQ ID NO: 2752029 - DNA, 25 bp, Homo sapien
gccaggtctaggagtcaggatgcca

SEQ ID NO: 2752030 - DNA, 25 bp, Homo sapien
gggcccagcaccatgtctagcacat

SEQ ID NO: 2752031 - DNA, 25 bp, Homo sapien
gcgttttctacaaagcaaccagagg

SEQ ID NO: 2752032 - DNA, 25 bp, Homo sapien
tggaacttactctggccatcggctt

SEQ ID NO: 2752033 - DNA, 25 bp, Homo sapien
ttcacatggcgtgtcggagaaagcg

SEQ ID NO: 2752034 - DNA, 25 bp, Homo sapien
gaaagcgaggcagaatggtgaacac

SEQ ID NO: 2752035 - DNA, 25 bp, Homo sapien
tctgcaatctgtcaggatattttga

SEQ ID NO: 2752036 - DNA, 25 bp, Homo sapien
atgtaattaagctccctaaaagcct

SEQ ID NO: 2752037 - DNA, 25 bp, Homo sapien
tccattacatgcgagcttaattttt

SEQ ID NO: 2752038 - DNA, 25 bp, Homo sapien
ccattacatgcgagcttaatttttt

SEQ ID NO: 2752039 - DNA, 25 bp, Homo sapien
cagatccattacatgcgagcttaat

SEQ ID NO: 2752040 - DNA, 25 bp, Homo sapien
gatccattacatgcgagcttaattt

SEQ ID NO: 2752041 - DNA, 25 bp, Homo sapien
gcctcttccactttctctcttaaat

SEQ ID NO: 2752042 - DNA, 25 bp, Homo sapien
ctagcctcttccactttctctctta

SEQ ID NO: 2752043 - DNA, 25 bp, Homo sapien
tagcctcttccactttctctcttaa

SEQ ID NO: 2752044 - DNA, 25 bp, Homo sapien
ctcttccactttctctcttaaatac

SEQ ID NO: 2752045 - DNA, 25 bp, Homo sapien
tcttaagtagaatgtgagaaggtct

SEQ ID NO: 2752046 - DNA, 25 bp, Homo sapien
cttggtgaggagtgtcaataaaagc

SEQ ID NO: 2752047 - DNA, 25 bp, Homo sapien
gagggacagctctttgatgaatctt

SEQ ID NO: 2752048 - DNA, 25 bp, Homo sapien
aaagcacaacctcaaatctggaaag

SEQ ID NO: 2752049 - DNA, 25 bp, Homo sapien
ctgaatgtggccaactgcttcctca

SEQ ID NO: 2752050 - DNA, 25 bp, Homo sapien
tgaatgtggccaactgcttcctcat

SEQ ID NO: 2752051 - DNA, 25 bp, Homo sapien
tctgaatgtggccaactgcttcctc

SEQ ID NO: 2752052 - DNA, 25 bp, Homo sapien
cttctgaatgtggccaactgcttcc

SEQ ID NO: 2752053 - DNA, 25 bp, Homo sapien
cagtacggagatggattcagctccc

SEQ ID NO: 2752054 - DNA, 25 bp, Homo sapien
tcagtacggagatggattcagctcc

SEQ ID NO: 2752055 - DNA, 25 bp, Homo sapien
cccttaatcttcaccacatccccct

SEQ ID NO: 2752056 - DNA, 25 bp, Homo sapien
ttaatcttcaccacatcccccttcc

SEQ ID NO: 2752057 - DNA, 25 bp, Homo sapien
tgaatgacatcatacagccagacct

SEQ ID NO: 2752058 - DNA, 25 bp, Homo sapien
aggatgctgacaccatgaatgacat

SEQ ID NO: 2752059 - DNA, 25 bp, Homo sapien
gagtgatgccaaggaagaacaccca

SEQ ID NO: 2752060 - DNA, 25 bp, Homo sapien
gagcccgcatgaaagacgagtgatg

SEQ ID NO: 2752061 - DNA, 25 bp, Homo sapien
cataacatcatcagcatcgagcagg

SEQ ID NO: 2752062 - DNA, 25 bp, Homo sapien
tatcaccacagtgatgaagcctgag

SEQ ID NO: 2752063 - DNA, 25 bp, Homo sapien
ctgagctgcgcagccgctagggtaa

SEQ ID NO: 2752064 - DNA, 25 bp, Homo sapien
cgagcaggtctctgttatcaccaca

SEQ ID NO: 2752065 - DNA, 25 bp, Homo sapien
gcacattctagggtaacagtccaaa

SEQ ID NO: 2752066 - DNA, 25 bp, Homo sapien
gagggcgacgacaatgtttcatcca

SEQ ID NO: 2752067 - DNA, 25 bp, Homo sapien
caagaaagctatttccgatgaaggg

SEQ ID NO: 2752068 - DNA, 25 bp, Homo sapien
tgcatattgtttccacccataggga

SEQ ID NO: 2752069 - DNA, 25 bp, Homo sapien
agaagaatacgtttccttgccaatc

SEQ ID NO: 2752070 - DNA, 25 bp, Homo sapien
tcaggaaaccgtccatgacaggcat

SEQ ID NO: 2752071 - DNA, 25 bp, Homo sapien
tgacaggcatggtttatgatgttcc

SEQ ID NO: 2752072 - DNA, 25 bp, Homo sapien
gttcctatttgtcaggtatctacca

SEQ ID NO: 2752073 - DNA, 25 bp, Homo sapien
aaaatgttcatgtcctcgaaagatc

SEQ ID NO: 2752074 - DNA, 25 bp, Homo sapien
gctttgtattccatagagtacatga

SEQ ID NO: 2752075 - DNA, 25 bp, Homo sapien
tgtcctcgaaagatcttgacatggc

SEQ ID NO: 2752076 - DNA, 25 bp, Homo sapien
taccccacctctagcttgagagtct

SEQ ID NO: 2752077 - DNA, 25 bp, Homo sapien
gctgttaactgataagcaccattca

SEQ ID NO: 2752078 - DNA, 25 bp, Homo sapien
tgataagcaccattcaccgagccaa

SEQ ID NO: 2752079 - DNA, 25 bp, Homo sapien
ggagggtttctgctgttaactgata

SEQ ID NO: 2752080 - DNA, 25 bp, Homo sapien
gcaccattcaccgagccaaaagtat

SEQ ID NO: 2752081 - DNA, 25 bp, Homo sapien
catgactttagattcttgggctgtc

SEQ ID NO: 2752082 - DNA, 25 bp, Homo sapien
tatattggtactttcatccacattc

SEQ ID NO: 2752083 - DNA, 25 bp, Homo sapien
tctctctatattggtactttcatcc

SEQ ID NO: 2752084 - DNA, 25 bp, Homo sapien
agtgcatgactttagattcttgggc

SEQ ID NO: 2752085 - DNA, 25 bp, Homo sapien
aattgtcatccctggacacagacgt

SEQ ID NO: 2752086 - DNA, 25 bp, Homo sapien
ggctcgccagagcaatcacagagtt

SEQ ID NO: 2752087 - DNA, 25 bp, Homo sapien
cactctgtctgatccaattgtcatc

SEQ ID NO: 2752088 - DNA, 25 bp, Homo sapien
tatctacaggaggaattttacccca

SEQ ID NO: 2752089 - DNA, 25 bp, Homo sapien
aaagctgcacatcctgcatatgtat

SEQ ID NO: 2752090 - DNA, 25 bp, Homo sapien
aagctgcacatcctgcatatgtatc

SEQ ID NO: 2752091 - DNA, 25 bp, Homo sapien
tgttcagccatcttgtgaggacctt

SEQ ID NO: 2752092 - DNA, 25 bp, Homo sapien
ctctttggaaagtcacgctggggta

SEQ ID NO: 2752093 - DNA, 25 bp, Homo sapien
tgacagttgctataaactcagcgtg

SEQ ID NO: 2752094 - DNA, 25 bp, Homo sapien
ggaaaatctgaaccgtaattgacag

SEQ ID NO: 2752095 - DNA, 25 bp, Homo sapien
tgctataaactcagcgtggacaggt

SEQ ID NO: 2752096 - DNA, 25 bp, Homo sapien
ttagaatactggtctagccacccaa

SEQ ID NO: 2752097 - DNA, 25 bp, Homo sapien
tctgcaagggtcattggttatattt

SEQ ID NO: 2752098 - DNA, 25 bp, Homo sapien
gactctgcaagggtcattggttata

SEQ ID NO: 2752099 - DNA, 25 bp, Homo sapien
aatactggtctagccacccaacaga

SEQ ID NO: 2752100 - DNA, 25 bp, Homo sapien
aggctagagtattgtggtggtgatg

SEQ ID NO: 2752101 - DNA, 25 bp, Homo sapien
ccaaggacagcttcatgcatgccca

SEQ ID NO: 2752102 - DNA, 25 bp, Homo sapien
ctaggcttgtgggatgctggtgttc

SEQ ID NO: 2752103 - DNA, 25 bp, Homo sapien
gtggctcggcacctcttgttttcct

SEQ ID NO: 2752104 - DNA, 25 bp, Homo sapien
gaggtgatgagagcaactggccgca

SEQ ID NO: 2752105 - DNA, 25 bp, Homo sapien
gagaagtagtcaggtttctctccaa

SEQ ID NO: 2752106 - DNA, 25 bp, Homo sapien
agtagtcaggtttctctccaaatga

SEQ ID NO: 2752107 - DNA, 25 bp, Homo sapien
ccagcacagagaagtagtcaggttt

SEQ ID NO: 2752108 - DNA, 25 bp, Homo sapien
caaaaccagcacagagaagtagtca

SEQ ID NO: 2752109 - DNA, 25 bp, Homo sapien
tcatgacttgttattgaactgttca

SEQ ID NO: 2752110 - DNA, 25 bp, Homo sapien
actgcagtctcatgacttgttattg

SEQ ID NO: 2752111 - DNA, 25 bp, Homo sapien
tcgggttgttgtatatggcctttgg

SEQ ID NO: 2752112 - DNA, 25 bp, Homo sapien
ttcagtatgatactaactgtcgggt

SEQ ID NO: 2752113 - DNA, 25 bp, Homo sapien
ttattcctcccctggtcaatcagaa

SEQ ID NO: 2752114 - DNA, 25 bp, Homo sapien
gatgatggaccctaggaccacaaag

SEQ ID NO: 2752115 - DNA, 25 bp, Homo sapien
gaaagctaaacgcatgctgccttct

SEQ ID NO: 2752116 - DNA, 25 bp, Homo sapien
aagaaagctaaacgcatgctgcctt

SEQ ID NO: 2752117 - DNA, 25 bp, Homo sapien
ccttctggagaacagtcacatcccc

SEQ ID NO: 2752118 - DNA, 25 bp, Homo sapien
gaacagtcacatcccccaggtattt

SEQ ID NO: 2752119 - DNA, 25 bp, Homo sapien
ttctggagaacagtcacatccccca

SEQ ID NO: 2752120 - DNA, 25 bp, Homo sapien
tggagaacagtcacatcccccaggt

SEQ ID NO: 2752121 - DNA, 25 bp, Homo sapien
tcaaataaaatgatggccaagcaca

SEQ ID NO: 2752122 - DNA, 25 bp, Homo sapien
aaatgatggccaagcacacggtgac

SEQ ID NO: 2752123 - DNA, 25 bp, Homo sapien
taaaatgatggccaagcacacggtg

SEQ ID NO: 2752124 - DNA, 25 bp, Homo sapien
aataaaatgatggccaagcacacgg

SEQ ID NO: 2752125 - DNA, 25 bp, Homo sapien
ttcccaagcaagtcctaaagttgtg

SEQ ID NO: 2752126 - DNA, 25 bp, Homo sapien
ctgattggtggaagacgagtgcccg

SEQ ID NO: 2752127 - DNA, 25 bp, Homo sapien
cctaaagttgtgaagctgattggtg

SEQ ID NO: 2752128 - DNA, 25 bp, Homo sapien
gggccactgtcccatagtacctggg

SEQ ID NO: 2752129 - DNA, 25 bp, Homo sapien
tcataagcaccgatcttcccactgt

SEQ ID NO: 2752130 - DNA, 25 bp, Homo sapien
gattctgagttgtcagaccccaggg

SEQ ID NO: 2752131 - DNA, 25 bp, Homo sapien
gcatttttacaaggccgtcatcagg

SEQ ID NO: 2752132 - DNA, 25 bp, Homo sapien
ttttccagaggcccatccctcatgg

SEQ ID NO: 2752133 - DNA, 25 bp, Homo sapien
catgaacaaacaggctctagggaca

SEQ ID NO: 2752134 - DNA, 25 bp, Homo sapien
cagcggccccgcatctaacaagatg

SEQ ID NO: 2752135 - DNA, 25 bp, Homo sapien
acaaacaggctctagggacagcggc

SEQ ID NO: 2752136 - DNA, 25 bp, Homo sapien
acagcggccccgcatctaacaagat

SEQ ID NO: 2752137 - DNA, 25 bp, Homo sapien
agaatgcggtcactctccccaagcg

SEQ ID NO: 2752138 - DNA, 25 bp, Homo sapien
tccccaagcgcacattatcacactt

SEQ ID NO: 2752139 - DNA, 25 bp, Homo sapien
gactgtattgtaagaagaatgcggt

SEQ ID NO: 2752140 - DNA, 25 bp, Homo sapien
ctgaccagcggaagccacggcctgg

SEQ ID NO: 2752141 - DNA, 25 bp, Homo sapien
cgcctcgatgtccagtccaaaccag

SEQ ID NO: 2752142 - DNA, 25 bp, Homo sapien
gcctcgatgtccagtccaaaccagg

SEQ ID NO: 2752143 - DNA, 25 bp, Homo sapien
cctcgatgtccagtccaaaccaggc

SEQ ID NO: 2752144 - DNA, 25 bp, Homo sapien
gcgcctcgatgtccagtccaaacca

SEQ ID NO: 2752145 - DNA, 25 bp, Homo sapien
tgggctgtccaaggggctgggtcct

SEQ ID NO: 2752146 - DNA, 25 bp, Homo sapien
gtcctgccaggctccctggtttttc

SEQ ID NO: 2752147 - DNA, 25 bp, Homo sapien
ctcctgggctgtccaaggggctggg

SEQ ID NO: 2752148 - DNA, 25 bp, Homo sapien
tcctgccaggctccctggtttttca

SEQ ID NO: 2752149 - DNA, 25 bp, Homo sapien
caatggtgctgatactggctccttg

SEQ ID NO: 2752150 - DNA, 25 bp, Homo sapien
tggctccttgtattttgcttgctgg

SEQ ID NO: 2752151 - DNA, 25 bp, Homo sapien
gtcatcaggagggacaaacacctct

SEQ ID NO: 2752152 - DNA, 25 bp, Homo sapien
gagaccgcaggatggacccaatggt

SEQ ID NO: 2752153 - DNA, 25 bp, Homo sapien
tgtctaaaagaaaacgtggctggga

SEQ ID NO: 2752154 - DNA, 25 bp, Homo sapien
caagatcacatcctaggaatgcagc

SEQ ID NO: 2752155 - DNA, 25 bp, Homo sapien
agtcttaagctccacaggatgaggg

SEQ ID NO: 2752156 - DNA, 25 bp, Homo sapien
gaatgcagcaatcagtgtctaaaag

SEQ ID NO: 2752157 - DNA, 25 bp, Homo sapien
gcttgatctgtagagtatgactcat

SEQ ID NO: 2752158 - DNA, 25 bp, Homo sapien
cccagaagcttgatctgtagagtat

SEQ ID NO: 2752159 - DNA, 25 bp, Homo sapien
ccagaagcttgatctgtagagtatg

SEQ ID NO: 2752160 - DNA, 25 bp, Homo sapien
gaagcttgatctgtagagtatgact

SEQ ID NO: 2752161 - DNA, 25 bp, Homo sapien
cactgtcacctagtctgtaatgcaa

SEQ ID NO: 2752162 - DNA, 25 bp, Homo sapien
tcactgtcacctagtctgtaatgca

SEQ ID NO: 2752163 - DNA, 25 bp, Homo sapien
tttcacttggtgattggcagctccc

SEQ ID NO: 2752164 - DNA, 25 bp, Homo sapien
cagccctgagggagtagtctataga

SEQ ID NO: 2752165 - DNA, 25 bp, Homo sapien
aatccagtcacgaaagcagtccttg

SEQ ID NO: 2752166 - DNA, 25 bp, Homo sapien
ttggcactgattccggactgaacac

SEQ ID NO: 2752167 - DNA, 25 bp, Homo sapien
ctgagttatcgtcctccagggagag

SEQ ID NO: 2752168 - DNA, 25 bp, Homo sapien
aaagagcaccttgcccagaactctc

SEQ ID NO: 2752169 - DNA, 25 bp, Homo sapien
agcaaagagcaccttgcccagaact

SEQ ID NO: 2752170 - DNA, 25 bp, Homo sapien
tgtggttctgagttatcgtcctcca

SEQ ID NO: 2752171 - DNA, 25 bp, Homo sapien
gattttacaactgttgatggctgcc

SEQ ID NO: 2752172 - DNA, 25 bp, Homo sapien
ctcgattttacaactgttgatggct

SEQ ID NO: 2752173 - DNA, 25 bp, Homo sapien
tacaactgttgatggctgcccttgt

SEQ ID NO: 2752174 - DNA, 25 bp, Homo sapien
cccttgttcctggtttgtggttcat

SEQ ID NO: 2752175 - DNA, 25 bp, Homo sapien
cagtgattggtgggcatcctcggat

SEQ ID NO: 2752176 - DNA, 25 bp, Homo sapien
gtgattggtgggcatcctcggatgt

SEQ ID NO: 2752177 - DNA, 25 bp, Homo sapien
tcagtgattggtgggcatcctcgga

SEQ ID NO: 2752178 - DNA, 25 bp, Homo sapien
tgattggtgggcatcctcggatgtc

SEQ ID NO: 2752179 - DNA, 25 bp, Homo sapien
cttacatttaattggccacgtgagc

SEQ ID NO: 2752180 - DNA, 25 bp, Homo sapien
aaaagtctcattcagtcacggatca

SEQ ID NO: 2752181 - DNA, 25 bp, Homo sapien
tgaaccgatattgggaggtctaccc

SEQ ID NO: 2752182 - DNA, 25 bp, Homo sapien
tcacggatcaagtacctctgggtaa

SEQ ID NO: 2752183 - DNA, 25 bp, Homo sapien
cttttccatcatactatctgacaca

SEQ ID NO: 2752184 - DNA, 25 bp, Homo sapien
tagactgggagaaatagacccaccc

SEQ ID NO: 2752185 - DNA, 25 bp, Homo sapien
gccactcagtgggtcttaagccttt

SEQ ID NO: 2752186 - DNA, 25 bp, Homo sapien
gacttggactgagacacacaactgg

SEQ ID NO: 2752187 - DNA, 25 bp, Homo sapien
taaaatcagattgcgcacagtggct

SEQ ID NO: 2752188 - DNA, 25 bp, Homo sapien
gatccatgatgtccaaagaattacc

SEQ ID NO: 2752189 - DNA, 25 bp, Homo sapien
ttcttgtggaagatacgatccatga

SEQ ID NO: 2752190 - DNA, 25 bp, Homo sapien
caggtgactttaccctgagattggt

SEQ ID NO: 2752191 - DNA, 25 bp, Homo sapien
tacctataactagagaagatctctc

SEQ ID NO: 2752192 - DNA, 25 bp, Homo sapien
taagactttgttgcgcatccagaca

SEQ ID NO: 2752193 - DNA, 25 bp, Homo sapien
cttttataagcatggcttttgtgga

SEQ ID NO: 2752194 - DNA, 25 bp, Homo sapien
aaacactgagatttctaagactttg

SEQ ID NO: 2752195 - DNA, 25 bp, Homo sapien
tccagacatagctaaagggtaggga

SEQ ID NO: 2752196 - DNA, 25 bp, Homo sapien
aaagtcctgagatcaaaactccttt

SEQ ID NO: 2752197 - DNA, 25 bp, Homo sapien
tctggcaccagcaaattagaatatt

SEQ ID NO: 2752198 - DNA, 25 bp, Homo sapien
tgccaagcaatgagactatcaagtg

SEQ ID NO: 2752199 - DNA, 25 bp, Homo sapien
gaatacatacattgctgctacagtc

SEQ ID NO: 2752200 - DNA, 25 bp, Homo sapien
gacacaggataaaattcgtcttaaa

SEQ ID NO: 2752201 - DNA, 25 bp, Homo sapien
ctgacacaggataaaattcgtctta

SEQ ID NO: 2752202 - DNA, 25 bp, Homo sapien
gataaaattcgtcttaaatggcact

SEQ ID NO: 2752203 - DNA, 25 bp, Homo sapien
caggataaaattcgtcttaaatggc

SEQ ID NO: 2752204 - DNA, 25 bp, Homo sapien
caagtgatgaccaatttcttgtatt

SEQ ID NO: 2752205 - DNA, 25 bp, Homo sapien
gtgatgaccaatttcttgtattaat

SEQ ID NO: 2752206 - DNA, 25 bp, Homo sapien
ttcttgtattaatctatgcatagat

SEQ ID NO: 2752207 - DNA, 25 bp, Homo sapien
tcttgtattaatctatgcatagatt

SEQ ID NO: 2752208 - DNA, 25 bp, Homo sapien
ggtcctgggcttgcaataaggtgta

SEQ ID NO: 2752209 - DNA, 25 bp, Homo sapien
caataaggtgtaaatccttcagtgc

SEQ ID NO: 2752210 - DNA, 25 bp, Homo sapien
gcttgcaataaggtgtaaatccttc

SEQ ID NO: 2752211 - DNA, 25 bp, Homo sapien
gtgtaaatccttcagtgctcatgtg

SEQ ID NO: 2752212 - DNA, 25 bp, Homo sapien
gcctcacgatcctgctaactgctag

SEQ ID NO: 2752213 - DNA, 25 bp, Homo sapien
ggatttagcctaatgcatcacgtca

SEQ ID NO: 2752214 - DNA, 25 bp, Homo sapien
actttcatgtaccacccagtgtggg

SEQ ID NO: 2752215 - DNA, 25 bp, Homo sapien
tccatgcgagaaacactacaaagcc

SEQ ID NO: 2752216 - DNA, 25 bp, Homo sapien
gcttagtcttatgcctcaggacggt

SEQ ID NO: 2752217 - DNA, 25 bp, Homo sapien
taatcagatgaggagacaagccgag

SEQ ID NO: 2752218 - DNA, 25 bp, Homo sapien
caaggtttggtcctcataaggctgc

SEQ ID NO: 2752219 - DNA, 25 bp, Homo sapien
caagccgagacgttctgaggttcag

SEQ ID NO: 2752220 - DNA, 25 bp, Homo sapien
taaaccctctgggatctgacagacg

SEQ ID NO: 2752221 - DNA, 25 bp, Homo sapien
gctactttgttaggcaataccagag

SEQ ID NO: 2752222 - DNA, 25 bp, Homo sapien
ttagtgcctcacagatcttccgcgg

SEQ ID NO: 2752223 - DNA, 25 bp, Homo sapien
gagtgaaaaattgccacagcgccct

SEQ ID NO: 2752224 - DNA, 25 bp, Homo sapien
gaagacagggctatgtccctgcgga

SEQ ID NO: 2752225 - DNA, 25 bp, Homo sapien
gcctctttaattgtgccgcctagga

SEQ ID NO: 2752226 - DNA, 25 bp, Homo sapien
gagtgtaataaagacctggtgctcc

SEQ ID NO: 2752227 - DNA, 25 bp, Homo sapien
gattctgagcaagttaactaccctt

SEQ ID NO: 2752228 - DNA, 25 bp, Homo sapien
ctaattccttttctaatcctgagaa

SEQ ID NO: 2752229 - DNA, 25 bp, Homo sapien
cctaattccttttctaatcctgaga

SEQ ID NO: 2752230 - DNA, 25 bp, Homo sapien
aattccttttctaatcctgagaaat

SEQ ID NO: 2752231 - DNA, 25 bp, Homo sapien
taattccttttctaatcctgagaaa

SEQ ID NO: 2752232 - DNA, 25 bp, Homo sapien
gctgaggctatgctgtggcttgccc

SEQ ID NO: 2752233 - DNA, 25 bp, Homo sapien
ggcttgcccatacccctaagaacag

SEQ ID NO: 2752234 - DNA, 25 bp, Homo sapien
tatgctgtggcttgcccatacccct

SEQ ID NO: 2752235 - DNA, 25 bp, Homo sapien
gaacaggaagacctcctggggtgac

SEQ ID NO: 2752236 - DNA, 25 bp, Homo sapien
tcagaggcagtaagtcatgggtccg

SEQ ID NO: 2752237 - DNA, 25 bp, Homo sapien
tggcaaggagctaccatggatcccc

SEQ ID NO: 2752238 - DNA, 25 bp, Homo sapien
gaaaatgttgaacacctccgaggcc

SEQ ID NO: 2752239 - DNA, 25 bp, Homo sapien
cgagtgtgcccagaccagttacagg

SEQ ID NO: 2752240 - DNA, 25 bp, Homo sapien
cctcttttcacggcctctaaaagtg

SEQ ID NO: 2752241 - DNA, 25 bp, Homo sapien
tgcatcgatgtacagggcctctttt

SEQ ID NO: 2752242 - DNA, 25 bp, Homo sapien
gcctctaaaagtgcttgcatcatat

SEQ ID NO: 2752243 - DNA, 25 bp, Homo sapien
tgggcagctggaaatgcatcgatgt

SEQ ID NO: 2752244 - DNA, 25 bp, Homo sapien
catcctcaagttcacgttcaagttt

SEQ ID NO: 2752245 - DNA, 25 bp, Homo sapien
gcaagcaataactcgtgcatcatcc

SEQ ID NO: 2752246 - DNA, 25 bp, Homo sapien
tggtctggagtccaatgtgggaaag

SEQ ID NO: 2752247 - DNA, 25 bp, Homo sapien
tggagtccaatgtgggaaagggaac

SEQ ID NO: 2752248 - DNA, 25 bp, Homo sapien
cagctattattttagtgagcagtga

SEQ ID NO: 2752249 - DNA, 25 bp, Homo sapien
tttaagagtccctgaaaatacctga

SEQ ID NO: 2752250 - DNA, 25 bp, Homo sapien
tattttagtgagcagtgagtcagag

SEQ ID NO: 2752251 - DNA, 25 bp, Homo sapien
aaatacctgagcaaaaattactact

SEQ ID NO: 2752252 - DNA, 25 bp, Homo sapien
cctggttcctcttagtgagaagtga

SEQ ID NO: 2752253 - DNA, 25 bp, Homo sapien
aacttctacatgacctacagctgga

SEQ ID NO: 2752254 - DNA, 25 bp, Homo sapien
tgtccttgtgtattcgaatgctcga

SEQ ID NO: 2752255 - DNA, 25 bp, Homo sapien
ctaccgatctgctataaggacaaac

SEQ ID NO: 2752256 - DNA, 25 bp, Homo sapien
tagatctgccagctagtcctgtgga

SEQ ID NO: 2752257 - DNA, 25 bp, Homo sapien
gaagccgtgatgtgtcatgtctgcg

SEQ ID NO: 2752258 - DNA, 25 bp, Homo sapien
tgatatcatacgcaaagagaagccg

SEQ ID NO: 2752259 - DNA, 25 bp, Homo sapien
ggtccagagctcatgccttcaacag

SEQ ID NO: 2752260 - DNA, 25 bp, Homo sapien
gaacattttacaagactgggcacag

SEQ ID NO: 2752261 - DNA, 25 bp, Homo sapien
catttcacttctataagaaaaggct

SEQ ID NO: 2752262 - DNA, 25 bp, Homo sapien
ttaaaaatgaccagggagtgtgccc

SEQ ID NO: 2752263 - DNA, 25 bp, Homo sapien
caggatactgtcactttcaagaaca

SEQ ID NO: 2752264 - DNA, 25 bp, Homo sapien
gaaaataacaacgttcgagtactgc

SEQ ID NO: 2752265 - DNA, 25 bp, Homo sapien
tgaggcacaccgaaaataacaacgt

SEQ ID NO: 2752266 - DNA, 25 bp, Homo sapien
catctgaggcacaccgaaaataaca

SEQ ID NO: 2752267 - DNA, 25 bp, Homo sapien
caacgttcgagtactgcgaaaaagt

SEQ ID NO: 2752268 - DNA, 25 bp, Homo sapien
gtcagacagctagtgaccacactgt

SEQ ID NO: 2752269 - DNA, 25 bp, Homo sapien
ccagcttcaccagaacacaggagac

SEQ ID NO: 2752270 - DNA, 25 bp, Homo sapien
ccccagtggtcatgcgtcagacagc

SEQ ID NO: 2752271 - DNA, 25 bp, Homo sapien
aaacgcttccctgtaagtcatccca

SEQ ID NO: 2752272 - DNA, 25 bp, Homo sapien
ggaattcacaagacctatcatataa

SEQ ID NO: 2752273 - DNA, 25 bp, Homo sapien
ggagactatttgtaaaacgtatcaa

SEQ ID NO: 2752274 - DNA, 25 bp, Homo sapien
taaccgtgatagcacgattctccag

SEQ ID NO: 2752275 - DNA, 25 bp, Homo sapien
tggatttctctagggccattctctg

SEQ ID NO: 2752276 - DNA, 25 bp, Homo sapien
tgggtttaattcataaccaactgct

SEQ ID NO: 2752277 - DNA, 25 bp, Homo sapien
tgtgaaccctttcttcgcagccgct

SEQ ID NO: 2752278 - DNA, 25 bp, Homo sapien
ccaagcgcggtatctggaataccaa

SEQ ID NO: 2752279 - DNA, 25 bp, Homo sapien
caaactagccatgggtttaattcat

SEQ ID NO: 2752280 - DNA, 25 bp, Homo sapien
taattgattctaggtcagccaaccc

SEQ ID NO: 2752281 - DNA, 25 bp, Homo sapien
cggggaggtcgaacaaaacattgct

SEQ ID NO: 2752282 - DNA, 25 bp, Homo sapien
actgcatctctccatcagtgggcta

SEQ ID NO: 2752283 - DNA, 25 bp, Homo sapien
gttcacttggaacacctccataatt

SEQ ID NO: 2752284 - DNA, 25 bp, Homo sapien
cttaaaatgttttagcagaactcac

SEQ ID NO: 2752285 - DNA, 25 bp, Homo sapien
cactaccgatgtccacaagggatcc

SEQ ID NO: 2752286 - DNA, 25 bp, Homo sapien
caaacagacttttcgaagggctggc

SEQ ID NO: 2752287 - DNA, 25 bp, Homo sapien
tacaaacggcgtggctacagcgtac

SEQ ID NO: 2752288 - DNA, 25 bp, Homo sapien
aagggatcctcttcggcatcgcaac

SEQ ID NO: 2752289 - DNA, 25 bp, Homo sapien
caggtagaacatgtcttgactgact

SEQ ID NO: 2752290 - DNA, 25 bp, Homo sapien
gaacatgtcttgactgactttcttc

SEQ ID NO: 2752291 - DNA, 25 bp, Homo sapien
tcaaaacttgcaggtagaacatgtc

SEQ ID NO: 2752292 - DNA, 25 bp, Homo sapien
aacttgcaggtagaacatgtcttga

SEQ ID NO: 2752293 - DNA, 25 bp, Homo sapien
gagacacatgtagcaccaaatctga

SEQ ID NO: 2752294 - DNA, 25 bp, Homo sapien
cacatgtagcaccaaatctgaaatc

SEQ ID NO: 2752295 - DNA, 25 bp, Homo sapien
gacacatgtagcaccaaatctgaaa

SEQ ID NO: 2752296 - DNA, 25 bp, Homo sapien
agaagagacacatgtagcaccaaat

SEQ ID NO: 2752297 - DNA, 25 bp, Homo sapien
aggctgaggccagaagatcgcttga

SEQ ID NO: 2752298 - DNA, 25 bp, Homo sapien
ggctgaggccagaagatcgcttgag

SEQ ID NO: 2752299 - DNA, 25 bp, Homo sapien
ctgaggccagaagatcgcttgagcc

SEQ ID NO: 2752300 - DNA, 25 bp, Homo sapien
gaggccagaagatcgcttgagcccg

SEQ ID NO: 2752301 - DNA, 25 bp, Homo sapien
gaatagtaactagccacgtgtttaa

SEQ ID NO: 2752302 - DNA, 25 bp, Homo sapien
cccagtgttttgacagggaatcaac

SEQ ID NO: 2752303 - DNA, 25 bp, Homo sapien
taaagcgggcttatatcagaatgtc

SEQ ID NO: 2752304 - DNA, 25 bp, Homo sapien
tcacaacaatcgaaggagccaaatg

SEQ ID NO: 2752305 - DNA, 25 bp, Homo sapien
ttattagttaagtccctgcccatgg

SEQ ID NO: 2752306 - DNA, 25 bp, Homo sapien
tatagcgcactgtaaactgaactcc

SEQ ID NO: 2752307 - DNA, 25 bp, Homo sapien
tctgaggcagcataatacagggctt

SEQ ID NO: 2752308 - DNA, 25 bp, Homo sapien
taagagatttagaggacagctgcgg

SEQ ID NO: 2752309 - DNA, 25 bp, Homo sapien
ttgatgacattcgtaagcctggaga

SEQ ID NO: 2752310 - DNA, 25 bp, Homo sapien
gagaaaactatgtagcaagatccac

SEQ ID NO: 2752311 - DNA, 25 bp, Homo sapien
ggatgtctcgtgatgcatctacagt

SEQ ID NO: 2752312 - DNA, 25 bp, Homo sapien
ttgttcaaagctgtgtaatcgtggg

SEQ ID NO: 2752313 - DNA, 25 bp, Homo sapien
ggttcccgatttctacacctgctag

SEQ ID NO: 2752314 - DNA, 25 bp, Homo sapien
ttagggtgcttgacccaaaggctag

SEQ ID NO: 2752315 - DNA, 25 bp, Homo sapien
tattttgctggtactttggccacac

SEQ ID NO: 2752316 - DNA, 25 bp, Homo sapien
tgtaggtgccagatttcatggacgc

SEQ ID NO: 2752317 - DNA, 25 bp, Homo sapien
tagcattccagttagatgacgccat

SEQ ID NO: 2752318 - DNA, 25 bp, Homo sapien
gacgcctactgcaaagacgcaactg

SEQ ID NO: 2752319 - DNA, 25 bp, Homo sapien
taaaagagggcaattatccaggtgg

SEQ ID NO: 2752320 - DNA, 25 bp, Homo sapien
tatatgttggcgtacttccagggtc

SEQ ID NO: 2752321 - DNA, 25 bp, Homo sapien
tctaaaggcctgaaaagcacatccc

SEQ ID NO: 2752322 - DNA, 25 bp, Homo sapien
ataccattgataagttctgctgctc

SEQ ID NO: 2752323 - DNA, 25 bp, Homo sapien
tgctgctctcatctaaaggcctgaa

SEQ ID NO: 2752324 - DNA, 25 bp, Homo sapien
gggccagccctaccgggactggctg

SEQ ID NO: 2752325 - DNA, 25 bp, Homo sapien
tttcgccaaggttgagaacgagccc

SEQ ID NO: 2752326 - DNA, 25 bp, Homo sapien
gaaggcagtattgcgcagttcccaa

SEQ ID NO: 2752327 - DNA, 25 bp, Homo sapien
tcgtcagggtgagatccaaaaaact

SEQ ID NO: 2752328 - DNA, 25 bp, Homo sapien
cggacgaggctctaacacagggttg

SEQ ID NO: 2752329 - DNA, 25 bp, Homo sapien
tgccataaggcggacaaacaggatt

SEQ ID NO: 2752330 - DNA, 25 bp, Homo sapien
tatagacttgcaggtgtggccagtg

SEQ ID NO: 2752331 - DNA, 25 bp, Homo sapien
tggccagtgactaccctgctacagg

SEQ ID NO: 2752332 - DNA, 25 bp, Homo sapien
ctgaagcagtgtaaaatacttctcc

SEQ ID NO: 2752333 - DNA, 25 bp, Homo sapien
gacctcaaatgatcagtccacctca

SEQ ID NO: 2752334 - DNA, 25 bp, Homo sapien
caaatgatcagtccacctcagactc

SEQ ID NO: 2752335 - DNA, 25 bp, Homo sapien
tcaaatgatcagtccacctcagact

SEQ ID NO: 2752336 - DNA, 25 bp, Homo sapien
cctcaaatgatcagtccacctcaga

SEQ ID NO: 2752337 - DNA, 25 bp, Homo sapien
ggccccaagctcaccatgaaggata

SEQ ID NO: 2752338 - DNA, 25 bp, Homo sapien
taagtgtccacagtagaccagccct

SEQ ID NO: 2752339 - DNA, 25 bp, Homo sapien
tccccaaggtggtcgatccagacat

SEQ ID NO: 2752340 - DNA, 25 bp, Homo sapien
tctgcagtgctggttcagaacacca

SEQ ID NO: 2752341 - DNA, 25 bp, Homo sapien
aagtcacatgtacgcaccccgtagg

SEQ ID NO: 2752342 - DNA, 25 bp, Homo sapien
gaatcaggccgtctgtgaggtcaaa

SEQ ID NO: 2752343 - DNA, 25 bp, Homo sapien
caggttggacactcaggaatcaggc

SEQ ID NO: 2752344 - DNA, 25 bp, Homo sapien
tcatgtgccaggataaacaagcttc

SEQ ID NO: 2752345 - DNA, 25 bp, Homo sapien
taagctgggcagttagtctacccgt

SEQ ID NO: 2752346 - DNA, 25 bp, Homo sapien
aaagctattctaggaaggcttgccc

SEQ ID NO: 2752347 - DNA, 25 bp, Homo sapien
gaaaaggccacacttgacctgtcag

SEQ ID NO: 2752348 - DNA, 25 bp, Homo sapien
tgaggcactacacctggtcagacct

SEQ ID NO: 2752349 - DNA, 25 bp, Homo sapien
ctcgtcaatgtagggcttgtctgca

SEQ ID NO: 2752350 - DNA, 25 bp, Homo sapien
gaacccatgagtctgcccagaaaat

SEQ ID NO: 2752351 - DNA, 25 bp, Homo sapien
atcttctctcttccgatgcacgaac

SEQ ID NO: 2752352 - DNA, 25 bp, Homo sapien
tgtctgcaggtgagcaatcttctct

SEQ ID NO: 2752353 - DNA, 25 bp, Homo sapien
aatttgatattcaactttgcagtgt

SEQ ID NO: 2752354 - DNA, 25 bp, Homo sapien
gtccttgagtggaatcacaacatca

SEQ ID NO: 2752355 - DNA, 25 bp, Homo sapien
tccttgagtggaatcacaacatcat

SEQ ID NO: 2752356 - DNA, 25 bp, Homo sapien
ccttgagtggaatcacaacatcatt

SEQ ID NO: 2752357 - DNA, 25 bp, Homo sapien
tatcaagacttagccccattgtaag

SEQ ID NO: 2752358 - DNA, 25 bp, Homo sapien
tgcccaactgtagcctgatgcaggt

SEQ ID NO: 2752359 - DNA, 25 bp, Homo sapien
tcggccaggtgaggctatgatgctt

SEQ ID NO: 2752360 - DNA, 25 bp, Homo sapien
tagcaagcagtttctatatacagat

SEQ ID NO: 2752361 - DNA, 25 bp, Homo sapien
agatgggcagtcttcacattattgg

SEQ ID NO: 2752362 - DNA, 25 bp, Homo sapien
ttattgggggttgtgttacactgga

SEQ ID NO: 2752363 - DNA, 25 bp, Homo sapien
tcccttctgcatggagtaaaaatgc

SEQ ID NO: 2752364 - DNA, 25 bp, Homo sapien
gggaggcttgtgattgttgtcactc

SEQ ID NO: 2752365 - DNA, 25 bp, Homo sapien
caaatgatggacagcagttccaccc

SEQ ID NO: 2752366 - DNA, 25 bp, Homo sapien
atgatggacagcagttccaccccag

SEQ ID NO: 2752367 - DNA, 25 bp, Homo sapien
catcatcaaatgatggacagcagtt

SEQ ID NO: 2752368 - DNA, 25 bp, Homo sapien
tggacagcagttccaccccagcaga

SEQ ID NO: 2752369 - DNA, 25 bp, Homo sapien
cactgttgtttcagatacttcaaga

SEQ ID NO: 2752370 - DNA, 25 bp, Homo sapien
aattttctgggcatgacactgttgt

SEQ ID NO: 2752371 - DNA, 25 bp, Homo sapien
gatacttcaagatagcactgatctc

SEQ ID NO: 2752372 - DNA, 25 bp, Homo sapien
cacgatgccaattttctgggcatga

SEQ ID NO: 2752373 - DNA, 25 bp, Homo sapien
tgagcagccataactatgggcagac

SEQ ID NO: 2752374 - DNA, 25 bp, Homo sapien
tccatgatctgctccctgcagagtg

SEQ ID NO: 2752375 - DNA, 25 bp, Homo sapien
ttcgtaagacccgagtccatgatct

SEQ ID NO: 2752376 - DNA, 25 bp, Homo sapien
acagcccacagcacggttcgtaaga

SEQ ID NO: 2752377 - DNA, 25 bp, Homo sapien
tcagggaagatagaccagtcgccag

SEQ ID NO: 2752378 - DNA, 25 bp, Homo sapien
gggtcccaaggctcttgccctacaa

SEQ ID NO: 2752379 - DNA, 25 bp, Homo sapien
ctatcgatcttctgggcatttcttg

SEQ ID NO: 2752380 - DNA, 25 bp, Homo sapien
cctacaaagaagtctggaacaatgg

SEQ ID NO: 2752381 - DNA, 25 bp, Homo sapien
ttaggtttcacaaccgcaggtgcac

SEQ ID NO: 2752382 - DNA, 25 bp, Homo sapien
aatgaggctatccacagggcacact

SEQ ID NO: 2752383 - DNA, 25 bp, Homo sapien
tggcaccgggccaagccctcttagg

SEQ ID NO: 2752384 - DNA, 25 bp, Homo sapien
cactcccatgggataggctggcatg

SEQ ID NO: 2752385 - DNA, 25 bp, Homo sapien
ccgtgaaatctgacacgaggctgag

SEQ ID NO: 2752386 - DNA, 25 bp, Homo sapien
accctgccgtccaaatgggccgtga

SEQ ID NO: 2752387 - DNA, 25 bp, Homo sapien
cgaccgtacgtgtatggaccaggag

SEQ ID NO: 2752388 - DNA, 25 bp, Homo sapien
ctgaaccccagtctaattcagaggg

SEQ ID NO: 2752389 - DNA, 25 bp, Homo sapien
tgtcacacggacaaggataagcttc

SEQ ID NO: 2752390 - DNA, 25 bp, Homo sapien
caagtctgtggccaatgtcacacgg

SEQ ID NO: 2752391 - DNA, 25 bp, Homo sapien
gatgtgctcgacttgaacttcacgg

SEQ ID NO: 2752392 - DNA, 25 bp, Homo sapien
tggtattgggcaactgccagccaaa

SEQ ID NO: 2752393 - DNA, 25 bp, Homo sapien
gataactcaccgccatcaggcctgc

SEQ ID NO: 2752394 - DNA, 25 bp, Homo sapien
agataactcaccgccatcaggcctg

SEQ ID NO: 2752395 - DNA, 25 bp, Homo sapien
ataactcaccgccatcaggcctgcc

SEQ ID NO: 2752396 - DNA, 25 bp, Homo sapien
tagtaaaaacgctacaaccagaatg

SEQ ID NO: 2752397 - DNA, 25 bp, Homo sapien
acgctacaaccagaatgtctcactg

SEQ ID NO: 2752398 - DNA, 25 bp, Homo sapien
tatattagtaaaaacgctacaacca

SEQ ID NO: 2752399 - DNA, 25 bp, Homo sapien
taaaaacgctacaaccagaatgtct

SEQ ID NO: 2752400 - DNA, 25 bp, Homo sapien
caagtttgcatacggtgtgatttcc

SEQ ID NO: 2752401 - DNA, 25 bp, Homo sapien
tacaaggagtatttaacggcatggt

SEQ ID NO: 2752402 - DNA, 25 bp, Homo sapien
gctcctccgtgctaaatggccaaaa

SEQ ID NO: 2752403 - DNA, 25 bp, Homo sapien
acggcatggtggaaaggctcctccg

SEQ ID NO: 2752404 - DNA, 25 bp, Homo sapien
ctgcttcggacgcatgggatcgtgg

SEQ ID NO: 2752405 - DNA, 25 bp, Homo sapien
tgcttcggacgcatgggatcgtgga

SEQ ID NO: 2752406 - DNA, 25 bp, Homo sapien
cttcggacgcatgggatcgtggagg

SEQ ID NO: 2752407 - DNA, 25 bp, Homo sapien
tcggacgcatgggatcgtggaggct

SEQ ID NO: 2752408 - DNA, 25 bp, Homo sapien
ggacaacgtatcacttttatgaaag

SEQ ID NO: 2752409 - DNA, 25 bp, Homo sapien
ctgcaaggacaacgtatcactttta

SEQ ID NO: 2752410 - DNA, 25 bp, Homo sapien
cgtatcacttttatgaaagtcagct

SEQ ID NO: 2752411 - DNA, 25 bp, Homo sapien
agtcagcttctgaaaacggactatg

SEQ ID NO: 2752412 - DNA, 25 bp, Homo sapien
cacgcggcaaagaccttctttgcca

SEQ ID NO: 2752413 - DNA, 25 bp, Homo sapien
cgtgcacgcggcaaagaccttcttt

SEQ ID NO: 2752414 - DNA, 25 bp, Homo sapien
ccgtgcacgcggcaaagaccttctt

SEQ ID NO: 2752415 - DNA, 25 bp, Homo sapien
tgcacgcggcaaagaccttctttgc

SEQ ID NO: 2752416 - DNA, 25 bp, Homo sapien
cacgcgggagttcagaggagcgggg

SEQ ID NO: 2752417 - DNA, 25 bp, Homo sapien
aacacacgcgggagttcagaggagc

SEQ ID NO: 2752418 - DNA, 25 bp, Homo sapien
cacacgcgggagttcagaggagcgg

SEQ ID NO: 2752419 - DNA, 25 bp, Homo sapien
gaacacacgcgggagttcagaggag

SEQ ID NO: 2752420 - DNA, 25 bp, Homo sapien
ggcgaccgaggacgcggggatcctg

SEQ ID NO: 2752421 - DNA, 25 bp, Homo sapien
gggatcctgcgggaccagtggctcc

SEQ ID NO: 2752422 - DNA, 25 bp, Homo sapien
gtcccgcggcctgagactgcgctgc

SEQ ID NO: 2752423 - DNA, 25 bp, Homo sapien
ggacgcgagagggacgtggacgcgg

SEQ ID NO: 2752424 - DNA, 25 bp, Homo sapien
gagaaatctgcaaagtcggggaagg

SEQ ID NO: 2752425 - DNA, 25 bp, Homo sapien
ctgggagagccaagcccggaggggg

SEQ ID NO: 2752426 - DNA, 25 bp, Homo sapien
tgggagagccaagcccggagggggc

SEQ ID NO: 2752427 - DNA, 25 bp, Homo sapien
aatctgcaaagtcggggaagggaag

SEQ ID NO: 2752428 - DNA, 25 bp, Homo sapien
ccgcagtcctgttgggttagagccc

SEQ ID NO: 2752429 - DNA, 25 bp, Homo sapien
tacctgcagagcaagagatctcttg

SEQ ID NO: 2752430 - DNA, 25 bp, Homo sapien
cagtccagggcggaactctatccat

SEQ ID NO: 2752431 - DNA, 25 bp, Homo sapien
tctgaaggcccttaattgacacagc

SEQ ID NO: 2752432 - DNA, 25 bp, Homo sapien
ccctcccagtactggagttgagaag

SEQ ID NO: 2752433 - DNA, 25 bp, Homo sapien
gaatccattccttgtgtccttcagc

SEQ ID NO: 2752434 - DNA, 25 bp, Homo sapien
gccacatttcctgccgaggctctga

SEQ ID NO: 2752435 - DNA, 25 bp, Homo sapien
cagtactggagttgagaagtctgaa

SEQ ID NO: 2752436 - DNA, 25 bp, Homo sapien
ggcattctcgttctagtagtcccag

SEQ ID NO: 2752437 - DNA, 25 bp, Homo sapien
gaagatgaaatgttgggagctgtca

SEQ ID NO: 2752438 - DNA, 25 bp, Homo sapien
ggagctgtcagtggccttgtttcca

SEQ ID NO: 2752439 - DNA, 25 bp, Homo sapien
gaagctggtctaacagcatgaagcc

SEQ ID NO: 2752440 - DNA, 25 bp, Homo sapien
ccaattccaccgctcacacataaca

SEQ ID NO: 2752441 - DNA, 25 bp, Homo sapien
cttactctgtttgatgaagattggg

SEQ ID NO: 2752442 - DNA, 25 bp, Homo sapien
taaaccttactctgtttgatgaaga

SEQ ID NO: 2752443 - DNA, 25 bp, Homo sapien
tattctaaaccttactctgtttgat

SEQ ID NO: 2752444 - DNA, 25 bp, Homo sapien
tatcggaaccgatctcccttagagg

SEQ ID NO: 2752445 - DNA, 25 bp, Homo sapien
agctcctgattaggtttcggccccg

SEQ ID NO: 2752446 - DNA, 25 bp, Homo sapien
tcaggcaattctgacgtggcggccc

SEQ ID NO: 2752447 - DNA, 25 bp, Homo sapien
gcgcagactcgcattgtcacaggaa

SEQ ID NO: 2752448 - DNA, 25 bp, Homo sapien
cagaaagcaaccttccgggtacagg

SEQ ID NO: 2752449 - DNA, 25 bp, Homo sapien
actgtgtgtacctgtgcaagtcctg

SEQ ID NO: 2752450 - DNA, 25 bp, Homo sapien
taatagaatgactgaccgtaccaag

SEQ ID NO: 2752451 - DNA, 25 bp, Homo sapien
caaaactactgatagtgtggcagga

SEQ ID NO: 2752452 - DNA, 25 bp, Homo sapien
gccatagtcaatggccgacccgtca

SEQ ID NO: 2752453 - DNA, 25 bp, Homo sapien
gatgtcactccacctgttgtccttg

SEQ ID NO: 2752454 - DNA, 25 bp, Homo sapien
tgccagcaggactgtctttgccata

SEQ ID NO: 2752455 - DNA, 25 bp, Homo sapien
caagtgaccaattgctgtacccacg

SEQ ID NO: 2752456 - DNA, 25 bp, Homo sapien
gtgaccaagaatcttaataataggg

SEQ ID NO: 2752457 - DNA, 25 bp, Homo sapien
tactgaggcgaccactgtgaccaag

SEQ ID NO: 2752458 - DNA, 25 bp, Homo sapien
tgtcactcttaggtggcagttgtag

SEQ ID NO: 2752459 - DNA, 25 bp, Homo sapien
ctaggtaacctagatcaatcacatt

SEQ ID NO: 2752460 - DNA, 25 bp, Homo sapien
cattgatagttattctgtgggtggg

SEQ ID NO: 2752461 - DNA, 25 bp, Homo sapien
ccattgatagttattctgtgggtgg

SEQ ID NO: 2752462 - DNA, 25 bp, Homo sapien
attgatagttattctgtgggtgggg

SEQ ID NO: 2752463 - DNA, 25 bp, Homo sapien
cccattgatagttattctgtgggtg

SEQ ID NO: 2752464 - DNA, 25 bp, Homo sapien
gattcagctgatatcaacctgggcc

SEQ ID NO: 2752465 - DNA, 25 bp, Homo sapien
catctgggacaaatccatcactggt

SEQ ID NO: 2752466 - DNA, 25 bp, Homo sapien
aaactggaagtcagatctaagggcc

SEQ ID NO: 2752467 - DNA, 25 bp, Homo sapien
tggtcacactgtgcctattaatagt

SEQ ID NO: 2752468 - DNA, 25 bp, Homo sapien
cagtaaagatattagccatgtgcag

SEQ ID NO: 2752469 - DNA, 25 bp, Homo sapien
cctttaaccgtgagagaggagctta

SEQ ID NO: 2752470 - DNA, 25 bp, Homo sapien
caaccaaacttgcagtgtaacatgt

SEQ ID NO: 2752471 - DNA, 25 bp, Homo sapien
ccttttgccactggtttgacttcta

SEQ ID NO: 2752472 - DNA, 25 bp, Homo sapien
gcgtataacataggtcttcagaaac

SEQ ID NO: 2752473 - DNA, 25 bp, Homo sapien
ttttttaacatatgcaagtcagcca

SEQ ID NO: 2752474 - DNA, 25 bp, Homo sapien
taaaaacatcggtatcgggagctgc

SEQ ID NO: 2752475 - DNA, 25 bp, Homo sapien
taatgctaaaggtatatcgtaaggg

SEQ ID NO: 2752476 - DNA, 25 bp, Homo sapien
taatatttgcttgggtagcatccgg

SEQ ID NO: 2752477 - DNA, 25 bp, Homo sapien
aattgccctccattttactggcagg

SEQ ID NO: 2752478 - DNA, 25 bp, Homo sapien
gatcttggtataaagtcattggaac

SEQ ID NO: 2752479 - DNA, 25 bp, Homo sapien
ttaacagcaagagatcctaggcaga

SEQ ID NO: 2752480 - DNA, 25 bp, Homo sapien
cacacgtgcaggagaatgtagtgcc

SEQ ID NO: 2752481 - DNA, 25 bp, Homo sapien
tgcgtttgcgaatgtgcgtgaacac

SEQ ID NO: 2752482 - DNA, 25 bp, Homo sapien
tgtagtgccataagaacactggcgc

SEQ ID NO: 2752483 - DNA, 25 bp, Homo sapien
tatcaacgcaaacaccttagggtac

SEQ ID NO: 2752484 - DNA, 25 bp, Homo sapien
catacgtaaacactacgtagaggcc

SEQ ID NO: 2752485 - DNA, 25 bp, Homo sapien
tcttcacatatgtaacagtgccgga

SEQ ID NO: 2752486 - DNA, 25 bp, Homo sapien
gactgtttggtatatgtaggtcccc

SEQ ID NO: 2752487 - DNA, 25 bp, Homo sapien
taggatacacctaaagatgagaagc

SEQ ID NO: 2752488 - DNA, 25 bp, Homo sapien
tgttaacggcaactgcagcagccag

SEQ ID NO: 2752489 - DNA, 25 bp, Homo sapien
ttgaagggagtgcttgccatcggcc

SEQ ID NO: 2752490 - DNA, 25 bp, Homo sapien
gactcgaggctcttttgacagatgt

SEQ ID NO: 2752491 - DNA, 25 bp, Homo sapien
catccattcggtggctgttaacggc

SEQ ID NO: 2752492 - DNA, 25 bp, Homo sapien
aaacgctcagctcgcgcggctctga

SEQ ID NO: 2752493 - DNA, 25 bp, Homo sapien
gtgggaaaccgatccgaagatgctt

SEQ ID NO: 2752494 - DNA, 25 bp, Homo sapien
gatgcttttgtaggcgaaacgctca

SEQ ID NO: 2752495 - DNA, 25 bp, Homo sapien
cgcggctctgaaccaccggggagca

SEQ ID NO: 2752496 - DNA, 25 bp, Homo sapien
tgctacagcatgtcagattcagtga

SEQ ID NO: 2752497 - DNA, 25 bp, Homo sapien
tttggagctctcagaacatcgcccc

SEQ ID NO: 2752498 - DNA, 25 bp, Homo sapien
cagtgactgacctatggtggttccc

SEQ ID NO: 2752499 - DNA, 25 bp, Homo sapien
tggttccctgttggtccgatgtgac

SEQ ID NO: 2752500 - DNA, 25 bp, Homo sapien
gaaaggccaacagaattcctcatag

SEQ ID NO: 2752501 - DNA, 25 bp, Homo sapien
agcccattcggaagtgaccaagaaa

SEQ ID NO: 2752502 - DNA, 25 bp, Homo sapien
tcgaaagcccattcggaagtgacca

SEQ ID NO: 2752503 - DNA, 25 bp, Homo sapien
ctagggctcgaaagcccattcggaa

SEQ ID NO: 2752504 - DNA, 25 bp, Homo sapien
gctggagattcccatgggccgctga

SEQ ID NO: 2752505 - DNA, 25 bp, Homo sapien
ggagattcccatgggccgctgatgc

SEQ ID NO: 2752506 - DNA, 25 bp, Homo sapien
ttgccctgtccgctggagattccca

SEQ ID NO: 2752507 - DNA, 25 bp, Homo sapien
tgtccgctggagattcccatgggcc

SEQ ID NO: 2752508 - DNA, 25 bp, Homo sapien
cttgaaaacgcagtgctgggttaga

SEQ ID NO: 2752509 - DNA, 25 bp, Homo sapien
taatagaattcgatgaaaaggccct

SEQ ID NO: 2752510 - DNA, 25 bp, Homo sapien
gatgaaaaggcccttaagctcttga

SEQ ID NO: 2752511 - DNA, 25 bp, Homo sapien
ttaaattaggaaactctagaggata

SEQ ID NO: 2752512 - DNA, 25 bp, Homo sapien
gtgccgtccacctcggcagcatcag

SEQ ID NO: 2752513 - DNA, 25 bp, Homo sapien
cgtgccgtccacctcggcagcatca

SEQ ID NO: 2752514 - DNA, 25 bp, Homo sapien
gccttcacagaagggactcgaggtg

SEQ ID NO: 2752515 - DNA, 25 bp, Homo sapien
caggtatgagatagccactctggca

SEQ ID NO: 2752516 - DNA, 25 bp, Homo sapien
cttcatcagtaggcagcgtgaccat

SEQ ID NO: 2752517 - DNA, 25 bp, Homo sapien
cactctggcaaggacggccttcaca

SEQ ID NO: 2752518 - DNA, 25 bp, Homo sapien
ctgaggggagggtcccataggccag

SEQ ID NO: 2752519 - DNA, 25 bp, Homo sapien
cagaggatgggctttcccgctgaaa

SEQ ID NO: 2752520 - DNA, 25 bp, Homo sapien
ccttctgctcggtgggcaggcattg

SEQ ID NO: 2752521 - DNA, 25 bp, Homo sapien
atgaacggtctcagggaggaagtcc

SEQ ID NO: 2752522 - DNA, 25 bp, Homo sapien
ctaaaagtgtctgccgtgtggaggc

SEQ ID NO: 2752523 - DNA, 25 bp, Homo sapien
gctggtgtctgcagtcacatggacg

SEQ ID NO: 2752524 - DNA, 25 bp, Homo sapien
cgccttattcttgacaccatcctgg

SEQ ID NO: 2752525 - DNA, 25 bp, Homo sapien
gtggaagaccgcagctcccaagcca

SEQ ID NO: 2752526 - DNA, 25 bp, Homo sapien
ggacgacacagtactttgtccccag

SEQ ID NO: 2752527 - DNA, 25 bp, Homo sapien
tggcttttggtaaggccagaagccc

SEQ ID NO: 2752528 - DNA, 25 bp, Homo sapien
ggatcccacgctttcctgtgctgag

SEQ ID NO: 2752529 - DNA, 25 bp, Homo sapien
agcattccccgtatctgtcccattt

SEQ ID NO: 2752530 - DNA, 25 bp, Homo sapien
tttccccgaggttggagcagggatc

SEQ ID NO: 2752531 - DNA, 25 bp, Homo sapien
cttttcttgcaaaccaagtccaaag

SEQ ID NO: 2752532 - DNA, 25 bp, Homo sapien
tcttttgattccgaaaataacagcc

SEQ ID NO: 2752533 - DNA, 25 bp, Homo sapien
tcttttcttgcaaaccaagtccaaa

SEQ ID NO: 2752534 - DNA, 25 bp, Homo sapien
ctcttttcttgcaaaccaagtccaa

SEQ ID NO: 2752535 - DNA, 25 bp, Homo sapien
ccctccttccatgggtagagccaga

SEQ ID NO: 2752536 - DNA, 25 bp, Homo sapien
gcacatcaggcacactcgttgctgc

SEQ ID NO: 2752537 - DNA, 25 bp, Homo sapien
ttaatcagcagcgagcacatcaggc

SEQ ID NO: 2752538 - DNA, 25 bp, Homo sapien
ctctgttgaaggaagctttaatcag

SEQ ID NO: 2752539 - DNA, 25 bp, Homo sapien
tggtcagatgggagtggacagagac

SEQ ID NO: 2752540 - DNA, 25 bp, Homo sapien
gagtggacagagacccggggtcctc

SEQ ID NO: 2752541 - DNA, 25 bp, Homo sapien
gatgggagtggacagagacccgggg

SEQ ID NO: 2752542 - DNA, 25 bp, Homo sapien
ctggtcagatgggagtggacagaga

SEQ ID NO: 2752543 - DNA, 25 bp, Homo sapien
gatcgtctgtttcttccgtcaaaca

SEQ ID NO: 2752544 - DNA, 25 bp, Homo sapien
agtggatccaacttcctctcacacc

SEQ ID NO: 2752545 - DNA, 25 bp, Homo sapien
tgtttcttccgtcaaacaccacagt

SEQ ID NO: 2752546 - DNA, 25 bp, Homo sapien
cttccagatcgtctgtttcttccgt

SEQ ID NO: 2752547 - DNA, 25 bp, Homo sapien
ttacaggggtgctgccctgagtcgt

SEQ ID NO: 2752548 - DNA, 25 bp, Homo sapien
cagaagaggggaagcgatatcacca

SEQ ID NO: 2752549 - DNA, 25 bp, Homo sapien
tactttacgcggcaaacactttgca

SEQ ID NO: 2752550 - DNA, 25 bp, Homo sapien
ctgccctgagtcgtggaagctggaa

SEQ ID NO: 2752551 - DNA, 25 bp, Homo sapien
ttctgcatcctaccgccaggagcgt

SEQ ID NO: 2752552 - DNA, 25 bp, Homo sapien
cagtgattcccgcatagtcagctgc

SEQ ID NO: 2752553 - DNA, 25 bp, Homo sapien
ccgccaggagcgtgctcagtgcgca

SEQ ID NO: 2752554 - DNA, 25 bp, Homo sapien
gccttgttaactcaggccttctgca

SEQ ID NO: 2752555 - DNA, 25 bp, Homo sapien
cccagctatggaatgttggccaaaa

SEQ ID NO: 2752556 - DNA, 25 bp, Homo sapien
tcttggttggggtccgtcctgcagc

SEQ ID NO: 2752557 - DNA, 25 bp, Homo sapien
gaaaaagctcctggagtcgatcaac

SEQ ID NO: 2752558 - DNA, 25 bp, Homo sapien
tcctgcagctaaggcgggaatttgg

SEQ ID NO: 2752559 - DNA, 25 bp, Homo sapien
gaagatgaaaaaggcaccttgcttc

SEQ ID NO: 2752560 - DNA, 25 bp, Homo sapien
aagagaagatgaaaaaggcaccttg

SEQ ID NO: 2752561 - DNA, 25 bp, Homo sapien
atgaaaaaggcaccttgcttctgtc

SEQ ID NO: 2752562 - DNA, 25 bp, Homo sapien
gagaagatgaaaaaggcaccttgct

SEQ ID NO: 2752563 - DNA, 25 bp, Homo sapien
cacgtggttgatggagaagccagat

SEQ ID NO: 2752564 - DNA, 25 bp, Homo sapien
gaagccagatgcagagtggttcact

SEQ ID NO: 2752565 - DNA, 25 bp, Homo sapien
catggacagctcagagggactccag

SEQ ID NO: 2752566 - DNA, 25 bp, Homo sapien
cgtatcagtgcaaggataccctgag

SEQ ID NO: 2752567 - DNA, 25 bp, Homo sapien
agtctaggaggctggaattgcaagg

SEQ ID NO: 2752568 - DNA, 25 bp, Homo sapien
cagtctaggaggctggaattgcaag

SEQ ID NO: 2752569 - DNA, 25 bp, Homo sapien
tcacagtctaggaggctggaattgc

SEQ ID NO: 2752570 - DNA, 25 bp, Homo sapien
cacagtctaggaggctggaattgca

SEQ ID NO: 2752571 - DNA, 25 bp, Homo sapien
tggagacacacctcctagagagttt

SEQ ID NO: 2752572 - DNA, 25 bp, Homo sapien
gtctggcacctctacccactgggaa

SEQ ID NO: 2752573 - DNA, 25 bp, Homo sapien
tagagagtttcctacaacatgcagg

SEQ ID NO: 2752574 - DNA, 25 bp, Homo sapien
gggaaacctcctactcatggctcct

SEQ ID NO: 2752575 - DNA, 25 bp, Homo sapien
gacggacacagaaaggtggagggtg

SEQ ID NO: 2752576 - DNA, 25 bp, Homo sapien
gccttggtctgggacggacacagaa

SEQ ID NO: 2752577 - DNA, 25 bp, Homo sapien
tggtatctgggaatccatcaagggc

SEQ ID NO: 2752578 - DNA, 25 bp, Homo sapien
gagggtggaattggtgtctggagga

SEQ ID NO: 2752579 - DNA, 25 bp, Homo sapien
tggcctgtggtttgatagaaaccgc

SEQ ID NO: 2752580 - DNA, 25 bp, Homo sapien
gcctgtggtttgatagaaaccgcag

SEQ ID NO: 2752581 - DNA, 25 bp, Homo sapien
tttgatagaaaccgcagcatctatt

SEQ ID NO: 2752582 - DNA, 25 bp, Homo sapien
ggtggcctgtggtttgatagaaacc

SEQ ID NO: 2752583 - DNA, 25 bp, Homo sapien
ctttcatcaccaaagattcattctg

SEQ ID NO: 2752584 - DNA, 25 bp, Homo sapien
ctcactttcatcaccaaagattcat

SEQ ID NO: 2752585 - DNA, 25 bp, Homo sapien
tttcatcaccaaagattcattctgc

SEQ ID NO: 2752586 - DNA, 25 bp, Homo sapien
cactttcatcaccaaagattcattc

SEQ ID NO: 2752587 - DNA, 25 bp, Homo sapien
taattagaccaaactgcaagaggca

SEQ ID NO: 2752588 - DNA, 25 bp, Homo sapien
aaagagaatgatgggcctggctcac

SEQ ID NO: 2752589 - DNA, 25 bp, Homo sapien
gagaagcacacttcaaactgccagg

SEQ ID NO: 2752590 - DNA, 25 bp, Homo sapien
gattttaaagattagaggcccagga

SEQ ID NO: 2752591 - DNA, 25 bp, Homo sapien
tcccagggtcgctgggacatttgct

SEQ ID NO: 2752592 - DNA, 25 bp, Homo sapien
tcagagtccaagctgggtcgcattt

SEQ ID NO: 2752593 - DNA, 25 bp, Homo sapien
tcacttcttcccagggtcgctggga

SEQ ID NO: 2752594 - DNA, 25 bp, Homo sapien
tgctctcagagtccaagctgggtcg

SEQ ID NO: 2752595 - DNA, 25 bp, Homo sapien
tagtatgagcactccaaaaggaagc

SEQ ID NO: 2752596 - DNA, 25 bp, Homo sapien
cccatcagaggtttgttcccgagta

SEQ ID NO: 2752597 - DNA, 25 bp, Homo sapien
ttttaaagtgcccagatggcctcca

SEQ ID NO: 2752598 - DNA, 25 bp, Homo sapien
tagtaatttaccttgcacagagcct

SEQ ID NO: 2752599 - DNA, 25 bp, Homo sapien
tgtcccctcagcttccgccttattc

SEQ ID NO: 2752600 - DNA, 25 bp, Homo sapien
tcccctcagcttccgccttattcac

SEQ ID NO: 2752601 - DNA, 25 bp, Homo sapien
gctgggggtgacattcctgtcctgg

SEQ ID NO: 2752602 - DNA, 25 bp, Homo sapien
tgggggtgacattcctgtcctggct

SEQ ID NO: 2752603 - DNA, 25 bp, Homo sapien
ggacaatccatcctttatccatggg

SEQ ID NO: 2752604 - DNA, 25 bp, Homo sapien
catcttgattacaactgcagagacc

SEQ ID NO: 2752605 - DNA, 25 bp, Homo sapien
tcatggttctgtttgcaaggaggca

SEQ ID NO: 2752606 - DNA, 25 bp, Homo sapien
ttcaatgtatcttttgggaggacac

SEQ ID NO: 2752607 - DNA, 25 bp, Homo sapien
agctttatccatcttgttgaaatat

SEQ ID NO: 2752608 - DNA, 25 bp, Homo sapien
aagtcctgggcagaatccgatcctt

SEQ ID NO: 2752609 - DNA, 25 bp, Homo sapien
aatatagattattggcgacatcccc

SEQ ID NO: 2752610 - DNA, 25 bp, Homo sapien
aaaagagagttgtagaagagaaacg

SEQ ID NO: 2752611 - DNA, 25 bp, Homo sapien
ggatgtggcggacattgactctttt

SEQ ID NO: 2752612 - DNA, 25 bp, Homo sapien
agggatgtggcggacattgactctt

SEQ ID NO: 2752613 - DNA, 25 bp, Homo sapien
gactcttttgtctgctgagggtaat

SEQ ID NO: 2752614 - DNA, 25 bp, Homo sapien
tgctgagggtaatagtcaaccttct

SEQ ID NO: 2752615 - DNA, 25 bp, Homo sapien
gcagcatggccccatcacggagaaa

SEQ ID NO: 2752616 - DNA, 25 bp, Homo sapien
tcacggagaaagtctcctccgggtg

SEQ ID NO: 2752617 - DNA, 25 bp, Homo sapien
gtgttctgctgagaccctaccaggc

SEQ ID NO: 2752618 - DNA, 25 bp, Homo sapien
ggcctccgccggaacatttggccat

SEQ ID NO: 2752619 - DNA, 25 bp, Homo sapien
ctgggagaagacagttatctgtctg

SEQ ID NO: 2752620 - DNA, 25 bp, Homo sapien
actgggagaagacagttatctgtct

SEQ ID NO: 2752621 - DNA, 25 bp, Homo sapien
tgggagaagacagttatctgtctgt

SEQ ID NO: 2752622 - DNA, 25 bp, Homo sapien
gggagaagacagttatctgtctgtc

SEQ ID NO: 2752623 - DNA, 25 bp, Homo sapien
gaatgtggggcatacagaaaatgct

SEQ ID NO: 2752624 - DNA, 25 bp, Homo sapien
cctgctggtggaattgaggctgaca

SEQ ID NO: 2752625 - DNA, 25 bp, Homo sapien
gactggaaggagttgcaagttcctg

SEQ ID NO: 2752626 - DNA, 25 bp, Homo sapien
cgttgagaatgtggggcatacagaa

SEQ ID NO: 2752627 - DNA, 25 bp, Homo sapien
cagggggctggccattgccaagcct

SEQ ID NO: 2752628 - DNA, 25 bp, Homo sapien
gtcattggccccattcgccggcagc

SEQ ID NO: 2752629 - DNA, 25 bp, Homo sapien
ccggcatctgctacccggccctcca

SEQ ID NO: 2752630 - DNA, 25 bp, Homo sapien
tttccagaagacagtaccatcactg

SEQ ID NO: 2752631 - DNA, 25 bp, Homo sapien
acagcctgatcctcagggccggctg

SEQ ID NO: 2752632 - DNA, 25 bp, Homo sapien
tgcgatggggcacctcaccctcagg

SEQ ID NO: 2752633 - DNA, 25 bp, Homo sapien
ttgatgccccgctcaccaaggaagc

SEQ ID NO: 2752634 - DNA, 25 bp, Homo sapien
ccacgaggcttagcttgatgccccg

SEQ ID NO: 2752635 - DNA, 25 bp, Homo sapien
agaggaattccgggatgtttgtttg

SEQ ID NO: 2752636 - DNA, 25 bp, Homo sapien
gtttggggacataacatctgctgtg

SEQ ID NO: 2752637 - DNA, 25 bp, Homo sapien
tgtttgtttggggacataacatctg

SEQ ID NO: 2752638 - DNA, 25 bp, Homo sapien
tggggacataacatctgctgtgtag

SEQ ID NO: 2752639 - DNA, 25 bp, Homo sapien
ggggagcctgtgcagtgccagaggg

SEQ ID NO: 2752640 - DNA, 25 bp, Homo sapien
gagggcacatcccagactgtcccag

SEQ ID NO: 2752641 - DNA, 25 bp, Homo sapien
aggggagcctgtgcagtgccagagg

SEQ ID NO: 2752642 - DNA, 25 bp, Homo sapien
gcacatcccagactgtcccagggga

SEQ ID NO: 2752643 - DNA, 25 bp, Homo sapien
tgatcaggggtcaggatctctggct

SEQ ID NO: 2752644 - DNA, 25 bp, Homo sapien
ggtcaggatctctggctgtccccac

SEQ ID NO: 2752645 - DNA, 25 bp, Homo sapien
tctgaatggattgtgagtgttttgg

SEQ ID NO: 2752646 - DNA, 25 bp, Homo sapien
gctcctggtgccttgatcaggggtc

SEQ ID NO: 2752647 - DNA, 25 bp, Homo sapien
tctctgcagccttcgagcctatgct

SEQ ID NO: 2752648 - DNA, 25 bp, Homo sapien
gccttcgagcctatgcttggtgtcc

SEQ ID NO: 2752649 - DNA, 25 bp, Homo sapien
tggcttggtgtgctctctgtaggca

SEQ ID NO: 2752650 - DNA, 25 bp, Homo sapien
ccttggcttggtgtgctctctgtag

SEQ ID NO: 2752651 - DNA, 25 bp, Homo sapien
ctacagcaccttgtccattcccaag

SEQ ID NO: 2752652 - DNA, 25 bp, Homo sapien
ctgtgctcctgaaaatgctcctttg

SEQ ID NO: 2752653 - DNA, 25 bp, Homo sapien
cattcccaagagtgtggtcttgttc

SEQ ID NO: 2752654 - DNA, 25 bp, Homo sapien
tcccaagagtgtggtcttgttctgt

SEQ ID NO: 2752655 - DNA, 25 bp, Homo sapien
gcctaagcccttcaccgtctttctc

SEQ ID NO: 2752656 - DNA, 25 bp, Homo sapien
tgtggacacgacattgatgacctct

SEQ ID NO: 2752657 - DNA, 25 bp, Homo sapien
ttgatgacctctccgcctaagccct

SEQ ID NO: 2752658 - DNA, 25 bp, Homo sapien
cattggaggtgtggacacgacattg

SEQ ID NO: 2752659 - DNA, 25 bp, Homo sapien
tgcagtgatatctgggaagtctgag

SEQ ID NO: 2752660 - DNA, 25 bp, Homo sapien
gtatgtgtaatggacggtggtcccc

SEQ ID NO: 2752661 - DNA, 25 bp, Homo sapien
ccctgcggccctctgattgtgcagt

SEQ ID NO: 2752662 - DNA, 25 bp, Homo sapien
ttcatggggtggacgtatgtgtaat

SEQ ID NO: 2752663 - DNA, 25 bp, Homo sapien
tttgagtgctcggtagctgcacatc

SEQ ID NO: 2752664 - DNA, 25 bp, Homo sapien
tattgaggtcctgttcttttcggtg

SEQ ID NO: 2752665 - DNA, 25 bp, Homo sapien
ttcccgcccttccagtttgagtgct

SEQ ID NO: 2752666 - DNA, 25 bp, Homo sapien
ttttcggtgacatcccacctcttca

SEQ ID NO: 2752667 - DNA, 25 bp, Homo sapien
gagctgagctttggcactgctaagc

SEQ ID NO: 2752668 - DNA, 25 bp, Homo sapien
tgccagggttgagctgagctttggc

SEQ ID NO: 2752669 - DNA, 25 bp, Homo sapien
ggttgagctgagctttggcactgct

SEQ ID NO: 2752670 - DNA, 25 bp, Homo sapien
ccagggttgagctgagctttggcac

SEQ ID NO: 2752671 - DNA, 25 bp, Homo sapien
aagaagcgtgaattacttttgtaat

SEQ ID NO: 2752672 - DNA, 25 bp, Homo sapien
gaagatgaaaaagtgcagcttgtgc

SEQ ID NO: 2752673 - DNA, 25 bp, Homo sapien
agcttgtgcggatctgtcttgcaga

SEQ ID NO: 2752674 - DNA, 25 bp, Homo sapien
aattttcgattgtgtgtattacata

SEQ ID NO: 2752675 - DNA, 25 bp, Homo sapien
gctgtaaagtgacgcagtgctctcc

SEQ ID NO: 2752676 - DNA, 25 bp, Homo sapien
gggactcttgctgtaaagtgacgca

SEQ ID NO: 2752677 - DNA, 25 bp, Homo sapien
ccgcagccgggactcttgctgtaaa

SEQ ID NO: 2752678 - DNA, 25 bp, Homo sapien
tcttgctgtaaagtgacgcagtgct

SEQ ID NO: 2752679 - DNA, 25 bp, Homo sapien
gagacactggaagaccaggcgacca

SEQ ID NO: 2752680 - DNA, 25 bp, Homo sapien
ggtcgggccagtgcggtgtgacacg

SEQ ID NO: 2752681 - DNA, 25 bp, Homo sapien
caggcgaccaggacagcgggtcggg

SEQ ID NO: 2752682 - DNA, 25 bp, Homo sapien
acacgagggctcgagcggcttcgca

SEQ ID NO: 2752683 - DNA, 25 bp, Homo sapien
ggctcgctcagcctccggagacttt

SEQ ID NO: 2752684 - DNA, 25 bp, Homo sapien
ctcagcctccggagacttttttctt

SEQ ID NO: 2752685 - DNA, 25 bp, Homo sapien
cctggtgccggtttccgccgagctg

SEQ ID NO: 2752686 - DNA, 25 bp, Homo sapien
cttttttctttgagcgcagccgcct

SEQ ID NO: 2752687 - DNA, 25 bp, Homo sapien
ggtccccgtggacctcctgactgaa

SEQ ID NO: 2752688 - DNA, 25 bp, Homo sapien
tcctgactgaattcgcgctggctgc

SEQ ID NO: 2752689 - DNA, 25 bp, Homo sapien
gctgcccgtgctgcaatccaggatg

SEQ ID NO: 2752690 - DNA, 25 bp, Homo sapien
ccgtgctgcaatccaggatgggctt

SEQ ID NO: 2752691 - DNA, 25 bp, Homo sapien
ctaccctcggagccctgtgatgtgg

SEQ ID NO: 2752692 - DNA, 25 bp, Homo sapien
cctcggagccctgtgatgtggatgt

SEQ ID NO: 2752693 - DNA, 25 bp, Homo sapien
accctcggagccctgtgatgtggat

SEQ ID NO: 2752694 - DNA, 25 bp, Homo sapien
agccctgtgatgtggatgtgggtgt

SEQ ID NO: 2752695 - DNA, 25 bp, Homo sapien
tgccataggtgctcccgtggtggag

SEQ ID NO: 2752696 - DNA, 25 bp, Homo sapien
cagttccggtgtggtctgagtctga

SEQ ID NO: 2752697 - DNA, 25 bp, Homo sapien
agggaggtgccataggtgctcccgt

SEQ ID NO: 2752698 - DNA, 25 bp, Homo sapien
caggaggcagttccggtgtggtctg

SEQ ID NO: 2752699 - DNA, 25 bp, Homo sapien
tgagcacaggctgacgtggttacac

SEQ ID NO: 2752700 - DNA, 25 bp, Homo sapien
gcccatgccgcagcgttagtgtcag

SEQ ID NO: 2752701 - DNA, 25 bp, Homo sapien
aatgcacttaacacccttcactggg

SEQ ID NO: 2752702 - DNA, 25 bp, Homo sapien
cgtctgggcctgttccccaagtgga

SEQ ID NO: 2752703 - DNA, 25 bp, Homo sapien
tcccttgccagaagtgtgggtccta

SEQ ID NO: 2752704 - DNA, 25 bp, Homo sapien
taattcaagggccaggtaagcatcc

SEQ ID NO: 2752705 - DNA, 25 bp, Homo sapien
ccagagagaaatgcttcattcttca

SEQ ID NO: 2752706 - DNA, 25 bp, Homo sapien
cagaagtgtgggtcctaattcaagg

SEQ ID NO: 2752707 - DNA, 25 bp, Homo sapien
tgggcacctcggatgacgcgagggt

SEQ ID NO: 2752708 - DNA, 25 bp, Homo sapien
ggcttctggtgcatcctgtgggcac

SEQ ID NO: 2752709 - DNA, 25 bp, Homo sapien
gaaacgctggcccaggaaatggaac

SEQ ID NO: 2752710 - DNA, 25 bp, Homo sapien
gggtggagcctgaaacgctggccca

SEQ ID NO: 2752711 - DNA, 25 bp, Homo sapien
acacttaagagtcgcgtttcaggaa

SEQ ID NO: 2752712 - DNA, 25 bp, Homo sapien
tccttgggagtacaaaggccctaga

SEQ ID NO: 2752713 - DNA, 25 bp, Homo sapien
tccatgctttggagggtccaggtct

SEQ ID NO: 2752714 - DNA, 25 bp, Homo sapien
gggcagtgccttgtcacctatatgt

SEQ ID NO: 2752715 - DNA, 25 bp, Homo sapien
tctctggatcttgtctgttctctct

SEQ ID NO: 2752716 - DNA, 25 bp, Homo sapien
tgaagagaaggttgcagttggtttc

SEQ ID NO: 2752717 - DNA, 25 bp, Homo sapien
ttgcagttggtttctctggatcttg

SEQ ID NO: 2752718 - DNA, 25 bp, Homo sapien
cagctctgtggagagtaggccagtt

SEQ ID NO: 2752719 - DNA, 25 bp, Homo sapien
tgtcgggggtgaggcttgggaggga

SEQ ID NO: 2752720 - DNA, 25 bp, Homo sapien
ctggaccaggtcttttcagtggcct

SEQ ID NO: 2752721 - DNA, 25 bp, Homo sapien
ctcgggagtggagagatgttgacag

SEQ ID NO: 2752722 - DNA, 25 bp, Homo sapien
ccagtggctttggtccggacttgcc

SEQ ID NO: 2752723 - DNA, 25 bp, Homo sapien
gctttggtccggacttgcccctgga

SEQ ID NO: 2752724 - DNA, 25 bp, Homo sapien
atgaacatatttagatccctcctgt

SEQ ID NO: 2752725 - DNA, 25 bp, Homo sapien
aacatatttagatccctcctgtcat

SEQ ID NO: 2752726 - DNA, 25 bp, Homo sapien
atatttagatccctcctgtcattaa

SEQ ID NO: 2752727 - DNA, 25 bp, Homo sapien
tatttagatccctcctgtcattaaa

SEQ ID NO: 2752728 - DNA, 25 bp, Homo sapien
ctctggcaggtcctctaagtcttct

SEQ ID NO: 2752729 - DNA, 25 bp, Homo sapien
cggtgggtcccatgtcctcgtcctg

SEQ ID NO: 2752730 - DNA, 25 bp, Homo sapien
aggccaaagggctgccagtcggtgg

SEQ ID NO: 2752731 - DNA, 25 bp, Homo sapien
ggcaggtcctctaagtcttctgctt

SEQ ID NO: 2752732 - DNA, 25 bp, Homo sapien
cataggaacattgtctgctggcaga

SEQ ID NO: 2752733 - DNA, 25 bp, Homo sapien
gagagccctgacttatgcattccca

SEQ ID NO: 2752734 - DNA, 25 bp, Homo sapien
tcctaagagtcatgtgtgcattcag

SEQ ID NO: 2752735 - DNA, 25 bp, Homo sapien
cagccctggaccactttcctaagag

SEQ ID NO: 2752736 - DNA, 25 bp, Homo sapien
tccctgttccgccatggtggatcct

SEQ ID NO: 2752737 - DNA, 25 bp, Homo sapien
gttccgccatggtggatccttgttc

SEQ ID NO: 2752738 - DNA, 25 bp, Homo sapien
tgtcccccagctgtgcgctgtgctg

SEQ ID NO: 2752739 - DNA, 25 bp, Homo sapien
catggtggatccttgttccccatgg

SEQ ID NO: 2752740 - DNA, 25 bp, Homo sapien
ccatggacttcccgtgggctccttt

SEQ ID NO: 2752741 - DNA, 25 bp, Homo sapien
tggacttcccgtgggctcctttgcc

SEQ ID NO: 2752742 - DNA, 25 bp, Homo sapien
catggacttcccgtgggctcctttg

SEQ ID NO: 2752743 - DNA, 25 bp, Homo sapien
ctcccatggacttcccgtgggctcc

SEQ ID NO: 2752744 - DNA, 25 bp, Homo sapien
gactttggaccctcatcgcagttcg

SEQ ID NO: 2752745 - DNA, 25 bp, Homo sapien
catcgcagttcgcaacttggtatag

SEQ ID NO: 2752746 - DNA, 25 bp, Homo sapien
gaccctcatcgcagttcgcaacttg

SEQ ID NO: 2752747 - DNA, 25 bp, Homo sapien
cgcaacttggtatagatgcctttca

SEQ ID NO: 2752748 - DNA, 25 bp, Homo sapien
gacaaagggagtttaagcatgtgat

SEQ ID NO: 2752749 - DNA, 25 bp, Homo sapien
ttaacttagacgtcttaggtctgac

SEQ ID NO: 2752750 - DNA, 25 bp, Homo sapien
caaagggagtttaagcatgtgatta

SEQ ID NO: 2752751 - DNA, 25 bp, Homo sapien
cttaggtctgacttcgagtctccac

SEQ ID NO: 2752752 - DNA, 25 bp, Homo sapien
ttgcatccatcagtccttcgcccat

SEQ ID NO: 2752753 - DNA, 25 bp, Homo sapien
gaagcagttgcatccatcagtcctt

SEQ ID NO: 2752754 - DNA, 25 bp, Homo sapien
tgaagcagttgcatccatcagtcct

SEQ ID NO: 2752755 - DNA, 25 bp, Homo sapien
catgccgagggcacatgttctggaa

SEQ ID NO: 2752756 - DNA, 25 bp, Homo sapien
tgttattcccttcgtgcatgcactc

SEQ ID NO: 2752757 - DNA, 25 bp, Homo sapien
gagccacatggggttcacgacctca

SEQ ID NO: 2752758 - DNA, 25 bp, Homo sapien
gccctcagagggtatttgattcatt

SEQ ID NO: 2752759 - DNA, 25 bp, Homo sapien
gccgttgagcgggtaggaaagtgcc

SEQ ID NO: 2752760 - DNA, 25 bp, Homo sapien
tgggattcggcactgggaaaccttg

SEQ ID NO: 2752761 - DNA, 25 bp, Homo sapien
ctgcctgcgatgtgggtgggattcg

SEQ ID NO: 2752762 - DNA, 25 bp, Homo sapien
caggagtggtgattgtcttggtaga

SEQ ID NO: 2752763 - DNA, 25 bp, Homo sapien
tatctctagcgagtgtgccctgtga

SEQ ID NO: 2752764 - DNA, 25 bp, Homo sapien
caggagcagatgttgttaagcagag

SEQ ID NO: 2752765 - DNA, 25 bp, Homo sapien
tcactccccgggtgattggtgggac

SEQ ID NO: 2752766 - DNA, 25 bp, Homo sapien
tatggcaagtaactcaagagctgca

SEQ ID NO: 2752767 - DNA, 25 bp, Homo sapien
catctggatgattacgactctggaa

SEQ ID NO: 2752768 - DNA, 25 bp, Homo sapien
ggatgattacgactctggaaatctc

SEQ ID NO: 2752769 - DNA, 25 bp, Homo sapien
tctggatgattacgactctggaaat

SEQ ID NO: 2752770 - DNA, 25 bp, Homo sapien
ctggatgattacgactctggaaatc

SEQ ID NO: 2752771 - DNA, 25 bp, Homo sapien
agaccgtcgcccatacttgagtgaa

SEQ ID NO: 2752772 - DNA, 25 bp, Homo sapien
tcctgctggactgtctgtgagttca

SEQ ID NO: 2752773 - DNA, 25 bp, Homo sapien
gaaacacactggacgatgagcttcc

SEQ ID NO: 2752774 - DNA, 25 bp, Homo sapien
tgaggaatactgaagtctacttggg

SEQ ID NO: 2752775 - DNA, 25 bp, Homo sapien
taggaactgaatactgccagagggt

SEQ ID NO: 2752776 - DNA, 25 bp, Homo sapien
gaatactgccagagggtcccctgga

SEQ ID NO: 2752777 - DNA, 25 bp, Homo sapien
ttacagcttaacttctaaccttgta

SEQ ID NO: 2752778 - DNA, 25 bp, Homo sapien
cttctaaccttgtagagttgtggag

SEQ ID NO: 2752779 - DNA, 25 bp, Homo sapien
aagcatgttgagtgacaggtggtct

SEQ ID NO: 2752780 - DNA, 25 bp, Homo sapien
ttaactgtcccagttactggacagg

SEQ ID NO: 2752781 - DNA, 25 bp, Homo sapien
ctcagagggctgaacagaggagttg

SEQ ID NO: 2752782 - DNA, 25 bp, Homo sapien
gacaggtgggcttttgagttaatca

SEQ ID NO: 2752783 - DNA, 25 bp, Homo sapien
tgagtctcggtttcccagcgttgcc

SEQ ID NO: 2752784 - DNA, 25 bp, Homo sapien
cccagcgttgccttatcttttcctg

SEQ ID NO: 2752785 - DNA, 25 bp, Homo sapien
gagtagaacttggtgagtctcggtt

SEQ ID NO: 2752786 - DNA, 25 bp, Homo sapien
ttcaaataagagagtagaacttggt

SEQ ID NO: 2752787 - DNA, 25 bp, Homo sapien
tacatcatgatacatggtgtctgtc

SEQ ID NO: 2752788 - DNA, 25 bp, Homo sapien
tactccattgaacaggactgcaggc

SEQ ID NO: 2752789 - DNA, 25 bp, Homo sapien
tatgaccctaataaccctagataca

SEQ ID NO: 2752790 - DNA, 25 bp, Homo sapien
caggcatcgagcaaccagggatctt

SEQ ID NO: 2752791 - DNA, 25 bp, Homo sapien
attaccaagtcaccacgagccccac

SEQ ID NO: 2752792 - DNA, 25 bp, Homo sapien
cattaccaagtcaccacgagcccca

SEQ ID NO: 2752793 - DNA, 25 bp, Homo sapien
gagaaccgcagctctaacacagtga

SEQ ID NO: 2752794 - DNA, 25 bp, Homo sapien
tgtgaaggttctcaaggccctggtc

SEQ ID NO: 2752795 - DNA, 25 bp, Homo sapien
cacagtgattgcgagaggacaccca

SEQ ID NO: 2752796 - DNA, 25 bp, Homo sapien
gcttctgctcggactgacgtggcgt

SEQ ID NO: 2752797 - DNA, 25 bp, Homo sapien
acatttctggtcctgcccagctgct

SEQ ID NO: 2752798 - DNA, 25 bp, Homo sapien
catttctggtcctgcccagctgcta

SEQ ID NO: 2752799 - DNA, 25 bp, Homo sapien
tgtcagggatgcgtggaacagcaat

SEQ ID NO: 2752800 - DNA, 25 bp, Homo sapien
tcatccaggtgcacaggatactctg

SEQ ID NO: 2752801 - DNA, 25 bp, Homo sapien
aatgatgggacagcaaatgactggc

SEQ ID NO: 2752802 - DNA, 25 bp, Homo sapien
gaaaagcctgctgagccaacaagct

SEQ ID NO: 2752803 - DNA, 25 bp, Homo sapien
gagaatacagataggccagtcctcg

SEQ ID NO: 2752804 - DNA, 25 bp, Homo sapien
ggatggaacgtgtgtatcaacaaca

SEQ ID NO: 2752805 - DNA, 25 bp, Homo sapien
cggccgctcccggtctgacgttgga

SEQ ID NO: 2752806 - DNA, 25 bp, Homo sapien
agacttccttggtgattggagatgg

SEQ ID NO: 2752807 - DNA, 25 bp, Homo sapien
gaacagcacggagccattcatctgg

SEQ ID NO: 2752808 - DNA, 25 bp, Homo sapien
ggaattactcgatgtgcagaggctg

SEQ ID NO: 2752809 - DNA, 25 bp, Homo sapien
gccccttggccgcacttgggaacat

SEQ ID NO: 2752810 - DNA, 25 bp, Homo sapien
aacatcgtggacatcttccttcctc

SEQ ID NO: 2752811 - DNA, 25 bp, Homo sapien
gggaaggctgtccgttcatccttac

SEQ ID NO: 2752812 - DNA, 25 bp, Homo sapien
gtgggaaggctgtccgttcatcctt

SEQ ID NO: 2752813 - DNA, 25 bp, Homo sapien
tgggaaggctgtccgttcatcctta

SEQ ID NO: 2752814 - DNA, 25 bp, Homo sapien
cctggggactcaagtgtgctctgcg

SEQ ID NO: 2752815 - DNA, 25 bp, Homo sapien
cgccggagacgcaggcttgctcatt

SEQ ID NO: 2752816 - DNA, 25 bp, Homo sapien
tctttccccaggtgcgccggagacg

SEQ ID NO: 2752817 - DNA, 25 bp, Homo sapien
tgtgctctgcggagtgagtcacagc

SEQ ID NO: 2752818 - DNA, 25 bp, Homo sapien
ctggcaatcggcgctcccctttgga

SEQ ID NO: 2752819 - DNA, 25 bp, Homo sapien
caatcggcgctcccctttggaaaca

SEQ ID NO: 2752820 - DNA, 25 bp, Homo sapien
ggcaatcggcgctcccctttggaaa

SEQ ID NO: 2752821 - DNA, 25 bp, Homo sapien
tggcaatcggcgctcccctttggaa

SEQ ID NO: 2752822 - DNA, 25 bp, Homo sapien
ccccagccgctttcagccggcacct

SEQ ID NO: 2752823 - DNA, 25 bp, Homo sapien
tggtttctaccccagccgctttcag

SEQ ID NO: 2752824 - DNA, 25 bp, Homo sapien
agccggcacctgcatgggactgcct

SEQ ID NO: 2752825 - DNA, 25 bp, Homo sapien
cagccgctttcagccggcacctgca

SEQ ID NO: 2752826 - DNA, 25 bp, Homo sapien
tcattgctggcttgggtccatgtct

SEQ ID NO: 2752827 - DNA, 25 bp, Homo sapien
ggtccatgtctgtggtcaacttcac

SEQ ID NO: 2752828 - DNA, 25 bp, Homo sapien
ttgctggcttgggtccatgtctgtg

SEQ ID NO: 2752829 - DNA, 25 bp, Homo sapien
gggtccatgtctgtggtcaacttca

SEQ ID NO: 2752830 - DNA, 25 bp, Homo sapien
gatgatctggcccttgttgaaggcc

SEQ ID NO: 2752831 - DNA, 25 bp, Homo sapien
tcattctgcgcggtgtagtcgtaca

SEQ ID NO: 2752832 - DNA, 25 bp, Homo sapien
gagccccacttgtccattgacttct

SEQ ID NO: 2752833 - DNA, 25 bp, Homo sapien
ataattggatgggaagagccccact

SEQ ID NO: 2752834 - DNA, 25 bp, Homo sapien
gaagctttacataattagctgggaa

SEQ ID NO: 2752835 - DNA, 25 bp, Homo sapien
tgggaaccagcctatctggcgcttt

SEQ ID NO: 2752836 - DNA, 25 bp, Homo sapien
ggagtgattttgctcgtcccagggc

SEQ ID NO: 2752837 - DNA, 25 bp, Homo sapien
cgtcccagggcttagaagctttaca

SEQ ID NO: 2752838 - DNA, 25 bp, Homo sapien
gaagggaagactccggccttgtcgc

SEQ ID NO: 2752839 - DNA, 25 bp, Homo sapien
ggccttgtcgcccactgttcctgtc

SEQ ID NO: 2752840 - DNA, 25 bp, Homo sapien
ctctgaatctttaagcctcacatag

SEQ ID NO: 2752841 - DNA, 25 bp, Homo sapien
ctcacatagttagaagggaagactc

SEQ ID NO: 2752842 - DNA, 25 bp, Homo sapien
cagaactctggtaagtgtacatggc

SEQ ID NO: 2752843 - DNA, 25 bp, Homo sapien
tcttggtaaccaaaatcacatctcc

SEQ ID NO: 2752844 - DNA, 25 bp, Homo sapien
cacatctccttgctgaaaggttaaa

SEQ ID NO: 2752845 - DNA, 25 bp, Homo sapien
gaaaggttaaatctccttgctcaga

SEQ ID NO: 2752846 - DNA, 25 bp, Homo sapien
cagaccatctgggcccaaatctttc

SEQ ID NO: 2752847 - DNA, 25 bp, Homo sapien
aatctttccaatcctggtaagaata

SEQ ID NO: 2752848 - DNA, 25 bp, Homo sapien
ccaaatctttccaatcctggtaaga

SEQ ID NO: 2752849 - DNA, 25 bp, Homo sapien
caacagcgtcccagaccatctgggc

SEQ ID NO: 2752850 - DNA, 25 bp, Homo sapien
gccttctgtgaaacaatggagcctc

SEQ ID NO: 2752851 - DNA, 25 bp, Homo sapien
aaaagctagggcgacaggaaacgtg

SEQ ID NO: 2752852 - DNA, 25 bp, Homo sapien
tccagccacttggaactaggagaaa

SEQ ID NO: 2752853 - DNA, 25 bp, Homo sapien
tgcagcccgtgctggcatcctcagg

SEQ ID NO: 2752854 - DNA, 25 bp, Homo sapien
gagagtggcatgctcctgaccctcg

SEQ ID NO: 2752855 - DNA, 25 bp, Homo sapien
agagagtggcatgctcctgaccctc

SEQ ID NO: 2752856 - DNA, 25 bp, Homo sapien
aacagtatgcaagggggtcttattt

SEQ ID NO: 2752857 - DNA, 25 bp, Homo sapien
ggtcttatttgagactccctgccca

SEQ ID NO: 2752858 - DNA, 25 bp, Homo sapien
gctgcactggtaacaagtcccatga

SEQ ID NO: 2752859 - DNA, 25 bp, Homo sapien
tgggctgcactggtaacaagtccca

SEQ ID NO: 2752860 - DNA, 25 bp, Homo sapien
tgcactggtaacaagtcccatgagg

SEQ ID NO: 2752861 - DNA, 25 bp, Homo sapien
ggctgcactggtaacaagtcccatg

SEQ ID NO: 2752862 - DNA, 25 bp, Homo sapien
tctttgaaatggtgtcgaggtggca

SEQ ID NO: 2752863 - DNA, 25 bp, Homo sapien
cgaaaacattcaaggcgctgtgctt

SEQ ID NO: 2752864 - DNA, 25 bp, Homo sapien
gaactccaggacacatttgaatagg

SEQ ID NO: 2752865 - DNA, 25 bp, Homo sapien
gaaaacgatgtgctcctcttggtaa

SEQ ID NO: 2752866 - DNA, 25 bp, Homo sapien
tgccatcctgctgactagctcccct

SEQ ID NO: 2752867 - DNA, 25 bp, Homo sapien
catcctgctgactagctcccctgag

SEQ ID NO: 2752868 - DNA, 25 bp, Homo sapien
ccatcctgctgactagctcccctga

SEQ ID NO: 2752869 - DNA, 25 bp, Homo sapien
gccatcctgctgactagctcccctg

SEQ ID NO: 2752870 - DNA, 25 bp, Homo sapien
aacataagcctttacggtgacactg

SEQ ID NO: 2752871 - DNA, 25 bp, Homo sapien
ctagcaggtgataacgtttgtttgg

SEQ ID NO: 2752872 - DNA, 25 bp, Homo sapien
acataagcctttacggtgacactgc

SEQ ID NO: 2752873 - DNA, 25 bp, Homo sapien
cgtttgtttggtaattgaacataag

SEQ ID NO: 2752874 - DNA, 25 bp, Homo sapien
cattcacgctggcttttcttaacac

SEQ ID NO: 2752875 - DNA, 25 bp, Homo sapien
tccagtcttgaaaccgcagcatgct

SEQ ID NO: 2752876 - DNA, 25 bp, Homo sapien
ccttcgcatcaaaccacattctgtg

SEQ ID NO: 2752877 - DNA, 25 bp, Homo sapien
tgtcaaagccctgcacagtagctct

SEQ ID NO: 2752878 - DNA, 25 bp, Homo sapien
gaagagactctgtaccctttggcca

SEQ ID NO: 2752879 - DNA, 25 bp, Homo sapien
gtagtactccactatgtggctatac

SEQ ID NO: 2752880 - DNA, 25 bp, Homo sapien
cacaagtaatctttggtgactggct

SEQ ID NO: 2752881 - DNA, 25 bp, Homo sapien
cacacaattcgcctaaaagtgtata

SEQ ID NO: 2752882 - DNA, 25 bp, Homo sapien
ggcaaacattttggatttaatgatc

SEQ ID NO: 2752883 - DNA, 25 bp, Homo sapien
actgataaactcatttaggcaaaca

SEQ ID NO: 2752884 - DNA, 25 bp, Homo sapien
tgatctaaagctcacagatgcatgc

SEQ ID NO: 2752885 - DNA, 25 bp, Homo sapien
gaagttaacaactgataaactcatt

SEQ ID NO: 2752886 - DNA, 25 bp, Homo sapien
aagcattaaggatgcttctggattt

SEQ ID NO: 2752887 - DNA, 25 bp, Homo sapien
agactgagaagcattaaggatgctt

SEQ ID NO: 2752888 - DNA, 25 bp, Homo sapien
gactgagaagcattaaggatgcttc

SEQ ID NO: 2752889 - DNA, 25 bp, Homo sapien
tgagaagcattaaggatgcttctgg

SEQ ID NO: 2752890 - DNA, 25 bp, Homo sapien
cagggcaggggtctgcacaggcctg

SEQ ID NO: 2752891 - DNA, 25 bp, Homo sapien
gggcaggggtctgcacaggcctgac

SEQ ID NO: 2752892 - DNA, 25 bp, Homo sapien
gcagggcaggggtctgcacaggcct

SEQ ID NO: 2752893 - DNA, 25 bp, Homo sapien
agggcaggggtctgcacaggcctga

SEQ ID NO: 2752894 - DNA, 25 bp, Homo sapien
ctgggtgctgctccgaaaggcaggc

SEQ ID NO: 2752895 - DNA, 25 bp, Homo sapien
tggagcgcggcatcccctcctgggt

SEQ ID NO: 2752896 - DNA, 25 bp, Homo sapien
cagcgctgccaaccaagtctgggtc

SEQ ID NO: 2752897 - DNA, 25 bp, Homo sapien
accaagtctgggtctctaaaagcca

SEQ ID NO: 2752898 - DNA, 25 bp, Homo sapien
cttaagttgattagatgggaaacca

SEQ ID NO: 2752899 - DNA, 25 bp, Homo sapien
tacatgccggcttcccttaagttga

SEQ ID NO: 2752900 - DNA, 25 bp, Homo sapien
aaacaccgtctttcaagtgtgaggc

SEQ ID NO: 2752901 - DNA, 25 bp, Homo sapien
tgaggctgtgccatgctccctcagg

SEQ ID NO: 2752902 - DNA, 25 bp, Homo sapien
ggtggttggcagctgctcacgacac

SEQ ID NO: 2752903 - DNA, 25 bp, Homo sapien
tgctcacgacacagttgctgacctg

SEQ ID NO: 2752904 - DNA, 25 bp, Homo sapien
cgtgaactggagaacagcaccagaa

SEQ ID NO: 2752905 - DNA, 25 bp, Homo sapien
cagctggcagacgtgaactggagaa

SEQ ID NO: 2752906 - DNA, 25 bp, Homo sapien
actgttctggagtttcgtctgacta

SEQ ID NO: 2752907 - DNA, 25 bp, Homo sapien
gtctgactaggtgaaccctctggct

SEQ ID NO: 2752908 - DNA, 25 bp, Homo sapien
tctggcttttcgaggacgcagggta

SEQ ID NO: 2752909 - DNA, 25 bp, Homo sapien
aaccctctggcttttcgaggacgca

SEQ ID NO: 2752910 - DNA, 25 bp, Homo sapien
tgatgcacccaagtgacaatggacc

SEQ ID NO: 2752911 - DNA, 25 bp, Homo sapien
taggacatctctagacaggaaactc

SEQ ID NO: 2752912 - DNA, 25 bp, Homo sapien
gccgtgccgagatctcatgccagaa

SEQ ID NO: 2752913 - DNA, 25 bp, Homo sapien
taaaaatcggaggacaacctgatgc

SEQ ID NO: 2752914 - DNA, 25 bp, Homo sapien
gctttttcggcttttctcatgggtg

SEQ ID NO: 2752915 - DNA, 25 bp, Homo sapien
ccccatctcacgagagagggaaatt

SEQ ID NO: 2752916 - DNA, 25 bp, Homo sapien
ggaaatttggcattgctgttccctg

SEQ ID NO: 2752917 - DNA, 25 bp, Homo sapien
ctcatgggtgcctcatcagcctgca

SEQ ID NO: 2752918 - DNA, 25 bp, Homo sapien
tcttactctcccacaggtgttgaga

SEQ ID NO: 2752919 - DNA, 25 bp, Homo sapien
tttattggcccatactaaaaagcat

SEQ ID NO: 2752920 - DNA, 25 bp, Homo sapien
gttttctcctaaccttaatctcatc

SEQ ID NO: 2752921 - DNA, 25 bp, Homo sapien
taaaaagcatgcaatgactgaggtt

SEQ ID NO: 2752922 - DNA, 25 bp, Homo sapien
cataaacaaggtttgggctggagct

SEQ ID NO: 2752923 - DNA, 25 bp, Homo sapien
aattctgctaatggcacctctaggg

SEQ ID NO: 2752924 - DNA, 25 bp, Homo sapien
gatttgggcgaaactgctggttctc

SEQ ID NO: 2752925 - DNA, 25 bp, Homo sapien
gggaaataccaagtgcagcagagcc

SEQ ID NO: 2752926 - DNA, 25 bp, Homo sapien
ttctggtgagccacctgcgcagccg

SEQ ID NO: 2752927 - DNA, 25 bp, Homo sapien
ttcttggggaaggatgcttgtccat

SEQ ID NO: 2752928 - DNA, 25 bp, Homo sapien
tccatggaggcatgcggcttctggt

SEQ ID NO: 2752929 - DNA, 25 bp, Homo sapien
gaaggatgcttgtccatggaggcat

SEQ ID NO: 2752930 - DNA, 25 bp, Homo sapien
ctgtcaggaaacacggaaagctcag

SEQ ID NO: 2752931 - DNA, 25 bp, Homo sapien
aaagctcaggttaatcaataggaag

SEQ ID NO: 2752932 - DNA, 25 bp, Homo sapien
caggttaatcaataggaagcatggg

SEQ ID NO: 2752933 - DNA, 25 bp, Homo sapien
tcaggaaacacggaaagctcaggtt

SEQ ID NO: 2752934 - DNA, 25 bp, Homo sapien
gatagcaattgtgtgtgaggaagcc

SEQ ID NO: 2752935 - DNA, 25 bp, Homo sapien
attgtgtgtgaggaagcctcaggcc

SEQ ID NO: 2752936 - DNA, 25 bp, Homo sapien
agcgtccctgcggaaggatagcaat

SEQ ID NO: 2752937 - DNA, 25 bp, Homo sapien
tccctgcggaaggatagcaattgtg

SEQ ID NO: 2752938 - DNA, 25 bp, Homo sapien
gaagcatggggtttgtatgtgagga

SEQ ID NO: 2752939 - DNA, 25 bp, Homo sapien
gcatggggtttgtatgtgaggaagc

SEQ ID NO: 2752940 - DNA, 25 bp, Homo sapien
aagcatggggtttgtatgtgaggaa

SEQ ID NO: 2752941 - DNA, 25 bp, Homo sapien
catggggtttgtatgtgaggaagcc

SEQ ID NO: 2752942 - DNA, 25 bp, Homo sapien
acgtccaggccagcgcccatcaacg

SEQ ID NO: 2752943 - DNA, 25 bp, Homo sapien
gaggaacgtccaggccagcgcccat

SEQ ID NO: 2752944 - DNA, 25 bp, Homo sapien
gcatggcggttgtatgtgaggaacg

SEQ ID NO: 2752945 - DNA, 25 bp, Homo sapien
tatgtgaggaacgtccaggccagcg

SEQ ID NO: 2752946 - DNA, 25 bp, Homo sapien
gcaggaagcatggtgtttgtgggtg

SEQ ID NO: 2752947 - DNA, 25 bp, Homo sapien
gaagcatggtgtttgtgggtgagga

SEQ ID NO: 2752948 - DNA, 25 bp, Homo sapien
catggtgtttgtgggtgaggaaccc

SEQ ID NO: 2752949 - DNA, 25 bp, Homo sapien
gcatggtgtttgtgggtgaggaacc

SEQ ID NO: 2752950 - DNA, 25 bp, Homo sapien
ggaagcatggtgtttgtgggtgagg

SEQ ID NO: 2752951 - DNA, 25 bp, Homo sapien
gcaggaagcatggtgtttgtgggtg

SEQ ID NO: 2752952 - DNA, 25 bp, Homo sapien
agtgtccctgcaggaagcatggtgt

SEQ ID NO: 2752953 - DNA, 25 bp, Homo sapien
aagcatggtgtttgtgggtgaggaa

SEQ ID NO: 2752954 - DNA, 25 bp, Homo sapien
ggggtatgtatgtgaggaagctcca

SEQ ID NO: 2752955 - DNA, 25 bp, Homo sapien
tgcaggaagcatggggtatgtatgt

SEQ ID NO: 2752956 - DNA, 25 bp, Homo sapien
cgtccctgcaggaagcatggggtat

SEQ ID NO: 2752957 - DNA, 25 bp, Homo sapien
ggtatgtatgtgaggaagctccagg

SEQ ID NO: 2752958 - DNA, 25 bp, Homo sapien
catggcagttgtatgtgaggaagcc

SEQ ID NO: 2752959 - DNA, 25 bp, Homo sapien
gcatggcagttgtatgtgaggaagc

SEQ ID NO: 2752960 - DNA, 25 bp, Homo sapien
aagcatggcagttgtatgtgaggaa

SEQ ID NO: 2752961 - DNA, 25 bp, Homo sapien
aggaagcatggcagttgtatgtgag

SEQ ID NO: 2752962 - DNA, 25 bp, Homo sapien
acaggaagcatggtgtttgtgggtg

SEQ ID NO: 2752963 - DNA, 25 bp, Homo sapien
tgtgggtgaggaagccccagaccag

SEQ ID NO: 2752964 - DNA, 25 bp, Homo sapien
tgaggaagccccagaccagcgccca

SEQ ID NO: 2752965 - DNA, 25 bp, Homo sapien
tttgtgggtgaggaagccccagacc

SEQ ID NO: 2752966 - DNA, 25 bp, Homo sapien
ggtttgtatgtgtggaaactacagg

SEQ ID NO: 2752967 - DNA, 25 bp, Homo sapien
tttgtatgtgtggaaactacaggcc

SEQ ID NO: 2752968 - DNA, 25 bp, Homo sapien
gtttgtatgtgtggaaactacaggc

SEQ ID NO: 2752969 - DNA, 25 bp, Homo sapien
ccagagcccaccagcgtcgctgtag

SEQ ID NO: 2752970 - DNA, 25 bp, Homo sapien
gtaggaagcatggtgtttgtgggtg

SEQ ID NO: 2752971 - DNA, 25 bp, Homo sapien
tttgtgggtgaggaagccccaggcc

SEQ ID NO: 2752972 - DNA, 25 bp, Homo sapien
ctgtaggaagcatggtgtttgtggg

SEQ ID NO: 2752973 - DNA, 25 bp, Homo sapien
gaggaagccccaggccaacgcccac

SEQ ID NO: 2752974 - DNA, 25 bp, Homo sapien
cagcgcccaccagtgtcgctggagg

SEQ ID NO: 2752975 - DNA, 25 bp, Homo sapien
cgcccaccagtgtcgctggaggaag

SEQ ID NO: 2752976 - DNA, 25 bp, Homo sapien
gtatgtgagtaagccgaaggccagc

SEQ ID NO: 2752977 - DNA, 25 bp, Homo sapien
gtttgtatgtgagtaagccgaaggc

SEQ ID NO: 2752978 - DNA, 25 bp, Homo sapien
aagtctgtcccttgtgggtgttagg

SEQ ID NO: 2752979 - DNA, 25 bp, Homo sapien
cctgcagggcaggcgtggactgtga

SEQ ID NO: 2752980 - DNA, 25 bp, Homo sapien
gtggaagtctgtcccttgtgggtgt

SEQ ID NO: 2752981 - DNA, 25 bp, Homo sapien
ggaagtctgtcccttgtgggtgtta

SEQ ID NO: 2752982 - DNA, 25 bp, Homo sapien
tggaaaggtaaaggatgcgagtctg

SEQ ID NO: 2752983 - DNA, 25 bp, Homo sapien
cgagtctggcctgcggtctgcagaa

SEQ ID NO: 2752984 - DNA, 25 bp, Homo sapien
atgcgagtctggcctgcggtctgca

SEQ ID NO: 2752985 - DNA, 25 bp, Homo sapien
aaggtaaaggatgcgagtctggcct

SEQ ID NO: 2752986 - DNA, 25 bp, Homo sapien
ctggggaaacgcggcaatgaagaga

SEQ ID NO: 2752987 - DNA, 25 bp, Homo sapien
tggggaaacgcggcaatgaagagag

SEQ ID NO: 2752988 - DNA, 25 bp, Homo sapien
ggggaaacgcggcaatgaagagagc

SEQ ID NO: 2752989 - DNA, 25 bp, Homo sapien
cgggcgatgaccccagagatgaaca

SEQ ID NO: 2752990 - DNA, 25 bp, Homo sapien
gagatgaacacagtgggtttaggtg

SEQ ID NO: 2752991 - DNA, 25 bp, Homo sapien
cagagatgaacacagtgggtttagg

SEQ ID NO: 2752992 - DNA, 25 bp, Homo sapien
ccgggcgatgaccccagagatgaac

SEQ ID NO: 2752993 - DNA, 25 bp, Homo sapien
ctttattatggtggcctggagcaga

SEQ ID NO: 2752994 - DNA, 25 bp, Homo sapien
tggaggctaaaggagatccccagca

SEQ ID NO: 2752995 - DNA, 25 bp, Homo sapien
ttattgaaacgcagacaagcaaaac

SEQ ID NO: 2752996 - DNA, 25 bp, Homo sapien
tgaaaccaaaaagttgtgggactca

SEQ ID NO: 2752997 - DNA, 25 bp, Homo sapien
acgcagaggcgccatccagcagtag

SEQ ID NO: 2752998 - DNA, 25 bp, Homo sapien
ggagtggaactccaggacgcagagg

SEQ ID NO: 2752999 - DNA, 25 bp, Homo sapien
cctccatgttgggtgttcctgacag

SEQ ID NO: 2753000 - DNA, 25 bp, Homo sapien
actgaggacgggagtctggagccca

SEQ ID NO: 2753001 - DNA, 25 bp, Homo sapien
tctatgcctcgagtatgtacccgga

SEQ ID NO: 2753002 - DNA, 25 bp, Homo sapien
tggaaaacacacacggaagctgagg

SEQ ID NO: 2753003 - DNA, 25 bp, Homo sapien
tgtacccggagaaatgtgtgtgaac

SEQ ID NO: 2753004 - DNA, 25 bp, Homo sapien
tgatatgagatcatgacagctctgc

SEQ ID NO: 2753005 - DNA, 25 bp, Homo sapien
gatggaaaggccgtgaacttgccct

SEQ ID NO: 2753006 - DNA, 25 bp, Homo sapien
aggatggaaaggccgtgaacttgcc

SEQ ID NO: 2753007 - DNA, 25 bp, Homo sapien
tcaggatggaaaggccgtgaacttg

SEQ ID NO: 2753008 - DNA, 25 bp, Homo sapien
tggaaaggccgtgaacttgcccttg

SEQ ID NO: 2753009 - DNA, 25 bp, Homo sapien
gtcactcagtggcaagcttaggtca

SEQ ID NO: 2753010 - DNA, 25 bp, Homo sapien
tcttggggcacaaccaaaacagtgt

SEQ ID NO: 2753011 - DNA, 25 bp, Homo sapien
acagtgtgcattccacctaattaac

SEQ ID NO: 2753012 - DNA, 25 bp, Homo sapien
ggagcagggacagggaatgtcactc

SEQ ID NO: 2753013 - DNA, 25 bp, Homo sapien
gacaggataaaatgccagaaacgct

SEQ ID NO: 2753014 - DNA, 25 bp, Homo sapien
gcagacagacaggataaaatgccag

SEQ ID NO: 2753015 - DNA, 25 bp, Homo sapien
aaaatgccagaaacgctcagtgact

SEQ ID NO: 2753016 - DNA, 25 bp, Homo sapien
agaaacgctcagtgactgagtaacc

SEQ ID NO: 2753017 - DNA, 25 bp, Homo sapien
tcaagactgagtttgatggtctcat

SEQ ID NO: 2753018 - DNA, 25 bp, Homo sapien
catcaagactgagtttgatggtctc

SEQ ID NO: 2753019 - DNA, 25 bp, Homo sapien
ggaatgcagatatcatcaagactga

SEQ ID NO: 2753020 - DNA, 25 bp, Homo sapien
ctgtggaatgcagatatcatcaaga

SEQ ID NO: 2753021 - DNA, 25 bp, Homo sapien
tggctcaccacagctagttttgtgg

SEQ ID NO: 2753022 - DNA, 25 bp, Homo sapien
caccacagctagttttgtggggtcc

SEQ ID NO: 2753023 - DNA, 25 bp, Homo sapien
ggctcaccacagctagttttgtggg

SEQ ID NO: 2753024 - DNA, 25 bp, Homo sapien
cacagctagttttgtggggtcctta

SEQ ID NO: 2753025 - DNA, 25 bp, Homo sapien
ttctgtgcaacagggagggtccgat

SEQ ID NO: 2753026 - DNA, 25 bp, Homo sapien
tgtgcatctgactggtcagcctctt

SEQ ID NO: 2753027 - DNA, 25 bp, Homo sapien
agggtccgatgtgcatctgactggt

SEQ ID NO: 2753028 - DNA, 25 bp, Homo sapien
agtgcccttcttcaccccaaaatag

SEQ ID NO: 2753029 - DNA, 25 bp, Homo sapien
tcagcttagttaccacgaaggtgaa

SEQ ID NO: 2753030 - DNA, 25 bp, Homo sapien
caaaggcattactggagagttgtac

SEQ ID NO: 2753031 - DNA, 25 bp, Homo sapien
cctgggttcatggaagtctactcaa

SEQ ID NO: 2753032 - DNA, 25 bp, Homo sapien
taaatgtactctatcagcaggaagc

SEQ ID NO: 2753033 - DNA, 25 bp, Homo sapien
tttctggcgtgtggatcttccctcc

SEQ ID NO: 2753034 - DNA, 25 bp, Homo sapien
catcagtagatgacgtgttccacac

SEQ ID NO: 2753035 - DNA, 25 bp, Homo sapien
tgtgttgggtgaatagggctcatca

SEQ ID NO: 2753036 - DNA, 25 bp, Homo sapien
ttttccctctagacacagctccaga

SEQ ID NO: 2753037 - DNA, 25 bp, Homo sapien
tcacatatacagaagcgaccacatc

SEQ ID NO: 2753038 - DNA, 25 bp, Homo sapien
atcttatggatttaatacgtagtga

SEQ ID NO: 2753039 - DNA, 25 bp, Homo sapien
tatacagaagcgaccacatctgagg

SEQ ID NO: 2753040 - DNA, 25 bp, Homo sapien
taatacgtagtgatggtcctgggcc

SEQ ID NO: 2753041 - DNA, 25 bp, Homo sapien
ggcttcagcctggtgtagaaatccc

SEQ ID NO: 2753042 - DNA, 25 bp, Homo sapien
gtgtagaaatcccagacattctgct

SEQ ID NO: 2753043 - DNA, 25 bp, Homo sapien
tcagcctggtgtagaaatcccagac

SEQ ID NO: 2753044 - DNA, 25 bp, Homo sapien
cctggtgtagaaatcccagacattc

SEQ ID NO: 2753045 - DNA, 25 bp, Homo sapien
ggtgtccatggttcaaagtacaaag

SEQ ID NO: 2753046 - DNA, 25 bp, Homo sapien
tttgattctgaacacgtccacgctt

SEQ ID NO: 2753047 - DNA, 25 bp, Homo sapien
caggctcaagggtcatgttataaat

SEQ ID NO: 2753048 - DNA, 25 bp, Homo sapien
ggataaaactatggtggctctaaaa

SEQ ID NO: 2753049 - DNA, 25 bp, Homo sapien
tgtctccgcttcttatcactgtcat

SEQ ID NO: 2753050 - DNA, 25 bp, Homo sapien
tcctctccactaacaggcatttggt

SEQ ID NO: 2753051 - DNA, 25 bp, Homo sapien
ctggagggacataggagcttgtctc

SEQ ID NO: 2753052 - DNA, 25 bp, Homo sapien
tggtgttcacacactgtataggacg

SEQ ID NO: 2753053 - DNA, 25 bp, Homo sapien
tgggttagggactgaggtgaagact

SEQ ID NO: 2753054 - DNA, 25 bp, Homo sapien
ttagggactgaggtgaagactggtc

SEQ ID NO: 2753055 - DNA, 25 bp, Homo sapien
ctgggttagggactgaggtgaagac

SEQ ID NO: 2753056 - DNA, 25 bp, Homo sapien
ggttagggactgaggtgaagactgg

SEQ ID NO: 2753057 - DNA, 25 bp, Homo sapien
tttgaggcgctatgtacacgtagac

SEQ ID NO: 2753058 - DNA, 25 bp, Homo sapien
ggcgctatgtacacgtagacatcta

SEQ ID NO: 2753059 - DNA, 25 bp, Homo sapien
tacacgtagacatctacatgagagc

SEQ ID NO: 2753060 - DNA, 25 bp, Homo sapien
ctacatgagagccttccttcttcca

SEQ ID NO: 2753061 - DNA, 25 bp, Homo sapien
tccaggtagaggacagcgcagggcg

SEQ ID NO: 2753062 - DNA, 25 bp, Homo sapien
caattgcttctttacacagcagcct

SEQ ID NO: 2753063 - DNA, 25 bp, Homo sapien
caaaaaatacagcagcggtgaagag

SEQ ID NO: 2753064 - DNA, 25 bp, Homo sapien
ggcacagggagccttcccctggctg

SEQ ID NO: 2753065 - DNA, 25 bp, Homo sapien
cactgacctccttttcatacaggtg

SEQ ID NO: 2753066 - DNA, 25 bp, Homo sapien
tcagtctttcctgcgcagtgtacag

SEQ ID NO: 2753067 - DNA, 25 bp, Homo sapien
agagcccgttgcctgtgatccctca

SEQ ID NO: 2753068 - DNA, 25 bp, Homo sapien
tgtgtggcctttcactgattctaga

SEQ ID NO: 2753069 - DNA, 25 bp, Homo sapien
gaactttgccctgatgccaggcgat

SEQ ID NO: 2753070 - DNA, 25 bp, Homo sapien
ttgaactttgccctgatgccaggcg

SEQ ID NO: 2753071 - DNA, 25 bp, Homo sapien
tcatcagaatttcatttgaactttg

SEQ ID NO: 2753072 - DNA, 25 bp, Homo sapien
actttgccctgatgccaggcgatcc

SEQ ID NO: 2753073 - DNA, 25 bp, Homo sapien
tccagcgtttatgctctgtgagagc

SEQ ID NO: 2753074 - DNA, 25 bp, Homo sapien
agcgtttatgctctgtgagagccat

SEQ ID NO: 2753075 - DNA, 25 bp, Homo sapien
ctccagcgtttatgctctgtgagag

SEQ ID NO: 2753076 - DNA, 25 bp, Homo sapien
ccagcgtttatgctctgtgagagcc

SEQ ID NO: 2753077 - DNA, 25 bp, Homo sapien
gctgctgtacttgcactagggagta

SEQ ID NO: 2753078 - DNA, 25 bp, Homo sapien
tttgcttgtgtccaaagtgcaggga

SEQ ID NO: 2753079 - DNA, 25 bp, Homo sapien
tcactccagttctaaacagtgcctg

SEQ ID NO: 2753080 - DNA, 25 bp, Homo sapien
tggagaggttaaagacacagtagcc

SEQ ID NO: 2753081 - DNA, 25 bp, Homo sapien
tacagcaaaatcttctgagcttgag

SEQ ID NO: 2753082 - DNA, 25 bp, Homo sapien
aattaccaggcagttcctgaagacc

SEQ ID NO: 2753083 - DNA, 25 bp, Homo sapien
cctgaagacccagcaaaggtacttt

SEQ ID NO: 2753084 - DNA, 25 bp, Homo sapien
cttgagaaacgcaggcaaactggca

SEQ ID NO: 2753085 - DNA, 25 bp, Homo sapien
catggaattccaacaaggagctggc

SEQ ID NO: 2753086 - DNA, 25 bp, Homo sapien
tcacacgtaacaattaatttgatga

SEQ ID NO: 2753087 - DNA, 25 bp, Homo sapien
gacaggaaacctctcgataatacac

SEQ ID NO: 2753088 - DNA, 25 bp, Homo sapien
tcccaaattggacctgacaggaaac

SEQ ID NO: 2753089 - DNA, 25 bp, Homo sapien
gggatcagtgcgtttctggtagtac

SEQ ID NO: 2753090 - DNA, 25 bp, Homo sapien
aagtattgctaatcttatgtaatag

SEQ ID NO: 2753091 - DNA, 25 bp, Homo sapien
cgtttctggtagtacaaaggatagt

SEQ ID NO: 2753092 - DNA, 25 bp, Homo sapien
gcatttaagtattgctaatcttatg

SEQ ID NO: 2753093 - DNA, 25 bp, Homo sapien
cactgccgtggtgtcttataaagcc

SEQ ID NO: 2753094 - DNA, 25 bp, Homo sapien
ggctcctgcccacaagatccgaaga

SEQ ID NO: 2753095 - DNA, 25 bp, Homo sapien
tagcctctgacatggttatgccggg

SEQ ID NO: 2753096 - DNA, 25 bp, Homo sapien
ttatgccgggtcctgagctcgggct

SEQ ID NO: 2753097 - DNA, 25 bp, Homo sapien
tgagaaccacccacaatggaaccac

SEQ ID NO: 2753098 - DNA, 25 bp, Homo sapien
gaaccacccacaatggaaccacagt

SEQ ID NO: 2753099 - DNA, 25 bp, Homo sapien
gagaaccacccacaatggaaccaca

SEQ ID NO: 2753100 - DNA, 25 bp, Homo sapien
agcttgtagtctgagaaccacccac

SEQ ID NO: 2753101 - DNA, 25 bp, Homo sapien
gaaagtcctgtcaccacagtgagct

SEQ ID NO: 2753102 - DNA, 25 bp, Homo sapien
gagacttcttcaaggagtcaatgtg

SEQ ID NO: 2753103 - DNA, 25 bp, Homo sapien
caatgtgcaggctgaacctagccat

SEQ ID NO: 2753104 - DNA, 25 bp, Homo sapien
accacagtgagcttccgctttctca

SEQ ID NO: 2753105 - DNA, 25 bp, Homo sapien
cattctaactttctatgagtctgac

SEQ ID NO: 2753106 - DNA, 25 bp, Homo sapien
ccatgacgtggcatatgacaggatt

SEQ ID NO: 2753107 - DNA, 25 bp, Homo sapien
gttgaataatattcctgcgtgtgtg

SEQ ID NO: 2753108 - DNA, 25 bp, Homo sapien
gtcatcttgcaaatctgatactctg

SEQ ID NO: 2753109 - DNA, 25 bp, Homo sapien
ccaagcactggagagttgatttaaa

SEQ ID NO: 2753110 - DNA, 25 bp, Homo sapien
gatcaaaacagtcctgccggtgtag

SEQ ID NO: 2753111 - DNA, 25 bp, Homo sapien
cctggaagggagaactgatagcccc

SEQ ID NO: 2753112 - DNA, 25 bp, Homo sapien
tgagacaattgaagtcaacagggct

SEQ ID NO: 2753113 - DNA, 25 bp, Homo sapien
gccacaggcaaaacgcttcctttta

SEQ ID NO: 2753114 - DNA, 25 bp, Homo sapien
gggcttcacacgcagcggatgctgc

SEQ ID NO: 2753115 - DNA, 25 bp, Homo sapien
tctgtcaactttctgccgcccaagt

SEQ ID NO: 2753116 - DNA, 25 bp, Homo sapien
tttctgccgcccaagttgccacagg

SEQ ID NO: 2753117 - DNA, 25 bp, Homo sapien
cacacacacacgaatgggtttgaac

SEQ ID NO: 2753118 - DNA, 25 bp, Homo sapien
gaggtcttgaatctaacttaagcag

SEQ ID NO: 2753119 - DNA, 25 bp, Homo sapien
acttaagcagcaatacagcccaggc

SEQ ID NO: 2753120 - DNA, 25 bp, Homo sapien
tctgtcattcttttacacaccaggt

SEQ ID NO: 2753121 - DNA, 25 bp, Homo sapien
gttggagctgacttacactggcatg

SEQ ID NO: 2753122 - DNA, 25 bp, Homo sapien
gaattatggctgacttctcgctgta

SEQ ID NO: 2753123 - DNA, 25 bp, Homo sapien
tctcgctgtacacaatggaagccag

SEQ ID NO: 2753124 - DNA, 25 bp, Homo sapien
caatttttccaagctgatgacacca

SEQ ID NO: 2753125 - DNA, 25 bp, Homo sapien
gttgtttaacccacagcagtaaaca

SEQ ID NO: 2753126 - DNA, 25 bp, Homo sapien
tcaggaatgtatcctagcaatttgg

SEQ ID NO: 2753127 - DNA, 25 bp, Homo sapien
aaagtcaagaggacaagtgctaaca

SEQ ID NO: 2753128 - DNA, 25 bp, Homo sapien
tgctgtgtcgagttgtttaacccac

SEQ ID NO: 2753129 - DNA, 25 bp, Homo sapien
ctgcagtcggcctgcttcaaaatat

SEQ ID NO: 2753130 - DNA, 25 bp, Homo sapien
tgcagtcggcctgcttcaaaatatc

SEQ ID NO: 2753131 - DNA, 25 bp, Homo sapien
cctgcagtcggcctgcttcaaaata

SEQ ID NO: 2753132 - DNA, 25 bp, Homo sapien
caggcaaggcgatatctcttgccct

SEQ ID NO: 2753133 - DNA, 25 bp, Homo sapien
aggcaaggcgatatctcttgccctc

SEQ ID NO: 2753134 - DNA, 25 bp, Homo sapien
ttttccaggcaaggcgatatctctt

SEQ ID NO: 2753135 - DNA, 25 bp, Homo sapien
tccaggcaaggcgatatctcttgcc

SEQ ID NO: 2753136 - DNA, 25 bp, Homo sapien
ctagcattttctttaaactgccttc

SEQ ID NO: 2753137 - DNA, 25 bp, Homo sapien
actgggactgaatctttacactgct

SEQ ID NO: 2753138 - DNA, 25 bp, Homo sapien
ccgtgcccggacaattctagcattt

SEQ ID NO: 2753139 - DNA, 25 bp, Homo sapien
tttaaaccagaactgggactgaatc

SEQ ID NO: 2753140 - DNA, 25 bp, Homo sapien
ccctgaacccaactggaaatctgaa

SEQ ID NO: 2753141 - DNA, 25 bp, Homo sapien
tgcaaagtcgagagaaatggattcc

SEQ ID NO: 2753142 - DNA, 25 bp, Homo sapien
cgagctcccgcagaggtgtgttagt

SEQ ID NO: 2753143 - DNA, 25 bp, Homo sapien
tagtgctttcttctacgtggacgag

SEQ ID NO: 2753144 - DNA, 25 bp, Homo sapien
aaaataggtgttgagcaggggagga

SEQ ID NO: 2753145 - DNA, 25 bp, Homo sapien
ggaaaataggtgttgagcaggggag

SEQ ID NO: 2753146 - DNA, 25 bp, Homo sapien
ttaaggaaaataggtgttgagcagg

SEQ ID NO: 2753147 - DNA, 25 bp, Homo sapien
aaggaaaataggtgttgagcagggg

SEQ ID NO: 2753148 - DNA, 25 bp, Homo sapien
ctgatgatccgagggaggaaatgct

SEQ ID NO: 2753149 - DNA, 25 bp, Homo sapien
cccagtcactcataagggcatggcc

SEQ ID NO: 2753150 - DNA, 25 bp, Homo sapien
taagggcatggccttgtaattctag

SEQ ID NO: 2753151 - DNA, 25 bp, Homo sapien
cagaggtatcatataaggacaccca

SEQ ID NO: 2753152 - DNA, 25 bp, Homo sapien
aggaagggaggcacactggctaaac

SEQ ID NO: 2753153 - DNA, 25 bp, Homo sapien
ggtgcaagaatttgcctacttcgtc

SEQ ID NO: 2753154 - DNA, 25 bp, Homo sapien
tggtggtccagccttgggaagaggg

SEQ ID NO: 2753155 - DNA, 25 bp, Homo sapien
gaggcacactggctaaacccaggca

SEQ ID NO: 2753156 - DNA, 25 bp, Homo sapien
ggaaaacatgctcaagagtcgctag

SEQ ID NO: 2753157 - DNA, 25 bp, Homo sapien
catgctcaagagtcgctagcatcat

SEQ ID NO: 2753158 - DNA, 25 bp, Homo sapien
atgttaatgcttaaccgaatagggt

SEQ ID NO: 2753159 - DNA, 25 bp, Homo sapien
tcaagagtcgctagcatcatcccac

SEQ ID NO: 2753160 - DNA, 25 bp, Homo sapien
ttctgcacaattcgcattccaccag

SEQ ID NO: 2753161 - DNA, 25 bp, Homo sapien
tgtttctgcacaattcgcattccac

SEQ ID NO: 2753162 - DNA, 25 bp, Homo sapien
tgcacaattcgcattccaccagctt

SEQ ID NO: 2753163 - DNA, 25 bp, Homo sapien
acaattcgcattccaccagctttca

SEQ ID NO: 2753164 - DNA, 25 bp, Homo sapien
tcaagtattttgtcagagcagcagt

SEQ ID NO: 2753165 - DNA, 25 bp, Homo sapien
agcagcagtgtaacgagggcacaaa

SEQ ID NO: 2753166 - DNA, 25 bp, Homo sapien
tattttgtcagagcagcagtgtaac

SEQ ID NO: 2753167 - DNA, 25 bp, Homo sapien
tacagatccactcagaaactttcca

SEQ ID NO: 2753168 - DNA, 25 bp, Homo sapien
catcagggctacagtgttccatgaa

SEQ ID NO: 2753169 - DNA, 25 bp, Homo sapien
aaaaagccagcctcgcatggtagcc

SEQ ID NO: 2753170 - DNA, 25 bp, Homo sapien
aataccagttatcctccatcagggc

SEQ ID NO: 2753171 - DNA, 25 bp, Homo sapien
ggatgtgggccttactgagctttac

SEQ ID NO: 2753172 - DNA, 25 bp, Homo sapien
cgatacagtcaacttgccacaccat

SEQ ID NO: 2753173 - DNA, 25 bp, Homo sapien
tctctgccacaagacggctaacatc

SEQ ID NO: 2753174 - DNA, 25 bp, Homo sapien
caagacggctaacatcacgatacag

SEQ ID NO: 2753175 - DNA, 25 bp, Homo sapien
taacatcacgatacagtcaacttgc

SEQ ID NO: 2753176 - DNA, 25 bp, Homo sapien
gtggaccctgccgagtcacgaaaac

SEQ ID NO: 2753177 - DNA, 25 bp, Homo sapien
aacccaggccaactttctttatgct

SEQ ID NO: 2753178 - DNA, 25 bp, Homo sapien
tttaaactgagtggaccctgccgag

SEQ ID NO: 2753179 - DNA, 25 bp, Homo sapien
gcattttaaactgagtggaccctgc

SEQ ID NO: 2753180 - DNA, 25 bp, Homo sapien
gatggtgacgtttgctcccaggacc

SEQ ID NO: 2753181 - DNA, 25 bp, Homo sapien
tactggtcttcaatttccctgggag

SEQ ID NO: 2753182 - DNA, 25 bp, Homo sapien
gaaaatgacgactatttcctctggc

SEQ ID NO: 2753183 - DNA, 25 bp, Homo sapien
tcttctcaacggagaggacattcta

SEQ ID NO: 2753184 - DNA, 25 bp, Homo sapien
gcacagcagccccacggagtagatc

SEQ ID NO: 2753185 - DNA, 25 bp, Homo sapien
gctctaaccacttggagtccacgca

SEQ ID NO: 2753186 - DNA, 25 bp, Homo sapien
tctgtggcaggcaccgctctaacca

SEQ ID NO: 2753187 - DNA, 25 bp, Homo sapien
ttggagtccacgcatctttcactgc

SEQ ID NO: 2753188 - DNA, 25 bp, Homo sapien
tgacactgggactatgcttagcaaa

SEQ ID NO: 2753189 - DNA, 25 bp, Homo sapien
attcaatttctggtcctgactggtt

SEQ ID NO: 2753190 - DNA, 25 bp, Homo sapien
caatttctggtcctgactggttgac

SEQ ID NO: 2753191 - DNA, 25 bp, Homo sapien
gacactgggactatgcttagcaaat

SEQ ID NO: 2753192 - DNA, 25 bp, Homo sapien
tgcgcacagtacagagagctcagag

SEQ ID NO: 2753193 - DNA, 25 bp, Homo sapien
ctgctgcctgaaccggccaagagga

SEQ ID NO: 2753194 - DNA, 25 bp, Homo sapien
agtctgctgcctgaaccggccaaga

SEQ ID NO: 2753195 - DNA, 25 bp, Homo sapien
tgcatccctgcgcacagtacagaga

SEQ ID NO: 2753196 - DNA, 25 bp, Homo sapien
cattgaggcacaagtctgttatcca

SEQ ID NO: 2753197 - DNA, 25 bp, Homo sapien
atcctttagtgtagtgggccgcctt

SEQ ID NO: 2753198 - DNA, 25 bp, Homo sapien
tctgtaacatctaggaaagcgcatt

SEQ ID NO: 2753199 - DNA, 25 bp, Homo sapien
gaaaaggttcacacatggtcctctg

SEQ ID NO: 2753200 - DNA, 25 bp, Homo sapien
agagctcaccccgtaagtctaaagg

SEQ ID NO: 2753201 - DNA, 25 bp, Homo sapien
taccctgatgctgaagcgggacgtg

SEQ ID NO: 2753202 - DNA, 25 bp, Homo sapien
gatgacagatggtgacagccacccg

SEQ ID NO: 2753203 - DNA, 25 bp, Homo sapien
ccccagtgaagcgtgaagtgatgtc

SEQ ID NO: 2753204 - DNA, 25 bp, Homo sapien
gaattcccgccctatagcggaggac

SEQ ID NO: 2753205 - DNA, 25 bp, Homo sapien
gaaaaatattgcctactctggactg

SEQ ID NO: 2753206 - DNA, 25 bp, Homo sapien
gtgctggtgcagagaattcccgccc

SEQ ID NO: 2753207 - DNA, 25 bp, Homo sapien
gaacggctcctattcattgtgctgg

SEQ ID NO: 2753208 - DNA, 25 bp, Homo sapien
aacagacccgtctggacagaatcca

SEQ ID NO: 2753209 - DNA, 25 bp, Homo sapien
aacggaaacagacccgtctggacag

SEQ ID NO: 2753210 - DNA, 25 bp, Homo sapien
cagtgtccctccatatgggccgact

SEQ ID NO: 2753211 - DNA, 25 bp, Homo sapien
atatgggccgactgccactggaaag

SEQ ID NO: 2753212 - DNA, 25 bp, Homo sapien
gcggtcctcaggaagaaacgcttcg

SEQ ID NO: 2753213 - DNA, 25 bp, Homo sapien
gcaagcggggccgaagctccggcgg

SEQ ID NO: 2753214 - DNA, 25 bp, Homo sapien
gccgcccgcggtcctcaggaagaaa

SEQ ID NO: 2753215 - DNA, 25 bp, Homo sapien
tcctcaggaagaaacgcttcgccgc

SEQ ID NO: 2753216 - DNA, 25 bp, Homo sapien
tgtccagctttagtctctagtttcc

SEQ ID NO: 2753217 - DNA, 25 bp, Homo sapien
ggcgggtgtccagctttagtctcta

SEQ ID NO: 2753218 - DNA, 25 bp, Homo sapien
tctctagtttcccttcgggaggcga

SEQ ID NO: 2753219 - DNA, 25 bp, Homo sapien
cggcgggcgggtgtccagctttagt

SEQ ID NO: 2753220 - DNA, 25 bp, Homo sapien
gacggcatgcgcactgacgtcaccg

SEQ ID NO: 2753221 - DNA, 25 bp, Homo sapien
gcgggagaacgacgcgcgcgcgtgg

SEQ ID NO: 2753222 - DNA, 25 bp, Homo sapien
cgtgcgcgagtgagctcaggtgtga

SEQ ID NO: 2753223 - DNA, 25 bp, Homo sapien
ccgggtgagtgccactgccgttaag

SEQ ID NO: 2753224 - DNA, 25 bp, Homo sapien
gaatgtcatggtgtccttcttggct

SEQ ID NO: 2753225 - DNA, 25 bp, Homo sapien
ggtctgatttatggattcccctgaa

SEQ ID NO: 2753226 - DNA, 25 bp, Homo sapien
cacagttgaggagaagacgttgact

SEQ ID NO: 2753227 - DNA, 25 bp, Homo sapien
tgtgattgtgaacagctcctggtgt

SEQ ID NO: 2753228 - DNA, 25 bp, Homo sapien
ccttagaggaaggactcttgaagca

SEQ ID NO: 2753229 - DNA, 25 bp, Homo sapien
ccgggccttagaggaaggactcttg

SEQ ID NO: 2753230 - DNA, 25 bp, Homo sapien
gggccttagaggaaggactcttgaa

SEQ ID NO: 2753231 - DNA, 25 bp, Homo sapien
gccttagaggaaggactcttgaagc

SEQ ID NO: 2753232 - DNA, 25 bp, Homo sapien
aacctgctgcgctggtggaatttgg

SEQ ID NO: 2753233 - DNA, 25 bp, Homo sapien
cccgtgtccctgatgtcaaagccat

SEQ ID NO: 2753234 - DNA, 25 bp, Homo sapien
gagaccctgagacaggggtgaaatc

SEQ ID NO: 2753235 - DNA, 25 bp, Homo sapien
ctgagacaggggtgaaatcagaacc

SEQ ID NO: 2753236 - DNA, 25 bp, Homo sapien
tgtcagtgacacctgaggcaaagta

SEQ ID NO: 2753237 - DNA, 25 bp, Homo sapien
tcaaagcaaggattcctaggcagcc

SEQ ID NO: 2753238 - DNA, 25 bp, Homo sapien
gagctgctgtggcattgcattagtc

SEQ ID NO: 2753239 - DNA, 25 bp, Homo sapien
taaccgacaatgttgtcagtgacac

SEQ ID NO: 2753240 - DNA, 25 bp, Homo sapien
tccgcttgagtttgcctcctttttc

SEQ ID NO: 2753241 - DNA, 25 bp, Homo sapien
tttttctgtgtgaacatgcaaactc

SEQ ID NO: 2753242 - DNA, 25 bp, Homo sapien
gcagctctgaaaattcccacatgag

SEQ ID NO: 2753243 - DNA, 25 bp, Homo sapien
tgagaaagcgcatccatattccgct

SEQ ID NO: 2753244 - DNA, 25 bp, Homo sapien
tacagattagaataaaccctctcat

SEQ ID NO: 2753245 - DNA, 25 bp, Homo sapien
ctacagattagaataaaccctctca

SEQ ID NO: 2753246 - DNA, 25 bp, Homo sapien
ctttgttccagatagagtttctaag

SEQ ID NO: 2753247 - DNA, 25 bp, Homo sapien
tttctttgttccagatagagtttct

SEQ ID NO: 2753248 - DNA, 25 bp, Homo sapien
cagtaggtgtgccataggtgttagt

SEQ ID NO: 2753249 - DNA, 25 bp, Homo sapien
cattcagtaggtgtgccataggtgt

SEQ ID NO: 2753250 - DNA, 25 bp, Homo sapien
ggacttcaatcccatggtactgttt

SEQ ID NO: 2753251 - DNA, 25 bp, Homo sapien
tggacttcaatcccatggtactgtt

SEQ ID NO: 2753252 - DNA, 25 bp, Homo sapien
gacttcaatcccatggtactgtttt

SEQ ID NO: 2753253 - DNA, 25 bp, Homo sapien
tatttttcttctgactgcggttttc

SEQ ID NO: 2753254 - DNA, 25 bp, Homo sapien
tttcttctgactgcggttttcctgc

SEQ ID NO: 2753255 - DNA, 25 bp, Homo sapien
tcctgaaatttcagcttcattattt

SEQ ID NO: 2753256 - DNA, 25 bp, Homo sapien
ctccttagtgaagaaatcttttcct

SEQ ID NO: 2753257 - DNA, 25 bp, Homo sapien
tgttgggaggatgggtcctctcggc

SEQ ID NO: 2753258 - DNA, 25 bp, Homo sapien
cgaatccaacgtttggggacttctg

SEQ ID NO: 2753259 - DNA, 25 bp, Homo sapien
ggaggatgggtcctctcggcatcct

SEQ ID NO: 2753260 - DNA, 25 bp, Homo sapien
tggcattcgaatccaacgtttgggg

SEQ ID NO: 2753261 - DNA, 25 bp, Homo sapien
gcctggtgaccgagaggacaagcac

SEQ ID NO: 2753262 - DNA, 25 bp, Homo sapien
taagctctgtggattaatgggatct

SEQ ID NO: 2753263 - DNA, 25 bp, Homo sapien
gacaagcacaccagaggtccacaga

SEQ ID NO: 2753264 - DNA, 25 bp, Homo sapien
tggattaatgggatcttgtcgggtc

SEQ ID NO: 2753265 - DNA, 25 bp, Homo sapien
aagaatctgttgtggtgttttcaaa

SEQ ID NO: 2753266 - DNA, 25 bp, Homo sapien
agaatctgttgtggtgttttcaaag

SEQ ID NO: 2753267 - DNA, 25 bp, Homo sapien
agggttgggagttggtaggagatga

SEQ ID NO: 2753268 - DNA, 25 bp, Homo sapien
tggtaggagatgaagaatctgttgt

SEQ ID NO: 2753269 - DNA, 25 bp, Homo sapien
gggtccatcctcgtttctatcagat

SEQ ID NO: 2753270 - DNA, 25 bp, Homo sapien
atcagattcccggacacgctgcaag

SEQ ID NO: 2753271 - DNA, 25 bp, Homo sapien
gcaagctccggggtccgtccctgtg

SEQ ID NO: 2753272 - DNA, 25 bp, Homo sapien
tcttcgccgcctgcaaagtgcgctg

SEQ ID NO: 2753273 - DNA, 25 bp, Homo sapien
tttgtgcgtctcaataggtccccag

SEQ ID NO: 2753274 - DNA, 25 bp, Homo sapien
acgcgcatcccctgccgtagtgtaa

SEQ ID NO: 2753275 - DNA, 25 bp, Homo sapien
gcaacaggagtctaattcctccata

SEQ ID NO: 2753276 - DNA, 25 bp, Homo sapien
ctctctggagaggaacttttcatct

SEQ ID NO: 2753277 - DNA, 25 bp, Homo sapien
tgcccagatgcatacacagtgccga

SEQ ID NO: 2753278 - DNA, 25 bp, Homo sapien
cagtgccgagtagcacaagaaggaa

SEQ ID NO: 2753279 - DNA, 25 bp, Homo sapien
tatagcgagcaaacaatattccaga

SEQ ID NO: 2753280 - DNA, 25 bp, Homo sapien
tctctgagggttggatgcatgggta

SEQ ID NO: 2753281 - DNA, 25 bp, Homo sapien
aggggctggccgtggtttcccacat

SEQ ID NO: 2753282 - DNA, 25 bp, Homo sapien
cattgctgacctcataattcttatg

SEQ ID NO: 2753283 - DNA, 25 bp, Homo sapien
gttcatggccctcagatgactcttg

SEQ ID NO: 2753284 - DNA, 25 bp, Homo sapien
ggtgggagacagcttctgtccctga

SEQ ID NO: 2753285 - DNA, 25 bp, Homo sapien
attcttatggcttaagttcatggcc

SEQ ID NO: 2753286 - DNA, 25 bp, Homo sapien
ttttctcttttaggtggctgtctct

SEQ ID NO: 2753287 - DNA, 25 bp, Homo sapien
tttctcttttaggtggctgtctctg

SEQ ID NO: 2753288 - DNA, 25 bp, Homo sapien
ttctcttttaggtggctgtctctgg

SEQ ID NO: 2753289 - DNA, 25 bp, Homo sapien
gtataaccctctatatttcatcaga

SEQ ID NO: 2753290 - DNA, 25 bp, Homo sapien
gagttacactgtattggccagcctg

SEQ ID NO: 2753291 - DNA, 25 bp, Homo sapien
caagaaggggtcattggagcatgat

SEQ ID NO: 2753292 - DNA, 25 bp, Homo sapien
catgataagcaaacaatcttcacag

SEQ ID NO: 2753293 - DNA, 25 bp, Homo sapien
tgtattaccctcattgcacctgaga

SEQ ID NO: 2753294 - DNA, 25 bp, Homo sapien
aattcacacattctcgttctacagg

SEQ ID NO: 2753295 - DNA, 25 bp, Homo sapien
gggagacatcgccaaaagctaaaat

SEQ ID NO: 2753296 - DNA, 25 bp, Homo sapien
aaaattcatcactagaaagtctggc

SEQ ID NO: 2753297 - DNA, 25 bp, Homo sapien
tctgggcagtgtaggagggcgacac

SEQ ID NO: 2753298 - DNA, 25 bp, Homo sapien
caagccaatgctgattaggggattc

SEQ ID NO: 2753299 - DNA, 25 bp, Homo sapien
agatctcagcatggtggtctgggca

SEQ ID NO: 2753300 - DNA, 25 bp, Homo sapien
gatcttccagagtggggtcattgga

SEQ ID NO: 2753301 - DNA, 25 bp, Homo sapien
ctagcaggaactttcagaaacagcc

SEQ ID NO: 2753302 - DNA, 25 bp, Homo sapien
gctcctcaatctgccatgctttgtc

SEQ ID NO: 2753303 - DNA, 25 bp, Homo sapien
gctagcaggaactttcagaaacagc

SEQ ID NO: 2753304 - DNA, 25 bp, Homo sapien
cagccgtcgtctccatgatgggtcc

SEQ ID NO: 2753305 - DNA, 25 bp, Homo sapien
caggatggcacccagttgtcgcaag

SEQ ID NO: 2753306 - DNA, 25 bp, Homo sapien
ttatccattcattcctcaggtccag

SEQ ID NO: 2753307 - DNA, 25 bp, Homo sapien
ggtgacctgtgttcccagccgtcgt

SEQ ID NO: 2753308 - DNA, 25 bp, Homo sapien
tttctctgaagccataggttgtaga

SEQ ID NO: 2753309 - DNA, 25 bp, Homo sapien
ttgactggaagtagaggcgtatagg

SEQ ID NO: 2753310 - DNA, 25 bp, Homo sapien
cagactgaaacacggagggttttct

SEQ ID NO: 2753311 - DNA, 25 bp, Homo sapien
tccttgggtgacaggtgattgactg

SEQ ID NO: 2753312 - DNA, 25 bp, Homo sapien
tgttgtatgcctcatgagccaagat

SEQ ID NO: 2753313 - DNA, 25 bp, Homo sapien
gctgttcccatgttgtatgcctcat

SEQ ID NO: 2753314 - DNA, 25 bp, Homo sapien
ccatttttggcaagattctctccag

SEQ ID NO: 2753315 - DNA, 25 bp, Homo sapien
gcctcatgagccaagataccaattt

SEQ ID NO: 2753316 - DNA, 25 bp, Homo sapien
tgtaaatctgtgtaagtggtcacat

SEQ ID NO: 2753317 - DNA, 25 bp, Homo sapien
taaatctgtgtaagtggtcacataa

SEQ ID NO: 2753318 - DNA, 25 bp, Homo sapien
aatctgtgtaagtggtcacataagt

SEQ ID NO: 2753319 - DNA, 25 bp, Homo sapien
atgtaaatctgtgtaagtggtcaca

SEQ ID NO: 2753320 - DNA, 25 bp, Homo sapien
tccccagtcagcttgataactccgg

SEQ ID NO: 2753321 - DNA, 25 bp, Homo sapien
cagcttgataactccggcaaggaca

SEQ ID NO: 2753322 - DNA, 25 bp, Homo sapien
agttccccttatcaggcaggttgac

SEQ ID NO: 2753323 - DNA, 25 bp, Homo sapien
ccactgcaattacgtaagttcccct

SEQ ID NO: 2753324 - DNA, 25 bp, Homo sapien
aactgcaagaactctttactgagag

SEQ ID NO: 2753325 - DNA, 25 bp, Homo sapien
gattcactgtatgatgtaactgcta

SEQ ID NO: 2753326 - DNA, 25 bp, Homo sapien
tatgatgtaactgctaaactgcaag

SEQ ID NO: 2753327 - DNA, 25 bp, Homo sapien
ggtaaagaaagacaagcactgcgtg

SEQ ID NO: 2753328 - DNA, 25 bp, Homo sapien
ttagatttgaaggtgcctctggtgg

SEQ ID NO: 2753329 - DNA, 25 bp, Homo sapien
gaaggtgcctctggtggtaactcag

SEQ ID NO: 2753330 - DNA, 25 bp, Homo sapien
ttgaaggtgcctctggtggtaactc

SEQ ID NO: 2753331 - DNA, 25 bp, Homo sapien
atttgaaggtgcctctggtggtaac

SEQ ID NO: 2753332 - DNA, 25 bp, Homo sapien
caaacatgacaggttgctgagagga

SEQ ID NO: 2753333 - DNA, 25 bp, Homo sapien
tacaagaagtaatctgatcattggc

SEQ ID NO: 2753334 - DNA, 25 bp, Homo sapien
catagacatctcctatacaagaagt

SEQ ID NO: 2753335 - DNA, 25 bp, Homo sapien
tgctagtagggctgacatagagagt

SEQ ID NO: 2753336 - DNA, 25 bp, Homo sapien
aggaaatgcactggcaagccccagg

SEQ ID NO: 2753337 - DNA, 25 bp, Homo sapien
aatgcactggcaagccccaggccat

SEQ ID NO: 2753338 - DNA, 25 bp, Homo sapien
tcctccacaaaggaaatgcactggc

SEQ ID NO: 2753339 - DNA, 25 bp, Homo sapien
caaaggaaatgcactggcaagcccc

SEQ ID NO: 2753340 - DNA, 25 bp, Homo sapien
ttatcgcttcccgttcacaaaagca

SEQ ID NO: 2753341 - DNA, 25 bp, Homo sapien
gagtcgtgatgacagcccacagaag

SEQ ID NO: 2753342 - DNA, 25 bp, Homo sapien
gcccacagaagtgacgagtgcttgg

SEQ ID NO: 2753343 - DNA, 25 bp, Homo sapien
tgcttggggtcaaatgggtttgctt

SEQ ID NO: 2753344 - DNA, 25 bp, Homo sapien
ttatggagagaagagtcgtgatgac

SEQ ID NO: 2753345 - DNA, 25 bp, Homo sapien
ctgtgcatgagccggcctcaccgtg

SEQ ID NO: 2753346 - DNA, 25 bp, Homo sapien
gtgcatgagccggcctcaccgtggt

SEQ ID NO: 2753347 - DNA, 25 bp, Homo sapien
agctgtgcatgagccggcctcaccg

SEQ ID NO: 2753348 - DNA, 25 bp, Homo sapien
gcatgagccggcctcaccgtggtgc

SEQ ID NO: 2753349 - DNA, 25 bp, Homo sapien
cactacatgaacaatattgggaagc

SEQ ID NO: 2753350 - DNA, 25 bp, Homo sapien
tctattaattacttggtgccattca

SEQ ID NO: 2753351 - DNA, 25 bp, Homo sapien
ctcggttcccctcaatctattaatt

SEQ ID NO: 2753352 - DNA, 25 bp, Homo sapien
gaaatctcagctggcctctcggttc

SEQ ID NO: 2753353 - DNA, 25 bp, Homo sapien
cttcatcaaccggagttggctgaat

SEQ ID NO: 2753354 - DNA, 25 bp, Homo sapien
catcaaccggagttggctgaattcc

SEQ ID NO: 2753355 - DNA, 25 bp, Homo sapien
cggagttggctgaattccactctta

SEQ ID NO: 2753356 - DNA, 25 bp, Homo sapien
ggaagacttattgtcttggttgtat

SEQ ID NO: 2753357 - DNA, 25 bp, Homo sapien
atgtcagcttgtctgaatgacccct

SEQ ID NO: 2753358 - DNA, 25 bp, Homo sapien
tgaccatcactgaacaaggttgttg

SEQ ID NO: 2753359 - DNA, 25 bp, Homo sapien
gaagtgaactaacatggaagctcca

SEQ ID NO: 2753360 - DNA, 25 bp, Homo sapien
tcaaaacctgcgacaaattgtggca

SEQ ID NO: 2753361 - DNA, 25 bp, Homo sapien
cttcacaggctcatgggattcccag

SEQ ID NO: 2753362 - DNA, 25 bp, Homo sapien
actcccgaaagtcctgcgcagtctg

SEQ ID NO: 2753363 - DNA, 25 bp, Homo sapien
tactcccgaaagtcctgcgcagtct

SEQ ID NO: 2753364 - DNA, 25 bp, Homo sapien
ctactcccgaaagtcctgcgcagtc

SEQ ID NO: 2753365 - DNA, 25 bp, Homo sapien
ttgtcatcctctgtgcccaccagtg

SEQ ID NO: 2753366 - DNA, 25 bp, Homo sapien
tctgcacgtgaaatgctgtccttcc

SEQ ID NO: 2753367 - DNA, 25 bp, Homo sapien
tgctgctctctgcacgtgaaatgct

SEQ ID NO: 2753368 - DNA, 25 bp, Homo sapien
caccagtggcatttgctgctctctg

SEQ ID NO: 2753369 - DNA, 25 bp, Homo sapien
ctcatcatgctgggactctcttttc

SEQ ID NO: 2753370 - DNA, 25 bp, Homo sapien
cttcttctgcctcacgctgcttccc

SEQ ID NO: 2753371 - DNA, 25 bp, Homo sapien
tctcatcatgctgggactctctttt

SEQ ID NO: 2753372 - DNA, 25 bp, Homo sapien
taaagcctcatcagccacgaaggat

SEQ ID NO: 2753373 - DNA, 25 bp, Homo sapien
cagttccatcataagtaacttgtct

SEQ ID NO: 2753374 - DNA, 25 bp, Homo sapien
catcagccacgaaggataaggaaga

SEQ ID NO: 2753375 - DNA, 25 bp, Homo sapien
ttgtctacacctaaagcctcatcag

SEQ ID NO: 2753376 - DNA, 25 bp, Homo sapien
aagcggtatgttgccttgcgatgag

SEQ ID NO: 2753377 - DNA, 25 bp, Homo sapien
tacaggttacaaagcggtatgttgc

SEQ ID NO: 2753378 - DNA, 25 bp, Homo sapien
gatggagaccagcacactttaatgt

SEQ ID NO: 2753379 - DNA, 25 bp, Homo sapien
tggtgtgcacgaggctctcttgccc

SEQ ID NO: 2753380 - DNA, 25 bp, Homo sapien
gcaacatgtcagcagtctccggcat

SEQ ID NO: 2753381 - DNA, 25 bp, Homo sapien
ggatacttcaagtaattggccccaa

SEQ ID NO: 2753382 - DNA, 25 bp, Homo sapien
catagttgtgtactgctccctgcca

SEQ ID NO: 2753383 - DNA, 25 bp, Homo sapien
taatatcctgagtcactagatggtc

SEQ ID NO: 2753384 - DNA, 25 bp, Homo sapien
tacccgcggcccatgttcttttcga

SEQ ID NO: 2753385 - DNA, 25 bp, Homo sapien
gcaatatttagaaccatagatgagg

SEQ ID NO: 2753386 - DNA, 25 bp, Homo sapien
catatcagaacgaacaatactgcta

SEQ ID NO: 2753387 - DNA, 25 bp, Homo sapien
tagatgaggaaacacggcggcattg

SEQ ID NO: 2753388 - DNA, 25 bp, Homo sapien
gctgaatgccttgtttagttgtcac

SEQ ID NO: 2753389 - DNA, 25 bp, Homo sapien
taaacaaagcgtgagaagccgtccc

SEQ ID NO: 2753390 - DNA, 25 bp, Homo sapien
tcacgctagaaaggtgctgcccact

SEQ ID NO: 2753391 - DNA, 25 bp, Homo sapien
tgtacagaggaaccccaatgcaacc

SEQ ID NO: 2753392 - DNA, 25 bp, Homo sapien
gaagcctagagtcacaacggatgaa

SEQ ID NO: 2753393 - DNA, 25 bp, Homo sapien
tggacctggtcctcgaagaaggact

SEQ ID NO: 2753394 - DNA, 25 bp, Homo sapien
gaagtcaacgtagttgccggtggac

SEQ ID NO: 2753395 - DNA, 25 bp, Homo sapien
gaaatggctggtaggtctcgtaatc

SEQ ID NO: 2753396 - DNA, 25 bp, Homo sapien
tcagttcactgtagggacgggcagc

SEQ ID NO: 2753397 - DNA, 25 bp, Homo sapien
gcgggcgcaccataagaattcctat

SEQ ID NO: 2753398 - DNA, 25 bp, Homo sapien
cctatacaaagttgaaattccagtg

SEQ ID NO: 2753399 - DNA, 25 bp, Homo sapien
gtttgatgtcttcagcgggcgcacc

SEQ ID NO: 2753400 - DNA, 25 bp, Homo sapien
ccataagaattcctatacaaagttg

SEQ ID NO: 2753401 - DNA, 25 bp, Homo sapien
gcgttgctgccggtgcactcgtagt

SEQ ID NO: 2753402 - DNA, 25 bp, Homo sapien
tgccggtgcactcgtagtctgtttt

SEQ ID NO: 2753403 - DNA, 25 bp, Homo sapien
ttcctggaagtgtgttcgcctttag

SEQ ID NO: 2753404 - DNA, 25 bp, Homo sapien
aagtgtgttcgcctttagctccgtg

SEQ ID NO: 2753405 - DNA, 25 bp, Homo sapien
ttcccgaggtgaagctggggcactt

SEQ ID NO: 2753406 - DNA, 25 bp, Homo sapien
tcccgaggtgaagctggggcacttg

SEQ ID NO: 2753407 - DNA, 25 bp, Homo sapien
agggtctctttgctccttgggtctg

SEQ ID NO: 2753408 - DNA, 25 bp, Homo sapien
tctctttgctccttgggtctgtggt

SEQ ID NO: 2753409 - DNA, 25 bp, Homo sapien
ttcgagcttatcattcacaccctct

SEQ ID NO: 2753410 - DNA, 25 bp, Homo sapien
gagcttatcattcacaccctctgta

SEQ ID NO: 2753411 - DNA, 25 bp, Homo sapien
gcatggctggttgaacacagccctg

SEQ ID NO: 2753412 - DNA, 25 bp, Homo sapien
cctgctcgcgagaaaaggctgcttc

SEQ ID NO: 2753413 - DNA, 25 bp, Homo sapien
cctgaggcagcgcactgtctgcatg

SEQ ID NO: 2753414 - DNA, 25 bp, Homo sapien
cattctcataacactgattggctca

SEQ ID NO: 2753415 - DNA, 25 bp, Homo sapien
gaaggaccgtctttgctcaacgaga

SEQ ID NO: 2753416 - DNA, 25 bp, Homo sapien
aacgagaaataaagcctggctggct

SEQ ID NO: 2753417 - DNA, 25 bp, Homo sapien
ctgagtacgggttggctcacggact

SEQ ID NO: 2753418 - DNA, 25 bp, Homo sapien
tagcgaaggtctgaatggaaggctc

SEQ ID NO: 2753419 - DNA, 25 bp, Homo sapien
gggcctttgccggtccctctcgatg

SEQ ID NO: 2753420 - DNA, 25 bp, Homo sapien
ggtccctctcgatggttgaagacga

SEQ ID NO: 2753421 - DNA, 25 bp, Homo sapien
tcgatggttgaagacgaggctacaa

SEQ ID NO: 2753422 - DNA, 25 bp, Homo sapien
gaagacgaggctacaaagtggtatt

SEQ ID NO: 2753423 - DNA, 25 bp, Homo sapien
ctgcaaaacacagcacgctcctgtt

SEQ ID NO: 2753424 - DNA, 25 bp, Homo sapien
caaaaacacgttcaggatggaagat

SEQ ID NO: 2753425 - DNA, 25 bp, Homo sapien
ggaagatatttcaacaatgtatgtg

SEQ ID NO: 2753426 - DNA, 25 bp, Homo sapien
tggaagatatttcaacaatgtatgt

SEQ ID NO: 2753427 - DNA, 25 bp, Homo sapien
tcagtctgtttagttgatacaggtc

SEQ ID NO: 2753428 - DNA, 25 bp, Homo sapien
ccctgaatctataacactctccatt

SEQ ID NO: 2753429 - DNA, 25 bp, Homo sapien
ctttttatggatttcgacggccctg

SEQ ID NO: 2753430 - DNA, 25 bp, Homo sapien
tcacggtatttctaggacgtggtca

SEQ ID NO: 2753431 - DNA, 25 bp, Homo sapien
caatctgtcatctggttaaatggag

SEQ ID NO: 2753432 - DNA, 25 bp, Homo sapien
cagcggccaatctgtcatctggtta

SEQ ID NO: 2753433 - DNA, 25 bp, Homo sapien
gcactggcggtgaggacggcatgaa

SEQ ID NO: 2753434 - DNA, 25 bp, Homo sapien
gacggcatgaacagctctctcagag

SEQ ID NO: 2753435 - DNA, 25 bp, Homo sapien
ctcagctttaacctcgggaactgct

SEQ ID NO: 2753436 - DNA, 25 bp, Homo sapien
cagctttaacctcgggaactgctgg

SEQ ID NO: 2753437 - DNA, 25 bp, Homo sapien
gctttaacctcgggaactgctggca

SEQ ID NO: 2753438 - DNA, 25 bp, Homo sapien
ctttaacctcgggaactgctggcag

SEQ ID NO: 2753439 - DNA, 25 bp, Homo sapien
cacgggcacgtggttatgacaggac

SEQ ID NO: 2753440 - DNA, 25 bp, Homo sapien
tattgttccagctacaaaacggagt

SEQ ID NO: 2753441 - DNA, 25 bp, Homo sapien
gaaacatctgagacagttccacatt

SEQ ID NO: 2753442 - DNA, 25 bp, Homo sapien
tctttccatcgaactggctggcctc

SEQ ID NO: 2753443 - DNA, 25 bp, Homo sapien
caacctcattgggaggcattgagac

SEQ ID NO: 2753444 - DNA, 25 bp, Homo sapien
tttcccacttagctcaacctcattg

SEQ ID NO: 2753445 - DNA, 25 bp, Homo sapien
tgagagatggagctagccagcagac

SEQ ID NO: 2753446 - DNA, 25 bp, Homo sapien
tctcccatgggcagagtgtaccaga

SEQ ID NO: 2753447 - DNA, 25 bp, Homo sapien
aatagccagagaccattttaagagg

SEQ ID NO: 2753448 - DNA, 25 bp, Homo sapien
tagccagagaccattttaagaggtc

SEQ ID NO: 2753449 - DNA, 25 bp, Homo sapien
cagagaccattttaagaggtcgttt

SEQ ID NO: 2753450 - DNA, 25 bp, Homo sapien
gccagagaccattttaagaggtcgt

SEQ ID NO: 2753451 - DNA, 25 bp, Homo sapien
caagcaaccctagcgcatctgaaac

SEQ ID NO: 2753452 - DNA, 25 bp, Homo sapien
tgcttatcaggtacagataaccggc

SEQ ID NO: 2753453 - DNA, 25 bp, Homo sapien
caggaatggctgcttatcaggtaca

SEQ ID NO: 2753454 - DNA, 25 bp, Homo sapien
acagataaccggctgccaagcaacc

SEQ ID NO: 2753455 - DNA, 25 bp, Homo sapien
tggtcccacgtccctggccagtgag

SEQ ID NO: 2753456 - DNA, 25 bp, Homo sapien
gtggtcccacgtccctggccagtga

SEQ ID NO: 2753457 - DNA, 25 bp, Homo sapien
ggtcccacgtccctggccagtgagt

SEQ ID NO: 2753458 - DNA, 25 bp, Homo sapien
gggatggaggcagcaatgatcttgg

SEQ ID NO: 2753459 - DNA, 25 bp, Homo sapien
gctatagatggggatggaggcagca

SEQ ID NO: 2753460 - DNA, 25 bp, Homo sapien
ctgggggatgggggctatagatggg

SEQ ID NO: 2753461 - DNA, 25 bp, Homo sapien
tggggatggaggcagcaatgatctt

SEQ ID NO: 2753462 - DNA, 25 bp, Homo sapien
ggacctgagatgcagccttgaccac

SEQ ID NO: 2753463 - DNA, 25 bp, Homo sapien
tttgtagagactcctcagatctcgg

SEQ ID NO: 2753464 - DNA, 25 bp, Homo sapien
agatctcggtactgccacatgctgt

SEQ ID NO: 2753465 - DNA, 25 bp, Homo sapien
gccacatgctgttgaggacctgaga

SEQ ID NO: 2753466 - DNA, 25 bp, Homo sapien
gaagcctgtggactaggtctcgcat

SEQ ID NO: 2753467 - DNA, 25 bp, Homo sapien
taatcacttcgtgcagtgtgcagca

SEQ ID NO: 2753468 - DNA, 25 bp, Homo sapien
gtgtcatccgacatggccttgcttg

SEQ ID NO: 2753469 - DNA, 25 bp, Homo sapien
taaggccttggcgttctccatgttc

SEQ ID NO: 2753470 - DNA, 25 bp, Homo sapien
tggattgtccggagatctctgacct

SEQ ID NO: 2753471 - DNA, 25 bp, Homo sapien
tgtggcttacagaccaaattggtga

SEQ ID NO: 2753472 - DNA, 25 bp, Homo sapien
tgtccaggtggtgagacaaattcct

SEQ ID NO: 2753473 - DNA, 25 bp, Homo sapien
tgagcatgagagtttccctgggcat

SEQ ID NO: 2753474 - DNA, 25 bp, Homo sapien
gactctgatggtcctgcctgtctgc

SEQ ID NO: 2753475 - DNA, 25 bp, Homo sapien
cagcaggttgtacagcggggtagca

SEQ ID NO: 2753476 - DNA, 25 bp, Homo sapien
tcattcacacttggctgagagtaac

SEQ ID NO: 2753477 - DNA, 25 bp, Homo sapien
ctgagagtaactggcccacaggcac

SEQ ID NO: 2753478 - DNA, 25 bp, Homo sapien
ctgccactctgtcaagcccgtttgg

SEQ ID NO: 2753479 - DNA, 25 bp, Homo sapien
ctgcaatgaggtaccgtgacaggag

SEQ ID NO: 2753480 - DNA, 25 bp, Homo sapien
gacttcctagcagtgtcaccttctg

SEQ ID NO: 2753481 - DNA, 25 bp, Homo sapien
tgaggtaccgtgacaggaggtcctt

SEQ ID NO: 2753482 - DNA, 25 bp, Homo sapien
cagccacagaaagcccatgcgtttt

SEQ ID NO: 2753483 - DNA, 25 bp, Homo sapien
cagcactgacgaaatggcaagctca

SEQ ID NO: 2753484 - DNA, 25 bp, Homo sapien
agtttcatgaccgtgagtgcctctg

SEQ ID NO: 2753485 - DNA, 25 bp, Homo sapien
tcatcagtcatatggaatcccacgg

SEQ ID NO: 2753486 - DNA, 25 bp, Homo sapien
tgtccaggaggatgatgtcacagga

SEQ ID NO: 2753487 - DNA, 25 bp, Homo sapien
aggaagcgggactgggcaactggtt

SEQ ID NO: 2753488 - DNA, 25 bp, Homo sapien
atgtcacaggaagcgggactgggca

SEQ ID NO: 2753489 - DNA, 25 bp, Homo sapien
tgcctgtccaggaggatgatgtcac

SEQ ID NO: 2753490 - DNA, 25 bp, Homo sapien
tggcaaaaatgccttttgtattgtt

SEQ ID NO: 2753491 - DNA, 25 bp, Homo sapien
atgccttttgtattgttttcccacg

SEQ ID NO: 2753492 - DNA, 25 bp, Homo sapien
cgatggcaaaaatgccttttgtatt

SEQ ID NO: 2753493 - DNA, 25 bp, Homo sapien
caacagcgatggcaaaaatgccttt

SEQ ID NO: 2753494 - DNA, 25 bp, Homo sapien
tcctagcaggtgaccctgcttgtaa

SEQ ID NO: 2753495 - DNA, 25 bp, Homo sapien
ctgtgttcctagcaggtgaccctgc

SEQ ID NO: 2753496 - DNA, 25 bp, Homo sapien
ggagatgggactctcaggtttaagt

SEQ ID NO: 2753497 - DNA, 25 bp, Homo sapien
gaccctgcttgtaattttgtaaata

SEQ ID NO: 2753498 - DNA, 25 bp, Homo sapien
catttgcccaatggccagagctcta

SEQ ID NO: 2753499 - DNA, 25 bp, Homo sapien
gataaactgacaagaaccctggcct

SEQ ID NO: 2753500 - DNA, 25 bp, Homo sapien
cagagctctagtgggtatgggtacc

SEQ ID NO: 2753501 - DNA, 25 bp, Homo sapien
taaaaatggagacacagctccctgg

SEQ ID NO: 2753502 - DNA, 25 bp, Homo sapien
tcccatcgttcatcatctcccagct

SEQ ID NO: 2753503 - DNA, 25 bp, Homo sapien
ccaacttgtagtttgggtccactgg

SEQ ID NO: 2753504 - DNA, 25 bp, Homo sapien
cccacgcttgcctcccatcgttcat

SEQ ID NO: 2753505 - DNA, 25 bp, Homo sapien
ttgaagaccgcacttgccctttgct

SEQ ID NO: 2753506 - DNA, 25 bp, Homo sapien
gcataggaatgctggcttgaagtgt

SEQ ID NO: 2753507 - DNA, 25 bp, Homo sapien
tggagaaggtagagttaaggacgta

SEQ ID NO: 2753508 - DNA, 25 bp, Homo sapien
ctggcttgaagtgtggcaggactga

SEQ ID NO: 2753509 - DNA, 25 bp, Homo sapien
gacaccacaggcttgattgaggaat

SEQ ID NO: 2753510 - DNA, 25 bp, Homo sapien
taaagttgggcttgagctgatttcc

SEQ ID NO: 2753511 - DNA, 25 bp, Homo sapien
gaaagccaacctgcaataaagttgg

SEQ ID NO: 2753512 - DNA, 25 bp, Homo sapien
gacccatgagtactgaattccaaca

SEQ ID NO: 2753513 - DNA, 25 bp, Homo sapien
catggtagtgcaggttctcagatac

SEQ ID NO: 2753514 - DNA, 25 bp, Homo sapien
tgccagcaacaggataagatgactt

SEQ ID NO: 2753515 - DNA, 25 bp, Homo sapien
cagcatgggtcagccagacccagga

SEQ ID NO: 2753516 - DNA, 25 bp, Homo sapien
gcatgggtcagccagacccaggaga

SEQ ID NO: 2753517 - DNA, 25 bp, Homo sapien
tgactttagaacttcagggaacttg

SEQ ID NO: 2753518 - DNA, 25 bp, Homo sapien
ctcttcacatgcagtaagggtcact

SEQ ID NO: 2753519 - DNA, 25 bp, Homo sapien
gatagagaacattccatgcgctccc

SEQ ID NO: 2753520 - DNA, 25 bp, Homo sapien
tgcagaagatgtgccttcgagatag

SEQ ID NO: 2753521 - DNA, 25 bp, Homo sapien
ggtaactgtccccactcttcacatg

SEQ ID NO: 2753522 - DNA, 25 bp, Homo sapien
tatttccagtactaaaaacagcacg

SEQ ID NO: 2753523 - DNA, 25 bp, Homo sapien
gggttgcactggactttccacagcc

SEQ ID NO: 2753524 - DNA, 25 bp, Homo sapien
ctaaaaacagcacgttgccttcctg

SEQ ID NO: 2753525 - DNA, 25 bp, Homo sapien
tagactgtggaatttagacggactt

SEQ ID NO: 2753526 - DNA, 25 bp, Homo sapien
ttaaaaaggtatctcaaagcttcca

SEQ ID NO: 2753527 - DNA, 25 bp, Homo sapien
gtcattgaagtggagacacagctgc

SEQ ID NO: 2753528 - DNA, 25 bp, Homo sapien
cagctgcagggatctgttcattccc

SEQ ID NO: 2753529 - DNA, 25 bp, Homo sapien
aaatgatatccctaacaccagatgc

SEQ ID NO: 2753530 - DNA, 25 bp, Homo sapien
aatgatatccctaacaccagatgcc

SEQ ID NO: 2753531 - DNA, 25 bp, Homo sapien
agccagaccaatggcctgtggggac

SEQ ID NO: 2753532 - DNA, 25 bp, Homo sapien
tctgagaggtttcagtagattcatc

SEQ ID NO: 2753533 - DNA, 25 bp, Homo sapien
cagtagattcatctttctccaggag

SEQ ID NO: 2753534 - DNA, 25 bp, Homo sapien
accaatggcctgtggggactgtgtc

SEQ ID NO: 2753535 - DNA, 25 bp, Homo sapien
cgatgagctccttatttctgacgtc

SEQ ID NO: 2753536 - DNA, 25 bp, Homo sapien
gagctccttatttctgacgtccaag

SEQ ID NO: 2753537 - DNA, 25 bp, Homo sapien
ccttatttctgacgtccaaggccat

SEQ ID NO: 2753538 - DNA, 25 bp, Homo sapien
tccttatttctgacgtccaaggcca

SEQ ID NO: 2753539 - DNA, 25 bp, Homo sapien
ttcggacagcggctcggatatatac

SEQ ID NO: 2753540 - DNA, 25 bp, Homo sapien
cagcggctcggatatatactgacca

SEQ ID NO: 2753541 - DNA, 25 bp, Homo sapien
tattcggagcagctccacgaggatg

SEQ ID NO: 2753542 - DNA, 25 bp, Homo sapien
gcgcacaccacacggtcattgtcta

SEQ ID NO: 2753543 - DNA, 25 bp, Homo sapien
tggcagtgaacgtagggcatatgcc

SEQ ID NO: 2753544 - DNA, 25 bp, Homo sapien
tctggcagtgaacgtagggcatatg

SEQ ID NO: 2753545 - DNA, 25 bp, Homo sapien
ctctggcagtgaacgtagggcatat

SEQ ID NO: 2753546 - DNA, 25 bp, Homo sapien
gcagtgaacgtagggcatatgccat

SEQ ID NO: 2753547 - DNA, 25 bp, Homo sapien
taaactctcaatcatggaaccctag

SEQ ID NO: 2753548 - DNA, 25 bp, Homo sapien
tgtgccggcacatactgctatagca

SEQ ID NO: 2753549 - DNA, 25 bp, Homo sapien
tattgtaagggaagagaccgagtca

SEQ ID NO: 2753550 - DNA, 25 bp, Homo sapien
gaagatggcagaacagctatcagcc

SEQ ID NO: 2753551 - DNA, 25 bp, Homo sapien
agtaggaaccgcagaactggccctt

SEQ ID NO: 2753552 - DNA, 25 bp, Homo sapien
agcacagtaggaaccgcagaactgg

SEQ ID NO: 2753553 - DNA, 25 bp, Homo sapien
cacagtaggaaccgcagaactggcc

SEQ ID NO: 2753554 - DNA, 25 bp, Homo sapien
cagtaggaaccgcagaactggccct

SEQ ID NO: 2753555 - DNA, 25 bp, Homo sapien
tttgactattgatgggtgccacagc

SEQ ID NO: 2753556 - DNA, 25 bp, Homo sapien
cagcatctggatcccttttggtggt

SEQ ID NO: 2753557 - DNA, 25 bp, Homo sapien
gatttgagcactcagagagcagtgt

SEQ ID NO: 2753558 - DNA, 25 bp, Homo sapien
cagtctggaagaggtcctactccat

SEQ ID NO: 2753559 - DNA, 25 bp, Homo sapien
ctggcggaagaaaaacaagagagca

SEQ ID NO: 2753560 - DNA, 25 bp, Homo sapien
gcggaagaaaaacaagagagcaaac

SEQ ID NO: 2753561 - DNA, 25 bp, Homo sapien
ggaagaaaaacaagagagcaaacat

SEQ ID NO: 2753562 - DNA, 25 bp, Homo sapien
tggcggaagaaaaacaagagagcaa

SEQ ID NO: 2753563 - DNA, 25 bp, Homo sapien
gctctccaagaacgactctaacatg

SEQ ID NO: 2753564 - DNA, 25 bp, Homo sapien
actctaacatgttgctgtaggaagg

SEQ ID NO: 2753565 - DNA, 25 bp, Homo sapien
gaacgactctaacatgttgctgtag

SEQ ID NO: 2753566 - DNA, 25 bp, Homo sapien
gaagtggataagctctccaagaacg

SEQ ID NO: 2753567 - DNA, 25 bp, Homo sapien
cccagcatatggtgaggtgaaggcc

SEQ ID NO: 2753568 - DNA, 25 bp, Homo sapien
tgcgcaaaaatgcacagccgtgatc

SEQ ID NO: 2753569 - DNA, 25 bp, Homo sapien
gggagactgtactcgaaccagccaa

SEQ ID NO: 2753570 - DNA, 25 bp, Homo sapien
ccgtgatctttgcaggctcatgaga

SEQ ID NO: 2753571 - DNA, 25 bp, Homo sapien
ttgaagaagtggtggccaataccga

SEQ ID NO: 2753572 - DNA, 25 bp, Homo sapien
gagcatccgaatgacatagcaggca

SEQ ID NO: 2753573 - DNA, 25 bp, Homo sapien
agaagtggtggccaataccgatatc

SEQ ID NO: 2753574 - DNA, 25 bp, Homo sapien
tcaagagcatccgaatgacatagca

SEQ ID NO: 2753575 - DNA, 25 bp, Homo sapien
tggtggaggacaatgtcccgtcacc

SEQ ID NO: 2753576 - DNA, 25 bp, Homo sapien
gctgaaacagtacccacctcaggac

SEQ ID NO: 2753577 - DNA, 25 bp, Homo sapien
gatcgttggccatagaccaaggtga

SEQ ID NO: 2753578 - DNA, 25 bp, Homo sapien
caccaacagcgccttgaagaaggtc

SEQ ID NO: 2753579 - DNA, 25 bp, Homo sapien
tgtgaaactctctgtaagctccttg

SEQ ID NO: 2753580 - DNA, 25 bp, Homo sapien
ctgttccagtgttagcaaaggtggg

SEQ ID NO: 2753581 - DNA, 25 bp, Homo sapien
ggccctgaagttaaccgctgttcca

SEQ ID NO: 2753582 - DNA, 25 bp, Homo sapien
tgagataaatcagtttccaggccct

SEQ ID NO: 2753583 - DNA, 25 bp, Homo sapien
aattgcatgcagctgcaagcagcct

SEQ ID NO: 2753584 - DNA, 25 bp, Homo sapien
gataattgcatgcagctgcaagcag

SEQ ID NO: 2753585 - DNA, 25 bp, Homo sapien
gaaggggataattgcatgcagctgc

SEQ ID NO: 2753586 - DNA, 25 bp, Homo sapien
gggataattgcatgcagctgcaagc

SEQ ID NO: 2753587 - DNA, 25 bp, Homo sapien
gagtagcccgtccagctcgtccgtg

SEQ ID NO: 2753588 - DNA, 25 bp, Homo sapien
ttgccattggcctcgccacagagta

SEQ ID NO: 2753589 - DNA, 25 bp, Homo sapien
tgccgccagccggtacgagaggttc

SEQ ID NO: 2753590 - DNA, 25 bp, Homo sapien
catgtgctgtccctgagacgtttct

SEQ ID NO: 2753591 - DNA, 25 bp, Homo sapien
aaatgcacacacagttttcaacggt

SEQ ID NO: 2753592 - DNA, 25 bp, Homo sapien
cttaaaatgcacacacagttttcaa

SEQ ID NO: 2753593 - DNA, 25 bp, Homo sapien
taaaatgcacacacagttttcaacg

SEQ ID NO: 2753594 - DNA, 25 bp, Homo sapien
aaaatgcacacacagttttcaacgg

SEQ ID NO: 2753595 - DNA, 25 bp, Homo sapien
ttagaatttcggtcagctctggtgg

SEQ ID NO: 2753596 - DNA, 25 bp, Homo sapien
gacttagaatttcggtcagctctgg

SEQ ID NO: 2753597 - DNA, 25 bp, Homo sapien
atcaaagacttagaatttcggtcag

SEQ ID NO: 2753598 - DNA, 25 bp, Homo sapien
aaagacttagaatttcggtcagctc

SEQ ID NO: 2753599 - DNA, 25 bp, Homo sapien
accggagcattttccgagtgtcaag

SEQ ID NO: 2753600 - DNA, 25 bp, Homo sapien
tactgcccaccggagcattttccga

SEQ ID NO: 2753601 - DNA, 25 bp, Homo sapien
gagcattttccgagtgtcaaggagg

SEQ ID NO: 2753602 - DNA, 25 bp, Homo sapien
tgcccaccggagcattttccgagtg

SEQ ID NO: 2753603 - DNA, 25 bp, Homo sapien
tctttctcatcccactgttcgtctt

SEQ ID NO: 2753604 - DNA, 25 bp, Homo sapien
ggcatcactgttcctctgtttaaca

SEQ ID NO: 2753605 - DNA, 25 bp, Homo sapien
aaatgctttataatcgagctgcagc

SEQ ID NO: 2753606 - DNA, 25 bp, Homo sapien
gctttataatcgagctgcagctggg

SEQ ID NO: 2753607 - DNA, 25 bp, Homo sapien
agcgcagactggatcacgtacagca

SEQ ID NO: 2753608 - DNA, 25 bp, Homo sapien
cacgtacagcaaggcatccgtaagc

SEQ ID NO: 2753609 - DNA, 25 bp, Homo sapien
tgctatcgatctcactgctccccag

SEQ ID NO: 2753610 - DNA, 25 bp, Homo sapien
aaggcatccgtaagcccatcacact

SEQ ID NO: 2753611 - DNA, 25 bp, Homo sapien
cctcttgtagttccacggcaggtgg

SEQ ID NO: 2753612 - DNA, 25 bp, Homo sapien
ccttgtcgttctgtgcaggtggaaa

SEQ ID NO: 2753613 - DNA, 25 bp, Homo sapien
gcattcaagtcccttacaagaggca

SEQ ID NO: 2753614 - DNA, 25 bp, Homo sapien
gaaatgtgtgacgtttgcacgatac

SEQ ID NO: 2753615 - DNA, 25 bp, Homo sapien
ttctttcctaacttgcagtacttgg

SEQ ID NO: 2753616 - DNA, 25 bp, Homo sapien
agctgtactcactaggcattgattt

SEQ ID NO: 2753617 - DNA, 25 bp, Homo sapien
gttctttcctaacttgcagtacttg

SEQ ID NO: 2753618 - DNA, 25 bp, Homo sapien
gctgtactcactaggcattgatttt

SEQ ID NO: 2753619 - DNA, 25 bp, Homo sapien
gaggacctctgttaagtccacccac

SEQ ID NO: 2753620 - DNA, 25 bp, Homo sapien
cactgcagcaagcattaccatgctt

SEQ ID NO: 2753621 - DNA, 25 bp, Homo sapien
tgacttcccatcaagaggacctctg

SEQ ID NO: 2753622 - DNA, 25 bp, Homo sapien
taccatgcttgctaaatgatttgcc

SEQ ID NO: 2753623 - DNA, 25 bp, Homo sapien
tctgcatcccagcatactgcgtgtt

SEQ ID NO: 2753624 - DNA, 25 bp, Homo sapien
tcttgttacccaagaagcctgtctg

SEQ ID NO: 2753625 - DNA, 25 bp, Homo sapien
tagaacgggaccagctgatgaatcc

SEQ ID NO: 2753626 - DNA, 25 bp, Homo sapien
caggactgtgtgaaagcacgctgac

SEQ ID NO: 2753627 - DNA, 25 bp, Homo sapien
atcatcatgggtgtgatgtttatgg

SEQ ID NO: 2753628 - DNA, 25 bp, Homo sapien
gatgtttatggaatcttggatgata

SEQ ID NO: 2753629 - DNA, 25 bp, Homo sapien
ggtgtgatgtttatggaatcttgga

SEQ ID NO: 2753630 - DNA, 25 bp, Homo sapien
atggaatcttggatgatagaagagc

SEQ ID NO: 2753631 - DNA, 25 bp, Homo sapien
gaaaacagatggatgccttaggcca

SEQ ID NO: 2753632 - DNA, 25 bp, Homo sapien
catcttcatctatggccaattttgg

SEQ ID NO: 2753633 - DNA, 25 bp, Homo sapien
cagcccttgaaggttctgcatcttc

SEQ ID NO: 2753634 - DNA, 25 bp, Homo sapien
ctcaggagcccaggttggcagcaga

SEQ ID NO: 2753635 - DNA, 25 bp, Homo sapien
tcctctgaggatctgtcacatgctc

SEQ ID NO: 2753636 - DNA, 25 bp, Homo sapien
ctgtgcttcctctgaggatctgtca

SEQ ID NO: 2753637 - DNA, 25 bp, Homo sapien
ctctgaggatctgtcacatgctctc

SEQ ID NO: 2753638 - DNA, 25 bp, Homo sapien
cttcctctgaggatctgtcacatgc

SEQ ID NO: 2753639 - DNA, 25 bp, Homo sapien
tgtgcaaaatagctccgtgagcagt

SEQ ID NO: 2753640 - DNA, 25 bp, Homo sapien
aacttgtgcaaaatagctccgtgag

SEQ ID NO: 2753641 - DNA, 25 bp, Homo sapien
aaaatagctccgtgagcagtcagca

SEQ ID NO: 2753642 - DNA, 25 bp, Homo sapien
cacctgactctaacttgtgcaaaat

SEQ ID NO: 2753643 - DNA, 25 bp, Homo sapien
acggtgacgctttcctttggcagaa

SEQ ID NO: 2753644 - DNA, 25 bp, Homo sapien
ggtgacgctttcctttggcagaacc

SEQ ID NO: 2753645 - DNA, 25 bp, Homo sapien
tgacgctttcctttggcagaaccct

SEQ ID NO: 2753646 - DNA, 25 bp, Homo sapien
cacggtgacgctttcctttggcaga

SEQ ID NO: 2753647 - DNA, 25 bp, Homo sapien
tccaggaacacaaagatagatctgc

SEQ ID NO: 2753648 - DNA, 25 bp, Homo sapien
aggactaagggcattaacttttcat

SEQ ID NO: 2753649 - DNA, 25 bp, Homo sapien
tgccgcttggcctctcacaatctag

SEQ ID NO: 2753650 - DNA, 25 bp, Homo sapien
tgtcaacatgatatagcttcccatg

SEQ ID NO: 2753651 - DNA, 25 bp, Homo sapien
tcagtagtctacgacctggaggtgg

SEQ ID NO: 2753652 - DNA, 25 bp, Homo sapien
gagaaactggacagagcctattaag

SEQ ID NO: 2753653 - DNA, 25 bp, Homo sapien
ttagaatgctccctgtaaatgtgcc

SEQ ID NO: 2753654 - DNA, 25 bp, Homo sapien
gcctattaagcctgcatgaaattgt

SEQ ID NO: 2753655 - DNA, 25 bp, Homo sapien
cagattttactgacttaaatttatc

SEQ ID NO: 2753656 - DNA, 25 bp, Homo sapien
cacattgtcaggttctggctaagcc

SEQ ID NO: 2753657 - DNA, 25 bp, Homo sapien
taagccttaggcagattttactgac

SEQ ID NO: 2753658 - DNA, 25 bp, Homo sapien
aaagacagaatagtgtcacattgtc

SEQ ID NO: 2753659 - DNA, 25 bp, Homo sapien
cctctctgtgtgatagggtggggat

SEQ ID NO: 2753660 - DNA, 25 bp, Homo sapien
taggcacccggtggcgttacgcagc

SEQ ID NO: 2753661 - DNA, 25 bp, Homo sapien
cttaggcacccggtggcgttacgca

SEQ ID NO: 2753662 - DNA, 25 bp, Homo sapien
ggcacccggtggcgttacgcagcac

SEQ ID NO: 2753663 - DNA, 25 bp, Homo sapien
ttaggcacccggtggcgttacgcag

SEQ ID NO: 2753664 - DNA, 25 bp, Homo sapien
cctgagtgggggataatcaccgcgt

SEQ ID NO: 2753665 - DNA, 25 bp, Homo sapien
tcatcctgaagaggcgaattttccc

SEQ ID NO: 2753666 - DNA, 25 bp, Homo sapien
tcaccgcgttggtcagtactgctag

SEQ ID NO: 2753667 - DNA, 25 bp, Homo sapien
tcagtactgctagggcatcctggat

SEQ ID NO: 2753668 - DNA, 25 bp, Homo sapien
tttgagtgcatcgcatgaggagagg

SEQ ID NO: 2753669 - DNA, 25 bp, Homo sapien
ttgagtgcatcgcatgaggagaggt

SEQ ID NO: 2753670 - DNA, 25 bp, Homo sapien
gagtgcatcgcatgaggagaggttc

SEQ ID NO: 2753671 - DNA, 25 bp, Homo sapien
tgagtgcatcgcatgaggagaggtt

SEQ ID NO: 2753672 - DNA, 25 bp, Homo sapien
tcactggataataatattaacactc

SEQ ID NO: 2753673 - DNA, 25 bp, Homo sapien
gaggccacttcagaaccctaaggga

SEQ ID NO: 2753674 - DNA, 25 bp, Homo sapien
tagctttaacatgcacaattcaggg

SEQ ID NO: 2753675 - DNA, 25 bp, Homo sapien
tggagacgttctggccttgagcaca

SEQ ID NO: 2753676 - DNA, 25 bp, Homo sapien
aattcagacgtaacactggctggct

SEQ ID NO: 2753677 - DNA, 25 bp, Homo sapien
atactgagccgcagttcccatttaa

SEQ ID NO: 2753678 - DNA, 25 bp, Homo sapien
tcacaagtaatttgaaactgtttct

SEQ ID NO: 2753679 - DNA, 25 bp, Homo sapien
tatttgtaaaaaatactgagccgca

SEQ ID NO: 2753680 - DNA, 25 bp, Homo sapien
gaatgtcagtggaaaccttcttctg

SEQ ID NO: 2753681 - DNA, 25 bp, Homo sapien
tgagcactcccggttgcctgaggat

SEQ ID NO: 2753682 - DNA, 25 bp, Homo sapien
agtctactagtatgtgggcccggag

SEQ ID NO: 2753683 - DNA, 25 bp, Homo sapien
gctgacagagtctactagtatgtgg

SEQ ID NO: 2753684 - DNA, 25 bp, Homo sapien
agggctgagcactcccggttgcctg

SEQ ID NO: 2753685 - DNA, 25 bp, Homo sapien
acatgtggggccactttgcccggga

SEQ ID NO: 2753686 - DNA, 25 bp, Homo sapien
agcaggtgagatggcgacaaccagc

SEQ ID NO: 2753687 - DNA, 25 bp, Homo sapien
tcagggtagacacatgtggggccac

SEQ ID NO: 2753688 - DNA, 25 bp, Homo sapien
atggcgacaaccagcagagcacaca

SEQ ID NO: 2753689 - DNA, 25 bp, Homo sapien
tggcaacgacaacagccgtcatgat

SEQ ID NO: 2753690 - DNA, 25 bp, Homo sapien
cgtcatgatggaagagcgagttgct

SEQ ID NO: 2753691 - DNA, 25 bp, Homo sapien
tgagtttcatcctctaacggataac

SEQ ID NO: 2753692 - DNA, 25 bp, Homo sapien
tcaaacgtttcatcaggaatgacaa

SEQ ID NO: 2753693 - DNA, 25 bp, Homo sapien
tgtccaaggcactagtaagcgtgca

SEQ ID NO: 2753694 - DNA, 25 bp, Homo sapien
caaggcactagtaagcgtgcagggc

SEQ ID NO: 2753695 - DNA, 25 bp, Homo sapien
actagtaagcgtgcagggcttggcc

SEQ ID NO: 2753696 - DNA, 25 bp, Homo sapien
aggcactagtaagcgtgcagggctt

SEQ ID NO: 2753697 - DNA, 25 bp, Homo sapien
tgcttcccctggtctccataagatg

SEQ ID NO: 2753698 - DNA, 25 bp, Homo sapien
ggtctccataagatgtgccctagtg

SEQ ID NO: 2753699 - DNA, 25 bp, Homo sapien
aaggccatgaggaactctgcttccc

SEQ ID NO: 2753700 - DNA, 25 bp, Homo sapien
tttgggatgaaaggccatgaggaac

SEQ ID NO: 2753701 - DNA, 25 bp, Homo sapien
ggaagctgccctgatccaacggctg

SEQ ID NO: 2753702 - DNA, 25 bp, Homo sapien
gataagtctaactaattctggcatc

SEQ ID NO: 2753703 - DNA, 25 bp, Homo sapien
ctgcctgtgccatggtagataagtc

SEQ ID NO: 2753704 - DNA, 25 bp, Homo sapien
ggagaagggaagctgccctgatcca

SEQ ID NO: 2753705 - DNA, 25 bp, Homo sapien
ctgctgccagtatctaaatgttgca

SEQ ID NO: 2753706 - DNA, 25 bp, Homo sapien
tgcaaggtggcaacaattcctgtga

SEQ ID NO: 2753707 - DNA, 25 bp, Homo sapien
cagtatctaaatgttgcaaggtggc

SEQ ID NO: 2753708 - DNA, 25 bp, Homo sapien
ggcaacaattcctgtgattccagtt

SEQ ID NO: 2753709 - DNA, 25 bp, Homo sapien
tgttctcctagatgctctcttccaa

SEQ ID NO: 2753710 - DNA, 25 bp, Homo sapien
gttctcctagatgctctcttccaat

SEQ ID NO: 2753711 - DNA, 25 bp, Homo sapien
ttctcctagatgctctcttccaatt

SEQ ID NO: 2753712 - DNA, 25 bp, Homo sapien
atgttctcctagatgctctcttcca

SEQ ID NO: 2753713 - DNA, 25 bp, Homo sapien
tagagtggaagcttggccaagtggc

SEQ ID NO: 2753714 - DNA, 25 bp, Homo sapien
tgaagttcagccaagcacaacatga

SEQ ID NO: 2753715 - DNA, 25 bp, Homo sapien
aagttcagccaagcacaacatgaaa

SEQ ID NO: 2753716 - DNA, 25 bp, Homo sapien
tcagcttgtcaacatgttctgatat

SEQ ID NO: 2753717 - DNA, 25 bp, Homo sapien
ctgaagttcagccaagcacaacatg

SEQ ID NO: 2753718 - DNA, 25 bp, Homo sapien
aatggagtagactgcggtcagttcc

SEQ ID NO: 2753719 - DNA, 25 bp, Homo sapien
caaatggcagcacaggataagacac

SEQ ID NO: 2753720 - DNA, 25 bp, Homo sapien
ggccgacacccagaagctgttggaa

SEQ ID NO: 2753721 - DNA, 25 bp, Homo sapien
gaagcaatgtcgaaggcaatggagt

SEQ ID NO: 2753722 - DNA, 25 bp, Homo sapien
gtcagtcgtcttgcggagtaacctc

SEQ ID NO: 2753723 - DNA, 25 bp, Homo sapien
tcccggatctccaggtcagtcgtct

SEQ ID NO: 2753724 - DNA, 25 bp, Homo sapien
ggatctccaggtcagtcgtcttgcg

SEQ ID NO: 2753725 - DNA, 25 bp, Homo sapien
tccaggtcagtcgtcttgcggagta

SEQ ID NO: 2753726 - DNA, 25 bp, Homo sapien
gagctccacaggcactacggtggac

SEQ ID NO: 2753727 - DNA, 25 bp, Homo sapien
gtcatccgatgatccaacaggtcca

SEQ ID NO: 2753728 - DNA, 25 bp, Homo sapien
gctgggatgccaccacagtttttca

SEQ ID NO: 2753729 - DNA, 25 bp, Homo sapien
tttgttatcatcgttggccttccca

SEQ ID NO: 2753730 - DNA, 25 bp, Homo sapien
acttcatattgagtgccttagacat

SEQ ID NO: 2753731 - DNA, 25 bp, Homo sapien
catttgcaaaagggagggatttgga

SEQ ID NO: 2753732 - DNA, 25 bp, Homo sapien
ctctgcatttgcaaaagggagggat

SEQ ID NO: 2753733 - DNA, 25 bp, Homo sapien
atttgcaaaagggagggatttggag

SEQ ID NO: 2753734 - DNA, 25 bp, Homo sapien
ctgctctgcatttgcaaaagggagg

SEQ ID NO: 2753735 - DNA, 25 bp, Homo sapien
attctgatctttcggctttttttgt

SEQ ID NO: 2753736 - DNA, 25 bp, Homo sapien
ttctgatctttcggctttttttgtg

SEQ ID NO: 2753737 - DNA, 25 bp, Homo sapien
tgacactggtctggcaaacatcatg

SEQ ID NO: 2753738 - DNA, 25 bp, Homo sapien
gaacaaggacttccagtgcctaaga

SEQ ID NO: 2753739 - DNA, 25 bp, Homo sapien
gactgagcgcagttttgactactga

SEQ ID NO: 2753740 - DNA, 25 bp, Homo sapien
tcaagaatgatggtatgaccacccc

SEQ ID NO: 2753741 - DNA, 25 bp, Homo sapien
ccagccctcctaacaatggcactgt

SEQ ID NO: 2753742 - DNA, 25 bp, Homo sapien
agggaggctcttcccctccattgtg

SEQ ID NO: 2753743 - DNA, 25 bp, Homo sapien
catttgtagttccaccaggttgagg

SEQ ID NO: 2753744 - DNA, 25 bp, Homo sapien
ctgttcaagtcagggaggctcttcc

SEQ ID NO: 2753745 - DNA, 25 bp, Homo sapien
caggttgaggaggtctaaatcttta

SEQ ID NO: 2753746 - DNA, 25 bp, Homo sapien
tcacctgtgatgcaaatgcgaatgg

SEQ ID NO: 2753747 - DNA, 25 bp, Homo sapien
gcatcaaaacggcaaagcacagtga

SEQ ID NO: 2753748 - DNA, 25 bp, Homo sapien
ggtacaggtcttcttctctaaacga

SEQ ID NO: 2753749 - DNA, 25 bp, Homo sapien
tgagaaatccctcagtgagtgccgg

SEQ ID NO: 2753750 - DNA, 25 bp, Homo sapien
taagtaaaaacacgactgaatcacc

SEQ ID NO: 2753751 - DNA, 25 bp, Homo sapien
agtaaaaacacgactgaatcaccat

SEQ ID NO: 2753752 - DNA, 25 bp, Homo sapien
ggtaagtaaaaacacgactgaatca

SEQ ID NO: 2753753 - DNA, 25 bp, Homo sapien
tggtaagtaaaaacacgactgaatc

SEQ ID NO: 2753754 - DNA, 25 bp, Homo sapien
ccagagtcggaattgggaagagaaa

SEQ ID NO: 2753755 - DNA, 25 bp, Homo sapien
tgatgtttagtatgtctttaggatt

SEQ ID NO: 2753756 - DNA, 25 bp, Homo sapien
tcacgttccaagtatggcatttgac

SEQ ID NO: 2753757 - DNA, 25 bp, Homo sapien
gaagagaaagacaaatcacgttcca

SEQ ID NO: 2753758 - DNA, 25 bp, Homo sapien
acagaggtgttgcaagtaggctgcc

SEQ ID NO: 2753759 - DNA, 25 bp, Homo sapien
ctccaaaacagaggtgttgcaagta

SEQ ID NO: 2753760 - DNA, 25 bp, Homo sapien
aaacagaggtgttgcaagtaggctg

SEQ ID NO: 2753761 - DNA, 25 bp, Homo sapien
tgtctccaaaacagaggtgttgcaa

SEQ ID NO: 2753762 - DNA, 25 bp, Homo sapien
ggtgctgcaacatctgaatcacttc

SEQ ID NO: 2753763 - DNA, 25 bp, Homo sapien
cagttccgggtctctccatccaaat

SEQ ID NO: 2753764 - DNA, 25 bp, Homo sapien
tagactggaccgagggaaactggtg

SEQ ID NO: 2753765 - DNA, 25 bp, Homo sapien
ttccgggtctctccatccaaattct

SEQ ID NO: 2753766 - DNA, 25 bp, Homo sapien
caagtgcaaacgtgtatactacata

SEQ ID NO: 2753767 - DNA, 25 bp, Homo sapien
catttaagcttgagtggattattca

SEQ ID NO: 2753768 - DNA, 25 bp, Homo sapien
tacagatcaatctatcaactgaagt

SEQ ID NO: 2753769 - DNA, 25 bp, Homo sapien
agcgcgcccagcctagtaaatagtt

SEQ ID NO: 2753770 - DNA, 25 bp, Homo sapien
catgaggtgaccatctctcgcttca

SEQ ID NO: 2753771 - DNA, 25 bp, Homo sapien
taacgaatgaagaaagggcttggac

SEQ ID NO: 2753772 - DNA, 25 bp, Homo sapien
cagtggcctcccactcaaatgcggg

SEQ ID NO: 2753773 - DNA, 25 bp, Homo sapien
gatgacaccgtcatgctgtgggcca

SEQ ID NO: 2753774 - DNA, 25 bp, Homo sapien
tgggggcctccagagaggacggctg

SEQ ID NO: 2753775 - DNA, 25 bp, Homo sapien
ctgccaaggtgtggagtcaccgggg

SEQ ID NO: 2753776 - DNA, 25 bp, Homo sapien
caaggtgtggagtcaccgggggtgg

SEQ ID NO: 2753777 - DNA, 25 bp, Homo sapien
atgggggcctccagagaggacggct

SEQ ID NO: 2753778 - DNA, 25 bp, Homo sapien
tgttggcaggaagcgagactcgtac

SEQ ID NO: 2753779 - DNA, 25 bp, Homo sapien
tagcatccctgagtgccgtgttggc

SEQ ID NO: 2753780 - DNA, 25 bp, Homo sapien
gaaagtcagatcctttcagcgtagc

SEQ ID NO: 2753781 - DNA, 25 bp, Homo sapien
ggtgcagcgctttcagttcattgta

SEQ ID NO: 2753782 - DNA, 25 bp, Homo sapien
gatctgaaaagaaccgctttgttga

SEQ ID NO: 2753783 - DNA, 25 bp, Homo sapien
gaaaagaaccgctttgttgaggcca

SEQ ID NO: 2753784 - DNA, 25 bp, Homo sapien
tgaaaagaaccgctttgttgaggcc

SEQ ID NO: 2753785 - DNA, 25 bp, Homo sapien
aaaagatctgaaaagaaccgctttg

SEQ ID NO: 2753786 - DNA, 25 bp, Homo sapien
ggctttcatgggagggttcgcttgg

SEQ ID NO: 2753787 - DNA, 25 bp, Homo sapien
tttcatgggagggttcgcttgggag

SEQ ID NO: 2753788 - DNA, 25 bp, Homo sapien
gagggttcgcttgggagagcggcat

SEQ ID NO: 2753789 - DNA, 25 bp, Homo sapien
catgggagggttcgcttgggagagc

SEQ ID NO: 2753790 - DNA, 25 bp, Homo sapien
tttaattcccaagtcattcaatact

SEQ ID NO: 2753791 - DNA, 25 bp, Homo sapien
taattcccaagtcattcaatacttg

SEQ ID NO: 2753792 - DNA, 25 bp, Homo sapien
tcccaagtcattcaatacttgcaca

SEQ ID NO: 2753793 - DNA, 25 bp, Homo sapien
aagtcattcaatacttgcacatgat

SEQ ID NO: 2753794 - DNA, 25 bp, Homo sapien
taatacagtcttcaacatgtgggct

SEQ ID NO: 2753795 - DNA, 25 bp, Homo sapien
tgtggttctgttcacgtcgtctgac

SEQ ID NO: 2753796 - DNA, 25 bp, Homo sapien
tctgacgtgtattgtgtttttccct

SEQ ID NO: 2753797 - DNA, 25 bp, Homo sapien
tgtccagtgtgtctctaatacagtc

SEQ ID NO: 2753798 - DNA, 25 bp, Homo sapien
gactgcggtccatatctaccctggg

SEQ ID NO: 2753799 - DNA, 25 bp, Homo sapien
aggaattgcgggtctcctggttact

SEQ ID NO: 2753800 - DNA, 25 bp, Homo sapien
catggattaaccatcttcaaggaat

SEQ ID NO: 2753801 - DNA, 25 bp, Homo sapien
acactcctgactgcggtccatatct

SEQ ID NO: 2753802 - DNA, 25 bp, Homo sapien
taggagtgaatgtattaatctgaag

SEQ ID NO: 2753803 - DNA, 25 bp, Homo sapien
ataacaatgctaaagcttaggagtg

SEQ ID NO: 2753804 - DNA, 25 bp, Homo sapien
aagcttaggagtgaatgtattaatc

SEQ ID NO: 2753805 - DNA, 25 bp, Homo sapien
gtattaatctgaagagtaaaattcc

SEQ ID NO: 2753806 - DNA, 25 bp, Homo sapien
gtttgccccagtttccttagataca

SEQ ID NO: 2753807 - DNA, 25 bp, Homo sapien
gaatttaaatggttcatgcactgcc

SEQ ID NO: 2753808 - DNA, 25 bp, Homo sapien
tagcacgggctatagctacaatccc

SEQ ID NO: 2753809 - DNA, 25 bp, Homo sapien
caagttacatatgtcggtttgcccc

SEQ ID NO: 2753810 - DNA, 25 bp, Homo sapien
taccacttcgatgtcccacttgtgg

SEQ ID NO: 2753811 - DNA, 25 bp, Homo sapien
cccacttgtggaggtttagctacca

SEQ ID NO: 2753812 - DNA, 25 bp, Homo sapien
tcttcttaactttagtgaggatctg

SEQ ID NO: 2753813 - DNA, 25 bp, Homo sapien
ttggtctaaatttaccacttcgatg

SEQ ID NO: 2753814 - DNA, 25 bp, Homo sapien
tcttagctgaagtctcggagggatg

SEQ ID NO: 2753815 - DNA, 25 bp, Homo sapien
gaagaaaccatgctgaggagtcaca

SEQ ID NO: 2753816 - DNA, 25 bp, Homo sapien
caaacccggtaaatgccgcatgtgg

SEQ ID NO: 2753817 - DNA, 25 bp, Homo sapien
gacaatttcaagatgtgaccatggc

SEQ ID NO: 2753818 - DNA, 25 bp, Homo sapien
taggatcttacaggcctgtgcaggc

SEQ ID NO: 2753819 - DNA, 25 bp, Homo sapien
gacaagctttgcactttctctgact

SEQ ID NO: 2753820 - DNA, 25 bp, Homo sapien
gagcttctgtgtgtttggactgaca

SEQ ID NO: 2753821 - DNA, 25 bp, Homo sapien
cagataggtctgcttttcaactccg

SEQ ID NO: 2753822 - DNA, 25 bp, Homo sapien
ctgtgggaacaactggaattcctgc

SEQ ID NO: 2753823 - DNA, 25 bp, Homo sapien
aagggaagtggaggcattcctgagc

SEQ ID NO: 2753824 - DNA, 25 bp, Homo sapien
aagtggaggcattcctgagccccat

SEQ ID NO: 2753825 - DNA, 25 bp, Homo sapien
gggaagtggaggcattcctgagccc

SEQ ID NO: 2753826 - DNA, 25 bp, Homo sapien
cagtggaagggaagtggaggcattc

SEQ ID NO: 2753827 - DNA, 25 bp, Homo sapien
cctcaaccgtgttggtgttggtgac

SEQ ID NO: 2753828 - DNA, 25 bp, Homo sapien
caaccgtgttggtgttggtgacctg

SEQ ID NO: 2753829 - DNA, 25 bp, Homo sapien
cctttctcctcaaccgtgttggtgt

SEQ ID NO: 2753830 - DNA, 25 bp, Homo sapien
ttctcctcaaccgtgttggtgttgg

SEQ ID NO: 2753831 - DNA, 25 bp, Homo sapien
gcctgcacatattgctatttaagaa

SEQ ID NO: 2753832 - DNA, 25 bp, Homo sapien
ttgctatttaagaaagccctgtaat

SEQ ID NO: 2753833 - DNA, 25 bp, Homo sapien
tccatcatgcctgcacatattgcta

SEQ ID NO: 2753834 - DNA, 25 bp, Homo sapien
agtcatccttatcaacccaaggcat

SEQ ID NO: 2753835 - DNA, 25 bp, Homo sapien
ctgcaactcccatgatcagtaactt

SEQ ID NO: 2753836 - DNA, 25 bp, Homo sapien
tggaaactgggcctgccacacaacg

SEQ ID NO: 2753837 - DNA, 25 bp, Homo sapien
cacaacgcctctggtggtgtcctgt

SEQ ID NO: 2753838 - DNA, 25 bp, Homo sapien
cagtaacttttgcttctctatacgc

SEQ ID NO: 2753839 - DNA, 25 bp, Homo sapien
ctttgcaggcttacgaaaggcttgg

SEQ ID NO: 2753840 - DNA, 25 bp, Homo sapien
cctatatagatcaaaagacagtgcc

SEQ ID NO: 2753841 - DNA, 25 bp, Homo sapien
gagctgacccagtaaaattgagatt

SEQ ID NO: 2753842 - DNA, 25 bp, Homo sapien
gtgggcatcattagtacacaactga

SEQ ID NO: 2753843 - DNA, 25 bp, Homo sapien
gagccattgcgtccaatccaaaatt

SEQ ID NO: 2753844 - DNA, 25 bp, Homo sapien
ccacttcagctgaatgctatgggaa

SEQ ID NO: 2753845 - DNA, 25 bp, Homo sapien
gaatgaatggccacttaatatgcct

SEQ ID NO: 2753846 - DNA, 25 bp, Homo sapien
gatctacacgtgcagattattgcga

SEQ ID NO: 2753847 - DNA, 25 bp, Homo sapien
gattgacccagtgagccaattttgt

SEQ ID NO: 2753848 - DNA, 25 bp, Homo sapien
gaagacagtccctgaggaatgattg

SEQ ID NO: 2753849 - DNA, 25 bp, Homo sapien
gaggaatgattgacccagtgagcca

SEQ ID NO: 2753850 - DNA, 25 bp, Homo sapien
agacagtccctgaggaatgattgac

SEQ ID NO: 2753851 - DNA, 25 bp, Homo sapien
tttgcattccttcgaaaccacttcc

SEQ ID NO: 2753852 - DNA, 25 bp, Homo sapien
ctctctctggtgagggttccacaac

SEQ ID NO: 2753853 - DNA, 25 bp, Homo sapien
tgttcaagactagacccacaaaatc

SEQ ID NO: 2753854 - DNA, 25 bp, Homo sapien
cgtgggaaccaactttgggtagcag

SEQ ID NO: 2753855 - DNA, 25 bp, Homo sapien
gagaagaggctcgttccctagagga

SEQ ID NO: 2753856 - DNA, 25 bp, Homo sapien
gatagcacatggatttggaagagaa

SEQ ID NO: 2753857 - DNA, 25 bp, Homo sapien
gaagaggctcgttccctagaggaag

SEQ ID NO: 2753858 - DNA, 25 bp, Homo sapien
gaagagaagaggctcgttccctaga

SEQ ID NO: 2753859 - DNA, 25 bp, Homo sapien
tacgagagcacaaaacggatttcca

SEQ ID NO: 2753860 - DNA, 25 bp, Homo sapien
tccaccatcgcaaaggatggggtat

SEQ ID NO: 2753861 - DNA, 25 bp, Homo sapien
tatacgagagcacaaaacggatttc

SEQ ID NO: 2753862 - DNA, 25 bp, Homo sapien
ctgtatacgagagcacaaaacggat

SEQ ID NO: 2753863 - DNA, 25 bp, Homo sapien
gtcacagaaagtcaatatggcttct

SEQ ID NO: 2753864 - DNA, 25 bp, Homo sapien
gaaccaatccttttgtatcctatga

SEQ ID NO: 2753865 - DNA, 25 bp, Homo sapien
gctttgccacaatccaaatgactga

SEQ ID NO: 2753866 - DNA, 25 bp, Homo sapien
gaagagatactggtctacaataaga

SEQ ID NO: 2753867 - DNA, 25 bp, Homo sapien
gccggatttgctgtatggagactca

SEQ ID NO: 2753868 - DNA, 25 bp, Homo sapien
caacagagggacaatactgcagctg

SEQ ID NO: 2753869 - DNA, 25 bp, Homo sapien
ccaaggtgccttcaggcgggagagc

SEQ ID NO: 2753870 - DNA, 25 bp, Homo sapien
tttctgaatgctatcaatggacggg

SEQ ID NO: 2753871 - DNA, 25 bp, Homo sapien
ctgcaaggggacggagtcgacacca

SEQ ID NO: 2753872 - DNA, 25 bp, Homo sapien
tgcaaggggacggagtcgacaccag

SEQ ID NO: 2753873 - DNA, 25 bp, Homo sapien
cctgctcacagaaatggttaaccag

SEQ ID NO: 2753874 - DNA, 25 bp, Homo sapien
gtaaaaaattgaggacctgctcaca

SEQ ID NO: 2753875 - DNA, 25 bp, Homo sapien
ctacgacaggaaagtagggacaaag

SEQ ID NO: 2753876 - DNA, 25 bp, Homo sapien
tgctcacagaaatggttaaccaggt

SEQ ID NO: 2753877 - DNA, 25 bp, Homo sapien
gggaccgagcaaactcatcacagga

SEQ ID NO: 2753878 - DNA, 25 bp, Homo sapien
taagatgaggggaccgagcaaactc

SEQ ID NO: 2753879 - DNA, 25 bp, Homo sapien
ccgagcaaactcatcacaggacaag

SEQ ID NO: 2753880 - DNA, 25 bp, Homo sapien
gaggggaccgagcaaactcatcaca

SEQ ID NO: 2753881 - DNA, 25 bp, Homo sapien
tatgtgtatccctagttgacatgac

SEQ ID NO: 2753882 - DNA, 25 bp, Homo sapien
taatgatgtaattccacgtatgagg

SEQ ID NO: 2753883 - DNA, 25 bp, Homo sapien
tatgaggtgacacatcttccagtaa

SEQ ID NO: 2753884 - DNA, 25 bp, Homo sapien
tcttttcaacattgctacgcttaat

SEQ ID NO: 2753885 - DNA, 25 bp, Homo sapien
tgatcacactcataccttcccttgg

SEQ ID NO: 2753886 - DNA, 25 bp, Homo sapien
tgaacccgagctggtagagcgtaca

SEQ ID NO: 2753887 - DNA, 25 bp, Homo sapien
gcaccgaatgaggagtgatcacact

SEQ ID NO: 2753888 - DNA, 25 bp, Homo sapien
gagcgtacagctgtagcaccgaatg

SEQ ID NO: 2753889 - DNA, 25 bp, Homo sapien
tcatcaagcatacgtctttcacgtc

SEQ ID NO: 2753890 - DNA, 25 bp, Homo sapien
atcatcaagcatacgtctttcacgt

SEQ ID NO: 2753891 - DNA, 25 bp, Homo sapien
catcatcaagcatacgtctttcacg

SEQ ID NO: 2753892 - DNA, 25 bp, Homo sapien
tagatgggatctatgtggtgttctg

SEQ ID NO: 2753893 - DNA, 25 bp, Homo sapien
gctgctgtatgaggctcgggaacca

SEQ ID NO: 2753894 - DNA, 25 bp, Homo sapien
tgtgctcgtgcggtaggtgccggtg

SEQ ID NO: 2753895 - DNA, 25 bp, Homo sapien
gggcttctgatagacgcggtcttca

SEQ ID NO: 2753896 - DNA, 25 bp, Homo sapien
cggactaacatatcagggtgctggg

SEQ ID NO: 2753897 - DNA, 25 bp, Homo sapien
tcagcctctctattccggactaaca

SEQ ID NO: 2753898 - DNA, 25 bp, Homo sapien
tgctgggattccttgatcttggcca

SEQ ID NO: 2753899 - DNA, 25 bp, Homo sapien
tctattccggactaacatatcaggg

SEQ ID NO: 2753900 - DNA, 25 bp, Homo sapien
acaaaacacagaatttgttcccata

SEQ ID NO: 2753901 - DNA, 25 bp, Homo sapien
tctctggcagcgtacaaaacacaga

SEQ ID NO: 2753902 - DNA, 25 bp, Homo sapien
tgaggttttccgatacaatttattg

SEQ ID NO: 2753903 - DNA, 25 bp, Homo sapien
gctgatgaggttttccgatacaatt

SEQ ID NO: 2753904 - DNA, 25 bp, Homo sapien
tctcaacatcctaaacagaggcctt

SEQ ID NO: 2753905 - DNA, 25 bp, Homo sapien
tcaaggtatgaacaggaataaggct

SEQ ID NO: 2753906 - DNA, 25 bp, Homo sapien
gtatctttcaccaacactcagagtg

SEQ ID NO: 2753907 - DNA, 25 bp, Homo sapien
taagataggtaataggtaggctgca

SEQ ID NO: 2753908 - DNA, 25 bp, Homo sapien
tgagtcgcgccaggtggcagcgagc

SEQ ID NO: 2753909 - DNA, 25 bp, Homo sapien
tctgctcaagccgggctgctgcttc

SEQ ID NO: 2753910 - DNA, 25 bp, Homo sapien
gcgcccaggtgagtcgcgccaggtg

SEQ ID NO: 2753911 - DNA, 25 bp, Homo sapien
tgcaactactacaacctggcagaca

SEQ ID NO: 2753912 - DNA, 25 bp, Homo sapien
cttggtgggcgacagggtggcgtac

SEQ ID NO: 2753913 - DNA, 25 bp, Homo sapien
tgtactgctcggacgcgtggaccag

SEQ ID NO: 2753914 - DNA, 25 bp, Homo sapien
gcgtacgtgccgatggtggagctca

SEQ ID NO: 2753915 - DNA, 25 bp, Homo sapien
gctcctgcgagtgcttgctgtactg

SEQ ID NO: 2753916 - DNA, 25 bp, Homo sapien
ctggtggatgggcgaggaggagatg

SEQ ID NO: 2753917 - DNA, 25 bp, Homo sapien
gtggatgggcgaggaggagatggtg

SEQ ID NO: 2753918 - DNA, 25 bp, Homo sapien
ggatgggcgaggaggagatggtgga

SEQ ID NO: 2753919 - DNA, 25 bp, Homo sapien
tggtggatgggcgaggaggagatgg

SEQ ID NO: 2753920 - DNA, 25 bp, Homo sapien
aggtcacgcggatcggggacaggcc

SEQ ID NO: 2753921 - DNA, 25 bp, Homo sapien
gtgctgtaggacttggccaggcggc

SEQ ID NO: 2753922 - DNA, 25 bp, Homo sapien
ggtggggggcgaggtcacgcggatc

SEQ ID NO: 2753923 - DNA, 25 bp, Homo sapien
cgacgatgttgatgggcgagctggt

SEQ ID NO: 2753924 - DNA, 25 bp, Homo sapien
gcgcggcgcggcgtaggtggcgccc

SEQ ID NO: 2753925 - DNA, 25 bp, Homo sapien
gcggcgcggcgtaggtggcgccctc

SEQ ID NO: 2753926 - DNA, 25 bp, Homo sapien
gcgcggcgtaggtggcgccctcggg

SEQ ID NO: 2753927 - DNA, 25 bp, Homo sapien
tgcagcttggtgggcgaaccgccct

SEQ ID NO: 2753928 - DNA, 25 bp, Homo sapien
ggctgggcgcgaacggctcccgcgg

SEQ ID NO: 2753929 - DNA, 25 bp, Homo sapien
aggtggccggcgcggctggtcgtgc

SEQ ID NO: 2753930 - DNA, 25 bp, Homo sapien
cgggcggcgcgtcgggcaggtggaa

SEQ ID NO: 2753931 - DNA, 25 bp, Homo sapien
cccaggctgggcgcgaacggctccc

SEQ ID NO: 2753932 - DNA, 25 bp, Homo sapien
tggagtccactgacaccatacagca

SEQ ID NO: 2753933 - DNA, 25 bp, Homo sapien
cttggagtccactgacaccatacag

SEQ ID NO: 2753934 - DNA, 25 bp, Homo sapien
gagtccactgacaccatacagcact

SEQ ID NO: 2753935 - DNA, 25 bp, Homo sapien
gtccactgacaccatacagcactgg

SEQ ID NO: 2753936 - DNA, 25 bp, Homo sapien
gccggatactggaaagacccttcag

SEQ ID NO: 2753937 - DNA, 25 bp, Homo sapien
gcctcgggccgggagctgtgaaggg

SEQ ID NO: 2753938 - DNA, 25 bp, Homo sapien
tctggcccgtagctcgggcttgtgt

SEQ ID NO: 2753939 - DNA, 25 bp, Homo sapien
tgctatggtagctggccggatactg

SEQ ID NO: 2753940 - DNA, 25 bp, Homo sapien
gatctcatcctgacctacatagaga

SEQ ID NO: 2753941 - DNA, 25 bp, Homo sapien
gatttttcaaatgatctcatcctga

SEQ ID NO: 2753942 - DNA, 25 bp, Homo sapien
tagagacatttcttatgagacaaat

SEQ ID NO: 2753943 - DNA, 25 bp, Homo sapien
tgggatcagacaatatcagaaacat

SEQ ID NO: 2753944 - DNA, 25 bp, Homo sapien
tcttttttgtacagtctacctgggc

SEQ ID NO: 2753945 - DNA, 25 bp, Homo sapien
ccccttgagatagtaatgcatccta

SEQ ID NO: 2753946 - DNA, 25 bp, Homo sapien
atggcttgtactggccagcctctcc

SEQ ID NO: 2753947 - DNA, 25 bp, Homo sapien
ggcaaagaaggttaaagcagataca

SEQ ID NO: 2753948 - DNA, 25 bp, Homo sapien
tagagagcacagacatatgaaacac

SEQ ID NO: 2753949 - DNA, 25 bp, Homo sapien
gagcacagacatatgaaacacgtta

SEQ ID NO: 2753950 - DNA, 25 bp, Homo sapien
tttagagagcacagacatatgaaac

SEQ ID NO: 2753951 - DNA, 25 bp, Homo sapien
atgtaactaactttcaattagcttt

SEQ ID NO: 2753952 - DNA, 25 bp, Homo sapien
gatagaatagtcctcagaactgagc

SEQ ID NO: 2753953 - DNA, 25 bp, Homo sapien
tgagcaacagcggatcatcatgtcc

SEQ ID NO: 2753954 - DNA, 25 bp, Homo sapien
tagacatctgaactgtgagcaacag

SEQ ID NO: 2753955 - DNA, 25 bp, Homo sapien
tttgccttcaagacgctgacctgag

SEQ ID NO: 2753956 - DNA, 25 bp, Homo sapien
tctggctctattgccagagctggag

SEQ ID NO: 2753957 - DNA, 25 bp, Homo sapien
aaagtctggctctattgccagagct

SEQ ID NO: 2753958 - DNA, 25 bp, Homo sapien
acaaagtctggctctattgccagag

SEQ ID NO: 2753959 - DNA, 25 bp, Homo sapien
agagctggagtggagtgaggcaatc

SEQ ID NO: 2753960 - DNA, 25 bp, Homo sapien
tgtagaataatcctgtgggtcaagt

SEQ ID NO: 2753961 - DNA, 25 bp, Homo sapien
gggtcaagtattcctgattcctgta

SEQ ID NO: 2753962 - DNA, 25 bp, Homo sapien
gtgacctaatacaggagtccaccag

SEQ ID NO: 2753963 - DNA, 25 bp, Homo sapien
caccagctcgagacctgttgtaagc

SEQ ID NO: 2753964 - DNA, 25 bp, Homo sapien
tattttaaagtgatgaacaaacaca

SEQ ID NO: 2753965 - DNA, 25 bp, Homo sapien
tgaaatattttaaagtgatgaacaa

SEQ ID NO: 2753966 - DNA, 25 bp, Homo sapien
attttaaagtgatgaacaaacacat

SEQ ID NO: 2753967 - DNA, 25 bp, Homo sapien
aatattttaaagtgatgaacaaaca

SEQ ID NO: 2753968 - DNA, 25 bp, Homo sapien
ccactgaaactgctcttctgctgaa

SEQ ID NO: 2753969 - DNA, 25 bp, Homo sapien
cttgtgactgccactgaaactgctc

SEQ ID NO: 2753970 - DNA, 25 bp, Homo sapien
tgccactgaaactgctcttctgctg

SEQ ID NO: 2753971 - DNA, 25 bp, Homo sapien
actgccactgaaactgctcttctgc

SEQ ID NO: 2753972 - DNA, 25 bp, Homo sapien
tgctgtatatcccttttgattcgca

SEQ ID NO: 2753973 - DNA, 25 bp, Homo sapien
ccttttgattcgcaagtattagcat

SEQ ID NO: 2753974 - DNA, 25 bp, Homo sapien
tatgaaaagggattccactttgata

SEQ ID NO: 2753975 - DNA, 25 bp, Homo sapien
gaaaagggattccactttgatataa

SEQ ID NO: 2753976 - DNA, 25 bp, Homo sapien
caggcatggcggtgtctgcatctaa

SEQ ID NO: 2753977 - DNA, 25 bp, Homo sapien
gccagacacaaccagtcctagagaa

SEQ ID NO: 2753978 - DNA, 25 bp, Homo sapien
cggtgtctgcatctaagcagccaga

SEQ ID NO: 2753979 - DNA, 25 bp, Homo sapien
tgacacagtcaccacaaactcttgg

SEQ ID NO: 2753980 - DNA, 25 bp, Homo sapien
cttctccgggtacacagcagctgta

SEQ ID NO: 2753981 - DNA, 25 bp, Homo sapien
tctccgggtacacagcagctgtatg

SEQ ID NO: 2753982 - DNA, 25 bp, Homo sapien
tacacagcagctgtatgtgtcctga

SEQ ID NO: 2753983 - DNA, 25 bp, Homo sapien
cagctgtatgtgtcctgaagttatc

SEQ ID NO: 2753984 - DNA, 25 bp, Homo sapien
ggcagaagtgatcaatctaccgagt

SEQ ID NO: 2753985 - DNA, 25 bp, Homo sapien
tcacctgtaagatcaagccccaact

SEQ ID NO: 2753986 - DNA, 25 bp, Homo sapien
tctttctggactgggagcaccttga

SEQ ID NO: 2753987 - DNA, 25 bp, Homo sapien
caggtgttcacaaatggaggtcagc

SEQ ID NO: 2753988 - DNA, 25 bp, Homo sapien
tgtcatgagcatgtccccgttctgc

SEQ ID NO: 2753989 - DNA, 25 bp, Homo sapien
ctgtcatgagcatgtccccgttctg

SEQ ID NO: 2753990 - DNA, 25 bp, Homo sapien
tgagcatgtccccgttctgcctctg

SEQ ID NO: 2753991 - DNA, 25 bp, Homo sapien
tcatgagcatgtccccgttctgcct

SEQ ID NO: 2753992 - DNA, 25 bp, Homo sapien
gacaaaatcctcatcacctaatgtg

SEQ ID NO: 2753993 - DNA, 25 bp, Homo sapien
gatgaagcagctcgggaaattcgca

SEQ ID NO: 2753994 - DNA, 25 bp, Homo sapien
aggacccggagtgagccctgatgaa

SEQ ID NO: 2753995 - DNA, 25 bp, Homo sapien
gaaattcgcaggctgccaggacatt

SEQ ID NO: 2753996 - DNA, 25 bp, Homo sapien
tggttgcttgagtgcttactgatgg

SEQ ID NO: 2753997 - DNA, 25 bp, Homo sapien
agtactcatgtataatggcgaagat

SEQ ID NO: 2753998 - DNA, 25 bp, Homo sapien
tgtgaatataactaggagcgttgag

SEQ ID NO: 2753999 - DNA, 25 bp, Homo sapien
tggcgaagataaaataacagttgtg

SEQ ID NO: 2754000 - DNA, 25 bp, Homo sapien
ttaaaggtgattaagttgactgcca

SEQ ID NO: 2754001 - DNA, 25 bp, Homo sapien
taaaggtgattaagttgactgccat

SEQ ID NO: 2754002 - DNA, 25 bp, Homo sapien
gcccggtctatccaatataggatta

SEQ ID NO: 2754003 - DNA, 25 bp, Homo sapien
ccacttggcccggtctatccaatat

SEQ ID NO: 2754004 - DNA, 25 bp, Homo sapien
tataggattaataccctgtctcact

SEQ ID NO: 2754005 - DNA, 25 bp, Homo sapien
taataccctgtctcactgaacttgg

SEQ ID NO: 2754006 - DNA, 25 bp, Homo sapien
tcactgagaggtactaaggcatggt

SEQ ID NO: 2754007 - DNA, 25 bp, Homo sapien
gacagaaagtgtcaagggttcagct

SEQ ID NO: 2754008 - DNA, 25 bp, Homo sapien
gggttcagctctgcataaagtactg

SEQ ID NO: 2754009 - DNA, 25 bp, Homo sapien
tgagttcctacaagtgcctagtcct

SEQ ID NO: 2754010 - DNA, 25 bp, Homo sapien
taaaaggtagctcatttggaacaac

SEQ ID NO: 2754011 - DNA, 25 bp, Homo sapien
gtatcccaggacttatctgtcaatt

SEQ ID NO: 2754012 - DNA, 25 bp, Homo sapien
cgctgagttctaagccttttttcag

SEQ ID NO: 2754013 - DNA, 25 bp, Homo sapien
ttggaacaactactaatctccgctg

SEQ ID NO: 2754014 - DNA, 25 bp, Homo sapien
tgctgttgccttcgttcaagccctt

SEQ ID NO: 2754015 - DNA, 25 bp, Homo sapien
gtctcactgctgttgccttcgttca

SEQ ID NO: 2754016 - DNA, 25 bp, Homo sapien
cactgctgttgccttcgttcaagcc

SEQ ID NO: 2754017 - DNA, 25 bp, Homo sapien
tgttgccttcgttcaagcccttgac

SEQ ID NO: 2754018 - DNA, 25 bp, Homo sapien
cgatttcactcaaacttctcagtaa

SEQ ID NO: 2754019 - DNA, 25 bp, Homo sapien
aacatgctatgtgagttatatgcac

SEQ ID NO: 2754020 - DNA, 25 bp, Homo sapien
tgtgagttatatgcacgatttcact

SEQ ID NO: 2754021 - DNA, 25 bp, Homo sapien
gcacgatttcactcaaacttctcag

SEQ ID NO: 2754022 - DNA, 25 bp, Homo sapien
tattcagtatggaaatatgcccaga

SEQ ID NO: 2754023 - DNA, 25 bp, Homo sapien
aaaataatacttgacagcggcatac

SEQ ID NO: 2754024 - DNA, 25 bp, Homo sapien
tctggatagagcaagaaacatatac

SEQ ID NO: 2754025 - DNA, 25 bp, Homo sapien
catactgttgaaatcatggttgtgg

SEQ ID NO: 2754026 - DNA, 25 bp, Homo sapien
ctatatacactcatcgaagcacatg

SEQ ID NO: 2754027 - DNA, 25 bp, Homo sapien
catcgaagcacatgacgatattttg

SEQ ID NO: 2754028 - DNA, 25 bp, Homo sapien
tacactcatcgaagcacatgacgat

SEQ ID NO: 2754029 - DNA, 25 bp, Homo sapien
agcacatgacgatattttgaattaa

SEQ ID NO: 2754030 - DNA, 25 bp, Homo sapien
atgccgtggacactatggcactgac

SEQ ID NO: 2754031 - DNA, 25 bp, Homo sapien
ttatgccgtggacactatggcactg

SEQ ID NO: 2754032 - DNA, 25 bp, Homo sapien
tatgccgtggacactatggcactga

SEQ ID NO: 2754033 - DNA, 25 bp, Homo sapien
taccgcaggaattggtgttttgcag

SEQ ID NO: 2754034 - DNA, 25 bp, Homo sapien
gggtccttcctaagcacactgctat

SEQ ID NO: 2754035 - DNA, 25 bp, Homo sapien
tctctatggataggaatctggatag

SEQ ID NO: 2754036 - DNA, 25 bp, Homo sapien
cccagtctggaaggtttacatccct

SEQ ID NO: 2754037 - DNA, 25 bp, Homo sapien
cgagagtaaggatcgtgaacttcat

SEQ ID NO: 2754038 - DNA, 25 bp, Homo sapien
taagctcctcgagagtaaggatcgt

SEQ ID NO: 2754039 - DNA, 25 bp, Homo sapien
ttgcgaagcctgcagtcttgtaagc

SEQ ID NO: 2754040 - DNA, 25 bp, Homo sapien
tgcagtcttgtaagctcctcgagag

SEQ ID NO: 2754041 - DNA, 25 bp, Homo sapien
gattgggatagacaagtgactcagg

SEQ ID NO: 2754042 - DNA, 25 bp, Homo sapien
gaataatccttttactgccaggcag

SEQ ID NO: 2754043 - DNA, 25 bp, Homo sapien
gatattagaatcagtcccagtcaac

SEQ ID NO: 2754044 - DNA, 25 bp, Homo sapien
gaactcccaggagtatactggaaga

SEQ ID NO: 2754045 - DNA, 25 bp, Homo sapien
ggaaagtccaaataatcaatagaaa

SEQ ID NO: 2754046 - DNA, 25 bp, Homo sapien
ggtttcatggcaggttacataatat

SEQ ID NO: 2754047 - DNA, 25 bp, Homo sapien
gggaaaattcatggtagcatcaaat

SEQ ID NO: 2754048 - DNA, 25 bp, Homo sapien
tacctgattatatcatatacttagg

SEQ ID NO: 2754049 - DNA, 25 bp, Homo sapien
gatgctctgctaagcaaacaattgc

SEQ ID NO: 2754050 - DNA, 25 bp, Homo sapien
ctgttctgatgatgctctgctaagc

SEQ ID NO: 2754051 - DNA, 25 bp, Homo sapien
tcaggctgatgtgggatctgacttt

SEQ ID NO: 2754052 - DNA, 25 bp, Homo sapien
tttcaggctgatgtgggatctgact

SEQ ID NO: 2754053 - DNA, 25 bp, Homo sapien
ttgaaacaacagatgtagaggtagg

SEQ ID NO: 2754054 - DNA, 25 bp, Homo sapien
gggaggtgaagtgttttccttctgc

SEQ ID NO: 2754055 - DNA, 25 bp, Homo sapien
gaggtgaagtgttttccttctgctt

SEQ ID NO: 2754056 - DNA, 25 bp, Homo sapien
cagatgtagaggtagggaggtgaag

SEQ ID NO: 2754057 - DNA, 25 bp, Homo sapien
gacgtacacactgctaaataccaag

SEQ ID NO: 2754058 - DNA, 25 bp, Homo sapien
tatgttccacacgtgatatgtgacg

SEQ ID NO: 2754059 - DNA, 25 bp, Homo sapien
tgtgaaatgaccaccgcaaactaat

SEQ ID NO: 2754060 - DNA, 25 bp, Homo sapien
tacactcgaatcatgcaagtatcct

SEQ ID NO: 2754061 - DNA, 25 bp, Homo sapien
gcttcaggcctagacgattggcgtc

SEQ ID NO: 2754062 - DNA, 25 bp, Homo sapien
taaggagtgactgttgaaaatatct

SEQ ID NO: 2754063 - DNA, 25 bp, Homo sapien
tgagtcacaacagataggaagtgtt

SEQ ID NO: 2754064 - DNA, 25 bp, Homo sapien
gctaaatattagagtgcttcaggcc

SEQ ID NO: 2754065 - DNA, 25 bp, Homo sapien
tatttcaacaaccatatgccagagc

SEQ ID NO: 2754066 - DNA, 25 bp, Homo sapien
gagcttagcacctagcagtttgtga

SEQ ID NO: 2754067 - DNA, 25 bp, Homo sapien
tgaattgtggccctcatccaggcat

SEQ ID NO: 2754068 - DNA, 25 bp, Homo sapien
tgggcagccccaatttcttagcagc

SEQ ID NO: 2754069 - DNA, 25 bp, Homo sapien
acatgaggttaactggcacgcctac

SEQ ID NO: 2754070 - DNA, 25 bp, Homo sapien
tgggccacccaagtccttgaacaga

SEQ ID NO: 2754071 - DNA, 25 bp, Homo sapien
cgcctacacagtcccagtgtgagtg

SEQ ID NO: 2754072 - DNA, 25 bp, Homo sapien
aaggtgcagcgatgggatggtgccc

SEQ ID NO: 2754073 - DNA, 25 bp, Homo sapien
agtctcccacgtatctaggactata

SEQ ID NO: 2754074 - DNA, 25 bp, Homo sapien
cacgtatctaggactataagctcgg

SEQ ID NO: 2754075 - DNA, 25 bp, Homo sapien
tctaggactataagctcggccacca

SEQ ID NO: 2754076 - DNA, 25 bp, Homo sapien
ggactataagctcggccaccacatt

SEQ ID NO: 2754077 - DNA, 25 bp, Homo sapien
gcagcaattagtctctagtaacccc

SEQ ID NO: 2754078 - DNA, 25 bp, Homo sapien
catccgagaccaagtgaatcagaaa

SEQ ID NO: 2754079 - DNA, 25 bp, Homo sapien
aatcagaaattggaggcagcaggtg

SEQ ID NO: 2754080 - DNA, 25 bp, Homo sapien
tctgcagtattggtatctgcctggg

SEQ ID NO: 2754081 - DNA, 25 bp, Homo sapien
gctgttaggttctacactagcacca

SEQ ID NO: 2754082 - DNA, 25 bp, Homo sapien
catggagtttggaacctgtgactga

SEQ ID NO: 2754083 - DNA, 25 bp, Homo sapien
ccaggttgtcaggatcagggtcaac

SEQ ID NO: 2754084 - DNA, 25 bp, Homo sapien
tattggtaggtatacacaggtgctg

SEQ ID NO: 2754085 - DNA, 25 bp, Homo sapien
ctcactgctggacaactgacaagta

SEQ ID NO: 2754086 - DNA, 25 bp, Homo sapien
agttccttccctctacggccttctg

SEQ ID NO: 2754087 - DNA, 25 bp, Homo sapien
gtccttgggctacagtccacatcct

SEQ ID NO: 2754088 - DNA, 25 bp, Homo sapien
gacaactgacaagtaaagttccttc

SEQ ID NO: 2754089 - DNA, 25 bp, Homo sapien
tgtgtctgattcccctgccccttgc

SEQ ID NO: 2754090 - DNA, 25 bp, Homo sapien
tctgattcccctgccccttgcagcc

SEQ ID NO: 2754091 - DNA, 25 bp, Homo sapien
tgtctgattcccctgccccttgcag

SEQ ID NO: 2754092 - DNA, 25 bp, Homo sapien
gtctgattcccctgccccttgcagc

SEQ ID NO: 2754093 - DNA, 25 bp, Homo sapien
cctccacgtccttgcaaggatccat

SEQ ID NO: 2754094 - DNA, 25 bp, Homo sapien
ctgctttgttcaatgtggcccacat

SEQ ID NO: 2754095 - DNA, 25 bp, Homo sapien
ttcaatgtggcccacattgccagac

SEQ ID NO: 2754096 - DNA, 25 bp, Homo sapien
aatgtggcccacattgccagactcc

SEQ ID NO: 2754097 - DNA, 25 bp, Homo sapien
tgaatgttccaattccaccaccggg

SEQ ID NO: 2754098 - DNA, 25 bp, Homo sapien
gaaacatcacgatttacttgcaggg

SEQ ID NO: 2754099 - DNA, 25 bp, Homo sapien
acagacaatgaacagagcggcgcta

SEQ ID NO: 2754100 - DNA, 25 bp, Homo sapien
tcccaaactcggagactgtgacttg

SEQ ID NO: 2754101 - DNA, 25 bp, Homo sapien
tccgagcttgcatcgctccagctgg

SEQ ID NO: 2754102 - DNA, 25 bp, Homo sapien
ctggctggctacgatctgccgttca

SEQ ID NO: 2754103 - DNA, 25 bp, Homo sapien
ctcatgctgccagtctcggatccga

SEQ ID NO: 2754104 - DNA, 25 bp, Homo sapien
ccagctctcgggtcagcctttcaaa

SEQ ID NO: 2754105 - DNA, 25 bp, Homo sapien
agaaacccatcaacaagatcaattc

SEQ ID NO: 2754106 - DNA, 25 bp, Homo sapien
aacccatcaacaagatcaattcaat

SEQ ID NO: 2754107 - DNA, 25 bp, Homo sapien
ccatcaacaagatcaattcaatcat

SEQ ID NO: 2754108 - DNA, 25 bp, Homo sapien
gaaacccatcaacaagatcaattca

SEQ ID NO: 2754109 - DNA, 25 bp, Homo sapien
tacttgaagaccatacagaactcct

SEQ ID NO: 2754110 - DNA, 25 bp, Homo sapien
cctcacatgtcgatggaaattcatt

SEQ ID NO: 2754111 - DNA, 25 bp, Homo sapien
taaagtactttgatttgctgcccac

SEQ ID NO: 2754112 - DNA, 25 bp, Homo sapien
tgctgcccactttcctgtgttaccg

SEQ ID NO: 2754113 - DNA, 25 bp, Homo sapien
cggctgcggcgtccagcagcaagct

SEQ ID NO: 2754114 - DNA, 25 bp, Homo sapien
gctgcggcgtccagcagcaagctat

SEQ ID NO: 2754115 - DNA, 25 bp, Homo sapien
cggcgtccagcagcaagctatgcat

SEQ ID NO: 2754116 - DNA, 25 bp, Homo sapien
tgcggcgtccagcagcaagctatgc

SEQ ID NO: 2754117 - DNA, 25 bp, Homo sapien
tacaaactaaagtcagggccagggc

SEQ ID NO: 2754118 - DNA, 25 bp, Homo sapien
tacatgcaaaacagtagtggaggcg

SEQ ID NO: 2754119 - DNA, 25 bp, Homo sapien
gaatctgctgcctgtaactgaccac

SEQ ID NO: 2754120 - DNA, 25 bp, Homo sapien
gataatgtgggtgcagttaatcccc

SEQ ID NO: 2754121 - DNA, 25 bp, Homo sapien
gaacccaaacaagtccagcggaatc

SEQ ID NO: 2754122 - DNA, 25 bp, Homo sapien
tctttgtactatggtgaggtttggt

SEQ ID NO: 2754123 - DNA, 25 bp, Homo sapien
atctctgacgataaaaggatgctgc

SEQ ID NO: 2754124 - DNA, 25 bp, Homo sapien
gactgcctgagaacaagctctcatt

SEQ ID NO: 2754125 - DNA, 25 bp, Homo sapien
tccgtactgagactatgggcatgag

SEQ ID NO: 2754126 - DNA, 25 bp, Homo sapien
gcctggcttggaatagtctttgaaa

SEQ ID NO: 2754127 - DNA, 25 bp, Homo sapien
taacaatgaagataagtagagctgg

SEQ ID NO: 2754128 - DNA, 25 bp, Homo sapien
aagtgattcgtctgctccgtactga

SEQ ID NO: 2754129 - DNA, 25 bp, Homo sapien
tcaggaatccgagttaagaagtgcc

SEQ ID NO: 2754130 - DNA, 25 bp, Homo sapien
gagagtcttattgcatgcccaggaa

SEQ ID NO: 2754131 - DNA, 25 bp, Homo sapien
tctcagaccaggaagcttgctattc

SEQ ID NO: 2754132 - DNA, 25 bp, Homo sapien
tcatgaggtccacgtagatcaaagg

SEQ ID NO: 2754133 - DNA, 25 bp, Homo sapien
tagttgcagccttgtcatatatggc

SEQ ID NO: 2754134 - DNA, 25 bp, Homo sapien
gcttttagcttagttccatccactg

SEQ ID NO: 2754135 - DNA, 25 bp, Homo sapien
ggacttctagccctctatgctgaat

SEQ ID NO: 2754136 - DNA, 25 bp, Homo sapien
tactgaaccttagtgggaatgcctc

SEQ ID NO: 2754137 - DNA, 25 bp, Homo sapien
tagacttgaaggcatcattctcttg

SEQ ID NO: 2754138 - DNA, 25 bp, Homo sapien
cacattgatgcaaggacatagagct

SEQ ID NO: 2754139 - DNA, 25 bp, Homo sapien
tagaagaataagttcacgtgtggac

SEQ ID NO: 2754140 - DNA, 25 bp, Homo sapien
tagctttcaagtgttagcatgcaca

SEQ ID NO: 2754141 - DNA, 25 bp, Homo sapien
catatgacacgttaaggccaaatgc

SEQ ID NO: 2754142 - DNA, 25 bp, Homo sapien
catccagcatatgacacgttaaggc

SEQ ID NO: 2754143 - DNA, 25 bp, Homo sapien
caactatgatcagggccactgtttc

SEQ ID NO: 2754144 - DNA, 25 bp, Homo sapien
caaatgcaactatgatcagggccac

SEQ ID NO: 2754145 - DNA, 25 bp, Homo sapien
gctgatggtgaattgaaattcaatt

SEQ ID NO: 2754146 - DNA, 25 bp, Homo sapien
atatttggtgtcacggggtttccat

SEQ ID NO: 2754147 - DNA, 25 bp, Homo sapien
cattactcgagttgccagccttctt

SEQ ID NO: 2754148 - DNA, 25 bp, Homo sapien
tgtcacggggtttccattactcgag

SEQ ID NO: 2754149 - DNA, 25 bp, Homo sapien
gcttgagtttacagataactgggtt

SEQ ID NO: 2754150 - DNA, 25 bp, Homo sapien
tgagtttacagataactgggttaat

SEQ ID NO: 2754151 - DNA, 25 bp, Homo sapien
cttgagtttacagataactgggtta

SEQ ID NO: 2754152 - DNA, 25 bp, Homo sapien
agtttacagataactgggttaatat

SEQ ID NO: 2754153 - DNA, 25 bp, Homo sapien
tcacagatcaagttgaaggaatatg

SEQ ID NO: 2754154 - DNA, 25 bp, Homo sapien
agtaaaagtgtgctgtaatgcgatc

SEQ ID NO: 2754155 - DNA, 25 bp, Homo sapien
actgagtcttagagttggagcttgt

SEQ ID NO: 2754156 - DNA, 25 bp, Homo sapien
cgatcataaaatggaactaagtctg

SEQ ID NO: 2754157 - DNA, 25 bp, Homo sapien
tgttgcctggactactccaataacc

SEQ ID NO: 2754158 - DNA, 25 bp, Homo sapien
gcgatttccggagtgatctggctaa

SEQ ID NO: 2754159 - DNA, 25 bp, Homo sapien
cagggacgtgccctttataactact

SEQ ID NO: 2754160 - DNA, 25 bp, Homo sapien
gactgtcacatgtacccaactgcat

SEQ ID NO: 2754161 - DNA, 25 bp, Homo sapien
gaagaaacacagtgcacagaaccag

SEQ ID NO: 2754162 - DNA, 25 bp, Homo sapien
aaatgccaggtctactgcaggaaga

SEQ ID NO: 2754163 - DNA, 25 bp, Homo sapien
gctccagatcacatctagttgaaac

SEQ ID NO: 2754164 - DNA, 25 bp, Homo sapien
ggtccagttgctccagatcacatct

SEQ ID NO: 2754165 - DNA, 25 bp, Homo sapien
gcaaacattagttgaggccacttag

SEQ ID NO: 2754166 - DNA, 25 bp, Homo sapien
gaacccaagtacttagcatcaggaa

SEQ ID NO: 2754167 - DNA, 25 bp, Homo sapien
tggagggctcctcgaatggatgcat

SEQ ID NO: 2754168 - DNA, 25 bp, Homo sapien
cacagagagggatcctgaacccaag

SEQ ID NO: 2754169 - DNA, 25 bp, Homo sapien
tgggaatagactcactctagagact

SEQ ID NO: 2754170 - DNA, 25 bp, Homo sapien
gagtgtccacacttttatgcagtcc

SEQ ID NO: 2754171 - DNA, 25 bp, Homo sapien
cacatcttgagtgtggataggaccc

SEQ ID NO: 2754172 - DNA, 25 bp, Homo sapien
ccctggctagctagaggaagcagca

SEQ ID NO: 2754173 - DNA, 25 bp, Homo sapien
tgtgtcatgacccagttccacggac

SEQ ID NO: 2754174 - DNA, 25 bp, Homo sapien
gactcctagcttgcacctttatctc

SEQ ID NO: 2754175 - DNA, 25 bp, Homo sapien
gatcactattcctaatacagctgag

SEQ ID NO: 2754176 - DNA, 25 bp, Homo sapien
tcacagcttcaaacagatgatcact

SEQ ID NO: 2754177 - DNA, 25 bp, Homo sapien
ataacccaaccataacaaggtagtg

SEQ ID NO: 2754178 - DNA, 25 bp, Homo sapien
cacatgaataagaaagcacgacata

SEQ ID NO: 2754179 - DNA, 25 bp, Homo sapien
gaaagcacgacataacccaaccata

SEQ ID NO: 2754180 - DNA, 25 bp, Homo sapien
tgaataagaaagcacgacataaccc

SEQ ID NO: 2754181 - DNA, 25 bp, Homo sapien
ttctttgactgaggcgaggatggca

SEQ ID NO: 2754182 - DNA, 25 bp, Homo sapien
gggaactcgtcttctctgaggctga

SEQ ID NO: 2754183 - DNA, 25 bp, Homo sapien
gagccatccccgttggaggtgttta

SEQ ID NO: 2754184 - DNA, 25 bp, Homo sapien
tgtttcagagccatccccgttggag

SEQ ID NO: 2754185 - DNA, 25 bp, Homo sapien
gatctctcaacagcaatcagggtcc

SEQ ID NO: 2754186 - DNA, 25 bp, Homo sapien
cagggtcccctcagacctgaggact

SEQ ID NO: 2754187 - DNA, 25 bp, Homo sapien
gacagatctctcaacagcaatcagg

SEQ ID NO: 2754188 - DNA, 25 bp, Homo sapien
gtcccctcagacctgaggactgaga

SEQ ID NO: 2754189 - DNA, 25 bp, Homo sapien
cttgatagatactagcgctgctgac

SEQ ID NO: 2754190 - DNA, 25 bp, Homo sapien
tagatactagcgctgctgactgact

SEQ ID NO: 2754191 - DNA, 25 bp, Homo sapien
agcgctgctgactgactttccattt

SEQ ID NO: 2754192 - DNA, 25 bp, Homo sapien
actagcgctgctgactgactttcca

SEQ ID NO: 2754193 - DNA, 25 bp, Homo sapien
tccaccagtagccagatgaggttcc

SEQ ID NO: 2754194 - DNA, 25 bp, Homo sapien
ggtcatcttgtaataccttgcaggc

SEQ ID NO: 2754195 - DNA, 25 bp, Homo sapien
ccctttgtggatgacctgtaacttc

SEQ ID NO: 2754196 - DNA, 25 bp, Homo sapien
tttcataatgcttaatataggcccc

SEQ ID NO: 2754197 - DNA, 25 bp, Homo sapien
tctcatctgagtaagctagtgttcc

SEQ ID NO: 2754198 - DNA, 25 bp, Homo sapien
gctttctgagttatccgagttcttg

SEQ ID NO: 2754199 - DNA, 25 bp, Homo sapien
taaagcctaggctgcaagcactaca

SEQ ID NO: 2754200 - DNA, 25 bp, Homo sapien
ggtgaagaaccattgctgaagaact

SEQ ID NO: 2754201 - DNA, 25 bp, Homo sapien
tctgacttcatagtcacagtcatca

SEQ ID NO: 2754202 - DNA, 25 bp, Homo sapien
ctagttgtccttctgtctctcaaaa

SEQ ID NO: 2754203 - DNA, 25 bp, Homo sapien
ctctcaaaatgcacatcatgtctga

SEQ ID NO: 2754204 - DNA, 25 bp, Homo sapien
tgcacatcatgtctgacttcatagt

SEQ ID NO: 2754205 - DNA, 25 bp, Homo sapien
cttcctgggagggaccccactcatc

SEQ ID NO: 2754206 - DNA, 25 bp, Homo sapien
ttaaccttccctgttgagcgtgatg

SEQ ID NO: 2754207 - DNA, 25 bp, Homo sapien
cttccctgttgagcgtgatggcccc

SEQ ID NO: 2754208 - DNA, 25 bp, Homo sapien
ctgttgagcgtgatggccccttcct

SEQ ID NO: 2754209 - DNA, 25 bp, Homo sapien
gcctctgggatcttcaagtcacaca

SEQ ID NO: 2754210 - DNA, 25 bp, Homo sapien
cgcctctgggatcttcaagtcacac

SEQ ID NO: 2754211 - DNA, 25 bp, Homo sapien
cctctgggatcttcaagtcacacac

SEQ ID NO: 2754212 - DNA, 25 bp, Homo sapien
atcccctagagtgccagcagtcctc

SEQ ID NO: 2754213 - DNA, 25 bp, Homo sapien
cccctagagtgccagcagtcctcat

SEQ ID NO: 2754214 - DNA, 25 bp, Homo sapien
gtcatcccctagagtgccagcagtc

SEQ ID NO: 2754215 - DNA, 25 bp, Homo sapien
cgtgtcatcccctagagtgccagca

SEQ ID NO: 2754216 - DNA, 25 bp, Homo sapien
gttggtctagccatgtatgtgcttc

SEQ ID NO: 2754217 - DNA, 25 bp, Homo sapien
tccaatgtccactagaccagcttgg

SEQ ID NO: 2754218 - DNA, 25 bp, Homo sapien
tgttaagttgaccaaaggcatcctc

SEQ ID NO: 2754219 - DNA, 25 bp, Homo sapien
tatgtgcttccgcatcgggattccc

SEQ ID NO: 2754220 - DNA, 25 bp, Homo sapien
taacaaacacatcagtactatcagg

SEQ ID NO: 2754221 - DNA, 25 bp, Homo sapien
gggtgtttgaacttgagcacctttc

SEQ ID NO: 2754222 - DNA, 25 bp, Homo sapien
cacatcagtactatcaggacagggt

SEQ ID NO: 2754223 - DNA, 25 bp, Homo sapien
tatcaggacagggtgtttgaacttg

SEQ ID NO: 2754224 - DNA, 25 bp, Homo sapien
gaacagactcttcatgagtcagcct

SEQ ID NO: 2754225 - DNA, 25 bp, Homo sapien
ctgcaggaacagactcttcatgagt

SEQ ID NO: 2754226 - DNA, 25 bp, Homo sapien
caggaacagactcttcatgagtcag

SEQ ID NO: 2754227 - DNA, 25 bp, Homo sapien
ggaacagactcttcatgagtcagcc

SEQ ID NO: 2754228 - DNA, 25 bp, Homo sapien
gaatacactcttttgtcgttgttgt

SEQ ID NO: 2754229 - DNA, 25 bp, Homo sapien
tgaatacactcttttgtcgttgttg

SEQ ID NO: 2754230 - DNA, 25 bp, Homo sapien
caaagtgaatacactcttttgtcgt

SEQ ID NO: 2754231 - DNA, 25 bp, Homo sapien
aagtgaatacactcttttgtcgttg

SEQ ID NO: 2754232 - DNA, 25 bp, Homo sapien
cacgagtgtaccctggtatccagca

SEQ ID NO: 2754233 - DNA, 25 bp, Homo sapien
ctgtgagagcctggcaagaggccct

SEQ ID NO: 2754234 - DNA, 25 bp, Homo sapien
ccactgagatacatgggagtgcctg

SEQ ID NO: 2754235 - DNA, 25 bp, Homo sapien
tcatgtcactgataaggtctccaag

SEQ ID NO: 2754236 - DNA, 25 bp, Homo sapien
gacccctgtgtcagttctacactgt

SEQ ID NO: 2754237 - DNA, 25 bp, Homo sapien
gttctaactgcccagtcttctttat

SEQ ID NO: 2754238 - DNA, 25 bp, Homo sapien
gaaaacttagcatctggcaggccat

SEQ ID NO: 2754239 - DNA, 25 bp, Homo sapien
tctttataggaaaacttagcatctg

SEQ ID NO: 2754240 - DNA, 25 bp, Homo sapien
catagaattggattctctgactcca

SEQ ID NO: 2754241 - DNA, 25 bp, Homo sapien
ggacaatcaattttacacaagcttc

SEQ ID NO: 2754242 - DNA, 25 bp, Homo sapien
caattttacacaagcttctgttcta

SEQ ID NO: 2754243 - DNA, 25 bp, Homo sapien
tcaccaggcccatagaattggattc

SEQ ID NO: 2754244 - DNA, 25 bp, Homo sapien
caggcaatgggagaaaactgttaaa

SEQ ID NO: 2754245 - DNA, 25 bp, Homo sapien
taatcacatactctttgccaggcaa

SEQ ID NO: 2754246 - DNA, 25 bp, Homo sapien
taaacttggaatatggatcactgtg

SEQ ID NO: 2754247 - DNA, 25 bp, Homo sapien
tcagcattgctactagccttataag

SEQ ID NO: 2754248 - DNA, 25 bp, Homo sapien
gctgttatactgattcctccagctt

SEQ ID NO: 2754249 - DNA, 25 bp, Homo sapien
atttactgagggcattggctgttat

SEQ ID NO: 2754250 - DNA, 25 bp, Homo sapien
tcatttactgagggcattggctgtt

SEQ ID NO: 2754251 - DNA, 25 bp, Homo sapien
tttactgagggcattggctgttata

SEQ ID NO: 2754252 - DNA, 25 bp, Homo sapien
caatggcaatgtttacttcctaagg

SEQ ID NO: 2754253 - DNA, 25 bp, Homo sapien
ggcaatgtttacttcctaaggacat

SEQ ID NO: 2754254 - DNA, 25 bp, Homo sapien
aatggcaatgtttacttcctaagga

SEQ ID NO: 2754255 - DNA, 25 bp, Homo sapien
tggcaatgtttacttcctaaggaca

SEQ ID NO: 2754256 - DNA, 25 bp, Homo sapien
caggctatgtcttccacacccagag

SEQ ID NO: 2754257 - DNA, 25 bp, Homo sapien
gtagagagcttctatacacatagct

SEQ ID NO: 2754258 - DNA, 25 bp, Homo sapien
cttctcgtagagagcttctatacac

SEQ ID NO: 2754259 - DNA, 25 bp, Homo sapien
aggctatgtcttccacacccagagc

SEQ ID NO: 2754260 - DNA, 25 bp, Homo sapien
ttcttcacagaagtgctggattccg

SEQ ID NO: 2754261 - DNA, 25 bp, Homo sapien
gaagtgctggattccgcctgtagta

SEQ ID NO: 2754262 - DNA, 25 bp, Homo sapien
ttccgcctgtagtactgagtcacag

SEQ ID NO: 2754263 - DNA, 25 bp, Homo sapien
gctggattccgcctgtagtactgag

SEQ ID NO: 2754264 - DNA, 25 bp, Homo sapien
ttccaagaggtcactcgagggacgc

SEQ ID NO: 2754265 - DNA, 25 bp, Homo sapien
cgtcctaattactgcttgacttgct

SEQ ID NO: 2754266 - DNA, 25 bp, Homo sapien
actccccacaacgaaaggcaggctt

SEQ ID NO: 2754267 - DNA, 25 bp, Homo sapien
ctcgagggacgccaccagcaaaggc

SEQ ID NO: 2754268 - DNA, 25 bp, Homo sapien
aggccactcagcttactggtcccag

SEQ ID NO: 2754269 - DNA, 25 bp, Homo sapien
tgactctccagcagacctaggatta

SEQ ID NO: 2754270 - DNA, 25 bp, Homo sapien
aggattagcactcccgctgcctttc

SEQ ID NO: 2754271 - DNA, 25 bp, Homo sapien
ctctagaaaggccactcagcttact

SEQ ID NO: 2754272 - DNA, 25 bp, Homo sapien
cacaggacttggttaagaggaagcc

SEQ ID NO: 2754273 - DNA, 25 bp, Homo sapien
tgattttagccaactgacacccaca

SEQ ID NO: 2754274 - DNA, 25 bp, Homo sapien
gaatgcagtcaggtataaccaatgc

SEQ ID NO: 2754275 - DNA, 25 bp, Homo sapien
gccaggatgataacgccagacgttg

SEQ ID NO: 2754276 - DNA, 25 bp, Homo sapien
agagcaaggcttggctctgccagct

SEQ ID NO: 2754277 - DNA, 25 bp, Homo sapien
gagcaaggcttggctctgccagctc

SEQ ID NO: 2754278 - DNA, 25 bp, Homo sapien
gggaacttaattaatgtaacactgc

SEQ ID NO: 2754279 - DNA, 25 bp, Homo sapien
gagagcaaggcttggctctgccagc

SEQ ID NO: 2754280 - DNA, 25 bp, Homo sapien
ctcagggtctggcaagccgcgggag

SEQ ID NO: 2754281 - DNA, 25 bp, Homo sapien
ggctgtctattgtcagcacgcagaa

SEQ ID NO: 2754282 - DNA, 25 bp, Homo sapien
cagaagcccccgaaacctgtgaagc

SEQ ID NO: 2754283 - DNA, 25 bp, Homo sapien
gaagccgctaaatatagaccaaggg

SEQ ID NO: 2754284 - DNA, 25 bp, Homo sapien
tgaagacacggccatggacgcatat

SEQ ID NO: 2754285 - DNA, 25 bp, Homo sapien
gacgcatatgactaagtctttccat

SEQ ID NO: 2754286 - DNA, 25 bp, Homo sapien
ggccatggacgcatatgactaagtc

SEQ ID NO: 2754287 - DNA, 25 bp, Homo sapien
gacacggccatggacgcatatgact

SEQ ID NO: 2754288 - DNA, 25 bp, Homo sapien
tctcctcccgtatattagggacgtc

SEQ ID NO: 2754289 - DNA, 25 bp, Homo sapien
ctcctcccgtatattagggacgtca

SEQ ID NO: 2754290 - DNA, 25 bp, Homo sapien
cgtctcctcccgtatattagggacg

SEQ ID NO: 2754291 - DNA, 25 bp, Homo sapien
tcctcccgtatattagggacgtcat

SEQ ID NO: 2754292 - DNA, 25 bp, Homo sapien
gcggcgcccggcggcttcctcgcaa

SEQ ID NO: 2754293 - DNA, 25 bp, Homo sapien
cgcccggcggcttcctcgcaaacat

SEQ ID NO: 2754294 - DNA, 25 bp, Homo sapien
ggcgcccggcggcttcctcgcaaac

SEQ ID NO: 2754295 - DNA, 25 bp, Homo sapien
ccaaaggcgcggcgcccggcggctt

SEQ ID NO: 2754296 - DNA, 25 bp, Homo sapien
gcgccgcccggcttcagggcaaggt

SEQ ID NO: 2754297 - DNA, 25 bp, Homo sapien
cagctcctcagtccgggaagaggcg

SEQ ID NO: 2754298 - DNA, 25 bp, Homo sapien
ggcgacagctcctcagtccgggaag

SEQ ID NO: 2754299 - DNA, 25 bp, Homo sapien
cgcccggcttcagggcaaggtcctg

SEQ ID NO: 2754300 - DNA, 25 bp, Homo sapien
atcttccgcttttgttgtctgagcg

SEQ ID NO: 2754301 - DNA, 25 bp, Homo sapien
cttttgttgtctgagcgcggccgcg

SEQ ID NO: 2754302 - DNA, 25 bp, Homo sapien
ccaactgcagcatcttccgcttttg

SEQ ID NO: 2754303 - DNA, 25 bp, Homo sapien
tccgcttttgttgtctgagcgcggc

SEQ ID NO: 2754304 - DNA, 25 bp, Homo sapien
gctcccgacgcgagtgcgcagcgcc

SEQ ID NO: 2754305 - DNA, 25 bp, Homo sapien
ctcagccgccgagggcgaggctcct

SEQ ID NO: 2754306 - DNA, 25 bp, Homo sapien
gcccctccgagctcggcgagcgcag

SEQ ID NO: 2754307 - DNA, 25 bp, Homo sapien
tcagcctccacctaaacctcggcgg

SEQ ID NO: 2754308 - DNA, 25 bp, Homo sapien
tctcctggttttcgcggcagcagcg

SEQ ID NO: 2754309 - DNA, 25 bp, Homo sapien
cgcgggttgggagagggccgagcat

SEQ ID NO: 2754310 - DNA, 25 bp, Homo sapien
ctccggagctaggcgaaagctggaa

SEQ ID NO: 2754311 - DNA, 25 bp, Homo sapien
caaggcgctgacagttgactctggt

SEQ ID NO: 2754312 - DNA, 25 bp, Homo sapien
caggttactccgcttccctaattca

SEQ ID NO: 2754313 - DNA, 25 bp, Homo sapien
gagatgggtggatgctccggagcta

SEQ ID NO: 2754314 - DNA, 25 bp, Homo sapien
ctgcaacaaaggaccagggtgcgag

SEQ ID NO: 2754315 - DNA, 25 bp, Homo sapien
gcaacaaaggaccagggtgcgaggg

SEQ ID NO: 2754316 - DNA, 25 bp, Homo sapien
caacaaaggaccagggtgcgagggg

SEQ ID NO: 2754317 - DNA, 25 bp, Homo sapien
tgcaacaaaggaccagggtgcgagg

SEQ ID NO: 2754318 - DNA, 25 bp, Homo sapien
gaatttgcagaacagtgatcactag

SEQ ID NO: 2754319 - DNA, 25 bp, Homo sapien
gttgaatcttgactcaggtgttttc

SEQ ID NO: 2754320 - DNA, 25 bp, Homo sapien
taattcagttctttcaagttgaatc

SEQ ID NO: 2754321 - DNA, 25 bp, Homo sapien
gatcactagtgagaacatcagtaag

SEQ ID NO: 2754322 - DNA, 25 bp, Homo sapien
gcctttgcccagactaccatcaact

SEQ ID NO: 2754323 - DNA, 25 bp, Homo sapien
ggcactgcgaactgtgcctttgccc

SEQ ID NO: 2754324 - DNA, 25 bp, Homo sapien
gcccagactaccatcaactctctga

SEQ ID NO: 2754325 - DNA, 25 bp, Homo sapien
tttgcccagactaccatcaactctc

SEQ ID NO: 2754326 - DNA, 25 bp, Homo sapien
accagagctgccgacttggagattc

SEQ ID NO: 2754327 - DNA, 25 bp, Homo sapien
caccagagctgccgacttggagatt

SEQ ID NO: 2754328 - DNA, 25 bp, Homo sapien
acaccagagctgccgacttggagat

SEQ ID NO: 2754329 - DNA, 25 bp, Homo sapien
gacaccagagctgccgacttggaga

SEQ ID NO: 2754330 - DNA, 25 bp, Homo sapien
caggcctgtccaccctgctaagact

SEQ ID NO: 2754331 - DNA, 25 bp, Homo sapien
cagcgtttgggtcccgcactctgtc

SEQ ID NO: 2754332 - DNA, 25 bp, Homo sapien
taagactcctcaggcagcgtttggg

SEQ ID NO: 2754333 - DNA, 25 bp, Homo sapien
ttattgcattgctggtagagacccc

SEQ ID NO: 2754334 - DNA, 25 bp, Homo sapien
gattttgaaatttactgtaactgtc

SEQ ID NO: 2754335 - DNA, 25 bp, Homo sapien
taatctcccttgcaagaattccctt

SEQ ID NO: 2754336 - DNA, 25 bp, Homo sapien
tgtcgctttgtcaaagggagcatgt

SEQ ID NO: 2754337 - DNA, 25 bp, Homo sapien
cgctttgtcaaagggagcatgtaga

SEQ ID NO: 2754338 - DNA, 25 bp, Homo sapien
ctctgtcgctttgtcaaagggagca

SEQ ID NO: 2754339 - DNA, 25 bp, Homo sapien
tcgctttgtcaaagggagcatgtag

SEQ ID NO: 2754340 - DNA, 25 bp, Homo sapien
gtaactagcaacactgatgaaattc

SEQ ID NO: 2754341 - DNA, 25 bp, Homo sapien
taactagcaacactgatgaaattca

SEQ ID NO: 2754342 - DNA, 25 bp, Homo sapien
tgtaactagcaacactgatgaaatt

SEQ ID NO: 2754343 - DNA, 25 bp, Homo sapien
aactagcaacactgatgaaattcat

SEQ ID NO: 2754344 - DNA, 25 bp, Homo sapien
tgtgaatccatttgcgggtaactga

SEQ ID NO: 2754345 - DNA, 25 bp, Homo sapien
tgtttctaaaccttgatgcctcctt

SEQ ID NO: 2754346 - DNA, 25 bp, Homo sapien
taatgggtatctgtcaactttcaat

SEQ ID NO: 2754347 - DNA, 25 bp, Homo sapien
tgcttagaatcttaagagcagtgct

SEQ ID NO: 2754348 - DNA, 25 bp, Homo sapien
ttgcttctattactccctagggcca

SEQ ID NO: 2754349 - DNA, 25 bp, Homo sapien
tgcttctattactccctagggccat

SEQ ID NO: 2754350 - DNA, 25 bp, Homo sapien
ctttgcttctattactccctagggc

SEQ ID NO: 2754351 - DNA, 25 bp, Homo sapien
tttgcttctattactccctagggcc

SEQ ID NO: 2754352 - DNA, 25 bp, Homo sapien
ccatatatctggaaaccttgtagtg

SEQ ID NO: 2754353 - DNA, 25 bp, Homo sapien
aatatttgatgccatatatctggaa

SEQ ID NO: 2754354 - DNA, 25 bp, Homo sapien
gatatgaggatggtccaaaatattt

SEQ ID NO: 2754355 - DNA, 25 bp, Homo sapien
tctggaaaccttgtagtgaaggtta

SEQ ID NO: 2754356 - DNA, 25 bp, Homo sapien
tcagagacaatacatgtgataggtt

SEQ ID NO: 2754357 - DNA, 25 bp, Homo sapien
tatcttctggtctgaagacagcagc

SEQ ID NO: 2754358 - DNA, 25 bp, Homo sapien
agcagccatgaatgtagcagcaata

SEQ ID NO: 2754359 - DNA, 25 bp, Homo sapien
tgaatactgaattgaagcatgtgac

SEQ ID NO: 2754360 - DNA, 25 bp, Homo sapien
tgggaccatatggtcctgaaagctt

SEQ ID NO: 2754361 - DNA, 25 bp, Homo sapien
tttccactgactcgcatgaaaggct

SEQ ID NO: 2754362 - DNA, 25 bp, Homo sapien
tcacccaagaattacatcctgggac

SEQ ID NO: 2754363 - DNA, 25 bp, Homo sapien
cttttccactgactcgcatgaaagg

SEQ ID NO: 2754364 - DNA, 25 bp, Homo sapien
gctcgttggctttgacacagggcat

SEQ ID NO: 2754365 - DNA, 25 bp, Homo sapien
ggtttcagctccatcgcctgctctg

SEQ ID NO: 2754366 - DNA, 25 bp, Homo sapien
tcctacacaggctgcgctctggttt

SEQ ID NO: 2754367 - DNA, 25 bp, Homo sapien
gctccttaacgactgataactggaa

SEQ ID NO: 2754368 - DNA, 25 bp, Homo sapien
ttaggtatggctaatatccctagag

SEQ ID NO: 2754369 - DNA, 25 bp, Homo sapien
ggtatggctaatatccctagagcta

SEQ ID NO: 2754370 - DNA, 25 bp, Homo sapien
aatatccctagagctactaataatg

SEQ ID NO: 2754371 - DNA, 25 bp, Homo sapien
ggctaatatccctagagctactaat

SEQ ID NO: 2754372 - DNA, 25 bp, Homo sapien
ttcctcatcagctgtggaaggccgt

SEQ ID NO: 2754373 - DNA, 25 bp, Homo sapien
tgtggaaggccgttttgaacgggca

SEQ ID NO: 2754374 - DNA, 25 bp, Homo sapien
gcatagaagtagttcttcctcatca

SEQ ID NO: 2754375 - DNA, 25 bp, Homo sapien
ttaagcatagaagtagttcttcctc

SEQ ID NO: 2754376 - DNA, 25 bp, Homo sapien
gaggacttggctctcaataatactc

SEQ ID NO: 2754377 - DNA, 25 bp, Homo sapien
cagagacaacagttatgccatccat

SEQ ID NO: 2754378 - DNA, 25 bp, Homo sapien
cattgtgggatgactcttcagaggg

SEQ ID NO: 2754379 - DNA, 25 bp, Homo sapien
aagatgcattgcttccttcagagac

SEQ ID NO: 2754380 - DNA, 25 bp, Homo sapien
ctgactttcaatgcacattctaaga

SEQ ID NO: 2754381 - DNA, 25 bp, Homo sapien
tttcaatgcacattctaagaataaa

SEQ ID NO: 2754382 - DNA, 25 bp, Homo sapien
tgcacattctaagaataaaagcatc

SEQ ID NO: 2754383 - DNA, 25 bp, Homo sapien
acattctaagaataaaagcatccat

SEQ ID NO: 2754384 - DNA, 25 bp, Homo sapien
tttgacagcacagagacttcaatga

SEQ ID NO: 2754385 - DNA, 25 bp, Homo sapien
cagcacagagacttcaatgatgaat

SEQ ID NO: 2754386 - DNA, 25 bp, Homo sapien
aagtcaattagatttgacagcacag

SEQ ID NO: 2754387 - DNA, 25 bp, Homo sapien
cttctcatacacgaagtcaattaga

SEQ ID NO: 2754388 - DNA, 25 bp, Homo sapien
ggaaatgctgcgttttttatacatg

SEQ ID NO: 2754389 - DNA, 25 bp, Homo sapien
tatatatcagatcattaggagctcg

SEQ ID NO: 2754390 - DNA, 25 bp, Homo sapien
tatcctgtagtctttaagagggagg

SEQ ID NO: 2754391 - DNA, 25 bp, Homo sapien
aagagggaggactctagattcggac

SEQ ID NO: 2754392 - DNA, 25 bp, Homo sapien
gccaacatcgggaagcccttctcca

SEQ ID NO: 2754393 - DNA, 25 bp, Homo sapien
aggccaacatcgggaagcccttctc

SEQ ID NO: 2754394 - DNA, 25 bp, Homo sapien
agcaggccaacatcgggaagccctt

SEQ ID NO: 2754395 - DNA, 25 bp, Homo sapien
gcaggccaacatcgggaagcccttc

SEQ ID NO: 2754396 - DNA, 25 bp, Homo sapien
ccagcgtcatctcttctagtggctg

SEQ ID NO: 2754397 - DNA, 25 bp, Homo sapien
ctcttctagtggctggatcctgttc

SEQ ID NO: 2754398 - DNA, 25 bp, Homo sapien
cctgttcttcctgaaaaccactcat

SEQ ID NO: 2754399 - DNA, 25 bp, Homo sapien
cttctagtggctggatcctgttctt

SEQ ID NO: 2754400 - DNA, 25 bp, Homo sapien
gccaaaacgcttgccccttgtaagc

SEQ ID NO: 2754401 - DNA, 25 bp, Homo sapien
cgccaaaacgcttgccccttgtaag

SEQ ID NO: 2754402 - DNA, 25 bp, Homo sapien
ttattcttatacacagtgccgccaa

SEQ ID NO: 2754403 - DNA, 25 bp, Homo sapien
tcttatacacagtgccgccaaaacg

SEQ ID NO: 2754404 - DNA, 25 bp, Homo sapien
aaatatccatcatggtctacataca

SEQ ID NO: 2754405 - DNA, 25 bp, Homo sapien
ggaggggttaactctcaaatatcca

SEQ ID NO: 2754406 - DNA, 25 bp, Homo sapien
ccttctgcataggtgatcttcgggc

SEQ ID NO: 2754407 - DNA, 25 bp, Homo sapien
tactgtgagtaagacagaggcttca

SEQ ID NO: 2754408 - DNA, 25 bp, Homo sapien
gttctcggcaccaagatgacatggt

SEQ ID NO: 2754409 - DNA, 25 bp, Homo sapien
gagtcatgagctcaggttctcggca

SEQ ID NO: 2754410 - DNA, 25 bp, Homo sapien
caaagcagaggttggatctcctagg

SEQ ID NO: 2754411 - DNA, 25 bp, Homo sapien
taaagctcgtttctcataatcttgg

SEQ ID NO: 2754412 - DNA, 25 bp, Homo sapien
ctttctgctcccaagtaatgtcctc

SEQ ID NO: 2754413 - DNA, 25 bp, Homo sapien
tttctgctcccaagtaatgtcctcc

SEQ ID NO: 2754414 - DNA, 25 bp, Homo sapien
tcacagcccaagtgggcacatcaca

SEQ ID NO: 2754415 - DNA, 25 bp, Homo sapien
cagacaataactcacagcccaagtg

SEQ ID NO: 2754416 - DNA, 25 bp, Homo sapien
gcccaagtgggcacatcacatttgt

SEQ ID NO: 2754417 - DNA, 25 bp, Homo sapien
caataactcacagcccaagtgggca

SEQ ID NO: 2754418 - DNA, 25 bp, Homo sapien
ccaacacagtggatatccgagtatc

SEQ ID NO: 2754419 - DNA, 25 bp, Homo sapien
cagtaaggaatgttgttggtgcagt

SEQ ID NO: 2754420 - DNA, 25 bp, Homo sapien
ccttataggatgatttgtacccaac

SEQ ID NO: 2754421 - DNA, 25 bp, Homo sapien
tatttttgccgctgccttataggat

SEQ ID NO: 2754422 - DNA, 25 bp, Homo sapien
tatactgtggggttatagatgtcac

SEQ ID NO: 2754423 - DNA, 25 bp, Homo sapien
ttgcactcatcaaatattcaactgt

SEQ ID NO: 2754424 - DNA, 25 bp, Homo sapien
cctaggagactctattttctactgt

SEQ ID NO: 2754425 - DNA, 25 bp, Homo sapien
caactgtacttatactgtggggtta

SEQ ID NO: 2754426 - DNA, 25 bp, Homo sapien
agttgggccacagtataagctttct

SEQ ID NO: 2754427 - DNA, 25 bp, Homo sapien
cactcagcatgagttgggccacagt

SEQ ID NO: 2754428 - DNA, 25 bp, Homo sapien
ggttgggaaccagcactcagcatga

SEQ ID NO: 2754429 - DNA, 25 bp, Homo sapien
gctttctggggtactgctcttttaa

SEQ ID NO: 2754430 - DNA, 25 bp, Homo sapien
caagcaaacttgtgataactggcaa

SEQ ID NO: 2754431 - DNA, 25 bp, Homo sapien
ctgtagttctgtgtgcccgcaagca

SEQ ID NO: 2754432 - DNA, 25 bp, Homo sapien
gtcccatgatactcagaaacgtcct

SEQ ID NO: 2754433 - DNA, 25 bp, Homo sapien
gggctggcacactccacagtcttca

SEQ ID NO: 2754434 - DNA, 25 bp, Homo sapien
tatttgatattaccatgaatcttgc

SEQ ID NO: 2754435 - DNA, 25 bp, Homo sapien
tttaacacttattgcataagcaaac

SEQ ID NO: 2754436 - DNA, 25 bp, Homo sapien
ttccttgagattaaagaactcctta

SEQ ID NO: 2754437 - DNA, 25 bp, Homo sapien
catgtgcttactgctaccagtgagt

SEQ ID NO: 2754438 - DNA, 25 bp, Homo sapien
atctgctgagattgttgcgacgggc

SEQ ID NO: 2754439 - DNA, 25 bp, Homo sapien
gcttttgcccacgtgactgctttcc

SEQ ID NO: 2754440 - DNA, 25 bp, Homo sapien
cagttatcaccagaccgaatgtggg

SEQ ID NO: 2754441 - DNA, 25 bp, Homo sapien
cgggcggagcttttgcccacgtgac

SEQ ID NO: 2754442 - DNA, 25 bp, Homo sapien
cagcagcctcgcaagagattttcat

SEQ ID NO: 2754443 - DNA, 25 bp, Homo sapien
taaacttgacaatcacaaaagggca

SEQ ID NO: 2754444 - DNA, 25 bp, Homo sapien
aaatttcgtatcttgtaactcatgg

SEQ ID NO: 2754445 - DNA, 25 bp, Homo sapien
tattcagtataacaaaagctacttc

SEQ ID NO: 2754446 - DNA, 25 bp, Homo sapien
aaaagagtgccgctgagttaggact

SEQ ID NO: 2754447 - DNA, 25 bp, Homo sapien
cagtgggtgggcttgaagtggcttc

SEQ ID NO: 2754448 - DNA, 25 bp, Homo sapien
gcttggttcgctctttggagagcct

SEQ ID NO: 2754449 - DNA, 25 bp, Homo sapien
tccaccagccagcagtttatcacgg

SEQ ID NO: 2754450 - DNA, 25 bp, Homo sapien
aaaggctccagtgggtcatctgtcc

SEQ ID NO: 2754451 - DNA, 25 bp, Homo sapien
cagcagtatttccttccgatgatga

SEQ ID NO: 2754452 - DNA, 25 bp, Homo sapien
gatgaggatcaaccactctcgccat

SEQ ID NO: 2754453 - DNA, 25 bp, Homo sapien
ttttctgattgtaatacagcagcag

SEQ ID NO: 2754454 - DNA, 25 bp, Homo sapien
cctagaaactgttagccacagtttc

SEQ ID NO: 2754455 - DNA, 25 bp, Homo sapien
tgcataggggccacactattcgtct

SEQ ID NO: 2754456 - DNA, 25 bp, Homo sapien
gccacactattcgtctctgtatcag

SEQ ID NO: 2754457 - DNA, 25 bp, Homo sapien
taggggccacactattcgtctctgt

SEQ ID NO: 2754458 - DNA, 25 bp, Homo sapien
gaacagtttacaaatttgtatgtta

SEQ ID NO: 2754459 - DNA, 25 bp, Homo sapien
ttttaaggatctatctgcatttaga

SEQ ID NO: 2754460 - DNA, 25 bp, Homo sapien
tttaaggatctatctgcatttagag

SEQ ID NO: 2754461 - DNA, 25 bp, Homo sapien
cttttaaggatctatctgcatttag

SEQ ID NO: 2754462 - DNA, 25 bp, Homo sapien
ttaaggatctatctgcatttagaga

SEQ ID NO: 2754463 - DNA, 25 bp, Homo sapien
tcagaagcagtctatagcttgacag

SEQ ID NO: 2754464 - DNA, 25 bp, Homo sapien
tgcttgtgtttcttgattcttgtgg

SEQ ID NO: 2754465 - DNA, 25 bp, Homo sapien
gcaaaccttgattctgtgcactgct

SEQ ID NO: 2754466 - DNA, 25 bp, Homo sapien
gtggattgaaaatgatgagcaaacc

SEQ ID NO: 2754467 - DNA, 25 bp, Homo sapien
tctgtgcactgctttgccattccag

SEQ ID NO: 2754468 - DNA, 25 bp, Homo sapien
tgcagcacccacaagacccattccc

SEQ ID NO: 2754469 - DNA, 25 bp, Homo sapien
ttcctagtgagctagggtatcttcc

SEQ ID NO: 2754470 - DNA, 25 bp, Homo sapien
taagagttggcttctacaggtgaga

SEQ ID NO: 2754471 - DNA, 25 bp, Homo sapien
tacaggtgagacaaattagatggca

SEQ ID NO: 2754472 - DNA, 25 bp, Homo sapien
catgatgtgctcagaccaataactt

SEQ ID NO: 2754473 - DNA, 25 bp, Homo sapien
ttatgtatccacttgttcaagtaat

SEQ ID NO: 2754474 - DNA, 25 bp, Homo sapien
cgttgttggaatagaagtcatttcc

SEQ ID NO: 2754475 - DNA, 25 bp, Homo sapien
gccactggtgccatatctgatggac

SEQ ID NO: 2754476 - DNA, 25 bp, Homo sapien
ccatctgccactggtgccatatctg

SEQ ID NO: 2754477 - DNA, 25 bp, Homo sapien
tcaataagcgttgttggaatagaag

SEQ ID NO: 2754478 - DNA, 25 bp, Homo sapien
ctgtggagagcaatggggggacatg

SEQ ID NO: 2754479 - DNA, 25 bp, Homo sapien
gactctagttctatgaacaaagccc

SEQ ID NO: 2754480 - DNA, 25 bp, Homo sapien
tctgcatttgatcgggaggagactc

SEQ ID NO: 2754481 - DNA, 25 bp, Homo sapien
gaatagtagtctatttctaccagct

SEQ ID NO: 2754482 - DNA, 25 bp, Homo sapien
tctaccagctaatgaagtctgacaa

SEQ ID NO: 2754483 - DNA, 25 bp, Homo sapien
gatttgtagtttgcgataggaccat

SEQ ID NO: 2754484 - DNA, 25 bp, Homo sapien
gagacacggataaaatgcgggattt

SEQ ID NO: 2754485 - DNA, 25 bp, Homo sapien
taaaatgcgggatttgtagtttgcg

SEQ ID NO: 2754486 - DNA, 25 bp, Homo sapien
cttagggagacacggataaaatgcg

SEQ ID NO: 2754487 - DNA, 25 bp, Homo sapien
ggcccaggacagtcaatgtcagcat

SEQ ID NO: 2754488 - DNA, 25 bp, Homo sapien
gggcccaggacagtcaatgtcagca

SEQ ID NO: 2754489 - DNA, 25 bp, Homo sapien
ggggcccaggacagtcaatgtcagc

SEQ ID NO: 2754490 - DNA, 25 bp, Homo sapien
tggggcccaggacagtcaatgtcag

SEQ ID NO: 2754491 - DNA, 25 bp, Homo sapien
tgtttgacgttcttgtattttgacc

SEQ ID NO: 2754492 - DNA, 25 bp, Homo sapien
ccaatttaccaataatagcattgca

SEQ ID NO: 2754493 - DNA, 25 bp, Homo sapien
tgacgttcttgtattttgaccaatt

SEQ ID NO: 2754494 - DNA, 25 bp, Homo sapien
tgaccaatttaccaataatagcatt

SEQ ID NO: 2754495 - DNA, 25 bp, Homo sapien
cactcatgcagttggtggcctcttg

SEQ ID NO: 2754496 - DNA, 25 bp, Homo sapien
cttatggtcaattggtcacctgtgg

SEQ ID NO: 2754497 - DNA, 25 bp, Homo sapien
tctatgttggtccttgcatgtgcac

SEQ ID NO: 2754498 - DNA, 25 bp, Homo sapien
ctgtgtgacagtagcctaggctgac

SEQ ID NO: 2754499 - DNA, 25 bp, Homo sapien
ggtataatacagtatatctttctca

SEQ ID NO: 2754500 - DNA, 25 bp, Homo sapien
tggtataatacagtatatctttctc

SEQ ID NO: 2754501 - DNA, 25 bp, Homo sapien
ttggtataatacagtatatctttct

SEQ ID NO: 2754502 - DNA, 25 bp, Homo sapien
taacaagtttggtaccataagcatg

SEQ ID NO: 2754503 - DNA, 25 bp, Homo sapien
gataccatgttgtaaatccgatgag

SEQ ID NO: 2754504 - DNA, 25 bp, Homo sapien
cataagcatgtggtagcctaaagac

SEQ ID NO: 2754505 - DNA, 25 bp, Homo sapien
catatcattctaatagcagccagga

SEQ ID NO: 2754506 - DNA, 25 bp, Homo sapien
ttcctttctatcatatagtcaggct

SEQ ID NO: 2754507 - DNA, 25 bp, Homo sapien
ttgtccttatcattatcaatgtctt

SEQ ID NO: 2754508 - DNA, 25 bp, Homo sapien
tcattatcaatgtctttgtcaaagc

SEQ ID NO: 2754509 - DNA, 25 bp, Homo sapien
ttccatcagacacccaaaatcatct

SEQ ID NO: 2754510 - DNA, 25 bp, Homo sapien
tattcttaatgctaaatgaggagtt

SEQ ID NO: 2754511 - DNA, 25 bp, Homo sapien
gagatattcttaatgctaaatgagg

SEQ ID NO: 2754512 - DNA, 25 bp, Homo sapien
attcttaatgctaaatgaggagtta

SEQ ID NO: 2754513 - DNA, 25 bp, Homo sapien
gatattcttaatgctaaatgaggag

SEQ ID NO: 2754514 - DNA, 25 bp, Homo sapien
caccttctagagagtatttatatac

SEQ ID NO: 2754515 - DNA, 25 bp, Homo sapien
gtatgaacttatgaatattgatttc

SEQ ID NO: 2754516 - DNA, 25 bp, Homo sapien
agttatgctccaccttctagagagt

SEQ ID NO: 2754517 - DNA, 25 bp, Homo sapien
catttactatgcaaggagttatgct

SEQ ID NO: 2754518 - DNA, 25 bp, Homo sapien
gaacccgggaggcggagcttgcagt

SEQ ID NO: 2754519 - DNA, 25 bp, Homo sapien
cgggcgcttgtagtcctagctaatc

SEQ ID NO: 2754520 - DNA, 25 bp, Homo sapien
ggaggctgaggcaggaaaatggtgt

SEQ ID NO: 2754521 - DNA, 25 bp, Homo sapien
tactccagcttgggcgagagagtga

SEQ ID NO: 2754522 - DNA, 25 bp, Homo sapien
ggtacatgcactttgcgtcaatctt

SEQ ID NO: 2754523 - DNA, 25 bp, Homo sapien
tatcatggtacatgcactttgcgtc

SEQ ID NO: 2754524 - DNA, 25 bp, Homo sapien
catggtacatgcactttgcgtcaat

SEQ ID NO: 2754525 - DNA, 25 bp, Homo sapien
catgcactttgcgtcaatctttaaa

SEQ ID NO: 2754526 - DNA, 25 bp, Homo sapien
gacttctcttaatataactgaatcc

SEQ ID NO: 2754527 - DNA, 25 bp, Homo sapien
accactgagatctgtactttgcaag

SEQ ID NO: 2754528 - DNA, 25 bp, Homo sapien
gctacttctgttatccgtggttgga

SEQ ID NO: 2754529 - DNA, 25 bp, Homo sapien
tttgcaaggcacaggacttctctta

SEQ ID NO: 2754530 - DNA, 25 bp, Homo sapien
tcttcctgagaaaaaacttcaacca

SEQ ID NO: 2754531 - DNA, 25 bp, Homo sapien
cttcctgagaaaaaacttcaaccat

SEQ ID NO: 2754532 - DNA, 25 bp, Homo sapien
tatgagacttaagctatgaggaccc

SEQ ID NO: 2754533 - DNA, 25 bp, Homo sapien
aagctgttgcttttgatcctaagga

SEQ ID NO: 2754534 - DNA, 25 bp, Homo sapien
tatggttcagtgtataccggtcagg

SEQ ID NO: 2754535 - DNA, 25 bp, Homo sapien
ggcgaggcataaaagtcaacaagta

SEQ ID NO: 2754536 - DNA, 25 bp, Homo sapien
gggccaagttatgtctatacagcag

SEQ ID NO: 2754537 - DNA, 25 bp, Homo sapien
ttcactggtgcatattctctggtag

SEQ ID NO: 2754538 - DNA, 25 bp, Homo sapien
tcaatataacgtgctcaccagagct

SEQ ID NO: 2754539 - DNA, 25 bp, Homo sapien
tgaatactagctatcatgggccaag

SEQ ID NO: 2754540 - DNA, 25 bp, Homo sapien
cggcctggcgagaagcagcctggga

SEQ ID NO: 2754541 - DNA, 25 bp, Homo sapien
aagagcctaaatgctatctgatttc

SEQ ID NO: 2754542 - DNA, 25 bp, Homo sapien
ggcctggcgagaagcagcctgggag

SEQ ID NO: 2754543 - DNA, 25 bp, Homo sapien
gcctaaatgctatctgatttcggat

SEQ ID NO: 2754544 - DNA, 25 bp, Homo sapien
tcacagttcagtaatgtccgtcttc

SEQ ID NO: 2754545 - DNA, 25 bp, Homo sapien
taatgtccgtcttcattgttgagtc

SEQ ID NO: 2754546 - DNA, 25 bp, Homo sapien
gtccgtcttcattgttgagtcaata

SEQ ID NO: 2754547 - DNA, 25 bp, Homo sapien
agttcagtaatgtccgtcttcattg

SEQ ID NO: 2754548 - DNA, 25 bp, Homo sapien
gatgctgtttattttgatcttgtct

SEQ ID NO: 2754549 - DNA, 25 bp, Homo sapien
gatcttgtcttttgtcttctggtga

SEQ ID NO: 2754550 - DNA, 25 bp, Homo sapien
gtcttttgtcttctggtgagtgtcc

SEQ ID NO: 2754551 - DNA, 25 bp, Homo sapien
tctgacttctgtctttgatgctgtt

SEQ ID NO: 2754552 - DNA, 25 bp, Homo sapien
gatctggttcctgtctaaatttgca

SEQ ID NO: 2754553 - DNA, 25 bp, Homo sapien
gggagcagtctgtctccgaaaccac

SEQ ID NO: 2754554 - DNA, 25 bp, Homo sapien
accatgatctaacaagacttgaggg

SEQ ID NO: 2754555 - DNA, 25 bp, Homo sapien
ttgagccaaactgtcttctaagaac

SEQ ID NO: 2754556 - DNA, 25 bp, Homo sapien
gaaaagccatgccaaatgttgctct

SEQ ID NO: 2754557 - DNA, 25 bp, Homo sapien
tacgtataataacataaggcattcc

SEQ ID NO: 2754558 - DNA, 25 bp, Homo sapien
catttaattataccagggtttacag

SEQ ID NO: 2754559 - DNA, 25 bp, Homo sapien
taaccgtaaagaatcattgtgagct

SEQ ID NO: 2754560 - DNA, 25 bp, Homo sapien
gacaggatctgttctgtcgcatagg

SEQ ID NO: 2754561 - DNA, 25 bp, Homo sapien
gatctgttctgtcgcataggctgga

SEQ ID NO: 2754562 - DNA, 25 bp, Homo sapien
gatcatgatggcatctacctcctgg

SEQ ID NO: 2754563 - DNA, 25 bp, Homo sapien
tgcaacggcacgatcatgatggcat

SEQ ID NO: 2754564 - DNA, 25 bp, Homo sapien
gatcagatttctacctttacatata

SEQ ID NO: 2754565 - DNA, 25 bp, Homo sapien
gtactgtggattgtagccttttgca

SEQ ID NO: 2754566 - DNA, 25 bp, Homo sapien
tatcagttgtcgctatgtactgtgg

SEQ ID NO: 2754567 - DNA, 25 bp, Homo sapien
taactcagagatactgggggtttca

SEQ ID NO: 2754568 - DNA, 25 bp, Homo sapien
tgctggtggagagttttgcatcgat

SEQ ID NO: 2754569 - DNA, 25 bp, Homo sapien
tgaagattgggatggctatgaaatc

SEQ ID NO: 2754570 - DNA, 25 bp, Homo sapien
gatggctactaactgatcagcctgg

SEQ ID NO: 2754571 - DNA, 25 bp, Homo sapien
tcaaaatttcagtcaatcacctcaa

SEQ ID NO: 2754572 - DNA, 25 bp, Homo sapien
atgccaaccaggcggggaagcactt

SEQ ID NO: 2754573 - DNA, 25 bp, Homo sapien
gccaaccaggcggggaagcacttct

SEQ ID NO: 2754574 - DNA, 25 bp, Homo sapien
tgccaaccaggcggggaagcacttc

SEQ ID NO: 2754575 - DNA, 25 bp, Homo sapien
ggaaagcgtgttctcatcagctggc

SEQ ID NO: 2754576 - DNA, 25 bp, Homo sapien
ccccatgggaaagcgtgttctcatc

SEQ ID NO: 2754577 - DNA, 25 bp, Homo sapien
agccccatgggaaagcgtgttctca

SEQ ID NO: 2754578 - DNA, 25 bp, Homo sapien
catgggaaagcgtgttctcatcagc

SEQ ID NO: 2754579 - DNA, 25 bp, Homo sapien
gatgcagtagcaggacacagtgccc

SEQ ID NO: 2754580 - DNA, 25 bp, Homo sapien
gctgtgacgagcagggcttgacctt

SEQ ID NO: 2754581 - DNA, 25 bp, Homo sapien
tgcccggaaggcagaacaatgaggc

SEQ ID NO: 2754582 - DNA, 25 bp, Homo sapien
acctctgcggtaagcagggactggc

SEQ ID NO: 2754583 - DNA, 25 bp, Homo sapien
aatgaagatcctgttgcttctgtcc

SEQ ID NO: 2754584 - DNA, 25 bp, Homo sapien
ctgtgggaccgggaatgaagatcct

SEQ ID NO: 2754585 - DNA, 25 bp, Homo sapien
gaagatcctgttgcttctgtcccac

SEQ ID NO: 2754586 - DNA, 25 bp, Homo sapien
ggaccgggaatgaagatcctgttgc

SEQ ID NO: 2754587 - DNA, 25 bp, Homo sapien
tgctgtgccggcgaagaggcattct

SEQ ID NO: 2754588 - DNA, 25 bp, Homo sapien
ccttggatgtgtgatgccctacggg

SEQ ID NO: 2754589 - DNA, 25 bp, Homo sapien
aagaggcattctgacctccagggct

SEQ ID NO: 2754590 - DNA, 25 bp, Homo sapien
ccgccgccattttcgtggcggatga

SEQ ID NO: 2754591 - DNA, 25 bp, Homo sapien
cctttggcccataggaatccaacat

SEQ ID NO: 2754592 - DNA, 25 bp, Homo sapien
cccataggaatccaacatcatggag

SEQ ID NO: 2754593 - DNA, 25 bp, Homo sapien
tttggcccataggaatccaacatca

SEQ ID NO: 2754594 - DNA, 25 bp, Homo sapien
tggcccataggaatccaacatcatg

SEQ ID NO: 2754595 - DNA, 25 bp, Homo sapien
aagtttacagtcagaatgttggcca

SEQ ID NO: 2754596 - DNA, 25 bp, Homo sapien
cagcatggtatcctgcctcatcaaa

SEQ ID NO: 2754597 - DNA, 25 bp, Homo sapien
ttcagggtctctcataagtttacag

SEQ ID NO: 2754598 - DNA, 25 bp, Homo sapien
atttttgagagtcagaaacccaggc

SEQ ID NO: 2754599 - DNA, 25 bp, Homo sapien
accagcttcacagctcatttgcttg

SEQ ID NO: 2754600 - DNA, 25 bp, Homo sapien
tcacggtacatgaactgtcttgttg

SEQ ID NO: 2754601 - DNA, 25 bp, Homo sapien
tacatgaactgtcttgttgattata

SEQ ID NO: 2754602 - DNA, 25 bp, Homo sapien
cggtacatgaactgtcttgttgatt

SEQ ID NO: 2754603 - DNA, 25 bp, Homo sapien
cacggtacatgaactgtcttgttga

SEQ ID NO: 2754604 - DNA, 25 bp, Homo sapien
tttatcagtccacccatcaacagga

SEQ ID NO: 2754605 - DNA, 25 bp, Homo sapien
tcaacaggatctataatgaacatca

SEQ ID NO: 2754606 - DNA, 25 bp, Homo sapien
tcactgcaatattgacagagattct

SEQ ID NO: 2754607 - DNA, 25 bp, Homo sapien
gatactttcttccatcacctagttt

SEQ ID NO: 2754608 - DNA, 25 bp, Homo sapien
gccagcggtattcttgaccaggtct

SEQ ID NO: 2754609 - DNA, 25 bp, Homo sapien
tgcagccagcggtattcttgaccag

SEQ ID NO: 2754610 - DNA, 25 bp, Homo sapien
gcggtattcttgaccaggtctgcca

SEQ ID NO: 2754611 - DNA, 25 bp, Homo sapien
tgcttgcagccagcggtattcttga

SEQ ID NO: 2754612 - DNA, 25 bp, Homo sapien
caactgctttgtgagttccagggat

SEQ ID NO: 2754613 - DNA, 25 bp, Homo sapien
cagggatctggtcaatccttccagc

SEQ ID NO: 2754614 - DNA, 25 bp, Homo sapien
taacaggactgtaggtttctgggct

SEQ ID NO: 2754615 - DNA, 25 bp, Homo sapien
gagaacgagtaacaggactgtaggt

SEQ ID NO: 2754616 - DNA, 25 bp, Homo sapien
aaaaaagtgctaaggtcagctgtcc

SEQ ID NO: 2754617 - DNA, 25 bp, Homo sapien
aaaaagtgctaaggtcagctgtccc

SEQ ID NO: 2754618 - DNA, 25 bp, Homo sapien
gttagaattgccctgactagaagaa

SEQ ID NO: 2754619 - DNA, 25 bp, Homo sapien
agaaaaaagtgctaaggtcagctgt

SEQ ID NO: 2754620 - DNA, 25 bp, Homo sapien
tgagaagcccaaagcaagccagtgg

SEQ ID NO: 2754621 - DNA, 25 bp, Homo sapien
tgagtaactgagtgatggtgaccag

SEQ ID NO: 2754622 - DNA, 25 bp, Homo sapien
tccccagtaaccagaacaacagctg

SEQ ID NO: 2754623 - DNA, 25 bp, Homo sapien
tggtgaccaggtctaattccctttc

SEQ ID NO: 2754624 - DNA, 25 bp, Homo sapien
agtggaatttatgatgtgaagatgg

SEQ ID NO: 2754625 - DNA, 25 bp, Homo sapien
tcatcttgaaatggcactgaactta

SEQ ID NO: 2754626 - DNA, 25 bp, Homo sapien
gaacttacattcacgcttacaagca

SEQ ID NO: 2754627 - DNA, 25 bp, Homo sapien
gctcacaaatatgaatcagatacat

SEQ ID NO: 2754628 - DNA, 25 bp, Homo sapien
gcacctttacttgctcacaaatatg

SEQ ID NO: 2754629 - DNA, 25 bp, Homo sapien
aagtaaccaaaggctcgagggccat

SEQ ID NO: 2754630 - DNA, 25 bp, Homo sapien
cagaaaagtaaccaaaggctcgagg

SEQ ID NO: 2754631 - DNA, 25 bp, Homo sapien
tgttaggtagtaatggtgaggatct

SEQ ID NO: 2754632 - DNA, 25 bp, Homo sapien
ggatcttttgtactactaagtccta

SEQ ID NO: 2754633 - DNA, 25 bp, Homo sapien
gagatcatgatatgcaaacacatgc

SEQ ID NO: 2754634 - DNA, 25 bp, Homo sapien
aacacatgctttagttcacatccaa

SEQ ID NO: 2754635 - DNA, 25 bp, Homo sapien
ttgctggcaaaactggtgttcagca

SEQ ID NO: 2754636 - DNA, 25 bp, Homo sapien
catgggcaacaagttatcaggaagc

SEQ ID NO: 2754637 - DNA, 25 bp, Homo sapien
ctggtgttcagcactggagatactc

SEQ ID NO: 2754638 - DNA, 25 bp, Homo sapien
agcatgggcaacaagttatcaggaa

SEQ ID NO: 2754639 - DNA, 25 bp, Homo sapien
tgattgatttttcactggcagagtc

SEQ ID NO: 2754640 - DNA, 25 bp, Homo sapien
tccatccgacaatgattgatttttc

SEQ ID NO: 2754641 - DNA, 25 bp, Homo sapien
gattgatttttcactggcagagtct

SEQ ID NO: 2754642 - DNA, 25 bp, Homo sapien
aaatattctccatccgacaatgatt

SEQ ID NO: 2754643 - DNA, 25 bp, Homo sapien
taattgcttccggtgactgtcattg

SEQ ID NO: 2754644 - DNA, 25 bp, Homo sapien
ctaattgcttccggtgactgtcatt

SEQ ID NO: 2754645 - DNA, 25 bp, Homo sapien
aattgcttccggtgactgtcattgc

SEQ ID NO: 2754646 - DNA, 25 bp, Homo sapien
tttcccgcttaagctctgggcagac

SEQ ID NO: 2754647 - DNA, 25 bp, Homo sapien
ttttcccgcttaagctctgggcaga

SEQ ID NO: 2754648 - DNA, 25 bp, Homo sapien
ctttttcccgcttaagctctgggca

SEQ ID NO: 2754649 - DNA, 25 bp, Homo sapien
tttttcccgcttaagctctgggcag

SEQ ID NO: 2754650 - DNA, 25 bp, Homo sapien
ccttcagcattgcattcgttgtcat

SEQ ID NO: 2754651 - DNA, 25 bp, Homo sapien
cagccttcagcattgcattcgttgt

SEQ ID NO: 2754652 - DNA, 25 bp, Homo sapien
tcagccttcagcattgcattcgttg

SEQ ID NO: 2754653 - DNA, 25 bp, Homo sapien
gccttcagcattgcattcgttgtca

SEQ ID NO: 2754654 - DNA, 25 bp, Homo sapien
aatcctgtgcaagactgtgaagtac

SEQ ID NO: 2754655 - DNA, 25 bp, Homo sapien
caattgacctgaatcctgtgcaaga

SEQ ID NO: 2754656 - DNA, 25 bp, Homo sapien
caaaatcagccaattgacctgaatc

SEQ ID NO: 2754657 - DNA, 25 bp, Homo sapien
tttatctttcccaaaatcagccaat

SEQ ID NO: 2754658 - DNA, 25 bp, Homo sapien
tattgcgcatacatttagcaattct

SEQ ID NO: 2754659 - DNA, 25 bp, Homo sapien
tcataaattcacgtgtgcaccttta

SEQ ID NO: 2754660 - DNA, 25 bp, Homo sapien
cctttatagatattgcgcatacatt

SEQ ID NO: 2754661 - DNA, 25 bp, Homo sapien
ttcacgtgtgcacctttatagatat

SEQ ID NO: 2754662 - DNA, 25 bp, Homo sapien
caaggtccttgaagtcacttccttt

SEQ ID NO: 2754663 - DNA, 25 bp, Homo sapien
tgccccaaggtccttgaagtcactt

SEQ ID NO: 2754664 - DNA, 25 bp, Homo sapien
cactgccccaaggtccttgaagtca

SEQ ID NO: 2754665 - DNA, 25 bp, Homo sapien
tcctccactgccccaaggtccttga

SEQ ID NO: 2754666 - DNA, 25 bp, Homo sapien
gggagacggcatggaccgtacttcc

SEQ ID NO: 2754667 - DNA, 25 bp, Homo sapien
tagagtgtagcagggggagacggca

SEQ ID NO: 2754668 - DNA, 25 bp, Homo sapien
gcatggaccgtacttcccaaaacat

SEQ ID NO: 2754669 - DNA, 25 bp, Homo sapien
agacggcatggaccgtacttcccaa

SEQ ID NO: 2754670 - DNA, 25 bp, Homo sapien
tccttttacgattgcgactttgctc

SEQ ID NO: 2754671 - DNA, 25 bp, Homo sapien
gcgttctttccttttacgattgcga

SEQ ID NO: 2754672 - DNA, 25 bp, Homo sapien
gattgcgactttgctcttgtacttc

SEQ ID NO: 2754673 - DNA, 25 bp, Homo sapien
tggcgttctttccttttacgattgc

SEQ ID NO: 2754674 - DNA, 25 bp, Homo sapien
gactgatagcaatactcttggtcta

SEQ ID NO: 2754675 - DNA, 25 bp, Homo sapien
tatgtgtgactgatagcaatactct

SEQ ID NO: 2754676 - DNA, 25 bp, Homo sapien
tagcaatactcttggtctaacatat

SEQ ID NO: 2754677 - DNA, 25 bp, Homo sapien
cctgagtacttggtgtatgtgtgac

SEQ ID NO: 2754678 - DNA, 25 bp, Homo sapien
ctgggagtccaatctggctgaactt

SEQ ID NO: 2754679 - DNA, 25 bp, Homo sapien
tgggagtccaatctggctgaacttc

SEQ ID NO: 2754680 - DNA, 25 bp, Homo sapien
gggagtccaatctggctgaacttca

SEQ ID NO: 2754681 - DNA, 25 bp, Homo sapien
aactgaggtctttggtgatgtaggg

SEQ ID NO: 2754682 - DNA, 25 bp, Homo sapien
gttcagaaccataactatttcagat

SEQ ID NO: 2754683 - DNA, 25 bp, Homo sapien
agttcagaaccataactatttcaga

SEQ ID NO: 2754684 - DNA, 25 bp, Homo sapien
gtagggttattgaacatacagtcat

SEQ ID NO: 2754685 - DNA, 25 bp, Homo sapien
cgcctttgctcagaagatccaataa

SEQ ID NO: 2754686 - DNA, 25 bp, Homo sapien
tcagaagatccaataatgcaaaccc

SEQ ID NO: 2754687 - DNA, 25 bp, Homo sapien
caaacacgcctttgctcagaagatc

SEQ ID NO: 2754688 - DNA, 25 bp, Homo sapien
tttgctcagaagatccaataatgca

SEQ ID NO: 2754689 - DNA, 25 bp, Homo sapien
ttgaagtgcacattcaacaactgca

SEQ ID NO: 2754690 - DNA, 25 bp, Homo sapien
gagctaaggtgcgacgtggagagtc

SEQ ID NO: 2754691 - DNA, 25 bp, Homo sapien
tctttgaagtgcacattcaacaact

SEQ ID NO: 2754692 - DNA, 25 bp, Homo sapien
tgcgacgtggagagtcttggcagat

SEQ ID NO: 2754693 - DNA, 25 bp, Homo sapien
tcctgatgggtaccatacttgcagg

SEQ ID NO: 2754694 - DNA, 25 bp, Homo sapien
tccagttcctgatgggtaccatact

SEQ ID NO: 2754695 - DNA, 25 bp, Homo sapien
ctgatgggtaccatacttgcaggtt

SEQ ID NO: 2754696 - DNA, 25 bp, Homo sapien
agttcctgatgggtaccatacttgc

SEQ ID NO: 2754697 - DNA, 25 bp, Homo sapien
cagacaagttttcgcctcttcattg

SEQ ID NO: 2754698 - DNA, 25 bp, Homo sapien
tttcgcctcttcattgtgagggctg

SEQ ID NO: 2754699 - DNA, 25 bp, Homo sapien
aaggtgcctttcaatagttgagggc

SEQ ID NO: 2754700 - DNA, 25 bp, Homo sapien
tttccctcctacttgaaaaatgtga

SEQ ID NO: 2754701 - DNA, 25 bp, Homo sapien
tgtggccatcgtggccagtgctgcc

SEQ ID NO: 2754702 - DNA, 25 bp, Homo sapien
tgtgcccttgcactttgtgtggcca

SEQ ID NO: 2754703 - DNA, 25 bp, Homo sapien
cgggcctgtgcccttgcactttgtg

SEQ ID NO: 2754704 - DNA, 25 bp, Homo sapien
tgcactttgtgtggccatcgtggcc

SEQ ID NO: 2754705 - DNA, 25 bp, Homo sapien
tatatatgtttacgggctatagaag

SEQ ID NO: 2754706 - DNA, 25 bp, Homo sapien
gctatagaagccactacacaaacat

SEQ ID NO: 2754707 - DNA, 25 bp, Homo sapien
tgcatgtccacataatcctccaaaa

SEQ ID NO: 2754708 - DNA, 25 bp, Homo sapien
caaacatatgctgaacctaggtaac

SEQ ID NO: 2754709 - DNA, 25 bp, Homo sapien
gtgattcaaagtcaggctcaatagc

SEQ ID NO: 2754710 - DNA, 25 bp, Homo sapien
ttaaggtgattcaaagtcaggctca

SEQ ID NO: 2754711 - DNA, 25 bp, Homo sapien
ggtgattcaaagtcaggctcaatag

SEQ ID NO: 2754712 - DNA, 25 bp, Homo sapien
aaggtgattcaaagtcaggctcaat

SEQ ID NO: 2754713 - DNA, 25 bp, Homo sapien
gtagtttcacatcatcaacaaaaaa

SEQ ID NO: 2754714 - DNA, 25 bp, Homo sapien
aaaaaattgcaattcgtggccactg

SEQ ID NO: 2754715 - DNA, 25 bp, Homo sapien
ccaggtttgtcttacaaagtataca

SEQ ID NO: 2754716 - DNA, 25 bp, Homo sapien
caattcgtggccactggttgccaag

SEQ ID NO: 2754717 - DNA, 25 bp, Homo sapien
tgtctggatcctagaaaggagcagg

SEQ ID NO: 2754718 - DNA, 25 bp, Homo sapien
tttcttcagacaataccgatgcatt

SEQ ID NO: 2754719 - DNA, 25 bp, Homo sapien
ataccgatgcattgtcgcctttgac

SEQ ID NO: 2754720 - DNA, 25 bp, Homo sapien
ggatcctagaaaggagcaggtattt

SEQ ID NO: 2754721 - DNA, 25 bp, Homo sapien
ttatttgaatcttgatttgctctat

SEQ ID NO: 2754722 - DNA, 25 bp, Homo sapien
tatttgaatcttgatttgctctatc

SEQ ID NO: 2754723 - DNA, 25 bp, Homo sapien
ctggtgggtagattcagacctttat

SEQ ID NO: 2754724 - DNA, 25 bp, Homo sapien
ctgagaggtttggagccactgatca

SEQ ID NO: 2754725 - DNA, 25 bp, Homo sapien
ggagccactgatcaccaagccctta

SEQ ID NO: 2754726 - DNA, 25 bp, Homo sapien
caagcccttataggtgaacttctcc

SEQ ID NO: 2754727 - DNA, 25 bp, Homo sapien
aggtttgacttgctactggctgagt

SEQ ID NO: 2754728 - DNA, 25 bp, Homo sapien
gtttgacttgctactggctgagttc

SEQ ID NO: 2754729 - DNA, 25 bp, Homo sapien
tgacttgctactggctgagttcgga

SEQ ID NO: 2754730 - DNA, 25 bp, Homo sapien
acttgctactggctgagttcggaga

SEQ ID NO: 2754731 - DNA, 25 bp, Homo sapien
ctccaagcctgcttaaaaactgacc

SEQ ID NO: 2754732 - DNA, 25 bp, Homo sapien
tctccaagcctgcttaaaaactgac

SEQ ID NO: 2754733 - DNA, 25 bp, Homo sapien
gtctccaagcctgcttaaaaactga

SEQ ID NO: 2754734 - DNA, 25 bp, Homo sapien
tgtaaaatgcagagccgcagtgccc

SEQ ID NO: 2754735 - DNA, 25 bp, Homo sapien
cctaggagccaatagcaagtatgtc

SEQ ID NO: 2754736 - DNA, 25 bp, Homo sapien
tgtaagcacttatgaaaggaaggga

SEQ ID NO: 2754737 - DNA, 25 bp, Homo sapien
tataatcatcactgataaaacagcc

SEQ ID NO: 2754738 - DNA, 25 bp, Homo sapien
aacggatgcgtggatgctcccagct

SEQ ID NO: 2754739 - DNA, 25 bp, Homo sapien
gcaaaagacagtgcttcaaagtaca

SEQ ID NO: 2754740 - DNA, 25 bp, Homo sapien
gacagtgcttcaaagtacactgatt

SEQ ID NO: 2754741 - DNA, 25 bp, Homo sapien
ctggtggaggtcacaatttgaacgg

SEQ ID NO: 2754742 - DNA, 25 bp, Homo sapien
tgacagtctttggcaaaacttttca

SEQ ID NO: 2754743 - DNA, 25 bp, Homo sapien
ctgacagtctttggcaaaacttttc

SEQ ID NO: 2754744 - DNA, 25 bp, Homo sapien
gacagtctttggcaaaacttttcat

SEQ ID NO: 2754745 - DNA, 25 bp, Homo sapien
tacactttgttacaggtacattggc

SEQ ID NO: 2754746 - DNA, 25 bp, Homo sapien
gcagcgcctgttttctctcctagaa

SEQ ID NO: 2754747 - DNA, 25 bp, Homo sapien
ttgagtgccccaaacaggacattgt

SEQ ID NO: 2754748 - DNA, 25 bp, Homo sapien
tgcagcaccactttgatcagattcc

SEQ ID NO: 2754749 - DNA, 25 bp, Homo sapien
ttcttgtccaccaggattgaagcgg

SEQ ID NO: 2754750 - DNA, 25 bp, Homo sapien
ggattgaagcgggtagcagtgggaa

SEQ ID NO: 2754751 - DNA, 25 bp, Homo sapien
tccaccaggattgaagcgggtagca

SEQ ID NO: 2754752 - DNA, 25 bp, Homo sapien
gtatttcttgtccaccaggattgaa

SEQ ID NO: 2754753 - DNA, 25 bp, Homo sapien
ttgccacgcatgctagaaaactgac

SEQ ID NO: 2754754 - DNA, 25 bp, Homo sapien
caaggctccattttaatgagtctcc

SEQ ID NO: 2754755 - DNA, 25 bp, Homo sapien
gaaaactgacagctgattgaggacc

SEQ ID NO: 2754756 - DNA, 25 bp, Homo sapien
cagctgattgaggaccaaggctcca

SEQ ID NO: 2754757 - DNA, 25 bp, Homo sapien
cctactggctttggtgaggacaaag

SEQ ID NO: 2754758 - DNA, 25 bp, Homo sapien
ggcctccatctttgcgcaaaaaatg

SEQ ID NO: 2754759 - DNA, 25 bp, Homo sapien
tctttgcgcaaaaaatgtatcaatg

SEQ ID NO: 2754760 - DNA, 25 bp, Homo sapien
tttacctactggctttggtgaggac

SEQ ID NO: 2754761 - DNA, 25 bp, Homo sapien
gaccagcttgttaactttcctggga

SEQ ID NO: 2754762 - DNA, 25 bp, Homo sapien
gggctgcaacccaagggccaagtag

SEQ ID NO: 2754763 - DNA, 25 bp, Homo sapien
aagtagagtgaaagacgaatccaga

SEQ ID NO: 2754764 - DNA, 25 bp, Homo sapien
ggtaaattggcaagtggaccagctt

SEQ ID NO: 2754765 - DNA, 25 bp, Homo sapien
ccggacacgataggagaggtctaca

SEQ ID NO: 2754766 - DNA, 25 bp, Homo sapien
ttccggacacgataggagaggtcta

SEQ ID NO: 2754767 - DNA, 25 bp, Homo sapien
aggagaggtctacaaggcatttctg

SEQ ID NO: 2754768 - DNA, 25 bp, Homo sapien
ccaattccggacacgataggagagg

SEQ ID NO: 2754769 - DNA, 25 bp, Homo sapien
tacagcttaggacatggtgcaaaca

SEQ ID NO: 2754770 - DNA, 25 bp, Homo sapien
agcttaggacatggtgcaaacactc

SEQ ID NO: 2754771 - DNA, 25 bp, Homo sapien
ctacagcttaggacatggtgcaaac

SEQ ID NO: 2754772 - DNA, 25 bp, Homo sapien
acagcttaggacatggtgcaaacac

SEQ ID NO: 2754773 - DNA, 25 bp, Homo sapien
caaacagcctgtgctaaccagagga

SEQ ID NO: 2754774 - DNA, 25 bp, Homo sapien
ccagaggactatagaaaggtactga

SEQ ID NO: 2754775 - DNA, 25 bp, Homo sapien
agaggacaagaacaaaatgctgcct

SEQ ID NO: 2754776 - DNA, 25 bp, Homo sapien
ccagggttcggcacacactgattca

SEQ ID NO: 2754777 - DNA, 25 bp, Homo sapien
taacgatttggagagttagtctgtc

SEQ ID NO: 2754778 - DNA, 25 bp, Homo sapien
ctgtcaagctggataacgatttgga

SEQ ID NO: 2754779 - DNA, 25 bp, Homo sapien
tttccactagtggatttcattgatt

SEQ ID NO: 2754780 - DNA, 25 bp, Homo sapien
gaaatgtgaatttccactagtggat

SEQ ID NO: 2754781 - DNA, 25 bp, Homo sapien
caagttcagcaaaaaacgtcgtcgg

SEQ ID NO: 2754782 - DNA, 25 bp, Homo sapien
cataggtgagtcttatccctggaaa

SEQ ID NO: 2754783 - DNA, 25 bp, Homo sapien
tcaagaaaggattacgcgagcattt

SEQ ID NO: 2754784 - DNA, 25 bp, Homo sapien
ggaataatgcttctccataggtgag

SEQ ID NO: 2754785 - DNA, 25 bp, Homo sapien
gaagcctttgtagggccctgggcac

SEQ ID NO: 2754786 - DNA, 25 bp, Homo sapien
ctactctgaagcctttgtagggccc

SEQ ID NO: 2754787 - DNA, 25 bp, Homo sapien
tactctgaagcctttgtagggccct

SEQ ID NO: 2754788 - DNA, 25 bp, Homo sapien
tctgaagcctttgtagggccctggg

SEQ ID NO: 2754789 - DNA, 25 bp, Homo sapien
gacaccctttggggtcttaggctca

SEQ ID NO: 2754790 - DNA, 25 bp, Homo sapien
agtcgatctagcttgcagctgacac

SEQ ID NO: 2754791 - DNA, 25 bp, Homo sapien
tgacaccctttggggtcttaggctc

SEQ ID NO: 2754792 - DNA, 25 bp, Homo sapien
gtaggcaagtcgatctagcttgcag

SEQ ID NO: 2754793 - DNA, 25 bp, Homo sapien
tacgaggatcttgatagcctcagcg

SEQ ID NO: 2754794 - DNA, 25 bp, Homo sapien
acgaggatcttgatagcctcagcgc

SEQ ID NO: 2754795 - DNA, 25 bp, Homo sapien
gatcttgatagcctcagcgcgtgca

SEQ ID NO: 2754796 - DNA, 25 bp, Homo sapien
atcttgatagcctcagcgcgtgcac

SEQ ID NO: 2754797 - DNA, 25 bp, Homo sapien
ggggtccaccctcttaagagagtca

SEQ ID NO: 2754798 - DNA, 25 bp, Homo sapien
ccaccctcttaagagagtcatatct

SEQ ID NO: 2754799 - DNA, 25 bp, Homo sapien
ggtccaccctcttaagagagtcata

SEQ ID NO: 2754800 - DNA, 25 bp, Homo sapien
ctcttaagagagtcatatctttgtg

SEQ ID NO: 2754801 - DNA, 25 bp, Homo sapien
atttgaaagacaatctgtggtgctc

SEQ ID NO: 2754802 - DNA, 25 bp, Homo sapien
cattgcaaagataagcttcagtgaa

SEQ ID NO: 2754803 - DNA, 25 bp, Homo sapien
ctgtggtgctctctaggtcaaccat

SEQ ID NO: 2754804 - DNA, 25 bp, Homo sapien
tctaggtcaaccattgcccacattg

SEQ ID NO: 2754805 - DNA, 25 bp, Homo sapien
cacggactctatcccagtagaacca

SEQ ID NO: 2754806 - DNA, 25 bp, Homo sapien
gactgcctgccacggactctatccc

SEQ ID NO: 2754807 - DNA, 25 bp, Homo sapien
ctgccacggactctatcccagtaga

SEQ ID NO: 2754808 - DNA, 25 bp, Homo sapien
tctatcccagtagaaccatgaagac

SEQ ID NO: 2754809 - DNA, 25 bp, Homo sapien
ctggctgctcagatttatggttttc

SEQ ID NO: 2754810 - DNA, 25 bp, Homo sapien
gctgctcagatttatggttttccag

SEQ ID NO: 2754811 - DNA, 25 bp, Homo sapien
ctgctcagatttatggttttccagg

SEQ ID NO: 2754812 - DNA, 25 bp, Homo sapien
ggctgctcagatttatggttttcca

SEQ ID NO: 2754813 - DNA, 25 bp, Homo sapien
ctgaggcctcctaagccttgtgaaa

SEQ ID NO: 2754814 - DNA, 25 bp, Homo sapien
tggtaccaggagtttgggtcactgc

SEQ ID NO: 2754815 - DNA, 25 bp, Homo sapien
gctcttaacagcatacggccatatg

SEQ ID NO: 2754816 - DNA, 25 bp, Homo sapien
tgttcacaggatagtgagctctcac

SEQ ID NO: 2754817 - DNA, 25 bp, Homo sapien
tgaaataatgatcctggtccacaga

SEQ ID NO: 2754818 - DNA, 25 bp, Homo sapien
gaatgaagcccagtgagagggaccc

SEQ ID NO: 2754819 - DNA, 25 bp, Homo sapien
tccatagaaagtccctacgcaccgt

SEQ ID NO: 2754820 - DNA, 25 bp, Homo sapien
agagggacccacacttgtctcccgg

SEQ ID NO: 2754821 - DNA, 25 bp, Homo sapien
taatttccttaaccatagcctgact

SEQ ID NO: 2754822 - DNA, 25 bp, Homo sapien
aatctttcacttaacagtctgggtc

SEQ ID NO: 2754823 - DNA, 25 bp, Homo sapien
agatccaagggtgtgaatattttta

SEQ ID NO: 2754824 - DNA, 25 bp, Homo sapien
aggttgggttgatttacattgctcc

SEQ ID NO: 2754825 - DNA, 25 bp, Homo sapien
ggctgcttgaaaccctgaaaataag

SEQ ID NO: 2754826 - DNA, 25 bp, Homo sapien
taccaggccacgttaacagaagaat

SEQ ID NO: 2754827 - DNA, 25 bp, Homo sapien
tcaagaacttggctgttaccaggcc

SEQ ID NO: 2754828 - DNA, 25 bp, Homo sapien
taacttgacctaaatacgaaaggca

SEQ ID NO: 2754829 - DNA, 25 bp, Homo sapien
gcataaacgacctaacatacactgt

SEQ ID NO: 2754830 - DNA, 25 bp, Homo sapien
gggaaaacctatgcagctcattaat

SEQ ID NO: 2754831 - DNA, 25 bp, Homo sapien
tatactactgtggatttgagggcca

SEQ ID NO: 2754832 - DNA, 25 bp, Homo sapien
tataagcatccaattaaggagtggg

SEQ ID NO: 2754833 - DNA, 25 bp, Homo sapien
ggctgtcctgagatccacagcggca

SEQ ID NO: 2754834 - DNA, 25 bp, Homo sapien
gacaggagtaaaaccgaggatctcg

SEQ ID NO: 2754835 - DNA, 25 bp, Homo sapien
ttcaagtccgttcgaactggcttct

SEQ ID NO: 2754836 - DNA, 25 bp, Homo sapien
acacagaagggcaaccccacggagc

SEQ ID NO: 2754837 - DNA, 25 bp, Homo sapien
tactaccatgctgagatgttcaatg

SEQ ID NO: 2754838 - DNA, 25 bp, Homo sapien
ccagcagggtgggtatagttcttct

SEQ ID NO: 2754839 - DNA, 25 bp, Homo sapien
gactagatgcaatgatatgacaaag

SEQ ID NO: 2754840 - DNA, 25 bp, Homo sapien
aataattactgtcccaagatgtcac

SEQ ID NO: 2754841 - DNA, 25 bp, Homo sapien
gagtttcatgttcctcttgtcccag

SEQ ID NO: 2754842 - DNA, 25 bp, Homo sapien
atagacatagacaccctctgtggga

SEQ ID NO: 2754843 - DNA, 25 bp, Homo sapien
tatgacaggcatcaactcaaagagc

SEQ ID NO: 2754844 - DNA, 25 bp, Homo sapien
gtccttcatccatttggtgacttca

SEQ ID NO: 2754845 - DNA, 25 bp, Homo sapien
cagcctttgttggcccgagttattt

SEQ ID NO: 2754846 - DNA, 25 bp, Homo sapien
gcccagcctttgttggcccgagtta

SEQ ID NO: 2754847 - DNA, 25 bp, Homo sapien
cccagcctttgttggcccgagttat

SEQ ID NO: 2754848 - DNA, 25 bp, Homo sapien
agcccagcctttgttggcccgagtt

SEQ ID NO: 2754849 - DNA, 25 bp, Homo sapien
ccagtgtactagaaatccaagaagc

SEQ ID NO: 2754850 - DNA, 25 bp, Homo sapien
tctataagttcagtaaaccagaaac

SEQ ID NO: 2754851 - DNA, 25 bp, Homo sapien
actggctgtttctttctataagttc

SEQ ID NO: 2754852 - DNA, 25 bp, Homo sapien
gaggtcggccattgaaaacccacga

SEQ ID NO: 2754853 - DNA, 25 bp, Homo sapien
tagaggaagctgtctagtgtagtgc

SEQ ID NO: 2754854 - DNA, 25 bp, Homo sapien
cttcacagggaagtctctgtagagg

SEQ ID NO: 2754855 - DNA, 25 bp, Homo sapien
tgcacactctcgcttcacagggaag

SEQ ID NO: 2754856 - DNA, 25 bp, Homo sapien
tagtgctgctggtgggtaagtctgt

SEQ ID NO: 2754857 - DNA, 25 bp, Homo sapien
ggtgtagcagggcaagtgaatgagg

SEQ ID NO: 2754858 - DNA, 25 bp, Homo sapien
gtagcagggcaagtgaatgaggaag

SEQ ID NO: 2754859 - DNA, 25 bp, Homo sapien
ctttaggtgtagcagggcaagtgaa

SEQ ID NO: 2754860 - DNA, 25 bp, Homo sapien
tttaggtgtagcagggcaagtgaat

SEQ ID NO: 2754861 - DNA, 25 bp, Homo sapien
atagcaagtttcagctcagtgaggg

SEQ ID NO: 2754862 - DNA, 25 bp, Homo sapien
ggaatggccccatcttctgcagcct

SEQ ID NO: 2754863 - DNA, 25 bp, Homo sapien
gattttcgctcatgatgatggtgcc

SEQ ID NO: 2754864 - DNA, 25 bp, Homo sapien
caccaagcagggattctagcatcaa

SEQ ID NO: 2754865 - DNA, 25 bp, Homo sapien
ccttgggttggatgcctaggatggt

SEQ ID NO: 2754866 - DNA, 25 bp, Homo sapien
gcctcccgggtctcatcccctccac

SEQ ID NO: 2754867 - DNA, 25 bp, Homo sapien
ccagcttgctctggtaggtgatgtc

SEQ ID NO: 2754868 - DNA, 25 bp, Homo sapien
gtgatgtcagcattggggtgcagcc

SEQ ID NO: 2754869 - DNA, 25 bp, Homo sapien
gcacagactgccaacataagcaccg

SEQ ID NO: 2754870 - DNA, 25 bp, Homo sapien
gccaacataagcaccgtctaaatta

SEQ ID NO: 2754871 - DNA, 25 bp, Homo sapien
cagacaccccagataagcacagact

SEQ ID NO: 2754872 - DNA, 25 bp, Homo sapien
tgaacaacagacaccccagataagc

SEQ ID NO: 2754873 - DNA, 25 bp, Homo sapien
caatctcttatcatagtcgtcagtg

SEQ ID NO: 2754874 - DNA, 25 bp, Homo sapien
gtcgtcagtgactctgcctccatat

SEQ ID NO: 2754875 - DNA, 25 bp, Homo sapien
tatcatgtagcggatggtggtccag

SEQ ID NO: 2754876 - DNA, 25 bp, Homo sapien
ctgaaccaaaccttagcaaatgtgt

SEQ ID NO: 2754877 - DNA, 25 bp, Homo sapien
ttttgacatccatgtcatccaagtg

SEQ ID NO: 2754878 - DNA, 25 bp, Homo sapien
gtacagcatgggcttccactgggac

SEQ ID NO: 2754879 - DNA, 25 bp, Homo sapien
taggggatattccaccccagggcac

SEQ ID NO: 2754880 - DNA, 25 bp, Homo sapien
cacagtggcattaaagtccgcttgg

SEQ ID NO: 2754881 - DNA, 25 bp, Homo sapien
ggaaactgcttatgagcctcggtgg

SEQ ID NO: 2754882 - DNA, 25 bp, Homo sapien
cagtcctgcccggagtccttgtgga

SEQ ID NO: 2754883 - DNA, 25 bp, Homo sapien
ggaacgcatcatgtacaagctcagt

SEQ ID NO: 2754884 - DNA, 25 bp, Homo sapien
tccttgtggaggatcgttggcaaat

SEQ ID NO: 2754885 - DNA, 25 bp, Homo sapien
catggagtccacgatgtacttgcgg

SEQ ID NO: 2754886 - DNA, 25 bp, Homo sapien
tccccaaggcaatgatggaatctgt

SEQ ID NO: 2754887 - DNA, 25 bp, Homo sapien
gctgcaagagcttccgagcatggac

SEQ ID NO: 2754888 - DNA, 25 bp, Homo sapien
tggcgtccgtggatcagattcctcc

SEQ ID NO: 2754889 - DNA, 25 bp, Homo sapien
gaagacgtctgaagcagtcaagaga

SEQ ID NO: 2754890 - DNA, 25 bp, Homo sapien
ctgggcgatggttctgtcaggacac

SEQ ID NO: 2754891 - DNA, 25 bp, Homo sapien
gagatttatcataggcatttggaag

SEQ ID NO: 2754892 - DNA, 25 bp, Homo sapien
caccaggatctaataaggagaagac

SEQ ID NO: 2754893 - DNA, 25 bp, Homo sapien
ccaaattcagccatgttatgtccag

SEQ ID NO: 2754894 - DNA, 25 bp, Homo sapien
gatccattttgatggttttggagga

SEQ ID NO: 2754895 - DNA, 25 bp, Homo sapien
agttccaccaaattcagccatgtta

SEQ ID NO: 2754896 - DNA, 25 bp, Homo sapien
gacatctgaaaactgtctgagtttg

SEQ ID NO: 2754897 - DNA, 25 bp, Homo sapien
ctatagtctctattcttatattgac

SEQ ID NO: 2754898 - DNA, 25 bp, Homo sapien
tgcgctatagtctctattcttatat

SEQ ID NO: 2754899 - DNA, 25 bp, Homo sapien
gctatagtctctattcttatattga

SEQ ID NO: 2754900 - DNA, 25 bp, Homo sapien
ctgtgcgctatagtctctattctta

SEQ ID NO: 2754901 - DNA, 25 bp, Homo sapien
tcatgcttgactcggttcctctgga

SEQ ID NO: 2754902 - DNA, 25 bp, Homo sapien
aatcctcttgcttgtaatcgggctc

SEQ ID NO: 2754903 - DNA, 25 bp, Homo sapien
taaacctcgtaggtcatgtgctcga

SEQ ID NO: 2754904 - DNA, 25 bp, Homo sapien
cagccctcgggcagcatacttataa

SEQ ID NO: 2754905 - DNA, 25 bp, Homo sapien
taaccaagcgcatctcagtaatgag

SEQ ID NO: 2754906 - DNA, 25 bp, Homo sapien
tagaggatgctgccccgcgtagcca

SEQ ID NO: 2754907 - DNA, 25 bp, Homo sapien
agtctgatacatctcattaaccaag

SEQ ID NO: 2754908 - DNA, 25 bp, Homo sapien
gaaactggcgaagcgaagtctgata

SEQ ID NO: 2754909 - DNA, 25 bp, Homo sapien
gactttcatcttctaccagggaccc

SEQ ID NO: 2754910 - DNA, 25 bp, Homo sapien
caggcggtaaagcaagttatcttct

SEQ ID NO: 2754911 - DNA, 25 bp, Homo sapien
tgttactcagcacgacaatgagact

SEQ ID NO: 2754912 - DNA, 25 bp, Homo sapien
tcctcccgggctgagttaatttgaa

SEQ ID NO: 2754913 - DNA, 25 bp, Homo sapien
tgtttgcagttacatcttccatcag

SEQ ID NO: 2754914 - DNA, 25 bp, Homo sapien
gtttgcagttacatcttccatcaga

SEQ ID NO: 2754915 - DNA, 25 bp, Homo sapien
tcttttgtttgcagttacatcttcc

SEQ ID NO: 2754916 - DNA, 25 bp, Homo sapien
tttgtttgcagttacatcttccatc

SEQ ID NO: 2754917 - DNA, 25 bp, Homo sapien
tggagaagctcttactaggacaatg

SEQ ID NO: 2754918 - DNA, 25 bp, Homo sapien
agtttggagaagctcttactaggac

SEQ ID NO: 2754919 - DNA, 25 bp, Homo sapien
gtttggagaagctcttactaggaca

SEQ ID NO: 2754920 - DNA, 25 bp, Homo sapien
tttggagaagctcttactaggacaa

SEQ ID NO: 2754921 - DNA, 25 bp, Homo sapien
tgatcttctagacctttcatggtga

SEQ ID NO: 2754922 - DNA, 25 bp, Homo sapien
tggaggtacgggcacttatctcagg

SEQ ID NO: 2754923 - DNA, 25 bp, Homo sapien
tggtgacagtgaagtcaatgatgga

SEQ ID NO: 2754924 - DNA, 25 bp, Homo sapien
tctgtgagaatgaccctccccagta

SEQ ID NO: 2754925 - DNA, 25 bp, Homo sapien
taaagccatccaacacatctacttc

SEQ ID NO: 2754926 - DNA, 25 bp, Homo sapien
tggtggtaatgtagagtctaaagcc

SEQ ID NO: 2754927 - DNA, 25 bp, Homo sapien
gtagagtctaaagccatccaacaca

SEQ ID NO: 2754928 - DNA, 25 bp, Homo sapien
ggtaatgtagagtctaaagccatcc

SEQ ID NO: 2754929 - DNA, 25 bp, Homo sapien
tgtcttccaggtggtttctgaagta

SEQ ID NO: 2754930 - DNA, 25 bp, Homo sapien
catcttcaataagcaaaggccttcc

SEQ ID NO: 2754931 - DNA, 25 bp, Homo sapien
gctggatctagttcctctccaacat

SEQ ID NO: 2754932 - DNA, 25 bp, Homo sapien
cattatctagtgctggatctagttc

SEQ ID NO: 2754933 - DNA, 25 bp, Homo sapien
tggacaagtcatcatttggcagacc

SEQ ID NO: 2754934 - DNA, 25 bp, Homo sapien
gcagaccttggaggttccattcact

SEQ ID NO: 2754935 - DNA, 25 bp, Homo sapien
taacagaagatcacgaaactcttgg

SEQ ID NO: 2754936 - DNA, 25 bp, Homo sapien
taacaaagggtaacgagatgccttc

SEQ ID NO: 2754937 - DNA, 25 bp, Homo sapien
caagccactgatgagcgtggaagct

SEQ ID NO: 2754938 - DNA, 25 bp, Homo sapien
tgtgcagcaaactcttggctttgct

SEQ ID NO: 2754939 - DNA, 25 bp, Homo sapien
gtcttttagtttgtgcagcaaactc

SEQ ID NO: 2754940 - DNA, 25 bp, Homo sapien
tttttcacctgccaagccactgatg

SEQ ID NO: 2754941 - DNA, 25 bp, Homo sapien
gtgtctgcatcgctctgcatcttca

SEQ ID NO: 2754942 - DNA, 25 bp, Homo sapien
cttgtgtctgcatcgctctgcatct

SEQ ID NO: 2754943 - DNA, 25 bp, Homo sapien
ctgcatcgctctgcatcttcaagca

SEQ ID NO: 2754944 - DNA, 25 bp, Homo sapien
catcgctctgcatcttcaagcaagg

SEQ ID NO: 2754945 - DNA, 25 bp, Homo sapien
cactggattctgcatggggcacagc

SEQ ID NO: 2754946 - DNA, 25 bp, Homo sapien
ccttcaatgggccatgcaggcctgg

SEQ ID NO: 2754947 - DNA, 25 bp, Homo sapien
ggtgaactgcagattggaacccttc

SEQ ID NO: 2754948 - DNA, 25 bp, Homo sapien
gacacactctccttcaatgggccat

SEQ ID NO: 2754949 - DNA, 25 bp, Homo sapien
catggcctgttcatactcagcctgc

SEQ ID NO: 2754950 - DNA, 25 bp, Homo sapien
tgcttgtcatccaactcggcctggg

SEQ ID NO: 2754951 - DNA, 25 bp, Homo sapien
tcatggcctgttcatactcagcctg

SEQ ID NO: 2754952 - DNA, 25 bp, Homo sapien
gtcaagttccgcctgcttgtcatcc

SEQ ID NO: 2754953 - DNA, 25 bp, Homo sapien
gcagtttcgatgttatagtcaggca

SEQ ID NO: 2754954 - DNA, 25 bp, Homo sapien
gaagccatagctttcgtccaggaac

SEQ ID NO: 2754955 - DNA, 25 bp, Homo sapien
ggcatttcaaagtaaggactcaaaa

SEQ ID NO: 2754956 - DNA, 25 bp, Homo sapien
ccacatacgcgtttagcagtttcga

SEQ ID NO: 2754957 - DNA, 25 bp, Homo sapien
gaaacagcagcagtacgcaatccat

SEQ ID NO: 2754958 - DNA, 25 bp, Homo sapien
tccaggtcaattttcacagcactga

SEQ ID NO: 2754959 - DNA, 25 bp, Homo sapien
gaacagtggcgatgtccgaaggcct

SEQ ID NO: 2754960 - DNA, 25 bp, Homo sapien
tccatgatccgcatgatgaggtgag

SEQ ID NO: 2754961 - DNA, 25 bp, Homo sapien
gcaatggctttgtctttagagatgc

SEQ ID NO: 2754962 - DNA, 25 bp, Homo sapien
gctttgtctttagagatgctgtcca

SEQ ID NO: 2754963 - DNA, 25 bp, Homo sapien
tgtctttagagatgctgtccacaat

SEQ ID NO: 2754964 - DNA, 25 bp, Homo sapien
caatggctttgtctttagagatgct

SEQ ID NO: 2754965 - DNA, 25 bp, Homo sapien
ggctttatcgttggccacttgtagc

SEQ ID NO: 2754966 - DNA, 25 bp, Homo sapien
caaggctgcaacagactctgaagct

SEQ ID NO: 2754967 - DNA, 25 bp, Homo sapien
tcaaggctgcaacagactctgaagc

SEQ ID NO: 2754968 - DNA, 25 bp, Homo sapien
catgtcggctttatcgttggccact

SEQ ID NO: 2754969 - DNA, 25 bp, Homo sapien
caaactgcagtcaatatcataggaa

SEQ ID NO: 2754970 - DNA, 25 bp, Homo sapien
cacgtgggtagaacgtcggaatctc

SEQ ID NO: 2754971 - DNA, 25 bp, Homo sapien
gccctgaataaaggagaggtatgat

SEQ ID NO: 2754972 - DNA, 25 bp, Homo sapien
catgcattggaccacctccttcttg

SEQ ID NO: 2754973 - DNA, 25 bp, Homo sapien
catctttgggccatcggctgaacca

SEQ ID NO: 2754974 - DNA, 25 bp, Homo sapien
cactggcgagaagcagagcacaata

SEQ ID NO: 2754975 - DNA, 25 bp, Homo sapien
catgaagtagtcgtgcaggttctca

SEQ ID NO: 2754976 - DNA, 25 bp, Homo sapien
caatatgaaggttctgtcggacccg

SEQ ID NO: 2754977 - DNA, 25 bp, Homo sapien
ccatcagatttgatgtgttgtagga

SEQ ID NO: 2754978 - DNA, 25 bp, Homo sapien
gactcatctttaatctcattgtctg

SEQ ID NO: 2754979 - DNA, 25 bp, Homo sapien
tcctttgccttgctgaccagctgtt

SEQ ID NO: 2754980 - DNA, 25 bp, Homo sapien
gctgttcgatacaaaaccttcagat

SEQ ID NO: 2754981 - DNA, 25 bp, Homo sapien
tttccctgaggagtacgaatgacac

SEQ ID NO: 2754982 - DNA, 25 bp, Homo sapien
aacctcgtcaggctctgctttcctg

SEQ ID NO: 2754983 - DNA, 25 bp, Homo sapien
tgatctggaaggaaacgtagccagc

SEQ ID NO: 2754984 - DNA, 25 bp, Homo sapien
gaaggaaacgtagccagcaatgaat

SEQ ID NO: 2754985 - DNA, 25 bp, Homo sapien
tcttggcttctatcgtgccttgtaa

SEQ ID NO: 2754986 - DNA, 25 bp, Homo sapien
tatcgtgccttgtaactaggccacg

SEQ ID NO: 2754987 - DNA, 25 bp, Homo sapien
tgtaactaggccacgtatttcaagg

SEQ ID NO: 2754988 - DNA, 25 bp, Homo sapien
gccacgtatttcaaggctcacagca

SEQ ID NO: 2754989 - DNA, 25 bp, Homo sapien
ggcgccacggatgctctcattatag

SEQ ID NO: 2754990 - DNA, 25 bp, Homo sapien
taagtgaaccatggcatctgcaaag

SEQ ID NO: 2754991 - DNA, 25 bp, Homo sapien
gcaggaacatattcagacgctcttt

SEQ ID NO: 2754992 - DNA, 25 bp, Homo sapien
gctctcattatagagctgcaggaac

SEQ ID NO: 2754993 - DNA, 25 bp, Homo sapien
taaagccttatcaaaccaggtcaca

SEQ ID NO: 2754994 - DNA, 25 bp, Homo sapien
tctcaagaaatccacaaaatatgtg

SEQ ID NO: 2754995 - DNA, 25 bp, Homo sapien
gtcaattccacaatccaccaagagt

SEQ ID NO: 2754996 - DNA, 25 bp, Homo sapien
tggacactgtgaaacggtcagctat

SEQ ID NO: 2754997 - DNA, 25 bp, Homo sapien
tgagaaacccctctgagtacagtag

SEQ ID NO: 2754998 - DNA, 25 bp, Homo sapien
gcgtgtcagaggcaccaattttgtc

SEQ ID NO: 2754999 - DNA, 25 bp, Homo sapien
gaaagatctcgtaggttaaacacat

SEQ ID NO: 2755000 - DNA, 25 bp, Homo sapien
tcatctgccatagtcggcgtgtcag

SEQ ID NO: 2755001 - DNA, 25 bp, Homo sapien
ccaccccacatcctcttgatcttta

SEQ ID NO: 2755002 - DNA, 25 bp, Homo sapien
caccccacatcctcttgatctttac

SEQ ID NO: 2755003 - DNA, 25 bp, Homo sapien
caccaccaggatggatcatggctgc

SEQ ID NO: 2755004 - DNA, 25 bp, Homo sapien
gggtatgtcattgcgtccaccacca

SEQ ID NO: 2755005 - DNA, 25 bp, Homo sapien
gatcttgtccacagaagcttcagag

SEQ ID NO: 2755006 - DNA, 25 bp, Homo sapien
tcatggctgccaaaaactggatgtc

SEQ ID NO: 2755007 - DNA, 25 bp, Homo sapien
cagtcatcttctttcccgcaggagg

SEQ ID NO: 2755008 - DNA, 25 bp, Homo sapien
atctccccactcattgattattggc

SEQ ID NO: 2755009 - DNA, 25 bp, Homo sapien
tatccacatagctctctatcgtcct

SEQ ID NO: 2755010 - DNA, 25 bp, Homo sapien
gagggccatatgttgtacccattcg

SEQ ID NO: 2755011 - DNA, 25 bp, Homo sapien
ctgcggtccagttaataaaaccaag

SEQ ID NO: 2755012 - DNA, 25 bp, Homo sapien
ttttgctgttatgaactgcggtcca

SEQ ID NO: 2755013 - DNA, 25 bp, Homo sapien
gattggtgttcccacctcatccact

SEQ ID NO: 2755014 - DNA, 25 bp, Homo sapien
ggatcatctgtgtagtattctgcca

SEQ ID NO: 2755015 - DNA, 25 bp, Homo sapien
aaattcagactcttgatcatgtgac

SEQ ID NO: 2755016 - DNA, 25 bp, Homo sapien
aaaaattcagactcttgatcatgtg

SEQ ID NO: 2755017 - DNA, 25 bp, Homo sapien
ttccttgttcaccaattaatagcac

SEQ ID NO: 2755018 - DNA, 25 bp, Homo sapien
gttccttgttcaccaattaatagca

SEQ ID NO: 2755019 - DNA, 25 bp, Homo sapien
tatcagacggatacaggtattcctg

SEQ ID NO: 2755020 - DNA, 25 bp, Homo sapien
ggtttgaattagaaagtcagtcctc

SEQ ID NO: 2755021 - DNA, 25 bp, Homo sapien
tcacattgtcaacatttggcaccag

SEQ ID NO: 2755022 - DNA, 25 bp, Homo sapien
ggtattcctgggtacgcgtgttcca

SEQ ID NO: 2755023 - DNA, 25 bp, Homo sapien
catcgggcgccacatagtagtcgaa

SEQ ID NO: 2755024 - DNA, 25 bp, Homo sapien
ctccagcgtccctgtgggccgagag

SEQ ID NO: 2755025 - DNA, 25 bp, Homo sapien
agcagcgcgaacacgaacagccgcc

SEQ ID NO: 2755026 - DNA, 25 bp, Homo sapien
gggccgagagcgcagccagagctcc

SEQ ID NO: 2755027 - DNA, 25 bp, Homo sapien
gattctgaaacccaaacgttgctct

SEQ ID NO: 2755028 - DNA, 25 bp, Homo sapien
aacataatagggttggccgggcacg

SEQ ID NO: 2755029 - DNA, 25 bp, Homo sapien
tctgagaatagcaagctgcctttaa

SEQ ID NO: 2755030 - DNA, 25 bp, Homo sapien
caagacactagttgccctccaagaa

SEQ ID NO: 2755031 - DNA, 25 bp, Homo sapien
ggaaagactcggtgtacagctgacg

SEQ ID NO: 2755032 - DNA, 25 bp, Homo sapien
tctggatacagaagcgatacaagtc

SEQ ID NO: 2755033 - DNA, 25 bp, Homo sapien
tgtacagctgacgaagaatttctgc

SEQ ID NO: 2755034 - DNA, 25 bp, Homo sapien
gttaatgctctgtgtgatgacaaag

SEQ ID NO: 2755035 - DNA, 25 bp, Homo sapien
tgaggtgagcgtttcttaagaaaac

SEQ ID NO: 2755036 - DNA, 25 bp, Homo sapien
cttgaggtgagcgtttcttaagaaa

SEQ ID NO: 2755037 - DNA, 25 bp, Homo sapien
ttgaggtgagcgtttcttaagaaaa

SEQ ID NO: 2755038 - DNA, 25 bp, Homo sapien
tggagaaatagtcttcaactcttga

SEQ ID NO: 2755039 - DNA, 25 bp, Homo sapien
gaaatagtcttcaactcttgattaa

SEQ ID NO: 2755040 - DNA, 25 bp, Homo sapien
tagtcttcaactcttgattaaaata

SEQ ID NO: 2755041 - DNA, 25 bp, Homo sapien
agatggagaaatagtcttcaactct

SEQ ID NO: 2755042 - DNA, 25 bp, Homo sapien
tatgaggctcgaaaatgatcttgca

SEQ ID NO: 2755043 - DNA, 25 bp, Homo sapien
gatagaagagctcatgaaaaccatt

SEQ ID NO: 2755044 - DNA, 25 bp, Homo sapien
caagaataggactccaatcaaggat

SEQ ID NO: 2755045 - DNA, 25 bp, Homo sapien
ggcaggagaagcattgtcaatgtta

SEQ ID NO: 2755046 - DNA, 25 bp, Homo sapien
cagatggcatctactggaccatcaa

SEQ ID NO: 2755047 - DNA, 25 bp, Homo sapien
agatggcatctactggaccatcaag

SEQ ID NO: 2755048 - DNA, 25 bp, Homo sapien
tcaagaattatccagatatgttccc

SEQ ID NO: 2755049 - DNA, 25 bp, Homo sapien
gagttttgttatcatccaaaacaga

SEQ ID NO: 2755050 - DNA, 25 bp, Homo sapien
ttccaggaacagtaagaagttgaac

SEQ ID NO: 2755051 - DNA, 25 bp, Homo sapien
gttccaggaacagtaagaagttgaa

SEQ ID NO: 2755052 - DNA, 25 bp, Homo sapien
gggcagtaatcgctttgggattcat

SEQ ID NO: 2755053 - DNA, 25 bp, Homo sapien
tatcccatcagtccagtcatttgtg

SEQ ID NO: 2755054 - DNA, 25 bp, Homo sapien
cgtccagccgaccaaacatctgtgg

SEQ ID NO: 2755055 - DNA, 25 bp, Homo sapien
tcctccaaagcgtagaaaatatccc

SEQ ID NO: 2755056 - DNA, 25 bp, Homo sapien
tcgaatagctggatgaccttcagtt

SEQ ID NO: 2755057 - DNA, 25 bp, Homo sapien
gagtcatcatcccatgtcgcactct

SEQ ID NO: 2755058 - DNA, 25 bp, Homo sapien
tgtcatggctctcatcaaggtgtgg

SEQ ID NO: 2755059 - DNA, 25 bp, Homo sapien
tctcatcaaggtgtggatgcaggtg

SEQ ID NO: 2755060 - DNA, 25 bp, Homo sapien
tggttgattaaaccagcttcttcaa

SEQ ID NO: 2755061 - DNA, 25 bp, Homo sapien
ggttgattaaaccagcttcttcaac

SEQ ID NO: 2755062 - DNA, 25 bp, Homo sapien
ctgtctactaattgctgcttccagt

SEQ ID NO: 2755063 - DNA, 25 bp, Homo sapien
tttgctgctcccaaggtccgaagaa

SEQ ID NO: 2755064 - DNA, 25 bp, Homo sapien
tagaaagattcatgtcccgtagtac

SEQ ID NO: 2755065 - DNA, 25 bp, Homo sapien
ccattggattggctctttttgctgc

SEQ ID NO: 2755066 - DNA, 25 bp, Homo sapien
gcatgacaatcgtggactccgtatc

SEQ ID NO: 2755067 - DNA, 25 bp, Homo sapien
tatgataatctgacggtcaggcacc

SEQ ID NO: 2755068 - DNA, 25 bp, Homo sapien
ggccactgagcggaaattaatcttc

SEQ ID NO: 2755069 - DNA, 25 bp, Homo sapien
tgtagagcgtgaaaaacttcctggc

SEQ ID NO: 2755070 - DNA, 25 bp, Homo sapien
cttcctggccaaaacaacgttgtca

SEQ ID NO: 2755071 - DNA, 25 bp, Homo sapien
caaattcagggttcatagtcacatt

SEQ ID NO: 2755072 - DNA, 25 bp, Homo sapien
ttacatgtcagaataatggaaattt

SEQ ID NO: 2755073 - DNA, 25 bp, Homo sapien
tcacattatctccatcagtaaagat

SEQ ID NO: 2755074 - DNA, 25 bp, Homo sapien
aaaagcccaaattcagggttcatag

SEQ ID NO: 2755075 - DNA, 25 bp, Homo sapien
ggtagatcaatacggttaaattcat

SEQ ID NO: 2755076 - DNA, 25 bp, Homo sapien
gatcaatacggttaaattcatcaaa

SEQ ID NO: 2755077 - DNA, 25 bp, Homo sapien
gaactggtagatcaatacggttaaa

SEQ ID NO: 2755078 - DNA, 25 bp, Homo sapien
gagaactggtagatcaatacggtta

SEQ ID NO: 2755079 - DNA, 25 bp, Homo sapien
atccatctggtctgaacaattgaaa

SEQ ID NO: 2755080 - DNA, 25 bp, Homo sapien
tccaagtcctcggaaatccatctgg

SEQ ID NO: 2755081 - DNA, 25 bp, Homo sapien
gaggcatcgtcccatgtctttagtg

SEQ ID NO: 2755082 - DNA, 25 bp, Homo sapien
aaccacgacgtatttcccgaggcat

SEQ ID NO: 2755083 - DNA, 25 bp, Homo sapien
tcatcgtaactattcatagcactgt

SEQ ID NO: 2755084 - DNA, 25 bp, Homo sapien
aatggtttcaactcctattggttct

SEQ ID NO: 2755085 - DNA, 25 bp, Homo sapien
actgtcagtgcattttgtcacaggt

SEQ ID NO: 2755086 - DNA, 25 bp, Homo sapien
cagcattcatcgtaactattcatag

SEQ ID NO: 2755087 - DNA, 25 bp, Homo sapien
catgggactcttgatatgcatatga

SEQ ID NO: 2755088 - DNA, 25 bp, Homo sapien
taagtggagttattacaagcctgtc

SEQ ID NO: 2755089 - DNA, 25 bp, Homo sapien
gtatatgaacgccacatctgtgatg

SEQ ID NO: 2755090 - DNA, 25 bp, Homo sapien
gtcagtgcagcctaaaaattcattc

SEQ ID NO: 2755091 - DNA, 25 bp, Homo sapien
aaagatatccctttggtgcacatga

SEQ ID NO: 2755092 - DNA, 25 bp, Homo sapien
tgtattgagtagctccaggaaagcc

SEQ ID NO: 2755093 - DNA, 25 bp, Homo sapien
tggaactcagatccctcgtggtgac

SEQ ID NO: 2755094 - DNA, 25 bp, Homo sapien
gaatcccgtgtccatatcatctgaa

SEQ ID NO: 2755095 - DNA, 25 bp, Homo sapien
cacaagatgcaatgaggactgagat

SEQ ID NO: 2755096 - DNA, 25 bp, Homo sapien
tcttgaatatttgcggctgcctggc

SEQ ID NO: 2755097 - DNA, 25 bp, Homo sapien
ccctcttgagaggaaattgacagaa

SEQ ID NO: 2755098 - DNA, 25 bp, Homo sapien
gccatgacaggtttatccaattcaa

SEQ ID NO: 2755099 - DNA, 25 bp, Homo sapien
cctgtatagtgtgggagtccgacgc

SEQ ID NO: 2755100 - DNA, 25 bp, Homo sapien
ccagaatctctagaagggcaggatc

SEQ ID NO: 2755101 - DNA, 25 bp, Homo sapien
gatctgagacgaagaaaaaccgagg

SEQ ID NO: 2755102 - DNA, 25 bp, Homo sapien
agcacagtcgttttttctccaagta

SEQ ID NO: 2755103 - DNA, 25 bp, Homo sapien
ctatgttagaaaaccgcttggcttc

SEQ ID NO: 2755104 - DNA, 25 bp, Homo sapien
cacccaagatttatctatgttagaa

SEQ ID NO: 2755105 - DNA, 25 bp, Homo sapien
agcaagtgtggtaacagctgcccca

SEQ ID NO: 2755106 - DNA, 25 bp, Homo sapien
gtgcccgagtcatgatcttcaccca

SEQ ID NO: 2755107 - DNA, 25 bp, Homo sapien
ccagctctcgatgatgtctgttgag

SEQ ID NO: 2755108 - DNA, 25 bp, Homo sapien
cgtcatccagctctcgatgatgtct

SEQ ID NO: 2755109 - DNA, 25 bp, Homo sapien
tctgttgagttggaaaggtactgca

SEQ ID NO: 2755110 - DNA, 25 bp, Homo sapien
tggaaaggtactgcacccatttttg

SEQ ID NO: 2755111 - DNA, 25 bp, Homo sapien
taaagctgccgaaggtgaatgtttt

SEQ ID NO: 2755112 - DNA, 25 bp, Homo sapien
catgttggcgatgatttccgaggta

SEQ ID NO: 2755113 - DNA, 25 bp, Homo sapien
tgttgctcagtagggatcccagcaa

SEQ ID NO: 2755114 - DNA, 25 bp, Homo sapien
gctctccacgggttttaaagctgcc

SEQ ID NO: 2755115 - DNA, 25 bp, Homo sapien
cttgcaatcttccatcacatcatac

SEQ ID NO: 2755116 - DNA, 25 bp, Homo sapien
gggcaacactcgctgaaatcatcaa

SEQ ID NO: 2755117 - DNA, 25 bp, Homo sapien
ggccatgtattccagcagcgggcaa

SEQ ID NO: 2755118 - DNA, 25 bp, Homo sapien
cacatccagactgtgcccggtgagg

SEQ ID NO: 2755119 - DNA, 25 bp, Homo sapien
ttcaggtccaaaaaagcctgccagt

SEQ ID NO: 2755120 - DNA, 25 bp, Homo sapien
catgggcccctgcttttgttccaga

SEQ ID NO: 2755121 - DNA, 25 bp, Homo sapien
cagtttctatgacactgttgtacag

SEQ ID NO: 2755122 - DNA, 25 bp, Homo sapien
tcctctcctccagtatatgtgatgt

SEQ ID NO: 2755123 - DNA, 25 bp, Homo sapien
tggcaggccaaaaagctcctctcct

SEQ ID NO: 2755124 - DNA, 25 bp, Homo sapien
tctgaccaaagaatatcataatagc

SEQ ID NO: 2755125 - DNA, 25 bp, Homo sapien
catgataagcctgtcactggcttcc

SEQ ID NO: 2755126 - DNA, 25 bp, Homo sapien
gataagcctgtcactggcttcctgg

SEQ ID NO: 2755127 - DNA, 25 bp, Homo sapien
cctggggcttcaagccgctagccat

SEQ ID NO: 2755128 - DNA, 25 bp, Homo sapien
ctgaaacatgataagcctgtcactg

SEQ ID NO: 2755129 - DNA, 25 bp, Homo sapien
gaagtccatatctgttaagcagggc

SEQ ID NO: 2755130 - DNA, 25 bp, Homo sapien
tctcccaagcatagtgcagtgtatc

SEQ ID NO: 2755131 - DNA, 25 bp, Homo sapien
gaggaatacctccacagcactaata

SEQ ID NO: 2755132 - DNA, 25 bp, Homo sapien
tattctggacttcgccagcacgtgc

SEQ ID NO: 2755133 - DNA, 25 bp, Homo sapien
gagggtatcccctgatcctgcacaa

SEQ ID NO: 2755134 - DNA, 25 bp, Homo sapien
ccaaggagagcaggttggaccatgt

SEQ ID NO: 2755135 - DNA, 25 bp, Homo sapien
ctttgccttgatgtttcaacccaag

SEQ ID NO: 2755136 - DNA, 25 bp, Homo sapien
tcttcatacttgagggtatcccctg

SEQ ID NO: 2755137 - DNA, 25 bp, Homo sapien
tgcaatccgaatatcatctaggtcc

SEQ ID NO: 2755138 - DNA, 25 bp, Homo sapien
gtccaatgacaaccatccaggcctt

SEQ ID NO: 2755139 - DNA, 25 bp, Homo sapien
gcagtcagggcgaacttcaagtcag

SEQ ID NO: 2755140 - DNA, 25 bp, Homo sapien
tttcagcgctgccattgcaatccga

SEQ ID NO: 2755141 - DNA, 25 bp, Homo sapien
gcgtttgaagcaatccatggatgta

SEQ ID NO: 2755142 - DNA, 25 bp, Homo sapien
gagaatctgggactcaaattcagaa

SEQ ID NO: 2755143 - DNA, 25 bp, Homo sapien
gccaaatgtgattgtagcgtttgaa

SEQ ID NO: 2755144 - DNA, 25 bp, Homo sapien
ctgtgtacagagcaatggaacccac

SEQ ID NO: 2755145 - DNA, 25 bp, Homo sapien
cttataatagttcttggtttgcacg

SEQ ID NO: 2755146 - DNA, 25 bp, Homo sapien
tgtgctaagcacagaaactaatttt

SEQ ID NO: 2755147 - DNA, 25 bp, Homo sapien
tcttggtttgcacgggaatgggtaa

SEQ ID NO: 2755148 - DNA, 25 bp, Homo sapien
gcacgggaatgggtaaatttacaga

SEQ ID NO: 2755149 - DNA, 25 bp, Homo sapien
cactgtcttcattactctgcaaagc

SEQ ID NO: 2755150 - DNA, 25 bp, Homo sapien
atttcaacatcagaatcactgtctt

SEQ ID NO: 2755151 - DNA, 25 bp, Homo sapien
cttcattactctgcaaagcagccat

SEQ ID NO: 2755152 - DNA, 25 bp, Homo sapien
tcagaatcactgtcttcattactct

SEQ ID NO: 2755153 - DNA, 25 bp, Homo sapien
catgacgatgttgggaatggccaga

SEQ ID NO: 2755154 - DNA, 25 bp, Homo sapien
tcagggtctgctgtacatcttccag

SEQ ID NO: 2755155 - DNA, 25 bp, Homo sapien
ccttagggacactgatgatgcactc

SEQ ID NO: 2755156 - DNA, 25 bp, Homo sapien
gacgcttgcccggaaaatgggcaaa

SEQ ID NO: 2755157 - DNA, 25 bp, Homo sapien
taagcaaaccacacaagattattac

SEQ ID NO: 2755158 - DNA, 25 bp, Homo sapien
ctaagcaaaccacacaagattatta

SEQ ID NO: 2755159 - DNA, 25 bp, Homo sapien
ttaattgtgtgagaggaatgaatac

SEQ ID NO: 2755160 - DNA, 25 bp, Homo sapien
cggaagttaattgtgtgagaggaat

SEQ ID NO: 2755161 - DNA, 25 bp, Homo sapien
gaagttaattgtgtgagaggaatga

SEQ ID NO: 2755162 - DNA, 25 bp, Homo sapien
cccggaagttaattgtgtgagagga

SEQ ID NO: 2755163 - DNA, 25 bp, Homo sapien
gagagagtaactcgcgggcttcttc

SEQ ID NO: 2755164 - DNA, 25 bp, Homo sapien
gagcatccatgttctgatggttgaa

SEQ ID NO: 2755165 - DNA, 25 bp, Homo sapien
ccttgtaactttcagaagagcatcc

SEQ ID NO: 2755166 - DNA, 25 bp, Homo sapien
tggcctctagtgtattccttgtaac

SEQ ID NO: 2755167 - DNA, 25 bp, Homo sapien
tcctcgtgactgtcgtcaaaagcag

SEQ ID NO: 2755168 - DNA, 25 bp, Homo sapien
tctttctttttcctcgtgactgtcg

SEQ ID NO: 2755169 - DNA, 25 bp, Homo sapien
actgtcgtcaaaagcagggcattgg

SEQ ID NO: 2755170 - DNA, 25 bp, Homo sapien
taatagatgatgtcaaggtgtcaaa

SEQ ID NO: 2755171 - DNA, 25 bp, Homo sapien
taacactattctcattggatatttt

SEQ ID NO: 2755172 - DNA, 25 bp, Homo sapien
aacactattctcattggatattttt

SEQ ID NO: 2755173 - DNA, 25 bp, Homo sapien
ttaacactattctcattggatattt

SEQ ID NO: 2755174 - DNA, 25 bp, Homo sapien
atttacaagctcattgactgcctcc

SEQ ID NO: 2755175 - DNA, 25 bp, Homo sapien
gtagtatttgtgcaccatttacaca

SEQ ID NO: 2755176 - DNA, 25 bp, Homo sapien
tagtatttgtgcaccatttacacaa

SEQ ID NO: 2755177 - DNA, 25 bp, Homo sapien
tgtagtatttgtgcaccatttacac

SEQ ID NO: 2755178 - DNA, 25 bp, Homo sapien
tcaaatcattgaccctgtcaagcag

SEQ ID NO: 2755179 - DNA, 25 bp, Homo sapien
tcaatgcggaactcaatcaaatcat

SEQ ID NO: 2755180 - DNA, 25 bp, Homo sapien
aagctgacaaagaggcgtgctgctc

SEQ ID NO: 2755181 - DNA, 25 bp, Homo sapien
tgctcatttcttctagaatggcatc

SEQ ID NO: 2755182 - DNA, 25 bp, Homo sapien
ggccaagtgagggacaatcaattgc

SEQ ID NO: 2755183 - DNA, 25 bp, Homo sapien
taagcctcaatattcagtgatgtcc

SEQ ID NO: 2755184 - DNA, 25 bp, Homo sapien
ccaggtcagtgcagccaagccaggt

SEQ ID NO: 2755185 - DNA, 25 bp, Homo sapien
tcaattgctcaatggcagcaggtat

SEQ ID NO: 2755186 - DNA, 25 bp, Homo sapien
gggccatgcactctgtttctctaaa

SEQ ID NO: 2755187 - DNA, 25 bp, Homo sapien
tctgagggtcaaagtttacaaacaa

SEQ ID NO: 2755188 - DNA, 25 bp, Homo sapien
ggagccttcaccaataatgaagcct

SEQ ID NO: 2755189 - DNA, 25 bp, Homo sapien
tatctatctcgtttctggaagaggg

SEQ ID NO: 2755190 - DNA, 25 bp, Homo sapien
cctgtggaagaggacctcaaactcc

SEQ ID NO: 2755191 - DNA, 25 bp, Homo sapien
tcgagccagaggaggatcgtatttc

SEQ ID NO: 2755192 - DNA, 25 bp, Homo sapien
caaaatctttccagcgatgggaggc

SEQ ID NO: 2755193 - DNA, 25 bp, Homo sapien
gaattataggtttggcttctgccgt

SEQ ID NO: 2755194 - DNA, 25 bp, Homo sapien
tgtaacatccatgaacttccgcaac

SEQ ID NO: 2755195 - DNA, 25 bp, Homo sapien
caacattcttagagcttgatttgtg

SEQ ID NO: 2755196 - DNA, 25 bp, Homo sapien
catccatgaacttccgcaactcgtt

SEQ ID NO: 2755197 - DNA, 25 bp, Homo sapien
tcaacattcttagagcttgatttgt

SEQ ID NO: 2755198 - DNA, 25 bp, Homo sapien
aacaatagccgacaaaaatcagtga

SEQ ID NO: 2755199 - DNA, 25 bp, Homo sapien
ctcgtggagaacaatagccgacaaa

SEQ ID NO: 2755200 - DNA, 25 bp, Homo sapien
tctaagggctgacggaaaataacac

SEQ ID NO: 2755201 - DNA, 25 bp, Homo sapien
taaagatcttctaagggctgacgga

SEQ ID NO: 2755202 - DNA, 25 bp, Homo sapien
tgtcaacaggaattttattatacaa

SEQ ID NO: 2755203 - DNA, 25 bp, Homo sapien
tccgctggtctaggaaattgtattc

SEQ ID NO: 2755204 - DNA, 25 bp, Homo sapien
caaaactcttcgtaatcttggtcaa

SEQ ID NO: 2755205 - DNA, 25 bp, Homo sapien
atccattttccgctggtctaggaaa

SEQ ID NO: 2755206 - DNA, 25 bp, Homo sapien
gaaggtcattagtctgcttgcaaaa

SEQ ID NO: 2755207 - DNA, 25 bp, Homo sapien
tatacatctcgctaaaatcaaattg

SEQ ID NO: 2755208 - DNA, 25 bp, Homo sapien
gaatcttgcaggactgaatacgtct

SEQ ID NO: 2755209 - DNA, 25 bp, Homo sapien
tcttgtgaaagcagagctggtattc

SEQ ID NO: 2755210 - DNA, 25 bp, Homo sapien
gcaaggcgtcggtgaaaagtttcga

SEQ ID NO: 2755211 - DNA, 25 bp, Homo sapien
gctggttccagatggaagcggttcc

SEQ ID NO: 2755212 - DNA, 25 bp, Homo sapien
tattggtaatataggctttacatgc

SEQ ID NO: 2755213 - DNA, 25 bp, Homo sapien
cagtttaatcgcagatagtattttt

SEQ ID NO: 2755214 - DNA, 25 bp, Homo sapien
ctgtttcagtttaatcgcagatagt

SEQ ID NO: 2755215 - DNA, 25 bp, Homo sapien
taattgcatttataagtgtaggaat

SEQ ID NO: 2755216 - DNA, 25 bp, Homo sapien
ctcagaggtattatagtaatgagag

SEQ ID NO: 2755217 - DNA, 25 bp, Homo sapien
taggaatagcatccatcatggatag

SEQ ID NO: 2755218 - DNA, 25 bp, Homo sapien
gatcttctcagaggtattatagtaa

SEQ ID NO: 2755219 - DNA, 25 bp, Homo sapien
gctgtacaaagggtcacaacatttt

SEQ ID NO: 2755220 - DNA, 25 bp, Homo sapien
ttcacattgtcctttgcttcattag

SEQ ID NO: 2755221 - DNA, 25 bp, Homo sapien
agttgcatcagtgattcgaatatcc

SEQ ID NO: 2755222 - DNA, 25 bp, Homo sapien
ttcgaatatccatctcccgccaagt

SEQ ID NO: 2755223 - DNA, 25 bp, Homo sapien
tatgcatagagaactcttattccca

SEQ ID NO: 2755224 - DNA, 25 bp, Homo sapien
aatatgcatagagaactcttattcc

SEQ ID NO: 2755225 - DNA, 25 bp, Homo sapien
gaaaatatgcatagagaactcttat

SEQ ID NO: 2755226 - DNA, 25 bp, Homo sapien
tgcatagagaactcttattcccatt

SEQ ID NO: 2755227 - DNA, 25 bp, Homo sapien
caacgtcatccgcttccttcagcag

SEQ ID NO: 2755228 - DNA, 25 bp, Homo sapien
cagccttcacatccgggcttttcaa

SEQ ID NO: 2755229 - DNA, 25 bp, Homo sapien
cttcagcagtttcgacttggccgcc

SEQ ID NO: 2755230 - DNA, 25 bp, Homo sapien
tcagcagctgattgttttcagcaag

SEQ ID NO: 2755231 - DNA, 25 bp, Homo sapien
cggggaaaaacacgagccattgcac

SEQ ID NO: 2755232 - DNA, 25 bp, Homo sapien
tgcgcggggaaaaacacgagccatt

SEQ ID NO: 2755233 - DNA, 25 bp, Homo sapien
ggaaaaacacgagccattgcacggg

SEQ ID NO: 2755234 - DNA, 25 bp, Homo sapien
aatgcgcggggaaaaacacgagcca

SEQ ID NO: 2755235 - DNA, 25 bp, Homo sapien
tagagtcaagtagtccgtaggttcc

SEQ ID NO: 2755236 - DNA, 25 bp, Homo sapien
gatccatactttcatgcaatcctct

SEQ ID NO: 2755237 - DNA, 25 bp, Homo sapien
cccaaagtctcagggttatttgcta

SEQ ID NO: 2755238 - DNA, 25 bp, Homo sapien
gtatgtcacactttcgaaggttcac

SEQ ID NO: 2755239 - DNA, 25 bp, Homo sapien
tcaagaactcctggcgaatgttagc

SEQ ID NO: 2755240 - DNA, 25 bp, Homo sapien
aatgttagctgcgtcctgaaggccc

SEQ ID NO: 2755241 - DNA, 25 bp, Homo sapien
tgaagatgtccgacagcaaacgtct

SEQ ID NO: 2755242 - DNA, 25 bp, Homo sapien
gacaggacgttcacaaagccttcca

SEQ ID NO: 2755243 - DNA, 25 bp, Homo sapien
taccccagtaagagccacatcgttt

SEQ ID NO: 2755244 - DNA, 25 bp, Homo sapien
acatcgtttccctcggtcacgaaca

SEQ ID NO: 2755245 - DNA, 25 bp, Homo sapien
tgatggctttggaagggtcagtcct

SEQ ID NO: 2755246 - DNA, 25 bp, Homo sapien
gatgaagaacacacataccccagta

SEQ ID NO: 2755247 - DNA, 25 bp, Homo sapien
cctccaacagcaaaaagttgatcaa

SEQ ID NO: 2755248 - DNA, 25 bp, Homo sapien
tagtaaaacatgaggtgtcggagac

SEQ ID NO: 2755249 - DNA, 25 bp, Homo sapien
cttgatagtaaaacatgaggtgtcg

SEQ ID NO: 2755250 - DNA, 25 bp, Homo sapien
taaaacatgaggtgtcggagacctc

SEQ ID NO: 2755251 - DNA, 25 bp, Homo sapien
cagtgagaagtgaaacgcatcccac

SEQ ID NO: 2755252 - DNA, 25 bp, Homo sapien
tcaagtcagtgagaagtgaaacgca

SEQ ID NO: 2755253 - DNA, 25 bp, Homo sapien
acaggactgtgtcaacagaccatct

SEQ ID NO: 2755254 - DNA, 25 bp, Homo sapien
ggactgtgtcaacagaccatctgtg

SEQ ID NO: 2755255 - DNA, 25 bp, Homo sapien
ggtccaaacaggaagccacaattgc

SEQ ID NO: 2755256 - DNA, 25 bp, Homo sapien
aataagtagttatgcctcgcatcca

SEQ ID NO: 2755257 - DNA, 25 bp, Homo sapien
ttatgcctcgcatccaaaagagccc

SEQ ID NO: 2755258 - DNA, 25 bp, Homo sapien
gcatccaaaagagcccgcttggctt

SEQ ID NO: 2755259 - DNA, 25 bp, Homo sapien
catttatgggtctacagagaaggag

SEQ ID NO: 2755260 - DNA, 25 bp, Homo sapien
agaagggtctcccactctagcctgg

SEQ ID NO: 2755261 - DNA, 25 bp, Homo sapien
tggtcatactcctaggacagtcgcc

SEQ ID NO: 2755262 - DNA, 25 bp, Homo sapien
gatttatgggtctccaaatgcaggg

SEQ ID NO: 2755263 - DNA, 25 bp, Homo sapien
gaggatggggctattgggtctgaga

SEQ ID NO: 2755264 - DNA, 25 bp, Homo sapien
tgggtctgagagttcttttgtgcct

SEQ ID NO: 2755265 - DNA, 25 bp, Homo sapien
ctgagagttcttttgtgcctaagca

SEQ ID NO: 2755266 - DNA, 25 bp, Homo sapien
ggtctgagagttcttttgtgcctaa

SEQ ID NO: 2755267 - DNA, 25 bp, Homo sapien
aaaagacagacatcagatctggacc

SEQ ID NO: 2755268 - DNA, 25 bp, Homo sapien
catttggttgttactggcatgatat

SEQ ID NO: 2755269 - DNA, 25 bp, Homo sapien
caaatgagcgaatgaatatatacag

SEQ ID NO: 2755270 - DNA, 25 bp, Homo sapien
gcatcattgcaataatagttccaga

SEQ ID NO: 2755271 - DNA, 25 bp, Homo sapien
tttttccacccaggtgtgacagatg

SEQ ID NO: 2755272 - DNA, 25 bp, Homo sapien
ttaagcggcaacgtgcagaaaagcc

SEQ ID NO: 2755273 - DNA, 25 bp, Homo sapien
gatgcagcatgaatttctaggtgcg

SEQ ID NO: 2755274 - DNA, 25 bp, Homo sapien
tatgtagcctatgcaccaggtgaac

SEQ ID NO: 2755275 - DNA, 25 bp, Homo sapien
actcgagtgacgctatgcttccaga

SEQ ID NO: 2755276 - DNA, 25 bp, Homo sapien
gagtgacgctatgcttccagagctg

SEQ ID NO: 2755277 - DNA, 25 bp, Homo sapien
gctatgcttccagagctgtctcctc

SEQ ID NO: 2755278 - DNA, 25 bp, Homo sapien
cgttaaaactcgagtgacgctatgc

SEQ ID NO: 2755279 - DNA, 25 bp, Homo sapien
tgtagccgtgcatggacaggctgga

SEQ ID NO: 2755280 - DNA, 25 bp, Homo sapien
tagccgtgcatggacaggctggagt

SEQ ID NO: 2755281 - DNA, 25 bp, Homo sapien
cgtgcatggacaggctggagtcagc

SEQ ID NO: 2755282 - DNA, 25 bp, Homo sapien
gccgtgcatggacaggctggagtca

SEQ ID NO: 2755283 - DNA, 25 bp, Homo sapien
caccagaaaatagcagtaggatcgg

SEQ ID NO: 2755284 - DNA, 25 bp, Homo sapien
taggatcggatcctcctcacatggc

SEQ ID NO: 2755285 - DNA, 25 bp, Homo sapien
caacctctggttgttggtaagcggc

SEQ ID NO: 2755286 - DNA, 25 bp, Homo sapien
aagacagtatctagactctgagtcc

SEQ ID NO: 2755287 - DNA, 25 bp, Homo sapien
tcgggcaaggtagatggcgtcttaa

SEQ ID NO: 2755288 - DNA, 25 bp, Homo sapien
ggctgaatttcaacccctcgggcaa

SEQ ID NO: 2755289 - DNA, 25 bp, Homo sapien
aaggtatcttcttgagcgctcaggc

SEQ ID NO: 2755290 - DNA, 25 bp, Homo sapien
ggcataaccatgactcccttgaggc

SEQ ID NO: 2755291 - DNA, 25 bp, Homo sapien
gagtctcttcagatagtatcgccta

SEQ ID NO: 2755292 - DNA, 25 bp, Homo sapien
gtatcgcctagcttggttattgcag

SEQ ID NO: 2755293 - DNA, 25 bp, Homo sapien
tattatagtaagtctttctggcatc

SEQ ID NO: 2755294 - DNA, 25 bp, Homo sapien
tgctgcatagcacagttatgtttca

SEQ ID NO: 2755295 - DNA, 25 bp, Homo sapien
cttgctctgtcccatcaacagacac

SEQ ID NO: 2755296 - DNA, 25 bp, Homo sapien
tctgtcccatcaacagacacacacc

SEQ ID NO: 2755297 - DNA, 25 bp, Homo sapien
gctctgtcccatcaacagacacaca

SEQ ID NO: 2755298 - DNA, 25 bp, Homo sapien
tgtcccatcaacagacacacaccac

SEQ ID NO: 2755299 - DNA, 25 bp, Homo sapien
ttcttcagtatcctgaaagcctctg

SEQ ID NO: 2755300 - DNA, 25 bp, Homo sapien
cttcttcagtatcctgaaagcctct

SEQ ID NO: 2755301 - DNA, 25 bp, Homo sapien
aagcctctgaaatctccactctttc

SEQ ID NO: 2755302 - DNA, 25 bp, Homo sapien
ctctgaaatctccactctttcccca

SEQ ID NO: 2755303 - DNA, 25 bp, Homo sapien
gcaaagacaaactgtcccggcagct

SEQ ID NO: 2755304 - DNA, 25 bp, Homo sapien
cagtcgccgcgtcccaagagcaggg

SEQ ID NO: 2755305 - DNA, 25 bp, Homo sapien
agcagcggtgcatccaccacagtcg

SEQ ID NO: 2755306 - DNA, 25 bp, Homo sapien
acaggtaagtgccacgtccatgaca

SEQ ID NO: 2755307 - DNA, 25 bp, Homo sapien
cctccgcctccttggttcaagtgat

SEQ ID NO: 2755308 - DNA, 25 bp, Homo sapien
agtggagcaatttggctcactgcaa

SEQ ID NO: 2755309 - DNA, 25 bp, Homo sapien
tggttcaagtgattcttctgcctca

SEQ ID NO: 2755310 - DNA, 25 bp, Homo sapien
cttgtgatctacctgcctcagcctc

SEQ ID NO: 2755311 - DNA, 25 bp, Homo sapien
gaagatatgggctgaatcgttccct

SEQ ID NO: 2755312 - DNA, 25 bp, Homo sapien
tgccccaacctgactggcatgaaag

SEQ ID NO: 2755313 - DNA, 25 bp, Homo sapien
aagtccattgaggtctacggcaaaa

SEQ ID NO: 2755314 - DNA, 25 bp, Homo sapien
ttcaggtggactaagatggctgccc

SEQ ID NO: 2755315 - DNA, 25 bp, Homo sapien
cgaaagagataaatgtgtctacccc

SEQ ID NO: 2755316 - DNA, 25 bp, Homo sapien
ggcaaaaatctccatctgcgaaaga

SEQ ID NO: 2755317 - DNA, 25 bp, Homo sapien
tcctccagtacacgaagcagaatga

SEQ ID NO: 2755318 - DNA, 25 bp, Homo sapien
taacaagcatgaagcaaatcctcca

SEQ ID NO: 2755319 - DNA, 25 bp, Homo sapien
tctaggctacctattctgagttggg

SEQ ID NO: 2755320 - DNA, 25 bp, Homo sapien
tgcgcattgaacacattgcttggcc

SEQ ID NO: 2755321 - DNA, 25 bp, Homo sapien
gctccagtgtaaacccaactctagg

SEQ ID NO: 2755322 - DNA, 25 bp, Homo sapien
ttcccacgtaagtgaagggctctga

SEQ ID NO: 2755323 - DNA, 25 bp, Homo sapien
gtatcttttcatgggtgcacatctg

SEQ ID NO: 2755324 - DNA, 25 bp, Homo sapien
tctaaaaccggatcaacttgactaa

SEQ ID NO: 2755325 - DNA, 25 bp, Homo sapien
ttctaatgaagtgcatatgtgtatc

SEQ ID NO: 2755326 - DNA, 25 bp, Homo sapien
gggagtttttctggctatctgatgt

SEQ ID NO: 2755327 - DNA, 25 bp, Homo sapien
ttcaatgtacaaacctggagagggc

SEQ ID NO: 2755328 - DNA, 25 bp, Homo sapien
gatcatatcggattggagcccacac

SEQ ID NO: 2755329 - DNA, 25 bp, Homo sapien
cgcgaggctataacagggactaact

SEQ ID NO: 2755330 - DNA, 25 bp, Homo sapien
gacatatacttgctgcgtgcccttg

SEQ ID NO: 2755331 - DNA, 25 bp, Homo sapien
tattgatgatcacccaggccctatc

SEQ ID NO: 2755332 - DNA, 25 bp, Homo sapien
tcttattgatgatcacccaggccct

SEQ ID NO: 2755333 - DNA, 25 bp, Homo sapien
ctttcttattgatgatcacccaggc

SEQ ID NO: 2755334 - DNA, 25 bp, Homo sapien
gatgatcacccaggccctatctggt

SEQ ID NO: 2755335 - DNA, 25 bp, Homo sapien
cgacagacacaaaagcgaccttcgc

SEQ ID NO: 2755336 - DNA, 25 bp, Homo sapien
gtccaaacccaagggctaatgagag

SEQ ID NO: 2755337 - DNA, 25 bp, Homo sapien
tggtaacagccaacgaacgacagac

SEQ ID NO: 2755338 - DNA, 25 bp, Homo sapien
taaacattcgcttctgtccaaaccc

SEQ ID NO: 2755339 - DNA, 25 bp, Homo sapien
acaatgggtggattgggtccacgtc

SEQ ID NO: 2755340 - DNA, 25 bp, Homo sapien
tccctgaacttagtgcgttttgcat

SEQ ID NO: 2755341 - DNA, 25 bp, Homo sapien
tgatgctcgctatgggacaatgggt

SEQ ID NO: 2755342 - DNA, 25 bp, Homo sapien
gtccacgtcgcagacaaccaatggc

SEQ ID NO: 2755343 - DNA, 25 bp, Homo sapien
cgcgtggcccgagcgcgcacagtac

SEQ ID NO: 2755344 - DNA, 25 bp, Homo sapien
tcgtagcgctcccccggtgcaggga

SEQ ID NO: 2755345 - DNA, 25 bp, Homo sapien
tgccctcgtctgctctccggagtcc

SEQ ID NO: 2755346 - DNA, 25 bp, Homo sapien
gtctgctctccggagtccgctcagg

SEQ ID NO: 2755347 - DNA, 25 bp, Homo sapien
ctagccggctgtttgctgctcctgc

SEQ ID NO: 2755348 - DNA, 25 bp, Homo sapien
gaagcccagagcttccggcctgcca

SEQ ID NO: 2755349 - DNA, 25 bp, Homo sapien
tcttgactattttccattaggtttc

SEQ ID NO: 2755350 - DNA, 25 bp, Homo sapien
gccccagatgccgtttcttgactat

SEQ ID NO: 2755351 - DNA, 25 bp, Homo sapien
tctcccctgattgtttagcatttgt

SEQ ID NO: 2755352 - DNA, 25 bp, Homo sapien
tcttccagctggaacttggccctga

SEQ ID NO: 2755353 - DNA, 25 bp, Homo sapien
cttccagctggaacttggccctgat

SEQ ID NO: 2755354 - DNA, 25 bp, Homo sapien
gttgcagtcagccgtattataacca

SEQ ID NO: 2755355 - DNA, 25 bp, Homo sapien
ttgcagtcagccgtattataaccat

SEQ ID NO: 2755356 - DNA, 25 bp, Homo sapien
cagacgagtggtaccaaaaggcaca

SEQ ID NO: 2755357 - DNA, 25 bp, Homo sapien
taacccaaaacacgcgacagtagag

SEQ ID NO: 2755358 - DNA, 25 bp, Homo sapien
tgtatgagcagatgcccaggcgttg

SEQ ID NO: 2755359 - DNA, 25 bp, Homo sapien
tcaggtccctttagccacttggcgg

SEQ ID NO: 2755360 - DNA, 25 bp, Homo sapien
ctatgtacattgaagtttctccaga

SEQ ID NO: 2755361 - DNA, 25 bp, Homo sapien
tatgtacattgaagtttctccagaa

SEQ ID NO: 2755362 - DNA, 25 bp, Homo sapien
agaatcaccaggtttgacctggact

SEQ ID NO: 2755363 - DNA, 25 bp, Homo sapien
ggtttgacctggactctgcagatga

SEQ ID NO: 2755364 - DNA, 25 bp, Homo sapien
catagagaggacaattagggtgctg

SEQ ID NO: 2755365 - DNA, 25 bp, Homo sapien
gatggcactttggacccctggttct

SEQ ID NO: 2755366 - DNA, 25 bp, Homo sapien
gcctcttgtttaggtgcctttccag

SEQ ID NO: 2755367 - DNA, 25 bp, Homo sapien
gctggcgctatcacccttgcacttg

SEQ ID NO: 2755368 - DNA, 25 bp, Homo sapien
caagttgctctgcagagcaaaattc

SEQ ID NO: 2755369 - DNA, 25 bp, Homo sapien
gcacacgggtttctgcagccatgag

SEQ ID NO: 2755370 - DNA, 25 bp, Homo sapien
gagccctctcacagacaaggaaggg

SEQ ID NO: 2755371 - DNA, 25 bp, Homo sapien
ctcagagccctctcacagacaagga

SEQ ID NO: 2755372 - DNA, 25 bp, Homo sapien
cagagccctctcacagacaaggaag

SEQ ID NO: 2755373 - DNA, 25 bp, Homo sapien
acaaggaaggggctgcccttccagg

SEQ ID NO: 2755374 - DNA, 25 bp, Homo sapien
gcagggacagctatccgatgaaccc

SEQ ID NO: 2755375 - DNA, 25 bp, Homo sapien
atccagcacatgaaaggcagggaca

SEQ ID NO: 2755376 - DNA, 25 bp, Homo sapien
tcacaggaaggtacaacaaaaccaa

SEQ ID NO: 2755377 - DNA, 25 bp, Homo sapien
gacagctatccgatgaacccaagga

SEQ ID NO: 2755378 - DNA, 25 bp, Homo sapien
tacacaaggaggcaccaggttaaga

SEQ ID NO: 2755379 - DNA, 25 bp, Homo sapien
ccgcagcacctgagctgttggaggt

SEQ ID NO: 2755380 - DNA, 25 bp, Homo sapien
gtgttggactctgcaccaagtaggg

SEQ ID NO: 2755381 - DNA, 25 bp, Homo sapien
gagaagtggtcccacttgagtaaga

SEQ ID NO: 2755382 - DNA, 25 bp, Homo sapien
gccgctgtgtttgtcacagtcccag

SEQ ID NO: 2755383 - DNA, 25 bp, Homo sapien
gctgtgtttgtcacagtcccagcct

SEQ ID NO: 2755384 - DNA, 25 bp, Homo sapien
ggctgccgctgtgtttgtcacagtc

SEQ ID NO: 2755385 - DNA, 25 bp, Homo sapien
ctgccgctgtgtttgtcacagtccc

SEQ ID NO: 2755386 - DNA, 25 bp, Homo sapien
cactgccatgccaaacacctgcatt

SEQ ID NO: 2755387 - DNA, 25 bp, Homo sapien
cccactgccatgccaaacacctgca

SEQ ID NO: 2755388 - DNA, 25 bp, Homo sapien
cagcagtgcaccaccccaagcccac

SEQ ID NO: 2755389 - DNA, 25 bp, Homo sapien
actgccatgccaaacacctgcattc

SEQ ID NO: 2755390 - DNA, 25 bp, Homo sapien
tggaagaagtctccaggagcatcat

SEQ ID NO: 2755391 - DNA, 25 bp, Homo sapien
gaagaagtctccaggagcatcatct

SEQ ID NO: 2755392 - DNA, 25 bp, Homo sapien
agaagtctccaggagcatcatcttc

SEQ ID NO: 2755393 - DNA, 25 bp, Homo sapien
ggaagaagtctccaggagcatcatc

SEQ ID NO: 2755394 - DNA, 25 bp, Homo sapien
ttcctctgtgcttgttgggacagca

SEQ ID NO: 2755395 - DNA, 25 bp, Homo sapien
ccttcctctgtgcttgttgggacag

SEQ ID NO: 2755396 - DNA, 25 bp, Homo sapien
cttcctctgtgcttgttgggacagc

SEQ ID NO: 2755397 - DNA, 25 bp, Homo sapien
cagttatagtcattagcgatggagt

SEQ ID NO: 2755398 - DNA, 25 bp, Homo sapien
catagttgcacaagcacagttatag

SEQ ID NO: 2755399 - DNA, 25 bp, Homo sapien
ctaaaaataagccacgtccaagcat

SEQ ID NO: 2755400 - DNA, 25 bp, Homo sapien
gatggagtttctcatgacaacagcc

SEQ ID NO: 2755401 - DNA, 25 bp, Homo sapien
caagtagtaactgagaattccctca

SEQ ID NO: 2755402 - DNA, 25 bp, Homo sapien
catcgtggagatccagggactttcc

SEQ ID NO: 2755403 - DNA, 25 bp, Homo sapien
taactgagaattccctcagggtgcc

SEQ ID NO: 2755404 - DNA, 25 bp, Homo sapien
aagcatcgtggagatccagggactt

SEQ ID NO: 2755405 - DNA, 25 bp, Homo sapien
ttgatgcggactcagaaagtagccc

SEQ ID NO: 2755406 - DNA, 25 bp, Homo sapien
gcctcatgtttcagcagaaagcctg

SEQ ID NO: 2755407 - DNA, 25 bp, Homo sapien
tgcttttcccttagccacaagagga

SEQ ID NO: 2755408 - DNA, 25 bp, Homo sapien
tggtggccaaagaaactccaggtta

SEQ ID NO: 2755409 - DNA, 25 bp, Homo sapien
ttggatgcctaagtgtaaagtggga

SEQ ID NO: 2755410 - DNA, 25 bp, Homo sapien
ccagaagaagtggaaagcgacatac

SEQ ID NO: 2755411 - DNA, 25 bp, Homo sapien
catacctggcggaggttatccgtgg

SEQ ID NO: 2755412 - DNA, 25 bp, Homo sapien
tatccgtgggcctttggatgcctaa

SEQ ID NO: 2755413 - DNA, 25 bp, Homo sapien
tgggttagacaggagcagtccagga

SEQ ID NO: 2755414 - DNA, 25 bp, Homo sapien
gctttgtccctcaggcaacaggatg

SEQ ID NO: 2755415 - DNA, 25 bp, Homo sapien
gaagacgccatcgaagtgacacaga

SEQ ID NO: 2755416 - DNA, 25 bp, Homo sapien
aagtgagcagcattcggttgtggcc

SEQ ID NO: 2755417 - DNA, 25 bp, Homo sapien
ctcagggataacttcccccaggacg

SEQ ID NO: 2755418 - DNA, 25 bp, Homo sapien
ttcccacggacacgtttgagttctg

SEQ ID NO: 2755419 - DNA, 25 bp, Homo sapien
gcttcccacggacacgtttgagttc

SEQ ID NO: 2755420 - DNA, 25 bp, Homo sapien
ctgtgttctcagggataacttcccc

SEQ ID NO: 2755421 - DNA, 25 bp, Homo sapien
gggatgcacattctttgtcgctcag

SEQ ID NO: 2755422 - DNA, 25 bp, Homo sapien
atttgcttcagtgtgacacggacca

SEQ ID NO: 2755423 - DNA, 25 bp, Homo sapien
tcagtcgagctgtaacccagaaagt

SEQ ID NO: 2755424 - DNA, 25 bp, Homo sapien
tgacacggaccatatgacaaccatt

SEQ ID NO: 2755425 - DNA, 25 bp, Homo sapien
agtcctccttccttctcattgtcct

SEQ ID NO: 2755426 - DNA, 25 bp, Homo sapien
ttccttctcattgtcctcccctgtg

SEQ ID NO: 2755427 - DNA, 25 bp, Homo sapien
tcagtcctccttccttctcattgtc

SEQ ID NO: 2755428 - DNA, 25 bp, Homo sapien
attgtcctcccctgtggcttccttc

SEQ ID NO: 2755429 - DNA, 25 bp, Homo sapien
tcatggaactagacaatccgacctt

SEQ ID NO: 2755430 - DNA, 25 bp, Homo sapien
cgaccttcctataaatagtctcttt

SEQ ID NO: 2755431 - DNA, 25 bp, Homo sapien
gtctcttttcccgccacattcagta

SEQ ID NO: 2755432 - DNA, 25 bp, Homo sapien
taattaaatccgatcatggaactag

SEQ ID NO: 2755433 - DNA, 25 bp, Homo sapien
catccctagctgcttattagcctca

SEQ ID NO: 2755434 - DNA, 25 bp, Homo sapien
ctgcatcaagagacatccctagctg

SEQ ID NO: 2755435 - DNA, 25 bp, Homo sapien
tagctgcttattagcctcacagtcc

SEQ ID NO: 2755436 - DNA, 25 bp, Homo sapien
gagacatccctagctgcttattagc

SEQ ID NO: 2755437 - DNA, 25 bp, Homo sapien
ctgaagagtgaatgttaactgccag

SEQ ID NO: 2755438 - DNA, 25 bp, Homo sapien
tgaagagtgaatgttaactgccagc

SEQ ID NO: 2755439 - DNA, 25 bp, Homo sapien
gaagagtgaatgttaactgccagct

SEQ ID NO: 2755440 - DNA, 25 bp, Homo sapien
tgagttcagtcttgaggtgctttct

SEQ ID NO: 2755441 - DNA, 25 bp, Homo sapien
tgttgagttcagtcttgaggtgctt

SEQ ID NO: 2755442 - DNA, 25 bp, Homo sapien
cagtgttgagttcagtcttgaggtg

SEQ ID NO: 2755443 - DNA, 25 bp, Homo sapien
gttcagtcttgaggtgctttcttac

SEQ ID NO: 2755444 - DNA, 25 bp, Homo sapien
ttgttgctttttgcagccatgattt

SEQ ID NO: 2755445 - DNA, 25 bp, Homo sapien
tgttgctttttgcagccatgatttt

SEQ ID NO: 2755446 - DNA, 25 bp, Homo sapien
gcactgtcatttggccacgatgcat

SEQ ID NO: 2755447 - DNA, 25 bp, Homo sapien
aatgttgcactgcttcgtcgctcag

SEQ ID NO: 2755448 - DNA, 25 bp, Homo sapien
gcttggcacagatgtacaccctcat

SEQ ID NO: 2755449 - DNA, 25 bp, Homo sapien
caaagtaagttctacgagggcaaga

SEQ ID NO: 2755450 - DNA, 25 bp, Homo sapien
tgacgatcaaggaccaggtacctct

SEQ ID NO: 2755451 - DNA, 25 bp, Homo sapien
gcctgagcaattcctgcaatccagg

SEQ ID NO: 2755452 - DNA, 25 bp, Homo sapien
cagggtggagggacacagctataca

SEQ ID NO: 2755453 - DNA, 25 bp, Homo sapien
ccatggttgggagagaagtaacagc

SEQ ID NO: 2755454 - DNA, 25 bp, Homo sapien
gaagttactatgtgcaggccacggt

SEQ ID NO: 2755455 - DNA, 25 bp, Homo sapien
ccttcttttggatgacctgggcagt

SEQ ID NO: 2755456 - DNA, 25 bp, Homo sapien
gtttctagaatgtccctcagctggg

SEQ ID NO: 2755457 - DNA, 25 bp, Homo sapien
ccacaaaggtaaaatgctggtctca

SEQ ID NO: 2755458 - DNA, 25 bp, Homo sapien
tagccggggcataggcgttttgaac

SEQ ID NO: 2755459 - DNA, 25 bp, Homo sapien
cgtccagcgctggtttgacacggat

SEQ ID NO: 2755460 - DNA, 25 bp, Homo sapien
tttgaactagaatattcgtccagcg

SEQ ID NO: 2755461 - DNA, 25 bp, Homo sapien
ggatcttccgcaaaggaacatttct

SEQ ID NO: 2755462 - DNA, 25 bp, Homo sapien
ctccagaggtaggaacgccaaccat

SEQ ID NO: 2755463 - DNA, 25 bp, Homo sapien
cagacagagctgcatttgcccagaa

SEQ ID NO: 2755464 - DNA, 25 bp, Homo sapien
tctaccggtggtgtcattcttagcc

SEQ ID NO: 2755465 - DNA, 25 bp, Homo sapien
tcctgcacagtgaactctaccggtg

SEQ ID NO: 2755466 - DNA, 25 bp, Homo sapien
tgagaaacccaaggtctatctggca

SEQ ID NO: 2755467 - DNA, 25 bp, Homo sapien
aaaagtgttgagatgcaaatgtgtc

SEQ ID NO: 2755468 - DNA, 25 bp, Homo sapien
ctatctggcattccgctcctggcgg

SEQ ID NO: 2755469 - DNA, 25 bp, Homo sapien
tcagcttgctttttggaaaaagtgt

SEQ ID NO: 2755470 - DNA, 25 bp, Homo sapien
gttattcatcgaacacacacgtgtg

SEQ ID NO: 2755471 - DNA, 25 bp, Homo sapien
aaaggatcacccactgatggattca

SEQ ID NO: 2755472 - DNA, 25 bp, Homo sapien
tgttcacccttactttgtgcagtgg

SEQ ID NO: 2755473 - DNA, 25 bp, Homo sapien
tggtatgcctaactctcccctttga

SEQ ID NO: 2755474 - DNA, 25 bp, Homo sapien
ggtaatcaccgggatatgagcagat

SEQ ID NO: 2755475 - DNA, 25 bp, Homo sapien
gagaaaactcttacaagccaccact

SEQ ID NO: 2755476 - DNA, 25 bp, Homo sapien
gatgttatgaaaatcttcttatggg

SEQ ID NO: 2755477 - DNA, 25 bp, Homo sapien
tagaggtctttttagtgacatgcac

SEQ ID NO: 2755478 - DNA, 25 bp, Homo sapien
tcatgataattcttggtatctgact

SEQ ID NO: 2755479 - DNA, 25 bp, Homo sapien
catgataattcttggtatctgactg

SEQ ID NO: 2755480 - DNA, 25 bp, Homo sapien
atgataattcttggtatctgactgc

SEQ ID NO: 2755481 - DNA, 25 bp, Homo sapien
catcctaggtttgtaccatccttgc

SEQ ID NO: 2755482 - DNA, 25 bp, Homo sapien
caaggatagcccaggattcttgtac

SEQ ID NO: 2755483 - DNA, 25 bp, Homo sapien
ctaggtttgtaccatccttgctgga

SEQ ID NO: 2755484 - DNA, 25 bp, Homo sapien
cctgggtgtcttcaaggatagccca

SEQ ID NO: 2755485 - DNA, 25 bp, Homo sapien
gagagagaatattgccgggctgact

SEQ ID NO: 2755486 - DNA, 25 bp, Homo sapien
aaaatcggtcctcaccataccgtgg

SEQ ID NO: 2755487 - DNA, 25 bp, Homo sapien
cttgagggctgagtatatggactgc

SEQ ID NO: 2755488 - DNA, 25 bp, Homo sapien
ggctctgtttctaatgcactgcaag

SEQ ID NO: 2755489 - DNA, 25 bp, Homo sapien
ttgtgtatccgctcagcaaaatcac

SEQ ID NO: 2755490 - DNA, 25 bp, Homo sapien
gatgtgtcccaaggctgcaaggcca

SEQ ID NO: 2755491 - DNA, 25 bp, Homo sapien
ttttgagagccgaagggagcactgt

SEQ ID NO: 2755492 - DNA, 25 bp, Homo sapien
actgtgcgctgtttgtgtatccgct

SEQ ID NO: 2755493 - DNA, 25 bp, Homo sapien
atgagtcggcctgtcgtttgcacat

SEQ ID NO: 2755494 - DNA, 25 bp, Homo sapien
cacagaggcatggggtttcttgcat

SEQ ID NO: 2755495 - DNA, 25 bp, Homo sapien
cagaggcatggggtttcttgcattc

SEQ ID NO: 2755496 - DNA, 25 bp, Homo sapien
aatgagtcggcctgtcgtttgcaca

SEQ ID NO: 2755497 - DNA, 25 bp, Homo sapien
aatacatgtaacactttgatgctcc

SEQ ID NO: 2755498 - DNA, 25 bp, Homo sapien
ctgactgtcctgtacttggagcatc

SEQ ID NO: 2755499 - DNA, 25 bp, Homo sapien
tttgaatacatgtaacactttgatg

SEQ ID NO: 2755500 - DNA, 25 bp, Homo sapien
gagcatctgtccacttttgaataca

SEQ ID NO: 2755501 - DNA, 25 bp, Homo sapien
gatcattcatatctggcacagacag

SEQ ID NO: 2755502 - DNA, 25 bp, Homo sapien
cagctagcggcacagccattcagtg

SEQ ID NO: 2755503 - DNA, 25 bp, Homo sapien
ttacaggttccatctagtagaggct

SEQ ID NO: 2755504 - DNA, 25 bp, Homo sapien
tcaggagtctttgtgcaaggaaggc

SEQ ID NO: 2755505 - DNA, 25 bp, Homo sapien
ccaaaccctccatgcagtgagtctt

SEQ ID NO: 2755506 - DNA, 25 bp, Homo sapien
ccatcagcagttgtcgtggcctgtc

SEQ ID NO: 2755507 - DNA, 25 bp, Homo sapien
gcttctgtccactcaaatgttgaat

SEQ ID NO: 2755508 - DNA, 25 bp, Homo sapien
gacatagacatagcttctgtccact

SEQ ID NO: 2755509 - DNA, 25 bp, Homo sapien
tgtcaaattgtacccattactcggt

SEQ ID NO: 2755510 - DNA, 25 bp, Homo sapien
aattgtacccattactcggtacctg

SEQ ID NO: 2755511 - DNA, 25 bp, Homo sapien
gtacccattactcggtacctgtcta

SEQ ID NO: 2755512 - DNA, 25 bp, Homo sapien
gcattgtcaaattgtacccattact

SEQ ID NO: 2755513 - DNA, 25 bp, Homo sapien
ggcattctgcatcctaatgaccatc

SEQ ID NO: 2755514 - DNA, 25 bp, Homo sapien
cctggtatcagtgggcttatggaga

SEQ ID NO: 2755515 - DNA, 25 bp, Homo sapien
tgttgtcactaaggatcagctctgc

SEQ ID NO: 2755516 - DNA, 25 bp, Homo sapien
gagaagcttcttgggcctgtggcat

SEQ ID NO: 2755517 - DNA, 25 bp, Homo sapien
tgtgtgtcttgttttaagccaaaca

SEQ ID NO: 2755518 - DNA, 25 bp, Homo sapien
gccaaacaagtgtcatctgtggttg

SEQ ID NO: 2755519 - DNA, 25 bp, Homo sapien
actgattttgaaagcaccagcctgt

SEQ ID NO: 2755520 - DNA, 25 bp, Homo sapien
gattttgaaagcaccagcctgtctt

SEQ ID NO: 2755521 - DNA, 25 bp, Homo sapien
ttttccttggtcgatggtcacagag

SEQ ID NO: 2755522 - DNA, 25 bp, Homo sapien
tcttttccttggtcgatggtcacag

SEQ ID NO: 2755523 - DNA, 25 bp, Homo sapien
ttccttggtcgatggtcacagagga

SEQ ID NO: 2755524 - DNA, 25 bp, Homo sapien
cttttccttggtcgatggtcacaga

SEQ ID NO: 2755525 - DNA, 25 bp, Homo sapien
tcgtgggcagcttagggacaagcaa

SEQ ID NO: 2755526 - DNA, 25 bp, Homo sapien
tatgatcgtgggcagcttagggaca

SEQ ID NO: 2755527 - DNA, 25 bp, Homo sapien
tctgtctttatgatcgtgggcagct

SEQ ID NO: 2755528 - DNA, 25 bp, Homo sapien
gtcttggtctgtctttatgatcgtg

SEQ ID NO: 2755529 - DNA, 25 bp, Homo sapien
aaatagtactatgaagagaaaatta

SEQ ID NO: 2755530 - DNA, 25 bp, Homo sapien
ttttagtattctgatcaaatagtac

SEQ ID NO: 2755531 - DNA, 25 bp, Homo sapien
aagtaaattagtggggacagatgcc

SEQ ID NO: 2755532 - DNA, 25 bp, Homo sapien
tttgttcttaagaaacagaatgtgg

SEQ ID NO: 2755533 - DNA, 25 bp, Homo sapien
ccccaggagagtgagagttgttgca

SEQ ID NO: 2755534 - DNA, 25 bp, Homo sapien
ttctggggctttcccatgccagcca

SEQ ID NO: 2755535 - DNA, 25 bp, Homo sapien
ccccacgaacccaggtatgaagtat

SEQ ID NO: 2755536 - DNA, 25 bp, Homo sapien
tcttgccctcagtcctggcactagt

SEQ ID NO: 2755537 - DNA, 25 bp, Homo sapien
gtgcagccagggctatacccggctg

SEQ ID NO: 2755538 - DNA, 25 bp, Homo sapien
tcctggttgaaacatggcagatgac

SEQ ID NO: 2755539 - DNA, 25 bp, Homo sapien
gctgtgaactttccaatagcagtaa

SEQ ID NO: 2755540 - DNA, 25 bp, Homo sapien
tggttcctgtgcacctcacaagaag

SEQ ID NO: 2755541 - DNA, 25 bp, Homo sapien
ccttgtaacaattctctgaggggca

SEQ ID NO: 2755542 - DNA, 25 bp, Homo sapien
ttaaaccttgtaacaattctctgag

SEQ ID NO: 2755543 - DNA, 25 bp, Homo sapien
aaaccttgtaacaattctctgaggg

SEQ ID NO: 2755544 - DNA, 25 bp, Homo sapien
tgtaacaattctctgaggggcacct

SEQ ID NO: 2755545 - DNA, 25 bp, Homo sapien
cagcacgaggctgccgttcctcttg

SEQ ID NO: 2755546 - DNA, 25 bp, Homo sapien
ggtgacttctaacatcgcagagatg

SEQ ID NO: 2755547 - DNA, 25 bp, Homo sapien
acatcgcagagatgttaaggcgcgg

SEQ ID NO: 2755548 - DNA, 25 bp, Homo sapien
cagttgatcagacttggtgacttct

SEQ ID NO: 2755549 - DNA, 25 bp, Homo sapien
taagttcctgattgagggcgtctcc

SEQ ID NO: 2755550 - DNA, 25 bp, Homo sapien
tctgggatagcctttgagacctcct

SEQ ID NO: 2755551 - DNA, 25 bp, Homo sapien
tgttggaatcctgggcatgaagcct

SEQ ID NO: 2755552 - DNA, 25 bp, Homo sapien
tatgtgacagcgtctatccctgaga

SEQ ID NO: 2755553 - DNA, 25 bp, Homo sapien
tgtatgcacgtcttttgagttcccc

SEQ ID NO: 2755554 - DNA, 25 bp, Homo sapien
tgaatgggtcgacaaaaatgtatgc

SEQ ID NO: 2755555 - DNA, 25 bp, Homo sapien
tcattcgttggcaccctgcagttca

SEQ ID NO: 2755556 - DNA, 25 bp, Homo sapien
tcagcgtgcactttgagagctcctc

SEQ ID NO: 2755557 - DNA, 25 bp, Homo sapien
ccctgcttggcttcaagttaatctt

SEQ ID NO: 2755558 - DNA, 25 bp, Homo sapien
aatcttattacgtaaagaaacagag

SEQ ID NO: 2755559 - DNA, 25 bp, Homo sapien
cctattcaccaaggcaagcattggg

SEQ ID NO: 2755560 - DNA, 25 bp, Homo sapien
aactagcctaggtgaccctgcttgg

SEQ ID NO: 2755561 - DNA, 25 bp, Homo sapien
gcagctttctggttgtgaacaagac

SEQ ID NO: 2755562 - DNA, 25 bp, Homo sapien
gaggttgaaaaccagggtgttgcca

SEQ ID NO: 2755563 - DNA, 25 bp, Homo sapien
tagcgcagctgtgtttttagaagac

SEQ ID NO: 2755564 - DNA, 25 bp, Homo sapien
ttttctgtagaaccccacagccttg

SEQ ID NO: 2755565 - DNA, 25 bp, Homo sapien
tggagggcacaagtggccgatggcc

SEQ ID NO: 2755566 - DNA, 25 bp, Homo sapien
tagtcaattgccttgctaacccagc

SEQ ID NO: 2755567 - DNA, 25 bp, Homo sapien
ccagggttcggagacgtggagggca

SEQ ID NO: 2755568 - DNA, 25 bp, Homo sapien
tgtttccatatcttcccagggttcg

SEQ ID NO: 2755569 - DNA, 25 bp, Homo sapien
taacgctcattgtagtgtcctgaag

SEQ ID NO: 2755570 - DNA, 25 bp, Homo sapien
tagcagtgttgactctgttggacca

SEQ ID NO: 2755571 - DNA, 25 bp, Homo sapien
taggaagacaacgttcaaggctggg

SEQ ID NO: 2755572 - DNA, 25 bp, Homo sapien
gttggaccaagctcccctatttatg

SEQ ID NO: 2755573 - DNA, 25 bp, Homo sapien
taacaaccctctcgatcctcttgtg

SEQ ID NO: 2755574 - DNA, 25 bp, Homo sapien
ccccgttatactcagtgttgctgaa

SEQ ID NO: 2755575 - DNA, 25 bp, Homo sapien
aacaaccctctcgatcctcttgtga

SEQ ID NO: 2755576 - DNA, 25 bp, Homo sapien
tcttgtgaccccgttatactcagtg

SEQ ID NO: 2755577 - DNA, 25 bp, Homo sapien
gattttagtattaaagcttgtgttg

SEQ ID NO: 2755578 - DNA, 25 bp, Homo sapien
ttccgtctttaggccagaccctctg

SEQ ID NO: 2755579 - DNA, 25 bp, Homo sapien
cacatccatttttccgtctttaggc

SEQ ID NO: 2755580 - DNA, 25 bp, Homo sapien
cagaccctctgatggttggtggatt

SEQ ID NO: 2755581 - DNA, 25 bp, Homo sapien
ctccttagcacgttcattgctaggg

SEQ ID NO: 2755582 - DNA, 25 bp, Homo sapien
tctccttagcacgttcattgctagg

SEQ ID NO: 2755583 - DNA, 25 bp, Homo sapien
tttgctctccttagcacgttcattg

SEQ ID NO: 2755584 - DNA, 25 bp, Homo sapien
gctctccttagcacgttcattgcta

SEQ ID NO: 2755585 - DNA, 25 bp, Homo sapien
gaagcatagagtcgtttctcagcct

SEQ ID NO: 2755586 - DNA, 25 bp, Homo sapien
gccttggaagcatagagtcgtttct

SEQ ID NO: 2755587 - DNA, 25 bp, Homo sapien
tctgccttggaagcatagagtcgtt

SEQ ID NO: 2755588 - DNA, 25 bp, Homo sapien
cttctctgccttggaagcatagagt

SEQ ID NO: 2755589 - DNA, 25 bp, Homo sapien
gttgtagccttgacacagatggaag

SEQ ID NO: 2755590 - DNA, 25 bp, Homo sapien
gaaatcaacagttgtagccttgaca

SEQ ID NO: 2755591 - DNA, 25 bp, Homo sapien
gttgttgggtggaaatcaacagttg

SEQ ID NO: 2755592 - DNA, 25 bp, Homo sapien
aatacaattgaatatgaggcataaa

SEQ ID NO: 2755593 - DNA, 25 bp, Homo sapien
tatgggaccatgtttgactcctcac

SEQ ID NO: 2755594 - DNA, 25 bp, Homo sapien
ttatgggaccatgtttgactcctca

SEQ ID NO: 2755595 - DNA, 25 bp, Homo sapien
agcagcacctgggaactccacgttc

SEQ ID NO: 2755596 - DNA, 25 bp, Homo sapien
ccttggtgtattcaggtggcatctg

SEQ ID NO: 2755597 - DNA, 25 bp, Homo sapien
agcccacagcggcaagaagcagcac

SEQ ID NO: 2755598 - DNA, 25 bp, Homo sapien
cttgccgtcagcctggattgcagcg

SEQ ID NO: 2755599 - DNA, 25 bp, Homo sapien
caccgagtggactgattgtaaggct

SEQ ID NO: 2755600 - DNA, 25 bp, Homo sapien
cagatcagtggcctttgcaatagac

SEQ ID NO: 2755601 - DNA, 25 bp, Homo sapien
gacagttctgcgctactgaattgga

SEQ ID NO: 2755602 - DNA, 25 bp, Homo sapien
tcttgaccgtttttgcaccgagtgg

SEQ ID NO: 2755603 - DNA, 25 bp, Homo sapien
gcgtagatattctggcccgtgccac

SEQ ID NO: 2755604 - DNA, 25 bp, Homo sapien
cccgtgccacagatccagaatagct

SEQ ID NO: 2755605 - DNA, 25 bp, Homo sapien
cagaatagctggtgaccctggtgtg

SEQ ID NO: 2755606 - DNA, 25 bp, Homo sapien
gcaaatgaagggcaggcgtagatat

SEQ ID NO: 2755607 - DNA, 25 bp, Homo sapien
aagtccatgaataaagtcacataac

SEQ ID NO: 2755608 - DNA, 25 bp, Homo sapien
ttggatattggaacagtcagtgctg

SEQ ID NO: 2755609 - DNA, 25 bp, Homo sapien
tctctgctcttggtcgcttctcagg

SEQ ID NO: 2755610 - DNA, 25 bp, Homo sapien
tggaacttggaaagcgcagccagga

SEQ ID NO: 2755611 - DNA, 25 bp, Homo sapien
caagccagtctcaaccggaatgtca

SEQ ID NO: 2755612 - DNA, 25 bp, Homo sapien
ctgtctctcggattcttcggagaca

SEQ ID NO: 2755613 - DNA, 25 bp, Homo sapien
tctctcggattcttcggagacaccc

SEQ ID NO: 2755614 - DNA, 25 bp, Homo sapien
ccacctcctggaatgttccttggca

SEQ ID NO: 2755615 - DNA, 25 bp, Homo sapien
cacctcctggaatgttccttggcat

SEQ ID NO: 2755616 - DNA, 25 bp, Homo sapien
tcatggcacccaaatccgagattct

SEQ ID NO: 2755617 - DNA, 25 bp, Homo sapien
ggaacacttgttggtgctgccgtct

SEQ ID NO: 2755618 - DNA, 25 bp, Homo sapien
cataggctcctcactgactgggtgc

SEQ ID NO: 2755619 - DNA, 25 bp, Homo sapien
gtaacctgacagagcctaactcctg

SEQ ID NO: 2755620 - DNA, 25 bp, Homo sapien
gactgccatgcagtgggactcagca

SEQ ID NO: 2755621 - DNA, 25 bp, Homo sapien
catcttggcggtgtctagttgagca

SEQ ID NO: 2755622 - DNA, 25 bp, Homo sapien
gatatttcccctgcagtgcgataag

SEQ ID NO: 2755623 - DNA, 25 bp, Homo sapien
tgctaataggaacaccgagaagtct

SEQ ID NO: 2755624 - DNA, 25 bp, Homo sapien
gataggacatcttctcctattctca

SEQ ID NO: 2755625 - DNA, 25 bp, Homo sapien
ccagtgtgcccggttttggactact

SEQ ID NO: 2755626 - DNA, 25 bp, Homo sapien
ttcttccacacttcgcacagatctt

SEQ ID NO: 2755627 - DNA, 25 bp, Homo sapien
gatcttttatttgataggacatctt

SEQ ID NO: 2755628 - DNA, 25 bp, Homo sapien
gaaagaaaatcatcaagcaccacct

SEQ ID NO: 2755629 - DNA, 25 bp, Homo sapien
taagcctcgactgactccattcttg

SEQ ID NO: 2755630 - DNA, 25 bp, Homo sapien
gacatgctgtcgaaccaaacagtaa

SEQ ID NO: 2755631 - DNA, 25 bp, Homo sapien
ttctgcacctagagataagcctcga

SEQ ID NO: 2755632 - DNA, 25 bp, Homo sapien
tgtacgaattcgttgcccacttcag

SEQ ID NO: 2755633 - DNA, 25 bp, Homo sapien
gaccaagctttgatctggcagggaa

SEQ ID NO: 2755634 - DNA, 25 bp, Homo sapien
ttttaggaagcgaggaatccaggtg

SEQ ID NO: 2755635 - DNA, 25 bp, Homo sapien
tcccgtaaagagagatgtcccatca

SEQ ID NO: 2755636 - DNA, 25 bp, Homo sapien
cactgctgtcttaatgatgactggc

SEQ ID NO: 2755637 - DNA, 25 bp, Homo sapien
taggtgctcataaataggacccagg

SEQ ID NO: 2755638 - DNA, 25 bp, Homo sapien
taatcttagaatgtctctcggtggc

SEQ ID NO: 2755639 - DNA, 25 bp, Homo sapien
gggatgtttacaagtcactgctgtc

SEQ ID NO: 2755640 - DNA, 25 bp, Homo sapien
gttgttctcccgcttattcctgttg

SEQ ID NO: 2755641 - DNA, 25 bp, Homo sapien
taaactgtgcaagctcagcgtagct

SEQ ID NO: 2755642 - DNA, 25 bp, Homo sapien
acagaggaaggcgaatagttaatcc

SEQ ID NO: 2755643 - DNA, 25 bp, Homo sapien
tgttgttaagcctggagtcattcag

SEQ ID NO: 2755644 - DNA, 25 bp, Homo sapien
tgtaatcaattaatgcaccaaagtc

SEQ ID NO: 2755645 - DNA, 25 bp, Homo sapien
tggaggagttcatgtaatcaattaa

SEQ ID NO: 2755646 - DNA, 25 bp, Homo sapien
acctttgctcgcaggagtgactgga

SEQ ID NO: 2755647 - DNA, 25 bp, Homo sapien
aatgggcatggtgaccgttgttttc

SEQ ID NO: 2755648 - DNA, 25 bp, Homo sapien
gcaagcgtggcttcacggtgatcgt

SEQ ID NO: 2755649 - DNA, 25 bp, Homo sapien
tctgcagcgaggaggtctgcaagcg

SEQ ID NO: 2755650 - DNA, 25 bp, Homo sapien
gtccaagtgggactccatcaagccc

SEQ ID NO: 2755651 - DNA, 25 bp, Homo sapien
tgatcgtggacatgcgtgggtccaa

SEQ ID NO: 2755652 - DNA, 25 bp, Homo sapien
tcccttgtgcaggtgaagaatattc

SEQ ID NO: 2755653 - DNA, 25 bp, Homo sapien
ccttgtgcaggtgaagaatattcct

SEQ ID NO: 2755654 - DNA, 25 bp, Homo sapien
tcagagccacgttcatcccttgtgc

SEQ ID NO: 2755655 - DNA, 25 bp, Homo sapien
ttaggtcagagccacgttcatccct

SEQ ID NO: 2755656 - DNA, 25 bp, Homo sapien
ccgccatgagcaagtgtgtccttcg

SEQ ID NO: 2755657 - DNA, 25 bp, Homo sapien
tgagcaagtgtgtccttcgaaatcc

SEQ ID NO: 2755658 - DNA, 25 bp, Homo sapien
aagtgtgtccttcgaaatccagtca

SEQ ID NO: 2755659 - DNA, 25 bp, Homo sapien
tgtgtccttcgaaatccagtcatga

SEQ ID NO: 2755660 - DNA, 25 bp, Homo sapien
gaagtcgctccttgacaagctccag

SEQ ID NO: 2755661 - DNA, 25 bp, Homo sapien
caaggccgtgcaccatgtcctggat

SEQ ID NO: 2755662 - DNA, 25 bp, Homo sapien
gatgtcatccacgaggtgctgcacc

SEQ ID NO: 2755663 - DNA, 25 bp, Homo sapien
cagatcgtgaagaatcactcatttc

SEQ ID NO: 2755664 - DNA, 25 bp, Homo sapien
ctggcaacaccgcaaggtccggctg

SEQ ID NO: 2755665 - DNA, 25 bp, Homo sapien
tggcaacaccgcaaggtccggctgc

SEQ ID NO: 2755666 - DNA, 25 bp, Homo sapien
gcaacaccgcaaggtccggctgcat

SEQ ID NO: 2755667 - DNA, 25 bp, Homo sapien
ggcaacaccgcaaggtccggctgca

SEQ ID NO: 2755668 - DNA, 25 bp, Homo sapien
tgccatccaccctttgagaacagaa

SEQ ID NO: 2755669 - DNA, 25 bp, Homo sapien
acagcaggaattggatttagccgca

SEQ ID NO: 2755670 - DNA, 25 bp, Homo sapien
ccagcagatgtcactataggttcag

SEQ ID NO: 2755671 - DNA, 25 bp, Homo sapien
agagcagcatcggaaacacctggag

SEQ ID NO: 2755672 - DNA, 25 bp, Homo sapien
gtcatacatagtcacagacgtgctt

SEQ ID NO: 2755673 - DNA, 25 bp, Homo sapien
cattcttgggcccttacagaatttc

SEQ ID NO: 2755674 - DNA, 25 bp, Homo sapien
caaagtagttgaaacatttagcaac

SEQ ID NO: 2755675 - DNA, 25 bp, Homo sapien
ctacagtgctctgtcatatttttat

SEQ ID NO: 2755676 - DNA, 25 bp, Homo sapien
taagcacctcctagatgaagacgtt

SEQ ID NO: 2755677 - DNA, 25 bp, Homo sapien
taaacatgcatagagcgaggagctg

SEQ ID NO: 2755678 - DNA, 25 bp, Homo sapien
tagcagcattgtgaagaccgcgttc

SEQ ID NO: 2755679 - DNA, 25 bp, Homo sapien
taaagcaatcaacacgacacagagg

SEQ ID NO: 2755680 - DNA, 25 bp, Homo sapien
gaaatgtgcctactaattatgactg

SEQ ID NO: 2755681 - DNA, 25 bp, Homo sapien
cctgttggtagtccttagaataatc

SEQ ID NO: 2755682 - DNA, 25 bp, Homo sapien
gactggcaactaatactcagtggta

SEQ ID NO: 2755683 - DNA, 25 bp, Homo sapien
tgtaaagtatgcttcagcagccggt

SEQ ID NO: 2755684 - DNA, 25 bp, Homo sapien
tagaaagctgttaggaaggcccaga

SEQ ID NO: 2755685 - DNA, 25 bp, Homo sapien
gtgagaaatgctgggcgctccccac

SEQ ID NO: 2755686 - DNA, 25 bp, Homo sapien
gacgggttaattataactgcaggga

SEQ ID NO: 2755687 - DNA, 25 bp, Homo sapien
catctacgatgagttatgacgggtt

SEQ ID NO: 2755688 - DNA, 25 bp, Homo sapien
aagcatatccgcgaagtcatccagg

SEQ ID NO: 2755689 - DNA, 25 bp, Homo sapien
taacaccttgttaaggcttccagca

SEQ ID NO: 2755690 - DNA, 25 bp, Homo sapien
caagcaggactggataaagcatatc

SEQ ID NO: 2755691 - DNA, 25 bp, Homo sapien
tatcctaagcaacgctaacaccttg

SEQ ID NO: 2755692 - DNA, 25 bp, Homo sapien
gctgatatgcacctcattaaacaaa

SEQ ID NO: 2755693 - DNA, 25 bp, Homo sapien
ttaaacaaatcagttgcttctccag

SEQ ID NO: 2755694 - DNA, 25 bp, Homo sapien
gaaggctgatatgcacctcattaaa

SEQ ID NO: 2755695 - DNA, 25 bp, Homo sapien
ggctgatatgcacctcattaaacaa

SEQ ID NO: 2755696 - DNA, 25 bp, Homo sapien
ctggacagccaaggagacggcagca

SEQ ID NO: 2755697 - DNA, 25 bp, Homo sapien
tagcctgttgccagaatgctttgca

SEQ ID NO: 2755698 - DNA, 25 bp, Homo sapien
ggcttcccctcgtggtgtctttgca

SEQ ID NO: 2755699 - DNA, 25 bp, Homo sapien
ctgcccatgcatttggaacagcggt

SEQ ID NO: 2755700 - DNA, 25 bp, Homo sapien
cagttgcatcaatataagtccttga

SEQ ID NO: 2755701 - DNA, 25 bp, Homo sapien
ggtcctgaccatgtccacgtccagg

SEQ ID NO: 2755702 - DNA, 25 bp, Homo sapien
ttcaaccacaaggataggaagcggt

SEQ ID NO: 2755703 - DNA, 25 bp, Homo sapien
caggtgtgggtcagaagtaacatgg

SEQ ID NO: 2755704 - DNA, 25 bp, Homo sapien
ggaaaccaggcagcttgaccagaat

SEQ ID NO: 2755705 - DNA, 25 bp, Homo sapien
tccagtgaggccagttcaaaacatc

SEQ ID NO: 2755706 - DNA, 25 bp, Homo sapien
tgatcggaaggaaaagtagccagga

SEQ ID NO: 2755707 - DNA, 25 bp, Homo sapien
cctgggcaaatgagcgtctctcact

SEQ ID NO: 2755708 - DNA, 25 bp, Homo sapien
aaaacatcctctttgccctacgctg

SEQ ID NO: 2755709 - DNA, 25 bp, Homo sapien
gatgattgcagatacactgttgaac

SEQ ID NO: 2755710 - DNA, 25 bp, Homo sapien
gtctccgcagatggccggcactgag

SEQ ID NO: 2755711 - DNA, 25 bp, Homo sapien
aatgatgattgcagatacactgttg

SEQ ID NO: 2755712 - DNA, 25 bp, Homo sapien
ccgtaggctcggtagagaaagcagc

SEQ ID NO: 2755713 - DNA, 25 bp, Homo sapien
gttgacagagggatgccctccttgg

SEQ ID NO: 2755714 - DNA, 25 bp, Homo sapien
ccagggcagttgacagagggatgcc

SEQ ID NO: 2755715 - DNA, 25 bp, Homo sapien
ggcagttgacagagggatgccctcc

SEQ ID NO: 2755716 - DNA, 25 bp, Homo sapien
tgacagagggatgccctccttggag

SEQ ID NO: 2755717 - DNA, 25 bp, Homo sapien
tggagaggtcccatgtcagccagtt

SEQ ID NO: 2755718 - DNA, 25 bp, Homo sapien
tcagccagttctttggtgggggtca

SEQ ID NO: 2755719 - DNA, 25 bp, Homo sapien
gcagtcacgtcaggatggagaggtc

SEQ ID NO: 2755720 - DNA, 25 bp, Homo sapien
ttctcaccggggcagtcacgtcagg

SEQ ID NO: 2755721 - DNA, 25 bp, Homo sapien
tccagctttgcagagaccaaggttc

SEQ ID NO: 2755722 - DNA, 25 bp, Homo sapien
ccagctttgcagagaccaaggttct

SEQ ID NO: 2755723 - DNA, 25 bp, Homo sapien
agaagcctctgtgaccaaacccgga

SEQ ID NO: 2755724 - DNA, 25 bp, Homo sapien
gcctctgtgaccaaacccggagctt

SEQ ID NO: 2755725 - DNA, 25 bp, Homo sapien
agcctctgtgaccaaacccggagct

SEQ ID NO: 2755726 - DNA, 25 bp, Homo sapien
ctctgtgaccaaacccggagcttgc

SEQ ID NO: 2755727 - DNA, 25 bp, Homo sapien
gttgaggtcactaacccctgtgtcg

SEQ ID NO: 2755728 - DNA, 25 bp, Homo sapien
ccctcacggccatggttttgaacca

SEQ ID NO: 2755729 - DNA, 25 bp, Homo sapien
tcttctcctgaaccgagtctgttca

SEQ ID NO: 2755730 - DNA, 25 bp, Homo sapien
tttcttcccacggtctgttgaggtc

SEQ ID NO: 2755731 - DNA, 25 bp, Homo sapien
tgtgaccctggctgtccaaggaggc

SEQ ID NO: 2755732 - DNA, 25 bp, Homo sapien
aatcggcagcagacccacatgtgtg

SEQ ID NO: 2755733 - DNA, 25 bp, Homo sapien
gacagcgtggagaatttgcaatgca

SEQ ID NO: 2755734 - DNA, 25 bp, Homo sapien
gaaacgccctggctgtcaatcggca

SEQ ID NO: 2755735 - DNA, 25 bp, Homo sapien
acagtagggaggtctgtgtgcttca

SEQ ID NO: 2755736 - DNA, 25 bp, Homo sapien
ccgagagcacgcctgcttctctgta

SEQ ID NO: 2755737 - DNA, 25 bp, Homo sapien
tgcatgcccttttccgagagcacgc

SEQ ID NO: 2755738 - DNA, 25 bp, Homo sapien
cagaggccgctggatctgctgaaca

SEQ ID NO: 2755739 - DNA, 25 bp, Homo sapien
ccatctccttcagggacccttccat

SEQ ID NO: 2755740 - DNA, 25 bp, Homo sapien
agtgccatctccttcagggaccctt

SEQ ID NO: 2755741 - DNA, 25 bp, Homo sapien
ccctcaaaggccagcttcagtgcca

SEQ ID NO: 2755742 - DNA, 25 bp, Homo sapien
tccctcaaaggccagcttcagtgcc

SEQ ID NO: 2755743 - DNA, 25 bp, Homo sapien
agggagatagtagcagcccttcctt

SEQ ID NO: 2755744 - DNA, 25 bp, Homo sapien
ggcactggaggatcgccccagctca

SEQ ID NO: 2755745 - DNA, 25 bp, Homo sapien
ccaggcactggaggatcgccccagc

SEQ ID NO: 2755746 - DNA, 25 bp, Homo sapien
cagggagatagtagcagcccttcct

SEQ ID NO: 2755747 - DNA, 25 bp, Homo sapien
acgtggggcggctgcaaggattcga

SEQ ID NO: 2755748 - DNA, 25 bp, Homo sapien
ggcggtgcaacgacatgatgaacgt

SEQ ID NO: 2755749 - DNA, 25 bp, Homo sapien
caggcggtgcaacgacatgatgaac

SEQ ID NO: 2755750 - DNA, 25 bp, Homo sapien
cggtgcaacgacatgatgaacgtgg

SEQ ID NO: 2755751 - DNA, 25 bp, Homo sapien
taattgaggcgccagaggtctatac

SEQ ID NO: 2755752 - DNA, 25 bp, Homo sapien
ggcagaaacaagcaggaccgggctt

SEQ ID NO: 2755753 - DNA, 25 bp, Homo sapien
tcttgggcccagtactgtaagagct

SEQ ID NO: 2755754 - DNA, 25 bp, Homo sapien
cacacagaggccgttggagggcttc

SEQ ID NO: 2755755 - DNA, 25 bp, Homo sapien
tattccataggaggaaatctaaaga

SEQ ID NO: 2755756 - DNA, 25 bp, Homo sapien
gtttagagccaagaacagtaaaaga

SEQ ID NO: 2755757 - DNA, 25 bp, Homo sapien
tggtcacagaccaagatgcaggact

SEQ ID NO: 2755758 - DNA, 25 bp, Homo sapien
cttctgcctcgctgcagagagaggc

SEQ ID NO: 2755759 - DNA, 25 bp, Homo sapien
gcggctgttctcactaactcggctg

SEQ ID NO: 2755760 - DNA, 25 bp, Homo sapien
tcttctaataagagcaagccgatca

SEQ ID NO: 2755761 - DNA, 25 bp, Homo sapien
gatcattaaccttctcaacgcagcg

SEQ ID NO: 2755762 - DNA, 25 bp, Homo sapien
tacgtcaccgtgttgctctggaaga

SEQ ID NO: 2755763 - DNA, 25 bp, Homo sapien
tacgtacttcttagtggcgtgtccc

SEQ ID NO: 2755764 - DNA, 25 bp, Homo sapien
ttagccaagccaaccatcaaactgg

SEQ ID NO: 2755765 - DNA, 25 bp, Homo sapien
tgaaatcatcctcgggaaccctgtc

SEQ ID NO: 2755766 - DNA, 25 bp, Homo sapien
tgtctccctgacctcggatacgtgg

SEQ ID NO: 2755767 - DNA, 25 bp, Homo sapien
tagccctgtgccatcggttcaaaga

SEQ ID NO: 2755768 - DNA, 25 bp, Homo sapien
tctgggcaccctcgaagttttctgg

SEQ ID NO: 2755769 - DNA, 25 bp, Homo sapien
tatgaagacctctgttgtacctgta

SEQ ID NO: 2755770 - DNA, 25 bp, Homo sapien
taaaagccgattaagcactggccgc

SEQ ID NO: 2755771 - DNA, 25 bp, Homo sapien
actgaccgtgcacagcgaggctgta

SEQ ID NO: 2755772 - DNA, 25 bp, Homo sapien
tatgtgccagaatgtcgactgaccg

SEQ ID NO: 2755773 - DNA, 25 bp, Homo sapien
tagaatagctaaggcaccctgttgc

SEQ ID NO: 2755774 - DNA, 25 bp, Homo sapien
acactcgagaccctggtatgtgcca

SEQ ID NO: 2755775 - DNA, 25 bp, Homo sapien
cttacagaaaatacatacgtcaata

SEQ ID NO: 2755776 - DNA, 25 bp, Homo sapien
gtatatatctgtgatcaccacccaa

SEQ ID NO: 2755777 - DNA, 25 bp, Homo sapien
caaagcaaactataaaacgtttctg

SEQ ID NO: 2755778 - DNA, 25 bp, Homo sapien
catagatatgtttgccttttaagta

SEQ ID NO: 2755779 - DNA, 25 bp, Homo sapien
tgcattcgggactgctgagattccc

SEQ ID NO: 2755780 - DNA, 25 bp, Homo sapien
gcttgcattcgggactgctgagatt

SEQ ID NO: 2755781 - DNA, 25 bp, Homo sapien
cattcgggactgctgagattcccag

SEQ ID NO: 2755782 - DNA, 25 bp, Homo sapien
ttcaggggcttgcattcgggactgc

SEQ ID NO: 2755783 - DNA, 25 bp, Homo sapien
gatggctctagcacacgctcctgtg

SEQ ID NO: 2755784 - DNA, 25 bp, Homo sapien
gacgtcccaaatgctactctcctga

SEQ ID NO: 2755785 - DNA, 25 bp, Homo sapien
gactcggctgtggatatcttctggg

SEQ ID NO: 2755786 - DNA, 25 bp, Homo sapien
tgtgccaacaattcctaactcgatg

SEQ ID NO: 2755787 - DNA, 25 bp, Homo sapien
gcagaagcgtctgactgggctccct

SEQ ID NO: 2755788 - DNA, 25 bp, Homo sapien
ctgcagaagcgtctgactgggctcc

SEQ ID NO: 2755789 - DNA, 25 bp, Homo sapien
tgcagaagcgtctgactgggctccc

SEQ ID NO: 2755790 - DNA, 25 bp, Homo sapien
cagaagcgtctgactgggctccctt

SEQ ID NO: 2755791 - DNA, 25 bp, Homo sapien
gcacctcttgcccaatagatgatga

SEQ ID NO: 2755792 - DNA, 25 bp, Homo sapien
cagtgatgcgtttgtggcttgctag

SEQ ID NO: 2755793 - DNA, 25 bp, Homo sapien
gagttgcattccctactttcagtga

SEQ ID NO: 2755794 - DNA, 25 bp, Homo sapien
tctgtgtccctcctagactataagc

SEQ ID NO: 2755795 - DNA, 25 bp, Homo sapien
ctccttgttcaatgccagttccttc

SEQ ID NO: 2755796 - DNA, 25 bp, Homo sapien
cacctccttgttcaatgccagttcc

SEQ ID NO: 2755797 - DNA, 25 bp, Homo sapien
gcacctccttgttcaatgccagttc

SEQ ID NO: 2755798 - DNA, 25 bp, Homo sapien
cacagggtgtctgtccccaggagct

SEQ ID NO: 2755799 - DNA, 25 bp, Homo sapien
cagtatgagtccagcacagggtgtc

SEQ ID NO: 2755800 - DNA, 25 bp, Homo sapien
tatgagtccagcacagggtgtctgt

SEQ ID NO: 2755801 - DNA, 25 bp, Homo sapien
ggctaggccagtatgagtccagcac

SEQ ID NO: 2755802 - DNA, 25 bp, Homo sapien
ctgcagccataggtcagtgaaccat

SEQ ID NO: 2755803 - DNA, 25 bp, Homo sapien
gccataggtcagtgaaccatcagga

SEQ ID NO: 2755804 - DNA, 25 bp, Homo sapien
atgttgaagccagggatggttaaac

SEQ ID NO: 2755805 - DNA, 25 bp, Homo sapien
catcaggatgttgaagccagggatg

SEQ ID NO: 2755806 - DNA, 25 bp, Homo sapien
cttggccggatgctgtttgaagtgt

SEQ ID NO: 2755807 - DNA, 25 bp, Homo sapien
ctgtaaactgggaataactggcatt

SEQ ID NO: 2755808 - DNA, 25 bp, Homo sapien
cactctacagacattgccaggtctg

SEQ ID NO: 2755809 - DNA, 25 bp, Homo sapien
tgcaaatccacggtgcttggccgga

SEQ ID NO: 2755810 - DNA, 25 bp, Homo sapien
gttgtcctgttttattactctcctg

SEQ ID NO: 2755811 - DNA, 25 bp, Homo sapien
acatgcggatttcagagaaagagac

SEQ ID NO: 2755812 - DNA, 25 bp, Homo sapien
tttctccattaattcatcccatcgt

SEQ ID NO: 2755813 - DNA, 25 bp, Homo sapien
catcccatcgttcttcaaacatgcg

SEQ ID NO: 2755814 - DNA, 25 bp, Homo sapien
aagtagacgtctgtgggctccttgg

SEQ ID NO: 2755815 - DNA, 25 bp, Homo sapien
gtggggtaagtagacgtctgtgggc

SEQ ID NO: 2755816 - DNA, 25 bp, Homo sapien
taagtagacgtctgtgggctccttg

SEQ ID NO: 2755817 - DNA, 25 bp, Homo sapien
gggtaagtagacgtctgtgggctcc

SEQ ID NO: 2755818 - DNA, 25 bp, Homo sapien
tcaatggagtcttcataaagcacat

SEQ ID NO: 2755819 - DNA, 25 bp, Homo sapien
tctttgaggatttccctgatgcata

SEQ ID NO: 2755820 - DNA, 25 bp, Homo sapien
aagcactgggcactgctagtcagcc

SEQ ID NO: 2755821 - DNA, 25 bp, Homo sapien
gattagctgagactatctgtaccca

SEQ ID NO: 2755822 - DNA, 25 bp, Homo sapien
ggtggtcagaatggctgatggtgcc

SEQ ID NO: 2755823 - DNA, 25 bp, Homo sapien
gatggtgcctgatctccctgcttga

SEQ ID NO: 2755824 - DNA, 25 bp, Homo sapien
tgcctgatctccctgcttgagctgc

SEQ ID NO: 2755825 - DNA, 25 bp, Homo sapien
tttccctaatactggggtggtcaga

SEQ ID NO: 2755826 - DNA, 25 bp, Homo sapien
ttctcttctggtagcctctcctcta

SEQ ID NO: 2755827 - DNA, 25 bp, Homo sapien
cctccttctcttctggtagcctctc

SEQ ID NO: 2755828 - DNA, 25 bp, Homo sapien
ctcctccttctcttctggtagcctc

SEQ ID NO: 2755829 - DNA, 25 bp, Homo sapien
tccttctcttctggtagcctctcct

SEQ ID NO: 2755830 - DNA, 25 bp, Homo sapien
tgcttgttaaggtcaaattcccagg

SEQ ID NO: 2755831 - DNA, 25 bp, Homo sapien
actccgaagtatgccagaaaggtgg

SEQ ID NO: 2755832 - DNA, 25 bp, Homo sapien
gaaggagagagacttcattgcttgt

SEQ ID NO: 2755833 - DNA, 25 bp, Homo sapien
gagggaagtcccaacagatagaagg

SEQ ID NO: 2755834 - DNA, 25 bp, Homo sapien
gaaggaagcattcagacagaaagtt

SEQ ID NO: 2755835 - DNA, 25 bp, Homo sapien
gggagtgcaccaaccctgagggaca

SEQ ID NO: 2755836 - DNA, 25 bp, Homo sapien
caccagatgagtagggcaggaggct

SEQ ID NO: 2755837 - DNA, 25 bp, Homo sapien
ttttgcatgccaccacaggaggaca

SEQ ID NO: 2755838 - DNA, 25 bp, Homo sapien
ttgtactgtactgggctggagatgg

SEQ ID NO: 2755839 - DNA, 25 bp, Homo sapien
gggcttgtactgtactgggctggag

SEQ ID NO: 2755840 - DNA, 25 bp, Homo sapien
gtactgtactgggctggagatggtg

SEQ ID NO: 2755841 - DNA, 25 bp, Homo sapien
gcttgtactgtactgggctggagat

SEQ ID NO: 2755842 - DNA, 25 bp, Homo sapien
aatttgggcagtgcagctatccata

SEQ ID NO: 2755843 - DNA, 25 bp, Homo sapien
aattcctttgtcctaattcagtgtg

SEQ ID NO: 2755844 - DNA, 25 bp, Homo sapien
agaacaaacagcaagttcagttaaa

SEQ ID NO: 2755845 - DNA, 25 bp, Homo sapien
ttcagtgtgatcttaaatttgggca

SEQ ID NO: 2755846 - DNA, 25 bp, Homo sapien
gaagatagaagttcacgctgccacc

SEQ ID NO: 2755847 - DNA, 25 bp, Homo sapien
ttagagtagaaaccacatgaagcct

SEQ ID NO: 2755848 - DNA, 25 bp, Homo sapien
gaggttgctgtcacccactctcagt

SEQ ID NO: 2755849 - DNA, 25 bp, Homo sapien
caatctgctcaggagtgcccgtgtc

SEQ ID NO: 2755850 - DNA, 25 bp, Homo sapien
tctgcctggtgtcacactaaacaca

SEQ ID NO: 2755851 - DNA, 25 bp, Homo sapien
actaaacacaataggatggctgtgg

SEQ ID NO: 2755852 - DNA, 25 bp, Homo sapien
cacactaaacacaataggatggctg

SEQ ID NO: 2755853 - DNA, 25 bp, Homo sapien
tgtcacactaaacacaataggatgg

SEQ ID NO: 2755854 - DNA, 25 bp, Homo sapien
catcatgttggaaggaccaagagtc

SEQ ID NO: 2755855 - DNA, 25 bp, Homo sapien
aaggaccaagagtcacagggttgaa

SEQ ID NO: 2755856 - DNA, 25 bp, Homo sapien
ggagcaacaccagaatgcctgcctc

SEQ ID NO: 2755857 - DNA, 25 bp, Homo sapien
gcatgtagccaatgctgactcttcc

SEQ ID NO: 2755858 - DNA, 25 bp, Homo sapien
atccaggagctcaaacaatgtacca

SEQ ID NO: 2755859 - DNA, 25 bp, Homo sapien
aagggctgaagggactaggccactc

SEQ ID NO: 2755860 - DNA, 25 bp, Homo sapien
tgaccaaaggctgcagaagtccctg

SEQ ID NO: 2755861 - DNA, 25 bp, Homo sapien
gtgtccagtgaaggcccactctctg

SEQ ID NO: 2755862 - DNA, 25 bp, Homo sapien
tccacttccccttgcaacttccttg

SEQ ID NO: 2755863 - DNA, 25 bp, Homo sapien
taaagaggatcaaatccataatttc

SEQ ID NO: 2755864 - DNA, 25 bp, Homo sapien
tccccttgcaacttccttgtggact

SEQ ID NO: 2755865 - DNA, 25 bp, Homo sapien
tgcaacttccttgtggacttgtgaa

SEQ ID NO: 2755866 - DNA, 25 bp, Homo sapien
tctgagtcccaatcaccaagccttc

SEQ ID NO: 2755867 - DNA, 25 bp, Homo sapien
tatgtagaatgactgaattcgtgga

SEQ ID NO: 2755868 - DNA, 25 bp, Homo sapien
gacctgaggctcctactgtcctgga

SEQ ID NO: 2755869 - DNA, 25 bp, Homo sapien
tgccaaaacttgtcccctcccaaca

SEQ ID NO: 2755870 - DNA, 25 bp, Homo sapien
ggactgcagaattctccttggcagg

SEQ ID NO: 2755871 - DNA, 25 bp, Homo sapien
ctccagggatgaggcgggaaagctg

SEQ ID NO: 2755872 - DNA, 25 bp, Homo sapien
gggccagggactgcagaattctcct

SEQ ID NO: 2755873 - DNA, 25 bp, Homo sapien
agctgggccagggactgcagaattc

SEQ ID NO: 2755874 - DNA, 25 bp, Homo sapien
tgcgacagacgagagcatgtgtccg

SEQ ID NO: 2755875 - DNA, 25 bp, Homo sapien
cacaggggctagttggtaactgcca

SEQ ID NO: 2755876 - DNA, 25 bp, Homo sapien
tggagcctgcgacagacgagagcat

SEQ ID NO: 2755877 - DNA, 25 bp, Homo sapien
taactgccaactagtaggttcctgg

SEQ ID NO: 2755878 - DNA, 25 bp, Homo sapien
gactgttcaagtttaactccagaga

SEQ ID NO: 2755879 - DNA, 25 bp, Homo sapien
cttgaagtaaagataaaagtgttca

SEQ ID NO: 2755880 - DNA, 25 bp, Homo sapien
agcctctcagggactggccggagat

SEQ ID NO: 2755881 - DNA, 25 bp, Homo sapien
gatatgtttatacttggatactccc

SEQ ID NO: 2755882 - DNA, 25 bp, Homo sapien
cagtgacggtggtcacagttgcaat

SEQ ID NO: 2755883 - DNA, 25 bp, Homo sapien
cacagttgcaataaagtctctctct

SEQ ID NO: 2755884 - DNA, 25 bp, Homo sapien
agtgacggtggtcacagttgcaata

SEQ ID NO: 2755885 - DNA, 25 bp, Homo sapien
ctctctctgaaaccaaagctagcat

SEQ ID NO: 2755886 - DNA, 25 bp, Homo sapien
gggaaaaacagctaacctggagaga

SEQ ID NO: 2755887 - DNA, 25 bp, Homo sapien
cgtggccacttcacatgatggcggg

SEQ ID NO: 2755888 - DNA, 25 bp, Homo sapien
tgatggcgggcctttaagagcacaa

SEQ ID NO: 2755889 - DNA, 25 bp, Homo sapien
gacatacagagaaccactactttgt

SEQ ID NO: 2755890 - DNA, 25 bp, Homo sapien
tctggatcccaaattgaagaaggca

SEQ ID NO: 2755891 - DNA, 25 bp, Homo sapien
acacgatccagttgcattcctgagt

SEQ ID NO: 2755892 - DNA, 25 bp, Homo sapien
tccagttgcattcctgagtctggat

SEQ ID NO: 2755893 - DNA, 25 bp, Homo sapien
ctggatcccaaattgaagaaggcat

SEQ ID NO: 2755894 - DNA, 25 bp, Homo sapien
ttaaatatgagcaagataggtaaat

SEQ ID NO: 2755895 - DNA, 25 bp, Homo sapien
tcagtagctgtcttctgtatggtac

SEQ ID NO: 2755896 - DNA, 25 bp, Homo sapien
tctcagtagctgtcttctgtatggt

SEQ ID NO: 2755897 - DNA, 25 bp, Homo sapien
cagaatctcagtagctgtcttctgt

SEQ ID NO: 2755898 - DNA, 25 bp, Homo sapien
gaatctcagtagctgtcttctgtat

SEQ ID NO: 2755899 - DNA, 25 bp, Homo sapien
aactgctaggtctggtgatggcctt

SEQ ID NO: 2755900 - DNA, 25 bp, Homo sapien
caactgctaggtctggtgatggcct

SEQ ID NO: 2755901 - DNA, 25 bp, Homo sapien
atgcaactgctaggtctggtgatgg

SEQ ID NO: 2755902 - DNA, 25 bp, Homo sapien
gcaactgctaggtctggtgatggcc

SEQ ID NO: 2755903 - DNA, 25 bp, Homo sapien
tgtcactgccactaaatcaaaatat

SEQ ID NO: 2755904 - DNA, 25 bp, Homo sapien
ttttatgtcactgccactaaatcaa

SEQ ID NO: 2755905 - DNA, 25 bp, Homo sapien
tatgtcactgccactaaatcaaaat

SEQ ID NO: 2755906 - DNA, 25 bp, Homo sapien
ctgccactaaatcaaaatatcctgt

SEQ ID NO: 2755907 - DNA, 25 bp, Homo sapien
tttacacaatagttatcccatatgc

SEQ ID NO: 2755908 - DNA, 25 bp, Homo sapien
tggcaatcacagtgcaggagtgaag

SEQ ID NO: 2755909 - DNA, 25 bp, Homo sapien
aaacattccagcttgcatgatctca

SEQ ID NO: 2755910 - DNA, 25 bp, Homo sapien
gttatcccatatgcctacttctgct

SEQ ID NO: 2755911 - DNA, 25 bp, Homo sapien
acctttggaataatgagcaacacat

SEQ ID NO: 2755912 - DNA, 25 bp, Homo sapien
acacagccctcatcaataggatttt

SEQ ID NO: 2755913 - DNA, 25 bp, Homo sapien
tggaaacacacagccctcatcaata

SEQ ID NO: 2755914 - DNA, 25 bp, Homo sapien
gccctcatcaataggatttttgaca

SEQ ID NO: 2755915 - DNA, 25 bp, Homo sapien
ctggaaacacacagccctcatcaat

SEQ ID NO: 2755916 - DNA, 25 bp, Homo sapien
ggagctgagtgagtgtgtacttatt

SEQ ID NO: 2755917 - DNA, 25 bp, Homo sapien
caagcagtcaggatttaggttttca

SEQ ID NO: 2755918 - DNA, 25 bp, Homo sapien
gaagcaagagtcagcccctcgatat

SEQ ID NO: 2755919 - DNA, 25 bp, Homo sapien
gaagagtgactatgtgttcttttgc

SEQ ID NO: 2755920 - DNA, 25 bp, Homo sapien
taatgtgacagagcgagtattgtta

SEQ ID NO: 2755921 - DNA, 25 bp, Homo sapien
tattttttaactcttatcttcaatg

SEQ ID NO: 2755922 - DNA, 25 bp, Homo sapien
caattccctcttgattaatagcaac

SEQ ID NO: 2755923 - DNA, 25 bp, Homo sapien
ctctcatttctgcagtcttgtaaaa

SEQ ID NO: 2755924 - DNA, 25 bp, Homo sapien
ttccctcttgattaatagcaacaaa

SEQ ID NO: 2755925 - DNA, 25 bp, Homo sapien
tttttcatattctaatgacacgtta

SEQ ID NO: 2755926 - DNA, 25 bp, Homo sapien
atgttttttcatattctaatgacac

SEQ ID NO: 2755927 - DNA, 25 bp, Homo sapien
gttttttcatattctaatgacacgt

SEQ ID NO: 2755928 - DNA, 25 bp, Homo sapien
ttttcatattctaatgacacgttac

SEQ ID NO: 2755929 - DNA, 25 bp, Homo sapien
acttgagaatgtatacatcctccac

SEQ ID NO: 2755930 - DNA, 25 bp, Homo sapien
tggtccaaaacaagccctctgatta

SEQ ID NO: 2755931 - DNA, 25 bp, Homo sapien
ggtccaaaacaagccctctgattaa

SEQ ID NO: 2755932 - DNA, 25 bp, Homo sapien
taggacattggaagttgtactatca

SEQ ID NO: 2755933 - DNA, 25 bp, Homo sapien
tcagtagcttttcaatgattaggac

SEQ ID NO: 2755934 - DNA, 25 bp, Homo sapien
tgattaggacattggaagttgtact

SEQ ID NO: 2755935 - DNA, 25 bp, Homo sapien
acattggaagttgtactatcaccag

SEQ ID NO: 2755936 - DNA, 25 bp, Homo sapien
cattgccatctttttagtaagcttg

SEQ ID NO: 2755937 - DNA, 25 bp, Homo sapien
ttcgtgaaacagcacattgccatct

SEQ ID NO: 2755938 - DNA, 25 bp, Homo sapien
taagcttgatgtctccagcgccaga

SEQ ID NO: 2755939 - DNA, 25 bp, Homo sapien
ttgccatctttttagtaagcttgat

SEQ ID NO: 2755940 - DNA, 25 bp, Homo sapien
tgatgttgaccgctagcgccacctc

SEQ ID NO: 2755941 - DNA, 25 bp, Homo sapien
catattcattgtgcccttgggcccc

SEQ ID NO: 2755942 - DNA, 25 bp, Homo sapien
tgcagaccctgcattatgctgatgt

SEQ ID NO: 2755943 - DNA, 25 bp, Homo sapien
gccacctccgttcgggccacctcag

SEQ ID NO: 2755944 - DNA, 25 bp, Homo sapien
tctagcttcattctgttaaggcaga

SEQ ID NO: 2755945 - DNA, 25 bp, Homo sapien
gagttttccagagtatgatattgca

SEQ ID NO: 2755946 - DNA, 25 bp, Homo sapien
ccttcagtggatctatgaggtcaaa

SEQ ID NO: 2755947 - DNA, 25 bp, Homo sapien
gatattgcagctgtttgaatacaga

SEQ ID NO: 2755948 - DNA, 25 bp, Homo sapien
tgagaccgttcttccaccactgatt

SEQ ID NO: 2755949 - DNA, 25 bp, Homo sapien
gaaggttttacgatgcattgttatc

SEQ ID NO: 2755950 - DNA, 25 bp, Homo sapien
acagttctgagaccgttcttccacc

SEQ ID NO: 2755951 - DNA, 25 bp, Homo sapien
ataacttaaaactgccacatgcaaa

SEQ ID NO: 2755952 - DNA, 25 bp, Homo sapien
acgaacagcaaagcgacccaaaggt

SEQ ID NO: 2755953 - DNA, 25 bp, Homo sapien
cccaccgcaactgtgtgtctcatat

SEQ ID NO: 2755954 - DNA, 25 bp, Homo sapien
atgacacccaccgcaactgtgtgtc

SEQ ID NO: 2755955 - DNA, 25 bp, Homo sapien
cacccaccgcaactgtgtgtctcat

SEQ ID NO: 2755956 - DNA, 25 bp, Homo sapien
gaatttagggccatcttccagcttt

SEQ ID NO: 2755957 - DNA, 25 bp, Homo sapien
aatttagggccatcttccagctttt

SEQ ID NO: 2755958 - DNA, 25 bp, Homo sapien
ttagggccatcttccagctttttac

SEQ ID NO: 2755959 - DNA, 25 bp, Homo sapien
cttcaagaatttagggccatcttcc

SEQ ID NO: 2755960 - DNA, 25 bp, Homo sapien
caatatgagccgtgtggcaatccaa

SEQ ID NO: 2755961 - DNA, 25 bp, Homo sapien
catagccagcgcttatttggcctgg

SEQ ID NO: 2755962 - DNA, 25 bp, Homo sapien
tatgagccgtgtggcaatccaatac

SEQ ID NO: 2755963 - DNA, 25 bp, Homo sapien
aatacaggggcatagccagcgctta

SEQ ID NO: 2755964 - DNA, 25 bp, Homo sapien
accagcaacgttgccacgacgaaca

SEQ ID NO: 2755965 - DNA, 25 bp, Homo sapien
gcaacgttgccacgacgaacatcct

SEQ ID NO: 2755966 - DNA, 25 bp, Homo sapien
tcaccagcaacgttgccacgacgaa

SEQ ID NO: 2755967 - DNA, 25 bp, Homo sapien
cagcaacgttgccacgacgaacatc

SEQ ID NO: 2755968 - DNA, 25 bp, Homo sapien
gagcatcagtgatagtcacatagta

SEQ ID NO: 2755969 - DNA, 25 bp, Homo sapien
gtgtcctggagcatcagtgatagtc

SEQ ID NO: 2755970 - DNA, 25 bp, Homo sapien
gacccagccatacttgaaagagccc

SEQ ID NO: 2755971 - DNA, 25 bp, Homo sapien
tcctggagcatcagtgatagtcaca

SEQ ID NO: 2755972 - DNA, 25 bp, Homo sapien
gtcgatgctactgcatttatagatc

SEQ ID NO: 2755973 - DNA, 25 bp, Homo sapien
gatgctactgcatttatagatcaga

SEQ ID NO: 2755974 - DNA, 25 bp, Homo sapien
acacctgtgttctggcggcaaaccc

SEQ ID NO: 2755975 - DNA, 25 bp, Homo sapien
tcttttgtcgatgctactgcattta

SEQ ID NO: 2755976 - DNA, 25 bp, Homo sapien
tagagtagttaatttctaagtgaaa

SEQ ID NO: 2755977 - DNA, 25 bp, Homo sapien
gggcattcaataatcaagaggcatt

SEQ ID NO: 2755978 - DNA, 25 bp, Homo sapien
gtgaaactgacaatagtttcttcca

SEQ ID NO: 2755979 - DNA, 25 bp, Homo sapien
aatacttgagtattcctagagtagt

SEQ ID NO: 2755980 - DNA, 25 bp, Homo sapien
ccctgcttctatctccaaatggcct

SEQ ID NO: 2755981 - DNA, 25 bp, Homo sapien
ctcctggcattctgcggcgtttctt

SEQ ID NO: 2755982 - DNA, 25 bp, Homo sapien
caaccttcttcggaaggcactttgg

SEQ ID NO: 2755983 - DNA, 25 bp, Homo sapien
gctcctggcattctgcggcgtttct

SEQ ID NO: 2755984 - DNA, 25 bp, Homo sapien
caagtaagttaatatcgtgagggtc

SEQ ID NO: 2755985 - DNA, 25 bp, Homo sapien
taagcgccacagttagcctaatatg

SEQ ID NO: 2755986 - DNA, 25 bp, Homo sapien
tcaatgaggattaagcataagcgcc

SEQ ID NO: 2755987 - DNA, 25 bp, Homo sapien
taagggcgccaaccattcgatttag

SEQ ID NO: 2755988 - DNA, 25 bp, Homo sapien
tcccagagatgaagcatttcgcctt

SEQ ID NO: 2755989 - DNA, 25 bp, Homo sapien
gactgcaactcaaccgcagaggcta

SEQ ID NO: 2755990 - DNA, 25 bp, Homo sapien
gggtttctgaactgcccaggccatt

SEQ ID NO: 2755991 - DNA, 25 bp, Homo sapien
gttgaactagttcgtcttctccgcc

SEQ ID NO: 2755992 - DNA, 25 bp, Homo sapien
tcgtttcccgctctcacaccctctg

SEQ ID NO: 2755993 - DNA, 25 bp, Homo sapien
gtccggtcgtttcccgctctcacac

SEQ ID NO: 2755994 - DNA, 25 bp, Homo sapien
ggtcgtttcccgctctcacaccctc

SEQ ID NO: 2755995 - DNA, 25 bp, Homo sapien
cgctcgtccggtcgtttcccgctct

SEQ ID NO: 2755996 - DNA, 25 bp, Homo sapien
gggacggagcaagcgcagcagccgc

SEQ ID NO: 2755997 - DNA, 25 bp, Homo sapien
tcagcccgcacacgtgtatgcgcat

SEQ ID NO: 2755998 - DNA, 25 bp, Homo sapien
agggaagcaagccagcggcgtccgg

SEQ ID NO: 2755999 - DNA, 25 bp, Homo sapien
ggcgtccggggacggagcaagcgca

SEQ ID NO: 2756000 - DNA, 25 bp, Homo sapien
ccacggtgacgcgcgcggaagcgct

SEQ ID NO: 2756001 - DNA, 25 bp, Homo sapien
tcctcgcgcagggtcagaggccgtg

SEQ ID NO: 2756002 - DNA, 25 bp, Homo sapien
gcgggccacggtgacgcgcgcggaa

SEQ ID NO: 2756003 - DNA, 25 bp, Homo sapien
gggccacggtgacgcgcgcggaagc

SEQ ID NO: 2756004 - DNA, 25 bp, Homo sapien
agagtggctgcattgaccccggata

SEQ ID NO: 2756005 - DNA, 25 bp, Homo sapien
gcctgggtgccggtactttcctgta

SEQ ID NO: 2756006 - DNA, 25 bp, Homo sapien
catgagccagtcgtggaaagtccac

SEQ ID NO: 2756007 - DNA, 25 bp, Homo sapien
ccccggatacctctggaagtcacat

SEQ ID NO: 2756008 - DNA, 25 bp, Homo sapien
cttggtggccatgaagtaagcagat

SEQ ID NO: 2756009 - DNA, 25 bp, Homo sapien
gatgtttgtgcacaggatctgagtg

SEQ ID NO: 2756010 - DNA, 25 bp, Homo sapien
taatggtggcctttagtaaaggctg

SEQ ID NO: 2756011 - DNA, 25 bp, Homo sapien
gaaattcagttgtggttaaagcaat

SEQ ID NO: 2756012 - DNA, 25 bp, Homo sapien
actatgaaagtgctttgcttaaatg

SEQ ID NO: 2756013 - DNA, 25 bp, Homo sapien
tgaaagtgctttgcttaaatgtctg

SEQ ID NO: 2756014 - DNA, 25 bp, Homo sapien
tgatactatgaaagtgctttgctta

SEQ ID NO: 2756015 - DNA, 25 bp, Homo sapien
tatgaaagtgctttgcttaaatgtc

SEQ ID NO: 2756016 - DNA, 25 bp, Homo sapien
agagaagaacgaacacatttggtca

SEQ ID NO: 2756017 - DNA, 25 bp, Homo sapien
gggctctaaggatgacatcacactt

SEQ ID NO: 2756018 - DNA, 25 bp, Homo sapien
gggctgaaagatgttaaattattga

SEQ ID NO: 2756019 - DNA, 25 bp, Homo sapien
tttaggcctttgatgtatggtcccc

SEQ ID NO: 2756020 - DNA, 25 bp, Homo sapien
agcacatggaaagtacctttttctg

SEQ ID NO: 2756021 - DNA, 25 bp, Homo sapien
aagcacatggaaagtacctttttct

SEQ ID NO: 2756022 - DNA, 25 bp, Homo sapien
catggaaagtacctttttctgatac

SEQ ID NO: 2756023 - DNA, 25 bp, Homo sapien
acatggaaagtacctttttctgata

SEQ ID NO: 2756024 - DNA, 25 bp, Homo sapien
catggcgtgtatcgtgatgtgtttg

SEQ ID NO: 2756025 - DNA, 25 bp, Homo sapien
gtgtatcgtgatgtgtttggcaggg

SEQ ID NO: 2756026 - DNA, 25 bp, Homo sapien
ccacatggcgtgtatcgtgatgtgt

SEQ ID NO: 2756027 - DNA, 25 bp, Homo sapien
gtcaggagttgtgggccgttcagga

SEQ ID NO: 2756028 - DNA, 25 bp, Homo sapien
ggcgatttgtaataactgatggtct

SEQ ID NO: 2756029 - DNA, 25 bp, Homo sapien
ttaaggtagctattgtcaggtttgc

SEQ ID NO: 2756030 - DNA, 25 bp, Homo sapien
tcaggtttgcttgtgacacgttaca

SEQ ID NO: 2756031 - DNA, 25 bp, Homo sapien
acacgttacaaaggtcggcaatggg

SEQ ID NO: 2756032 - DNA, 25 bp, Homo sapien
tccgctggtccgtggagacttggct

SEQ ID NO: 2756033 - DNA, 25 bp, Homo sapien
tggcaaagttgcatgtgacgtacat

SEQ ID NO: 2756034 - DNA, 25 bp, Homo sapien
agtgaggtgttactcctggacccct

SEQ ID NO: 2756035 - DNA, 25 bp, Homo sapien
cattgctgccggagtgaggtgttac

SEQ ID NO: 2756036 - DNA, 25 bp, Homo sapien
gcaggagctgcatagggttactctg

SEQ ID NO: 2756037 - DNA, 25 bp, Homo sapien
ctgattttgggatatcccgtgaata

SEQ ID NO: 2756038 - DNA, 25 bp, Homo sapien
caggagctgcatagggttactctga

SEQ ID NO: 2756039 - DNA, 25 bp, Homo sapien
gatatcccgtgaataatcacaagtg

SEQ ID NO: 2756040 - DNA, 25 bp, Homo sapien
tgctgtgactgtttggtccggttca

SEQ ID NO: 2756041 - DNA, 25 bp, Homo sapien
ggttcattactcagctcagacacca

SEQ ID NO: 2756042 - DNA, 25 bp, Homo sapien
cttcaagatagtctccaaggctgtg

SEQ ID NO: 2756043 - DNA, 25 bp, Homo sapien
cattggagattcatatgatgtggtc

SEQ ID NO: 2756044 - DNA, 25 bp, Homo sapien
gaagttcacctccatacggcgagtc

SEQ ID NO: 2756045 - DNA, 25 bp, Homo sapien
tgctgctgcaggtttgagtccaaaa

SEQ ID NO: 2756046 - DNA, 25 bp, Homo sapien
cggcgagtccgtggtgataattact

SEQ ID NO: 2756047 - DNA, 25 bp, Homo sapien
tcccagggctatgaagaggtttctc

SEQ ID NO: 2756048 - DNA, 25 bp, Homo sapien
tcataagcaaatacaactggatcaa

SEQ ID NO: 2756049 - DNA, 25 bp, Homo sapien
caactggatcaagcaatggaaactt

SEQ ID NO: 2756050 - DNA, 25 bp, Homo sapien
tggatcaagcaatggaaacttggac

SEQ ID NO: 2756051 - DNA, 25 bp, Homo sapien
tacaactggatcaagcaatggaaac

SEQ ID NO: 2756052 - DNA, 25 bp, Homo sapien
gaactattcacaaatgaggcggagg

SEQ ID NO: 2756053 - DNA, 25 bp, Homo sapien
ggacacatcaaatgacccaggacag

SEQ ID NO: 2756054 - DNA, 25 bp, Homo sapien
ggacagcttctgaggaaccacctca

SEQ ID NO: 2756055 - DNA, 25 bp, Homo sapien
tctgtgcttctgtttgctcgggaca

SEQ ID NO: 2756056 - DNA, 25 bp, Homo sapien
tcattgctgaggacgatcggcacta

SEQ ID NO: 2756057 - DNA, 25 bp, Homo sapien
tataacatccccgtcagagtgtgtg

SEQ ID NO: 2756058 - DNA, 25 bp, Homo sapien
tatgagagacgcatgctcctgacag

SEQ ID NO: 2756059 - DNA, 25 bp, Homo sapien
caaggactggccagtggtaacgctc

SEQ ID NO: 2756060 - DNA, 25 bp, Homo sapien
caaggaactgtaagaaggaggaact

SEQ ID NO: 2756061 - DNA, 25 bp, Homo sapien
aaagaaagccctcagtgtgtgtgaa

SEQ ID NO: 2756062 - DNA, 25 bp, Homo sapien
cccgatgtgctgttttacctaggag

SEQ ID NO: 2756063 - DNA, 25 bp, Homo sapien
gcaggtactcccctttgaaagccag

SEQ ID NO: 2756064 - DNA, 25 bp, Homo sapien
ttctcccagtaagcagaagtacttg

SEQ ID NO: 2756065 - DNA, 25 bp, Homo sapien
tgccaaaacatcgatcagtacaagg

SEQ ID NO: 2756066 - DNA, 25 bp, Homo sapien
tgcagcaatccacagtaatgttggt

SEQ ID NO: 2756067 - DNA, 25 bp, Homo sapien
ttgtaccccttataagaactgcagc

SEQ ID NO: 2756068 - DNA, 25 bp, Homo sapien
cagatgcggtcagttgcctggctcc

SEQ ID NO: 2756069 - DNA, 25 bp, Homo sapien
tgtgtccaaaatttcgcctgctctg

SEQ ID NO: 2756070 - DNA, 25 bp, Homo sapien
tacaccataagatgttccgcatgtg

SEQ ID NO: 2756071 - DNA, 25 bp, Homo sapien
tgtgaacctggcagcgctcatcttg

SEQ ID NO: 2756072 - DNA, 25 bp, Homo sapien
tgcccacccgtgttaagtgtcaggc

SEQ ID NO: 2756073 - DNA, 25 bp, Homo sapien
tagctcaggcgtaagctggtgccca

SEQ ID NO: 2756074 - DNA, 25 bp, Homo sapien
tgagtgtcgtcctctctggctgggt

SEQ ID NO: 2756075 - DNA, 25 bp, Homo sapien
tcaggagtccccgtttggtgtggcc

SEQ ID NO: 2756076 - DNA, 25 bp, Homo sapien
ctgggcttgtgaggactggattccc

SEQ ID NO: 2756077 - DNA, 25 bp, Homo sapien
gactggattcccagcgaaggtggaa

SEQ ID NO: 2756078 - DNA, 25 bp, Homo sapien
gtggaattgggcctgccagccattt

SEQ ID NO: 2756079 - DNA, 25 bp, Homo sapien
tggaattgggcctgccagccatttg

SEQ ID NO: 2756080 - DNA, 25 bp, Homo sapien
cagaccacacgtgaattgcaagcag

SEQ ID NO: 2756081 - DNA, 25 bp, Homo sapien
cacacgtgaattgcaagcagctgcc

SEQ ID NO: 2756082 - DNA, 25 bp, Homo sapien
acacgtgaattgcaagcagctgccc

SEQ ID NO: 2756083 - DNA, 25 bp, Homo sapien
gaccacacgtgaattgcaagcagct

SEQ ID NO: 2756084 - DNA, 25 bp, Homo sapien
cattgtaggatctcatacgacgttc

SEQ ID NO: 2756085 - DNA, 25 bp, Homo sapien
gccacagcccatgtagaggaatgac

SEQ ID NO: 2756086 - DNA, 25 bp, Homo sapien
tgttagatacataaagagcacttcc

SEQ ID NO: 2756087 - DNA, 25 bp, Homo sapien
gaggaatgactctaagcacacttaa

SEQ ID NO: 2756088 - DNA, 25 bp, Homo sapien
gaatcacgtgtgtggctcttgtcca

SEQ ID NO: 2756089 - DNA, 25 bp, Homo sapien
aatccaaggagcagcgtatttgcca

SEQ ID NO: 2756090 - DNA, 25 bp, Homo sapien
ccgtgggtccctgcatgttcatggc

SEQ ID NO: 2756091 - DNA, 25 bp, Homo sapien
tgcacggtgacatgaccatcgctgt

SEQ ID NO: 2756092 - DNA, 25 bp, Homo sapien
tgctattttgtggaacacacgcaca

SEQ ID NO: 2756093 - DNA, 25 bp, Homo sapien
aatgattattccaaccaggagagag

SEQ ID NO: 2756094 - DNA, 25 bp, Homo sapien
taagtttagaagtcagctcacctgc

SEQ ID NO: 2756095 - DNA, 25 bp, Homo sapien
cacctgcaaagctggtactaaccgg

SEQ ID NO: 2756096 - DNA, 25 bp, Homo sapien
cagtttcttagggaatcggctatcc

SEQ ID NO: 2756097 - DNA, 25 bp, Homo sapien
gacaaacccgatgcaggcagtcatg

SEQ ID NO: 2756098 - DNA, 25 bp, Homo sapien
taccgtgactttccaagcgcaagcc

SEQ ID NO: 2756099 - DNA, 25 bp, Homo sapien
gatgggactcgattagaagaaacgc

SEQ ID NO: 2756100 - DNA, 25 bp, Homo sapien
ccccagaagcatgaaagtcacacat

SEQ ID NO: 2756101 - DNA, 25 bp, Homo sapien
cccggcctgctttctcagtttggat

SEQ ID NO: 2756102 - DNA, 25 bp, Homo sapien
ttggatctttaagctccaaccccag

SEQ ID NO: 2756103 - DNA, 25 bp, Homo sapien
ccaaccccagaagcatgaaagtcac

SEQ ID NO: 2756104 - DNA, 25 bp, Homo sapien
aacggtagacacaaagggcctgcct

SEQ ID NO: 2756105 - DNA, 25 bp, Homo sapien
caactgcaggtatgttgagcacaca

SEQ ID NO: 2756106 - DNA, 25 bp, Homo sapien
gaggaagcacgccaaggacatgtcc

SEQ ID NO: 2756107 - DNA, 25 bp, Homo sapien
ggaacaatatgatcacacagcactg

SEQ ID NO: 2756108 - DNA, 25 bp, Homo sapien
ttgaaaatgcgaaaataggaaatgt

SEQ ID NO: 2756109 - DNA, 25 bp, Homo sapien
tttattgaaaatgcgaaaataggaa

SEQ ID NO: 2756110 - DNA, 25 bp, Homo sapien
attttattgaaaatgcgaaaatagg

SEQ ID NO: 2756111 - DNA, 25 bp, Homo sapien
gaaaatgcgaaaataggaaatgtat

SEQ ID NO: 2756112 - DNA, 25 bp, Homo sapien
tcaggaaaagtcatgcggcagggtc

SEQ ID NO: 2756113 - DNA, 25 bp, Homo sapien
tatgactaaggatagcagaaccagg

SEQ ID NO: 2756114 - DNA, 25 bp, Homo sapien
tttcagggaggaccacatagtgact

SEQ ID NO: 2756115 - DNA, 25 bp, Homo sapien
ggatgctccatgtgactcgctctaa

SEQ ID NO: 2756116 - DNA, 25 bp, Homo sapien
tcctcagtgtgaacggggactccgg

SEQ ID NO: 2756117 - DNA, 25 bp, Homo sapien
aggtctccgttcctcagtgtgaacg

SEQ ID NO: 2756118 - DNA, 25 bp, Homo sapien
gttcctcagtgtgaacggggactcc

SEQ ID NO: 2756119 - DNA, 25 bp, Homo sapien
gtctccgttcctcagtgtgaacggg

SEQ ID NO: 2756120 - DNA, 25 bp, Homo sapien
cgtcaaccgtgaggcagctgtgtct

SEQ ID NO: 2756121 - DNA, 25 bp, Homo sapien
ctttggttccaagaggagattgtcc

SEQ ID NO: 2756122 - DNA, 25 bp, Homo sapien
tctttgtacggccatgtgactggga

SEQ ID NO: 2756123 - DNA, 25 bp, Homo sapien
actgggaagcaaatcaaaggaagcc

SEQ ID NO: 2756124 - DNA, 25 bp, Homo sapien
gaacaaaatacgatgggagagggaa

SEQ ID NO: 2756125 - DNA, 25 bp, Homo sapien
gctagagaattgacacgaaaccttt

SEQ ID NO: 2756126 - DNA, 25 bp, Homo sapien
gatgccgaagtgtcatcctgactga

SEQ ID NO: 2756127 - DNA, 25 bp, Homo sapien
tcaaggcctctttcattaccaaaac

SEQ ID NO: 2756128 - DNA, 25 bp, Homo sapien
gaggcatgtctgtcatggcagagtc

SEQ ID NO: 2756129 - DNA, 25 bp, Homo sapien
tgtcggaggcatgtctgtcatggca

SEQ ID NO: 2756130 - DNA, 25 bp, Homo sapien
cctcctctgtcggaggcatgtctgt

SEQ ID NO: 2756131 - DNA, 25 bp, Homo sapien
tgtctgtcatggcagagtcttcccc

SEQ ID NO: 2756132 - DNA, 25 bp, Homo sapien
cactgcacagcagaaccacgagcag

SEQ ID NO: 2756133 - DNA, 25 bp, Homo sapien
agcagaaccacgagcagggagacaa

SEQ ID NO: 2756134 - DNA, 25 bp, Homo sapien
agcagggagacaacaccggggtctt

SEQ ID NO: 2756135 - DNA, 25 bp, Homo sapien
cttgggggacccctcactgtaggct

SEQ ID NO: 2756136 - DNA, 25 bp, Homo sapien
tcttacaataaatggcctctcaggg

SEQ ID NO: 2756137 - DNA, 25 bp, Homo sapien
tactgcctgtcctagttcctggtca

SEQ ID NO: 2756138 - DNA, 25 bp, Homo sapien
ttccaccttgtacagcatccgtcag

SEQ ID NO: 2756139 - DNA, 25 bp, Homo sapien
ttgccattatcgacacaccaacagg

SEQ ID NO: 2756140 - DNA, 25 bp, Homo sapien
ttccagccaccctaagccacgagac

SEQ ID NO: 2756141 - DNA, 25 bp, Homo sapien
gaacgccaccatccaacctggtcag

SEQ ID NO: 2756142 - DNA, 25 bp, Homo sapien
agtgtcaccaaggatcccccactga

SEQ ID NO: 2756143 - DNA, 25 bp, Homo sapien
cccactgacgaacgccaccatccaa

SEQ ID NO: 2756144 - DNA, 25 bp, Homo sapien
gatggcgaccatggtggattctccc

SEQ ID NO: 2756145 - DNA, 25 bp, Homo sapien
atggtggattctcccacaaagcccg

SEQ ID NO: 2756146 - DNA, 25 bp, Homo sapien
ctgcttccggtagacatagcacgca

SEQ ID NO: 2756147 - DNA, 25 bp, Homo sapien
atagcacgcagcgatggcgaccatg

SEQ ID NO: 2756148 - DNA, 25 bp, Homo sapien
tgcagatgagaacacaaaggcaatt

SEQ ID NO: 2756149 - DNA, 25 bp, Homo sapien
gcagatgagaacacaaaggcaattt

SEQ ID NO: 2756150 - DNA, 25 bp, Homo sapien
ctgcagatgagaacacaaaggcaat

SEQ ID NO: 2756151 - DNA, 25 bp, Homo sapien
agatgagaacacaaaggcaatttgt

SEQ ID NO: 2756152 - DNA, 25 bp, Homo sapien
gacggctgagaccagcggcgttctc

SEQ ID NO: 2756153 - DNA, 25 bp, Homo sapien
gggccgcagctaataacctaatgtg

SEQ ID NO: 2756154 - DNA, 25 bp, Homo sapien
taaggccaagtcaaggcacaaccgt

SEQ ID NO: 2756155 - DNA, 25 bp, Homo sapien
gaaagtaagtgtagcctcgagacgg

SEQ ID NO: 2756156 - DNA, 25 bp, Homo sapien
cgatgaggacgatgatccgcagcac

SEQ ID NO: 2756157 - DNA, 25 bp, Homo sapien
tttcttcagtgtcatcagccacccg

SEQ ID NO: 2756158 - DNA, 25 bp, Homo sapien
acccggtgagatgcgccctcactgt

SEQ ID NO: 2756159 - DNA, 25 bp, Homo sapien
ccaggtagggtaggaccacgaggct

SEQ ID NO: 2756160 - DNA, 25 bp, Homo sapien
aggagcaaaggactcgtcagccgtg

SEQ ID NO: 2756161 - DNA, 25 bp, Homo sapien
gttgggaggagcaaaggactcgtca

SEQ ID NO: 2756162 - DNA, 25 bp, Homo sapien
gcaaaggactcgtcagccgtgcccg

SEQ ID NO: 2756163 - DNA, 25 bp, Homo sapien
gagcaaaggactcgtcagccgtgcc

SEQ ID NO: 2756164 - DNA, 25 bp, Homo sapien
cactgggacagcatcttccaggcag

SEQ ID NO: 2756165 - DNA, 25 bp, Homo sapien
ggcagcctagctgctcttgtccagt

SEQ ID NO: 2756166 - DNA, 25 bp, Homo sapien
ttctccactgggacagcatcttcca

SEQ ID NO: 2756167 - DNA, 25 bp, Homo sapien
cttggccagcctcgccctctgatca

SEQ ID NO: 2756168 - DNA, 25 bp, Homo sapien
aagtggcactctagtgtgatgctgc

SEQ ID NO: 2756169 - DNA, 25 bp, Homo sapien
cactctagtgtgatgctgcgtgagc

SEQ ID NO: 2756170 - DNA, 25 bp, Homo sapien
tcagagaaaagtggcactctagtgt

SEQ ID NO: 2756171 - DNA, 25 bp, Homo sapien
tgtgatgctgcgtgagcagaaaagc

SEQ ID NO: 2756172 - DNA, 25 bp, Homo sapien
tccaccgaggtcacttccctttctc

SEQ ID NO: 2756173 - DNA, 25 bp, Homo sapien
gcctgcctcttcactggatctctga

SEQ ID NO: 2756174 - DNA, 25 bp, Homo sapien
tgggccctcgttggtgtgctgccat

SEQ ID NO: 2756175 - DNA, 25 bp, Homo sapien
ttctccctcctaatggtgtgggccc

SEQ ID NO: 2756176 - DNA, 25 bp, Homo sapien
gaagatccgcaaaggaacaacacag

SEQ ID NO: 2756177 - DNA, 25 bp, Homo sapien
tccactccgatgatgtctatcaaga

SEQ ID NO: 2756178 - DNA, 25 bp, Homo sapien
tgcaaaggcaaagtccactccgatg

SEQ ID NO: 2756179 - DNA, 25 bp, Homo sapien
cagacacgttgggtgtccaaaacat

SEQ ID NO: 2756180 - DNA, 25 bp, Homo sapien
cttggagagttacgaaagagggaca

SEQ ID NO: 2756181 - DNA, 25 bp, Homo sapien
gaaaaagtgtaagcaggtgaaatga

SEQ ID NO: 2756182 - DNA, 25 bp, Homo sapien
gcagatcaggtgtggcacaatcctt

SEQ ID NO: 2756183 - DNA, 25 bp, Homo sapien
gtgggcatgctggtcccagatctgc

SEQ ID NO: 2756184 - DNA, 25 bp, Homo sapien
gcaagggttaaggagagtgccaaac

SEQ ID NO: 2756185 - DNA, 25 bp, Homo sapien
ccgttcagaaccagtgtgctttggg

SEQ ID NO: 2756186 - DNA, 25 bp, Homo sapien
agggttaaggagagtgccaaacagc

SEQ ID NO: 2756187 - DNA, 25 bp, Homo sapien
ggttaaggagagtgccaaacagctc

SEQ ID NO: 2756188 - DNA, 25 bp, Homo sapien
cctgtcatcttttcccactgcaaag

SEQ ID NO: 2756189 - DNA, 25 bp, Homo sapien
aatgccctggacaagtggccctgtc

SEQ ID NO: 2756190 - DNA, 25 bp, Homo sapien
tgaatgccctggacaagtggccctg

SEQ ID NO: 2756191 - DNA, 25 bp, Homo sapien
gccctggacaagtggccctgtcatc

SEQ ID NO: 2756192 - DNA, 25 bp, Homo sapien
tcaaagcatttggaaccgggatatg

SEQ ID NO: 2756193 - DNA, 25 bp, Homo sapien
aagcagccagttgtcttcatcagca

SEQ ID NO: 2756194 - DNA, 25 bp, Homo sapien
agagtgggccatgcatggtccccga

SEQ ID NO: 2756195 - DNA, 25 bp, Homo sapien
tcagcacgtgaactcagaaacatgc

SEQ ID NO: 2756196 - DNA, 25 bp, Homo sapien
tggaatatggcctttagcatccgcc

SEQ ID NO: 2756197 - DNA, 25 bp, Homo sapien
ttctaacatggaacgcagggccagc

SEQ ID NO: 2756198 - DNA, 25 bp, Homo sapien
tcggatggcaagttttactacaagc

SEQ ID NO: 2756199 - DNA, 25 bp, Homo sapien
ccgggcaaagtcctgtcggatggca

SEQ ID NO: 2756200 - DNA, 25 bp, Homo sapien
gaggagcccatcctgacctgcaagg

SEQ ID NO: 2756201 - DNA, 25 bp, Homo sapien
cacatggacagtaggtagaaatggg

SEQ ID NO: 2756202 - DNA, 25 bp, Homo sapien
gaaggccctctccactacacatgga

SEQ ID NO: 2756203 - DNA, 25 bp, Homo sapien
ctgcaaggtgcgtccaaaactggcc

SEQ ID NO: 2756204 - DNA, 25 bp, Homo sapien
tactgaaaccgtctgtgacctgcca

SEQ ID NO: 2756205 - DNA, 25 bp, Homo sapien
tgtgacctgccaccttgcaatggtg

SEQ ID NO: 2756206 - DNA, 25 bp, Homo sapien
tgtgccttccaagaagaggtggtca

SEQ ID NO: 2756207 - DNA, 25 bp, Homo sapien
gatgaggggcactgtaaatactgaa

SEQ ID NO: 2756208 - DNA, 25 bp, Homo sapien
ctccactgcctaggcgtttgatgat

SEQ ID NO: 2756209 - DNA, 25 bp, Homo sapien
caacgtggggagagacgagacacac

SEQ ID NO: 2756210 - DNA, 25 bp, Homo sapien
gatgatttcagcaatgcatacggcc

SEQ ID NO: 2756211 - DNA, 25 bp, Homo sapien
gagctgcgcgagtgtcacgtgaaca

SEQ ID NO: 2756212 - DNA, 25 bp, Homo sapien
tcgggagtgtctggactaagcgccc

SEQ ID NO: 2756213 - DNA, 25 bp, Homo sapien
taagcgccccgtcaggctgatgtct

SEQ ID NO: 2756214 - DNA, 25 bp, Homo sapien
ttctccacgttgatggcgcatgcgt

SEQ ID NO: 2756215 - DNA, 25 bp, Homo sapien
gaatggccggtcatcgggagtttca

SEQ ID NO: 2756216 - DNA, 25 bp, Homo sapien
cattgacctcggatacccttgcact

SEQ ID NO: 2756217 - DNA, 25 bp, Homo sapien
tcaaccggtggataaccaatttggc

SEQ ID NO: 2756218 - DNA, 25 bp, Homo sapien
cactctattgcatgaggccacgtgg

SEQ ID NO: 2756219 - DNA, 25 bp, Homo sapien
tcagctcgccaaaaatcaaccggtg

SEQ ID NO: 2756220 - DNA, 25 bp, Homo sapien
ttgcgcatagaaatacagacaggct

SEQ ID NO: 2756221 - DNA, 25 bp, Homo sapien
cgtgttgtttatttaaggttgcgca

SEQ ID NO: 2756222 - DNA, 25 bp, Homo sapien
gctgacacagtgtcacacacgcttg

SEQ ID NO: 2756223 - DNA, 25 bp, Homo sapien
ctgggatcccgcaggggctcaatgc

SEQ ID NO: 2756224 - DNA, 25 bp, Homo sapien
gggcctccttgaataacaatcgttc

SEQ ID NO: 2756225 - DNA, 25 bp, Homo sapien
tattcctagactcaagggcctcctt

SEQ ID NO: 2756226 - DNA, 25 bp, Homo sapien
tcagcaagacaagtgtactattcca

SEQ ID NO: 2756227 - DNA, 25 bp, Homo sapien
aatccagcatcacattacattgtgg

SEQ ID NO: 2756228 - DNA, 25 bp, Homo sapien
agagccatgcagacgaaggtgaact

SEQ ID NO: 2756229 - DNA, 25 bp, Homo sapien
gccatgcagacgaaggtgaacttct

SEQ ID NO: 2756230 - DNA, 25 bp, Homo sapien
tcttgatgtgggctgccgtgactgt

SEQ ID NO: 2756231 - DNA, 25 bp, Homo sapien
gtgttgctcgtgctcaccagtttgt

SEQ ID NO: 2756232 - DNA, 25 bp, Homo sapien
gaaaaccacagtcatgaatgggccc

SEQ ID NO: 2756233 - DNA, 25 bp, Homo sapien
aaccacagtcatgaatgggcccggc

SEQ ID NO: 2756234 - DNA, 25 bp, Homo sapien
gaatgggcccggcttatccttggct

SEQ ID NO: 2756235 - DNA, 25 bp, Homo sapien
tgggcccggcttatccttggctgaa

SEQ ID NO: 2756236 - DNA, 25 bp, Homo sapien
tcaagtgacagtttgccaggcggct

SEQ ID NO: 2756237 - DNA, 25 bp, Homo sapien
ccaggcggctgtcatgttgagtgtc

SEQ ID NO: 2756238 - DNA, 25 bp, Homo sapien
gtgtctctcgggcagctgtcaggtc

SEQ ID NO: 2756239 - DNA, 25 bp, Homo sapien
ctgatgtgtctgaattagaggtttc

SEQ ID NO: 2756240 - DNA, 25 bp, Homo sapien
ggatttccgtcaaccagccgtatgg

SEQ ID NO: 2756241 - DNA, 25 bp, Homo sapien
cgtatggcatgtgacccacagggta

SEQ ID NO: 2756242 - DNA, 25 bp, Homo sapien
gcaggatacacagcacggatttccg

SEQ ID NO: 2756243 - DNA, 25 bp, Homo sapien
tatgtggctgtcaaaatcgccactg

SEQ ID NO: 2756244 - DNA, 25 bp, Homo sapien
tgcaaagacggtttcaatccctccc

SEQ ID NO: 2756245 - DNA, 25 bp, Homo sapien
ccacaacaagatcaggtgagccagt

SEQ ID NO: 2756246 - DNA, 25 bp, Homo sapien
gaaaagaccatccattgctctgaga

SEQ ID NO: 2756247 - DNA, 25 bp, Homo sapien
gaaattataggaagtcggagctgtc

SEQ ID NO: 2756248 - DNA, 25 bp, Homo sapien
ggttgttgatggctccgtgctactc

SEQ ID NO: 2756249 - DNA, 25 bp, Homo sapien
tactctccttacaacccaactcact

SEQ ID NO: 2756250 - DNA, 25 bp, Homo sapien
ctaagcctccactccgtccttcagg

SEQ ID NO: 2756251 - DNA, 25 bp, Homo sapien
tggctccgtgctactctccttacaa

SEQ ID NO: 2756252 - DNA, 25 bp, Homo sapien
cgggaaacaaagaggttgacaatag

SEQ ID NO: 2756253 - DNA, 25 bp, Homo sapien
tgtgtggccagaattagagccaaag

SEQ ID NO: 2756254 - DNA, 25 bp, Homo sapien
taggccgactgattctctgtgtggc

SEQ ID NO: 2756255 - DNA, 25 bp, Homo sapien
gaattagagccaaaggccaccagaa

SEQ ID NO: 2756256 - DNA, 25 bp, Homo sapien
ctgtgttaagaaacgaagataaaag

SEQ ID NO: 2756257 - DNA, 25 bp, Homo sapien
ctgtcagggatgatgtcgtgaatgt

SEQ ID NO: 2756258 - DNA, 25 bp, Homo sapien
tacaaggagaggatcgggatgagca

SEQ ID NO: 2756259 - DNA, 25 bp, Homo sapien
gttcttgtagtagcccaggcacagg

SEQ ID NO: 2756260 - DNA, 25 bp, Homo sapien
ggtgcagcgcacaagtgcgcccatg

SEQ ID NO: 2756261 - DNA, 25 bp, Homo sapien
caatggtacagtctctaaatcaagc

SEQ ID NO: 2756262 - DNA, 25 bp, Homo sapien
aggagcgggtagtcaacagagcaaa

SEQ ID NO: 2756263 - DNA, 25 bp, Homo sapien
catgtaaaaaccaggactgcagcgg

SEQ ID NO: 2756264 - DNA, 25 bp, Homo sapien
gcctttgtctagagtcctcctggga

SEQ ID NO: 2756265 - DNA, 25 bp, Homo sapien
ttctcagaccgcgtggaaaggtagc

SEQ ID NO: 2756266 - DNA, 25 bp, Homo sapien
gccagggctcagagaattggaccca

SEQ ID NO: 2756267 - DNA, 25 bp, Homo sapien
gagattgtgccattcgacaagagcg

SEQ ID NO: 2756268 - DNA, 25 bp, Homo sapien
gcagtttagttcatctcccatagga

SEQ ID NO: 2756269 - DNA, 25 bp, Homo sapien
gacatctgagattgaggcacatccc

SEQ ID NO: 2756270 - DNA, 25 bp, Homo sapien
gaggcacatcccaccaggaaactgt

SEQ ID NO: 2756271 - DNA, 25 bp, Homo sapien
agagaatgccagcatgggtccatgc

SEQ ID NO: 2756272 - DNA, 25 bp, Homo sapien
tgagattgaggcacatcccaccagg

SEQ ID NO: 2756273 - DNA, 25 bp, Homo sapien
gggtctgagttattacagtcattac

SEQ ID NO: 2756274 - DNA, 25 bp, Homo sapien
tattacagtcattaccggtgctcac

SEQ ID NO: 2756275 - DNA, 25 bp, Homo sapien
gtgatgcagatcataatgagggctc

SEQ ID NO: 2756276 - DNA, 25 bp, Homo sapien
tgagggctctcatttgggtctgagt

SEQ ID NO: 2756277 - DNA, 25 bp, Homo sapien
tgccttcaagtttgggcaggatctg

SEQ ID NO: 2756278 - DNA, 25 bp, Homo sapien
gccttcaagtttgggcaggatctga

SEQ ID NO: 2756279 - DNA, 25 bp, Homo sapien
agtttgggcaggatctgacctgaca

SEQ ID NO: 2756280 - DNA, 25 bp, Homo sapien
gcaggatctgacctgacactttggg

SEQ ID NO: 2756281 - DNA, 25 bp, Homo sapien
gggagcagacgaaaagcccgaggaa

SEQ ID NO: 2756282 - DNA, 25 bp, Homo sapien
agcagacgaaaagcccgaggaacag

SEQ ID NO: 2756283 - DNA, 25 bp, Homo sapien
ctacgaggggagcagacgaaaagcc

SEQ ID NO: 2756284 - DNA, 25 bp, Homo sapien
tacgaggggagcagacgaaaagccc

SEQ ID NO: 2756285 - DNA, 25 bp, Homo sapien
gtctgaaagccaccatacaataagc

SEQ ID NO: 2756286 - DNA, 25 bp, Homo sapien
aatgaggcaagcagggtctattccc

SEQ ID NO: 2756287 - DNA, 25 bp, Homo sapien
tgtcaagattttgtacagcaacagc

SEQ ID NO: 2756288 - DNA, 25 bp, Homo sapien
tgtgggctggctttgttgtctgaaa

SEQ ID NO: 2756289 - DNA, 25 bp, Homo sapien
attcttctatgtgtgtagattccca

SEQ ID NO: 2756290 - DNA, 25 bp, Homo sapien
caggtccttaagaatctgcaattca

SEQ ID NO: 2756291 - DNA, 25 bp, Homo sapien
tcctggaattcaccgtataactgta

SEQ ID NO: 2756292 - DNA, 25 bp, Homo sapien
tgcaattcacttttactaacagtcc

SEQ ID NO: 2756293 - DNA, 25 bp, Homo sapien
ctcagaggaatgacacggacctgtc

SEQ ID NO: 2756294 - DNA, 25 bp, Homo sapien
aggaatgacacggacctgtccagga

SEQ ID NO: 2756295 - DNA, 25 bp, Homo sapien
cctcagaggaatgacacggacctgt

SEQ ID NO: 2756296 - DNA, 25 bp, Homo sapien
ggaatgacacggacctgtccaggaa

SEQ ID NO: 2756297 - DNA, 25 bp, Homo sapien
tagcagcgttagtcacaagaaccca

SEQ ID NO: 2756298 - DNA, 25 bp, Homo sapien
actctgatggtggtatagctgctac

SEQ ID NO: 2756299 - DNA, 25 bp, Homo sapien
gacaattggaacctgagtactctga

SEQ ID NO: 2756300 - DNA, 25 bp, Homo sapien
tagctgctacgaagatcagtctgct

SEQ ID NO: 2756301 - DNA, 25 bp, Homo sapien
aggaaggcccttctcgtcttgctcc

SEQ ID NO: 2756302 - DNA, 25 bp, Homo sapien
catgaaaggaaaggcggcgaggtac

SEQ ID NO: 2756303 - DNA, 25 bp, Homo sapien
gtcttgctccccaccgactcgtcca

SEQ ID NO: 2756304 - DNA, 25 bp, Homo sapien
gaaaggcggcgaggtacaggaaggc

SEQ ID NO: 2756305 - DNA, 25 bp, Homo sapien
gataatgtagtatcctaaatcacta

SEQ ID NO: 2756306 - DNA, 25 bp, Homo sapien
tattgataatgtagtatcctaaatc

SEQ ID NO: 2756307 - DNA, 25 bp, Homo sapien
atgtagtatcctaaatcactataag

SEQ ID NO: 2756308 - DNA, 25 bp, Homo sapien
cagtttattgataatgtagtatcct

SEQ ID NO: 2756309 - DNA, 25 bp, Homo sapien
ggtcacagccaatgaatgctctggg

SEQ ID NO: 2756310 - DNA, 25 bp, Homo sapien
gagtttgcttggtatcagcttgccc

SEQ ID NO: 2756311 - DNA, 25 bp, Homo sapien
gaaaagaatgcttggtggctaggtt

SEQ ID NO: 2756312 - DNA, 25 bp, Homo sapien
tcctattgctacacagtgaggtggt

SEQ ID NO: 2756313 - DNA, 25 bp, Homo sapien
tgtctggtccatcagcagatgcgct

SEQ ID NO: 2756314 - DNA, 25 bp, Homo sapien
aacgctttggctgaatgtctggtcc

SEQ ID NO: 2756315 - DNA, 25 bp, Homo sapien
gaaaatggctcaggtcaaatgtagc

SEQ ID NO: 2756316 - DNA, 25 bp, Homo sapien
caaacacactgtaaacggtctgggt

SEQ ID NO: 2756317 - DNA, 25 bp, Homo sapien
tgaaggctttatccccaccaagaaa

SEQ ID NO: 2756318 - DNA, 25 bp, Homo sapien
cgacggaagtcatgccctgaaggct

SEQ ID NO: 2756319 - DNA, 25 bp, Homo sapien
cagtcacgcgtcttaaacaatcagt

SEQ ID NO: 2756320 - DNA, 25 bp, Homo sapien
tggtttcagtagaggtaccactcaa

SEQ ID NO: 2756321 - DNA, 25 bp, Homo sapien
aatgttattcctagatgtaatcgcc

SEQ ID NO: 2756322 - DNA, 25 bp, Homo sapien
taatgacccagtacaatgacgcaca

SEQ ID NO: 2756323 - DNA, 25 bp, Homo sapien
gacgcacacatatctctaacgaaag

SEQ ID NO: 2756324 - DNA, 25 bp, Homo sapien
taagctaggagcacaagcgctttcc

SEQ ID NO: 2756325 - DNA, 25 bp, Homo sapien
caccaccatacacaggacggctttg

SEQ ID NO: 2756326 - DNA, 25 bp, Homo sapien
tgtgaaagacggcagcgatggcccc

SEQ ID NO: 2756327 - DNA, 25 bp, Homo sapien
aacttcatgagggagtacgccagcc

SEQ ID NO: 2756328 - DNA, 25 bp, Homo sapien
tcatgggacccgtgaagaacttcat

SEQ ID NO: 2756329 - DNA, 25 bp, Homo sapien
aacccacaagcattagaaatgtcat

SEQ ID NO: 2756330 - DNA, 25 bp, Homo sapien
caaatcagtaacagcagaccagtgg

SEQ ID NO: 2756331 - DNA, 25 bp, Homo sapien
gaagatgcggttgtaaaataccctg

SEQ ID NO: 2756332 - DNA, 25 bp, Homo sapien
aggccttggtgggatggtacttcca

SEQ ID NO: 2756333 - DNA, 25 bp, Homo sapien
gagagacgctcttaggcactgcagg

SEQ ID NO: 2756334 - DNA, 25 bp, Homo sapien
acaaattttccctgatggaatacat

SEQ ID NO: 2756335 - DNA, 25 bp, Homo sapien
caaattttccctgatggaatacatt

SEQ ID NO: 2756336 - DNA, 25 bp, Homo sapien
ttccctgatggaatacattaacacc

SEQ ID NO: 2756337 - DNA, 25 bp, Homo sapien
attttccctgatggaatacattaac

SEQ ID NO: 2756338 - DNA, 25 bp, Homo sapien
cacagggtttaaagccatgcagact

SEQ ID NO: 2756339 - DNA, 25 bp, Homo sapien
ttgccaaggcgacatcgtaaacact

SEQ ID NO: 2756340 - DNA, 25 bp, Homo sapien
taagcgctgagtggccttggctaaa

SEQ ID NO: 2756341 - DNA, 25 bp, Homo sapien
gagagggcccaggtaatgatagctc

SEQ ID NO: 2756342 - DNA, 25 bp, Homo sapien
agctgtagaactgtggcaaaatcac

SEQ ID NO: 2756343 - DNA, 25 bp, Homo sapien
ccaggtgcataaagagctggaggca

SEQ ID NO: 2756344 - DNA, 25 bp, Homo sapien
aggtagctgaacctgcagacgtgaa

SEQ ID NO: 2756345 - DNA, 25 bp, Homo sapien
gtagacaaggcagcccctctaaaga

SEQ ID NO: 2756346 - DNA, 25 bp, Homo sapien
gccattaaaggtctgggcagaggca

SEQ ID NO: 2756347 - DNA, 25 bp, Homo sapien
acccaggccagacaaggtgcggctt

SEQ ID NO: 2756348 - DNA, 25 bp, Homo sapien
caagcaggcaatgctgagatgattc

SEQ ID NO: 2756349 - DNA, 25 bp, Homo sapien
gctgccactggcctttgtgatagaa

SEQ ID NO: 2756350 - DNA, 25 bp, Homo sapien
aaggcgagtctctaaacattcatgg

SEQ ID NO: 2756351 - DNA, 25 bp, Homo sapien
cacttagcgatgtggaatggctgac

SEQ ID NO: 2756352 - DNA, 25 bp, Homo sapien
gaacctgatgatgactgctgagctt

SEQ ID NO: 2756353 - DNA, 25 bp, Homo sapien
tccagcatgaattaggcctcgaggc

SEQ ID NO: 2756354 - DNA, 25 bp, Homo sapien
ccatcatggttataaggccctgggc

SEQ ID NO: 2756355 - DNA, 25 bp, Homo sapien
tgagggcacatgcagcacccggcct

SEQ ID NO: 2756356 - DNA, 25 bp, Homo sapien
cccggccacagtaacagagtggtcc

SEQ ID NO: 2756357 - DNA, 25 bp, Homo sapien
agagtggtcccctagtctgattcct

SEQ ID NO: 2756358 - DNA, 25 bp, Homo sapien
tgcttttttgagattcacacgccta

SEQ ID NO: 2756359 - DNA, 25 bp, Homo sapien
ttttttgagattcacacgcctagcc

SEQ ID NO: 2756360 - DNA, 25 bp, Homo sapien
gcttttttgagattcacacgcctag

SEQ ID NO: 2756361 - DNA, 25 bp, Homo sapien
ttttgagattcacacgcctagccat

SEQ ID NO: 2756362 - DNA, 25 bp, Homo sapien
tgtgccgctgacagagaaccacgtt

SEQ ID NO: 2756363 - DNA, 25 bp, Homo sapien
tgcaagtcaggacgtgccaagggct

SEQ ID NO: 2756364 - DNA, 25 bp, Homo sapien
cactgtgaatgaacggtgcctggat

SEQ ID NO: 2756365 - DNA, 25 bp, Homo sapien
tgggccctgaccttgttatacacat

SEQ ID NO: 2756366 - DNA, 25 bp, Homo sapien
agaactctaagttatcaaggccaac

SEQ ID NO: 2756367 - DNA, 25 bp, Homo sapien
ctgcccttgttagaactctaagtta

SEQ ID NO: 2756368 - DNA, 25 bp, Homo sapien
tgttagaactctaagttatcaaggc

SEQ ID NO: 2756369 - DNA, 25 bp, Homo sapien
gcccttgttagaactctaagttatc

SEQ ID NO: 2756370 - DNA, 25 bp, Homo sapien
gcagaacggcttcctcttgtcttct

SEQ ID NO: 2756371 - DNA, 25 bp, Homo sapien
tggctgtgttgtcttcatcccgacg

SEQ ID NO: 2756372 - DNA, 25 bp, Homo sapien
gacgaaatgccagcagaacggcttc

SEQ ID NO: 2756373 - DNA, 25 bp, Homo sapien
tgtcttcatcccgacgaaatgccag

SEQ ID NO: 2756374 - DNA, 25 bp, Homo sapien
tcgagtcccattatactgggcaggg

SEQ ID NO: 2756375 - DNA, 25 bp, Homo sapien
ctgcaagcttgtgagtggaggattt

SEQ ID NO: 2756376 - DNA, 25 bp, Homo sapien
gatatgactgtgataggaaaggctg

SEQ ID NO: 2756377 - DNA, 25 bp, Homo sapien
tgtgagtggaggatttatgaagaac

SEQ ID NO: 2756378 - DNA, 25 bp, Homo sapien
tcagtcatagccaaagacctaaccc

SEQ ID NO: 2756379 - DNA, 25 bp, Homo sapien
cactcagtcatagccaaagacctaa

SEQ ID NO: 2756380 - DNA, 25 bp, Homo sapien
tgccactcagtcatagccaaagacc

SEQ ID NO: 2756381 - DNA, 25 bp, Homo sapien
gtcatagccaaagacctaaccccta

SEQ ID NO: 2756382 - DNA, 25 bp, Homo sapien
cagaggcagtgagaccaccggacac

SEQ ID NO: 2756383 - DNA, 25 bp, Homo sapien
tcagaggcagtgagaccaccggaca

SEQ ID NO: 2756384 - DNA, 25 bp, Homo sapien
tggtggctgcaaatctcaatggtgc

SEQ ID NO: 2756385 - DNA, 25 bp, Homo sapien
catttctctgccttgtttgctctct

SEQ ID NO: 2756386 - DNA, 25 bp, Homo sapien
gtgtggctgactattgaacaatgaa

SEQ ID NO: 2756387 - DNA, 25 bp, Homo sapien
aagtttgcaagtgacacctaatggc

SEQ ID NO: 2756388 - DNA, 25 bp, Homo sapien
aaacaggtcacccaaaatggagatg

SEQ ID NO: 2756389 - DNA, 25 bp, Homo sapien
ccaagaggaaactggtctacgtatg

SEQ ID NO: 2756390 - DNA, 25 bp, Homo sapien
tgttttgacttaactgaagaaacca

SEQ ID NO: 2756391 - DNA, 25 bp, Homo sapien
cgtatgaaaatgtgcatcctggaaa

SEQ ID NO: 2756392 - DNA, 25 bp, Homo sapien
caagaaatacactaacgagcaaaaa

SEQ ID NO: 2756393 - DNA, 25 bp, Homo sapien
tggctcagacacctacctcatttgg

SEQ ID NO: 2756394 - DNA, 25 bp, Homo sapien
gaatctatatgacttgaatctcccc

SEQ ID NO: 2756395 - DNA, 25 bp, Homo sapien
tcactctagcctttacttaaatgag

SEQ ID NO: 2756396 - DNA, 25 bp, Homo sapien
tcagtatttatacttcatggctcag

SEQ ID NO: 2756397 - DNA, 25 bp, Homo sapien
gtcttccgatacagaacacatcact

SEQ ID NO: 2756398 - DNA, 25 bp, Homo sapien
ctagacattcggtctgtgatcagta

SEQ ID NO: 2756399 - DNA, 25 bp, Homo sapien
tagacattcggtctgtgatcagtac

SEQ ID NO: 2756400 - DNA, 25 bp, Homo sapien
tccccaggacaagtcgatgaaggct

SEQ ID NO: 2756401 - DNA, 25 bp, Homo sapien
tgttcatccgatgtgtgtgtcccca

SEQ ID NO: 2756402 - DNA, 25 bp, Homo sapien
tttgttcatccgatgtgtgtgtccc

SEQ ID NO: 2756403 - DNA, 25 bp, Homo sapien
gtgtccccaggacaagtcgatgaag

SEQ ID NO: 2756404 - DNA, 25 bp, Homo sapien
gaagccactgggcagttaggctggg

SEQ ID NO: 2756405 - DNA, 25 bp, Homo sapien
ccactgggcagttaggctgggccac

SEQ ID NO: 2756406 - DNA, 25 bp, Homo sapien
actgggcagttaggctgggccactc

SEQ ID NO: 2756407 - DNA, 25 bp, Homo sapien
tgggccactccagagcatgggtcat

SEQ ID NO: 2756408 - DNA, 25 bp, Homo sapien
tgtattccttgttgatcactcattc

SEQ ID NO: 2756409 - DNA, 25 bp, Homo sapien
attccttgttgatcactcattcttc

SEQ ID NO: 2756410 - DNA, 25 bp, Homo sapien
tttgtattccttgttgatcactcat

SEQ ID NO: 2756411 - DNA, 25 bp, Homo sapien
atattttgtattccttgttgatcac

SEQ ID NO: 2756412 - DNA, 25 bp, Homo sapien
tgttgtcaaaggctgcttccttgtc

SEQ ID NO: 2756413 - DNA, 25 bp, Homo sapien
tgtcaaaggctgcttccttgtcggc

SEQ ID NO: 2756414 - DNA, 25 bp, Homo sapien
cttgtcggccatggcgggcaggcga

SEQ ID NO: 2756415 - DNA, 25 bp, Homo sapien
tgtgttgtcaaaggctgcttccttg

SEQ ID NO: 2756416 - DNA, 25 bp, Homo sapien
cagtgcctatcctgatgattaccaa

SEQ ID NO: 2756417 - DNA, 25 bp, Homo sapien
gtctggaaccgaagccgcaatagct

SEQ ID NO: 2756418 - DNA, 25 bp, Homo sapien
caagctaatgctatgttactgaaag

SEQ ID NO: 2756419 - DNA, 25 bp, Homo sapien
gaaccctattagatgccttcttgat

SEQ ID NO: 2756420 - DNA, 25 bp, Homo sapien
tctctcatctactcctgcagtttca

SEQ ID NO: 2756421 - DNA, 25 bp, Homo sapien
agatctctcatctactcctgcagtt

SEQ ID NO: 2756422 - DNA, 25 bp, Homo sapien
catctactcctgcagtttcaattcc

SEQ ID NO: 2756423 - DNA, 25 bp, Homo sapien
tctcatctactcctgcagtttcaat

SEQ ID NO: 2756424 - DNA, 25 bp, Homo sapien
gaaacctggtctgcaatgtatgtcc

SEQ ID NO: 2756425 - DNA, 25 bp, Homo sapien
tatcatttggtcctgtgatcacctt

SEQ ID NO: 2756426 - DNA, 25 bp, Homo sapien
tctacagagacgaaggaacggaggc

SEQ ID NO: 2756427 - DNA, 25 bp, Homo sapien
gagaatttcattactcaccccaggt

SEQ ID NO: 2756428 - DNA, 25 bp, Homo sapien
ttcgactgtgcttcgaagtctgtgc

SEQ ID NO: 2756429 - DNA, 25 bp, Homo sapien
caggtgtcactcaaagggccatttc

SEQ ID NO: 2756430 - DNA, 25 bp, Homo sapien
ctcaaagggccatttcgactgtgct

SEQ ID NO: 2756431 - DNA, 25 bp, Homo sapien
aaagggccatttcgactgtgcttcg

SEQ ID NO: 2756432 - DNA, 25 bp, Homo sapien
caactcaggtgcaactgtgcaagaa

SEQ ID NO: 2756433 - DNA, 25 bp, Homo sapien
ttgtgcacataaggagacatggagc

SEQ ID NO: 2756434 - DNA, 25 bp, Homo sapien
tagaagcctactgcttagtcaggac

SEQ ID NO: 2756435 - DNA, 25 bp, Homo sapien
ggtacagactgcctaattcaatagc

SEQ ID NO: 2756436 - DNA, 25 bp, Homo sapien
ttctaatgggaaccggctgcggcag

SEQ ID NO: 2756437 - DNA, 25 bp, Homo sapien
gctgcggcagctcttctattacgtg

SEQ ID NO: 2756438 - DNA, 25 bp, Homo sapien
tattacgtgtgatctgtccttaggc

SEQ ID NO: 2756439 - DNA, 25 bp, Homo sapien
tccttaggcgtcatcagttttaact

SEQ ID NO: 2756440 - DNA, 25 bp, Homo sapien
cccaggctgccatgatattccttac

SEQ ID NO: 2756441 - DNA, 25 bp, Homo sapien
agccacggcacccaggctgccatga

SEQ ID NO: 2756442 - DNA, 25 bp, Homo sapien
ggcacccaggctgccatgatattcc

SEQ ID NO: 2756443 - DNA, 25 bp, Homo sapien
acggcacccaggctgccatgatatt

SEQ ID NO: 2756444 - DNA, 25 bp, Homo sapien
tgtcttcctaggtaccgatccttaa

SEQ ID NO: 2756445 - DNA, 25 bp, Homo sapien
gagtcagcacagtgagtttgtaagg

SEQ ID NO: 2756446 - DNA, 25 bp, Homo sapien
tgtaagggcttaagaattctgatac

SEQ ID NO: 2756447 - DNA, 25 bp, Homo sapien
aggtaccgatccttaacctgaactg

SEQ ID NO: 2756448 - DNA, 25 bp, Homo sapien
aagcacctgcactactgacacctgt

SEQ ID NO: 2756449 - DNA, 25 bp, Homo sapien
tgtaaatatcacagggctacaatcc

SEQ ID NO: 2756450 - DNA, 25 bp, Homo sapien
cactgggttcaagtcaaggaggtct

SEQ ID NO: 2756451 - DNA, 25 bp, Homo sapien
taagtctatatgtcagcaaagtggc

SEQ ID NO: 2756452 - DNA, 25 bp, Homo sapien
tcggtgtgaccctagagcgtgcact

SEQ ID NO: 2756453 - DNA, 25 bp, Homo sapien
cacaggaagttagtttctgggcgcc

SEQ ID NO: 2756454 - DNA, 25 bp, Homo sapien
tctgggcgccagctgaattcaagcc

SEQ ID NO: 2756455 - DNA, 25 bp, Homo sapien
cctttcaggctaaggccagggacca

SEQ ID NO: 2756456 - DNA, 25 bp, Homo sapien
tcttctatacctagactactgggtg

SEQ ID NO: 2756457 - DNA, 25 bp, Homo sapien
tatacctagactactgggtgggata

SEQ ID NO: 2756458 - DNA, 25 bp, Homo sapien
ttttacctcttctatacctagacta

SEQ ID NO: 2756459 - DNA, 25 bp, Homo sapien
ctgggtgggatagtgcattcataaa

SEQ ID NO: 2756460 - DNA, 25 bp, Homo sapien
gaagaattatgatttctacagggtg

SEQ ID NO: 2756461 - DNA, 25 bp, Homo sapien
ttatgaagaattatgatttctacag

SEQ ID NO: 2756462 - DNA, 25 bp, Homo sapien
tgaagaattatgatttctacagggt

SEQ ID NO: 2756463 - DNA, 25 bp, Homo sapien
cgtgacaaaatgctactttatgaag

SEQ ID NO: 2756464 - DNA, 25 bp, Homo sapien
ggggggctgaggcaggtatggatca

SEQ ID NO: 2756465 - DNA, 25 bp, Homo sapien
ctatctctactaaaaatacaaaaat

SEQ ID NO: 2756466 - DNA, 25 bp, Homo sapien
cctggccaacatggtgaacccctat

SEQ ID NO: 2756467 - DNA, 25 bp, Homo sapien
cctgaggtcaggagttcgagaccag

SEQ ID NO: 2756468 - DNA, 25 bp, Homo sapien
aggccaacggcccaacatcaagggt

SEQ ID NO: 2756469 - DNA, 25 bp, Homo sapien
cctgggcgacatgataaaacctgtc

SEQ ID NO: 2756470 - DNA, 25 bp, Homo sapien
ataagaacaagggagaatgacagcc

SEQ ID NO: 2756471 - DNA, 25 bp, Homo sapien
gataccaagggtaggaggattccca

SEQ ID NO: 2756472 - DNA, 25 bp, Homo sapien
tctccatgacattttatctccacag

SEQ ID NO: 2756473 - DNA, 25 bp, Homo sapien
tgcagagccctcagatagctgtgac

SEQ ID NO: 2756474 - DNA, 25 bp, Homo sapien
gatagctgtgactgcagacaaaaac

SEQ ID NO: 2756475 - DNA, 25 bp, Homo sapien
tagaggctgaaacaatctgttccca

SEQ ID NO: 2756476 - DNA, 25 bp, Homo sapien
tagtgccttagaggaacctgaaatc

SEQ ID NO: 2756477 - DNA, 25 bp, Homo sapien
gaggaacctgaaatctatcgaattg

SEQ ID NO: 2756478 - DNA, 25 bp, Homo sapien
taaacatatcttagtgccttagagg

SEQ ID NO: 2756479 - DNA, 25 bp, Homo sapien
cgaattgataaagatggcaatgagc

SEQ ID NO: 2756480 - DNA, 25 bp, Homo sapien
ggtagaatgaacacctcatatggga

SEQ ID NO: 2756481 - DNA, 25 bp, Homo sapien
gacagcgaaaaagaccaactagcag

SEQ ID NO: 2756482 - DNA, 25 bp, Homo sapien
ttttccagactaacgcaatgtatgc

SEQ ID NO: 2756483 - DNA, 25 bp, Homo sapien
gattacagattaaagggacagcgaa

SEQ ID NO: 2756484 - DNA, 25 bp, Homo sapien
gctctggcagttcgcacactccagt

SEQ ID NO: 2756485 - DNA, 25 bp, Homo sapien
ccactgtgcgctctggcagttcgca

SEQ ID NO: 2756486 - DNA, 25 bp, Homo sapien
tctttccgcgtgactctgacatact

SEQ ID NO: 2756487 - DNA, 25 bp, Homo sapien
ctaagcagctgagcggtcaccactg

SEQ ID NO: 2756488 - DNA, 25 bp, Homo sapien
cattcccaggtaggtgtaggagcca

SEQ ID NO: 2756489 - DNA, 25 bp, Homo sapien
gccatatctgtttggataaagaaga

SEQ ID NO: 2756490 - DNA, 25 bp, Homo sapien
tatctcagatcataccacgtgggca

SEQ ID NO: 2756491 - DNA, 25 bp, Homo sapien
gaaatggtaacttgattgccaacag

SEQ ID NO: 2756492 - DNA, 25 bp, Homo sapien
gaatgaccgaaggtggcgacagcat

SEQ ID NO: 2756493 - DNA, 25 bp, Homo sapien
accgaaggtggcgacagcatgagta

SEQ ID NO: 2756494 - DNA, 25 bp, Homo sapien
acacaggctggaatgaccgaaggtg

SEQ ID NO: 2756495 - DNA, 25 bp, Homo sapien
ccagtacacgcacccacacaggctg

SEQ ID NO: 2756496 - DNA, 25 bp, Homo sapien
caaagggatccatggtcaaatgctc

SEQ ID NO: 2756497 - DNA, 25 bp, Homo sapien
tgcacaccatccacaccagagaaat

SEQ ID NO: 2756498 - DNA, 25 bp, Homo sapien
tggtcaaatgctcaaggggggccct

SEQ ID NO: 2756499 - DNA, 25 bp, Homo sapien
tgattgccatggtgccaaagggatc

SEQ ID NO: 2756500 - DNA, 25 bp, Homo sapien
tttagagcacaggaggccaaaacga

SEQ ID NO: 2756501 - DNA, 25 bp, Homo sapien
cccagtctgggtatatggtccaggg

SEQ ID NO: 2756502 - DNA, 25 bp, Homo sapien
caaaacgagattctcgcctgctcct

SEQ ID NO: 2756503 - DNA, 25 bp, Homo sapien
tgttaggctctcagacatatcaatc

SEQ ID NO: 2756504 - DNA, 25 bp, Homo sapien
acctgacctaaatgcagagcacggc

SEQ ID NO: 2756505 - DNA, 25 bp, Homo sapien
gggctcgtgctgacctgcattcacc

SEQ ID NO: 2756506 - DNA, 25 bp, Homo sapien
tacaaacctgacctaaatgcagagc

SEQ ID NO: 2756507 - DNA, 25 bp, Homo sapien
ccacatacaaacctgacctaaatgc

SEQ ID NO: 2756508 - DNA, 25 bp, Homo sapien
tcaagactaccaaagctcaagccgt

SEQ ID NO: 2756509 - DNA, 25 bp, Homo sapien
gctcaagccgtcaactttgtctttc

SEQ ID NO: 2756510 - DNA, 25 bp, Homo sapien
gactgaaatcaagactaccaaagct

SEQ ID NO: 2756511 - DNA, 25 bp, Homo sapien
taccaaagctcaagccgtcaacttt

SEQ ID NO: 2756512 - DNA, 25 bp, Homo sapien
ccttcacagtcagtaggaaagtgga

SEQ ID NO: 2756513 - DNA, 25 bp, Homo sapien
cctggaaggtgactgcaagggcatc

SEQ ID NO: 2756514 - DNA, 25 bp, Homo sapien
tcaggttaaatgagctctccctggc

SEQ ID NO: 2756515 - DNA, 25 bp, Homo sapien
caggatatttctgagtggcgcctca

SEQ ID NO: 2756516 - DNA, 25 bp, Homo sapien
tgaacgacacactgaagtgtctctt

SEQ ID NO: 2756517 - DNA, 25 bp, Homo sapien
agtgtctcttccatttactgggtgc

SEQ ID NO: 2756518 - DNA, 25 bp, Homo sapien
tcaagcccaagtatgaacgacacac

SEQ ID NO: 2756519 - DNA, 25 bp, Homo sapien
tggacttggaacagatgaaggctgc

SEQ ID NO: 2756520 - DNA, 25 bp, Homo sapien
tgtgtgctcgctcttgagttattct

SEQ ID NO: 2756521 - DNA, 25 bp, Homo sapien
cagtgtgtgctcgctcttgagttat

SEQ ID NO: 2756522 - DNA, 25 bp, Homo sapien
gtgtgtgctcgctcttgagttattc

SEQ ID NO: 2756523 - DNA, 25 bp, Homo sapien
agtgtgtgctcgctcttgagttatt

SEQ ID NO: 2756524 - DNA, 25 bp, Homo sapien
tttttttggtgatggaatttcactc

SEQ ID NO: 2756525 - DNA, 25 bp, Homo sapien
ttttggtgatggaatttcactcttg

SEQ ID NO: 2756526 - DNA, 25 bp, Homo sapien
gctggagagtacaatggcgcaatct

SEQ ID NO: 2756527 - DNA, 25 bp, Homo sapien
ttgcccaggctggagagtacaatgg

SEQ ID NO: 2756528 - DNA, 25 bp, Homo sapien
gccgtaaaacttattttgatgcagc

SEQ ID NO: 2756529 - DNA, 25 bp, Homo sapien
cggccgtaaaacttattttgatgca

SEQ ID NO: 2756530 - DNA, 25 bp, Homo sapien
taaaacttattttgatgcagccaaa

SEQ ID NO: 2756531 - DNA, 25 bp, Homo sapien
cgtaaaacttattttgatgcagcca

SEQ ID NO: 2756532 - DNA, 25 bp, Homo sapien
tgaagggtgctgcatcaaaggcaaa

SEQ ID NO: 2756533 - DNA, 25 bp, Homo sapien
gggagccagtaaactactaaagaca

SEQ ID NO: 2756534 - DNA, 25 bp, Homo sapien
tacaggttgccttatgggatgaagg

SEQ ID NO: 2756535 - DNA, 25 bp, Homo sapien
gcaaaaagcgttgctcttaggccag

SEQ ID NO: 2756536 - DNA, 25 bp, Homo sapien
aatcgccggaacctgcatgttgcag

SEQ ID NO: 2756537 - DNA, 25 bp, Homo sapien
gcctggcgatggaccgagattctgt

SEQ ID NO: 2756538 - DNA, 25 bp, Homo sapien
caaagttttatactctgggccaggt

SEQ ID NO: 2756539 - DNA, 25 bp, Homo sapien
catggcttcttacgagacactagga

SEQ ID NO: 2756540 - DNA, 25 bp, Homo sapien
ggtcactcggatgtgcatcctcaaa

SEQ ID NO: 2756541 - DNA, 25 bp, Homo sapien
tgtgcatcctcaaaagaaggtggtc

SEQ ID NO: 2756542 - DNA, 25 bp, Homo sapien
tgtcacggtcactcggatgtgcatc

SEQ ID NO: 2756543 - DNA, 25 bp, Homo sapien
agacgctgcttgtcacggtcactcg

SEQ ID NO: 2756544 - DNA, 25 bp, Homo sapien
caaacttgactgttctgcatacctt

SEQ ID NO: 2756545 - DNA, 25 bp, Homo sapien
ggcattaagtatctgcacatcattg

SEQ ID NO: 2756546 - DNA, 25 bp, Homo sapien
ccagtggcttatggtgttaattgaa

SEQ ID NO: 2756547 - DNA, 25 bp, Homo sapien
gcctatattgtagcatacatcgtaa

SEQ ID NO: 2756548 - DNA, 25 bp, Homo sapien
cacaggtacgcatccgtcatttgac

SEQ ID NO: 2756549 - DNA, 25 bp, Homo sapien
cagtggttgactaggaagactgcaa

SEQ ID NO: 2756550 - DNA, 25 bp, Homo sapien
ggcactgtggatatatctgggctga

SEQ ID NO: 2756551 - DNA, 25 bp, Homo sapien
tgtacacttcacttagagcctaaag

SEQ ID NO: 2756552 - DNA, 25 bp, Homo sapien
gggctggctcgaatacagccatgct

SEQ ID NO: 2756553 - DNA, 25 bp, Homo sapien
ggggctggctcgaatacagccatgc

SEQ ID NO: 2756554 - DNA, 25 bp, Homo sapien
caggggctggctcgaatacagccat

SEQ ID NO: 2756555 - DNA, 25 bp, Homo sapien
aggggctggctcgaatacagccatg

SEQ ID NO: 2756556 - DNA, 25 bp, Homo sapien
taaaggaatggttctccacccatgc

SEQ ID NO: 2756557 - DNA, 25 bp, Homo sapien
caactgggcttgtctcatctaaaaa

SEQ ID NO: 2756558 - DNA, 25 bp, Homo sapien
ggttcccataaacggtatcacactg

SEQ ID NO: 2756559 - DNA, 25 bp, Homo sapien
tctggtatgctatatcaggagctta

SEQ ID NO: 2756560 - DNA, 25 bp, Homo sapien
tgtgagctatagcacctggcctttt

SEQ ID NO: 2756561 - DNA, 25 bp, Homo sapien
tgggaaaaggacctcaaatgacact

SEQ ID NO: 2756562 - DNA, 25 bp, Homo sapien
gacctgcgaggataaaccatctgga

SEQ ID NO: 2756563 - DNA, 25 bp, Homo sapien
gaactccatataaactcaagggctg

SEQ ID NO: 2756564 - DNA, 25 bp, Homo sapien
gtgataaaatatctccgccctccag

SEQ ID NO: 2756565 - DNA, 25 bp, Homo sapien
tctccgatttgtaactgcctcctga

SEQ ID NO: 2756566 - DNA, 25 bp, Homo sapien
tacttttacaatgagtactgcatca

SEQ ID NO: 2756567 - DNA, 25 bp, Homo sapien
aatccaaacagatattcgtcaaacg

SEQ ID NO: 2756568 - DNA, 25 bp, Homo sapien
ttcgtcaaacgaaggagtcacacaa

SEQ ID NO: 2756569 - DNA, 25 bp, Homo sapien
aacccttccataggtgaagcttcac

SEQ ID NO: 2756570 - DNA, 25 bp, Homo sapien
cattttaattagagctgaggtttac

SEQ ID NO: 2756571 - DNA, 25 bp, Homo sapien
tactgccgtgcactaaaaacccttc

SEQ ID NO: 2756572 - DNA, 25 bp, Homo sapien
gagctgaggtttacataatcgcaaa

SEQ ID NO: 2756573 - DNA, 25 bp, Homo sapien
tgtccgggcgtgtaaggccaaggca

SEQ ID NO: 2756574 - DNA, 25 bp, Homo sapien
tgcacacccgaccaaatgtttcagg

SEQ ID NO: 2756575 - DNA, 25 bp, Homo sapien
tcaggataaagagggactcggagca

SEQ ID NO: 2756576 - DNA, 25 bp, Homo sapien
gaaaagtcacccttgacaagctgca

SEQ ID NO: 2756577 - DNA, 25 bp, Homo sapien
ccaagaaccggatcaggggccagta

SEQ ID NO: 2756578 - DNA, 25 bp, Homo sapien
ctgctccccgaagtcgatggctatg

SEQ ID NO: 2756579 - DNA, 25 bp, Homo sapien
aagtcgatggctatgttggtgatgc

SEQ ID NO: 2756580 - DNA, 25 bp, Homo sapien
gcgtgagcgccgggaatttcaccat

SEQ ID NO: 2756581 - DNA, 25 bp, Homo sapien
cacaacaaagatctgccgggaaaaa

SEQ ID NO: 2756582 - DNA, 25 bp, Homo sapien
gggatccgcaagctcaagtccatcc

SEQ ID NO: 2756583 - DNA, 25 bp, Homo sapien
ctctagcaggggatccgcaagctca

SEQ ID NO: 2756584 - DNA, 25 bp, Homo sapien
ggcgccttctccgagcgcggctgct

SEQ ID NO: 2756585 - DNA, 25 bp, Homo sapien
aaatgacaccaccacgagctgactt

SEQ ID NO: 2756586 - DNA, 25 bp, Homo sapien
tcttgccagggcaactgtgtaatct

SEQ ID NO: 2756587 - DNA, 25 bp, Homo sapien
cagagcacagatatatactgtatgc

SEQ ID NO: 2756588 - DNA, 25 bp, Homo sapien
ggtggcactgtgtattggtaactac

SEQ ID NO: 2756589 - DNA, 25 bp, Homo sapien
gcattgtggtctgtacggagaaact

SEQ ID NO: 2756590 - DNA, 25 bp, Homo sapien
tattatccttgccacctattcaaaa

SEQ ID NO: 2756591 - DNA, 25 bp, Homo sapien
tccaccatctaaaggagatactact

SEQ ID NO: 2756592 - DNA, 25 bp, Homo sapien
gctgtctgggactaaagcattggca

SEQ ID NO: 2756593 - DNA, 25 bp, Homo sapien
ctttcatgtcttctgcaggatgttt

SEQ ID NO: 2756594 - DNA, 25 bp, Homo sapien
ccagagtcactgttgatttcgatgt

SEQ ID NO: 2756595 - DNA, 25 bp, Homo sapien
cactgttgatttcgatgttagggaa

SEQ ID NO: 2756596 - DNA, 25 bp, Homo sapien
gagtcactgttgatttcgatgttag

SEQ ID NO: 2756597 - DNA, 25 bp, Homo sapien
catccgagtggtgcaggtggtacca

SEQ ID NO: 2756598 - DNA, 25 bp, Homo sapien
aattggaagcagcaaggagtaggcc

SEQ ID NO: 2756599 - DNA, 25 bp, Homo sapien
ttaggaactgtggactgaacgaggc

SEQ ID NO: 2756600 - DNA, 25 bp, Homo sapien
ccttgcctgagggatgggaccctgt

SEQ ID NO: 2756601 - DNA, 25 bp, Homo sapien
ctaaattttggtccacggtccagtg

SEQ ID NO: 2756602 - DNA, 25 bp, Homo sapien
cctgatatccagagcaatggttcct

SEQ ID NO: 2756603 - DNA, 25 bp, Homo sapien
gagcaatggttcctaaattttggtc

SEQ ID NO: 2756604 - DNA, 25 bp, Homo sapien
aatgtcagtggctaatgccagcttt

SEQ ID NO: 2756605 - DNA, 25 bp, Homo sapien
caaaacttccacgatatcatcagaa

SEQ ID NO: 2756606 - DNA, 25 bp, Homo sapien
aaacttccacgatatcatcagaaat

SEQ ID NO: 2756607 - DNA, 25 bp, Homo sapien
aagcaaaacttccacgatatcatca

SEQ ID NO: 2756608 - DNA, 25 bp, Homo sapien
gcaaaacttccacgatatcatcaga

SEQ ID NO: 2756609 - DNA, 25 bp, Homo sapien
gggaagcgtcctcttcaccagactt

SEQ ID NO: 2756610 - DNA, 25 bp, Homo sapien
tctggagggccctcccgacaatgag

SEQ ID NO: 2756611 - DNA, 25 bp, Homo sapien
aatgagcaagaaacccaagtctggg

SEQ ID NO: 2756612 - DNA, 25 bp, Homo sapien
ttcaccagacttagcagtatcctcc

SEQ ID NO: 2756613 - DNA, 25 bp, Homo sapien
gatatcagtagtggagactgatgga

SEQ ID NO: 2756614 - DNA, 25 bp, Homo sapien
gaactggcctttctcagaccatctg

SEQ ID NO: 2756615 - DNA, 25 bp, Homo sapien
ggcatccgtgccatgaagagcaagg

SEQ ID NO: 2756616 - DNA, 25 bp, Homo sapien
gagactgatggaggcatccgtgcca

SEQ ID NO: 2756617 - DNA, 25 bp, Homo sapien
ggtagccgtgagtgggtccccactg

SEQ ID NO: 2756618 - DNA, 25 bp, Homo sapien
gtagccgtgagtgggtccccactgc

SEQ ID NO: 2756619 - DNA, 25 bp, Homo sapien
tagccgtgagtgggtccccactgct

SEQ ID NO: 2756620 - DNA, 25 bp, Homo sapien
tggtagccgtgagtgggtccccact

SEQ ID NO: 2756621 - DNA, 25 bp, Homo sapien
tacaaggcctaatcaccacctttgc

SEQ ID NO: 2756622 - DNA, 25 bp, Homo sapien
tgattacaaggcctaatcaccacct

SEQ ID NO: 2756623 - DNA, 25 bp, Homo sapien
cagtagggtcccttttgattacaag

SEQ ID NO: 2756624 - DNA, 25 bp, Homo sapien
aaagctaatggcttgtcgagagcag

SEQ ID NO: 2756625 - DNA, 25 bp, Homo sapien
caacgtggagtgctaatctgtgcat

SEQ ID NO: 2756626 - DNA, 25 bp, Homo sapien
ttcacaacgtggagtgctaatctgt

SEQ ID NO: 2756627 - DNA, 25 bp, Homo sapien
gctttcacaacgtggagtgctaatc

SEQ ID NO: 2756628 - DNA, 25 bp, Homo sapien
agcagctttcacaacgtggagtgct

SEQ ID NO: 2756629 - DNA, 25 bp, Homo sapien
catattaacttgagtggaaactaaa

SEQ ID NO: 2756630 - DNA, 25 bp, Homo sapien
acttcatattaacttgagtggaaac

SEQ ID NO: 2756631 - DNA, 25 bp, Homo sapien
tttccagcaggcgcgatggcggaag

SEQ ID NO: 2756632 - DNA, 25 bp, Homo sapien
gcggaagccccgtgacggtggccat

SEQ ID NO: 2756633 - DNA, 25 bp, Homo sapien
ttggaaatcagctccatagcgtgaa

SEQ ID NO: 2756634 - DNA, 25 bp, Homo sapien
ccttgtgcagtgctttggatctctg

SEQ ID NO: 2756635 - DNA, 25 bp, Homo sapien
aatcagctccatagcgtgaacagct

SEQ ID NO: 2756636 - DNA, 25 bp, Homo sapien
ccctgtggggcctactgtttggcct

SEQ ID NO: 2756637 - DNA, 25 bp, Homo sapien
tatgccacagatagaaatttccact

SEQ ID NO: 2756638 - DNA, 25 bp, Homo sapien
tggtgatgaccgtcccagagtttgt

SEQ ID NO: 2756639 - DNA, 25 bp, Homo sapien
tgtgaaatggcatctggaacacggg

SEQ ID NO: 2756640 - DNA, 25 bp, Homo sapien
cacgggtaagtcacaggaagctcaa

SEQ ID NO: 2756641 - DNA, 25 bp, Homo sapien
caggacacctatgagggagtgctct

SEQ ID NO: 2756642 - DNA, 25 bp, Homo sapien
acacctatgagggagtgctcttggc

SEQ ID NO: 2756643 - DNA, 25 bp, Homo sapien
gggccaggacacctatgagggagtg

SEQ ID NO: 2756644 - DNA, 25 bp, Homo sapien
gccaggacacctatgagggagtgct

SEQ ID NO: 2756645 - DNA, 25 bp, Homo sapien
acatttccacgccatgagctggctc

SEQ ID NO: 2756646 - DNA, 25 bp, Homo sapien
ggtgcctagtgttcctttcctggaa

SEQ ID NO: 2756647 - DNA, 25 bp, Homo sapien
ctctttgcatctcccgtgcctgttg

SEQ ID NO: 2756648 - DNA, 25 bp, Homo sapien
tttgcatctcccgtgcctgttgtcc

SEQ ID NO: 2756649 - DNA, 25 bp, Homo sapien
gtgctcattcaacataacagggatt

SEQ ID NO: 2756650 - DNA, 25 bp, Homo sapien
agtgctcattcaacataacagggat

SEQ ID NO: 2756651 - DNA, 25 bp, Homo sapien
ttagtgttatgtcctcgcctttgca

SEQ ID NO: 2756652 - DNA, 25 bp, Homo sapien
tctggctctatttctataggtgtgt

SEQ ID NO: 2756653 - DNA, 25 bp, Homo sapien
ttggttttagcatctctggctctat

SEQ ID NO: 2756654 - DNA, 25 bp, Homo sapien
tgactttgctgtccgattttcattc

SEQ ID NO: 2756655 - DNA, 25 bp, Homo sapien
tggaaacttggcgtcagtctgagca

SEQ ID NO: 2756656 - DNA, 25 bp, Homo sapien
tgatcctatctctctttccttggaa

SEQ ID NO: 2756657 - DNA, 25 bp, Homo sapien
ctcagtctgagtgatcctatctctc

SEQ ID NO: 2756658 - DNA, 25 bp, Homo sapien
ggaaacttggcgtcagtctgagcat

SEQ ID NO: 2756659 - DNA, 25 bp, Homo sapien
tttgagggtaatatgaacaactggg

SEQ ID NO: 2756660 - DNA, 25 bp, Homo sapien
ttgttcgcagactctgcagtactct

SEQ ID NO: 2756661 - DNA, 25 bp, Homo sapien
tccttggcttttgttcgcagactct

SEQ ID NO: 2756662 - DNA, 25 bp, Homo sapien
actctgtcggcttgatggatgtatt

SEQ ID NO: 2756663 - DNA, 25 bp, Homo sapien
ctctacagctttgcgaggagtttgt

SEQ ID NO: 2756664 - DNA, 25 bp, Homo sapien
gaaggagacatggtttcctgaagag

SEQ ID NO: 2756665 - DNA, 25 bp, Homo sapien
cgttcccgtaagtcttcctctacag

SEQ ID NO: 2756666 - DNA, 25 bp, Homo sapien
gatggtatcactggactggtctggt

SEQ ID NO: 2756667 - DNA, 25 bp, Homo sapien
acctgggttgaggatggagaggtcc

SEQ ID NO: 2756668 - DNA, 25 bp, Homo sapien
cctgggttgaggatggagaggtcca

SEQ ID NO: 2756669 - DNA, 25 bp, Homo sapien
ctgggttgaggatggagaggtccat

SEQ ID NO: 2756670 - DNA, 25 bp, Homo sapien
cttgattacacaacttttgctctga

SEQ ID NO: 2756671 - DNA, 25 bp, Homo sapien
tcagacttgattacacaacttttgc

SEQ ID NO: 2756672 - DNA, 25 bp, Homo sapien
gacttgattacacaacttttgctct

SEQ ID NO: 2756673 - DNA, 25 bp, Homo sapien
gccccaggttttaattcctgtgtca

SEQ ID NO: 2756674 - DNA, 25 bp, Homo sapien
cagacatcaatctgcggaaacagca

SEQ ID NO: 2756675 - DNA, 25 bp, Homo sapien
ccatgagggttctgagaagtgtgca

SEQ ID NO: 2756676 - DNA, 25 bp, Homo sapien
ccatggctattacaatatccccagc

SEQ ID NO: 2756677 - DNA, 25 bp, Homo sapien
cagaagctggtcctttttgctacca

SEQ ID NO: 2756678 - DNA, 25 bp, Homo sapien
ggaactctactccatacaccctggg

SEQ ID NO: 2756679 - DNA, 25 bp, Homo sapien
cccctttccatagagtggaactcta

SEQ ID NO: 2756680 - DNA, 25 bp, Homo sapien
ctactgatatagtgccccctttcca

SEQ ID NO: 2756681 - DNA, 25 bp, Homo sapien
ctctggggtgatcattgagcttgtc

SEQ ID NO: 2756682 - DNA, 25 bp, Homo sapien
cttggctatcattatagattcatgg

SEQ ID NO: 2756683 - DNA, 25 bp, Homo sapien
gtccagcttcaaagggcccttggca

SEQ ID NO: 2756684 - DNA, 25 bp, Homo sapien
ggtgtccagcttcaaagggcccttg

SEQ ID NO: 2756685 - DNA, 25 bp, Homo sapien
tatcattatagattcatggtgtcca

SEQ ID NO: 2756686 - DNA, 25 bp, Homo sapien
gctgcaaggcctgattacacagagt

SEQ ID NO: 2756687 - DNA, 25 bp, Homo sapien
aatcagaaaggctcaattggggtgc

SEQ ID NO: 2756688 - DNA, 25 bp, Homo sapien
tacacagagttattaatcacgtttc

SEQ ID NO: 2756689 - DNA, 25 bp, Homo sapien
ggcctgattacacagagttattaat

SEQ ID NO: 2756690 - DNA, 25 bp, Homo sapien
taatgttgattatatttatggcttt

SEQ ID NO: 2756691 - DNA, 25 bp, Homo sapien
ggtaatgttgattatatttatggct

SEQ ID NO: 2756692 - DNA, 25 bp, Homo sapien
aggtaatgttgattatatttatggc

SEQ ID NO: 2756693 - DNA, 25 bp, Homo sapien
taaggtaatgttgattatatttatg

SEQ ID NO: 2756694 - DNA, 25 bp, Homo sapien
gtggactcttttgtctcattatgcc

SEQ ID NO: 2756695 - DNA, 25 bp, Homo sapien
ggactcttttgtctcattatgccaa

SEQ ID NO: 2756696 - DNA, 25 bp, Homo sapien
gactcttttgtctcattatgccaat

SEQ ID NO: 2756697 - DNA, 25 bp, Homo sapien
cagtggactcttttgtctcattatg

SEQ ID NO: 2756698 - DNA, 25 bp, Homo sapien
ttctttgtgcaagggcggaatgagc

SEQ ID NO: 2756699 - DNA, 25 bp, Homo sapien
cagtcataggactggcggagacgtt

SEQ ID NO: 2756700 - DNA, 25 bp, Homo sapien
gacgttggctgacccacagaaagca

SEQ ID NO: 2756701 - DNA, 25 bp, Homo sapien
tcaatcctcagtgaaatgacagtca

SEQ ID NO: 2756702 - DNA, 25 bp, Homo sapien
ctgtttggtggaaaagcctcattca

SEQ ID NO: 2756703 - DNA, 25 bp, Homo sapien
gaaaagcctcattcaatagtgagac

SEQ ID NO: 2756704 - DNA, 25 bp, Homo sapien
caatagtgagacagaatcaagggcc

SEQ ID NO: 2756705 - DNA, 25 bp, Homo sapien
cattcaatagtgagacagaatcaag

SEQ ID NO: 2756706 - DNA, 25 bp, Homo sapien
tgcagagaatgatgcaggaggcttt

SEQ ID NO: 2756707 - DNA, 25 bp, Homo sapien
ccttgagtccaagtgggctgtctcc

SEQ ID NO: 2756708 - DNA, 25 bp, Homo sapien
tgccacagggaatgtccttgagtcc

SEQ ID NO: 2756709 - DNA, 25 bp, Homo sapien
gcttgggtgtctatatctgctgcat

SEQ ID NO: 2756710 - DNA, 25 bp, Homo sapien
taccagcgggttgacttgttctctc

SEQ ID NO: 2756711 - DNA, 25 bp, Homo sapien
taagaagacctctctggcacattga

SEQ ID NO: 2756712 - DNA, 25 bp, Homo sapien
gatggtagtcagtcaatataagcca

SEQ ID NO: 2756713 - DNA, 25 bp, Homo sapien
tctgattggcccatttaccagcggg

SEQ ID NO: 2756714 - DNA, 25 bp, Homo sapien
tgtgtccactgaaacatccagtgtg

SEQ ID NO: 2756715 - DNA, 25 bp, Homo sapien
tctaggtccacatgcttcttgaagg

SEQ ID NO: 2756716 - DNA, 25 bp, Homo sapien
catgaacatgcgctggcatgtaggt

SEQ ID NO: 2756717 - DNA, 25 bp, Homo sapien
gcagttctcagcatgaacatgcgct

SEQ ID NO: 2756718 - DNA, 25 bp, Homo sapien
aatttgcgtagcacaattgtgtttg

SEQ ID NO: 2756719 - DNA, 25 bp, Homo sapien
tttgtgcgtgcaatttttggagcct

SEQ ID NO: 2756720 - DNA, 25 bp, Homo sapien
tgtaaagcatttttgtgcgtgcaat

SEQ ID NO: 2756721 - DNA, 25 bp, Homo sapien
gaaaatgcaatttgcgtagcacaat

SEQ ID NO: 2756722 - DNA, 25 bp, Homo sapien
ctctccaggtgtcagggttgtttca

SEQ ID NO: 2756723 - DNA, 25 bp, Homo sapien
ctagcagaggttacaggtctgagag

SEQ ID NO: 2756724 - DNA, 25 bp, Homo sapien
tacaggtctgagagttggcctctcc

SEQ ID NO: 2756725 - DNA, 25 bp, Homo sapien
caggtctgagagttggcctctccag

SEQ ID NO: 2756726 - DNA, 25 bp, Homo sapien
cacttgtttacactccgaaggttga

SEQ ID NO: 2756727 - DNA, 25 bp, Homo sapien
cgaaggttgaccatattcatcacaa

SEQ ID NO: 2756728 - DNA, 25 bp, Homo sapien
aaggtgagactcagtgaaaggctcc

SEQ ID NO: 2756729 - DNA, 25 bp, Homo sapien
tgtagtttcttggaaggtttggcca

SEQ ID NO: 2756730 - DNA, 25 bp, Homo sapien
tcgtcatggactgtttctcccgcta

SEQ ID NO: 2756731 - DNA, 25 bp, Homo sapien
gcagaaatgttgtcctcgtcatgga

SEQ ID NO: 2756732 - DNA, 25 bp, Homo sapien
ccaaatcagattcatgtagtgcgtg

SEQ ID NO: 2756733 - DNA, 25 bp, Homo sapien
tctcccgctatgagataaactgttc

SEQ ID NO: 2756734 - DNA, 25 bp, Homo sapien
tacagccaacctttccatggagttc

SEQ ID NO: 2756735 - DNA, 25 bp, Homo sapien
aaccttcttcgactggcttccagga

SEQ ID NO: 2756736 - DNA, 25 bp, Homo sapien
tcacgtttagataggtgggaatcag

SEQ ID NO: 2756737 - DNA, 25 bp, Homo sapien
cagagaaggtccttatgactggact

SEQ ID NO: 2756738 - DNA, 25 bp, Homo sapien
caacgtgggacttttctgtgcacaa

SEQ ID NO: 2756739 - DNA, 25 bp, Homo sapien
aatgtactagggtgtcaacgtggga

SEQ ID NO: 2756740 - DNA, 25 bp, Homo sapien
cctcccagtgggtctaaatgtacta

SEQ ID NO: 2756741 - DNA, 25 bp, Homo sapien
caaaggccaccttctgacactctgg

SEQ ID NO: 2756742 - DNA, 25 bp, Homo sapien
ttatatctcggtctgttggttgctt

SEQ ID NO: 2756743 - DNA, 25 bp, Homo sapien
gatttactaacaccaagagtttctc

SEQ ID NO: 2756744 - DNA, 25 bp, Homo sapien
ctgtacttatatctcggtctgttgg

SEQ ID NO: 2756745 - DNA, 25 bp, Homo sapien
ttcaagctgatttactaacaccaag

SEQ ID NO: 2756746 - DNA, 25 bp, Homo sapien
agggcccaattcacctgtttggaag

SEQ ID NO: 2756747 - DNA, 25 bp, Homo sapien
cagggcccaattcacctgtttggaa

SEQ ID NO: 2756748 - DNA, 25 bp, Homo sapien
tcagggcccaattcacctgtttgga

SEQ ID NO: 2756749 - DNA, 25 bp, Homo sapien
aatgtgtactctgtccaagagaacc

SEQ ID NO: 2756750 - DNA, 25 bp, Homo sapien
cagaaatgtgtactctgtccaagag

SEQ ID NO: 2756751 - DNA, 25 bp, Homo sapien
ccagaaatgtgtactctgtccaaga

SEQ ID NO: 2756752 - DNA, 25 bp, Homo sapien
gaaatgtgtactctgtccaagagaa

SEQ ID NO: 2756753 - DNA, 25 bp, Homo sapien
gcggaagctttctgctggtttagag

SEQ ID NO: 2756754 - DNA, 25 bp, Homo sapien
cggaagctttctgctggtttagagt

SEQ ID NO: 2756755 - DNA, 25 bp, Homo sapien
tgcggaagctttctgctggtttaga

SEQ ID NO: 2756756 - DNA, 25 bp, Homo sapien
gaagctttctgctggtttagagtct

SEQ ID NO: 2756757 - DNA, 25 bp, Homo sapien
cagaaaatacttggttcccaggaca

SEQ ID NO: 2756758 - DNA, 25 bp, Homo sapien
gacagtctaagtctcaggtaagcga

SEQ ID NO: 2756759 - DNA, 25 bp, Homo sapien
caacctagtttgcatcagtggagac

SEQ ID NO: 2756760 - DNA, 25 bp, Homo sapien
gtttttagagctcccaactcaggaa

SEQ ID NO: 2756761 - DNA, 25 bp, Homo sapien
cccatcttgctctcattgtctagtg

SEQ ID NO: 2756762 - DNA, 25 bp, Homo sapien
gtttcaccacttgccgatgccaggg

SEQ ID NO: 2756763 - DNA, 25 bp, Homo sapien
cctctttccactatggggagctttt

SEQ ID NO: 2756764 - DNA, 25 bp, Homo sapien
gcaccattttgggtcccccatcttg

SEQ ID NO: 2756765 - DNA, 25 bp, Homo sapien
tcagatgaggttaggagcatcaaaa

SEQ ID NO: 2756766 - DNA, 25 bp, Homo sapien
agcatcaaaactagaagatgtcacc

SEQ ID NO: 2756767 - DNA, 25 bp, Homo sapien
agatgtcacccaagatgattcattg

SEQ ID NO: 2756768 - DNA, 25 bp, Homo sapien
gatgtcacccaagatgattcattga

SEQ ID NO: 2756769 - DNA, 25 bp, Homo sapien
catgcacctcagtgtcgtctgccat

SEQ ID NO: 2756770 - DNA, 25 bp, Homo sapien
tgtctaaaggagcatgcacctcagt

SEQ ID NO: 2756771 - DNA, 25 bp, Homo sapien
gtcatgaccatttatatcattcagc

SEQ ID NO: 2756772 - DNA, 25 bp, Homo sapien
gaccatttatatcattcagccactt

SEQ ID NO: 2756773 - DNA, 25 bp, Homo sapien
tgcctaagccctctattcctagtct

SEQ ID NO: 2756774 - DNA, 25 bp, Homo sapien
agctgtcaccggcatgttcaaatag

SEQ ID NO: 2756775 - DNA, 25 bp, Homo sapien
caaccctcctctaaacattctagag

SEQ ID NO: 2756776 - DNA, 25 bp, Homo sapien
tcctctaaacattctagagtggctt

SEQ ID NO: 2756777 - DNA, 25 bp, Homo sapien
gggctttccggagcccagtgtgatt

SEQ ID NO: 2756778 - DNA, 25 bp, Homo sapien
agtgtgatttgcacatctgatcttc

SEQ ID NO: 2756779 - DNA, 25 bp, Homo sapien
acagtctagggctttccggagccca

SEQ ID NO: 2756780 - DNA, 25 bp, Homo sapien
gagcccagtgtgatttgcacatctg

SEQ ID NO: 2756781 - DNA, 25 bp, Homo sapien
atcccagtatcagatgtgctgtgga

SEQ ID NO: 2756782 - DNA, 25 bp, Homo sapien
cgatcccagtatcagatgtgctgtg

SEQ ID NO: 2756783 - DNA, 25 bp, Homo sapien
gatcccagtatcagatgtgctgtgg

SEQ ID NO: 2756784 - DNA, 25 bp, Homo sapien
cctgagtccagggatttggtgtctt

SEQ ID NO: 2756785 - DNA, 25 bp, Homo sapien
cactcaatcatgtgaggcctgagtc

SEQ ID NO: 2756786 - DNA, 25 bp, Homo sapien
tgcattgtagggtctgacagcagag

SEQ ID NO: 2756787 - DNA, 25 bp, Homo sapien
agtatgtttggaatgtgtgatcctc

SEQ ID NO: 2756788 - DNA, 25 bp, Homo sapien
gagcaccgcttctcacaaagagact

SEQ ID NO: 2756789 - DNA, 25 bp, Homo sapien
acagctgtcagagcaagcgagcacc

SEQ ID NO: 2756790 - DNA, 25 bp, Homo sapien
aacacagctgtcagagcaagcgagc

SEQ ID NO: 2756791 - DNA, 25 bp, Homo sapien
tcagagcaagcgagcaccgcttctc

SEQ ID NO: 2756792 - DNA, 25 bp, Homo sapien
ctctattctcagtgactttgaaggc

SEQ ID NO: 2756793 - DNA, 25 bp, Homo sapien
gcaaatctagcccatgatccttcca

SEQ ID NO: 2756794 - DNA, 25 bp, Homo sapien
tgtgtcattgatgtgcagcattgca

SEQ ID NO: 2756795 - DNA, 25 bp, Homo sapien
cagcattgcaaatctagcccatgat

SEQ ID NO: 2756796 - DNA, 25 bp, Homo sapien
agtcaacgggatgcctttttctgtg

SEQ ID NO: 2756797 - DNA, 25 bp, Homo sapien
tctcgtgatttgagggtttaccctg

SEQ ID NO: 2756798 - DNA, 25 bp, Homo sapien
catctctcgtgatttgagggtttac

SEQ ID NO: 2756799 - DNA, 25 bp, Homo sapien
ttaccctgaaaagtcaacgggatgc

SEQ ID NO: 2756800 - DNA, 25 bp, Homo sapien
tgataaacgatgcccatctcttctt

SEQ ID NO: 2756801 - DNA, 25 bp, Homo sapien
cagctcctgataaacgatgcccatc

SEQ ID NO: 2756802 - DNA, 25 bp, Homo sapien
caccttcagctcctgataaacgatg

SEQ ID NO: 2756803 - DNA, 25 bp, Homo sapien
ttcttcctgtctatggagaaagcca

SEQ ID NO: 2756804 - DNA, 25 bp, Homo sapien
cacagggccattcttggaactgaca

SEQ ID NO: 2756805 - DNA, 25 bp, Homo sapien
tggtgaacttgtgagacacagggcc

SEQ ID NO: 2756806 - DNA, 25 bp, Homo sapien
taaaccagtataaaagaagggctgc

SEQ ID NO: 2756807 - DNA, 25 bp, Homo sapien
tgtatgtatctcagcgacaagccct

SEQ ID NO: 2756808 - DNA, 25 bp, Homo sapien
tgtgaagcggttccaaaaattagaa

SEQ ID NO: 2756809 - DNA, 25 bp, Homo sapien
tttccctcaagagactctctaaggg

SEQ ID NO: 2756810 - DNA, 25 bp, Homo sapien
gggaaagttgctgcaggttaattgt

SEQ ID NO: 2756811 - DNA, 25 bp, Homo sapien
cagagggtgttaaaggagacaaagt

SEQ ID NO: 2756812 - DNA, 25 bp, Homo sapien
tgcaaagggtttgcttagctgccag

SEQ ID NO: 2756813 - DNA, 25 bp, Homo sapien
aaagccaggatattgcaaagggttt

SEQ ID NO: 2756814 - DNA, 25 bp, Homo sapien
ggagaggagagtataaaagccagga

SEQ ID NO: 2756815 - DNA, 25 bp, Homo sapien
gccaggatattgcaaagggtttgct

SEQ ID NO: 2756816 - DNA, 25 bp, Homo sapien
tttccctgggctcatcaacaaattt

SEQ ID NO: 2756817 - DNA, 25 bp, Homo sapien
gtttccctgggctcatcaacaaatt

SEQ ID NO: 2756818 - DNA, 25 bp, Homo sapien
atttctcagtatcagggaaatccaa

SEQ ID NO: 2756819 - DNA, 25 bp, Homo sapien
gatacaagaccagatattgctgtgc

SEQ ID NO: 2756820 - DNA, 25 bp, Homo sapien
cttctggtgagcaaacaaccttgtc

SEQ ID NO: 2756821 - DNA, 25 bp, Homo sapien
ctttgagaggtgacctggagtggtg

SEQ ID NO: 2756822 - DNA, 25 bp, Homo sapien
tgaaggaccttctggtgagcaaaca

SEQ ID NO: 2756823 - DNA, 25 bp, Homo sapien
ctgtgaaccaagagtggcctctgga

SEQ ID NO: 2756824 - DNA, 25 bp, Homo sapien
actgtgaaccaagagtggcctctgg

SEQ ID NO: 2756825 - DNA, 25 bp, Homo sapien
ctggatgagtcacgtccagttcccc

SEQ ID NO: 2756826 - DNA, 25 bp, Homo sapien
gttccccagcttcacccaaagccca

SEQ ID NO: 2756827 - DNA, 25 bp, Homo sapien
gcacagcctcacagcgagtccttgt

SEQ ID NO: 2756828 - DNA, 25 bp, Homo sapien
cacagcgagtccttgtcgcctctcc

SEQ ID NO: 2756829 - DNA, 25 bp, Homo sapien
cccatcccccgggtagctgagggat

SEQ ID NO: 2756830 - DNA, 25 bp, Homo sapien
tcccatcccccgggtagctgaggga

SEQ ID NO: 2756831 - DNA, 25 bp, Homo sapien
gagagcttagcctctttcacctagg

SEQ ID NO: 2756832 - DNA, 25 bp, Homo sapien
cactgaatttttccatgagtgcaga

SEQ ID NO: 2756833 - DNA, 25 bp, Homo sapien
tattctaaagtggtcttagacctct

SEQ ID NO: 2756834 - DNA, 25 bp, Homo sapien
gatggcgtcccaggaaataaaccca

SEQ ID NO: 2756835 - DNA, 25 bp, Homo sapien
ggagaaacatgaaacgtggcccatt

SEQ ID NO: 2756836 - DNA, 25 bp, Homo sapien
aacatgaaacgtggcccatttgctg

SEQ ID NO: 2756837 - DNA, 25 bp, Homo sapien
cggaccacgaggcagggcaagtttc

SEQ ID NO: 2756838 - DNA, 25 bp, Homo sapien
ccatttgctggttccaaacggacca

SEQ ID NO: 2756839 - DNA, 25 bp, Homo sapien
ctgggaacagccaggtctgagcaaa

SEQ ID NO: 2756840 - DNA, 25 bp, Homo sapien
tgggaacagccaggtctgagcaaat

SEQ ID NO: 2756841 - DNA, 25 bp, Homo sapien
ggtactcccggtctgaaacttcatg

SEQ ID NO: 2756842 - DNA, 25 bp, Homo sapien
cagggctcagaggttatcacaatga

SEQ ID NO: 2756843 - DNA, 25 bp, Homo sapien
catgtgtaggtaagagacttgctgc

SEQ ID NO: 2756844 - DNA, 25 bp, Homo sapien
cttgctgcagccgtaatatcgcatt

SEQ ID NO: 2756845 - DNA, 25 bp, Homo sapien
agtgaataacctggttccattctcc

SEQ ID NO: 2756846 - DNA, 25 bp, Homo sapien
tcaaagcaccttgctggtttatatc

SEQ ID NO: 2756847 - DNA, 25 bp, Homo sapien
catttaacaagcgtcttgtcaaagc

SEQ ID NO: 2756848 - DNA, 25 bp, Homo sapien
tgtcaaagcaccttgctggtttata

SEQ ID NO: 2756849 - DNA, 25 bp, Homo sapien
ctggtgaaggatactgtgtgaaatc

SEQ ID NO: 2756850 - DNA, 25 bp, Homo sapien
tcatttctaaaagagcagtagtggc

SEQ ID NO: 2756851 - DNA, 25 bp, Homo sapien
caatgtgtaaccaaattctggtgaa

SEQ ID NO: 2756852 - DNA, 25 bp, Homo sapien
gcagtagtggctccccaatgtgtaa

SEQ ID NO: 2756853 - DNA, 25 bp, Homo sapien
aaatgaaagaataatagctctggta

SEQ ID NO: 2756854 - DNA, 25 bp, Homo sapien
tgtattgcggttgccaatatcatct

SEQ ID NO: 2756855 - DNA, 25 bp, Homo sapien
catcttgagtttcctcaaatgaaaa

SEQ ID NO: 2756856 - DNA, 25 bp, Homo sapien
gaaagaataatagctctggtatagt

SEQ ID NO: 2756857 - DNA, 25 bp, Homo sapien
tctctccgctaatgaagatcttctc

SEQ ID NO: 2756858 - DNA, 25 bp, Homo sapien
aatatctctccgctaatgaagatct

SEQ ID NO: 2756859 - DNA, 25 bp, Homo sapien
ctaatgaagatcttctctgggccaa

SEQ ID NO: 2756860 - DNA, 25 bp, Homo sapien
tccgctaatgaagatcttctctggg

SEQ ID NO: 2756861 - DNA, 25 bp, Homo sapien
tggtttcaaaagttgctaagccttg

SEQ ID NO: 2756862 - DNA, 25 bp, Homo sapien
caaaagttgctaagccttggcagcc

SEQ ID NO: 2756863 - DNA, 25 bp, Homo sapien
aacaagccaggggtccaagaacagc

SEQ ID NO: 2756864 - DNA, 25 bp, Homo sapien
taagccttggcagccttctaatatt

SEQ ID NO: 2756865 - DNA, 25 bp, Homo sapien
tgtgttaatggccaggtcaccattg

SEQ ID NO: 2756866 - DNA, 25 bp, Homo sapien
ggttgaaagtcagcgtcaaagcgca

SEQ ID NO: 2756867 - DNA, 25 bp, Homo sapien
caaagcgcagcatgtgttaatggcc

SEQ ID NO: 2756868 - DNA, 25 bp, Homo sapien
taatggccaggtcaccattgtgact

SEQ ID NO: 2756869 - DNA, 25 bp, Homo sapien
tttcttgtttatgtttatgcagatt

SEQ ID NO: 2756870 - DNA, 25 bp, Homo sapien
cttgtttatgtttatgcagattttc

SEQ ID NO: 2756871 - DNA, 25 bp, Homo sapien
tcaccccagactcctcatttgtttc

SEQ ID NO: 2756872 - DNA, 25 bp, Homo sapien
tatgtttatgcagattttccatcat

SEQ ID NO: 2756873 - DNA, 25 bp, Homo sapien
tcgctccgaagggttcgcgcgtagc

SEQ ID NO: 2756874 - DNA, 25 bp, Homo sapien
aggcgcctggcgctaacaaaagtcc

SEQ ID NO: 2756875 - DNA, 25 bp, Homo sapien
ctttaaaaggccgcgcatctccggg

SEQ ID NO: 2756876 - DNA, 25 bp, Homo sapien
ctccagctgtgattgacgctgggcg

SEQ ID NO: 2756877 - DNA, 25 bp, Homo sapien
tcctgggtaatgaaaaacaagcaca

SEQ ID NO: 2756878 - DNA, 25 bp, Homo sapien
aaagtgtagactgtttctggaactg

SEQ ID NO: 2756879 - DNA, 25 bp, Homo sapien
ctattaggttgtgaattacatttac

SEQ ID NO: 2756880 - DNA, 25 bp, Homo sapien
catggtcagcattttccccgttccg

SEQ ID NO: 2756881 - DNA, 25 bp, Homo sapien
cacaaaagtttgtgagccattaata

SEQ ID NO: 2756882 - DNA, 25 bp, Homo sapien
tcttttcaggcactctgacatacag

SEQ ID NO: 2756883 - DNA, 25 bp, Homo sapien
gagccattaataacagtaatcacca

SEQ ID NO: 2756884 - DNA, 25 bp, Homo sapien
gacatacagattgtttagtttgatg

SEQ ID NO: 2756885 - DNA, 25 bp, Homo sapien
aattcatatgagttggtagcctggc

SEQ ID NO: 2756886 - DNA, 25 bp, Homo sapien
gataaatggcctcagttagtcatcc

SEQ ID NO: 2756887 - DNA, 25 bp, Homo sapien
aaaatgatttgaccaggtgagagac

SEQ ID NO: 2756888 - DNA, 25 bp, Homo sapien
gagaaagtgatttgaacccagtggc

SEQ ID NO: 2756889 - DNA, 25 bp, Homo sapien
gaaatatcaagctgaggctgctcac

SEQ ID NO: 2756890 - DNA, 25 bp, Homo sapien
cactgaaatatcaagctgaggctgc

SEQ ID NO: 2756891 - DNA, 25 bp, Homo sapien
ctaactcctccactgaaatatcaag

SEQ ID NO: 2756892 - DNA, 25 bp, Homo sapien
cctccactgaaatatcaagctgagg

SEQ ID NO: 2756893 - DNA, 25 bp, Homo sapien
ccagcaggcgtaagggcctgtgtgt

SEQ ID NO: 2756894 - DNA, 25 bp, Homo sapien
gcctccatgtgggaatttagagcca

SEQ ID NO: 2756895 - DNA, 25 bp, Homo sapien
tgtgtctagattgtggaccagcagg

SEQ ID NO: 2756896 - DNA, 25 bp, Homo sapien
tttgaaaaagcaggttgtgtctaga

SEQ ID NO: 2756897 - DNA, 25 bp, Homo sapien
gcatcatcgttcgttgcagcttctg

SEQ ID NO: 2756898 - DNA, 25 bp, Homo sapien
catcgttcgttgcagcttctggaag

SEQ ID NO: 2756899 - DNA, 25 bp, Homo sapien
cattgcatcatcgttcgttgcagct

SEQ ID NO: 2756900 - DNA, 25 bp, Homo sapien
ctgcattgcatcatcgttcgttgca

SEQ ID NO: 2756901 - DNA, 25 bp, Homo sapien
tgtttccagaccgtcaagggtcctg

SEQ ID NO: 2756902 - DNA, 25 bp, Homo sapien
tcccagcgacactggttgatgcatg

SEQ ID NO: 2756903 - DNA, 25 bp, Homo sapien
ttccagaccgtcaagggtcctggct

SEQ ID NO: 2756904 - DNA, 25 bp, Homo sapien
agtcatgggcctggagactatccca

SEQ ID NO: 2756905 - DNA, 25 bp, Homo sapien
gctactaatgttggctagtgggacc

SEQ ID NO: 2756906 - DNA, 25 bp, Homo sapien
cgggctgtgccacagtcaggccagt

SEQ ID NO: 2756907 - DNA, 25 bp, Homo sapien
tggctagtgggaccctccacttttc

SEQ ID NO: 2756908 - DNA, 25 bp, Homo sapien
tggtgctgccgccatacagtgctac

SEQ ID NO: 2756909 - DNA, 25 bp, Homo sapien
ttcagagagaaaacagccgttaggg

SEQ ID NO: 2756910 - DNA, 25 bp, Homo sapien
gagagaaaacagccgttagggtcaa

SEQ ID NO: 2756911 - DNA, 25 bp, Homo sapien
tcagagagaaaacagccgttagggt

SEQ ID NO: 2756912 - DNA, 25 bp, Homo sapien
cagagagaaaacagccgttagggtc

SEQ ID NO: 2756913 - DNA, 25 bp, Homo sapien
ggtggggtaacatcaggccatgcat

SEQ ID NO: 2756914 - DNA, 25 bp, Homo sapien
cttggtggggtaacatcaggccatg

SEQ ID NO: 2756915 - DNA, 25 bp, Homo sapien
tctggattcccctgttggttttcca

SEQ ID NO: 2756916 - DNA, 25 bp, Homo sapien
gtaacatcaggccatgcattgatgt

SEQ ID NO: 2756917 - DNA, 25 bp, Homo sapien
cacaaatgagattcaggcagtggct

SEQ ID NO: 2756918 - DNA, 25 bp, Homo sapien
tgatgcacaaatgagattcaggcag

SEQ ID NO: 2756919 - DNA, 25 bp, Homo sapien
tgcacaaatgagattcaggcagtgg

SEQ ID NO: 2756920 - DNA, 25 bp, Homo sapien
gtgatgatgcacaaatgagattcag

SEQ ID NO: 2756921 - DNA, 25 bp, Homo sapien
tcccatgggctccacgtgtagtctt

SEQ ID NO: 2756922 - DNA, 25 bp, Homo sapien
tagactggctctttgcgtataacct

SEQ ID NO: 2756923 - DNA, 25 bp, Homo sapien
tgtatgtgacaagaggttcaccctg

SEQ ID NO: 2756924 - DNA, 25 bp, Homo sapien
cctgattgcaggagaaacgctgtct

SEQ ID NO: 2756925 - DNA, 25 bp, Homo sapien
tagttcggaggttctacaagtagcc

SEQ ID NO: 2756926 - DNA, 25 bp, Homo sapien
caaatacggagtactttacagcatg

SEQ ID NO: 2756927 - DNA, 25 bp, Homo sapien
caatcacccagttagtggaaacaaa

SEQ ID NO: 2756928 - DNA, 25 bp, Homo sapien
gtactttacagcatgtcaccacggg

SEQ ID NO: 2756929 - DNA, 25 bp, Homo sapien
actcccctttggcttgaaagagcta

SEQ ID NO: 2756930 - DNA, 25 bp, Homo sapien
ttatattatgctgtagggacagaca

SEQ ID NO: 2756931 - DNA, 25 bp, Homo sapien
aaatgaaacagagtgcttaggattc

SEQ ID NO: 2756932 - DNA, 25 bp, Homo sapien
tccacccctggagaagtcatctatt

SEQ ID NO: 2756933 - DNA, 25 bp, Homo sapien
tctcatggtgcaccagtagcagctt

SEQ ID NO: 2756934 - DNA, 25 bp, Homo sapien
ccacctgggtccgtgtacttgtgtg

SEQ ID NO: 2756935 - DNA, 25 bp, Homo sapien
ggattttgtgttagaagtctgcagc

SEQ ID NO: 2756936 - DNA, 25 bp, Homo sapien
ttagtattaaatcaggttctcatgg

SEQ ID NO: 2756937 - DNA, 25 bp, Homo sapien
tcagtgtcaccatgaaacccaggtg

SEQ ID NO: 2756938 - DNA, 25 bp, Homo sapien
tgtgctacccggcagcttgatgtag

SEQ ID NO: 2756939 - DNA, 25 bp, Homo sapien
ctgagctggactgtgctacccggca

SEQ ID NO: 2756940 - DNA, 25 bp, Homo sapien
gaagctgcagcgaagactgccctga

SEQ ID NO: 2756941 - DNA, 25 bp, Homo sapien
tgaaaatgcttcttgcaactgtggg

SEQ ID NO: 2756942 - DNA, 25 bp, Homo sapien
tggcctgaaactgatagtgagttcc

SEQ ID NO: 2756943 - DNA, 25 bp, Homo sapien
gcctggttagaactgactcatcatg

SEQ ID NO: 2756944 - DNA, 25 bp, Homo sapien
tggactagtgttcccagcctggcac

SEQ ID NO: 2756945 - DNA, 25 bp, Homo sapien
tgtactagggtttcaatggagccca

SEQ ID NO: 2756946 - DNA, 25 bp, Homo sapien
cagtgttctttgtactagggtttca

SEQ ID NO: 2756947 - DNA, 25 bp, Homo sapien
gcatccacgaactttctttagtgta

SEQ ID NO: 2756948 - DNA, 25 bp, Homo sapien
ggaggttttacactaaagcaccatc

SEQ ID NO: 2756949 - DNA, 25 bp, Homo sapien
tatatcaacctgtttgtggtttcca

SEQ ID NO: 2756950 - DNA, 25 bp, Homo sapien
tatgctgattgctagaaatttccag

SEQ ID NO: 2756951 - DNA, 25 bp, Homo sapien
tccttgcaaaccatcggtccgtata

SEQ ID NO: 2756952 - DNA, 25 bp, Homo sapien
tagtaagcagtttgtacacctggtc

SEQ ID NO: 2756953 - DNA, 25 bp, Homo sapien
gatctggaagctggggccgagggaa

SEQ ID NO: 2756954 - DNA, 25 bp, Homo sapien
aggtcttttccgtaattgaggcagg

SEQ ID NO: 2756955 - DNA, 25 bp, Homo sapien
gctgtagactgtagaaaggtctttt

SEQ ID NO: 2756956 - DNA, 25 bp, Homo sapien
aacacagacaatgctgggttgctga

SEQ ID NO: 2756957 - DNA, 25 bp, Homo sapien
agaggagcccgtgtagcttaaggac

SEQ ID NO: 2756958 - DNA, 25 bp, Homo sapien
taagaggagcccgtgtagcttaagg

SEQ ID NO: 2756959 - DNA, 25 bp, Homo sapien
ccagggtaagaggagcccgtgtagc

SEQ ID NO: 2756960 - DNA, 25 bp, Homo sapien
aggagcccgtgtagcttaaggacat

SEQ ID NO: 2756961 - DNA, 25 bp, Homo sapien
tggatttgtagttcagatcttcaat

SEQ ID NO: 2756962 - DNA, 25 bp, Homo sapien
tgtaccatacttggatttgtagttc

SEQ ID NO: 2756963 - DNA, 25 bp, Homo sapien
tcctgtaccatacttggatttgtag

SEQ ID NO: 2756964 - DNA, 25 bp, Homo sapien
gatttgtagttcagatcttcaatgt

SEQ ID NO: 2756965 - DNA, 25 bp, Homo sapien
tcagtgcactgccttcgggctcatc

SEQ ID NO: 2756966 - DNA, 25 bp, Homo sapien
gaagcagtgctcgtattgatagata

SEQ ID NO: 2756967 - DNA, 25 bp, Homo sapien
gtgataaatcatccacttcaggtgg

SEQ ID NO: 2756968 - DNA, 25 bp, Homo sapien
tcccagtcctgtaatagagccgcac

SEQ ID NO: 2756969 - DNA, 25 bp, Homo sapien
aaacaaagtaccatacattgggtgg

SEQ ID NO: 2756970 - DNA, 25 bp, Homo sapien
aagaaggtaactgtggcacttcagg

SEQ ID NO: 2756971 - DNA, 25 bp, Homo sapien
ttcactccatgaatcttgtttcctg

SEQ ID NO: 2756972 - DNA, 25 bp, Homo sapien
tgtttcctgttgtgttataattggg

SEQ ID NO: 2756973 - DNA, 25 bp, Homo sapien
gtaagacacccttcatggaatgagg

SEQ ID NO: 2756974 - DNA, 25 bp, Homo sapien
gattcttgccttaaagactcccaga

SEQ ID NO: 2756975 - DNA, 25 bp, Homo sapien
tattacaaagtgttggctactgtgc

SEQ ID NO: 2756976 - DNA, 25 bp, Homo sapien
gctactgtgctaaagatgactgtaa

SEQ ID NO: 2756977 - DNA, 25 bp, Homo sapien
ttgaagccaggaactttgtgaggaa

SEQ ID NO: 2756978 - DNA, 25 bp, Homo sapien
catatttgtgacacctagcctggcc

SEQ ID NO: 2756979 - DNA, 25 bp, Homo sapien
cacatcttgttataggtatctctca

SEQ ID NO: 2756980 - DNA, 25 bp, Homo sapien
ggttactccatagtcagaacagccc

SEQ ID NO: 2756981 - DNA, 25 bp, Homo sapien
tcctgacagcgtgtggtagctcatg

SEQ ID NO: 2756982 - DNA, 25 bp, Homo sapien
gtaccgtggacacataagacctggg

SEQ ID NO: 2756983 - DNA, 25 bp, Homo sapien
agtgggttccactgagagcacattc

SEQ ID NO: 2756984 - DNA, 25 bp, Homo sapien
tgggctctgctcacaaagaacatac

SEQ ID NO: 2756985 - DNA, 25 bp, Homo sapien
gcatcctgtctgttcaacaagatca

SEQ ID NO: 2756986 - DNA, 25 bp, Homo sapien
gaagtcattcaaaggaatggccaca

SEQ ID NO: 2756987 - DNA, 25 bp, Homo sapien
gctgtgagccgaagtcattcaaagg

SEQ ID NO: 2756988 - DNA, 25 bp, Homo sapien
cagccattgggctgtgagccgaagt

SEQ ID NO: 2756989 - DNA, 25 bp, Homo sapien
ctgtccccagctgcgctgagcacac

SEQ ID NO: 2756990 - DNA, 25 bp, Homo sapien
gctgtccccagctgcgctgagcaca

SEQ ID NO: 2756991 - DNA, 25 bp, Homo sapien
gtccccagctgcgctgagcacacag

SEQ ID NO: 2756992 - DNA, 25 bp, Homo sapien
cacagatcctgctgcacaggcctct

SEQ ID NO: 2756993 - DNA, 25 bp, Homo sapien
atcaaggtgaacacttttcattaca

SEQ ID NO: 2756994 - DNA, 25 bp, Homo sapien
catcaaggtgaacacttttcattac

SEQ ID NO: 2756995 - DNA, 25 bp, Homo sapien
ccatcaaggtgaacacttttcatta

SEQ ID NO: 2756996 - DNA, 25 bp, Homo sapien
tcaaggtgaacacttttcattacac

SEQ ID NO: 2756997 - DNA, 25 bp, Homo sapien
tgcaaaccctgattttccgtagggc

SEQ ID NO: 2756998 - DNA, 25 bp, Homo sapien
gccatgcaaaccctgattttccgta

SEQ ID NO: 2756999 - DNA, 25 bp, Homo sapien
cttgccatgcaaaccctgattttcc

SEQ ID NO: 2757000 - DNA, 25 bp, Homo sapien
catgcaaaccctgattttccgtagg

SEQ ID NO: 2757001 - DNA, 25 bp, Homo sapien
acttaatggtgcagggtagttcaac

SEQ ID NO: 2757002 - DNA, 25 bp, Homo sapien
tccacttaatggtgcagggtagttc

SEQ ID NO: 2757003 - DNA, 25 bp, Homo sapien
tgctccacttaatggtgcagggtag

SEQ ID NO: 2757004 - DNA, 25 bp, Homo sapien
cctctgctccacttaatggtgcagg

SEQ ID NO: 2757005 - DNA, 25 bp, Homo sapien
cattgtgcctgttgtctgctataac

SEQ ID NO: 2757006 - DNA, 25 bp, Homo sapien
tcgcagttcagttgcatctggcacg

SEQ ID NO: 2757007 - DNA, 25 bp, Homo sapien
cccagtgataattcttggacaaagc

SEQ ID NO: 2757008 - DNA, 25 bp, Homo sapien
acacagtgaaatccccggctttgac

SEQ ID NO: 2757009 - DNA, 25 bp, Homo sapien
cacttcaatttggagccagttccct

SEQ ID NO: 2757010 - DNA, 25 bp, Homo sapien
gcaaggctctccagttctctgtaga

SEQ ID NO: 2757011 - DNA, 25 bp, Homo sapien
tgtagaccccagtgtaacccactcc

SEQ ID NO: 2757012 - DNA, 25 bp, Homo sapien
tgactctgttcctatggctgtggcc

SEQ ID NO: 2757013 - DNA, 25 bp, Homo sapien
tatagtccatcttctgcggcacctg

SEQ ID NO: 2757014 - DNA, 25 bp, Homo sapien
caaccctatagtccatcttctgcgg

SEQ ID NO: 2757015 - DNA, 25 bp, Homo sapien
agtccatcttctgcggcacctgtag

SEQ ID NO: 2757016 - DNA, 25 bp, Homo sapien
gttcccaaccctatagtccatcttc

SEQ ID NO: 2757017 - DNA, 25 bp, Homo sapien
ccttcctgcgtgtgcaagctgcatg

SEQ ID NO: 2757018 - DNA, 25 bp, Homo sapien
ttcctgcgtgtgcaagctgcatgcc

SEQ ID NO: 2757019 - DNA, 25 bp, Homo sapien
cttcctgcgtgtgcaagctgcatgc

SEQ ID NO: 2757020 - DNA, 25 bp, Homo sapien
cctattcagagatccactatacctg

SEQ ID NO: 2757021 - DNA, 25 bp, Homo sapien
gatccactatacctgagcatctcat

SEQ ID NO: 2757022 - DNA, 25 bp, Homo sapien
gcatctcattgatttcagaggcaca

SEQ ID NO: 2757023 - DNA, 25 bp, Homo sapien
catctcattgatttcagaggcacac

SEQ ID NO: 2757024 - DNA, 25 bp, Homo sapien
catttctgagagaatgtggtcgtca

SEQ ID NO: 2757025 - DNA, 25 bp, Homo sapien
tgaacaaatgcttcatcagccttct

SEQ ID NO: 2757026 - DNA, 25 bp, Homo sapien
tagtagaaccttgaaggtccagcag

SEQ ID NO: 2757027 - DNA, 25 bp, Homo sapien
cttctctcccatagtagaaccttga

SEQ ID NO: 2757028 - DNA, 25 bp, Homo sapien
gcttctcagttacatgatgaaggga

SEQ ID NO: 2757029 - DNA, 25 bp, Homo sapien
caataggcttcacatctgaaggctc

SEQ ID NO: 2757030 - DNA, 25 bp, Homo sapien
aggctactcctatcgcacgttctgt

SEQ ID NO: 2757031 - DNA, 25 bp, Homo sapien
gcacagcactgctgaaagcaaggct

SEQ ID NO: 2757032 - DNA, 25 bp, Homo sapien
tcaggcactccggtagatgtgtagg

SEQ ID NO: 2757033 - DNA, 25 bp, Homo sapien
caagtgaggaaatcaggcactccgg

SEQ ID NO: 2757034 - DNA, 25 bp, Homo sapien
gaggaaatcaggcactccggtagat

SEQ ID NO: 2757035 - DNA, 25 bp, Homo sapien
ggactctgtgcaagtgaggaaatca

SEQ ID NO: 2757036 - DNA, 25 bp, Homo sapien
tttgagggacaggccctggcattcc

SEQ ID NO: 2757037 - DNA, 25 bp, Homo sapien
ttgagggacaggccctggcattcca

SEQ ID NO: 2757038 - DNA, 25 bp, Homo sapien
tgagggacaggccctggcattccat

SEQ ID NO: 2757039 - DNA, 25 bp, Homo sapien
gtttgagggacaggccctggcattc

SEQ ID NO: 2757040 - DNA, 25 bp, Homo sapien
taaatctacaggttgtcctgagctg

SEQ ID NO: 2757041 - DNA, 25 bp, Homo sapien
ccccgtgaccgtagaccaggatttg

SEQ ID NO: 2757042 - DNA, 25 bp, Homo sapien
tgagatggtaaagtgaagcttgagc

SEQ ID NO: 2757043 - DNA, 25 bp, Homo sapien
ctgagctgaaaatcatgcggctttt

SEQ ID NO: 2757044 - DNA, 25 bp, Homo sapien
catcttcaggcgacaccatgggcat

SEQ ID NO: 2757045 - DNA, 25 bp, Homo sapien
cgttctcatcttcaggcgacaccat

SEQ ID NO: 2757046 - DNA, 25 bp, Homo sapien
cccgttctcatcttcaggcgacacc

SEQ ID NO: 2757047 - DNA, 25 bp, Homo sapien
gttctcatcttcaggcgacaccatg

SEQ ID NO: 2757048 - DNA, 25 bp, Homo sapien
atcctgataacaagtttttgagtac

SEQ ID NO: 2757049 - DNA, 25 bp, Homo sapien
tttcccactgtgtatcctgataaca

SEQ ID NO: 2757050 - DNA, 25 bp, Homo sapien
cactgtgtatcctgataacaagttt

SEQ ID NO: 2757051 - DNA, 25 bp, Homo sapien
gtgtatcctgataacaagtttttga

SEQ ID NO: 2757052 - DNA, 25 bp, Homo sapien
ctaagcttcctttatcggttttgct

SEQ ID NO: 2757053 - DNA, 25 bp, Homo sapien
tctaagcttcctttatcggttttgc

SEQ ID NO: 2757054 - DNA, 25 bp, Homo sapien
agcttcctttatcggttttgcttgg

SEQ ID NO: 2757055 - DNA, 25 bp, Homo sapien
tggaagacaaaccttctaagcttcc

SEQ ID NO: 2757056 - DNA, 25 bp, Homo sapien
ccaatggcgtccttatcatccatgc

SEQ ID NO: 2757057 - DNA, 25 bp, Homo sapien
ggcctcagtcctggagtctagttct

SEQ ID NO: 2757058 - DNA, 25 bp, Homo sapien
gtgaaacccaatggcgtccttatca

SEQ ID NO: 2757059 - DNA, 25 bp, Homo sapien
tggagagtctcaagcagcaaggcct

SEQ ID NO: 2757060 - DNA, 25 bp, Homo sapien
gtgttctgtgaaacgcactctggga

SEQ ID NO: 2757061 - DNA, 25 bp, Homo sapien
gttttccacagactgtgttctgtga

SEQ ID NO: 2757062 - DNA, 25 bp, Homo sapien
ggtgagccaagaggtctgttttcca

SEQ ID NO: 2757063 - DNA, 25 bp, Homo sapien
taattggctaatgtgcagggtgagc

SEQ ID NO: 2757064 - DNA, 25 bp, Homo sapien
gatgcatctattcttgccagtaact

SEQ ID NO: 2757065 - DNA, 25 bp, Homo sapien
ttgatgcatctattcttgccagtaa

SEQ ID NO: 2757066 - DNA, 25 bp, Homo sapien
gtaactgcctgaagacgctactccc

SEQ ID NO: 2757067 - DNA, 25 bp, Homo sapien
gccagtaactgcctgaagacgctac

SEQ ID NO: 2757068 - DNA, 25 bp, Homo sapien
agcagtaatattctgaagcctgtcc

SEQ ID NO: 2757069 - DNA, 25 bp, Homo sapien
cggaggtctgcttccacttagctgc

SEQ ID NO: 2757070 - DNA, 25 bp, Homo sapien
tccactgcttacatcggaggtctgc

SEQ ID NO: 2757071 - DNA, 25 bp, Homo sapien
aatcctgcacggcagctcttggcac

SEQ ID NO: 2757072 - DNA, 25 bp, Homo sapien
gaagtttccttggacaagttcactc

SEQ ID NO: 2757073 - DNA, 25 bp, Homo sapien
taactaccacctgttgtaggaggga

SEQ ID NO: 2757074 - DNA, 25 bp, Homo sapien
ctgaaagagatcctctaggagaggc

SEQ ID NO: 2757075 - DNA, 25 bp, Homo sapien
taggagggacttgataggagataat

SEQ ID NO: 2757076 - DNA, 25 bp, Homo sapien
aacttatctgacctgagctagtggg

SEQ ID NO: 2757077 - DNA, 25 bp, Homo sapien
ttaaggcaatccaagcaacaatagg

SEQ ID NO: 2757078 - DNA, 25 bp, Homo sapien
cacttctgcctgtatagattagagc

SEQ ID NO: 2757079 - DNA, 25 bp, Homo sapien
gaagatcacaaacgtgattccaggc

SEQ ID NO: 2757080 - DNA, 25 bp, Homo sapien
ttatcccaaagactccaaggcactg

SEQ ID NO: 2757081 - DNA, 25 bp, Homo sapien
ggagaaacaaatgcacggatcagaa

SEQ ID NO: 2757082 - DNA, 25 bp, Homo sapien
tgcacggatcagaaaagtccctcct

SEQ ID NO: 2757083 - DNA, 25 bp, Homo sapien
tccctcctgtggcagtagagaggat

SEQ ID NO: 2757084 - DNA, 25 bp, Homo sapien
cacacttgttcgtgttcatctctca

SEQ ID NO: 2757085 - DNA, 25 bp, Homo sapien
cgcatgaccttctagccttaccaga

SEQ ID NO: 2757086 - DNA, 25 bp, Homo sapien
tcatgcccatccttactctgtgtct

SEQ ID NO: 2757087 - DNA, 25 bp, Homo sapien
catacagtttctcgcatgaccttct

SEQ ID NO: 2757088 - DNA, 25 bp, Homo sapien
acttttcaagctgcccttggctgac

SEQ ID NO: 2757089 - DNA, 25 bp, Homo sapien
tgacctgaactctggctacatctcc

SEQ ID NO: 2757090 - DNA, 25 bp, Homo sapien
tcacttttcaagctgcccttggctg

SEQ ID NO: 2757091 - DNA, 25 bp, Homo sapien
tgcccttggctgacctgaactctgg

SEQ ID NO: 2757092 - DNA, 25 bp, Homo sapien
gtttagcttgcattctaagtatgag

SEQ ID NO: 2757093 - DNA, 25 bp, Homo sapien
agtatgagtgtgtctgatgggtcca

SEQ ID NO: 2757094 - DNA, 25 bp, Homo sapien
ggtccaggtccaccgccctgagctg

SEQ ID NO: 2757095 - DNA, 25 bp, Homo sapien
ttcttctcatgtttagcttgcattc

SEQ ID NO: 2757096 - DNA, 25 bp, Homo sapien
cttcaggtggtgaaatatgcgtcat

SEQ ID NO: 2757097 - DNA, 25 bp, Homo sapien
attcttcaggtggtgaaatatgcgt

SEQ ID NO: 2757098 - DNA, 25 bp, Homo sapien
ttcttcaggtggtgaaatatgcgtc

SEQ ID NO: 2757099 - DNA, 25 bp, Homo sapien
tcttcaggtggtgaaatatgcgtca

SEQ ID NO: 2757100 - DNA, 25 bp, Homo sapien
tcataatctaaccttggaagtgaca

SEQ ID NO: 2757101 - DNA, 25 bp, Homo sapien
atgagattccactggcacccacgtc

SEQ ID NO: 2757102 - DNA, 25 bp, Homo sapien
tcagggagcacctaccacaaacagc

SEQ ID NO: 2757103 - DNA, 25 bp, Homo sapien
catttattagagacacaccactgca

SEQ ID NO: 2757104 - DNA, 25 bp, Homo sapien
tggacttgacaagaccaccaattgt

SEQ ID NO: 2757105 - DNA, 25 bp, Homo sapien
ccagccaatgtttcactccttatgt

SEQ ID NO: 2757106 - DNA, 25 bp, Homo sapien
tttggaaactcgatccaagtttaca

SEQ ID NO: 2757107 - DNA, 25 bp, Homo sapien
tatgacagcacaaaagagcaggctc

SEQ ID NO: 2757108 - DNA, 25 bp, Homo sapien
tgctcgaacatgacttctgagtatc

SEQ ID NO: 2757109 - DNA, 25 bp, Homo sapien
gagtatcttcctcattgaaaggcag

SEQ ID NO: 2757110 - DNA, 25 bp, Homo sapien
cttcctcattgaaaggcagaagctc

SEQ ID NO: 2757111 - DNA, 25 bp, Homo sapien
cggagtgctcgaacatgacttctga

SEQ ID NO: 2757112 - DNA, 25 bp, Homo sapien
ggaaaatcactaagcggcagagatt

SEQ ID NO: 2757113 - DNA, 25 bp, Homo sapien
tcttggaaaatcactaagcggcaga

SEQ ID NO: 2757114 - DNA, 25 bp, Homo sapien
ttcttggaaaatcactaagcggcag

SEQ ID NO: 2757115 - DNA, 25 bp, Homo sapien
ttggaaaatcactaagcggcagaga

SEQ ID NO: 2757116 - DNA, 25 bp, Homo sapien
gctggatcgcagcacaatctgctca

SEQ ID NO: 2757117 - DNA, 25 bp, Homo sapien
ggctggatcgcagcacaatctgctc

SEQ ID NO: 2757118 - DNA, 25 bp, Homo sapien
ctggatcgcagcacaatctgctcac

SEQ ID NO: 2757119 - DNA, 25 bp, Homo sapien
tggatcgcagcacaatctgctcact

SEQ ID NO: 2757120 - DNA, 25 bp, Homo sapien
ggaggcatgatcaaactccaatcca

SEQ ID NO: 2757121 - DNA, 25 bp, Homo sapien
ggtaaacacccatatggaggcatga

SEQ ID NO: 2757122 - DNA, 25 bp, Homo sapien
tcaggttcaatgcatacgcctggta

SEQ ID NO: 2757123 - DNA, 25 bp, Homo sapien
catgatcaaactccaatccaggcag

SEQ ID NO: 2757124 - DNA, 25 bp, Homo sapien
ttgctcctcgcttgaactcaggagg

SEQ ID NO: 2757125 - DNA, 25 bp, Homo sapien
caccattgcgctccagcctgggcaa

SEQ ID NO: 2757126 - DNA, 25 bp, Homo sapien
cagagattgcggtgagccgagatcg

SEQ ID NO: 2757127 - DNA, 25 bp, Homo sapien
cagcctgggcaacaagagtaaaact

SEQ ID NO: 2757128 - DNA, 25 bp, Homo sapien
tacttcctcagtgggacaggttcca

SEQ ID NO: 2757129 - DNA, 25 bp, Homo sapien
cttcctcagtgggacaggttccatg

SEQ ID NO: 2757130 - DNA, 25 bp, Homo sapien
ttacttcctcagtgggacaggttcc

SEQ ID NO: 2757131 - DNA, 25 bp, Homo sapien
tcctcagtgggacaggttccatgca

SEQ ID NO: 2757132 - DNA, 25 bp, Homo sapien
ctggttcctccaagtaattcctgta

SEQ ID NO: 2757133 - DNA, 25 bp, Homo sapien
cattgatatacttatggattttaga

SEQ ID NO: 2757134 - DNA, 25 bp, Homo sapien
tggattttagaacaatgtggcttaa

SEQ ID NO: 2757135 - DNA, 25 bp, Homo sapien
caatgtggcttaaacgtttccttag

SEQ ID NO: 2757136 - DNA, 25 bp, Homo sapien
gcttaaacgtttccttagctgtatg

SEQ ID NO: 2757137 - DNA, 25 bp, Homo sapien
tggcctctgtgactgatattacatg

SEQ ID NO: 2757138 - DNA, 25 bp, Homo sapien
cagactcaaaaactgggcaacactg

SEQ ID NO: 2757139 - DNA, 25 bp, Homo sapien
cacaatgctacccttatcagactgg

SEQ ID NO: 2757140 - DNA, 25 bp, Homo sapien
tattacatgagttccaccatcctcg

SEQ ID NO: 2757141 - DNA, 25 bp, Homo sapien
ctggcacattttgcctgggagttga

SEQ ID NO: 2757142 - DNA, 25 bp, Homo sapien
caaacagggtatctaagtgtagaga

SEQ ID NO: 2757143 - DNA, 25 bp, Homo sapien
tagcttagaaactatcctcgcgccc

SEQ ID NO: 2757144 - DNA, 25 bp, Homo sapien
caaccatagatagtgcaaacagggt

SEQ ID NO: 2757145 - DNA, 25 bp, Homo sapien
aaatgccctttggtatccgacacgg

SEQ ID NO: 2757146 - DNA, 25 bp, Homo sapien
tacctggtgatctactgcgcctcca

SEQ ID NO: 2757147 - DNA, 25 bp, Homo sapien
aaatccctggatatcggcaaatgcc

SEQ ID NO: 2757148 - DNA, 25 bp, Homo sapien
tgtggagtacctcgccaagaactgc

SEQ ID NO: 2757149 - DNA, 25 bp, Homo sapien
gaagtgtggagtactgttcagaaag

SEQ ID NO: 2757150 - DNA, 25 bp, Homo sapien
ggaaaaggactgttcatggataact

SEQ ID NO: 2757151 - DNA, 25 bp, Homo sapien
ttattcacatcagagatctcaggca

SEQ ID NO: 2757152 - DNA, 25 bp, Homo sapien
ctggaagtgtggagtactgttcaga

SEQ ID NO: 2757153 - DNA, 25 bp, Homo sapien
caggatgccaagaggtctctgtggc

SEQ ID NO: 2757154 - DNA, 25 bp, Homo sapien
taatgtgacatcgaagagaaaaccc

SEQ ID NO: 2757155 - DNA, 25 bp, Homo sapien
gagagtgagtgactgtcttgcacca

SEQ ID NO: 2757156 - DNA, 25 bp, Homo sapien
tagggagccgagacgataactttac

SEQ ID NO: 2757157 - DNA, 25 bp, Homo sapien
cccagatgaaggtcttagtcatggt

SEQ ID NO: 2757158 - DNA, 25 bp, Homo sapien
tagcaggccataaagtcccagatga

SEQ ID NO: 2757159 - DNA, 25 bp, Homo sapien
tgtcagctcactggggcgaatgcct

SEQ ID NO: 2757160 - DNA, 25 bp, Homo sapien
gaaggtcttagtcatggtgtcatct

SEQ ID NO: 2757161 - DNA, 25 bp, Homo sapien
tctcatattcccacactagagttga

SEQ ID NO: 2757162 - DNA, 25 bp, Homo sapien
cagagaactctcatattcccacact

SEQ ID NO: 2757163 - DNA, 25 bp, Homo sapien
ttcccacactagagttgattctcca

SEQ ID NO: 2757164 - DNA, 25 bp, Homo sapien
cccacactagagttgattctccaat

SEQ ID NO: 2757165 - DNA, 25 bp, Homo sapien
caggtgttgggtacggagtctcact

SEQ ID NO: 2757166 - DNA, 25 bp, Homo sapien
catcaggattttggtagggactaca

SEQ ID NO: 2757167 - DNA, 25 bp, Homo sapien
cttaaacaggaagtgtaatgtctcc

SEQ ID NO: 2757168 - DNA, 25 bp, Homo sapien
tatttgcgcatagaatcacattgac

SEQ ID NO: 2757169 - DNA, 25 bp, Homo sapien
tatgacatagaagcagtatgaagct

SEQ ID NO: 2757170 - DNA, 25 bp, Homo sapien
gatgaacacaggtgtatgacataga

SEQ ID NO: 2757171 - DNA, 25 bp, Homo sapien
gacatagaagcagtatgaagctcct

SEQ ID NO: 2757172 - DNA, 25 bp, Homo sapien
caggtgtatgacatagaagcagtat

SEQ ID NO: 2757173 - DNA, 25 bp, Homo sapien
tgtaaactttggcatccacccagca

SEQ ID NO: 2757174 - DNA, 25 bp, Homo sapien
gagcaggcctagatagccagcacct

SEQ ID NO: 2757175 - DNA, 25 bp, Homo sapien
tatgagtgacctgctgctttgggca

SEQ ID NO: 2757176 - DNA, 25 bp, Homo sapien
gaaacagtcttgcaatatcgaaagc

SEQ ID NO: 2757177 - DNA, 25 bp, Homo sapien
aatacttctacaagagttagaatgt

SEQ ID NO: 2757178 - DNA, 25 bp, Homo sapien
acttctacaagagttagaatgtttc

SEQ ID NO: 2757179 - DNA, 25 bp, Homo sapien
aaatacttctacaagagttagaatg

SEQ ID NO: 2757180 - DNA, 25 bp, Homo sapien
cactttcacgcagaagaccttcaaa

SEQ ID NO: 2757181 - DNA, 25 bp, Homo sapien
tgaacaatgagtgacctgtcccttc

SEQ ID NO: 2757182 - DNA, 25 bp, Homo sapien
atgagtgacctgtcccttcactgag

SEQ ID NO: 2757183 - DNA, 25 bp, Homo sapien
agtgacctgtcccttcactgagcat

SEQ ID NO: 2757184 - DNA, 25 bp, Homo sapien
ctgaacaatgagtgacctgtccctt

SEQ ID NO: 2757185 - DNA, 25 bp, Homo sapien
aagggaaaatagctccaggtctgct

SEQ ID NO: 2757186 - DNA, 25 bp, Homo sapien
ggttttagaccagcaacgtgccatc

SEQ ID NO: 2757187 - DNA, 25 bp, Homo sapien
gataacacctaatgctctagctggg

SEQ ID NO: 2757188 - DNA, 25 bp, Homo sapien
tagcagtctcagtagaagttcagca

SEQ ID NO: 2757189 - DNA, 25 bp, Homo sapien
gtcaagcatgttcaggatgatatgg

SEQ ID NO: 2757190 - DNA, 25 bp, Homo sapien
ggtcaagcatgttcaggatgatatg

SEQ ID NO: 2757191 - DNA, 25 bp, Homo sapien
gaggtcaagcatgttcaggatgata

SEQ ID NO: 2757192 - DNA, 25 bp, Homo sapien
atgaggtcaagcatgttcaggatga

SEQ ID NO: 2757193 - DNA, 25 bp, Homo sapien
catgtgttatcttgctctctgtgtc

SEQ ID NO: 2757194 - DNA, 25 bp, Homo sapien
gggaagtacatgtgttatcttgctc

SEQ ID NO: 2757195 - DNA, 25 bp, Homo sapien
gaggggaagtacatgtgttatcttg

SEQ ID NO: 2757196 - DNA, 25 bp, Homo sapien
agtacatgtgttatcttgctctctg

SEQ ID NO: 2757197 - DNA, 25 bp, Homo sapien
gattgtaccagagatttgtttctca

SEQ ID NO: 2757198 - DNA, 25 bp, Homo sapien
cacaacagattgtaccagagatttg

SEQ ID NO: 2757199 - DNA, 25 bp, Homo sapien
aggccacatgatgtatacggtagac

SEQ ID NO: 2757200 - DNA, 25 bp, Homo sapien
tcaggtaaaggccacatgatgtata

SEQ ID NO: 2757201 - DNA, 25 bp, Homo sapien
tggttgacaaggtggtcaagtgcca

SEQ ID NO: 2757202 - DNA, 25 bp, Homo sapien
gttgacaaggtggtcaagtgccaaa

SEQ ID NO: 2757203 - DNA, 25 bp, Homo sapien
ctgtggttgacaaggtggtcaagtg

SEQ ID NO: 2757204 - DNA, 25 bp, Homo sapien
tgacaaggtggtcaagtgccaaata

SEQ ID NO: 2757205 - DNA, 25 bp, Homo sapien
gagtgtcctagtgagtttctatagc

SEQ ID NO: 2757206 - DNA, 25 bp, Homo sapien
ggaagagtgtcctagtgagtttcta

SEQ ID NO: 2757207 - DNA, 25 bp, Homo sapien
gacattctcaagagtatcatgggaa

SEQ ID NO: 2757208 - DNA, 25 bp, Homo sapien
tagtaaatcctgacattctcaagag

SEQ ID NO: 2757209 - DNA, 25 bp, Homo sapien
caaagcccctgtgcagcggtgatga

SEQ ID NO: 2757210 - DNA, 25 bp, Homo sapien
tgaatatccctgtttgatgggtcca

SEQ ID NO: 2757211 - DNA, 25 bp, Homo sapien
gcggtgatgaagagctaactccact

SEQ ID NO: 2757212 - DNA, 25 bp, Homo sapien
ccttctgaggtccagcagttgccat

SEQ ID NO: 2757213 - DNA, 25 bp, Homo sapien
gcaagatttttaaatgcccagctca

SEQ ID NO: 2757214 - DNA, 25 bp, Homo sapien
aagatttttaaatgcccagctcacc

SEQ ID NO: 2757215 - DNA, 25 bp, Homo sapien
gatttttaaatgcccagctcaccat

SEQ ID NO: 2757216 - DNA, 25 bp, Homo sapien
aagcaagatttttaaatgcccagct

SEQ ID NO: 2757217 - DNA, 25 bp, Homo sapien
tgtgccaattgcctccattaggtag

SEQ ID NO: 2757218 - DNA, 25 bp, Homo sapien
cgctagttcgcaacctgttcctggg

SEQ ID NO: 2757219 - DNA, 25 bp, Homo sapien
tcatctagtgaaagaaaaagacttc

SEQ ID NO: 2757220 - DNA, 25 bp, Homo sapien
tgattacttcaaacaaccagcatgt

SEQ ID NO: 2757221 - DNA, 25 bp, Homo sapien
gaaaaattacacacagagcgaaagc

SEQ ID NO: 2757222 - DNA, 25 bp, Homo sapien
aaaagatgtgacaaaccagacaacg

SEQ ID NO: 2757223 - DNA, 25 bp, Homo sapien
gaagtgctatggttttgccattcac

SEQ ID NO: 2757224 - DNA, 25 bp, Homo sapien
caagtaccaacttataaaagatgtg

SEQ ID NO: 2757225 - DNA, 25 bp, Homo sapien
tacttgtggaagactctccccggct

SEQ ID NO: 2757226 - DNA, 25 bp, Homo sapien
agtgcaaattcacagctcgccagcg

SEQ ID NO: 2757227 - DNA, 25 bp, Homo sapien
gcagagctgtcaatggcaaccacaa

SEQ ID NO: 2757228 - DNA, 25 bp, Homo sapien
ggcctcatccgattgaacaggtgca

SEQ ID NO: 2757229 - DNA, 25 bp, Homo sapien
tggtgcccacggttccacatcctca

SEQ ID NO: 2757230 - DNA, 25 bp, Homo sapien
gtggctgaaaacatctatgggcttc

SEQ ID NO: 2757231 - DNA, 25 bp, Homo sapien
tgctcagccgtgtggttctcgatgg

SEQ ID NO: 2757232 - DNA, 25 bp, Homo sapien
tctcgatggcccagagtttgtctcc

SEQ ID NO: 2757233 - DNA, 25 bp, Homo sapien
taccagatacaaatctccagttcca

SEQ ID NO: 2757234 - DNA, 25 bp, Homo sapien
cactggtttcaactaccagatacaa

SEQ ID NO: 2757235 - DNA, 25 bp, Homo sapien
acccttaaatctgggtgcacactgg

SEQ ID NO: 2757236 - DNA, 25 bp, Homo sapien
agttccagacccttaaatctgggtg

SEQ ID NO: 2757237 - DNA, 25 bp, Homo sapien
tttcccagtatgtgctcaaagcatg

SEQ ID NO: 2757238 - DNA, 25 bp, Homo sapien
ttcacatcacaaagggctgctctgc

SEQ ID NO: 2757239 - DNA, 25 bp, Homo sapien
tcaggctcatcacgttgaatcagac

SEQ ID NO: 2757240 - DNA, 25 bp, Homo sapien
tcaaagcatgaaggatccgaggcag

SEQ ID NO: 2757241 - DNA, 25 bp, Homo sapien
cttgtacagctctgagatgcacggg

SEQ ID NO: 2757242 - DNA, 25 bp, Homo sapien
tcttcactgtgcaagtggtcccgaa

SEQ ID NO: 2757243 - DNA, 25 bp, Homo sapien
caaagctcggctatcctcagtgacc

SEQ ID NO: 2757244 - DNA, 25 bp, Homo sapien
ggtcccgaatcagaccacactggat

SEQ ID NO: 2757245 - DNA, 25 bp, Homo sapien
aagagcttagtctactcagacatcc

SEQ ID NO: 2757246 - DNA, 25 bp, Homo sapien
ccaaaccacataagccctaaagtct

SEQ ID NO: 2757247 - DNA, 25 bp, Homo sapien
gcttagtctactcagacatccccaa

SEQ ID NO: 2757248 - DNA, 25 bp, Homo sapien
accacataagccctaaagtcttcag

SEQ ID NO: 2757249 - DNA, 25 bp, Homo sapien
ggccttaccaacaattacactttca

SEQ ID NO: 2757250 - DNA, 25 bp, Homo sapien
tcgacaacaatccaaaggccttacc

SEQ ID NO: 2757251 - DNA, 25 bp, Homo sapien
tcttcacttgaaactacctgataaa

SEQ ID NO: 2757252 - DNA, 25 bp, Homo sapien
ttacagcttaagaaatcgctaccta

SEQ ID NO: 2757253 - DNA, 25 bp, Homo sapien
tcccatggcaagtaggaggccagct

SEQ ID NO: 2757254 - DNA, 25 bp, Homo sapien
ggagccaatctcacatcttcccatg

SEQ ID NO: 2757255 - DNA, 25 bp, Homo sapien
catgaaatcggcctgaaaccttcct

SEQ ID NO: 2757256 - DNA, 25 bp, Homo sapien
tatttgccaagtatctgttcatctg

SEQ ID NO: 2757257 - DNA, 25 bp, Homo sapien
gacttgtactagtgagaaaggagga

SEQ ID NO: 2757258 - DNA, 25 bp, Homo sapien
aattattccggcaacatctcttcag

SEQ ID NO: 2757259 - DNA, 25 bp, Homo sapien
ggcattaagttgaagtgatctcaaa

SEQ ID NO: 2757260 - DNA, 25 bp, Homo sapien
aattaaagctctagtaagtagaggc

SEQ ID NO: 2757261 - DNA, 25 bp, Homo sapien
gaaaatgctcccaatgccgtggtac

SEQ ID NO: 2757262 - DNA, 25 bp, Homo sapien
ggaaaatgctcccaatgccgtggta

SEQ ID NO: 2757263 - DNA, 25 bp, Homo sapien
tcgccgactggtcaccatcgcgatg

SEQ ID NO: 2757264 - DNA, 25 bp, Homo sapien
tcacacacgccacataaatgctgca

SEQ ID NO: 2757265 - DNA, 25 bp, Homo sapien
ggtcaccatcgcgatgcctgtgcac

SEQ ID NO: 2757266 - DNA, 25 bp, Homo sapien
tgattggcttccgttttctcacagt

SEQ ID NO: 2757267 - DNA, 25 bp, Homo sapien
tatgcacactagatccataaaacca

SEQ ID NO: 2757268 - DNA, 25 bp, Homo sapien
gaccagaggagccaagtcacactgg

SEQ ID NO: 2757269 - DNA, 25 bp, Homo sapien
ccatagcagatctgaaaaaggatgt

SEQ ID NO: 2757270 - DNA, 25 bp, Homo sapien
cattccatagcagatctgaaaaagg

SEQ ID NO: 2757271 - DNA, 25 bp, Homo sapien
tctcaaccagtgttatagaaatgct

SEQ ID NO: 2757272 - DNA, 25 bp, Homo sapien
taagaacagggatcctaggattaca

SEQ ID NO: 2757273 - DNA, 25 bp, Homo sapien
taggattacagcaatcatctgaact

SEQ ID NO: 2757274 - DNA, 25 bp, Homo sapien
caaccagtgttatagaaatgctctg

SEQ ID NO: 2757275 - DNA, 25 bp, Homo sapien
gacccaggaaatcgagtggccatgc

SEQ ID NO: 2757276 - DNA, 25 bp, Homo sapien
tcctgggacccaggaaatcgagtgg

SEQ ID NO: 2757277 - DNA, 25 bp, Homo sapien
aggaaatcgagtggccatgcactga

SEQ ID NO: 2757278 - DNA, 25 bp, Homo sapien
atgcactggctgtagtgtttcctgg

SEQ ID NO: 2757279 - DNA, 25 bp, Homo sapien
tacgaagctgcacctgtactacctg

SEQ ID NO: 2757280 - DNA, 25 bp, Homo sapien
gataaacatcctacgatggacagga

SEQ ID NO: 2757281 - DNA, 25 bp, Homo sapien
tgccccatgaacgtcagatgtggct

SEQ ID NO: 2757282 - DNA, 25 bp, Homo sapien
gtgccattgacatctagcgggtaga

SEQ ID NO: 2757283 - DNA, 25 bp, Homo sapien
tcagtgcagcttggctatttgaagg

SEQ ID NO: 2757284 - DNA, 25 bp, Homo sapien
ctactctgactcaaggctcagtgca

SEQ ID NO: 2757285 - DNA, 25 bp, Homo sapien
gcttggctatttgaaggctcccaga

SEQ ID NO: 2757286 - DNA, 25 bp, Homo sapien
tatttgaaggctcccagacacacac

SEQ ID NO: 2757287 - DNA, 25 bp, Homo sapien
gcttgagtggctctaattttaacag

SEQ ID NO: 2757288 - DNA, 25 bp, Homo sapien
tctacgtggcaatcagaacttacac

SEQ ID NO: 2757289 - DNA, 25 bp, Homo sapien
gaacttacacatcgttcactgtagt

SEQ ID NO: 2757290 - DNA, 25 bp, Homo sapien
catcgttcagtccttctacgtggca

SEQ ID NO: 2757291 - DNA, 25 bp, Homo sapien
gaaactgacataagctgacactctg

SEQ ID NO: 2757292 - DNA, 25 bp, Homo sapien
gacataagctgacactctgctgtat

SEQ ID NO: 2757293 - DNA, 25 bp, Homo sapien
atatcttggcacaatattgctttca

SEQ ID NO: 2757294 - DNA, 25 bp, Homo sapien
gacactctgctgtatatcttggcac

SEQ ID NO: 2757295 - DNA, 25 bp, Homo sapien
caggtttactgccatgttcagagcc

SEQ ID NO: 2757296 - DNA, 25 bp, Homo sapien
gctcagagcatctaccaactgtgac

SEQ ID NO: 2757297 - DNA, 25 bp, Homo sapien
gatgcaggatgtgtataagactata

SEQ ID NO: 2757298 - DNA, 25 bp, Homo sapien
gagccaagtaccaaattagatattc

SEQ ID NO: 2757299 - DNA, 25 bp, Homo sapien
tttcccaagaagcgcacagtgtcca

SEQ ID NO: 2757300 - DNA, 25 bp, Homo sapien
caagaagcgcacagtgtccacaaga

SEQ ID NO: 2757301 - DNA, 25 bp, Homo sapien
cgcacagtgtccacaagaatgtgaa

SEQ ID NO: 2757302 - DNA, 25 bp, Homo sapien
acaagaatgtgaaagccatctggaa

SEQ ID NO: 2757303 - DNA, 25 bp, Homo sapien
tgttccatgtatagcaaggcactgc

SEQ ID NO: 2757304 - DNA, 25 bp, Homo sapien
taagggtcatggacattccaagagg

SEQ ID NO: 2757305 - DNA, 25 bp, Homo sapien
taaagtgccctctgatgaatccaat

SEQ ID NO: 2757306 - DNA, 25 bp, Homo sapien
gacacaaatggagcccaagacgttt

SEQ ID NO: 2757307 - DNA, 25 bp, Homo sapien
aatttctccctccagcaagatggct

SEQ ID NO: 2757308 - DNA, 25 bp, Homo sapien
ccagggtacagagccattttcaggg

SEQ ID NO: 2757309 - DNA, 25 bp, Homo sapien
cctcaggagatggtcggtgcctcaa

SEQ ID NO: 2757310 - DNA, 25 bp, Homo sapien
aacttcccctataactggccagtgg

SEQ ID NO: 2757311 - DNA, 25 bp, Homo sapien
tgcttacggactctgagagctaaag

SEQ ID NO: 2757312 - DNA, 25 bp, Homo sapien
tgaccatcgcttttctcctgaataa

SEQ ID NO: 2757313 - DNA, 25 bp, Homo sapien
aaaggttttaagttatggatgacat

SEQ ID NO: 2757314 - DNA, 25 bp, Homo sapien
taataacccacttatgcttacggac

SEQ ID NO: 2757315 - DNA, 25 bp, Homo sapien
aataattatagtccaggtagacgca

SEQ ID NO: 2757316 - DNA, 25 bp, Homo sapien
ggaggagcaaactgaccacctgttt

SEQ ID NO: 2757317 - DNA, 25 bp, Homo sapien
cttcagtaggaaaacaaaccatagt

SEQ ID NO: 2757318 - DNA, 25 bp, Homo sapien
cttgtccaaggagaacacaggtcta

SEQ ID NO: 2757319 - DNA, 25 bp, Homo sapien
gctcctcctagtgcatcagctacat

SEQ ID NO: 2757320 - DNA, 25 bp, Homo sapien
ccaaagtcagttttcaatggtaatt

SEQ ID NO: 2757321 - DNA, 25 bp, Homo sapien
caggctggacatatgcagacatttt

SEQ ID NO: 2757322 - DNA, 25 bp, Homo sapien
gcaatgccaatacagttcatgctct

SEQ ID NO: 2757323 - DNA, 25 bp, Homo sapien
aattattcacaagccctaggtcagc

SEQ ID NO: 2757324 - DNA, 25 bp, Homo sapien
tctgcaaacactggtagttccacct

SEQ ID NO: 2757325 - DNA, 25 bp, Homo sapien
gatttagatagcaacaaggaacacg

SEQ ID NO: 2757326 - DNA, 25 bp, Homo sapien
cactagtaattcagcttgcaggttc

SEQ ID NO: 2757327 - DNA, 25 bp, Homo sapien
cagggcatttgtagatttatgtgta

SEQ ID NO: 2757328 - DNA, 25 bp, Homo sapien
gaacctgaatctgtttcacgataaa

SEQ ID NO: 2757329 - DNA, 25 bp, Homo sapien
tgagagtaactgttgggaatacttc

SEQ ID NO: 2757330 - DNA, 25 bp, Homo sapien
tatattctacctgtctgttcaaaga

SEQ ID NO: 2757331 - DNA, 25 bp, Homo sapien
taactaagcttaagtgcattcatgt

SEQ ID NO: 2757332 - DNA, 25 bp, Homo sapien
tggagcccattagagcttaaatgct

SEQ ID NO: 2757333 - DNA, 25 bp, Homo sapien
gataaagaaagcctggttaagtgga

SEQ ID NO: 2757334 - DNA, 25 bp, Homo sapien
aaccaaagttttcataccagtgaag

SEQ ID NO: 2757335 - DNA, 25 bp, Homo sapien
agctgatgtgtataccgaactgacc

SEQ ID NO: 2757336 - DNA, 25 bp, Homo sapien
tccattttagcaggcacagctgatg

SEQ ID NO: 2757337 - DNA, 25 bp, Homo sapien
acatggtatctataacagcaaagtt

SEQ ID NO: 2757338 - DNA, 25 bp, Homo sapien
caggaacctctctcactgatccatt

SEQ ID NO: 2757339 - DNA, 25 bp, Homo sapien
ttatcactaaagcacctgaggaaca

SEQ ID NO: 2757340 - DNA, 25 bp, Homo sapien
tgcttctaagcataaaccaaaatcc

SEQ ID NO: 2757341 - DNA, 25 bp, Homo sapien
accaaaatccatcgaataattcaca

SEQ ID NO: 2757342 - DNA, 25 bp, Homo sapien
cttttggcattatcactaaagcacc

SEQ ID NO: 2757343 - DNA, 25 bp, Homo sapien
accgagcgcgtctcgggctggtctc

SEQ ID NO: 2757344 - DNA, 25 bp, Homo sapien
ccctggaagcagatcttgcagatgg

SEQ ID NO: 2757345 - DNA, 25 bp, Homo sapien
tgctgcacaccgagcgcgtctcggg

SEQ ID NO: 2757346 - DNA, 25 bp, Homo sapien
tggaagcagatcttgcagatgggct

SEQ ID NO: 2757347 - DNA, 25 bp, Homo sapien
ccggggccgcctttcgctgctgccg

SEQ ID NO: 2757348 - DNA, 25 bp, Homo sapien
tccccggagtcgccggccgccgcca

SEQ ID NO: 2757349 - DNA, 25 bp, Homo sapien
ccgccgccacttcctggccggcggg

SEQ ID NO: 2757350 - DNA, 25 bp, Homo sapien
ggccgccgccacttcctggccggcg

SEQ ID NO: 2757351 - DNA, 25 bp, Homo sapien
ccggccgccgccacttcctggccgg

SEQ ID NO: 2757352 - DNA, 25 bp, Homo sapien
ctcaaagctcatggttgtgccgccg

SEQ ID NO: 2757353 - DNA, 25 bp, Homo sapien
ctagcggctcgcttggccccgcggc

SEQ ID NO: 2757354 - DNA, 25 bp, Homo sapien
gtggccgccctcaaagctcatggtt

SEQ ID NO: 2757355 - DNA, 25 bp, Homo sapien
aggcggcagctcgtccgctcccctg

SEQ ID NO: 2757356 - DNA, 25 bp, Homo sapien
ggggatgcggaaggttctgcagctg

SEQ ID NO: 2757357 - DNA, 25 bp, Homo sapien
ggaggggatgcggaaggttctgcag

SEQ ID NO: 2757358 - DNA, 25 bp, Homo sapien
agggaaagagagcgcggagggggcg

SEQ ID NO: 2757359 - DNA, 25 bp, Homo sapien
cagggaaagagagcgcggagggggc

SEQ ID NO: 2757360 - DNA, 25 bp, Homo sapien
ttccggggcggatgacccctctcca

SEQ ID NO: 2757361 - DNA, 25 bp, Homo sapien
tgacccctctccaaacggcgcagcg

SEQ ID NO: 2757362 - DNA, 25 bp, Homo sapien
ggcggatgacccctctccaaacggc

SEQ ID NO: 2757363 - DNA, 25 bp, Homo sapien
ggatgacccctctccaaacggcgca

SEQ ID NO: 2757364 - DNA, 25 bp, Homo sapien
agtagggggcaggggagaggccgcg

SEQ ID NO: 2757365 - DNA, 25 bp, Homo sapien
gggcaggggagaggccgcgggtcca

SEQ ID NO: 2757366 - DNA, 25 bp, Homo sapien
caggggagaggccgcgggtccagaa

SEQ ID NO: 2757367 - DNA, 25 bp, Homo sapien
gcaggggagaggccgcgggtccaga

SEQ ID NO: 2757368 - DNA, 25 bp, Homo sapien
tcctgcagtgagcatcccgggttgt

SEQ ID NO: 2757369 - DNA, 25 bp, Homo sapien
taatcactttcgtcgttgccgcatg

SEQ ID NO: 2757370 - DNA, 25 bp, Homo sapien
ttatactagtgaaccctggcgccac

SEQ ID NO: 2757371 - DNA, 25 bp, Homo sapien
taaagatcttggtgcctgggaggtc

SEQ ID NO: 2757372 - DNA, 25 bp, Homo sapien
cgttgaagaaatgtggttgtcgata

SEQ ID NO: 2757373 - DNA, 25 bp, Homo sapien
aaatgtggttgtcgatatgctttca

SEQ ID NO: 2757374 - DNA, 25 bp, Homo sapien
agaaatgtggttgtcgatatgcttt

SEQ ID NO: 2757375 - DNA, 25 bp, Homo sapien
tgaagaaatgtggttgtcgatatgc

SEQ ID NO: 2757376 - DNA, 25 bp, Homo sapien
gtcagaatgacaacgcaagtttgtg

SEQ ID NO: 2757377 - DNA, 25 bp, Homo sapien
cataagttctcgagttaaagactgt

SEQ ID NO: 2757378 - DNA, 25 bp, Homo sapien
caacgcaagtttgtgtattgccaca

SEQ ID NO: 2757379 - DNA, 25 bp, Homo sapien
cacagtcaagataatcataagcctt

SEQ ID NO: 2757380 - DNA, 25 bp, Homo sapien
gaaaaggatcatggttgctccagcc

SEQ ID NO: 2757381 - DNA, 25 bp, Homo sapien
gaccatgagctgctgagcagtcgct

SEQ ID NO: 2757382 - DNA, 25 bp, Homo sapien
cttccttcagataagaagaggaggc

SEQ ID NO: 2757383 - DNA, 25 bp, Homo sapien
caagtttacggcaaaccaccagcct

SEQ ID NO: 2757384 - DNA, 25 bp, Homo sapien
acaaaatgacatagctgatgtgagt

SEQ ID NO: 2757385 - DNA, 25 bp, Homo sapien
caacaaaatgacatagctgatgtga

SEQ ID NO: 2757386 - DNA, 25 bp, Homo sapien
caaaatgacatagctgatgtgagta

SEQ ID NO: 2757387 - DNA, 25 bp, Homo sapien
aacaaaatgacatagctgatgtgag

SEQ ID NO: 2757388 - DNA, 25 bp, Homo sapien
gatcttcctgtccacagcaaatggc

SEQ ID NO: 2757389 - DNA, 25 bp, Homo sapien
ccacagcaaatggcaaataacaaat

SEQ ID NO: 2757390 - DNA, 25 bp, Homo sapien
ctgatcttcctgtccacagcaaatg

SEQ ID NO: 2757391 - DNA, 25 bp, Homo sapien
gtccacagcaaatggcaaataacaa

SEQ ID NO: 2757392 - DNA, 25 bp, Homo sapien
tgaccactcccatatgcagaattta

SEQ ID NO: 2757393 - DNA, 25 bp, Homo sapien
cacacctagacttgatgctgcaacc

SEQ ID NO: 2757394 - DNA, 25 bp, Homo sapien
acctgagtcccaatatgatcgcctg

SEQ ID NO: 2757395 - DNA, 25 bp, Homo sapien
gaatttaccaaatcgcacacctaga

SEQ ID NO: 2757396 - DNA, 25 bp, Homo sapien
tcagggagcctcttggcaatttgga

SEQ ID NO: 2757397 - DNA, 25 bp, Homo sapien
acagatgtgaggtagatggtgaact

SEQ ID NO: 2757398 - DNA, 25 bp, Homo sapien
tgggtctactcctgcccgggaaatc

SEQ ID NO: 2757399 - DNA, 25 bp, Homo sapien
gactgactgacacttgacagatgtg

SEQ ID NO: 2757400 - DNA, 25 bp, Homo sapien
gagcctgctgccgtcttgtatctgc

SEQ ID NO: 2757401 - DNA, 25 bp, Homo sapien
gcgagagcctgctgccgtcttgtat

SEQ ID NO: 2757402 - DNA, 25 bp, Homo sapien
cgagagcctgctgccgtcttgtatc

SEQ ID NO: 2757403 - DNA, 25 bp, Homo sapien
gcctgctgccgtcttgtatctgcct

SEQ ID NO: 2757404 - DNA, 25 bp, Homo sapien
cactgtctgggtcatgagagagctg

SEQ ID NO: 2757405 - DNA, 25 bp, Homo sapien
ccactttgagtcagggcactgtctg

SEQ ID NO: 2757406 - DNA, 25 bp, Homo sapien
tcagggcactgtctgggtcatgaga

SEQ ID NO: 2757407 - DNA, 25 bp, Homo sapien
cttctctcccactttgagtcagggc

SEQ ID NO: 2757408 - DNA, 25 bp, Homo sapien
catctggtagctgtacttgctgaga

SEQ ID NO: 2757409 - DNA, 25 bp, Homo sapien
tgtgctacaattggcttcaccctga

SEQ ID NO: 2757410 - DNA, 25 bp, Homo sapien
aaaatgtagaggtatctgaagctgg

SEQ ID NO: 2757411 - DNA, 25 bp, Homo sapien
tcctcttgcactattggaatctgtg

SEQ ID NO: 2757412 - DNA, 25 bp, Homo sapien
gcagtttctatggcttcacagggca

SEQ ID NO: 2757413 - DNA, 25 bp, Homo sapien
ggcagtttctatggcttcacagggc

SEQ ID NO: 2757414 - DNA, 25 bp, Homo sapien
gggcagtttctatggcttcacaggg

SEQ ID NO: 2757415 - DNA, 25 bp, Homo sapien
agatcaactgttttgaggctcaatt

SEQ ID NO: 2757416 - DNA, 25 bp, Homo sapien
acttgagaatactcactgtctatct

SEQ ID NO: 2757417 - DNA, 25 bp, Homo sapien
tactcactgtctatctgattgctgc

SEQ ID NO: 2757418 - DNA, 25 bp, Homo sapien
tctatctgattgctgctaaaatctt

SEQ ID NO: 2757419 - DNA, 25 bp, Homo sapien
tgtctcaagggaccagcagaaggag

SEQ ID NO: 2757420 - DNA, 25 bp, Homo sapien
catgggcaccctaagctcagggagt

SEQ ID NO: 2757421 - DNA, 25 bp, Homo sapien
gagatatgagagaggcagttttccc

SEQ ID NO: 2757422 - DNA, 25 bp, Homo sapien
tcagcatcattgaagatcacaggcc

SEQ ID NO: 2757423 - DNA, 25 bp, Homo sapien
ttccactgccgcctgggtatttgcg

SEQ ID NO: 2757424 - DNA, 25 bp, Homo sapien
tgactcaatgcttctcagtcccagc

SEQ ID NO: 2757425 - DNA, 25 bp, Homo sapien
ggtcagacgccgcaaatgctctggg

SEQ ID NO: 2757426 - DNA, 25 bp, Homo sapien
aatgctctgggtgcaggaccggact

SEQ ID NO: 2757427 - DNA, 25 bp, Homo sapien
agcatctctgccatggatgccctca

SEQ ID NO: 2757428 - DNA, 25 bp, Homo sapien
caaaagcactgtgattccttcttct

SEQ ID NO: 2757429 - DNA, 25 bp, Homo sapien
catctctgccatggatgccctcagt

SEQ ID NO: 2757430 - DNA, 25 bp, Homo sapien
atctctgccatggatgccctcagtc

SEQ ID NO: 2757431 - DNA, 25 bp, Homo sapien
gcactaataatctggtatacaccga

SEQ ID NO: 2757432 - DNA, 25 bp, Homo sapien
gaaacatgcactaataatctggtat

SEQ ID NO: 2757433 - DNA, 25 bp, Homo sapien
agtggtaccaaagaagctcaaatcc

SEQ ID NO: 2757434 - DNA, 25 bp, Homo sapien
ggtatacaccgaactgtgccaagtg

SEQ ID NO: 2757435 - DNA, 25 bp, Homo sapien
ctgggggtggtagggatgtggagct

SEQ ID NO: 2757436 - DNA, 25 bp, Homo sapien
tgggggtggtagggatgtggagctt

SEQ ID NO: 2757437 - DNA, 25 bp, Homo sapien
ccactttagggcaaaggataatatc

SEQ ID NO: 2757438 - DNA, 25 bp, Homo sapien
tagggcaaaggataatatcatcagc

SEQ ID NO: 2757439 - DNA, 25 bp, Homo sapien
aattctctaccactttagggcaaag

SEQ ID NO: 2757440 - DNA, 25 bp, Homo sapien
aaaggataatatcatcagctttctg

SEQ ID NO: 2757441 - DNA, 25 bp, Homo sapien
aaccataagagacttgatgcattct

SEQ ID NO: 2757442 - DNA, 25 bp, Homo sapien
tagccaactaagtctttcacccgag

SEQ ID NO: 2757443 - DNA, 25 bp, Homo sapien
gcaaatgactgcagacattcaatat

SEQ ID NO: 2757444 - DNA, 25 bp, Homo sapien
cacccgagtgtggtaaaccataaga

SEQ ID NO: 2757445 - DNA, 25 bp, Homo sapien
taagccaggttgagcatcacaaagg

SEQ ID NO: 2757446 - DNA, 25 bp, Homo sapien
gccaggttgagcatcacaaaggagc

SEQ ID NO: 2757447 - DNA, 25 bp, Homo sapien
ttgagcatcacaaaggagcagctct

SEQ ID NO: 2757448 - DNA, 25 bp, Homo sapien
tgctaagccaggttgagcatcacaa

SEQ ID NO: 2757449 - DNA, 25 bp, Homo sapien
cacagatgctatggtcagatctttt

SEQ ID NO: 2757450 - DNA, 25 bp, Homo sapien
atcaggttggccaactctaaagcct

SEQ ID NO: 2757451 - DNA, 25 bp, Homo sapien
ggacagcacgttggggttacgcatc

SEQ ID NO: 2757452 - DNA, 25 bp, Homo sapien
ttttgtcacagatgctatggtcaga

SEQ ID NO: 2757453 - DNA, 25 bp, Homo sapien
tagatccggggatatccacgggtgc

SEQ ID NO: 2757454 - DNA, 25 bp, Homo sapien
ctagatccggggatatccacgggtg

SEQ ID NO: 2757455 - DNA, 25 bp, Homo sapien
aatgatcaacaaatcctgcatcttg

SEQ ID NO: 2757456 - DNA, 25 bp, Homo sapien
cctgcatcttgttcagatgagtgca

SEQ ID NO: 2757457 - DNA, 25 bp, Homo sapien
gtttcctcgaaataaatgatcaaca

SEQ ID NO: 2757458 - DNA, 25 bp, Homo sapien
ttcccagtttcctcgaaataaatga

SEQ ID NO: 2757459 - DNA, 25 bp, Homo sapien
taaatgtattgaacacagtgccaga

SEQ ID NO: 2757460 - DNA, 25 bp, Homo sapien
tctggacccttaagtaggaagagct

SEQ ID NO: 2757461 - DNA, 25 bp, Homo sapien
cagtgccagagtgtagtaagtaccc

SEQ ID NO: 2757462 - DNA, 25 bp, Homo sapien
tatccagcacgggaagaaagaggtg

SEQ ID NO: 2757463 - DNA, 25 bp, Homo sapien
catatgcaggttcacttaggaaaaa

SEQ ID NO: 2757464 - DNA, 25 bp, Homo sapien
gactgagaatatgctagaagatctc

SEQ ID NO: 2757465 - DNA, 25 bp, Homo sapien
cagaatcgtttggacgtttttagct

SEQ ID NO: 2757466 - DNA, 25 bp, Homo sapien
gtttttagctccgttgacttctgtc

SEQ ID NO: 2757467 - DNA, 25 bp, Homo sapien
cctccagcatgggtaccagattgaa

SEQ ID NO: 2757468 - DNA, 25 bp, Homo sapien
aagaacacttgaatccaacctgagc

SEQ ID NO: 2757469 - DNA, 25 bp, Homo sapien
gggtaccagattgaagaacacttga

SEQ ID NO: 2757470 - DNA, 25 bp, Homo sapien
gaacacttgaatccaacctgagcat

SEQ ID NO: 2757471 - DNA, 25 bp, Homo sapien
gatgtttagcagctggtggacagat

SEQ ID NO: 2757472 - DNA, 25 bp, Homo sapien
tcacaatgtgcttctgaggaactct

SEQ ID NO: 2757473 - DNA, 25 bp, Homo sapien
acaatgtgcttctgaggaactcttg

SEQ ID NO: 2757474 - DNA, 25 bp, Homo sapien
tagcagctggtggacagataagcac

SEQ ID NO: 2757475 - DNA, 25 bp, Homo sapien
ccaggtgttcagtggaacaatcttt

SEQ ID NO: 2757476 - DNA, 25 bp, Homo sapien
caggtgttcagtggaacaatctttt

SEQ ID NO: 2757477 - DNA, 25 bp, Homo sapien
aggtgttcagtggaacaatcttttg

SEQ ID NO: 2757478 - DNA, 25 bp, Homo sapien
tttgggcatcttcttgggcagaaat

SEQ ID NO: 2757479 - DNA, 25 bp, Homo sapien
tgggcagaaatccaaaaatgctctt

SEQ ID NO: 2757480 - DNA, 25 bp, Homo sapien
tcttcttgggcagaaatccaaaaat

SEQ ID NO: 2757481 - DNA, 25 bp, Homo sapien
tgggcatcttcttgggcagaaatcc

SEQ ID NO: 2757482 - DNA, 25 bp, Homo sapien
ccctagttgatgttagaggctgact

SEQ ID NO: 2757483 - DNA, 25 bp, Homo sapien
ctggctttctccctagttgatgtta

SEQ ID NO: 2757484 - DNA, 25 bp, Homo sapien
aattgccggcaactgctgattgctg

SEQ ID NO: 2757485 - DNA, 25 bp, Homo sapien
gaggctgacttgtgcaattgccggc

SEQ ID NO: 2757486 - DNA, 25 bp, Homo sapien
tgttcgttctttgctctcttgaatc

SEQ ID NO: 2757487 - DNA, 25 bp, Homo sapien
gtgttcgttctttgctctcttgaat

SEQ ID NO: 2757488 - DNA, 25 bp, Homo sapien
ggtgttcgttctttgctctcttgaa

SEQ ID NO: 2757489 - DNA, 25 bp, Homo sapien
gttcgttctttgctctcttgaatcc

SEQ ID NO: 2757490 - DNA, 25 bp, Homo sapien
tttctgcaagcagtctcttcgtctc

SEQ ID NO: 2757491 - DNA, 25 bp, Homo sapien
cagggtgattggcagctatttccca

SEQ ID NO: 2757492 - DNA, 25 bp, Homo sapien
ctcttcgtctcttacttcagggtga

SEQ ID NO: 2757493 - DNA, 25 bp, Homo sapien
agatggctttgatcatccactggcc

SEQ ID NO: 2757494 - DNA, 25 bp, Homo sapien
catgaagtaattccctaaggagcct

SEQ ID NO: 2757495 - DNA, 25 bp, Homo sapien
agccactggtaaatttctgcgtacg

SEQ ID NO: 2757496 - DNA, 25 bp, Homo sapien
tttccacctgactcttggccaaggc

SEQ ID NO: 2757497 - DNA, 25 bp, Homo sapien
tctgcgtacgtgttaagtgcctagt

SEQ ID NO: 2757498 - DNA, 25 bp, Homo sapien
attcccaaaccaagtgcttggtccg

SEQ ID NO: 2757499 - DNA, 25 bp, Homo sapien
caaaccaagtgcttggtccgtgatg

SEQ ID NO: 2757500 - DNA, 25 bp, Homo sapien
tcccaaaccaagtgcttggtccgtg

SEQ ID NO: 2757501 - DNA, 25 bp, Homo sapien
accaagtgcttggtccgtgatggag

SEQ ID NO: 2757502 - DNA, 25 bp, Homo sapien
tccagaagccaaacctgatagcaag

SEQ ID NO: 2757503 - DNA, 25 bp, Homo sapien
aagacaggcggcttctaccctgacg

SEQ ID NO: 2757504 - DNA, 25 bp, Homo sapien
tgatagcaagggtgattctgagagc

SEQ ID NO: 2757505 - DNA, 25 bp, Homo sapien
tctgagagctgcgtgtcagctttca

SEQ ID NO: 2757506 - DNA, 25 bp, Homo sapien
ttgtggaagaacctgggcatcccat

SEQ ID NO: 2757507 - DNA, 25 bp, Homo sapien
tatccgccagcaagggagtttcata

SEQ ID NO: 2757508 - DNA, 25 bp, Homo sapien
gacaatcagtcctgacaacagcctg

SEQ ID NO: 2757509 - DNA, 25 bp, Homo sapien
catagcacaagaagggagtatccgc

SEQ ID NO: 2757510 - DNA, 25 bp, Homo sapien
tttggaagaagcttcggttcctgta

SEQ ID NO: 2757511 - DNA, 25 bp, Homo sapien
gaagcttcggttcctgtagccaaag

SEQ ID NO: 2757512 - DNA, 25 bp, Homo sapien
tggaagaagcttcggttcctgtagc

SEQ ID NO: 2757513 - DNA, 25 bp, Homo sapien
gaagaagcttcggttcctgtagcca

SEQ ID NO: 2757514 - DNA, 25 bp, Homo sapien
ttcctgatgttgtagtcaagatggc

SEQ ID NO: 2757515 - DNA, 25 bp, Homo sapien
tggctcactcacataacggtagcaa

SEQ ID NO: 2757516 - DNA, 25 bp, Homo sapien
taacggtagcaagaggcctcagttc

SEQ ID NO: 2757517 - DNA, 25 bp, Homo sapien
tgtcctcataacatatcagctagct

SEQ ID NO: 2757518 - DNA, 25 bp, Homo sapien
ttgacttatgattctgatggctgaa

SEQ ID NO: 2757519 - DNA, 25 bp, Homo sapien
gtttcctttgtttcgttcatatata

SEQ ID NO: 2757520 - DNA, 25 bp, Homo sapien
cattaaccaaagacttatgctcagt

SEQ ID NO: 2757521 - DNA, 25 bp, Homo sapien
tatacctctttataatcataacgta

SEQ ID NO: 2757522 - DNA, 25 bp, Homo sapien
tatactcaactcaacattaaccaaa

SEQ ID NO: 2757523 - DNA, 25 bp, Homo sapien
ctactgccgaacatagttcttgctg

SEQ ID NO: 2757524 - DNA, 25 bp, Homo sapien
agttcttgctgttgataggtgaacc

SEQ ID NO: 2757525 - DNA, 25 bp, Homo sapien
aacatagttcttgctgttgataggt

SEQ ID NO: 2757526 - DNA, 25 bp, Homo sapien
catagttcttgctgttgataggtga

SEQ ID NO: 2757527 - DNA, 25 bp, Homo sapien
tctcattctaatcaagcccagtgta

SEQ ID NO: 2757528 - DNA, 25 bp, Homo sapien
ctgagtgcacaacatcgttcctcat

SEQ ID NO: 2757529 - DNA, 25 bp, Homo sapien
ctcattctaatcaagcccagtgtat

SEQ ID NO: 2757530 - DNA, 25 bp, Homo sapien
tgttcaagctattttctgaggccat

SEQ ID NO: 2757531 - DNA, 25 bp, Homo sapien
cacattgctgcagaatgatgttgtt

SEQ ID NO: 2757532 - DNA, 25 bp, Homo sapien
tgttgttcaagctattttctgaggc

SEQ ID NO: 2757533 - DNA, 25 bp, Homo sapien
ctgcagaatgatgttgttcaagcta

SEQ ID NO: 2757534 - DNA, 25 bp, Homo sapien
cacacggctgccagtttatgggtcc

SEQ ID NO: 2757535 - DNA, 25 bp, Homo sapien
tttaacaccgtagctgctgatggac

SEQ ID NO: 2757536 - DNA, 25 bp, Homo sapien
tgttggaaaatatgacccggtcctc

SEQ ID NO: 2757537 - DNA, 25 bp, Homo sapien
ttgaaagctccaacagaggcggctg

SEQ ID NO: 2757538 - DNA, 25 bp, Homo sapien
gatcctccgagaaagagggaattct

SEQ ID NO: 2757539 - DNA, 25 bp, Homo sapien
tctctaatgcgggtggcctcatcca

SEQ ID NO: 2757540 - DNA, 25 bp, Homo sapien
gaaggacttaggagaaaaagcctga

SEQ ID NO: 2757541 - DNA, 25 bp, Homo sapien
ccttcagactagagactgcagcatc

SEQ ID NO: 2757542 - DNA, 25 bp, Homo sapien
tggaaggtcctcatgagccggtgct

SEQ ID NO: 2757543 - DNA, 25 bp, Homo sapien
ttttagtgacagtgctcccaatgcc

SEQ ID NO: 2757544 - DNA, 25 bp, Homo sapien
caatggagtacctgcaagtgctcga

SEQ ID NO: 2757545 - DNA, 25 bp, Homo sapien
caaagtgcgtatgtccagtcctgct

SEQ ID NO: 2757546 - DNA, 25 bp, Homo sapien
tcaattaccaggaccctttgtttgc

SEQ ID NO: 2757547 - DNA, 25 bp, Homo sapien
ccgcttcttacccagctacctgaag

SEQ ID NO: 2757548 - DNA, 25 bp, Homo sapien
tgccttgccgcttcttacccagcta

SEQ ID NO: 2757549 - DNA, 25 bp, Homo sapien
tgtttgccttgccgcttcttaccca

SEQ ID NO: 2757550 - DNA, 25 bp, Homo sapien
gaaaacatggcttggtggcataacc

SEQ ID NO: 2757551 - DNA, 25 bp, Homo sapien
atgaaaacatggcttggtggcataa

SEQ ID NO: 2757552 - DNA, 25 bp, Homo sapien
tgaaaacatggcttggtggcataac

SEQ ID NO: 2757553 - DNA, 25 bp, Homo sapien
tagcaagtggctggttagtctcctc

SEQ ID NO: 2757554 - DNA, 25 bp, Homo sapien
tcaaaaacctctagtagataggcag

SEQ ID NO: 2757555 - DNA, 25 bp, Homo sapien
cacagtcacgttatgcaggattcca

SEQ ID NO: 2757556 - DNA, 25 bp, Homo sapien
ggagatccactgtcaattatcagga

SEQ ID NO: 2757557 - DNA, 25 bp, Homo sapien
tgacagtgtgtatccactggacaaa

SEQ ID NO: 2757558 - DNA, 25 bp, Homo sapien
tctgatcaccgagatggtgaagtgg

SEQ ID NO: 2757559 - DNA, 25 bp, Homo sapien
gatacctcgacagtccatctgatca

SEQ ID NO: 2757560 - DNA, 25 bp, Homo sapien
tggtgaagtggctaactggagggaa

SEQ ID NO: 2757561 - DNA, 25 bp, Homo sapien
tgaatattttcagtccgaggttgaa

SEQ ID NO: 2757562 - DNA, 25 bp, Homo sapien
gagctgactgcatatccaccgtagc

SEQ ID NO: 2757563 - DNA, 25 bp, Homo sapien
cgaggttgaatgaacccacagatac

SEQ ID NO: 2757564 - DNA, 25 bp, Homo sapien
tgagtatgggatgccacttttttcc

SEQ ID NO: 2757565 - DNA, 25 bp, Homo sapien
tccctataaacgtagcaggtactgg

SEQ ID NO: 2757566 - DNA, 25 bp, Homo sapien
ggactttaaattgcaggcaacagcc

SEQ ID NO: 2757567 - DNA, 25 bp, Homo sapien
gaaattaggctcatagctaggtgga

SEQ ID NO: 2757568 - DNA, 25 bp, Homo sapien
tatcttcaggcaactttacggcttg

SEQ ID NO: 2757569 - DNA, 25 bp, Homo sapien
ctttataagtcgtctcattttccac

SEQ ID NO: 2757570 - DNA, 25 bp, Homo sapien
ccagctcgggagaggaaaaacaggc

SEQ ID NO: 2757571 - DNA, 25 bp, Homo sapien
caggcagcgagtagaaaagcagctt

SEQ ID NO: 2757572 - DNA, 25 bp, Homo sapien
tggtgcaccttacttccagctcggg

SEQ ID NO: 2757573 - DNA, 25 bp, Homo sapien
tctgcatgggtaacactggtgcacc

SEQ ID NO: 2757574 - DNA, 25 bp, Homo sapien
tcttctaagcacttacaaatttctc

SEQ ID NO: 2757575 - DNA, 25 bp, Homo sapien
aatgtgccaattgcaaattagtctg

SEQ ID NO: 2757576 - DNA, 25 bp, Homo sapien
aaaatgactgcacattgaaagttgg

SEQ ID NO: 2757577 - DNA, 25 bp, Homo sapien
gaaagttggcaacacagctcttacc

SEQ ID NO: 2757578 - DNA, 25 bp, Homo sapien
gcaggttcagcccacatgcatgtgt

SEQ ID NO: 2757579 - DNA, 25 bp, Homo sapien
ctaggctttacacttggatctttgt

SEQ ID NO: 2757580 - DNA, 25 bp, Homo sapien
gcatgtgttcacttctccagtgtga

SEQ ID NO: 2757581 - DNA, 25 bp, Homo sapien
tgtgataggcataagataccagaaa

SEQ ID NO: 2757582 - DNA, 25 bp, Homo sapien
cgtgagggcaaccacattctcctgg

SEQ ID NO: 2757583 - DNA, 25 bp, Homo sapien
tgtcaaacacaacagattgggtcct

SEQ ID NO: 2757584 - DNA, 25 bp, Homo sapien
tttaagcactaactctgccagggac

SEQ ID NO: 2757585 - DNA, 25 bp, Homo sapien
tggataatagggaacctgggcacca

SEQ ID NO: 2757586 - DNA, 25 bp, Homo sapien
gcaagcgcccagagatattcagtac

SEQ ID NO: 2757587 - DNA, 25 bp, Homo sapien
gaagcaactgtcaggcagcagtgca

SEQ ID NO: 2757588 - DNA, 25 bp, Homo sapien
tagcctggatttaatgcaagcgccc

SEQ ID NO: 2757589 - DNA, 25 bp, Homo sapien
taaagctgaggcgatgaagcaactg

SEQ ID NO: 2757590 - DNA, 25 bp, Homo sapien
ttctaacttttattattaggtcaga

SEQ ID NO: 2757591 - DNA, 25 bp, Homo sapien
gggtctctcctatgatctgtctttc

SEQ ID NO: 2757592 - DNA, 25 bp, Homo sapien
tgaagtagcagcaaaagggtctctc

SEQ ID NO: 2757593 - DNA, 25 bp, Homo sapien
ggagatgattgctcaatcccagcag

SEQ ID NO: 2757594 - DNA, 25 bp, Homo sapien
tgggcaggagatgattgctcaatcc

SEQ ID NO: 2757595 - DNA, 25 bp, Homo sapien
tgcatgtctcgctctcgcataagag

SEQ ID NO: 2757596 - DNA, 25 bp, Homo sapien
gtctcgctctcgcataagagccgct

SEQ ID NO: 2757597 - DNA, 25 bp, Homo sapien
ggacatactgcatgtctcgctctcg

SEQ ID NO: 2757598 - DNA, 25 bp, Homo sapien
ctttggacatactgcatgtctcgct

SEQ ID NO: 2757599 - DNA, 25 bp, Homo sapien
ctatgattggaaggcagttaagaaa

SEQ ID NO: 2757600 - DNA, 25 bp, Homo sapien
ggactccagaattgcataccagaac

SEQ ID NO: 2757601 - DNA, 25 bp, Homo sapien
atccaaccttggcagagaattcaaa

SEQ ID NO: 2757602 - DNA, 25 bp, Homo sapien
tctctaagccatgcgcctcaggggt

SEQ ID NO: 2757603 - DNA, 25 bp, Homo sapien
cacggccttccgatttttggcaact

SEQ ID NO: 2757604 - DNA, 25 bp, Homo sapien
actgctgaagtactcggcccacggc

SEQ ID NO: 2757605 - DNA, 25 bp, Homo sapien
aaatcgctgtttgtagtatctcatc

SEQ ID NO: 2757606 - DNA, 25 bp, Homo sapien
agctcttgacaagccaaatcgctgt

SEQ ID NO: 2757607 - DNA, 25 bp, Homo sapien
gcagtagccacttatagaccatcca

SEQ ID NO: 2757608 - DNA, 25 bp, Homo sapien
tctgacatccaattgaatgggcctt

SEQ ID NO: 2757609 - DNA, 25 bp, Homo sapien
tactccaaaagagctgaagagcaac

SEQ ID NO: 2757610 - DNA, 25 bp, Homo sapien
catggtgaagcatgcgacctgtcca

SEQ ID NO: 2757611 - DNA, 25 bp, Homo sapien
tccccttccttgtgatctggatagc

SEQ ID NO: 2757612 - DNA, 25 bp, Homo sapien
actcctcagccttattggggtcctc

SEQ ID NO: 2757613 - DNA, 25 bp, Homo sapien
gttcttttctgagggcaactcctca

SEQ ID NO: 2757614 - DNA, 25 bp, Homo sapien
gcaactcctcagccttattggggtc

SEQ ID NO: 2757615 - DNA, 25 bp, Homo sapien
gaagtctgcaaattccaaagcagca

SEQ ID NO: 2757616 - DNA, 25 bp, Homo sapien
cctgtacagcttctgtggagtagaa

SEQ ID NO: 2757617 - DNA, 25 bp, Homo sapien
tcgttgcaccacaagcaaatcttgc

SEQ ID NO: 2757618 - DNA, 25 bp, Homo sapien
gaaggacttccctttctcgttgcac

SEQ ID NO: 2757619 - DNA, 25 bp, Homo sapien
taatcagtcccttaatatctgaaag

SEQ ID NO: 2757620 - DNA, 25 bp, Homo sapien
cacatcgtccattgcttcagtatcc

SEQ ID NO: 2757621 - DNA, 25 bp, Homo sapien
gaaactgtggtctttggtcatgtga

SEQ ID NO: 2757622 - DNA, 25 bp, Homo sapien
tcttcatcagcgagctggaatgatg

SEQ ID NO: 2757623 - DNA, 25 bp, Homo sapien
tttgccaacttcttcgcctgctgtt

SEQ ID NO: 2757624 - DNA, 25 bp, Homo sapien
tgctgttcaaaccactggagccggg

SEQ ID NO: 2757625 - DNA, 25 bp, Homo sapien
gtacccacggccacgacattcctgg

SEQ ID NO: 2757626 - DNA, 25 bp, Homo sapien
gtggtttctcactcgggtctcggtc

SEQ ID NO: 2757627 - DNA, 25 bp, Homo sapien
cagtccgtcttatagtgggcccgct

SEQ ID NO: 2757628 - DNA, 25 bp, Homo sapien
caggttgtagcggtgccagtccgtc

SEQ ID NO: 2757629 - DNA, 25 bp, Homo sapien
aacgccacccggcaagttatgcagg

SEQ ID NO: 2757630 - DNA, 25 bp, Homo sapien
gatggccgcgttcatggcatccttg

SEQ ID NO: 2757631 - DNA, 25 bp, Homo sapien
aggaaacccgcctctcaggctgtgg

SEQ ID NO: 2757632 - DNA, 25 bp, Homo sapien
gttattcacaactggacaggaaacc

SEQ ID NO: 2757633 - DNA, 25 bp, Homo sapien
cactgaggaaacttccggcacacgt

SEQ ID NO: 2757634 - DNA, 25 bp, Homo sapien
cggcacacgtcggaagttattcaca

SEQ ID NO: 2757635 - DNA, 25 bp, Homo sapien
gaatgtgtctacgttggatgaagct

SEQ ID NO: 2757636 - DNA, 25 bp, Homo sapien
gagactagagagagccacgatatca

SEQ ID NO: 2757637 - DNA, 25 bp, Homo sapien
catttcagatgggtcctaaaggaga

SEQ ID NO: 2757638 - DNA, 25 bp, Homo sapien
catgcttcatttgatggagagtcac

SEQ ID NO: 2757639 - DNA, 25 bp, Homo sapien
tatgactttgacactgtgtctcagg

SEQ ID NO: 2757640 - DNA, 25 bp, Homo sapien
tcattctctaaacatccgtgtgtga

SEQ ID NO: 2757641 - DNA, 25 bp, Homo sapien
tagtacaaatgctacagtggaaatg

SEQ ID NO: 2757642 - DNA, 25 bp, Homo sapien
cagggccataatattaacatgagaa

SEQ ID NO: 2757643 - DNA, 25 bp, Homo sapien
caaacacagtcatgaggcactaatg

SEQ ID NO: 2757644 - DNA, 25 bp, Homo sapien
tccaaaacccacacagttcagagat

SEQ ID NO: 2757645 - DNA, 25 bp, Homo sapien
ggcacaggctcactttgtatcaata

SEQ ID NO: 2757646 - DNA, 25 bp, Homo sapien
tatcaataaaggacatcaaacacag

SEQ ID NO: 2757647 - DNA, 25 bp, Homo sapien
taataccacccactgcaagactaga

SEQ ID NO: 2757648 - DNA, 25 bp, Homo sapien
ggtagttgctggcatggtccctcga

SEQ ID NO: 2757649 - DNA, 25 bp, Homo sapien
ggtctaacttaagtctgagcaggca

SEQ ID NO: 2757650 - DNA, 25 bp, Homo sapien
tgccaaaatgccagctgtacctgaa

SEQ ID NO: 2757651 - DNA, 25 bp, Homo sapien
tgtgctctgttgcaagctgattcct

SEQ ID NO: 2757652 - DNA, 25 bp, Homo sapien
gctctgttgcaagctgattcctaga

SEQ ID NO: 2757653 - DNA, 25 bp, Homo sapien
tttgtgctctgttgcaagctgattc

SEQ ID NO: 2757654 - DNA, 25 bp, Homo sapien
tgctctgttgcaagctgattcctag

SEQ ID NO: 2757655 - DNA, 25 bp, Homo sapien
taatggcctcccagcagatttgaaa

SEQ ID NO: 2757656 - DNA, 25 bp, Homo sapien
gctcatcaggtgaaaggtttggtca

SEQ ID NO: 2757657 - DNA, 25 bp, Homo sapien
ttctcttgagctcagtgggcaaacc

SEQ ID NO: 2757658 - DNA, 25 bp, Homo sapien
tctaactggtctttgatagctgcag

SEQ ID NO: 2757659 - DNA, 25 bp, Homo sapien
gaaaacttcctcactgggtcggtca

SEQ ID NO: 2757660 - DNA, 25 bp, Homo sapien
agatctctagagaaaacttcctcac

SEQ ID NO: 2757661 - DNA, 25 bp, Homo sapien
tctgaaagatctctagagaaaactt

SEQ ID NO: 2757662 - DNA, 25 bp, Homo sapien
aacttcctcactgggtcggtcaaga

SEQ ID NO: 2757663 - DNA, 25 bp, Homo sapien
tctttggcagcaaccgtgaggctaa

SEQ ID NO: 2757664 - DNA, 25 bp, Homo sapien
tgaaggtcccattatcagtccagga

SEQ ID NO: 2757665 - DNA, 25 bp, Homo sapien
tctgtgtcagacacagataactctt

SEQ ID NO: 2757666 - DNA, 25 bp, Homo sapien
tccaggatacctctgagacgtctgt

SEQ ID NO: 2757667 - DNA, 25 bp, Homo sapien
tgaaaagtctaattcactgtcatct

SEQ ID NO: 2757668 - DNA, 25 bp, Homo sapien
gaaaagtctaattcactgtcatctt

SEQ ID NO: 2757669 - DNA, 25 bp, Homo sapien
tcactgtcatctttgtgactttttt

SEQ ID NO: 2757670 - DNA, 25 bp, Homo sapien
gtttcagcagaactgacttaatttt

SEQ ID NO: 2757671 - DNA, 25 bp, Homo sapien
gatctctcacgtttcttctgattaa

SEQ ID NO: 2757672 - DNA, 25 bp, Homo sapien
cagatctctcacgtttcttctgatt

SEQ ID NO: 2757673 - DNA, 25 bp, Homo sapien
tccagtttcagcagaactgacttaa

SEQ ID NO: 2757674 - DNA, 25 bp, Homo sapien
tttgtccaatatcattacatttaaa

SEQ ID NO: 2757675 - DNA, 25 bp, Homo sapien
ttgtccaatatcattacatttaaac

SEQ ID NO: 2757676 - DNA, 25 bp, Homo sapien
ttttgtccaatatcattacatttaa

SEQ ID NO: 2757677 - DNA, 25 bp, Homo sapien
tgtattcccaatatttatttctttg

SEQ ID NO: 2757678 - DNA, 25 bp, Homo sapien
ttcatctggttttgtctactcagtc

SEQ ID NO: 2757679 - DNA, 25 bp, Homo sapien
accagtagacatgaagttttctcat

SEQ ID NO: 2757680 - DNA, 25 bp, Homo sapien
tacaactaagaagccatcaccataa

SEQ ID NO: 2757681 - DNA, 25 bp, Homo sapien
gacatatgcatacaactaagaagcc

SEQ ID NO: 2757682 - DNA, 25 bp, Homo sapien
gtagatagctgagtataaccccagg

SEQ ID NO: 2757683 - DNA, 25 bp, Homo sapien
gatagctgagtataaccccaggaat

SEQ ID NO: 2757684 - DNA, 25 bp, Homo sapien
agctgagtataaccccaggaatgta

SEQ ID NO: 2757685 - DNA, 25 bp, Homo sapien
tgagtataaccccaggaatgtaact

SEQ ID NO: 2757686 - DNA, 25 bp, Homo sapien
aagcaagcaaaggaaattcattaag

SEQ ID NO: 2757687 - DNA, 25 bp, Homo sapien
agcaagcaaaggaaattcattaagg

SEQ ID NO: 2757688 - DNA, 25 bp, Homo sapien
gcaagcaaaggaaattcattaaggg

SEQ ID NO: 2757689 - DNA, 25 bp, Homo sapien
caagcaaaggaaattcattaaggga

SEQ ID NO: 2757690 - DNA, 25 bp, Homo sapien
tggtttggaattgataacttcccag

SEQ ID NO: 2757691 - DNA, 25 bp, Homo sapien
tcatctggtttggaattgataactt

SEQ ID NO: 2757692 - DNA, 25 bp, Homo sapien
tgagcctgggtctttcatctggttt

SEQ ID NO: 2757693 - DNA, 25 bp, Homo sapien
tctggtttggaattgataacttccc

SEQ ID NO: 2757694 - DNA, 25 bp, Homo sapien
gaccatatctggcaccaggtttgca

SEQ ID NO: 2757695 - DNA, 25 bp, Homo sapien
ctgttttcagcaggaccatatctgg

SEQ ID NO: 2757696 - DNA, 25 bp, Homo sapien
tctgttttcagcaggaccatatctg

SEQ ID NO: 2757697 - DNA, 25 bp, Homo sapien
catatctggcaccaggtttgcatac

SEQ ID NO: 2757698 - DNA, 25 bp, Homo sapien
cattaatttatgtcaccacagttca

SEQ ID NO: 2757699 - DNA, 25 bp, Homo sapien
gtttaccattaatttatgtcaccac

SEQ ID NO: 2757700 - DNA, 25 bp, Homo sapien
tgagtttaccattaatttatgtcac

SEQ ID NO: 2757701 - DNA, 25 bp, Homo sapien
taccattaatttatgtcaccacagt

SEQ ID NO: 2757702 - DNA, 25 bp, Homo sapien
aacatagttcaattgctggtggcca

SEQ ID NO: 2757703 - DNA, 25 bp, Homo sapien
gacatccataatgttggagacccag

SEQ ID NO: 2757704 - DNA, 25 bp, Homo sapien
cccactggctggaacatagaaacat

SEQ ID NO: 2757705 - DNA, 25 bp, Homo sapien
catgcctacctgcaagagagcctag

SEQ ID NO: 2757706 - DNA, 25 bp, Homo sapien
gccgcatgcctttatcaatttggga

SEQ ID NO: 2757707 - DNA, 25 bp, Homo sapien
tgctacatccaggttttgccgcatg

SEQ ID NO: 2757708 - DNA, 25 bp, Homo sapien
tggaacattccctacaccaccgttg

SEQ ID NO: 2757709 - DNA, 25 bp, Homo sapien
gcagtttactggtgtggcggtacaa

SEQ ID NO: 2757710 - DNA, 25 bp, Homo sapien
aatacaatcaccttcgtgcatccgg

SEQ ID NO: 2757711 - DNA, 25 bp, Homo sapien
atgacgtttcggctttaaaagtgct

SEQ ID NO: 2757712 - DNA, 25 bp, Homo sapien
tgcatccggaacacaaatgtacggc

SEQ ID NO: 2757713 - DNA, 25 bp, Homo sapien
gctccggagtccagcgatcacaaaa

SEQ ID NO: 2757714 - DNA, 25 bp, Homo sapien
gagcgccataaagccctaccaagtg

SEQ ID NO: 2757715 - DNA, 25 bp, Homo sapien
aagaagatgcatgaagagctccgtc

SEQ ID NO: 2757716 - DNA, 25 bp, Homo sapien
ggaaagcgcttccacaagaagatgc

SEQ ID NO: 2757717 - DNA, 25 bp, Homo sapien
cagctggctgacattgggagcgcca

SEQ ID NO: 2757718 - DNA, 25 bp, Homo sapien
tcccctcgtctcttgaccttggaaa

SEQ ID NO: 2757719 - DNA, 25 bp, Homo sapien
tcagagtggcattcaggctcaccct

SEQ ID NO: 2757720 - DNA, 25 bp, Homo sapien
gaggctcctactaataccacgtatg

SEQ ID NO: 2757721 - DNA, 25 bp, Homo sapien
aaaagggcatggagtctccagaggc

SEQ ID NO: 2757722 - DNA, 25 bp, Homo sapien
tacctcaaaggacggggagtctctc

SEQ ID NO: 2757723 - DNA, 25 bp, Homo sapien
tatgctacctcaaaggacggggagt

SEQ ID NO: 2757724 - DNA, 25 bp, Homo sapien
ctacaggtagtagggggaggtggca

SEQ ID NO: 2757725 - DNA, 25 bp, Homo sapien
cggggagtctctcattttcaatcca

SEQ ID NO: 2757726 - DNA, 25 bp, Homo sapien
ctcttgagtgagttcgtgccaaaga

SEQ ID NO: 2757727 - DNA, 25 bp, Homo sapien
cctggaattaaaggactgcattctt

SEQ ID NO: 2757728 - DNA, 25 bp, Homo sapien
cagactgaagaataagtacgtacgt

SEQ ID NO: 2757729 - DNA, 25 bp, Homo sapien
cattaagttatttgcctctcttgag

SEQ ID NO: 2757730 - DNA, 25 bp, Homo sapien
cttttgcctggtccaaagtcttcac

SEQ ID NO: 2757731 - DNA, 25 bp, Homo sapien
ttgcctggtccaaagtcttcacctt

SEQ ID NO: 2757732 - DNA, 25 bp, Homo sapien
ttttgcctggtccaaagtcttcacc

SEQ ID NO: 2757733 - DNA, 25 bp, Homo sapien
cctggtccaaagtcttcaccttcag

SEQ ID NO: 2757734 - DNA, 25 bp, Homo sapien
gctaaccacggctaatgtggccaaa

SEQ ID NO: 2757735 - DNA, 25 bp, Homo sapien
gcctgcctcccttgaatgaagctag

SEQ ID NO: 2757736 - DNA, 25 bp, Homo sapien
taggagctgggttattatcactgcc

SEQ ID NO: 2757737 - DNA, 25 bp, Homo sapien
tactcccagtactgtgacaggcggc

SEQ ID NO: 2757738 - DNA, 25 bp, Homo sapien
tcacgtgttcatctgggcaaaacgc

SEQ ID NO: 2757739 - DNA, 25 bp, Homo sapien
cgaatgttgagttcacgtgttcatc

SEQ ID NO: 2757740 - DNA, 25 bp, Homo sapien
atgcacacgaatgttgagttcacgt

SEQ ID NO: 2757741 - DNA, 25 bp, Homo sapien
gttgagttcacgtgttcatctgggc

SEQ ID NO: 2757742 - DNA, 25 bp, Homo sapien
gacctgcctcttaattgtaaaggat

SEQ ID NO: 2757743 - DNA, 25 bp, Homo sapien
gatcttagttgctggttaccacaga

SEQ ID NO: 2757744 - DNA, 25 bp, Homo sapien
tcttgcatacctgaacataactgtt

SEQ ID NO: 2757745 - DNA, 25 bp, Homo sapien
gcttactatttcttgcatacctgaa

SEQ ID NO: 2757746 - DNA, 25 bp, Homo sapien
aagacaataatcaaccagtctctca

SEQ ID NO: 2757747 - DNA, 25 bp, Homo sapien
cgatggaccggctctttttggtttg

SEQ ID NO: 2757748 - DNA, 25 bp, Homo sapien
cagccatccgatggaccggctcttt

SEQ ID NO: 2757749 - DNA, 25 bp, Homo sapien
taatcaaccagtctctcagacagaa

SEQ ID NO: 2757750 - DNA, 25 bp, Homo sapien
tctacttgtgggatctgtaaccaga

SEQ ID NO: 2757751 - DNA, 25 bp, Homo sapien
tcacttgtatcttcagtatattccg

SEQ ID NO: 2757752 - DNA, 25 bp, Homo sapien
gaaatttggcccaaagaaggcctgc

SEQ ID NO: 2757753 - DNA, 25 bp, Homo sapien
gccacctgcgtgaggttggtacaga

SEQ ID NO: 2757754 - DNA, 25 bp, Homo sapien
gctgactgtttcgtaaaagacatgt

SEQ ID NO: 2757755 - DNA, 25 bp, Homo sapien
agcctctacagcttcaggatttttg

SEQ ID NO: 2757756 - DNA, 25 bp, Homo sapien
gatttttgctcaagtcagagcacag

SEQ ID NO: 2757757 - DNA, 25 bp, Homo sapien
tgagaagctgactgtttcgtaaaag

SEQ ID NO: 2757758 - DNA, 25 bp, Homo sapien
tgtggaagtatcactgtagtcacca

SEQ ID NO: 2757759 - DNA, 25 bp, Homo sapien
gaccgcctccattcttgttgtggaa

SEQ ID NO: 2757760 - DNA, 25 bp, Homo sapien
catatttcccagtctaacgcagaca

SEQ ID NO: 2757761 - DNA, 25 bp, Homo sapien
gctggtataactattaacaggcccc

SEQ ID NO: 2757762 - DNA, 25 bp, Homo sapien
caaattgaaagggagactttgcagc

SEQ ID NO: 2757763 - DNA, 25 bp, Homo sapien
tgccacgtaccatctgacggccttg

SEQ ID NO: 2757764 - DNA, 25 bp, Homo sapien
gcttgcagctctggaagtaaatcat

SEQ ID NO: 2757765 - DNA, 25 bp, Homo sapien
gacggccttgcggtcttggctgcat

SEQ ID NO: 2757766 - DNA, 25 bp, Homo sapien
actgtgatgacctgtgtcctccggt

SEQ ID NO: 2757767 - DNA, 25 bp, Homo sapien
tgtgctgacatgtgtcctctggccc

SEQ ID NO: 2757768 - DNA, 25 bp, Homo sapien
ctgtgctgacatgtgtcctctggcc

SEQ ID NO: 2757769 - DNA, 25 bp, Homo sapien
gatgacctgtgtcctccggttcctg

SEQ ID NO: 2757770 - DNA, 25 bp, Homo sapien
tgcgagggggacactgtgctgacct

SEQ ID NO: 2757771 - DNA, 25 bp, Homo sapien
gtggatttgcgagggggacactgtg

SEQ ID NO: 2757772 - DNA, 25 bp, Homo sapien
ctgcaggtggatttgcgagggggac

SEQ ID NO: 2757773 - DNA, 25 bp, Homo sapien
gggacactgtgctgacctgcatcct

SEQ ID NO: 2757774 - DNA, 25 bp, Homo sapien
agctgggaaacaggcttaatcggat

SEQ ID NO: 2757775 - DNA, 25 bp, Homo sapien
ttaatcggatgagatggcgtcttcc

SEQ ID NO: 2757776 - DNA, 25 bp, Homo sapien
caggatggaagtcctgggcccacat

SEQ ID NO: 2757777 - DNA, 25 bp, Homo sapien
aacaggcttaatcggatgagatggc

SEQ ID NO: 2757778 - DNA, 25 bp, Homo sapien
cgtgttccggaaaatgtgttagatt

SEQ ID NO: 2757779 - DNA, 25 bp, Homo sapien
taaacacgctttatcacagcttagt

SEQ ID NO: 2757780 - DNA, 25 bp, Homo sapien
tagtagtgaagacaacgtgttccgg

SEQ ID NO: 2757781 - DNA, 25 bp, Homo sapien
gtggccttagtgtcaataaacctgg

SEQ ID NO: 2757782 - DNA, 25 bp, Homo sapien
tggcaatgaaaaggggacggtcacc

SEQ ID NO: 2757783 - DNA, 25 bp, Homo sapien
tgtgatggatatatattccacctgc

SEQ ID NO: 2757784 - DNA, 25 bp, Homo sapien
tcaaggtcaccttgtgatggatata

SEQ ID NO: 2757785 - DNA, 25 bp, Homo sapien
gacggtcaccccaggttcaaggtca

SEQ ID NO: 2757786 - DNA, 25 bp, Homo sapien
tttcccatttgggttcatcctgcac

SEQ ID NO: 2757787 - DNA, 25 bp, Homo sapien
cctgcacagtggtcatcagactagt

SEQ ID NO: 2757788 - DNA, 25 bp, Homo sapien
cagagcctgatgtagcttgacctgc

SEQ ID NO: 2757789 - DNA, 25 bp, Homo sapien
caatgagcagcaattcaagtccaag

SEQ ID NO: 2757790 - DNA, 25 bp, Homo sapien
agctgtcaccagagggacgtgtgcc

SEQ ID NO: 2757791 - DNA, 25 bp, Homo sapien
gaatgtcatcagagtccaggcattt

SEQ ID NO: 2757792 - DNA, 25 bp, Homo sapien
caccgggaatccagaaataagctgt

SEQ ID NO: 2757793 - DNA, 25 bp, Homo sapien
gaaataagctgtcaccagagggacg

SEQ ID NO: 2757794 - DNA, 25 bp, Homo sapien
ctgacttctgcctgaaggcttctca

SEQ ID NO: 2757795 - DNA, 25 bp, Homo sapien
tgacttctgcctgaaggcttctcag

SEQ ID NO: 2757796 - DNA, 25 bp, Homo sapien
tcagagccaccgttccatgtgtcca

SEQ ID NO: 2757797 - DNA, 25 bp, Homo sapien
ttatggatgatgagccacgcccatc

SEQ ID NO: 2757798 - DNA, 25 bp, Homo sapien
ccccttgtggcagatcagactctac

SEQ ID NO: 2757799 - DNA, 25 bp, Homo sapien
tcagactctactgcaagctgccagg

SEQ ID NO: 2757800 - DNA, 25 bp, Homo sapien
tatggatgatgagccacgcccatca

SEQ ID NO: 2757801 - DNA, 25 bp, Homo sapien
ccccttcacctacagagtcagctct

SEQ ID NO: 2757802 - DNA, 25 bp, Homo sapien
ttccccttcacctacagagtcagct

SEQ ID NO: 2757803 - DNA, 25 bp, Homo sapien
ggacaaaagccatccagccctgctg

SEQ ID NO: 2757804 - DNA, 25 bp, Homo sapien
cccttcacctacagagtcagctctc

SEQ ID NO: 2757805 - DNA, 25 bp, Homo sapien
gatgctgacatttccgaggctggaa

SEQ ID NO: 2757806 - DNA, 25 bp, Homo sapien
gttgagcctcgcttgtttctctgga

SEQ ID NO: 2757807 - DNA, 25 bp, Homo sapien
gaggctggaacctctccgttgagcc

SEQ ID NO: 2757808 - DNA, 25 bp, Homo sapien
tctccgttgagcctcgcttgtttct

SEQ ID NO: 2757809 - DNA, 25 bp, Homo sapien
ttggattcctatgactgggccgtgc

SEQ ID NO: 2757810 - DNA, 25 bp, Homo sapien
gcagagtgctggttgtcacctcccc

SEQ ID NO: 2757811 - DNA, 25 bp, Homo sapien
ggagccctgggcactcaggtgaact

SEQ ID NO: 2757812 - DNA, 25 bp, Homo sapien
cactcaggtgaactaaatgccaggt

SEQ ID NO: 2757813 - DNA, 25 bp, Homo sapien
ccaatttgttctgggcctataagct

SEQ ID NO: 2757814 - DNA, 25 bp, Homo sapien
atgtgttagacatctctgatttaaa

SEQ ID NO: 2757815 - DNA, 25 bp, Homo sapien
gaaagcatacaaccaactagagcat

SEQ ID NO: 2757816 - DNA, 25 bp, Homo sapien
ggcctataagctgggtgaacaccaa

SEQ ID NO: 2757817 - DNA, 25 bp, Homo sapien
ctggaagcccacaaaacaaaagagc

SEQ ID NO: 2757818 - DNA, 25 bp, Homo sapien
aaagagcatttcattgcaagaatca

SEQ ID NO: 2757819 - DNA, 25 bp, Homo sapien
ggaagcccacaaaacaaaagagcat

SEQ ID NO: 2757820 - DNA, 25 bp, Homo sapien
ttcattgcaagaatcagggccacac

SEQ ID NO: 2757821 - DNA, 25 bp, Homo sapien
cctccattaagcacaacacggaaag

SEQ ID NO: 2757822 - DNA, 25 bp, Homo sapien
cctccctccattaagcacaacacgg

SEQ ID NO: 2757823 - DNA, 25 bp, Homo sapien
cattaagcacaacacggaaagaaag

SEQ ID NO: 2757824 - DNA, 25 bp, Homo sapien
tccattaagcacaacacggaaagaa

SEQ ID NO: 2757825 - DNA, 25 bp, Homo sapien
ctgaggcttctccacaactgtgcac

SEQ ID NO: 2757826 - DNA, 25 bp, Homo sapien
catccggtgaagactgaaagcctgt

SEQ ID NO: 2757827 - DNA, 25 bp, Homo sapien
gatctacaggattgcagggaggctc

SEQ ID NO: 2757828 - DNA, 25 bp, Homo sapien
cctgatgacatgtcagctgggcgaa

SEQ ID NO: 2757829 - DNA, 25 bp, Homo sapien
tataggaggctgactcatagctcac

SEQ ID NO: 2757830 - DNA, 25 bp, Homo sapien
ggtttcctgcaatttgtgagtatga

SEQ ID NO: 2757831 - DNA, 25 bp, Homo sapien
gcatgaatatcaagcccatgagtca

SEQ ID NO: 2757832 - DNA, 25 bp, Homo sapien
ttccacatctgcatgaatatcaagc

SEQ ID NO: 2757833 - DNA, 25 bp, Homo sapien
cccatgagtcaacagcggaaacgat

SEQ ID NO: 2757834 - DNA, 25 bp, Homo sapien
tatcacaacaagtgcctgtttgggc

SEQ ID NO: 2757835 - DNA, 25 bp, Homo sapien
ctcaaggcagcctggatacgtgtgt

SEQ ID NO: 2757836 - DNA, 25 bp, Homo sapien
tacgtgtgtggtaaacaagtatcac

SEQ ID NO: 2757837 - DNA, 25 bp, Homo sapien
caagtatcacaacaagtgcctgttt

SEQ ID NO: 2757838 - DNA, 25 bp, Homo sapien
tatttgcataataacacgcccaagt

SEQ ID NO: 2757839 - DNA, 25 bp, Homo sapien
gacggaaatcaggtgatatactctc

SEQ ID NO: 2757840 - DNA, 25 bp, Homo sapien
gcccaagtatcatgacggaaatcag

SEQ ID NO: 2757841 - DNA, 25 bp, Homo sapien
ggtgatatactctccatggagtcaa

SEQ ID NO: 2757842 - DNA, 25 bp, Homo sapien
aaagttatttaataggcatcaaagt

SEQ ID NO: 2757843 - DNA, 25 bp, Homo sapien
gaaagttatttaataggcatcaaag

SEQ ID NO: 2757844 - DNA, 25 bp, Homo sapien
ccagtgtgactgcatgaaagttatt

SEQ ID NO: 2757845 - DNA, 25 bp, Homo sapien
tctctaacagacacggatgggctgc

SEQ ID NO: 2757846 - DNA, 25 bp, Homo sapien
tagccgatggagaatggaagtgacc

SEQ ID NO: 2757847 - DNA, 25 bp, Homo sapien
aaaacagcagttattggccgggcgt

SEQ ID NO: 2757848 - DNA, 25 bp, Homo sapien
gatgggctgcactacagaggccctt

SEQ ID NO: 2757849 - DNA, 25 bp, Homo sapien
acagaaacgtgtggtaaccatggag

SEQ ID NO: 2757850 - DNA, 25 bp, Homo sapien
gaattccgaagggaaaatagccaca

SEQ ID NO: 2757851 - DNA, 25 bp, Homo sapien
catggaggaattccgaagggaaaat

SEQ ID NO: 2757852 - DNA, 25 bp, Homo sapien
agagtccacagaaacgtgtggtaac

SEQ ID NO: 2757853 - DNA, 25 bp, Homo sapien
ccatgagggcagggcgatcgagtac

SEQ ID NO: 2757854 - DNA, 25 bp, Homo sapien
atgagggcagggcgatcgagtacag

SEQ ID NO: 2757855 - DNA, 25 bp, Homo sapien
tgagggcagggcgatcgagtacaga

SEQ ID NO: 2757856 - DNA, 25 bp, Homo sapien
catgagggcagggcgatcgagtaca

SEQ ID NO: 2757857 - DNA, 25 bp, Homo sapien
gcaaacattatatatgaccattaaa

SEQ ID NO: 2757858 - DNA, 25 bp, Homo sapien
caacttttatctgaaaagcgtattt

SEQ ID NO: 2757859 - DNA, 25 bp, Homo sapien
aataccccatttgtcatagaaagac

SEQ ID NO: 2757860 - DNA, 25 bp, Homo sapien
agtgagagttacatgttcttttagc

SEQ ID NO: 2757861 - DNA, 25 bp, Homo sapien
gcaagttagggcctatttctatata

SEQ ID NO: 2757862 - DNA, 25 bp, Homo sapien
tgtgtggtttagctacgattggaaa

SEQ ID NO: 2757863 - DNA, 25 bp, Homo sapien
ttggaaaggtacagttctctaaatc

SEQ ID NO: 2757864 - DNA, 25 bp, Homo sapien
aatcaccatatgcacgttcttttag

SEQ ID NO: 2757865 - DNA, 25 bp, Homo sapien
ggcctatattcgataaatgtgtcta

SEQ ID NO: 2757866 - DNA, 25 bp, Homo sapien
tgtttggcttgtgatgaccacggcc

SEQ ID NO: 2757867 - DNA, 25 bp, Homo sapien
accacatcacccaggtgactcatgt

SEQ ID NO: 2757868 - DNA, 25 bp, Homo sapien
caggtgactcatgtttggcttgtga

SEQ ID NO: 2757869 - DNA, 25 bp, Homo sapien
ttagtctgcactggccgctcagaag

SEQ ID NO: 2757870 - DNA, 25 bp, Homo sapien
atcagggaaaatgacgggctgtcaa

SEQ ID NO: 2757871 - DNA, 25 bp, Homo sapien
gattcttgagcattccatacccaca

SEQ ID NO: 2757872 - DNA, 25 bp, Homo sapien
tctctctacatggatcactcggacc

SEQ ID NO: 2757873 - DNA, 25 bp, Homo sapien
tcaaagttaacaagccgtgtgctgt

SEQ ID NO: 2757874 - DNA, 25 bp, Homo sapien
ccccaaggtcactcctgtgtcaaag

SEQ ID NO: 2757875 - DNA, 25 bp, Homo sapien
cctgtgtcaaagttaacaagccgtg

SEQ ID NO: 2757876 - DNA, 25 bp, Homo sapien
aagccgtgtgctgtgccctgtcagc

SEQ ID NO: 2757877 - DNA, 25 bp, Homo sapien
atggtgcccacaccgatggagacca

SEQ ID NO: 2757878 - DNA, 25 bp, Homo sapien
tggtgcccacaccgatggagaccac

SEQ ID NO: 2757879 - DNA, 25 bp, Homo sapien
ataagcaaatgccacaggtaaccac

SEQ ID NO: 2757880 - DNA, 25 bp, Homo sapien
taaaataagcaaatgccacaggtaa

SEQ ID NO: 2757881 - DNA, 25 bp, Homo sapien
aaataagcaaatgccacaggtaacc

SEQ ID NO: 2757882 - DNA, 25 bp, Homo sapien
ctataaaataagcaaatgccacagg

SEQ ID NO: 2757883 - DNA, 25 bp, Homo sapien
ccgagagccagaatgaggacttgaa

SEQ ID NO: 2757884 - DNA, 25 bp, Homo sapien
gagccagaatgaggacttgaacagc

SEQ ID NO: 2757885 - DNA, 25 bp, Homo sapien
tgctgactctgagagcccgagagcc

SEQ ID NO: 2757886 - DNA, 25 bp, Homo sapien
ccagaatgaggacttgaacagcagt

SEQ ID NO: 2757887 - DNA, 25 bp, Homo sapien
cctgatttgttaaaagtgagtcgct

SEQ ID NO: 2757888 - DNA, 25 bp, Homo sapien
ccctgatttgttaaaagtgagtcgc

SEQ ID NO: 2757889 - DNA, 25 bp, Homo sapien
caccctgatttgttaaaagtgagtc

SEQ ID NO: 2757890 - DNA, 25 bp, Homo sapien
gatttgttaaaagtgagtcgctggg

SEQ ID NO: 2757891 - DNA, 25 bp, Homo sapien
tgaaagccacaccaaatccgaatac

SEQ ID NO: 2757892 - DNA, 25 bp, Homo sapien
cagccatgtttactgtgaaagccac

SEQ ID NO: 2757893 - DNA, 25 bp, Homo sapien
cgaatacaacgaatgtctggccttc

SEQ ID NO: 2757894 - DNA, 25 bp, Homo sapien
tccgtcaaatctaagcagccatgtt

SEQ ID NO: 2757895 - DNA, 25 bp, Homo sapien
taaaccttgctgttctaatagaccc

SEQ ID NO: 2757896 - DNA, 25 bp, Homo sapien
catgcgcagtcttgtacacgaggcc

SEQ ID NO: 2757897 - DNA, 25 bp, Homo sapien
tcatggtgagagtcccgtcaggatg

SEQ ID NO: 2757898 - DNA, 25 bp, Homo sapien
cataagtaactgagccccagaccag

SEQ ID NO: 2757899 - DNA, 25 bp, Homo sapien
tggcctgacacgcaccctccagggc

SEQ ID NO: 2757900 - DNA, 25 bp, Homo sapien
agggaatgccactcacgctgttttc

SEQ ID NO: 2757901 - DNA, 25 bp, Homo sapien
atgccactcacgctgttttctgtgt

SEQ ID NO: 2757902 - DNA, 25 bp, Homo sapien
ggaatgccactcacgctgttttctg

SEQ ID NO: 2757903 - DNA, 25 bp, Homo sapien
caaaagcatcataaatcttaacccc

SEQ ID NO: 2757904 - DNA, 25 bp, Homo sapien
tctctgctggactctgagtaccctt

SEQ ID NO: 2757905 - DNA, 25 bp, Homo sapien
aaagcatcataaatcttaaccccta

SEQ ID NO: 2757906 - DNA, 25 bp, Homo sapien
ctgctggactctgagtacccttggg

SEQ ID NO: 2757907 - DNA, 25 bp, Homo sapien
agcagcctggatacctgttactcat

SEQ ID NO: 2757908 - DNA, 25 bp, Homo sapien
gcagcagcctggatacctgttactc

SEQ ID NO: 2757909 - DNA, 25 bp, Homo sapien
tctgttccttcccatagtagcagca

SEQ ID NO: 2757910 - DNA, 25 bp, Homo sapien
cagcagcctggatacctgttactca

SEQ ID NO: 2757911 - DNA, 25 bp, Homo sapien
cctgtttgtccgctgttatatcccc

SEQ ID NO: 2757912 - DNA, 25 bp, Homo sapien
ggtggctcggctggccaagatgggc

SEQ ID NO: 2757913 - DNA, 25 bp, Homo sapien
gaacagtgtcagcatatagcacaca

SEQ ID NO: 2757914 - DNA, 25 bp, Homo sapien
agggatctcacctgtttgtccgctg

SEQ ID NO: 2757915 - DNA, 25 bp, Homo sapien
gacaggcgtgggaagacatcaaaat

SEQ ID NO: 2757916 - DNA, 25 bp, Homo sapien
aaactgcgtagacagggacaggcgt

SEQ ID NO: 2757917 - DNA, 25 bp, Homo sapien
gatagtattatctgaggcccctcat

SEQ ID NO: 2757918 - DNA, 25 bp, Homo sapien
gggactgttacccaatctacttcag

SEQ ID NO: 2757919 - DNA, 25 bp, Homo sapien
tgaagagcgctttttggagagacaa

SEQ ID NO: 2757920 - DNA, 25 bp, Homo sapien
gaacgggtacctaatctggtccaga

SEQ ID NO: 2757921 - DNA, 25 bp, Homo sapien
cattcagggcccatctcaggtgact

SEQ ID NO: 2757922 - DNA, 25 bp, Homo sapien
gacaggacaccactttcaacgaagg

SEQ ID NO: 2757923 - DNA, 25 bp, Homo sapien
agctcagcagctcgtcggcgcggca

SEQ ID NO: 2757924 - DNA, 25 bp, Homo sapien
ccgagcagccaggttaccgcggccg

SEQ ID NO: 2757925 - DNA, 25 bp, Homo sapien
cagcaggttggcagcgacgaagccg

SEQ ID NO: 2757926 - DNA, 25 bp, Homo sapien
ggagccgggcatccctcctcggcgt

SEQ ID NO: 2757927 - DNA, 25 bp, Homo sapien
agctgtgcttccagacagggacggg

SEQ ID NO: 2757928 - DNA, 25 bp, Homo sapien
gctgtgcttccagacagggacgggg

SEQ ID NO: 2757929 - DNA, 25 bp, Homo sapien
actgactgcgaacaatcggttgagg

SEQ ID NO: 2757930 - DNA, 25 bp, Homo sapien
ctgcgaacaatcggttgaggtaact

SEQ ID NO: 2757931 - DNA, 25 bp, Homo sapien
gactgcgaacaatcggttgaggtaa

SEQ ID NO: 2757932 - DNA, 25 bp, Homo sapien
gtgagaagggtggaaagagctgaac

SEQ ID NO: 2757933 - DNA, 25 bp, Homo sapien
caaaatcagcttccaatgagccctc

SEQ ID NO: 2757934 - DNA, 25 bp, Homo sapien
tcccacaggctcaatgggtctcctt

SEQ ID NO: 2757935 - DNA, 25 bp, Homo sapien
gaagagatacacttaaaccagggtc

SEQ ID NO: 2757936 - DNA, 25 bp, Homo sapien
aatcagcttccaatgagccctcaga

SEQ ID NO: 2757937 - DNA, 25 bp, Homo sapien
atatacctgtagactgttctcctgc

SEQ ID NO: 2757938 - DNA, 25 bp, Homo sapien
tctcctgctgacaaggttgttcttg

SEQ ID NO: 2757939 - DNA, 25 bp, Homo sapien
cttctgcaatctgctgacatctaat

SEQ ID NO: 2757940 - DNA, 25 bp, Homo sapien
cctgctgacaaggttgttcttgctc

SEQ ID NO: 2757941 - DNA, 25 bp, Homo sapien
caataaagtctgttccttcacccat

SEQ ID NO: 2757942 - DNA, 25 bp, Homo sapien
ataaagtctgttccttcacccatac

SEQ ID NO: 2757943 - DNA, 25 bp, Homo sapien
ccaataaagtctgttccttcaccca

SEQ ID NO: 2757944 - DNA, 25 bp, Homo sapien
tcccccaataaagtctgttccttca

SEQ ID NO: 2757945 - DNA, 25 bp, Homo sapien
gacggctgtttgattcctcacagct

SEQ ID NO: 2757946 - DNA, 25 bp, Homo sapien
acggctgtttgattcctcacagctt

SEQ ID NO: 2757947 - DNA, 25 bp, Homo sapien
cttctaaagctggttcatccgacaa

SEQ ID NO: 2757948 - DNA, 25 bp, Homo sapien
ggttcatccgacaaatctctttcta

SEQ ID NO: 2757949 - DNA, 25 bp, Homo sapien
gctggttcatccgacaaatctcttt

SEQ ID NO: 2757950 - DNA, 25 bp, Homo sapien
taaagctggttcatccgacaaatct

SEQ ID NO: 2757951 - DNA, 25 bp, Homo sapien
tactatagcagatttttgaccccaa

SEQ ID NO: 2757952 - DNA, 25 bp, Homo sapien
gaccccaatttagtgtgctatctga

SEQ ID NO: 2757953 - DNA, 25 bp, Homo sapien
cgatattttccagcaatcgtgatgc

SEQ ID NO: 2757954 - DNA, 25 bp, Homo sapien
catagtgagtatgtctcggaagagc

SEQ ID NO: 2757955 - DNA, 25 bp, Homo sapien
aatactagattgtcagcgtctgaag

SEQ ID NO: 2757956 - DNA, 25 bp, Homo sapien
tataccactgtatagcagggacttg

SEQ ID NO: 2757957 - DNA, 25 bp, Homo sapien
agtcagccctcagtgttcatgtggt

SEQ ID NO: 2757958 - DNA, 25 bp, Homo sapien
ggtgcctcctcagtaacagacattc

SEQ ID NO: 2757959 - DNA, 25 bp, Homo sapien
catctataattgagggcgggcgaca

SEQ ID NO: 2757960 - DNA, 25 bp, Homo sapien
caactatgccatgtaaaggctcaca

SEQ ID NO: 2757961 - DNA, 25 bp, Homo sapien
aggcctccctgtacgttctgttgca

SEQ ID NO: 2757962 - DNA, 25 bp, Homo sapien
tgtgatgctgctctacagtgatggg

SEQ ID NO: 2757963 - DNA, 25 bp, Homo sapien
caaattctttctgagcctaaaataa

SEQ ID NO: 2757964 - DNA, 25 bp, Homo sapien
tcaaattctttctgagcctaaaata

SEQ ID NO: 2757965 - DNA, 25 bp, Homo sapien
tctttctgagcctaaaataaaaaca

SEQ ID NO: 2757966 - DNA, 25 bp, Homo sapien
tccaagtctttgccggctttccttg

SEQ ID NO: 2757967 - DNA, 25 bp, Homo sapien
atccaagtctttgccggctttcctt

SEQ ID NO: 2757968 - DNA, 25 bp, Homo sapien
agtctttgccggctttccttgggtg

SEQ ID NO: 2757969 - DNA, 25 bp, Homo sapien
caagtctttgccggctttccttggg

SEQ ID NO: 2757970 - DNA, 25 bp, Homo sapien
ctggtggtttgggtacattggcaac

SEQ ID NO: 2757971 - DNA, 25 bp, Homo sapien
ggttgcaagatcaggcacactttgg

SEQ ID NO: 2757972 - DNA, 25 bp, Homo sapien
aagaagccatccgtgagcatgagca

SEQ ID NO: 2757973 - DNA, 25 bp, Homo sapien
cttgctcatgctagacgcctggcct

SEQ ID NO: 2757974 - DNA, 25 bp, Homo sapien
ctacaagagcagtggagacagctgc

SEQ ID NO: 2757975 - DNA, 25 bp, Homo sapien
tacaagagcagtggagacagctgca

SEQ ID NO: 2757976 - DNA, 25 bp, Homo sapien
tacacaaagggacaaggcaaatttc

SEQ ID NO: 2757977 - DNA, 25 bp, Homo sapien
cactcaagtgttaagacgtttctgg

SEQ ID NO: 2757978 - DNA, 25 bp, Homo sapien
ttcgtgtgggtagacttagttggcc

SEQ ID NO: 2757979 - DNA, 25 bp, Homo sapien
tcttgttctaaaaccagcactggag

SEQ ID NO: 2757980 - DNA, 25 bp, Homo sapien
ttccatgagaaaggctgcccgcagc

SEQ ID NO: 2757981 - DNA, 25 bp, Homo sapien
tacaggatcaatgaaggcggcaggc

SEQ ID NO: 2757982 - DNA, 25 bp, Homo sapien
catgcacgaacaggcaagcacgtac

SEQ ID NO: 2757983 - DNA, 25 bp, Homo sapien
ggcaaaaggatcctcggagacacct

SEQ ID NO: 2757984 - DNA, 25 bp, Homo sapien
ctgatgtaggctttcatgagcttgg

SEQ ID NO: 2757985 - DNA, 25 bp, Homo sapien
gcgcttcttcacgatcatgctgatg

SEQ ID NO: 2757986 - DNA, 25 bp, Homo sapien
cgtgtcgtgctgtagcgcttcttca

SEQ ID NO: 2757987 - DNA, 25 bp, Homo sapien
gctgctggcggagcgtgtcgtgctg

SEQ ID NO: 2757988 - DNA, 25 bp, Homo sapien
aaagagaggatgtgttcatactgga

SEQ ID NO: 2757989 - DNA, 25 bp, Homo sapien
ttcgccaggggtgccccaaaagaga

SEQ ID NO: 2757990 - DNA, 25 bp, Homo sapien
cacgcttgtagacggagacggcgtc

SEQ ID NO: 2757991 - DNA, 25 bp, Homo sapien
acgatcttatacgtattcgccaggg

SEQ ID NO: 2757992 - DNA, 25 bp, Homo sapien
tcacgcttttgggaaaacctcacta

SEQ ID NO: 2757993 - DNA, 25 bp, Homo sapien
cctctttgcggatggttagtcttca

SEQ ID NO: 2757994 - DNA, 25 bp, Homo sapien
aaatggcacctctctggctatcttg

SEQ ID NO: 2757995 - DNA, 25 bp, Homo sapien
gaagtggcctggaaacgtacatgct

SEQ ID NO: 2757996 - DNA, 25 bp, Homo sapien
tcagggtcccctctaggaagctcgt

SEQ ID NO: 2757997 - DNA, 25 bp, Homo sapien
tggtggccatggataaccgcttcgt

SEQ ID NO: 2757998 - DNA, 25 bp, Homo sapien
atcaaacagcgtcgagccatagcca

SEQ ID NO: 2757999 - DNA, 25 bp, Homo sapien
caatgatactggctcgagcagagga

SEQ ID NO: 2758000 - DNA, 25 bp, Homo sapien
gttcaaacataaatgcaaactccac

SEQ ID NO: 2758001 - DNA, 25 bp, Homo sapien
tccaggaagcagtaaagtttgaagt

SEQ ID NO: 2758002 - DNA, 25 bp, Homo sapien
tttggcacgttgtctgtgtccagga

SEQ ID NO: 2758003 - DNA, 25 bp, Homo sapien
aggtccccaacctcggatgtggcag

SEQ ID NO: 2758004 - DNA, 25 bp, Homo sapien
actttcaatggctttgtcgacgtgg

SEQ ID NO: 2758005 - DNA, 25 bp, Homo sapien
tacgacggttcgactttcaatggct

SEQ ID NO: 2758006 - DNA, 25 bp, Homo sapien
gacgtggccgttgtattcaaacaaa

SEQ ID NO: 2758007 - DNA, 25 bp, Homo sapien
tggctaagacatcagctacgacggt

SEQ ID NO: 2758008 - DNA, 25 bp, Homo sapien
gccgccatggcaatagaccgtggat

SEQ ID NO: 2758009 - DNA, 25 bp, Homo sapien
cagagcttctatttcatctcgggaa

SEQ ID NO: 2758010 - DNA, 25 bp, Homo sapien
atggtgatcttgcaggagccgccgc

SEQ ID NO: 2758011 - DNA, 25 bp, Homo sapien
atctcgggaaggcacaaactctcgg

SEQ ID NO: 2758012 - DNA, 25 bp, Homo sapien
gatctgccagctgtacaggttgccc

SEQ ID NO: 2758013 - DNA, 25 bp, Homo sapien
ttgagaatccctcgactcggcagga

SEQ ID NO: 2758014 - DNA, 25 bp, Homo sapien
taagctggcagtacagctcgtcccg

SEQ ID NO: 2758015 - DNA, 25 bp, Homo sapien
gacatggactccagttgctgcaggg

SEQ ID NO: 2758016 - DNA, 25 bp, Homo sapien
gtgtatcgaaggatcgggttccgct

SEQ ID NO: 2758017 - DNA, 25 bp, Homo sapien
tgagatttatgtccccatacggaag

SEQ ID NO: 2758018 - DNA, 25 bp, Homo sapien
agttgagatttatgtccccatacgg

SEQ ID NO: 2758019 - DNA, 25 bp, Homo sapien
gcttgtaaatctgttccaccacatc

SEQ ID NO: 2758020 - DNA, 25 bp, Homo sapien
cacgttttgaatggcactggaccac

SEQ ID NO: 2758021 - DNA, 25 bp, Homo sapien
tagagccggtaacagtgcttgcgcc

SEQ ID NO: 2758022 - DNA, 25 bp, Homo sapien
tgcttgcgcccgtacacggtgacgt

SEQ ID NO: 2758023 - DNA, 25 bp, Homo sapien
ggccttggtgtcagtcacgttttga

SEQ ID NO: 2758024 - DNA, 25 bp, Homo sapien
aatgcctgtgtcctctctgacctca

SEQ ID NO: 2758025 - DNA, 25 bp, Homo sapien
cggggactgaggcaatgcctgtgtc

SEQ ID NO: 2758026 - DNA, 25 bp, Homo sapien
ggggtgcccagcacacgcacgtcaa

SEQ ID NO: 2758027 - DNA, 25 bp, Homo sapien
tcaacgccaacctcggggactgagg

SEQ ID NO: 2758028 - DNA, 25 bp, Homo sapien
ccagggaattgtgggtgagtacaaa

SEQ ID NO: 2758029 - DNA, 25 bp, Homo sapien
tgaactcttgtagtaatccagggaa

SEQ ID NO: 2758030 - DNA, 25 bp, Homo sapien
ggtccccagtttgagcgcgttcttc

SEQ ID NO: 2758031 - DNA, 25 bp, Homo sapien
tgagtacaaaccaccgtttcttcag

SEQ ID NO: 2758032 - DNA, 25 bp, Homo sapien
agtggtgcatctcctccggcgtgtc

SEQ ID NO: 2758033 - DNA, 25 bp, Homo sapien
tctgcagcagggttatccagtggtg

SEQ ID NO: 2758034 - DNA, 25 bp, Homo sapien
ccgtgatgatcacaaacgagttggg

SEQ ID NO: 2758035 - DNA, 25 bp, Homo sapien
ggtgtcccctttggacctctgcagc

SEQ ID NO: 2758036 - DNA, 25 bp, Homo sapien
caaagccccttagccctaccgtcag

SEQ ID NO: 2758037 - DNA, 25 bp, Homo sapien
agccccttagccctaccgtcagcat

SEQ ID NO: 2758038 - DNA, 25 bp, Homo sapien
gccctaccgtcagcatcacctctgt

SEQ ID NO: 2758039 - DNA, 25 bp, Homo sapien
cttagccctaccgtcagcatcacct

SEQ ID NO: 2758040 - DNA, 25 bp, Homo sapien
gaagagggtcgtgacccagcagcac

SEQ ID NO: 2758041 - DNA, 25 bp, Homo sapien
tgtataaatcccaagtttgtccctg

SEQ ID NO: 2758042 - DNA, 25 bp, Homo sapien
cagaaaggagaatgactcccttccc

SEQ ID NO: 2758043 - DNA, 25 bp, Homo sapien
gacacacacaggtgatgagctgttt

SEQ ID NO: 2758044 - DNA, 25 bp, Homo sapien
acacacagaatcaatcagccccaca

SEQ ID NO: 2758045 - DNA, 25 bp, Homo sapien
gcacacacagaatcaatcagcccca

SEQ ID NO: 2758046 - DNA, 25 bp, Homo sapien
cacagaatcaatcagccccacatcc

SEQ ID NO: 2758047 - DNA, 25 bp, Homo sapien
aggcacacacagaatcaatcagccc

SEQ ID NO: 2758048 - DNA, 25 bp, Homo sapien
tttgcctgctcatcatgcatctcct

SEQ ID NO: 2758049 - DNA, 25 bp, Homo sapien
tggatctcctggtccgtggacgcgt

SEQ ID NO: 2758050 - DNA, 25 bp, Homo sapien
gtggacctgactcagcacgctgaac

SEQ ID NO: 2758051 - DNA, 25 bp, Homo sapien
tgggtttgcctgctcatcatgcatc

SEQ ID NO: 2758052 - DNA, 25 bp, Homo sapien
tgaaagagacgctagggtatccttc

SEQ ID NO: 2758053 - DNA, 25 bp, Homo sapien
gcaatgagccacgattattccactg

SEQ ID NO: 2758054 - DNA, 25 bp, Homo sapien
tgaccaactacaaaatgtgagcgct

SEQ ID NO: 2758055 - DNA, 25 bp, Homo sapien
aaatcaagcagaacaaagcatcagg

SEQ ID NO: 2758056 - DNA, 25 bp, Homo sapien
gcaatcaggtggaaagtcctatcgg

SEQ ID NO: 2758057 - DNA, 25 bp, Homo sapien
tctggggactctgcaatcaggtgga

SEQ ID NO: 2758058 - DNA, 25 bp, Homo sapien
agtcctatcggccataatgatgtcg

SEQ ID NO: 2758059 - DNA, 25 bp, Homo sapien
gatgtcgatcccattctccttggtg

SEQ ID NO: 2758060 - DNA, 25 bp, Homo sapien
agcaaaagcaacaaacgcacatcag

SEQ ID NO: 2758061 - DNA, 25 bp, Homo sapien
gcaaaagcaacaaacgcacatcagg

SEQ ID NO: 2758062 - DNA, 25 bp, Homo sapien
ttgaggacgcaccagcggcgtttcc

SEQ ID NO: 2758063 - DNA, 25 bp, Homo sapien
catcagcttggactggcggaggaca

SEQ ID NO: 2758064 - DNA, 25 bp, Homo sapien
cttggagcggaaccacaagaaggtt

SEQ ID NO: 2758065 - DNA, 25 bp, Homo sapien
aagaaggtttcatccttgaggacgc

SEQ ID NO: 2758066 - DNA, 25 bp, Homo sapien
gaaaagtcagtcaagttggatgaca

SEQ ID NO: 2758067 - DNA, 25 bp, Homo sapien
cagtcaagttggatgacaacaacat

SEQ ID NO: 2758068 - DNA, 25 bp, Homo sapien
tgttccccgtgagattgggtagaga

SEQ ID NO: 2758069 - DNA, 25 bp, Homo sapien
ctgttccccgtgagattgggtagag

SEQ ID NO: 2758070 - DNA, 25 bp, Homo sapien
ccaaaccttctaggggtttcatgag

SEQ ID NO: 2758071 - DNA, 25 bp, Homo sapien
tccaacagtcctactaaaagtctcc

SEQ ID NO: 2758072 - DNA, 25 bp, Homo sapien
ctggctacctcacccttgatgtttt

SEQ ID NO: 2758073 - DNA, 25 bp, Homo sapien
tgactgacagtcgtcactagaccca

SEQ ID NO: 2758074 - DNA, 25 bp, Homo sapien
ctcaggtagctggcactacaggagc

SEQ ID NO: 2758075 - DNA, 25 bp, Homo sapien
tctcaggtagctggcactacaggag

SEQ ID NO: 2758076 - DNA, 25 bp, Homo sapien
cggataaaataacgcctcgctctcc

SEQ ID NO: 2758077 - DNA, 25 bp, Homo sapien
cgccatccatcagcccggataaaat

SEQ ID NO: 2758078 - DNA, 25 bp, Homo sapien
tcagcccggataaaataacgcctcg

SEQ ID NO: 2758079 - DNA, 25 bp, Homo sapien
tccatcagcccggataaaataacgc

SEQ ID NO: 2758080 - DNA, 25 bp, Homo sapien
acagctgtacacagagtcacgccgg

SEQ ID NO: 2758081 - DNA, 25 bp, Homo sapien
aagctgtggaaatacggcagagtga

SEQ ID NO: 2758082 - DNA, 25 bp, Homo sapien
gtcacgccggtatgaaagctcatca

SEQ ID NO: 2758083 - DNA, 25 bp, Homo sapien
gtggaaatacggcagagtgacacag

SEQ ID NO: 2758084 - DNA, 25 bp, Homo sapien
taggcacccgagctgttgtaggtcc

SEQ ID NO: 2758085 - DNA, 25 bp, Homo sapien
tcctggtcgtagtcgtagtcgccgt

SEQ ID NO: 2758086 - DNA, 25 bp, Homo sapien
agtgatggcaccgtcctcatagtca

SEQ ID NO: 2758087 - DNA, 25 bp, Homo sapien
cccctcagagctgaaccggtaggca

SEQ ID NO: 2758088 - DNA, 25 bp, Homo sapien
acttgttcgctggtctgagtggccg

SEQ ID NO: 2758089 - DNA, 25 bp, Homo sapien
catgtatgggtcctcctctgaagag

SEQ ID NO: 2758090 - DNA, 25 bp, Homo sapien
ggcaccaccgtgtcgttcatgtatg

SEQ ID NO: 2758091 - DNA, 25 bp, Homo sapien
tctgaagagtcatcgctggtccgga

SEQ ID NO: 2758092 - DNA, 25 bp, Homo sapien
tctccagacggaggatctcttccac

SEQ ID NO: 2758093 - DNA, 25 bp, Homo sapien
gacagggaccgctcgatattccgga

SEQ ID NO: 2758094 - DNA, 25 bp, Homo sapien
gaaattgagggactcgaggaactcc

SEQ ID NO: 2758095 - DNA, 25 bp, Homo sapien
cagttcacgggtcagttcagcttcc

SEQ ID NO: 2758096 - DNA, 25 bp, Homo sapien
ctggacagaagcagaagggagattt

SEQ ID NO: 2758097 - DNA, 25 bp, Homo sapien
cagaagggagatttcagaaggcttc

SEQ ID NO: 2758098 - DNA, 25 bp, Homo sapien
aggcttcagtacaaaagtccaagca

SEQ ID NO: 2758099 - DNA, 25 bp, Homo sapien
cttcagtacaaaagtccaagcatag

SEQ ID NO: 2758100 - DNA, 25 bp, Homo sapien
ctgctgggcgcggagctcggcttct

SEQ ID NO: 2758101 - DNA, 25 bp, Homo sapien
tgggcgcggagctcggcttctcttc

SEQ ID NO: 2758102 - DNA, 25 bp, Homo sapien
gctgggcgcggagctcggcttctct

SEQ ID NO: 2758103 - DNA, 25 bp, Homo sapien
gcggagctcggcttctcttcgctct

SEQ ID NO: 2758104 - DNA, 25 bp, Homo sapien
tcttttcttcttgctcccttttctc

SEQ ID NO: 2758105 - DNA, 25 bp, Homo sapien
cttttcttcttgctcccttttctct

SEQ ID NO: 2758106 - DNA, 25 bp, Homo sapien
ctgtaaactctccgagcaatctgac

SEQ ID NO: 2758107 - DNA, 25 bp, Homo sapien
gtctgtaaactctccgagcaatctg

SEQ ID NO: 2758108 - DNA, 25 bp, Homo sapien
ttgtctgtaaactctccgagcaatc

SEQ ID NO: 2758109 - DNA, 25 bp, Homo sapien
tctgtaaactctccgagcaatctga

SEQ ID NO: 2758110 - DNA, 25 bp, Homo sapien
tgcctttttcaggtgcaaaaatctc

SEQ ID NO: 2758111 - DNA, 25 bp, Homo sapien
tcaggtgcaaaaatctcctcctcag

SEQ ID NO: 2758112 - DNA, 25 bp, Homo sapien
ttgcttctggaaaactatggctgcc

SEQ ID NO: 2758113 - DNA, 25 bp, Homo sapien
agttgcttctggaaaactatggctg

SEQ ID NO: 2758114 - DNA, 25 bp, Homo sapien
agacatgggcccgaatcaccatggc

SEQ ID NO: 2758115 - DNA, 25 bp, Homo sapien
atggccgcgtggctcacttcctctt

SEQ ID NO: 2758116 - DNA, 25 bp, Homo sapien
gttccaaggattctcgaagaaagac

SEQ ID NO: 2758117 - DNA, 25 bp, Homo sapien
tgttccaaggattctcgaagaaaga

SEQ ID NO: 2758118 - DNA, 25 bp, Homo sapien
ggtgcatcacgttctcccaatggca

SEQ ID NO: 2758119 - DNA, 25 bp, Homo sapien
aaataaagagtcctaccaccttgtg

SEQ ID NO: 2758120 - DNA, 25 bp, Homo sapien
cattctggcctaaaatggtgcatca

SEQ ID NO: 2758121 - DNA, 25 bp, Homo sapien
gaatgattccctataacaaccagta

SEQ ID NO: 2758122 - DNA, 25 bp, Homo sapien
gccagattcctcatcagcactttat

SEQ ID NO: 2758123 - DNA, 25 bp, Homo sapien
ctgttggaggcatcatagagctgca

SEQ ID NO: 2758124 - DNA, 25 bp, Homo sapien
ttccctcggacgtcctcaggcagag

SEQ ID NO: 2758125 - DNA, 25 bp, Homo sapien
agctgcagcaggctcgtgcacttcc

SEQ ID NO: 2758126 - DNA, 25 bp, Homo sapien
gctttgcggattctcacagtctcca

SEQ ID NO: 2758127 - DNA, 25 bp, Homo sapien
accgcctggtcaaactggtctggca

SEQ ID NO: 2758128 - DNA, 25 bp, Homo sapien
ccagctttgcggattctcacagtct

SEQ ID NO: 2758129 - DNA, 25 bp, Homo sapien
gcagctggttcagcacaaccgcctg

SEQ ID NO: 2758130 - DNA, 25 bp, Homo sapien
ttcctgtctctccaaggggcatctc

SEQ ID NO: 2758131 - DNA, 25 bp, Homo sapien
tcctgtctctccaaggggcatctca

SEQ ID NO: 2758132 - DNA, 25 bp, Homo sapien
catcttcctgtctctccaaggggca

SEQ ID NO: 2758133 - DNA, 25 bp, Homo sapien
tcttcctgtctctccaaggggcatc

SEQ ID NO: 2758134 - DNA, 25 bp, Homo sapien
aattcatatggaaaacaactgccac

SEQ ID NO: 2758135 - DNA, 25 bp, Homo sapien
tggaaaacaactgccacactgacct

SEQ ID NO: 2758136 - DNA, 25 bp, Homo sapien
ggctcttgggccaaaattcatatgg

SEQ ID NO: 2758137 - DNA, 25 bp, Homo sapien
agtttggctcttgggccaaaattca

SEQ ID NO: 2758138 - DNA, 25 bp, Homo sapien
cacgagggggtagatctggatttcc

SEQ ID NO: 2758139 - DNA, 25 bp, Homo sapien
tagatctggatttccattggtggtt

SEQ ID NO: 2758140 - DNA, 25 bp, Homo sapien
cctgcgatcacaatcacgagggggt

SEQ ID NO: 2758141 - DNA, 25 bp, Homo sapien
tcacaatcacgagggggtagatctg

SEQ ID NO: 2758142 - DNA, 25 bp, Homo sapien
ctggtgaattgaatgttcaaagatg

SEQ ID NO: 2758143 - DNA, 25 bp, Homo sapien
ggtgaattgaatgttcaaagatgac

SEQ ID NO: 2758144 - DNA, 25 bp, Homo sapien
tgaattgaatgttcaaagatgacac

SEQ ID NO: 2758145 - DNA, 25 bp, Homo sapien
gaattgaatgttcaaagatgacaca

SEQ ID NO: 2758146 - DNA, 25 bp, Homo sapien
cagcttatttagataaaggacaaca

SEQ ID NO: 2758147 - DNA, 25 bp, Homo sapien
gcagcttatttagataaaggacaac

SEQ ID NO: 2758148 - DNA, 25 bp, Homo sapien
gcttatttagataaaggacaacaga

SEQ ID NO: 2758149 - DNA, 25 bp, Homo sapien
atttagataaaggacaacagaggtg

SEQ ID NO: 2758150 - DNA, 25 bp, Homo sapien
ctcggacccacacaaacctcaacta

SEQ ID NO: 2758151 - DNA, 25 bp, Homo sapien
gaaatgtaccatctgttgagcctga

SEQ ID NO: 2758152 - DNA, 25 bp, Homo sapien
aaatgctccctcctgcgtaaaactg

SEQ ID NO: 2758153 - DNA, 25 bp, Homo sapien
ttttaggtgtctctcaaatgctccc

SEQ ID NO: 2758154 - DNA, 25 bp, Homo sapien
tcttgattaaaatgctcacttcctg

SEQ ID NO: 2758155 - DNA, 25 bp, Homo sapien
cactggacagatttctcaactctgc

SEQ ID NO: 2758156 - DNA, 25 bp, Homo sapien
aggccacacaccagcttgcacacca

SEQ ID NO: 2758157 - DNA, 25 bp, Homo sapien
cacaccagcttgcacaccaactcct

SEQ ID NO: 2758158 - DNA, 25 bp, Homo sapien
ggccagggtcgcttgtctcctctcc

SEQ ID NO: 2758159 - DNA, 25 bp, Homo sapien
gagtatatgctcctaaatccaagaa

SEQ ID NO: 2758160 - DNA, 25 bp, Homo sapien
ttaattgttaagtgcctccctcctg

SEQ ID NO: 2758161 - DNA, 25 bp, Homo sapien
gacagaaggctattcatgagtgaca

SEQ ID NO: 2758162 - DNA, 25 bp, Homo sapien
ctttctctaagataggagtgcctga

SEQ ID NO: 2758163 - DNA, 25 bp, Homo sapien
cagtctgcatgagctagacggacag

SEQ ID NO: 2758164 - DNA, 25 bp, Homo sapien
aattcagggcggctaatgcttagag

SEQ ID NO: 2758165 - DNA, 25 bp, Homo sapien
gctaatgaagcagagtggaccatct

SEQ ID NO: 2758166 - DNA, 25 bp, Homo sapien
ggctgcccgtgaaaacgttaattca

SEQ ID NO: 2758167 - DNA, 25 bp, Homo sapien
tatgtacaccccattttagcagctg

SEQ ID NO: 2758168 - DNA, 25 bp, Homo sapien
ttatgtacaccccattttagcagct

SEQ ID NO: 2758169 - DNA, 25 bp, Homo sapien
cggacctgaggacccacatttgtaa

SEQ ID NO: 2758170 - DNA, 25 bp, Homo sapien
gactggggtcgcctctctaattgca

SEQ ID NO: 2758171 - DNA, 25 bp, Homo sapien
tatccttcagccaccgaggcattca

SEQ ID NO: 2758172 - DNA, 25 bp, Homo sapien
cagccctctcgcaagcagcaatgcg

SEQ ID NO: 2758173 - DNA, 25 bp, Homo sapien
taagtgtgtgtcagattaattactc

SEQ ID NO: 2758174 - DNA, 25 bp, Homo sapien
ggtaataagtgtgtgtcagattaat

SEQ ID NO: 2758175 - DNA, 25 bp, Homo sapien
aataagtgtgtgtcagattaattac

SEQ ID NO: 2758176 - DNA, 25 bp, Homo sapien
agggtaataagtgtgtgtcagatta

SEQ ID NO: 2758177 - DNA, 25 bp, Homo sapien
gaatatgcctcatcaggtttttcca

SEQ ID NO: 2758178 - DNA, 25 bp, Homo sapien
taaagggaatcccaacagaatatgc

SEQ ID NO: 2758179 - DNA, 25 bp, Homo sapien
tggatgactgcagtgtataaactct

SEQ ID NO: 2758180 - DNA, 25 bp, Homo sapien
taaaggttcctataaagcacgaggc

SEQ ID NO: 2758181 - DNA, 25 bp, Homo sapien
catctttagcagtccgggcaagggc

SEQ ID NO: 2758182 - DNA, 25 bp, Homo sapien
caagggcatctaagctgacagacac

SEQ ID NO: 2758183 - DNA, 25 bp, Homo sapien
tcagtttctgtccactgtaaatagc

SEQ ID NO: 2758184 - DNA, 25 bp, Homo sapien
aatagctgcatctttagcagtccgg

SEQ ID NO: 2758185 - DNA, 25 bp, Homo sapien
caccagttctatagtgagcaacaga

SEQ ID NO: 2758186 - DNA, 25 bp, Homo sapien
tcgcaagttgatgcttctgccctct

SEQ ID NO: 2758187 - DNA, 25 bp, Homo sapien
tcttgtccatatcattcaccagttc

SEQ ID NO: 2758188 - DNA, 25 bp, Homo sapien
ataattctaagaagtcctaactcgc

SEQ ID NO: 2758189 - DNA, 25 bp, Homo sapien
tgctggaacccatgacgtttccttc

SEQ ID NO: 2758190 - DNA, 25 bp, Homo sapien
gacgtttccttcctagaatctgcat

SEQ ID NO: 2758191 - DNA, 25 bp, Homo sapien
gtttccttcctagaatctgcatcct

SEQ ID NO: 2758192 - DNA, 25 bp, Homo sapien
atgacgtttccttcctagaatctgc

SEQ ID NO: 2758193 - DNA, 25 bp, Homo sapien
gcagactggcgtctctcgggaagca

SEQ ID NO: 2758194 - DNA, 25 bp, Homo sapien
ggagggtaacatccaaggacaaggc

SEQ ID NO: 2758195 - DNA, 25 bp, Homo sapien
gctgagcgccagtgaggctagcaaa

SEQ ID NO: 2758196 - DNA, 25 bp, Homo sapien
ttctaggtgcttcctcgctgagcgc

SEQ ID NO: 2758197 - DNA, 25 bp, Homo sapien
gagagaacgccatcggatactgagc

SEQ ID NO: 2758198 - DNA, 25 bp, Homo sapien
caattttgcctctctagaagacaga

SEQ ID NO: 2758199 - DNA, 25 bp, Homo sapien
gggagtctacatcaagcaccaaagc

SEQ ID NO: 2758200 - DNA, 25 bp, Homo sapien
tactgcccaccagagtgtacaaagc

SEQ ID NO: 2758201 - DNA, 25 bp, Homo sapien
caatgaaaggactttggagaaacca

SEQ ID NO: 2758202 - DNA, 25 bp, Homo sapien
gctgtgtccctcgagacagatccca

SEQ ID NO: 2758203 - DNA, 25 bp, Homo sapien
aaaagcagactaacaggcccaaggg

SEQ ID NO: 2758204 - DNA, 25 bp, Homo sapien
aatctgtgagtaaccaccccaggag

SEQ ID NO: 2758205 - DNA, 25 bp, Homo sapien
tgatacagcgaacaaagaaaggatt

SEQ ID NO: 2758206 - DNA, 25 bp, Homo sapien
cttctgcatgtttggcttgatacag

SEQ ID NO: 2758207 - DNA, 25 bp, Homo sapien
aagaaaggattagaggagcttagcg

SEQ ID NO: 2758208 - DNA, 25 bp, Homo sapien
aggagcttagcgttgccattaagga

SEQ ID NO: 2758209 - DNA, 25 bp, Homo sapien
aaatttctcagtactctaggcactt

SEQ ID NO: 2758210 - DNA, 25 bp, Homo sapien
aatcataggactaataacttagagg

SEQ ID NO: 2758211 - DNA, 25 bp, Homo sapien
tgttgatttagtctcttattatgtc

SEQ ID NO: 2758212 - DNA, 25 bp, Homo sapien
cagtactctaggcacttagaaacaa

SEQ ID NO: 2758213 - DNA, 25 bp, Homo sapien
catttcagtatgtaggattaaaggc

SEQ ID NO: 2758214 - DNA, 25 bp, Homo sapien
gggctaatctcatttcgcctgatcc

SEQ ID NO: 2758215 - DNA, 25 bp, Homo sapien
caagggcatgccgaataacttttta

SEQ ID NO: 2758216 - DNA, 25 bp, Homo sapien
tatacccacccctgtggaaaagcaa

SEQ ID NO: 2758217 - DNA, 25 bp, Homo sapien
atcctgacattcacggcccttcata

SEQ ID NO: 2758218 - DNA, 25 bp, Homo sapien
tgaagaaaactgaactgtctgaaca

SEQ ID NO: 2758219 - DNA, 25 bp, Homo sapien
tcacggcccttcatattttgatacc

SEQ ID NO: 2758220 - DNA, 25 bp, Homo sapien
cactacatggattaattacttctcc

SEQ ID NO: 2758221 - DNA, 25 bp, Homo sapien
gacttcacatacacccaaatcctct

SEQ ID NO: 2758222 - DNA, 25 bp, Homo sapien
acaaatattctcatagacttcacat

SEQ ID NO: 2758223 - DNA, 25 bp, Homo sapien
aaatacagtaacgacggattcctct

SEQ ID NO: 2758224 - DNA, 25 bp, Homo sapien
ttctaaagcactatctggtttaaaa

SEQ ID NO: 2758225 - DNA, 25 bp, Homo sapien
taggccgccgatgtttgcttccaca

SEQ ID NO: 2758226 - DNA, 25 bp, Homo sapien
tccacatttcaaggtatcctggttg

SEQ ID NO: 2758227 - DNA, 25 bp, Homo sapien
tatcctggttgttgcggcttgaaac

SEQ ID NO: 2758228 - DNA, 25 bp, Homo sapien
gaaacatgttcaaaaagatcgtaga

SEQ ID NO: 2758229 - DNA, 25 bp, Homo sapien
cagttaacggatggaaaggtgctcc

SEQ ID NO: 2758230 - DNA, 25 bp, Homo sapien
gaacactaattacagggtgaggcag

SEQ ID NO: 2758231 - DNA, 25 bp, Homo sapien
taatttatcccctaatgccaggtga

SEQ ID NO: 2758232 - DNA, 25 bp, Homo sapien
ggtgaggcaggcgatggttcaaatc

SEQ ID NO: 2758233 - DNA, 25 bp, Homo sapien
agatacctcggacatcatattgcac

SEQ ID NO: 2758234 - DNA, 25 bp, Homo sapien
tctgttcttctccaagatacctcgg

SEQ ID NO: 2758235 - DNA, 25 bp, Homo sapien
cttagcaaattgagaaggtcatctc

SEQ ID NO: 2758236 - DNA, 25 bp, Homo sapien
gaaggtcatctcgaaatgtatctct

SEQ ID NO: 2758237 - DNA, 25 bp, Homo sapien
tccagcatagtgcttcactccaaaa

SEQ ID NO: 2758238 - DNA, 25 bp, Homo sapien
actccaaaattgttaactgcaactc

SEQ ID NO: 2758239 - DNA, 25 bp, Homo sapien
caaaattgttaactgcaactctggg

SEQ ID NO: 2758240 - DNA, 25 bp, Homo sapien
aactctgggcttcacataaaagtgg

SEQ ID NO: 2758241 - DNA, 25 bp, Homo sapien
gcttctccaataaggtgctgtctgt

SEQ ID NO: 2758242 - DNA, 25 bp, Homo sapien
cgcatgctgactgtgtagcttctcc

SEQ ID NO: 2758243 - DNA, 25 bp, Homo sapien
cttcattgataagggctaggaggcc

SEQ ID NO: 2758244 - DNA, 25 bp, Homo sapien
tttcttcattgataagggctaggag

SEQ ID NO: 2758245 - DNA, 25 bp, Homo sapien
aatatcttcccacactaatccttcc

SEQ ID NO: 2758246 - DNA, 25 bp, Homo sapien
caatatcttcccacactaatccttc

SEQ ID NO: 2758247 - DNA, 25 bp, Homo sapien
tccattgtctatccagtcaatatct

SEQ ID NO: 2758248 - DNA, 25 bp, Homo sapien
tctccattgtctatccagtcaatat

SEQ ID NO: 2758249 - DNA, 25 bp, Homo sapien
tattgaactgttcaaagtgattaac

SEQ ID NO: 2758250 - DNA, 25 bp, Homo sapien
atatgcttgttgaagtactcctgaa

SEQ ID NO: 2758251 - DNA, 25 bp, Homo sapien
ctcctgaagtttctcgtttgcatag

SEQ ID NO: 2758252 - DNA, 25 bp, Homo sapien
gaagtttctcgtttgcatagtttat

SEQ ID NO: 2758253 - DNA, 25 bp, Homo sapien
gatgtcgaggatgccaatagacttg

SEQ ID NO: 2758254 - DNA, 25 bp, Homo sapien
tagacttgaagtcctcattgccttt

SEQ ID NO: 2758255 - DNA, 25 bp, Homo sapien
tgattacccactcaaagcagcacgc

SEQ ID NO: 2758256 - DNA, 25 bp, Homo sapien
gcacgcatacagagccatggccagg

SEQ ID NO: 2758257 - DNA, 25 bp, Homo sapien
caaagcatctgtgagctgtgttggg

SEQ ID NO: 2758258 - DNA, 25 bp, Homo sapien
tctcccctgaggaacattgatctct

SEQ ID NO: 2758259 - DNA, 25 bp, Homo sapien
gaacattgatctctgggtcaaagca

SEQ ID NO: 2758260 - DNA, 25 bp, Homo sapien
cattgagaggcgtgaggatctcttc

SEQ ID NO: 2758261 - DNA, 25 bp, Homo sapien
tagtagcgacgggtttcaccgtatc

SEQ ID NO: 2758262 - DNA, 25 bp, Homo sapien
cggcctggctggtctccaactcctg

SEQ ID NO: 2758263 - DNA, 25 bp, Homo sapien
cttggcctcctaaagaaagttctgg

SEQ ID NO: 2758264 - DNA, 25 bp, Homo sapien
cgacgggtttcaccgtatcggcctg

SEQ ID NO: 2758265 - DNA, 25 bp, Homo sapien
ggctagacagtcaataatttaggtt

SEQ ID NO: 2758266 - DNA, 25 bp, Homo sapien
actgcaccttcaacccgcagaggct

SEQ ID NO: 2758267 - DNA, 25 bp, Homo sapien
tcaacccgcagaggctcaggtgatc

SEQ ID NO: 2758268 - DNA, 25 bp, Homo sapien
ctttctgaaaggctagacagtcaat

SEQ ID NO: 2758269 - DNA, 25 bp, Homo sapien
tgaactgcatcacgtccattgccgt

SEQ ID NO: 2758270 - DNA, 25 bp, Homo sapien
tccttgctgaactgcatcacgtcca

SEQ ID NO: 2758271 - DNA, 25 bp, Homo sapien
tctatgttcccaagatgcagtatac

SEQ ID NO: 2758272 - DNA, 25 bp, Homo sapien
agtataccagcaagcagcctcgaca

SEQ ID NO: 2758273 - DNA, 25 bp, Homo sapien
gataaagaactatagcatgctcaga

SEQ ID NO: 2758274 - DNA, 25 bp, Homo sapien
gacattacatagtgcacataagagg

SEQ ID NO: 2758275 - DNA, 25 bp, Homo sapien
tcaatgaaataaacatagtgtcccc

SEQ ID NO: 2758276 - DNA, 25 bp, Homo sapien
caaaagaattacctcagggagtcac

SEQ ID NO: 2758277 - DNA, 25 bp, Homo sapien
tgctgatggaaaatctaaatagatc

SEQ ID NO: 2758278 - DNA, 25 bp, Homo sapien
gatctggacctatcttccttaggca

SEQ ID NO: 2758279 - DNA, 25 bp, Homo sapien
aatctaaatagatctggacctatct

SEQ ID NO: 2758280 - DNA, 25 bp, Homo sapien
taaatagatctggacctatcttcct

SEQ ID NO: 2758281 - DNA, 25 bp, Homo sapien
taaaagctagcaatcactgaaggga

SEQ ID NO: 2758282 - DNA, 25 bp, Homo sapien
aatgatgtcccgagagaacacagag

SEQ ID NO: 2758283 - DNA, 25 bp, Homo sapien
gccaacaagcgagctcgcaggtgat

SEQ ID NO: 2758284 - DNA, 25 bp, Homo sapien
gaacacagagtaccaacggagtatc

SEQ ID NO: 2758285 - DNA, 25 bp, Homo sapien
actgcagtcgcccgccaccatatcc

SEQ ID NO: 2758286 - DNA, 25 bp, Homo sapien
gcagtcgcccgccaccatatccagc

SEQ ID NO: 2758287 - DNA, 25 bp, Homo sapien
ggactgcagtcgcccgccaccatat

SEQ ID NO: 2758288 - DNA, 25 bp, Homo sapien
tttgtgtgtttttagcagtgacggg

SEQ ID NO: 2758289 - DNA, 25 bp, Homo sapien
ttctggcgtagataaataaaattct

SEQ ID NO: 2758290 - DNA, 25 bp, Homo sapien
tccctaaaggattcctggtcactga

SEQ ID NO: 2758291 - DNA, 25 bp, Homo sapien
caagtagtggtagttttctggcgta

SEQ ID NO: 2758292 - DNA, 25 bp, Homo sapien
tacacatccagactgattcaagtag

SEQ ID NO: 2758293 - DNA, 25 bp, Homo sapien
aaatatgtgataattcctttccccg

SEQ ID NO: 2758294 - DNA, 25 bp, Homo sapien
tatgtgataattcctttccccggga

SEQ ID NO: 2758295 - DNA, 25 bp, Homo sapien
cagccctgccagcagtgcataaaat

SEQ ID NO: 2758296 - DNA, 25 bp, Homo sapien
tctttcttcatgttccagccctgcc

SEQ ID NO: 2758297 - DNA, 25 bp, Homo sapien
tgtgtcctgtgcttaattcacacaa

SEQ ID NO: 2758298 - DNA, 25 bp, Homo sapien
gagatgtgtcctgtgcttaattcac

SEQ ID NO: 2758299 - DNA, 25 bp, Homo sapien
tcctgtgcttaattcacacaaacca

SEQ ID NO: 2758300 - DNA, 25 bp, Homo sapien
gatgtgtcctgtgcttaattcacac

SEQ ID NO: 2758301 - DNA, 25 bp, Homo sapien
tatagataaaaataaatgaaagagg

SEQ ID NO: 2758302 - DNA, 25 bp, Homo sapien
agataaaaataaatgaaagaggata

SEQ ID NO: 2758303 - DNA, 25 bp, Homo sapien
tagataaaaataaatgaaagaggat

SEQ ID NO: 2758304 - DNA, 25 bp, Homo sapien
gataaaaataaatgaaagaggatac

SEQ ID NO: 2758305 - DNA, 25 bp, Homo sapien
attctcccgccctgaatatttcctt

SEQ ID NO: 2758306 - DNA, 25 bp, Homo sapien
aattctcccgccctgaatatttcct

SEQ ID NO: 2758307 - DNA, 25 bp, Homo sapien
cttcccaaagcgactagagttgttg

SEQ ID NO: 2758308 - DNA, 25 bp, Homo sapien
agttgttgttgtacacggtcttcgc

SEQ ID NO: 2758309 - DNA, 25 bp, Homo sapien
gcattgccgaaagcttccatgatgg

SEQ ID NO: 2758310 - DNA, 25 bp, Homo sapien
gtacacggtcttcgcattgccgaaa

SEQ ID NO: 2758311 - DNA, 25 bp, Homo sapien
gggcagcagacagcattaataaggg

SEQ ID NO: 2758312 - DNA, 25 bp, Homo sapien
cagacagcattaataagggtgggtc

SEQ ID NO: 2758313 - DNA, 25 bp, Homo sapien
gcaatagcacttctcacaaatgtca

SEQ ID NO: 2758314 - DNA, 25 bp, Homo sapien
gggtgggtctgaagacagcaatagc

SEQ ID NO: 2758315 - DNA, 25 bp, Homo sapien
ctgatgactgacagaaacttgagga

SEQ ID NO: 2758316 - DNA, 25 bp, Homo sapien
aatagctcgttcaacacaggatgtc

SEQ ID NO: 2758317 - DNA, 25 bp, Homo sapien
ctgctttcaagaatagctcgttcaa

SEQ ID NO: 2758318 - DNA, 25 bp, Homo sapien
ttccaaagactgttgactgatgact

SEQ ID NO: 2758319 - DNA, 25 bp, Homo sapien
tgctgccgttgtttaggcccgcggt

SEQ ID NO: 2758320 - DNA, 25 bp, Homo sapien
tcatcaaggccacctgtaggaaacg

SEQ ID NO: 2758321 - DNA, 25 bp, Homo sapien
ggccacctgtaggaaacgcagctct

SEQ ID NO: 2758322 - DNA, 25 bp, Homo sapien
cgaagggtccctcgggagaccagct

SEQ ID NO: 2758323 - DNA, 25 bp, Homo sapien
actgaatcggaaatccggagagagg

SEQ ID NO: 2758324 - DNA, 25 bp, Homo sapien
ccactgaatcggaaatccggagaga

SEQ ID NO: 2758325 - DNA, 25 bp, Homo sapien
gacatcacccgccaaatccaaacca

SEQ ID NO: 2758326 - DNA, 25 bp, Homo sapien
ttccactgaatcggaaatccggaga

SEQ ID NO: 2758327 - DNA, 25 bp, Homo sapien
tagcactcgttggcgatggcgaaga

SEQ ID NO: 2758328 - DNA, 25 bp, Homo sapien
gcgccggctgtactgctccatggtg

SEQ ID NO: 2758329 - DNA, 25 bp, Homo sapien
gatgcactggttgtcgtggcgcttc

SEQ ID NO: 2758330 - DNA, 25 bp, Homo sapien
tggcaggctcgtacagcccggcgat

SEQ ID NO: 2758331 - DNA, 25 bp, Homo sapien
tccaatcaccaaaaggtgatacagc

SEQ ID NO: 2758332 - DNA, 25 bp, Homo sapien
aaaaggtgatacagcagcccaagcc

SEQ ID NO: 2758333 - DNA, 25 bp, Homo sapien
cattgactaacttccacaaaggctc

SEQ ID NO: 2758334 - DNA, 25 bp, Homo sapien
tctgagatttccctcggggtcttta

SEQ ID NO: 2758335 - DNA, 25 bp, Homo sapien
tgtttgtgtccatgcacatgacaaa

SEQ ID NO: 2758336 - DNA, 25 bp, Homo sapien
ttgtgtccatgcacatgacaaatgg

SEQ ID NO: 2758337 - DNA, 25 bp, Homo sapien
ttttactgtttgtgtccatgcacat

SEQ ID NO: 2758338 - DNA, 25 bp, Homo sapien
tactgtttgtgtccatgcacatgac

SEQ ID NO: 2758339 - DNA, 25 bp, Homo sapien
cactgaagtataggctacatgtgta

SEQ ID NO: 2758340 - DNA, 25 bp, Homo sapien
taagaggttcactgagtaataagaa

SEQ ID NO: 2758341 - DNA, 25 bp, Homo sapien
acatgtgtaagaggttcactgagta

SEQ ID NO: 2758342 - DNA, 25 bp, Homo sapien
tgtcactgaagtataggctacatgt

SEQ ID NO: 2758343 - DNA, 25 bp, Homo sapien
gtttaagactgtggacacatgcagc

SEQ ID NO: 2758344 - DNA, 25 bp, Homo sapien
gccatgcagtttaagactgtggaca

SEQ ID NO: 2758345 - DNA, 25 bp, Homo sapien
taccgctccacaaacggccatgatg

SEQ ID NO: 2758346 - DNA, 25 bp, Homo sapien
tatgaaaagatattgttaccgctcc

SEQ ID NO: 2758347 - DNA, 25 bp, Homo sapien
caagtgacgcttccccaaaacgcat

SEQ ID NO: 2758348 - DNA, 25 bp, Homo sapien
gcatgcttaaagttatcccctacag

SEQ ID NO: 2758349 - DNA, 25 bp, Homo sapien
cccctacagctttcatgagtccgtt

SEQ ID NO: 2758350 - DNA, 25 bp, Homo sapien
gctttcatgagtccgttcaagctca

SEQ ID NO: 2758351 - DNA, 25 bp, Homo sapien
cattgctctcgaccgccttgccagc

SEQ ID NO: 2758352 - DNA, 25 bp, Homo sapien
tgagttgcacagagccattccttcc

SEQ ID NO: 2758353 - DNA, 25 bp, Homo sapien
gcagcatgcaacctttgttctggca

SEQ ID NO: 2758354 - DNA, 25 bp, Homo sapien
tcctccattgctctcgaccgccttg

SEQ ID NO: 2758355 - DNA, 25 bp, Homo sapien
gatatagacaggcattgctccgagc

SEQ ID NO: 2758356 - DNA, 25 bp, Homo sapien
tgacaggtggcggtcttgtctcgat

SEQ ID NO: 2758357 - DNA, 25 bp, Homo sapien
tgctccgagccaggatcaaatgtgg

SEQ ID NO: 2758358 - DNA, 25 bp, Homo sapien
tgtgagcggagtccaacagacgctg

SEQ ID NO: 2758359 - DNA, 25 bp, Homo sapien
tcccttgtgtgaaatgcctgggaca

SEQ ID NO: 2758360 - DNA, 25 bp, Homo sapien
caacttgtgtctaggtgggcatgct

SEQ ID NO: 2758361 - DNA, 25 bp, Homo sapien
tatgaccttattccaagaccaagat

SEQ ID NO: 2758362 - DNA, 25 bp, Homo sapien
caaacggaaggtctacaatggcata

SEQ ID NO: 2758363 - DNA, 25 bp, Homo sapien
cactcaaacgtgaggatctttttaa

SEQ ID NO: 2758364 - DNA, 25 bp, Homo sapien
tcactcaaacgtgaggatcttttta

SEQ ID NO: 2758365 - DNA, 25 bp, Homo sapien
tatacatgatggagccgccatggag

SEQ ID NO: 2758366 - DNA, 25 bp, Homo sapien
atttgatttctcttataccgctgga

SEQ ID NO: 2758367 - DNA, 25 bp, Homo sapien
cttctggtgggtaattgtgctctgc

SEQ ID NO: 2758368 - DNA, 25 bp, Homo sapien
tgtcaaggacgccatgtcatccacg

SEQ ID NO: 2758369 - DNA, 25 bp, Homo sapien
ctgccagcgcaactcgagttccctt

SEQ ID NO: 2758370 - DNA, 25 bp, Homo sapien
actcaaggctcctgccagcgcaact

SEQ ID NO: 2758371 - DNA, 25 bp, Homo sapien
aggctcctgccagcgcaactcgagt

SEQ ID NO: 2758372 - DNA, 25 bp, Homo sapien
tgccagcgcaactcgagttcccttc

SEQ ID NO: 2758373 - DNA, 25 bp, Homo sapien
tgttctagaagtacaaaccgctggt

SEQ ID NO: 2758374 - DNA, 25 bp, Homo sapien
gaacaaactgttctgttctagaagt

SEQ ID NO: 2758375 - DNA, 25 bp, Homo sapien
tagaagtacaaaccgctggtaacat

SEQ ID NO: 2758376 - DNA, 25 bp, Homo sapien
tgttctgttctagaagtacaaaccg

SEQ ID NO: 2758377 - DNA, 25 bp, Homo sapien
cagtaggggctgttatggtagaaat

SEQ ID NO: 2758378 - DNA, 25 bp, Homo sapien
gcatctgtggttgagcgtggctgca

SEQ ID NO: 2758379 - DNA, 25 bp, Homo sapien
gacaggtaatggccaggagggacac

SEQ ID NO: 2758380 - DNA, 25 bp, Homo sapien
acacagatgcaagggtgatgtggca

SEQ ID NO: 2758381 - DNA, 25 bp, Homo sapien
gctcatcatcatgggcaacactaac

SEQ ID NO: 2758382 - DNA, 25 bp, Homo sapien
catcatcatgggcaacactaacatc

SEQ ID NO: 2758383 - DNA, 25 bp, Homo sapien
aacactaacatcaaacacagcaccg

SEQ ID NO: 2758384 - DNA, 25 bp, Homo sapien
tcatcatgggcaacactaacatcaa

SEQ ID NO: 2758385 - DNA, 25 bp, Homo sapien
aagcaaaggatgtaaaagccctgca

SEQ ID NO: 2758386 - DNA, 25 bp, Homo sapien
gagagttttcccagtacatggatca

SEQ ID NO: 2758387 - DNA, 25 bp, Homo sapien
tatggtacaaaaactaggagaactc

SEQ ID NO: 2758388 - DNA, 25 bp, Homo sapien
tcagcttggctcaaacttatggtac

SEQ ID NO: 2758389 - DNA, 25 bp, Homo sapien
taagtgcgtctaataataaagctca

SEQ ID NO: 2758390 - DNA, 25 bp, Homo sapien
tatggcttttttgtaagtgcgtcta

SEQ ID NO: 2758391 - DNA, 25 bp, Homo sapien
aactcttctcgcaaactgtttttca

SEQ ID NO: 2758392 - DNA, 25 bp, Homo sapien
tgtttgccaactcttctcgcaaact

SEQ ID NO: 2758393 - DNA, 25 bp, Homo sapien
atgtattaaaatgctcaaaaacctt

SEQ ID NO: 2758394 - DNA, 25 bp, Homo sapien
cactttaacttgatgtattaaaatg

SEQ ID NO: 2758395 - DNA, 25 bp, Homo sapien
gacactttaacttgatgtattaaaa

SEQ ID NO: 2758396 - DNA, 25 bp, Homo sapien
gatgtattaaaatgctcaaaaacct

SEQ ID NO: 2758397 - DNA, 25 bp, Homo sapien
gcaaagggaatgagaacaatttaaa

SEQ ID NO: 2758398 - DNA, 25 bp, Homo sapien
gtgctatacagaactgaacctcttc

SEQ ID NO: 2758399 - DNA, 25 bp, Homo sapien
aaagtgctatacagaactgaacctc

SEQ ID NO: 2758400 - DNA, 25 bp, Homo sapien
agtgctatacagaactgaacctctt

SEQ ID NO: 2758401 - DNA, 25 bp, Homo sapien
tagcatgtttggtagcaaaaggtgg

SEQ ID NO: 2758402 - DNA, 25 bp, Homo sapien
gtcaccatgaaagagcgcaggcttc

SEQ ID NO: 2758403 - DNA, 25 bp, Homo sapien
tgggcccgcaaagtctacaatcata

SEQ ID NO: 2758404 - DNA, 25 bp, Homo sapien
aaaaggtgggaaaggtcatcatcat

SEQ ID NO: 2758405 - DNA, 25 bp, Homo sapien
atcgcacctggctaaacacatttct

SEQ ID NO: 2758406 - DNA, 25 bp, Homo sapien
tctttactgcagaaattaagatcaa

SEQ ID NO: 2758407 - DNA, 25 bp, Homo sapien
gaaattaagatcaaatgctgctctg

SEQ ID NO: 2758408 - DNA, 25 bp, Homo sapien
gctaaacacatttctttactgcaga

SEQ ID NO: 2758409 - DNA, 25 bp, Homo sapien
gacagacatctctgtaggaaccagg

SEQ ID NO: 2758410 - DNA, 25 bp, Homo sapien
tgaagcatgcgccattctgatgact

SEQ ID NO: 2758411 - DNA, 25 bp, Homo sapien
gcctgcttgagtgagagtctcccag

SEQ ID NO: 2758412 - DNA, 25 bp, Homo sapien
tctagggagtcagaaccacgtggct

SEQ ID NO: 2758413 - DNA, 25 bp, Homo sapien
caaaaggtcgcctacatccacaagg

SEQ ID NO: 2758414 - DNA, 25 bp, Homo sapien
cacaaggcattcaagggacataaaa

SEQ ID NO: 2758415 - DNA, 25 bp, Homo sapien
cggaagatttttctgggagacagga

SEQ ID NO: 2758416 - DNA, 25 bp, Homo sapien
cattcaacaggcttgcggaagattt

SEQ ID NO: 2758417 - DNA, 25 bp, Homo sapien
tcactaagagctgcccatggacaac

SEQ ID NO: 2758418 - DNA, 25 bp, Homo sapien
caaacccacaacccataaatactgt

SEQ ID NO: 2758419 - DNA, 25 bp, Homo sapien
gttgaaaatgatcagaactactgac

SEQ ID NO: 2758420 - DNA, 25 bp, Homo sapien
gaactactgacccaaccaatccatt

SEQ ID NO: 2758421 - DNA, 25 bp, Homo sapien
gaaaccaaattctcatctggggaaa

SEQ ID NO: 2758422 - DNA, 25 bp, Homo sapien
cttgagaagtatgtacaggtcctga

SEQ ID NO: 2758423 - DNA, 25 bp, Homo sapien
tgtacaggtcctgaaagaaaccaaa

SEQ ID NO: 2758424 - DNA, 25 bp, Homo sapien
cccttttcacatcatcttgagaagt

SEQ ID NO: 2758425 - DNA, 25 bp, Homo sapien
tatacttgaacttttgctcaaatta

SEQ ID NO: 2758426 - DNA, 25 bp, Homo sapien
catatacttgaacttttgctcaaat

SEQ ID NO: 2758427 - DNA, 25 bp, Homo sapien
atacttgaacttttgctcaaattac

SEQ ID NO: 2758428 - DNA, 25 bp, Homo sapien
tcatatacttgaacttttgctcaaa

SEQ ID NO: 2758429 - DNA, 25 bp, Homo sapien
tgaccatagtctgtccggaagacga

SEQ ID NO: 2758430 - DNA, 25 bp, Homo sapien
cattttctctcagccagacccgtgt

SEQ ID NO: 2758431 - DNA, 25 bp, Homo sapien
tccggaagacgacgatgccttctgc

SEQ ID NO: 2758432 - DNA, 25 bp, Homo sapien
tgccttctgcacaggaatttacagt

SEQ ID NO: 2758433 - DNA, 25 bp, Homo sapien
tatgcaaactattacattcagtcat

SEQ ID NO: 2758434 - DNA, 25 bp, Homo sapien
cgtatgcaaactattacattcagtc

SEQ ID NO: 2758435 - DNA, 25 bp, Homo sapien
gtatgcaaactattacattcagtca

SEQ ID NO: 2758436 - DNA, 25 bp, Homo sapien
tgagacagattttccagggtggaat

SEQ ID NO: 2758437 - DNA, 25 bp, Homo sapien
ttgagacagattttccagggtggaa

SEQ ID NO: 2758438 - DNA, 25 bp, Homo sapien
gggtggaatgcagaggcgcaatatg

SEQ ID NO: 2758439 - DNA, 25 bp, Homo sapien
atgcagaggcgcaatatgggctcac

SEQ ID NO: 2758440 - DNA, 25 bp, Homo sapien
ggtccttgcgggcttcacgagatcg

SEQ ID NO: 2758441 - DNA, 25 bp, Homo sapien
cgggcttcacgagatcgattcctga

SEQ ID NO: 2758442 - DNA, 25 bp, Homo sapien
cttgcgggcttcacgagatcgattc

SEQ ID NO: 2758443 - DNA, 25 bp, Homo sapien
tccttgcgggcttcacgagatcgat

SEQ ID NO: 2758444 - DNA, 25 bp, Homo sapien
tttgctgagaactgcacaactcaga

SEQ ID NO: 2758445 - DNA, 25 bp, Homo sapien
gctgagaactgcacaactcagacag

SEQ ID NO: 2758446 - DNA, 25 bp, Homo sapien
ttgctgagaactgcacaactcagac

SEQ ID NO: 2758447 - DNA, 25 bp, Homo sapien
tgagaactgcacaactcagacagta

SEQ ID NO: 2758448 - DNA, 25 bp, Homo sapien
gaaacgaggcatggagcagataaag

SEQ ID NO: 2758449 - DNA, 25 bp, Homo sapien
ttacagacatgggaaacgaggcatg

SEQ ID NO: 2758450 - DNA, 25 bp, Homo sapien
tagaaaatagtccagcctagcacct

SEQ ID NO: 2758451 - DNA, 25 bp, Homo sapien
tactgattggctttcataagccact

SEQ ID NO: 2758452 - DNA, 25 bp, Homo sapien
acccagagtccactgctctcaacag

SEQ ID NO: 2758453 - DNA, 25 bp, Homo sapien
cgaccttgagcccttactgtgtctg

SEQ ID NO: 2758454 - DNA, 25 bp, Homo sapien
cttgagcccttactgtgtctgagtg

SEQ ID NO: 2758455 - DNA, 25 bp, Homo sapien
accttgagcccttactgtgtctgag

SEQ ID NO: 2758456 - DNA, 25 bp, Homo sapien
ctgcttcttcaggcccaggaacatc

SEQ ID NO: 2758457 - DNA, 25 bp, Homo sapien
tgcttcttcaggcccaggaacatcc

SEQ ID NO: 2758458 - DNA, 25 bp, Homo sapien
ttcttcaggcccaggaacatcccac

SEQ ID NO: 2758459 - DNA, 25 bp, Homo sapien
ctactgcttcttcaggcccaggaac

SEQ ID NO: 2758460 - DNA, 25 bp, Homo sapien
tatgcctatctcgaaggtcactgca

SEQ ID NO: 2758461 - DNA, 25 bp, Homo sapien
gccagcatggccaaaaccactttag

SEQ ID NO: 2758462 - DNA, 25 bp, Homo sapien
ttaaatcattaactaccaagggctg

SEQ ID NO: 2758463 - DNA, 25 bp, Homo sapien
catccaagaagtgccagaagttacc

SEQ ID NO: 2758464 - DNA, 25 bp, Homo sapien
tcaccctggtatcgcagaatttcct

SEQ ID NO: 2758465 - DNA, 25 bp, Homo sapien
tggttttcaccctggtatcgcagaa

SEQ ID NO: 2758466 - DNA, 25 bp, Homo sapien
gtgaatgaagtcacttttgcaaaac

SEQ ID NO: 2758467 - DNA, 25 bp, Homo sapien
tgaagtcacttttgcaaaactgcat

SEQ ID NO: 2758468 - DNA, 25 bp, Homo sapien
agctctgccgatcccaacagctggc

SEQ ID NO: 2758469 - DNA, 25 bp, Homo sapien
gccagctctgccgatcccaacagct

SEQ ID NO: 2758470 - DNA, 25 bp, Homo sapien
cagctctgccgatcccaacagctgg

SEQ ID NO: 2758471 - DNA, 25 bp, Homo sapien
gctctgccgatcccaacagctggcc

SEQ ID NO: 2758472 - DNA, 25 bp, Homo sapien
tcaacagatagtggtgcagactcgt

SEQ ID NO: 2758473 - DNA, 25 bp, Homo sapien
tcccgagtgttaagcctcagccttg

SEQ ID NO: 2758474 - DNA, 25 bp, Homo sapien
cccattcggagttctgaggagtctt

SEQ ID NO: 2758475 - DNA, 25 bp, Homo sapien
cagttgaatcgcttggtcccgagtg

SEQ ID NO: 2758476 - DNA, 25 bp, Homo sapien
tttgcgagagaatacgacctttttc

SEQ ID NO: 2758477 - DNA, 25 bp, Homo sapien
caaagctttgcgagagaatacgacc

SEQ ID NO: 2758478 - DNA, 25 bp, Homo sapien
gacataacttgacatgccctcaaag

SEQ ID NO: 2758479 - DNA, 25 bp, Homo sapien
tgccctcaaagctttgcgagagaat

SEQ ID NO: 2758480 - DNA, 25 bp, Homo sapien
aaaatcatttaataactgcccactt

SEQ ID NO: 2758481 - DNA, 25 bp, Homo sapien
cacttttagggcatttcatcagaga

SEQ ID NO: 2758482 - DNA, 25 bp, Homo sapien
taataactgcccacttttagggcat

SEQ ID NO: 2758483 - DNA, 25 bp, Homo sapien
tgcccacttttagggcatttcatca

SEQ ID NO: 2758484 - DNA, 25 bp, Homo sapien
cacaattaactcgaggggagccata

SEQ ID NO: 2758485 - DNA, 25 bp, Homo sapien
gggagccataaaattctaatgaagg

SEQ ID NO: 2758486 - DNA, 25 bp, Homo sapien
gaggaatgtggcatgctcagtttct

SEQ ID NO: 2758487 - DNA, 25 bp, Homo sapien
taaaattctaatgaaggccatgaag

SEQ ID NO: 2758488 - DNA, 25 bp, Homo sapien
cgctgtagcgcgttatcctgatgtt

SEQ ID NO: 2758489 - DNA, 25 bp, Homo sapien
gagatcaggacgctgtagcgcgtta

SEQ ID NO: 2758490 - DNA, 25 bp, Homo sapien
gtagcgcgttatcctgatgttcccc

SEQ ID NO: 2758491 - DNA, 25 bp, Homo sapien
ggtaacaggagatcaggacgctgta

SEQ ID NO: 2758492 - DNA, 25 bp, Homo sapien
actcttgcagaaagttctggtgcct

SEQ ID NO: 2758493 - DNA, 25 bp, Homo sapien
ctttaccactggacaacgtgcaact

SEQ ID NO: 2758494 - DNA, 25 bp, Homo sapien
tggtgcctttcgacaagcatgaaaa

SEQ ID NO: 2758495 - DNA, 25 bp, Homo sapien
cactggacaacgtgcaactcttgca

SEQ ID NO: 2758496 - DNA, 25 bp, Homo sapien
ggtccggggaaaccatgcgtgtcac

SEQ ID NO: 2758497 - DNA, 25 bp, Homo sapien
agcgcagtcccggactcgccgagtg

SEQ ID NO: 2758498 - DNA, 25 bp, Homo sapien
gagtgccgctccgactcgcggaagt

SEQ ID NO: 2758499 - DNA, 25 bp, Homo sapien
ggaaaccatgcgtgtcacggcgcca

SEQ ID NO: 2758500 - DNA, 25 bp, Homo sapien
tcccctgctgccatcgcccggtccc

SEQ ID NO: 2758501 - DNA, 25 bp, Homo sapien
ccatcgcccggtcccttcttgtcct

SEQ ID NO: 2758502 - DNA, 25 bp, Homo sapien
ccctgctgccatcgcccggtccctt

SEQ ID NO: 2758503 - DNA, 25 bp, Homo sapien
gctgccatcgcccggtcccttcttg

SEQ ID NO: 2758504 - DNA, 25 bp, Homo sapien
ccaagttcctcactactgggcgcag

SEQ ID NO: 2758505 - DNA, 25 bp, Homo sapien
aagttcctcactactgggcgcagcg

SEQ ID NO: 2758506 - DNA, 25 bp, Homo sapien
gtcccgacggcagcctttgtctctt

SEQ ID NO: 2758507 - DNA, 25 bp, Homo sapien
cctaactcgcccgtcccgacggcag

SEQ ID NO: 2758508 - DNA, 25 bp, Homo sapien
gaggacagcgggccgcaaagtgagc

SEQ ID NO: 2758509 - DNA, 25 bp, Homo sapien
ccgcgcgagcgcttggaggtgagca

SEQ ID NO: 2758510 - DNA, 25 bp, Homo sapien
tcagccagctctcgcccgcgggact

SEQ ID NO: 2758511 - DNA, 25 bp, Homo sapien
acagcgggccgcaaagtgagcagga

SEQ ID NO: 2758512 - DNA, 25 bp, Homo sapien
tctgtcttgctttaattttagtatt

SEQ ID NO: 2758513 - DNA, 25 bp, Homo sapien
tctctctgtcttgctttaattttag

SEQ ID NO: 2758514 - DNA, 25 bp, Homo sapien
aatcttctctctgtcttgctttaat

SEQ ID NO: 2758515 - DNA, 25 bp, Homo sapien
gctaatcttctctctgtcttgcttt

SEQ ID NO: 2758516 - DNA, 25 bp, Homo sapien
ggcaaccttgcttcctcggcagcag

SEQ ID NO: 2758517 - DNA, 25 bp, Homo sapien
aggaaggcaaccttgcttcctcggc

SEQ ID NO: 2758518 - DNA, 25 bp, Homo sapien
cctcacccatcaggaaggcaacctt

SEQ ID NO: 2758519 - DNA, 25 bp, Homo sapien
accttgcttcctcggcagcagggca

SEQ ID NO: 2758520 - DNA, 25 bp, Homo sapien
cttcaactgctttacccttgagcca

SEQ ID NO: 2758521 - DNA, 25 bp, Homo sapien
aactgctttacccttgagccataga

SEQ ID NO: 2758522 - DNA, 25 bp, Homo sapien
actgctttacccttgagccatagag

SEQ ID NO: 2758523 - DNA, 25 bp, Homo sapien
tcaactgctttacccttgagccata

SEQ ID NO: 2758524 - DNA, 25 bp, Homo sapien
gcatgattggatcgcatttcctaga

SEQ ID NO: 2758525 - DNA, 25 bp, Homo sapien
tatccattgtatatagcatgattgg

SEQ ID NO: 2758526 - DNA, 25 bp, Homo sapien
ttcctagatgttgtaaaagccttga

SEQ ID NO: 2758527 - DNA, 25 bp, Homo sapien
catttcctagatgttgtaaaagcct

SEQ ID NO: 2758528 - DNA, 25 bp, Homo sapien
ctcgggctatattaaaaaggtgctc

SEQ ID NO: 2758529 - DNA, 25 bp, Homo sapien
ttggtcaaccaattggtaaaggtgc

SEQ ID NO: 2758530 - DNA, 25 bp, Homo sapien
aaggtgctcatgattggtcaaccaa

SEQ ID NO: 2758531 - DNA, 25 bp, Homo sapien
tgggagggcctcgggctatattaaa

SEQ ID NO: 2758532 - DNA, 25 bp, Homo sapien
tggtttgctcatccgacttccttcc

SEQ ID NO: 2758533 - DNA, 25 bp, Homo sapien
ggtggtttgctcatccgacttcctt

SEQ ID NO: 2758534 - DNA, 25 bp, Homo sapien
gtttgctcatccgacttccttccca

SEQ ID NO: 2758535 - DNA, 25 bp, Homo sapien
ctggtggtttgctcatccgacttcc

SEQ ID NO: 2758536 - DNA, 25 bp, Homo sapien
agcctccagcgacacacacagtagt

SEQ ID NO: 2758537 - DNA, 25 bp, Homo sapien
cgacacacacagtagtttgagcagg

SEQ ID NO: 2758538 - DNA, 25 bp, Homo sapien
ggcagacaactgtgcgcaggtcctt

SEQ ID NO: 2758539 - DNA, 25 bp, Homo sapien
caactgtgcgcaggtccttgaagta

SEQ ID NO: 2758540 - DNA, 25 bp, Homo sapien
cctgatagaaatacttagttggcgc

SEQ ID NO: 2758541 - DNA, 25 bp, Homo sapien
caaacttgaatgtcgcctgggttgc

SEQ ID NO: 2758542 - DNA, 25 bp, Homo sapien
tagttggcgctatgatgatgtcttt

SEQ ID NO: 2758543 - DNA, 25 bp, Homo sapien
taatgtgataatccccacggagcca

SEQ ID NO: 2758544 - DNA, 25 bp, Homo sapien
tctttctcggtttccaatcagtctc

SEQ ID NO: 2758545 - DNA, 25 bp, Homo sapien
tcacttcccttccaaatcagcttgt

SEQ ID NO: 2758546 - DNA, 25 bp, Homo sapien
catttgagtgtgcttgggtcccctt

SEQ ID NO: 2758547 - DNA, 25 bp, Homo sapien
cagtctctcaatgcttttcaataaa

SEQ ID NO: 2758548 - DNA, 25 bp, Homo sapien
ggtcctccactccaaaggatccttg

SEQ ID NO: 2758549 - DNA, 25 bp, Homo sapien
catccattgggtttggttacttcct

SEQ ID NO: 2758550 - DNA, 25 bp, Homo sapien
gtagctgagtcacaccttatgggaa

SEQ ID NO: 2758551 - DNA, 25 bp, Homo sapien
tggtatgacgtgacagtagctgagt

SEQ ID NO: 2758552 - DNA, 25 bp, Homo sapien
tacagccagctcaggagaatgactg

SEQ ID NO: 2758553 - DNA, 25 bp, Homo sapien
catgggtactgggttgataacaggt

SEQ ID NO: 2758554 - DNA, 25 bp, Homo sapien
taacgagtttataggacctctcttc

SEQ ID NO: 2758555 - DNA, 25 bp, Homo sapien
gcggaccatagaagggaatctcttt

SEQ ID NO: 2758556 - DNA, 25 bp, Homo sapien
gaaggtcccctgttgctcacctgtg

SEQ ID NO: 2758557 - DNA, 25 bp, Homo sapien
ggcgggtcccctggctctcagatgc

SEQ ID NO: 2758558 - DNA, 25 bp, Homo sapien
agatgcatacccttgtccttgtgcc

SEQ ID NO: 2758559 - DNA, 25 bp, Homo sapien
ttgtgcctgtgcaagcgggcaggaa

SEQ ID NO: 2758560 - DNA, 25 bp, Homo sapien
ttttcctgaactgtgcgtttcccat

SEQ ID NO: 2758561 - DNA, 25 bp, Homo sapien
cattttcctgaactgtgcgtttccc

SEQ ID NO: 2758562 - DNA, 25 bp, Homo sapien
cgtttcccatgacttagagtaaggg

SEQ ID NO: 2758563 - DNA, 25 bp, Homo sapien
tgtgcgtttcccatgacttagagta

SEQ ID NO: 2758564 - DNA, 25 bp, Homo sapien
tagagccttatgtttctcctgagag

SEQ ID NO: 2758565 - DNA, 25 bp, Homo sapien
ggtgagatcagtgcaatatcagata

SEQ ID NO: 2758566 - DNA, 25 bp, Homo sapien
cagcaaatgcccctttgatgctttc

SEQ ID NO: 2758567 - DNA, 25 bp, Homo sapien
ctccataggcaggtgagatcagtgc

SEQ ID NO: 2758568 - DNA, 25 bp, Homo sapien
agttctttccaaggacacccttgat

SEQ ID NO: 2758569 - DNA, 25 bp, Homo sapien
tgagctcatctcctccggaatagca

SEQ ID NO: 2758570 - DNA, 25 bp, Homo sapien
tctcctccggaatagcaggctttgg

SEQ ID NO: 2758571 - DNA, 25 bp, Homo sapien
gaagttagaagagtatggagctcca

SEQ ID NO: 2758572 - DNA, 25 bp, Homo sapien
gtactgttttaggatcaagactcat

SEQ ID NO: 2758573 - DNA, 25 bp, Homo sapien
agcatcctgggaacggcggctgttt

SEQ ID NO: 2758574 - DNA, 25 bp, Homo sapien
gaggaggcgattacactgggaatcc

SEQ ID NO: 2758575 - DNA, 25 bp, Homo sapien
cactggttgctttacggcaggcaga

SEQ ID NO: 2758576 - DNA, 25 bp, Homo sapien
ggcggtgattcccactctaaaagaa

SEQ ID NO: 2758577 - DNA, 25 bp, Homo sapien
tctgactgggccgaaagccagatga

SEQ ID NO: 2758578 - DNA, 25 bp, Homo sapien
tggtctgactgggccgaaagccaga

SEQ ID NO: 2758579 - DNA, 25 bp, Homo sapien
ctgactgggccgaaagccagatgag

SEQ ID NO: 2758580 - DNA, 25 bp, Homo sapien
ctttcattgggggtggtctgactgg

SEQ ID NO: 2758581 - DNA, 25 bp, Homo sapien
gataaatgcatagtggcacgaatcc

SEQ ID NO: 2758582 - DNA, 25 bp, Homo sapien
catcgtcattgagcttatgtcctac

SEQ ID NO: 2758583 - DNA, 25 bp, Homo sapien
caattccctatcatcttggttgagt

SEQ ID NO: 2758584 - DNA, 25 bp, Homo sapien
gcagttagatttagtgtcacagccc

SEQ ID NO: 2758585 - DNA, 25 bp, Homo sapien
attggtatatacttgcacatgcaca

SEQ ID NO: 2758586 - DNA, 25 bp, Homo sapien
tattcctttggatagacatctagca

SEQ ID NO: 2758587 - DNA, 25 bp, Homo sapien
gacaatcgtggacagtcaatggctg

SEQ ID NO: 2758588 - DNA, 25 bp, Homo sapien
tagcacataatgcaactcgtgtaca

SEQ ID NO: 2758589 - DNA, 25 bp, Homo sapien
ggtaaaccacaacacattgagcagg

SEQ ID NO: 2758590 - DNA, 25 bp, Homo sapien
gattaacaaatccatgccacgtcag

SEQ ID NO: 2758591 - DNA, 25 bp, Homo sapien
tatttgataagttccccagctgaag

SEQ ID NO: 2758592 - DNA, 25 bp, Homo sapien
gtttgactttattggattcagccca

SEQ ID NO: 2758593 - DNA, 25 bp, Homo sapien
tgaaacaataccgagggcttgccct

SEQ ID NO: 2758594 - DNA, 25 bp, Homo sapien
taaattgcacgttaactccctgatg

SEQ ID NO: 2758595 - DNA, 25 bp, Homo sapien
tgtgctgacttagcccaggtgagct

SEQ ID NO: 2758596 - DNA, 25 bp, Homo sapien
gattttgccccaggtcaacatcgga

SEQ ID NO: 2758597 - DNA, 25 bp, Homo sapien
gagaaggagggaaagagtagaacca

SEQ ID NO: 2758598 - DNA, 25 bp, Homo sapien
ctgactgaataatcaattgagataa

SEQ ID NO: 2758599 - DNA, 25 bp, Homo sapien
atctgtaactgactgaataatcaat

SEQ ID NO: 2758600 - DNA, 25 bp, Homo sapien
aggagggaaagagtagaaccaggag

SEQ ID NO: 2758601 - DNA, 25 bp, Homo sapien
agctctccggaacagcgtcctcagg

SEQ ID NO: 2758602 - DNA, 25 bp, Homo sapien
ctgctttttatagtgaggcgttcat

SEQ ID NO: 2758603 - DNA, 25 bp, Homo sapien
tgagcgttagggagaatgacagagc

SEQ ID NO: 2758604 - DNA, 25 bp, Homo sapien
gatgactcatgttcctgtgtctgtg

SEQ ID NO: 2758605 - DNA, 25 bp, Homo sapien
ccagtggagccagaagtctggtaaa

SEQ ID NO: 2758606 - DNA, 25 bp, Homo sapien
tttagccagtggagccagaagtctg

SEQ ID NO: 2758607 - DNA, 25 bp, Homo sapien
gtggagccagaagtctggtaaatgt

SEQ ID NO: 2758608 - DNA, 25 bp, Homo sapien
ggctttagccagtggagccagaagt

SEQ ID NO: 2758609 - DNA, 25 bp, Homo sapien
taccttttggctacatacatagcag

SEQ ID NO: 2758610 - DNA, 25 bp, Homo sapien
catgtgttatcacggcagcaggaga

SEQ ID NO: 2758611 - DNA, 25 bp, Homo sapien
ggcaaagtgggttagaaaaatctca

SEQ ID NO: 2758612 - DNA, 25 bp, Homo sapien
gaccttctattattcttggcttggc

SEQ ID NO: 2758613 - DNA, 25 bp, Homo sapien
ctcaattcccccagtaggctctgca

SEQ ID NO: 2758614 - DNA, 25 bp, Homo sapien
tcaattcccccagtaggctctgcat

SEQ ID NO: 2758615 - DNA, 25 bp, Homo sapien
ctgtcctcaattcccccagtaggct

SEQ ID NO: 2758616 - DNA, 25 bp, Homo sapien
ctctctgtcctcaattcccccagta

SEQ ID NO: 2758617 - DNA, 25 bp, Homo sapien
ttcaaagcctcttgagatggaaaag

SEQ ID NO: 2758618 - DNA, 25 bp, Homo sapien
cttttcctggcacagcagattcttt

SEQ ID NO: 2758619 - DNA, 25 bp, Homo sapien
cctctgctgacagtgaactgaccga

SEQ ID NO: 2758620 - DNA, 25 bp, Homo sapien
actgaccgataccatgaagttcctg

SEQ ID NO: 2758621 - DNA, 25 bp, Homo sapien
aataatgtacgtactgccccatgcc

SEQ ID NO: 2758622 - DNA, 25 bp, Homo sapien
tggagatactgtgtttacctgtggt

SEQ ID NO: 2758623 - DNA, 25 bp, Homo sapien
agacttccctcagaccaacctttgt

SEQ ID NO: 2758624 - DNA, 25 bp, Homo sapien
tacctgtggttgagactaaatgaaa

SEQ ID NO: 2758625 - DNA, 25 bp, Homo sapien
atgcaaagcctagacattgccaaga

SEQ ID NO: 2758626 - DNA, 25 bp, Homo sapien
catgcaaagcctagacattgccaag

SEQ ID NO: 2758627 - DNA, 25 bp, Homo sapien
gaatcctgaaaacgagcatgttgca

SEQ ID NO: 2758628 - DNA, 25 bp, Homo sapien
ggtcagtgttgaaagcaaaccagca

SEQ ID NO: 2758629 - DNA, 25 bp, Homo sapien
cctcctgtaagtgctagtgtgtccg

SEQ ID NO: 2758630 - DNA, 25 bp, Homo sapien
caactccaattgttgctggcagcaa

SEQ ID NO: 2758631 - DNA, 25 bp, Homo sapien
gatgtatggccaacctgaggtctgc

SEQ ID NO: 2758632 - DNA, 25 bp, Homo sapien
cctgatggaacagtcgtggatggtc

SEQ ID NO: 2758633 - DNA, 25 bp, Homo sapien
ggattccatttcagggtgccactga

SEQ ID NO: 2758634 - DNA, 25 bp, Homo sapien
tctcaactggtacagatatgctgac

SEQ ID NO: 2758635 - DNA, 25 bp, Homo sapien
cagcgtctgcttataaggtctgcgt

SEQ ID NO: 2758636 - DNA, 25 bp, Homo sapien
cacagcgtctgcttataaggtctgc

SEQ ID NO: 2758637 - DNA, 25 bp, Homo sapien
gtctgcttataaggtctgcgtttta

SEQ ID NO: 2758638 - DNA, 25 bp, Homo sapien
gcgtctgcttataaggtctgcgttt

SEQ ID NO: 2758639 - DNA, 25 bp, Homo sapien
gaagtcattcattactgcgagctca

SEQ ID NO: 2758640 - DNA, 25 bp, Homo sapien
gaaaagcacttttgacctgatccac

SEQ ID NO: 2758641 - DNA, 25 bp, Homo sapien
cgagctcaagaaggaagtatgcagt

SEQ ID NO: 2758642 - DNA, 25 bp, Homo sapien
tgtagccagccacaagatcatccat

SEQ ID NO: 2758643 - DNA, 25 bp, Homo sapien
taacgctgctgaacataacttgaac

SEQ ID NO: 2758644 - DNA, 25 bp, Homo sapien
ttaccaaacttctgcggtcatggag

SEQ ID NO: 2758645 - DNA, 25 bp, Homo sapien
tctgcggtcatggagcctttgggca

SEQ ID NO: 2758646 - DNA, 25 bp, Homo sapien
gcctttgggcaatagctcttaacgc

SEQ ID NO: 2758647 - DNA, 25 bp, Homo sapien
aagatcaagcaggtgttcaaggtgg

SEQ ID NO: 2758648 - DNA, 25 bp, Homo sapien
tgttcaaggtggtatggttatagac

SEQ ID NO: 2758649 - DNA, 25 bp, Homo sapien
agcttccaagatcaagcaggtgttc

SEQ ID NO: 2758650 - DNA, 25 bp, Homo sapien
tccaagatcaagcaggtgttcaagg

SEQ ID NO: 2758651 - DNA, 25 bp, Homo sapien
ctgcaggctatacagcaggcatggc

SEQ ID NO: 2758652 - DNA, 25 bp, Homo sapien
cagggaggcaggcacgtcttcacat

SEQ ID NO: 2758653 - DNA, 25 bp, Homo sapien
gtggaaggtaacagggaggcaggca

SEQ ID NO: 2758654 - DNA, 25 bp, Homo sapien
atggtggaaggtaacagggaggcag

SEQ ID NO: 2758655 - DNA, 25 bp, Homo sapien
tatcatcagaccaccagggttcgga

SEQ ID NO: 2758656 - DNA, 25 bp, Homo sapien
catgatctggctgaagctttgcaca

SEQ ID NO: 2758657 - DNA, 25 bp, Homo sapien
tggactcagggatcttaacaccagc

SEQ ID NO: 2758658 - DNA, 25 bp, Homo sapien
tcaaatggactcttaggctgggcgt

SEQ ID NO: 2758659 - DNA, 25 bp, Homo sapien
accacgccaggctgaaaaactcttc

SEQ ID NO: 2758660 - DNA, 25 bp, Homo sapien
caccacgccaggctgaaaaactctt

SEQ ID NO: 2758661 - DNA, 25 bp, Homo sapien
ccaccacgccaggctgaaaaactct

SEQ ID NO: 2758662 - DNA, 25 bp, Homo sapien
taggcacgctcacatcagttggctg

SEQ ID NO: 2758663 - DNA, 25 bp, Homo sapien
cattttggctagagagccagctggc

SEQ ID NO: 2758664 - DNA, 25 bp, Homo sapien
gagaagcctccagtatcctattggt

SEQ ID NO: 2758665 - DNA, 25 bp, Homo sapien
tcttcattagggaacctggtctcca

SEQ ID NO: 2758666 - DNA, 25 bp, Homo sapien
tattcgttgcttaagatataccaca

SEQ ID NO: 2758667 - DNA, 25 bp, Homo sapien
taacttggactaagtaatgcctcag

SEQ ID NO: 2758668 - DNA, 25 bp, Homo sapien
aaaaatagtccccagatctcagagg

SEQ ID NO: 2758669 - DNA, 25 bp, Homo sapien
tcacagtcaccatatattgtatcag

SEQ ID NO: 2758670 - DNA, 25 bp, Homo sapien
gcctttgacgtctgcctccctaagt

SEQ ID NO: 2758671 - DNA, 25 bp, Homo sapien
tacagatgtacttgcctttgacgtc

SEQ ID NO: 2758672 - DNA, 25 bp, Homo sapien
gttgaatacagatgtacttgccttt

SEQ ID NO: 2758673 - DNA, 25 bp, Homo sapien
gtacttgcctttgacgtctgcctcc

SEQ ID NO: 2758674 - DNA, 25 bp, Homo sapien
tcaactggcttttgcgggaaggtaa

SEQ ID NO: 2758675 - DNA, 25 bp, Homo sapien
gtcctgagggcagaaccatcctgag

SEQ ID NO: 2758676 - DNA, 25 bp, Homo sapien
gcaggcgagcatgaaagcgatccaa

SEQ ID NO: 2758677 - DNA, 25 bp, Homo sapien
cagagggcgccaaaatgccgcaaat

SEQ ID NO: 2758678 - DNA, 25 bp, Homo sapien
tgccagccgaggtagcggaatcgta

SEQ ID NO: 2758679 - DNA, 25 bp, Homo sapien
ctagctttgactcgagcgctcgcaa

SEQ ID NO: 2758680 - DNA, 25 bp, Homo sapien
tgtgtcccggtgctaaaccaagtgt

SEQ ID NO: 2758681 - DNA, 25 bp, Homo sapien
tatgtccctcttgccaacaggtaag

SEQ ID NO: 2758682 - DNA, 25 bp, Homo sapien
ctccctaagtctgagcgagagcccg

SEQ ID NO: 2758683 - DNA, 25 bp, Homo sapien
gcacttcttatccaacggttccaaa

SEQ ID NO: 2758684 - DNA, 25 bp, Homo sapien
atcacctcgaggcagctccctaagt

SEQ ID NO: 2758685 - DNA, 25 bp, Homo sapien
tgggagaagtccacggacagcccag

SEQ ID NO: 2758686 - DNA, 25 bp, Homo sapien
tttaaccactatcgaaacctcagtc

SEQ ID NO: 2758687 - DNA, 25 bp, Homo sapien
caatctgttttgttccgcgtccacg

SEQ ID NO: 2758688 - DNA, 25 bp, Homo sapien
tagcagaccgtctgccactgtgtag

SEQ ID NO: 2758689 - DNA, 25 bp, Homo sapien
caggatccacttacagaaagccagt

SEQ ID NO: 2758690 - DNA, 25 bp, Homo sapien
tggatcctatatccgtctcatgatc

SEQ ID NO: 2758691 - DNA, 25 bp, Homo sapien
cagaggagacctcttcggcctttta

SEQ ID NO: 2758692 - DNA, 25 bp, Homo sapien
gggacggtgcagtcactacctgctg

SEQ ID NO: 2758693 - DNA, 25 bp, Homo sapien
cttacattatgtgcacgtggtttcc

SEQ ID NO: 2758694 - DNA, 25 bp, Homo sapien
tatgccgatttctagcgttatctgg

SEQ ID NO: 2758695 - DNA, 25 bp, Homo sapien
gccctcttggcagatccagtgtgca

SEQ ID NO: 2758696 - DNA, 25 bp, Homo sapien
gtggatggagagcttttatgccgat

SEQ ID NO: 2758697 - DNA, 25 bp, Homo sapien
cgttatctggcttattggtttgaga

SEQ ID NO: 2758698 - DNA, 25 bp, Homo sapien
tgcatacaacgggatgtttaatctt

SEQ ID NO: 2758699 - DNA, 25 bp, Homo sapien
cactttctaaagcatactattggga

SEQ ID NO: 2758700 - DNA, 25 bp, Homo sapien
tatggaacataagtgcttaagatgc

SEQ ID NO: 2758701 - DNA, 25 bp, Homo sapien
tattgaggtcaataagagcaggttt

SEQ ID NO: 2758702 - DNA, 25 bp, Homo sapien
tgggctttgatttcatctgtaccaa

SEQ ID NO: 2758703 - DNA, 25 bp, Homo sapien
tctgacccgatgattgactgatgga

SEQ ID NO: 2758704 - DNA, 25 bp, Homo sapien
gactgatggaaagtctcattgaagg

SEQ ID NO: 2758705 - DNA, 25 bp, Homo sapien
tctgccatccagacagagagcctgg

SEQ ID NO: 2758706 - DNA, 25 bp, Homo sapien
tgagcaatgcactcttaactagacc

SEQ ID NO: 2758707 - DNA, 25 bp, Homo sapien
tgaagaccctgatatctgaaagctg

SEQ ID NO: 2758708 - DNA, 25 bp, Homo sapien
aaaaagctgcttgcgctactgtgtc

SEQ ID NO: 2758709 - DNA, 25 bp, Homo sapien
cggccgagagctagtttcctgattg

SEQ ID NO: 2758710 - DNA, 25 bp, Homo sapien
ggtacatccttgctctgcgtgctaa

SEQ ID NO: 2758711 - DNA, 25 bp, Homo sapien
tctgcgtgctaatgtccttgaggag

SEQ ID NO: 2758712 - DNA, 25 bp, Homo sapien
tatttgtaacggtacatccttgctc

SEQ ID NO: 2758713 - DNA, 25 bp, Homo sapien
aatgtccttgaggagtcgaagtaag

SEQ ID NO: 2758714 - DNA, 25 bp, Homo sapien
tcagtttccggtgtctaacttgaca

SEQ ID NO: 2758715 - DNA, 25 bp, Homo sapien
aacttgacactattgatgtctgcct

SEQ ID NO: 2758716 - DNA, 25 bp, Homo sapien
tgacactattgatgtctgcctcttg

SEQ ID NO: 2758717 - DNA, 25 bp, Homo sapien
ggtgtctaacttgacactattgatg

SEQ ID NO: 2758718 - DNA, 25 bp, Homo sapien
cgaatgcttgtccactgccagcaga

SEQ ID NO: 2758719 - DNA, 25 bp, Homo sapien
tccctgcaaagcactgcagctcttg

SEQ ID NO: 2758720 - DNA, 25 bp, Homo sapien
tgtgtccctgcaaagcactgcagct

SEQ ID NO: 2758721 - DNA, 25 bp, Homo sapien
aacaaaacactgctgtgtccctgca

SEQ ID NO: 2758722 - DNA, 25 bp, Homo sapien
gagaaggagggcgagaaggacgcgg

SEQ ID NO: 2758723 - DNA, 25 bp, Homo sapien
aaggagggcgagaaggacgcggcgg

SEQ ID NO: 2758724 - DNA, 25 bp, Homo sapien
agaaggagggcgagaaggacgcggc

SEQ ID NO: 2758725 - DNA, 25 bp, Homo sapien
ggagggcgagaaggacgcggcggct

SEQ ID NO: 2758726 - DNA, 25 bp, Homo sapien
gaggccccgaaggcggagcccgaga

SEQ ID NO: 2758727 - DNA, 25 bp, Homo sapien
cgagaagacggagggcgcggcagag

SEQ ID NO: 2758728 - DNA, 25 bp, Homo sapien
cccgaaggcggagcccgagaagacg

SEQ ID NO: 2758729 - DNA, 25 bp, Homo sapien
gaggccaaggctgagcccccgaagg

SEQ ID NO: 2758730 - DNA, 25 bp, Homo sapien
gatgcgtttgattctgcccacaggg

SEQ ID NO: 2758731 - DNA, 25 bp, Homo sapien
caagatccgcgtctgaaagtgcagt

SEQ ID NO: 2758732 - DNA, 25 bp, Homo sapien
gcagctaattccgaccaaaccgtaa

SEQ ID NO: 2758733 - DNA, 25 bp, Homo sapien
taaccgtgaaagagtgacaaggaca

SEQ ID NO: 2758734 - DNA, 25 bp, Homo sapien
ggtggtactggcactcccggaatgt

SEQ ID NO: 2758735 - DNA, 25 bp, Homo sapien
tactgggtgcctttgtgcgtactgc

SEQ ID NO: 2758736 - DNA, 25 bp, Homo sapien
cagaggaacttgtacagggatgcca

SEQ ID NO: 2758737 - DNA, 25 bp, Homo sapien
gattcttttccgtagctgatgccgc

SEQ ID NO: 2758738 - DNA, 25 bp, Homo sapien
ccaagagtacttactgcattgctaa

SEQ ID NO: 2758739 - DNA, 25 bp, Homo sapien
catagccaagagtacttactgcatt

SEQ ID NO: 2758740 - DNA, 25 bp, Homo sapien
agcatagccaagagtacttactgca

SEQ ID NO: 2758741 - DNA, 25 bp, Homo sapien
tagccaagagtacttactgcattgc

SEQ ID NO: 2758742 - DNA, 25 bp, Homo sapien
gctggtttttcggactgcataaccc

SEQ ID NO: 2758743 - DNA, 25 bp, Homo sapien
gtttttcggactgcataaccctcat

SEQ ID NO: 2758744 - DNA, 25 bp, Homo sapien
ccagagcttgctggtttttcggact

SEQ ID NO: 2758745 - DNA, 25 bp, Homo sapien
gcttgctggtttttcggactgcata

SEQ ID NO: 2758746 - DNA, 25 bp, Homo sapien
gaccaatatatgagtaatttctccc

SEQ ID NO: 2758747 - DNA, 25 bp, Homo sapien
ccatccctacctagaggaactgtgg

SEQ ID NO: 2758748 - DNA, 25 bp, Homo sapien
tattgagtatatactgcaggacaca

SEQ ID NO: 2758749 - DNA, 25 bp, Homo sapien
cacttggatcaaataagcagaatga

SEQ ID NO: 2758750 - DNA, 25 bp, Homo sapien
agtaaccttctagattcattactgg

SEQ ID NO: 2758751 - DNA, 25 bp, Homo sapien
taaccttctagattcattactggaa

SEQ ID NO: 2758752 - DNA, 25 bp, Homo sapien
gtaaccttctagattcattactgga

SEQ ID NO: 2758753 - DNA, 25 bp, Homo sapien
aaagtaaccttctagattcattact

SEQ ID NO: 2758754 - DNA, 25 bp, Homo sapien
aggttcttactttcaagcagggcag

SEQ ID NO: 2758755 - DNA, 25 bp, Homo sapien
agtcacatcttcacccaaggacgga

SEQ ID NO: 2758756 - DNA, 25 bp, Homo sapien
gttcttactttcaagcagggcagag

SEQ ID NO: 2758757 - DNA, 25 bp, Homo sapien
atagtcacatcttcacccaaggacg

SEQ ID NO: 2758758 - DNA, 25 bp, Homo sapien
tctgacaggtaaacacttagtgata

SEQ ID NO: 2758759 - DNA, 25 bp, Homo sapien
gagagaatttgaatcatgtgggcag

SEQ ID NO: 2758760 - DNA, 25 bp, Homo sapien
tcttgccacccctatgtaagcagta

SEQ ID NO: 2758761 - DNA, 25 bp, Homo sapien
tagtagattgaaccgtaagtatctg

SEQ ID NO: 2758762 - DNA, 25 bp, Homo sapien
ctttgcacacttctaggggccacca

SEQ ID NO: 2758763 - DNA, 25 bp, Homo sapien
tttgcacacttctaggggccaccat

SEQ ID NO: 2758764 - DNA, 25 bp, Homo sapien
tctttgcacacttctaggggccacc

SEQ ID NO: 2758765 - DNA, 25 bp, Homo sapien
ctctttgcacacttctaggggccac

SEQ ID NO: 2758766 - DNA, 25 bp, Homo sapien
gagcctcctgttggcagatccttgg

SEQ ID NO: 2758767 - DNA, 25 bp, Homo sapien
cctcctgttggcagatccttggctg

SEQ ID NO: 2758768 - DNA, 25 bp, Homo sapien
caagagcctcctgttggcagatcct

SEQ ID NO: 2758769 - DNA, 25 bp, Homo sapien
cacaagagcctcctgttggcagatc

SEQ ID NO: 2758770 - DNA, 25 bp, Homo sapien
gtacccaatttctttatgtgaagga

SEQ ID NO: 2758771 - DNA, 25 bp, Homo sapien
tacccaatttctttatgtgaaggaa

SEQ ID NO: 2758772 - DNA, 25 bp, Homo sapien
acccaatttctttatgtgaaggaat

SEQ ID NO: 2758773 - DNA, 25 bp, Homo sapien
ggatgttttggtacaacttatagaa

SEQ ID NO: 2758774 - DNA, 25 bp, Homo sapien
aggtaaaggaaaccccaacatgcat

SEQ ID NO: 2758775 - DNA, 25 bp, Homo sapien
caaatcaaagaacttaagtggatgt

SEQ ID NO: 2758776 - DNA, 25 bp, Homo sapien
aagtggatgttttggtacaacttat

SEQ ID NO: 2758777 - DNA, 25 bp, Homo sapien
cacggctatggggaaattagcctga

SEQ ID NO: 2758778 - DNA, 25 bp, Homo sapien
gaagtcaccccacggctatggggaa

SEQ ID NO: 2758779 - DNA, 25 bp, Homo sapien
cccacggctatggggaaattagcct

SEQ ID NO: 2758780 - DNA, 25 bp, Homo sapien
cggctatggggaaattagcctgagg

SEQ ID NO: 2758781 - DNA, 25 bp, Homo sapien
ggtcaaagagatattccgccaagct

SEQ ID NO: 2758782 - DNA, 25 bp, Homo sapien
tcccatcttgcacaagttggtcatg

SEQ ID NO: 2758783 - DNA, 25 bp, Homo sapien
ccgccaagctagattcgggtgctcc

SEQ ID NO: 2758784 - DNA, 25 bp, Homo sapien
ggtgtgctggtcaaagagatattcc

SEQ ID NO: 2758785 - DNA, 25 bp, Homo sapien
agtcatcacagtccggtttcttgat

SEQ ID NO: 2758786 - DNA, 25 bp, Homo sapien
ccagtcatcacagtccggtttcttg

SEQ ID NO: 2758787 - DNA, 25 bp, Homo sapien
atcacagtccggtttcttgatatcc

SEQ ID NO: 2758788 - DNA, 25 bp, Homo sapien
tctcccagtcatcacagtccggttt

SEQ ID NO: 2758789 - DNA, 25 bp, Homo sapien
caggtaaacgcaggaggcgtagagc

SEQ ID NO: 2758790 - DNA, 25 bp, Homo sapien
ggacaggtaaacgcaggaggcgtag

SEQ ID NO: 2758791 - DNA, 25 bp, Homo sapien
aggtaaacgcaggaggcgtagagct

SEQ ID NO: 2758792 - DNA, 25 bp, Homo sapien
agacatggacaggtaaacgcaggag

SEQ ID NO: 2758793 - DNA, 25 bp, Homo sapien
gcggcctttagtcctggtggtagtc

SEQ ID NO: 2758794 - DNA, 25 bp, Homo sapien
cctttagtcctggtggtagtcctgg

SEQ ID NO: 2758795 - DNA, 25 bp, Homo sapien
gcctttagtcctggtggtagtcctg

SEQ ID NO: 2758796 - DNA, 25 bp, Homo sapien
ctttagtcctggtggtagtcctggc

SEQ ID NO: 2758797 - DNA, 25 bp, Homo sapien
gctgcgttcgcggtggtgactgcgc

SEQ ID NO: 2758798 - DNA, 25 bp, Homo sapien
acgactctcgtggaagaacgtccat

SEQ ID NO: 2758799 - DNA, 25 bp, Homo sapien
gacgactctcgtggaagaacgtcca

SEQ ID NO: 2758800 - DNA, 25 bp, Homo sapien
gcggtggtgactgcgcagtgctgga

SEQ ID NO: 2758801 - DNA, 25 bp, Homo sapien
ttgcatcgagcaaagcgtaaccgct

SEQ ID NO: 2758802 - DNA, 25 bp, Homo sapien
gtaaccgctcctttctgctgacgct

SEQ ID NO: 2758803 - DNA, 25 bp, Homo sapien
gttcttctggtctgcggatttctcc

SEQ ID NO: 2758804 - DNA, 25 bp, Homo sapien
tctcccaggctaggttgctcgaact

SEQ ID NO: 2758805 - DNA, 25 bp, Homo sapien
atgttgccagcttcggtctcagttc

SEQ ID NO: 2758806 - DNA, 25 bp, Homo sapien
tggggggtgcaacatcccgccatgt

SEQ ID NO: 2758807 - DNA, 25 bp, Homo sapien
acatcccgccatgttgccagcttcg

SEQ ID NO: 2758808 - DNA, 25 bp, Homo sapien
ggtgcaacatcccgccatgttgcca

SEQ ID NO: 2758809 - DNA, 25 bp, Homo sapien
tcacaatgggggaacgtggacactt

SEQ ID NO: 2758810 - DNA, 25 bp, Homo sapien
ggaacgtggacacttttacatgctg

SEQ ID NO: 2758811 - DNA, 25 bp, Homo sapien
taaagaggaatctatggaagataca

SEQ ID NO: 2758812 - DNA, 25 bp, Homo sapien
caatctttagtcctatcacaatggg

SEQ ID NO: 2758813 - DNA, 25 bp, Homo sapien
atccgcagtagagatagcagacgcc

SEQ ID NO: 2758814 - DNA, 25 bp, Homo sapien
cgcagtagagatagcagacgccaaa

SEQ ID NO: 2758815 - DNA, 25 bp, Homo sapien
cagtagagatagcagacgccaaaga

SEQ ID NO: 2758816 - DNA, 25 bp, Homo sapien
tccgcagtagagatagcagacgcca

SEQ ID NO: 2758817 - DNA, 25 bp, Homo sapien
ggtcacaagtctttgtgcagattct

SEQ ID NO: 2758818 - DNA, 25 bp, Homo sapien
aggtcacaagtctttgtgcagattc

SEQ ID NO: 2758819 - DNA, 25 bp, Homo sapien
aaggtcacaagtctttgtgcagatt

SEQ ID NO: 2758820 - DNA, 25 bp, Homo sapien
cttgggttgcagagaggagagattt

SEQ ID NO: 2758821 - DNA, 25 bp, Homo sapien
tgggttgcagagaggagagatttgg

SEQ ID NO: 2758822 - DNA, 25 bp, Homo sapien
gcagagaggagagatttggaattct

SEQ ID NO: 2758823 - DNA, 25 bp, Homo sapien
gttgcagagaggagagatttggaat

SEQ ID NO: 2758824 - DNA, 25 bp, Homo sapien
tcacaggcagacatggtattacccg

SEQ ID NO: 2758825 - DNA, 25 bp, Homo sapien
gccctcaggcttctaaatggtccca

SEQ ID NO: 2758826 - DNA, 25 bp, Homo sapien
taaggactccaactgatgccactgt

SEQ ID NO: 2758827 - DNA, 25 bp, Homo sapien
tatacattatatgcttgaggccacg

SEQ ID NO: 2758828 - DNA, 25 bp, Homo sapien
cttcatcttacatccttgatttctg

SEQ ID NO: 2758829 - DNA, 25 bp, Homo sapien
catccttgatttctgtgaattcgca

SEQ ID NO: 2758830 - DNA, 25 bp, Homo sapien
catcttacatccttgatttctgtga

SEQ ID NO: 2758831 - DNA, 25 bp, Homo sapien
tcttacatccttgatttctgtgaat

SEQ ID NO: 2758832 - DNA, 25 bp, Homo sapien
accagatggtcactcaacctttcaa

SEQ ID NO: 2758833 - DNA, 25 bp, Homo sapien
tctgatgtggcactgttgtcaccag

SEQ ID NO: 2758834 - DNA, 25 bp, Homo sapien
gctttgctaattttcactagcttcc

SEQ ID NO: 2758835 - DNA, 25 bp, Homo sapien
gttgtcaccagatggtcactcaacc

SEQ ID NO: 2758836 - DNA, 25 bp, Homo sapien
agatcagtcttacgaattctctctg

SEQ ID NO: 2758837 - DNA, 25 bp, Homo sapien
caagatcagtcttacgaattctctc

SEQ ID NO: 2758838 - DNA, 25 bp, Homo sapien
gatcagtcttacgaattctctctgc

SEQ ID NO: 2758839 - DNA, 25 bp, Homo sapien
cagtcttacgaattctctctgctgc

SEQ ID NO: 2758840 - DNA, 25 bp, Homo sapien
gatggtagcctcaggtgacaccttg

SEQ ID NO: 2758841 - DNA, 25 bp, Homo sapien
aatagcccacgaggagtttgcgtcc

SEQ ID NO: 2758842 - DNA, 25 bp, Homo sapien
catctagggtggctgaatgtacatc

SEQ ID NO: 2758843 - DNA, 25 bp, Homo sapien
tactccttggttctaggcaggcagc

SEQ ID NO: 2758844 - DNA, 25 bp, Homo sapien
ctcctcagggcctatgagaaatttt

SEQ ID NO: 2758845 - DNA, 25 bp, Homo sapien
tctgcaggcctcactggaaatgagg

SEQ ID NO: 2758846 - DNA, 25 bp, Homo sapien
cctcagggcctatgagaaattttct

SEQ ID NO: 2758847 - DNA, 25 bp, Homo sapien
cagggcctatgagaaattttctggg

SEQ ID NO: 2758848 - DNA, 25 bp, Homo sapien
cttcacttttactgtttccaaccat

SEQ ID NO: 2758849 - DNA, 25 bp, Homo sapien
caggacctgccaggattgctgtgaa

SEQ ID NO: 2758850 - DNA, 25 bp, Homo sapien
gacctgccaggattgctgtgaaaga

SEQ ID NO: 2758851 - DNA, 25 bp, Homo sapien
tgccaggattgctgtgaaagactca

SEQ ID NO: 2758852 - DNA, 25 bp, Homo sapien
cctgccaggattgctgtgaaagact

SEQ ID NO: 2758853 - DNA, 25 bp, Homo sapien
ttcccaacttgaaagcttaacctca

SEQ ID NO: 2758854 - DNA, 25 bp, Homo sapien
tcccaacttgaaagcttaacctcat

SEQ ID NO: 2758855 - DNA, 25 bp, Homo sapien
gctcatctccactcgatgcccagaa

SEQ ID NO: 2758856 - DNA, 25 bp, Homo sapien
accaggcctaggtccatcagtgcca

SEQ ID NO: 2758857 - DNA, 25 bp, Homo sapien
tctcagcagctcatctccactcgat

SEQ ID NO: 2758858 - DNA, 25 bp, Homo sapien
ccagaaagccaattgatcacgggaa

SEQ ID NO: 2758859 - DNA, 25 bp, Homo sapien
ctcttgaatatgtgctatggagtgt

SEQ ID NO: 2758860 - DNA, 25 bp, Homo sapien
cttgaatatgtgctatggagtgtct

SEQ ID NO: 2758861 - DNA, 25 bp, Homo sapien
tgaatatgtgctatggagtgtctac

SEQ ID NO: 2758862 - DNA, 25 bp, Homo sapien
tcttgaatatgtgctatggagtgtc

SEQ ID NO: 2758863 - DNA, 25 bp, Homo sapien
gcggttctccaagaacttgcattgg

SEQ ID NO: 2758864 - DNA, 25 bp, Homo sapien
ctctgtcacagctgcggttctccaa

SEQ ID NO: 2758865 - DNA, 25 bp, Homo sapien
gaaatcctgttggtttagtcgtggc

SEQ ID NO: 2758866 - DNA, 25 bp, Homo sapien
caacagcacggttttgggataaagg

SEQ ID NO: 2758867 - DNA, 25 bp, Homo sapien
ctgggttcatttcttcctcattcat

SEQ ID NO: 2758868 - DNA, 25 bp, Homo sapien
ccaataggcataattatcacaaagt

SEQ ID NO: 2758869 - DNA, 25 bp, Homo sapien
actgacatgagaagaattgcgcata

SEQ ID NO: 2758870 - DNA, 25 bp, Homo sapien
taggttggcacttccgaatgtggaa

SEQ ID NO: 2758871 - DNA, 25 bp, Homo sapien
taaatggagataccaataggcataa

SEQ ID NO: 2758872 - DNA, 25 bp, Homo sapien
caaaaatgtccacttgtccttaaag

SEQ ID NO: 2758873 - DNA, 25 bp, Homo sapien
tatgcaactggacttctgacagcca

SEQ ID NO: 2758874 - DNA, 25 bp, Homo sapien
ttgtccttaaagtcatgaataaagg

SEQ ID NO: 2758875 - DNA, 25 bp, Homo sapien
gcttccagatatgcaactggacttc

SEQ ID NO: 2758876 - DNA, 25 bp, Homo sapien
gctaatgaatgagttcatttccaca

SEQ ID NO: 2758877 - DNA, 25 bp, Homo sapien
ggctaatgaatgagttcatttccac

SEQ ID NO: 2758878 - DNA, 25 bp, Homo sapien
ttcaggctaatgaatgagttcattt

SEQ ID NO: 2758879 - DNA, 25 bp, Homo sapien
caggctaatgaatgagttcatttcc

SEQ ID NO: 2758880 - DNA, 25 bp, Homo sapien
ggttgagaaagccaccagaatttca

SEQ ID NO: 2758881 - DNA, 25 bp, Homo sapien
ttcgggtatagtcttagatttcaca

SEQ ID NO: 2758882 - DNA, 25 bp, Homo sapien
cacagtgtcaaactgactgggttga

SEQ ID NO: 2758883 - DNA, 25 bp, Homo sapien
tgaatgagcatttcgggtatagtct

SEQ ID NO: 2758884 - DNA, 25 bp, Homo sapien
ctagagtgcaaggtttcccaggagc

SEQ ID NO: 2758885 - DNA, 25 bp, Homo sapien
tagagtgcaaggtttcccaggagcg

SEQ ID NO: 2758886 - DNA, 25 bp, Homo sapien
tcccaggagcgtgggctctccggca

SEQ ID NO: 2758887 - DNA, 25 bp, Homo sapien
caaggtttcccaggagcgtgggctc

SEQ ID NO: 2758888 - DNA, 25 bp, Homo sapien
tgtaggcgacgccctttttctggcg

SEQ ID NO: 2758889 - DNA, 25 bp, Homo sapien
taggcgacgccctttttctggcggc

SEQ ID NO: 2758890 - DNA, 25 bp, Homo sapien
aggcgacgccctttttctggcggct

SEQ ID NO: 2758891 - DNA, 25 bp, Homo sapien
ttgtggggccttgtgctctctcctc

SEQ ID NO: 2758892 - DNA, 25 bp, Homo sapien
gttgtggggccttgtgctctctcct

SEQ ID NO: 2758893 - DNA, 25 bp, Homo sapien
tgagcctggcctgctgcaggcagta

SEQ ID NO: 2758894 - DNA, 25 bp, Homo sapien
tctctcctctctgaggctgagcctg

SEQ ID NO: 2758895 - DNA, 25 bp, Homo sapien
ctggcgtcagaaaacaagggcagtg

SEQ ID NO: 2758896 - DNA, 25 bp, Homo sapien
ggcgtcagaaaacaagggcagtggt

SEQ ID NO: 2758897 - DNA, 25 bp, Homo sapien
gcgtcagaaaacaagggcagtggtg

SEQ ID NO: 2758898 - DNA, 25 bp, Homo sapien
tggcgtcagaaaacaagggcagtgg

SEQ ID NO: 2758899 - DNA, 25 bp, Homo sapien
tagaaaaaattctgggtgccaagga

SEQ ID NO: 2758900 - DNA, 25 bp, Homo sapien
gaccatcatggaagtcattacaatg

SEQ ID NO: 2758901 - DNA, 25 bp, Homo sapien
aacctctgccgtgtgcatcgtggga

SEQ ID NO: 2758902 - DNA, 25 bp, Homo sapien
agtttacatttcacgaccatcatgg

SEQ ID NO: 2758903 - DNA, 25 bp, Homo sapien
aacagcaggaactagtgaccacgcc

SEQ ID NO: 2758904 - DNA, 25 bp, Homo sapien
agtgatttgccaggtcggccaccca

SEQ ID NO: 2758905 - DNA, 25 bp, Homo sapien
gacctcagagctccaaatatgatgg

SEQ ID NO: 2758906 - DNA, 25 bp, Homo sapien
tgcacggtctgagatacaaatatga

SEQ ID NO: 2758907 - DNA, 25 bp, Homo sapien
tttctcgatgttggggtaatgggcc

SEQ ID NO: 2758908 - DNA, 25 bp, Homo sapien
tgttggggtaatgggccctgggctg

SEQ ID NO: 2758909 - DNA, 25 bp, Homo sapien
tcccctgtgaaaggcttgggctgca

SEQ ID NO: 2758910 - DNA, 25 bp, Homo sapien
tctcacacatctccagtgcctctcc

SEQ ID NO: 2758911 - DNA, 25 bp, Homo sapien
tcattccagccatggctacggccat

SEQ ID NO: 2758912 - DNA, 25 bp, Homo sapien
cagaccaagacctgggtcattccag

SEQ ID NO: 2758913 - DNA, 25 bp, Homo sapien
cagctcccagaccaagacctgggtc

SEQ ID NO: 2758914 - DNA, 25 bp, Homo sapien
aagacctgggtcattccagccatgg

SEQ ID NO: 2758915 - DNA, 25 bp, Homo sapien
tggaagctgtattctgtcagatgtt

SEQ ID NO: 2758916 - DNA, 25 bp, Homo sapien
ggaagctgtattctgtcagatgttg

SEQ ID NO: 2758917 - DNA, 25 bp, Homo sapien
gctgtattctgtcagatgttgcagg

SEQ ID NO: 2758918 - DNA, 25 bp, Homo sapien
catagaactcaatagtctgagtggg

SEQ ID NO: 2758919 - DNA, 25 bp, Homo sapien
gatggtgattccacacacaaggtta

SEQ ID NO: 2758920 - DNA, 25 bp, Homo sapien
tctggcccctcatagaactcaatag

SEQ ID NO: 2758921 - DNA, 25 bp, Homo sapien
agtggggtctgagtaaagctgaact

SEQ ID NO: 2758922 - DNA, 25 bp, Homo sapien
tcctgcagggctccaatggtagcgc

SEQ ID NO: 2758923 - DNA, 25 bp, Homo sapien
gctcctgcagggctccaatggtagc

SEQ ID NO: 2758924 - DNA, 25 bp, Homo sapien
cctgcagggctccaatggtagcgct

SEQ ID NO: 2758925 - DNA, 25 bp, Homo sapien
gggctcctgcagggctccaatggta

SEQ ID NO: 2758926 - DNA, 25 bp, Homo sapien
ctggaagcgcaggaccaggatgatg

SEQ ID NO: 2758927 - DNA, 25 bp, Homo sapien
ggaagcgcaggaccaggatgatggc

SEQ ID NO: 2758928 - DNA, 25 bp, Homo sapien
tggaagcgcaggaccaggatgatgg

SEQ ID NO: 2758929 - DNA, 25 bp, Homo sapien
tgaggagtaacagctgcgtggactt

SEQ ID NO: 2758930 - DNA, 25 bp, Homo sapien
cagcttgaggagtaacagctgcgtg

SEQ ID NO: 2758931 - DNA, 25 bp, Homo sapien
aagggcagcttgaggagtaacagct

SEQ ID NO: 2758932 - DNA, 25 bp, Homo sapien
tggaagggcagcttgaggagtaaca

SEQ ID NO: 2758933 - DNA, 25 bp, Homo sapien
tgcccttttgctggcggctttagtg

SEQ ID NO: 2758934 - DNA, 25 bp, Homo sapien
ctttagtggccagggtcttcgtggc

SEQ ID NO: 2758935 - DNA, 25 bp, Homo sapien
gatttcgcacattgccaggcctgta

SEQ ID NO: 2758936 - DNA, 25 bp, Homo sapien
tcctgtaggcagtgcccttttgctg

SEQ ID NO: 2758937 - DNA, 25 bp, Homo sapien
ggctgagccaggttaactggagaca

SEQ ID NO: 2758938 - DNA, 25 bp, Homo sapien
ctggtttcagactgcaatggtggtg

SEQ ID NO: 2758939 - DNA, 25 bp, Homo sapien
cttgggctgagccaggttaactgga

SEQ ID NO: 2758940 - DNA, 25 bp, Homo sapien
gagccaggttaactggagacagcgc

SEQ ID NO: 2758941 - DNA, 25 bp, Homo sapien
atgtaaggcctttttctaatgcccg

SEQ ID NO: 2758942 - DNA, 25 bp, Homo sapien
tgtatgtaaggcctttttctaatgc

SEQ ID NO: 2758943 - DNA, 25 bp, Homo sapien
tcctgtatgtaaggcctttttctaa

SEQ ID NO: 2758944 - DNA, 25 bp, Homo sapien
taccacctccccaacaaagatctgt

SEQ ID NO: 2758945 - DNA, 25 bp, Homo sapien
gataacccatgggttgttgtcttta

SEQ ID NO: 2758946 - DNA, 25 bp, Homo sapien
atgattgtgacatgccagggatgga

SEQ ID NO: 2758947 - DNA, 25 bp, Homo sapien
gatggataacccatgggttgttgtc

SEQ ID NO: 2758948 - DNA, 25 bp, Homo sapien
gacatgccagggatggataacccat

SEQ ID NO: 2758949 - DNA, 25 bp, Homo sapien
ttcctgattttgtgcagtgccaggg

SEQ ID NO: 2758950 - DNA, 25 bp, Homo sapien
cattaggcattggaaggtcagcttg

SEQ ID NO: 2758951 - DNA, 25 bp, Homo sapien
tacttcctgattttgtgcagtgcca

SEQ ID NO: 2758952 - DNA, 25 bp, Homo sapien
ggcctgggtgatctcacgcattagg

SEQ ID NO: 2758953 - DNA, 25 bp, Homo sapien
ctgtggcggtgaggcttcttgatcc

SEQ ID NO: 2758954 - DNA, 25 bp, Homo sapien
caggaccctcttgccagcagctttg

SEQ ID NO: 2758955 - DNA, 25 bp, Homo sapien
tcatgtagccaggaccctcttgcca

SEQ ID NO: 2758956 - DNA, 25 bp, Homo sapien
ccaggaccctcttgccagcagcttt

SEQ ID NO: 2758957 - DNA, 25 bp, Homo sapien
gtagccaggaccctcttgccagcag

SEQ ID NO: 2758958 - DNA, 25 bp, Homo sapien
tggaagcagtgctggtaccagacag

SEQ ID NO: 2758959 - DNA, 25 bp, Homo sapien
gtgctggtaccagacagcaatggtg

SEQ ID NO: 2758960 - DNA, 25 bp, Homo sapien
taatgcgagccatggtgtagggctg

SEQ ID NO: 2758961 - DNA, 25 bp, Homo sapien
gcagtgctggtaccagacagcaatg

SEQ ID NO: 2758962 - DNA, 25 bp, Homo sapien
aggggaatatggaaacctgaaatgg

SEQ ID NO: 2758963 - DNA, 25 bp, Homo sapien
tcaaaggtgatgctcctgcaaatct

SEQ ID NO: 2758964 - DNA, 25 bp, Homo sapien
aggtgatgctcctgcaaatctgctg

SEQ ID NO: 2758965 - DNA, 25 bp, Homo sapien
aaaggtgatgctcctgcaaatctgc

SEQ ID NO: 2758966 - DNA, 25 bp, Homo sapien
tatactggatagacttagagcctct

SEQ ID NO: 2758967 - DNA, 25 bp, Homo sapien
tagagcctctaacacattgcttggt

SEQ ID NO: 2758968 - DNA, 25 bp, Homo sapien
ggcactgtcaattatgtatccacat

SEQ ID NO: 2758969 - DNA, 25 bp, Homo sapien
gcagatggtttgtcccatgccatag

SEQ ID NO: 2758970 - DNA, 25 bp, Homo sapien
gcttgttatgaatgcctttgtatac

SEQ ID NO: 2758971 - DNA, 25 bp, Homo sapien
gctctgcttgttatgaatgcctttg

SEQ ID NO: 2758972 - DNA, 25 bp, Homo sapien
ttatgggtgcatccgggaaggctct

SEQ ID NO: 2758973 - DNA, 25 bp, Homo sapien
gcctgcacctttatgggtgcatccg

SEQ ID NO: 2758974 - DNA, 25 bp, Homo sapien
gcagttgctgttggggaagaggccc

SEQ ID NO: 2758975 - DNA, 25 bp, Homo sapien
ctagaacatgattcttctgcagttg

SEQ ID NO: 2758976 - DNA, 25 bp, Homo sapien
ctgttggggaagaggcccttgggct

SEQ ID NO: 2758977 - DNA, 25 bp, Homo sapien
gaacatgattcttctgcagttgctg

SEQ ID NO: 2758978 - DNA, 25 bp, Homo sapien
gcctcccttaaatgcttgggctgca

SEQ ID NO: 2758979 - DNA, 25 bp, Homo sapien
cctcccttaaatgcttgggctgcag

SEQ ID NO: 2758980 - DNA, 25 bp, Homo sapien
ccgcaacgcgtgctctcgggaacgc

SEQ ID NO: 2758981 - DNA, 25 bp, Homo sapien
aacgcgtgctctcgggaacgctgac

SEQ ID NO: 2758982 - DNA, 25 bp, Homo sapien
acccgcaacgcgtgctctcgggaac

SEQ ID NO: 2758983 - DNA, 25 bp, Homo sapien
gcaacgcgtgctctcgggaacgctg

SEQ ID NO: 2758984 - DNA, 25 bp, Homo sapien
agacacgcctgtttgcctgccggtc

SEQ ID NO: 2758985 - DNA, 25 bp, Homo sapien
gacacgcctgtttgcctgccggtct

SEQ ID NO: 2758986 - DNA, 25 bp, Homo sapien
ctcagcagacacgcctgtttgcctg

SEQ ID NO: 2758987 - DNA, 25 bp, Homo sapien
agcagacacgcctgtttgcctgccg

SEQ ID NO: 2758988 - DNA, 25 bp, Homo sapien
gcagttgctgttggggaagaggccc

SEQ ID NO: 2758989 - DNA, 25 bp, Homo sapien
gaacatgattcttctgcagttgctg

SEQ ID NO: 2758990 - DNA, 25 bp, Homo sapien
ctagaacatgattcttctgcagttg

SEQ ID NO: 2758991 - DNA, 25 bp, Homo sapien
ctgttggggaagaggcccttgggct

SEQ ID NO: 2758992 - DNA, 25 bp, Homo sapien
cctcccttaaatgcttgggctgcag

SEQ ID NO: 2758993 - DNA, 25 bp, Homo sapien
gcctcccttaaatgcttgggctgca

SEQ ID NO: 2758994 - DNA, 25 bp, Homo sapien
tccaacaaagagcttggctattcca

SEQ ID NO: 2758995 - DNA, 25 bp, Homo sapien
gagcttggctattccagccatggca

SEQ ID NO: 2758996 - DNA, 25 bp, Homo sapien
aacaaagagcttggctattccagcc

SEQ ID NO: 2758997 - DNA, 25 bp, Homo sapien
accacctctccaacaaagagcttgg

SEQ ID NO: 2758998 - DNA, 25 bp, Homo sapien
aacgcgtgctctcgggaacgctgac

SEQ ID NO: 2758999 - DNA, 25 bp, Homo sapien
gcaacgcgtgctctcgggaacgctg

SEQ ID NO: 2759000 - DNA, 25 bp, Homo sapien
acccgcaacgcgtgctctcgggaac

SEQ ID NO: 2759001 - DNA, 25 bp, Homo sapien
ccgcaacgcgtgctctcgggaacgc

SEQ ID NO: 2759002 - DNA, 25 bp, Homo sapien
cagacacacctgtttgcctgccggt

SEQ ID NO: 2759003 - DNA, 25 bp, Homo sapien
ctcagcagacacacctgtttgcctg

SEQ ID NO: 2759004 - DNA, 25 bp, Homo sapien
acacctgtttgcctgccggtctcca

SEQ ID NO: 2759005 - DNA, 25 bp, Homo sapien
gacacacctgtttgcctgccggtct

SEQ ID NO: 2759006 - DNA, 25 bp, Homo sapien
aacatgattcttttgcagttgctgt

SEQ ID NO: 2759007 - DNA, 25 bp, Homo sapien
atgattcttttgcagttgctgttgg

SEQ ID NO: 2759008 - DNA, 25 bp, Homo sapien
tgattcttttgcagttgctgttggg

SEQ ID NO: 2759009 - DNA, 25 bp, Homo sapien
tagaacatgattcttttgcagttgc

SEQ ID NO: 2759010 - DNA, 25 bp, Homo sapien
cctcccttaaatgcttgggctgcag

SEQ ID NO: 2759011 - DNA, 25 bp, Homo sapien
gcctcccttaaatgcttgggctgca

SEQ ID NO: 2759012 - DNA, 25 bp, Homo sapien
accacctctccaacaaagagcttgg

SEQ ID NO: 2759013 - DNA, 25 bp, Homo sapien
gagcttggctattccagccatggca

SEQ ID NO: 2759014 - DNA, 25 bp, Homo sapien
tccaacaaagagcttggctattcca

SEQ ID NO: 2759015 - DNA, 25 bp, Homo sapien
aacaaagagcttggctattccagcc

SEQ ID NO: 2759016 - DNA, 25 bp, Homo sapien
acccgcaacgcgtgctctcgggaac

SEQ ID NO: 2759017 - DNA, 25 bp, Homo sapien
aacgcgtgctctcgggaacgctgac

SEQ ID NO: 2759018 - DNA, 25 bp, Homo sapien
gcaacgcgtgctctcgggaacgctg

SEQ ID NO: 2759019 - DNA, 25 bp, Homo sapien
ccgcaacgcgtgctctcgggaacgc

SEQ ID NO: 2759020 - DNA, 25 bp, Homo sapien
agacacgcctgtttgcctgccggtc

SEQ ID NO: 2759021 - DNA, 25 bp, Homo sapien
agcagacacgcctgtttgcctgccg

SEQ ID NO: 2759022 - DNA, 25 bp, Homo sapien
gacacgcctgtttgcctgccggtct

SEQ ID NO: 2759023 - DNA, 25 bp, Homo sapien
ctcagcagacacgcctgtttgcctg

SEQ ID NO: 2759024 - DNA, 25 bp, Homo sapien
aacatgattcttttgcagttgctgt

SEQ ID NO: 2759025 - DNA, 25 bp, Homo sapien
tagaacatgattcttttgcagttgc

SEQ ID NO: 2759026 - DNA, 25 bp, Homo sapien
atgattcttttgcagttgctgttgg

SEQ ID NO: 2759027 - DNA, 25 bp, Homo sapien
tgattcttttgcagttgctgttggg

SEQ ID NO: 2759028 - DNA, 25 bp, Homo sapien
cctcccttaaatgcttgggctgcag

SEQ ID NO: 2759029 - DNA, 25 bp, Homo sapien
gcctcccttaaatgcttgggctgca

SEQ ID NO: 2759030 - DNA, 25 bp, Homo sapien
accacctctccaacaaagagcttgg

SEQ ID NO: 2759031 - DNA, 25 bp, Homo sapien
gagcttggctattccagccatggca

SEQ ID NO: 2759032 - DNA, 25 bp, Homo sapien
tccaacaaagagcttggctattcca

SEQ ID NO: 2759033 - DNA, 25 bp, Homo sapien
aacaaagagcttggctattccagcc

SEQ ID NO: 2759034 - DNA, 25 bp, Homo sapien
aacgcgtgctctcgggaacgctgac

SEQ ID NO: 2759035 - DNA, 25 bp, Homo sapien
gcaacgcgtgctctcgggaacgctg

SEQ ID NO: 2759036 - DNA, 25 bp, Homo sapien
acccgcaacgcgtgctctcgggaac

SEQ ID NO: 2759037 - DNA, 25 bp, Homo sapien
ccgcaacgcgtgctctcgggaacgc

SEQ ID NO: 2759038 - DNA, 25 bp, Homo sapien
ctcagcagacacgcctgtttgcctg

SEQ ID NO: 2759039 - DNA, 25 bp, Homo sapien
gacacgcctgtttgcctgccggtct

SEQ ID NO: 2759040 - DNA, 25 bp, Homo sapien
agacacgcctgtttgcctgccggtc

SEQ ID NO: 2759041 - DNA, 25 bp, Homo sapien
agcagacacgcctgtttgcctgccg

SEQ ID NO: 2759042 - DNA, 25 bp, Homo sapien
tagaacatgattcttttgcagttgc

SEQ ID NO: 2759043 - DNA, 25 bp, Homo sapien
atgattcttttgcagttgctgttgg

SEQ ID NO: 2759044 - DNA, 25 bp, Homo sapien
aacatgattcttttgcagttgctgt

SEQ ID NO: 2759045 - DNA, 25 bp, Homo sapien
tgattcttttgcagttgctgttggg

SEQ ID NO: 2759046 - DNA, 25 bp, Homo sapien
gcctcccttaaatgcttgggctgca

SEQ ID NO: 2759047 - DNA, 25 bp, Homo sapien
cctcccttaaatgcttgggctgcag

SEQ ID NO: 2759048 - DNA, 25 bp, Homo sapien
accacctctccaacaaagagcttgg

SEQ ID NO: 2759049 - DNA, 25 bp, Homo sapien
gagcttggctattccagccatggca

SEQ ID NO: 2759050 - DNA, 25 bp, Homo sapien
tccaacaaagagcttggctattcca

SEQ ID NO: 2759051 - DNA, 25 bp, Homo sapien
aacaaagagcttggctattccagcc

SEQ ID NO: 2759052 - DNA, 25 bp, Homo sapien
acccgcaacgcgtgctctcgggaac

SEQ ID NO: 2759053 - DNA, 25 bp, Homo sapien
aacgcgtgctctcgggaacgctgac

SEQ ID NO: 2759054 - DNA, 25 bp, Homo sapien
gcaacgcgtgctctcgggaacgctg

SEQ ID NO: 2759055 - DNA, 25 bp, Homo sapien
ccgcaacgcgtgctctcgggaacgc

SEQ ID NO: 2759056 - DNA, 25 bp, Homo sapien
agacacgcctgtttgcctgccggtc

SEQ ID NO: 2759057 - DNA, 25 bp, Homo sapien
gacacgcctgtttgcctgccggtct

SEQ ID NO: 2759058 - DNA, 25 bp, Homo sapien
ctcagcagacacgcctgtttgcctg

SEQ ID NO: 2759059 - DNA, 25 bp, Homo sapien
agcagacacgcctgtttgcctgccg

SEQ ID NO: 2759060 - DNA, 25 bp, Homo sapien
atgattcttttgcagttgctgttgg

SEQ ID NO: 2759061 - DNA, 25 bp, Homo sapien
tagaacatgattcttttgcagttgc

SEQ ID NO: 2759062 - DNA, 25 bp, Homo sapien
tgattcttttgcagttgctgttggg

SEQ ID NO: 2759063 - DNA, 25 bp, Homo sapien
aacatgattcttttgcagttgctgt

SEQ ID NO: 2759064 - DNA, 25 bp, Homo sapien
cctcccttaaatgcttgggctgcag

SEQ ID NO: 2759065 - DNA, 25 bp, Homo sapien
gcctcccttaaatgcttgggctgca

SEQ ID NO: 2759066 - DNA, 25 bp, Homo sapien
aacgcgtgctctcgggaacgctgac

SEQ ID NO: 2759067 - DNA, 25 bp, Homo sapien
ccgcaacgcgtgctctcgggaacgc

SEQ ID NO: 2759068 - DNA, 25 bp, Homo sapien
gcaacgcgtgctctcgggaacgctg

SEQ ID NO: 2759069 - DNA, 25 bp, Homo sapien
acccgcaacgcgtgctctcgggaac

SEQ ID NO: 2759070 - DNA, 25 bp, Homo sapien
cagacacacctgtttgcctgccggt

SEQ ID NO: 2759071 - DNA, 25 bp, Homo sapien
gacacacctgtttgcctgccggtct

SEQ ID NO: 2759072 - DNA, 25 bp, Homo sapien
acacctgtttgcctgccggtctcca

SEQ ID NO: 2759073 - DNA, 25 bp, Homo sapien
ctcagcagacacacctgtttgcctg

SEQ ID NO: 2759074 - DNA, 25 bp, Homo sapien
tagaacatgattcttttgcagttgc

SEQ ID NO: 2759075 - DNA, 25 bp, Homo sapien
atgattcttttgcagttgctgttgg

SEQ ID NO: 2759076 - DNA, 25 bp, Homo sapien
tgattcttttgcagttgctgttggg

SEQ ID NO: 2759077 - DNA, 25 bp, Homo sapien
aacatgattcttttgcagttgctgt

SEQ ID NO: 2759078 - DNA, 25 bp, Homo sapien
cctcccttaaatgcttgggctgcag

SEQ ID NO: 2759079 - DNA, 25 bp, Homo sapien
gcctcccttaaatgcttgggctgca

SEQ ID NO: 2759080 - DNA, 25 bp, Homo sapien
acccgcaacgcgtgctctcgggaac

SEQ ID NO: 2759081 - DNA, 25 bp, Homo sapien
gcaacgcgtgctctcgggaacgctg

SEQ ID NO: 2759082 - DNA, 25 bp, Homo sapien
ccgcaacgcgtgctctcgggaacgc

SEQ ID NO: 2759083 - DNA, 25 bp, Homo sapien
aacgcgtgctctcgggaacgctgac

SEQ ID NO: 2759084 - DNA, 25 bp, Homo sapien
agacacgcctgtttgcctgccggtc

SEQ ID NO: 2759085 - DNA, 25 bp, Homo sapien
ctcagcagacacgcctgtttgcctg

SEQ ID NO: 2759086 - DNA, 25 bp, Homo sapien
gacacgcctgtttgcctgccggtct

SEQ ID NO: 2759087 - DNA, 25 bp, Homo sapien
agcagacacgcctgtttgcctgccg

SEQ ID NO: 2759088 - DNA, 25 bp, Homo sapien
tagaacatgattcttttgcagttgc

SEQ ID NO: 2759089 - DNA, 25 bp, Homo sapien
atgattcttttgcagttgctgttgg

SEQ ID NO: 2759090 - DNA, 25 bp, Homo sapien
tgattcttttgcagttgctgttggg

SEQ ID NO: 2759091 - DNA, 25 bp, Homo sapien
aacatgattcttttgcagttgctgt

SEQ ID NO: 2759092 - DNA, 25 bp, Homo sapien
cctcccttaaatgcttgggctgcag

SEQ ID NO: 2759093 - DNA, 25 bp, Homo sapien
gcctcccttaaatgcttgggctgca

SEQ ID NO: 2759094 - DNA, 25 bp, Homo sapien
aacgcgtgctctcgggaacgctgac

SEQ ID NO: 2759095 - DNA, 25 bp, Homo sapien
gcaacgcgtgctctcgggaacgctg

SEQ ID NO: 2759096 - DNA, 25 bp, Homo sapien
acccgcaacgcgtgctctcgggaac

SEQ ID NO: 2759097 - DNA, 25 bp, Homo sapien
ccgcaacgcgtgctctcgggaacgc

SEQ ID NO: 2759098 - DNA, 25 bp, Homo sapien
acacctgtttgcctgccggtctcca

SEQ ID NO: 2759099 - DNA, 25 bp, Homo sapien
cagacacacctgtttgcctgccggt

SEQ ID NO: 2759100 - DNA, 25 bp, Homo sapien
gacacacctgtttgcctgccggtct

SEQ ID NO: 2759101 - DNA, 25 bp, Homo sapien
ctcagcagacacacctgtttgcctg

SEQ ID NO: 2759102 - DNA, 25 bp, Homo sapien
tagaacatgattcttttgcagttgc

SEQ ID NO: 2759103 - DNA, 25 bp, Homo sapien
atgattcttttgcagttgctgttgg

SEQ ID NO: 2759104 - DNA, 25 bp, Homo sapien
tgattcttttgcagttgctgttggg

SEQ ID NO: 2759105 - DNA, 25 bp, Homo sapien
aacatgattcttttgcagttgctgt

SEQ ID NO: 2759106 - DNA, 25 bp, Homo sapien
gcctcccttaaatgcttgggctgca

SEQ ID NO: 2759107 - DNA, 25 bp, Homo sapien
cctcccttaaatgcttgggctgcag

SEQ ID NO: 2759108 - DNA, 25 bp, Homo sapien
gcaacgcgtgctctcgggaacgctg

SEQ ID NO: 2759109 - DNA, 25 bp, Homo sapien
aacgcgtgctctcgggaacgctgac

SEQ ID NO: 2759110 - DNA, 25 bp, Homo sapien
acccgcaacgcgtgctctcgggaac

SEQ ID NO: 2759111 - DNA, 25 bp, Homo sapien
ccgcaacgcgtgctctcgggaacgc

SEQ ID NO: 2759112 - DNA, 25 bp, Homo sapien
agacacgcctgtttgcctgccggtc

SEQ ID NO: 2759113 - DNA, 25 bp, Homo sapien
gacacgcctgtttgcctgccggtct

SEQ ID NO: 2759114 - DNA, 25 bp, Homo sapien
ctcagcagacacgcctgtttgcctg

SEQ ID NO: 2759115 - DNA, 25 bp, Homo sapien
agcagacacgcctgtttgcctgccg

SEQ ID NO: 2759116 - DNA, 25 bp, Homo sapien
tgattcttttgcagttgctgttggg

SEQ ID NO: 2759117 - DNA, 25 bp, Homo sapien
tagaacatgattcttttgcagttgc

SEQ ID NO: 2759118 - DNA, 25 bp, Homo sapien
atgattcttttgcagttgctgttgg

SEQ ID NO: 2759119 - DNA, 25 bp, Homo sapien
aacatgattcttttgcagttgctgt

SEQ ID NO: 2759120 - DNA, 25 bp, Homo sapien
gcctcccttaaatgcttgggctgca

SEQ ID NO: 2759121 - DNA, 25 bp, Homo sapien
cctcccttaaatgcttgggctgcag

SEQ ID NO: 2759122 - DNA, 25 bp, Homo sapien
acccgcaacgcgtgctctcgggaac

SEQ ID NO: 2759123 - DNA, 25 bp, Homo sapien
aacgcgtgctctcgggaacgctgac

SEQ ID NO: 2759124 - DNA, 25 bp, Homo sapien
gcaacgcgtgctctcgggaacgctg

SEQ ID NO: 2759125 - DNA, 25 bp, Homo sapien
ccgcaacgcgtgctctcgggaacgc

SEQ ID NO: 2759126 - DNA, 25 bp, Homo sapien
acacctgtttgcctgccggtctcca

SEQ ID NO: 2759127 - DNA, 25 bp, Homo sapien
gacacacctgtttgcctgccggtct

SEQ ID NO: 2759128 - DNA, 25 bp, Homo sapien
ctcagcagacacacctgtttgcctg

SEQ ID NO: 2759129 - DNA, 25 bp, Homo sapien
cagacacacctgtttgcctgccggt

SEQ ID NO: 2759130 - DNA, 25 bp, Homo sapien
gaacatgattcttctgcagttgctg

SEQ ID NO: 2759131 - DNA, 25 bp, Homo sapien
ctagaacatgattcttctgcagttg

SEQ ID NO: 2759132 - DNA, 25 bp, Homo sapien
gcagttgctgttggggaagaggccc

SEQ ID NO: 2759133 - DNA, 25 bp, Homo sapien
ctgttggggaagaggcccttgggct

SEQ ID NO: 2759134 - DNA, 25 bp, Homo sapien
gcctcccttaaatgcttgggctgca

SEQ ID NO: 2759135 - DNA, 25 bp, Homo sapien
cctcccttaaatgcttgggctgcag

SEQ ID NO: 2759136 - DNA, 25 bp, Homo sapien
acccgcaacgcgtgctctcgggaac

SEQ ID NO: 2759137 - DNA, 25 bp, Homo sapien
aacgcgtgctctcgggaacgctgac

SEQ ID NO: 2759138 - DNA, 25 bp, Homo sapien
gcaacgcgtgctctcgggaacgctg

SEQ ID NO: 2759139 - DNA, 25 bp, Homo sapien
ccgcaacgcgtgctctcgggaacgc

SEQ ID NO: 2759140 - DNA, 25 bp, Homo sapien
cagacacacctgtttgcctgccggt

SEQ ID NO: 2759141 - DNA, 25 bp, Homo sapien
acacctgtttgcctgccggtctcca

SEQ ID NO: 2759142 - DNA, 25 bp, Homo sapien
gacacacctgtttgcctgccggtct

SEQ ID NO: 2759143 - DNA, 25 bp, Homo sapien
ctcagcagacacacctgtttgcctg

SEQ ID NO: 2759144 - DNA, 25 bp, Homo sapien
ctagaacatgattcttctgcagttg

SEQ ID NO: 2759145 - DNA, 25 bp, Homo sapien
gcagttgctgttggggaagaggccc

SEQ ID NO: 2759146 - DNA, 25 bp, Homo sapien
ctgttggggaagaggcccttgggct

SEQ ID NO: 2759147 - DNA, 25 bp, Homo sapien
gaacatgattcttctgcagttgctg

SEQ ID NO: 2759148 - DNA, 25 bp, Homo sapien
cctcccttaaatgcttgggctgcag

SEQ ID NO: 2759149 - DNA, 25 bp, Homo sapien
gcctcccttaaatgcttgggctgca

SEQ ID NO: 2759150 - DNA, 25 bp, Homo sapien
gcaacgcgtgctctcgggaacgctg

SEQ ID NO: 2759151 - DNA, 25 bp, Homo sapien
aacgcgtgctctcgggaacgctgac

SEQ ID NO: 2759152 - DNA, 25 bp, Homo sapien
ccgcaacgcgtgctctcgggaacgc

SEQ ID NO: 2759153 - DNA, 25 bp, Homo sapien
acccgcaacgcgtgctctcgggaac

SEQ ID NO: 2759154 - DNA, 25 bp, Homo sapien
cagacacacctgtttgcctgccggt

SEQ ID NO: 2759155 - DNA, 25 bp, Homo sapien
acacctgtttgcctgccggtctcca

SEQ ID NO: 2759156 - DNA, 25 bp, Homo sapien
ctcagcagacacacctgtttgcctg

SEQ ID NO: 2759157 - DNA, 25 bp, Homo sapien
gacacacctgtttgcctgccggtct

SEQ ID NO: 2759158 - DNA, 25 bp, Homo sapien
tagaacatgattcttttgcagttgc

SEQ ID NO: 2759159 - DNA, 25 bp, Homo sapien
atgattcttttgcagttgctgttgg

SEQ ID NO: 2759160 - DNA, 25 bp, Homo sapien
aacatgattcttttgcagttgctgt

SEQ ID NO: 2759161 - DNA, 25 bp, Homo sapien
tgattcttttgcagttgctgttggg

SEQ ID NO: 2759162 - DNA, 25 bp, Homo sapien
cctcccttaaatgcttgggctgcag

SEQ ID NO: 2759163 - DNA, 25 bp, Homo sapien
gcctcccttaaatgcttgggctgca

SEQ ID NO: 2759164 - DNA, 25 bp, Homo sapien
aacgcgtgctctcgggaacgctgac

SEQ ID NO: 2759165 - DNA, 25 bp, Homo sapien
gcaacgcgtgctctcgggaacgctg

SEQ ID NO: 2759166 - DNA, 25 bp, Homo sapien
acccgcaacgcgtgctctcgggaac

SEQ ID NO: 2759167 - DNA, 25 bp, Homo sapien
ccgcaacgcgtgctctcgggaacgc

SEQ ID NO: 2759168 - DNA, 25 bp, Homo sapien
cagacacacctgtttgcctgccggt

SEQ ID NO: 2759169 - DNA, 25 bp, Homo sapien
acacctgtttgcctgccggtctcca

SEQ ID NO: 2759170 - DNA, 25 bp, Homo sapien
ctcagcagacacacctgtttgcctg

SEQ ID NO: 2759171 - DNA, 25 bp, Homo sapien
gacacacctgtttgcctgccggtct

SEQ ID NO: 2759172 - DNA, 25 bp, Homo sapien
aacatgattcttttgcagttgctgt

SEQ ID NO: 2759173 - DNA, 25 bp, Homo sapien
atgattcttttgcagttgctgttgg

SEQ ID NO: 2759174 - DNA, 25 bp, Homo sapien
tgattcttttgcagttgctgttggg

SEQ ID NO: 2759175 - DNA, 25 bp, Homo sapien
tagaacatgattcttttgcagttgc

SEQ ID NO: 2759176 - DNA, 25 bp, Homo sapien
gcctcccttaaatgcttgggctgca

SEQ ID NO: 2759177 - DNA, 25 bp, Homo sapien
cctcccttaaatgcttgggctgcag

SEQ ID NO: 2759178 - DNA, 25 bp, Homo sapien
aacgcgtgctctcgggaacgctgac

SEQ ID NO: 2759179 - DNA, 25 bp, Homo sapien
gcaacgcgtgctctcgggaacgctg

SEQ ID NO: 2759180 - DNA, 25 bp, Homo sapien
ccgcaacgcgtgctctcgggaacgc

SEQ ID NO: 2759181 - DNA, 25 bp, Homo sapien
acccgcaacgcgtgctctcgggaac

SEQ ID NO: 2759182 - DNA, 25 bp, Homo sapien
ctcagcagacacacctgtttgcctg

SEQ ID NO: 2759183 - DNA, 25 bp, Homo sapien
cagacacacctgtttgcctgccggt

SEQ ID NO: 2759184 - DNA, 25 bp, Homo sapien
gacacacctgtttgcctgccggtct

SEQ ID NO: 2759185 - DNA, 25 bp, Homo sapien
acacctgtttgcctgccggtctcca

SEQ ID NO: 2759186 - DNA, 25 bp, Homo sapien
aacatgattcttttgcagttgctgt

SEQ ID NO: 2759187 - DNA, 25 bp, Homo sapien
tagaacatgattcttttgcagttgc

SEQ ID NO: 2759188 - DNA, 25 bp, Homo sapien
atgattcttttgcagttgctgttgg

SEQ ID NO: 2759189 - DNA, 25 bp, Homo sapien
tgattcttttgcagttgctgttggg

SEQ ID NO: 2759190 - DNA, 25 bp, Homo sapien
cctcccttaaatgcttgggctgcag

SEQ ID NO: 2759191 - DNA, 25 bp, Homo sapien
gcctcccttaaatgcttgggctgca

SEQ ID NO: 2759192 - DNA, 25 bp, Homo sapien
acccgcaacgcgtgctctcgggaac

SEQ ID NO: 2759193 - DNA, 25 bp, Homo sapien
gcaacgcgtgctctcgggaacgctg

SEQ ID NO: 2759194 - DNA, 25 bp, Homo sapien
aacgcgtgctctcgggaacgctgac

SEQ ID NO: 2759195 - DNA, 25 bp, Homo sapien
ccgcaacgcgtgctctcgggaacgc

SEQ ID NO: 2759196 - DNA, 25 bp, Homo sapien
cagacacacctgtttgcctgccggt

SEQ ID NO: 2759197 - DNA, 25 bp, Homo sapien
gacacacctgtttgcctgccggtct

SEQ ID NO: 2759198 - DNA, 25 bp, Homo sapien
acacctgtttgcctgccggtctcca

SEQ ID NO: 2759199 - DNA, 25 bp, Homo sapien
ctcagcagacacacctgtttgcctg

SEQ ID NO: 2759200 - DNA, 25 bp, Homo sapien
tagaacatgattcttttgcagttgc

SEQ ID NO: 2759201 - DNA, 25 bp, Homo sapien
aacatgattcttttgcagttgctgt

SEQ ID NO: 2759202 - DNA, 25 bp, Homo sapien
atgattcttttgcagttgctgttgg

SEQ ID NO: 2759203 - DNA, 25 bp, Homo sapien
tgattcttttgcagttgctgttggg

SEQ ID NO: 2759204 - DNA, 25 bp, Homo sapien
gcctcccttaaatgcttgggctgca

SEQ ID NO: 2759205 - DNA, 25 bp, Homo sapien
cctcccttaaatgcttgggctgcag

SEQ ID NO: 2759206 - DNA, 25 bp, Homo sapien
aacgcgtgctctcgggaacgctgac

SEQ ID NO: 2759207 - DNA, 25 bp, Homo sapien
acccgcaacgcgtgctctcgggaac

SEQ ID NO: 2759208 - DNA, 25 bp, Homo sapien
gcaacgcgtgctctcgggaacgctg

SEQ ID NO: 2759209 - DNA, 25 bp, Homo sapien
ccgcaacgcgtgctctcgggaacgc

SEQ ID NO: 2759210 - DNA, 25 bp, Homo sapien
acacctgtttgcctgccggtctcca

SEQ ID NO: 2759211 - DNA, 25 bp, Homo sapien
gacacacctgtttgcctgccggtct

SEQ ID NO: 2759212 - DNA, 25 bp, Homo sapien
cagacacacctgtttgcctgccggt

SEQ ID NO: 2759213 - DNA, 25 bp, Homo sapien
ctcagcagacacacctgtttgcctg

SEQ ID NO: 2759214 - DNA, 25 bp, Homo sapien
aacatgattcttttgcagttgctgt

SEQ ID NO: 2759215 - DNA, 25 bp, Homo sapien
tagaacatgattcttttgcagttgc

SEQ ID NO: 2759216 - DNA, 25 bp, Homo sapien
atgattcttttgcagttgctgttgg

SEQ ID NO: 2759217 - DNA, 25 bp, Homo sapien
tgattcttttgcagttgctgttggg

SEQ ID NO: 2759218 - DNA, 25 bp, Homo sapien
cctcccttaaatgcttgggctgcag

SEQ ID NO: 2759219 - DNA, 25 bp, Homo sapien
gcctcccttaaatgcttgggctgca

SEQ ID NO: 2759220 - DNA, 25 bp, Homo sapien
aacgcgtgctctcgggaacgctgac

SEQ ID NO: 2759221 - DNA, 25 bp, Homo sapien
acccgcaacgcgtgctctcgggaac

SEQ ID NO: 2759222 - DNA, 25 bp, Homo sapien
gcaacgcgtgctctcgggaacgctg

SEQ ID NO: 2759223 - DNA, 25 bp, Homo sapien
ccgcaacgcgtgctctcgggaacgc

SEQ ID NO: 2759224 - DNA, 25 bp, Homo sapien
gacacacctgtttgcctgccggtct

SEQ ID NO: 2759225 - DNA, 25 bp, Homo sapien
cagacacacctgtttgcctgccggt

SEQ ID NO: 2759226 - DNA, 25 bp, Homo sapien
ctcagcagacacacctgtttgcctg

SEQ ID NO: 2759227 - DNA, 25 bp, Homo sapien
acacctgtttgcctgccggtctcca

SEQ ID NO: 2759228 - DNA, 25 bp, Homo sapien
aacaatgcctcagggttgcgagccc

SEQ ID NO: 2759229 - DNA, 25 bp, Homo sapien
tctggctgtgcggtcgttgcctcca

SEQ ID NO: 2759230 - DNA, 25 bp, Homo sapien
cagctcacaggtcagaagttctgct

SEQ ID NO: 2759231 - DNA, 25 bp, Homo sapien
gatccgattcgagttggtggcagaa

SEQ ID NO: 2759232 - DNA, 25 bp, Homo sapien
actgggactctcctggcatggatga

SEQ ID NO: 2759233 - DNA, 25 bp, Homo sapien
tgtctctgggcataactgggactct

SEQ ID NO: 2759234 - DNA, 25 bp, Homo sapien
cctctccacggaggctgtgggccag

SEQ ID NO: 2759235 - DNA, 25 bp, Homo sapien
ttaagcaccctctccacggaggctg

SEQ ID NO: 2759236 - DNA, 25 bp, Homo sapien
gctgccttcatctgggtgagaccaa

SEQ ID NO: 2759237 - DNA, 25 bp, Homo sapien
agtcattgtgcctggtctgagatat

SEQ ID NO: 2759238 - DNA, 25 bp, Homo sapien
gggattatgaaactggctgctgcct

SEQ ID NO: 2759239 - DNA, 25 bp, Homo sapien
aatgttggttttacagaaatgagtc

SEQ ID NO: 2759240 - DNA, 25 bp, Homo sapien
cattatcggtttgacgcctataagt

SEQ ID NO: 2759241 - DNA, 25 bp, Homo sapien
gagacattatcggtttgacgcctat

SEQ ID NO: 2759242 - DNA, 25 bp, Homo sapien
caggagacattatcggtttgacgcc

SEQ ID NO: 2759243 - DNA, 25 bp, Homo sapien
atcacaggagacattatcggtttga

SEQ ID NO: 2759244 - DNA, 25 bp, Homo sapien
tggtggctttgcaggcggtctgttt

SEQ ID NO: 2759245 - DNA, 25 bp, Homo sapien
ctagagggcgcccttttgcggacgg

SEQ ID NO: 2759246 - DNA, 25 bp, Homo sapien
caggcggtctgtttgatgggcccca

SEQ ID NO: 2759247 - DNA, 25 bp, Homo sapien
cgcccttttgcggacggcttttgtg

SEQ ID NO: 2759248 - DNA, 25 bp, Homo sapien
tcccctctccttgggctgagcctgg

SEQ ID NO: 2759249 - DNA, 25 bp, Homo sapien
gggcgggcagtagcctctcccctct

SEQ ID NO: 2759250 - DNA, 25 bp, Homo sapien
ggggcgggcagtagcctctcccctc

SEQ ID NO: 2759251 - DNA, 25 bp, Homo sapien
tgagcctggcccactgcaggcggcg

SEQ ID NO: 2759252 - DNA, 25 bp, Homo sapien
aaatgccatgaagccccgcgaagcc

SEQ ID NO: 2759253 - DNA, 25 bp, Homo sapien
ccgaggactcagcagctaccttcat

SEQ ID NO: 2759254 - DNA, 25 bp, Homo sapien
ggaaatgccatgaagccccgcgaag

SEQ ID NO: 2759255 - DNA, 25 bp, Homo sapien
aaccgaggactcagcagctaccttc

SEQ ID NO: 2759256 - DNA, 25 bp, Homo sapien
cacaaccaaatggaaacgaagccgt

SEQ ID NO: 2759257 - DNA, 25 bp, Homo sapien
ctatgattaacacaaagacgttgaa

SEQ ID NO: 2759258 - DNA, 25 bp, Homo sapien
ggctgcttttggaccccatgaggga

SEQ ID NO: 2759259 - DNA, 25 bp, Homo sapien
aaacgaagccgtctagagtgcagcg

SEQ ID NO: 2759260 - DNA, 25 bp, Homo sapien
cctctctgccgagttggcaggccag

SEQ ID NO: 2759261 - DNA, 25 bp, Homo sapien
tctctgccgagttggcaggccagct

SEQ ID NO: 2759262 - DNA, 25 bp, Homo sapien
atgtctctgggcataactgtgacac

SEQ ID NO: 2759263 - DNA, 25 bp, Homo sapien
gtctctgggcataactgtgacacgc

SEQ ID NO: 2759264 - DNA, 25 bp, Homo sapien
aacacataggttgatgtctttaaag

SEQ ID NO: 2759265 - DNA, 25 bp, Homo sapien
taacacataggttgatgtctttaaa

SEQ ID NO: 2759266 - DNA, 25 bp, Homo sapien
ataacacataggttgatgtctttaa

SEQ ID NO: 2759267 - DNA, 25 bp, Homo sapien
ttgatccctcgtgtagccaggaccc

SEQ ID NO: 2759268 - DNA, 25 bp, Homo sapien
ggcaatctcgtgctccaggcgctgg

SEQ ID NO: 2759269 - DNA, 25 bp, Homo sapien
caggaccctcttgccggtgactttg

SEQ ID NO: 2759270 - DNA, 25 bp, Homo sapien
tcttgccggtgactttggtggccag

SEQ ID NO: 2759271 - DNA, 25 bp, Homo sapien
ggcctctgccttgtcactgggctga

SEQ ID NO: 2759272 - DNA, 25 bp, Homo sapien
tgccttgtcactgggctgaacctgg

SEQ ID NO: 2759273 - DNA, 25 bp, Homo sapien
tcactgggctgaacctggtgaactg

SEQ ID NO: 2759274 - DNA, 25 bp, Homo sapien
tgaacctggtgaactggaagcagtg

SEQ ID NO: 2759275 - DNA, 25 bp, Homo sapien
tggtgaggctgtgggcaggattcag

SEQ ID NO: 2759276 - DNA, 25 bp, Homo sapien
tggtaccagacagcaatggtggtga

SEQ ID NO: 2759277 - DNA, 25 bp, Homo sapien
aggctgtgggcaggattcagagagt

SEQ ID NO: 2759278 - DNA, 25 bp, Homo sapien
ctggtaccagacagcaatggtggtg

SEQ ID NO: 2759279 - DNA, 25 bp, Homo sapien
aagatgctgccatacacttagcccc

SEQ ID NO: 2759280 - DNA, 25 bp, Homo sapien
gatgctgccatacacttagcccctt

SEQ ID NO: 2759281 - DNA, 25 bp, Homo sapien
agaagatgctgccatacacttagcc

SEQ ID NO: 2759282 - DNA, 25 bp, Homo sapien
gctgccatacacttagccccttcca

SEQ ID NO: 2759283 - DNA, 25 bp, Homo sapien
aggtccctgtattgagtctccttga

SEQ ID NO: 2759284 - DNA, 25 bp, Homo sapien
cctgtattgagtctccttgagtagc

SEQ ID NO: 2759285 - DNA, 25 bp, Homo sapien
tcagtgggtctgaggtccctgtatt

SEQ ID NO: 2759286 - DNA, 25 bp, Homo sapien
actgatcagtgggtctgaggtccct

SEQ ID NO: 2759287 - DNA, 25 bp, Homo sapien
aggtgatgctcctgcaaatctgctg

SEQ ID NO: 2759288 - DNA, 25 bp, Homo sapien
tcaaaggtgatgctcctgcaaatct

SEQ ID NO: 2759289 - DNA, 25 bp, Homo sapien
aaaggtgatgctcctgcaaatctgc

SEQ ID NO: 2759290 - DNA, 25 bp, Homo sapien
aggggaatatggaaacctgaaatgg

SEQ ID NO: 2759291 - DNA, 25 bp, Homo sapien
gtggcaggtcgagccctttcagaac

SEQ ID NO: 2759292 - DNA, 25 bp, Homo sapien
gcagatgtggcaggtcgagcccttt

SEQ ID NO: 2759293 - DNA, 25 bp, Homo sapien
gatgtggcaggtcgagccctttcag

SEQ ID NO: 2759294 - DNA, 25 bp, Homo sapien
tgtggcaggtcgagccctttcagaa

SEQ ID NO: 2759295 - DNA, 25 bp, Homo sapien
aagatgctcaaggaccatatacttt

SEQ ID NO: 2759296 - DNA, 25 bp, Homo sapien
cagaagatgctcaaggaccatatac

SEQ ID NO: 2759297 - DNA, 25 bp, Homo sapien
gaagatgctcaaggaccatatactt

SEQ ID NO: 2759298 - DNA, 25 bp, Homo sapien
agaagatgctcaaggaccatatact

SEQ ID NO: 2759299 - DNA, 25 bp, Homo sapien
cccgacaaagacctgggtcattaca

SEQ ID NO: 2759300 - DNA, 25 bp, Homo sapien
cgacaaagacctgggtcattacagc

SEQ ID NO: 2759301 - DNA, 25 bp, Homo sapien
tccccgacaaagacctgggtcatta

SEQ ID NO: 2759302 - DNA, 25 bp, Homo sapien
cctccccgacaaagacctgggtcat

SEQ ID NO: 2759303 - DNA, 25 bp, Homo sapien
cctatgcttagctacctttgggctc

SEQ ID NO: 2759304 - DNA, 25 bp, Homo sapien
aatcctatgcttagctacctttggg

SEQ ID NO: 2759305 - DNA, 25 bp, Homo sapien
tcctatgcttagctacctttgggct

SEQ ID NO: 2759306 - DNA, 25 bp, Homo sapien
atcctatgcttagctacctttgggc

SEQ ID NO: 2759307 - DNA, 25 bp, Homo sapien
cggcgccctttttccggctgctttg

SEQ ID NO: 2759308 - DNA, 25 bp, Homo sapien
tggctccggataagccaaagctttc

SEQ ID NO: 2759309 - DNA, 25 bp, Homo sapien
ccccaaaagtgacactcgtgaaaat

SEQ ID NO: 2759310 - DNA, 25 bp, Homo sapien
cgtgaaaatcttctcgtagcctcca

SEQ ID NO: 2759311 - DNA, 25 bp, Homo sapien
tcgtagcctccagcaggtttggctc

SEQ ID NO: 2759312 - DNA, 25 bp, Homo sapien
gggccagctgcatgtctctgggcat

SEQ ID NO: 2759313 - DNA, 25 bp, Homo sapien
cagcgggccagctgcatgtctctgg

SEQ ID NO: 2759314 - DNA, 25 bp, Homo sapien
ccgctccacggaggcagcgggccag

SEQ ID NO: 2759315 - DNA, 25 bp, Homo sapien
cgggccagctgcatgtctctgggca

SEQ ID NO: 2759316 - DNA, 25 bp, Homo sapien
caggttggtgtcttcaaagaggcgc

SEQ ID NO: 2759317 - DNA, 25 bp, Homo sapien
ggttggtgtcttcaaagaggcgcac

SEQ ID NO: 2759318 - DNA, 25 bp, Homo sapien
gtgcctggcatggatggcacacagg

SEQ ID NO: 2759319 - DNA, 25 bp, Homo sapien
cacaggttggtgtcttcaaagaggc

SEQ ID NO: 2759320 - DNA, 25 bp, Homo sapien
tcctgcagggcgctagtggttgcgc

SEQ ID NO: 2759321 - DNA, 25 bp, Homo sapien
ggtgccagacctgtagccgtggggc

SEQ ID NO: 2759322 - DNA, 25 bp, Homo sapien
gattttgcagagtgccagggtgcca

SEQ ID NO: 2759323 - DNA, 25 bp, Homo sapien
gcgctagtggttgcgctctggaagc

SEQ ID NO: 2759324 - DNA, 25 bp, Homo sapien
ctgtggtgcagggccgcggcctctc

SEQ ID NO: 2759325 - DNA, 25 bp, Homo sapien
cggcctctcccctgtccttgggctg

SEQ ID NO: 2759326 - DNA, 25 bp, Homo sapien
ctctcccctgtccttgggctgagcc

SEQ ID NO: 2759327 - DNA, 25 bp, Homo sapien
tgagcctggccagctgcaggcagct

SEQ ID NO: 2759328 - DNA, 25 bp, Homo sapien
gcaggtgtggagtggaccgtaggat

SEQ ID NO: 2759329 - DNA, 25 bp, Homo sapien
ggtgtggagtggaccgtaggattcc

SEQ ID NO: 2759330 - DNA, 25 bp, Homo sapien
gttttgttctagcaggtgtggagtg

SEQ ID NO: 2759331 - DNA, 25 bp, Homo sapien
tggagtggaccgtaggattcctcat

SEQ ID NO: 2759332 - DNA, 25 bp, Homo sapien
tggttgtctagcccgctgacattgg

SEQ ID NO: 2759333 - DNA, 25 bp, Homo sapien
gaagatgttacttctgtgagaaatc

SEQ ID NO: 2759334 - DNA, 25 bp, Homo sapien
gatgttacttctgtgagaaatcagc

SEQ ID NO: 2759335 - DNA, 25 bp, Homo sapien
tctagcccgctgacattggagaaga

SEQ ID NO: 2759336 - DNA, 25 bp, Homo sapien
aactctcatcgggtccctgcatcct

SEQ ID NO: 2759337 - DNA, 25 bp, Homo sapien
ggactgcggcactgtccccgtggga

SEQ ID NO: 2759338 - DNA, 25 bp, Homo sapien
tctcatcgggtccctgcatcctttg

SEQ ID NO: 2759339 - DNA, 25 bp, Homo sapien
ctgcggcactgtccccgtgggaaga

SEQ ID NO: 2759340 - DNA, 25 bp, Homo sapien
ttctgagaaagcgctggagagggtg

SEQ ID NO: 2759341 - DNA, 25 bp, Homo sapien
ctggagagggtggtacaattgtgaa

SEQ ID NO: 2759342 - DNA, 25 bp, Homo sapien
tgttctgagaaagcgctggagaggg

SEQ ID NO: 2759343 - DNA, 25 bp, Homo sapien
cgctggagagggtggtacaattgtg

SEQ ID NO: 2759344 - DNA, 25 bp, Homo sapien
tgtacacattagtggcaaaacccat

SEQ ID NO: 2759345 - DNA, 25 bp, Homo sapien
tctgtacacattagtggcaaaaccc

SEQ ID NO: 2759346 - DNA, 25 bp, Homo sapien
catctctgtacacattagtggcaaa

SEQ ID NO: 2759347 - DNA, 25 bp, Homo sapien
cggtgcaaagatcccatctctgtac

SEQ ID NO: 2759348 - DNA, 25 bp, Homo sapien
ttgtaacactagaagggtatggctc

SEQ ID NO: 2759349 - DNA, 25 bp, Homo sapien
gctcagtttcagcagagtgccattt

SEQ ID NO: 2759350 - DNA, 25 bp, Homo sapien
gcattcacctgatgttccttaaaga

SEQ ID NO: 2759351 - DNA, 25 bp, Homo sapien
ggtatggctcataacccatgagtaa

SEQ ID NO: 2759352 - DNA, 25 bp, Homo sapien
cagatgaacagcaatctggtgtgag

SEQ ID NO: 2759353 - DNA, 25 bp, Homo sapien
ttaggggatagtcacaagtggcaga

SEQ ID NO: 2759354 - DNA, 25 bp, Homo sapien
cagcaatctggtgtgagtggctgct

SEQ ID NO: 2759355 - DNA, 25 bp, Homo sapien
gatagtcacaagtggcagatgaaca

SEQ ID NO: 2759356 - DNA, 25 bp, Homo sapien
catctgatgaggacagtatctttcc

SEQ ID NO: 2759357 - DNA, 25 bp, Homo sapien
cttagacaaggctttggtggattcc

SEQ ID NO: 2759358 - DNA, 25 bp, Homo sapien
tcccatggccactcctttgttggag

SEQ ID NO: 2759359 - DNA, 25 bp, Homo sapien
gagtccattcgcctctccaggtaga

SEQ ID NO: 2759360 - DNA, 25 bp, Homo sapien
ggtgacatctcacggtaggtgacca

SEQ ID NO: 2759361 - DNA, 25 bp, Homo sapien
gccacctttgggtgacatctcacgg

SEQ ID NO: 2759362 - DNA, 25 bp, Homo sapien
tctgatcatccaccattggccacct

SEQ ID NO: 2759363 - DNA, 25 bp, Homo sapien
tttgggtgacatctcacggtaggtg

SEQ ID NO: 2759364 - DNA, 25 bp, Homo sapien
caaaggatatttggtggtggaccgt

SEQ ID NO: 2759365 - DNA, 25 bp, Homo sapien
gaccttttggtgtactcaagtcaca

SEQ ID NO: 2759366 - DNA, 25 bp, Homo sapien
gtggaccgtggacaatccagaccaa

SEQ ID NO: 2759367 - DNA, 25 bp, Homo sapien
caatccagaccaaacctccagaggg

SEQ ID NO: 2759368 - DNA, 25 bp, Homo sapien
cttcagagtgcccttcttgggaatg

SEQ ID NO: 2759369 - DNA, 25 bp, Homo sapien
cagagtgcccttcttgggaatgttt

SEQ ID NO: 2759370 - DNA, 25 bp, Homo sapien
ttctcttctttgctagttctaccat

SEQ ID NO: 2759371 - DNA, 25 bp, Homo sapien
agtgcccttcttgggaatgtttctc

SEQ ID NO: 2759372 - DNA, 25 bp, Homo sapien
cattgaggatcagcatcatagagtt

SEQ ID NO: 2759373 - DNA, 25 bp, Homo sapien
gaggatcagcatcatagagttggct

SEQ ID NO: 2759374 - DNA, 25 bp, Homo sapien
catggcattgaggatcagcatcata

SEQ ID NO: 2759375 - DNA, 25 bp, Homo sapien
gctggaatttatcatggcattgagg

SEQ ID NO: 2759376 - DNA, 25 bp, Homo sapien
cttgagagagtctagggtggccttt

SEQ ID NO: 2759377 - DNA, 25 bp, Homo sapien
tgagagagtctagggtggccttttt

SEQ ID NO: 2759378 - DNA, 25 bp, Homo sapien
aaacttgagagagtctagggtggcc

SEQ ID NO: 2759379 - DNA, 25 bp, Homo sapien
ctggaaacttgagagagtctagggt

SEQ ID NO: 2759380 - DNA, 25 bp, Homo sapien
gttgctgccataacatgtctctctt

SEQ ID NO: 2759381 - DNA, 25 bp, Homo sapien
cttgttgctgccataacatgtctct

SEQ ID NO: 2759382 - DNA, 25 bp, Homo sapien
tcaataccaactacccattccagag

SEQ ID NO: 2759383 - DNA, 25 bp, Homo sapien
ccataacatgtctctcttgcaagct

SEQ ID NO: 2759384 - DNA, 25 bp, Homo sapien
tgttcagccaaaactgtgtcataag

SEQ ID NO: 2759385 - DNA, 25 bp, Homo sapien
tgtgtcataagggtgaaccagagca

SEQ ID NO: 2759386 - DNA, 25 bp, Homo sapien
gctttttattatgttcagccaaaac

SEQ ID NO: 2759387 - DNA, 25 bp, Homo sapien
caaaactgtgtcataagggtgaacc

SEQ ID NO: 2759388 - DNA, 25 bp, Homo sapien
tctctccagtctggtgtccccgatt

SEQ ID NO: 2759389 - DNA, 25 bp, Homo sapien
tccagtctggtgtccccgatttctc

SEQ ID NO: 2759390 - DNA, 25 bp, Homo sapien
ctctccagtctggtgtccccgattt

SEQ ID NO: 2759391 - DNA, 25 bp, Homo sapien
tctccagtctggtgtccccgatttc

SEQ ID NO: 2759392 - DNA, 25 bp, Homo sapien
tctctctgcttggccccaacagatt

SEQ ID NO: 2759393 - DNA, 25 bp, Homo sapien
tgcttggccccaacagattgattag

SEQ ID NO: 2759394 - DNA, 25 bp, Homo sapien
acagattgattagctatttggacag

SEQ ID NO: 2759395 - DNA, 25 bp, Homo sapien
ttagctatttggacagtctgctgtt

SEQ ID NO: 2759396 - DNA, 25 bp, Homo sapien
aatcaggggtgactctagttccagt

SEQ ID NO: 2759397 - DNA, 25 bp, Homo sapien
tcttgaaagaatcaggggtgactct

SEQ ID NO: 2759398 - DNA, 25 bp, Homo sapien
ttaacctgagtccattgagagctcc

SEQ ID NO: 2759399 - DNA, 25 bp, Homo sapien
tgagaaggggaattgtgcctgcatc

SEQ ID NO: 2759400 - DNA, 25 bp, Homo sapien
tgcagctgcattgtcagataggagc

SEQ ID NO: 2759401 - DNA, 25 bp, Homo sapien
gttattaacccgtccctcagcagaa

SEQ ID NO: 2759402 - DNA, 25 bp, Homo sapien
caaaccatttccgttagggccatcg

SEQ ID NO: 2759403 - DNA, 25 bp, Homo sapien
gcttggttccaattggaaagctgca

SEQ ID NO: 2759404 - DNA, 25 bp, Homo sapien
gactcgagtcctgtctttcaagtgt

SEQ ID NO: 2759405 - DNA, 25 bp, Homo sapien
gctgaaagacacaaaggtatgaaaa

SEQ ID NO: 2759406 - DNA, 25 bp, Homo sapien
tcaaaatgactcgagtcctgtcttt

SEQ ID NO: 2759407 - DNA, 25 bp, Homo sapien
aaaagttcattctcaaaatgactcg

SEQ ID NO: 2759408 - DNA, 25 bp, Homo sapien
cttactccacattcggcaaaaatta

SEQ ID NO: 2759409 - DNA, 25 bp, Homo sapien
gttaatagcctctcaattttcctcc

SEQ ID NO: 2759410 - DNA, 25 bp, Homo sapien
tagcctctcaattttcctccttact

SEQ ID NO: 2759411 - DNA, 25 bp, Homo sapien
ggatgaagatggaatccaggttaac

SEQ ID NO: 2759412 - DNA, 25 bp, Homo sapien
ctcagaaattggtctaaaggagcct

SEQ ID NO: 2759413 - DNA, 25 bp, Homo sapien
tctaaaggagcctccactgaaacat

SEQ ID NO: 2759414 - DNA, 25 bp, Homo sapien
ttatctgagtatccccactccaagc

SEQ ID NO: 2759415 - DNA, 25 bp, Homo sapien
cactgaaacattatctgagtatccc

SEQ ID NO: 2759416 - DNA, 25 bp, Homo sapien
gacaaccttgactgaacctaaataa

SEQ ID NO: 2759417 - DNA, 25 bp, Homo sapien
catatgagccaatgtcaaggttaca

SEQ ID NO: 2759418 - DNA, 25 bp, Homo sapien
caggtacagaatgagccagaaacag

SEQ ID NO: 2759419 - DNA, 25 bp, Homo sapien
gagataacattccaccttgcactgc

SEQ ID NO: 2759420 - DNA, 25 bp, Homo sapien
gacttttgttacaggccagaggcaa

SEQ ID NO: 2759421 - DNA, 25 bp, Homo sapien
gcaaatgcggacagtcaatacagca

SEQ ID NO: 2759422 - DNA, 25 bp, Homo sapien
tcagctggccagagcatttgagcaa

SEQ ID NO: 2759423 - DNA, 25 bp, Homo sapien
cttgacacataattccctgctctgg

SEQ ID NO: 2759424 - DNA, 25 bp, Homo sapien
taggcaaggtaaaggtgtgatgtct

SEQ ID NO: 2759425 - DNA, 25 bp, Homo sapien
ttcttggctctagaatgggtccgtt

SEQ ID NO: 2759426 - DNA, 25 bp, Homo sapien
ttgtttgtgccatcaggtaactggg

SEQ ID NO: 2759427 - DNA, 25 bp, Homo sapien
tcttcttaggcaaggtaaaggtgtg

SEQ ID NO: 2759428 - DNA, 25 bp, Homo sapien
tgatttaaggcagcatgaccatgac

SEQ ID NO: 2759429 - DNA, 25 bp, Homo sapien
taacacaattcgaaaggctgagtcc

SEQ ID NO: 2759430 - DNA, 25 bp, Homo sapien
tgagtccttgccacagattagggtg

SEQ ID NO: 2759431 - DNA, 25 bp, Homo sapien
caggcggtgggtcactgaaacataa

SEQ ID NO: 2759432 - DNA, 25 bp, Homo sapien
cagactggatcaaggctcacctcta

SEQ ID NO: 2759433 - DNA, 25 bp, Homo sapien
tgcgtctcatcaggcctgccggata

SEQ ID NO: 2759434 - DNA, 25 bp, Homo sapien
tgggctccaagcaacatctaactgt

SEQ ID NO: 2759435 - DNA, 25 bp, Homo sapien
cagaaaggatgggtacagaagaagc

SEQ ID NO: 2759436 - DNA, 25 bp, Homo sapien
tttggaaaacctcgctggcatttag

SEQ ID NO: 2759437 - DNA, 25 bp, Homo sapien
tgcaactcgctgtataacatctatg

SEQ ID NO: 2759438 - DNA, 25 bp, Homo sapien
tcggcattcaatgggataagagaat

SEQ ID NO: 2759439 - DNA, 25 bp, Homo sapien
gtcttcaaattgttcggcattcaat

SEQ ID NO: 2759440 - DNA, 25 bp, Homo sapien
tcatgatacacagtgtcaatcacta

SEQ ID NO: 2759441 - DNA, 25 bp, Homo sapien
tgatacacagtgtcaatcactagtg

SEQ ID NO: 2759442 - DNA, 25 bp, Homo sapien
tcctgctgaagaccctttcatgata

SEQ ID NO: 2759443 - DNA, 25 bp, Homo sapien
cacttcccgaacttgactgttcctg

SEQ ID NO: 2759444 - DNA, 25 bp, Homo sapien
ctgtggcttccagttgatacctcat

SEQ ID NO: 2759445 - DNA, 25 bp, Homo sapien
cagccactgtggcttccagttgata

SEQ ID NO: 2759446 - DNA, 25 bp, Homo sapien
gccactgtggcttccagttgatacc

SEQ ID NO: 2759447 - DNA, 25 bp, Homo sapien
cactgtggcttccagttgatacctc

SEQ ID NO: 2759448 - DNA, 25 bp, Homo sapien
gctgtagccacttcttagtgaaaat

SEQ ID NO: 2759449 - DNA, 25 bp, Homo sapien
tcttagtgaaaatcctactgatagg

SEQ ID NO: 2759450 - DNA, 25 bp, Homo sapien
cgttttttaatctgaggagcttcat

SEQ ID NO: 2759451 - DNA, 25 bp, Homo sapien
tactgataggattttagcatttccg

SEQ ID NO: 2759452 - DNA, 25 bp, Homo sapien
ctctctctgcctcaaaggcttgtcg

SEQ ID NO: 2759453 - DNA, 25 bp, Homo sapien
cttgtcgtttcagtttagccttgca

SEQ ID NO: 2759454 - DNA, 25 bp, Homo sapien
tagccttgcagatggcacatccatt

SEQ ID NO: 2759455 - DNA, 25 bp, Homo sapien
tgcctcaaaggcttgtcgtttcagt

SEQ ID NO: 2759456 - DNA, 25 bp, Homo sapien
agtcgttttactgctttcgacctgg

SEQ ID NO: 2759457 - DNA, 25 bp, Homo sapien
aggttcttgtccagtcgttttactg

SEQ ID NO: 2759458 - DNA, 25 bp, Homo sapien
cgttttactgctttcgacctggtca

SEQ ID NO: 2759459 - DNA, 25 bp, Homo sapien
tgtccagtcgttttactgctttcga

SEQ ID NO: 2759460 - DNA, 25 bp, Homo sapien
ctcatttccacgatgattaacagag

SEQ ID NO: 2759461 - DNA, 25 bp, Homo sapien
tcatttccacgatgattaacagagt

SEQ ID NO: 2759462 - DNA, 25 bp, Homo sapien
tcatagatttggaatggcaattgca

SEQ ID NO: 2759463 - DNA, 25 bp, Homo sapien
atttggaatggcaattgcatgcatc

SEQ ID NO: 2759464 - DNA, 25 bp, Homo sapien
ttccatttgccagctggattctcat

SEQ ID NO: 2759465 - DNA, 25 bp, Homo sapien
ttccattccatttgccagctggatt

SEQ ID NO: 2759466 - DNA, 25 bp, Homo sapien
cattccatttgccagctggattctc

SEQ ID NO: 2759467 - DNA, 25 bp, Homo sapien
taggatccccttccattccatttgc

SEQ ID NO: 2759468 - DNA, 25 bp, Homo sapien
cgtagttggctgtgttccgaggttc

SEQ ID NO: 2759469 - DNA, 25 bp, Homo sapien
gagtaaatttgcaagtcactactag

SEQ ID NO: 2759470 - DNA, 25 bp, Homo sapien
ccaggtaagaatggccgtagttggc

SEQ ID NO: 2759471 - DNA, 25 bp, Homo sapien
tgatatcagggctatcatcactcat

SEQ ID NO: 2759472 - DNA, 25 bp, Homo sapien
catttgcaacttttgctttcccatt

SEQ ID NO: 2759473 - DNA, 25 bp, Homo sapien
tttgcaacttttgctttcccattcc

SEQ ID NO: 2759474 - DNA, 25 bp, Homo sapien
tctcttggggcctgaattattttct

SEQ ID NO: 2759475 - DNA, 25 bp, Homo sapien
ttcctttctcttggggcctgaatta

SEQ ID NO: 2759476 - DNA, 25 bp, Homo sapien
gatacttcctcatctggagcagaat

SEQ ID NO: 2759477 - DNA, 25 bp, Homo sapien
tttgagtacaagcactgtataaggg

SEQ ID NO: 2759478 - DNA, 25 bp, Homo sapien
tataagggatagtttgggagcatcc

SEQ ID NO: 2759479 - DNA, 25 bp, Homo sapien
aatagccagagtgcaggaaatcaac

SEQ ID NO: 2759480 - DNA, 25 bp, Homo sapien
agatgtcagaggtggagagtcatta

SEQ ID NO: 2759481 - DNA, 25 bp, Homo sapien
aggtggagagtcattagcgcaagct

SEQ ID NO: 2759482 - DNA, 25 bp, Homo sapien
tcaggccaccacagatgtcagaggt

SEQ ID NO: 2759483 - DNA, 25 bp, Homo sapien
tcagaggtggagagtcattagcgca

SEQ ID NO: 2759484 - DNA, 25 bp, Homo sapien
acctcagtctctcgagtatcgggga

SEQ ID NO: 2759485 - DNA, 25 bp, Homo sapien
cactattttgcttaggcttgtctcg

SEQ ID NO: 2759486 - DNA, 25 bp, Homo sapien
agtctctcgagtatcggggaccaca

SEQ ID NO: 2759487 - DNA, 25 bp, Homo sapien
gtctcactattttgcttaggcttgt

SEQ ID NO: 2759488 - DNA, 25 bp, Homo sapien
acaatcatcagcccattgagaaaat

SEQ ID NO: 2759489 - DNA, 25 bp, Homo sapien
atattttgaatacaactttctgcca

SEQ ID NO: 2759490 - DNA, 25 bp, Homo sapien
ctgaggcttctctcaaccacaatca

SEQ ID NO: 2759491 - DNA, 25 bp, Homo sapien
tttgaatacaactttctgccacact

SEQ ID NO: 2759492 - DNA, 25 bp, Homo sapien
tttccctacagacgtcattaaaagc

SEQ ID NO: 2759493 - DNA, 25 bp, Homo sapien
tccctacagacgtcattaaaagctt

SEQ ID NO: 2759494 - DNA, 25 bp, Homo sapien
cattttccctacagacgtcattaaa

SEQ ID NO: 2759495 - DNA, 25 bp, Homo sapien
cctacagacgtcattaaaagctttc

SEQ ID NO: 2759496 - DNA, 25 bp, Homo sapien
ttgatttggtaattgcaaagagatg

SEQ ID NO: 2759497 - DNA, 25 bp, Homo sapien
gtatctctggacttcagatctctgt

SEQ ID NO: 2759498 - DNA, 25 bp, Homo sapien
gtaattgcaaagagatgagcatcag

SEQ ID NO: 2759499 - DNA, 25 bp, Homo sapien
ctgttcagttattgatttggtaatt

SEQ ID NO: 2759500 - DNA, 25 bp, Homo sapien
gtcttccttgactattgttggagaa

SEQ ID NO: 2759501 - DNA, 25 bp, Homo sapien
tgtcttccttgactattgttggaga

SEQ ID NO: 2759502 - DNA, 25 bp, Homo sapien
ctgtcttccttgactattgttggag

SEQ ID NO: 2759503 - DNA, 25 bp, Homo sapien
gtgtaatttgtcataggaattctgc

SEQ ID NO: 2759504 - DNA, 25 bp, Homo sapien
attgtggttaatatcatcctcagtg

SEQ ID NO: 2759505 - DNA, 25 bp, Homo sapien
aatttgtcataggaattctgcttca

SEQ ID NO: 2759506 - DNA, 25 bp, Homo sapien
gtggttaatatcatcctcagtgatg

SEQ ID NO: 2759507 - DNA, 25 bp, Homo sapien
tacttggctataagtaaagccttaa

SEQ ID NO: 2759508 - DNA, 25 bp, Homo sapien
cttggctataagtaaagccttaaag

SEQ ID NO: 2759509 - DNA, 25 bp, Homo sapien
gtacttggctataagtaaagcctta

SEQ ID NO: 2759510 - DNA, 25 bp, Homo sapien
tgtacttggctataagtaaagcctt

SEQ ID NO: 2759511 - DNA, 25 bp, Homo sapien
cctgtggcccacactaagtgcttta

SEQ ID NO: 2759512 - DNA, 25 bp, Homo sapien
ccaaagggtaggatttgagatcgga

SEQ ID NO: 2759513 - DNA, 25 bp, Homo sapien
tagagagttcatttgaagagcactg

SEQ ID NO: 2759514 - DNA, 25 bp, Homo sapien
aaaaaacaaattgggcgactgcatt

SEQ ID NO: 2759515 - DNA, 25 bp, Homo sapien
tatctggagagttgtgtggattctt

SEQ ID NO: 2759516 - DNA, 25 bp, Homo sapien
tctggagagttgtgtggattcttct

SEQ ID NO: 2759517 - DNA, 25 bp, Homo sapien
tatgtgatgtggaaactatctggag

SEQ ID NO: 2759518 - DNA, 25 bp, Homo sapien
cagcaactgacatgtatgtgatgtg

SEQ ID NO: 2759519 - DNA, 25 bp, Homo sapien
cagttggttgatcctgcaattttcc

SEQ ID NO: 2759520 - DNA, 25 bp, Homo sapien
agcagttggttgatcctgcaatttt

SEQ ID NO: 2759521 - DNA, 25 bp, Homo sapien
gcagttggttgatcctgcaattttc

SEQ ID NO: 2759522 - DNA, 25 bp, Homo sapien
gacatgactgatgggcttctgttgc

SEQ ID NO: 2759523 - DNA, 25 bp, Homo sapien
taggaactaagtggcacaagtctcc

SEQ ID NO: 2759524 - DNA, 25 bp, Homo sapien
ttgttatctgcttaatggtcctcat

SEQ ID NO: 2759525 - DNA, 25 bp, Homo sapien
cagactgcctgatctgcagagctgc

SEQ ID NO: 2759526 - DNA, 25 bp, Homo sapien
cactataaccatgcccttcatttgc

SEQ ID NO: 2759527 - DNA, 25 bp, Homo sapien
cattcattagtaaagcatgattatc

SEQ ID NO: 2759528 - DNA, 25 bp, Homo sapien
gattatctgcaaggcatctttgtga

SEQ ID NO: 2759529 - DNA, 25 bp, Homo sapien
gccatcttgtattgcaactcttgcc

SEQ ID NO: 2759530 - DNA, 25 bp, Homo sapien
tgcggggagaagtaacagcgtgtgg

SEQ ID NO: 2759531 - DNA, 25 bp, Homo sapien
aagtaacagcgtgtggagtggaacc

SEQ ID NO: 2759532 - DNA, 25 bp, Homo sapien
gcaggtgcggggagaagtaacagcg

SEQ ID NO: 2759533 - DNA, 25 bp, Homo sapien
ggagaagtaacagcgtgtggagtgg

SEQ ID NO: 2759534 - DNA, 25 bp, Homo sapien
tctgcggagtctggagccaacagtc

SEQ ID NO: 2759535 - DNA, 25 bp, Homo sapien
gactttgggtgaaggatctcccttg

SEQ ID NO: 2759536 - DNA, 25 bp, Homo sapien
gagtgtttccgtctttgaatgggag

SEQ ID NO: 2759537 - DNA, 25 bp, Homo sapien
gacttgactgtgtccgtagcaccca

SEQ ID NO: 2759538 - DNA, 25 bp, Homo sapien
gtaagggacaatatgacagcagacc

SEQ ID NO: 2759539 - DNA, 25 bp, Homo sapien
taagggacaatatgacagcagacca

SEQ ID NO: 2759540 - DNA, 25 bp, Homo sapien
aagggacaatatgacagcagaccag

SEQ ID NO: 2759541 - DNA, 25 bp, Homo sapien
gggtaagggacaatatgacagcaga

SEQ ID NO: 2759542 - DNA, 25 bp, Homo sapien
tttgggttgttataacagaggccag

SEQ ID NO: 2759543 - DNA, 25 bp, Homo sapien
gggcctgtttttttgctatgccaca

SEQ ID NO: 2759544 - DNA, 25 bp, Homo sapien
taacagaggccagcagcactacatt

SEQ ID NO: 2759545 - DNA, 25 bp, Homo sapien
gcactacattcagagcagaccttga

SEQ ID NO: 2759546 - DNA, 25 bp, Homo sapien
ccacatggcactgatccacttgcat

SEQ ID NO: 2759547 - DNA, 25 bp, Homo sapien
tggtctcctcgtagaaaccagggga

SEQ ID NO: 2759548 - DNA, 25 bp, Homo sapien
caggggaatgggctagttcctttat

SEQ ID NO: 2759549 - DNA, 25 bp, Homo sapien
ttcagtgatccctgaacctcccatg

SEQ ID NO: 2759550 - DNA, 25 bp, Homo sapien
gccactgatcctcagcactttattg

SEQ ID NO: 2759551 - DNA, 25 bp, Homo sapien
taatggacagactgtacctcaccat

SEQ ID NO: 2759552 - DNA, 25 bp, Homo sapien
ttggactgcctaatggacagactgt

SEQ ID NO: 2759553 - DNA, 25 bp, Homo sapien
ctcagcactttattggactgcctaa

SEQ ID NO: 2759554 - DNA, 25 bp, Homo sapien
ggactgaggtcatcactctggtgct

SEQ ID NO: 2759555 - DNA, 25 bp, Homo sapien
ccatgagagcaaggagtaaaacgtg

SEQ ID NO: 2759556 - DNA, 25 bp, Homo sapien
agggctgctgtaacaccatgagagc

SEQ ID NO: 2759557 - DNA, 25 bp, Homo sapien
caaactagtgttgccaactggacac

SEQ ID NO: 2759558 - DNA, 25 bp, Homo sapien
tatgatactagctatggtcctgtaa

SEQ ID NO: 2759559 - DNA, 25 bp, Homo sapien
atgttgaataatggtggtgagaatg

SEQ ID NO: 2759560 - DNA, 25 bp, Homo sapien
cctttcattatgatactagctatgg

SEQ ID NO: 2759561 - DNA, 25 bp, Homo sapien
gctatggtcctgtaatataaggctt

SEQ ID NO: 2759562 - DNA, 25 bp, Homo sapien
cagtttggccacaaacttccattag

SEQ ID NO: 2759563 - DNA, 25 bp, Homo sapien
tccagccttatgtactctctccagg

SEQ ID NO: 2759564 - DNA, 25 bp, Homo sapien
cagtcctgaattagtcctcagcagg

SEQ ID NO: 2759565 - DNA, 25 bp, Homo sapien
ccaagagttggcaagttgtgcacat

SEQ ID NO: 2759566 - DNA, 25 bp, Homo sapien
cattgtgcagcgtgttgggatcata

SEQ ID NO: 2759567 - DNA, 25 bp, Homo sapien
caaggtctggcaagaaggtttgccc

SEQ ID NO: 2759568 - DNA, 25 bp, Homo sapien
ggtacatgacaatatgccaatgagg

SEQ ID NO: 2759569 - DNA, 25 bp, Homo sapien
gattcattagataggcactgggtac

SEQ ID NO: 2759570 - DNA, 25 bp, Homo sapien
tattgtgagccaacaaaactgatgc

SEQ ID NO: 2759571 - DNA, 25 bp, Homo sapien
gatgctgagacattcatattaacag

SEQ ID NO: 2759572 - DNA, 25 bp, Homo sapien
gccacatcctgtgaaattgcatgaa

SEQ ID NO: 2759573 - DNA, 25 bp, Homo sapien
gaaagcagtattgacacatttatcc

SEQ ID NO: 2759574 - DNA, 25 bp, Homo sapien
tacatagagtgctagagcagaagtt

SEQ ID NO: 2759575 - DNA, 25 bp, Homo sapien
caggatttgagctttggtccggtaa

SEQ ID NO: 2759576 - DNA, 25 bp, Homo sapien
gcaaagaaagccatagtgcctctct

SEQ ID NO: 2759577 - DNA, 25 bp, Homo sapien
gattcaggctttgatcatgattgga

SEQ ID NO: 2759578 - DNA, 25 bp, Homo sapien
taagtgttcagaccacataatattc

SEQ ID NO: 2759579 - DNA, 25 bp, Homo sapien
aatgttgtacaagtgggtggtacta

SEQ ID NO: 2759580 - DNA, 25 bp, Homo sapien
aagaaatttgattaacagaaataag

SEQ ID NO: 2759581 - DNA, 25 bp, Homo sapien
tataaacactgatgtatgcaataaa

SEQ ID NO: 2759582 - DNA, 25 bp, Homo sapien
tgtgtagaattgttacatagtgtat

SEQ ID NO: 2759583 - DNA, 25 bp, Homo sapien
caccgcacccgactctgtctttctt

SEQ ID NO: 2759584 - DNA, 25 bp, Homo sapien
tgtagaattgttacatagtgtatta

SEQ ID NO: 2759585 - DNA, 25 bp, Homo sapien
gtgtagaattgttacatagtgtatt

SEQ ID NO: 2759586 - DNA, 25 bp, Homo sapien
gactctgaagaactgaacttgaagg

SEQ ID NO: 2759587 - DNA, 25 bp, Homo sapien
gacttagggtaaaagcacttcacgc

SEQ ID NO: 2759588 - DNA, 25 bp, Homo sapien
catgtcaggctcaaatgaactaccc

SEQ ID NO: 2759589 - DNA, 25 bp, Homo sapien
tgtatgccggctggtctgaagaaga

SEQ ID NO: 2759590 - DNA, 25 bp, Homo sapien
ccaaaatggccgcaagctgtttcca

SEQ ID NO: 2759591 - DNA, 25 bp, Homo sapien
tacagctctgttagctctattagaa

SEQ ID NO: 2759592 - DNA, 25 bp, Homo sapien
caagcctttagtcggatcgggagca

SEQ ID NO: 2759593 - DNA, 25 bp, Homo sapien
tcagctcgattagaacgaacctggg

SEQ ID NO: 2759594 - DNA, 25 bp, Homo sapien
cagctcgtcctgtctctcactagta

SEQ ID NO: 2759595 - DNA, 25 bp, Homo sapien
tctttactatccgattcatcgggtg

SEQ ID NO: 2759596 - DNA, 25 bp, Homo sapien
tatccgattcatcgggtgtgagcta

SEQ ID NO: 2759597 - DNA, 25 bp, Homo sapien
gtcctgtctctcactagtattaaaa

SEQ ID NO: 2759598 - DNA, 25 bp, Homo sapien
ttttgatcagcatgacaaatactgg

SEQ ID NO: 2759599 - DNA, 25 bp, Homo sapien
gtgaatccagatcgtttcctggagc

SEQ ID NO: 2759600 - DNA, 25 bp, Homo sapien
tccagatcgtttcctggagccagga

SEQ ID NO: 2759601 - DNA, 25 bp, Homo sapien
atactggctgatacccagtgaatcc

SEQ ID NO: 2759602 - DNA, 25 bp, Homo sapien
tcaatccaagggttcctggtctcgt

SEQ ID NO: 2759603 - DNA, 25 bp, Homo sapien
ctgtggagaaatcccggatgggccc

SEQ ID NO: 2759604 - DNA, 25 bp, Homo sapien
aatgcatggacccaaagcgtgtgca

SEQ ID NO: 2759605 - DNA, 25 bp, Homo sapien
ccatggaccgcagcagcaagtgtta

SEQ ID NO: 2759606 - DNA, 25 bp, Homo sapien
ttctgcctcatgctcattaaaagca

SEQ ID NO: 2759607 - DNA, 25 bp, Homo sapien
aagtttttctgcctcatgctcatta

SEQ ID NO: 2759608 - DNA, 25 bp, Homo sapien
agtttttctgcctcatgctcattaa

SEQ ID NO: 2759609 - DNA, 25 bp, Homo sapien
gttatgttggcattcgtacttcctg

SEQ ID NO: 2759610 - DNA, 25 bp, Homo sapien
tatgttggcattcgtacttcctgtc

SEQ ID NO: 2759611 - DNA, 25 bp, Homo sapien
gttggcattcgtacttcctgtcatc

SEQ ID NO: 2759612 - DNA, 25 bp, Homo sapien
tgttggcattcgtacttcctgtcat

SEQ ID NO: 2759613 - DNA, 25 bp, Homo sapien
ggactgtaggcgtgccccactgtgc

SEQ ID NO: 2759614 - DNA, 25 bp, Homo sapien
cagaactcttgggattacggatttt

SEQ ID NO: 2759615 - DNA, 25 bp, Homo sapien
tcggcattgagcactacagctcaga

SEQ ID NO: 2759616 - DNA, 25 bp, Homo sapien
aaaataccaaatcggcattgagcac

SEQ ID NO: 2759617 - DNA, 25 bp, Homo sapien
ggtgaaagtcgacaaacagctgcct

SEQ ID NO: 2759618 - DNA, 25 bp, Homo sapien
gactgttacatcatgtcagcctcca

SEQ ID NO: 2759619 - DNA, 25 bp, Homo sapien
gaaatcctctactctgtgtcaggga

SEQ ID NO: 2759620 - DNA, 25 bp, Homo sapien
tgcagccttgccttgcggtcctttc

SEQ ID NO: 2759621 - DNA, 25 bp, Homo sapien
tgttagagtggaaagcccgtagtga

SEQ ID NO: 2759622 - DNA, 25 bp, Homo sapien
cacttgcagattttccaggaaatcc

SEQ ID NO: 2759623 - DNA, 25 bp, Homo sapien
gcctaagtaacatgttagagtggaa

SEQ ID NO: 2759624 - DNA, 25 bp, Homo sapien
cacagccacgaatgttgcctaagta

SEQ ID NO: 2759625 - DNA, 25 bp, Homo sapien
agtgtgagaacaaaaccgactttcg

SEQ ID NO: 2759626 - DNA, 25 bp, Homo sapien
gaagtgccctgcttgattgatgaaa

SEQ ID NO: 2759627 - DNA, 25 bp, Homo sapien
gagacattacgctatcagccgcgag

SEQ ID NO: 2759628 - DNA, 25 bp, Homo sapien
tgaaagccaatgtgtgcagatagcc

SEQ ID NO: 2759629 - DNA, 25 bp, Homo sapien
aggtctgaacacagtttaagcagcc

SEQ ID NO: 2759630 - DNA, 25 bp, Homo sapien
gaacacagtttaagcagccagaaaa

SEQ ID NO: 2759631 - DNA, 25 bp, Homo sapien
tgaacacagtttaagcagccagaaa

SEQ ID NO: 2759632 - DNA, 25 bp, Homo sapien
gtctgaacacagtttaagcagccag

SEQ ID NO: 2759633 - DNA, 25 bp, Homo sapien
aaggatctgaacaggtcgtttgctc

SEQ ID NO: 2759634 - DNA, 25 bp, Homo sapien
tgctccagtctcctaggtaatagtg

SEQ ID NO: 2759635 - DNA, 25 bp, Homo sapien
gacttgtaactattcaataagatct

SEQ ID NO: 2759636 - DNA, 25 bp, Homo sapien
tgaaaactcctatagacttgtaact

SEQ ID NO: 2759637 - DNA, 25 bp, Homo sapien
tgtctcccttaatgtactcagtatg

SEQ ID NO: 2759638 - DNA, 25 bp, Homo sapien
cctcatagcatcgtctttcccagct

SEQ ID NO: 2759639 - DNA, 25 bp, Homo sapien
gctcatgtctcccttaatgtactca

SEQ ID NO: 2759640 - DNA, 25 bp, Homo sapien
gctgctcatgtctcccttaatgtac

SEQ ID NO: 2759641 - DNA, 25 bp, Homo sapien
accagcatgcaacacttgatctctt

SEQ ID NO: 2759642 - DNA, 25 bp, Homo sapien
tacactcagccaaaatactcttgag

SEQ ID NO: 2759643 - DNA, 25 bp, Homo sapien
cactcccaccagcatgcaacacttg

SEQ ID NO: 2759644 - DNA, 25 bp, Homo sapien
ttccttcatatctgccacactccca

SEQ ID NO: 2759645 - DNA, 25 bp, Homo sapien
aaagtcagaatcttctaattcacac

SEQ ID NO: 2759646 - DNA, 25 bp, Homo sapien
ttttgccaacagcccactcatcata

SEQ ID NO: 2759647 - DNA, 25 bp, Homo sapien
atcataccatgtccctccagctaag

SEQ ID NO: 2759648 - DNA, 25 bp, Homo sapien
ccctccagctaagtggagtattaaa

SEQ ID NO: 2759649 - DNA, 25 bp, Homo sapien
tttgacatacaaatctcttgggctt

SEQ ID NO: 2759650 - DNA, 25 bp, Homo sapien
tcttcagtttgacatacaaatctct

SEQ ID NO: 2759651 - DNA, 25 bp, Homo sapien
agtttgacatacaaatctcttgggc

SEQ ID NO: 2759652 - DNA, 25 bp, Homo sapien
tcagtttgacatacaaatctcttgg

SEQ ID NO: 2759653 - DNA, 25 bp, Homo sapien
acccaaagagtgaaataacaaagct

SEQ ID NO: 2759654 - DNA, 25 bp, Homo sapien
gacccaaagagtgaaataacaaagc

SEQ ID NO: 2759655 - DNA, 25 bp, Homo sapien
tggtgaatgtttcacaggattctct

SEQ ID NO: 2759656 - DNA, 25 bp, Homo sapien
ctcttctaatggtgaatgtttcaca

SEQ ID NO: 2759657 - DNA, 25 bp, Homo sapien
ttctctcctagcatatctctcttaa

SEQ ID NO: 2759658 - DNA, 25 bp, Homo sapien
tcctagcatatctctcttaaaacat

SEQ ID NO: 2759659 - DNA, 25 bp, Homo sapien
taatctgcaaccatcgtttaatgcg

SEQ ID NO: 2759660 - DNA, 25 bp, Homo sapien
tctgtcagtcttaaagtattggtgt

SEQ ID NO: 2759661 - DNA, 25 bp, Homo sapien
cattctggaaagaaacggcttgtga

SEQ ID NO: 2759662 - DNA, 25 bp, Homo sapien
ccacatatcgtctatcagggttgct

SEQ ID NO: 2759663 - DNA, 25 bp, Homo sapien
tgccgcgaattataactgatagaat

SEQ ID NO: 2759664 - DNA, 25 bp, Homo sapien
tgatgcaggtcataatgccgcgaat

SEQ ID NO: 2759665 - DNA, 25 bp, Homo sapien
tagctgtatcccaacctgatgcagg

SEQ ID NO: 2759666 - DNA, 25 bp, Homo sapien
cagataacgtatcttagatgacgcg

SEQ ID NO: 2759667 - DNA, 25 bp, Homo sapien
ctccattattgcagattttcctctg

SEQ ID NO: 2759668 - DNA, 25 bp, Homo sapien
tttttctccattattgcagattttc

SEQ ID NO: 2759669 - DNA, 25 bp, Homo sapien
caaagtatctatatttgatgttctc

SEQ ID NO: 2759670 - DNA, 25 bp, Homo sapien
taccattcgacgtattttgagaaaa

SEQ ID NO: 2759671 - DNA, 25 bp, Homo sapien
cggaggaaattaccattcgacgtat

SEQ ID NO: 2759672 - DNA, 25 bp, Homo sapien
ctctttccaaatatctcggaggaaa

SEQ ID NO: 2759673 - DNA, 25 bp, Homo sapien
ggaattaatagtccaatctggttaa

SEQ ID NO: 2759674 - DNA, 25 bp, Homo sapien
gtccaatctggttaattacttctat

SEQ ID NO: 2759675 - DNA, 25 bp, Homo sapien
actgaacaggaattaatagtccaat

SEQ ID NO: 2759676 - DNA, 25 bp, Homo sapien
taatagtccaatctggttaattact

SEQ ID NO: 2759677 - DNA, 25 bp, Homo sapien
tcactttcatgaccatactgagctt

SEQ ID NO: 2759678 - DNA, 25 bp, Homo sapien
cactttcatgaccatactgagcttc

SEQ ID NO: 2759679 - DNA, 25 bp, Homo sapien
cacggtatgaaagtggtgcatctca

SEQ ID NO: 2759680 - DNA, 25 bp, Homo sapien
cattcctagaatttccacggtatga

SEQ ID NO: 2759681 - DNA, 25 bp, Homo sapien
gggaatctctctgatactgtatacc

SEQ ID NO: 2759682 - DNA, 25 bp, Homo sapien
tgcaactgtttctacaggactcatt

SEQ ID NO: 2759683 - DNA, 25 bp, Homo sapien
ggtagtctcagtgggttcgccagca

SEQ ID NO: 2759684 - DNA, 25 bp, Homo sapien
ctctgagcgggtagtctcagtgggt

SEQ ID NO: 2759685 - DNA, 25 bp, Homo sapien
ggttcgccagcaatccacgaagttc

SEQ ID NO: 2759686 - DNA, 25 bp, Homo sapien
gccagcaatccacgaagttcatcca

SEQ ID NO: 2759687 - DNA, 25 bp, Homo sapien
aaatggttgttaccccatgtattat

SEQ ID NO: 2759688 - DNA, 25 bp, Homo sapien
aggctcattgcattgagggaaatgt

SEQ ID NO: 2759689 - DNA, 25 bp, Homo sapien
tgtattataaatcaggctcattgca

SEQ ID NO: 2759690 - DNA, 25 bp, Homo sapien
gaaatgtccagatcgtgaaaatcat

SEQ ID NO: 2759691 - DNA, 25 bp, Homo sapien
gagggctcttcctgcgaacctgagc

SEQ ID NO: 2759692 - DNA, 25 bp, Homo sapien
tcttctgcaaatgtctgtcctgaaa

SEQ ID NO: 2759693 - DNA, 25 bp, Homo sapien
gggctccaggttctttgacatgcag

SEQ ID NO: 2759694 - DNA, 25 bp, Homo sapien
tgttcttttatcctgcacccctggg

SEQ ID NO: 2759695 - DNA, 25 bp, Homo sapien
tgtcctgaaaaggaattatgttctt

SEQ ID NO: 2759696 - DNA, 25 bp, Homo sapien
ggaattctttgtagacttgttgaaa

SEQ ID NO: 2759697 - DNA, 25 bp, Homo sapien
agcctgaggatcttcagagagtaaa

SEQ ID NO: 2759698 - DNA, 25 bp, Homo sapien
aatcaaatgttcgtggagggcccct

SEQ ID NO: 2759699 - DNA, 25 bp, Homo sapien
gaggatcttcagagagtaaacgccc

SEQ ID NO: 2759700 - DNA, 25 bp, Homo sapien
tcagatttggaagtgcaatgagtct

SEQ ID NO: 2759701 - DNA, 25 bp, Homo sapien
gatttggaagtgcaatgagtcttta

SEQ ID NO: 2759702 - DNA, 25 bp, Homo sapien
tgtctcatgcaacatgtttaagagt

SEQ ID NO: 2759703 - DNA, 25 bp, Homo sapien
caacatgtttaagagtacaatattg

SEQ ID NO: 2759704 - DNA, 25 bp, Homo sapien
tcaaaagactttgcagcctttgtaa

SEQ ID NO: 2759705 - DNA, 25 bp, Homo sapien
caaaagactttgcagcctttgtaaa

SEQ ID NO: 2759706 - DNA, 25 bp, Homo sapien
aagactttgcagcctttgtaaactc

SEQ ID NO: 2759707 - DNA, 25 bp, Homo sapien
aaagactttgcagcctttgtaaact

SEQ ID NO: 2759708 - DNA, 25 bp, Homo sapien
cttggtaactccgatggtgagtgag

SEQ ID NO: 2759709 - DNA, 25 bp, Homo sapien
tggtaactccgatggtgagtgagac

SEQ ID NO: 2759710 - DNA, 25 bp, Homo sapien
tccttggtaactccgatggtgagtg

SEQ ID NO: 2759711 - DNA, 25 bp, Homo sapien
agctccttggtaactccgatggtga

SEQ ID NO: 2759712 - DNA, 25 bp, Homo sapien
gagaatactatattgaaaactcctt

SEQ ID NO: 2759713 - DNA, 25 bp, Homo sapien
tatcaaatccttgactactgagaat

SEQ ID NO: 2759714 - DNA, 25 bp, Homo sapien
ccacagagccaaaactctgaatatc

SEQ ID NO: 2759715 - DNA, 25 bp, Homo sapien
gccaaaactctgaatatcaaatcct

SEQ ID NO: 2759716 - DNA, 25 bp, Homo sapien
gactttcggaaacatatctgaggat

SEQ ID NO: 2759717 - DNA, 25 bp, Homo sapien
taatatgatagcacagggcaattgc

SEQ ID NO: 2759718 - DNA, 25 bp, Homo sapien
tggaccctgaacacagagactttcg

SEQ ID NO: 2759719 - DNA, 25 bp, Homo sapien
tgcacatgggtagaaacagacagaa

SEQ ID NO: 2759720 - DNA, 25 bp, Homo sapien
gaggatagtctttcagactacattg

SEQ ID NO: 2759721 - DNA, 25 bp, Homo sapien
agactgaagtacaaaccagccagca

SEQ ID NO: 2759722 - DNA, 25 bp, Homo sapien
gactacattgttattgtgtgaggta

SEQ ID NO: 2759723 - DNA, 25 bp, Homo sapien
taattactgctcgtgttgaaaataa

SEQ ID NO: 2759724 - DNA, 25 bp, Homo sapien
cttgtttctacaggagctgtgtcca

SEQ ID NO: 2759725 - DNA, 25 bp, Homo sapien
tcattgctgaggttgtatatccact

SEQ ID NO: 2759726 - DNA, 25 bp, Homo sapien
ttccacaaggttgcaagaactgacc

SEQ ID NO: 2759727 - DNA, 25 bp, Homo sapien
taacccagtttcgatcatgaaaagg

SEQ ID NO: 2759728 - DNA, 25 bp, Homo sapien
gattgtgtcgttgctgaatccagcg

SEQ ID NO: 2759729 - DNA, 25 bp, Homo sapien
gaatccagcgagctgatagacccag

SEQ ID NO: 2759730 - DNA, 25 bp, Homo sapien
tcataggtgaccacgttctcccgta

SEQ ID NO: 2759731 - DNA, 25 bp, Homo sapien
gatcaagggctcttttttgctgcgc

SEQ ID NO: 2759732 - DNA, 25 bp, Homo sapien
tcagggtgataaaaagtaccacaat

SEQ ID NO: 2759733 - DNA, 25 bp, Homo sapien
cagggtgataaaaagtaccacaatt

SEQ ID NO: 2759734 - DNA, 25 bp, Homo sapien
ctcagggtgataaaaagtaccacaa

SEQ ID NO: 2759735 - DNA, 25 bp, Homo sapien
agggtgataaaaagtaccacaattg

SEQ ID NO: 2759736 - DNA, 25 bp, Homo sapien
tataatatttgagatacacacaggc

SEQ ID NO: 2759737 - DNA, 25 bp, Homo sapien
ggttgtgaatcaaacaccaggttat

SEQ ID NO: 2759738 - DNA, 25 bp, Homo sapien
cataaggtattaagtgtgtcccata

SEQ ID NO: 2759739 - DNA, 25 bp, Homo sapien
tatactgcattgtgtctggcaacct

SEQ ID NO: 2759740 - DNA, 25 bp, Homo sapien
caccacgtgttcacaccaactccat

SEQ ID NO: 2759741 - DNA, 25 bp, Homo sapien
agttcaccacgtgttcacaccaact

SEQ ID NO: 2759742 - DNA, 25 bp, Homo sapien
gttcaccacgtgttcacaccaactc

SEQ ID NO: 2759743 - DNA, 25 bp, Homo sapien
ttcaccacgtgttcacaccaactcc

SEQ ID NO: 2759744 - DNA, 25 bp, Homo sapien
cagagaagaatagcgattaaggctc

SEQ ID NO: 2759745 - DNA, 25 bp, Homo sapien
tctcgcatgcacaaaccctgatggt

SEQ ID NO: 2759746 - DNA, 25 bp, Homo sapien
cttctgcatggcaggtccgcacacg

SEQ ID NO: 2759747 - DNA, 25 bp, Homo sapien
tgtactcaaaccagccgaggacagg

SEQ ID NO: 2759748 - DNA, 25 bp, Homo sapien
gagagaggggattccaccatcagag

SEQ ID NO: 2759749 - DNA, 25 bp, Homo sapien
gagaggggattccaccatcagagat

SEQ ID NO: 2759750 - DNA, 25 bp, Homo sapien
gaggggattccaccatcagagatca

SEQ ID NO: 2759751 - DNA, 25 bp, Homo sapien
ctgagagaggggattccaccatcag

SEQ ID NO: 2759752 - DNA, 25 bp, Homo sapien
gttcgactaaatctcctccgccttg

SEQ ID NO: 2759753 - DNA, 25 bp, Homo sapien
gaacagttcgactaaatctcctccg

SEQ ID NO: 2759754 - DNA, 25 bp, Homo sapien
acacatcctgaacagttcgactaaa

SEQ ID NO: 2759755 - DNA, 25 bp, Homo sapien
gactaaatctcctccgccttgtcag

SEQ ID NO: 2759756 - DNA, 25 bp, Homo sapien
ctttcattaacagttcgtactgtga

SEQ ID NO: 2759757 - DNA, 25 bp, Homo sapien
gctactaagctggcctttcctttcc

SEQ ID NO: 2759758 - DNA, 25 bp, Homo sapien
gcagtctgtacactcaaactttcat

SEQ ID NO: 2759759 - DNA, 25 bp, Homo sapien
acagttcgtactgtgagaacataat

SEQ ID NO: 2759760 - DNA, 25 bp, Homo sapien
gtgaagtttggatttacaggcaggc

SEQ ID NO: 2759761 - DNA, 25 bp, Homo sapien
ggatttacaggcaggcgttcatcaa

SEQ ID NO: 2759762 - DNA, 25 bp, Homo sapien
accttggtccattggcaaaatcatc

SEQ ID NO: 2759763 - DNA, 25 bp, Homo sapien
cagtggcactgatggtatgaataac

SEQ ID NO: 2759764 - DNA, 25 bp, Homo sapien
gacatccagaactctaatacccact

SEQ ID NO: 2759765 - DNA, 25 bp, Homo sapien
caataatatcatattccctggcaag

SEQ ID NO: 2759766 - DNA, 25 bp, Homo sapien
tattccctggcaagttcgggtggat

SEQ ID NO: 2759767 - DNA, 25 bp, Homo sapien
actgtgacatggctcagcaaatcag

SEQ ID NO: 2759768 - DNA, 25 bp, Homo sapien
ttttcatgcattccacacttgggca

SEQ ID NO: 2759769 - DNA, 25 bp, Homo sapien
gaagcaactgctgatggtaatgcaa

SEQ ID NO: 2759770 - DNA, 25 bp, Homo sapien
tttgtttgacaatcccacacctggc

SEQ ID NO: 2759771 - DNA, 25 bp, Homo sapien
cctggcaacacatgcggaagacgtg

SEQ ID NO: 2759772 - DNA, 25 bp, Homo sapien
cacctggctatttacccaagacaag

SEQ ID NO: 2759773 - DNA, 25 bp, Homo sapien
tactgtgatacataaagtagtttac

SEQ ID NO: 2759774 - DNA, 25 bp, Homo sapien
ttactgtgatacataaagtagttta

SEQ ID NO: 2759775 - DNA, 25 bp, Homo sapien
caatgttgaaaaatctgtcgtcttc

SEQ ID NO: 2759776 - DNA, 25 bp, Homo sapien
tctctgtcgagaacctttgtagtcc

SEQ ID NO: 2759777 - DNA, 25 bp, Homo sapien
caatttctgaagcagtgactgtgat

SEQ ID NO: 2759778 - DNA, 25 bp, Homo sapien
aatggtcccagtattggcatcaatg

SEQ ID NO: 2759779 - DNA, 25 bp, Homo sapien
ttttcgtagacttccatgaggtagg

SEQ ID NO: 2759780 - DNA, 25 bp, Homo sapien
caacgacggtcccaatcttggcatt

SEQ ID NO: 2759781 - DNA, 25 bp, Homo sapien
ttagtactgtcaggatcttgtgcca

SEQ ID NO: 2759782 - DNA, 25 bp, Homo sapien
gacccaagtgagaaaagcgaaaatc

SEQ ID NO: 2759783 - DNA, 25 bp, Homo sapien
gtcctgctggcggatttatagagca

SEQ ID NO: 2759784 - DNA, 25 bp, Homo sapien
atgatacagacaggaacgttgcaga

SEQ ID NO: 2759785 - DNA, 25 bp, Homo sapien
caattttctgatgaaggaatgatac

SEQ ID NO: 2759786 - DNA, 25 bp, Homo sapien
gattagctgttctgcccagctggct

SEQ ID NO: 2759787 - DNA, 25 bp, Homo sapien
taggtcatgtcagcatttgagccag

SEQ ID NO: 2759788 - DNA, 25 bp, Homo sapien
gattgagaatattcccatgccatca

SEQ ID NO: 2759789 - DNA, 25 bp, Homo sapien
agctgaaccaacttgagctgactca

SEQ ID NO: 2759790 - DNA, 25 bp, Homo sapien
caccatttatgatggagtaggtcat

SEQ ID NO: 2759791 - DNA, 25 bp, Homo sapien
tcctaagctactgagtttgtaactc

SEQ ID NO: 2759792 - DNA, 25 bp, Homo sapien
tagttgggcatgcattatccagtct

SEQ ID NO: 2759793 - DNA, 25 bp, Homo sapien
catttatctgacttgtatcctaagc

SEQ ID NO: 2759794 - DNA, 25 bp, Homo sapien
ccagtctctatgctcctttttcaca

SEQ ID NO: 2759795 - DNA, 25 bp, Homo sapien
tcaaatcatggaaaacaaatacgta

SEQ ID NO: 2759796 - DNA, 25 bp, Homo sapien
caaatcatggaaaacaaatacgtac

SEQ ID NO: 2759797 - DNA, 25 bp, Homo sapien
ctgttgtagatcctgaaagccctcc

SEQ ID NO: 2759798 - DNA, 25 bp, Homo sapien
gatgttgactgttgtagatcctgaa

SEQ ID NO: 2759799 - DNA, 25 bp, Homo sapien
tcattgacatcggttaaggtgatgt

SEQ ID NO: 2759800 - DNA, 25 bp, Homo sapien
gaaagccctccaacttgcccagcca

SEQ ID NO: 2759801 - DNA, 25 bp, Homo sapien
gaatgactacggagtaatgttctct

SEQ ID NO: 2759802 - DNA, 25 bp, Homo sapien
ggcttgaatgactacggagtaatgt

SEQ ID NO: 2759803 - DNA, 25 bp, Homo sapien
gactacggagtaatgttctctggct

SEQ ID NO: 2759804 - DNA, 25 bp, Homo sapien
cttgaatgactacggagtaatgttc

SEQ ID NO: 2759805 - DNA, 25 bp, Homo sapien
ttatgtaaggccgttctaataactc

SEQ ID NO: 2759806 - DNA, 25 bp, Homo sapien
tgacatattgtaaaaaccactaggt

SEQ ID NO: 2759807 - DNA, 25 bp, Homo sapien
tgagtctgactctagaaaaagtgtc

SEQ ID NO: 2759808 - DNA, 25 bp, Homo sapien
aagttgcacttttggtgcaaacaag

SEQ ID NO: 2759809 - DNA, 25 bp, Homo sapien
cgtttggacagcttagaaatgtaga

SEQ ID NO: 2759810 - DNA, 25 bp, Homo sapien
tgcatagtaatatttgagtttctgt

SEQ ID NO: 2759811 - DNA, 25 bp, Homo sapien
gtaatatttgagtttctgtgaacat

SEQ ID NO: 2759812 - DNA, 25 bp, Homo sapien
tagtaatatttgagtttctgtgaac

SEQ ID NO: 2759813 - DNA, 25 bp, Homo sapien
catagtaatatttgagtttctgtga

SEQ ID NO: 2759814 - DNA, 25 bp, Homo sapien
cccagcctcttgtcaatcttaaaga

SEQ ID NO: 2759815 - DNA, 25 bp, Homo sapien
ccagcctcttgtcaatcttaaagaa

SEQ ID NO: 2759816 - DNA, 25 bp, Homo sapien
cagcctcttgtcaatcttaaagaag

SEQ ID NO: 2759817 - DNA, 25 bp, Homo sapien
gaatgctgtaaaccacccgagcgct

SEQ ID NO: 2759818 - DNA, 25 bp, Homo sapien
accacccgagcgctgtttccatagg

SEQ ID NO: 2759819 - DNA, 25 bp, Homo sapien
agcgctgtttccataggtagggtca

SEQ ID NO: 2759820 - DNA, 25 bp, Homo sapien
cgacggagaagtagggttgtccttg

SEQ ID NO: 2759821 - DNA, 25 bp, Homo sapien
taaagtcagcacagctggtgtctct

SEQ ID NO: 2759822 - DNA, 25 bp, Homo sapien
tcagcgctccaacaagaagcacaat

SEQ ID NO: 2759823 - DNA, 25 bp, Homo sapien
ggtgtctcttcttgttgctctgcag

SEQ ID NO: 2759824 - DNA, 25 bp, Homo sapien
ttgttgctctgcagcaagaaacaca

SEQ ID NO: 2759825 - DNA, 25 bp, Homo sapien
tccagagggaacgagtttggcaact

SEQ ID NO: 2759826 - DNA, 25 bp, Homo sapien
tcaataagcccgacagtattctggg

SEQ ID NO: 2759827 - DNA, 25 bp, Homo sapien
tctgggcctctcttaggctcctgca

SEQ ID NO: 2759828 - DNA, 25 bp, Homo sapien
caggctggttcctgtgttctgctgg

SEQ ID NO: 2759829 - DNA, 25 bp, Homo sapien
tcacccgtggtatcgtcaatgataa

SEQ ID NO: 2759830 - DNA, 25 bp, Homo sapien
tgaactcggattcaggctcaagagg

SEQ ID NO: 2759831 - DNA, 25 bp, Homo sapien
tgataaatatagtcccagcaccctc

SEQ ID NO: 2759832 - DNA, 25 bp, Homo sapien
tttgttgagtggatatcacccgtgg

SEQ ID NO: 2759833 - DNA, 25 bp, Homo sapien
ctgtgaaatacacatggaataattt

SEQ ID NO: 2759834 - DNA, 25 bp, Homo sapien
gtgaaatacacatggaataatttag

SEQ ID NO: 2759835 - DNA, 25 bp, Homo sapien
gaaatacacatggaataatttagca

SEQ ID NO: 2759836 - DNA, 25 bp, Homo sapien
aaatacacatggaataatttagcat

SEQ ID NO: 2759837 - DNA, 25 bp, Homo sapien
taaaaatatagcacatgaggctggg

SEQ ID NO: 2759838 - DNA, 25 bp, Homo sapien
aaagcatattagtgtcctggaacga

SEQ ID NO: 2759839 - DNA, 25 bp, Homo sapien
gccagggagaccacaaaaatattga

SEQ ID NO: 2759840 - DNA, 25 bp, Homo sapien
tattggccttatgaacttagagaac

SEQ ID NO: 2759841 - DNA, 25 bp, Homo sapien
tcgctctgggaattcaacgaatggg

SEQ ID NO: 2759842 - DNA, 25 bp, Homo sapien
gaagctgtgggttgaggcaaactaa

SEQ ID NO: 2759843 - DNA, 25 bp, Homo sapien
tgacctattgagtcctcgctctggg

SEQ ID NO: 2759844 - DNA, 25 bp, Homo sapien
caacccagggttgagcccatataac

SEQ ID NO: 2759845 - DNA, 25 bp, Homo sapien
taatgtcctgtaccaaagttgcaca

SEQ ID NO: 2759846 - DNA, 25 bp, Homo sapien
cgatgagactttgggtacgactagc

SEQ ID NO: 2759847 - DNA, 25 bp, Homo sapien
taacaagtggctcatatttgaaccc

SEQ ID NO: 2759848 - DNA, 25 bp, Homo sapien
catcccagtgggtaaaatttggtca

SEQ ID NO: 2759849 - DNA, 25 bp, Homo sapien
tgccacaggtgatcaaataaggcct

SEQ ID NO: 2759850 - DNA, 25 bp, Homo sapien
aataatgccacaggtgatcaaataa

SEQ ID NO: 2759851 - DNA, 25 bp, Homo sapien
aaggagcctatacttcttagcaaag

SEQ ID NO: 2759852 - DNA, 25 bp, Homo sapien
aagaaaggagcctatacttcttagc

SEQ ID NO: 2759853 - DNA, 25 bp, Homo sapien
aagtagctctttctgcaacttgaaa

SEQ ID NO: 2759854 - DNA, 25 bp, Homo sapien
catgatctggcaaagtagctctttc

SEQ ID NO: 2759855 - DNA, 25 bp, Homo sapien
tttagttaacactatctttccgata

SEQ ID NO: 2759856 - DNA, 25 bp, Homo sapien
aacactatctttccgatattgggca

SEQ ID NO: 2759857 - DNA, 25 bp, Homo sapien
gacaagaagtctattataatgagca

SEQ ID NO: 2759858 - DNA, 25 bp, Homo sapien
tcaagcttagctcctcactcagtaa

SEQ ID NO: 2759859 - DNA, 25 bp, Homo sapien
gactgtagcttaactgaaccctgat

SEQ ID NO: 2759860 - DNA, 25 bp, Homo sapien
cagacagtgggctagctttgacaca

SEQ ID NO: 2759861 - DNA, 25 bp, Homo sapien
attattatatacagtcgtgcttcat

SEQ ID NO: 2759862 - DNA, 25 bp, Homo sapien
tacagtcgtgcttcatttaaggatg

SEQ ID NO: 2759863 - DNA, 25 bp, Homo sapien
tgagaagtgcatcgttaagcaattc

SEQ ID NO: 2759864 - DNA, 25 bp, Homo sapien
tacacaaaccgagatgcaatagcca

SEQ ID NO: 2759865 - DNA, 25 bp, Homo sapien
ttatacctgtgcatttgtccatcca

SEQ ID NO: 2759866 - DNA, 25 bp, Homo sapien
gaaccgccacaaacctgaacagcat

SEQ ID NO: 2759867 - DNA, 25 bp, Homo sapien
caacagtttcacagaaccgccacaa

SEQ ID NO: 2759868 - DNA, 25 bp, Homo sapien
gtccatccatactacagacaacaga

SEQ ID NO: 2759869 - DNA, 25 bp, Homo sapien
tcaaggatggaaaggatacagaaaa

SEQ ID NO: 2759870 - DNA, 25 bp, Homo sapien
atggaaaggatacagaaaaaggatt

SEQ ID NO: 2759871 - DNA, 25 bp, Homo sapien
ggatggaaaggatacagaaaaagga

SEQ ID NO: 2759872 - DNA, 25 bp, Homo sapien
aaggatggaaaggatacagaaaaag

SEQ ID NO: 2759873 - DNA, 25 bp, Homo sapien
tactgcctacacattagggaagcgc

SEQ ID NO: 2759874 - DNA, 25 bp, Homo sapien
tgagcctgcagtcacggatattcta

SEQ ID NO: 2759875 - DNA, 25 bp, Homo sapien
gcagctgtaacccagtccctgttgg

SEQ ID NO: 2759876 - DNA, 25 bp, Homo sapien
gcgccacggcttagatggaatacta

SEQ ID NO: 2759877 - DNA, 25 bp, Homo sapien
ggaacttgacctgaaataactgatc

SEQ ID NO: 2759878 - DNA, 25 bp, Homo sapien
cagccattaagttttcgtgtctgca

SEQ ID NO: 2759879 - DNA, 25 bp, Homo sapien
aaaatattcatatgattttaaaggc

SEQ ID NO: 2759880 - DNA, 25 bp, Homo sapien
agcctgtatatccagtgcatactta

SEQ ID NO: 2759881 - DNA, 25 bp, Homo sapien
tcagtgtgcgaataagtgacatgtg

SEQ ID NO: 2759882 - DNA, 25 bp, Homo sapien
tgcagtcttgtacatatgggccaat

SEQ ID NO: 2759883 - DNA, 25 bp, Homo sapien
tagtagtttctatagcgtaattcac

SEQ ID NO: 2759884 - DNA, 25 bp, Homo sapien
tgcaggagcaatatgtgaaaatagc

SEQ ID NO: 2759885 - DNA, 25 bp, Homo sapien
ctttccaacatactgaggatctggt

SEQ ID NO: 2759886 - DNA, 25 bp, Homo sapien
tgattccatacccatccccttttgg

SEQ ID NO: 2759887 - DNA, 25 bp, Homo sapien
cccttttgggacgatgatggacttc

SEQ ID NO: 2759888 - DNA, 25 bp, Homo sapien
gatctggtcccatatgttcttctaa

SEQ ID NO: 2759889 - DNA, 25 bp, Homo sapien
ctgtggtgagcagttccataacacc

SEQ ID NO: 2759890 - DNA, 25 bp, Homo sapien
tgtggtgagcagttccataacacct

SEQ ID NO: 2759891 - DNA, 25 bp, Homo sapien
tggacagatgcaagatgtgctagta

SEQ ID NO: 2759892 - DNA, 25 bp, Homo sapien
gactggacagatgcaagatgtgcta

SEQ ID NO: 2759893 - DNA, 25 bp, Homo sapien
aggactggacagatgcaagatgtgc

SEQ ID NO: 2759894 - DNA, 25 bp, Homo sapien
actggacagatgcaagatgtgctag

SEQ ID NO: 2759895 - DNA, 25 bp, Homo sapien
tttaactgtccatcagggaaaggtc

SEQ ID NO: 2759896 - DNA, 25 bp, Homo sapien
gagaagccagagcatctttaggaag

SEQ ID NO: 2759897 - DNA, 25 bp, Homo sapien
caaagccgtagttgtctgattccaa

SEQ ID NO: 2759898 - DNA, 25 bp, Homo sapien
tgaaccacttggaaaatcaaagccg

SEQ ID NO: 2759899 - DNA, 25 bp, Homo sapien
tccttgcaaactaggataaactcta

SEQ ID NO: 2759900 - DNA, 25 bp, Homo sapien
caacttccatatagtgaagtttctt

SEQ ID NO: 2759901 - DNA, 25 bp, Homo sapien
tatatgaccgataaattgtattttg

SEQ ID NO: 2759902 - DNA, 25 bp, Homo sapien
taaactctaggaacaacttccatat

SEQ ID NO: 2759903 - DNA, 25 bp, Homo sapien
cccgaactttatttcttatctctct

SEQ ID NO: 2759904 - DNA, 25 bp, Homo sapien
tatctctctttcatcttgttcccct

SEQ ID NO: 2759905 - DNA, 25 bp, Homo sapien
tttcatcttgttcccctgctcttct

SEQ ID NO: 2759906 - DNA, 25 bp, Homo sapien
tctttcatcttgttcccctgctctt

SEQ ID NO: 2759907 - DNA, 25 bp, Homo sapien
ttattagcaagtgaaggtctcagtg

SEQ ID NO: 2759908 - DNA, 25 bp, Homo sapien
attaagtgttcccattgaggaccta

SEQ ID NO: 2759909 - DNA, 25 bp, Homo sapien
cctagattattagcaagtgaaggtc

SEQ ID NO: 2759910 - DNA, 25 bp, Homo sapien
cccattgaggacctagattattagc

SEQ ID NO: 2759911 - DNA, 25 bp, Homo sapien
gtgggccaccagtttgtggccttca

SEQ ID NO: 2759912 - DNA, 25 bp, Homo sapien
ctctgggccagatatttacccatgt

SEQ ID NO: 2759913 - DNA, 25 bp, Homo sapien
catgtgggccaccagtttgtggcct

SEQ ID NO: 2759914 - DNA, 25 bp, Homo sapien
tctgggccagatatttacccatgtg

SEQ ID NO: 2759915 - DNA, 25 bp, Homo sapien
tagatctgtaactggctccctgttt

SEQ ID NO: 2759916 - DNA, 25 bp, Homo sapien
agatctgtaactggctccctgtttc

SEQ ID NO: 2759917 - DNA, 25 bp, Homo sapien
ggcacagctgctcgccgtcctcgga

SEQ ID NO: 2759918 - DNA, 25 bp, Homo sapien
cttggcggacttgccctaactggtg

SEQ ID NO: 2759919 - DNA, 25 bp, Homo sapien
tgctcgccgtcctcggaaagcccag

SEQ ID NO: 2759920 - DNA, 25 bp, Homo sapien
acagctgctcgccgtcctcggaaag

SEQ ID NO: 2759921 - DNA, 25 bp, Homo sapien
aattataagaaggttgtgcagatat

SEQ ID NO: 2759922 - DNA, 25 bp, Homo sapien
gatgaggctgaactaatataaccat

SEQ ID NO: 2759923 - DNA, 25 bp, Homo sapien
ttataagaaggttgtgcagatatta

SEQ ID NO: 2759924 - DNA, 25 bp, Homo sapien
aatgatgaggctgaactaatataac

SEQ ID NO: 2759925 - DNA, 25 bp, Homo sapien
aaaattgttgtgtgcctcgaaacgc

SEQ ID NO: 2759926 - DNA, 25 bp, Homo sapien
gagaggttgtgtcaacagttcccaa

SEQ ID NO: 2759927 - DNA, 25 bp, Homo sapien
tcaacctgagactatatgggaactg

SEQ ID NO: 2759928 - DNA, 25 bp, Homo sapien
gaaacaacttgtaatacctgctggg

SEQ ID NO: 2759929 - DNA, 25 bp, Homo sapien
acagattttaacgtgacagtaaggt

SEQ ID NO: 2759930 - DNA, 25 bp, Homo sapien
ttactgggtctcatcaatccttgta

SEQ ID NO: 2759931 - DNA, 25 bp, Homo sapien
catccttatcatatgtcacagattt

SEQ ID NO: 2759932 - DNA, 25 bp, Homo sapien
taacgtgacagtaaggtgtgttttc

SEQ ID NO: 2759933 - DNA, 25 bp, Homo sapien
gaagtatggaatgtatagccttttt

SEQ ID NO: 2759934 - DNA, 25 bp, Homo sapien
tcttggtgctttaatttaggaaaca

SEQ ID NO: 2759935 - DNA, 25 bp, Homo sapien
ccaagccaggttcccctaaggctgt

SEQ ID NO: 2759936 - DNA, 25 bp, Homo sapien
aagtatggaatgtatagcctttttc

SEQ ID NO: 2759937 - DNA, 25 bp, Homo sapien
tatactatcatgtcagttaacagca

SEQ ID NO: 2759938 - DNA, 25 bp, Homo sapien
cagcatcatgccttagtagaaaata

SEQ ID NO: 2759939 - DNA, 25 bp, Homo sapien
ccaaataatccaccccaagtcagta

SEQ ID NO: 2759940 - DNA, 25 bp, Homo sapien
cacgcccagctgaagaatgactatt

SEQ ID NO: 2759941 - DNA, 25 bp, Homo sapien
tgctttgtaatgggttcgaaaatcc

SEQ ID NO: 2759942 - DNA, 25 bp, Homo sapien
gctgctttgtaatgggttcgaaaat

SEQ ID NO: 2759943 - DNA, 25 bp, Homo sapien
agctgctttgtaatgggttcgaaaa

SEQ ID NO: 2759944 - DNA, 25 bp, Homo sapien
tagctgctttgtaatgggttcgaaa

SEQ ID NO: 2759945 - DNA, 25 bp, Homo sapien
gcagaagacatgattatatttagaa

SEQ ID NO: 2759946 - DNA, 25 bp, Homo sapien
aactccatcatctcaagcccaaaat

SEQ ID NO: 2759947 - DNA, 25 bp, Homo sapien
catgattatatttagaaaactccat

SEQ ID NO: 2759948 - DNA, 25 bp, Homo sapien
aatcttccctgtttgcagaagacat

SEQ ID NO: 2759949 - DNA, 25 bp, Homo sapien
aacagccagattcccactcatcttc

SEQ ID NO: 2759950 - DNA, 25 bp, Homo sapien
catttccagccatgtaatttactct

SEQ ID NO: 2759951 - DNA, 25 bp, Homo sapien
tccatttccagccatgtaatttact

SEQ ID NO: 2759952 - DNA, 25 bp, Homo sapien
ccatttccagccatgtaatttactc

SEQ ID NO: 2759953 - DNA, 25 bp, Homo sapien
ttatcacttgcaaccccaactatca

SEQ ID NO: 2759954 - DNA, 25 bp, Homo sapien
agtctctctttatcacttgcaaccc

SEQ ID NO: 2759955 - DNA, 25 bp, Homo sapien
taaatcaagtcccatgccataatca

SEQ ID NO: 2759956 - DNA, 25 bp, Homo sapien
aagagttccattcctaaatcaagtc

SEQ ID NO: 2759957 - DNA, 25 bp, Homo sapien
caccagctaaatctgatacatttcc

SEQ ID NO: 2759958 - DNA, 25 bp, Homo sapien
gctaaatctgatacatttccttcct

SEQ ID NO: 2759959 - DNA, 25 bp, Homo sapien
aaatctgatacatttccttcctgct

SEQ ID NO: 2759960 - DNA, 25 bp, Homo sapien
cagctaaatctgatacatttccttc

SEQ ID NO: 2759961 - DNA, 25 bp, Homo sapien
ccttcctggaaggtatggacatctg

SEQ ID NO: 2759962 - DNA, 25 bp, Homo sapien
gaaggtatggacatctgttcatctt

SEQ ID NO: 2759963 - DNA, 25 bp, Homo sapien
tctaagtcaatgactgacagatgac

SEQ ID NO: 2759964 - DNA, 25 bp, Homo sapien
gagagattgaatatttagcatcctt

SEQ ID NO: 2759965 - DNA, 25 bp, Homo sapien
ctttcctccataattttcccatatg

SEQ ID NO: 2759966 - DNA, 25 bp, Homo sapien
ttcctccataattttcccatatgtc

SEQ ID NO: 2759967 - DNA, 25 bp, Homo sapien
cctccataattttcccatatgtcca

SEQ ID NO: 2759968 - DNA, 25 bp, Homo sapien
ctccataattttcccatatgtccat

SEQ ID NO: 2759969 - DNA, 25 bp, Homo sapien
actaatacaagctgagattatattg

SEQ ID NO: 2759970 - DNA, 25 bp, Homo sapien
aaaactaatacaagctgagattata

SEQ ID NO: 2759971 - DNA, 25 bp, Homo sapien
ctaatacaagctgagattatattgt

SEQ ID NO: 2759972 - DNA, 25 bp, Homo sapien
aaactaatacaagctgagattatat

SEQ ID NO: 2759973 - DNA, 25 bp, Homo sapien
ccattacaattgtgtctgcatcaaa

SEQ ID NO: 2759974 - DNA, 25 bp, Homo sapien
atctccattacaattgtgtctgcat

SEQ ID NO: 2759975 - DNA, 25 bp, Homo sapien
ctccattacaattgtgtctgcatca

SEQ ID NO: 2759976 - DNA, 25 bp, Homo sapien
tctccattacaattgtgtctgcatc

SEQ ID NO: 2759977 - DNA, 25 bp, Homo sapien
cagcttccttctgaacacagccagg

SEQ ID NO: 2759978 - DNA, 25 bp, Homo sapien
caggcacctgttcaaaagcctctct

SEQ ID NO: 2759979 - DNA, 25 bp, Homo sapien
agcttccttctgaacacagccaggc

SEQ ID NO: 2759980 - DNA, 25 bp, Homo sapien
ctggcatggtggcattcttctcgtc

SEQ ID NO: 2759981 - DNA, 25 bp, Homo sapien
tacccgaatcaacatggtgactggc

SEQ ID NO: 2759982 - DNA, 25 bp, Homo sapien
gcaactcgtctgcatcctcgctggt

SEQ ID NO: 2759983 - DNA, 25 bp, Homo sapien
taaattggtgtctgcccgcaccaaa

SEQ ID NO: 2759984 - DNA, 25 bp, Homo sapien
tccacctttgcattcaccactgtca

SEQ ID NO: 2759985 - DNA, 25 bp, Homo sapien
atctccacctttgcattcaccactg

SEQ ID NO: 2759986 - DNA, 25 bp, Homo sapien
cacctttgcattcaccactgtcacc

SEQ ID NO: 2759987 - DNA, 25 bp, Homo sapien
cctttgcattcaccactgtcacctt

SEQ ID NO: 2759988 - DNA, 25 bp, Homo sapien
ctccaatggtttagtgcgaaatggt

SEQ ID NO: 2759989 - DNA, 25 bp, Homo sapien
tttagtgcgaaatggtgaagagact

SEQ ID NO: 2759990 - DNA, 25 bp, Homo sapien
gtttagtgcgaaatggtgaagagac

SEQ ID NO: 2759991 - DNA, 25 bp, Homo sapien
caatggtttagtgcgaaatggtgaa

SEQ ID NO: 2759992 - DNA, 25 bp, Homo sapien
tctggtaatatctttgccaaataaa

SEQ ID NO: 2759993 - DNA, 25 bp, Homo sapien
acagagcttaatgagcccaaaacag

SEQ ID NO: 2759994 - DNA, 25 bp, Homo sapien
gggacagagcttaatgagcccaaaa

SEQ ID NO: 2759995 - DNA, 25 bp, Homo sapien
ggacagagcttaatgagcccaaaac

SEQ ID NO: 2759996 - DNA, 25 bp, Homo sapien
ggggacagagcttaatgagcccaaa

SEQ ID NO: 2759997 - DNA, 25 bp, Homo sapien
tttcttgccgaaattaaatgaggca

SEQ ID NO: 2759998 - DNA, 25 bp, Homo sapien
ttcttgccgaaattaaatgaggcac

SEQ ID NO: 2759999 - DNA, 25 bp, Homo sapien
ttgtcgctcctagtgatgatgggtc

SEQ ID NO: 2760000 - DNA, 25 bp, Homo sapien
ttcttttcagatgtcagctccacct

SEQ ID NO: 2760001 - DNA, 25 bp, Homo sapien
tgatgggtccgttttcttttcagat

SEQ ID NO: 2760002 - DNA, 25 bp, Homo sapien
tcagctccaccttcttgtcaggtgt

SEQ ID NO: 2760003 - DNA, 25 bp, Homo sapien
gttgagccaacaagggaaggagacc

SEQ ID NO: 2760004 - DNA, 25 bp, Homo sapien
aggagaccgtgtttcagccgcagct

SEQ ID NO: 2760005 - DNA, 25 bp, Homo sapien
tgccatgaaacaaaaacgctgactc

SEQ ID NO: 2760006 - DNA, 25 bp, Homo sapien
agccaacaagggaaggagaccgtgt

SEQ ID NO: 2760007 - DNA, 25 bp, Homo sapien
tttccattcgacagtccttccaaag

SEQ ID NO: 2760008 - DNA, 25 bp, Homo sapien
aaagataggtgtcagatcacagagg

SEQ ID NO: 2760009 - DNA, 25 bp, Homo sapien
ctggttatgttgtttccattcgaca

SEQ ID NO: 2760010 - DNA, 25 bp, Homo sapien
gccaactgcttgtgataggcatttc

SEQ ID NO: 2760011 - DNA, 25 bp, Homo sapien
ttctttatggctctattcttcaaga

SEQ ID NO: 2760012 - DNA, 25 bp, Homo sapien
ctttatggctctattcttcaagact

SEQ ID NO: 2760013 - DNA, 25 bp, Homo sapien
tctttatggctctattcttcaagac

SEQ ID NO: 2760014 - DNA, 25 bp, Homo sapien
cttcttgatcccaattcctatctgt

SEQ ID NO: 2760015 - DNA, 25 bp, Homo sapien
tcatcttcttgatcccaattcctat

SEQ ID NO: 2760016 - DNA, 25 bp, Homo sapien
cttgatcccaattcctatctgtcag

SEQ ID NO: 2760017 - DNA, 25 bp, Homo sapien
gatcccaattcctatctgtcagttc

SEQ ID NO: 2760018 - DNA, 25 bp, Homo sapien
cctgcgctgcgggcctcagaggact

SEQ ID NO: 2760019 - DNA, 25 bp, Homo sapien
gaggcggcgagacgcgccggttcag

SEQ ID NO: 2760020 - DNA, 25 bp, Homo sapien
gctgtgttcggcagcgaggcggcga

SEQ ID NO: 2760021 - DNA, 25 bp, Homo sapien
gtaggggagatcctcacgctgtgtt

SEQ ID NO: 2760022 - DNA, 25 bp, Homo sapien
aaagaaacgccccgacagtgttctg

SEQ ID NO: 2760023 - DNA, 25 bp, Homo sapien
aagaaacgccccgacagtgttctga

SEQ ID NO: 2760024 - DNA, 25 bp, Homo sapien
agaaacgccccgacagtgttctgaa

SEQ ID NO: 2760025 - DNA, 25 bp, Homo sapien
cataaggggactatgtctgttcatt

SEQ ID NO: 2760026 - DNA, 25 bp, Homo sapien
gcagtataacctaacttaccctgac

SEQ ID NO: 2760027 - DNA, 25 bp, Homo sapien
gactatgtctgttcatttttaccac

SEQ ID NO: 2760028 - DNA, 25 bp, Homo sapien
tgcagtataacctaacttaccctga

SEQ ID NO: 2760029 - DNA, 25 bp, Homo sapien
tccagagtcctccttctgagaagtt

SEQ ID NO: 2760030 - DNA, 25 bp, Homo sapien
atttctccagagtcctccttctgag

SEQ ID NO: 2760031 - DNA, 25 bp, Homo sapien
gatttctccctgagattcctccatt

SEQ ID NO: 2760032 - DNA, 25 bp, Homo sapien
agatttctccctgagattcctccat

SEQ ID NO: 2760033 - DNA, 25 bp, Homo sapien
ctgtatagcaaaggggccaacacac

SEQ ID NO: 2760034 - DNA, 25 bp, Homo sapien
cagctccgtagctgctgcaaagatt

SEQ ID NO: 2760035 - DNA, 25 bp, Homo sapien
agctccgtagctgctgcaaagattt

SEQ ID NO: 2760036 - DNA, 25 bp, Homo sapien
gctccgtagctgctgcaaagatttc

SEQ ID NO: 2760037 - DNA, 25 bp, Homo sapien
tttgatcccaggatactggctcttt

SEQ ID NO: 2760038 - DNA, 25 bp, Homo sapien
ttgatcccaggatactggctctttc

SEQ ID NO: 2760039 - DNA, 25 bp, Homo sapien
ctttgatcccaggatactggctctt

SEQ ID NO: 2760040 - DNA, 25 bp, Homo sapien
ctgatggagaacaaccacggccacc

SEQ ID NO: 2760041 - DNA, 25 bp, Homo sapien
atggagaacaaccacggccaccctt

SEQ ID NO: 2760042 - DNA, 25 bp, Homo sapien
cttcagccaactgcactgcaggcaa

SEQ ID NO: 2760043 - DNA, 25 bp, Homo sapien
agaacaaccacggccacccttcagc

SEQ ID NO: 2760044 - DNA, 25 bp, Homo sapien
caaacagaaacgaggagtaggtctt

SEQ ID NO: 2760045 - DNA, 25 bp, Homo sapien
gtaggtcttatagccttgagtgtaa

SEQ ID NO: 2760046 - DNA, 25 bp, Homo sapien
gaaacgaggagtaggtcttatagcc

SEQ ID NO: 2760047 - DNA, 25 bp, Homo sapien
gccttgagtgtaataacagctgtta

SEQ ID NO: 2760048 - DNA, 25 bp, Homo sapien
ctgctgtgtggtatctggacaaaac

SEQ ID NO: 2760049 - DNA, 25 bp, Homo sapien
caaaacagggtattggtggtcacca

SEQ ID NO: 2760050 - DNA, 25 bp, Homo sapien
ctgtggcctacaatgtatttatcat

SEQ ID NO: 2760051 - DNA, 25 bp, Homo sapien
tatttatcatagaaaacctgctgtg

SEQ ID NO: 2760052 - DNA, 25 bp, Homo sapien
gactctaagttacaacagttcccca

SEQ ID NO: 2760053 - DNA, 25 bp, Homo sapien
gattcacttgttgtcatctgactga

SEQ ID NO: 2760054 - DNA, 25 bp, Homo sapien
ttgtattttgccctagtcctaacca

SEQ ID NO: 2760055 - DNA, 25 bp, Homo sapien
tcttttaaggtgagcttgccagcaa

SEQ ID NO: 2760056 - DNA, 25 bp, Homo sapien
cacacatgagttatcctgaggttaa

SEQ ID NO: 2760057 - DNA, 25 bp, Homo sapien
tatcgaatctactttaagctttgtc

SEQ ID NO: 2760058 - DNA, 25 bp, Homo sapien
tctatctatcatttacaggaacagc

SEQ ID NO: 2760059 - DNA, 25 bp, Homo sapien
cttccgtttactactcacacatgag

SEQ ID NO: 2760060 - DNA, 25 bp, Homo sapien
gccttatgaatttgtaaatgctgtt

SEQ ID NO: 2760061 - DNA, 25 bp, Homo sapien
tgaatttgtaaatgctgttcactag

SEQ ID NO: 2760062 - DNA, 25 bp, Homo sapien
tttgtaaatgctgttcactagtaaa

SEQ ID NO: 2760063 - DNA, 25 bp, Homo sapien
cacctcaaaccttgccttatgaatt

SEQ ID NO: 2760064 - DNA, 25 bp, Homo sapien
gataatttattatgaccaggcaaaa

SEQ ID NO: 2760065 - DNA, 25 bp, Homo sapien
caatattcttgctgaaggtatatac

SEQ ID NO: 2760066 - DNA, 25 bp, Homo sapien
tagcaaattgagttgaacaatacag

SEQ ID NO: 2760067 - DNA, 25 bp, Homo sapien
caaataaaagcctgggaaccaatgg

SEQ ID NO: 2760068 - DNA, 25 bp, Homo sapien
tcatgttcccctgactgcgttacag

SEQ ID NO: 2760069 - DNA, 25 bp, Homo sapien
aacactgtggttgcaggttcttgaa

SEQ ID NO: 2760070 - DNA, 25 bp, Homo sapien
tttctggatctctagttcaacactg

SEQ ID NO: 2760071 - DNA, 25 bp, Homo sapien
tacagttgtgagtgtatgacagctg

SEQ ID NO: 2760072 - DNA, 25 bp, Homo sapien
ttgcttttagcgatggcccatctct

SEQ ID NO: 2760073 - DNA, 25 bp, Homo sapien
ggctgtcctgcctgtcatttccatg

SEQ ID NO: 2760074 - DNA, 25 bp, Homo sapien
agcgatggcccatctctcagtggct

SEQ ID NO: 2760075 - DNA, 25 bp, Homo sapien
cctgaacatgagacactgtggaagt

SEQ ID NO: 2760076 - DNA, 25 bp, Homo sapien
tgtagtggtcgttgccttggtaacg

SEQ ID NO: 2760077 - DNA, 25 bp, Homo sapien
gtcattgctttgtagtggtcgttgc

SEQ ID NO: 2760078 - DNA, 25 bp, Homo sapien
ggtaacgataatgtaggaaattcat

SEQ ID NO: 2760079 - DNA, 25 bp, Homo sapien
gttgccttggtaacgataatgtagg

SEQ ID NO: 2760080 - DNA, 25 bp, Homo sapien
ttagaaagactccatgaactcgttt

SEQ ID NO: 2760081 - DNA, 25 bp, Homo sapien
gatattttgagtattcgccttgaat

SEQ ID NO: 2760082 - DNA, 25 bp, Homo sapien
cacttagtacatatagaatcatgca

SEQ ID NO: 2760083 - DNA, 25 bp, Homo sapien
aacatagttaaaacacggcttcgtg

SEQ ID NO: 2760084 - DNA, 25 bp, Homo sapien
agaaaccgatgccagttttatagct

SEQ ID NO: 2760085 - DNA, 25 bp, Homo sapien
ttagaaaccgatgccagttttatag

SEQ ID NO: 2760086 - DNA, 25 bp, Homo sapien
gctggcagatgtcttactttcgcat

SEQ ID NO: 2760087 - DNA, 25 bp, Homo sapien
tagaaaccgatgccagttttatagc

SEQ ID NO: 2760088 - DNA, 25 bp, Homo sapien
cggattgccgtaggacttcttaact

SEQ ID NO: 2760089 - DNA, 25 bp, Homo sapien
tttcggattgccgtaggacttctta

SEQ ID NO: 2760090 - DNA, 25 bp, Homo sapien
tgccgtaggacttcttaactttgga

SEQ ID NO: 2760091 - DNA, 25 bp, Homo sapien
cgtaggacttcttaactttggagag

SEQ ID NO: 2760092 - DNA, 25 bp, Homo sapien
tcacaaggccgtaattaatttttgc

SEQ ID NO: 2760093 - DNA, 25 bp, Homo sapien
ctgggaaaatcaatgagacaatatc

SEQ ID NO: 2760094 - DNA, 25 bp, Homo sapien
taatttttgcctgaagttcagccaa

SEQ ID NO: 2760095 - DNA, 25 bp, Homo sapien
aatccaattttgcatcagcttcctt

SEQ ID NO: 2760096 - DNA, 25 bp, Homo sapien
tccgtcgtattcagaagtcccttct

SEQ ID NO: 2760097 - DNA, 25 bp, Homo sapien
tttatccgtcgtattcagaagtccc

SEQ ID NO: 2760098 - DNA, 25 bp, Homo sapien
cagtttatccgtcgtattcagaagt

SEQ ID NO: 2760099 - DNA, 25 bp, Homo sapien
cgtattcagaagtcccttctcatgg

SEQ ID NO: 2760100 - DNA, 25 bp, Homo sapien
tatcagctattgctctagaagaact

SEQ ID NO: 2760101 - DNA, 25 bp, Homo sapien
tggaacaccaagagatactcttaga

SEQ ID NO: 2760102 - DNA, 25 bp, Homo sapien
ggatgttatcttgagcccataggga

SEQ ID NO: 2760103 - DNA, 25 bp, Homo sapien
ggttatagaggaaagcacggccgaa

SEQ ID NO: 2760104 - DNA, 25 bp, Homo sapien
cagatcaactgtgaataatcttgtt

SEQ ID NO: 2760105 - DNA, 25 bp, Homo sapien
gatcaactgtgaataatcttgttgc

SEQ ID NO: 2760106 - DNA, 25 bp, Homo sapien
gaaagaactctgcagatcaactgtg

SEQ ID NO: 2760107 - DNA, 25 bp, Homo sapien
agatcaactgtgaataatcttgttg

SEQ ID NO: 2760108 - DNA, 25 bp, Homo sapien
cctttagaccgctctcttgtttttg

SEQ ID NO: 2760109 - DNA, 25 bp, Homo sapien
cttttcacctttagaccgctctctt

SEQ ID NO: 2760110 - DNA, 25 bp, Homo sapien
cacctttagaccgctctcttgtttt

SEQ ID NO: 2760111 - DNA, 25 bp, Homo sapien
ttcacctttagaccgctctcttgtt

SEQ ID NO: 2760112 - DNA, 25 bp, Homo sapien
gaaggtacagacataggtttaatta

SEQ ID NO: 2760113 - DNA, 25 bp, Homo sapien
tatataatgctagaaggtacagaca

SEQ ID NO: 2760114 - DNA, 25 bp, Homo sapien
actttttatatataatgctagaagg

SEQ ID NO: 2760115 - DNA, 25 bp, Homo sapien
cagacataggtttaattagtgataa

SEQ ID NO: 2760116 - DNA, 25 bp, Homo sapien
tttcaagttcattgaagtaagcaag

SEQ ID NO: 2760117 - DNA, 25 bp, Homo sapien
tcaagttcattgaagtaagcaagag

SEQ ID NO: 2760118 - DNA, 25 bp, Homo sapien
caagttcattgaagtaagcaagagg

SEQ ID NO: 2760119 - DNA, 25 bp, Homo sapien
aagttcattgaagtaagcaagagga

SEQ ID NO: 2760120 - DNA, 25 bp, Homo sapien
taatagcattgaattgatacgccat

SEQ ID NO: 2760121 - DNA, 25 bp, Homo sapien
caccaactccaccaaggaaagacat

SEQ ID NO: 2760122 - DNA, 25 bp, Homo sapien
catctgtgtatcctcaaccacactg

SEQ ID NO: 2760123 - DNA, 25 bp, Homo sapien
actccaccaaggaaagacattccat

SEQ ID NO: 2760124 - DNA, 25 bp, Homo sapien
cacactgtttctaccctggtgagta

SEQ ID NO: 2760125 - DNA, 25 bp, Homo sapien
gcaacaacaaattcattcagaatca

SEQ ID NO: 2760126 - DNA, 25 bp, Homo sapien
ctctccttcctttggatacttttct

SEQ ID NO: 2760127 - DNA, 25 bp, Homo sapien
caatcacctctccttcctttggata

SEQ ID NO: 2760128 - DNA, 25 bp, Homo sapien
cacctctccttcctttggatacttt

SEQ ID NO: 2760129 - DNA, 25 bp, Homo sapien
aatcacctctccttcctttggatac

SEQ ID NO: 2760130 - DNA, 25 bp, Homo sapien
cacagtgtggctcttgctgaaacct

SEQ ID NO: 2760131 - DNA, 25 bp, Homo sapien
tcagggcctctgaaactgctaagaa

SEQ ID NO: 2760132 - DNA, 25 bp, Homo sapien
ctgctactagtgttttctcagggcc

SEQ ID NO: 2760133 - DNA, 25 bp, Homo sapien
aatcccaccagtaggctggctgcct

SEQ ID NO: 2760134 - DNA, 25 bp, Homo sapien
tactttctgtctgagtagaacattt

SEQ ID NO: 2760135 - DNA, 25 bp, Homo sapien
ttgcatttgcacaagaacactctct

SEQ ID NO: 2760136 - DNA, 25 bp, Homo sapien
gaacatttctcgctgacaagggaga

SEQ ID NO: 2760137 - DNA, 25 bp, Homo sapien
taagtatgagatattgtaggcaaac

SEQ ID NO: 2760138 - DNA, 25 bp, Homo sapien
gactgatggtgtcaattgtccacac

SEQ ID NO: 2760139 - DNA, 25 bp, Homo sapien
catgttgatgtcagcacattctgtc

SEQ ID NO: 2760140 - DNA, 25 bp, Homo sapien
agcgtattgaccatttgatctccag

SEQ ID NO: 2760141 - DNA, 25 bp, Homo sapien
gatctccagtttgggtgtcaacaaa

SEQ ID NO: 2760142 - DNA, 25 bp, Homo sapien
ggtcaacacgggaatgcccaatatg

SEQ ID NO: 2760143 - DNA, 25 bp, Homo sapien
tgactagctcgtaacctgagagtgc

SEQ ID NO: 2760144 - DNA, 25 bp, Homo sapien
tcaggaccaactatgccaaggtcaa

SEQ ID NO: 2760145 - DNA, 25 bp, Homo sapien
gcccaatatgattgggatgtgtcat

SEQ ID NO: 2760146 - DNA, 25 bp, Homo sapien
caccacaggtgatatagacccacag

SEQ ID NO: 2760147 - DNA, 25 bp, Homo sapien
tggtgactcaattaaatctctcctg

SEQ ID NO: 2760148 - DNA, 25 bp, Homo sapien
ctcactttgatagagtggtgactca

SEQ ID NO: 2760149 - DNA, 25 bp, Homo sapien
tgtgtcatggttcgttcaccacagg

SEQ ID NO: 2760150 - DNA, 25 bp, Homo sapien
gaagcaagctgccaaatgttattca

SEQ ID NO: 2760151 - DNA, 25 bp, Homo sapien
tatctgagtccagaggtcttcactg

SEQ ID NO: 2760152 - DNA, 25 bp, Homo sapien
catgattatgcccaatgacctctgc

SEQ ID NO: 2760153 - DNA, 25 bp, Homo sapien
gcaagtggctatactggatgcaacc

SEQ ID NO: 2760154 - DNA, 25 bp, Homo sapien
gtaataatccgactcaatttcatcg

SEQ ID NO: 2760155 - DNA, 25 bp, Homo sapien
ccgactcaatttcatcggtgcttag

SEQ ID NO: 2760156 - DNA, 25 bp, Homo sapien
aatttcatcggtgcttagtctaagg

SEQ ID NO: 2760157 - DNA, 25 bp, Homo sapien
tcggtgcttagtctaaggatgttct

SEQ ID NO: 2760158 - DNA, 25 bp, Homo sapien
gagttggcctctgttacttgatcca

SEQ ID NO: 2760159 - DNA, 25 bp, Homo sapien
tggcctctgttacttgatccaccat

SEQ ID NO: 2760160 - DNA, 25 bp, Homo sapien
agagttggcctctgttacttgatcc

SEQ ID NO: 2760161 - DNA, 25 bp, Homo sapien
gttggcctctgttacttgatccacc

SEQ ID NO: 2760162 - DNA, 25 bp, Homo sapien
taaaaacaagactcagtaggtgatc

SEQ ID NO: 2760163 - DNA, 25 bp, Homo sapien
cattaagcaaattagaactgtaaga

SEQ ID NO: 2760164 - DNA, 25 bp, Homo sapien
gtgcagatataactcccatgaatgt

SEQ ID NO: 2760165 - DNA, 25 bp, Homo sapien
gttgacacactaagtaacagtaaaa

SEQ ID NO: 2760166 - DNA, 25 bp, Homo sapien
tcaaacccgtagccccacatggcac

SEQ ID NO: 2760167 - DNA, 25 bp, Homo sapien
cacatggcacttaggagccatttct

SEQ ID NO: 2760168 - DNA, 25 bp, Homo sapien
ttctgtgggtttctgtaccttcttc

SEQ ID NO: 2760169 - DNA, 25 bp, Homo sapien
cttaggagccatttctgtgggtttc

SEQ ID NO: 2760170 - DNA, 25 bp, Homo sapien
ttttaggtcttttaatccatcttga

SEQ ID NO: 2760171 - DNA, 25 bp, Homo sapien
gaggaatagattgcaaaaaattttc

SEQ ID NO: 2760172 - DNA, 25 bp, Homo sapien
tcagaggaatagattgcaaaaaatt

SEQ ID NO: 2760173 - DNA, 25 bp, Homo sapien
tgtcagaggaatagattgcaaaaaa

SEQ ID NO: 2760174 - DNA, 25 bp, Homo sapien
ttcaggatagatgtgatgagcagct

SEQ ID NO: 2760175 - DNA, 25 bp, Homo sapien
tcagtgatactgcttggctcaggac

SEQ ID NO: 2760176 - DNA, 25 bp, Homo sapien
aatgtcctaggttcctccttgctct

SEQ ID NO: 2760177 - DNA, 25 bp, Homo sapien
ggctgatgccaccacaatgtcctag

SEQ ID NO: 2760178 - DNA, 25 bp, Homo sapien
tgtttctgggactcgatctgcctca

SEQ ID NO: 2760179 - DNA, 25 bp, Homo sapien
ttgtttctgggactcgatctgcctc

SEQ ID NO: 2760180 - DNA, 25 bp, Homo sapien
gattttctgtcgtttcgtatcagaa

SEQ ID NO: 2760181 - DNA, 25 bp, Homo sapien
tcagaacctcatcatatccatttcc

SEQ ID NO: 2760182 - DNA, 25 bp, Homo sapien
tctgggcccactaagggcaaatagt

SEQ ID NO: 2760183 - DNA, 25 bp, Homo sapien
gggcagaattgacacaaaaactaca

SEQ ID NO: 2760184 - DNA, 25 bp, Homo sapien
taacacagggtcaatctactctaat

SEQ ID NO: 2760185 - DNA, 25 bp, Homo sapien
tcaacttttgttagtgtaagtcaac

SEQ ID NO: 2760186 - DNA, 25 bp, Homo sapien
gataaggtgaatagttacattcctg

SEQ ID NO: 2760187 - DNA, 25 bp, Homo sapien
cagggaccaaaggtatgtagcagaa

SEQ ID NO: 2760188 - DNA, 25 bp, Homo sapien
gcctttatggatagcacttagaaaa

SEQ ID NO: 2760189 - DNA, 25 bp, Homo sapien
taagtcagctttacggtacatctgg

SEQ ID NO: 2760190 - DNA, 25 bp, Homo sapien
caggtaacagagcgtgaatgaacaa

SEQ ID NO: 2760191 - DNA, 25 bp, Homo sapien
aggtaacagagcgtgaatgaacaaa

SEQ ID NO: 2760192 - DNA, 25 bp, Homo sapien
ggtaacagagcgtgaatgaacaaag

SEQ ID NO: 2760193 - DNA, 25 bp, Homo sapien
gcaggtaacagagcgtgaatgaaca

SEQ ID NO: 2760194 - DNA, 25 bp, Homo sapien
gaaaagccaaagtatccaagtgttg

SEQ ID NO: 2760195 - DNA, 25 bp, Homo sapien
tacttcttcaagatcaataaatcgc

SEQ ID NO: 2760196 - DNA, 25 bp, Homo sapien
gttgtacttcttcaagatcaataaa

SEQ ID NO: 2760197 - DNA, 25 bp, Homo sapien
tcttatgtagctgtccttccctgcc

SEQ ID NO: 2760198 - DNA, 25 bp, Homo sapien
ctcagggatcctccagaataaagaa

SEQ ID NO: 2760199 - DNA, 25 bp, Homo sapien
tcagggatcctccagaataaagaag

SEQ ID NO: 2760200 - DNA, 25 bp, Homo sapien
cacgtcgctgctgcttgcttgatgt

SEQ ID NO: 2760201 - DNA, 25 bp, Homo sapien
tactgcgttgttgtgaaccaggatg

SEQ ID NO: 2760202 - DNA, 25 bp, Homo sapien
gcaattatccgtgttgaagagaaac

SEQ ID NO: 2760203 - DNA, 25 bp, Homo sapien
accaggatgacgtattgttaaggca

SEQ ID NO: 2760204 - DNA, 25 bp, Homo sapien
caacaacaaagctgttttgactact

SEQ ID NO: 2760205 - DNA, 25 bp, Homo sapien
gcaacaacaaagctgttttgactac

SEQ ID NO: 2760206 - DNA, 25 bp, Homo sapien
tgcaacaacaaagctgttttgacta

SEQ ID NO: 2760207 - DNA, 25 bp, Homo sapien
ctgcaacaacaaagctgttttgact

SEQ ID NO: 2760208 - DNA, 25 bp, Homo sapien
ttaaccacattcttcattgattgca

SEQ ID NO: 2760209 - DNA, 25 bp, Homo sapien
taaccacattcttcattgattgcat

SEQ ID NO: 2760210 - DNA, 25 bp, Homo sapien
atgaccggaagaaagtctccacggc

SEQ ID NO: 2760211 - DNA, 25 bp, Homo sapien
tatgaccggaagaaagtctccacgg

SEQ ID NO: 2760212 - DNA, 25 bp, Homo sapien
tgaccggaagaaagtctccacggcc

SEQ ID NO: 2760213 - DNA, 25 bp, Homo sapien
ctatgaccggaagaaagtctccacg

SEQ ID NO: 2760214 - DNA, 25 bp, Homo sapien
taatagcatgtctcaggtcgactga

SEQ ID NO: 2760215 - DNA, 25 bp, Homo sapien
gagatatgctgactgggacagtttc

SEQ ID NO: 2760216 - DNA, 25 bp, Homo sapien
tcaggtcgactgaggtctgttttca

SEQ ID NO: 2760217 - DNA, 25 bp, Homo sapien
taaagatggagatatgctgactggg

SEQ ID NO: 2760218 - DNA, 25 bp, Homo sapien
accactgttcgaatgccactttcta

SEQ ID NO: 2760219 - DNA, 25 bp, Homo sapien
tgaaaggtgaaattagctggcacca

SEQ ID NO: 2760220 - DNA, 25 bp, Homo sapien
ttcttgatgattataaagtaggaac

SEQ ID NO: 2760221 - DNA, 25 bp, Homo sapien
gctaggttttcggatgctgtttact

SEQ ID NO: 2760222 - DNA, 25 bp, Homo sapien
cagctaaatatgtggttgtccttca

SEQ ID NO: 2760223 - DNA, 25 bp, Homo sapien
agctaaatatgtggttgtccttcat

SEQ ID NO: 2760224 - DNA, 25 bp, Homo sapien
tcagctaaatatgtggttgtccttc

SEQ ID NO: 2760225 - DNA, 25 bp, Homo sapien
gctaaatatgtggttgtccttcatc

SEQ ID NO: 2760226 - DNA, 25 bp, Homo sapien
ccttagaacctataacagcgtcatt

SEQ ID NO: 2760227 - DNA, 25 bp, Homo sapien
tgccttagaacctataacagcgtca

SEQ ID NO: 2760228 - DNA, 25 bp, Homo sapien
tctgccttagaacctataacagcgt

SEQ ID NO: 2760229 - DNA, 25 bp, Homo sapien
tagaacctataacagcgtcattcat

SEQ ID NO: 2760230 - DNA, 25 bp, Homo sapien
tccactgataacaagaagcaggctc

SEQ ID NO: 2760231 - DNA, 25 bp, Homo sapien
tatccttctcgtaaaacagtatagc

SEQ ID NO: 2760232 - DNA, 25 bp, Homo sapien
gcttatccttctcgtaaaacagtat

SEQ ID NO: 2760233 - DNA, 25 bp, Homo sapien
ctgataacaagaagcaggctctttc

SEQ ID NO: 2760234 - DNA, 25 bp, Homo sapien
tcaaggagacatcggaatttttgtg

SEQ ID NO: 2760235 - DNA, 25 bp, Homo sapien
aaggagacatcggaatttttgtgga

SEQ ID NO: 2760236 - DNA, 25 bp, Homo sapien
ggagacatcggaatttttgtggaga

SEQ ID NO: 2760237 - DNA, 25 bp, Homo sapien
gagacatcggaatttttgtggagac

SEQ ID NO: 2760238 - DNA, 25 bp, Homo sapien
cactgatgagtgcacacaaagaaaa

SEQ ID NO: 2760239 - DNA, 25 bp, Homo sapien
ccaaagcacccagatatcagactat

SEQ ID NO: 2760240 - DNA, 25 bp, Homo sapien
caaagtgcctagtttgtctcccagt

SEQ ID NO: 2760241 - DNA, 25 bp, Homo sapien
tatgggctcactagttgagtgttca

SEQ ID NO: 2760242 - DNA, 25 bp, Homo sapien
agaggaaatttacattgttaccaat

SEQ ID NO: 2760243 - DNA, 25 bp, Homo sapien
ttccacgtagatgcttcccatcgtg

SEQ ID NO: 2760244 - DNA, 25 bp, Homo sapien
ggtttccatgaactttattgtctca

SEQ ID NO: 2760245 - DNA, 25 bp, Homo sapien
actttttatttccacgtagatgctt

SEQ ID NO: 2760246 - DNA, 25 bp, Homo sapien
tataagccaaatttctgctcaacag

SEQ ID NO: 2760247 - DNA, 25 bp, Homo sapien
ttctgctcaacagagcaaccatatc

SEQ ID NO: 2760248 - DNA, 25 bp, Homo sapien
tctgctcaacagagcaaccatatcc

SEQ ID NO: 2760249 - DNA, 25 bp, Homo sapien
ctatataagccaaatttctgctcaa

SEQ ID NO: 2760250 - DNA, 25 bp, Homo sapien
caagcacacttgaagcacaatacat

SEQ ID NO: 2760251 - DNA, 25 bp, Homo sapien
acaagcacacttgaagcacaataca

SEQ ID NO: 2760252 - DNA, 25 bp, Homo sapien
tacaagcacacttgaagcacaatac

SEQ ID NO: 2760253 - DNA, 25 bp, Homo sapien
gtacaagcacacttgaagcacaata

SEQ ID NO: 2760254 - DNA, 25 bp, Homo sapien
ttgtgatcttcacttgtacaagttg

SEQ ID NO: 2760255 - DNA, 25 bp, Homo sapien
tgagctcccaccttttcagtgaact

SEQ ID NO: 2760256 - DNA, 25 bp, Homo sapien
tttatgctgcgagataagtcctctc

SEQ ID NO: 2760257 - DNA, 25 bp, Homo sapien
tacaagttgtctttatgctgcgaga

SEQ ID NO: 2760258 - DNA, 25 bp, Homo sapien
cactcatgttacctgatggaaaatc

SEQ ID NO: 2760259 - DNA, 25 bp, Homo sapien
tcactcatgttacctgatggaaaat

SEQ ID NO: 2760260 - DNA, 25 bp, Homo sapien
ctcactcatgttacctgatggaaaa

SEQ ID NO: 2760261 - DNA, 25 bp, Homo sapien
tctcactcatgttacctgatggaaa

SEQ ID NO: 2760262 - DNA, 25 bp, Homo sapien
gataaagtcgaagtaacaaattctg

SEQ ID NO: 2760263 - DNA, 25 bp, Homo sapien
tcaagaattctcctcgtcccctttc

SEQ ID NO: 2760264 - DNA, 25 bp, Homo sapien
cattttccggttgataaagtcgaag

SEQ ID NO: 2760265 - DNA, 25 bp, Homo sapien
tctgtgacattttccggttgataaa

SEQ ID NO: 2760266 - DNA, 25 bp, Homo sapien
tccaagctgtctattccagagagct

SEQ ID NO: 2760267 - DNA, 25 bp, Homo sapien
aagctgtctattccagagagctctg

SEQ ID NO: 2760268 - DNA, 25 bp, Homo sapien
cagggcatccaagctgtctattcca

SEQ ID NO: 2760269 - DNA, 25 bp, Homo sapien
ggcatccaagctgtctattccagag

SEQ ID NO: 2760270 - DNA, 25 bp, Homo sapien
catgcatccataggtctttgccatc

SEQ ID NO: 2760271 - DNA, 25 bp, Homo sapien
tagtcattgcacaatcctttggcaa

SEQ ID NO: 2760272 - DNA, 25 bp, Homo sapien
tggcaatctgggcacaaatctcatc

SEQ ID NO: 2760273 - DNA, 25 bp, Homo sapien
gaccatcttcactgttacgaccttg

SEQ ID NO: 2760274 - DNA, 25 bp, Homo sapien
tcaccgatatcagtgaaggatgatt

SEQ ID NO: 2760275 - DNA, 25 bp, Homo sapien
aattaagattttgctgaacaaagat

SEQ ID NO: 2760276 - DNA, 25 bp, Homo sapien
gaacaaagatgcagtgaagggagat

SEQ ID NO: 2760277 - DNA, 25 bp, Homo sapien
gatatcagtgaaggatgatttgctc

SEQ ID NO: 2760278 - DNA, 25 bp, Homo sapien
tgcagtttgggctgtctctgtggct

SEQ ID NO: 2760279 - DNA, 25 bp, Homo sapien
tcctccagcatttgccgcgagttat

SEQ ID NO: 2760280 - DNA, 25 bp, Homo sapien
gagttattggcaagttcccctgcag

SEQ ID NO: 2760281 - DNA, 25 bp, Homo sapien
gaaagccgcagtccctctgcggaag

SEQ ID NO: 2760282 - DNA, 25 bp, Homo sapien
gaaggtgggtttcatgaagcgagtc

SEQ ID NO: 2760283 - DNA, 25 bp, Homo sapien
gcaatgtttgaacaaactcgaagaa

SEQ ID NO: 2760284 - DNA, 25 bp, Homo sapien
atgtttgaacaaactcgaagaacag

SEQ ID NO: 2760285 - DNA, 25 bp, Homo sapien
tcatcttttaggtaaaaaagctcgc

SEQ ID NO: 2760286 - DNA, 25 bp, Homo sapien
aaaagctcgcacatttgacttggaa

SEQ ID NO: 2760287 - DNA, 25 bp, Homo sapien
cccaaggtgggtcatagtaactaag

SEQ ID NO: 2760288 - DNA, 25 bp, Homo sapien
taaaatccagaactagtactcgaac

SEQ ID NO: 2760289 - DNA, 25 bp, Homo sapien
gaagaaatgcagcacggagaggcca

SEQ ID NO: 2760290 - DNA, 25 bp, Homo sapien
ggttctgccctataccctggaggaa

SEQ ID NO: 2760291 - DNA, 25 bp, Homo sapien
gtggggacaagtgtccactggccct

SEQ ID NO: 2760292 - DNA, 25 bp, Homo sapien
tgtggggacaagtgtccactggccc

SEQ ID NO: 2760293 - DNA, 25 bp, Homo sapien
aggccatgctcagatggagtgctgt

SEQ ID NO: 2760294 - DNA, 25 bp, Homo sapien
gaatgtcttaattgtcctggaaggt

SEQ ID NO: 2760295 - DNA, 25 bp, Homo sapien
cagtcggcctattgtgagacttccc

SEQ ID NO: 2760296 - DNA, 25 bp, Homo sapien
tgagcctccctacctttgaagtttg

SEQ ID NO: 2760297 - DNA, 25 bp, Homo sapien
gcatccgtgcaggacgtaagaaagc

SEQ ID NO: 2760298 - DNA, 25 bp, Homo sapien
tagtggtggaacctcaggcatccgt

SEQ ID NO: 2760299 - DNA, 25 bp, Homo sapien
tcttcacttagagacaagactcctt

SEQ ID NO: 2760300 - DNA, 25 bp, Homo sapien
cattcattgtgaaatcgcggggaca

SEQ ID NO: 2760301 - DNA, 25 bp, Homo sapien
gactctgacatgtgcccatagctag

SEQ ID NO: 2760302 - DNA, 25 bp, Homo sapien
tgggactctgacatgtgcccatagc

SEQ ID NO: 2760303 - DNA, 25 bp, Homo sapien
ctgacatgtgcccatagctagggtg

SEQ ID NO: 2760304 - DNA, 25 bp, Homo sapien
ttacatgggactctgacatgtgccc

SEQ ID NO: 2760305 - DNA, 25 bp, Homo sapien
tacacattgacaatgggtaaataga

SEQ ID NO: 2760306 - DNA, 25 bp, Homo sapien
tatacacattgacaatgggtaaata

SEQ ID NO: 2760307 - DNA, 25 bp, Homo sapien
atttatacacattgacaatgggtaa

SEQ ID NO: 2760308 - DNA, 25 bp, Homo sapien
tttatacacattgacaatgggtaaa

SEQ ID NO: 2760309 - DNA, 25 bp, Homo sapien
tgctgtatctgccttttgacagcgg

SEQ ID NO: 2760310 - DNA, 25 bp, Homo sapien
tgtatctgccttttgacagcgggtg

SEQ ID NO: 2760311 - DNA, 25 bp, Homo sapien
ctgccttttgacagcgggtgtgacc

SEQ ID NO: 2760312 - DNA, 25 bp, Homo sapien
tatctgccttttgacagcgggtgtg

SEQ ID NO: 2760313 - DNA, 25 bp, Homo sapien
cagcggtgacccgtagagacagcct

SEQ ID NO: 2760314 - DNA, 25 bp, Homo sapien
gtctgccttcttttcacagcggtga

SEQ ID NO: 2760315 - DNA, 25 bp, Homo sapien
gtgtctgccttcttttcacagcggt

SEQ ID NO: 2760316 - DNA, 25 bp, Homo sapien
gaggcaggatctggtccgggtggtc

SEQ ID NO: 2760317 - DNA, 25 bp, Homo sapien
tggaatgctgcctgtttttccaggt

SEQ ID NO: 2760318 - DNA, 25 bp, Homo sapien
gcgctggaatgctgcctgtttttcc

SEQ ID NO: 2760319 - DNA, 25 bp, Homo sapien
gatgcgctggaatgctgcctgtttt

SEQ ID NO: 2760320 - DNA, 25 bp, Homo sapien
gaatgctgcctgtttttccaggtgc

SEQ ID NO: 2760321 - DNA, 25 bp, Homo sapien
acacagcactggcttactgtggtac

SEQ ID NO: 2760322 - DNA, 25 bp, Homo sapien
ctggaattcggagcacacagcactg

SEQ ID NO: 2760323 - DNA, 25 bp, Homo sapien
tggaattcggagcacacagcactgg

SEQ ID NO: 2760324 - DNA, 25 bp, Homo sapien
agcacacagcactggcttactgtgg

SEQ ID NO: 2760325 - DNA, 25 bp, Homo sapien
tgagcacataatggcaccagtgaca

SEQ ID NO: 2760326 - DNA, 25 bp, Homo sapien
gtgagcacataatggcaccagtgac

SEQ ID NO: 2760327 - DNA, 25 bp, Homo sapien
caaaaacctgcaacaaagagatact

SEQ ID NO: 2760328 - DNA, 25 bp, Homo sapien
aaatcctcttgtttatggcagtaca

SEQ ID NO: 2760329 - DNA, 25 bp, Homo sapien
ataacacaggtgaatagcagaggca

SEQ ID NO: 2760330 - DNA, 25 bp, Homo sapien
aataattttcgaccagatggagctg

SEQ ID NO: 2760331 - DNA, 25 bp, Homo sapien
tgttcatttccgtctccagcttgag

SEQ ID NO: 2760332 - DNA, 25 bp, Homo sapien
caacattgtagagattagcactgag

SEQ ID NO: 2760333 - DNA, 25 bp, Homo sapien
ctttccagccatatgcatctgttca

SEQ ID NO: 2760334 - DNA, 25 bp, Homo sapien
tggtcttgtctccattctattaaaa

SEQ ID NO: 2760335 - DNA, 25 bp, Homo sapien
gctcctctgagcatcatttctgtcc

SEQ ID NO: 2760336 - DNA, 25 bp, Homo sapien
ttgaaatcagaatggaggcaaccat

SEQ ID NO: 2760337 - DNA, 25 bp, Homo sapien
agggcttcactggatggccctccca

SEQ ID NO: 2760338 - DNA, 25 bp, Homo sapien
ctgtcctttgaaatcagaatggagg

SEQ ID NO: 2760339 - DNA, 25 bp, Homo sapien
cctaaacttgtggtttcatgcccca

SEQ ID NO: 2760340 - DNA, 25 bp, Homo sapien
cactctcttagtggcattggctctg

SEQ ID NO: 2760341 - DNA, 25 bp, Homo sapien
taaaatgcatgagttagcaccctct

SEQ ID NO: 2760342 - DNA, 25 bp, Homo sapien
atatgttctagtttgctcttggcca

SEQ ID NO: 2760343 - DNA, 25 bp, Homo sapien
tcatagagtcccctgagaaggaaac

SEQ ID NO: 2760344 - DNA, 25 bp, Homo sapien
tacattcaaaaccacaggtctgtgg

SEQ ID NO: 2760345 - DNA, 25 bp, Homo sapien
gacacttgtccgtagatgttctgtg

SEQ ID NO: 2760346 - DNA, 25 bp, Homo sapien
gggcagaaactaatacccctctcaa

SEQ ID NO: 2760347 - DNA, 25 bp, Homo sapien
tgaaaaagagtcagtcagcagcaga

SEQ ID NO: 2760348 - DNA, 25 bp, Homo sapien
tcgagtgggcgaaagaacctgttaa

SEQ ID NO: 2760349 - DNA, 25 bp, Homo sapien
gagatcctctataaggcaaccagtg

SEQ ID NO: 2760350 - DNA, 25 bp, Homo sapien
gatataaatacctagccagaggagg

SEQ ID NO: 2760351 - DNA, 25 bp, Homo sapien
cccatagcccttgctgacatttctg

SEQ ID NO: 2760352 - DNA, 25 bp, Homo sapien
cagcccttttttcccatagcccttg

SEQ ID NO: 2760353 - DNA, 25 bp, Homo sapien
ccttttttcccatagcccttgctga

SEQ ID NO: 2760354 - DNA, 25 bp, Homo sapien
ttttttcccatagcccttgctgaca

SEQ ID NO: 2760355 - DNA, 25 bp, Homo sapien
tctttgttttacatcacatcagcaa

SEQ ID NO: 2760356 - DNA, 25 bp, Homo sapien
tcagcaaagatctagttaaataact

SEQ ID NO: 2760357 - DNA, 25 bp, Homo sapien
caatctatgttacatctgcctttaa

SEQ ID NO: 2760358 - DNA, 25 bp, Homo sapien
ttgcacttacatatcgagaaattaa

SEQ ID NO: 2760359 - DNA, 25 bp, Homo sapien
tgggcaatgcgtacactaaagctta

SEQ ID NO: 2760360 - DNA, 25 bp, Homo sapien
caatgagttgttgaggttgggcaat

SEQ ID NO: 2760361 - DNA, 25 bp, Homo sapien
actgtatatactgttaaagcttgca

SEQ ID NO: 2760362 - DNA, 25 bp, Homo sapien
gaacatagtggaaacaagactgaca

SEQ ID NO: 2760363 - DNA, 25 bp, Homo sapien
tatgcataagctacaacccgttgaa

SEQ ID NO: 2760364 - DNA, 25 bp, Homo sapien
ggtacaaggaggcataaaatcaact

SEQ ID NO: 2760365 - DNA, 25 bp, Homo sapien
aatattataactggctactgccttg

SEQ ID NO: 2760366 - DNA, 25 bp, Homo sapien
caatcaagagatataccagttcgga

SEQ ID NO: 2760367 - DNA, 25 bp, Homo sapien
aaccagaaactgagaaagctagatg

SEQ ID NO: 2760368 - DNA, 25 bp, Homo sapien
tcccatataccccactagggcaaaa

SEQ ID NO: 2760369 - DNA, 25 bp, Homo sapien
gttctccactaggaaggatccgatg

SEQ ID NO: 2760370 - DNA, 25 bp, Homo sapien
gatccgatgagtagatagacacaag

SEQ ID NO: 2760371 - DNA, 25 bp, Homo sapien
gaggttcaatccatgtataagccag

SEQ ID NO: 2760372 - DNA, 25 bp, Homo sapien
gatggtgctgccctaactgaggttc

SEQ ID NO: 2760373 - DNA, 25 bp, Homo sapien
gatatggttacttaagacgtgatac

SEQ ID NO: 2760374 - DNA, 25 bp, Homo sapien
gacgtgatactgtcacagtgaattt

SEQ ID NO: 2760375 - DNA, 25 bp, Homo sapien
cactagcccttgttagttctttaag

SEQ ID NO: 2760376 - DNA, 25 bp, Homo sapien
taagcccaatcctcaactccaaagt

SEQ ID NO: 2760377 - DNA, 25 bp, Homo sapien
tactattgttttgttcccactagcc

SEQ ID NO: 2760378 - DNA, 25 bp, Homo sapien
acttctaactgaagctgtactattg

SEQ ID NO: 2760379 - DNA, 25 bp, Homo sapien
ccctctatttagagtcccagcatac

SEQ ID NO: 2760380 - DNA, 25 bp, Homo sapien
gactccctctatttagagtcccagc

SEQ ID NO: 2760381 - DNA, 25 bp, Homo sapien
ggactccctctatttagagtcccag

SEQ ID NO: 2760382 - DNA, 25 bp, Homo sapien
ttgtggactccctctatttagagtc

SEQ ID NO: 2760383 - DNA, 25 bp, Homo sapien
tattcagagatatgcccagataaat

SEQ ID NO: 2760384 - DNA, 25 bp, Homo sapien
ttcagagatatgcccagataaatgc

SEQ ID NO: 2760385 - DNA, 25 bp, Homo sapien
ttattcagagatatgcccagataaa

SEQ ID NO: 2760386 - DNA, 25 bp, Homo sapien
attcagagatatgcccagataaatg

SEQ ID NO: 2760387 - DNA, 25 bp, Homo sapien
aactcatccgacatgtcacagggag

SEQ ID NO: 2760388 - DNA, 25 bp, Homo sapien
ggacagatgatacaactcatccgac

SEQ ID NO: 2760389 - DNA, 25 bp, Homo sapien
atattcatatgcctgagctagaagc

SEQ ID NO: 2760390 - DNA, 25 bp, Homo sapien
caggcttgcagttgataggacagat

SEQ ID NO: 2760391 - DNA, 25 bp, Homo sapien
ccaacatccattacttctacaacat

SEQ ID NO: 2760392 - DNA, 25 bp, Homo sapien
caacatccattacttctacaacatt

SEQ ID NO: 2760393 - DNA, 25 bp, Homo sapien
catccattacttctacaacattcca

SEQ ID NO: 2760394 - DNA, 25 bp, Homo sapien
aacatccattacttctacaacattc

SEQ ID NO: 2760395 - DNA, 25 bp, Homo sapien
tgaattctgcgttgtaacacaaggg

SEQ ID NO: 2760396 - DNA, 25 bp, Homo sapien
gagacatcagacaaaggctctttgg

SEQ ID NO: 2760397 - DNA, 25 bp, Homo sapien
cacaagggaactaagcaaagaagag

SEQ ID NO: 2760398 - DNA, 25 bp, Homo sapien
gagagatatccggaatgcttcctag

SEQ ID NO: 2760399 - DNA, 25 bp, Homo sapien
catttgcctttacatctgtacccat

SEQ ID NO: 2760400 - DNA, 25 bp, Homo sapien
ataagaatctcattatacttaaagc

SEQ ID NO: 2760401 - DNA, 25 bp, Homo sapien
tgttctccttgaactcttcatgcca

SEQ ID NO: 2760402 - DNA, 25 bp, Homo sapien
gaacacaataagaatctcattatac

SEQ ID NO: 2760403 - DNA, 25 bp, Homo sapien
cttaaagctacagttgccaagtgtt

SEQ ID NO: 2760404 - DNA, 25 bp, Homo sapien
caggtgatggctgctacataagatg

SEQ ID NO: 2760405 - DNA, 25 bp, Homo sapien
atggacagtgtttggcaatcaggtg

SEQ ID NO: 2760406 - DNA, 25 bp, Homo sapien
ctggcaggtgatggctgctacataa

SEQ ID NO: 2760407 - DNA, 25 bp, Homo sapien
ggtggtctactgcagggtttcttga

SEQ ID NO: 2760408 - DNA, 25 bp, Homo sapien
tgatagtagatggtagataggccat

SEQ ID NO: 2760409 - DNA, 25 bp, Homo sapien
ctcaatatgaaagtggaacaaccac

SEQ ID NO: 2760410 - DNA, 25 bp, Homo sapien
tagtatctatgaatcttcacccaca

SEQ ID NO: 2760411 - DNA, 25 bp, Homo sapien
ggtcacagtatccaggaatctatga

SEQ ID NO: 2760412 - DNA, 25 bp, Homo sapien
ttctgagaactagtgtcatgtaaaa

SEQ ID NO: 2760413 - DNA, 25 bp, Homo sapien
ctgagaactagtgtcatgtaaaaat

SEQ ID NO: 2760414 - DNA, 25 bp, Homo sapien
tctgagaactagtgtcatgtaaaaa

SEQ ID NO: 2760415 - DNA, 25 bp, Homo sapien
gatgttgattaaggtcagcatgctt

SEQ ID NO: 2760416 - DNA, 25 bp, Homo sapien
taaaccatttccacttggtatgtgg

SEQ ID NO: 2760417 - DNA, 25 bp, Homo sapien
ttccacttggtatgtggcttccctt

SEQ ID NO: 2760418 - DNA, 25 bp, Homo sapien
tccctttgggcacgttatagtactg

SEQ ID NO: 2760419 - DNA, 25 bp, Homo sapien
gtgccatatcgtttggccttcaaga

SEQ ID NO: 2760420 - DNA, 25 bp, Homo sapien
gttcaatggcctttagcacaaccag

SEQ ID NO: 2760421 - DNA, 25 bp, Homo sapien
attgatctgttcagaatcatcagtg

SEQ ID NO: 2760422 - DNA, 25 bp, Homo sapien
actcttcaccctcatattgatctgt

SEQ ID NO: 2760423 - DNA, 25 bp, Homo sapien
tctcctccacactagccggtttctg

SEQ ID NO: 2760424 - DNA, 25 bp, Homo sapien
ccacactagccggtttctgctggtt

SEQ ID NO: 2760425 - DNA, 25 bp, Homo sapien
ggtttctgctggttagaatgtggtc

SEQ ID NO: 2760426 - DNA, 25 bp, Homo sapien
tagccggtttctgctggttagaatg

SEQ ID NO: 2760427 - DNA, 25 bp, Homo sapien
tctgcataaacactaggtgggctct

SEQ ID NO: 2760428 - DNA, 25 bp, Homo sapien
ttgtgagagagctcatcattgttcc

SEQ ID NO: 2760429 - DNA, 25 bp, Homo sapien
atcttcttgtgagagagctcatcat

SEQ ID NO: 2760430 - DNA, 25 bp, Homo sapien
ggaatctgcataaacactaggtggg

SEQ ID NO: 2760431 - DNA, 25 bp, Homo sapien
aatcaatgatgcttgattatcaggc

SEQ ID NO: 2760432 - DNA, 25 bp, Homo sapien
tcaatgatgcttgattatcaggcat

SEQ ID NO: 2760433 - DNA, 25 bp, Homo sapien
agcaaacaaagaataacttggcttc

SEQ ID NO: 2760434 - DNA, 25 bp, Homo sapien
ataacttggcttcttgattatgaat

SEQ ID NO: 2760435 - DNA, 25 bp, Homo sapien
ctcaatgcaaactcaatatccttca

SEQ ID NO: 2760436 - DNA, 25 bp, Homo sapien
aactcaatgcaaactcaatatcctt

SEQ ID NO: 2760437 - DNA, 25 bp, Homo sapien
tcaatgcaaactcaatatccttcag

SEQ ID NO: 2760438 - DNA, 25 bp, Homo sapien
actcaatgcaaactcaatatccttc

SEQ ID NO: 2760439 - DNA, 25 bp, Homo sapien
actctaactgataaagttgtttcac

SEQ ID NO: 2760440 - DNA, 25 bp, Homo sapien
gaactctaactgataaagttgtttc

SEQ ID NO: 2760441 - DNA, 25 bp, Homo sapien
ctctaactgataaagttgtttcaca

SEQ ID NO: 2760442 - DNA, 25 bp, Homo sapien
aactctaactgataaagttgtttca

SEQ ID NO: 2760443 - DNA, 25 bp, Homo sapien
cagattctgctcaacagtaggctcc

SEQ ID NO: 2760444 - DNA, 25 bp, Homo sapien
tcctacccaatgtgaggatggtgag

SEQ ID NO: 2760445 - DNA, 25 bp, Homo sapien
ggcataggtgctcctaacccctgtg

SEQ ID NO: 2760446 - DNA, 25 bp, Homo sapien
ttgaggaggcaaaagttctacatgg

SEQ ID NO: 2760447 - DNA, 25 bp, Homo sapien
tgtgtaatttgagccctgaggcctc

SEQ ID NO: 2760448 - DNA, 25 bp, Homo sapien
caaaaccaatatttattttaatgtg

SEQ ID NO: 2760449 - DNA, 25 bp, Homo sapien
tttaatgtgtaatttgagccctgag

SEQ ID NO: 2760450 - DNA, 25 bp, Homo sapien
gcctctctttataaagaggaatatt

SEQ ID NO: 2760451 - DNA, 25 bp, Homo sapien
ccgcaataccatcacagcagagtgt

SEQ ID NO: 2760452 - DNA, 25 bp, Homo sapien
tctcggttgtattttagcctccacg

SEQ ID NO: 2760453 - DNA, 25 bp, Homo sapien
ggagagtcagagtgtcgctattgct

SEQ ID NO: 2760454 - DNA, 25 bp, Homo sapien
taatcaaaggaatcttgtcccagag

SEQ ID NO: 2760455 - DNA, 25 bp, Homo sapien
tgggtttctcagagccccgatgtcg

SEQ ID NO: 2760456 - DNA, 25 bp, Homo sapien
gatgtcgaaagcctgggtatcttcc

SEQ ID NO: 2760457 - DNA, 25 bp, Homo sapien
tcccttcgtaggcatatgtggccag

SEQ ID NO: 2760458 - DNA, 25 bp, Homo sapien
cttctttagaggtcatcagggtgtc

SEQ ID NO: 2760459 - DNA, 25 bp, Homo sapien
tgctgggcagatgttccggcagaaa

SEQ ID NO: 2760460 - DNA, 25 bp, Homo sapien
agggtgatgccagtccaacattgga

SEQ ID NO: 2760461 - DNA, 25 bp, Homo sapien
tacaggcatataagggtgaaaaccc

SEQ ID NO: 2760462 - DNA, 25 bp, Homo sapien
aatataggaatactccaggactcag

SEQ ID NO: 2760463 - DNA, 25 bp, Homo sapien
atatatatccaagaagtatgaaata

SEQ ID NO: 2760464 - DNA, 25 bp, Homo sapien
tttacatgataaattgaggagagag

SEQ ID NO: 2760465 - DNA, 25 bp, Homo sapien
catagattatcttctagctaggtat

SEQ ID NO: 2760466 - DNA, 25 bp, Homo sapien
caatttaattcaatacacatagatt

SEQ ID NO: 2760467 - DNA, 25 bp, Homo sapien
gggtagctgctgtcttctattacaa

SEQ ID NO: 2760468 - DNA, 25 bp, Homo sapien
tagaattgcaatcaacgccccagtg

SEQ ID NO: 2760469 - DNA, 25 bp, Homo sapien
ggtgccatcagagtcacatctacag

SEQ ID NO: 2760470 - DNA, 25 bp, Homo sapien
cgccccagtgctaagtcctacaggt

SEQ ID NO: 2760471 - DNA, 25 bp, Homo sapien
ttctgaagtcacgaactgtaaaatt

SEQ ID NO: 2760472 - DNA, 25 bp, Homo sapien
ggtgataatctaaaggagaattgtt

SEQ ID NO: 2760473 - DNA, 25 bp, Homo sapien
aatttggtttgatagcagcctcagg

SEQ ID NO: 2760474 - DNA, 25 bp, Homo sapien
taatctaaaggagaattgttgccca

SEQ ID NO: 2760475 - DNA, 25 bp, Homo sapien
ggctgtctcatatggcacagatatt

SEQ ID NO: 2760476 - DNA, 25 bp, Homo sapien
catttacatctaagacattaatcag

SEQ ID NO: 2760477 - DNA, 25 bp, Homo sapien
gactttgctggtcaataaagggtta

SEQ ID NO: 2760478 - DNA, 25 bp, Homo sapien
ttggcattttcacacacggctgtct

SEQ ID NO: 2760479 - DNA, 25 bp, Homo sapien
cagtgcttgttcacagaaatgcagg

SEQ ID NO: 2760480 - DNA, 25 bp, Homo sapien
gaatacactgtaagccaatcagtgc

SEQ ID NO: 2760481 - DNA, 25 bp, Homo sapien
agtcacccaggtgaatacactgtaa

SEQ ID NO: 2760482 - DNA, 25 bp, Homo sapien
gcctaggaacagataggaaaagttg

SEQ ID NO: 2760483 - DNA, 25 bp, Homo sapien
gttttaacatcataaagatgagtga

SEQ ID NO: 2760484 - DNA, 25 bp, Homo sapien
ctgttttaacatcataaagatgagt

SEQ ID NO: 2760485 - DNA, 25 bp, Homo sapien
agatgagtgaatttcccatggtcag

SEQ ID NO: 2760486 - DNA, 25 bp, Homo sapien
aaagatgagtgaatttcccatggtc

SEQ ID NO: 2760487 - DNA, 25 bp, Homo sapien
tagatattcatgcaatactgcaaac

SEQ ID NO: 2760488 - DNA, 25 bp, Homo sapien
tcatgcaatactgcaaacaggactc

SEQ ID NO: 2760489 - DNA, 25 bp, Homo sapien
aatactgcaaacaggactcattggc

SEQ ID NO: 2760490 - DNA, 25 bp, Homo sapien
acaggactcattggcagctgtcaca

SEQ ID NO: 2760491 - DNA, 25 bp, Homo sapien
tatactgcgcagtgctttctctgtc

SEQ ID NO: 2760492 - DNA, 25 bp, Homo sapien
catctattgtaaagtagctgtcccc

SEQ ID NO: 2760493 - DNA, 25 bp, Homo sapien
caattatggagaaattatactgcgc

SEQ ID NO: 2760494 - DNA, 25 bp, Homo sapien
tcattagtggcgatggttccttcat

SEQ ID NO: 2760495 - DNA, 25 bp, Homo sapien
caatgatggtccctaccggagtgtc

SEQ ID NO: 2760496 - DNA, 25 bp, Homo sapien
gaaaaccggtggctcatctacgtcc

SEQ ID NO: 2760497 - DNA, 25 bp, Homo sapien
tgtagagcggcttgctgaaaaccgg

SEQ ID NO: 2760498 - DNA, 25 bp, Homo sapien
tgtgtctttgaaagggcccgccgag

SEQ ID NO: 2760499 - DNA, 25 bp, Homo sapien
tttagtagtcaactgtcccaacatt

SEQ ID NO: 2760500 - DNA, 25 bp, Homo sapien
attatttagtagtcaactgtcccaa

SEQ ID NO: 2760501 - DNA, 25 bp, Homo sapien
tatttagtagtcaactgtcccaaca

SEQ ID NO: 2760502 - DNA, 25 bp, Homo sapien
tagtagtcaactgtcccaacatttg

SEQ ID NO: 2760503 - DNA, 25 bp, Homo sapien
gtgacgatgtcaaacaaatttcccc

SEQ ID NO: 2760504 - DNA, 25 bp, Homo sapien
ccaatagctgaaccaataggggaag

SEQ ID NO: 2760505 - DNA, 25 bp, Homo sapien
gggaagactcaggaactttcaagtg

SEQ ID NO: 2760506 - DNA, 25 bp, Homo sapien
ccctcttgtgtatcctcatctgtga

SEQ ID NO: 2760507 - DNA, 25 bp, Homo sapien
tggctctttcccatgggtaaatcaa

SEQ ID NO: 2760508 - DNA, 25 bp, Homo sapien
gaatggctctttcccatgggtaaat

SEQ ID NO: 2760509 - DNA, 25 bp, Homo sapien
atggctctttcccatgggtaaatca

SEQ ID NO: 2760510 - DNA, 25 bp, Homo sapien
tagaatggctctttcccatgggtaa

SEQ ID NO: 2760511 - DNA, 25 bp, Homo sapien
ttgtcttagctaaatggaaggcccc

SEQ ID NO: 2760512 - DNA, 25 bp, Homo sapien
caggcagattctcgcttcaaggaga

SEQ ID NO: 2760513 - DNA, 25 bp, Homo sapien
tctgctttgatggactatgacctca

SEQ ID NO: 2760514 - DNA, 25 bp, Homo sapien
caccattggaggcagcaaagttagg

SEQ ID NO: 2760515 - DNA, 25 bp, Homo sapien
gtggtgacaacatacgccgtgattt

SEQ ID NO: 2760516 - DNA, 25 bp, Homo sapien
tatgagtggtgacaacatacgccgt

SEQ ID NO: 2760517 - DNA, 25 bp, Homo sapien
gtgttcatgtaatacaagcagaaaa

SEQ ID NO: 2760518 - DNA, 25 bp, Homo sapien
tcagacaatagtccaagtgttcatg

SEQ ID NO: 2760519 - DNA, 25 bp, Homo sapien
cctaggcatgaatctcatcaaaatg

SEQ ID NO: 2760520 - DNA, 25 bp, Homo sapien
aaatgtgtcaaaactatgaggctcc

SEQ ID NO: 2760521 - DNA, 25 bp, Homo sapien
gaagacataggtgtgaattactcta

SEQ ID NO: 2760522 - DNA, 25 bp, Homo sapien
gatagcataagaccaatacttcaac

SEQ ID NO: 2760523 - DNA, 25 bp, Homo sapien
ctaagtgtctggaaaatgattgtca

SEQ ID NO: 2760524 - DNA, 25 bp, Homo sapien
gattgtcattcccatagcattcaat

SEQ ID NO: 2760525 - DNA, 25 bp, Homo sapien
ttgtcattcccatagcattcaatga

SEQ ID NO: 2760526 - DNA, 25 bp, Homo sapien
aaaatgattgtcattcccatagcat

SEQ ID NO: 2760527 - DNA, 25 bp, Homo sapien
aggcttaacaggaaaggtgacatac

SEQ ID NO: 2760528 - DNA, 25 bp, Homo sapien
caataatttaggcttaacaggaaag

SEQ ID NO: 2760529 - DNA, 25 bp, Homo sapien
aaccgcaataatttaggcttaacag

SEQ ID NO: 2760530 - DNA, 25 bp, Homo sapien
tttaggcttaacaggaaaggtgaca

SEQ ID NO: 2760531 - DNA, 25 bp, Homo sapien
cttggatgagtacttgatattgttc

SEQ ID NO: 2760532 - DNA, 25 bp, Homo sapien
tgttgttccggctaatcctccaagc

SEQ ID NO: 2760533 - DNA, 25 bp, Homo sapien
tgacatcggtgagagtgatgttgac

SEQ ID NO: 2760534 - DNA, 25 bp, Homo sapien
gatgttgactattgttgttccggct

SEQ ID NO: 2760535 - DNA, 25 bp, Homo sapien
tttggcaaagctgttctaataacac

SEQ ID NO: 2760536 - DNA, 25 bp, Homo sapien
gtttggcaaagctgttctaataaca

SEQ ID NO: 2760537 - DNA, 25 bp, Homo sapien
tcttagtggagttctcgaaggactg

SEQ ID NO: 2760538 - DNA, 25 bp, Homo sapien
cggagtgactccctgttttagtcct

SEQ ID NO: 2760539 - DNA, 25 bp, Homo sapien
ttttcaggtttacataacggagtga

SEQ ID NO: 2760540 - DNA, 25 bp, Homo sapien
tctcgaaggactgatgctgtcctta

SEQ ID NO: 2760541 - DNA, 25 bp, Homo sapien
aatagagaaataaggttgtccctga

SEQ ID NO: 2760542 - DNA, 25 bp, Homo sapien
acgactctggcactgtttccatagg

SEQ ID NO: 2760543 - DNA, 25 bp, Homo sapien
ctgtaaacgactctggcactgtttc

SEQ ID NO: 2760544 - DNA, 25 bp, Homo sapien
gagaaataaggttgtccctgaagaa

SEQ ID NO: 2760545 - DNA, 25 bp, Homo sapien
tctgtgagttttaattccatgcaga

SEQ ID NO: 2760546 - DNA, 25 bp, Homo sapien
gaggcagctctgggtgaaaaaggtc

SEQ ID NO: 2760547 - DNA, 25 bp, Homo sapien
tgcttctgtgagttttaattccatg

SEQ ID NO: 2760548 - DNA, 25 bp, Homo sapien
gtgagttttaattccatgcagaggc

SEQ ID NO: 2760549 - DNA, 25 bp, Homo sapien
gcagtgccaattactgacatgtaaa

SEQ ID NO: 2760550 - DNA, 25 bp, Homo sapien
tgcattgtacttccggaagtactgg

SEQ ID NO: 2760551 - DNA, 25 bp, Homo sapien
tcaaagcagtgccaattactgacat

SEQ ID NO: 2760552 - DNA, 25 bp, Homo sapien
tggacacaaacttcactcattgtca

SEQ ID NO: 2760553 - DNA, 25 bp, Homo sapien
aaaaagcagtctaaacctgtgacca

SEQ ID NO: 2760554 - DNA, 25 bp, Homo sapien
gttgatgctgtaattgctgaactta

SEQ ID NO: 2760555 - DNA, 25 bp, Homo sapien
gatgctgtaattgctgaacttaaaa

SEQ ID NO: 2760556 - DNA, 25 bp, Homo sapien
aagcagtctaaacctgtgaccaccc

SEQ ID NO: 2760557 - DNA, 25 bp, Homo sapien
tctgtgaacacattccctgacctgt

SEQ ID NO: 2760558 - DNA, 25 bp, Homo sapien
gtctgtgaacacattccctgacctg

SEQ ID NO: 2760559 - DNA, 25 bp, Homo sapien
ctgtgaacacattccctgacctgtc

SEQ ID NO: 2760560 - DNA, 25 bp, Homo sapien
tgtgaacacattccctgacctgtca

SEQ ID NO: 2760561 - DNA, 25 bp, Homo sapien
gctttccatgccatcagtatcctga

SEQ ID NO: 2760562 - DNA, 25 bp, Homo sapien
tagacatctcaaaacaatatatggg

SEQ ID NO: 2760563 - DNA, 25 bp, Homo sapien
tccagtctgtgttcgcatgtgtgtg

SEQ ID NO: 2760564 - DNA, 25 bp, Homo sapien
gctgtaggaagtaaccatgtccata

SEQ ID NO: 2760565 - DNA, 25 bp, Homo sapien
gcaaggctcagagtgatgtggttat

SEQ ID NO: 2760566 - DNA, 25 bp, Homo sapien
tagtcatgtagatgttcggcaaggc

SEQ ID NO: 2760567 - DNA, 25 bp, Homo sapien
gagctgtcttgttgtttgatatgaa

SEQ ID NO: 2760568 - DNA, 25 bp, Homo sapien
ggtgatgagctgtcttgttgtttga

SEQ ID NO: 2760569 - DNA, 25 bp, Homo sapien
tacatcacgtttgcctttgatcccc

SEQ ID NO: 2760570 - DNA, 25 bp, Homo sapien
ttctatagtaacaaagttctcccgc

SEQ ID NO: 2760571 - DNA, 25 bp, Homo sapien
cataccctttatcttctatagtaac

SEQ ID NO: 2760572 - DNA, 25 bp, Homo sapien
cttgatagaaggatttagtacatca

SEQ ID NO: 2760573 - DNA, 25 bp, Homo sapien
tgtttccagagctccatatgcatca

SEQ ID NO: 2760574 - DNA, 25 bp, Homo sapien
tccagagctccatatgcatcaattt

SEQ ID NO: 2760575 - DNA, 25 bp, Homo sapien
agcagcagggaatgtttccagagct

SEQ ID NO: 2760576 - DNA, 25 bp, Homo sapien
gctccatatgcatcaatttgggaaa

SEQ ID NO: 2760577 - DNA, 25 bp, Homo sapien
tgccacaagaagtgtgtcagagccc

SEQ ID NO: 2760578 - DNA, 25 bp, Homo sapien
tcagggactggagttgaattctacc

SEQ ID NO: 2760579 - DNA, 25 bp, Homo sapien
tgatgttagacagccttgtgccaca

SEQ ID NO: 2760580 - DNA, 25 bp, Homo sapien
ttctggagagaatctagccctgccc

SEQ ID NO: 2760581 - DNA, 25 bp, Homo sapien
ggtacagataggaagatcccccagg

SEQ ID NO: 2760582 - DNA, 25 bp, Homo sapien
gggtacagataggaagatcccccag

SEQ ID NO: 2760583 - DNA, 25 bp, Homo sapien
gagggtacagataggaagatccccc

SEQ ID NO: 2760584 - DNA, 25 bp, Homo sapien
gtacagataggaagatcccccaggc

SEQ ID NO: 2760585 - DNA, 25 bp, Homo sapien
gccgaggactacaaaaccatcagct

SEQ ID NO: 2760586 - DNA, 25 bp, Homo sapien
agcagaggaaatggccgaggactac

SEQ ID NO: 2760587 - DNA, 25 bp, Homo sapien
gaaatggccgaggactacaaaacca

SEQ ID NO: 2760588 - DNA, 25 bp, Homo sapien
tgtcatatatctaaattcagatggg

SEQ ID NO: 2760589 - DNA, 25 bp, Homo sapien
tcatgaatatatgcaacagtggctc

SEQ ID NO: 2760590 - DNA, 25 bp, Homo sapien
tatcttcctggagaatgcaacatat

SEQ ID NO: 2760591 - DNA, 25 bp, Homo sapien
tattcctgaggctagatccacattg

SEQ ID NO: 2760592 - DNA, 25 bp, Homo sapien
cccagctacagcgttactacagcag

SEQ ID NO: 2760593 - DNA, 25 bp, Homo sapien
caaaacccaagactagcatatgttg

SEQ ID NO: 2760594 - DNA, 25 bp, Homo sapien
cagttgcaatttgccgatctctaca

SEQ ID NO: 2760595 - DNA, 25 bp, Homo sapien
tatgttgtcttcttaaggagccctc

SEQ ID NO: 2760596 - DNA, 25 bp, Homo sapien
cagtttcagggtgaatgagaaagaa

SEQ ID NO: 2760597 - DNA, 25 bp, Homo sapien
aagctgataattggtgtttcttaca

SEQ ID NO: 2760598 - DNA, 25 bp, Homo sapien
tccacacatcaaggtaaaggcgtcc

SEQ ID NO: 2760599 - DNA, 25 bp, Homo sapien
ttgtgaagcacaagtggaagctgat

SEQ ID NO: 2760600 - DNA, 25 bp, Homo sapien
caaatcaacggcttgtctccacaca

SEQ ID NO: 2760601 - DNA, 25 bp, Homo sapien
tgacttgcaacatttaccactggga

SEQ ID NO: 2760602 - DNA, 25 bp, Homo sapien
gagtgtgtagtaagtaactggcctc

SEQ ID NO: 2760603 - DNA, 25 bp, Homo sapien
tatgccgccacaaaaaggaaatgag

SEQ ID NO: 2760604 - DNA, 25 bp, Homo sapien
gcagaacgaagagcctagaggtcag

SEQ ID NO: 2760605 - DNA, 25 bp, Homo sapien
tcagggtagcgtgcacaatcttcat

SEQ ID NO: 2760606 - DNA, 25 bp, Homo sapien
tgccctcagggtagcgtgcacaatc

SEQ ID NO: 2760607 - DNA, 25 bp, Homo sapien
cttctgccctcagggtagcgtgcac

SEQ ID NO: 2760608 - DNA, 25 bp, Homo sapien
gggtagcgtgcacaatcttcatcac

SEQ ID NO: 2760609 - DNA, 25 bp, Homo sapien
cccctgtggtttcatcaatggtaaa

SEQ ID NO: 2760610 - DNA, 25 bp, Homo sapien
cagcgccatctcctgagagggtgta

SEQ ID NO: 2760611 - DNA, 25 bp, Homo sapien
tgtccacagcctgagcacgaagagt

SEQ ID NO: 2760612 - DNA, 25 bp, Homo sapien
taggctccttattgcatgaatgtcc

SEQ ID NO: 2760613 - DNA, 25 bp, Homo sapien
gcgtcagggtataggcctctttttc

SEQ ID NO: 2760614 - DNA, 25 bp, Homo sapien
aatgaaacgtggtgtgtacttccta

SEQ ID NO: 2760615 - DNA, 25 bp, Homo sapien
acttcctactgatgcgtcagggtat

SEQ ID NO: 2760616 - DNA, 25 bp, Homo sapien
tcatgtaaattgatatgcaaagcca

SEQ ID NO: 2760617 - DNA, 25 bp, Homo sapien
tctgtagtaattgtcaaagctagtt

SEQ ID NO: 2760618 - DNA, 25 bp, Homo sapien
tatgaagccactctcagtgcataga

SEQ ID NO: 2760619 - DNA, 25 bp, Homo sapien
tgtcaaagctagttatgaagccact

SEQ ID NO: 2760620 - DNA, 25 bp, Homo sapien
gcatagaaatcctacactgaacccc

SEQ ID NO: 2760621 - DNA, 25 bp, Homo sapien
tgaaatgctttctcgggtaatttca

SEQ ID NO: 2760622 - DNA, 25 bp, Homo sapien
aatgctttctcgggtaatttcattc

SEQ ID NO: 2760623 - DNA, 25 bp, Homo sapien
atttgaaatgctttctcgggtaatt

SEQ ID NO: 2760624 - DNA, 25 bp, Homo sapien
atgctttctcgggtaatttcattca

SEQ ID NO: 2760625 - DNA, 25 bp, Homo sapien
gctccttcacgattacatgagtcag

SEQ ID NO: 2760626 - DNA, 25 bp, Homo sapien
tattctgccagcgtactgcctttgg

SEQ ID NO: 2760627 - DNA, 25 bp, Homo sapien
gatggcttacactgcagatcggaca

SEQ ID NO: 2760628 - DNA, 25 bp, Homo sapien
gagtaaaacagattagatgggcttc

SEQ ID NO: 2760629 - DNA, 25 bp, Homo sapien
cacaaaaaattgattccatacccag

SEQ ID NO: 2760630 - DNA, 25 bp, Homo sapien
gctcggagcccacgtattcttccag

SEQ ID NO: 2760631 - DNA, 25 bp, Homo sapien
ctctgtggctaaagtctgctgtggc

SEQ ID NO: 2760632 - DNA, 25 bp, Homo sapien
gaccgttgtcctggcagatggataa

SEQ ID NO: 2760633 - DNA, 25 bp, Homo sapien
taacgtagaattgtggaatccaggt

SEQ ID NO: 2760634 - DNA, 25 bp, Homo sapien
aactccaacacttaacgtagaattg

SEQ ID NO: 2760635 - DNA, 25 bp, Homo sapien
aattgtggaatccaggtttgaggtg

SEQ ID NO: 2760636 - DNA, 25 bp, Homo sapien
gctttcctacagcagagtaataaaa

SEQ ID NO: 2760637 - DNA, 25 bp, Homo sapien
cttttgatgaaaaggcttctgctgt

SEQ ID NO: 2760638 - DNA, 25 bp, Homo sapien
tgtattatattccatctaaaggggc

SEQ ID NO: 2760639 - DNA, 25 bp, Homo sapien
ttttgatgaaaaggcttctgctgta

SEQ ID NO: 2760640 - DNA, 25 bp, Homo sapien
ctgctgtattatattccatctaaag

SEQ ID NO: 2760641 - DNA, 25 bp, Homo sapien
gggctggaaatcgcccacatttgct

SEQ ID NO: 2760642 - DNA, 25 bp, Homo sapien
tgaccacctgggcagcatataaatc

SEQ ID NO: 2760643 - DNA, 25 bp, Homo sapien
acctgggcagcatataaatcctcta

SEQ ID NO: 2760644 - DNA, 25 bp, Homo sapien
ctggaaatcgcccacatttgcttta

SEQ ID NO: 2760645 - DNA, 25 bp, Homo sapien
cagtgtggctcgtgtacgtttccca

SEQ ID NO: 2760646 - DNA, 25 bp, Homo sapien
agtaatatccccagtgtggctcgtg

SEQ ID NO: 2760647 - DNA, 25 bp, Homo sapien
tgtacgtttcccactctgctgatta

SEQ ID NO: 2760648 - DNA, 25 bp, Homo sapien
cattaggggctctgcagtaatatcc

SEQ ID NO: 2760649 - DNA, 25 bp, Homo sapien
caaaagatggcctacctttggaagc

SEQ ID NO: 2760650 - DNA, 25 bp, Homo sapien
ggtaattgtgctaccccaaaagtca

SEQ ID NO: 2760651 - DNA, 25 bp, Homo sapien
gatcataaatctaggaacgttctct

SEQ ID NO: 2760652 - DNA, 25 bp, Homo sapien
tgagaccaaccctttaggctctgat

SEQ ID NO: 2760653 - DNA, 25 bp, Homo sapien
ctggagagccggagggaaaaacctg

SEQ ID NO: 2760654 - DNA, 25 bp, Homo sapien
gccaatcagaagcagtggagggcct

SEQ ID NO: 2760655 - DNA, 25 bp, Homo sapien
tccaatatgacatcaggtggcatct

SEQ ID NO: 2760656 - DNA, 25 bp, Homo sapien
gtttccacagaagaggtctgcttgg

SEQ ID NO: 2760657 - DNA, 25 bp, Homo sapien
tgggtgacccagccccagtgtttta

SEQ ID NO: 2760658 - DNA, 25 bp, Homo sapien
ctgggtgacccagccccagtgtttt

SEQ ID NO: 2760659 - DNA, 25 bp, Homo sapien
tggatccgcaaagtagacacttggt

SEQ ID NO: 2760660 - DNA, 25 bp, Homo sapien
ctcgttctggaattcctctatagcc

SEQ ID NO: 2760661 - DNA, 25 bp, Homo sapien
gcccatccgtactaccaggagactg

SEQ ID NO: 2760662 - DNA, 25 bp, Homo sapien
gacacttggtctcatgaagccactg

SEQ ID NO: 2760663 - DNA, 25 bp, Homo sapien
tctgtttgacttaatcgctgctgat

SEQ ID NO: 2760664 - DNA, 25 bp, Homo sapien
tgacttaatcgctgctgataaacac

SEQ ID NO: 2760665 - DNA, 25 bp, Homo sapien
ttcagatgaatttcctctctggcag

SEQ ID NO: 2760666 - DNA, 25 bp, Homo sapien
cagctctctgtttgacttaatcgct

SEQ ID NO: 2760667 - DNA, 25 bp, Homo sapien
tttctcttctgtaggcctggaatca

SEQ ID NO: 2760668 - DNA, 25 bp, Homo sapien
tcaaatatatagctctttggactca

SEQ ID NO: 2760669 - DNA, 25 bp, Homo sapien
ttctcttctgtaggcctggaatcaa

SEQ ID NO: 2760670 - DNA, 25 bp, Homo sapien
tggactcaatggctctgccatgccc

SEQ ID NO: 2760671 - DNA, 25 bp, Homo sapien
accacaatgcctggctaactttaga

SEQ ID NO: 2760672 - DNA, 25 bp, Homo sapien
acggagtttcactttgtcgcccaag

SEQ ID NO: 2760673 - DNA, 25 bp, Homo sapien
gcagtggggcgatcttaactcactg

SEQ ID NO: 2760674 - DNA, 25 bp, Homo sapien
ctggagtgcagtggggcgatcttaa

SEQ ID NO: 2760675 - DNA, 25 bp, Homo sapien
tgttgccaagtcacacaatgcctag

SEQ ID NO: 2760676 - DNA, 25 bp, Homo sapien
gatgacttcattgcccagatattaa

SEQ ID NO: 2760677 - DNA, 25 bp, Homo sapien
tgtgcagaaccagctcaaagtctgg

SEQ ID NO: 2760678 - DNA, 25 bp, Homo sapien
caaagtctggatgtaagccagccat

SEQ ID NO: 2760679 - DNA, 25 bp, Homo sapien
taacgtccacaaatgtcctgtgcct

SEQ ID NO: 2760680 - DNA, 25 bp, Homo sapien
gtcctgtgcctattagcattttaaa

SEQ ID NO: 2760681 - DNA, 25 bp, Homo sapien
catttctacaccatgtaatctcaca

SEQ ID NO: 2760682 - DNA, 25 bp, Homo sapien
tacaccatgtaatctcacataacgt

SEQ ID NO: 2760683 - DNA, 25 bp, Homo sapien
ctggacccagatgacccaaactgtg

SEQ ID NO: 2760684 - DNA, 25 bp, Homo sapien
gattgcttctaaatatctgtgagag

SEQ ID NO: 2760685 - DNA, 25 bp, Homo sapien
cttttgaggattatggttccaggga

SEQ ID NO: 2760686 - DNA, 25 bp, Homo sapien
gaaatactttccagaattattgctg

SEQ ID NO: 2760687 - DNA, 25 bp, Homo sapien
tttaccttggcaatgcacaaccctc

SEQ ID NO: 2760688 - DNA, 25 bp, Homo sapien
tgacacagtcacttgctgcagtgca

SEQ ID NO: 2760689 - DNA, 25 bp, Homo sapien
cagtcacccggataaagcagcactt

SEQ ID NO: 2760690 - DNA, 25 bp, Homo sapien
tccaacgccgttttcactccaggaa

SEQ ID NO: 2760691 - DNA, 25 bp, Homo sapien
gagaaatccgtcaaatcaaccgtga

SEQ ID NO: 2760692 - DNA, 25 bp, Homo sapien
gatcgaagttttcaatcaacaccct

SEQ ID NO: 2760693 - DNA, 25 bp, Homo sapien
attttctctgtgaacgaggtgagaa

SEQ ID NO: 2760694 - DNA, 25 bp, Homo sapien
gggagatcgaagttttcaatcaaca

SEQ ID NO: 2760695 - DNA, 25 bp, Homo sapien
tggaggctccctaacactcttggca

SEQ ID NO: 2760696 - DNA, 25 bp, Homo sapien
gagattctccgtgagcgtgctccgt

SEQ ID NO: 2760697 - DNA, 25 bp, Homo sapien
gactaagcgatgtttctgaacggga

SEQ ID NO: 2760698 - DNA, 25 bp, Homo sapien
gaaatcctccgaggttcccagtgag

SEQ ID NO: 2760699 - DNA, 25 bp, Homo sapien
aggagattagctgccgtgctagcca

SEQ ID NO: 2760700 - DNA, 25 bp, Homo sapien
gtcttttccagcctaatggatgaac

SEQ ID NO: 2760701 - DNA, 25 bp, Homo sapien
cgcaggcaacacacgccgagggttg

SEQ ID NO: 2760702 - DNA, 25 bp, Homo sapien
tgattagcaagaacgctccgggtgc

SEQ ID NO: 2760703 - DNA, 25 bp, Homo sapien
agaatctgctagatttatgaacttg

SEQ ID NO: 2760704 - DNA, 25 bp, Homo sapien
cttgagaatttagtcttgtagaatc

SEQ ID NO: 2760705 - DNA, 25 bp, Homo sapien
aatttagtcttgtagaatctgctag

SEQ ID NO: 2760706 - DNA, 25 bp, Homo sapien
tgtagaatctgctagatttatgaac

SEQ ID NO: 2760707 - DNA, 25 bp, Homo sapien
gtgcctgctactacgaagcccagct

SEQ ID NO: 2760708 - DNA, 25 bp, Homo sapien
ggtgcctgctactacgaagcccagc

SEQ ID NO: 2760709 - DNA, 25 bp, Homo sapien
aggtgcctgctactacgaagcccag

SEQ ID NO: 2760710 - DNA, 25 bp, Homo sapien
gctccagctcagctagtgtctctgc

SEQ ID NO: 2760711 - DNA, 25 bp, Homo sapien
gaatgctctcaatggcagacaaact

SEQ ID NO: 2760712 - DNA, 25 bp, Homo sapien
acctcttctagagtggacttgggcc

SEQ ID NO: 2760713 - DNA, 25 bp, Homo sapien
cactcggggctaatacaagacactt

SEQ ID NO: 2760714 - DNA, 25 bp, Homo sapien
tctttcttgtaagggttggcatgtg

SEQ ID NO: 2760715 - DNA, 25 bp, Homo sapien
gatctttcttgtaagggttggcatg

SEQ ID NO: 2760716 - DNA, 25 bp, Homo sapien
gtggaaaaaggctgatctttcttgt

SEQ ID NO: 2760717 - DNA, 25 bp, Homo sapien
ggaaacagggacattcgacttatac

SEQ ID NO: 2760718 - DNA, 25 bp, Homo sapien
gttagtaacaattaatgctgtgata

SEQ ID NO: 2760719 - DNA, 25 bp, Homo sapien
aacaattaatgctgtgataaaatta

SEQ ID NO: 2760720 - DNA, 25 bp, Homo sapien
caagttagtaacaattaatgctgtg

SEQ ID NO: 2760721 - DNA, 25 bp, Homo sapien
tagtaacaattaatgctgtgataaa

SEQ ID NO: 2760722 - DNA, 25 bp, Homo sapien
tttaaattctgaactccatctttta

SEQ ID NO: 2760723 - DNA, 25 bp, Homo sapien
ttccaatggaaggtgttgatgtata

SEQ ID NO: 2760724 - DNA, 25 bp, Homo sapien
caatggaaggtgttgatgtatacat

SEQ ID NO: 2760725 - DNA, 25 bp, Homo sapien
ttattccaatggaaggtgttgatgt

SEQ ID NO: 2760726 - DNA, 25 bp, Homo sapien
cattttactgagataaccgttagag

SEQ ID NO: 2760727 - DNA, 25 bp, Homo sapien
actaacgttacaggcagcagcgacc

SEQ ID NO: 2760728 - DNA, 25 bp, Homo sapien
ccagagaacctcattgtgaagggca

SEQ ID NO: 2760729 - DNA, 25 bp, Homo sapien
ccacagccctgatagagtcaggatc

SEQ ID NO: 2760730 - DNA, 25 bp, Homo sapien
aataccaatttcaatcctattttga

SEQ ID NO: 2760731 - DNA, 25 bp, Homo sapien
caataccaatttcaatcctattttg

SEQ ID NO: 2760732 - DNA, 25 bp, Homo sapien
cttcaataccaatttcaatcctatt

SEQ ID NO: 2760733 - DNA, 25 bp, Homo sapien
tcaataccaatttcaatcctatttt

SEQ ID NO: 2760734 - DNA, 25 bp, Homo sapien
ttaagagatgtaggctcggatctca

SEQ ID NO: 2760735 - DNA, 25 bp, Homo sapien
gattctcttggtaagatgaactgtg

SEQ ID NO: 2760736 - DNA, 25 bp, Homo sapien
gatctcaaggaccaaatgattctct

SEQ ID NO: 2760737 - DNA, 25 bp, Homo sapien
tcttggtaagatgaactgtgttcac

SEQ ID NO: 2760738 - DNA, 25 bp, Homo sapien
gaatggagtactaatcagccctgta

SEQ ID NO: 2760739 - DNA, 25 bp, Homo sapien
tgtccttccttacagcaatttggga

SEQ ID NO: 2760740 - DNA, 25 bp, Homo sapien
actttgctccagatacctagtgatc

SEQ ID NO: 2760741 - DNA, 25 bp, Homo sapien
tactggatgtgtcgctttgtgaaaa

SEQ ID NO: 2760742 - DNA, 25 bp, Homo sapien
tactgccttgaacaacttagaaaac

SEQ ID NO: 2760743 - DNA, 25 bp, Homo sapien
tctcataccattttagcaattcctg

SEQ ID NO: 2760744 - DNA, 25 bp, Homo sapien
tgcacacataacataaagctcattt

SEQ ID NO: 2760745 - DNA, 25 bp, Homo sapien
cattaggcaattggctttcagcaca

SEQ ID NO: 2760746 - DNA, 25 bp, Homo sapien
tatttccacccatagttctcaggag

SEQ ID NO: 2760747 - DNA, 25 bp, Homo sapien
gactgaaaacaggtcactaaggttc

SEQ ID NO: 2760748 - DNA, 25 bp, Homo sapien
gactggtattgactttgtagcacaa

SEQ ID NO: 2760749 - DNA, 25 bp, Homo sapien
catgcttgaaccactaaagggaaat

SEQ ID NO: 2760750 - DNA, 25 bp, Homo sapien
ttctgattctttcggacaccattgg

SEQ ID NO: 2760751 - DNA, 25 bp, Homo sapien
ctgattctttcggacaccattggaa

SEQ ID NO: 2760752 - DNA, 25 bp, Homo sapien
attctttcggacaccattggaagtt

SEQ ID NO: 2760753 - DNA, 25 bp, Homo sapien
tgattctttcggacaccattggaag

SEQ ID NO: 2760754 - DNA, 25 bp, Homo sapien
taacttgattctatagcactggaca

SEQ ID NO: 2760755 - DNA, 25 bp, Homo sapien
taaggccagcttatgtatctcaaat

SEQ ID NO: 2760756 - DNA, 25 bp, Homo sapien
atttattttctaaggccagcttatg

SEQ ID NO: 2760757 - DNA, 25 bp, Homo sapien
gttttgacctccacagtaacttgat

SEQ ID NO: 2760758 - DNA, 25 bp, Homo sapien
tttctctgcctagattagactccat

SEQ ID NO: 2760759 - DNA, 25 bp, Homo sapien
ttcggtaaaccttcattttctctgc

SEQ ID NO: 2760760 - DNA, 25 bp, Homo sapien
cttcggtaaaccttcattttctctg

SEQ ID NO: 2760761 - DNA, 25 bp, Homo sapien
gattcatccacaggaaagatagttg

SEQ ID NO: 2760762 - DNA, 25 bp, Homo sapien
gcatgatcagctgattcatccacag

SEQ ID NO: 2760763 - DNA, 25 bp, Homo sapien
tcatgcatgatcagctgattcatcc

SEQ ID NO: 2760764 - DNA, 25 bp, Homo sapien
ccacaggaaagatagttgagaggat

SEQ ID NO: 2760765 - DNA, 25 bp, Homo sapien
aatatttaagcctcttggcatttca

SEQ ID NO: 2760766 - DNA, 25 bp, Homo sapien
acaaatctcttgctgtttataatta

SEQ ID NO: 2760767 - DNA, 25 bp, Homo sapien
gcatttcatggtacacttctagcat

SEQ ID NO: 2760768 - DNA, 25 bp, Homo sapien
taagcaaatgtgtccttcaatagac

SEQ ID NO: 2760769 - DNA, 25 bp, Homo sapien
ggattatgaaggttaggaagccatt

SEQ ID NO: 2760770 - DNA, 25 bp, Homo sapien
tgtagctgtactcccattattgaga

SEQ ID NO: 2760771 - DNA, 25 bp, Homo sapien
agtgctcttacgtaagcctcccaaa

SEQ ID NO: 2760772 - DNA, 25 bp, Homo sapien
gaactcccagtgtcaagtgctctta

SEQ ID NO: 2760773 - DNA, 25 bp, Homo sapien
cagtgtagggcacttctgagccctt

SEQ ID NO: 2760774 - DNA, 25 bp, Homo sapien
tgtagggcacttctgagcccttttt

SEQ ID NO: 2760775 - DNA, 25 bp, Homo sapien
taaggtagatgatagtcatcagatt

SEQ ID NO: 2760776 - DNA, 25 bp, Homo sapien
cagattaattggtagatatgaagct

SEQ ID NO: 2760777 - DNA, 25 bp, Homo sapien
tttccattgcaaatgcccaggtgtc

SEQ ID NO: 2760778 - DNA, 25 bp, Homo sapien
tcaaacaagtttccaaaggtgttgc

SEQ ID NO: 2760779 - DNA, 25 bp, Homo sapien
aataggactgccatagttttttcca

SEQ ID NO: 2760780 - DNA, 25 bp, Homo sapien
tccaaaggtgttgccgatcaatagg

SEQ ID NO: 2760781 - DNA, 25 bp, Homo sapien
tcttcttcagatgtgctaattgcaa

SEQ ID NO: 2760782 - DNA, 25 bp, Homo sapien
tcttcagatgtgctaattgcaactc

SEQ ID NO: 2760783 - DNA, 25 bp, Homo sapien
gatgtgctaattgcaactctaacaa

SEQ ID NO: 2760784 - DNA, 25 bp, Homo sapien
atttatcttcttcagatgtgctaat

SEQ ID NO: 2760785 - DNA, 25 bp, Homo sapien
agagccaagctgttaggtaacaaag

SEQ ID NO: 2760786 - DNA, 25 bp, Homo sapien
aaagagccaagctgttaggtaacaa

SEQ ID NO: 2760787 - DNA, 25 bp, Homo sapien
caaaagagccaagctgttaggtaac

SEQ ID NO: 2760788 - DNA, 25 bp, Homo sapien
tcccaaaagagccaagctgttaggt

SEQ ID NO: 2760789 - DNA, 25 bp, Homo sapien
tgaactgggggtgttcggtcacata

SEQ ID NO: 2760790 - DNA, 25 bp, Homo sapien
ttccttgacttcatattgaactggg

SEQ ID NO: 2760791 - DNA, 25 bp, Homo sapien
gggggtgttcggtcacataggatac

SEQ ID NO: 2760792 - DNA, 25 bp, Homo sapien
caatttccttgacttcatattgaac

SEQ ID NO: 2760793 - DNA, 25 bp, Homo sapien
ctcagagaagcaacttcgggctcta

SEQ ID NO: 2760794 - DNA, 25 bp, Homo sapien
gagaagcaacttcgggctctacttg

SEQ ID NO: 2760795 - DNA, 25 bp, Homo sapien
gcaacttcgggctctacttgtgggt

SEQ ID NO: 2760796 - DNA, 25 bp, Homo sapien
agcaacttcgggctctacttgtggg

SEQ ID NO: 2760797 - DNA, 25 bp, Homo sapien
gactactgattacagagaaagcaca

SEQ ID NO: 2760798 - DNA, 25 bp, Homo sapien
gctgtgaggatgtccaagttagact

SEQ ID NO: 2760799 - DNA, 25 bp, Homo sapien
gattttggtgcaccaatcgccggag

SEQ ID NO: 2760800 - DNA, 25 bp, Homo sapien
gaaagcacactagttgcaatgaaga

SEQ ID NO: 2760801 - DNA, 25 bp, Homo sapien
tacttgagtgacacttcccctgtca

SEQ ID NO: 2760802 - DNA, 25 bp, Homo sapien
cagggctttggcagttcgccagaaa

SEQ ID NO: 2760803 - DNA, 25 bp, Homo sapien
gggctttggcagttcgccagaaact

SEQ ID NO: 2760804 - DNA, 25 bp, Homo sapien
gctttggcagttcgccagaaactct

SEQ ID NO: 2760805 - DNA, 25 bp, Homo sapien
tggcagttcgccagaaactcttcat

SEQ ID NO: 2760806 - DNA, 25 bp, Homo sapien
agggaaaggcattgccagcaattct

SEQ ID NO: 2760807 - DNA, 25 bp, Homo sapien
gggaaaggcattgccagcaattctg

SEQ ID NO: 2760808 - DNA, 25 bp, Homo sapien
aatctgaaaggaccaatcaatttgt

SEQ ID NO: 2760809 - DNA, 25 bp, Homo sapien
tttgtgcatcaactttttattatcc

SEQ ID NO: 2760810 - DNA, 25 bp, Homo sapien
gaaaggaccaatcaatttgtgcatc

SEQ ID NO: 2760811 - DNA, 25 bp, Homo sapien
gcctttgagattttactcagaaagc

SEQ ID NO: 2760812 - DNA, 25 bp, Homo sapien
ggccatgcgcagtcctgctttgaag

SEQ ID NO: 2760813 - DNA, 25 bp, Homo sapien
tcattcagtgctgatatctgaagac

SEQ ID NO: 2760814 - DNA, 25 bp, Homo sapien
gctttgaagttctcactacctggct

SEQ ID NO: 2760815 - DNA, 25 bp, Homo sapien
ttctggttgcatgatggccatgcgc

SEQ ID NO: 2760816 - DNA, 25 bp, Homo sapien
ccagagaggaaaagaccatggaagg

SEQ ID NO: 2760817 - DNA, 25 bp, Homo sapien
aggaaaagaccatggaaggtgaaag

SEQ ID NO: 2760818 - DNA, 25 bp, Homo sapien
agaggaaaagaccatggaaggtgaa

SEQ ID NO: 2760819 - DNA, 25 bp, Homo sapien
ctgtccagagaggaaaagaccatgg

SEQ ID NO: 2760820 - DNA, 25 bp, Homo sapien
cctgcgtattacaaaggctgaaagc

SEQ ID NO: 2760821 - DNA, 25 bp, Homo sapien
gtaaaagctactcaaccagtcagcc

SEQ ID NO: 2760822 - DNA, 25 bp, Homo sapien
gacccataacattgtaaaagctact

SEQ ID NO: 2760823 - DNA, 25 bp, Homo sapien
ctgagtccctgattagacccataac

SEQ ID NO: 2760824 - DNA, 25 bp, Homo sapien
tccaagcttcatgtctcagataatc

SEQ ID NO: 2760825 - DNA, 25 bp, Homo sapien
caagcttcatgtctcagataatcat

SEQ ID NO: 2760826 - DNA, 25 bp, Homo sapien
atctccaagcttcatgtctcagata

SEQ ID NO: 2760827 - DNA, 25 bp, Homo sapien
gcttcatgtctcagataatcattca

SEQ ID NO: 2760828 - DNA, 25 bp, Homo sapien
tcgatgtcaagcttattggcaaaca

SEQ ID NO: 2760829 - DNA, 25 bp, Homo sapien
gaggtcgtcgatgtcaagcttattg

SEQ ID NO: 2760830 - DNA, 25 bp, Homo sapien
gatggcaaagaggtcgtcgatgtca

SEQ ID NO: 2760831 - DNA, 25 bp, Homo sapien
caaagaggtcgtcgatgtcaagctt

SEQ ID NO: 2760832 - DNA, 25 bp, Homo sapien
caagtgcacgtggtccccatcgtag

SEQ ID NO: 2760833 - DNA, 25 bp, Homo sapien
gcgtgtcagacaagtcatacttatg

SEQ ID NO: 2760834 - DNA, 25 bp, Homo sapien
agtgcacgtggtccccatcgtaggg

SEQ ID NO: 2760835 - DNA, 25 bp, Homo sapien
gacaaacctggcgactgcatgcgtg

SEQ ID NO: 2760836 - DNA, 25 bp, Homo sapien
tccaaaaacctcatactgctttttc

SEQ ID NO: 2760837 - DNA, 25 bp, Homo sapien
caggctgtactttcggcatgttgcc

SEQ ID NO: 2760838 - DNA, 25 bp, Homo sapien
acaggctgtactttcggcatgttgc

SEQ ID NO: 2760839 - DNA, 25 bp, Homo sapien
agcacaatcttagccacactgggac

SEQ ID NO: 2760840 - DNA, 25 bp, Homo sapien
cacactgggacttgggcttctcaaa

SEQ ID NO: 2760841 - DNA, 25 bp, Homo sapien
gcttcctagctttcaacagcacaat

SEQ ID NO: 2760842 - DNA, 25 bp, Homo sapien
tcaacagcacaatcttagccacact

SEQ ID NO: 2760843 - DNA, 25 bp, Homo sapien
agcattctgggaggccgagactgga

SEQ ID NO: 2760844 - DNA, 25 bp, Homo sapien
attctgggaggccgagactggatgg

SEQ ID NO: 2760845 - DNA, 25 bp, Homo sapien
cagcattctgggaggccgagactgg

SEQ ID NO: 2760846 - DNA, 25 bp, Homo sapien
aataataaataaaaagccaggcatg

SEQ ID NO: 2760847 - DNA, 25 bp, Homo sapien
gattctctccccactaattagcccc

SEQ ID NO: 2760848 - DNA, 25 bp, Homo sapien
ttctctccccactaattagccccat

SEQ ID NO: 2760849 - DNA, 25 bp, Homo sapien
tgattctctccccactaattagccc

SEQ ID NO: 2760850 - DNA, 25 bp, Homo sapien
attctctccccactaattagcccca

SEQ ID NO: 2760851 - DNA, 25 bp, Homo sapien
gatgtcttaaagatacctcaagggc

SEQ ID NO: 2760852 - DNA, 25 bp, Homo sapien
gacgctttctgcctcatatatccaa

SEQ ID NO: 2760853 - DNA, 25 bp, Homo sapien
taaatggacccaattccaatgcagt

SEQ ID NO: 2760854 - DNA, 25 bp, Homo sapien
cacttgagactaatttgaacaccct

SEQ ID NO: 2760855 - DNA, 25 bp, Homo sapien
gtaatctctatctttctgatttggg

SEQ ID NO: 2760856 - DNA, 25 bp, Homo sapien
tgctgtaatctctatctttctgatt

SEQ ID NO: 2760857 - DNA, 25 bp, Homo sapien
tgtaatctctatctttctgatttgg

SEQ ID NO: 2760858 - DNA, 25 bp, Homo sapien
tctctatctttctgatttggggcat

SEQ ID NO: 2760859 - DNA, 25 bp, Homo sapien
tgtgacacaatacacactgcgtaag

SEQ ID NO: 2760860 - DNA, 25 bp, Homo sapien
tacatacactggttgtagatgggag

SEQ ID NO: 2760861 - DNA, 25 bp, Homo sapien
gccgaccttaggctaattctttagc

SEQ ID NO: 2760862 - DNA, 25 bp, Homo sapien
cagtaatattcatgtctcagggttg

SEQ ID NO: 2760863 - DNA, 25 bp, Homo sapien
tcagcactaggattcacaaaaacac

SEQ ID NO: 2760864 - DNA, 25 bp, Homo sapien
tctctgttagagtaggcagatagcc

SEQ ID NO: 2760865 - DNA, 25 bp, Homo sapien
aattgtaacccctatgtgttgaagg

SEQ ID NO: 2760866 - DNA, 25 bp, Homo sapien
gcagatagccagaagcgagcaggaa

SEQ ID NO: 2760867 - DNA, 25 bp, Homo sapien
cgagataattaataggagcactgct

SEQ ID NO: 2760868 - DNA, 25 bp, Homo sapien
gcggccgatacccatggcaggagct

SEQ ID NO: 2760869 - DNA, 25 bp, Homo sapien
gagctctcgtcatctaactgccaca

SEQ ID NO: 2760870 - DNA, 25 bp, Homo sapien
gtctccagcactatggcgagataat

SEQ ID NO: 2760871 - DNA, 25 bp, Homo sapien
ttgacagccactatcagtagcagca

SEQ ID NO: 2760872 - DNA, 25 bp, Homo sapien
cttagacccttctggcgaagcatct

SEQ ID NO: 2760873 - DNA, 25 bp, Homo sapien
accattgacagccactatcagtagc

SEQ ID NO: 2760874 - DNA, 25 bp, Homo sapien
gaagcatctctaaagaagaccattg

SEQ ID NO: 2760875 - DNA, 25 bp, Homo sapien
gagaaacacgaagcgaaaatgcaga

SEQ ID NO: 2760876 - DNA, 25 bp, Homo sapien
agaaatggctgccttcaaactattt

SEQ ID NO: 2760877 - DNA, 25 bp, Homo sapien
gctccttcggcaatagcactttgat

SEQ ID NO: 2760878 - DNA, 25 bp, Homo sapien
gcactttgatgtttatcaaagccta

SEQ ID NO: 2760879 - DNA, 25 bp, Homo sapien
gataaatttaatgatccttggcata

SEQ ID NO: 2760880 - DNA, 25 bp, Homo sapien
tgaatagtaatatagtcacttgaaa

SEQ ID NO: 2760881 - DNA, 25 bp, Homo sapien
catctattaagcttgagaatcattg

SEQ ID NO: 2760882 - DNA, 25 bp, Homo sapien
tgatttttgtgtacggcccctaaca

SEQ ID NO: 2760883 - DNA, 25 bp, Homo sapien
tgtcatctgtacgatgatctgctta

SEQ ID NO: 2760884 - DNA, 25 bp, Homo sapien
caaatatgtcatctgtacgatgatc

SEQ ID NO: 2760885 - DNA, 25 bp, Homo sapien
ctacaacttaactggagcggagtct

SEQ ID NO: 2760886 - DNA, 25 bp, Homo sapien
caacttaactggagcggagtctggg

SEQ ID NO: 2760887 - DNA, 25 bp, Homo sapien
ggtgatctctagataacgaaaatgc

SEQ ID NO: 2760888 - DNA, 25 bp, Homo sapien
tacctctcaatagcctctccttagg

SEQ ID NO: 2760889 - DNA, 25 bp, Homo sapien
tactagtcgtaatatttctgttcag

SEQ ID NO: 2760890 - DNA, 25 bp, Homo sapien
aaattgatctccctatacctctcaa

SEQ ID NO: 2760891 - DNA, 25 bp, Homo sapien
cttgttctcgatttgcaaaaatatt

SEQ ID NO: 2760892 - DNA, 25 bp, Homo sapien
tcctgtttccatacttggcatggcc

SEQ ID NO: 2760893 - DNA, 25 bp, Homo sapien
aatgtgatggctcatcagttccaaa

SEQ ID NO: 2760894 - DNA, 25 bp, Homo sapien
ccaaaatcatctcctgtttccatac

SEQ ID NO: 2760895 - DNA, 25 bp, Homo sapien
tcaatgtgatggctcatcagttcca

SEQ ID NO: 2760896 - DNA, 25 bp, Homo sapien
cttgaacgcctgacacatgtgttcc

SEQ ID NO: 2760897 - DNA, 25 bp, Homo sapien
cattaaacgagcctagcagcgggtg

SEQ ID NO: 2760898 - DNA, 25 bp, Homo sapien
gctttgaatgaatccgaggactcct

SEQ ID NO: 2760899 - DNA, 25 bp, Homo sapien
caataatgctctcggagcggctgga

SEQ ID NO: 2760900 - DNA, 25 bp, Homo sapien
gccttgcgcggaaggtgagaccctt

SEQ ID NO: 2760901 - DNA, 25 bp, Homo sapien
catatactctacttggcccaggctc

SEQ ID NO: 2760902 - DNA, 25 bp, Homo sapien
gactccctgaagcagtacagccatt

SEQ ID NO: 2760903 - DNA, 25 bp, Homo sapien
cgatgtgacgattcactaagtatat

SEQ ID NO: 2760904 - DNA, 25 bp, Homo sapien
cagccatttccttacgatgtgacga

SEQ ID NO: 2760905 - DNA, 25 bp, Homo sapien
ttaattgctgtacttatatgatttc

SEQ ID NO: 2760906 - DNA, 25 bp, Homo sapien
taattgctgtacttatatgatttct

SEQ ID NO: 2760907 - DNA, 25 bp, Homo sapien
aattgctgtacttatatgatttctc

SEQ ID NO: 2760908 - DNA, 25 bp, Homo sapien
attgctgtacttatatgatttctca

SEQ ID NO: 2760909 - DNA, 25 bp, Homo sapien
gcttggcctttgcactacctacccc

SEQ ID NO: 2760910 - DNA, 25 bp, Homo sapien
cttggcctttgcactacctacccct

SEQ ID NO: 2760911 - DNA, 25 bp, Homo sapien
tggcctttgcactacctacccctga

SEQ ID NO: 2760912 - DNA, 25 bp, Homo sapien
ttggcctttgcactacctacccctg

SEQ ID NO: 2760913 - DNA, 25 bp, Homo sapien
ttctcctctctccccctctgcatgt

SEQ ID NO: 2760914 - DNA, 25 bp, Homo sapien
tcctctctccccctctgcatgttgc

SEQ ID NO: 2760915 - DNA, 25 bp, Homo sapien
cagagtttgccacttttctcctctc

SEQ ID NO: 2760916 - DNA, 25 bp, Homo sapien
tcagagtttgccacttttctcctct

SEQ ID NO: 2760917 - DNA, 25 bp, Homo sapien
tgcttggtagatctgaagatgacag

SEQ ID NO: 2760918 - DNA, 25 bp, Homo sapien
tttcctttccttccgctgtagcagc

SEQ ID NO: 2760919 - DNA, 25 bp, Homo sapien
cctggcagcttctgtacacacttta

SEQ ID NO: 2760920 - DNA, 25 bp, Homo sapien
ggtaacttgtcaacatattgtcaac

SEQ ID NO: 2760921 - DNA, 25 bp, Homo sapien
acaagctaattcttgcaactgcatc

SEQ ID NO: 2760922 - DNA, 25 bp, Homo sapien
tccaaacttttcagtgccagcacgt

SEQ ID NO: 2760923 - DNA, 25 bp, Homo sapien
gcatcagtgtatggcctatttccaa

SEQ ID NO: 2760924 - DNA, 25 bp, Homo sapien
gccagcacgtcaacagatagtgtat

SEQ ID NO: 2760925 - DNA, 25 bp, Homo sapien
ggaatcttcttcaaactgatgtccc

SEQ ID NO: 2760926 - DNA, 25 bp, Homo sapien
tcttcaaactgatgtccccagtgcc

SEQ ID NO: 2760927 - DNA, 25 bp, Homo sapien
cccagtgcctcttgaaagtattctg

SEQ ID NO: 2760928 - DNA, 25 bp, Homo sapien
cagtttcccttacagacaccaagga

SEQ ID NO: 2760929 - DNA, 25 bp, Homo sapien
taataaaattgcatgctaagtcacg

SEQ ID NO: 2760930 - DNA, 25 bp, Homo sapien
gaaagggcctgagtaactacattga

SEQ ID NO: 2760931 - DNA, 25 bp, Homo sapien
gcatgctaagtcacgtcttttattc

SEQ ID NO: 2760932 - DNA, 25 bp, Homo sapien
taatctaggctatggatattgtaag

SEQ ID NO: 2760933 - DNA, 25 bp, Homo sapien
gctaagtgggtgatgggtggctgcc

SEQ ID NO: 2760934 - DNA, 25 bp, Homo sapien
tgattgcagtaatgggctaagtggg

SEQ ID NO: 2760935 - DNA, 25 bp, Homo sapien
gccatgggccaagggaactatggac

SEQ ID NO: 2760936 - DNA, 25 bp, Homo sapien
tggctgccatgggccaagggaacta

SEQ ID NO: 2760937 - DNA, 25 bp, Homo sapien
catgatcggtattattattactgtc

SEQ ID NO: 2760938 - DNA, 25 bp, Homo sapien
taatattattcacgttgtcttcatg

SEQ ID NO: 2760939 - DNA, 25 bp, Homo sapien
tcatcacaataatcaccatgatcgg

SEQ ID NO: 2760940 - DNA, 25 bp, Homo sapien
tgtcttcatgtccaatatcatactt

SEQ ID NO: 2760941 - DNA, 25 bp, Homo sapien
taatcctttctgcgctgtgacctca

SEQ ID NO: 2760942 - DNA, 25 bp, Homo sapien
cttttaatcctttctgcgctgtgac

SEQ ID NO: 2760943 - DNA, 25 bp, Homo sapien
ctgcaggacatccaccttgccactg

SEQ ID NO: 2760944 - DNA, 25 bp, Homo sapien
cactgcacagtttgtcttttaatcc

SEQ ID NO: 2760945 - DNA, 25 bp, Homo sapien
tttattccactctttggctcgtgca

SEQ ID NO: 2760946 - DNA, 25 bp, Homo sapien
ttggctcgtgcatctgtgttatact

SEQ ID NO: 2760947 - DNA, 25 bp, Homo sapien
gacaaagtaactatttgcctgaatt

SEQ ID NO: 2760948 - DNA, 25 bp, Homo sapien
tgtgttatactgcaaatgaccatag

SEQ ID NO: 2760949 - DNA, 25 bp, Homo sapien
cctttctcaatagggcaaggttgat

SEQ ID NO: 2760950 - DNA, 25 bp, Homo sapien
ggttgatattaagagctggtctcct

SEQ ID NO: 2760951 - DNA, 25 bp, Homo sapien
taaattcctttctcaatagggcaag

SEQ ID NO: 2760952 - DNA, 25 bp, Homo sapien
tgctgagaacgattatcaaggactt

SEQ ID NO: 2760953 - DNA, 25 bp, Homo sapien
tctttctctgtaactgctctggtag

SEQ ID NO: 2760954 - DNA, 25 bp, Homo sapien
ctttctctgtaactgctctggtagc

SEQ ID NO: 2760955 - DNA, 25 bp, Homo sapien
ctctttctctgtaactgctctggta

SEQ ID NO: 2760956 - DNA, 25 bp, Homo sapien
gctgcctcttaattaagccatgttc

SEQ ID NO: 2760957 - DNA, 25 bp, Homo sapien
tgttgctgcctcttaattaagccat

SEQ ID NO: 2760958 - DNA, 25 bp, Homo sapien
gttgctgcctcttaattaagccatg

SEQ ID NO: 2760959 - DNA, 25 bp, Homo sapien
tctgttgctgcctcttaattaagcc

SEQ ID NO: 2760960 - DNA, 25 bp, Homo sapien
ctacacaactcttcgtagttctcca

SEQ ID NO: 2760961 - DNA, 25 bp, Homo sapien
ttttcatgtgcctttctacacaact

SEQ ID NO: 2760962 - DNA, 25 bp, Homo sapien
catgtgcctttctacacaactcttc

SEQ ID NO: 2760963 - DNA, 25 bp, Homo sapien
gtgcctttctacacaactcttcgta

SEQ ID NO: 2760964 - DNA, 25 bp, Homo sapien
ccatgaatccaaagcccaaagtctt

SEQ ID NO: 2760965 - DNA, 25 bp, Homo sapien
ttgttgtagtgtggatagcaatgac

SEQ ID NO: 2760966 - DNA, 25 bp, Homo sapien
tccaaagcccaaagtcttgctgtag

SEQ ID NO: 2760967 - DNA, 25 bp, Homo sapien
ttgtagtgtggatagcaatgacagt

SEQ ID NO: 2760968 - DNA, 25 bp, Homo sapien
tctctctccctgagcggtcctggtg

SEQ ID NO: 2760969 - DNA, 25 bp, Homo sapien
tccctgagcggtcctggtgaccctg

SEQ ID NO: 2760970 - DNA, 25 bp, Homo sapien
gagcggtcctggtgaccctgcttga

SEQ ID NO: 2760971 - DNA, 25 bp, Homo sapien
ctggcatgctaggtttctgggttct

SEQ ID NO: 2760972 - DNA, 25 bp, Homo sapien
ttaattcctgcagcccgacaaaggt

SEQ ID NO: 2760973 - DNA, 25 bp, Homo sapien
cctgcagcccgacaaaggtagctta

SEQ ID NO: 2760974 - DNA, 25 bp, Homo sapien
attaattcctgcagcccgacaaagg

SEQ ID NO: 2760975 - DNA, 25 bp, Homo sapien
attcctgcagcccgacaaaggtagc

SEQ ID NO: 2760976 - DNA, 25 bp, Homo sapien
ccaaacttaggagggctgcagaacc

SEQ ID NO: 2760977 - DNA, 25 bp, Homo sapien
gcagccatccctgagtgaaacagca

SEQ ID NO: 2760978 - DNA, 25 bp, Homo sapien
taaacaataagagcagagccattca

SEQ ID NO: 2760979 - DNA, 25 bp, Homo sapien
tgcagaacccataggccctcttcag

SEQ ID NO: 2760980 - DNA, 25 bp, Homo sapien
tgctacaaattctctattcatcgtt

SEQ ID NO: 2760981 - DNA, 25 bp, Homo sapien
tctgctacaaattctctattcatcg

SEQ ID NO: 2760982 - DNA, 25 bp, Homo sapien
gctacaaattctctattcatcgtta

SEQ ID NO: 2760983 - DNA, 25 bp, Homo sapien
tctctgctacaaattctctattcat

SEQ ID NO: 2760984 - DNA, 25 bp, Homo sapien
accccttctcttctctgacacccac

SEQ ID NO: 2760985 - DNA, 25 bp, Homo sapien
tgttaccccttctcttctctgacac

SEQ ID NO: 2760986 - DNA, 25 bp, Homo sapien
ctgcttcttggtccgtgttacccct

SEQ ID NO: 2760987 - DNA, 25 bp, Homo sapien
ttctgcttcttggtccgtgttaccc

SEQ ID NO: 2760988 - DNA, 25 bp, Homo sapien
cttaattatcttgattccagcagtt

SEQ ID NO: 2760989 - DNA, 25 bp, Homo sapien
attatcttgattccagcagtttgaa

SEQ ID NO: 2760990 - DNA, 25 bp, Homo sapien
aattatcttgattccagcagtttga

SEQ ID NO: 2760991 - DNA, 25 bp, Homo sapien
taattatcttgattccagcagtttg

SEQ ID NO: 2760992 - DNA, 25 bp, Homo sapien
tcttcaagctgtgtacttatcagtg

SEQ ID NO: 2760993 - DNA, 25 bp, Homo sapien
tgaggcctttttctgaggttacagc

SEQ ID NO: 2760994 - DNA, 25 bp, Homo sapien
atctcagcctttggaaaactaccat

SEQ ID NO: 2760995 - DNA, 25 bp, Homo sapien
ggtaaccactgtggatagcagaggc

SEQ ID NO: 2760996 - DNA, 25 bp, Homo sapien
atacttggtctgcttttagcctgag

SEQ ID NO: 2760997 - DNA, 25 bp, Homo sapien
tcagttgttgatgcgatatacttgg

SEQ ID NO: 2760998 - DNA, 25 bp, Homo sapien
tgttgatgcgatatacttggtctgc

SEQ ID NO: 2760999 - DNA, 25 bp, Homo sapien
ggtctgcttttagcctgagtttccg

SEQ ID NO: 2761000 - DNA, 25 bp, Homo sapien
tgcttctatagcgtggaagccttac

SEQ ID NO: 2761001 - DNA, 25 bp, Homo sapien
tatgttgtagttatcagagtgcttc

SEQ ID NO: 2761002 - DNA, 25 bp, Homo sapien
tagttatcagagtgcttctatagcg

SEQ ID NO: 2761003 - DNA, 25 bp, Homo sapien
cagagtgcttctatagcgtggaagc

SEQ ID NO: 2761004 - DNA, 25 bp, Homo sapien
accactttttcgccaaggatttgct

SEQ ID NO: 2761005 - DNA, 25 bp, Homo sapien
aaatgcactctcctggacggcagag

SEQ ID NO: 2761006 - DNA, 25 bp, Homo sapien
gcactctcctggacggcagagaagc

SEQ ID NO: 2761007 - DNA, 25 bp, Homo sapien
tgcactctcctggacggcagagaag

SEQ ID NO: 2761008 - DNA, 25 bp, Homo sapien
ctgaggagggtggagatctgagaag

SEQ ID NO: 2761009 - DNA, 25 bp, Homo sapien
aggagggtggagatctgagaagctg

SEQ ID NO: 2761010 - DNA, 25 bp, Homo sapien
gagggtggagatctgagaagctgaa

SEQ ID NO: 2761011 - DNA, 25 bp, Homo sapien
tgaggagggtggagatctgagaagc

SEQ ID NO: 2761012 - DNA, 25 bp, Homo sapien
taaattggaatttgaggctaacctg

SEQ ID NO: 2761013 - DNA, 25 bp, Homo sapien
cagcgttttggacaattgcacagag

SEQ ID NO: 2761014 - DNA, 25 bp, Homo sapien
cacagagttgatgagaggacataaa

SEQ ID NO: 2761015 - DNA, 25 bp, Homo sapien
tttgaggctaacctgggagaaggat

SEQ ID NO: 2761016 - DNA, 25 bp, Homo sapien
gaaactttaacctatgctggcatgt

SEQ ID NO: 2761017 - DNA, 25 bp, Homo sapien
gaatttgcttaccaatatacagaga

SEQ ID NO: 2761018 - DNA, 25 bp, Homo sapien
tgacctcgagatgttattgtctggg

SEQ ID NO: 2761019 - DNA, 25 bp, Homo sapien
taaacacacgtcagtaattagggta

SEQ ID NO: 2761020 - DNA, 25 bp, Homo sapien
aataacctgattcacccattgctga

SEQ ID NO: 2761021 - DNA, 25 bp, Homo sapien
tttaaacttgcacctcgagctttct

SEQ ID NO: 2761022 - DNA, 25 bp, Homo sapien
ttttaaacttgcacctcgagctttc

SEQ ID NO: 2761023 - DNA, 25 bp, Homo sapien
aaataacctgattcacccattgctg

SEQ ID NO: 2761024 - DNA, 25 bp, Homo sapien
catcccgtgtaaagtaaactcttct

SEQ ID NO: 2761025 - DNA, 25 bp, Homo sapien
tcccgtgtaaagtaaactcttctga

SEQ ID NO: 2761026 - DNA, 25 bp, Homo sapien
ccgtgtaaagtaaactcttctgaga

SEQ ID NO: 2761027 - DNA, 25 bp, Homo sapien
cccgtgtaaagtaaactcttctgag

SEQ ID NO: 2761028 - DNA, 25 bp, Homo sapien
gtttcaatataatgctggactgccg

SEQ ID NO: 2761029 - DNA, 25 bp, Homo sapien
ctccactcttctggtccgctagaga

SEQ ID NO: 2761030 - DNA, 25 bp, Homo sapien
tatttatatattcgtgccctttcct

SEQ ID NO: 2761031 - DNA, 25 bp, Homo sapien
tggcgttggagtacaaggcaggagg

SEQ ID NO: 2761032 - DNA, 25 bp, Homo sapien
atgcttctgtctggaccatccctga

SEQ ID NO: 2761033 - DNA, 25 bp, Homo sapien
tgcttctgtctggaccatccctgac

SEQ ID NO: 2761034 - DNA, 25 bp, Homo sapien
tatgcttctgtctggaccatccctg

SEQ ID NO: 2761035 - DNA, 25 bp, Homo sapien
ctatgcttctgtctggaccatccct

SEQ ID NO: 2761036 - DNA, 25 bp, Homo sapien
tcttggaacttcatctgccaaaagt

SEQ ID NO: 2761037 - DNA, 25 bp, Homo sapien
tccgaaagtgatattgcccgaccgg

SEQ ID NO: 2761038 - DNA, 25 bp, Homo sapien
gttttcttggaacttcatctgccaa

SEQ ID NO: 2761039 - DNA, 25 bp, Homo sapien
gatattgcccgaccggtctctccat

SEQ ID NO: 2761040 - DNA, 25 bp, Homo sapien
aattgttgcacctggtttcaaattc

SEQ ID NO: 2761041 - DNA, 25 bp, Homo sapien
gcaatgtaacacgttttgggctttg

SEQ ID NO: 2761042 - DNA, 25 bp, Homo sapien
tgtggcaatgtaacacgttttgggc

SEQ ID NO: 2761043 - DNA, 25 bp, Homo sapien
atgtaacacgttttgggctttgaat

SEQ ID NO: 2761044 - DNA, 25 bp, Homo sapien
aggctcatcgggatcaccgtcgtgt

SEQ ID NO: 2761045 - DNA, 25 bp, Homo sapien
cgggatcaccgtcgtgtaggacaac

SEQ ID NO: 2761046 - DNA, 25 bp, Homo sapien
tcatcgggatcaccgtcgtgtagga

SEQ ID NO: 2761047 - DNA, 25 bp, Homo sapien
gctcatcgggatcaccgtcgtgtag

SEQ ID NO: 2761048 - DNA, 25 bp, Homo sapien
ggtttccaccatggaattcttcttg

SEQ ID NO: 2761049 - DNA, 25 bp, Homo sapien
gtttccaccatggaattcttcttgt

SEQ ID NO: 2761050 - DNA, 25 bp, Homo sapien
caaggtttccaccatggaattcttc

SEQ ID NO: 2761051 - DNA, 25 bp, Homo sapien
ccaccatggaattcttcttgtaatg

SEQ ID NO: 2761052 - DNA, 25 bp, Homo sapien
tcagaagatatttaagctcaataac

SEQ ID NO: 2761053 - DNA, 25 bp, Homo sapien
ttcagaagatatttaagctcaataa

SEQ ID NO: 2761054 - DNA, 25 bp, Homo sapien
gttcagaagatatttaagctcaata

SEQ ID NO: 2761055 - DNA, 25 bp, Homo sapien
agttcagaagatatttaagctcaat

SEQ ID NO: 2761056 - DNA, 25 bp, Homo sapien
agccaaagtggcacatttctcctct

SEQ ID NO: 2761057 - DNA, 25 bp, Homo sapien
tctccatagaggtcatagtaatcac

SEQ ID NO: 2761058 - DNA, 25 bp, Homo sapien
ttctcctctccatagaggtcatagt

SEQ ID NO: 2761059 - DNA, 25 bp, Homo sapien
acatttctcctctccatagaggtca

SEQ ID NO: 2761060 - DNA, 25 bp, Homo sapien
tcctcttgtcaacagtaggttttct

SEQ ID NO: 2761061 - DNA, 25 bp, Homo sapien
ctcttgtcaacagtaggttttctgc

SEQ ID NO: 2761062 - DNA, 25 bp, Homo sapien
cctcttgtcaacagtaggttttctg

SEQ ID NO: 2761063 - DNA, 25 bp, Homo sapien
ctcctcttgtcaacagtaggttttc

SEQ ID NO: 2761064 - DNA, 25 bp, Homo sapien
tagccaatggtgaagcagaggcttc

SEQ ID NO: 2761065 - DNA, 25 bp, Homo sapien
caccacctagatgaatttggaagca

SEQ ID NO: 2761066 - DNA, 25 bp, Homo sapien
ttcagtcccaaacatcacagagcga

SEQ ID NO: 2761067 - DNA, 25 bp, Homo sapien
gatgagcaggactgatagccaatgg

SEQ ID NO: 2761068 - DNA, 25 bp, Homo sapien
tttcggtcaacgtagaatgtgttaa

SEQ ID NO: 2761069 - DNA, 25 bp, Homo sapien
cggtcaacgtagaatgtgttaaaag

SEQ ID NO: 2761070 - DNA, 25 bp, Homo sapien
ctgatgaattttcggtcaacgtaga

SEQ ID NO: 2761071 - DNA, 25 bp, Homo sapien
gaattttcggtcaacgtagaatgtg

SEQ ID NO: 2761072 - DNA, 25 bp, Homo sapien
gatgctagggctgcttgcatgacat

SEQ ID NO: 2761073 - DNA, 25 bp, Homo sapien
gctgcttgcatgacatatgcttgag

SEQ ID NO: 2761074 - DNA, 25 bp, Homo sapien
tagattttgatgctagggctgcttg

SEQ ID NO: 2761075 - DNA, 25 bp, Homo sapien
catgacatatgcttgagagtcacac

SEQ ID NO: 2761076 - DNA, 25 bp, Homo sapien
gtagctataaccactacccccacca

SEQ ID NO: 2761077 - DNA, 25 bp, Homo sapien
tagctataaccactacccccaccat

SEQ ID NO: 2761078 - DNA, 25 bp, Homo sapien
ggaggccttggccaatctcttgggc

SEQ ID NO: 2761079 - DNA, 25 bp, Homo sapien
gaagggtgtatcttggaggcacaaa

SEQ ID NO: 2761080 - DNA, 25 bp, Homo sapien
ggcggacaaatgaaagcctcagaac

SEQ ID NO: 2761081 - DNA, 25 bp, Homo sapien
caattcataagtctcaaggctcagg

SEQ ID NO: 2761082 - DNA, 25 bp, Homo sapien
tactactactaagattgtgacacct

SEQ ID NO: 2761083 - DNA, 25 bp, Homo sapien
gaccaagaagttattcactcccaag

SEQ ID NO: 2761084 - DNA, 25 bp, Homo sapien
aaaccagttctagattcccgtcaat

SEQ ID NO: 2761085 - DNA, 25 bp, Homo sapien
aacaaggatcttcactggcttaggg

SEQ ID NO: 2761086 - DNA, 25 bp, Homo sapien
ttggtattttgacaacaagtcctga

SEQ ID NO: 2761087 - DNA, 25 bp, Homo sapien
ttttgacaacaagtcctgaagtata

SEQ ID NO: 2761088 - DNA, 25 bp, Homo sapien
attggtattttgacaacaagtcctg

SEQ ID NO: 2761089 - DNA, 25 bp, Homo sapien
tttgacaacaagtcctgaagtatac

SEQ ID NO: 2761090 - DNA, 25 bp, Homo sapien
ctacaacagccaaggattgaagttt

SEQ ID NO: 2761091 - DNA, 25 bp, Homo sapien
tgtgtactctggtgaaagtcttctt

SEQ ID NO: 2761092 - DNA, 25 bp, Homo sapien
cagccaaggattgaagtttaaaggg

SEQ ID NO: 2761093 - DNA, 25 bp, Homo sapien
tactctggtgaaagtcttcttccac

SEQ ID NO: 2761094 - DNA, 25 bp, Homo sapien
ggcatagcttagatagagaagggcc

SEQ ID NO: 2761095 - DNA, 25 bp, Homo sapien
agagaagggcctccgaaatcagttc

SEQ ID NO: 2761096 - DNA, 25 bp, Homo sapien
gaagggcctccgaaatcagttctca

SEQ ID NO: 2761097 - DNA, 25 bp, Homo sapien
atagagaagggcctccgaaatcagt

SEQ ID NO: 2761098 - DNA, 25 bp, Homo sapien
gccactggggctgactaaagtactg

SEQ ID NO: 2761099 - DNA, 25 bp, Homo sapien
tgactaaagtactgggagcctgctt

SEQ ID NO: 2761100 - DNA, 25 bp, Homo sapien
gcctgcttccctggaagatgcaact

SEQ ID NO: 2761101 - DNA, 25 bp, Homo sapien
gagcctgcttccctggaagatgcaa

SEQ ID NO: 2761102 - DNA, 25 bp, Homo sapien
aggcaccgtgcatagcccccaggaa

SEQ ID NO: 2761103 - DNA, 25 bp, Homo sapien
tagcccccaggaagatttagaagtg

SEQ ID NO: 2761104 - DNA, 25 bp, Homo sapien
gcccccaggaagatttagaagtgac

SEQ ID NO: 2761105 - DNA, 25 bp, Homo sapien
atgaggcaccgtgcatagcccccag

SEQ ID NO: 2761106 - DNA, 25 bp, Homo sapien
tagatacaataataagtggtaaatg

SEQ ID NO: 2761107 - DNA, 25 bp, Homo sapien
atctgaaacaattgtgacagaatgt

SEQ ID NO: 2761108 - DNA, 25 bp, Homo sapien
gcttcactgtggcttggttagtttt

SEQ ID NO: 2761109 - DNA, 25 bp, Homo sapien
aatctaaatgtgaataagagtgcca

SEQ ID NO: 2761110 - DNA, 25 bp, Homo sapien
aagtttcagtcactggagcaatcac

SEQ ID NO: 2761111 - DNA, 25 bp, Homo sapien
cactggagcaatcacaggattttct

SEQ ID NO: 2761112 - DNA, 25 bp, Homo sapien
ttaagtttcagtcactggagcaatc

SEQ ID NO: 2761113 - DNA, 25 bp, Homo sapien
gtcactggagcaatcacaggatttt

SEQ ID NO: 2761114 - DNA, 25 bp, Homo sapien
gcctttgacgccaacttcttagcgg

SEQ ID NO: 2761115 - DNA, 25 bp, Homo sapien
tggccaaacataatagcctttgacg

SEQ ID NO: 2761116 - DNA, 25 bp, Homo sapien
gccaacttcttagcggatccaccaa

SEQ ID NO: 2761117 - DNA, 25 bp, Homo sapien
tagcggatccaccaatcctcttagc

SEQ ID NO: 2761118 - DNA, 25 bp, Homo sapien
catggttggtgtctgtagaactaaa

SEQ ID NO: 2761119 - DNA, 25 bp, Homo sapien
tcaacaaaataattccaccaggaac

SEQ ID NO: 2761120 - DNA, 25 bp, Homo sapien
gtttaaagtgctgtattatcagaat

SEQ ID NO: 2761121 - DNA, 25 bp, Homo sapien
tgccagcaagcttattactgaaagt

SEQ ID NO: 2761122 - DNA, 25 bp, Homo sapien
gcagagtgcgtcttattattctgga

SEQ ID NO: 2761123 - DNA, 25 bp, Homo sapien
tccatagaacaatctggcagagtgc

SEQ ID NO: 2761124 - DNA, 25 bp, Homo sapien
tgtgttgtcatttactccatagaac

SEQ ID NO: 2761125 - DNA, 25 bp, Homo sapien
ttattctggatatgtacatcaagag

SEQ ID NO: 2761126 - DNA, 25 bp, Homo sapien
gactagatccgcaaagagttgaact

SEQ ID NO: 2761127 - DNA, 25 bp, Homo sapien
acaaagcagacttagaggcggtgga

SEQ ID NO: 2761128 - DNA, 25 bp, Homo sapien
gcggtggagtgtggataatatccat

SEQ ID NO: 2761129 - DNA, 25 bp, Homo sapien
gaagtacagatattggctttttgga

SEQ ID NO: 2761130 - DNA, 25 bp, Homo sapien
caaaaaaaacgcatattccttggct

SEQ ID NO: 2761131 - DNA, 25 bp, Homo sapien
ctccccacagatcagagaattaggt

SEQ ID NO: 2761132 - DNA, 25 bp, Homo sapien
cccacagatcagagaattaggtgta

SEQ ID NO: 2761133 - DNA, 25 bp, Homo sapien
tccccacagatcagagaattaggtg

SEQ ID NO: 2761134 - DNA, 25 bp, Homo sapien
ttgttctcattatcactggtaattt

SEQ ID NO: 2761135 - DNA, 25 bp, Homo sapien
ctttgttctcattatcactggtaat

SEQ ID NO: 2761136 - DNA, 25 bp, Homo sapien
tttgttctcattatcactggtaatt

SEQ ID NO: 2761137 - DNA, 25 bp, Homo sapien
cacaggtagtgcagccatgactcat

SEQ ID NO: 2761138 - DNA, 25 bp, Homo sapien
gctgttcacaggtagtgcagccatg

SEQ ID NO: 2761139 - DNA, 25 bp, Homo sapien
tacaagtgctgttcacaggtagtgc

SEQ ID NO: 2761140 - DNA, 25 bp, Homo sapien
gaatctatacaagtgctgttcacag

SEQ ID NO: 2761141 - DNA, 25 bp, Homo sapien
tttgactgagttgatgtttaagcat

SEQ ID NO: 2761142 - DNA, 25 bp, Homo sapien
ttttgttttgactgagttgatgttt

SEQ ID NO: 2761143 - DNA, 25 bp, Homo sapien
ttgttttgactgagttgatgtttaa

SEQ ID NO: 2761144 - DNA, 25 bp, Homo sapien
gttttgactgagttgatgtttaagc

SEQ ID NO: 2761145 - DNA, 25 bp, Homo sapien
aaggtcactttagatcctctaaaga

SEQ ID NO: 2761146 - DNA, 25 bp, Homo sapien
tgttttgcacctgtccgtaagtctt

SEQ ID NO: 2761147 - DNA, 25 bp, Homo sapien
tatgttttgcacctgtccgtaagtc

SEQ ID NO: 2761148 - DNA, 25 bp, Homo sapien
ttatgttttgcacctgtccgtaagt

SEQ ID NO: 2761149 - DNA, 25 bp, Homo sapien
atgttttgcacctgtccgtaagtct

SEQ ID NO: 2761150 - DNA, 25 bp, Homo sapien
gtaactgattatgatcaattagctg

SEQ ID NO: 2761151 - DNA, 25 bp, Homo sapien
cacaggtttgtcgagtgaagcagtg

SEQ ID NO: 2761152 - DNA, 25 bp, Homo sapien
ctgtaactgattatgatcaattagc

SEQ ID NO: 2761153 - DNA, 25 bp, Homo sapien
taaacaccactacacttggagtggc

SEQ ID NO: 2761154 - DNA, 25 bp, Homo sapien
cacgcttactgagggcatctgtgtc

SEQ ID NO: 2761155 - DNA, 25 bp, Homo sapien
tgtgtcttgctgtacctggaaccca

SEQ ID NO: 2761156 - DNA, 25 bp, Homo sapien
cagtgatcctggttgtactaaaagg

SEQ ID NO: 2761157 - DNA, 25 bp, Homo sapien
tccgagtagttagtggagagaacct

SEQ ID NO: 2761158 - DNA, 25 bp, Homo sapien
gcagtatttgtccatcattaactgg

SEQ ID NO: 2761159 - DNA, 25 bp, Homo sapien
gtttagacatctcaaataagtggag

SEQ ID NO: 2761160 - DNA, 25 bp, Homo sapien
tctatgatgtcacatatgacacgat

SEQ ID NO: 2761161 - DNA, 25 bp, Homo sapien
taagcatgcttatatctctctgaga

SEQ ID NO: 2761162 - DNA, 25 bp, Homo sapien
ctttgaactatagaacatcttggag

SEQ ID NO: 2761163 - DNA, 25 bp, Homo sapien
tgaggttggctaactgtccatctcc

SEQ ID NO: 2761164 - DNA, 25 bp, Homo sapien
tctaaatctttgtggacatatagaa

SEQ ID NO: 2761165 - DNA, 25 bp, Homo sapien
cctggatcctcgctcattgtactga

SEQ ID NO: 2761166 - DNA, 25 bp, Homo sapien
atgcaatttccagtctgtctgtagc

SEQ ID NO: 2761167 - DNA, 25 bp, Homo sapien
tatgcaatttccagtctgtctgtag

SEQ ID NO: 2761168 - DNA, 25 bp, Homo sapien
tatatgcaatttccagtctgtctgt

SEQ ID NO: 2761169 - DNA, 25 bp, Homo sapien
atatatgcaatttccagtctgtctg

SEQ ID NO: 2761170 - DNA, 25 bp, Homo sapien
actcactaaactttgagaactcctc

SEQ ID NO: 2761171 - DNA, 25 bp, Homo sapien
ctcactaaactttgagaactcctct

SEQ ID NO: 2761172 - DNA, 25 bp, Homo sapien
tgtccaggctctcgctgatgtccat

SEQ ID NO: 2761173 - DNA, 25 bp, Homo sapien
tgaatgtccaggctctcgctgatgt

SEQ ID NO: 2761174 - DNA, 25 bp, Homo sapien
cctgaatgtccaggctctcgctgat

SEQ ID NO: 2761175 - DNA, 25 bp, Homo sapien
aatgtccaggctctcgctgatgtcc

SEQ ID NO: 2761176 - DNA, 25 bp, Homo sapien
gggcagctcttgaggtaagattttg

SEQ ID NO: 2761177 - DNA, 25 bp, Homo sapien
ttgtatatctcatgaagttaccacc

SEQ ID NO: 2761178 - DNA, 25 bp, Homo sapien
ccagggaagccatatgagtctgagt

SEQ ID NO: 2761179 - DNA, 25 bp, Homo sapien
ttctggcaaactactggaccaatgg

SEQ ID NO: 2761180 - DNA, 25 bp, Homo sapien
cacccgatcaagtatcgattcatgg

SEQ ID NO: 2761181 - DNA, 25 bp, Homo sapien
caagtatcgattcatggaaattctc

SEQ ID NO: 2761182 - DNA, 25 bp, Homo sapien
tttatgcacccgatcaagtatcgat

SEQ ID NO: 2761183 - DNA, 25 bp, Homo sapien
cgatcaagtatcgattcatggaaat

SEQ ID NO: 2761184 - DNA, 25 bp, Homo sapien
tctggtcatatatacaaaggtctgc

SEQ ID NO: 2761185 - DNA, 25 bp, Homo sapien
tagtgtataagtcgctcctctctgg

SEQ ID NO: 2761186 - DNA, 25 bp, Homo sapien
gagattacaatctctcacaaaggaa

SEQ ID NO: 2761187 - DNA, 25 bp, Homo sapien
ttagtctataaaggcattagagtag

SEQ ID NO: 2761188 - DNA, 25 bp, Homo sapien
aacacatattgtaatagaagttgct

SEQ ID NO: 2761189 - DNA, 25 bp, Homo sapien
tgtgcggcctcatcagttagaaaga

SEQ ID NO: 2761190 - DNA, 25 bp, Homo sapien
gctaactaatgtgcggcctcatcag

SEQ ID NO: 2761191 - DNA, 25 bp, Homo sapien
taatagaagttgctaactaatgtgc

SEQ ID NO: 2761192 - DNA, 25 bp, Homo sapien
gcttttaaattggatgcagaaactt

SEQ ID NO: 2761193 - DNA, 25 bp, Homo sapien
gttggaaacaccttggatcttcatc

SEQ ID NO: 2761194 - DNA, 25 bp, Homo sapien
ttaaattggatgcagaaacttgttg

SEQ ID NO: 2761195 - DNA, 25 bp, Homo sapien
acaccttggatcttcatcagggaag

SEQ ID NO: 2761196 - DNA, 25 bp, Homo sapien
cttggctcatggctcgttgtaactc

SEQ ID NO: 2761197 - DNA, 25 bp, Homo sapien
tgtgtgagtctcttgctcttcccca

SEQ ID NO: 2761198 - DNA, 25 bp, Homo sapien
aactcgatttgtgtgagtctcttgc

SEQ ID NO: 2761199 - DNA, 25 bp, Homo sapien
gctcgttgtaactcgatttgtgtga

SEQ ID NO: 2761200 - DNA, 25 bp, Homo sapien
tgagagagtacatcctgaaggcagt

SEQ ID NO: 2761201 - DNA, 25 bp, Homo sapien
tggattgccacgctctccagtgaga

SEQ ID NO: 2761202 - DNA, 25 bp, Homo sapien
tcagaaatgggtacagttaaggcct

SEQ ID NO: 2761203 - DNA, 25 bp, Homo sapien
tagggtctgggagtacacacaaagc

SEQ ID NO: 2761204 - DNA, 25 bp, Homo sapien
aatgggacctctcaatagtagaaat

SEQ ID NO: 2761205 - DNA, 25 bp, Homo sapien
cacaatgggacctctcaatagtaga

SEQ ID NO: 2761206 - DNA, 25 bp, Homo sapien
acaatgggacctctcaatagtagaa

SEQ ID NO: 2761207 - DNA, 25 bp, Homo sapien
caatgggacctctcaatagtagaaa

SEQ ID NO: 2761208 - DNA, 25 bp, Homo sapien
attactgccagaacaacttttaatt

SEQ ID NO: 2761209 - DNA, 25 bp, Homo sapien
aattgtgacttttcaacaattactg

SEQ ID NO: 2761210 - DNA, 25 bp, Homo sapien
tactgccagaacaacttttaattct

SEQ ID NO: 2761211 - DNA, 25 bp, Homo sapien
caacaattactgccagaacaacttt

SEQ ID NO: 2761212 - DNA, 25 bp, Homo sapien
cagaagtcatcgttgtcacatagca

SEQ ID NO: 2761213 - DNA, 25 bp, Homo sapien
tgggtaaccacaaatcacgccgata

SEQ ID NO: 2761214 - DNA, 25 bp, Homo sapien
caagacagatcaaaaactaggcctc

SEQ ID NO: 2761215 - DNA, 25 bp, Homo sapien
tcttatattggaggaagatgtcacc

SEQ ID NO: 2761216 - DNA, 25 bp, Homo sapien
tattcacgattcataggaagcgatc

SEQ ID NO: 2761217 - DNA, 25 bp, Homo sapien
gattctcctggctgagtatcccata

SEQ ID NO: 2761218 - DNA, 25 bp, Homo sapien
cccggccaggagtcacattttagat

SEQ ID NO: 2761219 - DNA, 25 bp, Homo sapien
tccaatcctcatgggtcactgtgag

SEQ ID NO: 2761220 - DNA, 25 bp, Homo sapien
ccagcacgaaaggaagacgaaggcc

SEQ ID NO: 2761221 - DNA, 25 bp, Homo sapien
aggaagctccagcacgaaaggaaga

SEQ ID NO: 2761222 - DNA, 25 bp, Homo sapien
tctgtagttgaaggcctgagaccat

SEQ ID NO: 2761223 - DNA, 25 bp, Homo sapien
tgtggcaagccgctggtgtaagtcc

SEQ ID NO: 2761224 - DNA, 25 bp, Homo sapien
acttcctgatccgtgcagtgtgcat

SEQ ID NO: 2761225 - DNA, 25 bp, Homo sapien
catattaaaggacttcctgatccgt

SEQ ID NO: 2761226 - DNA, 25 bp, Homo sapien
ctccctgaaatagtgccggttttct

SEQ ID NO: 2761227 - DNA, 25 bp, Homo sapien
cggttttctatgattgtgtcacaca

SEQ ID NO: 2761228 - DNA, 25 bp, Homo sapien
taaccttgccaaacctgcagagaat

SEQ ID NO: 2761229 - DNA, 25 bp, Homo sapien
ttttgtaaccttgccaaacctgcag

SEQ ID NO: 2761230 - DNA, 25 bp, Homo sapien
tgtgttatgctcttttgtaaccttg

SEQ ID NO: 2761231 - DNA, 25 bp, Homo sapien
tatgctcttttgtaaccttgccaaa

SEQ ID NO: 2761232 - DNA, 25 bp, Homo sapien
aatttacatcagaaaaacttaggat

SEQ ID NO: 2761233 - DNA, 25 bp, Homo sapien
tctacaagaggtccatgtggttctc

SEQ ID NO: 2761234 - DNA, 25 bp, Homo sapien
gcatttgaagttactggcgtcagcc

SEQ ID NO: 2761235 - DNA, 25 bp, Homo sapien
tcagccacatgagattgatgacggg

SEQ ID NO: 2761236 - DNA, 25 bp, Homo sapien
tgatgacgggattggcttctacaag

SEQ ID NO: 2761237 - DNA, 25 bp, Homo sapien
tcatatcagttcatggtgtaccaga

SEQ ID NO: 2761238 - DNA, 25 bp, Homo sapien
tggtcgggacattcacagaagtctg

SEQ ID NO: 2761239 - DNA, 25 bp, Homo sapien
gggctggatgtcactcgcttatgaa

SEQ ID NO: 2761240 - DNA, 25 bp, Homo sapien
gaagcagagatgctaggtcaaccca

SEQ ID NO: 2761241 - DNA, 25 bp, Homo sapien
gagcacgtatgctgtgtcaccaaat

SEQ ID NO: 2761242 - DNA, 25 bp, Homo sapien
tagtcaataaaagaggtgcagccca

SEQ ID NO: 2761243 - DNA, 25 bp, Homo sapien
tagcttagacgaattatccttacgg

SEQ ID NO: 2761244 - DNA, 25 bp, Homo sapien
ttgccaataaaggataatagccatg

SEQ ID NO: 2761245 - DNA, 25 bp, Homo sapien
catttgggtggactttatttcaata

SEQ ID NO: 2761246 - DNA, 25 bp, Homo sapien
ttcaatagggagtgataaaaaaaga

SEQ ID NO: 2761247 - DNA, 25 bp, Homo sapien
ttatttcaatagggagtgataaaaa

SEQ ID NO: 2761248 - DNA, 25 bp, Homo sapien
caatagggagtgataaaaaaagaca

SEQ ID NO: 2761249 - DNA, 25 bp, Homo sapien
ggaaaggaaacatagcagtggataa

SEQ ID NO: 2761250 - DNA, 25 bp, Homo sapien
agagttgtcataggagacacagcag

SEQ ID NO: 2761251 - DNA, 25 bp, Homo sapien
ctttttggtatgtacatgggacaat

SEQ ID NO: 2761252 - DNA, 25 bp, Homo sapien
ttcacttggaaggacacaaaacagg

SEQ ID NO: 2761253 - DNA, 25 bp, Homo sapien
tccatggaatgtcaatatttgaccc

SEQ ID NO: 2761254 - DNA, 25 bp, Homo sapien
gaatgtcaatatttgacccagcatt

SEQ ID NO: 2761255 - DNA, 25 bp, Homo sapien
cttccatggaatgtcaatatttgac

SEQ ID NO: 2761256 - DNA, 25 bp, Homo sapien
atgtcaatatttgacccagcattat

SEQ ID NO: 2761257 - DNA, 25 bp, Homo sapien
aggagatactgccatcccacaagaa

SEQ ID NO: 2761258 - DNA, 25 bp, Homo sapien
ctgttgacaacttctatgtaaatca

SEQ ID NO: 2761259 - DNA, 25 bp, Homo sapien
catcccacaagaacagttccaactg

SEQ ID NO: 2761260 - DNA, 25 bp, Homo sapien
tggtcataccatttatcagatatag

SEQ ID NO: 2761261 - DNA, 25 bp, Homo sapien
cagccactgtgttaatcctccatgg

SEQ ID NO: 2761262 - DNA, 25 bp, Homo sapien
aagtttcagatatccagactccaag

SEQ ID NO: 2761263 - DNA, 25 bp, Homo sapien
ctgtgttaatcctccatgggggcct

SEQ ID NO: 2761264 - DNA, 25 bp, Homo sapien
ttccttcttggtgttcagccactgt

SEQ ID NO: 2761265 - DNA, 25 bp, Homo sapien
gatcccacactaggagagttgagca

SEQ ID NO: 2761266 - DNA, 25 bp, Homo sapien
gcagctcctccgtgattcctgtgga

SEQ ID NO: 2761267 - DNA, 25 bp, Homo sapien
ccatcgggtttactcatctgtgcag

SEQ ID NO: 2761268 - DNA, 25 bp, Homo sapien
tctgtgcaggtttaggaagcagctc

SEQ ID NO: 2761269 - DNA, 25 bp, Homo sapien
gccgcagtccctgaaaatgaccaga

SEQ ID NO: 2761270 - DNA, 25 bp, Homo sapien
tgccgcagtccctgaaaatgaccag

SEQ ID NO: 2761271 - DNA, 25 bp, Homo sapien
cagtccctgaaaatgaccagagctt

SEQ ID NO: 2761272 - DNA, 25 bp, Homo sapien
cgcagtccctgaaaatgaccagagc

SEQ ID NO: 2761273 - DNA, 25 bp, Homo sapien
ttttagttatctctaagtacctaca

SEQ ID NO: 2761274 - DNA, 25 bp, Homo sapien
gactttattatcaacccttgagaaa

SEQ ID NO: 2761275 - DNA, 25 bp, Homo sapien
ccttgagaaatttttagttatctct

SEQ ID NO: 2761276 - DNA, 25 bp, Homo sapien
ctgcttcagtgtgattttgagagac

SEQ ID NO: 2761277 - DNA, 25 bp, Homo sapien
ccatgccgcctcttactagacagag

SEQ ID NO: 2761278 - DNA, 25 bp, Homo sapien
tagtaggagggtgattatgcagtaa

SEQ ID NO: 2761279 - DNA, 25 bp, Homo sapien
tactagacagagctttcacctggat

SEQ ID NO: 2761280 - DNA, 25 bp, Homo sapien
cttctagtaggagggtgattatgca

SEQ ID NO: 2761281 - DNA, 25 bp, Homo sapien
aagaatgtgaggaacccaaatggtc

SEQ ID NO: 2761282 - DNA, 25 bp, Homo sapien
aaatggtctagctcttccaaatcca

SEQ ID NO: 2761283 - DNA, 25 bp, Homo sapien
caagatcaagttccactactgatgg

SEQ ID NO: 2761284 - DNA, 25 bp, Homo sapien
tggttctgagcaagaatgtgaggaa

SEQ ID NO: 2761285 - DNA, 25 bp, Homo sapien
cattcaacaattatcttagctgtct

SEQ ID NO: 2761286 - DNA, 25 bp, Homo sapien
cccttgtgcccagctctaagtataa

SEQ ID NO: 2761287 - DNA, 25 bp, Homo sapien
tgtacgctagcttctaacaagagag

SEQ ID NO: 2761288 - DNA, 25 bp, Homo sapien
cacttgttgctgtgcgttgcatttt

SEQ ID NO: 2761289 - DNA, 25 bp, Homo sapien
tatattccatgagacatcctacagg

SEQ ID NO: 2761290 - DNA, 25 bp, Homo sapien
ggttgcttaagggagaactatcctg

SEQ ID NO: 2761291 - DNA, 25 bp, Homo sapien
catttgcaagggcaggacatgtacc

SEQ ID NO: 2761292 - DNA, 25 bp, Homo sapien
gacatgtacctaacagaagcggctt

SEQ ID NO: 2761293 - DNA, 25 bp, Homo sapien
cattaatgaaatcccggacgtccgt

SEQ ID NO: 2761294 - DNA, 25 bp, Homo sapien
tctgctagcttattaaaccgagggc

SEQ ID NO: 2761295 - DNA, 25 bp, Homo sapien
tatctggagctgtaggagtcctccg

SEQ ID NO: 2761296 - DNA, 25 bp, Homo sapien
tccttcataggcataggttgcaagt

SEQ ID NO: 2761297 - DNA, 25 bp, Homo sapien
gccttggctgtcacaagcacacact

SEQ ID NO: 2761298 - DNA, 25 bp, Homo sapien
cacacactcgaatggtcagtgtgcc

SEQ ID NO: 2761299 - DNA, 25 bp, Homo sapien
gcttcagcactgcaggattgcatgt

SEQ ID NO: 2761300 - DNA, 25 bp, Homo sapien
ggatggcgatcaaggccccagtgct

SEQ ID NO: 2761301 - DNA, 25 bp, Homo sapien
ttttctggttaagattctggcagta

SEQ ID NO: 2761302 - DNA, 25 bp, Homo sapien
ttttttctggttaagattctggcag

SEQ ID NO: 2761303 - DNA, 25 bp, Homo sapien
ctgatttcatgtctattgaatccat

SEQ ID NO: 2761304 - DNA, 25 bp, Homo sapien
tctggttaagattctggcagtatta

SEQ ID NO: 2761305 - DNA, 25 bp, Homo sapien
aatttctgtccacctaaagggtcat

SEQ ID NO: 2761306 - DNA, 25 bp, Homo sapien
ctactgcacttatagtctgtattag

SEQ ID NO: 2761307 - DNA, 25 bp, Homo sapien
ggattgacagcagctaaactgaaaa

SEQ ID NO: 2761308 - DNA, 25 bp, Homo sapien
catctttgtctactgcacttatagt

SEQ ID NO: 2761309 - DNA, 25 bp, Homo sapien
agcacccttgaacccttttcagttg

SEQ ID NO: 2761310 - DNA, 25 bp, Homo sapien
catattattatggtgtctggaacaa

SEQ ID NO: 2761311 - DNA, 25 bp, Homo sapien
aaggcttagttgtcatttggtttca

SEQ ID NO: 2761312 - DNA, 25 bp, Homo sapien
tctggaacaatgaatgggttttaag

SEQ ID NO: 2761313 - DNA, 25 bp, Homo sapien
gtcattaacatccaaaattctcaca

SEQ ID NO: 2761314 - DNA, 25 bp, Homo sapien
tgtcattaacatccaaaattctcac

SEQ ID NO: 2761315 - DNA, 25 bp, Homo sapien
aaaaacagccacgcgtgttgtctct

SEQ ID NO: 2761316 - DNA, 25 bp, Homo sapien
cagccacgcgtgttgtctctttggg

SEQ ID NO: 2761317 - DNA, 25 bp, Homo sapien
aaatcaacagcatcaaagttctcac

SEQ ID NO: 2761318 - DNA, 25 bp, Homo sapien
catgcacgatggctcgtggctgtaa

SEQ ID NO: 2761319 - DNA, 25 bp, Homo sapien
ttctggctggctcatgcacgatggc

SEQ ID NO: 2761320 - DNA, 25 bp, Homo sapien
ataaagagatgcatttctggctggc

SEQ ID NO: 2761321 - DNA, 25 bp, Homo sapien
tcctgaatgaatgttaaagattctg

SEQ ID NO: 2761322 - DNA, 25 bp, Homo sapien
tttgatgtataaagagatccatttc

SEQ ID NO: 2761323 - DNA, 25 bp, Homo sapien
gattatgccactgagatagttcacg

SEQ ID NO: 2761324 - DNA, 25 bp, Homo sapien
gatagttcacggtcaagaggttttg

SEQ ID NO: 2761325 - DNA, 25 bp, Homo sapien
tcaaacagataggaggacctactaa

SEQ ID NO: 2761326 - DNA, 25 bp, Homo sapien
gtcttcggctctcatagtcgagtgg

SEQ ID NO: 2761327 - DNA, 25 bp, Homo sapien
ggctggaaatagaatctgggtccct

SEQ ID NO: 2761328 - DNA, 25 bp, Homo sapien
gggtcccttgccattacagtaccaa

SEQ ID NO: 2761329 - DNA, 25 bp, Homo sapien
tgacacttccaatggctgtgccaac

SEQ ID NO: 2761330 - DNA, 25 bp, Homo sapien
tcaagaactcgaagatgaatagtgt

SEQ ID NO: 2761331 - DNA, 25 bp, Homo sapien
gatgtcaaacatatcagtaccgtca

SEQ ID NO: 2761332 - DNA, 25 bp, Homo sapien
tgtgtccttctcagtcacgatgtca

SEQ ID NO: 2761333 - DNA, 25 bp, Homo sapien
gtggttgtccccgataagcctccca

SEQ ID NO: 2761334 - DNA, 25 bp, Homo sapien
ggatgaccacttggtattgctctct

SEQ ID NO: 2761335 - DNA, 25 bp, Homo sapien
tgttcatgttcggtaaagcagtcct

SEQ ID NO: 2761336 - DNA, 25 bp, Homo sapien
tgaccacttggtattgctctctgtt

SEQ ID NO: 2761337 - DNA, 25 bp, Homo sapien
ccacagagaaatagggctgcccttg

SEQ ID NO: 2761338 - DNA, 25 bp, Homo sapien
tgttcccatatgaagggtcatcggc

SEQ ID NO: 2761339 - DNA, 25 bp, Homo sapien
tgtaaatgactctggcgctgttccc

SEQ ID NO: 2761340 - DNA, 25 bp, Homo sapien
tagctgtgacttgcaccacagaagt

SEQ ID NO: 2761341 - DNA, 25 bp, Homo sapien
tgaagtatccaaattcagcttagtt

SEQ ID NO: 2761342 - DNA, 25 bp, Homo sapien
ctgaagtatccaaattcagcttagt

SEQ ID NO: 2761343 - DNA, 25 bp, Homo sapien
cacagtaccagaaggaggagcaaaa

SEQ ID NO: 2761344 - DNA, 25 bp, Homo sapien
ctgcacagtaccagaaggaggagca

SEQ ID NO: 2761345 - DNA, 25 bp, Homo sapien
agtaccagaaggaggagcaaaagca

SEQ ID NO: 2761346 - DNA, 25 bp, Homo sapien
cagtaccagaaggaggagcaaaagc

SEQ ID NO: 2761347 - DNA, 25 bp, Homo sapien
aataccatcataaacgctgtaaatg

SEQ ID NO: 2761348 - DNA, 25 bp, Homo sapien
aacactttttgaataccatcataaa

SEQ ID NO: 2761349 - DNA, 25 bp, Homo sapien
ccatcataaacgctgtaaatgaact

SEQ ID NO: 2761350 - DNA, 25 bp, Homo sapien
tcataaacgctgtaaatgaacttac

SEQ ID NO: 2761351 - DNA, 25 bp, Homo sapien
gatttcttctgggaacgttggctca

SEQ ID NO: 2761352 - DNA, 25 bp, Homo sapien
tgcgcgtagagtataaaaggccttt

SEQ ID NO: 2761353 - DNA, 25 bp, Homo sapien
gacatttcgggaacactagctgtat

SEQ ID NO: 2761354 - DNA, 25 bp, Homo sapien
tcgccttgtggcatgaatatcacct

SEQ ID NO: 2761355 - DNA, 25 bp, Homo sapien
tttctaccttcaccaatgggaatat

SEQ ID NO: 2761356 - DNA, 25 bp, Homo sapien
atggagtttgcaagtagactgtggt

SEQ ID NO: 2761357 - DNA, 25 bp, Homo sapien
tactgtgggagtttctgttggatta

SEQ ID NO: 2761358 - DNA, 25 bp, Homo sapien
aacatggtagtagggaatcaaagag

SEQ ID NO: 2761359 - DNA, 25 bp, Homo sapien
gtaaattcacaaccagataaaggac

SEQ ID NO: 2761360 - DNA, 25 bp, Homo sapien
tgtaaattcacaaccagataaagga

SEQ ID NO: 2761361 - DNA, 25 bp, Homo sapien
aaattcacaaccagataaaggacat

SEQ ID NO: 2761362 - DNA, 25 bp, Homo sapien
taaattcacaaccagataaaggaca

SEQ ID NO: 2761363 - DNA, 25 bp, Homo sapien
gaaaaaaccatatctatcaggaggc

SEQ ID NO: 2761364 - DNA, 25 bp, Homo sapien
tcttgctggagcactaatgctattc

SEQ ID NO: 2761365 - DNA, 25 bp, Homo sapien
agaccaaggtgccaacagattcaat

SEQ ID NO: 2761366 - DNA, 25 bp, Homo sapien
gctattcatgagatttccaccttca

SEQ ID NO: 2761367 - DNA, 25 bp, Homo sapien
tgggactcaactgggactcataggc

SEQ ID NO: 2761368 - DNA, 25 bp, Homo sapien
cctgaaggagaaggactaggcagca

SEQ ID NO: 2761369 - DNA, 25 bp, Homo sapien
tgctcgagcccgtgcatgcaaggtt

SEQ ID NO: 2761370 - DNA, 25 bp, Homo sapien
taggcagcagactacggtctcgagg

SEQ ID NO: 2761371 - DNA, 25 bp, Homo sapien
gtgatttgcgtcctccctcatgaca

SEQ ID NO: 2761372 - DNA, 25 bp, Homo sapien
caagatcaacgctctcacaaggaaa

SEQ ID NO: 2761373 - DNA, 25 bp, Homo sapien
caatgtcatgactctgtgatttgcg

SEQ ID NO: 2761374 - DNA, 25 bp, Homo sapien
gaaaagggattgctcgattgactga

SEQ ID NO: 2761375 - DNA, 25 bp, Homo sapien
gtatctgtaactggccaaggaaagg

SEQ ID NO: 2761376 - DNA, 25 bp, Homo sapien
aggggcttgaaggtgagtatctgta

SEQ ID NO: 2761377 - DNA, 25 bp, Homo sapien
tctgtaactggccaaggaaagggca

SEQ ID NO: 2761378 - DNA, 25 bp, Homo sapien
ctgtaactggccaaggaaagggcac

SEQ ID NO: 2761379 - DNA, 25 bp, Homo sapien
ccagttgtctggctgctaccagaat

SEQ ID NO: 2761380 - DNA, 25 bp, Homo sapien
tatccagttgtctggctgctaccag

SEQ ID NO: 2761381 - DNA, 25 bp, Homo sapien
atccagttgtctggctgctaccaga

SEQ ID NO: 2761382 - DNA, 25 bp, Homo sapien
cagaatttcaggagctcccactggg

SEQ ID NO: 2761383 - DNA, 25 bp, Homo sapien
gagctagagaagtgaagtccgccat

SEQ ID NO: 2761384 - DNA, 25 bp, Homo sapien
aagtcctgtcttcagcagttggttt

SEQ ID NO: 2761385 - DNA, 25 bp, Homo sapien
ggtttattgaaagaagcatcttcat

SEQ ID NO: 2761386 - DNA, 25 bp, Homo sapien
agcagttggtttattgaaagaagca

SEQ ID NO: 2761387 - DNA, 25 bp, Homo sapien
ttagcaagtcctgtcttcagcagtt

SEQ ID NO: 2761388 - DNA, 25 bp, Homo sapien
caccagctacatatctttctgctat

SEQ ID NO: 2761389 - DNA, 25 bp, Homo sapien
tcaccagctacatatctttctgcta

SEQ ID NO: 2761390 - DNA, 25 bp, Homo sapien
accagctacatatctttctgctata

SEQ ID NO: 2761391 - DNA, 25 bp, Homo sapien
ttaccaggagtcatggaacacagtt

SEQ ID NO: 2761392 - DNA, 25 bp, Homo sapien
ttaaaattaccaggagtcatggaac

SEQ ID NO: 2761393 - DNA, 25 bp, Homo sapien
gcatccagtctatgttaactcttaa

SEQ ID NO: 2761394 - DNA, 25 bp, Homo sapien
taattaaaattaccaggagtcatgg

SEQ ID NO: 2761395 - DNA, 25 bp, Homo sapien
gattggaacacatattactccgaca

SEQ ID NO: 2761396 - DNA, 25 bp, Homo sapien
tgtaagtctctccattgctagtggg

SEQ ID NO: 2761397 - DNA, 25 bp, Homo sapien
ccaagagaagttgataaaccaaggg

SEQ ID NO: 2761398 - DNA, 25 bp, Homo sapien
tattccccactacagagagatacct

SEQ ID NO: 2761399 - DNA, 25 bp, Homo sapien
tccacatccaaccacgtttttgacg

SEQ ID NO: 2761400 - DNA, 25 bp, Homo sapien
cttgcctacgtactgataatcagat

SEQ ID NO: 2761401 - DNA, 25 bp, Homo sapien
gacgatggagaattttgccatcact

SEQ ID NO: 2761402 - DNA, 25 bp, Homo sapien
cagatcctgtatattcttcaagtaa

SEQ ID NO: 2761403 - DNA, 25 bp, Homo sapien
acaggcgtccttctgaacattattt

SEQ ID NO: 2761404 - DNA, 25 bp, Homo sapien
gagagcagaaatgtggcaggcatac

SEQ ID NO: 2761405 - DNA, 25 bp, Homo sapien
agaaacagtagcaaaaattgatgta

SEQ ID NO: 2761406 - DNA, 25 bp, Homo sapien
gtggcaggcatacccagaatagaaa

SEQ ID NO: 2761407 - DNA, 25 bp, Homo sapien
cagaaatgtggcaggcatacccaga

SEQ ID NO: 2761408 - DNA, 25 bp, Homo sapien
caactggtttccaacatttcatcaa

SEQ ID NO: 2761409 - DNA, 25 bp, Homo sapien
gatgaagagaagtggtcctatttta

SEQ ID NO: 2761410 - DNA, 25 bp, Homo sapien
agagaagtggtcctattttacccag

SEQ ID NO: 2761411 - DNA, 25 bp, Homo sapien
aatgttttgttcatgtttcccaaag

SEQ ID NO: 2761412 - DNA, 25 bp, Homo sapien
cttttgtgtatacccgctctgtgtt

SEQ ID NO: 2761413 - DNA, 25 bp, Homo sapien
tgtgtatacccgctctgtgtttaaa

SEQ ID NO: 2761414 - DNA, 25 bp, Homo sapien
tacccgctctgtgtttaaatgatat

SEQ ID NO: 2761415 - DNA, 25 bp, Homo sapien
tgtatacccgctctgtgtttaaatg

SEQ ID NO: 2761416 - DNA, 25 bp, Homo sapien
tcagcaaacagggagtcagtgcaac

SEQ ID NO: 2761417 - DNA, 25 bp, Homo sapien
gatgtcagcacacgggctcatcaga

SEQ ID NO: 2761418 - DNA, 25 bp, Homo sapien
gcctgcttaggggagtgtgtaattt

SEQ ID NO: 2761419 - DNA, 25 bp, Homo sapien
gttcattgatgtcagcacacgggct

SEQ ID NO: 2761420 - DNA, 25 bp, Homo sapien
tcattctgcagccagttccaagcca

SEQ ID NO: 2761421 - DNA, 25 bp, Homo sapien
tgcagccagttccaagccagcagtc

SEQ ID NO: 2761422 - DNA, 25 bp, Homo sapien
cattctgcagccagttccaagccag

SEQ ID NO: 2761423 - DNA, 25 bp, Homo sapien
ttctgcagccagttccaagccagca

SEQ ID NO: 2761424 - DNA, 25 bp, Homo sapien
tcagcttcccatgagtagaagacca

SEQ ID NO: 2761425 - DNA, 25 bp, Homo sapien
cagcttcccatgagtagaagaccat

SEQ ID NO: 2761426 - DNA, 25 bp, Homo sapien
ttcagcttcccatgagtagaagacc

SEQ ID NO: 2761427 - DNA, 25 bp, Homo sapien
tcttcagcttcccatgagtagaaga

SEQ ID NO: 2761428 - DNA, 25 bp, Homo sapien
tatgcatatgtaggtggatgctcat

SEQ ID NO: 2761429 - DNA, 25 bp, Homo sapien
tatgaaattctattctttgattgaa

SEQ ID NO: 2761430 - DNA, 25 bp, Homo sapien
gaagtcaatttgttcacagcaagta

SEQ ID NO: 2761431 - DNA, 25 bp, Homo sapien
gaaggcgtatgcattcaccagagaa

SEQ ID NO: 2761432 - DNA, 25 bp, Homo sapien
gaagtcagggaaggcgtatgcattc

SEQ ID NO: 2761433 - DNA, 25 bp, Homo sapien
atgggtttgcatctgacgtgtccct

SEQ ID NO: 2761434 - DNA, 25 bp, Homo sapien
catctgacgtgtccctaaggcacag

SEQ ID NO: 2761435 - DNA, 25 bp, Homo sapien
gtccctaaggcacagatccacgctg

SEQ ID NO: 2761436 - DNA, 25 bp, Homo sapien
ggcacagatccacgctgtttacacc

SEQ ID NO: 2761437 - DNA, 25 bp, Homo sapien
acataacctctttctttcttcttca

SEQ ID NO: 2761438 - DNA, 25 bp, Homo sapien
cataacctctttctttcttcttcat

SEQ ID NO: 2761439 - DNA, 25 bp, Homo sapien
tgtttctaggacataacctctttct

SEQ ID NO: 2761440 - DNA, 25 bp, Homo sapien
ctgtgtttctaggacataacctctt

SEQ ID NO: 2761441 - DNA, 25 bp, Homo sapien
tagatgcttagtgaccattgacagt

SEQ ID NO: 2761442 - DNA, 25 bp, Homo sapien
aaaaatgaacaagtctgggcatgac

SEQ ID NO: 2761443 - DNA, 25 bp, Homo sapien
ctacgaataagtgcagagtgaatcc

SEQ ID NO: 2761444 - DNA, 25 bp, Homo sapien
tgcttttgcccatagttacagtgct

SEQ ID NO: 2761445 - DNA, 25 bp, Homo sapien
tatcactgattctacttcaatctaa

SEQ ID NO: 2761446 - DNA, 25 bp, Homo sapien
attttctatcactgattctacttca

SEQ ID NO: 2761447 - DNA, 25 bp, Homo sapien
gataatggaagttggttccagccaa

SEQ ID NO: 2761448 - DNA, 25 bp, Homo sapien
ggagaaattgtcactatgtcccctt

SEQ ID NO: 2761449 - DNA, 25 bp, Homo sapien
cgaagaaaacgggggcgagctctct

SEQ ID NO: 2761450 - DNA, 25 bp, Homo sapien
tggacagcagggaaccgaagaaaac

SEQ ID NO: 2761451 - DNA, 25 bp, Homo sapien
tctgattggctttcattcagtgctt

SEQ ID NO: 2761452 - DNA, 25 bp, Homo sapien
aactctggacagcagggaaccgaag

SEQ ID NO: 2761453 - DNA, 25 bp, Homo sapien
agtctgcggtggcagctggtagtgc

SEQ ID NO: 2761454 - DNA, 25 bp, Homo sapien
tctgatggccatgcttccaggaaac

SEQ ID NO: 2761455 - DNA, 25 bp, Homo sapien
ccaggaaacagcagaactaagacaa

SEQ ID NO: 2761456 - DNA, 25 bp, Homo sapien
cagctggtagtgcttctctgatggc

SEQ ID NO: 2761457 - DNA, 25 bp, Homo sapien
aatccaccctttaagcttcagcaag

SEQ ID NO: 2761458 - DNA, 25 bp, Homo sapien
aatgaccttgggtagagctcagaaa

SEQ ID NO: 2761459 - DNA, 25 bp, Homo sapien
tttttaatgaccttgggtagagctc

SEQ ID NO: 2761460 - DNA, 25 bp, Homo sapien
gagctcagaaatccaccctttaagc

SEQ ID NO: 2761461 - DNA, 25 bp, Homo sapien
aagcaggaaaatgagagtttggccc

SEQ ID NO: 2761462 - DNA, 25 bp, Homo sapien
aagggaacaggaagtgctctcccct

SEQ ID NO: 2761463 - DNA, 25 bp, Homo sapien
ctccccaaagcaggaaaatgagagt

SEQ ID NO: 2761464 - DNA, 25 bp, Homo sapien
ccggcaccagattgaagggaacagg

SEQ ID NO: 2761465 - DNA, 25 bp, Homo sapien
gtcttaaaactctgttgtgaaggct

SEQ ID NO: 2761466 - DNA, 25 bp, Homo sapien
cattatggactccataaagaacata

SEQ ID NO: 2761467 - DNA, 25 bp, Homo sapien
tcagaaagtccaaagatagcccaga

SEQ ID NO: 2761468 - DNA, 25 bp, Homo sapien
ttgtaacattatggactccataaag

SEQ ID NO: 2761469 - DNA, 25 bp, Homo sapien
agttcaggccctacaatgagaagag

SEQ ID NO: 2761470 - DNA, 25 bp, Homo sapien
caacatccatatgttaagctgggat

SEQ ID NO: 2761471 - DNA, 25 bp, Homo sapien
tctgtctgctgtatgagaatacggg

SEQ ID NO: 2761472 - DNA, 25 bp, Homo sapien
cctgcgaatcagaaagaatgccctc

SEQ ID NO: 2761473 - DNA, 25 bp, Homo sapien
caagaccatctgtaacctcacggag

SEQ ID NO: 2761474 - DNA, 25 bp, Homo sapien
ggttctggaacatgtgaccacctca

SEQ ID NO: 2761475 - DNA, 25 bp, Homo sapien
ggatcatcttcttacagccattggc

SEQ ID NO: 2761476 - DNA, 25 bp, Homo sapien
gctgatagaagctccaccgtctgga

SEQ ID NO: 2761477 - DNA, 25 bp, Homo sapien
tgttcacagattgcacacatagcca

SEQ ID NO: 2761478 - DNA, 25 bp, Homo sapien
agggaggcatctagatgttcacaga

SEQ ID NO: 2761479 - DNA, 25 bp, Homo sapien
gcatctagatgttcacagattgcac

SEQ ID NO: 2761480 - DNA, 25 bp, Homo sapien
tctagatgttcacagattgcacaca

SEQ ID NO: 2761481 - DNA, 25 bp, Homo sapien
ttgtaactcagtatttcatccaaac

SEQ ID NO: 2761482 - DNA, 25 bp, Homo sapien
tgaagaagccattgtaactcagtat

SEQ ID NO: 2761483 - DNA, 25 bp, Homo sapien
gaagccattgtaactcagtatttca

SEQ ID NO: 2761484 - DNA, 25 bp, Homo sapien
tcagagagctaaactgaagaagcca

SEQ ID NO: 2761485 - DNA, 25 bp, Homo sapien
cttcttgttggttccaaggtccagc

SEQ ID NO: 2761486 - DNA, 25 bp, Homo sapien
agaatgatttgaggaaactataagc

SEQ ID NO: 2761487 - DNA, 25 bp, Homo sapien
ttcttgttggttccaaggtccagca

SEQ ID NO: 2761488 - DNA, 25 bp, Homo sapien
atgatttgaggaaactataagccat

SEQ ID NO: 2761489 - DNA, 25 bp, Homo sapien
ccttaaaggaaactatctgtggcca

SEQ ID NO: 2761490 - DNA, 25 bp, Homo sapien
gaaaatgtctgctaaatgcccaagc

SEQ ID NO: 2761491 - DNA, 25 bp, Homo sapien
tctctgcaaagctagggtcctgcaa

SEQ ID NO: 2761492 - DNA, 25 bp, Homo sapien
catggtatatggcacagctctggaa

SEQ ID NO: 2761493 - DNA, 25 bp, Homo sapien
gtaaaaggctgatagaaactccatg

SEQ ID NO: 2761494 - DNA, 25 bp, Homo sapien
ttgcctaaagtaaaaggctgataga

SEQ ID NO: 2761495 - DNA, 25 bp, Homo sapien
gctccaagaacgcttgtggtttatt

SEQ ID NO: 2761496 - DNA, 25 bp, Homo sapien
taaagtaaaaggctgatagaaactc

SEQ ID NO: 2761497 - DNA, 25 bp, Homo sapien
tacttgttgcaactctcatagggct

SEQ ID NO: 2761498 - DNA, 25 bp, Homo sapien
gtcctcagcttgtggaaaaaatgcc

SEQ ID NO: 2761499 - DNA, 25 bp, Homo sapien
tctttatcacgaaaactccaggaga

SEQ ID NO: 2761500 - DNA, 25 bp, Homo sapien
ctcttctatgaagccgtcctcagct

SEQ ID NO: 2761501 - DNA, 25 bp, Homo sapien
aaaatgtaggttgctgcagctcagc

SEQ ID NO: 2761502 - DNA, 25 bp, Homo sapien
gcatgtcatagacaggcttgtaact

SEQ ID NO: 2761503 - DNA, 25 bp, Homo sapien
gaagcatgcatgtcatagacaggct

SEQ ID NO: 2761504 - DNA, 25 bp, Homo sapien
caaaatgtaggttgctgcagctcag

SEQ ID NO: 2761505 - DNA, 25 bp, Homo sapien
ttcgacatgtgctgaaatgtcatct

SEQ ID NO: 2761506 - DNA, 25 bp, Homo sapien
cttgagtcctctggtggtttcgaca

SEQ ID NO: 2761507 - DNA, 25 bp, Homo sapien
tctggtggtttcgacatgtgctgaa

SEQ ID NO: 2761508 - DNA, 25 bp, Homo sapien
tcctctggtggtttcgacatgtgct

SEQ ID NO: 2761509 - DNA, 25 bp, Homo sapien
cctactgccgtttttctattccagg

SEQ ID NO: 2761510 - DNA, 25 bp, Homo sapien
gtcatatcttcttgggctcctctgg

SEQ ID NO: 2761511 - DNA, 25 bp, Homo sapien
tatagtatacttgtcactgtgaaag

SEQ ID NO: 2761512 - DNA, 25 bp, Homo sapien
ggatcccatccaggtggctacctaa

SEQ ID NO: 2761513 - DNA, 25 bp, Homo sapien
cagaaatttattgatacctagttgt

SEQ ID NO: 2761514 - DNA, 25 bp, Homo sapien
aaaattatgatgagtcaagctgtgc

SEQ ID NO: 2761515 - DNA, 25 bp, Homo sapien
gagactggttcttcaattttgatct

SEQ ID NO: 2761516 - DNA, 25 bp, Homo sapien
taatgcaggtgatacttaaaggtaa

SEQ ID NO: 2761517 - DNA, 25 bp, Homo sapien
gacgtttatcaaaggaactagtaga

SEQ ID NO: 2761518 - DNA, 25 bp, Homo sapien
tcgtgcagacgtttatcaaaggaac

SEQ ID NO: 2761519 - DNA, 25 bp, Homo sapien
gagatctgacatcgtgcagacgttt

SEQ ID NO: 2761520 - DNA, 25 bp, Homo sapien
ctagtagaactgaatgcattgatga

SEQ ID NO: 2761521 - DNA, 25 bp, Homo sapien
tgagcagccttataagatttacaac

SEQ ID NO: 2761522 - DNA, 25 bp, Homo sapien
tatgtcctcagggtccttgtatttg

SEQ ID NO: 2761523 - DNA, 25 bp, Homo sapien
catcgtgtaagaagatatgctcgca

SEQ ID NO: 2761524 - DNA, 25 bp, Homo sapien
catacccttcaagataatgttgaca

SEQ ID NO: 2761525 - DNA, 25 bp, Homo sapien
ttcaagatggatttgccttacaaca

SEQ ID NO: 2761526 - DNA, 25 bp, Homo sapien
caagatggatttgccttacaacaaa

SEQ ID NO: 2761527 - DNA, 25 bp, Homo sapien
gatggatttgccttacaacaaaata

SEQ ID NO: 2761528 - DNA, 25 bp, Homo sapien
tggatttgccttacaacaaaatagc

SEQ ID NO: 2761529 - DNA, 25 bp, Homo sapien
taattatttcatccccgtagctgta

SEQ ID NO: 2761530 - DNA, 25 bp, Homo sapien
tatttcatccccgtagctgtaaact

SEQ ID NO: 2761531 - DNA, 25 bp, Homo sapien
tgtgtatttgtcttagcattgatca

SEQ ID NO: 2761532 - DNA, 25 bp, Homo sapien
catccccgtagctgtaaactaagtt

SEQ ID NO: 2761533 - DNA, 25 bp, Homo sapien
aatacttgtgctctactaccacctg

SEQ ID NO: 2761534 - DNA, 25 bp, Homo sapien
agaataccggggagagtaatacttg

SEQ ID NO: 2761535 - DNA, 25 bp, Homo sapien
agtaatacttgtgctctactaccac

SEQ ID NO: 2761536 - DNA, 25 bp, Homo sapien
aataccggggagagtaatacttgtg

SEQ ID NO: 2761537 - DNA, 25 bp, Homo sapien
ttagcacaaagtcacaacccacaat

SEQ ID NO: 2761538 - DNA, 25 bp, Homo sapien
tagcacaaagtcacaacccacaatt

SEQ ID NO: 2761539 - DNA, 25 bp, Homo sapien
agcacaaagtcacaacccacaatta

SEQ ID NO: 2761540 - DNA, 25 bp, Homo sapien
agcaaaaaccgaaacctgattatag

SEQ ID NO: 2761541 - DNA, 25 bp, Homo sapien
aaaaccgaaacctgattataggcat

SEQ ID NO: 2761542 - DNA, 25 bp, Homo sapien
tgtacataaagccaactgttgtttc

SEQ ID NO: 2761543 - DNA, 25 bp, Homo sapien
aaagtgttgtacataaagccaactg

SEQ ID NO: 2761544 - DNA, 25 bp, Homo sapien
agaggatgctccaaagtgttgtaca

SEQ ID NO: 2761545 - DNA, 25 bp, Homo sapien
gctccaaagtgttgtacataaagcc

SEQ ID NO: 2761546 - DNA, 25 bp, Homo sapien
taaggccactcgtattttgaagcta

SEQ ID NO: 2761547 - DNA, 25 bp, Homo sapien
aggccactcgtattttgaagctaga

SEQ ID NO: 2761548 - DNA, 25 bp, Homo sapien
tataaggccactcgtattttgaagc

SEQ ID NO: 2761549 - DNA, 25 bp, Homo sapien
cttataaggccactcgtattttgaa

SEQ ID NO: 2761550 - DNA, 25 bp, Homo sapien
tcaggctcgtattccagacctcggg

SEQ ID NO: 2761551 - DNA, 25 bp, Homo sapien
taagggttctcctctttcaggctcg

SEQ ID NO: 2761552 - DNA, 25 bp, Homo sapien
gatgatccagagcaactcagagacg

SEQ ID NO: 2761553 - DNA, 25 bp, Homo sapien
tcttggtggcaagctctgatgatcc

SEQ ID NO: 2761554 - DNA, 25 bp, Homo sapien
ctgcttcagattcttagtcccgatc

SEQ ID NO: 2761555 - DNA, 25 bp, Homo sapien
gcagccagctgatcacaacagccgg

SEQ ID NO: 2761556 - DNA, 25 bp, Homo sapien
caggcagcggtctctcttgggtttc

SEQ ID NO: 2761557 - DNA, 25 bp, Homo sapien
cagctgatcacaacagccggctgtt

SEQ ID NO: 2761558 - DNA, 25 bp, Homo sapien
aattgaacaccccaaggagcctctg

SEQ ID NO: 2761559 - DNA, 25 bp, Homo sapien
tgatgggaaattgaacaccccaagg

SEQ ID NO: 2761560 - DNA, 25 bp, Homo sapien
tgggaaattgaacaccccaaggagc

SEQ ID NO: 2761561 - DNA, 25 bp, Homo sapien
gaacaccccaaggagcctctgctgg

SEQ ID NO: 2761562 - DNA, 25 bp, Homo sapien
caggttcctacagggtacttgggca

SEQ ID NO: 2761563 - DNA, 25 bp, Homo sapien
gtaacatgtcatccaggttcctaca

SEQ ID NO: 2761564 - DNA, 25 bp, Homo sapien
gcaaatacagctttgttatgttttg

SEQ ID NO: 2761565 - DNA, 25 bp, Homo sapien
tcctacagggtacttgggcaaatac

SEQ ID NO: 2761566 - DNA, 25 bp, Homo sapien
agtaagtcgatcaaactttactctt

SEQ ID NO: 2761567 - DNA, 25 bp, Homo sapien
agtcgatcaaactttactcttttct

SEQ ID NO: 2761568 - DNA, 25 bp, Homo sapien
ttagtaagtcgatcaaactttactc

SEQ ID NO: 2761569 - DNA, 25 bp, Homo sapien
tagtaagtcgatcaaactttactct

SEQ ID NO: 2761570 - DNA, 25 bp, Homo sapien
gatttgtagattgggagacatgaag

SEQ ID NO: 2761571 - DNA, 25 bp, Homo sapien
gactagatgagggatttgtagattg

SEQ ID NO: 2761572 - DNA, 25 bp, Homo sapien
gctgttccactggagactagatgag

SEQ ID NO: 2761573 - DNA, 25 bp, Homo sapien
ttgtagattgggagacatgaagaga

SEQ ID NO: 2761574 - DNA, 25 bp, Homo sapien
gttcaaagccacatgcatgcagttt

SEQ ID NO: 2761575 - DNA, 25 bp, Homo sapien
cacatgcatgcagttttcaatggaa

SEQ ID NO: 2761576 - DNA, 25 bp, Homo sapien
ttacactgtagtgtggacttgcagt

SEQ ID NO: 2761577 - DNA, 25 bp, Homo sapien
gcatgcagttttcaatggaatttga

SEQ ID NO: 2761578 - DNA, 25 bp, Homo sapien
tgttgccgaatctcaaagaggtcta

SEQ ID NO: 2761579 - DNA, 25 bp, Homo sapien
ttcaaaacactgttgccgaatctca

SEQ ID NO: 2761580 - DNA, 25 bp, Homo sapien
gaggtctaccatttgttgtgtttct

SEQ ID NO: 2761581 - DNA, 25 bp, Homo sapien
gaatctcaaagaggtctaccatttg

SEQ ID NO: 2761582 - DNA, 25 bp, Homo sapien
tgagctatcaaagtcccagatgaca

SEQ ID NO: 2761583 - DNA, 25 bp, Homo sapien
tcagttgaaagcgagagacttgcaa

SEQ ID NO: 2761584 - DNA, 25 bp, Homo sapien
tagatcttctgtataactagccgca

SEQ ID NO: 2761585 - DNA, 25 bp, Homo sapien
gatgcaggagatctagtttttggcc

SEQ ID NO: 2761586 - DNA, 25 bp, Homo sapien
tgaaactatgtttctaattaagctt

SEQ ID NO: 2761587 - DNA, 25 bp, Homo sapien
taacaatatgggctcatgtttttct

SEQ ID NO: 2761588 - DNA, 25 bp, Homo sapien
tatcctttcaacattgtcttaattt

SEQ ID NO: 2761589 - DNA, 25 bp, Homo sapien
acaatatgggctcatgtttttctct

SEQ ID NO: 2761590 - DNA, 25 bp, Homo sapien
acatcctgtgccaaaacggcattta

SEQ ID NO: 2761591 - DNA, 25 bp, Homo sapien
caattctctgtttgaccaatgtcat

SEQ ID NO: 2761592 - DNA, 25 bp, Homo sapien
gaccaatgtcatatctcttccacct

SEQ ID NO: 2761593 - DNA, 25 bp, Homo sapien
tcttcctgacacagattcctcttca

SEQ ID NO: 2761594 - DNA, 25 bp, Homo sapien
gaacactacagactaggcaacttat

SEQ ID NO: 2761595 - DNA, 25 bp, Homo sapien
caccagtgatggtctgtagcttaaa

SEQ ID NO: 2761596 - DNA, 25 bp, Homo sapien
tagcttaaatctgacacactgactg

SEQ ID NO: 2761597 - DNA, 25 bp, Homo sapien
tacaggacattttagcttaggccaa

SEQ ID NO: 2761598 - DNA, 25 bp, Homo sapien
cagctgccagttttgccagttgcat

SEQ ID NO: 2761599 - DNA, 25 bp, Homo sapien
agaataaattctgggattttctgta

SEQ ID NO: 2761600 - DNA, 25 bp, Homo sapien
ccagttgcatattgcttcagtcaga

SEQ ID NO: 2761601 - DNA, 25 bp, Homo sapien
gattttctgtagtgcctctttgtgc

SEQ ID NO: 2761602 - DNA, 25 bp, Homo sapien
ctcagcctaatcagggtcaggatta

SEQ ID NO: 2761603 - DNA, 25 bp, Homo sapien
aggattatcaatattactgtcttca

SEQ ID NO: 2761604 - DNA, 25 bp, Homo sapien
tcagcctaatcagggtcaggattat

SEQ ID NO: 2761605 - DNA, 25 bp, Homo sapien
attatcaatattactgtcttcaacc

SEQ ID NO: 2761606 - DNA, 25 bp, Homo sapien
ttgcttctcctcctatcccatgaaa

SEQ ID NO: 2761607 - DNA, 25 bp, Homo sapien
tgaaacttcataattagccacagcc

SEQ ID NO: 2761608 - DNA, 25 bp, Homo sapien
gttgcttctcctcctatcccatgaa

SEQ ID NO: 2761609 - DNA, 25 bp, Homo sapien
tcccatgaaacttcataattagcca

SEQ ID NO: 2761610 - DNA, 25 bp, Homo sapien
tatgtagtgagtaaaagagtaatcc

SEQ ID NO: 2761611 - DNA, 25 bp, Homo sapien
tacacatgttgcactctactagctg

SEQ ID NO: 2761612 - DNA, 25 bp, Homo sapien
agagtaatccaactaccagtagaag

SEQ ID NO: 2761613 - DNA, 25 bp, Homo sapien
taaataggaccaattaagcacgtga

SEQ ID NO: 2761614 - DNA, 25 bp, Homo sapien
gctagaatctatataaagtcagctt

SEQ ID NO: 2761615 - DNA, 25 bp, Homo sapien
agagctaagttgcaaacaactatcc

SEQ ID NO: 2761616 - DNA, 25 bp, Homo sapien
tgatttaggtcagaagctagaatct

SEQ ID NO: 2761617 - DNA, 25 bp, Homo sapien
tatccttgagaccagaccatttttt

SEQ ID NO: 2761618 - DNA, 25 bp, Homo sapien
ctactatgtatacagcagtcttgaa

SEQ ID NO: 2761619 - DNA, 25 bp, Homo sapien
ccatcaacccagaagacatcaaatt

SEQ ID NO: 2761620 - DNA, 25 bp, Homo sapien
taatttgtctactatgtatacagca

SEQ ID NO: 2761621 - DNA, 25 bp, Homo sapien
tttgtctactatgtatacagcagtc

SEQ ID NO: 2761622 - DNA, 25 bp, Homo sapien
ccaatggcgacagagtggtcacccg

SEQ ID NO: 2761623 - DNA, 25 bp, Homo sapien
gtcaaaggcatgcacgtcccagata

SEQ ID NO: 2761624 - DNA, 25 bp, Homo sapien
gccactgagtgggatcacagcacca

SEQ ID NO: 2761625 - DNA, 25 bp, Homo sapien
gggaattgaacgtgcagatgaagct

SEQ ID NO: 2761626 - DNA, 25 bp, Homo sapien
cattagcaccagtatgttctggagc

SEQ ID NO: 2761627 - DNA, 25 bp, Homo sapien
attgccactgtcacatttgttacca

SEQ ID NO: 2761628 - DNA, 25 bp, Homo sapien
agctctcattgccactgtcacattt

SEQ ID NO: 2761629 - DNA, 25 bp, Homo sapien
ctcattgccactgtcacatttgtta

SEQ ID NO: 2761630 - DNA, 25 bp, Homo sapien
ccactgtcacatttgttaccacttt

SEQ ID NO: 2761631 - DNA, 25 bp, Homo sapien
tcatgatacctgtgataaagagaca

SEQ ID NO: 2761632 - DNA, 25 bp, Homo sapien
ccttagattgattcatcaagggaga

SEQ ID NO: 2761633 - DNA, 25 bp, Homo sapien
tcatcaagggagatatagtggaaat

SEQ ID NO: 2761634 - DNA, 25 bp, Homo sapien
cctgtgataaagagacatcatagtt

SEQ ID NO: 2761635 - DNA, 25 bp, Homo sapien
gggagcttgaggagatccttgtatg

SEQ ID NO: 2761636 - DNA, 25 bp, Homo sapien
ggagcttgaggagatccttgtatgc

SEQ ID NO: 2761637 - DNA, 25 bp, Homo sapien
tgtaatgatagtttggattgctttg

SEQ ID NO: 2761638 - DNA, 25 bp, Homo sapien
ctgtcccatcaacccaggggaattt

SEQ ID NO: 2761639 - DNA, 25 bp, Homo sapien
tcagaaactccctcaaaataacagc

SEQ ID NO: 2761640 - DNA, 25 bp, Homo sapien
ttcagaaactccctcaaaataacag

SEQ ID NO: 2761641 - DNA, 25 bp, Homo sapien
tttctcttagacctttcagaaactc

SEQ ID NO: 2761642 - DNA, 25 bp, Homo sapien
catttttccgcggtgcatctagcgc

SEQ ID NO: 2761643 - DNA, 25 bp, Homo sapien
tccgcggtgcatctagcgcatctgg

SEQ ID NO: 2761644 - DNA, 25 bp, Homo sapien
gcggtgcatctagcgcatctggtgc

SEQ ID NO: 2761645 - DNA, 25 bp, Homo sapien
tcttgtcatttttccgcggtgcatc

SEQ ID NO: 2761646 - DNA, 25 bp, Homo sapien
cacaaataccaaaattgcgttttct

SEQ ID NO: 2761647 - DNA, 25 bp, Homo sapien
gcgttttctcattccagtgaagatt

SEQ ID NO: 2761648 - DNA, 25 bp, Homo sapien
aaaattgcgttttctcattccagtg

SEQ ID NO: 2761649 - DNA, 25 bp, Homo sapien
gaagattaatgaaatctcctctgac

SEQ ID NO: 2761650 - DNA, 25 bp, Homo sapien
actctgtatgaagaagagtgaaatc

SEQ ID NO: 2761651 - DNA, 25 bp, Homo sapien
cactctgtatgaagaagagtgaaat

SEQ ID NO: 2761652 - DNA, 25 bp, Homo sapien
tcactctgtatgaagaagagtgaaa

SEQ ID NO: 2761653 - DNA, 25 bp, Homo sapien
atttagtttgaatatctgccaagct

SEQ ID NO: 2761654 - DNA, 25 bp, Homo sapien
tctctgaaaatattgatttagtttg

SEQ ID NO: 2761655 - DNA, 25 bp, Homo sapien
gttttgcctaaatctttctctctga

SEQ ID NO: 2761656 - DNA, 25 bp, Homo sapien
gaatatctgccaagctctcttttct

SEQ ID NO: 2761657 - DNA, 25 bp, Homo sapien
tgatgtaggccactcttttatagag

SEQ ID NO: 2761658 - DNA, 25 bp, Homo sapien
aatctccattacaacattgatgtag

SEQ ID NO: 2761659 - DNA, 25 bp, Homo sapien
ccattacaacattgatgtaggccac

SEQ ID NO: 2761660 - DNA, 25 bp, Homo sapien
caacattgatgtaggccactctttt

SEQ ID NO: 2761661 - DNA, 25 bp, Homo sapien
tccttgccgttcataactatctggg

SEQ ID NO: 2761662 - DNA, 25 bp, Homo sapien
tgctatatccttgccgttcataact

SEQ ID NO: 2761663 - DNA, 25 bp, Homo sapien
cgttcataactatctgggctctgag

SEQ ID NO: 2761664 - DNA, 25 bp, Homo sapien
ttatgctatatccttgccgttcata

SEQ ID NO: 2761665 - DNA, 25 bp, Homo sapien
gggagatcagcttcgtctacttcaa

SEQ ID NO: 2761666 - DNA, 25 bp, Homo sapien
cagggagatcagcttcgtctacttc

SEQ ID NO: 2761667 - DNA, 25 bp, Homo sapien
gagatcagcttcgtctacttcaagc

SEQ ID NO: 2761668 - DNA, 25 bp, Homo sapien
ttcagggagatcagcttcgtctact

SEQ ID NO: 2761669 - DNA, 25 bp, Homo sapien
tcttgccctgttgtgggacctggga

SEQ ID NO: 2761670 - DNA, 25 bp, Homo sapien
tcacttggaccacaccaaagcctgt

SEQ ID NO: 2761671 - DNA, 25 bp, Homo sapien
gatgttatcgaaaacacaaagagtc

SEQ ID NO: 2761672 - DNA, 25 bp, Homo sapien
taagttactactggaaacaacactg

SEQ ID NO: 2761673 - DNA, 25 bp, Homo sapien
gatgttcccaacagtcagggcaggg

SEQ ID NO: 2761674 - DNA, 25 bp, Homo sapien
gagcttgatgttcccaacagtcagg

SEQ ID NO: 2761675 - DNA, 25 bp, Homo sapien
tgaccaccgagcttgatgttcccaa

SEQ ID NO: 2761676 - DNA, 25 bp, Homo sapien
catccacgtgaccaccgagcttgat

SEQ ID NO: 2761677 - DNA, 25 bp, Homo sapien
gctggataaaactaaagccactttc

SEQ ID NO: 2761678 - DNA, 25 bp, Homo sapien
actttcactgaggtaggtacaacat

SEQ ID NO: 2761679 - DNA, 25 bp, Homo sapien
ccctggtattctgtagctgtagaaa

SEQ ID NO: 2761680 - DNA, 25 bp, Homo sapien
taggtacaacatcgatattccctgg

SEQ ID NO: 2761681 - DNA, 25 bp, Homo sapien
gatttgtatgatatttatgatactg

SEQ ID NO: 2761682 - DNA, 25 bp, Homo sapien
gaatggaatgtactgatttgtatga

SEQ ID NO: 2761683 - DNA, 25 bp, Homo sapien
atttgtatgatatttatgatactgc

SEQ ID NO: 2761684 - DNA, 25 bp, Homo sapien
aatggaatgtactgatttgtatgat

SEQ ID NO: 2761685 - DNA, 25 bp, Homo sapien
ggccctgaacagagaagaagtaaga

SEQ ID NO: 2761686 - DNA, 25 bp, Homo sapien
tatcatagccgatgactgagaaacg

SEQ ID NO: 2761687 - DNA, 25 bp, Homo sapien
catagccgatgactgagaaacggga

SEQ ID NO: 2761688 - DNA, 25 bp, Homo sapien
atgactgagaaacgggaaggcccaa

SEQ ID NO: 2761689 - DNA, 25 bp, Homo sapien
ctgaaatatatcatagccgatgact

SEQ ID NO: 2761690 - DNA, 25 bp, Homo sapien
cttttcaacgacctgtgacaaaggc

SEQ ID NO: 2761691 - DNA, 25 bp, Homo sapien
ttcccttttcaacgacctgtgacaa

SEQ ID NO: 2761692 - DNA, 25 bp, Homo sapien
tctttcccttttcaacgacctgtga

SEQ ID NO: 2761693 - DNA, 25 bp, Homo sapien
cccttttcaacgacctgtgacaaag

SEQ ID NO: 2761694 - DNA, 25 bp, Homo sapien
gagttaggtccacaagatcaatgca

SEQ ID NO: 2761695 - DNA, 25 bp, Homo sapien
ggtccacaagatcaatgcagtaatt

SEQ ID NO: 2761696 - DNA, 25 bp, Homo sapien
ccacaagatcaatgcagtaattgca

SEQ ID NO: 2761697 - DNA, 25 bp, Homo sapien
acccaaagagttaggtccacaagat

SEQ ID NO: 2761698 - DNA, 25 bp, Homo sapien
ttttcagtaatgcagatgaagcctg

SEQ ID NO: 2761699 - DNA, 25 bp, Homo sapien
gaatacctcatggttattaggcgta

SEQ ID NO: 2761700 - DNA, 25 bp, Homo sapien
gcccatgcactcttcgaactcagga

SEQ ID NO: 2761701 - DNA, 25 bp, Homo sapien
gaactcaggaaatgtgattattgcc

SEQ ID NO: 2761702 - DNA, 25 bp, Homo sapien
taactaaagcaaggagctacctacc

SEQ ID NO: 2761703 - DNA, 25 bp, Homo sapien
tggaaaattgtatgtgggactcgcc

SEQ ID NO: 2761704 - DNA, 25 bp, Homo sapien
cgccatacctcactgtaaaggcatg

SEQ ID NO: 2761705 - DNA, 25 bp, Homo sapien
aaaaacattacctttcatgcgcgtc

SEQ ID NO: 2761706 - DNA, 25 bp, Homo sapien
gttcattcagctcatgaatccaccc

SEQ ID NO: 2761707 - DNA, 25 bp, Homo sapien
gacctctgagtgatttccaatacgg

SEQ ID NO: 2761708 - DNA, 25 bp, Homo sapien
gagtgatttccaatacggttcaaag

SEQ ID NO: 2761709 - DNA, 25 bp, Homo sapien
ccaggacctctgagtgatttccaat

SEQ ID NO: 2761710 - DNA, 25 bp, Homo sapien
caggtagccaggatagatacactta

SEQ ID NO: 2761711 - DNA, 25 bp, Homo sapien
ggatagatacacttagcaattgaaa

SEQ ID NO: 2761712 - DNA, 25 bp, Homo sapien
cacttagcaattgaaagaatctgca

SEQ ID NO: 2761713 - DNA, 25 bp, Homo sapien
tcaaaacaggtagccaggatagata

SEQ ID NO: 2761714 - DNA, 25 bp, Homo sapien
ctgtttttcagcaatcagcagcttc

SEQ ID NO: 2761715 - DNA, 25 bp, Homo sapien
tgtttttcagcaatcagcagcttca

SEQ ID NO: 2761716 - DNA, 25 bp, Homo sapien
attattttctacaatgtgtctggac

SEQ ID NO: 2761717 - DNA, 25 bp, Homo sapien
acatcagtgcttgggtgaccagcat

SEQ ID NO: 2761718 - DNA, 25 bp, Homo sapien
agtgcttgggtgaccagcatatgcc

SEQ ID NO: 2761719 - DNA, 25 bp, Homo sapien
tcagtgcttgggtgaccagcatatg

SEQ ID NO: 2761720 - DNA, 25 bp, Homo sapien
ctacatcagtgcttgggtgaccagc

SEQ ID NO: 2761721 - DNA, 25 bp, Homo sapien
gctgcctgatttagaatctcttagt

SEQ ID NO: 2761722 - DNA, 25 bp, Homo sapien
gaatctcttagtacgtgcttcagct

SEQ ID NO: 2761723 - DNA, 25 bp, Homo sapien
cgtgcttcagcttcagggataaatc

SEQ ID NO: 2761724 - DNA, 25 bp, Homo sapien
tagtacgtgcttcagcttcagggat

SEQ ID NO: 2761725 - DNA, 25 bp, Homo sapien
gtaacatgtacaatatctgctctca

SEQ ID NO: 2761726 - DNA, 25 bp, Homo sapien
agtaacatgtacaatatctgctctc

SEQ ID NO: 2761727 - DNA, 25 bp, Homo sapien
taacatgtacaatatctgctctcat

SEQ ID NO: 2761728 - DNA, 25 bp, Homo sapien
tatagcaggcatgagagttaaccat

SEQ ID NO: 2761729 - DNA, 25 bp, Homo sapien
tttatccctttagctattcatatag

SEQ ID NO: 2761730 - DNA, 25 bp, Homo sapien
gaaagtatagtaattgtaggctaca

SEQ ID NO: 2761731 - DNA, 25 bp, Homo sapien
taaataatatgggtgtataccagga

SEQ ID NO: 2761732 - DNA, 25 bp, Homo sapien
tactgaaacatttagacgtacatgg

SEQ ID NO: 2761733 - DNA, 25 bp, Homo sapien
tatggtcttatcgtttcagcaatgc

SEQ ID NO: 2761734 - DNA, 25 bp, Homo sapien
tgactcggataacccattgataaac

SEQ ID NO: 2761735 - DNA, 25 bp, Homo sapien
gcaatgccctcactaatgactcgga

SEQ ID NO: 2761736 - DNA, 25 bp, Homo sapien
gagagtccagaatattcaatagagg

SEQ ID NO: 2761737 - DNA, 25 bp, Homo sapien
gagtccagaatattcaatagaggag

SEQ ID NO: 2761738 - DNA, 25 bp, Homo sapien
gggagagtccagaatattcaataga

SEQ ID NO: 2761739 - DNA, 25 bp, Homo sapien
ccagaatattcaatagaggagggat

SEQ ID NO: 2761740 - DNA, 25 bp, Homo sapien
gcccagatatttgtgaatacgccat

SEQ ID NO: 2761741 - DNA, 25 bp, Homo sapien
caaataagagtcgtaatctattagg

SEQ ID NO: 2761742 - DNA, 25 bp, Homo sapien
aaataagagtcgtaatctattaggg

SEQ ID NO: 2761743 - DNA, 25 bp, Homo sapien
ccacaaataagagtcgtaatctatt

SEQ ID NO: 2761744 - DNA, 25 bp, Homo sapien
ataagagtcgtaatctattagggtt

SEQ ID NO: 2761745 - DNA, 25 bp, Homo sapien
gcaggcccttgcaatccctacatat

SEQ ID NO: 2761746 - DNA, 25 bp, Homo sapien
gcttttaatatgtacagacactcac

SEQ ID NO: 2761747 - DNA, 25 bp, Homo sapien
taaccagaactgctttgacttgcta

SEQ ID NO: 2761748 - DNA, 25 bp, Homo sapien
tagaaagcaccgatcaagtcgcagg

SEQ ID NO: 2761749 - DNA, 25 bp, Homo sapien
cagtcttcttctgtatcactccatc

SEQ ID NO: 2761750 - DNA, 25 bp, Homo sapien
tcttcttctgtatcactccatccat

SEQ ID NO: 2761751 - DNA, 25 bp, Homo sapien
gcttttcccagtcttcttctgtatc

SEQ ID NO: 2761752 - DNA, 25 bp, Homo sapien
ttcccagtcttcttctgtatcactc

SEQ ID NO: 2761753 - DNA, 25 bp, Homo sapien
tagtccacaattctaccagcgaaga

SEQ ID NO: 2761754 - DNA, 25 bp, Homo sapien
cagtgagcacctttggcagctcatg

SEQ ID NO: 2761755 - DNA, 25 bp, Homo sapien
gcacctttggcagctcatgcttagg

SEQ ID NO: 2761756 - DNA, 25 bp, Homo sapien
tttgattatcttcccatagtccaca

SEQ ID NO: 2761757 - DNA, 25 bp, Homo sapien
gtgtcattacaatttttgtgtatgt

SEQ ID NO: 2761758 - DNA, 25 bp, Homo sapien
tctctgtgtcattacaatttttgtg

SEQ ID NO: 2761759 - DNA, 25 bp, Homo sapien
ttgtgtatgtgtgttgccaaagcaa

SEQ ID NO: 2761760 - DNA, 25 bp, Homo sapien
aatgcttcatgaattgcctgtcatc

SEQ ID NO: 2761761 - DNA, 25 bp, Homo sapien
ccttaacgcaggttgccagtttcct

SEQ ID NO: 2761762 - DNA, 25 bp, Homo sapien
caaaggaacaattgccacccaacgt

SEQ ID NO: 2761763 - DNA, 25 bp, Homo sapien
gccctgatgctacaaaaacatgaaa

SEQ ID NO: 2761764 - DNA, 25 bp, Homo sapien
caacgttccttaacgcaggttgcca

SEQ ID NO: 2761765 - DNA, 25 bp, Homo sapien
aagttgctgttacaaggctgtattt

SEQ ID NO: 2761766 - DNA, 25 bp, Homo sapien
ttcctgttactatgtctggtgttgg

SEQ ID NO: 2761767 - DNA, 25 bp, Homo sapien
tcattcaacttttgttgacttcctg

SEQ ID NO: 2761768 - DNA, 25 bp, Homo sapien
ttcattcaacttttgttgacttcct

SEQ ID NO: 2761769 - DNA, 25 bp, Homo sapien
cctgttactatgtctggtgttgggc

SEQ ID NO: 2761770 - DNA, 25 bp, Homo sapien
atgtagtattaagggtcgtattcgc

SEQ ID NO: 2761771 - DNA, 25 bp, Homo sapien
taagggtcgtattcgccccagtaga

SEQ ID NO: 2761772 - DNA, 25 bp, Homo sapien
tagttgtggtagtagatgtagtatt

SEQ ID NO: 2761773 - DNA, 25 bp, Homo sapien
tattcgccccagtagaggcacctac

SEQ ID NO: 2761774 - DNA, 25 bp, Homo sapien
tgcctggtgctggacctgtgacttt

SEQ ID NO: 2761775 - DNA, 25 bp, Homo sapien
gctggacctgtgacttttctcccca

SEQ ID NO: 2761776 - DNA, 25 bp, Homo sapien
gtgcctggtgctggacctgtgactt

SEQ ID NO: 2761777 - DNA, 25 bp, Homo sapien
taatataaactgatggactggatgt

SEQ ID NO: 2761778 - DNA, 25 bp, Homo sapien
tttctgacctatttcccttgagagg

SEQ ID NO: 2761779 - DNA, 25 bp, Homo sapien
gactggatgttgatttttacagccc

SEQ ID NO: 2761780 - DNA, 25 bp, Homo sapien
acagcccctgctctatgaattgtac

SEQ ID NO: 2761781 - DNA, 25 bp, Homo sapien
tcttctcgtattaatatataactca

SEQ ID NO: 2761782 - DNA, 25 bp, Homo sapien
aattctgacttttcttctcgtatta

SEQ ID NO: 2761783 - DNA, 25 bp, Homo sapien
tttcttctcgtattaatatataact

SEQ ID NO: 2761784 - DNA, 25 bp, Homo sapien
ctgacttttcttctcgtattaatat

SEQ ID NO: 2761785 - DNA, 25 bp, Homo sapien
tcactctcatgacttgatgttccat

SEQ ID NO: 2761786 - DNA, 25 bp, Homo sapien
gccattttctatatcatattgcaca

SEQ ID NO: 2761787 - DNA, 25 bp, Homo sapien
ttttttgcaagtttgcaggacatgc

SEQ ID NO: 2761788 - DNA, 25 bp, Homo sapien
tcaaggcgagttcctagattttttg

SEQ ID NO: 2761789 - DNA, 25 bp, Homo sapien
atcactgccaataaggcgttgccac

SEQ ID NO: 2761790 - DNA, 25 bp, Homo sapien
gccaataaggcgttgccactctgcc

SEQ ID NO: 2761791 - DNA, 25 bp, Homo sapien
taatcactgcattaatactgctgag

SEQ ID NO: 2761792 - DNA, 25 bp, Homo sapien
cactgccaataaggcgttgccactc

SEQ ID NO: 2761793 - DNA, 25 bp, Homo sapien
tacatctgctcatgtgcctctggca

SEQ ID NO: 2761794 - DNA, 25 bp, Homo sapien
caaaagtgctataagatacatctgc

SEQ ID NO: 2761795 - DNA, 25 bp, Homo sapien
tttgcactgccactgtaggaatctg

SEQ ID NO: 2761796 - DNA, 25 bp, Homo sapien
tgagtaaggtacacgttgagcttct

SEQ ID NO: 2761797 - DNA, 25 bp, Homo sapien
ttcactcacactcctagaaaagtat

SEQ ID NO: 2761798 - DNA, 25 bp, Homo sapien
gttatcaaacttctcacactcaact

SEQ ID NO: 2761799 - DNA, 25 bp, Homo sapien
cttcactcacactcctagaaaagta

SEQ ID NO: 2761800 - DNA, 25 bp, Homo sapien
acagaatggcttcaaagatccccaa

SEQ ID NO: 2761801 - DNA, 25 bp, Homo sapien
tacagaatggcttcaaagatcccca

SEQ ID NO: 2761802 - DNA, 25 bp, Homo sapien
cagaatggcttcaaagatccccaaa

SEQ ID NO: 2761803 - DNA, 25 bp, Homo sapien
ctacagaatggcttcaaagatcccc

SEQ ID NO: 2761804 - DNA, 25 bp, Homo sapien
acacttgtaactctagtccttgttc

SEQ ID NO: 2761805 - DNA, 25 bp, Homo sapien
gtccttgttccccactggctactga

SEQ ID NO: 2761806 - DNA, 25 bp, Homo sapien
cagatacaaacacttgtaactctag

SEQ ID NO: 2761807 - DNA, 25 bp, Homo sapien
cttgttccccactggctactgacat

SEQ ID NO: 2761808 - DNA, 25 bp, Homo sapien
ttgtcagttctgaggtttcagattt

SEQ ID NO: 2761809 - DNA, 25 bp, Homo sapien
tcacttgtcagttctgaggtttcag

SEQ ID NO: 2761810 - DNA, 25 bp, Homo sapien
tcagttctgaggtttcagatttcat

SEQ ID NO: 2761811 - DNA, 25 bp, Homo sapien
cacttgtcagttctgaggtttcaga

SEQ ID NO: 2761812 - DNA, 25 bp, Homo sapien
caccaaacacctgttatgggtaaca

SEQ ID NO: 2761813 - DNA, 25 bp, Homo sapien
gggtcatttttctgcttactatcaa

SEQ ID NO: 2761814 - DNA, 25 bp, Homo sapien
gaacctctgcttgcatggtcacatt

SEQ ID NO: 2761815 - DNA, 25 bp, Homo sapien
tttcagcctagtctgataatccagg

SEQ ID NO: 2761816 - DNA, 25 bp, Homo sapien
tgctccaccgactgaggtagtcggg

SEQ ID NO: 2761817 - DNA, 25 bp, Homo sapien
cccatgctccaccgactgaggtagt

SEQ ID NO: 2761818 - DNA, 25 bp, Homo sapien
gctccaccgactgaggtagtcgggc

SEQ ID NO: 2761819 - DNA, 25 bp, Homo sapien
catgctccaccgactgaggtagtcg

SEQ ID NO: 2761820 - DNA, 25 bp, Homo sapien
aaggtgctcccaacctgtacgtggg

SEQ ID NO: 2761821 - DNA, 25 bp, Homo sapien
gggacctctcgacagctgcctcata

SEQ ID NO: 2761822 - DNA, 25 bp, Homo sapien
ttcttgagaaaaggtgctcccaacc

SEQ ID NO: 2761823 - DNA, 25 bp, Homo sapien
ccaacctgtacgtgggacctctcga

SEQ ID NO: 2761824 - DNA, 25 bp, Homo sapien
tgagacaccacatcggaaacaccag

SEQ ID NO: 2761825 - DNA, 25 bp, Homo sapien
aataccgggtccactattctgagag

SEQ ID NO: 2761826 - DNA, 25 bp, Homo sapien
tggcgaaattggactctccgggtgt

SEQ ID NO: 2761827 - DNA, 25 bp, Homo sapien
gggtccagctgtctattggtgaaac

SEQ ID NO: 2761828 - DNA, 25 bp, Homo sapien
tcactgatattgcatcactggcaga

SEQ ID NO: 2761829 - DNA, 25 bp, Homo sapien
atcactggcagaaaagtagctttct

SEQ ID NO: 2761830 - DNA, 25 bp, Homo sapien
cactgatattgcatcactggcagaa

SEQ ID NO: 2761831 - DNA, 25 bp, Homo sapien
cagaaaagtagctttctcctcatta
